United States Patent Application Publication US 2020/0095579 A1 - sequence listing, part 18

SEQ ID NO: 278569 - DNA, 20 bp, Artificial Sequence
  Description of Artificial Sequence: Synthetic oligonucleotide
  Target: LAMA2; (-) strand; PAM type: YTN; PAM sequence: CTG
ttactgggctttggtagaaa

SEQ ID NO: 278570 - DNA, 20 bp, Artificial Sequence
  Description of Artificial Sequence: Synthetic oligonucleotide
  Target: LAMA2; (-) strand; PAM type: YTN; PAM sequence: TTG
gcctgttactgggctttggt

SEQ ID NO: 278571 - DNA, 20 bp, Artificial Sequence
  Description of Artificial Sequence: Synthetic oligonucleotide
  Target: LAMA2; (-) strand; PAM type: YTN; PAM sequence: CTT
ggcctgttactgggctttgg

SEQ ID NO: 278572 - DNA, 20 bp, Artificial Sequence
  Description of Artificial Sequence: Synthetic oligonucleotide
  Target: LAMA2; (-) strand; PAM type: YTN; PAM sequence: CTC
ttggcctgttactgggcttt

SEQ ID NO: 278573 - DNA, 20 bp, Artificial Sequence
  Description of Artificial Sequence: Synthetic oligonucleotide
  Target: LAMA2; (-) strand; PAM type: YTN; PAM sequence: TTG
agagacaactcttggcctgt

SEQ ID NO: 278574 - DNA, 20 bp, Artificial Sequence
  Description of Artificial Sequence: Synthetic oligonucleotide
  Target: LAMA2; (-) strand; PAM type: YTN; PAM sequence: TTT
gagagacaactcttggcctg

SEQ ID NO: 278575 - DNA, 20 bp, Artificial Sequence
  Description of Artificial Sequence: Synthetic oligonucleotide
  Target: LAMA2; (-) strand; PAM type: YTN; PAM sequence: CTC
catttgagagacaactcttg

SEQ ID NO: 278576 - DNA, 20 bp, Artificial Sequence
  Description of Artificial Sequence: Synthetic oligonucleotide
  Target: LAMA2; (-) strand; PAM type: YTN; PAM sequence: CTC
tccatttgagagacaactct

SEQ ID NO: 278577 - DNA, 20 bp, Artificial Sequence
  Description of Artificial Sequence: Synthetic oligonucleotide
  Target: LAMA2; (-) strand; PAM type: YTN; PAM sequence: CTA
ctctccatttgagagacaac

SEQ ID NO: 278578 - DNA, 20 bp, Artificial Sequence
  Description of Artificial Sequence: Synthetic oligonucleotide
  Target: LAMA2; (-) strand; PAM type: YTN; PAM sequence: CTG
cagatcactactctccattt

SEQ ID NO: 278579 - DNA, 20 bp, Artificial Sequence
  Description of Artificial Sequence: Synthetic oligonucleotide
  Target: LAMA2; (-) strand; PAM type: YTN; PAM sequence: TTC
tgcagatcactactctccat

SEQ ID NO: 278580 - DNA, 20 bp, Artificial Sequence
  Description of Artificial Sequence: Synthetic oligonucleotide
  Target: LAMA2; (-) strand; PAM type: YTN; PAM sequence: CTT
ctgcagatcactactctcca

SEQ ID NO: 278581 - DNA, 20 bp, Artificial Sequence
  Description of Artificial Sequence: Synthetic oligonucleotide
  Target: LAMA2; (-) strand; PAM type: YTN; PAM sequence: CTG
ccatcttctgcagatcacta

SEQ ID NO: 278582 - DNA, 20 bp, Artificial Sequence
  Description of Artificial Sequence: Synthetic oligonucleotide
  Target: LAMA2; (-) strand; PAM type: YTN; PAM sequence: TTG
gagcaaggccctgccatctt

SEQ ID NO: 278583 - DNA, 20 bp, Artificial Sequence
  Description of Artificial Sequence: Synthetic oligonucleotide
  Target: LAMA2; (-) strand; PAM type: YTN; PAM sequence: TTT
ggagcaaggccctgccatct

SEQ ID NO: 278584 - DNA, 20 bp, Artificial Sequence
  Description of Artificial Sequence: Synthetic oligonucleotide
  Target: LAMA2; (-) strand; PAM type: YTN; PAM sequence: TTT
tggagcaaggccctgccatc

SEQ ID NO: 278585 - DNA, 20 bp, Artificial Sequence
  Description of Artificial Sequence: Synthetic oligonucleotide
  Target: LAMA2; (-) strand; PAM type: YTN; PAM sequence: CTA
ggattttggagcaaggccct

SEQ ID NO: 278586 - DNA, 20 bp, Artificial Sequence
  Description of Artificial Sequence: Synthetic oligonucleotide
  Target: LAMA2; (-) strand; PAM type: YTN; PAM sequence: CTC
taggattttggagcaaggcc

SEQ ID NO: 278587 - DNA, 20 bp, Artificial Sequence
  Description of Artificial Sequence: Synthetic oligonucleotide
  Target: LAMA2; (-) strand; PAM type: YTN; PAM sequence: CTA
gaggtggaagcctctaggat

SEQ ID NO: 278588 - DNA, 20 bp, Artificial Sequence
  Description of Artificial Sequence: Synthetic oligonucleotide
  Target: LAMA2; (-) strand; PAM type: YTN; PAM sequence: CTC
ctagaggtggaagcctctag

SEQ ID NO: 278589 - DNA, 20 bp, Artificial Sequence
  Description of Artificial Sequence: Synthetic oligonucleotide
  Target: LAMA2; (-) strand; PAM type: YTN; PAM sequence: CTC
ccataggtgactcctagagg

SEQ ID NO: 278590 - DNA, 20 bp, Artificial Sequence
  Description of Artificial Sequence: Synthetic oligonucleotide
  Target: LAMA2; (-) strand; PAM type: YTN; PAM sequence: TTG
gcaggctcccataggtgact

SEQ ID NO: 278591 - DNA, 20 bp, Artificial Sequence
  Description of Artificial Sequence: Synthetic oligonucleotide
  Target: LAMA2; (-) strand; PAM type: YTN; PAM sequence: TTT
ggcaggctcccataggtgac

SEQ ID NO: 278592 - DNA, 20 bp, Artificial Sequence
  Description of Artificial Sequence: Synthetic oligonucleotide
  Target: LAMA2; (-) strand; PAM type: YTN; PAM sequence: CTT
tggcaggctcccataggtga

SEQ ID NO: 278593 - DNA, 20 bp, Artificial Sequence
  Description of Artificial Sequence: Synthetic oligonucleotide
  Target: LAMA2; (-) strand; PAM type: YTN; PAM sequence: TTG
aagcctttggcaggctccca

SEQ ID NO: 278594 - DNA, 20 bp, Artificial Sequence
  Description of Artificial Sequence: Synthetic oligonucleotide
  Target: LAMA2; (-) strand; PAM type: YTN; PAM sequence: TTT
gaagcctttggcaggctccc

SEQ ID NO: 278595 - DNA, 20 bp, Artificial Sequence
  Description of Artificial Sequence: Synthetic oligonucleotide
  Target: LAMA2; (-) strand; PAM type: YTN; PAM sequence: CTG
tttgaagcctttggcaggct

SEQ ID NO: 278596 - DNA, 20 bp, Artificial Sequence
  Description of Artificial Sequence: Synthetic oligonucleotide
  Target: LAMA2; (-) strand; PAM type: YTN; PAM sequence: TTG
aggtgtcaatggcagacagg

SEQ ID NO: 278597 - DNA, 20 bp, Artificial Sequence
  Description of Artificial Sequence: Synthetic oligonucleotide
  Target: LAMA2; (-) strand; PAM type: YTN; PAM sequence: CTT
gaggtgtcaatggcagacag

SEQ ID NO: 278598 - DNA, 20 bp, Artificial Sequence
  Description of Artificial Sequence: Synthetic oligonucleotide
  Target: LAMA2; (-) strand; PAM type: YTN; PAM sequence: CTA
gcagatccaatagtccttga

SEQ ID NO: 278599 - DNA, 20 bp, Artificial Sequence
  Description of Artificial Sequence: Synthetic oligonucleotide
  Target: LAMA2; (-) strand; PAM type: YTN; PAM sequence: TTG
ggccgtatgacctagcagat

SEQ ID NO: 278600 - DNA, 20 bp, Artificial Sequence
  Description of Artificial Sequence: Synthetic oligonucleotide
  Target: LAMA2; (-) strand; PAM type: YTN; PAM sequence: CTG
ccgattgggccgtatgacct

SEQ ID NO: 278601 - DNA, 20 bp, Artificial Sequence
  Description of Artificial Sequence: Synthetic oligonucleotide
  Target: LAMA2; (-) strand; PAM type: YTN; PAM sequence: CTC
tgccgattgggccgtatgac

SEQ ID NO: 278602 - DNA, 20 bp, Artificial Sequence
  Description of Artificial Sequence: Synthetic oligonucleotide
  Target: LAMA2; (-) strand; PAM type: YTN; PAM sequence: CTG
ctctgccgattgggccgtat

SEQ ID NO: 278603 - DNA, 20 bp, Artificial Sequence
  Description of Artificial Sequence: Synthetic oligonucleotide
  Target: LAMA2; (-) strand; PAM type: YTN; PAM sequence: CTG
tgcaaactgctctgccgatt

SEQ ID NO: 278604 - DNA, 20 bp, Artificial Sequence
  Description of Artificial Sequence: Synthetic oligonucleotide
  Target: LAMA2; (-) strand; PAM type: YTN; PAM sequence: CTG
ctgtgcaaactgctctgccg

SEQ ID NO: 278605 - DNA, 20 bp, Artificial Sequence
  Description of Artificial Sequence: Synthetic oligonucleotide
  Target: LAMA2; (-) strand; PAM type: YTN; PAM sequence: CTG
caacaagtccagactgctgt

SEQ ID NO: 278606 - DNA, 20 bp, Artificial Sequence
  Description of Artificial Sequence: Synthetic oligonucleotide
  Target: LAMA2; (-) strand; PAM type: YTN; PAM sequence: CTC
tgcaacaagtccagactgct

SEQ ID NO: 278607 - DNA, 20 bp, Artificial Sequence
  Description of Artificial Sequence: Synthetic oligonucleotide
  Target: LAMA2; (-) strand; PAM type: YTN; PAM sequence: TTA
agtgggctctgcaacaagtc

SEQ ID NO: 278608 - DNA, 20 bp, Artificial Sequence
  Description of Artificial Sequence: Synthetic oligonucleotide
  Target: LAMA2; (-) strand; PAM type: YTN; PAM sequence: TTT
aagtgggctctgcaacaagt

SEQ ID NO: 278609 - DNA, 20 bp, Artificial Sequence
  Description of Artificial Sequence: Synthetic oligonucleotide
  Target: LAMA2; (-) strand; PAM type: YTN; PAM sequence: TTT
taagtgggctctgcaacaag

SEQ ID NO: 278610 - DNA, 20 bp, Artificial Sequence
  Description of Artificial Sequence: Synthetic oligonucleotide
  Target: LAMA2; (-) strand; PAM type: YTN; PAM sequence: CTG
ccaattttaagtgggctctg

SEQ ID NO: 278611 - DNA, 20 bp, Artificial Sequence
  Description of Artificial Sequence: Synthetic oligonucleotide
  Target: LAMA2; (-) strand; PAM type: YTN; PAM sequence: CTG
aaaggctgccaattttaagt

SEQ ID NO: 278612 - DNA, 20 bp, Artificial Sequence
  Description of Artificial Sequence: Synthetic oligonucleotide
  Target: LAMA2; (-) strand; PAM type: YTN; PAM sequence: TTG
agtgacctgaaaggctgcca

SEQ ID NO: 278613 - DNA, 20 bp, Artificial Sequence
  Description of Artificial Sequence: Synthetic oligonucleotide
  Target: LAMA2; (-) strand; PAM type: YTN; PAM sequence: TTA
ttgagtgacctgaaaggctg

SEQ ID NO: 278614 - DNA, 20 bp, Artificial Sequence
  Description of Artificial Sequence: Synthetic oligonucleotide
  Target: LAMA2; (-) strand; PAM type: YTN; PAM sequence: TTT
attgagtgacctgaaaggct

SEQ ID NO: 278615 - DNA, 20 bp, Artificial Sequence
  Description of Artificial Sequence: Synthetic oligonucleotide
  Target: LAMA2; (-) strand; PAM type: YTN; PAM sequence: TTA
aaatgggcccatttattgag

SEQ ID NO: 278616 - DNA, 20 bp, Artificial Sequence
  Description of Artificial Sequence: Synthetic oligonucleotide
  Target: LAMA2; (-) strand; PAM type: YTN; PAM sequence: CTG
ggtgtgttaaaatgggccca

SEQ ID NO: 278617 - DNA, 20 bp, Artificial Sequence
  Description of Artificial Sequence: Synthetic oligonucleotide
  Target: LAMA2; (-) strand; PAM type: YTN; PAM sequence: TTC
ctgggtgtgttaaaatgggc

SEQ ID NO: 278618 - DNA, 20 bp, Artificial Sequence
  Description of Artificial Sequence: Synthetic oligonucleotide
  Target: LAMA2; (-) strand; PAM type: YTN; PAM sequence: TTG
ttcctgggtgtgttaaaatg

SEQ ID NO: 278619 - DNA, 20 bp, Artificial Sequence
  Description of Artificial Sequence: Synthetic oligonucleotide
  Target: LAMA2; (-) strand; PAM type: YTN; PAM sequence: TTG
aaggatgcaaagcattgttc

SEQ ID NO: 278620 - DNA, 20 bp, Artificial Sequence
  Description of Artificial Sequence: Synthetic oligonucleotide
  Target: LAMA2; (-) strand; PAM type: YTN; PAM sequence: TTG
tattgaaggatgcaaagcat

SEQ ID NO: 278621 - DNA, 20 bp, Artificial Sequence
  Description of Artificial Sequence: Synthetic oligonucleotide
  Target: LAMA2; (-) strand; PAM type: YTN; PAM sequence: TTG
attgtattgaaggatgcaaa

SEQ ID NO: 278622 - DNA, 20 bp, Artificial Sequence
  Description of Artificial Sequence: Synthetic oligonucleotide
  Target: LAMA2; (-) strand; PAM type: YTN; PAM sequence: CTT
gattgtattgaaggatgcaa

SEQ ID NO: 278623 - DNA, 20 bp, Artificial Sequence
  Description of Artificial Sequence: Synthetic oligonucleotide
  Target: LAMA2; (-) strand; PAM type: YTN; PAM sequence: CTG
agtgccaacttgattgtatt

SEQ ID NO: 278624 - DNA, 20 bp, Artificial Sequence
  Description of Artificial Sequence: Synthetic oligonucleotide
  Target: LAMA2; (-) strand; PAM type: YTN; PAM sequence: TTA
atactgagtgccaacttgat

SEQ ID NO: 278625 - DNA, 20 bp, Artificial Sequence
  Description of Artificial Sequence: Synthetic oligonucleotide
  Target: LAMA2; (-) strand; PAM type: YTN; PAM sequence: CTG
tgatggttaatactgagtgc

SEQ ID NO: 278626 - DNA, 20 bp, Artificial Sequence
  Description of Artificial Sequence: Synthetic oligonucleotide
  Target: LAMA2; (-) strand; PAM type: YTN; PAM sequence: TTC
actgtgatggttaatactga

SEQ ID NO: 278627 - DNA, 20 bp, Artificial Sequence
  Description of Artificial Sequence: Synthetic oligonucleotide
  Target: LAMA2; (-) strand; PAM type: YTN; PAM sequence: TTC
attcactgtgatggttaata

SEQ ID NO: 278628 - DNA, 20 bp, Artificial Sequence
  Description of Artificial Sequence: Synthetic oligonucleotide
  Target: LAMA2; (-) strand; PAM type: YTN; PAM sequence: CTA
ttcattcactgtgatggtta

SEQ ID NO: 278629 - DNA, 20 bp, Artificial Sequence
  Description of Artificial Sequence: Synthetic oligonucleotide
  Target: LAMA2; (-) strand; PAM type: YTN; PAM sequence: TTC
caaggagtcaacgtcataga

SEQ ID NO: 278630 - DNA, 20 bp, Artificial Sequence
  Description of Artificial Sequence: Synthetic oligonucleotide
  Target: LAMA2; (-) strand; PAM type: YTN; PAM sequence: CTG
gtggtcattccaaggagtca

SEQ ID NO: 278631 - DNA, 20 bp, Artificial Sequence
  Description of Artificial Sequence: Synthetic oligonucleotide
  Target: LAMA2; (-) strand; PAM type: YTN; PAM sequence: CTC
tggtggtcattccaaggagt

SEQ ID NO: 278632 - DNA, 20 bp, Artificial Sequence
  Description of Artificial Sequence: Synthetic oligonucleotide
  Target: LAMA2; (-) strand; PAM type: YTN; PAM sequence: TTG
cctctggtggtcattccaag

SEQ ID NO: 278633 - DNA, 20 bp, Artificial Sequence
  Description of Artificial Sequence: Synthetic oligonucleotide
  Target: LAMA2; (-) strand; PAM type: YTN; PAM sequence: TTA
ttgcctctggtggtcattcc

SEQ ID NO: 278634 - DNA, 20 bp, Artificial Sequence
  Description of Artificial Sequence: Synthetic oligonucleotide
  Target: LAMA2; (-) strand; PAM type: YTN; PAM sequence: CTT
attgcctctggtggtcattc

SEQ ID NO: 278635 - DNA, 20 bp, Artificial Sequence
  Description of Artificial Sequence: Synthetic oligonucleotide
  Target: LAMA2; (-) strand; PAM type: YTN; PAM sequence: CTG
agagtgtgcttattgcctct

SEQ ID NO: 278636 - DNA, 20 bp, Artificial Sequence
  Description of Artificial Sequence: Synthetic oligonucleotide
  Target: LAMA2; (-) strand; PAM type: YTN; PAM sequence: CTC
gtgtcactgagagtgtgctt

SEQ ID NO: 278637 - DNA, 20 bp, Artificial Sequence
  Description of Artificial Sequence: Synthetic oligonucleotide
  Target: LAMA2; (-) strand; PAM type: YTN; PAM sequence: CTC
atatcctcgtgtcactgaga

SEQ ID NO: 278638 - DNA, 20 bp, Artificial Sequence
  Description of Artificial Sequence: Synthetic oligonucleotide
  Target: LAMA2; (-) strand; PAM type: YTN; PAM sequence: TTC
cagtgtaaatgggcagagga

SEQ ID NO: 278639 - DNA, 20 bp, Artificial Sequence
  Description of Artificial Sequence: Synthetic oligonucleotide
  Target: LAMA2; (-) strand; PAM type: YTN; PAM sequence: TTT
ccagtgtaaatgggcagagg

SEQ ID NO: 278640 - DNA, 20 bp, Artificial Sequence
  Description of Artificial Sequence: Synthetic oligonucleotide
  Target: LAMA2; (-) strand; PAM type: YTN; PAM sequence: CTA
agacatttccagtgtaaatg

SEQ ID NO: 278641 - DNA, 20 bp, Artificial Sequence
  Description of Artificial Sequence: Synthetic oligonucleotide
  Target: LAMA2; (-) strand; PAM type: YTN; PAM sequence: CTA
agacatctaagacatttcca

SEQ ID NO: 278642 - DNA, 20 bp, Artificial Sequence
  Description of Artificial Sequence: Synthetic oligonucleotide
  Target: LAMA2; (-) strand; PAM type: YTN; PAM sequence: TTG
aaaagcactaagacatctaa

SEQ ID NO: 278643 - DNA, 20 bp, Artificial Sequence
  Description of Artificial Sequence: Synthetic oligonucleotide
  Target: LAMA2; (-) strand; PAM type: YTN; PAM sequence: CTG
attgaaaagcactaagacat

SEQ ID NO: 278644 - DNA, 20 bp, Artificial Sequence
  Description of Artificial Sequence: Synthetic oligonucleotide
  Target: LAMA2; (-) strand; PAM type: YTN; PAM sequence: TTG
gatatacctgattgaaaagc

SEQ ID NO: 278645 - DNA, 20 bp, Artificial Sequence
  Description of Artificial Sequence: Synthetic oligonucleotide
  Target: LAMA2; (-) strand; PAM type: YTN; PAM sequence: TTT
ggatatacctgattgaaaag

SEQ ID NO: 278646 - DNA, 20 bp, Artificial Sequence
  Description of Artificial Sequence: Synthetic oligonucleotide
  Target: LAMA2; (-) strand; PAM type: YTN; PAM sequence: TTG
tttggatatacctgattgaa

SEQ ID NO: 278647 - DNA, 20 bp, Artificial Sequence
  Description of Artificial Sequence: Synthetic oligonucleotide
  Target: LAMA2; (-) strand; PAM type: YTN; PAM sequence: TTG
ttgtttggatatacctgatt

SEQ ID NO: 278648 - DNA, 20 bp, Artificial Sequence
  Description of Artificial Sequence: Synthetic oligonucleotide
  Target: LAMA2; (-) strand; PAM type: YTN; PAM sequence: TTT
gttgtttggatatacctgat

SEQ ID NO: 278649 - DNA, 20 bp, Artificial Sequence
  Description of Artificial Sequence: Synthetic oligonucleotide
  Target: LAMA2; (-) strand; PAM type: YTN; PAM sequence: TTG
tttgttgtttggatatacct

SEQ ID NO: 278650 - DNA, 20 bp, Artificial Sequence
  Description of Artificial Sequence: Synthetic oligonucleotide
  Target: LAMA2; (-) strand; PAM type: YTN; PAM sequence: TTT
gtttgttgtttggatatacc

SEQ ID NO: 278651 - DNA, 20 bp, Artificial Sequence
  Description of Artificial Sequence: Synthetic oligonucleotide
  Target: LAMA2; (-) strand; PAM type: YTN; PAM sequence: TTG
tttgtttgttgtttggatat

SEQ ID NO: 278652 - DNA, 20 bp, Artificial Sequence
  Description of Artificial Sequence: Synthetic oligonucleotide
  Target: LAMA2; (-) strand; PAM type: YTN; PAM sequence: TTT
gtttgtttgttgtttggata

SEQ ID NO: 278653 - DNA, 20 bp, Artificial Sequence
  Description of Artificial Sequence: Synthetic oligonucleotide
  Target: LAMA2; (-) strand; PAM type: YTN; PAM sequence: TTA
tttgtttgtttgttgtttgg

SEQ ID NO: 278654 - DNA, 20 bp, Artificial Sequence
  Description of Artificial Sequence: Synthetic oligonucleotide
  Target: LAMA2; (-) strand; PAM type: YTN; PAM sequence: TTT
atttgtttgtttgttgtttg

SEQ ID NO: 278655 - DNA, 20 bp, Artificial Sequence
  Description of Artificial Sequence: Synthetic oligonucleotide
  Target: LAMA2; (-) strand; PAM type: YTN; PAM sequence: TTT
tatttgtttgtttgttgttt

SEQ ID NO: 278656 - DNA, 20 bp, Artificial Sequence
  Description of Artificial Sequence: Synthetic oligonucleotide
  Target: LAMA2; (-) strand; PAM type: YTN; PAM sequence: TTA
ttttatttgtttgtttgttg

SEQ ID NO: 278657 - DNA, 20 bp, Artificial Sequence
  Description of Artificial Sequence: Synthetic oligonucleotide
  Target: LAMA2; (-) strand; PAM type: YTN; PAM sequence: CTT
attttatttgtttgtttgtt

SEQ ID NO: 278658 - DNA, 20 bp, Artificial Sequence
  Description of Artificial Sequence: Synthetic oligonucleotide
  Target: LAMA2; (-) strand; PAM type: YTN; PAM sequence: TTA
gtcttattttatttgtttgt

SEQ ID NO: 278659 - DNA, 20 bp, Artificial Sequence
  Description of Artificial Sequence: Synthetic oligonucleotide
  Target: LAMA2; (-) strand; PAM type: YTN; PAM sequence: CTG
cattagtcttattttatttg

SEQ ID NO: 278660 - DNA, 20 bp, Artificial Sequence
  Description of Artificial Sequence: Synthetic oligonucleotide
  Target: LAMA2; (-) strand; PAM type: YTN; PAM sequence: TTC
tgcattagtcttattttatt

SEQ ID NO: 278661 - DNA, 20 bp, Artificial Sequence
  Description of Artificial Sequence: Synthetic oligonucleotide
  Target: LAMA2; (-) strand; PAM type: YTN; PAM sequence: TTC
attctgcattagtcttattt

SEQ ID NO: 278662 - DNA, 20 bp, Artificial Sequence
  Description of Artificial Sequence: Synthetic oligonucleotide
  Target: LAMA2; (-) strand; PAM type: YTN; PAM sequence: CTA
tggaattcattctgcattag

SEQ ID NO: 278663 - DNA, 20 bp, Artificial Sequence
  Description of Artificial Sequence: Synthetic oligonucleotide
  Target: LAMA2; (-) strand; PAM type: YTN; PAM sequence: CTG
aactatggaattcattctgc

SEQ ID NO: 278664 - DNA, 20 bp, Artificial Sequence
  Description of Artificial Sequence: Synthetic oligonucleotide
  Target: LAMA2; (-) strand; PAM type: YTN; PAM sequence: TTG
aagaatctgaactatggaat

SEQ ID NO: 278665 - DNA, 20 bp, Artificial Sequence
  Description of Artificial Sequence: Synthetic oligonucleotide
  Target: LAMA2; (-) strand; PAM type: YTN; PAM sequence: CTT
gaagaatctgaactatggaa

SEQ ID NO: 278666 - DNA, 20 bp, Artificial Sequence
  Description of Artificial Sequence: Synthetic oligonucleotide
  Target: LAMA2; (-) strand; PAM type: YTN; PAM sequence: TTA
tcttgaagaatctgaactat

SEQ ID NO: 278667 - DNA, 20 bp, Artificial Sequence
  Description of Artificial Sequence: Synthetic oligonucleotide
  Target: LAMA2; (-) strand; PAM type: YTN; PAM sequence: TTC
cattatcttgaagaatctga

SEQ ID NO: 278668 - DNA, 20 bp, Artificial Sequence
  Description of Artificial Sequence: Synthetic oligonucleotide
  Target: LAMA2; (-) strand; PAM type: YTN; PAM sequence: TTT
ccattatcttgaagaatctg

SEQ ID NO: 278669 - DNA, 20 bp, Artificial Sequence
  Description of Artificial Sequence: Synthetic oligonucleotide
  Target: LAMA2; (-) strand; PAM type: YTN; PAM sequence: TTT
tccattatcttgaagaatct

SEQ ID NO: 278670 - DNA, 20 bp, Artificial Sequence
  Description of Artificial Sequence: Synthetic oligonucleotide
  Target: LAMA2; (-) strand; PAM type: YTN; PAM sequence: TTA
tgtgataattttccattatc

SEQ ID NO: 278671 - DNA, 20 bp, Artificial Sequence
  Description of Artificial Sequence: Synthetic oligonucleotide
  Target: LAMA2; (-) strand; PAM type: YTN; PAM sequence: TTC
aaaacaggtggagattatgt

SEQ ID NO: 278672 - DNA, 20 bp, Artificial Sequence
  Description of Artificial Sequence: Synthetic oligonucleotide
  Target: LAMA2; (-) strand; PAM type: YTN; PAM sequence: TTT
caaaacaggtggagattatg

SEQ ID NO: 278673 - DNA, 20 bp, Artificial Sequence
  Description of Artificial Sequence: Synthetic oligonucleotide
  Target: LAMA2; (-) strand; PAM type: YTN; PAM sequence: TTA
gagaaagggagaaagggagg

SEQ ID NO: 278674 - DNA, 20 bp, Artificial Sequence
  Description of Artificial Sequence: Synthetic oligonucleotide
  Target: LAMA2; (-) strand; PAM type: YTN; PAM sequence: CTT
agagaaagggagaaagggag

SEQ ID NO: 278675 - DNA, 20 bp, Artificial Sequence
  Description of Artificial Sequence: Synthetic oligonucleotide
  Target: LAMA2; (-) strand; PAM type: YTN; PAM sequence: CTG
acttagagaaagggagaaag

SEQ ID NO: 278676 - DNA, 20 bp, Artificial Sequence
  Description of Artificial Sequence: Synthetic oligonucleotide
  Target: LAMA2; (-) strand; PAM type: YTN; PAM sequence: TTC
cactgacttagagaaaggga

SEQ ID NO: 278677 - DNA, 20 bp, Artificial Sequence
  Description of Artificial Sequence: Synthetic oligonucleotide
  Target: LAMA2; (-) strand; PAM type: YTN; PAM sequence: CTA
ttccactgacttagagaaag

SEQ ID NO: 278678 - DNA, 20 bp, Artificial Sequence
  Description of Artificial Sequence: Synthetic oligonucleotide
  Target: LAMA2; (-) strand; PAM type: YTN; PAM sequence: CTA
gactattccactgacttaga

SEQ ID NO: 278679 - DNA, 20 bp, Artificial Sequence
  Description of Artificial Sequence: Synthetic oligonucleotide
  Target: LAMA2; (-) strand; PAM type: YTN; PAM sequence: TTA
aactagactattccactgac

SEQ ID NO: 278680 - DNA, 20 bp, Artificial Sequence
  Description of Artificial Sequence: Synthetic oligonucleotide
  Target: LAMA2; (-) strand; PAM type: YTN; PAM sequence: CTA
catcaaagttaaactagact

SEQ ID NO: 278681 - DNA, 20 bp, Artificial Sequence
  Description of Artificial Sequence: Synthetic oligonucleotide
  Target: LAMA2; (-) strand; PAM type: YTN; PAM sequence: TTC
tacatcaaagttaaactaga

SEQ ID NO: 278682 - DNA, 20 bp, Artificial Sequence
  Description of Artificial Sequence: Synthetic oligonucleotide
  Target: LAMA2; (-) strand; PAM type: YTN; PAM sequence: TTT
ctacatcaaagttaaactag

SEQ ID NO: 278683 - DNA, 20 bp, Artificial Sequence
  Description of Artificial Sequence: Synthetic oligonucleotide
  Target: LAMA2; (-) strand; PAM type: YTN; PAM sequence: TTT
tctacatcaaagttaaacta

SEQ ID NO: 278684 - DNA, 20 bp, Artificial Sequence
  Description of Artificial Sequence: Synthetic oligonucleotide
  Target: LAMA2; (-) strand; PAM type: YTN; PAM sequence: CTA
aattttctacatcaaagtta

SEQ ID NO: 278685 - DNA, 20 bp, Artificial Sequence
  Description of Artificial Sequence: Synthetic oligonucleotide
  Target: LAMA2; (-) strand; PAM type: YTN; PAM sequence: CTG
cctaaattttctacatcaaa

SEQ ID NO: 278686 - DNA, 20 bp, Artificial Sequence
  Description of Artificial Sequence: Synthetic oligonucleotide
  Target: LAMA2; (-) strand; PAM type: YTN; PAM sequence: TTG
aggactgcctaaattttcta

SEQ ID NO: 278687 - DNA, 20 bp, Artificial Sequence
  Description of Artificial Sequence: Synthetic oligonucleotide
  Target: LAMA2; (-) strand; PAM type: YTN; PAM sequence: CTA
gagaggttgaggactgccta

SEQ ID NO: 278688 - DNA, 20 bp, Artificial Sequence
  Description of Artificial Sequence: Synthetic oligonucleotide
  Target: LAMA2; (-) strand; PAM type: YTN; PAM sequence: TTC
agcatacctagagaggttga

SEQ ID NO: 278689 - DNA, 20 bp, Artificial Sequence
  Description of Artificial Sequence: Synthetic oligonucleotide
  Target: LAMA2; (-) strand; PAM type: YTN; PAM sequence: TTA
attcagcatacctagagagg

SEQ ID NO: 278690 - DNA, 20 bp, Artificial Sequence
  Description of Artificial Sequence: Synthetic oligonucleotide
  Target: LAMA2; (-) strand; PAM type: YTN; PAM sequence: TTT
aattcagcatacctagagag

SEQ ID NO: 278691 - DNA, 20 bp, Artificial Sequence
  Description of Artificial Sequence: Synthetic oligonucleotide
  Target: LAMA2; (-) strand; PAM type: YTN; PAM sequence: TTT
taattcagcatacctagaga

SEQ ID NO: 278692 - DNA, 20 bp, Artificial Sequence
  Description of Artificial Sequence: Synthetic oligonucleotide
  Target: LAMA2; (-) strand; PAM type: YTN; PAM sequence: TTT
ttaattcagcatacctagag

SEQ ID NO: 278693 - DNA, 20 bp, Artificial Sequence
  Description of Artificial Sequence: Synthetic oligonucleotide
  Target: LAMA2; (-) strand; PAM type: YTN; PAM sequence: TTT
tttaattcagcatacctaga

SEQ ID NO: 278694 - DNA, 20 bp, Artificial Sequence
  Description of Artificial Sequence: Synthetic oligonucleotide
  Target: LAMA2; (-) strand; PAM type: YTN; PAM sequence: TTT
ttttaattcagcatacctag

SEQ ID NO: 278695 - DNA, 20 bp, Artificial Sequence
  Description of Artificial Sequence: Synthetic oligonucleotide
  Target: LAMA2; (-) strand; PAM type: YTN; PAM sequence: TTT
tttttaattcagcataccta

SEQ ID NO: 278696 - DNA, 20 bp, Artificial Sequence
  Description of Artificial Sequence: Synthetic oligonucleotide
  Target: LAMA2; (-) strand; PAM type: YTN; PAM sequence: TTT
ttttttaattcagcatacct

SEQ ID NO: 278697 - DNA, 20 bp, Artificial Sequence
  Description of Artificial Sequence: Synthetic oligonucleotide
  Target: LAMA2; (-) strand; PAM type: YTN; PAM sequence: TTT
tttttttaattcagcatacc

SEQ ID NO: 278698 - DNA, 20 bp, Artificial Sequence
  Description of Artificial Sequence: Synthetic oligonucleotide
  Target: LAMA2; (-) strand; PAM type: YTN; PAM sequence: TTT
ttttttttaattcagcatac

SEQ ID NO: 278699 - DNA, 20 bp, Artificial Sequence
  Description of Artificial Sequence: Synthetic oligonucleotide
  Target: LAMA2; (-) strand; PAM type: YTN; PAM sequence: TTT
tttttttttaattcagcata

SEQ ID NO: 278700 - DNA, 20 bp, Artificial Sequence
  Description of Artificial Sequence: Synthetic oligonucleotide
  Target: LAMA2; (-) strand; PAM type: YTN; PAM sequence: CTT
ttttttttttaattcagcat

SEQ ID NO: 278701 - DNA, 20 bp, Artificial Sequence
  Description of Artificial Sequence: Synthetic oligonucleotide
  Target: LAMA2; (-) strand; PAM type: YTN; PAM sequence: TTC
ttttttttttttaattcagc

SEQ ID NO: 278702 - DNA, 20 bp, Artificial Sequence
  Description of Artificial Sequence: Synthetic oligonucleotide
  Target: LAMA2; (-) strand; PAM type: YTN; PAM sequence: TTA
aaaatgtcattctttttttt

SEQ ID NO: 278703 - DNA, 20 bp, Artificial Sequence
  Description of Artificial Sequence: Synthetic oligonucleotide
  Target: LAMA2; (-) strand; PAM type: YTN; PAM sequence: TTG
ccatgggaattaaaaatgtc

SEQ ID NO: 278704 - DNA, 20 bp, Artificial Sequence
  Description of Artificial Sequence: Synthetic oligonucleotide
  Target: LAMA2; (-) strand; PAM type: YTN; PAM sequence: TTT
gccatgggaattaaaaatgt

SEQ ID NO: 278705 - DNA, 20 bp, Artificial Sequence
  Description of Artificial Sequence: Synthetic oligonucleotide
  Target: LAMA2; (-) strand; PAM type: YTN; PAM sequence: CTC
catttgccatgggaattaaa

SEQ ID NO: 278706 - DNA, 20 bp, Artificial Sequence
  Description of Artificial Sequence: Synthetic oligonucleotide
  Target: LAMA2; (-) strand; PAM type: YTN; PAM sequence: TTG
caaggtgaagaagaggaaca

SEQ ID NO: 278707 - DNA, 20 bp, Artificial Sequence
  Description of Artificial Sequence: Synthetic oligonucleotide
  Target: LAMA2; (-) strand; PAM type: YTN; PAM sequence: TTA
caaaatgacagtcattgcaa

SEQ ID NO: 278708 - DNA, 20 bp, Artificial Sequence
  Description of Artificial Sequence: Synthetic oligonucleotide
  Target: LAMA2; (-) strand; PAM type: YTN; PAM sequence: TTT
acaaaatgacagtcattgca

SEQ ID NO: 278709 - DNA, 20 bp, Artificial Sequence
  Description of Artificial Sequence: Synthetic oligonucleotide
  Target: LAMA2; (-) strand; PAM type: YTN; PAM sequence: TTT
tacaaaatgacagtcattgc

SEQ ID NO: 278710 - DNA, 20 bp, Artificial Sequence
  Description of Artificial Sequence: Synthetic oligonucleotide
  Target: LAMA2; (-) strand; PAM type: YTN; PAM sequence: TTG
tgagtgtatgtgtgagtaag

SEQ ID NO: 278711 - DNA, 20 bp, Artificial Sequence
  Description of Artificial Sequence: Synthetic oligonucleotide
  Target: LAMA2; (-) strand; PAM type: YTN; PAM sequence: TTA
aggaacattgtgagtgtatg

SEQ ID NO: 278712 - DNA, 20 bp, Artificial Sequence
  Description of Artificial Sequence: Synthetic oligonucleotide
  Target: LAMA2; (-) strand; PAM type: YTN; PAM sequence: TTA
gaagatattaaggaacattg

SEQ ID NO: 278713 - DNA, 20 bp, Artificial Sequence
  Description of Artificial Sequence: Synthetic oligonucleotide
  Target: LAMA2; (-) strand; PAM type: YTN; PAM sequence: TTC
aggattagaagatattaagg

SEQ ID NO: 278714 - DNA, 20 bp, Artificial Sequence
  Description of Artificial Sequence: Synthetic oligonucleotide
  Target: LAMA2; (-) strand; PAM type: YTN; PAM sequence: TTG
agaaaggaaattcaggatta

SEQ ID NO: 278715 - DNA, 20 bp, Artificial Sequence
  Description of Artificial Sequence: Synthetic oligonucleotide
  Target: LAMA2; (-) strand; PAM type: YTN; PAM sequence: CTA
aacaaattgagaaaggaaat

SEQ ID NO: 278716 - DNA, 20 bp, Artificial Sequence
  Description of Artificial Sequence: Synthetic oligonucleotide
  Target: LAMA2; (-) strand; PAM type: YTN; PAM sequence: CTA
actaaacaaattgagaaagg

SEQ ID NO: 278717 - DNA, 20 bp, Artificial Sequence
  Description of Artificial Sequence: Synthetic oligonucleotide
  Target: LAMA2; (-) strand; PAM type: YTN; PAM sequence: CTA
gtgaagatctaactaaacaa

SEQ ID NO: 278718 - DNA, 20 bp, Artificial Sequence
  Description of Artificial Sequence: Synthetic oligonucleotide
  Target: LAMA2; (-) strand; PAM type: YTN; PAM sequence: TTC
tagtgaagatctaactaaac

SEQ ID NO: 278719 - DNA, 20 bp, Artificial Sequence
  Description of Artificial Sequence: Synthetic oligonucleotide
  Target: LAMA2; (-) strand; PAM type: YTN; PAM sequence: TTT
ctagtgaagatctaactaaa

SEQ ID NO: 278720 - DNA, 20 bp, Artificial Sequence
  Description of Artificial Sequence: Synthetic oligonucleotide
  Target: LAMA2; (-) strand; PAM type: YTN; PAM sequence: TTA
tttctagtgaagatctaact

SEQ ID NO: 278721 - DNA, 20 bp, Artificial Sequence
  Description of Artificial Sequence: Synthetic oligonucleotide
  Target: LAMA2; (-) strand; PAM type: YTN; PAM sequence: CTT
atttctagtgaagatctaac

SEQ ID NO: 278722 - DNA, 20 bp, Artificial Sequence
  Description of Artificial Sequence: Synthetic oligonucleotide
  Target: LAMA2; (-) strand; PAM type: YTN; PAM sequence: CTA
atacttatttctagtgaaga

SEQ ID NO: 278723 - DNA, 20 bp, Artificial Sequence
  Description of Artificial Sequence: Synthetic oligonucleotide
  Target: LAMA2; (-) strand; PAM type: YTN; PAM sequence: TTC
taatacttatttctagtgaa

SEQ ID NO: 278724 - DNA, 20 bp, Artificial Sequence
  Description of Artificial Sequence: Synthetic oligonucleotide
  Target: LAMA2; (-) strand; PAM type: YTN; PAM sequence: TTT
ctaatacttatttctagtga

SEQ ID NO: 278725 - DNA, 20 bp, Artificial Sequence
  Description of Artificial Sequence: Synthetic oligonucleotide
  Target: LAMA2; (-) strand; PAM type: YTN; PAM sequence: TTC
ccaatttctaatacttattt

SEQ ID NO: 278726 - DNA, 20 bp, Artificial Sequence
  Description of Artificial Sequence: Synthetic oligonucleotide
  Target: LAMA2; (-) strand; PAM type: YTN; PAM sequence: TTT
cccaatttctaatacttatt

SEQ ID NO: 278727 - DNA, 20 bp, Artificial Sequence
  Description of Artificial Sequence: Synthetic oligonucleotide
  Target: LAMA2; (-) strand; PAM type: YTN; PAM sequence: TTT
tcccaatttctaatacttat

SEQ ID NO: 278728 - DNA, 20 bp, Artificial Sequence
  Description of Artificial Sequence: Synthetic oligonucleotide
  Target: LAMA2; (-) strand; PAM type: YTN; PAM sequence: CTT
ttcccaatttctaatactta

SEQ ID NO: 278729 - DNA, 20 bp, Artificial Sequence
  Description of Artificial Sequence: Synthetic oligonucleotide
  Target: LAMA2; (-) strand; PAM type: YTN; PAM sequence: CTA
atacaaccagtataaacttt

SEQ ID NO: 278730 - DNA, 20 bp, Artificial Sequence
  Description of Artificial Sequence: Synthetic oligonucleotide
  Target: LAMA2; (-) strand; PAM type: YTN; PAM sequence: TTG
gagaaccctaatacaaccag

SEQ ID NO: 278731 - DNA, 20 bp, Artificial Sequence
  Description of Artificial Sequence: Synthetic oligonucleotide
  Target: LAMA2; (-) strand; PAM type: YTN; PAM sequence: TTT
ggagaaccctaatacaacca

SEQ ID NO: 278732 - DNA, 20 bp, Artificial Sequence
  Description of Artificial Sequence: Synthetic oligonucleotide
  Target: LAMA2; (-) strand; PAM type: YTN; PAM sequence: TTA
tttggagaaccctaatacaa

SEQ ID NO: 278733 - DNA, 20 bp, Artificial Sequence
  Description of Artificial Sequence: Synthetic oligonucleotide
  Target: LAMA2; (-) strand; PAM type: YTN; PAM sequence: TTT
atttggagaaccctaataca

SEQ ID NO: 278734 - DNA, 20 bp, Artificial Sequence
  Description of Artificial Sequence: Synthetic oligonucleotide
  Target: LAMA2; (-) strand; PAM type: YTN; PAM sequence: CTG
tttatttggagaaccctaat

SEQ ID NO: 278735 - DNA, 20 bp, Artificial Sequence
  Description of Artificial Sequence: Synthetic oligonucleotide
  Target: LAMA2; (-) strand; PAM type: YTN; PAM sequence: TTC
tgtttatttggagaacccta

SEQ ID NO: 278736 - DNA, 20 bp, Artificial Sequence
  Description of Artificial Sequence: Synthetic oligonucleotide
  Target: LAMA2; (-) strand; PAM type: YTN; PAM sequence: CTA
atagttctgtttatttggag

SEQ ID NO: 278737 - DNA, 20 bp, Artificial Sequence
  Description of Artificial Sequence: Synthetic oligonucleotide
  Target: LAMA2; (-) strand; PAM type: YTN; PAM sequence: CTC
ctaatagttctgtttatttg

SEQ ID NO: 278738 - DNA, 20 bp, Artificial Sequence
  Description of Artificial Sequence: Synthetic oligonucleotide
  Target: LAMA2; (-) strand; PAM type: YTN; PAM sequence: CTA
tccatctcctaatagttctg

SEQ ID NO: 278739 - DNA, 20 bp, Artificial Sequence
  Description of Artificial Sequence: Synthetic oligonucleotide
  Target: LAMA2; (-) strand; PAM type: YTN; PAM sequence: CTA
tctatccatctcctaatagt

SEQ ID NO: 278740 - DNA, 20 bp, Artificial Sequence
  Description of Artificial Sequence: Synthetic oligonucleotide
  Target: LAMA2; (-) strand; PAM type: YTN; PAM sequence: CTA
tctatctatccatctcctaa

SEQ ID NO: 278741 - DNA, 20 bp, Artificial Sequence
  Description of Artificial Sequence: Synthetic oligonucleotide
  Target: LAMA2; (-) strand; PAM type: YTN; PAM sequence: CTA
tcaatcaatgtatctatcta

SEQ ID NO: 278742 - DNA, 20 bp, Artificial Sequence
  Description of Artificial Sequence: Synthetic oligonucleotide
  Target: LAMA2; (-) strand; PAM type: YTN; PAM sequence: CTG
tcatctatcaatcaatgtat

SEQ ID NO: 278743 - DNA, 20 bp, Artificial Sequence
  Description of Artificial Sequence: Synthetic oligonucleotide
  Target: LAMA2; (-) strand; PAM type: YTN; PAM sequence: CTA
tctgtcatctatcaatcaat

SEQ ID NO: 278744 - DNA, 20 bp, Artificial Sequence
  Description of Artificial Sequence: Synthetic oligonucleotide
  Target: LAMA2; (-) strand; PAM type: YTN; PAM sequence: TTC
atctatctgtcatctatcaa

SEQ ID NO: 278745 - DNA, 20 bp, Artificial Sequence
  Description of Artificial Sequence: Synthetic oligonucleotide
  Target: LAMA2; (-) strand; PAM type: YTN; PAM sequence: CTA
tccatccattcatctatctg

SEQ ID NO: 278746 - DNA, 20 bp, Artificial Sequence
  Description of Artificial Sequence: Synthetic oligonucleotide
  Target: LAMA2; (-) strand; PAM type: YTN; PAM sequence: TTA
tccacctatccatccattca

SEQ ID NO: 278747 - DNA, 20 bp, Artificial Sequence
  Description of Artificial Sequence: Synthetic oligonucleotide
  Target: LAMA2; (-) strand; PAM type: YTN; PAM sequence: CTA
ttatccacctatccatccat

SEQ ID NO: 278748 - DNA, 20 bp, Artificial Sequence
  Description of Artificial Sequence: Synthetic oligonucleotide
  Target: LAMA2; (-) strand; PAM type: YTN; PAM sequence: CTA
ccagcctattatccacctat

SEQ ID NO: 278749 - DNA, 20 bp, Artificial Sequence
  Description of Artificial Sequence: Synthetic oligonucleotide
  Target: LAMA2; (-) strand; PAM type: YTN; PAM sequence: CTA
tcatctaccagcctattatc

SEQ ID NO: 278750 - DNA, 20 bp, Artificial Sequence
  Description of Artificial Sequence: Synthetic oligonucleotide
  Target: LAMA2; (-) strand; PAM type: YTN; PAM sequence: CTA
tcatccatctatcatctacc

SEQ ID NO: 278751 - DNA, 20 bp, Artificial Sequence
  Description of Artificial Sequence: Synthetic oligonucleotide
  Target: LAMA2; (-) strand; PAM type: YTN; PAM sequence: CTG
tctatcatccatctatcatc

SEQ ID NO: 278752 - DNA, 20 bp, Artificial Sequence
  Description of Artificial Sequence: Synthetic oligonucleotide
  Target: LAMA2; (-) strand; PAM type: YTN; PAM sequence: CTA
atctgtctatcatccatcta

SEQ ID NO: 278753 - DNA, 20 bp, Artificial Sequence
  Description of Artificial Sequence: Synthetic oligonucleotide
  Target: LAMA2; (-) strand; PAM type: YTN; PAM sequence: CTA
tctaatctgtctatcatcca

SEQ ID NO: 278754 - DNA, 20 bp, Artificial Sequence
  Description of Artificial Sequence: Synthetic oligonucleotide
  Target: LAMA2; (-) strand; PAM type: YTN; PAM sequence: CTA
tctatctaatctgtctatca

SEQ ID NO: 278755 - DNA, 20 bp, Artificial Sequence
  Description of Artificial Sequence: Synthetic oligonucleotide
  Target: LAMA2; (-) strand; PAM type: YTN; PAM sequence: CTA
tctatctatctaatctgtct

SEQ ID NO: 278756 - DNA, 20 bp, Artificial Sequence
  Description of Artificial Sequence: Synthetic oligonucleotide
  Target: LAMA2; (-) strand; PAM type: YTN; PAM sequence: CTA
tctatctatctatctaatct

SEQ ID NO: 278757 - DNA, 20 bp, Artificial Sequence
  Description of Artificial Sequence: Synthetic oligonucleotide
  Target: LAMA2; (-) strand; PAM type: YTN; PAM sequence: CTA
tctatctatctatctatcta

SEQ ID NO: 278758 - DNA, 20 bp, Artificial Sequence
  Description of Artificial Sequence: Synthetic oligonucleotide
  Target: LAMA2; (-) strand; PAM type: YTN; PAM sequence: CTA
tctatctatctatctatcta

SEQ ID NO: 278759 - DNA, 20 bp, Artificial Sequence
  Description of Artificial Sequence: Synthetic oligonucleotide
  Target: LAMA2; (-) strand; PAM type: YTN; PAM sequence: CTA
tctatctatctatctatcta

SEQ ID NO: 278760 - DNA, 20 bp, Artificial Sequence
  Description of Artificial Sequence: Synthetic oligonucleotide
  Target: LAMA2; (-) strand; PAM type: YTN; PAM sequence: CTA
tctatctatctatctatcta

SEQ ID NO: 278761 - DNA, 20 bp, Artificial Sequence
  Description of Artificial Sequence: Synthetic oligonucleotide
  Target: LAMA2; (-) strand; PAM type: YTN; PAM sequence: CTA
tctatctatctatctatcta

SEQ ID NO: 278762 - DNA, 20 bp, Artificial Sequence
  Description of Artificial Sequence: Synthetic oligonucleotide
  Target: LAMA2; (-) strand; PAM type: YTN; PAM sequence: TTA
tctatctatctatctatcta

SEQ ID NO: 278763 - DNA, 20 bp, Artificial Sequence
  Description of Artificial Sequence: Synthetic oligonucleotide
  Target: LAMA2; (-) strand; PAM type: YTN; PAM sequence: CTA
ttatctatctatctatctat

SEQ ID NO: 278764 - DNA, 20 bp, Artificial Sequence
  Description of Artificial Sequence: Synthetic oligonucleotide
  Target: LAMA2; (-) strand; PAM type: YTN; PAM sequence: CTA
atctattatctatctatcta

SEQ ID NO: 278765 - DNA, 20 bp, Artificial Sequence
  Description of Artificial Sequence: Synthetic oligonucleotide
  Target: LAMA2; (-) strand; PAM type: YTN; PAM sequence: CTA
tcatctaatctattatctat

SEQ ID NO: 278766 - DNA, 20 bp, Artificial Sequence
  Description of Artificial Sequence: Synthetic oligonucleotide
  Target: LAMA2; (-) strand; PAM type: YTN; PAM sequence: CTG
tctatcatctaatctattat

SEQ ID NO: 278767 - DNA, 20 bp, Artificial Sequence
  Description of Artificial Sequence: Synthetic oligonucleotide
  Target: LAMA2; (-) strand; PAM type: YTN; PAM sequence: TTC
tgtctatcatctaatctatt

SEQ ID NO: 278768 - DNA, 20 bp, Artificial Sequence
  Description of Artificial Sequence: Synthetic oligonucleotide
  Target: LAMA2; (-) strand; PAM type: YTN; PAM sequence: TTT
ctgtctatcatctaatctat

SEQ ID NO: 278769 - DNA, 20 bp, Artificial Sequence
  Description of Artificial Sequence: Synthetic oligonucleotide
  Target: LAMA2; (-) strand; PAM type: YTN; PAM sequence: CTT
tctgtctatcatctaatcta

SEQ ID NO: 278770 - DNA, 20 bp, Artificial Sequence
  Description of Artificial Sequence: Synthetic oligonucleotide
  Target: LAMA2; (-) strand; PAM type: YTN; PAM sequence: TTC
tttctgtctatcatctaatc

SEQ ID NO: 278771 - DNA, 20 bp, Artificial Sequence
  Description of Artificial Sequence: Synthetic oligonucleotide
  Target: LAMA2; (-) strand; PAM type: YTN; PAM sequence: TTA
ttctttctgtctatcatcta

SEQ ID NO: 278772 - DNA, 20 bp, Artificial Sequence
  Description of Artificial Sequence: Synthetic oligonucleotide
  Target: LAMA2; (-) strand; PAM type: YTN; PAM sequence: CTT
attctttctgtctatcatct

SEQ ID NO: 278773 - DNA, 20 bp, Artificial Sequence
  Description of Artificial Sequence: Synthetic oligonucleotide
  Target: LAMA2; (-) strand; PAM type: YTN; PAM sequence: CTC
ttattctttctgtctatcat

SEQ ID NO: 278774 - DNA, 20 bp, Artificial Sequence
  Description of Artificial Sequence: Synthetic oligonucleotide
  Target: LAMA2; (-) strand; PAM type: YTN; PAM sequence: TTC
ataataaatctcttattctt

SEQ ID NO: 278775 - DNA, 20 bp, Artificial Sequence
  Description of Artificial Sequence: Synthetic oligonucleotide
  Target: LAMA2; (-) strand; PAM type: YTN; PAM sequence: CTT
cataataaatctcttattct

SEQ ID NO: 278776 - DNA, 20 bp, Artificial Sequence
  Description of Artificial Sequence: Synthetic oligonucleotide
  Target: LAMA2; (-) strand; PAM type: YTN; PAM sequence: TTC
ttcataataaatctcttatt

SEQ ID NO: 278777 - DNA, 20 bp, Artificial Sequence
  Description of Artificial Sequence: Synthetic oligonucleotide
  Target: LAMA2; (-) strand; PAM type: YTN; PAM sequence: CTC
cataatcacgtaagccaatt

SEQ ID NO: 278778 - DNA, 20 bp, Artificial Sequence
  Description of Artificial Sequence: Synthetic oligonucleotide
  Target: LAMA2; (-) strand; PAM type: YTN; PAM sequence: TTG
cagcctccataatcacgtaa

SEQ ID NO: 278779 - DNA, 20 bp, Artificial Sequence
  Description of Artificial Sequence: Synthetic oligonucleotide
  Target: LAMA2; (-) strand; PAM type: YTN; PAM sequence: TTT
gcagcctccataatcacgta

SEQ ID NO: 278780 - DNA, 20 bp, Artificial Sequence
  Description of Artificial Sequence: Synthetic oligonucleotide
  Target: LAMA2; (-) strand; PAM type: YTN; PAM sequence: CTT
tgcagcctccataatcacgt

SEQ ID NO: 278781 - DNA, 20 bp, Artificial Sequence
  Description of Artificial Sequence: Synthetic oligonucleotide
  Target: LAMA2; (-) strand; PAM type: YTN; PAM sequence: CTG
ggactttgcagcctccataa

SEQ ID NO: 278782 - DNA, 20 bp, Artificial Sequence
  Description of Artificial Sequence: Synthetic oligonucleotide
  Target: LAMA2; (-) strand; PAM type: YTN; PAM sequence: CTC
acagatactgggactttgca

SEQ ID NO: 278783 - DNA, 20 bp, Artificial Sequence
  Description of Artificial Sequence: Synthetic oligonucleotide
  Target: LAMA2; (-) strand; PAM type: YTN; PAM sequence: CTG
cagctcacagatactgggac

SEQ ID NO: 278784 - DNA, 20 bp, Artificial Sequence
  Description of Artificial Sequence: Synthetic oligonucleotide
  Target: LAMA2; (-) strand; PAM type: YTN; PAM sequence: CTA
tatcatggatctgcagctca

SEQ ID NO: 278785 - DNA, 20 bp, Artificial Sequence
  Description of Artificial Sequence: Synthetic oligonucleotide
  Target: LAMA2; (-) strand; PAM type: YTN; PAM sequence: CTC
aaagtgaactatatcatgga

SEQ ID NO: 278786 - DNA, 20 bp, Artificial Sequence
  Description of Artificial Sequence: Synthetic oligonucleotide
  Target: LAMA2; (-) strand; PAM type: YTN; PAM sequence: TTG
gactcaaagtgaactatatc

SEQ ID NO: 278787 - DNA, 20 bp, Artificial Sequence
  Description of Artificial Sequence: Synthetic oligonucleotide
  Target: LAMA2; (-) strand; PAM type: YTN; PAM sequence: TTT
ggactcaaagtgaactatat

SEQ ID NO: 278788 - DNA, 20 bp, Artificial Sequence
  Description of Artificial Sequence: Synthetic oligonucleotide
  Target: LAMA2; (-) strand; PAM type: YTN; PAM sequence: CTT
tggactcaaagtgaactata

SEQ ID NO: 278789 - DNA, 20 bp, Artificial Sequence
  Description of Artificial Sequence: Synthetic oligonucleotide
  Target: LAMA2; (-) strand; PAM type: YTN; PAM sequence: CTG
gcctttggactcaaagtgaa

SEQ ID NO: 278790 - DNA, 20 bp, Artificial Sequence
  Description of Artificial Sequence: Synthetic oligonucleotide
  Target: LAMA2; (-) strand; PAM type: YTN; PAM sequence: CTC
tggcctttggactcaaagtg

SEQ ID NO: 278791 - DNA, 20 bp, Artificial Sequence
  Description of Artificial Sequence: Synthetic oligonucleotide
  Target: LAMA2; (-) strand; PAM type: YTN; PAM sequence: TTC
tctggcctttggactcaaag

SEQ ID NO: 278792 - DNA, 20 bp, Artificial Sequence
  Description of Artificial Sequence: Synthetic oligonucleotide
  Target: LAMA2; (-) strand; PAM type: YTN; PAM sequence: CTC
ccgtgattctctggcctttg

SEQ ID NO: 278793 - DNA, 20 bp, Artificial Sequence
  Description of Artificial Sequence: Synthetic oligonucleotide
  Target: LAMA2; (-) strand; PAM type: YTN; PAM sequence: TTG
taccatcagctcccgtgatt

SEQ ID NO: 278794 - DNA, 20 bp, Artificial Sequence
  Description of Artificial Sequence: Synthetic oligonucleotide
  Target: LAMA2; (-) strand; PAM type: YTN; PAM sequence: TTT
gtaccatcagctcccgtgat

SEQ ID NO: 278795 - DNA, 20 bp, Artificial Sequence
  Description of Artificial Sequence: Synthetic oligonucleotide
  Target: LAMA2; (-) strand; PAM type: YTN; PAM sequence: CTG
tggtttgtaccatcagctcc

SEQ ID NO: 278796 - DNA, 20 bp, Artificial Sequence
  Description of Artificial Sequence: Synthetic oligonucleotide
  Target: LAMA2; (-) strand; PAM type: YTN; PAM sequence: TTG
aactgtggtttgtaccatca

SEQ ID NO: 278797 - DNA, 20 bp, Artificial Sequence
  Description of Artificial Sequence: Synthetic oligonucleotide
  Target: LAMA2; (-) strand; PAM type: YTN; PAM sequence: CTT
gaactgtggtttgtaccatc

SEQ ID NO: 278798 - DNA, 20 bp, Artificial Sequence
  Description of Artificial Sequence: Synthetic oligonucleotide
  Target: LAMA2; (-) strand; PAM type: YTN; PAM sequence: TTC
ttgaactgtggtttgtacca

SEQ ID NO: 278799 - DNA, 20 bp, Artificial Sequence
  Description of Artificial Sequence: Synthetic oligonucleotide
  Target: LAMA2; (-) strand; PAM type: YTN; PAM sequence: CTA
gttcttgaactgtggtttgt

SEQ ID NO: 278800 - DNA, 20 bp, Artificial Sequence
  Description of Artificial Sequence: Synthetic oligonucleotide
  Target: LAMA2; (-) strand; PAM type: YTN; PAM sequence: CTC
tagttcttgaactgtggttt

SEQ ID NO: 278801 - DNA, 20 bp, Artificial Sequence
  Description of Artificial Sequence: Synthetic oligonucleotide
  Target: LAMA2; (-) strand; PAM type: YTN; PAM sequence: CTC
tctagttcttgaactgtggt

SEQ ID NO: 278802 - DNA, 20 bp, Artificial Sequence
  Description of Artificial Sequence: Synthetic oligonucleotide
  Target: LAMA2; (-) strand; PAM type: YTN; PAM sequence: TTC
tctctagttcttgaactgtg

SEQ ID NO: 278803 - DNA, 20 bp, Artificial Sequence
  Description of Artificial Sequence: Synthetic oligonucleotide
  Target: LAMA2; (-) strand; PAM type: YTN; PAM sequence: TTT
ctctctagttcttgaactgt

SEQ ID NO: 278804 - DNA, 20 bp, Artificial Sequence
  Description of Artificial Sequence: Synthetic oligonucleotide
  Target: LAMA2; (-) strand; PAM type: YTN; PAM sequence: TTT
tctctctagttcttgaactg

SEQ ID NO: 278805 - DNA, 20 bp, Artificial Sequence
  Description of Artificial Sequence: Synthetic oligonucleotide
  Target: LAMA2; (-) strand; PAM type: YTN; PAM sequence: CTC
attttctctctagttcttga

SEQ ID NO: 278806 - DNA, 20 bp, Artificial Sequence
  Description of Artificial Sequence: Synthetic oligonucleotide
  Target: LAMA2; (-) strand; PAM type: YTN; PAM sequence: CTC
atctcattttctctctagtt

SEQ ID NO: 278807 - DNA, 20 bp, Artificial Sequence
  Description of Artificial Sequence: Synthetic oligonucleotide
  Target: LAMA2; (-) strand; PAM type: YTN; PAM sequence: CTG
ggacatctcatctcattttc

SEQ ID NO: 278808 - DNA, 20 bp, Artificial Sequence
  Description of Artificial Sequence: Synthetic oligonucleotide
  Target: LAMA2; (-) strand; PAM type: YTN; PAM sequence: TTG
agctgggacatctcatctca

SEQ ID NO: 278809 - DNA, 20 bp, Artificial Sequence
  Description of Artificial Sequence: Synthetic oligonucleotide
  Target: LAMA2; (-) strand; PAM type: YTN; PAM sequence: TTA
cagattgagctgggacatct

SEQ ID NO: 278810 - DNA, 20 bp, Artificial Sequence
  Description of Artificial Sequence: Synthetic oligonucleotide
  Target: LAMA2; (-) strand; PAM type: YTN; PAM sequence: CTT
acagattgagctgggacatc

SEQ ID NO: 278811 - DNA, 20 bp, Artificial Sequence
  Description of Artificial Sequence: Synthetic oligonucleotide
  Target: LAMA2; (-) strand; PAM type: YTN; PAM sequence: CTG
ccttacagattgagctggga

SEQ ID NO: 278812 - DNA, 20 bp, Artificial Sequence
  Description of Artificial Sequence: Synthetic oligonucleotide
  Target: LAMA2; (-) strand; PAM type: YTN; PAM sequence: TTC
tgccttacagattgagctgg

SEQ ID NO: 278813 - DNA, 20 bp, Artificial Sequence
  Description of Artificial Sequence: Synthetic oligonucleotide
  Target: LAMA2; (-) strand; PAM type: YTN; PAM sequence: TTT
ctgccttacagattgagctg

SEQ ID NO: 278814 - DNA, 20 bp, Artificial Sequence
  Description of Artificial Sequence: Synthetic oligonucleotide
  Target: LAMA2; (-) strand; PAM type: YTN; PAM sequence: TTT
tctgccttacagattgagct

SEQ ID NO: 278815 - DNA, 20 bp, Artificial Sequence
  Description of Artificial Sequence: Synthetic oligonucleotide
  Target: LAMA2; (-) strand; PAM type: YTN; PAM sequence: CTT
ttctgccttacagattgagc

SEQ ID NO: 278816 - DNA, 20 bp, Artificial Sequence
  Description of Artificial Sequence: Synthetic oligonucleotide
  Target: LAMA2; (-) strand; PAM type: YTN; PAM sequence: TTC
ttttctgccttacagattga

SEQ ID NO: 278817 - DNA, 20 bp, Artificial Sequence
  Description of Artificial Sequence: Synthetic oligonucleotide
  Target: LAMA2; (-) strand; PAM type: YTN; PAM sequence: CTT
cttttctgccttacagattg

SEQ ID NO: 278818 - DNA, 20 bp, Artificial Sequence
  Description of Artificial Sequence: Synthetic oligonucleotide
  Target: LAMA2; (-) strand; PAM type: YTN; PAM sequence: TTC
ccttcttttctgccttacag

SEQ ID NO: 278819 - DNA, 20 bp, Artificial Sequence
  Description of Artificial Sequence: Synthetic oligonucleotide
  Target: LAMA2; (-) strand; PAM type: YTN; PAM sequence: CTT
cccttcttttctgccttaca

SEQ ID NO: 278820 - DNA, 20 bp, Artificial Sequence
  Description of Artificial Sequence: Synthetic oligonucleotide
  Target: LAMA2; (-) strand; PAM type: YTN; PAM sequence: TTC
cttcccttcttttctgcctt

SEQ ID NO: 278821 - DNA, 20 bp, Artificial Sequence
  Description of Artificial Sequence: Synthetic oligonucleotide
  Target: LAMA2; (-) strand; PAM type: YTN; PAM sequence: CTG
aatagaacaaaaagcaaaga

SEQ ID NO: 278822 - DNA, 20 bp, Artificial Sequence
  Description of Artificial Sequence: Synthetic oligonucleotide
  Target: LAMA2; (-) strand; PAM type: YTN; PAM sequence: TTG
agggctgaatagaacaaaaa

SEQ ID NO: 278823 - DNA, 20 bp, Artificial Sequence
  Description of Artificial Sequence: Synthetic oligonucleotide
  Target: LAMA2; (-) strand; PAM type: YTN; PAM sequence: CTT
gagggctgaatagaacaaaa

SEQ ID NO: 278824 - DNA, 20 bp, Artificial Sequence
  Description of Artificial Sequence: Synthetic oligonucleotide
  Target: LAMA2; (-) strand; PAM type: YTN; PAM sequence: CTC
ttgagggctgaatagaacaa

SEQ ID NO: 278825 - DNA, 20 bp, Artificial Sequence
  Description of Artificial Sequence: Synthetic oligonucleotide
  Target: LAMA2; (-) strand; PAM type: YTN; PAM sequence: CTG
tgcatcacccaatctcttga

SEQ ID NO: 278826 - DNA, 20 bp, Artificial Sequence
  Description of Artificial Sequence: Synthetic oligonucleotide
  Target: LAMA2; (-) strand; PAM type: YTN; PAM sequence: TTG
ctgtgcatcacccaatctct

SEQ ID NO: 278827 - DNA, 20 bp, Artificial Sequence
  Description of Artificial Sequence: Synthetic oligonucleotide
  Target: LAMA2; (-) strand; PAM type: YTN; PAM sequence: CTC
aatattgctgtgcatcaccc

SEQ ID NO: 278828 - DNA, 20 bp, Artificial Sequence
  Description of Artificial Sequence: Synthetic oligonucleotide
  Target: LAMA2; (-) strand; PAM type: YTN; PAM sequence: CTC
ctcaatattgctgtgcatca

SEQ ID NO: 278829 - DNA, 20 bp, Artificial Sequence
  Description of Artificial Sequence: Synthetic oligonucleotide
  Target: LAMA2; (-) strand; PAM type: YTN; PAM sequence: TTG
ccctcctcaatattgctgtg

SEQ ID NO: 278830 - DNA, 20 bp, Artificial Sequence
  Description of Artificial Sequence: Synthetic oligonucleotide
  Target: LAMA2; (-) strand; PAM type: YTN; PAM sequence: CTG
gatgacagtaaaagagattg

SEQ ID NO: 278831 - DNA, 20 bp, Artificial Sequence
  Description of Artificial Sequence: Synthetic oligonucleotide
  Target: LAMA2; (-) strand; PAM type: YTN; PAM sequence: TTC
tggatgacagtaaaagagat

SEQ ID NO: 278832 - DNA, 20 bp, Artificial Sequence
  Description of Artificial Sequence: Synthetic oligonucleotide
  Target: LAMA2; (-) strand; PAM type: YTN; PAM sequence: TTT
ctggatgacagtaaaagaga

SEQ ID NO: 278833 - DNA, 20 bp, Artificial Sequence
  Description of Artificial Sequence: Synthetic oligonucleotide
  Target: LAMA2; (-) strand; PAM type: YTN; PAM sequence: CTG
tgagggtgtttctggatgac

SEQ ID NO: 278834 - DNA, 20 bp, Artificial Sequence
  Description of Artificial Sequence: Synthetic oligonucleotide
  Target: LAMA2; (-) strand; PAM type: YTN; PAM sequence: TTC
cgggtgtgtctgtgagggtg

SEQ ID NO: 278835 - DNA, 20 bp, Artificial Sequence
  Description of Artificial Sequence: Synthetic oligonucleotide
  Target: LAMA2; (-) strand; PAM type: YTN; PAM sequence: TTT
ccgggtgtgtctgtgagggt

SEQ ID NO: 278836 - DNA, 20 bp, Artificial Sequence
  Description of Artificial Sequence: Synthetic oligonucleotide
  Target: LAMA2; (-) strand; PAM type: YTN; PAM sequence: TTA
tttccgggtgtgtctgtgag

SEQ ID NO: 278837 - DNA, 20 bp, Artificial Sequence
  Description of Artificial Sequence: Synthetic oligonucleotide
  Target: LAMA2; (-) strand; PAM type: YTN; PAM sequence: TTA
aacattatttccgggtgtgt

SEQ ID NO: 278838 - DNA, 20 bp, Artificial Sequence
  Description of Artificial Sequence: Synthetic oligonucleotide
  Target: LAMA2; (-) strand; PAM type: YTN; PAM sequence: CTA
aattaaacattatttccggg

SEQ ID NO: 278839 - DNA, 20 bp, Artificial Sequence
  Description of Artificial Sequence: Synthetic oligonucleotide
  Target: LAMA2; (-) strand; PAM type: YTN; PAM sequence: CTG
gccatgggcacctaaattaa

SEQ ID NO: 278840 - DNA, 20 bp, Artificial Sequence
  Description of Artificial Sequence: Synthetic oligonucleotide
  Target: LAMA2; (-) strand; PAM type: YTN; PAM sequence: TTG
actggccatgggcacctaaa

SEQ ID NO: 278841 - DNA, 20 bp, Artificial Sequence
  Description of Artificial Sequence: Synthetic oligonucleotide
  Target: LAMA2; (-) strand; PAM type: YTN; PAM sequence: CTT
gactggccatgggcacctaa

SEQ ID NO: 278842 - DNA, 20 bp, Artificial Sequence
  Description of Artificial Sequence: Synthetic oligonucleotide
  Target: LAMA2; (-) strand; PAM type: YTN; PAM sequence: TTG
tatgtgtcaacttgactggc

SEQ ID NO: 278843 - DNA, 20 bp, Artificial Sequence
  Description of Artificial Sequence: Synthetic oligonucleotide
  Target: LAMA2; (-) strand; PAM type: YTN; PAM sequence: TTG
taaattgtatgtgtcaactt

SEQ ID NO: 278844 - DNA, 20 bp, Artificial Sequence
  Description of Artificial Sequence: Synthetic oligonucleotide
  Target: LAMA2; (-) strand; PAM type: YTN; PAM sequence: TTG
aaggccagtgtcattgtaaa

SEQ ID NO: 278845 - DNA, 20 bp, Artificial Sequence
  Description of Artificial Sequence: Synthetic oligonucleotide
  Target: LAMA2; (-) strand; PAM type: YTN; PAM sequence: CTG
gagttgaaggccagtgtcat

SEQ ID NO: 278846 - DNA, 20 bp, Artificial Sequence
  Description of Artificial Sequence: Synthetic oligonucleotide
  Target: LAMA2; (-) strand; PAM type: YTN; PAM sequence: TTG
tgcactggagttgaaggcca

SEQ ID NO: 278847 - DNA, 20 bp, Artificial Sequence
  Description of Artificial Sequence: Synthetic oligonucleotide
  Target: LAMA2; (-) strand; PAM type: YTN; PAM sequence: TTG
gagaataaagaggaagacca

SEQ ID NO: 278848 - DNA, 20 bp, Artificial Sequence
  Description of Artificial Sequence: Synthetic oligonucleotide
  Target: LAMA2; (-) strand; PAM type: YTN; PAM sequence: TTT
ggagaataaagaggaagacc

SEQ ID NO: 278849 - DNA, 20 bp, Artificial Sequence
  Description of Artificial Sequence: Synthetic oligonucleotide
  Target: LAMA2; (-) strand; PAM type: YTN; PAM sequence: TTG
aatttggagaataaagagga

SEQ ID NO: 278850 - DNA, 20 bp, Artificial Sequence
  Description of Artificial Sequence: Synthetic oligonucleotide
  Target: LAMA2; (-) strand; PAM type: YTN; PAM sequence: CTT
gaatttggagaataaagagg

SEQ ID NO: 278851 - DNA, 20 bp, Artificial Sequence
  Description of Artificial Sequence: Synthetic oligonucleotide
  Target: LAMA2; (-) strand; PAM type: YTN; PAM sequence: CTG
tagcaagtaagagaacttga

SEQ ID NO: 278852 - DNA, 20 bp, Artificial Sequence
  Description of Artificial Sequence: Synthetic oligonucleotide
  Target: LAMA2; (-) strand; PAM type: YTN; PAM sequence: TTC
ccaagaaatatggacaactg

SEQ ID NO: 278853 - DNA, 20 bp, Artificial Sequence
  Description of Artificial Sequence: Synthetic oligonucleotide
  Target: LAMA2; (-) strand; PAM type: YTN; PAM sequence: TTA
gaatgatggttcccaagaaa

SEQ ID NO: 278854 - DNA, 20 bp, Artificial Sequence
  Description of Artificial Sequence: Synthetic oligonucleotide
  Target: LAMA2; (-) strand; PAM type: YTN; PAM sequence: TTT
agaatgatggttcccaagaa

SEQ ID NO: 278855 - DNA, 20 bp, Artificial Sequence
  Description of Artificial Sequence: Synthetic oligonucleotide
  Target: LAMA2; (-) strand; PAM type: YTN; PAM sequence: TTT
tagaatgatggttcccaaga

SEQ ID NO: 278856 - DNA, 20 bp, Artificial Sequence
  Description of Artificial Sequence: Synthetic oligonucleotide
  Target: LAMA2; (-) strand; PAM type: YTN; PAM sequence: TTT
ttagaatgatggttcccaag

SEQ ID NO: 278857 - DNA, 20 bp, Artificial Sequence
  Description of Artificial Sequence: Synthetic oligonucleotide
  Target: LAMA2; (-) strand; PAM type: YTN; PAM sequence: TTT
tttagaatgatggttcccaa

SEQ ID NO: 278858 - DNA, 20 bp, Artificial Sequence
  Description of Artificial Sequence: Synthetic oligonucleotide
  Target: LAMA2; (-) strand; PAM type: YTN; PAM sequence: CTG
gtcaacattttttagaatga

SEQ ID NO: 278859 - DNA, 20 bp, Artificial Sequence
  Description of Artificial Sequence: Synthetic oligonucleotide
  Target: LAMA2; (-) strand; PAM type: YTN; PAM sequence: CTA
agaaaggcctggtcaacatt

SEQ ID NO: 278860 - DNA, 20 bp, Artificial Sequence
  Description of Artificial Sequence: Synthetic oligonucleotide
  Target: LAMA2; (-) strand; PAM type: YTN; PAM sequence: CTA
gaaatgcctaagaaaggcct

SEQ ID NO: 278861 - DNA, 20 bp, Artificial Sequence
  Description of Artificial Sequence: Synthetic oligonucleotide
  Target: LAMA2; (-) strand; PAM type: YTN; PAM sequence: TTC
ctagaaatgcctaagaaagg

SEQ ID NO: 278862 - DNA, 20 bp, Artificial Sequence
  Description of Artificial Sequence: Synthetic oligonucleotide
  Target: LAMA2; (-) strand; PAM type: YTN; PAM sequence: TTT
cctagaaatgcctaagaaag

SEQ ID NO: 278863 - DNA, 20 bp, Artificial Sequence
  Description of Artificial Sequence: Synthetic oligonucleotide
  Target: LAMA2; (-) strand; PAM type: YTN; PAM sequence: TTT
tcctagaaatgcctaagaaa

SEQ ID NO: 278864 - DNA, 20 bp, Artificial Sequence
  Description of Artificial Sequence: Synthetic oligonucleotide
  Target: LAMA2; (-) strand; PAM type: YTN; PAM sequence: TTT
ttcctagaaatgcctaagaa

SEQ ID NO: 278865 - DNA, 20 bp, Artificial Sequence
  Description of Artificial Sequence: Synthetic oligonucleotide
  Target: LAMA2; (-) strand; PAM type: YTN; PAM sequence: TTA
tttttcctagaaatgcctaa

SEQ ID NO: 278866 - DNA, 20 bp, Artificial Sequence
  Description of Artificial Sequence: Synthetic oligonucleotide
  Target: LAMA2; (-) strand; PAM type: YTN; PAM sequence: TTA
tattatttttcctagaaatg

SEQ ID NO: 278867 - DNA, 20 bp, Artificial Sequence
  Description of Artificial Sequence: Synthetic oligonucleotide
  Target: LAMA2; (-) strand; PAM type: YTN; PAM sequence: TTT
atattatttttcctagaaat

SEQ ID NO: 278868 - DNA, 20 bp, Artificial Sequence
  Description of Artificial Sequence: Synthetic oligonucleotide
  Target: LAMA2; (-) strand; PAM type: YTN; PAM sequence: TTT
tatattatttttcctagaaa

SEQ ID NO: 278869 - DNA, 20 bp, Artificial Sequence
  Description of Artificial Sequence: Synthetic oligonucleotide
  Target: LAMA2; (-) strand; PAM type: YTN; PAM sequence: CTG
tattttatattatttttcct

SEQ ID NO: 278870 - DNA, 20 bp, Artificial Sequence
  Description of Artificial Sequence: Synthetic oligonucleotide
  Target: LAMA2; (-) strand; PAM type: YTN; PAM sequence: TTC
tgtattttatattatttttc

SEQ ID NO: 278871 - DNA, 20 bp, Artificial Sequence
  Description of Artificial Sequence: Synthetic oligonucleotide
  Target: LAMA2; (-) strand; PAM type: YTN; PAM sequence: TTA
ttctgtattttatattattt

SEQ ID NO: 278872 - DNA, 20 bp, Artificial Sequence
  Description of Artificial Sequence: Synthetic oligonucleotide
  Target: LAMA2; (-) strand; PAM type: YTN; PAM sequence: TTT
attctgtattttatattatt

SEQ ID NO: 278873 - DNA, 20 bp, Artificial Sequence
  Description of Artificial Sequence: Synthetic oligonucleotide
  Target: LAMA2; (-) strand; PAM type: YTN; PAM sequence: CTT
tattctgtattttatattat

SEQ ID NO: 278874 - DNA, 20 bp, Artificial Sequence
  Description of Artificial Sequence: Synthetic oligonucleotide
  Target: LAMA2; (-) strand; PAM type: YTN; PAM sequence: CTC
actttattctgtattttata

SEQ ID NO: 278875 - DNA, 20 bp, Artificial Sequence
  Description of Artificial Sequence: Synthetic oligonucleotide
  Target: LAMA2; (-) strand; PAM type: YTN; PAM sequence: CTC
ccctcactttattctgtatt

SEQ ID NO: 278876 - DNA, 20 bp, Artificial Sequence
  Description of Artificial Sequence: Synthetic oligonucleotide
  Target: LAMA2; (-) strand; PAM type: YTN; PAM sequence: CTG
aactcccctcactttattct

SEQ ID NO: 278877 - DNA, 20 bp, Artificial Sequence
  Description of Artificial Sequence: Synthetic oligonucleotide
  Target: LAMA2; (-) strand; PAM type: YTN; PAM sequence: TTA
tatctgaactcccctcactt

SEQ ID NO: 278878 - DNA, 20 bp, Artificial Sequence
  Description of Artificial Sequence: Synthetic oligonucleotide
  Target: LAMA2; (-) strand; PAM type: YTN; PAM sequence: CTA
tgagaaatgcattatatctg

SEQ ID NO: 278879 - DNA, 20 bp, Artificial Sequence
  Description of Artificial Sequence: Synthetic oligonucleotide
  Target: LAMA2; (-) strand; PAM type: YTN; PAM sequence: TTC
tatgagaaatgcattatatc

SEQ ID NO: 278880 - DNA, 20 bp, Artificial Sequence
  Description of Artificial Sequence: Synthetic oligonucleotide
  Target: LAMA2; (-) strand; PAM type: YTN; PAM sequence: TTT
ctatgagaaatgcattatat

SEQ ID NO: 278881 - DNA, 20 bp, Artificial Sequence
  Description of Artificial Sequence: Synthetic oligonucleotide
  Target: LAMA2; (-) strand; PAM type: YTN; PAM sequence: TTT
tctatgagaaatgcattata

SEQ ID NO: 278882 - DNA, 20 bp, Artificial Sequence
  Description of Artificial Sequence: Synthetic oligonucleotide
  Target: LAMA2; (-) strand; PAM type: YTN; PAM sequence: TTT
ttctatgagaaatgcattat

SEQ ID NO: 278883 - DNA, 20 bp, Artificial Sequence
  Description of Artificial Sequence: Synthetic oligonucleotide
  Target: LAMA2; (-) strand; PAM type: YTN; PAM sequence: TTT
tttctatgagaaatgcatta

SEQ ID NO: 278884 - DNA, 20 bp, Artificial Sequence
  Description of Artificial Sequence: Synthetic oligonucleotide
  Target: LAMA2; (-) strand; PAM type: YTN; PAM sequence: CTA
tcattttttctatgagaaat

SEQ ID NO: 278885 - DNA, 20 bp, Artificial Sequence
  Description of Artificial Sequence: Synthetic oligonucleotide
  Target: LAMA2; (-) strand; PAM type: YTN; PAM sequence: CTA
accatcccactatcattttt

SEQ ID NO: 278886 - DNA, 20 bp, Artificial Sequence
  Description of Artificial Sequence: Synthetic oligonucleotide
  Target: LAMA2; (-) strand; PAM type: YTN; PAM sequence: TTA
ctaaccatcccactatcatt

SEQ ID NO: 278887 - DNA, 20 bp, Artificial Sequence
  Description of Artificial Sequence: Synthetic oligonucleotide
  Target: LAMA2; (-) strand; PAM type: YTN; PAM sequence: TTT
actaaccatcccactatcat

SEQ ID NO: 278888 - DNA, 20 bp, Artificial Sequence
  Description of Artificial Sequence: Synthetic oligonucleotide
  Target: LAMA2; (-) strand; PAM type: YTN; PAM sequence: CTT
tactaaccatcccactatca

SEQ ID NO: 278889 - DNA, 20 bp, Artificial Sequence
  Description of Artificial Sequence: Synthetic oligonucleotide
  Target: LAMA2; (-) strand; PAM type: YTN; PAM sequence: TTC
tttactaaccatcccactat

SEQ ID NO: 278890 - DNA, 20 bp, Artificial Sequence
  Description of Artificial Sequence: Synthetic oligonucleotide
  Target: LAMA2; (-) strand; PAM type: YTN; PAM sequence: TTA
cacagcacagttctttacta

SEQ ID NO: 278891 - DNA, 20 bp, Artificial Sequence
  Description of Artificial Sequence: Synthetic oligonucleotide
  Target: LAMA2; (-) strand; PAM type: YTN; PAM sequence: CTT
acacagcacagttctttact

SEQ ID NO: 278892 - DNA, 20 bp, Artificial Sequence
  Description of Artificial Sequence: Synthetic oligonucleotide
  Target: LAMA2; (-) strand; PAM type: YTN; PAM sequence: TTG
cttacacagcacagttcttt

SEQ ID NO: 278893 - DNA, 20 bp, Artificial Sequence
  Description of Artificial Sequence: Synthetic oligonucleotide
  Target: LAMA2; (-) strand; PAM type: YTN; PAM sequence: CTT
gcttacacagcacagttctt

SEQ ID NO: 278894 - DNA, 20 bp, Artificial Sequence
  Description of Artificial Sequence: Synthetic oligonucleotide
  Target: LAMA2; (-) strand; PAM type: YTN; PAM sequence: TTA
catcttgcttacacagcaca

SEQ ID NO: 278895 - DNA, 20 bp, Artificial Sequence
  Description of Artificial Sequence: Synthetic oligonucleotide
  Target: LAMA2; (-) strand; PAM type: YTN; PAM sequence: CTT
acatcttgcttacacagcac

SEQ ID NO: 278896 - DNA, 20 bp, Artificial Sequence
  Description of Artificial Sequence: Synthetic oligonucleotide
  Target: LAMA2; (-) strand; PAM type: YTN; PAM sequence: TTA
aagcttacatcttgcttaca

SEQ ID NO: 278897 - DNA, 20 bp, Artificial Sequence
  Description of Artificial Sequence: Synthetic oligonucleotide
  Target: LAMA2; (-) strand; PAM type: YTN; PAM sequence: TTT
aaagcttacatcttgcttac

SEQ ID NO: 278898 - DNA, 20 bp, Artificial Sequence
  Description of Artificial Sequence: Synthetic oligonucleotide
  Target: LAMA2; (-) strand; PAM type: YTN; PAM sequence: TTG
tttaaagcttacatcttgct

SEQ ID NO: 278899 - DNA, 20 bp, Artificial Sequence
  Description of Artificial Sequence: Synthetic oligonucleotide
  Target: LAMA2; (-) strand; PAM type: YTN; PAM sequence: TTT
gtttaaagcttacatcttgc

SEQ ID NO: 278900 - DNA, 20 bp, Artificial Sequence
  Description of Artificial Sequence: Synthetic oligonucleotide
  Target: LAMA2; (-) strand; PAM type: YTN; PAM sequence: CTT
tgtttaaagcttacatcttg

SEQ ID NO: 278901 - DNA, 20 bp, Artificial Sequence
  Description of Artificial Sequence: Synthetic oligonucleotide
  Target: LAMA2; (-) strand; PAM type: YTN; PAM sequence: TTC
actttgtttaaagcttacat

SEQ ID NO: 278902 - DNA, 20 bp, Artificial Sequence
  Description of Artificial Sequence: Synthetic oligonucleotide
  Target: LAMA2; (-) strand; PAM type: YTN; PAM sequence: CTT
cactttgtttaaagcttaca

SEQ ID NO: 278903 - DNA, 20 bp, Artificial Sequence
  Description of Artificial Sequence: Synthetic oligonucleotide
  Target: LAMA2; (-) strand; PAM type: YTN; PAM sequence: TTC
ttcactttgtttaaagctta

SEQ ID NO: 278904 - DNA, 20 bp, Artificial Sequence
  Description of Artificial Sequence: Synthetic oligonucleotide
  Target: LAMA2; (-) strand; PAM type: YTN; PAM sequence: TTT
cttcactttgtttaaagctt

SEQ ID NO: 278905 - DNA, 20 bp, Artificial Sequence
  Description of Artificial Sequence: Synthetic oligonucleotide
  Target: LAMA2; (-) strand; PAM type: YTN; PAM sequence: TTT
tcttcactttgtttaaagct

SEQ ID NO: 278906 - DNA, 20 bp, Artificial Sequence
  Description of Artificial Sequence: Synthetic oligonucleotide
  Target: LAMA2; (-) strand; PAM type: YTN; PAM sequence: CTT
ttcttcactttgtttaaagc

SEQ ID NO: 278907 - DNA, 20 bp, Artificial Sequence
  Description of Artificial Sequence: Synthetic oligonucleotide
  Target: LAMA2; (-) strand; PAM type: YTN; PAM sequence: CTC
cccttttcttcactttgttt

SEQ ID NO: 278908 - DNA, 20 bp, Artificial Sequence
  Description of Artificial Sequence: Synthetic oligonucleotide
  Target: LAMA2; (-) strand; PAM type: YTN; PAM sequence: TTC
tccccttttcttcactttgt

SEQ ID NO: 278909 - DNA, 20 bp, Artificial Sequence
  Description of Artificial Sequence: Synthetic oligonucleotide
  Target: LAMA2; (-) strand; PAM type: YTN; PAM sequence: CTT
ctccccttttcttcactttg

SEQ ID NO: 278910 - DNA, 20 bp, Artificial Sequence
  Description of Artificial Sequence: Synthetic oligonucleotide
  Target: LAMA2; (-) strand; PAM type: YTN; PAM sequence: CTA
ggcttctccccttttcttca

SEQ ID NO: 278911 - DNA, 20 bp, Artificial Sequence
  Description of Artificial Sequence: Synthetic oligonucleotide
  Target: LAMA2; (-) strand; PAM type: YTN; PAM sequence: TTC
taggcttctccccttttctt

SEQ ID NO: 278912 - DNA, 20 bp, Artificial Sequence
  Description of Artificial Sequence: Synthetic oligonucleotide
  Target: LAMA2; (-) strand; PAM type: YTN; PAM sequence: TTT
ctaggcttctccccttttct

SEQ ID NO: 278913 - DNA, 20 bp, Artificial Sequence
  Description of Artificial Sequence: Synthetic oligonucleotide
  Target: LAMA2; (-) strand; PAM type: YTN; PAM sequence: TTT
tctaggcttctccccttttc

SEQ ID NO: 278914 - DNA, 20 bp, Artificial Sequence
  Description of Artificial Sequence: Synthetic oligonucleotide
  Target: LAMA2; (-) strand; PAM type: YTN; PAM sequence: TTT
ttctaggcttctcccctttt

SEQ ID NO: 278915 - DNA, 20 bp, Artificial Sequence
  Description of Artificial Sequence: Synthetic oligonucleotide
  Target: LAMA2; (-) strand; PAM type: YTN; PAM sequence: TTT
tttctaggcttctccccttt

SEQ ID NO: 278916 - DNA, 20 bp, Artificial Sequence
  Description of Artificial Sequence: Synthetic oligonucleotide
  Target: LAMA2; (-) strand; PAM type: YTN; PAM sequence: TTA
ttttttctaggcttctcccc

SEQ ID NO: 278917 - DNA, 20 bp, Artificial Sequence
  Description of Artificial Sequence: Synthetic oligonucleotide
  Target: LAMA2; (-) strand; PAM type: YTN; PAM sequence: CTG
tataatgttattttttctag

SEQ ID NO: 278918 - DNA, 20 bp, Artificial Sequence
  Description of Artificial Sequence: Synthetic oligonucleotide
  Target: LAMA2; (-) strand; PAM type: YTN; PAM sequence: TTC
tgtataatgttattttttct

SEQ ID NO: 278919 - DNA, 20 bp, Artificial Sequence
  Description of Artificial Sequence: Synthetic oligonucleotide
  Target: LAMA2; (-) strand; PAM type: YTN; PAM sequence: TTT
ctgtataatgttattttttc

SEQ ID NO: 278920 - DNA, 20 bp, Artificial Sequence
  Description of Artificial Sequence: Synthetic oligonucleotide
  Target: LAMA2; (-) strand; PAM type: YTN; PAM sequence: CTT
tctgtataatgttatttttt

SEQ ID NO: 278921 - DNA, 20 bp, Artificial Sequence
  Description of Artificial Sequence: Synthetic oligonucleotide
  Target: LAMA2; (-) strand; PAM type: YTN; PAM sequence: CTC
tttctgtataatgttatttt

SEQ ID NO: 278922 - DNA, 20 bp, Artificial Sequence
  Description of Artificial Sequence: Synthetic oligonucleotide
  Target: LAMA2; (-) strand; PAM type: YTN; PAM sequence: TTC
tctttctgtataatgttatt

SEQ ID NO: 278923 - DNA, 20 bp, Artificial Sequence
  Description of Artificial Sequence: Synthetic oligonucleotide
  Target: LAMA2; (-) strand; PAM type: YTN; PAM sequence: TTA
agaatattctctttctgtat

SEQ ID NO: 278924 - DNA, 20 bp, Artificial Sequence
  Description of Artificial Sequence: Synthetic oligonucleotide
  Target: LAMA2; (-) strand; PAM type: YTN; PAM sequence: TTT
aagaatattctctttctgta

SEQ ID NO: 278925 - DNA, 20 bp, Artificial Sequence
  Description of Artificial Sequence: Synthetic oligonucleotide
  Target: LAMA2; (-) strand; PAM type: YTN; PAM sequence: TTG
acatatttaagaatattctc

SEQ ID NO: 278926 - DNA, 20 bp, Artificial Sequence
  Description of Artificial Sequence: Synthetic oligonucleotide
  Target: LAMA2; (-) strand; PAM type: YTN; PAM sequence: CTA
taagagaagttgacatattt

SEQ ID NO: 278927 - DNA, 20 bp, Artificial Sequence
  Description of Artificial Sequence: Synthetic oligonucleotide
  Target: LAMA2; (-) strand; PAM type: YTN; PAM sequence: TTG
ctataagagaagttgacata

SEQ ID NO: 278928 - DNA, 20 bp, Artificial Sequence
  Description of Artificial Sequence: Synthetic oligonucleotide
  Target: LAMA2; (-) strand; PAM type: YTN; PAM sequence: TTT
gctataagagaagttgacat

SEQ ID NO: 278929 - DNA, 20 bp, Artificial Sequence
  Description of Artificial Sequence: Synthetic oligonucleotide
  Target: LAMA2; (-) strand; PAM type: YTN; PAM sequence: CTG
ggaaatttgctataagagaa

SEQ ID NO: 278930 - DNA, 20 bp, Artificial Sequence
  Description of Artificial Sequence: Synthetic oligonucleotide
  Target: LAMA2; (-) strand; PAM type: YTN; PAM sequence: TTA
ggaatgaacactgggaaatt

SEQ ID NO: 278931 - DNA, 20 bp, Artificial Sequence
  Description of Artificial Sequence: Synthetic oligonucleotide
  Target: LAMA2; (-) strand; PAM type: YTN; PAM sequence: TTG
tattaggaatgaacactggg

SEQ ID NO: 278932 - DNA, 20 bp, Artificial Sequence
  Description of Artificial Sequence: Synthetic oligonucleotide
  Target: LAMA2; (-) strand; PAM type: YTN; PAM sequence: CTT
gtattaggaatgaacactgg

SEQ ID NO: 278933 - DNA, 20 bp, Artificial Sequence
  Description of Artificial Sequence: Synthetic oligonucleotide
  Target: LAMA2; (-) strand; PAM type: YTN; PAM sequence: CTC
cttgtattaggaatgaacac

SEQ ID NO: 278934 - DNA, 20 bp, Artificial Sequence
  Description of Artificial Sequence: Synthetic oligonucleotide
  Target: LAMA2; (-) strand; PAM type: YTN; PAM sequence: CTC
tccttgtattaggaatgaac

SEQ ID NO: 278935 - DNA, 20 bp, Artificial Sequence
  Description of Artificial Sequence: Synthetic oligonucleotide
  Target: LAMA2; (-) strand; PAM type: YTN; PAM sequence: TTA
ctctccttgtattaggaatg

SEQ ID NO: 278936 - DNA, 20 bp, Artificial Sequence
  Description of Artificial Sequence: Synthetic oligonucleotide
  Target: LAMA2; (-) strand; PAM type: YTN; PAM sequence: TTT
actctccttgtattaggaat

SEQ ID NO: 278937 - DNA, 20 bp, Artificial Sequence
  Description of Artificial Sequence: Synthetic oligonucleotide
  Target: LAMA2; (-) strand; PAM type: YTN; PAM sequence: TTT
tactctccttgtattaggaa

SEQ ID NO: 278938 - DNA, 20 bp, Artificial Sequence
  Description of Artificial Sequence: Synthetic oligonucleotide
  Target: LAMA2; (-) strand; PAM type: YTN; PAM sequence: TTT
ttactctccttgtattagga

SEQ ID NO: 278939 - DNA, 20 bp, Artificial Sequence
  Description of Artificial Sequence: Synthetic oligonucleotide
  Target: LAMA2; (-) strand; PAM type: YTN; PAM sequence: CTA
tggagtttttactctccttg

SEQ ID NO: 278940 - DNA, 20 bp, Artificial Sequence
  Description of Artificial Sequence: Synthetic oligonucleotide
  Target: LAMA2; (-) strand; PAM type: YTN; PAM sequence: TTC
tatggagtttttactctcct

SEQ ID NO: 278941 - DNA, 20 bp, Artificial Sequence
  Description of Artificial Sequence: Synthetic oligonucleotide
  Target: LAMA2; (-) strand; PAM type: YTN; PAM sequence: TTT
ctatggagtttttactctcc

SEQ ID NO: 278942 - DNA, 20 bp, Artificial Sequence
  Description of Artificial Sequence: Synthetic oligonucleotide
  Target: LAMA2; (-) strand; PAM type: YTN; PAM sequence: TTG
aggtttctatggagttttta

SEQ ID NO: 278943 - DNA, 20 bp, Artificial Sequence
  Description of Artificial Sequence: Synthetic oligonucleotide
  Target: LAMA2; (-) strand; PAM type: YTN; PAM sequence: TTT
gaggtttctatggagttttt

SEQ ID NO: 278944 - DNA, 20 bp, Artificial Sequence
  Description of Artificial Sequence: Synthetic oligonucleotide
  Target: LAMA2; (-) strand; PAM type: YTN; PAM sequence: TTT
tgaggtttctatggagtttt

SEQ ID NO: 278945 - DNA, 20 bp, Artificial Sequence
  Description of Artificial Sequence: Synthetic oligonucleotide
  Target: LAMA2; (-) strand; PAM type: YTN; PAM sequence: TTT
ttgaggtttctatggagttt

SEQ ID NO: 278946 - DNA, 20 bp, Artificial Sequence
  Description of Artificial Sequence: Synthetic oligonucleotide
  Target: LAMA2; (-) strand; PAM type: YTN; PAM sequence: CTT
tttgaggtttctatggagtt

SEQ ID NO: 278947 - DNA, 20 bp, Artificial Sequence
  Description of Artificial Sequence: Synthetic oligonucleotide
  Target: LAMA2; (-) strand; PAM type: YTN; PAM sequence: CTC
tttttgaggtttctatggag

SEQ ID NO: 278948 - DNA, 20 bp, Artificial Sequence
  Description of Artificial Sequence: Synthetic oligonucleotide
  Target: LAMA2; (-) strand; PAM type: YTN; PAM sequence: TTG
caagaaaaagctctttttga

SEQ ID NO: 278949 - DNA, 20 bp, Artificial Sequence
  Description of Artificial Sequence: Synthetic oligonucleotide
  Target: LAMA2; (-) strand; PAM type: YTN; PAM sequence: CTA
accccattgcaagaaaaagc

SEQ ID NO: 278950 - DNA, 20 bp, Artificial Sequence
  Description of Artificial Sequence: Synthetic oligonucleotide
  Target: LAMA2; (-) strand; PAM type: YTN; PAM sequence: TTA
gacacctaaccccattgcaa

SEQ ID NO: 278951 - DNA, 20 bp, Artificial Sequence
  Description of Artificial Sequence: Synthetic oligonucleotide
  Target: LAMA2; (-) strand; PAM type: YTN; PAM sequence: CTT
agacacctaaccccattgca

SEQ ID NO: 278952 - DNA, 20 bp, Artificial Sequence
  Description of Artificial Sequence: Synthetic oligonucleotide
  Target: LAMA2; (-) strand; PAM type: YTN; PAM sequence: TTC
cttagacacctaaccccatt

SEQ ID NO: 278953 - DNA, 20 bp, Artificial Sequence
  Description of Artificial Sequence: Synthetic oligonucleotide
  Target: LAMA2; (-) strand; PAM type: YTN; PAM sequence: TTA
ttccttagacacctaacccc

SEQ ID NO: 278954 - DNA, 20 bp, Artificial Sequence
  Description of Artificial Sequence: Synthetic oligonucleotide
  Target: LAMA2; (-) strand; PAM type: YTN; PAM sequence: TTT
attccttagacacctaaccc

SEQ ID NO: 278955 - DNA, 20 bp, Artificial Sequence
  Description of Artificial Sequence: Synthetic oligonucleotide
  Target: LAMA2; (-) strand; PAM type: YTN; PAM sequence: CTG
tttattccttagacacctaa

SEQ ID NO: 278956 - DNA, 20 bp, Artificial Sequence
  Description of Artificial Sequence: Synthetic oligonucleotide
  Target: LAMA2; (-) strand; PAM type: YTN; PAM sequence: TTC
aaaagtcctgtttattcctt

SEQ ID NO: 278957 - DNA, 20 bp, Artificial Sequence
  Description of Artificial Sequence: Synthetic oligonucleotide
  Target: LAMA2; (-) strand; PAM type: YTN; PAM sequence: TTT
caaaagtcctgtttattcct

SEQ ID NO: 278958 - DNA, 20 bp, Artificial Sequence
  Description of Artificial Sequence: Synthetic oligonucleotide
  Target: LAMA2; (-) strand; PAM type: YTN; PAM sequence: CTG
tcacataagagtaaagtttc

SEQ ID NO: 278959 - DNA, 20 bp, Artificial Sequence
  Description of Artificial Sequence: Synthetic oligonucleotide
  Target: LAMA2; (-) strand; PAM type: YTN; PAM sequence: CTG
atctgtcacataagagtaaa

SEQ ID NO: 278960 - DNA, 20 bp, Artificial Sequence
  Description of Artificial Sequence: Synthetic oligonucleotide
  Target: LAMA2; (-) strand; PAM type: YTN; PAM sequence: CTC
actgatctgtcacataagag

SEQ ID NO: 278961 - DNA, 20 bp, Artificial Sequence
  Description of Artificial Sequence: Synthetic oligonucleotide
  Target: LAMA2; (-) strand; PAM type: YTN; PAM sequence: CTC
ctcactgatctgtcacataa

SEQ ID NO: 278962 - DNA, 20 bp, Artificial Sequence
  Description of Artificial Sequence: Synthetic oligonucleotide
  Target: LAMA2; (-) strand; PAM type: YTN; PAM sequence: TTC
ctcctcactgatctgtcaca

SEQ ID NO: 278963 - DNA, 20 bp, Artificial Sequence
  Description of Artificial Sequence: Synthetic oligonucleotide
  Target: LAMA2; (-) strand; PAM type: YTN; PAM sequence: TTT
cctcctcactgatctgtcac

SEQ ID NO: 278964 - DNA, 20 bp, Artificial Sequence
  Description of Artificial Sequence: Synthetic oligonucleotide
  Target: LAMA2; (-) strand; PAM type: YTN; PAM sequence: TTA
tcagcgtgtttcctcctcac

SEQ ID NO: 278965 - DNA, 20 bp, Artificial Sequence
  Description of Artificial Sequence: Synthetic oligonucleotide
  Target: LAMA2; (-) strand; PAM type: YTN; PAM sequence: CTT
atcagcgtgtttcctcctca

SEQ ID NO: 278966 - DNA, 20 bp, Artificial Sequence
  Description of Artificial Sequence: Synthetic oligonucleotide
  Target: LAMA2; (-) strand; PAM type: YTN; PAM sequence: TTC
ttatcagcgtgtttcctcct

SEQ ID NO: 278967 - DNA, 20 bp, Artificial Sequence
  Description of Artificial Sequence: Synthetic oligonucleotide
  Target: LAMA2; (-) strand; PAM type: YTN; PAM sequence: CTT
cttatcagcgtgtttcctcc

SEQ ID NO: 278968 - DNA, 20 bp, Artificial Sequence
  Description of Artificial Sequence: Synthetic oligonucleotide
  Target: LAMA2; (-) strand; PAM type: YTN; PAM sequence: TTC
agtgcttcttatcagcgtgt

SEQ ID NO: 278969 - DNA, 20 bp, Artificial Sequence
  Description of Artificial Sequence: Synthetic oligonucleotide
  Target: LAMA2; (-) strand; PAM type: YTN; PAM sequence: TTG
tagtagttcagtgcttctta

SEQ ID NO: 278970 - DNA, 20 bp, Artificial Sequence
  Description of Artificial Sequence: Synthetic oligonucleotide
  Target: LAMA2; (-) strand; PAM type: YTN; PAM sequence: TTT
gtagtagttcagtgcttctt

SEQ ID NO: 278971 - DNA, 20 bp, Artificial Sequence
  Description of Artificial Sequence: Synthetic oligonucleotide
  Target: LAMA2; (-) strand; PAM type: YTN; PAM sequence: TTA
tagcaaatgaagcgtatttg

SEQ ID NO: 278972 - DNA, 20 bp, Artificial Sequence
  Description of Artificial Sequence: Synthetic oligonucleotide
  Target: LAMA2; (-) strand; PAM type: YTN; PAM sequence: TTT
atagcaaatgaagcgtattt

SEQ ID NO: 278973 - DNA, 20 bp, Artificial Sequence
  Description of Artificial Sequence: Synthetic oligonucleotide
  Target: LAMA2; (-) strand; PAM type: YTN; PAM sequence: TTC
agtgaatgaagtgtatttat

SEQ ID NO: 278974 - DNA, 20 bp, Artificial Sequence
  Description of Artificial Sequence: Synthetic oligonucleotide
  Target: LAMA2; (-) strand; PAM type: YTN; PAM sequence: TTA
tagttcagtgaatgaagtgt

SEQ ID NO: 278975 - DNA, 20 bp, Artificial Sequence
  Description of Artificial Sequence: Synthetic oligonucleotide
  Target: LAMA2; (-) strand; PAM type: YTN; PAM sequence: TTA
ttatagttcagtgaatgaag

SEQ ID NO: 278976 - DNA, 20 bp, Artificial Sequence
  Description of Artificial Sequence: Synthetic oligonucleotide
  Target: LAMA2; (-) strand; PAM type: YTN; PAM sequence: TTT
attatagttcagtgaatgaa

SEQ ID NO: 278977 - DNA, 20 bp, Artificial Sequence
  Description of Artificial Sequence: Synthetic oligonucleotide
  Target: LAMA2; (-) strand; PAM type: YTN; PAM sequence: TTT
tattatagttcagtgaatga

SEQ ID NO: 278978 - DNA, 20 bp, Artificial Sequence
  Description of Artificial Sequence: Synthetic oligonucleotide
  Target: LAMA2; (-) strand; PAM type: YTN; PAM sequence: TTG
aagtgaattttattatagtt

SEQ ID NO: 278979 - DNA, 20 bp, Artificial Sequence
  Description of Artificial Sequence: Synthetic oligonucleotide
  Target: LAMA2; (-) strand; PAM type: YTN; PAM sequence: TTT
gaagtgaattttattatagt

SEQ ID NO: 278980 - DNA, 20 bp, Artificial Sequence
  Description of Artificial Sequence: Synthetic oligonucleotide
  Target: LAMA2; (-) strand; PAM type: YTN; PAM sequence: TTT
tgaagtgaattttattatag

SEQ ID NO: 278981 - DNA, 20 bp, Artificial Sequence
  Description of Artificial Sequence: Synthetic oligonucleotide
  Target: LAMA2; (-) strand; PAM type: YTN; PAM sequence: CTT
ttgaagtgaattttattata

SEQ ID NO: 278982 - DNA, 20 bp, Artificial Sequence
  Description of Artificial Sequence: Synthetic oligonucleotide
  Target: LAMA2; (-) strand; PAM type: YTN; PAM sequence: TTC
cttttgaagtgaattttatt

SEQ ID NO: 278983 - DNA, 20 bp, Artificial Sequence
  Description of Artificial Sequence: Synthetic oligonucleotide
  Target: LAMA2; (-) strand; PAM type: YTN; PAM sequence: TTC
acattccttttgaagtgaat

SEQ ID NO: 278984 - DNA, 20 bp, Artificial Sequence
  Description of Artificial Sequence: Synthetic oligonucleotide
  Target: LAMA2; (-) strand; PAM type: YTN; PAM sequence: TTG
ttcacattccttttgaagtg

SEQ ID NO: 278985 - DNA, 20 bp, Artificial Sequence
  Description of Artificial Sequence: Synthetic oligonucleotide
  Target: LAMA2; (-) strand; PAM type: YTN; PAM sequence: TTT
gttcacattccttttgaagt

SEQ ID NO: 278986 - DNA, 20 bp, Artificial Sequence
  Description of Artificial Sequence: Synthetic oligonucleotide
  Target: LAMA2; (-) strand; PAM type: YTN; PAM sequence: TTT
tgttcacattccttttgaag

SEQ ID NO: 278987 - DNA, 20 bp, Artificial Sequence
  Description of Artificial Sequence: Synthetic oligonucleotide
  Target: LAMA2; (-) strand; PAM type: YTN; PAM sequence: TTC
attttgttcacattcctttt

SEQ ID NO: 278988 - DNA, 20 bp, Artificial Sequence
  Description of Artificial Sequence: Synthetic oligonucleotide
  Target: LAMA2; (-) strand; PAM type: YTN; PAM sequence: TTT
cattttgttcacattccttt

SEQ ID NO: 278989 - DNA, 20 bp, Artificial Sequence
  Description of Artificial Sequence: Synthetic oligonucleotide
  Target: LAMA2; (-) strand; PAM type: YTN; PAM sequence: CTT
tcattttgttcacattcctt

SEQ ID NO: 278990 - DNA, 20 bp, Artificial Sequence
  Description of Artificial Sequence: Synthetic oligonucleotide
  Target: LAMA2; (-) strand; PAM type: YTN; PAM sequence: TTC
tttcattttgttcacattcc

SEQ ID NO: 278991 - DNA, 20 bp, Artificial Sequence
  Description of Artificial Sequence: Synthetic oligonucleotide
  Target: LAMA2; (-) strand; PAM type: YTN; PAM sequence: TTA
tatccaagttctttcatttt

SEQ ID NO: 278992 - DNA, 20 bp, Artificial Sequence
  Description of Artificial Sequence: Synthetic oligonucleotide
  Target: LAMA2; (-) strand; PAM type: YTN; PAM sequence: TTT
atatccaagttctttcattt

SEQ ID NO: 278993 - DNA, 20 bp, Artificial Sequence
  Description of Artificial Sequence: Synthetic oligonucleotide
  Target: LAMA2; (-) strand; PAM type: YTN; PAM sequence: CTT
tatatccaagttctttcatt

SEQ ID NO: 278994 - DNA, 20 bp, Artificial Sequence
  Description of Artificial Sequence: Synthetic oligonucleotide
  Target: LAMA2; (-) strand; PAM type: YTN; PAM sequence: TTG
cccctttatatccaagttct

SEQ ID NO: 278995 - DNA, 20 bp, Artificial Sequence
  Description of Artificial Sequence: Synthetic oligonucleotide
  Target: LAMA2; (-) strand; PAM type: YTN; PAM sequence: TTT
gcccctttatatccaagttc

SEQ ID NO: 278996 - DNA, 20 bp, Artificial Sequence
  Description of Artificial Sequence: Synthetic oligonucleotide
  Target: LAMA2; (-) strand; PAM type: YTN; PAM sequence: TTT
tgcccctttatatccaagtt

SEQ ID NO: 278997 - DNA, 20 bp, Artificial Sequence
  Description of Artificial Sequence: Synthetic oligonucleotide
  Target: LAMA2; (-) strand; PAM type: YTN; PAM sequence: CTT
ttgcccctttatatccaagt

SEQ ID NO: 278998 - DNA, 20 bp, Artificial Sequence
  Description of Artificial Sequence: Synthetic oligonucleotide
  Target: LAMA2; (-) strand; PAM type: YTN; PAM sequence: TTC
acttttgcccctttatatcc

SEQ ID NO: 278999 - DNA, 20 bp, Artificial Sequence
  Description of Artificial Sequence: Synthetic oligonucleotide
  Target: LAMA2; (-) strand; PAM type: YTN; PAM sequence: TTG
ttcacttttgcccctttata

SEQ ID NO: 279000 - DNA, 20 bp, Artificial Sequence
  Description of Artificial Sequence: Synthetic oligonucleotide
  Target: LAMA2; (-) strand; PAM type: YTN; PAM sequence: TTT
gttcacttttgcccctttat

SEQ ID NO: 279001 - DNA, 20 bp, Artificial Sequence
  Description of Artificial Sequence: Synthetic oligonucleotide
  Target: LAMA2; (-) strand; PAM type: YTN; PAM sequence: TTT
tgttcacttttgccccttta

SEQ ID NO: 279002 - DNA, 20 bp, Artificial Sequence
  Description of Artificial Sequence: Synthetic oligonucleotide
  Target: LAMA2; (-) strand; PAM type: YTN; PAM sequence: TTT
ttgttcacttttgccccttt

SEQ ID NO: 279003 - DNA, 20 bp, Artificial Sequence
  Description of Artificial Sequence: Synthetic oligonucleotide
  Target: LAMA2; (-) strand; PAM type: YTN; PAM sequence: CTT
tttgttcacttttgcccctt

SEQ ID NO: 279004 - DNA, 20 bp, Artificial Sequence
  Description of Artificial Sequence: Synthetic oligonucleotide
  Target: LAMA2; (-) strand; PAM type: YTN; PAM sequence: CTA
tctttttgttcacttttgcc

SEQ ID NO: 279005 - DNA, 20 bp, Artificial Sequence
  Description of Artificial Sequence: Synthetic oligonucleotide
  Target: LAMA2; (-) strand; PAM type: YTN; PAM sequence: TTC
tatctttttgttcacttttg

SEQ ID NO: 279006 - DNA, 20 bp, Artificial Sequence
  Description of Artificial Sequence: Synthetic oligonucleotide
  Target: LAMA2; (-) strand; PAM type: YTN; PAM sequence: TTT
ctatctttttgttcactttt

SEQ ID NO: 279007 - DNA, 20 bp, Artificial Sequence
  Description of Artificial Sequence: Synthetic oligonucleotide
  Target: LAMA2; (-) strand; PAM type: YTN; PAM sequence: TTT
tctatctttttgttcacttt

SEQ ID NO: 279008 - DNA, 20 bp, Artificial Sequence
  Description of Artificial Sequence: Synthetic oligonucleotide
  Target: LAMA2; (-) strand; PAM type: YTN; PAM sequence: TTG
tacacattttctatcttttt

SEQ ID NO: 279009 - DNA, 20 bp, Artificial Sequence
  Description of Artificial Sequence: Synthetic oligonucleotide
  Target: LAMA2; (-) strand; PAM type: YTN; PAM sequence: TTT
gtacacattttctatctttt

SEQ ID NO: 279010 - DNA, 20 bp, Artificial Sequence
  Description of Artificial Sequence: Synthetic oligonucleotide
  Target: LAMA2; (-) strand; PAM type: YTN; PAM sequence: TTA
gatttgtacacattttctat

SEQ ID NO: 279011 - DNA, 20 bp, Artificial Sequence
  Description of Artificial Sequence: Synthetic oligonucleotide
  Target: LAMA2; (-) strand; PAM type: YTN; PAM sequence: CTT
agatttgtacacattttcta

SEQ ID NO: 279012 - DNA, 20 bp, Artificial Sequence
  Description of Artificial Sequence: Synthetic oligonucleotide
  Target: LAMA2; (-) strand; PAM type: YTN; PAM sequence: TTA
cttagatttgtacacatttt

SEQ ID NO: 279013 - DNA, 20 bp, Artificial Sequence
  Description of Artificial Sequence: Synthetic oligonucleotide
  Target: LAMA2; (-) strand; PAM type: YTN; PAM sequence: CTT
acttagatttgtacacattt

SEQ ID NO: 279014 - DNA, 20 bp, Artificial Sequence
  Description of Artificial Sequence: Synthetic oligonucleotide
  Target: LAMA2; (-) strand; PAM type: YTN; PAM sequence: TTC
cataatgcttacttagattt

SEQ ID NO: 279015 - DNA, 20 bp, Artificial Sequence
  Description of Artificial Sequence: Synthetic oligonucleotide
  Target: LAMA2; (-) strand; PAM type: YTN; PAM sequence: TTT
ccataatgcttacttagatt

SEQ ID NO: 279016 - DNA, 20 bp, Artificial Sequence
  Description of Artificial Sequence: Synthetic oligonucleotide
  Target: LAMA2; (-) strand; PAM type: YTN; PAM sequence: CTT
tccataatgcttacttagat

SEQ ID NO: 279017 - DNA, 20 bp, Artificial Sequence
  Description of Artificial Sequence: Synthetic oligonucleotide
  Target: LAMA2; (-) strand; PAM type: YTN; PAM sequence: TTA
tgctttccataatgcttact

SEQ ID NO: 279018 - DNA, 20 bp, Artificial Sequence
  Description of Artificial Sequence: Synthetic oligonucleotide
  Target: LAMA2; (-) strand; PAM type: YTN; PAM sequence: TTA
tcattatgctttccataatg

SEQ ID NO: 279019 - DNA, 20 bp, Artificial Sequence
  Description of Artificial Sequence: Synthetic oligonucleotide
  Target: LAMA2; (-) strand; PAM type: YTN; PAM sequence: TTA
ttatcattatgctttccata

SEQ ID NO: 279020 - DNA, 20 bp, Artificial Sequence
  Description of Artificial Sequence: Synthetic oligonucleotide
  Target: LAMA2; (-) strand; PAM type: YTN; PAM sequence: TTA
ataattattatcattatgct

SEQ ID NO: 279021 - DNA, 20 bp, Artificial Sequence
  Description of Artificial Sequence: Synthetic oligonucleotide
  Target: LAMA2; (-) strand; PAM type: YTN; PAM sequence: TTT
aataattattatcattatgc

SEQ ID NO: 279022 - DNA, 20 bp, Artificial Sequence
  Description of Artificial Sequence: Synthetic oligonucleotide
  Target: LAMA2; (-) strand; PAM type: YTN; PAM sequence: TTC
cacatatttaataattatta

SEQ ID NO: 279023 - DNA, 20 bp, Artificial Sequence
  Description of Artificial Sequence: Synthetic oligonucleotide
  Target: LAMA2; (-) strand; PAM type: YTN; PAM sequence: TTA
attccacatatttaataatt

SEQ ID NO: 279024 - DNA, 20 bp, Artificial Sequence
  Description of Artificial Sequence: Synthetic oligonucleotide
  Target: LAMA2; (-) strand; PAM type: YTN; PAM sequence: TTT
aattccacatatttaataat

SEQ ID NO: 279025 - DNA, 20 bp, Artificial Sequence
  Description of Artificial Sequence: Synthetic oligonucleotide
  Target: LAMA2; (-) strand; PAM type: YTN; PAM sequence: TTT
taattccacatatttaataa

SEQ ID NO: 279026 - DNA, 20 bp, Artificial Sequence
  Description of Artificial Sequence: Synthetic oligonucleotide
  Target: LAMA2; (-) strand; PAM type: YTN; PAM sequence: TTT
ttaattccacatatttaata

SEQ ID NO: 279027 - DNA, 20 bp, Artificial Sequence
  Description of Artificial Sequence: Synthetic oligonucleotide
  Target: LAMA2; (-) strand; PAM type: YTN; PAM sequence: TTG
tttttaattccacatattta

SEQ ID NO: 279028 - DNA, 20 bp, Artificial Sequence
  Description of Artificial Sequence: Synthetic oligonucleotide
  Target: LAMA2; (-) strand; PAM type: YTN; PAM sequence: TTT
gtttttaattccacatattt

SEQ ID NO: 279029 - DNA, 20 bp, Artificial Sequence
  Description of Artificial Sequence: Synthetic oligonucleotide
  Target: LAMA2; (-) strand; PAM type: YTN; PAM sequence: CTT
tgtttttaattccacatatt

SEQ ID NO: 279030 - DNA, 20 bp, Artificial Sequence
  Description of Artificial Sequence: Synthetic oligonucleotide
  Target: LAMA2; (-) strand; PAM type: YTN; PAM sequence: TTC
cactttgtttttaattccac

SEQ ID NO: 279031 - DNA, 20 bp, Artificial Sequence
  Description of Artificial Sequence: Synthetic oligonucleotide
  Target: LAMA2; (-) strand; PAM type: YTN; PAM sequence: TTA
gttccactttgtttttaatt

SEQ ID NO: 279032 - DNA, 20 bp, Artificial Sequence
  Description of Artificial Sequence: Synthetic oligonucleotide
  Target: LAMA2; (-) strand; PAM type: YTN; PAM sequence: TTT
agttccactttgtttttaat

SEQ ID NO: 279033 - DNA, 20 bp, Artificial Sequence
  Description of Artificial Sequence: Synthetic oligonucleotide
  Target: LAMA2; (-) strand; PAM type: YTN; PAM sequence: TTT
tagttccactttgtttttaa

SEQ ID NO: 279034 - DNA, 20 bp, Artificial Sequence
  Description of Artificial Sequence: Synthetic oligonucleotide
  Target: LAMA2; (-) strand; PAM type: YTN; PAM sequence: TTG
tgttttagttccactttgtt

SEQ ID NO: 279035 - DNA, 20 bp, Artificial Sequence
  Description of Artificial Sequence: Synthetic oligonucleotide
  Target: LAMA2; (-) strand; PAM type: YTN; PAM sequence: CTT
gtgttttagttccactttgt

SEQ ID NO: 279036 - DNA, 20 bp, Artificial Sequence
  Description of Artificial Sequence: Synthetic oligonucleotide
  Target: LAMA2; (-) strand; PAM type: YTN; PAM sequence: CTC
ttgtgttttagttccacttt

SEQ ID NO: 279037 - DNA, 20 bp, Artificial Sequence
  Description of Artificial Sequence: Synthetic oligonucleotide
  Target: LAMA2; (-) strand; PAM type: YTN; PAM sequence: TTA
gtctcttgtgttttagttcc

SEQ ID NO: 279038 - DNA, 20 bp, Artificial Sequence
  Description of Artificial Sequence: Synthetic oligonucleotide
  Target: LAMA2; (-) strand; PAM type: YTN; PAM sequence: TTA
ttagtctcttgtgttttagt

SEQ ID NO: 279039 - DNA, 20 bp, Artificial Sequence
  Description of Artificial Sequence: Synthetic oligonucleotide
  Target: LAMA2; (-) strand; PAM type: YTN; PAM sequence: TTT
attagtctcttgtgttttag

SEQ ID NO: 279040 - DNA, 20 bp, Artificial Sequence
  Description of Artificial Sequence: Synthetic oligonucleotide
  Target: LAMA2; (-) strand; PAM type: YTN; PAM sequence: TTT
tattagtctcttgtgtttta

SEQ ID NO: 279041 - DNA, 20 bp, Artificial Sequence
  Description of Artificial Sequence: Synthetic oligonucleotide
  Target: LAMA2; (-) strand; PAM type: YTN; PAM sequence: TTC
cattttattagtctcttgtg

SEQ ID NO: 279042 - DNA, 20 bp, Artificial Sequence
  Description of Artificial Sequence: Synthetic oligonucleotide
  Target: LAMA2; (-) strand; PAM type: YTN; PAM sequence: TTT
ccattttattagtctcttgt

SEQ ID NO: 279043 - DNA, 20 bp, Artificial Sequence
  Description of Artificial Sequence: Synthetic oligonucleotide
  Target: LAMA2; (-) strand; PAM type: YTN; PAM sequence: TTT
tccattttattagtctcttg

SEQ ID NO: 279044 - DNA, 20 bp, Artificial Sequence
  Description of Artificial Sequence: Synthetic oligonucleotide
  Target: LAMA2; (-) strand; PAM type: YTN; PAM sequence: CTG
ccccattttccattttatta

SEQ ID NO: 279045 - DNA, 20 bp, Artificial Sequence
  Description of Artificial Sequence: Synthetic oligonucleotide
  Target: LAMA2; (-) strand; PAM type: YTN; PAM sequence: CTA
cctgccccattttccatttt

SEQ ID NO: 279046 - DNA, 20 bp, Artificial Sequence
  Description of Artificial Sequence: Synthetic oligonucleotide
  Target: LAMA2; (-) strand; PAM type: YTN; PAM sequence: CTG
actacctgccccattttcca

SEQ ID NO: 279047 - DNA, 20 bp, Artificial Sequence
  Description of Artificial Sequence: Synthetic oligonucleotide
  Target: LAMA2; (-) strand; PAM type: YTN; PAM sequence: TTA
aataactgactacctgcccc

SEQ ID NO: 279048 - DNA, 20 bp, Artificial Sequence
  Description of Artificial Sequence: Synthetic oligonucleotide
  Target: LAMA2; (-) strand; PAM type: YTN; PAM sequence: TTA
ttaaataactgactacctgc

SEQ ID NO: 279049 - DNA, 20 bp, Artificial Sequence
  Description of Artificial Sequence: Synthetic oligonucleotide
  Target: LAMA2; (-) strand; PAM type: YTN; PAM sequence: TTT
attaaataactgactacctg

SEQ ID NO: 279050 - DNA, 20 bp, Artificial Sequence
  Description of Artificial Sequence: Synthetic oligonucleotide
  Target: LAMA2; (-) strand; PAM type: YTN; PAM sequence: TTT
tattaaataactgactacct

SEQ ID NO: 279051 - DNA, 20 bp, Artificial Sequence
  Description of Artificial Sequence: Synthetic oligonucleotide
  Target: LAMA2; (-) strand; PAM type: YTN; PAM sequence: CTT
ttattaaataactgactacc

SEQ ID NO: 279052 - DNA, 20 bp, Artificial Sequence
  Description of Artificial Sequence: Synthetic oligonucleotide
  Target: LAMA2; (-) strand; PAM type: YTN; PAM sequence: TTA
aaaacttttattaaataact

SEQ ID NO: 279053 - DNA, 20 bp, Artificial Sequence
  Description of Artificial Sequence: Synthetic oligonucleotide
  Target: LAMA2; (-) strand; PAM type: YTN; PAM sequence: TTC
aagaatattaaaaactttta

SEQ ID NO: 279054 - DNA, 20 bp, Artificial Sequence
  Description of Artificial Sequence: Synthetic oligonucleotide
  Target: LAMA2; (-) strand; PAM type: YTN; PAM sequence: CTC
cccagaattcaagaatatta

SEQ ID NO: 279055 - DNA, 20 bp, Artificial Sequence
  Description of Artificial Sequence: Synthetic oligonucleotide
  Target: LAMA2; (-) strand; PAM type: YTN; PAM sequence: TTC
ctccccagaattcaagaata

SEQ ID NO: 279056 - DNA, 20 bp, Artificial Sequence
  Description of Artificial Sequence: Synthetic oligonucleotide
  Target: LAMA2; (-) strand; PAM type: YTN; PAM sequence: TTT
cctccccagaattcaagaat

SEQ ID NO: 279057 - DNA, 20 bp, Artificial Sequence
  Description of Artificial Sequence: Synthetic oligonucleotide
  Target: LAMA2; (-) strand; PAM type: YTN; PAM sequence: CTT
tcctccccagaattcaagaa

SEQ ID NO: 279058 - DNA, 20 bp, Artificial Sequence
  Description of Artificial Sequence: Synthetic oligonucleotide
  Target: LAMA2; (-) strand; PAM type: YTN; PAM sequence: TTG
ctttcctccccagaattcaa

SEQ ID NO: 279059 - DNA, 20 bp, Artificial Sequence
  Description of Artificial Sequence: Synthetic oligonucleotide
  Target: LAMA2; (-) strand; PAM type: YTN; PAM sequence: TTT
gctttcctccccagaattca

SEQ ID NO: 279060 - DNA, 20 bp, Artificial Sequence
  Description of Artificial Sequence: Synthetic oligonucleotide
  Target: LAMA2; (-) strand; PAM type: YTN; PAM sequence: TTT
tgctttcctccccagaattc

SEQ ID NO: 279061 - DNA, 20 bp, Artificial Sequence
  Description of Artificial Sequence: Synthetic oligonucleotide
  Target: LAMA2; (-) strand; PAM type: YTN; PAM sequence: TTT
ttgctttcctccccagaatt

SEQ ID NO: 279062 - DNA, 20 bp, Artificial Sequence
  Description of Artificial Sequence: Synthetic oligonucleotide
  Target: LAMA2; (-) strand; PAM type: YTN; PAM sequence: CTT
tttgctttcctccccagaat

SEQ ID NO: 279063 - DNA, 20 bp, Artificial Sequence
  Description of Artificial Sequence: Synthetic oligonucleotide
  Target: LAMA2; (-) strand; PAM type: YTN; PAM sequence: TTA
gctttttgctttcctcccca

SEQ ID NO: 279064 - DNA, 20 bp, Artificial Sequence
  Description of Artificial Sequence: Synthetic oligonucleotide
  Target: LAMA2; (-) strand; PAM type: YTN; PAM sequence: TTA
attagctttttgctttcctc

SEQ ID NO: 279065 - DNA, 20 bp, Artificial Sequence
  Description of Artificial Sequence: Synthetic oligonucleotide
  Target: LAMA2; (-) strand; PAM type: YTN; PAM sequence: CTA
aagttaattagctttttgct

SEQ ID NO: 279066 - DNA, 20 bp, Artificial Sequence
  Description of Artificial Sequence: Synthetic oligonucleotide
  Target: LAMA2; (-) strand; PAM type: YTN; PAM sequence: TTA
gtgaaaactaaagttaatta

SEQ ID NO: 279067 - DNA, 20 bp, Artificial Sequence
  Description of Artificial Sequence: Synthetic oligonucleotide
  Target: LAMA2; (-) strand; PAM type: YTN; PAM sequence: CTT
agtgaaaactaaagttaatt

SEQ ID NO: 279068 - DNA, 20 bp, Artificial Sequence
  Description of Artificial Sequence: Synthetic oligonucleotide
  Target: LAMA2; (-) strand; PAM type: YTN; PAM sequence: TTC
ttagtgaaaactaaagttaa

SEQ ID NO: 279069 - DNA, 20 bp, Artificial Sequence
  Description of Artificial Sequence: Synthetic oligonucleotide
  Target: LAMA2; (-) strand; PAM type: YTN; PAM sequence: TTA
atacatattcttagtgaaaa

SEQ ID NO: 279070 - DNA, 20 bp, Artificial Sequence
  Description of Artificial Sequence: Synthetic oligonucleotide
  Target: LAMA2; (-) strand; PAM type: YTN; PAM sequence: TTT
aatacatattcttagtgaaa

SEQ ID NO: 279071 - DNA, 20 bp, Artificial Sequence
  Description of Artificial Sequence: Synthetic oligonucleotide
  Target: LAMA2; (-) strand; PAM type: YTN; PAM sequence: TTC
aatgtttaatacatattctt

SEQ ID NO: 279072 - DNA, 20 bp, Artificial Sequence
  Description of Artificial Sequence: Synthetic oligonucleotide
  Target: LAMA2; (-) strand; PAM type: YTN; PAM sequence: TTT
caatgtttaatacatattct

SEQ ID NO: 279073 - DNA, 20 bp, Artificial Sequence
  Description of Artificial Sequence: Synthetic oligonucleotide
  Target: LAMA2; (-) strand; PAM type: YTN; PAM sequence: TTT
tcaatgtttaatacatattc

SEQ ID NO: 279074 - DNA, 20 bp, Artificial Sequence
  Description of Artificial Sequence: Synthetic oligonucleotide
  Target: LAMA2; (-) strand; PAM type: YTN; PAM sequence: TTT
ttcaatgtttaatacatatt

SEQ ID NO: 279075 - DNA, 20 bp, Artificial Sequence
  Description of Artificial Sequence: Synthetic oligonucleotide
  Target: LAMA2; (-) strand; PAM type: YTN; PAM sequence: TTT
tttcaatgtttaatacatat

SEQ ID NO: 279076 - DNA, 20 bp, Artificial Sequence
  Description of Artificial Sequence: Synthetic oligonucleotide
  Target: LAMA2; (-) strand; PAM type: YTN; PAM sequence: TTT
ttttcaatgtttaatacata

SEQ ID NO: 279077 - DNA, 20 bp, Artificial Sequence
  Description of Artificial Sequence: Synthetic oligonucleotide
  Target: LAMA2; (-) strand; PAM type: YTN; PAM sequence: TTT
tttttcaatgtttaatacat

SEQ ID NO: 279078 - DNA, 20 bp, Artificial Sequence
  Description of Artificial Sequence: Synthetic oligonucleotide
  Target: LAMA2; (-) strand; PAM type: YTN; PAM sequence: TTC
cagattttttttcaatgttt

SEQ ID NO: 279079 - DNA, 20 bp, Artificial Sequence
  Description of Artificial Sequence: Synthetic oligonucleotide
  Target: LAMA2; (-) strand; PAM type: YTN; PAM sequence: TTT
ccagattttttttcaatgtt

SEQ ID NO: 279080 - DNA, 20 bp, Artificial Sequence
  Description of Artificial Sequence: Synthetic oligonucleotide
  Target: LAMA2; (-) strand; PAM type: YTN; PAM sequence: TTT
tccagattttttttcaatgt

SEQ ID NO: 279081 - DNA, 20 bp, Artificial Sequence
  Description of Artificial Sequence: Synthetic oligonucleotide
  Target: LAMA2; (-) strand; PAM type: YTN; PAM sequence: TTT
ttccagattttttttcaatg

SEQ ID NO: 279082 - DNA, 20 bp, Artificial Sequence
  Description of Artificial Sequence: Synthetic oligonucleotide
  Target: LAMA2; (-) strand; PAM type: YTN; PAM sequence: TTA
tttttccagattttttttca

SEQ ID NO: 279083 - DNA, 20 bp, Artificial Sequence
  Description of Artificial Sequence: Synthetic oligonucleotide
  Target: LAMA2; (-) strand; PAM type: YTN; PAM sequence: TTT
atttttccagattttttttc

SEQ ID NO: 279084 - DNA, 20 bp, Artificial Sequence
  Description of Artificial Sequence: Synthetic oligonucleotide
  Target: LAMA2; (-) strand; PAM type: YTN; PAM sequence: TTT
tatttttccagatttttttt

SEQ ID NO: 279085 - DNA, 20 bp, Artificial Sequence
  Description of Artificial Sequence: Synthetic oligonucleotide
  Target: LAMA2; (-) strand; PAM type: YTN; PAM sequence: TTG
tcaattttatttttccagat

SEQ ID NO: 279086 - DNA, 20 bp, Artificial Sequence
  Description of Artificial Sequence: Synthetic oligonucleotide
  Target: LAMA2; (-) strand; PAM type: YTN; PAM sequence: CTC
gaatattgtcaattttattt

SEQ ID NO: 279087 - DNA, 20 bp, Artificial Sequence
  Description of Artificial Sequence: Synthetic oligonucleotide
  Target: LAMA2; (-) strand; PAM type: YTN; PAM sequence: CTG
gagaactcgaatattgtcaa

SEQ ID NO: 279088 - DNA, 20 bp, Artificial Sequence
  Description of Artificial Sequence: Synthetic oligonucleotide
  Target: LAMA2; (-) strand; PAM type: YTN; PAM sequence: CTC
tggagaactcgaatattgtc

SEQ ID NO: 279089 - DNA, 20 bp, Artificial Sequence
  Description of Artificial Sequence: Synthetic oligonucleotide
  Target: LAMA2; (-) strand; PAM type: YTN; PAM sequence: TTC
tctggagaactcgaatattg

SEQ ID NO: 279090 - DNA, 20 bp, Artificial Sequence
  Description of Artificial Sequence: Synthetic oligonucleotide
  Target: LAMA2; (-) strand; PAM type: YTN; PAM sequence: TTT
ctctggagaactcgaatatt

SEQ ID NO: 279091 - DNA, 20 bp, Artificial Sequence
  Description of Artificial Sequence: Synthetic oligonucleotide
  Target: LAMA2; (-) strand; PAM type: YTN; PAM sequence: CTG
tttctctggagaactcgaat

SEQ ID NO: 279092 - DNA, 20 bp, Artificial Sequence
  Description of Artificial Sequence: Synthetic oligonucleotide
  Target: LAMA2; (-) strand; PAM type: YTN; PAM sequence: TTC
tgtttctctggagaactcga

SEQ ID NO: 279093 - DNA, 20 bp, Artificial Sequence
  Description of Artificial Sequence: Synthetic oligonucleotide
  Target: LAMA2; (-) strand; PAM type: YTN; PAM sequence: TTG
ttctgtttctctggagaact

SEQ ID NO: 279094 - DNA, 20 bp, Artificial Sequence
  Description of Artificial Sequence: Synthetic oligonucleotide
  Target: LAMA2; (-) strand; PAM type: YTN; PAM sequence: TTT
gttctgtttctctggagaac

SEQ ID NO: 279095 - DNA, 20 bp, Artificial Sequence
  Description of Artificial Sequence: Synthetic oligonucleotide
  Target: LAMA2; (-) strand; PAM type: YTN; PAM sequence: TTC
caatttgttctgtttctctg

SEQ ID NO: 279096 - DNA, 20 bp, Artificial Sequence
  Description of Artificial Sequence: Synthetic oligonucleotide
  Target: LAMA2; (-) strand; PAM type: YTN; PAM sequence: CTT
ccaatttgttctgtttctct

SEQ ID NO: 279097 - DNA, 20 bp, Artificial Sequence
  Description of Artificial Sequence: Synthetic oligonucleotide
  Target: LAMA2; (-) strand; PAM type: YTN; PAM sequence: CTG
tgtatatatacacttccaat

SEQ ID NO: 279098 - DNA, 20 bp, Artificial Sequence
  Description of Artificial Sequence: Synthetic oligonucleotide
  Target: LAMA2; (-) strand; PAM type: YTN; PAM sequence: TTA
aaatatataatatatctgtg

SEQ ID NO: 279099 - DNA, 20 bp, Artificial Sequence
  Description of Artificial Sequence: Synthetic oligonucleotide
  Target: LAMA2; (-) strand; PAM type: YTN; PAM sequence: TTT
aaaatatataatatatctgt

SEQ ID NO: 279100 - DNA, 20 bp, Artificial Sequence
  Description of Artificial Sequence: Synthetic oligonucleotide
  Target: LAMA2; (-) strand; PAM type: YTN; PAM sequence: CTT
taaaatatataatatatctg

SEQ ID NO: 279101 - DNA, 20 bp, Artificial Sequence
  Description of Artificial Sequence: Synthetic oligonucleotide
  Target: LAMA2; (-) strand; PAM type: YTN; PAM sequence: TTC
tttaaaatatataatatatc

SEQ ID NO: 279102 - DNA, 20 bp, Artificial Sequence
  Description of Artificial Sequence: Synthetic oligonucleotide
  Target: LAMA2; (-) strand; PAM type: YTN; PAM sequence: CTC
atgagtcaattctttaaaat

SEQ ID NO: 279103 - DNA, 20 bp, Artificial Sequence
  Description of Artificial Sequence: Synthetic oligonucleotide
  Target: LAMA2; (-) strand; PAM type: YTN; PAM sequence: CTG
cagccagaccccacaatctc

SEQ ID NO: 279104 - DNA, 20 bp, Artificial Sequence
  Description of Artificial Sequence: Synthetic oligonucleotide
  Target: LAMA2; (-) strand; PAM type: YTN; PAM sequence: TTC
cctgcagccagaccccacaa

SEQ ID NO: 279105 - DNA, 20 bp, Artificial Sequence
  Description of Artificial Sequence: Synthetic oligonucleotide
  Target: LAMA2; (-) strand; PAM type: YTN; PAM sequence: CTA
ttccctgcagccagacccca

SEQ ID NO: 279106 - DNA, 20 bp, Artificial Sequence
  Description of Artificial Sequence: Synthetic oligonucleotide
  Target: LAMA2; (-) strand; PAM type: YTN; PAM sequence: TTC
acctattccctgcagccaga

SEQ ID NO: 279107 - DNA, 20 bp, Artificial Sequence
  Description of Artificial Sequence: Synthetic oligonucleotide
  Target: LAMA2; (-) strand; PAM type: YTN; PAM sequence: TTC
aagacggcaatattcaccta

SEQ ID NO: 279108 - DNA, 20 bp, Artificial Sequence
  Description of Artificial Sequence: Synthetic oligonucleotide
  Target: LAMA2; (-) strand; PAM type: YTN; PAM sequence: TTG
gattcaagacggcaatattc

SEQ ID NO: 279109 - DNA, 20 bp, Artificial Sequence
  Description of Artificial Sequence: Synthetic oligonucleotide
  Target: LAMA2; (-) strand; PAM type: YTN; PAM sequence: TTT
ggattcaagacggcaatatt

SEQ ID NO: 279110 - DNA, 20 bp, Artificial Sequence
  Description of Artificial Sequence: Synthetic oligonucleotide
  Target: LAMA2; (-) strand; PAM type: YTN; PAM sequence: CTT
tggattcaagacggcaatat

SEQ ID NO: 279111 - DNA, 20 bp, Artificial Sequence
  Description of Artificial Sequence: Synthetic oligonucleotide
  Target: LAMA2; (-) strand; PAM type: YTN; PAM sequence: CTG
cctttggattcaagacggca

SEQ ID NO: 279112 - DNA, 20 bp, Artificial Sequence
  Description of Artificial Sequence: Synthetic oligonucleotide
  Target: LAMA2; (-) strand; PAM type: YTN; PAM sequence: CTC
caaactgcctttggattcaa

SEQ ID NO: 279113 - DNA, 20 bp, Artificial Sequence
  Description of Artificial Sequence: Synthetic oligonucleotide
  Target: LAMA2; (-) strand; PAM type: YTN; PAM sequence: CTG
cctccaaactgcctttggat

SEQ ID NO: 279114 - DNA, 20 bp, Artificial Sequence
  Description of Artificial Sequence: Synthetic oligonucleotide
  Target: LAMA2; (-) strand; PAM type: YTN; PAM sequence: TTC
tgcctccaaactgcctttgg

SEQ ID NO: 279115 - DNA, 20 bp, Artificial Sequence
  Description of Artificial Sequence: Synthetic oligonucleotide
  Target: LAMA2; (-) strand; PAM type: YTN; PAM sequence: CTG
aagaagaagaaattctgcct

SEQ ID NO: 279116 - DNA, 20 bp, Artificial Sequence
  Description of Artificial Sequence: Synthetic oligonucleotide
  Target: LAMA2; (-) strand; PAM type: YTN; PAM sequence: CTG
aggtcccctgaagaagaaga

SEQ ID NO: 279117 - DNA, 20 bp, Artificial Sequence
  Description of Artificial Sequence: Synthetic oligonucleotide
  Target: LAMA2; (-) strand; PAM type: YTN; PAM sequence: TTA
ctgaggtcccctgaagaaga

SEQ ID NO: 279118 - DNA, 20 bp, Artificial Sequence
  Description of Artificial Sequence: Synthetic oligonucleotide
  Target: LAMA2; (-) strand; PAM type: YTN; PAM sequence: TTA
agaagaattactgaggtccc

SEQ ID NO: 279119 - DNA, 20 bp, Artificial Sequence
  Description of Artificial Sequence: Synthetic oligonucleotide
  Target: LAMA2; (-) strand; PAM type: YTN; PAM sequence: CTT
aagaagaattactgaggtcc

SEQ ID NO: 279120 - DNA, 20 bp, Artificial Sequence
  Description of Artificial Sequence: Synthetic oligonucleotide
  Target: LAMA2; (-) strand; PAM type: YTN; PAM sequence: CTC
atccaacagtcagaggcctt

SEQ ID NO: 279121 - DNA, 20 bp, Artificial Sequence
  Description of Artificial Sequence: Synthetic oligonucleotide
  Target: LAMA2; (-) strand; PAM type: YTN; PAM sequence: TTG
gggaacctcatccaacagtc

SEQ ID NO: 279122 - DNA, 20 bp, Artificial Sequence
  Description of Artificial Sequence: Synthetic oligonucleotide
  Target: LAMA2; (-) strand; PAM type: YTN; PAM sequence: CTC
catgatgttggggaacctca

SEQ ID NO: 279123 - DNA, 20 bp, Artificial Sequence
  Description of Artificial Sequence: Synthetic oligonucleotide
  Target: LAMA2; (-) strand; PAM type: YTN; PAM sequence: TTG
agtaaagcaggtcaccctcc

SEQ ID NO: 279124 - DNA, 20 bp, Artificial Sequence
  Description of Artificial Sequence: Synthetic oligonucleotide
  Target: LAMA2; (-) strand; PAM type: YTN; PAM sequence: TTT
gagtaaagcaggtcaccctc

SEQ ID NO: 279125 - DNA, 20 bp, Artificial Sequence
  Description of Artificial Sequence: Synthetic oligonucleotide
  Target: LAMA2; (-) strand; PAM type: YTN; PAM sequence: CTT
tgagtaaagcaggtcaccct

SEQ ID NO: 279126 - DNA, 20 bp, Artificial Sequence
  Description of Artificial Sequence: Synthetic oligonucleotide
  Target: LAMA2; (-) strand; PAM type: YTN; PAM sequence: TTC
agtcagtagactttgagtaa

SEQ ID NO: 279127 - DNA, 20 bp, Artificial Sequence
  Description of Artificial Sequence: Synthetic oligonucleotide
  Target: LAMA2; (-) strand; PAM type: YTN; PAM sequence: TTT
cagtcagtagactttgagta

SEQ ID NO: 279128 - DNA, 20 bp, Artificial Sequence
  Description of Artificial Sequence: Synthetic oligonucleotide
  Target: LAMA2; (-) strand; PAM type: YTN; PAM sequence: TTA
acgtttcagtcagtagactt

SEQ ID NO: 279129 - DNA, 20 bp, Artificial Sequence
  Description of Artificial Sequence: Synthetic oligonucleotide
  Target: LAMA2; (-) strand; PAM type: YTN; PAM sequence: TTA
gatgtgattaacgtttcagt

SEQ ID NO: 279130 - DNA, 20 bp, Artificial Sequence
  Description of Artificial Sequence: Synthetic oligonucleotide
  Target: LAMA2; (-) strand; PAM type: YTN; PAM sequence: TTT
agatgtgattaacgtttcag

SEQ ID NO: 279131 - DNA, 20 bp, Artificial Sequence
  Description of Artificial Sequence: Synthetic oligonucleotide
  Target: LAMA2; (-) strand; PAM type: YTN; PAM sequence: TTT
tagatgtgattaacgtttca

SEQ ID NO: 279132 - DNA, 20 bp, Artificial Sequence
  Description of Artificial Sequence: Synthetic oligonucleotide
  Target: LAMA2; (-) strand; PAM type: YTN; PAM sequence: TTT
ttagatgtgattaacgtttc

SEQ ID NO: 279133 - DNA, 20 bp, Artificial Sequence
  Description of Artificial Sequence: Synthetic oligonucleotide
  Target: LAMA2; (-) strand; PAM type: YTN; PAM sequence: TTT
tttagatgtgattaacgttt

SEQ ID NO: 279134 - DNA, 20 bp, Artificial Sequence
  Description of Artificial Sequence: Synthetic oligonucleotide
  Target: LAMA2; (-) strand; PAM type: YTN; PAM sequence: CTG
tgaatgtattttttagatgt

SEQ ID NO: 279135 - DNA, 20 bp, Artificial Sequence
  Description of Artificial Sequence: Synthetic oligonucleotide
  Target: LAMA2; (-) strand; PAM type: YTN; PAM sequence: TTG
ctgtgaatgtattttttaga

SEQ ID NO: 279136 - DNA, 20 bp, Artificial Sequence
  Description of Artificial Sequence: Synthetic oligonucleotide
  Target: LAMA2; (-) strand; PAM type: YTN; PAM sequence: CTA
gatgttgctgtgaatgtatt

SEQ ID NO: 279137 - DNA, 20 bp, Artificial Sequence
  Description of Artificial Sequence: Synthetic oligonucleotide
  Target: LAMA2; (-) strand; PAM type: YTN; PAM sequence: TTG
gtaaaacagcagtctagatg

SEQ ID NO: 279138 - DNA, 20 bp, Artificial Sequence
  Description of Artificial Sequence: Synthetic oligonucleotide
  Target: LAMA2; (-) strand; PAM type: YTN; PAM sequence: TTT
ggtaaaacagcagtctagat

SEQ ID NO: 279139 - DNA, 20 bp, Artificial Sequence
  Description of Artificial Sequence: Synthetic oligonucleotide
  Target: LAMA2; (-) strand; PAM type: YTN; PAM sequence: TTT
tggtaaaacagcagtctaga

SEQ ID NO: 279140 - DNA, 20 bp, Artificial Sequence
  Description of Artificial Sequence: Synthetic oligonucleotide
  Target: LAMA2; (-) strand; PAM type: YTN; PAM sequence: TTT
ttggtaaaacagcagtctag

SEQ ID NO: 279141 - DNA, 20 bp, Artificial Sequence
  Description of Artificial Sequence: Synthetic oligonucleotide
  Target: LAMA2; (-) strand; PAM type: YTN; PAM sequence: TTG
gtttttggtaaaacagcagt

SEQ ID NO: 279142 - DNA, 20 bp, Artificial Sequence
  Description of Artificial Sequence: Synthetic oligonucleotide
  Target: LAMA2; (-) strand; PAM type: YTN; PAM sequence: CTT
ggtttttggtaaaacagcag

SEQ ID NO: 279143 - DNA, 20 bp, Artificial Sequence
  Description of Artificial Sequence: Synthetic oligonucleotide
  Target: LAMA2; (-) strand; PAM type: YTN; PAM sequence: CTA
tggtacttggtttttggtaa

SEQ ID NO: 279144 - DNA, 20 bp, Artificial Sequence
  Description of Artificial Sequence: Synthetic oligonucleotide
  Target: LAMA2; (-) strand; PAM type: YTN; PAM sequence: CTA
ggctatggtacttggttttt

SEQ ID NO: 279145 - DNA, 20 bp, Artificial Sequence
  Description of Artificial Sequence: Synthetic oligonucleotide
  Target: LAMA2; (-) strand; PAM type: YTN; PAM sequence: TTG
gctaggctatggtacttggt

SEQ ID NO: 279146 - DNA, 20 bp, Artificial Sequence
  Description of Artificial Sequence: Synthetic oligonucleotide
  Target: LAMA2; (-) strand; PAM type: YTN; PAM sequence: CTT
ggctaggctatggtacttgg

SEQ ID NO: 279147 - DNA, 20 bp, Artificial Sequence
  Description of Artificial Sequence: Synthetic oligonucleotide
  Target: LAMA2; (-) strand; PAM type: YTN; PAM sequence: TTA
tatccacttggctaggctat

SEQ ID NO: 279148 - DNA, 20 bp, Artificial Sequence
  Description of Artificial Sequence: Synthetic oligonucleotide
  Target: LAMA2; (-) strand; PAM type: YTN; PAM sequence: TTT
atatccacttggctaggcta

SEQ ID NO: 279149 - DNA, 20 bp, Artificial Sequence
  Description of Artificial Sequence: Synthetic oligonucleotide
  Target: LAMA2; (-) strand; PAM type: YTN; PAM sequence: TTA
atttatatccacttggctag

SEQ ID NO: 279150 - DNA, 20 bp, Artificial Sequence
  Description of Artificial Sequence: Synthetic oligonucleotide
  Target: LAMA2; (-) strand; PAM type: YTN; PAM sequence: TTG
tgatcgttaatttatatcca

SEQ ID NO: 279151 - DNA, 20 bp, Artificial Sequence
  Description of Artificial Sequence: Synthetic oligonucleotide
  Target: LAMA2; (-) strand; PAM type: YTN; PAM sequence: TTT
gtgatcgttaatttatatcc

SEQ ID NO: 279152 - DNA, 20 bp, Artificial Sequence
  Description of Artificial Sequence: Synthetic oligonucleotide
  Target: LAMA2; (-) strand; PAM type: YTN; PAM sequence: CTG
tttgtgatcgttaatttata

SEQ ID NO: 279153 - DNA, 20 bp, Artificial Sequence
  Description of Artificial Sequence: Synthetic oligonucleotide
  Target: LAMA2; (-) strand; PAM type: YTN; PAM sequence: TTA
gctgtttgtgatcgttaatt

SEQ ID NO: 279154 - DNA, 20 bp, Artificial Sequence
  Description of Artificial Sequence: Synthetic oligonucleotide
  Target: LAMA2; (-) strand; PAM type: YTN; PAM sequence: TTT
agctgtttgtgatcgttaat

SEQ ID NO: 279155 - DNA, 20 bp, Artificial Sequence
  Description of Artificial Sequence: Synthetic oligonucleotide
  Target: LAMA2; (-) strand; PAM type: YTN; PAM sequence: TTG
gaatgtttagctgtttgtga

SEQ ID NO: 279156 - DNA, 20 bp, Artificial Sequence
  Description of Artificial Sequence: Synthetic oligonucleotide
  Target: LAMA2; (-) strand; PAM type: YTN; PAM sequence: TTT
ggaatgtttagctgtttgtg

SEQ ID NO: 279157 - DNA, 20 bp, Artificial Sequence
  Description of Artificial Sequence: Synthetic oligonucleotide
  Target: LAMA2; (-) strand; PAM type: YTN; PAM sequence: TTG
tttggaatgtttagctgttt

SEQ ID NO: 279158 - DNA, 20 bp, Artificial Sequence
  Description of Artificial Sequence: Synthetic oligonucleotide
  Target: LAMA2; (-) strand; PAM type: YTN; PAM sequence: CTT
gtttggaatgtttagctgtt

SEQ ID NO: 279159 - DNA, 20 bp, Artificial Sequence
  Description of Artificial Sequence: Synthetic oligonucleotide
  Target: LAMA2; (-) strand; PAM type: YTN; PAM sequence: CTG
cttgtttggaatgtttagct

SEQ ID NO: 279160 - DNA, 20 bp, Artificial Sequence
  Description of Artificial Sequence: Synthetic oligonucleotide
  Target: LAMA2; (-) strand; PAM type: YTN; PAM sequence: CTG
tctgcttgtttggaatgttt

SEQ ID NO: 279161 - DNA, 20 bp, Artificial Sequence
  Description of Artificial Sequence: Synthetic oligonucleotide
  Target: LAMA2; (-) strand; PAM type: YTN; PAM sequence: CTC
tgtctgcttgtttggaatgt

SEQ ID NO: 279162 - DNA, 20 bp, Artificial Sequence
  Description of Artificial Sequence: Synthetic oligonucleotide
  Target: LAMA2; (-) strand; PAM type: YTN; PAM sequence: CTC
tctgtctgcttgtttggaat

SEQ ID NO: 279163 - DNA, 20 bp, Artificial Sequence
  Description of Artificial Sequence: Synthetic oligonucleotide
  Target: LAMA2; (-) strand; PAM type: YTN; PAM sequence: CTC
tctctgtctgcttgtttgga

SEQ ID NO: 279164 - DNA, 20 bp, Artificial Sequence
  Description of Artificial Sequence: Synthetic oligonucleotide
  Target: LAMA2; (-) strand; PAM type: YTN; PAM sequence: TTC
tctctctgtctgcttgtttg

SEQ ID NO: 279165 - DNA, 20 bp, Artificial Sequence
  Description of Artificial Sequence: Synthetic oligonucleotide
  Target: LAMA2; (-) strand; PAM type: YTN; PAM sequence: TTT
ctctctctgtctgcttgttt

SEQ ID NO: 279166 - DNA, 20 bp, Artificial Sequence
  Description of Artificial Sequence: Synthetic oligonucleotide
  Target: LAMA2; (-) strand; PAM type: YTN; PAM sequence: TTT
tctctctctgtctgcttgtt

SEQ ID NO: 279167 - DNA, 20 bp, Artificial Sequence
  Description of Artificial Sequence: Synthetic oligonucleotide
  Target: LAMA2; (-) strand; PAM type: YTN; PAM sequence: TTT
ttctctctctgtctgcttgt

SEQ ID NO: 279168 - DNA, 20 bp, Artificial Sequence
  Description of Artificial Sequence: Synthetic oligonucleotide
  Target: LAMA2; (-) strand; PAM type: YTN; PAM sequence: TTT
tttctctctctgtctgcttg

SEQ ID NO: 279169 - DNA, 20 bp, Artificial Sequence
  Description of Artificial Sequence: Synthetic oligonucleotide
  Target: LAMA2; (-) strand; PAM type: YTN; PAM sequence: TTT
ttttctctctctgtctgctt

SEQ ID NO: 279170 - DNA, 20 bp, Artificial Sequence
  Description of Artificial Sequence: Synthetic oligonucleotide
  Target: LAMA2; (-) strand; PAM type: YTN; PAM sequence: TTA
tttttttctctctctgtctg

SEQ ID NO: 279171 - DNA, 20 bp, Artificial Sequence
  Description of Artificial Sequence: Synthetic oligonucleotide
  Target: LAMA2; (-) strand; PAM type: YTN; PAM sequence: TTT
atttttttctctctctgtct

SEQ ID NO: 279172 - DNA, 20 bp, Artificial Sequence
  Description of Artificial Sequence: Synthetic oligonucleotide
  Target: LAMA2; (-) strand; PAM type: YTN; PAM sequence: CTT
tatttttttctctctctgtc

SEQ ID NO: 279173 - DNA, 20 bp, Artificial Sequence
  Description of Artificial Sequence: Synthetic oligonucleotide
  Target: LAMA2; (-) strand; PAM type: YTN; PAM sequence: TTC
tttatttttttctctctctg

SEQ ID NO: 279174 - DNA, 20 bp, Artificial Sequence
  Description of Artificial Sequence: Synthetic oligonucleotide
  Target: LAMA2; (-) strand; PAM type: YTN; PAM sequence: TTT
ctttatttttttctctctct

SEQ ID NO: 279175 - DNA, 20 bp, Artificial Sequence
  Description of Artificial Sequence: Synthetic oligonucleotide
  Target: LAMA2; (-) strand; PAM type: YTN; PAM sequence: TTC
acatttctttatttttttct

SEQ ID NO: 279176 - DNA, 20 bp, Artificial Sequence
  Description of Artificial Sequence: Synthetic oligonucleotide
  Target: LAMA2; (-) strand; PAM type: YTN; PAM sequence: CTT
cacatttctttatttttttc

SEQ ID NO: 279177 - DNA, 20 bp, Artificial Sequence
  Description of Artificial Sequence: Synthetic oligonucleotide
  Target: LAMA2; (-) strand; PAM type: YTN; PAM sequence: CTC
cccttcacatttctttattt

SEQ ID NO: 279178 - DNA, 20 bp, Artificial Sequence
  Description of Artificial Sequence: Synthetic oligonucleotide
  Target: LAMA2; (-) strand; PAM type: YTN; PAM sequence: CTC
ctccccttcacatttcttta

SEQ ID NO: 279179 - DNA, 20 bp, Artificial Sequence
  Description of Artificial Sequence: Synthetic oligonucleotide
  Target: LAMA2; (-) strand; PAM type: YTN; PAM sequence: TTC
tcctccccttcacatttctt

SEQ ID NO: 279180 - DNA, 20 bp, Artificial Sequence
  Description of Artificial Sequence: Synthetic oligonucleotide
  Target: LAMA2; (-) strand; PAM type: YTN; PAM sequence: TTG
aaaattctcctccccttcac

SEQ ID NO: 279181 - DNA, 20 bp, Artificial Sequence
  Description of Artificial Sequence: Synthetic oligonucleotide
  Target: LAMA2; (-) strand; PAM type: YTN; PAM sequence: TTG
attgaaaattctcctcccct

SEQ ID NO: 279182 - DNA, 20 bp, Artificial Sequence
  Description of Artificial Sequence: Synthetic oligonucleotide
  Target: LAMA2; (-) strand; PAM type: YTN; PAM sequence: TTC
cagaattgattgaaaattct

SEQ ID NO: 279183 - DNA, 20 bp, Artificial Sequence
  Description of Artificial Sequence: Synthetic oligonucleotide
  Target: LAMA2; (-) strand; PAM type: YTN; PAM sequence: TTT
ccagaattgattgaaaattc

SEQ ID NO: 279184 - DNA, 20 bp, Artificial Sequence
  Description of Artificial Sequence: Synthetic oligonucleotide
  Target: LAMA2; (-) strand; PAM type: YTN; PAM sequence: TTT
tccagaattgattgaaaatt

SEQ ID NO: 279185 - DNA, 20 bp, Artificial Sequence
  Description of Artificial Sequence: Synthetic oligonucleotide
  Target: LAMA2; (-) strand; PAM type: YTN; PAM sequence: CTT
ttccagaattgattgaaaat

SEQ ID NO: 279186 - DNA, 20 bp, Artificial Sequence
  Description of Artificial Sequence: Synthetic oligonucleotide
  Target: LAMA2; (-) strand; PAM type: YTN; PAM sequence: TTG
tcttttccagaattgattga

SEQ ID NO: 279187 - DNA, 20 bp, Artificial Sequence
  Description of Artificial Sequence: Synthetic oligonucleotide
  Target: LAMA2; (-) strand; PAM type: YTN; PAM sequence: TTT
gtcttttccagaattgattg

SEQ ID NO: 279188 - DNA, 20 bp, Artificial Sequence
  Description of Artificial Sequence: Synthetic oligonucleotide
  Target: LAMA2; (-) strand; PAM type: YTN; PAM sequence: TTT
tgtcttttccagaattgatt

SEQ ID NO: 279189 - DNA, 20 bp, Artificial Sequence
  Description of Artificial Sequence: Synthetic oligonucleotide
  Target: LAMA2; (-) strand; PAM type: YTN; PAM sequence: TTT
ttgtcttttccagaattgat

SEQ ID NO: 279190 - DNA, 20 bp, Artificial Sequence
  Description of Artificial Sequence: Synthetic oligonucleotide
  Target: LAMA2; (-) strand; PAM type: YTN; PAM sequence: TTT
tttgtcttttccagaattga

SEQ ID NO: 279191 - DNA, 20 bp, Artificial Sequence
  Description of Artificial Sequence: Synthetic oligonucleotide
  Target: LAMA2; (-) strand; PAM type: YTN; PAM sequence: TTT
ttttgtcttttccagaattg

SEQ ID NO: 279192 - DNA, 20 bp, Artificial Sequence
  Description of Artificial Sequence: Synthetic oligonucleotide
  Target: LAMA2; (-) strand; PAM type: YTN; PAM sequence: CTT
tttttgtcttttccagaatt

SEQ ID NO: 279193 - DNA, 20 bp, Artificial Sequence
  Description of Artificial Sequence: Synthetic oligonucleotide
  Target: LAMA2; (-) strand; PAM type: YTN; PAM sequence: CTC
tttttttgtcttttccagaa

SEQ ID NO: 279194 - DNA, 20 bp, Artificial Sequence
  Description of Artificial Sequence: Synthetic oligonucleotide
  Target: LAMA2; (-) strand; PAM type: YTN; PAM sequence: TTC
tctttttttgtcttttccag

SEQ ID NO: 279195 - DNA, 20 bp, Artificial Sequence
  Description of Artificial Sequence: Synthetic oligonucleotide
  Target: LAMA2; (-) strand; PAM type: YTN; PAM sequence: TTT
ctctttttttgtcttttcca

SEQ ID NO: 279196 - DNA, 20 bp, Artificial Sequence
  Description of Artificial Sequence: Synthetic oligonucleotide
  Target: LAMA2; (-) strand; PAM type: YTN; PAM sequence: TTT
tctctttttttgtcttttcc

SEQ ID NO: 279197 - DNA, 20 bp, Artificial Sequence
  Description of Artificial Sequence: Synthetic oligonucleotide
  Target: LAMA2; (-) strand; PAM type: YTN; PAM sequence: TTT
ttctctttttttgtcttttc

SEQ ID NO: 279198 - DNA, 20 bp, Artificial Sequence
  Description of Artificial Sequence: Synthetic oligonucleotide
  Target: LAMA2; (-) strand; PAM type: YTN; PAM sequence: CTT
tttctctttttttgtctttt

SEQ ID NO: 279199 - DNA, 20 bp, Artificial Sequence
  Description of Artificial Sequence: Synthetic oligonucleotide
  Target: LAMA2; (-) strand; PAM type: YTN; PAM sequence: CTC
tttttctctttttttgtctt

SEQ ID NO: 279200 - DNA, 20 bp, Artificial Sequence
  Description of Artificial Sequence: Synthetic oligonucleotide
  Target: LAMA2; (-) strand; PAM type: YTN; PAM sequence: TTC
tctttttctctttttttgtc

SEQ ID NO: 279201 - DNA, 20 bp, Artificial Sequence
  Description of Artificial Sequence: Synthetic oligonucleotide
  Target: LAMA2; (-) strand; PAM type: YTN; PAM sequence: TTT
ctctttttctctttttttgt

SEQ ID NO: 279202 - DNA, 20 bp, Artificial Sequence
  Description of Artificial Sequence: Synthetic oligonucleotide
  Target: LAMA2; (-) strand; PAM type: YTN; PAM sequence: TTG
tttctctttttctctttttt

SEQ ID NO: 279203 - DNA, 20 bp, Artificial Sequence
  Description of Artificial Sequence: Synthetic oligonucleotide
  Target: LAMA2; (-) strand; PAM type: YTN; PAM sequence: TTT
gtttctctttttctcttttt

SEQ ID NO: 279204 - DNA, 20 bp, Artificial Sequence
  Description of Artificial Sequence: Synthetic oligonucleotide
  Target: LAMA2; (-) strand; PAM type: YTN; PAM sequence: TTA
tgatttgtttctctttttct

SEQ ID NO: 279205 - DNA, 20 bp, Artificial Sequence
  Description of Artificial Sequence: Synthetic oligonucleotide
  Target: LAMA2; (-) strand; PAM type: YTN; PAM sequence: TTT
atgatttgtttctctttttc

SEQ ID NO: 279206 - DNA, 20 bp, Artificial Sequence
  Description of Artificial Sequence: Synthetic oligonucleotide
  Target: LAMA2; (-) strand; PAM type: YTN; PAM sequence: TTA
tatttatgatttgtttctct

SEQ ID NO: 279207 - DNA, 20 bp, Artificial Sequence
  Description of Artificial Sequence: Synthetic oligonucleotide
  Target: LAMA2; (-) strand; PAM type: YTN; PAM sequence: TTT
atatttatgatttgtttctc

SEQ ID NO: 279208 - DNA, 20 bp, Artificial Sequence
  Description of Artificial Sequence: Synthetic oligonucleotide
  Target: LAMA2; (-) strand; PAM type: YTN; PAM sequence: TTT
tatatttatgatttgtttct

SEQ ID NO: 279209 - DNA, 20 bp, Artificial Sequence
  Description of Artificial Sequence: Synthetic oligonucleotide
  Target: LAMA2; (-) strand; PAM type: YTN; PAM sequence: TTA
tattttatatttatgatttg

SEQ ID NO: 279210 - DNA, 20 bp, Artificial Sequence
  Description of Artificial Sequence: Synthetic oligonucleotide
  Target: LAMA2; (-) strand; PAM type: YTN; PAM sequence: TTC
cattatattttatatttatg

SEQ ID NO: 279211 - DNA, 20 bp, Artificial Sequence
  Description of Artificial Sequence: Synthetic oligonucleotide
  Target: LAMA2; (-) strand; PAM type: YTN; PAM sequence: TTA
attccattatattttatatt

SEQ ID NO: 279212 - DNA, 20 bp, Artificial Sequence
  Description of Artificial Sequence: Synthetic oligonucleotide
  Target: LAMA2; (-) strand; PAM type: YTN; PAM sequence: TTT
aattccattatattttatat

SEQ ID NO: 279213 - DNA, 20 bp, Artificial Sequence
  Description of Artificial Sequence: Synthetic oligonucleotide
  Target: LAMA2; (-) strand; PAM type: YTN; PAM sequence: TTG
tatatggatttaattccatt

SEQ ID NO: 279214 - DNA, 20 bp, Artificial Sequence
  Description of Artificial Sequence: Synthetic oligonucleotide
  Target: LAMA2; (-) strand; PAM type: YTN; PAM sequence: TTG
ttgtatatggatttaattcc

SEQ ID NO: 279215 - DNA, 20 bp, Artificial Sequence
  Description of Artificial Sequence: Synthetic oligonucleotide
  Target: LAMA2; (-) strand; PAM type: YTN; PAM sequence: CTG
attgttgtatatggatttaa

SEQ ID NO: 279216 - DNA, 20 bp, Artificial Sequence
  Description of Artificial Sequence: Synthetic oligonucleotide
  Target: LAMA2; (-) strand; PAM type: YTN; PAM sequence: TTA
ccctgattgttgtatatgga

SEQ ID NO: 279217 - DNA, 20 bp, Artificial Sequence
  Description of Artificial Sequence: Synthetic oligonucleotide
  Target: LAMA2; (-) strand; PAM type: YTN; PAM sequence: CTG
gtgataattaccctgattgt

SEQ ID NO: 279218 - DNA, 20 bp, Artificial Sequence
  Description of Artificial Sequence: Synthetic oligonucleotide
  Target: LAMA2; (-) strand; PAM type: YTN; PAM sequence: TTG
aggcagctggtgataattac

SEQ ID NO: 279219 - DNA, 20 bp, Artificial Sequence
  Description of Artificial Sequence: Synthetic oligonucleotide
  Target: LAMA2; (-) strand; PAM type: YTN; PAM sequence: CTT
gaggcagctggtgataatta

SEQ ID NO: 279220 - DNA, 20 bp, Artificial Sequence
  Description of Artificial Sequence: Synthetic oligonucleotide
  Target: LAMA2; (-) strand; PAM type: YTN; PAM sequence: TTC
ttgaggcagctggtgataat

SEQ ID NO: 279221 - DNA, 20 bp, Artificial Sequence
  Description of Artificial Sequence: Synthetic oligonucleotide
  Target: LAMA2; (-) strand; PAM type: YTN; PAM sequence: TTT
cttgaggcagctggtgataa

SEQ ID NO: 279222 - DNA, 20 bp, Artificial Sequence
  Description of Artificial Sequence: Synthetic oligonucleotide
  Target: LAMA2; (-) strand; PAM type: YTN; PAM sequence: TTA
tttcttgaggcagctggtga

SEQ ID NO: 279223 - DNA, 20 bp, Artificial Sequence
  Description of Artificial Sequence: Synthetic oligonucleotide
  Target: LAMA2; (-) strand; PAM type: YTN; PAM sequence: TTC
aggggttatttcttgaggca

SEQ ID NO: 279224 - DNA, 20 bp, Artificial Sequence
  Description of Artificial Sequence: Synthetic oligonucleotide
  Target: LAMA2; (-) strand; PAM type: YTN; PAM sequence: TTT
caggggttatttcttgaggc

SEQ ID NO: 279225 - DNA, 20 bp, Artificial Sequence
  Description of Artificial Sequence: Synthetic oligonucleotide
  Target: LAMA2; (-) strand; PAM type: YTN; PAM sequence: TTA
tgtccatcatgtgagatttc

SEQ ID NO: 279226 - DNA, 20 bp, Artificial Sequence
  Description of Artificial Sequence: Synthetic oligonucleotide
  Target: LAMA2; (-) strand; PAM type: YTN; PAM sequence: TTG
aattatgtccatcatgtgag

SEQ ID NO: 279227 - DNA, 20 bp, Artificial Sequence
  Description of Artificial Sequence: Synthetic oligonucleotide
  Target: LAMA2; (-) strand; PAM type: YTN; PAM sequence: CTT
gaattatgtccatcatgtga

SEQ ID NO: 279228 - DNA, 20 bp, Artificial Sequence
  Description of Artificial Sequence: Synthetic oligonucleotide
  Target: LAMA2; (-) strand; PAM type: YTN; PAM sequence: TTG
tgatgtgagacataaacttg

SEQ ID NO: 279229 - DNA, 20 bp, Artificial Sequence
  Description of Artificial Sequence: Synthetic oligonucleotide
  Target: LAMA2; (-) strand; PAM type: YTN; PAM sequence: TTG
tgttgtgatgtgagacataa

SEQ ID NO: 279230 - DNA, 20 bp, Artificial Sequence
  Description of Artificial Sequence: Synthetic oligonucleotide
  Target: LAMA2; (-) strand; PAM type: YTN; PAM sequence: CTC
acattgtgttgtgatgtgag

SEQ ID NO: 279231 - DNA, 20 bp, Artificial Sequence
  Description of Artificial Sequence: Synthetic oligonucleotide
  Target: LAMA2; (-) strand; PAM type: YTN; PAM sequence: CTA
caagatgcaaaaggtggtat

SEQ ID NO: 279232 - DNA, 20 bp, Artificial Sequence
  Description of Artificial Sequence: Synthetic oligonucleotide
  Target: LAMA2; (-) strand; PAM type: YTN; PAM sequence: CTG
tatggtgtcactacaagatg

SEQ ID NO: 279233 - DNA, 20 bp, Artificial Sequence
  Description of Artificial Sequence: Synthetic oligonucleotide
  Target: LAMA2; (-) strand; PAM type: YTN; PAM sequence: CTA
cactgtatggtgtcactaca

SEQ ID NO: 279234 - DNA, 20 bp, Artificial Sequence
  Description of Artificial Sequence: Synthetic oligonucleotide
  Target: LAMA2; (-) strand; PAM type: YTN; PAM sequence: TTG
gaggctacactgtatggtgt

SEQ ID NO: 279235 - DNA, 20 bp, Artificial Sequence
  Description of Artificial Sequence: Synthetic oligonucleotide
  Target: LAMA2; (-) strand; PAM type: YTN; PAM sequence: CTT
ggaggctacactgtatggtg

SEQ ID NO: 279236 - DNA, 20 bp, Artificial Sequence
  Description of Artificial Sequence: Synthetic oligonucleotide
  Target: LAMA2; (-) strand; PAM type: YTN; PAM sequence: CTG
ccttggaggctacactgtat

SEQ ID NO: 279237 - DNA, 20 bp, Artificial Sequence
  Description of Artificial Sequence: Synthetic oligonucleotide
  Target: LAMA2; (-) strand; PAM type: YTN; PAM sequence: TTC
cctgccttggaggctacact

SEQ ID NO: 279238 - DNA, 20 bp, Artificial Sequence
  Description of Artificial Sequence: Synthetic oligonucleotide
  Target: LAMA2; (-) strand; PAM type: YTN; PAM sequence: CTT
ccctgccttggaggctacac

SEQ ID NO: 279239 - DNA, 20 bp, Artificial Sequence
  Description of Artificial Sequence: Synthetic oligonucleotide
  Target: LAMA2; (-) strand; PAM type: YTN; PAM sequence: CTC
ttccctgccttggaggctac

SEQ ID NO: 279240 - DNA, 20 bp, Artificial Sequence
  Description of Artificial Sequence: Synthetic oligonucleotide
  Target: LAMA2; (-) strand; PAM type: YTN; PAM sequence: TTC
tcttccctgccttggaggct

SEQ ID NO: 279241 - DNA, 20 bp, Artificial Sequence
  Description of Artificial Sequence: Synthetic oligonucleotide
  Target: LAMA2; (-) strand; PAM type: YTN; PAM sequence: TTT
ctcttccctgccttggaggc

SEQ ID NO: 279242 - DNA, 20 bp, Artificial Sequence
  Description of Artificial Sequence: Synthetic oligonucleotide
  Target: LAMA2; (-) strand; PAM type: YTN; PAM sequence: TTT
tctcttccctgccttggagg

SEQ ID NO: 279243 - DNA, 20 bp, Artificial Sequence
  Description of Artificial Sequence: Synthetic oligonucleotide
  Target: LAMA2; (-) strand; PAM type: YTN; PAM sequence: TTT
ttctcttccctgccttggag

SEQ ID NO: 279244 - DNA, 20 bp, Artificial Sequence
  Description of Artificial Sequence: Synthetic oligonucleotide
  Target: LAMA2; (-) strand; PAM type: YTN; PAM sequence: TTT
tttctcttccctgccttgga

SEQ ID NO: 279245 - DNA, 20 bp, Artificial Sequence
  Description of Artificial Sequence: Synthetic oligonucleotide
  Target: LAMA2; (-) strand; PAM type: YTN; PAM sequence: TTC
attttttctcttccctgcct

SEQ ID NO: 279246 - DNA, 20 bp, Artificial Sequence
  Description of Artificial Sequence: Synthetic oligonucleotide
  Target: LAMA2; (-) strand; PAM type: YTN; PAM sequence: CTT
cattttttctcttccctgcc

SEQ ID NO: 279247 - DNA, 20 bp, Artificial Sequence
  Description of Artificial Sequence: Synthetic oligonucleotide
  Target: LAMA2; (-) strand; PAM type: YTN; PAM sequence: CTC
ttcattttttctcttccctg

SEQ ID NO: 279248 - DNA, 20 bp, Artificial Sequence
  Description of Artificial Sequence: Synthetic oligonucleotide
  Target: LAMA2; (-) strand; PAM type: YTN; PAM sequence: CTA
catgtctcttcattttttct

SEQ ID NO: 279249 - DNA, 20 bp, Artificial Sequence
  Description of Artificial Sequence: Synthetic oligonucleotide
  Target: LAMA2; (-) strand; PAM type: YTN; PAM sequence: TTC
atgagccagtatggtagggg

SEQ ID NO: 279250 - DNA, 20 bp, Artificial Sequence
  Description of Artificial Sequence: Synthetic oligonucleotide
  Target: LAMA2; (-) strand; PAM type: YTN; PAM sequence: CTT
catgagccagtatggtaggg

SEQ ID NO: 279251 - DNA, 20 bp, Artificial Sequence
  Description of Artificial Sequence: Synthetic oligonucleotide
  Target: LAMA2; (-) strand; PAM type: YTN; PAM sequence: CTC
agaccagacgtggtccaggc

SEQ ID NO: 279252 - DNA, 20 bp, Artificial Sequence
  Description of Artificial Sequence: Synthetic oligonucleotide
  Target: LAMA2; (-) strand; PAM type: YTN; PAM sequence: CTG
gtcaatgactcagaccagac

SEQ ID NO: 279253 - DNA, 20 bp, Artificial Sequence
  Description of Artificial Sequence: Synthetic oligonucleotide
  Target: LAMA2; (-) strand; PAM type: YTN; PAM sequence: TTC
tggtcaatgactcagaccag

SEQ ID NO: 279254 - DNA, 20 bp, Artificial Sequence
  Description of Artificial Sequence: Synthetic oligonucleotide
  Target: LAMA2; (-) strand; PAM type: YTN; PAM sequence: CTT
ctggtcaatgactcagacca

SEQ ID NO: 279255 - DNA, 20 bp, Artificial Sequence
  Description of Artificial Sequence: Synthetic oligonucleotide
  Target: LAMA2; (-) strand; PAM type: YTN; PAM sequence: CTA
cttctggtcaatgactcaga

SEQ ID NO: 279256 - DNA, 20 bp, Artificial Sequence
  Description of Artificial Sequence: Synthetic oligonucleotide
  Target: LAMA2; (-) strand; PAM type: YTN; PAM sequence: TTG
gggcacacggctacttctgg

SEQ ID NO: 279257 - DNA, 20 bp, Artificial Sequence
  Description of Artificial Sequence: Synthetic oligonucleotide
  Target: LAMA2; (-) strand; PAM type: YTN; PAM sequence: CTT
ggggcacacggctacttctg

SEQ ID NO: 279258 - DNA, 20 bp, Artificial Sequence
  Description of Artificial Sequence: Synthetic oligonucleotide
  Target: LAMA2; (-) strand; PAM type: YTN; PAM sequence: TTA
gcttggggcacacggctact

SEQ ID NO: 279259 - DNA, 20 bp, Artificial Sequence
  Description of Artificial Sequence: Synthetic oligonucleotide
  Target: LAMA2; (-) strand; PAM type: YTN; PAM sequence: TTA
cagttagcttggggcacacg

SEQ ID NO: 279260 - DNA, 20 bp, Artificial Sequence
  Description of Artificial Sequence: Synthetic oligonucleotide
  Target: LAMA2; (-) strand; PAM type: YTN; PAM sequence: CTT
acagttagcttggggcacac

SEQ ID NO: 279261 - DNA, 20 bp, Artificial Sequence
  Description of Artificial Sequence: Synthetic oligonucleotide
  Target: LAMA2; (-) strand; PAM type: YTN; PAM sequence: CTC
ccttacagttagcttggggc

SEQ ID NO: 279262 - DNA, 20 bp, Artificial Sequence
  Description of Artificial Sequence: Synthetic oligonucleotide
  Target: LAMA2; (-) strand; PAM type: YTN; PAM sequence: TTC
cagacctcccttacagttag

SEQ ID NO: 279263 - DNA, 20 bp, Artificial Sequence
  Description of Artificial Sequence: Synthetic oligonucleotide
  Target: LAMA2; (-) strand; PAM type: YTN; PAM sequence: TTT
ccagacctcccttacagtta

SEQ ID NO: 279264 - DNA, 20 bp, Artificial Sequence
  Description of Artificial Sequence: Synthetic oligonucleotide
  Target: LAMA2; (-) strand; PAM type: YTN; PAM sequence: TTT
tccagacctcccttacagtt

SEQ ID NO: 279265 - DNA, 20 bp, Artificial Sequence
  Description of Artificial Sequence: Synthetic oligonucleotide
  Target: LAMA2; (-) strand; PAM type: YTN; PAM sequence: CTT
ttccagacctcccttacagt

SEQ ID NO: 279266 - DNA, 20 bp, Artificial Sequence
  Description of Artificial Sequence: Synthetic oligonucleotide
  Target: LAMA2; (-) strand; PAM type: YTN; PAM sequence: CTA
cttttccagacctcccttac

SEQ ID NO: 279267 - DNA, 20 bp, Artificial Sequence
  Description of Artificial Sequence: Synthetic oligonucleotide
  Target: LAMA2; (-) strand; PAM type: YTN; PAM sequence: CTC
ctacttttccagacctccct

SEQ ID NO: 279268 - DNA, 20 bp, Artificial Sequence
  Description of Artificial Sequence: Synthetic oligonucleotide
  Target: LAMA2; (-) strand; PAM type: YTN; PAM sequence: CTA
tgtgcctcctacttttccag

SEQ ID NO: 279269 - DNA, 20 bp, Artificial Sequence
  Description of Artificial Sequence: Synthetic oligonucleotide
  Target: LAMA2; (-) strand; PAM type: YTN; PAM sequence: CTC
atcaaatatcctatgtgcct

SEQ ID NO: 279270 - DNA, 20 bp, Artificial Sequence
  Description of Artificial Sequence: Synthetic oligonucleotide
  Target: LAMA2; (-) strand; PAM type: YTN; PAM sequence: TTA
gtgctcatcaaatatcctat

SEQ ID NO: 279271 - DNA, 20 bp, Artificial Sequence
  Description of Artificial Sequence: Synthetic oligonucleotide
  Target: LAMA2; (-) strand; PAM type: YTN; PAM sequence: CTG
aagcagagatagttagtgct

SEQ ID NO: 279272 - DNA, 20 bp, Artificial Sequence
  Description of Artificial Sequence: Synthetic oligonucleotide
  Target: LAMA2; (-) strand; PAM type: YTN; PAM sequence: TTA
tgaagacaacctgaagcaga

SEQ ID NO: 279273 - DNA, 20 bp, Artificial Sequence
  Description of Artificial Sequence: Synthetic oligonucleotide
  Target: LAMA2; (-) strand; PAM type: YTN; PAM sequence: TTA
ttatgaagacaacctgaagc

SEQ ID NO: 279274 - DNA, 20 bp, Artificial Sequence
  Description of Artificial Sequence: Synthetic oligonucleotide
  Target: LAMA2; (-) strand; PAM type: YTN; PAM sequence: TTT
attatgaagacaacctgaag

SEQ ID NO: 279275 - DNA, 20 bp, Artificial Sequence
  Description of Artificial Sequence: Synthetic oligonucleotide
  Target: LAMA2; (-) strand; PAM type: YTN; PAM sequence: TTG
catttattatgaagacaacc

SEQ ID NO: 279276 - DNA, 20 bp, Artificial Sequence
  Description of Artificial Sequence: Synthetic oligonucleotide
  Target: LAMA2; (-) strand; PAM type: YTN; PAM sequence: TTT
gcatttattatgaagacaac

SEQ ID NO: 279277 - DNA, 20 bp, Artificial Sequence
  Description of Artificial Sequence: Synthetic oligonucleotide
  Target: LAMA2; (-) strand; PAM type: YTN; PAM sequence: TTA
atgtttgcatttattatgaa

SEQ ID NO: 279278 - DNA, 20 bp, Artificial Sequence
  Description of Artificial Sequence: Synthetic oligonucleotide
  Target: LAMA2; (-) strand; PAM type: YTN; PAM sequence: TTT
aatgtttgcatttattatga

SEQ ID NO: 279279 - DNA, 20 bp, Artificial Sequence
  Description of Artificial Sequence: Synthetic oligonucleotide
  Target: LAMA2; (-) strand; PAM type: YTN; PAM sequence: TTT
taatgtttgcatttattatg

SEQ ID NO: 279280 - DNA, 20 bp, Artificial Sequence
  Description of Artificial Sequence: Synthetic oligonucleotide
  Target: LAMA2; (-) strand; PAM type: YTN; PAM sequence: CTG
tcaattttaatgtttgcatt

SEQ ID NO: 279281 - DNA, 20 bp, Artificial Sequence
  Description of Artificial Sequence: Synthetic oligonucleotide
  Target: LAMA2; (-) strand; PAM type: YTN; PAM sequence: TTA
atccaatatgaaaatcatag

SEQ ID NO: 279282 - DNA, 20 bp, Artificial Sequence
  Description of Artificial Sequence: Synthetic oligonucleotide
  Target: LAMA2; (-) strand; PAM type: YTN; PAM sequence: TTT
aatccaatatgaaaatcata

SEQ ID NO: 279283 - DNA, 20 bp, Artificial Sequence
  Description of Artificial Sequence: Synthetic oligonucleotide
  Target: LAMA2; (-) strand; PAM type: YTN; PAM sequence: TTT
taatccaatatgaaaatcat

SEQ ID NO: 279284 - DNA, 20 bp, Artificial Sequence
  Description of Artificial Sequence: Synthetic oligonucleotide
  Target: LAMA2; (-) strand; PAM type: YTN; PAM sequence: TTA
gacattttaatccaatatga

SEQ ID NO: 279285 - DNA, 20 bp, Artificial Sequence
  Description of Artificial Sequence: Synthetic oligonucleotide
  Target: LAMA2; (-) strand; PAM type: YTN; PAM sequence: TTT
agacattttaatccaatatg

SEQ ID NO: 279286 - DNA, 20 bp, Artificial Sequence
  Description of Artificial Sequence: Synthetic oligonucleotide
  Target: LAMA2; (-) strand; PAM type: YTN; PAM sequence: TTT
tagacattttaatccaatat

SEQ ID NO: 279287 - DNA, 20 bp, Artificial Sequence
  Description of Artificial Sequence: Synthetic oligonucleotide
  Target: LAMA2; (-) strand; PAM type: YTN; PAM sequence: TTG
ttttagacattttaatccaa

SEQ ID NO: 279288 - DNA, 20 bp, Artificial Sequence
  Description of Artificial Sequence: Synthetic oligonucleotide
  Target: LAMA2; (-) strand; PAM type: YTN; PAM sequence: TTT
gttttagacattttaatcca

SEQ ID NO: 279289 - DNA, 20 bp, Artificial Sequence
  Description of Artificial Sequence: Synthetic oligonucleotide
  Target: LAMA2; (-) strand; PAM type: YTN; PAM sequence: CTT
tgttttagacattttaatcc

SEQ ID NO: 279290 - DNA, 20 bp, Artificial Sequence
  Description of Artificial Sequence: Synthetic oligonucleotide
  Target: LAMA2; (-) strand; PAM type: YTN; PAM sequence: TTG
tgtaagtcatacatagacga

SEQ ID NO: 279291 - DNA, 20 bp, Artificial Sequence
  Description of Artificial Sequence: Synthetic oligonucleotide
  Target: LAMA2; (-) strand; PAM type: YTN; PAM sequence: TTT
gtgtaagtcatacatagacg

SEQ ID NO: 279292 - DNA, 20 bp, Artificial Sequence
  Description of Artificial Sequence: Synthetic oligonucleotide
  Target: LAMA2; (-) strand; PAM type: YTN; PAM sequence: TTG
cagtatttgtgtaagtcata

SEQ ID NO: 279293 - DNA, 20 bp, Artificial Sequence
  Description of Artificial Sequence: Synthetic oligonucleotide
  Target: LAMA2; (-) strand; PAM type: YTN; PAM sequence: TTT
gcagtatttgtgtaagtcat

SEQ ID NO: 279294 - DNA, 20 bp, Artificial Sequence
  Description of Artificial Sequence: Synthetic oligonucleotide
  Target: LAMA2; (-) strand; PAM type: YTN; PAM sequence: CTA
agatttgcagtatttgtgta

SEQ ID NO: 279295 - DNA, 20 bp, Artificial Sequence
  Description of Artificial Sequence: Synthetic oligonucleotide
  Target: LAMA2; (-) strand; PAM type: YTN; PAM sequence: TTC
ccctaagatttgcagtattt

SEQ ID NO: 279296 - DNA, 20 bp, Artificial Sequence
  Description of Artificial Sequence: Synthetic oligonucleotide
  Target: LAMA2; (-) strand; PAM type: YTN; PAM sequence: CTG
ttcccctaagatttgcagta

SEQ ID NO: 279297 - DNA, 20 bp, Artificial Sequence
  Description of Artificial Sequence: Synthetic oligonucleotide
  Target: LAMA2; (-) strand; PAM type: YTN; PAM sequence: TTC
tgttcccctaagatttgcag

SEQ ID NO: 279298 - DNA, 20 bp, Artificial Sequence
  Description of Artificial Sequence: Synthetic oligonucleotide
  Target: LAMA2; (-) strand; PAM type: YTN; PAM sequence: TTT
ctgttcccctaagatttgca

SEQ ID NO: 279299 - DNA, 20 bp, Artificial Sequence
  Description of Artificial Sequence: Synthetic oligonucleotide
  Target: LAMA2; (-) strand; PAM type: YTN; PAM sequence: CTT
tctgttcccctaagatttgc

SEQ ID NO: 279300 - DNA, 20 bp, Artificial Sequence
  Description of Artificial Sequence: Synthetic oligonucleotide
  Target: LAMA2; (-) strand; PAM type: YTN; PAM sequence: TTC
agtctttctgttcccctaag

SEQ ID NO: 279301 - DNA, 20 bp, Artificial Sequence
  Description of Artificial Sequence: Synthetic oligonucleotide
  Target: LAMA2; (-) strand; PAM type: YTN; PAM sequence: TTT
cagtctttctgttcccctaa

SEQ ID NO: 279302 - DNA, 20 bp, Artificial Sequence
  Description of Artificial Sequence: Synthetic oligonucleotide
  Target: LAMA2; (-) strand; PAM type: YTN; PAM sequence: TTT
tcagtctttctgttccccta

SEQ ID NO: 279303 - DNA, 20 bp, Artificial Sequence
  Description of Artificial Sequence: Synthetic oligonucleotide
  Target: LAMA2; (-) strand; PAM type: YTN; PAM sequence: CTC
attttcagtctttctgttcc

SEQ ID NO: 279304 - DNA, 20 bp, Artificial Sequence
  Description of Artificial Sequence: Synthetic oligonucleotide
  Target: LAMA2; (-) strand; PAM type: YTN; PAM sequence: CTC
tcattttcagtctttctgtt

SEQ ID NO: 279305 - DNA, 20 bp, Artificial Sequence
  Description of Artificial Sequence: Synthetic oligonucleotide
  Target: LAMA2; (-) strand; PAM type: YTN; PAM sequence: TTA
tctctcattttcagtctttc

SEQ ID NO: 279306 - DNA, 20 bp, Artificial Sequence
  Description of Artificial Sequence: Synthetic oligonucleotide
  Target: LAMA2; (-) strand; PAM type: YTN; PAM sequence: CTT
atctctcattttcagtcttt

SEQ ID NO: 279307 - DNA, 20 bp, Artificial Sequence
  Description of Artificial Sequence: Synthetic oligonucleotide
  Target: LAMA2; (-) strand; PAM type: YTN; PAM sequence: TTG
catagtgtatcttatctctc

SEQ ID NO: 279308 - DNA, 20 bp, Artificial Sequence
  Description of Artificial Sequence: Synthetic oligonucleotide
  Target: LAMA2; (-) strand; PAM type: YTN; PAM sequence: TTT
gcatagtgtatcttatctct

SEQ ID NO: 279309 - DNA, 20 bp, Artificial Sequence
  Description of Artificial Sequence: Synthetic oligonucleotide
  Target: LAMA2; (-) strand; PAM type: YTN; PAM sequence: TTA
gagtttgcatagtgtatctt

SEQ ID NO: 279310 - DNA, 20 bp, Artificial Sequence
  Description of Artificial Sequence: Synthetic oligonucleotide
  Target: LAMA2; (-) strand; PAM type: YTN; PAM sequence: CTG
gttagagtttgcatagtgta

SEQ ID NO: 279311 - DNA, 20 bp, Artificial Sequence
  Description of Artificial Sequence: Synthetic oligonucleotide
  Target: LAMA2; (-) strand; PAM type: YTN; PAM sequence: TTC
tggttagagtttgcatagtg

SEQ ID NO: 279312 - DNA, 20 bp, Artificial Sequence
  Description of Artificial Sequence: Synthetic oligonucleotide
  Target: LAMA2; (-) strand; PAM type: YTN; PAM sequence: CTT
ctggttagagtttgcatagt

SEQ ID NO: 279313 - DNA, 20 bp, Artificial Sequence
  Description of Artificial Sequence: Synthetic oligonucleotide
  Target: LAMA2; (-) strand; PAM type: YTN; PAM sequence: TTC
ttctggttagagtttgcata

SEQ ID NO: 279314 - DNA, 20 bp, Artificial Sequence
  Description of Artificial Sequence: Synthetic oligonucleotide
  Target: LAMA2; (-) strand; PAM type: YTN; PAM sequence: TTT
cttctggttagagtttgcat

SEQ ID NO: 279315 - DNA, 20 bp, Artificial Sequence
  Description of Artificial Sequence: Synthetic oligonucleotide
  Target: LAMA2; (-) strand; PAM type: YTN; PAM sequence: CTT
tcttctggttagagtttgca

SEQ ID NO: 279316 - DNA, 20 bp, Artificial Sequence
  Description of Artificial Sequence: Synthetic oligonucleotide
  Target: LAMA2; (-) strand; PAM type: YTN; PAM sequence: TTA
atggtagcataccagctttc

SEQ ID NO: 279317 - DNA, 20 bp, Artificial Sequence
  Description of Artificial Sequence: Synthetic oligonucleotide
  Target: LAMA2; (-) strand; PAM type: YTN; PAM sequence: CTA
ttaatggtagcataccagct

SEQ ID NO: 279318 - DNA, 20 bp, Artificial Sequence
  Description of Artificial Sequence: Synthetic oligonucleotide
  Target: LAMA2; (-) strand; PAM type: YTN; PAM sequence: TTG
ctattaatggtagcatacca

SEQ ID NO: 279319 - DNA, 20 bp, Artificial Sequence
  Description of Artificial Sequence: Synthetic oligonucleotide
  Target: LAMA2; (-) strand; PAM type: YTN; PAM sequence: TTG
attgctattaatggtagcat

SEQ ID NO: 279320 - DNA, 20 bp, Artificial Sequence
  Description of Artificial Sequence: Synthetic oligonucleotide
  Target: LAMA2; (-) strand; PAM type: YTN; PAM sequence: TTT
gattgctattaatggtagca

SEQ ID NO: 279321 - DNA, 20 bp, Artificial Sequence
  Description of Artificial Sequence: Synthetic oligonucleotide
  Target: LAMA2; (-) strand; PAM type: YTN; PAM sequence: TTT
tgattgctattaatggtagc

SEQ ID NO: 279322 - DNA, 20 bp, Artificial Sequence
  Description of Artificial Sequence: Synthetic oligonucleotide
  Target: LAMA2; (-) strand; PAM type: YTN; PAM sequence: TTT
ttgattgctattaatggtag

SEQ ID NO: 279323 - DNA, 20 bp, Artificial Sequence
  Description of Artificial Sequence: Synthetic oligonucleotide
  Target: LAMA2; (-) strand; PAM type: YTN; PAM sequence: CTT
tttgattgctattaatggta

SEQ ID NO: 279324 - DNA, 20 bp, Artificial Sequence
  Description of Artificial Sequence: Synthetic oligonucleotide
  Target: LAMA2; (-) strand; PAM type: YTN; PAM sequence: TTA
aagtctttttgattgctatt

SEQ ID NO: 279325 - DNA, 20 bp, Artificial Sequence
  Description of Artificial Sequence: Synthetic oligonucleotide
  Target: LAMA2; (-) strand; PAM type: YTN; PAM sequence: TTA
aaaaaattaaagtctttttg

SEQ ID NO: 279326 - DNA, 20 bp, Artificial Sequence
  Description of Artificial Sequence: Synthetic oligonucleotide
  Target: LAMA2; (-) strand; PAM type: YTN; PAM sequence: TTT
aaaaaaattaaagtcttttt

SEQ ID NO: 279327 - DNA, 20 bp, Artificial Sequence
  Description of Artificial Sequence: Synthetic oligonucleotide
  Target: LAMA2; (-) strand; PAM type: YTN; PAM sequence: TTT
taaaaaaattaaagtctttt

SEQ ID NO: 279328 - DNA, 20 bp, Artificial Sequence
  Description of Artificial Sequence: Synthetic oligonucleotide
  Target: LAMA2; (-) strand; PAM type: YTN; PAM sequence: CTT
ttaaaaaaattaaagtcttt

SEQ ID NO: 279329 - DNA, 20 bp, Artificial Sequence
  Description of Artificial Sequence: Synthetic oligonucleotide
  Target: LAMA2; (-) strand; PAM type: YTN; PAM sequence: TTC
ttttaaaaaaattaaagtct

SEQ ID NO: 279330 - DNA, 20 bp, Artificial Sequence
  Description of Artificial Sequence: Synthetic oligonucleotide
  Target: LAMA2; (-) strand; PAM type: YTN; PAM sequence: TTA
ataattcttttaaaaaaatt

SEQ ID NO: 279331 - DNA, 20 bp, Artificial Sequence
  Description of Artificial Sequence: Synthetic oligonucleotide
  Target: LAMA2; (-) strand; PAM type: YTN; PAM sequence: CTT
aataattcttttaaaaaaat

SEQ ID NO: 279332 - DNA, 20 bp, Artificial Sequence
  Description of Artificial Sequence: Synthetic oligonucleotide
  Target: LAMA2; (-) strand; PAM type: YTN; PAM sequence: TTG
tccttaataattcttttaaa

SEQ ID NO: 279333 - DNA, 20 bp, Artificial Sequence
  Description of Artificial Sequence: Synthetic oligonucleotide
  Target: LAMA2; (-) strand; PAM type: YTN; PAM sequence: TTT
gtccttaataattcttttaa

SEQ ID NO: 279334 - DNA, 20 bp, Artificial Sequence
  Description of Artificial Sequence: Synthetic oligonucleotide
  Target: LAMA2; (-) strand; PAM type: YTN; PAM sequence: CTT
tgtccttaataattctttta

SEQ ID NO: 279335 - DNA, 20 bp, Artificial Sequence
  Description of Artificial Sequence: Synthetic oligonucleotide
  Target: LAMA2; (-) strand; PAM type: YTN; PAM sequence: TTC
tttgtccttaataattcttt

SEQ ID NO: 279336 - DNA, 20 bp, Artificial Sequence
  Description of Artificial Sequence: Synthetic oligonucleotide
  Target: LAMA2; (-) strand; PAM type: YTN; PAM sequence: TTT
ctttgtccttaataattctt

SEQ ID NO: 279337 - DNA, 20 bp, Artificial Sequence
  Description of Artificial Sequence: Synthetic oligonucleotide
  Target: LAMA2; (-) strand; PAM type: YTN; PAM sequence: CTT
tctttgtccttaataattct

SEQ ID NO: 279338 - DNA, 20 bp, Artificial Sequence
  Description of Artificial Sequence: Synthetic oligonucleotide
  Target: LAMA2; (-) strand; PAM type: YTN; PAM sequence: CTA
tcatgatcactttctttgtc

SEQ ID NO: 279339 - DNA, 20 bp, Artificial Sequence
  Description of Artificial Sequence: Synthetic oligonucleotide
  Target: LAMA2; (-) strand; PAM type: YTN; PAM sequence: TTC
tatcatgatcactttctttg

SEQ ID NO: 279340 - DNA, 20 bp, Artificial Sequence
  Description of Artificial Sequence: Synthetic oligonucleotide
  Target: LAMA2; (-) strand; PAM type: YTN; PAM sequence: TTA
ttctatcatgatcactttct

SEQ ID NO: 279341 - DNA, 20 bp, Artificial Sequence
  Description of Artificial Sequence: Synthetic oligonucleotide
  Target: LAMA2; (-) strand; PAM type: YTN; PAM sequence: TTT
attctatcatgatcactttc

SEQ ID NO: 279342 - DNA, 20 bp, Artificial Sequence
  Description of Artificial Sequence: Synthetic oligonucleotide
  Target: LAMA2; (-) strand; PAM type: YTN; PAM sequence: TTT
tattctatcatgatcacttt

SEQ ID NO: 279343 - DNA, 20 bp, Artificial Sequence
  Description of Artificial Sequence: Synthetic oligonucleotide
  Target: LAMA2; (-) strand; PAM type: YTN; PAM sequence: CTT
ttattctatcatgatcactt

SEQ ID NO: 279344 - DNA, 20 bp, Artificial Sequence
  Description of Artificial Sequence: Synthetic oligonucleotide
  Target: LAMA2; (-) strand; PAM type: YTN; PAM sequence: TTC
cttttattctatcatgatca

SEQ ID NO: 279345 - DNA, 20 bp, Artificial Sequence
  Description of Artificial Sequence: Synthetic oligonucleotide
  Target: LAMA2; (-) strand; PAM type: YTN; PAM sequence: TTG
ttccttttattctatcatga

SEQ ID NO: 279346 - DNA, 20 bp, Artificial Sequence
  Description of Artificial Sequence: Synthetic oligonucleotide
  Target: LAMA2; (-) strand; PAM type: YTN; PAM sequence: CTT
gttccttttattctatcatg

SEQ ID NO: 279347 - DNA, 20 bp, Artificial Sequence
  Description of Artificial Sequence: Synthetic oligonucleotide
  Target: LAMA2; (-) strand; PAM type: YTN; PAM sequence: TTC
cttgttccttttattctatc

SEQ ID NO: 279348 - DNA, 20 bp, Artificial Sequence
  Description of Artificial Sequence: Synthetic oligonucleotide
  Target: LAMA2; (-) strand; PAM type: YTN; PAM sequence: TTT
ccttgttccttttattctat

SEQ ID NO: 279349 - DNA, 20 bp, Artificial Sequence
  Description of Artificial Sequence: Synthetic oligonucleotide
  Target: LAMA2; (-) strand; PAM type: YTN; PAM sequence: TTT
tccttgttccttttattcta

SEQ ID NO: 279350 - DNA, 20 bp, Artificial Sequence
  Description of Artificial Sequence: Synthetic oligonucleotide
  Target: LAMA2; (-) strand; PAM type: YTN; PAM sequence: TTA
gttttccttgttccttttat

SEQ ID NO: 279351 - DNA, 20 bp, Artificial Sequence
  Description of Artificial Sequence: Synthetic oligonucleotide
  Target: LAMA2; (-) strand; PAM type: YTN; PAM sequence: TTT
agttttccttgttcctttta

SEQ ID NO: 279352 - DNA, 20 bp, Artificial Sequence
  Description of Artificial Sequence: Synthetic oligonucleotide
  Target: LAMA2; (-) strand; PAM type: YTN; PAM sequence: TTT
tagttttccttgttcctttt

SEQ ID NO: 279353 - DNA, 20 bp, Artificial Sequence
  Description of Artificial Sequence: Synthetic oligonucleotide
  Target: LAMA2; (-) strand; PAM type: YTN; PAM sequence: TTT
ttagttttccttgttccttt

SEQ ID NO: 279354 - DNA, 20 bp, Artificial Sequence
  Description of Artificial Sequence: Synthetic oligonucleotide
  Target: LAMA2; (-) strand; PAM type: YTN; PAM sequence: TTT
tttagttttccttgttcctt

SEQ ID NO: 279355 - DNA, 20 bp, Artificial Sequence
  Description of Artificial Sequence: Synthetic oligonucleotide
  Target: LAMA2; (-) strand; PAM type: YTN; PAM sequence: CTC
ataattttttagttttcctt

SEQ ID NO: 279356 - DNA, 20 bp, Artificial Sequence
  Description of Artificial Sequence: Synthetic oligonucleotide
  Target: LAMA2; (-) strand; PAM type: YTN; PAM sequence: TTG
caggctcataattttttagt

SEQ ID NO: 279357 - DNA, 20 bp, Artificial Sequence
  Description of Artificial Sequence: Synthetic oligonucleotide
  Target: LAMA2; (-) strand; PAM type: YTN; PAM sequence: CTT
gcaggctcataattttttag

SEQ ID NO: 279358 - DNA, 20 bp, Artificial Sequence
  Description of Artificial Sequence: Synthetic oligonucleotide
  Target: LAMA2; (-) strand; PAM type: YTN; PAM sequence: TTA
tgaccttgcaggctcataat

SEQ ID NO: 279359 - DNA, 20 bp, Artificial Sequence
  Description of Artificial Sequence: Synthetic oligonucleotide
  Target: LAMA2; (-) strand; PAM type: YTN; PAM sequence: TTA
ttatgaccttgcaggctcat

SEQ ID NO: 279360 - DNA, 20 bp, Artificial Sequence
  Description of Artificial Sequence: Synthetic oligonucleotide
  Target: LAMA2; (-) strand; PAM type: YTN; PAM sequence: TTG
ttattatgaccttgcaggct

SEQ ID NO: 279361 - DNA, 20 bp, Artificial Sequence
  Description of Artificial Sequence: Synthetic oligonucleotide
  Target: LAMA2; (-) strand; PAM type: YTN; PAM sequence: TTT
gttattatgaccttgcaggc

SEQ ID NO: 279362 - DNA, 20 bp, Artificial Sequence
  Description of Artificial Sequence: Synthetic oligonucleotide
  Target: LAMA2; (-) strand; PAM type: YTN; PAM sequence: CTT
tgttattatgaccttgcagg

SEQ ID NO: 279363 - DNA, 20 bp, Artificial Sequence
  Description of Artificial Sequence: Synthetic oligonucleotide
  Target: LAMA2; (-) strand; PAM type: YTN; PAM sequence: TTA
tccataggctttgttattat

SEQ ID NO: 279364 - DNA, 20 bp, Artificial Sequence
  Description of Artificial Sequence: Synthetic oligonucleotide
  Target: LAMA2; (-) strand; PAM type: YTN; PAM sequence: TTT
atccataggctttgttatta

SEQ ID NO: 279365 - DNA, 20 bp, Artificial Sequence
  Description of Artificial Sequence: Synthetic oligonucleotide
  Target: LAMA2; (-) strand; PAM type: YTN; PAM sequence: TTA
tttatccataggctttgtta

SEQ ID NO: 279366 - DNA, 20 bp, Artificial Sequence
  Description of Artificial Sequence: Synthetic oligonucleotide
  Target: LAMA2; (-) strand; PAM type: YTN; PAM sequence: TTT
atttatccataggctttgtt

SEQ ID NO: 279367 - DNA, 20 bp, Artificial Sequence
  Description of Artificial Sequence: Synthetic oligonucleotide
  Target: LAMA2; (-) strand; PAM type: YTN; PAM sequence: CTT
tatttatccataggctttgt

SEQ ID NO: 279368 - DNA, 20 bp, Artificial Sequence
  Description of Artificial Sequence: Synthetic oligonucleotide
  Target: LAMA2; (-) strand; PAM type: YTN; PAM sequence: TTA
tctttatttatccataggct

SEQ ID NO: 279369 - DNA, 20 bp, Artificial Sequence
  Description of Artificial Sequence: Synthetic oligonucleotide
  Target: LAMA2; (-) strand; PAM type: YTN; PAM sequence: TTT
atctttatttatccataggc

SEQ ID NO: 279370 - DNA, 20 bp, Artificial Sequence
  Description of Artificial Sequence: Synthetic oligonucleotide
  Target: LAMA2; (-) strand; PAM type: YTN; PAM sequence: CTG
atatatttatctttatttat

SEQ ID NO: 279371 - DNA, 20 bp, Artificial Sequence
  Description of Artificial Sequence: Synthetic oligonucleotide
  Target: LAMA2; (-) strand; PAM type: YTN; PAM sequence: TTC
tgatatatttatctttattt

SEQ ID NO: 279372 - DNA, 20 bp, Artificial Sequence
  Description of Artificial Sequence: Synthetic oligonucleotide
  Target: LAMA2; (-) strand; PAM type: YTN; PAM sequence: CTC
attctgatatatttatcttt

SEQ ID NO: 279373 - DNA, 20 bp, Artificial Sequence
  Description of Artificial Sequence: Synthetic oligonucleotide
  Target: LAMA2; (-) strand; PAM type: YTN; PAM sequence: TTC
tcattctgatatatttatct

SEQ ID NO: 279374 - DNA, 20 bp, Artificial Sequence
  Description of Artificial Sequence: Synthetic oligonucleotide
  Target: LAMA2; (-) strand; PAM type: YTN; PAM sequence: TTA
tatatatgaaaatgttctca

SEQ ID NO: 279375 - DNA, 20 bp, Artificial Sequence
  Description of Artificial Sequence: Synthetic oligonucleotide
  Target: LAMA2; (-) strand; PAM type: YTN; PAM sequence: CTA
ttatatatatgaaaatgttc

SEQ ID NO: 279376 - DNA, 20 bp, Artificial Sequence
  Description of Artificial Sequence: Synthetic oligonucleotide
  Target: LAMA2; (-) strand; PAM type: YTN; PAM sequence: TTC
cctattatatatatgaaaat

SEQ ID NO: 279377 - DNA, 20 bp, Artificial Sequence
  Description of Artificial Sequence: Synthetic oligonucleotide
  Target: LAMA2; (-) strand; PAM type: YTN; PAM sequence: TTA
agagagatatggtaaaatca

SEQ ID NO: 279378 - DNA, 20 bp, Artificial Sequence
  Description of Artificial Sequence: Synthetic oligonucleotide
  Target: LAMA2; (-) strand; PAM type: YTN; PAM sequence: TTT
aagagagatatggtaaaatc

SEQ ID NO: 279379 - DNA, 20 bp, Artificial Sequence
  Description of Artificial Sequence: Synthetic oligonucleotide
  Target: LAMA2; (-) strand; PAM type: YTN; PAM sequence: TTT
taagagagatatggtaaaat

SEQ ID NO: 279380 - DNA, 20 bp, Artificial Sequence
  Description of Artificial Sequence: Synthetic oligonucleotide
  Target: LAMA2; (-) strand; PAM type: YTN; PAM sequence: TTT
ttaagagagatatggtaaaa

SEQ ID NO: 279381 - DNA, 20 bp, Artificial Sequence
  Description of Artificial Sequence: Synthetic oligonucleotide
  Target: LAMA2; (-) strand; PAM type: YTN; PAM sequence: CTT
tttaagagagatatggtaaa

SEQ ID NO: 279382 - DNA, 20 bp, Artificial Sequence
  Description of Artificial Sequence: Synthetic oligonucleotide
  Target: LAMA2; (-) strand; PAM type: YTN; PAM sequence: CTA
tcactttttaagagagatat

SEQ ID NO: 279383 - DNA, 20 bp, Artificial Sequence
  Description of Artificial Sequence: Synthetic oligonucleotide
  Target: LAMA2; (-) strand; PAM type: YTN; PAM sequence: TTG
atctatcactttttaagaga

SEQ ID NO: 279384 - DNA, 20 bp, Artificial Sequence
  Description of Artificial Sequence: Synthetic oligonucleotide
  Target: LAMA2; (-) strand; PAM type: YTN; PAM sequence: CTT
gatctatcactttttaagag

SEQ ID NO: 279385 - DNA, 20 bp, Artificial Sequence
  Description of Artificial Sequence: Synthetic oligonucleotide
  Target: LAMA2; (-) strand; PAM type: YTN; PAM sequence: TTG
cttgatctatcactttttaa

SEQ ID NO: 279386 - DNA, 20 bp, Artificial Sequence
  Description of Artificial Sequence: Synthetic oligonucleotide
  Target: LAMA2; (-) strand; PAM type: YTN; PAM sequence: TTT
gcttgatctatcacttttta

SEQ ID NO: 279387 - DNA, 20 bp, Artificial Sequence
  Description of Artificial Sequence: Synthetic oligonucleotide
  Target: LAMA2; (-) strand; PAM type: YTN; PAM sequence: CTT
tgcttgatctatcacttttt

SEQ ID NO: 279388 - DNA, 20 bp, Artificial Sequence
  Description of Artificial Sequence: Synthetic oligonucleotide
  Target: LAMA2; (-) strand; PAM type: YTN; PAM sequence: CTC
tttgcttgatctatcacttt

SEQ ID NO: 279389 - DNA, 20 bp, Artificial Sequence
  Description of Artificial Sequence: Synthetic oligonucleotide
  Target: LAMA2; (-) strand; PAM type: YTN; PAM sequence: CTG
tgtctctttgcttgatctat

SEQ ID NO: 279390 - DNA, 20 bp, Artificial Sequence
  Description of Artificial Sequence: Synthetic oligonucleotide
  Target: LAMA2; (-) strand; PAM type: YTN; PAM sequence: TTA
aaatctgtgtctctttgctt

SEQ ID NO: 279391 - DNA, 20 bp, Artificial Sequence
  Description of Artificial Sequence: Synthetic oligonucleotide
  Target: LAMA2; (-) strand; PAM type: YTN; PAM sequence: TTT
aaaatctgtgtctctttgct

SEQ ID NO: 279392 - DNA, 20 bp, Artificial Sequence
  Description of Artificial Sequence: Synthetic oligonucleotide
  Target: LAMA2; (-) strand; PAM type: YTN; PAM sequence: TTT
taaaatctgtgtctctttgc

SEQ ID NO: 279393 - DNA, 20 bp, Artificial Sequence
  Description of Artificial Sequence: Synthetic oligonucleotide
  Target: LAMA2; (-) strand; PAM type: YTN; PAM sequence: CTT
ttaaaatctgtgtctctttg

SEQ ID NO: 279394 - DNA, 20 bp, Artificial Sequence
  Description of Artificial Sequence: Synthetic oligonucleotide
  Target: LAMA2; (-) strand; PAM type: YTN; PAM sequence: TTG
tgtaaggtacttttaaaatc

SEQ ID NO: 279395 - DNA, 20 bp, Artificial Sequence
  Description of Artificial Sequence: Synthetic oligonucleotide
  Target: LAMA2; (-) strand; PAM type: YTN; PAM sequence: CTT
gtgtaaggtacttttaaaat

SEQ ID NO: 279396 - DNA, 20 bp, Artificial Sequence
  Description of Artificial Sequence: Synthetic oligonucleotide
  Target: LAMA2; (-) strand; PAM type: YTN; PAM sequence: TTA
tcttgtgtaaggtactttta

SEQ ID NO: 279397 - DNA, 20 bp, Artificial Sequence
  Description of Artificial Sequence: Synthetic oligonucleotide
  Target: LAMA2; (-) strand; PAM type: YTN; PAM sequence: TTA
agttatcttgtgtaaggtac

SEQ ID NO: 279398 - DNA, 20 bp, Artificial Sequence
  Description of Artificial Sequence: Synthetic oligonucleotide
  Target: LAMA2; (-) strand; PAM type: YTN; PAM sequence: CTA
taaggccattaagttatctt

SEQ ID NO: 279399 - DNA, 20 bp, Artificial Sequence
  Description of Artificial Sequence: Synthetic oligonucleotide
  Target: LAMA2; (-) strand; PAM type: YTN; PAM sequence: TTC
tataaggccattaagttatc

SEQ ID NO: 279400 - DNA, 20 bp, Artificial Sequence
  Description of Artificial Sequence: Synthetic oligonucleotide
  Target: LAMA2; (-) strand; PAM type: YTN; PAM sequence: TTG
acatagagttctataaggcc

SEQ ID NO: 279401 - DNA, 20 bp, Artificial Sequence
  Description of Artificial Sequence: Synthetic oligonucleotide
  Target: LAMA2; (-) strand; PAM type: YTN; PAM sequence: CTA
gttgacatagagttctataa

SEQ ID NO: 279402 - DNA, 20 bp, Artificial Sequence
  Description of Artificial Sequence: Synthetic oligonucleotide
  Target: LAMA2; (-) strand; PAM type: YTN; PAM sequence: TTA
tctagttgacatagagttct

SEQ ID NO: 279403 - DNA, 20 bp, Artificial Sequence
  Description of Artificial Sequence: Synthetic oligonucleotide
  Target: LAMA2; (-) strand; PAM type: YTN; PAM sequence: TTA
attatctagttgacatagag

SEQ ID NO: 279404 - DNA, 20 bp, Artificial Sequence
  Description of Artificial Sequence: Synthetic oligonucleotide
  Target: LAMA2; (-) strand; PAM type: YTN; PAM sequence: TTC
atcgaatggggcatgtagaa

SEQ ID NO: 279405 - DNA, 20 bp, Artificial Sequence
  Description of Artificial Sequence: Synthetic oligonucleotide
  Target: LAMA2; (-) strand; PAM type: YTN; PAM sequence: CTT
catcgaatggggcatgtaga

SEQ ID NO: 279406 - DNA, 20 bp, Artificial Sequence
  Description of Artificial Sequence: Synthetic oligonucleotide
  Target: LAMA2; (-) strand; PAM type: YTN; PAM sequence: TTA
cttcatcgaatggggcatgt

SEQ ID NO: 279407 - DNA, 20 bp, Artificial Sequence
  Description of Artificial Sequence: Synthetic oligonucleotide
  Target: LAMA2; (-) strand; PAM type: YTN; PAM sequence: TTC
atgagttacttcatcgaatg

SEQ ID NO: 279408 - DNA, 20 bp, Artificial Sequence
  Description of Artificial Sequence: Synthetic oligonucleotide
  Target: LAMA2; (-) strand; PAM type: YTN; PAM sequence: TTT
catgagttacttcatcgaat

SEQ ID NO: 279409 - DNA, 20 bp, Artificial Sequence
  Description of Artificial Sequence: Synthetic oligonucleotide
  Target: LAMA2; (-) strand; PAM type: YTN; PAM sequence: TTG
tttcatgagttacttcatcg

SEQ ID NO: 279410 - DNA, 20 bp, Artificial Sequence
  Description of Artificial Sequence: Synthetic oligonucleotide
  Target: LAMA2; (-) strand; PAM type: YTN; PAM sequence: TTT
gtttcatgagttacttcatc

SEQ ID NO: 279411 - DNA, 20 bp, Artificial Sequence
  Description of Artificial Sequence: Synthetic oligonucleotide
  Target: LAMA2; (-) strand; PAM type: YTN; PAM sequence: TTG
tttgtttcatgagttacttc

SEQ ID NO: 279412 - DNA, 20 bp, Artificial Sequence
  Description of Artificial Sequence: Synthetic oligonucleotide
  Target: LAMA2; (-) strand; PAM type: YTN; PAM sequence: TTT
gtttgtttcatgagttactt

SEQ ID NO: 279413 - DNA, 20 bp, Artificial Sequence
  Description of Artificial Sequence: Synthetic oligonucleotide
  Target: LAMA2; (-) strand; PAM type: YTN; PAM sequence: CTT
tgtttgtttcatgagttact

SEQ ID NO: 279414 - DNA, 20 bp, Artificial Sequence
  Description of Artificial Sequence: Synthetic oligonucleotide
  Target: LAMA2; (-) strand; PAM type: YTN; PAM sequence: TTG
tggtcctttgtttgtttcat

SEQ ID NO: 279415 - DNA, 20 bp, Artificial Sequence
  Description of Artificial Sequence: Synthetic oligonucleotide
  Target: LAMA2; (-) strand; PAM type: YTN; PAM sequence: CTA
ggttgtggtcctttgtttgt

SEQ ID NO: 279416 - DNA, 20 bp, Artificial Sequence
  Description of Artificial Sequence: Synthetic oligonucleotide
  Target: LAMA2; (-) strand; PAM type: YTN; PAM sequence: TTA
tgatctaggttgtggtcctt

SEQ ID NO: 279417 - DNA, 20 bp, Artificial Sequence
  Description of Artificial Sequence: Synthetic oligonucleotide
  Target: LAMA2; (-) strand; PAM type: YTN; PAM sequence: TTT
atgatctaggttgtggtcct

SEQ ID NO: 279418 - DNA, 20 bp, Artificial Sequence
  Description of Artificial Sequence: Synthetic oligonucleotide
  Target: LAMA2; (-) strand; PAM type: YTN; PAM sequence: CTT
tatgatctaggttgtggtcc

SEQ ID NO: 279419 - DNA, 20 bp, Artificial Sequence
  Description of Artificial Sequence: Synthetic oligonucleotide
  Target: LAMA2; (-) strand; PAM type: YTN; PAM sequence: TTG
ctttatgatctaggttgtgg

SEQ ID NO: 279420 - DNA, 20 bp, Artificial Sequence
  Description of Artificial Sequence: Synthetic oligonucleotide
  Target: LAMA2; (-) strand; PAM type: YTN; PAM sequence: CTT
gctttatgatctaggttgtg

SEQ ID NO: 279421 - DNA, 20 bp, Artificial Sequence
  Description of Artificial Sequence: Synthetic oligonucleotide
  Target: LAMA2; (-) strand; PAM type: YTN; PAM sequence: CTG
atacttgctttatgatctag

SEQ ID NO: 279422 - DNA, 20 bp, Artificial Sequence
  Description of Artificial Sequence: Synthetic oligonucleotide
  Target: LAMA2; (-) strand; PAM type: YTN; PAM sequence: TTG
ctgatacttgctttatgatc

SEQ ID NO: 279423 - DNA, 20 bp, Artificial Sequence
  Description of Artificial Sequence: Synthetic oligonucleotide
  Target: LAMA2; (-) strand; PAM type: YTN; PAM sequence: TTT
gctgatacttgctttatgat

SEQ ID NO: 279424 - DNA, 20 bp, Artificial Sequence
  Description of Artificial Sequence: Synthetic oligonucleotide
  Target: LAMA2; (-) strand; PAM type: YTN; PAM sequence: TTA
ggatttgctgatacttgctt

SEQ ID NO: 279425 - DNA, 20 bp, Artificial Sequence
  Description of Artificial Sequence: Synthetic oligonucleotide
  Target: LAMA2; (-) strand; PAM type: YTN; PAM sequence: TTG
gatcattaggatttgctgat

SEQ ID NO: 279426 - DNA, 20 bp, Artificial Sequence
  Description of Artificial Sequence: Synthetic oligonucleotide
  Target: LAMA2; (-) strand; PAM type: YTN; PAM sequence: CTA
ttggatcattaggatttgct

SEQ ID NO: 279427 - DNA, 20 bp, Artificial Sequence
  Description of Artificial Sequence: Synthetic oligonucleotide
  Target: LAMA2; (-) strand; PAM type: YTN; PAM sequence: CTA
gatgctattggatcattagg

SEQ ID NO: 279428 - DNA, 20 bp, Artificial Sequence
  Description of Artificial Sequence: Synthetic oligonucleotide
  Target: LAMA2; (-) strand; PAM type: YTN; PAM sequence: TTA
tgataagaggatgtagtcta

SEQ ID NO: 279429 - DNA, 20 bp, Artificial Sequence
  Description of Artificial Sequence: Synthetic oligonucleotide
  Target: LAMA2; (-) strand; PAM type: YTN; PAM sequence: TTG
cattatgataagaggatgta

SEQ ID NO: 279430 - DNA, 20 bp, Artificial Sequence
  Description of Artificial Sequence: Synthetic oligonucleotide
  Target: LAMA2; (-) strand; PAM type: YTN; PAM sequence: TTG
tattgcattatgataagagg

SEQ ID NO: 279431 - DNA, 20 bp, Artificial Sequence
  Description of Artificial Sequence: Synthetic oligonucleotide
  Target: LAMA2; (-) strand; PAM type: YTN; PAM sequence: CTA
attgtattgcattatgataa

SEQ ID NO: 279432 - DNA, 20 bp, Artificial Sequence
  Description of Artificial Sequence: Synthetic oligonucleotide
  Target: LAMA2; (-) strand; PAM type: YTN; PAM sequence: TTC
taattgtattgcattatgat

SEQ ID NO: 279433 - DNA, 20 bp, Artificial Sequence
  Description of Artificial Sequence: Synthetic oligonucleotide
  Target: LAMA2; (-) strand; PAM type: YTN; PAM sequence: TTT
ctaattgtattgcattatga

SEQ ID NO: 279434 - DNA, 20 bp, Artificial Sequence
  Description of Artificial Sequence: Synthetic oligonucleotide
  Target: LAMA2; (-) strand; PAM type: YTN; PAM sequence: TTG
taccaatttctaattgtatt

SEQ ID NO: 279435 - DNA, 20 bp, Artificial Sequence
  Description of Artificial Sequence: Synthetic oligonucleotide
  Target: LAMA2; (-) strand; PAM type: YTN; PAM sequence: TTT
gtaccaatttctaattgtat

SEQ ID NO: 279436 - DNA, 20 bp, Artificial Sequence
  Description of Artificial Sequence: Synthetic oligonucleotide
  Target: LAMA2; (-) strand; PAM type: YTN; PAM sequence: TTT
tgtaccaatttctaattgta

SEQ ID NO: 279437 - DNA, 20 bp, Artificial Sequence
  Description of Artificial Sequence: Synthetic oligonucleotide
  Target: LAMA2; (-) strand; PAM type: YTN; PAM sequence: TTG
ttttgtaccaatttctaatt

SEQ ID NO: 279438 - DNA, 20 bp, Artificial Sequence
  Description of Artificial Sequence: Synthetic oligonucleotide
  Target: LAMA2; (-) strand; PAM type: YTN; PAM sequence: TTG
tcaattgttttgtaccaatt

SEQ ID NO: 279439 - DNA, 20 bp, Artificial Sequence
  Description of Artificial Sequence: Synthetic oligonucleotide
  Target: LAMA2; (-) strand; PAM type: YTN; PAM sequence: TTT
gtcaattgttttgtaccaat

SEQ ID NO: 279440 - DNA, 20 bp, Artificial Sequence
  Description of Artificial Sequence: Synthetic oligonucleotide
  Target: LAMA2; (-) strand; PAM type: YTN; PAM sequence: TTT
tgtcaattgttttgtaccaa

SEQ ID NO: 279441 - DNA, 20 bp, Artificial Sequence
  Description of Artificial Sequence: Synthetic oligonucleotide
  Target: LAMA2; (-) strand; PAM type: YTN; PAM sequence: TTT
ttgtcaattgttttgtacca

SEQ ID NO: 279442 - DNA, 20 bp, Artificial Sequence
  Description of Artificial Sequence: Synthetic oligonucleotide
  Target: LAMA2; (-) strand; PAM type: YTN; PAM sequence: CTT
tttgtcaattgttttgtacc

SEQ ID NO: 279443 - DNA, 20 bp, Artificial Sequence
  Description of Artificial Sequence: Synthetic oligonucleotide
  Target: LAMA2; (-) strand; PAM type: YTN; PAM sequence: TTA
aaactttttgtcaattgttt

SEQ ID NO: 279444 - DNA, 20 bp, Artificial Sequence
  Description of Artificial Sequence: Synthetic oligonucleotide
  Target: LAMA2; (-) strand; PAM type: YTN; PAM sequence: TTT
aaaactttttgtcaattgtt

SEQ ID NO: 279445 - DNA, 20 bp, Artificial Sequence
  Description of Artificial Sequence: Synthetic oligonucleotide
  Target: LAMA2; (-) strand; PAM type: YTN; PAM sequence: TTT
taaaactttttgtcaattgt

SEQ ID NO: 279446 - DNA, 20 bp, Artificial Sequence
  Description of Artificial Sequence: Synthetic oligonucleotide
  Target: LAMA2; (-) strand; PAM type: YTN; PAM sequence: TTA
ttttaaaactttttgtcaat

SEQ ID NO: 279447 - DNA, 20 bp, Artificial Sequence
  Description of Artificial Sequence: Synthetic oligonucleotide
  Target: LAMA2; (-) strand; PAM type: YTN; PAM sequence: TTT
attttaaaactttttgtcaa

SEQ ID NO: 279448 - DNA, 20 bp, Artificial Sequence
  Description of Artificial Sequence: Synthetic oligonucleotide
  Target: LAMA2; (-) strand; PAM type: YTN; PAM sequence: TTT
tattttaaaactttttgtca

SEQ ID NO: 279449 - DNA, 20 bp, Artificial Sequence
  Description of Artificial Sequence: Synthetic oligonucleotide
  Target: LAMA2; (-) strand; PAM type: YTN; PAM sequence: TTT
ttattttaaaactttttgtc

SEQ ID NO: 279450 - DNA, 20 bp, Artificial Sequence
  Description of Artificial Sequence: Synthetic oligonucleotide
  Target: LAMA2; (-) strand; PAM type: YTN; PAM sequence: TTT
tttattttaaaactttttgt

SEQ ID NO: 279451 - DNA, 20 bp, Artificial Sequence
  Description of Artificial Sequence: Synthetic oligonucleotide
  Target: LAMA2; (-) strand; PAM type: YTN; PAM sequence: TTG
aagtatgttttttattttaa

SEQ ID NO: 279452 - DNA, 20 bp, Artificial Sequence
  Description of Artificial Sequence: Synthetic oligonucleotide
  Target: LAMA2; (-) strand; PAM type: YTN; PAM sequence: TTT
gaagtatgttttttatttta

SEQ ID NO: 279453 - DNA, 20 bp, Artificial Sequence
  Description of Artificial Sequence: Synthetic oligonucleotide
  Target: LAMA2; (-) strand; PAM type: YTN; PAM sequence: CTT
tgaagtatgttttttatttt

SEQ ID NO: 279454 - DNA, 20 bp, Artificial Sequence
  Description of Artificial Sequence: Synthetic oligonucleotide
  Target: LAMA2; (-) strand; PAM type: YTN; PAM sequence: TTA
ctttgaagtatgttttttat

SEQ ID NO: 279455 - DNA, 20 bp, Artificial Sequence
  Description of Artificial Sequence: Synthetic oligonucleotide
  Target: LAMA2; (-) strand; PAM type: YTN; PAM sequence: CTC
aagccatggattactttgaa

SEQ ID NO: 279456 - DNA, 20 bp, Artificial Sequence
  Description of Artificial Sequence: Synthetic oligonucleotide
  Target: LAMA2; (-) strand; PAM type: YTN; PAM sequence: TTC
tcaagccatggattactttg

SEQ ID NO: 279457 - DNA, 20 bp, Artificial Sequence
  Description of Artificial Sequence: Synthetic oligonucleotide
  Target: LAMA2; (-) strand; PAM type: YTN; PAM sequence: TTT
ctcaagccatggattacttt

SEQ ID NO: 279458 - DNA, 20 bp, Artificial Sequence
  Description of Artificial Sequence: Synthetic oligonucleotide
  Target: LAMA2; (-) strand; PAM type: YTN; PAM sequence: TTT
tctcaagccatggattactt

SEQ ID NO: 279459 - DNA, 20 bp, Artificial Sequence
  Description of Artificial Sequence: Synthetic oligonucleotide
  Target: LAMA2; (-) strand; PAM type: YTN; PAM sequence: TTT
ttctcaagccatggattact

SEQ ID NO: 279460 - DNA, 20 bp, Artificial Sequence
  Description of Artificial Sequence: Synthetic oligonucleotide
  Target: LAMA2; (-) strand; PAM type: YTN; PAM sequence: TTT
tttctcaagccatggattac

SEQ ID NO: 279461 - DNA, 20 bp, Artificial Sequence
  Description of Artificial Sequence: Synthetic oligonucleotide
  Target: LAMA2; (-) strand; PAM type: YTN; PAM sequence: TTT
ttttctcaagccatggatta

SEQ ID NO: 279462 - DNA, 20 bp, Artificial Sequence
  Description of Artificial Sequence: Synthetic oligonucleotide
  Target: LAMA2; (-) strand; PAM type: YTN; PAM sequence: CTG
tgtttttttctcaagccatg

SEQ ID NO: 279463 - DNA, 20 bp, Artificial Sequence
  Description of Artificial Sequence: Synthetic oligonucleotide
  Target: LAMA2; (-) strand; PAM type: YTN; PAM sequence: TTA
aactgtgtttttttctcaag

SEQ ID NO: 279464 - DNA, 20 bp, Artificial Sequence
  Description of Artificial Sequence: Synthetic oligonucleotide
  Target: LAMA2; (-) strand; PAM type: YTN; PAM sequence: TTT
aaactgtgtttttttctcaa

SEQ ID NO: 279465 - DNA, 20 bp, Artificial Sequence
  Description of Artificial Sequence: Synthetic oligonucleotide
  Target: LAMA2; (-) strand; PAM type: YTN; PAM sequence: TTC
gtaaatttaaactgtgtttt

SEQ ID NO: 279466 - DNA, 20 bp, Artificial Sequence
  Description of Artificial Sequence: Synthetic oligonucleotide
  Target: LAMA2; (-) strand; PAM type: YTN; PAM sequence: CTT
cgtaaatttaaactgtgttt

SEQ ID NO: 279467 - DNA, 20 bp, Artificial Sequence
  Description of Artificial Sequence: Synthetic oligonucleotide
  Target: LAMA2; (-) strand; PAM type: YTN; PAM sequence: TTA
aatacttcgtaaatttaaac

SEQ ID NO: 279468 - DNA, 20 bp, Artificial Sequence
  Description of Artificial Sequence: Synthetic oligonucleotide
  Target: LAMA2; (-) strand; PAM type: YTN; PAM sequence: TTA
ttaaatacttcgtaaattta

SEQ ID NO: 279469 - DNA, 20 bp, Artificial Sequence
  Description of Artificial Sequence: Synthetic oligonucleotide
  Target: LAMA2; (-) strand; PAM type: YTN; PAM sequence: CTG
ttattaaatacttcgtaaat

SEQ ID NO: 279470 - DNA, 20 bp, Artificial Sequence
  Description of Artificial Sequence: Synthetic oligonucleotide
  Target: LAMA2; (-) strand; PAM type: YTN; PAM sequence: TTC
tgttattaaatacttcgtaa

SEQ ID NO: 279471 - DNA, 20 bp, Artificial Sequence
  Description of Artificial Sequence: Synthetic oligonucleotide
  Target: LAMA2; (-) strand; PAM type: YTN; PAM sequence: TTC
cattctgttattaaatactt

SEQ ID NO: 279472 - DNA, 20 bp, Artificial Sequence
  Description of Artificial Sequence: Synthetic oligonucleotide
  Target: LAMA2; (-) strand; PAM type: YTN; PAM sequence: TTT
ccattctgttattaaatact

SEQ ID NO: 279473 - DNA, 20 bp, Artificial Sequence
  Description of Artificial Sequence: Synthetic oligonucleotide
  Target: LAMA2; (-) strand; PAM type: YTN; PAM sequence: TTA
tttccattctgttattaaat

SEQ ID NO: 279474 - DNA, 20 bp, Artificial Sequence
  Description of Artificial Sequence: Synthetic oligonucleotide
  Target: LAMA2; (-) strand; PAM type: YTN; PAM sequence: TTT
atttccattctgttattaaa

SEQ ID NO: 279475 - DNA, 20 bp, Artificial Sequence
  Description of Artificial Sequence: Synthetic oligonucleotide
  Target: LAMA2; (-) strand; PAM type: YTN; PAM sequence: TTT
tatttccattctgttattaa

SEQ ID NO: 279476 - DNA, 20 bp, Artificial Sequence
  Description of Artificial Sequence: Synthetic oligonucleotide
  Target: LAMA2; (-) strand; PAM type: YTN; PAM sequence: TTG
aggtgaaattttatttccat

SEQ ID NO: 279477 - DNA, 20 bp, Artificial Sequence
  Description of Artificial Sequence: Synthetic oligonucleotide
  Target: LAMA2; (-) strand; PAM type: YTN; PAM sequence: TTT
gaggtgaaattttatttcca

SEQ ID NO: 279478 - DNA, 20 bp, Artificial Sequence
  Description of Artificial Sequence: Synthetic oligonucleotide
  Target: LAMA2; (-) strand; PAM type: YTN; PAM sequence: TTT
tgaggtgaaattttatttcc

SEQ ID NO: 279479 - DNA, 20 bp, Artificial Sequence
  Description of Artificial Sequence: Synthetic oligonucleotide
  Target: LAMA2; (-) strand; PAM type: YTN; PAM sequence: TTG
cacacacaaattttgaggtg

SEQ ID NO: 279480 - DNA, 20 bp, Artificial Sequence
  Description of Artificial Sequence: Synthetic oligonucleotide
  Target: LAMA2; (-) strand; PAM type: YTN; PAM sequence: TTT
gcacacacaaattttgaggt

SEQ ID NO: 279481 - DNA, 20 bp, Artificial Sequence
  Description of Artificial Sequence: Synthetic oligonucleotide
  Target: LAMA2; (-) strand; PAM type: YTN; PAM sequence: TTA
tttgcacacacaaattttga

SEQ ID NO: 279482 - DNA, 20 bp, Artificial Sequence
  Description of Artificial Sequence: Synthetic oligonucleotide
  Target: LAMA2; (-) strand; PAM type: YTN; PAM sequence: TTT
atttgcacacacaaattttg

SEQ ID NO: 279483 - DNA, 20 bp, Artificial Sequence
  Description of Artificial Sequence: Synthetic oligonucleotide
  Target: LAMA2; (-) strand; PAM type: YTN; PAM sequence: CTT
tatttgcacacacaaatttt

SEQ ID NO: 279484 - DNA, 20 bp, Artificial Sequence
  Description of Artificial Sequence: Synthetic oligonucleotide
  Target: LAMA2; (-) strand; PAM type: YTN; PAM sequence: TTG
gtaccactttatttgcacac

SEQ ID NO: 279485 - DNA, 20 bp, Artificial Sequence
  Description of Artificial Sequence: Synthetic oligonucleotide
  Target: LAMA2; (-) strand; PAM type: YTN; PAM sequence: CTG
ttggtaccactttatttgca

SEQ ID NO: 279486 - DNA, 20 bp, Artificial Sequence
  Description of Artificial Sequence: Synthetic oligonucleotide
  Target: LAMA2; (-) strand; PAM type: YTN; PAM sequence: TTC
ctgttggtaccactttattt

SEQ ID NO: 279487 - DNA, 20 bp, Artificial Sequence
  Description of Artificial Sequence: Synthetic oligonucleotide
  Target: LAMA2; (-) strand; PAM type: YTN; PAM sequence: TTT
cctgttggtaccactttatt

SEQ ID NO: 279488 - DNA, 20 bp, Artificial Sequence
  Description of Artificial Sequence: Synthetic oligonucleotide
  Target: LAMA2; (-) strand; PAM type: YTN; PAM sequence: TTT
tcctgttggtaccactttat

SEQ ID NO: 279489 - DNA, 20 bp, Artificial Sequence
  Description of Artificial Sequence: Synthetic oligonucleotide
  Target: LAMA2; (-) strand; PAM type: YTN; PAM sequence: CTG
tacattttcctgttggtacc

SEQ ID NO: 279490 - DNA, 20 bp, Artificial Sequence
  Description of Artificial Sequence: Synthetic oligonucleotide
  Target: LAMA2; (-) strand; PAM type: YTN; PAM sequence: TTC
caaactgtacattttcctgt

SEQ ID NO: 279491 - DNA, 20 bp, Artificial Sequence
  Description of Artificial Sequence: Synthetic oligonucleotide
  Target: LAMA2; (-) strand; PAM type: YTN; PAM sequence: CTG
cattccaaactgtacatttt

SEQ ID NO: 279492 - DNA, 20 bp, Artificial Sequence
  Description of Artificial Sequence: Synthetic oligonucleotide
  Target: LAMA2; (-) strand; PAM type: YTN; PAM sequence: CTA
atatctgcattccaaactgt

SEQ ID NO: 279493 - DNA, 20 bp, Artificial Sequence
  Description of Artificial Sequence: Synthetic oligonucleotide
  Target: LAMA2; (-) strand; PAM type: YTN; PAM sequence: TTG
cctaatatctgcattccaaa

SEQ ID NO: 279494 - DNA, 20 bp, Artificial Sequence
  Description of Artificial Sequence: Synthetic oligonucleotide
  Target: LAMA2; (-) strand; PAM type: YTN; PAM sequence: CTT
gcctaatatctgcattccaa

SEQ ID NO: 279495 - DNA, 20 bp, Artificial Sequence
  Description of Artificial Sequence: Synthetic oligonucleotide
  Target: LAMA2; (-) strand; PAM type: YTN; PAM sequence: TTA
cccttgcctaatatctgcat

SEQ ID NO: 279496 - DNA, 20 bp, Artificial Sequence
  Description of Artificial Sequence: Synthetic oligonucleotide
  Target: LAMA2; (-) strand; PAM type: YTN; PAM sequence: CTT
acccttgcctaatatctgca

SEQ ID NO: 279497 - DNA, 20 bp, Artificial Sequence
  Description of Artificial Sequence: Synthetic oligonucleotide
  Target: LAMA2; (-) strand; PAM type: YTN; PAM sequence: TTC
ttacccttgcctaatatctg

SEQ ID NO: 279498 - DNA, 20 bp, Artificial Sequence
  Description of Artificial Sequence: Synthetic oligonucleotide
  Target: LAMA2; (-) strand; PAM type: YTN; PAM sequence: TTA
gtatcagttcttacccttgc

SEQ ID NO: 279499 - DNA, 20 bp, Artificial Sequence
  Description of Artificial Sequence: Synthetic oligonucleotide
  Target: LAMA2; (-) strand; PAM type: YTN; PAM sequence: TTA
gataattagtatcagttctt

SEQ ID NO: 279500 - DNA, 20 bp, Artificial Sequence
  Description of Artificial Sequence: Synthetic oligonucleotide
  Target: LAMA2; (-) strand; PAM type: YTN; PAM sequence: CTT
agataattagtatcagttct

SEQ ID NO: 279501 - DNA, 20 bp, Artificial Sequence
  Description of Artificial Sequence: Synthetic oligonucleotide
  Target: LAMA2; (-) strand; PAM type: YTN; PAM sequence: TTG
agcagaaaccttagataatt

SEQ ID NO: 279502 - DNA, 20 bp, Artificial Sequence
  Description of Artificial Sequence: Synthetic oligonucleotide
  Target: LAMA2; (-) strand; PAM type: YTN; PAM sequence: CTT
gagcagaaaccttagataat

SEQ ID NO: 279503 - DNA, 20 bp, Artificial Sequence
  Description of Artificial Sequence: Synthetic oligonucleotide
  Target: LAMA2; (-) strand; PAM type: YTN; PAM sequence: TTA
aacatcttgagcagaaacct

SEQ ID NO: 279504 - DNA, 20 bp, Artificial Sequence
  Description of Artificial Sequence: Synthetic oligonucleotide
  Target: LAMA2; (-) strand; PAM type: YTN; PAM sequence: TTT
aaacatcttgagcagaaacc

SEQ ID NO: 279505 - DNA, 20 bp, Artificial Sequence
  Description of Artificial Sequence: Synthetic oligonucleotide
  Target: LAMA2; (-) strand; PAM type: YTN; PAM sequence: TTT
taaacatcttgagcagaaac

SEQ ID NO: 279506 - DNA, 20 bp, Artificial Sequence
  Description of Artificial Sequence: Synthetic oligonucleotide
  Target: LAMA2; (-) strand; PAM type: YTN; PAM sequence: TTT
ttaaacatcttgagcagaaa

SEQ ID NO: 279507 - DNA, 20 bp, Artificial Sequence
  Description of Artificial Sequence: Synthetic oligonucleotide
  Target: LAMA2; (-) strand; PAM type: YTN; PAM sequence: TTT
tttaaacatcttgagcagaa

SEQ ID NO: 279508 - DNA, 20 bp, Artificial Sequence
  Description of Artificial Sequence: Synthetic oligonucleotide
  Target: LAMA2; (-) strand; PAM type: YTN; PAM sequence: CTT
ttttaaacatcttgagcaga

SEQ ID NO: 279509 - DNA, 20 bp, Artificial Sequence
  Description of Artificial Sequence: Synthetic oligonucleotide
  Target: LAMA2; (-) strand; PAM type: YTN; PAM sequence: CTG
tgtacttttttaaacatctt

SEQ ID NO: 279510 - DNA, 20 bp, Artificial Sequence
  Description of Artificial Sequence: Synthetic oligonucleotide
  Target: LAMA2; (-) strand; PAM type: YTN; PAM sequence: TTC
tgtgtacttttttaaacatc

SEQ ID NO: 279511 - DNA, 20 bp, Artificial Sequence
  Description of Artificial Sequence: Synthetic oligonucleotide
  Target: LAMA2; (-) strand; PAM type: YTN; PAM sequence: TTT
ctgtgtacttttttaaacat

SEQ ID NO: 279512 - DNA, 20 bp, Artificial Sequence
  Description of Artificial Sequence: Synthetic oligonucleotide
  Target: LAMA2; (-) strand; PAM type: YTN; PAM sequence: CTT
tctgtgtacttttttaaaca

SEQ ID NO: 279513 - DNA, 20 bp, Artificial Sequence
  Description of Artificial Sequence: Synthetic oligonucleotide
  Target: LAMA2; (-) strand; PAM type: YTN; PAM sequence: TTC
tttctgtgtacttttttaaa

SEQ ID NO: 279514 - DNA, 20 bp, Artificial Sequence
  Description of Artificial Sequence: Synthetic oligonucleotide
  Target: LAMA2; (-) strand; PAM type: YTN; PAM sequence: TTT
ctttctgtgtacttttttaa

SEQ ID NO: 279515 - DNA, 20 bp, Artificial Sequence
  Description of Artificial Sequence: Synthetic oligonucleotide
  Target: LAMA2; (-) strand; PAM type: YTN; PAM sequence: TTA
tttctttctgtgtacttttt

SEQ ID NO: 279516 - DNA, 20 bp, Artificial Sequence
  Description of Artificial Sequence: Synthetic oligonucleotide
  Target: LAMA2; (-) strand; PAM type: YTN; PAM sequence: TTT
atttctttctgtgtactttt

SEQ ID NO: 279517 - DNA, 20 bp, Artificial Sequence
  Description of Artificial Sequence: Synthetic oligonucleotide
  Target: LAMA2; (-) strand; PAM type: YTN; PAM sequence: TTT
tatttctttctgtgtacttt

SEQ ID NO: 279518 - DNA, 20 bp, Artificial Sequence
  Description of Artificial Sequence: Synthetic oligonucleotide
  Target: LAMA2; (-) strand; PAM type: YTN; PAM sequence: TTT
ttatttctttctgtgtactt

SEQ ID NO: 279519 - DNA, 20 bp, Artificial Sequence
  Description of Artificial Sequence: Synthetic oligonucleotide
  Target: LAMA2; (-) strand; PAM type: YTN; PAM sequence: TTA
tttttatttctttctgtgta

SEQ ID NO: 279520 - DNA, 20 bp, Artificial Sequence
  Description of Artificial Sequence: Synthetic oligonucleotide
  Target: LAMA2; (-) strand; PAM type: YTN; PAM sequence: TTT
atttttatttctttctgtgt

SEQ ID NO: 279521 - DNA, 20 bp, Artificial Sequence
  Description of Artificial Sequence: Synthetic oligonucleotide
  Target: LAMA2; (-) strand; PAM type: YTN; PAM sequence: TTT
tatttttatttctttctgtg

SEQ ID NO: 279522 - DNA, 20 bp, Artificial Sequence
  Description of Artificial Sequence: Synthetic oligonucleotide
  Target: LAMA2; (-) strand; PAM type: YTN; PAM sequence: CTT
ttatttttatttctttctgt

SEQ ID NO: 279523 - DNA, 20 bp, Artificial Sequence
  Description of Artificial Sequence: Synthetic oligonucleotide
  Target: LAMA2; (-) strand; PAM type: YTN; PAM sequence: CTG
cttttatttttatttctttc

SEQ ID NO: 279524 - DNA, 20 bp, Artificial Sequence
  Description of Artificial Sequence: Synthetic oligonucleotide
  Target: LAMA2; (-) strand; PAM type: YTN; PAM sequence: TTC
tgcttttatttttatttctt

SEQ ID NO: 279525 - DNA, 20 bp, Artificial Sequence
  Description of Artificial Sequence: Synthetic oligonucleotide
  Target: LAMA2; (-) strand; PAM type: YTN; PAM sequence: TTT
ctgcttttatttttatttct

SEQ ID NO: 279526 - DNA, 20 bp, Artificial Sequence
  Description of Artificial Sequence: Synthetic oligonucleotide
  Target: LAMA2; (-) strand; PAM type: YTN; PAM sequence: TTA
atttctgcttttatttttat

SEQ ID NO: 279527 - DNA, 20 bp, Artificial Sequence
  Description of Artificial Sequence: Synthetic oligonucleotide
  Target: LAMA2; (-) strand; PAM type: YTN; PAM sequence: TTA
ggtcattaatttctgctttt

SEQ ID NO: 279528 - DNA, 20 bp, Artificial Sequence
  Description of Artificial Sequence: Synthetic oligonucleotide
  Target: LAMA2; (-) strand; PAM type: YTN; PAM sequence: CTT
aggtcattaatttctgcttt

SEQ ID NO: 279529 - DNA, 20 bp, Artificial Sequence
  Description of Artificial Sequence: Synthetic oligonucleotide
  Target: LAMA2; (-) strand; PAM type: YTN; PAM sequence: TTC
cttaggtcattaatttctgc

SEQ ID NO: 279530 - DNA, 20 bp, Artificial Sequence
  Description of Artificial Sequence: Synthetic oligonucleotide
  Target: LAMA2; (-) strand; PAM type: YTN; PAM sequence: TTT
ccttaggtcattaatttctg

SEQ ID NO: 279531 - DNA, 20 bp, Artificial Sequence
  Description of Artificial Sequence: Synthetic oligonucleotide
  Target: LAMA2; (-) strand; PAM type: YTN; PAM sequence: CTT
tccttaggtcattaatttct

SEQ ID NO: 279532 - DNA, 20 bp, Artificial Sequence
  Description of Artificial Sequence: Synthetic oligonucleotide
  Target: LAMA2; (-) strand; PAM type: YTN; PAM sequence: CTA
atgcctttccttaggtcatt

SEQ ID NO: 279533 - DNA, 20 bp, Artificial Sequence
  Description of Artificial Sequence: Synthetic oligonucleotide
  Target: LAMA2; (-) strand; PAM type: YTN; PAM sequence: CTG
tctaatgcctttccttaggt

SEQ ID NO: 279534 - DNA, 20 bp, Artificial Sequence
  Description of Artificial Sequence: Synthetic oligonucleotide
  Target: LAMA2; (-) strand; PAM type: YTN; PAM sequence: TTG
tcaaccctgtctaatgcctt

SEQ ID NO: 279535 - DNA, 20 bp, Artificial Sequence
  Description of Artificial Sequence: Synthetic oligonucleotide
  Target: LAMA2; (-) strand; PAM type: YTN; PAM sequence: TTT
gtcaaccctgtctaatgcct

SEQ ID NO: 279536 - DNA, 20 bp, Artificial Sequence
  Description of Artificial Sequence: Synthetic oligonucleotide
  Target: LAMA2; (-) strand; PAM type: YTN; PAM sequence: TTT
tgtcaaccctgtctaatgcc

SEQ ID NO: 279537 - DNA, 20 bp, Artificial Sequence
  Description of Artificial Sequence: Synthetic oligonucleotide
  Target: LAMA2; (-) strand; PAM type: YTN; PAM sequence: CTG
ttttgtcaaccctgtctaat

SEQ ID NO: 279538 - DNA, 20 bp, Artificial Sequence
  Description of Artificial Sequence: Synthetic oligonucleotide
  Target: LAMA2; (-) strand; PAM type: YTN; PAM sequence: TTG
ctgttttgtcaaccctgtct

SEQ ID NO: 279539 - DNA, 20 bp, Artificial Sequence
  Description of Artificial Sequence: Synthetic oligonucleotide
  Target: LAMA2; (-) strand; PAM type: YTN; PAM sequence: CTT
gctgttttgtcaaccctgtc

SEQ ID NO: 279540 - DNA, 20 bp, Artificial Sequence
  Description of Artificial Sequence: Synthetic oligonucleotide
  Target: LAMA2; (-) strand; PAM type: YTN; PAM sequence: CTA
agaatcaacttgctgttttg

SEQ ID NO: 279541 - DNA, 20 bp, Artificial Sequence
  Description of Artificial Sequence: Synthetic oligonucleotide
  Target: LAMA2; (-) strand; PAM type: YTN; PAM sequence: TTC
taagaatcaacttgctgttt

SEQ ID NO: 279542 - DNA, 20 bp, Artificial Sequence
  Description of Artificial Sequence: Synthetic oligonucleotide
  Target: LAMA2; (-) strand; PAM type: YTN; PAM sequence: TTA
ttctaagaatcaacttgctg

SEQ ID NO: 279543 - DNA, 20 bp, Artificial Sequence
  Description of Artificial Sequence: Synthetic oligonucleotide
  Target: LAMA2; (-) strand; PAM type: YTN; PAM sequence: TTT
attctaagaatcaacttgct

SEQ ID NO: 279544 - DNA, 20 bp, Artificial Sequence
  Description of Artificial Sequence: Synthetic oligonucleotide
  Target: LAMA2; (-) strand; PAM type: YTN; PAM sequence: CTA
gtttattctaagaatcaact

SEQ ID NO: 279545 - DNA, 20 bp, Artificial Sequence
  Description of Artificial Sequence: Synthetic oligonucleotide
  Target: LAMA2; (-) strand; PAM type: YTN; PAM sequence: TTG
ctagtttattctaagaatca

SEQ ID NO: 279546 - DNA, 20 bp, Artificial Sequence
  Description of Artificial Sequence: Synthetic oligonucleotide
  Target: LAMA2; (-) strand; PAM type: YTN; PAM sequence: TTT
gctagtttattctaagaatc

SEQ ID NO: 279547 - DNA, 20 bp, Artificial Sequence
  Description of Artificial Sequence: Synthetic oligonucleotide
  Target: LAMA2; (-) strand; PAM type: YTN; PAM sequence: TTA
tttgctagtttattctaaga

SEQ ID NO: 279548 - DNA, 20 bp, Artificial Sequence
  Description of Artificial Sequence: Synthetic oligonucleotide
  Target: LAMA2; (-) strand; PAM type: YTN; PAM sequence: TTT
atttgctagtttattctaag

SEQ ID NO: 279549 - DNA, 20 bp, Artificial Sequence
  Description of Artificial Sequence: Synthetic oligonucleotide
  Target: LAMA2; (-) strand; PAM type: YTN; PAM sequence: CTG
tttatttgctagtttattct

SEQ ID NO: 279550 - DNA, 20 bp, Artificial Sequence
  Description of Artificial Sequence: Synthetic oligonucleotide
  Target: LAMA2; (-) strand; PAM type: YTN; PAM sequence: TTC
tgtttatttgctagtttatt

SEQ ID NO: 279551 - DNA, 20 bp, Artificial Sequence
  Description of Artificial Sequence: Synthetic oligonucleotide
  Target: LAMA2; (-) strand; PAM type: YTN; PAM sequence: CTT
ctgtttatttgctagtttat

SEQ ID NO: 279552 - DNA, 20 bp, Artificial Sequence
  Description of Artificial Sequence: Synthetic oligonucleotide
  Target: LAMA2; (-) strand; PAM type: YTN; PAM sequence: TTG
tcttctgtttatttgctagt

SEQ ID NO: 279553 - DNA, 20 bp, Artificial Sequence
  Description of Artificial Sequence: Synthetic oligonucleotide
  Target: LAMA2; (-) strand; PAM type: YTN; PAM sequence: CTT
gtcttctgtttatttgctag

SEQ ID NO: 279554 - DNA, 20 bp, Artificial Sequence
  Description of Artificial Sequence: Synthetic oligonucleotide
  Target: LAMA2; (-) strand; PAM type: YTN; PAM sequence: TTC
ttgtcttctgtttatttgct

SEQ ID NO: 279555 - DNA, 20 bp, Artificial Sequence
  Description of Artificial Sequence: Synthetic oligonucleotide
  Target: LAMA2; (-) strand; PAM type: YTN; PAM sequence: TTG
ttcttgtcttctgtttattt

SEQ ID NO: 279556 - DNA, 20 bp, Artificial Sequence
  Description of Artificial Sequence: Synthetic oligonucleotide
  Target: LAMA2; (-) strand; PAM type: YTN; PAM sequence: TTA
attgttcttgtcttctgttt

SEQ ID NO: 279557 - DNA, 20 bp, Artificial Sequence
  Description of Artificial Sequence: Synthetic oligonucleotide
  Target: LAMA2; (-) strand; PAM type: YTN; PAM sequence: CTT
aattgttcttgtcttctgtt

SEQ ID NO: 279558 - DNA, 20 bp, Artificial Sequence
  Description of Artificial Sequence: Synthetic oligonucleotide
  Target: LAMA2; (-) strand; PAM type: YTN; PAM sequence: TTG
cttaattgttcttgtcttct

SEQ ID NO: 279559 - DNA, 20 bp, Artificial Sequence
  Description of Artificial Sequence: Synthetic oligonucleotide
  Target: LAMA2; (-) strand; PAM type: YTN; PAM sequence: TTT
gcttaattgttcttgtcttc

SEQ ID NO: 279560 - DNA, 20 bp, Artificial Sequence
  Description of Artificial Sequence: Synthetic oligonucleotide
  Target: LAMA2; (-) strand; PAM type: YTN; PAM sequence: CTT
tgcttaattgttcttgtctt

SEQ ID NO: 279561 - DNA, 20 bp, Artificial Sequence
  Description of Artificial Sequence: Synthetic oligonucleotide
  Target: LAMA2; (-) strand; PAM type: YTN; PAM sequence: CTC
tttgcttaattgttcttgtc

SEQ ID NO: 279562 - DNA, 20 bp, Artificial Sequence
  Description of Artificial Sequence: Synthetic oligonucleotide
  Target: LAMA2; (-) strand; PAM type: YTN; PAM sequence: CTC
tctttgcttaattgttcttg

SEQ ID NO: 279563 - DNA, 20 bp, Artificial Sequence
  Description of Artificial Sequence: Synthetic oligonucleotide
  Target: LAMA2; (-) strand; PAM type: YTN; PAM sequence: TTG
tctctctttgcttaattgtt

SEQ ID NO: 279564 - DNA, 20 bp, Artificial Sequence
  Description of Artificial Sequence: Synthetic oligonucleotide
  Target: LAMA2; (-) strand; PAM type: YTN; PAM sequence: TTG
tgttgtctctctttgcttaa

SEQ ID NO: 279565 - DNA, 20 bp, Artificial Sequence
  Description of Artificial Sequence: Synthetic oligonucleotide
  Target: LAMA2; (-) strand; PAM type: YTN; PAM sequence: TTT
gtgttgtctctctttgctta

SEQ ID NO: 279566 - DNA, 20 bp, Artificial Sequence
  Description of Artificial Sequence: Synthetic oligonucleotide
  Target: LAMA2; (-) strand; PAM type: YTN; PAM sequence: TTC
atttgtgttgtctctctttg

SEQ ID NO: 279567 - DNA, 20 bp, Artificial Sequence
  Description of Artificial Sequence: Synthetic oligonucleotide
  Target: LAMA2; (-) strand; PAM type: YTN; PAM sequence: CTA
ttcatttgtgttgtctctct

SEQ ID NO: 279568 - DNA, 20 bp, Artificial Sequence
  Description of Artificial Sequence: Synthetic oligonucleotide
  Target: LAMA2; (-) strand; PAM type: YTN; PAM sequence: TTG
atcctattcatttgtgttgt

SEQ ID NO: 279569 - DNA, 20 bp, Artificial Sequence
  Description of Artificial Sequence: Synthetic oligonucleotide
  Target: LAMA2; (-) strand; PAM type: YTN; PAM sequence: CTT
gatcctattcatttgtgttg

SEQ ID NO: 279570 - DNA, 20 bp, Artificial Sequence
  Description of Artificial Sequence: Synthetic oligonucleotide
  Target: LAMA2; (-) strand; PAM type: YTN; PAM sequence: TTC
ttgatcctattcatttgtgt

SEQ ID NO: 279571 - DNA, 20 bp, Artificial Sequence
  Description of Artificial Sequence: Synthetic oligonucleotide
  Target: LAMA2; (-) strand; PAM type: YTN; PAM sequence: TTC
attcttgatcctattcattt

SEQ ID NO: 279572 - DNA, 20 bp, Artificial Sequence
  Description of Artificial Sequence: Synthetic oligonucleotide
  Target: LAMA2; (-) strand; PAM type: YTN; PAM sequence: TTT
cattcttgatcctattcatt

SEQ ID NO: 279573 - DNA, 20 bp, Artificial Sequence
  Description of Artificial Sequence: Synthetic oligonucleotide
  Target: LAMA2; (-) strand; PAM type: YTN; PAM sequence: TTT
tcattcttgatcctattcat

SEQ ID NO: 279574 - DNA, 20 bp, Artificial Sequence
  Description of Artificial Sequence: Synthetic oligonucleotide
  Target: LAMA2; (-) strand; PAM type: YTN; PAM sequence: CTT
ttcattcttgatcctattca

SEQ ID NO: 279575 - DNA, 20 bp, Artificial Sequence
  Description of Artificial Sequence: Synthetic oligonucleotide
  Target: LAMA2; (-) strand; PAM type: YTN; PAM sequence: TTA
tgatccccttttcattcttg

SEQ ID NO: 279576 - DNA, 20 bp, Artificial Sequence
  Description of Artificial Sequence: Synthetic oligonucleotide
  Target: LAMA2; (-) strand; PAM type: YTN; PAM sequence: CTA
cagttatgatccccttttca

SEQ ID NO: 279577 - DNA, 20 bp, Artificial Sequence
  Description of Artificial Sequence: Synthetic oligonucleotide
  Target: LAMA2; (-) strand; PAM type: YTN; PAM sequence: CTA
taatgtatctacagttatga

SEQ ID NO: 279578 - DNA, 20 bp, Artificial Sequence
  Description of Artificial Sequence: Synthetic oligonucleotide
  Target: LAMA2; (-) strand; PAM type: YTN; PAM sequence: TTC
aatctataatgtatctacag

SEQ ID NO: 279579 - DNA, 20 bp, Artificial Sequence
  Description of Artificial Sequence: Synthetic oligonucleotide
  Target: LAMA2; (-) strand; PAM type: YTN; PAM sequence: TTT
caatctataatgtatctaca

SEQ ID NO: 279580 - DNA, 20 bp, Artificial Sequence
  Description of Artificial Sequence: Synthetic oligonucleotide
  Target: LAMA2; (-) strand; PAM type: YTN; PAM sequence: TTT
tcaatctataatgtatctac

SEQ ID NO: 279581 - DNA, 20 bp, Artificial Sequence
  Description of Artificial Sequence: Synthetic oligonucleotide
  Target: LAMA2; (-) strand; PAM type: YTN; PAM sequence: TTT
ttcaatctataatgtatcta

SEQ ID NO: 279582 - DNA, 20 bp, Artificial Sequence
  Description of Artificial Sequence: Synthetic oligonucleotide
  Target: LAMA2; (-) strand; PAM type: YTN; PAM sequence: TTA
tttttcaatctataatgtat

SEQ ID NO: 279583 - DNA, 20 bp, Artificial Sequence
  Description of Artificial Sequence: Synthetic oligonucleotide
  Target: LAMA2; (-) strand; PAM type: YTN; PAM sequence: TTT
atttttcaatctataatgta

SEQ ID NO: 279584 - DNA, 20 bp, Artificial Sequence
  Description of Artificial Sequence: Synthetic oligonucleotide
  Target: LAMA2; (-) strand; PAM type: YTN; PAM sequence: TTT
tatttttcaatctataatgt

SEQ ID NO: 279585 - DNA, 20 bp, Artificial Sequence
  Description of Artificial Sequence: Synthetic oligonucleotide
  Target: LAMA2; (-) strand; PAM type: YTN; PAM sequence: TTT
ttatttttcaatctataatg

SEQ ID NO: 279586 - DNA, 20 bp, Artificial Sequence
  Description of Artificial Sequence: Synthetic oligonucleotide
  Target: LAMA2; (-) strand; PAM type: YTN; PAM sequence: CTC
caatatatccatttttattt

SEQ ID NO: 279587 - DNA, 20 bp, Artificial Sequence
  Description of Artificial Sequence: Synthetic oligonucleotide
  Target: LAMA2; (-) strand; PAM type: YTN; PAM sequence: TTG
cgcatatcctccaatatatc

SEQ ID NO: 279588 - DNA, 20 bp, Artificial Sequence
  Description of Artificial Sequence: Synthetic oligonucleotide
  Target: LAMA2; (-) strand; PAM type: YTN; PAM sequence: TTG
aataaaattgcgcatatcct

SEQ ID NO: 279589 - DNA, 20 bp, Artificial Sequence
  Description of Artificial Sequence: Synthetic oligonucleotide
  Target: LAMA2; (-) strand; PAM type: YTN; PAM sequence: TTT
gaataaaattgcgcatatcc

SEQ ID NO: 279590 - DNA, 20 bp, Artificial Sequence
  Description of Artificial Sequence: Synthetic oligonucleotide
  Target: LAMA2; (-) strand; PAM type: YTN; PAM sequence: TTC
aaatgtgtttgaataaaatt

SEQ ID NO: 279591 - DNA, 20 bp, Artificial Sequence
  Description of Artificial Sequence: Synthetic oligonucleotide
  Target: LAMA2; (-) strand; PAM type: YTN; PAM sequence: CTA
agtattcaaatgtgtttgaa

SEQ ID NO: 279592 - DNA, 20 bp, Artificial Sequence
  Description of Artificial Sequence: Synthetic oligonucleotide
  Target: LAMA2; (-) strand; PAM type: YTN; PAM sequence: TTC
acctaagtattcaaatgtgt

SEQ ID NO: 279593 - DNA, 20 bp, Artificial Sequence
  Description of Artificial Sequence: Synthetic oligonucleotide
  Target: LAMA2; (-) strand; PAM type: YTN; PAM sequence: CTT
cacctaagtattcaaatgtg

SEQ ID NO: 279594 - DNA, 20 bp, Artificial Sequence
  Description of Artificial Sequence: Synthetic oligonucleotide
  Target: LAMA2; (-) strand; PAM type: YTN; PAM sequence: TTA
cttcacctaagtattcaaat

SEQ ID NO: 279595 - DNA, 20 bp, Artificial Sequence
  Description of Artificial Sequence: Synthetic oligonucleotide
  Target: LAMA2; (-) strand; PAM type: YTN; PAM sequence: TTT
acttcacctaagtattcaaa

SEQ ID NO: 279596 - DNA, 20 bp, Artificial Sequence
  Description of Artificial Sequence: Synthetic oligonucleotide
  Target: LAMA2; (-) strand; PAM type: YTN; PAM sequence: CTG
tttacttcacctaagtattc

SEQ ID NO: 279597 - DNA, 20 bp, Artificial Sequence
  Description of Artificial Sequence: Synthetic oligonucleotide
  Target: LAMA2; (-) strand; PAM type: YTN; PAM sequence: TTA
ctgtttacttcacctaagta

SEQ ID NO: 279598 - DNA, 20 bp, Artificial Sequence
  Description of Artificial Sequence: Synthetic oligonucleotide
  Target: LAMA2; (-) strand; PAM type: YTN; PAM sequence: CTT
actgtttacttcacctaagt

SEQ ID NO: 279599 - DNA, 20 bp, Artificial Sequence
  Description of Artificial Sequence: Synthetic oligonucleotide
  Target: LAMA2; (-) strand; PAM type: YTN; PAM sequence: CTA
aacttactgtttacttcacc

SEQ ID NO: 279600 - DNA, 20 bp, Artificial Sequence
  Description of Artificial Sequence: Synthetic oligonucleotide
  Target: LAMA2; (-) strand; PAM type: YTN; PAM sequence: CTC
taaacttactgtttacttca

SEQ ID NO: 279601 - DNA, 20 bp, Artificial Sequence
  Description of Artificial Sequence: Synthetic oligonucleotide
  Target: LAMA2; (-) strand; PAM type: YTN; PAM sequence: TTG
ctctaaacttactgtttact

SEQ ID NO: 279602 - DNA, 20 bp, Artificial Sequence
  Description of Artificial Sequence: Synthetic oligonucleotide
  Target: LAMA2; (-) strand; PAM type: YTN; PAM sequence: TTT
gctctaaacttactgtttac

SEQ ID NO: 279603 - DNA, 20 bp, Artificial Sequence
  Description of Artificial Sequence: Synthetic oligonucleotide
  Target: LAMA2; (-) strand; PAM type: YTN; PAM sequence: TTT
tgctctaaacttactgttta

SEQ ID NO: 279604 - DNA, 20 bp, Artificial Sequence
  Description of Artificial Sequence: Synthetic oligonucleotide
  Target: LAMA2; (-) strand; PAM type: YTN; PAM sequence: TTG
agtaaattttgctctaaact

SEQ ID NO: 279605 - DNA, 20 bp, Artificial Sequence
  Description of Artificial Sequence: Synthetic oligonucleotide
  Target: LAMA2; (-) strand; PAM type: YTN; PAM sequence: TTT
gagtaaattttgctctaaac

SEQ ID NO: 279606 - DNA, 20 bp, Artificial Sequence
  Description of Artificial Sequence: Synthetic oligonucleotide
  Target: LAMA2; (-) strand; PAM type: YTN; PAM sequence: TTT
tgagtaaattttgctctaaa

SEQ ID NO: 279607 - DNA, 20 bp, Artificial Sequence
  Description of Artificial Sequence: Synthetic oligonucleotide
  Target: LAMA2; (-) strand; PAM type: YTN; PAM sequence: TTT
ttgagtaaattttgctctaa

SEQ ID NO: 279608 - DNA, 20 bp, Artificial Sequence
  Description of Artificial Sequence: Synthetic oligonucleotide
  Target: LAMA2; (-) strand; PAM type: YTN; PAM sequence: CTT
tttgagtaaattttgctcta

SEQ ID NO: 279609 - DNA, 20 bp, Artificial Sequence
  Description of Artificial Sequence: Synthetic oligonucleotide
  Target: LAMA2; (-) strand; PAM type: YTN; PAM sequence: TTC
tttttgagtaaattttgctc

SEQ ID NO: 279610 - DNA, 20 bp, Artificial Sequence
  Description of Artificial Sequence: Synthetic oligonucleotide
  Target: LAMA2; (-) strand; PAM type: YTN; PAM sequence: TTT
ctttttgagtaaattttgct

SEQ ID NO: 279611 - DNA, 20 bp, Artificial Sequence
  Description of Artificial Sequence: Synthetic oligonucleotide
  Target: LAMA2; (-) strand; PAM type: YTN; PAM sequence: CTA
tttctttttgagtaaatttt

SEQ ID NO: 279612 - DNA, 20 bp, Artificial Sequence
  Description of Artificial Sequence: Synthetic oligonucleotide
  Target: LAMA2; (-) strand; PAM type: YTN; PAM sequence: CTC
aggtgtactatttctttttg

SEQ ID NO: 279613 - DNA, 20 bp, Artificial Sequence
  Description of Artificial Sequence: Synthetic oligonucleotide
  Target: LAMA2; (-) strand; PAM type: YTN; PAM sequence: TTC
tcaggtgtactatttctttt

SEQ ID NO: 279614 - DNA, 20 bp, Artificial Sequence
  Description of Artificial Sequence: Synthetic oligonucleotide
  Target: LAMA2; (-) strand; PAM type: YTN; PAM sequence: TTA
tagttctcaggtgtactatt

SEQ ID NO: 279615 - DNA, 20 bp, Artificial Sequence
  Description of Artificial Sequence: Synthetic oligonucleotide
  Target: LAMA2; (-) strand; PAM type: YTN; PAM sequence: TTA
acggttatagttctcaggtg

SEQ ID NO: 279616 - DNA, 20 bp, Artificial Sequence
  Description of Artificial Sequence: Synthetic oligonucleotide
  Target: LAMA2; (-) strand; PAM type: YTN; PAM sequence: TTT
aacggttatagttctcaggt

SEQ ID NO: 279617 - DNA, 20 bp, Artificial Sequence
  Description of Artificial Sequence: Synthetic oligonucleotide
  Target: LAMA2; (-) strand; PAM type: YTN; PAM sequence: TTA
tttaacggttatagttctca

SEQ ID NO: 279618 - DNA, 20 bp, Artificial Sequence
  Description of Artificial Sequence: Synthetic oligonucleotide
  Target: LAMA2; (-) strand; PAM type: YTN; PAM sequence: TTT
atttaacggttatagttctc

SEQ ID NO: 279619 - DNA, 20 bp, Artificial Sequence
  Description of Artificial Sequence: Synthetic oligonucleotide
  Target: LAMA2; (-) strand; PAM type: YTN; PAM sequence: CTG
atgcaatttatttaacggtt

SEQ ID NO: 279620 - DNA, 20 bp, Artificial Sequence
  Description of Artificial Sequence: Synthetic oligonucleotide
  Target: LAMA2; (-) strand; PAM type: YTN; PAM sequence: CTA
ctgatgcaatttatttaacg

SEQ ID NO: 279621 - DNA, 20 bp, Artificial Sequence
  Description of Artificial Sequence: Synthetic oligonucleotide
  Target: LAMA2; (-) strand; PAM type: YTN; PAM sequence: TTA
actactgatgcaatttattt

SEQ ID NO: 279622 - DNA, 20 bp, Artificial Sequence
  Description of Artificial Sequence: Synthetic oligonucleotide
  Target: LAMA2; (-) strand; PAM type: YTN; PAM sequence: TTG
tattaactactgatgcaatt

SEQ ID NO: 279623 - DNA, 20 bp, Artificial Sequence
  Description of Artificial Sequence: Synthetic oligonucleotide
  Target: LAMA2; (-) strand; PAM type: YTN; PAM sequence: TTG
ttgtattaactactgatgca

SEQ ID NO: 279624 - DNA, 20 bp, Artificial Sequence
  Description of Artificial Sequence: Synthetic oligonucleotide
  Target: LAMA2; (-) strand; PAM type: YTN; PAM sequence: TTT
gttgtattaactactgatgc

SEQ ID NO: 279625 - DNA, 20 bp, Artificial Sequence
  Description of Artificial Sequence: Synthetic oligonucleotide
  Target: LAMA2; (-) strand; PAM type: YTN; PAM sequence: TTT
tgttgtattaactactgatg

SEQ ID NO: 279626 - DNA, 20 bp, Artificial Sequence
  Description of Artificial Sequence: Synthetic oligonucleotide
  Target: LAMA2; (-) strand; PAM type: YTN; PAM sequence: TTA
ttttgttgtattaactactg

SEQ ID NO: 279627 - DNA, 20 bp, Artificial Sequence
  Description of Artificial Sequence: Synthetic oligonucleotide
  Target: LAMA2; (-) strand; PAM type: YTN; PAM sequence: TTG
ttattttgttgtattaacta

SEQ ID NO: 279628 - DNA, 20 bp, Artificial Sequence
  Description of Artificial Sequence: Synthetic oligonucleotide
  Target: LAMA2; (-) strand; PAM type: YTN; PAM sequence: TTG
tacatattgttattttgttg

SEQ ID NO: 279629 - DNA, 20 bp, Artificial Sequence
  Description of Artificial Sequence: Synthetic oligonucleotide
  Target: LAMA2; (-) strand; PAM type: YTN; PAM sequence: TTT
gtacatattgttattttgtt

SEQ ID NO: 279630 - DNA, 20 bp, Artificial Sequence
  Description of Artificial Sequence: Synthetic oligonucleotide
  Target: LAMA2; (-) strand; PAM type: YTN; PAM sequence: TTT
tgtacatattgttattttgt

SEQ ID NO: 279631 - DNA, 20 bp, Artificial Sequence
  Description of Artificial Sequence: Synthetic oligonucleotide
  Target: LAMA2; (-) strand; PAM type: YTN; PAM sequence: TTT
ttgtacatattgttattttg

SEQ ID NO: 279632 - DNA, 20 bp, Artificial Sequence
  Description of Artificial Sequence: Synthetic oligonucleotide
  Target: LAMA2; (-) strand; PAM type: YTN; PAM sequence: TTA
catttttgtacatattgtta

SEQ ID NO: 279633 - DNA, 20 bp, Artificial Sequence
  Description of Artificial Sequence: Synthetic oligonucleotide
  Target: LAMA2; (-) strand; PAM type: YTN; PAM sequence: TTT
acatttttgtacatattgtt

SEQ ID NO: 279634 - DNA, 20 bp, Artificial Sequence
  Description of Artificial Sequence: Synthetic oligonucleotide
  Target: LAMA2; (-) strand; PAM type: YTN; PAM sequence: CTT
tacatttttgtacatattgt

SEQ ID NO: 279635 - DNA, 20 bp, Artificial Sequence
  Description of Artificial Sequence: Synthetic oligonucleotide
  Target: LAMA2; (-) strand; PAM type: YTN; PAM sequence: TTG
cataatgggtcctttacatt

SEQ ID NO: 279636 - DNA, 20 bp, Artificial Sequence
  Description of Artificial Sequence: Synthetic oligonucleotide
  Target: LAMA2; (-) strand; PAM type: YTN; PAM sequence: TTG
ggaacaaattgcataatggg

SEQ ID NO: 279637 - DNA, 20 bp, Artificial Sequence
  Description of Artificial Sequence: Synthetic oligonucleotide
  Target: LAMA2; (-) strand; PAM type: YTN; PAM sequence: CTT
gggaacaaattgcataatgg

SEQ ID NO: 279638 - DNA, 20 bp, Artificial Sequence
  Description of Artificial Sequence: Synthetic oligonucleotide
  Target: LAMA2; (-) strand; PAM type: YTN; PAM sequence: TTC
ttgggaacaaattgcataat

SEQ ID NO: 279639 - DNA, 20 bp, Artificial Sequence
  Description of Artificial Sequence: Synthetic oligonucleotide
  Target: LAMA2; (-) strand; PAM type: YTN; PAM sequence: TTC
cattcttgggaacaaattgc

SEQ ID NO: 279640 - DNA, 20 bp, Artificial Sequence
  Description of Artificial Sequence: Synthetic oligonucleotide
  Target: LAMA2; (-) strand; PAM type: YTN; PAM sequence: TTT
ccattcttgggaacaaattg

SEQ ID NO: 279641 - DNA, 20 bp, Artificial Sequence
  Description of Artificial Sequence: Synthetic oligonucleotide
  Target: LAMA2; (-) strand; PAM type: YTN; PAM sequence: TTT
tccattcttgggaacaaatt

SEQ ID NO: 279642 - DNA, 20 bp, Artificial Sequence
  Description of Artificial Sequence: Synthetic oligonucleotide
  Target: LAMA2; (-) strand; PAM type: YTN; PAM sequence: TTT
ttccattcttgggaacaaat

SEQ ID NO: 279643 - DNA, 20 bp, Artificial Sequence
  Description of Artificial Sequence: Synthetic oligonucleotide
  Target: LAMA2; (-) strand; PAM type: YTN; PAM sequence: CTT
tttccattcttgggaacaaa

SEQ ID NO: 279644 - DNA, 20 bp, Artificial Sequence
  Description of Artificial Sequence: Synthetic oligonucleotide
  Target: LAMA2; (-) strand; PAM type: YTN; PAM sequence: TTC
tttttccattcttgggaaca

SEQ ID NO: 279645 - DNA, 20 bp, Artificial Sequence
  Description of Artificial Sequence: Synthetic oligonucleotide
  Target: LAMA2; (-) strand; PAM type: YTN; PAM sequence: CTT
ctttttccattcttgggaac

SEQ ID NO: 279646 - DNA, 20 bp, Artificial Sequence
  Description of Artificial Sequence: Synthetic oligonucleotide
  Target: LAMA2; (-) strand; PAM type: YTN; PAM sequence: TTC
ttctttttccattcttggga

SEQ ID NO: 279647 - DNA, 20 bp, Artificial Sequence
  Description of Artificial Sequence: Synthetic oligonucleotide
  Target: LAMA2; (-) strand; PAM type: YTN; PAM sequence: TTT
cttctttttccattcttggg

SEQ ID NO: 279648 - DNA, 20 bp, Artificial Sequence
  Description of Artificial Sequence: Synthetic oligonucleotide
  Target: LAMA2; (-) strand; PAM type: YTN; PAM sequence: TTT
tcttctttttccattcttgg

SEQ ID NO: 279649 - DNA, 20 bp, Artificial Sequence
  Description of Artificial Sequence: Synthetic oligonucleotide
  Target: LAMA2; (-) strand; PAM type: YTN; PAM sequence: TTT
ttcttctttttccattcttg

SEQ ID NO: 279650 - DNA, 20 bp, Artificial Sequence
  Description of Artificial Sequence: Synthetic oligonucleotide
  Target: LAMA2; (-) strand; PAM type: YTN; PAM sequence: CTG
aggaaatttttcttcttttt

SEQ ID NO: 279651 - DNA, 20 bp, Artificial Sequence
  Description of Artificial Sequence: Synthetic oligonucleotide
  Target: LAMA2; (-) strand; PAM type: YTN; PAM sequence: CTC
ataaaataagctgaggaaat

SEQ ID NO: 279652 - DNA, 20 bp, Artificial Sequence
  Description of Artificial Sequence: Synthetic oligonucleotide
  Target: LAMA2; (-) strand; PAM type: YTN; PAM sequence: TTG
tatcagcctcataaaataag

SEQ ID NO: 279653 - DNA, 20 bp, Artificial Sequence
  Description of Artificial Sequence: Synthetic oligonucleotide
  Target: LAMA2; (-) strand; PAM type: YTN; PAM sequence: TTG
ccatcaagattgtatcagcc

SEQ ID NO: 279654 - DNA, 20 bp, Artificial Sequence
  Description of Artificial Sequence: Synthetic oligonucleotide
  Target: LAMA2; (-) strand; PAM type: YTN; PAM sequence: CTT
gccatcaagattgtatcagc

SEQ ID NO: 279655 - DNA, 20 bp, Artificial Sequence
  Description of Artificial Sequence: Synthetic oligonucleotide
  Target: LAMA2; (-) strand; PAM type: YTN; PAM sequence: CTG
tagggcttgccatcaagatt

SEQ ID NO: 279656 - DNA, 20 bp, Artificial Sequence
  Description of Artificial Sequence: Synthetic oligonucleotide
  Target: LAMA2; (-) strand; PAM type: YTN; PAM sequence: CTC
tgtagggcttgccatcaaga

SEQ ID NO: 279657 - DNA, 20 bp, Artificial Sequence
  Description of Artificial Sequence: Synthetic oligonucleotide
  Target: LAMA2; (-) strand; PAM type: YTN; PAM sequence: CTG
tcctctgtagggcttgccat

SEQ ID NO: 279658 - DNA, 20 bp, Artificial Sequence
  Description of Artificial Sequence: Synthetic oligonucleotide
  Target: LAMA2; (-) strand; PAM type: YTN; PAM sequence: TTG
tagtactgtcctctgtaggg

SEQ ID NO: 279659 - DNA, 20 bp, Artificial Sequence
  Description of Artificial Sequence: Synthetic oligonucleotide
  Target: LAMA2; (-) strand; PAM type: YTN; PAM sequence: TTT
gtagtactgtcctctgtagg

SEQ ID NO: 279660 - DNA, 20 bp, Artificial Sequence
  Description of Artificial Sequence: Synthetic oligonucleotide
  Target: LAMA2; (-) strand; PAM type: YTN; PAM sequence: CTT
tgtagtactgtcctctgtag

SEQ ID NO: 279661 - DNA, 20 bp, Artificial Sequence
  Description of Artificial Sequence: Synthetic oligonucleotide
  Target: LAMA2; (-) strand; PAM type: YTN; PAM sequence: TTC
tttgtagtactgtcctctgt

SEQ ID NO: 279662 - DNA, 20 bp, Artificial Sequence
  Description of Artificial Sequence: Synthetic oligonucleotide
  Target: LAMA2; (-) strand; PAM type: YTN; PAM sequence: TTT
ctttgtagtactgtcctctg

SEQ ID NO: 279663 - DNA, 20 bp, Artificial Sequence
  Description of Artificial Sequence: Synthetic oligonucleotide
  Target: LAMA2; (-) strand; PAM type: YTN; PAM sequence: TTT
tctttgtagtactgtcctct

SEQ ID NO: 279664 - DNA, 20 bp, Artificial Sequence
  Description of Artificial Sequence: Synthetic oligonucleotide
  Target: LAMA2; (-) strand; PAM type: YTN; PAM sequence: TTT
ttctttgtagtactgtcctc

SEQ ID NO: 279665 - DNA, 20 bp, Artificial Sequence
  Description of Artificial Sequence: Synthetic oligonucleotide
  Target: LAMA2; (-) strand; PAM type: YTN; PAM sequence: CTA
tagtttttctttgtagtact

SEQ ID NO: 279666 - DNA, 20 bp, Artificial Sequence
  Description of Artificial Sequence: Synthetic oligonucleotide
  Target: LAMA2; (-) strand; PAM type: YTN; PAM sequence: CTG
gcctatagtttttctttgta

SEQ ID NO: 279667 - DNA, 20 bp, Artificial Sequence
  Description of Artificial Sequence: Synthetic oligonucleotide
  Target: LAMA2; (-) strand; PAM type: YTN; PAM sequence: TTA
aataactggcctatagtttt

SEQ ID NO: 279668 - DNA, 20 bp, Artificial Sequence
  Description of Artificial Sequence: Synthetic oligonucleotide
  Target: LAMA2; (-) strand; PAM type: YTN; PAM sequence: TTT
aaataactggcctatagttt

SEQ ID NO: 279669 - DNA, 20 bp, Artificial Sequence
  Description of Artificial Sequence: Synthetic oligonucleotide
  Target: LAMA2; (-) strand; PAM type: YTN; PAM sequence: CTA
tttaaataactggcctatag

SEQ ID NO: 279670 - DNA, 20 bp, Artificial Sequence
  Description of Artificial Sequence: Synthetic oligonucleotide
  Target: LAMA2; (-) strand; PAM type: YTN; PAM sequence: CTC
tatttaaataactggcctat

SEQ ID NO: 279671 - DNA, 20 bp, Artificial Sequence
  Description of Artificial Sequence: Synthetic oligonucleotide
  Target: LAMA2; (-) strand; PAM type: YTN; PAM sequence: TTC
tctatttaaataactggcct

SEQ ID NO: 279672 - DNA, 20 bp, Artificial Sequence
  Description of Artificial Sequence: Synthetic oligonucleotide
  Target: LAMA2; (-) strand; PAM type: YTN; PAM sequence: CTT
ctctatttaaataactggcc

SEQ ID NO: 279673 - DNA, 20 bp, Artificial Sequence
  Description of Artificial Sequence: Synthetic oligonucleotide
  Target: LAMA2; (-) strand; PAM type: YTN; PAM sequence: TTG
tagcttctctatttaaataa

SEQ ID NO: 279674 - DNA, 20 bp, Artificial Sequence
  Description of Artificial Sequence: Synthetic oligonucleotide
  Target: LAMA2; (-) strand; PAM type: YTN; PAM sequence: TTT
gtagcttctctatttaaata

SEQ ID NO: 279675 - DNA, 20 bp, Artificial Sequence
  Description of Artificial Sequence: Synthetic oligonucleotide
  Target: LAMA2; (-) strand; PAM type: YTN; PAM sequence: TTC
atttgtagcttctctattta

SEQ ID NO: 279676 - DNA, 20 bp, Artificial Sequence
  Description of Artificial Sequence: Synthetic oligonucleotide
  Target: LAMA2; (-) strand; PAM type: YTN; PAM sequence: TTT
catttgtagcttctctattt

SEQ ID NO: 279677 - DNA, 20 bp, Artificial Sequence
  Description of Artificial Sequence: Synthetic oligonucleotide
  Target: LAMA2; (-) strand; PAM type: YTN; PAM sequence: TTA
taatatttcatttgtagctt

SEQ ID NO: 279678 - DNA, 20 bp, Artificial Sequence
  Description of Artificial Sequence: Synthetic oligonucleotide
  Target: LAMA2; (-) strand; PAM type: YTN; PAM sequence: TTT
ataatatttcatttgtagct

SEQ ID NO: 279679 - DNA, 20 bp, Artificial Sequence
  Description of Artificial Sequence: Synthetic oligonucleotide
  Target: LAMA2; (-) strand; PAM type: YTN; PAM sequence: TTT
tataatatttcatttgtagc

SEQ ID NO: 279680 - DNA, 20 bp, Artificial Sequence
  Description of Artificial Sequence: Synthetic oligonucleotide
  Target: LAMA2; (-) strand; PAM type: YTN; PAM sequence: CTG
ggttttataatatttcattt

SEQ ID NO: 279681 - DNA, 20 bp, Artificial Sequence
  Description of Artificial Sequence: Synthetic oligonucleotide
  Target: LAMA2; (-) strand; PAM type: YTN; PAM sequence: TTG
aactgggttttataatattt

SEQ ID NO: 279682 - DNA, 20 bp, Artificial Sequence
  Description of Artificial Sequence: Synthetic oligonucleotide
  Target: LAMA2; (-) strand; PAM type: YTN; PAM sequence: TTT
gaactgggttttataatatt

SEQ ID NO: 279683 - DNA, 20 bp, Artificial Sequence
  Description of Artificial Sequence: Synthetic oligonucleotide
  Target: LAMA2; (-) strand; PAM type: YTN; PAM sequence: TTA
aaatatgtacatttgaactg

SEQ ID NO: 279684 - DNA, 20 bp, Artificial Sequence
  Description of Artificial Sequence: Synthetic oligonucleotide
  Target: LAMA2; (-) strand; PAM type: YTN; PAM sequence: TTT
aaaatatgtacatttgaact

SEQ ID NO: 279685 - DNA, 20 bp, Artificial Sequence
  Description of Artificial Sequence: Synthetic oligonucleotide
  Target: LAMA2; (-) strand; PAM type: YTN; PAM sequence: CTT
taaaatatgtacatttgaac

SEQ ID NO: 279686 - DNA, 20 bp, Artificial Sequence
  Description of Artificial Sequence: Synthetic oligonucleotide
  Target: LAMA2; (-) strand; PAM type: YTN; PAM sequence: TTA
cagatctttaaaatatgtac

SEQ ID NO: 279687 - DNA, 20 bp, Artificial Sequence
  Description of Artificial Sequence: Synthetic oligonucleotide
  Target: LAMA2; (-) strand; PAM type: YTN; PAM sequence: TTT
acagatctttaaaatatgta

SEQ ID NO: 279688 - DNA, 20 bp, Artificial Sequence
  Description of Artificial Sequence: Synthetic oligonucleotide
  Target: LAMA2; (-) strand; PAM type: YTN; PAM sequence: CTG
tatatttacagatctttaaa

SEQ ID NO: 279689 - DNA, 20 bp, Artificial Sequence
  Description of Artificial Sequence: Synthetic oligonucleotide
  Target: LAMA2; (-) strand; PAM type: YTN; PAM sequence: TTA
ctgtatatttacagatcttt

SEQ ID NO: 279690 - DNA, 20 bp, Artificial Sequence
  Description of Artificial Sequence: Synthetic oligonucleotide
  Target: LAMA2; (-) strand; PAM type: YTN; PAM sequence: TTT
actgtatatttacagatctt

SEQ ID NO: 279691 - DNA, 20 bp, Artificial Sequence
  Description of Artificial Sequence: Synthetic oligonucleotide
  Target: LAMA2; (-) strand; PAM type: YTN; PAM sequence: TTT
tactgtatatttacagatct

SEQ ID NO: 279692 - DNA, 20 bp, Artificial Sequence
  Description of Artificial Sequence: Synthetic oligonucleotide
  Target: LAMA2; (-) strand; PAM type: YTN; PAM sequence: TTA
atgttttactgtatatttac

SEQ ID NO: 279693 - DNA, 20 bp, Artificial Sequence
  Description of Artificial Sequence: Synthetic oligonucleotide
  Target: LAMA2; (-) strand; PAM type: YTN; PAM sequence: CTG
gcaaatgttaatgttttact

SEQ ID NO: 279694 - DNA, 20 bp, Artificial Sequence
  Description of Artificial Sequence: Synthetic oligonucleotide
  Target: LAMA2; (-) strand; PAM type: YTN; PAM sequence: CTG
tatctggcaaatgttaatgt

SEQ ID NO: 279695 - DNA, 20 bp, Artificial Sequence
  Description of Artificial Sequence: Synthetic oligonucleotide
  Target: LAMA2; (-) strand; PAM type: YTN; PAM sequence: TTC
ccatcatctgtatctggcaa

SEQ ID NO: 279696 - DNA, 20 bp, Artificial Sequence
  Description of Artificial Sequence: Synthetic oligonucleotide
  Target: LAMA2; (-) strand; PAM type: YTN; PAM sequence: CTA
ttcccatcatctgtatctgg

SEQ ID NO: 279697 - DNA, 20 bp, Artificial Sequence
  Description of Artificial Sequence: Synthetic oligonucleotide
  Target: LAMA2; (-) strand; PAM type: YTN; PAM sequence: CTC
tattcccatcatctgtatct

SEQ ID NO: 279698 - DNA, 20 bp, Artificial Sequence
  Description of Artificial Sequence: Synthetic oligonucleotide
  Target: LAMA2; (-) strand; PAM type: YTN; PAM sequence: TTA
atacagacacctctattccc

SEQ ID NO: 279699 - DNA, 20 bp, Artificial Sequence
  Description of Artificial Sequence: Synthetic oligonucleotide
  Target: LAMA2; (-) strand; PAM type: YTN; PAM sequence: TTA
gaaattaatacagacacctc

SEQ ID NO: 279700 - DNA, 20 bp, Artificial Sequence
  Description of Artificial Sequence: Synthetic oligonucleotide
  Target: LAMA2; (-) strand; PAM type: YTN; PAM sequence: TTA
agtaggaaataagatagata

SEQ ID NO: 279701 - DNA, 20 bp, Artificial Sequence
  Description of Artificial Sequence: Synthetic oligonucleotide
  Target: LAMA2; (-) strand; PAM type: YTN; PAM sequence: TTT
aagtaggaaataagatagat

SEQ ID NO: 279702 - DNA, 20 bp, Artificial Sequence
  Description of Artificial Sequence: Synthetic oligonucleotide
  Target: LAMA2; (-) strand; PAM type: YTN; PAM sequence: CTA
tttaagtaggaaataagata

SEQ ID NO: 279703 - DNA, 20 bp, Artificial Sequence
  Description of Artificial Sequence: Synthetic oligonucleotide
  Target: LAMA2; (-) strand; PAM type: YTN; PAM sequence: TTA
aactatttaagtaggaaata

SEQ ID NO: 279704 - DNA, 20 bp, Artificial Sequence
  Description of Artificial Sequence: Synthetic oligonucleotide
  Target: LAMA2; (-) strand; PAM type: YTN; PAM sequence: TTA
attaaactatttaagtagga

SEQ ID NO: 279705 - DNA, 20 bp, Artificial Sequence
  Description of Artificial Sequence: Synthetic oligonucleotide
  Target: LAMA2; (-) strand; PAM type: YTN; PAM sequence: TTT
aattaaactatttaagtagg

SEQ ID NO: 279706 - DNA, 20 bp, Artificial Sequence
  Description of Artificial Sequence: Synthetic oligonucleotide
  Target: LAMA2; (-) strand; PAM type: YTN; PAM sequence: TTT
taattaaactatttaagtag

SEQ ID NO: 279707 - DNA, 20 bp, Artificial Sequence
  Description of Artificial Sequence: Synthetic oligonucleotide
  Target: LAMA2; (-) strand; PAM type: YTN; PAM sequence: TTC
attttaattaaactatttaa

SEQ ID NO: 279708 - DNA, 20 bp, Artificial Sequence
  Description of Artificial Sequence: Synthetic oligonucleotide
  Target: LAMA2; (-) strand; PAM type: YTN; PAM sequence: CTG
aggttcattttaattaaact

SEQ ID NO: 279709 - DNA, 20 bp, Artificial Sequence
  Description of Artificial Sequence: Synthetic oligonucleotide
  Target: LAMA2; (-) strand; PAM type: YTN; PAM sequence: CTC
tgaggttcattttaattaaa

SEQ ID NO: 279710 - DNA, 20 bp, Artificial Sequence
  Description of Artificial Sequence: Synthetic oligonucleotide
  Target: LAMA2; (-) strand; PAM type: YTN; PAM sequence: CTC
ctctgaggttcattttaatt

SEQ ID NO: 279711 - DNA, 20 bp, Artificial Sequence
  Description of Artificial Sequence: Synthetic oligonucleotide
  Target: LAMA2; (-) strand; PAM type: YTN; PAM sequence: CTA
tctcctctgaggttcatttt

SEQ ID NO: 279712 - DNA, 20 bp, Artificial Sequence
  Description of Artificial Sequence: Synthetic oligonucleotide
  Target: LAMA2; (-) strand; PAM type: YTN; PAM sequence: TTC
tatctcctctgaggttcatt

SEQ ID NO: 279713 - DNA, 20 bp, Artificial Sequence
  Description of Artificial Sequence: Synthetic oligonucleotide
  Target: LAMA2; (-) strand; PAM type: YTN; PAM sequence: TTT
ctatctcctctgaggttcat

SEQ ID NO: 279714 - DNA, 20 bp, Artificial Sequence
  Description of Artificial Sequence: Synthetic oligonucleotide
  Target: LAMA2; (-) strand; PAM type: YTN; PAM sequence: TTT
tctatctcctctgaggttca

SEQ ID NO: 279715 - DNA, 20 bp, Artificial Sequence
  Description of Artificial Sequence: Synthetic oligonucleotide
  Target: LAMA2; (-) strand; PAM type: YTN; PAM sequence: TTG
caggacagattttctatctc

SEQ ID NO: 279716 - DNA, 20 bp, Artificial Sequence
  Description of Artificial Sequence: Synthetic oligonucleotide
  Target: LAMA2; (-) strand; PAM type: YTN; PAM sequence: TTA
ttgcaggacagattttctat

SEQ ID NO: 279717 - DNA, 20 bp, Artificial Sequence
  Description of Artificial Sequence: Synthetic oligonucleotide
  Target: LAMA2; (-) strand; PAM type: YTN; PAM sequence: TTT
attgcaggacagattttcta

SEQ ID NO: 279718 - DNA, 20 bp, Artificial Sequence
  Description of Artificial Sequence: Synthetic oligonucleotide
  Target: LAMA2; (-) strand; PAM type: YTN; PAM sequence: TTT
tattgcaggacagattttct

SEQ ID NO: 279719 - DNA, 20 bp, Artificial Sequence
  Description of Artificial Sequence: Synthetic oligonucleotide
  Target: LAMA2; (-) strand; PAM type: YTN; PAM sequence: TTA
gaacagattttattgcagga

SEQ ID NO: 279720 - DNA, 20 bp, Artificial Sequence
  Description of Artificial Sequence: Synthetic oligonucleotide
  Target: LAMA2; (-) strand; PAM type: YTN; PAM sequence: TTT
agaacagattttattgcagg

SEQ ID NO: 279721 - DNA, 20 bp, Artificial Sequence
  Description of Artificial Sequence: Synthetic oligonucleotide
  Target: LAMA2; (-) strand; PAM type: YTN; PAM sequence: TTT
tagaacagattttattgcag

SEQ ID NO: 279722 - DNA, 20 bp, Artificial Sequence
  Description of Artificial Sequence: Synthetic oligonucleotide
  Target: LAMA2; (-) strand; PAM type: YTN; PAM sequence: TTA
ttttagaacagattttattg

SEQ ID NO: 279723 - DNA, 20 bp, Artificial Sequence
  Description of Artificial Sequence: Synthetic oligonucleotide
  Target: LAMA2; (-) strand; PAM type: YTN; PAM sequence: TTA
ttattttagaacagatttta

SEQ ID NO: 279724 - DNA, 20 bp, Artificial Sequence
  Description of Artificial Sequence: Synthetic oligonucleotide
  Target: LAMA2; (-) strand; PAM type: YTN; PAM sequence: TTT
attattttagaacagatttt

SEQ ID NO: 279725 - DNA, 20 bp, Artificial Sequence
  Description of Artificial Sequence: Synthetic oligonucleotide
  Target: LAMA2; (-) strand; PAM type: YTN; PAM sequence: CTT
tattattttagaacagattt

SEQ ID NO: 279726 - DNA, 20 bp, Artificial Sequence
  Description of Artificial Sequence: Synthetic oligonucleotide
  Target: LAMA2; (-) strand; PAM type: YTN; PAM sequence: TTC
tttattattttagaacagat

SEQ ID NO: 279727 - DNA, 20 bp, Artificial Sequence
  Description of Artificial Sequence: Synthetic oligonucleotide
  Target: LAMA2; (-) strand; PAM type: YTN; PAM sequence: TTT
ctttattattttagaacaga

SEQ ID NO: 279728 - DNA, 20 bp, Artificial Sequence
  Description of Artificial Sequence: Synthetic oligonucleotide
  Target: LAMA2; (-) strand; PAM type: YTN; PAM sequence: TTT
tctttattattttagaacag

SEQ ID NO: 279729 - DNA, 20 bp, Artificial Sequence
  Description of Artificial Sequence: Synthetic oligonucleotide
  Target: LAMA2; (-) strand; PAM type: YTN; PAM sequence: CTA
ttttctttattattttagaa

SEQ ID NO: 279730 - DNA, 20 bp, Artificial Sequence
  Description of Artificial Sequence: Synthetic oligonucleotide
  Target: LAMA2; (-) strand; PAM type: YTN; PAM sequence: TTA
gacctattttctttattatt

SEQ ID NO: 279731 - DNA, 20 bp, Artificial Sequence
  Description of Artificial Sequence: Synthetic oligonucleotide
  Target: LAMA2; (-) strand; PAM type: YTN; PAM sequence: TTT
agacctattttctttattat

SEQ ID NO: 279732 - DNA, 20 bp, Artificial Sequence
  Description of Artificial Sequence: Synthetic oligonucleotide
  Target: LAMA2; (-) strand; PAM type: YTN; PAM sequence: TTT
tagacctattttctttatta

SEQ ID NO: 279733 - DNA, 20 bp, Artificial Sequence
  Description of Artificial Sequence: Synthetic oligonucleotide
  Target: LAMA2; (-) strand; PAM type: YTN; PAM sequence: TTC
cagacccattttagacctat

SEQ ID NO: 279734 - DNA, 20 bp, Artificial Sequence
  Description of Artificial Sequence: Synthetic oligonucleotide
  Target: LAMA2; (-) strand; PAM type: YTN; PAM sequence: TTT
ccagacccattttagaccta

SEQ ID NO: 279735 - DNA, 20 bp, Artificial Sequence
  Description of Artificial Sequence: Synthetic oligonucleotide
  Target: LAMA2; (-) strand; PAM type: YTN; PAM sequence: TTC
atttccagacccattttaga

SEQ ID NO: 279736 - DNA, 20 bp, Artificial Sequence
  Description of Artificial Sequence: Synthetic oligonucleotide
  Target: LAMA2; (-) strand; PAM type: YTN; PAM sequence: TTT
catttccagacccattttag

SEQ ID NO: 279737 - DNA, 20 bp, Artificial Sequence
  Description of Artificial Sequence: Synthetic oligonucleotide
  Target: LAMA2; (-) strand; PAM type: YTN; PAM sequence: TTG
tttcatttccagacccattt

SEQ ID NO: 279738 - DNA, 20 bp, Artificial Sequence
  Description of Artificial Sequence: Synthetic oligonucleotide
  Target: LAMA2; (-) strand; PAM type: YTN; PAM sequence: TTG
ttgtttcatttccagaccca

SEQ ID NO: 279739 - DNA, 20 bp, Artificial Sequence
  Description of Artificial Sequence: Synthetic oligonucleotide
  Target: LAMA2; (-) strand; PAM type: YTN; PAM sequence: CTG
gtgtaaaggatgagggttgt

SEQ ID NO: 279740 - DNA, 20 bp, Artificial Sequence
  Description of Artificial Sequence: Synthetic oligonucleotide
  Target: LAMA2; (-) strand; PAM type: YTN; PAM sequence: TTG
ctggtgtaaaggatgagggt

SEQ ID NO: 279741 - DNA, 20 bp, Artificial Sequence
  Description of Artificial Sequence: Synthetic oligonucleotide
  Target: LAMA2; (-) strand; PAM type: YTN; PAM sequence: CTT
gctggtgtaaaggatgaggg

SEQ ID NO: 279742 - DNA, 20 bp, Artificial Sequence
  Description of Artificial Sequence: Synthetic oligonucleotide
  Target: LAMA2; (-) strand; PAM type: YTN; PAM sequence: TTC
ttgctggtgtaaaggatgag

SEQ ID NO: 279743 - DNA, 20 bp, Artificial Sequence
  Description of Artificial Sequence: Synthetic oligonucleotide
  Target: LAMA2; (-) strand; PAM type: YTN; PAM sequence: CTT
cttgctggtgtaaaggatga

SEQ ID NO: 279744 - DNA, 20 bp, Artificial Sequence
  Description of Artificial Sequence: Synthetic oligonucleotide
  Target: LAMA2; (-) strand; PAM type: YTN; PAM sequence: TTA
gaacttcttgctggtgtaaa

SEQ ID NO: 279745 - DNA, 20 bp, Artificial Sequence
  Description of Artificial Sequence: Synthetic oligonucleotide
  Target: LAMA2; (-) strand; PAM type: YTN; PAM sequence: TTT
agaacttcttgctggtgtaa

SEQ ID NO: 279746 - DNA, 20 bp, Artificial Sequence
  Description of Artificial Sequence: Synthetic oligonucleotide
  Target: LAMA2; (-) strand; PAM type: YTN; PAM sequence: TTA
gaaaaagaaagaaatttaga

SEQ ID NO: 279747 - DNA, 20 bp, Artificial Sequence
  Description of Artificial Sequence: Synthetic oligonucleotide
  Target: LAMA2; (-) strand; PAM type: YTN; PAM sequence: TTT
agaaaaagaaagaaatttag

SEQ ID NO: 279748 - DNA, 20 bp, Artificial Sequence
  Description of Artificial Sequence: Synthetic oligonucleotide
  Target: LAMA2; (-) strand; PAM type: YTN; PAM sequence: TTA
aaacatgtatgcatcatgaa

SEQ ID NO: 279749 - DNA, 20 bp, Artificial Sequence
  Description of Artificial Sequence: Synthetic oligonucleotide
  Target: LAMA2; (-) strand; PAM type: YTN; PAM sequence: TTA
aaagaaattaaaacatgtat

SEQ ID NO: 279750 - DNA, 20 bp, Artificial Sequence
  Description of Artificial Sequence: Synthetic oligonucleotide
  Target: LAMA2; (-) strand; PAM type: YTN; PAM sequence: TTT
aaaagaaattaaaacatgta

SEQ ID NO: 279751 - DNA, 20 bp, Artificial Sequence
  Description of Artificial Sequence: Synthetic oligonucleotide
  Target: LAMA2; (-) strand; PAM type: YTN; PAM sequence: CTG
atcatttaaaagaaattaaa

SEQ ID NO: 279752 - DNA, 20 bp, Artificial Sequence
  Description of Artificial Sequence: Synthetic oligonucleotide
  Target: LAMA2; (-) strand; PAM type: YTN; PAM sequence: CTC
tgatcatttaaaagaaatta

SEQ ID NO: 279753 - DNA, 20 bp, Artificial Sequence
  Description of Artificial Sequence: Synthetic oligonucleotide
  Target: LAMA2; (-) strand; PAM type: YTN; PAM sequence: TTA
tcagcctctgatcatttaaa

SEQ ID NO: 279754 - DNA, 20 bp, Artificial Sequence
  Description of Artificial Sequence: Synthetic oligonucleotide
  Target: LAMA2; (-) strand; PAM type: YTN; PAM sequence: TTG
caattatcagcctctgatca

SEQ ID NO: 279755 - DNA, 20 bp, Artificial Sequence
  Description of Artificial Sequence: Synthetic oligonucleotide
  Target: LAMA2; (-) strand; PAM type: YTN; PAM sequence: CTT
gcaattatcagcctctgatc

SEQ ID NO: 279756 - DNA, 20 bp, Artificial Sequence
  Description of Artificial Sequence: Synthetic oligonucleotide
  Target: LAMA2; (-) strand; PAM type: YTN; PAM sequence: TTG
cttgcaattatcagcctctg

SEQ ID NO: 279757 - DNA, 20 bp, Artificial Sequence
  Description of Artificial Sequence: Synthetic oligonucleotide
  Target: LAMA2; (-) strand; PAM type: YTN; PAM sequence: TTG
ttgcttgcaattatcagcct

SEQ ID NO: 279758 - DNA, 20 bp, Artificial Sequence
  Description of Artificial Sequence: Synthetic oligonucleotide
  Target: LAMA2; (-) strand; PAM type: YTN; PAM sequence: TTA
ggggattgttgcttgcaatt

SEQ ID NO: 279759 - DNA, 20 bp, Artificial Sequence
  Description of Artificial Sequence: Synthetic oligonucleotide
  Target: LAMA2; (-) strand; PAM type: YTN; PAM sequence: TTA
ggttaggggattgttgcttg

SEQ ID NO: 279760 - DNA, 20 bp, Artificial Sequence
  Description of Artificial Sequence: Synthetic oligonucleotide
  Target: LAMA2; (-) strand; PAM type: YTN; PAM sequence: TTG
agagaaaagttaggttaggg

SEQ ID NO: 279761 - DNA, 20 bp, Artificial Sequence
  Description of Artificial Sequence: Synthetic oligonucleotide
  Target: LAMA2; (-) strand; PAM type: YTN; PAM sequence: TTA
gttgagagaaaagttaggtt

SEQ ID NO: 279762 - DNA, 20 bp, Artificial Sequence
  Description of Artificial Sequence: Synthetic oligonucleotide
  Target: LAMA2; (-) strand; PAM type: YTN; PAM sequence: CTT
agttgagagaaaagttaggt

SEQ ID NO: 279763 - DNA, 20 bp, Artificial Sequence
  Description of Artificial Sequence: Synthetic oligonucleotide
  Target: LAMA2; (-) strand; PAM type: YTN; PAM sequence: CTG
tgagcttagttgagagaaaa

SEQ ID NO: 279764 - DNA, 20 bp, Artificial Sequence
  Description of Artificial Sequence: Synthetic oligonucleotide
  Target: LAMA2; (-) strand; PAM type: YTN; PAM sequence: CTG
gagctgtgagcttagttgag

SEQ ID NO: 279765 - DNA, 20 bp, Artificial Sequence
  Description of Artificial Sequence: Synthetic oligonucleotide
  Target: LAMA2; (-) strand; PAM type: YTN; PAM sequence: TTG
atcctggagctgtgagctta

SEQ ID NO: 279766 - DNA, 20 bp, Artificial Sequence
  Description of Artificial Sequence: Synthetic oligonucleotide
  Target: LAMA2; (-) strand; PAM type: YTN; PAM sequence: TTG
ttgatcctggagctgtgagc

SEQ ID NO: 279767 - DNA, 20 bp, Artificial Sequence
  Description of Artificial Sequence: Synthetic oligonucleotide
  Target: LAMA2; (-) strand; PAM type: YTN; PAM sequence: TTG
gaattgttgatcctggagct

SEQ ID NO: 279768 - DNA, 20 bp, Artificial Sequence
  Description of Artificial Sequence: Synthetic oligonucleotide
  Target: LAMA2; (-) strand; PAM type: YTN; PAM sequence: TTT
ggaattgttgatcctggagc

SEQ ID NO: 279769 - DNA, 20 bp, Artificial Sequence
  Description of Artificial Sequence: Synthetic oligonucleotide
  Target: LAMA2; (-) strand; PAM type: YTN; PAM sequence: TTG
aaagatttggaattgttgat

SEQ ID NO: 279770 - DNA, 20 bp, Artificial Sequence
  Description of Artificial Sequence: Synthetic oligonucleotide
  Target: LAMA2; (-) strand; PAM type: YTN; PAM sequence: TTT
gaaagatttggaattgttga

SEQ ID NO: 279771 - DNA, 20 bp, Artificial Sequence
  Description of Artificial Sequence: Synthetic oligonucleotide
  Target: LAMA2; (-) strand; PAM type: YTN; PAM sequence: CTA
agagatgtagtaaaagaaga

SEQ ID NO: 279772 - DNA, 20 bp, Artificial Sequence
  Description of Artificial Sequence: Synthetic oligonucleotide
  Target: LAMA2; (-) strand; PAM type: YTN; PAM sequence: TTA
ctaagagatgtagtaaaaga

SEQ ID NO: 279773 - DNA, 20 bp, Artificial Sequence
  Description of Artificial Sequence: Synthetic oligonucleotide
  Target: LAMA2; (-) strand; PAM type: YTN; PAM sequence: TTA
atgaaatacgtgatggcaca

SEQ ID NO: 279774 - DNA, 20 bp, Artificial Sequence
  Description of Artificial Sequence: Synthetic oligonucleotide
  Target: LAMA2; (-) strand; PAM type: YTN; PAM sequence: CTT
aatgaaatacgtgatggcac

SEQ ID NO: 279775 - DNA, 20 bp, Artificial Sequence
  Description of Artificial Sequence: Synthetic oligonucleotide
  Target: LAMA2; (-) strand; PAM type: YTN; PAM sequence: TTA
aatagataatgccccactta

SEQ ID NO: 279776 - DNA, 20 bp, Artificial Sequence
  Description of Artificial Sequence: Synthetic oligonucleotide
  Target: LAMA2; (-) strand; PAM type: YTN; PAM sequence: TTC
atcatagcagtaattaaata

SEQ ID NO: 279777 - DNA, 20 bp, Artificial Sequence
  Description of Artificial Sequence: Synthetic oligonucleotide
  Target: LAMA2; (-) strand; PAM type: YTN; PAM sequence: CTT
catcatagcagtaattaaat

SEQ ID NO: 279778 - DNA, 20 bp, Artificial Sequence
  Description of Artificial Sequence: Synthetic oligonucleotide
  Target: LAMA2; (-) strand; PAM type: YTN; PAM sequence: CTC
cttcatcatagcagtaatta

SEQ ID NO: 279779 - DNA, 20 bp, Artificial Sequence
  Description of Artificial Sequence: Synthetic oligonucleotide
  Target: LAMA2; (-) strand; PAM type: YTN; PAM sequence: CTA
catctccttcatcatagcag

SEQ ID NO: 279780 - DNA, 20 bp, Artificial Sequence
  Description of Artificial Sequence: Synthetic oligonucleotide
  Target: LAMA2; (-) strand; PAM type: YTN; PAM sequence: CTG
taagtgaactacatctcctt

SEQ ID NO: 279781 - DNA, 20 bp, Artificial Sequence
  Description of Artificial Sequence: Synthetic oligonucleotide
  Target: LAMA2; (-) strand; PAM type: YTN; PAM sequence: TTC
tgtaagtgaactacatctcc

SEQ ID NO: 279782 - DNA, 20 bp, Artificial Sequence
  Description of Artificial Sequence: Synthetic oligonucleotide
  Target: LAMA2; (-) strand; PAM type: YTN; PAM sequence: CTG
aagggtgggaaaatgtgatg

SEQ ID NO: 279783 - DNA, 20 bp, Artificial Sequence
  Description of Artificial Sequence: Synthetic oligonucleotide
  Target: LAMA2; (-) strand; PAM type: YTN; PAM sequence: TTG
ggaaactgaagggtgggaaa

SEQ ID NO: 279784 - DNA, 20 bp, Artificial Sequence
  Description of Artificial Sequence: Synthetic oligonucleotide
  Target: LAMA2; (-) strand; PAM type: YTN; PAM sequence: CTA
tattgggaaactgaagggtg

SEQ ID NO: 279785 - DNA, 20 bp, Artificial Sequence
  Description of Artificial Sequence: Synthetic oligonucleotide
  Target: LAMA2; (-) strand; PAM type: YTN; PAM sequence: CTA
agcacagtaatgtacctata

SEQ ID NO: 279786 - DNA, 20 bp, Artificial Sequence
  Description of Artificial Sequence: Synthetic oligonucleotide
  Target: LAMA2; (-) strand; PAM type: YTN; PAM sequence: TTA
aaaatgaagaatctaagcac

SEQ ID NO: 279787 - DNA, 20 bp, Artificial Sequence
  Description of Artificial Sequence: Synthetic oligonucleotide
  Target: LAMA2; (-) strand; PAM type: YTN; PAM sequence: TTA
ggttaaaaatgaagaatcta

SEQ ID NO: 279788 - DNA, 20 bp, Artificial Sequence
  Description of Artificial Sequence: Synthetic oligonucleotide
  Target: LAMA2; (-) strand; PAM type: YTN; PAM sequence: CTC
agtatattaggttaaaaatg

SEQ ID NO: 279789 - DNA, 20 bp, Artificial Sequence
  Description of Artificial Sequence: Synthetic oligonucleotide
  Target: LAMA2; (-) strand; PAM type: YTN; PAM sequence: CTC
tcagtatattaggttaaaaa

SEQ ID NO: 279790 - DNA, 20 bp, Artificial Sequence
  Description of Artificial Sequence: Synthetic oligonucleotide
  Target: LAMA2; (-) strand; PAM type: YTN; PAM sequence: TTA
tacaggaaataatgctctca

SEQ ID NO: 279791 - DNA, 20 bp, Artificial Sequence
  Description of Artificial Sequence: Synthetic oligonucleotide
  Target: LAMA2; (-) strand; PAM type: YTN; PAM sequence: TTT
atacaggaaataatgctctc

SEQ ID NO: 279792 - DNA, 20 bp, Artificial Sequence
  Description of Artificial Sequence: Synthetic oligonucleotide
  Target: LAMA2; (-) strand; PAM type: YTN; PAM sequence: CTA
tcatttatacaggaaataat

SEQ ID NO: 279793 - DNA, 20 bp, Artificial Sequence
  Description of Artificial Sequence: Synthetic oligonucleotide
  Target: LAMA2; (-) strand; PAM type: YTN; PAM sequence: TTA
aagagtgcagagtctatcat

SEQ ID NO: 279794 - DNA, 20 bp, Artificial Sequence
  Description of Artificial Sequence: Synthetic oligonucleotide
  Target: LAMA2; (-) strand; PAM type: YTN; PAM sequence: CTT
aaagagtgcagagtctatca

SEQ ID NO: 279795 - DNA, 20 bp, Artificial Sequence
  Description of Artificial Sequence: Synthetic oligonucleotide
  Target: LAMA2; (-) strand; PAM type: YTN; PAM sequence: TTC
atcttaaagagtgcagagtc

SEQ ID NO: 279796 - DNA, 20 bp, Artificial Sequence
  Description of Artificial Sequence: Synthetic oligonucleotide
  Target: LAMA2; (-) strand; PAM type: YTN; PAM sequence: CTT
catcttaaagagtgcagagt

SEQ ID NO: 279797 - DNA, 20 bp, Artificial Sequence
  Description of Artificial Sequence: Synthetic oligonucleotide
  Target: LAMA2; (-) strand; PAM type: YTN; PAM sequence: CTA
aagggaagaatgaggacata

SEQ ID NO: 279798 - DNA, 20 bp, Artificial Sequence
  Description of Artificial Sequence: Synthetic oligonucleotide
  Target: LAMA2; (-) strand; PAM type: YTN; PAM sequence: CTG
agaggacgaggaaaaaagga

SEQ ID NO: 279799 - DNA, 20 bp, Artificial Sequence
  Description of Artificial Sequence: Synthetic oligonucleotide
  Target: LAMA2; (-) strand; PAM type: YTN; PAM sequence: TTA
aagaggtagaagctgagagg

SEQ ID NO: 279800 - DNA, 20 bp, Artificial Sequence
  Description of Artificial Sequence: Synthetic oligonucleotide
  Target: LAMA2; (-) strand; PAM type: YTN; PAM sequence: TTG
accatcacaatatcaaagtt

SEQ ID NO: 279801 - DNA, 20 bp, Artificial Sequence
  Description of Artificial Sequence: Synthetic oligonucleotide
  Target: LAMA2; (-) strand; PAM type: YTN; PAM sequence: TTA
ttgaccatcacaatatcaaa

SEQ ID NO: 279802 - DNA, 20 bp, Artificial Sequence
  Description of Artificial Sequence: Synthetic oligonucleotide
  Target: LAMA2; (-) strand; PAM type: YTN; PAM sequence: TTA
tagataaaatgtaaatgtta

SEQ ID NO: 279803 - DNA, 20 bp, Artificial Sequence
  Description of Artificial Sequence: Synthetic oligonucleotide
  Target: LAMA2; (-) strand; PAM type: YTN; PAM sequence: TTA
tggttatagataaaatgtaa

SEQ ID NO: 279804 - DNA, 20 bp, Artificial Sequence
  Description of Artificial Sequence: Synthetic oligonucleotide
  Target: LAMA2; (-) strand; PAM type: YTN; PAM sequence: CTG
ccatggcacaattatggtta

SEQ ID NO: 279805 - DNA, 20 bp, Artificial Sequence
  Description of Artificial Sequence: Synthetic oligonucleotide
  Target: LAMA2; (-) strand; PAM type: YTN; PAM sequence: TTC
tgccatggcacaattatggt

SEQ ID NO: 279806 - DNA, 20 bp, Artificial Sequence
  Description of Artificial Sequence: Synthetic oligonucleotide
  Target: LAMA2; (-) strand; PAM type: YTN; PAM sequence: CTG
tattctgccatggcacaatt

SEQ ID NO: 279807 - DNA, 20 bp, Artificial Sequence
  Description of Artificial Sequence: Synthetic oligonucleotide
  Target: LAMA2; (-) strand; PAM type: YTN; PAM sequence: TTC
tgtattctgccatggcacaa

SEQ ID NO: 279808 - DNA, 20 bp, Artificial Sequence
  Description of Artificial Sequence: Synthetic oligonucleotide
  Target: LAMA2; (-) strand; PAM type: YTN; PAM sequence: CTT
ctgtattctgccatggcaca

SEQ ID NO: 279809 - DNA, 20 bp, Artificial Sequence
  Description of Artificial Sequence: Synthetic oligonucleotide
  Target: LAMA2; (-) strand; PAM type: YTN; PAM sequence: TTC
agagaagggacttctgtatt

SEQ ID NO: 279810 - DNA, 20 bp, Artificial Sequence
  Description of Artificial Sequence: Synthetic oligonucleotide
  Target: LAMA2; (-) strand; PAM type: YTN; PAM sequence: CTT
cagagaagggacttctgtat

SEQ ID NO: 279811 - DNA, 20 bp, Artificial Sequence
  Description of Artificial Sequence: Synthetic oligonucleotide
  Target: LAMA2; (-) strand; PAM type: YTN; PAM sequence: TTA
aggaataaaatgtcttcaga

SEQ ID NO: 279812 - DNA, 20 bp, Artificial Sequence
  Description of Artificial Sequence: Synthetic oligonucleotide
  Target: LAMA2; (-) strand; PAM type: YTN; PAM sequence: TTT
aaggaataaaatgtcttcag

SEQ ID NO: 279813 - DNA, 20 bp, Artificial Sequence
  Description of Artificial Sequence: Synthetic oligonucleotide
  Target: LAMA2; (-) strand; PAM type: YTN; PAM sequence: CTT
taaggaataaaatgtcttca

SEQ ID NO: 279814 - DNA, 20 bp, Artificial Sequence
  Description of Artificial Sequence: Synthetic oligonucleotide
  Target: LAMA2; (-) strand; PAM type: YTN; PAM sequence: CTG
aaaaaaaatcaaagggagtc

SEQ ID NO: 279815 - DNA, 20 bp, Artificial Sequence
  Description of Artificial Sequence: Synthetic oligonucleotide
  Target: LAMA2; (-) strand; PAM type: YTN; PAM sequence: CTG
gcaatcaagcatcaaatggc

SEQ ID NO: 279816 - DNA, 20 bp, Artificial Sequence
  Description of Artificial Sequence: Synthetic oligonucleotide
  Target: LAMA2; (-) strand; PAM type: YTN; PAM sequence: CTG
cacagagcaactggcaatca

SEQ ID NO: 279817 - DNA, 20 bp, Artificial Sequence
  Description of Artificial Sequence: Synthetic oligonucleotide
  Target: LAMA2; (-) strand; PAM type: YTN; PAM sequence: TTC
tgcacagagcaactggcaat

SEQ ID NO: 279818 - DNA, 20 bp, Artificial Sequence
  Description of Artificial Sequence: Synthetic oligonucleotide
  Target: LAMA2; (-) strand; PAM type: YTN; PAM sequence: CTT
ctgcacagagcaactggcaa

SEQ ID NO: 279819 - DNA, 20 bp, Artificial Sequence
  Description of Artificial Sequence: Synthetic oligonucleotide
  Target: LAMA2; (-) strand; PAM type: YTN; PAM sequence: CTC
ttctgcacagagcaactggc

SEQ ID NO: 279820 - DNA, 20 bp, Artificial Sequence
  Description of Artificial Sequence: Synthetic oligonucleotide
  Target: LAMA2; (-) strand; PAM type: YTN; PAM sequence: TTC
tcttctgcacagagcaactg

SEQ ID NO: 279821 - DNA, 20 bp, Artificial Sequence
  Description of Artificial Sequence: Synthetic oligonucleotide
  Target: LAMA2; (-) strand; PAM type: YTN; PAM sequence: CTT
ctcttctgcacagagcaact

SEQ ID NO: 279822 - DNA, 20 bp, Artificial Sequence
  Description of Artificial Sequence: Synthetic oligonucleotide
  Target: LAMA2; (-) strand; PAM type: YTN; PAM sequence: TTA
tggaataaaataccccttct

SEQ ID NO: 279823 - DNA, 20 bp, Artificial Sequence
  Description of Artificial Sequence: Synthetic oligonucleotide
  Target: LAMA2; (-) strand; PAM type: YTN; PAM sequence: TTT
atggaataaaataccccttc

SEQ ID NO: 279824 - DNA, 20 bp, Artificial Sequence
  Description of Artificial Sequence: Synthetic oligonucleotide
  Target: LAMA2; (-) strand; PAM type: YTN; PAM sequence: TTT
tatggaataaaatacccctt

SEQ ID NO: 279825 - DNA, 20 bp, Artificial Sequence
  Description of Artificial Sequence: Synthetic oligonucleotide
  Target: LAMA2; (-) strand; PAM type: YTN; PAM sequence: TTA
ttttatggaataaaataccc

SEQ ID NO: 279826 - DNA, 20 bp, Artificial Sequence
  Description of Artificial Sequence: Synthetic oligonucleotide
  Target: LAMA2; (-) strand; PAM type: YTN; PAM sequence: CTG
caagttattttatggaataa

SEQ ID NO: 279827 - DNA, 20 bp, Artificial Sequence
  Description of Artificial Sequence: Synthetic oligonucleotide
  Target: LAMA2; (-) strand; PAM type: YTN; PAM sequence: TTC
actgcaagttattttatgga

SEQ ID NO: 279828 - DNA, 20 bp, Artificial Sequence
  Description of Artificial Sequence: Synthetic oligonucleotide
  Target: LAMA2; (-) strand; PAM type: YTN; PAM sequence: TTG
tgaaaataaaaaggaataat

SEQ ID NO: 279829 - DNA, 20 bp, Artificial Sequence
  Description of Artificial Sequence: Synthetic oligonucleotide
  Target: LAMA2; (-) strand; PAM type: YTN; PAM sequence: CTC
agaaagaacaggtaaggtag

SEQ ID NO: 279830 - DNA, 20 bp, Artificial Sequence
  Description of Artificial Sequence: Synthetic oligonucleotide
  Target: LAMA2; (-) strand; PAM type: YTN; PAM sequence: TTG
gagaaggccaggcctcagaa

SEQ ID NO: 279831 - DNA, 20 bp, Artificial Sequence
  Description of Artificial Sequence: Synthetic oligonucleotide
  Target: LAMA2; (-) strand; PAM type: YTN; PAM sequence: TTT
ggagaaggccaggcctcaga

SEQ ID NO: 279832 - DNA, 20 bp, Artificial Sequence
  Description of Artificial Sequence: Synthetic oligonucleotide
  Target: LAMA2; (-) strand; PAM type: YTN; PAM sequence: CTA
tagggtatatgccagcaagg

SEQ ID NO: 279833 - DNA, 20 bp, Artificial Sequence
  Description of Artificial Sequence: Synthetic oligonucleotide
  Target: LAMA2; (-) strand; PAM type: YTN; PAM sequence: TTG
cactatagggtatatgccag

SEQ ID NO: 279834 - DNA, 20 bp, Artificial Sequence
  Description of Artificial Sequence: Synthetic oligonucleotide
  Target: LAMA2; (-) strand; PAM type: YTN; PAM sequence: CTT
gcactatagggtatatgcca

SEQ ID NO: 279835 - DNA, 20 bp, Artificial Sequence
  Description of Artificial Sequence: Synthetic oligonucleotide
  Target: LAMA2; (-) strand; PAM type: YTN; PAM sequence: TTG
tacccacaacttgcactata

SEQ ID NO: 279836 - DNA, 20 bp, Artificial Sequence
  Description of Artificial Sequence: Synthetic oligonucleotide
  Target: LAMA2; (-) strand; PAM type: YTN; PAM sequence: TTA
ttgtacccacaacttgcact

SEQ ID NO: 279837 - DNA, 20 bp, Artificial Sequence
  Description of Artificial Sequence: Synthetic oligonucleotide
  Target: LAMA2; (-) strand; PAM type: YTN; PAM sequence: TTG
cagttattgtacccacaact

SEQ ID NO: 279838 - DNA, 20 bp, Artificial Sequence
  Description of Artificial Sequence: Synthetic oligonucleotide
  Target: LAMA2; (-) strand; PAM type: YTN; PAM sequence: TTT
gcagttattgtacccacaac

SEQ ID NO: 279839 - DNA, 20 bp, Artificial Sequence
  Description of Artificial Sequence: Synthetic oligonucleotide
  Target: LAMA2; (-) strand; PAM type: YTN; PAM sequence: TTT
tgcagttattgtacccacaa

SEQ ID NO: 279840 - DNA, 20 bp, Artificial Sequence
  Description of Artificial Sequence: Synthetic oligonucleotide
  Target: LAMA2; (-) strand; PAM type: YTN; PAM sequence: CTT
ttgcagttattgtacccaca

SEQ ID NO: 279841 - DNA, 20 bp, Artificial Sequence
  Description of Artificial Sequence: Synthetic oligonucleotide
  Target: LAMA2; (-) strand; PAM type: YTN; PAM sequence: CTC
aatcttttgcagttattgta

SEQ ID NO: 279842 - DNA, 20 bp, Artificial Sequence
  Description of Artificial Sequence: Synthetic oligonucleotide
  Target: LAMA2; (-) strand; PAM type: YTN; PAM sequence: CTC
ctcaatcttttgcagttatt

SEQ ID NO: 279843 - DNA, 20 bp, Artificial Sequence
  Description of Artificial Sequence: Synthetic oligonucleotide
  Target: LAMA2; (-) strand; PAM type: YTN; PAM sequence: CTG
ctcctcaatcttttgcagtt

SEQ ID NO: 279844 - DNA, 20 bp, Artificial Sequence
  Description of Artificial Sequence: Synthetic oligonucleotide
  Target: LAMA2; (-) strand; PAM type: YTN; PAM sequence: TTC
ctgctcctcaatcttttgca

SEQ ID NO: 279845 - DNA, 20 bp, Artificial Sequence
  Description of Artificial Sequence: Synthetic oligonucleotide
  Target: LAMA2; (-) strand; PAM type: YTN; PAM sequence: TTA
gatagttcctgctcctcaat

SEQ ID NO: 279846 - DNA, 20 bp, Artificial Sequence
  Description of Artificial Sequence: Synthetic oligonucleotide
  Target: LAMA2; (-) strand; PAM type: YTN; PAM sequence: TTT
agatagttcctgctcctcaa

SEQ ID NO: 279847 - DNA, 20 bp, Artificial Sequence
  Description of Artificial Sequence: Synthetic oligonucleotide
  Target: LAMA2; (-) strand; PAM type: YTN; PAM sequence: TTA
tttagatagttcctgctcct

SEQ ID NO: 279848 - DNA, 20 bp, Artificial Sequence
  Description of Artificial Sequence: Synthetic oligonucleotide
  Target: LAMA2; (-) strand; PAM type: YTN; PAM sequence: CTG
cacccagccaccatggttat

SEQ ID NO: 279849 - DNA, 20 bp, Artificial Sequence
  Description of Artificial Sequence: Synthetic oligonucleotide
  Target: LAMA2; (-) strand; PAM type: YTN; PAM sequence: TTA
ccggcatgagtcactgcacc

SEQ ID NO: 279850 - DNA, 20 bp, Artificial Sequence
  Description of Artificial Sequence: Synthetic oligonucleotide
  Target: LAMA2; (-) strand; PAM type: YTN; PAM sequence: CTG
ggattaccggcatgagtcac

SEQ ID NO: 279851 - DNA, 20 bp, Artificial Sequence
  Description of Artificial Sequence: Synthetic oligonucleotide
  Target: LAMA2; (-) strand; PAM type: YTN; PAM sequence: CTC
ccaaagtgctgggattaccg

SEQ ID NO: 279852 - DNA, 20 bp, Artificial Sequence
  Description of Artificial Sequence: Synthetic oligonucleotide
  Target: LAMA2; (-) strand; PAM type: YTN; PAM sequence: CTC
agcctcccaaagtgctggga

SEQ ID NO: 279853 - DNA, 20 bp, Artificial Sequence
  Description of Artificial Sequence: Synthetic oligonucleotide
  Target: LAMA2; (-) strand; PAM type: YTN; PAM sequence: TTC
ccacctcagcctcccaaagt

SEQ ID NO: 279854 - DNA, 20 bp, Artificial Sequence
  Description of Artificial Sequence: Synthetic oligonucleotide
  Target: LAMA2; (-) strand; PAM type: YTN; PAM sequence: CTT
cccacctcagcctcccaaag

SEQ ID NO: 279855 - DNA, 20 bp, Artificial Sequence
  Description of Artificial Sequence: Synthetic oligonucleotide
  Target: LAMA2; (-) strand; PAM type: YTN; PAM sequence: CTC
aagcaatcttcccacctcag

SEQ ID NO: 279856 - DNA, 20 bp, Artificial Sequence
  Description of Artificial Sequence: Synthetic oligonucleotide
  Target: LAMA2; (-) strand; PAM type: YTN; PAM sequence: CTG
ggctcaagcaatcttcccac

SEQ ID NO: 279857 - DNA, 20 bp, Artificial Sequence
  Description of Artificial Sequence: Synthetic oligonucleotide
  Target: LAMA2; (-) strand; PAM type: YTN; PAM sequence: CTC
ctgggctcaagcaatcttcc

SEQ ID NO: 279858 - DNA, 20 bp, Artificial Sequence
  Description of Artificial Sequence: Synthetic oligonucleotide
  Target: LAMA2; (-) strand; PAM type: YTN; PAM sequence: CTC
aaactcctgggctcaagcaa

SEQ ID NO: 279859 - DNA, 20 bp, Artificial Sequence
  Description of Artificial Sequence: Synthetic oligonucleotide
  Target: LAMA2; (-) strand; PAM type: YTN; PAM sequence: CTG
gtctcaaactcctgggctca

SEQ ID NO: 279860 - DNA, 20 bp, Artificial Sequence
  Description of Artificial Sequence: Synthetic oligonucleotide
  Target: LAMA2; (-) strand; PAM type: YTN; PAM sequence: TTG
tccaggctggtctcaaactc

SEQ ID NO: 279861 - DNA, 20 bp, Artificial Sequence
  Description of Artificial Sequence: Synthetic oligonucleotide
  Target: LAMA2; (-) strand; PAM type: YTN; PAM sequence: TTC
gccatgttgtccaggctggt

SEQ ID NO: 279862 - DNA, 20 bp, Artificial Sequence
  Description of Artificial Sequence: Synthetic oligonucleotide
  Target: LAMA2; (-) strand; PAM type: YTN; PAM sequence: TTT
cgccatgttgtccaggctgg

SEQ ID NO: 279863 - DNA, 20 bp, Artificial Sequence
  Description of Artificial Sequence: Synthetic oligonucleotide
  Target: LAMA2; (-) strand; PAM type: YTN; PAM sequence: TTA
gtagagatggggtttcgcca

SEQ ID NO: 279864 - DNA, 20 bp, Artificial Sequence
  Description of Artificial Sequence: Synthetic oligonucleotide
  Target: LAMA2; (-) strand; PAM type: YTN; PAM sequence: TTT
agtagagatggggtttcgcc

SEQ ID NO: 279865 - DNA, 20 bp, Artificial Sequence
  Description of Artificial Sequence: Synthetic oligonucleotide
  Target: LAMA2; (-) strand; PAM type: YTN; PAM sequence: TTT
tagtagagatggggtttcgc

SEQ ID NO: 279866 - DNA, 20 bp, Artificial Sequence
  Description of Artificial Sequence: Synthetic oligonucleotide
  Target: LAMA2; (-) strand; PAM type: YTN; PAM sequence: TTT
ttagtagagatggggtttcg

SEQ ID NO: 279867 - DNA, 20 bp, Artificial Sequence
  Description of Artificial Sequence: Synthetic oligonucleotide
  Target: LAMA2; (-) strand; PAM type: YTN; PAM sequence: TTG
tatttttagtagagatgggg

SEQ ID NO: 279868 - DNA, 20 bp, Artificial Sequence
  Description of Artificial Sequence: Synthetic oligonucleotide
  Target: LAMA2; (-) strand; PAM type: YTN; PAM sequence: TTT
gtatttttagtagagatggg

SEQ ID NO: 279869 - DNA, 20 bp, Artificial Sequence
  Description of Artificial Sequence: Synthetic oligonucleotide
  Target: LAMA2; (-) strand; PAM type: YTN; PAM sequence: TTT
tgtatttttagtagagatgg

SEQ ID NO: 279870 - DNA, 20 bp, Artificial Sequence
  Description of Artificial Sequence: Synthetic oligonucleotide
  Target: LAMA2; (-) strand; PAM type: YTN; PAM sequence: TTT
ttgtatttttagtagagatg

SEQ ID NO: 279871 - DNA, 20 bp, Artificial Sequence
  Description of Artificial Sequence: Synthetic oligonucleotide
  Target: LAMA2; (-) strand; PAM type: YTN; PAM sequence: CTA
atttttgtatttttagtaga

SEQ ID NO: 279872 - DNA, 20 bp, Artificial Sequence
  Description of Artificial Sequence: Synthetic oligonucleotide
  Target: LAMA2; (-) strand; PAM type: YTN; PAM sequence: CTG
gctaatttttgtatttttag

SEQ ID NO: 279873 - DNA, 20 bp, Artificial Sequence
  Description of Artificial Sequence: Synthetic oligonucleotide
  Target: LAMA2; (-) strand; PAM type: YTN; PAM sequence: TTA
caggcatgtgtcaccatgcc

SEQ ID NO: 279874 - DNA, 20 bp, Artificial Sequence
  Description of Artificial Sequence: Synthetic oligonucleotide
  Target: LAMA2; (-) strand; PAM type: YTN; PAM sequence: CTG
gattacaggcatgtgtcacc

SEQ ID NO: 279875 - DNA, 20 bp, Artificial Sequence
  Description of Artificial Sequence: Synthetic oligonucleotide
  Target: LAMA2; (-) strand; PAM type: YTN; PAM sequence: CTG
agtagcctggattacaggca

SEQ ID NO: 279876 - DNA, 20 bp, Artificial Sequence
  Description of Artificial Sequence: Synthetic oligonucleotide
  Target: LAMA2; (-) strand; PAM type: YTN; PAM sequence: CTC
ctgagtagcctggattacag

SEQ ID NO: 279877 - DNA, 20 bp, Artificial Sequence
  Description of Artificial Sequence: Synthetic oligonucleotide
  Target: LAMA2; (-) strand; PAM type: YTN; PAM sequence: CTC
agcctcctgagtagcctgga

SEQ ID NO: 279878 - DNA, 20 bp, Artificial Sequence
  Description of Artificial Sequence: Synthetic oligonucleotide
  Target: LAMA2; (-) strand; PAM type: YTN; PAM sequence: CTC
ccacctcagcctcctgagta

SEQ ID NO: 279879 - DNA, 20 bp, Artificial Sequence
  Description of Artificial Sequence: Synthetic oligonucleotide
  Target: LAMA2; (-) strand; PAM type: YTN; PAM sequence: CTC
aggggatcctcccacctcag

SEQ ID NO: 279880 - DNA, 20 bp, Artificial Sequence
  Description of Artificial Sequence: Synthetic oligonucleotide
  Target: LAMA2; (-) strand; PAM type: YTN; PAM sequence: TTC
ccaggctcaggggatcctcc

SEQ ID NO: 279881 - DNA, 20 bp, Artificial Sequence
  Description of Artificial Sequence: Synthetic oligonucleotide
  Target: LAMA2; (-) strand; PAM type: YTN; PAM sequence: CTT
cccaggctcaggggatcctc

SEQ ID NO: 279882 - DNA, 20 bp, Artificial Sequence
  Description of Artificial Sequence: Synthetic oligonucleotide
  Target: LAMA2; (-) strand; PAM type: YTN; PAM sequence: TTG
acttcccaggctcaggggat

SEQ ID NO: 279883 - DNA, 20 bp, Artificial Sequence
  Description of Artificial Sequence: Synthetic oligonucleotide
  Target: LAMA2; (-) strand; PAM type: YTN; PAM sequence: CTT
gacttcccaggctcagggga

SEQ ID NO: 279884 - DNA, 20 bp, Artificial Sequence
  Description of Artificial Sequence: Synthetic oligonucleotide
  Target: LAMA2; (-) strand; PAM type: YTN; PAM sequence: CTG
cagccttgacttcccaggct

SEQ ID NO: 279885 - DNA, 20 bp, Artificial Sequence
  Description of Artificial Sequence: Synthetic oligonucleotide
  Target: LAMA2; (-) strand; PAM type: YTN; PAM sequence: CTC
actgcagccttgacttccca

SEQ ID NO: 279886 - DNA, 20 bp, Artificial Sequence
  Description of Artificial Sequence: Synthetic oligonucleotide
  Target: LAMA2; (-) strand; PAM type: YTN; PAM sequence: TTG
gctcactgcagccttgactt

SEQ ID NO: 279887 - DNA, 20 bp, Artificial Sequence
  Description of Artificial Sequence: Synthetic oligonucleotide
  Target: LAMA2; (-) strand; PAM type: YTN; PAM sequence: CTT
ggctcactgcagccttgact

SEQ ID NO: 279888 - DNA, 20 bp, Artificial Sequence
  Description of Artificial Sequence: Synthetic oligonucleotide
  Target: LAMA2; (-) strand; PAM type: YTN; PAM sequence: CTG
gagtgcagtggcatgatctt

SEQ ID NO: 279889 - DNA, 20 bp, Artificial Sequence
  Description of Artificial Sequence: Synthetic oligonucleotide
  Target: LAMA2; (-) strand; PAM type: YTN; PAM sequence: CTG
tcacgcaggctggagtgcag

SEQ ID NO: 279890 - DNA, 20 bp, Artificial Sequence
  Description of Artificial Sequence: Synthetic oligonucleotide
  Target: LAMA2; (-) strand; PAM type: YTN; PAM sequence: CTC
tgtcacgcaggctggagtgc

SEQ ID NO: 279891 - DNA, 20 bp, Artificial Sequence
  Description of Artificial Sequence: Synthetic oligonucleotide
  Target: LAMA2; (-) strand; PAM type: YTN; PAM sequence: TTG
ctctgtcacgcaggctggag

SEQ ID NO: 279892 - DNA, 20 bp, Artificial Sequence
  Description of Artificial Sequence: Synthetic oligonucleotide
  Target: LAMA2; (-) strand; PAM type: YTN; PAM sequence: CTT
gctctgtcacgcaggctgga

SEQ ID NO: 279893 - DNA, 20 bp, Artificial Sequence
  Description of Artificial Sequence: Synthetic oligonucleotide
  Target: LAMA2; (-) strand; PAM type: YTN; PAM sequence: TTG
tgagataaggtcttgctctg

SEQ ID NO: 279894 - DNA, 20 bp, Artificial Sequence
  Description of Artificial Sequence: Synthetic oligonucleotide
  Target: LAMA2; (-) strand; PAM type: YTN; PAM sequence: TTT
gtgagataaggtcttgctct

SEQ ID NO: 279895 - DNA, 20 bp, Artificial Sequence
  Description of Artificial Sequence: Synthetic oligonucleotide
  Target: LAMA2; (-) strand; PAM type: YTN; PAM sequence: TTT
tgtgagataaggtcttgctc

SEQ ID NO: 279896 - DNA, 20 bp, Artificial Sequence
  Description of Artificial Sequence: Synthetic oligonucleotide
  Target: LAMA2; (-) strand; PAM type: YTN; PAM sequence: TTT
ttgtgagataaggtcttgct

SEQ ID NO: 279897 - DNA, 20 bp, Artificial Sequence
  Description of Artificial Sequence: Synthetic oligonucleotide
  Target: LAMA2; (-) strand; PAM type: YTN; PAM sequence: TTT
tttgtgagataaggtcttgc

SEQ ID NO: 279898 - DNA, 20 bp, Artificial Sequence
  Description of Artificial Sequence: Synthetic oligonucleotide
  Target: LAMA2; (-) strand; PAM type: YTN; PAM sequence: CTT
ttttgtgagataaggtcttg

SEQ ID NO: 279899 - DNA, 20 bp, Artificial Sequence
  Description of Artificial Sequence: Synthetic oligonucleotide
  Target: LAMA2; (-) strand; PAM type: YTN; PAM sequence: TTC
ttttttgtgagataaggtct

SEQ ID NO: 279900 - DNA, 20 bp, Artificial Sequence
  Description of Artificial Sequence: Synthetic oligonucleotide
  Target: LAMA2; (-) strand; PAM type: YTN; PAM sequence: TTT
cttttttgtgagataaggtc

SEQ ID NO: 279901 - DNA, 20 bp, Artificial Sequence
  Description of Artificial Sequence: Synthetic oligonucleotide
  Target: LAMA2; (-) strand; PAM type: YTN; PAM sequence: TTT
tcttttttgtgagataaggt

SEQ ID NO: 279902 - DNA, 20 bp, Artificial Sequence
  Description of Artificial Sequence: Synthetic oligonucleotide
  Target: LAMA2; (-) strand; PAM type: YTN; PAM sequence: TTA
ttttcttttttgtgagataa

SEQ ID NO: 279903 - DNA, 20 bp, Artificial Sequence
  Description of Artificial Sequence: Synthetic oligonucleotide
  Target: LAMA2; (-) strand; PAM type: YTN; PAM sequence: TTT
attttcttttttgtgagata

SEQ ID NO: 279904 - DNA, 20 bp, Artificial Sequence
  Description of Artificial Sequence: Synthetic oligonucleotide
  Target: LAMA2; (-) strand; PAM type: YTN; PAM sequence: TTT
tattttcttttttgtgagat

SEQ ID NO: 279905 - DNA, 20 bp, Artificial Sequence
  Description of Artificial Sequence: Synthetic oligonucleotide
  Target: LAMA2; (-) strand; PAM type: YTN; PAM sequence: CTT
ttattttcttttttgtgaga

SEQ ID NO: 279906 - DNA, 20 bp, Artificial Sequence
  Description of Artificial Sequence: Synthetic oligonucleotide
  Target: LAMA2; (-) strand; PAM type: YTN; PAM sequence: CTA
gccacaccaccatgggcctt

SEQ ID NO: 279907 - DNA, 20 bp, Artificial Sequence
  Description of Artificial Sequence: Synthetic oligonucleotide
  Target: LAMA2; (-) strand; PAM type: YTN; PAM sequence: TTC
ctagccacaccaccatgggc

SEQ ID NO: 279908 - DNA, 20 bp, Artificial Sequence
  Description of Artificial Sequence: Synthetic oligonucleotide
  Target: LAMA2; (-) strand; PAM type: YTN; PAM sequence: TTT
cctagccacaccaccatggg

SEQ ID NO: 279909 - DNA, 20 bp, Artificial Sequence
  Description of Artificial Sequence: Synthetic oligonucleotide
  Target: LAMA2; (-) strand; PAM type: YTN; PAM sequence: CTT
tcctagccacaccaccatgg

SEQ ID NO: 279910 - DNA, 20 bp, Artificial Sequence
  Description of Artificial Sequence: Synthetic oligonucleotide
  Target: LAMA2; (-) strand; PAM type: YTN; PAM sequence: CTC
tttcctagccacaccaccat

SEQ ID NO: 279911 - DNA, 20 bp, Artificial Sequence
  Description of Artificial Sequence: Synthetic oligonucleotide
  Target: LAMA2; (-) strand; PAM type: YTN; PAM sequence: TTG
gcactctttcctagccacac

SEQ ID NO: 279912 - DNA, 20 bp, Artificial Sequence
  Description of Artificial Sequence: Synthetic oligonucleotide
  Target: LAMA2; (-) strand; PAM type: YTN; PAM sequence: TTG
gacagggttggcactctttc

SEQ ID NO: 279913 - DNA, 20 bp, Artificial Sequence
  Description of Artificial Sequence: Synthetic oligonucleotide
  Target: LAMA2; (-) strand; PAM type: YTN; PAM sequence: TTT
ggacagggttggcactcttt

SEQ ID NO: 279914 - DNA, 20 bp, Artificial Sequence
  Description of Artificial Sequence: Synthetic oligonucleotide
  Target: LAMA2; (-) strand; PAM type: YTN; PAM sequence: CTT
tggacagggttggcactctt

SEQ ID NO: 279915 - DNA, 20 bp, Artificial Sequence
  Description of Artificial Sequence: Synthetic oligonucleotide
  Target: LAMA2; (-) strand; PAM type: YTN; PAM sequence: TTC
cctttggacagggttggcac

SEQ ID NO: 279916 - DNA, 20 bp, Artificial Sequence
  Description of Artificial Sequence: Synthetic oligonucleotide
  Target: LAMA2; (-) strand; PAM type: YTN; PAM sequence: CTT
ccctttggacagggttggca

SEQ ID NO: 279917 - DNA, 20 bp, Artificial Sequence
  Description of Artificial Sequence: Synthetic oligonucleotide
  Target: LAMA2; (-) strand; PAM type: YTN; PAM sequence: TTC
agcaaagaaagcttcccttt

SEQ ID NO: 279918 - DNA, 20 bp, Artificial Sequence
  Description of Artificial Sequence: Synthetic oligonucleotide
  Target: LAMA2; (-) strand; PAM type: YTN; PAM sequence: TTT
cagcaaagaaagcttccctt

SEQ ID NO: 279919 - DNA, 20 bp, Artificial Sequence
  Description of Artificial Sequence: Synthetic oligonucleotide
  Target: LAMA2; (-) strand; PAM type: YTN; PAM sequence: CTC
aaaaaaaaaaaaaaaaaaaa

SEQ ID NO: 279920 - DNA, 20 bp, Artificial Sequence
  Description of Artificial Sequence: Synthetic oligonucleotide
  Target: LAMA2; (-) strand; PAM type: YTN; PAM sequence: CTC
cgtctcaaaaaaaaaaaaaa

SEQ ID NO: 279921 - DNA, 20 bp, Artificial Sequence
  Description of Artificial Sequence: Synthetic oligonucleotide
  Target: LAMA2; (-) strand; PAM type: YTN; PAM sequence: CTG
ggcgacagagcgagactccg

SEQ ID NO: 279922 - DNA, 20 bp, Artificial Sequence
  Description of Artificial Sequence: Synthetic oligonucleotide
  Target: LAMA2; (-) strand; PAM type: YTN; PAM sequence: CTC
cagcctgggcgacagagcga

SEQ ID NO: 279923 - DNA, 20 bp, Artificial Sequence
  Description of Artificial Sequence: Synthetic oligonucleotide
  Target: LAMA2; (-) strand; PAM type: YTN; PAM sequence: CTG
cactccagcctgggcgacag

SEQ ID NO: 279924 - DNA, 20 bp, Artificial Sequence
  Description of Artificial Sequence: Synthetic oligonucleotide
  Target: LAMA2; (-) strand; PAM type: YTN; PAM sequence: TTG
cagtgagccgagatcccgcc

SEQ ID NO: 279925 - DNA, 20 bp, Artificial Sequence
  Description of Artificial Sequence: Synthetic oligonucleotide
  Target: LAMA2; (-) strand; PAM type: YTN; PAM sequence: CTT
gcagtgagccgagatcccgc

SEQ ID NO: 279926 - DNA, 20 bp, Artificial Sequence
  Description of Artificial Sequence: Synthetic oligonucleotide
  Target: LAMA2; (-) strand; PAM type: YTN; PAM sequence: CTG
aggcaggagaatggcgtgaa

SEQ ID NO: 279927 - DNA, 20 bp, Artificial Sequence
  Description of Artificial Sequence: Synthetic oligonucleotide
  Target: LAMA2; (-) strand; PAM type: YTN; PAM sequence: TTG
ggaggctgaggcaggagaat

SEQ ID NO: 279928 - DNA, 20 bp, Artificial Sequence
  Description of Artificial Sequence: Synthetic oligonucleotide
  Target: LAMA2; (-) strand; PAM type: YTN; PAM sequence: CTT
gggaggctgaggcaggagaa

SEQ ID NO: 279929 - DNA, 20 bp, Artificial Sequence
  Description of Artificial Sequence: Synthetic oligonucleotide
  Target: LAMA2; (-) strand; PAM type: YTN; PAM sequence: CTA
cttgggaggctgaggcagga

SEQ ID NO: 279930 - DNA, 20 bp, Artificial Sequence
  Description of Artificial Sequence: Synthetic oligonucleotide
  Target: LAMA2; (-) strand; PAM type: YTN; PAM sequence: CTG
tagtcccagctacttgggag

SEQ ID NO: 279931 - DNA, 20 bp, Artificial Sequence
  Description of Artificial Sequence: Synthetic oligonucleotide
  Target: LAMA2; (-) strand; PAM type: YTN; PAM sequence: TTA
gccgggcgtagtggcgggcg

SEQ ID NO: 279932 - DNA, 20 bp, Artificial Sequence
  Description of Artificial Sequence: Synthetic oligonucleotide
  Target: LAMA2; (-) strand; PAM type: YTN; PAM sequence: CTA
aaaatacaaaaaaattagcc

SEQ ID NO: 279933 - DNA, 20 bp, Artificial Sequence
  Description of Artificial Sequence: Synthetic oligonucleotide
  Target: LAMA2; (-) strand; PAM type: YTN; PAM sequence: CTA
ctaaaaatacaaaaaaatta

SEQ ID NO: 279934 - DNA, 20 bp, Artificial Sequence
  Description of Artificial Sequence: Synthetic oligonucleotide
  Target: LAMA2; (-) strand; PAM type: YTN; PAM sequence: CTC
tactaaaaatacaaaaaaat

SEQ ID NO: 279935 - DNA, 20 bp, Artificial Sequence
  Description of Artificial Sequence: Synthetic oligonucleotide
  Target: LAMA2; (-) strand; PAM type: YTN; PAM sequence: CTA
aaacggtgaaaccccgtctc

SEQ ID NO: 279936 - DNA, 20 bp, Artificial Sequence
  Description of Artificial Sequence: Synthetic oligonucleotide
  Target: LAMA2; (-) strand; PAM type: YTN; PAM sequence: TTG
ggcgggcggatcacgaggtc

SEQ ID NO: 279937 - DNA, 20 bp, Artificial Sequence
  Description of Artificial Sequence: Synthetic oligonucleotide
  Target: LAMA2; (-) strand; PAM type: YTN; PAM sequence: TTT
gggcgggcggatcacgaggt

SEQ ID NO: 279938 - DNA, 20 bp, Artificial Sequence
  Description of Artificial Sequence: Synthetic oligonucleotide
  Target: LAMA2; (-) strand; PAM type: YTN; PAM sequence: CTT
tgggcgggcggatcacgagg

SEQ ID NO: 279939 - DNA, 20 bp, Artificial Sequence
  Description of Artificial Sequence: Synthetic oligonucleotide
  Target: LAMA2; (-) strand; PAM type: YTN; PAM sequence: CTG
taatcccagcactttgggcg

SEQ ID NO: 279940 - DNA, 20 bp, Artificial Sequence
  Description of Artificial Sequence: Synthetic oligonucleotide
  Target: LAMA2; (-) strand; PAM type: YTN; PAM sequence: CTC
acgcctgtaatcccagcact

SEQ ID NO: 279941 - DNA, 20 bp, Artificial Sequence
  Description of Artificial Sequence: Synthetic oligonucleotide
  Target: LAMA2; (-) strand; PAM type: YTN; PAM sequence: TTC
ggccgggcgcggtggctcac

SEQ ID NO: 279942 - DNA, 20 bp, Artificial Sequence
  Description of Artificial Sequence: Synthetic oligonucleotide
  Target: LAMA2; (-) strand; PAM type: YTN; PAM sequence: TTT
cggccgggcgcggtggctca

SEQ ID NO: 279943 - DNA, 20 bp, Artificial Sequence
  Description of Artificial Sequence: Synthetic oligonucleotide
  Target: LAMA2; (-) strand; PAM type: YTN; PAM sequence: TTG
atcaaagaaagtgtataatt

SEQ ID NO: 279944 - DNA, 20 bp, Artificial Sequence
  Description of Artificial Sequence: Synthetic oligonucleotide
  Target: LAMA2; (-) strand; PAM type: YTN; PAM sequence: CTA
tgacggagtaaaaagaagtt

SEQ ID NO: 279945 - DNA, 20 bp, Artificial Sequence
  Description of Artificial Sequence: Synthetic oligonucleotide
  Target: LAMA2; (-) strand; PAM type: YTN; PAM sequence: TTG
gtggggaataaaactatgac

SEQ ID NO: 279946 - DNA, 20 bp, Artificial Sequence
  Description of Artificial Sequence: Synthetic oligonucleotide
  Target: LAMA2; (-) strand; PAM type: YTN; PAM sequence: CTG
tccgggggagattggtgggg

SEQ ID NO: 279947 - DNA, 20 bp, Artificial Sequence
  Description of Artificial Sequence: Synthetic oligonucleotide
  Target: LAMA2; (-) strand; PAM type: YTN; PAM sequence: CTA
agtaaaatggagtgactgtc

SEQ ID NO: 279948 - DNA, 20 bp, Artificial Sequence
  Description of Artificial Sequence: Synthetic oligonucleotide
  Target: LAMA2; (-) strand; PAM type: YTN; PAM sequence: CTG
agaatagtaccaagagacta

SEQ ID NO: 279949 - DNA, 20 bp, Artificial Sequence
  Description of Artificial Sequence: Synthetic oligonucleotide
  Target: LAMA2; (-) strand; PAM type: YTN; PAM sequence: TTC
tgagaatagtaccaagagac

SEQ ID NO: 279950 - DNA, 20 bp, Artificial Sequence
  Description of Artificial Sequence: Synthetic oligonucleotide
  Target: LAMA2; (-) strand; PAM type: YTN; PAM sequence: TTG
aattctgagaatagtaccaa

SEQ ID NO: 279951 - DNA, 20 bp, Artificial Sequence
  Description of Artificial Sequence: Synthetic oligonucleotide
  Target: LAMA2; (-) strand; PAM type: YTN; PAM sequence: TTT
gaattctgagaatagtacca

SEQ ID NO: 279952 - DNA, 20 bp, Artificial Sequence
  Description of Artificial Sequence: Synthetic oligonucleotide
  Target: LAMA2; (-) strand; PAM type: YTN; PAM sequence: TTA
aaatttgaattctgagaata

SEQ ID NO: 279953 - DNA, 20 bp, Artificial Sequence
  Description of Artificial Sequence: Synthetic oligonucleotide
  Target: LAMA2; (-) strand; PAM type: YTN; PAM sequence: TTT
aaaatttgaattctgagaat

SEQ ID NO: 279954 - DNA, 20 bp, Artificial Sequence
  Description of Artificial Sequence: Synthetic oligonucleotide
  Target: LAMA2; (-) strand; PAM type: YTN; PAM sequence: TTA
atttaaaatttgaattctga

SEQ ID NO: 279955 - DNA, 20 bp, Artificial Sequence
  Description of Artificial Sequence: Synthetic oligonucleotide
  Target: LAMA2; (-) strand; PAM type: YTN; PAM sequence: TTA
attaatttaaaatttgaatt

SEQ ID NO: 279956 - DNA, 20 bp, Artificial Sequence
  Description of Artificial Sequence: Synthetic oligonucleotide
  Target: LAMA2; (-) strand; PAM type: YTN; PAM sequence: TTC
agaaatacagattaattaat

SEQ ID NO: 279957 - DNA, 20 bp, Artificial Sequence
  Description of Artificial Sequence: Synthetic oligonucleotide
  Target: LAMA2; (-) strand; PAM type: YTN; PAM sequence: CTT
cagaaatacagattaattaa

SEQ ID NO: 279958 - DNA, 20 bp, Artificial Sequence
  Description of Artificial Sequence: Synthetic oligonucleotide
  Target: LAMA2; (-) strand; PAM type: YTN; PAM sequence: CTC
ttcagaaatacagattaatt

SEQ ID NO: 279959 - DNA, 20 bp, Artificial Sequence
  Description of Artificial Sequence: Synthetic oligonucleotide
  Target: LAMA2; (-) strand; PAM type: YTN; PAM sequence: TTC
ccatggagaaagcaaaatat

SEQ ID NO: 279960 - DNA, 20 bp, Artificial Sequence
  Description of Artificial Sequence: Synthetic oligonucleotide
  Target: LAMA2; (-) strand; PAM type: YTN; PAM sequence: TTT
cccatggagaaagcaaaata

SEQ ID NO: 279961 - DNA, 20 bp, Artificial Sequence
  Description of Artificial Sequence: Synthetic oligonucleotide
  Target: LAMA2; (-) strand; PAM type: YTN; PAM sequence: CTT
tcccatggagaaagcaaaat

SEQ ID NO: 279962 - DNA, 20 bp, Artificial Sequence
  Description of Artificial Sequence: Synthetic oligonucleotide
  Target: LAMA2; (-) strand; PAM type: YTN; PAM sequence: CTC
ccaagcatatctttcccatg

SEQ ID NO: 279963 - DNA, 20 bp, Artificial Sequence
  Description of Artificial Sequence: Synthetic oligonucleotide
  Target: LAMA2; (-) strand; PAM type: YTN; PAM sequence: CTG
catgaggctcccaagcatat

SEQ ID NO: 279964 - DNA, 20 bp, Artificial Sequence
  Description of Artificial Sequence: Synthetic oligonucleotide
  Target: LAMA2; (-) strand; PAM type: YTN; PAM sequence: CTC
ccaccaagactgcatgaggc

SEQ ID NO: 279965 - DNA, 20 bp, Artificial Sequence
  Description of Artificial Sequence: Synthetic oligonucleotide
  Target: LAMA2; (-) strand; PAM type: YTN; PAM sequence: TTA
cataactcccaccaagactg

SEQ ID NO: 279966 - DNA, 20 bp, Artificial Sequence
  Description of Artificial Sequence: Synthetic oligonucleotide
  Target: LAMA2; (-) strand; PAM type: YTN; PAM sequence: CTG
gcccagtggttacataactc

SEQ ID NO: 279967 - DNA, 20 bp, Artificial Sequence
  Description of Artificial Sequence: Synthetic oligonucleotide
  Target: LAMA2; (-) strand; PAM type: YTN; PAM sequence: CTG
acatatctggcccagtggtt

SEQ ID NO: 279968 - DNA, 20 bp, Artificial Sequence
  Description of Artificial Sequence: Synthetic oligonucleotide
  Target: LAMA2; (-) strand; PAM type: YTN; PAM sequence: CTG
tgtgccctgacatatctggc

SEQ ID NO: 279969 - DNA, 20 bp, Artificial Sequence
  Description of Artificial Sequence: Synthetic oligonucleotide
  Target: LAMA2; (-) strand; PAM type: YTN; PAM sequence: CTC
accatgctgtgtgccctgac

SEQ ID NO: 279970 - DNA, 20 bp, Artificial Sequence
  Description of Artificial Sequence: Synthetic oligonucleotide
  Target: LAMA2; (-) strand; PAM type: YTN; PAM sequence: CTG
gccagggaatggctcaccat

SEQ ID NO: 279971 - DNA, 20 bp, Artificial Sequence
  Description of Artificial Sequence: Synthetic oligonucleotide
  Target: LAMA2; (-) strand; PAM type: YTN; PAM sequence: CTG
ggcgatggaactggccaggg

SEQ ID NO: 279972 - DNA, 20 bp, Artificial Sequence
  Description of Artificial Sequence: Synthetic oligonucleotide
  Target: LAMA2; (-) strand; PAM type: YTN; PAM sequence: CTC
tgggcgatggaactggccag

SEQ ID NO: 279973 - DNA, 20 bp, Artificial Sequence
  Description of Artificial Sequence: Synthetic oligonucleotide
  Target: LAMA2; (-) strand; PAM type: YTN; PAM sequence: CTG
gctctgggcgatggaactgg

SEQ ID NO: 279974 - DNA, 20 bp, Artificial Sequence
  Description of Artificial Sequence: Synthetic oligonucleotide
  Target: LAMA2; (-) strand; PAM type: YTN; PAM sequence: CTG
tgtagggcccaaagggtctg

SEQ ID NO: 279975 - DNA, 20 bp, Artificial Sequence
  Description of Artificial Sequence: Synthetic oligonucleotide
  Target: LAMA2; (-) strand; PAM type: YTN; PAM sequence: CTG
tgcagtctgtgtagggccca

SEQ ID NO: 279976 - DNA, 20 bp, Artificial Sequence
  Description of Artificial Sequence: Synthetic oligonucleotide
  Target: LAMA2; (-) strand; PAM type: YTN; PAM sequence: CTG
gggctgtgcagtctgtgtag

SEQ ID NO: 279977 - DNA, 20 bp, Artificial Sequence
  Description of Artificial Sequence: Synthetic oligonucleotide
  Target: LAMA2; (-) strand; PAM type: YTN; PAM sequence: TTA
tacaagcccccacatgctgg

SEQ ID NO: 279978 - DNA, 20 bp, Artificial Sequence
  Description of Artificial Sequence: Synthetic oligonucleotide
  Target: LAMA2; (-) strand; PAM type: YTN; PAM sequence: CTT
atacaagcccccacatgctg

SEQ ID NO: 279979 - DNA, 20 bp, Artificial Sequence
  Description of Artificial Sequence: Synthetic oligonucleotide
  Target: LAMA2; (-) strand; PAM type: YTN; PAM sequence: TTC
ccttatacaagcccccacat

SEQ ID NO: 279980 - DNA, 20 bp, Artificial Sequence
  Description of Artificial Sequence: Synthetic oligonucleotide
  Target: LAMA2; (-) strand; PAM type: YTN; PAM sequence: CTT
cccttatacaagcccccaca

SEQ ID NO: 279981 - DNA, 20 bp, Artificial Sequence
  Description of Artificial Sequence: Synthetic oligonucleotide
  Target: LAMA2; (-) strand; PAM type: YTN; PAM sequence: CTG
tgacatcagaacttccctta

SEQ ID NO: 279982 - DNA, 20 bp, Artificial Sequence
  Description of Artificial Sequence: Synthetic oligonucleotide
  Target: LAMA2; (-) strand; PAM type: YTN; PAM sequence: CTG
gtgaagaaacaccccaagga

SEQ ID NO: 279983 - DNA, 20 bp, Artificial Sequence
  Description of Artificial Sequence: Synthetic oligonucleotide
  Target: LAMA2; (-) strand; PAM type: YTN; PAM sequence: TTC
cagctggtgaagaaacaccc

SEQ ID NO: 279984 - DNA, 20 bp, Artificial Sequence
  Description of Artificial Sequence: Synthetic oligonucleotide
  Target: LAMA2; (-) strand; PAM type: YTN; PAM sequence: TTT
ccagctggtgaagaaacacc

SEQ ID NO: 279985 - DNA, 20 bp, Artificial Sequence
  Description of Artificial Sequence: Synthetic oligonucleotide
  Target: LAMA2; (-) strand; PAM type: YTN; PAM sequence: CTG
gccacagaggtttccagctg

SEQ ID NO: 279986 - DNA, 20 bp, Artificial Sequence
  Description of Artificial Sequence: Synthetic oligonucleotide
  Target: LAMA2; (-) strand; PAM type: YTN; PAM sequence: CTC
aggcaaaggtgccactggcc

SEQ ID NO: 279987 - DNA, 20 bp, Artificial Sequence
  Description of Artificial Sequence: Synthetic oligonucleotide
  Target: LAMA2; (-) strand; PAM type: YTN; PAM sequence: CTC
agcaaaactcaggcaaaggt

SEQ ID NO: 279988 - DNA, 20 bp, Artificial Sequence
  Description of Artificial Sequence: Synthetic oligonucleotide
  Target: LAMA2; (-) strand; PAM type: YTN; PAM sequence: CTG
agtgggcggaatgtgcccag

SEQ ID NO: 279989 - DNA, 20 bp, Artificial Sequence
  Description of Artificial Sequence: Synthetic oligonucleotide
  Target: LAMA2; (-) strand; PAM type: YTN; PAM sequence: CTG
ccaggctgagtgggcggaat

SEQ ID NO: 279990 - DNA, 20 bp, Artificial Sequence
  Description of Artificial Sequence: Synthetic oligonucleotide
  Target: LAMA2; (-) strand; PAM type: YTN; PAM sequence: TTG
gcaggtgtgggatccagccc

SEQ ID NO: 279991 - DNA, 20 bp, Artificial Sequence
  Description of Artificial Sequence: Synthetic oligonucleotide
  Target: LAMA2; (-) strand; PAM type: YTN; PAM sequence: CTT
ggcaggtgtgggatccagcc

SEQ ID NO: 279992 - DNA, 20 bp, Artificial Sequence
  Description of Artificial Sequence: Synthetic oligonucleotide
  Target: LAMA2; (-) strand; PAM type: YTN; PAM sequence: CTG
aatcacccttggcaggtgtg

SEQ ID NO: 279993 - DNA, 20 bp, Artificial Sequence
  Description of Artificial Sequence: Synthetic oligonucleotide
  Target: LAMA2; (-) strand; PAM type: YTN; PAM sequence: CTG
ccctgaatcacccttggcag

SEQ ID NO: 279994 - DNA, 20 bp, Artificial Sequence
  Description of Artificial Sequence: Synthetic oligonucleotide
  Target: LAMA2; (-) strand; PAM type: YTN; PAM sequence: CTC
tgccctgaatcacccttggc

SEQ ID NO: 279995 - DNA, 20 bp, Artificial Sequence
  Description of Artificial Sequence: Synthetic oligonucleotide
  Target: LAMA2; (-) strand; PAM type: YTN; PAM sequence: CTC
gccactctgccctgaatcac

SEQ ID NO: 279996 - DNA, 20 bp, Artificial Sequence
  Description of Artificial Sequence: Synthetic oligonucleotide
  Target: LAMA2; (-) strand; PAM type: YTN; PAM sequence: CTC
acacacccctcgccactctg

SEQ ID NO: 279997 - DNA, 20 bp, Artificial Sequence
  Description of Artificial Sequence: Synthetic oligonucleotide
  Target: LAMA2; (-) strand; PAM type: YTN; PAM sequence: CTC
actcacacacccctcgccac

SEQ ID NO: 279998 - DNA, 20 bp, Artificial Sequence
  Description of Artificial Sequence: Synthetic oligonucleotide
  Target: LAMA2; (-) strand; PAM type: YTN; PAM sequence: CTG
gagcccacgctcactcacac

SEQ ID NO: 279999 - DNA, 20 bp, Artificial Sequence
  Description of Artificial Sequence: Synthetic oligonucleotide
  Target: LAMA2; (-) strand; PAM type: YTN; PAM sequence: CTG
tgcacagtggctggagccca

SEQ ID NO: 280000 - DNA, 20 bp, Artificial Sequence
  Description of Artificial Sequence: Synthetic oligonucleotide
  Target: LAMA2; (-) strand; PAM type: YTN; PAM sequence: TTA
gctgtgcacagtggctggag

SEQ ID NO: 280001 - DNA, 20 bp, Artificial Sequence
  Description of Artificial Sequence: Synthetic oligonucleotide
  Target: LAMA2; (-) strand; PAM type: YTN; PAM sequence: CTT
agctgtgcacagtggctgga

SEQ ID NO: 280002 - DNA, 20 bp, Artificial Sequence
  Description of Artificial Sequence: Synthetic oligonucleotide
  Target: LAMA2; (-) strand; PAM type: YTN; PAM sequence: CTG
gcacgcttagctgtgcacag

SEQ ID NO: 280003 - DNA, 20 bp, Artificial Sequence
  Description of Artificial Sequence: Synthetic oligonucleotide
  Target: LAMA2; (-) strand; PAM type: YTN; PAM sequence: CTG
cagctggcacgcttagctgt

SEQ ID NO: 280004 - DNA, 20 bp, Artificial Sequence
  Description of Artificial Sequence: Synthetic oligonucleotide
  Target: LAMA2; (-) strand; PAM type: YTN; PAM sequence: CTG
cccagcccactgcagctggc

SEQ ID NO: 280005 - DNA, 20 bp, Artificial Sequence
  Description of Artificial Sequence: Synthetic oligonucleotide
  Target: LAMA2; (-) strand; PAM type: YTN; PAM sequence: CTG
gagctgcccagcccactgca

SEQ ID NO: 280006 - DNA, 20 bp, Artificial Sequence
  Description of Artificial Sequence: Synthetic oligonucleotide
  Target: LAMA2; (-) strand; PAM type: YTN; PAM sequence: CTC
acatagagccaggacctgga

SEQ ID NO: 280007 - DNA, 20 bp, Artificial Sequence
  Description of Artificial Sequence: Synthetic oligonucleotide
  Target: LAMA2; (-) strand; PAM type: YTN; PAM sequence: TTC
agccacagcctcacatagag

SEQ ID NO: 280008 - DNA, 20 bp, Artificial Sequence
  Description of Artificial Sequence: Synthetic oligonucleotide
  Target: LAMA2; (-) strand; PAM type: YTN; PAM sequence: CTG
gttcagccacagcctcacat

SEQ ID NO: 280009 - DNA, 20 bp, Artificial Sequence
  Description of Artificial Sequence: Synthetic oligonucleotide
  Target: LAMA2; (-) strand; PAM type: YTN; PAM sequence: TTG
tagtatgtctggttcagcca

SEQ ID NO: 280010 - DNA, 20 bp, Artificial Sequence
  Description of Artificial Sequence: Synthetic oligonucleotide
  Target: LAMA2; (-) strand; PAM type: YTN; PAM sequence: CTG
gtaccagtggtggaagccaa

SEQ ID NO: 280011 - DNA, 20 bp, Artificial Sequence
  Description of Artificial Sequence: Synthetic oligonucleotide
  Target: LAMA2; (-) strand; PAM type: YTN; PAM sequence: TTC
cctggtaccagtggtggaag

SEQ ID NO: 280012 - DNA, 20 bp, Artificial Sequence
  Description of Artificial Sequence: Synthetic oligonucleotide
  Target: LAMA2; (-) strand; PAM type: YTN; PAM sequence: CTG
ggtgccaccgcattccctgg

SEQ ID NO: 280013 - DNA, 20 bp, Artificial Sequence
  Description of Artificial Sequence: Synthetic oligonucleotide
  Target: LAMA2; (-) strand; PAM type: YTN; PAM sequence: CTC
ctgggtgccaccgcattccc

SEQ ID NO: 280014 - DNA, 20 bp, Artificial Sequence
  Description of Artificial Sequence: Synthetic oligonucleotide
  Target: LAMA2; (-) strand; PAM type: YTN; PAM sequence: CTC
caagctcctgggtgccaccg

SEQ ID NO: 280015 - DNA, 20 bp, Artificial Sequence
  Description of Artificial Sequence: Synthetic oligonucleotide
  Target: LAMA2; (-) strand; PAM type: YTN; PAM sequence: CTG
gcatctccaagctcctgggt

SEQ ID NO: 280016 - DNA, 20 bp, Artificial Sequence
  Description of Artificial Sequence: Synthetic oligonucleotide
  Target: LAMA2; (-) strand; PAM type: YTN; PAM sequence: TTC
ctggcatctccaagctcctg

SEQ ID NO: 280017 - DNA, 20 bp, Artificial Sequence
  Description of Artificial Sequence: Synthetic oligonucleotide
  Target: LAMA2; (-) strand; PAM type: YTN; PAM sequence: CTG
tggttcctggcatctccaag

SEQ ID NO: 280018 - DNA, 20 bp, Artificial Sequence
  Description of Artificial Sequence: Synthetic oligonucleotide
  Target: LAMA2; (-) strand; PAM type: YTN; PAM sequence: CTC
tgtggttcctggcatctcca

SEQ ID NO: 280019 - DNA, 20 bp, Artificial Sequence
  Description of Artificial Sequence: Synthetic oligonucleotide
  Target: LAMA2; (-) strand; PAM type: YTN; PAM sequence: TTC
agactctgtggttcctggca

SEQ ID NO: 280020 - DNA, 20 bp, Artificial Sequence
  Description of Artificial Sequence: Synthetic oligonucleotide
  Target: LAMA2; (-) strand; PAM type: YTN; PAM sequence: TTT
cagactctgtggttcctggc

SEQ ID NO: 280021 - DNA, 20 bp, Artificial Sequence
  Description of Artificial Sequence: Synthetic oligonucleotide
  Target: LAMA2; (-) strand; PAM type: YTN; PAM sequence: CTT
tcagactctgtggttcctgg

SEQ ID NO: 280022 - DNA, 20 bp, Artificial Sequence
  Description of Artificial Sequence: Synthetic oligonucleotide
  Target: LAMA2; (-) strand; PAM type: YTN; PAM sequence: CTC
tttcagactctgtggttcct

SEQ ID NO: 280023 - DNA, 20 bp, Artificial Sequence
  Description of Artificial Sequence: Synthetic oligonucleotide
  Target: LAMA2; (-) strand; PAM type: YTN; PAM sequence: CTG
tgagaccctctttcagactc

SEQ ID NO: 280024 - DNA, 20 bp, Artificial Sequence
  Description of Artificial Sequence: Synthetic oligonucleotide
  Target: LAMA2; (-) strand; PAM type: YTN; PAM sequence: CTG
agccagggctgtgagaccct

SEQ ID NO: 280025 - DNA, 20 bp, Artificial Sequence
  Description of Artificial Sequence: Synthetic oligonucleotide
  Target: LAMA2; (-) strand; PAM type: YTN; PAM sequence: CTC
cctgagccagggctgtgaga

SEQ ID NO: 280026 - DNA, 20 bp, Artificial Sequence
  Description of Artificial Sequence: Synthetic oligonucleotide
  Target: LAMA2; (-) strand; PAM type: YTN; PAM sequence: CTA
tggactccctgagccagggc

SEQ ID NO: 280027 - DNA, 20 bp, Artificial Sequence
  Description of Artificial Sequence: Synthetic oligonucleotide
  Target: LAMA2; (-) strand; PAM type: YTN; PAM sequence: CTG
agacctatggactccctgag

SEQ ID NO: 280028 - DNA, 20 bp, Artificial Sequence
  Description of Artificial Sequence: Synthetic oligonucleotide
  Target: LAMA2; (-) strand; PAM type: YTN; PAM sequence: TTG
gggagctgagacctatggac

SEQ ID NO: 280029 - DNA, 20 bp, Artificial Sequence
  Description of Artificial Sequence: Synthetic oligonucleotide
  Target: LAMA2; (-) strand; PAM type: YTN; PAM sequence: TTT
ggggagctgagacctatgga

SEQ ID NO: 280030 - DNA, 20 bp, Artificial Sequence
  Description of Artificial Sequence: Synthetic oligonucleotide
  Target: LAMA2; (-) strand; PAM type: YTN; PAM sequence: TTT
tggggagctgagacctatgg

SEQ ID NO: 280031 - DNA, 20 bp, Artificial Sequence
  Description of Artificial Sequence: Synthetic oligonucleotide
  Target: LAMA2; (-) strand; PAM type: YTN; PAM sequence: CTT
ttggggagctgagacctatg

SEQ ID NO: 280032 - DNA, 20 bp, Artificial Sequence
  Description of Artificial Sequence: Synthetic oligonucleotide
  Target: LAMA2; (-) strand; PAM type: YTN; PAM sequence: CTG
tggccttttggggagctgag

SEQ ID NO: 280033 - DNA, 20 bp, Artificial Sequence
  Description of Artificial Sequence: Synthetic oligonucleotide
  Target: LAMA2; (-) strand; PAM type: YTN; PAM sequence: TTG
acagcaatgagcaggagaga

SEQ ID NO: 280034 - DNA, 20 bp, Artificial Sequence
  Description of Artificial Sequence: Synthetic oligonucleotide
  Target: LAMA2; (-) strand; PAM type: YTN; PAM sequence: CTC
accatgttgacagcaatgag

SEQ ID NO: 280035 - DNA, 20 bp, Artificial Sequence
  Description of Artificial Sequence: Synthetic oligonucleotide
  Target: LAMA2; (-) strand; PAM type: YTN; PAM sequence: TTC
cccagctcaccatgttgaca

SEQ ID NO: 280036 - DNA, 20 bp, Artificial Sequence
  Description of Artificial Sequence: Synthetic oligonucleotide
  Target: LAMA2; (-) strand; PAM type: YTN; PAM sequence: CTT
ccccagctcaccatgttgac

SEQ ID NO: 280037 - DNA, 20 bp, Artificial Sequence
  Description of Artificial Sequence: Synthetic oligonucleotide
  Target: LAMA2; (-) strand; PAM type: YTN; PAM sequence: TTG
aaacacacccccttccccag

SEQ ID NO: 280038 - DNA, 20 bp, Artificial Sequence
  Description of Artificial Sequence: Synthetic oligonucleotide
  Target: LAMA2; (-) strand; PAM type: YTN; PAM sequence: CTA
caacacaaacagggttgaaa

SEQ ID NO: 280039 - DNA, 20 bp, Artificial Sequence
  Description of Artificial Sequence: Synthetic oligonucleotide
  Target: LAMA2; (-) strand; PAM type: YTN; PAM sequence: TTG
ggacccccccgcaaatggtg

SEQ ID NO: 280040 - DNA, 20 bp, Artificial Sequence
  Description of Artificial Sequence: Synthetic oligonucleotide
  Target: LAMA2; (-) strand; PAM type: YTN; PAM sequence: CTT
gggacccccccgcaaatggt

SEQ ID NO: 280041 - DNA, 20 bp, Artificial Sequence
  Description of Artificial Sequence: Synthetic oligonucleotide
  Target: LAMA2; (-) strand; PAM type: YTN; PAM sequence: TTC
caggatgtgggacaagaact

SEQ ID NO: 280042 - DNA, 20 bp, Artificial Sequence
  Description of Artificial Sequence: Synthetic oligonucleotide
  Target: LAMA2; (-) strand; PAM type: YTN; PAM sequence: CTT
ccaggatgtgggacaagaac

SEQ ID NO: 280043 - DNA, 20 bp, Artificial Sequence
  Description of Artificial Sequence: Synthetic oligonucleotide
  Target: LAMA2; (-) strand; PAM type: YTN; PAM sequence: TTC
ttccaggatgtgggacaaga

SEQ ID NO: 280044 - DNA, 20 bp, Artificial Sequence
  Description of Artificial Sequence: Synthetic oligonucleotide
  Target: LAMA2; (-) strand; PAM type: YTN; PAM sequence: CTC
attcttccaggatgtgggac

SEQ ID NO: 280045 - DNA, 20 bp, Artificial Sequence
  Description of Artificial Sequence: Synthetic oligonucleotide
  Target: LAMA2; (-) strand; PAM type: YTN; PAM sequence: CTG
caaacctcattcttccagga

SEQ ID NO: 280046 - DNA, 20 bp, Artificial Sequence
  Description of Artificial Sequence: Synthetic oligonucleotide
  Target: LAMA2; (-) strand; PAM type: YTN; PAM sequence: TTG
tctgcaaacctcattcttcc

SEQ ID NO: 280047 - DNA, 20 bp, Artificial Sequence
  Description of Artificial Sequence: Synthetic oligonucleotide
  Target: LAMA2; (-) strand; PAM type: YTN; PAM sequence: CTC
cagttgtctgcaaacctcat

SEQ ID NO: 280048 - DNA, 20 bp, Artificial Sequence
  Description of Artificial Sequence: Synthetic oligonucleotide
  Target: LAMA2; (-) strand; PAM type: YTN; PAM sequence: CTA
accctccagttgtctgcaaa

SEQ ID NO: 280049 - DNA, 20 bp, Artificial Sequence
  Description of Artificial Sequence: Synthetic oligonucleotide
  Target: LAMA2; (-) strand; PAM type: YTN; PAM sequence: TTG
ctaaccctccagttgtctgc

SEQ ID NO: 280050 - DNA, 20 bp, Artificial Sequence
  Description of Artificial Sequence: Synthetic oligonucleotide
  Target: LAMA2; (-) strand; PAM type: YTN; PAM sequence: CTT
gctaaccctccagttgtctg

SEQ ID NO: 280051 - DNA, 20 bp, Artificial Sequence
  Description of Artificial Sequence: Synthetic oligonucleotide
  Target: LAMA2; (-) strand; PAM type: YTN; PAM sequence: TTC
accttgctaaccctccagtt

SEQ ID NO: 280052 - DNA, 20 bp, Artificial Sequence
  Description of Artificial Sequence: Synthetic oligonucleotide
  Target: LAMA2; (-) strand; PAM type: YTN; PAM sequence: CTT
caccttgctaaccctccagt

SEQ ID NO: 280053 - DNA, 20 bp, Artificial Sequence
  Description of Artificial Sequence: Synthetic oligonucleotide
  Target: LAMA2; (-) strand; PAM type: YTN; PAM sequence: CTC
ttcaccttgctaaccctcca

SEQ ID NO: 280054 - DNA, 20 bp, Artificial Sequence
  Description of Artificial Sequence: Synthetic oligonucleotide
  Target: LAMA2; (-) strand; PAM type: YTN; PAM sequence: CTC
aataaagcacctcttcacct

SEQ ID NO: 280055 - DNA, 20 bp, Artificial Sequence
  Description of Artificial Sequence: Synthetic oligonucleotide
  Target: LAMA2; (-) strand; PAM type: YTN; PAM sequence: CTG
tcactcaataaagcacctct

SEQ ID NO: 280056 - DNA, 20 bp, Artificial Sequence
  Description of Artificial Sequence: Synthetic oligonucleotide
  Target: LAMA2; (-) strand; PAM type: YTN; PAM sequence: TTG
cactgtcactcaataaagca

SEQ ID NO: 280057 - DNA, 20 bp, Artificial Sequence
  Description of Artificial Sequence: Synthetic oligonucleotide
  Target: LAMA2; (-) strand; PAM type: YTN; PAM sequence: CTG
agagttgcactgtcactcaa

SEQ ID NO: 280058 - DNA, 20 bp, Artificial Sequence
  Description of Artificial Sequence: Synthetic oligonucleotide
  Target: LAMA2; (-) strand; PAM type: YTN; PAM sequence: CTC
ctgagagttgcactgtcact

SEQ ID NO: 280059 - DNA, 20 bp, Artificial Sequence
  Description of Artificial Sequence: Synthetic oligonucleotide
  Target: LAMA2; (-) strand; PAM type: YTN; PAM sequence: TTC
aggcctcctgagagttgcac

SEQ ID NO: 280060 - DNA, 20 bp, Artificial Sequence
  Description of Artificial Sequence: Synthetic oligonucleotide
  Target: LAMA2; (-) strand; PAM type: YTN; PAM sequence: TTT
caggcctcctgagagttgca

SEQ ID NO: 280061 - DNA, 20 bp, Artificial Sequence
  Description of Artificial Sequence: Synthetic oligonucleotide
  Target: LAMA2; (-) strand; PAM type: YTN; PAM sequence: CTA
cccatttcaggcctcctgag

SEQ ID NO: 280062 - DNA, 20 bp, Artificial Sequence
  Description of Artificial Sequence: Synthetic oligonucleotide
  Target: LAMA2; (-) strand; PAM type: YTN; PAM sequence: CTG
tggaacggagctacccattt

SEQ ID NO: 280063 - DNA, 20 bp, Artificial Sequence
  Description of Artificial Sequence: Synthetic oligonucleotide
  Target: LAMA2; (-) strand; PAM type: YTN; PAM sequence: CTG
cctgtggaacggagctaccc

SEQ ID NO: 280064 - DNA, 20 bp, Artificial Sequence
  Description of Artificial Sequence: Synthetic oligonucleotide
  Target: LAMA2; (-) strand; PAM type: YTN; PAM sequence: TTA
cctgcctgtggaacggagct

SEQ ID NO: 280065 - DNA, 20 bp, Artificial Sequence
  Description of Artificial Sequence: Synthetic oligonucleotide
  Target: LAMA2; (-) strand; PAM type: YTN; PAM sequence: CTG
gaattacctgcctgtggaac

SEQ ID NO: 280066 - DNA, 20 bp, Artificial Sequence
  Description of Artificial Sequence: Synthetic oligonucleotide
  Target: LAMA2; (-) strand; PAM type: YTN; PAM sequence: CTG
cacagatgctggaattacct

SEQ ID NO: 280067 - DNA, 20 bp, Artificial Sequence
  Description of Artificial Sequence: Synthetic oligonucleotide
  Target: LAMA2; (-) strand; PAM type: YTN; PAM sequence: TTG
agggtgctgcacagatgctg

SEQ ID NO: 280068 - DNA, 20 bp, Artificial Sequence
  Description of Artificial Sequence: Synthetic oligonucleotide
  Target: LAMA2; (-) strand; PAM type: YTN; PAM sequence: CTG
ttgagggtgctgcacagatg

SEQ ID NO: 280069 - DNA, 20 bp, Artificial Sequence
  Description of Artificial Sequence: Synthetic oligonucleotide
  Target: LAMA2; (-) strand; PAM type: YTN; PAM sequence: CTC
tgttgagggtgctgcacaga

SEQ ID NO: 280070 - DNA, 20 bp, Artificial Sequence
  Description of Artificial Sequence: Synthetic oligonucleotide
  Target: LAMA2; (-) strand; PAM type: YTN; PAM sequence: CTC
acctctgttgagggtgctgc

SEQ ID NO: 280071 - DNA, 20 bp, Artificial Sequence
  Description of Artificial Sequence: Synthetic oligonucleotide
  Target: LAMA2; (-) strand; PAM type: YTN; PAM sequence: CTG
tgtgtctcacctctgttgag

SEQ ID NO: 280072 - DNA, 20 bp, Artificial Sequence
  Description of Artificial Sequence: Synthetic oligonucleotide
  Target: LAMA2; (-) strand; PAM type: YTN; PAM sequence: CTA
cccactgtgtgtctcacctc

SEQ ID NO: 280073 - DNA, 20 bp, Artificial Sequence
  Description of Artificial Sequence: Synthetic oligonucleotide
  Target: LAMA2; (-) strand; PAM type: YTN; PAM sequence: CTG
tggataggagctacccactg

SEQ ID NO: 280074 - DNA, 20 bp, Artificial Sequence
  Description of Artificial Sequence: Synthetic oligonucleotide
  Target: LAMA2; (-) strand; PAM type: YTN; PAM sequence: CTA
cctgtggataggagctaccc

SEQ ID NO: 280075 - DNA, 20 bp, Artificial Sequence
  Description of Artificial Sequence: Synthetic oligonucleotide
  Target: LAMA2; (-) strand; PAM type: YTN; PAM sequence: CTC
agccagacgtgggcagacaa

SEQ ID NO: 280076 - DNA, 20 bp, Artificial Sequence
  Description of Artificial Sequence: Synthetic oligonucleotide
  Target: LAMA2; (-) strand; PAM type: YTN; PAM sequence: CTG
aggcccataaaaaaccccgg

SEQ ID NO: 280077 - DNA, 20 bp, Artificial Sequence
  Description of Artificial Sequence: Synthetic oligonucleotide
  Target: LAMA2; (-) strand; PAM type: YTN; PAM sequence: CTC
tgaggcccataaaaaacccc

SEQ ID NO: 280078 - DNA, 20 bp, Artificial Sequence
  Description of Artificial Sequence: Synthetic oligonucleotide
  Target: LAMA2; (-) strand; PAM type: YTN; PAM sequence: CTC
ccctctgaggcccataaaaa

SEQ ID NO: 280079 - DNA, 20 bp, Artificial Sequence
  Description of Artificial Sequence: Synthetic oligonucleotide
  Target: LAMA2; (-) strand; PAM type: YTN; PAM sequence: TTC
ctcccctctgaggcccataa

SEQ ID NO: 280080 - DNA, 20 bp, Artificial Sequence
  Description of Artificial Sequence: Synthetic oligonucleotide
  Target: LAMA2; (-) strand; PAM type: YTN; PAM sequence: CTT
cctcccctctgaggcccata

SEQ ID NO: 280081 - DNA, 20 bp, Artificial Sequence
  Description of Artificial Sequence: Synthetic oligonucleotide
  Target: LAMA2; (-) strand; PAM type: YTN; PAM sequence: CTC
atggccacccatggaccaat

SEQ ID NO: 280082 - DNA, 20 bp, Artificial Sequence
  Description of Artificial Sequence: Synthetic oligonucleotide
  Target: LAMA2; (-) strand; PAM type: YTN; PAM sequence: TTG
ggccagctcatggccaccca

SEQ ID NO: 280083 - DNA, 20 bp, Artificial Sequence
  Description of Artificial Sequence: Synthetic oligonucleotide
  Target: LAMA2; (-) strand; PAM type: YTN; PAM sequence: TTT
gggccagctcatggccaccc

SEQ ID NO: 280084 - DNA, 20 bp, Artificial Sequence
  Description of Artificial Sequence: Synthetic oligonucleotide
  Target: LAMA2; (-) strand; PAM type: YTN; PAM sequence: TTT
tgggccagctcatggccacc

SEQ ID NO: 280085 - DNA, 20 bp, Artificial Sequence
  Description of Artificial Sequence: Synthetic oligonucleotide
  Target: LAMA2; (-) strand; PAM type: YTN; PAM sequence: TTT
ttgggccagctcatggccac

SEQ ID NO: 280086 - DNA, 20 bp, Artificial Sequence
  Description of Artificial Sequence: Synthetic oligonucleotide
  Target: LAMA2; (-) strand; PAM type: YTN; PAM sequence: TTT
tttgggccagctcatggcca

SEQ ID NO: 280087 - DNA, 20 bp, Artificial Sequence
  Description of Artificial Sequence: Synthetic oligonucleotide
  Target: LAMA2; (-) strand; PAM type: YTN; PAM sequence: TTT
ttttgggccagctcatggcc

SEQ ID NO: 280088 - DNA, 20 bp, Artificial Sequence
  Description of Artificial Sequence: Synthetic oligonucleotide
  Target: LAMA2; (-) strand; PAM type: YTN; PAM sequence: CTT
tttttgggccagctcatggc

SEQ ID NO: 280089 - DNA, 20 bp, Artificial Sequence
  Description of Artificial Sequence: Synthetic oligonucleotide
  Target: LAMA2; (-) strand; PAM type: YTN; PAM sequence: TTA
tggtgctttttttgggccag

SEQ ID NO: 280090 - DNA, 20 bp, Artificial Sequence
  Description of Artificial Sequence: Synthetic oligonucleotide
  Target: LAMA2; (-) strand; PAM type: YTN; PAM sequence: CTT
atggtgctttttttgggcca

SEQ ID NO: 280091 - DNA, 20 bp, Artificial Sequence
  Description of Artificial Sequence: Synthetic oligonucleotide
  Target: LAMA2; (-) strand; PAM type: YTN; PAM sequence: CTG
gagtgagaacttatggtgct

SEQ ID NO: 280092 - DNA, 20 bp, Artificial Sequence
  Description of Artificial Sequence: Synthetic oligonucleotide
  Target: LAMA2; (-) strand; PAM type: YTN; PAM sequence: TTC
cacaaactggagtgagaact

SEQ ID NO: 280093 - DNA, 20 bp, Artificial Sequence
  Description of Artificial Sequence: Synthetic oligonucleotide
  Target: LAMA2; (-) strand; PAM type: YTN; PAM sequence: CTG
tcggttccacaaactggagt

SEQ ID NO: 280094 - DNA, 20 bp, Artificial Sequence
  Description of Artificial Sequence: Synthetic oligonucleotide
  Target: LAMA2; (-) strand; PAM type: YTN; PAM sequence: CTG
gactgtcggttccacaaact

SEQ ID NO: 280095 - DNA, 20 bp, Artificial Sequence
  Description of Artificial Sequence: Synthetic oligonucleotide
  Target: LAMA2; (-) strand; PAM type: YTN; PAM sequence: CTG
aaggaagggggctggactgt

SEQ ID NO: 280096 - DNA, 20 bp, Artificial Sequence
  Description of Artificial Sequence: Synthetic oligonucleotide
  Target: LAMA2; (-) strand; PAM type: YTN; PAM sequence: CTG
cctgaaggaagggggctgga

SEQ ID NO: 280097 - DNA, 20 bp, Artificial Sequence
  Description of Artificial Sequence: Synthetic oligonucleotide
  Target: LAMA2; (-) strand; PAM type: YTN; PAM sequence: TTC
aagccagggactgcctgaag

SEQ ID NO: 280098 - DNA, 20 bp, Artificial Sequence
  Description of Artificial Sequence: Synthetic oligonucleotide
  Target: LAMA2; (-) strand; PAM type: YTN; PAM sequence: CTT
caagccagggactgcctgaa

SEQ ID NO: 280099 - DNA, 20 bp, Artificial Sequence
  Description of Artificial Sequence: Synthetic oligonucleotide
  Target: LAMA2; (-) strand; PAM type: YTN; PAM sequence: CTC
caccttcaagccagggactg

SEQ ID NO: 280100 - DNA, 20 bp, Artificial Sequence
  Description of Artificial Sequence: Synthetic oligonucleotide
  Target: LAMA2; (-) strand; PAM type: YTN; PAM sequence: CTC
agtgaagctccaccttcaag

SEQ ID NO: 280101 - DNA, 20 bp, Artificial Sequence
  Description of Artificial Sequence: Synthetic oligonucleotide
  Target: LAMA2; (-) strand; PAM type: YTN; PAM sequence: CTG
ggtggaaaggggtgggccct

SEQ ID NO: 280102 - DNA, 20 bp, Artificial Sequence
  Description of Artificial Sequence: Synthetic oligonucleotide
  Target: LAMA2; (-) strand; PAM type: YTN; PAM sequence: TTC
ctgggtggaaaggggtgggc

SEQ ID NO: 280103 - DNA, 20 bp, Artificial Sequence
  Description of Artificial Sequence: Synthetic oligonucleotide
  Target: LAMA2; (-) strand; PAM type: YTN; PAM sequence: TTG
gtggtggcaggaggcataca

SEQ ID NO: 280104 - DNA, 20 bp, Artificial Sequence
  Description of Artificial Sequence: Synthetic oligonucleotide
  Target: LAMA2; (-) strand; PAM type: YTN; PAM sequence: CTG
ggtgccagtgggcgccgtgg

SEQ ID NO: 280105 - DNA, 20 bp, Artificial Sequence
  Description of Artificial Sequence: Synthetic oligonucleotide
  Target: LAMA2; (-) strand; PAM type: YTN; PAM sequence: CTA
ggcatgaacagcctgggtgc

SEQ ID NO: 280106 - DNA, 20 bp, Artificial Sequence
  Description of Artificial Sequence: Synthetic oligonucleotide
  Target: LAMA2; (-) strand; PAM type: YTN; PAM sequence: CTG
aaggtgaccctaggcatgaa

SEQ ID NO: 280107 - DNA, 20 bp, Artificial Sequence
  Description of Artificial Sequence: Synthetic oligonucleotide
  Target: LAMA2; (-) strand; PAM type: YTN; PAM sequence: CTG
catgggcctgaaggtgaccc

SEQ ID NO: 280108 - DNA, 20 bp, Artificial Sequence
  Description of Artificial Sequence: Synthetic oligonucleotide
  Target: LAMA2; (-) strand; PAM type: YTN; PAM sequence: CTC
tgcatgggcctgaaggtgac

SEQ ID NO: 280109 - DNA, 20 bp, Artificial Sequence
  Description of Artificial Sequence: Synthetic oligonucleotide
  Target: LAMA2; (-) strand; PAM type: YTN; PAM sequence: TTG
agggtggctctgcatgggcc

SEQ ID NO: 280110 - DNA, 20 bp, Artificial Sequence
  Description of Artificial Sequence: Synthetic oligonucleotide
  Target: LAMA2; (-) strand; PAM type: YTN; PAM sequence: TTA
gggaggccaagggggagttg

SEQ ID NO: 280111 - DNA, 20 bp, Artificial Sequence
  Description of Artificial Sequence: Synthetic oligonucleotide
  Target: LAMA2; (-) strand; PAM type: YTN; PAM sequence: TTG
ggtgccaaggagcacattag

SEQ ID NO: 280112 - DNA, 20 bp, Artificial Sequence
  Description of Artificial Sequence: Synthetic oligonucleotide
  Target: LAMA2; (-) strand; PAM type: YTN; PAM sequence: TTT
gggtgccaaggagcacatta

SEQ ID NO: 280113 - DNA, 20 bp, Artificial Sequence
  Description of Artificial Sequence: Synthetic oligonucleotide
  Target: LAMA2; (-) strand; PAM type: YTN; PAM sequence: TTT
tgggtgccaaggagcacatt

SEQ ID NO: 280114 - DNA, 20 bp, Artificial Sequence
  Description of Artificial Sequence: Synthetic oligonucleotide
  Target: LAMA2; (-) strand; PAM type: YTN; PAM sequence: CTG
gattttgggtgccaaggagc

SEQ ID NO: 280115 - DNA, 20 bp, Artificial Sequence
  Description of Artificial Sequence: Synthetic oligonucleotide
  Target: LAMA2; (-) strand; PAM type: YTN; PAM sequence: TTC
tggattttgggtgccaagga

SEQ ID NO: 280116 - DNA, 20 bp, Artificial Sequence
  Description of Artificial Sequence: Synthetic oligonucleotide
  Target: LAMA2; (-) strand; PAM type: YTN; PAM sequence: CTT
ctggattttgggtgccaagg

SEQ ID NO: 280117 - DNA, 20 bp, Artificial Sequence
  Description of Artificial Sequence: Synthetic oligonucleotide
  Target: LAMA2; (-) strand; PAM type: YTN; PAM sequence: TTG
gccccttctggattttgggt

SEQ ID NO: 280118 - DNA, 20 bp, Artificial Sequence
  Description of Artificial Sequence: Synthetic oligonucleotide
  Target: LAMA2; (-) strand; PAM type: YTN; PAM sequence: CTT
ggccccttctggattttggg

SEQ ID NO: 280119 - DNA, 20 bp, Artificial Sequence
  Description of Artificial Sequence: Synthetic oligonucleotide
  Target: LAMA2; (-) strand; PAM type: YTN; PAM sequence: CTA
tcttggccccttctggattt

SEQ ID NO: 280120 - DNA, 20 bp, Artificial Sequence
  Description of Artificial Sequence: Synthetic oligonucleotide
  Target: LAMA2; (-) strand; PAM type: YTN; PAM sequence: CTA
ctatcttggccccttctgga

SEQ ID NO: 280121 - DNA, 20 bp, Artificial Sequence
  Description of Artificial Sequence: Synthetic oligonucleotide
  Target: LAMA2; (-) strand; PAM type: YTN; PAM sequence: CTA
gccccctactatcttggccc

SEQ ID NO: 280122 - DNA, 20 bp, Artificial Sequence
  Description of Artificial Sequence: Synthetic oligonucleotide
  Target: LAMA2; (-) strand; PAM type: YTN; PAM sequence: CTC
tagccccctactatcttggc

SEQ ID NO: 280123 - DNA, 20 bp, Artificial Sequence
  Description of Artificial Sequence: Synthetic oligonucleotide
  Target: LAMA2; (-) strand; PAM type: YTN; PAM sequence: CTG
acactctagccccctactat

SEQ ID NO: 280124 - DNA, 20 bp, Artificial Sequence
  Description of Artificial Sequence: Synthetic oligonucleotide
  Target: LAMA2; (-) strand; PAM type: YTN; PAM sequence: CTC
ggggcagcactgacactcta

SEQ ID NO: 280125 - DNA, 20 bp, Artificial Sequence
  Description of Artificial Sequence: Synthetic oligonucleotide
  Target: LAMA2; (-) strand; PAM type: YTN; PAM sequence: TTG
caacccagccaggtgtgcat

SEQ ID NO: 280126 - DNA, 20 bp, Artificial Sequence
  Description of Artificial Sequence: Synthetic oligonucleotide
  Target: LAMA2; (-) strand; PAM type: YTN; PAM sequence: CTG
ttgcaacccagccaggtgtg

SEQ ID NO: 280127 - DNA, 20 bp, Artificial Sequence
  Description of Artificial Sequence: Synthetic oligonucleotide
  Target: LAMA2; (-) strand; PAM type: YTN; PAM sequence: CTG
aggctgttgcaacccagcca

SEQ ID NO: 280128 - DNA, 20 bp, Artificial Sequence
  Description of Artificial Sequence: Synthetic oligonucleotide
  Target: LAMA2; (-) strand; PAM type: YTN; PAM sequence: TTC
agagcaaagctgaggctgtt

SEQ ID NO: 280129 - DNA, 20 bp, Artificial Sequence
  Description of Artificial Sequence: Synthetic oligonucleotide
  Target: LAMA2; (-) strand; PAM type: YTN; PAM sequence: TTT
cagagcaaagctgaggctgt

SEQ ID NO: 280130 - DNA, 20 bp, Artificial Sequence
  Description of Artificial Sequence: Synthetic oligonucleotide
  Target: LAMA2; (-) strand; PAM type: YTN; PAM sequence: CTG
atttcagagcaaagctgagg

SEQ ID NO: 280131 - DNA, 20 bp, Artificial Sequence
  Description of Artificial Sequence: Synthetic oligonucleotide
  Target: LAMA2; (-) strand; PAM type: YTN; PAM sequence: TTC
ccggcacccaggctgatttc

SEQ ID NO: 280132 - DNA, 20 bp, Artificial Sequence
  Description of Artificial Sequence: Synthetic oligonucleotide
  Target: LAMA2; (-) strand; PAM type: YTN; PAM sequence: CTG
ttcccggcacccaggctgat

SEQ ID NO: 280133 - DNA, 20 bp, Artificial Sequence
  Description of Artificial Sequence: Synthetic oligonucleotide
  Target: LAMA2; (-) strand; PAM type: YTN; PAM sequence: CTC
actgttcccggcacccaggc

SEQ ID NO: 280134 - DNA, 20 bp, Artificial Sequence
  Description of Artificial Sequence: Synthetic oligonucleotide
  Target: LAMA2; (-) strand; PAM type: YTN; PAM sequence: CTC
tcactgttcccggcacccag

SEQ ID NO: 280135 - DNA, 20 bp, Artificial Sequence
  Description of Artificial Sequence: Synthetic oligonucleotide
  Target: LAMA2; (-) strand; PAM type: YTN; PAM sequence: CTG
gtctctcactgttcccggca

SEQ ID NO: 280136 - DNA, 20 bp, Artificial Sequence
  Description of Artificial Sequence: Synthetic oligonucleotide
  Target: LAMA2; (-) strand; PAM type: YTN; PAM sequence: TTC
ctggtctctcactgttcccg

SEQ ID NO: 280137 - DNA, 20 bp, Artificial Sequence
  Description of Artificial Sequence: Synthetic oligonucleotide
  Target: LAMA2; (-) strand; PAM type: YTN; PAM sequence: CTT
cctggtctctcactgttccc

SEQ ID NO: 280138 - DNA, 20 bp, Artificial Sequence
  Description of Artificial Sequence: Synthetic oligonucleotide
  Target: LAMA2; (-) strand; PAM type: YTN; PAM sequence: TTC
ttcctggtctctcactgttc

SEQ ID NO: 280139 - DNA, 20 bp, Artificial Sequence
  Description of Artificial Sequence: Synthetic oligonucleotide
  Target: LAMA2; (-) strand; PAM type: YTN; PAM sequence: CTT
cttcctggtctctcactgtt

SEQ ID NO: 280140 - DNA, 20 bp, Artificial Sequence
  Description of Artificial Sequence: Synthetic oligonucleotide
  Target: LAMA2; (-) strand; PAM type: YTN; PAM sequence: CTC
cttcttcctggtctctcact

SEQ ID NO: 280141 - DNA, 20 bp, Artificial Sequence
  Description of Artificial Sequence: Synthetic oligonucleotide
  Target: LAMA2; (-) strand; PAM type: YTN; PAM sequence: CTC
agaagtgcccgctccttctt

SEQ ID NO: 280142 - DNA, 20 bp, Artificial Sequence
  Description of Artificial Sequence: Synthetic oligonucleotide
  Target: LAMA2; (-) strand; PAM type: YTN; PAM sequence: CTA
caggctcagaagtgcccgct

SEQ ID NO: 280143 - DNA, 20 bp, Artificial Sequence
  Description of Artificial Sequence: Synthetic oligonucleotide
  Target: LAMA2; (-) strand; PAM type: YTN; PAM sequence: TTC
ccctacaggctcagaagtgc

SEQ ID NO: 280144 - DNA, 20 bp, Artificial Sequence
  Description of Artificial Sequence: Synthetic oligonucleotide
  Target: LAMA2; (-) strand; PAM type: YTN; PAM sequence: CTT
cccctacaggctcagaagtg

SEQ ID NO: 280145 - DNA, 20 bp, Artificial Sequence
  Description of Artificial Sequence: Synthetic oligonucleotide
  Target: LAMA2; (-) strand; PAM type: YTN; PAM sequence: CTC
ttcccctacaggctcagaag

SEQ ID NO: 280146 - DNA, 20 bp, Artificial Sequence
  Description of Artificial Sequence: Synthetic oligonucleotide
  Target: LAMA2; (-) strand; PAM type: YTN; PAM sequence: CTC
tcttcccctacaggctcaga

SEQ ID NO: 280147 - DNA, 20 bp, Artificial Sequence
  Description of Artificial Sequence: Synthetic oligonucleotide
  Target: LAMA2; (-) strand; PAM type: YTN; PAM sequence: CTC
agccacctctcttcccctac

SEQ ID NO: 280148 - DNA, 20 bp, Artificial Sequence
  Description of Artificial Sequence: Synthetic oligonucleotide
  Target: LAMA2; (-) strand; PAM type: YTN; PAM sequence: CTG
tgccctcagccacctctctt

SEQ ID NO: 280149 - DNA, 20 bp, Artificial Sequence
  Description of Artificial Sequence: Synthetic oligonucleotide
  Target: LAMA2; (-) strand; PAM type: YTN; PAM sequence: CTG
tggacccaggcatccctgtg

SEQ ID NO: 280150 - DNA, 20 bp, Artificial Sequence
  Description of Artificial Sequence: Synthetic oligonucleotide
  Target: LAMA2; (-) strand; PAM type: YTN; PAM sequence: CTG
cagccacccagccagctgtg

SEQ ID NO: 280151 - DNA, 20 bp, Artificial Sequence
  Description of Artificial Sequence: Synthetic oligonucleotide
  Target: LAMA2; (-) strand; PAM type: YTN; PAM sequence: CTG
ggtgcagctgcagccaccca

SEQ ID NO: 280152 - DNA, 20 bp, Artificial Sequence
  Description of Artificial Sequence: Synthetic oligonucleotide
  Target: LAMA2; (-) strand; PAM type: YTN; PAM sequence: CTA
ctgggtgcagctgcagccac

SEQ ID NO: 280153 - DNA, 20 bp, Artificial Sequence
  Description of Artificial Sequence: Synthetic oligonucleotide
  Target: LAMA2; (-) strand; PAM type: YTN; PAM sequence: CTG
ccctactgggtgcagctgca

SEQ ID NO: 280154 - DNA, 20 bp, Artificial Sequence
  Description of Artificial Sequence: Synthetic oligonucleotide
  Target: LAMA2; (-) strand; PAM type: YTN; PAM sequence: TTG
aaggtgggggaaccctgccc

SEQ ID NO: 280155 - DNA, 20 bp, Artificial Sequence
  Description of Artificial Sequence: Synthetic oligonucleotide
  Target: LAMA2; (-) strand; PAM type: YTN; PAM sequence: TTC
cgagttgaaggtgggggaac

SEQ ID NO: 280156 - DNA, 20 bp, Artificial Sequence
  Description of Artificial Sequence: Synthetic oligonucleotide
  Target: LAMA2; (-) strand; PAM type: YTN; PAM sequence: CTT
ccgagttgaaggtgggggaa

SEQ ID NO: 280157 - DNA, 20 bp, Artificial Sequence
  Description of Artificial Sequence: Synthetic oligonucleotide
  Target: LAMA2; (-) strand; PAM type: YTN; PAM sequence: CTG
gtgggagccaggaacaagtg

SEQ ID NO: 280158 - DNA, 20 bp, Artificial Sequence
  Description of Artificial Sequence: Synthetic oligonucleotide
  Target: LAMA2; (-) strand; PAM type: YTN; PAM sequence: CTC
cacagagctggtgggagcca

SEQ ID NO: 280159 - DNA, 20 bp, Artificial Sequence
  Description of Artificial Sequence: Synthetic oligonucleotide
  Target: LAMA2; (-) strand; PAM type: YTN; PAM sequence: TTG
tgctccacagagctggtggg

SEQ ID NO: 280160 - DNA, 20 bp, Artificial Sequence
  Description of Artificial Sequence: Synthetic oligonucleotide
  Target: LAMA2; (-) strand; PAM type: YTN; PAM sequence: TTT
gtgctccacagagctggtgg

SEQ ID NO: 280161 - DNA, 20 bp, Artificial Sequence
  Description of Artificial Sequence: Synthetic oligonucleotide
  Target: LAMA2; (-) strand; PAM type: YTN; PAM sequence: CTT
tgtgctccacagagctggtg

SEQ ID NO: 280162 - DNA, 20 bp, Artificial Sequence
  Description of Artificial Sequence: Synthetic oligonucleotide
  Target: LAMA2; (-) strand; PAM type: YTN; PAM sequence: CTG
gctttgtgctccacagagct

SEQ ID NO: 280163 - DNA, 20 bp, Artificial Sequence
  Description of Artificial Sequence: Synthetic oligonucleotide
  Target: LAMA2; (-) strand; PAM type: YTN; PAM sequence: CTG
tctggctttgtgctccacag

SEQ ID NO: 280164 - DNA, 20 bp, Artificial Sequence
  Description of Artificial Sequence: Synthetic oligonucleotide
  Target: LAMA2; (-) strand; PAM type: YTN; PAM sequence: CTC
agtaatggcagtgtcagcct

SEQ ID NO: 280165 - DNA, 20 bp, Artificial Sequence
  Description of Artificial Sequence: Synthetic oligonucleotide
  Target: LAMA2; (-) strand; PAM type: YTN; PAM sequence: CTG
agagcaagagggtctcagta

SEQ ID NO: 280166 - DNA, 20 bp, Artificial Sequence
  Description of Artificial Sequence: Synthetic oligonucleotide
  Target: LAMA2; (-) strand; PAM type: YTN; PAM sequence: TTC
tgagagcaagagggtctcag

SEQ ID NO: 280167 - DNA, 20 bp, Artificial Sequence
  Description of Artificial Sequence: Synthetic oligonucleotide
  Target: LAMA2; (-) strand; PAM type: YTN; PAM sequence: CTT
ctgagagcaagagggtctca

SEQ ID NO: 280168 - DNA, 20 bp, Artificial Sequence
  Description of Artificial Sequence: Synthetic oligonucleotide
  Target: LAMA2; (-) strand; PAM type: YTN; PAM sequence: CTC
ttctgagagcaagagggtct

SEQ ID NO: 280169 - DNA, 20 bp, Artificial Sequence
  Description of Artificial Sequence: Synthetic oligonucleotide
  Target: LAMA2; (-) strand; PAM type: YTN; PAM sequence: CTG
agaaaaggaaataggaacaa

SEQ ID NO: 280170 - DNA, 20 bp, Artificial Sequence
  Description of Artificial Sequence: Synthetic oligonucleotide
  Target: LAMA2; (-) strand; PAM type: YTN; PAM sequence: TTC
tgagaaaaggaaataggaac

SEQ ID NO: 280171 - DNA, 20 bp, Artificial Sequence
  Description of Artificial Sequence: Synthetic oligonucleotide
  Target: LAMA2; (-) strand; PAM type: YTN; PAM sequence: TTT
ctgagaaaaggaaataggaa

SEQ ID NO: 280172 - DNA, 20 bp, Artificial Sequence
  Description of Artificial Sequence: Synthetic oligonucleotide
  Target: LAMA2; (-) strand; PAM type: YTN; PAM sequence: TTT
tctgagaaaaggaaatagga

SEQ ID NO: 280173 - DNA, 20 bp, Artificial Sequence
  Description of Artificial Sequence: Synthetic oligonucleotide
  Target: LAMA2; (-) strand; PAM type: YTN; PAM sequence: CTT
ttctgagaaaaggaaatagg

SEQ ID NO: 280174 - DNA, 20 bp, Artificial Sequence
  Description of Artificial Sequence: Synthetic oligonucleotide
  Target: LAMA2; (-) strand; PAM type: YTN; PAM sequence: TTC
ttttctgagaaaaggaaata

SEQ ID NO: 280175 - DNA, 20 bp, Artificial Sequence
  Description of Artificial Sequence: Synthetic oligonucleotide
  Target: LAMA2; (-) strand; PAM type: YTN; PAM sequence: TTT
cttttctgagaaaaggaaat

SEQ ID NO: 280176 - DNA, 20 bp, Artificial Sequence
  Description of Artificial Sequence: Synthetic oligonucleotide
  Target: LAMA2; (-) strand; PAM type: YTN; PAM sequence: CTT
tcttttctgagaaaaggaaa

SEQ ID NO: 280177 - DNA, 20 bp, Artificial Sequence
  Description of Artificial Sequence: Synthetic oligonucleotide
  Target: LAMA2; (-) strand; PAM type: YTN; PAM sequence: CTA
aagactttcttttctgagaa

SEQ ID NO: 280178 - DNA, 20 bp, Artificial Sequence
  Description of Artificial Sequence: Synthetic oligonucleotide
  Target: LAMA2; (-) strand; PAM type: YTN; PAM sequence: TTC
taaagactttcttttctgag

SEQ ID NO: 280179 - DNA, 20 bp, Artificial Sequence
  Description of Artificial Sequence: Synthetic oligonucleotide
  Target: LAMA2; (-) strand; PAM type: YTN; PAM sequence: TTA
attctaaagactttcttttc

SEQ ID NO: 280180 - DNA, 20 bp, Artificial Sequence
  Description of Artificial Sequence: Synthetic oligonucleotide
  Target: LAMA2; (-) strand; PAM type: YTN; PAM sequence: TTT
aattctaaagactttctttt

SEQ ID NO: 280181 - DNA, 20 bp, Artificial Sequence
  Description of Artificial Sequence: Synthetic oligonucleotide
  Target: LAMA2; (-) strand; PAM type: YTN; PAM sequence: TTT
taattctaaagactttcttt

SEQ ID NO: 280182 - DNA, 20 bp, Artificial Sequence
  Description of Artificial Sequence: Synthetic oligonucleotide
  Target: LAMA2; (-) strand; PAM type: YTN; PAM sequence: TTA
aattttaattctaaagactt

SEQ ID NO: 280183 - DNA, 20 bp, Artificial Sequence
  Description of Artificial Sequence: Synthetic oligonucleotide
  Target: LAMA2; (-) strand; PAM type: YTN; PAM sequence: CTT
aaattttaattctaaagact

SEQ ID NO: 280184 - DNA, 20 bp, Artificial Sequence
  Description of Artificial Sequence: Synthetic oligonucleotide
  Target: LAMA2; (-) strand; PAM type: YTN; PAM sequence: TTG
tcagcttaaattttaattct

SEQ ID NO: 280185 - DNA, 20 bp, Artificial Sequence
  Description of Artificial Sequence: Synthetic oligonucleotide
  Target: LAMA2; (-) strand; PAM type: YTN; PAM sequence: CTA
ttgtcagcttaaattttaat

SEQ ID NO: 280186 - DNA, 20 bp, Artificial Sequence
  Description of Artificial Sequence: Synthetic oligonucleotide
  Target: LAMA2; (-) strand; PAM type: YTN; PAM sequence: CTG
gggagaggggatctattgtc

SEQ ID NO: 280187 - DNA, 20 bp, Artificial Sequence
  Description of Artificial Sequence: Synthetic oligonucleotide
  Target: LAMA2; (-) strand; PAM type: YTN; PAM sequence: CTC
cctggggagaggggatctat

SEQ ID NO: 280188 - DNA, 20 bp, Artificial Sequence
  Description of Artificial Sequence: Synthetic oligonucleotide
  Target: LAMA2; (-) strand; PAM type: YTN; PAM sequence: CTG
ctccctggggagaggggatc

SEQ ID NO: 280189 - DNA, 20 bp, Artificial Sequence
  Description of Artificial Sequence: Synthetic oligonucleotide
  Target: LAMA2; (-) strand; PAM type: YTN; PAM sequence: TTC
tgctccctggggagagggga

SEQ ID NO: 280190 - DNA, 20 bp, Artificial Sequence
  Description of Artificial Sequence: Synthetic oligonucleotide
  Target: LAMA2; (-) strand; PAM type: YTN; PAM sequence: TTT
ctgctccctggggagagggg

SEQ ID NO: 280191 - DNA, 20 bp, Artificial Sequence
  Description of Artificial Sequence: Synthetic oligonucleotide
  Target: LAMA2; (-) strand; PAM type: YTN; PAM sequence: TTA
gggatatccatatttctgct

SEQ ID NO: 280192 - DNA, 20 bp, Artificial Sequence
  Description of Artificial Sequence: Synthetic oligonucleotide
  Target: LAMA2; (-) strand; PAM type: YTN; PAM sequence: TTT
agggatatccatatttctgc

SEQ ID NO: 280193 - DNA, 20 bp, Artificial Sequence
  Description of Artificial Sequence: Synthetic oligonucleotide
  Target: LAMA2; (-) strand; PAM type: YTN; PAM sequence: CTT
tagggatatccatatttctg

SEQ ID NO: 280194 - DNA, 20 bp, Artificial Sequence
  Description of Artificial Sequence: Synthetic oligonucleotide
  Target: LAMA2; (-) strand; PAM type: YTN; PAM sequence: CTC
aagacctttagggatatcca

SEQ ID NO: 280195 - DNA, 20 bp, Artificial Sequence
  Description of Artificial Sequence: Synthetic oligonucleotide
  Target: LAMA2; (-) strand; PAM type: YTN; PAM sequence: TTG
agtataaaatagtgaaagac

SEQ ID NO: 280196 - DNA, 20 bp, Artificial Sequence
  Description of Artificial Sequence: Synthetic oligonucleotide
  Target: LAMA2; (-) strand; PAM type: YTN; PAM sequence: CTA
gataaaaatcatggaatatt

SEQ ID NO: 280197 - DNA, 20 bp, Artificial Sequence
  Description of Artificial Sequence: Synthetic oligonucleotide
  Target: LAMA2; (-) strand; PAM type: YTN; PAM sequence: TTG
tccaccaggcatatctagat

SEQ ID NO: 280198 - DNA, 20 bp, Artificial Sequence
  Description of Artificial Sequence: Synthetic oligonucleotide
  Target: LAMA2; (-) strand; PAM type: YTN; PAM sequence: CTG
ttgtccaccaggcatatcta

SEQ ID NO: 280199 - DNA, 20 bp, Artificial Sequence
  Description of Artificial Sequence: Synthetic oligonucleotide
  Target: LAMA2; (-) strand; PAM type: YTN; PAM sequence: TTG
gcgatcacctgttgtccacc

SEQ ID NO: 280200 - DNA, 20 bp, Artificial Sequence
  Description of Artificial Sequence: Synthetic oligonucleotide
  Target: LAMA2; (-) strand; PAM type: YTN; PAM sequence: TTT
ggcgatcacctgttgtccac

SEQ ID NO: 280201 - DNA, 20 bp, Artificial Sequence
  Description of Artificial Sequence: Synthetic oligonucleotide
  Target: LAMA2; (-) strand; PAM type: YTN; PAM sequence: CTA
tatttggcgatcacctgttg

SEQ ID NO: 280202 - DNA, 20 bp, Artificial Sequence
  Description of Artificial Sequence: Synthetic oligonucleotide
  Target: LAMA2; (-) strand; PAM type: YTN; PAM sequence: TTG
gagatgggagggacaaccta

SEQ ID NO: 280203 - DNA, 20 bp, Artificial Sequence
  Description of Artificial Sequence: Synthetic oligonucleotide
  Target: LAMA2; (-) strand; PAM type: YTN; PAM sequence: TTT
ggagatgggagggacaacct

SEQ ID NO: 280204 - DNA, 20 bp, Artificial Sequence
  Description of Artificial Sequence: Synthetic oligonucleotide
  Target: LAMA2; (-) strand; PAM type: YTN; PAM sequence: CTA
gcatcagaatttggagatgg

SEQ ID NO: 280205 - DNA, 20 bp, Artificial Sequence
  Description of Artificial Sequence: Synthetic oligonucleotide
  Target: LAMA2; (-) strand; PAM type: YTN; PAM sequence: TTC
tagcatcagaatttggagat

SEQ ID NO: 280206 - DNA, 20 bp, Artificial Sequence
  Description of Artificial Sequence: Synthetic oligonucleotide
  Target: LAMA2; (-) strand; PAM type: YTN; PAM sequence: TTT
ctagcatcagaatttggaga

SEQ ID NO: 280207 - DNA, 20 bp, Artificial Sequence
  Description of Artificial Sequence: Synthetic oligonucleotide
  Target: LAMA2; (-) strand; PAM type: YTN; PAM sequence: CTG
atttctagcatcagaatttg

SEQ ID NO: 280208 - DNA, 20 bp, Artificial Sequence
  Description of Artificial Sequence: Synthetic oligonucleotide
  Target: LAMA2; (-) strand; PAM type: YTN; PAM sequence: TTC
ctgatttctagcatcagaat

SEQ ID NO: 280209 - DNA, 20 bp, Artificial Sequence
  Description of Artificial Sequence: Synthetic oligonucleotide
  Target: LAMA2; (-) strand; PAM type: YTN; PAM sequence: CTA
tcatagccattcctgatttc

SEQ ID NO: 280210 - DNA, 20 bp, Artificial Sequence
  Description of Artificial Sequence: Synthetic oligonucleotide
  Target: LAMA2; (-) strand; PAM type: YTN; PAM sequence: CTG
gactatcatagccattcctg

SEQ ID NO: 280211 - DNA, 20 bp, Artificial Sequence
  Description of Artificial Sequence: Synthetic oligonucleotide
  Target: LAMA2; (-) strand; PAM type: YTN; PAM sequence: CTG
aaaatctggactatcatagc

SEQ ID NO: 280212 - DNA, 20 bp, Artificial Sequence
  Description of Artificial Sequence: Synthetic oligonucleotide
  Target: LAMA2; (-) strand; PAM type: YTN; PAM sequence: TTC
tgaaaatctggactatcata

SEQ ID NO: 280213 - DNA, 20 bp, Artificial Sequence
  Description of Artificial Sequence: Synthetic oligonucleotide
  Target: LAMA2; (-) strand; PAM type: YTN; PAM sequence: TTA
tcaattctgaaaatctggac

SEQ ID NO: 280214 - DNA, 20 bp, Artificial Sequence
  Description of Artificial Sequence: Synthetic oligonucleotide
  Target: LAMA2; (-) strand; PAM type: YTN; PAM sequence: CTT
atcaattctgaaaatctgga

SEQ ID NO: 280215 - DNA, 20 bp, Artificial Sequence
  Description of Artificial Sequence: Synthetic oligonucleotide
  Target: LAMA2; (-) strand; PAM type: YTN; PAM sequence: TTA
gggtaatataaatatcttat

SEQ ID NO: 280216 - DNA, 20 bp, Artificial Sequence
  Description of Artificial Sequence: Synthetic oligonucleotide
  Target: LAMA2; (-) strand; PAM type: YTN; PAM sequence: CTT
agggtaatataaatatctta

SEQ ID NO: 280217 - DNA, 20 bp, Artificial Sequence
  Description of Artificial Sequence: Synthetic oligonucleotide
  Target: LAMA2; (-) strand; PAM type: YTN; PAM sequence: CTC
ttagggtaatataaatatct

SEQ ID NO: 280218 - DNA, 20 bp, Artificial Sequence
  Description of Artificial Sequence: Synthetic oligonucleotide
  Target: LAMA2; (-) strand; PAM type: YTN; PAM sequence: TTC
cgtatctcttagggtaatat

SEQ ID NO: 280219 - DNA, 20 bp, Artificial Sequence
  Description of Artificial Sequence: Synthetic oligonucleotide
  Target: LAMA2; (-) strand; PAM type: YTN; PAM sequence: CTT
ccgtatctcttagggtaata

SEQ ID NO: 280220 - DNA, 20 bp, Artificial Sequence
  Description of Artificial Sequence: Synthetic oligonucleotide
  Target: LAMA2; (-) strand; PAM type: YTN; PAM sequence: TTC
aacttccgtatctcttaggg

SEQ ID NO: 280221 - DNA, 20 bp, Artificial Sequence
  Description of Artificial Sequence: Synthetic oligonucleotide
  Target: LAMA2; (-) strand; PAM type: YTN; PAM sequence: CTG
ttcaacttccgtatctctta

SEQ ID NO: 280222 - DNA, 20 bp, Artificial Sequence
  Description of Artificial Sequence: Synthetic oligonucleotide
  Target: LAMA2; (-) strand; PAM type: YTN; PAM sequence: TTC
tgttcaacttccgtatctct

SEQ ID NO: 280223 - DNA, 20 bp, Artificial Sequence
  Description of Artificial Sequence: Synthetic oligonucleotide
  Target: LAMA2; (-) strand; PAM type: YTN; PAM sequence: TTA
ttctgttcaacttccgtatc

SEQ ID NO: 280224 - DNA, 20 bp, Artificial Sequence
  Description of Artificial Sequence: Synthetic oligonucleotide
  Target: LAMA2; (-) strand; PAM type: YTN; PAM sequence: TTT
attctgttcaacttccgtat

SEQ ID NO: 280225 - DNA, 20 bp, Artificial Sequence
  Description of Artificial Sequence: Synthetic oligonucleotide
  Target: LAMA2; (-) strand; PAM type: YTN; PAM sequence: TTT
tattctgttcaacttccgta

SEQ ID NO: 280226 - DNA, 20 bp, Artificial Sequence
  Description of Artificial Sequence: Synthetic oligonucleotide
  Target: LAMA2; (-) strand; PAM type: YTN; PAM sequence: TTT
ttattctgttcaacttccgt

SEQ ID NO: 280227 - DNA, 20 bp, Artificial Sequence
  Description of Artificial Sequence: Synthetic oligonucleotide
  Target: LAMA2; (-) strand; PAM type: YTN; PAM sequence: TTT
tttattctgttcaacttccg

SEQ ID NO: 280228 - DNA, 20 bp, Artificial Sequence
  Description of Artificial Sequence: Synthetic oligonucleotide
  Target: LAMA2; (-) strand; PAM type: YTN; PAM sequence: TTT
ttttattctgttcaacttcc

SEQ ID NO: 280229 - DNA, 20 bp, Artificial Sequence
  Description of Artificial Sequence: Synthetic oligonucleotide
  Target: LAMA2; (-) strand; PAM type: YTN; PAM sequence: TTG
aatttttttattctgttcaa

SEQ ID NO: 280230 - DNA, 20 bp, Artificial Sequence
  Description of Artificial Sequence: Synthetic oligonucleotide
  Target: LAMA2; (-) strand; PAM type: YTN; PAM sequence: TTT
gaatttttttattctgttca

SEQ ID NO: 280231 - DNA, 20 bp, Artificial Sequence
  Description of Artificial Sequence: Synthetic oligonucleotide
  Target: LAMA2; (-) strand; PAM type: YTN; PAM sequence: TTT
tgaatttttttattctgttc

SEQ ID NO: 280232 - DNA, 20 bp, Artificial Sequence
  Description of Artificial Sequence: Synthetic oligonucleotide
  Target: LAMA2; (-) strand; PAM type: YTN; PAM sequence: TTA
ttttgaatttttttattctg

SEQ ID NO: 280233 - DNA, 20 bp, Artificial Sequence
  Description of Artificial Sequence: Synthetic oligonucleotide
  Target: LAMA2; (-) strand; PAM type: YTN; PAM sequence: TTT
attttgaatttttttattct

SEQ ID NO: 280234 - DNA, 20 bp, Artificial Sequence
  Description of Artificial Sequence: Synthetic oligonucleotide
  Target: LAMA2; (-) strand; PAM type: YTN; PAM sequence: TTT
tattttgaatttttttattc

SEQ ID NO: 280235 - DNA, 20 bp, Artificial Sequence
  Description of Artificial Sequence: Synthetic oligonucleotide
  Target: LAMA2; (-) strand; PAM type: YTN; PAM sequence: CTT
ttattttgaatttttttatt

SEQ ID NO: 280236 - DNA, 20 bp, Artificial Sequence
  Description of Artificial Sequence: Synthetic oligonucleotide
  Target: LAMA2; (-) strand; PAM type: YTN; PAM sequence: TTA
cttttattttgaattttttt

SEQ ID NO: 280237 - DNA, 20 bp, Artificial Sequence
  Description of Artificial Sequence: Synthetic oligonucleotide
  Target: LAMA2; (-) strand; PAM type: YTN; PAM sequence: TTT
acttttattttgaatttttt

SEQ ID NO: 280238 - DNA, 20 bp, Artificial Sequence
  Description of Artificial Sequence: Synthetic oligonucleotide
  Target: LAMA2; (-) strand; PAM type: YTN; PAM sequence: TTA
tttacttttattttgaattt

SEQ ID NO: 280239 - DNA, 20 bp, Artificial Sequence
  Description of Artificial Sequence: Synthetic oligonucleotide
  Target: LAMA2; (-) strand; PAM type: YTN; PAM sequence: TTT
atttacttttattttgaatt

SEQ ID NO: 280240 - DNA, 20 bp, Artificial Sequence
  Description of Artificial Sequence: Synthetic oligonucleotide
  Target: LAMA2; (-) strand; PAM type: YTN; PAM sequence: TTT
tatttacttttattttgaat

SEQ ID NO: 280241 - DNA, 20 bp, Artificial Sequence
  Description of Artificial Sequence: Synthetic oligonucleotide
  Target: LAMA2; (-) strand; PAM type: YTN; PAM sequence: CTA
aacagggaaagaaagtaatt

SEQ ID NO: 280242 - DNA, 20 bp, Artificial Sequence
  Description of Artificial Sequence: Synthetic oligonucleotide
  Target: LAMA2; (-) strand; PAM type: YTN; PAM sequence: CTC
aaactaaacagggaaagaaa

SEQ ID NO: 280243 - DNA, 20 bp, Artificial Sequence
  Description of Artificial Sequence: Synthetic oligonucleotide
  Target: LAMA2; (-) strand; PAM type: YTN; PAM sequence: TTA
cacatgatctcaaactaaac

SEQ ID NO: 280244 - DNA, 20 bp, Artificial Sequence
  Description of Artificial Sequence: Synthetic oligonucleotide
  Target: LAMA2; (-) strand; PAM type: YTN; PAM sequence: TTT
acacatgatctcaaactaaa

SEQ ID NO: 280245 - DNA, 20 bp, Artificial Sequence
  Description of Artificial Sequence: Synthetic oligonucleotide
  Target: LAMA2; (-) strand; PAM type: YTN; PAM sequence: CTG
atatttacacatgatctcaa

SEQ ID NO: 280246 - DNA, 20 bp, Artificial Sequence
  Description of Artificial Sequence: Synthetic oligonucleotide
  Target: LAMA2; (-) strand; PAM type: YTN; PAM sequence: TTC
actgatatttacacatgatc

SEQ ID NO: 280247 - DNA, 20 bp, Artificial Sequence
  Description of Artificial Sequence: Synthetic oligonucleotide
  Target: LAMA2; (-) strand; PAM type: YTN; PAM sequence: CTA
tatgacatcacgttcactga

SEQ ID NO: 280248 - DNA, 20 bp, Artificial Sequence
  Description of Artificial Sequence: Synthetic oligonucleotide
  Target: LAMA2; (-) strand; PAM type: YTN; PAM sequence: CTG
atcaataaaaaaaaatccta

SEQ ID NO: 280249 - DNA, 20 bp, Artificial Sequence
  Description of Artificial Sequence: Synthetic oligonucleotide
  Target: LAMA2; (-) strand; PAM type: YTN; PAM sequence: TTC
tgatcaataaaaaaaaatcc

SEQ ID NO: 280250 - DNA, 20 bp, Artificial Sequence
  Description of Artificial Sequence: Synthetic oligonucleotide
  Target: LAMA2; (-) strand; PAM type: YTN; PAM sequence: CTA
attctgatcaataaaaaaaa

SEQ ID NO: 280251 - DNA, 20 bp, Artificial Sequence
  Description of Artificial Sequence: Synthetic oligonucleotide
  Target: LAMA2; (-) strand; PAM type: YTN; PAM sequence: TTG
aacctaattctgatcaataa

SEQ ID NO: 280252 - DNA, 20 bp, Artificial Sequence
  Description of Artificial Sequence: Synthetic oligonucleotide
  Target: LAMA2; (-) strand; PAM type: YTN; PAM sequence: CTT
gaacctaattctgatcaata

SEQ ID NO: 280253 - DNA, 20 bp, Artificial Sequence
  Description of Artificial Sequence: Synthetic oligonucleotide
  Target: LAMA2; (-) strand; PAM type: YTN; PAM sequence: TTC
cagaacacaacttgaaccta

SEQ ID NO: 280254 - DNA, 20 bp, Artificial Sequence
  Description of Artificial Sequence: Synthetic oligonucleotide
  Target: LAMA2; (-) strand; PAM type: YTN; PAM sequence: TTT
ccagaacacaacttgaacct

SEQ ID NO: 280255 - DNA, 20 bp, Artificial Sequence
  Description of Artificial Sequence: Synthetic oligonucleotide
  Target: LAMA2; (-) strand; PAM type: YTN; PAM sequence: TTA
gaagtttccagaacacaact

SEQ ID NO: 280256 - DNA, 20 bp, Artificial Sequence
  Description of Artificial Sequence: Synthetic oligonucleotide
  Target: LAMA2; (-) strand; PAM type: YTN; PAM sequence: TTA
attagaagtttccagaacac

SEQ ID NO: 280257 - DNA, 20 bp, Artificial Sequence
  Description of Artificial Sequence: Synthetic oligonucleotide
  Target: LAMA2; (-) strand; PAM type: YTN; PAM sequence: TTT
aattagaagtttccagaaca

SEQ ID NO: 280258 - DNA, 20 bp, Artificial Sequence
  Description of Artificial Sequence: Synthetic oligonucleotide
  Target: LAMA2; (-) strand; PAM type: YTN; PAM sequence: CTC
aatttaattagaagtttcca

SEQ ID NO: 280259 - DNA, 20 bp, Artificial Sequence
  Description of Artificial Sequence: Synthetic oligonucleotide
  Target: LAMA2; (-) strand; PAM type: YTN; PAM sequence: TTC
cctcaatttaattagaagtt

SEQ ID NO: 280260 - DNA, 20 bp, Artificial Sequence
  Description of Artificial Sequence: Synthetic oligonucleotide
  Target: LAMA2; (-) strand; PAM type: YTN; PAM sequence: CTT
ccctcaatttaattagaagt

SEQ ID NO: 280261 - DNA, 20 bp, Artificial Sequence
  Description of Artificial Sequence: Synthetic oligonucleotide
  Target: LAMA2; (-) strand; PAM type: YTN; PAM sequence: CTA
gcatcttccctcaatttaat

SEQ ID NO: 280262 - DNA, 20 bp, Artificial Sequence
  Description of Artificial Sequence: Synthetic oligonucleotide
  Target: LAMA2; (-) strand; PAM type: YTN; PAM sequence: CTG
ctagcatcttccctcaattt

SEQ ID NO: 280263 - DNA, 20 bp, Artificial Sequence
  Description of Artificial Sequence: Synthetic oligonucleotide
  Target: LAMA2; (-) strand; PAM type: YTN; PAM sequence: CTG
gcctgctagcatcttccctc

SEQ ID NO: 280264 - DNA, 20 bp, Artificial Sequence
  Description of Artificial Sequence: Synthetic oligonucleotide
  Target: LAMA2; (-) strand; PAM type: YTN; PAM sequence: TTC
tggcctgctagcatcttccc

SEQ ID NO: 280265 - DNA, 20 bp, Artificial Sequence
  Description of Artificial Sequence: Synthetic oligonucleotide
  Target: LAMA2; (-) strand; PAM type: YTN; PAM sequence: TTC
ccaaattctggcctgctagc

SEQ ID NO: 280266 - DNA, 20 bp, Artificial Sequence
  Description of Artificial Sequence: Synthetic oligonucleotide
  Target: LAMA2; (-) strand; PAM type: YTN; PAM sequence: CTA
attcccaaattctggcctgc

SEQ ID NO: 280267 - DNA, 20 bp, Artificial Sequence
  Description of Artificial Sequence: Synthetic oligonucleotide
  Target: LAMA2; (-) strand; PAM type: YTN; PAM sequence: TTG
gagccagatcatctaattcc

SEQ ID NO: 280268 - DNA, 20 bp, Artificial Sequence
  Description of Artificial Sequence: Synthetic oligonucleotide
  Target: LAMA2; (-) strand; PAM type: YTN; PAM sequence: TTT
ggagccagatcatctaattc

SEQ ID NO: 280269 - DNA, 20 bp, Artificial Sequence
  Description of Artificial Sequence: Synthetic oligonucleotide
  Target: LAMA2; (-) strand; PAM type: YTN; PAM sequence: TTG
aatttggagccagatcatct

SEQ ID NO: 280270 - DNA, 20 bp, Artificial Sequence
  Description of Artificial Sequence: Synthetic oligonucleotide
  Target: LAMA2; (-) strand; PAM type: YTN; PAM sequence: TTA
catagacaatatgtattgaa

SEQ ID NO: 280271 - DNA, 20 bp, Artificial Sequence
  Description of Artificial Sequence: Synthetic oligonucleotide
  Target: LAMA2; (-) strand; PAM type: YTN; PAM sequence: CTA
attacatagacaatatgtat

SEQ ID NO: 280272 - DNA, 20 bp, Artificial Sequence
  Description of Artificial Sequence: Synthetic oligonucleotide
  Target: LAMA2; (-) strand; PAM type: YTN; PAM sequence: TTA
ggtgacacagctaattacat

SEQ ID NO: 280273 - DNA, 20 bp, Artificial Sequence
  Description of Artificial Sequence: Synthetic oligonucleotide
  Target: LAMA2; (-) strand; PAM type: YTN; PAM sequence: TTG
gtacattaggtgacacagct

SEQ ID NO: 280274 - DNA, 20 bp, Artificial Sequence
  Description of Artificial Sequence: Synthetic oligonucleotide
  Target: LAMA2; (-) strand; PAM type: YTN; PAM sequence: TTA
ttggtacattaggtgacaca

SEQ ID NO: 280275 - DNA, 20 bp, Artificial Sequence
  Description of Artificial Sequence: Synthetic oligonucleotide
  Target: LAMA2; (-) strand; PAM type: YTN; PAM sequence: TTG
aaaaggcattattggtacat

SEQ ID NO: 280276 - DNA, 20 bp, Artificial Sequence
  Description of Artificial Sequence: Synthetic oligonucleotide
  Target: LAMA2; (-) strand; PAM type: YTN; PAM sequence: CTT
gaaaaggcattattggtaca

SEQ ID NO: 280277 - DNA, 20 bp, Artificial Sequence
  Description of Artificial Sequence: Synthetic oligonucleotide
  Target: LAMA2; (-) strand; PAM type: YTN; PAM sequence: TTC
ttgaaaaggcattattggta

SEQ ID NO: 280278 - DNA, 20 bp, Artificial Sequence
  Description of Artificial Sequence: Synthetic oligonucleotide
  Target: LAMA2; (-) strand; PAM type: YTN; PAM sequence: TTT
cttgaaaaggcattattggt

SEQ ID NO: 280279 - DNA, 20 bp, Artificial Sequence
  Description of Artificial Sequence: Synthetic oligonucleotide
  Target: LAMA2; (-) strand; PAM type: YTN; PAM sequence: CTG
cacagtgtttcttgaaaagg

SEQ ID NO: 280280 - DNA, 20 bp, Artificial Sequence
  Description of Artificial Sequence: Synthetic oligonucleotide
  Target: LAMA2; (-) strand; PAM type: YTN; PAM sequence: TTA
agccaatggaggaatcagaa

SEQ ID NO: 280281 - DNA, 20 bp, Artificial Sequence
  Description of Artificial Sequence: Synthetic oligonucleotide
  Target: LAMA2; (-) strand; PAM type: YTN; PAM sequence: TTA
taggaattaagccaatggag

SEQ ID NO: 280282 - DNA, 20 bp, Artificial Sequence
  Description of Artificial Sequence: Synthetic oligonucleotide
  Target: LAMA2; (-) strand; PAM type: YTN; PAM sequence: TTA
ttataggaattaagccaatg

SEQ ID NO: 280283 - DNA, 20 bp, Artificial Sequence
  Description of Artificial Sequence: Synthetic oligonucleotide
  Target: LAMA2; (-) strand; PAM type: YTN; PAM sequence: TTT
attataggaattaagccaat

SEQ ID NO: 280284 - DNA, 20 bp, Artificial Sequence
  Description of Artificial Sequence: Synthetic oligonucleotide
  Target: LAMA2; (-) strand; PAM type: YTN; PAM sequence: CTA
tatttattataggaattaag

SEQ ID NO: 280285 - DNA, 20 bp, Artificial Sequence
  Description of Artificial Sequence: Synthetic oligonucleotide
  Target: LAMA2; (-) strand; PAM type: YTN; PAM sequence: TTG
gaaactatatttattatagg

SEQ ID NO: 280286 - DNA, 20 bp, Artificial Sequence
  Description of Artificial Sequence: Synthetic oligonucleotide
  Target: LAMA2; (-) strand; PAM type: YTN; PAM sequence: TTT
ggaaactatatttattatag

SEQ ID NO: 280287 - DNA, 20 bp, Artificial Sequence
  Description of Artificial Sequence: Synthetic oligonucleotide
  Target: LAMA2; (-) strand; PAM type: YTN; PAM sequence: CTT
tggaaactatatttattata

SEQ ID NO: 280288 - DNA, 20 bp, Artificial Sequence
  Description of Artificial Sequence: Synthetic oligonucleotide
  Target: LAMA2; (-) strand; PAM type: YTN; PAM sequence: TTA
taaactttggaaactatatt

SEQ ID NO: 280289 - DNA, 20 bp, Artificial Sequence
  Description of Artificial Sequence: Synthetic oligonucleotide
  Target: LAMA2; (-) strand; PAM type: YTN; PAM sequence: TTA
agttataaactttggaaact

SEQ ID NO: 280290 - DNA, 20 bp, Artificial Sequence
  Description of Artificial Sequence: Synthetic oligonucleotide
  Target: LAMA2; (-) strand; PAM type: YTN; PAM sequence: CTG
aaaattaagttataaacttt

SEQ ID NO: 280291 - DNA, 20 bp, Artificial Sequence
  Description of Artificial Sequence: Synthetic oligonucleotide
  Target: LAMA2; (-) strand; PAM type: YTN; PAM sequence: TTC
tgaaaattaagttataaact

SEQ ID NO: 280292 - DNA, 20 bp, Artificial Sequence
  Description of Artificial Sequence: Synthetic oligonucleotide
  Target: LAMA2; (-) strand; PAM type: YTN; PAM sequence: TTA
aaataaataaattctgaaaa

SEQ ID NO: 280293 - DNA, 20 bp, Artificial Sequence
  Description of Artificial Sequence: Synthetic oligonucleotide
  Target: LAMA2; (-) strand; PAM type: YTN; PAM sequence: CTG
tcaattaaaataaataaatt

SEQ ID NO: 280294 - DNA, 20 bp, Artificial Sequence
  Description of Artificial Sequence: Synthetic oligonucleotide
  Target: LAMA2; (-) strand; PAM type: YTN; PAM sequence: TTA
tctgtcaattaaaataaata

SEQ ID NO: 280295 - DNA, 20 bp, Artificial Sequence
  Description of Artificial Sequence: Synthetic oligonucleotide
  Target: LAMA2; (-) strand; PAM type: YTN; PAM sequence: TTT
atctgtcaattaaaataaat

SEQ ID NO: 280296 - DNA, 20 bp, Artificial Sequence
  Description of Artificial Sequence: Synthetic oligonucleotide
  Target: LAMA2; (-) strand; PAM type: YTN; PAM sequence: TTT
tatctgtcaattaaaataaa

SEQ ID NO: 280297 - DNA, 20 bp, Artificial Sequence
  Description of Artificial Sequence: Synthetic oligonucleotide
  Target: LAMA2; (-) strand; PAM type: YTN; PAM sequence: CTT
ttatctgtcaattaaaataa

SEQ ID NO: 280298 - DNA, 20 bp, Artificial Sequence
  Description of Artificial Sequence: Synthetic oligonucleotide
  Target: LAMA2; (-) strand; PAM type: YTN; PAM sequence: TTG
tacatgataaatatatacca

SEQ ID NO: 280299 - DNA, 20 bp, Artificial Sequence
  Description of Artificial Sequence: Synthetic oligonucleotide
  Target: LAMA2; (-) strand; PAM type: YTN; PAM sequence: TTC
aaagcatcatgttgtacatg

SEQ ID NO: 280300 - DNA, 20 bp, Artificial Sequence
  Description of Artificial Sequence: Synthetic oligonucleotide
  Target: LAMA2; (-) strand; PAM type: YTN; PAM sequence: TTT
caaagcatcatgttgtacat

SEQ ID NO: 280301 - DNA, 20 bp, Artificial Sequence
  Description of Artificial Sequence: Synthetic oligonucleotide
  Target: LAMA2; (-) strand; PAM type: YTN; PAM sequence: TTA
tttcaaagcatcatgttgta

SEQ ID NO: 280302 - DNA, 20 bp, Artificial Sequence
  Description of Artificial Sequence: Synthetic oligonucleotide
  Target: LAMA2; (-) strand; PAM type: YTN; PAM sequence: CTT
atttcaaagcatcatgttgt

SEQ ID NO: 280303 - DNA, 20 bp, Artificial Sequence
  Description of Artificial Sequence: Synthetic oligonucleotide
  Target: LAMA2; (-) strand; PAM type: YTN; PAM sequence: TTC
cacaatgtatacttatttca

SEQ ID NO: 280304 - DNA, 20 bp, Artificial Sequence
  Description of Artificial Sequence: Synthetic oligonucleotide
  Target: LAMA2; (-) strand; PAM type: YTN; PAM sequence: TTA
gccattccacaatgtatact

SEQ ID NO: 280305 - DNA, 20 bp, Artificial Sequence
  Description of Artificial Sequence: Synthetic oligonucleotide
  Target: LAMA2; (-) strand; PAM type: YTN; PAM sequence: TTT
agccattccacaatgtatac

SEQ ID NO: 280306 - DNA, 20 bp, Artificial Sequence
  Description of Artificial Sequence: Synthetic oligonucleotide
  Target: LAMA2; (-) strand; PAM type: YTN; PAM sequence: CTC
gatttagccattccacaatg

SEQ ID NO: 280307 - DNA, 20 bp, Artificial Sequence
  Description of Artificial Sequence: Synthetic oligonucleotide
  Target: LAMA2; (-) strand; PAM type: YTN; PAM sequence: TTA
aatacctcgatttagccatt

SEQ ID NO: 280308 - DNA, 20 bp, Artificial Sequence
  Description of Artificial Sequence: Synthetic oligonucleotide
  Target: LAMA2; (-) strand; PAM type: YTN; PAM sequence: TTT
aaatacctcgatttagccat

SEQ ID NO: 280309 - DNA, 20 bp, Artificial Sequence
  Description of Artificial Sequence: Synthetic oligonucleotide
  Target: LAMA2; (-) strand; PAM type: YTN; PAM sequence: TTT
taaatacctcgatttagcca

SEQ ID NO: 280310 - DNA, 20 bp, Artificial Sequence
  Description of Artificial Sequence: Synthetic oligonucleotide
  Target: LAMA2; (-) strand; PAM type: YTN; PAM sequence: TTT
ttaaatacctcgatttagcc

SEQ ID NO: 280311 - DNA, 20 bp, Artificial Sequence
  Description of Artificial Sequence: Synthetic oligonucleotide
  Target: LAMA2; (-) strand; PAM type: YTN; PAM sequence: CTC
aacacagaaaaatgaccagt

SEQ ID NO: 280312 - DNA, 20 bp, Artificial Sequence
  Description of Artificial Sequence: Synthetic oligonucleotide
  Target: LAMA2; (-) strand; PAM type: YTN; PAM sequence: TTC
tcaacacagaaaaatgacca

SEQ ID NO: 280313 - DNA, 20 bp, Artificial Sequence
  Description of Artificial Sequence: Synthetic oligonucleotide
  Target: LAMA2; (-) strand; PAM type: YTN; PAM sequence: TTA
agtgttctcaacacagaaaa

SEQ ID NO: 280314 - DNA, 20 bp, Artificial Sequence
  Description of Artificial Sequence: Synthetic oligonucleotide
  Target: LAMA2; (-) strand; PAM type: YTN; PAM sequence: TTT
aagtgttctcaacacagaaa

SEQ ID NO: 280315 - DNA, 20 bp, Artificial Sequence
  Description of Artificial Sequence: Synthetic oligonucleotide
  Target: LAMA2; (-) strand; PAM type: YTN; PAM sequence: TTT
taagtgttctcaacacagaa

SEQ ID NO: 280316 - DNA, 20 bp, Artificial Sequence
  Description of Artificial Sequence: Synthetic oligonucleotide
  Target: LAMA2; (-) strand; PAM type: YTN; PAM sequence: CTA
agagagtagattttaagtgt

SEQ ID NO: 280317 - DNA, 20 bp, Artificial Sequence
  Description of Artificial Sequence: Synthetic oligonucleotide
  Target: LAMA2; (-) strand; PAM type: YTN; PAM sequence: TTG
ctaagagagtagattttaag

SEQ ID NO: 280318 - DNA, 20 bp, Artificial Sequence
  Description of Artificial Sequence: Synthetic oligonucleotide
  Target: LAMA2; (-) strand; PAM type: YTN; PAM sequence: TTT
gctaagagagtagattttaa

SEQ ID NO: 280319 - DNA, 20 bp, Artificial Sequence
  Description of Artificial Sequence: Synthetic oligonucleotide
  Target: LAMA2; (-) strand; PAM type: YTN; PAM sequence: CTT
tgctaagagagtagatttta

SEQ ID NO: 280320 - DNA, 20 bp, Artificial Sequence
  Description of Artificial Sequence: Synthetic oligonucleotide
  Target: LAMA2; (-) strand; PAM type: YTN; PAM sequence: CTA
aagccagcatggctttgcta

SEQ ID NO: 280321 - DNA, 20 bp, Artificial Sequence
  Description of Artificial Sequence: Synthetic oligonucleotide
  Target: LAMA2; (-) strand; PAM type: YTN; PAM sequence: TTG
acccaaatgagagtatcatg

SEQ ID NO: 280322 - DNA, 20 bp, Artificial Sequence
  Description of Artificial Sequence: Synthetic oligonucleotide
  Target: LAMA2; (-) strand; PAM type: YTN; PAM sequence: TTA
ttgacccaaatgagagtatc

SEQ ID NO: 280323 - DNA, 20 bp, Artificial Sequence
  Description of Artificial Sequence: Synthetic oligonucleotide
  Target: LAMA2; (-) strand; PAM type: YTN; PAM sequence: TTA
aaaaaattattgacccaaat

SEQ ID NO: 280324 - DNA, 20 bp, Artificial Sequence
  Description of Artificial Sequence: Synthetic oligonucleotide
  Target: LAMA2; (-) strand; PAM type: YTN; PAM sequence: TTT
aaaaaaattattgacccaaa

SEQ ID NO: 280325 - DNA, 20 bp, Artificial Sequence
  Description of Artificial Sequence: Synthetic oligonucleotide
  Target: LAMA2; (-) strand; PAM type: YTN; PAM sequence: TTT
taaaaaaattattgacccaa

SEQ ID NO: 280326 - DNA, 20 bp, Artificial Sequence
  Description of Artificial Sequence: Synthetic oligonucleotide
  Target: LAMA2; (-) strand; PAM type: YTN; PAM sequence: CTT
ttaaaaaaattattgaccca

SEQ ID NO: 280327 - DNA, 20 bp, Artificial Sequence
  Description of Artificial Sequence: Synthetic oligonucleotide
  Target: LAMA2; (-) strand; PAM type: YTN; PAM sequence: TTC
caatagacttttaaaaaaat

SEQ ID NO: 280328 - DNA, 20 bp, Artificial Sequence
  Description of Artificial Sequence: Synthetic oligonucleotide
  Target: LAMA2; (-) strand; PAM type: YTN; PAM sequence: CTT
ccaatagacttttaaaaaaa

SEQ ID NO: 280329 - DNA, 20 bp, Artificial Sequence
  Description of Artificial Sequence: Synthetic oligonucleotide
  Target: LAMA2; (-) strand; PAM type: YTN; PAM sequence: CTG
cttccaatagacttttaaaa

SEQ ID NO: 280330 - DNA, 20 bp, Artificial Sequence
  Description of Artificial Sequence: Synthetic oligonucleotide
  Target: LAMA2; (-) strand; PAM type: YTN; PAM sequence: CTC
tgcttccaatagacttttaa

SEQ ID NO: 280331 - DNA, 20 bp, Artificial Sequence
  Description of Artificial Sequence: Synthetic oligonucleotide
  Target: LAMA2; (-) strand; PAM type: YTN; PAM sequence: TTC
tctgcttccaatagactttt

SEQ ID NO: 280332 - DNA, 20 bp, Artificial Sequence
  Description of Artificial Sequence: Synthetic oligonucleotide
  Target: LAMA2; (-) strand; PAM type: YTN; PAM sequence: TTT
ctctgcttccaatagacttt

SEQ ID NO: 280333 - DNA, 20 bp, Artificial Sequence
  Description of Artificial Sequence: Synthetic oligonucleotide
  Target: LAMA2; (-) strand; PAM type: YTN; PAM sequence: TTA
tttctctgcttccaatagac

SEQ ID NO: 280334 - DNA, 20 bp, Artificial Sequence
  Description of Artificial Sequence: Synthetic oligonucleotide
  Target: LAMA2; (-) strand; PAM type: YTN; PAM sequence: TTT
atttctctgcttccaataga

SEQ ID NO: 280335 - DNA, 20 bp, Artificial Sequence
  Description of Artificial Sequence: Synthetic oligonucleotide
  Target: LAMA2; (-) strand; PAM type: YTN; PAM sequence: CTG
ggtcaaaaaatttatttctc

SEQ ID NO: 280336 - DNA, 20 bp, Artificial Sequence
  Description of Artificial Sequence: Synthetic oligonucleotide
  Target: LAMA2; (-) strand; PAM type: YTN; PAM sequence: CTA
aggctgggtcaaaaaattta

SEQ ID NO: 280337 - DNA, 20 bp, Artificial Sequence
  Description of Artificial Sequence: Synthetic oligonucleotide
  Target: LAMA2; (-) strand; PAM type: YTN; PAM sequence: TTA
aatacatctaaggctgggtc

SEQ ID NO: 280338 - DNA, 20 bp, Artificial Sequence
  Description of Artificial Sequence: Synthetic oligonucleotide
  Target: LAMA2; (-) strand; PAM type: YTN; PAM sequence: TTT
aaatacatctaaggctgggt

SEQ ID NO: 280339 - DNA, 20 bp, Artificial Sequence
  Description of Artificial Sequence: Synthetic oligonucleotide
  Target: LAMA2; (-) strand; PAM type: YTN; PAM sequence: TTT
taaatacatctaaggctggg

SEQ ID NO: 280340 - DNA, 20 bp, Artificial Sequence
  Description of Artificial Sequence: Synthetic oligonucleotide
  Target: LAMA2; (-) strand; PAM type: YTN; PAM sequence: CTT
ttaaatacatctaaggctgg

SEQ ID NO: 280341 - DNA, 20 bp, Artificial Sequence
  Description of Artificial Sequence: Synthetic oligonucleotide
  Target: LAMA2; (-) strand; PAM type: YTN; PAM sequence: CTG
aacttttaaatacatctaag

SEQ ID NO: 280342 - DNA, 20 bp, Artificial Sequence
  Description of Artificial Sequence: Synthetic oligonucleotide
  Target: LAMA2; (-) strand; PAM type: YTN; PAM sequence: TTA
tgccctgaacttttaaatac

SEQ ID NO: 280343 - DNA, 20 bp, Artificial Sequence
  Description of Artificial Sequence: Synthetic oligonucleotide
  Target: LAMA2; (-) strand; PAM type: YTN; PAM sequence: TTT
atgccctgaacttttaaata

SEQ ID NO: 280344 - DNA, 20 bp, Artificial Sequence
  Description of Artificial Sequence: Synthetic oligonucleotide
  Target: LAMA2; (-) strand; PAM type: YTN; PAM sequence: TTT
tatgccctgaacttttaaat

SEQ ID NO: 280345 - DNA, 20 bp, Artificial Sequence
  Description of Artificial Sequence: Synthetic oligonucleotide
  Target: LAMA2; (-) strand; PAM type: YTN; PAM sequence: CTA
tcattttatgccctgaactt

SEQ ID NO: 280346 - DNA, 20 bp, Artificial Sequence
  Description of Artificial Sequence: Synthetic oligonucleotide
  Target: LAMA2; (-) strand; PAM type: YTN; PAM sequence: CTG
agacatctatcattttatgc

SEQ ID NO: 280347 - DNA, 20 bp, Artificial Sequence
  Description of Artificial Sequence: Synthetic oligonucleotide
  Target: LAMA2; (-) strand; PAM type: YTN; PAM sequence: CTG
atgacacaaaccctgagaca

SEQ ID NO: 280348 - DNA, 20 bp, Artificial Sequence
  Description of Artificial Sequence: Synthetic oligonucleotide
  Target: LAMA2; (-) strand; PAM type: YTN; PAM sequence: TTC
cgactgatgacacaaaccct

SEQ ID NO: 280349 - DNA, 20 bp, Artificial Sequence
  Description of Artificial Sequence: Synthetic oligonucleotide
  Target: LAMA2; (-) strand; PAM type: YTN; PAM sequence: TTT
ccgactgatgacacaaaccc

SEQ ID NO: 280350 - DNA, 20 bp, Artificial Sequence
  Description of Artificial Sequence: Synthetic oligonucleotide
  Target: LAMA2; (-) strand; PAM type: YTN; PAM sequence: CTG
tgtttccgactgatgacaca

SEQ ID NO: 280351 - DNA, 20 bp, Artificial Sequence
  Description of Artificial Sequence: Synthetic oligonucleotide
  Target: LAMA2; (-) strand; PAM type: YTN; PAM sequence: TTC
tgtgtttccgactgatgaca

SEQ ID NO: 280352 - DNA, 20 bp, Artificial Sequence
  Description of Artificial Sequence: Synthetic oligonucleotide
  Target: LAMA2; (-) strand; PAM type: YTN; PAM sequence: TTC
aaaagagttctgtgtttccg

SEQ ID NO: 280353 - DNA, 20 bp, Artificial Sequence
  Description of Artificial Sequence: Synthetic oligonucleotide
  Target: LAMA2; (-) strand; PAM type: YTN; PAM sequence: TTG
ttcaaaagagttctgtgttt

SEQ ID NO: 280354 - DNA, 20 bp, Artificial Sequence
  Description of Artificial Sequence: Synthetic oligonucleotide
  Target: LAMA2; (-) strand; PAM type: YTN; PAM sequence: TTG
tggcattgttcaaaagagtt

SEQ ID NO: 280355 - DNA, 20 bp, Artificial Sequence
  Description of Artificial Sequence: Synthetic oligonucleotide
  Target: LAMA2; (-) strand; PAM type: YTN; PAM sequence: TTG
cattgtggcattgttcaaaa

SEQ ID NO: 280356 - DNA, 20 bp, Artificial Sequence
  Description of Artificial Sequence: Synthetic oligonucleotide
  Target: LAMA2; (-) strand; PAM type: YTN; PAM sequence: TTA
gattgcattgtggcattgtt

SEQ ID NO: 280357 - DNA, 20 bp, Artificial Sequence
  Description of Artificial Sequence: Synthetic oligonucleotide
  Target: LAMA2; (-) strand; PAM type: YTN; PAM sequence: CTT
agattgcattgtggcattgt

SEQ ID NO: 280358 - DNA, 20 bp, Artificial Sequence
  Description of Artificial Sequence: Synthetic oligonucleotide
  Target: LAMA2; (-) strand; PAM type: YTN; PAM sequence: TTA
gatcaaacttagattgcatt

SEQ ID NO: 280359 - DNA, 20 bp, Artificial Sequence
  Description of Artificial Sequence: Synthetic oligonucleotide
  Target: LAMA2; (-) strand; PAM type: YTN; PAM sequence: TTG
aagaaaattagatcaaactt

SEQ ID NO: 280360 - DNA, 20 bp, Artificial Sequence
  Description of Artificial Sequence: Synthetic oligonucleotide
  Target: LAMA2; (-) strand; PAM type: YTN; PAM sequence: CTT
gaagaaaattagatcaaact

SEQ ID NO: 280361 - DNA, 20 bp, Artificial Sequence
  Description of Artificial Sequence: Synthetic oligonucleotide
  Target: LAMA2; (-) strand; PAM type: YTN; PAM sequence: TTG
tcttgaagaaaattagatca

SEQ ID NO: 280362 - DNA, 20 bp, Artificial Sequence
  Description of Artificial Sequence: Synthetic oligonucleotide
  Target: LAMA2; (-) strand; PAM type: YTN; PAM sequence: TTA
ttgtcttgaagaaaattaga

SEQ ID NO: 280363 - DNA, 20 bp, Artificial Sequence
  Description of Artificial Sequence: Synthetic oligonucleotide
  Target: LAMA2; (-) strand; PAM type: YTN; PAM sequence: CTA
cgggtagaaatcataaagag

SEQ ID NO: 280364 - DNA, 20 bp, Artificial Sequence
  Description of Artificial Sequence: Synthetic oligonucleotide
  Target: LAMA2; (-) strand; PAM type: YTN; PAM sequence: CTA
cctacgggtagaaatcataa

SEQ ID NO: 280365 - DNA, 20 bp, Artificial Sequence
  Description of Artificial Sequence: Synthetic oligonucleotide
  Target: LAMA2; (-) strand; PAM type: YTN; PAM sequence: TTC
tacctacgggtagaaatcat

SEQ ID NO: 280366 - DNA, 20 bp, Artificial Sequence
  Description of Artificial Sequence: Synthetic oligonucleotide
  Target: LAMA2; (-) strand; PAM type: YTN; PAM sequence: TTA
ttctacctacgggtagaaat

SEQ ID NO: 280367 - DNA, 20 bp, Artificial Sequence
  Description of Artificial Sequence: Synthetic oligonucleotide
  Target: LAMA2; (-) strand; PAM type: YTN; PAM sequence: TTG
attattctacctacgggtag

SEQ ID NO: 280368 - DNA, 20 bp, Artificial Sequence
  Description of Artificial Sequence: Synthetic oligonucleotide
  Target: LAMA2; (-) strand; PAM type: YTN; PAM sequence: CTT
gattattctacctacgggta

SEQ ID NO: 280369 - DNA, 20 bp, Artificial Sequence
  Description of Artificial Sequence: Synthetic oligonucleotide
  Target: LAMA2; (-) strand; PAM type: YTN; PAM sequence: CTC
ttgattattctacctacggg

SEQ ID NO: 280370 - DNA, 20 bp, Artificial Sequence
  Description of Artificial Sequence: Synthetic oligonucleotide
  Target: LAMA2; (-) strand; PAM type: YTN; PAM sequence: CTC
acctcttgattattctacct

SEQ ID NO: 280371 - DNA, 20 bp, Artificial Sequence
  Description of Artificial Sequence: Synthetic oligonucleotide
  Target: LAMA2; (-) strand; PAM type: YTN; PAM sequence: TTA
atgtccagaatcaaaaacaa

SEQ ID NO: 280372 - DNA, 20 bp, Artificial Sequence
  Description of Artificial Sequence: Synthetic oligonucleotide
  Target: LAMA2; (-) strand; PAM type: YTN; PAM sequence: CTA
gttaatgtccagaatcaaaa

SEQ ID NO: 280373 - DNA, 20 bp, Artificial Sequence
  Description of Artificial Sequence: Synthetic oligonucleotide
  Target: LAMA2; (-) strand; PAM type: YTN; PAM sequence: CTC
tagttaatgtccagaatcaa

SEQ ID NO: 280374 - DNA, 20 bp, Artificial Sequence
  Description of Artificial Sequence: Synthetic oligonucleotide
  Target: LAMA2; (-) strand; PAM type: YTN; PAM sequence: TTC
cctctagttaatgtccagaa

SEQ ID NO: 280375 - DNA, 20 bp, Artificial Sequence
  Description of Artificial Sequence: Synthetic oligonucleotide
  Target: LAMA2; (-) strand; PAM type: YTN; PAM sequence: TTT
ccctctagttaatgtccaga

SEQ ID NO: 280376 - DNA, 20 bp, Artificial Sequence
  Description of Artificial Sequence: Synthetic oligonucleotide
  Target: LAMA2; (-) strand; PAM type: YTN; PAM sequence: TTT
tccctctagttaatgtccag

SEQ ID NO: 280377 - DNA, 20 bp, Artificial Sequence
  Description of Artificial Sequence: Synthetic oligonucleotide
  Target: LAMA2; (-) strand; PAM type: YTN; PAM sequence: TTC
gaattttccctctagttaat

SEQ ID NO: 280378 - DNA, 20 bp, Artificial Sequence
  Description of Artificial Sequence: Synthetic oligonucleotide
  Target: LAMA2; (-) strand; PAM type: YTN; PAM sequence: CTT
cgaattttccctctagttaa

SEQ ID NO: 280379 - DNA, 20 bp, Artificial Sequence
  Description of Artificial Sequence: Synthetic oligonucleotide
  Target: LAMA2; (-) strand; PAM type: YTN; PAM sequence: TTA
gagggcttcgaattttccct

SEQ ID NO: 280380 - DNA, 20 bp, Artificial Sequence
  Description of Artificial Sequence: Synthetic oligonucleotide
  Target: LAMA2; (-) strand; PAM type: YTN; PAM sequence: CTT
agagggcttcgaattttccc

SEQ ID NO: 280381 - DNA, 20 bp, Artificial Sequence
  Description of Artificial Sequence: Synthetic oligonucleotide
  Target: LAMA2; (-) strand; PAM type: YTN; PAM sequence: TTC
ttagagggcttcgaattttc

SEQ ID NO: 280382 - DNA, 20 bp, Artificial Sequence
  Description of Artificial Sequence: Synthetic oligonucleotide
  Target: LAMA2; (-) strand; PAM type: YTN; PAM sequence: TTA
gataccattcttagagggct

SEQ ID NO: 280383 - DNA, 20 bp, Artificial Sequence
  Description of Artificial Sequence: Synthetic oligonucleotide
  Target: LAMA2; (-) strand; PAM type: YTN; PAM sequence: TTA
agttagataccattcttaga

SEQ ID NO: 280384 - DNA, 20 bp, Artificial Sequence
  Description of Artificial Sequence: Synthetic oligonucleotide
  Target: LAMA2; (-) strand; PAM type: YTN; PAM sequence: CTA
ttaagttagataccattctt

SEQ ID NO: 280385 - DNA, 20 bp, Artificial Sequence
  Description of Artificial Sequence: Synthetic oligonucleotide
  Target: LAMA2; (-) strand; PAM type: YTN; PAM sequence: TTG
agtaaaggtaatggagaggt

SEQ ID NO: 280386 - DNA, 20 bp, Artificial Sequence
  Description of Artificial Sequence: Synthetic oligonucleotide
  Target: LAMA2; (-) strand; PAM type: YTN; PAM sequence: TTT
gagtaaaggtaatggagagg

SEQ ID NO: 280387 - DNA, 20 bp, Artificial Sequence
  Description of Artificial Sequence: Synthetic oligonucleotide
  Target: LAMA2; (-) strand; PAM type: YTN; PAM sequence: TTT
tgagtaaaggtaatggagag

SEQ ID NO: 280388 - DNA, 20 bp, Artificial Sequence
  Description of Artificial Sequence: Synthetic oligonucleotide
  Target: LAMA2; (-) strand; PAM type: YTN; PAM sequence: TTA
gttttgagtaaaggtaatgg

SEQ ID NO: 280389 - DNA, 20 bp, Artificial Sequence
  Description of Artificial Sequence: Synthetic oligonucleotide
  Target: LAMA2; (-) strand; PAM type: YTN; PAM sequence: CTT
agttttgagtaaaggtaatg

SEQ ID NO: 280390 - DNA, 20 bp, Artificial Sequence
  Description of Artificial Sequence: Synthetic oligonucleotide
  Target: LAMA2; (-) strand; PAM type: YTN; PAM sequence: CTA
gaggtggggtgggcccatac

SEQ ID NO: 280391 - DNA, 20 bp, Artificial Sequence
  Description of Artificial Sequence: Synthetic oligonucleotide
  Target: LAMA2; (-) strand; PAM type: YTN; PAM sequence: CTA
ctagaggtggggtgggccca

SEQ ID NO: 280392 - DNA, 20 bp, Artificial Sequence
  Description of Artificial Sequence: Synthetic oligonucleotide
  Target: LAMA2; (-) strand; PAM type: YTN; PAM sequence: CTG
gctactagaggtggggtggg

SEQ ID NO: 280393 - DNA, 20 bp, Artificial Sequence
  Description of Artificial Sequence: Synthetic oligonucleotide
  Target: LAMA2; (-) strand; PAM type: YTN; PAM sequence: CTA
gcagctggctactagaggtg

SEQ ID NO: 280394 - DNA, 20 bp, Artificial Sequence
  Description of Artificial Sequence: Synthetic oligonucleotide
  Target: LAMA2; (-) strand; PAM type: YTN; PAM sequence: CTG
gactagcagctggctactag

SEQ ID NO: 280395 - DNA, 20 bp, Artificial Sequence
  Description of Artificial Sequence: Synthetic oligonucleotide
  Target: LAMA2; (-) strand; PAM type: YTN; PAM sequence: TTC
agtgagacagacactggact

SEQ ID NO: 280396 - DNA, 20 bp, Artificial Sequence
  Description of Artificial Sequence: Synthetic oligonucleotide
  Target: LAMA2; (-) strand; PAM type: YTN; PAM sequence: CTT
cagtgagacagacactggac

SEQ ID NO: 280397 - DNA, 20 bp, Artificial Sequence
  Description of Artificial Sequence: Synthetic oligonucleotide
  Target: LAMA2; (-) strand; PAM type: YTN; PAM sequence: CTG
cttcagtgagacagacactg

SEQ ID NO: 280398 - DNA, 20 bp, Artificial Sequence
  Description of Artificial Sequence: Synthetic oligonucleotide
  Target: LAMA2; (-) strand; PAM type: YTN; PAM sequence: CTA
gactgcttcagtgagacaga

SEQ ID NO: 280399 - DNA, 20 bp, Artificial Sequence
  Description of Artificial Sequence: Synthetic oligonucleotide
  Target: LAMA2; (-) strand; PAM type: YTN; PAM sequence: CTA
tgtgtaccactagactgctt

SEQ ID NO: 280400 - DNA, 20 bp, Artificial Sequence
  Description of Artificial Sequence: Synthetic oligonucleotide
  Target: LAMA2; (-) strand; PAM type: YTN; PAM sequence: CTC
agtacctatgtgtaccacta

SEQ ID NO: 280401 - DNA, 20 bp, Artificial Sequence
  Description of Artificial Sequence: Synthetic oligonucleotide
  Target: LAMA2; (-) strand; PAM type: YTN; PAM sequence: TTG
ctcagtacctatgtgtacca

SEQ ID NO: 280402 - DNA, 20 bp, Artificial Sequence
  Description of Artificial Sequence: Synthetic oligonucleotide
  Target: LAMA2; (-) strand; PAM type: YTN; PAM sequence: TTA
cagcatgacagacataattg

SEQ ID NO: 280403 - DNA, 20 bp, Artificial Sequence
  Description of Artificial Sequence: Synthetic oligonucleotide
  Target: LAMA2; (-) strand; PAM type: YTN; PAM sequence: CTC
aattacagcatgacagacat

SEQ ID NO: 280404 - DNA, 20 bp, Artificial Sequence
  Description of Artificial Sequence: Synthetic oligonucleotide
  Target: LAMA2; (-) strand; PAM type: YTN; PAM sequence: TTC
ctcaattacagcatgacaga

SEQ ID NO: 280405 - DNA, 20 bp, Artificial Sequence
  Description of Artificial Sequence: Synthetic oligonucleotide
  Target: LAMA2; (-) strand; PAM type: YTN; PAM sequence: TTT
cctcaattacagcatgacag

SEQ ID NO: 280406 - DNA, 20 bp, Artificial Sequence
  Description of Artificial Sequence: Synthetic oligonucleotide
  Target: LAMA2; (-) strand; PAM type: YTN; PAM sequence: TTT
tcctcaattacagcatgaca

SEQ ID NO: 280407 - DNA, 20 bp, Artificial Sequence
  Description of Artificial Sequence: Synthetic oligonucleotide
  Target: LAMA2; (-) strand; PAM type: YTN; PAM sequence: TTC
aaaaatataaaatgaagtaa

SEQ ID NO: 280408 - DNA, 20 bp, Artificial Sequence
  Description of Artificial Sequence: Synthetic oligonucleotide
  Target: LAMA2; (-) strand; PAM type: YTN; PAM sequence: TTA
tgggaacaccaagaaggaca

SEQ ID NO: 280409 - DNA, 20 bp, Artificial Sequence
  Description of Artificial Sequence: Synthetic oligonucleotide
  Target: LAMA2; (-) strand; PAM type: YTN; PAM sequence: TTT
atgggaacaccaagaaggac

SEQ ID NO: 280410 - DNA, 20 bp, Artificial Sequence
  Description of Artificial Sequence: Synthetic oligonucleotide
  Target: LAMA2; (-) strand; PAM type: YTN; PAM sequence: CTT
tatgggaacaccaagaagga

SEQ ID NO: 280411 - DNA, 20 bp, Artificial Sequence
  Description of Artificial Sequence: Synthetic oligonucleotide
  Target: LAMA2; (-) strand; PAM type: YTN; PAM sequence: TTA
gctttatgggaacaccaaga

SEQ ID NO: 280412 - DNA, 20 bp, Artificial Sequence
  Description of Artificial Sequence: Synthetic oligonucleotide
  Target: LAMA2; (-) strand; PAM type: YTN; PAM sequence: TTT
agctttatgggaacaccaag

SEQ ID NO: 280413 - DNA, 20 bp, Artificial Sequence
  Description of Artificial Sequence: Synthetic oligonucleotide
  Target: LAMA2; (-) strand; PAM type: YTN; PAM sequence: TTT
tagctttatgggaacaccaa

SEQ ID NO: 280414 - DNA, 20 bp, Artificial Sequence
  Description of Artificial Sequence: Synthetic oligonucleotide
  Target: LAMA2; (-) strand; PAM type: YTN; PAM sequence: TTT
ttagctttatgggaacacca

SEQ ID NO: 280415 - DNA, 20 bp, Artificial Sequence
  Description of Artificial Sequence: Synthetic oligonucleotide
  Target: LAMA2; (-) strand; PAM type: YTN; PAM sequence: TTC
gtgagtgtgaatttttagct

SEQ ID NO: 280416 - DNA, 20 bp, Artificial Sequence
  Description of Artificial Sequence: Synthetic oligonucleotide
  Target: LAMA2; (-) strand; PAM type: YTN; PAM sequence: TTA
aaattcgtgagtgtgaattt

SEQ ID NO: 280417 - DNA, 20 bp, Artificial Sequence
  Description of Artificial Sequence: Synthetic oligonucleotide
  Target: LAMA2; (-) strand; PAM type: YTN; PAM sequence: TTT
aaaattcgtgagtgtgaatt

SEQ ID NO: 280418 - DNA, 20 bp, Artificial Sequence
  Description of Artificial Sequence: Synthetic oligonucleotide
  Target: LAMA2; (-) strand; PAM type: YTN; PAM sequence: CTC
atgataatttaaaattcgtg

SEQ ID NO: 280419 - DNA, 20 bp, Artificial Sequence
  Description of Artificial Sequence: Synthetic oligonucleotide
  Target: LAMA2; (-) strand; PAM type: YTN; PAM sequence: TTG
ctcatgataatttaaaattc

SEQ ID NO: 280420 - DNA, 20 bp, Artificial Sequence
  Description of Artificial Sequence: Synthetic oligonucleotide
  Target: LAMA2; (-) strand; PAM type: YTN; PAM sequence: CTC
agtgataaaataggaaatcc

SEQ ID NO: 280421 - DNA, 20 bp, Artificial Sequence
  Description of Artificial Sequence: Synthetic oligonucleotide
  Target: LAMA2; (-) strand; PAM type: YTN; PAM sequence: CTC
aaaggagactcagtgataaa

SEQ ID NO: 280422 - DNA, 20 bp, Artificial Sequence
  Description of Artificial Sequence: Synthetic oligonucleotide
  Target: LAMA2; (-) strand; PAM type: YTN; PAM sequence: CTG
agcactcaaaggagactcag

SEQ ID NO: 280423 - DNA, 20 bp, Artificial Sequence
  Description of Artificial Sequence: Synthetic oligonucleotide
  Target: LAMA2; (-) strand; PAM type: YTN; PAM sequence: TTG
aaagcagctgagcactcaaa

SEQ ID NO: 280424 - DNA, 20 bp, Artificial Sequence
  Description of Artificial Sequence: Synthetic oligonucleotide
  Target: LAMA2; (-) strand; PAM type: YTN; PAM sequence: CTG
tcaagattgaaagcagctga

SEQ ID NO: 280425 - DNA, 20 bp, Artificial Sequence
  Description of Artificial Sequence: Synthetic oligonucleotide
  Target: LAMA2; (-) strand; PAM type: YTN; PAM sequence: CTA
agggtggtagatgggtcaga

SEQ ID NO: 280426 - DNA, 20 bp, Artificial Sequence
  Description of Artificial Sequence: Synthetic oligonucleotide
  Target: LAMA2; (-) strand; PAM type: YTN; PAM sequence: CTG
gcatcgcatagcatacccta

SEQ ID NO: 280427 - DNA, 20 bp, Artificial Sequence
  Description of Artificial Sequence: Synthetic oligonucleotide
  Target: LAMA2; (-) strand; PAM type: YTN; PAM sequence: CTG
taggtccctggcatcgcata

SEQ ID NO: 280428 - DNA, 20 bp, Artificial Sequence
  Description of Artificial Sequence: Synthetic oligonucleotide
  Target: LAMA2; (-) strand; PAM type: YTN; PAM sequence: TTA
aaaggctgtaggtccctggc

SEQ ID NO: 280429 - DNA, 20 bp, Artificial Sequence
  Description of Artificial Sequence: Synthetic oligonucleotide
  Target: LAMA2; (-) strand; PAM type: YTN; PAM sequence: CTT
aaaaggctgtaggtccctgg

SEQ ID NO: 280430 - DNA, 20 bp, Artificial Sequence
  Description of Artificial Sequence: Synthetic oligonucleotide
  Target: LAMA2; (-) strand; PAM type: YTN; PAM sequence: CTC
ttaaaaggctgtaggtccct

SEQ ID NO: 280431 - DNA, 20 bp, Artificial Sequence
  Description of Artificial Sequence: Synthetic oligonucleotide
  Target: LAMA2; (-) strand; PAM type: YTN; PAM sequence: TTG
gtcaaaaatctcttaaaagg

SEQ ID NO: 280432 - DNA, 20 bp, Artificial Sequence
  Description of Artificial Sequence: Synthetic oligonucleotide
  Target: LAMA2; (-) strand; PAM type: YTN; PAM sequence: TTT
ggtcaaaaatctcttaaaag

SEQ ID NO: 280433 - DNA, 20 bp, Artificial Sequence
  Description of Artificial Sequence: Synthetic oligonucleotide
  Target: LAMA2; (-) strand; PAM type: YTN; PAM sequence: CTT
tggtcaaaaatctcttaaaa

SEQ ID NO: 280434 - DNA, 20 bp, Artificial Sequence
  Description of Artificial Sequence: Synthetic oligonucleotide
  Target: LAMA2; (-) strand; PAM type: YTN; PAM sequence: TTA
aataatgagtaaaaaatgag

SEQ ID NO: 280435 - DNA, 20 bp, Artificial Sequence
  Description of Artificial Sequence: Synthetic oligonucleotide
  Target: LAMA2; (-) strand; PAM type: YTN; PAM sequence: TTA
aaattaaataatgagtaaaa

SEQ ID NO: 280436 - DNA, 20 bp, Artificial Sequence
  Description of Artificial Sequence: Synthetic oligonucleotide
  Target: LAMA2; (-) strand; PAM type: YTN; PAM sequence: TTA
ttaaaattaaataatgagta

SEQ ID NO: 280437 - DNA, 20 bp, Artificial Sequence
  Description of Artificial Sequence: Synthetic oligonucleotide
  Target: LAMA2; (-) strand; PAM type: YTN; PAM sequence: CTA
taggttattaaaattaaata

SEQ ID NO: 280438 - DNA, 20 bp, Artificial Sequence
  Description of Artificial Sequence: Synthetic oligonucleotide
  Target: LAMA2; (-) strand; PAM type: YTN; PAM sequence: TTA
agtactataggttattaaaa

SEQ ID NO: 280439 - DNA, 20 bp, Artificial Sequence
  Description of Artificial Sequence: Synthetic oligonucleotide
  Target: LAMA2; (-) strand; PAM type: YTN; PAM sequence: TTT
aagtactataggttattaaa

SEQ ID NO: 280440 - DNA, 20 bp, Artificial Sequence
  Description of Artificial Sequence: Synthetic oligonucleotide
  Target: LAMA2; (-) strand; PAM type: YTN; PAM sequence: TTT
taagtactataggttattaa

SEQ ID NO: 280441 - DNA, 20 bp, Artificial Sequence
  Description of Artificial Sequence: Synthetic oligonucleotide
  Target: LAMA2; (-) strand; PAM type: YTN; PAM sequence: TTT
ttaagtactataggttatta

SEQ ID NO: 280442 - DNA, 20 bp, Artificial Sequence
  Description of Artificial Sequence: Synthetic oligonucleotide
  Target: LAMA2; (-) strand; PAM type: YTN; PAM sequence: CTG
tacatttttaagtactatag

SEQ ID NO: 280443 - DNA, 20 bp, Artificial Sequence
  Description of Artificial Sequence: Synthetic oligonucleotide
  Target: LAMA2; (-) strand; PAM type: YTN; PAM sequence: TTA
tatagtactgtacattttta

SEQ ID NO: 280444 - DNA, 20 bp, Artificial Sequence
  Description of Artificial Sequence: Synthetic oligonucleotide
  Target: LAMA2; (-) strand; PAM type: YTN; PAM sequence: TTT
atatagtactgtacattttt

SEQ ID NO: 280445 - DNA, 20 bp, Artificial Sequence
  Description of Artificial Sequence: Synthetic oligonucleotide
  Target: LAMA2; (-) strand; PAM type: YTN; PAM sequence: CTT
tatatagtactgtacatttt

SEQ ID NO: 280446 - DNA, 20 bp, Artificial Sequence
  Description of Artificial Sequence: Synthetic oligonucleotide
  Target: LAMA2; (-) strand; PAM type: YTN; PAM sequence: TTA
aggtgctttatatagtactg

SEQ ID NO: 280447 - DNA, 20 bp, Artificial Sequence
  Description of Artificial Sequence: Synthetic oligonucleotide
  Target: LAMA2; (-) strand; PAM type: YTN; PAM sequence: TTT
aaggtgctttatatagtact

SEQ ID NO: 280448 - DNA, 20 bp, Artificial Sequence
  Description of Artificial Sequence: Synthetic oligonucleotide
  Target: LAMA2; (-) strand; PAM type: YTN; PAM sequence: TTT
taaggtgctttatatagtac

SEQ ID NO: 280449 - DNA, 20 bp, Artificial Sequence
  Description of Artificial Sequence: Synthetic oligonucleotide
  Target: LAMA2; (-) strand; PAM type: YTN; PAM sequence: TTT
ttaaggtgctttatatagta

SEQ ID NO: 280450 - DNA, 20 bp, Artificial Sequence
  Description of Artificial Sequence: Synthetic oligonucleotide
  Target: LAMA2; (-) strand; PAM type: YTN; PAM sequence: TTA
aaataagaaaatcaccatgc

SEQ ID NO: 280451 - DNA, 20 bp, Artificial Sequence
  Description of Artificial Sequence: Synthetic oligonucleotide
  Target: LAMA2; (-) strand; PAM type: YTN; PAM sequence: TTT
aaaataagaaaatcaccatg

SEQ ID NO: 280452 - DNA, 20 bp, Artificial Sequence
  Description of Artificial Sequence: Synthetic oligonucleotide
  Target: LAMA2; (-) strand; PAM type: YTN; PAM sequence: TTT
taaaataagaaaatcaccat

SEQ ID NO: 280453 - DNA, 20 bp, Artificial Sequence
  Description of Artificial Sequence: Synthetic oligonucleotide
  Target: LAMA2; (-) strand; PAM type: YTN; PAM sequence: TTA
aaaaatcatacacaatttta

SEQ ID NO: 280454 - DNA, 20 bp, Artificial Sequence
  Description of Artificial Sequence: Synthetic oligonucleotide
  Target: LAMA2; (-) strand; PAM type: YTN; PAM sequence: TTT
aaaaaatcatacacaatttt

SEQ ID NO: 280455 - DNA, 20 bp, Artificial Sequence
  Description of Artificial Sequence: Synthetic oligonucleotide
  Target: LAMA2; (-) strand; PAM type: YTN; PAM sequence: TTA
taataatttaaaaaatcata

SEQ ID NO: 280456 - DNA, 20 bp, Artificial Sequence
  Description of Artificial Sequence: Synthetic oligonucleotide
  Target: LAMA2; (-) strand; PAM type: YTN; PAM sequence: TTT
ataataatttaaaaaatcat

SEQ ID NO: 280457 - DNA, 20 bp, Artificial Sequence
  Description of Artificial Sequence: Synthetic oligonucleotide
  Target: LAMA2; (-) strand; PAM type: YTN; PAM sequence: TTT
tataataatttaaaaaatca

SEQ ID NO: 280458 - DNA, 20 bp, Artificial Sequence
  Description of Artificial Sequence: Synthetic oligonucleotide
  Target: LAMA2; (-) strand; PAM type: YTN; PAM sequence: CTT
ttataataatttaaaaaatc

SEQ ID NO: 280459 - DNA, 20 bp, Artificial Sequence
  Description of Artificial Sequence: Synthetic oligonucleotide
  Target: LAMA2; (-) strand; PAM type: YTN; PAM sequence: CTG
cttttataataatttaaaaa

SEQ ID NO: 280460 - DNA, 20 bp, Artificial Sequence
  Description of Artificial Sequence: Synthetic oligonucleotide
  Target: LAMA2; (-) strand; PAM type: YTN; PAM sequence: CTA
taatagacataagctgcttt

SEQ ID NO: 280461 - DNA, 20 bp, Artificial Sequence
  Description of Artificial Sequence: Synthetic oligonucleotide
  Target: LAMA2; (-) strand; PAM type: YTN; PAM sequence: TTC
tataatagacataagctgct

SEQ ID NO: 280462 - DNA, 20 bp, Artificial Sequence
  Description of Artificial Sequence: Synthetic oligonucleotide
  Target: LAMA2; (-) strand; PAM type: YTN; PAM sequence: TTT
ctataatagacataagctgc

SEQ ID NO: 280463 - DNA, 20 bp, Artificial Sequence
  Description of Artificial Sequence: Synthetic oligonucleotide
  Target: LAMA2; (-) strand; PAM type: YTN; PAM sequence: TTT
tctataatagacataagctg

SEQ ID NO: 280464 - DNA, 20 bp, Artificial Sequence
  Description of Artificial Sequence: Synthetic oligonucleotide
  Target: LAMA2; (-) strand; PAM type: YTN; PAM sequence: CTA
ttttctataatagacataag

SEQ ID NO: 280465 - DNA, 20 bp, Artificial Sequence
  Description of Artificial Sequence: Synthetic oligonucleotide
  Target: LAMA2; (-) strand; PAM type: YTN; PAM sequence: TTC
ctattttctataatagacat

SEQ ID NO: 280466 - DNA, 20 bp, Artificial Sequence
  Description of Artificial Sequence: Synthetic oligonucleotide
  Target: LAMA2; (-) strand; PAM type: YTN; PAM sequence: TTT
cctattttctataatagaca

SEQ ID NO: 280467 - DNA, 20 bp, Artificial Sequence
  Description of Artificial Sequence: Synthetic oligonucleotide
  Target: LAMA2; (-) strand; PAM type: YTN; PAM sequence: CTG
tatttcctattttctataat

SEQ ID NO: 280468 - DNA, 20 bp, Artificial Sequence
  Description of Artificial Sequence: Synthetic oligonucleotide
  Target: LAMA2; (-) strand; PAM type: YTN; PAM sequence: TTC
tgtatttcctattttctata

SEQ ID NO: 280469 - DNA, 20 bp, Artificial Sequence
  Description of Artificial Sequence: Synthetic oligonucleotide
  Target: LAMA2; (-) strand; PAM type: YTN; PAM sequence: TTT
ctgtatttcctattttctat

SEQ ID NO: 280470 - DNA, 20 bp, Artificial Sequence
  Description of Artificial Sequence: Synthetic oligonucleotide
  Target: LAMA2; (-) strand; PAM type: YTN; PAM sequence: TTT
tctgtatttcctattttcta

SEQ ID NO: 280471 - DNA, 20 bp, Artificial Sequence
  Description of Artificial Sequence: Synthetic oligonucleotide
  Target: LAMA2; (-) strand; PAM type: YTN; PAM sequence: CTT
ttctgtatttcctattttct

SEQ ID NO: 280472 - DNA, 20 bp, Artificial Sequence
  Description of Artificial Sequence: Synthetic oligonucleotide
  Target: LAMA2; (-) strand; PAM type: YTN; PAM sequence: TTG
cttttctgtatttcctattt

SEQ ID NO: 280473 - DNA, 20 bp, Artificial Sequence
  Description of Artificial Sequence: Synthetic oligonucleotide
  Target: LAMA2; (-) strand; PAM type: YTN; PAM sequence: CTT
gcttttctgtatttcctatt

SEQ ID NO: 280474 - DNA, 20 bp, Artificial Sequence
  Description of Artificial Sequence: Synthetic oligonucleotide
  Target: LAMA2; (-) strand; PAM type: YTN; PAM sequence: TTC
ttgcttttctgtatttccta

SEQ ID NO: 280475 - DNA, 20 bp, Artificial Sequence
  Description of Artificial Sequence: Synthetic oligonucleotide
  Target: LAMA2; (-) strand; PAM type: YTN; PAM sequence: CTT
cttgcttttctgtatttcct

SEQ ID NO: 280476 - DNA, 20 bp, Artificial Sequence
  Description of Artificial Sequence: Synthetic oligonucleotide
  Target: LAMA2; (-) strand; PAM type: YTN; PAM sequence: TTC
ttcttgcttttctgtatttc

SEQ ID NO: 280477 - DNA, 20 bp, Artificial Sequence
  Description of Artificial Sequence: Synthetic oligonucleotide
  Target: LAMA2; (-) strand; PAM type: YTN; PAM sequence: CTT
cttcttgcttttctgtattt

SEQ ID NO: 280478 - DNA, 20 bp, Artificial Sequence
  Description of Artificial Sequence: Synthetic oligonucleotide
  Target: LAMA2; (-) strand; PAM type: YTN; PAM sequence: TTC
ttcttcttgcttttctgtat

SEQ ID NO: 280479 - DNA, 20 bp, Artificial Sequence
  Description of Artificial Sequence: Synthetic oligonucleotide
  Target: LAMA2; (-) strand; PAM type: YTN; PAM sequence: TTT
cttcttcttgcttttctgta

SEQ ID NO: 280480 - DNA, 20 bp, Artificial Sequence
  Description of Artificial Sequence: Synthetic oligonucleotide
  Target: LAMA2; (-) strand; PAM type: YTN; PAM sequence: TTT
tcttcttcttgcttttctgt

SEQ ID NO: 280481 - DNA, 20 bp, Artificial Sequence
  Description of Artificial Sequence: Synthetic oligonucleotide
  Target: LAMA2; (-) strand; PAM type: YTN; PAM sequence: TTA
tattttcttcttcttgcttt

SEQ ID NO: 280482 - DNA, 20 bp, Artificial Sequence
  Description of Artificial Sequence: Synthetic oligonucleotide
  Target: LAMA2; (-) strand; PAM type: YTN; PAM sequence: TTT
atattttcttcttcttgctt

SEQ ID NO: 280483 - DNA, 20 bp, Artificial Sequence
  Description of Artificial Sequence: Synthetic oligonucleotide
  Target: LAMA2; (-) strand; PAM type: YTN; PAM sequence: TTT
tatattttcttcttcttgct

SEQ ID NO: 280484 - DNA, 20 bp, Artificial Sequence
  Description of Artificial Sequence: Synthetic oligonucleotide
  Target: LAMA2; (-) strand; PAM type: YTN; PAM sequence: CTC
gtatgcacattttatatttt

SEQ ID NO: 280485 - DNA, 20 bp, Artificial Sequence
  Description of Artificial Sequence: Synthetic oligonucleotide
  Target: LAMA2; (-) strand; PAM type: YTN; PAM sequence: TTA
ctcgtatgcacattttatat

SEQ ID NO: 280486 - DNA, 20 bp, Artificial Sequence
  Description of Artificial Sequence: Synthetic oligonucleotide
  Target: LAMA2; (-) strand; PAM type: YTN; PAM sequence: TTA
caaaagtaattactcgtatg

SEQ ID NO: 280487 - DNA, 20 bp, Artificial Sequence
  Description of Artificial Sequence: Synthetic oligonucleotide
  Target: LAMA2; (-) strand; PAM type: YTN; PAM sequence: TTG
cataggaaaagatatgagta

SEQ ID NO: 280488 - DNA, 20 bp, Artificial Sequence
  Description of Artificial Sequence: Synthetic oligonucleotide
  Target: LAMA2; (-) strand; PAM type: YTN; PAM sequence: TTT
gcataggaaaagatatgagt

SEQ ID NO: 280489 - DNA, 20 bp, Artificial Sequence
  Description of Artificial Sequence: Synthetic oligonucleotide
  Target: LAMA2; (-) strand; PAM type: YTN; PAM sequence: CTA
tttgcataggaaaagatatg

SEQ ID NO: 280490 - DNA, 20 bp, Artificial Sequence
  Description of Artificial Sequence: Synthetic oligonucleotide
  Target: LAMA2; (-) strand; PAM type: YTN; PAM sequence: TTG
tagaaaaactatttgcatag

SEQ ID NO: 280491 - DNA, 20 bp, Artificial Sequence
  Description of Artificial Sequence: Synthetic oligonucleotide
  Target: LAMA2; (-) strand; PAM type: YTN; PAM sequence: TTT
gtagaaaaactatttgcata

SEQ ID NO: 280492 - DNA, 20 bp, Artificial Sequence
  Description of Artificial Sequence: Synthetic oligonucleotide
  Target: LAMA2; (-) strand; PAM type: YTN; PAM sequence: TTA
tataaatatcacccatttgt

SEQ ID NO: 280493 - DNA, 20 bp, Artificial Sequence
  Description of Artificial Sequence: Synthetic oligonucleotide
  Target: LAMA2; (-) strand; PAM type: YTN; PAM sequence: TTA
tgaaacagttatataaatat

SEQ ID NO: 280494 - DNA, 20 bp, Artificial Sequence
  Description of Artificial Sequence: Synthetic oligonucleotide
  Target: LAMA2; (-) strand; PAM type: YTN; PAM sequence: TTC
ccatagtaagttatgaaaca

SEQ ID NO: 280495 - DNA, 20 bp, Artificial Sequence
  Description of Artificial Sequence: Synthetic oligonucleotide
  Target: LAMA2; (-) strand; PAM type: YTN; PAM sequence: TTC
attcccatagtaagttatga

SEQ ID NO: 280496 - DNA, 20 bp, Artificial Sequence
  Description of Artificial Sequence: Synthetic oligonucleotide
  Target: LAMA2; (-) strand; PAM type: YTN; PAM sequence: TTA
aaatacgtatgtgatgttca

SEQ ID NO: 280497 - DNA, 20 bp, Artificial Sequence
  Description of Artificial Sequence: Synthetic oligonucleotide
  Target: LAMA2; (-) strand; PAM type: YTN; PAM sequence: TTT
aaaatacgtatgtgatgttc

SEQ ID NO: 280498 - DNA, 20 bp, Artificial Sequence
  Description of Artificial Sequence: Synthetic oligonucleotide
  Target: LAMA2; (-) strand; PAM type: YTN; PAM sequence: TTT
taaaatacgtatgtgatgtt

SEQ ID NO: 280499 - DNA, 20 bp, Artificial Sequence
  Description of Artificial Sequence: Synthetic oligonucleotide
  Target: LAMA2; (-) strand; PAM type: YTN; PAM sequence: TTT
ttaaaatacgtatgtgatgt

SEQ ID NO: 280500 - DNA, 20 bp, Artificial Sequence
  Description of Artificial Sequence: Synthetic oligonucleotide
  Target: LAMA2; (-) strand; PAM type: YTN; PAM sequence: TTT
tttaaaatacgtatgtgatg

SEQ ID NO: 280501 - DNA, 20 bp, Artificial Sequence
  Description of Artificial Sequence: Synthetic oligonucleotide
  Target: LAMA2; (-) strand; PAM type: YTN; PAM sequence: TTG
agaatattttttaaaatacg

SEQ ID NO: 280502 - DNA, 20 bp, Artificial Sequence
  Description of Artificial Sequence: Synthetic oligonucleotide
  Target: LAMA2; (-) strand; PAM type: YTN; PAM sequence: TTT
gagaatattttttaaaatac

SEQ ID NO: 280503 - DNA, 20 bp, Artificial Sequence
  Description of Artificial Sequence: Synthetic oligonucleotide
  Target: LAMA2; (-) strand; PAM type: YTN; PAM sequence: TTT
tgagaatattttttaaaata

SEQ ID NO: 280504 - DNA, 20 bp, Artificial Sequence
  Description of Artificial Sequence: Synthetic oligonucleotide
  Target: LAMA2; (-) strand; PAM type: YTN; PAM sequence: TTT
ttgagaatattttttaaaat

SEQ ID NO: 280505 - DNA, 20 bp, Artificial Sequence
  Description of Artificial Sequence: Synthetic oligonucleotide
  Target: LAMA2; (-) strand; PAM type: YTN; PAM sequence: TTA
aaaatatatttttgagaata

SEQ ID NO: 280506 - DNA, 20 bp, Artificial Sequence
  Description of Artificial Sequence: Synthetic oligonucleotide
  Target: LAMA2; (-) strand; PAM type: YTN; PAM sequence: TTT
aaaaatatatttttgagaat

SEQ ID NO: 280507 - DNA, 20 bp, Artificial Sequence
  Description of Artificial Sequence: Synthetic oligonucleotide
  Target: LAMA2; (-) strand; PAM type: YTN; PAM sequence: TTT
taaaaatatatttttgagaa

SEQ ID NO: 280508 - DNA, 20 bp, Artificial Sequence
  Description of Artificial Sequence: Synthetic oligonucleotide
  Target: LAMA2; (-) strand; PAM type: YTN; PAM sequence: TTC
aatatacattttaaaaatat

SEQ ID NO: 280509 - DNA, 20 bp, Artificial Sequence
  Description of Artificial Sequence: Synthetic oligonucleotide
  Target: LAMA2; (-) strand; PAM type: YTN; PAM sequence: CTA
gttcaatatacattttaaaa

SEQ ID NO: 280510 - DNA, 20 bp, Artificial Sequence
  Description of Artificial Sequence: Synthetic oligonucleotide
  Target: LAMA2; (-) strand; PAM type: YTN; PAM sequence: CTC
agaatctagttcaatataca

SEQ ID NO: 280511 - DNA, 20 bp, Artificial Sequence
  Description of Artificial Sequence: Synthetic oligonucleotide
  Target: LAMA2; (-) strand; PAM type: YTN; PAM sequence: TTC
tcagaatctagttcaatata

SEQ ID NO: 280512 - DNA, 20 bp, Artificial Sequence
  Description of Artificial Sequence: Synthetic oligonucleotide
  Target: LAMA2; (-) strand; PAM type: YTN; PAM sequence: CTA
taataatgatgtaaattctc

SEQ ID NO: 280513 - DNA, 20 bp, Artificial Sequence
  Description of Artificial Sequence: Synthetic oligonucleotide
  Target: LAMA2; (-) strand; PAM type: YTN; PAM sequence: TTA
ctataataatgatgtaaatt

SEQ ID NO: 280514 - DNA, 20 bp, Artificial Sequence
  Description of Artificial Sequence: Synthetic oligonucleotide
  Target: LAMA2; (-) strand; PAM type: YTN; PAM sequence: CTT
actataataatgatgtaaat

SEQ ID NO: 280515 - DNA, 20 bp, Artificial Sequence
  Description of Artificial Sequence: Synthetic oligonucleotide
  Target: LAMA2; (-) strand; PAM type: YTN; PAM sequence: TTC
ttactataataatgatgtaa

SEQ ID NO: 280516 - DNA, 20 bp, Artificial Sequence
  Description of Artificial Sequence: Synthetic oligonucleotide
  Target: LAMA2; (-) strand; PAM type: YTN; PAM sequence: CTA
tgaatcaaaatcaaggataa

SEQ ID NO: 280517 - DNA, 20 bp, Artificial Sequence
  Description of Artificial Sequence: Synthetic oligonucleotide
  Target: LAMA2; (-) strand; PAM type: YTN; PAM sequence: TTA
gactatgaatcaaaatcaag

SEQ ID NO: 280518 - DNA, 20 bp, Artificial Sequence
  Description of Artificial Sequence: Synthetic oligonucleotide
  Target: LAMA2; (-) strand; PAM type: YTN; PAM sequence: TTG
gtatgttagactatgaatca

SEQ ID NO: 280519 - DNA, 20 bp, Artificial Sequence
  Description of Artificial Sequence: Synthetic oligonucleotide
  Target: LAMA2; (-) strand; PAM type: YTN; PAM sequence: TTT
ggtatgttagactatgaatc

SEQ ID NO: 280520 - DNA, 20 bp, Artificial Sequence
  Description of Artificial Sequence: Synthetic oligonucleotide
  Target: LAMA2; (-) strand; PAM type: YTN; PAM sequence: TTA
gagtttggtatgttagacta

SEQ ID NO: 280521 - DNA, 20 bp, Artificial Sequence
  Description of Artificial Sequence: Synthetic oligonucleotide
  Target: LAMA2; (-) strand; PAM type: YTN; PAM sequence: TTT
agagtttggtatgttagact

SEQ ID NO: 280522 - DNA, 20 bp, Artificial Sequence
  Description of Artificial Sequence: Synthetic oligonucleotide
  Target: LAMA2; (-) strand; PAM type: YTN; PAM sequence: TTA
tgtaaagtgagtaacagaag

SEQ ID NO: 280523 - DNA, 20 bp, Artificial Sequence
  Description of Artificial Sequence: Synthetic oligonucleotide
  Target: LAMA2; (-) strand; PAM type: YTN; PAM sequence: TTT
atgtaaagtgagtaacagaa

SEQ ID NO: 280524 - DNA, 20 bp, Artificial Sequence
  Description of Artificial Sequence: Synthetic oligonucleotide
  Target: LAMA2; (-) strand; PAM type: YTN; PAM sequence: CTG
caatgtgtttatgtaaagtg

SEQ ID NO: 280525 - DNA, 20 bp, Artificial Sequence
  Description of Artificial Sequence: Synthetic oligonucleotide
  Target: LAMA2; (-) strand; PAM type: YTN; PAM sequence: CTG
gctgcaatgtgtttatgtaa

SEQ ID NO: 280526 - DNA, 20 bp, Artificial Sequence
  Description of Artificial Sequence: Synthetic oligonucleotide
  Target: LAMA2; (-) strand; PAM type: YTN; PAM sequence: TTG
gtgactggctgcaatgtgtt

SEQ ID NO: 280527 - DNA, 20 bp, Artificial Sequence
  Description of Artificial Sequence: Synthetic oligonucleotide
  Target: LAMA2; (-) strand; PAM type: YTN; PAM sequence: CTG
tgcagggatatatgtaaggg

SEQ ID NO: 280528 - DNA, 20 bp, Artificial Sequence
  Description of Artificial Sequence: Synthetic oligonucleotide
  Target: LAMA2; (-) strand; PAM type: YTN; PAM sequence: CTC
aaactgtgcagggatatatg

SEQ ID NO: 280529 - DNA, 20 bp, Artificial Sequence
  Description of Artificial Sequence: Synthetic oligonucleotide
  Target: LAMA2; (-) strand; PAM type: YTN; PAM sequence: CTG
ctcaaactgtgcagggatat

SEQ ID NO: 280530 - DNA, 20 bp, Artificial Sequence
  Description of Artificial Sequence: Synthetic oligonucleotide
  Target: LAMA2; (-) strand; PAM type: YTN; PAM sequence: TTC
aataaagaaaactgctcaaa

SEQ ID NO: 280531 - DNA, 20 bp, Artificial Sequence
  Description of Artificial Sequence: Synthetic oligonucleotide
  Target: LAMA2; (-) strand; PAM type: YTN; PAM sequence: TTT
caataaagaaaactgctcaa

SEQ ID NO: 280532 - DNA, 20 bp, Artificial Sequence
  Description of Artificial Sequence: Synthetic oligonucleotide
  Target: LAMA2; (-) strand; PAM type: YTN; PAM sequence: TTT
tcaataaagaaaactgctca

SEQ ID NO: 280533 - DNA, 20 bp, Artificial Sequence
  Description of Artificial Sequence: Synthetic oligonucleotide
  Target: LAMA2; (-) strand; PAM type: YTN; PAM sequence: TTA
aaaatattttcaataaagaa

SEQ ID NO: 280534 - DNA, 20 bp, Artificial Sequence
  Description of Artificial Sequence: Synthetic oligonucleotide
  Target: LAMA2; (-) strand; PAM type: YTN; PAM sequence: TTA
aattaaaaatattttcaata

SEQ ID NO: 280535 - DNA, 20 bp, Artificial Sequence
  Description of Artificial Sequence: Synthetic oligonucleotide
  Target: LAMA2; (-) strand; PAM type: YTN; PAM sequence: TTT
aaattaaaaatattttcaat

SEQ ID NO: 280536 - DNA, 20 bp, Artificial Sequence
  Description of Artificial Sequence: Synthetic oligonucleotide
  Target: LAMA2; (-) strand; PAM type: YTN; PAM sequence: TTT
taaattaaaaatattttcaa

SEQ ID NO: 280537 - DNA, 20 bp, Artificial Sequence
  Description of Artificial Sequence: Synthetic oligonucleotide
  Target: LAMA2; (-) strand; PAM type: YTN; PAM sequence: TTA
aaatgattttaaattaaaaa

SEQ ID NO: 280538 - DNA, 20 bp, Artificial Sequence
  Description of Artificial Sequence: Synthetic oligonucleotide
  Target: LAMA2; (-) strand; PAM type: YTN; PAM sequence: CTT
aaaatgattttaaattaaaa

SEQ ID NO: 280539 - DNA, 20 bp, Artificial Sequence
  Description of Artificial Sequence: Synthetic oligonucleotide
  Target: LAMA2; (-) strand; PAM type: YTN; PAM sequence: TTA
atgtgccaagataatataaa

SEQ ID NO: 280540 - DNA, 20 bp, Artificial Sequence
  Description of Artificial Sequence: Synthetic oligonucleotide
  Target: LAMA2; (-) strand; PAM type: YTN; PAM sequence: TTC
cacaggggttaatgtgccaa

SEQ ID NO: 280541 - DNA, 20 bp, Artificial Sequence
  Description of Artificial Sequence: Synthetic oligonucleotide
  Target: LAMA2; (-) strand; PAM type: YTN; PAM sequence: TTT
ccacaggggttaatgtgcca

SEQ ID NO: 280542 - DNA, 20 bp, Artificial Sequence
  Description of Artificial Sequence: Synthetic oligonucleotide
  Target: LAMA2; (-) strand; PAM type: YTN; PAM sequence: TTA
cacatttccacaggggttaa

SEQ ID NO: 280543 - DNA, 20 bp, Artificial Sequence
  Description of Artificial Sequence: Synthetic oligonucleotide
  Target: LAMA2; (-) strand; PAM type: YTN; PAM sequence: CTT
acacatttccacaggggtta

SEQ ID NO: 280544 - DNA, 20 bp, Artificial Sequence
  Description of Artificial Sequence: Synthetic oligonucleotide
  Target: LAMA2; (-) strand; PAM type: YTN; PAM sequence: TTA
gaagagaagtcttacacatt

SEQ ID NO: 280545 - DNA, 20 bp, Artificial Sequence
  Description of Artificial Sequence: Synthetic oligonucleotide
  Target: LAMA2; (-) strand; PAM type: YTN; PAM sequence: TTT
agaagagaagtcttacacat

SEQ ID NO: 280546 - DNA, 20 bp, Artificial Sequence
  Description of Artificial Sequence: Synthetic oligonucleotide
  Target: LAMA2; (-) strand; PAM type: YTN; PAM sequence: TTT
tagaagagaagtcttacaca

SEQ ID NO: 280547 - DNA, 20 bp, Artificial Sequence
  Description of Artificial Sequence: Synthetic oligonucleotide
  Target: LAMA2; (-) strand; PAM type: YTN; PAM sequence: TTA
ttttagaagagaagtcttac

SEQ ID NO: 280548 - DNA, 20 bp, Artificial Sequence
  Description of Artificial Sequence: Synthetic oligonucleotide
  Target: LAMA2; (-) strand; PAM type: YTN; PAM sequence: TTT
attttagaagagaagtctta

SEQ ID NO: 280549 - DNA, 20 bp, Artificial Sequence
  Description of Artificial Sequence: Synthetic oligonucleotide
  Target: LAMA2; (-) strand; PAM type: YTN; PAM sequence: TTA
tgaaataatttattttagaa

SEQ ID NO: 280550 - DNA, 20 bp, Artificial Sequence
  Description of Artificial Sequence: Synthetic oligonucleotide
  Target: LAMA2; (-) strand; PAM type: YTN; PAM sequence: TTT
atgaaataatttattttaga

SEQ ID NO: 280551 - DNA, 20 bp, Artificial Sequence
  Description of Artificial Sequence: Synthetic oligonucleotide
  Target: LAMA2; (-) strand; PAM type: YTN; PAM sequence: CTT
tatgaaataatttattttag

SEQ ID NO: 280552 - DNA, 20 bp, Artificial Sequence
  Description of Artificial Sequence: Synthetic oligonucleotide
  Target: LAMA2; (-) strand; PAM type: YTN; PAM sequence: CTC
tttatgaaataatttatttt

SEQ ID NO: 280553 - DNA, 20 bp, Artificial Sequence
  Description of Artificial Sequence: Synthetic oligonucleotide
  Target: LAMA2; (-) strand; PAM type: YTN; PAM sequence: CTC
tctttatgaaataatttatt

SEQ ID NO: 280554 - DNA, 20 bp, Artificial Sequence
  Description of Artificial Sequence: Synthetic oligonucleotide
  Target: LAMA2; (-) strand; PAM type: YTN; PAM sequence: CTC
tctctttatgaaataattta

SEQ ID NO: 280555 - DNA, 20 bp, Artificial Sequence
  Description of Artificial Sequence: Synthetic oligonucleotide
  Target: LAMA2; (-) strand; PAM type: YTN; PAM sequence: CTC
tctctctttatgaaataatt

SEQ ID NO: 280556 - DNA, 20 bp, Artificial Sequence
  Description of Artificial Sequence: Synthetic oligonucleotide
  Target: LAMA2; (-) strand; PAM type: YTN; PAM sequence: TTA
ctctctctctttatgaaata

SEQ ID NO: 280557 - DNA, 20 bp, Artificial Sequence
  Description of Artificial Sequence: Synthetic oligonucleotide
  Target: LAMA2; (-) strand; PAM type: YTN; PAM sequence: CTA
ttactctctctctttatgaa

SEQ ID NO: 280558 - DNA, 20 bp, Artificial Sequence
  Description of Artificial Sequence: Synthetic oligonucleotide
  Target: LAMA2; (-) strand; PAM type: YTN; PAM sequence: TTC
tattactctctctctttatg

SEQ ID NO: 280559 - DNA, 20 bp, Artificial Sequence
  Description of Artificial Sequence: Synthetic oligonucleotide
  Target: LAMA2; (-) strand; PAM type: YTN; PAM sequence: TTA
ttctattactctctctcttt

SEQ ID NO: 280560 - DNA, 20 bp, Artificial Sequence
  Description of Artificial Sequence: Synthetic oligonucleotide
  Target: LAMA2; (-) strand; PAM type: YTN; PAM sequence: CTT
attctattactctctctctt

SEQ ID NO: 280561 - DNA, 20 bp, Artificial Sequence
  Description of Artificial Sequence: Synthetic oligonucleotide
  Target: LAMA2; (-) strand; PAM type: YTN; PAM sequence: TTA
tgacttattctattactctc

SEQ ID NO: 280562 - DNA, 20 bp, Artificial Sequence
  Description of Artificial Sequence: Synthetic oligonucleotide
  Target: LAMA2; (-) strand; PAM type: YTN; PAM sequence: TTT
atgacttattctattactct

SEQ ID NO: 280563 - DNA, 20 bp, Artificial Sequence
  Description of Artificial Sequence: Synthetic oligonucleotide
  Target: LAMA2; (-) strand; PAM type: YTN; PAM sequence: TTC
atcagcatggtttatgactt

SEQ ID NO: 280564 - DNA, 20 bp, Artificial Sequence
  Description of Artificial Sequence: Synthetic oligonucleotide
  Target: LAMA2; (-) strand; PAM type: YTN; PAM sequence: CTA
aaaattcatcagcatggttt

SEQ ID NO: 280565 - DNA, 20 bp, Artificial Sequence
  Description of Artificial Sequence: Synthetic oligonucleotide
  Target: LAMA2; (-) strand; PAM type: YTN; PAM sequence: TTA
aagacagtagtaactaaaaa

SEQ ID NO: 280566 - DNA, 20 bp, Artificial Sequence
  Description of Artificial Sequence: Synthetic oligonucleotide
  Target: LAMA2; (-) strand; PAM type: YTN; PAM sequence: TTT
aaagacagtagtaactaaaa

SEQ ID NO: 280567 - DNA, 20 bp, Artificial Sequence
  Description of Artificial Sequence: Synthetic oligonucleotide
  Target: LAMA2; (-) strand; PAM type: YTN; PAM sequence: TTT
taaagacagtagtaactaaa

SEQ ID NO: 280568 - DNA, 20 bp, Artificial Sequence
  Description of Artificial Sequence: Synthetic oligonucleotide
  Target: LAMA2; (-) strand; PAM type: YTN; PAM sequence: TTT
ttaaagacagtagtaactaa

SEQ ID NO: 280569 - DNA, 20 bp, Artificial Sequence
  Description of Artificial Sequence: Synthetic oligonucleotide
  Target: LAMA2; (-) strand; PAM type: YTN; PAM sequence: CTT
tttaaagacagtagtaacta

SEQ ID NO: 280570 - DNA, 20 bp, Artificial Sequence
  Description of Artificial Sequence: Synthetic oligonucleotide
  Target: LAMA2; (-) strand; PAM type: YTN; PAM sequence: TTA
ctttttaaagacagtagtaa

SEQ ID NO: 280571 - DNA, 20 bp, Artificial Sequence
  Description of Artificial Sequence: Synthetic oligonucleotide
  Target: LAMA2; (-) strand; PAM type: YTN; PAM sequence: TTT
actttttaaagacagtagta

SEQ ID NO: 280572 - DNA, 20 bp, Artificial Sequence
  Description of Artificial Sequence: Synthetic oligonucleotide
  Target: LAMA2; (-) strand; PAM type: YTN; PAM sequence: TTG
tttactttttaaagacagta

SEQ ID NO: 280573 - DNA, 20 bp, Artificial Sequence
  Description of Artificial Sequence: Synthetic oligonucleotide
  Target: LAMA2; (-) strand; PAM type: YTN; PAM sequence: TTT
gtttactttttaaagacagt

SEQ ID NO: 280574 - DNA, 20 bp, Artificial Sequence
  Description of Artificial Sequence: Synthetic oligonucleotide
  Target: LAMA2; (-) strand; PAM type: YTN; PAM sequence: TTT
tgtttactttttaaagacag

SEQ ID NO: 280575 - DNA, 20 bp, Artificial Sequence
  Description of Artificial Sequence: Synthetic oligonucleotide
  Target: LAMA2; (-) strand; PAM type: YTN; PAM sequence: TTT
ttgtttactttttaaagaca

SEQ ID NO: 280576 - DNA, 20 bp, Artificial Sequence
  Description of Artificial Sequence: Synthetic oligonucleotide
  Target: LAMA2; (-) strand; PAM type: YTN; PAM sequence: TTT
tttgtttactttttaaagac

SEQ ID NO: 280577 - DNA, 20 bp, Artificial Sequence
  Description of Artificial Sequence: Synthetic oligonucleotide
  Target: LAMA2; (-) strand; PAM type: YTN; PAM sequence: TTT
ttttgtttactttttaaaga

SEQ ID NO: 280578 - DNA, 20 bp, Artificial Sequence
  Description of Artificial Sequence: Synthetic oligonucleotide
  Target: LAMA2; (-) strand; PAM type: YTN; PAM sequence: CTG
tttttttgtttactttttaa

SEQ ID NO: 280579 - DNA, 20 bp, Artificial Sequence
  Description of Artificial Sequence: Synthetic oligonucleotide
  Target: LAMA2; (-) strand; PAM type: YTN; PAM sequence: TTC
tgtttttttgtttacttttt

SEQ ID NO: 280580 - DNA, 20 bp, Artificial Sequence
  Description of Artificial Sequence: Synthetic oligonucleotide
  Target: LAMA2; (-) strand; PAM type: YTN; PAM sequence: TTT
ctgtttttttgtttactttt

SEQ ID NO: 280581 - DNA, 20 bp, Artificial Sequence
  Description of Artificial Sequence: Synthetic oligonucleotide
  Target: LAMA2; (-) strand; PAM type: YTN; PAM sequence: TTT
tctgtttttttgtttacttt

SEQ ID NO: 280582 - DNA, 20 bp, Artificial Sequence
  Description of Artificial Sequence: Synthetic oligonucleotide
  Target: LAMA2; (-) strand; PAM type: YTN; PAM sequence: TTA
ttttctgtttttttgtttac

SEQ ID NO: 280583 - DNA, 20 bp, Artificial Sequence
  Description of Artificial Sequence: Synthetic oligonucleotide
  Target: LAMA2; (-) strand; PAM type: YTN; PAM sequence: TTT
attttctgtttttttgttta

SEQ ID NO: 280584 - DNA, 20 bp, Artificial Sequence
  Description of Artificial Sequence: Synthetic oligonucleotide
  Target: LAMA2; (-) strand; PAM type: YTN; PAM sequence: CTG
taaaagatgtaaaatattta

SEQ ID NO: 280585 - DNA, 20 bp, Artificial Sequence
  Description of Artificial Sequence: Synthetic oligonucleotide
  Target: LAMA2; (-) strand; PAM type: YTN; PAM sequence: TTG
gctgtaaaagatgtaaaata

SEQ ID NO: 280586 - DNA, 20 bp, Artificial Sequence
  Description of Artificial Sequence: Synthetic oligonucleotide
  Target: LAMA2; (-) strand; PAM type: YTN; PAM sequence: TTG
aaagagttggctgtaaaaga

SEQ ID NO: 280587 - DNA, 20 bp, Artificial Sequence
  Description of Artificial Sequence: Synthetic oligonucleotide
  Target: LAMA2; (-) strand; PAM type: YTN; PAM sequence: CTC
attgaaagagttggctgtaa

SEQ ID NO: 280588 - DNA, 20 bp, Artificial Sequence
  Description of Artificial Sequence: Synthetic oligonucleotide
  Target: LAMA2; (-) strand; PAM type: YTN; PAM sequence: TTG
aactcattgaaagagttggc

SEQ ID NO: 280589 - DNA, 20 bp, Artificial Sequence
  Description of Artificial Sequence: Synthetic oligonucleotide
  Target: LAMA2; (-) strand; PAM type: YTN; PAM sequence: TTT
gaactcattgaaagagttgg

SEQ ID NO: 280590 - DNA, 20 bp, Artificial Sequence
  Description of Artificial Sequence: Synthetic oligonucleotide
  Target: LAMA2; (-) strand; PAM type: YTN; PAM sequence: TTT
tgaactcattgaaagagttg

SEQ ID NO: 280591 - DNA, 20 bp, Artificial Sequence
  Description of Artificial Sequence: Synthetic oligonucleotide
  Target: LAMA2; (-) strand; PAM type: YTN; PAM sequence: TTT
ttgaactcattgaaagagtt

SEQ ID NO: 280592 - DNA, 20 bp, Artificial Sequence
  Description of Artificial Sequence: Synthetic oligonucleotide
  Target: LAMA2; (-) strand; PAM type: YTN; PAM sequence: TTA
gagatgaaatttttgaactc

SEQ ID NO: 280593 - DNA, 20 bp, Artificial Sequence
  Description of Artificial Sequence: Synthetic oligonucleotide
  Target: LAMA2; (-) strand; PAM type: YTN; PAM sequence: TTA
ttagagatgaaatttttgaa

SEQ ID NO: 280594 - DNA, 20 bp, Artificial Sequence
  Description of Artificial Sequence: Synthetic oligonucleotide
  Target: LAMA2; (-) strand; PAM type: YTN; PAM sequence: TTT
attagagatgaaatttttga

SEQ ID NO: 280595 - DNA, 20 bp, Artificial Sequence
  Description of Artificial Sequence: Synthetic oligonucleotide
  Target: LAMA2; (-) strand; PAM type: YTN; PAM sequence: TTT
tattagagatgaaatttttg

SEQ ID NO: 280596 - DNA, 20 bp, Artificial Sequence
  Description of Artificial Sequence: Synthetic oligonucleotide
  Target: LAMA2; (-) strand; PAM type: YTN; PAM sequence: TTT
ttattagagatgaaattttt

SEQ ID NO: 280597 - DNA, 20 bp, Artificial Sequence
  Description of Artificial Sequence: Synthetic oligonucleotide
  Target: LAMA2; (-) strand; PAM type: YTN; PAM sequence: TTT
tttattagagatgaaatttt

SEQ ID NO: 280598 - DNA, 20 bp, Artificial Sequence
  Description of Artificial Sequence: Synthetic oligonucleotide
  Target: LAMA2; (-) strand; PAM type: YTN; PAM sequence: CTT
ttttattagagatgaaattt

SEQ ID NO: 280599 - DNA, 20 bp, Artificial Sequence
  Description of Artificial Sequence: Synthetic oligonucleotide
  Target: LAMA2; (-) strand; PAM type: YTN; PAM sequence: TTA
cttttttattagagatgaaa

SEQ ID NO: 280600 - DNA, 20 bp, Artificial Sequence
  Description of Artificial Sequence: Synthetic oligonucleotide
  Target: LAMA2; (-) strand; PAM type: YTN; PAM sequence: TTC
cccaaattacttttttatta

SEQ ID NO: 280601 - DNA, 20 bp, Artificial Sequence
  Description of Artificial Sequence: Synthetic oligonucleotide
  Target: LAMA2; (-) strand; PAM type: YTN; PAM sequence: CTA
aatgttccccaaattacttt

SEQ ID NO: 280602 - DNA, 20 bp, Artificial Sequence
  Description of Artificial Sequence: Synthetic oligonucleotide
  Target: LAMA2; (-) strand; PAM type: YTN; PAM sequence: TTC
ctaaatgttccccaaattac

SEQ ID NO: 280603 - DNA, 20 bp, Artificial Sequence
  Description of Artificial Sequence: Synthetic oligonucleotide
  Target: LAMA2; (-) strand; PAM type: YTN; PAM sequence: TTT
cctaaatgttccccaaatta

SEQ ID NO: 280604 - DNA, 20 bp, Artificial Sequence
  Description of Artificial Sequence: Synthetic oligonucleotide
  Target: LAMA2; (-) strand; PAM type: YTN; PAM sequence: TTT
tcctaaatgttccccaaatt

SEQ ID NO: 280605 - DNA, 20 bp, Artificial Sequence
  Description of Artificial Sequence: Synthetic oligonucleotide
  Target: LAMA2; (-) strand; PAM type: YTN; PAM sequence: TTT
ttcctaaatgttccccaaat

SEQ ID NO: 280606 - DNA, 20 bp, Artificial Sequence
  Description of Artificial Sequence: Synthetic oligonucleotide
  Target: LAMA2; (-) strand; PAM type: YTN; PAM sequence: TTT
tttcctaaatgttccccaaa

SEQ ID NO: 280607 - DNA, 20 bp, Artificial Sequence
  Description of Artificial Sequence: Synthetic oligonucleotide
  Target: LAMA2; (-) strand; PAM type: YTN; PAM sequence: CTT
ttttcctaaatgttccccaa

SEQ ID NO: 280608 - DNA, 20 bp, Artificial Sequence
  Description of Artificial Sequence: Synthetic oligonucleotide
  Target: LAMA2; (-) strand; PAM type: YTN; PAM sequence: TTG
cttttttcctaaatgttccc

SEQ ID NO: 280609 - DNA, 20 bp, Artificial Sequence
  Description of Artificial Sequence: Synthetic oligonucleotide
  Target: LAMA2; (-) strand; PAM type: YTN; PAM sequence: TTT
gcttttttcctaaatgttcc

SEQ ID NO: 280610 - DNA, 20 bp, Artificial Sequence
  Description of Artificial Sequence: Synthetic oligonucleotide
  Target: LAMA2; (-) strand; PAM type: YTN; PAM sequence: TTT
tgcttttttcctaaatgttc

SEQ ID NO: 280611 - DNA, 20 bp, Artificial Sequence
  Description of Artificial Sequence: Synthetic oligonucleotide
  Target: LAMA2; (-) strand; PAM type: YTN; PAM sequence: TTA
tatattttgcttttttccta

SEQ ID NO: 280612 - DNA, 20 bp, Artificial Sequence
  Description of Artificial Sequence: Synthetic oligonucleotide
  Target: LAMA2; (-) strand; PAM type: YTN; PAM sequence: TTT
atatattttgcttttttcct

SEQ ID NO: 280613 - DNA, 20 bp, Artificial Sequence
  Description of Artificial Sequence: Synthetic oligonucleotide
  Target: LAMA2; (-) strand; PAM type: YTN; PAM sequence: CTT
tatatattttgcttttttcc

SEQ ID NO: 280614 - DNA, 20 bp, Artificial Sequence
  Description of Artificial Sequence: Synthetic oligonucleotide
  Target: LAMA2; (-) strand; PAM type: YTN; PAM sequence: TTG
ctttatatattttgcttttt

SEQ ID NO: 280615 - DNA, 20 bp, Artificial Sequence
  Description of Artificial Sequence: Synthetic oligonucleotide
  Target: LAMA2; (-) strand; PAM type: YTN; PAM sequence: TTA
cattgctttatatattttgc

SEQ ID NO: 280616 - DNA, 20 bp, Artificial Sequence
  Description of Artificial Sequence: Synthetic oligonucleotide
  Target: LAMA2; (-) strand; PAM type: YTN; PAM sequence: TTT
acattgctttatatattttg

SEQ ID NO: 280617 - DNA, 20 bp, Artificial Sequence
  Description of Artificial Sequence: Synthetic oligonucleotide
  Target: LAMA2; (-) strand; PAM type: YTN; PAM sequence: TTG
tttacattgctttatatatt

SEQ ID NO: 280618 - DNA, 20 bp, Artificial Sequence
  Description of Artificial Sequence: Synthetic oligonucleotide
  Target: LAMA2; (-) strand; PAM type: YTN; PAM sequence: TTA
ttgtttacattgctttatat

SEQ ID NO: 280619 - DNA, 20 bp, Artificial Sequence
  Description of Artificial Sequence: Synthetic oligonucleotide
  Target: LAMA2; (-) strand; PAM type: YTN; PAM sequence: TTA
aaagttattgtttacattgc

SEQ ID NO: 280620 - DNA, 20 bp, Artificial Sequence
  Description of Artificial Sequence: Synthetic oligonucleotide
  Target: LAMA2; (-) strand; PAM type: YTN; PAM sequence: TTT
aaaagttattgtttacattg

SEQ ID NO: 280621 - DNA, 20 bp, Artificial Sequence
  Description of Artificial Sequence: Synthetic oligonucleotide
  Target: LAMA2; (-) strand; PAM type: YTN; PAM sequence: CTA
aacaagcaagtttaaaagtt

SEQ ID NO: 280622 - DNA, 20 bp, Artificial Sequence
  Description of Artificial Sequence: Synthetic oligonucleotide
  Target: LAMA2; (-) strand; PAM type: YTN; PAM sequence: TTC
taaacaagcaagtttaaaag

SEQ ID NO: 280623 - DNA, 20 bp, Artificial Sequence
  Description of Artificial Sequence: Synthetic oligonucleotide
  Target: LAMA2; (-) strand; PAM type: YTN; PAM sequence: TTT
ctaaacaagcaagtttaaaa

SEQ ID NO: 280624 - DNA, 20 bp, Artificial Sequence
  Description of Artificial Sequence: Synthetic oligonucleotide
  Target: LAMA2; (-) strand; PAM type: YTN; PAM sequence: TTT
tctaaacaagcaagtttaaa

SEQ ID NO: 280625 - DNA, 20 bp, Artificial Sequence
  Description of Artificial Sequence: Synthetic oligonucleotide
  Target: LAMA2; (-) strand; PAM type: YTN; PAM sequence: CTG
taccccagtgattttctaaa

SEQ ID NO: 280626 - DNA, 20 bp, Artificial Sequence
  Description of Artificial Sequence: Synthetic oligonucleotide
  Target: LAMA2; (-) strand; PAM type: YTN; PAM sequence: CTA
acctgtaccccagtgatttt

SEQ ID NO: 280627 - DNA, 20 bp, Artificial Sequence
  Description of Artificial Sequence: Synthetic oligonucleotide
  Target: LAMA2; (-) strand; PAM type: YTN; PAM sequence: CTG
actaacctgtaccccagtga

SEQ ID NO: 280628 - DNA, 20 bp, Artificial Sequence
  Description of Artificial Sequence: Synthetic oligonucleotide
  Target: LAMA2; (-) strand; PAM type: YTN; PAM sequence: TTA
tcaggctgactaacctgtac

SEQ ID NO: 280629 - DNA, 20 bp, Artificial Sequence
  Description of Artificial Sequence: Synthetic oligonucleotide
  Target: LAMA2; (-) strand; PAM type: YTN; PAM sequence: TTT
atcaggctgactaacctgta

SEQ ID NO: 280630 - DNA, 20 bp, Artificial Sequence
  Description of Artificial Sequence: Synthetic oligonucleotide
  Target: LAMA2; (-) strand; PAM type: YTN; PAM sequence: TTA
gagtttatcaggctgactaa

SEQ ID NO: 280631 - DNA, 20 bp, Artificial Sequence
  Description of Artificial Sequence: Synthetic oligonucleotide
  Target: LAMA2; (-) strand; PAM type: YTN; PAM sequence: CTG
gaggagggaggtgtgaaggc

SEQ ID NO: 280632 - DNA, 20 bp, Artificial Sequence
  Description of Artificial Sequence: Synthetic oligonucleotide
  Target: LAMA2; (-) strand; PAM type: YTN; PAM sequence: CTG
ctggaggagggaggtgtgaa

SEQ ID NO: 280633 - DNA, 20 bp, Artificial Sequence
  Description of Artificial Sequence: Synthetic oligonucleotide
  Target: LAMA2; (-) strand; PAM type: YTN; PAM sequence: CTC
tgctggaggagggaggtgtg

SEQ ID NO: 280634 - DNA, 20 bp, Artificial Sequence
  Description of Artificial Sequence: Synthetic oligonucleotide
  Target: LAMA2; (-) strand; PAM type: YTN; PAM sequence: CTG
tcagaggaggctctgctgga

SEQ ID NO: 280635 - DNA, 20 bp, Artificial Sequence
  Description of Artificial Sequence: Synthetic oligonucleotide
  Target: LAMA2; (-) strand; PAM type: YTN; PAM sequence: TTG
gctgtcagaggaggctctgc

SEQ ID NO: 280636 - DNA, 20 bp, Artificial Sequence
  Description of Artificial Sequence: Synthetic oligonucleotide
  Target: LAMA2; (-) strand; PAM type: YTN; PAM sequence: TTT
ggctgtcagaggaggctctg

SEQ ID NO: 280637 - DNA, 20 bp, Artificial Sequence
  Description of Artificial Sequence: Synthetic oligonucleotide
  Target: LAMA2; (-) strand; PAM type: YTN; PAM sequence: CTA
gatgtttggctgtcagagga

SEQ ID NO: 280638 - DNA, 20 bp, Artificial Sequence
  Description of Artificial Sequence: Synthetic oligonucleotide
  Target: LAMA2; (-) strand; PAM type: YTN; PAM sequence: TTA
ccataatggaacacagaaat

SEQ ID NO: 280639 - DNA, 20 bp, Artificial Sequence
  Description of Artificial Sequence: Synthetic oligonucleotide
  Target: LAMA2; (-) strand; PAM type: YTN; PAM sequence: TTA
taaaaaaagacaatcattac

SEQ ID NO: 280640 - DNA, 20 bp, Artificial Sequence
  Description of Artificial Sequence: Synthetic oligonucleotide
  Target: LAMA2; (-) strand; PAM type: YTN; PAM sequence: CTT
ataaaaaaagacaatcatta

SEQ ID NO: 280641 - DNA, 20 bp, Artificial Sequence
  Description of Artificial Sequence: Synthetic oligonucleotide
  Target: LAMA2; (-) strand; PAM type: YTN; PAM sequence: CTG
gagtggagggaagaggaaag

SEQ ID NO: 280642 - DNA, 20 bp, Artificial Sequence
  Description of Artificial Sequence: Synthetic oligonucleotide
  Target: LAMA2; (-) strand; PAM type: YTN; PAM sequence: CTA
atggaactggagtggaggga

SEQ ID NO: 280643 - DNA, 20 bp, Artificial Sequence
  Description of Artificial Sequence: Synthetic oligonucleotide
  Target: LAMA2; (-) strand; PAM type: YTN; PAM sequence: TTC
cctaatggaactggagtgga

SEQ ID NO: 280644 - DNA, 20 bp, Artificial Sequence
  Description of Artificial Sequence: Synthetic oligonucleotide
  Target: LAMA2; (-) strand; PAM type: YTN; PAM sequence: CTT
ccctaatggaactggagtgg

SEQ ID NO: 280645 - DNA, 20 bp, Artificial Sequence
  Description of Artificial Sequence: Synthetic oligonucleotide
  Target: LAMA2; (-) strand; PAM type: YTN; PAM sequence: CTA
tgccttccctaatggaactg

SEQ ID NO: 280646 - DNA, 20 bp, Artificial Sequence
  Description of Artificial Sequence: Synthetic oligonucleotide
  Target: LAMA2; (-) strand; PAM type: YTN; PAM sequence: TTC
aaaatggaaagactatgcct

SEQ ID NO: 280647 - DNA, 20 bp, Artificial Sequence
  Description of Artificial Sequence: Synthetic oligonucleotide
  Target: LAMA2; (-) strand; PAM type: YTN; PAM sequence: CTC
aagcaccaaatattcaaaat

SEQ ID NO: 280648 - DNA, 20 bp, Artificial Sequence
  Description of Artificial Sequence: Synthetic oligonucleotide
  Target: LAMA2; (-) strand; PAM type: YTN; PAM sequence: TTA
tctcaagcaccaaatattca

SEQ ID NO: 280649 - DNA, 20 bp, Artificial Sequence
  Description of Artificial Sequence: Synthetic oligonucleotide
  Target: LAMA2; (-) strand; PAM type: YTN; PAM sequence: TTT
atctcaagcaccaaatattc

SEQ ID NO: 280650 - DNA, 20 bp, Artificial Sequence
  Description of Artificial Sequence: Synthetic oligonucleotide
  Target: LAMA2; (-) strand; PAM type: YTN; PAM sequence: TTA
tttatctcaagcaccaaata

SEQ ID NO: 280651 - DNA, 20 bp, Artificial Sequence
  Description of Artificial Sequence: Synthetic oligonucleotide
  Target: LAMA2; (-) strand; PAM type: YTN; PAM sequence: TTT
atttatctcaagcaccaaat

SEQ ID NO: 280652 - DNA, 20 bp, Artificial Sequence
  Description of Artificial Sequence: Synthetic oligonucleotide
  Target: LAMA2; (-) strand; PAM type: YTN; PAM sequence: TTT
tatttatctcaagcaccaaa

SEQ ID NO: 280653 - DNA, 20 bp, Artificial Sequence
  Description of Artificial Sequence: Synthetic oligonucleotide
  Target: LAMA2; (-) strand; PAM type: YTN; PAM sequence: TTT
ttatttatctcaagcaccaa

SEQ ID NO: 280654 - DNA, 20 bp, Artificial Sequence
  Description of Artificial Sequence: Synthetic oligonucleotide
  Target: LAMA2; (-) strand; PAM type: YTN; PAM sequence: CTT
tttatttatctcaagcacca

SEQ ID NO: 280655 - DNA, 20 bp, Artificial Sequence
  Description of Artificial Sequence: Synthetic oligonucleotide
  Target: LAMA2; (-) strand; PAM type: YTN; PAM sequence: TTA
cccaacaaaactttttattt

SEQ ID NO: 280656 - DNA, 20 bp, Artificial Sequence
  Description of Artificial Sequence: Synthetic oligonucleotide
  Target: LAMA2; (-) strand; PAM type: YTN; PAM sequence: TTT
acccaacaaaactttttatt

SEQ ID NO: 280657 - DNA, 20 bp, Artificial Sequence
  Description of Artificial Sequence: Synthetic oligonucleotide
  Target: LAMA2; (-) strand; PAM type: YTN; PAM sequence: TTA
tttacccaacaaaacttttt

SEQ ID NO: 280658 - DNA, 20 bp, Artificial Sequence
  Description of Artificial Sequence: Synthetic oligonucleotide
  Target: LAMA2; (-) strand; PAM type: YTN; PAM sequence: TTT
atttacccaacaaaactttt

SEQ ID NO: 280659 - DNA, 20 bp, Artificial Sequence
  Description of Artificial Sequence: Synthetic oligonucleotide
  Target: LAMA2; (-) strand; PAM type: YTN; PAM sequence: TTG
atttatttacccaacaaaac

SEQ ID NO: 280660 - DNA, 20 bp, Artificial Sequence
  Description of Artificial Sequence: Synthetic oligonucleotide
  Target: LAMA2; (-) strand; PAM type: YTN; PAM sequence: TTA
atagataagtgaattgattt

SEQ ID NO: 280661 - DNA, 20 bp, Artificial Sequence
  Description of Artificial Sequence: Synthetic oligonucleotide
  Target: LAMA2; (-) strand; PAM type: YTN; PAM sequence: TTG
attaatagataagtgaattg

SEQ ID NO: 280662 - DNA, 20 bp, Artificial Sequence
  Description of Artificial Sequence: Synthetic oligonucleotide
  Target: LAMA2; (-) strand; PAM type: YTN; PAM sequence: CTG
ccattgattaatagataagt

SEQ ID NO: 280663 - DNA, 20 bp, Artificial Sequence
  Description of Artificial Sequence: Synthetic oligonucleotide
  Target: LAMA2; (-) strand; PAM type: YTN; PAM sequence: CTA
aagcatactgccattgatta

SEQ ID NO: 280664 - DNA, 20 bp, Artificial Sequence
  Description of Artificial Sequence: Synthetic oligonucleotide
  Target: LAMA2; (-) strand; PAM type: YTN; PAM sequence: TTG
ctaaagcatactgccattga

SEQ ID NO: 280665 - DNA, 20 bp, Artificial Sequence
  Description of Artificial Sequence: Synthetic oligonucleotide
  Target: LAMA2; (-) strand; PAM type: YTN; PAM sequence: CTT
gctaaagcatactgccattg

SEQ ID NO: 280666 - DNA, 20 bp, Artificial Sequence
  Description of Artificial Sequence: Synthetic oligonucleotide
  Target: LAMA2; (-) strand; PAM type: YTN; PAM sequence: CTC
ttgctaaagcatactgccat

SEQ ID NO: 280667 - DNA, 20 bp, Artificial Sequence
  Description of Artificial Sequence: Synthetic oligonucleotide
  Target: LAMA2; (-) strand; PAM type: YTN; PAM sequence: TTA
ctcttgctaaagcatactgc

SEQ ID NO: 280668 - DNA, 20 bp, Artificial Sequence
  Description of Artificial Sequence: Synthetic oligonucleotide
  Target: LAMA2; (-) strand; PAM type: YTN; PAM sequence: TTC
ataattactcttgctaaagc

SEQ ID NO: 280669 - DNA, 20 bp, Artificial Sequence
  Description of Artificial Sequence: Synthetic oligonucleotide
  Target: LAMA2; (-) strand; PAM type: YTN; PAM sequence: TTA
gatattcataattactcttg

SEQ ID NO: 280670 - DNA, 20 bp, Artificial Sequence
  Description of Artificial Sequence: Synthetic oligonucleotide
  Target: LAMA2; (-) strand; PAM type: YTN; PAM sequence: TTA
ttagatattcataattactc

SEQ ID NO: 280671 - DNA, 20 bp, Artificial Sequence
  Description of Artificial Sequence: Synthetic oligonucleotide
  Target: LAMA2; (-) strand; PAM type: YTN; PAM sequence: CTT
attagatattcataattact

SEQ ID NO: 280672 - DNA, 20 bp, Artificial Sequence
  Description of Artificial Sequence: Synthetic oligonucleotide
  Target: LAMA2; (-) strand; PAM type: YTN; PAM sequence: CTA
cttattagatattcataatt

SEQ ID NO: 280673 - DNA, 20 bp, Artificial Sequence
  Description of Artificial Sequence: Synthetic oligonucleotide
  Target: LAMA2; (-) strand; PAM type: YTN; PAM sequence: CTA
ctacttattagatattcata

SEQ ID NO: 280674 - DNA, 20 bp, Artificial Sequence
  Description of Artificial Sequence: Synthetic oligonucleotide
  Target: LAMA2; (-) strand; PAM type: YTN; PAM sequence: TTC
ctactacttattagatattc

SEQ ID NO: 280675 - DNA, 20 bp, Artificial Sequence
  Description of Artificial Sequence: Synthetic oligonucleotide
  Target: LAMA2; (-) strand; PAM type: YTN; PAM sequence: CTT
cctactacttattagatatt

SEQ ID NO: 280676 - DNA, 20 bp, Artificial Sequence
  Description of Artificial Sequence: Synthetic oligonucleotide
  Target: LAMA2; (-) strand; PAM type: YTN; PAM sequence: CTC
ttcctactacttattagata

SEQ ID NO: 280677 - DNA, 20 bp, Artificial Sequence
  Description of Artificial Sequence: Synthetic oligonucleotide
  Target: LAMA2; (-) strand; PAM type: YTN; PAM sequence: TTC
ctcttcctactacttattag

SEQ ID NO: 280678 - DNA, 20 bp, Artificial Sequence
  Description of Artificial Sequence: Synthetic oligonucleotide
  Target: LAMA2; (-) strand; PAM type: YTN; PAM sequence: TTT
cctcttcctactacttatta

SEQ ID NO: 280679 - DNA, 20 bp, Artificial Sequence
  Description of Artificial Sequence: Synthetic oligonucleotide
  Target: LAMA2; (-) strand; PAM type: YTN; PAM sequence: TTT
tcctcttcctactacttatt

SEQ ID NO: 280680 - DNA, 20 bp, Artificial Sequence
  Description of Artificial Sequence: Synthetic oligonucleotide
  Target: LAMA2; (-) strand; PAM type: YTN; PAM sequence: TTA
gttttcctcttcctactact

SEQ ID NO: 280681 - DNA, 20 bp, Artificial Sequence
  Description of Artificial Sequence: Synthetic oligonucleotide
  Target: LAMA2; (-) strand; PAM type: YTN; PAM sequence: TTA
atacatgttagttttcctct

SEQ ID NO: 280682 - DNA, 20 bp, Artificial Sequence
  Description of Artificial Sequence: Synthetic oligonucleotide
  Target: LAMA2; (-) strand; PAM type: YTN; PAM sequence: TTT
aatacatgttagttttcctc

SEQ ID NO: 280683 - DNA, 20 bp, Artificial Sequence
  Description of Artificial Sequence: Synthetic oligonucleotide
  Target: LAMA2; (-) strand; PAM type: YTN; PAM sequence: TTT
taatacatgttagttttcct

SEQ ID NO: 280684 - DNA, 20 bp, Artificial Sequence
  Description of Artificial Sequence: Synthetic oligonucleotide
  Target: LAMA2; (-) strand; PAM type: YTN; PAM sequence: TTG
cattttaatacatgttagtt

SEQ ID NO: 280685 - DNA, 20 bp, Artificial Sequence
  Description of Artificial Sequence: Synthetic oligonucleotide
  Target: LAMA2; (-) strand; PAM type: YTN; PAM sequence: TTG
gcatgtaattgcattttaat

SEQ ID NO: 280686 - DNA, 20 bp, Artificial Sequence
  Description of Artificial Sequence: Synthetic oligonucleotide
  Target: LAMA2; (-) strand; PAM type: YTN; PAM sequence: CTT
ggcatgtaattgcattttaa

SEQ ID NO: 280687 - DNA, 20 bp, Artificial Sequence
  Description of Artificial Sequence: Synthetic oligonucleotide
  Target: LAMA2; (-) strand; PAM type: YTN; PAM sequence: TTC
aacagatgacttggcatgta

SEQ ID NO: 280688 - DNA, 20 bp, Artificial Sequence
  Description of Artificial Sequence: Synthetic oligonucleotide
  Target: LAMA2; (-) strand; PAM type: YTN; PAM sequence: TTA
ggattcaacagatgacttgg

SEQ ID NO: 280689 - DNA, 20 bp, Artificial Sequence
  Description of Artificial Sequence: Synthetic oligonucleotide
  Target: LAMA2; (-) strand; PAM type: YTN; PAM sequence: CTG
ttaggattcaacagatgact

SEQ ID NO: 280690 - DNA, 20 bp, Artificial Sequence
  Description of Artificial Sequence: Synthetic oligonucleotide
  Target: LAMA2; (-) strand; PAM type: YTN; PAM sequence: TTA
taaagtctgttaggattcaa

SEQ ID NO: 280691 - DNA, 20 bp, Artificial Sequence
  Description of Artificial Sequence: Synthetic oligonucleotide
  Target: LAMA2; (-) strand; PAM type: YTN; PAM sequence: TTA
tagcaggaaaaaatgaaatt

SEQ ID NO: 280692 - DNA, 20 bp, Artificial Sequence
  Description of Artificial Sequence: Synthetic oligonucleotide
  Target: LAMA2; (-) strand; PAM type: YTN; PAM sequence: TTA
aaacgtcattatagcaggaa

SEQ ID NO: 280693 - DNA, 20 bp, Artificial Sequence
  Description of Artificial Sequence: Synthetic oligonucleotide
  Target: LAMA2; (-) strand; PAM type: YTN; PAM sequence: TTT
aaaacgtcattatagcagga

SEQ ID NO: 280694 - DNA, 20 bp, Artificial Sequence
  Description of Artificial Sequence: Synthetic oligonucleotide
  Target: LAMA2; (-) strand; PAM type: YTN; PAM sequence: TTA
agaaaatgtgagataattta

SEQ ID NO: 280695 - DNA, 20 bp, Artificial Sequence
  Description of Artificial Sequence: Synthetic oligonucleotide
  Target: LAMA2; (-) strand; PAM type: YTN; PAM sequence: TTT
aagaaaatgtgagataattt

SEQ ID NO: 280696 - DNA, 20 bp, Artificial Sequence
  Description of Artificial Sequence: Synthetic oligonucleotide
  Target: LAMA2; (-) strand; PAM type: YTN; PAM sequence: TTG
tttaagaaaatgtgagataa

SEQ ID NO: 280697 - DNA, 20 bp, Artificial Sequence
  Description of Artificial Sequence: Synthetic oligonucleotide
  Target: LAMA2; (-) strand; PAM type: YTN; PAM sequence: TTA
ataattgtttaagaaaatgt

SEQ ID NO: 280698 - DNA, 20 bp, Artificial Sequence
  Description of Artificial Sequence: Synthetic oligonucleotide
  Target: LAMA2; (-) strand; PAM type: YTN; PAM sequence: TTA
gttaataattgtttaagaaa

SEQ ID NO: 280699 - DNA, 20 bp, Artificial Sequence
  Description of Artificial Sequence: Synthetic oligonucleotide
  Target: LAMA2; (-) strand; PAM type: YTN; PAM sequence: TTA
ttagttaataattgtttaag

SEQ ID NO: 280700 - DNA, 20 bp, Artificial Sequence
  Description of Artificial Sequence: Synthetic oligonucleotide
  Target: LAMA2; (-) strand; PAM type: YTN; PAM sequence: TTT
attagttaataattgtttaa

SEQ ID NO: 280701 - DNA, 20 bp, Artificial Sequence
  Description of Artificial Sequence: Synthetic oligonucleotide
  Target: LAMA2; (-) strand; PAM type: YTN; PAM sequence: TTT
tattagttaataattgttta

SEQ ID NO: 280702 - DNA, 20 bp, Artificial Sequence
  Description of Artificial Sequence: Synthetic oligonucleotide
  Target: LAMA2; (-) strand; PAM type: YTN; PAM sequence: TTT
ttattagttaataattgttt

SEQ ID NO: 280703 - DNA, 20 bp, Artificial Sequence
  Description of Artificial Sequence: Synthetic oligonucleotide
  Target: LAMA2; (-) strand; PAM type: YTN; PAM sequence: CTG
tatgtttttattagttaata

SEQ ID NO: 280704 - DNA, 20 bp, Artificial Sequence
  Description of Artificial Sequence: Synthetic oligonucleotide
  Target: LAMA2; (-) strand; PAM type: YTN; PAM sequence: TTG
ctgtatgtttttattagtta

SEQ ID NO: 280705 - DNA, 20 bp, Artificial Sequence
  Description of Artificial Sequence: Synthetic oligonucleotide
  Target: LAMA2; (-) strand; PAM type: YTN; PAM sequence: TTA
tgtaagttgctgtatgtttt

SEQ ID NO: 280706 - DNA, 20 bp, Artificial Sequence
  Description of Artificial Sequence: Synthetic oligonucleotide
  Target: LAMA2; (-) strand; PAM type: YTN; PAM sequence: TTT
atgtaagttgctgtatgttt

SEQ ID NO: 280707 - DNA, 20 bp, Artificial Sequence
  Description of Artificial Sequence: Synthetic oligonucleotide
  Target: LAMA2; (-) strand; PAM type: YTN; PAM sequence: TTT
tatgtaagttgctgtatgtt

SEQ ID NO: 280708 - DNA, 20 bp, Artificial Sequence
  Description of Artificial Sequence: Synthetic oligonucleotide
  Target: LAMA2; (-) strand; PAM type: YTN; PAM sequence: TTT
ttatgtaagttgctgtatgt

SEQ ID NO: 280709 - DNA, 20 bp, Artificial Sequence
  Description of Artificial Sequence: Synthetic oligonucleotide
  Target: LAMA2; (-) strand; PAM type: YTN; PAM sequence: CTA
tttttatgtaagttgctgta

SEQ ID NO: 280710 - DNA, 20 bp, Artificial Sequence
  Description of Artificial Sequence: Synthetic oligonucleotide
  Target: LAMA2; (-) strand; PAM type: YTN; PAM sequence: CTA
tatcatgcaaaacagagtct

SEQ ID NO: 280711 - DNA, 20 bp, Artificial Sequence
  Description of Artificial Sequence: Synthetic oligonucleotide
  Target: LAMA2; (-) strand; PAM type: YTN; PAM sequence: TTC
aactatatcatgcaaaacag

SEQ ID NO: 280712 - DNA, 20 bp, Artificial Sequence
  Description of Artificial Sequence: Synthetic oligonucleotide
  Target: LAMA2; (-) strand; PAM type: YTN; PAM sequence: TTT
caactatatcatgcaaaaca

SEQ ID NO: 280713 - DNA, 20 bp, Artificial Sequence
  Description of Artificial Sequence: Synthetic oligonucleotide
  Target: LAMA2; (-) strand; PAM type: YTN; PAM sequence: TTA
tataaaaatttcaactatat

SEQ ID NO: 280714 - DNA, 20 bp, Artificial Sequence
  Description of Artificial Sequence: Synthetic oligonucleotide
  Target: LAMA2; (-) strand; PAM type: YTN; PAM sequence: TTC
atacatatggatatacaagt

SEQ ID NO: 280715 - DNA, 20 bp, Artificial Sequence
  Description of Artificial Sequence: Synthetic oligonucleotide
  Target: LAMA2; (-) strand; PAM type: YTN; PAM sequence: CTG
tgtacatatatatatattca

SEQ ID NO: 280716 - DNA, 20 bp, Artificial Sequence
  Description of Artificial Sequence: Synthetic oligonucleotide
  Target: LAMA2; (-) strand; PAM type: YTN; PAM sequence: CTG
agtctgtgtacatatatata

SEQ ID NO: 280717 - DNA, 20 bp, Artificial Sequence
  Description of Artificial Sequence: Synthetic oligonucleotide
  Target: LAMA2; (-) strand; PAM type: YTN; PAM sequence: TTC
tgagtctgtgtacatatata

SEQ ID NO: 280718 - DNA, 20 bp, Artificial Sequence
  Description of Artificial Sequence: Synthetic oligonucleotide
  Target: LAMA2; (-) strand; PAM type: YTN; PAM sequence: TTT
ctgagtctgtgtacatatat

SEQ ID NO: 280719 - DNA, 20 bp, Artificial Sequence
  Description of Artificial Sequence: Synthetic oligonucleotide
  Target: LAMA2; (-) strand; PAM type: YTN; PAM sequence: CTT
tctgagtctgtgtacatata

SEQ ID NO: 280720 - DNA, 20 bp, Artificial Sequence
  Description of Artificial Sequence: Synthetic oligonucleotide
  Target: LAMA2; (-) strand; PAM type: YTN; PAM sequence: CTC
tttctgagtctgtgtacata

SEQ ID NO: 280721 - DNA, 20 bp, Artificial Sequence
  Description of Artificial Sequence: Synthetic oligonucleotide
  Target: LAMA2; (-) strand; PAM type: YTN; PAM sequence: TTC
tctttctgagtctgtgtaca

SEQ ID NO: 280722 - DNA, 20 bp, Artificial Sequence
  Description of Artificial Sequence: Synthetic oligonucleotide
  Target: LAMA2; (-) strand; PAM type: YTN; PAM sequence: TTG
gtattctctttctgagtctg

SEQ ID NO: 280723 - DNA, 20 bp, Artificial Sequence
  Description of Artificial Sequence: Synthetic oligonucleotide
  Target: LAMA2; (-) strand; PAM type: YTN; PAM sequence: CTT
ggtattctctttctgagtct

SEQ ID NO: 280724 - DNA, 20 bp, Artificial Sequence
  Description of Artificial Sequence: Synthetic oligonucleotide
  Target: LAMA2; (-) strand; PAM type: YTN; PAM sequence: TTC
ttggtattctctttctgagt

SEQ ID NO: 280725 - DNA, 20 bp, Artificial Sequence
  Description of Artificial Sequence: Synthetic oligonucleotide
  Target: LAMA2; (-) strand; PAM type: YTN; PAM sequence: TTA
aacaataaattcttggtatt

SEQ ID NO: 280726 - DNA, 20 bp, Artificial Sequence
  Description of Artificial Sequence: Synthetic oligonucleotide
  Target: LAMA2; (-) strand; PAM type: YTN; PAM sequence: TTT
aaacaataaattcttggtat

SEQ ID NO: 280727 - DNA, 20 bp, Artificial Sequence
  Description of Artificial Sequence: Synthetic oligonucleotide
  Target: LAMA2; (-) strand; PAM type: YTN; PAM sequence: TTT
taaacaataaattcttggta

SEQ ID NO: 280728 - DNA, 20 bp, Artificial Sequence
  Description of Artificial Sequence: Synthetic oligonucleotide
  Target: LAMA2; (-) strand; PAM type: YTN; PAM sequence: TTT
ttaaacaataaattcttggt

SEQ ID NO: 280729 - DNA, 20 bp, Artificial Sequence
  Description of Artificial Sequence: Synthetic oligonucleotide
  Target: LAMA2; (-) strand; PAM type: YTN; PAM sequence: TTT
tttaaacaataaattcttgg

SEQ ID NO: 280730 - DNA, 20 bp, Artificial Sequence
  Description of Artificial Sequence: Synthetic oligonucleotide
  Target: LAMA2; (-) strand; PAM type: YTN; PAM sequence: TTT
ttttaaacaataaattcttg

SEQ ID NO: 280731 - DNA, 20 bp, Artificial Sequence
  Description of Artificial Sequence: Synthetic oligonucleotide
  Target: LAMA2; (-) strand; PAM type: YTN; PAM sequence: TTT
tttttaaacaataaattctt

SEQ ID NO: 280732 - DNA, 20 bp, Artificial Sequence
  Description of Artificial Sequence: Synthetic oligonucleotide
  Target: LAMA2; (-) strand; PAM type: YTN; PAM sequence: TTT
ttttttaaacaataaattct

SEQ ID NO: 280733 - DNA, 20 bp, Artificial Sequence
  Description of Artificial Sequence: Synthetic oligonucleotide
  Target: LAMA2; (-) strand; PAM type: YTN; PAM sequence: TTT
tttttttaaacaataaattc

SEQ ID NO: 280734 - DNA, 20 bp, Artificial Sequence
  Description of Artificial Sequence: Synthetic oligonucleotide
  Target: LAMA2; (-) strand; PAM type: YTN; PAM sequence: TTT
ttttttttaaacaataaatt

SEQ ID NO: 280735 - DNA, 20 bp, Artificial Sequence
  Description of Artificial Sequence: Synthetic oligonucleotide
  Target: LAMA2; (-) strand; PAM type: YTN; PAM sequence: TTA
gaggtttttttttttaaaca

SEQ ID NO: 280736 - DNA, 20 bp, Artificial Sequence
  Description of Artificial Sequence: Synthetic oligonucleotide
  Target: LAMA2; (-) strand; PAM type: YTN; PAM sequence: TTT
agaggtttttttttttaaac

SEQ ID NO: 280737 - DNA, 20 bp, Artificial Sequence
  Description of Artificial Sequence: Synthetic oligonucleotide
  Target: LAMA2; (-) strand; PAM type: YTN; PAM sequence: TTT
tagaggtttttttttttaaa

SEQ ID NO: 280738 - DNA, 20 bp, Artificial Sequence
  Description of Artificial Sequence: Synthetic oligonucleotide
  Target: LAMA2; (-) strand; PAM type: YTN; PAM sequence: TTT
ttagaggtttttttttttaa

SEQ ID NO: 280739 - DNA, 20 bp, Artificial Sequence
  Description of Artificial Sequence: Synthetic oligonucleotide
  Target: LAMA2; (-) strand; PAM type: YTN; PAM sequence: CTT
tttagaggttttttttttta

SEQ ID NO: 280740 - DNA, 20 bp, Artificial Sequence
  Description of Artificial Sequence: Synthetic oligonucleotide
  Target: LAMA2; (-) strand; PAM type: YTN; PAM sequence: TTG
ctttttagaggttttttttt

SEQ ID NO: 280741 - DNA, 20 bp, Artificial Sequence
  Description of Artificial Sequence: Synthetic oligonucleotide
  Target: LAMA2; (-) strand; PAM type: YTN; PAM sequence: CTT
gctttttagaggtttttttt

SEQ ID NO: 280742 - DNA, 20 bp, Artificial Sequence
  Description of Artificial Sequence: Synthetic oligonucleotide
  Target: LAMA2; (-) strand; PAM type: YTN; PAM sequence: TTC
ttgctttttagaggtttttt

SEQ ID NO: 280743 - DNA, 20 bp, Artificial Sequence
  Description of Artificial Sequence: Synthetic oligonucleotide
  Target: LAMA2; (-) strand; PAM type: YTN; PAM sequence: TTT
cttgctttttagaggttttt

SEQ ID NO: 280744 - DNA, 20 bp, Artificial Sequence
  Description of Artificial Sequence: Synthetic oligonucleotide
  Target: LAMA2; (-) strand; PAM type: YTN; PAM sequence: TTG
tttcttgctttttagaggtt

SEQ ID NO: 280745 - DNA, 20 bp, Artificial Sequence
  Description of Artificial Sequence: Synthetic oligonucleotide
  Target: LAMA2; (-) strand; PAM type: YTN; PAM sequence: TTT
gtttcttgctttttagaggt

SEQ ID NO: 280746 - DNA, 20 bp, Artificial Sequence
  Description of Artificial Sequence: Synthetic oligonucleotide
  Target: LAMA2; (-) strand; PAM type: YTN; PAM sequence: TTT
tgtttcttgctttttagagg

SEQ ID NO: 280747 - DNA, 20 bp, Artificial Sequence
  Description of Artificial Sequence: Synthetic oligonucleotide
  Target: LAMA2; (-) strand; PAM type: YTN; PAM sequence: TTG
caagatattttgtttcttgc

SEQ ID NO: 280748 - DNA, 20 bp, Artificial Sequence
  Description of Artificial Sequence: Synthetic oligonucleotide
  Target: LAMA2; (-) strand; PAM type: YTN; PAM sequence: TTG
agttgcaagatattttgttt

SEQ ID NO: 280749 - DNA, 20 bp, Artificial Sequence
  Description of Artificial Sequence: Synthetic oligonucleotide
  Target: LAMA2; (-) strand; PAM type: YTN; PAM sequence: TTT
gagttgcaagatattttgtt

SEQ ID NO: 280750 - DNA, 20 bp, Artificial Sequence
  Description of Artificial Sequence: Synthetic oligonucleotide
  Target: LAMA2; (-) strand; PAM type: YTN; PAM sequence: CTT
tgagttgcaagatattttgt

SEQ ID NO: 280751 - DNA, 20 bp, Artificial Sequence
  Description of Artificial Sequence: Synthetic oligonucleotide
  Target: LAMA2; (-) strand; PAM type: YTN; PAM sequence: TTC
tttgagttgcaagatatttt

SEQ ID NO: 280752 - DNA, 20 bp, Artificial Sequence
  Description of Artificial Sequence: Synthetic oligonucleotide
  Target: LAMA2; (-) strand; PAM type: YTN; PAM sequence: CTA
cagcatatgtgaaatataaa

SEQ ID NO: 280753 - DNA, 20 bp, Artificial Sequence
  Description of Artificial Sequence: Synthetic oligonucleotide
  Target: LAMA2; (-) strand; PAM type: YTN; PAM sequence: CTG
tgtctacagcatatgtgaaa

SEQ ID NO: 280754 - DNA, 20 bp, Artificial Sequence
  Description of Artificial Sequence: Synthetic oligonucleotide
  Target: LAMA2; (-) strand; PAM type: YTN; PAM sequence: CTG
agctgtgtctacagcatatg

SEQ ID NO: 280755 - DNA, 20 bp, Artificial Sequence
  Description of Artificial Sequence: Synthetic oligonucleotide
  Target: LAMA2; (-) strand; PAM type: YTN; PAM sequence: TTC
ctgagctgtgtctacagcat

SEQ ID NO: 280756 - DNA, 20 bp, Artificial Sequence
  Description of Artificial Sequence: Synthetic oligonucleotide
  Target: LAMA2; (-) strand; PAM type: YTN; PAM sequence: CTG
agttcctgagctgtgtctac

SEQ ID NO: 280757 - DNA, 20 bp, Artificial Sequence
  Description of Artificial Sequence: Synthetic oligonucleotide
  Target: LAMA2; (-) strand; PAM type: YTN; PAM sequence: TTC
ataagcatcacatctgagtt

SEQ ID NO: 280758 - DNA, 20 bp, Artificial Sequence
  Description of Artificial Sequence: Synthetic oligonucleotide
  Target: LAMA2; (-) strand; PAM type: YTN; PAM sequence: TTA
tacatattcataagcatcac

SEQ ID NO: 280759 - DNA, 20 bp, Artificial Sequence
  Description of Artificial Sequence: Synthetic oligonucleotide
  Target: LAMA2; (-) strand; PAM type: YTN; PAM sequence: TTT
atacatattcataagcatca

SEQ ID NO: 280760 - DNA, 20 bp, Artificial Sequence
  Description of Artificial Sequence: Synthetic oligonucleotide
  Target: LAMA2; (-) strand; PAM type: YTN; PAM sequence: CTT
tatacatattcataagcatc

SEQ ID NO: 280761 - DNA, 20 bp, Artificial Sequence
  Description of Artificial Sequence: Synthetic oligonucleotide
  Target: LAMA2; (-) strand; PAM type: YTN; PAM sequence: TTA
tactttatacatattcataa

SEQ ID NO: 280762 - DNA, 20 bp, Artificial Sequence
  Description of Artificial Sequence: Synthetic oligonucleotide
  Target: LAMA2; (-) strand; PAM type: YTN; PAM sequence: CTA
attatactttatacatattc

SEQ ID NO: 280763 - DNA, 20 bp, Artificial Sequence
  Description of Artificial Sequence: Synthetic oligonucleotide
  Target: LAMA2; (-) strand; PAM type: YTN; PAM sequence: CTA
agctaattatactttataca

SEQ ID NO: 280764 - DNA, 20 bp, Artificial Sequence
  Description of Artificial Sequence: Synthetic oligonucleotide
  Target: LAMA2; (-) strand; PAM type: YTN; PAM sequence: TTC
taagctaattatactttata

SEQ ID NO: 280765 - DNA, 20 bp, Artificial Sequence
  Description of Artificial Sequence: Synthetic oligonucleotide
  Target: LAMA2; (-) strand; PAM type: YTN; PAM sequence: TTT
ctaagctaattatactttat

SEQ ID NO: 280766 - DNA, 20 bp, Artificial Sequence
  Description of Artificial Sequence: Synthetic oligonucleotide
  Target: LAMA2; (-) strand; PAM type: YTN; PAM sequence: TTT
tctaagctaattatacttta

SEQ ID NO: 280767 - DNA, 20 bp, Artificial Sequence
  Description of Artificial Sequence: Synthetic oligonucleotide
  Target: LAMA2; (-) strand; PAM type: YTN; PAM sequence: TTG
aagcacatcaacaatatcag

SEQ ID NO: 280768 - DNA, 20 bp, Artificial Sequence
  Description of Artificial Sequence: Synthetic oligonucleotide
  Target: LAMA2; (-) strand; PAM type: YTN; PAM sequence: TTA
ttgaagcacatcaacaatat

SEQ ID NO: 280769 - DNA, 20 bp, Artificial Sequence
  Description of Artificial Sequence: Synthetic oligonucleotide
  Target: LAMA2; (-) strand; PAM type: YTN; PAM sequence: TTG
gtaagttattgaagcacatc

SEQ ID NO: 280770 - DNA, 20 bp, Artificial Sequence
  Description of Artificial Sequence: Synthetic oligonucleotide
  Target: LAMA2; (-) strand; PAM type: YTN; PAM sequence: CTT
ggtaagttattgaagcacat

SEQ ID NO: 280771 - DNA, 20 bp, Artificial Sequence
  Description of Artificial Sequence: Synthetic oligonucleotide
  Target: LAMA2; (-) strand; PAM type: YTN; PAM sequence: TTG
cttggtaagttattgaagca

SEQ ID NO: 280772 - DNA, 20 bp, Artificial Sequence
  Description of Artificial Sequence: Synthetic oligonucleotide
  Target: LAMA2; (-) strand; PAM type: YTN; PAM sequence: TTC
cagcattgcttggtaagtta

SEQ ID NO: 280773 - DNA, 20 bp, Artificial Sequence
  Description of Artificial Sequence: Synthetic oligonucleotide
  Target: LAMA2; (-) strand; PAM type: YTN; PAM sequence: TTT
ccagcattgcttggtaagtt

SEQ ID NO: 280774 - DNA, 20 bp, Artificial Sequence
  Description of Artificial Sequence: Synthetic oligonucleotide
  Target: LAMA2; (-) strand; PAM type: YTN; PAM sequence: TTT
tccagcattgcttggtaagt

SEQ ID NO: 280775 - DNA, 20 bp, Artificial Sequence
  Description of Artificial Sequence: Synthetic oligonucleotide
  Target: LAMA2; (-) strand; PAM type: YTN; PAM sequence: CTT
ttccagcattgcttggtaag

SEQ ID NO: 280776 - DNA, 20 bp, Artificial Sequence
  Description of Artificial Sequence: Synthetic oligonucleotide
  Target: LAMA2; (-) strand; PAM type: YTN; PAM sequence: TTG
gagagaaccttttccagcat

SEQ ID NO: 280777 - DNA, 20 bp, Artificial Sequence
  Description of Artificial Sequence: Synthetic oligonucleotide
  Target: LAMA2; (-) strand; PAM type: YTN; PAM sequence: TTT
ggagagaaccttttccagca

SEQ ID NO: 280778 - DNA, 20 bp, Artificial Sequence
  Description of Artificial Sequence: Synthetic oligonucleotide
  Target: LAMA2; (-) strand; PAM type: YTN; PAM sequence: CTG
gaatttggagagaacctttt

SEQ ID NO: 280779 - DNA, 20 bp, Artificial Sequence
  Description of Artificial Sequence: Synthetic oligonucleotide
  Target: LAMA2; (-) strand; PAM type: YTN; PAM sequence: CTC
actggaatttggagagaacc

SEQ ID NO: 280780 - DNA, 20 bp, Artificial Sequence
  Description of Artificial Sequence: Synthetic oligonucleotide
  Target: LAMA2; (-) strand; PAM type: YTN; PAM sequence: TTC
aactcactggaatttggaga

SEQ ID NO: 280781 - DNA, 20 bp, Artificial Sequence
  Description of Artificial Sequence: Synthetic oligonucleotide
  Target: LAMA2; (-) strand; PAM type: YTN; PAM sequence: TTT
caactcactggaatttggag

SEQ ID NO: 280782 - DNA, 20 bp, Artificial Sequence
  Description of Artificial Sequence: Synthetic oligonucleotide
  Target: LAMA2; (-) strand; PAM type: YTN; PAM sequence: TTA
tgggtgaaaagcaccgtttc

SEQ ID NO: 280783 - DNA, 20 bp, Artificial Sequence
  Description of Artificial Sequence: Synthetic oligonucleotide
  Target: LAMA2; (-) strand; PAM type: YTN; PAM sequence: CTA
acatgttatgggtgaaaagc

SEQ ID NO: 280784 - DNA, 20 bp, Artificial Sequence
  Description of Artificial Sequence: Synthetic oligonucleotide
  Target: LAMA2; (-) strand; PAM type: YTN; PAM sequence: TTC
acatgataagggaatggaaa

SEQ ID NO: 280785 - DNA, 20 bp, Artificial Sequence
  Description of Artificial Sequence: Synthetic oligonucleotide
  Target: LAMA2; (-) strand; PAM type: YTN; PAM sequence: TTT
cacatgataagggaatggaa

SEQ ID NO: 280786 - DNA, 20 bp, Artificial Sequence
  Description of Artificial Sequence: Synthetic oligonucleotide
  Target: LAMA2; (-) strand; PAM type: YTN; PAM sequence: TTT
tcacatgataagggaatgga

SEQ ID NO: 280787 - DNA, 20 bp, Artificial Sequence
  Description of Artificial Sequence: Synthetic oligonucleotide
  Target: LAMA2; (-) strand; PAM type: YTN; PAM sequence: CTT
ttcacatgataagggaatgg

SEQ ID NO: 280788 - DNA, 20 bp, Artificial Sequence
  Description of Artificial Sequence: Synthetic oligonucleotide
  Target: LAMA2; (-) strand; PAM type: YTN; PAM sequence: TTA
aaggacaggcttttcacatg

SEQ ID NO: 280789 - DNA, 20 bp, Artificial Sequence
  Description of Artificial Sequence: Synthetic oligonucleotide
  Target: LAMA2; (-) strand; PAM type: YTN; PAM sequence: TTT
aaaggacaggcttttcacat

SEQ ID NO: 280790 - DNA, 20 bp, Artificial Sequence
  Description of Artificial Sequence: Synthetic oligonucleotide
  Target: LAMA2; (-) strand; PAM type: YTN; PAM sequence: CTG
ggtttaaaggacaggctttt

SEQ ID NO: 280791 - DNA, 20 bp, Artificial Sequence
  Description of Artificial Sequence: Synthetic oligonucleotide
  Target: LAMA2; (-) strand; PAM type: YTN; PAM sequence: CTG
ccagcaatctgggtttaaag

SEQ ID NO: 280792 - DNA, 20 bp, Artificial Sequence
  Description of Artificial Sequence: Synthetic oligonucleotide
  Target: LAMA2; (-) strand; PAM type: YTN; PAM sequence: TTA
caagcagtctgccagcaatc

SEQ ID NO: 280793 - DNA, 20 bp, Artificial Sequence
  Description of Artificial Sequence: Synthetic oligonucleotide
  Target: LAMA2; (-) strand; PAM type: YTN; PAM sequence: CTG
tcagttacaagcagtctgcc

SEQ ID NO: 280794 - DNA, 20 bp, Artificial Sequence
  Description of Artificial Sequence: Synthetic oligonucleotide
  Target: LAMA2; (-) strand; PAM type: YTN; PAM sequence: TTA
tggcatacaactgtcagtta

SEQ ID NO: 280795 - DNA, 20 bp, Artificial Sequence
  Description of Artificial Sequence: Synthetic oligonucleotide
  Target: LAMA2; (-) strand; PAM type: YTN; PAM sequence: CTT
atggcatacaactgtcagtt

SEQ ID NO: 280796 - DNA, 20 bp, Artificial Sequence
  Description of Artificial Sequence: Synthetic oligonucleotide
  Target: LAMA2; (-) strand; PAM type: YTN; PAM sequence: TTA
aagtaaagagcttatggcat

SEQ ID NO: 280797 - DNA, 20 bp, Artificial Sequence
  Description of Artificial Sequence: Synthetic oligonucleotide
  Target: LAMA2; (-) strand; PAM type: YTN; PAM sequence: CTA
aaatattaaagtaaagagct

SEQ ID NO: 280798 - DNA, 20 bp, Artificial Sequence
  Description of Artificial Sequence: Synthetic oligonucleotide
  Target: LAMA2; (-) strand; PAM type: YTN; PAM sequence: CTC
taaaatattaaagtaaagag

SEQ ID NO: 280799 - DNA, 20 bp, Artificial Sequence
  Description of Artificial Sequence: Synthetic oligonucleotide
  Target: LAMA2; (-) strand; PAM type: YTN; PAM sequence: CTC
tctaaaatattaaagtaaag

SEQ ID NO: 280800 - DNA, 20 bp, Artificial Sequence
  Description of Artificial Sequence: Synthetic oligonucleotide
  Target: LAMA2; (-) strand; PAM type: YTN; PAM sequence: TTC
aagaagctctctaaaatatt

SEQ ID NO: 280801 - DNA, 20 bp, Artificial Sequence
  Description of Artificial Sequence: Synthetic oligonucleotide
  Target: LAMA2; (-) strand; PAM type: YTN; PAM sequence: TTT
caagaagctctctaaaatat

SEQ ID NO: 280802 - DNA, 20 bp, Artificial Sequence
  Description of Artificial Sequence: Synthetic oligonucleotide
  Target: LAMA2; (-) strand; PAM type: YTN; PAM sequence: CTC
aatgtttcaagaagctctct

SEQ ID NO: 280803 - DNA, 20 bp, Artificial Sequence
  Description of Artificial Sequence: Synthetic oligonucleotide
  Target: LAMA2; (-) strand; PAM type: YTN; PAM sequence: TTG
gaggaaaagacatgcctcaa

SEQ ID NO: 280804 - DNA, 20 bp, Artificial Sequence
  Description of Artificial Sequence: Synthetic oligonucleotide
  Target: LAMA2; (-) strand; PAM type: YTN; PAM sequence: TTT
ggaggaaaagacatgcctca

SEQ ID NO: 280805 - DNA, 20 bp, Artificial Sequence
  Description of Artificial Sequence: Synthetic oligonucleotide
  Target: LAMA2; (-) strand; PAM type: YTN; PAM sequence: TTA
aaaatcaagagatttggagg

SEQ ID NO: 280806 - DNA, 20 bp, Artificial Sequence
  Description of Artificial Sequence: Synthetic oligonucleotide
  Target: LAMA2; (-) strand; PAM type: YTN; PAM sequence: TTG
agaggttaaaaatcaagaga

SEQ ID NO: 280807 - DNA, 20 bp, Artificial Sequence
  Description of Artificial Sequence: Synthetic oligonucleotide
  Target: LAMA2; (-) strand; PAM type: YTN; PAM sequence: CTC
atgcaagcaccgtggaattg

SEQ ID NO: 280808 - DNA, 20 bp, Artificial Sequence
  Description of Artificial Sequence: Synthetic oligonucleotide
  Target: LAMA2; (-) strand; PAM type: YTN; PAM sequence: TTG
taatagtataggccagagaa

SEQ ID NO: 280809 - DNA, 20 bp, Artificial Sequence
  Description of Artificial Sequence: Synthetic oligonucleotide
  Target: LAMA2; (-) strand; PAM type: YTN; PAM sequence: TTA
ttgtaatagtataggccaga

SEQ ID NO: 280810 - DNA, 20 bp, Artificial Sequence
  Description of Artificial Sequence: Synthetic oligonucleotide
  Target: LAMA2; (-) strand; PAM type: YTN; PAM sequence: TTG
gttattgtaatagtataggc

SEQ ID NO: 280811 - DNA, 20 bp, Artificial Sequence
  Description of Artificial Sequence: Synthetic oligonucleotide
  Target: LAMA2; (-) strand; PAM type: YTN; PAM sequence: CTG
tgtgggaaaaaaggagccat

SEQ ID NO: 280812 - DNA, 20 bp, Artificial Sequence
  Description of Artificial Sequence: Synthetic oligonucleotide
  Target: LAMA2; (-) strand; PAM type: YTN; PAM sequence: TTG
ggcagctgtgtgggaaaaaa

SEQ ID NO: 280813 - DNA, 20 bp, Artificial Sequence
  Description of Artificial Sequence: Synthetic oligonucleotide
  Target: LAMA2; (-) strand; PAM type: YTN; PAM sequence: CTG
tagtccaagaagatgaattg

SEQ ID NO: 280814 - DNA, 20 bp, Artificial Sequence
  Description of Artificial Sequence: Synthetic oligonucleotide
  Target: LAMA2; (-) strand; PAM type: YTN; PAM sequence: CTG
agtaggagagtgtgatcaga

SEQ ID NO: 280815 - DNA, 20 bp, Artificial Sequence
  Description of Artificial Sequence: Synthetic oligonucleotide
  Target: LAMA2; (-) strand; PAM type: YTN; PAM sequence: TTC
tgagtaggagagtgtgatca

SEQ ID NO: 280816 - DNA, 20 bp, Artificial Sequence
  Description of Artificial Sequence: Synthetic oligonucleotide
  Target: LAMA2; (-) strand; PAM type: YTN; PAM sequence: TTT
ctgagtaggagagtgtgatc

SEQ ID NO: 280817 - DNA, 20 bp, Artificial Sequence
  Description of Artificial Sequence: Synthetic oligonucleotide
  Target: LAMA2; (-) strand; PAM type: YTN; PAM sequence: TTG
aaagtttctgagtaggagag

SEQ ID NO: 280818 - DNA, 20 bp, Artificial Sequence
  Description of Artificial Sequence: Synthetic oligonucleotide
  Target: LAMA2; (-) strand; PAM type: YTN; PAM sequence: CTT
gaaagtttctgagtaggaga

SEQ ID NO: 280819 - DNA, 20 bp, Artificial Sequence
  Description of Artificial Sequence: Synthetic oligonucleotide
  Target: LAMA2; (-) strand; PAM type: YTN; PAM sequence: TTG
gaggccttgaaagtttctga

SEQ ID NO: 280820 - DNA, 20 bp, Artificial Sequence
  Description of Artificial Sequence: Synthetic oligonucleotide
  Target: LAMA2; (-) strand; PAM type: YTN; PAM sequence: TTT
ggaggccttgaaagtttctg

SEQ ID NO: 280821 - DNA, 20 bp, Artificial Sequence
  Description of Artificial Sequence: Synthetic oligonucleotide
  Target: LAMA2; (-) strand; PAM type: YTN; PAM sequence: CTG
ggcaatgagcaatttggagg

SEQ ID NO: 280822 - DNA, 20 bp, Artificial Sequence
  Description of Artificial Sequence: Synthetic oligonucleotide
  Target: LAMA2; (-) strand; PAM type: YTN; PAM sequence: TTG
aatgtgcgagtaaggaaact

SEQ ID NO: 280823 - DNA, 20 bp, Artificial Sequence
  Description of Artificial Sequence: Synthetic oligonucleotide
  Target: LAMA2; (-) strand; PAM type: YTN; PAM sequence: TTT
gaatgtgcgagtaaggaaac

SEQ ID NO: 280824 - DNA, 20 bp, Artificial Sequence
  Description of Artificial Sequence: Synthetic oligonucleotide
  Target: LAMA2; (-) strand; PAM type: YTN; PAM sequence: CTG
gaaggtttgaatgtgcgagt

SEQ ID NO: 280825 - DNA, 20 bp, Artificial Sequence
  Description of Artificial Sequence: Synthetic oligonucleotide
  Target: LAMA2; (-) strand; PAM type: YTN; PAM sequence: TTC
tggaaggtttgaatgtgcga

SEQ ID NO: 280826 - DNA, 20 bp, Artificial Sequence
  Description of Artificial Sequence: Synthetic oligonucleotide
  Target: LAMA2; (-) strand; PAM type: YTN; PAM sequence: TTT
ctggaaggtttgaatgtgcg

SEQ ID NO: 280827 - DNA, 20 bp, Artificial Sequence
  Description of Artificial Sequence: Synthetic oligonucleotide
  Target: LAMA2; (-) strand; PAM type: YTN; PAM sequence: TTA
gacaggtcagagtcaatttc

SEQ ID NO: 280828 - DNA, 20 bp, Artificial Sequence
  Description of Artificial Sequence: Synthetic oligonucleotide
  Target: LAMA2; (-) strand; PAM type: YTN; PAM sequence: CTA
ttagacaggtcagagtcaat

SEQ ID NO: 280829 - DNA, 20 bp, Artificial Sequence
  Description of Artificial Sequence: Synthetic oligonucleotide
  Target: LAMA2; (-) strand; PAM type: YTN; PAM sequence: TTC
gtcaagggcaatgtggagaa

SEQ ID NO: 280830 - DNA, 20 bp, Artificial Sequence
  Description of Artificial Sequence: Synthetic oligonucleotide
  Target: LAMA2; (-) strand; PAM type: YTN; PAM sequence: TTG
tagggttcgtcaagggcaat

SEQ ID NO: 280831 - DNA, 20 bp, Artificial Sequence
  Description of Artificial Sequence: Synthetic oligonucleotide
  Target: LAMA2; (-) strand; PAM type: YTN; PAM sequence: TTT
gtagggttcgtcaagggcaa

SEQ ID NO: 280832 - DNA, 20 bp, Artificial Sequence
  Description of Artificial Sequence: Synthetic oligonucleotide
  Target: LAMA2; (-) strand; PAM type: YTN; PAM sequence: CTA
agtttgtagggttcgtcaag

SEQ ID NO: 280833 - DNA, 20 bp, Artificial Sequence
  Description of Artificial Sequence: Synthetic oligonucleotide
  Target: LAMA2; (-) strand; PAM type: YTN; PAM sequence: CTC
cctaagtttgtagggttcgt

SEQ ID NO: 280834 - DNA, 20 bp, Artificial Sequence
  Description of Artificial Sequence: Synthetic oligonucleotide
  Target: LAMA2; (-) strand; PAM type: YTN; PAM sequence: TTC
agctccctaagtttgtaggg

SEQ ID NO: 280835 - DNA, 20 bp, Artificial Sequence
  Description of Artificial Sequence: Synthetic oligonucleotide
  Target: LAMA2; (-) strand; PAM type: YTN; PAM sequence: TTT
cagctccctaagtttgtagg

SEQ ID NO: 280836 - DNA, 20 bp, Artificial Sequence
  Description of Artificial Sequence: Synthetic oligonucleotide
  Target: LAMA2; (-) strand; PAM type: YTN; PAM sequence: TTG
atgtgtggatgtgagagcga

SEQ ID NO: 280837 - DNA, 20 bp, Artificial Sequence
  Description of Artificial Sequence: Synthetic oligonucleotide
  Target: LAMA2; (-) strand; PAM type: YTN; PAM sequence: TTT
gatgtgtggatgtgagagcg

SEQ ID NO: 280838 - DNA, 20 bp, Artificial Sequence
  Description of Artificial Sequence: Synthetic oligonucleotide
  Target: LAMA2; (-) strand; PAM type: YTN; PAM sequence: TTT
tgatgtgtggatgtgagagc

SEQ ID NO: 280839 - DNA, 20 bp, Artificial Sequence
  Description of Artificial Sequence: Synthetic oligonucleotide
  Target: LAMA2; (-) strand; PAM type: YTN; PAM sequence: CTT
ttgatgtgtggatgtgagag

SEQ ID NO: 280840 - DNA, 20 bp, Artificial Sequence
  Description of Artificial Sequence: Synthetic oligonucleotide
  Target: LAMA2; (-) strand; PAM type: YTN; PAM sequence: CTC
agatgaaaggagacaggtag

SEQ ID NO: 280841 - DNA, 20 bp, Artificial Sequence
  Description of Artificial Sequence: Synthetic oligonucleotide
  Target: LAMA2; (-) strand; PAM type: YTN; PAM sequence: TTG
ctcagatgaaaggagacagg

SEQ ID NO: 280842 - DNA, 20 bp, Artificial Sequence
  Description of Artificial Sequence: Synthetic oligonucleotide
  Target: LAMA2; (-) strand; PAM type: YTN; PAM sequence: CTT
gctcagatgaaaggagacag

SEQ ID NO: 280843 - DNA, 20 bp, Artificial Sequence
  Description of Artificial Sequence: Synthetic oligonucleotide
  Target: LAMA2; (-) strand; PAM type: YTN; PAM sequence: TTC
cttgctcagatgaaaggaga

SEQ ID NO: 280844 - DNA, 20 bp, Artificial Sequence
  Description of Artificial Sequence: Synthetic oligonucleotide
  Target: LAMA2; (-) strand; PAM type: YTN; PAM sequence: TTA
gtcaaccattccttgctcag

SEQ ID NO: 280845 - DNA, 20 bp, Artificial Sequence
  Description of Artificial Sequence: Synthetic oligonucleotide
  Target: LAMA2; (-) strand; PAM type: YTN; PAM sequence: CTT
agtcaaccattccttgctca

SEQ ID NO: 280846 - DNA, 20 bp, Artificial Sequence
  Description of Artificial Sequence: Synthetic oligonucleotide
  Target: LAMA2; (-) strand; PAM type: YTN; PAM sequence: CTG
gatccttagtcaaccattcc

SEQ ID NO: 280847 - DNA, 20 bp, Artificial Sequence
  Description of Artificial Sequence: Synthetic oligonucleotide
  Target: LAMA2; (-) strand; PAM type: YTN; PAM sequence: TTC
ctggatccttagtcaaccat

SEQ ID NO: 280848 - DNA, 20 bp, Artificial Sequence
  Description of Artificial Sequence: Synthetic oligonucleotide
  Target: LAMA2; (-) strand; PAM type: YTN; PAM sequence: CTT
cctggatccttagtcaacca

SEQ ID NO: 280849 - DNA, 20 bp, Artificial Sequence
  Description of Artificial Sequence: Synthetic oligonucleotide
  Target: LAMA2; (-) strand; PAM type: YTN; PAM sequence: TTC
ttcctggatccttagtcaac

SEQ ID NO: 280850 - DNA, 20 bp, Artificial Sequence
  Description of Artificial Sequence: Synthetic oligonucleotide
  Target: LAMA2; (-) strand; PAM type: YTN; PAM sequence: TTT
cttcctggatccttagtcaa

SEQ ID NO: 280851 - DNA, 20 bp, Artificial Sequence
  Description of Artificial Sequence: Synthetic oligonucleotide
  Target: LAMA2; (-) strand; PAM type: YTN; PAM sequence: TTA
ggaagtcagtgatttcttcc

SEQ ID NO: 280852 - DNA, 20 bp, Artificial Sequence
  Description of Artificial Sequence: Synthetic oligonucleotide
  Target: LAMA2; (-) strand; PAM type: YTN; PAM sequence: TTT
aggaagtcagtgatttcttc

SEQ ID NO: 280853 - DNA, 20 bp, Artificial Sequence
  Description of Artificial Sequence: Synthetic oligonucleotide
  Target: LAMA2; (-) strand; PAM type: YTN; PAM sequence: TTT
taggaagtcagtgatttctt

SEQ ID NO: 280854 - DNA, 20 bp, Artificial Sequence
  Description of Artificial Sequence: Synthetic oligonucleotide
  Target: LAMA2; (-) strand; PAM type: YTN; PAM sequence: TTT
ttaggaagtcagtgatttct

SEQ ID NO: 280855 - DNA, 20 bp, Artificial Sequence
  Description of Artificial Sequence: Synthetic oligonucleotide
  Target: LAMA2; (-) strand; PAM type: YTN; PAM sequence: CTT
tttaggaagtcagtgatttc

SEQ ID NO: 280856 - DNA, 20 bp, Artificial Sequence
  Description of Artificial Sequence: Synthetic oligonucleotide
  Target: LAMA2; (-) strand; PAM type: YTN; PAM sequence: CTG
ctttttaggaagtcagtgat

SEQ ID NO: 280857 - DNA, 20 bp, Artificial Sequence
  Description of Artificial Sequence: Synthetic oligonucleotide
  Target: LAMA2; (-) strand; PAM type: YTN; PAM sequence: TTC
cctgctttttaggaagtcag

SEQ ID NO: 280858 - DNA, 20 bp, Artificial Sequence
  Description of Artificial Sequence: Synthetic oligonucleotide
  Target: LAMA2; (-) strand; PAM type: YTN; PAM sequence: TTT
ccctgctttttaggaagtca

SEQ ID NO: 280859 - DNA, 20 bp, Artificial Sequence
  Description of Artificial Sequence: Synthetic oligonucleotide
  Target: LAMA2; (-) strand; PAM type: YTN; PAM sequence: TTT
tccctgctttttaggaagtc

SEQ ID NO: 280860 - DNA, 20 bp, Artificial Sequence
  Description of Artificial Sequence: Synthetic oligonucleotide
  Target: LAMA2; (-) strand; PAM type: YTN; PAM sequence: TTT
ttccctgctttttaggaagt

SEQ ID NO: 280861 - DNA, 20 bp, Artificial Sequence
  Description of Artificial Sequence: Synthetic oligonucleotide
  Target: LAMA2; (-) strand; PAM type: YTN; PAM sequence: TTT
tttccctgctttttaggaag

SEQ ID NO: 280862 - DNA, 20 bp, Artificial Sequence
  Description of Artificial Sequence: Synthetic oligonucleotide
  Target: LAMA2; (-) strand; PAM type: YTN; PAM sequence: TTT
ttttccctgctttttaggaa

SEQ ID NO: 280863 - DNA, 20 bp, Artificial Sequence
  Description of Artificial Sequence: Synthetic oligonucleotide
  Target: LAMA2; (-) strand; PAM type: YTN; PAM sequence: TTT
tttttccctgctttttagga

SEQ ID NO: 280864 - DNA, 20 bp, Artificial Sequence
  Description of Artificial Sequence: Synthetic oligonucleotide
  Target: LAMA2; (-) strand; PAM type: YTN; PAM sequence: TTT
ttttttccctgctttttagg

SEQ ID NO: 280865 - DNA, 20 bp, Artificial Sequence
  Description of Artificial Sequence: Synthetic oligonucleotide
  Target: LAMA2; (-) strand; PAM type: YTN; PAM sequence: TTC
caggcaatttttttttccct

SEQ ID NO: 280866 - DNA, 20 bp, Artificial Sequence
  Description of Artificial Sequence: Synthetic oligonucleotide
  Target: LAMA2; (-) strand; PAM type: YTN; PAM sequence: CTT
ccaggcaatttttttttccc

SEQ ID NO: 280867 - DNA, 20 bp, Artificial Sequence
  Description of Artificial Sequence: Synthetic oligonucleotide
  Target: LAMA2; (-) strand; PAM type: YTN; PAM sequence: TTG
cttccaggcaattttttttt

SEQ ID NO: 280868 - DNA, 20 bp, Artificial Sequence
  Description of Artificial Sequence: Synthetic oligonucleotide
  Target: LAMA2; (-) strand; PAM type: YTN; PAM sequence: TTT
gcttccaggcaatttttttt

SEQ ID NO: 280869 - DNA, 20 bp, Artificial Sequence
  Description of Artificial Sequence: Synthetic oligonucleotide
  Target: LAMA2; (-) strand; PAM type: YTN; PAM sequence: CTT
tgcttccaggcaattttttt

SEQ ID NO: 280870 - DNA, 20 bp, Artificial Sequence
  Description of Artificial Sequence: Synthetic oligonucleotide
  Target: LAMA2; (-) strand; PAM type: YTN; PAM sequence: CTC
tttgcttccaggcaattttt

SEQ ID NO: 280871 - DNA, 20 bp, Artificial Sequence
  Description of Artificial Sequence: Synthetic oligonucleotide
  Target: LAMA2; (-) strand; PAM type: YTN; PAM sequence: CTG
ctctttgcttccaggcaatt

SEQ ID NO: 280872 - DNA, 20 bp, Artificial Sequence
  Description of Artificial Sequence: Synthetic oligonucleotide
  Target: LAMA2; (-) strand; PAM type: YTN; PAM sequence: CTG
aatatcacctgctctttgct

SEQ ID NO: 280873 - DNA, 20 bp, Artificial Sequence
  Description of Artificial Sequence: Synthetic oligonucleotide
  Target: LAMA2; (-) strand; PAM type: YTN; PAM sequence: TTC
tgaatatcacctgctctttg

SEQ ID NO: 280874 - DNA, 20 bp, Artificial Sequence
  Description of Artificial Sequence: Synthetic oligonucleotide
  Target: LAMA2; (-) strand; PAM type: YTN; PAM sequence: TTT
ctgaatatcacctgctcttt

SEQ ID NO: 280875 - DNA, 20 bp, Artificial Sequence
  Description of Artificial Sequence: Synthetic oligonucleotide
  Target: LAMA2; (-) strand; PAM type: YTN; PAM sequence: TTG
catttctgaatatcacctgc

SEQ ID NO: 280876 - DNA, 20 bp, Artificial Sequence
  Description of Artificial Sequence: Synthetic oligonucleotide
  Target: LAMA2; (-) strand; PAM type: YTN; PAM sequence: CTT
gcatttctgaatatcacctg

SEQ ID NO: 280877 - DNA, 20 bp, Artificial Sequence
  Description of Artificial Sequence: Synthetic oligonucleotide
  Target: LAMA2; (-) strand; PAM type: YTN; PAM sequence: TTC
ttgcatttctgaatatcacc

SEQ ID NO: 280878 - DNA, 20 bp, Artificial Sequence
  Description of Artificial Sequence: Synthetic oligonucleotide
  Target: LAMA2; (-) strand; PAM type: YTN; PAM sequence: CTT
cttgcatttctgaatatcac

SEQ ID NO: 280879 - DNA, 20 bp, Artificial Sequence
  Description of Artificial Sequence: Synthetic oligonucleotide
  Target: LAMA2; (-) strand; PAM type: YTN; PAM sequence: CTA
tcttcttgcatttctgaata

SEQ ID NO: 280880 - DNA, 20 bp, Artificial Sequence
  Description of Artificial Sequence: Synthetic oligonucleotide
  Target: LAMA2; (-) strand; PAM type: YTN; PAM sequence: TTC
tatcttcttgcatttctgaa

SEQ ID NO: 280881 - DNA, 20 bp, Artificial Sequence
  Description of Artificial Sequence: Synthetic oligonucleotide
  Target: LAMA2; (-) strand; PAM type: YTN; PAM sequence: TTT
ctatcttcttgcatttctga

SEQ ID NO: 280882 - DNA, 20 bp, Artificial Sequence
  Description of Artificial Sequence: Synthetic oligonucleotide
  Target: LAMA2; (-) strand; PAM type: YTN; PAM sequence: TTT
tctatcttcttgcatttctg

SEQ ID NO: 280883 - DNA, 20 bp, Artificial Sequence
  Description of Artificial Sequence: Synthetic oligonucleotide
  Target: LAMA2; (-) strand; PAM type: YTN; PAM sequence: CTA
attttctatcttcttgcatt

SEQ ID NO: 280884 - DNA, 20 bp, Artificial Sequence
  Description of Artificial Sequence: Synthetic oligonucleotide
  Target: LAMA2; (-) strand; PAM type: YTN; PAM sequence: TTG
ctaattttctatcttcttgc

SEQ ID NO: 280885 - DNA, 20 bp, Artificial Sequence
  Description of Artificial Sequence: Synthetic oligonucleotide
  Target: LAMA2; (-) strand; PAM type: YTN; PAM sequence: CTC
cgtgttgctaattttctatc

SEQ ID NO: 280886 - DNA, 20 bp, Artificial Sequence
  Description of Artificial Sequence: Synthetic oligonucleotide
  Target: LAMA2; (-) strand; PAM type: YTN; PAM sequence: CTG
atacagacctccgtgttgct

SEQ ID NO: 280887 - DNA, 20 bp, Artificial Sequence
  Description of Artificial Sequence: Synthetic oligonucleotide
  Target: LAMA2; (-) strand; PAM type: YTN; PAM sequence: CTA
tgtactgatacagacctccg

SEQ ID NO: 280888 - DNA, 20 bp, Artificial Sequence
  Description of Artificial Sequence: Synthetic oligonucleotide
  Target: LAMA2; (-) strand; PAM type: YTN; PAM sequence: CTG
aaggctatgtactgatacag

SEQ ID NO: 280889 - DNA, 20 bp, Artificial Sequence
  Description of Artificial Sequence: Synthetic oligonucleotide
  Target: LAMA2; (-) strand; PAM type: YTN; PAM sequence: CTG
actgaaggctatgtactgat

SEQ ID NO: 280890 - DNA, 20 bp, Artificial Sequence
  Description of Artificial Sequence: Synthetic oligonucleotide
  Target: LAMA2; (-) strand; PAM type: YTN; PAM sequence: TTC
atccagaaacatgacagccc

SEQ ID NO: 280891 - DNA, 20 bp, Artificial Sequence
  Description of Artificial Sequence: Synthetic oligonucleotide
  Target: LAMA2; (-) strand; PAM type: YTN; PAM sequence: CTT
catccagaaacatgacagcc

SEQ ID NO: 280892 - DNA, 20 bp, Artificial Sequence
  Description of Artificial Sequence: Synthetic oligonucleotide
  Target: LAMA2; (-) strand; PAM type: YTN; PAM sequence: TTG
caccttcatccagaaacatg

SEQ ID NO: 280893 - DNA, 20 bp, Artificial Sequence
  Description of Artificial Sequence: Synthetic oligonucleotide
  Target: LAMA2; (-) strand; PAM type: YTN; PAM sequence: CTT
gcaccttcatccagaaacat

SEQ ID NO: 280894 - DNA, 20 bp, Artificial Sequence
  Description of Artificial Sequence: Synthetic oligonucleotide
  Target: LAMA2; (-) strand; PAM type: YTN; PAM sequence: CTC
ttgcaccttcatccagaaac

SEQ ID NO: 280895 - DNA, 20 bp, Artificial Sequence
  Description of Artificial Sequence: Synthetic oligonucleotide
  Target: LAMA2; (-) strand; PAM type: YTN; PAM sequence: CTG
gctcttgcaccttcatccag

SEQ ID NO: 280896 - DNA, 20 bp, Artificial Sequence
  Description of Artificial Sequence: Synthetic oligonucleotide
  Target: LAMA2; (-) strand; PAM type: YTN; PAM sequence: TTC
cactggctcttgcaccttca

SEQ ID NO: 280897 - DNA, 20 bp, Artificial Sequence
  Description of Artificial Sequence: Synthetic oligonucleotide
  Target: LAMA2; (-) strand; PAM type: YTN; PAM sequence: TTT
ccactggctcttgcaccttc

SEQ ID NO: 280898 - DNA, 20 bp, Artificial Sequence
  Description of Artificial Sequence: Synthetic oligonucleotide
  Target: LAMA2; (-) strand; PAM type: YTN; PAM sequence: TTT
tccactggctcttgcacctt

SEQ ID NO: 280899 - DNA, 20 bp, Artificial Sequence
  Description of Artificial Sequence: Synthetic oligonucleotide
  Target: LAMA2; (-) strand; PAM type: YTN; PAM sequence: TTG
attttccactggctcttgca

SEQ ID NO: 280900 - DNA, 20 bp, Artificial Sequence
  Description of Artificial Sequence: Synthetic oligonucleotide
  Target: LAMA2; (-) strand; PAM type: YTN; PAM sequence: TTA
tcaatgtattgattttccac

SEQ ID NO: 280901 - DNA, 20 bp, Artificial Sequence
  Description of Artificial Sequence: Synthetic oligonucleotide
  Target: LAMA2; (-) strand; PAM type: YTN; PAM sequence: CTG
gatgattatcaatgtattga

SEQ ID NO: 280902 - DNA, 20 bp, Artificial Sequence
  Description of Artificial Sequence: Synthetic oligonucleotide
  Target: LAMA2; (-) strand; PAM type: YTN; PAM sequence: CTG
gctggatgattatcaatgta

SEQ ID NO: 280903 - DNA, 20 bp, Artificial Sequence
  Description of Artificial Sequence: Synthetic oligonucleotide
  Target: LAMA2; (-) strand; PAM type: YTN; PAM sequence: TTA
gtctggctggatgattatca

SEQ ID NO: 280904 - DNA, 20 bp, Artificial Sequence
  Description of Artificial Sequence: Synthetic oligonucleotide
  Target: LAMA2; (-) strand; PAM type: YTN; PAM sequence: CTG
attagtctggctggatgatt

SEQ ID NO: 280905 - DNA, 20 bp, Artificial Sequence
  Description of Artificial Sequence: Synthetic oligonucleotide
  Target: LAMA2; (-) strand; PAM type: YTN; PAM sequence: TTC
tgattagtctggctggatga

SEQ ID NO: 280906 - DNA, 20 bp, Artificial Sequence
  Description of Artificial Sequence: Synthetic oligonucleotide
  Target: LAMA2; (-) strand; PAM type: YTN; PAM sequence: TTT
ctgattagtctggctggatg

SEQ ID NO: 280907 - DNA, 20 bp, Artificial Sequence
  Description of Artificial Sequence: Synthetic oligonucleotide
  Target: LAMA2; (-) strand; PAM type: YTN; PAM sequence: TTT
tctgattagtctggctggat

SEQ ID NO: 280908 - DNA, 20 bp, Artificial Sequence
  Description of Artificial Sequence: Synthetic oligonucleotide
  Target: LAMA2; (-) strand; PAM type: YTN; PAM sequence: TTT
ttctgattagtctggctgga

SEQ ID NO: 280909 - DNA, 20 bp, Artificial Sequence
  Description of Artificial Sequence: Synthetic oligonucleotide
  Target: LAMA2; (-) strand; PAM type: YTN; PAM sequence: TTT
tttctgattagtctggctgg

SEQ ID NO: 280910 - DNA, 20 bp, Artificial Sequence
  Description of Artificial Sequence: Synthetic oligonucleotide
  Target: LAMA2; (-) strand; PAM type: YTN; PAM sequence: TTT
ttttctgattagtctggctg

SEQ ID NO: 280911 - DNA, 20 bp, Artificial Sequence
  Description of Artificial Sequence: Synthetic oligonucleotide
  Target: LAMA2; (-) strand; PAM type: YTN; PAM sequence: CTG
atttttttctgattagtctg

SEQ ID NO: 280912 - DNA, 20 bp, Artificial Sequence
  Description of Artificial Sequence: Synthetic oligonucleotide
  Target: LAMA2; (-) strand; PAM type: YTN; PAM sequence: TTC
tgatttttttctgattagtc

SEQ ID NO: 280913 - DNA, 20 bp, Artificial Sequence
  Description of Artificial Sequence: Synthetic oligonucleotide
  Target: LAMA2; (-) strand; PAM type: YTN; PAM sequence: TTT
ctgatttttttctgattagt

SEQ ID NO: 280914 - DNA, 20 bp, Artificial Sequence
  Description of Artificial Sequence: Synthetic oligonucleotide
  Target: LAMA2; (-) strand; PAM type: YTN; PAM sequence: TTT
tctgatttttttctgattag

SEQ ID NO: 280915 - DNA, 20 bp, Artificial Sequence
  Description of Artificial Sequence: Synthetic oligonucleotide
  Target: LAMA2; (-) strand; PAM type: YTN; PAM sequence: CTT
ttctgatttttttctgatta

SEQ ID NO: 280916 - DNA, 20 bp, Artificial Sequence
  Description of Artificial Sequence: Synthetic oligonucleotide
  Target: LAMA2; (-) strand; PAM type: YTN; PAM sequence: TTG
gtgacttttctgattttttt

SEQ ID NO: 280917 - DNA, 20 bp, Artificial Sequence
  Description of Artificial Sequence: Synthetic oligonucleotide
  Target: LAMA2; (-) strand; PAM type: YTN; PAM sequence: TTG
gtagttggtgacttttctga

SEQ ID NO: 280918 - DNA, 20 bp, Artificial Sequence
  Description of Artificial Sequence: Synthetic oligonucleotide
  Target: LAMA2; (-) strand; PAM type: YTN; PAM sequence: CTG
atattggtagttggtgactt

SEQ ID NO: 280919 - DNA, 20 bp, Artificial Sequence
  Description of Artificial Sequence: Synthetic oligonucleotide
  Target: LAMA2; (-) strand; PAM type: YTN; PAM sequence: TTC
ctgatattggtagttggtga

SEQ ID NO: 280920 - DNA, 20 bp, Artificial Sequence
  Description of Artificial Sequence: Synthetic oligonucleotide
  Target: LAMA2; (-) strand; PAM type: YTN; PAM sequence: TTG
tattcctgatattggtagtt

SEQ ID NO: 280921 - DNA, 20 bp, Artificial Sequence
  Description of Artificial Sequence: Synthetic oligonucleotide
  Target: LAMA2; (-) strand; PAM type: YTN; PAM sequence: CTT
gtattcctgatattggtagt

SEQ ID NO: 280922 - DNA, 20 bp, Artificial Sequence
  Description of Artificial Sequence: Synthetic oligonucleotide
  Target: LAMA2; (-) strand; PAM type: YTN; PAM sequence: CTC
ttgtattcctgatattggta

SEQ ID NO: 280923 - DNA, 20 bp, Artificial Sequence
  Description of Artificial Sequence: Synthetic oligonucleotide
  Target: LAMA2; (-) strand; PAM type: YTN; PAM sequence: TTC
acctcttgtattcctgatat

SEQ ID NO: 280924 - DNA, 20 bp, Artificial Sequence
  Description of Artificial Sequence: Synthetic oligonucleotide
  Target: LAMA2; (-) strand; PAM type: YTN; PAM sequence: TTT
cacctcttgtattcctgata

SEQ ID NO: 280925 - DNA, 20 bp, Artificial Sequence
  Description of Artificial Sequence: Synthetic oligonucleotide
  Target: LAMA2; (-) strand; PAM type: YTN; PAM sequence: TTG
tagtgatttcacctcttgta

SEQ ID NO: 280926 - DNA, 20 bp, Artificial Sequence
  Description of Artificial Sequence: Synthetic oligonucleotide
  Target: LAMA2; (-) strand; PAM type: YTN; PAM sequence: CTG
cagaagttgtagtgatttca

SEQ ID NO: 280927 - DNA, 20 bp, Artificial Sequence
  Description of Artificial Sequence: Synthetic oligonucleotide
  Target: LAMA2; (-) strand; PAM type: YTN; PAM sequence: CTA
tctgcagaagttgtagtgat

SEQ ID NO: 280928 - DNA, 20 bp, Artificial Sequence
  Description of Artificial Sequence: Synthetic oligonucleotide
  Target: LAMA2; (-) strand; PAM type: YTN; PAM sequence: TTA
ctatctgcagaagttgtagt

SEQ ID NO: 280929 - DNA, 20 bp, Artificial Sequence
  Description of Artificial Sequence: Synthetic oligonucleotide
  Target: LAMA2; (-) strand; PAM type: YTN; PAM sequence: TTT
actatctgcagaagttgtag

SEQ ID NO: 280930 - DNA, 20 bp, Artificial Sequence
  Description of Artificial Sequence: Synthetic oligonucleotide
  Target: LAMA2; (-) strand; PAM type: YTN; PAM sequence: CTT
tactatctgcagaagttgta

SEQ ID NO: 280931 - DNA, 20 bp, Artificial Sequence
  Description of Artificial Sequence: Synthetic oligonucleotide
  Target: LAMA2; (-) strand; PAM type: YTN; PAM sequence: TTA
acatcctttactatctgcag

SEQ ID NO: 280932 - DNA, 20 bp, Artificial Sequence
  Description of Artificial Sequence: Synthetic oligonucleotide
  Target: LAMA2; (-) strand; PAM type: YTN; PAM sequence: CTT
aacatcctttactatctgca

SEQ ID NO: 280933 - DNA, 20 bp, Artificial Sequence
  Description of Artificial Sequence: Synthetic oligonucleotide
  Target: LAMA2; (-) strand; PAM type: YTN; PAM sequence: CTC
ttaacatcctttactatctg

SEQ ID NO: 280934 - DNA, 20 bp, Artificial Sequence
  Description of Artificial Sequence: Synthetic oligonucleotide
  Target: LAMA2; (-) strand; PAM type: YTN; PAM sequence: TTC
ataatatcctcttaacatcc

SEQ ID NO: 280935 - DNA, 20 bp, Artificial Sequence
  Description of Artificial Sequence: Synthetic oligonucleotide
  Target: LAMA2; (-) strand; PAM type: YTN; PAM sequence: TTG
ttcataatatcctcttaaca

SEQ ID NO: 280936 - DNA, 20 bp, Artificial Sequence
  Description of Artificial Sequence: Synthetic oligonucleotide
  Target: LAMA2; (-) strand; PAM type: YTN; PAM sequence: TTG
ccataaaattgttcataata

SEQ ID NO: 280937 - DNA, 20 bp, Artificial Sequence
  Description of Artificial Sequence: Synthetic oligonucleotide
  Target: LAMA2; (-) strand; PAM type: YTN; PAM sequence: TTA
ttgccataaaattgttcata

SEQ ID NO: 280938 - DNA, 20 bp, Artificial Sequence
  Description of Artificial Sequence: Synthetic oligonucleotide
  Target: LAMA2; (-) strand; PAM type: YTN; PAM sequence: TTG
aattattgccataaaattgt

SEQ ID NO: 280939 - DNA, 20 bp, Artificial Sequence
  Description of Artificial Sequence: Synthetic oligonucleotide
  Target: LAMA2; (-) strand; PAM type: YTN; PAM sequence: TTG
ttgaattattgccataaaat

SEQ ID NO: 280940 - DNA, 20 bp, Artificial Sequence
  Description of Artificial Sequence: Synthetic oligonucleotide
  Target: LAMA2; (-) strand; PAM type: YTN; PAM sequence: TTA
tccaaattgttgaattattg

SEQ ID NO: 280941 - DNA, 20 bp, Artificial Sequence
  Description of Artificial Sequence: Synthetic oligonucleotide
  Target: LAMA2; (-) strand; PAM type: YTN; PAM sequence: TTT
atccaaattgttgaattatt

SEQ ID NO: 280942 - DNA, 20 bp, Artificial Sequence
  Description of Artificial Sequence: Synthetic oligonucleotide
  Target: LAMA2; (-) strand; PAM type: YTN; PAM sequence: TTT
tatccaaattgttgaattat

SEQ ID NO: 280943 - DNA, 20 bp, Artificial Sequence
  Description of Artificial Sequence: Synthetic oligonucleotide
  Target: LAMA2; (-) strand; PAM type: YTN; PAM sequence: TTT
ttatccaaattgttgaatta

SEQ ID NO: 280944 - DNA, 20 bp, Artificial Sequence
  Description of Artificial Sequence: Synthetic oligonucleotide
  Target: LAMA2; (-) strand; PAM type: YTN; PAM sequence: CTT
tttatccaaattgttgaatt

SEQ ID NO: 280945 - DNA, 20 bp, Artificial Sequence
  Description of Artificial Sequence: Synthetic oligonucleotide
  Target: LAMA2; (-) strand; PAM type: YTN; PAM sequence: TTG
ccctttttatccaaattgtt

SEQ ID NO: 280946 - DNA, 20 bp, Artificial Sequence
  Description of Artificial Sequence: Synthetic oligonucleotide
  Target: LAMA2; (-) strand; PAM type: YTN; PAM sequence: TTT
gccctttttatccaaattgt

SEQ ID NO: 280947 - DNA, 20 bp, Artificial Sequence
  Description of Artificial Sequence: Synthetic oligonucleotide
  Target: LAMA2; (-) strand; PAM type: YTN; PAM sequence: TTC
aaagaatttgccctttttat

SEQ ID NO: 280948 - DNA, 20 bp, Artificial Sequence
  Description of Artificial Sequence: Synthetic oligonucleotide
  Target: LAMA2; (-) strand; PAM type: YTN; PAM sequence: TTT
caaagaatttgcccttttta

SEQ ID NO: 280949 - DNA, 20 bp, Artificial Sequence
  Description of Artificial Sequence: Synthetic oligonucleotide
  Target: LAMA2; (-) strand; PAM type: YTN; PAM sequence: TTT
tcaaagaatttgcccttttt

SEQ ID NO: 280950 - DNA, 20 bp, Artificial Sequence
  Description of Artificial Sequence: Synthetic oligonucleotide
  Target: LAMA2; (-) strand; PAM type: YTN; PAM sequence: TTG
tgattttcaaagaatttgcc

SEQ ID NO: 280951 - DNA, 20 bp, Artificial Sequence
  Description of Artificial Sequence: Synthetic oligonucleotide
  Target: LAMA2; (-) strand; PAM type: YTN; PAM sequence: TTT
gtgattttcaaagaatttgc

SEQ ID NO: 280952 - DNA, 20 bp, Artificial Sequence
  Description of Artificial Sequence: Synthetic oligonucleotide
  Target: LAMA2; (-) strand; PAM type: YTN; PAM sequence: TTG
gtagtttgtgattttcaaag

SEQ ID NO: 280953 - DNA, 20 bp, Artificial Sequence
  Description of Artificial Sequence: Synthetic oligonucleotide
  Target: LAMA2; (-) strand; PAM type: YTN; PAM sequence: TTT
ggtagtttgtgattttcaaa

SEQ ID NO: 280954 - DNA, 20 bp, Artificial Sequence
  Description of Artificial Sequence: Synthetic oligonucleotide
  Target: LAMA2; (-) strand; PAM type: YTN; PAM sequence: TTT
tggtagtttgtgattttcaa

SEQ ID NO: 280955 - DNA, 20 bp, Artificial Sequence
  Description of Artificial Sequence: Synthetic oligonucleotide
  Target: LAMA2; (-) strand; PAM type: YTN; PAM sequence: CTG
tgagttttggtagtttgtga

SEQ ID NO: 280956 - DNA, 20 bp, Artificial Sequence
  Description of Artificial Sequence: Synthetic oligonucleotide
  Target: LAMA2; (-) strand; PAM type: YTN; PAM sequence: TTA
tctgtgagttttggtagttt

SEQ ID NO: 280957 - DNA, 20 bp, Artificial Sequence
  Description of Artificial Sequence: Synthetic oligonucleotide
  Target: LAMA2; (-) strand; PAM type: YTN; PAM sequence: TTT
atctgtgagttttggtagtt

SEQ ID NO: 280958 - DNA, 20 bp, Artificial Sequence
  Description of Artificial Sequence: Synthetic oligonucleotide
  Target: LAMA2; (-) strand; PAM type: YTN; PAM sequence: TTA
tttatctgtgagttttggta

SEQ ID NO: 280959 - DNA, 20 bp, Artificial Sequence
  Description of Artificial Sequence: Synthetic oligonucleotide
  Target: LAMA2; (-) strand; PAM type: YTN; PAM sequence: TTC
agattatttatctgtgagtt

SEQ ID NO: 280960 - DNA, 20 bp, Artificial Sequence
  Description of Artificial Sequence: Synthetic oligonucleotide
  Target: LAMA2; (-) strand; PAM type: YTN; PAM sequence: CTA
ttcagattatttatctgtga

SEQ ID NO: 280961 - DNA, 20 bp, Artificial Sequence
  Description of Artificial Sequence: Synthetic oligonucleotide
  Target: LAMA2; (-) strand; PAM type: YTN; PAM sequence: CTA
atgaatatagaactattcag

SEQ ID NO: 280962 - DNA, 20 bp, Artificial Sequence
  Description of Artificial Sequence: Synthetic oligonucleotide
  Target: LAMA2; (-) strand; PAM type: YTN; PAM sequence: CTC
taatgaatatagaactattc

SEQ ID NO: 280963 - DNA, 20 bp, Artificial Sequence
  Description of Artificial Sequence: Synthetic oligonucleotide
  Target: LAMA2; (-) strand; PAM type: YTN; PAM sequence: TTC
tctaatgaatatagaactat

SEQ ID NO: 280964 - DNA, 20 bp, Artificial Sequence
  Description of Artificial Sequence: Synthetic oligonucleotide
  Target: LAMA2; (-) strand; PAM type: YTN; PAM sequence: TTA
aattctctaatgaatataga

SEQ ID NO: 280965 - DNA, 20 bp, Artificial Sequence
  Description of Artificial Sequence: Synthetic oligonucleotide
  Target: LAMA2; (-) strand; PAM type: YTN; PAM sequence: CTA
caaattaaattctctaatga

SEQ ID NO: 280966 - DNA, 20 bp, Artificial Sequence
  Description of Artificial Sequence: Synthetic oligonucleotide
  Target: LAMA2; (-) strand; PAM type: YTN; PAM sequence: TTG
aactacaaattaaattctct

SEQ ID NO: 280967 - DNA, 20 bp, Artificial Sequence
  Description of Artificial Sequence: Synthetic oligonucleotide
  Target: LAMA2; (-) strand; PAM type: YTN; PAM sequence: TTT
gaactacaaattaaattctc

SEQ ID NO: 280968 - DNA, 20 bp, Artificial Sequence
  Description of Artificial Sequence: Synthetic oligonucleotide
  Target: LAMA2; (-) strand; PAM type: YTN; PAM sequence: TTT
tgaactacaaattaaattct

SEQ ID NO: 280969 - DNA, 20 bp, Artificial Sequence
  Description of Artificial Sequence: Synthetic oligonucleotide
  Target: LAMA2; (-) strand; PAM type: YTN; PAM sequence: TTG
tgtgtgtgaaggttttgaac

SEQ ID NO: 280970 - DNA, 20 bp, Artificial Sequence
  Description of Artificial Sequence: Synthetic oligonucleotide
  Target: LAMA2; (-) strand; PAM type: YTN; PAM sequence: TTT
gtgtgtgtgaaggttttgaa

SEQ ID NO: 280971 - DNA, 20 bp, Artificial Sequence
  Description of Artificial Sequence: Synthetic oligonucleotide
  Target: LAMA2; (-) strand; PAM type: YTN; PAM sequence: CTG
aatttgtgtgtgtgaaggtt

SEQ ID NO: 280972 - DNA, 20 bp, Artificial Sequence
  Description of Artificial Sequence: Synthetic oligonucleotide
  Target: LAMA2; (-) strand; PAM type: YTN; PAM sequence: CTG
gaactgaatttgtgtgtgtg

SEQ ID NO: 280973 - DNA, 20 bp, Artificial Sequence
  Description of Artificial Sequence: Synthetic oligonucleotide
  Target: LAMA2; (-) strand; PAM type: YTN; PAM sequence: TTC
acaagtaaagtcatctggaa

SEQ ID NO: 280974 - DNA, 20 bp, Artificial Sequence
  Description of Artificial Sequence: Synthetic oligonucleotide
  Target: LAMA2; (-) strand; PAM type: YTN; PAM sequence: TTG
gtggaattcacaagtaaagt

SEQ ID NO: 280975 - DNA, 20 bp, Artificial Sequence
  Description of Artificial Sequence: Synthetic oligonucleotide
  Target: LAMA2; (-) strand; PAM type: YTN; PAM sequence: TTT
ggtggaattcacaagtaaag

SEQ ID NO: 280976 - DNA, 20 bp, Artificial Sequence
  Description of Artificial Sequence: Synthetic oligonucleotide
  Target: LAMA2; (-) strand; PAM type: YTN; PAM sequence: TTA
aatatttggtggaattcaca

SEQ ID NO: 280977 - DNA, 20 bp, Artificial Sequence
  Description of Artificial Sequence: Synthetic oligonucleotide
  Target: LAMA2; (-) strand; PAM type: YTN; PAM sequence: TTC
attaaatatttggtggaatt

SEQ ID NO: 280978 - DNA, 20 bp, Artificial Sequence
  Description of Artificial Sequence: Synthetic oligonucleotide
  Target: LAMA2; (-) strand; PAM type: YTN; PAM sequence: CTT
cattaaatatttggtggaat

SEQ ID NO: 280979 - DNA, 20 bp, Artificial Sequence
  Description of Artificial Sequence: Synthetic oligonucleotide
  Target: LAMA2; (-) strand; PAM type: YTN; PAM sequence: TTC
ttcattaaatatttggtgga

SEQ ID NO: 280980 - DNA, 20 bp, Artificial Sequence
  Description of Artificial Sequence: Synthetic oligonucleotide
  Target: LAMA2; (-) strand; PAM type: YTN; PAM sequence: TTT
cttcattaaatatttggtgg

SEQ ID NO: 280981 - DNA, 20 bp, Artificial Sequence
  Description of Artificial Sequence: Synthetic oligonucleotide
  Target: LAMA2; (-) strand; PAM type: YTN; PAM sequence: TTA
tttcttcattaaatatttgg

SEQ ID NO: 280982 - DNA, 20 bp, Artificial Sequence
  Description of Artificial Sequence: Synthetic oligonucleotide
  Target: LAMA2; (-) strand; PAM type: YTN; PAM sequence: TTA
ttatttcttcattaaatatt

SEQ ID NO: 280983 - DNA, 20 bp, Artificial Sequence
  Description of Artificial Sequence: Synthetic oligonucleotide
  Target: LAMA2; (-) strand; PAM type: YTN; PAM sequence: TTT
attatttcttcattaaatat

SEQ ID NO: 280984 - DNA, 20 bp, Artificial Sequence
  Description of Artificial Sequence: Synthetic oligonucleotide
  Target: LAMA2; (-) strand; PAM type: YTN; PAM sequence: CTG
aaagagtttattatttcttc

SEQ ID NO: 280985 - DNA, 20 bp, Artificial Sequence
  Description of Artificial Sequence: Synthetic oligonucleotide
  Target: LAMA2; (-) strand; PAM type: YTN; PAM sequence: TTC
tgaaagagtttattatttct

SEQ ID NO: 280986 - DNA, 20 bp, Artificial Sequence
  Description of Artificial Sequence: Synthetic oligonucleotide
  Target: LAMA2; (-) strand; PAM type: YTN; PAM sequence: TTT
ctgaaagagtttattatttc

SEQ ID NO: 280987 - DNA, 20 bp, Artificial Sequence
  Description of Artificial Sequence: Synthetic oligonucleotide
  Target: LAMA2; (-) strand; PAM type: YTN; PAM sequence: TTT
tctgaaagagtttattattt

SEQ ID NO: 280988 - DNA, 20 bp, Artificial Sequence
  Description of Artificial Sequence: Synthetic oligonucleotide
  Target: LAMA2; (-) strand; PAM type: YTN; PAM sequence: TTC
aattttctgaaagagtttat

SEQ ID NO: 280989 - DNA, 20 bp, Artificial Sequence
  Description of Artificial Sequence: Synthetic oligonucleotide
  Target: LAMA2; (-) strand; PAM type: YTN; PAM sequence: CTT
caattttctgaaagagttta

SEQ ID NO: 280990 - DNA, 20 bp, Artificial Sequence
  Description of Artificial Sequence: Synthetic oligonucleotide
  Target: LAMA2; (-) strand; PAM type: YTN; PAM sequence: CTC
ttcaattttctgaaagagtt

SEQ ID NO: 280991 - DNA, 20 bp, Artificial Sequence
  Description of Artificial Sequence: Synthetic oligonucleotide
  Target: LAMA2; (-) strand; PAM type: YTN; PAM sequence: CTC
ctcttcaattttctgaaaga

SEQ ID NO: 280992 - DNA, 20 bp, Artificial Sequence
  Description of Artificial Sequence: Synthetic oligonucleotide
  Target: LAMA2; (-) strand; PAM type: YTN; PAM sequence: TTC
tcctcttcaattttctgaaa

SEQ ID NO: 280993 - DNA, 20 bp, Artificial Sequence
  Description of Artificial Sequence: Synthetic oligonucleotide
  Target: LAMA2; (-) strand; PAM type: YTN; PAM sequence: TTT
ctcctcttcaattttctgaa

SEQ ID NO: 280994 - DNA, 20 bp, Artificial Sequence
  Description of Artificial Sequence: Synthetic oligonucleotide
  Target: LAMA2; (-) strand; PAM type: YTN; PAM sequence: TTT
tctcctcttcaattttctga

SEQ ID NO: 280995 - DNA, 20 bp, Artificial Sequence
  Description of Artificial Sequence: Synthetic oligonucleotide
  Target: LAMA2; (-) strand; PAM type: YTN; PAM sequence: TTG
gatgtattttctcctcttca

SEQ ID NO: 280996 - DNA, 20 bp, Artificial Sequence
  Description of Artificial Sequence: Synthetic oligonucleotide
  Target: LAMA2; (-) strand; PAM type: YTN; PAM sequence: CTC
gtagaatgaggttggatgta

SEQ ID NO: 280997 - DNA, 20 bp, Artificial Sequence
  Description of Artificial Sequence: Synthetic oligonucleotide
  Target: LAMA2; (-) strand; PAM type: YTN; PAM sequence: CTG
gcctcgtagaatgaggttgg

SEQ ID NO: 280998 - DNA, 20 bp, Artificial Sequence
  Description of Artificial Sequence: Synthetic oligonucleotide
  Target: LAMA2; (-) strand; PAM type: YTN; PAM sequence: TTG
gtatcagagtaatactggcc

SEQ ID NO: 280999 - DNA, 20 bp, Artificial Sequence
  Description of Artificial Sequence: Synthetic oligonucleotide
  Target: LAMA2; (-) strand; PAM type: YTN; PAM sequence: CTG
ccattggtatcagagtaata

SEQ ID NO: 281000 - DNA, 20 bp, Artificial Sequence
  Description of Artificial Sequence: Synthetic oligonucleotide
  Target: LAMA2; (-) strand; PAM type: YTN; PAM sequence: TTG
tctgccattggtatcagagt

SEQ ID NO: 281001 - DNA, 20 bp, Artificial Sequence
  Description of Artificial Sequence: Synthetic oligonucleotide
  Target: LAMA2; (-) strand; PAM type: YTN; PAM sequence: TTT
gtctgccattggtatcagag

SEQ ID NO: 281002 - DNA, 20 bp, Artificial Sequence
  Description of Artificial Sequence: Synthetic oligonucleotide
  Target: LAMA2; (-) strand; PAM type: YTN; PAM sequence: CTT
tgtctgccattggtatcaga

SEQ ID NO: 281003 - DNA, 20 bp, Artificial Sequence
  Description of Artificial Sequence: Synthetic oligonucleotide
  Target: LAMA2; (-) strand; PAM type: YTN; PAM sequence: CTA
tctttgtctgccattggtat

SEQ ID NO: 281004 - DNA, 20 bp, Artificial Sequence
  Description of Artificial Sequence: Synthetic oligonucleotide
  Target: LAMA2; (-) strand; PAM type: YTN; PAM sequence: TTA
aaaactatctttgtctgcca

SEQ ID NO: 281005 - DNA, 20 bp, Artificial Sequence
  Description of Artificial Sequence: Synthetic oligonucleotide
  Target: LAMA2; (-) strand; PAM type: YTN; PAM sequence: TTT
aaaaactatctttgtctgcc

SEQ ID NO: 281006 - DNA, 20 bp, Artificial Sequence
  Description of Artificial Sequence: Synthetic oligonucleotide
  Target: LAMA2; (-) strand; PAM type: YTN; PAM sequence: TTT
taaaaactatctttgtctgc

SEQ ID NO: 281007 - DNA, 20 bp, Artificial Sequence
  Description of Artificial Sequence: Synthetic oligonucleotide
  Target: LAMA2; (-) strand; PAM type: YTN; PAM sequence: TTT
ttaaaaactatctttgtctg

SEQ ID NO: 281008 - DNA, 20 bp, Artificial Sequence
  Description of Artificial Sequence: Synthetic oligonucleotide
  Target: LAMA2; (-) strand; PAM type: YTN; PAM sequence: TTT
tttaaaaactatctttgtct

SEQ ID NO: 281009 - DNA, 20 bp, Artificial Sequence
  Description of Artificial Sequence: Synthetic oligonucleotide
  Target: LAMA2; (-) strand; PAM type: YTN; PAM sequence: CTT
ttttaaaaactatctttgtc

SEQ ID NO: 281010 - DNA, 20 bp, Artificial Sequence
  Description of Artificial Sequence: Synthetic oligonucleotide
  Target: LAMA2; (-) strand; PAM type: YTN; PAM sequence: TTC
ttttttaaaaactatctttg

SEQ ID NO: 281011 - DNA, 20 bp, Artificial Sequence
  Description of Artificial Sequence: Synthetic oligonucleotide
  Target: LAMA2; (-) strand; PAM type: YTN; PAM sequence: TTT
cttttttaaaaactatcttt

SEQ ID NO: 281012 - DNA, 20 bp, Artificial Sequence
  Description of Artificial Sequence: Synthetic oligonucleotide
  Target: LAMA2; (-) strand; PAM type: YTN; PAM sequence: TTT
tcttttttaaaaactatctt

SEQ ID NO: 281013 - DNA, 20 bp, Artificial Sequence
  Description of Artificial Sequence: Synthetic oligonucleotide
  Target: LAMA2; (-) strand; PAM type: YTN; PAM sequence: TTA
tataatataattttcttttt

SEQ ID NO: 281014 - DNA, 20 bp, Artificial Sequence
  Description of Artificial Sequence: Synthetic oligonucleotide
  Target: LAMA2; (-) strand; PAM type: YTN; PAM sequence: TTG
ttatataatataattttctt

SEQ ID NO: 281015 - DNA, 20 bp, Artificial Sequence
  Description of Artificial Sequence: Synthetic oligonucleotide
  Target: LAMA2; (-) strand; PAM type: YTN; PAM sequence: TTC
atggagggatattgttatat

SEQ ID NO: 281016 - DNA, 20 bp, Artificial Sequence
  Description of Artificial Sequence: Synthetic oligonucleotide
  Target: LAMA2; (-) strand; PAM type: YTN; PAM sequence: CTA
tgttcatggagggatattgt

SEQ ID NO: 281017 - DNA, 20 bp, Artificial Sequence
  Description of Artificial Sequence: Synthetic oligonucleotide
  Target: LAMA2; (-) strand; PAM type: YTN; PAM sequence: TTA
catctatgttcatggaggga

SEQ ID NO: 281018 - DNA, 20 bp, Artificial Sequence
  Description of Artificial Sequence: Synthetic oligonucleotide
  Target: LAMA2; (-) strand; PAM type: YTN; PAM sequence: TTT
acatctatgttcatggaggg

SEQ ID NO: 281019 - DNA, 20 bp, Artificial Sequence
  Description of Artificial Sequence: Synthetic oligonucleotide
  Target: LAMA2; (-) strand; PAM type: YTN; PAM sequence: TTT
tacatctatgttcatggagg

SEQ ID NO: 281020 - DNA, 20 bp, Artificial Sequence
  Description of Artificial Sequence: Synthetic oligonucleotide
  Target: LAMA2; (-) strand; PAM type: YTN; PAM sequence: CTT
ttacatctatgttcatggag

SEQ ID NO: 281021 - DNA, 20 bp, Artificial Sequence
  Description of Artificial Sequence: Synthetic oligonucleotide
  Target: LAMA2; (-) strand; PAM type: YTN; PAM sequence: TTG
ccatgaacttttacatctat

SEQ ID NO: 281022 - DNA, 20 bp, Artificial Sequence
  Description of Artificial Sequence: Synthetic oligonucleotide
  Target: LAMA2; (-) strand; PAM type: YTN; PAM sequence: TTT
gccatgaacttttacatcta

SEQ ID NO: 281023 - DNA, 20 bp, Artificial Sequence
  Description of Artificial Sequence: Synthetic oligonucleotide
  Target: LAMA2; (-) strand; PAM type: YTN; PAM sequence: CTT
tgccatgaacttttacatct

SEQ ID NO: 281024 - DNA, 20 bp, Artificial Sequence
  Description of Artificial Sequence: Synthetic oligonucleotide
  Target: LAMA2; (-) strand; PAM type: YTN; PAM sequence: TTA
taactttgccatgaactttt

SEQ ID NO: 281025 - DNA, 20 bp, Artificial Sequence
  Description of Artificial Sequence: Synthetic oligonucleotide
  Target: LAMA2; (-) strand; PAM type: YTN; PAM sequence: TTG
ttataactttgccatgaact

SEQ ID NO: 281026 - DNA, 20 bp, Artificial Sequence
  Description of Artificial Sequence: Synthetic oligonucleotide
  Target: LAMA2; (-) strand; PAM type: YTN; PAM sequence: TTT
gttataactttgccatgaac

SEQ ID NO: 281027 - DNA, 20 bp, Artificial Sequence
  Description of Artificial Sequence: Synthetic oligonucleotide
  Target: LAMA2; (-) strand; PAM type: YTN; PAM sequence: TTG
atttgttataactttgccat

SEQ ID NO: 281028 - DNA, 20 bp, Artificial Sequence
  Description of Artificial Sequence: Synthetic oligonucleotide
  Target: LAMA2; (-) strand; PAM type: YTN; PAM sequence: TTT
gatttgttataactttgcca

SEQ ID NO: 281029 - DNA, 20 bp, Artificial Sequence
  Description of Artificial Sequence: Synthetic oligonucleotide
  Target: LAMA2; (-) strand; PAM type: YTN; PAM sequence: TTA
gatttgatttgttataactt

SEQ ID NO: 281030 - DNA, 20 bp, Artificial Sequence
  Description of Artificial Sequence: Synthetic oligonucleotide
  Target: LAMA2; (-) strand; PAM type: YTN; PAM sequence: TTG
agtaaatcattagatttgat

SEQ ID NO: 281031 - DNA, 20 bp, Artificial Sequence
  Description of Artificial Sequence: Synthetic oligonucleotide
  Target: LAMA2; (-) strand; PAM type: YTN; PAM sequence: TTT
gagtaaatcattagatttga

SEQ ID NO: 281032 - DNA, 20 bp, Artificial Sequence
  Description of Artificial Sequence: Synthetic oligonucleotide
  Target: LAMA2; (-) strand; PAM type: YTN; PAM sequence: CTT
tgagtaaatcattagatttg

SEQ ID NO: 281033 - DNA, 20 bp, Artificial Sequence
  Description of Artificial Sequence: Synthetic oligonucleotide
  Target: LAMA2; (-) strand; PAM type: YTN; PAM sequence: TTA
gtgatcatgtataatccttt

SEQ ID NO: 281034 - DNA, 20 bp, Artificial Sequence
  Description of Artificial Sequence: Synthetic oligonucleotide
  Target: LAMA2; (-) strand; PAM type: YTN; PAM sequence: TTT
agtgatcatgtataatcctt

SEQ ID NO: 281035 - DNA, 20 bp, Artificial Sequence
  Description of Artificial Sequence: Synthetic oligonucleotide
  Target: LAMA2; (-) strand; PAM type: YTN; PAM sequence: TTA
atatcatttagtgatcatgt

SEQ ID NO: 281036 - DNA, 20 bp, Artificial Sequence
  Description of Artificial Sequence: Synthetic oligonucleotide
  Target: LAMA2; (-) strand; PAM type: YTN; PAM sequence: CTG
gcattaatatcatttagtga

SEQ ID NO: 281037 - DNA, 20 bp, Artificial Sequence
  Description of Artificial Sequence: Synthetic oligonucleotide
  Target: LAMA2; (-) strand; PAM type: YTN; PAM sequence: TTA
catcctggcattaatatcat

SEQ ID NO: 281038 - DNA, 20 bp, Artificial Sequence
  Description of Artificial Sequence: Synthetic oligonucleotide
  Target: LAMA2; (-) strand; PAM type: YTN; PAM sequence: CTT
acatcctggcattaatatca

SEQ ID NO: 281039 - DNA, 20 bp, Artificial Sequence
  Description of Artificial Sequence: Synthetic oligonucleotide
  Target: LAMA2; (-) strand; PAM type: YTN; PAM sequence: TTA
aaccaatcttacatcctggc

SEQ ID NO: 281040 - DNA, 20 bp, Artificial Sequence
  Description of Artificial Sequence: Synthetic oligonucleotide
  Target: LAMA2; (-) strand; PAM type: YTN; PAM sequence: TTC
aaatattaaaccaatcttac

SEQ ID NO: 281041 - DNA, 20 bp, Artificial Sequence
  Description of Artificial Sequence: Synthetic oligonucleotide
  Target: LAMA2; (-) strand; PAM type: YTN; PAM sequence: TTT
caaatattaaaccaatctta

SEQ ID NO: 281042 - DNA, 20 bp, Artificial Sequence
  Description of Artificial Sequence: Synthetic oligonucleotide
  Target: LAMA2; (-) strand; PAM type: YTN; PAM sequence: CTA
atttcaaatattaaaccaat

SEQ ID NO: 281043 - DNA, 20 bp, Artificial Sequence
  Description of Artificial Sequence: Synthetic oligonucleotide
  Target: LAMA2; (-) strand; PAM type: YTN; PAM sequence: CTG
actaatttcaaatattaaac

SEQ ID NO: 281044 - DNA, 20 bp, Artificial Sequence
  Description of Artificial Sequence: Synthetic oligonucleotide
  Target: LAMA2; (-) strand; PAM type: YTN; PAM sequence: TTA
cactgactaatttcaaatat

SEQ ID NO: 281045 - DNA, 20 bp, Artificial Sequence
  Description of Artificial Sequence: Synthetic oligonucleotide
  Target: LAMA2; (-) strand; PAM type: YTN; PAM sequence: CTA
tatggtaaattacactgact

SEQ ID NO: 281046 - DNA, 20 bp, Artificial Sequence
  Description of Artificial Sequence: Synthetic oligonucleotide
  Target: LAMA2; (-) strand; PAM type: YTN; PAM sequence: TTG
ctatatggtaaattacactg

SEQ ID NO: 281047 - DNA, 20 bp, Artificial Sequence
  Description of Artificial Sequence: Synthetic oligonucleotide
  Target: LAMA2; (-) strand; PAM type: YTN; PAM sequence: TTT
gctatatggtaaattacact

SEQ ID NO: 281048 - DNA, 20 bp, Artificial Sequence
  Description of Artificial Sequence: Synthetic oligonucleotide
  Target: LAMA2; (-) strand; PAM type: YTN; PAM sequence: TTA
gtttgctatatggtaaatta

SEQ ID NO: 281049 - DNA, 20 bp, Artificial Sequence
  Description of Artificial Sequence: Synthetic oligonucleotide
  Target: LAMA2; (-) strand; PAM type: YTN; PAM sequence: TTT
agtttgctatatggtaaatt

SEQ ID NO: 281050 - DNA, 20 bp, Artificial Sequence
  Description of Artificial Sequence: Synthetic oligonucleotide
  Target: LAMA2; (-) strand; PAM type: YTN; PAM sequence: TTT
tagtttgctatatggtaaat

SEQ ID NO: 281051 - DNA, 20 bp, Artificial Sequence
  Description of Artificial Sequence: Synthetic oligonucleotide
  Target: LAMA2; (-) strand; PAM type: YTN; PAM sequence: TTT
ttagtttgctatatggtaaa

SEQ ID NO: 281052 - DNA, 20 bp, Artificial Sequence
  Description of Artificial Sequence: Synthetic oligonucleotide
  Target: LAMA2; (-) strand; PAM type: YTN; PAM sequence: CTT
tttagtttgctatatggtaa

SEQ ID NO: 281053 - DNA, 20 bp, Artificial Sequence
  Description of Artificial Sequence: Synthetic oligonucleotide
  Target: LAMA2; (-) strand; PAM type: YTN; PAM sequence: TTG
ctttttagtttgctatatgg

SEQ ID NO: 281054 - DNA, 20 bp, Artificial Sequence
  Description of Artificial Sequence: Synthetic oligonucleotide
  Target: LAMA2; (-) strand; PAM type: YTN; PAM sequence: TTT
gctttttagtttgctatatg

SEQ ID NO: 281055 - DNA, 20 bp, Artificial Sequence
  Description of Artificial Sequence: Synthetic oligonucleotide
  Target: LAMA2; (-) strand; PAM type: YTN; PAM sequence: TTA
tatagtttgctttttagttt

SEQ ID NO: 281056 - DNA, 20 bp, Artificial Sequence
  Description of Artificial Sequence: Synthetic oligonucleotide
  Target: LAMA2; (-) strand; PAM type: YTN; PAM sequence: TTG
aggtgattatatagtttgct

SEQ ID NO: 281057 - DNA, 20 bp, Artificial Sequence
  Description of Artificial Sequence: Synthetic oligonucleotide
  Target: LAMA2; (-) strand; PAM type: YTN; PAM sequence: CTG
tatcaattgaggtgattata

SEQ ID NO: 281058 - DNA, 20 bp, Artificial Sequence
  Description of Artificial Sequence: Synthetic oligonucleotide
  Target: LAMA2; (-) strand; PAM type: YTN; PAM sequence: TTG
ctgtatcaattgaggtgatt

SEQ ID NO: 281059 - DNA, 20 bp, Artificial Sequence
  Description of Artificial Sequence: Synthetic oligonucleotide
  Target: LAMA2; (-) strand; PAM type: YTN; PAM sequence: TTT
gctgtatcaattgaggtgat

SEQ ID NO: 281060 - DNA, 20 bp, Artificial Sequence
  Description of Artificial Sequence: Synthetic oligonucleotide
  Target: LAMA2; (-) strand; PAM type: YTN; PAM sequence: CTT
tgctgtatcaattgaggtga

SEQ ID NO: 281061 - DNA, 20 bp, Artificial Sequence
  Description of Artificial Sequence: Synthetic oligonucleotide
  Target: LAMA2; (-) strand; PAM type: YTN; PAM sequence: TTG
tcaaatgcctttgctgtatc

SEQ ID NO: 281062 - DNA, 20 bp, Artificial Sequence
  Description of Artificial Sequence: Synthetic oligonucleotide
  Target: LAMA2; (-) strand; PAM type: YTN; PAM sequence: TTT
gtcaaatgcctttgctgtat

SEQ ID NO: 281063 - DNA, 20 bp, Artificial Sequence
  Description of Artificial Sequence: Synthetic oligonucleotide
  Target: LAMA2; (-) strand; PAM type: YTN; PAM sequence: TTT
tgtcaaatgcctttgctgta

SEQ ID NO: 281064 - DNA, 20 bp, Artificial Sequence
  Description of Artificial Sequence: Synthetic oligonucleotide
  Target: LAMA2; (-) strand; PAM type: YTN; PAM sequence: TTA
aaaaaaaatagacgcatttt

SEQ ID NO: 281065 - DNA, 20 bp, Artificial Sequence
  Description of Artificial Sequence: Synthetic oligonucleotide
  Target: LAMA2; (-) strand; PAM type: YTN; PAM sequence: TTT
aaaaaaaaatagacgcattt

SEQ ID NO: 281066 - DNA, 20 bp, Artificial Sequence
  Description of Artificial Sequence: Synthetic oligonucleotide
  Target: LAMA2; (-) strand; PAM type: YTN; PAM sequence: TTT
taaaaaaaaatagacgcatt

SEQ ID NO: 281067 - DNA, 20 bp, Artificial Sequence
  Description of Artificial Sequence: Synthetic oligonucleotide
  Target: LAMA2; (-) strand; PAM type: YTN; PAM sequence: TTT
ttaaaaaaaaatagacgcat

SEQ ID NO: 281068 - DNA, 20 bp, Artificial Sequence
  Description of Artificial Sequence: Synthetic oligonucleotide
  Target: LAMA2; (-) strand; PAM type: YTN; PAM sequence: TTA
gtaggcagtttttaaaaaaa

SEQ ID NO: 281069 - DNA, 20 bp, Artificial Sequence
  Description of Artificial Sequence: Synthetic oligonucleotide
  Target: LAMA2; (-) strand; PAM type: YTN; PAM sequence: CTT
agtaggcagtttttaaaaaa

SEQ ID NO: 281070 - DNA, 20 bp, Artificial Sequence
  Description of Artificial Sequence: Synthetic oligonucleotide
  Target: LAMA2; (-) strand; PAM type: YTN; PAM sequence: CTC
ttagtaggcagtttttaaaa

SEQ ID NO: 281071 - DNA, 20 bp, Artificial Sequence
  Description of Artificial Sequence: Synthetic oligonucleotide
  Target: LAMA2; (-) strand; PAM type: YTN; PAM sequence: CTA
ctcttagtaggcagttttta

SEQ ID NO: 281072 - DNA, 20 bp, Artificial Sequence
  Description of Artificial Sequence: Synthetic oligonucleotide
  Target: LAMA2; (-) strand; PAM type: YTN; PAM sequence: TTC
ccctactcttagtaggcagt

SEQ ID NO: 281073 - DNA, 20 bp, Artificial Sequence
  Description of Artificial Sequence: Synthetic oligonucleotide
  Target: LAMA2; (-) strand; PAM type: YTN; PAM sequence: TTA
tagtgatcaggtagtgaagt

SEQ ID NO: 281074 - DNA, 20 bp, Artificial Sequence
  Description of Artificial Sequence: Synthetic oligonucleotide
  Target: LAMA2; (-) strand; PAM type: YTN; PAM sequence: TTT
atagtgatcaggtagtgaag

SEQ ID NO: 281075 - DNA, 20 bp, Artificial Sequence
  Description of Artificial Sequence: Synthetic oligonucleotide
  Target: LAMA2; (-) strand; PAM type: YTN; PAM sequence: TTT
tatagtgatcaggtagtgaa

SEQ ID NO: 281076 - DNA, 20 bp, Artificial Sequence
  Description of Artificial Sequence: Synthetic oligonucleotide
  Target: LAMA2; (-) strand; PAM type: YTN; PAM sequence: TTT
ttatagtgatcaggtagtga

SEQ ID NO: 281077 - DNA, 20 bp, Artificial Sequence
  Description of Artificial Sequence: Synthetic oligonucleotide
  Target: LAMA2; (-) strand; PAM type: YTN; PAM sequence: TTA
aaaaataggtttttatagtg

SEQ ID NO: 281078 - DNA, 20 bp, Artificial Sequence
  Description of Artificial Sequence: Synthetic oligonucleotide
  Target: LAMA2; (-) strand; PAM type: YTN; PAM sequence: TTT
aaaaaataggtttttatagt

SEQ ID NO: 281079 - DNA, 20 bp, Artificial Sequence
  Description of Artificial Sequence: Synthetic oligonucleotide
  Target: LAMA2; (-) strand; PAM type: YTN; PAM sequence: TTT
taaaaaataggtttttatag

SEQ ID NO: 281080 - DNA, 20 bp, Artificial Sequence
  Description of Artificial Sequence: Synthetic oligonucleotide
  Target: LAMA2; (-) strand; PAM type: YTN; PAM sequence: TTT
ttaaaaaataggtttttata

SEQ ID NO: 281081 - DNA, 20 bp, Artificial Sequence
  Description of Artificial Sequence: Synthetic oligonucleotide
  Target: LAMA2; (-) strand; PAM type: YTN; PAM sequence: TTT
tttaaaaaataggtttttat

SEQ ID NO: 281082 - DNA, 20 bp, Artificial Sequence
  Description of Artificial Sequence: Synthetic oligonucleotide
  Target: LAMA2; (-) strand; PAM type: YTN; PAM sequence: TTT
ttttaaaaaataggttttta

SEQ ID NO: 281083 - DNA, 20 bp, Artificial Sequence
  Description of Artificial Sequence: Synthetic oligonucleotide
  Target: LAMA2; (-) strand; PAM type: YTN; PAM sequence: TTA
ggtttttttaaaaaataggt

SEQ ID NO: 281084 - DNA, 20 bp, Artificial Sequence
  Description of Artificial Sequence: Synthetic oligonucleotide
  Target: LAMA2; (-) strand; PAM type: YTN; PAM sequence: CTG
ttaggtttttttaaaaaata

SEQ ID NO: 281085 - DNA, 20 bp, Artificial Sequence
  Description of Artificial Sequence: Synthetic oligonucleotide
  Target: LAMA2; (-) strand; PAM type: YTN; PAM sequence: TTA
gctgttaggtttttttaaaa

SEQ ID NO: 281086 - DNA, 20 bp, Artificial Sequence
  Description of Artificial Sequence: Synthetic oligonucleotide
  Target: LAMA2; (-) strand; PAM type: YTN; PAM sequence: TTT
agctgttaggtttttttaaa

SEQ ID NO: 281087 - DNA, 20 bp, Artificial Sequence
  Description of Artificial Sequence: Synthetic oligonucleotide
  Target: LAMA2; (-) strand; PAM type: YTN; PAM sequence: TTT
tagctgttaggtttttttaa

SEQ ID NO: 281088 - DNA, 20 bp, Artificial Sequence
  Description of Artificial Sequence: Synthetic oligonucleotide
  Target: LAMA2; (-) strand; PAM type: YTN; PAM sequence: CTA
agtatgattttagctgttag

SEQ ID NO: 281089 - DNA, 20 bp, Artificial Sequence
  Description of Artificial Sequence: Synthetic oligonucleotide
  Target: LAMA2; (-) strand; PAM type: YTN; PAM sequence: TTG
tgctaagtatgattttagct

SEQ ID NO: 281090 - DNA, 20 bp, Artificial Sequence
  Description of Artificial Sequence: Synthetic oligonucleotide
  Target: LAMA2; (-) strand; PAM type: YTN; PAM sequence: CTT
gtgctaagtatgattttagc

SEQ ID NO: 281091 - DNA, 20 bp, Artificial Sequence
  Description of Artificial Sequence: Synthetic oligonucleotide
  Target: LAMA2; (-) strand; PAM type: YTN; PAM sequence: TTA
gtcttgtgctaagtatgatt

SEQ ID NO: 281092 - DNA, 20 bp, Artificial Sequence
  Description of Artificial Sequence: Synthetic oligonucleotide
  Target: LAMA2; (-) strand; PAM type: YTN; PAM sequence: CTT
agtcttgtgctaagtatgat

SEQ ID NO: 281093 - DNA, 20 bp, Artificial Sequence
  Description of Artificial Sequence: Synthetic oligonucleotide
  Target: LAMA2; (-) strand; PAM type: YTN; PAM sequence: CTA
atcttagtcttgtgctaagt

SEQ ID NO: 281094 - DNA, 20 bp, Artificial Sequence
  Description of Artificial Sequence: Synthetic oligonucleotide
  Target: LAMA2; (-) strand; PAM type: YTN; PAM sequence: TTC
ctaatcttagtcttgtgcta

SEQ ID NO: 281095 - DNA, 20 bp, Artificial Sequence
  Description of Artificial Sequence: Synthetic oligonucleotide
  Target: LAMA2; (-) strand; PAM type: YTN; PAM sequence: CTT
cctaatcttagtcttgtgct

SEQ ID NO: 281096 - DNA, 20 bp, Artificial Sequence
  Description of Artificial Sequence: Synthetic oligonucleotide
  Target: LAMA2; (-) strand; PAM type: YTN; PAM sequence: TTC
ttcctaatcttagtcttgtg

SEQ ID NO: 281097 - DNA, 20 bp, Artificial Sequence
  Description of Artificial Sequence: Synthetic oligonucleotide
  Target: LAMA2; (-) strand; PAM type: YTN; PAM sequence: CTT
cttcctaatcttagtcttgt

SEQ ID NO: 281098 - DNA, 20 bp, Artificial Sequence
  Description of Artificial Sequence: Synthetic oligonucleotide
  Target: LAMA2; (-) strand; PAM type: YTN; PAM sequence: TTG
ccttcttcctaatcttagtc

SEQ ID NO: 281099 - DNA, 20 bp, Artificial Sequence
  Description of Artificial Sequence: Synthetic oligonucleotide
  Target: LAMA2; (-) strand; PAM type: YTN; PAM sequence: CTT
gccttcttcctaatcttagt

SEQ ID NO: 281100 - DNA, 20 bp, Artificial Sequence
  Description of Artificial Sequence: Synthetic oligonucleotide
  Target: LAMA2; (-) strand; PAM type: YTN; PAM sequence: TTA
aatggaagtaatggaagcag

SEQ ID NO: 281101 - DNA, 20 bp, Artificial Sequence
  Description of Artificial Sequence: Synthetic oligonucleotide
  Target: LAMA2; (-) strand; PAM type: YTN; PAM sequence: CTA
gtacaatgttaaatggaagt

SEQ ID NO: 281102 - DNA, 20 bp, Artificial Sequence
  Description of Artificial Sequence: Synthetic oligonucleotide
  Target: LAMA2; (-) strand; PAM type: YTN; PAM sequence: CTC
tagtacaatgttaaatggaa

SEQ ID NO: 281103 - DNA, 20 bp, Artificial Sequence
  Description of Artificial Sequence: Synthetic oligonucleotide
  Target: LAMA2; (-) strand; PAM type: YTN; PAM sequence: CTC
tctagtacaatgttaaatgg

SEQ ID NO: 281104 - DNA, 20 bp, Artificial Sequence
  Description of Artificial Sequence: Synthetic oligonucleotide
  Target: LAMA2; (-) strand; PAM type: YTN; PAM sequence: TTA
gtctctctagtacaatgtta

SEQ ID NO: 281105 - DNA, 20 bp, Artificial Sequence
  Description of Artificial Sequence: Synthetic oligonucleotide
  Target: LAMA2; (-) strand; PAM type: YTN; PAM sequence: CTG
gttagtctctctagtacaat

SEQ ID NO: 281106 - DNA, 20 bp, Artificial Sequence
  Description of Artificial Sequence: Synthetic oligonucleotide
  Target: LAMA2; (-) strand; PAM type: YTN; PAM sequence: TTG
tactggttagtctctctagt

SEQ ID NO: 281107 - DNA, 20 bp, Artificial Sequence
  Description of Artificial Sequence: Synthetic oligonucleotide
  Target: LAMA2; (-) strand; PAM type: YTN; PAM sequence: CTT
gtactggttagtctctctag

SEQ ID NO: 281108 - DNA, 20 bp, Artificial Sequence
  Description of Artificial Sequence: Synthetic oligonucleotide
  Target: LAMA2; (-) strand; PAM type: YTN; PAM sequence: TTG
ccccttgtactggttagtct

SEQ ID NO: 281109 - DNA, 20 bp, Artificial Sequence
  Description of Artificial Sequence: Synthetic oligonucleotide
  Target: LAMA2; (-) strand; PAM type: YTN; PAM sequence: CTT
gccccttgtactggttagtc

SEQ ID NO: 281110 - DNA, 20 bp, Artificial Sequence
  Description of Artificial Sequence: Synthetic oligonucleotide
  Target: LAMA2; (-) strand; PAM type: YTN; PAM sequence: TTC
ttgccccttgtactggttag

SEQ ID NO: 281111 - DNA, 20 bp, Artificial Sequence
  Description of Artificial Sequence: Synthetic oligonucleotide
  Target: LAMA2; (-) strand; PAM type: YTN; PAM sequence: TTT
cttgccccttgtactggtta

SEQ ID NO: 281112 - DNA, 20 bp, Artificial Sequence
  Description of Artificial Sequence: Synthetic oligonucleotide
  Target: LAMA2; (-) strand; PAM type: YTN; PAM sequence: TTT
tcttgccccttgtactggtt

SEQ ID NO: 281113 - DNA, 20 bp, Artificial Sequence
  Description of Artificial Sequence: Synthetic oligonucleotide
  Target: LAMA2; (-) strand; PAM type: YTN; PAM sequence: TTT
ttcttgccccttgtactggt

SEQ ID NO: 281114 - DNA, 20 bp, Artificial Sequence
  Description of Artificial Sequence: Synthetic oligonucleotide
  Target: LAMA2; (-) strand; PAM type: YTN; PAM sequence: CTT
tttcttgccccttgtactgg

SEQ ID NO: 281115 - DNA, 20 bp, Artificial Sequence
  Description of Artificial Sequence: Synthetic oligonucleotide
  Target: LAMA2; (-) strand; PAM type: YTN; PAM sequence: TTC
ctttttcttgccccttgtac

SEQ ID NO: 281116 - DNA, 20 bp, Artificial Sequence
  Description of Artificial Sequence: Synthetic oligonucleotide
  Target: LAMA2; (-) strand; PAM type: YTN; PAM sequence: TTT
cctttttcttgccccttgta

SEQ ID NO: 281117 - DNA, 20 bp, Artificial Sequence
  Description of Artificial Sequence: Synthetic oligonucleotide
  Target: LAMA2; (-) strand; PAM type: YTN; PAM sequence: TTA
tttcctttttcttgcccctt

SEQ ID NO: 281118 - DNA, 20 bp, Artificial Sequence
  Description of Artificial Sequence: Synthetic oligonucleotide
  Target: LAMA2; (-) strand; PAM type: YTN; PAM sequence: TTT
atttcctttttcttgcccct

SEQ ID NO: 281119 - DNA, 20 bp, Artificial Sequence
  Description of Artificial Sequence: Synthetic oligonucleotide
  Target: LAMA2; (-) strand; PAM type: YTN; PAM sequence: CTG
gatgccatttatttcctttt

SEQ ID NO: 281120 - DNA, 20 bp, Artificial Sequence
  Description of Artificial Sequence: Synthetic oligonucleotide
  Target: LAMA2; (-) strand; PAM type: YTN; PAM sequence: TTC
aatctggatgccatttattt

SEQ ID NO: 281121 - DNA, 20 bp, Artificial Sequence
  Description of Artificial Sequence: Synthetic oligonucleotide
  Target: LAMA2; (-) strand; PAM type: YTN; PAM sequence: TTT
caatctggatgccatttatt

SEQ ID NO: 281122 - DNA, 20 bp, Artificial Sequence
  Description of Artificial Sequence: Synthetic oligonucleotide
  Target: LAMA2; (-) strand; PAM type: YTN; PAM sequence: TTT
tcaatctggatgccatttat

SEQ ID NO: 281123 - DNA, 20 bp, Artificial Sequence
  Description of Artificial Sequence: Synthetic oligonucleotide
  Target: LAMA2; (-) strand; PAM type: YTN; PAM sequence: TTT
ttcaatctggatgccattta

SEQ ID NO: 281124 - DNA, 20 bp, Artificial Sequence
  Description of Artificial Sequence: Synthetic oligonucleotide
  Target: LAMA2; (-) strand; PAM type: YTN; PAM sequence: TTA
tttttcaatctggatgccat

SEQ ID NO: 281125 - DNA, 20 bp, Artificial Sequence
  Description of Artificial Sequence: Synthetic oligonucleotide
  Target: LAMA2; (-) strand; PAM type: YTN; PAM sequence: CTT
atttttcaatctggatgcca

SEQ ID NO: 281126 - DNA, 20 bp, Artificial Sequence
  Description of Artificial Sequence: Synthetic oligonucleotide
  Target: LAMA2; (-) strand; PAM type: YTN; PAM sequence: TTG
tacttatttttcaatctgga

SEQ ID NO: 281127 - DNA, 20 bp, Artificial Sequence
  Description of Artificial Sequence: Synthetic oligonucleotide
  Target: LAMA2; (-) strand; PAM type: YTN; PAM sequence: TTT
gtacttatttttcaatctgg

SEQ ID NO: 281128 - DNA, 20 bp, Artificial Sequence
  Description of Artificial Sequence: Synthetic oligonucleotide
  Target: LAMA2; (-) strand; PAM type: YTN; PAM sequence: CTG
tgaataaaaacatttgtact

SEQ ID NO: 281129 - DNA, 20 bp, Artificial Sequence
  Description of Artificial Sequence: Synthetic oligonucleotide
  Target: LAMA2; (-) strand; PAM type: YTN; PAM sequence: CTA
tagtatctgtgaataaaaac

SEQ ID NO: 281130 - DNA, 20 bp, Artificial Sequence
  Description of Artificial Sequence: Synthetic oligonucleotide
  Target: LAMA2; (-) strand; PAM type: YTN; PAM sequence: TTC
tatagtatctgtgaataaaa

SEQ ID NO: 281131 - DNA, 20 bp, Artificial Sequence
  Description of Artificial Sequence: Synthetic oligonucleotide
  Target: LAMA2; (-) strand; PAM type: YTN; PAM sequence: CTT
ctatagtatctgtgaataaa

SEQ ID NO: 281132 - DNA, 20 bp, Artificial Sequence
  Description of Artificial Sequence: Synthetic oligonucleotide
  Target: LAMA2; (-) strand; PAM type: YTN; PAM sequence: TTA
gacttctatagtatctgtga

SEQ ID NO: 281133 - DNA, 20 bp, Artificial Sequence
  Description of Artificial Sequence: Synthetic oligonucleotide
  Target: LAMA2; (-) strand; PAM type: YTN; PAM sequence: CTT
agacttctatagtatctgtg

SEQ ID NO: 281134 - DNA, 20 bp, Artificial Sequence
  Description of Artificial Sequence: Synthetic oligonucleotide
  Target: LAMA2; (-) strand; PAM type: YTN; PAM sequence: TTA
tgcttagacttctatagtat

SEQ ID NO: 281135 - DNA, 20 bp, Artificial Sequence
  Description of Artificial Sequence: Synthetic oligonucleotide
  Target: LAMA2; (-) strand; PAM type: YTN; PAM sequence: TTT
atgcttagacttctatagta

SEQ ID NO: 281136 - DNA, 20 bp, Artificial Sequence
  Description of Artificial Sequence: Synthetic oligonucleotide
  Target: LAMA2; (-) strand; PAM type: YTN; PAM sequence: TTT
tatgcttagacttctatagt

SEQ ID NO: 281137 - DNA, 20 bp, Artificial Sequence
  Description of Artificial Sequence: Synthetic oligonucleotide
  Target: LAMA2; (-) strand; PAM type: YTN; PAM sequence: TTA
caggcatgaaccaccaggat

SEQ ID NO: 281138 - DNA, 20 bp, Artificial Sequence
  Description of Artificial Sequence: Synthetic oligonucleotide
  Target: LAMA2; (-) strand; PAM type: YTN; PAM sequence: CTA
gggttacaggcatgaaccac

SEQ ID NO: 281139 - DNA, 20 bp, Artificial Sequence
  Description of Artificial Sequence: Synthetic oligonucleotide
  Target: LAMA2; (-) strand; PAM type: YTN; PAM sequence: CTA
aagcactagggttacaggca

SEQ ID NO: 281140 - DNA, 20 bp, Artificial Sequence
  Description of Artificial Sequence: Synthetic oligonucleotide
  Target: LAMA2; (-) strand; PAM type: YTN; PAM sequence: CTC
ctaaagcactagggttacag

SEQ ID NO: 281141 - DNA, 20 bp, Artificial Sequence
  Description of Artificial Sequence: Synthetic oligonucleotide
  Target: LAMA2; (-) strand; PAM type: YTN; PAM sequence: CTC
agcctcctaaagcactaggg

SEQ ID NO: 281142 - DNA, 20 bp, Artificial Sequence
  Description of Artificial Sequence: Synthetic oligonucleotide
  Target: LAMA2; (-) strand; PAM type: YTN; PAM sequence: CTG
cctcagcctcctaaagcact

SEQ ID NO: 281143 - DNA, 20 bp, Artificial Sequence
  Description of Artificial Sequence: Synthetic oligonucleotide
  Target: LAMA2; (-) strand; PAM type: YTN; PAM sequence: CTC
aagcaatccacctgcctcag

SEQ ID NO: 281144 - DNA, 20 bp, Artificial Sequence
  Description of Artificial Sequence: Synthetic oligonucleotide
  Target: LAMA2; (-) strand; PAM type: YTN; PAM sequence: TTG
gcctcaagcaatccacctgc

SEQ ID NO: 281145 - DNA, 20 bp, Artificial Sequence
  Description of Artificial Sequence: Synthetic oligonucleotide
  Target: LAMA2; (-) strand; PAM type: YTN; PAM sequence: CTT
ggcctcaagcaatccacctg

SEQ ID NO: 281146 - DNA, 20 bp, Artificial Sequence
  Description of Artificial Sequence: Synthetic oligonucleotide
  Target: LAMA2; (-) strand; PAM type: YTN; PAM sequence: CTC
ttggcctcaagcaatccacc

SEQ ID NO: 281147 - DNA, 20 bp, Artificial Sequence
  Description of Artificial Sequence: Synthetic oligonucleotide
  Target: LAMA2; (-) strand; PAM type: YTN; PAM sequence: CTC
aaactcttggcctcaagcaa

SEQ ID NO: 281148 - DNA, 20 bp, Artificial Sequence
  Description of Artificial Sequence: Synthetic oligonucleotide
  Target: LAMA2; (-) strand; PAM type: YTN; PAM sequence: CTA
gtctcaaactcttggcctca

SEQ ID NO: 281149 - DNA, 20 bp, Artificial Sequence
  Description of Artificial Sequence: Synthetic oligonucleotide
  Target: LAMA2; (-) strand; PAM type: YTN; PAM sequence: TTG
cccagctagtctcaaactct

SEQ ID NO: 281150 - DNA, 20 bp, Artificial Sequence
  Description of Artificial Sequence: Synthetic oligonucleotide
  Target: LAMA2; (-) strand; PAM type: YTN; PAM sequence: CTA
tgttgcccagctagtctcaa

SEQ ID NO: 281151 - DNA, 20 bp, Artificial Sequence
  Description of Artificial Sequence: Synthetic oligonucleotide
  Target: LAMA2; (-) strand; PAM type: YTN; PAM sequence: TTG
ctatgttgcccagctagtct

SEQ ID NO: 281152 - DNA, 20 bp, Artificial Sequence
  Description of Artificial Sequence: Synthetic oligonucleotide
  Target: LAMA2; (-) strand; PAM type: YTN; PAM sequence: CTT
gctatgttgcccagctagtc

SEQ ID NO: 281153 - DNA, 20 bp, Artificial Sequence
  Description of Artificial Sequence: Synthetic oligonucleotide
  Target: LAMA2; (-) strand; PAM type: YTN; PAM sequence: TTG
tagagatgaggtcttgctat

SEQ ID NO: 281154 - DNA, 20 bp, Artificial Sequence
  Description of Artificial Sequence: Synthetic oligonucleotide
  Target: LAMA2; (-) strand; PAM type: YTN; PAM sequence: TTG
gttgtagagatgaggtcttg

SEQ ID NO: 281155 - DNA, 20 bp, Artificial Sequence
  Description of Artificial Sequence: Synthetic oligonucleotide
  Target: LAMA2; (-) strand; PAM type: YTN; PAM sequence: TTT
ggttgtagagatgaggtctt

SEQ ID NO: 281156 - DNA, 20 bp, Artificial Sequence
  Description of Artificial Sequence: Synthetic oligonucleotide
  Target: LAMA2; (-) strand; PAM type: YTN; PAM sequence: TTT
tggttgtagagatgaggtct

SEQ ID NO: 281157 - DNA, 20 bp, Artificial Sequence
  Description of Artificial Sequence: Synthetic oligonucleotide
  Target: LAMA2; (-) strand; PAM type: YTN; PAM sequence: TTT
ttggttgtagagatgaggtc

SEQ ID NO: 281158 - DNA, 20 bp, Artificial Sequence
  Description of Artificial Sequence: Synthetic oligonucleotide
  Target: LAMA2; (-) strand; PAM type: YTN; PAM sequence: TTT
tttggttgtagagatgaggt

SEQ ID NO: 281159 - DNA, 20 bp, Artificial Sequence
  Description of Artificial Sequence: Synthetic oligonucleotide
  Target: LAMA2; (-) strand; PAM type: YTN; PAM sequence: TTT
ttttggttgtagagatgagg

SEQ ID NO: 281160 - DNA, 20 bp, Artificial Sequence
  Description of Artificial Sequence: Synthetic oligonucleotide
  Target: LAMA2; (-) strand; PAM type: YTN; PAM sequence: TTT
tttttggttgtagagatgag

SEQ ID NO: 281161 - DNA, 20 bp, Artificial Sequence
  Description of Artificial Sequence: Synthetic oligonucleotide
  Target: LAMA2; (-) strand; PAM type: YTN; PAM sequence: TTT
ttttttggttgtagagatga

SEQ ID NO: 281162 - DNA, 20 bp, Artificial Sequence
  Description of Artificial Sequence: Synthetic oligonucleotide
  Target: LAMA2; (-) strand; PAM type: YTN; PAM sequence: CTT
tttttttggttgtagagatg

SEQ ID NO: 281163 - DNA, 20 bp, Artificial Sequence
  Description of Artificial Sequence: Synthetic oligonucleotide
  Target: LAMA2; (-) strand; PAM type: YTN; PAM sequence: TTA
aactttttttttggttgtag

SEQ ID NO: 281164 - DNA, 20 bp, Artificial Sequence
  Description of Artificial Sequence: Synthetic oligonucleotide
  Target: LAMA2; (-) strand; PAM type: YTN; PAM sequence: TTT
aaactttttttttggttgta

SEQ ID NO: 281165 - DNA, 20 bp, Artificial Sequence
  Description of Artificial Sequence: Synthetic oligonucleotide
  Target: LAMA2; (-) strand; PAM type: YTN; PAM sequence: TTT
taaactttttttttggttgt

SEQ ID NO: 281166 - DNA, 20 bp, Artificial Sequence
  Description of Artificial Sequence: Synthetic oligonucleotide
  Target: LAMA2; (-) strand; PAM type: YTN; PAM sequence: TTT
ttaaactttttttttggttg

SEQ ID NO: 281167 - DNA, 20 bp, Artificial Sequence
  Description of Artificial Sequence: Synthetic oligonucleotide
  Target: LAMA2; (-) strand; PAM type: YTN; PAM sequence: CTT
tttaaactttttttttggtt

SEQ ID NO: 281168 - DNA, 20 bp, Artificial Sequence
  Description of Artificial Sequence: Synthetic oligonucleotide
  Target: LAMA2; (-) strand; PAM type: YTN; PAM sequence: TTA
tgctttttaaactttttttt

SEQ ID NO: 281169 - DNA, 20 bp, Artificial Sequence
  Description of Artificial Sequence: Synthetic oligonucleotide
  Target: LAMA2; (-) strand; PAM type: YTN; PAM sequence: TTT
atgctttttaaacttttttt

SEQ ID NO: 281170 - DNA, 20 bp, Artificial Sequence
  Description of Artificial Sequence: Synthetic oligonucleotide
  Target: LAMA2; (-) strand; PAM type: YTN; PAM sequence: TTT
tatgctttttaaactttttt

SEQ ID NO: 281171 - DNA, 20 bp, Artificial Sequence
  Description of Artificial Sequence: Synthetic oligonucleotide
  Target: LAMA2; (-) strand; PAM type: YTN; PAM sequence: TTA
ttttatgctttttaaacttt

SEQ ID NO: 281172 - DNA, 20 bp, Artificial Sequence
  Description of Artificial Sequence: Synthetic oligonucleotide
  Target: LAMA2; (-) strand; PAM type: YTN; PAM sequence: TTT
attttatgctttttaaactt

SEQ ID NO: 281173 - DNA, 20 bp, Artificial Sequence
  Description of Artificial Sequence: Synthetic oligonucleotide
  Target: LAMA2; (-) strand; PAM type: YTN; PAM sequence: TTT
tattttatgctttttaaact

SEQ ID NO: 281174 - DNA, 20 bp, Artificial Sequence
  Description of Artificial Sequence: Synthetic oligonucleotide
  Target: LAMA2; (-) strand; PAM type: YTN; PAM sequence: TTA
atagatagcattttatttta

SEQ ID NO: 281175 - DNA, 20 bp, Artificial Sequence
  Description of Artificial Sequence: Synthetic oligonucleotide
  Target: LAMA2; (-) strand; PAM type: YTN; PAM sequence: TTT
aatagatagcattttatttt

SEQ ID NO: 281176 - DNA, 20 bp, Artificial Sequence
  Description of Artificial Sequence: Synthetic oligonucleotide
  Target: LAMA2; (-) strand; PAM type: YTN; PAM sequence: TTT
taatagatagcattttattt

SEQ ID NO: 281177 - DNA, 20 bp, Artificial Sequence
  Description of Artificial Sequence: Synthetic oligonucleotide
  Target: LAMA2; (-) strand; PAM type: YTN; PAM sequence: TTT
ttaatagatagcattttatt

SEQ ID NO: 281178 - DNA, 20 bp, Artificial Sequence
  Description of Artificial Sequence: Synthetic oligonucleotide
  Target: LAMA2; (-) strand; PAM type: YTN; PAM sequence: TTT
tttaatagatagcattttat

SEQ ID NO: 281179 - DNA, 20 bp, Artificial Sequence
  Description of Artificial Sequence: Synthetic oligonucleotide
  Target: LAMA2; (-) strand; PAM type: YTN; PAM sequence: TTT
ttttaatagatagcatttta

SEQ ID NO: 281180 - DNA, 20 bp, Artificial Sequence
  Description of Artificial Sequence: Synthetic oligonucleotide
  Target: LAMA2; (-) strand; PAM type: YTN; PAM sequence: TTT
tttttaatagatagcatttt

SEQ ID NO: 281181 - DNA, 20 bp, Artificial Sequence
  Description of Artificial Sequence: Synthetic oligonucleotide
  Target: LAMA2; (-) strand; PAM type: YTN; PAM sequence: CTT
ttttttaatagatagcattt

SEQ ID NO: 281182 - DNA, 20 bp, Artificial Sequence
  Description of Artificial Sequence: Synthetic oligonucleotide
  Target: LAMA2; (-) strand; PAM type: YTN; PAM sequence: CTA
gtaacttttttttaatagat

SEQ ID NO: 281183 - DNA, 20 bp, Artificial Sequence
  Description of Artificial Sequence: Synthetic oligonucleotide
  Target: LAMA2; (-) strand; PAM type: YTN; PAM sequence: TTC
tagtaacttttttttaatag

SEQ ID NO: 281184 - DNA, 20 bp, Artificial Sequence
  Description of Artificial Sequence: Synthetic oligonucleotide
  Target: LAMA2; (-) strand; PAM type: YTN; PAM sequence: TTA
gttctagtaactttttttta

SEQ ID NO: 281185 - DNA, 20 bp, Artificial Sequence
  Description of Artificial Sequence: Synthetic oligonucleotide
  Target: LAMA2; (-) strand; PAM type: YTN; PAM sequence: TTA
ttagttctagtaactttttt

SEQ ID NO: 281186 - DNA, 20 bp, Artificial Sequence
  Description of Artificial Sequence: Synthetic oligonucleotide
  Target: LAMA2; (-) strand; PAM type: YTN; PAM sequence: CTT
attagttctagtaacttttt

SEQ ID NO: 281187 - DNA, 20 bp, Artificial Sequence
  Description of Artificial Sequence: Synthetic oligonucleotide
  Target: LAMA2; (-) strand; PAM type: YTN; PAM sequence: CTC
acttattagttctagtaact

SEQ ID NO: 281188 - DNA, 20 bp, Artificial Sequence
  Description of Artificial Sequence: Synthetic oligonucleotide
  Target: LAMA2; (-) strand; PAM type: YTN; PAM sequence: TTG
gtaagctcacttattagttc

SEQ ID NO: 281189 - DNA, 20 bp, Artificial Sequence
  Description of Artificial Sequence: Synthetic oligonucleotide
  Target: LAMA2; (-) strand; PAM type: YTN; PAM sequence: TTA
taacattggtaagctcactt

SEQ ID NO: 281190 - DNA, 20 bp, Artificial Sequence
  Description of Artificial Sequence: Synthetic oligonucleotide
  Target: LAMA2; (-) strand; PAM type: YTN; PAM sequence: CTT
ataacattggtaagctcact

SEQ ID NO: 281191 - DNA, 20 bp, Artificial Sequence
  Description of Artificial Sequence: Synthetic oligonucleotide
  Target: LAMA2; (-) strand; PAM type: YTN; PAM sequence: TTG
taccttataacattggtaag

SEQ ID NO: 281192 - DNA, 20 bp, Artificial Sequence
  Description of Artificial Sequence: Synthetic oligonucleotide
  Target: LAMA2; (-) strand; PAM type: YTN; PAM sequence: TTC
acatatagatgttgtacctt

SEQ ID NO: 281193 - DNA, 20 bp, Artificial Sequence
  Description of Artificial Sequence: Synthetic oligonucleotide
  Target: LAMA2; (-) strand; PAM type: YTN; PAM sequence: TTT
cacatatagatgttgtacct

SEQ ID NO: 281194 - DNA, 20 bp, Artificial Sequence
  Description of Artificial Sequence: Synthetic oligonucleotide
  Target: LAMA2; (-) strand; PAM type: YTN; PAM sequence: TTT
tcacatatagatgttgtacc

SEQ ID NO: 281195 - DNA, 20 bp, Artificial Sequence
  Description of Artificial Sequence: Synthetic oligonucleotide
  Target: LAMA2; (-) strand; PAM type: YTN; PAM sequence: CTG
attttcacatatagatgttg

SEQ ID NO: 281196 - DNA, 20 bp, Artificial Sequence
  Description of Artificial Sequence: Synthetic oligonucleotide
  Target: LAMA2; (-) strand; PAM type: YTN; PAM sequence: TTG
aaatgactgattttcacata

SEQ ID NO: 281197 - DNA, 20 bp, Artificial Sequence
  Description of Artificial Sequence: Synthetic oligonucleotide
  Target: LAMA2; (-) strand; PAM type: YTN; PAM sequence: TTT
gaaatgactgattttcacat

SEQ ID NO: 281198 - DNA, 20 bp, Artificial Sequence
  Description of Artificial Sequence: Synthetic oligonucleotide
  Target: LAMA2; (-) strand; PAM type: YTN; PAM sequence: CTT
tgaaatgactgattttcaca

SEQ ID NO: 281199 - DNA, 20 bp, Artificial Sequence
  Description of Artificial Sequence: Synthetic oligonucleotide
  Target: LAMA2; (-) strand; PAM type: YTN; PAM sequence: TTG
ccagtctttgaaatgactga

SEQ ID NO: 281200 - DNA, 20 bp, Artificial Sequence
  Description of Artificial Sequence: Synthetic oligonucleotide
  Target: LAMA2; (-) strand; PAM type: YTN; PAM sequence: CTT
gccagtctttgaaatgactg

SEQ ID NO: 281201 - DNA, 20 bp, Artificial Sequence
  Description of Artificial Sequence: Synthetic oligonucleotide
  Target: LAMA2; (-) strand; PAM type: YTN; PAM sequence: TTC
caacgtatccttgccagtct

SEQ ID NO: 281202 - DNA, 20 bp, Artificial Sequence
  Description of Artificial Sequence: Synthetic oligonucleotide
  Target: LAMA2; (-) strand; PAM type: YTN; PAM sequence: CTT
ccaacgtatccttgccagtc

SEQ ID NO: 281203 - DNA, 20 bp, Artificial Sequence
  Description of Artificial Sequence: Synthetic oligonucleotide
  Target: LAMA2; (-) strand; PAM type: YTN; PAM sequence: TTC
aacttccaacgtatccttgc

SEQ ID NO: 281204 - DNA, 20 bp, Artificial Sequence
  Description of Artificial Sequence: Synthetic oligonucleotide
  Target: LAMA2; (-) strand; PAM type: YTN; PAM sequence: TTT
caacttccaacgtatccttg

SEQ ID NO: 281205 - DNA, 20 bp, Artificial Sequence
  Description of Artificial Sequence: Synthetic oligonucleotide
  Target: LAMA2; (-) strand; PAM type: YTN; PAM sequence: TTA
atttcaacttccaacgtatc

SEQ ID NO: 281206 - DNA, 20 bp, Artificial Sequence
  Description of Artificial Sequence: Synthetic oligonucleotide
  Target: LAMA2; (-) strand; PAM type: YTN; PAM sequence: TTT
aatttcaacttccaacgtat

SEQ ID NO: 281207 - DNA, 20 bp, Artificial Sequence
  Description of Artificial Sequence: Synthetic oligonucleotide
  Target: LAMA2; (-) strand; PAM type: YTN; PAM sequence: TTT
taatttcaacttccaacgta

SEQ ID NO: 281208 - DNA, 20 bp, Artificial Sequence
  Description of Artificial Sequence: Synthetic oligonucleotide
  Target: LAMA2; (-) strand; PAM type: YTN; PAM sequence: CTT
ttaatttcaacttccaacgt

SEQ ID NO: 281209 - DNA, 20 bp, Artificial Sequence
  Description of Artificial Sequence: Synthetic oligonucleotide
  Target: LAMA2; (-) strand; PAM type: YTN; PAM sequence: CTG
taaccttttaatttcaactt

SEQ ID NO: 281210 - DNA, 20 bp, Artificial Sequence
  Description of Artificial Sequence: Synthetic oligonucleotide
  Target: LAMA2; (-) strand; PAM type: YTN; PAM sequence: TTG
taaactgtaaccttttaatt

SEQ ID NO: 281211 - DNA, 20 bp, Artificial Sequence
  Description of Artificial Sequence: Synthetic oligonucleotide
  Target: LAMA2; (-) strand; PAM type: YTN; PAM sequence: CTA
ttgtaaactgtaacctttta

SEQ ID NO: 281212 - DNA, 20 bp, Artificial Sequence
  Description of Artificial Sequence: Synthetic oligonucleotide
  Target: LAMA2; (-) strand; PAM type: YTN; PAM sequence: TTA
atgctattgtaaactgtaac

SEQ ID NO: 281213 - DNA, 20 bp, Artificial Sequence
  Description of Artificial Sequence: Synthetic oligonucleotide
  Target: LAMA2; (-) strand; PAM type: YTN; PAM sequence: TTT
aatgctattgtaaactgtaa

SEQ ID NO: 281214 - DNA, 20 bp, Artificial Sequence
  Description of Artificial Sequence: Synthetic oligonucleotide
  Target: LAMA2; (-) strand; PAM type: YTN; PAM sequence: TTT
taatgctattgtaaactgta

SEQ ID NO: 281215 - DNA, 20 bp, Artificial Sequence
  Description of Artificial Sequence: Synthetic oligonucleotide
  Target: LAMA2; (-) strand; PAM type: YTN; PAM sequence: TTT
ttaatgctattgtaaactgt

SEQ ID NO: 281216 - DNA, 20 bp, Artificial Sequence
  Description of Artificial Sequence: Synthetic oligonucleotide
  Target: LAMA2; (-) strand; PAM type: YTN; PAM sequence: TTA
catttttaatgctattgtaa

SEQ ID NO: 281217 - DNA, 20 bp, Artificial Sequence
  Description of Artificial Sequence: Synthetic oligonucleotide
  Target: LAMA2; (-) strand; PAM type: YTN; PAM sequence: TTT
acatttttaatgctattgta

SEQ ID NO: 281218 - DNA, 20 bp, Artificial Sequence
  Description of Artificial Sequence: Synthetic oligonucleotide
  Target: LAMA2; (-) strand; PAM type: YTN; PAM sequence: TTT
tacatttttaatgctattgt

SEQ ID NO: 281219 - DNA, 20 bp, Artificial Sequence
  Description of Artificial Sequence: Synthetic oligonucleotide
  Target: LAMA2; (-) strand; PAM type: YTN; PAM sequence: CTT
ttacatttttaatgctattg

SEQ ID NO: 281220 - DNA, 20 bp, Artificial Sequence
  Description of Artificial Sequence: Synthetic oligonucleotide
  Target: LAMA2; (-) strand; PAM type: YTN; PAM sequence: TTC
agtgtagggggtcttttaca

SEQ ID NO: 281221 - DNA, 20 bp, Artificial Sequence
  Description of Artificial Sequence: Synthetic oligonucleotide
  Target: LAMA2; (-) strand; PAM type: YTN; PAM sequence: CTC
cagagtattcagtgtagggg

SEQ ID NO: 281222 - DNA, 20 bp, Artificial Sequence
  Description of Artificial Sequence: Synthetic oligonucleotide
  Target: LAMA2; (-) strand; PAM type: YTN; PAM sequence: TTA
tctccagagtattcagtgta

SEQ ID NO: 281223 - DNA, 20 bp, Artificial Sequence
  Description of Artificial Sequence: Synthetic oligonucleotide
  Target: LAMA2; (-) strand; PAM type: YTN; PAM sequence: TTT
atctccagagtattcagtgt

SEQ ID NO: 281224 - DNA, 20 bp, Artificial Sequence
  Description of Artificial Sequence: Synthetic oligonucleotide
  Target: LAMA2; (-) strand; PAM type: YTN; PAM sequence: TTA
tttatctccagagtattcag

SEQ ID NO: 281225 - DNA, 20 bp, Artificial Sequence
  Description of Artificial Sequence: Synthetic oligonucleotide
  Target: LAMA2; (-) strand; PAM type: YTN; PAM sequence: TTT
atttatctccagagtattca

SEQ ID NO: 281226 - DNA, 20 bp, Artificial Sequence
  Description of Artificial Sequence: Synthetic oligonucleotide
  Target: LAMA2; (-) strand; PAM type: YTN; PAM sequence: TTT
tatttatctccagagtattc

SEQ ID NO: 281227 - DNA, 20 bp, Artificial Sequence
  Description of Artificial Sequence: Synthetic oligonucleotide
  Target: LAMA2; (-) strand; PAM type: YTN; PAM sequence: CTT
ttatttatctccagagtatt

SEQ ID NO: 281228 - DNA, 20 bp, Artificial Sequence
  Description of Artificial Sequence: Synthetic oligonucleotide
  Target: LAMA2; (-) strand; PAM type: YTN; PAM sequence: TTC
ttttatttatctccagagta

SEQ ID NO: 281229 - DNA, 20 bp, Artificial Sequence
  Description of Artificial Sequence: Synthetic oligonucleotide
  Target: LAMA2; (-) strand; PAM type: YTN; PAM sequence: TTT
cttttatttatctccagagt

SEQ ID NO: 281230 - DNA, 20 bp, Artificial Sequence
  Description of Artificial Sequence: Synthetic oligonucleotide
  Target: LAMA2; (-) strand; PAM type: YTN; PAM sequence: TTT
tcttttatttatctccagag

SEQ ID NO: 281231 - DNA, 20 bp, Artificial Sequence
  Description of Artificial Sequence: Synthetic oligonucleotide
  Target: LAMA2; (-) strand; PAM type: YTN; PAM sequence: TTA
gattttcttttatttatctc

SEQ ID NO: 281232 - DNA, 20 bp, Artificial Sequence
  Description of Artificial Sequence: Synthetic oligonucleotide
  Target: LAMA2; (-) strand; PAM type: YTN; PAM sequence: TTT
agattttcttttatttatct

SEQ ID NO: 281233 - DNA, 20 bp, Artificial Sequence
  Description of Artificial Sequence: Synthetic oligonucleotide
  Target: LAMA2; (-) strand; PAM type: YTN; PAM sequence: TTA
tttagattttcttttattta

SEQ ID NO: 281234 - DNA, 20 bp, Artificial Sequence
  Description of Artificial Sequence: Synthetic oligonucleotide
  Target: LAMA2; (-) strand; PAM type: YTN; PAM sequence: TTT
atttagattttcttttattt

SEQ ID NO: 281235 - DNA, 20 bp, Artificial Sequence
  Description of Artificial Sequence: Synthetic oligonucleotide
  Target: LAMA2; (-) strand; PAM type: YTN; PAM sequence: TTG
atttatttagattttctttt

SEQ ID NO: 281236 - DNA, 20 bp, Artificial Sequence
  Description of Artificial Sequence: Synthetic oligonucleotide
  Target: LAMA2; (-) strand; PAM type: YTN; PAM sequence: CTT
gatttatttagattttcttt

SEQ ID NO: 281237 - DNA, 20 bp, Artificial Sequence
  Description of Artificial Sequence: Synthetic oligonucleotide
  Target: LAMA2; (-) strand; PAM type: YTN; PAM sequence: CTC
ttgatttatttagattttct

SEQ ID NO: 281238 - DNA, 20 bp, Artificial Sequence
  Description of Artificial Sequence: Synthetic oligonucleotide
  Target: LAMA2; (-) strand; PAM type: YTN; PAM sequence: CTA
tgaacatggtatatctcttg

SEQ ID NO: 281239 - DNA, 20 bp, Artificial Sequence
  Description of Artificial Sequence: Synthetic oligonucleotide
  Target: LAMA2; (-) strand; PAM type: YTN; PAM sequence: CTG
atctatgaacatggtatatc

SEQ ID NO: 281240 - DNA, 20 bp, Artificial Sequence
  Description of Artificial Sequence: Synthetic oligonucleotide
  Target: LAMA2; (-) strand; PAM type: YTN; PAM sequence: TTC
tgatctatgaacatggtata

SEQ ID NO: 281241 - DNA, 20 bp, Artificial Sequence
  Description of Artificial Sequence: Synthetic oligonucleotide
  Target: LAMA2; (-) strand; PAM type: YTN; PAM sequence: CTT
ctgatctatgaacatggtat

SEQ ID NO: 281242 - DNA, 20 bp, Artificial Sequence
  Description of Artificial Sequence: Synthetic oligonucleotide
  Target: LAMA2; (-) strand; PAM type: YTN; PAM sequence: TTG
aatcttctgatctatgaaca

SEQ ID NO: 281243 - DNA, 20 bp, Artificial Sequence
  Description of Artificial Sequence: Synthetic oligonucleotide
  Target: LAMA2; (-) strand; PAM type: YTN; PAM sequence: TTA
taggaatattgaatcttctg

SEQ ID NO: 281244 - DNA, 20 bp, Artificial Sequence
  Description of Artificial Sequence: Synthetic oligonucleotide
  Target: LAMA2; (-) strand; PAM type: YTN; PAM sequence: CTA
ggattataggaatattgaat

SEQ ID NO: 281245 - DNA, 20 bp, Artificial Sequence
  Description of Artificial Sequence: Synthetic oligonucleotide
  Target: LAMA2; (-) strand; PAM type: YTN; PAM sequence: TTG
aatgtgtaggtcaatatgta

SEQ ID NO: 281246 - DNA, 20 bp, Artificial Sequence
  Description of Artificial Sequence: Synthetic oligonucleotide
  Target: LAMA2; (-) strand; PAM type: YTN; PAM sequence: TTG
cattgaatgtgtaggtcaat

SEQ ID NO: 281247 - DNA, 20 bp, Artificial Sequence
  Description of Artificial Sequence: Synthetic oligonucleotide
  Target: LAMA2; (-) strand; PAM type: YTN; PAM sequence: CTG
ggattgcattgaatgtgtag

SEQ ID NO: 281248 - DNA, 20 bp, Artificial Sequence
  Description of Artificial Sequence: Synthetic oligonucleotide
  Target: LAMA2; (-) strand; PAM type: YTN; PAM sequence: TTA
ctgggattgcattgaatgtg

SEQ ID NO: 281249 - DNA, 20 bp, Artificial Sequence
  Description of Artificial Sequence: Synthetic oligonucleotide
  Target: LAMA2; (-) strand; PAM type: YTN; PAM sequence: TTT
actgggattgcattgaatgt

SEQ ID NO: 281250 - DNA, 20 bp, Artificial Sequence
  Description of Artificial Sequence: Synthetic oligonucleotide
  Target: LAMA2; (-) strand; PAM type: YTN; PAM sequence: TTT
tactgggattgcattgaatg

SEQ ID NO: 281251 - DNA, 20 bp, Artificial Sequence
  Description of Artificial Sequence: Synthetic oligonucleotide
  Target: LAMA2; (-) strand; PAM type: YTN; PAM sequence: TTT
ttactgggattgcattgaat

SEQ ID NO: 281252 - DNA, 20 bp, Artificial Sequence
  Description of Artificial Sequence: Synthetic oligonucleotide
  Target: LAMA2; (-) strand; PAM type: YTN; PAM sequence: CTA
ggatttttactgggattgca

SEQ ID NO: 281253 - DNA, 20 bp, Artificial Sequence
  Description of Artificial Sequence: Synthetic oligonucleotide
  Target: LAMA2; (-) strand; PAM type: YTN; PAM sequence: TTG
ctaggatttttactgggatt

SEQ ID NO: 281254 - DNA, 20 bp, Artificial Sequence
  Description of Artificial Sequence: Synthetic oligonucleotide
  Target: LAMA2; (-) strand; PAM type: YTN; PAM sequence: CTT
gctaggatttttactgggat

SEQ ID NO: 281255 - DNA, 20 bp, Artificial Sequence
  Description of Artificial Sequence: Synthetic oligonucleotide
  Target: LAMA2; (-) strand; PAM type: YTN; PAM sequence: TTA
ggaaaaaaccttgctaggat

SEQ ID NO: 281256 - DNA, 20 bp, Artificial Sequence
  Description of Artificial Sequence: Synthetic oligonucleotide
  Target: LAMA2; (-) strand; PAM type: YTN; PAM sequence: TTT
aggaaaaaaccttgctagga

SEQ ID NO: 281257 - DNA, 20 bp, Artificial Sequence
  Description of Artificial Sequence: Synthetic oligonucleotide
  Target: LAMA2; (-) strand; PAM type: YTN; PAM sequence: TTT
taggaaaaaaccttgctagg

SEQ ID NO: 281258 - DNA, 20 bp, Artificial Sequence
  Description of Artificial Sequence: Synthetic oligonucleotide
  Target: LAMA2; (-) strand; PAM type: YTN; PAM sequence: TTT
ttaggaaaaaaccttgctag

SEQ ID NO: 281259 - DNA, 20 bp, Artificial Sequence
  Description of Artificial Sequence: Synthetic oligonucleotide
  Target: LAMA2; (-) strand; PAM type: YTN; PAM sequence: CTG
taaatttttaggaaaaaacc

SEQ ID NO: 281260 - DNA, 20 bp, Artificial Sequence
  Description of Artificial Sequence: Synthetic oligonucleotide
  Target: LAMA2; (-) strand; PAM type: YTN; PAM sequence: TTG
taaaacatatctgtaaattt

SEQ ID NO: 281261 - DNA, 20 bp, Artificial Sequence
  Description of Artificial Sequence: Synthetic oligonucleotide
  Target: LAMA2; (-) strand; PAM type: YTN; PAM sequence: TTC
catatgaattgtaaaacata

SEQ ID NO: 281262 - DNA, 20 bp, Artificial Sequence
  Description of Artificial Sequence: Synthetic oligonucleotide
  Target: LAMA2; (-) strand; PAM type: YTN; PAM sequence: TTC
caattccatatgaattgtaa

SEQ ID NO: 281263 - DNA, 20 bp, Artificial Sequence
  Description of Artificial Sequence: Synthetic oligonucleotide
  Target: LAMA2; (-) strand; PAM type: YTN; PAM sequence: TTT
ccaattccatatgaattgta

SEQ ID NO: 281264 - DNA, 20 bp, Artificial Sequence
  Description of Artificial Sequence: Synthetic oligonucleotide
  Target: LAMA2; (-) strand; PAM type: YTN; PAM sequence: CTT
tccaattccatatgaattgt

SEQ ID NO: 281265 - DNA, 20 bp, Artificial Sequence
  Description of Artificial Sequence: Synthetic oligonucleotide
  Target: LAMA2; (-) strand; PAM type: YTN; PAM sequence: CTC
ctttccaattccatatgaat

SEQ ID NO: 281266 - DNA, 20 bp, Artificial Sequence
  Description of Artificial Sequence: Synthetic oligonucleotide
  Target: LAMA2; (-) strand; PAM type: YTN; PAM sequence: TTC
tcctttccaattccatatga

SEQ ID NO: 281267 - DNA, 20 bp, Artificial Sequence
  Description of Artificial Sequence: Synthetic oligonucleotide
  Target: LAMA2; (-) strand; PAM type: YTN; PAM sequence: TTT
ctcctttccaattccatatg

SEQ ID NO: 281268 - DNA, 20 bp, Artificial Sequence
  Description of Artificial Sequence: Synthetic oligonucleotide
  Target: LAMA2; (-) strand; PAM type: YTN; PAM sequence: TTT
tctcctttccaattccatat

SEQ ID NO: 281269 - DNA, 20 bp, Artificial Sequence
  Description of Artificial Sequence: Synthetic oligonucleotide
  Target: LAMA2; (-) strand; PAM type: YTN; PAM sequence: TTT
ttctcctttccaattccata

SEQ ID NO: 281270 - DNA, 20 bp, Artificial Sequence
  Description of Artificial Sequence: Synthetic oligonucleotide
  Target: LAMA2; (-) strand; PAM type: YTN; PAM sequence: TTC
caacatttttctcctttcca

SEQ ID NO: 281271 - DNA, 20 bp, Artificial Sequence
  Description of Artificial Sequence: Synthetic oligonucleotide
  Target: LAMA2; (-) strand; PAM type: YTN; PAM sequence: TTT
ccaacatttttctcctttcc

SEQ ID NO: 281272 - DNA, 20 bp, Artificial Sequence
  Description of Artificial Sequence: Synthetic oligonucleotide
  Target: LAMA2; (-) strand; PAM type: YTN; PAM sequence: CTT
tccaacatttttctcctttc

SEQ ID NO: 281273 - DNA, 20 bp, Artificial Sequence
  Description of Artificial Sequence: Synthetic oligonucleotide
  Target: LAMA2; (-) strand; PAM type: YTN; PAM sequence: TTG
aagtcaggtagtataacctt

SEQ ID NO: 281274 - DNA, 20 bp, Artificial Sequence
  Description of Artificial Sequence: Synthetic oligonucleotide
  Target: LAMA2; (-) strand; PAM type: YTN; PAM sequence: TTG
gtagtaagtattgaagtcag

SEQ ID NO: 281275 - DNA, 20 bp, Artificial Sequence
  Description of Artificial Sequence: Synthetic oligonucleotide
  Target: LAMA2; (-) strand; PAM type: YTN; PAM sequence: CTT
ggtagtaagtattgaagtca

SEQ ID NO: 281276 - DNA, 20 bp, Artificial Sequence
  Description of Artificial Sequence: Synthetic oligonucleotide
  Target: LAMA2; (-) strand; PAM type: YTN; PAM sequence: TTA
ccatagcttggtagtaagta

SEQ ID NO: 281277 - DNA, 20 bp, Artificial Sequence
  Description of Artificial Sequence: Synthetic oligonucleotide
  Target: LAMA2; (-) strand; PAM type: YTN; PAM sequence: CTG
attaccatagcttggtagta

SEQ ID NO: 281278 - DNA, 20 bp, Artificial Sequence
  Description of Artificial Sequence: Synthetic oligonucleotide
  Target: LAMA2; (-) strand; PAM type: YTN; PAM sequence: CTC
tgattaccatagcttggtag

SEQ ID NO: 281279 - DNA, 20 bp, Artificial Sequence
  Description of Artificial Sequence: Synthetic oligonucleotide
  Target: LAMA2; (-) strand; PAM type: YTN; PAM sequence: TTC
tctgattaccatagcttggt

SEQ ID NO: 281280 - DNA, 20 bp, Artificial Sequence
  Description of Artificial Sequence: Synthetic oligonucleotide
  Target: LAMA2; (-) strand; PAM type: YTN; PAM sequence: TTG
ataccaacaccacattctct

SEQ ID NO: 281281 - DNA, 20 bp, Artificial Sequence
  Description of Artificial Sequence: Synthetic oligonucleotide
  Target: LAMA2; (-) strand; PAM type: YTN; PAM sequence: TTG
tcaatattgataccaacacc

SEQ ID NO: 281282 - DNA, 20 bp, Artificial Sequence
  Description of Artificial Sequence: Synthetic oligonucleotide
  Target: LAMA2; (-) strand; PAM type: YTN; PAM sequence: TTT
gtcaatattgataccaacac

SEQ ID NO: 281283 - DNA, 20 bp, Artificial Sequence
  Description of Artificial Sequence: Synthetic oligonucleotide
  Target: LAMA2; (-) strand; PAM type: YTN; PAM sequence: CTA
tttgtcaatattgataccaa

SEQ ID NO: 281284 - DNA, 20 bp, Artificial Sequence
  Description of Artificial Sequence: Synthetic oligonucleotide
  Target: LAMA2; (-) strand; PAM type: YTN; PAM sequence: CTA
ataatctatttgtcaatatt

SEQ ID NO: 281285 - DNA, 20 bp, Artificial Sequence
  Description of Artificial Sequence: Synthetic oligonucleotide
  Target: LAMA2; (-) strand; PAM type: YTN; PAM sequence: TTC
taataatctatttgtcaata

SEQ ID NO: 281286 - DNA, 20 bp, Artificial Sequence
  Description of Artificial Sequence: Synthetic oligonucleotide
  Target: LAMA2; (-) strand; PAM type: YTN; PAM sequence: CTA
ttctaataatctatttgtca

SEQ ID NO: 281287 - DNA, 20 bp, Artificial Sequence
  Description of Artificial Sequence: Synthetic oligonucleotide
  Target: LAMA2; (-) strand; PAM type: YTN; PAM sequence: TTA
atctattctaataatctatt

SEQ ID NO: 281288 - DNA, 20 bp, Artificial Sequence
  Description of Artificial Sequence: Synthetic oligonucleotide
  Target: LAMA2; (-) strand; PAM type: YTN; PAM sequence: TTT
aatctattctaataatctat

SEQ ID NO: 281289 - DNA, 20 bp, Artificial Sequence
  Description of Artificial Sequence: Synthetic oligonucleotide
  Target: LAMA2; (-) strand; PAM type: YTN; PAM sequence: CTT
taatctattctaataatcta

SEQ ID NO: 281290 - DNA, 20 bp, Artificial Sequence
  Description of Artificial Sequence: Synthetic oligonucleotide
  Target: LAMA2; (-) strand; PAM type: YTN; PAM sequence: CTC
tttaatctattctaataatc

SEQ ID NO: 281291 - DNA, 20 bp, Artificial Sequence
  Description of Artificial Sequence: Synthetic oligonucleotide
  Target: LAMA2; (-) strand; PAM type: YTN; PAM sequence: CTG
gactctttaatctattctaa

SEQ ID NO: 281292 - DNA, 20 bp, Artificial Sequence
  Description of Artificial Sequence: Synthetic oligonucleotide
  Target: LAMA2; (-) strand; PAM type: YTN; PAM sequence: CTA
tatctggactctttaatcta

SEQ ID NO: 281293 - DNA, 20 bp, Artificial Sequence
  Description of Artificial Sequence: Synthetic oligonucleotide
  Target: LAMA2; (-) strand; PAM type: YTN; PAM sequence: CTG
gatctatatctggactcttt

SEQ ID NO: 281294 - DNA, 20 bp, Artificial Sequence
  Description of Artificial Sequence: Synthetic oligonucleotide
  Target: LAMA2; (-) strand; PAM type: YTN; PAM sequence: TTG
accatacatgtctggatcta

SEQ ID NO: 281295 - DNA, 20 bp, Artificial Sequence
  Description of Artificial Sequence: Synthetic oligonucleotide
  Target: LAMA2; (-) strand; PAM type: YTN; PAM sequence: TTT
gaccatacatgtctggatct

SEQ ID NO: 281296 - DNA, 20 bp, Artificial Sequence
  Description of Artificial Sequence: Synthetic oligonucleotide
  Target: LAMA2; (-) strand; PAM type: YTN; PAM sequence: TTG
tcataaatcatttgaccata

SEQ ID NO: 281297 - DNA, 20 bp, Artificial Sequence
  Description of Artificial Sequence: Synthetic oligonucleotide
  Target: LAMA2; (-) strand; PAM type: YTN; PAM sequence: TTT
gtcataaatcatttgaccat

SEQ ID NO: 281298 - DNA, 20 bp, Artificial Sequence
  Description of Artificial Sequence: Synthetic oligonucleotide
  Target: LAMA2; (-) strand; PAM type: YTN; PAM sequence: TTT
tgtcataaatcatttgacca

SEQ ID NO: 281299 - DNA, 20 bp, Artificial Sequence
  Description of Artificial Sequence: Synthetic oligonucleotide
  Target: LAMA2; (-) strand; PAM type: YTN; PAM sequence: TTT
ttgtcataaatcatttgacc

SEQ ID NO: 281300 - DNA, 20 bp, Artificial Sequence
  Description of Artificial Sequence: Synthetic oligonucleotide
  Target: LAMA2; (-) strand; PAM type: YTN; PAM sequence: TTG
tatttttgtcataaatcatt

SEQ ID NO: 281301 - DNA, 20 bp, Artificial Sequence
  Description of Artificial Sequence: Synthetic oligonucleotide
  Target: LAMA2; (-) strand; PAM type: YTN; PAM sequence: TTT
gtatttttgtcataaatcat

SEQ ID NO: 281302 - DNA, 20 bp, Artificial Sequence
  Description of Artificial Sequence: Synthetic oligonucleotide
  Target: LAMA2; (-) strand; PAM type: YTN; PAM sequence: TTT
tgtatttttgtcataaatca

SEQ ID NO: 281303 - DNA, 20 bp, Artificial Sequence
  Description of Artificial Sequence: Synthetic oligonucleotide
  Target: LAMA2; (-) strand; PAM type: YTN; PAM sequence: CTT
ttgtatttttgtcataaatc

SEQ ID NO: 281304 - DNA, 20 bp, Artificial Sequence
  Description of Artificial Sequence: Synthetic oligonucleotide
  Target: LAMA2; (-) strand; PAM type: YTN; PAM sequence: TTG
cttttgtatttttgtcataa

SEQ ID NO: 281305 - DNA, 20 bp, Artificial Sequence
  Description of Artificial Sequence: Synthetic oligonucleotide
  Target: LAMA2; (-) strand; PAM type: YTN; PAM sequence: TTG
tattgcttttgtatttttgt

SEQ ID NO: 281306 - DNA, 20 bp, Artificial Sequence
  Description of Artificial Sequence: Synthetic oligonucleotide
  Target: LAMA2; (-) strand; PAM type: YTN; PAM sequence: CTT
gtattgcttttgtatttttg

SEQ ID NO: 281307 - DNA, 20 bp, Artificial Sequence
  Description of Artificial Sequence: Synthetic oligonucleotide
  Target: LAMA2; (-) strand; PAM type: YTN; PAM sequence: TTA
aatataccttgtattgcttt

SEQ ID NO: 281308 - DNA, 20 bp, Artificial Sequence
  Description of Artificial Sequence: Synthetic oligonucleotide
  Target: LAMA2; (-) strand; PAM type: YTN; PAM sequence: TTG
ttaaatataccttgtattgc

SEQ ID NO: 281309 - DNA, 20 bp, Artificial Sequence
  Description of Artificial Sequence: Synthetic oligonucleotide
  Target: LAMA2; (-) strand; PAM type: YTN; PAM sequence: TTT
gttaaatataccttgtattg

SEQ ID NO: 281310 - DNA, 20 bp, Artificial Sequence
  Description of Artificial Sequence: Synthetic oligonucleotide
  Target: LAMA2; (-) strand; PAM type: YTN; PAM sequence: CTA
gtagaatttgttaaatatac

SEQ ID NO: 281311 - DNA, 20 bp, Artificial Sequence
  Description of Artificial Sequence: Synthetic oligonucleotide
  Target: LAMA2; (-) strand; PAM type: YTN; PAM sequence: CTC
tagtagaatttgttaaatat

SEQ ID NO: 281312 - DNA, 20 bp, Artificial Sequence
  Description of Artificial Sequence: Synthetic oligonucleotide
  Target: LAMA2; (-) strand; PAM type: YTN; PAM sequence: TTC
ctctagtagaatttgttaaa

SEQ ID NO: 281313 - DNA, 20 bp, Artificial Sequence
  Description of Artificial Sequence: Synthetic oligonucleotide
  Target: LAMA2; (-) strand; PAM type: YTN; PAM sequence: TTC
aattcctctagtagaatttg

SEQ ID NO: 281314 - DNA, 20 bp, Artificial Sequence
  Description of Artificial Sequence: Synthetic oligonucleotide
  Target: LAMA2; (-) strand; PAM type: YTN; PAM sequence: TTC
atggatattcaattcctcta

SEQ ID NO: 281315 - DNA, 20 bp, Artificial Sequence
  Description of Artificial Sequence: Synthetic oligonucleotide
  Target: LAMA2; (-) strand; PAM type: YTN; PAM sequence: TTG
ttcatggatattcaattcct

SEQ ID NO: 281316 - DNA, 20 bp, Artificial Sequence
  Description of Artificial Sequence: Synthetic oligonucleotide
  Target: LAMA2; (-) strand; PAM type: YTN; PAM sequence: TTG
ttgttcatggatattcaatt

SEQ ID NO: 281317 - DNA, 20 bp, Artificial Sequence
  Description of Artificial Sequence: Synthetic oligonucleotide
  Target: LAMA2; (-) strand; PAM type: YTN; PAM sequence: TTG
ttgttgttcatggatattca

SEQ ID NO: 281318 - DNA, 20 bp, Artificial Sequence
  Description of Artificial Sequence: Synthetic oligonucleotide
  Target: LAMA2; (-) strand; PAM type: YTN; PAM sequence: TTT
gttgttgttcatggatattc

SEQ ID NO: 281319 - DNA, 20 bp, Artificial Sequence
  Description of Artificial Sequence: Synthetic oligonucleotide
  Target: LAMA2; (-) strand; PAM type: YTN; PAM sequence: TTT
tgttgttgttcatggatatt

SEQ ID NO: 281320 - DNA, 20 bp, Artificial Sequence
  Description of Artificial Sequence: Synthetic oligonucleotide
  Target: LAMA2; (-) strand; PAM type: YTN; PAM sequence: TTT
ttgttgttgttcatggatat

SEQ ID NO: 281321 - DNA, 20 bp, Artificial Sequence
  Description of Artificial Sequence: Synthetic oligonucleotide
  Target: LAMA2; (-) strand; PAM type: YTN; PAM sequence: TTT
tttgttgttgttcatggata

SEQ ID NO: 281322 - DNA, 20 bp, Artificial Sequence
  Description of Artificial Sequence: Synthetic oligonucleotide
  Target: LAMA2; (-) strand; PAM type: YTN; PAM sequence: TTT
ttttgttgttgttcatggat

SEQ ID NO: 281323 - DNA, 20 bp, Artificial Sequence
  Description of Artificial Sequence: Synthetic oligonucleotide
  Target: LAMA2; (-) strand; PAM type: YTN; PAM sequence: TTT
tttttgttgttgttcatgga

SEQ ID NO: 281324 - DNA, 20 bp, Artificial Sequence
  Description of Artificial Sequence: Synthetic oligonucleotide
  Target: LAMA2; (-) strand; PAM type: YTN; PAM sequence: TTC
attttttttgttgttgttca

SEQ ID NO: 281325 - DNA, 20 bp, Artificial Sequence
  Description of Artificial Sequence: Synthetic oligonucleotide
  Target: LAMA2; (-) strand; PAM type: YTN; PAM sequence: CTG
aagttcattttttttgttgt

SEQ ID NO: 281326 - DNA, 20 bp, Artificial Sequence
  Description of Artificial Sequence: Synthetic oligonucleotide
  Target: LAMA2; (-) strand; PAM type: YTN; PAM sequence: TTG
gaatatggtgcaagatacag

SEQ ID NO: 281327 - DNA, 20 bp, Artificial Sequence
  Description of Artificial Sequence: Synthetic oligonucleotide
  Target: LAMA2; (-) strand; PAM type: YTN; PAM sequence: TTT
ggaatatggtgcaagataca

SEQ ID NO: 281328 - DNA, 20 bp, Artificial Sequence
  Description of Artificial Sequence: Synthetic oligonucleotide
  Target: LAMA2; (-) strand; PAM type: YTN; PAM sequence: TTT
tggaatatggtgcaagatac

SEQ ID NO: 281329 - DNA, 20 bp, Artificial Sequence
  Description of Artificial Sequence: Synthetic oligonucleotide
  Target: LAMA2; (-) strand; PAM type: YTN; PAM sequence: TTA
attttggaatatggtgcaag

SEQ ID NO: 281330 - DNA, 20 bp, Artificial Sequence
  Description of Artificial Sequence: Synthetic oligonucleotide
  Target: LAMA2; (-) strand; PAM type: YTN; PAM sequence: TTG
agttaattttggaatatggt

SEQ ID NO: 281331 - DNA, 20 bp, Artificial Sequence
  Description of Artificial Sequence: Synthetic oligonucleotide
  Target: LAMA2; (-) strand; PAM type: YTN; PAM sequence: TTT
gagttaattttggaatatgg

SEQ ID NO: 281332 - DNA, 20 bp, Artificial Sequence
  Description of Artificial Sequence: Synthetic oligonucleotide
  Target: LAMA2; (-) strand; PAM type: YTN; PAM sequence: TTT
tgagttaattttggaatatg

SEQ ID NO: 281333 - DNA, 20 bp, Artificial Sequence
  Description of Artificial Sequence: Synthetic oligonucleotide
  Target: LAMA2; (-) strand; PAM type: YTN; PAM sequence: CTT
ttgagttaattttggaatat

SEQ ID NO: 281334 - DNA, 20 bp, Artificial Sequence
  Description of Artificial Sequence: Synthetic oligonucleotide
  Target: LAMA2; (-) strand; PAM type: YTN; PAM sequence: CTC
ttttgagttaattttggaat

SEQ ID NO: 281335 - DNA, 20 bp, Artificial Sequence
  Description of Artificial Sequence: Synthetic oligonucleotide
  Target: LAMA2; (-) strand; PAM type: YTN; PAM sequence: CTA
gcatctcttttgagttaatt

SEQ ID NO: 281336 - DNA, 20 bp, Artificial Sequence
  Description of Artificial Sequence: Synthetic oligonucleotide
  Target: LAMA2; (-) strand; PAM type: YTN; PAM sequence: TTA
ggtctagcatctcttttgag

SEQ ID NO: 281337 - DNA, 20 bp, Artificial Sequence
  Description of Artificial Sequence: Synthetic oligonucleotide
  Target: LAMA2; (-) strand; PAM type: YTN; PAM sequence: TTA
cagttaggtctagcatctct

SEQ ID NO: 281338 - DNA, 20 bp, Artificial Sequence
  Description of Artificial Sequence: Synthetic oligonucleotide
  Target: LAMA2; (-) strand; PAM type: YTN; PAM sequence: TTT
acagttaggtctagcatctc

SEQ ID NO: 281339 - DNA, 20 bp, Artificial Sequence
  Description of Artificial Sequence: Synthetic oligonucleotide
  Target: LAMA2; (-) strand; PAM type: YTN; PAM sequence: TTT
tacagttaggtctagcatct

SEQ ID NO: 281340 - DNA, 20 bp, Artificial Sequence
  Description of Artificial Sequence: Synthetic oligonucleotide
  Target: LAMA2; (-) strand; PAM type: YTN; PAM sequence: TTA
tgttttacagttaggtctag

SEQ ID NO: 281341 - DNA, 20 bp, Artificial Sequence
  Description of Artificial Sequence: Synthetic oligonucleotide
  Target: LAMA2; (-) strand; PAM type: YTN; PAM sequence: TTT
atgttttacagttaggtcta

SEQ ID NO: 281342 - DNA, 20 bp, Artificial Sequence
  Description of Artificial Sequence: Synthetic oligonucleotide
  Target: LAMA2; (-) strand; PAM type: YTN; PAM sequence: TTT
tatgttttacagttaggtct

SEQ ID NO: 281343 - DNA, 20 bp, Artificial Sequence
  Description of Artificial Sequence: Synthetic oligonucleotide
  Target: LAMA2; (-) strand; PAM type: YTN; PAM sequence: TTT
ttatgttttacagttaggtc

SEQ ID NO: 281344 - DNA, 20 bp, Artificial Sequence
  Description of Artificial Sequence: Synthetic oligonucleotide
  Target: LAMA2; (-) strand; PAM type: YTN; PAM sequence: TTA
tatttttatgttttacagtt

SEQ ID NO: 281345 - DNA, 20 bp, Artificial Sequence
  Description of Artificial Sequence: Synthetic oligonucleotide
  Target: LAMA2; (-) strand; PAM type: YTN; PAM sequence: TTT
atatttttatgttttacagt

SEQ ID NO: 281346 - DNA, 20 bp, Artificial Sequence
  Description of Artificial Sequence: Synthetic oligonucleotide
  Target: LAMA2; (-) strand; PAM type: YTN; PAM sequence: TTT
tatatttttatgttttacag

SEQ ID NO: 281347 - DNA, 20 bp, Artificial Sequence
  Description of Artificial Sequence: Synthetic oligonucleotide
  Target: LAMA2; (-) strand; PAM type: YTN; PAM sequence: TTA
gatgttttatatttttatgt

SEQ ID NO: 281348 - DNA, 20 bp, Artificial Sequence
  Description of Artificial Sequence: Synthetic oligonucleotide
  Target: LAMA2; (-) strand; PAM type: YTN; PAM sequence: TTT
agatgttttatatttttatg

SEQ ID NO: 281349 - DNA, 20 bp, Artificial Sequence
  Description of Artificial Sequence: Synthetic oligonucleotide
  Target: LAMA2; (-) strand; PAM type: YTN; PAM sequence: TTT
tagatgttttatatttttat

SEQ ID NO: 281350 - DNA, 20 bp, Artificial Sequence
  Description of Artificial Sequence: Synthetic oligonucleotide
  Target: LAMA2; (-) strand; PAM type: YTN; PAM sequence: TTT
ttagatgttttatattttta

SEQ ID NO: 281351 - DNA, 20 bp, Artificial Sequence
  Description of Artificial Sequence: Synthetic oligonucleotide
  Target: LAMA2; (-) strand; PAM type: YTN; PAM sequence: TTA
tatatttttagatgttttat

SEQ ID NO: 281352 - DNA, 20 bp, Artificial Sequence
  Description of Artificial Sequence: Synthetic oligonucleotide
  Target: LAMA2; (-) strand; PAM type: YTN; PAM sequence: CTT
atatatttttagatgtttta

SEQ ID NO: 281353 - DNA, 20 bp, Artificial Sequence
  Description of Artificial Sequence: Synthetic oligonucleotide
  Target: LAMA2; (-) strand; PAM type: YTN; PAM sequence: TTC
ttatatatttttagatgttt

SEQ ID NO: 281354 - DNA, 20 bp, Artificial Sequence
  Description of Artificial Sequence: Synthetic oligonucleotide
  Target: LAMA2; (-) strand; PAM type: YTN; PAM sequence: TTT
cttatatatttttagatgtt

SEQ ID NO: 281355 - DNA, 20 bp, Artificial Sequence
  Description of Artificial Sequence: Synthetic oligonucleotide
  Target: LAMA2; (-) strand; PAM type: YTN; PAM sequence: TTT
tcttatatatttttagatgt

SEQ ID NO: 281356 - DNA, 20 bp, Artificial Sequence
  Description of Artificial Sequence: Synthetic oligonucleotide
  Target: LAMA2; (-) strand; PAM type: YTN; PAM sequence: TTT
ttcttatatatttttagatg

SEQ ID NO: 281357 - DNA, 20 bp, Artificial Sequence
  Description of Artificial Sequence: Synthetic oligonucleotide
  Target: LAMA2; (-) strand; PAM type: YTN; PAM sequence: TTA
cccaagatcacaaagatttt

SEQ ID NO: 281358 - DNA, 20 bp, Artificial Sequence
  Description of Artificial Sequence: Synthetic oligonucleotide
  Target: LAMA2; (-) strand; PAM type: YTN; PAM sequence: TTT
acccaagatcacaaagattt

SEQ ID NO: 281359 - DNA, 20 bp, Artificial Sequence
  Description of Artificial Sequence: Synthetic oligonucleotide
  Target: LAMA2; (-) strand; PAM type: YTN; PAM sequence: CTT
tacccaagatcacaaagatt

SEQ ID NO: 281360 - DNA, 20 bp, Artificial Sequence
  Description of Artificial Sequence: Synthetic oligonucleotide
  Target: LAMA2; (-) strand; PAM type: YTN; PAM sequence: TTG
ctttacccaagatcacaaag

SEQ ID NO: 281361 - DNA, 20 bp, Artificial Sequence
  Description of Artificial Sequence: Synthetic oligonucleotide
  Target: LAMA2; (-) strand; PAM type: YTN; PAM sequence: TTT
gctttacccaagatcacaaa

SEQ ID NO: 281362 - DNA, 20 bp, Artificial Sequence
  Description of Artificial Sequence: Synthetic oligonucleotide
  Target: LAMA2; (-) strand; PAM type: YTN; PAM sequence: CTT
tgctttacccaagatcacaa

SEQ ID NO: 281363 - DNA, 20 bp, Artificial Sequence
  Description of Artificial Sequence: Synthetic oligonucleotide
  Target: LAMA2; (-) strand; PAM type: YTN; PAM sequence: CTA
agaatctttgctttacccaa

SEQ ID NO: 281364 - DNA, 20 bp, Artificial Sequence
  Description of Artificial Sequence: Synthetic oligonucleotide
  Target: LAMA2; (-) strand; PAM type: YTN; PAM sequence: TTG
gtggtgtatctaagaatctt

SEQ ID NO: 281365 - DNA, 20 bp, Artificial Sequence
  Description of Artificial Sequence: Synthetic oligonucleotide
  Target: LAMA2; (-) strand; PAM type: YTN; PAM sequence: TTT
ggtggtgtatctaagaatct

SEQ ID NO: 281366 - DNA, 20 bp, Artificial Sequence
  Description of Artificial Sequence: Synthetic oligonucleotide
  Target: LAMA2; (-) strand; PAM type: YTN; PAM sequence: TTT
tggtggtgtatctaagaatc

SEQ ID NO: 281367 - DNA, 20 bp, Artificial Sequence
  Description of Artificial Sequence: Synthetic oligonucleotide
  Target: LAMA2; (-) strand; PAM type: YTN; PAM sequence: CTT
ttggtggtgtatctaagaat

SEQ ID NO: 281368 - DNA, 20 bp, Artificial Sequence
  Description of Artificial Sequence: Synthetic oligonucleotide
  Target: LAMA2; (-) strand; PAM type: YTN; PAM sequence: TTG
aggatatgcttttggtggtg

SEQ ID NO: 281369 - DNA, 20 bp, Artificial Sequence
  Description of Artificial Sequence: Synthetic oligonucleotide
  Target: LAMA2; (-) strand; PAM type: YTN; PAM sequence: TTT
gaggatatgcttttggtggt

SEQ ID NO: 281370 - DNA, 20 bp, Artificial Sequence
  Description of Artificial Sequence: Synthetic oligonucleotide
  Target: LAMA2; (-) strand; PAM type: YTN; PAM sequence: TTT
tgaggatatgcttttggtgg

SEQ ID NO: 281371 - DNA, 20 bp, Artificial Sequence
  Description of Artificial Sequence: Synthetic oligonucleotide
  Target: LAMA2; (-) strand; PAM type: YTN; PAM sequence: CTT
ttgaggatatgcttttggtg

SEQ ID NO: 281372 - DNA, 20 bp, Artificial Sequence
  Description of Artificial Sequence: Synthetic oligonucleotide
  Target: LAMA2; (-) strand; PAM type: YTN; PAM sequence: TTC
cttttgaggatatgcttttg

SEQ ID NO: 281373 - DNA, 20 bp, Artificial Sequence
  Description of Artificial Sequence: Synthetic oligonucleotide
  Target: LAMA2; (-) strand; PAM type: YTN; PAM sequence: TTT
ccttttgaggatatgctttt

SEQ ID NO: 281374 - DNA, 20 bp, Artificial Sequence
  Description of Artificial Sequence: Synthetic oligonucleotide
  Target: LAMA2; (-) strand; PAM type: YTN; PAM sequence: TTT
tccttttgaggatatgcttt

SEQ ID NO: 281375 - DNA, 20 bp, Artificial Sequence
  Description of Artificial Sequence: Synthetic oligonucleotide
  Target: LAMA2; (-) strand; PAM type: YTN; PAM sequence: TTG
ttttccttttgaggatatgc

SEQ ID NO: 281376 - DNA, 20 bp, Artificial Sequence
  Description of Artificial Sequence: Synthetic oligonucleotide
  Target: LAMA2; (-) strand; PAM type: YTN; PAM sequence: TTT
gttttccttttgaggatatg

SEQ ID NO: 281377 - DNA, 20 bp, Artificial Sequence
  Description of Artificial Sequence: Synthetic oligonucleotide
  Target: LAMA2; (-) strand; PAM type: YTN; PAM sequence: TTT
tgttttccttttgaggatat

SEQ ID NO: 281378 - DNA, 20 bp, Artificial Sequence
  Description of Artificial Sequence: Synthetic oligonucleotide
  Target: LAMA2; (-) strand; PAM type: YTN; PAM sequence: TTA
attttgttttccttttgagg

SEQ ID NO: 281379 - DNA, 20 bp, Artificial Sequence
  Description of Artificial Sequence: Synthetic oligonucleotide
  Target: LAMA2; (-) strand; PAM type: YTN; PAM sequence: TTG
ttaattttgttttccttttg

SEQ ID NO: 281380 - DNA, 20 bp, Artificial Sequence
  Description of Artificial Sequence: Synthetic oligonucleotide
  Target: LAMA2; (-) strand; PAM type: YTN; PAM sequence: TTA
agttgttaattttgttttcc

SEQ ID NO: 281381 - DNA, 20 bp, Artificial Sequence
  Description of Artificial Sequence: Synthetic oligonucleotide
  Target: LAMA2; (-) strand; PAM type: YTN; PAM sequence: TTT
aagttgttaattttgttttc

SEQ ID NO: 281382 - DNA, 20 bp, Artificial Sequence
  Description of Artificial Sequence: Synthetic oligonucleotide
  Target: LAMA2; (-) strand; PAM type: YTN; PAM sequence: TTG
atgaaatttaagttgttaat

SEQ ID NO: 281383 - DNA, 20 bp, Artificial Sequence
  Description of Artificial Sequence: Synthetic oligonucleotide
  Target: LAMA2; (-) strand; PAM type: YTN; PAM sequence: TTT
gatgaaatttaagttgttaa

SEQ ID NO: 281384 - DNA, 20 bp, Artificial Sequence
  Description of Artificial Sequence: Synthetic oligonucleotide
  Target: LAMA2; (-) strand; PAM type: YTN; PAM sequence: TTT
tgatgaaatttaagttgtta

SEQ ID NO: 281385 - DNA, 20 bp, Artificial Sequence
  Description of Artificial Sequence: Synthetic oligonucleotide
  Target: LAMA2; (-) strand; PAM type: YTN; PAM sequence: CTC
aattttgatgaaatttaagt

SEQ ID NO: 281386 - DNA, 20 bp, Artificial Sequence
  Description of Artificial Sequence: Synthetic oligonucleotide
  Target: LAMA2; (-) strand; PAM type: YTN; PAM sequence: TTC
tcaattttgatgaaatttaa

SEQ ID NO: 281387 - DNA, 20 bp, Artificial Sequence
  Description of Artificial Sequence: Synthetic oligonucleotide
  Target: LAMA2; (-) strand; PAM type: YTN; PAM sequence: TTG
aagggaagaagttctcaatt

SEQ ID NO: 281388 - DNA, 20 bp, Artificial Sequence
  Description of Artificial Sequence: Synthetic oligonucleotide
  Target: LAMA2; (-) strand; PAM type: YTN; PAM sequence: TTT
gaagggaagaagttctcaat

SEQ ID NO: 281389 - DNA, 20 bp, Artificial Sequence
  Description of Artificial Sequence: Synthetic oligonucleotide
  Target: LAMA2; (-) strand; PAM type: YTN; PAM sequence: TTT
tgaagggaagaagttctcaa

SEQ ID NO: 281390 - DNA, 20 bp, Artificial Sequence
  Description of Artificial Sequence: Synthetic oligonucleotide
  Target: LAMA2; (-) strand; PAM type: YTN; PAM sequence: TTT
ttgaagggaagaagttctca

SEQ ID NO: 281391 - DNA, 20 bp, Artificial Sequence
  Description of Artificial Sequence: Synthetic oligonucleotide
  Target: LAMA2; (-) strand; PAM type: YTN; PAM sequence: TTT
tttgaagggaagaagttctc

SEQ ID NO: 281392 - DNA, 20 bp, Artificial Sequence
  Description of Artificial Sequence: Synthetic oligonucleotide
  Target: LAMA2; (-) strand; PAM type: YTN; PAM sequence: TTT
ttttgaagggaagaagttct

SEQ ID NO: 281393 - DNA, 20 bp, Artificial Sequence
  Description of Artificial Sequence: Synthetic oligonucleotide
  Target: LAMA2; (-) strand; PAM type: YTN; PAM sequence: TTT
tttttgaagggaagaagttc

SEQ ID NO: 281394 - DNA, 20 bp, Artificial Sequence
  Description of Artificial Sequence: Synthetic oligonucleotide
  Target: LAMA2; (-) strand; PAM type: YTN; PAM sequence: TTT
ttttttgaagggaagaagtt

SEQ ID NO: 281395 - DNA, 20 bp, Artificial Sequence
  Description of Artificial Sequence: Synthetic oligonucleotide
  Target: LAMA2; (-) strand; PAM type: YTN; PAM sequence: TTT
tttttttgaagggaagaagt

SEQ ID NO: 281396 - DNA, 20 bp, Artificial Sequence
  Description of Artificial Sequence: Synthetic oligonucleotide
  Target: LAMA2; (-) strand; PAM type: YTN; PAM sequence: TTT
ttttttttgaagggaagaag

SEQ ID NO: 281397 - DNA, 20 bp, Artificial Sequence
  Description of Artificial Sequence: Synthetic oligonucleotide
  Target: LAMA2; (-) strand; PAM type: YTN; PAM sequence: TTT
tttttttttgaagggaagaa

SEQ ID NO: 281398 - DNA, 20 bp, Artificial Sequence
  Description of Artificial Sequence: Synthetic oligonucleotide
  Target: LAMA2; (-) strand; PAM type: YTN; PAM sequence: CTT
ttttttttttgaagggaaga

SEQ ID NO: 281399 - DNA, 20 bp, Artificial Sequence
  Description of Artificial Sequence: Synthetic oligonucleotide
  Target: LAMA2; (-) strand; PAM type: YTN; PAM sequence: TTA
aaagtgcttttttttttttg

SEQ ID NO: 281400 - DNA, 20 bp, Artificial Sequence
  Description of Artificial Sequence: Synthetic oligonucleotide
  Target: LAMA2; (-) strand; PAM type: YTN; PAM sequence: CTT
aaaagtgctttttttttttt

SEQ ID NO: 281401 - DNA, 20 bp, Artificial Sequence
  Description of Artificial Sequence: Synthetic oligonucleotide
  Target: LAMA2; (-) strand; PAM type: YTN; PAM sequence: TTC
ttaaaagtgctttttttttt

SEQ ID NO: 281402 - DNA, 20 bp, Artificial Sequence
  Description of Artificial Sequence: Synthetic oligonucleotide
  Target: LAMA2; (-) strand; PAM type: YTN; PAM sequence: TTT
cttaaaagtgcttttttttt

SEQ ID NO: 281403 - DNA, 20 bp, Artificial Sequence
  Description of Artificial Sequence: Synthetic oligonucleotide
  Target: LAMA2; (-) strand; PAM type: YTN; PAM sequence: TTT
tcttaaaagtgctttttttt

SEQ ID NO: 281404 - DNA, 20 bp, Artificial Sequence
  Description of Artificial Sequence: Synthetic oligonucleotide
  Target: LAMA2; (-) strand; PAM type: YTN; PAM sequence: TTC
attttcttaaaagtgctttt

SEQ ID NO: 281405 - DNA, 20 bp, Artificial Sequence
  Description of Artificial Sequence: Synthetic oligonucleotide
  Target: LAMA2; (-) strand; PAM type: YTN; PAM sequence: TTT
cattttcttaaaagtgcttt

SEQ ID NO: 281406 - DNA, 20 bp, Artificial Sequence
  Description of Artificial Sequence: Synthetic oligonucleotide
  Target: LAMA2; (-) strand; PAM type: YTN; PAM sequence: TTT
tcattttcttaaaagtgctt

SEQ ID NO: 281407 - DNA, 20 bp, Artificial Sequence
  Description of Artificial Sequence: Synthetic oligonucleotide
  Target: LAMA2; (-) strand; PAM type: YTN; PAM sequence: CTT
ttcattttcttaaaagtgct

SEQ ID NO: 281408 - DNA, 20 bp, Artificial Sequence
  Description of Artificial Sequence: Synthetic oligonucleotide
  Target: LAMA2; (-) strand; PAM type: YTN; PAM sequence: TTA
tcttttcattttcttaaaag

SEQ ID NO: 281409 - DNA, 20 bp, Artificial Sequence
  Description of Artificial Sequence: Synthetic oligonucleotide
  Target: LAMA2; (-) strand; PAM type: YTN; PAM sequence: TTG
tagttatcttttcattttct

SEQ ID NO: 281410 - DNA, 20 bp, Artificial Sequence
  Description of Artificial Sequence: Synthetic oligonucleotide
  Target: LAMA2; (-) strand; PAM type: YTN; PAM sequence: TTT
gtagttatcttttcattttc

SEQ ID NO: 281411 - DNA, 20 bp, Artificial Sequence
  Description of Artificial Sequence: Synthetic oligonucleotide
  Target: LAMA2; (-) strand; PAM type: YTN; PAM sequence: CTA
gtttgtagttatcttttcat

SEQ ID NO: 281412 - DNA, 20 bp, Artificial Sequence
  Description of Artificial Sequence: Synthetic oligonucleotide
  Target: LAMA2; (-) strand; PAM type: YTN; PAM sequence: CTA
ctagtttgtagttatctttt

SEQ ID NO: 281413 - DNA, 20 bp, Artificial Sequence
  Description of Artificial Sequence: Synthetic oligonucleotide
  Target: LAMA2; (-) strand; PAM type: YTN; PAM sequence: TTC
tactagtttgtagttatctt

SEQ ID NO: 281414 - DNA, 20 bp, Artificial Sequence
  Description of Artificial Sequence: Synthetic oligonucleotide
  Target: LAMA2; (-) strand; PAM type: YTN; PAM sequence: TTG
gaaatatattctactagttt

SEQ ID NO: 281415 - DNA, 20 bp, Artificial Sequence
  Description of Artificial Sequence: Synthetic oligonucleotide
  Target: LAMA2; (-) strand; PAM type: YTN; PAM sequence: TTT
ggaaatatattctactagtt

SEQ ID NO: 281416 - DNA, 20 bp, Artificial Sequence
  Description of Artificial Sequence: Synthetic oligonucleotide
  Target: LAMA2; (-) strand; PAM type: YTN; PAM sequence: TTA
tcagatatgtaatttggaaa

SEQ ID NO: 281417 - DNA, 20 bp, Artificial Sequence
  Description of Artificial Sequence: Synthetic oligonucleotide
  Target: LAMA2; (-) strand; PAM type: YTN; PAM sequence: TTT
atcagatatgtaatttggaa

SEQ ID NO: 281418 - DNA, 20 bp, Artificial Sequence
  Description of Artificial Sequence: Synthetic oligonucleotide
  Target: LAMA2; (-) strand; PAM type: YTN; PAM sequence: CTT
tatcagatatgtaatttgga

SEQ ID NO: 281419 - DNA, 20 bp, Artificial Sequence
  Description of Artificial Sequence: Synthetic oligonucleotide
  Target: LAMA2; (-) strand; PAM type: YTN; PAM sequence: CTG
gatatgggtcctttatcaga

SEQ ID NO: 281420 - DNA, 20 bp, Artificial Sequence
  Description of Artificial Sequence: Synthetic oligonucleotide
  Target: LAMA2; (-) strand; PAM type: YTN; PAM sequence: TTG
aatgatacatatgaataatc

SEQ ID NO: 281421 - DNA, 20 bp, Artificial Sequence
  Description of Artificial Sequence: Synthetic oligonucleotide
  Target: LAMA2; (-) strand; PAM type: YTN; PAM sequence: TTT
gaatgatacatatgaataat

SEQ ID NO: 281422 - DNA, 20 bp, Artificial Sequence
  Description of Artificial Sequence: Synthetic oligonucleotide
  Target: LAMA2; (-) strand; PAM type: YTN; PAM sequence: TTT
tgaatgatacatatgaataa

SEQ ID NO: 281423 - DNA, 20 bp, Artificial Sequence
  Description of Artificial Sequence: Synthetic oligonucleotide
  Target: LAMA2; (-) strand; PAM type: YTN; PAM sequence: TTG
agttttgaatgatacatatg

SEQ ID NO: 281424 - DNA, 20 bp, Artificial Sequence
  Description of Artificial Sequence: Synthetic oligonucleotide
  Target: LAMA2; (-) strand; PAM type: YTN; PAM sequence: TTT
gagttttgaatgatacatat

SEQ ID NO: 281425 - DNA, 20 bp, Artificial Sequence
  Description of Artificial Sequence: Synthetic oligonucleotide
  Target: LAMA2; (-) strand; PAM type: YTN; PAM sequence: TTT
tgagttttgaatgatacata

SEQ ID NO: 281426 - DNA, 20 bp, Artificial Sequence
  Description of Artificial Sequence: Synthetic oligonucleotide
  Target: LAMA2; (-) strand; PAM type: YTN; PAM sequence: TTT
ttgagttttgaatgatacat

SEQ ID NO: 281427 - DNA, 20 bp, Artificial Sequence
  Description of Artificial Sequence: Synthetic oligonucleotide
  Target: LAMA2; (-) strand; PAM type: YTN; PAM sequence: TTA
tttttgagttttgaatgata

SEQ ID NO: 281428 - DNA, 20 bp, Artificial Sequence
  Description of Artificial Sequence: Synthetic oligonucleotide
  Target: LAMA2; (-) strand; PAM type: YTN; PAM sequence: CTT
atttttgagttttgaatgat

SEQ ID NO: 281429 - DNA, 20 bp, Artificial Sequence
  Description of Artificial Sequence: Synthetic oligonucleotide
  Target: LAMA2; (-) strand; PAM type: YTN; PAM sequence: CTC
ttatttttgagttttgaatg

SEQ ID NO: 281430 - DNA, 20 bp, Artificial Sequence
  Description of Artificial Sequence: Synthetic oligonucleotide
  Target: LAMA2; (-) strand; PAM type: YTN; PAM sequence: TTG
ctcttatttttgagttttga

SEQ ID NO: 281431 - DNA, 20 bp, Artificial Sequence
  Description of Artificial Sequence: Synthetic oligonucleotide
  Target: LAMA2; (-) strand; PAM type: YTN; PAM sequence: TTT
gctcttatttttgagttttg

SEQ ID NO: 281432 - DNA, 20 bp, Artificial Sequence
  Description of Artificial Sequence: Synthetic oligonucleotide
  Target: LAMA2; (-) strand; PAM type: YTN; PAM sequence: TTA
tttgctcttatttttgagtt

SEQ ID NO: 281433 - DNA, 20 bp, Artificial Sequence
  Description of Artificial Sequence: Synthetic oligonucleotide
  Target: LAMA2; (-) strand; PAM type: YTN; PAM sequence: TTG
ggttatttgctcttattttt

SEQ ID NO: 281434 - DNA, 20 bp, Artificial Sequence
  Description of Artificial Sequence: Synthetic oligonucleotide
  Target: LAMA2; (-) strand; PAM type: YTN; PAM sequence: CTT
gggttatttgctcttatttt

SEQ ID NO: 281435 - DNA, 20 bp, Artificial Sequence
  Description of Artificial Sequence: Synthetic oligonucleotide
  Target: LAMA2; (-) strand; PAM type: YTN; PAM sequence: TTC
ttgggttatttgctcttatt

SEQ ID NO: 281436 - DNA, 20 bp, Artificial Sequence
  Description of Artificial Sequence: Synthetic oligonucleotide
  Target: LAMA2; (-) strand; PAM type: YTN; PAM sequence: TTT
cttgggttatttgctcttat

SEQ ID NO: 281437 - DNA, 20 bp, Artificial Sequence
  Description of Artificial Sequence: Synthetic oligonucleotide
  Target: LAMA2; (-) strand; PAM type: YTN; PAM sequence: TTT
tcttgggttatttgctctta

SEQ ID NO: 281438 - DNA, 20 bp, Artificial Sequence
  Description of Artificial Sequence: Synthetic oligonucleotide
  Target: LAMA2; (-) strand; PAM type: YTN; PAM sequence: TTC
aaattttcttgggttatttg

SEQ ID NO: 281439 - DNA, 20 bp, Artificial Sequence
  Description of Artificial Sequence: Synthetic oligonucleotide
  Target: LAMA2; (-) strand; PAM type: YTN; PAM sequence: TTG
ttcaaattttcttgggttat

SEQ ID NO: 281440 - DNA, 20 bp, Artificial Sequence
  Description of Artificial Sequence: Synthetic oligonucleotide
  Target: LAMA2; (-) strand; PAM type: YTN; PAM sequence: TTT
gttcaaattttcttgggtta

SEQ ID NO: 281441 - DNA, 20 bp, Artificial Sequence
  Description of Artificial Sequence: Synthetic oligonucleotide
  Target: LAMA2; (-) strand; PAM type: YTN; PAM sequence: TTT
tgttcaaattttcttgggtt

SEQ ID NO: 281442 - DNA, 20 bp, Artificial Sequence
  Description of Artificial Sequence: Synthetic oligonucleotide
  Target: LAMA2; (-) strand; PAM type: YTN; PAM sequence: CTT
ttgttcaaattttcttgggt

SEQ ID NO: 281443 - DNA, 20 bp, Artificial Sequence
  Description of Artificial Sequence: Synthetic oligonucleotide
  Target: LAMA2; (-) strand; PAM type: YTN; PAM sequence: TTA
aatcttttgttcaaattttc

SEQ ID NO: 281444 - DNA, 20 bp, Artificial Sequence
  Description of Artificial Sequence: Synthetic oligonucleotide
  Target: LAMA2; (-) strand; PAM type: YTN; PAM sequence: TTT
aaatcttttgttcaaatttt

SEQ ID NO: 281445 - DNA, 20 bp, Artificial Sequence
  Description of Artificial Sequence: Synthetic oligonucleotide
  Target: LAMA2; (-) strand; PAM type: YTN; PAM sequence: CTG
tttaaatcttttgttcaaat

SEQ ID NO: 281446 - DNA, 20 bp, Artificial Sequence
  Description of Artificial Sequence: Synthetic oligonucleotide
  Target: LAMA2; (-) strand; PAM type: YTN; PAM sequence: TTG
gtgacctgtttaaatctttt

SEQ ID NO: 281447 - DNA, 20 bp, Artificial Sequence
  Description of Artificial Sequence: Synthetic oligonucleotide
  Target: LAMA2; (-) strand; PAM type: YTN; PAM sequence: TTT
ggtgacctgtttaaatcttt

SEQ ID NO: 281448 - DNA, 20 bp, Artificial Sequence
  Description of Artificial Sequence: Synthetic oligonucleotide
  Target: LAMA2; (-) strand; PAM type: YTN; PAM sequence: CTT
tggtgacctgtttaaatctt

SEQ ID NO: 281449 - DNA, 20 bp, Artificial Sequence
  Description of Artificial Sequence: Synthetic oligonucleotide
  Target: LAMA2; (-) strand; PAM type: YTN; PAM sequence: TTC
tttggtgacctgtttaaatc

SEQ ID NO: 281450 - DNA, 20 bp, Artificial Sequence
  Description of Artificial Sequence: Synthetic oligonucleotide
  Target: LAMA2; (-) strand; PAM type: YTN; PAM sequence: CTT
ctttggtgacctgtttaaat

SEQ ID NO: 281451 - DNA, 20 bp, Artificial Sequence
  Description of Artificial Sequence: Synthetic oligonucleotide
  Target: LAMA2; (-) strand; PAM type: YTN; PAM sequence: TTC
caccttctttggtgacctgt

SEQ ID NO: 281452 - DNA, 20 bp, Artificial Sequence
  Description of Artificial Sequence: Synthetic oligonucleotide
  Target: LAMA2; (-) strand; PAM type: YTN; PAM sequence: TTT
ccaccttctttggtgacctg

SEQ ID NO: 281453 - DNA, 20 bp, Artificial Sequence
  Description of Artificial Sequence: Synthetic oligonucleotide
  Target: LAMA2; (-) strand; PAM type: YTN; PAM sequence: TTT
tccaccttctttggtgacct

SEQ ID NO: 281454 - DNA, 20 bp, Artificial Sequence
  Description of Artificial Sequence: Synthetic oligonucleotide
  Target: LAMA2; (-) strand; PAM type: YTN; PAM sequence: TTA
ttttccaccttctttggtga

SEQ ID NO: 281455 - DNA, 20 bp, Artificial Sequence
  Description of Artificial Sequence: Synthetic oligonucleotide
  Target: LAMA2; (-) strand; PAM type: YTN; PAM sequence: CTT
attttccaccttctttggtg

SEQ ID NO: 281456 - DNA, 20 bp, Artificial Sequence
  Description of Artificial Sequence: Synthetic oligonucleotide
  Target: LAMA2; (-) strand; PAM type: YTN; PAM sequence: TTC
acatgcttattttccacctt

SEQ ID NO: 281457 - DNA, 20 bp, Artificial Sequence
  Description of Artificial Sequence: Synthetic oligonucleotide
  Target: LAMA2; (-) strand; PAM type: YTN; PAM sequence: TTT
cacatgcttattttccacct

SEQ ID NO: 281458 - DNA, 20 bp, Artificial Sequence
  Description of Artificial Sequence: Synthetic oligonucleotide
  Target: LAMA2; (-) strand; PAM type: YTN; PAM sequence: TTT
tcacatgcttattttccacc

SEQ ID NO: 281459 - DNA, 20 bp, Artificial Sequence
  Description of Artificial Sequence: Synthetic oligonucleotide
  Target: LAMA2; (-) strand; PAM type: YTN; PAM sequence: CTT
ttcacatgcttattttccac

SEQ ID NO: 281460 - DNA, 20 bp, Artificial Sequence
  Description of Artificial Sequence: Synthetic oligonucleotide
  Target: LAMA2; (-) strand; PAM type: YTN; PAM sequence: TTG
agcatcttttcacatgctta

SEQ ID NO: 281461 - DNA, 20 bp, Artificial Sequence
  Description of Artificial Sequence: Synthetic oligonucleotide
  Target: LAMA2; (-) strand; PAM type: YTN; PAM sequence: CTA
ataacattgagcatcttttc

SEQ ID NO: 281462 - DNA, 20 bp, Artificial Sequence
  Description of Artificial Sequence: Synthetic oligonucleotide
  Target: LAMA2; (-) strand; PAM type: YTN; PAM sequence: TTA
tgactaataacattgagcat

SEQ ID NO: 281463 - DNA, 20 bp, Artificial Sequence
  Description of Artificial Sequence: Synthetic oligonucleotide
  Target: LAMA2; (-) strand; PAM type: YTN; PAM sequence: CTT
atgactaataacattgagca

SEQ ID NO: 281464 - DNA, 20 bp, Artificial Sequence
  Description of Artificial Sequence: Synthetic oligonucleotide
  Target: LAMA2; (-) strand; PAM type: YTN; PAM sequence: TTC
cttatgactaataacattga

SEQ ID NO: 281465 - DNA, 20 bp, Artificial Sequence
  Description of Artificial Sequence: Synthetic oligonucleotide
  Target: LAMA2; (-) strand; PAM type: YTN; PAM sequence: TTT
ccttatgactaataacattg

SEQ ID NO: 281466 - DNA, 20 bp, Artificial Sequence
  Description of Artificial Sequence: Synthetic oligonucleotide
  Target: LAMA2; (-) strand; PAM type: YTN; PAM sequence: TTT
tccttatgactaataacatt

SEQ ID NO: 281467 - DNA, 20 bp, Artificial Sequence
  Description of Artificial Sequence: Synthetic oligonucleotide
  Target: LAMA2; (-) strand; PAM type: YTN; PAM sequence: TTG
tgttttccttatgactaata

SEQ ID NO: 281468 - DNA, 20 bp, Artificial Sequence
  Description of Artificial Sequence: Synthetic oligonucleotide
  Target: LAMA2; (-) strand; PAM type: YTN; PAM sequence: TTT
gtgttttccttatgactaat

SEQ ID NO: 281469 - DNA, 20 bp, Artificial Sequence
  Description of Artificial Sequence: Synthetic oligonucleotide
  Target: LAMA2; (-) strand; PAM type: YTN; PAM sequence: CTT
tgtgttttccttatgactaa

SEQ ID NO: 281470 - DNA, 20 bp, Artificial Sequence
  Description of Artificial Sequence: Synthetic oligonucleotide
  Target: LAMA2; (-) strand; PAM type: YTN; PAM sequence: TTG
ctttgtgttttccttatgac

SEQ ID NO: 281471 - DNA, 20 bp, Artificial Sequence
  Description of Artificial Sequence: Synthetic oligonucleotide
  Target: LAMA2; (-) strand; PAM type: YTN; PAM sequence: TTT
gctttgtgttttccttatga

SEQ ID NO: 281472 - DNA, 20 bp, Artificial Sequence
  Description of Artificial Sequence: Synthetic oligonucleotide
  Target: LAMA2; (-) strand; PAM type: YTN; PAM sequence: TTT
tgctttgtgttttccttatg

SEQ ID NO: 281473 - DNA, 20 bp, Artificial Sequence
  Description of Artificial Sequence: Synthetic oligonucleotide
  Target: LAMA2; (-) strand; PAM type: YTN; PAM sequence: TTG
gttttgctttgtgttttcct

SEQ ID NO: 281474 - DNA, 20 bp, Artificial Sequence
  Description of Artificial Sequence: Synthetic oligonucleotide
  Target: LAMA2; (-) strand; PAM type: YTN; PAM sequence: TTT
ggttttgctttgtgttttcc

SEQ ID NO: 281475 - DNA, 20 bp, Artificial Sequence
  Description of Artificial Sequence: Synthetic oligonucleotide
  Target: LAMA2; (-) strand; PAM type: YTN; PAM sequence: TTT
tggttttgctttgtgttttc

SEQ ID NO: 281476 - DNA, 20 bp, Artificial Sequence
  Description of Artificial Sequence: Synthetic oligonucleotide
  Target: LAMA2; (-) strand; PAM type: YTN; PAM sequence: CTG
gtcatcattttggttttgct

SEQ ID NO: 281477 - DNA, 20 bp, Artificial Sequence
  Description of Artificial Sequence: Synthetic oligonucleotide
  Target: LAMA2; (-) strand; PAM type: YTN; PAM sequence: CTA
actggtcatcattttggttt

SEQ ID NO: 281478 - DNA, 20 bp, Artificial Sequence
  Description of Artificial Sequence: Synthetic oligonucleotide
  Target: LAMA2; (-) strand; PAM type: YTN; PAM sequence: TTC
taactggtcatcattttggt

SEQ ID NO: 281479 - DNA, 20 bp, Artificial Sequence
  Description of Artificial Sequence: Synthetic oligonucleotide
  Target: LAMA2; (-) strand; PAM type: YTN; PAM sequence: TTA
gacattctaactggtcatca

SEQ ID NO: 281480 - DNA, 20 bp, Artificial Sequence
  Description of Artificial Sequence: Synthetic oligonucleotide
  Target: LAMA2; (-) strand; PAM type: YTN; PAM sequence: TTT
agacattctaactggtcatc

SEQ ID NO: 281481 - DNA, 20 bp, Artificial Sequence
  Description of Artificial Sequence: Synthetic oligonucleotide
  Target: LAMA2; (-) strand; PAM type: YTN; PAM sequence: TTT
tagacattctaactggtcat

SEQ ID NO: 281482 - DNA, 20 bp, Artificial Sequence
  Description of Artificial Sequence: Synthetic oligonucleotide
  Target: LAMA2; (-) strand; PAM type: YTN; PAM sequence: TTA
aaattttagacattctaact

SEQ ID NO: 281483 - DNA, 20 bp, Artificial Sequence
  Description of Artificial Sequence: Synthetic oligonucleotide
  Target: LAMA2; (-) strand; PAM type: YTN; PAM sequence: TTT
aaaattttagacattctaac

SEQ ID NO: 281484 - DNA, 20 bp, Artificial Sequence
  Description of Artificial Sequence: Synthetic oligonucleotide
  Target: LAMA2; (-) strand; PAM type: YTN; PAM sequence: TTT
taaaattttagacattctaa

SEQ ID NO: 281485 - DNA, 20 bp, Artificial Sequence
  Description of Artificial Sequence: Synthetic oligonucleotide
  Target: LAMA2; (-) strand; PAM type: YTN; PAM sequence: CTT
ttaaaattttagacattcta

SEQ ID NO: 281486 - DNA, 20 bp, Artificial Sequence
  Description of Artificial Sequence: Synthetic oligonucleotide
  Target: LAMA2; (-) strand; PAM type: YTN; PAM sequence: CTG
tcttttaaaattttagacat

SEQ ID NO: 281487 - DNA, 20 bp, Artificial Sequence
  Description of Artificial Sequence: Synthetic oligonucleotide
  Target: LAMA2; (-) strand; PAM type: YTN; PAM sequence: TTG
gtataacctgtcttttaaaa

SEQ ID NO: 281488 - DNA, 20 bp, Artificial Sequence
  Description of Artificial Sequence: Synthetic oligonucleotide
  Target: LAMA2; (-) strand; PAM type: YTN; PAM sequence: CTT
ggtataacctgtcttttaaa

SEQ ID NO: 281489 - DNA, 20 bp, Artificial Sequence
  Description of Artificial Sequence: Synthetic oligonucleotide
  Target: LAMA2; (-) strand; PAM type: YTN; PAM sequence: TTG
atacttggtataacctgtct

SEQ ID NO: 281490 - DNA, 20 bp, Artificial Sequence
  Description of Artificial Sequence: Synthetic oligonucleotide
  Target: LAMA2; (-) strand; PAM type: YTN; PAM sequence: TTG
ttgatacttggtataacctg

SEQ ID NO: 281491 - DNA, 20 bp, Artificial Sequence
  Description of Artificial Sequence: Synthetic oligonucleotide
  Target: LAMA2; (-) strand; PAM type: YTN; PAM sequence: TTT
gttgatacttggtataacct

SEQ ID NO: 281492 - DNA, 20 bp, Artificial Sequence
  Description of Artificial Sequence: Synthetic oligonucleotide
  Target: LAMA2; (-) strand; PAM type: YTN; PAM sequence: CTT
tgttgatacttggtataacc

SEQ ID NO: 281493 - DNA, 20 bp, Artificial Sequence
  Description of Artificial Sequence: Synthetic oligonucleotide
  Target: LAMA2; (-) strand; PAM type: YTN; PAM sequence: CTA
catctttgttgatacttggt

SEQ ID NO: 281494 - DNA, 20 bp, Artificial Sequence
  Description of Artificial Sequence: Synthetic oligonucleotide
  Target: LAMA2; (-) strand; PAM type: YTN; PAM sequence: CTG
catgtgcctacatctttgtt

SEQ ID NO: 281495 - DNA, 20 bp, Artificial Sequence
  Description of Artificial Sequence: Synthetic oligonucleotide
  Target: LAMA2; (-) strand; PAM type: YTN; PAM sequence: TTC
ccatcaccagtgtatgagag

SEQ ID NO: 281496 - DNA, 20 bp, Artificial Sequence
  Description of Artificial Sequence: Synthetic oligonucleotide
  Target: LAMA2; (-) strand; PAM type: YTN; PAM sequence: TTA
tattcccatcaccagtgtat

SEQ ID NO: 281497 - DNA, 20 bp, Artificial Sequence
  Description of Artificial Sequence: Synthetic oligonucleotide
  Target: LAMA2; (-) strand; PAM type: YTN; PAM sequence: TTT
atattcccatcaccagtgta

SEQ ID NO: 281498 - DNA, 20 bp, Artificial Sequence
  Description of Artificial Sequence: Synthetic oligonucleotide
  Target: LAMA2; (-) strand; PAM type: YTN; PAM sequence: CTA
tttatattcccatcaccagt

SEQ ID NO: 281499 - DNA, 20 bp, Artificial Sequence
  Description of Artificial Sequence: Synthetic oligonucleotide
  Target: LAMA2; (-) strand; PAM type: YTN; PAM sequence: CTG
aactatttatattcccatca

SEQ ID NO: 281500 - DNA, 20 bp, Artificial Sequence
  Description of Artificial Sequence: Synthetic oligonucleotide
  Target: LAMA2; (-) strand; PAM type: YTN; PAM sequence: CTA
aagtatctgaactatttata

SEQ ID NO: 281501 - DNA, 20 bp, Artificial Sequence
  Description of Artificial Sequence: Synthetic oligonucleotide
  Target: LAMA2; (-) strand; PAM type: YTN; PAM sequence: TTC
taaagtatctgaactattta

SEQ ID NO: 281502 - DNA, 20 bp, Artificial Sequence
  Description of Artificial Sequence: Synthetic oligonucleotide
  Target: LAMA2; (-) strand; PAM type: YTN; PAM sequence: TTT
ctaaagtatctgaactattt

SEQ ID NO: 281503 - DNA, 20 bp, Artificial Sequence
  Description of Artificial Sequence: Synthetic oligonucleotide
  Target: LAMA2; (-) strand; PAM type: YTN; PAM sequence: TTT
tctaaagtatctgaactatt

SEQ ID NO: 281504 - DNA, 20 bp, Artificial Sequence
  Description of Artificial Sequence: Synthetic oligonucleotide
  Target: LAMA2; (-) strand; PAM type: YTN; PAM sequence: CTG
ttttctaaagtatctgaact

SEQ ID NO: 281505 - DNA, 20 bp, Artificial Sequence
  Description of Artificial Sequence: Synthetic oligonucleotide
  Target: LAMA2; (-) strand; PAM type: YTN; PAM sequence: TTA
tcaacctgttttctaaagta

SEQ ID NO: 281506 - DNA, 20 bp, Artificial Sequence
  Description of Artificial Sequence: Synthetic oligonucleotide
  Target: LAMA2; (-) strand; PAM type: YTN; PAM sequence: TTA
agaaattatcaacctgtttt

SEQ ID NO: 281507 - DNA, 20 bp, Artificial Sequence
  Description of Artificial Sequence: Synthetic oligonucleotide
  Target: LAMA2; (-) strand; PAM type: YTN; PAM sequence: TTT
aagaaattatcaacctgttt

SEQ ID NO: 281508 - DNA, 20 bp, Artificial Sequence
  Description of Artificial Sequence: Synthetic oligonucleotide
  Target: LAMA2; (-) strand; PAM type: YTN; PAM sequence: TTT
taagaaattatcaacctgtt

SEQ ID NO: 281509 - DNA, 20 bp, Artificial Sequence
  Description of Artificial Sequence: Synthetic oligonucleotide
  Target: LAMA2; (-) strand; PAM type: YTN; PAM sequence: TTT
ttaagaaattatcaacctgt

SEQ ID NO: 281510 - DNA, 20 bp, Artificial Sequence
  Description of Artificial Sequence: Synthetic oligonucleotide
  Target: LAMA2; (-) strand; PAM type: YTN; PAM sequence: TTA
cgtttttaagaaattatcaa

SEQ ID NO: 281511 - DNA, 20 bp, Artificial Sequence
  Description of Artificial Sequence: Synthetic oligonucleotide
  Target: LAMA2; (-) strand; PAM type: YTN; PAM sequence: TTT
acgtttttaagaaattatca

SEQ ID NO: 281512 - DNA, 20 bp, Artificial Sequence
  Description of Artificial Sequence: Synthetic oligonucleotide
  Target: LAMA2; (-) strand; PAM type: YTN; PAM sequence: TTA
tgtttacgtttttaagaaat

SEQ ID NO: 281513 - DNA, 20 bp, Artificial Sequence
  Description of Artificial Sequence: Synthetic oligonucleotide
  Target: LAMA2; (-) strand; PAM type: YTN; PAM sequence: TTT
atgtttacgtttttaagaaa

SEQ ID NO: 281514 - DNA, 20 bp, Artificial Sequence
  Description of Artificial Sequence: Synthetic oligonucleotide
  Target: LAMA2; (-) strand; PAM type: YTN; PAM sequence: CTG
gatcatatggtaatttatgt

SEQ ID NO: 281515 - DNA, 20 bp, Artificial Sequence
  Description of Artificial Sequence: Synthetic oligonucleotide
  Target: LAMA2; (-) strand; PAM type: YTN; PAM sequence: TTG
gagtaaatacacagaagcag

SEQ ID NO: 281516 - DNA, 20 bp, Artificial Sequence
  Description of Artificial Sequence: Synthetic oligonucleotide
  Target: LAMA2; (-) strand; PAM type: YTN; PAM sequence: CTT
ggagtaaatacacagaagca

SEQ ID NO: 281517 - DNA, 20 bp, Artificial Sequence
  Description of Artificial Sequence: Synthetic oligonucleotide
  Target: LAMA2; (-) strand; PAM type: YTN; PAM sequence: TTA
tcttggagtaaatacacaga

SEQ ID NO: 281518 - DNA, 20 bp, Artificial Sequence
  Description of Artificial Sequence: Synthetic oligonucleotide
  Target: LAMA2; (-) strand; PAM type: YTN; PAM sequence: TTT
atcttggagtaaatacacag

SEQ ID NO: 281519 - DNA, 20 bp, Artificial Sequence
  Description of Artificial Sequence: Synthetic oligonucleotide
  Target: LAMA2; (-) strand; PAM type: YTN; PAM sequence: TTG
ggtgaacatatgccatcatt

SEQ ID NO: 281520 - DNA, 20 bp, Artificial Sequence
  Description of Artificial Sequence: Synthetic oligonucleotide
  Target: LAMA2; (-) strand; PAM type: YTN; PAM sequence: TTT
gggtgaacatatgccatcat

SEQ ID NO: 281521 - DNA, 20 bp, Artificial Sequence
  Description of Artificial Sequence: Synthetic oligonucleotide
  Target: LAMA2; (-) strand; PAM type: YTN; PAM sequence: TTT
tgggtgaacatatgccatca

SEQ ID NO: 281522 - DNA, 20 bp, Artificial Sequence
  Description of Artificial Sequence: Synthetic oligonucleotide
  Target: LAMA2; (-) strand; PAM type: YTN; PAM sequence: TTT
ttgggtgaacatatgccatc

SEQ ID NO: 281523 - DNA, 20 bp, Artificial Sequence
  Description of Artificial Sequence: Synthetic oligonucleotide
  Target: LAMA2; (-) strand; PAM type: YTN; PAM sequence: CTG
tgtacaaatttttgggtgaa

SEQ ID NO: 281524 - DNA, 20 bp, Artificial Sequence
  Description of Artificial Sequence: Synthetic oligonucleotide
  Target: LAMA2; (-) strand; PAM type: YTN; PAM sequence: TTC
atcatagggatatgtacaca

SEQ ID NO: 281525 - DNA, 20 bp, Artificial Sequence
  Description of Artificial Sequence: Synthetic oligonucleotide
  Target: LAMA2; (-) strand; PAM type: YTN; PAM sequence: TTT
catcatagggatatgtacac

SEQ ID NO: 281526 - DNA, 20 bp, Artificial Sequence
  Description of Artificial Sequence: Synthetic oligonucleotide
  Target: LAMA2; (-) strand; PAM type: YTN; PAM sequence: TTA
tttcatcatagggatatgta

SEQ ID NO: 281527 - DNA, 20 bp, Artificial Sequence
  Description of Artificial Sequence: Synthetic oligonucleotide
  Target: LAMA2; (-) strand; PAM type: YTN; PAM sequence: TTG
gtaattatttcatcataggg

SEQ ID NO: 281528 - DNA, 20 bp, Artificial Sequence
  Description of Artificial Sequence: Synthetic oligonucleotide
  Target: LAMA2; (-) strand; PAM type: YTN; PAM sequence: TTA
ttggtaattatttcatcata

SEQ ID NO: 281529 - DNA, 20 bp, Artificial Sequence
  Description of Artificial Sequence: Synthetic oligonucleotide
  Target: LAMA2; (-) strand; PAM type: YTN; PAM sequence: TTT
attggtaattatttcatcat

SEQ ID NO: 281530 - DNA, 20 bp, Artificial Sequence
  Description of Artificial Sequence: Synthetic oligonucleotide
  Target: LAMA2; (-) strand; PAM type: YTN; PAM sequence: TTT
tattggtaattatttcatca

SEQ ID NO: 281531 - DNA, 20 bp, Artificial Sequence
  Description of Artificial Sequence: Synthetic oligonucleotide
  Target: LAMA2; (-) strand; PAM type: YTN; PAM sequence: TTT
ttattggtaattatttcatc

SEQ ID NO: 281532 - DNA, 20 bp, Artificial Sequence
  Description of Artificial Sequence: Synthetic oligonucleotide
  Target: LAMA2; (-) strand; PAM type: YTN; PAM sequence: CTT
tttattggtaattatttcat

SEQ ID NO: 281533 - DNA, 20 bp, Artificial Sequence
  Description of Artificial Sequence: Synthetic oligonucleotide
  Target: LAMA2; (-) strand; PAM type: YTN; PAM sequence: TTG
atcctttttattggtaatta

SEQ ID NO: 281534 - DNA, 20 bp, Artificial Sequence
  Description of Artificial Sequence: Synthetic oligonucleotide
  Target: LAMA2; (-) strand; PAM type: YTN; PAM sequence: TTT
gatcctttttattggtaatt

SEQ ID NO: 281535 - DNA, 20 bp, Artificial Sequence
  Description of Artificial Sequence: Synthetic oligonucleotide
  Target: LAMA2; (-) strand; PAM type: YTN; PAM sequence: TTG
tgtgtgtatccatatttgat

SEQ ID NO: 281536 - DNA, 20 bp, Artificial Sequence
  Description of Artificial Sequence: Synthetic oligonucleotide
  Target: LAMA2; (-) strand; PAM type: YTN; PAM sequence: CTA
tgttgtgtgtgtatccatat

SEQ ID NO: 281537 - DNA, 20 bp, Artificial Sequence
  Description of Artificial Sequence: Synthetic oligonucleotide
  Target: LAMA2; (-) strand; PAM type: YTN; PAM sequence: TTA
tctatgttgtgtgtgtatcc

SEQ ID NO: 281538 - DNA, 20 bp, Artificial Sequence
  Description of Artificial Sequence: Synthetic oligonucleotide
  Target: LAMA2; (-) strand; PAM type: YTN; PAM sequence: TTT
atctatgttgtgtgtgtatc

SEQ ID NO: 281539 - DNA, 20 bp, Artificial Sequence
  Description of Artificial Sequence: Synthetic oligonucleotide
  Target: LAMA2; (-) strand; PAM type: YTN; PAM sequence: TTC
aacatttatctatgttgtgt

SEQ ID NO: 281540 - DNA, 20 bp, Artificial Sequence
  Description of Artificial Sequence: Synthetic oligonucleotide
  Target: LAMA2; (-) strand; PAM type: YTN; PAM sequence: TTT
caacatttatctatgttgtg

SEQ ID NO: 281541 - DNA, 20 bp, Artificial Sequence
  Description of Artificial Sequence: Synthetic oligonucleotide
  Target: LAMA2; (-) strand; PAM type: YTN; PAM sequence: CTC
aacatagtttcaacatttat

SEQ ID NO: 281542 - DNA, 20 bp, Artificial Sequence
  Description of Artificial Sequence: Synthetic oligonucleotide
  Target: LAMA2; (-) strand; PAM type: YTN; PAM sequence: TTC
actcaacatagtttcaacat

SEQ ID NO: 281543 - DNA, 20 bp, Artificial Sequence
  Description of Artificial Sequence: Synthetic oligonucleotide
  Target: LAMA2; (-) strand; PAM type: YTN; PAM sequence: TTT
cactcaacatagtttcaaca

SEQ ID NO: 281544 - DNA, 20 bp, Artificial Sequence
  Description of Artificial Sequence: Synthetic oligonucleotide
  Target: LAMA2; (-) strand; PAM type: YTN; PAM sequence: CTT
tcactcaacatagtttcaac

SEQ ID NO: 281545 - DNA, 20 bp, Artificial Sequence
  Description of Artificial Sequence: Synthetic oligonucleotide
  Target: LAMA2; (-) strand; PAM type: YTN; PAM sequence: TTC
tttcactcaacatagtttca

SEQ ID NO: 281546 - DNA, 20 bp, Artificial Sequence
  Description of Artificial Sequence: Synthetic oligonucleotide
  Target: LAMA2; (-) strand; PAM type: YTN; PAM sequence: CTT
ctttcactcaacatagtttc

SEQ ID NO: 281547 - DNA, 20 bp, Artificial Sequence
  Description of Artificial Sequence: Synthetic oligonucleotide
  Target: LAMA2; (-) strand; PAM type: YTN; PAM sequence: CTG
gcttctttcactcaacatag

SEQ ID NO: 281548 - DNA, 20 bp, Artificial Sequence
  Description of Artificial Sequence: Synthetic oligonucleotide
  Target: LAMA2; (-) strand; PAM type: YTN; PAM sequence: TTG
tctggcttctttcactcaac

SEQ ID NO: 281549 - DNA, 20 bp, Artificial Sequence
  Description of Artificial Sequence: Synthetic oligonucleotide
  Target: LAMA2; (-) strand; PAM type: YTN; PAM sequence: TTT
gtctggcttctttcactcaa

SEQ ID NO: 281550 - DNA, 20 bp, Artificial Sequence
  Description of Artificial Sequence: Synthetic oligonucleotide
  Target: LAMA2; (-) strand; PAM type: YTN; PAM sequence: TTT
tgtctggcttctttcactca

SEQ ID NO: 281551 - DNA, 20 bp, Artificial Sequence
  Description of Artificial Sequence: Synthetic oligonucleotide
  Target: LAMA2; (-) strand; PAM type: YTN; PAM sequence: TTT
ttgtctggcttctttcactc

SEQ ID NO: 281552 - DNA, 20 bp, Artificial Sequence
  Description of Artificial Sequence: Synthetic oligonucleotide
  Target: LAMA2; (-) strand; PAM type: YTN; PAM sequence: CTT
tttgtctggcttctttcact

SEQ ID NO: 281553 - DNA, 20 bp, Artificial Sequence
  Description of Artificial Sequence: Synthetic oligonucleotide
  Target: LAMA2; (-) strand; PAM type: YTN; PAM sequence: CTC
tttttgtctggcttctttca

SEQ ID NO: 281554 - DNA, 20 bp, Artificial Sequence
  Description of Artificial Sequence: Synthetic oligonucleotide
  Target: LAMA2; (-) strand; PAM type: YTN; PAM sequence: CTC
tctttttgtctggcttcttt

SEQ ID NO: 281555 - DNA, 20 bp, Artificial Sequence
  Description of Artificial Sequence: Synthetic oligonucleotide
  Target: LAMA2; (-) strand; PAM type: YTN; PAM sequence: CTG
catgtactctctttttgtct

SEQ ID NO: 281556 - DNA, 20 bp, Artificial Sequence
  Description of Artificial Sequence: Synthetic oligonucleotide
  Target: LAMA2; (-) strand; PAM type: YTN; PAM sequence: TTC
tgcatgtactctctttttgt

SEQ ID NO: 281557 - DNA, 20 bp, Artificial Sequence
  Description of Artificial Sequence: Synthetic oligonucleotide
  Target: LAMA2; (-) strand; PAM type: YTN; PAM sequence: TTA
tacaaatggaaacattctgc

SEQ ID NO: 281558 - DNA, 20 bp, Artificial Sequence
  Description of Artificial Sequence: Synthetic oligonucleotide
  Target: LAMA2; (-) strand; PAM type: YTN; PAM sequence: TTT
atacaaatggaaacattctg

SEQ ID NO: 281559 - DNA, 20 bp, Artificial Sequence
  Description of Artificial Sequence: Synthetic oligonucleotide
  Target: LAMA2; (-) strand; PAM type: YTN; PAM sequence: TTT
tatacaaatggaaacattct

SEQ ID NO: 281560 - DNA, 20 bp, Artificial Sequence
  Description of Artificial Sequence: Synthetic oligonucleotide
  Target: LAMA2; (-) strand; PAM type: YTN; PAM sequence: TTC
atagaattttatacaaatgg

SEQ ID NO: 281561 - DNA, 20 bp, Artificial Sequence
  Description of Artificial Sequence: Synthetic oligonucleotide
  Target: LAMA2; (-) strand; PAM type: YTN; PAM sequence: TTT
catagaattttatacaaatg

SEQ ID NO: 281562 - DNA, 20 bp, Artificial Sequence
  Description of Artificial Sequence: Synthetic oligonucleotide
  Target: LAMA2; (-) strand; PAM type: YTN; PAM sequence: TTG
catttcatagaattttatac

SEQ ID NO: 281563 - DNA, 20 bp, Artificial Sequence
  Description of Artificial Sequence: Synthetic oligonucleotide
  Target: LAMA2; (-) strand; PAM type: YTN; PAM sequence: TTT
gcatttcatagaattttata

SEQ ID NO: 281564 - DNA, 20 bp, Artificial Sequence
  Description of Artificial Sequence: Synthetic oligonucleotide
  Target: LAMA2; (-) strand; PAM type: YTN; PAM sequence: CTG
taggtttgcatttcatagaa

SEQ ID NO: 281565 - DNA, 20 bp, Artificial Sequence
  Description of Artificial Sequence: Synthetic oligonucleotide
  Target: LAMA2; (-) strand; PAM type: YTN; PAM sequence: TTC
catcactgtaggtttgcatt

SEQ ID NO: 281566 - DNA, 20 bp, Artificial Sequence
  Description of Artificial Sequence: Synthetic oligonucleotide
  Target: LAMA2; (-) strand; PAM type: YTN; PAM sequence: TTT
ccatcactgtaggtttgcat

SEQ ID NO: 281567 - DNA, 20 bp, Artificial Sequence
  Description of Artificial Sequence: Synthetic oligonucleotide
  Target: LAMA2; (-) strand; PAM type: YTN; PAM sequence: CTT
tccatcactgtaggtttgca

SEQ ID NO: 281568 - DNA, 20 bp, Artificial Sequence
  Description of Artificial Sequence: Synthetic oligonucleotide
  Target: LAMA2; (-) strand; PAM type: YTN; PAM sequence: CTG
ctttccatcactgtaggttt

SEQ ID NO: 281569 - DNA, 20 bp, Artificial Sequence
  Description of Artificial Sequence: Synthetic oligonucleotide
  Target: LAMA2; (-) strand; PAM type: YTN; PAM sequence: CTG
atctgctttccatcactgta

SEQ ID NO: 281570 - DNA, 20 bp, Artificial Sequence
  Description of Artificial Sequence: Synthetic oligonucleotide
  Target: LAMA2; (-) strand; PAM type: YTN; PAM sequence: CTG
tccccagacaaatactgatc

SEQ ID NO: 281571 - DNA, 20 bp, Artificial Sequence
  Description of Artificial Sequence: Synthetic oligonucleotide
  Target: LAMA2; (-) strand; PAM type: YTN; PAM sequence: CTC
tgtccccagacaaatactga

SEQ ID NO: 281572 - DNA, 20 bp, Artificial Sequence
  Description of Artificial Sequence: Synthetic oligonucleotide
  Target: LAMA2; (-) strand; PAM type: YTN; PAM sequence: TTC
cctctgtccccagacaaata

SEQ ID NO: 281573 - DNA, 20 bp, Artificial Sequence
  Description of Artificial Sequence: Synthetic oligonucleotide
  Target: LAMA2; (-) strand; PAM type: YTN; PAM sequence: CTT
ccctctgtccccagacaaat

SEQ ID NO: 281574 - DNA, 20 bp, Artificial Sequence
  Description of Artificial Sequence: Synthetic oligonucleotide
  Target: LAMA2; (-) strand; PAM type: YTN; PAM sequence: CTC
ttccctctgtccccagacaa

SEQ ID NO: 281575 - DNA, 20 bp, Artificial Sequence
  Description of Artificial Sequence: Synthetic oligonucleotide
  Target: LAMA2; (-) strand; PAM type: YTN; PAM sequence: TTC
tcttccctctgtccccagac

SEQ ID NO: 281576 - DNA, 20 bp, Artificial Sequence
  Description of Artificial Sequence: Synthetic oligonucleotide
  Target: LAMA2; (-) strand; PAM type: YTN; PAM sequence: CTT
ctcttccctctgtccccaga

SEQ ID NO: 281577 - DNA, 20 bp, Artificial Sequence
  Description of Artificial Sequence: Synthetic oligonucleotide
  Target: LAMA2; (-) strand; PAM type: YTN; PAM sequence: TTC
cttctcttccctctgtcccc

SEQ ID NO: 281578 - DNA, 20 bp, Artificial Sequence
  Description of Artificial Sequence: Synthetic oligonucleotide
  Target: LAMA2; (-) strand; PAM type: YTN; PAM sequence: CTT
ccttctcttccctctgtccc

SEQ ID NO: 281579 - DNA, 20 bp, Artificial Sequence
  Description of Artificial Sequence: Synthetic oligonucleotide
  Target: LAMA2; (-) strand; PAM type: YTN; PAM sequence: CTA
tccttccttctcttccctct

SEQ ID NO: 281580 - DNA, 20 bp, Artificial Sequence
  Description of Artificial Sequence: Synthetic oligonucleotide
  Target: LAMA2; (-) strand; PAM type: YTN; PAM sequence: TTC
tatccttccttctcttccct

SEQ ID NO: 281581 - DNA, 20 bp, Artificial Sequence
  Description of Artificial Sequence: Synthetic oligonucleotide
  Target: LAMA2; (-) strand; PAM type: YTN; PAM sequence: CTT
ctatccttccttctcttccc

SEQ ID NO: 281582 - DNA, 20 bp, Artificial Sequence
  Description of Artificial Sequence: Synthetic oligonucleotide
  Target: LAMA2; (-) strand; PAM type: YTN; PAM sequence: TTC
ttctatccttccttctcttc

SEQ ID NO: 281583 - DNA, 20 bp, Artificial Sequence
  Description of Artificial Sequence: Synthetic oligonucleotide
  Target: LAMA2; (-) strand; PAM type: YTN; PAM sequence: TTT
cttctatccttccttctctt

SEQ ID NO: 281584 - DNA, 20 bp, Artificial Sequence
  Description of Artificial Sequence: Synthetic oligonucleotide
  Target: LAMA2; (-) strand; PAM type: YTN; PAM sequence: CTT
tcttctatccttccttctct

SEQ ID NO: 281585 - DNA, 20 bp, Artificial Sequence
  Description of Artificial Sequence: Synthetic oligonucleotide
  Target: LAMA2; (-) strand; PAM type: YTN; PAM sequence: CTC
tttcttctatccttccttct

SEQ ID NO: 281586 - DNA, 20 bp, Artificial Sequence
  Description of Artificial Sequence: Synthetic oligonucleotide
  Target: LAMA2; (-) strand; PAM type: YTN; PAM sequence: TTG
aatctctttcttctatcctt

SEQ ID NO: 281587 - DNA, 20 bp, Artificial Sequence
  Description of Artificial Sequence: Synthetic oligonucleotide
  Target: LAMA2; (-) strand; PAM type: YTN; PAM sequence: TTT
gaatctctttcttctatcct

SEQ ID NO: 281588 - DNA, 20 bp, Artificial Sequence
  Description of Artificial Sequence: Synthetic oligonucleotide
  Target: LAMA2; (-) strand; PAM type: YTN; PAM sequence: TTT
tgaatctctttcttctatcc

SEQ ID NO: 281589 - DNA, 20 bp, Artificial Sequence
  Description of Artificial Sequence: Synthetic oligonucleotide
  Target: LAMA2; (-) strand; PAM type: YTN; PAM sequence: CTT
ttgaatctctttcttctatc

SEQ ID NO: 281590 - DNA, 20 bp, Artificial Sequence
  Description of Artificial Sequence: Synthetic oligonucleotide
  Target: LAMA2; (-) strand; PAM type: YTN; PAM sequence: TTC
ttttgaatctctttcttcta

SEQ ID NO: 281591 - DNA, 20 bp, Artificial Sequence
  Description of Artificial Sequence: Synthetic oligonucleotide
  Target: LAMA2; (-) strand; PAM type: YTN; PAM sequence: TTT
cttttgaatctctttcttct

SEQ ID NO: 281592 - DNA, 20 bp, Artificial Sequence
  Description of Artificial Sequence: Synthetic oligonucleotide
  Target: LAMA2; (-) strand; PAM type: YTN; PAM sequence: TTA
ccacaaccatggtagagaat

SEQ ID NO: 281593 - DNA, 20 bp, Artificial Sequence
  Description of Artificial Sequence: Synthetic oligonucleotide
  Target: LAMA2; (-) strand; PAM type: YTN; PAM sequence: TTG
aatatgtacacccatgagac

SEQ ID NO: 281594 - DNA, 20 bp, Artificial Sequence
  Description of Artificial Sequence: Synthetic oligonucleotide
  Target: LAMA2; (-) strand; PAM type: YTN; PAM sequence: TTT
gaatatgtacacccatgaga

SEQ ID NO: 281595 - DNA, 20 bp, Artificial Sequence
  Description of Artificial Sequence: Synthetic oligonucleotide
  Target: LAMA2; (-) strand; PAM type: YTN; PAM sequence: TTT
tgaatatgtacacccatgag

SEQ ID NO: 281596 - DNA, 20 bp, Artificial Sequence
  Description of Artificial Sequence: Synthetic oligonucleotide
  Target: LAMA2; (-) strand; PAM type: YTN; PAM sequence: TTG
gataagttttgaatatgtac

SEQ ID NO: 281597 - DNA, 20 bp, Artificial Sequence
  Description of Artificial Sequence: Synthetic oligonucleotide
  Target: LAMA2; (-) strand; PAM type: YTN; PAM sequence: TTA
caattggataagttttgaat

SEQ ID NO: 281598 - DNA, 20 bp, Artificial Sequence
  Description of Artificial Sequence: Synthetic oligonucleotide
  Target: LAMA2; (-) strand; PAM type: YTN; PAM sequence: TTT
acaattggataagttttgaa

SEQ ID NO: 281599 - DNA, 20 bp, Artificial Sequence
  Description of Artificial Sequence: Synthetic oligonucleotide
  Target: LAMA2; (-) strand; PAM type: YTN; PAM sequence: CTG
gcataaataaaccatgcaaa

SEQ ID NO: 281600 - DNA, 20 bp, Artificial Sequence
  Description of Artificial Sequence: Synthetic oligonucleotide
  Target: LAMA2; (-) strand; PAM type: YTN; PAM sequence: TTA
aaactggcataaataaacca

SEQ ID NO: 281601 - DNA, 20 bp, Artificial Sequence
  Description of Artificial Sequence: Synthetic oligonucleotide
  Target: LAMA2; (-) strand; PAM type: YTN; PAM sequence: TTG
agttaaaactggcataaata

SEQ ID NO: 281602 - DNA, 20 bp, Artificial Sequence
  Description of Artificial Sequence: Synthetic oligonucleotide
  Target: LAMA2; (-) strand; PAM type: YTN; PAM sequence: TTA
ttgagttaaaactggcataa

SEQ ID NO: 281603 - DNA, 20 bp, Artificial Sequence
  Description of Artificial Sequence: Synthetic oligonucleotide
  Target: LAMA2; (-) strand; PAM type: YTN; PAM sequence: TTT
attgagttaaaactggcata

SEQ ID NO: 281604 - DNA, 20 bp, Artificial Sequence
  Description of Artificial Sequence: Synthetic oligonucleotide
  Target: LAMA2; (-) strand; PAM type: YTN; PAM sequence: TTT
tattgagttaaaactggcat

SEQ ID NO: 281605 - DNA, 20 bp, Artificial Sequence
  Description of Artificial Sequence: Synthetic oligonucleotide
  Target: LAMA2; (-) strand; PAM type: YTN; PAM sequence: CTT
ttattgagttaaaactggca

SEQ ID NO: 281606 - DNA, 20 bp, Artificial Sequence
  Description of Artificial Sequence: Synthetic oligonucleotide
  Target: LAMA2; (-) strand; PAM type: YTN; PAM sequence: TTA
atacttttattgagttaaaa

SEQ ID NO: 281607 - DNA, 20 bp, Artificial Sequence
  Description of Artificial Sequence: Synthetic oligonucleotide
  Target: LAMA2; (-) strand; PAM type: YTN; PAM sequence: TTT
aatacttttattgagttaaa

SEQ ID NO: 281608 - DNA, 20 bp, Artificial Sequence
  Description of Artificial Sequence: Synthetic oligonucleotide
  Target: LAMA2; (-) strand; PAM type: YTN; PAM sequence: CTG
tttaatacttttattgagtt

SEQ ID NO: 281609 - DNA, 20 bp, Artificial Sequence
  Description of Artificial Sequence: Synthetic oligonucleotide
  Target: LAMA2; (-) strand; PAM type: YTN; PAM sequence: CTA
atactgtttaatacttttat

SEQ ID NO: 281610 - DNA, 20 bp, Artificial Sequence
  Description of Artificial Sequence: Synthetic oligonucleotide
  Target: LAMA2; (-) strand; PAM type: YTN; PAM sequence: CTA
tgaccagagatgactaatac

SEQ ID NO: 281611 - DNA, 20 bp, Artificial Sequence
  Description of Artificial Sequence: Synthetic oligonucleotide
  Target: LAMA2; (-) strand; PAM type: YTN; PAM sequence: TTG
tggagggactatgaccagag

SEQ ID NO: 281612 - DNA, 20 bp, Artificial Sequence
  Description of Artificial Sequence: Synthetic oligonucleotide
  Target: LAMA2; (-) strand; PAM type: YTN; PAM sequence: TTG
tggaaattgtggagggacta

SEQ ID NO: 281613 - DNA, 20 bp, Artificial Sequence
  Description of Artificial Sequence: Synthetic oligonucleotide
  Target: LAMA2; (-) strand; PAM type: YTN; PAM sequence: CTA
agttgtggaaattgtggagg

SEQ ID NO: 281614 - DNA, 20 bp, Artificial Sequence
  Description of Artificial Sequence: Synthetic oligonucleotide
  Target: LAMA2; (-) strand; PAM type: YTN; PAM sequence: CTA
aaatctaagttgtggaaatt

SEQ ID NO: 281615 - DNA, 20 bp, Artificial Sequence
  Description of Artificial Sequence: Synthetic oligonucleotide
  Target: LAMA2; (-) strand; PAM type: YTN; PAM sequence: TTG
gtaagagagaaaagaggaag

SEQ ID NO: 281616 - DNA, 20 bp, Artificial Sequence
  Description of Artificial Sequence: Synthetic oligonucleotide
  Target: LAMA2; (-) strand; PAM type: YTN; PAM sequence: TTA
aaaaagaaaataaatggaat

SEQ ID NO: 281617 - DNA, 20 bp, Artificial Sequence
  Description of Artificial Sequence: Synthetic oligonucleotide
  Target: LAMA2; (-) strand; PAM type: YTN; PAM sequence: TTT
aaaaaagaaaataaatggaa

SEQ ID NO: 281618 - DNA, 20 bp, Artificial Sequence
  Description of Artificial Sequence: Synthetic oligonucleotide
  Target: LAMA2; (-) strand; PAM type: YTN; PAM sequence: TTA
aaaaaaagtaaaaagaattt

SEQ ID NO: 281619 - DNA, 20 bp, Artificial Sequence
  Description of Artificial Sequence: Synthetic oligonucleotide
  Target: LAMA2; (-) strand; PAM type: YTN; PAM sequence: TTC
aaaaattaaaaaaaagtaaa

SEQ ID NO: 281620 - DNA, 20 bp, Artificial Sequence
  Description of Artificial Sequence: Synthetic oligonucleotide
  Target: LAMA2; (-) strand; PAM type: YTN; PAM sequence: TTT
caaaaattaaaaaaaagtaa

SEQ ID NO: 281621 - DNA, 20 bp, Artificial Sequence
  Description of Artificial Sequence: Synthetic oligonucleotide
  Target: LAMA2; (-) strand; PAM type: YTN; PAM sequence: CTA
aaatacaagtttcaaaaatt

SEQ ID NO: 281622 - DNA, 20 bp, Artificial Sequence
  Description of Artificial Sequence: Synthetic oligonucleotide
  Target: LAMA2; (-) strand; PAM type: YTN; PAM sequence: TTG
aacctaaaatacaagtttca

SEQ ID NO: 281623 - DNA, 20 bp, Artificial Sequence
  Description of Artificial Sequence: Synthetic oligonucleotide
  Target: LAMA2; (-) strand; PAM type: YTN; PAM sequence: TTT
gaacctaaaatacaagtttc

SEQ ID NO: 281624 - DNA, 20 bp, Artificial Sequence
  Description of Artificial Sequence: Synthetic oligonucleotide
  Target: LAMA2; (-) strand; PAM type: YTN; PAM sequence: CTT
tgaacctaaaatacaagttt

SEQ ID NO: 281625 - DNA, 20 bp, Artificial Sequence
  Description of Artificial Sequence: Synthetic oligonucleotide
  Target: LAMA2; (-) strand; PAM type: YTN; PAM sequence: CTG
cacatgtacctttgaaccta

SEQ ID NO: 281626 - DNA, 20 bp, Artificial Sequence
  Description of Artificial Sequence: Synthetic oligonucleotide
  Target: LAMA2; (-) strand; PAM type: YTN; PAM sequence: CTA
tataaaaaacctgcacatgt

SEQ ID NO: 281627 - DNA, 20 bp, Artificial Sequence
  Description of Artificial Sequence: Synthetic oligonucleotide
  Target: LAMA2; (-) strand; PAM type: YTN; PAM sequence: TTA
cctatataaaaaacctgcac

SEQ ID NO: 281628 - DNA, 20 bp, Artificial Sequence
  Description of Artificial Sequence: Synthetic oligonucleotide
  Target: LAMA2; (-) strand; PAM type: YTN; PAM sequence: TTT
acctatataaaaaacctgca

SEQ ID NO: 281629 - DNA, 20 bp, Artificial Sequence
  Description of Artificial Sequence: Synthetic oligonucleotide
  Target: LAMA2; (-) strand; PAM type: YTN; PAM sequence: CTC
catgacaagagtttacctat

SEQ ID NO: 281630 - DNA, 20 bp, Artificial Sequence
  Description of Artificial Sequence: Synthetic oligonucleotide
  Target: LAMA2; (-) strand; PAM type: YTN; PAM sequence: CTA
tacaacaaacctccatgaca

SEQ ID NO: 281631 - DNA, 20 bp, Artificial Sequence
  Description of Artificial Sequence: Synthetic oligonucleotide
  Target: LAMA2; (-) strand; PAM type: YTN; PAM sequence: CTG
cgtgatgaaatctatacaac

SEQ ID NO: 281632 - DNA, 20 bp, Artificial Sequence
  Description of Artificial Sequence: Synthetic oligonucleotide
  Target: LAMA2; (-) strand; PAM type: YTN; PAM sequence: TTC
ctgcgtgatgaaatctatac

SEQ ID NO: 281633 - DNA, 20 bp, Artificial Sequence
  Description of Artificial Sequence: Synthetic oligonucleotide
  Target: LAMA2; (-) strand; PAM type: YTN; PAM sequence: TTA
gttcctgcgtgatgaaatct

SEQ ID NO: 281634 - DNA, 20 bp, Artificial Sequence
  Description of Artificial Sequence: Synthetic oligonucleotide
  Target: LAMA2; (-) strand; PAM type: YTN; PAM sequence: CTT
agttcctgcgtgatgaaatc

SEQ ID NO: 281635 - DNA, 20 bp, Artificial Sequence
  Description of Artificial Sequence: Synthetic oligonucleotide
  Target: LAMA2; (-) strand; PAM type: YTN; PAM sequence: TTG
ggtagtagacttagttcctg

SEQ ID NO: 281636 - DNA, 20 bp, Artificial Sequence
  Description of Artificial Sequence: Synthetic oligonucleotide
  Target: LAMA2; (-) strand; PAM type: YTN; PAM sequence: CTA
ttgggtagtagacttagttc

SEQ ID NO: 281637 - DNA, 20 bp, Artificial Sequence
  Description of Artificial Sequence: Synthetic oligonucleotide
  Target: LAMA2; (-) strand; PAM type: YTN; PAM sequence: CTA
gtgggaggagggagagaaac

SEQ ID NO: 281638 - DNA, 20 bp, Artificial Sequence
  Description of Artificial Sequence: Synthetic oligonucleotide
  Target: LAMA2; (-) strand; PAM type: YTN; PAM sequence: TTG
agggtagctagtgggaggag

SEQ ID NO: 281639 - DNA, 20 bp, Artificial Sequence
  Description of Artificial Sequence: Synthetic oligonucleotide
  Target: LAMA2; (-) strand; PAM type: YTN; PAM sequence: CTT
gagggtagctagtgggagga

SEQ ID NO: 281640 - DNA, 20 bp, Artificial Sequence
  Description of Artificial Sequence: Synthetic oligonucleotide
  Target: LAMA2; (-) strand; PAM type: YTN; PAM sequence: CTA
cttgagggtagctagtggga

SEQ ID NO: 281641 - DNA, 20 bp, Artificial Sequence
  Description of Artificial Sequence: Synthetic oligonucleotide
  Target: LAMA2; (-) strand; PAM type: YTN; PAM sequence: CTA
aatgatgagaacatatggac

SEQ ID NO: 281642 - DNA, 20 bp, Artificial Sequence
  Description of Artificial Sequence: Synthetic oligonucleotide
  Target: LAMA2; (-) strand; PAM type: YTN; PAM sequence: TTA
taagtgggagctaaatgatg

SEQ ID NO: 281643 - DNA, 20 bp, Artificial Sequence
  Description of Artificial Sequence: Synthetic oligonucleotide
  Target: LAMA2; (-) strand; PAM type: YTN; PAM sequence: TTT
ataagtgggagctaaatgat

SEQ ID NO: 281644 - DNA, 20 bp, Artificial Sequence
  Description of Artificial Sequence: Synthetic oligonucleotide
  Target: LAMA2; (-) strand; PAM type: YTN; PAM sequence: CTC
atttataagtgggagctaaa

SEQ ID NO: 281645 - DNA, 20 bp, Artificial Sequence
  Description of Artificial Sequence: Synthetic oligonucleotide
  Target: LAMA2; (-) strand; PAM type: YTN; PAM sequence: TTC
tcatttataagtgggagcta

SEQ ID NO: 281646 - DNA, 20 bp, Artificial Sequence
  Description of Artificial Sequence: Synthetic oligonucleotide
  Target: LAMA2; (-) strand; PAM type: YTN; PAM sequence: CTA
atgcaggaacagaaaatcaa

SEQ ID NO: 281647 - DNA, 20 bp, Artificial Sequence
  Description of Artificial Sequence: Synthetic oligonucleotide
  Target: LAMA2; (-) strand; PAM type: YTN; PAM sequence: TTA
gcaaactaatgcaggaacag

SEQ ID NO: 281648 - DNA, 20 bp, Artificial Sequence
  Description of Artificial Sequence: Synthetic oligonucleotide
  Target: LAMA2; (-) strand; PAM type: YTN; PAM sequence: CTT
agcaaactaatgcaggaaca

SEQ ID NO: 281649 - DNA, 20 bp, Artificial Sequence
  Description of Artificial Sequence: Synthetic oligonucleotide
  Target: LAMA2; (-) strand; PAM type: YTN; PAM sequence: TTC
ttagcaaactaatgcaggaa

SEQ ID NO: 281650 - DNA, 20 bp, Artificial Sequence
  Description of Artificial Sequence: Synthetic oligonucleotide
  Target: LAMA2; (-) strand; PAM type: YTN; PAM sequence: TTA
ttcttagcaaactaatgcag

SEQ ID NO: 281651 - DNA, 20 bp, Artificial Sequence
  Description of Artificial Sequence: Synthetic oligonucleotide
  Target: LAMA2; (-) strand; PAM type: YTN; PAM sequence: TTG
gaggccattattcttagcaa

SEQ ID NO: 281652 - DNA, 20 bp, Artificial Sequence
  Description of Artificial Sequence: Synthetic oligonucleotide
  Target: LAMA2; (-) strand; PAM type: YTN; PAM sequence: TTG
caggaacatggatggagttg

SEQ ID NO: 281653 - DNA, 20 bp, Artificial Sequence
  Description of Artificial Sequence: Synthetic oligonucleotide
  Target: LAMA2; (-) strand; PAM type: YTN; PAM sequence: TTT
gcaggaacatggatggagtt

SEQ ID NO: 281654 - DNA, 20 bp, Artificial Sequence
  Description of Artificial Sequence: Synthetic oligonucleotide
  Target: LAMA2; (-) strand; PAM type: YTN; PAM sequence: CTT
tgcaggaacatggatggagt

SEQ ID NO: 281655 - DNA, 20 bp, Artificial Sequence
  Description of Artificial Sequence: Synthetic oligonucleotide
  Target: LAMA2; (-) strand; PAM type: YTN; PAM sequence: CTA
tgcagtcataaaacgaatgc

SEQ ID NO: 281656 - DNA, 20 bp, Artificial Sequence
  Description of Artificial Sequence: Synthetic oligonucleotide
  Target: LAMA2; (-) strand; PAM type: YTN; PAM sequence: CTG
gataaataaaatgtggtaca

SEQ ID NO: 281657 - DNA, 20 bp, Artificial Sequence
  Description of Artificial Sequence: Synthetic oligonucleotide
  Target: LAMA2; (-) strand; PAM type: YTN; PAM sequence: CTG
agcataagaaaataaggaat

SEQ ID NO: 281658 - DNA, 20 bp, Artificial Sequence
  Description of Artificial Sequence: Synthetic oligonucleotide
  Target: LAMA2; (-) strand; PAM type: YTN; PAM sequence: TTG
ctgagcataagaaaataagg

SEQ ID NO: 281659 - DNA, 20 bp, Artificial Sequence
  Description of Artificial Sequence: Synthetic oligonucleotide
  Target: LAMA2; (-) strand; PAM type: YTN; PAM sequence: TTT
gctgagcataagaaaataag

SEQ ID NO: 281660 - DNA, 20 bp, Artificial Sequence
  Description of Artificial Sequence: Synthetic oligonucleotide
  Target: LAMA2; (-) strand; PAM type: YTN; PAM sequence: TTG
atttgctgagcataagaaaa

SEQ ID NO: 281661 - DNA, 20 bp, Artificial Sequence
  Description of Artificial Sequence: Synthetic oligonucleotide
  Target: LAMA2; (-) strand; PAM type: YTN; PAM sequence: TTA
aagtggagagaaaaggttga

SEQ ID NO: 281662 - DNA, 20 bp, Artificial Sequence
  Description of Artificial Sequence: Synthetic oligonucleotide
  Target: LAMA2; (-) strand; PAM type: YTN; PAM sequence: TTC
aggtgtgcaaagtgaggcac

SEQ ID NO: 281663 - DNA, 20 bp, Artificial Sequence
  Description of Artificial Sequence: Synthetic oligonucleotide
  Target: LAMA2; (-) strand; PAM type: YTN; PAM sequence: CTT
caggtgtgcaaagtgaggca

SEQ ID NO: 281664 - DNA, 20 bp, Artificial Sequence
  Description of Artificial Sequence: Synthetic oligonucleotide
  Target: LAMA2; (-) strand; PAM type: YTN; PAM sequence: CTA
acttcaggtgtgcaaagtga

SEQ ID NO: 281665 - DNA, 20 bp, Artificial Sequence
  Description of Artificial Sequence: Synthetic oligonucleotide
  Target: LAMA2; (-) strand; PAM type: YTN; PAM sequence: TTA
aagctaacttcaggtgtgca

SEQ ID NO: 281666 - DNA, 20 bp, Artificial Sequence
  Description of Artificial Sequence: Synthetic oligonucleotide
  Target: LAMA2; (-) strand; PAM type: YTN; PAM sequence: TTT
aaagctaacttcaggtgtgc

SEQ ID NO: 281667 - DNA, 20 bp, Artificial Sequence
  Description of Artificial Sequence: Synthetic oligonucleotide
  Target: LAMA2; (-) strand; PAM type: YTN; PAM sequence: TTT
taaagctaacttcaggtgtg

SEQ ID NO: 281668 - DNA, 20 bp, Artificial Sequence
  Description of Artificial Sequence: Synthetic oligonucleotide
  Target: LAMA2; (-) strand; PAM type: YTN; PAM sequence: TTA
aaagtcataattttaaagct

SEQ ID NO: 281669 - DNA, 20 bp, Artificial Sequence
  Description of Artificial Sequence: Synthetic oligonucleotide
  Target: LAMA2; (-) strand; PAM type: YTN; PAM sequence: TTT
aaaagtcataattttaaagc

SEQ ID NO: 281670 - DNA, 20 bp, Artificial Sequence
  Description of Artificial Sequence: Synthetic oligonucleotide
  Target: LAMA2; (-) strand; PAM type: YTN; PAM sequence: CTG
acaagcatttaaaagtcata

SEQ ID NO: 281671 - DNA, 20 bp, Artificial Sequence
  Description of Artificial Sequence: Synthetic oligonucleotide
  Target: LAMA2; (-) strand; PAM type: YTN; PAM sequence: TTG
taagaatgtaatctgacaag

SEQ ID NO: 281672 - DNA, 20 bp, Artificial Sequence
  Description of Artificial Sequence: Synthetic oligonucleotide
  Target: LAMA2; (-) strand; PAM type: YTN; PAM sequence: TTT
gtaagaatgtaatctgacaa

SEQ ID NO: 281673 - DNA, 20 bp, Artificial Sequence
  Description of Artificial Sequence: Synthetic oligonucleotide
  Target: LAMA2; (-) strand; PAM type: YTN; PAM sequence: TTT
tgtaagaatgtaatctgaca

SEQ ID NO: 281674 - DNA, 20 bp, Artificial Sequence
  Description of Artificial Sequence: Synthetic oligonucleotide
  Target: LAMA2; (-) strand; PAM type: YTN; PAM sequence: TTT
ttgtaagaatgtaatctgac

SEQ ID NO: 281675 - DNA, 20 bp, Artificial Sequence
  Description of Artificial Sequence: Synthetic oligonucleotide
  Target: LAMA2; (-) strand; PAM type: YTN; PAM sequence: CTT
tttgtaagaatgtaatctga

SEQ ID NO: 281676 - DNA, 20 bp, Artificial Sequence
  Description of Artificial Sequence: Synthetic oligonucleotide
  Target: LAMA2; (-) strand; PAM type: YTN; PAM sequence: TTG
gagtgtgaatacctttttgt

SEQ ID NO: 281677 - DNA, 20 bp, Artificial Sequence
  Description of Artificial Sequence: Synthetic oligonucleotide
  Target: LAMA2; (-) strand; PAM type: YTN; PAM sequence: CTT
ggagtgtgaatacctttttg

SEQ ID NO: 281678 - DNA, 20 bp, Artificial Sequence
  Description of Artificial Sequence: Synthetic oligonucleotide
  Target: LAMA2; (-) strand; PAM type: YTN; PAM sequence: TTC
cccagtgccttggagtgtga

SEQ ID NO: 281679 - DNA, 20 bp, Artificial Sequence
  Description of Artificial Sequence: Synthetic oligonucleotide
  Target: LAMA2; (-) strand; PAM type: YTN; PAM sequence: TTT
ccccagtgccttggagtgtg

SEQ ID NO: 281680 - DNA, 20 bp, Artificial Sequence
  Description of Artificial Sequence: Synthetic oligonucleotide
  Target: LAMA2; (-) strand; PAM type: YTN; PAM sequence: CTT
tccccagtgccttggagtgt

SEQ ID NO: 281681 - DNA, 20 bp, Artificial Sequence
  Description of Artificial Sequence: Synthetic oligonucleotide
  Target: LAMA2; (-) strand; PAM type: YTN; PAM sequence: CTA
gacaaaaaaagaaaacagct

SEQ ID NO: 281682 - DNA, 20 bp, Artificial Sequence
  Description of Artificial Sequence: Synthetic oligonucleotide
  Target: LAMA2; (-) strand; PAM type: YTN; PAM sequence: CTA
gatgaaactagacaaaaaaa

SEQ ID NO: 281683 - DNA, 20 bp, Artificial Sequence
  Description of Artificial Sequence: Synthetic oligonucleotide
  Target: LAMA2; (-) strand; PAM type: YTN; PAM sequence: TTA
tagtactagatgaaactaga

SEQ ID NO: 281684 - DNA, 20 bp, Artificial Sequence
  Description of Artificial Sequence: Synthetic oligonucleotide
  Target: LAMA2; (-) strand; PAM type: YTN; PAM sequence: TTT
atagtactagatgaaactag

SEQ ID NO: 281685 - DNA, 20 bp, Artificial Sequence
  Description of Artificial Sequence: Synthetic oligonucleotide
  Target: LAMA2; (-) strand; PAM type: YTN; PAM sequence: TTG
tcaagataatataggccatt

SEQ ID NO: 281686 - DNA, 20 bp, Artificial Sequence
  Description of Artificial Sequence: Synthetic oligonucleotide
  Target: LAMA2; (-) strand; PAM type: YTN; PAM sequence: CTG
aattgtcaagataatatagg

SEQ ID NO: 281687 - DNA, 20 bp, Artificial Sequence
  Description of Artificial Sequence: Synthetic oligonucleotide
  Target: LAMA2; (-) strand; PAM type: YTN; PAM sequence: TTG
tggtaaaataaccaaggatg

SEQ ID NO: 281688 - DNA, 20 bp, Artificial Sequence
  Description of Artificial Sequence: Synthetic oligonucleotide
  Target: LAMA2; (-) strand; PAM type: YTN; PAM sequence: TTA
ttgtggtaaaataaccaagg

SEQ ID NO: 281689 - DNA, 20 bp, Artificial Sequence
  Description of Artificial Sequence: Synthetic oligonucleotide
  Target: LAMA2; (-) strand; PAM type: YTN; PAM sequence: CTT
attgtggtaaaataaccaag

SEQ ID NO: 281690 - DNA, 20 bp, Artificial Sequence
  Description of Artificial Sequence: Synthetic oligonucleotide
  Target: LAMA2; (-) strand; PAM type: YTN; PAM sequence: CTC
agtagatgccaaccttattg

SEQ ID NO: 281691 - DNA, 20 bp, Artificial Sequence
  Description of Artificial Sequence: Synthetic oligonucleotide
  Target: LAMA2; (-) strand; PAM type: YTN; PAM sequence: TTG
gaaagggataaaatgtatag

SEQ ID NO: 281692 - DNA, 20 bp, Artificial Sequence
  Description of Artificial Sequence: Synthetic oligonucleotide
  Target: LAMA2; (-) strand; PAM type: YTN; PAM sequence: TTT
ggaaagggataaaatgtata

SEQ ID NO: 281693 - DNA, 20 bp, Artificial Sequence
  Description of Artificial Sequence: Synthetic oligonucleotide
  Target: LAMA2; (-) strand; PAM type: YTN; PAM sequence: CTG
agtcaatttggaaagggata

SEQ ID NO: 281694 - DNA, 20 bp, Artificial Sequence
  Description of Artificial Sequence: Synthetic oligonucleotide
  Target: LAMA2; (-) strand; PAM type: YTN; PAM sequence: CTC
aggagtctgagtcaatttgg

SEQ ID NO: 281695 - DNA, 20 bp, Artificial Sequence
  Description of Artificial Sequence: Synthetic oligonucleotide
  Target: LAMA2; (-) strand; PAM type: YTN; PAM sequence: TTG
aagctcaggagtctgagtca

SEQ ID NO: 281696 - DNA, 20 bp, Artificial Sequence
  Description of Artificial Sequence: Synthetic oligonucleotide
  Target: LAMA2; (-) strand; PAM type: YTN; PAM sequence: TTT
gaagctcaggagtctgagtc

SEQ ID NO: 281697 - DNA, 20 bp, Artificial Sequence
  Description of Artificial Sequence: Synthetic oligonucleotide
  Target: LAMA2; (-) strand; PAM type: YTN; PAM sequence: TTT
tgaagctcaggagtctgagt

SEQ ID NO: 281698 - DNA, 20 bp, Artificial Sequence
  Description of Artificial Sequence: Synthetic oligonucleotide
  Target: LAMA2; (-) strand; PAM type: YTN; PAM sequence: TTT
ttgaagctcaggagtctgag

SEQ ID NO: 281699 - DNA, 20 bp, Artificial Sequence
  Description of Artificial Sequence: Synthetic oligonucleotide
  Target: LAMA2; (-) strand; PAM type: YTN; PAM sequence: CTA
aaaagtggagagaggaattt

SEQ ID NO: 281700 - DNA, 20 bp, Artificial Sequence
  Description of Artificial Sequence: Synthetic oligonucleotide
  Target: LAMA2; (-) strand; PAM type: YTN; PAM sequence: CTC
taaaaagtggagagaggaat

SEQ ID NO: 281701 - DNA, 20 bp, Artificial Sequence
  Description of Artificial Sequence: Synthetic oligonucleotide
  Target: LAMA2; (-) strand; PAM type: YTN; PAM sequence: CTG
tccgacaatgagcaaagaga

SEQ ID NO: 281702 - DNA, 20 bp, Artificial Sequence
  Description of Artificial Sequence: Synthetic oligonucleotide
  Target: LAMA2; (-) strand; PAM type: YTN; PAM sequence: CTG
acaatctgtccgacaatgag

SEQ ID NO: 281703 - DNA, 20 bp, Artificial Sequence
  Description of Artificial Sequence: Synthetic oligonucleotide
  Target: LAMA2; (-) strand; PAM type: YTN; PAM sequence: CTA
aacaaacacatgaaaacagc

SEQ ID NO: 281704 - DNA, 20 bp, Artificial Sequence
  Description of Artificial Sequence: Synthetic oligonucleotide
  Target: LAMA2; (-) strand; PAM type: YTN; PAM sequence: CTC
taaacaaacacatgaaaaca

SEQ ID NO: 281705 - DNA, 20 bp, Artificial Sequence
  Description of Artificial Sequence: Synthetic oligonucleotide
  Target: LAMA2; (-) strand; PAM type: YTN; PAM sequence: TTC
tctaaacaaacacatgaaaa

SEQ ID NO: 281706 - DNA, 20 bp, Artificial Sequence
  Description of Artificial Sequence: Synthetic oligonucleotide
  Target: LAMA2; (-) strand; PAM type: YTN; PAM sequence: TTA
caatgaaagaatgtgtgaag

SEQ ID NO: 281707 - DNA, 20 bp, Artificial Sequence
  Description of Artificial Sequence: Synthetic oligonucleotide
  Target: LAMA2; (-) strand; PAM type: YTN; PAM sequence: TTA
gagacaggaaattacaatga

SEQ ID NO: 281708 - DNA, 20 bp, Artificial Sequence
  Description of Artificial Sequence: Synthetic oligonucleotide
  Target: LAMA2; (-) strand; PAM type: YTN; PAM sequence: TTT
agagacaggaaattacaatg

SEQ ID NO: 281709 - DNA, 20 bp, Artificial Sequence
  Description of Artificial Sequence: Synthetic oligonucleotide
  Target: LAMA2; (-) strand; PAM type: YTN; PAM sequence: CTG
aatcaaaacaatttagagac

SEQ ID NO: 281710 - DNA, 20 bp, Artificial Sequence
  Description of Artificial Sequence: Synthetic oligonucleotide
  Target: LAMA2; (-) strand; PAM type: YTN; PAM sequence: TTC
tgaatcaaaacaatttagag

SEQ ID NO: 281711 - DNA, 20 bp, Artificial Sequence
  Description of Artificial Sequence: Synthetic oligonucleotide
  Target: LAMA2; (-) strand; PAM type: YTN; PAM sequence: TTT
ctgaatcaaaacaatttaga

SEQ ID NO: 281712 - DNA, 20 bp, Artificial Sequence
  Description of Artificial Sequence: Synthetic oligonucleotide
  Target: LAMA2; (-) strand; PAM type: YTN; PAM sequence: TTT
tctgaatcaaaacaatttag

SEQ ID NO: 281713 - DNA, 20 bp, Artificial Sequence
  Description of Artificial Sequence: Synthetic oligonucleotide
  Target: LAMA2; (-) strand; PAM type: YTN; PAM sequence: TTA
taggttttctgaatcaaaac

SEQ ID NO: 281714 - DNA, 20 bp, Artificial Sequence
  Description of Artificial Sequence: Synthetic oligonucleotide
  Target: LAMA2; (-) strand; PAM type: YTN; PAM sequence: TTG
gttataggttttctgaatca

SEQ ID NO: 281715 - DNA, 20 bp, Artificial Sequence
  Description of Artificial Sequence: Synthetic oligonucleotide
  Target: LAMA2; (-) strand; PAM type: YTN; PAM sequence: CTT
ggttataggttttctgaatc

SEQ ID NO: 281716 - DNA, 20 bp, Artificial Sequence
  Description of Artificial Sequence: Synthetic oligonucleotide
  Target: LAMA2; (-) strand; PAM type: YTN; PAM sequence: CTC
ccttggttataggttttctg

SEQ ID NO: 281717 - DNA, 20 bp, Artificial Sequence
  Description of Artificial Sequence: Synthetic oligonucleotide
  Target: LAMA2; (-) strand; PAM type: YTN; PAM sequence: TTA
ctcccttggttataggtttt

SEQ ID NO: 281718 - DNA, 20 bp, Artificial Sequence
  Description of Artificial Sequence: Synthetic oligonucleotide
  Target: LAMA2; (-) strand; PAM type: YTN; PAM sequence: TTT
actcccttggttataggttt

SEQ ID NO: 281719 - DNA, 20 bp, Artificial Sequence
  Description of Artificial Sequence: Synthetic oligonucleotide
  Target: LAMA2; (-) strand; PAM type: YTN; PAM sequence: TTT
tactcccttggttataggtt

SEQ ID NO: 281720 - DNA, 20 bp, Artificial Sequence
  Description of Artificial Sequence: Synthetic oligonucleotide
  Target: LAMA2; (-) strand; PAM type: YTN; PAM sequence: TTT
ttactcccttggttataggt

SEQ ID NO: 281721 - DNA, 20 bp, Artificial Sequence
  Description of Artificial Sequence: Synthetic oligonucleotide
  Target: LAMA2; (-) strand; PAM type: YTN; PAM sequence: TTA
cacgtcatttttactccctt

SEQ ID NO: 281722 - DNA, 20 bp, Artificial Sequence
  Description of Artificial Sequence: Synthetic oligonucleotide
  Target: LAMA2; (-) strand; PAM type: YTN; PAM sequence: TTT
acacgtcatttttactccct

SEQ ID NO: 281723 - DNA, 20 bp, Artificial Sequence
  Description of Artificial Sequence: Synthetic oligonucleotide
  Target: LAMA2; (-) strand; PAM type: YTN; PAM sequence: TTC
caaatttacacgtcattttt

SEQ ID NO: 281724 - DNA, 20 bp, Artificial Sequence
  Description of Artificial Sequence: Synthetic oligonucleotide
  Target: LAMA2; (-) strand; PAM type: YTN; PAM sequence: TTG
ttccaaatttacacgtcatt

SEQ ID NO: 281725 - DNA, 20 bp, Artificial Sequence
  Description of Artificial Sequence: Synthetic oligonucleotide
  Target: LAMA2; (-) strand; PAM type: YTN; PAM sequence: TTT
gttccaaatttacacgtcat

SEQ ID NO: 281726 - DNA, 20 bp, Artificial Sequence
  Description of Artificial Sequence: Synthetic oligonucleotide
  Target: LAMA2; (-) strand; PAM type: YTN; PAM sequence: CTA
tatttgttccaaatttacac

SEQ ID NO: 281727 - DNA, 20 bp, Artificial Sequence
  Description of Artificial Sequence: Synthetic oligonucleotide
  Target: LAMA2; (-) strand; PAM type: YTN; PAM sequence: TTC
tatatttgttccaaatttac

SEQ ID NO: 281728 - DNA, 20 bp, Artificial Sequence
  Description of Artificial Sequence: Synthetic oligonucleotide
  Target: LAMA2; (-) strand; PAM type: YTN; PAM sequence: CTC
agattctatatttgttccaa

SEQ ID NO: 281729 - DNA, 20 bp, Artificial Sequence
  Description of Artificial Sequence: Synthetic oligonucleotide
  Target: LAMA2; (-) strand; PAM type: YTN; PAM sequence: TTA
cccactcagattctatattt

SEQ ID NO: 281730 - DNA, 20 bp, Artificial Sequence
  Description of Artificial Sequence: Synthetic oligonucleotide
  Target: LAMA2; (-) strand; PAM type: YTN; PAM sequence: CTC
aggttacccactcagattct

SEQ ID NO: 281731 - DNA, 20 bp, Artificial Sequence
  Description of Artificial Sequence: Synthetic oligonucleotide
  Target: LAMA2; (-) strand; PAM type: YTN; PAM sequence: CTC
acgaagtaagcctcaggtta

SEQ ID NO: 281732 - DNA, 20 bp, Artificial Sequence
  Description of Artificial Sequence: Synthetic oligonucleotide
  Target: LAMA2; (-) strand; PAM type: YTN; PAM sequence: TTA
actcacgaagtaagcctcag

SEQ ID NO: 281733 - DNA, 20 bp, Artificial Sequence
  Description of Artificial Sequence: Synthetic oligonucleotide
  Target: LAMA2; (-) strand; PAM type: YTN; PAM sequence: TTT
aactcacgaagtaagcctca

SEQ ID NO: 281734 - DNA, 20 bp, Artificial Sequence
  Description of Artificial Sequence: Synthetic oligonucleotide
  Target: LAMA2; (-) strand; PAM type: YTN; PAM sequence: CTT
taactcacgaagtaagcctc

SEQ ID NO: 281735 - DNA, 20 bp, Artificial Sequence
  Description of Artificial Sequence: Synthetic oligonucleotide
  Target: LAMA2; (-) strand; PAM type: YTN; PAM sequence: TTA
atgacacagatgcaatgtac

SEQ ID NO: 281736 - DNA, 20 bp, Artificial Sequence
  Description of Artificial Sequence: Synthetic oligonucleotide
  Target: LAMA2; (-) strand; PAM type: YTN; PAM sequence: TTG
gaaaaaaaaaaaagagtgtc

SEQ ID NO: 281737 - DNA, 20 bp, Artificial Sequence
  Description of Artificial Sequence: Synthetic oligonucleotide
  Target: LAMA2; (-) strand; PAM type: YTN; PAM sequence: CTT
ggaaaaaaaaaaaagagtgt

SEQ ID NO: 281738 - DNA, 20 bp, Artificial Sequence
  Description of Artificial Sequence: Synthetic oligonucleotide
  Target: LAMA2; (-) strand; PAM type: YTN; PAM sequence: TTC
atcttggaaaaaaaaaaaag

SEQ ID NO: 281739 - DNA, 20 bp, Artificial Sequence
  Description of Artificial Sequence: Synthetic oligonucleotide
  Target: LAMA2; (-) strand; PAM type: YTN; PAM sequence: TTA
gatacagtaacatcacataa

SEQ ID NO: 281740 - DNA, 20 bp, Artificial Sequence
  Description of Artificial Sequence: Synthetic oligonucleotide
  Target: LAMA2; (-) strand; PAM type: YTN; PAM sequence: TTG
ggaattagatacagtaacat

SEQ ID NO: 281741 - DNA, 20 bp, Artificial Sequence
  Description of Artificial Sequence: Synthetic oligonucleotide
  Target: LAMA2; (-) strand; PAM type: YTN; PAM sequence: CTT
gggaattagatacagtaaca

SEQ ID NO: 281742 - DNA, 20 bp, Artificial Sequence
  Description of Artificial Sequence: Synthetic oligonucleotide
  Target: LAMA2; (-) strand; PAM type: YTN; PAM sequence: CTC
ttgggaattagatacagtaa

SEQ ID NO: 281743 - DNA, 20 bp, Artificial Sequence
  Description of Artificial Sequence: Synthetic oligonucleotide
  Target: LAMA2; (-) strand; PAM type: YTN; PAM sequence: TTC
tcttgggaattagatacagt

SEQ ID NO: 281744 - DNA, 20 bp, Artificial Sequence
  Description of Artificial Sequence: Synthetic oligonucleotide
  Target: LAMA2; (-) strand; PAM type: YTN; PAM sequence: CTA
cagttctcttgggaattaga

SEQ ID NO: 281745 - DNA, 20 bp, Artificial Sequence
  Description of Artificial Sequence: Synthetic oligonucleotide
  Target: LAMA2; (-) strand; PAM type: YTN; PAM sequence: TTG
ctacagttctcttgggaatt

SEQ ID NO: 281746 - DNA, 20 bp, Artificial Sequence
  Description of Artificial Sequence: Synthetic oligonucleotide
  Target: LAMA2; (-) strand; PAM type: YTN; PAM sequence: CTC
attgctacagttctcttggg

SEQ ID NO: 281747 - DNA, 20 bp, Artificial Sequence
  Description of Artificial Sequence: Synthetic oligonucleotide
  Target: LAMA2; (-) strand; PAM type: YTN; PAM sequence: TTC
tcattgctacagttctcttg

SEQ ID NO: 281748 - DNA, 20 bp, Artificial Sequence
  Description of Artificial Sequence: Synthetic oligonucleotide
  Target: LAMA2; (-) strand; PAM type: YTN; PAM sequence: CTG
ggaaaaacaggaattctcat

SEQ ID NO: 281749 - DNA, 20 bp, Artificial Sequence
  Description of Artificial Sequence: Synthetic oligonucleotide
  Target: LAMA2; (-) strand; PAM type: YTN; PAM sequence: CTG
ctgggaaaaacaggaattct

SEQ ID NO: 281750 - DNA, 20 bp, Artificial Sequence
  Description of Artificial Sequence: Synthetic oligonucleotide
  Target: LAMA2; (-) strand; PAM type: YTN; PAM sequence: TTC
tgctgggaaaaacaggaatt

SEQ ID NO: 281751 - DNA, 20 bp, Artificial Sequence
  Description of Artificial Sequence: Synthetic oligonucleotide
  Target: LAMA2; (-) strand; PAM type: YTN; PAM sequence: TTT
ctgctgggaaaaacaggaat

SEQ ID NO: 281752 - DNA, 20 bp, Artificial Sequence
  Description of Artificial Sequence: Synthetic oligonucleotide
  Target: LAMA2; (-) strand; PAM type: YTN; PAM sequence: TTT
tctgctgggaaaaacaggaa

SEQ ID NO: 281753 - DNA, 20 bp, Artificial Sequence
  Description of Artificial Sequence: Synthetic oligonucleotide
  Target: LAMA2; (-) strand; PAM type: YTN; PAM sequence: CTG
atgatgttttctgctgggaa

SEQ ID NO: 281754 - DNA, 20 bp, Artificial Sequence
  Description of Artificial Sequence: Synthetic oligonucleotide
  Target: LAMA2; (-) strand; PAM type: YTN; PAM sequence: CTC
cagaaaactgatgatgtttt

SEQ ID NO: 281755 - DNA, 20 bp, Artificial Sequence
  Description of Artificial Sequence: Synthetic oligonucleotide
  Target: LAMA2; (-) strand; PAM type: YTN; PAM sequence: TTC
tccagaaaactgatgatgtt

SEQ ID NO: 281756 - DNA, 20 bp, Artificial Sequence
  Description of Artificial Sequence: Synthetic oligonucleotide
  Target: LAMA2; (-) strand; PAM type: YTN; PAM sequence: TTA
ttctccagaaaactgatgat

SEQ ID NO: 281757 - DNA, 20 bp, Artificial Sequence
  Description of Artificial Sequence: Synthetic oligonucleotide
  Target: LAMA2; (-) strand; PAM type: YTN; PAM sequence: TTG
gcaaattattctccagaaaa

SEQ ID NO: 281758 - DNA, 20 bp, Artificial Sequence
  Description of Artificial Sequence: Synthetic oligonucleotide
  Target: LAMA2; (-) strand; PAM type: YTN; PAM sequence: CTT
ggcaaattattctccagaaa

SEQ ID NO: 281759 - DNA, 20 bp, Artificial Sequence
  Description of Artificial Sequence: Synthetic oligonucleotide
  Target: LAMA2; (-) strand; PAM type: YTN; PAM sequence: TTG
caaaagacaaccttggcaaa

SEQ ID NO: 281760 - DNA, 20 bp, Artificial Sequence
  Description of Artificial Sequence: Synthetic oligonucleotide
  Target: LAMA2; (-) strand; PAM type: YTN; PAM sequence: CTT
gcaaaagacaaccttggcaa

SEQ ID NO: 281761 - DNA, 20 bp, Artificial Sequence
  Description of Artificial Sequence: Synthetic oligonucleotide
  Target: LAMA2; (-) strand; PAM type: YTN; PAM sequence: TTC
ttgcaaaagacaaccttggc

SEQ ID NO: 281762 - DNA, 20 bp, Artificial Sequence
  Description of Artificial Sequence: Synthetic oligonucleotide
  Target: LAMA2; (-) strand; PAM type: YTN; PAM sequence: CTG
aacatagttcttgcaaaaga

SEQ ID NO: 281763 - DNA, 20 bp, Artificial Sequence
  Description of Artificial Sequence: Synthetic oligonucleotide
  Target: LAMA2; (-) strand; PAM type: YTN; PAM sequence: CTA
cataaataaaaaagaacact

SEQ ID NO: 281764 - DNA, 20 bp, Artificial Sequence
  Description of Artificial Sequence: Synthetic oligonucleotide
  Target: LAMA2; (-) strand; PAM type: YTN; PAM sequence: TTG
gaaacatctacataaataaa

SEQ ID NO: 281765 - DNA, 20 bp, Artificial Sequence
  Description of Artificial Sequence: Synthetic oligonucleotide
  Target: LAMA2; (-) strand; PAM type: YTN; PAM sequence: CTA
caaaaagatatattggaaac

SEQ ID NO: 281766 - DNA, 20 bp, Artificial Sequence
  Description of Artificial Sequence: Synthetic oligonucleotide
  Target: LAMA2; (-) strand; PAM type: YTN; PAM sequence: CTA
tcatatctacaaaaagatat

SEQ ID NO: 281767 - DNA, 20 bp, Artificial Sequence
  Description of Artificial Sequence: Synthetic oligonucleotide
  Target: LAMA2; (-) strand; PAM type: YTN; PAM sequence: TTG
tacaatgctatcatatctac

SEQ ID NO: 281768 - DNA, 20 bp, Artificial Sequence
  Description of Artificial Sequence: Synthetic oligonucleotide
  Target: LAMA2; (-) strand; PAM type: YTN; PAM sequence: TTG
attgtacaatgctatcatat

SEQ ID NO: 281769 - DNA, 20 bp, Artificial Sequence
  Description of Artificial Sequence: Synthetic oligonucleotide
  Target: LAMA2; (-) strand; PAM type: YTN; PAM sequence: CTC
atagaacagattgattgtac

SEQ ID NO: 281770 - DNA, 20 bp, Artificial Sequence
  Description of Artificial Sequence: Synthetic oligonucleotide
  Target: LAMA2; (-) strand; PAM type: YTN; PAM sequence: TTG
ctcatagaacagattgattg

SEQ ID NO: 281771 - DNA, 20 bp, Artificial Sequence
  Description of Artificial Sequence: Synthetic oligonucleotide
  Target: LAMA2; (-) strand; PAM type: YTN; PAM sequence: TTG
attgctcatagaacagattg

SEQ ID NO: 281772 - DNA, 20 bp, Artificial Sequence
  Description of Artificial Sequence: Synthetic oligonucleotide
  Target: LAMA2; (-) strand; PAM type: YTN; PAM sequence: TTC
aggtaaataattgattgctc

SEQ ID NO: 281773 - DNA, 20 bp, Artificial Sequence
  Description of Artificial Sequence: Synthetic oligonucleotide
  Target: LAMA2; (-) strand; PAM type: YTN; PAM sequence: TTT
caggtaaataattgattgct

SEQ ID NO: 281774 - DNA, 20 bp, Artificial Sequence
  Description of Artificial Sequence: Synthetic oligonucleotide
  Target: LAMA2; (-) strand; PAM type: YTN; PAM sequence: CTT
tcaggtaaataattgattgc

SEQ ID NO: 281775 - DNA, 20 bp, Artificial Sequence
  Description of Artificial Sequence: Synthetic oligonucleotide
  Target: LAMA2; (-) strand; PAM type: YTN; PAM sequence: CTA
acagctttcaggtaaataat

SEQ ID NO: 281776 - DNA, 20 bp, Artificial Sequence
  Description of Artificial Sequence: Synthetic oligonucleotide
  Target: LAMA2; (-) strand; PAM type: YTN; PAM sequence: TTC
taacagctttcaggtaaata

SEQ ID NO: 281777 - DNA, 20 bp, Artificial Sequence
  Description of Artificial Sequence: Synthetic oligonucleotide
  Target: LAMA2; (-) strand; PAM type: YTN; PAM sequence: TTA
ttctaacagctttcaggtaa

SEQ ID NO: 281778 - DNA, 20 bp, Artificial Sequence
  Description of Artificial Sequence: Synthetic oligonucleotide
  Target: LAMA2; (-) strand; PAM type: YTN; PAM sequence: TTA
atgtattattctaacagctt

SEQ ID NO: 281779 - DNA, 20 bp, Artificial Sequence
  Description of Artificial Sequence: Synthetic oligonucleotide
  Target: LAMA2; (-) strand; PAM type: YTN; PAM sequence: TTT
aatgtattattctaacagct

SEQ ID NO: 281780 - DNA, 20 bp, Artificial Sequence
  Description of Artificial Sequence: Synthetic oligonucleotide
  Target: LAMA2; (-) strand; PAM type: YTN; PAM sequence: TTT
taatgtattattctaacagc

SEQ ID NO: 281781 - DNA, 20 bp, Artificial Sequence
  Description of Artificial Sequence: Synthetic oligonucleotide
  Target: LAMA2; (-) strand; PAM type: YTN; PAM sequence: TTA
ttttaatgtattattctaac

SEQ ID NO: 281782 - DNA, 20 bp, Artificial Sequence
  Description of Artificial Sequence: Synthetic oligonucleotide
  Target: LAMA2; (-) strand; PAM type: YTN; PAM sequence: TTT
attttaatgtattattctaa

SEQ ID NO: 281783 - DNA, 20 bp, Artificial Sequence
  Description of Artificial Sequence: Synthetic oligonucleotide
  Target: LAMA2; (-) strand; PAM type: YTN; PAM sequence: CTG
tggtcaaatttattttaatg

SEQ ID NO: 281784 - DNA, 20 bp, Artificial Sequence
  Description of Artificial Sequence: Synthetic oligonucleotide
  Target: LAMA2; (-) strand; PAM type: YTN; PAM sequence: TTG
gtatggctgtggtcaaattt

SEQ ID NO: 281785 - DNA, 20 bp, Artificial Sequence
  Description of Artificial Sequence: Synthetic oligonucleotide
  Target: LAMA2; (-) strand; PAM type: YTN; PAM sequence: CTT
ggtatggctgtggtcaaatt

SEQ ID NO: 281786 - DNA, 20 bp, Artificial Sequence
  Description of Artificial Sequence: Synthetic oligonucleotide
  Target: LAMA2; (-) strand; PAM type: YTN; PAM sequence: TTA
cagaacttggtatggctgtg

SEQ ID NO: 281787 - DNA, 20 bp, Artificial Sequence
  Description of Artificial Sequence: Synthetic oligonucleotide
  Target: LAMA2; (-) strand; PAM type: YTN; PAM sequence: CTA
gaaaagattacagaacttgg

SEQ ID NO: 281788 - DNA, 20 bp, Artificial Sequence
  Description of Artificial Sequence: Synthetic oligonucleotide
  Target: LAMA2; (-) strand; PAM type: YTN; PAM sequence: TTA
aactagaaaagattacagaa

SEQ ID NO: 281789 - DNA, 20 bp, Artificial Sequence
  Description of Artificial Sequence: Synthetic oligonucleotide
  Target: LAMA2; (-) strand; PAM type: YTN; PAM sequence: TTG
aacattaaactagaaaagat

SEQ ID NO: 281790 - DNA, 20 bp, Artificial Sequence
  Description of Artificial Sequence: Synthetic oligonucleotide
  Target: LAMA2; (-) strand; PAM type: YTN; PAM sequence: TTT
gaacattaaactagaaaaga

SEQ ID NO: 281791 - DNA, 20 bp, Artificial Sequence
  Description of Artificial Sequence: Synthetic oligonucleotide
  Target: LAMA2; (-) strand; PAM type: YTN; PAM sequence: TTA
tttgaacattaaactagaaa

SEQ ID NO: 281792 - DNA, 20 bp, Artificial Sequence
  Description of Artificial Sequence: Synthetic oligonucleotide
  Target: LAMA2; (-) strand; PAM type: YTN; PAM sequence: TTA
tcagtcacattatttgaaca

SEQ ID NO: 281793 - DNA, 20 bp, Artificial Sequence
  Description of Artificial Sequence: Synthetic oligonucleotide
  Target: LAMA2; (-) strand; PAM type: YTN; PAM sequence: TTT
atcagtcacattatttgaac

SEQ ID NO: 281794 - DNA, 20 bp, Artificial Sequence
  Description of Artificial Sequence: Synthetic oligonucleotide
  Target: LAMA2; (-) strand; PAM type: YTN; PAM sequence: TTT
tatcagtcacattatttgaa

SEQ ID NO: 281795 - DNA, 20 bp, Artificial Sequence
  Description of Artificial Sequence: Synthetic oligonucleotide
  Target: LAMA2; (-) strand; PAM type: YTN; PAM sequence: TTT
ttatcagtcacattatttga

SEQ ID NO: 281796 - DNA, 20 bp, Artificial Sequence
  Description of Artificial Sequence: Synthetic oligonucleotide
  Target: LAMA2; (-) strand; PAM type: YTN; PAM sequence: TTA
tttttatcagtcacattatt

SEQ ID NO: 281797 - DNA, 20 bp, Artificial Sequence
  Description of Artificial Sequence: Synthetic oligonucleotide
  Target: LAMA2; (-) strand; PAM type: YTN; PAM sequence: TTA
cattatttttatcagtcaca

SEQ ID NO: 281798 - DNA, 20 bp, Artificial Sequence
  Description of Artificial Sequence: Synthetic oligonucleotide
  Target: LAMA2; (-) strand; PAM type: YTN; PAM sequence: TTA
gttacattatttttatcagt

SEQ ID NO: 281799 - DNA, 20 bp, Artificial Sequence
  Description of Artificial Sequence: Synthetic oligonucleotide
  Target: LAMA2; (-) strand; PAM type: YTN; PAM sequence: CTT
agttacattatttttatcag

SEQ ID NO: 281800 - DNA, 20 bp, Artificial Sequence
  Description of Artificial Sequence: Synthetic oligonucleotide
  Target: LAMA2; (-) strand; PAM type: YTN; PAM sequence: CTG
ccttagttacattattttta

SEQ ID NO: 281801 - DNA, 20 bp, Artificial Sequence
  Description of Artificial Sequence: Synthetic oligonucleotide
  Target: LAMA2; (-) strand; PAM type: YTN; PAM sequence: CTG
gactgccttagttacattat

SEQ ID NO: 281802 - DNA, 20 bp, Artificial Sequence
  Description of Artificial Sequence: Synthetic oligonucleotide
  Target: LAMA2; (-) strand; PAM type: YTN; PAM sequence: TTA
aaggcatctggactgcctta

SEQ ID NO: 281803 - DNA, 20 bp, Artificial Sequence
  Description of Artificial Sequence: Synthetic oligonucleotide
  Target: LAMA2; (-) strand; PAM type: YTN; PAM sequence: CTC
gttaaaggcatctggactgc

SEQ ID NO: 281804 - DNA, 20 bp, Artificial Sequence
  Description of Artificial Sequence: Synthetic oligonucleotide
  Target: LAMA2; (-) strand; PAM type: YTN; PAM sequence: TTA
tcacagacataacactcgtt

SEQ ID NO: 281805 - DNA, 20 bp, Artificial Sequence
  Description of Artificial Sequence: Synthetic oligonucleotide
  Target: LAMA2; (-) strand; PAM type: YTN; PAM sequence: CTC
agattatcacagacataaca

SEQ ID NO: 281806 - DNA, 20 bp, Artificial Sequence
  Description of Artificial Sequence: Synthetic oligonucleotide
  Target: LAMA2; (-) strand; PAM type: YTN; PAM sequence: CTG
aactcagattatcacagaca

SEQ ID NO: 281807 - DNA, 20 bp, Artificial Sequence
  Description of Artificial Sequence: Synthetic oligonucleotide
  Target: LAMA2; (-) strand; PAM type: YTN; PAM sequence: TTG
aagatataaatctgaactca

SEQ ID NO: 281808 - DNA, 20 bp, Artificial Sequence
  Description of Artificial Sequence: Synthetic oligonucleotide
  Target: LAMA2; (-) strand; PAM type: YTN; PAM sequence: CTG
ttgaagatataaatctgaac

SEQ ID NO: 281809 - DNA, 20 bp, Artificial Sequence
  Description of Artificial Sequence: Synthetic oligonucleotide
  Target: LAMA2; (-) strand; PAM type: YTN; PAM sequence: TTA
ctgttgaagatataaatctg

SEQ ID NO: 281810 - DNA, 20 bp, Artificial Sequence
  Description of Artificial Sequence: Synthetic oligonucleotide
  Target: LAMA2; (-) strand; PAM type: YTN; PAM sequence: CTT
actgttgaagatataaatct

SEQ ID NO: 281811 - DNA, 20 bp, Artificial Sequence
  Description of Artificial Sequence: Synthetic oligonucleotide
  Target: LAMA2; (-) strand; PAM type: YTN; PAM sequence: CTA
aatacttactgttgaagata

SEQ ID NO: 281812 - DNA, 20 bp, Artificial Sequence
  Description of Artificial Sequence: Synthetic oligonucleotide
  Target: LAMA2; (-) strand; PAM type: YTN; PAM sequence: TTG
gagagtgctaaatacttact

SEQ ID NO: 281813 - DNA, 20 bp, Artificial Sequence
  Description of Artificial Sequence: Synthetic oligonucleotide
  Target: LAMA2; (-) strand; PAM type: YTN; PAM sequence: TTG
caagtgcaagaagggttgga

SEQ ID NO: 281814 - DNA, 20 bp, Artificial Sequence
  Description of Artificial Sequence: Synthetic oligonucleotide
  Target: LAMA2; (-) strand; PAM type: YTN; PAM sequence: TTG
gaaaagtattgcaagtgcaa

SEQ ID NO: 281815 - DNA, 20 bp, Artificial Sequence
  Description of Artificial Sequence: Synthetic oligonucleotide
  Target: LAMA2; (-) strand; PAM type: YTN; PAM sequence: TTA
aattggaaaagtattgcaag

SEQ ID NO: 281816 - DNA, 20 bp, Artificial Sequence
  Description of Artificial Sequence: Synthetic oligonucleotide
  Target: LAMA2; (-) strand; PAM type: YTN; PAM sequence: TTT
aaattggaaaagtattgcaa

SEQ ID NO: 281817 - DNA, 20 bp, Artificial Sequence
  Description of Artificial Sequence: Synthetic oligonucleotide
  Target: LAMA2; (-) strand; PAM type: YTN; PAM sequence: TTT
taaattggaaaagtattgca

SEQ ID NO: 281818 - DNA, 20 bp, Artificial Sequence
  Description of Artificial Sequence: Synthetic oligonucleotide
  Target: LAMA2; (-) strand; PAM type: YTN; PAM sequence: TTA
tgtgtaaattttaaattgga

SEQ ID NO: 281819 - DNA, 20 bp, Artificial Sequence
  Description of Artificial Sequence: Synthetic oligonucleotide
  Target: LAMA2; (-) strand; PAM type: YTN; PAM sequence: CTT
atgtgtaaattttaaattgg

SEQ ID NO: 281820 - DNA, 20 bp, Artificial Sequence
  Description of Artificial Sequence: Synthetic oligonucleotide
  Target: LAMA2; (-) strand; PAM type: YTN; PAM sequence: TTC
atatataccaagagataaat

SEQ ID NO: 281821 - DNA, 20 bp, Artificial Sequence
  Description of Artificial Sequence: Synthetic oligonucleotide
  Target: LAMA2; (-) strand; PAM type: YTN; PAM sequence: TTA
cataattcatatataccaag

SEQ ID NO: 281822 - DNA, 20 bp, Artificial Sequence
  Description of Artificial Sequence: Synthetic oligonucleotide
  Target: LAMA2; (-) strand; PAM type: YTN; PAM sequence: CTC
agcaatcattacataattca

SEQ ID NO: 281823 - DNA, 20 bp, Artificial Sequence
  Description of Artificial Sequence: Synthetic oligonucleotide
  Target: LAMA2; (-) strand; PAM type: YTN; PAM sequence: CTC
ctcagcaatcattacataat

SEQ ID NO: 281824 - DNA, 20 bp, Artificial Sequence
  Description of Artificial Sequence: Synthetic oligonucleotide
  Target: LAMA2; (-) strand; PAM type: YTN; PAM sequence: TTG
ctcctcagcaatcattacat

SEQ ID NO: 281825 - DNA, 20 bp, Artificial Sequence
  Description of Artificial Sequence: Synthetic oligonucleotide
  Target: LAMA2; (-) strand; PAM type: YTN; PAM sequence: TTT
gctcctcagcaatcattaca

SEQ ID NO: 281826 - DNA, 20 bp, Artificial Sequence
  Description of Artificial Sequence: Synthetic oligonucleotide
  Target: LAMA2; (-) strand; PAM type: YTN; PAM sequence: TTA
atagtgtttgctcctcagca

SEQ ID NO: 281827 - DNA, 20 bp, Artificial Sequence
  Description of Artificial Sequence: Synthetic oligonucleotide
  Target: LAMA2; (-) strand; PAM type: YTN; PAM sequence: TTT
aatagtgtttgctcctcagc

SEQ ID NO: 281828 - DNA, 20 bp, Artificial Sequence
  Description of Artificial Sequence: Synthetic oligonucleotide
  Target: LAMA2; (-) strand; PAM type: YTN; PAM sequence: TTT
taatagtgtttgctcctcag

SEQ ID NO: 281829 - DNA, 20 bp, Artificial Sequence
  Description of Artificial Sequence: Synthetic oligonucleotide
  Target: LAMA2; (-) strand; PAM type: YTN; PAM sequence: TTA
cccattttaatagtgtttgc

SEQ ID NO: 281830 - DNA, 20 bp, Artificial Sequence
  Description of Artificial Sequence: Synthetic oligonucleotide
  Target: LAMA2; (-) strand; PAM type: YTN; PAM sequence: CTA
gttacccattttaatagtgt

SEQ ID NO: 281831 - DNA, 20 bp, Artificial Sequence
  Description of Artificial Sequence: Synthetic oligonucleotide
  Target: LAMA2; (-) strand; PAM type: YTN; PAM sequence: TTG
aatgtctagttacccatttt

SEQ ID NO: 281832 - DNA, 20 bp, Artificial Sequence
  Description of Artificial Sequence: Synthetic oligonucleotide
  Target: LAMA2; (-) strand; PAM type: YTN; PAM sequence: CTT
gaatgtctagttacccattt

SEQ ID NO: 281833 - DNA, 20 bp, Artificial Sequence
  Description of Artificial Sequence: Synthetic oligonucleotide
  Target: LAMA2; (-) strand; PAM type: YTN; PAM sequence: TTA
acttgaatgtctagttaccc

SEQ ID NO: 281834 - DNA, 20 bp, Artificial Sequence
  Description of Artificial Sequence: Synthetic oligonucleotide
  Target: LAMA2; (-) strand; PAM type: YTN; PAM sequence: TTT
aacttgaatgtctagttacc

SEQ ID NO: 281835 - DNA, 20 bp, Artificial Sequence
  Description of Artificial Sequence: Synthetic oligonucleotide
  Target: LAMA2; (-) strand; PAM type: YTN; PAM sequence: TTA
atagaatgatatgggaaaag

SEQ ID NO: 281836 - DNA, 20 bp, Artificial Sequence
  Description of Artificial Sequence: Synthetic oligonucleotide
  Target: LAMA2; (-) strand; PAM type: YTN; PAM sequence: TTA
aaaaaggtgacacaaagtta

SEQ ID NO: 281837 - DNA, 20 bp, Artificial Sequence
  Description of Artificial Sequence: Synthetic oligonucleotide
  Target: LAMA2; (-) strand; PAM type: YTN; PAM sequence: CTC
agattaaaaaaggtgacaca

SEQ ID NO: 281838 - DNA, 20 bp, Artificial Sequence
  Description of Artificial Sequence: Synthetic oligonucleotide
  Target: LAMA2; (-) strand; PAM type: YTN; PAM sequence: TTA
gactcagattaaaaaaggtg

SEQ ID NO: 281839 - DNA, 20 bp, Artificial Sequence
  Description of Artificial Sequence: Synthetic oligonucleotide
  Target: LAMA2; (-) strand; PAM type: YTN; PAM sequence: TTT
agactcagattaaaaaaggt

SEQ ID NO: 281840 - DNA, 20 bp, Artificial Sequence
  Description of Artificial Sequence: Synthetic oligonucleotide
  Target: LAMA2; (-) strand; PAM type: YTN; PAM sequence: TTG
tttagactcagattaaaaaa

SEQ ID NO: 281841 - DNA, 20 bp, Artificial Sequence
  Description of Artificial Sequence: Synthetic oligonucleotide
  Target: LAMA2; (-) strand; PAM type: YTN; PAM sequence: TTT
gtttagactcagattaaaaa

SEQ ID NO: 281842 - DNA, 20 bp, Artificial Sequence
  Description of Artificial Sequence: Synthetic oligonucleotide
  Target: LAMA2; (-) strand; PAM type: YTN; PAM sequence: CTC
caagcaaagatatatttgtt

SEQ ID NO: 281843 - DNA, 20 bp, Artificial Sequence
  Description of Artificial Sequence: Synthetic oligonucleotide
  Target: LAMA2; (-) strand; PAM type: YTN; PAM sequence: TTA
tctccaagcaaagatatatt

SEQ ID NO: 281844 - DNA, 20 bp, Artificial Sequence
  Description of Artificial Sequence: Synthetic oligonucleotide
  Target: LAMA2; (-) strand; PAM type: YTN; PAM sequence: CTG
agccacaattatctccaagc

SEQ ID NO: 281845 - DNA, 20 bp, Artificial Sequence
  Description of Artificial Sequence: Synthetic oligonucleotide
  Target: LAMA2; (-) strand; PAM type: YTN; PAM sequence: CTC
tgagccacaattatctccaa

SEQ ID NO: 281846 - DNA, 20 bp, Artificial Sequence
  Description of Artificial Sequence: Synthetic oligonucleotide
  Target: LAMA2; (-) strand; PAM type: YTN; PAM sequence: CTA
aatgacaatctctgagccac

SEQ ID NO: 281847 - DNA, 20 bp, Artificial Sequence
  Description of Artificial Sequence: Synthetic oligonucleotide
  Target: LAMA2; (-) strand; PAM type: YTN; PAM sequence: TTC
taaatgacaatctctgagcc

SEQ ID NO: 281848 - DNA, 20 bp, Artificial Sequence
  Description of Artificial Sequence: Synthetic oligonucleotide
  Target: LAMA2; (-) strand; PAM type: YTN; PAM sequence: CTT
ctaaatgacaatctctgagc

SEQ ID NO: 281849 - DNA, 20 bp, Artificial Sequence
  Description of Artificial Sequence: Synthetic oligonucleotide
  Target: LAMA2; (-) strand; PAM type: YTN; PAM sequence: TTA
aagcggtatggcaaaacaca

SEQ ID NO: 281850 - DNA, 20 bp, Artificial Sequence
  Description of Artificial Sequence: Synthetic oligonucleotide
  Target: LAMA2; (-) strand; PAM type: YTN; PAM sequence: CTT
aaagcggtatggcaaaacac

SEQ ID NO: 281851 - DNA, 20 bp, Artificial Sequence
  Description of Artificial Sequence: Synthetic oligonucleotide
  Target: LAMA2; (-) strand; PAM type: YTN; PAM sequence: TTA
aaaaatgcatcttaaagcgg

SEQ ID NO: 281852 - DNA, 20 bp, Artificial Sequence
  Description of Artificial Sequence: Synthetic oligonucleotide
  Target: LAMA2; (-) strand; PAM type: YTN; PAM sequence: TTT
aaaaaatgcatcttaaagcg

SEQ ID NO: 281853 - DNA, 20 bp, Artificial Sequence
  Description of Artificial Sequence: Synthetic oligonucleotide
  Target: LAMA2; (-) strand; PAM type: YTN; PAM sequence: TTT
taaaaaatgcatcttaaagc

SEQ ID NO: 281854 - DNA, 20 bp, Artificial Sequence
  Description of Artificial Sequence: Synthetic oligonucleotide
  Target: LAMA2; (-) strand; PAM type: YTN; PAM sequence: CTT
ttaaaaaatgcatcttaaag

SEQ ID NO: 281855 - DNA, 20 bp, Artificial Sequence
  Description of Artificial Sequence: Synthetic oligonucleotide
  Target: LAMA2; (-) strand; PAM type: YTN; PAM sequence: TTC
ttttaaaaaatgcatcttaa

SEQ ID NO: 281856 - DNA, 20 bp, Artificial Sequence
  Description of Artificial Sequence: Synthetic oligonucleotide
  Target: LAMA2; (-) strand; PAM type: YTN; PAM sequence: CTT
cttttaaaaaatgcatctta

SEQ ID NO: 281857 - DNA, 20 bp, Artificial Sequence
  Description of Artificial Sequence: Synthetic oligonucleotide
  Target: LAMA2; (-) strand; PAM type: YTN; PAM sequence: CTG
cttcttttaaaaaatgcatc

SEQ ID NO: 281858 - DNA, 20 bp, Artificial Sequence
  Description of Artificial Sequence: Synthetic oligonucleotide
  Target: LAMA2; (-) strand; PAM type: YTN; PAM sequence: CTG
aaatgagaaagaacactgct

SEQ ID NO: 281859 - DNA, 20 bp, Artificial Sequence
  Description of Artificial Sequence: Synthetic oligonucleotide
  Target: LAMA2; (-) strand; PAM type: YTN; PAM sequence: CTC
ccaagtgctgaaatgagaaa

SEQ ID NO: 281860 - DNA, 20 bp, Artificial Sequence
  Description of Artificial Sequence: Synthetic oligonucleotide
  Target: LAMA2; (-) strand; PAM type: YTN; PAM sequence: CTG
tatctcccaagtgctgaaat

SEQ ID NO: 281861 - DNA, 20 bp, Artificial Sequence
  Description of Artificial Sequence: Synthetic oligonucleotide
  Target: LAMA2; (-) strand; PAM type: YTN; PAM sequence: TTC
ctgtatctcccaagtgctga

SEQ ID NO: 281862 - DNA, 20 bp, Artificial Sequence
  Description of Artificial Sequence: Synthetic oligonucleotide
  Target: LAMA2; (-) strand; PAM type: YTN; PAM sequence: TTT
cctgtatctcccaagtgctg

SEQ ID NO: 281863 - DNA, 20 bp, Artificial Sequence
  Description of Artificial Sequence: Synthetic oligonucleotide
  Target: LAMA2; (-) strand; PAM type: YTN; PAM sequence: CTG
agaggggagcatttcctgta

SEQ ID NO: 281864 - DNA, 20 bp, Artificial Sequence
  Description of Artificial Sequence: Synthetic oligonucleotide
  Target: LAMA2; (-) strand; PAM type: YTN; PAM sequence: TTG
tggactgagaggggagcatt

SEQ ID NO: 281865 - DNA, 20 bp, Artificial Sequence
  Description of Artificial Sequence: Synthetic oligonucleotide
  Target: LAMA2; (-) strand; PAM type: YTN; PAM sequence: CTA
gttgtggactgagaggggag

SEQ ID NO: 281866 - DNA, 20 bp, Artificial Sequence
  Description of Artificial Sequence: Synthetic oligonucleotide
  Target: LAMA2; (-) strand; PAM type: YTN; PAM sequence: CTC
tagttgtggactgagagggg

SEQ ID NO: 281867 - DNA, 20 bp, Artificial Sequence
  Description of Artificial Sequence: Synthetic oligonucleotide
  Target: LAMA2; (-) strand; PAM type: YTN; PAM sequence: TTC
actctagttgtggactgaga

SEQ ID NO: 281868 - DNA, 20 bp, Artificial Sequence
  Description of Artificial Sequence: Synthetic oligonucleotide
  Target: LAMA2; (-) strand; PAM type: YTN; PAM sequence: TTT
cactctagttgtggactgag

SEQ ID NO: 281869 - DNA, 20 bp, Artificial Sequence
  Description of Artificial Sequence: Synthetic oligonucleotide
  Target: LAMA2; (-) strand; PAM type: YTN; PAM sequence: TTA
agcaaatttcactctagttg

SEQ ID NO: 281870 - DNA, 20 bp, Artificial Sequence
  Description of Artificial Sequence: Synthetic oligonucleotide
  Target: LAMA2; (-) strand; PAM type: YTN; PAM sequence: CTT
aagcaaatttcactctagtt

SEQ ID NO: 281871 - DNA, 20 bp, Artificial Sequence
  Description of Artificial Sequence: Synthetic oligonucleotide
  Target: LAMA2; (-) strand; PAM type: YTN; PAM sequence: TTA
tccttaagcaaatttcactc

SEQ ID NO: 281872 - DNA, 20 bp, Artificial Sequence
  Description of Artificial Sequence: Synthetic oligonucleotide
  Target: LAMA2; (-) strand; PAM type: YTN; PAM sequence: TTT
atccttaagcaaatttcact

SEQ ID NO: 281873 - DNA, 20 bp, Artificial Sequence
  Description of Artificial Sequence: Synthetic oligonucleotide
  Target: LAMA2; (-) strand; PAM type: YTN; PAM sequence: CTT
tatccttaagcaaatttcac

SEQ ID NO: 281874 - DNA, 20 bp, Artificial Sequence
  Description of Artificial Sequence: Synthetic oligonucleotide
  Target: LAMA2; (-) strand; PAM type: YTN; PAM sequence: CTG
actttatccttaagcaaatt

SEQ ID NO: 281875 - DNA, 20 bp, Artificial Sequence
  Description of Artificial Sequence: Synthetic oligonucleotide
  Target: LAMA2; (-) strand; PAM type: YTN; PAM sequence: CTA
aacacatcccctgactttat

SEQ ID NO: 281876 - DNA, 20 bp, Artificial Sequence
  Description of Artificial Sequence: Synthetic oligonucleotide
  Target: LAMA2; (-) strand; PAM type: YTN; PAM sequence: TTA
agaactaaacacatcccctg

SEQ ID NO: 281877 - DNA, 20 bp, Artificial Sequence
  Description of Artificial Sequence: Synthetic oligonucleotide
  Target: LAMA2; (-) strand; PAM type: YTN; PAM sequence: CTA
cagaagtcaagcaaattaag

SEQ ID NO: 281878 - DNA, 20 bp, Artificial Sequence
  Description of Artificial Sequence: Synthetic oligonucleotide
  Target: LAMA2; (-) strand; PAM type: YTN; PAM sequence: TTA
tgacgtgctacagaagtcaa

SEQ ID NO: 281879 - DNA, 20 bp, Artificial Sequence
  Description of Artificial Sequence: Synthetic oligonucleotide
  Target: LAMA2; (-) strand; PAM type: YTN; PAM sequence: CTG
agcagcattatgacgtgcta

SEQ ID NO: 281880 - DNA, 20 bp, Artificial Sequence
  Description of Artificial Sequence: Synthetic oligonucleotide
  Target: LAMA2; (-) strand; PAM type: YTN; PAM sequence: TTG
taaggacataactgagcagc

SEQ ID NO: 281881 - DNA, 20 bp, Artificial Sequence
  Description of Artificial Sequence: Synthetic oligonucleotide
  Target: LAMA2; (-) strand; PAM type: YTN; PAM sequence: CTG
gcggtgttgtaaggacataa

SEQ ID NO: 281882 - DNA, 20 bp, Artificial Sequence
  Description of Artificial Sequence: Synthetic oligonucleotide
  Target: LAMA2; (-) strand; PAM type: YTN; PAM sequence: CTC
gatgcatgataactggcggt

SEQ ID NO: 281883 - DNA, 20 bp, Artificial Sequence
  Description of Artificial Sequence: Synthetic oligonucleotide
  Target: LAMA2; (-) strand; PAM type: YTN; PAM sequence: TTA
agagatgcagaagtgactcg

SEQ ID NO: 281884 - DNA, 20 bp, Artificial Sequence
  Description of Artificial Sequence: Synthetic oligonucleotide
  Target: LAMA2; (-) strand; PAM type: YTN; PAM sequence: CTA
tggaaattaagagatgcaga

SEQ ID NO: 281885 - DNA, 20 bp, Artificial Sequence
  Description of Artificial Sequence: Synthetic oligonucleotide
  Target: LAMA2; (-) strand; PAM type: YTN; PAM sequence: TTA
ggagagcataacactatgga

SEQ ID NO: 281886 - DNA, 20 bp, Artificial Sequence
  Description of Artificial Sequence: Synthetic oligonucleotide
  Target: LAMA2; (-) strand; PAM type: YTN; PAM sequence: TTC
cacagaggaaaaggagaaat

SEQ ID NO: 281887 - DNA, 20 bp, Artificial Sequence
  Description of Artificial Sequence: Synthetic oligonucleotide
  Target: LAMA2; (-) strand; PAM type: YTN; PAM sequence: CTG
gcattccacagaggaaaagg

SEQ ID NO: 281888 - DNA, 20 bp, Artificial Sequence
  Description of Artificial Sequence: Synthetic oligonucleotide
  Target: LAMA2; (-) strand; PAM type: YTN; PAM sequence: CTG
gcaaggtgactggcattcca

SEQ ID NO: 281889 - DNA, 20 bp, Artificial Sequence
  Description of Artificial Sequence: Synthetic oligonucleotide
  Target: LAMA2; (-) strand; PAM type: YTN; PAM sequence: TTA
gggagtaggcagagaaagtg

SEQ ID NO: 281890 - DNA, 20 bp, Artificial Sequence
  Description of Artificial Sequence: Synthetic oligonucleotide
  Target: LAMA2; (-) strand; PAM type: YTN; PAM sequence: TTT
agggagtaggcagagaaagt

SEQ ID NO: 281891 - DNA, 20 bp, Artificial Sequence
  Description of Artificial Sequence: Synthetic oligonucleotide
  Target: LAMA2; (-) strand; PAM type: YTN; PAM sequence: TTC
aatgtttagggagtaggcag

SEQ ID NO: 281892 - DNA, 20 bp, Artificial Sequence
  Description of Artificial Sequence: Synthetic oligonucleotide
  Target: LAMA2; (-) strand; PAM type: YTN; PAM sequence: CTT
caatgtttagggagtaggca

SEQ ID NO: 281893 - DNA, 20 bp, Artificial Sequence
  Description of Artificial Sequence: Synthetic oligonucleotide
  Target: LAMA2; (-) strand; PAM type: YTN; PAM sequence: TTA
ggaacttcaatgtttaggga

SEQ ID NO: 281894 - DNA, 20 bp, Artificial Sequence
  Description of Artificial Sequence: Synthetic oligonucleotide
  Target: LAMA2; (-) strand; PAM type: YTN; PAM sequence: CTT
aggaacttcaatgtttaggg

SEQ ID NO: 281895 - DNA, 20 bp, Artificial Sequence
  Description of Artificial Sequence: Synthetic oligonucleotide
  Target: LAMA2; (-) strand; PAM type: YTN; PAM sequence: TTC
ttaggaacttcaatgtttag

SEQ ID NO: 281896 - DNA, 20 bp, Artificial Sequence
  Description of Artificial Sequence: Synthetic oligonucleotide
  Target: LAMA2; (-) strand; PAM type: YTN; PAM sequence: CTA
gaacagagttcttaggaact

SEQ ID NO: 281897 - DNA, 20 bp, Artificial Sequence
  Description of Artificial Sequence: Synthetic oligonucleotide
  Target: LAMA2; (-) strand; PAM type: YTN; PAM sequence: TTA
cggtatgagaagaagatcta

SEQ ID NO: 281898 - DNA, 20 bp, Artificial Sequence
  Description of Artificial Sequence: Synthetic oligonucleotide
  Target: LAMA2; (-) strand; PAM type: YTN; PAM sequence: TTA
ttacggtatgagaagaagat

SEQ ID NO: 281899 - DNA, 20 bp, Artificial Sequence
  Description of Artificial Sequence: Synthetic oligonucleotide
  Target: LAMA2; (-) strand; PAM type: YTN; PAM sequence: TTT
attacggtatgagaagaaga

SEQ ID NO: 281900 - DNA, 20 bp, Artificial Sequence
  Description of Artificial Sequence: Synthetic oligonucleotide
  Target: LAMA2; (-) strand; PAM type: YTN; PAM sequence: CTG
tttattacggtatgagaaga

SEQ ID NO: 281901 - DNA, 20 bp, Artificial Sequence
  Description of Artificial Sequence: Synthetic oligonucleotide
  Target: LAMA2; (-) strand; PAM type: YTN; PAM sequence: TTA
ggagactgtttattacggta

SEQ ID NO: 281902 - DNA, 20 bp, Artificial Sequence
  Description of Artificial Sequence: Synthetic oligonucleotide
  Target: LAMA2; (-) strand; PAM type: YTN; PAM sequence: TTA
aagttaggagactgtttatt

SEQ ID NO: 281903 - DNA, 20 bp, Artificial Sequence
  Description of Artificial Sequence: Synthetic oligonucleotide
  Target: LAMA2; (-) strand; PAM type: YTN; PAM sequence: TTC
ggtagttaaagttaggagac

SEQ ID NO: 281904 - DNA, 20 bp, Artificial Sequence
  Description of Artificial Sequence: Synthetic oligonucleotide
  Target: LAMA2; (-) strand; PAM type: YTN; PAM sequence: TTA
gcacatattcggtagttaaa

SEQ ID NO: 281905 - DNA, 20 bp, Artificial Sequence
  Description of Artificial Sequence: Synthetic oligonucleotide
  Target: LAMA2; (-) strand; PAM type: YTN; PAM sequence: TTA
ttagcacatattcggtagtt

SEQ ID NO: 281906 - DNA, 20 bp, Artificial Sequence
  Description of Artificial Sequence: Synthetic oligonucleotide
  Target: LAMA2; (-) strand; PAM type: YTN; PAM sequence: TTG
taaattattagcacatattc

SEQ ID NO: 281907 - DNA, 20 bp, Artificial Sequence
  Description of Artificial Sequence: Synthetic oligonucleotide
  Target: LAMA2; (-) strand; PAM type: YTN; PAM sequence: CTG
cagatatagaattgtaaatt

SEQ ID NO: 281908 - DNA, 20 bp, Artificial Sequence
  Description of Artificial Sequence: Synthetic oligonucleotide
  Target: LAMA2; (-) strand; PAM type: YTN; PAM sequence: CTG
ggctgcagatatagaattgt

SEQ ID NO: 281909 - DNA, 20 bp, Artificial Sequence
  Description of Artificial Sequence: Synthetic oligonucleotide
  Target: LAMA2; (-) strand; PAM type: YTN; PAM sequence: CTC
tgggctgcagatatagaatt

SEQ ID NO: 281910 - DNA, 20 bp, Artificial Sequence
  Description of Artificial Sequence: Synthetic oligonucleotide
  Target: LAMA2; (-) strand; PAM type: YTN; PAM sequence: TTA
ggaaagagctctgggctgca

SEQ ID NO: 281911 - DNA, 20 bp, Artificial Sequence
  Description of Artificial Sequence: Synthetic oligonucleotide
  Target: LAMA2; (-) strand; PAM type: YTN; PAM sequence: TTT
aggaaagagctctgggctgc

SEQ ID NO: 281912 - DNA, 20 bp, Artificial Sequence
  Description of Artificial Sequence: Synthetic oligonucleotide
  Target: LAMA2; (-) strand; PAM type: YTN; PAM sequence: CTT
taggaaagagctctgggctg

SEQ ID NO: 281913 - DNA, 20 bp, Artificial Sequence
  Description of Artificial Sequence: Synthetic oligonucleotide
  Target: LAMA2; (-) strand; PAM type: YTN; PAM sequence: TTG
cctttaggaaagagctctgg

SEQ ID NO: 281914 - DNA, 20 bp, Artificial Sequence
  Description of Artificial Sequence: Synthetic oligonucleotide
  Target: LAMA2; (-) strand; PAM type: YTN; PAM sequence: TTT
gcctttaggaaagagctctg

SEQ ID NO: 281915 - DNA, 20 bp, Artificial Sequence
  Description of Artificial Sequence: Synthetic oligonucleotide
  Target: LAMA2; (-) strand; PAM type: YTN; PAM sequence: TTG
gtacacagagtttgccttta

SEQ ID NO: 281916 - DNA, 20 bp, Artificial Sequence
  Description of Artificial Sequence: Synthetic oligonucleotide
  Target: LAMA2; (-) strand; PAM type: YTN; PAM sequence: CTA
aaaccatagaataatggagt

SEQ ID NO: 281917 - DNA, 20 bp, Artificial Sequence
  Description of Artificial Sequence: Synthetic oligonucleotide
  Target: LAMA2; (-) strand; PAM type: YTN; PAM sequence: CTG
tggacagaaaaacaaatgtc

SEQ ID NO: 281918 - DNA, 20 bp, Artificial Sequence
  Description of Artificial Sequence: Synthetic oligonucleotide
  Target: LAMA2; (-) strand; PAM type: YTN; PAM sequence: TTG
cctgtggacagaaaaacaaa

SEQ ID NO: 281919 - DNA, 20 bp, Artificial Sequence
  Description of Artificial Sequence: Synthetic oligonucleotide
  Target: LAMA2; (-) strand; PAM type: YTN; PAM sequence: CTG
ttgcctgtggacagaaaaac

SEQ ID NO: 281920 - DNA, 20 bp, Artificial Sequence
  Description of Artificial Sequence: Synthetic oligonucleotide
  Target: LAMA2; (-) strand; PAM type: YTN; PAM sequence: TTA
ataaaccccgaggacctgtt

SEQ ID NO: 281921 - DNA, 20 bp, Artificial Sequence
  Description of Artificial Sequence: Synthetic oligonucleotide
  Target: LAMA2; (-) strand; PAM type: YTN; PAM sequence: TTT
aataaaccccgaggacctgt

SEQ ID NO: 281922 - DNA, 20 bp, Artificial Sequence
  Description of Artificial Sequence: Synthetic oligonucleotide
  Target: LAMA2; (-) strand; PAM type: YTN; PAM sequence: CTT
taataaaccccgaggacctg

SEQ ID NO: 281923 - DNA, 20 bp, Artificial Sequence
  Description of Artificial Sequence: Synthetic oligonucleotide
  Target: LAMA2; (-) strand; PAM type: YTN; PAM sequence: TTC
ctttaataaaccccgaggac

SEQ ID NO: 281924 - DNA, 20 bp, Artificial Sequence
  Description of Artificial Sequence: Synthetic oligonucleotide
  Target: LAMA2; (-) strand; PAM type: YTN; PAM sequence: CTT
cctttaataaaccccgagga

SEQ ID NO: 281925 - DNA, 20 bp, Artificial Sequence
  Description of Artificial Sequence: Synthetic oligonucleotide
  Target: LAMA2; (-) strand; PAM type: YTN; PAM sequence: TTG
gcatcttcctttaataaacc

SEQ ID NO: 281926 - DNA, 20 bp, Artificial Sequence
  Description of Artificial Sequence: Synthetic oligonucleotide
  Target: LAMA2; (-) strand; PAM type: YTN; PAM sequence: TTT
ggcatcttcctttaataaac

SEQ ID NO: 281927 - DNA, 20 bp, Artificial Sequence
  Description of Artificial Sequence: Synthetic oligonucleotide
  Target: LAMA2; (-) strand; PAM type: YTN; PAM sequence: CTT
tggcatcttcctttaataaa

SEQ ID NO: 281928 - DNA, 20 bp, Artificial Sequence
  Description of Artificial Sequence: Synthetic oligonucleotide
  Target: LAMA2; (-) strand; PAM type: YTN; PAM sequence: CTG
aagacagcctttggcatctt

SEQ ID NO: 281929 - DNA, 20 bp, Artificial Sequence
  Description of Artificial Sequence: Synthetic oligonucleotide
  Target: LAMA2; (-) strand; PAM type: YTN; PAM sequence: TTC
tgaagacagcctttggcatc

SEQ ID NO: 281930 - DNA, 20 bp, Artificial Sequence
  Description of Artificial Sequence: Synthetic oligonucleotide
  Target: LAMA2; (-) strand; PAM type: YTN; PAM sequence: TTT
ctgaagacagcctttggcat

SEQ ID NO: 281931 - DNA, 20 bp, Artificial Sequence
  Description of Artificial Sequence: Synthetic oligonucleotide
  Target: LAMA2; (-) strand; PAM type: YTN; PAM sequence: TTT
tctgaagacagcctttggca

SEQ ID NO: 281932 - DNA, 20 bp, Artificial Sequence
  Description of Artificial Sequence: Synthetic oligonucleotide
  Target: LAMA2; (-) strand; PAM type: YTN; PAM sequence: CTT
ttctgaagacagcctttggc

SEQ ID NO: 281933 - DNA, 20 bp, Artificial Sequence
  Description of Artificial Sequence: Synthetic oligonucleotide
  Target: LAMA2; (-) strand; PAM type: YTN; PAM sequence: CTG
aagcttttctgaagacagcc

SEQ ID NO: 281934 - DNA, 20 bp, Artificial Sequence
  Description of Artificial Sequence: Synthetic oligonucleotide
  Target: LAMA2; (-) strand; PAM type: YTN; PAM sequence: TTA
agaatcctgaagcttttctg

SEQ ID NO: 281935 - DNA, 20 bp, Artificial Sequence
  Description of Artificial Sequence: Synthetic oligonucleotide
  Target: LAMA2; (-) strand; PAM type: YTN; PAM sequence: TTC
gttaagaatcctgaagcttt

SEQ ID NO: 281936 - DNA, 20 bp, Artificial Sequence
  Description of Artificial Sequence: Synthetic oligonucleotide
  Target: LAMA2; (-) strand; PAM type: YTN; PAM sequence: CTT
cgttaagaatcctgaagctt

SEQ ID NO: 281937 - DNA, 20 bp, Artificial Sequence
  Description of Artificial Sequence: Synthetic oligonucleotide
  Target: LAMA2; (-) strand; PAM type: YTN; PAM sequence: TTG
gcttcgttaagaatcctgaa

SEQ ID NO: 281938 - DNA, 20 bp, Artificial Sequence
  Description of Artificial Sequence: Synthetic oligonucleotide
  Target: LAMA2; (-) strand; PAM type: YTN; PAM sequence: CTT
ggcttcgttaagaatcctga

SEQ ID NO: 281939 - DNA, 20 bp, Artificial Sequence
  Description of Artificial Sequence: Synthetic oligonucleotide
  Target: LAMA2; (-) strand; PAM type: YTN; PAM sequence: TTC
ttggcttcgttaagaatcct

SEQ ID NO: 281940 - DNA, 20 bp, Artificial Sequence
  Description of Artificial Sequence: Synthetic oligonucleotide
  Target: LAMA2; (-) strand; PAM type: YTN; PAM sequence: CTT
cttggcttcgttaagaatcc

SEQ ID NO: 281941 - DNA, 20 bp, Artificial Sequence
  Description of Artificial Sequence: Synthetic oligonucleotide
  Target: LAMA2; (-) strand; PAM type: YTN; PAM sequence: CTA
acttcttggcttcgttaaga

SEQ ID NO: 281942 - DNA, 20 bp, Artificial Sequence
  Description of Artificial Sequence: Synthetic oligonucleotide
  Target: LAMA2; (-) strand; PAM type: YTN; PAM sequence: TTG
ctaacttcttggcttcgtta

SEQ ID NO: 281943 - DNA, 20 bp, Artificial Sequence
  Description of Artificial Sequence: Synthetic oligonucleotide
  Target: LAMA2; (-) strand; PAM type: YTN; PAM sequence: TTT
gctaacttcttggcttcgtt

SEQ ID NO: 281944 - DNA, 20 bp, Artificial Sequence
  Description of Artificial Sequence: Synthetic oligonucleotide
  Target: LAMA2; (-) strand; PAM type: YTN; PAM sequence: TTA
catcatttgctaacttcttg

SEQ ID NO: 281945 - DNA, 20 bp, Artificial Sequence
  Description of Artificial Sequence: Synthetic oligonucleotide
  Target: LAMA2; (-) strand; PAM type: YTN; PAM sequence: TTT
acatcatttgctaacttctt

SEQ ID NO: 281946 - DNA, 20 bp, Artificial Sequence
  Description of Artificial Sequence: Synthetic oligonucleotide
  Target: LAMA2; (-) strand; PAM type: YTN; PAM sequence: TTT
tacatcatttgctaacttct

SEQ ID NO: 281947 - DNA, 20 bp, Artificial Sequence
  Description of Artificial Sequence: Synthetic oligonucleotide
  Target: LAMA2; (-) strand; PAM type: YTN; PAM sequence: CTT
ttacatcatttgctaacttc

SEQ ID NO: 281948 - DNA, 20 bp, Artificial Sequence
  Description of Artificial Sequence: Synthetic oligonucleotide
  Target: LAMA2; (-) strand; PAM type: YTN; PAM sequence: CTG
accttttacatcatttgcta

SEQ ID NO: 281949 - DNA, 20 bp, Artificial Sequence
  Description of Artificial Sequence: Synthetic oligonucleotide
  Target: LAMA2; (-) strand; PAM type: YTN; PAM sequence: CTA
tggccacactgaccttttac

SEQ ID NO: 281950 - DNA, 20 bp, Artificial Sequence
  Description of Artificial Sequence: Synthetic oligonucleotide
  Target: LAMA2; (-) strand; PAM type: YTN; PAM sequence: CTG
gaatataataaaaactatgg

SEQ ID NO: 281951 - DNA, 20 bp, Artificial Sequence
  Description of Artificial Sequence: Synthetic oligonucleotide
  Target: LAMA2; (-) strand; PAM type: YTN; PAM sequence: TTA
actggaatataataaaaact

SEQ ID NO: 281952 - DNA, 20 bp, Artificial Sequence
  Description of Artificial Sequence: Synthetic oligonucleotide
  Target: LAMA2; (-) strand; PAM type: YTN; PAM sequence: TTA
tcagtaacaacccgattaac

SEQ ID NO: 281953 - DNA, 20 bp, Artificial Sequence
  Description of Artificial Sequence: Synthetic oligonucleotide
  Target: LAMA2; (-) strand; PAM type: YTN; PAM sequence: CTT
atcagtaacaacccgattaa

SEQ ID NO: 281954 - DNA, 20 bp, Artificial Sequence
  Description of Artificial Sequence: Synthetic oligonucleotide
  Target: LAMA2; (-) strand; PAM type: YTN; PAM sequence: CTC
caatagtgtgatagaatatc

SEQ ID NO: 281955 - DNA, 20 bp, Artificial Sequence
  Description of Artificial Sequence: Synthetic oligonucleotide
  Target: LAMA2; (-) strand; PAM type: YTN; PAM sequence: TTC
tccaatagtgtgatagaata

SEQ ID NO: 281956 - DNA, 20 bp, Artificial Sequence
  Description of Artificial Sequence: Synthetic oligonucleotide
  Target: LAMA2; (-) strand; PAM type: YTN; PAM sequence: TTA
cattctccaatagtgtgata

SEQ ID NO: 281957 - DNA, 20 bp, Artificial Sequence
  Description of Artificial Sequence: Synthetic oligonucleotide
  Target: LAMA2; (-) strand; PAM type: YTN; PAM sequence: CTA
aagaaattacattctccaat

SEQ ID NO: 281958 - DNA, 20 bp, Artificial Sequence
  Description of Artificial Sequence: Synthetic oligonucleotide
  Target: LAMA2; (-) strand; PAM type: YTN; PAM sequence: TTA
tagaatcatcacaaaaatca

SEQ ID NO: 281959 - DNA, 20 bp, Artificial Sequence
  Description of Artificial Sequence: Synthetic oligonucleotide
  Target: LAMA2; (-) strand; PAM type: YTN; PAM sequence: TTA
aatagattatagaatcatca

SEQ ID NO: 281960 - DNA, 20 bp, Artificial Sequence
  Description of Artificial Sequence: Synthetic oligonucleotide
  Target: LAMA2; (-) strand; PAM type: YTN; PAM sequence: TTG
cattaaatagattatagaat

SEQ ID NO: 281961 - DNA, 20 bp, Artificial Sequence
  Description of Artificial Sequence: Synthetic oligonucleotide
  Target: LAMA2; (-) strand; PAM type: YTN; PAM sequence: CTT
gcattaaatagattatagaa

SEQ ID NO: 281962 - DNA, 20 bp, Artificial Sequence
  Description of Artificial Sequence: Synthetic oligonucleotide
  Target: LAMA2; (-) strand; PAM type: YTN; PAM sequence: TTA
cttgcattaaatagattata

SEQ ID NO: 281963 - DNA, 20 bp, Artificial Sequence
  Description of Artificial Sequence: Synthetic oligonucleotide
  Target: LAMA2; (-) strand; PAM type: YTN; PAM sequence: TTT
acttgcattaaatagattat

SEQ ID NO: 281964 - DNA, 20 bp, Artificial Sequence
  Description of Artificial Sequence: Synthetic oligonucleotide
  Target: LAMA2; (-) strand; PAM type: YTN; PAM sequence: CTA
gtgagaaagtttacttgcat

SEQ ID NO: 281965 - DNA, 20 bp, Artificial Sequence
  Description of Artificial Sequence: Synthetic oligonucleotide
  Target: LAMA2; (-) strand; PAM type: YTN; PAM sequence: TTG
taaaactagtgagaaagttt

SEQ ID NO: 281966 - DNA, 20 bp, Artificial Sequence
  Description of Artificial Sequence: Synthetic oligonucleotide
  Target: LAMA2; (-) strand; PAM type: YTN; PAM sequence: TTT
gtaaaactagtgagaaagtt

SEQ ID NO: 281967 - DNA, 20 bp, Artificial Sequence
  Description of Artificial Sequence: Synthetic oligonucleotide
  Target: LAMA2; (-) strand; PAM type: YTN; PAM sequence: TTT
tgtaaaactagtgagaaagt

SEQ ID NO: 281968 - DNA, 20 bp, Artificial Sequence
  Description of Artificial Sequence: Synthetic oligonucleotide
  Target: LAMA2; (-) strand; PAM type: YTN; PAM sequence: TTG
aagtgagataggtagacaac

SEQ ID NO: 281969 - DNA, 20 bp, Artificial Sequence
  Description of Artificial Sequence: Synthetic oligonucleotide
  Target: LAMA2; (-) strand; PAM type: YTN; PAM sequence: CTT
gaagtgagataggtagacaa

SEQ ID NO: 281970 - DNA, 20 bp, Artificial Sequence
  Description of Artificial Sequence: Synthetic oligonucleotide
  Target: LAMA2; (-) strand; PAM type: YTN; PAM sequence: CTA
cttgaagtgagataggtaga

SEQ ID NO: 281971 - DNA, 20 bp, Artificial Sequence
  Description of Artificial Sequence: Synthetic oligonucleotide
  Target: LAMA2; (-) strand; PAM type: YTN; PAM sequence: TTA
ccctacttgaagtgagatag

SEQ ID NO: 281972 - DNA, 20 bp, Artificial Sequence
  Description of Artificial Sequence: Synthetic oligonucleotide
  Target: LAMA2; (-) strand; PAM type: YTN; PAM sequence: TTA
tgagatattaccctacttga

SEQ ID NO: 281973 - DNA, 20 bp, Artificial Sequence
  Description of Artificial Sequence: Synthetic oligonucleotide
  Target: LAMA2; (-) strand; PAM type: YTN; PAM sequence: TTA
caaattatgagatattaccc

SEQ ID NO: 281974 - DNA, 20 bp, Artificial Sequence
  Description of Artificial Sequence: Synthetic oligonucleotide
  Target: LAMA2; (-) strand; PAM type: YTN; PAM sequence: CTT
acaaattatgagatattacc

SEQ ID NO: 281975 - DNA, 20 bp, Artificial Sequence
  Description of Artificial Sequence: Synthetic oligonucleotide
  Target: LAMA2; (-) strand; PAM type: YTN; PAM sequence: CTA
tagaaataagacttacaaat

SEQ ID NO: 281976 - DNA, 20 bp, Artificial Sequence
  Description of Artificial Sequence: Synthetic oligonucleotide
  Target: LAMA2; (-) strand; PAM type: YTN; PAM sequence: TTA
gatataggtgaagtgatgct

SEQ ID NO: 281977 - DNA, 20 bp, Artificial Sequence
  Description of Artificial Sequence: Synthetic oligonucleotide
  Target: LAMA2; (-) strand; PAM type: YTN; PAM sequence: CTA
tacattagatataggtgaag

SEQ ID NO: 281978 - DNA, 20 bp, Artificial Sequence
  Description of Artificial Sequence: Synthetic oligonucleotide
  Target: LAMA2; (-) strand; PAM type: YTN; PAM sequence: TTA
ctatacattagatataggtg

SEQ ID NO: 281979 - DNA, 20 bp, Artificial Sequence
  Description of Artificial Sequence: Synthetic oligonucleotide
  Target: LAMA2; (-) strand; PAM type: YTN; PAM sequence: CTA
aaagttactatacattagat

SEQ ID NO: 281980 - DNA, 20 bp, Artificial Sequence
  Description of Artificial Sequence: Synthetic oligonucleotide
  Target: LAMA2; (-) strand; PAM type: YTN; PAM sequence: TTA
cactaaaagttactatacat

SEQ ID NO: 281981 - DNA, 20 bp, Artificial Sequence
  Description of Artificial Sequence: Synthetic oligonucleotide
  Target: LAMA2; (-) strand; PAM type: YTN; PAM sequence: TTA
ttacactaaaagttactata

SEQ ID NO: 281982 - DNA, 20 bp, Artificial Sequence
  Description of Artificial Sequence: Synthetic oligonucleotide
  Target: LAMA2; (-) strand; PAM type: YTN; PAM sequence: CTT
attacactaaaagttactat

SEQ ID NO: 281983 - DNA, 20 bp, Artificial Sequence
  Description of Artificial Sequence: Synthetic oligonucleotide
  Target: LAMA2; (-) strand; PAM type: YTN; PAM sequence: TTA
aaaacttattacactaaaag

SEQ ID NO: 281984 - DNA, 20 bp, Artificial Sequence
  Description of Artificial Sequence: Synthetic oligonucleotide
  Target: LAMA2; (-) strand; PAM type: YTN; PAM sequence: CTT
aaaaacttattacactaaaa

SEQ ID NO: 281985 - DNA, 20 bp, Artificial Sequence
  Description of Artificial Sequence: Synthetic oligonucleotide
  Target: LAMA2; (-) strand; PAM type: YTN; PAM sequence: CTC
ttaaaaacttattacactaa

SEQ ID NO: 281986 - DNA, 20 bp, Artificial Sequence
  Description of Artificial Sequence: Synthetic oligonucleotide
  Target: LAMA2; (-) strand; PAM type: YTN; PAM sequence: TTG
atactcttaaaaacttatta

SEQ ID NO: 281987 - DNA, 20 bp, Artificial Sequence
  Description of Artificial Sequence: Synthetic oligonucleotide
  Target: LAMA2; (-) strand; PAM type: YTN; PAM sequence: TTT
gatactcttaaaaacttatt

SEQ ID NO: 281988 - DNA, 20 bp, Artificial Sequence
  Description of Artificial Sequence: Synthetic oligonucleotide
  Target: LAMA2; (-) strand; PAM type: YTN; PAM sequence: CTG
ggtttgatactcttaaaaac

SEQ ID NO: 281989 - DNA, 20 bp, Artificial Sequence
  Description of Artificial Sequence: Synthetic oligonucleotide
  Target: LAMA2; (-) strand; PAM type: YTN; PAM sequence: CTG
gcctgggtttgatactctta

SEQ ID NO: 281990 - DNA, 20 bp, Artificial Sequence
  Description of Artificial Sequence: Synthetic oligonucleotide
  Target: LAMA2; (-) strand; PAM type: YTN; PAM sequence: CTA
tggctggcctgggtttgata

SEQ ID NO: 281991 - DNA, 20 bp, Artificial Sequence
  Description of Artificial Sequence: Synthetic oligonucleotide
  Target: LAMA2; (-) strand; PAM type: YTN; PAM sequence: CTA
gaatcacaggtgtgagccac

SEQ ID NO: 281992 - DNA, 20 bp, Artificial Sequence
  Description of Artificial Sequence: Synthetic oligonucleotide
  Target: LAMA2; (-) strand; PAM type: YTN; PAM sequence: CTA
agcactagaatcacaggtgt

SEQ ID NO: 281993 - DNA, 20 bp, Artificial Sequence
  Description of Artificial Sequence: Synthetic oligonucleotide
  Target: LAMA2; (-) strand; PAM type: YTN; PAM sequence: CTC
cctaagcactagaatcacag

SEQ ID NO: 281994 - DNA, 20 bp, Artificial Sequence
  Description of Artificial Sequence: Synthetic oligonucleotide
  Target: LAMA2; (-) strand; PAM type: YTN; PAM sequence: CTC
ggcctccctaagcactagaa

SEQ ID NO: 281995 - DNA, 20 bp, Artificial Sequence
  Description of Artificial Sequence: Synthetic oligonucleotide
  Target: LAMA2; (-) strand; PAM type: YTN; PAM sequence: CTG
cctcggcctccctaagcact

SEQ ID NO: 281996 - DNA, 20 bp, Artificial Sequence
  Description of Artificial Sequence: Synthetic oligonucleotide
  Target: LAMA2; (-) strand; PAM type: YTN; PAM sequence: CTC
ctgcctcggcctccctaagc

SEQ ID NO: 281997 - DNA, 20 bp, Artificial Sequence
  Description of Artificial Sequence: Synthetic oligonucleotide
  Target: LAMA2; (-) strand; PAM type: YTN; PAM sequence: TTG
gcaccaagggatcctcctgc

SEQ ID NO: 281998 - DNA, 20 bp, Artificial Sequence
  Description of Artificial Sequence: Synthetic oligonucleotide
  Target: LAMA2; (-) strand; PAM type: YTN; PAM sequence: CTT
ggcaccaagggatcctcctg

SEQ ID NO: 281999 - DNA, 20 bp, Artificial Sequence
  Description of Artificial Sequence: Synthetic oligonucleotide
  Target: LAMA2; (-) strand; PAM type: YTN; PAM sequence: TTC
ttggcaccaagggatcctcc

SEQ ID NO: 282000 - DNA, 20 bp, Artificial Sequence
  Description of Artificial Sequence: Synthetic oligonucleotide
  Target: LAMA2; (-) strand; PAM type: YTN; PAM sequence: CTC
aaattcttggcaccaaggga

SEQ ID NO: 282001 - DNA, 20 bp, Artificial Sequence
  Description of Artificial Sequence: Synthetic oligonucleotide
  Target: LAMA2; (-) strand; PAM type: YTN; PAM sequence: CTG
gtctcaaattcttggcacca

SEQ ID NO: 282002 - DNA, 20 bp, Artificial Sequence
  Description of Artificial Sequence: Synthetic oligonucleotide
  Target: LAMA2; (-) strand; PAM type: YTN; PAM sequence: TTC
cccggctggtctcaaattct

SEQ ID NO: 282003 - DNA, 20 bp, Artificial Sequence
  Description of Artificial Sequence: Synthetic oligonucleotide
  Target: LAMA2; (-) strand; PAM type: YTN; PAM sequence: TTT
ccccggctggtctcaaattc

SEQ ID NO: 282004 - DNA, 20 bp, Artificial Sequence
  Description of Artificial Sequence: Synthetic oligonucleotide
  Target: LAMA2; (-) strand; PAM type: YTN; PAM sequence: CTA
tgtttccccggctggtctca

SEQ ID NO: 282005 - DNA, 20 bp, Artificial Sequence
  Description of Artificial Sequence: Synthetic oligonucleotide
  Target: LAMA2; (-) strand; PAM type: YTN; PAM sequence: TTG
ctatgtttccccggctggtc

SEQ ID NO: 282006 - DNA, 20 bp, Artificial Sequence
  Description of Artificial Sequence: Synthetic oligonucleotide
  Target: LAMA2; (-) strand; PAM type: YTN; PAM sequence: CTT
gctatgtttccccggctggt

SEQ ID NO: 282007 - DNA, 20 bp, Artificial Sequence
  Description of Artificial Sequence: Synthetic oligonucleotide
  Target: LAMA2; (-) strand; PAM type: YTN; PAM sequence: TTG
tagagacaggatcttgctat

SEQ ID NO: 282008 - DNA, 20 bp, Artificial Sequence
  Description of Artificial Sequence: Synthetic oligonucleotide
  Target: LAMA2; (-) strand; PAM type: YTN; PAM sequence: TTT
gtagagacaggatcttgcta

SEQ ID NO: 282009 - DNA, 20 bp, Artificial Sequence
  Description of Artificial Sequence: Synthetic oligonucleotide
  Target: LAMA2; (-) strand; PAM type: YTN; PAM sequence: TTT
tgtagagacaggatcttgct

SEQ ID NO: 282010 - DNA, 20 bp, Artificial Sequence
  Description of Artificial Sequence: Synthetic oligonucleotide
  Target: LAMA2; (-) strand; PAM type: YTN; PAM sequence: TTA
aaaaatgttttgtagagaca

SEQ ID NO: 282011 - DNA, 20 bp, Artificial Sequence
  Description of Artificial Sequence: Synthetic oligonucleotide
  Target: LAMA2; (-) strand; PAM type: YTN; PAM sequence: TTT
aaaaaatgttttgtagagac

SEQ ID NO: 282012 - DNA, 20 bp, Artificial Sequence
  Description of Artificial Sequence: Synthetic oligonucleotide
  Target: LAMA2; (-) strand; PAM type: YTN; PAM sequence: TTT
taaaaaatgttttgtagaga

SEQ ID NO: 282013 - DNA, 20 bp, Artificial Sequence
  Description of Artificial Sequence: Synthetic oligonucleotide
  Target: LAMA2; (-) strand; PAM type: YTN; PAM sequence: TTT
ttaaaaaatgttttgtagag

SEQ ID NO: 282014 - DNA, 20 bp, Artificial Sequence
  Description of Artificial Sequence: Synthetic oligonucleotide
  Target: LAMA2; (-) strand; PAM type: YTN; PAM sequence: CTA
aatttttaaaaaatgttttg

SEQ ID NO: 282015 - DNA, 20 bp, Artificial Sequence
  Description of Artificial Sequence: Synthetic oligonucleotide
  Target: LAMA2; (-) strand; PAM type: YTN; PAM sequence: CTG
actaaatttttaaaaaatgt

SEQ ID NO: 282016 - DNA, 20 bp, Artificial Sequence
  Description of Artificial Sequence: Synthetic oligonucleotide
  Target: LAMA2; (-) strand; PAM type: YTN; PAM sequence: CTA
cacctgactaaatttttaaa

SEQ ID NO: 282017 - DNA, 20 bp, Artificial Sequence
  Description of Artificial Sequence: Synthetic oligonucleotide
  Target: LAMA2; (-) strand; PAM type: YTN; PAM sequence: CTG
ctacacctgactaaattttt

SEQ ID NO: 282018 - DNA, 20 bp, Artificial Sequence
  Description of Artificial Sequence: Synthetic oligonucleotide
  Target: LAMA2; (-) strand; PAM type: YTN; PAM sequence: CTC
acgctgctacacctgactaa

SEQ ID NO: 282019 - DNA, 20 bp, Artificial Sequence
  Description of Artificial Sequence: Synthetic oligonucleotide
  Target: LAMA2; (-) strand; PAM type: YTN; PAM sequence: CTA
tgtgctcacgctgctacacc

SEQ ID NO: 282020 - DNA, 20 bp, Artificial Sequence
  Description of Artificial Sequence: Synthetic oligonucleotide
  Target: LAMA2; (-) strand; PAM type: YTN; PAM sequence: CTA
tgcctatgtgctcacgctgc

SEQ ID NO: 282021 - DNA, 20 bp, Artificial Sequence
  Description of Artificial Sequence: Synthetic oligonucleotide
  Target: LAMA2; (-) strand; PAM type: YTN; PAM sequence: TTC
caagtagctatgcctatgtg

SEQ ID NO: 282022 - DNA, 20 bp, Artificial Sequence
  Description of Artificial Sequence: Synthetic oligonucleotide
  Target: LAMA2; (-) strand; PAM type: YTN; PAM sequence: CTT
ccaagtagctatgcctatgt

SEQ ID NO: 282023 - DNA, 20 bp, Artificial Sequence
  Description of Artificial Sequence: Synthetic oligonucleotide
  Target: LAMA2; (-) strand; PAM type: YTN; PAM sequence: CTC
agccttccaagtagctatgc

SEQ ID NO: 282024 - DNA, 20 bp, Artificial Sequence
  Description of Artificial Sequence: Synthetic oligonucleotide
  Target: LAMA2; (-) strand; PAM type: YTN; PAM sequence: CTG
gctcagccttccaagtagct

SEQ ID NO: 282025 - DNA, 20 bp, Artificial Sequence
  Description of Artificial Sequence: Synthetic oligonucleotide
  Target: LAMA2; (-) strand; PAM type: YTN; PAM sequence: CTC
ctggctcagccttccaagta

SEQ ID NO: 282026 - DNA, 20 bp, Artificial Sequence
  Description of Artificial Sequence: Synthetic oligonucleotide
  Target: LAMA2; (-) strand; PAM type: YTN; PAM sequence: CTA
aagcgatcctcctggctcag

SEQ ID NO: 282027 - DNA, 20 bp, Artificial Sequence
  Description of Artificial Sequence: Synthetic oligonucleotide
  Target: LAMA2; (-) strand; PAM type: YTN; PAM sequence: CTG
ggctaaagcgatcctcctgg

SEQ ID NO: 282028 - DNA, 20 bp, Artificial Sequence
  Description of Artificial Sequence: Synthetic oligonucleotide
  Target: LAMA2; (-) strand; PAM type: YTN; PAM sequence: TTC
acgcccctgggctaaagcga

SEQ ID NO: 282029 - DNA, 20 bp, Artificial Sequence
  Description of Artificial Sequence: Synthetic oligonucleotide
  Target: LAMA2; (-) strand; PAM type: YTN; PAM sequence: CTT
cacgcccctgggctaaagcg

SEQ ID NO: 282030 - DNA, 20 bp, Artificial Sequence
  Description of Artificial Sequence: Synthetic oligonucleotide
  Target: LAMA2; (-) strand; PAM type: YTN; PAM sequence: CTC
acggtaacttcacgcccctg

SEQ ID NO: 282031 - DNA, 20 bp, Artificial Sequence
  Description of Artificial Sequence: Synthetic oligonucleotide
  Target: LAMA2; (-) strand; PAM type: YTN; PAM sequence: CTG
gtgtacagtagtgtgatcac

SEQ ID NO: 282032 - DNA, 20 bp, Artificial Sequence
  Description of Artificial Sequence: Synthetic oligonucleotide
  Target: LAMA2; (-) strand; PAM type: YTN; PAM sequence: TTA
cccaggctggtgtacagtag

SEQ ID NO: 282033 - DNA, 20 bp, Artificial Sequence
  Description of Artificial Sequence: Synthetic oligonucleotide
  Target: LAMA2; (-) strand; PAM type: YTN; PAM sequence: CTG
ttacccaggctggtgtacag

SEQ ID NO: 282034 - DNA, 20 bp, Artificial Sequence
  Description of Artificial Sequence: Synthetic oligonucleotide
  Target: LAMA2; (-) strand; PAM type: YTN; PAM sequence: CTC
tgttacccaggctggtgtac

SEQ ID NO: 282035 - DNA, 20 bp, Artificial Sequence
  Description of Artificial Sequence: Synthetic oligonucleotide
  Target: LAMA2; (-) strand; PAM type: YTN; PAM sequence: TTA
ctctgttacccaggctggtg

SEQ ID NO: 282036 - DNA, 20 bp, Artificial Sequence
  Description of Artificial Sequence: Synthetic oligonucleotide
  Target: LAMA2; (-) strand; PAM type: YTN; PAM sequence: CTT
actctgttacccaggctggt

SEQ ID NO: 282037 - DNA, 20 bp, Artificial Sequence
  Description of Artificial Sequence: Synthetic oligonucleotide
  Target: LAMA2; (-) strand; PAM type: YTN; PAM sequence: TTA
gagacaggatcttactctgt

SEQ ID NO: 282038 - DNA, 20 bp, Artificial Sequence
  Description of Artificial Sequence: Synthetic oligonucleotide
  Target: LAMA2; (-) strand; PAM type: YTN; PAM sequence: TTT
agagacaggatcttactctg

SEQ ID NO: 282039 - DNA, 20 bp, Artificial Sequence
  Description of Artificial Sequence: Synthetic oligonucleotide
  Target: LAMA2; (-) strand; PAM type: YTN; PAM sequence: TTT
tagagacaggatcttactct

SEQ ID NO: 282040 - DNA, 20 bp, Artificial Sequence
  Description of Artificial Sequence: Synthetic oligonucleotide
  Target: LAMA2; (-) strand; PAM type: YTN; PAM sequence: TTT
ttagagacaggatcttactc

SEQ ID NO: 282041 - DNA, 20 bp, Artificial Sequence
  Description of Artificial Sequence: Synthetic oligonucleotide
  Target: LAMA2; (-) strand; PAM type: YTN; PAM sequence: CTT
tttagagacaggatcttact

SEQ ID NO: 282042 - DNA, 20 bp, Artificial Sequence
  Description of Artificial Sequence: Synthetic oligonucleotide
  Target: LAMA2; (-) strand; PAM type: YTN; PAM sequence: TTC
tttttagagacaggatctta

SEQ ID NO: 282043 - DNA, 20 bp, Artificial Sequence
  Description of Artificial Sequence: Synthetic oligonucleotide
  Target: LAMA2; (-) strand; PAM type: YTN; PAM sequence: TTT
ctttttagagacaggatctt

SEQ ID NO: 282044 - DNA, 20 bp, Artificial Sequence
  Description of Artificial Sequence: Synthetic oligonucleotide
  Target: LAMA2; (-) strand; PAM type: YTN; PAM sequence: TTT
tctttttagagacaggatct

SEQ ID NO: 282045 - DNA, 20 bp, Artificial Sequence
  Description of Artificial Sequence: Synthetic oligonucleotide
  Target: LAMA2; (-) strand; PAM type: YTN; PAM sequence: TTT
ttctttttagagacaggatc

SEQ ID NO: 282046 - DNA, 20 bp, Artificial Sequence
  Description of Artificial Sequence: Synthetic oligonucleotide
  Target: LAMA2; (-) strand; PAM type: YTN; PAM sequence: TTG
tttttctttttagagacagg

SEQ ID NO: 282047 - DNA, 20 bp, Artificial Sequence
  Description of Artificial Sequence: Synthetic oligonucleotide
  Target: LAMA2; (-) strand; PAM type: YTN; PAM sequence: TTT
gtttttctttttagagacag

SEQ ID NO: 282048 - DNA, 20 bp, Artificial Sequence
  Description of Artificial Sequence: Synthetic oligonucleotide
  Target: LAMA2; (-) strand; PAM type: YTN; PAM sequence: TTT
tgtttttctttttagagaca

SEQ ID NO: 282049 - DNA, 20 bp, Artificial Sequence
  Description of Artificial Sequence: Synthetic oligonucleotide
  Target: LAMA2; (-) strand; PAM type: YTN; PAM sequence: TTA
attttgtttttctttttaga

SEQ ID NO: 282050 - DNA, 20 bp, Artificial Sequence
  Description of Artificial Sequence: Synthetic oligonucleotide
  Target: LAMA2; (-) strand; PAM type: YTN; PAM sequence: TTT
aattttgtttttctttttag

SEQ ID NO: 282051 - DNA, 20 bp, Artificial Sequence
  Description of Artificial Sequence: Synthetic oligonucleotide
  Target: LAMA2; (-) strand; PAM type: YTN; PAM sequence: CTC
agaaaaagaaaaatgtattt

SEQ ID NO: 282052 - DNA, 20 bp, Artificial Sequence
  Description of Artificial Sequence: Synthetic oligonucleotide
  Target: LAMA2; (-) strand; PAM type: YTN; PAM sequence: TTC
atctcagaaaaagaaaaatg

SEQ ID NO: 282053 - DNA, 20 bp, Artificial Sequence
  Description of Artificial Sequence: Synthetic oligonucleotide
  Target: LAMA2; (-) strand; PAM type: YTN; PAM sequence: CTT
catctcagaaaaagaaaaat

SEQ ID NO: 282054 - DNA, 20 bp, Artificial Sequence
  Description of Artificial Sequence: Synthetic oligonucleotide
  Target: LAMA2; (-) strand; PAM type: YTN; PAM sequence: TTG
acagagcgagacttcatctc

SEQ ID NO: 282055 - DNA, 20 bp, Artificial Sequence
  Description of Artificial Sequence: Synthetic oligonucleotide
  Target: LAMA2; (-) strand; PAM type: YTN; PAM sequence: CTG
gttgacagagcgagacttca

SEQ ID NO: 282056 - DNA, 20 bp, Artificial Sequence
  Description of Artificial Sequence: Synthetic oligonucleotide
  Target: LAMA2; (-) strand; PAM type: YTN; PAM sequence: CTC
cagcctggttgacagagcga

SEQ ID NO: 282057 - DNA, 20 bp, Artificial Sequence
  Description of Artificial Sequence: Synthetic oligonucleotide
  Target: LAMA2; (-) strand; PAM type: YTN; PAM sequence: CTG
cactccagcctggttgacag

SEQ ID NO: 282058 - DNA, 20 bp, Artificial Sequence
  Description of Artificial Sequence: Synthetic oligonucleotide
  Target: LAMA2; (-) strand; PAM type: YTN; PAM sequence: CTG
cagtgagccaagatcgcacc

SEQ ID NO: 282059 - DNA, 20 bp, Artificial Sequence
  Description of Artificial Sequence: Synthetic oligonucleotide
  Target: LAMA2; (-) strand; PAM type: YTN; PAM sequence: CTG
ggagacagaggctgcagtga

SEQ ID NO: 282060 - DNA, 20 bp, Artificial Sequence
  Description of Artificial Sequence: Synthetic oligonucleotide
  Target: LAMA2; (-) strand; PAM type: YTN; PAM sequence: TTG
aacctgggagacagaggctg

SEQ ID NO: 282061 - DNA, 20 bp, Artificial Sequence
  Description of Artificial Sequence: Synthetic oligonucleotide
  Target: LAMA2; (-) strand; PAM type: YTN; PAM sequence: CTT
gaacctgggagacagaggct

SEQ ID NO: 282062 - DNA, 20 bp, Artificial Sequence
  Description of Artificial Sequence: Synthetic oligonucleotide
  Target: LAMA2; (-) strand; PAM type: YTN; PAM sequence: CTG
taatcccagatatgaggcag

SEQ ID NO: 282063 - DNA, 20 bp, Artificial Sequence
  Description of Artificial Sequence: Synthetic oligonucleotide
  Target: LAMA2; (-) strand; PAM type: YTN; PAM sequence: TTA
gccaggtgtggtggcatgca

SEQ ID NO: 282064 - DNA, 20 bp, Artificial Sequence
  Description of Artificial Sequence: Synthetic oligonucleotide
  Target: LAMA2; (-) strand; PAM type: YTN; PAM sequence: CTC
aaaatgcaaagattagccag

SEQ ID NO: 282065 - DNA, 20 bp, Artificial Sequence
  Description of Artificial Sequence: Synthetic oligonucleotide
  Target: LAMA2; (-) strand; PAM type: YTN; PAM sequence: CTA
ctcaaaatgcaaagattagc

SEQ ID NO: 282066 - DNA, 20 bp, Artificial Sequence
  Description of Artificial Sequence: Synthetic oligonucleotide
  Target: LAMA2; (-) strand; PAM type: YTN; PAM sequence: CTC
tactcaaaatgcaaagatta

SEQ ID NO: 282067 - DNA, 20 bp, Artificial Sequence
  Description of Artificial Sequence: Synthetic oligonucleotide
  Target: LAMA2; (-) strand; PAM type: YTN; PAM sequence: CTG
tctctactcaaaatgcaaag

SEQ ID NO: 282068 - DNA, 20 bp, Artificial Sequence
  Description of Artificial Sequence: Synthetic oligonucleotide
  Target: LAMA2; (-) strand; PAM type: YTN; PAM sequence: CTG
gtcaacatggtgaaaccctg

SEQ ID NO: 282069 - DNA, 20 bp, Artificial Sequence
  Description of Artificial Sequence: Synthetic oligonucleotide
  Target: LAMA2; (-) strand; PAM type: YTN; PAM sequence: TTC
aagaccagcctggtcaacat

SEQ ID NO: 282070 - DNA, 20 bp, Artificial Sequence
  Description of Artificial Sequence: Synthetic oligonucleotide
  Target: LAMA2; (-) strand; PAM type: YTN; PAM sequence: TTG
aggtcaggagttcaagacca

SEQ ID NO: 282071 - DNA, 20 bp, Artificial Sequence
  Description of Artificial Sequence: Synthetic oligonucleotide
  Target: LAMA2; (-) strand; PAM type: YTN; PAM sequence: CTT
gaggtcaggagttcaagacc

SEQ ID NO: 282072 - DNA, 20 bp, Artificial Sequence
  Description of Artificial Sequence: Synthetic oligonucleotide
  Target: LAMA2; (-) strand; PAM type: YTN; PAM sequence: TTG
ggaggccgaggcgggaggat

SEQ ID NO: 282073 - DNA, 20 bp, Artificial Sequence
  Description of Artificial Sequence: Synthetic oligonucleotide
  Target: LAMA2; (-) strand; PAM type: YTN; PAM sequence: TTT
gggaggccgaggcgggagga

SEQ ID NO: 282074 - DNA, 20 bp, Artificial Sequence
  Description of Artificial Sequence: Synthetic oligonucleotide
  Target: LAMA2; (-) strand; PAM type: YTN; PAM sequence: CTT
tgggaggccgaggcgggagg

SEQ ID NO: 282075 - DNA, 20 bp, Artificial Sequence
  Description of Artificial Sequence: Synthetic oligonucleotide
  Target: LAMA2; (-) strand; PAM type: YTN; PAM sequence: CTC
agcactttgggaggccgagg

SEQ ID NO: 282076 - DNA, 20 bp, Artificial Sequence
  Description of Artificial Sequence: Synthetic oligonucleotide
  Target: LAMA2; (-) strand; PAM type: YTN; PAM sequence: CTG
taatctcagcactttgggag

SEQ ID NO: 282077 - DNA, 20 bp, Artificial Sequence
  Description of Artificial Sequence: Synthetic oligonucleotide
  Target: LAMA2; (-) strand; PAM type: YTN; PAM sequence: CTC
acatctgtaatctcagcact

SEQ ID NO: 282078 - DNA, 20 bp, Artificial Sequence
  Description of Artificial Sequence: Synthetic oligonucleotide
  Target: LAMA2; (-) strand; PAM type: YTN; PAM sequence: TTA
gggccgggcacggtggctca

SEQ ID NO: 282079 - DNA, 20 bp, Artificial Sequence
  Description of Artificial Sequence: Synthetic oligonucleotide
  Target: LAMA2; (-) strand; PAM type: YTN; PAM sequence: TTT
agggccgggcacggtggctc

SEQ ID NO: 282080 - DNA, 20 bp, Artificial Sequence
  Description of Artificial Sequence: Synthetic oligonucleotide
  Target: LAMA2; (-) strand; PAM type: YTN; PAM sequence: CTG
aatcagaaataaaatacaag

SEQ ID NO: 282081 - DNA, 20 bp, Artificial Sequence
  Description of Artificial Sequence: Synthetic oligonucleotide
  Target: LAMA2; (-) strand; PAM type: YTN; PAM sequence: TTC
ctgaatcagaaataaaatac

SEQ ID NO: 282082 - DNA, 20 bp, Artificial Sequence
  Description of Artificial Sequence: Synthetic oligonucleotide
  Target: LAMA2; (-) strand; PAM type: YTN; PAM sequence: TTG
attcctgaatcagaaataaa

SEQ ID NO: 282083 - DNA, 20 bp, Artificial Sequence
  Description of Artificial Sequence: Synthetic oligonucleotide
  Target: LAMA2; (-) strand; PAM type: YTN; PAM sequence: TTT
gattcctgaatcagaaataa

SEQ ID NO: 282084 - DNA, 20 bp, Artificial Sequence
  Description of Artificial Sequence: Synthetic oligonucleotide
  Target: LAMA2; (-) strand; PAM type: YTN; PAM sequence: TTT
tgattcctgaatcagaaata

SEQ ID NO: 282085 - DNA, 20 bp, Artificial Sequence
  Description of Artificial Sequence: Synthetic oligonucleotide
  Target: LAMA2; (-) strand; PAM type: YTN; PAM sequence: TTG
tgcattttgattcctgaatc

SEQ ID NO: 282086 - DNA, 20 bp, Artificial Sequence
  Description of Artificial Sequence: Synthetic oligonucleotide
  Target: LAMA2; (-) strand; PAM type: YTN; PAM sequence: TTT
gtgcattttgattcctgaat

SEQ ID NO: 282087 - DNA, 20 bp, Artificial Sequence
  Description of Artificial Sequence: Synthetic oligonucleotide
  Target: LAMA2; (-) strand; PAM type: YTN; PAM sequence: TTT
tgtgcattttgattcctgaa

SEQ ID NO: 282088 - DNA, 20 bp, Artificial Sequence
  Description of Artificial Sequence: Synthetic oligonucleotide
  Target: LAMA2; (-) strand; PAM type: YTN; PAM sequence: TTA
acataaaacccataatatgg

SEQ ID NO: 282089 - DNA, 20 bp, Artificial Sequence
  Description of Artificial Sequence: Synthetic oligonucleotide
  Target: LAMA2; (-) strand; PAM type: YTN; PAM sequence: CTT
aacataaaacccataatatg

SEQ ID NO: 282090 - DNA, 20 bp, Artificial Sequence
  Description of Artificial Sequence: Synthetic oligonucleotide
  Target: LAMA2; (-) strand; PAM type: YTN; PAM sequence: TTC
ttaacataaaacccataata

SEQ ID NO: 282091 - DNA, 20 bp, Artificial Sequence
  Description of Artificial Sequence: Synthetic oligonucleotide
  Target: LAMA2; (-) strand; PAM type: YTN; PAM sequence: TTA
atgatatattcttaacataa

SEQ ID NO: 282092 - DNA, 20 bp, Artificial Sequence
  Description of Artificial Sequence: Synthetic oligonucleotide
  Target: LAMA2; (-) strand; PAM type: YTN; PAM sequence: TTT
aatgatatattcttaacata

SEQ ID NO: 282093 - DNA, 20 bp, Artificial Sequence
  Description of Artificial Sequence: Synthetic oligonucleotide
  Target: LAMA2; (-) strand; PAM type: YTN; PAM sequence: CTC
atatagagagcagccatgtt

SEQ ID NO: 282094 - DNA, 20 bp, Artificial Sequence
  Description of Artificial Sequence: Synthetic oligonucleotide
  Target: LAMA2; (-) strand; PAM type: YTN; PAM sequence: TTG
taatggctcatatagagagc

SEQ ID NO: 282095 - DNA, 20 bp, Artificial Sequence
  Description of Artificial Sequence: Synthetic oligonucleotide
  Target: LAMA2; (-) strand; PAM type: YTN; PAM sequence: TTC
aaatgggagacaagagataa

SEQ ID NO: 282096 - DNA, 20 bp, Artificial Sequence
  Description of Artificial Sequence: Synthetic oligonucleotide
  Target: LAMA2; (-) strand; PAM type: YTN; PAM sequence: CTG
aagagagaaacaggtggcaa

SEQ ID NO: 282097 - DNA, 20 bp, Artificial Sequence
  Description of Artificial Sequence: Synthetic oligonucleotide
  Target: LAMA2; (-) strand; PAM type: YTN; PAM sequence: TTA
ggtaagggtagggagacaga

SEQ ID NO: 282098 - DNA, 20 bp, Artificial Sequence
  Description of Artificial Sequence: Synthetic oligonucleotide
  Target: LAMA2; (-) strand; PAM type: YTN; PAM sequence: CTT
aggtaagggtagggagacag

SEQ ID NO: 282099 - DNA, 20 bp, Artificial Sequence
  Description of Artificial Sequence: Synthetic oligonucleotide
  Target: LAMA2; (-) strand; PAM type: YTN; PAM sequence: TTA
tgaatacttaggtaagggta

SEQ ID NO: 282100 - DNA, 20 bp, Artificial Sequence
  Description of Artificial Sequence: Synthetic oligonucleotide
  Target: LAMA2; (-) strand; PAM type: YTN; PAM sequence: TTG
ggaggaattatgaatactta

SEQ ID NO: 282101 - DNA, 20 bp, Artificial Sequence
  Description of Artificial Sequence: Synthetic oligonucleotide
  Target: LAMA2; (-) strand; PAM type: YTN; PAM sequence: TTT
gggaggaattatgaatactt

SEQ ID NO: 282102 - DNA, 20 bp, Artificial Sequence
  Description of Artificial Sequence: Synthetic oligonucleotide
  Target: LAMA2; (-) strand; PAM type: YTN; PAM sequence: TTG
gaatagtagcatgtttggga

SEQ ID NO: 282103 - DNA, 20 bp, Artificial Sequence
  Description of Artificial Sequence: Synthetic oligonucleotide
  Target: LAMA2; (-) strand; PAM type: YTN; PAM sequence: CTT
ggaatagtagcatgtttggg

SEQ ID NO: 282104 - DNA, 20 bp, Artificial Sequence
  Description of Artificial Sequence: Synthetic oligonucleotide
  Target: LAMA2; (-) strand; PAM type: YTN; PAM sequence: CTG
aaaacatgaaggcttggaat

SEQ ID NO: 282105 - DNA, 20 bp, Artificial Sequence
  Description of Artificial Sequence: Synthetic oligonucleotide
  Target: LAMA2; (-) strand; PAM type: YTN; PAM sequence: TTC
caaggggaagaaataatact

SEQ ID NO: 282106 - DNA, 20 bp, Artificial Sequence
  Description of Artificial Sequence: Synthetic oligonucleotide
  Target: LAMA2; (-) strand; PAM type: YTN; PAM sequence: TTA
ggcaaagaagagaggtgaag

SEQ ID NO: 282107 - DNA, 20 bp, Artificial Sequence
  Description of Artificial Sequence: Synthetic oligonucleotide
  Target: LAMA2; (-) strand; PAM type: YTN; PAM sequence: CTG
gaagaaagcagttaggcaaa

SEQ ID NO: 282108 - DNA, 20 bp, Artificial Sequence
  Description of Artificial Sequence: Synthetic oligonucleotide
  Target: LAMA2; (-) strand; PAM type: YTN; PAM sequence: CTG
aaggtctggaagaaagcagt

SEQ ID NO: 282109 - DNA, 20 bp, Artificial Sequence
  Description of Artificial Sequence: Synthetic oligonucleotide
  Target: LAMA2; (-) strand; PAM type: YTN; PAM sequence: CTA
aatcctgaaggtctggaaga

SEQ ID NO: 282110 - DNA, 20 bp, Artificial Sequence
  Description of Artificial Sequence: Synthetic oligonucleotide
  Target: LAMA2; (-) strand; PAM type: YTN; PAM sequence: TTG
aactaaatcctgaaggtctg

SEQ ID NO: 282111 - DNA, 20 bp, Artificial Sequence
  Description of Artificial Sequence: Synthetic oligonucleotide
  Target: LAMA2; (-) strand; PAM type: YTN; PAM sequence: TTT
gaactaaatcctgaaggtct

SEQ ID NO: 282112 - DNA, 20 bp, Artificial Sequence
  Description of Artificial Sequence: Synthetic oligonucleotide
  Target: LAMA2; (-) strand; PAM type: YTN; PAM sequence: CTG
gaaatgatggcatttgaact

SEQ ID NO: 282113 - DNA, 20 bp, Artificial Sequence
  Description of Artificial Sequence: Synthetic oligonucleotide
  Target: LAMA2; (-) strand; PAM type: YTN; PAM sequence: TTC
ctggaaatgatggcatttga

SEQ ID NO: 282114 - DNA, 20 bp, Artificial Sequence
  Description of Artificial Sequence: Synthetic oligonucleotide
  Target: LAMA2; (-) strand; PAM type: YTN; PAM sequence: TTT
cctggaaatgatggcatttg

SEQ ID NO: 282115 - DNA, 20 bp, Artificial Sequence
  Description of Artificial Sequence: Synthetic oligonucleotide
  Target: LAMA2; (-) strand; PAM type: YTN; PAM sequence: TTA
ggtttcctggaaatgatggc

SEQ ID NO: 282116 - DNA, 20 bp, Artificial Sequence
  Description of Artificial Sequence: Synthetic oligonucleotide
  Target: LAMA2; (-) strand; PAM type: YTN; PAM sequence: CTA
taccagagagggggcatgta

SEQ ID NO: 282117 - DNA, 20 bp, Artificial Sequence
  Description of Artificial Sequence: Synthetic oligonucleotide
  Target: LAMA2; (-) strand; PAM type: YTN; PAM sequence: CTA
tgagaaaactataccagaga

SEQ ID NO: 282118 - DNA, 20 bp, Artificial Sequence
  Description of Artificial Sequence: Synthetic oligonucleotide
  Target: LAMA2; (-) strand; PAM type: YTN; PAM sequence: TTG
acaagcctatgagaaaacta

SEQ ID NO: 282119 - DNA, 20 bp, Artificial Sequence
  Description of Artificial Sequence: Synthetic oligonucleotide
  Target: LAMA2; (-) strand; PAM type: YTN; PAM sequence: TTT
gacaagcctatgagaaaact

SEQ ID NO: 282120 - DNA, 20 bp, Artificial Sequence
  Description of Artificial Sequence: Synthetic oligonucleotide
  Target: LAMA2; (-) strand; PAM type: YTN; PAM sequence: TTG
tggtggtttgacaagcctat

SEQ ID NO: 282121 - DNA, 20 bp, Artificial Sequence
  Description of Artificial Sequence: Synthetic oligonucleotide
  Target: LAMA2; (-) strand; PAM type: YTN; PAM sequence: TTA
gtccatgattgtggtggttt

SEQ ID NO: 282122 - DNA, 20 bp, Artificial Sequence
  Description of Artificial Sequence: Synthetic oligonucleotide
  Target: LAMA2; (-) strand; PAM type: YTN; PAM sequence: TTA
attagtccatgattgtggtg

SEQ ID NO: 282123 - DNA, 20 bp, Artificial Sequence
  Description of Artificial Sequence: Synthetic oligonucleotide
  Target: LAMA2; (-) strand; PAM type: YTN; PAM sequence: TTG
taaaagaagatggaatatta

SEQ ID NO: 282124 - DNA, 20 bp, Artificial Sequence
  Description of Artificial Sequence: Synthetic oligonucleotide
  Target: LAMA2; (-) strand; PAM type: YTN; PAM sequence: TTA
aaaattgtaaaagaagatgg

SEQ ID NO: 282125 - DNA, 20 bp, Artificial Sequence
  Description of Artificial Sequence: Synthetic oligonucleotide
  Target: LAMA2; (-) strand; PAM type: YTN; PAM sequence: TTT
aaaaattgtaaaagaagatg

SEQ ID NO: 282126 - DNA, 20 bp, Artificial Sequence
  Description of Artificial Sequence: Synthetic oligonucleotide
  Target: LAMA2; (-) strand; PAM type: YTN; PAM sequence: TTT
taaaaattgtaaaagaagat

SEQ ID NO: 282127 - DNA, 20 bp, Artificial Sequence
  Description of Artificial Sequence: Synthetic oligonucleotide
  Target: LAMA2; (-) strand; PAM type: YTN; PAM sequence: TTA
tgcatcaataaaaaagtttt

SEQ ID NO: 282128 - DNA, 20 bp, Artificial Sequence
  Description of Artificial Sequence: Synthetic oligonucleotide
  Target: LAMA2; (-) strand; PAM type: YTN; PAM sequence: CTG
ttatgcatcaataaaaaagt

SEQ ID NO: 282129 - DNA, 20 bp, Artificial Sequence
  Description of Artificial Sequence: Synthetic oligonucleotide
  Target: LAMA2; (-) strand; PAM type: YTN; PAM sequence: TTA
tacatctgttatgcatcaat

SEQ ID NO: 282130 - DNA, 20 bp, Artificial Sequence
  Description of Artificial Sequence: Synthetic oligonucleotide
  Target: LAMA2; (-) strand; PAM type: YTN; PAM sequence: TTT
atacatctgttatgcatcaa

SEQ ID NO: 282131 - DNA, 20 bp, Artificial Sequence
  Description of Artificial Sequence: Synthetic oligonucleotide
  Target: LAMA2; (-) strand; PAM type: YTN; PAM sequence: CTC
aagaagatggaatgccaaaa

SEQ ID NO: 282132 - DNA, 20 bp, Artificial Sequence
  Description of Artificial Sequence: Synthetic oligonucleotide
  Target: LAMA2; (-) strand; PAM type: YTN; PAM sequence: TTC
ctcaagaagatggaatgcca

SEQ ID NO: 282133 - DNA, 20 bp, Artificial Sequence
  Description of Artificial Sequence: Synthetic oligonucleotide
  Target: LAMA2; (-) strand; PAM type: YTN; PAM sequence: TTT
cctcaagaagatggaatgcc

SEQ ID NO: 282134 - DNA, 20 bp, Artificial Sequence
  Description of Artificial Sequence: Synthetic oligonucleotide
  Target: LAMA2; (-) strand; PAM type: YTN; PAM sequence: CTT
tcctcaagaagatggaatgc

SEQ ID NO: 282135 - DNA, 20 bp, Artificial Sequence
  Description of Artificial Sequence: Synthetic oligonucleotide
  Target: LAMA2; (-) strand; PAM type: YTN; PAM sequence: TTA
gcaaaaccccatgtctttcc

SEQ ID NO: 282136 - DNA, 20 bp, Artificial Sequence
  Description of Artificial Sequence: Synthetic oligonucleotide
  Target: LAMA2; (-) strand; PAM type: YTN; PAM sequence: CTA
gaaatacacagttagcaaaa

SEQ ID NO: 282137 - DNA, 20 bp, Artificial Sequence
  Description of Artificial Sequence: Synthetic oligonucleotide
  Target: LAMA2; (-) strand; PAM type: YTN; PAM sequence: TTA
tgcatactagaaatacacag

SEQ ID NO: 282138 - DNA, 20 bp, Artificial Sequence
  Description of Artificial Sequence: Synthetic oligonucleotide
  Target: LAMA2; (-) strand; PAM type: YTN; PAM sequence: CTA
ttatgcatactagaaataca

SEQ ID NO: 282139 - DNA, 20 bp, Artificial Sequence
  Description of Artificial Sequence: Synthetic oligonucleotide
  Target: LAMA2; (-) strand; PAM type: YTN; PAM sequence: CTA
gtcactattatgcatactag

SEQ ID NO: 282140 - DNA, 20 bp, Artificial Sequence
  Description of Artificial Sequence: Synthetic oligonucleotide
  Target: LAMA2; (-) strand; PAM type: YTN; PAM sequence: TTG
agctagtcactattatgcat

SEQ ID NO: 282141 - DNA, 20 bp, Artificial Sequence
  Description of Artificial Sequence: Synthetic oligonucleotide
  Target: LAMA2; (-) strand; PAM type: YTN; PAM sequence: TTT
gagctagtcactattatgca

SEQ ID NO: 282142 - DNA, 20 bp, Artificial Sequence
  Description of Artificial Sequence: Synthetic oligonucleotide
  Target: LAMA2; (-) strand; PAM type: YTN; PAM sequence: CTC
atttgagctagtcactatta

SEQ ID NO: 282143 - DNA, 20 bp, Artificial Sequence
  Description of Artificial Sequence: Synthetic oligonucleotide
  Target: LAMA2; (-) strand; PAM type: YTN; PAM sequence: TTC
ctcatttgagctagtcacta

SEQ ID NO: 282144 - DNA, 20 bp, Artificial Sequence
  Description of Artificial Sequence: Synthetic oligonucleotide
  Target: LAMA2; (-) strand; PAM type: YTN; PAM sequence: TTT
cctcatttgagctagtcact

SEQ ID NO: 282145 - DNA, 20 bp, Artificial Sequence
  Description of Artificial Sequence: Synthetic oligonucleotide
  Target: LAMA2; (-) strand; PAM type: YTN; PAM sequence: TTG
taaaaaataagtatttcctc

SEQ ID NO: 282146 - DNA, 20 bp, Artificial Sequence
  Description of Artificial Sequence: Synthetic oligonucleotide
  Target: LAMA2; (-) strand; PAM type: YTN; PAM sequence: TTA
ttgtaaaaaataagtatttc

SEQ ID NO: 282147 - DNA, 20 bp, Artificial Sequence
  Description of Artificial Sequence: Synthetic oligonucleotide
  Target: LAMA2; (-) strand; PAM type: YTN; PAM sequence: TTT
attgtaaaaaataagtattt

SEQ ID NO: 282148 - DNA, 20 bp, Artificial Sequence
  Description of Artificial Sequence: Synthetic oligonucleotide
  Target: LAMA2; (-) strand; PAM type: YTN; PAM sequence: CTA
agataagtaagataagccaa

SEQ ID NO: 282149 - DNA, 20 bp, Artificial Sequence
  Description of Artificial Sequence: Synthetic oligonucleotide
  Target: LAMA2; (-) strand; PAM type: YTN; PAM sequence: TTC
taagataagtaagataagcc

SEQ ID NO: 282150 - DNA, 20 bp, Artificial Sequence
  Description of Artificial Sequence: Synthetic oligonucleotide
  Target: LAMA2; (-) strand; PAM type: YTN; PAM sequence: TTT
ctaagataagtaagataagc

SEQ ID NO: 282151 - DNA, 20 bp, Artificial Sequence
  Description of Artificial Sequence: Synthetic oligonucleotide
  Target: LAMA2; (-) strand; PAM type: YTN; PAM sequence: CTT
tctaagataagtaagataag

SEQ ID NO: 282152 - DNA, 20 bp, Artificial Sequence
  Description of Artificial Sequence: Synthetic oligonucleotide
  Target: LAMA2; (-) strand; PAM type: YTN; PAM sequence: CTC
tttctaagataagtaagata

SEQ ID NO: 282153 - DNA, 20 bp, Artificial Sequence
  Description of Artificial Sequence: Synthetic oligonucleotide
  Target: LAMA2; (-) strand; PAM type: YTN; PAM sequence: TTC
tctttctaagataagtaaga

SEQ ID NO: 282154 - DNA, 20 bp, Artificial Sequence
  Description of Artificial Sequence: Synthetic oligonucleotide
  Target: LAMA2; (-) strand; PAM type: YTN; PAM sequence: CTT
ctctttctaagataagtaag

SEQ ID NO: 282155 - DNA, 20 bp, Artificial Sequence
  Description of Artificial Sequence: Synthetic oligonucleotide
  Target: LAMA2; (-) strand; PAM type: YTN; PAM sequence: CTC
ttctctttctaagataagta

SEQ ID NO: 282156 - DNA, 20 bp, Artificial Sequence
  Description of Artificial Sequence: Synthetic oligonucleotide
  Target: LAMA2; (-) strand; PAM type: YTN; PAM sequence: TTA
aaacctcttctctttctaag

SEQ ID NO: 282157 - DNA, 20 bp, Artificial Sequence
  Description of Artificial Sequence: Synthetic oligonucleotide
  Target: LAMA2; (-) strand; PAM type: YTN; PAM sequence: TTT
aaaacctcttctctttctaa

SEQ ID NO: 282158 - DNA, 20 bp, Artificial Sequence
  Description of Artificial Sequence: Synthetic oligonucleotide
  Target: LAMA2; (-) strand; PAM type: YTN; PAM sequence: TTT
taaaacctcttctctttcta

SEQ ID NO: 282159 - DNA, 20 bp, Artificial Sequence
  Description of Artificial Sequence: Synthetic oligonucleotide
  Target: LAMA2; (-) strand; PAM type: YTN; PAM sequence: CTG
agaccaaaacatgccaaata

SEQ ID NO: 282160 - DNA, 20 bp, Artificial Sequence
  Description of Artificial Sequence: Synthetic oligonucleotide
  Target: LAMA2; (-) strand; PAM type: YTN; PAM sequence: CTA
ctgagaccaaaacatgccaa

SEQ ID NO: 282161 - DNA, 20 bp, Artificial Sequence
  Description of Artificial Sequence: Synthetic oligonucleotide
  Target: LAMA2; (-) strand; PAM type: YTN; PAM sequence: TTC
tactgagaccaaaacatgcc

SEQ ID NO: 282162 - DNA, 20 bp, Artificial Sequence
  Description of Artificial Sequence: Synthetic oligonucleotide
  Target: LAMA2; (-) strand; PAM type: YTN; PAM sequence: CTT
ctactgagaccaaaacatgc

SEQ ID NO: 282163 - DNA, 20 bp, Artificial Sequence
  Description of Artificial Sequence: Synthetic oligonucleotide
  Target: LAMA2; (-) strand; PAM type: YTN; PAM sequence: TTC
atatcagcttctactgagac

SEQ ID NO: 282164 - DNA, 20 bp, Artificial Sequence
  Description of Artificial Sequence: Synthetic oligonucleotide
  Target: LAMA2; (-) strand; PAM type: YTN; PAM sequence: TTT
catatcagcttctactgaga

SEQ ID NO: 282165 - DNA, 20 bp, Artificial Sequence
  Description of Artificial Sequence: Synthetic oligonucleotide
  Target: LAMA2; (-) strand; PAM type: YTN; PAM sequence: TTG
taatttcatatcagcttcta

SEQ ID NO: 282166 - DNA, 20 bp, Artificial Sequence
  Description of Artificial Sequence: Synthetic oligonucleotide
  Target: LAMA2; (-) strand; PAM type: YTN; PAM sequence: CTT
gtaatttcatatcagcttct

SEQ ID NO: 282167 - DNA, 20 bp, Artificial Sequence
  Description of Artificial Sequence: Synthetic oligonucleotide
  Target: LAMA2; (-) strand; PAM type: YTN; PAM sequence: TTA
taatcgagatagaacttgta

SEQ ID NO: 282168 - DNA, 20 bp, Artificial Sequence
  Description of Artificial Sequence: Synthetic oligonucleotide
  Target: LAMA2; (-) strand; PAM type: YTN; PAM sequence: CTT
ataatcgagatagaacttgt

SEQ ID NO: 282169 - DNA, 20 bp, Artificial Sequence
  Description of Artificial Sequence: Synthetic oligonucleotide
  Target: LAMA2; (-) strand; PAM type: YTN; PAM sequence: TTA
cttataatcgagatagaact

SEQ ID NO: 282170 - DNA, 20 bp, Artificial Sequence
  Description of Artificial Sequence: Synthetic oligonucleotide
  Target: LAMA2; (-) strand; PAM type: YTN; PAM sequence: TTT
acttataatcgagatagaac

SEQ ID NO: 282171 - DNA, 20 bp, Artificial Sequence
  Description of Artificial Sequence: Synthetic oligonucleotide
  Target: LAMA2; (-) strand; PAM type: YTN; PAM sequence: TTT
tacttataatcgagatagaa

SEQ ID NO: 282172 - DNA, 20 bp, Artificial Sequence
  Description of Artificial Sequence: Synthetic oligonucleotide
  Target: LAMA2; (-) strand; PAM type: YTN; PAM sequence: TTA
aaattttacttataatcgag

SEQ ID NO: 282173 - DNA, 20 bp, Artificial Sequence
  Description of Artificial Sequence: Synthetic oligonucleotide
  Target: LAMA2; (-) strand; PAM type: YTN; PAM sequence: CTA
ttaaaattttacttataatc

SEQ ID NO: 282174 - DNA, 20 bp, Artificial Sequence
  Description of Artificial Sequence: Synthetic oligonucleotide
  Target: LAMA2; (-) strand; PAM type: YTN; PAM sequence: TTG
tactattaaaattttactta

SEQ ID NO: 282175 - DNA, 20 bp, Artificial Sequence
  Description of Artificial Sequence: Synthetic oligonucleotide
  Target: LAMA2; (-) strand; PAM type: YTN; PAM sequence: CTG
aagaattgtactattaaaat

SEQ ID NO: 282176 - DNA, 20 bp, Artificial Sequence
  Description of Artificial Sequence: Synthetic oligonucleotide
  Target: LAMA2; (-) strand; PAM type: YTN; PAM sequence: CTG
taatacacagcctgaagaat

SEQ ID NO: 282177 - DNA, 20 bp, Artificial Sequence
  Description of Artificial Sequence: Synthetic oligonucleotide
  Target: LAMA2; (-) strand; PAM type: YTN; PAM sequence: TTC
acctgtaatacacagcctga

SEQ ID NO: 282178 - DNA, 20 bp, Artificial Sequence
  Description of Artificial Sequence: Synthetic oligonucleotide
  Target: LAMA2; (-) strand; PAM type: YTN; PAM sequence: TTT
cacctgtaatacacagcctg

SEQ ID NO: 282179 - DNA, 20 bp, Artificial Sequence
  Description of Artificial Sequence: Synthetic oligonucleotide
  Target: LAMA2; (-) strand; PAM type: YTN; PAM sequence: TTA
tttcacctgtaatacacagc

SEQ ID NO: 282180 - DNA, 20 bp, Artificial Sequence
  Description of Artificial Sequence: Synthetic oligonucleotide
  Target: LAMA2; (-) strand; PAM type: YTN; PAM sequence: TTT
atttcacctgtaatacacag

SEQ ID NO: 282181 - DNA, 20 bp, Artificial Sequence
  Description of Artificial Sequence: Synthetic oligonucleotide
  Target: LAMA2; (-) strand; PAM type: YTN; PAM sequence: TTT
tatttcacctgtaatacaca

SEQ ID NO: 282182 - DNA, 20 bp, Artificial Sequence
  Description of Artificial Sequence: Synthetic oligonucleotide
  Target: LAMA2; (-) strand; PAM type: YTN; PAM sequence: TTA
tgtgtgtagggagttttatt

SEQ ID NO: 282183 - DNA, 20 bp, Artificial Sequence
  Description of Artificial Sequence: Synthetic oligonucleotide
  Target: LAMA2; (-) strand; PAM type: YTN; PAM sequence: CTG
agcagaattatgtgtgtagg

SEQ ID NO: 282184 - DNA, 20 bp, Artificial Sequence
  Description of Artificial Sequence: Synthetic oligonucleotide
  Target: LAMA2; (-) strand; PAM type: YTN; PAM sequence: CTG
ctgagcagaattatgtgtgt

SEQ ID NO: 282185 - DNA, 20 bp, Artificial Sequence
  Description of Artificial Sequence: Synthetic oligonucleotide
  Target: LAMA2; (-) strand; PAM type: YTN; PAM sequence: TTG
taataagaggtacctgctga

SEQ ID NO: 282186 - DNA, 20 bp, Artificial Sequence
  Description of Artificial Sequence: Synthetic oligonucleotide
  Target: LAMA2; (-) strand; PAM type: YTN; PAM sequence: TTC
agattgtaataagaggtacc

SEQ ID NO: 282187 - DNA, 20 bp, Artificial Sequence
  Description of Artificial Sequence: Synthetic oligonucleotide
  Target: LAMA2; (-) strand; PAM type: YTN; PAM sequence: CTT
cagattgtaataagaggtac

SEQ ID NO: 282188 - DNA, 20 bp, Artificial Sequence
  Description of Artificial Sequence: Synthetic oligonucleotide
  Target: LAMA2; (-) strand; PAM type: YTN; PAM sequence: TTC
ttcagattgtaataagaggt

SEQ ID NO: 282189 - DNA, 20 bp, Artificial Sequence
  Description of Artificial Sequence: Synthetic oligonucleotide
  Target: LAMA2; (-) strand; PAM type: YTN; PAM sequence: TTA
cagtcattcttcagattgta

SEQ ID NO: 282190 - DNA, 20 bp, Artificial Sequence
  Description of Artificial Sequence: Synthetic oligonucleotide
  Target: LAMA2; (-) strand; PAM type: YTN; PAM sequence: CTT
acagtcattcttcagattgt

SEQ ID NO: 282191 - DNA, 20 bp, Artificial Sequence
  Description of Artificial Sequence: Synthetic oligonucleotide
  Target: LAMA2; (-) strand; PAM type: YTN; PAM sequence: TTC
ttacagtcattcttcagatt

SEQ ID NO: 282192 - DNA, 20 bp, Artificial Sequence
  Description of Artificial Sequence: Synthetic oligonucleotide
  Target: LAMA2; (-) strand; PAM type: YTN; PAM sequence: CTT
cttacagtcattcttcagat

SEQ ID NO: 282193 - DNA, 20 bp, Artificial Sequence
  Description of Artificial Sequence: Synthetic oligonucleotide
  Target: LAMA2; (-) strand; PAM type: YTN; PAM sequence: TTG
gcttcttacagtcattcttc

SEQ ID NO: 282194 - DNA, 20 bp, Artificial Sequence
  Description of Artificial Sequence: Synthetic oligonucleotide
  Target: LAMA2; (-) strand; PAM type: YTN; PAM sequence: TTT
ggcttcttacagtcattctt

SEQ ID NO: 282195 - DNA, 20 bp, Artificial Sequence
  Description of Artificial Sequence: Synthetic oligonucleotide
  Target: LAMA2; (-) strand; PAM type: YTN; PAM sequence: TTT
tggcttcttacagtcattct

SEQ ID NO: 282196 - DNA, 20 bp, Artificial Sequence
  Description of Artificial Sequence: Synthetic oligonucleotide
  Target: LAMA2; (-) strand; PAM type: YTN; PAM sequence: TTG
tccaataggaacacaggttt

SEQ ID NO: 282197 - DNA, 20 bp, Artificial Sequence
  Description of Artificial Sequence: Synthetic oligonucleotide
  Target: LAMA2; (-) strand; PAM type: YTN; PAM sequence: TTT
gtccaataggaacacaggtt

SEQ ID NO: 282198 - DNA, 20 bp, Artificial Sequence
  Description of Artificial Sequence: Synthetic oligonucleotide
  Target: LAMA2; (-) strand; PAM type: YTN; PAM sequence: TTG
agtccatttgtccaatagga

SEQ ID NO: 282199 - DNA, 20 bp, Artificial Sequence
  Description of Artificial Sequence: Synthetic oligonucleotide
  Target: LAMA2; (-) strand; PAM type: YTN; PAM sequence: CTG
ggcaagggtatgagatagga

SEQ ID NO: 282200 - DNA, 20 bp, Artificial Sequence
  Description of Artificial Sequence: Synthetic oligonucleotide
  Target: LAMA2; (-) strand; PAM type: YTN; PAM sequence: TTC
ccagccctgggcaagggtat

SEQ ID NO: 282201 - DNA, 20 bp, Artificial Sequence
  Description of Artificial Sequence: Synthetic oligonucleotide
  Target: LAMA2; (-) strand; PAM type: YTN; PAM sequence: CTA
ttcccagccctgggcaaggg

SEQ ID NO: 282202 - DNA, 20 bp, Artificial Sequence
  Description of Artificial Sequence: Synthetic oligonucleotide
  Target: LAMA2; (-) strand; PAM type: YTN; PAM sequence: CTC
cctattcccagccctgggca

SEQ ID NO: 282203 - DNA, 20 bp, Artificial Sequence
  Description of Artificial Sequence: Synthetic oligonucleotide
  Target: LAMA2; (-) strand; PAM type: YTN; PAM sequence: TTC
ctccctattcccagccctgg

SEQ ID NO: 282204 - DNA, 20 bp, Artificial Sequence
  Description of Artificial Sequence: Synthetic oligonucleotide
  Target: LAMA2; (-) strand; PAM type: YTN; PAM sequence: CTT
cctccctattcccagccctg

SEQ ID NO: 282205 - DNA, 20 bp, Artificial Sequence
  Description of Artificial Sequence: Synthetic oligonucleotide
  Target: LAMA2; (-) strand; PAM type: YTN; PAM sequence: CTC
ccttcctccctattcccagc

SEQ ID NO: 282206 - DNA, 20 bp, Artificial Sequence
  Description of Artificial Sequence: Synthetic oligonucleotide
  Target: LAMA2; (-) strand; PAM type: YTN; PAM sequence: CTC
gctcccttcctccctattcc

SEQ ID NO: 282207 - DNA, 20 bp, Artificial Sequence
  Description of Artificial Sequence: Synthetic oligonucleotide
  Target: LAMA2; (-) strand; PAM type: YTN; PAM sequence: TTG
catgaatcacctcgctccct

SEQ ID NO: 282208 - DNA, 20 bp, Artificial Sequence
  Description of Artificial Sequence: Synthetic oligonucleotide
  Target: LAMA2; (-) strand; PAM type: YTN; PAM sequence: CTT
gcatgaatcacctcgctccc

SEQ ID NO: 282209 - DNA, 20 bp, Artificial Sequence
  Description of Artificial Sequence: Synthetic oligonucleotide
  Target: LAMA2; (-) strand; PAM type: YTN; PAM sequence: TTG
cacttgcatgaatcacctcg

SEQ ID NO: 282210 - DNA, 20 bp, Artificial Sequence
  Description of Artificial Sequence: Synthetic oligonucleotide
  Target: LAMA2; (-) strand; PAM type: YTN; PAM sequence: CTT
gcacttgcatgaatcacctc

SEQ ID NO: 282211 - DNA, 20 bp, Artificial Sequence
  Description of Artificial Sequence: Synthetic oligonucleotide
  Target: LAMA2; (-) strand; PAM type: YTN; PAM sequence: TTC
ttgcacttgcatgaatcacc

SEQ ID NO: 282212 - DNA, 20 bp, Artificial Sequence
  Description of Artificial Sequence: Synthetic oligonucleotide
  Target: LAMA2; (-) strand; PAM type: YTN; PAM sequence: TTG
gttcttgcacttgcatgaat

SEQ ID NO: 282213 - DNA, 20 bp, Artificial Sequence
  Description of Artificial Sequence: Synthetic oligonucleotide
  Target: LAMA2; (-) strand; PAM type: YTN; PAM sequence: TTA
aagacaggattggttcttgc

SEQ ID NO: 282214 - DNA, 20 bp, Artificial Sequence
  Description of Artificial Sequence: Synthetic oligonucleotide
  Target: LAMA2; (-) strand; PAM type: YTN; PAM sequence: CTT
aaagacaggattggttcttg

SEQ ID NO: 282215 - DNA, 20 bp, Artificial Sequence
  Description of Artificial Sequence: Synthetic oligonucleotide
  Target: LAMA2; (-) strand; PAM type: YTN; PAM sequence: TTA
aaatcttaaagacaggattg

SEQ ID NO: 282216 - DNA, 20 bp, Artificial Sequence
  Description of Artificial Sequence: Synthetic oligonucleotide
  Target: LAMA2; (-) strand; PAM type: YTN; PAM sequence: TTA
ttaaaatcttaaagacagga

SEQ ID NO: 282217 - DNA, 20 bp, Artificial Sequence
  Description of Artificial Sequence: Synthetic oligonucleotide
  Target: LAMA2; (-) strand; PAM type: YTN; PAM sequence: CTG
gtattattaaaatcttaaag

SEQ ID NO: 282218 - DNA, 20 bp, Artificial Sequence
  Description of Artificial Sequence: Synthetic oligonucleotide
  Target: LAMA2; (-) strand; PAM type: YTN; PAM sequence: TTG
tggggaaatagaggcgaggg

SEQ ID NO: 282219 - DNA, 20 bp, Artificial Sequence
  Description of Artificial Sequence: Synthetic oligonucleotide
  Target: LAMA2; (-) strand; PAM type: YTN; PAM sequence: TTT
gtggggaaatagaggcgagg

SEQ ID NO: 282220 - DNA, 20 bp, Artificial Sequence
  Description of Artificial Sequence: Synthetic oligonucleotide
  Target: LAMA2; (-) strand; PAM type: YTN; PAM sequence: TTA
taataccagtgtttgtgggg

SEQ ID NO: 282221 - DNA, 20 bp, Artificial Sequence
  Description of Artificial Sequence: Synthetic oligonucleotide
  Target: LAMA2; (-) strand; PAM type: YTN; PAM sequence: TTT
ataataccagtgtttgtggg

SEQ ID NO: 282222 - DNA, 20 bp, Artificial Sequence
  Description of Artificial Sequence: Synthetic oligonucleotide
  Target: LAMA2; (-) strand; PAM type: YTN; PAM sequence: TTT
tataataccagtgtttgtgg

SEQ ID NO: 282223 - DNA, 20 bp, Artificial Sequence
  Description of Artificial Sequence: Synthetic oligonucleotide
  Target: LAMA2; (-) strand; PAM type: YTN; PAM sequence: TTT
ttataataccagtgtttgtg

SEQ ID NO: 282224 - DNA, 20 bp, Artificial Sequence
  Description of Artificial Sequence: Synthetic oligonucleotide
  Target: LAMA2; (-) strand; PAM type: YTN; PAM sequence: TTC
atttttataataccagtgtt

SEQ ID NO: 282225 - DNA, 20 bp, Artificial Sequence
  Description of Artificial Sequence: Synthetic oligonucleotide
  Target: LAMA2; (-) strand; PAM type: YTN; PAM sequence: CTT
catttttataataccagtgt

SEQ ID NO: 282226 - DNA, 20 bp, Artificial Sequence
  Description of Artificial Sequence: Synthetic oligonucleotide
  Target: LAMA2; (-) strand; PAM type: YTN; PAM sequence: TTC
ttcatttttataataccagt

SEQ ID NO: 282227 - DNA, 20 bp, Artificial Sequence
  Description of Artificial Sequence: Synthetic oligonucleotide
  Target: LAMA2; (-) strand; PAM type: YTN; PAM sequence: TTT
cttcatttttataataccag

SEQ ID NO: 282228 - DNA, 20 bp, Artificial Sequence
  Description of Artificial Sequence: Synthetic oligonucleotide
  Target: LAMA2; (-) strand; PAM type: YTN; PAM sequence: CTT
tcttcatttttataatacca

SEQ ID NO: 282229 - DNA, 20 bp, Artificial Sequence
  Description of Artificial Sequence: Synthetic oligonucleotide
  Target: LAMA2; (-) strand; PAM type: YTN; PAM sequence: TTC
tttcttcatttttataatac

SEQ ID NO: 282230 - DNA, 20 bp, Artificial Sequence
  Description of Artificial Sequence: Synthetic oligonucleotide
  Target: LAMA2; (-) strand; PAM type: YTN; PAM sequence: CTG
aaaataaaattctttcttca

SEQ ID NO: 282231 - DNA, 20 bp, Artificial Sequence
  Description of Artificial Sequence: Synthetic oligonucleotide
  Target: LAMA2; (-) strand; PAM type: YTN; PAM sequence: TTG
gaaaaaaaatggctgaaaat

SEQ ID NO: 282232 - DNA, 20 bp, Artificial Sequence
  Description of Artificial Sequence: Synthetic oligonucleotide
  Target: LAMA2; (-) strand; PAM type: YTN; PAM sequence: CTT
ggaaaaaaaatggctgaaaa

SEQ ID NO: 282233 - DNA, 20 bp, Artificial Sequence
  Description of Artificial Sequence: Synthetic oligonucleotide
  Target: LAMA2; (-) strand; PAM type: YTN; PAM sequence: CTC
ttggaaaaaaaatggctgaa

SEQ ID NO: 282234 - DNA, 20 bp, Artificial Sequence
  Description of Artificial Sequence: Synthetic oligonucleotide
  Target: LAMA2; (-) strand; PAM type: YTN; PAM sequence: TTC
tcttggaaaaaaaatggctg

SEQ ID NO: 282235 - DNA, 20 bp, Artificial Sequence
  Description of Artificial Sequence: Synthetic oligonucleotide
  Target: LAMA2; (-) strand; PAM type: YTN; PAM sequence: TTT
ctcttggaaaaaaaatggct

SEQ ID NO: 282236 - DNA, 20 bp, Artificial Sequence
  Description of Artificial Sequence: Synthetic oligonucleotide
  Target: LAMA2; (-) strand; PAM type: YTN; PAM sequence: TTT
tctcttggaaaaaaaatggc

SEQ ID NO: 282237 - DNA, 20 bp, Artificial Sequence
  Description of Artificial Sequence: Synthetic oligonucleotide
  Target: LAMA2; (-) strand; PAM type: YTN; PAM sequence: TTT
ttctcttggaaaaaaaatgg

SEQ ID NO: 282238 - DNA, 20 bp, Artificial Sequence
  Description of Artificial Sequence: Synthetic oligonucleotide
  Target: LAMA2; (-) strand; PAM type: YTN; PAM sequence: CTT
tttctcttggaaaaaaaatg

SEQ ID NO: 282239 - DNA, 20 bp, Artificial Sequence
  Description of Artificial Sequence: Synthetic oligonucleotide
  Target: LAMA2; (-) strand; PAM type: YTN; PAM sequence: TTC
tttttctcttggaaaaaaaa

SEQ ID NO: 282240 - DNA, 20 bp, Artificial Sequence
  Description of Artificial Sequence: Synthetic oligonucleotide
  Target: LAMA2; (-) strand; PAM type: YTN; PAM sequence: TTT
ctttttctcttggaaaaaaa

SEQ ID NO: 282241 - DNA, 20 bp, Artificial Sequence
  Description of Artificial Sequence: Synthetic oligonucleotide
  Target: LAMA2; (-) strand; PAM type: YTN; PAM sequence: TTA
gatttctttttctcttggaa

SEQ ID NO: 282242 - DNA, 20 bp, Artificial Sequence
  Description of Artificial Sequence: Synthetic oligonucleotide
  Target: LAMA2; (-) strand; PAM type: YTN; PAM sequence: TTT
agatttctttttctcttgga

SEQ ID NO: 282243 - DNA, 20 bp, Artificial Sequence
  Description of Artificial Sequence: Synthetic oligonucleotide
  Target: LAMA2; (-) strand; PAM type: YTN; PAM sequence: CTT
tagatttctttttctcttgg

SEQ ID NO: 282244 - DNA, 20 bp, Artificial Sequence
  Description of Artificial Sequence: Synthetic oligonucleotide
  Target: LAMA2; (-) strand; PAM type: YTN; PAM sequence: TTG
tctttagatttctttttctc

SEQ ID NO: 282245 - DNA, 20 bp, Artificial Sequence
  Description of Artificial Sequence: Synthetic oligonucleotide
  Target: LAMA2; (-) strand; PAM type: YTN; PAM sequence: CTT
gtctttagatttctttttct

SEQ ID NO: 282246 - DNA, 20 bp, Artificial Sequence
  Description of Artificial Sequence: Synthetic oligonucleotide
  Target: LAMA2; (-) strand; PAM type: YTN; PAM sequence: CTA
caatgcttgtctttagattt

SEQ ID NO: 282247 - DNA, 20 bp, Artificial Sequence
  Description of Artificial Sequence: Synthetic oligonucleotide
  Target: LAMA2; (-) strand; PAM type: YTN; PAM sequence: TTC
ctacaatgcttgtctttaga

SEQ ID NO: 282248 - DNA, 20 bp, Artificial Sequence
  Description of Artificial Sequence: Synthetic oligonucleotide
  Target: LAMA2; (-) strand; PAM type: YTN; PAM sequence: CTT
cctacaatgcttgtctttag

SEQ ID NO: 282249 - DNA, 20 bp, Artificial Sequence
  Description of Artificial Sequence: Synthetic oligonucleotide
  Target: LAMA2; (-) strand; PAM type: YTN; PAM sequence: CTA
acccttcctacaatgcttgt

SEQ ID NO: 282250 - DNA, 20 bp, Artificial Sequence
  Description of Artificial Sequence: Synthetic oligonucleotide
  Target: LAMA2; (-) strand; PAM type: YTN; PAM sequence: CTC
ctaacccttcctacaatgct

SEQ ID NO: 282251 - DNA, 20 bp, Artificial Sequence
  Description of Artificial Sequence: Synthetic oligonucleotide
  Target: LAMA2; (-) strand; PAM type: YTN; PAM sequence: CTG
tctcctaacccttcctacaa

SEQ ID NO: 282252 - DNA, 20 bp, Artificial Sequence
  Description of Artificial Sequence: Synthetic oligonucleotide
  Target: LAMA2; (-) strand; PAM type: YTN; PAM sequence: TTC
tgtctcctaacccttcctac

SEQ ID NO: 282253 - DNA, 20 bp, Artificial Sequence
  Description of Artificial Sequence: Synthetic oligonucleotide
  Target: LAMA2; (-) strand; PAM type: YTN; PAM sequence: TTT
ctgtctcctaacccttccta

SEQ ID NO: 282254 - DNA, 20 bp, Artificial Sequence
  Description of Artificial Sequence: Synthetic oligonucleotide
  Target: LAMA2; (-) strand; PAM type: YTN; PAM sequence: CTA
atgaacatttctgtctccta

SEQ ID NO: 282255 - DNA, 20 bp, Artificial Sequence
  Description of Artificial Sequence: Synthetic oligonucleotide
  Target: LAMA2; (-) strand; PAM type: YTN; PAM sequence: TTA
aactaatgaacatttctgtc

SEQ ID NO: 282256 - DNA, 20 bp, Artificial Sequence
  Description of Artificial Sequence: Synthetic oligonucleotide
  Target: LAMA2; (-) strand; PAM type: YTN; PAM sequence: TTT
aaactaatgaacatttctgt

SEQ ID NO: 282257 - DNA, 20 bp, Artificial Sequence
  Description of Artificial Sequence: Synthetic oligonucleotide
  Target: LAMA2; (-) strand; PAM type: YTN; PAM sequence: CTA
caaaaaaaataaatttaaac

SEQ ID NO: 282258 - DNA, 20 bp, Artificial Sequence
  Description of Artificial Sequence: Synthetic oligonucleotide
  Target: LAMA2; (-) strand; PAM type: YTN; PAM sequence: CTG
aactacaaaaaaaataaatt

SEQ ID NO: 282259 - DNA, 20 bp, Artificial Sequence
  Description of Artificial Sequence: Synthetic oligonucleotide
  Target: LAMA2; (-) strand; PAM type: YTN; PAM sequence: CTA
cctgaactacaaaaaaaata

SEQ ID NO: 282260 - DNA, 20 bp, Artificial Sequence
  Description of Artificial Sequence: Synthetic oligonucleotide
  Target: LAMA2; (-) strand; PAM type: YTN; PAM sequence: TTA
aataatgtactacctgaact

SEQ ID NO: 282261 - DNA, 20 bp, Artificial Sequence
  Description of Artificial Sequence: Synthetic oligonucleotide
  Target: LAMA2; (-) strand; PAM type: YTN; PAM sequence: TTT
aaataatgtactacctgaac

SEQ ID NO: 282262 - DNA, 20 bp, Artificial Sequence
  Description of Artificial Sequence: Synthetic oligonucleotide
  Target: LAMA2; (-) strand; PAM type: YTN; PAM sequence: CTT
taaataatgtactacctgaa

SEQ ID NO: 282263 - DNA, 20 bp, Artificial Sequence
  Description of Artificial Sequence: Synthetic oligonucleotide
  Target: LAMA2; (-) strand; PAM type: YTN; PAM sequence: TTA
ctttaaataatgtactacct

SEQ ID NO: 282264 - DNA, 20 bp, Artificial Sequence
  Description of Artificial Sequence: Synthetic oligonucleotide
  Target: LAMA2; (-) strand; PAM type: YTN; PAM sequence: TTC
attactttaaataatgtact

SEQ ID NO: 282265 - DNA, 20 bp, Artificial Sequence
  Description of Artificial Sequence: Synthetic oligonucleotide
  Target: LAMA2; (-) strand; PAM type: YTN; PAM sequence: TTT
cattactttaaataatgtac

SEQ ID NO: 282266 - DNA, 20 bp, Artificial Sequence
  Description of Artificial Sequence: Synthetic oligonucleotide
  Target: LAMA2; (-) strand; PAM type: YTN; PAM sequence: TTT
tcattactttaaataatgta

SEQ ID NO: 282267 - DNA, 20 bp, Artificial Sequence
  Description of Artificial Sequence: Synthetic oligonucleotide
  Target: LAMA2; (-) strand; PAM type: YTN; PAM sequence: TTG
tgggttttcattactttaaa

SEQ ID NO: 282268 - DNA, 20 bp, Artificial Sequence
  Description of Artificial Sequence: Synthetic oligonucleotide
  Target: LAMA2; (-) strand; PAM type: YTN; PAM sequence: TTT
gtgggttttcattactttaa

SEQ ID NO: 282269 - DNA, 20 bp, Artificial Sequence
  Description of Artificial Sequence: Synthetic oligonucleotide
  Target: LAMA2; (-) strand; PAM type: YTN; PAM sequence: TTG
agtagtttgtgggttttcat

SEQ ID NO: 282270 - DNA, 20 bp, Artificial Sequence
  Description of Artificial Sequence: Synthetic oligonucleotide
  Target: LAMA2; (-) strand; PAM type: YTN; PAM sequence: CTT
gagtagtttgtgggttttca

SEQ ID NO: 282271 - DNA, 20 bp, Artificial Sequence
  Description of Artificial Sequence: Synthetic oligonucleotide
  Target: LAMA2; (-) strand; PAM type: YTN; PAM sequence: TTA
cttgagtagtttgtgggttt

SEQ ID NO: 282272 - DNA, 20 bp, Artificial Sequence
  Description of Artificial Sequence: Synthetic oligonucleotide
  Target: LAMA2; (-) strand; PAM type: YTN; PAM sequence: TTA
ttacttgagtagtttgtggg

SEQ ID NO: 282273 - DNA, 20 bp, Artificial Sequence
  Description of Artificial Sequence: Synthetic oligonucleotide
  Target: LAMA2; (-) strand; PAM type: YTN; PAM sequence: CTA
gaggaattattacttgagta

SEQ ID NO: 282274 - DNA, 20 bp, Artificial Sequence
  Description of Artificial Sequence: Synthetic oligonucleotide
  Target: LAMA2; (-) strand; PAM type: YTN; PAM sequence: TTC
tagaggaattattacttgag

SEQ ID NO: 282275 - DNA, 20 bp, Artificial Sequence
  Description of Artificial Sequence: Synthetic oligonucleotide
  Target: LAMA2; (-) strand; PAM type: YTN; PAM sequence: TTT
ctagaggaattattacttga

SEQ ID NO: 282276 - DNA, 20 bp, Artificial Sequence
  Description of Artificial Sequence: Synthetic oligonucleotide
  Target: LAMA2; (-) strand; PAM type: YTN; PAM sequence: TTT
tctagaggaattattacttg

SEQ ID NO: 282277 - DNA, 20 bp, Artificial Sequence
  Description of Artificial Sequence: Synthetic oligonucleotide
  Target: LAMA2; (-) strand; PAM type: YTN; PAM sequence: TTG
gttttctagaggaattatta

SEQ ID NO: 282278 - DNA, 20 bp, Artificial Sequence
  Description of Artificial Sequence: Synthetic oligonucleotide
  Target: LAMA2; (-) strand; PAM type: YTN; PAM sequence: CTT
ggttttctagaggaattatt

SEQ ID NO: 282279 - DNA, 20 bp, Artificial Sequence
  Description of Artificial Sequence: Synthetic oligonucleotide
  Target: LAMA2; (-) strand; PAM type: YTN; PAM sequence: TTG
gcttggttttctagaggaat

SEQ ID NO: 282280 - DNA, 20 bp, Artificial Sequence
  Description of Artificial Sequence: Synthetic oligonucleotide
  Target: LAMA2; (-) strand; PAM type: YTN; PAM sequence: CTT
ggcttggttttctagaggaa

SEQ ID NO: 282281 - DNA, 20 bp, Artificial Sequence
  Description of Artificial Sequence: Synthetic oligonucleotide
  Target: LAMA2; (-) strand; PAM type: YTN; PAM sequence: CTC
cgtcatagccttggcttggt

SEQ ID NO: 282282 - DNA, 20 bp, Artificial Sequence
  Description of Artificial Sequence: Synthetic oligonucleotide
  Target: LAMA2; (-) strand; PAM type: YTN; PAM sequence: TTC
ccatctccgtcatagccttg

SEQ ID NO: 282283 - DNA, 20 bp, Artificial Sequence
  Description of Artificial Sequence: Synthetic oligonucleotide
  Target: LAMA2; (-) strand; PAM type: YTN; PAM sequence: TTG
gccacaaatcagagaaatgt

SEQ ID NO: 282284 - DNA, 20 bp, Artificial Sequence
  Description of Artificial Sequence: Synthetic oligonucleotide
  Target: LAMA2; (-) strand; PAM type: YTN; PAM sequence: CTC
cgtaattggccacaaatcag

SEQ ID NO: 282285 - DNA, 20 bp, Artificial Sequence
  Description of Artificial Sequence: Synthetic oligonucleotide
  Target: LAMA2; (-) strand; PAM type: YTN; PAM sequence: TTA
taacctccgtaattggccac

SEQ ID NO: 282286 - DNA, 20 bp, Artificial Sequence
  Description of Artificial Sequence: Synthetic oligonucleotide
  Target: LAMA2; (-) strand; PAM type: YTN; PAM sequence: TTT
ataacctccgtaattggcca

SEQ ID NO: 282287 - DNA, 20 bp, Artificial Sequence
  Description of Artificial Sequence: Synthetic oligonucleotide
  Target: LAMA2; (-) strand; PAM type: YTN; PAM sequence: TTT
tataacctccgtaattggcc

SEQ ID NO: 282288 - DNA, 20 bp, Artificial Sequence
  Description of Artificial Sequence: Synthetic oligonucleotide
  Target: LAMA2; (-) strand; PAM type: YTN; PAM sequence: TTA
acagccattttataacctcc

SEQ ID NO: 282289 - DNA, 20 bp, Artificial Sequence
  Description of Artificial Sequence: Synthetic oligonucleotide
  Target: LAMA2; (-) strand; PAM type: YTN; PAM sequence: CTG
attaacagccattttataac

SEQ ID NO: 282290 - DNA, 20 bp, Artificial Sequence
  Description of Artificial Sequence: Synthetic oligonucleotide
  Target: LAMA2; (-) strand; PAM type: YTN; PAM sequence: TTC
cctgattaacagccatttta

SEQ ID NO: 282291 - DNA, 20 bp, Artificial Sequence
  Description of Artificial Sequence: Synthetic oligonucleotide
  Target: LAMA2; (-) strand; PAM type: YTN; PAM sequence: TTT
ccctgattaacagccatttt

SEQ ID NO: 282292 - DNA, 20 bp, Artificial Sequence
  Description of Artificial Sequence: Synthetic oligonucleotide
  Target: LAMA2; (-) strand; PAM type: YTN; PAM sequence: CTG
gtagtaatatatggcatttc

SEQ ID NO: 282293 - DNA, 20 bp, Artificial Sequence
  Description of Artificial Sequence: Synthetic oligonucleotide
  Target: LAMA2; (-) strand; PAM type: YTN; PAM sequence: TTC
ctggtagtaatatatggcat

SEQ ID NO: 282294 - DNA, 20 bp, Artificial Sequence
  Description of Artificial Sequence: Synthetic oligonucleotide
  Target: LAMA2; (-) strand; PAM type: YTN; PAM sequence: TTC
agcagttcctggtagtaata

SEQ ID NO: 282295 - DNA, 20 bp, Artificial Sequence
  Description of Artificial Sequence: Synthetic oligonucleotide
  Target: LAMA2; (-) strand; PAM type: YTN; PAM sequence: TTT
cagcagttcctggtagtaat

SEQ ID NO: 282296 - DNA, 20 bp, Artificial Sequence
  Description of Artificial Sequence: Synthetic oligonucleotide
  Target: LAMA2; (-) strand; PAM type: YTN; PAM sequence: CTA
tttcagcagttcctggtagt

SEQ ID NO: 282297 - DNA, 20 bp, Artificial Sequence
  Description of Artificial Sequence: Synthetic oligonucleotide
  Target: LAMA2; (-) strand; PAM type: YTN; PAM sequence: CTG
tagggcctatttcagcagtt

SEQ ID NO: 282298 - DNA, 20 bp, Artificial Sequence
  Description of Artificial Sequence: Synthetic oligonucleotide
  Target: LAMA2; (-) strand; PAM type: YTN; PAM sequence: CTC
tgtagggcctatttcagcag

SEQ ID NO: 282299 - DNA, 20 bp, Artificial Sequence
  Description of Artificial Sequence: Synthetic oligonucleotide
  Target: LAMA2; (-) strand; PAM type: YTN; PAM sequence: TTG
ctctgtagggcctatttcag

SEQ ID NO: 282300 - DNA, 20 bp, Artificial Sequence
  Description of Artificial Sequence: Synthetic oligonucleotide
  Target: LAMA2; (-) strand; PAM type: YTN; PAM sequence: TTT
gctctgtagggcctatttca

SEQ ID NO: 282301 - DNA, 20 bp, Artificial Sequence
  Description of Artificial Sequence: Synthetic oligonucleotide
  Target: LAMA2; (-) strand; PAM type: YTN; PAM sequence: TTT
tgctctgtagggcctatttc

SEQ ID NO: 282302 - DNA, 20 bp, Artificial Sequence
  Description of Artificial Sequence: Synthetic oligonucleotide
  Target: LAMA2; (-) strand; PAM type: YTN; PAM sequence: CTG
tcaagagttttgctctgtag

SEQ ID NO: 282303 - DNA, 20 bp, Artificial Sequence
  Description of Artificial Sequence: Synthetic oligonucleotide
  Target: LAMA2; (-) strand; PAM type: YTN; PAM sequence: CTG
ctgtcaagagttttgctctg

SEQ ID NO: 282304 - DNA, 20 bp, Artificial Sequence
  Description of Artificial Sequence: Synthetic oligonucleotide
  Target: LAMA2; (-) strand; PAM type: YTN; PAM sequence: TTA
atagctgctgtcaagagttt

SEQ ID NO: 282305 - DNA, 20 bp, Artificial Sequence
  Description of Artificial Sequence: Synthetic oligonucleotide
  Target: LAMA2; (-) strand; PAM type: YTN; PAM sequence: TTT
aatagctgctgtcaagagtt

SEQ ID NO: 282306 - DNA, 20 bp, Artificial Sequence
  Description of Artificial Sequence: Synthetic oligonucleotide
  Target: LAMA2; (-) strand; PAM type: YTN; PAM sequence: TTT
taatagctgctgtcaagagt

SEQ ID NO: 282307 - DNA, 20 bp, Artificial Sequence
  Description of Artificial Sequence: Synthetic oligonucleotide
  Target: LAMA2; (-) strand; PAM type: YTN; PAM sequence: CTA
ttttaatagctgctgtcaag

SEQ ID NO: 282308 - DNA, 20 bp, Artificial Sequence
  Description of Artificial Sequence: Synthetic oligonucleotide
  Target: LAMA2; (-) strand; PAM type: YTN; PAM sequence: CTC
tattttaatagctgctgtca

SEQ ID NO: 282309 - DNA, 20 bp, Artificial Sequence
  Description of Artificial Sequence: Synthetic oligonucleotide
  Target: LAMA2; (-) strand; PAM type: YTN; PAM sequence: CTA
aatctctattttaatagctg

SEQ ID NO: 282310 - DNA, 20 bp, Artificial Sequence
  Description of Artificial Sequence: Synthetic oligonucleotide
  Target: LAMA2; (-) strand; PAM type: YTN; PAM sequence: CTC
caggcaccatagagagagaa

SEQ ID NO: 282311 - DNA, 20 bp, Artificial Sequence
  Description of Artificial Sequence: Synthetic oligonucleotide
  Target: LAMA2; (-) strand; PAM type: YTN; PAM sequence: CTA
actccaggcaccatagagag

SEQ ID NO: 282312 - DNA, 20 bp, Artificial Sequence
  Description of Artificial Sequence: Synthetic oligonucleotide
  Target: LAMA2; (-) strand; PAM type: YTN; PAM sequence: TTC
taactccaggcaccatagag

SEQ ID NO: 282313 - DNA, 20 bp, Artificial Sequence
  Description of Artificial Sequence: Synthetic oligonucleotide
  Target: LAMA2; (-) strand; PAM type: YTN; PAM sequence: CTT
ctaactccaggcaccataga

SEQ ID NO: 282314 - DNA, 20 bp, Artificial Sequence
  Description of Artificial Sequence: Synthetic oligonucleotide
  Target: LAMA2; (-) strand; PAM type: YTN; PAM sequence: TTC
cttctaactccaggcaccat

SEQ ID NO: 282315 - DNA, 20 bp, Artificial Sequence
  Description of Artificial Sequence: Synthetic oligonucleotide
  Target: LAMA2; (-) strand; PAM type: YTN; PAM sequence: TTA
ttccttctaactccaggcac

SEQ ID NO: 282316 - DNA, 20 bp, Artificial Sequence
  Description of Artificial Sequence: Synthetic oligonucleotide
  Target: LAMA2; (-) strand; PAM type: YTN; PAM sequence: TTT
attccttctaactccaggca

SEQ ID NO: 282317 - DNA, 20 bp, Artificial Sequence
  Description of Artificial Sequence: Synthetic oligonucleotide
  Target: LAMA2; (-) strand; PAM type: YTN; PAM sequence: TTT
tattccttctaactccaggc

SEQ ID NO: 282318 - DNA, 20 bp, Artificial Sequence
  Description of Artificial Sequence: Synthetic oligonucleotide
  Target: LAMA2; (-) strand; PAM type: YTN; PAM sequence: TTT
ttattccttctaactccagg

SEQ ID NO: 282319 - DNA, 20 bp, Artificial Sequence
  Description of Artificial Sequence: Synthetic oligonucleotide
  Target: LAMA2; (-) strand; PAM type: YTN; PAM sequence: CTC
accatttttattccttctaa

SEQ ID NO: 282320 - DNA, 20 bp, Artificial Sequence
  Description of Artificial Sequence: Synthetic oligonucleotide
  Target: LAMA2; (-) strand; PAM type: YTN; PAM sequence: CTG
gcctcaccatttttattcct

SEQ ID NO: 282321 - DNA, 20 bp, Artificial Sequence
  Description of Artificial Sequence: Synthetic oligonucleotide
  Target: LAMA2; (-) strand; PAM type: YTN; PAM sequence: TTA
gaaatatggagggtatactg

SEQ ID NO: 282322 - DNA, 20 bp, Artificial Sequence
  Description of Artificial Sequence: Synthetic oligonucleotide
  Target: LAMA2; (-) strand; PAM type: YTN; PAM sequence: TTG
aaccaagcaacaaattagaa

SEQ ID NO: 282323 - DNA, 20 bp, Artificial Sequence
  Description of Artificial Sequence: Synthetic oligonucleotide
  Target: LAMA2; (-) strand; PAM type: YTN; PAM sequence: CTG
aattgaaccaagcaacaaat

SEQ ID NO: 282324 - DNA, 20 bp, Artificial Sequence
  Description of Artificial Sequence: Synthetic oligonucleotide
  Target: LAMA2; (-) strand; PAM type: YTN; PAM sequence: CTG
tactgaattgaaccaagcaa

SEQ ID NO: 282325 - DNA, 20 bp, Artificial Sequence
  Description of Artificial Sequence: Synthetic oligonucleotide
  Target: LAMA2; (-) strand; PAM type: YTN; PAM sequence: CTG
aactgtactgaattgaacca

SEQ ID NO: 282326 - DNA, 20 bp, Artificial Sequence
  Description of Artificial Sequence: Synthetic oligonucleotide
  Target: LAMA2; (-) strand; PAM type: YTN; PAM sequence: CTA
actgaactgtactgaattga

SEQ ID NO: 282327 - DNA, 20 bp, Artificial Sequence
  Description of Artificial Sequence: Synthetic oligonucleotide
  Target: LAMA2; (-) strand; PAM type: YTN; PAM sequence: CTC
acaaactaactgaactgtac

SEQ ID NO: 282328 - DNA, 20 bp, Artificial Sequence
  Description of Artificial Sequence: Synthetic oligonucleotide
  Target: LAMA2; (-) strand; PAM type: YTN; PAM sequence: CTG
aagctcacaaactaactgaa

SEQ ID NO: 282329 - DNA, 20 bp, Artificial Sequence
  Description of Artificial Sequence: Synthetic oligonucleotide
  Target: LAMA2; (-) strand; PAM type: YTN; PAM sequence: TTC
atgactgaagctcacaaact

SEQ ID NO: 282330 - DNA, 20 bp, Artificial Sequence
  Description of Artificial Sequence: Synthetic oligonucleotide
  Target: LAMA2; (-) strand; PAM type: YTN; PAM sequence: CTA
agtcattcatgactgaagct

SEQ ID NO: 282331 - DNA, 20 bp, Artificial Sequence
  Description of Artificial Sequence: Synthetic oligonucleotide
  Target: LAMA2; (-) strand; PAM type: YTN; PAM sequence: CTC
aaggcaaggacagcataaaa

SEQ ID NO: 282332 - DNA, 20 bp, Artificial Sequence
  Description of Artificial Sequence: Synthetic oligonucleotide
  Target: LAMA2; (-) strand; PAM type: YTN; PAM sequence: TTC
cctcaaggcaaggacagcat

SEQ ID NO: 282333 - DNA, 20 bp, Artificial Sequence
  Description of Artificial Sequence: Synthetic oligonucleotide
  Target: LAMA2; (-) strand; PAM type: YTN; PAM sequence: TTC
agattccctcaaggcaagga

SEQ ID NO: 282334 - DNA, 20 bp, Artificial Sequence
  Description of Artificial Sequence: Synthetic oligonucleotide
  Target: LAMA2; (-) strand; PAM type: YTN; PAM sequence: CTC
ccggcaagttcagattccct

SEQ ID NO: 282335 - DNA, 20 bp, Artificial Sequence
  Description of Artificial Sequence: Synthetic oligonucleotide
  Target: LAMA2; (-) strand; PAM type: YTN; PAM sequence: TTG
ctcccggcaagttcagattc

SEQ ID NO: 282336 - DNA, 20 bp, Artificial Sequence
  Description of Artificial Sequence: Synthetic oligonucleotide
  Target: LAMA2; (-) strand; PAM type: YTN; PAM sequence: TTA
aaaagcaaaacaaattgctc

SEQ ID NO: 282337 - DNA, 20 bp, Artificial Sequence
  Description of Artificial Sequence: Synthetic oligonucleotide
  Target: LAMA2; (-) strand; PAM type: YTN; PAM sequence: TTC
aaaaattaaaaagcaaaaca

SEQ ID NO: 282338 - DNA, 20 bp, Artificial Sequence
  Description of Artificial Sequence: Synthetic oligonucleotide
  Target: LAMA2; (-) strand; PAM type: YTN; PAM sequence: TTA
acagatgtatattcaaaaat

SEQ ID NO: 282339 - DNA, 20 bp, Artificial Sequence
  Description of Artificial Sequence: Synthetic oligonucleotide
  Target: LAMA2; (-) strand; PAM type: YTN; PAM sequence: TTT
aacagatgtatattcaaaaa

SEQ ID NO: 282340 - DNA, 20 bp, Artificial Sequence
  Description of Artificial Sequence: Synthetic oligonucleotide
  Target: LAMA2; (-) strand; PAM type: YTN; PAM sequence: TTT
taacagatgtatattcaaaa

SEQ ID NO: 282341 - DNA, 20 bp, Artificial Sequence
  Description of Artificial Sequence: Synthetic oligonucleotide
  Target: LAMA2; (-) strand; PAM type: YTN; PAM sequence: CTT
ttaacagatgtatattcaaa

SEQ ID NO: 282342 - DNA, 20 bp, Artificial Sequence
  Description of Artificial Sequence: Synthetic oligonucleotide
  Target: LAMA2; (-) strand; PAM type: YTN; PAM sequence: TTA
cttttaacagatgtatattc

SEQ ID NO: 282343 - DNA, 20 bp, Artificial Sequence
  Description of Artificial Sequence: Synthetic oligonucleotide
  Target: LAMA2; (-) strand; PAM type: YTN; PAM sequence: TTT
acttttaacagatgtatatt

SEQ ID NO: 282344 - DNA, 20 bp, Artificial Sequence
  Description of Artificial Sequence: Synthetic oligonucleotide
  Target: LAMA2; (-) strand; PAM type: YTN; PAM sequence: CTC
acacaagggcaaatttactt

SEQ ID NO: 282345 - DNA, 20 bp, Artificial Sequence
  Description of Artificial Sequence: Synthetic oligonucleotide
  Target: LAMA2; (-) strand; PAM type: YTN; PAM sequence: CTC
aaactcacacaagggcaaat

SEQ ID NO: 282346 - DNA, 20 bp, Artificial Sequence
  Description of Artificial Sequence: Synthetic oligonucleotide
  Target: LAMA2; (-) strand; PAM type: YTN; PAM sequence: TTC
aaatctcaaactcacacaag

SEQ ID NO: 282347 - DNA, 20 bp, Artificial Sequence
  Description of Artificial Sequence: Synthetic oligonucleotide
  Target: LAMA2; (-) strand; PAM type: YTN; PAM sequence: CTT
caaatctcaaactcacacaa

SEQ ID NO: 282348 - DNA, 20 bp, Artificial Sequence
  Description of Artificial Sequence: Synthetic oligonucleotide
  Target: LAMA2; (-) strand; PAM type: YTN; PAM sequence: TTC
gatcagtgcaatgtagacag

SEQ ID NO: 282349 - DNA, 20 bp, Artificial Sequence
  Description of Artificial Sequence: Synthetic oligonucleotide
  Target: LAMA2; (-) strand; PAM type: YTN; PAM sequence: CTC
cacaaacattcgatcagtgc

SEQ ID NO: 282350 - DNA, 20 bp, Artificial Sequence
  Description of Artificial Sequence: Synthetic oligonucleotide
  Target: LAMA2; (-) strand; PAM type: YTN; PAM sequence: TTA
tctccacaaacattcgatca

SEQ ID NO: 282351 - DNA, 20 bp, Artificial Sequence
  Description of Artificial Sequence: Synthetic oligonucleotide
  Target: LAMA2; (-) strand; PAM type: YTN; PAM sequence: TTT
atctccacaaacattcgatc

SEQ ID NO: 282352 - DNA, 20 bp, Artificial Sequence
  Description of Artificial Sequence: Synthetic oligonucleotide
  Target: LAMA2; (-) strand; PAM type: YTN; PAM sequence: TTT
tatctccacaaacattcgat

SEQ ID NO: 282353 - DNA, 20 bp, Artificial Sequence
  Description of Artificial Sequence: Synthetic oligonucleotide
  Target: LAMA2; (-) strand; PAM type: YTN; PAM sequence: TTT
ttatctccacaaacattcga

SEQ ID NO: 282354 - DNA, 20 bp, Artificial Sequence
  Description of Artificial Sequence: Synthetic oligonucleotide
  Target: LAMA2; (-) strand; PAM type: YTN; PAM sequence: CTT
tttatctccacaaacattcg

SEQ ID NO: 282355 - DNA, 20 bp, Artificial Sequence
  Description of Artificial Sequence: Synthetic oligonucleotide
  Target: LAMA2; (-) strand; PAM type: YTN; PAM sequence: CTC
atatccatcaacaaaatact

SEQ ID NO: 282356 - DNA, 20 bp, Artificial Sequence
  Description of Artificial Sequence: Synthetic oligonucleotide
  Target: LAMA2; (-) strand; PAM type: YTN; PAM sequence: TTG
taccaagcctcatatccatc

SEQ ID NO: 282357 - DNA, 20 bp, Artificial Sequence
  Description of Artificial Sequence: Synthetic oligonucleotide
  Target: LAMA2; (-) strand; PAM type: YTN; PAM sequence: TTT
gtaccaagcctcatatccat

SEQ ID NO: 282358 - DNA, 20 bp, Artificial Sequence
  Description of Artificial Sequence: Synthetic oligonucleotide
  Target: LAMA2; (-) strand; PAM type: YTN; PAM sequence: TTC
agtcatcaatttgtaccaag

SEQ ID NO: 282359 - DNA, 20 bp, Artificial Sequence
  Description of Artificial Sequence: Synthetic oligonucleotide
  Target: LAMA2; (-) strand; PAM type: YTN; PAM sequence: TTT
cagtcatcaatttgtaccaa

SEQ ID NO: 282360 - DNA, 20 bp, Artificial Sequence
  Description of Artificial Sequence: Synthetic oligonucleotide
  Target: LAMA2; (-) strand; PAM type: YTN; PAM sequence: CTT
tcagtcatcaatttgtacca

SEQ ID NO: 282361 - DNA, 20 bp, Artificial Sequence
  Description of Artificial Sequence: Synthetic oligonucleotide
  Target: LAMA2; (-) strand; PAM type: YTN; PAM sequence: CTC
tttcagtcatcaatttgtac

SEQ ID NO: 282362 - DNA, 20 bp, Artificial Sequence
  Description of Artificial Sequence: Synthetic oligonucleotide
  Target: LAMA2; (-) strand; PAM type: YTN; PAM sequence: TTC
actctttcagtcatcaattt

SEQ ID NO: 282363 - DNA, 20 bp, Artificial Sequence
  Description of Artificial Sequence: Synthetic oligonucleotide
  Target: LAMA2; (-) strand; PAM type: YTN; PAM sequence: TTT
cactctttcagtcatcaatt

SEQ ID NO: 282364 - DNA, 20 bp, Artificial Sequence
  Description of Artificial Sequence: Synthetic oligonucleotide
  Target: LAMA2; (-) strand; PAM type: YTN; PAM sequence: TTT
tcactctttcagtcatcaat

SEQ ID NO: 282365 - DNA, 20 bp, Artificial Sequence
  Description of Artificial Sequence: Synthetic oligonucleotide
  Target: LAMA2; (-) strand; PAM type: YTN; PAM sequence: CTT
ttcactctttcagtcatcaa

SEQ ID NO: 282366 - DNA, 20 bp, Artificial Sequence
  Description of Artificial Sequence: Synthetic oligonucleotide
  Target: LAMA2; (-) strand; PAM type: YTN; PAM sequence: TTC
atcttttcactctttcagtc

SEQ ID NO: 282367 - DNA, 20 bp, Artificial Sequence
  Description of Artificial Sequence: Synthetic oligonucleotide
  Target: LAMA2; (-) strand; PAM type: YTN; PAM sequence: CTA
attcatcttttcactctttc

SEQ ID NO: 282368 - DNA, 20 bp, Artificial Sequence
  Description of Artificial Sequence: Synthetic oligonucleotide
  Target: LAMA2; (-) strand; PAM type: YTN; PAM sequence: CTG
gtggtactaattcatctttt

SEQ ID NO: 282369 - DNA, 20 bp, Artificial Sequence
  Description of Artificial Sequence: Synthetic oligonucleotide
  Target: LAMA2; (-) strand; PAM type: YTN; PAM sequence: TTC
acctggtggtactaattcat

SEQ ID NO: 282370 - DNA, 20 bp, Artificial Sequence
  Description of Artificial Sequence: Synthetic oligonucleotide
  Target: LAMA2; (-) strand; PAM type: YTN; PAM sequence: TTC
attcacctggtggtactaat

SEQ ID NO: 282371 - DNA, 20 bp, Artificial Sequence
  Description of Artificial Sequence: Synthetic oligonucleotide
  Target: LAMA2; (-) strand; PAM type: YTN; PAM sequence: CTG
caaagcagtgttcattcacc

SEQ ID NO: 282372 - DNA, 20 bp, Artificial Sequence
  Description of Artificial Sequence: Synthetic oligonucleotide
  Target: LAMA2; (-) strand; PAM type: YTN; PAM sequence: CTA
tctgcaaagcagtgttcatt

SEQ ID NO: 282373 - DNA, 20 bp, Artificial Sequence
  Description of Artificial Sequence: Synthetic oligonucleotide
  Target: LAMA2; (-) strand; PAM type: YTN; PAM sequence: TTG
tctatctgcaaagcagtgtt

SEQ ID NO: 282374 - DNA, 20 bp, Artificial Sequence
  Description of Artificial Sequence: Synthetic oligonucleotide
  Target: LAMA2; (-) strand; PAM type: YTN; PAM sequence: CTT
gtctatctgcaaagcagtgt

SEQ ID NO: 282375 - DNA, 20 bp, Artificial Sequence
  Description of Artificial Sequence: Synthetic oligonucleotide
  Target: LAMA2; (-) strand; PAM type: YTN; PAM sequence: TTC
ttgtctatctgcaaagcagt

SEQ ID NO: 282376 - DNA, 20 bp, Artificial Sequence
  Description of Artificial Sequence: Synthetic oligonucleotide
  Target: LAMA2; (-) strand; PAM type: YTN; PAM sequence: TTT
cttgtctatctgcaaagcag

SEQ ID NO: 282377 - DNA, 20 bp, Artificial Sequence
  Description of Artificial Sequence: Synthetic oligonucleotide
  Target: LAMA2; (-) strand; PAM type: YTN; PAM sequence: TTA
aaaaatttcttgtctatctg

SEQ ID NO: 282378 - DNA, 20 bp, Artificial Sequence
  Description of Artificial Sequence: Synthetic oligonucleotide
  Target: LAMA2; (-) strand; PAM type: YTN; PAM sequence: CTT
aaaaaatttcttgtctatct

SEQ ID NO: 282379 - DNA, 20 bp, Artificial Sequence
  Description of Artificial Sequence: Synthetic oligonucleotide
  Target: LAMA2; (-) strand; PAM type: YTN; PAM sequence: CTG
cgcccggccttaaaaaattt

SEQ ID NO: 282380 - DNA, 20 bp, Artificial Sequence
  Description of Artificial Sequence: Synthetic oligonucleotide
  Target: LAMA2; (-) strand; PAM type: YTN; PAM sequence: TTA
cagggcatgagccactgcgc

SEQ ID NO: 282381 - DNA, 20 bp, Artificial Sequence
  Description of Artificial Sequence: Synthetic oligonucleotide
  Target: LAMA2; (-) strand; PAM type: YTN; PAM sequence: CTG
gaattacagggcatgagcca

SEQ ID NO: 282382 - DNA, 20 bp, Artificial Sequence
  Description of Artificial Sequence: Synthetic oligonucleotide
  Target: LAMA2; (-) strand; PAM type: YTN; PAM sequence: CTC
ccaaaatgctggaattacag

SEQ ID NO: 282383 - DNA, 20 bp, Artificial Sequence
  Description of Artificial Sequence: Synthetic oligonucleotide
  Target: LAMA2; (-) strand; PAM type: YTN; PAM sequence: CTC
ggcctcccaaaatgctggaa

SEQ ID NO: 282384 - DNA, 20 bp, Artificial Sequence
  Description of Artificial Sequence: Synthetic oligonucleotide
  Target: LAMA2; (-) strand; PAM type: YTN; PAM sequence: CTG
cctcggcctcccaaaatgct

SEQ ID NO: 282385 - DNA, 20 bp, Artificial Sequence
  Description of Artificial Sequence: Synthetic oligonucleotide
  Target: LAMA2; (-) strand; PAM type: YTN; PAM sequence: CTG
cctgcctcggcctcccaaaa

SEQ ID NO: 282386 - DNA, 20 bp, Artificial Sequence
  Description of Artificial Sequence: Synthetic oligonucleotide
  Target: LAMA2; (-) strand; PAM type: YTN; PAM sequence: CTC
tgcctgcctcggcctcccaa

SEQ ID NO: 282387 - DNA, 20 bp, Artificial Sequence
  Description of Artificial Sequence: Synthetic oligonucleotide
  Target: LAMA2; (-) strand; PAM type: YTN; PAM sequence: TTC
tctgcctgcctcggcctccc

SEQ ID NO: 282388 - DNA, 20 bp, Artificial Sequence
  Description of Artificial Sequence: Synthetic oligonucleotide
  Target: LAMA2; (-) strand; PAM type: YTN; PAM sequence: CTT
ctctgcctgcctcggcctcc

SEQ ID NO: 282389 - DNA, 20 bp, Artificial Sequence
  Description of Artificial Sequence: Synthetic oligonucleotide
  Target: LAMA2; (-) strand; PAM type: YTN; PAM sequence: CTC
ccacttctctgcctgcctcg

SEQ ID NO: 282390 - DNA, 20 bp, Artificial Sequence
  Description of Artificial Sequence: Synthetic oligonucleotide
  Target: LAMA2; (-) strand; PAM type: YTN; PAM sequence: TTC
tcccacttctctgcctgcct

SEQ ID NO: 282391 - DNA, 20 bp, Artificial Sequence
  Description of Artificial Sequence: Synthetic oligonucleotide
  Target: LAMA2; (-) strand; PAM type: YTN; PAM sequence: TTA
ttctcccacttctctgcctg

SEQ ID NO: 282392 - DNA, 20 bp, Artificial Sequence
  Description of Artificial Sequence: Synthetic oligonucleotide
  Target: LAMA2; (-) strand; PAM type: YTN; PAM sequence: CTC
aagttattctcccacttctc

SEQ ID NO: 282393 - DNA, 20 bp, Artificial Sequence
  Description of Artificial Sequence: Synthetic oligonucleotide
  Target: LAMA2; (-) strand; PAM type: YTN; PAM sequence: CTG
ggctcaagttattctcccac

SEQ ID NO: 282394 - DNA, 20 bp, Artificial Sequence
  Description of Artificial Sequence: Synthetic oligonucleotide
  Target: LAMA2; (-) strand; PAM type: YTN; PAM sequence: CTC
ctgggctcaagttattctcc

SEQ ID NO: 282395 - DNA, 20 bp, Artificial Sequence
  Description of Artificial Sequence: Synthetic oligonucleotide
  Target: LAMA2; (-) strand; PAM type: YTN; PAM sequence: CTG
cctcctgggctcaagttatt

SEQ ID NO: 282396 - DNA, 20 bp, Artificial Sequence
  Description of Artificial Sequence: Synthetic oligonucleotide
  Target: LAMA2; (-) strand; PAM type: YTN; PAM sequence: CTC
tgcctcctgggctcaagtta

SEQ ID NO: 282397 - DNA, 20 bp, Artificial Sequence
  Description of Artificial Sequence: Synthetic oligonucleotide
  Target: LAMA2; (-) strand; PAM type: YTN; PAM sequence: CTG
caacctctgcctcctgggct

SEQ ID NO: 282398 - DNA, 20 bp, Artificial Sequence
  Description of Artificial Sequence: Synthetic oligonucleotide
  Target: LAMA2; (-) strand; PAM type: YTN; PAM sequence: CTC
actgcaacctctgcctcctg

SEQ ID NO: 282399 - DNA, 20 bp, Artificial Sequence
  Description of Artificial Sequence: Synthetic oligonucleotide
  Target: LAMA2; (-) strand; PAM type: YTN; PAM sequence: TTG
gctcactgcaacctctgcct

SEQ ID NO: 282400 - DNA, 20 bp, Artificial Sequence
  Description of Artificial Sequence: Synthetic oligonucleotide
  Target: LAMA2; (-) strand; PAM type: YTN; PAM sequence: CTT
ggctcactgcaacctctgcc

SEQ ID NO: 282401 - DNA, 20 bp, Artificial Sequence
  Description of Artificial Sequence: Synthetic oligonucleotide
  Target: LAMA2; (-) strand; PAM type: YTN; PAM sequence: CTA
gagtgcaatggagcgatctt

SEQ ID NO: 282402 - DNA, 20 bp, Artificial Sequence
  Description of Artificial Sequence: Synthetic oligonucleotide
  Target: LAMA2; (-) strand; PAM type: YTN; PAM sequence: CTG
tcacccaggctagagtgcaa

SEQ ID NO: 282403 - DNA, 20 bp, Artificial Sequence
  Description of Artificial Sequence: Synthetic oligonucleotide
  Target: LAMA2; (-) strand; PAM type: YTN; PAM sequence: CTC
tgtcacccaggctagagtgc

SEQ ID NO: 282404 - DNA, 20 bp, Artificial Sequence
  Description of Artificial Sequence: Synthetic oligonucleotide
  Target: LAMA2; (-) strand; PAM type: YTN; PAM sequence: CTC
actctgtcacccaggctaga

SEQ ID NO: 282405 - DNA, 20 bp, Artificial Sequence
  Description of Artificial Sequence: Synthetic oligonucleotide
  Target: LAMA2; (-) strand; PAM type: YTN; PAM sequence: CTC
tcactctgtcacccaggcta

SEQ ID NO: 282406 - DNA, 20 bp, Artificial Sequence
  Description of Artificial Sequence: Synthetic oligonucleotide
  Target: LAMA2; (-) strand; PAM type: YTN; PAM sequence: TTG
agacaggctctcactctgtc

SEQ ID NO: 282407 - DNA, 20 bp, Artificial Sequence
  Description of Artificial Sequence: Synthetic oligonucleotide
  Target: LAMA2; (-) strand; PAM type: YTN; PAM sequence: TTT
gagacaggctctcactctgt

SEQ ID NO: 282408 - DNA, 20 bp, Artificial Sequence
  Description of Artificial Sequence: Synthetic oligonucleotide
  Target: LAMA2; (-) strand; PAM type: YTN; PAM sequence: TTA
tttgagacaggctctcactc

SEQ ID NO: 282409 - DNA, 20 bp, Artificial Sequence
  Description of Artificial Sequence: Synthetic oligonucleotide
  Target: LAMA2; (-) strand; PAM type: YTN; PAM sequence: TTA
ttatttgagacaggctctca

SEQ ID NO: 282410 - DNA, 20 bp, Artificial Sequence
  Description of Artificial Sequence: Synthetic oligonucleotide
  Target: LAMA2; (-) strand; PAM type: YTN; PAM sequence: TTA
attattatttgagacaggct

SEQ ID NO: 282411 - DNA, 20 bp, Artificial Sequence
  Description of Artificial Sequence: Synthetic oligonucleotide
  Target: LAMA2; (-) strand; PAM type: YTN; PAM sequence: TTA
attaattattatttgagaca

SEQ ID NO: 282412 - DNA, 20 bp, Artificial Sequence
  Description of Artificial Sequence: Synthetic oligonucleotide
  Target: LAMA2; (-) strand; PAM type: YTN; PAM sequence: TTA
attaattaattattatttga

SEQ ID NO: 282413 - DNA, 20 bp, Artificial Sequence
  Description of Artificial Sequence: Synthetic oligonucleotide
  Target: LAMA2; (-) strand; PAM type: YTN; PAM sequence: TTA
ttaattaattaattattatt

SEQ ID NO: 282414 - DNA, 20 bp, Artificial Sequence
  Description of Artificial Sequence: Synthetic oligonucleotide
  Target: LAMA2; (-) strand; PAM type: YTN; PAM sequence: TTA
ttattaattaattaattatt

SEQ ID NO: 282415 - DNA, 20 bp, Artificial Sequence
  Description of Artificial Sequence: Synthetic oligonucleotide
  Target: LAMA2; (-) strand; PAM type: YTN; PAM sequence: TTT
attattaattaattaattat

SEQ ID NO: 282416 - DNA, 20 bp, Artificial Sequence
  Description of Artificial Sequence: Synthetic oligonucleotide
  Target: LAMA2; (-) strand; PAM type: YTN; PAM sequence: TTT
tattattaattaattaatta

SEQ ID NO: 282417 - DNA, 20 bp, Artificial Sequence
  Description of Artificial Sequence: Synthetic oligonucleotide
  Target: LAMA2; (-) strand; PAM type: YTN; PAM sequence: TTT
ttattattaattaattaatt

SEQ ID NO: 282418 - DNA, 20 bp, Artificial Sequence
  Description of Artificial Sequence: Synthetic oligonucleotide
  Target: LAMA2; (-) strand; PAM type: YTN; PAM sequence: TTA
aatttttattattaattaat

SEQ ID NO: 282419 - DNA, 20 bp, Artificial Sequence
  Description of Artificial Sequence: Synthetic oligonucleotide
  Target: LAMA2; (-) strand; PAM type: YTN; PAM sequence: TTT
aaatttttattattaattaa

SEQ ID NO: 282420 - DNA, 20 bp, Artificial Sequence
  Description of Artificial Sequence: Synthetic oligonucleotide
  Target: LAMA2; (-) strand; PAM type: YTN; PAM sequence: TTT
taaatttttattattaatta

SEQ ID NO: 282421 - DNA, 20 bp, Artificial Sequence
  Description of Artificial Sequence: Synthetic oligonucleotide
  Target: LAMA2; (-) strand; PAM type: YTN; PAM sequence: TTA
ttttaaatttttattattaa

SEQ ID NO: 282422 - DNA, 20 bp, Artificial Sequence
  Description of Artificial Sequence: Synthetic oligonucleotide
  Target: LAMA2; (-) strand; PAM type: YTN; PAM sequence: CTG
aaaaaaattattttaaattt

SEQ ID NO: 282423 - DNA, 20 bp, Artificial Sequence
  Description of Artificial Sequence: Synthetic oligonucleotide
  Target: LAMA2; (-) strand; PAM type: YTN; PAM sequence: TTA
ctgaaaaaaattattttaaa

SEQ ID NO: 282424 - DNA, 20 bp, Artificial Sequence
  Description of Artificial Sequence: Synthetic oligonucleotide
  Target: LAMA2; (-) strand; PAM type: YTN; PAM sequence: TTT
actgaaaaaaattattttaa

SEQ ID NO: 282425 - DNA, 20 bp, Artificial Sequence
  Description of Artificial Sequence: Synthetic oligonucleotide
  Target: LAMA2; (-) strand; PAM type: YTN; PAM sequence: TTT
tactgaaaaaaattatttta

SEQ ID NO: 282426 - DNA, 20 bp, Artificial Sequence
  Description of Artificial Sequence: Synthetic oligonucleotide
  Target: LAMA2; (-) strand; PAM type: YTN; PAM sequence: TTG
gcattttactgaaaaaaatt

SEQ ID NO: 282427 - DNA, 20 bp, Artificial Sequence
  Description of Artificial Sequence: Synthetic oligonucleotide
  Target: LAMA2; (-) strand; PAM type: YTN; PAM sequence: TTC
catgagaaaatgaagttggc

SEQ ID NO: 282428 - DNA, 20 bp, Artificial Sequence
  Description of Artificial Sequence: Synthetic oligonucleotide
  Target: LAMA2; (-) strand; PAM type: YTN; PAM sequence: CTC
gtacacattccatgagaaaa

SEQ ID NO: 282429 - DNA, 20 bp, Artificial Sequence
  Description of Artificial Sequence: Synthetic oligonucleotide
  Target: LAMA2; (-) strand; PAM type: YTN; PAM sequence: TTG
cctcgtacacattccatgag

SEQ ID NO: 282430 - DNA, 20 bp, Artificial Sequence
  Description of Artificial Sequence: Synthetic oligonucleotide
  Target: LAMA2; (-) strand; PAM type: YTN; PAM sequence: CTT
gcctcgtacacattccatga

SEQ ID NO: 282431 - DNA, 20 bp, Artificial Sequence
  Description of Artificial Sequence: Synthetic oligonucleotide
  Target: LAMA2; (-) strand; PAM type: YTN; PAM sequence: TTC
cttgcctcgtacacattcca

SEQ ID NO: 282432 - DNA, 20 bp, Artificial Sequence
  Description of Artificial Sequence: Synthetic oligonucleotide
  Target: LAMA2; (-) strand; PAM type: YTN; PAM sequence: CTT
ccttgcctcgtacacattcc

SEQ ID NO: 282433 - DNA, 20 bp, Artificial Sequence
  Description of Artificial Sequence: Synthetic oligonucleotide
  Target: LAMA2; (-) strand; PAM type: YTN; PAM sequence: TTC
ttccttgcctcgtacacatt

SEQ ID NO: 282434 - DNA, 20 bp, Artificial Sequence
  Description of Artificial Sequence: Synthetic oligonucleotide
  Target: LAMA2; (-) strand; PAM type: YTN; PAM sequence: CTT
cttccttgcctcgtacacat

SEQ ID NO: 282435 - DNA, 20 bp, Artificial Sequence
  Description of Artificial Sequence: Synthetic oligonucleotide
  Target: LAMA2; (-) strand; PAM type: YTN; PAM sequence: CTA
cttcttccttgcctcgtaca

SEQ ID NO: 282436 - DNA, 20 bp, Artificial Sequence
  Description of Artificial Sequence: Synthetic oligonucleotide
  Target: LAMA2; (-) strand; PAM type: YTN; PAM sequence: TTA
ataaaccaaggtctacttct

SEQ ID NO: 282437 - DNA, 20 bp, Artificial Sequence
  Description of Artificial Sequence: Synthetic oligonucleotide
  Target: LAMA2; (-) strand; PAM type: YTN; PAM sequence: TTT
aataaaccaaggtctacttc

SEQ ID NO: 282438 - DNA, 20 bp, Artificial Sequence
  Description of Artificial Sequence: Synthetic oligonucleotide
  Target: LAMA2; (-) strand; PAM type: YTN; PAM sequence: TTT
taataaaccaaggtctactt

SEQ ID NO: 282439 - DNA, 20 bp, Artificial Sequence
  Description of Artificial Sequence: Synthetic oligonucleotide
  Target: LAMA2; (-) strand; PAM type: YTN; PAM sequence: CTT
ttaataaaccaaggtctact

SEQ ID NO: 282440 - DNA, 20 bp, Artificial Sequence
  Description of Artificial Sequence: Synthetic oligonucleotide
  Target: LAMA2; (-) strand; PAM type: YTN; PAM sequence: CTC
aaacttttaataaaccaagg

SEQ ID NO: 282441 - DNA, 20 bp, Artificial Sequence
  Description of Artificial Sequence: Synthetic oligonucleotide
  Target: LAMA2; (-) strand; PAM type: YTN; PAM sequence: TTC
tcaaacttttaataaaccaa

SEQ ID NO: 282442 - DNA, 20 bp, Artificial Sequence
  Description of Artificial Sequence: Synthetic oligonucleotide
  Target: LAMA2; (-) strand; PAM type: YTN; PAM sequence: TTA
atattctcaaacttttaata

SEQ ID NO: 282443 - DNA, 20 bp, Artificial Sequence
  Description of Artificial Sequence: Synthetic oligonucleotide
  Target: LAMA2; (-) strand; PAM type: YTN; PAM sequence: CTT
aatattctcaaacttttaat

SEQ ID NO: 282444 - DNA, 20 bp, Artificial Sequence
  Description of Artificial Sequence: Synthetic oligonucleotide
  Target: LAMA2; (-) strand; PAM type: YTN; PAM sequence: TTA
aaatcttaatattctcaaac

SEQ ID NO: 282445 - DNA, 20 bp, Artificial Sequence
  Description of Artificial Sequence: Synthetic oligonucleotide
  Target: LAMA2; (-) strand; PAM type: YTN; PAM sequence: TTT
aaaatcttaatattctcaaa

SEQ ID NO: 282446 - DNA, 20 bp, Artificial Sequence
  Description of Artificial Sequence: Synthetic oligonucleotide
  Target: LAMA2; (-) strand; PAM type: YTN; PAM sequence: TTT
taaaatcttaatattctcaa

SEQ ID NO: 282447 - DNA, 20 bp, Artificial Sequence
  Description of Artificial Sequence: Synthetic oligonucleotide
  Target: LAMA2; (-) strand; PAM type: YTN; PAM sequence: TTA
gtcaatataaggtaagatgt

SEQ ID NO: 282448 - DNA, 20 bp, Artificial Sequence
  Description of Artificial Sequence: Synthetic oligonucleotide
  Target: LAMA2; (-) strand; PAM type: YTN; PAM sequence: CTG
aaaagttagtcaatataagg

SEQ ID NO: 282449 - DNA, 20 bp, Artificial Sequence
  Description of Artificial Sequence: Synthetic oligonucleotide
  Target: LAMA2; (-) strand; PAM type: YTN; PAM sequence: TTA
agaaggaaataaaactgaaa

SEQ ID NO: 282450 - DNA, 20 bp, Artificial Sequence
  Description of Artificial Sequence: Synthetic oligonucleotide
  Target: LAMA2; (-) strand; PAM type: YTN; PAM sequence: TTG
gggataaattaagaaggaaa

SEQ ID NO: 282451 - DNA, 20 bp, Artificial Sequence
  Description of Artificial Sequence: Synthetic oligonucleotide
  Target: LAMA2; (-) strand; PAM type: YTN; PAM sequence: TTG
ggcaaagacaaaaattgggg

SEQ ID NO: 282452 - DNA, 20 bp, Artificial Sequence
  Description of Artificial Sequence: Synthetic oligonucleotide
  Target: LAMA2; (-) strand; PAM type: YTN; PAM sequence: CTT
gggcaaagacaaaaattggg

SEQ ID NO: 282453 - DNA, 20 bp, Artificial Sequence
  Description of Artificial Sequence: Synthetic oligonucleotide
  Target: LAMA2; (-) strand; PAM type: YTN; PAM sequence: TTA
tcttgggcaaagacaaaaat

SEQ ID NO: 282454 - DNA, 20 bp, Artificial Sequence
  Description of Artificial Sequence: Synthetic oligonucleotide
  Target: LAMA2; (-) strand; PAM type: YTN; PAM sequence: TTT
atcttgggcaaagacaaaaa

SEQ ID NO: 282455 - DNA, 20 bp, Artificial Sequence
  Description of Artificial Sequence: Synthetic oligonucleotide
  Target: LAMA2; (-) strand; PAM type: YTN; PAM sequence: TTC
atttatcttgggcaaagaca

SEQ ID NO: 282456 - DNA, 20 bp, Artificial Sequence
  Description of Artificial Sequence: Synthetic oligonucleotide
  Target: LAMA2; (-) strand; PAM type: YTN; PAM sequence: TTT
catttatcttgggcaaagac

SEQ ID NO: 282457 - DNA, 20 bp, Artificial Sequence
  Description of Artificial Sequence: Synthetic oligonucleotide
  Target: LAMA2; (-) strand; PAM type: YTN; PAM sequence: TTA
aataatttcatttatcttgg

SEQ ID NO: 282458 - DNA, 20 bp, Artificial Sequence
  Description of Artificial Sequence: Synthetic oligonucleotide
  Target: LAMA2; (-) strand; PAM type: YTN; PAM sequence: CTA
agtaattaaataatttcatt

SEQ ID NO: 282459 - DNA, 20 bp, Artificial Sequence
  Description of Artificial Sequence: Synthetic oligonucleotide
  Target: LAMA2; (-) strand; PAM type: YTN; PAM sequence: TTC
taagtaattaaataatttca

SEQ ID NO: 282460 - DNA, 20 bp, Artificial Sequence
  Description of Artificial Sequence: Synthetic oligonucleotide
  Target: LAMA2; (-) strand; PAM type: YTN; PAM sequence: TTT
ctaagtaattaaataatttc

SEQ ID NO: 282461 - DNA, 20 bp, Artificial Sequence
  Description of Artificial Sequence: Synthetic oligonucleotide
  Target: LAMA2; (-) strand; PAM type: YTN; PAM sequence: TTT
tctaagtaattaaataattt

SEQ ID NO: 282462 - DNA, 20 bp, Artificial Sequence
  Description of Artificial Sequence: Synthetic oligonucleotide
  Target: LAMA2; (-) strand; PAM type: YTN; PAM sequence: TTT
ttctaagtaattaaataatt

SEQ ID NO: 282463 - DNA, 20 bp, Artificial Sequence
  Description of Artificial Sequence: Synthetic oligonucleotide
  Target: LAMA2; (-) strand; PAM type: YTN; PAM sequence: TTA
tttttctaagtaattaaata

SEQ ID NO: 282464 - DNA, 20 bp, Artificial Sequence
  Description of Artificial Sequence: Synthetic oligonucleotide
  Target: LAMA2; (-) strand; PAM type: YTN; PAM sequence: CTA
ttatttttctaagtaattaa

SEQ ID NO: 282465 - DNA, 20 bp, Artificial Sequence
  Description of Artificial Sequence: Synthetic oligonucleotide
  Target: LAMA2; (-) strand; PAM type: YTN; PAM sequence: TTA
cctattatttttctaagtaa

SEQ ID NO: 282466 - DNA, 20 bp, Artificial Sequence
  Description of Artificial Sequence: Synthetic oligonucleotide
  Target: LAMA2; (-) strand; PAM type: YTN; PAM sequence: CTG
gccaacatgttacctattat

SEQ ID NO: 282467 - DNA, 20 bp, Artificial Sequence
  Description of Artificial Sequence: Synthetic oligonucleotide
  Target: LAMA2; (-) strand; PAM type: YTN; PAM sequence: TTA
caggtgcgagccaccgcacc

SEQ ID NO: 282468 - DNA, 20 bp, Artificial Sequence
  Description of Artificial Sequence: Synthetic oligonucleotide
  Target: LAMA2; (-) strand; PAM type: YTN; PAM sequence: TTA
ggattacaggtgcgagccac

SEQ ID NO: 282469 - DNA, 20 bp, Artificial Sequence
  Description of Artificial Sequence: Synthetic oligonucleotide
  Target: LAMA2; (-) strand; PAM type: YTN; PAM sequence: CTC
ccgaagtgttaggattacag

SEQ ID NO: 282470 - DNA, 20 bp, Artificial Sequence
  Description of Artificial Sequence: Synthetic oligonucleotide
  Target: LAMA2; (-) strand; PAM type: YTN; PAM sequence: CTC
ggtctcccgaagtgttagga

SEQ ID NO: 282471 - DNA, 20 bp, Artificial Sequence
  Description of Artificial Sequence: Synthetic oligonucleotide
  Target: LAMA2; (-) strand; PAM type: YTN; PAM sequence: CTG
cccacctcggtctcccgaag

SEQ ID NO: 282472 - DNA, 20 bp, Artificial Sequence
  Description of Artificial Sequence: Synthetic oligonucleotide
  Target: LAMA2; (-) strand; PAM type: YTN; PAM sequence: CTC
aggtgatctgcccacctcgg

SEQ ID NO: 282473 - DNA, 20 bp, Artificial Sequence
  Description of Artificial Sequence: Synthetic oligonucleotide
  Target: LAMA2; (-) strand; PAM type: YTN; PAM sequence: TTA
cctcaggtgatctgcccacc

SEQ ID NO: 282474 - DNA, 20 bp, Artificial Sequence
  Description of Artificial Sequence: Synthetic oligonucleotide
  Target: LAMA2; (-) strand; PAM type: YTN; PAM sequence: CTT
acctcaggtgatctgcccac

SEQ ID NO: 282475 - DNA, 20 bp, Artificial Sequence
  Description of Artificial Sequence: Synthetic oligonucleotide
  Target: LAMA2; (-) strand; PAM type: YTN; PAM sequence: CTC
cttacctcaggtgatctgcc

SEQ ID NO: 282476 - DNA, 20 bp, Artificial Sequence
  Description of Artificial Sequence: Synthetic oligonucleotide
  Target: LAMA2; (-) strand; PAM type: YTN; PAM sequence: CTC
aaactccttacctcaggtga

SEQ ID NO: 282477 - DNA, 20 bp, Artificial Sequence
  Description of Artificial Sequence: Synthetic oligonucleotide
  Target: LAMA2; (-) strand; PAM type: YTN; PAM sequence: CTG
gtctcaaactccttacctca

SEQ ID NO: 282478 - DNA, 20 bp, Artificial Sequence
  Description of Artificial Sequence: Synthetic oligonucleotide
  Target: LAMA2; (-) strand; PAM type: YTN; PAM sequence: CTG
gccatgctggtctcaaactc

SEQ ID NO: 282479 - DNA, 20 bp, Artificial Sequence
  Description of Artificial Sequence: Synthetic oligonucleotide
  Target: LAMA2; (-) strand; PAM type: YTN; PAM sequence: TTC
accacgctggccatgctggt

SEQ ID NO: 282480 - DNA, 20 bp, Artificial Sequence
  Description of Artificial Sequence: Synthetic oligonucleotide
  Target: LAMA2; (-) strand; PAM type: YTN; PAM sequence: TTT
caccacgctggccatgctgg

SEQ ID NO: 282481 - DNA, 20 bp, Artificial Sequence
  Description of Artificial Sequence: Synthetic oligonucleotide
  Target: LAMA2; (-) strand; PAM type: YTN; PAM sequence: TTA
gtagagacagggtttcacca

SEQ ID NO: 282482 - DNA, 20 bp, Artificial Sequence
  Description of Artificial Sequence: Synthetic oligonucleotide
  Target: LAMA2; (-) strand; PAM type: YTN; PAM sequence: TTT
agtagagacagggtttcacc

SEQ ID NO: 282483 - DNA, 20 bp, Artificial Sequence
  Description of Artificial Sequence: Synthetic oligonucleotide
  Target: LAMA2; (-) strand; PAM type: YTN; PAM sequence: TTT
tagtagagacagggtttcac

SEQ ID NO: 282484 - DNA, 20 bp, Artificial Sequence
  Description of Artificial Sequence: Synthetic oligonucleotide
  Target: LAMA2; (-) strand; PAM type: YTN; PAM sequence: TTT
ttagtagagacagggtttca

SEQ ID NO: 282485 - DNA, 20 bp, Artificial Sequence
  Description of Artificial Sequence: Synthetic oligonucleotide
  Target: LAMA2; (-) strand; PAM type: YTN; PAM sequence: TTG
cgtttttagtagagacaggg

SEQ ID NO: 282486 - DNA, 20 bp, Artificial Sequence
  Description of Artificial Sequence: Synthetic oligonucleotide
  Target: LAMA2; (-) strand; PAM type: YTN; PAM sequence: TTT
gcgtttttagtagagacagg

SEQ ID NO: 282487 - DNA, 20 bp, Artificial Sequence
  Description of Artificial Sequence: Synthetic oligonucleotide
  Target: LAMA2; (-) strand; PAM type: YTN; PAM sequence: TTT
tgcgtttttagtagagacag

SEQ ID NO: 282488 - DNA, 20 bp, Artificial Sequence
  Description of Artificial Sequence: Synthetic oligonucleotide
  Target: LAMA2; (-) strand; PAM type: YTN; PAM sequence: TTT
ttgcgtttttagtagagaca

SEQ ID NO: 282489 - DNA, 20 bp, Artificial Sequence
  Description of Artificial Sequence: Synthetic oligonucleotide
  Target: LAMA2; (-) strand; PAM type: YTN; PAM sequence: CTA
atttttgcgtttttagtaga

SEQ ID NO: 282490 - DNA, 20 bp, Artificial Sequence
  Description of Artificial Sequence: Synthetic oligonucleotide
  Target: LAMA2; (-) strand; PAM type: YTN; PAM sequence: TTA
caggcacccaccaccatgcc

SEQ ID NO: 282491 - DNA, 20 bp, Artificial Sequence
  Description of Artificial Sequence: Synthetic oligonucleotide
  Target: LAMA2; (-) strand; PAM type: YTN; PAM sequence: CTG
ggattacaggcacccaccac

SEQ ID NO: 282492 - DNA, 20 bp, Artificial Sequence
  Description of Artificial Sequence: Synthetic oligonucleotide
  Target: LAMA2; (-) strand; PAM type: YTN; PAM sequence: CTG
agtagctgggattacaggca

SEQ ID NO: 282493 - DNA, 20 bp, Artificial Sequence
  Description of Artificial Sequence: Synthetic oligonucleotide
  Target: LAMA2; (-) strand; PAM type: YTN; PAM sequence: CTC
ctgagtagctgggattacag

SEQ ID NO: 282494 - DNA, 20 bp, Artificial Sequence
  Description of Artificial Sequence: Synthetic oligonucleotide
  Target: LAMA2; (-) strand; PAM type: YTN; PAM sequence: CTC
agcctcctgagtagctggga

SEQ ID NO: 282495 - DNA, 20 bp, Artificial Sequence
  Description of Artificial Sequence: Synthetic oligonucleotide
  Target: LAMA2; (-) strand; PAM type: YTN; PAM sequence: CTA
cctcagcctcctgagtagct

SEQ ID NO: 282496 - DNA, 20 bp, Artificial Sequence
  Description of Artificial Sequence: Synthetic oligonucleotide
  Target: LAMA2; (-) strand; PAM type: YTN; PAM sequence: CTC
ctacctcagcctcctgagta

SEQ ID NO: 282497 - DNA, 20 bp, Artificial Sequence
  Description of Artificial Sequence: Synthetic oligonucleotide
  Target: LAMA2; (-) strand; PAM type: YTN; PAM sequence: TTC
tcctacctcagcctcctgag

SEQ ID NO: 282498 - DNA, 20 bp, Artificial Sequence
  Description of Artificial Sequence: Synthetic oligonucleotide
  Target: LAMA2; (-) strand; PAM type: YTN; PAM sequence: TTC
cagcaattctcctacctcag

SEQ ID NO: 282499 - DNA, 20 bp, Artificial Sequence
  Description of Artificial Sequence: Synthetic oligonucleotide
  Target: LAMA2; (-) strand; PAM type: YTN; PAM sequence: CTG
ggttccagcaattctcctac

SEQ ID NO: 282500 - DNA, 20 bp, Artificial Sequence
  Description of Artificial Sequence: Synthetic oligonucleotide
  Target: LAMA2; (-) strand; PAM type: YTN; PAM sequence: CTC
cgtatcctgggttccagcaa

SEQ ID NO: 282501 - DNA, 20 bp, Artificial Sequence
  Description of Artificial Sequence: Synthetic oligonucleotide
  Target: LAMA2; (-) strand; PAM type: YTN; PAM sequence: CTG
taacctccgtatcctgggtt

SEQ ID NO: 282502 - DNA, 20 bp, Artificial Sequence
  Description of Artificial Sequence: Synthetic oligonucleotide
  Target: LAMA2; (-) strand; PAM type: YTN; PAM sequence: CTC
actgtaacctccgtatcctg

SEQ ID NO: 282503 - DNA, 20 bp, Artificial Sequence
  Description of Artificial Sequence: Synthetic oligonucleotide
  Target: LAMA2; (-) strand; PAM type: YTN; PAM sequence: CTC
agctcactgtaacctccgta

SEQ ID NO: 282504 - DNA, 20 bp, Artificial Sequence
  Description of Artificial Sequence: Synthetic oligonucleotide
  Target: LAMA2; (-) strand; PAM type: YTN; PAM sequence: CTG
aagtgcagtggcgcaatctc

SEQ ID NO: 282505 - DNA, 20 bp, Artificial Sequence
  Description of Artificial Sequence: Synthetic oligonucleotide
  Target: LAMA2; (-) strand; PAM type: YTN; PAM sequence: TTG
cccaggctgaagtgcagtgg

SEQ ID NO: 282506 - DNA, 20 bp, Artificial Sequence
  Description of Artificial Sequence: Synthetic oligonucleotide
  Target: LAMA2; (-) strand; PAM type: YTN; PAM sequence: CTG
ttgcccaggctgaagtgcag

SEQ ID NO: 282507 - DNA, 20 bp, Artificial Sequence
  Description of Artificial Sequence: Synthetic oligonucleotide
  Target: LAMA2; (-) strand; PAM type: YTN; PAM sequence: CTC
tgttgcccaggctgaagtgc

SEQ ID NO: 282508 - DNA, 20 bp, Artificial Sequence
  Description of Artificial Sequence: Synthetic oligonucleotide
  Target: LAMA2; (-) strand; PAM type: YTN; PAM sequence: CTC
actctgttgcccaggctgaa

SEQ ID NO: 282509 - DNA, 20 bp, Artificial Sequence
  Description of Artificial Sequence: Synthetic oligonucleotide
  Target: LAMA2; (-) strand; PAM type: YTN; PAM sequence: TTA
gatagagtctcactctgttg

SEQ ID NO: 282510 - DNA, 20 bp, Artificial Sequence
  Description of Artificial Sequence: Synthetic oligonucleotide
  Target: LAMA2; (-) strand; PAM type: YTN; PAM sequence: TTT
agatagagtctcactctgtt

SEQ ID NO: 282511 - DNA, 20 bp, Artificial Sequence
  Description of Artificial Sequence: Synthetic oligonucleotide
  Target: LAMA2; (-) strand; PAM type: YTN; PAM sequence: TTT
tagatagagtctcactctgt

SEQ ID NO: 282512 - DNA, 20 bp, Artificial Sequence
  Description of Artificial Sequence: Synthetic oligonucleotide
  Target: LAMA2; (-) strand; PAM type: YTN; PAM sequence: TTT
ttagatagagtctcactctg

SEQ ID NO: 282513 - DNA, 20 bp, Artificial Sequence
  Description of Artificial Sequence: Synthetic oligonucleotide
  Target: LAMA2; (-) strand; PAM type: YTN; PAM sequence: TTT
tttagatagagtctcactct

SEQ ID NO: 282514 - DNA, 20 bp, Artificial Sequence
  Description of Artificial Sequence: Synthetic oligonucleotide
  Target: LAMA2; (-) strand; PAM type: YTN; PAM sequence: TTT
ttttagatagagtctcactc

SEQ ID NO: 282515 - DNA, 20 bp, Artificial Sequence
  Description of Artificial Sequence: Synthetic oligonucleotide
  Target: LAMA2; (-) strand; PAM type: YTN; PAM sequence: TTT
tttttagatagagtctcact

SEQ ID NO: 282516 - DNA, 20 bp, Artificial Sequence
  Description of Artificial Sequence: Synthetic oligonucleotide
  Target: LAMA2; (-) strand; PAM type: YTN; PAM sequence: TTT
ttttttagatagagtctcac

SEQ ID NO: 282517 - DNA, 20 bp, Artificial Sequence
  Description of Artificial Sequence: Synthetic oligonucleotide
  Target: LAMA2; (-) strand; PAM type: YTN; PAM sequence: TTT
tttttttagatagagtctca

SEQ ID NO: 282518 - DNA, 20 bp, Artificial Sequence
  Description of Artificial Sequence: Synthetic oligonucleotide
  Target: LAMA2; (-) strand; PAM type: YTN; PAM sequence: TTT
ttttttttagatagagtctc

SEQ ID NO: 282519 - DNA, 20 bp, Artificial Sequence
  Description of Artificial Sequence: Synthetic oligonucleotide
  Target: LAMA2; (-) strand; PAM type: YTN; PAM sequence: TTT
tttttttttagatagagtct

SEQ ID NO: 282520 - DNA, 20 bp, Artificial Sequence
  Description of Artificial Sequence: Synthetic oligonucleotide
  Target: LAMA2; (-) strand; PAM type: YTN; PAM sequence: TTT
ttttttttttagatagagtc

SEQ ID NO: 282521 - DNA, 20 bp, Artificial Sequence
  Description of Artificial Sequence: Synthetic oligonucleotide
  Target: LAMA2; (-) strand; PAM type: YTN; PAM sequence: TTT
tttttttttttagatagagt

SEQ ID NO: 282522 - DNA, 20 bp, Artificial Sequence
  Description of Artificial Sequence: Synthetic oligonucleotide
  Target: LAMA2; (-) strand; PAM type: YTN; PAM sequence: TTT
ttttttttttttagatagag

SEQ ID NO: 282523 - DNA, 20 bp, Artificial Sequence
  Description of Artificial Sequence: Synthetic oligonucleotide
  Target: LAMA2; (-) strand; PAM type: YTN; PAM sequence: TTT
tttttttttttttagataga

SEQ ID NO: 282524 - DNA, 20 bp, Artificial Sequence
  Description of Artificial Sequence: Synthetic oligonucleotide
  Target: LAMA2; (-) strand; PAM type: YTN; PAM sequence: TTT
ttttttttttttttagatag

SEQ ID NO: 282525 - DNA, 20 bp, Artificial Sequence
  Description of Artificial Sequence: Synthetic oligonucleotide
  Target: LAMA2; (-) strand; PAM type: YTN; PAM sequence: TTT
tttttttttttttttagata

SEQ ID NO: 282526 - DNA, 20 bp, Artificial Sequence
  Description of Artificial Sequence: Synthetic oligonucleotide
  Target: LAMA2; (-) strand; PAM type: YTN; PAM sequence: CTA
gtttttttttttttttttta

SEQ ID NO: 282527 - DNA, 20 bp, Artificial Sequence
  Description of Artificial Sequence: Synthetic oligonucleotide
  Target: LAMA2; (-) strand; PAM type: YTN; PAM sequence: TTA
cctagttttttttttttttt

SEQ ID NO: 282528 - DNA, 20 bp, Artificial Sequence
  Description of Artificial Sequence: Synthetic oligonucleotide
  Target: LAMA2; (-) strand; PAM type: YTN; PAM sequence: TTA
taggtatgttacctagtttt

SEQ ID NO: 282529 - DNA, 20 bp, Artificial Sequence
  Description of Artificial Sequence: Synthetic oligonucleotide
  Target: LAMA2; (-) strand; PAM type: YTN; PAM sequence: TTT
ataggtatgttacctagttt

SEQ ID NO: 282530 - DNA, 20 bp, Artificial Sequence
  Description of Artificial Sequence: Synthetic oligonucleotide
  Target: LAMA2; (-) strand; PAM type: YTN; PAM sequence: TTT
tataggtatgttacctagtt

SEQ ID NO: 282531 - DNA, 20 bp, Artificial Sequence
  Description of Artificial Sequence: Synthetic oligonucleotide
  Target: LAMA2; (-) strand; PAM type: YTN; PAM sequence: CTA
ttttataggtatgttaccta

SEQ ID NO: 282532 - DNA, 20 bp, Artificial Sequence
  Description of Artificial Sequence: Synthetic oligonucleotide
  Target: LAMA2; (-) strand; PAM type: YTN; PAM sequence: TTA
tctattttataggtatgtta

SEQ ID NO: 282533 - DNA, 20 bp, Artificial Sequence
  Description of Artificial Sequence: Synthetic oligonucleotide
  Target: LAMA2; (-) strand; PAM type: YTN; PAM sequence: CTG
tgttatctattttataggta

SEQ ID NO: 282534 - DNA, 20 bp, Artificial Sequence
  Description of Artificial Sequence: Synthetic oligonucleotide
  Target: LAMA2; (-) strand; PAM type: YTN; PAM sequence: TTC
ctgtgttatctattttatag

SEQ ID NO: 282535 - DNA, 20 bp, Artificial Sequence
  Description of Artificial Sequence: Synthetic oligonucleotide
  Target: LAMA2; (-) strand; PAM type: YTN; PAM sequence: TTT
cctgtgttatctattttata

SEQ ID NO: 282536 - DNA, 20 bp, Artificial Sequence
  Description of Artificial Sequence: Synthetic oligonucleotide
  Target: LAMA2; (-) strand; PAM type: YTN; PAM sequence: TTA
tttcctgtgttatctatttt

SEQ ID NO: 282537 - DNA, 20 bp, Artificial Sequence
  Description of Artificial Sequence: Synthetic oligonucleotide
  Target: LAMA2; (-) strand; PAM type: YTN; PAM sequence: TTT
atttcctgtgttatctattt

SEQ ID NO: 282538 - DNA, 20 bp, Artificial Sequence
  Description of Artificial Sequence: Synthetic oligonucleotide
  Target: LAMA2; (-) strand; PAM type: YTN; PAM sequence: TTT
tatttcctgtgttatctatt

SEQ ID NO: 282539 - DNA, 20 bp, Artificial Sequence
  Description of Artificial Sequence: Synthetic oligonucleotide
  Target: LAMA2; (-) strand; PAM type: YTN; PAM sequence: TTT
ttatttcctgtgttatctat

SEQ ID NO: 282540 - DNA, 20 bp, Artificial Sequence
  Description of Artificial Sequence: Synthetic oligonucleotide
  Target: LAMA2; (-) strand; PAM type: YTN; PAM sequence: CTT
tttatttcctgtgttatcta

SEQ ID NO: 282541 - DNA, 20 bp, Artificial Sequence
  Description of Artificial Sequence: Synthetic oligonucleotide
  Target: LAMA2; (-) strand; PAM type: YTN; PAM sequence: CTC
cagggaataggtctttttat

SEQ ID NO: 282542 - DNA, 20 bp, Artificial Sequence
  Description of Artificial Sequence: Synthetic oligonucleotide
  Target: LAMA2; (-) strand; PAM type: YTN; PAM sequence: CTG
tcatagatctccagggaata

SEQ ID NO: 282543 - DNA, 20 bp, Artificial Sequence
  Description of Artificial Sequence: Synthetic oligonucleotide
  Target: LAMA2; (-) strand; PAM type: YTN; PAM sequence: TTA
aaatgagctgtcatagatct

SEQ ID NO: 282544 - DNA, 20 bp, Artificial Sequence
  Description of Artificial Sequence: Synthetic oligonucleotide
  Target: LAMA2; (-) strand; PAM type: YTN; PAM sequence: TTT
aaaatgagctgtcatagatc

SEQ ID NO: 282545 - DNA, 20 bp, Artificial Sequence
  Description of Artificial Sequence: Synthetic oligonucleotide
  Target: LAMA2; (-) strand; PAM type: YTN; PAM sequence: CTT
taaaatgagctgtcatagat

SEQ ID NO: 282546 - DNA, 20 bp, Artificial Sequence
  Description of Artificial Sequence: Synthetic oligonucleotide
  Target: LAMA2; (-) strand; PAM type: YTN; PAM sequence: CTC
ctttaaaatgagctgtcata

SEQ ID NO: 282547 - DNA, 20 bp, Artificial Sequence
  Description of Artificial Sequence: Synthetic oligonucleotide
  Target: LAMA2; (-) strand; PAM type: YTN; PAM sequence: CTA
tgagacaaaccgcctccttt

SEQ ID NO: 282548 - DNA, 20 bp, Artificial Sequence
  Description of Artificial Sequence: Synthetic oligonucleotide
  Target: LAMA2; (-) strand; PAM type: YTN; PAM sequence: CTA
cagtgctatgagacaaaccg

SEQ ID NO: 282549 - DNA, 20 bp, Artificial Sequence
  Description of Artificial Sequence: Synthetic oligonucleotide
  Target: LAMA2; (-) strand; PAM type: YTN; PAM sequence: TTA
tataccacaggctacagtgc

SEQ ID NO: 282550 - DNA, 20 bp, Artificial Sequence
  Description of Artificial Sequence: Synthetic oligonucleotide
  Target: LAMA2; (-) strand; PAM type: YTN; PAM sequence: CTG
taattatataccacaggcta

SEQ ID NO: 282551 - DNA, 20 bp, Artificial Sequence
  Description of Artificial Sequence: Synthetic oligonucleotide
  Target: LAMA2; (-) strand; PAM type: YTN; PAM sequence: TTA
actgtaattatataccacag

SEQ ID NO: 282552 - DNA, 20 bp, Artificial Sequence
  Description of Artificial Sequence: Synthetic oligonucleotide
  Target: LAMA2; (-) strand; PAM type: YTN; PAM sequence: TTG
gtcaagggttaactgtaatt

SEQ ID NO: 282553 - DNA, 20 bp, Artificial Sequence
  Description of Artificial Sequence: Synthetic oligonucleotide
  Target: LAMA2; (-) strand; PAM type: YTN; PAM sequence: CTG
cattggtcaagggttaactg

SEQ ID NO: 282554 - DNA, 20 bp, Artificial Sequence
  Description of Artificial Sequence: Synthetic oligonucleotide
  Target: LAMA2; (-) strand; PAM type: YTN; PAM sequence: CTC
caacccctgcattggtcaag

SEQ ID NO: 282555 - DNA, 20 bp, Artificial Sequence
  Description of Artificial Sequence: Synthetic oligonucleotide
  Target: LAMA2; (-) strand; PAM type: YTN; PAM sequence: CTC
tccaacccctgcattggtca

SEQ ID NO: 282556 - DNA, 20 bp, Artificial Sequence
  Description of Artificial Sequence: Synthetic oligonucleotide
  Target: LAMA2; (-) strand; PAM type: YTN; PAM sequence: CTG
tgcaggggtccatgctctcc

SEQ ID NO: 282557 - DNA, 20 bp, Artificial Sequence
  Description of Artificial Sequence: Synthetic oligonucleotide
  Target: LAMA2; (-) strand; PAM type: YTN; PAM sequence: TTC
aactgtgcaggggtccatgc

SEQ ID NO: 282558 - DNA, 20 bp, Artificial Sequence
  Description of Artificial Sequence: Synthetic oligonucleotide
  Target: LAMA2; (-) strand; PAM type: YTN; PAM sequence: TTT
caactgtgcaggggtccatg

SEQ ID NO: 282559 - DNA, 20 bp, Artificial Sequence
  Description of Artificial Sequence: Synthetic oligonucleotide
  Target: LAMA2; (-) strand; PAM type: YTN; PAM sequence: TTT
tcaactgtgcaggggtccat

SEQ ID NO: 282560 - DNA, 20 bp, Artificial Sequence
  Description of Artificial Sequence: Synthetic oligonucleotide
  Target: LAMA2; (-) strand; PAM type: YTN; PAM sequence: TTA
tacatggattttcaactgtg

SEQ ID NO: 282561 - DNA, 20 bp, Artificial Sequence
  Description of Artificial Sequence: Synthetic oligonucleotide
  Target: LAMA2; (-) strand; PAM type: YTN; PAM sequence: CTA
atgttatacatggattttca

SEQ ID NO: 282562 - DNA, 20 bp, Artificial Sequence
  Description of Artificial Sequence: Synthetic oligonucleotide
  Target: LAMA2; (-) strand; PAM type: YTN; PAM sequence: TTA
tgaagagtctaatgttatac

SEQ ID NO: 282563 - DNA, 20 bp, Artificial Sequence
  Description of Artificial Sequence: Synthetic oligonucleotide
  Target: LAMA2; (-) strand; PAM type: YTN; PAM sequence: TTT
atgaagagtctaatgttata

SEQ ID NO: 282564 - DNA, 20 bp, Artificial Sequence
  Description of Artificial Sequence: Synthetic oligonucleotide
  Target: LAMA2; (-) strand; PAM type: YTN; PAM sequence: TTA
tgaagtttatgaagagtcta

SEQ ID NO: 282565 - DNA, 20 bp, Artificial Sequence
  Description of Artificial Sequence: Synthetic oligonucleotide
  Target: LAMA2; (-) strand; PAM type: YTN; PAM sequence: TTA
gttatgaagtttatgaagag

SEQ ID NO: 282566 - DNA, 20 bp, Artificial Sequence
  Description of Artificial Sequence: Synthetic oligonucleotide
  Target: LAMA2; (-) strand; PAM type: YTN; PAM sequence: TTT
agttatgaagtttatgaaga

SEQ ID NO: 282567 - DNA, 20 bp, Artificial Sequence
  Description of Artificial Sequence: Synthetic oligonucleotide
  Target: LAMA2; (-) strand; PAM type: YTN; PAM sequence: TTA
tgaagtttagttatgaagtt

SEQ ID NO: 282568 - DNA, 20 bp, Artificial Sequence
  Description of Artificial Sequence: Synthetic oligonucleotide
  Target: LAMA2; (-) strand; PAM type: YTN; PAM sequence: TTA
tgttatgaagtttagttatg

SEQ ID NO: 282569 - DNA, 20 bp, Artificial Sequence
  Description of Artificial Sequence: Synthetic oligonucleotide
  Target: LAMA2; (-) strand; PAM type: YTN; PAM sequence: TTT
atgttatgaagtttagttat

SEQ ID NO: 282570 - DNA, 20 bp, Artificial Sequence
  Description of Artificial Sequence: Synthetic oligonucleotide
  Target: LAMA2; (-) strand; PAM type: YTN; PAM sequence: TTA
taaagtttatgttatgaagt

SEQ ID NO: 282571 - DNA, 20 bp, Artificial Sequence
  Description of Artificial Sequence: Synthetic oligonucleotide
  Target: LAMA2; (-) strand; PAM type: YTN; PAM sequence: TTT
ataaagtttatgttatgaag

SEQ ID NO: 282572 - DNA, 20 bp, Artificial Sequence
  Description of Artificial Sequence: Synthetic oligonucleotide
  Target: LAMA2; (-) strand; PAM type: YTN; PAM sequence: TTA
gtttataaagtttatgttat

SEQ ID NO: 282573 - DNA, 20 bp, Artificial Sequence
  Description of Artificial Sequence: Synthetic oligonucleotide
  Target: LAMA2; (-) strand; PAM type: YTN; PAM sequence: TTT
agtttataaagtttatgtta

SEQ ID NO: 282574 - DNA, 20 bp, Artificial Sequence
  Description of Artificial Sequence: Synthetic oligonucleotide
  Target: LAMA2; (-) strand; PAM type: YTN; PAM sequence: TTT
tagtttataaagtttatgtt

SEQ ID NO: 282575 - DNA, 20 bp, Artificial Sequence
  Description of Artificial Sequence: Synthetic oligonucleotide
  Target: LAMA2; (-) strand; PAM type: YTN; PAM sequence: TTT
ttagtttataaagtttatgt

SEQ ID NO: 282576 - DNA, 20 bp, Artificial Sequence
  Description of Artificial Sequence: Synthetic oligonucleotide
  Target: LAMA2; (-) strand; PAM type: YTN; PAM sequence: TTT
tttagtttataaagtttatg

SEQ ID NO: 282577 - DNA, 20 bp, Artificial Sequence
  Description of Artificial Sequence: Synthetic oligonucleotide
  Target: LAMA2; (-) strand; PAM type: YTN; PAM sequence: TTT
ttttagtttataaagtttat

SEQ ID NO: 282578 - DNA, 20 bp, Artificial Sequence
  Description of Artificial Sequence: Synthetic oligonucleotide
  Target: LAMA2; (-) strand; PAM type: YTN; PAM sequence: CTT
tttttagtttataaagttta

SEQ ID NO: 282579 - DNA, 20 bp, Artificial Sequence
  Description of Artificial Sequence: Synthetic oligonucleotide
  Target: LAMA2; (-) strand; PAM type: YTN; PAM sequence: TTC
tttttttagtttataaagtt

SEQ ID NO: 282580 - DNA, 20 bp, Artificial Sequence
  Description of Artificial Sequence: Synthetic oligonucleotide
  Target: LAMA2; (-) strand; PAM type: YTN; PAM sequence: TTG
ggaatagattctttttttag

SEQ ID NO: 282581 - DNA, 20 bp, Artificial Sequence
  Description of Artificial Sequence: Synthetic oligonucleotide
  Target: LAMA2; (-) strand; PAM type: YTN; PAM sequence: CTT
gggaatagattcttttttta

SEQ ID NO: 282582 - DNA, 20 bp, Artificial Sequence
  Description of Artificial Sequence: Synthetic oligonucleotide
  Target: LAMA2; (-) strand; PAM type: YTN; PAM sequence: TTG
ggcttgggaatagattcttt

SEQ ID NO: 282583 - DNA, 20 bp, Artificial Sequence
  Description of Artificial Sequence: Synthetic oligonucleotide
  Target: LAMA2; (-) strand; PAM type: YTN; PAM sequence: TTT
gggcttgggaatagattctt

SEQ ID NO: 282584 - DNA, 20 bp, Artificial Sequence
  Description of Artificial Sequence: Synthetic oligonucleotide
  Target: LAMA2; (-) strand; PAM type: YTN; PAM sequence: TTA
tttgggcttgggaatagatt

SEQ ID NO: 282585 - DNA, 20 bp, Artificial Sequence
  Description of Artificial Sequence: Synthetic oligonucleotide
  Target: LAMA2; (-) strand; PAM type: YTN; PAM sequence: TTC
attatttgggcttgggaata

SEQ ID NO: 282586 - DNA, 20 bp, Artificial Sequence
  Description of Artificial Sequence: Synthetic oligonucleotide
  Target: LAMA2; (-) strand; PAM type: YTN; PAM sequence: CTG
attcattatttgggcttggg

SEQ ID NO: 282587 - DNA, 20 bp, Artificial Sequence
  Description of Artificial Sequence: Synthetic oligonucleotide
  Target: LAMA2; (-) strand; PAM type: YTN; PAM sequence: CTG
tgtgggacagcaccatatgt

SEQ ID NO: 282588 - DNA, 20 bp, Artificial Sequence
  Description of Artificial Sequence: Synthetic oligonucleotide
  Target: LAMA2; (-) strand; PAM type: YTN; PAM sequence: CTC
tgtgtgggacagcaccatat

SEQ ID NO: 282589 - DNA, 20 bp, Artificial Sequence
  Description of Artificial Sequence: Synthetic oligonucleotide
  Target: LAMA2; (-) strand; PAM type: YTN; PAM sequence: TTC
tctgtgtgggacagcaccat

SEQ ID NO: 282590 - DNA, 20 bp, Artificial Sequence
  Description of Artificial Sequence: Synthetic oligonucleotide
  Target: LAMA2; (-) strand; PAM type: YTN; PAM sequence: CTG
ttctctgtgtgggacagcac

SEQ ID NO: 282591 - DNA, 20 bp, Artificial Sequence
  Description of Artificial Sequence: Synthetic oligonucleotide
  Target: LAMA2; (-) strand; PAM type: YTN; PAM sequence: TTC
atactgttctctgtgtggga

SEQ ID NO: 282592 - DNA, 20 bp, Artificial Sequence
  Description of Artificial Sequence: Synthetic oligonucleotide
  Target: LAMA2; (-) strand; PAM type: YTN; PAM sequence: TTT
catactgttctctgtgtggg

SEQ ID NO: 282593 - DNA, 20 bp, Artificial Sequence
  Description of Artificial Sequence: Synthetic oligonucleotide
  Target: LAMA2; (-) strand; PAM type: YTN; PAM sequence: TTG
gaataatgtttcatactgtt

SEQ ID NO: 282594 - DNA, 20 bp, Artificial Sequence
  Description of Artificial Sequence: Synthetic oligonucleotide
  Target: LAMA2; (-) strand; PAM type: YTN; PAM sequence: TTA
atgattggaataatgtttca

SEQ ID NO: 282595 - DNA, 20 bp, Artificial Sequence
  Description of Artificial Sequence: Synthetic oligonucleotide
  Target: LAMA2; (-) strand; PAM type: YTN; PAM sequence: CTT
aatgattggaataatgtttc

SEQ ID NO: 282596 - DNA, 20 bp, Artificial Sequence
  Description of Artificial Sequence: Synthetic oligonucleotide
  Target: LAMA2; (-) strand; PAM type: YTN; PAM sequence: TTG
ataaaacttaatgattggaa

SEQ ID NO: 282597 - DNA, 20 bp, Artificial Sequence
  Description of Artificial Sequence: Synthetic oligonucleotide
  Target: LAMA2; (-) strand; PAM type: YTN; PAM sequence: TTT
gataaaacttaatgattgga

SEQ ID NO: 282598 - DNA, 20 bp, Artificial Sequence
  Description of Artificial Sequence: Synthetic oligonucleotide
  Target: LAMA2; (-) strand; PAM type: YTN; PAM sequence: CTG
gtttgataaaacttaatgat

SEQ ID NO: 282599 - DNA, 20 bp, Artificial Sequence
  Description of Artificial Sequence: Synthetic oligonucleotide
  Target: LAMA2; (-) strand; PAM type: YTN; PAM sequence: TTC
aactggtttgataaaactta

SEQ ID NO: 282600 - DNA, 20 bp, Artificial Sequence
  Description of Artificial Sequence: Synthetic oligonucleotide
  Target: LAMA2; (-) strand; PAM type: YTN; PAM sequence: CTT
caactggtttgataaaactt

SEQ ID NO: 282601 - DNA, 20 bp, Artificial Sequence
  Description of Artificial Sequence: Synthetic oligonucleotide
  Target: LAMA2; (-) strand; PAM type: YTN; PAM sequence: CTG
tatagaaggaaggcttcaac

SEQ ID NO: 282602 - DNA, 20 bp, Artificial Sequence
  Description of Artificial Sequence: Synthetic oligonucleotide
  Target: LAMA2; (-) strand; PAM type: YTN; PAM sequence: TTG
gaggaccactgtatagaagg

SEQ ID NO: 282603 - DNA, 20 bp, Artificial Sequence
  Description of Artificial Sequence: Synthetic oligonucleotide
  Target: LAMA2; (-) strand; PAM type: YTN; PAM sequence: TTT
ggaggaccactgtatagaag

SEQ ID NO: 282604 - DNA, 20 bp, Artificial Sequence
  Description of Artificial Sequence: Synthetic oligonucleotide
  Target: LAMA2; (-) strand; PAM type: YTN; PAM sequence: CTG
agtgtttggaggaccactgt

SEQ ID NO: 282605 - DNA, 20 bp, Artificial Sequence
  Description of Artificial Sequence: Synthetic oligonucleotide
  Target: LAMA2; (-) strand; PAM type: YTN; PAM sequence: CTG
aacggaatgactgagtgttt

SEQ ID NO: 282606 - DNA, 20 bp, Artificial Sequence
  Description of Artificial Sequence: Synthetic oligonucleotide
  Target: LAMA2; (-) strand; PAM type: YTN; PAM sequence: TTG
tctgaacggaatgactgagt

SEQ ID NO: 282607 - DNA, 20 bp, Artificial Sequence
  Description of Artificial Sequence: Synthetic oligonucleotide
  Target: LAMA2; (-) strand; PAM type: YTN; PAM sequence: CTT
gtctgaacggaatgactgag

SEQ ID NO: 282608 - DNA, 20 bp, Artificial Sequence
  Description of Artificial Sequence: Synthetic oligonucleotide
  Target: LAMA2; (-) strand; PAM type: YTN; PAM sequence: TTC
aagacccacttgtctgaacg

SEQ ID NO: 282609 - DNA, 20 bp, Artificial Sequence
  Description of Artificial Sequence: Synthetic oligonucleotide
  Target: LAMA2; (-) strand; PAM type: YTN; PAM sequence: CTT
caagacccacttgtctgaac

SEQ ID NO: 282610 - DNA, 20 bp, Artificial Sequence
  Description of Artificial Sequence: Synthetic oligonucleotide
  Target: LAMA2; (-) strand; PAM type: YTN; PAM sequence: CTC
agaatcttcaagacccactt

SEQ ID NO: 282611 - DNA, 20 bp, Artificial Sequence
  Description of Artificial Sequence: Synthetic oligonucleotide
  Target: LAMA2; (-) strand; PAM type: YTN; PAM sequence: TTA
catccatgatctcagaatct

SEQ ID NO: 282612 - DNA, 20 bp, Artificial Sequence
  Description of Artificial Sequence: Synthetic oligonucleotide
  Target: LAMA2; (-) strand; PAM type: YTN; PAM sequence: TTG
caagtgtattacatccatga

SEQ ID NO: 282613 - DNA, 20 bp, Artificial Sequence
  Description of Artificial Sequence: Synthetic oligonucleotide
  Target: LAMA2; (-) strand; PAM type: YTN; PAM sequence: TTT
gcaagtgtattacatccatg

SEQ ID NO: 282614 - DNA, 20 bp, Artificial Sequence
  Description of Artificial Sequence: Synthetic oligonucleotide
  Target: LAMA2; (-) strand; PAM type: YTN; PAM sequence: TTA
gcgtttgcaagtgtattaca

SEQ ID NO: 282615 - DNA, 20 bp, Artificial Sequence
  Description of Artificial Sequence: Synthetic oligonucleotide
  Target: LAMA2; (-) strand; PAM type: YTN; PAM sequence: CTC
aacaggttagcgtttgcaag

SEQ ID NO: 282616 - DNA, 20 bp, Artificial Sequence
  Description of Artificial Sequence: Synthetic oligonucleotide
  Target: LAMA2; (-) strand; PAM type: YTN; PAM sequence: TTA
aaatataaaataataacaca

SEQ ID NO: 282617 - DNA, 20 bp, Artificial Sequence
  Description of Artificial Sequence: Synthetic oligonucleotide
  Target: LAMA2; (-) strand; PAM type: YTN; PAM sequence: TTT
aaaatataaaataataacac

SEQ ID NO: 282618 - DNA, 20 bp, Artificial Sequence
  Description of Artificial Sequence: Synthetic oligonucleotide
  Target: LAMA2; (-) strand; PAM type: YTN; PAM sequence: TTT
taaaatataaaataataaca

SEQ ID NO: 282619 - DNA, 20 bp, Artificial Sequence
  Description of Artificial Sequence: Synthetic oligonucleotide
  Target: LAMA2; (-) strand; PAM type: YTN; PAM sequence: TTT
ttaaaatataaaataataac

SEQ ID NO: 282620 - DNA, 20 bp, Artificial Sequence
  Description of Artificial Sequence: Synthetic oligonucleotide
  Target: LAMA2; (-) strand; PAM type: YTN; PAM sequence: TTA
tttttaaaatataaaataat

SEQ ID NO: 282621 - DNA, 20 bp, Artificial Sequence
  Description of Artificial Sequence: Synthetic oligonucleotide
  Target: LAMA2; (-) strand; PAM type: YTN; PAM sequence: CTT
atttttaaaatataaaataa

SEQ ID NO: 282622 - DNA, 20 bp, Artificial Sequence
  Description of Artificial Sequence: Synthetic oligonucleotide
  Target: LAMA2; (-) strand; PAM type: YTN; PAM sequence: CTC
ttatttttaaaatataaaat

SEQ ID NO: 282623 - DNA, 20 bp, Artificial Sequence
  Description of Artificial Sequence: Synthetic oligonucleotide
  Target: LAMA2; (-) strand; PAM type: YTN; PAM sequence: TTC
tcttatttttaaaatataaa

SEQ ID NO: 282624 - DNA, 20 bp, Artificial Sequence
  Description of Artificial Sequence: Synthetic oligonucleotide
  Target: LAMA2; (-) strand; PAM type: YTN; PAM sequence: TTA
ttctcttatttttaaaatat

SEQ ID NO: 282625 - DNA, 20 bp, Artificial Sequence
  Description of Artificial Sequence: Synthetic oligonucleotide
  Target: LAMA2; (-) strand; PAM type: YTN; PAM sequence: TTT
attctcttatttttaaaata

SEQ ID NO: 282626 - DNA, 20 bp, Artificial Sequence
  Description of Artificial Sequence: Synthetic oligonucleotide
  Target: LAMA2; (-) strand; PAM type: YTN; PAM sequence: TTC
cagtttattctcttattttt

SEQ ID NO: 282627 - DNA, 20 bp, Artificial Sequence
  Description of Artificial Sequence: Synthetic oligonucleotide
  Target: LAMA2; (-) strand; PAM type: YTN; PAM sequence: CTG
cagtattccagtttattctc

SEQ ID NO: 282628 - DNA, 20 bp, Artificial Sequence
  Description of Artificial Sequence: Synthetic oligonucleotide
  Target: LAMA2; (-) strand; PAM type: YTN; PAM sequence: TTA
gcagcactgcagtattccag

SEQ ID NO: 282629 - DNA, 20 bp, Artificial Sequence
  Description of Artificial Sequence: Synthetic oligonucleotide
  Target: LAMA2; (-) strand; PAM type: YTN; PAM sequence: TTT
agcagcactgcagtattcca

SEQ ID NO: 282630 - DNA, 20 bp, Artificial Sequence
  Description of Artificial Sequence: Synthetic oligonucleotide
  Target: LAMA2; (-) strand; PAM type: YTN; PAM sequence: TTG
gtttagcagcactgcagtat

SEQ ID NO: 282631 - DNA, 20 bp, Artificial Sequence
  Description of Artificial Sequence: Synthetic oligonucleotide
  Target: LAMA2; (-) strand; PAM type: YTN; PAM sequence: TTT
ggtttagcagcactgcagta

SEQ ID NO: 282632 - DNA, 20 bp, Artificial Sequence
  Description of Artificial Sequence: Synthetic oligonucleotide
  Target: LAMA2; (-) strand; PAM type: YTN; PAM sequence: CTT
tggtttagcagcactgcagt

SEQ ID NO: 282633 - DNA, 20 bp, Artificial Sequence
  Description of Artificial Sequence: Synthetic oligonucleotide
  Target: LAMA2; (-) strand; PAM type: YTN; PAM sequence: CTA
tatcatactttggtttagca

SEQ ID NO: 282634 - DNA, 20 bp, Artificial Sequence
  Description of Artificial Sequence: Synthetic oligonucleotide
  Target: LAMA2; (-) strand; PAM type: YTN; PAM sequence: CTC
ctatatcatactttggttta

SEQ ID NO: 282635 - DNA, 20 bp, Artificial Sequence
  Description of Artificial Sequence: Synthetic oligonucleotide
  Target: LAMA2; (-) strand; PAM type: YTN; PAM sequence: TTG
cactcctatatcatactttg

SEQ ID NO: 282636 - DNA, 20 bp, Artificial Sequence
  Description of Artificial Sequence: Synthetic oligonucleotide
  Target: LAMA2; (-) strand; PAM type: YTN; PAM sequence: TTA
gtcacaattgcactcctata

SEQ ID NO: 282637 - DNA, 20 bp, Artificial Sequence
  Description of Artificial Sequence: Synthetic oligonucleotide
  Target: LAMA2; (-) strand; PAM type: YTN; PAM sequence: CTT
agtcacaattgcactcctat

SEQ ID NO: 282638 - DNA, 20 bp, Artificial Sequence
  Description of Artificial Sequence: Synthetic oligonucleotide
  Target: LAMA2; (-) strand; PAM type: YTN; PAM sequence: TTA
ataataaaaggatcccttag

SEQ ID NO: 282639 - DNA, 20 bp, Artificial Sequence
  Description of Artificial Sequence: Synthetic oligonucleotide
  Target: LAMA2; (-) strand; PAM type: YTN; PAM sequence: TTT
aataataaaaggatccctta

SEQ ID NO: 282640 - DNA, 20 bp, Artificial Sequence
  Description of Artificial Sequence: Synthetic oligonucleotide
  Target: LAMA2; (-) strand; PAM type: YTN; PAM sequence: CTT
taataataaaaggatccctt

SEQ ID NO: 282641 - DNA, 20 bp, Artificial Sequence
  Description of Artificial Sequence: Synthetic oligonucleotide
  Target: LAMA2; (-) strand; PAM type: YTN; PAM sequence: TTC
aaaaggagtatatctttaat

SEQ ID NO: 282642 - DNA, 20 bp, Artificial Sequence
  Description of Artificial Sequence: Synthetic oligonucleotide
  Target: LAMA2; (-) strand; PAM type: YTN; PAM sequence: TTC
aggcaaagggtaatatgcaa

SEQ ID NO: 282643 - DNA, 20 bp, Artificial Sequence
  Description of Artificial Sequence: Synthetic oligonucleotide
  Target: LAMA2; (-) strand; PAM type: YTN; PAM sequence: CTG
attcaggcaaagggtaatat

SEQ ID NO: 282644 - DNA, 20 bp, Artificial Sequence
  Description of Artificial Sequence: Synthetic oligonucleotide
  Target: LAMA2; (-) strand; PAM type: YTN; PAM sequence: CTA
tggaaaggctgattcaggca

SEQ ID NO: 282645 - DNA, 20 bp, Artificial Sequence
  Description of Artificial Sequence: Synthetic oligonucleotide
  Target: LAMA2; (-) strand; PAM type: YTN; PAM sequence: CTG
ctatggaaaggctgattcag

SEQ ID NO: 282646 - DNA, 20 bp, Artificial Sequence
  Description of Artificial Sequence: Synthetic oligonucleotide
  Target: LAMA2; (-) strand; PAM type: YTN; PAM sequence: TTG
catgcctgctatggaaaggc

SEQ ID NO: 282647 - DNA, 20 bp, Artificial Sequence
  Description of Artificial Sequence: Synthetic oligonucleotide
  Target: LAMA2; (-) strand; PAM type: YTN; PAM sequence: TTT
gcatgcctgctatggaaagg

SEQ ID NO: 282648 - DNA, 20 bp, Artificial Sequence
  Description of Artificial Sequence: Synthetic oligonucleotide
  Target: LAMA2; (-) strand; PAM type: YTN; PAM sequence: TTT
tgcatgcctgctatggaaag

SEQ ID NO: 282649 - DNA, 20 bp, Artificial Sequence
  Description of Artificial Sequence: Synthetic oligonucleotide
  Target: LAMA2; (-) strand; PAM type: YTN; PAM sequence: CTT
ttgcatgcctgctatggaaa

SEQ ID NO: 282650 - DNA, 20 bp, Artificial Sequence
  Description of Artificial Sequence: Synthetic oligonucleotide
  Target: LAMA2; (-) strand; PAM type: YTN; PAM sequence: TTG
tcttttgcatgcctgctatg

SEQ ID NO: 282651 - DNA, 20 bp, Artificial Sequence
  Description of Artificial Sequence: Synthetic oligonucleotide
  Target: LAMA2; (-) strand; PAM type: YTN; PAM sequence: CTT
gtcttttgcatgcctgctat

SEQ ID NO: 282652 - DNA, 20 bp, Artificial Sequence
  Description of Artificial Sequence: Synthetic oligonucleotide
  Target: LAMA2; (-) strand; PAM type: YTN; PAM sequence: TTG
cttgtcttttgcatgcctgc

SEQ ID NO: 282653 - DNA, 20 bp, Artificial Sequence
  Description of Artificial Sequence: Synthetic oligonucleotide
  Target: LAMA2; (-) strand; PAM type: YTN; PAM sequence: TTT
gcttgtcttttgcatgcctg

SEQ ID NO: 282654 - DNA, 20 bp, Artificial Sequence
  Description of Artificial Sequence: Synthetic oligonucleotide
  Target: LAMA2; (-) strand; PAM type: YTN; PAM sequence: TTT
tgcttgtcttttgcatgcct

SEQ ID NO: 282655 - DNA, 20 bp, Artificial Sequence
  Description of Artificial Sequence: Synthetic oligonucleotide
  Target: LAMA2; (-) strand; PAM type: YTN; PAM sequence: TTG
tggtcaatagagcagatttt

SEQ ID NO: 282656 - DNA, 20 bp, Artificial Sequence
  Description of Artificial Sequence: Synthetic oligonucleotide
  Target: LAMA2; (-) strand; PAM type: YTN; PAM sequence: CTA
aaattgtggtcaatagagca

SEQ ID NO: 282657 - DNA, 20 bp, Artificial Sequence
  Description of Artificial Sequence: Synthetic oligonucleotide
  Target: LAMA2; (-) strand; PAM type: YTN; PAM sequence: TTA
gtctaaaattgtggtcaata

SEQ ID NO: 282658 - DNA, 20 bp, Artificial Sequence
  Description of Artificial Sequence: Synthetic oligonucleotide
  Target: LAMA2; (-) strand; PAM type: YTN; PAM sequence: TTT
agtctaaaattgtggtcaat

SEQ ID NO: 282659 - DNA, 20 bp, Artificial Sequence
  Description of Artificial Sequence: Synthetic oligonucleotide
  Target: LAMA2; (-) strand; PAM type: YTN; PAM sequence: TTT
tagtctaaaattgtggtcaa

SEQ ID NO: 282660 - DNA, 20 bp, Artificial Sequence
  Description of Artificial Sequence: Synthetic oligonucleotide
  Target: LAMA2; (-) strand; PAM type: YTN; PAM sequence: CTT
ttagtctaaaattgtggtca

SEQ ID NO: 282661 - DNA, 20 bp, Artificial Sequence
  Description of Artificial Sequence: Synthetic oligonucleotide
  Target: LAMA2; (-) strand; PAM type: YTN; PAM sequence: TTC
atccttttagtctaaaattg

SEQ ID NO: 282662 - DNA, 20 bp, Artificial Sequence
  Description of Artificial Sequence: Synthetic oligonucleotide
  Target: LAMA2; (-) strand; PAM type: YTN; PAM sequence: TTT
catccttttagtctaaaatt

SEQ ID NO: 282663 - DNA, 20 bp, Artificial Sequence
  Description of Artificial Sequence: Synthetic oligonucleotide
  Target: LAMA2; (-) strand; PAM type: YTN; PAM sequence: TTA
atttcatccttttagtctaa

SEQ ID NO: 282664 - DNA, 20 bp, Artificial Sequence
  Description of Artificial Sequence: Synthetic oligonucleotide
  Target: LAMA2; (-) strand; PAM type: YTN; PAM sequence: CTT
aatttcatccttttagtcta

SEQ ID NO: 282665 - DNA, 20 bp, Artificial Sequence
  Description of Artificial Sequence: Synthetic oligonucleotide
  Target: LAMA2; (-) strand; PAM type: YTN; PAM sequence: CTC
cagaccacagtaggccaggg

SEQ ID NO: 282666 - DNA, 20 bp, Artificial Sequence
  Description of Artificial Sequence: Synthetic oligonucleotide
  Target: LAMA2; (-) strand; PAM type: YTN; PAM sequence: TTC
tccagaccacagtaggccag

SEQ ID NO: 282667 - DNA, 20 bp, Artificial Sequence
  Description of Artificial Sequence: Synthetic oligonucleotide
  Target: LAMA2; (-) strand; PAM type: YTN; PAM sequence: TTG
ttctccagaccacagtaggc

SEQ ID NO: 282668 - DNA, 20 bp, Artificial Sequence
  Description of Artificial Sequence: Synthetic oligonucleotide
  Target: LAMA2; (-) strand; PAM type: YTN; PAM sequence: TTT
gttctccagaccacagtagg

SEQ ID NO: 282669 - DNA, 20 bp, Artificial Sequence
  Description of Artificial Sequence: Synthetic oligonucleotide
  Target: LAMA2; (-) strand; PAM type: YTN; PAM sequence: CTT
tgttctccagaccacagtag

SEQ ID NO: 282670 - DNA, 20 bp, Artificial Sequence
  Description of Artificial Sequence: Synthetic oligonucleotide
  Target: LAMA2; (-) strand; PAM type: YTN; PAM sequence: CTG
ctttgttctccagaccacag

SEQ ID NO: 282671 - DNA, 20 bp, Artificial Sequence
  Description of Artificial Sequence: Synthetic oligonucleotide
  Target: LAMA2; (-) strand; PAM type: YTN; PAM sequence: CTG
gaaaagactgctttgttctc

SEQ ID NO: 282672 - DNA, 20 bp, Artificial Sequence
  Description of Artificial Sequence: Synthetic oligonucleotide
  Target: LAMA2; (-) strand; PAM type: YTN; PAM sequence: TTC
acctggaaaagactgctttg

SEQ ID NO: 282673 - DNA, 20 bp, Artificial Sequence
  Description of Artificial Sequence: Synthetic oligonucleotide
  Target: LAMA2; (-) strand; PAM type: YTN; PAM sequence: TTT
cacctggaaaagactgcttt

SEQ ID NO: 282674 - DNA, 20 bp, Artificial Sequence
  Description of Artificial Sequence: Synthetic oligonucleotide
  Target: LAMA2; (-) strand; PAM type: YTN; PAM sequence: TTG
tatgagggatcagcaatttc

SEQ ID NO: 282675 - DNA, 20 bp, Artificial Sequence
  Description of Artificial Sequence: Synthetic oligonucleotide
  Target: LAMA2; (-) strand; PAM type: YTN; PAM sequence: TTT
gtatgagggatcagcaattt

SEQ ID NO: 282676 - DNA, 20 bp, Artificial Sequence
  Description of Artificial Sequence: Synthetic oligonucleotide
  Target: LAMA2; (-) strand; PAM type: YTN; PAM sequence: CTT
tgtatgagggatcagcaatt

SEQ ID NO: 282677 - DNA, 20 bp, Artificial Sequence
  Description of Artificial Sequence: Synthetic oligonucleotide
  Target: LAMA2; (-) strand; PAM type: YTN; PAM sequence: CTA
aaggaggaatcaaaactttg

SEQ ID NO: 282678 - DNA, 20 bp, Artificial Sequence
  Description of Artificial Sequence: Synthetic oligonucleotide
  Target: LAMA2; (-) strand; PAM type: YTN; PAM sequence: CTC
taaaggaggaatcaaaactt

SEQ ID NO: 282679 - DNA, 20 bp, Artificial Sequence
  Description of Artificial Sequence: Synthetic oligonucleotide
  Target: LAMA2; (-) strand; PAM type: YTN; PAM sequence: TTC
acactctaaaggaggaatca

SEQ ID NO: 282680 - DNA, 20 bp, Artificial Sequence
  Description of Artificial Sequence: Synthetic oligonucleotide
  Target: LAMA2; (-) strand; PAM type: YTN; PAM sequence: TTC
caccattcacactctaaagg

SEQ ID NO: 282681 - DNA, 20 bp, Artificial Sequence
  Description of Artificial Sequence: Synthetic oligonucleotide
  Target: LAMA2; (-) strand; PAM type: YTN; PAM sequence: TTT
ccaccattcacactctaaag

SEQ ID NO: 282682 - DNA, 20 bp, Artificial Sequence
  Description of Artificial Sequence: Synthetic oligonucleotide
  Target: LAMA2; (-) strand; PAM type: YTN; PAM sequence: TTA
tttccaccattcacactcta

SEQ ID NO: 282683 - DNA, 20 bp, Artificial Sequence
  Description of Artificial Sequence: Synthetic oligonucleotide
  Target: LAMA2; (-) strand; PAM type: YTN; PAM sequence: TTT
atttccaccattcacactct

SEQ ID NO: 282684 - DNA, 20 bp, Artificial Sequence
  Description of Artificial Sequence: Synthetic oligonucleotide
  Target: LAMA2; (-) strand; PAM type: YTN; PAM sequence: TTT
tatttccaccattcacactc

SEQ ID NO: 282685 - DNA, 20 bp, Artificial Sequence
  Description of Artificial Sequence: Synthetic oligonucleotide
  Target: LAMA2; (-) strand; PAM type: YTN; PAM sequence: TTT
ttatttccaccattcacact

SEQ ID NO: 282686 - DNA, 20 bp, Artificial Sequence
  Description of Artificial Sequence: Synthetic oligonucleotide
  Target: LAMA2; (-) strand; PAM type: YTN; PAM sequence: TTT
tttatttccaccattcacac

SEQ ID NO: 282687 - DNA, 20 bp, Artificial Sequence
  Description of Artificial Sequence: Synthetic oligonucleotide
  Target: LAMA2; (-) strand; PAM type: YTN; PAM sequence: TTT
ttttatttccaccattcaca

SEQ ID NO: 282688 - DNA, 20 bp, Artificial Sequence
  Description of Artificial Sequence: Synthetic oligonucleotide
  Target: LAMA2; (-) strand; PAM type: YTN; PAM sequence: TTA
tttttttatttccaccattc

SEQ ID NO: 282689 - DNA, 20 bp, Artificial Sequence
  Description of Artificial Sequence: Synthetic oligonucleotide
  Target: LAMA2; (-) strand; PAM type: YTN; PAM sequence: TTT
atttttttatttccaccatt

SEQ ID NO: 282690 - DNA, 20 bp, Artificial Sequence
  Description of Artificial Sequence: Synthetic oligonucleotide
  Target: LAMA2; (-) strand; PAM type: YTN; PAM sequence: TTT
tatttttttatttccaccat

SEQ ID NO: 282691 - DNA, 20 bp, Artificial Sequence
  Description of Artificial Sequence: Synthetic oligonucleotide
  Target: LAMA2; (-) strand; PAM type: YTN; PAM sequence: CTG
gttttatttttttatttcca

SEQ ID NO: 282692 - DNA, 20 bp, Artificial Sequence
  Description of Artificial Sequence: Synthetic oligonucleotide
  Target: LAMA2; (-) strand; PAM type: YTN; PAM sequence: CTA
atggaagtccaccctggttt

SEQ ID NO: 282693 - DNA, 20 bp, Artificial Sequence
  Description of Artificial Sequence: Synthetic oligonucleotide
  Target: LAMA2; (-) strand; PAM type: YTN; PAM sequence: CTC
taatggaagtccaccctggt

SEQ ID NO: 282694 - DNA, 20 bp, Artificial Sequence
  Description of Artificial Sequence: Synthetic oligonucleotide
  Target: LAMA2; (-) strand; PAM type: YTN; PAM sequence: TTC
tctaatggaagtccaccctg

SEQ ID NO: 282695 - DNA, 20 bp, Artificial Sequence
  Description of Artificial Sequence: Synthetic oligonucleotide
  Target: LAMA2; (-) strand; PAM type: YTN; PAM sequence: TTT
ctctaatggaagtccaccct

SEQ ID NO: 282696 - DNA, 20 bp, Artificial Sequence
  Description of Artificial Sequence: Synthetic oligonucleotide
  Target: LAMA2; (-) strand; PAM type: YTN; PAM sequence: TTT
tctctaatggaagtccaccc

SEQ ID NO: 282697 - DNA, 20 bp, Artificial Sequence
  Description of Artificial Sequence: Synthetic oligonucleotide
  Target: LAMA2; (-) strand; PAM type: YTN; PAM sequence: TTT
ttctctaatggaagtccacc

SEQ ID NO: 282698 - DNA, 20 bp, Artificial Sequence
  Description of Artificial Sequence: Synthetic oligonucleotide
  Target: LAMA2; (-) strand; PAM type: YTN; PAM sequence: TTT
tttctctaatggaagtccac

SEQ ID NO: 282699 - DNA, 20 bp, Artificial Sequence
  Description of Artificial Sequence: Synthetic oligonucleotide
  Target: LAMA2; (-) strand; PAM type: YTN; PAM sequence: TTG
ttttttctctaatggaagtc

SEQ ID NO: 282700 - DNA, 20 bp, Artificial Sequence
  Description of Artificial Sequence: Synthetic oligonucleotide
  Target: LAMA2; (-) strand; PAM type: YTN; PAM sequence: TTA
ttgttttttctctaatggaa

SEQ ID NO: 282701 - DNA, 20 bp, Artificial Sequence
  Description of Artificial Sequence: Synthetic oligonucleotide
  Target: LAMA2; (-) strand; PAM type: YTN; PAM sequence: CTT
attgttttttctctaatgga

SEQ ID NO: 282702 - DNA, 20 bp, Artificial Sequence
  Description of Artificial Sequence: Synthetic oligonucleotide
  Target: LAMA2; (-) strand; PAM type: YTN; PAM sequence: TTG
ccacttattgttttttctct

SEQ ID NO: 282703 - DNA, 20 bp, Artificial Sequence
  Description of Artificial Sequence: Synthetic oligonucleotide
  Target: LAMA2; (-) strand; PAM type: YTN; PAM sequence: TTT
gccacttattgttttttctc

SEQ ID NO: 282704 - DNA, 20 bp, Artificial Sequence
  Description of Artificial Sequence: Synthetic oligonucleotide
  Target: LAMA2; (-) strand; PAM type: YTN; PAM sequence: TTT
tgccacttattgttttttct

SEQ ID NO: 282705 - DNA, 20 bp, Artificial Sequence
  Description of Artificial Sequence: Synthetic oligonucleotide
  Target: LAMA2; (-) strand; PAM type: YTN; PAM sequence: CTA
ttttgccacttattgttttt

SEQ ID NO: 282706 - DNA, 20 bp, Artificial Sequence
  Description of Artificial Sequence: Synthetic oligonucleotide
  Target: LAMA2; (-) strand; PAM type: YTN; PAM sequence: TTG
ccactattttgccacttatt

SEQ ID NO: 282707 - DNA, 20 bp, Artificial Sequence
  Description of Artificial Sequence: Synthetic oligonucleotide
  Target: LAMA2; (-) strand; PAM type: YTN; PAM sequence: TTT
gccactattttgccacttat

SEQ ID NO: 282708 - DNA, 20 bp, Artificial Sequence
  Description of Artificial Sequence: Synthetic oligonucleotide
  Target: LAMA2; (-) strand; PAM type: YTN; PAM sequence: CTA
tatttgccactattttgcca

SEQ ID NO: 282709 - DNA, 20 bp, Artificial Sequence
  Description of Artificial Sequence: Synthetic oligonucleotide
  Target: LAMA2; (-) strand; PAM type: YTN; PAM sequence: CTC
tatatttgccactattttgc

SEQ ID NO: 282710 - DNA, 20 bp, Artificial Sequence
  Description of Artificial Sequence: Synthetic oligonucleotide
  Target: LAMA2; (-) strand; PAM type: YTN; PAM sequence: CTG
cccctctatatttgccacta

SEQ ID NO: 282711 - DNA, 20 bp, Artificial Sequence
  Description of Artificial Sequence: Synthetic oligonucleotide
  Target: LAMA2; (-) strand; PAM type: YTN; PAM sequence: TTC
caatagaacctgcccctcta

SEQ ID NO: 282712 - DNA, 20 bp, Artificial Sequence
  Description of Artificial Sequence: Synthetic oligonucleotide
  Target: LAMA2; (-) strand; PAM type: YTN; PAM sequence: TTT
ccaatagaacctgcccctct

SEQ ID NO: 282713 - DNA, 20 bp, Artificial Sequence
  Description of Artificial Sequence: Synthetic oligonucleotide
  Target: LAMA2; (-) strand; PAM type: YTN; PAM sequence: CTT
tccaatagaacctgcccctc

SEQ ID NO: 282714 - DNA, 20 bp, Artificial Sequence
  Description of Artificial Sequence: Synthetic oligonucleotide
  Target: LAMA2; (-) strand; PAM type: YTN; PAM sequence: TTA
gggataatctttccaataga

SEQ ID NO: 282715 - DNA, 20 bp, Artificial Sequence
  Description of Artificial Sequence: Synthetic oligonucleotide
  Target: LAMA2; (-) strand; PAM type: YTN; PAM sequence: CTT
agggataatctttccaatag

SEQ ID NO: 282716 - DNA, 20 bp, Artificial Sequence
  Description of Artificial Sequence: Synthetic oligonucleotide
  Target: LAMA2; (-) strand; PAM type: YTN; PAM sequence: CTC
ttagggataatctttccaat

SEQ ID NO: 282717 - DNA, 20 bp, Artificial Sequence
  Description of Artificial Sequence: Synthetic oligonucleotide
  Target: LAMA2; (-) strand; PAM type: YTN; PAM sequence: CTC
gctcttagggataatctttc

SEQ ID NO: 282718 - DNA, 20 bp, Artificial Sequence
  Description of Artificial Sequence: Synthetic oligonucleotide
  Target: LAMA2; (-) strand; PAM type: YTN; PAM sequence: CTA
cgtctcgctcttagggataa

SEQ ID NO: 282719 - DNA, 20 bp, Artificial Sequence
  Description of Artificial Sequence: Synthetic oligonucleotide
  Target: LAMA2; (-) strand; PAM type: YTN; PAM sequence: TTG
gatatgacaagctacgtctc

SEQ ID NO: 282720 - DNA, 20 bp, Artificial Sequence
  Description of Artificial Sequence: Synthetic oligonucleotide
  Target: LAMA2; (-) strand; PAM type: YTN; PAM sequence: CTC
acatggtggggttggatatg

SEQ ID NO: 282721 - DNA, 20 bp, Artificial Sequence
  Description of Artificial Sequence: Synthetic oligonucleotide
  Target: LAMA2; (-) strand; PAM type: YTN; PAM sequence: CTA
ctcacatggtggggttggat

SEQ ID NO: 282722 - DNA, 20 bp, Artificial Sequence
  Description of Artificial Sequence: Synthetic oligonucleotide
  Target: LAMA2; (-) strand; PAM type: YTN; PAM sequence: CTC
tactcacatggtggggttgg

SEQ ID NO: 282723 - DNA, 20 bp, Artificial Sequence
  Description of Artificial Sequence: Synthetic oligonucleotide
  Target: LAMA2; (-) strand; PAM type: YTN; PAM sequence: TTG
tcctctactcacatggtggg

SEQ ID NO: 282724 - DNA, 20 bp, Artificial Sequence
  Description of Artificial Sequence: Synthetic oligonucleotide
  Target: LAMA2; (-) strand; PAM type: YTN; PAM sequence: CTT
gtcctctactcacatggtgg

SEQ ID NO: 282725 - DNA, 20 bp, Artificial Sequence
  Description of Artificial Sequence: Synthetic oligonucleotide
  Target: LAMA2; (-) strand; PAM type: YTN; PAM sequence: TTC
ttgtcctctactcacatggt

SEQ ID NO: 282726 - DNA, 20 bp, Artificial Sequence
  Description of Artificial Sequence: Synthetic oligonucleotide
  Target: LAMA2; (-) strand; PAM type: YTN; PAM sequence: TTT
cttgtcctctactcacatgg

SEQ ID NO: 282727 - DNA, 20 bp, Artificial Sequence
  Description of Artificial Sequence: Synthetic oligonucleotide
  Target: LAMA2; (-) strand; PAM type: YTN; PAM sequence: TTG
tttcttgtcctctactcaca

SEQ ID NO: 282728 - DNA, 20 bp, Artificial Sequence
  Description of Artificial Sequence: Synthetic oligonucleotide
  Target: LAMA2; (-) strand; PAM type: YTN; PAM sequence: TTT
gtttcttgtcctctactcac

SEQ ID NO: 282729 - DNA, 20 bp, Artificial Sequence
  Description of Artificial Sequence: Synthetic oligonucleotide
  Target: LAMA2; (-) strand; PAM type: YTN; PAM sequence: CTG
aatgtttgtttcttgtcctc

SEQ ID NO: 282730 - DNA, 20 bp, Artificial Sequence
  Description of Artificial Sequence: Synthetic oligonucleotide
  Target: LAMA2; (-) strand; PAM type: YTN; PAM sequence: TTC
tgaatgtttgtttcttgtcc

SEQ ID NO: 282731 - DNA, 20 bp, Artificial Sequence
  Description of Artificial Sequence: Synthetic oligonucleotide
  Target: LAMA2; (-) strand; PAM type: YTN; PAM sequence: CTG
agatgatatacaggagtgtt

SEQ ID NO: 282732 - DNA, 20 bp, Artificial Sequence
  Description of Artificial Sequence: Synthetic oligonucleotide
  Target: LAMA2; (-) strand; PAM type: YTN; PAM sequence: TTG
ctgagatgatatacaggagt

SEQ ID NO: 282733 - DNA, 20 bp, Artificial Sequence
  Description of Artificial Sequence: Synthetic oligonucleotide
  Target: LAMA2; (-) strand; PAM type: YTN; PAM sequence: CTT
gctgagatgatatacaggag

SEQ ID NO: 282734 - DNA, 20 bp, Artificial Sequence
  Description of Artificial Sequence: Synthetic oligonucleotide
  Target: LAMA2; (-) strand; PAM type: YTN; PAM sequence: CTC
ttgctgagatgatatacagg

SEQ ID NO: 282735 - DNA, 20 bp, Artificial Sequence
  Description of Artificial Sequence: Synthetic oligonucleotide
  Target: LAMA2; (-) strand; PAM type: YTN; PAM sequence: TTG
tctcttgctgagatgatata

SEQ ID NO: 282736 - DNA, 20 bp, Artificial Sequence
  Description of Artificial Sequence: Synthetic oligonucleotide
  Target: LAMA2; (-) strand; PAM type: YTN; PAM sequence: TTT
gtctcttgctgagatgatat

SEQ ID NO: 282737 - DNA, 20 bp, Artificial Sequence
  Description of Artificial Sequence: Synthetic oligonucleotide
  Target: LAMA2; (-) strand; PAM type: YTN; PAM sequence: CTT
tgtctcttgctgagatgata

SEQ ID NO: 282738 - DNA, 20 bp, Artificial Sequence
  Description of Artificial Sequence: Synthetic oligonucleotide
  Target: LAMA2; (-) strand; PAM type: YTN; PAM sequence: TTG
cacaggcctttgtctcttgc

SEQ ID NO: 282739 - DNA, 20 bp, Artificial Sequence
  Description of Artificial Sequence: Synthetic oligonucleotide
  Target: LAMA2; (-) strand; PAM type: YTN; PAM sequence: TTA
ttgcacaggcctttgtctct

SEQ ID NO: 282740 - DNA, 20 bp, Artificial Sequence
  Description of Artificial Sequence: Synthetic oligonucleotide
  Target: LAMA2; (-) strand; PAM type: YTN; PAM sequence: TTT
attgcacaggcctttgtctc

SEQ ID NO: 282741 - DNA, 20 bp, Artificial Sequence
  Description of Artificial Sequence: Synthetic oligonucleotide
  Target: LAMA2; (-) strand; PAM type: YTN; PAM sequence: TTT
tattgcacaggcctttgtct

SEQ ID NO: 282742 - DNA, 20 bp, Artificial Sequence
  Description of Artificial Sequence: Synthetic oligonucleotide
  Target: LAMA2; (-) strand; PAM type: YTN; PAM sequence: TTT
ttattgcacaggcctttgtc

SEQ ID NO: 282743 - DNA, 20 bp, Artificial Sequence
  Description of Artificial Sequence: Synthetic oligonucleotide
  Target: LAMA2; (-) strand; PAM type: YTN; PAM sequence: CTA
agccccatttttattgcaca

SEQ ID NO: 282744 - DNA, 20 bp, Artificial Sequence
  Description of Artificial Sequence: Synthetic oligonucleotide
  Target: LAMA2; (-) strand; PAM type: YTN; PAM sequence: CTC
taagccccatttttattgca

SEQ ID NO: 282745 - DNA, 20 bp, Artificial Sequence
  Description of Artificial Sequence: Synthetic oligonucleotide
  Target: LAMA2; (-) strand; PAM type: YTN; PAM sequence: TTA
gctctaagccccatttttat

SEQ ID NO: 282746 - DNA, 20 bp, Artificial Sequence
  Description of Artificial Sequence: Synthetic oligonucleotide
  Target: LAMA2; (-) strand; PAM type: YTN; PAM sequence: TTT
agctctaagccccattttta

SEQ ID NO: 282747 - DNA, 20 bp, Artificial Sequence
  Description of Artificial Sequence: Synthetic oligonucleotide
  Target: LAMA2; (-) strand; PAM type: YTN; PAM sequence: TTT
tagctctaagccccattttt

SEQ ID NO: 282748 - DNA, 20 bp, Artificial Sequence
  Description of Artificial Sequence: Synthetic oligonucleotide
  Target: LAMA2; (-) strand; PAM type: YTN; PAM sequence: TTT
ttagctctaagccccatttt

SEQ ID NO: 282749 - DNA, 20 bp, Artificial Sequence
  Description of Artificial Sequence: Synthetic oligonucleotide
  Target: LAMA2; (-) strand; PAM type: YTN; PAM sequence: CTG
aacacacaacaaagcccaga

SEQ ID NO: 282750 - DNA, 20 bp, Artificial Sequence
  Description of Artificial Sequence: Synthetic oligonucleotide
  Target: LAMA2; (-) strand; PAM type: YTN; PAM sequence: TTC
tgaacacacaacaaagccca

SEQ ID NO: 282751 - DNA, 20 bp, Artificial Sequence
  Description of Artificial Sequence: Synthetic oligonucleotide
  Target: LAMA2; (-) strand; PAM type: YTN; PAM sequence: CTG
attctgaacacacaacaaag

SEQ ID NO: 282752 - DNA, 20 bp, Artificial Sequence
  Description of Artificial Sequence: Synthetic oligonucleotide
  Target: LAMA2; (-) strand; PAM type: YTN; PAM sequence: CTC
tgattctgaacacacaacaa

SEQ ID NO: 282753 - DNA, 20 bp, Artificial Sequence
  Description of Artificial Sequence: Synthetic oligonucleotide
  Target: LAMA2; (-) strand; PAM type: YTN; PAM sequence: CTC
agactctgattctgaacaca

SEQ ID NO: 282754 - DNA, 20 bp, Artificial Sequence
  Description of Artificial Sequence: Synthetic oligonucleotide
  Target: LAMA2; (-) strand; PAM type: YTN; PAM sequence: TTG
caaaaaacgccatagaatct

SEQ ID NO: 282755 - DNA, 20 bp, Artificial Sequence
  Description of Artificial Sequence: Synthetic oligonucleotide
  Target: LAMA2; (-) strand; PAM type: YTN; PAM sequence: CTT
gcaaaaaacgccatagaatc

SEQ ID NO: 282756 - DNA, 20 bp, Artificial Sequence
  Description of Artificial Sequence: Synthetic oligonucleotide
  Target: LAMA2; (-) strand; PAM type: YTN; PAM sequence: TTA
cttgcaaaaaacgccataga

SEQ ID NO: 282757 - DNA, 20 bp, Artificial Sequence
  Description of Artificial Sequence: Synthetic oligonucleotide
  Target: LAMA2; (-) strand; PAM type: YTN; PAM sequence: CTT
acttgcaaaaaacgccatag

SEQ ID NO: 282758 - DNA, 20 bp, Artificial Sequence
  Description of Artificial Sequence: Synthetic oligonucleotide
  Target: LAMA2; (-) strand; PAM type: YTN; PAM sequence: TTA
acttacttgcaaaaaacgcc

SEQ ID NO: 282759 - DNA, 20 bp, Artificial Sequence
  Description of Artificial Sequence: Synthetic oligonucleotide
  Target: LAMA2; (-) strand; PAM type: YTN; PAM sequence: CTA
aattaacttacttgcaaaaa

SEQ ID NO: 282760 - DNA, 20 bp, Artificial Sequence
  Description of Artificial Sequence: Synthetic oligonucleotide
  Target: LAMA2; (-) strand; PAM type: YTN; PAM sequence: CTG
gtctaaattaacttacttgc

SEQ ID NO: 282761 - DNA, 20 bp, Artificial Sequence
  Description of Artificial Sequence: Synthetic oligonucleotide
  Target: LAMA2; (-) strand; PAM type: YTN; PAM sequence: TTC
tggtctaaattaacttactt

SEQ ID NO: 282762 - DNA, 20 bp, Artificial Sequence
  Description of Artificial Sequence: Synthetic oligonucleotide
  Target: LAMA2; (-) strand; PAM type: YTN; PAM sequence: TTT
ctggtctaaattaacttact

SEQ ID NO: 282763 - DNA, 20 bp, Artificial Sequence
  Description of Artificial Sequence: Synthetic oligonucleotide
  Target: LAMA2; (-) strand; PAM type: YTN; PAM sequence: TTA
tttctggtctaaattaactt

SEQ ID NO: 282764 - DNA, 20 bp, Artificial Sequence
  Description of Artificial Sequence: Synthetic oligonucleotide
  Target: LAMA2; (-) strand; PAM type: YTN; PAM sequence: TTT
atttctggtctaaattaact

SEQ ID NO: 282765 - DNA, 20 bp, Artificial Sequence
  Description of Artificial Sequence: Synthetic oligonucleotide
  Target: LAMA2; (-) strand; PAM type: YTN; PAM sequence: CTG
tttatttctggtctaaatta

SEQ ID NO: 282766 - DNA, 20 bp, Artificial Sequence
  Description of Artificial Sequence: Synthetic oligonucleotide
  Target: LAMA2; (-) strand; PAM type: YTN; PAM sequence: TTC
tgtttatttctggtctaaat

SEQ ID NO: 282767 - DNA, 20 bp, Artificial Sequence
  Description of Artificial Sequence: Synthetic oligonucleotide
  Target: LAMA2; (-) strand; PAM type: YTN; PAM sequence: TTT
ctgtttatttctggtctaaa

SEQ ID NO: 282768 - DNA, 20 bp, Artificial Sequence
  Description of Artificial Sequence: Synthetic oligonucleotide
  Target: LAMA2; (-) strand; PAM type: YTN; PAM sequence: TTG
aaggcatttctgtttatttc

SEQ ID NO: 282769 - DNA, 20 bp, Artificial Sequence
  Description of Artificial Sequence: Synthetic oligonucleotide
  Target: LAMA2; (-) strand; PAM type: YTN; PAM sequence: CTT
gaaggcatttctgtttattt

SEQ ID NO: 282770 - DNA, 20 bp, Artificial Sequence
  Description of Artificial Sequence: Synthetic oligonucleotide
  Target: LAMA2; (-) strand; PAM type: YTN; PAM sequence: CTC
ttgaaggcatttctgtttat

SEQ ID NO: 282771 - DNA, 20 bp, Artificial Sequence
  Description of Artificial Sequence: Synthetic oligonucleotide
  Target: LAMA2; (-) strand; PAM type: YTN; PAM sequence: CTG
taagtctcttgaaggcattt

SEQ ID NO: 282772 - DNA, 20 bp, Artificial Sequence
  Description of Artificial Sequence: Synthetic oligonucleotide
  Target: LAMA2; (-) strand; PAM type: YTN; PAM sequence: TTA
tctgtaagtctcttgaaggc

SEQ ID NO: 282773 - DNA, 20 bp, Artificial Sequence
  Description of Artificial Sequence: Synthetic oligonucleotide
  Target: LAMA2; (-) strand; PAM type: YTN; PAM sequence: TTA
tgttatctgtaagtctcttg

SEQ ID NO: 282774 - DNA, 20 bp, Artificial Sequence
  Description of Artificial Sequence: Synthetic oligonucleotide
  Target: LAMA2; (-) strand; PAM type: YTN; PAM sequence: TTT
atgttatctgtaagtctctt

SEQ ID NO: 282775 - DNA, 20 bp, Artificial Sequence
  Description of Artificial Sequence: Synthetic oligonucleotide
  Target: LAMA2; (-) strand; PAM type: YTN; PAM sequence: CTT
tatgttatctgtaagtctct

SEQ ID NO: 282776 - DNA, 20 bp, Artificial Sequence
  Description of Artificial Sequence: Synthetic oligonucleotide
  Target: LAMA2; (-) strand; PAM type: YTN; PAM sequence: TTA
acacaggccccaccatccct

SEQ ID NO: 282777 - DNA, 20 bp, Artificial Sequence
  Description of Artificial Sequence: Synthetic oligonucleotide
  Target: LAMA2; (-) strand; PAM type: YTN; PAM sequence: TTT
aacacaggccccaccatccc

SEQ ID NO: 282778 - DNA, 20 bp, Artificial Sequence
  Description of Artificial Sequence: Synthetic oligonucleotide
  Target: LAMA2; (-) strand; PAM type: YTN; PAM sequence: TTG
gtttaacacaggccccacca

SEQ ID NO: 282779 - DNA, 20 bp, Artificial Sequence
  Description of Artificial Sequence: Synthetic oligonucleotide
  Target: LAMA2; (-) strand; PAM type: YTN; PAM sequence: TTT
ggtttaacacaggccccacc

SEQ ID NO: 282780 - DNA, 20 bp, Artificial Sequence
  Description of Artificial Sequence: Synthetic oligonucleotide
  Target: LAMA2; (-) strand; PAM type: YTN; PAM sequence: CTT
tggtttaacacaggccccac

SEQ ID NO: 282781 - DNA, 20 bp, Artificial Sequence
  Description of Artificial Sequence: Synthetic oligonucleotide
  Target: LAMA2; (-) strand; PAM type: YTN; PAM sequence: TTA
aataagacaaatagtctttg

SEQ ID NO: 282782 - DNA, 20 bp, Artificial Sequence
  Description of Artificial Sequence: Synthetic oligonucleotide
  Target: LAMA2; (-) strand; PAM type: YTN; PAM sequence: TTT
aaataagacaaatagtcttt

SEQ ID NO: 282783 - DNA, 20 bp, Artificial Sequence
  Description of Artificial Sequence: Synthetic oligonucleotide
  Target: LAMA2; (-) strand; PAM type: YTN; PAM sequence: CTT
taaataagacaaatagtctt

SEQ ID NO: 282784 - DNA, 20 bp, Artificial Sequence
  Description of Artificial Sequence: Synthetic oligonucleotide
  Target: LAMA2; (-) strand; PAM type: YTN; PAM sequence: TTG
aatacctttaaataagacaa

SEQ ID NO: 282785 - DNA, 20 bp, Artificial Sequence
  Description of Artificial Sequence: Synthetic oligonucleotide
  Target: LAMA2; (-) strand; PAM type: YTN; PAM sequence: TTT
gaatacctttaaataagaca

SEQ ID NO: 282786 - DNA, 20 bp, Artificial Sequence
  Description of Artificial Sequence: Synthetic oligonucleotide
  Target: LAMA2; (-) strand; PAM type: YTN; PAM sequence: TTG
agtttgaatacctttaaata

SEQ ID NO: 282787 - DNA, 20 bp, Artificial Sequence
  Description of Artificial Sequence: Synthetic oligonucleotide
  Target: LAMA2; (-) strand; PAM type: YTN; PAM sequence: TTG
cccagcaagaaaattgagtt

SEQ ID NO: 282788 - DNA, 20 bp, Artificial Sequence
  Description of Artificial Sequence: Synthetic oligonucleotide
  Target: LAMA2; (-) strand; PAM type: YTN; PAM sequence: TTT
gcccagcaagaaaattgagt

SEQ ID NO: 282789 - DNA, 20 bp, Artificial Sequence
  Description of Artificial Sequence: Synthetic oligonucleotide
  Target: LAMA2; (-) strand; PAM type: YTN; PAM sequence: TTT
tgcccagcaagaaaattgag

SEQ ID NO: 282790 - DNA, 20 bp, Artificial Sequence
  Description of Artificial Sequence: Synthetic oligonucleotide
  Target: LAMA2; (-) strand; PAM type: YTN; PAM sequence: CTT
ttgcccagcaagaaaattga

SEQ ID NO: 282791 - DNA, 20 bp, Artificial Sequence
  Description of Artificial Sequence: Synthetic oligonucleotide
  Target: LAMA2; (-) strand; PAM type: YTN; PAM sequence: TTC
ttttgcccagcaagaaaatt

SEQ ID NO: 282792 - DNA, 20 bp, Artificial Sequence
  Description of Artificial Sequence: Synthetic oligonucleotide
  Target: LAMA2; (-) strand; PAM type: YTN; PAM sequence: TTT
cttttgcccagcaagaaaat

SEQ ID NO: 282793 - DNA, 20 bp, Artificial Sequence
  Description of Artificial Sequence: Synthetic oligonucleotide
  Target: LAMA2; (-) strand; PAM type: YTN; PAM sequence: TTT
tcttttgcccagcaagaaaa

SEQ ID NO: 282794 - DNA, 20 bp, Artificial Sequence
  Description of Artificial Sequence: Synthetic oligonucleotide
  Target: LAMA2; (-) strand; PAM type: YTN; PAM sequence: TTG
ttttcttttgcccagcaaga

SEQ ID NO: 282795 - DNA, 20 bp, Artificial Sequence
  Description of Artificial Sequence: Synthetic oligonucleotide
  Target: LAMA2; (-) strand; PAM type: YTN; PAM sequence: CTT
gttttcttttgcccagcaag

SEQ ID NO: 282796 - DNA, 20 bp, Artificial Sequence
  Description of Artificial Sequence: Synthetic oligonucleotide
  Target: LAMA2; (-) strand; PAM type: YTN; PAM sequence: TTG
caggcttgttttcttttgcc

SEQ ID NO: 282797 - DNA, 20 bp, Artificial Sequence
  Description of Artificial Sequence: Synthetic oligonucleotide
  Target: LAMA2; (-) strand; PAM type: YTN; PAM sequence: CTT
gcaggcttgttttcttttgc

SEQ ID NO: 282798 - DNA, 20 bp, Artificial Sequence
  Description of Artificial Sequence: Synthetic oligonucleotide
  Target: LAMA2; (-) strand; PAM type: YTN; PAM sequence: CTG
tgggcttgcaggcttgtttt

SEQ ID NO: 282799 - DNA, 20 bp, Artificial Sequence
  Description of Artificial Sequence: Synthetic oligonucleotide
  Target: LAMA2; (-) strand; PAM type: YTN; PAM sequence: CTA
ggacatggtgactgtgggct

SEQ ID NO: 282800 - DNA, 20 bp, Artificial Sequence
  Description of Artificial Sequence: Synthetic oligonucleotide
  Target: LAMA2; (-) strand; PAM type: YTN; PAM sequence: CTC
taggacatggtgactgtggg

SEQ ID NO: 282801 - DNA, 20 bp, Artificial Sequence
  Description of Artificial Sequence: Synthetic oligonucleotide
  Target: LAMA2; (-) strand; PAM type: YTN; PAM sequence: CTC
ctctaggacatggtgactgt

SEQ ID NO: 282802 - DNA, 20 bp, Artificial Sequence
  Description of Artificial Sequence: Synthetic oligonucleotide
  Target: LAMA2; (-) strand; PAM type: YTN; PAM sequence: TTG
gctcctctaggacatggtga

SEQ ID NO: 282803 - DNA, 20 bp, Artificial Sequence
  Description of Artificial Sequence: Synthetic oligonucleotide
  Target: LAMA2; (-) strand; PAM type: YTN; PAM sequence: TTT
ggctcctctaggacatggtg

SEQ ID NO: 282804 - DNA, 20 bp, Artificial Sequence
  Description of Artificial Sequence: Synthetic oligonucleotide
  Target: LAMA2; (-) strand; PAM type: YTN; PAM sequence: CTG
catttggctcctctaggaca

SEQ ID NO: 282805 - DNA, 20 bp, Artificial Sequence
  Description of Artificial Sequence: Synthetic oligonucleotide
  Target: LAMA2; (-) strand; PAM type: YTN; PAM sequence: CTA
aaaccaccagacatcaacac

SEQ ID NO: 282806 - DNA, 20 bp, Artificial Sequence
  Description of Artificial Sequence: Synthetic oligonucleotide
  Target: LAMA2; (-) strand; PAM type: YTN; PAM sequence: CTG
cagccagtggaatgaaaaac

SEQ ID NO: 282807 - DNA, 20 bp, Artificial Sequence
  Description of Artificial Sequence: Synthetic oligonucleotide
  Target: LAMA2; (-) strand; PAM type: YTN; PAM sequence: CTC
tgcagccagtggaatgaaaa

SEQ ID NO: 282808 - DNA, 20 bp, Artificial Sequence
  Description of Artificial Sequence: Synthetic oligonucleotide
  Target: LAMA2; (-) strand; PAM type: YTN; PAM sequence: TTG
ggataaaagggagtcccctc

SEQ ID NO: 282809 - DNA, 20 bp, Artificial Sequence
  Description of Artificial Sequence: Synthetic oligonucleotide
  Target: LAMA2; (-) strand; PAM type: YTN; PAM sequence: TTC
aggatattgggataaaaggg

SEQ ID NO: 282810 - DNA, 20 bp, Artificial Sequence
  Description of Artificial Sequence: Synthetic oligonucleotide
  Target: LAMA2; (-) strand; PAM type: YTN; PAM sequence: CTG
caaagattcaggatattggg

SEQ ID NO: 282811 - DNA, 20 bp, Artificial Sequence
  Description of Artificial Sequence: Synthetic oligonucleotide
  Target: LAMA2; (-) strand; PAM type: YTN; PAM sequence: TTC
tgcaaagattcaggatattg

SEQ ID NO: 282812 - DNA, 20 bp, Artificial Sequence
  Description of Artificial Sequence: Synthetic oligonucleotide
  Target: LAMA2; (-) strand; PAM type: YTN; PAM sequence: CTG
gtagcaggttctgcaaagat

SEQ ID NO: 282813 - DNA, 20 bp, Artificial Sequence
  Description of Artificial Sequence: Synthetic oligonucleotide
  Target: LAMA2; (-) strand; PAM type: YTN; PAM sequence: TTG
tctggtagcaggttctgcaa

SEQ ID NO: 282814 - DNA, 20 bp, Artificial Sequence
  Description of Artificial Sequence: Synthetic oligonucleotide
  Target: LAMA2; (-) strand; PAM type: YTN; PAM sequence: CTT
gtctggtagcaggttctgca

SEQ ID NO: 282815 - DNA, 20 bp, Artificial Sequence
  Description of Artificial Sequence: Synthetic oligonucleotide
  Target: LAMA2; (-) strand; PAM type: YTN; PAM sequence: TTC
aggaaaggagggaaggtgta

SEQ ID NO: 282816 - DNA, 20 bp, Artificial Sequence
  Description of Artificial Sequence: Synthetic oligonucleotide
  Target: LAMA2; (-) strand; PAM type: YTN; PAM sequence: CTT
caggaaaggagggaaggtgt

SEQ ID NO: 282817 - DNA, 20 bp, Artificial Sequence
  Description of Artificial Sequence: Synthetic oligonucleotide
  Target: LAMA2; (-) strand; PAM type: YTN; PAM sequence: CTA
gggggtcatagtaggagctt

SEQ ID NO: 282818 - DNA, 20 bp, Artificial Sequence
  Description of Artificial Sequence: Synthetic oligonucleotide
  Target: LAMA2; (-) strand; PAM type: YTN; PAM sequence: CTC
ccactagggggtcatagtag

SEQ ID NO: 282819 - DNA, 20 bp, Artificial Sequence
  Description of Artificial Sequence: Synthetic oligonucleotide
  Target: LAMA2; (-) strand; PAM type: YTN; PAM sequence: TTC
ctcccactagggggtcatag

SEQ ID NO: 282820 - DNA, 20 bp, Artificial Sequence
  Description of Artificial Sequence: Synthetic oligonucleotide
  Target: LAMA2; (-) strand; PAM type: YTN; PAM sequence: CTT
cctcccactagggggtcata

SEQ ID NO: 282821 - DNA, 20 bp, Artificial Sequence
  Description of Artificial Sequence: Synthetic oligonucleotide
  Target: LAMA2; (-) strand; PAM type: YTN; PAM sequence: CTC
ttcctcccactagggggtca

SEQ ID NO: 282822 - DNA, 20 bp, Artificial Sequence
  Description of Artificial Sequence: Synthetic oligonucleotide
  Target: LAMA2; (-) strand; PAM type: YTN; PAM sequence: TTG
catatgctcttcctcccact

SEQ ID NO: 282823 - DNA, 20 bp, Artificial Sequence
  Description of Artificial Sequence: Synthetic oligonucleotide
  Target: LAMA2; (-) strand; PAM type: YTN; PAM sequence: CTT
gcatatgctcttcctcccac

SEQ ID NO: 282824 - DNA, 20 bp, Artificial Sequence
  Description of Artificial Sequence: Synthetic oligonucleotide
  Target: LAMA2; (-) strand; PAM type: YTN; PAM sequence: TTC
gcaataagcaccatgcttgc

SEQ ID NO: 282825 - DNA, 20 bp, Artificial Sequence
  Description of Artificial Sequence: Synthetic oligonucleotide
  Target: LAMA2; (-) strand; PAM type: YTN; PAM sequence: TTG
ttcgcaataagcaccatgct

SEQ ID NO: 282826 - DNA, 20 bp, Artificial Sequence
  Description of Artificial Sequence: Synthetic oligonucleotide
  Target: LAMA2; (-) strand; PAM type: YTN; PAM sequence: CTT
gttcgcaataagcaccatgc

SEQ ID NO: 282827 - DNA, 20 bp, Artificial Sequence
  Description of Artificial Sequence: Synthetic oligonucleotide
  Target: LAMA2; (-) strand; PAM type: YTN; PAM sequence: TTA
gatcttgttcgcaataagca

SEQ ID NO: 282828 - DNA, 20 bp, Artificial Sequence
  Description of Artificial Sequence: Synthetic oligonucleotide
  Target: LAMA2; (-) strand; PAM type: YTN; PAM sequence: CTG
aaagtaagaaattagatctt

SEQ ID NO: 282829 - DNA, 20 bp, Artificial Sequence
  Description of Artificial Sequence: Synthetic oligonucleotide
  Target: LAMA2; (-) strand; PAM type: YTN; PAM sequence: CTG
atctgaaagtaagaaattag

SEQ ID NO: 282830 - DNA, 20 bp, Artificial Sequence
  Description of Artificial Sequence: Synthetic oligonucleotide
  Target: LAMA2; (-) strand; PAM type: YTN; PAM sequence: TTC
tgatctgaaagtaagaaatt

SEQ ID NO: 282831 - DNA, 20 bp, Artificial Sequence
  Description of Artificial Sequence: Synthetic oligonucleotide
  Target: LAMA2; (-) strand; PAM type: YTN; PAM sequence: CTT
ctgatctgaaagtaagaaat

SEQ ID NO: 282832 - DNA, 20 bp, Artificial Sequence
  Description of Artificial Sequence: Synthetic oligonucleotide
  Target: LAMA2; (-) strand; PAM type: YTN; PAM sequence: CTC
ttctgatctgaaagtaagaa

SEQ ID NO: 282833 - DNA, 20 bp, Artificial Sequence
  Description of Artificial Sequence: Synthetic oligonucleotide
  Target: LAMA2; (-) strand; PAM type: YTN; PAM sequence: TTA
tggagaaaccctcttctgat

SEQ ID NO: 282834 - DNA, 20 bp, Artificial Sequence
  Description of Artificial Sequence: Synthetic oligonucleotide
  Target: LAMA2; (-) strand; PAM type: YTN; PAM sequence: TTC
acagggagtcaggttatgga

SEQ ID NO: 282835 - DNA, 20 bp, Artificial Sequence
  Description of Artificial Sequence: Synthetic oligonucleotide
  Target: LAMA2; (-) strand; PAM type: YTN; PAM sequence: TTT
cacagggagtcaggttatgg

SEQ ID NO: 282836 - DNA, 20 bp, Artificial Sequence
  Description of Artificial Sequence: Synthetic oligonucleotide
  Target: LAMA2; (-) strand; PAM type: YTN; PAM sequence: CTG
tttcacagggagtcaggtta

SEQ ID NO: 282837 - DNA, 20 bp, Artificial Sequence
  Description of Artificial Sequence: Synthetic oligonucleotide
  Target: LAMA2; (-) strand; PAM type: YTN; PAM sequence: CTC
agagatgactgtttcacagg

SEQ ID NO: 282838 - DNA, 20 bp, Artificial Sequence
  Description of Artificial Sequence: Synthetic oligonucleotide
  Target: LAMA2; (-) strand; PAM type: YTN; PAM sequence: CTA
gagtgaccacatatgggaac

SEQ ID NO: 282839 - DNA, 20 bp, Artificial Sequence
  Description of Artificial Sequence: Synthetic oligonucleotide
  Target: LAMA2; (-) strand; PAM type: YTN; PAM sequence: CTG
cacagacagacatacatact

SEQ ID NO: 282840 - DNA, 20 bp, Artificial Sequence
  Description of Artificial Sequence: Synthetic oligonucleotide
  Target: LAMA2; (-) strand; PAM type: YTN; PAM sequence: TTC
tgcacagacagacatacata

SEQ ID NO: 282841 - DNA, 20 bp, Artificial Sequence
  Description of Artificial Sequence: Synthetic oligonucleotide
  Target: LAMA2; (-) strand; PAM type: YTN; PAM sequence: TTA
ttctgcacagacagacatac

SEQ ID NO: 282842 - DNA, 20 bp, Artificial Sequence
  Description of Artificial Sequence: Synthetic oligonucleotide
  Target: LAMA2; (-) strand; PAM type: YTN; PAM sequence: CTT
attctgcacagacagacata

SEQ ID NO: 282843 - DNA, 20 bp, Artificial Sequence
  Description of Artificial Sequence: Synthetic oligonucleotide
  Target: LAMA2; (-) strand; PAM type: YTN; PAM sequence: TTA
cttattctgcacagacagac

SEQ ID NO: 282844 - DNA, 20 bp, Artificial Sequence
  Description of Artificial Sequence: Synthetic oligonucleotide
  Target: LAMA2; (-) strand; PAM type: YTN; PAM sequence: CTG
attacttattctgcacagac

SEQ ID NO: 282845 - DNA, 20 bp, Artificial Sequence
  Description of Artificial Sequence: Synthetic oligonucleotide
  Target: LAMA2; (-) strand; PAM type: YTN; PAM sequence: CTG
tatatctgattacttattct

SEQ ID NO: 282846 - DNA, 20 bp, Artificial Sequence
  Description of Artificial Sequence: Synthetic oligonucleotide
  Target: LAMA2; (-) strand; PAM type: YTN; PAM sequence: TTG
ggatgtgctgtatatctgat

SEQ ID NO: 282847 - DNA, 20 bp, Artificial Sequence
  Description of Artificial Sequence: Synthetic oligonucleotide
  Target: LAMA2; (-) strand; PAM type: YTN; PAM sequence: TTT
gggatgtgctgtatatctga

SEQ ID NO: 282848 - DNA, 20 bp, Artificial Sequence
  Description of Artificial Sequence: Synthetic oligonucleotide
  Target: LAMA2; (-) strand; PAM type: YTN; PAM sequence: CTG
tcacaagtttgggatgtgct

SEQ ID NO: 282849 - DNA, 20 bp, Artificial Sequence
  Description of Artificial Sequence: Synthetic oligonucleotide
  Target: LAMA2; (-) strand; PAM type: YTN; PAM sequence: CTA
gtagctgtcacaagtttggg

SEQ ID NO: 282850 - DNA, 20 bp, Artificial Sequence
  Description of Artificial Sequence: Synthetic oligonucleotide
  Target: LAMA2; (-) strand; PAM type: YTN; PAM sequence: TTC
cctagtagctgtcacaagtt

SEQ ID NO: 282851 - DNA, 20 bp, Artificial Sequence
  Description of Artificial Sequence: Synthetic oligonucleotide
  Target: LAMA2; (-) strand; PAM type: YTN; PAM sequence: TTT
ccctagtagctgtcacaagt

SEQ ID NO: 282852 - DNA, 20 bp, Artificial Sequence
  Description of Artificial Sequence: Synthetic oligonucleotide
  Target: LAMA2; (-) strand; PAM type: YTN; PAM sequence: CTT
tccctagtagctgtcacaag

SEQ ID NO: 282853 - DNA, 20 bp, Artificial Sequence
  Description of Artificial Sequence: Synthetic oligonucleotide
  Target: LAMA2; (-) strand; PAM type: YTN; PAM sequence: TTC
cctttccctagtagctgtca

SEQ ID NO: 282854 - DNA, 20 bp, Artificial Sequence
  Description of Artificial Sequence: Synthetic oligonucleotide
  Target: LAMA2; (-) strand; PAM type: YTN; PAM sequence: CTT
ccctttccctagtagctgtc

SEQ ID NO: 282855 - DNA, 20 bp, Artificial Sequence
  Description of Artificial Sequence: Synthetic oligonucleotide
  Target: LAMA2; (-) strand; PAM type: YTN; PAM sequence: CTG
tgcttccctttccctagtag

SEQ ID NO: 282856 - DNA, 20 bp, Artificial Sequence
  Description of Artificial Sequence: Synthetic oligonucleotide
  Target: LAMA2; (-) strand; PAM type: YTN; PAM sequence: CTC
ctgtgcttccctttccctag

SEQ ID NO: 282857 - DNA, 20 bp, Artificial Sequence
  Description of Artificial Sequence: Synthetic oligonucleotide
  Target: LAMA2; (-) strand; PAM type: YTN; PAM sequence: TTA
ctcctgtgcttccctttccc

SEQ ID NO: 282858 - DNA, 20 bp, Artificial Sequence
  Description of Artificial Sequence: Synthetic oligonucleotide
  Target: LAMA2; (-) strand; PAM type: YTN; PAM sequence: TTG
ttactcctgtgcttcccttt

SEQ ID NO: 282859 - DNA, 20 bp, Artificial Sequence
  Description of Artificial Sequence: Synthetic oligonucleotide
  Target: LAMA2; (-) strand; PAM type: YTN; PAM sequence: TTC
atgattgttactcctgtgct

SEQ ID NO: 282860 - DNA, 20 bp, Artificial Sequence
  Description of Artificial Sequence: Synthetic oligonucleotide
  Target: LAMA2; (-) strand; PAM type: YTN; PAM sequence: TTT
catgattgttactcctgtgc

SEQ ID NO: 282861 - DNA, 20 bp, Artificial Sequence
  Description of Artificial Sequence: Synthetic oligonucleotide
  Target: LAMA2; (-) strand; PAM type: YTN; PAM sequence: CTT
tcatgattgttactcctgtg

SEQ ID NO: 282862 - DNA, 20 bp, Artificial Sequence
  Description of Artificial Sequence: Synthetic oligonucleotide
  Target: LAMA2; (-) strand; PAM type: YTN; PAM sequence: TTC
tttcatgattgttactcctg

SEQ ID NO: 282863 - DNA, 20 bp, Artificial Sequence
  Description of Artificial Sequence: Synthetic oligonucleotide
  Target: LAMA2; (-) strand; PAM type: YTN; PAM sequence: CTT
ctttcatgattgttactcct

SEQ ID NO: 282864 - DNA, 20 bp, Artificial Sequence
  Description of Artificial Sequence: Synthetic oligonucleotide
  Target: LAMA2; (-) strand; PAM type: YTN; PAM sequence: CTA
gccttctttcatgattgtta

SEQ ID NO: 282865 - DNA, 20 bp, Artificial Sequence
  Description of Artificial Sequence: Synthetic oligonucleotide
  Target: LAMA2; (-) strand; PAM type: YTN; PAM sequence: TTC
tagccttctttcatgattgt

SEQ ID NO: 282866 - DNA, 20 bp, Artificial Sequence
  Description of Artificial Sequence: Synthetic oligonucleotide
  Target: LAMA2; (-) strand; PAM type: YTN; PAM sequence: TTT
ctagccttctttcatgattg

SEQ ID NO: 282867 - DNA, 20 bp, Artificial Sequence
  Description of Artificial Sequence: Synthetic oligonucleotide
  Target: LAMA2; (-) strand; PAM type: YTN; PAM sequence: TTA
tatttctagccttctttcat

SEQ ID NO: 282868 - DNA, 20 bp, Artificial Sequence
  Description of Artificial Sequence: Synthetic oligonucleotide
  Target: LAMA2; (-) strand; PAM type: YTN; PAM sequence: TTT
atatttctagccttctttca

SEQ ID NO: 282869 - DNA, 20 bp, Artificial Sequence
  Description of Artificial Sequence: Synthetic oligonucleotide
  Target: LAMA2; (-) strand; PAM type: YTN; PAM sequence: CTT
tatatttctagccttctttc

SEQ ID NO: 282870 - DNA, 20 bp, Artificial Sequence
  Description of Artificial Sequence: Synthetic oligonucleotide
  Target: LAMA2; (-) strand; PAM type: YTN; PAM sequence: CTG
aacctttatatttctagcct

SEQ ID NO: 282871 - DNA, 20 bp, Artificial Sequence
  Description of Artificial Sequence: Synthetic oligonucleotide
  Target: LAMA2; (-) strand; PAM type: YTN; PAM sequence: TTC
ctgaacctttatatttctag

SEQ ID NO: 282872 - DNA, 20 bp, Artificial Sequence
  Description of Artificial Sequence: Synthetic oligonucleotide
  Target: LAMA2; (-) strand; PAM type: YTN; PAM sequence: TTT
cctgaacctttatatttcta

SEQ ID NO: 282873 - DNA, 20 bp, Artificial Sequence
  Description of Artificial Sequence: Synthetic oligonucleotide
  Target: LAMA2; (-) strand; PAM type: YTN; PAM sequence: TTC
ggaacggtatcatttcctga

SEQ ID NO: 282874 - DNA, 20 bp, Artificial Sequence
  Description of Artificial Sequence: Synthetic oligonucleotide
  Target: LAMA2; (-) strand; PAM type: YTN; PAM sequence: TTG
gtgacaatgattcggaacgg

SEQ ID NO: 282875 - DNA, 20 bp, Artificial Sequence
  Description of Artificial Sequence: Synthetic oligonucleotide
  Target: LAMA2; (-) strand; PAM type: YTN; PAM sequence: TTT
ggtgacaatgattcggaacg

SEQ ID NO: 282876 - DNA, 20 bp, Artificial Sequence
  Description of Artificial Sequence: Synthetic oligonucleotide
  Target: LAMA2; (-) strand; PAM type: YTN; PAM sequence: TTG
aatttggtgacaatgattcg

SEQ ID NO: 282877 - DNA, 20 bp, Artificial Sequence
  Description of Artificial Sequence: Synthetic oligonucleotide
  Target: LAMA2; (-) strand; PAM type: YTN; PAM sequence: TTA
tgcaggcaatcattgaattt

SEQ ID NO: 282878 - DNA, 20 bp, Artificial Sequence
  Description of Artificial Sequence: Synthetic oligonucleotide
  Target: LAMA2; (-) strand; PAM type: YTN; PAM sequence: CTG
cattatgcaggcaatcattg

SEQ ID NO: 282879 - DNA, 20 bp, Artificial Sequence
  Description of Artificial Sequence: Synthetic oligonucleotide
  Target: LAMA2; (-) strand; PAM type: YTN; PAM sequence: TTC
tgcattatgcaggcaatcat

SEQ ID NO: 282880 - DNA, 20 bp, Artificial Sequence
  Description of Artificial Sequence: Synthetic oligonucleotide
  Target: LAMA2; (-) strand; PAM type: YTN; PAM sequence: TTT
ctgcattatgcaggcaatca

SEQ ID NO: 282881 - DNA, 20 bp, Artificial Sequence
  Description of Artificial Sequence: Synthetic oligonucleotide
  Target: LAMA2; (-) strand; PAM type: YTN; PAM sequence: TTT
tctgcattatgcaggcaatc

SEQ ID NO: 282882 - DNA, 20 bp, Artificial Sequence
  Description of Artificial Sequence: Synthetic oligonucleotide
  Target: LAMA2; (-) strand; PAM type: YTN; PAM sequence: CTC
caattttctgcattatgcag

SEQ ID NO: 282883 - DNA, 20 bp, Artificial Sequence
  Description of Artificial Sequence: Synthetic oligonucleotide
  Target: LAMA2; (-) strand; PAM type: YTN; PAM sequence: TTA
gaaaaaatccctccaatttt

SEQ ID NO: 282884 - DNA, 20 bp, Artificial Sequence
  Description of Artificial Sequence: Synthetic oligonucleotide
  Target: LAMA2; (-) strand; PAM type: YTN; PAM sequence: CTT
agaaaaaatccctccaattt

SEQ ID NO: 282885 - DNA, 20 bp, Artificial Sequence
  Description of Artificial Sequence: Synthetic oligonucleotide
  Target: LAMA2; (-) strand; PAM type: YTN; PAM sequence: TTC
ttagaaaaaatccctccaat

SEQ ID NO: 282886 - DNA, 20 bp, Artificial Sequence
  Description of Artificial Sequence: Synthetic oligonucleotide
  Target: LAMA2; (-) strand; PAM type: YTN; PAM sequence: CTT
cttagaaaaaatccctccaa

SEQ ID NO: 282887 - DNA, 20 bp, Artificial Sequence
  Description of Artificial Sequence: Synthetic oligonucleotide
  Target: LAMA2; (-) strand; PAM type: YTN; PAM sequence: TTG
tacttcttagaaaaaatccc

SEQ ID NO: 282888 - DNA, 20 bp, Artificial Sequence
  Description of Artificial Sequence: Synthetic oligonucleotide
  Target: LAMA2; (-) strand; PAM type: YTN; PAM sequence: TTT
gtacttcttagaaaaaatcc

SEQ ID NO: 282889 - DNA, 20 bp, Artificial Sequence
  Description of Artificial Sequence: Synthetic oligonucleotide
  Target: LAMA2; (-) strand; PAM type: YTN; PAM sequence: CTT
tgtacttcttagaaaaaatc

SEQ ID NO: 282890 - DNA, 20 bp, Artificial Sequence
  Description of Artificial Sequence: Synthetic oligonucleotide
  Target: LAMA2; (-) strand; PAM type: YTN; PAM sequence: CTA
cacccaatctttgtacttct

SEQ ID NO: 282891 - DNA, 20 bp, Artificial Sequence
  Description of Artificial Sequence: Synthetic oligonucleotide
  Target: LAMA2; (-) strand; PAM type: YTN; PAM sequence: TTG
ctacacccaatctttgtact

SEQ ID NO: 282892 - DNA, 20 bp, Artificial Sequence
  Description of Artificial Sequence: Synthetic oligonucleotide
  Target: LAMA2; (-) strand; PAM type: YTN; PAM sequence: TTG
ataaggttgctacacccaat

SEQ ID NO: 282893 - DNA, 20 bp, Artificial Sequence
  Description of Artificial Sequence: Synthetic oligonucleotide
  Target: LAMA2; (-) strand; PAM type: YTN; PAM sequence: TTT
gataaggttgctacacccaa

SEQ ID NO: 282894 - DNA, 20 bp, Artificial Sequence
  Description of Artificial Sequence: Synthetic oligonucleotide
  Target: LAMA2; (-) strand; PAM type: YTN; PAM sequence: TTG
atttgataaggttgctacac

SEQ ID NO: 282895 - DNA, 20 bp, Artificial Sequence
  Description of Artificial Sequence: Synthetic oligonucleotide
  Target: LAMA2; (-) strand; PAM type: YTN; PAM sequence: CTC
cagcaaattgatttgataag

SEQ ID NO: 282896 - DNA, 20 bp, Artificial Sequence
  Description of Artificial Sequence: Synthetic oligonucleotide
  Target: LAMA2; (-) strand; PAM type: YTN; PAM sequence: CTA
ggtctccagcaaattgattt

SEQ ID NO: 282897 - DNA, 20 bp, Artificial Sequence
  Description of Artificial Sequence: Synthetic oligonucleotide
  Target: LAMA2; (-) strand; PAM type: YTN; PAM sequence: CTC
ctaggtctccagcaaattga

SEQ ID NO: 282898 - DNA, 20 bp, Artificial Sequence
  Description of Artificial Sequence: Synthetic oligonucleotide
  Target: LAMA2; (-) strand; PAM type: YTN; PAM sequence: CTC
tcctaggtctccagcaaatt

SEQ ID NO: 282899 - DNA, 20 bp, Artificial Sequence
  Description of Artificial Sequence: Synthetic oligonucleotide
  Target: LAMA2; (-) strand; PAM type: YTN; PAM sequence: TTC
tctcctaggtctccagcaaa

SEQ ID NO: 282900 - DNA, 20 bp, Artificial Sequence
  Description of Artificial Sequence: Synthetic oligonucleotide
  Target: LAMA2; (-) strand; PAM type: YTN; PAM sequence: TTT
ctctcctaggtctccagcaa

SEQ ID NO: 282901 - DNA, 20 bp, Artificial Sequence
  Description of Artificial Sequence: Synthetic oligonucleotide
  Target: LAMA2; (-) strand; PAM type: YTN; PAM sequence: CTG
tatttctctcctaggtctcc

SEQ ID NO: 282902 - DNA, 20 bp, Artificial Sequence
  Description of Artificial Sequence: Synthetic oligonucleotide
  Target: LAMA2; (-) strand; PAM type: YTN; PAM sequence: CTA
caactgtatttctctcctag

SEQ ID NO: 282903 - DNA, 20 bp, Artificial Sequence
  Description of Artificial Sequence: Synthetic oligonucleotide
  Target: LAMA2; (-) strand; PAM type: YTN; PAM sequence: TTG
aaatctacaactgtatttct

SEQ ID NO: 282904 - DNA, 20 bp, Artificial Sequence
  Description of Artificial Sequence: Synthetic oligonucleotide
  Target: LAMA2; (-) strand; PAM type: YTN; PAM sequence: CTG
ggtaggaaagaagagcaccc

SEQ ID NO: 282905 - DNA, 20 bp, Artificial Sequence
  Description of Artificial Sequence: Synthetic oligonucleotide
  Target: LAMA2; (-) strand; PAM type: YTN; PAM sequence: TTG
agacctgggtaggaaagaag

SEQ ID NO: 282906 - DNA, 20 bp, Artificial Sequence
  Description of Artificial Sequence: Synthetic oligonucleotide
  Target: LAMA2; (-) strand; PAM type: YTN; PAM sequence: CTT
gagacctgggtaggaaagaa

SEQ ID NO: 282907 - DNA, 20 bp, Artificial Sequence
  Description of Artificial Sequence: Synthetic oligonucleotide
  Target: LAMA2; (-) strand; PAM type: YTN; PAM sequence: CTA
aatacccagtgcaggatctt

SEQ ID NO: 282908 - DNA, 20 bp, Artificial Sequence
  Description of Artificial Sequence: Synthetic oligonucleotide
  Target: LAMA2; (-) strand; PAM type: YTN; PAM sequence: CTA
agtcaacctaaatacccagt

SEQ ID NO: 282909 - DNA, 20 bp, Artificial Sequence
  Description of Artificial Sequence: Synthetic oligonucleotide
  Target: LAMA2; (-) strand; PAM type: YTN; PAM sequence: CTG
tcccctaagtcaacctaaat

SEQ ID NO: 282910 - DNA, 20 bp, Artificial Sequence
  Description of Artificial Sequence: Synthetic oligonucleotide
  Target: LAMA2; (-) strand; PAM type: YTN; PAM sequence: CTA
aagaccctgtcccctaagtc

SEQ ID NO: 282911 - DNA, 20 bp, Artificial Sequence
  Description of Artificial Sequence: Synthetic oligonucleotide
  Target: LAMA2; (-) strand; PAM type: YTN; PAM sequence: TTC
taaagaccctgtcccctaag

SEQ ID NO: 282912 - DNA, 20 bp, Artificial Sequence
  Description of Artificial Sequence: Synthetic oligonucleotide
  Target: LAMA2; (-) strand; PAM type: YTN; PAM sequence: TTT
ctaaagaccctgtcccctaa

SEQ ID NO: 282913 - DNA, 20 bp, Artificial Sequence
  Description of Artificial Sequence: Synthetic oligonucleotide
  Target: LAMA2; (-) strand; PAM type: YTN; PAM sequence: TTG
agatttctaaagaccctgtc

SEQ ID NO: 282914 - DNA, 20 bp, Artificial Sequence
  Description of Artificial Sequence: Synthetic oligonucleotide
  Target: LAMA2; (-) strand; PAM type: YTN; PAM sequence: CTT
gagatttctaaagaccctgt

SEQ ID NO: 282915 - DNA, 20 bp, Artificial Sequence
  Description of Artificial Sequence: Synthetic oligonucleotide
  Target: LAMA2; (-) strand; PAM type: YTN; PAM sequence: TTC
ttgagatttctaaagaccct

SEQ ID NO: 282916 - DNA, 20 bp, Artificial Sequence
  Description of Artificial Sequence: Synthetic oligonucleotide
  Target: LAMA2; (-) strand; PAM type: YTN; PAM sequence: CTT
cttgagatttctaaagaccc

SEQ ID NO: 282917 - DNA, 20 bp, Artificial Sequence
  Description of Artificial Sequence: Synthetic oligonucleotide
  Target: LAMA2; (-) strand; PAM type: YTN; PAM sequence: TTG
gcttcttgagatttctaaag

SEQ ID NO: 282918 - DNA, 20 bp, Artificial Sequence
  Description of Artificial Sequence: Synthetic oligonucleotide
  Target: LAMA2; (-) strand; PAM type: YTN; PAM sequence: TTT
ggcttcttgagatttctaaa

SEQ ID NO: 282919 - DNA, 20 bp, Artificial Sequence
  Description of Artificial Sequence: Synthetic oligonucleotide
  Target: LAMA2; (-) strand; PAM type: YTN; PAM sequence: TTT
tggcttcttgagatttctaa

SEQ ID NO: 282920 - DNA, 20 bp, Artificial Sequence
  Description of Artificial Sequence: Synthetic oligonucleotide
  Target: LAMA2; (-) strand; PAM type: YTN; PAM sequence: TTC
agattttggcttcttgagat

SEQ ID NO: 282921 - DNA, 20 bp, Artificial Sequence
  Description of Artificial Sequence: Synthetic oligonucleotide
  Target: LAMA2; (-) strand; PAM type: YTN; PAM sequence: CTG
tgttcagattttggcttctt

SEQ ID NO: 282922 - DNA, 20 bp, Artificial Sequence
  Description of Artificial Sequence: Synthetic oligonucleotide
  Target: LAMA2; (-) strand; PAM type: YTN; PAM sequence: TTA
caggcataagtgactgtgtt

SEQ ID NO: 282923 - DNA, 20 bp, Artificial Sequence
  Description of Artificial Sequence: Synthetic oligonucleotide
  Target: LAMA2; (-) strand; PAM type: YTN; PAM sequence: CTG
ggattacaggcataagtgac

SEQ ID NO: 282924 - DNA, 20 bp, Artificial Sequence
  Description of Artificial Sequence: Synthetic oligonucleotide
  Target: LAMA2; (-) strand; PAM type: YTN; PAM sequence: TTG
aaaggacctgggattacagg

SEQ ID NO: 282925 - DNA, 20 bp, Artificial Sequence
  Description of Artificial Sequence: Synthetic oligonucleotide
  Target: LAMA2; (-) strand; PAM type: YTN; PAM sequence: TTT
gaaaggacctgggattacag

SEQ ID NO: 282926 - DNA, 20 bp, Artificial Sequence
  Description of Artificial Sequence: Synthetic oligonucleotide
  Target: LAMA2; (-) strand; PAM type: YTN; PAM sequence: TTT
tgaaaggacctgggattaca

SEQ ID NO: 282927 - DNA, 20 bp, Artificial Sequence
  Description of Artificial Sequence: Synthetic oligonucleotide
  Target: LAMA2; (-) strand; PAM type: YTN; PAM sequence: CTT
ttgaaaggacctgggattac

SEQ ID NO: 282928 - DNA, 20 bp, Artificial Sequence
  Description of Artificial Sequence: Synthetic oligonucleotide
  Target: LAMA2; (-) strand; PAM type: YTN; PAM sequence: TTA
cttttgaaaggacctgggat

SEQ ID NO: 282929 - DNA, 20 bp, Artificial Sequence
  Description of Artificial Sequence: Synthetic oligonucleotide
  Target: LAMA2; (-) strand; PAM type: YTN; PAM sequence: TTC
atggaaatgtgattactttt

SEQ ID NO: 282930 - DNA, 20 bp, Artificial Sequence
  Description of Artificial Sequence: Synthetic oligonucleotide
  Target: LAMA2; (-) strand; PAM type: YTN; PAM sequence: TTC
acaagggtgaaattcatgga

SEQ ID NO: 282931 - DNA, 20 bp, Artificial Sequence
  Description of Artificial Sequence: Synthetic oligonucleotide
  Target: LAMA2; (-) strand; PAM type: YTN; PAM sequence: CTG
aaagaatgccccattcacaa

SEQ ID NO: 282932 - DNA, 20 bp, Artificial Sequence
  Description of Artificial Sequence: Synthetic oligonucleotide
  Target: LAMA2; (-) strand; PAM type: YTN; PAM sequence: TTA
atatgaatagggcacaaata

SEQ ID NO: 282933 - DNA, 20 bp, Artificial Sequence
  Description of Artificial Sequence: Synthetic oligonucleotide
  Target: LAMA2; (-) strand; PAM type: YTN; PAM sequence: TTA
ttaatatgaatagggcacaa

SEQ ID NO: 282934 - DNA, 20 bp, Artificial Sequence
  Description of Artificial Sequence: Synthetic oligonucleotide
  Target: LAMA2; (-) strand; PAM type: YTN; PAM sequence: TTT
attaatatgaatagggcaca

SEQ ID NO: 282935 - DNA, 20 bp, Artificial Sequence
  Description of Artificial Sequence: Synthetic oligonucleotide
  Target: LAMA2; (-) strand; PAM type: YTN; PAM sequence: TTT
tattaatatgaatagggcac

SEQ ID NO: 282936 - DNA, 20 bp, Artificial Sequence
  Description of Artificial Sequence: Synthetic oligonucleotide
  Target: LAMA2; (-) strand; PAM type: YTN; PAM sequence: TTT
ttattaatatgaatagggca

SEQ ID NO: 282937 - DNA, 20 bp, Artificial Sequence
  Description of Artificial Sequence: Synthetic oligonucleotide
  Target: LAMA2; (-) strand; PAM type: YTN; PAM sequence: TTT
tttattaatatgaatagggc

SEQ ID NO: 282938 - DNA, 20 bp, Artificial Sequence
  Description of Artificial Sequence: Synthetic oligonucleotide
  Target: LAMA2; (-) strand; PAM type: YTN; PAM sequence: TTA
ttttttattaatatgaatag

SEQ ID NO: 282939 - DNA, 20 bp, Artificial Sequence
  Description of Artificial Sequence: Synthetic oligonucleotide
  Target: LAMA2; (-) strand; PAM type: YTN; PAM sequence: TTT
attttttattaatatgaata

SEQ ID NO: 282940 - DNA, 20 bp, Artificial Sequence
  Description of Artificial Sequence: Synthetic oligonucleotide
  Target: LAMA2; (-) strand; PAM type: YTN; PAM sequence: TTT
tattttttattaatatgaat

SEQ ID NO: 282941 - DNA, 20 bp, Artificial Sequence
  Description of Artificial Sequence: Synthetic oligonucleotide
  Target: LAMA2; (-) strand; PAM type: YTN; PAM sequence: TTT
ttattttttattaatatgaa

SEQ ID NO: 282942 - DNA, 20 bp, Artificial Sequence
  Description of Artificial Sequence: Synthetic oligonucleotide
  Target: LAMA2; (-) strand; PAM type: YTN; PAM sequence: CTC
aaatggaatttttatttttt

SEQ ID NO: 282943 - DNA, 20 bp, Artificial Sequence
  Description of Artificial Sequence: Synthetic oligonucleotide
  Target: LAMA2; (-) strand; PAM type: YTN; PAM sequence: TTC
tcaaatggaatttttatttt

SEQ ID NO: 282944 - DNA, 20 bp, Artificial Sequence
  Description of Artificial Sequence: Synthetic oligonucleotide
  Target: LAMA2; (-) strand; PAM type: YTN; PAM sequence: TTT
ctcaaatggaatttttattt

SEQ ID NO: 282945 - DNA, 20 bp, Artificial Sequence
  Description of Artificial Sequence: Synthetic oligonucleotide
  Target: LAMA2; (-) strand; PAM type: YTN; PAM sequence: TTG
agtttctcaaatggaatttt

SEQ ID NO: 282946 - DNA, 20 bp, Artificial Sequence
  Description of Artificial Sequence: Synthetic oligonucleotide
  Target: LAMA2; (-) strand; PAM type: YTN; PAM sequence: TTC
catccagttgagtttctcaa

SEQ ID NO: 282947 - DNA, 20 bp, Artificial Sequence
  Description of Artificial Sequence: Synthetic oligonucleotide
  Target: LAMA2; (-) strand; PAM type: YTN; PAM sequence: TTC
aaattccatccagttgagtt

SEQ ID NO: 282948 - DNA, 20 bp, Artificial Sequence
  Description of Artificial Sequence: Synthetic oligonucleotide
  Target: LAMA2; (-) strand; PAM type: YTN; PAM sequence: CTA
ttcaaattccatccagttga

SEQ ID NO: 282949 - DNA, 20 bp, Artificial Sequence
  Description of Artificial Sequence: Synthetic oligonucleotide
  Target: LAMA2; (-) strand; PAM type: YTN; PAM sequence: TTG
actattcaaattccatccag

SEQ ID NO: 282950 - DNA, 20 bp, Artificial Sequence
  Description of Artificial Sequence: Synthetic oligonucleotide
  Target: LAMA2; (-) strand; PAM type: YTN; PAM sequence: TTT
gactattcaaattccatcca

SEQ ID NO: 282951 - DNA, 20 bp, Artificial Sequence
  Description of Artificial Sequence: Synthetic oligonucleotide
  Target: LAMA2; (-) strand; PAM type: YTN; PAM sequence: TTA
atttgactattcaaattcca

SEQ ID NO: 282952 - DNA, 20 bp, Artificial Sequence
  Description of Artificial Sequence: Synthetic oligonucleotide
  Target: LAMA2; (-) strand; PAM type: YTN; PAM sequence: TTT
aatttgactattcaaattcc

SEQ ID NO: 282953 - DNA, 20 bp, Artificial Sequence
  Description of Artificial Sequence: Synthetic oligonucleotide
  Target: LAMA2; (-) strand; PAM type: YTN; PAM sequence: TTA
atggaaatgtttaatttgac

SEQ ID NO: 282954 - DNA, 20 bp, Artificial Sequence
  Description of Artificial Sequence: Synthetic oligonucleotide
  Target: LAMA2; (-) strand; PAM type: YTN; PAM sequence: TTT
aatggaaatgtttaatttga

SEQ ID NO: 282955 - DNA, 20 bp, Artificial Sequence
  Description of Artificial Sequence: Synthetic oligonucleotide
  Target: LAMA2; (-) strand; PAM type: YTN; PAM sequence: TTT
taatggaaatgtttaatttg

SEQ ID NO: 282956 - DNA, 20 bp, Artificial Sequence
  Description of Artificial Sequence: Synthetic oligonucleotide
  Target: LAMA2; (-) strand; PAM type: YTN; PAM sequence: TTA
taaattttaatggaaatgtt

SEQ ID NO: 282957 - DNA, 20 bp, Artificial Sequence
  Description of Artificial Sequence: Synthetic oligonucleotide
  Target: LAMA2; (-) strand; PAM type: YTN; PAM sequence: TTT
ataaattttaatggaaatgt

SEQ ID NO: 282958 - DNA, 20 bp, Artificial Sequence
  Description of Artificial Sequence: Synthetic oligonucleotide
  Target: LAMA2; (-) strand; PAM type: YTN; PAM sequence: TTT
tataaattttaatggaaatg

SEQ ID NO: 282959 - DNA, 20 bp, Artificial Sequence
  Description of Artificial Sequence: Synthetic oligonucleotide
  Target: LAMA2; (-) strand; PAM type: YTN; PAM sequence: TTT
ttataaattttaatggaaat

SEQ ID NO: 282960 - DNA, 20 bp, Artificial Sequence
  Description of Artificial Sequence: Synthetic oligonucleotide
  Target: LAMA2; (-) strand; PAM type: YTN; PAM sequence: CTA
aatatcgggacgatttttat

SEQ ID NO: 282961 - DNA, 20 bp, Artificial Sequence
  Description of Artificial Sequence: Synthetic oligonucleotide
  Target: LAMA2; (-) strand; PAM type: YTN; PAM sequence: TTC
aactaaatatcgggacgatt

SEQ ID NO: 282962 - DNA, 20 bp, Artificial Sequence
  Description of Artificial Sequence: Synthetic oligonucleotide
  Target: LAMA2; (-) strand; PAM type: YTN; PAM sequence: TTT
caactaaatatcgggacgat

SEQ ID NO: 282963 - DNA, 20 bp, Artificial Sequence
  Description of Artificial Sequence: Synthetic oligonucleotide
  Target: LAMA2; (-) strand; PAM type: YTN; PAM sequence: TTT
tcaactaaatatcgggacga

SEQ ID NO: 282964 - DNA, 20 bp, Artificial Sequence
  Description of Artificial Sequence: Synthetic oligonucleotide
  Target: LAMA2; (-) strand; PAM type: YTN; PAM sequence: CTT
ttcaactaaatatcgggacg

SEQ ID NO: 282965 - DNA, 20 bp, Artificial Sequence
  Description of Artificial Sequence: Synthetic oligonucleotide
  Target: LAMA2; (-) strand; PAM type: YTN; PAM sequence: CTC
acttttcaactaaatatcgg

SEQ ID NO: 282966 - DNA, 20 bp, Artificial Sequence
  Description of Artificial Sequence: Synthetic oligonucleotide
  Target: LAMA2; (-) strand; PAM type: YTN; PAM sequence: TTC
ctcacttttcaactaaatat

SEQ ID NO: 282967 - DNA, 20 bp, Artificial Sequence
  Description of Artificial Sequence: Synthetic oligonucleotide
  Target: LAMA2; (-) strand; PAM type: YTN; PAM sequence: CTA
tgtatatattcctcactttt

SEQ ID NO: 282968 - DNA, 20 bp, Artificial Sequence
  Description of Artificial Sequence: Synthetic oligonucleotide
  Target: LAMA2; (-) strand; PAM type: YTN; PAM sequence: CTA
aacatatgtatacctatgta

SEQ ID NO: 282969 - DNA, 20 bp, Artificial Sequence
  Description of Artificial Sequence: Synthetic oligonucleotide
  Target: LAMA2; (-) strand; PAM type: YTN; PAM sequence: TTC
ctaaacatatgtatacctat

SEQ ID NO: 282970 - DNA, 20 bp, Artificial Sequence
  Description of Artificial Sequence: Synthetic oligonucleotide
  Target: LAMA2; (-) strand; PAM type: YTN; PAM sequence: TTT
cctaaacatatgtataccta

SEQ ID NO: 282971 - DNA, 20 bp, Artificial Sequence
  Description of Artificial Sequence: Synthetic oligonucleotide
  Target: LAMA2; (-) strand; PAM type: YTN; PAM sequence: TTA
tatttcctaaacatatgtat

SEQ ID NO: 282972 - DNA, 20 bp, Artificial Sequence
  Description of Artificial Sequence: Synthetic oligonucleotide
  Target: LAMA2; (-) strand; PAM type: YTN; PAM sequence: TTT
atatttcctaaacatatgta

SEQ ID NO: 282973 - DNA, 20 bp, Artificial Sequence
  Description of Artificial Sequence: Synthetic oligonucleotide
  Target: LAMA2; (-) strand; PAM type: YTN; PAM sequence: TTT
tatatttcctaaacatatgt

SEQ ID NO: 282974 - DNA, 20 bp, Artificial Sequence
  Description of Artificial Sequence: Synthetic oligonucleotide
  Target: LAMA2; (-) strand; PAM type: YTN; PAM sequence: TTT
ttatatttcctaaacatatg

SEQ ID NO: 282975 - DNA, 20 bp, Artificial Sequence
  Description of Artificial Sequence: Synthetic oligonucleotide
  Target: LAMA2; (-) strand; PAM type: YTN; PAM sequence: TTC
gtttttatatttcctaaaca

SEQ ID NO: 282976 - DNA, 20 bp, Artificial Sequence
  Description of Artificial Sequence: Synthetic oligonucleotide
  Target: LAMA2; (-) strand; PAM type: YTN; PAM sequence: TTT
cgtttttatatttcctaaac

SEQ ID NO: 282977 - DNA, 20 bp, Artificial Sequence
  Description of Artificial Sequence: Synthetic oligonucleotide
  Target: LAMA2; (-) strand; PAM type: YTN; PAM sequence: TTA
tttcgtttttatatttccta

SEQ ID NO: 282978 - DNA, 20 bp, Artificial Sequence
  Description of Artificial Sequence: Synthetic oligonucleotide
  Target: LAMA2; (-) strand; PAM type: YTN; PAM sequence: TTT
atttcgtttttatatttcct

SEQ ID NO: 282979 - DNA, 20 bp, Artificial Sequence
  Description of Artificial Sequence: Synthetic oligonucleotide
  Target: LAMA2; (-) strand; PAM type: YTN; PAM sequence: CTA
agtttatttcgtttttatat

SEQ ID NO: 282980 - DNA, 20 bp, Artificial Sequence
  Description of Artificial Sequence: Synthetic oligonucleotide
  Target: LAMA2; (-) strand; PAM type: YTN; PAM sequence: TTG
gtccagaacctaagtttatt

SEQ ID NO: 282981 - DNA, 20 bp, Artificial Sequence
  Description of Artificial Sequence: Synthetic oligonucleotide
  Target: LAMA2; (-) strand; PAM type: YTN; PAM sequence: CTT
ggtccagaacctaagtttat

SEQ ID NO: 282982 - DNA, 20 bp, Artificial Sequence
  Description of Artificial Sequence: Synthetic oligonucleotide
  Target: LAMA2; (-) strand; PAM type: YTN; PAM sequence: TTA
cttggtccagaacctaagtt

SEQ ID NO: 282983 - DNA, 20 bp, Artificial Sequence
  Description of Artificial Sequence: Synthetic oligonucleotide
  Target: LAMA2; (-) strand; PAM type: YTN; PAM sequence: TTA
aattacttggtccagaacct

SEQ ID NO: 282984 - DNA, 20 bp, Artificial Sequence
  Description of Artificial Sequence: Synthetic oligonucleotide
  Target: LAMA2; (-) strand; PAM type: YTN; PAM sequence: TTT
aaattacttggtccagaacc

SEQ ID NO: 282985 - DNA, 20 bp, Artificial Sequence
  Description of Artificial Sequence: Synthetic oligonucleotide
  Target: LAMA2; (-) strand; PAM type: YTN; PAM sequence: TTA
tttaaattacttggtccaga

SEQ ID NO: 282986 - DNA, 20 bp, Artificial Sequence
  Description of Artificial Sequence: Synthetic oligonucleotide
  Target: LAMA2; (-) strand; PAM type: YTN; PAM sequence: TTT
atttaaattacttggtccag

SEQ ID NO: 282987 - DNA, 20 bp, Artificial Sequence
  Description of Artificial Sequence: Synthetic oligonucleotide
  Target: LAMA2; (-) strand; PAM type: YTN; PAM sequence: TTT
tatttaaattacttggtcca

SEQ ID NO: 282988 - DNA, 20 bp, Artificial Sequence
  Description of Artificial Sequence: Synthetic oligonucleotide
  Target: LAMA2; (-) strand; PAM type: YTN; PAM sequence: TTT
ttatttaaattacttggtcc

SEQ ID NO: 282989 - DNA, 20 bp, Artificial Sequence
  Description of Artificial Sequence: Synthetic oligonucleotide
  Target: LAMA2; (-) strand; PAM type: YTN; PAM sequence: TTT
tttatttaaattacttggtc

SEQ ID NO: 282990 - DNA, 20 bp, Artificial Sequence
  Description of Artificial Sequence: Synthetic oligonucleotide
  Target: LAMA2; (-) strand; PAM type: YTN; PAM sequence: CTT
ttttatttaaattacttggt

SEQ ID NO: 282991 - DNA, 20 bp, Artificial Sequence
  Description of Artificial Sequence: Synthetic oligonucleotide
  Target: LAMA2; (-) strand; PAM type: YTN; PAM sequence: TTC
cttttttatttaaattactt

SEQ ID NO: 282992 - DNA, 20 bp, Artificial Sequence
  Description of Artificial Sequence: Synthetic oligonucleotide
  Target: LAMA2; (-) strand; PAM type: YTN; PAM sequence: TTA
ttccttttttatttaaatta

SEQ ID NO: 282993 - DNA, 20 bp, Artificial Sequence
  Description of Artificial Sequence: Synthetic oligonucleotide
  Target: LAMA2; (-) strand; PAM type: YTN; PAM sequence: TTT
attccttttttatttaaatt

SEQ ID NO: 282994 - DNA, 20 bp, Artificial Sequence
  Description of Artificial Sequence: Synthetic oligonucleotide
  Target: LAMA2; (-) strand; PAM type: YTN; PAM sequence: CTT
tattccttttttatttaaat

SEQ ID NO: 282995 - DNA, 20 bp, Artificial Sequence
  Description of Artificial Sequence: Synthetic oligonucleotide
  Target: LAMA2; (-) strand; PAM type: YTN; PAM sequence: TTA
tgactttattccttttttat

SEQ ID NO: 282996 - DNA, 20 bp, Artificial Sequence
  Description of Artificial Sequence: Synthetic oligonucleotide
  Target: LAMA2; (-) strand; PAM type: YTN; PAM sequence: TTT
atgactttattcctttttta

SEQ ID NO: 282997 - DNA, 20 bp, Artificial Sequence
  Description of Artificial Sequence: Synthetic oligonucleotide
  Target: LAMA2; (-) strand; PAM type: YTN; PAM sequence: CTA
tttatgactttattcctttt

SEQ ID NO: 282998 - DNA, 20 bp, Artificial Sequence
  Description of Artificial Sequence: Synthetic oligonucleotide
  Target: LAMA2; (-) strand; PAM type: YTN; PAM sequence: TTA
taataatgctatttatgact

SEQ ID NO: 282999 - DNA, 20 bp, Artificial Sequence
  Description of Artificial Sequence: Synthetic oligonucleotide
  Target: LAMA2; (-) strand; PAM type: YTN; PAM sequence: TTA
ttataataatgctatttatg

SEQ ID NO: 283000 - DNA, 20 bp, Artificial Sequence
  Description of Artificial Sequence: Synthetic oligonucleotide
  Target: LAMA2; (-) strand; PAM type: YTN; PAM sequence: TTT
attataataatgctatttat

SEQ ID NO: 283001 - DNA, 20 bp, Artificial Sequence
  Description of Artificial Sequence: Synthetic oligonucleotide
  Target: LAMA2; (-) strand; PAM type: YTN; PAM sequence: TTT
tattataataatgctattta

SEQ ID NO: 283002 - DNA, 20 bp, Artificial Sequence
  Description of Artificial Sequence: Synthetic oligonucleotide
  Target: LAMA2; (-) strand; PAM type: YTN; PAM sequence: TTT
ttattataataatgctattt

SEQ ID NO: 283003 - DNA, 20 bp, Artificial Sequence
  Description of Artificial Sequence: Synthetic oligonucleotide
  Target: LAMA2; (-) strand; PAM type: YTN; PAM sequence: TTA
ccagtttttattataataat

SEQ ID NO: 283004 - DNA, 20 bp, Artificial Sequence
  Description of Artificial Sequence: Synthetic oligonucleotide
  Target: LAMA2; (-) strand; PAM type: YTN; PAM sequence: TTT
accagtttttattataataa

SEQ ID NO: 283005 - DNA, 20 bp, Artificial Sequence
  Description of Artificial Sequence: Synthetic oligonucleotide
  Target: LAMA2; (-) strand; PAM type: YTN; PAM sequence: TTT
taccagtttttattataata

SEQ ID NO: 283006 - DNA, 20 bp, Artificial Sequence
  Description of Artificial Sequence: Synthetic oligonucleotide
  Target: LAMA2; (-) strand; PAM type: YTN; PAM sequence: CTG
gtgtgttttaccagttttta

SEQ ID NO: 283007 - DNA, 20 bp, Artificial Sequence
  Description of Artificial Sequence: Synthetic oligonucleotide
  Target: LAMA2; (-) strand; PAM type: YTN; PAM sequence: TTG
tcctggtgtgttttaccagt

SEQ ID NO: 283008 - DNA, 20 bp, Artificial Sequence
  Description of Artificial Sequence: Synthetic oligonucleotide
  Target: LAMA2; (-) strand; PAM type: YTN; PAM sequence: TTG
aaaattgtcctggtgtgttt

SEQ ID NO: 283009 - DNA, 20 bp, Artificial Sequence
  Description of Artificial Sequence: Synthetic oligonucleotide
  Target: LAMA2; (-) strand; PAM type: YTN; PAM sequence: TTT
gaaaattgtcctggtgtgtt

SEQ ID NO: 283010 - DNA, 20 bp, Artificial Sequence
  Description of Artificial Sequence: Synthetic oligonucleotide
  Target: LAMA2; (-) strand; PAM type: YTN; PAM sequence: TTG
gtttgaaaattgtcctggtg

SEQ ID NO: 283011 - DNA, 20 bp, Artificial Sequence
  Description of Artificial Sequence: Synthetic oligonucleotide
  Target: LAMA2; (-) strand; PAM type: YTN; PAM sequence: CTG
acattggtttgaaaattgtc

SEQ ID NO: 283012 - DNA, 20 bp, Artificial Sequence
  Description of Artificial Sequence: Synthetic oligonucleotide
  Target: LAMA2; (-) strand; PAM type: YTN; PAM sequence: TTA
ccataggcagtaagtaaaag

SEQ ID NO: 283013 - DNA, 20 bp, Artificial Sequence
  Description of Artificial Sequence: Synthetic oligonucleotide
  Target: LAMA2; (-) strand; PAM type: YTN; PAM sequence: TTT
accataggcagtaagtaaaa

SEQ ID NO: 283014 - DNA, 20 bp, Artificial Sequence
  Description of Artificial Sequence: Synthetic oligonucleotide
  Target: LAMA2; (-) strand; PAM type: YTN; PAM sequence: CTG
gatttaccataggcagtaag

SEQ ID NO: 283015 - DNA, 20 bp, Artificial Sequence
  Description of Artificial Sequence: Synthetic oligonucleotide
  Target: LAMA2; (-) strand; PAM type: YTN; PAM sequence: CTG
ggagatgtatgagaaagtgc

SEQ ID NO: 283016 - DNA, 20 bp, Artificial Sequence
  Description of Artificial Sequence: Synthetic oligonucleotide
  Target: LAMA2; (-) strand; PAM type: YTN; PAM sequence: CTG
atatgagaaataaactggga

SEQ ID NO: 283017 - DNA, 20 bp, Artificial Sequence
  Description of Artificial Sequence: Synthetic oligonucleotide
  Target: LAMA2; (-) strand; PAM type: YTN; PAM sequence: TTC
atgtgactgatatgagaaat

SEQ ID NO: 283018 - DNA, 20 bp, Artificial Sequence
  Description of Artificial Sequence: Synthetic oligonucleotide
  Target: LAMA2; (-) strand; PAM type: YTN; PAM sequence: CTT
catgtgactgatatgagaaa

SEQ ID NO: 283019 - DNA, 20 bp, Artificial Sequence
  Description of Artificial Sequence: Synthetic oligonucleotide
  Target: LAMA2; (-) strand; PAM type: YTN; PAM sequence: TTC
cttcatgtgactgatatgag

SEQ ID NO: 283020 - DNA, 20 bp, Artificial Sequence
  Description of Artificial Sequence: Synthetic oligonucleotide
  Target: LAMA2; (-) strand; PAM type: YTN; PAM sequence: CTT
ccttcatgtgactgatatga

SEQ ID NO: 283021 - DNA, 20 bp, Artificial Sequence
  Description of Artificial Sequence: Synthetic oligonucleotide
  Target: LAMA2; (-) strand; PAM type: YTN; PAM sequence: TTA
catatggcaaataaagaaaa

SEQ ID NO: 283022 - DNA, 20 bp, Artificial Sequence
  Description of Artificial Sequence: Synthetic oligonucleotide
  Target: LAMA2; (-) strand; PAM type: YTN; PAM sequence: TTT
acatatggcaaataaagaaa

SEQ ID NO: 283023 - DNA, 20 bp, Artificial Sequence
  Description of Artificial Sequence: Synthetic oligonucleotide
  Target: LAMA2; (-) strand; PAM type: YTN; PAM sequence: TTT
tacatatggcaaataaagaa

SEQ ID NO: 283024 - DNA, 20 bp, Artificial Sequence
  Description of Artificial Sequence: Synthetic oligonucleotide
  Target: LAMA2; (-) strand; PAM type: YTN; PAM sequence: TTT
ttacatatggcaaataaaga

SEQ ID NO: 283025 - DNA, 20 bp, Artificial Sequence
  Description of Artificial Sequence: Synthetic oligonucleotide
  Target: LAMA2; (-) strand; PAM type: YTN; PAM sequence: CTT
tttacatatggcaaataaag

SEQ ID NO: 283026 - DNA, 20 bp, Artificial Sequence
  Description of Artificial Sequence: Synthetic oligonucleotide
  Target: LAMA2; (-) strand; PAM type: YTN; PAM sequence: CTG
tccctttttacatatggcaa

SEQ ID NO: 283027 - DNA, 20 bp, Artificial Sequence
  Description of Artificial Sequence: Synthetic oligonucleotide
  Target: LAMA2; (-) strand; PAM type: YTN; PAM sequence: TTC
tgtccctttttacatatggc

SEQ ID NO: 283028 - DNA, 20 bp, Artificial Sequence
  Description of Artificial Sequence: Synthetic oligonucleotide
  Target: LAMA2; (-) strand; PAM type: YTN; PAM sequence: TTT
ctgtccctttttacatatgg

SEQ ID NO: 283029 - DNA, 20 bp, Artificial Sequence
  Description of Artificial Sequence: Synthetic oligonucleotide
  Target: LAMA2; (-) strand; PAM type: YTN; PAM sequence: TTC
aaatgtcatttctgtccctt

SEQ ID NO: 283030 - DNA, 20 bp, Artificial Sequence
  Description of Artificial Sequence: Synthetic oligonucleotide
  Target: LAMA2; (-) strand; PAM type: YTN; PAM sequence: TTG
gaagatgtgggttcaaatgt

SEQ ID NO: 283031 - DNA, 20 bp, Artificial Sequence
  Description of Artificial Sequence: Synthetic oligonucleotide
  Target: LAMA2; (-) strand; PAM type: YTN; PAM sequence: CTA
taggacacagagttggaaga

SEQ ID NO: 283032 - DNA, 20 bp, Artificial Sequence
  Description of Artificial Sequence: Synthetic oligonucleotide
  Target: LAMA2; (-) strand; PAM type: YTN; PAM sequence: CTG
gtacaatgaaatcactatag

SEQ ID NO: 283033 - DNA, 20 bp, Artificial Sequence
  Description of Artificial Sequence: Synthetic oligonucleotide
  Target: LAMA2; (-) strand; PAM type: YTN; PAM sequence: CTA
gtctggtacaatgaaatcac

SEQ ID NO: 283034 - DNA, 20 bp, Artificial Sequence
  Description of Artificial Sequence: Synthetic oligonucleotide
  Target: LAMA2; (-) strand; PAM type: YTN; PAM sequence: CTG
aaatctagtctggtacaatg

SEQ ID NO: 283035 - DNA, 20 bp, Artificial Sequence
  Description of Artificial Sequence: Synthetic oligonucleotide
  Target: LAMA2; (-) strand; PAM type: YTN; PAM sequence: CTC
tgaaatctagtctggtacaa

SEQ ID NO: 283036 - DNA, 20 bp, Artificial Sequence
  Description of Artificial Sequence: Synthetic oligonucleotide
  Target: LAMA2; (-) strand; PAM type: YTN; PAM sequence: TTC
tctgaaatctagtctggtac

SEQ ID NO: 283037 - DNA, 20 bp, Artificial Sequence
  Description of Artificial Sequence: Synthetic oligonucleotide
  Target: LAMA2; (-) strand; PAM type: YTN; PAM sequence: TTT
ctctgaaatctagtctggta

SEQ ID NO: 283038 - DNA, 20 bp, Artificial Sequence
  Description of Artificial Sequence: Synthetic oligonucleotide
  Target: LAMA2; (-) strand; PAM type: YTN; PAM sequence: CTA
cacagtatttctctgaaatc

SEQ ID NO: 283039 - DNA, 20 bp, Artificial Sequence
  Description of Artificial Sequence: Synthetic oligonucleotide
  Target: LAMA2; (-) strand; PAM type: YTN; PAM sequence: CTG
ctacacagtatttctctgaa

SEQ ID NO: 283040 - DNA, 20 bp, Artificial Sequence
  Description of Artificial Sequence: Synthetic oligonucleotide
  Target: LAMA2; (-) strand; PAM type: YTN; PAM sequence: CTC
aaaataaaactgctacacag

SEQ ID NO: 283041 - DNA, 20 bp, Artificial Sequence
  Description of Artificial Sequence: Synthetic oligonucleotide
  Target: LAMA2; (-) strand; PAM type: YTN; PAM sequence: CTA
tgtacgatctcaaaataaaa

SEQ ID NO: 283042 - DNA, 20 bp, Artificial Sequence
  Description of Artificial Sequence: Synthetic oligonucleotide
  Target: LAMA2; (-) strand; PAM type: YTN; PAM sequence: CTA
actatgtacgatctcaaaat

SEQ ID NO: 283043 - DNA, 20 bp, Artificial Sequence
  Description of Artificial Sequence: Synthetic oligonucleotide
  Target: LAMA2; (-) strand; PAM type: YTN; PAM sequence: TTA
gaactaactatgtacgatct

SEQ ID NO: 283044 - DNA, 20 bp, Artificial Sequence
  Description of Artificial Sequence: Synthetic oligonucleotide
  Target: LAMA2; (-) strand; PAM type: YTN; PAM sequence: TTA
tattagaactaactatgtac

SEQ ID NO: 283045 - DNA, 20 bp, Artificial Sequence
  Description of Artificial Sequence: Synthetic oligonucleotide
  Target: LAMA2; (-) strand; PAM type: YTN; PAM sequence: TTA
gttatattagaactaactat

SEQ ID NO: 283046 - DNA, 20 bp, Artificial Sequence
  Description of Artificial Sequence: Synthetic oligonucleotide
  Target: LAMA2; (-) strand; PAM type: YTN; PAM sequence: CTT
agttatattagaactaacta

SEQ ID NO: 283047 - DNA, 20 bp, Artificial Sequence
  Description of Artificial Sequence: Synthetic oligonucleotide
  Target: LAMA2; (-) strand; PAM type: YTN; PAM sequence: TTA
gggcttagttatattagaac

SEQ ID NO: 283048 - DNA, 20 bp, Artificial Sequence
  Description of Artificial Sequence: Synthetic oligonucleotide
  Target: LAMA2; (-) strand; PAM type: YTN; PAM sequence: CTA
aatataaattagggcttagt

SEQ ID NO: 283049 - DNA, 20 bp, Artificial Sequence
  Description of Artificial Sequence: Synthetic oligonucleotide
  Target: LAMA2; (-) strand; PAM type: YTN; PAM sequence: CTG
acatgatgctaaatataaat

SEQ ID NO: 283050 - DNA, 20 bp, Artificial Sequence
  Description of Artificial Sequence: Synthetic oligonucleotide
  Target: LAMA2; (-) strand; PAM type: YTN; PAM sequence: TTC
tgacatgatgctaaatataa

SEQ ID NO: 283051 - DNA, 20 bp, Artificial Sequence
  Description of Artificial Sequence: Synthetic oligonucleotide
  Target: LAMA2; (-) strand; PAM type: YTN; PAM sequence: TTT
ctgacatgatgctaaatata

SEQ ID NO: 283052 - DNA, 20 bp, Artificial Sequence
  Description of Artificial Sequence: Synthetic oligonucleotide
  Target: LAMA2; (-) strand; PAM type: YTN; PAM sequence: TTA
tcatgtttctgacatgatgc

SEQ ID NO: 283053 - DNA, 20 bp, Artificial Sequence
  Description of Artificial Sequence: Synthetic oligonucleotide
  Target: LAMA2; (-) strand; PAM type: YTN; PAM sequence: TTT
atcatgtttctgacatgatg

SEQ ID NO: 283054 - DNA, 20 bp, Artificial Sequence
  Description of Artificial Sequence: Synthetic oligonucleotide
  Target: LAMA2; (-) strand; PAM type: YTN; PAM sequence: TTG
tttatcatgtttctgacatg

SEQ ID NO: 283055 - DNA, 20 bp, Artificial Sequence
  Description of Artificial Sequence: Synthetic oligonucleotide
  Target: LAMA2; (-) strand; PAM type: YTN; PAM sequence: CTT
gtttatcatgtttctgacat

SEQ ID NO: 283056 - DNA, 20 bp, Artificial Sequence
  Description of Artificial Sequence: Synthetic oligonucleotide
  Target: LAMA2; (-) strand; PAM type: YTN; PAM sequence: CTC
ttgtttatcatgtttctgac

SEQ ID NO: 283057 - DNA, 20 bp, Artificial Sequence
  Description of Artificial Sequence: Synthetic oligonucleotide
  Target: LAMA2; (-) strand; PAM type: YTN; PAM sequence: TTA
ctcttgtttatcatgtttct

SEQ ID NO: 283058 - DNA, 20 bp, Artificial Sequence
  Description of Artificial Sequence: Synthetic oligonucleotide
  Target: LAMA2; (-) strand; PAM type: YTN; PAM sequence: TTA
ataatgagcagttactcttg

SEQ ID NO: 283059 - DNA, 20 bp, Artificial Sequence
  Description of Artificial Sequence: Synthetic oligonucleotide
  Target: LAMA2; (-) strand; PAM type: YTN; PAM sequence: TTG
cattaataatgagcagttac

SEQ ID NO: 283060 - DNA, 20 bp, Artificial Sequence
  Description of Artificial Sequence: Synthetic oligonucleotide
  Target: LAMA2; (-) strand; PAM type: YTN; PAM sequence: CTT
gcattaataatgagcagtta

SEQ ID NO: 283061 - DNA, 20 bp, Artificial Sequence
  Description of Artificial Sequence: Synthetic oligonucleotide
  Target: LAMA2; (-) strand; PAM type: YTN; PAM sequence: TTG
caagtcacttgcattaataa

SEQ ID NO: 283062 - DNA, 20 bp, Artificial Sequence
  Description of Artificial Sequence: Synthetic oligonucleotide
  Target: LAMA2; (-) strand; PAM type: YTN; PAM sequence: TTG
aaatggcacaagatagatat

SEQ ID NO: 283063 - DNA, 20 bp, Artificial Sequence
  Description of Artificial Sequence: Synthetic oligonucleotide
  Target: LAMA2; (-) strand; PAM type: YTN; PAM sequence: TTG
tcacatgcccattgaaatgg

SEQ ID NO: 283064 - DNA, 20 bp, Artificial Sequence
  Description of Artificial Sequence: Synthetic oligonucleotide
  Target: LAMA2; (-) strand; PAM type: YTN; PAM sequence: TTT
gtcacatgcccattgaaatg

SEQ ID NO: 283065 - DNA, 20 bp, Artificial Sequence
  Description of Artificial Sequence: Synthetic oligonucleotide
  Target: LAMA2; (-) strand; PAM type: YTN; PAM sequence: CTT
tgtcacatgcccattgaaat

SEQ ID NO: 283066 - DNA, 20 bp, Artificial Sequence
  Description of Artificial Sequence: Synthetic oligonucleotide
  Target: LAMA2; (-) strand; PAM type: YTN; PAM sequence: TTC
ctttgtcacatgcccattga

SEQ ID NO: 283067 - DNA, 20 bp, Artificial Sequence
  Description of Artificial Sequence: Synthetic oligonucleotide
  Target: LAMA2; (-) strand; PAM type: YTN; PAM sequence: TTT
cctttgtcacatgcccattg

SEQ ID NO: 283068 - DNA, 20 bp, Artificial Sequence
  Description of Artificial Sequence: Synthetic oligonucleotide
  Target: LAMA2; (-) strand; PAM type: YTN; PAM sequence: TTT
tcctttgtcacatgcccatt

SEQ ID NO: 283069 - DNA, 20 bp, Artificial Sequence
  Description of Artificial Sequence: Synthetic oligonucleotide
  Target: LAMA2; (-) strand; PAM type: YTN; PAM sequence: CTG
ggaacacaatgacagtgtaa

SEQ ID NO: 283070 - DNA, 20 bp, Artificial Sequence
  Description of Artificial Sequence: Synthetic oligonucleotide
  Target: LAMA2; (-) strand; PAM type: YTN; PAM sequence: CTC
acaatgagggaatggaagca

SEQ ID NO: 283071 - DNA, 20 bp, Artificial Sequence
  Description of Artificial Sequence: Synthetic oligonucleotide
  Target: LAMA2; (-) strand; PAM type: YTN; PAM sequence: TTG
gcaaaagcaggactcacaat

SEQ ID NO: 283072 - DNA, 20 bp, Artificial Sequence
  Description of Artificial Sequence: Synthetic oligonucleotide
  Target: LAMA2; (-) strand; PAM type: YTN; PAM sequence: TTT
ggcaaaagcaggactcacaa

SEQ ID NO: 283073 - DNA, 20 bp, Artificial Sequence
  Description of Artificial Sequence: Synthetic oligonucleotide
  Target: LAMA2; (-) strand; PAM type: YTN; PAM sequence: TTA
gtttggcaaaagcaggactc

SEQ ID NO: 283074 - DNA, 20 bp, Artificial Sequence
  Description of Artificial Sequence: Synthetic oligonucleotide
  Target: LAMA2; (-) strand; PAM type: YTN; PAM sequence: CTA
gaattagtttggcaaaagca

SEQ ID NO: 283075 - DNA, 20 bp, Artificial Sequence
  Description of Artificial Sequence: Synthetic oligonucleotide
  Target: LAMA2; (-) strand; PAM type: YTN; PAM sequence: CTC
atagagtagaagaaaaatgt

SEQ ID NO: 283076 - DNA, 20 bp, Artificial Sequence
  Description of Artificial Sequence: Synthetic oligonucleotide
  Target: LAMA2; (-) strand; PAM type: YTN; PAM sequence: CTC
ctcatagagtagaagaaaaa

SEQ ID NO: 283077 - DNA, 20 bp, Artificial Sequence
  Description of Artificial Sequence: Synthetic oligonucleotide
  Target: LAMA2; (-) strand; PAM type: YTN; PAM sequence: CTC
ctcctcatagagtagaagaa

SEQ ID NO: 283078 - DNA, 20 bp, Artificial Sequence
  Description of Artificial Sequence: Synthetic oligonucleotide
  Target: LAMA2; (-) strand; PAM type: YTN; PAM sequence: CTC
atctcctcctcatagagtag

SEQ ID NO: 283079 - DNA, 20 bp, Artificial Sequence
  Description of Artificial Sequence: Synthetic oligonucleotide
  Target: LAMA2; (-) strand; PAM type: YTN; PAM sequence: TTC
tcatctcctcctcatagagt

SEQ ID NO: 283080 - DNA, 20 bp, Artificial Sequence
  Description of Artificial Sequence: Synthetic oligonucleotide
  Target: LAMA2; (-) strand; PAM type: YTN; PAM sequence: TTT
ctcatctcctcctcatagag

SEQ ID NO: 283081 - DNA, 20 bp, Artificial Sequence
  Description of Artificial Sequence: Synthetic oligonucleotide
  Target: LAMA2; (-) strand; PAM type: YTN; PAM sequence: CTT
tctcatctcctcctcataga

SEQ ID NO: 283082 - DNA, 20 bp, Artificial Sequence
  Description of Artificial Sequence: Synthetic oligonucleotide
  Target: LAMA2; (-) strand; PAM type: YTN; PAM sequence: CTC
cctttctcatctcctcctca

SEQ ID NO: 283083 - DNA, 20 bp, Artificial Sequence
  Description of Artificial Sequence: Synthetic oligonucleotide
  Target: LAMA2; (-) strand; PAM type: YTN; PAM sequence: CTC
tccctttctcatctcctcct

SEQ ID NO: 283084 - DNA, 20 bp, Artificial Sequence
  Description of Artificial Sequence: Synthetic oligonucleotide
  Target: LAMA2; (-) strand; PAM type: YTN; PAM sequence: CTG
gctctccctttctcatctcc

SEQ ID NO: 283085 - DNA, 20 bp, Artificial Sequence
  Description of Artificial Sequence: Synthetic oligonucleotide
  Target: LAMA2; (-) strand; PAM type: YTN; PAM sequence: TTA
agtctggctctccctttctc

SEQ ID NO: 283086 - DNA, 20 bp, Artificial Sequence
  Description of Artificial Sequence: Synthetic oligonucleotide
  Target: LAMA2; (-) strand; PAM type: YTN; PAM sequence: TTT
aagtctggctctccctttct

SEQ ID NO: 283087 - DNA, 20 bp, Artificial Sequence
  Description of Artificial Sequence: Synthetic oligonucleotide
  Target: LAMA2; (-) strand; PAM type: YTN; PAM sequence: CTT
taagtctggctctccctttc

SEQ ID NO: 283088 - DNA, 20 bp, Artificial Sequence
  Description of Artificial Sequence: Synthetic oligonucleotide
  Target: LAMA2; (-) strand; PAM type: YTN; PAM sequence: CTA
cacacacatacgtctttaag

SEQ ID NO: 283089 - DNA, 20 bp, Artificial Sequence
  Description of Artificial Sequence: Synthetic oligonucleotide
  Target: LAMA2; (-) strand; PAM type: YTN; PAM sequence: CTC
aaaggctacacacacatacg

SEQ ID NO: 283090 - DNA, 20 bp, Artificial Sequence
  Description of Artificial Sequence: Synthetic oligonucleotide
  Target: LAMA2; (-) strand; PAM type: YTN; PAM sequence: CTA
aagatcacatccaccaaaac

SEQ ID NO: 283091 - DNA, 20 bp, Artificial Sequence
  Description of Artificial Sequence: Synthetic oligonucleotide
  Target: LAMA2; (-) strand; PAM type: YTN; PAM sequence: CTC
taaagatcacatccaccaaa

SEQ ID NO: 283092 - DNA, 20 bp, Artificial Sequence
  Description of Artificial Sequence: Synthetic oligonucleotide
  Target: LAMA2; (-) strand; PAM type: YTN; PAM sequence: CTC
tctaaagatcacatccacca

SEQ ID NO: 283093 - DNA, 20 bp, Artificial Sequence
  Description of Artificial Sequence: Synthetic oligonucleotide
  Target: LAMA2; (-) strand; PAM type: YTN; PAM sequence: TTC
tctctaaagatcacatccac

SEQ ID NO: 283094 - DNA, 20 bp, Artificial Sequence
  Description of Artificial Sequence: Synthetic oligonucleotide
  Target: LAMA2; (-) strand; PAM type: YTN; PAM sequence: TTT
ctctctaaagatcacatcca

SEQ ID NO: 283095 - DNA, 20 bp, Artificial Sequence
  Description of Artificial Sequence: Synthetic oligonucleotide
  Target: LAMA2; (-) strand; PAM type: YTN; PAM sequence: CTT
tctctctaaagatcacatcc

SEQ ID NO: 283096 - DNA, 20 bp, Artificial Sequence
  Description of Artificial Sequence: Synthetic oligonucleotide
  Target: LAMA2; (-) strand; PAM type: YTN; PAM sequence: CTA
ctttctctctaaagatcaca

SEQ ID NO: 283097 - DNA, 20 bp, Artificial Sequence
  Description of Artificial Sequence: Synthetic oligonucleotide
  Target: LAMA2; (-) strand; PAM type: YTN; PAM sequence: TTC
tactttctctctaaagatca

SEQ ID NO: 283098 - DNA, 20 bp, Artificial Sequence
  Description of Artificial Sequence: Synthetic oligonucleotide
  Target: LAMA2; (-) strand; PAM type: YTN; PAM sequence: CTA
gtcattctactttctctcta

SEQ ID NO: 283099 - DNA, 20 bp, Artificial Sequence
  Description of Artificial Sequence: Synthetic oligonucleotide
  Target: LAMA2; (-) strand; PAM type: YTN; PAM sequence: CTC
aaacccaataacagaagcct

SEQ ID NO: 283100 - DNA, 20 bp, Artificial Sequence
  Description of Artificial Sequence: Synthetic oligonucleotide
  Target: LAMA2; (-) strand; PAM type: YTN; PAM sequence: CTC
tcaaacccaataacagaagc

SEQ ID NO: 283101 - DNA, 20 bp, Artificial Sequence
  Description of Artificial Sequence: Synthetic oligonucleotide
  Target: LAMA2; (-) strand; PAM type: YTN; PAM sequence: TTC
agctctcaaacccaataaca

SEQ ID NO: 283102 - DNA, 20 bp, Artificial Sequence
  Description of Artificial Sequence: Synthetic oligonucleotide
  Target: LAMA2; (-) strand; PAM type: YTN; PAM sequence: CTT
cagctctcaaacccaataac

SEQ ID NO: 283103 - DNA, 20 bp, Artificial Sequence
  Description of Artificial Sequence: Synthetic oligonucleotide
  Target: LAMA2; (-) strand; PAM type: YTN; PAM sequence: TTC
cttcagctctcaaacccaat

SEQ ID NO: 283104 - DNA, 20 bp, Artificial Sequence
  Description of Artificial Sequence: Synthetic oligonucleotide
  Target: LAMA2; (-) strand; PAM type: YTN; PAM sequence: TTA
ttccttcagctctcaaaccc

SEQ ID NO: 283105 - DNA, 20 bp, Artificial Sequence
  Description of Artificial Sequence: Synthetic oligonucleotide
  Target: LAMA2; (-) strand; PAM type: YTN; PAM sequence: CTT
attccttcagctctcaaacc

SEQ ID NO: 283106 - DNA, 20 bp, Artificial Sequence
  Description of Artificial Sequence: Synthetic oligonucleotide
  Target: LAMA2; (-) strand; PAM type: YTN; PAM sequence: CTC
cttattccttcagctctcaa

SEQ ID NO: 283107 - DNA, 20 bp, Artificial Sequence
  Description of Artificial Sequence: Synthetic oligonucleotide
  Target: LAMA2; (-) strand; PAM type: YTN; PAM sequence: CTC
tccttattccttcagctctc

SEQ ID NO: 283108 - DNA, 20 bp, Artificial Sequence
  Description of Artificial Sequence: Synthetic oligonucleotide
  Target: LAMA2; (-) strand; PAM type: YTN; PAM sequence: TTC
cctctccttattccttcagc

SEQ ID NO: 283109 - DNA, 20 bp, Artificial Sequence
  Description of Artificial Sequence: Synthetic oligonucleotide
  Target: LAMA2; (-) strand; PAM type: YTN; PAM sequence: CTA
gattccctctccttattcct

SEQ ID NO: 283110 - DNA, 20 bp, Artificial Sequence
  Description of Artificial Sequence: Synthetic oligonucleotide
  Target: LAMA2; (-) strand; PAM type: YTN; PAM sequence: TTC
tagattccctctccttattc

SEQ ID NO: 283111 - DNA, 20 bp, Artificial Sequence
  Description of Artificial Sequence: Synthetic oligonucleotide
  Target: LAMA2; (-) strand; PAM type: YTN; PAM sequence: TTT
ctagattccctctccttatt

SEQ ID NO: 283112 - DNA, 20 bp, Artificial Sequence
  Description of Artificial Sequence: Synthetic oligonucleotide
  Target: LAMA2; (-) strand; PAM type: YTN; PAM sequence: TTT
tctagattccctctccttat

SEQ ID NO: 283113 - DNA, 20 bp, Artificial Sequence
  Description of Artificial Sequence: Synthetic oligonucleotide
  Target: LAMA2; (-) strand; PAM type: YTN; PAM sequence: TTA
ttttctagattccctctcct

SEQ ID NO: 283114 - DNA, 20 bp, Artificial Sequence
  Description of Artificial Sequence: Synthetic oligonucleotide
  Target: LAMA2; (-) strand; PAM type: YTN; PAM sequence: TTT
attttctagattccctctcc

SEQ ID NO: 283115 - DNA, 20 bp, Artificial Sequence
  Description of Artificial Sequence: Synthetic oligonucleotide
  Target: LAMA2; (-) strand; PAM type: YTN; PAM sequence: TTT
tattttctagattccctctc

SEQ ID NO: 283116 - DNA, 20 bp, Artificial Sequence
  Description of Artificial Sequence: Synthetic oligonucleotide
  Target: LAMA2; (-) strand; PAM type: YTN; PAM sequence: TTA
taatccatagttttattttc

SEQ ID NO: 283117 - DNA, 20 bp, Artificial Sequence
  Description of Artificial Sequence: Synthetic oligonucleotide
  Target: LAMA2; (-) strand; PAM type: YTN; PAM sequence: TTT
ataatccatagttttatttt

SEQ ID NO: 283118 - DNA, 20 bp, Artificial Sequence
  Description of Artificial Sequence: Synthetic oligonucleotide
  Target: LAMA2; (-) strand; PAM type: YTN; PAM sequence: TTA
atttataatccatagtttta

SEQ ID NO: 283119 - DNA, 20 bp, Artificial Sequence
  Description of Artificial Sequence: Synthetic oligonucleotide
  Target: LAMA2; (-) strand; PAM type: YTN; PAM sequence: TTT
aatttataatccatagtttt

SEQ ID NO: 283120 - DNA, 20 bp, Artificial Sequence
  Description of Artificial Sequence: Synthetic oligonucleotide
  Target: LAMA2; (-) strand; PAM type: YTN; PAM sequence: CTG
gagaataagaagaagattta

SEQ ID NO: 283121 - DNA, 20 bp, Artificial Sequence
  Description of Artificial Sequence: Synthetic oligonucleotide
  Target: LAMA2; (-) strand; PAM type: YTN; PAM sequence: TTC
tggagaataagaagaagatt

SEQ ID NO: 283122 - DNA, 20 bp, Artificial Sequence
  Description of Artificial Sequence: Synthetic oligonucleotide
  Target: LAMA2; (-) strand; PAM type: YTN; PAM sequence: TTT
ctggagaataagaagaagat

SEQ ID NO: 283123 - DNA, 20 bp, Artificial Sequence
  Description of Artificial Sequence: Synthetic oligonucleotide
  Target: LAMA2; (-) strand; PAM type: YTN; PAM sequence: TTG
tgatttctggagaataagaa

SEQ ID NO: 283124 - DNA, 20 bp, Artificial Sequence
  Description of Artificial Sequence: Synthetic oligonucleotide
  Target: LAMA2; (-) strand; PAM type: YTN; PAM sequence: CTT
gtgatttctggagaataaga

SEQ ID NO: 283125 - DNA, 20 bp, Artificial Sequence
  Description of Artificial Sequence: Synthetic oligonucleotide
  Target: LAMA2; (-) strand; PAM type: YTN; PAM sequence: TTA
cttgtgatttctggagaata

SEQ ID NO: 283126 - DNA, 20 bp, Artificial Sequence
  Description of Artificial Sequence: Synthetic oligonucleotide
  Target: LAMA2; (-) strand; PAM type: YTN; PAM sequence: TTT
acttgtgatttctggagaat

SEQ ID NO: 283127 - DNA, 20 bp, Artificial Sequence
  Description of Artificial Sequence: Synthetic oligonucleotide
  Target: LAMA2; (-) strand; PAM type: YTN; PAM sequence: TTT
tacttgtgatttctggagaa

SEQ ID NO: 283128 - DNA, 20 bp, Artificial Sequence
  Description of Artificial Sequence: Synthetic oligonucleotide
  Target: LAMA2; (-) strand; PAM type: YTN; PAM sequence: TTT
ttacttgtgatttctggaga

SEQ ID NO: 283129 - DNA, 20 bp, Artificial Sequence
  Description of Artificial Sequence: Synthetic oligonucleotide
  Target: LAMA2; (-) strand; PAM type: YTN; PAM sequence: TTT
tttacttgtgatttctggag

SEQ ID NO: 283130 - DNA, 20 bp, Artificial Sequence
  Description of Artificial Sequence: Synthetic oligonucleotide
  Target: LAMA2; (-) strand; PAM type: YTN; PAM sequence: TTT
ttttacttgtgatttctgga

SEQ ID NO: 283131 - DNA, 20 bp, Artificial Sequence
  Description of Artificial Sequence: Synthetic oligonucleotide
  Target: LAMA2; (-) strand; PAM type: YTN; PAM sequence: CTG
aatttttttacttgtgattt

SEQ ID NO: 283132 - DNA, 20 bp, Artificial Sequence
  Description of Artificial Sequence: Synthetic oligonucleotide
  Target: LAMA2; (-) strand; PAM type: YTN; PAM sequence: TTA
aaagaaaatccaactgaatt

SEQ ID NO: 283133 - DNA, 20 bp, Artificial Sequence
  Description of Artificial Sequence: Synthetic oligonucleotide
  Target: LAMA2; (-) strand; PAM type: YTN; PAM sequence: TTA
tcgatagttaaaagaaaatc

SEQ ID NO: 283134 - DNA, 20 bp, Artificial Sequence
  Description of Artificial Sequence: Synthetic oligonucleotide
  Target: LAMA2; (-) strand; PAM type: YTN; PAM sequence: TTG
taacaagggtgaagacatag

SEQ ID NO: 283135 - DNA, 20 bp, Artificial Sequence
  Description of Artificial Sequence: Synthetic oligonucleotide
  Target: LAMA2; (-) strand; PAM type: YTN; PAM sequence: TTG
aattgtaacaagggtgaaga

SEQ ID NO: 283136 - DNA, 20 bp, Artificial Sequence
  Description of Artificial Sequence: Synthetic oligonucleotide
  Target: LAMA2; (-) strand; PAM type: YTN; PAM sequence: TTT
gaattgtaacaagggtgaag

SEQ ID NO: 283137 - DNA, 20 bp, Artificial Sequence
  Description of Artificial Sequence: Synthetic oligonucleotide
  Target: LAMA2; (-) strand; PAM type: YTN; PAM sequence: TTC
agtttgaattgtaacaaggg

SEQ ID NO: 283138 - DNA, 20 bp, Artificial Sequence
  Description of Artificial Sequence: Synthetic oligonucleotide
  Target: LAMA2; (-) strand; PAM type: YTN; PAM sequence: TTG
tgattcagtttgaattgtaa

SEQ ID NO: 283139 - DNA, 20 bp, Artificial Sequence
  Description of Artificial Sequence: Synthetic oligonucleotide
  Target: LAMA2; (-) strand; PAM type: YTN; PAM sequence: CTT
gtgattcagtttgaattgta

SEQ ID NO: 283140 - DNA, 20 bp, Artificial Sequence
  Description of Artificial Sequence: Synthetic oligonucleotide
  Target: LAMA2; (-) strand; PAM type: YTN; PAM sequence: CTC
ttgtgattcagtttgaattg

SEQ ID NO: 283141 - DNA, 20 bp, Artificial Sequence
  Description of Artificial Sequence: Synthetic oligonucleotide
  Target: LAMA2; (-) strand; PAM type: YTN; PAM sequence: CTA
aaagtaagaaagaactcttg

SEQ ID NO: 283142 - DNA, 20 bp, Artificial Sequence
  Description of Artificial Sequence: Synthetic oligonucleotide
  Target: LAMA2; (-) strand; PAM type: YTN; PAM sequence: TTA
aataaaagacagaggaggca

SEQ ID NO: 283143 - DNA, 20 bp, Artificial Sequence
  Description of Artificial Sequence: Synthetic oligonucleotide
  Target: LAMA2; (-) strand; PAM type: YTN; PAM sequence: TTT
aaataaaagacagaggaggc

SEQ ID NO: 283144 - DNA, 20 bp, Artificial Sequence
  Description of Artificial Sequence: Synthetic oligonucleotide
  Target: LAMA2; (-) strand; PAM type: YTN; PAM sequence: TTT
taaataaaagacagaggagg

SEQ ID NO: 283145 - DNA, 20 bp, Artificial Sequence
  Description of Artificial Sequence: Synthetic oligonucleotide
  Target: LAMA2; (-) strand; PAM type: YTN; PAM sequence: CTG
attttaaataaaagacagag

SEQ ID NO: 283146 - DNA, 20 bp, Artificial Sequence
  Description of Artificial Sequence: Synthetic oligonucleotide
  Target: LAMA2; (-) strand; PAM type: YTN; PAM sequence: CTG
ggctgattttaaataaaaga

SEQ ID NO: 283147 - DNA, 20 bp, Artificial Sequence
  Description of Artificial Sequence: Synthetic oligonucleotide
  Target: LAMA2; (-) strand; PAM type: YTN; PAM sequence: CTC
ctgggctgattttaaataaa

SEQ ID NO: 283148 - DNA, 20 bp, Artificial Sequence
  Description of Artificial Sequence: Synthetic oligonucleotide
  Target: LAMA2; (-) strand; PAM type: YTN; PAM sequence: CTA
gaaaaataagcactcctggg

SEQ ID NO: 283149 - DNA, 20 bp, Artificial Sequence
  Description of Artificial Sequence: Synthetic oligonucleotide
  Target: LAMA2; (-) strand; PAM type: YTN; PAM sequence: TTA
caaaataatagcgaggaaaa

SEQ ID NO: 283150 - DNA, 20 bp, Artificial Sequence
  Description of Artificial Sequence: Synthetic oligonucleotide
  Target: LAMA2; (-) strand; PAM type: YTN; PAM sequence: CTT
acaaaataatagcgaggaaa

SEQ ID NO: 283151 - DNA, 20 bp, Artificial Sequence
  Description of Artificial Sequence: Synthetic oligonucleotide
  Target: LAMA2; (-) strand; PAM type: YTN; PAM sequence: TTC
aaaatggaacttacaaaata

SEQ ID NO: 283152 - DNA, 20 bp, Artificial Sequence
  Description of Artificial Sequence: Synthetic oligonucleotide
  Target: LAMA2; (-) strand; PAM type: YTN; PAM sequence: TTT
caaaatggaacttacaaaat

SEQ ID NO: 283153 - DNA, 20 bp, Artificial Sequence
  Description of Artificial Sequence: Synthetic oligonucleotide
  Target: LAMA2; (-) strand; PAM type: YTN; PAM sequence: TTG
cagatttcaaaatggaactt

SEQ ID NO: 283154 - DNA, 20 bp, Artificial Sequence
  Description of Artificial Sequence: Synthetic oligonucleotide
  Target: LAMA2; (-) strand; PAM type: YTN; PAM sequence: TTC
agagaagaattgcagatttc

SEQ ID NO: 283155 - DNA, 20 bp, Artificial Sequence
  Description of Artificial Sequence: Synthetic oligonucleotide
  Target: LAMA2; (-) strand; PAM type: YTN; PAM sequence: CTA
ttcagagaagaattgcagat

SEQ ID NO: 283156 - DNA, 20 bp, Artificial Sequence
  Description of Artificial Sequence: Synthetic oligonucleotide
  Target: LAMA2; (-) strand; PAM type: YTN; PAM sequence: TTA
gatgagtagaagctattcag

SEQ ID NO: 283157 - DNA, 20 bp, Artificial Sequence
  Description of Artificial Sequence: Synthetic oligonucleotide
  Target: LAMA2; (-) strand; PAM type: YTN; PAM sequence: TTG
gtgatagaattagatgagta

SEQ ID NO: 283158 - DNA, 20 bp, Artificial Sequence
  Description of Artificial Sequence: Synthetic oligonucleotide
  Target: LAMA2; (-) strand; PAM type: YTN; PAM sequence: TTT
ggtgatagaattagatgagt

SEQ ID NO: 283159 - DNA, 20 bp, Artificial Sequence
  Description of Artificial Sequence: Synthetic oligonucleotide
  Target: LAMA2; (-) strand; PAM type: YTN; PAM sequence: CTT
tggtgatagaattagatgag

SEQ ID NO: 283160 - DNA, 20 bp, Artificial Sequence
  Description of Artificial Sequence: Synthetic oligonucleotide
  Target: LAMA2; (-) strand; PAM type: YTN; PAM sequence: TTG
tagctttggtgatagaatta

SEQ ID NO: 283161 - DNA, 20 bp, Artificial Sequence
  Description of Artificial Sequence: Synthetic oligonucleotide
  Target: LAMA2; (-) strand; PAM type: YTN; PAM sequence: TTT
gtagctttggtgatagaatt

SEQ ID NO: 283162 - DNA, 20 bp, Artificial Sequence
  Description of Artificial Sequence: Synthetic oligonucleotide
  Target: LAMA2; (-) strand; PAM type: YTN; PAM sequence: TTT
tgtagctttggtgatagaat

SEQ ID NO: 283163 - DNA, 20 bp, Artificial Sequence
  Description of Artificial Sequence: Synthetic oligonucleotide
  Target: LAMA2; (-) strand; PAM type: YTN; PAM sequence: CTA
aacattttgtagctttggtg

SEQ ID NO: 283164 - DNA, 20 bp, Artificial Sequence
  Description of Artificial Sequence: Synthetic oligonucleotide
  Target: LAMA2; (-) strand; PAM type: YTN; PAM sequence: CTA
catctaaacattttgtagct

SEQ ID NO: 283165 - DNA, 20 bp, Artificial Sequence
  Description of Artificial Sequence: Synthetic oligonucleotide
  Target: LAMA2; (-) strand; PAM type: YTN; PAM sequence: TTG
aactacatctaaacattttg

SEQ ID NO: 283166 - DNA, 20 bp, Artificial Sequence
  Description of Artificial Sequence: Synthetic oligonucleotide
  Target: LAMA2; (-) strand; PAM type: YTN; PAM sequence: CTT
gaactacatctaaacatttt

SEQ ID NO: 283167 - DNA, 20 bp, Artificial Sequence
  Description of Artificial Sequence: Synthetic oligonucleotide
  Target: LAMA2; (-) strand; PAM type: YTN; PAM sequence: TTC
ttgaactacatctaaacatt

SEQ ID NO: 283168 - DNA, 20 bp, Artificial Sequence
  Description of Artificial Sequence: Synthetic oligonucleotide
  Target: LAMA2; (-) strand; PAM type: YTN; PAM sequence: TTT
cttgaactacatctaaacat

SEQ ID NO: 283169 - DNA, 20 bp, Artificial Sequence
  Description of Artificial Sequence: Synthetic oligonucleotide
  Target: LAMA2; (-) strand; PAM type: YTN; PAM sequence: CTG
gaatttcttgaactacatct

SEQ ID NO: 283170 - DNA, 20 bp, Artificial Sequence
  Description of Artificial Sequence: Synthetic oligonucleotide
  Target: LAMA2; (-) strand; PAM type: YTN; PAM sequence: TTC
tggaatttcttgaactacat

SEQ ID NO: 283171 - DNA, 20 bp, Artificial Sequence
  Description of Artificial Sequence: Synthetic oligonucleotide
  Target: LAMA2; (-) strand; PAM type: YTN; PAM sequence: TTT
ctggaatttcttgaactaca

SEQ ID NO: 283172 - DNA, 20 bp, Artificial Sequence
  Description of Artificial Sequence: Synthetic oligonucleotide
  Target: LAMA2; (-) strand; PAM type: YTN; PAM sequence: CTA
aagtagtttctggaatttct

SEQ ID NO: 283173 - DNA, 20 bp, Artificial Sequence
  Description of Artificial Sequence: Synthetic oligonucleotide
  Target: LAMA2; (-) strand; PAM type: YTN; PAM sequence: TTC
taaagtagtttctggaattt

SEQ ID NO: 283174 - DNA, 20 bp, Artificial Sequence
  Description of Artificial Sequence: Synthetic oligonucleotide
  Target: LAMA2; (-) strand; PAM type: YTN; PAM sequence: TTT
ctaaagtagtttctggaatt

SEQ ID NO: 283175 - DNA, 20 bp, Artificial Sequence
  Description of Artificial Sequence: Synthetic oligonucleotide
  Target: LAMA2; (-) strand; PAM type: YTN; PAM sequence: TTT
tctaaagtagtttctggaat

SEQ ID NO: 283176 - DNA, 20 bp, Artificial Sequence
  Description of Artificial Sequence: Synthetic oligonucleotide
  Target: LAMA2; (-) strand; PAM type: YTN; PAM sequence: TTT
ttctaaagtagtttctggaa

SEQ ID NO: 283177 - DNA, 20 bp, Artificial Sequence
  Description of Artificial Sequence: Synthetic oligonucleotide
  Target: LAMA2; (-) strand; PAM type: YTN; PAM sequence: CTT
tttctaaagtagtttctgga

SEQ ID NO: 283178 - DNA, 20 bp, Artificial Sequence
  Description of Artificial Sequence: Synthetic oligonucleotide
  Target: LAMA2; (-) strand; PAM type: YTN; PAM sequence: CTG
atcacctttttctaaagtag

SEQ ID NO: 283179 - DNA, 20 bp, Artificial Sequence
  Description of Artificial Sequence: Synthetic oligonucleotide
  Target: LAMA2; (-) strand; PAM type: YTN; PAM sequence: TTA
cgctgatcacctttttctaa

SEQ ID NO: 283180 - DNA, 20 bp, Artificial Sequence
  Description of Artificial Sequence: Synthetic oligonucleotide
  Target: LAMA2; (-) strand; PAM type: YTN; PAM sequence: CTT
acgctgatcacctttttcta

SEQ ID NO: 283181 - DNA, 20 bp, Artificial Sequence
  Description of Artificial Sequence: Synthetic oligonucleotide
  Target: LAMA2; (-) strand; PAM type: YTN; PAM sequence: TTC
ttacgctgatcacctttttc

SEQ ID NO: 283182 - DNA, 20 bp, Artificial Sequence
  Description of Artificial Sequence: Synthetic oligonucleotide
  Target: LAMA2; (-) strand; PAM type: YTN; PAM sequence: TTT
cttacgctgatcaccttttt

SEQ ID NO: 283183 - DNA, 20 bp, Artificial Sequence
  Description of Artificial Sequence: Synthetic oligonucleotide
  Target: LAMA2; (-) strand; PAM type: YTN; PAM sequence: CTT
tcttacgctgatcacctttt

SEQ ID NO: 283184 - DNA, 20 bp, Artificial Sequence
  Description of Artificial Sequence: Synthetic oligonucleotide
  Target: LAMA2; (-) strand; PAM type: YTN; PAM sequence: TTG
ccctttcttacgctgatcac

SEQ ID NO: 283185 - DNA, 20 bp, Artificial Sequence
  Description of Artificial Sequence: Synthetic oligonucleotide
  Target: LAMA2; (-) strand; PAM type: YTN; PAM sequence: TTT
gccctttcttacgctgatca

SEQ ID NO: 283186 - DNA, 20 bp, Artificial Sequence
  Description of Artificial Sequence: Synthetic oligonucleotide
  Target: LAMA2; (-) strand; PAM type: YTN; PAM sequence: TTA
atttgccctttcttacgctg

SEQ ID NO: 283187 - DNA, 20 bp, Artificial Sequence
  Description of Artificial Sequence: Synthetic oligonucleotide
  Target: LAMA2; (-) strand; PAM type: YTN; PAM sequence: TTA
ttaatttgccctttcttacg

SEQ ID NO: 283188 - DNA, 20 bp, Artificial Sequence
  Description of Artificial Sequence: Synthetic oligonucleotide
  Target: LAMA2; (-) strand; PAM type: YTN; PAM sequence: CTT
attaatttgccctttcttac

SEQ ID NO: 283189 - DNA, 20 bp, Artificial Sequence
  Description of Artificial Sequence: Synthetic oligonucleotide
  Target: LAMA2; (-) strand; PAM type: YTN; PAM sequence: CTG
atccttattaatttgccctt

SEQ ID NO: 283190 - DNA, 20 bp, Artificial Sequence
  Description of Artificial Sequence: Synthetic oligonucleotide
  Target: LAMA2; (-) strand; PAM type: YTN; PAM sequence: CTC
tgatccttattaatttgccc

SEQ ID NO: 283191 - DNA, 20 bp, Artificial Sequence
  Description of Artificial Sequence: Synthetic oligonucleotide
  Target: LAMA2; (-) strand; PAM type: YTN; PAM sequence: TTG
actctgatccttattaattt

SEQ ID NO: 283192 - DNA, 20 bp, Artificial Sequence
  Description of Artificial Sequence: Synthetic oligonucleotide
  Target: LAMA2; (-) strand; PAM type: YTN; PAM sequence: CTT
gactctgatccttattaatt

SEQ ID NO: 283193 - DNA, 20 bp, Artificial Sequence
  Description of Artificial Sequence: Synthetic oligonucleotide
  Target: LAMA2; (-) strand; PAM type: YTN; PAM sequence: CTG
cttgactctgatccttatta

SEQ ID NO: 283194 - DNA, 20 bp, Artificial Sequence
  Description of Artificial Sequence: Synthetic oligonucleotide
  Target: LAMA2; (-) strand; PAM type: YTN; PAM sequence: TTC
agctgcttgactctgatcct

SEQ ID NO: 283195 - DNA, 20 bp, Artificial Sequence
  Description of Artificial Sequence: Synthetic oligonucleotide
  Target: LAMA2; (-) strand; PAM type: YTN; PAM sequence: TTT
cagctgcttgactctgatcc

SEQ ID NO: 283196 - DNA, 20 bp, Artificial Sequence
  Description of Artificial Sequence: Synthetic oligonucleotide
  Target: LAMA2; (-) strand; PAM type: YTN; PAM sequence: TTA
atgtttcagctgcttgactc

SEQ ID NO: 283197 - DNA, 20 bp, Artificial Sequence
  Description of Artificial Sequence: Synthetic oligonucleotide
  Target: LAMA2; (-) strand; PAM type: YTN; PAM sequence: TTT
aatgtttcagctgcttgact

SEQ ID NO: 283198 - DNA, 20 bp, Artificial Sequence
  Description of Artificial Sequence: Synthetic oligonucleotide
  Target: LAMA2; (-) strand; PAM type: YTN; PAM sequence: TTT
taatgtttcagctgcttgac

SEQ ID NO: 283199 - DNA, 20 bp, Artificial Sequence
  Description of Artificial Sequence: Synthetic oligonucleotide
  Target: LAMA2; (-) strand; PAM type: YTN; PAM sequence: TTT
ttaatgtttcagctgcttga

SEQ ID NO: 283200 - DNA, 20 bp, Artificial Sequence
  Description of Artificial Sequence: Synthetic oligonucleotide
  Target: LAMA2; (-) strand; PAM type: YTN; PAM sequence: TTT
tttaatgtttcagctgcttg

SEQ ID NO: 283201 - DNA, 20 bp, Artificial Sequence
  Description of Artificial Sequence: Synthetic oligonucleotide
  Target: LAMA2; (-) strand; PAM type: YTN; PAM sequence: TTT
ttttaatgtttcagctgctt

SEQ ID NO: 283202 - DNA, 20 bp, Artificial Sequence
  Description of Artificial Sequence: Synthetic oligonucleotide
  Target: LAMA2; (-) strand; PAM type: YTN; PAM sequence: TTT
tttttaatgtttcagctgct

SEQ ID NO: 283203 - DNA, 20 bp, Artificial Sequence
  Description of Artificial Sequence: Synthetic oligonucleotide
  Target: LAMA2; (-) strand; PAM type: YTN; PAM sequence: TTT
ttttttaatgtttcagctgc

SEQ ID NO: 283204 - DNA, 20 bp, Artificial Sequence
  Description of Artificial Sequence: Synthetic oligonucleotide
  Target: LAMA2; (-) strand; PAM type: YTN; PAM sequence: CTG
atttttttttaatgtttcag

SEQ ID NO: 283205 - DNA, 20 bp, Artificial Sequence
  Description of Artificial Sequence: Synthetic oligonucleotide
  Target: LAMA2; (-) strand; PAM type: YTN; PAM sequence: TTC
tgatttttttttaatgtttc

SEQ ID NO: 283206 - DNA, 20 bp, Artificial Sequence
  Description of Artificial Sequence: Synthetic oligonucleotide
  Target: LAMA2; (-) strand; PAM type: YTN; PAM sequence: CTG
ttctgatttttttttaatgt

SEQ ID NO: 283207 - DNA, 20 bp, Artificial Sequence
  Description of Artificial Sequence: Synthetic oligonucleotide
  Target: LAMA2; (-) strand; PAM type: YTN; PAM sequence: TTC
caaccctgttctgatttttt

SEQ ID NO: 283208 - DNA, 20 bp, Artificial Sequence
  Description of Artificial Sequence: Synthetic oligonucleotide
  Target: LAMA2; (-) strand; PAM type: YTN; PAM sequence: TTA
caatgtgtatattccaaccc

SEQ ID NO: 283209 - DNA, 20 bp, Artificial Sequence
  Description of Artificial Sequence: Synthetic oligonucleotide
  Target: LAMA2; (-) strand; PAM type: YTN; PAM sequence: CTA
gcaagttacaatgtgtatat

SEQ ID NO: 283210 - DNA, 20 bp, Artificial Sequence
  Description of Artificial Sequence: Synthetic oligonucleotide
  Target: LAMA2; (-) strand; PAM type: YTN; PAM sequence: TTG
tactagcaagttacaatgtg

SEQ ID NO: 283211 - DNA, 20 bp, Artificial Sequence
  Description of Artificial Sequence: Synthetic oligonucleotide
  Target: LAMA2; (-) strand; PAM type: YTN; PAM sequence: TTT
gtactagcaagttacaatgt

SEQ ID NO: 283212 - DNA, 20 bp, Artificial Sequence
  Description of Artificial Sequence: Synthetic oligonucleotide
  Target: LAMA2; (-) strand; PAM type: YTN; PAM sequence: TTT
tgtactagcaagttacaatg

SEQ ID NO: 283213 - DNA, 20 bp, Artificial Sequence
  Description of Artificial Sequence: Synthetic oligonucleotide
  Target: LAMA2; (-) strand; PAM type: YTN; PAM sequence: TTT
ttgtactagcaagttacaat

SEQ ID NO: 283214 - DNA, 20 bp, Artificial Sequence
  Description of Artificial Sequence: Synthetic oligonucleotide
  Target: LAMA2; (-) strand; PAM type: YTN; PAM sequence: TTT
tttgtactagcaagttacaa

SEQ ID NO: 283215 - DNA, 20 bp, Artificial Sequence
  Description of Artificial Sequence: Synthetic oligonucleotide
  Target: LAMA2; (-) strand; PAM type: YTN; PAM sequence: TTT
ttttgtactagcaagttaca

SEQ ID NO: 283216 - DNA, 20 bp, Artificial Sequence
  Description of Artificial Sequence: Synthetic oligonucleotide
  Target: LAMA2; (-) strand; PAM type: YTN; PAM sequence: TTT
tttttgtactagcaagttac

SEQ ID NO: 283217 - DNA, 20 bp, Artificial Sequence
  Description of Artificial Sequence: Synthetic oligonucleotide
  Target: LAMA2; (-) strand; PAM type: YTN; PAM sequence: TTT
ttttttgtactagcaagtta

SEQ ID NO: 283218 - DNA, 20 bp, Artificial Sequence
  Description of Artificial Sequence: Synthetic oligonucleotide
  Target: LAMA2; (-) strand; PAM type: YTN; PAM sequence: TTT
tttttttgtactagcaagtt

SEQ ID NO: 283219 - DNA, 20 bp, Artificial Sequence
  Description of Artificial Sequence: Synthetic oligonucleotide
  Target: LAMA2; (-) strand; PAM type: YTN; PAM sequence: CTG
cattttttttttgtactagc

SEQ ID NO: 283220 - DNA, 20 bp, Artificial Sequence
  Description of Artificial Sequence: Synthetic oligonucleotide
  Target: LAMA2; (-) strand; PAM type: YTN; PAM sequence: CTC
tgcattttttttttgtacta

SEQ ID NO: 283221 - DNA, 20 bp, Artificial Sequence
  Description of Artificial Sequence: Synthetic oligonucleotide
  Target: LAMA2; (-) strand; PAM type: YTN; PAM sequence: TTC
tctgcattttttttttgtac

SEQ ID NO: 283222 - DNA, 20 bp, Artificial Sequence
  Description of Artificial Sequence: Synthetic oligonucleotide
  Target: LAMA2; (-) strand; PAM type: YTN; PAM sequence: TTG
attctctgcatttttttttt

SEQ ID NO: 283223 - DNA, 20 bp, Artificial Sequence
  Description of Artificial Sequence: Synthetic oligonucleotide
  Target: LAMA2; (-) strand; PAM type: YTN; PAM sequence: TTT
gattctctgcattttttttt

SEQ ID NO: 283224 - DNA, 20 bp, Artificial Sequence
  Description of Artificial Sequence: Synthetic oligonucleotide
  Target: LAMA2; (-) strand; PAM type: YTN; PAM sequence: TTT
tgattctctgcatttttttt

SEQ ID NO: 283225 - DNA, 20 bp, Artificial Sequence
  Description of Artificial Sequence: Synthetic oligonucleotide
  Target: LAMA2; (-) strand; PAM type: YTN; PAM sequence: CTA
attttgattctctgcatttt

SEQ ID NO: 283226 - DNA, 20 bp, Artificial Sequence
  Description of Artificial Sequence: Synthetic oligonucleotide
  Target: LAMA2; (-) strand; PAM type: YTN; PAM sequence: TTC
caaagcgctaattttgattc

SEQ ID NO: 283227 - DNA, 20 bp, Artificial Sequence
  Description of Artificial Sequence: Synthetic oligonucleotide
  Target: LAMA2; (-) strand; PAM type: YTN; PAM sequence: CTC
aagttccaaagcgctaattt

SEQ ID NO: 283228 - DNA, 20 bp, Artificial Sequence
  Description of Artificial Sequence: Synthetic oligonucleotide
  Target: LAMA2; (-) strand; PAM type: YTN; PAM sequence: CTC
tcaagttccaaagcgctaat

SEQ ID NO: 283229 - DNA, 20 bp, Artificial Sequence
  Description of Artificial Sequence: Synthetic oligonucleotide
  Target: LAMA2; (-) strand; PAM type: YTN; PAM sequence: CTG
cctctcaagttccaaagcgc

SEQ ID NO: 283230 - DNA, 20 bp, Artificial Sequence
  Description of Artificial Sequence: Synthetic oligonucleotide
  Target: LAMA2; (-) strand; PAM type: YTN; PAM sequence: CTG
ctgcctctcaagttccaaag

SEQ ID NO: 283231 - DNA, 20 bp, Artificial Sequence
  Description of Artificial Sequence: Synthetic oligonucleotide
  Target: LAMA2; (-) strand; PAM type: YTN; PAM sequence: TTA
ctgctgcctctcaagttcca

SEQ ID NO: 283232 - DNA, 20 bp, Artificial Sequence
  Description of Artificial Sequence: Synthetic oligonucleotide
  Target: LAMA2; (-) strand; PAM type: YTN; PAM sequence: TTT
actgctgcctctcaagttcc

SEQ ID NO: 283233 - DNA, 20 bp, Artificial Sequence
  Description of Artificial Sequence: Synthetic oligonucleotide
  Target: LAMA2; (-) strand; PAM type: YTN; PAM sequence: TTT
tactgctgcctctcaagttc

SEQ ID NO: 283234 - DNA, 20 bp, Artificial Sequence
  Description of Artificial Sequence: Synthetic oligonucleotide
  Target: LAMA2; (-) strand; PAM type: YTN; PAM sequence: TTT
ttactgctgcctctcaagtt

SEQ ID NO: 283235 - DNA, 20 bp, Artificial Sequence
  Description of Artificial Sequence: Synthetic oligonucleotide
  Target: LAMA2; (-) strand; PAM type: YTN; PAM sequence: CTG
aagaatatttttactgctgc

SEQ ID NO: 283236 - DNA, 20 bp, Artificial Sequence
  Description of Artificial Sequence: Synthetic oligonucleotide
  Target: LAMA2; (-) strand; PAM type: YTN; PAM sequence: CTG
acctgaagaatatttttact

SEQ ID NO: 283237 - DNA, 20 bp, Artificial Sequence
  Description of Artificial Sequence: Synthetic oligonucleotide
  Target: LAMA2; (-) strand; PAM type: YTN; PAM sequence: TTC
agaagactgacctgaagaat

SEQ ID NO: 283238 - DNA, 20 bp, Artificial Sequence
  Description of Artificial Sequence: Synthetic oligonucleotide
  Target: LAMA2; (-) strand; PAM type: YTN; PAM sequence: TTA
ttcagaagactgacctgaag

SEQ ID NO: 283239 - DNA, 20 bp, Artificial Sequence
  Description of Artificial Sequence: Synthetic oligonucleotide
  Target: LAMA2; (-) strand; PAM type: YTN; PAM sequence: CTG
ggccaattattcagaagact

SEQ ID NO: 283240 - DNA, 20 bp, Artificial Sequence
  Description of Artificial Sequence: Synthetic oligonucleotide
  Target: LAMA2; (-) strand; PAM type: YTN; PAM sequence: CTG
aacaactgggccaattattc

SEQ ID NO: 283241 - DNA, 20 bp, Artificial Sequence
  Description of Artificial Sequence: Synthetic oligonucleotide
  Target: LAMA2; (-) strand; PAM type: YTN; PAM sequence: CTG
gctgaacaactgggccaatt

SEQ ID NO: 283242 - DNA, 20 bp, Artificial Sequence
  Description of Artificial Sequence: Synthetic oligonucleotide
  Target: LAMA2; (-) strand; PAM type: YTN; PAM sequence: CTG
atagcaaaatgctggctgaa

SEQ ID NO: 283243 - DNA, 20 bp, Artificial Sequence
  Description of Artificial Sequence: Synthetic oligonucleotide
  Target: LAMA2; (-) strand; PAM type: YTN; PAM sequence: TTC
tgatagcaaaatgctggctg

SEQ ID NO: 283244 - DNA, 20 bp, Artificial Sequence
  Description of Artificial Sequence: Synthetic oligonucleotide
  Target: LAMA2; (-) strand; PAM type: YTN; PAM sequence: CTG
cattctgatagcaaaatgct

SEQ ID NO: 283245 - DNA, 20 bp, Artificial Sequence
  Description of Artificial Sequence: Synthetic oligonucleotide
  Target: LAMA2; (-) strand; PAM type: YTN; PAM sequence: TTC
tgcattctgatagcaaaatg

SEQ ID NO: 283246 - DNA, 20 bp, Artificial Sequence
  Description of Artificial Sequence: Synthetic oligonucleotide
  Target: LAMA2; (-) strand; PAM type: YTN; PAM sequence: TTT
ctgcattctgatagcaaaat

SEQ ID NO: 283247 - DNA, 20 bp, Artificial Sequence
  Description of Artificial Sequence: Synthetic oligonucleotide
  Target: LAMA2; (-) strand; PAM type: YTN; PAM sequence: CTT
tctgcattctgatagcaaaa

SEQ ID NO: 283248 - DNA, 20 bp, Artificial Sequence
  Description of Artificial Sequence: Synthetic oligonucleotide
  Target: LAMA2; (-) strand; PAM type: YTN; PAM sequence: TTA
taccactttctgcattctga

SEQ ID NO: 283249 - DNA, 20 bp, Artificial Sequence
  Description of Artificial Sequence: Synthetic oligonucleotide
  Target: LAMA2; (-) strand; PAM type: YTN; PAM sequence: TTT
ataccactttctgcattctg

SEQ ID NO: 283250 - DNA, 20 bp, Artificial Sequence
  Description of Artificial Sequence: Synthetic oligonucleotide
  Target: LAMA2; (-) strand; PAM type: YTN; PAM sequence: CTG
ggtttataccactttctgca

SEQ ID NO: 283251 - DNA, 20 bp, Artificial Sequence
  Description of Artificial Sequence: Synthetic oligonucleotide
  Target: LAMA2; (-) strand; PAM type: YTN; PAM sequence: TTG
aagggtatccctgggtttat

SEQ ID NO: 283252 - DNA, 20 bp, Artificial Sequence
  Description of Artificial Sequence: Synthetic oligonucleotide
  Target: LAMA2; (-) strand; PAM type: YTN; PAM sequence: TTT
gaagggtatccctgggttta

SEQ ID NO: 283253 - DNA, 20 bp, Artificial Sequence
  Description of Artificial Sequence: Synthetic oligonucleotide
  Target: LAMA2; (-) strand; PAM type: YTN; PAM sequence: TTA
atttgaagggtatccctggg

SEQ ID NO: 283254 - DNA, 20 bp, Artificial Sequence
  Description of Artificial Sequence: Synthetic oligonucleotide
  Target: LAMA2; (-) strand; PAM type: YTN; PAM sequence: TTC
atgtatggtgagaaagatca

SEQ ID NO: 283255 - DNA, 20 bp, Artificial Sequence
  Description of Artificial Sequence: Synthetic oligonucleotide
  Target: LAMA2; (-) strand; PAM type: YTN; PAM sequence: CTG
gcaagcaagatattcatgta

SEQ ID NO: 283256 - DNA, 20 bp, Artificial Sequence
  Description of Artificial Sequence: Synthetic oligonucleotide
  Target: LAMA2; (-) strand; PAM type: YTN; PAM sequence: TTC
tggcaagcaagatattcatg

SEQ ID NO: 283257 - DNA, 20 bp, Artificial Sequence
  Description of Artificial Sequence: Synthetic oligonucleotide
  Target: LAMA2; (-) strand; PAM type: YTN; PAM sequence: TTC
aaatgttctggcaagcaaga

SEQ ID NO: 283258 - DNA, 20 bp, Artificial Sequence
  Description of Artificial Sequence: Synthetic oligonucleotide
  Target: LAMA2; (-) strand; PAM type: YTN; PAM sequence: TTA
aaataatggagcattcaaat

SEQ ID NO: 283259 - DNA, 20 bp, Artificial Sequence
  Description of Artificial Sequence: Synthetic oligonucleotide
  Target: LAMA2; (-) strand; PAM type: YTN; PAM sequence: TTT
aaaataatggagcattcaaa

SEQ ID NO: 283260 - DNA, 20 bp, Artificial Sequence
  Description of Artificial Sequence: Synthetic oligonucleotide
  Target: LAMA2; (-) strand; PAM type: YTN; PAM sequence: TTT
taaaataatggagcattcaa

SEQ ID NO: 283261 - DNA, 20 bp, Artificial Sequence
  Description of Artificial Sequence: Synthetic oligonucleotide
  Target: LAMA2; (-) strand; PAM type: YTN; PAM sequence: TTT
ttaaaataatggagcattca

SEQ ID NO: 283262 - DNA, 20 bp, Artificial Sequence
  Description of Artificial Sequence: Synthetic oligonucleotide
  Target: LAMA2; (-) strand; PAM type: YTN; PAM sequence: TTA
gtttttaaaataatggagca

SEQ ID NO: 283263 - DNA, 20 bp, Artificial Sequence
  Description of Artificial Sequence: Synthetic oligonucleotide
  Target: LAMA2; (-) strand; PAM type: YTN; PAM sequence: TTT
agtttttaaaataatggagc

SEQ ID NO: 283264 - DNA, 20 bp, Artificial Sequence
  Description of Artificial Sequence: Synthetic oligonucleotide
  Target: LAMA2; (-) strand; PAM type: YTN; PAM sequence: TTG
gatttagtttttaaaataat

SEQ ID NO: 283265 - DNA, 20 bp, Artificial Sequence
  Description of Artificial Sequence: Synthetic oligonucleotide
  Target: LAMA2; (-) strand; PAM type: YTN; PAM sequence: TTG
attggatttagtttttaaaa

SEQ ID NO: 283266 - DNA, 20 bp, Artificial Sequence
  Description of Artificial Sequence: Synthetic oligonucleotide
  Target: LAMA2; (-) strand; PAM type: YTN; PAM sequence: CTT
gattggatttagtttttaaa

SEQ ID NO: 283267 - DNA, 20 bp, Artificial Sequence
  Description of Artificial Sequence: Synthetic oligonucleotide
  Target: LAMA2; (-) strand; PAM type: YTN; PAM sequence: TTC
ttgattggatttagttttta

SEQ ID NO: 283268 - DNA, 20 bp, Artificial Sequence
  Description of Artificial Sequence: Synthetic oligonucleotide
  Target: LAMA2; (-) strand; PAM type: YTN; PAM sequence: CTT
cttgattggatttagttttt

SEQ ID NO: 283269 - DNA, 20 bp, Artificial Sequence
  Description of Artificial Sequence: Synthetic oligonucleotide
  Target: LAMA2; (-) strand; PAM type: YTN; PAM sequence: TTA
gcttcttgattggatttagt

SEQ ID NO: 283270 - DNA, 20 bp, Artificial Sequence
  Description of Artificial Sequence: Synthetic oligonucleotide
  Target: LAMA2; (-) strand; PAM type: YTN; PAM sequence: CTT
agcttcttgattggatttag

SEQ ID NO: 283271 - DNA, 20 bp, Artificial Sequence
  Description of Artificial Sequence: Synthetic oligonucleotide
  Target: LAMA2; (-) strand; PAM type: YTN; PAM sequence: TTC
ttagcttcttgattggattt

SEQ ID NO: 283272 - DNA, 20 bp, Artificial Sequence
  Description of Artificial Sequence: Synthetic oligonucleotide
  Target: LAMA2; (-) strand; PAM type: YTN; PAM sequence: TTT
cttagcttcttgattggatt

SEQ ID NO: 283273 - DNA, 20 bp, Artificial Sequence
  Description of Artificial Sequence: Synthetic oligonucleotide
  Target: LAMA2; (-) strand; PAM type: YTN; PAM sequence: TTC
atttcttagcttcttgattg

SEQ ID NO: 283274 - DNA, 20 bp, Artificial Sequence
  Description of Artificial Sequence: Synthetic oligonucleotide
  Target: LAMA2; (-) strand; PAM type: YTN; PAM sequence: TTT
catttcttagcttcttgatt

SEQ ID NO: 283275 - DNA, 20 bp, Artificial Sequence
  Description of Artificial Sequence: Synthetic oligonucleotide
  Target: LAMA2; (-) strand; PAM type: YTN; PAM sequence: CTG
tagaaatttcatttcttagc

SEQ ID NO: 283276 - DNA, 20 bp, Artificial Sequence
  Description of Artificial Sequence: Synthetic oligonucleotide
  Target: LAMA2; (-) strand; PAM type: YTN; PAM sequence: TTA
agaaaatggaactgtagaaa

SEQ ID NO: 283277 - DNA, 20 bp, Artificial Sequence
  Description of Artificial Sequence: Synthetic oligonucleotide
  Target: LAMA2; (-) strand; PAM type: YTN; PAM sequence: CTT
aagaaaatggaactgtagaa

SEQ ID NO: 283278 - DNA, 20 bp, Artificial Sequence
  Description of Artificial Sequence: Synthetic oligonucleotide
  Target: LAMA2; (-) strand; PAM type: YTN; PAM sequence: TTC
aacacttaagaaaatggaac

SEQ ID NO: 283279 - DNA, 20 bp, Artificial Sequence
  Description of Artificial Sequence: Synthetic oligonucleotide
  Target: LAMA2; (-) strand; PAM type: YTN; PAM sequence: CTT
caacacttaagaaaatggaa

SEQ ID NO: 283280 - DNA, 20 bp, Artificial Sequence
  Description of Artificial Sequence: Synthetic oligonucleotide
  Target: LAMA2; (-) strand; PAM type: YTN; PAM sequence: TTG
aaagtcttcaacacttaaga

SEQ ID NO: 283281 - DNA, 20 bp, Artificial Sequence
  Description of Artificial Sequence: Synthetic oligonucleotide
  Target: LAMA2; (-) strand; PAM type: YTN; PAM sequence: CTT
gaaagtcttcaacacttaag

SEQ ID NO: 283282 - DNA, 20 bp, Artificial Sequence
  Description of Artificial Sequence: Synthetic oligonucleotide
  Target: LAMA2; (-) strand; PAM type: YTN; PAM sequence: TTA
gcttgaaagtcttcaacact

SEQ ID NO: 283283 - DNA, 20 bp, Artificial Sequence
  Description of Artificial Sequence: Synthetic oligonucleotide
  Target: LAMA2; (-) strand; PAM type: YTN; PAM sequence: TTG
atattagcttgaaagtcttc

SEQ ID NO: 283284 - DNA, 20 bp, Artificial Sequence
  Description of Artificial Sequence: Synthetic oligonucleotide
  Target: LAMA2; (-) strand; PAM type: YTN; PAM sequence: TTT
gatattagcttgaaagtctt

SEQ ID NO: 283285 - DNA, 20 bp, Artificial Sequence
  Description of Artificial Sequence: Synthetic oligonucleotide
  Target: LAMA2; (-) strand; PAM type: YTN; PAM sequence: TTT
tgatattagcttgaaagtct

SEQ ID NO: 283286 - DNA, 20 bp, Artificial Sequence
  Description of Artificial Sequence: Synthetic oligonucleotide
  Target: LAMA2; (-) strand; PAM type: YTN; PAM sequence: CTT
ttgatattagcttgaaagtc

SEQ ID NO: 283287 - DNA, 20 bp, Artificial Sequence
  Description of Artificial Sequence: Synthetic oligonucleotide
  Target: LAMA2; (-) strand; PAM type: YTN; PAM sequence: CTC
ttttgatattagcttgaaag

SEQ ID NO: 283288 - DNA, 20 bp, Artificial Sequence
  Description of Artificial Sequence: Synthetic oligonucleotide
  Target: LAMA2; (-) strand; PAM type: YTN; PAM sequence: CTG
ctcttttgatattagcttga

SEQ ID NO: 283289 - DNA, 20 bp, Artificial Sequence
  Description of Artificial Sequence: Synthetic oligonucleotide
  Target: LAMA2; (-) strand; PAM type: YTN; PAM sequence: TTG
agaataaagggctgctcttt

SEQ ID NO: 283290 - DNA, 20 bp, Artificial Sequence
  Description of Artificial Sequence: Synthetic oligonucleotide
  Target: LAMA2; (-) strand; PAM type: YTN; PAM sequence: TTT
gagaataaagggctgctctt

SEQ ID NO: 283291 - DNA, 20 bp, Artificial Sequence
  Description of Artificial Sequence: Synthetic oligonucleotide
  Target: LAMA2; (-) strand; PAM type: YTN; PAM sequence: CTT
tgagaataaagggctgctct

SEQ ID NO: 283292 - DNA, 20 bp, Artificial Sequence
  Description of Artificial Sequence: Synthetic oligonucleotide
  Target: LAMA2; (-) strand; PAM type: YTN; PAM sequence: TTC
tttgagaataaagggctgct

SEQ ID NO: 283293 - DNA, 20 bp, Artificial Sequence
  Description of Artificial Sequence: Synthetic oligonucleotide
  Target: LAMA2; (-) strand; PAM type: YTN; PAM sequence: CTA
tacaaattctttgagaataa

SEQ ID NO: 283294 - DNA, 20 bp, Artificial Sequence
  Description of Artificial Sequence: Synthetic oligonucleotide
  Target: LAMA2; (-) strand; PAM type: YTN; PAM sequence: CTG
tgatatctatacaaattctt

SEQ ID NO: 283295 - DNA, 20 bp, Artificial Sequence
  Description of Artificial Sequence: Synthetic oligonucleotide
  Target: LAMA2; (-) strand; PAM type: YTN; PAM sequence: TTA
tgactgtgatatctatacaa

SEQ ID NO: 283296 - DNA, 20 bp, Artificial Sequence
  Description of Artificial Sequence: Synthetic oligonucleotide
  Target: LAMA2; (-) strand; PAM type: YTN; PAM sequence: CTG
attatgactgtgatatctat

SEQ ID NO: 283297 - DNA, 20 bp, Artificial Sequence
  Description of Artificial Sequence: Synthetic oligonucleotide
  Target: LAMA2; (-) strand; PAM type: YTN; PAM sequence: CTG
aaataaagccagtctgatta

SEQ ID NO: 283298 - DNA, 20 bp, Artificial Sequence
  Description of Artificial Sequence: Synthetic oligonucleotide
  Target: LAMA2; (-) strand; PAM type: YTN; PAM sequence: CTC
tgaaataaagccagtctgat

SEQ ID NO: 283299 - DNA, 20 bp, Artificial Sequence
  Description of Artificial Sequence: Synthetic oligonucleotide
  Target: LAMA2; (-) strand; PAM type: YTN; PAM sequence: CTC
tctgaaataaagccagtctg

SEQ ID NO: 283300 - DNA, 20 bp, Artificial Sequence
  Description of Artificial Sequence: Synthetic oligonucleotide
  Target: LAMA2; (-) strand; PAM type: YTN; PAM sequence: CTA
ccaaaagcatactctctgaa

SEQ ID NO: 283301 - DNA, 20 bp, Artificial Sequence
  Description of Artificial Sequence: Synthetic oligonucleotide
  Target: LAMA2; (-) strand; PAM type: YTN; PAM sequence: TTG
gataggctaccaaaagcata

SEQ ID NO: 283302 - DNA, 20 bp, Artificial Sequence
  Description of Artificial Sequence: Synthetic oligonucleotide
  Target: LAMA2; (-) strand; PAM type: YTN; PAM sequence: TTT
ggataggctaccaaaagcat

SEQ ID NO: 283303 - DNA, 20 bp, Artificial Sequence
  Description of Artificial Sequence: Synthetic oligonucleotide
  Target: LAMA2; (-) strand; PAM type: YTN; PAM sequence: CTT
tggataggctaccaaaagca

SEQ ID NO: 283304 - DNA, 20 bp, Artificial Sequence
  Description of Artificial Sequence: Synthetic oligonucleotide
  Target: LAMA2; (-) strand; PAM type: YTN; PAM sequence: CTA
aaataaaatctttggatagg

SEQ ID NO: 283305 - DNA, 20 bp, Artificial Sequence
  Description of Artificial Sequence: Synthetic oligonucleotide
  Target: LAMA2; (-) strand; PAM type: YTN; PAM sequence: TTA
tactaaaataaaatctttgg

SEQ ID NO: 283306 - DNA, 20 bp, Artificial Sequence
  Description of Artificial Sequence: Synthetic oligonucleotide
  Target: LAMA2; (-) strand; PAM type: YTN; PAM sequence: TTT
atactaaaataaaatctttg

SEQ ID NO: 283307 - DNA, 20 bp, Artificial Sequence
  Description of Artificial Sequence: Synthetic oligonucleotide
  Target: LAMA2; (-) strand; PAM type: YTN; PAM sequence: CTG
tttatactaaaataaaatct

SEQ ID NO: 283308 - DNA, 20 bp, Artificial Sequence
  Description of Artificial Sequence: Synthetic oligonucleotide
  Target: LAMA2; (-) strand; PAM type: YTN; PAM sequence: TTA
ctgtttatactaaaataaaa

SEQ ID NO: 283309 - DNA, 20 bp, Artificial Sequence
  Description of Artificial Sequence: Synthetic oligonucleotide
  Target: LAMA2; (-) strand; PAM type: YTN; PAM sequence: TTT
actgtttatactaaaataaa

SEQ ID NO: 283310 - DNA, 20 bp, Artificial Sequence
  Description of Artificial Sequence: Synthetic oligonucleotide
  Target: LAMA2; (-) strand; PAM type: YTN; PAM sequence: TTT
tactgtttatactaaaataa

SEQ ID NO: 283311 - DNA, 20 bp, Artificial Sequence
  Description of Artificial Sequence: Synthetic oligonucleotide
  Target: LAMA2; (-) strand; PAM type: YTN; PAM sequence: TTT
ttactgtttatactaaaata

SEQ ID NO: 283312 - DNA, 20 bp, Artificial Sequence
  Description of Artificial Sequence: Synthetic oligonucleotide
  Target: LAMA2; (-) strand; PAM type: YTN; PAM sequence: TTA
tttttactgtttatactaaa

SEQ ID NO: 283313 - DNA, 20 bp, Artificial Sequence
  Description of Artificial Sequence: Synthetic oligonucleotide
  Target: LAMA2; (-) strand; PAM type: YTN; PAM sequence: CTG
ttatttttactgtttatact

SEQ ID NO: 283314 - DNA, 20 bp, Artificial Sequence
  Description of Artificial Sequence: Synthetic oligonucleotide
  Target: LAMA2; (-) strand; PAM type: YTN; PAM sequence: TTC
tgttatttttactgtttata

SEQ ID NO: 283315 - DNA, 20 bp, Artificial Sequence
  Description of Artificial Sequence: Synthetic oligonucleotide
  Target: LAMA2; (-) strand; PAM type: YTN; PAM sequence: CTT
ctgttatttttactgtttat

SEQ ID NO: 283316 - DNA, 20 bp, Artificial Sequence
  Description of Artificial Sequence: Synthetic oligonucleotide
  Target: LAMA2; (-) strand; PAM type: YTN; PAM sequence: TTA
taatacttctgttattttta

SEQ ID NO: 283317 - DNA, 20 bp, Artificial Sequence
  Description of Artificial Sequence: Synthetic oligonucleotide
  Target: LAMA2; (-) strand; PAM type: YTN; PAM sequence: CTT
ataatacttctgttattttt

SEQ ID NO: 283318 - DNA, 20 bp, Artificial Sequence
  Description of Artificial Sequence: Synthetic oligonucleotide
  Target: LAMA2; (-) strand; PAM type: YTN; PAM sequence: TTC
ttataatacttctgttattt

SEQ ID NO: 283319 - DNA, 20 bp, Artificial Sequence
  Description of Artificial Sequence: Synthetic oligonucleotide
  Target: LAMA2; (-) strand; PAM type: YTN; PAM sequence: TTT
cttataatacttctgttatt

SEQ ID NO: 283320 - DNA, 20 bp, Artificial Sequence
  Description of Artificial Sequence: Synthetic oligonucleotide
  Target: LAMA2; (-) strand; PAM type: YTN; PAM sequence: CTT
tcttataatacttctgttat

SEQ ID NO: 283321 - DNA, 20 bp, Artificial Sequence
  Description of Artificial Sequence: Synthetic oligonucleotide
  Target: LAMA2; (-) strand; PAM type: YTN; PAM sequence: TTC
atctttcttataatacttct

SEQ ID NO: 283322 - DNA, 20 bp, Artificial Sequence
  Description of Artificial Sequence: Synthetic oligonucleotide
  Target: LAMA2; (-) strand; PAM type: YTN; PAM sequence: CTG
tcaatcacaattcatctttc

SEQ ID NO: 283323 - DNA, 20 bp, Artificial Sequence
  Description of Artificial Sequence: Synthetic oligonucleotide
  Target: LAMA2; (-) strand; PAM type: YTN; PAM sequence: CTC
tgtcaatcacaattcatctt

SEQ ID NO: 283324 - DNA, 20 bp, Artificial Sequence
  Description of Artificial Sequence: Synthetic oligonucleotide
  Target: LAMA2; (-) strand; PAM type: YTN; PAM sequence: CTC
ctctgtcaatcacaattcat

SEQ ID NO: 283325 - DNA, 20 bp, Artificial Sequence
  Description of Artificial Sequence: Synthetic oligonucleotide
  Target: LAMA2; (-) strand; PAM type: YTN; PAM sequence: TTC
tcctctgtcaatcacaattc

SEQ ID NO: 283326 - DNA, 20 bp, Artificial Sequence
  Description of Artificial Sequence: Synthetic oligonucleotide
  Target: LAMA2; (-) strand; PAM type: YTN; PAM sequence: TTT
ctcctctgtcaatcacaatt

SEQ ID NO: 283327 - DNA, 20 bp, Artificial Sequence
  Description of Artificial Sequence: Synthetic oligonucleotide
  Target: LAMA2; (-) strand; PAM type: YTN; PAM sequence: TTT
tctcctctgtcaatcacaat

SEQ ID NO: 283328 - DNA, 20 bp, Artificial Sequence
  Description of Artificial Sequence: Synthetic oligonucleotide
  Target: LAMA2; (-) strand; PAM type: YTN; PAM sequence: TTG
gattttctcctctgtcaatc

SEQ ID NO: 283329 - DNA, 20 bp, Artificial Sequence
  Description of Artificial Sequence: Synthetic oligonucleotide
  Target: LAMA2; (-) strand; PAM type: YTN; PAM sequence: TTC
caagtaattggattttctcc

SEQ ID NO: 283330 - DNA, 20 bp, Artificial Sequence
  Description of Artificial Sequence: Synthetic oligonucleotide
  Target: LAMA2; (-) strand; PAM type: YTN; PAM sequence: TTT
ccaagtaattggattttctc

SEQ ID NO: 283331 - DNA, 20 bp, Artificial Sequence
  Description of Artificial Sequence: Synthetic oligonucleotide
  Target: LAMA2; (-) strand; PAM type: YTN; PAM sequence: CTT
tccaagtaattggattttct

SEQ ID NO: 283332 - DNA, 20 bp, Artificial Sequence
  Description of Artificial Sequence: Synthetic oligonucleotide
  Target: LAMA2; (-) strand; PAM type: YTN; PAM sequence: CTA
agcccacaaaatatactttc

SEQ ID NO: 283333 - DNA, 20 bp, Artificial Sequence
  Description of Artificial Sequence: Synthetic oligonucleotide
  Target: LAMA2; (-) strand; PAM type: YTN; PAM sequence: TTC
taagcccacaaaatatactt

SEQ ID NO: 283334 - DNA, 20 bp, Artificial Sequence
  Description of Artificial Sequence: Synthetic oligonucleotide
  Target: LAMA2; (-) strand; PAM type: YTN; PAM sequence: TTC
aattctaagcccacaaaata

SEQ ID NO: 283335 - DNA, 20 bp, Artificial Sequence
  Description of Artificial Sequence: Synthetic oligonucleotide
  Target: LAMA2; (-) strand; PAM type: YTN; PAM sequence: TTT
caattctaagcccacaaaat

SEQ ID NO: 283336 - DNA, 20 bp, Artificial Sequence
  Description of Artificial Sequence: Synthetic oligonucleotide
  Target: LAMA2; (-) strand; PAM type: YTN; PAM sequence: TTT
tcaattctaagcccacaaaa

SEQ ID NO: 283337 - DNA, 20 bp, Artificial Sequence
  Description of Artificial Sequence: Synthetic oligonucleotide
  Target: LAMA2; (-) strand; PAM type: YTN; PAM sequence: TTA
ttttcaattctaagcccaca

SEQ ID NO: 283338 - DNA, 20 bp, Artificial Sequence
  Description of Artificial Sequence: Synthetic oligonucleotide
  Target: LAMA2; (-) strand; PAM type: YTN; PAM sequence: TTA
ttattttcaattctaagccc

SEQ ID NO: 283339 - DNA, 20 bp, Artificial Sequence
  Description of Artificial Sequence: Synthetic oligonucleotide
  Target: LAMA2; (-) strand; PAM type: YTN; PAM sequence: CTA
atatattattattttcaatt

SEQ ID NO: 283340 - DNA, 20 bp, Artificial Sequence
  Description of Artificial Sequence: Synthetic oligonucleotide
  Target: LAMA2; (-) strand; PAM type: YTN; PAM sequence: TTC
agtcactaatatattattat

SEQ ID NO: 283341 - DNA, 20 bp, Artificial Sequence
  Description of Artificial Sequence: Synthetic oligonucleotide
  Target: LAMA2; (-) strand; PAM type: YTN; PAM sequence: CTA
gttcagtcactaatatatta

SEQ ID NO: 283342 - DNA, 20 bp, Artificial Sequence
  Description of Artificial Sequence: Synthetic oligonucleotide
  Target: LAMA2; (-) strand; PAM type: YTN; PAM sequence: CTA
aaacatcaatatgtctagtt

SEQ ID NO: 283343 - DNA, 20 bp, Artificial Sequence
  Description of Artificial Sequence: Synthetic oligonucleotide
  Target: LAMA2; (-) strand; PAM type: YTN; PAM sequence: CTC
taaaacatcaatatgtctag

SEQ ID NO: 283344 - DNA, 20 bp, Artificial Sequence
  Description of Artificial Sequence: Synthetic oligonucleotide
  Target: LAMA2; (-) strand; PAM type: YTN; PAM sequence: TTC
cagcaaagcacggctctaaa

SEQ ID NO: 283345 - DNA, 20 bp, Artificial Sequence
  Description of Artificial Sequence: Synthetic oligonucleotide
  Target: LAMA2; (-) strand; PAM type: YTN; PAM sequence: CTG
aaaaacaaagcataaaatat

SEQ ID NO: 283346 - DNA, 20 bp, Artificial Sequence
  Description of Artificial Sequence: Synthetic oligonucleotide
  Target: LAMA2; (-) strand; PAM type: YTN; PAM sequence: CTG
acatcactgaaaaacaaagc

SEQ ID NO: 283347 - DNA, 20 bp, Artificial Sequence
  Description of Artificial Sequence: Synthetic oligonucleotide
  Target: LAMA2; (-) strand; PAM type: YTN; PAM sequence: TTC
caagccaaagacctgacatc

SEQ ID NO: 283348 - DNA, 20 bp, Artificial Sequence
  Description of Artificial Sequence: Synthetic oligonucleotide
  Target: LAMA2; (-) strand; PAM type: YTN; PAM sequence: TTA
aattccaagccaaagacctg

SEQ ID NO: 283349 - DNA, 20 bp, Artificial Sequence
  Description of Artificial Sequence: Synthetic oligonucleotide
  Target: LAMA2; (-) strand; PAM type: YTN; PAM sequence: TTG
ttaaattccaagccaaagac

SEQ ID NO: 283350 - DNA, 20 bp, Artificial Sequence
  Description of Artificial Sequence: Synthetic oligonucleotide
  Target: LAMA2; (-) strand; PAM type: YTN; PAM sequence: CTG
ttgttaaattccaagccaaa

SEQ ID NO: 283351 - DNA, 20 bp, Artificial Sequence
  Description of Artificial Sequence: Synthetic oligonucleotide
  Target: LAMA2; (-) strand; PAM type: YTN; PAM sequence: TTA
aagtgtctgttgttaaattc

SEQ ID NO: 283352 - DNA, 20 bp, Artificial Sequence
  Description of Artificial Sequence: Synthetic oligonucleotide
  Target: LAMA2; (-) strand; PAM type: YTN; PAM sequence: TTT
aaagtgtctgttgttaaatt

SEQ ID NO: 283353 - DNA, 20 bp, Artificial Sequence
  Description of Artificial Sequence: Synthetic oligonucleotide
  Target: LAMA2; (-) strand; PAM type: YTN; PAM sequence: TTG
tttaaagtgtctgttgttaa

SEQ ID NO: 283354 - DNA, 20 bp, Artificial Sequence
  Description of Artificial Sequence: Synthetic oligonucleotide
  Target: LAMA2; (-) strand; PAM type: YTN; PAM sequence: CTA
atataagcacataacattgt

SEQ ID NO: 283355 - DNA, 20 bp, Artificial Sequence
  Description of Artificial Sequence: Synthetic oligonucleotide
  Target: LAMA2; (-) strand; PAM type: YTN; PAM sequence: TTA
tactaatataagcacataac

SEQ ID NO: 283356 - DNA, 20 bp, Artificial Sequence
  Description of Artificial Sequence: Synthetic oligonucleotide
  Target: LAMA2; (-) strand; PAM type: YTN; PAM sequence: CTA
cagattatactaatataagc

SEQ ID NO: 283357 - DNA, 20 bp, Artificial Sequence
  Description of Artificial Sequence: Synthetic oligonucleotide
  Target: LAMA2; (-) strand; PAM type: YTN; PAM sequence: TTA
tactacagattatactaata

SEQ ID NO: 283358 - DNA, 20 bp, Artificial Sequence
  Description of Artificial Sequence: Synthetic oligonucleotide
  Target: LAMA2; (-) strand; PAM type: YTN; PAM sequence: CTG
ttatactacagattatacta

SEQ ID NO: 283359 - DNA, 20 bp, Artificial Sequence
  Description of Artificial Sequence: Synthetic oligonucleotide
  Target: LAMA2; (-) strand; PAM type: YTN; PAM sequence: TTC
tgttatactacagattatac

SEQ ID NO: 283360 - DNA, 20 bp, Artificial Sequence
  Description of Artificial Sequence: Synthetic oligonucleotide
  Target: LAMA2; (-) strand; PAM type: YTN; PAM sequence: CTT
ctgttatactacagattata

SEQ ID NO: 283361 - DNA, 20 bp, Artificial Sequence
  Description of Artificial Sequence: Synthetic oligonucleotide
  Target: LAMA2; (-) strand; PAM type: YTN; PAM sequence: TTA
aacttctgttatactacaga

SEQ ID NO: 283362 - DNA, 20 bp, Artificial Sequence
  Description of Artificial Sequence: Synthetic oligonucleotide
  Target: LAMA2; (-) strand; PAM type: YTN; PAM sequence: CTT
aaacttctgttatactacag

SEQ ID NO: 283363 - DNA, 20 bp, Artificial Sequence
  Description of Artificial Sequence: Synthetic oligonucleotide
  Target: LAMA2; (-) strand; PAM type: YTN; PAM sequence: TTA
taggcagacaccttaaactt

SEQ ID NO: 283364 - DNA, 20 bp, Artificial Sequence
  Description of Artificial Sequence: Synthetic oligonucleotide
  Target: LAMA2; (-) strand; PAM type: YTN; PAM sequence: TTT
ataggcagacaccttaaact

SEQ ID NO: 283365 - DNA, 20 bp, Artificial Sequence
  Description of Artificial Sequence: Synthetic oligonucleotide
  Target: LAMA2; (-) strand; PAM type: YTN; PAM sequence: TTT
tataggcagacaccttaaac

SEQ ID NO: 283366 - DNA, 20 bp, Artificial Sequence
  Description of Artificial Sequence: Synthetic oligonucleotide
  Target: LAMA2; (-) strand; PAM type: YTN; PAM sequence: TTC
atataaagggttttataggc

SEQ ID NO: 283367 - DNA, 20 bp, Artificial Sequence
  Description of Artificial Sequence: Synthetic oligonucleotide
  Target: LAMA2; (-) strand; PAM type: YTN; PAM sequence: CTT
catataaagggttttatagg

SEQ ID NO: 283368 - DNA, 20 bp, Artificial Sequence
  Description of Artificial Sequence: Synthetic oligonucleotide
  Target: LAMA2; (-) strand; PAM type: YTN; PAM sequence: CTC
cacttcatataaagggtttt

SEQ ID NO: 283369 - DNA, 20 bp, Artificial Sequence
  Description of Artificial Sequence: Synthetic oligonucleotide
  Target: LAMA2; (-) strand; PAM type: YTN; PAM sequence: TTC
actccacttcatataaaggg

SEQ ID NO: 283370 - DNA, 20 bp, Artificial Sequence
  Description of Artificial Sequence: Synthetic oligonucleotide
  Target: LAMA2; (-) strand; PAM type: YTN; PAM sequence: TTA
atgattcactccacttcata

SEQ ID NO: 283371 - DNA, 20 bp, Artificial Sequence
  Description of Artificial Sequence: Synthetic oligonucleotide
  Target: LAMA2; (-) strand; PAM type: YTN; PAM sequence: TTA
attaatgattcactccactt

SEQ ID NO: 283372 - DNA, 20 bp, Artificial Sequence
  Description of Artificial Sequence: Synthetic oligonucleotide
  Target: LAMA2; (-) strand; PAM type: YTN; PAM sequence: CTG
gatgtgaagaagagtacggg

SEQ ID NO: 283373 - DNA, 20 bp, Artificial Sequence
  Description of Artificial Sequence: Synthetic oligonucleotide
  Target: LAMA2; (-) strand; PAM type: YTN; PAM sequence: CTA
tcggtgtctggatgtgaaga

SEQ ID NO: 283374 - DNA, 20 bp, Artificial Sequence
  Description of Artificial Sequence: Synthetic oligonucleotide
  Target: LAMA2; (-) strand; PAM type: YTN; PAM sequence: CTG
aactatcggtgtctggatgt

SEQ ID NO: 283375 - DNA, 20 bp, Artificial Sequence
  Description of Artificial Sequence: Synthetic oligonucleotide
  Target: LAMA2; (-) strand; PAM type: YTN; PAM sequence: TTC
tgaactatcggtgtctggat

SEQ ID NO: 283376 - DNA, 20 bp, Artificial Sequence
  Description of Artificial Sequence: Synthetic oligonucleotide
  Target: LAMA2; (-) strand; PAM type: YTN; PAM sequence: CTG
tgaagaatagcaaagggaaa

SEQ ID NO: 283377 - DNA, 20 bp, Artificial Sequence
  Description of Artificial Sequence: Synthetic oligonucleotide
  Target: LAMA2; (-) strand; PAM type: YTN; PAM sequence: CTG
catctgtgaagaatagcaaa

SEQ ID NO: 283378 - DNA, 20 bp, Artificial Sequence
  Description of Artificial Sequence: Synthetic oligonucleotide
  Target: LAMA2; (-) strand; PAM type: YTN; PAM sequence: TTG
gcctgcatctgtgaagaata

SEQ ID NO: 283379 - DNA, 20 bp, Artificial Sequence
  Description of Artificial Sequence: Synthetic oligonucleotide
  Target: LAMA2; (-) strand; PAM type: YTN; PAM sequence: TTG
ttggcctgcatctgtgaaga

SEQ ID NO: 283380 - DNA, 20 bp, Artificial Sequence
  Description of Artificial Sequence: Synthetic oligonucleotide
  Target: LAMA2; (-) strand; PAM type: YTN; PAM sequence: TTT
gttggcctgcatctgtgaag

SEQ ID NO: 283381 - DNA, 20 bp, Artificial Sequence
  Description of Artificial Sequence: Synthetic oligonucleotide
  Target: LAMA2; (-) strand; PAM type: YTN; PAM sequence: CTT
tgttggcctgcatctgtgaa

SEQ ID NO: 283382 - DNA, 20 bp, Artificial Sequence
  Description of Artificial Sequence: Synthetic oligonucleotide
  Target: LAMA2; (-) strand; PAM type: YTN; PAM sequence: CTC
atctttgttggcctgcatct

SEQ ID NO: 283383 - DNA, 20 bp, Artificial Sequence
  Description of Artificial Sequence: Synthetic oligonucleotide
  Target: LAMA2; (-) strand; PAM type: YTN; PAM sequence: CTA
tcctcatctttgttggcctg

SEQ ID NO: 283384 - DNA, 20 bp, Artificial Sequence
  Description of Artificial Sequence: Synthetic oligonucleotide
  Target: LAMA2; (-) strand; PAM type: YTN; PAM sequence: CTG
gagaactatcctcatctttg

SEQ ID NO: 283385 - DNA, 20 bp, Artificial Sequence
  Description of Artificial Sequence: Synthetic oligonucleotide
  Target: LAMA2; (-) strand; PAM type: YTN; PAM sequence: CTG
tgcaggccatgggcagctgg

SEQ ID NO: 283386 - DNA, 20 bp, Artificial Sequence
  Description of Artificial Sequence: Synthetic oligonucleotide
  Target: LAMA2; (-) strand; PAM type: YTN; PAM sequence: TTA
gaggaactgtgcaggccatg

SEQ ID NO: 283387 - DNA, 20 bp, Artificial Sequence
  Description of Artificial Sequence: Synthetic oligonucleotide
  Target: LAMA2; (-) strand; PAM type: YTN; PAM sequence: CTC
attagaggaactgtgcaggc

SEQ ID NO: 283388 - DNA, 20 bp, Artificial Sequence
  Description of Artificial Sequence: Synthetic oligonucleotide
  Target: LAMA2; (-) strand; PAM type: YTN; PAM sequence: TTG
tgcatgtggctcattagagg

SEQ ID NO: 283389 - DNA, 20 bp, Artificial Sequence
  Description of Artificial Sequence: Synthetic oligonucleotide
  Target: LAMA2; (-) strand; PAM type: YTN; PAM sequence: CTC
agaggttgtgcatgtggctc

SEQ ID NO: 283390 - DNA, 20 bp, Artificial Sequence
  Description of Artificial Sequence: Synthetic oligonucleotide
  Target: LAMA2; (-) strand; PAM type: YTN; PAM sequence: CTC
tcagaggttgtgcatgtggc

SEQ ID NO: 283391 - DNA, 20 bp, Artificial Sequence
  Description of Artificial Sequence: Synthetic oligonucleotide
  Target: LAMA2; (-) strand; PAM type: YTN; PAM sequence: CTG
tgtgcacacccctctcagag

SEQ ID NO: 283392 - DNA, 20 bp, Artificial Sequence
  Description of Artificial Sequence: Synthetic oligonucleotide
  Target: LAMA2; (-) strand; PAM type: YTN; PAM sequence: TTG
actgtgtgcacacccctctc

SEQ ID NO: 283393 - DNA, 20 bp, Artificial Sequence
  Description of Artificial Sequence: Synthetic oligonucleotide
  Target: LAMA2; (-) strand; PAM type: YTN; PAM sequence: TTT
gactgtgtgcacacccctct

SEQ ID NO: 283394 - DNA, 20 bp, Artificial Sequence
  Description of Artificial Sequence: Synthetic oligonucleotide
  Target: LAMA2; (-) strand; PAM type: YTN; PAM sequence: TTG
atttgactgtgtgcacaccc

SEQ ID NO: 283395 - DNA, 20 bp, Artificial Sequence
  Description of Artificial Sequence: Synthetic oligonucleotide
  Target: LAMA2; (-) strand; PAM type: YTN; PAM sequence: CTT
gatttgactgtgtgcacacc

SEQ ID NO: 283396 - DNA, 20 bp, Artificial Sequence
  Description of Artificial Sequence: Synthetic oligonucleotide
  Target: LAMA2; (-) strand; PAM type: YTN; PAM sequence: CTA
cagcagtcttgatttgactg

SEQ ID NO: 283397 - DNA, 20 bp, Artificial Sequence
  Description of Artificial Sequence: Synthetic oligonucleotide
  Target: LAMA2; (-) strand; PAM type: YTN; PAM sequence: CTG
gtacccagagaaggcaggtg

SEQ ID NO: 283398 - DNA, 20 bp, Artificial Sequence
  Description of Artificial Sequence: Synthetic oligonucleotide
  Target: LAMA2; (-) strand; PAM type: YTN; PAM sequence: TTC
ctggtacccagagaaggcag

SEQ ID NO: 283399 - DNA, 20 bp, Artificial Sequence
  Description of Artificial Sequence: Synthetic oligonucleotide
  Target: LAMA2; (-) strand; PAM type: YTN; PAM sequence: TTT
cctggtacccagagaaggca

SEQ ID NO: 283400 - DNA, 20 bp, Artificial Sequence
  Description of Artificial Sequence: Synthetic oligonucleotide
  Target: LAMA2; (-) strand; PAM type: YTN; PAM sequence: CTT
tcctggtacccagagaaggc

SEQ ID NO: 283401 - DNA, 20 bp, Artificial Sequence
  Description of Artificial Sequence: Synthetic oligonucleotide
  Target: LAMA2; (-) strand; PAM type: YTN; PAM sequence: TTC
atcactttcctggtacccag

SEQ ID NO: 283402 - DNA, 20 bp, Artificial Sequence
  Description of Artificial Sequence: Synthetic oligonucleotide
  Target: LAMA2; (-) strand; PAM type: YTN; PAM sequence: TTT
catcactttcctggtaccca

SEQ ID NO: 283403 - DNA, 20 bp, Artificial Sequence
  Description of Artificial Sequence: Synthetic oligonucleotide
  Target: LAMA2; (-) strand; PAM type: YTN; PAM sequence: TTT
tcatcactttcctggtaccc

SEQ ID NO: 283404 - DNA, 20 bp, Artificial Sequence
  Description of Artificial Sequence: Synthetic oligonucleotide
  Target: LAMA2; (-) strand; PAM type: YTN; PAM sequence: CTG
attttcatcactttcctggt

SEQ ID NO: 283405 - DNA, 20 bp, Artificial Sequence
  Description of Artificial Sequence: Synthetic oligonucleotide
  Target: LAMA2; (-) strand; PAM type: YTN; PAM sequence: TTG
tcaacaccaagactgatttt

SEQ ID NO: 283406 - DNA, 20 bp, Artificial Sequence
  Description of Artificial Sequence: Synthetic oligonucleotide
  Target: LAMA2; (-) strand; PAM type: YTN; PAM sequence: TTT
gtcaacaccaagactgattt

SEQ ID NO: 283407 - DNA, 20 bp, Artificial Sequence
  Description of Artificial Sequence: Synthetic oligonucleotide
  Target: LAMA2; (-) strand; PAM type: YTN; PAM sequence: TTA
tttgtcaacaccaagactga

SEQ ID NO: 283408 - DNA, 20 bp, Artificial Sequence
  Description of Artificial Sequence: Synthetic oligonucleotide
  Target: LAMA2; (-) strand; PAM type: YTN; PAM sequence: TTC
atgttatttgtcaacaccaa

SEQ ID NO: 283409 - DNA, 20 bp, Artificial Sequence
  Description of Artificial Sequence: Synthetic oligonucleotide
  Target: LAMA2; (-) strand; PAM type: YTN; PAM sequence: CTT
catgttatttgtcaacacca

SEQ ID NO: 283410 - DNA, 20 bp, Artificial Sequence
  Description of Artificial Sequence: Synthetic oligonucleotide
  Target: LAMA2; (-) strand; PAM type: YTN; PAM sequence: CTA
tcttcatgttatttgtcaac

SEQ ID NO: 283411 - DNA, 20 bp, Artificial Sequence
  Description of Artificial Sequence: Synthetic oligonucleotide
  Target: LAMA2; (-) strand; PAM type: YTN; PAM sequence: TTG
ctatcttcatgttatttgtc

SEQ ID NO: 283412 - DNA, 20 bp, Artificial Sequence
  Description of Artificial Sequence: Synthetic oligonucleotide
  Target: LAMA2; (-) strand; PAM type: YTN; PAM sequence: TTT
gctatcttcatgttatttgt

SEQ ID NO: 283413 - DNA, 20 bp, Artificial Sequence
  Description of Artificial Sequence: Synthetic oligonucleotide
  Target: LAMA2; (-) strand; PAM type: YTN; PAM sequence: TTA
tttgctatcttcatgttatt

SEQ ID NO: 283414 - DNA, 20 bp, Artificial Sequence
  Description of Artificial Sequence: Synthetic oligonucleotide
  Target: LAMA2; (-) strand; PAM type: YTN; PAM sequence: CTG
gggaagaatgttatttgcta

SEQ ID NO: 283415 - DNA, 20 bp, Artificial Sequence
  Description of Artificial Sequence: Synthetic oligonucleotide
  Target: LAMA2; (-) strand; PAM type: YTN; PAM sequence: CTA
actggggaagaatgttattt

SEQ ID NO: 283416 - DNA, 20 bp, Artificial Sequence
  Description of Artificial Sequence: Synthetic oligonucleotide
  Target: LAMA2; (-) strand; PAM type: YTN; PAM sequence: TTA
aaccacctaactggggaaga

SEQ ID NO: 283417 - DNA, 20 bp, Artificial Sequence
  Description of Artificial Sequence: Synthetic oligonucleotide
  Target: LAMA2; (-) strand; PAM type: YTN; PAM sequence: CTT
aaaccacctaactggggaag

SEQ ID NO: 283418 - DNA, 20 bp, Artificial Sequence
  Description of Artificial Sequence: Synthetic oligonucleotide
  Target: LAMA2; (-) strand; PAM type: YTN; PAM sequence: TTA
aaaaacttaaaccacctaac

SEQ ID NO: 283419 - DNA, 20 bp, Artificial Sequence
  Description of Artificial Sequence: Synthetic oligonucleotide
  Target: LAMA2; (-) strand; PAM type: YTN; PAM sequence: TTT
aaaaaacttaaaccacctaa

SEQ ID NO: 283420 - DNA, 20 bp, Artificial Sequence
  Description of Artificial Sequence: Synthetic oligonucleotide
  Target: LAMA2; (-) strand; PAM type: YTN; PAM sequence: TTT
taaaaaacttaaaccaccta

SEQ ID NO: 283421 - DNA, 20 bp, Artificial Sequence
  Description of Artificial Sequence: Synthetic oligonucleotide
  Target: LAMA2; (-) strand; PAM type: YTN; PAM sequence: TTC
aatgttttaaaaaacttaaa

SEQ ID NO: 283422 - DNA, 20 bp, Artificial Sequence
  Description of Artificial Sequence: Synthetic oligonucleotide
  Target: LAMA2; (-) strand; PAM type: YTN; PAM sequence: TTT
caatgttttaaaaaacttaa

SEQ ID NO: 283423 - DNA, 20 bp, Artificial Sequence
  Description of Artificial Sequence: Synthetic oligonucleotide
  Target: LAMA2; (-) strand; PAM type: YTN; PAM sequence: TTT
tcaatgttttaaaaaactta

SEQ ID NO: 283424 - DNA, 20 bp, Artificial Sequence
  Description of Artificial Sequence: Synthetic oligonucleotide
  Target: LAMA2; (-) strand; PAM type: YTN; PAM sequence: TTT
ttcaatgttttaaaaaactt

SEQ ID NO: 283425 - DNA, 20 bp, Artificial Sequence
  Description of Artificial Sequence: Synthetic oligonucleotide
  Target: LAMA2; (-) strand; PAM type: YTN; PAM sequence: CTG
tttttcaatgttttaaaaaa

SEQ ID NO: 283426 - DNA, 20 bp, Artificial Sequence
  Description of Artificial Sequence: Synthetic oligonucleotide
  Target: LAMA2; (-) strand; PAM type: YTN; PAM sequence: TTC
tgtttttcaatgttttaaaa

SEQ ID NO: 283427 - DNA, 20 bp, Artificial Sequence
  Description of Artificial Sequence: Synthetic oligonucleotide
  Target: LAMA2; (-) strand; PAM type: YTN; PAM sequence: TTT
ctgtttttcaatgttttaaa

SEQ ID NO: 283428 - DNA, 20 bp, Artificial Sequence
  Description of Artificial Sequence: Synthetic oligonucleotide
  Target: LAMA2; (-) strand; PAM type: YTN; PAM sequence: CTG
tgtgcatatatttctgtttt

SEQ ID NO: 283429 - DNA, 20 bp, Artificial Sequence
  Description of Artificial Sequence: Synthetic oligonucleotide
  Target: LAMA2; (-) strand; PAM type: YTN; PAM sequence: TTC
tgtgtgcatatatttctgtt

SEQ ID NO: 283430 - DNA, 20 bp, Artificial Sequence
  Description of Artificial Sequence: Synthetic oligonucleotide
  Target: LAMA2; (-) strand; PAM type: YTN; PAM sequence: TTT
ctgtgtgcatatatttctgt

SEQ ID NO: 283431 - DNA, 20 bp, Artificial Sequence
  Description of Artificial Sequence: Synthetic oligonucleotide
  Target: LAMA2; (-) strand; PAM type: YTN; PAM sequence: CTT
tctgtgtgcatatatttctg

SEQ ID NO: 283432 - DNA, 20 bp, Artificial Sequence
  Description of Artificial Sequence: Synthetic oligonucleotide
  Target: LAMA2; (-) strand; PAM type: YTN; PAM sequence: TTG
ctttctgtgtgcatatattt

SEQ ID NO: 283433 - DNA, 20 bp, Artificial Sequence
  Description of Artificial Sequence: Synthetic oligonucleotide
  Target: LAMA2; (-) strand; PAM type: YTN; PAM sequence: CTA
aattgctttctgtgtgcata

SEQ ID NO: 283434 - DNA, 20 bp, Artificial Sequence
  Description of Artificial Sequence: Synthetic oligonucleotide
  Target: LAMA2; (-) strand; PAM type: YTN; PAM sequence: CTG
gctaaattgctttctgtgtg

SEQ ID NO: 283435 - DNA, 20 bp, Artificial Sequence
  Description of Artificial Sequence: Synthetic oligonucleotide
  Target: LAMA2; (-) strand; PAM type: YTN; PAM sequence: TTG
tgctggctaaattgctttct

SEQ ID NO: 283436 - DNA, 20 bp, Artificial Sequence
  Description of Artificial Sequence: Synthetic oligonucleotide
  Target: LAMA2; (-) strand; PAM type: YTN; PAM sequence: TTA
tacccggttgtgctggctaa

SEQ ID NO: 283437 - DNA, 20 bp, Artificial Sequence
  Description of Artificial Sequence: Synthetic oligonucleotide
  Target: LAMA2; (-) strand; PAM type: YTN; PAM sequence: TTT
atacccggttgtgctggcta

SEQ ID NO: 283438 - DNA, 20 bp, Artificial Sequence
  Description of Artificial Sequence: Synthetic oligonucleotide
  Target: LAMA2; (-) strand; PAM type: YTN; PAM sequence: TTT
tatacccggttgtgctggct

SEQ ID NO: 283439 - DNA, 20 bp, Artificial Sequence
  Description of Artificial Sequence: Synthetic oligonucleotide
  Target: LAMA2; (-) strand; PAM type: YTN; PAM sequence: CTC
attttatacccggttgtgct

SEQ ID NO: 283440 - DNA, 20 bp, Artificial Sequence
  Description of Artificial Sequence: Synthetic oligonucleotide
  Target: LAMA2; (-) strand; PAM type: YTN; PAM sequence: TTC
tcattttatacccggttgtg

SEQ ID NO: 283441 - DNA, 20 bp, Artificial Sequence
  Description of Artificial Sequence: Synthetic oligonucleotide
  Target: LAMA2; (-) strand; PAM type: YTN; PAM sequence: CTT
ctcattttatacccggttgt

SEQ ID NO: 283442 - DNA, 20 bp, Artificial Sequence
  Description of Artificial Sequence: Synthetic oligonucleotide
  Target: LAMA2; (-) strand; PAM type: YTN; PAM sequence: CTA
aaacttctcattttataccc

SEQ ID NO: 283443 - DNA, 20 bp, Artificial Sequence
  Description of Artificial Sequence: Synthetic oligonucleotide
  Target: LAMA2; (-) strand; PAM type: YTN; PAM sequence: TTA
atagtgccgtgagggacaat

SEQ ID NO: 283444 - DNA, 20 bp, Artificial Sequence
  Description of Artificial Sequence: Synthetic oligonucleotide
  Target: LAMA2; (-) strand; PAM type: YTN; PAM sequence: CTG
ggaatgaatgaggcagttaa

SEQ ID NO: 283445 - DNA, 20 bp, Artificial Sequence
  Description of Artificial Sequence: Synthetic oligonucleotide
  Target: LAMA2; (-) strand; PAM type: YTN; PAM sequence: TTA
atagtgggtagaaactggga

SEQ ID NO: 283446 - DNA, 20 bp, Artificial Sequence
  Description of Artificial Sequence: Synthetic oligonucleotide
  Target: LAMA2; (-) strand; PAM type: YTN; PAM sequence: TTA
cagtaattaatagtgggtag

SEQ ID NO: 283447 - DNA, 20 bp, Artificial Sequence
  Description of Artificial Sequence: Synthetic oligonucleotide
  Target: LAMA2; (-) strand; PAM type: YTN; PAM sequence: TTT
acagtaattaatagtgggta

SEQ ID NO: 283448 - DNA, 20 bp, Artificial Sequence
  Description of Artificial Sequence: Synthetic oligonucleotide
  Target: LAMA2; (-) strand; PAM type: YTN; PAM sequence: CTT
tacagtaattaatagtgggt

SEQ ID NO: 283449 - DNA, 20 bp, Artificial Sequence
  Description of Artificial Sequence: Synthetic oligonucleotide
  Target: LAMA2; (-) strand; PAM type: YTN; PAM sequence: CTG
ggtagagaagaacatgccaa

SEQ ID NO: 283450 - DNA, 20 bp, Artificial Sequence
  Description of Artificial Sequence: Synthetic oligonucleotide
  Target: LAMA2; (-) strand; PAM type: YTN; PAM sequence: CTG
gtgggagctgggtagagaag

SEQ ID NO: 283451 - DNA, 20 bp, Artificial Sequence
  Description of Artificial Sequence: Synthetic oligonucleotide
  Target: LAMA2; (-) strand; PAM type: YTN; PAM sequence: TTG
gcatggtaggggctggtggg

SEQ ID NO: 283452 - DNA, 20 bp, Artificial Sequence
  Description of Artificial Sequence: Synthetic oligonucleotide
  Target: LAMA2; (-) strand; PAM type: YTN; PAM sequence: TTT
ggcatggtaggggctggtgg

SEQ ID NO: 283453 - DNA, 20 bp, Artificial Sequence
  Description of Artificial Sequence: Synthetic oligonucleotide
  Target: LAMA2; (-) strand; PAM type: YTN; PAM sequence: CTG
acacatatacaagcatttgg

SEQ ID NO: 283454 - DNA, 20 bp, Artificial Sequence
  Description of Artificial Sequence: Synthetic oligonucleotide
  Target: LAMA2; (-) strand; PAM type: YTN; PAM sequence: TTC
catgaaaataagcaagatgc

SEQ ID NO: 283455 - DNA, 20 bp, Artificial Sequence
  Description of Artificial Sequence: Synthetic oligonucleotide
  Target: LAMA2; (-) strand; PAM type: YTN; PAM sequence: TTT
ccatgaaaataagcaagatg

SEQ ID NO: 283456 - DNA, 20 bp, Artificial Sequence
  Description of Artificial Sequence: Synthetic oligonucleotide
  Target: LAMA2; (-) strand; PAM type: YTN; PAM sequence: CTT
tccatgaaaataagcaagat

SEQ ID NO: 283457 - DNA, 20 bp, Artificial Sequence
  Description of Artificial Sequence: Synthetic oligonucleotide
  Target: LAMA2; (-) strand; PAM type: YTN; PAM sequence: TTA
agacctttccatgaaaataa

SEQ ID NO: 283458 - DNA, 20 bp, Artificial Sequence
  Description of Artificial Sequence: Synthetic oligonucleotide
  Target: LAMA2; (-) strand; PAM type: YTN; PAM sequence: CTT
aagacctttccatgaaaata

SEQ ID NO: 283459 - DNA, 20 bp, Artificial Sequence
  Description of Artificial Sequence: Synthetic oligonucleotide
  Target: LAMA2; (-) strand; PAM type: YTN; PAM sequence: CTA
taaaaagaagtagatgagcg

SEQ ID NO: 283460 - DNA, 20 bp, Artificial Sequence
  Description of Artificial Sequence: Synthetic oligonucleotide
  Target: LAMA2; (-) strand; PAM type: YTN; PAM sequence: TTC
atacaatggtacaggtgcaa

SEQ ID NO: 283461 - DNA, 20 bp, Artificial Sequence
  Description of Artificial Sequence: Synthetic oligonucleotide
  Target: LAMA2; (-) strand; PAM type: YTN; PAM sequence: TTA
tatccacacagcatgttcat

SEQ ID NO: 283462 - DNA, 20 bp, Artificial Sequence
  Description of Artificial Sequence: Synthetic oligonucleotide
  Target: LAMA2; (-) strand; PAM type: YTN; PAM sequence: TTT
atatccacacagcatgttca

SEQ ID NO: 283463 - DNA, 20 bp, Artificial Sequence
  Description of Artificial Sequence: Synthetic oligonucleotide
  Target: LAMA2; (-) strand; PAM type: YTN; PAM sequence: CTG
tttatatccacacagcatgt

SEQ ID NO: 283464 - DNA, 20 bp, Artificial Sequence
  Description of Artificial Sequence: Synthetic oligonucleotide
  Target: LAMA2; (-) strand; PAM type: YTN; PAM sequence: TTA
aagtgctgtttatatccaca

SEQ ID NO: 283465 - DNA, 20 bp, Artificial Sequence
  Description of Artificial Sequence: Synthetic oligonucleotide
  Target: LAMA2; (-) strand; PAM type: YTN; PAM sequence: CTA
ataagattaaagtgctgttt

SEQ ID NO: 283466 - DNA, 20 bp, Artificial Sequence
  Description of Artificial Sequence: Synthetic oligonucleotide
  Target: LAMA2; (-) strand; PAM type: YTN; PAM sequence: TTG
taataaaaaaaaggaggggg

SEQ ID NO: 283467 - DNA, 20 bp, Artificial Sequence
  Description of Artificial Sequence: Synthetic oligonucleotide
  Target: LAMA2; (-) strand; PAM type: YTN; PAM sequence: TTT
gtaataaaaaaaaggagggg

SEQ ID NO: 283468 - DNA, 20 bp, Artificial Sequence
  Description of Artificial Sequence: Synthetic oligonucleotide
  Target: LAMA2; (-) strand; PAM type: YTN; PAM sequence: TTC
atttgtaataaaaaaaagga

SEQ ID NO: 283469 - DNA, 20 bp, Artificial Sequence
  Description of Artificial Sequence: Synthetic oligonucleotide
  Target: LAMA2; (-) strand; PAM type: YTN; PAM sequence: CTT
catttgtaataaaaaaaagg

SEQ ID NO: 283470 - DNA, 20 bp, Artificial Sequence
  Description of Artificial Sequence: Synthetic oligonucleotide
  Target: LAMA2; (-) strand; PAM type: YTN; PAM sequence: CTC
ttcatttgtaataaaaaaaa

SEQ ID NO: 283471 - DNA, 20 bp, Artificial Sequence
  Description of Artificial Sequence: Synthetic oligonucleotide
  Target: LAMA2; (-) strand; PAM type: YTN; PAM sequence: TTA
gctcttcatttgtaataaaa

SEQ ID NO: 283472 - DNA, 20 bp, Artificial Sequence
  Description of Artificial Sequence: Synthetic oligonucleotide
  Target: LAMA2; (-) strand; PAM type: YTN; PAM sequence: CTC
attagctcttcatttgtaat

SEQ ID NO: 283473 - DNA, 20 bp, Artificial Sequence
  Description of Artificial Sequence: Synthetic oligonucleotide
  Target: LAMA2; (-) strand; PAM type: YTN; PAM sequence: TTG
gggatactcattagctcttc

SEQ ID NO: 283474 - DNA, 20 bp, Artificial Sequence
  Description of Artificial Sequence: Synthetic oligonucleotide
  Target: LAMA2; (-) strand; PAM type: YTN; PAM sequence: TTT
ggggatactcattagctctt

SEQ ID NO: 283475 - DNA, 20 bp, Artificial Sequence
  Description of Artificial Sequence: Synthetic oligonucleotide
  Target: LAMA2; (-) strand; PAM type: YTN; PAM sequence: CTT
tggggatactcattagctct

SEQ ID NO: 283476 - DNA, 20 bp, Artificial Sequence
  Description of Artificial Sequence: Synthetic oligonucleotide
  Target: LAMA2; (-) strand; PAM type: YTN; PAM sequence: TTA
tctttggggatactcattag

SEQ ID NO: 283477 - DNA, 20 bp, Artificial Sequence
  Description of Artificial Sequence: Synthetic oligonucleotide
  Target: LAMA2; (-) strand; PAM type: YTN; PAM sequence: TTT
atctttggggatactcatta

SEQ ID NO: 283478 - DNA, 20 bp, Artificial Sequence
  Description of Artificial Sequence: Synthetic oligonucleotide
  Target: LAMA2; (-) strand; PAM type: YTN; PAM sequence: CTG
taaaagatttatctttgggg

SEQ ID NO: 283479 - DNA, 20 bp, Artificial Sequence
  Description of Artificial Sequence: Synthetic oligonucleotide
  Target: LAMA2; (-) strand; PAM type: YTN; PAM sequence: TTC
aatatacctgtaaaagattt

SEQ ID NO: 283480 - DNA, 20 bp, Artificial Sequence
  Description of Artificial Sequence: Synthetic oligonucleotide
  Target: LAMA2; (-) strand; PAM type: YTN; PAM sequence: CTT
caatatacctgtaaaagatt

SEQ ID NO: 283481 - DNA, 20 bp, Artificial Sequence
  Description of Artificial Sequence: Synthetic oligonucleotide
  Target: LAMA2; (-) strand; PAM type: YTN; PAM sequence: TTA
cccttcaatatacctgtaaa

SEQ ID NO: 283482 - DNA, 20 bp, Artificial Sequence
  Description of Artificial Sequence: Synthetic oligonucleotide
  Target: LAMA2; (-) strand; PAM type: YTN; PAM sequence: TTT
acccttcaatatacctgtaa

SEQ ID NO: 283483 - DNA, 20 bp, Artificial Sequence
  Description of Artificial Sequence: Synthetic oligonucleotide
  Target: LAMA2; (-) strand; PAM type: YTN; PAM sequence: CTG
atagaaatttacccttcaat

SEQ ID NO: 283484 - DNA, 20 bp, Artificial Sequence
  Description of Artificial Sequence: Synthetic oligonucleotide
  Target: LAMA2; (-) strand; PAM type: YTN; PAM sequence: CTA
ctgatagaaatttacccttc

SEQ ID NO: 283485 - DNA, 20 bp, Artificial Sequence
  Description of Artificial Sequence: Synthetic oligonucleotide
  Target: LAMA2; (-) strand; PAM type: YTN; PAM sequence: TTC
tactgatagaaatttaccct

SEQ ID NO: 283486 - DNA, 20 bp, Artificial Sequence
  Description of Artificial Sequence: Synthetic oligonucleotide
  Target: LAMA2; (-) strand; PAM type: YTN; PAM sequence: TTG
gcaattctactgatagaaat

SEQ ID NO: 283487 - DNA, 20 bp, Artificial Sequence
  Description of Artificial Sequence: Synthetic oligonucleotide
  Target: LAMA2; (-) strand; PAM type: YTN; PAM sequence: TTT
ggcaattctactgatagaaa

SEQ ID NO: 283488 - DNA, 20 bp, Artificial Sequence
  Description of Artificial Sequence: Synthetic oligonucleotide
  Target: LAMA2; (-) strand; PAM type: YTN; PAM sequence: TTG
gtttggcaattctactgata

SEQ ID NO: 283489 - DNA, 20 bp, Artificial Sequence
  Description of Artificial Sequence: Synthetic oligonucleotide
  Target: LAMA2; (-) strand; PAM type: YTN; PAM sequence: TTT
ggtttggcaattctactgat

SEQ ID NO: 283490 - DNA, 20 bp, Artificial Sequence
  Description of Artificial Sequence: Synthetic oligonucleotide
  Target: LAMA2; (-) strand; PAM type: YTN; PAM sequence: TTA
aatagacatgtatttggttt

SEQ ID NO: 283491 - DNA, 20 bp, Artificial Sequence
  Description of Artificial Sequence: Synthetic oligonucleotide
  Target: LAMA2; (-) strand; PAM type: YTN; PAM sequence: TTT
aaatagacatgtatttggtt

SEQ ID NO: 283492 - DNA, 20 bp, Artificial Sequence
  Description of Artificial Sequence: Synthetic oligonucleotide
  Target: LAMA2; (-) strand; PAM type: YTN; PAM sequence: TTT
taaatagacatgtatttggt

SEQ ID NO: 283493 - DNA, 20 bp, Artificial Sequence
  Description of Artificial Sequence: Synthetic oligonucleotide
  Target: LAMA2; (-) strand; PAM type: YTN; PAM sequence: TTA
gaattttaaatagacatgta

SEQ ID NO: 283494 - DNA, 20 bp, Artificial Sequence
  Description of Artificial Sequence: Synthetic oligonucleotide
  Target: LAMA2; (-) strand; PAM type: YTN; PAM sequence: TTA
ttagaattttaaatagacat

SEQ ID NO: 283495 - DNA, 20 bp, Artificial Sequence
  Description of Artificial Sequence: Synthetic oligonucleotide
  Target: LAMA2; (-) strand; PAM type: YTN; PAM sequence: TTT
attagaattttaaatagaca

SEQ ID NO: 283496 - DNA, 20 bp, Artificial Sequence
  Description of Artificial Sequence: Synthetic oligonucleotide
  Target: LAMA2; (-) strand; PAM type: YTN; PAM sequence: TTA
ataagtttattagaatttta

SEQ ID NO: 283497 - DNA, 20 bp, Artificial Sequence
  Description of Artificial Sequence: Synthetic oligonucleotide
  Target: LAMA2; (-) strand; PAM type: YTN; PAM sequence: TTG
aagagcaagttaataagttt

SEQ ID NO: 283498 - DNA, 20 bp, Artificial Sequence
  Description of Artificial Sequence: Synthetic oligonucleotide
  Target: LAMA2; (-) strand; PAM type: YTN; PAM sequence: TTT
gaagagcaagttaataagtt

SEQ ID NO: 283499 - DNA, 20 bp, Artificial Sequence
  Description of Artificial Sequence: Synthetic oligonucleotide
  Target: LAMA2; (-) strand; PAM type: YTN; PAM sequence: TTG
tttgaagagcaagttaataa

SEQ ID NO: 283500 - DNA, 20 bp, Artificial Sequence
  Description of Artificial Sequence: Synthetic oligonucleotide
  Target: LAMA2; (-) strand; PAM type: YTN; PAM sequence: TTC
cattgtttgaagagcaagtt

SEQ ID NO: 283501 - DNA, 20 bp, Artificial Sequence
  Description of Artificial Sequence: Synthetic oligonucleotide
  Target: LAMA2; (-) strand; PAM type: YTN; PAM sequence: TTG
attccattgtttgaagagca

SEQ ID NO: 283502 - DNA, 20 bp, Artificial Sequence
  Description of Artificial Sequence: Synthetic oligonucleotide
  Target: LAMA2; (-) strand; PAM type: YTN; PAM sequence: CTA
gtggacgtgcagattgattc

SEQ ID NO: 283503 - DNA, 20 bp, Artificial Sequence
  Description of Artificial Sequence: Synthetic oligonucleotide
  Target: LAMA2; (-) strand; PAM type: YTN; PAM sequence: TTC
acaagagtgctagtggacgt

SEQ ID NO: 283504 - DNA, 20 bp, Artificial Sequence
  Description of Artificial Sequence: Synthetic oligonucleotide
  Target: LAMA2; (-) strand; PAM type: YTN; PAM sequence: TTA
aatgtatgataatgccaagt

SEQ ID NO: 283505 - DNA, 20 bp, Artificial Sequence
  Description of Artificial Sequence: Synthetic oligonucleotide
  Target: LAMA2; (-) strand; PAM type: YTN; PAM sequence: TTG
gggaaaattaaatgtatgat

SEQ ID NO: 283506 - DNA, 20 bp, Artificial Sequence
  Description of Artificial Sequence: Synthetic oligonucleotide
  Target: LAMA2; (-) strand; PAM type: YTN; PAM sequence: TTG
agattggggaaaattaaatg

SEQ ID NO: 283507 - DNA, 20 bp, Artificial Sequence
  Description of Artificial Sequence: Synthetic oligonucleotide
  Target: LAMA2; (-) strand; PAM type: YTN; PAM sequence: TTT
gagattggggaaaattaaat

SEQ ID NO: 283508 - DNA, 20 bp, Artificial Sequence
  Description of Artificial Sequence: Synthetic oligonucleotide
  Target: LAMA2; (-) strand; PAM type: YTN; PAM sequence: TTT
tgagattggggaaaattaaa

SEQ ID NO: 283509 - DNA, 20 bp, Artificial Sequence
  Description of Artificial Sequence: Synthetic oligonucleotide
  Target: LAMA2; (-) strand; PAM type: YTN; PAM sequence: TTT
ttgagattggggaaaattaa

SEQ ID NO: 283510 - DNA, 20 bp, Artificial Sequence
  Description of Artificial Sequence: Synthetic oligonucleotide
  Target: LAMA2; (-) strand; PAM type: YTN; PAM sequence: TTA
tttttgagattggggaaaat

SEQ ID NO: 283511 - DNA, 20 bp, Artificial Sequence
  Description of Artificial Sequence: Synthetic oligonucleotide
  Target: LAMA2; (-) strand; PAM type: YTN; PAM sequence: CTT
atttttgagattggggaaaa

SEQ ID NO: 283512 - DNA, 20 bp, Artificial Sequence
  Description of Artificial Sequence: Synthetic oligonucleotide
  Target: LAMA2; (-) strand; PAM type: YTN; PAM sequence: TTC
ttatttttgagattggggaa

SEQ ID NO: 283513 - DNA, 20 bp, Artificial Sequence
  Description of Artificial Sequence: Synthetic oligonucleotide
  Target: LAMA2; (-) strand; PAM type: YTN; PAM sequence: TTT
cttatttttgagattgggga

SEQ ID NO: 283514 - DNA, 20 bp, Artificial Sequence
  Description of Artificial Sequence: Synthetic oligonucleotide
  Target: LAMA2; (-) strand; PAM type: YTN; PAM sequence: CTA
agcaacagtaagatgtcatt

SEQ ID NO: 283515 - DNA, 20 bp, Artificial Sequence
  Description of Artificial Sequence: Synthetic oligonucleotide
  Target: LAMA2; (-) strand; PAM type: YTN; PAM sequence: CTG
taaaactaagcaacagtaag

SEQ ID NO: 283516 - DNA, 20 bp, Artificial Sequence
  Description of Artificial Sequence: Synthetic oligonucleotide
  Target: LAMA2; (-) strand; PAM type: YTN; PAM sequence: TTA
tcataaagaactgtaaaact

SEQ ID NO: 283517 - DNA, 20 bp, Artificial Sequence
  Description of Artificial Sequence: Synthetic oligonucleotide
  Target: LAMA2; (-) strand; PAM type: YTN; PAM sequence: CTC
aagattatcataaagaactg

SEQ ID NO: 283518 - DNA, 20 bp, Artificial Sequence
  Description of Artificial Sequence: Synthetic oligonucleotide
  Target: LAMA2; (-) strand; PAM type: YTN; PAM sequence: TTC
gtaaaaagcactcaagatta

SEQ ID NO: 283519 - DNA, 20 bp, Artificial Sequence
  Description of Artificial Sequence: Synthetic oligonucleotide
  Target: LAMA2; (-) strand; PAM type: YTN; PAM sequence: TTA
tgaaattcgtaaaaagcact

SEQ ID NO: 283520 - DNA, 20 bp, Artificial Sequence
  Description of Artificial Sequence: Synthetic oligonucleotide
  Target: LAMA2; (-) strand; PAM type: YTN; PAM sequence: TTT
atgaaattcgtaaaaagcac

SEQ ID NO: 283521 - DNA, 20 bp, Artificial Sequence
  Description of Artificial Sequence: Synthetic oligonucleotide
  Target: LAMA2; (-) strand; PAM type: YTN; PAM sequence: TTC
acaataaaataaacatacat

SEQ ID NO: 283522 - DNA, 20 bp, Artificial Sequence
  Description of Artificial Sequence: Synthetic oligonucleotide
  Target: LAMA2; (-) strand; PAM type: YTN; PAM sequence: TTA
aggataatgaggaaaatata

SEQ ID NO: 283523 - DNA, 20 bp, Artificial Sequence
  Description of Artificial Sequence: Synthetic oligonucleotide
  Target: LAMA2; (-) strand; PAM type: YTN; PAM sequence: TTT
aaggataatgaggaaaatat

SEQ ID NO: 283524 - DNA, 20 bp, Artificial Sequence
  Description of Artificial Sequence: Synthetic oligonucleotide
  Target: LAMA2; (-) strand; PAM type: YTN; PAM sequence: TTT
taaggataatgaggaaaata

SEQ ID NO: 283525 - DNA, 20 bp, Artificial Sequence
  Description of Artificial Sequence: Synthetic oligonucleotide
  Target: LAMA2; (-) strand; PAM type: YTN; PAM sequence: TTT
ttaaggataatgaggaaaat

SEQ ID NO: 283526 - DNA, 20 bp, Artificial Sequence
  Description of Artificial Sequence: Synthetic oligonucleotide
  Target: LAMA2; (-) strand; PAM type: YTN; PAM sequence: TTC
catatttttaaggataatga

SEQ ID NO: 283527 - DNA, 20 bp, Artificial Sequence
  Description of Artificial Sequence: Synthetic oligonucleotide
  Target: LAMA2; (-) strand; PAM type: YTN; PAM sequence: CTG
gcaggcaaatatgcaaagtg

SEQ ID NO: 283528 - DNA, 20 bp, Artificial Sequence
  Description of Artificial Sequence: Synthetic oligonucleotide
  Target: LAMA2; (-) strand; PAM type: YTN; PAM sequence: CTA
tgtgcaaaactggcaggcaa

SEQ ID NO: 283529 - DNA, 20 bp, Artificial Sequence
  Description of Artificial Sequence: Synthetic oligonucleotide
  Target: LAMA2; (-) strand; PAM type: YTN; PAM sequence: TTG
tctatgtgcaaaactggcag

SEQ ID NO: 283530 - DNA, 20 bp, Artificial Sequence
  Description of Artificial Sequence: Synthetic oligonucleotide
  Target: LAMA2; (-) strand; PAM type: YTN; PAM sequence: TTC
agagtagaatagcattgtct

SEQ ID NO: 283531 - DNA, 20 bp, Artificial Sequence
  Description of Artificial Sequence: Synthetic oligonucleotide
  Target: LAMA2; (-) strand; PAM type: YTN; PAM sequence: TTA
ttcagagtagaatagcattg

SEQ ID NO: 283532 - DNA, 20 bp, Artificial Sequence
  Description of Artificial Sequence: Synthetic oligonucleotide
  Target: LAMA2; (-) strand; PAM type: YTN; PAM sequence: TTG
taattattcagagtagaata

SEQ ID NO: 283533 - DNA, 20 bp, Artificial Sequence
  Description of Artificial Sequence: Synthetic oligonucleotide
  Target: LAMA2; (-) strand; PAM type: YTN; PAM sequence: CTA
agcaacatatataaccaagt

SEQ ID NO: 283534 - DNA, 20 bp, Artificial Sequence
  Description of Artificial Sequence: Synthetic oligonucleotide
  Target: LAMA2; (-) strand; PAM type: YTN; PAM sequence: CTC
acctaagcaacatatataac

SEQ ID NO: 283535 - DNA, 20 bp, Artificial Sequence
  Description of Artificial Sequence: Synthetic oligonucleotide
  Target: LAMA2; (-) strand; PAM type: YTN; PAM sequence: TTA
cagaaatcagagaagcctca

SEQ ID NO: 283536 - DNA, 20 bp, Artificial Sequence
  Description of Artificial Sequence: Synthetic oligonucleotide
  Target: LAMA2; (-) strand; PAM type: YTN; PAM sequence: TTG
gtcacagttacagaaatcag

SEQ ID NO: 283537 - DNA, 20 bp, Artificial Sequence
  Description of Artificial Sequence: Synthetic oligonucleotide
  Target: LAMA2; (-) strand; PAM type: YTN; PAM sequence: TTA
aagaaattggtcacagttac

SEQ ID NO: 283538 - DNA, 20 bp, Artificial Sequence
  Description of Artificial Sequence: Synthetic oligonucleotide
  Target: LAMA2; (-) strand; PAM type: YTN; PAM sequence: CTT
aaagaaattggtcacagtta

SEQ ID NO: 283539 - DNA, 20 bp, Artificial Sequence
  Description of Artificial Sequence: Synthetic oligonucleotide
  Target: LAMA2; (-) strand; PAM type: YTN; PAM sequence: TTG
tcttaaagaaattggtcaca

SEQ ID NO: 283540 - DNA, 20 bp, Artificial Sequence
  Description of Artificial Sequence: Synthetic oligonucleotide
  Target: LAMA2; (-) strand; PAM type: YTN; PAM sequence: TTG
ttgtcttaaagaaattggtc

SEQ ID NO: 283541 - DNA, 20 bp, Artificial Sequence
  Description of Artificial Sequence: Synthetic oligonucleotide
  Target: LAMA2; (-) strand; PAM type: YTN; PAM sequence: TTT
gttgtcttaaagaaattggt

SEQ ID NO: 283542 - DNA, 20 bp, Artificial Sequence
  Description of Artificial Sequence: Synthetic oligonucleotide
  Target: LAMA2; (-) strand; PAM type: YTN; PAM sequence: CTT
tgttgtcttaaagaaattgg

SEQ ID NO: 283543 - DNA, 20 bp, Artificial Sequence
  Description of Artificial Sequence: Synthetic oligonucleotide
  Target: LAMA2; (-) strand; PAM type: YTN; PAM sequence: CTC
ctttgttgtcttaaagaaat

SEQ ID NO: 283544 - DNA, 20 bp, Artificial Sequence
  Description of Artificial Sequence: Synthetic oligonucleotide
  Target: LAMA2; (-) strand; PAM type: YTN; PAM sequence: TTC
tcctttgttgtcttaaagaa

SEQ ID NO: 283545 - DNA, 20 bp, Artificial Sequence
  Description of Artificial Sequence: Synthetic oligonucleotide
  Target: LAMA2; (-) strand; PAM type: YTN; PAM sequence: TTT
ctcctttgttgtcttaaaga

SEQ ID NO: 283546 - DNA, 20 bp, Artificial Sequence
  Description of Artificial Sequence: Synthetic oligonucleotide
  Target: LAMA2; (-) strand; PAM type: YTN; PAM sequence: TTT
tctcctttgttgtcttaaag

SEQ ID NO: 283547 - DNA, 20 bp, Artificial Sequence
  Description of Artificial Sequence: Synthetic oligonucleotide
  Target: LAMA2; (-) strand; PAM type: YTN; PAM sequence: CTC
attttctcctttgttgtctt

SEQ ID NO: 283548 - DNA, 20 bp, Artificial Sequence
  Description of Artificial Sequence: Synthetic oligonucleotide
  Target: LAMA2; (-) strand; PAM type: YTN; PAM sequence: CTC
tcattttctcctttgttgtc

SEQ ID NO: 283549 - DNA, 20 bp, Artificial Sequence
  Description of Artificial Sequence: Synthetic oligonucleotide
  Target: LAMA2; (-) strand; PAM type: YTN; PAM sequence: TTC
ctctcattttctcctttgtt

SEQ ID NO: 283550 - DNA, 20 bp, Artificial Sequence
  Description of Artificial Sequence: Synthetic oligonucleotide
  Target: LAMA2; (-) strand; PAM type: YTN; PAM sequence: CTT
cctctcattttctcctttgt

SEQ ID NO: 283551 - DNA, 20 bp, Artificial Sequence
  Description of Artificial Sequence: Synthetic oligonucleotide
  Target: LAMA2; (-) strand; PAM type: YTN; PAM sequence: TTG
tcttcctctcattttctcct

SEQ ID NO: 283552 - DNA, 20 bp, Artificial Sequence
  Description of Artificial Sequence: Synthetic oligonucleotide
  Target: LAMA2; (-) strand; PAM type: YTN; PAM sequence: TTT
gtcttcctctcattttctcc

SEQ ID NO: 283553 - DNA, 20 bp, Artificial Sequence
  Description of Artificial Sequence: Synthetic oligonucleotide
  Target: LAMA2; (-) strand; PAM type: YTN; PAM sequence: CTT
tgtcttcctctcattttctc

SEQ ID NO: 283554 - DNA, 20 bp, Artificial Sequence
  Description of Artificial Sequence: Synthetic oligonucleotide
  Target: LAMA2; (-) strand; PAM type: YTN; PAM sequence: TTC
ctttgtcttcctctcatttt

SEQ ID NO: 283555 - DNA, 20 bp, Artificial Sequence
  Description of Artificial Sequence: Synthetic oligonucleotide
  Target: LAMA2; (-) strand; PAM type: YTN; PAM sequence: TTT
cctttgtcttcctctcattt

SEQ ID NO: 283556 - DNA, 20 bp, Artificial Sequence
  Description of Artificial Sequence: Synthetic oligonucleotide
  Target: LAMA2; (-) strand; PAM type: YTN; PAM sequence: CTT
tcctttgtcttcctctcatt

SEQ ID NO: 283557 - DNA, 20 bp, Artificial Sequence
  Description of Artificial Sequence: Synthetic oligonucleotide
  Target: LAMA2; (-) strand; PAM type: YTN; PAM sequence: CTC
ctttcctttgtcttcctctc

SEQ ID NO: 283558 - DNA, 20 bp, Artificial Sequence
  Description of Artificial Sequence: Synthetic oligonucleotide
  Target: LAMA2; (-) strand; PAM type: YTN; PAM sequence: CTC
ctcctttcctttgtcttcct

SEQ ID NO: 283559 - DNA, 20 bp, Artificial Sequence
  Description of Artificial Sequence: Synthetic oligonucleotide
  Target: LAMA2; (-) strand; PAM type: YTN; PAM sequence: CTG
tcctcctcctttcctttgtc

SEQ ID NO: 283560 - DNA, 20 bp, Artificial Sequence
  Description of Artificial Sequence: Synthetic oligonucleotide
  Target: LAMA2; (-) strand; PAM type: YTN; PAM sequence: TTC
ctgtcctcctcctttccttt

SEQ ID NO: 283561 - DNA, 20 bp, Artificial Sequence
  Description of Artificial Sequence: Synthetic oligonucleotide
  Target: LAMA2; (-) strand; PAM type: YTN; PAM sequence: CTT
cctgtcctcctcctttcctt

SEQ ID NO: 283562 - DNA, 20 bp, Artificial Sequence
  Description of Artificial Sequence: Synthetic oligonucleotide
  Target: LAMA2; (-) strand; PAM type: YTN; PAM sequence: TTC
ttcctgtcctcctcctttcc

SEQ ID NO: 283563 - DNA, 20 bp, Artificial Sequence
  Description of Artificial Sequence: Synthetic oligonucleotide
  Target: LAMA2; (-) strand; PAM type: YTN; PAM sequence: TTT
cttcctgtcctcctcctttc

SEQ ID NO: 283564 - DNA, 20 bp, Artificial Sequence
  Description of Artificial Sequence: Synthetic oligonucleotide
  Target: LAMA2; (-) strand; PAM type: YTN; PAM sequence: TTT
tcttcctgtcctcctccttt

SEQ ID NO: 283565 - DNA, 20 bp, Artificial Sequence
  Description of Artificial Sequence: Synthetic oligonucleotide
  Target: LAMA2; (-) strand; PAM type: YTN; PAM sequence: CTT
ttcttcctgtcctcctcctt

SEQ ID NO: 283566 - DNA, 20 bp, Artificial Sequence
  Description of Artificial Sequence: Synthetic oligonucleotide
  Target: LAMA2; (-) strand; PAM type: YTN; PAM sequence: CTC
aaccttttcttcctgtcctc

SEQ ID NO: 283567 - DNA, 20 bp, Artificial Sequence
  Description of Artificial Sequence: Synthetic oligonucleotide
  Target: LAMA2; (-) strand; PAM type: YTN; PAM sequence: CTC
ccaccatcaccctcaacctt

SEQ ID NO: 283568 - DNA, 20 bp, Artificial Sequence
  Description of Artificial Sequence: Synthetic oligonucleotide
  Target: LAMA2; (-) strand; PAM type: YTN; PAM sequence: CTC
ctcccaccatcaccctcaac

SEQ ID NO: 283569 - DNA, 20 bp, Artificial Sequence
  Description of Artificial Sequence: Synthetic oligonucleotide
  Target: LAMA2; (-) strand; PAM type: YTN; PAM sequence: TTG
ggtagcaatgctcctcccac

SEQ ID NO: 283570 - DNA, 20 bp, Artificial Sequence
  Description of Artificial Sequence: Synthetic oligonucleotide
  Target: LAMA2; (-) strand; PAM type: YTN; PAM sequence: TTT
gggtagcaatgctcctccca

SEQ ID NO: 283571 - DNA, 20 bp, Artificial Sequence
  Description of Artificial Sequence: Synthetic oligonucleotide
  Target: LAMA2; (-) strand; PAM type: YTN; PAM sequence: TTT
tgggtagcaatgctcctccc

SEQ ID NO: 283572 - DNA, 20 bp, Artificial Sequence
  Description of Artificial Sequence: Synthetic oligonucleotide
  Target: LAMA2; (-) strand; PAM type: YTN; PAM sequence: TTA
gtagagcattttgggtagca

SEQ ID NO: 283573 - DNA, 20 bp, Artificial Sequence
  Description of Artificial Sequence: Synthetic oligonucleotide
  Target: LAMA2; (-) strand; PAM type: YTN; PAM sequence: CTA
gggattagtagagcattttg

SEQ ID NO: 283574 - DNA, 20 bp, Artificial Sequence
  Description of Artificial Sequence: Synthetic oligonucleotide
  Target: LAMA2; (-) strand; PAM type: YTN; PAM sequence: TTG
atagtcaaaactagggatta

SEQ ID NO: 283575 - DNA, 20 bp, Artificial Sequence
  Description of Artificial Sequence: Synthetic oligonucleotide
  Target: LAMA2; (-) strand; PAM type: YTN; PAM sequence: CTA
ccaaggattgatagtcaaaa

SEQ ID NO: 283576 - DNA, 20 bp, Artificial Sequence
  Description of Artificial Sequence: Synthetic oligonucleotide
  Target: LAMA2; (-) strand; PAM type: YTN; PAM sequence: TTC
taccaaggattgatagtcaa

SEQ ID NO: 283577 - DNA, 20 bp, Artificial Sequence
  Description of Artificial Sequence: Synthetic oligonucleotide
  Target: LAMA2; (-) strand; PAM type: YTN; PAM sequence: CTG
cattctaccaaggattgata

SEQ ID NO: 283578 - DNA, 20 bp, Artificial Sequence
  Description of Artificial Sequence: Synthetic oligonucleotide
  Target: LAMA2; (-) strand; PAM type: YTN; PAM sequence: CTA
ctgcattctaccaaggattg

SEQ ID NO: 283579 - DNA, 20 bp, Artificial Sequence
  Description of Artificial Sequence: Synthetic oligonucleotide
  Target: LAMA2; (-) strand; PAM type: YTN; PAM sequence: CTA
actactgcattctaccaagg

SEQ ID NO: 283580 - DNA, 20 bp, Artificial Sequence
  Description of Artificial Sequence: Synthetic oligonucleotide
  Target: LAMA2; (-) strand; PAM type: YTN; PAM sequence: TTC
cataaacaatgctaactact

SEQ ID NO: 283581 - DNA, 20 bp, Artificial Sequence
  Description of Artificial Sequence: Synthetic oligonucleotide
  Target: LAMA2; (-) strand; PAM type: YTN; PAM sequence: TTC
aaatccacatagtcccattc

SEQ ID NO: 283582 - DNA, 20 bp, Artificial Sequence
  Description of Artificial Sequence: Synthetic oligonucleotide
  Target: LAMA2; (-) strand; PAM type: YTN; PAM sequence: TTA
ataaatggcagtggtggtat

SEQ ID NO: 283583 - DNA, 20 bp, Artificial Sequence
  Description of Artificial Sequence: Synthetic oligonucleotide
  Target: LAMA2; (-) strand; PAM type: YTN; PAM sequence: TTG
catggttaataaatggcagt

SEQ ID NO: 283584 - DNA, 20 bp, Artificial Sequence
  Description of Artificial Sequence: Synthetic oligonucleotide
  Target: LAMA2; (-) strand; PAM type: YTN; PAM sequence: CTT
gcatggttaataaatggcag

SEQ ID NO: 283585 - DNA, 20 bp, Artificial Sequence
  Description of Artificial Sequence: Synthetic oligonucleotide
  Target: LAMA2; (-) strand; PAM type: YTN; PAM sequence: CTA
agcttgcatggttaataaat

SEQ ID NO: 283586 - DNA, 20 bp, Artificial Sequence
  Description of Artificial Sequence: Synthetic oligonucleotide
  Target: LAMA2; (-) strand; PAM type: YTN; PAM sequence: TTC
ctaagcttgcatggttaata

SEQ ID NO: 283587 - DNA, 20 bp, Artificial Sequence
  Description of Artificial Sequence: Synthetic oligonucleotide
  Target: LAMA2; (-) strand; PAM type: YTN; PAM sequence: TTT
cctaagcttgcatggttaat

SEQ ID NO: 283588 - DNA, 20 bp, Artificial Sequence
  Description of Artificial Sequence: Synthetic oligonucleotide
  Target: LAMA2; (-) strand; PAM type: YTN; PAM sequence: TTG
agtaaatttcctaagcttgc

SEQ ID NO: 283589 - DNA, 20 bp, Artificial Sequence
  Description of Artificial Sequence: Synthetic oligonucleotide
  Target: LAMA2; (-) strand; PAM type: YTN; PAM sequence: TTA
gagaagttgagtaaatttcc

SEQ ID NO: 283590 - DNA, 20 bp, Artificial Sequence
  Description of Artificial Sequence: Synthetic oligonucleotide
  Target: LAMA2; (-) strand; PAM type: YTN; PAM sequence: CTT
agagaagttgagtaaatttc

SEQ ID NO: 283591 - DNA, 20 bp, Artificial Sequence
  Description of Artificial Sequence: Synthetic oligonucleotide
  Target: LAMA2; (-) strand; PAM type: YTN; PAM sequence: TTG
agacttagagaagttgagta

SEQ ID NO: 283592 - DNA, 20 bp, Artificial Sequence
  Description of Artificial Sequence: Synthetic oligonucleotide
  Target: LAMA2; (-) strand; PAM type: YTN; PAM sequence: TTA
caaatgaggaaattgagact

SEQ ID NO: 283593 - DNA, 20 bp, Artificial Sequence
  Description of Artificial Sequence: Synthetic oligonucleotide
  Target: LAMA2; (-) strand; PAM type: YTN; PAM sequence: TTT
acaaatgaggaaattgagac

SEQ ID NO: 283594 - DNA, 20 bp, Artificial Sequence
  Description of Artificial Sequence: Synthetic oligonucleotide
  Target: LAMA2; (-) strand; PAM type: YTN; PAM sequence: CTC
caatttacaaatgaggaaat

SEQ ID NO: 283595 - DNA, 20 bp, Artificial Sequence
  Description of Artificial Sequence: Synthetic oligonucleotide
  Target: LAMA2; (-) strand; PAM type: YTN; PAM sequence: TTA
tctccaatttacaaatgagg

SEQ ID NO: 283596 - DNA, 20 bp, Artificial Sequence
  Description of Artificial Sequence: Synthetic oligonucleotide
  Target: LAMA2; (-) strand; PAM type: YTN; PAM sequence: CTA
ttatctccaatttacaaatg

SEQ ID NO: 283597 - DNA, 20 bp, Artificial Sequence
  Description of Artificial Sequence: Synthetic oligonucleotide
  Target: LAMA2; (-) strand; PAM type: YTN; PAM sequence: CTA
ctattatctccaatttacaa

SEQ ID NO: 283598 - DNA, 20 bp, Artificial Sequence
  Description of Artificial Sequence: Synthetic oligonucleotide
  Target: LAMA2; (-) strand; PAM type: YTN; PAM sequence: TTG
atgtatgatgtatatgatga

SEQ ID NO: 283599 - DNA, 20 bp, Artificial Sequence
  Description of Artificial Sequence: Synthetic oligonucleotide
  Target: LAMA2; (-) strand; PAM type: YTN; PAM sequence: TTA
caataacattgatgtatgat

SEQ ID NO: 283600 - DNA, 20 bp, Artificial Sequence
  Description of Artificial Sequence: Synthetic oligonucleotide
  Target: LAMA2; (-) strand; PAM type: YTN; PAM sequence: CTT
acaataacattgatgtatga

SEQ ID NO: 283601 - DNA, 20 bp, Artificial Sequence
  Description of Artificial Sequence: Synthetic oligonucleotide
  Target: LAMA2; (-) strand; PAM type: YTN; PAM sequence: TTA
atccttacaataacattgat

SEQ ID NO: 283602 - DNA, 20 bp, Artificial Sequence
  Description of Artificial Sequence: Synthetic oligonucleotide
  Target: LAMA2; (-) strand; PAM type: YTN; PAM sequence: CTT
aatccttacaataacattga

SEQ ID NO: 283603 - DNA, 20 bp, Artificial Sequence
  Description of Artificial Sequence: Synthetic oligonucleotide
  Target: LAMA2; (-) strand; PAM type: YTN; PAM sequence: TTA
cttaatccttacaataacat

SEQ ID NO: 283604 - DNA, 20 bp, Artificial Sequence
  Description of Artificial Sequence: Synthetic oligonucleotide
  Target: LAMA2; (-) strand; PAM type: YTN; PAM sequence: TTT
acttaatccttacaataaca

SEQ ID NO: 283605 - DNA, 20 bp, Artificial Sequence
  Description of Artificial Sequence: Synthetic oligonucleotide
  Target: LAMA2; (-) strand; PAM type: YTN; PAM sequence: TTT
tacttaatccttacaataac

SEQ ID NO: 283606 - DNA, 20 bp, Artificial Sequence
  Description of Artificial Sequence: Synthetic oligonucleotide
  Target: LAMA2; (-) strand; PAM type: YTN; PAM sequence: TTG
ttttacttaatccttacaat

SEQ ID NO: 283607 - DNA, 20 bp, Artificial Sequence
  Description of Artificial Sequence: Synthetic oligonucleotide
  Target: LAMA2; (-) strand; PAM type: YTN; PAM sequence: TTC
agtgggttgttttacttaat

SEQ ID NO: 283608 - DNA, 20 bp, Artificial Sequence
  Description of Artificial Sequence: Synthetic oligonucleotide
  Target: LAMA2; (-) strand; PAM type: YTN; PAM sequence: TTT
cagtgggttgttttacttaa

SEQ ID NO: 283609 - DNA, 20 bp, Artificial Sequence
  Description of Artificial Sequence: Synthetic oligonucleotide
  Target: LAMA2; (-) strand; PAM type: YTN; PAM sequence: TTC
agtttcagtgggttgtttta

SEQ ID NO: 283610 - DNA, 20 bp, Artificial Sequence
  Description of Artificial Sequence: Synthetic oligonucleotide
  Target: LAMA2; (-) strand; PAM type: YTN; PAM sequence: CTT
cagtttcagtgggttgtttt

SEQ ID NO: 283611 - DNA, 20 bp, Artificial Sequence
  Description of Artificial Sequence: Synthetic oligonucleotide
  Target: LAMA2; (-) strand; PAM type: YTN; PAM sequence: TTC
ttcagtttcagtgggttgtt

SEQ ID NO: 283612 - DNA, 20 bp, Artificial Sequence
  Description of Artificial Sequence: Synthetic oligonucleotide
  Target: LAMA2; (-) strand; PAM type: YTN; PAM sequence: TTA
gtgttcttcagtttcagtgg

SEQ ID NO: 283613 - DNA, 20 bp, Artificial Sequence
  Description of Artificial Sequence: Synthetic oligonucleotide
  Target: LAMA2; (-) strand; PAM type: YTN; PAM sequence: TTT
agtgttcttcagtttcagtg

SEQ ID NO: 283614 - DNA, 20 bp, Artificial Sequence
  Description of Artificial Sequence: Synthetic oligonucleotide
  Target: LAMA2; (-) strand; PAM type: YTN; PAM sequence: TTA
cacgcatttagtgttcttca

SEQ ID NO: 283615 - DNA, 20 bp, Artificial Sequence
  Description of Artificial Sequence: Synthetic oligonucleotide
  Target: LAMA2; (-) strand; PAM type: YTN; PAM sequence: TTG
aatgtgtatgttacacgcat

SEQ ID NO: 283616 - DNA, 20 bp, Artificial Sequence
  Description of Artificial Sequence: Synthetic oligonucleotide
  Target: LAMA2; (-) strand; PAM type: YTN; PAM sequence: CTG
acaagcattgaatgtgtatg

SEQ ID NO: 283617 - DNA, 20 bp, Artificial Sequence
  Description of Artificial Sequence: Synthetic oligonucleotide
  Target: LAMA2; (-) strand; PAM type: YTN; PAM sequence: TTA
gtaagagtaatgcctgacaa

SEQ ID NO: 283618 - DNA, 20 bp, Artificial Sequence
  Description of Artificial Sequence: Synthetic oligonucleotide
  Target: LAMA2; (-) strand; PAM type: YTN; PAM sequence: TTT
agtaagagtaatgcctgaca

SEQ ID NO: 283619 - DNA, 20 bp, Artificial Sequence
  Description of Artificial Sequence: Synthetic oligonucleotide
  Target: LAMA2; (-) strand; PAM type: YTN; PAM sequence: CTG
gataggatggacaagtattt

SEQ ID NO: 283620 - DNA, 20 bp, Artificial Sequence
  Description of Artificial Sequence: Synthetic oligonucleotide
  Target: LAMA2; (-) strand; PAM type: YTN; PAM sequence: CTC
ctggataggatggacaagta

SEQ ID NO: 283621 - DNA, 20 bp, Artificial Sequence
  Description of Artificial Sequence: Synthetic oligonucleotide
  Target: LAMA2; (-) strand; PAM type: YTN; PAM sequence: CTA
gtccctcctggataggatgg

SEQ ID NO: 283622 - DNA, 20 bp, Artificial Sequence
  Description of Artificial Sequence: Synthetic oligonucleotide
  Target: LAMA2; (-) strand; PAM type: YTN; PAM sequence: TTC
tagtccctcctggataggat

SEQ ID NO: 283623 - DNA, 20 bp, Artificial Sequence
  Description of Artificial Sequence: Synthetic oligonucleotide
  Target: LAMA2; (-) strand; PAM type: YTN; PAM sequence: TTG
ttctagtccctcctggatag

SEQ ID NO: 283624 - DNA, 20 bp, Artificial Sequence
  Description of Artificial Sequence: Synthetic oligonucleotide
  Target: LAMA2; (-) strand; PAM type: YTN; PAM sequence: CTG
agaaaggaccaagaaagaga

SEQ ID NO: 283625 - DNA, 20 bp, Artificial Sequence
  Description of Artificial Sequence: Synthetic oligonucleotide
  Target: LAMA2; (-) strand; PAM type: YTN; PAM sequence: CTC
cacagaaatgcaacatgtaa

SEQ ID NO: 283626 - DNA, 20 bp, Artificial Sequence
  Description of Artificial Sequence: Synthetic oligonucleotide
  Target: LAMA2; (-) strand; PAM type: YTN; PAM sequence: TTA
gctccacagaaatgcaacat

SEQ ID NO: 283627 - DNA, 20 bp, Artificial Sequence
  Description of Artificial Sequence: Synthetic oligonucleotide
  Target: LAMA2; (-) strand; PAM type: YTN; PAM sequence: TTA
aattagctccacagaaatgc

SEQ ID NO: 283628 - DNA, 20 bp, Artificial Sequence
  Description of Artificial Sequence: Synthetic oligonucleotide
  Target: LAMA2; (-) strand; PAM type: YTN; PAM sequence: TTT
aaattagctccacagaaatg

SEQ ID NO: 283629 - DNA, 20 bp, Artificial Sequence
  Description of Artificial Sequence: Synthetic oligonucleotide
  Target: LAMA2; (-) strand; PAM type: YTN; PAM sequence: TTG
tttaaattagctccacagaa

SEQ ID NO: 283630 - DNA, 20 bp, Artificial Sequence
  Description of Artificial Sequence: Synthetic oligonucleotide
  Target: LAMA2; (-) strand; PAM type: YTN; PAM sequence: CTA
attgtttaaattagctccac

SEQ ID NO: 283631 - DNA, 20 bp, Artificial Sequence
  Description of Artificial Sequence: Synthetic oligonucleotide
  Target: LAMA2; (-) strand; PAM type: YTN; PAM sequence: TTG
ggacatgcgtactaattgtt

SEQ ID NO: 283632 - DNA, 20 bp, Artificial Sequence
  Description of Artificial Sequence: Synthetic oligonucleotide
  Target: LAMA2; (-) strand; PAM type: YTN; PAM sequence: TTT
gggacatgcgtactaattgt

SEQ ID NO: 283633 - DNA, 20 bp, Artificial Sequence
  Description of Artificial Sequence: Synthetic oligonucleotide
  Target: LAMA2; (-) strand; PAM type: YTN; PAM sequence: TTT
tgggacatgcgtactaattg

SEQ ID NO: 283634 - DNA, 20 bp, Artificial Sequence
  Description of Artificial Sequence: Synthetic oligonucleotide
  Target: LAMA2; (-) strand; PAM type: YTN; PAM sequence: TTG
ttttgggacatgcgtactaa

SEQ ID NO: 283635 - DNA, 20 bp, Artificial Sequence
  Description of Artificial Sequence: Synthetic oligonucleotide
  Target: LAMA2; (-) strand; PAM type: YTN; PAM sequence: TTA
tgccataaaaattgttttgg

SEQ ID NO: 283636 - DNA, 20 bp, Artificial Sequence
  Description of Artificial Sequence: Synthetic oligonucleotide
  Target: LAMA2; (-) strand; PAM type: YTN; PAM sequence: CTT
atgccataaaaattgttttg

SEQ ID NO: 283637 - DNA, 20 bp, Artificial Sequence
  Description of Artificial Sequence: Synthetic oligonucleotide
  Target: LAMA2; (-) strand; PAM type: YTN; PAM sequence: TTC
ttatgccataaaaattgttt

SEQ ID NO: 283638 - DNA, 20 bp, Artificial Sequence
  Description of Artificial Sequence: Synthetic oligonucleotide
  Target: LAMA2; (-) strand; PAM type: YTN; PAM sequence: TTT
cttatgccataaaaattgtt

SEQ ID NO: 283639 - DNA, 20 bp, Artificial Sequence
  Description of Artificial Sequence: Synthetic oligonucleotide
  Target: LAMA2; (-) strand; PAM type: YTN; PAM sequence: TTA
atagtttcttatgccataaa

SEQ ID NO: 283640 - DNA, 20 bp, Artificial Sequence
  Description of Artificial Sequence: Synthetic oligonucleotide
  Target: LAMA2; (-) strand; PAM type: YTN; PAM sequence: TTT
aatagtttcttatgccataa

SEQ ID NO: 283641 - DNA, 20 bp, Artificial Sequence
  Description of Artificial Sequence: Synthetic oligonucleotide
  Target: LAMA2; (-) strand; PAM type: YTN; PAM sequence: TTT
taatagtttcttatgccata

SEQ ID NO: 283642 - DNA, 20 bp, Artificial Sequence
  Description of Artificial Sequence: Synthetic oligonucleotide
  Target: LAMA2; (-) strand; PAM type: YTN; PAM sequence: TTT
ttaatagtttcttatgccat

SEQ ID NO: 283643 - DNA, 20 bp, Artificial Sequence
  Description of Artificial Sequence: Synthetic oligonucleotide
  Target: LAMA2; (-) strand; PAM type: YTN; PAM sequence: TTA
ggtaaatttttaatagtttc

SEQ ID NO: 283644 - DNA, 20 bp, Artificial Sequence
  Description of Artificial Sequence: Synthetic oligonucleotide
  Target: LAMA2; (-) strand; PAM type: YTN; PAM sequence: TTT
aggtaaatttttaatagttt

SEQ ID NO: 283645 - DNA, 20 bp, Artificial Sequence
  Description of Artificial Sequence: Synthetic oligonucleotide
  Target: LAMA2; (-) strand; PAM type: YTN; PAM sequence: TTT
taggtaaatttttaatagtt

SEQ ID NO: 283646 - DNA, 20 bp, Artificial Sequence
  Description of Artificial Sequence: Synthetic oligonucleotide
  Target: LAMA2; (-) strand; PAM type: YTN; PAM sequence: TTT
ttaggtaaatttttaatagt

SEQ ID NO: 283647 - DNA, 20 bp, Artificial Sequence
  Description of Artificial Sequence: Synthetic oligonucleotide
  Target: LAMA2; (-) strand; PAM type: YTN; PAM sequence: TTT
tttaggtaaatttttaatag

SEQ ID NO: 283648 - DNA, 20 bp, Artificial Sequence
  Description of Artificial Sequence: Synthetic oligonucleotide
  Target: LAMA2; (-) strand; PAM type: YTN; PAM sequence: CTC
attttttaggtaaattttta

SEQ ID NO: 283649 - DNA, 20 bp, Artificial Sequence
  Description of Artificial Sequence: Synthetic oligonucleotide
  Target: LAMA2; (-) strand; PAM type: YTN; PAM sequence: CTG
gatacaacagctcatttttt

SEQ ID NO: 283650 - DNA, 20 bp, Artificial Sequence
  Description of Artificial Sequence: Synthetic oligonucleotide
  Target: LAMA2; (-) strand; PAM type: YTN; PAM sequence: TTG
actggatacaacagctcatt

SEQ ID NO: 283651 - DNA, 20 bp, Artificial Sequence
  Description of Artificial Sequence: Synthetic oligonucleotide
  Target: LAMA2; (-) strand; PAM type: YTN; PAM sequence: CTT
gactggatacaacagctcat

SEQ ID NO: 283652 - DNA, 20 bp, Artificial Sequence
  Description of Artificial Sequence: Synthetic oligonucleotide
  Target: LAMA2; (-) strand; PAM type: YTN; PAM sequence: CTC
ttgactggatacaacagctc

SEQ ID NO: 283653 - DNA, 20 bp, Artificial Sequence
  Description of Artificial Sequence: Synthetic oligonucleotide
  Target: LAMA2; (-) strand; PAM type: YTN; PAM sequence: CTC
tcttgactggatacaacagc

SEQ ID NO: 283654 - DNA, 20 bp, Artificial Sequence
  Description of Artificial Sequence: Synthetic oligonucleotide
  Target: LAMA2; (-) strand; PAM type: YTN; PAM sequence: TTA
cctctcttgactggatacaa

SEQ ID NO: 283655 - DNA, 20 bp, Artificial Sequence
  Description of Artificial Sequence: Synthetic oligonucleotide
  Target: LAMA2; (-) strand; PAM type: YTN; PAM sequence: TTT
acctctcttgactggataca

SEQ ID NO: 283656 - DNA, 20 bp, Artificial Sequence
  Description of Artificial Sequence: Synthetic oligonucleotide
  Target: LAMA2; (-) strand; PAM type: YTN; PAM sequence: TTA
tttacctctcttgactggat

SEQ ID NO: 283657 - DNA, 20 bp, Artificial Sequence
  Description of Artificial Sequence: Synthetic oligonucleotide
  Target: LAMA2; (-) strand; PAM type: YTN; PAM sequence: TTC
ccacaatattatttacctct

SEQ ID NO: 283658 - DNA, 20 bp, Artificial Sequence
  Description of Artificial Sequence: Synthetic oligonucleotide
  Target: LAMA2; (-) strand; PAM type: YTN; PAM sequence: CTT
cccacaatattatttacctc

SEQ ID NO: 283659 - DNA, 20 bp, Artificial Sequence
  Description of Artificial Sequence: Synthetic oligonucleotide
  Target: LAMA2; (-) strand; PAM type: YTN; PAM sequence: CTA
tacttcccacaatattattt

SEQ ID NO: 283660 - DNA, 20 bp, Artificial Sequence
  Description of Artificial Sequence: Synthetic oligonucleotide
  Target: LAMA2; (-) strand; PAM type: YTN; PAM sequence: TTG
aaaaaacaaaatatgaaaaa

SEQ ID NO: 283661 - DNA, 20 bp, Artificial Sequence
  Description of Artificial Sequence: Synthetic oligonucleotide
  Target: LAMA2; (-) strand; PAM type: YTN; PAM sequence: TTC
aaattgaaaaaacaaaatat

SEQ ID NO: 283662 - DNA, 20 bp, Artificial Sequence
  Description of Artificial Sequence: Synthetic oligonucleotide
  Target: LAMA2; (-) strand; PAM type: YTN; PAM sequence: TTA
gtgaaaattcaaattgaaaa

SEQ ID NO: 283663 - DNA, 20 bp, Artificial Sequence
  Description of Artificial Sequence: Synthetic oligonucleotide
  Target: LAMA2; (-) strand; PAM type: YTN; PAM sequence: TTA
ttagtgaaaattcaaattga

SEQ ID NO: 283664 - DNA, 20 bp, Artificial Sequence
  Description of Artificial Sequence: Synthetic oligonucleotide
  Target: LAMA2; (-) strand; PAM type: YTN; PAM sequence: TTT
attagtgaaaattcaaattg

SEQ ID NO: 283665 - DNA, 20 bp, Artificial Sequence
  Description of Artificial Sequence: Synthetic oligonucleotide
  Target: LAMA2; (-) strand; PAM type: YTN; PAM sequence: TTA
catcatttattagtgaaaat

SEQ ID NO: 283666 - DNA, 20 bp, Artificial Sequence
  Description of Artificial Sequence: Synthetic oligonucleotide
  Target: LAMA2; (-) strand; PAM type: YTN; PAM sequence: CTT
acatcatttattagtgaaaa

SEQ ID NO: 283667 - DNA, 20 bp, Artificial Sequence
  Description of Artificial Sequence: Synthetic oligonucleotide
  Target: LAMA2; (-) strand; PAM type: YTN; PAM sequence: TTC
ttacatcatttattagtgaa

SEQ ID NO: 283668 - DNA, 20 bp, Artificial Sequence
  Description of Artificial Sequence: Synthetic oligonucleotide
  Target: LAMA2; (-) strand; PAM type: YTN; PAM sequence: TTT
cttacatcatttattagtga

SEQ ID NO: 283669 - DNA, 20 bp, Artificial Sequence
  Description of Artificial Sequence: Synthetic oligonucleotide
  Target: LAMA2; (-) strand; PAM type: YTN; PAM sequence: TTT
tcttacatcatttattagtg

SEQ ID NO: 283670 - DNA, 20 bp, Artificial Sequence
  Description of Artificial Sequence: Synthetic oligonucleotide
  Target: LAMA2; (-) strand; PAM type: YTN; PAM sequence: TTT
ttcttacatcatttattagt

SEQ ID NO: 283671 - DNA, 20 bp, Artificial Sequence
  Description of Artificial Sequence: Synthetic oligonucleotide
  Target: LAMA2; (-) strand; PAM type: YTN; PAM sequence: CTT
tttcttacatcatttattag

SEQ ID NO: 283672 - DNA, 20 bp, Artificial Sequence
  Description of Artificial Sequence: Synthetic oligonucleotide
  Target: LAMA2; (-) strand; PAM type: YTN; PAM sequence: TTC
tttttcttacatcatttatt

SEQ ID NO: 283673 - DNA, 20 bp, Artificial Sequence
  Description of Artificial Sequence: Synthetic oligonucleotide
  Target: LAMA2; (-) strand; PAM type: YTN; PAM sequence: CTT
ctttttcttacatcatttat

SEQ ID NO: 283674 - DNA, 20 bp, Artificial Sequence
  Description of Artificial Sequence: Synthetic oligonucleotide
  Target: LAMA2; (-) strand; PAM type: YTN; PAM sequence: CTG
tcttctttttcttacatcat

SEQ ID NO: 283675 - DNA, 20 bp, Artificial Sequence
  Description of Artificial Sequence: Synthetic oligonucleotide
  Target: LAMA2; (-) strand; PAM type: YTN; PAM sequence: TTC
atctgtcttctttttcttac

SEQ ID NO: 283676 - DNA, 20 bp, Artificial Sequence
  Description of Artificial Sequence: Synthetic oligonucleotide
  Target: LAMA2; (-) strand; PAM type: YTN; PAM sequence: CTG
aaatggagttcatctgtctt

SEQ ID NO: 283677 - DNA, 20 bp, Artificial Sequence
  Description of Artificial Sequence: Synthetic oligonucleotide
  Target: LAMA2; (-) strand; PAM type: YTN; PAM sequence: TTA
agactgaaatggagttcatc

SEQ ID NO: 283678 - DNA, 20 bp, Artificial Sequence
  Description of Artificial Sequence: Synthetic oligonucleotide
  Target: LAMA2; (-) strand; PAM type: YTN; PAM sequence: CTT
aagactgaaatggagttcat

SEQ ID NO: 283679 - DNA, 20 bp, Artificial Sequence
  Description of Artificial Sequence: Synthetic oligonucleotide
  Target: LAMA2; (-) strand; PAM type: YTN; PAM sequence: CTG
caaatatatcttaagactga

SEQ ID NO: 283680 - DNA, 20 bp, Artificial Sequence
  Description of Artificial Sequence: Synthetic oligonucleotide
  Target: LAMA2; (-) strand; PAM type: YTN; PAM sequence: TTA
aactgcaaatatatcttaag

SEQ ID NO: 283681 - DNA, 20 bp, Artificial Sequence
  Description of Artificial Sequence: Synthetic oligonucleotide
  Target: LAMA2; (-) strand; PAM type: YTN; PAM sequence: CTC
aggtatgcattaaactgcaa

SEQ ID NO: 283682 - DNA, 20 bp, Artificial Sequence
  Description of Artificial Sequence: Synthetic oligonucleotide
  Target: LAMA2; (-) strand; PAM type: YTN; PAM sequence: TTA
ctcaggtatgcattaaactg

SEQ ID NO: 283683 - DNA, 20 bp, Artificial Sequence
  Description of Artificial Sequence: Synthetic oligonucleotide
  Target: LAMA2; (-) strand; PAM type: YTN; PAM sequence: CTT
actcaggtatgcattaaact

SEQ ID NO: 283684 - DNA, 20 bp, Artificial Sequence
  Description of Artificial Sequence: Synthetic oligonucleotide
  Target: LAMA2; (-) strand; PAM type: YTN; PAM sequence: TTA
gaaatcttactcaggtatgc

SEQ ID NO: 283685 - DNA, 20 bp, Artificial Sequence
  Description of Artificial Sequence: Synthetic oligonucleotide
  Target: LAMA2; (-) strand; PAM type: YTN; PAM sequence: TTT
agaaatcttactcaggtatg

SEQ ID NO: 283686 - DNA, 20 bp, Artificial Sequence
  Description of Artificial Sequence: Synthetic oligonucleotide
  Target: LAMA2; (-) strand; PAM type: YTN; PAM sequence: TTG
atataagtttagaaatctta

SEQ ID NO: 283687 - DNA, 20 bp, Artificial Sequence
  Description of Artificial Sequence: Synthetic oligonucleotide
  Target: LAMA2; (-) strand; PAM type: YTN; PAM sequence: CTG
ttgatataagtttagaaatc

SEQ ID NO: 283688 - DNA, 20 bp, Artificial Sequence
  Description of Artificial Sequence: Synthetic oligonucleotide
  Target: LAMA2; (-) strand; PAM type: YTN; PAM sequence: TTA
aggggaaagaaaataaagat

SEQ ID NO: 283689 - DNA, 20 bp, Artificial Sequence
  Description of Artificial Sequence: Synthetic oligonucleotide
  Target: LAMA2; (-) strand; PAM type: YTN; PAM sequence: TTG
aaatcattaaggggaaagaa

SEQ ID NO: 283690 - DNA, 20 bp, Artificial Sequence
  Description of Artificial Sequence: Synthetic oligonucleotide
  Target: LAMA2; (-) strand; PAM type: YTN; PAM sequence: TTT
gaaatcattaaggggaaaga

SEQ ID NO: 283691 - DNA, 20 bp, Artificial Sequence
  Description of Artificial Sequence: Synthetic oligonucleotide
  Target: LAMA2; (-) strand; PAM type: YTN; PAM sequence: TTC
gagtacaacaatataaagag

SEQ ID NO: 283692 - DNA, 20 bp, Artificial Sequence
  Description of Artificial Sequence: Synthetic oligonucleotide
  Target: LAMA2; (-) strand; PAM type: YTN; PAM sequence: TTA
aattcgagtacaacaatata

SEQ ID NO: 283693 - DNA, 20 bp, Artificial Sequence
  Description of Artificial Sequence: Synthetic oligonucleotide
  Target: LAMA2; (-) strand; PAM type: YTN; PAM sequence: TTT
aaattcgagtacaacaatat

SEQ ID NO: 283694 - DNA, 20 bp, Artificial Sequence
  Description of Artificial Sequence: Synthetic oligonucleotide
  Target: LAMA2; (-) strand; PAM type: YTN; PAM sequence: CTA
agcagtttaaattcgagtac

SEQ ID NO: 283695 - DNA, 20 bp, Artificial Sequence
  Description of Artificial Sequence: Synthetic oligonucleotide
  Target: LAMA2; (-) strand; PAM type: YTN; PAM sequence: TTG
taatagtaactaagcagttt

SEQ ID NO: 283696 - DNA, 20 bp, Artificial Sequence
  Description of Artificial Sequence: Synthetic oligonucleotide
  Target: LAMA2; (-) strand; PAM type: YTN; PAM sequence: TTA
tattgtaatagtaactaagc

SEQ ID NO: 283697 - DNA, 20 bp, Artificial Sequence
  Description of Artificial Sequence: Synthetic oligonucleotide
  Target: LAMA2; (-) strand; PAM type: YTN; PAM sequence: TTT
atattgtaatagtaactaag

SEQ ID NO: 283698 - DNA, 20 bp, Artificial Sequence
  Description of Artificial Sequence: Synthetic oligonucleotide
  Target: LAMA2; (-) strand; PAM type: YTN; PAM sequence: TTA
atttatattgtaatagtaac

SEQ ID NO: 283699 - DNA, 20 bp, Artificial Sequence
  Description of Artificial Sequence: Synthetic oligonucleotide
  Target: LAMA2; (-) strand; PAM type: YTN; PAM sequence: TTA
gattaatttatattgtaata

SEQ ID NO: 283700 - DNA, 20 bp, Artificial Sequence
  Description of Artificial Sequence: Synthetic oligonucleotide
  Target: LAMA2; (-) strand; PAM type: YTN; PAM sequence: TTT
agattaatttatattgtaat

SEQ ID NO: 283701 - DNA, 20 bp, Artificial Sequence
  Description of Artificial Sequence: Synthetic oligonucleotide
  Target: LAMA2; (-) strand; PAM type: YTN; PAM sequence: CTT
tagattaatttatattgtaa

SEQ ID NO: 283702 - DNA, 20 bp, Artificial Sequence
  Description of Artificial Sequence: Synthetic oligonucleotide
  Target: LAMA2; (-) strand; PAM type: YTN; PAM sequence: CTA
aactttagattaatttatat

SEQ ID NO: 283703 - DNA, 20 bp, Artificial Sequence
  Description of Artificial Sequence: Synthetic oligonucleotide
  Target: LAMA2; (-) strand; PAM type: YTN; PAM sequence: CTC
taaactttagattaatttat

SEQ ID NO: 283704 - DNA, 20 bp, Artificial Sequence
  Description of Artificial Sequence: Synthetic oligonucleotide
  Target: LAMA2; (-) strand; PAM type: YTN; PAM sequence: TTC
tctaaactttagattaattt

SEQ ID NO: 283705 - DNA, 20 bp, Artificial Sequence
  Description of Artificial Sequence: Synthetic oligonucleotide
  Target: LAMA2; (-) strand; PAM type: YTN; PAM sequence: TTA
atattctctaaactttagat

SEQ ID NO: 283706 - DNA, 20 bp, Artificial Sequence
  Description of Artificial Sequence: Synthetic oligonucleotide
  Target: LAMA2; (-) strand; PAM type: YTN; PAM sequence: TTT
aatattctctaaactttaga

SEQ ID NO: 283707 - DNA, 20 bp, Artificial Sequence
  Description of Artificial Sequence: Synthetic oligonucleotide
  Target: LAMA2; (-) strand; PAM type: YTN; PAM sequence: TTT
taatattctctaaactttag

SEQ ID NO: 283708 - DNA, 20 bp, Artificial Sequence
  Description of Artificial Sequence: Synthetic oligonucleotide
  Target: LAMA2; (-) strand; PAM type: YTN; PAM sequence: TTT
ttaatattctctaaacttta

SEQ ID NO: 283709 - DNA, 20 bp, Artificial Sequence
  Description of Artificial Sequence: Synthetic oligonucleotide
  Target: LAMA2; (-) strand; PAM type: YTN; PAM sequence: CTA
gtttttaatattctctaaac

SEQ ID NO: 283710 - DNA, 20 bp, Artificial Sequence
  Description of Artificial Sequence: Synthetic oligonucleotide
  Target: LAMA2; (-) strand; PAM type: YTN; PAM sequence: TTC
cactagtttttaatattctc

SEQ ID NO: 283711 - DNA, 20 bp, Artificial Sequence
  Description of Artificial Sequence: Synthetic oligonucleotide
  Target: LAMA2; (-) strand; PAM type: YTN; PAM sequence: TTT
ccactagtttttaatattct

SEQ ID NO: 283712 - DNA, 20 bp, Artificial Sequence
  Description of Artificial Sequence: Synthetic oligonucleotide
  Target: LAMA2; (-) strand; PAM type: YTN; PAM sequence: CTT
tccactagtttttaatattc

SEQ ID NO: 283713 - DNA, 20 bp, Artificial Sequence
  Description of Artificial Sequence: Synthetic oligonucleotide
  Target: LAMA2; (-) strand; PAM type: YTN; PAM sequence: CTG
ctttccactagtttttaata

SEQ ID NO: 283714 - DNA, 20 bp, Artificial Sequence
  Description of Artificial Sequence: Synthetic oligonucleotide
  Target: LAMA2; (-) strand; PAM type: YTN; PAM sequence: CTA
gctgctttccactagttttt

SEQ ID NO: 283715 - DNA, 20 bp, Artificial Sequence
  Description of Artificial Sequence: Synthetic oligonucleotide
  Target: LAMA2; (-) strand; PAM type: YTN; PAM sequence: TTC
tagctgctttccactagttt

SEQ ID NO: 283716 - DNA, 20 bp, Artificial Sequence
  Description of Artificial Sequence: Synthetic oligonucleotide
  Target: LAMA2; (-) strand; PAM type: YTN; PAM sequence: TTT
ctagctgctttccactagtt

SEQ ID NO: 283717 - DNA, 20 bp, Artificial Sequence
  Description of Artificial Sequence: Synthetic oligonucleotide
  Target: LAMA2; (-) strand; PAM type: YTN; PAM sequence: TTT
tctagctgctttccactagt

SEQ ID NO: 283718 - DNA, 20 bp, Artificial Sequence
  Description of Artificial Sequence: Synthetic oligonucleotide
  Target: LAMA2; (-) strand; PAM type: YTN; PAM sequence: TTA
catatataagttttctagct

SEQ ID NO: 283719 - DNA, 20 bp, Artificial Sequence
  Description of Artificial Sequence: Synthetic oligonucleotide
  Target: LAMA2; (-) strand; PAM type: YTN; PAM sequence: TTA
atattacatatataagtttt

SEQ ID NO: 283720 - DNA, 20 bp, Artificial Sequence
  Description of Artificial Sequence: Synthetic oligonucleotide
  Target: LAMA2; (-) strand; PAM type: YTN; PAM sequence: TTT
aatattacatatataagttt

SEQ ID NO: 283721 - DNA, 20 bp, Artificial Sequence
  Description of Artificial Sequence: Synthetic oligonucleotide
  Target: LAMA2; (-) strand; PAM type: YTN; PAM sequence: CTA
gagataatttaatattacat

SEQ ID NO: 283722 - DNA, 20 bp, Artificial Sequence
  Description of Artificial Sequence: Synthetic oligonucleotide
  Target: LAMA2; (-) strand; PAM type: YTN; PAM sequence: TTG
ctagagataatttaatatta

SEQ ID NO: 283723 - DNA, 20 bp, Artificial Sequence
  Description of Artificial Sequence: Synthetic oligonucleotide
  Target: LAMA2; (-) strand; PAM type: YTN; PAM sequence: TTT
gctagagataatttaatatt

SEQ ID NO: 283724 - DNA, 20 bp, Artificial Sequence
  Description of Artificial Sequence: Synthetic oligonucleotide
  Target: LAMA2; (-) strand; PAM type: YTN; PAM sequence: TTC
aaaaatgccatttgctagag

SEQ ID NO: 283725 - DNA, 20 bp, Artificial Sequence
  Description of Artificial Sequence: Synthetic oligonucleotide
  Target: LAMA2; (-) strand; PAM type: YTN; PAM sequence: TTA
atattcaaaaatgccatttg

SEQ ID NO: 283726 - DNA, 20 bp, Artificial Sequence
  Description of Artificial Sequence: Synthetic oligonucleotide
  Target: LAMA2; (-) strand; PAM type: YTN; PAM sequence: TTT
aatattcaaaaatgccattt

SEQ ID NO: 283727 - DNA, 20 bp, Artificial Sequence
  Description of Artificial Sequence: Synthetic oligonucleotide
  Target: LAMA2; (-) strand; PAM type: YTN; PAM sequence: CTT
taatattcaaaaatgccatt

SEQ ID NO: 283728 - DNA, 20 bp, Artificial Sequence
  Description of Artificial Sequence: Synthetic oligonucleotide
  Target: LAMA2; (-) strand; PAM type: YTN; PAM sequence: TTA
tctttaatattcaaaaatgc

SEQ ID NO: 283729 - DNA, 20 bp, Artificial Sequence
  Description of Artificial Sequence: Synthetic oligonucleotide
  Target: LAMA2; (-) strand; PAM type: YTN; PAM sequence: TTA
gcaatgttatctttaatatt

SEQ ID NO: 283730 - DNA, 20 bp, Artificial Sequence
  Description of Artificial Sequence: Synthetic oligonucleotide
  Target: LAMA2; (-) strand; PAM type: YTN; PAM sequence: TTT
agcaatgttatctttaatat

SEQ ID NO: 283731 - DNA, 20 bp, Artificial Sequence
  Description of Artificial Sequence: Synthetic oligonucleotide
  Target: LAMA2; (-) strand; PAM type: YTN; PAM sequence: CTT
tagcaatgttatctttaata

SEQ ID NO: 283732 - DNA, 20 bp, Artificial Sequence
  Description of Artificial Sequence: Synthetic oligonucleotide
  Target: LAMA2; (-) strand; PAM type: YTN; PAM sequence: TTG
atactttagcaatgttatct

SEQ ID NO: 283733 - DNA, 20 bp, Artificial Sequence
  Description of Artificial Sequence: Synthetic oligonucleotide
  Target: LAMA2; (-) strand; PAM type: YTN; PAM sequence: CTT
gatactttagcaatgttatc

SEQ ID NO: 283734 - DNA, 20 bp, Artificial Sequence
  Description of Artificial Sequence: Synthetic oligonucleotide
  Target: LAMA2; (-) strand; PAM type: YTN; PAM sequence: CTC
ttgatactttagcaatgtta

SEQ ID NO: 283735 - DNA, 20 bp, Artificial Sequence
  Description of Artificial Sequence: Synthetic oligonucleotide
  Target: LAMA2; (-) strand; PAM type: YTN; PAM sequence: TTC
tcttgatactttagcaatgt

SEQ ID NO: 283736 - DNA, 20 bp, Artificial Sequence
  Description of Artificial Sequence: Synthetic oligonucleotide
  Target: LAMA2; (-) strand; PAM type: YTN; PAM sequence: TTT
ctcttgatactttagcaatg

SEQ ID NO: 283737 - DNA, 20 bp, Artificial Sequence
  Description of Artificial Sequence: Synthetic oligonucleotide
  Target: LAMA2; (-) strand; PAM type: YTN; PAM sequence: TTT
tctcttgatactttagcaat

SEQ ID NO: 283738 - DNA, 20 bp, Artificial Sequence
  Description of Artificial Sequence: Synthetic oligonucleotide
  Target: LAMA2; (-) strand; PAM type: YTN; PAM sequence: TTT
ttctcttgatactttagcaa

SEQ ID NO: 283739 - DNA, 20 bp, Artificial Sequence
  Description of Artificial Sequence: Synthetic oligonucleotide
  Target: LAMA2; (-) strand; PAM type: YTN; PAM sequence: TTT
tttctcttgatactttagca

SEQ ID NO: 283740 - DNA, 20 bp, Artificial Sequence
  Description of Artificial Sequence: Synthetic oligonucleotide
  Target: LAMA2; (-) strand; PAM type: YTN; PAM sequence: TTT
ttttctcttgatactttagc

SEQ ID NO: 283741 - DNA, 20 bp, Artificial Sequence
  Description of Artificial Sequence: Synthetic oligonucleotide
  Target: LAMA2; (-) strand; PAM type: YTN; PAM sequence: TTA
tatagtttttttctcttgat

SEQ ID NO: 283742 - DNA, 20 bp, Artificial Sequence
  Description of Artificial Sequence: Synthetic oligonucleotide
  Target: LAMA2; (-) strand; PAM type: YTN; PAM sequence: TTT
atatagtttttttctcttga

SEQ ID NO: 283743 - DNA, 20 bp, Artificial Sequence
  Description of Artificial Sequence: Synthetic oligonucleotide
  Target: LAMA2; (-) strand; PAM type: YTN; PAM sequence: TTT
tatatagtttttttctcttg

SEQ ID NO: 283744 - DNA, 20 bp, Artificial Sequence
  Description of Artificial Sequence: Synthetic oligonucleotide
  Target: LAMA2; (-) strand; PAM type: YTN; PAM sequence: TTG
ggtccaataaattttatata

SEQ ID NO: 283745 - DNA, 20 bp, Artificial Sequence
  Description of Artificial Sequence: Synthetic oligonucleotide
  Target: LAMA2; (-) strand; PAM type: YTN; PAM sequence: TTA
caaattgggtccaataaatt

SEQ ID NO: 283746 - DNA, 20 bp, Artificial Sequence
  Description of Artificial Sequence: Synthetic oligonucleotide
  Target: LAMA2; (-) strand; PAM type: YTN; PAM sequence: TTT
acaaattgggtccaataaat

SEQ ID NO: 283747 - DNA, 20 bp, Artificial Sequence
  Description of Artificial Sequence: Synthetic oligonucleotide
  Target: LAMA2; (-) strand; PAM type: YTN; PAM sequence: TTT
tacaaattgggtccaataaa

SEQ ID NO: 283748 - DNA, 20 bp, Artificial Sequence
  Description of Artificial Sequence: Synthetic oligonucleotide
  Target: LAMA2; (-) strand; PAM type: YTN; PAM sequence: TTT
ttacaaattgggtccaataa

SEQ ID NO: 283749 - DNA, 20 bp, Artificial Sequence
  Description of Artificial Sequence: Synthetic oligonucleotide
  Target: LAMA2; (-) strand; PAM type: YTN; PAM sequence: CTC
ataaagaaaacaatattttt

SEQ ID NO: 283750 - DNA, 20 bp, Artificial Sequence
  Description of Artificial Sequence: Synthetic oligonucleotide
  Target: LAMA2; (-) strand; PAM type: YTN; PAM sequence: TTC
tcataaagaaaacaatattt

SEQ ID NO: 283751 - DNA, 20 bp, Artificial Sequence
  Description of Artificial Sequence: Synthetic oligonucleotide
  Target: LAMA2; (-) strand; PAM type: YTN; PAM sequence: TTT
ctcataaagaaaacaatatt

SEQ ID NO: 283752 - DNA, 20 bp, Artificial Sequence
  Description of Artificial Sequence: Synthetic oligonucleotide
  Target: LAMA2; (-) strand; PAM type: YTN; PAM sequence: TTT
tctcataaagaaaacaatat

SEQ ID NO: 283753 - DNA, 20 bp, Artificial Sequence
  Description of Artificial Sequence: Synthetic oligonucleotide
  Target: LAMA2; (-) strand; PAM type: YTN; PAM sequence: TTT
ttctcataaagaaaacaata

SEQ ID NO: 283754 - DNA, 20 bp, Artificial Sequence
  Description of Artificial Sequence: Synthetic oligonucleotide
  Target: LAMA2; (-) strand; PAM type: YTN; PAM sequence: CTG
ataatagtcatttttctcat

SEQ ID NO: 283755 - DNA, 20 bp, Artificial Sequence
  Description of Artificial Sequence: Synthetic oligonucleotide
  Target: LAMA2; (-) strand; PAM type: YTN; PAM sequence: TTA
gcacatatctgataatagtc

SEQ ID NO: 283756 - DNA, 20 bp, Artificial Sequence
  Description of Artificial Sequence: Synthetic oligonucleotide
  Target: LAMA2; (-) strand; PAM type: YTN; PAM sequence: TTT
agcacatatctgataatagt

SEQ ID NO: 283757 - DNA, 20 bp, Artificial Sequence
  Description of Artificial Sequence: Synthetic oligonucleotide
  Target: LAMA2; (-) strand; PAM type: YTN; PAM sequence: TTA
aagaaatggaaaaacaacat

SEQ ID NO: 283758 - DNA, 20 bp, Artificial Sequence
  Description of Artificial Sequence: Synthetic oligonucleotide
  Target: LAMA2; (-) strand; PAM type: YTN; PAM sequence: TTG
gacaaaaatacacattaaag

SEQ ID NO: 283759 - DNA, 20 bp, Artificial Sequence
  Description of Artificial Sequence: Synthetic oligonucleotide
  Target: LAMA2; (-) strand; PAM type: YTN; PAM sequence: TTT
ggacaaaaatacacattaaa

SEQ ID NO: 283760 - DNA, 20 bp, Artificial Sequence
  Description of Artificial Sequence: Synthetic oligonucleotide
  Target: LAMA2; (-) strand; PAM type: YTN; PAM sequence: TTA
tttggacaaaaatacacatt

SEQ ID NO: 283761 - DNA, 20 bp, Artificial Sequence
  Description of Artificial Sequence: Synthetic oligonucleotide
  Target: LAMA2; (-) strand; PAM type: YTN; PAM sequence: TTT
atttggacaaaaatacacat

SEQ ID NO: 283762 - DNA, 20 bp, Artificial Sequence
  Description of Artificial Sequence: Synthetic oligonucleotide
  Target: LAMA2; (-) strand; PAM type: YTN; PAM sequence: TTA
atatttatttggacaaaaat

SEQ ID NO: 283763 - DNA, 20 bp, Artificial Sequence
  Description of Artificial Sequence: Synthetic oligonucleotide
  Target: LAMA2; (-) strand; PAM type: YTN; PAM sequence: TTG
ttaatatttatttggacaaa

SEQ ID NO: 283764 - DNA, 20 bp, Artificial Sequence
  Description of Artificial Sequence: Synthetic oligonucleotide
  Target: LAMA2; (-) strand; PAM type: YTN; PAM sequence: TTT
gttaatatttatttggacaa

SEQ ID NO: 283765 - DNA, 20 bp, Artificial Sequence
  Description of Artificial Sequence: Synthetic oligonucleotide
  Target: LAMA2; (-) strand; PAM type: YTN; PAM sequence: TTC
agtataataatatttgttaa

SEQ ID NO: 283766 - DNA, 20 bp, Artificial Sequence
  Description of Artificial Sequence: Synthetic oligonucleotide
  Target: LAMA2; (-) strand; PAM type: YTN; PAM sequence: CTT
cagtataataatatttgtta

SEQ ID NO: 283767 - DNA, 20 bp, Artificial Sequence
  Description of Artificial Sequence: Synthetic oligonucleotide
  Target: LAMA2; (-) strand; PAM type: YTN; PAM sequence: CTC
caacttcagtataataatat

SEQ ID NO: 283768 - DNA, 20 bp, Artificial Sequence
  Description of Artificial Sequence: Synthetic oligonucleotide
  Target: LAMA2; (-) strand; PAM type: YTN; PAM sequence: TTA
gcagaatcctccaacttcag

SEQ ID NO: 283769 - DNA, 20 bp, Artificial Sequence
  Description of Artificial Sequence: Synthetic oligonucleotide
  Target: LAMA2; (-) strand; PAM type: YTN; PAM sequence: TTT
agcagaatcctccaacttca

SEQ ID NO: 283770 - DNA, 20 bp, Artificial Sequence
  Description of Artificial Sequence: Synthetic oligonucleotide
  Target: LAMA2; (-) strand; PAM type: YTN; PAM sequence: TTG
tttagcagaatcctccaact

SEQ ID NO: 283771 - DNA, 20 bp, Artificial Sequence
  Description of Artificial Sequence: Synthetic oligonucleotide
  Target: LAMA2; (-) strand; PAM type: YTN; PAM sequence: CTC
agatatgattgtttagcaga

SEQ ID NO: 283772 - DNA, 20 bp, Artificial Sequence
  Description of Artificial Sequence: Synthetic oligonucleotide
  Target: LAMA2; (-) strand; PAM type: YTN; PAM sequence: TTC
aaaatctcagatatgattgt

SEQ ID NO: 283773 - DNA, 20 bp, Artificial Sequence
  Description of Artificial Sequence: Synthetic oligonucleotide
  Target: LAMA2; (-) strand; PAM type: YTN; PAM sequence: TTT
caaaatctcagatatgattg

SEQ ID NO: 283774 - DNA, 20 bp, Artificial Sequence
  Description of Artificial Sequence: Synthetic oligonucleotide
  Target: LAMA2; (-) strand; PAM type: YTN; PAM sequence: TTT
tcaaaatctcagatatgatt

SEQ ID NO: 283775 - DNA, 20 bp, Artificial Sequence
  Description of Artificial Sequence: Synthetic oligonucleotide
  Target: LAMA2; (-) strand; PAM type: YTN; PAM sequence: TTA
gattttcaaaatctcagata

SEQ ID NO: 283776 - DNA, 20 bp, Artificial Sequence
  Description of Artificial Sequence: Synthetic oligonucleotide
  Target: LAMA2; (-) strand; PAM type: YTN; PAM sequence: TTG
gattagattttcaaaatctc

SEQ ID NO: 283777 - DNA, 20 bp, Artificial Sequence
  Description of Artificial Sequence: Synthetic oligonucleotide
  Target: LAMA2; (-) strand; PAM type: YTN; PAM sequence: TTA
ccaaaatgaatcattggatt

SEQ ID NO: 283778 - DNA, 20 bp, Artificial Sequence
  Description of Artificial Sequence: Synthetic oligonucleotide
  Target: LAMA2; (-) strand; PAM type: YTN; PAM sequence: TTA
ttaccaaaatgaatcattgg

SEQ ID NO: 283779 - DNA, 20 bp, Artificial Sequence
  Description of Artificial Sequence: Synthetic oligonucleotide
  Target: LAMA2; (-) strand; PAM type: YTN; PAM sequence: TTT
attaccaaaatgaatcattg

SEQ ID NO: 283780 - DNA, 20 bp, Artificial Sequence
  Description of Artificial Sequence: Synthetic oligonucleotide
  Target: LAMA2; (-) strand; PAM type: YTN; PAM sequence: TTT
tattaccaaaatgaatcatt

SEQ ID NO: 283781 - DNA, 20 bp, Artificial Sequence
  Description of Artificial Sequence: Synthetic oligonucleotide
  Target: LAMA2; (-) strand; PAM type: YTN; PAM sequence: CTT
ttattaccaaaatgaatcat

SEQ ID NO: 283782 - DNA, 20 bp, Artificial Sequence
  Description of Artificial Sequence: Synthetic oligonucleotide
  Target: LAMA2; (-) strand; PAM type: YTN; PAM sequence: TTA
aaaacttttattaccaaaat

SEQ ID NO: 283783 - DNA, 20 bp, Artificial Sequence
  Description of Artificial Sequence: Synthetic oligonucleotide
  Target: LAMA2; (-) strand; PAM type: YTN; PAM sequence: TTT
aaaaacttttattaccaaaa

SEQ ID NO: 283784 - DNA, 20 bp, Artificial Sequence
  Description of Artificial Sequence: Synthetic oligonucleotide
  Target: LAMA2; (-) strand; PAM type: YTN; PAM sequence: TTA
tttaaaaacttttattacca

SEQ ID NO: 283785 - DNA, 20 bp, Artificial Sequence
  Description of Artificial Sequence: Synthetic oligonucleotide
  Target: LAMA2; (-) strand; PAM type: YTN; PAM sequence: CTT
atttaaaaacttttattacc

SEQ ID NO: 283786 - DNA, 20 bp, Artificial Sequence
  Description of Artificial Sequence: Synthetic oligonucleotide
  Target: LAMA2; (-) strand; PAM type: YTN; PAM sequence: TTC
cacttatttaaaaactttta

SEQ ID NO: 283787 - DNA, 20 bp, Artificial Sequence
  Description of Artificial Sequence: Synthetic oligonucleotide
  Target: LAMA2; (-) strand; PAM type: YTN; PAM sequence: TTG
attccacttatttaaaaact

SEQ ID NO: 283788 - DNA, 20 bp, Artificial Sequence
  Description of Artificial Sequence: Synthetic oligonucleotide
  Target: LAMA2; (-) strand; PAM type: YTN; PAM sequence: CTC
ccattgattccacttattta

SEQ ID NO: 283789 - DNA, 20 bp, Artificial Sequence
  Description of Artificial Sequence: Synthetic oligonucleotide
  Target: LAMA2; (-) strand; PAM type: YTN; PAM sequence: TTA
tcactcccattgattccact

SEQ ID NO: 283790 - DNA, 20 bp, Artificial Sequence
  Description of Artificial Sequence: Synthetic oligonucleotide
  Target: LAMA2; (-) strand; PAM type: YTN; PAM sequence: TTG
ttatcactcccattgattcc

SEQ ID NO: 283791 - DNA, 20 bp, Artificial Sequence
  Description of Artificial Sequence: Synthetic oligonucleotide
  Target: LAMA2; (-) strand; PAM type: YTN; PAM sequence: CTT
gttatcactcccattgattc

SEQ ID NO: 283792 - DNA, 20 bp, Artificial Sequence
  Description of Artificial Sequence: Synthetic oligonucleotide
  Target: LAMA2; (-) strand; PAM type: YTN; PAM sequence: CTC
ttgttatcactcccattgat

SEQ ID NO: 283793 - DNA, 20 bp, Artificial Sequence
  Description of Artificial Sequence: Synthetic oligonucleotide
  Target: LAMA2; (-) strand; PAM type: YTN; PAM sequence: TTA
tgccctcttgttatcactcc

SEQ ID NO: 283794 - DNA, 20 bp, Artificial Sequence
  Description of Artificial Sequence: Synthetic oligonucleotide
  Target: LAMA2; (-) strand; PAM type: YTN; PAM sequence: TTG
taattatgccctcttgttat

SEQ ID NO: 283795 - DNA, 20 bp, Artificial Sequence
  Description of Artificial Sequence: Synthetic oligonucleotide
  Target: LAMA2; (-) strand; PAM type: YTN; PAM sequence: TTT
gtaattatgccctcttgtta

SEQ ID NO: 283796 - DNA, 20 bp, Artificial Sequence
  Description of Artificial Sequence: Synthetic oligonucleotide
  Target: LAMA2; (-) strand; PAM type: YTN; PAM sequence: TTC
catttgtaattatgccctct

SEQ ID NO: 283797 - DNA, 20 bp, Artificial Sequence
  Description of Artificial Sequence: Synthetic oligonucleotide
  Target: LAMA2; (-) strand; PAM type: YTN; PAM sequence: TTA
ttccatttgtaattatgccc

SEQ ID NO: 283798 - DNA, 20 bp, Artificial Sequence
  Description of Artificial Sequence: Synthetic oligonucleotide
  Target: LAMA2; (-) strand; PAM type: YTN; PAM sequence: TTT
attccatttgtaattatgcc

SEQ ID NO: 283799 - DNA, 20 bp, Artificial Sequence
  Description of Artificial Sequence: Synthetic oligonucleotide
  Target: LAMA2; (-) strand; PAM type: YTN; PAM sequence: TTT
tattccatttgtaattatgc

SEQ ID NO: 283800 - DNA, 20 bp, Artificial Sequence
  Description of Artificial Sequence: Synthetic oligonucleotide
  Target: LAMA2; (-) strand; PAM type: YTN; PAM sequence: CTT
ttattccatttgtaattatg

SEQ ID NO: 283801 - DNA, 20 bp, Artificial Sequence
  Description of Artificial Sequence: Synthetic oligonucleotide
  Target: LAMA2; (-) strand; PAM type: YTN; PAM sequence: TTA
gtcttttattccatttgtaa

SEQ ID NO: 283802 - DNA, 20 bp, Artificial Sequence
  Description of Artificial Sequence: Synthetic oligonucleotide
  Target: LAMA2; (-) strand; PAM type: YTN; PAM sequence: CTC
caaagaattagtcttttatt

SEQ ID NO: 283803 - DNA, 20 bp, Artificial Sequence
  Description of Artificial Sequence: Synthetic oligonucleotide
  Target: LAMA2; (-) strand; PAM type: YTN; PAM sequence: CTA
tagagaagaaacctccaaag

SEQ ID NO: 283804 - DNA, 20 bp, Artificial Sequence
  Description of Artificial Sequence: Synthetic oligonucleotide
  Target: LAMA2; (-) strand; PAM type: YTN; PAM sequence: TTC
ctatagagaagaaacctcca

SEQ ID NO: 283805 - DNA, 20 bp, Artificial Sequence
  Description of Artificial Sequence: Synthetic oligonucleotide
  Target: LAMA2; (-) strand; PAM type: YTN; PAM sequence: CTT
cctatagagaagaaacctcc

SEQ ID NO: 283806 - DNA, 20 bp, Artificial Sequence
  Description of Artificial Sequence: Synthetic oligonucleotide
  Target: LAMA2; (-) strand; PAM type: YTN; PAM sequence: TTG
atatcttcctatagagaaga

SEQ ID NO: 283807 - DNA, 20 bp, Artificial Sequence
  Description of Artificial Sequence: Synthetic oligonucleotide
  Target: LAMA2; (-) strand; PAM type: YTN; PAM sequence: TTT
gatatcttcctatagagaag

SEQ ID NO: 283808 - DNA, 20 bp, Artificial Sequence
  Description of Artificial Sequence: Synthetic oligonucleotide
  Target: LAMA2; (-) strand; PAM type: YTN; PAM sequence: TTA
atttgatatcttcctataga

SEQ ID NO: 283809 - DNA, 20 bp, Artificial Sequence
  Description of Artificial Sequence: Synthetic oligonucleotide
  Target: LAMA2; (-) strand; PAM type: YTN; PAM sequence: CTT
aatttgatatcttcctatag

SEQ ID NO: 283810 - DNA, 20 bp, Artificial Sequence
  Description of Artificial Sequence: Synthetic oligonucleotide
  Target: LAMA2; (-) strand; PAM type: YTN; PAM sequence: CTG
acttaatttgatatcttcct

SEQ ID NO: 283811 - DNA, 20 bp, Artificial Sequence
  Description of Artificial Sequence: Synthetic oligonucleotide
  Target: LAMA2; (-) strand; PAM type: YTN; PAM sequence: TTA
tctgacttaatttgatatct

SEQ ID NO: 283812 - DNA, 20 bp, Artificial Sequence
  Description of Artificial Sequence: Synthetic oligonucleotide
  Target: LAMA2; (-) strand; PAM type: YTN; PAM sequence: TTT
atctgacttaatttgatatc

SEQ ID NO: 283813 - DNA, 20 bp, Artificial Sequence
  Description of Artificial Sequence: Synthetic oligonucleotide
  Target: LAMA2; (-) strand; PAM type: YTN; PAM sequence: CTT
tatctgacttaatttgatat

SEQ ID NO: 283814 - DNA, 20 bp, Artificial Sequence
  Description of Artificial Sequence: Synthetic oligonucleotide
  Target: LAMA2; (-) strand; PAM type: YTN; PAM sequence: CTG
atctttatctgacttaattt

SEQ ID NO: 283815 - DNA, 20 bp, Artificial Sequence
  Description of Artificial Sequence: Synthetic oligonucleotide
  Target: LAMA2; (-) strand; PAM type: YTN; PAM sequence: TTG
gtatctgatctttatctgac

SEQ ID NO: 283816 - DNA, 20 bp, Artificial Sequence
  Description of Artificial Sequence: Synthetic oligonucleotide
  Target: LAMA2; (-) strand; PAM type: YTN; PAM sequence: CTT
ggtatctgatctttatctga

SEQ ID NO: 283817 - DNA, 20 bp, Artificial Sequence
  Description of Artificial Sequence: Synthetic oligonucleotide
  Target: LAMA2; (-) strand; PAM type: YTN; PAM sequence: TTC
ttggtatctgatctttatct

SEQ ID NO: 283818 - DNA, 20 bp, Artificial Sequence
  Description of Artificial Sequence: Synthetic oligonucleotide
  Target: LAMA2; (-) strand; PAM type: YTN; PAM sequence: CTT
cttggtatctgatctttatc

SEQ ID NO: 283819 - DNA, 20 bp, Artificial Sequence
  Description of Artificial Sequence: Synthetic oligonucleotide
  Target: LAMA2; (-) strand; PAM type: YTN; PAM sequence: TTC
ttcttggtatctgatcttta

SEQ ID NO: 283820 - DNA, 20 bp, Artificial Sequence
  Description of Artificial Sequence: Synthetic oligonucleotide
  Target: LAMA2; (-) strand; PAM type: YTN; PAM sequence: TTT
cttcttggtatctgatcttt

SEQ ID NO: 283821 - DNA, 20 bp, Artificial Sequence
  Description of Artificial Sequence: Synthetic oligonucleotide
  Target: LAMA2; (-) strand; PAM type: YTN; PAM sequence: TTT
tcttcttggtatctgatctt

SEQ ID NO: 283822 - DNA, 20 bp, Artificial Sequence
  Description of Artificial Sequence: Synthetic oligonucleotide
  Target: LAMA2; (-) strand; PAM type: YTN; PAM sequence: TTG
aacaatgacattttcttctt

SEQ ID NO: 283823 - DNA, 20 bp, Artificial Sequence
  Description of Artificial Sequence: Synthetic oligonucleotide
  Target: LAMA2; (-) strand; PAM type: YTN; PAM sequence: CTA
catgttgaacaatgacattt

SEQ ID NO: 283824 - DNA, 20 bp, Artificial Sequence
  Description of Artificial Sequence: Synthetic oligonucleotide
  Target: LAMA2; (-) strand; PAM type: YTN; PAM sequence: TTC
tacatgttgaacaatgacat

SEQ ID NO: 283825 - DNA, 20 bp, Artificial Sequence
  Description of Artificial Sequence: Synthetic oligonucleotide
  Target: LAMA2; (-) strand; PAM type: YTN; PAM sequence: CTT
ctacatgttgaacaatgaca

SEQ ID NO: 283826 - DNA, 20 bp, Artificial Sequence
  Description of Artificial Sequence: Synthetic oligonucleotide
  Target: LAMA2; (-) strand; PAM type: YTN; PAM sequence: TTG
gatgcttctacatgttgaac

SEQ ID NO: 283827 - DNA, 20 bp, Artificial Sequence
  Description of Artificial Sequence: Synthetic oligonucleotide
  Target: LAMA2; (-) strand; PAM type: YTN; PAM sequence: TTA
ttggatgcttctacatgttg

SEQ ID NO: 283828 - DNA, 20 bp, Artificial Sequence
  Description of Artificial Sequence: Synthetic oligonucleotide
  Target: LAMA2; (-) strand; PAM type: YTN; PAM sequence: TTG
aattattggatgcttctaca

SEQ ID NO: 283829 - DNA, 20 bp, Artificial Sequence
  Description of Artificial Sequence: Synthetic oligonucleotide
  Target: LAMA2; (-) strand; PAM type: YTN; PAM sequence: TTA
tcattgaattattggatgct

SEQ ID NO: 283830 - DNA, 20 bp, Artificial Sequence
  Description of Artificial Sequence: Synthetic oligonucleotide
  Target: LAMA2; (-) strand; PAM type: YTN; PAM sequence: TTA
ttatcattgaattattggat

SEQ ID NO: 283831 - DNA, 20 bp, Artificial Sequence
  Description of Artificial Sequence: Synthetic oligonucleotide
  Target: LAMA2; (-) strand; PAM type: YTN; PAM sequence: TTT
attatcattgaattattgga

SEQ ID NO: 283832 - DNA, 20 bp, Artificial Sequence
  Description of Artificial Sequence: Synthetic oligonucleotide
  Target: LAMA2; (-) strand; PAM type: YTN; PAM sequence: TTT
tattatcattgaattattgg

SEQ ID NO: 283833 - DNA, 20 bp, Artificial Sequence
  Description of Artificial Sequence: Synthetic oligonucleotide
  Target: LAMA2; (-) strand; PAM type: YTN; PAM sequence: TTT
ttattatcattgaattattg

SEQ ID NO: 283834 - DNA, 20 bp, Artificial Sequence
  Description of Artificial Sequence: Synthetic oligonucleotide
  Target: LAMA2; (-) strand; PAM type: YTN; PAM sequence: TTA
aaaatatgtgtttttattat

SEQ ID NO: 283835 - DNA, 20 bp, Artificial Sequence
  Description of Artificial Sequence: Synthetic oligonucleotide
  Target: LAMA2; (-) strand; PAM type: YTN; PAM sequence: TTT
aaaaatatgtgtttttatta

SEQ ID NO: 283836 - DNA, 20 bp, Artificial Sequence
  Description of Artificial Sequence: Synthetic oligonucleotide
  Target: LAMA2; (-) strand; PAM type: YTN; PAM sequence: TTT
taaaaatatgtgtttttatt

SEQ ID NO: 283837 - DNA, 20 bp, Artificial Sequence
  Description of Artificial Sequence: Synthetic oligonucleotide
  Target: LAMA2; (-) strand; PAM type: YTN; PAM sequence: TTC
caatcatattttaaaaatat

SEQ ID NO: 283838 - DNA, 20 bp, Artificial Sequence
  Description of Artificial Sequence: Synthetic oligonucleotide
  Target: LAMA2; (-) strand; PAM type: YTN; PAM sequence: TTT
ccaatcatattttaaaaata

SEQ ID NO: 283839 - DNA, 20 bp, Artificial Sequence
  Description of Artificial Sequence: Synthetic oligonucleotide
  Target: LAMA2; (-) strand; PAM type: YTN; PAM sequence: CTA
tacataaatatatttccaat

SEQ ID NO: 283840 - DNA, 20 bp, Artificial Sequence
  Description of Artificial Sequence: Synthetic oligonucleotide
  Target: LAMA2; (-) strand; PAM type: YTN; PAM sequence: TTG
gcatctatacataaatatat

SEQ ID NO: 283841 - DNA, 20 bp, Artificial Sequence
  Description of Artificial Sequence: Synthetic oligonucleotide
  Target: LAMA2; (-) strand; PAM type: YTN; PAM sequence: TTA
ttggcatctatacataaata

SEQ ID NO: 283842 - DNA, 20 bp, Artificial Sequence
  Description of Artificial Sequence: Synthetic oligonucleotide
  Target: LAMA2; (-) strand; PAM type: YTN; PAM sequence: TTT
attggcatctatacataaat

SEQ ID NO: 283843 - DNA, 20 bp, Artificial Sequence
  Description of Artificial Sequence: Synthetic oligonucleotide
  Target: LAMA2; (-) strand; PAM type: YTN; PAM sequence: TTA
atttattggcatctatacat

SEQ ID NO: 283844 - DNA, 20 bp, Artificial Sequence
  Description of Artificial Sequence: Synthetic oligonucleotide
  Target: LAMA2; (-) strand; PAM type: YTN; PAM sequence: TTT
aatttattggcatctataca

SEQ ID NO: 283845 - DNA, 20 bp, Artificial Sequence
  Description of Artificial Sequence: Synthetic oligonucleotide
  Target: LAMA2; (-) strand; PAM type: YTN; PAM sequence: TTA
aaagcaagaaaatgtattta

SEQ ID NO: 283846 - DNA, 20 bp, Artificial Sequence
  Description of Artificial Sequence: Synthetic oligonucleotide
  Target: LAMA2; (-) strand; PAM type: YTN; PAM sequence: TTA
attaaaagcaagaaaatgta

SEQ ID NO: 283847 - DNA, 20 bp, Artificial Sequence
  Description of Artificial Sequence: Synthetic oligonucleotide
  Target: LAMA2; (-) strand; PAM type: YTN; PAM sequence: TTA
atataaaattaattaaaagc

SEQ ID NO: 283848 - DNA, 20 bp, Artificial Sequence
  Description of Artificial Sequence: Synthetic oligonucleotide
  Target: LAMA2; (-) strand; PAM type: YTN; PAM sequence: TTT
aatataaaattaattaaaag

SEQ ID NO: 283849 - DNA, 20 bp, Artificial Sequence
  Description of Artificial Sequence: Synthetic oligonucleotide
  Target: LAMA2; (-) strand; PAM type: YTN; PAM sequence: TTT
taatataaaattaattaaaa

SEQ ID NO: 283850 - DNA, 20 bp, Artificial Sequence
  Description of Artificial Sequence: Synthetic oligonucleotide
  Target: LAMA2; (-) strand; PAM type: YTN; PAM sequence: TTA
ttttaatataaaattaatta

SEQ ID NO: 283851 - DNA, 20 bp, Artificial Sequence
  Description of Artificial Sequence: Synthetic oligonucleotide
  Target: LAMA2; (-) strand; PAM type: YTN; PAM sequence: TTC
aggttattttaatataaaat

SEQ ID NO: 283852 - DNA, 20 bp, Artificial Sequence
  Description of Artificial Sequence: Synthetic oligonucleotide
  Target: LAMA2; (-) strand; PAM type: YTN; PAM sequence: TTT
caggttattttaatataaaa

SEQ ID NO: 283853 - DNA, 20 bp, Artificial Sequence
  Description of Artificial Sequence: Synthetic oligonucleotide
  Target: LAMA2; (-) strand; PAM type: YTN; PAM sequence: TTG
gatgtgcaatttcaggttat

SEQ ID NO: 283854 - DNA, 20 bp, Artificial Sequence
  Description of Artificial Sequence: Synthetic oligonucleotide
  Target: LAMA2; (-) strand; PAM type: YTN; PAM sequence: CTT
ggatgtgcaatttcaggtta

SEQ ID NO: 283855 - DNA, 20 bp, Artificial Sequence
  Description of Artificial Sequence: Synthetic oligonucleotide
  Target: LAMA2; (-) strand; PAM type: YTN; PAM sequence: TTA
tacttggatgtgcaatttca

SEQ ID NO: 283856 - DNA, 20 bp, Artificial Sequence
  Description of Artificial Sequence: Synthetic oligonucleotide
  Target: LAMA2; (-) strand; PAM type: YTN; PAM sequence: CTT
atacttggatgtgcaatttc

SEQ ID NO: 283857 - DNA, 20 bp, Artificial Sequence
  Description of Artificial Sequence: Synthetic oligonucleotide
  Target: LAMA2; (-) strand; PAM type: YTN; PAM sequence: CTG
agcttatacttggatgtgca

SEQ ID NO: 283858 - DNA, 20 bp, Artificial Sequence
  Description of Artificial Sequence: Synthetic oligonucleotide
  Target: LAMA2; (-) strand; PAM type: YTN; PAM sequence: TTA
tcatccctgagcttatactt

SEQ ID NO: 283859 - DNA, 20 bp, Artificial Sequence
  Description of Artificial Sequence: Synthetic oligonucleotide
  Target: LAMA2; (-) strand; PAM type: YTN; PAM sequence: TTT
atcatccctgagcttatact

SEQ ID NO: 283860 - DNA, 20 bp, Artificial Sequence
  Description of Artificial Sequence: Synthetic oligonucleotide
  Target: LAMA2; (-) strand; PAM type: YTN; PAM sequence: TTT
tatcatccctgagcttatac

SEQ ID NO: 283861 - DNA, 20 bp, Artificial Sequence
  Description of Artificial Sequence: Synthetic oligonucleotide
  Target: LAMA2; (-) strand; PAM type: YTN; PAM sequence: TTA
aataagttttatcatccctg

SEQ ID NO: 283862 - DNA, 20 bp, Artificial Sequence
  Description of Artificial Sequence: Synthetic oligonucleotide
  Target: LAMA2; (-) strand; PAM type: YTN; PAM sequence: CTG
cgaataaaaaacaaaaaaaa

SEQ ID NO: 283863 - DNA, 20 bp, Artificial Sequence
  Description of Artificial Sequence: Synthetic oligonucleotide
  Target: LAMA2; (-) strand; PAM type: YTN; PAM sequence: TTC
tgcgaataaaaaacaaaaaa

SEQ ID NO: 283864 - DNA, 20 bp, Artificial Sequence
  Description of Artificial Sequence: Synthetic oligonucleotide
  Target: LAMA2; (-) strand; PAM type: YTN; PAM sequence: TTT
ctgcgaataaaaaacaaaaa

SEQ ID NO: 283865 - DNA, 20 bp, Artificial Sequence
  Description of Artificial Sequence: Synthetic oligonucleotide
  Target: LAMA2; (-) strand; PAM type: YTN; PAM sequence: TTT
tctgcgaataaaaaacaaaa

SEQ ID NO: 283866 - DNA, 20 bp, Artificial Sequence
  Description of Artificial Sequence: Synthetic oligonucleotide
  Target: LAMA2; (-) strand; PAM type: YTN; PAM sequence: TTC
attttctgcgaataaaaaac

SEQ ID NO: 283867 - DNA, 20 bp, Artificial Sequence
  Description of Artificial Sequence: Synthetic oligonucleotide
  Target: LAMA2; (-) strand; PAM type: YTN; PAM sequence: CTT
cattttctgcgaataaaaaa

SEQ ID NO: 283868 - DNA, 20 bp, Artificial Sequence
  Description of Artificial Sequence: Synthetic oligonucleotide
  Target: LAMA2; (-) strand; PAM type: YTN; PAM sequence: TTA
gatggtcttcattttctgcg

SEQ ID NO: 283869 - DNA, 20 bp, Artificial Sequence
  Description of Artificial Sequence: Synthetic oligonucleotide
  Target: LAMA2; (-) strand; PAM type: YTN; PAM sequence: TTT
agatggtcttcattttctgc

SEQ ID NO: 283870 - DNA, 20 bp, Artificial Sequence
  Description of Artificial Sequence: Synthetic oligonucleotide
  Target: LAMA2; (-) strand; PAM type: YTN; PAM sequence: TTA
agccatttagatggtcttca

SEQ ID NO: 283871 - DNA, 20 bp, Artificial Sequence
  Description of Artificial Sequence: Synthetic oligonucleotide
  Target: LAMA2; (-) strand; PAM type: YTN; PAM sequence: TTT
aagccatttagatggtcttc

SEQ ID NO: 283872 - DNA, 20 bp, Artificial Sequence
  Description of Artificial Sequence: Synthetic oligonucleotide
  Target: LAMA2; (-) strand; PAM type: YTN; PAM sequence: TTT
taagccatttagatggtctt

SEQ ID NO: 283873 - DNA, 20 bp, Artificial Sequence
  Description of Artificial Sequence: Synthetic oligonucleotide
  Target: LAMA2; (-) strand; PAM type: YTN; PAM sequence: TTT
ttaagccatttagatggtct

SEQ ID NO: 283874 - DNA, 20 bp, Artificial Sequence
  Description of Artificial Sequence: Synthetic oligonucleotide
  Target: LAMA2; (-) strand; PAM type: YTN; PAM sequence: CTG
gtttttaagccatttagatg

SEQ ID NO: 283875 - DNA, 20 bp, Artificial Sequence
  Description of Artificial Sequence: Synthetic oligonucleotide
  Target: LAMA2; (-) strand; PAM type: YTN; PAM sequence: CTA
tcctggtttttaagccattt

SEQ ID NO: 283876 - DNA, 20 bp, Artificial Sequence
  Description of Artificial Sequence: Synthetic oligonucleotide
  Target: LAMA2; (-) strand; PAM type: YTN; PAM sequence: TTC
tatcctggtttttaagccat

SEQ ID NO: 283877 - DNA, 20 bp, Artificial Sequence
  Description of Artificial Sequence: Synthetic oligonucleotide
  Target: LAMA2; (-) strand; PAM type: YTN; PAM sequence: TTT
ctatcctggtttttaagcca

SEQ ID NO: 283878 - DNA, 20 bp, Artificial Sequence
  Description of Artificial Sequence: Synthetic oligonucleotide
  Target: LAMA2; (-) strand; PAM type: YTN; PAM sequence: TTT
tctatcctggtttttaagcc

SEQ ID NO: 283879 - DNA, 20 bp, Artificial Sequence
  Description of Artificial Sequence: Synthetic oligonucleotide
  Target: LAMA2; (-) strand; PAM type: YTN; PAM sequence: CTA
gcatcagcattttctatcct

SEQ ID NO: 283880 - DNA, 20 bp, Artificial Sequence
  Description of Artificial Sequence: Synthetic oligonucleotide
  Target: LAMA2; (-) strand; PAM type: YTN; PAM sequence: TTC
tagcatcagcattttctatc

SEQ ID NO: 283881 - DNA, 20 bp, Artificial Sequence
  Description of Artificial Sequence: Synthetic oligonucleotide
  Target: LAMA2; (-) strand; PAM type: YTN; PAM sequence: TTT
ctagcatcagcattttctat

SEQ ID NO: 283882 - DNA, 20 bp, Artificial Sequence
  Description of Artificial Sequence: Synthetic oligonucleotide
  Target: LAMA2; (-) strand; PAM type: YTN; PAM sequence: CTC
aagagatccccatttctagc

SEQ ID NO: 283883 - DNA, 20 bp, Artificial Sequence
  Description of Artificial Sequence: Synthetic oligonucleotide
  Target: LAMA2; (-) strand; PAM type: YTN; PAM sequence: TTC
tcaagagatccccatttcta

SEQ ID NO: 283884 - DNA, 20 bp, Artificial Sequence
  Description of Artificial Sequence: Synthetic oligonucleotide
  Target: LAMA2; (-) strand; PAM type: YTN; PAM sequence: TTC
aaagttctcaagagatcccc

SEQ ID NO: 283885 - DNA, 20 bp, Artificial Sequence
  Description of Artificial Sequence: Synthetic oligonucleotide
  Target: LAMA2; (-) strand; PAM type: YTN; PAM sequence: TTC
ccaaagtgtcattcaaagtt

SEQ ID NO: 283886 - DNA, 20 bp, Artificial Sequence
  Description of Artificial Sequence: Synthetic oligonucleotide
  Target: LAMA2; (-) strand; PAM type: YTN; PAM sequence: TTT
cccaaagtgtcattcaaagt

SEQ ID NO: 283887 - DNA, 20 bp, Artificial Sequence
  Description of Artificial Sequence: Synthetic oligonucleotide
  Target: LAMA2; (-) strand; PAM type: YTN; PAM sequence: CTT
tcccaaagtgtcattcaaag

SEQ ID NO: 283888 - DNA, 20 bp, Artificial Sequence
  Description of Artificial Sequence: Synthetic oligonucleotide
  Target: LAMA2; (-) strand; PAM type: YTN; PAM sequence: CTG
ataactttcccaaagtgtca

SEQ ID NO: 283889 - DNA, 20 bp, Artificial Sequence
  Description of Artificial Sequence: Synthetic oligonucleotide
  Target: LAMA2; (-) strand; PAM type: YTN; PAM sequence: TTG
gaatagctgataactttccc

SEQ ID NO: 283890 - DNA, 20 bp, Artificial Sequence
  Description of Artificial Sequence: Synthetic oligonucleotide
  Target: LAMA2; (-) strand; PAM type: YTN; PAM sequence: TTT
ggaatagctgataactttcc

SEQ ID NO: 283891 - DNA, 20 bp, Artificial Sequence
  Description of Artificial Sequence: Synthetic oligonucleotide
  Target: LAMA2; (-) strand; PAM type: YTN; PAM sequence: TTA
ccatttggaatagctgataa

SEQ ID NO: 283892 - DNA, 20 bp, Artificial Sequence
  Description of Artificial Sequence: Synthetic oligonucleotide
  Target: LAMA2; (-) strand; PAM type: YTN; PAM sequence: CTT
accatttggaatagctgata

SEQ ID NO: 283893 - DNA, 20 bp, Artificial Sequence
  Description of Artificial Sequence: Synthetic oligonucleotide
  Target: LAMA2; (-) strand; PAM type: YTN; PAM sequence: CTG
aatgcttaccatttggaata

SEQ ID NO: 283894 - DNA, 20 bp, Artificial Sequence
  Description of Artificial Sequence: Synthetic oligonucleotide
  Target: LAMA2; (-) strand; PAM type: YTN; PAM sequence: TTG
gtagtgtcctgaatgcttac

SEQ ID NO: 283895 - DNA, 20 bp, Artificial Sequence
  Description of Artificial Sequence: Synthetic oligonucleotide
  Target: LAMA2; (-) strand; PAM type: YTN; PAM sequence: CTG
acacagttggtagtgtcctg

SEQ ID NO: 283896 - DNA, 20 bp, Artificial Sequence
  Description of Artificial Sequence: Synthetic oligonucleotide
  Target: LAMA2; (-) strand; PAM type: YTN; PAM sequence: TTC
aggtcaactgacacagttgg

SEQ ID NO: 283897 - DNA, 20 bp, Artificial Sequence
  Description of Artificial Sequence: Synthetic oligonucleotide
  Target: LAMA2; (-) strand; PAM type: YTN; PAM sequence: CTT
caggtcaactgacacagttg

SEQ ID NO: 283898 - DNA, 20 bp, Artificial Sequence
  Description of Artificial Sequence: Synthetic oligonucleotide
  Target: LAMA2; (-) strand; PAM type: YTN; PAM sequence: TTC
aaaacttcaggtcaactgac

SEQ ID NO: 283899 - DNA, 20 bp, Artificial Sequence
  Description of Artificial Sequence: Synthetic oligonucleotide
  Target: LAMA2; (-) strand; PAM type: YTN; PAM sequence: CTT
caaaacttcaggtcaactga

SEQ ID NO: 283900 - DNA, 20 bp, Artificial Sequence
  Description of Artificial Sequence: Synthetic oligonucleotide
  Target: LAMA2; (-) strand; PAM type: YTN; PAM sequence: TTA
acaacagtcttcaaaacttc

SEQ ID NO: 283901 - DNA, 20 bp, Artificial Sequence
  Description of Artificial Sequence: Synthetic oligonucleotide
  Target: LAMA2; (-) strand; PAM type: YTN; PAM sequence: TTA
gaaaaaaatggtaaaagtta

SEQ ID NO: 283902 - DNA, 20 bp, Artificial Sequence
  Description of Artificial Sequence: Synthetic oligonucleotide
  Target: LAMA2; (-) strand; PAM type: YTN; PAM sequence: CTT
agaaaaaaatggtaaaagtt

SEQ ID NO: 283903 - DNA, 20 bp, Artificial Sequence
  Description of Artificial Sequence: Synthetic oligonucleotide
  Target: LAMA2; (-) strand; PAM type: YTN; PAM sequence: TTC
cagataatagtaccagaata

SEQ ID NO: 283904 - DNA, 20 bp, Artificial Sequence
  Description of Artificial Sequence: Synthetic oligonucleotide
  Target: LAMA2; (-) strand; PAM type: YTN; PAM sequence: TTT
ccagataatagtaccagaat

SEQ ID NO: 283905 - DNA, 20 bp, Artificial Sequence
  Description of Artificial Sequence: Synthetic oligonucleotide
  Target: LAMA2; (-) strand; PAM type: YTN; PAM sequence: CTA
atttccagataatagtacca

SEQ ID NO: 283906 - DNA, 20 bp, Artificial Sequence
  Description of Artificial Sequence: Synthetic oligonucleotide
  Target: LAMA2; (-) strand; PAM type: YTN; PAM sequence: TTC
atgagtaagaaaaacagtat

SEQ ID NO: 283907 - DNA, 20 bp, Artificial Sequence
  Description of Artificial Sequence: Synthetic oligonucleotide
  Target: LAMA2; (-) strand; PAM type: YTN; PAM sequence: CTC
acaaagaagaattcatgagt

SEQ ID NO: 283908 - DNA, 20 bp, Artificial Sequence
  Description of Artificial Sequence: Synthetic oligonucleotide
  Target: LAMA2; (-) strand; PAM type: YTN; PAM sequence: TTC
tcacaaagaagaattcatga

SEQ ID NO: 283909 - DNA, 20 bp, Artificial Sequence
  Description of Artificial Sequence: Synthetic oligonucleotide
  Target: LAMA2; (-) strand; PAM type: YTN; PAM sequence: CTC
attctcacaaagaagaattc

SEQ ID NO: 283910 - DNA, 20 bp, Artificial Sequence
  Description of Artificial Sequence: Synthetic oligonucleotide
  Target: LAMA2; (-) strand; PAM type: YTN; PAM sequence: TTC
tcattctcacaaagaagaat

SEQ ID NO: 283911 - DNA, 20 bp, Artificial Sequence
  Description of Artificial Sequence: Synthetic oligonucleotide
  Target: LAMA2; (-) strand; PAM type: YTN; PAM sequence: TTT
ctcattctcacaaagaagaa

SEQ ID NO: 283912 - DNA, 20 bp, Artificial Sequence
  Description of Artificial Sequence: Synthetic oligonucleotide
  Target: LAMA2; (-) strand; PAM type: YTN; PAM sequence: TTA
gtttctcattctcacaaaga

SEQ ID NO: 283913 - DNA, 20 bp, Artificial Sequence
  Description of Artificial Sequence: Synthetic oligonucleotide
  Target: LAMA2; (-) strand; PAM type: YTN; PAM sequence: TTT
agtttctcattctcacaaag

SEQ ID NO: 283914 - DNA, 20 bp, Artificial Sequence
  Description of Artificial Sequence: Synthetic oligonucleotide
  Target: LAMA2; (-) strand; PAM type: YTN; PAM sequence: CTA
aaggcaataaaagataaaaa

SEQ ID NO: 283915 - DNA, 20 bp, Artificial Sequence
  Description of Artificial Sequence: Synthetic oligonucleotide
  Target: LAMA2; (-) strand; PAM type: YTN; PAM sequence: CTG
gctaaaggcaataaaagata

SEQ ID NO: 283916 - DNA, 20 bp, Artificial Sequence
  Description of Artificial Sequence: Synthetic oligonucleotide
  Target: LAMA2; (-) strand; PAM type: YTN; PAM sequence: CTA
aggatactggctaaaggcaa

SEQ ID NO: 283917 - DNA, 20 bp, Artificial Sequence
  Description of Artificial Sequence: Synthetic oligonucleotide
  Target: LAMA2; (-) strand; PAM type: YTN; PAM sequence: TTC
ctaaggatactggctaaagg

SEQ ID NO: 283918 - DNA, 20 bp, Artificial Sequence
  Description of Artificial Sequence: Synthetic oligonucleotide
  Target: LAMA2; (-) strand; PAM type: YTN; PAM sequence: CTG
taacacattcctaaggatac

SEQ ID NO: 283919 - DNA, 20 bp, Artificial Sequence
  Description of Artificial Sequence: Synthetic oligonucleotide
  Target: LAMA2; (-) strand; PAM type: YTN; PAM sequence: TTC
tgtaacacattcctaaggat

SEQ ID NO: 283920 - DNA, 20 bp, Artificial Sequence
  Description of Artificial Sequence: Synthetic oligonucleotide
  Target: LAMA2; (-) strand; PAM type: YTN; PAM sequence: TTT
ctgtaacacattcctaagga

SEQ ID NO: 283921 - DNA, 20 bp, Artificial Sequence
  Description of Artificial Sequence: Synthetic oligonucleotide
  Target: LAMA2; (-) strand; PAM type: YTN; PAM sequence: CTT
tctgtaacacattcctaagg

SEQ ID NO: 283922 - DNA, 20 bp, Artificial Sequence
  Description of Artificial Sequence: Synthetic oligonucleotide
  Target: LAMA2; (-) strand; PAM type: YTN; PAM sequence: TTC
ctttctgtaacacattccta

SEQ ID NO: 283923 - DNA, 20 bp, Artificial Sequence
  Description of Artificial Sequence: Synthetic oligonucleotide
  Target: LAMA2; (-) strand; PAM type: YTN; PAM sequence: CTT
cctttctgtaacacattcct

SEQ ID NO: 283924 - DNA, 20 bp, Artificial Sequence
  Description of Artificial Sequence: Synthetic oligonucleotide
  Target: LAMA2; (-) strand; PAM type: YTN; PAM sequence: CTA
tatcttcctttctgtaacac

SEQ ID NO: 283925 - DNA, 20 bp, Artificial Sequence
  Description of Artificial Sequence: Synthetic oligonucleotide
  Target: LAMA2; (-) strand; PAM type: YTN; PAM sequence: TTA
taataataagatgtctatat

SEQ ID NO: 283926 - DNA, 20 bp, Artificial Sequence
  Description of Artificial Sequence: Synthetic oligonucleotide
  Target: LAMA2; (-) strand; PAM type: YTN; PAM sequence: TTT
ataataataagatgtctata

SEQ ID NO: 283927 - DNA, 20 bp, Artificial Sequence
  Description of Artificial Sequence: Synthetic oligonucleotide
  Target: LAMA2; (-) strand; PAM type: YTN; PAM sequence: TTT
tataataataagatgtctat

SEQ ID NO: 283928 - DNA, 20 bp, Artificial Sequence
  Description of Artificial Sequence: Synthetic oligonucleotide
  Target: LAMA2; (-) strand; PAM type: YTN; PAM sequence: CTG
aaggatgagttttataataa

SEQ ID NO: 283929 - DNA, 20 bp, Artificial Sequence
  Description of Artificial Sequence: Synthetic oligonucleotide
  Target: LAMA2; (-) strand; PAM type: YTN; PAM sequence: CTG
ccaatactgaaggatgagtt

SEQ ID NO: 283930 - DNA, 20 bp, Artificial Sequence
  Description of Artificial Sequence: Synthetic oligonucleotide
  Target: LAMA2; (-) strand; PAM type: YTN; PAM sequence: CTG
gaaccaatcccctgccaata

SEQ ID NO: 283931 - DNA, 20 bp, Artificial Sequence
  Description of Artificial Sequence: Synthetic oligonucleotide
  Target: LAMA2; (-) strand; PAM type: YTN; PAM sequence: CTG
tgggggggggtcctggaacc

SEQ ID NO: 283932 - DNA, 20 bp, Artificial Sequence
  Description of Artificial Sequence: Synthetic oligonucleotide
  Target: LAMA2; (-) strand; PAM type: YTN; PAM sequence: TTG
atatctgtgggggggggtcc

SEQ ID NO: 283933 - DNA, 20 bp, Artificial Sequence
  Description of Artificial Sequence: Synthetic oligonucleotide
  Target: LAMA2; (-) strand; PAM type: YTN; PAM sequence: TTT
gatatctgtgggggggggtc

SEQ ID NO: 283934 - DNA, 20 bp, Artificial Sequence
  Description of Artificial Sequence: Synthetic oligonucleotide
  Target: LAMA2; (-) strand; PAM type: YTN; PAM sequence: TTT
tgatatctgtgggggggggt

SEQ ID NO: 283935 - DNA, 20 bp, Artificial Sequence
  Description of Artificial Sequence: Synthetic oligonucleotide
  Target: LAMA2; (-) strand; PAM type: YTN; PAM sequence: TTC
aagaattttgatatctgtgg

SEQ ID NO: 283936 - DNA, 20 bp, Artificial Sequence
  Description of Artificial Sequence: Synthetic oligonucleotide
  Target: LAMA2; (-) strand; PAM type: YTN; PAM sequence: TTG
agtattcaagaattttgata

SEQ ID NO: 283937 - DNA, 20 bp, Artificial Sequence
  Description of Artificial Sequence: Synthetic oligonucleotide
  Target: LAMA2; (-) strand; PAM type: YTN; PAM sequence: CTT
gagtattcaagaattttgat

SEQ ID NO: 283938 - DNA, 20 bp, Artificial Sequence
  Description of Artificial Sequence: Synthetic oligonucleotide
  Target: LAMA2; (-) strand; PAM type: YTN; PAM sequence: TTA
taaaagggacttgagtattc

SEQ ID NO: 283939 - DNA, 20 bp, Artificial Sequence
  Description of Artificial Sequence: Synthetic oligonucleotide
  Target: LAMA2; (-) strand; PAM type: YTN; PAM sequence: TTT
ataaaagggacttgagtatt

SEQ ID NO: 283940 - DNA, 20 bp, Artificial Sequence
  Description of Artificial Sequence: Synthetic oligonucleotide
  Target: LAMA2; (-) strand; PAM type: YTN; PAM sequence: TTT
tataaaagggacttgagtat

SEQ ID NO: 283941 - DNA, 20 bp, Artificial Sequence
  Description of Artificial Sequence: Synthetic oligonucleotide
  Target: LAMA2; (-) strand; PAM type: YTN; PAM sequence: CTA
tgccattttataaaagggac

SEQ ID NO: 283942 - DNA, 20 bp, Artificial Sequence
  Description of Artificial Sequence: Synthetic oligonucleotide
  Target: LAMA2; (-) strand; PAM type: YTN; PAM sequence: TTA
tatgcaaatactatgccatt

SEQ ID NO: 283943 - DNA, 20 bp, Artificial Sequence
  Description of Artificial Sequence: Synthetic oligonucleotide
  Target: LAMA2; (-) strand; PAM type: YTN; PAM sequence: CTA
tgcataggttatatgcaaat

SEQ ID NO: 283944 - DNA, 20 bp, Artificial Sequence
  Description of Artificial Sequence: Synthetic oligonucleotide
  Target: LAMA2; (-) strand; PAM type: YTN; PAM sequence: TTA
aagtatatgggaggctatgc

SEQ ID NO: 283945 - DNA, 20 bp, Artificial Sequence
  Description of Artificial Sequence: Synthetic oligonucleotide
  Target: LAMA2; (-) strand; PAM type: YTN; PAM sequence: CTA
gggattaaagtatatgggag

SEQ ID NO: 283946 - DNA, 20 bp, Artificial Sequence
  Description of Artificial Sequence: Synthetic oligonucleotide
  Target: LAMA2; (-) strand; PAM type: YTN; PAM sequence: TTA
taaatgatctagggattaaa

SEQ ID NO: 283947 - DNA, 20 bp, Artificial Sequence
  Description of Artificial Sequence: Synthetic oligonucleotide
  Target: LAMA2; (-) strand; PAM type: YTN; PAM sequence: TTA
ggtattataaatgatctagg

SEQ ID NO: 283948 - DNA, 20 bp, Artificial Sequence
  Description of Artificial Sequence: Synthetic oligonucleotide
  Target: LAMA2; (-) strand; PAM type: YTN; PAM sequence: TTA
tattaggtattataaatgat

SEQ ID NO: 283949 - DNA, 20 bp, Artificial Sequence
  Description of Artificial Sequence: Synthetic oligonucleotide
  Target: LAMA2; (-) strand; PAM type: YTN; PAM sequence: TTA
cattatattaggtattataa

SEQ ID NO: 283950 - DNA, 20 bp, Artificial Sequence
  Description of Artificial Sequence: Synthetic oligonucleotide
  Target: LAMA2; (-) strand; PAM type: YTN; PAM sequence: TTT
acattatattaggtattata

SEQ ID NO: 283951 - DNA, 20 bp, Artificial Sequence
  Description of Artificial Sequence: Synthetic oligonucleotide
  Target: LAMA2; (-) strand; PAM type: YTN; PAM sequence: TTA
catagcatttacattatatt

SEQ ID NO: 283952 - DNA, 20 bp, Artificial Sequence
  Description of Artificial Sequence: Synthetic oligonucleotide
  Target: LAMA2; (-) strand; PAM type: YTN; PAM sequence: TTT
acatagcatttacattatat

SEQ ID NO: 283953 - DNA, 20 bp, Artificial Sequence
  Description of Artificial Sequence: Synthetic oligonucleotide
  Target: LAMA2; (-) strand; PAM type: YTN; PAM sequence: CTG
taagaatttacatagcattt

SEQ ID NO: 283954 - DNA, 20 bp, Artificial Sequence
  Description of Artificial Sequence: Synthetic oligonucleotide
  Target: LAMA2; (-) strand; PAM type: YTN; PAM sequence: TTC
ataaacaatacactgtaaga

SEQ ID NO: 283955 - DNA, 20 bp, Artificial Sequence
  Description of Artificial Sequence: Synthetic oligonucleotide
  Target: LAMA2; (-) strand; PAM type: YTN; PAM sequence: TTT
cataaacaatacactgtaag

SEQ ID NO: 283956 - DNA, 20 bp, Artificial Sequence
  Description of Artificial Sequence: Synthetic oligonucleotide
  Target: LAMA2; (-) strand; PAM type: YTN; PAM sequence: TTA
tttcataaacaatacactgt

SEQ ID NO: 283957 - DNA, 20 bp, Artificial Sequence
  Description of Artificial Sequence: Synthetic oligonucleotide
  Target: LAMA2; (-) strand; PAM type: YTN; PAM sequence: TTG
tcattatttcataaacaata

SEQ ID NO: 283958 - DNA, 20 bp, Artificial Sequence
  Description of Artificial Sequence: Synthetic oligonucleotide
  Target: LAMA2; (-) strand; PAM type: YTN; PAM sequence: CTT
gtcattatttcataaacaat

SEQ ID NO: 283959 - DNA, 20 bp, Artificial Sequence
  Description of Artificial Sequence: Synthetic oligonucleotide
  Target: LAMA2; (-) strand; PAM type: YTN; PAM sequence: TTC
ttgtcattatttcataaaca

SEQ ID NO: 283960 - DNA, 20 bp, Artificial Sequence
  Description of Artificial Sequence: Synthetic oligonucleotide
  Target: LAMA2; (-) strand; PAM type: YTN; PAM sequence: TTT
cttgtcattatttcataaac

SEQ ID NO: 283961 - DNA, 20 bp, Artificial Sequence
  Description of Artificial Sequence: Synthetic oligonucleotide
  Target: LAMA2; (-) strand; PAM type: YTN; PAM sequence: TTT
tcttgtcattatttcataaa

SEQ ID NO: 283962 - DNA, 20 bp, Artificial Sequence
  Description of Artificial Sequence: Synthetic oligonucleotide
  Target: LAMA2; (-) strand; PAM type: YTN; PAM sequence: TTT
ttcttgtcattatttcataa

SEQ ID NO: 283963 - DNA, 20 bp, Artificial Sequence
  Description of Artificial Sequence: Synthetic oligonucleotide
  Target: LAMA2; (-) strand; PAM type: YTN; PAM sequence: TTT
tttcttgtcattatttcata

SEQ ID NO: 283964 - DNA, 20 bp, Artificial Sequence
  Description of Artificial Sequence: Synthetic oligonucleotide
  Target: LAMA2; (-) strand; PAM type: YTN; PAM sequence: CTT
ttttcttgtcattatttcat

SEQ ID NO: 283965 - DNA, 20 bp, Artificial Sequence
  Description of Artificial Sequence: Synthetic oligonucleotide
  Target: LAMA2; (-) strand; PAM type: YTN; PAM sequence: CTG
aacatggacaaacttttttc

SEQ ID NO: 283966 - DNA, 20 bp, Artificial Sequence
  Description of Artificial Sequence: Synthetic oligonucleotide
  Target: LAMA2; (-) strand; PAM type: YTN; PAM sequence: CTG
tactgaacatggacaaactt

SEQ ID NO: 283967 - DNA, 20 bp, Artificial Sequence
  Description of Artificial Sequence: Synthetic oligonucleotide
  Target: LAMA2; (-) strand; PAM type: YTN; PAM sequence: TTG
tgtctgtactgaacatggac

SEQ ID NO: 283968 - DNA, 20 bp, Artificial Sequence
  Description of Artificial Sequence: Synthetic oligonucleotide
  Target: LAMA2; (-) strand; PAM type: YTN; PAM sequence: TTA
ggggaaaaaatggttgtgtc

SEQ ID NO: 283969 - DNA, 20 bp, Artificial Sequence
  Description of Artificial Sequence: Synthetic oligonucleotide
  Target: LAMA2; (-) strand; PAM type: YTN; PAM sequence: TTT
aggggaaaaaatggttgtgt

SEQ ID NO: 283970 - DNA, 20 bp, Artificial Sequence
  Description of Artificial Sequence: Synthetic oligonucleotide
  Target: LAMA2; (-) strand; PAM type: YTN; PAM sequence: TTG
gatatttaggggaaaaaatg

SEQ ID NO: 283971 - DNA, 20 bp, Artificial Sequence
  Description of Artificial Sequence: Synthetic oligonucleotide
  Target: LAMA2; (-) strand; PAM type: YTN; PAM sequence: TTT
ggatatttaggggaaaaaat

SEQ ID NO: 283972 - DNA, 20 bp, Artificial Sequence
  Description of Artificial Sequence: Synthetic oligonucleotide
  Target: LAMA2; (-) strand; PAM type: YTN; PAM sequence: TTG
gatatttggatatttagggg

SEQ ID NO: 283973 - DNA, 20 bp, Artificial Sequence
  Description of Artificial Sequence: Synthetic oligonucleotide
  Target: LAMA2; (-) strand; PAM type: YTN; PAM sequence: TTG
gagagttggatatttggata

SEQ ID NO: 283974 - DNA, 20 bp, Artificial Sequence
  Description of Artificial Sequence: Synthetic oligonucleotide
  Target: LAMA2; (-) strand; PAM type: YTN; PAM sequence: CTT
ggagagttggatatttggat

SEQ ID NO: 283975 - DNA, 20 bp, Artificial Sequence
  Description of Artificial Sequence: Synthetic oligonucleotide
  Target: LAMA2; (-) strand; PAM type: YTN; PAM sequence: TTC
aaccaaccttggagagttgg

SEQ ID NO: 283976 - DNA, 20 bp, Artificial Sequence
  Description of Artificial Sequence: Synthetic oligonucleotide
  Target: LAMA2; (-) strand; PAM type: YTN; PAM sequence: CTG
taaattcaaccaaccttgga

SEQ ID NO: 283977 - DNA, 20 bp, Artificial Sequence
  Description of Artificial Sequence: Synthetic oligonucleotide
  Target: LAMA2; (-) strand; PAM type: YTN; PAM sequence: CTG
tatctgtaaattcaaccaac

SEQ ID NO: 283978 - DNA, 20 bp, Artificial Sequence
  Description of Artificial Sequence: Synthetic oligonucleotide
  Target: LAMA2; (-) strand; PAM type: YTN; PAM sequence: CTC
tgtatctgtaaattcaacca

SEQ ID NO: 283979 - DNA, 20 bp, Artificial Sequence
  Description of Artificial Sequence: Synthetic oligonucleotide
  Target: LAMA2; (-) strand; PAM type: YTN; PAM sequence: CTG
tgtcagtgggctctgtatct

SEQ ID NO: 283980 - DNA, 20 bp, Artificial Sequence
  Description of Artificial Sequence: Synthetic oligonucleotide
  Target: LAMA2; (-) strand; PAM type: YTN; PAM sequence: CTC
tgtgtcagtgggctctgtat

SEQ ID NO: 283981 - DNA, 20 bp, Artificial Sequence
  Description of Artificial Sequence: Synthetic oligonucleotide
  Target: LAMA2; (-) strand; PAM type: YTN; PAM sequence: TTG
tccctctgtgtcagtgggct

SEQ ID NO: 283982 - DNA, 20 bp, Artificial Sequence
  Description of Artificial Sequence: Synthetic oligonucleotide
  Target: LAMA2; (-) strand; PAM type: YTN; PAM sequence: CTG
aaacacagaagacaatacag

SEQ ID NO: 283983 - DNA, 20 bp, Artificial Sequence
  Description of Artificial Sequence: Synthetic oligonucleotide
  Target: LAMA2; (-) strand; PAM type: YTN; PAM sequence: TTG
ggctgaaacacagaagacaa

SEQ ID NO: 283984 - DNA, 20 bp, Artificial Sequence
  Description of Artificial Sequence: Synthetic oligonucleotide
  Target: LAMA2; (-) strand; PAM type: YTN; PAM sequence: CTT
gggctgaaacacagaagaca

SEQ ID NO: 283985 - DNA, 20 bp, Artificial Sequence
  Description of Artificial Sequence: Synthetic oligonucleotide
  Target: LAMA2; (-) strand; PAM type: YTN; PAM sequence: TTC
ttgggctgaaacacagaaga

SEQ ID NO: 283986 - DNA, 20 bp, Artificial Sequence
  Description of Artificial Sequence: Synthetic oligonucleotide
  Target: LAMA2; (-) strand; PAM type: YTN; PAM sequence: TTT
cttgggctgaaacacagaag

SEQ ID NO: 283987 - DNA, 20 bp, Artificial Sequence
  Description of Artificial Sequence: Synthetic oligonucleotide
  Target: LAMA2; (-) strand; PAM type: YTN; PAM sequence: CTA
atacacgatttcttgggctg

SEQ ID NO: 283988 - DNA, 20 bp, Artificial Sequence
  Description of Artificial Sequence: Synthetic oligonucleotide
  Target: LAMA2; (-) strand; PAM type: YTN; PAM sequence: TTC
actaatacacgatttcttgg

SEQ ID NO: 283989 - DNA, 20 bp, Artificial Sequence
  Description of Artificial Sequence: Synthetic oligonucleotide
  Target: LAMA2; (-) strand; PAM type: YTN; PAM sequence: TTT
cactaatacacgatttcttg

SEQ ID NO: 283990 - DNA, 20 bp, Artificial Sequence
  Description of Artificial Sequence: Synthetic oligonucleotide
  Target: LAMA2; (-) strand; PAM type: YTN; PAM sequence: CTA
tttcactaatacacgatttc

SEQ ID NO: 283991 - DNA, 20 bp, Artificial Sequence
  Description of Artificial Sequence: Synthetic oligonucleotide
  Target: LAMA2; (-) strand; PAM type: YTN; PAM sequence: TTC
tatttcactaatacacgatt

SEQ ID NO: 283992 - DNA, 20 bp, Artificial Sequence
  Description of Artificial Sequence: Synthetic oligonucleotide
  Target: LAMA2; (-) strand; PAM type: YTN; PAM sequence: TTA
ttctatttcactaatacacg

SEQ ID NO: 283993 - DNA, 20 bp, Artificial Sequence
  Description of Artificial Sequence: Synthetic oligonucleotide
  Target: LAMA2; (-) strand; PAM type: YTN; PAM sequence: TTT
attctatttcactaatacac

SEQ ID NO: 283994 - DNA, 20 bp, Artificial Sequence
  Description of Artificial Sequence: Synthetic oligonucleotide
  Target: LAMA2; (-) strand; PAM type: YTN; PAM sequence: CTA
tgtgatttattctatttcac

SEQ ID NO: 283995 - DNA, 20 bp, Artificial Sequence
  Description of Artificial Sequence: Synthetic oligonucleotide
  Target: LAMA2; (-) strand; PAM type: YTN; PAM sequence: TTA
gtgtctatgtgatttattct

SEQ ID NO: 283996 - DNA, 20 bp, Artificial Sequence
  Description of Artificial Sequence: Synthetic oligonucleotide
  Target: LAMA2; (-) strand; PAM type: YTN; PAM sequence: TTA
gagattagtgtctatgtgat

SEQ ID NO: 283997 - DNA, 20 bp, Artificial Sequence
  Description of Artificial Sequence: Synthetic oligonucleotide
  Target: LAMA2; (-) strand; PAM type: YTN; PAM sequence: TTT
agagattagtgtctatgtga

SEQ ID NO: 283998 - DNA, 20 bp, Artificial Sequence
  Description of Artificial Sequence: Synthetic oligonucleotide
  Target: LAMA2; (-) strand; PAM type: YTN; PAM sequence: TTT
tagagattagtgtctatgtg

SEQ ID NO: 283999 - DNA, 20 bp, Artificial Sequence
  Description of Artificial Sequence: Synthetic oligonucleotide
  Target: LAMA2; (-) strand; PAM type: YTN; PAM sequence: TTG
tggtggtacatcagtatttt

SEQ ID NO: 284000 - DNA, 20 bp, Artificial Sequence
  Description of Artificial Sequence: Synthetic oligonucleotide
  Target: LAMA2; (-) strand; PAM type: YTN; PAM sequence: TTT
gtggtggtacatcagtattt

SEQ ID NO: 284001 - DNA, 20 bp, Artificial Sequence
  Description of Artificial Sequence: Synthetic oligonucleotide
  Target: LAMA2; (-) strand; PAM type: YTN; PAM sequence: CTT
tgtggtggtacatcagtatt

SEQ ID NO: 284002 - DNA, 20 bp, Artificial Sequence
  Description of Artificial Sequence: Synthetic oligonucleotide
  Target: LAMA2; (-) strand; PAM type: YTN; PAM sequence: CTG
tgtctttgtggtggtacatc

SEQ ID NO: 284003 - DNA, 20 bp, Artificial Sequence
  Description of Artificial Sequence: Synthetic oligonucleotide
  Target: LAMA2; (-) strand; PAM type: YTN; PAM sequence: TTA
ataaactgtgtctttgtggt

SEQ ID NO: 284004 - DNA, 20 bp, Artificial Sequence
  Description of Artificial Sequence: Synthetic oligonucleotide
  Target: LAMA2; (-) strand; PAM type: YTN; PAM sequence: TTT
aataaactgtgtctttgtgg

SEQ ID NO: 284005 - DNA, 20 bp, Artificial Sequence
  Description of Artificial Sequence: Synthetic oligonucleotide
  Target: LAMA2; (-) strand; PAM type: YTN; PAM sequence: CTT
taataaactgtgtctttgtg

SEQ ID NO: 284006 - DNA, 20 bp, Artificial Sequence
  Description of Artificial Sequence: Synthetic oligonucleotide
  Target: LAMA2; (-) strand; PAM type: YTN; PAM sequence: CTG
caggtactttaataaactgt

SEQ ID NO: 284007 - DNA, 20 bp, Artificial Sequence
  Description of Artificial Sequence: Synthetic oligonucleotide
  Target: LAMA2; (-) strand; PAM type: YTN; PAM sequence: TTA
ctgcaggtactttaataaac

SEQ ID NO: 284008 - DNA, 20 bp, Artificial Sequence
  Description of Artificial Sequence: Synthetic oligonucleotide
  Target: LAMA2; (-) strand; PAM type: YTN; PAM sequence: CTA
ttactgcaggtactttaata

SEQ ID NO: 284009 - DNA, 20 bp, Artificial Sequence
  Description of Artificial Sequence: Synthetic oligonucleotide
  Target: LAMA2; (-) strand; PAM type: YTN; PAM sequence: CTA
tcacctattactgcaggtac

SEQ ID NO: 284010 - DNA, 20 bp, Artificial Sequence
  Description of Artificial Sequence: Synthetic oligonucleotide
  Target: LAMA2; (-) strand; PAM type: YTN; PAM sequence: TTA
tcaagagagaatgcagtggg

SEQ ID NO: 284011 - DNA, 20 bp, Artificial Sequence
  Description of Artificial Sequence: Synthetic oligonucleotide
  Target: LAMA2; (-) strand; PAM type: YTN; PAM sequence: TTT
atcaagagagaatgcagtgg

SEQ ID NO: 284012 - DNA, 20 bp, Artificial Sequence
  Description of Artificial Sequence: Synthetic oligonucleotide
  Target: LAMA2; (-) strand; PAM type: YTN; PAM sequence: TTT
tatcaagagagaatgcagtg

SEQ ID NO: 284013 - DNA, 20 bp, Artificial Sequence
  Description of Artificial Sequence: Synthetic oligonucleotide
  Target: LAMA2; (-) strand; PAM type: YTN; PAM sequence: TTG
aattttatcaagagagaatg

SEQ ID NO: 284014 - DNA, 20 bp, Artificial Sequence
  Description of Artificial Sequence: Synthetic oligonucleotide
  Target: LAMA2; (-) strand; PAM type: YTN; PAM sequence: TTA
aagaaattgaattttatcaa

SEQ ID NO: 284015 - DNA, 20 bp, Artificial Sequence
  Description of Artificial Sequence: Synthetic oligonucleotide
  Target: LAMA2; (-) strand; PAM type: YTN; PAM sequence: TTG
gaatagttaaagaaattgaa

SEQ ID NO: 284016 - DNA, 20 bp, Artificial Sequence
  Description of Artificial Sequence: Synthetic oligonucleotide
  Target: LAMA2; (-) strand; PAM type: YTN; PAM sequence: TTG
aaagttggaatagttaaaga

SEQ ID NO: 284017 - DNA, 20 bp, Artificial Sequence
  Description of Artificial Sequence: Synthetic oligonucleotide
  Target: LAMA2; (-) strand; PAM type: YTN; PAM sequence: TTT
gaaagttggaatagttaaag

SEQ ID NO: 284018 - DNA, 20 bp, Artificial Sequence
  Description of Artificial Sequence: Synthetic oligonucleotide
  Target: LAMA2; (-) strand; PAM type: YTN; PAM sequence: TTT
tgaaagttggaatagttaaa

SEQ ID NO: 284019 - DNA, 20 bp, Artificial Sequence
  Description of Artificial Sequence: Synthetic oligonucleotide
  Target: LAMA2; (-) strand; PAM type: YTN; PAM sequence: TTT
ttgaaagttggaatagttaa

SEQ ID NO: 284020 - DNA, 20 bp, Artificial Sequence
  Description of Artificial Sequence: Synthetic oligonucleotide
  Target: LAMA2; (-) strand; PAM type: YTN; PAM sequence: CTA
atgtttttgaaagttggaat

SEQ ID NO: 284021 - DNA, 20 bp, Artificial Sequence
  Description of Artificial Sequence: Synthetic oligonucleotide
  Target: LAMA2; (-) strand; PAM type: YTN; PAM sequence: TTG
accactaatgtttttgaaag

SEQ ID NO: 284022 - DNA, 20 bp, Artificial Sequence
  Description of Artificial Sequence: Synthetic oligonucleotide
  Target: LAMA2; (-) strand; PAM type: YTN; PAM sequence: TTT
gaccactaatgtttttgaaa

SEQ ID NO: 284023 - DNA, 20 bp, Artificial Sequence
  Description of Artificial Sequence: Synthetic oligonucleotide
  Target: LAMA2; (-) strand; PAM type: YTN; PAM sequence: TTA
cagacatggtttgaccacta

SEQ ID NO: 284024 - DNA, 20 bp, Artificial Sequence
  Description of Artificial Sequence: Synthetic oligonucleotide
  Target: LAMA2; (-) strand; PAM type: YTN; PAM sequence: CTA
ataggtagaaagatattaca

SEQ ID NO: 284025 - DNA, 20 bp, Artificial Sequence
  Description of Artificial Sequence: Synthetic oligonucleotide
  Target: LAMA2; (-) strand; PAM type: YTN; PAM sequence: TTC
taataggtagaaagatatta

SEQ ID NO: 284026 - DNA, 20 bp, Artificial Sequence
  Description of Artificial Sequence: Synthetic oligonucleotide
  Target: LAMA2; (-) strand; PAM type: YTN; PAM sequence: TTC
cagcagttctaataggtaga

SEQ ID NO: 284027 - DNA, 20 bp, Artificial Sequence
  Description of Artificial Sequence: Synthetic oligonucleotide
  Target: LAMA2; (-) strand; PAM type: YTN; PAM sequence: TTT
ccagcagttctaataggtag

SEQ ID NO: 284028 - DNA, 20 bp, Artificial Sequence
  Description of Artificial Sequence: Synthetic oligonucleotide
  Target: LAMA2; (-) strand; PAM type: YTN; PAM sequence: CTA
ataccatgcaaaaatttcca

SEQ ID NO: 284029 - DNA, 20 bp, Artificial Sequence
  Description of Artificial Sequence: Synthetic oligonucleotide
  Target: LAMA2; (-) strand; PAM type: YTN; PAM sequence: TTC
aggaactaataccatgcaaa

SEQ ID NO: 284030 - DNA, 20 bp, Artificial Sequence
  Description of Artificial Sequence: Synthetic oligonucleotide
  Target: LAMA2; (-) strand; PAM type: YTN; PAM sequence: TTT
caggaactaataccatgcaa

SEQ ID NO: 284031 - DNA, 20 bp, Artificial Sequence
  Description of Artificial Sequence: Synthetic oligonucleotide
  Target: LAMA2; (-) strand; PAM type: YTN; PAM sequence: CTT
tcaggaactaataccatgca

SEQ ID NO: 284032 - DNA, 20 bp, Artificial Sequence
  Description of Artificial Sequence: Synthetic oligonucleotide
  Target: LAMA2; (-) strand; PAM type: YTN; PAM sequence: TTA
aaataacgtgtgctttcagg

SEQ ID NO: 284033 - DNA, 20 bp, Artificial Sequence
  Description of Artificial Sequence: Synthetic oligonucleotide
  Target: LAMA2; (-) strand; PAM type: YTN; PAM sequence: TTT
aaaataacgtgtgctttcag

SEQ ID NO: 284034 - DNA, 20 bp, Artificial Sequence
  Description of Artificial Sequence: Synthetic oligonucleotide
  Target: LAMA2; (-) strand; PAM type: YTN; PAM sequence: CTT
taaaataacgtgtgctttca

SEQ ID NO: 284035 - DNA, 20 bp, Artificial Sequence
  Description of Artificial Sequence: Synthetic oligonucleotide
  Target: LAMA2; (-) strand; PAM type: YTN; PAM sequence: TTA
acaatataaaaatagtaaaa

SEQ ID NO: 284036 - DNA, 20 bp, Artificial Sequence
  Description of Artificial Sequence: Synthetic oligonucleotide
  Target: LAMA2; (-) strand; PAM type: YTN; PAM sequence: TTT
aacaatataaaaatagtaaa

SEQ ID NO: 284037 - DNA, 20 bp, Artificial Sequence
  Description of Artificial Sequence: Synthetic oligonucleotide
  Target: LAMA2; (-) strand; PAM type: YTN; PAM sequence: CTT
taacaatataaaaatagtaa

SEQ ID NO: 284038 - DNA, 20 bp, Artificial Sequence
  Description of Artificial Sequence: Synthetic oligonucleotide
  Target: LAMA2; (-) strand; PAM type: YTN; PAM sequence: TTA
tatcatgctttaacaatata

SEQ ID NO: 284039 - DNA, 20 bp, Artificial Sequence
  Description of Artificial Sequence: Synthetic oligonucleotide
  Target: LAMA2; (-) strand; PAM type: YTN; PAM sequence: TTA
ttatatcatgctttaacaat

SEQ ID NO: 284040 - DNA, 20 bp, Artificial Sequence
  Description of Artificial Sequence: Synthetic oligonucleotide
  Target: LAMA2; (-) strand; PAM type: YTN; PAM sequence: TTG
ttattatatcatgctttaac

SEQ ID NO: 284041 - DNA, 20 bp, Artificial Sequence
  Description of Artificial Sequence: Synthetic oligonucleotide
  Target: LAMA2; (-) strand; PAM type: YTN; PAM sequence: TTG
ttgttattatatcatgcttt

SEQ ID NO: 284042 - DNA, 20 bp, Artificial Sequence
  Description of Artificial Sequence: Synthetic oligonucleotide
  Target: LAMA2; (-) strand; PAM type: YTN; PAM sequence: TTT
gttgttattatatcatgctt

SEQ ID NO: 284043 - DNA, 20 bp, Artificial Sequence
  Description of Artificial Sequence: Synthetic oligonucleotide
  Target: LAMA2; (-) strand; PAM type: YTN; PAM sequence: CTT
tgttgttattatatcatgct

SEQ ID NO: 284044 - DNA, 20 bp, Artificial Sequence
  Description of Artificial Sequence: Synthetic oligonucleotide
  Target: LAMA2; (-) strand; PAM type: YTN; PAM sequence: TTA
taatctttgttgttattata

SEQ ID NO: 284045 - DNA, 20 bp, Artificial Sequence
  Description of Artificial Sequence: Synthetic oligonucleotide
  Target: LAMA2; (-) strand; PAM type: YTN; PAM sequence: TTT
ataatctttgttgttattat

SEQ ID NO: 284046 - DNA, 20 bp, Artificial Sequence
  Description of Artificial Sequence: Synthetic oligonucleotide
  Target: LAMA2; (-) strand; PAM type: YTN; PAM sequence: CTC
aataagtgtttataatcttt

SEQ ID NO: 284047 - DNA, 20 bp, Artificial Sequence
  Description of Artificial Sequence: Synthetic oligonucleotide
  Target: LAMA2; (-) strand; PAM type: YTN; PAM sequence: TTA
agtactcaataagtgtttat

SEQ ID NO: 284048 - DNA, 20 bp, Artificial Sequence
  Description of Artificial Sequence: Synthetic oligonucleotide
  Target: LAMA2; (-) strand; PAM type: YTN; PAM sequence: TTA
acataagtatattaagtact

SEQ ID NO: 284049 - DNA, 20 bp, Artificial Sequence
  Description of Artificial Sequence: Synthetic oligonucleotide
  Target: LAMA2; (-) strand; PAM type: YTN; PAM sequence: CTT
aacataagtatattaagtac

SEQ ID NO: 284050 - DNA, 20 bp, Artificial Sequence
  Description of Artificial Sequence: Synthetic oligonucleotide
  Target: LAMA2; (-) strand; PAM type: YTN; PAM sequence: TTA
catacacttaacataagtat

SEQ ID NO: 284051 - DNA, 20 bp, Artificial Sequence
  Description of Artificial Sequence: Synthetic oligonucleotide
  Target: LAMA2; (-) strand; PAM type: YTN; PAM sequence: TTG
gtatgaggattacatacact

SEQ ID NO: 284052 - DNA, 20 bp, Artificial Sequence
  Description of Artificial Sequence: Synthetic oligonucleotide
  Target: LAMA2; (-) strand; PAM type: YTN; PAM sequence: CTC
caattggtatgaggattaca

SEQ ID NO: 284053 - DNA, 20 bp, Artificial Sequence
  Description of Artificial Sequence: Synthetic oligonucleotide
  Target: LAMA2; (-) strand; PAM type: YTN; PAM sequence: TTG
ctccaattggtatgaggatt

SEQ ID NO: 284054 - DNA, 20 bp, Artificial Sequence
  Description of Artificial Sequence: Synthetic oligonucleotide
  Target: LAMA2; (-) strand; PAM type: YTN; PAM sequence: TTT
gctccaattggtatgaggat

SEQ ID NO: 284055 - DNA, 20 bp, Artificial Sequence
  Description of Artificial Sequence: Synthetic oligonucleotide
  Target: LAMA2; (-) strand; PAM type: YTN; PAM sequence: TTT
tgctccaattggtatgagga

SEQ ID NO: 284056 - DNA, 20 bp, Artificial Sequence
  Description of Artificial Sequence: Synthetic oligonucleotide
  Target: LAMA2; (-) strand; PAM type: YTN; PAM sequence: TTT
ttgctccaattggtatgagg

SEQ ID NO: 284057 - DNA, 20 bp, Artificial Sequence
  Description of Artificial Sequence: Synthetic oligonucleotide
  Target: LAMA2; (-) strand; PAM type: YTN; PAM sequence: TTG
atgcaagcaaatgaagcaaa

SEQ ID NO: 284058 - DNA, 20 bp, Artificial Sequence
  Description of Artificial Sequence: Synthetic oligonucleotide
  Target: LAMA2; (-) strand; PAM type: YTN; PAM sequence: TTG
agatagatatatatatatat

SEQ ID NO: 284059 - DNA, 20 bp, Artificial Sequence
  Description of Artificial Sequence: Synthetic oligonucleotide
  Target: LAMA2; (-) strand; PAM type: YTN; PAM sequence: CTA
tataaccaattgagatagat

SEQ ID NO: 284060 - DNA, 20 bp, Artificial Sequence
  Description of Artificial Sequence: Synthetic oligonucleotide
  Target: LAMA2; (-) strand; PAM type: YTN; PAM sequence: TTA
tctatataaccaattgagat

SEQ ID NO: 284061 - DNA, 20 bp, Artificial Sequence
  Description of Artificial Sequence: Synthetic oligonucleotide
  Target: LAMA2; (-) strand; PAM type: YTN; PAM sequence: TTA
tgttatctatataaccaatt

SEQ ID NO: 284062 - DNA, 20 bp, Artificial Sequence
  Description of Artificial Sequence: Synthetic oligonucleotide
  Target: LAMA2; (-) strand; PAM type: YTN; PAM sequence: CTT
atgttatctatataaccaat

SEQ ID NO: 284063 - DNA, 20 bp, Artificial Sequence
  Description of Artificial Sequence: Synthetic oligonucleotide
  Target: LAMA2; (-) strand; PAM type: YTN; PAM sequence: CTA
tacttatgttatctatataa

SEQ ID NO: 284064 - DNA, 20 bp, Artificial Sequence
  Description of Artificial Sequence: Synthetic oligonucleotide
  Target: LAMA2; (-) strand; PAM type: YTN; PAM sequence: TTA
tctatacttatgttatctat

SEQ ID NO: 284065 - DNA, 20 bp, Artificial Sequence
  Description of Artificial Sequence: Synthetic oligonucleotide
  Target: LAMA2; (-) strand; PAM type: YTN; PAM sequence: CTA
tgttatctatacttatgtta

SEQ ID NO: 284066 - DNA, 20 bp, Artificial Sequence
  Description of Artificial Sequence: Synthetic oligonucleotide
  Target: LAMA2; (-) strand; PAM type: YTN; PAM sequence: TTA
cctatgttatctatacttat

SEQ ID NO: 284067 - DNA, 20 bp, Artificial Sequence
  Description of Artificial Sequence: Synthetic oligonucleotide
  Target: LAMA2; (-) strand; PAM type: YTN; PAM sequence: CTG
aatgttacctatgttatcta

SEQ ID NO: 284068 - DNA, 20 bp, Artificial Sequence
  Description of Artificial Sequence: Synthetic oligonucleotide
  Target: LAMA2; (-) strand; PAM type: YTN; PAM sequence: TTC
tgaatgttacctatgttatc

SEQ ID NO: 284069 - DNA, 20 bp, Artificial Sequence
  Description of Artificial Sequence: Synthetic oligonucleotide
  Target: LAMA2; (-) strand; PAM type: YTN; PAM sequence: CTA
ttctgaatgttacctatgtt

SEQ ID NO: 284070 - DNA, 20 bp, Artificial Sequence
  Description of Artificial Sequence: Synthetic oligonucleotide
  Target: LAMA2; (-) strand; PAM type: YTN; PAM sequence: TTA
aagtagtgaagtgactattc

SEQ ID NO: 284071 - DNA, 20 bp, Artificial Sequence
  Description of Artificial Sequence: Synthetic oligonucleotide
  Target: LAMA2; (-) strand; PAM type: YTN; PAM sequence: CTT
aaagtagtgaagtgactatt

SEQ ID NO: 284072 - DNA, 20 bp, Artificial Sequence
  Description of Artificial Sequence: Synthetic oligonucleotide
  Target: LAMA2; (-) strand; PAM type: YTN; PAM sequence: CTC
ttaaagtagtgaagtgacta

SEQ ID NO: 284073 - DNA, 20 bp, Artificial Sequence
  Description of Artificial Sequence: Synthetic oligonucleotide
  Target: LAMA2; (-) strand; PAM type: YTN; PAM sequence: TTA
gctcttaaagtagtgaagtg

SEQ ID NO: 284074 - DNA, 20 bp, Artificial Sequence
  Description of Artificial Sequence: Synthetic oligonucleotide
  Target: LAMA2; (-) strand; PAM type: YTN; PAM sequence: CTA
attagctcttaaagtagtga

SEQ ID NO: 284075 - DNA, 20 bp, Artificial Sequence
  Description of Artificial Sequence: Synthetic oligonucleotide
  Target: LAMA2; (-) strand; PAM type: YTN; PAM sequence: CTG
tatgaatacctaattagctc

SEQ ID NO: 284076 - DNA, 20 bp, Artificial Sequence
  Description of Artificial Sequence: Synthetic oligonucleotide
  Target: LAMA2; (-) strand; PAM type: YTN; PAM sequence: CTG
tatctgtatgaatacctaat

SEQ ID NO: 284077 - DNA, 20 bp, Artificial Sequence
  Description of Artificial Sequence: Synthetic oligonucleotide
  Target: LAMA2; (-) strand; PAM type: YTN; PAM sequence: TTC
tgtatctgtatgaataccta

SEQ ID NO: 284078 - DNA, 20 bp, Artificial Sequence
  Description of Artificial Sequence: Synthetic oligonucleotide
  Target: LAMA2; (-) strand; PAM type: YTN; PAM sequence: CTG
tgtcagtaggttctgtatct

SEQ ID NO: 284079 - DNA, 20 bp, Artificial Sequence
  Description of Artificial Sequence: Synthetic oligonucleotide
  Target: LAMA2; (-) strand; PAM type: YTN; PAM sequence: TTC
tgtgtcagtaggttctgtat

SEQ ID NO: 284080 - DNA, 20 bp, Artificial Sequence
  Description of Artificial Sequence: Synthetic oligonucleotide
  Target: LAMA2; (-) strand; PAM type: YTN; PAM sequence: CTT
ctgtgtcagtaggttctgta

SEQ ID NO: 284081 - DNA, 20 bp, Artificial Sequence
  Description of Artificial Sequence: Synthetic oligonucleotide
  Target: LAMA2; (-) strand; PAM type: YTN; PAM sequence: TTG
tccttctgtgtcagtaggtt

SEQ ID NO: 284082 - DNA, 20 bp, Artificial Sequence
  Description of Artificial Sequence: Synthetic oligonucleotide
  Target: LAMA2; (-) strand; PAM type: YTN; PAM sequence: TTA
tacacagaagacaagttgtc

SEQ ID NO: 284083 - DNA, 20 bp, Artificial Sequence
  Description of Artificial Sequence: Synthetic oligonucleotide
  Target: LAMA2; (-) strand; PAM type: YTN; PAM sequence: TTA
tgttatacacagaagacaag

SEQ ID NO: 284084 - DNA, 20 bp, Artificial Sequence
  Description of Artificial Sequence: Synthetic oligonucleotide
  Target: LAMA2; (-) strand; PAM type: YTN; PAM sequence: CTT
atgttatacacagaagacaa

SEQ ID NO: 284085 - DNA, 20 bp, Artificial Sequence
  Description of Artificial Sequence: Synthetic oligonucleotide
  Target: LAMA2; (-) strand; PAM type: YTN; PAM sequence: CTA
acttatgttatacacagaag

SEQ ID NO: 284086 - DNA, 20 bp, Artificial Sequence
  Description of Artificial Sequence: Synthetic oligonucleotide
  Target: LAMA2; (-) strand; PAM type: YTN; PAM sequence: TTA
gtgctaacttatgttataca

SEQ ID NO: 284087 - DNA, 20 bp, Artificial Sequence
  Description of Artificial Sequence: Synthetic oligonucleotide
  Target: LAMA2; (-) strand; PAM type: YTN; PAM sequence: TTA
agtgttagtgctaacttatg

SEQ ID NO: 284088 - DNA, 20 bp, Artificial Sequence
  Description of Artificial Sequence: Synthetic oligonucleotide
  Target: LAMA2; (-) strand; PAM type: YTN; PAM sequence: CTG
atgttaagtgttagtgctaa

SEQ ID NO: 284089 - DNA, 20 bp, Artificial Sequence
  Description of Artificial Sequence: Synthetic oligonucleotide
  Target: LAMA2; (-) strand; PAM type: YTN; PAM sequence: TTA
actgatgttaagtgttagtg

SEQ ID NO: 284090 - DNA, 20 bp, Artificial Sequence
  Description of Artificial Sequence: Synthetic oligonucleotide
  Target: LAMA2; (-) strand; PAM type: YTN; PAM sequence: CTT
aactgatgttaagtgttagt

SEQ ID NO: 284091 - DNA, 20 bp, Artificial Sequence
  Description of Artificial Sequence: Synthetic oligonucleotide
  Target: LAMA2; (-) strand; PAM type: YTN; PAM sequence: CTG
taaagtggggataataacag

SEQ ID NO: 284092 - DNA, 20 bp, Artificial Sequence
  Description of Artificial Sequence: Synthetic oligonucleotide
  Target: LAMA2; (-) strand; PAM type: YTN; PAM sequence: CTC
acctgtaaagtggggataat

SEQ ID NO: 284093 - DNA, 20 bp, Artificial Sequence
  Description of Artificial Sequence: Synthetic oligonucleotide
  Target: LAMA2; (-) strand; PAM type: YTN; PAM sequence: TTC
tcacctgtaaagtggggata

SEQ ID NO: 284094 - DNA, 20 bp, Artificial Sequence
  Description of Artificial Sequence: Synthetic oligonucleotide
  Target: LAMA2; (-) strand; PAM type: YTN; PAM sequence: TTT
ctcacctgtaaagtggggat

SEQ ID NO: 284095 - DNA, 20 bp, Artificial Sequence
  Description of Artificial Sequence: Synthetic oligonucleotide
  Target: LAMA2; (-) strand; PAM type: YTN; PAM sequence: CTG
tttctcacctgtaaagtggg

SEQ ID NO: 284096 - DNA, 20 bp, Artificial Sequence
  Description of Artificial Sequence: Synthetic oligonucleotide
  Target: LAMA2; (-) strand; PAM type: YTN; PAM sequence: CTG
tctgtttctcacctgtaaag

SEQ ID NO: 284097 - DNA, 20 bp, Artificial Sequence
  Description of Artificial Sequence: Synthetic oligonucleotide
  Target: LAMA2; (-) strand; PAM type: YTN; PAM sequence: CTC
tgtctgtttctcacctgtaa

SEQ ID NO: 284098 - DNA, 20 bp, Artificial Sequence
  Description of Artificial Sequence: Synthetic oligonucleotide
  Target: LAMA2; (-) strand; PAM type: YTN; PAM sequence: TTC
agtatcctctgtctgtttct

SEQ ID NO: 284099 - DNA, 20 bp, Artificial Sequence
  Description of Artificial Sequence: Synthetic oligonucleotide
  Target: LAMA2; (-) strand; PAM type: YTN; PAM sequence: CTT
cagtatcctctgtctgtttc

SEQ ID NO: 284100 - DNA, 20 bp, Artificial Sequence
  Description of Artificial Sequence: Synthetic oligonucleotide
  Target: LAMA2; (-) strand; PAM type: YTN; PAM sequence: TTA
acaatggccttcagtatcct

SEQ ID NO: 284101 - DNA, 20 bp, Artificial Sequence
  Description of Artificial Sequence: Synthetic oligonucleotide
  Target: LAMA2; (-) strand; PAM type: YTN; PAM sequence: TTT
aacaatggccttcagtatcc

SEQ ID NO: 284102 - DNA, 20 bp, Artificial Sequence
  Description of Artificial Sequence: Synthetic oligonucleotide
  Target: LAMA2; (-) strand; PAM type: YTN; PAM sequence: TTT
taacaatggccttcagtatc

SEQ ID NO: 284103 - DNA, 20 bp, Artificial Sequence
  Description of Artificial Sequence: Synthetic oligonucleotide
  Target: LAMA2; (-) strand; PAM type: YTN; PAM sequence: CTT
ttaacaatggccttcagtat

SEQ ID NO: 284104 - DNA, 20 bp, Artificial Sequence
  Description of Artificial Sequence: Synthetic oligonucleotide
  Target: LAMA2; (-) strand; PAM type: YTN; PAM sequence: CTG
tgccacttttaacaatggcc

SEQ ID NO: 284105 - DNA, 20 bp, Artificial Sequence
  Description of Artificial Sequence: Synthetic oligonucleotide
  Target: LAMA2; (-) strand; PAM type: YTN; PAM sequence: CTC
tgtgccacttttaacaatgg

SEQ ID NO: 284106 - DNA, 20 bp, Artificial Sequence
  Description of Artificial Sequence: Synthetic oligonucleotide
  Target: LAMA2; (-) strand; PAM type: YTN; PAM sequence: TTC
ctctgtgccacttttaacaa

SEQ ID NO: 284107 - DNA, 20 bp, Artificial Sequence
  Description of Artificial Sequence: Synthetic oligonucleotide
  Target: LAMA2; (-) strand; PAM type: YTN; PAM sequence: TTT
cctctgtgccacttttaaca

SEQ ID NO: 284108 - DNA, 20 bp, Artificial Sequence
  Description of Artificial Sequence: Synthetic oligonucleotide
  Target: LAMA2; (-) strand; PAM type: YTN; PAM sequence: TTA
agtttcctctgtgccacttt

SEQ ID NO: 284109 - DNA, 20 bp, Artificial Sequence
  Description of Artificial Sequence: Synthetic oligonucleotide
  Target: LAMA2; (-) strand; PAM type: YTN; PAM sequence: TTT
aagtttcctctgtgccactt

SEQ ID NO: 284110 - DNA, 20 bp, Artificial Sequence
  Description of Artificial Sequence: Synthetic oligonucleotide
  Target: LAMA2; (-) strand; PAM type: YTN; PAM sequence: CTG
tggggtttaagtttcctctg

SEQ ID NO: 284111 - DNA, 20 bp, Artificial Sequence
  Description of Artificial Sequence: Synthetic oligonucleotide
  Target: LAMA2; (-) strand; PAM type: YTN; PAM sequence: CTG
aaatcaaactgtggggttta

SEQ ID NO: 284112 - DNA, 20 bp, Artificial Sequence
  Description of Artificial Sequence: Synthetic oligonucleotide
  Target: LAMA2; (-) strand; PAM type: YTN; PAM sequence: CTC
tgaaatcaaactgtggggtt

SEQ ID NO: 284113 - DNA, 20 bp, Artificial Sequence
  Description of Artificial Sequence: Synthetic oligonucleotide
  Target: LAMA2; (-) strand; PAM type: YTN; PAM sequence: TTA
agatcataggctctgaaatc

SEQ ID NO: 284114 - DNA, 20 bp, Artificial Sequence
  Description of Artificial Sequence: Synthetic oligonucleotide
  Target: LAMA2; (-) strand; PAM type: YTN; PAM sequence: TTA
gtggttaagatcataggctc

SEQ ID NO: 284115 - DNA, 20 bp, Artificial Sequence
  Description of Artificial Sequence: Synthetic oligonucleotide
  Target: LAMA2; (-) strand; PAM type: YTN; PAM sequence: CTA
gtgtgtataggttagtggtt

SEQ ID NO: 284116 - DNA, 20 bp, Artificial Sequence
  Description of Artificial Sequence: Synthetic oligonucleotide
  Target: LAMA2; (-) strand; PAM type: YTN; PAM sequence: CTA
ctagtgtgtataggttagtg

SEQ ID NO: 284117 - DNA, 20 bp, Artificial Sequence
  Description of Artificial Sequence: Synthetic oligonucleotide
  Target: LAMA2; (-) strand; PAM type: YTN; PAM sequence: CTA
tagatgactactagtgtgta

SEQ ID NO: 284118 - DNA, 20 bp, Artificial Sequence
  Description of Artificial Sequence: Synthetic oligonucleotide
  Target: LAMA2; (-) strand; PAM type: YTN; PAM sequence: TTG
tacctatagatgactactag

SEQ ID NO: 284119 - DNA, 20 bp, Artificial Sequence
  Description of Artificial Sequence: Synthetic oligonucleotide
  Target: LAMA2; (-) strand; PAM type: YTN; PAM sequence: TTG
tatattgtacctatagatga

SEQ ID NO: 284120 - DNA, 20 bp, Artificial Sequence
  Description of Artificial Sequence: Synthetic oligonucleotide
  Target: LAMA2; (-) strand; PAM type: YTN; PAM sequence: TTT
gtatattgtacctatagatg

SEQ ID NO: 284121 - DNA, 20 bp, Artificial Sequence
  Description of Artificial Sequence: Synthetic oligonucleotide
  Target: LAMA2; (-) strand; PAM type: YTN; PAM sequence: CTA
atttgtatattgtacctata

SEQ ID NO: 284122 - DNA, 20 bp, Artificial Sequence
  Description of Artificial Sequence: Synthetic oligonucleotide
  Target: LAMA2; (-) strand; PAM type: YTN; PAM sequence: CTG
atcctaatttgtatattgta

SEQ ID NO: 284123 - DNA, 20 bp, Artificial Sequence
  Description of Artificial Sequence: Synthetic oligonucleotide
  Target: LAMA2; (-) strand; PAM type: YTN; PAM sequence: CTC
ctgatcctaatttgtatatt

SEQ ID NO: 284124 - DNA, 20 bp, Artificial Sequence
  Description of Artificial Sequence: Synthetic oligonucleotide
  Target: LAMA2; (-) strand; PAM type: YTN; PAM sequence: TTG
tctcctgatcctaatttgta

SEQ ID NO: 284125 - DNA, 20 bp, Artificial Sequence
  Description of Artificial Sequence: Synthetic oligonucleotide
  Target: LAMA2; (-) strand; PAM type: YTN; PAM sequence: TTT
gtctcctgatcctaatttgt

SEQ ID NO: 284126 - DNA, 20 bp, Artificial Sequence
  Description of Artificial Sequence: Synthetic oligonucleotide
  Target: LAMA2; (-) strand; PAM type: YTN; PAM sequence: TTG
tataaatatgtgcatttgtc

SEQ ID NO: 284127 - DNA, 20 bp, Artificial Sequence
  Description of Artificial Sequence: Synthetic oligonucleotide
  Target: LAMA2; (-) strand; PAM type: YTN; PAM sequence: CTG
tgttgtataaatatgtgcat

SEQ ID NO: 284128 - DNA, 20 bp, Artificial Sequence
  Description of Artificial Sequence: Synthetic oligonucleotide
  Target: LAMA2; (-) strand; PAM type: YTN; PAM sequence: TTA
actgtgttgtataaatatgt

SEQ ID NO: 284129 - DNA, 20 bp, Artificial Sequence
  Description of Artificial Sequence: Synthetic oligonucleotide
  Target: LAMA2; (-) strand; PAM type: YTN; PAM sequence: TTA
atattaactgtgttgtataa

SEQ ID NO: 284130 - DNA, 20 bp, Artificial Sequence
  Description of Artificial Sequence: Synthetic oligonucleotide
  Target: LAMA2; (-) strand; PAM type: YTN; PAM sequence: TTT
aatattaactgtgttgtata

SEQ ID NO: 284131 - DNA, 20 bp, Artificial Sequence
  Description of Artificial Sequence: Synthetic oligonucleotide
  Target: LAMA2; (-) strand; PAM type: YTN; PAM sequence: TTT
taatattaactgtgttgtat

SEQ ID NO: 284132 - DNA, 20 bp, Artificial Sequence
  Description of Artificial Sequence: Synthetic oligonucleotide
  Target: LAMA2; (-) strand; PAM type: YTN; PAM sequence: TTA
aaaaagtaaaaaccaccgag

SEQ ID NO: 284133 - DNA, 20 bp, Artificial Sequence
  Description of Artificial Sequence: Synthetic oligonucleotide
  Target: LAMA2; (-) strand; PAM type: YTN; PAM sequence: TTA
aacgttaaaaaagtaaaaac

SEQ ID NO: 284134 - DNA, 20 bp, Artificial Sequence
  Description of Artificial Sequence: Synthetic oligonucleotide
  Target: LAMA2; (-) strand; PAM type: YTN; PAM sequence: TTT
aaacgttaaaaaagtaaaaa

SEQ ID NO: 284135 - DNA, 20 bp, Artificial Sequence
  Description of Artificial Sequence: Synthetic oligonucleotide
  Target: LAMA2; (-) strand; PAM type: YTN; PAM sequence: TTT
taaacgttaaaaaagtaaaa

SEQ ID NO: 284136 - DNA, 20 bp, Artificial Sequence
  Description of Artificial Sequence: Synthetic oligonucleotide
  Target: LAMA2; (-) strand; PAM type: YTN; PAM sequence: TTT
ttaaacgttaaaaaagtaaa

SEQ ID NO: 284137 - DNA, 20 bp, Artificial Sequence
  Description of Artificial Sequence: Synthetic oligonucleotide
  Target: LAMA2; (-) strand; PAM type: YTN; PAM sequence: CTC
aggtttttaaacgttaaaaa

SEQ ID NO: 284138 - DNA, 20 bp, Artificial Sequence
  Description of Artificial Sequence: Synthetic oligonucleotide
  Target: LAMA2; (-) strand; PAM type: YTN; PAM sequence: TTA
ctcaggtttttaaacgttaa

SEQ ID NO: 284139 - DNA, 20 bp, Artificial Sequence
  Description of Artificial Sequence: Synthetic oligonucleotide
  Target: LAMA2; (-) strand; PAM type: YTN; PAM sequence: CTG
aaaagttactcaggttttta

SEQ ID NO: 284140 - DNA, 20 bp, Artificial Sequence
  Description of Artificial Sequence: Synthetic oligonucleotide
  Target: LAMA2; (-) strand; PAM type: YTN; PAM sequence: CTG
aaaaagggacatgaaaatct

SEQ ID NO: 284141 - DNA, 20 bp, Artificial Sequence
  Description of Artificial Sequence: Synthetic oligonucleotide
  Target: LAMA2; (-) strand; PAM type: YTN; PAM sequence: CTA
ctgaaaaagggacatgaaaa

SEQ ID NO: 284142 - DNA, 20 bp, Artificial Sequence
  Description of Artificial Sequence: Synthetic oligonucleotide
  Target: LAMA2; (-) strand; PAM type: YTN; PAM sequence: TTA
ctactgaaaaagggacatga

SEQ ID NO: 284143 - DNA, 20 bp, Artificial Sequence
  Description of Artificial Sequence: Synthetic oligonucleotide
  Target: LAMA2; (-) strand; PAM type: YTN; PAM sequence: CTT
actactgaaaaagggacatg

SEQ ID NO: 284144 - DNA, 20 bp, Artificial Sequence
  Description of Artificial Sequence: Synthetic oligonucleotide
  Target: LAMA2; (-) strand; PAM type: YTN; PAM sequence: CTA
tatacttactactgaaaaag

SEQ ID NO: 284145 - DNA, 20 bp, Artificial Sequence
  Description of Artificial Sequence: Synthetic oligonucleotide
  Target: LAMA2; (-) strand; PAM type: YTN; PAM sequence: TTC
tatatacttactactgaaaa

SEQ ID NO: 284146 - DNA, 20 bp, Artificial Sequence
  Description of Artificial Sequence: Synthetic oligonucleotide
  Target: LAMA2; (-) strand; PAM type: YTN; PAM sequence: TTT
ctatatacttactactgaaa

SEQ ID NO: 284147 - DNA, 20 bp, Artificial Sequence
  Description of Artificial Sequence: Synthetic oligonucleotide
  Target: LAMA2; (-) strand; PAM type: YTN; PAM sequence: TTT
tctatatacttactactgaa

SEQ ID NO: 284148 - DNA, 20 bp, Artificial Sequence
  Description of Artificial Sequence: Synthetic oligonucleotide
  Target: LAMA2; (-) strand; PAM type: YTN; PAM sequence: TTG
gaaattttctatatacttac

SEQ ID NO: 284149 - DNA, 20 bp, Artificial Sequence
  Description of Artificial Sequence: Synthetic oligonucleotide
  Target: LAMA2; (-) strand; PAM type: YTN; PAM sequence: TTC
agcattggaaattttctata

SEQ ID NO: 284150 - DNA, 20 bp, Artificial Sequence
  Description of Artificial Sequence: Synthetic oligonucleotide
  Target: LAMA2; (-) strand; PAM type: YTN; PAM sequence: TTT
cagcattggaaattttctat

SEQ ID NO: 284151 - DNA, 20 bp, Artificial Sequence
  Description of Artificial Sequence: Synthetic oligonucleotide
  Target: LAMA2; (-) strand; PAM type: YTN; PAM sequence: TTT
tcagcattggaaattttcta

SEQ ID NO: 284152 - DNA, 20 bp, Artificial Sequence
  Description of Artificial Sequence: Synthetic oligonucleotide
  Target: LAMA2; (-) strand; PAM type: YTN; PAM sequence: TTG
ttttcagcattggaaatttt

SEQ ID NO: 284153 - DNA, 20 bp, Artificial Sequence
  Description of Artificial Sequence: Synthetic oligonucleotide
  Target: LAMA2; (-) strand; PAM type: YTN; PAM sequence: CTT
gttttcagcattggaaattt

SEQ ID NO: 284154 - DNA, 20 bp, Artificial Sequence
  Description of Artificial Sequence: Synthetic oligonucleotide
  Target: LAMA2; (-) strand; PAM type: YTN; PAM sequence: TTA
tacttgttttcagcattgga

SEQ ID NO: 284155 - DNA, 20 bp, Artificial Sequence
  Description of Artificial Sequence: Synthetic oligonucleotide
  Target: LAMA2; (-) strand; PAM type: YTN; PAM sequence: TTT
atacttgttttcagcattgg

SEQ ID NO: 284156 - DNA, 20 bp, Artificial Sequence
  Description of Artificial Sequence: Synthetic oligonucleotide
  Target: LAMA2; (-) strand; PAM type: YTN; PAM sequence: TTA
ggccatgcatttatacttgt

SEQ ID NO: 284157 - DNA, 20 bp, Artificial Sequence
  Description of Artificial Sequence: Synthetic oligonucleotide
  Target: LAMA2; (-) strand; PAM type: YTN; PAM sequence: TTC
aggtatgttaggccatgcat

SEQ ID NO: 284158 - DNA, 20 bp, Artificial Sequence
  Description of Artificial Sequence: Synthetic oligonucleotide
  Target: LAMA2; (-) strand; PAM type: YTN; PAM sequence: TTT
caggtatgttaggccatgca

SEQ ID NO: 284159 - DNA, 20 bp, Artificial Sequence
  Description of Artificial Sequence: Synthetic oligonucleotide
  Target: LAMA2; (-) strand; PAM type: YTN; PAM sequence: TTT
tcaggtatgttaggccatgc

SEQ ID NO: 284160 - DNA, 20 bp, Artificial Sequence
  Description of Artificial Sequence: Synthetic oligonucleotide
  Target: LAMA2; (-) strand; PAM type: YTN; PAM sequence: TTA
ggatagagaaacattttcag

SEQ ID NO: 284161 - DNA, 20 bp, Artificial Sequence
  Description of Artificial Sequence: Synthetic oligonucleotide
  Target: LAMA2; (-) strand; PAM type: YTN; PAM sequence: TTT
aggatagagaaacattttca

SEQ ID NO: 284162 - DNA, 20 bp, Artificial Sequence
  Description of Artificial Sequence: Synthetic oligonucleotide
  Target: LAMA2; (-) strand; PAM type: YTN; PAM sequence: TTT
taggatagagaaacattttc

SEQ ID NO: 284163 - DNA, 20 bp, Artificial Sequence
  Description of Artificial Sequence: Synthetic oligonucleotide
  Target: LAMA2; (-) strand; PAM type: YTN; PAM sequence: TTC
attttaggatagagaaacat

SEQ ID NO: 284164 - DNA, 20 bp, Artificial Sequence
  Description of Artificial Sequence: Synthetic oligonucleotide
  Target: LAMA2; (-) strand; PAM type: YTN; PAM sequence: TTT
cattttaggatagagaaaca

SEQ ID NO: 284165 - DNA, 20 bp, Artificial Sequence
  Description of Artificial Sequence: Synthetic oligonucleotide
  Target: LAMA2; (-) strand; PAM type: YTN; PAM sequence: TTT
tcattttaggatagagaaac

SEQ ID NO: 284166 - DNA, 20 bp, Artificial Sequence
  Description of Artificial Sequence: Synthetic oligonucleotide
  Target: LAMA2; (-) strand; PAM type: YTN; PAM sequence: CTA
acgtattttcattttaggat

SEQ ID NO: 284167 - DNA, 20 bp, Artificial Sequence
  Description of Artificial Sequence: Synthetic oligonucleotide
  Target: LAMA2; (-) strand; PAM type: YTN; PAM sequence: TTG
gagggaaactaacgtatttt

SEQ ID NO: 284168 - DNA, 20 bp, Artificial Sequence
  Description of Artificial Sequence: Synthetic oligonucleotide
  Target: LAMA2; (-) strand; PAM type: YTN; PAM sequence: TTG
gggtgggggttggagggaaa

SEQ ID NO: 284169 - DNA, 20 bp, Artificial Sequence
  Description of Artificial Sequence: Synthetic oligonucleotide
  Target: LAMA2; (-) strand; PAM type: YTN; PAM sequence: TTC
caaagcagggcaggggttgg

SEQ ID NO: 284170 - DNA, 20 bp, Artificial Sequence
  Description of Artificial Sequence: Synthetic oligonucleotide
  Target: LAMA2; (-) strand; PAM type: YTN; PAM sequence: TTT
ccaaagcagggcaggggttg

SEQ ID NO: 284171 - DNA, 20 bp, Artificial Sequence
  Description of Artificial Sequence: Synthetic oligonucleotide
  Target: LAMA2; (-) strand; PAM type: YTN; PAM sequence: CTG
catttccaaagcagggcagg

SEQ ID NO: 284172 - DNA, 20 bp, Artificial Sequence
  Description of Artificial Sequence: Synthetic oligonucleotide
  Target: LAMA2; (-) strand; PAM type: YTN; PAM sequence: TTA
atctgcatttccaaagcagg

SEQ ID NO: 284173 - DNA, 20 bp, Artificial Sequence
  Description of Artificial Sequence: Synthetic oligonucleotide
  Target: LAMA2; (-) strand; PAM type: YTN; PAM sequence: TTT
aatctgcatttccaaagcag

SEQ ID NO: 284174 - DNA, 20 bp, Artificial Sequence
  Description of Artificial Sequence: Synthetic oligonucleotide
  Target: LAMA2; (-) strand; PAM type: YTN; PAM sequence: TTA
agatttaatctgcatttcca

SEQ ID NO: 284175 - DNA, 20 bp, Artificial Sequence
  Description of Artificial Sequence: Synthetic oligonucleotide
  Target: LAMA2; (-) strand; PAM type: YTN; PAM sequence: CTT
aagatttaatctgcatttcc

SEQ ID NO: 284176 - DNA, 20 bp, Artificial Sequence
  Description of Artificial Sequence: Synthetic oligonucleotide
  Target: LAMA2; (-) strand; PAM type: YTN; PAM sequence: TTC
atgaaaacgaggcttaagat

SEQ ID NO: 284177 - DNA, 20 bp, Artificial Sequence
  Description of Artificial Sequence: Synthetic oligonucleotide
  Target: LAMA2; (-) strand; PAM type: YTN; PAM sequence: CTT
catgaaaacgaggcttaaga

SEQ ID NO: 284178 - DNA, 20 bp, Artificial Sequence
  Description of Artificial Sequence: Synthetic oligonucleotide
  Target: LAMA2; (-) strand; PAM type: YTN; PAM sequence: TTA
tccacatgagcttcatgaaa

SEQ ID NO: 284179 - DNA, 20 bp, Artificial Sequence
  Description of Artificial Sequence: Synthetic oligonucleotide
  Target: LAMA2; (-) strand; PAM type: YTN; PAM sequence: TTT
atccacatgagcttcatgaa

SEQ ID NO: 284180 - DNA, 20 bp, Artificial Sequence
  Description of Artificial Sequence: Synthetic oligonucleotide
  Target: LAMA2; (-) strand; PAM type: YTN; PAM sequence: TTC
acgagataaatttatccaca

SEQ ID NO: 284181 - DNA, 20 bp, Artificial Sequence
  Description of Artificial Sequence: Synthetic oligonucleotide
  Target: LAMA2; (-) strand; PAM type: YTN; PAM sequence: TTA
ttcacgagataaatttatcc

SEQ ID NO: 284182 - DNA, 20 bp, Artificial Sequence
  Description of Artificial Sequence: Synthetic oligonucleotide
  Target: LAMA2; (-) strand; PAM type: YTN; PAM sequence: CTT
attcacgagataaatttatc

SEQ ID NO: 284183 - DNA, 20 bp, Artificial Sequence
  Description of Artificial Sequence: Synthetic oligonucleotide
  Target: LAMA2; (-) strand; PAM type: YTN; PAM sequence: CTG
aacttattcacgagataaat

SEQ ID NO: 284184 - DNA, 20 bp, Artificial Sequence
  Description of Artificial Sequence: Synthetic oligonucleotide
  Target: LAMA2; (-) strand; PAM type: YTN; PAM sequence: CTG
ctgaacttattcacgagata

SEQ ID NO: 284185 - DNA, 20 bp, Artificial Sequence
  Description of Artificial Sequence: Synthetic oligonucleotide
  Target: LAMA2; (-) strand; PAM type: YTN; PAM sequence: TTG
ctgctgaacttattcacgag

SEQ ID NO: 284186 - DNA, 20 bp, Artificial Sequence
  Description of Artificial Sequence: Synthetic oligonucleotide
  Target: LAMA2; (-) strand; PAM type: YTN; PAM sequence: TTT
gctgctgaacttattcacga

SEQ ID NO: 284187 - DNA, 20 bp, Artificial Sequence
  Description of Artificial Sequence: Synthetic oligonucleotide
  Target: LAMA2; (-) strand; PAM type: YTN; PAM sequence: TTG
tgatttgctgctgaacttat

SEQ ID NO: 284188 - DNA, 20 bp, Artificial Sequence
  Description of Artificial Sequence: Synthetic oligonucleotide
  Target: LAMA2; (-) strand; PAM type: YTN; PAM sequence: TTG
tataagatcatattgtgatt

SEQ ID NO: 284189 - DNA, 20 bp, Artificial Sequence
  Description of Artificial Sequence: Synthetic oligonucleotide
  Target: LAMA2; (-) strand; PAM type: YTN; PAM sequence: TTC
attgtataagatcatattgt

SEQ ID NO: 284190 - DNA, 20 bp, Artificial Sequence
  Description of Artificial Sequence: Synthetic oligonucleotide
  Target: LAMA2; (-) strand; PAM type: YTN; PAM sequence: CTA
aatgttcattgtataagatc

SEQ ID NO: 284191 - DNA, 20 bp, Artificial Sequence
  Description of Artificial Sequence: Synthetic oligonucleotide
  Target: LAMA2; (-) strand; PAM type: YTN; PAM sequence: TTC
taaatgttcattgtataaga

SEQ ID NO: 284192 - DNA, 20 bp, Artificial Sequence
  Description of Artificial Sequence: Synthetic oligonucleotide
  Target: LAMA2; (-) strand; PAM type: YTN; PAM sequence: CTA
ttctaaatgttcattgtata

SEQ ID NO: 284193 - DNA, 20 bp, Artificial Sequence
  Description of Artificial Sequence: Synthetic oligonucleotide
  Target: LAMA2; (-) strand; PAM type: YTN; PAM sequence: TTA
aagtagtgacgtgactattc

SEQ ID NO: 284194 - DNA, 20 bp, Artificial Sequence
  Description of Artificial Sequence: Synthetic oligonucleotide
  Target: LAMA2; (-) strand; PAM type: YTN; PAM sequence: CTT
aaagtagtgacgtgactatt

SEQ ID NO: 284195 - DNA, 20 bp, Artificial Sequence
  Description of Artificial Sequence: Synthetic oligonucleotide
  Target: LAMA2; (-) strand; PAM type: YTN; PAM sequence: CTC
ttaaagtagtgacgtgacta

SEQ ID NO: 284196 - DNA, 20 bp, Artificial Sequence
  Description of Artificial Sequence: Synthetic oligonucleotide
  Target: LAMA2; (-) strand; PAM type: YTN; PAM sequence: TTA
gctcttaaagtagtgacgtg

SEQ ID NO: 284197 - DNA, 20 bp, Artificial Sequence
  Description of Artificial Sequence: Synthetic oligonucleotide
  Target: LAMA2; (-) strand; PAM type: YTN; PAM sequence: CTG
attagctcttaaagtagtga

SEQ ID NO: 284198 - DNA, 20 bp, Artificial Sequence
  Description of Artificial Sequence: Synthetic oligonucleotide
  Target: LAMA2; (-) strand; PAM type: YTN; PAM sequence: CTA
tgaatacctgattagctctt

SEQ ID NO: 284199 - DNA, 20 bp, Artificial Sequence
  Description of Artificial Sequence: Synthetic oligonucleotide
  Target: LAMA2; (-) strand; PAM type: YTN; PAM sequence: TTG
ctatgaatacctgattagct

SEQ ID NO: 284200 - DNA, 20 bp, Artificial Sequence
  Description of Artificial Sequence: Synthetic oligonucleotide
  Target: LAMA2; (-) strand; PAM type: YTN; PAM sequence: TTT
gctatgaatacctgattagc

SEQ ID NO: 284201 - DNA, 20 bp, Artificial Sequence
  Description of Artificial Sequence: Synthetic oligonucleotide
  Target: LAMA2; (-) strand; PAM type: YTN; PAM sequence: TTT
tgctatgaatacctgattag

SEQ ID NO: 284202 - DNA, 20 bp, Artificial Sequence
  Description of Artificial Sequence: Synthetic oligonucleotide
  Target: LAMA2; (-) strand; PAM type: YTN; PAM sequence: CTT
ttgctatgaatacctgatta

SEQ ID NO: 284203 - DNA, 20 bp, Artificial Sequence
  Description of Artificial Sequence: Synthetic oligonucleotide
  Target: LAMA2; (-) strand; PAM type: YTN; PAM sequence: CTC
agggacttttgctatgaata

SEQ ID NO: 284204 - DNA, 20 bp, Artificial Sequence
  Description of Artificial Sequence: Synthetic oligonucleotide
  Target: LAMA2; (-) strand; PAM type: YTN; PAM sequence: TTC
tcagggacttttgctatgaa

SEQ ID NO: 284205 - DNA, 20 bp, Artificial Sequence
  Description of Artificial Sequence: Synthetic oligonucleotide
  Target: LAMA2; (-) strand; PAM type: YTN; PAM sequence: TTT
ctcagggacttttgctatga

SEQ ID NO: 284206 - DNA, 20 bp, Artificial Sequence
  Description of Artificial Sequence: Synthetic oligonucleotide
  Target: LAMA2; (-) strand; PAM type: YTN; PAM sequence: TTT
tctcagggacttttgctatg

SEQ ID NO: 284207 - DNA, 20 bp, Artificial Sequence
  Description of Artificial Sequence: Synthetic oligonucleotide
  Target: LAMA2; (-) strand; PAM type: YTN; PAM sequence: TTA
aattttctcagggacttttg

SEQ ID NO: 284208 - DNA, 20 bp, Artificial Sequence
  Description of Artificial Sequence: Synthetic oligonucleotide
  Target: LAMA2; (-) strand; PAM type: YTN; PAM sequence: TTA
ggtaaattaaattttctcag

SEQ ID NO: 284209 - DNA, 20 bp, Artificial Sequence
  Description of Artificial Sequence: Synthetic oligonucleotide
  Target: LAMA2; (-) strand; PAM type: YTN; PAM sequence: TTT
aggtaaattaaattttctca

SEQ ID NO: 284210 - DNA, 20 bp, Artificial Sequence
  Description of Artificial Sequence: Synthetic oligonucleotide
  Target: LAMA2; (-) strand; PAM type: YTN; PAM sequence: TTT
taggtaaattaaattttctc

SEQ ID NO: 284211 - DNA, 20 bp, Artificial Sequence
  Description of Artificial Sequence: Synthetic oligonucleotide
  Target: LAMA2; (-) strand; PAM type: YTN; PAM sequence: TTT
ttaggtaaattaaattttct

SEQ ID NO: 284212 - DNA, 20 bp, Artificial Sequence
  Description of Artificial Sequence: Synthetic oligonucleotide
  Target: LAMA2; (-) strand; PAM type: YTN; PAM sequence: TTT
tttaggtaaattaaattttc

SEQ ID NO: 284213 - DNA, 20 bp, Artificial Sequence
  Description of Artificial Sequence: Synthetic oligonucleotide
  Target: LAMA2; (-) strand; PAM type: YTN; PAM sequence: TTT
ttttaggtaaattaaatttt

SEQ ID NO: 284214 - DNA, 20 bp, Artificial Sequence
  Description of Artificial Sequence: Synthetic oligonucleotide
  Target: LAMA2; (-) strand; PAM type: YTN; PAM sequence: TTC
aggtgtagcaaatgaagcaa

SEQ ID NO: 284215 - DNA, 20 bp, Artificial Sequence
  Description of Artificial Sequence: Synthetic oligonucleotide
  Target: LAMA2; (-) strand; PAM type: YTN; PAM sequence: CTC
attcaggtgtagcaaatgaa

SEQ ID NO: 284216 - DNA, 20 bp, Artificial Sequence
  Description of Artificial Sequence: Synthetic oligonucleotide
  Target: LAMA2; (-) strand; PAM type: YTN; PAM sequence: TTG
tctcattcaggtgtagcaaa

SEQ ID NO: 284217 - DNA, 20 bp, Artificial Sequence
  Description of Artificial Sequence: Synthetic oligonucleotide
  Target: LAMA2; (-) strand; PAM type: YTN; PAM sequence: TTT
gtctcattcaggtgtagcaa

SEQ ID NO: 284218 - DNA, 20 bp, Artificial Sequence
  Description of Artificial Sequence: Synthetic oligonucleotide
  Target: LAMA2; (-) strand; PAM type: YTN; PAM sequence: CTT
tgtctcattcaggtgtagca

SEQ ID NO: 284219 - DNA, 20 bp, Artificial Sequence
  Description of Artificial Sequence: Synthetic oligonucleotide
  Target: LAMA2; (-) strand; PAM type: YTN; PAM sequence: CTG
aactttgtctcattcaggtg

SEQ ID NO: 284220 - DNA, 20 bp, Artificial Sequence
  Description of Artificial Sequence: Synthetic oligonucleotide
  Target: LAMA2; (-) strand; PAM type: YTN; PAM sequence: TTA
caaagggaaaaggctgaact

SEQ ID NO: 284221 - DNA, 20 bp, Artificial Sequence
  Description of Artificial Sequence: Synthetic oligonucleotide
  Target: LAMA2; (-) strand; PAM type: YTN; PAM sequence: TTT
acaaagggaaaaggctgaac

SEQ ID NO: 284222 - DNA, 20 bp, Artificial Sequence
  Description of Artificial Sequence: Synthetic oligonucleotide
  Target: LAMA2; (-) strand; PAM type: YTN; PAM sequence: CTC
ggacacatttacaaagggaa

SEQ ID NO: 284223 - DNA, 20 bp, Artificial Sequence
  Description of Artificial Sequence: Synthetic oligonucleotide
  Target: LAMA2; (-) strand; PAM type: YTN; PAM sequence: CTG
acctcggacacatttacaaa

SEQ ID NO: 284224 - DNA, 20 bp, Artificial Sequence
  Description of Artificial Sequence: Synthetic oligonucleotide
  Target: LAMA2; (-) strand; PAM type: YTN; PAM sequence: CTG
gctgacctcggacacattta

SEQ ID NO: 284225 - DNA, 20 bp, Artificial Sequence
  Description of Artificial Sequence: Synthetic oligonucleotide
  Target: LAMA2; (-) strand; PAM type: YTN; PAM sequence: CTG
tggctggctgacctcggaca

SEQ ID NO: 284226 - DNA, 20 bp, Artificial Sequence
  Description of Artificial Sequence: Synthetic oligonucleotide
  Target: LAMA2; (-) strand; PAM type: YTN; PAM sequence: TTG
acaaagcgaggctgtggctg

SEQ ID NO: 284227 - DNA, 20 bp, Artificial Sequence
  Description of Artificial Sequence: Synthetic oligonucleotide
  Target: LAMA2; (-) strand; PAM type: YTN; PAM sequence: CTT
gacaaagcgaggctgtggct

SEQ ID NO: 284228 - DNA, 20 bp, Artificial Sequence
  Description of Artificial Sequence: Synthetic oligonucleotide
  Target: LAMA2; (-) strand; PAM type: YTN; PAM sequence: TTA
atccatgcttgacaaagcga

SEQ ID NO: 284229 - DNA, 20 bp, Artificial Sequence
  Description of Artificial Sequence: Synthetic oligonucleotide
  Target: LAMA2; (-) strand; PAM type: YTN; PAM sequence: CTT
aatccatgcttgacaaagcg

SEQ ID NO: 284230 - DNA, 20 bp, Artificial Sequence
  Description of Artificial Sequence: Synthetic oligonucleotide
  Target: LAMA2; (-) strand; PAM type: YTN; PAM sequence: TTA
gtggcttaatccatgcttga

SEQ ID NO: 284231 - DNA, 20 bp, Artificial Sequence
  Description of Artificial Sequence: Synthetic oligonucleotide
  Target: LAMA2; (-) strand; PAM type: YTN; PAM sequence: CTG
tcagcagatgagggtatgaa

SEQ ID NO: 284232 - DNA, 20 bp, Artificial Sequence
  Description of Artificial Sequence: Synthetic oligonucleotide
  Target: LAMA2; (-) strand; PAM type: YTN; PAM sequence: CTG
tatctgtcagcagatgaggg

SEQ ID NO: 284233 - DNA, 20 bp, Artificial Sequence
  Description of Artificial Sequence: Synthetic oligonucleotide
  Target: LAMA2; (-) strand; PAM type: YTN; PAM sequence: TTA
gcagctgtatctgtcagcag

SEQ ID NO: 284234 - DNA, 20 bp, Artificial Sequence
  Description of Artificial Sequence: Synthetic oligonucleotide
  Target: LAMA2; (-) strand; PAM type: YTN; PAM sequence: TTT
agcagctgtatctgtcagca

SEQ ID NO: 284235 - DNA, 20 bp, Artificial Sequence
  Description of Artificial Sequence: Synthetic oligonucleotide
  Target: LAMA2; (-) strand; PAM type: YTN; PAM sequence: TTG
cagtttagcagctgtatctg

SEQ ID NO: 284236 - DNA, 20 bp, Artificial Sequence
  Description of Artificial Sequence: Synthetic oligonucleotide
  Target: LAMA2; (-) strand; PAM type: YTN; PAM sequence: CTT
gcagtttagcagctgtatct

SEQ ID NO: 284237 - DNA, 20 bp, Artificial Sequence
  Description of Artificial Sequence: Synthetic oligonucleotide
  Target: LAMA2; (-) strand; PAM type: YTN; PAM sequence: TTA
acagcttgcagtttagcagc

SEQ ID NO: 284238 - DNA, 20 bp, Artificial Sequence
  Description of Artificial Sequence: Synthetic oligonucleotide
  Target: LAMA2; (-) strand; PAM type: YTN; PAM sequence: CTT
aacagcttgcagtttagcag

SEQ ID NO: 284239 - DNA, 20 bp, Artificial Sequence
  Description of Artificial Sequence: Synthetic oligonucleotide
  Target: LAMA2; (-) strand; PAM type: YTN; PAM sequence: TTG
tccttaacagcttgcagttt

SEQ ID NO: 284240 - DNA, 20 bp, Artificial Sequence
  Description of Artificial Sequence: Synthetic oligonucleotide
  Target: LAMA2; (-) strand; PAM type: YTN; PAM sequence: TTT
gtccttaacagcttgcagtt

SEQ ID NO: 284241 - DNA, 20 bp, Artificial Sequence
  Description of Artificial Sequence: Synthetic oligonucleotide
  Target: LAMA2; (-) strand; PAM type: YTN; PAM sequence: CTT
tgtccttaacagcttgcagt

SEQ ID NO: 284242 - DNA, 20 bp, Artificial Sequence
  Description of Artificial Sequence: Synthetic oligonucleotide
  Target: LAMA2; (-) strand; PAM type: YTN; PAM sequence: CTG
gctttgtccttaacagcttg

SEQ ID NO: 284243 - DNA, 20 bp, Artificial Sequence
  Description of Artificial Sequence: Synthetic oligonucleotide
  Target: LAMA2; (-) strand; PAM type: YTN; PAM sequence: TTG
tctggctttgtccttaacag

SEQ ID NO: 284244 - DNA, 20 bp, Artificial Sequence
  Description of Artificial Sequence: Synthetic oligonucleotide
  Target: LAMA2; (-) strand; PAM type: YTN; PAM sequence: CTT
gtctggctttgtccttaaca

SEQ ID NO: 284245 - DNA, 20 bp, Artificial Sequence
  Description of Artificial Sequence: Synthetic oligonucleotide
  Target: LAMA2; (-) strand; PAM type: YTN; PAM sequence: TTG
gcttgtctggctttgtcctt

SEQ ID NO: 284246 - DNA, 20 bp, Artificial Sequence
  Description of Artificial Sequence: Synthetic oligonucleotide
  Target: LAMA2; (-) strand; PAM type: YTN; PAM sequence: CTG
tgtcgttggcttgtctggct

SEQ ID NO: 284247 - DNA, 20 bp, Artificial Sequence
  Description of Artificial Sequence: Synthetic oligonucleotide
  Target: LAMA2; (-) strand; PAM type: YTN; PAM sequence: TTA
gctgtgtcgttggcttgtct

SEQ ID NO: 284248 - DNA, 20 bp, Artificial Sequence
  Description of Artificial Sequence: Synthetic oligonucleotide
  Target: LAMA2; (-) strand; PAM type: YTN; PAM sequence: TTT
agctgtgtcgttggcttgtc

SEQ ID NO: 284249 - DNA, 20 bp, Artificial Sequence
  Description of Artificial Sequence: Synthetic oligonucleotide
  Target: LAMA2; (-) strand; PAM type: YTN; PAM sequence: CTT
tagctgtgtcgttggcttgt

SEQ ID NO: 284250 - DNA, 20 bp, Artificial Sequence
  Description of Artificial Sequence: Synthetic oligonucleotide
  Target: LAMA2; (-) strand; PAM type: YTN; PAM sequence: CTG
tgccagtacatctttagctg

SEQ ID NO: 284251 - DNA, 20 bp, Artificial Sequence
  Description of Artificial Sequence: Synthetic oligonucleotide
  Target: LAMA2; (-) strand; PAM type: YTN; PAM sequence: CTG
taatctgtgccagtacatct

SEQ ID NO: 284252 - DNA, 20 bp, Artificial Sequence
  Description of Artificial Sequence: Synthetic oligonucleotide
  Target: LAMA2; (-) strand; PAM type: YTN; PAM sequence: CTC
tgtaatctgtgccagtacat

SEQ ID NO: 284253 - DNA, 20 bp, Artificial Sequence
  Description of Artificial Sequence: Synthetic oligonucleotide
  Target: LAMA2; (-) strand; PAM type: YTN; PAM sequence: CTG
gtggagctctgtaatctgtg

SEQ ID NO: 284254 - DNA, 20 bp, Artificial Sequence
  Description of Artificial Sequence: Synthetic oligonucleotide
  Target: LAMA2; (-) strand; PAM type: YTN; PAM sequence: TTC
tggtggagctctgtaatctg

SEQ ID NO: 284255 - DNA, 20 bp, Artificial Sequence
  Description of Artificial Sequence: Synthetic oligonucleotide
  Target: LAMA2; (-) strand; PAM type: YTN; PAM sequence: TTC
aggccatcgaggttctggtg

SEQ ID NO: 284256 - DNA, 20 bp, Artificial Sequence
  Description of Artificial Sequence: Synthetic oligonucleotide
  Target: LAMA2; (-) strand; PAM type: YTN; PAM sequence: CTT
caggccatcgaggttctggt

SEQ ID NO: 284257 - DNA, 20 bp, Artificial Sequence
  Description of Artificial Sequence: Synthetic oligonucleotide
  Target: LAMA2; (-) strand; PAM type: YTN; PAM sequence: TTC
ttcaggccatcgaggttctg

SEQ ID NO: 284258 - DNA, 20 bp, Artificial Sequence
  Description of Artificial Sequence: Synthetic oligonucleotide
  Target: LAMA2; (-) strand; PAM type: YTN; PAM sequence: CTT
cttcaggccatcgaggttct

SEQ ID NO: 284259 - DNA, 20 bp, Artificial Sequence
  Description of Artificial Sequence: Synthetic oligonucleotide
  Target: LAMA2; (-) strand; PAM type: YTN; PAM sequence: TTC
ttcttcaggccatcgaggtt

SEQ ID NO: 284260 - DNA, 20 bp, Artificial Sequence
  Description of Artificial Sequence: Synthetic oligonucleotide
  Target: LAMA2; (-) strand; PAM type: YTN; PAM sequence: TTG
taattcttcttcaggccatc

SEQ ID NO: 284261 - DNA, 20 bp, Artificial Sequence
  Description of Artificial Sequence: Synthetic oligonucleotide
  Target: LAMA2; (-) strand; PAM type: YTN; PAM sequence: TTA
ttgtaattcttcttcaggcc

SEQ ID NO: 284262 - DNA, 20 bp, Artificial Sequence
  Description of Artificial Sequence: Synthetic oligonucleotide
  Target: LAMA2; (-) strand; PAM type: YTN; PAM sequence: TTT
attgtaattcttcttcaggc

SEQ ID NO: 284263 - DNA, 20 bp, Artificial Sequence
  Description of Artificial Sequence: Synthetic oligonucleotide
  Target: LAMA2; (-) strand; PAM type: YTN; PAM sequence: CTA
gtttattgtaattcttcttc

SEQ ID NO: 284264 - DNA, 20 bp, Artificial Sequence
  Description of Artificial Sequence: Synthetic oligonucleotide
  Target: LAMA2; (-) strand; PAM type: YTN; PAM sequence: CTG
ctagtttattgtaattcttc

SEQ ID NO: 284265 - DNA, 20 bp, Artificial Sequence
  Description of Artificial Sequence: Synthetic oligonucleotide
  Target: LAMA2; (-) strand; PAM type: YTN; PAM sequence: CTG
tctgctagtttattgtaatt

SEQ ID NO: 284266 - DNA, 20 bp, Artificial Sequence
  Description of Artificial Sequence: Synthetic oligonucleotide
  Target: LAMA2; (-) strand; PAM type: YTN; PAM sequence: TTG
gcgacgctgtctgctagttt

SEQ ID NO: 284267 - DNA, 20 bp, Artificial Sequence
  Description of Artificial Sequence: Synthetic oligonucleotide
  Target: LAMA2; (-) strand; PAM type: YTN; PAM sequence: TTT
ggcgacgctgtctgctagtt

SEQ ID NO: 284268 - DNA, 20 bp, Artificial Sequence
  Description of Artificial Sequence: Synthetic oligonucleotide
  Target: LAMA2; (-) strand; PAM type: YTN; PAM sequence: TTT
tggcgacgctgtctgctagt

SEQ ID NO: 284269 - DNA, 20 bp, Artificial Sequence
  Description of Artificial Sequence: Synthetic oligonucleotide
  Target: LAMA2; (-) strand; PAM type: YTN; PAM sequence: TTC
gttttggcgacgctgtctgc

SEQ ID NO: 284270 - DNA, 20 bp, Artificial Sequence
  Description of Artificial Sequence: Synthetic oligonucleotide
  Target: LAMA2; (-) strand; PAM type: YTN; PAM sequence: TTA
accacagcattcgttttggc

SEQ ID NO: 284271 - DNA, 20 bp, Artificial Sequence
  Description of Artificial Sequence: Synthetic oligonucleotide
  Target: LAMA2; (-) strand; PAM type: YTN; PAM sequence: TTT
aaccacagcattcgttttgg

SEQ ID NO: 284272 - DNA, 20 bp, Artificial Sequence
  Description of Artificial Sequence: Synthetic oligonucleotide
  Target: LAMA2; (-) strand; PAM type: YTN; PAM sequence: CTT
taaccacagcattcgttttg

SEQ ID NO: 284273 - DNA, 20 bp, Artificial Sequence
  Description of Artificial Sequence: Synthetic oligonucleotide
  Target: LAMA2; (-) strand; PAM type: YTN; PAM sequence: TTG
gaaggatctttaaccacagc

SEQ ID NO: 284274 - DNA, 20 bp, Artificial Sequence
  Description of Artificial Sequence: Synthetic oligonucleotide
  Target: LAMA2; (-) strand; PAM type: YTN; PAM sequence: CTT
ggaaggatctttaaccacag

SEQ ID NO: 284275 - DNA, 20 bp, Artificial Sequence
  Description of Artificial Sequence: Synthetic oligonucleotide
  Target: LAMA2; (-) strand; PAM type: YTN; PAM sequence: TTC
ttggaaggatctttaaccac

SEQ ID NO: 284276 - DNA, 20 bp, Artificial Sequence
  Description of Artificial Sequence: Synthetic oligonucleotide
  Target: LAMA2; (-) strand; PAM type: YTN; PAM sequence: CTG
ttcttggaaggatctttaac

SEQ ID NO: 284277 - DNA, 20 bp, Artificial Sequence
  Description of Artificial Sequence: Synthetic oligonucleotide
  Target: LAMA2; (-) strand; PAM type: YTN; PAM sequence: TTA
ctgttcttggaaggatcttt

SEQ ID NO: 284278 - DNA, 20 bp, Artificial Sequence
  Description of Artificial Sequence: Synthetic oligonucleotide
  Target: LAMA2; (-) strand; PAM type: YTN; PAM sequence: CTT
actgttcttggaaggatctt

SEQ ID NO: 284279 - DNA, 20 bp, Artificial Sequence
  Description of Artificial Sequence: Synthetic oligonucleotide
  Target: LAMA2; (-) strand; PAM type: YTN; PAM sequence: TTA
cagtgagaggaaataaatga

SEQ ID NO: 284280 - DNA, 20 bp, Artificial Sequence
  Description of Artificial Sequence: Synthetic oligonucleotide
  Target: LAMA2; (-) strand; PAM type: YTN; PAM sequence: TTT
acagtgagaggaaataaatg

SEQ ID NO: 284281 - DNA, 20 bp, Artificial Sequence
  Description of Artificial Sequence: Synthetic oligonucleotide
  Target: LAMA2; (-) strand; PAM type: YTN; PAM sequence: TTT
tacagtgagaggaaataaat

SEQ ID NO: 284282 - DNA, 20 bp, Artificial Sequence
  Description of Artificial Sequence: Synthetic oligonucleotide
  Target: LAMA2; (-) strand; PAM type: YTN; PAM sequence: CTT
ttacagtgagaggaaataaa

SEQ ID NO: 284283 - DNA, 20 bp, Artificial Sequence
  Description of Artificial Sequence: Synthetic oligonucleotide
  Target: LAMA2; (-) strand; PAM type: YTN; PAM sequence: CTG
ggatacttttacagtgagag

SEQ ID NO: 284284 - DNA, 20 bp, Artificial Sequence
  Description of Artificial Sequence: Synthetic oligonucleotide
  Target: LAMA2; (-) strand; PAM type: YTN; PAM sequence: TTA
caggtctgggatacttttac

SEQ ID NO: 284285 - DNA, 20 bp, Artificial Sequence
  Description of Artificial Sequence: Synthetic oligonucleotide
  Target: LAMA2; (-) strand; PAM type: YTN; PAM sequence: TTT
acaggtctgggatactttta

SEQ ID NO: 284286 - DNA, 20 bp, Artificial Sequence
  Description of Artificial Sequence: Synthetic oligonucleotide
  Target: LAMA2; (-) strand; PAM type: YTN; PAM sequence: CTC
gagcatttacaggtctggga

SEQ ID NO: 284287 - DNA, 20 bp, Artificial Sequence
  Description of Artificial Sequence: Synthetic oligonucleotide
  Target: LAMA2; (-) strand; PAM type: YTN; PAM sequence: TTC
caactcgagcatttacaggt

SEQ ID NO: 284288 - DNA, 20 bp, Artificial Sequence
  Description of Artificial Sequence: Synthetic oligonucleotide
  Target: LAMA2; (-) strand; PAM type: YTN; PAM sequence: TTT
ccaactcgagcatttacagg

SEQ ID NO: 284289 - DNA, 20 bp, Artificial Sequence
  Description of Artificial Sequence: Synthetic oligonucleotide
  Target: LAMA2; (-) strand; PAM type: YTN; PAM sequence: CTT
tccaactcgagcatttacag

SEQ ID NO: 284290 - DNA, 20 bp, Artificial Sequence
  Description of Artificial Sequence: Synthetic oligonucleotide
  Target: LAMA2; (-) strand; PAM type: YTN; PAM sequence: CTA
caccaccatgagggtctttc

SEQ ID NO: 284291 - DNA, 20 bp, Artificial Sequence
  Description of Artificial Sequence: Synthetic oligonucleotide
  Target: LAMA2; (-) strand; PAM type: YTN; PAM sequence: CTA
tgaaagaaggaaggcagact

SEQ ID NO: 284292 - DNA, 20 bp, Artificial Sequence
  Description of Artificial Sequence: Synthetic oligonucleotide
  Target: LAMA2; (-) strand; PAM type: YTN; PAM sequence: CTG
aggccaatctatgaaagaag

SEQ ID NO: 284293 - DNA, 20 bp, Artificial Sequence
  Description of Artificial Sequence: Synthetic oligonucleotide
  Target: LAMA2; (-) strand; PAM type: YTN; PAM sequence: TTC
tgaggccaatctatgaaaga

SEQ ID NO: 284294 - DNA, 20 bp, Artificial Sequence
  Description of Artificial Sequence: Synthetic oligonucleotide
  Target: LAMA2; (-) strand; PAM type: YTN; PAM sequence: TTT
ctgaggccaatctatgaaag

SEQ ID NO: 284295 - DNA, 20 bp, Artificial Sequence
  Description of Artificial Sequence: Synthetic oligonucleotide
  Target: LAMA2; (-) strand; PAM type: YTN; PAM sequence: CTC
aatttctgaggccaatctat

SEQ ID NO: 284296 - DNA, 20 bp, Artificial Sequence
  Description of Artificial Sequence: Synthetic oligonucleotide
  Target: LAMA2; (-) strand; PAM type: YTN; PAM sequence: CTG
catgacactcaatttctgag

SEQ ID NO: 284297 - DNA, 20 bp, Artificial Sequence
  Description of Artificial Sequence: Synthetic oligonucleotide
  Target: LAMA2; (-) strand; PAM type: YTN; PAM sequence: TTG
gaactgcatgacactcaatt

SEQ ID NO: 284298 - DNA, 20 bp, Artificial Sequence
  Description of Artificial Sequence: Synthetic oligonucleotide
  Target: LAMA2; (-) strand; PAM type: YTN; PAM sequence: TTT
ggaactgcatgacactcaat

SEQ ID NO: 284299 - DNA, 20 bp, Artificial Sequence
  Description of Artificial Sequence: Synthetic oligonucleotide
  Target: LAMA2; (-) strand; PAM type: YTN; PAM sequence: CTT
tggaactgcatgacactcaa

SEQ ID NO: 284300 - DNA, 20 bp, Artificial Sequence
  Description of Artificial Sequence: Synthetic oligonucleotide
  Target: LAMA2; (-) strand; PAM type: YTN; PAM sequence: TTC
cagctttggaactgcatgac

SEQ ID NO: 284301 - DNA, 20 bp, Artificial Sequence
  Description of Artificial Sequence: Synthetic oligonucleotide
  Target: LAMA2; (-) strand; PAM type: YTN; PAM sequence: TTG
gattccagctttggaactgc

SEQ ID NO: 284302 - DNA, 20 bp, Artificial Sequence
  Description of Artificial Sequence: Synthetic oligonucleotide
  Target: LAMA2; (-) strand; PAM type: YTN; PAM sequence: CTT
ggattccagctttggaactg

SEQ ID NO: 284303 - DNA, 20 bp, Artificial Sequence
  Description of Artificial Sequence: Synthetic oligonucleotide
  Target: LAMA2; (-) strand; PAM type: YTN; PAM sequence: CTA
gaagacttggattccagctt

SEQ ID NO: 284304 - DNA, 20 bp, Artificial Sequence
  Description of Artificial Sequence: Synthetic oligonucleotide
  Target: LAMA2; (-) strand; PAM type: YTN; PAM sequence: TTC
agaggaaaaaagcaccgggg

SEQ ID NO: 284305 - DNA, 20 bp, Artificial Sequence
  Description of Artificial Sequence: Synthetic oligonucleotide
  Target: LAMA2; (-) strand; PAM type: YTN; PAM sequence: TTT
cagaggaaaaaagcaccggg

SEQ ID NO: 284306 - DNA, 20 bp, Artificial Sequence
  Description of Artificial Sequence: Synthetic oligonucleotide
  Target: LAMA2; (-) strand; PAM type: YTN; PAM sequence: CTG
gaaaaatttcagaggaaaaa

SEQ ID NO: 284307 - DNA, 20 bp, Artificial Sequence
  Description of Artificial Sequence: Synthetic oligonucleotide
  Target: LAMA2; (-) strand; PAM type: YTN; PAM sequence: CTC
aactggaaaaatttcagagg

SEQ ID NO: 284308 - DNA, 20 bp, Artificial Sequence
  Description of Artificial Sequence: Synthetic oligonucleotide
  Target: LAMA2; (-) strand; PAM type: YTN; PAM sequence: TTC
tcaactggaaaaatttcaga

SEQ ID NO: 284309 - DNA, 20 bp, Artificial Sequence
  Description of Artificial Sequence: Synthetic oligonucleotide
  Target: LAMA2; (-) strand; PAM type: YTN; PAM sequence: CTT
ctcaactggaaaaatttcag

SEQ ID NO: 284310 - DNA, 20 bp, Artificial Sequence
  Description of Artificial Sequence: Synthetic oligonucleotide
  Target: LAMA2; (-) strand; PAM type: YTN; PAM sequence: CTC
ttctcaactggaaaaatttc

SEQ ID NO: 284311 - DNA, 20 bp, Artificial Sequence
  Description of Artificial Sequence: Synthetic oligonucleotide
  Target: LAMA2; (-) strand; PAM type: YTN; PAM sequence: CTA
atctcttctcaactggaaaa

SEQ ID NO: 284312 - DNA, 20 bp, Artificial Sequence
  Description of Artificial Sequence: Synthetic oligonucleotide
  Target: LAMA2; (-) strand; PAM type: YTN; PAM sequence: TTC
ctaatctcttctcaactgga

SEQ ID NO: 284313 - DNA, 20 bp, Artificial Sequence
  Description of Artificial Sequence: Synthetic oligonucleotide
  Target: LAMA2; (-) strand; PAM type: YTN; PAM sequence: TTG
agaattcctaatctcttctc

SEQ ID NO: 284314 - DNA, 20 bp, Artificial Sequence
  Description of Artificial Sequence: Synthetic oligonucleotide
  Target: LAMA2; (-) strand; PAM type: YTN; PAM sequence: CTT
gagaattcctaatctcttct

SEQ ID NO: 284315 - DNA, 20 bp, Artificial Sequence
  Description of Artificial Sequence: Synthetic oligonucleotide
  Target: LAMA2; (-) strand; PAM type: YTN; PAM sequence: TTA
ggcacaccttgagaattcct

SEQ ID NO: 284316 - DNA, 20 bp, Artificial Sequence
  Description of Artificial Sequence: Synthetic oligonucleotide
  Target: LAMA2; (-) strand; PAM type: YTN; PAM sequence: CTG
aatgttaggcacaccttgag

SEQ ID NO: 284317 - DNA, 20 bp, Artificial Sequence
  Description of Artificial Sequence: Synthetic oligonucleotide
  Target: LAMA2; (-) strand; PAM type: YTN; PAM sequence: CTG
ctgaatgttaggcacacctt

SEQ ID NO: 284318 - DNA, 20 bp, Artificial Sequence
  Description of Artificial Sequence: Synthetic oligonucleotide
  Target: LAMA2; (-) strand; PAM type: YTN; PAM sequence: CTC
tgctgaatgttaggcacacc

SEQ ID NO: 284319 - DNA, 20 bp, Artificial Sequence
  Description of Artificial Sequence: Synthetic oligonucleotide
  Target: LAMA2; (-) strand; PAM type: YTN; PAM sequence: CTC
tctgctgaatgttaggcaca

SEQ ID NO: 284320 - DNA, 20 bp, Artificial Sequence
  Description of Artificial Sequence: Synthetic oligonucleotide
  Target: LAMA2; (-) strand; PAM type: YTN; PAM sequence: TTG
catctctctgctgaatgtta

SEQ ID NO: 284321 - DNA, 20 bp, Artificial Sequence
  Description of Artificial Sequence: Synthetic oligonucleotide
  Target: LAMA2; (-) strand; PAM type: YTN; PAM sequence: TTT
gcatctctctgctgaatgtt

SEQ ID NO: 284322 - DNA, 20 bp, Artificial Sequence
  Description of Artificial Sequence: Synthetic oligonucleotide
  Target: LAMA2; (-) strand; PAM type: YTN; PAM sequence: TTT
tgcatctctctgctgaatgt

SEQ ID NO: 284323 - DNA, 20 bp, Artificial Sequence
  Description of Artificial Sequence: Synthetic oligonucleotide
  Target: LAMA2; (-) strand; PAM type: YTN; PAM sequence: TTA
aaaagtgttttgcatctctc

SEQ ID NO: 284324 - DNA, 20 bp, Artificial Sequence
  Description of Artificial Sequence: Synthetic oligonucleotide
  Target: LAMA2; (-) strand; PAM type: YTN; PAM sequence: TTA
cacacacggattaaaaagtg

SEQ ID NO: 284325 - DNA, 20 bp, Artificial Sequence
  Description of Artificial Sequence: Synthetic oligonucleotide
  Target: LAMA2; (-) strand; PAM type: YTN; PAM sequence: TTA
attacacacacggattaaaa

SEQ ID NO: 284326 - DNA, 20 bp, Artificial Sequence
  Description of Artificial Sequence: Synthetic oligonucleotide
  Target: LAMA2; (-) strand; PAM type: YTN; PAM sequence: TTT
aattacacacacggattaaa

SEQ ID NO: 284327 - DNA, 20 bp, Artificial Sequence
  Description of Artificial Sequence: Synthetic oligonucleotide
  Target: LAMA2; (-) strand; PAM type: YTN; PAM sequence: TTT
taattacacacacggattaa

SEQ ID NO: 284328 - DNA, 20 bp, Artificial Sequence
  Description of Artificial Sequence: Synthetic oligonucleotide
  Target: LAMA2; (-) strand; PAM type: YTN; PAM sequence: TTT
ttaattacacacacggatta

SEQ ID NO: 284329 - DNA, 20 bp, Artificial Sequence
  Description of Artificial Sequence: Synthetic oligonucleotide
  Target: LAMA2; (-) strand; PAM type: YTN; PAM sequence: CTG
tgtttttaattacacacacg

SEQ ID NO: 284330 - DNA, 20 bp, Artificial Sequence
  Description of Artificial Sequence: Synthetic oligonucleotide
  Target: LAMA2; (-) strand; PAM type: YTN; PAM sequence: TTA
cccaagtacaactgtgtttt

SEQ ID NO: 284331 - DNA, 20 bp, Artificial Sequence
  Description of Artificial Sequence: Synthetic oligonucleotide
  Target: LAMA2; (-) strand; PAM type: YTN; PAM sequence: CTG
aggatataattacccaagta

SEQ ID NO: 284332 - DNA, 20 bp, Artificial Sequence
  Description of Artificial Sequence: Synthetic oligonucleotide
  Target: LAMA2; (-) strand; PAM type: YTN; PAM sequence: TTC
tgaggatataattacccaag

SEQ ID NO: 284333 - DNA, 20 bp, Artificial Sequence
  Description of Artificial Sequence: Synthetic oligonucleotide
  Target: LAMA2; (-) strand; PAM type: YTN; PAM sequence: TTC
gccagttctgaggatataat

SEQ ID NO: 284334 - DNA, 20 bp, Artificial Sequence
  Description of Artificial Sequence: Synthetic oligonucleotide
  Target: LAMA2; (-) strand; PAM type: YTN; PAM sequence: CTT
cgccagttctgaggatataa

SEQ ID NO: 284335 - DNA, 20 bp, Artificial Sequence
  Description of Artificial Sequence: Synthetic oligonucleotide
  Target: LAMA2; (-) strand; PAM type: YTN; PAM sequence: TTC
catgacacttcgccagttct

SEQ ID NO: 284336 - DNA, 20 bp, Artificial Sequence
  Description of Artificial Sequence: Synthetic oligonucleotide
  Target: LAMA2; (-) strand; PAM type: YTN; PAM sequence: CTA
tgttccatgacacttcgcca

SEQ ID NO: 284337 - DNA, 20 bp, Artificial Sequence
  Description of Artificial Sequence: Synthetic oligonucleotide
  Target: LAMA2; (-) strand; PAM type: YTN; PAM sequence: CTC
tatgttccatgacacttcgc

SEQ ID NO: 284338 - DNA, 20 bp, Artificial Sequence
  Description of Artificial Sequence: Synthetic oligonucleotide
  Target: LAMA2; (-) strand; PAM type: YTN; PAM sequence: TTA
acctctatgttccatgacac

SEQ ID NO: 284339 - DNA, 20 bp, Artificial Sequence
  Description of Artificial Sequence: Synthetic oligonucleotide
  Target: LAMA2; (-) strand; PAM type: YTN; PAM sequence: CTT
aacctctatgttccatgaca

SEQ ID NO: 284340 - DNA, 20 bp, Artificial Sequence
  Description of Artificial Sequence: Synthetic oligonucleotide
  Target: LAMA2; (-) strand; PAM type: YTN; PAM sequence: TTC
atgaacgtgccccttaacct

SEQ ID NO: 284341 - DNA, 20 bp, Artificial Sequence
  Description of Artificial Sequence: Synthetic oligonucleotide
  Target: LAMA2; (-) strand; PAM type: YTN; PAM sequence: CTG
ttcatgaacgtgccccttaa

SEQ ID NO: 284342 - DNA, 20 bp, Artificial Sequence
  Description of Artificial Sequence: Synthetic oligonucleotide
  Target: LAMA2; (-) strand; PAM type: YTN; PAM sequence: CTA
acaagtctgttcatgaacgt

SEQ ID NO: 284343 - DNA, 20 bp, Artificial Sequence
  Description of Artificial Sequence: Synthetic oligonucleotide
  Target: LAMA2; (-) strand; PAM type: YTN; PAM sequence: TTC
taacaagtctgttcatgaac

SEQ ID NO: 284344 - DNA, 20 bp, Artificial Sequence
  Description of Artificial Sequence: Synthetic oligonucleotide
  Target: LAMA2; (-) strand; PAM type: YTN; PAM sequence: CTG
ttctaacaagtctgttcatg

SEQ ID NO: 284345 - DNA, 20 bp, Artificial Sequence
  Description of Artificial Sequence: Synthetic oligonucleotide
  Target: LAMA2; (-) strand; PAM type: YTN; PAM sequence: TTC
atatcctgttctaacaagtc

SEQ ID NO: 284346 - DNA, 20 bp, Artificial Sequence
  Description of Artificial Sequence: Synthetic oligonucleotide
  Target: LAMA2; (-) strand; PAM type: YTN; PAM sequence: TTT
catatcctgttctaacaagt

SEQ ID NO: 284347 - DNA, 20 bp, Artificial Sequence
  Description of Artificial Sequence: Synthetic oligonucleotide
  Target: LAMA2; (-) strand; PAM type: YTN; PAM sequence: TTT
tcatatcctgttctaacaag

SEQ ID NO: 284348 - DNA, 20 bp, Artificial Sequence
  Description of Artificial Sequence: Synthetic oligonucleotide
  Target: LAMA2; (-) strand; PAM type: YTN; PAM sequence: TTG
atatcattttcatatcctgt

SEQ ID NO: 284349 - DNA, 20 bp, Artificial Sequence
  Description of Artificial Sequence: Synthetic oligonucleotide
  Target: LAMA2; (-) strand; PAM type: YTN; PAM sequence: TTC
aagttgatatcattttcata

SEQ ID NO: 284350 - DNA, 20 bp, Artificial Sequence
  Description of Artificial Sequence: Synthetic oligonucleotide
  Target: LAMA2; (-) strand; PAM type: YTN; PAM sequence: TTT
caagttgatatcattttcat

SEQ ID NO: 284351 - DNA, 20 bp, Artificial Sequence
  Description of Artificial Sequence: Synthetic oligonucleotide
  Target: LAMA2; (-) strand; PAM type: YTN; PAM sequence: TTA
atgcatttcaagttgatatc

SEQ ID NO: 284352 - DNA, 20 bp, Artificial Sequence
  Description of Artificial Sequence: Synthetic oligonucleotide
  Target: LAMA2; (-) strand; PAM type: YTN; PAM sequence: TTT
aatgcatttcaagttgatat

SEQ ID NO: 284353 - DNA, 20 bp, Artificial Sequence
  Description of Artificial Sequence: Synthetic oligonucleotide
  Target: LAMA2; (-) strand; PAM type: YTN; PAM sequence: TTT
taatgcatttcaagttgata

SEQ ID NO: 284354 - DNA, 20 bp, Artificial Sequence
  Description of Artificial Sequence: Synthetic oligonucleotide
  Target: LAMA2; (-) strand; PAM type: YTN; PAM sequence: TTC
aaattttaatgcatttcaag

SEQ ID NO: 284355 - DNA, 20 bp, Artificial Sequence
  Description of Artificial Sequence: Synthetic oligonucleotide
  Target: LAMA2; (-) strand; PAM type: YTN; PAM sequence: TTT
caaattttaatgcatttcaa

SEQ ID NO: 284356 - DNA, 20 bp, Artificial Sequence
  Description of Artificial Sequence: Synthetic oligonucleotide
  Target: LAMA2; (-) strand; PAM type: YTN; PAM sequence: TTT
tcaaattttaatgcatttca

SEQ ID NO: 284357 - DNA, 20 bp, Artificial Sequence
  Description of Artificial Sequence: Synthetic oligonucleotide
  Target: LAMA2; (-) strand; PAM type: YTN; PAM sequence: CTA
aataataaaatatcaagatt

SEQ ID NO: 284358 - DNA, 20 bp, Artificial Sequence
  Description of Artificial Sequence: Synthetic oligonucleotide
  Target: LAMA2; (-) strand; PAM type: YTN; PAM sequence: CTG
gaatctaaataataaaatat

SEQ ID NO: 284359 - DNA, 20 bp, Artificial Sequence
  Description of Artificial Sequence: Synthetic oligonucleotide
  Target: LAMA2; (-) strand; PAM type: YTN; PAM sequence: TTC
ccagaaatgtgatgtaactg

SEQ ID NO: 284360 - DNA, 20 bp, Artificial Sequence
  Description of Artificial Sequence: Synthetic oligonucleotide
  Target: LAMA2; (-) strand; PAM type: YTN; PAM sequence: TTT
cccagaaatgtgatgtaact

SEQ ID NO: 284361 - DNA, 20 bp, Artificial Sequence
  Description of Artificial Sequence: Synthetic oligonucleotide
  Target: LAMA2; (-) strand; PAM type: YTN; PAM sequence: TTA
tttcccagaaatgtgatgta

SEQ ID NO: 284362 - DNA, 20 bp, Artificial Sequence
  Description of Artificial Sequence: Synthetic oligonucleotide
  Target: LAMA2; (-) strand; PAM type: YTN; PAM sequence: TTT
atttcccagaaatgtgatgt

SEQ ID NO: 284363 - DNA, 20 bp, Artificial Sequence
  Description of Artificial Sequence: Synthetic oligonucleotide
  Target: LAMA2; (-) strand; PAM type: YTN; PAM sequence: TTT
tatttcccagaaatgtgatg

SEQ ID NO: 284364 - DNA, 20 bp, Artificial Sequence
  Description of Artificial Sequence: Synthetic oligonucleotide
  Target: LAMA2; (-) strand; PAM type: YTN; PAM sequence: TTT
ttatttcccagaaatgtgat

SEQ ID NO: 284365 - DNA, 20 bp, Artificial Sequence
  Description of Artificial Sequence: Synthetic oligonucleotide
  Target: LAMA2; (-) strand; PAM type: YTN; PAM sequence: TTA
tttttatttcccagaaatgt

SEQ ID NO: 284366 - DNA, 20 bp, Artificial Sequence
  Description of Artificial Sequence: Synthetic oligonucleotide
  Target: LAMA2; (-) strand; PAM type: YTN; PAM sequence: TTT
atttttatttcccagaaatg

SEQ ID NO: 284367 - DNA, 20 bp, Artificial Sequence
  Description of Artificial Sequence: Synthetic oligonucleotide
  Target: LAMA2; (-) strand; PAM type: YTN; PAM sequence: CTT
tatttttatttcccagaaat

SEQ ID NO: 284368 - DNA, 20 bp, Artificial Sequence
  Description of Artificial Sequence: Synthetic oligonucleotide
  Target: LAMA2; (-) strand; PAM type: YTN; PAM sequence: CTA
gataaatgctttatttttat

SEQ ID NO: 284369 - DNA, 20 bp, Artificial Sequence
  Description of Artificial Sequence: Synthetic oligonucleotide
  Target: LAMA2; (-) strand; PAM type: YTN; PAM sequence: TTA
gaaactagataaatgcttta

SEQ ID NO: 284370 - DNA, 20 bp, Artificial Sequence
  Description of Artificial Sequence: Synthetic oligonucleotide
  Target: LAMA2; (-) strand; PAM type: YTN; PAM sequence: TTT
agaaactagataaatgcttt

SEQ ID NO: 284371 - DNA, 20 bp, Artificial Sequence
  Description of Artificial Sequence: Synthetic oligonucleotide
  Target: LAMA2; (-) strand; PAM type: YTN; PAM sequence: CTT
tagaaactagataaatgctt

SEQ ID NO: 284372 - DNA, 20 bp, Artificial Sequence
  Description of Artificial Sequence: Synthetic oligonucleotide
  Target: LAMA2; (-) strand; PAM type: YTN; PAM sequence: TTA
tataatatataagagatgtg

SEQ ID NO: 284373 - DNA, 20 bp, Artificial Sequence
  Description of Artificial Sequence: Synthetic oligonucleotide
  Target: LAMA2; (-) strand; PAM type: YTN; PAM sequence: TTT
atataatatataagagatgt

SEQ ID NO: 284374 - DNA, 20 bp, Artificial Sequence
  Description of Artificial Sequence: Synthetic oligonucleotide
  Target: LAMA2; (-) strand; PAM type: YTN; PAM sequence: TTT
tatataatatataagagatg

SEQ ID NO: 284375 - DNA, 20 bp, Artificial Sequence
  Description of Artificial Sequence: Synthetic oligonucleotide
  Target: LAMA2; (-) strand; PAM type: YTN; PAM sequence: TTA
agtcaatataattttatata

SEQ ID NO: 284376 - DNA, 20 bp, Artificial Sequence
  Description of Artificial Sequence: Synthetic oligonucleotide
  Target: LAMA2; (-) strand; PAM type: YTN; PAM sequence: CTT
aagtcaatataattttatat

SEQ ID NO: 284377 - DNA, 20 bp, Artificial Sequence
  Description of Artificial Sequence: Synthetic oligonucleotide
  Target: LAMA2; (-) strand; PAM type: YTN; PAM sequence: CTC
agtaaatccttaagtcaata

SEQ ID NO: 284378 - DNA, 20 bp, Artificial Sequence
  Description of Artificial Sequence: Synthetic oligonucleotide
  Target: LAMA2; (-) strand; PAM type: YTN; PAM sequence: TTC
tcagtaaatccttaagtcaa

SEQ ID NO: 284379 - DNA, 20 bp, Artificial Sequence
  Description of Artificial Sequence: Synthetic oligonucleotide
  Target: LAMA2; (-) strand; PAM type: YTN; PAM sequence: TTT
ctcagtaaatccttaagtca

SEQ ID NO: 284380 - DNA, 20 bp, Artificial Sequence
  Description of Artificial Sequence: Synthetic oligonucleotide
  Target: LAMA2; (-) strand; PAM type: YTN; PAM sequence: TTT
tctcagtaaatccttaagtc

SEQ ID NO: 284381 - DNA, 20 bp, Artificial Sequence
  Description of Artificial Sequence: Synthetic oligonucleotide
  Target: LAMA2; (-) strand; PAM type: YTN; PAM sequence: CTC
aggttttctcagtaaatcct

SEQ ID NO: 284382 - DNA, 20 bp, Artificial Sequence
  Description of Artificial Sequence: Synthetic oligonucleotide
  Target: LAMA2; (-) strand; PAM type: YTN; PAM sequence: CTC
tcaggttttctcagtaaatc

SEQ ID NO: 284383 - DNA, 20 bp, Artificial Sequence
  Description of Artificial Sequence: Synthetic oligonucleotide
  Target: LAMA2; (-) strand; PAM type: YTN; PAM sequence: TTC
tctcaggttttctcagtaaa

SEQ ID NO: 284384 - DNA, 20 bp, Artificial Sequence
  Description of Artificial Sequence: Synthetic oligonucleotide
  Target: LAMA2; (-) strand; PAM type: YTN; PAM sequence: TTT
ctctcaggttttctcagtaa

SEQ ID NO: 284385 - DNA, 20 bp, Artificial Sequence
  Description of Artificial Sequence: Synthetic oligonucleotide
  Target: LAMA2; (-) strand; PAM type: YTN; PAM sequence: TTT
tctctcaggttttctcagta

SEQ ID NO: 284386 - DNA, 20 bp, Artificial Sequence
  Description of Artificial Sequence: Synthetic oligonucleotide
  Target: LAMA2; (-) strand; PAM type: YTN; PAM sequence: TTA
tgatattttctctcaggttt

SEQ ID NO: 284387 - DNA, 20 bp, Artificial Sequence
  Description of Artificial Sequence: Synthetic oligonucleotide
  Target: LAMA2; (-) strand; PAM type: YTN; PAM sequence: CTA
ataatataagttatgatatt

SEQ ID NO: 284388 - DNA, 20 bp, Artificial Sequence
  Description of Artificial Sequence: Synthetic oligonucleotide
  Target: LAMA2; (-) strand; PAM type: YTN; PAM sequence: TTA
actaataatataagttatga

SEQ ID NO: 284389 - DNA, 20 bp, Artificial Sequence
  Description of Artificial Sequence: Synthetic oligonucleotide
  Target: LAMA2; (-) strand; PAM type: YTN; PAM sequence: TTT
aactaataatataagttatg

SEQ ID NO: 284390 - DNA, 20 bp, Artificial Sequence
  Description of Artificial Sequence: Synthetic oligonucleotide
  Target: LAMA2; (-) strand; PAM type: YTN; PAM sequence: CTA
tatttaactaataatataag

SEQ ID NO: 284391 - DNA, 20 bp, Artificial Sequence
  Description of Artificial Sequence: Synthetic oligonucleotide
  Target: LAMA2; (-) strand; PAM type: YTN; PAM sequence: TTG
actatatttaactaataata

SEQ ID NO: 284392 - DNA, 20 bp, Artificial Sequence
  Description of Artificial Sequence: Synthetic oligonucleotide
  Target: LAMA2; (-) strand; PAM type: YTN; PAM sequence: TTT
gactatatttaactaataat

SEQ ID NO: 284393 - DNA, 20 bp, Artificial Sequence
  Description of Artificial Sequence: Synthetic oligonucleotide
  Target: LAMA2; (-) strand; PAM type: YTN; PAM sequence: TTT
tgactatatttaactaataa

SEQ ID NO: 284394 - DNA, 20 bp, Artificial Sequence
  Description of Artificial Sequence: Synthetic oligonucleotide
  Target: LAMA2; (-) strand; PAM type: YTN; PAM sequence: TTA
atattttgactatatttaac

SEQ ID NO: 284395 - DNA, 20 bp, Artificial Sequence
  Description of Artificial Sequence: Synthetic oligonucleotide
  Target: LAMA2; (-) strand; PAM type: YTN; PAM sequence: CTT
aatattttgactatatttaa

SEQ ID NO: 284396 - DNA, 20 bp, Artificial Sequence
  Description of Artificial Sequence: Synthetic oligonucleotide
  Target: LAMA2; (-) strand; PAM type: YTN; PAM sequence: TTA
aaatcttaatattttgacta

SEQ ID NO: 284397 - DNA, 20 bp, Artificial Sequence
  Description of Artificial Sequence: Synthetic oligonucleotide
  Target: LAMA2; (-) strand; PAM type: YTN; PAM sequence: TTT
aaaatcttaatattttgact

SEQ ID NO: 284398 - DNA, 20 bp, Artificial Sequence
  Description of Artificial Sequence: Synthetic oligonucleotide
  Target: LAMA2; (-) strand; PAM type: YTN; PAM sequence: TTT
taaaatcttaatattttgac

SEQ ID NO: 284399 - DNA, 20 bp, Artificial Sequence
  Description of Artificial Sequence: Synthetic oligonucleotide
  Target: LAMA2; (-) strand; PAM type: YTN; PAM sequence: TTG
acggaaaaggaaaaatgcat

SEQ ID NO: 284400 - DNA, 20 bp, Artificial Sequence
  Description of Artificial Sequence: Synthetic oligonucleotide
  Target: LAMA2; (-) strand; PAM type: YTN; PAM sequence: TTT
gacggaaaaggaaaaatgca

SEQ ID NO: 284401 - DNA, 20 bp, Artificial Sequence
  Description of Artificial Sequence: Synthetic oligonucleotide
  Target: LAMA2; (-) strand; PAM type: YTN; PAM sequence: TTG
tatcatttgacggaaaagga

SEQ ID NO: 284402 - DNA, 20 bp, Artificial Sequence
  Description of Artificial Sequence: Synthetic oligonucleotide
  Target: LAMA2; (-) strand; PAM type: YTN; PAM sequence: CTT
gtatcatttgacggaaaagg

SEQ ID NO: 284403 - DNA, 20 bp, Artificial Sequence
  Description of Artificial Sequence: Synthetic oligonucleotide
  Target: LAMA2; (-) strand; PAM type: YTN; PAM sequence: CTG
gcccaatatagccttgtatc

SEQ ID NO: 284404 - DNA, 20 bp, Artificial Sequence
  Description of Artificial Sequence: Synthetic oligonucleotide
  Target: LAMA2; (-) strand; PAM type: YTN; PAM sequence: CTG
tacctggcccaatatagcct

SEQ ID NO: 284405 - DNA, 20 bp, Artificial Sequence
  Description of Artificial Sequence: Synthetic oligonucleotide
  Target: LAMA2; (-) strand; PAM type: YTN; PAM sequence: TTA
accactgtacctggcccaat

SEQ ID NO: 284406 - DNA, 20 bp, Artificial Sequence
  Description of Artificial Sequence: Synthetic oligonucleotide
  Target: LAMA2; (-) strand; PAM type: YTN; PAM sequence: TTA
caggtgttaaccactgtacc

SEQ ID NO: 284407 - DNA, 20 bp, Artificial Sequence
  Description of Artificial Sequence: Synthetic oligonucleotide
  Target: LAMA2; (-) strand; PAM type: YTN; PAM sequence: CTC
ccaaagtgcaaagattacag

SEQ ID NO: 284408 - DNA, 20 bp, Artificial Sequence
  Description of Artificial Sequence: Synthetic oligonucleotide
  Target: LAMA2; (-) strand; PAM type: YTN; PAM sequence: CTC
aggctcccaaagtgcaaaga

SEQ ID NO: 284409 - DNA, 20 bp, Artificial Sequence
  Description of Artificial Sequence: Synthetic oligonucleotide
  Target: LAMA2; (-) strand; PAM type: YTN; PAM sequence: CTC
gcctcaggctcccaaagtgc

SEQ ID NO: 284410 - DNA, 20 bp, Artificial Sequence
  Description of Artificial Sequence: Synthetic oligonucleotide
  Target: LAMA2; (-) strand; PAM type: YTN; PAM sequence: CTC
tcgcctcaggctcccaaagt

SEQ ID NO: 284411 - DNA, 20 bp, Artificial Sequence
  Description of Artificial Sequence: Synthetic oligonucleotide
  Target: LAMA2; (-) strand; PAM type: YTN; PAM sequence: CTC
aagtgatcctctcgcctcag

SEQ ID NO: 284412 - DNA, 20 bp, Artificial Sequence
  Description of Artificial Sequence: Synthetic oligonucleotide
  Target: LAMA2; (-) strand; PAM type: YTN; PAM sequence: CTA
ggctcaagtgatcctctcgc

SEQ ID NO: 284413 - DNA, 20 bp, Artificial Sequence
  Description of Artificial Sequence: Synthetic oligonucleotide
  Target: LAMA2; (-) strand; PAM type: YTN; PAM sequence: TTC
ctaggctcaagtgatcctct

SEQ ID NO: 284414 - DNA, 20 bp, Artificial Sequence
  Description of Artificial Sequence: Synthetic oligonucleotide
  Target: LAMA2; (-) strand; PAM type: YTN; PAM sequence: CTC
gaattcctaggctcaagtga

SEQ ID NO: 284415 - DNA, 20 bp, Artificial Sequence
  Description of Artificial Sequence: Synthetic oligonucleotide
  Target: LAMA2; (-) strand; PAM type: YTN; PAM sequence: CTG
gtctcgaattcctaggctca

SEQ ID NO: 284416 - DNA, 20 bp, Artificial Sequence
  Description of Artificial Sequence: Synthetic oligonucleotide
  Target: LAMA2; (-) strand; PAM type: YTN; PAM sequence: CTA
tggtgcccaggctggtctcg

SEQ ID NO: 284417 - DNA, 20 bp, Artificial Sequence
  Description of Artificial Sequence: Synthetic oligonucleotide
  Target: LAMA2; (-) strand; PAM type: YTN; PAM sequence: TTG
ctatggtgcccaggctggtc

SEQ ID NO: 284418 - DNA, 20 bp, Artificial Sequence
  Description of Artificial Sequence: Synthetic oligonucleotide
  Target: LAMA2; (-) strand; PAM type: YTN; PAM sequence: CTT
gctatggtgcccaggctggt

SEQ ID NO: 284419 - DNA, 20 bp, Artificial Sequence
  Description of Artificial Sequence: Synthetic oligonucleotide
  Target: LAMA2; (-) strand; PAM type: YTN; PAM sequence: TTG
taaagatggggtcttgctat

SEQ ID NO: 284420 - DNA, 20 bp, Artificial Sequence
  Description of Artificial Sequence: Synthetic oligonucleotide
  Target: LAMA2; (-) strand; PAM type: YTN; PAM sequence: TTT
gtaaagatggggtcttgcta

SEQ ID NO: 284421 - DNA, 20 bp, Artificial Sequence
  Description of Artificial Sequence: Synthetic oligonucleotide
  Target: LAMA2; (-) strand; PAM type: YTN; PAM sequence: TTT
tgtaaagatggggtcttgct

SEQ ID NO: 284422 - DNA, 20 bp, Artificial Sequence
  Description of Artificial Sequence: Synthetic oligonucleotide
  Target: LAMA2; (-) strand; PAM type: YTN; PAM sequence: TTT
ttgtaaagatggggtcttgc

SEQ ID NO: 284423 - DNA, 20 bp, Artificial Sequence
  Description of Artificial Sequence: Synthetic oligonucleotide
  Target: LAMA2; (-) strand; PAM type: YTN; PAM sequence: TTT
tttgtaaagatggggtcttg

SEQ ID NO: 284424 - DNA, 20 bp, Artificial Sequence
  Description of Artificial Sequence: Synthetic oligonucleotide
  Target: LAMA2; (-) strand; PAM type: YTN; PAM sequence: TTA
aattttttgtaaagatgggg

SEQ ID NO: 284425 - DNA, 20 bp, Artificial Sequence
  Description of Artificial Sequence: Synthetic oligonucleotide
  Target: LAMA2; (-) strand; PAM type: YTN; PAM sequence: TTT
aaattttttgtaaagatggg

SEQ ID NO: 284426 - DNA, 20 bp, Artificial Sequence
  Description of Artificial Sequence: Synthetic oligonucleotide
  Target: LAMA2; (-) strand; PAM type: YTN; PAM sequence: TTT
taaattttttgtaaagatgg

SEQ ID NO: 284427 - DNA, 20 bp, Artificial Sequence
  Description of Artificial Sequence: Synthetic oligonucleotide
  Target: LAMA2; (-) strand; PAM type: YTN; PAM sequence: TTT
ttaaattttttgtaaagatg

SEQ ID NO: 284428 - DNA, 20 bp, Artificial Sequence
  Description of Artificial Sequence: Synthetic oligonucleotide
  Target: LAMA2; (-) strand; PAM type: YTN; PAM sequence: TTT
tttaaattttttgtaaagat

SEQ ID NO: 284429 - DNA, 20 bp, Artificial Sequence
  Description of Artificial Sequence: Synthetic oligonucleotide
  Target: LAMA2; (-) strand; PAM type: YTN; PAM sequence: CTA
ttttttaaattttttgtaaa

SEQ ID NO: 284430 - DNA, 20 bp, Artificial Sequence
  Description of Artificial Sequence: Synthetic oligonucleotide
  Target: LAMA2; (-) strand; PAM type: YTN; PAM sequence: CTG
gctattttttaaattttttg

SEQ ID NO: 284431 - DNA, 20 bp, Artificial Sequence
  Description of Artificial Sequence: Synthetic oligonucleotide
  Target: LAMA2; (-) strand; PAM type: YTN; PAM sequence: CTA
ccatgcctggctatttttta

SEQ ID NO: 284432 - DNA, 20 bp, Artificial Sequence
  Description of Artificial Sequence: Synthetic oligonucleotide
  Target: LAMA2; (-) strand; PAM type: YTN; PAM sequence: CTG
ggaacacaggtgcaatgtca

SEQ ID NO: 284433 - DNA, 20 bp, Artificial Sequence
  Description of Artificial Sequence: Synthetic oligonucleotide
  Target: LAMA2; (-) strand; PAM type: YTN; PAM sequence: CTC
ccaagtggctgggaacacag

SEQ ID NO: 284434 - DNA, 20 bp, Artificial Sequence
  Description of Artificial Sequence: Synthetic oligonucleotide
  Target: LAMA2; (-) strand; PAM type: YTN; PAM sequence: CTC
agactcccaagtggctggga

SEQ ID NO: 284435 - DNA, 20 bp, Artificial Sequence
  Description of Artificial Sequence: Synthetic oligonucleotide
  Target: LAMA2; (-) strand; PAM type: YTN; PAM sequence: CTC
cagcctcagactcccaagtg

SEQ ID NO: 284436 - DNA, 20 bp, Artificial Sequence
  Description of Artificial Sequence: Synthetic oligonucleotide
  Target: LAMA2; (-) strand; PAM type: YTN; PAM sequence: TTC
aagggatcctccagcctcag

SEQ ID NO: 284437 - DNA, 20 bp, Artificial Sequence
  Description of Artificial Sequence: Synthetic oligonucleotide
  Target: LAMA2; (-) strand; PAM type: YTN; PAM sequence: CTG
ggttcaagggatcctccagc

SEQ ID NO: 284438 - DNA, 20 bp, Artificial Sequence
  Description of Artificial Sequence: Synthetic oligonucleotide
  Target: LAMA2; (-) strand; PAM type: YTN; PAM sequence: TTC
tgggttcaagggatcctcca

SEQ ID NO: 284439 - DNA, 20 bp, Artificial Sequence
  Description of Artificial Sequence: Synthetic oligonucleotide
  Target: LAMA2; (-) strand; PAM type: YTN; PAM sequence: CTT
ctgggttcaagggatcctcc

SEQ ID NO: 284440 - DNA, 20 bp, Artificial Sequence
  Description of Artificial Sequence: Synthetic oligonucleotide
  Target: LAMA2; (-) strand; PAM type: YTN; PAM sequence: CTC
acccttctgggttcaaggga

SEQ ID NO: 284441 - DNA, 20 bp, Artificial Sequence
  Description of Artificial Sequence: Synthetic oligonucleotide
  Target: LAMA2; (-) strand; PAM type: YTN; PAM sequence: CTG
cagcctcacccttctgggtt

SEQ ID NO: 284442 - DNA, 20 bp, Artificial Sequence
  Description of Artificial Sequence: Synthetic oligonucleotide
  Target: LAMA2; (-) strand; PAM type: YTN; PAM sequence: CTC
actgcagcctcacccttctg

SEQ ID NO: 284443 - DNA, 20 bp, Artificial Sequence
  Description of Artificial Sequence: Synthetic oligonucleotide
  Target: LAMA2; (-) strand; PAM type: YTN; PAM sequence: CTG
gagtgcagtggcgtgatcac

SEQ ID NO: 284444 - DNA, 20 bp, Artificial Sequence
  Description of Artificial Sequence: Synthetic oligonucleotide
  Target: LAMA2; (-) strand; PAM type: YTN; PAM sequence: CTG
ccacccaggctggagtgcag

SEQ ID NO: 284445 - DNA, 20 bp, Artificial Sequence
  Description of Artificial Sequence: Synthetic oligonucleotide
  Target: LAMA2; (-) strand; PAM type: YTN; PAM sequence: CTC
aatctgccacccaggctgga

SEQ ID NO: 284446 - DNA, 20 bp, Artificial Sequence
  Description of Artificial Sequence: Synthetic oligonucleotide
  Target: LAMA2; (-) strand; PAM type: YTN; PAM sequence: TTG
agacagcatctcaatctgcc

SEQ ID NO: 284447 - DNA, 20 bp, Artificial Sequence
  Description of Artificial Sequence: Synthetic oligonucleotide
  Target: LAMA2; (-) strand; PAM type: YTN; PAM sequence: TTT
gagacagcatctcaatctgc

SEQ ID NO: 284448 - DNA, 20 bp, Artificial Sequence
  Description of Artificial Sequence: Synthetic oligonucleotide
  Target: LAMA2; (-) strand; PAM type: YTN; PAM sequence: TTT
tgagacagcatctcaatctg

SEQ ID NO: 284449 - DNA, 20 bp, Artificial Sequence
  Description of Artificial Sequence: Synthetic oligonucleotide
  Target: LAMA2; (-) strand; PAM type: YTN; PAM sequence: TTT
ttgagacagcatctcaatct

SEQ ID NO: 284450 - DNA, 20 bp, Artificial Sequence
  Description of Artificial Sequence: Synthetic oligonucleotide
  Target: LAMA2; (-) strand; PAM type: YTN; PAM sequence: TTT
tttgagacagcatctcaatc

SEQ ID NO: 284451 - DNA, 20 bp, Artificial Sequence
  Description of Artificial Sequence: Synthetic oligonucleotide
  Target: LAMA2; (-) strand; PAM type: YTN; PAM sequence: TTT
ttttgagacagcatctcaat

SEQ ID NO: 284452 - DNA, 20 bp, Artificial Sequence
  Description of Artificial Sequence: Synthetic oligonucleotide
  Target: LAMA2; (-) strand; PAM type: YTN; PAM sequence: TTT
tttttgagacagcatctcaa

SEQ ID NO: 284453 - DNA, 20 bp, Artificial Sequence
  Description of Artificial Sequence: Synthetic oligonucleotide
  Target: LAMA2; (-) strand; PAM type: YTN; PAM sequence: TTT
ttttttgagacagcatctca

SEQ ID NO: 284454 - DNA, 20 bp, Artificial Sequence
  Description of Artificial Sequence: Synthetic oligonucleotide
  Target: LAMA2; (-) strand; PAM type: YTN; PAM sequence: TTT
tttttttgagacagcatctc

SEQ ID NO: 284455 - DNA, 20 bp, Artificial Sequence
  Description of Artificial Sequence: Synthetic oligonucleotide
  Target: LAMA2; (-) strand; PAM type: YTN; PAM sequence: TTT
ttttttttgagacagcatct

SEQ ID NO: 284456 - DNA, 20 bp, Artificial Sequence
  Description of Artificial Sequence: Synthetic oligonucleotide
  Target: LAMA2; (-) strand; PAM type: YTN; PAM sequence: TTT
tttttttttgagacagcatc

SEQ ID NO: 284457 - DNA, 20 bp, Artificial Sequence
  Description of Artificial Sequence: Synthetic oligonucleotide
  Target: LAMA2; (-) strand; PAM type: YTN; PAM sequence: CTT
ttttttttttgagacagcat

SEQ ID NO: 284458 - DNA, 20 bp, Artificial Sequence
  Description of Artificial Sequence: Synthetic oligonucleotide
  Target: LAMA2; (-) strand; PAM type: YTN; PAM sequence: TTG
gtgaaaccatgtaacaagga

SEQ ID NO: 284459 - DNA, 20 bp, Artificial Sequence
  Description of Artificial Sequence: Synthetic oligonucleotide
  Target: LAMA2; (-) strand; PAM type: YTN; PAM sequence: TTT
ggtgaaaccatgtaacaagg

SEQ ID NO: 284460 - DNA, 20 bp, Artificial Sequence
  Description of Artificial Sequence: Synthetic oligonucleotide
  Target: LAMA2; (-) strand; PAM type: YTN; PAM sequence: CTT
tggtgaaaccatgtaacaag

SEQ ID NO: 284461 - DNA, 20 bp, Artificial Sequence
  Description of Artificial Sequence: Synthetic oligonucleotide
  Target: LAMA2; (-) strand; PAM type: YTN; PAM sequence: CTC
ctttggtgaaaccatgtaac

SEQ ID NO: 284462 - DNA, 20 bp, Artificial Sequence
  Description of Artificial Sequence: Synthetic oligonucleotide
  Target: LAMA2; (-) strand; PAM type: YTN; PAM sequence: TTA
cccaagcatctcctttggtg

SEQ ID NO: 284463 - DNA, 20 bp, Artificial Sequence
  Description of Artificial Sequence: Synthetic oligonucleotide
  Target: LAMA2; (-) strand; PAM type: YTN; PAM sequence: TTG
aaagtgaaaagcacagatta

SEQ ID NO: 284464 - DNA, 20 bp, Artificial Sequence
  Description of Artificial Sequence: Synthetic oligonucleotide
  Target: LAMA2; (-) strand; PAM type: YTN; PAM sequence: CTT
gaaagtgaaaagcacagatt

SEQ ID NO: 284465 - DNA, 20 bp, Artificial Sequence
  Description of Artificial Sequence: Synthetic oligonucleotide
  Target: LAMA2; (-) strand; PAM type: YTN; PAM sequence: CTC
ttgaaagtgaaaagcacaga

SEQ ID NO: 284466 - DNA, 20 bp, Artificial Sequence
  Description of Artificial Sequence: Synthetic oligonucleotide
  Target: LAMA2; (-) strand; PAM type: YTN; PAM sequence: CTA
gtctcttgaaagtgaaaagc

SEQ ID NO: 284467 - DNA, 20 bp, Artificial Sequence
  Description of Artificial Sequence: Synthetic oligonucleotide
  Target: LAMA2; (-) strand; PAM type: YTN; PAM sequence: TTG
gcatataaagagggctagtc

SEQ ID NO: 284468 - DNA, 20 bp, Artificial Sequence
  Description of Artificial Sequence: Synthetic oligonucleotide
  Target: LAMA2; (-) strand; PAM type: YTN; PAM sequence: TTG
atacccccccaaaaatgttg

SEQ ID NO: 284469 - DNA, 20 bp, Artificial Sequence
  Description of Artificial Sequence: Synthetic oligonucleotide
  Target: LAMA2; (-) strand; PAM type: YTN; PAM sequence: TTT
gatacccccccaaaaatgtt

SEQ ID NO: 284470 - DNA, 20 bp, Artificial Sequence
  Description of Artificial Sequence: Synthetic oligonucleotide
  Target: LAMA2; (-) strand; PAM type: YTN; PAM sequence: TTT
tgatacccccccaaaaatgt

SEQ ID NO: 284471 - DNA, 20 bp, Artificial Sequence
  Description of Artificial Sequence: Synthetic oligonucleotide
  Target: LAMA2; (-) strand; PAM type: YTN; PAM sequence: CTC
caaatattttgatacccccc

SEQ ID NO: 284472 - DNA, 20 bp, Artificial Sequence
  Description of Artificial Sequence: Synthetic oligonucleotide
  Target: LAMA2; (-) strand; PAM type: YTN; PAM sequence: TTA
tactccaaatattttgatac

SEQ ID NO: 284473 - DNA, 20 bp, Artificial Sequence
  Description of Artificial Sequence: Synthetic oligonucleotide
  Target: LAMA2; (-) strand; PAM type: YTN; PAM sequence: TTT
atactccaaatattttgata

SEQ ID NO: 284474 - DNA, 20 bp, Artificial Sequence
  Description of Artificial Sequence: Synthetic oligonucleotide
  Target: LAMA2; (-) strand; PAM type: YTN; PAM sequence: TTT
tatactccaaatattttgat

SEQ ID NO: 284475 - DNA, 20 bp, Artificial Sequence
  Description of Artificial Sequence: Synthetic oligonucleotide
  Target: LAMA2; (-) strand; PAM type: YTN; PAM sequence: TTT
ttatactccaaatattttga

SEQ ID NO: 284476 - DNA, 20 bp, Artificial Sequence
  Description of Artificial Sequence: Synthetic oligonucleotide
  Target: LAMA2; (-) strand; PAM type: YTN; PAM sequence: TTG
tttttatactccaaatattt

SEQ ID NO: 284477 - DNA, 20 bp, Artificial Sequence
  Description of Artificial Sequence: Synthetic oligonucleotide
  Target: LAMA2; (-) strand; PAM type: YTN; PAM sequence: TTT
gtttttatactccaaatatt

SEQ ID NO: 284478 - DNA, 20 bp, Artificial Sequence
  Description of Artificial Sequence: Synthetic oligonucleotide
  Target: LAMA2; (-) strand; PAM type: YTN; PAM sequence: TTT
tgtttttatactccaaatat

SEQ ID NO: 284479 - DNA, 20 bp, Artificial Sequence
  Description of Artificial Sequence: Synthetic oligonucleotide
  Target: LAMA2; (-) strand; PAM type: YTN; PAM sequence: CTT
ttgtttttatactccaaata

SEQ ID NO: 284480 - DNA, 20 bp, Artificial Sequence
  Description of Artificial Sequence: Synthetic oligonucleotide
  Target: LAMA2; (-) strand; PAM type: YTN; PAM sequence: TTA
cagtgcttttgtttttatac

SEQ ID NO: 284481 - DNA, 20 bp, Artificial Sequence
  Description of Artificial Sequence: Synthetic oligonucleotide
  Target: LAMA2; (-) strand; PAM type: YTN; PAM sequence: TTA
tggcatataataccaattac

SEQ ID NO: 284482 - DNA, 20 bp, Artificial Sequence
  Description of Artificial Sequence: Synthetic oligonucleotide
  Target: LAMA2; (-) strand; PAM type: YTN; PAM sequence: TTT
atggcatataataccaatta

SEQ ID NO: 284483 - DNA, 20 bp, Artificial Sequence
  Description of Artificial Sequence: Synthetic oligonucleotide
  Target: LAMA2; (-) strand; PAM type: YTN; PAM sequence: TTT
tatggcatataataccaatt

SEQ ID NO: 284484 - DNA, 20 bp, Artificial Sequence
  Description of Artificial Sequence: Synthetic oligonucleotide
  Target: LAMA2; (-) strand; PAM type: YTN; PAM sequence: TTG
aattttatggcatataatac

SEQ ID NO: 284485 - DNA, 20 bp, Artificial Sequence
  Description of Artificial Sequence: Synthetic oligonucleotide
  Target: LAMA2; (-) strand; PAM type: YTN; PAM sequence: TTT
gaattttatggcatataata

SEQ ID NO: 284486 - DNA, 20 bp, Artificial Sequence
  Description of Artificial Sequence: Synthetic oligonucleotide
  Target: LAMA2; (-) strand; PAM type: YTN; PAM sequence: CTC
aaacagcatttgaattttat

SEQ ID NO: 284487 - DNA, 20 bp, Artificial Sequence
  Description of Artificial Sequence: Synthetic oligonucleotide
  Target: LAMA2; (-) strand; PAM type: YTN; PAM sequence: TTC
cccactcaaacagcatttga

SEQ ID NO: 284488 - DNA, 20 bp, Artificial Sequence
  Description of Artificial Sequence: Synthetic oligonucleotide
  Target: LAMA2; (-) strand; PAM type: YTN; PAM sequence: CTC
cattccccactcaaacagca

SEQ ID NO: 284489 - DNA, 20 bp, Artificial Sequence
  Description of Artificial Sequence: Synthetic oligonucleotide
  Target: LAMA2; (-) strand; PAM type: YTN; PAM sequence: CTG
aaatcaggctccattcccca

SEQ ID NO: 284490 - DNA, 20 bp, Artificial Sequence
  Description of Artificial Sequence: Synthetic oligonucleotide
  Target: LAMA2; (-) strand; PAM type: YTN; PAM sequence: CTA
ggatgctgaaatcaggctcc

SEQ ID NO: 284491 - DNA, 20 bp, Artificial Sequence
  Description of Artificial Sequence: Synthetic oligonucleotide
  Target: LAMA2; (-) strand; PAM type: YTN; PAM sequence: TTG
aggctaggatgctgaaatca

SEQ ID NO: 284492 - DNA, 20 bp, Artificial Sequence
  Description of Artificial Sequence: Synthetic oligonucleotide
  Target: LAMA2; (-) strand; PAM type: YTN; PAM sequence: TTT
gaggctaggatgctgaaatc

SEQ ID NO: 284493 - DNA, 20 bp, Artificial Sequence
  Description of Artificial Sequence: Synthetic oligonucleotide
  Target: LAMA2; (-) strand; PAM type: YTN; PAM sequence: TTG
atttgaggctaggatgctga

SEQ ID NO: 284494 - DNA, 20 bp, Artificial Sequence
  Description of Artificial Sequence: Synthetic oligonucleotide
  Target: LAMA2; (-) strand; PAM type: YTN; PAM sequence: TTT
gatttgaggctaggatgctg

SEQ ID NO: 284495 - DNA, 20 bp, Artificial Sequence
  Description of Artificial Sequence: Synthetic oligonucleotide
  Target: LAMA2; (-) strand; PAM type: YTN; PAM sequence: TTA
tatcatagcatccataggat

SEQ ID NO: 284496 - DNA, 20 bp, Artificial Sequence
  Description of Artificial Sequence: Synthetic oligonucleotide
  Target: LAMA2; (-) strand; PAM type: YTN; PAM sequence: CTA
ttatatcatagcatccatag

SEQ ID NO: 284497 - DNA, 20 bp, Artificial Sequence
  Description of Artificial Sequence: Synthetic oligonucleotide
  Target: LAMA2; (-) strand; PAM type: YTN; PAM sequence: TTA
ataatgtctattatatcata

SEQ ID NO: 284498 - DNA, 20 bp, Artificial Sequence
  Description of Artificial Sequence: Synthetic oligonucleotide
  Target: LAMA2; (-) strand; PAM type: YTN; PAM sequence: CTC
atgaaggagtcgtattaata

SEQ ID NO: 284499 - DNA, 20 bp, Artificial Sequence
  Description of Artificial Sequence: Synthetic oligonucleotide
  Target: LAMA2; (-) strand; PAM type: YTN; PAM sequence: TTG
ctcatgaaggagtcgtatta

SEQ ID NO: 284500 - DNA, 20 bp, Artificial Sequence
  Description of Artificial Sequence: Synthetic oligonucleotide
  Target: LAMA2; (-) strand; PAM type: YTN; PAM sequence: CTT
gctcatgaaggagtcgtatt

SEQ ID NO: 284501 - DNA, 20 bp, Artificial Sequence
  Description of Artificial Sequence: Synthetic oligonucleotide
  Target: LAMA2; (-) strand; PAM type: YTN; PAM sequence: TTC
cttgctcatgaaggagtcgt

SEQ ID NO: 284502 - DNA, 20 bp, Artificial Sequence
  Description of Artificial Sequence: Synthetic oligonucleotide
  Target: LAMA2; (-) strand; PAM type: YTN; PAM sequence: CTT
ccttgctcatgaaggagtcg

SEQ ID NO: 284503 - DNA, 20 bp, Artificial Sequence
  Description of Artificial Sequence: Synthetic oligonucleotide
  Target: LAMA2; (-) strand; PAM type: YTN; PAM sequence: CTC
ttccttgctcatgaaggagt

SEQ ID NO: 284504 - DNA, 20 bp, Artificial Sequence
  Description of Artificial Sequence: Synthetic oligonucleotide
  Target: LAMA2; (-) strand; PAM type: YTN; PAM sequence: TTG
tactcttccttgctcatgaa

SEQ ID NO: 284505 - DNA, 20 bp, Artificial Sequence
  Description of Artificial Sequence: Synthetic oligonucleotide
  Target: LAMA2; (-) strand; PAM type: YTN; PAM sequence: TTT
gtactcttccttgctcatga

SEQ ID NO: 284506 - DNA, 20 bp, Artificial Sequence
  Description of Artificial Sequence: Synthetic oligonucleotide
  Target: LAMA2; (-) strand; PAM type: YTN; PAM sequence: TTA
tatgtgtttgtactcttcct

SEQ ID NO: 284507 - DNA, 20 bp, Artificial Sequence
  Description of Artificial Sequence: Synthetic oligonucleotide
  Target: LAMA2; (-) strand; PAM type: YTN; PAM sequence: TTA
tgttatatgtgtttgtactc

SEQ ID NO: 284508 - DNA, 20 bp, Artificial Sequence
  Description of Artificial Sequence: Synthetic oligonucleotide
  Target: LAMA2; (-) strand; PAM type: YTN; PAM sequence: TTT
atgttatatgtgtttgtact

SEQ ID NO: 284509 - DNA, 20 bp, Artificial Sequence
  Description of Artificial Sequence: Synthetic oligonucleotide
  Target: LAMA2; (-) strand; PAM type: YTN; PAM sequence: CTG
aagtttatgttatatgtgtt

SEQ ID NO: 284510 - DNA, 20 bp, Artificial Sequence
  Description of Artificial Sequence: Synthetic oligonucleotide
  Target: LAMA2; (-) strand; PAM type: YTN; PAM sequence: CTC
tgaagtttatgttatatgtg

SEQ ID NO: 284511 - DNA, 20 bp, Artificial Sequence
  Description of Artificial Sequence: Synthetic oligonucleotide
  Target: LAMA2; (-) strand; PAM type: YTN; PAM sequence: CTG
gctctgaagtttatgttata

SEQ ID NO: 284512 - DNA, 20 bp, Artificial Sequence
  Description of Artificial Sequence: Synthetic oligonucleotide
  Target: LAMA2; (-) strand; PAM type: YTN; PAM sequence: TTC
accctggctctgaagtttat

SEQ ID NO: 284513 - DNA, 20 bp, Artificial Sequence
  Description of Artificial Sequence: Synthetic oligonucleotide
  Target: LAMA2; (-) strand; PAM type: YTN; PAM sequence: TTT
caccctggctctgaagttta

SEQ ID NO: 284514 - DNA, 20 bp, Artificial Sequence
  Description of Artificial Sequence: Synthetic oligonucleotide
  Target: LAMA2; (-) strand; PAM type: YTN; PAM sequence: TTT
tcaccctggctctgaagttt

SEQ ID NO: 284515 - DNA, 20 bp, Artificial Sequence
  Description of Artificial Sequence: Synthetic oligonucleotide
  Target: LAMA2; (-) strand; PAM type: YTN; PAM sequence: TTT
ttcaccctggctctgaagtt

SEQ ID NO: 284516 - DNA, 20 bp, Artificial Sequence
  Description of Artificial Sequence: Synthetic oligonucleotide
  Target: LAMA2; (-) strand; PAM type: YTN; PAM sequence: CTT
tttcaccctggctctgaagt

SEQ ID NO: 284517 - DNA, 20 bp, Artificial Sequence
  Description of Artificial Sequence: Synthetic oligonucleotide
  Target: LAMA2; (-) strand; PAM type: YTN; PAM sequence: CTC
ccctttttcaccctggctct

SEQ ID NO: 284518 - DNA, 20 bp, Artificial Sequence
  Description of Artificial Sequence: Synthetic oligonucleotide
  Target: LAMA2; (-) strand; PAM type: YTN; PAM sequence: TTA
tctcccctttttcaccctgg

SEQ ID NO: 284519 - DNA, 20 bp, Artificial Sequence
  Description of Artificial Sequence: Synthetic oligonucleotide
  Target: LAMA2; (-) strand; PAM type: YTN; PAM sequence: TTT
atctcccctttttcaccctg

SEQ ID NO: 284520 - DNA, 20 bp, Artificial Sequence
  Description of Artificial Sequence: Synthetic oligonucleotide
  Target: LAMA2; (-) strand; PAM type: YTN; PAM sequence: TTT
tatctcccctttttcaccct

SEQ ID NO: 284521 - DNA, 20 bp, Artificial Sequence
  Description of Artificial Sequence: Synthetic oligonucleotide
  Target: LAMA2; (-) strand; PAM type: YTN; PAM sequence: TTT
ttatctcccctttttcaccc

SEQ ID NO: 284522 - DNA, 20 bp, Artificial Sequence
  Description of Artificial Sequence: Synthetic oligonucleotide
  Target: LAMA2; (-) strand; PAM type: YTN; PAM sequence: TTA
aaaaatgtttttatctcccc

SEQ ID NO: 284523 - DNA, 20 bp, Artificial Sequence
  Description of Artificial Sequence: Synthetic oligonucleotide
  Target: LAMA2; (-) strand; PAM type: YTN; PAM sequence: TTT
aaaaaatgtttttatctccc

SEQ ID NO: 284524 - DNA, 20 bp, Artificial Sequence
  Description of Artificial Sequence: Synthetic oligonucleotide
  Target: LAMA2; (-) strand; PAM type: YTN; PAM sequence: TTT
taaaaaatgtttttatctcc

SEQ ID NO: 284525 - DNA, 20 bp, Artificial Sequence
  Description of Artificial Sequence: Synthetic oligonucleotide
  Target: LAMA2; (-) strand; PAM type: YTN; PAM sequence: TTA
aaaaattttaaaaaatgttt

SEQ ID NO: 284526 - DNA, 20 bp, Artificial Sequence
  Description of Artificial Sequence: Synthetic oligonucleotide
  Target: LAMA2; (-) strand; PAM type: YTN; PAM sequence: TTA
cattaaaaaattttaaaaaa

SEQ ID NO: 284527 - DNA, 20 bp, Artificial Sequence
  Description of Artificial Sequence: Synthetic oligonucleotide
  Target: LAMA2; (-) strand; PAM type: YTN; PAM sequence: CTT
acattaaaaaattttaaaaa

SEQ ID NO: 284528 - DNA, 20 bp, Artificial Sequence
  Description of Artificial Sequence: Synthetic oligonucleotide
  Target: LAMA2; (-) strand; PAM type: YTN; PAM sequence: CTG
ggcttacattaaaaaatttt

SEQ ID NO: 284529 - DNA, 20 bp, Artificial Sequence
  Description of Artificial Sequence: Synthetic oligonucleotide
  Target: LAMA2; (-) strand; PAM type: YTN; PAM sequence: TTC
tgggcttacattaaaaaatt

SEQ ID NO: 284530 - DNA, 20 bp, Artificial Sequence
  Description of Artificial Sequence: Synthetic oligonucleotide
  Target: LAMA2; (-) strand; PAM type: YTN; PAM sequence: TTT
ctgggcttacattaaaaaat

SEQ ID NO: 284531 - DNA, 20 bp, Artificial Sequence
  Description of Artificial Sequence: Synthetic oligonucleotide
  Target: LAMA2; (-) strand; PAM type: YTN; PAM sequence: CTA
caagagaagccatttctggg

SEQ ID NO: 284532 - DNA, 20 bp, Artificial Sequence
  Description of Artificial Sequence: Synthetic oligonucleotide
  Target: LAMA2; (-) strand; PAM type: YTN; PAM sequence: TTG
agctacaagagaagccattt

SEQ ID NO: 284533 - DNA, 20 bp, Artificial Sequence
  Description of Artificial Sequence: Synthetic oligonucleotide
  Target: LAMA2; (-) strand; PAM type: YTN; PAM sequence: TTT
gagctacaagagaagccatt

SEQ ID NO: 284534 - DNA, 20 bp, Artificial Sequence
  Description of Artificial Sequence: Synthetic oligonucleotide
  Target: LAMA2; (-) strand; PAM type: YTN; PAM sequence: CTT
tgagctacaagagaagccat

SEQ ID NO: 284535 - DNA, 20 bp, Artificial Sequence
  Description of Artificial Sequence: Synthetic oligonucleotide
  Target: LAMA2; (-) strand; PAM type: YTN; PAM sequence: TTA
tgtaaactttgagctacaag

SEQ ID NO: 284536 - DNA, 20 bp, Artificial Sequence
  Description of Artificial Sequence: Synthetic oligonucleotide
  Target: LAMA2; (-) strand; PAM type: YTN; PAM sequence: TTA
ttatgtaaactttgagctac

SEQ ID NO: 284537 - DNA, 20 bp, Artificial Sequence
  Description of Artificial Sequence: Synthetic oligonucleotide
  Target: LAMA2; (-) strand; PAM type: YTN; PAM sequence: TTG
gcataaatcataagaagtta

SEQ ID NO: 284538 - DNA, 20 bp, Artificial Sequence
  Description of Artificial Sequence: Synthetic oligonucleotide
  Target: LAMA2; (-) strand; PAM type: YTN; PAM sequence: TTT
ggcataaatcataagaagtt

SEQ ID NO: 284539 - DNA, 20 bp, Artificial Sequence
  Description of Artificial Sequence: Synthetic oligonucleotide
  Target: LAMA2; (-) strand; PAM type: YTN; PAM sequence: TTG
tgatttggcataaatcataa

SEQ ID NO: 284540 - DNA, 20 bp, Artificial Sequence
  Description of Artificial Sequence: Synthetic oligonucleotide
  Target: LAMA2; (-) strand; PAM type: YTN; PAM sequence: TTA
gtgggaatattgtgatttgg

SEQ ID NO: 284541 - DNA, 20 bp, Artificial Sequence
  Description of Artificial Sequence: Synthetic oligonucleotide
  Target: LAMA2; (-) strand; PAM type: YTN; PAM sequence: TTT
agtgggaatattgtgatttg

SEQ ID NO: 284542 - DNA, 20 bp, Artificial Sequence
  Description of Artificial Sequence: Synthetic oligonucleotide
  Target: LAMA2; (-) strand; PAM type: YTN; PAM sequence: TTT
tagtgggaatattgtgattt

SEQ ID NO: 284543 - DNA, 20 bp, Artificial Sequence
  Description of Artificial Sequence: Synthetic oligonucleotide
  Target: LAMA2; (-) strand; PAM type: YTN; PAM sequence: TTT
ttagtgggaatattgtgatt

SEQ ID NO: 284544 - DNA, 20 bp, Artificial Sequence
  Description of Artificial Sequence: Synthetic oligonucleotide
  Target: LAMA2; (-) strand; PAM type: YTN; PAM sequence: TTC
atttttagtgggaatattgt

SEQ ID NO: 284545 - DNA, 20 bp, Artificial Sequence
  Description of Artificial Sequence: Synthetic oligonucleotide
  Target: LAMA2; (-) strand; PAM type: YTN; PAM sequence: TTC
attcatttttagtgggaata

SEQ ID NO: 284546 - DNA, 20 bp, Artificial Sequence
  Description of Artificial Sequence: Synthetic oligonucleotide
  Target: LAMA2; (-) strand; PAM type: YTN; PAM sequence: TTT
cattcatttttagtgggaat

SEQ ID NO: 284547 - DNA, 20 bp, Artificial Sequence
  Description of Artificial Sequence: Synthetic oligonucleotide
  Target: LAMA2; (-) strand; PAM type: YTN; PAM sequence: TTT
tcattcatttttagtgggaa

SEQ ID NO: 284548 - DNA, 20 bp, Artificial Sequence
  Description of Artificial Sequence: Synthetic oligonucleotide
  Target: LAMA2; (-) strand; PAM type: YTN; PAM sequence: TTG
ttttcattcatttttagtgg

SEQ ID NO: 284549 - DNA, 20 bp, Artificial Sequence
  Description of Artificial Sequence: Synthetic oligonucleotide
  Target: LAMA2; (-) strand; PAM type: YTN; PAM sequence: TTT
gttttcattcatttttagtg

SEQ ID NO: 284550 - DNA, 20 bp, Artificial Sequence
  Description of Artificial Sequence: Synthetic oligonucleotide
  Target: LAMA2; (-) strand; PAM type: YTN; PAM sequence: TTT
tgttttcattcatttttagt

SEQ ID NO: 284551 - DNA, 20 bp, Artificial Sequence
  Description of Artificial Sequence: Synthetic oligonucleotide
  Target: LAMA2; (-) strand; PAM type: YTN; PAM sequence: TTA
aaattttgttttcattcatt

SEQ ID NO: 284552 - DNA, 20 bp, Artificial Sequence
  Description of Artificial Sequence: Synthetic oligonucleotide
  Target: LAMA2; (-) strand; PAM type: YTN; PAM sequence: TTG
attaaaattttgttttcatt

SEQ ID NO: 284553 - DNA, 20 bp, Artificial Sequence
  Description of Artificial Sequence: Synthetic oligonucleotide
  Target: LAMA2; (-) strand; PAM type: YTN; PAM sequence: TTT
gattaaaattttgttttcat

SEQ ID NO: 284554 - DNA, 20 bp, Artificial Sequence
  Description of Artificial Sequence: Synthetic oligonucleotide
  Target: LAMA2; (-) strand; PAM type: YTN; PAM sequence: TTA
tgaagtaagcagcagagata

SEQ ID NO: 284555 - DNA, 20 bp, Artificial Sequence
  Description of Artificial Sequence: Synthetic oligonucleotide
  Target: LAMA2; (-) strand; PAM type: YTN; PAM sequence: TTA
aattatgaagtaagcagcag

SEQ ID NO: 284556 - DNA, 20 bp, Artificial Sequence
  Description of Artificial Sequence: Synthetic oligonucleotide
  Target: LAMA2; (-) strand; PAM type: YTN; PAM sequence: CTT
aaattatgaagtaagcagca

SEQ ID NO: 284557 - DNA, 20 bp, Artificial Sequence
  Description of Artificial Sequence: Synthetic oligonucleotide
  Target: LAMA2; (-) strand; PAM type: YTN; PAM sequence: TTA
aaaatatatcttaaattatg

SEQ ID NO: 284558 - DNA, 20 bp, Artificial Sequence
  Description of Artificial Sequence: Synthetic oligonucleotide
  Target: LAMA2; (-) strand; PAM type: YTN; PAM sequence: TTA
aaataaaagttaaaaatata

SEQ ID NO: 284559 - DNA, 20 bp, Artificial Sequence
  Description of Artificial Sequence: Synthetic oligonucleotide
  Target: LAMA2; (-) strand; PAM type: YTN; PAM sequence: CTT
aaaataaaagttaaaaatat

SEQ ID NO: 284560 - DNA, 20 bp, Artificial Sequence
  Description of Artificial Sequence: Synthetic oligonucleotide
  Target: LAMA2; (-) strand; PAM type: YTN; PAM sequence: CTG
aacttaaaataaaagttaaa

SEQ ID NO: 284561 - DNA, 20 bp, Artificial Sequence
  Description of Artificial Sequence: Synthetic oligonucleotide
  Target: LAMA2; (-) strand; PAM type: YTN; PAM sequence: TTA
tacgcctgaacttaaaataa

SEQ ID NO: 284562 - DNA, 20 bp, Artificial Sequence
  Description of Artificial Sequence: Synthetic oligonucleotide
  Target: LAMA2; (-) strand; PAM type: YTN; PAM sequence: CTT
atacgcctgaacttaaaata

SEQ ID NO: 284563 - DNA, 20 bp, Artificial Sequence
  Description of Artificial Sequence: Synthetic oligonucleotide
  Target: LAMA2; (-) strand; PAM type: YTN; PAM sequence: CTG
cacttatacgcctgaactta

SEQ ID NO: 284564 - DNA, 20 bp, Artificial Sequence
  Description of Artificial Sequence: Synthetic oligonucleotide
  Target: LAMA2; (-) strand; PAM type: YTN; PAM sequence: CTA
tgtaacaaacctgcacttat

SEQ ID NO: 284565 - DNA, 20 bp, Artificial Sequence
  Description of Artificial Sequence: Synthetic oligonucleotide
  Target: LAMA2; (-) strand; PAM type: YTN; PAM sequence: TTA
cctatgtaacaaacctgcac

SEQ ID NO: 284566 - DNA, 20 bp, Artificial Sequence
  Description of Artificial Sequence: Synthetic oligonucleotide
  Target: LAMA2; (-) strand; PAM type: YTN; PAM sequence: TTT
acctatgtaacaaacctgca

SEQ ID NO: 284567 - DNA, 20 bp, Artificial Sequence
  Description of Artificial Sequence: Synthetic oligonucleotide
  Target: LAMA2; (-) strand; PAM type: YTN; PAM sequence: TTC
ataaaacaaacccccatgac

SEQ ID NO: 284568 - DNA, 20 bp, Artificial Sequence
  Description of Artificial Sequence: Synthetic oligonucleotide
  Target: LAMA2; (-) strand; PAM type: YTN; PAM sequence: TTA
atacatgcgtgatgaaataa

SEQ ID NO: 284569 - DNA, 20 bp, Artificial Sequence
  Description of Artificial Sequence: Synthetic oligonucleotide
  Target: LAMA2; (-) strand; PAM type: YTN; PAM sequence: CTT
aatacatgcgtgatgaaata

SEQ ID NO: 284570 - DNA, 20 bp, Artificial Sequence
  Description of Artificial Sequence: Synthetic oligonucleotide
  Target: LAMA2; (-) strand; PAM type: YTN; PAM sequence: CTA
ggcttaatacatgcgtgatg

SEQ ID NO: 284571 - DNA, 20 bp, Artificial Sequence
  Description of Artificial Sequence: Synthetic oligonucleotide
  Target: LAMA2; (-) strand; PAM type: YTN; PAM sequence: CTA
atgggtactaggcttaatac

SEQ ID NO: 284572 - DNA, 20 bp, Artificial Sequence
  Description of Artificial Sequence: Synthetic oligonucleotide
  Target: LAMA2; (-) strand; PAM type: YTN; PAM sequence: TTG
gagggtggagagcaggagga

SEQ ID NO: 284573 - DNA, 20 bp, Artificial Sequence
  Description of Artificial Sequence: Synthetic oligonucleotide
  Target: LAMA2; (-) strand; PAM type: YTN; PAM sequence: TTT
ggagggtggagagcaggagg

SEQ ID NO: 284574 - DNA, 20 bp, Artificial Sequence
  Description of Artificial Sequence: Synthetic oligonucleotide
  Target: LAMA2; (-) strand; PAM type: YTN; PAM sequence: TTT
tggagggtggagagcaggag

SEQ ID NO: 284575 - DNA, 20 bp, Artificial Sequence
  Description of Artificial Sequence: Synthetic oligonucleotide
  Target: LAMA2; (-) strand; PAM type: YTN; PAM sequence: CTT
ttggagggtggagagcagga

SEQ ID NO: 284576 - DNA, 20 bp, Artificial Sequence
  Description of Artificial Sequence: Synthetic oligonucleotide
  Target: LAMA2; (-) strand; PAM type: YTN; PAM sequence: TTC
ttttggagggtggagagcag

SEQ ID NO: 284577 - DNA, 20 bp, Artificial Sequence
  Description of Artificial Sequence: Synthetic oligonucleotide
  Target: LAMA2; (-) strand; PAM type: YTN; PAM sequence: CTA
aaatagaatggaattctttt

SEQ ID NO: 284578 - DNA, 20 bp, Artificial Sequence
  Description of Artificial Sequence: Synthetic oligonucleotide
  Target: LAMA2; (-) strand; PAM type: YTN; PAM sequence: TTG
agaatcaatctaaaatagaa

SEQ ID NO: 284579 - DNA, 20 bp, Artificial Sequence
  Description of Artificial Sequence: Synthetic oligonucleotide
  Target: LAMA2; (-) strand; PAM type: YTN; PAM sequence: CTA
ccagttgagaatcaatctaa

SEQ ID NO: 284580 - DNA, 20 bp, Artificial Sequence
  Description of Artificial Sequence: Synthetic oligonucleotide
  Target: LAMA2; (-) strand; PAM type: YTN; PAM sequence: TTA
aaacagagatatgacaaaag

SEQ ID NO: 284581 - DNA, 20 bp, Artificial Sequence
  Description of Artificial Sequence: Synthetic oligonucleotide
  Target: LAMA2; (-) strand; PAM type: YTN; PAM sequence: CTC
ataatagaggataggattaa

SEQ ID NO: 284582 - DNA, 20 bp, Artificial Sequence
  Description of Artificial Sequence: Synthetic oligonucleotide
  Target: LAMA2; (-) strand; PAM type: YTN; PAM sequence: TTC
tcataatagaggataggatt

SEQ ID NO: 284583 - DNA, 20 bp, Artificial Sequence
  Description of Artificial Sequence: Synthetic oligonucleotide
  Target: LAMA2; (-) strand; PAM type: YTN; PAM sequence: TTT
ctcataatagaggataggat

SEQ ID NO: 284584 - DNA, 20 bp, Artificial Sequence
  Description of Artificial Sequence: Synthetic oligonucleotide
  Target: LAMA2; (-) strand; PAM type: YTN; PAM sequence: CTA
tttctcataatagaggatag

SEQ ID NO: 284585 - DNA, 20 bp, Artificial Sequence
  Description of Artificial Sequence: Synthetic oligonucleotide
  Target: LAMA2; (-) strand; PAM type: YTN; PAM sequence: TTA
actatttctcataatagagg

SEQ ID NO: 284586 - DNA, 20 bp, Artificial Sequence
  Description of Artificial Sequence: Synthetic oligonucleotide
  Target: LAMA2; (-) strand; PAM type: YTN; PAM sequence: TTA
tagataattaactatttctc

SEQ ID NO: 284587 - DNA, 20 bp, Artificial Sequence
  Description of Artificial Sequence: Synthetic oligonucleotide
  Target: LAMA2; (-) strand; PAM type: YTN; PAM sequence: TTT
atagataattaactatttct

SEQ ID NO: 284588 - DNA, 20 bp, Artificial Sequence
  Description of Artificial Sequence: Synthetic oligonucleotide
  Target: LAMA2; (-) strand; PAM type: YTN; PAM sequence: TTA
atatttatagataattaact

SEQ ID NO: 284589 - DNA, 20 bp, Artificial Sequence
  Description of Artificial Sequence: Synthetic oligonucleotide
  Target: LAMA2; (-) strand; PAM type: YTN; PAM sequence: TTA
attaatatttatagataatt

SEQ ID NO: 284590 - DNA, 20 bp, Artificial Sequence
  Description of Artificial Sequence: Synthetic oligonucleotide
  Target: LAMA2; (-) strand; PAM type: YTN; PAM sequence: TTT
aattaatatttatagataat

SEQ ID NO: 284591 - DNA, 20 bp, Artificial Sequence
  Description of Artificial Sequence: Synthetic oligonucleotide
  Target: LAMA2; (-) strand; PAM type: YTN; PAM sequence: TTA
gtaagatagaaaacagaccc

SEQ ID NO: 284592 - DNA, 20 bp, Artificial Sequence
  Description of Artificial Sequence: Synthetic oligonucleotide
  Target: LAMA2; (-) strand; PAM type: YTN; PAM sequence: TTT
agtaagatagaaaacagacc

SEQ ID NO: 284593 - DNA, 20 bp, Artificial Sequence
  Description of Artificial Sequence: Synthetic oligonucleotide
  Target: LAMA2; (-) strand; PAM type: YTN; PAM sequence: TTT
tagtaagatagaaaacagac

SEQ ID NO: 284594 - DNA, 20 bp, Artificial Sequence
  Description of Artificial Sequence: Synthetic oligonucleotide
  Target: LAMA2; (-) strand; PAM type: YTN; PAM sequence: CTA
tgttttagtaagatagaaaa

SEQ ID NO: 284595 - DNA, 20 bp, Artificial Sequence
  Description of Artificial Sequence: Synthetic oligonucleotide
  Target: LAMA2; (-) strand; PAM type: YTN; PAM sequence: TTC
tatgttttagtaagatagaa

SEQ ID NO: 284596 - DNA, 20 bp, Artificial Sequence
  Description of Artificial Sequence: Synthetic oligonucleotide
  Target: LAMA2; (-) strand; PAM type: YTN; PAM sequence: TTT
ctatgttttagtaagataga

SEQ ID NO: 284597 - DNA, 20 bp, Artificial Sequence
  Description of Artificial Sequence: Synthetic oligonucleotide
  Target: LAMA2; (-) strand; PAM type: YTN; PAM sequence: TTA
tttctatgttttagtaagat

SEQ ID NO: 284598 - DNA, 20 bp, Artificial Sequence
  Description of Artificial Sequence: Synthetic oligonucleotide
  Target: LAMA2; (-) strand; PAM type: YTN; PAM sequence: TTA
aaaattatttctatgtttta

SEQ ID NO: 284599 - DNA, 20 bp, Artificial Sequence
  Description of Artificial Sequence: Synthetic oligonucleotide
  Target: LAMA2; (-) strand; PAM type: YTN; PAM sequence: TTT
aaaaattatttctatgtttt

SEQ ID NO: 284600 - DNA, 20 bp, Artificial Sequence
  Description of Artificial Sequence: Synthetic oligonucleotide
  Target: LAMA2; (-) strand; PAM type: YTN; PAM sequence: TTT
taaaaattatttctatgttt

SEQ ID NO: 284601 - DNA, 20 bp, Artificial Sequence
  Description of Artificial Sequence: Synthetic oligonucleotide
  Target: LAMA2; (-) strand; PAM type: YTN; PAM sequence: TTG
tattttaaaaattatttcta

SEQ ID NO: 284602 - DNA, 20 bp, Artificial Sequence
  Description of Artificial Sequence: Synthetic oligonucleotide
  Target: LAMA2; (-) strand; PAM type: YTN; PAM sequence: TTT
gtattttaaaaattatttct

SEQ ID NO: 284603 - DNA, 20 bp, Artificial Sequence
  Description of Artificial Sequence: Synthetic oligonucleotide
  Target: LAMA2; (-) strand; PAM type: YTN; PAM sequence: CTA
tttgtattttaaaaattatt

SEQ ID NO: 284604 - DNA, 20 bp, Artificial Sequence
  Description of Artificial Sequence: Synthetic oligonucleotide
  Target: LAMA2; (-) strand; PAM type: YTN; PAM sequence: TTA
gtggccactatttgtatttt

SEQ ID NO: 284605 - DNA, 20 bp, Artificial Sequence
  Description of Artificial Sequence: Synthetic oligonucleotide
  Target: LAMA2; (-) strand; PAM type: YTN; PAM sequence: TTT
agtggccactatttgtattt

SEQ ID NO: 284606 - DNA, 20 bp, Artificial Sequence
  Description of Artificial Sequence: Synthetic oligonucleotide
  Target: LAMA2; (-) strand; PAM type: YTN; PAM sequence: TTA
tcaaataaaagtacacaaaa

SEQ ID NO: 284607 - DNA, 20 bp, Artificial Sequence
  Description of Artificial Sequence: Synthetic oligonucleotide
  Target: LAMA2; (-) strand; PAM type: YTN; PAM sequence: TTG
ttatcaaataaaagtacaca

SEQ ID NO: 284608 - DNA, 20 bp, Artificial Sequence
  Description of Artificial Sequence: Synthetic oligonucleotide
  Target: LAMA2; (-) strand; PAM type: YTN; PAM sequence: CTG
aagcaattgttatcaaataa

SEQ ID NO: 284609 - DNA, 20 bp, Artificial Sequence
  Description of Artificial Sequence: Synthetic oligonucleotide
  Target: LAMA2; (-) strand; PAM type: YTN; PAM sequence: TTA
actgaagcaattgttatcaa

SEQ ID NO: 284610 - DNA, 20 bp, Artificial Sequence
  Description of Artificial Sequence: Synthetic oligonucleotide
  Target: LAMA2; (-) strand; PAM type: YTN; PAM sequence: TTT
aactgaagcaattgttatca

SEQ ID NO: 284611 - DNA, 20 bp, Artificial Sequence
  Description of Artificial Sequence: Synthetic oligonucleotide
  Target: LAMA2; (-) strand; PAM type: YTN; PAM sequence: TTT
taactgaagcaattgttatc

SEQ ID NO: 284612 - DNA, 20 bp, Artificial Sequence
  Description of Artificial Sequence: Synthetic oligonucleotide
  Target: LAMA2; (-) strand; PAM type: YTN; PAM sequence: TTA
taaatgcaccccattttaac

SEQ ID NO: 284613 - DNA, 20 bp, Artificial Sequence
  Description of Artificial Sequence: Synthetic oligonucleotide
  Target: LAMA2; (-) strand; PAM type: YTN; PAM sequence: CTA
attataaatgcaccccattt

SEQ ID NO: 284614 - DNA, 20 bp, Artificial Sequence
  Description of Artificial Sequence: Synthetic oligonucleotide
  Target: LAMA2; (-) strand; PAM type: YTN; PAM sequence: TTC
ataacaggtactaattataa

SEQ ID NO: 284615 - DNA, 20 bp, Artificial Sequence
  Description of Artificial Sequence: Synthetic oligonucleotide
  Target: LAMA2; (-) strand; PAM type: YTN; PAM sequence: TTT
cataacaggtactaattata

SEQ ID NO: 284616 - DNA, 20 bp, Artificial Sequence
  Description of Artificial Sequence: Synthetic oligonucleotide
  Target: LAMA2; (-) strand; PAM type: YTN; PAM sequence: TTT
tcataacaggtactaattat

SEQ ID NO: 284617 - DNA, 20 bp, Artificial Sequence
  Description of Artificial Sequence: Synthetic oligonucleotide
  Target: LAMA2; (-) strand; PAM type: YTN; PAM sequence: TTT
ttcataacaggtactaatta

SEQ ID NO: 284618 - DNA, 20 bp, Artificial Sequence
  Description of Artificial Sequence: Synthetic oligonucleotide
  Target: LAMA2; (-) strand; PAM type: YTN; PAM sequence: CTA
aaaatggtatttttcataac

SEQ ID NO: 284619 - DNA, 20 bp, Artificial Sequence
  Description of Artificial Sequence: Synthetic oligonucleotide
  Target: LAMA2; (-) strand; PAM type: YTN; PAM sequence: TTA
taaagtagtgactaaaaatg

SEQ ID NO: 284620 - DNA, 20 bp, Artificial Sequence
  Description of Artificial Sequence: Synthetic oligonucleotide
  Target: LAMA2; (-) strand; PAM type: YTN; PAM sequence: CTA
taaatattataaagtagtga

SEQ ID NO: 284621 - DNA, 20 bp, Artificial Sequence
  Description of Artificial Sequence: Synthetic oligonucleotide
  Target: LAMA2; (-) strand; PAM type: YTN; PAM sequence: TTC
tataaatattataaagtagt

SEQ ID NO: 284622 - DNA, 20 bp, Artificial Sequence
  Description of Artificial Sequence: Synthetic oligonucleotide
  Target: LAMA2; (-) strand; PAM type: YTN; PAM sequence: TTT
ctataaatattataaagtag

SEQ ID NO: 284623 - DNA, 20 bp, Artificial Sequence
  Description of Artificial Sequence: Synthetic oligonucleotide
  Target: LAMA2; (-) strand; PAM type: YTN; PAM sequence: TTT
tctataaatattataaagta

SEQ ID NO: 284624 - DNA, 20 bp, Artificial Sequence
  Description of Artificial Sequence: Synthetic oligonucleotide
  Target: LAMA2; (-) strand; PAM type: YTN; PAM sequence: TTC
atgaggaagtattttctata

SEQ ID NO: 284625 - DNA, 20 bp, Artificial Sequence
  Description of Artificial Sequence: Synthetic oligonucleotide
  Target: LAMA2; (-) strand; PAM type: YTN; PAM sequence: TTA
taaattcatgaggaagtatt

SEQ ID NO: 284626 - DNA, 20 bp, Artificial Sequence
  Description of Artificial Sequence: Synthetic oligonucleotide
  Target: LAMA2; (-) strand; PAM type: YTN; PAM sequence: TTC
acatggaagcaaaacaaaaa

SEQ ID NO: 284627 - DNA, 20 bp, Artificial Sequence
  Description of Artificial Sequence: Synthetic oligonucleotide
  Target: LAMA2; (-) strand; PAM type: YTN; PAM sequence: TTT
cacatggaagcaaaacaaaa

SEQ ID NO: 284628 - DNA, 20 bp, Artificial Sequence
  Description of Artificial Sequence: Synthetic oligonucleotide
  Target: LAMA2; (-) strand; PAM type: YTN; PAM sequence: CTG
caggcaatttcacatggaag

SEQ ID NO: 284629 - DNA, 20 bp, Artificial Sequence
  Description of Artificial Sequence: Synthetic oligonucleotide
  Target: LAMA2; (-) strand; PAM type: YTN; PAM sequence: TTC
tgcaggcaatttcacatgga

SEQ ID NO: 284630 - DNA, 20 bp, Artificial Sequence
  Description of Artificial Sequence: Synthetic oligonucleotide
  Target: LAMA2; (-) strand; PAM type: YTN; PAM sequence: TTT
ctgcaggcaatttcacatgg

SEQ ID NO: 284631 - DNA, 20 bp, Artificial Sequence
  Description of Artificial Sequence: Synthetic oligonucleotide
  Target: LAMA2; (-) strand; PAM type: YTN; PAM sequence: CTG
atttctgcaggcaatttcac

SEQ ID NO: 284632 - DNA, 20 bp, Artificial Sequence
  Description of Artificial Sequence: Synthetic oligonucleotide
  Target: LAMA2; (-) strand; PAM type: YTN; PAM sequence: CTA
aaaggtatataagtaaacat

SEQ ID NO: 284633 - DNA, 20 bp, Artificial Sequence
  Description of Artificial Sequence: Synthetic oligonucleotide
  Target: LAMA2; (-) strand; PAM type: YTN; PAM sequence: TTA
ctaaaaggtatataagtaaa

SEQ ID NO: 284634 - DNA, 20 bp, Artificial Sequence
  Description of Artificial Sequence: Synthetic oligonucleotide
  Target: LAMA2; (-) strand; PAM type: YTN; PAM sequence: TTG
caataggcaatgaagcatga

SEQ ID NO: 284635 - DNA, 20 bp, Artificial Sequence
  Description of Artificial Sequence: Synthetic oligonucleotide
  Target: LAMA2; (-) strand; PAM type: YTN; PAM sequence: TTT
gcaataggcaatgaagcatg

SEQ ID NO: 284636 - DNA, 20 bp, Artificial Sequence
  Description of Artificial Sequence: Synthetic oligonucleotide
  Target: LAMA2; (-) strand; PAM type: YTN; PAM sequence: TTT
tgcaataggcaatgaagcat

SEQ ID NO: 284637 - DNA, 20 bp, Artificial Sequence
  Description of Artificial Sequence: Synthetic oligonucleotide
  Target: LAMA2; (-) strand; PAM type: YTN; PAM sequence: TTT
ttgcaataggcaatgaagca

SEQ ID NO: 284638 - DNA, 20 bp, Artificial Sequence
  Description of Artificial Sequence: Synthetic oligonucleotide
  Target: LAMA2; (-) strand; PAM type: YTN; PAM sequence: CTT
tttgcaataggcaatgaagc

SEQ ID NO: 284639 - DNA, 20 bp, Artificial Sequence
  Description of Artificial Sequence: Synthetic oligonucleotide
  Target: LAMA2; (-) strand; PAM type: YTN; PAM sequence: CTG
aaactttttgcaataggcaa

SEQ ID NO: 284640 - DNA, 20 bp, Artificial Sequence
  Description of Artificial Sequence: Synthetic oligonucleotide
  Target: LAMA2; (-) strand; PAM type: YTN; PAM sequence: TTA
aagcaaaaccaaaatatagt

SEQ ID NO: 284641 - DNA, 20 bp, Artificial Sequence
  Description of Artificial Sequence: Synthetic oligonucleotide
  Target: LAMA2; (-) strand; PAM type: YTN; PAM sequence: TTT
aaagcaaaaccaaaatatag

SEQ ID NO: 284642 - DNA, 20 bp, Artificial Sequence
  Description of Artificial Sequence: Synthetic oligonucleotide
  Target: LAMA2; (-) strand; PAM type: YTN; PAM sequence: CTA
cgcaatgtttaaagcaaaac

SEQ ID NO: 284643 - DNA, 20 bp, Artificial Sequence
  Description of Artificial Sequence: Synthetic oligonucleotide
  Target: LAMA2; (-) strand; PAM type: YTN; PAM sequence: CTG
taacagtggaaagaatagct

SEQ ID NO: 284644 - DNA, 20 bp, Artificial Sequence
  Description of Artificial Sequence: Synthetic oligonucleotide
  Target: LAMA2; (-) strand; PAM type: YTN; PAM sequence: TTA
atactgtaacagtggaaaga

SEQ ID NO: 284645 - DNA, 20 bp, Artificial Sequence
  Description of Artificial Sequence: Synthetic oligonucleotide
  Target: LAMA2; (-) strand; PAM type: YTN; PAM sequence: CTA
ccattaatactgtaacagtg

SEQ ID NO: 284646 - DNA, 20 bp, Artificial Sequence
  Description of Artificial Sequence: Synthetic oligonucleotide
  Target: LAMA2; (-) strand; PAM type: YTN; PAM sequence: TTA
cgcatctaccattaatactg

SEQ ID NO: 284647 - DNA, 20 bp, Artificial Sequence
  Description of Artificial Sequence: Synthetic oligonucleotide
  Target: LAMA2; (-) strand; PAM type: YTN; PAM sequence: TTT
acgcatctaccattaatact

SEQ ID NO: 284648 - DNA, 20 bp, Artificial Sequence
  Description of Artificial Sequence: Synthetic oligonucleotide
  Target: LAMA2; (-) strand; PAM type: YTN; PAM sequence: TTT
tacgcatctaccattaatac

SEQ ID NO: 284649 - DNA, 20 bp, Artificial Sequence
  Description of Artificial Sequence: Synthetic oligonucleotide
  Target: LAMA2; (-) strand; PAM type: YTN; PAM sequence: CTT
ttacgcatctaccattaata

SEQ ID NO: 284650 - DNA, 20 bp, Artificial Sequence
  Description of Artificial Sequence: Synthetic oligonucleotide
  Target: LAMA2; (-) strand; PAM type: YTN; PAM sequence: TTC
cttttacgcatctaccatta

SEQ ID NO: 284651 - DNA, 20 bp, Artificial Sequence
  Description of Artificial Sequence: Synthetic oligonucleotide
  Target: LAMA2; (-) strand; PAM type: YTN; PAM sequence: TTA
taaaggaagattccttttac

SEQ ID NO: 284652 - DNA, 20 bp, Artificial Sequence
  Description of Artificial Sequence: Synthetic oligonucleotide
  Target: LAMA2; (-) strand; PAM type: YTN; PAM sequence: TTT
ataaaggaagattcctttta

SEQ ID NO: 284653 - DNA, 20 bp, Artificial Sequence
  Description of Artificial Sequence: Synthetic oligonucleotide
  Target: LAMA2; (-) strand; PAM type: YTN; PAM sequence: TTT
tataaaggaagattcctttt

SEQ ID NO: 284654 - DNA, 20 bp, Artificial Sequence
  Description of Artificial Sequence: Synthetic oligonucleotide
  Target: LAMA2; (-) strand; PAM type: YTN; PAM sequence: TTT
ttataaaggaagattccttt

SEQ ID NO: 284655 - DNA, 20 bp, Artificial Sequence
  Description of Artificial Sequence: Synthetic oligonucleotide
  Target: LAMA2; (-) strand; PAM type: YTN; PAM sequence: CTT
tttataaaggaagattcctt

SEQ ID NO: 284656 - DNA, 20 bp, Artificial Sequence
  Description of Artificial Sequence: Synthetic oligonucleotide
  Target: LAMA2; (-) strand; PAM type: YTN; PAM sequence: TTA
tccacatatgacctttttat

SEQ ID NO: 284657 - DNA, 20 bp, Artificial Sequence
  Description of Artificial Sequence: Synthetic oligonucleotide
  Target: LAMA2; (-) strand; PAM type: YTN; PAM sequence: TTT
atccacatatgaccttttta

SEQ ID NO: 284658 - DNA, 20 bp, Artificial Sequence
  Description of Artificial Sequence: Synthetic oligonucleotide
  Target: LAMA2; (-) strand; PAM type: YTN; PAM sequence: CTT
tatccacatatgaccttttt

SEQ ID NO: 284659 - DNA, 20 bp, Artificial Sequence
  Description of Artificial Sequence: Synthetic oligonucleotide
  Target: LAMA2; (-) strand; PAM type: YTN; PAM sequence: TTA
tatcacctttatccacatat

SEQ ID NO: 284660 - DNA, 20 bp, Artificial Sequence
  Description of Artificial Sequence: Synthetic oligonucleotide
  Target: LAMA2; (-) strand; PAM type: YTN; PAM sequence: TTT
atatcacctttatccacata

SEQ ID NO: 284661 - DNA, 20 bp, Artificial Sequence
  Description of Artificial Sequence: Synthetic oligonucleotide
  Target: LAMA2; (-) strand; PAM type: YTN; PAM sequence: TTT
tatatcacctttatccacat

SEQ ID NO: 284662 - DNA, 20 bp, Artificial Sequence
  Description of Artificial Sequence: Synthetic oligonucleotide
  Target: LAMA2; (-) strand; PAM type: YTN; PAM sequence: TTA
aaaacattttatatcacctt

SEQ ID NO: 284663 - DNA, 20 bp, Artificial Sequence
  Description of Artificial Sequence: Synthetic oligonucleotide
  Target: LAMA2; (-) strand; PAM type: YTN; PAM sequence: CTA
ttaaaaacattttatatcac

SEQ ID NO: 284664 - DNA, 20 bp, Artificial Sequence
  Description of Artificial Sequence: Synthetic oligonucleotide
  Target: LAMA2; (-) strand; PAM type: YTN; PAM sequence: TTA
taacactattaaaaacattt

SEQ ID NO: 284665 - DNA, 20 bp, Artificial Sequence
  Description of Artificial Sequence: Synthetic oligonucleotide
  Target: LAMA2; (-) strand; PAM type: YTN; PAM sequence: TTT
ataacactattaaaaacatt

SEQ ID NO: 284666 - DNA, 20 bp, Artificial Sequence
  Description of Artificial Sequence: Synthetic oligonucleotide
  Target: LAMA2; (-) strand; PAM type: YTN; PAM sequence: TTT
tataacactattaaaaacat

SEQ ID NO: 284667 - DNA, 20 bp, Artificial Sequence
  Description of Artificial Sequence: Synthetic oligonucleotide
  Target: LAMA2; (-) strand; PAM type: YTN; PAM sequence: TTT
ttataacactattaaaaaca

SEQ ID NO: 284668 - DNA, 20 bp, Artificial Sequence
  Description of Artificial Sequence: Synthetic oligonucleotide
  Target: LAMA2; (-) strand; PAM type: YTN; PAM sequence: CTT
tttataacactattaaaaac

SEQ ID NO: 284669 - DNA, 20 bp, Artificial Sequence
  Description of Artificial Sequence: Synthetic oligonucleotide
  Target: LAMA2; (-) strand; PAM type: YTN; PAM sequence: CTG
accaaactttttataacact

SEQ ID NO: 284670 - DNA, 20 bp, Artificial Sequence
  Description of Artificial Sequence: Synthetic oligonucleotide
  Target: LAMA2; (-) strand; PAM type: YTN; PAM sequence: TTC
gcctgaccaaactttttata

SEQ ID NO: 284671 - DNA, 20 bp, Artificial Sequence
  Description of Artificial Sequence: Synthetic oligonucleotide
  Target: LAMA2; (-) strand; PAM type: YTN; PAM sequence: CTT
cgcctgaccaaactttttat

SEQ ID NO: 284672 - DNA, 20 bp, Artificial Sequence
  Description of Artificial Sequence: Synthetic oligonucleotide
  Target: LAMA2; (-) strand; PAM type: YTN; PAM sequence: TTA
gagtatgagccacttcgcct

SEQ ID NO: 284673 - DNA, 20 bp, Artificial Sequence
  Description of Artificial Sequence: Synthetic oligonucleotide
  Target: LAMA2; (-) strand; PAM type: YTN; PAM sequence: CTG
gggttagagtatgagccact

SEQ ID NO: 284674 - DNA, 20 bp, Artificial Sequence
  Description of Artificial Sequence: Synthetic oligonucleotide
  Target: LAMA2; (-) strand; PAM type: YTN; PAM sequence: TTC
tggggttagagtatgagcca

SEQ ID NO: 284675 - DNA, 20 bp, Artificial Sequence
  Description of Artificial Sequence: Synthetic oligonucleotide
  Target: LAMA2; (-) strand; PAM type: YTN; PAM sequence: TTT
ctggggttagagtatgagcc

SEQ ID NO: 284676 - DNA, 20 bp, Artificial Sequence
  Description of Artificial Sequence: Synthetic oligonucleotide
  Target: LAMA2; (-) strand; PAM type: YTN; PAM sequence: CTC
ccaaatttctggggttagag

SEQ ID NO: 284677 - DNA, 20 bp, Artificial Sequence
  Description of Artificial Sequence: Synthetic oligonucleotide
  Target: LAMA2; (-) strand; PAM type: YTN; PAM sequence: TTG
acctcccaaatttctggggt

SEQ ID NO: 284678 - DNA, 20 bp, Artificial Sequence
  Description of Artificial Sequence: Synthetic oligonucleotide
  Target: LAMA2; (-) strand; PAM type: YTN; PAM sequence: CTT
gacctcccaaatttctgggg

SEQ ID NO: 284679 - DNA, 20 bp, Artificial Sequence
  Description of Artificial Sequence: Synthetic oligonucleotide
  Target: LAMA2; (-) strand; PAM type: YTN; PAM sequence: CTC
ccaccttgacctcccaaatt

SEQ ID NO: 284680 - DNA, 20 bp, Artificial Sequence
  Description of Artificial Sequence: Synthetic oligonucleotide
  Target: LAMA2; (-) strand; PAM type: YTN; PAM sequence: CTC
aagtgatcctcccaccttga

SEQ ID NO: 284681 - DNA, 20 bp, Artificial Sequence
  Description of Artificial Sequence: Synthetic oligonucleotide
  Target: LAMA2; (-) strand; PAM type: YTN; PAM sequence: CTG
gcctcaagtgatcctcccac

SEQ ID NO: 284682 - DNA, 20 bp, Artificial Sequence
  Description of Artificial Sequence: Synthetic oligonucleotide
  Target: LAMA2; (-) strand; PAM type: YTN; PAM sequence: TTC
tggcctcaagtgatcctccc

SEQ ID NO: 284683 - DNA, 20 bp, Artificial Sequence
  Description of Artificial Sequence: Synthetic oligonucleotide
  Target: LAMA2; (-) strand; PAM type: YTN; PAM sequence: CTT
ctggcctcaagtgatcctcc

SEQ ID NO: 284684 - DNA, 20 bp, Artificial Sequence
  Description of Artificial Sequence: Synthetic oligonucleotide
  Target: LAMA2; (-) strand; PAM type: YTN; PAM sequence: CTC
aaacttctggcctcaagtga

SEQ ID NO: 284685 - DNA, 20 bp, Artificial Sequence
  Description of Artificial Sequence: Synthetic oligonucleotide
  Target: LAMA2; (-) strand; PAM type: YTN; PAM sequence: CTG
atctcaaacttctggcctca

SEQ ID NO: 284686 - DNA, 20 bp, Artificial Sequence
  Description of Artificial Sequence: Synthetic oligonucleotide
  Target: LAMA2; (-) strand; PAM type: YTN; PAM sequence: TTC
ccaggctgatctcaaacttc

SEQ ID NO: 284687 - DNA, 20 bp, Artificial Sequence
  Description of Artificial Sequence: Synthetic oligonucleotide
  Target: LAMA2; (-) strand; PAM type: YTN; PAM sequence: TTT
cccaggctgatctcaaactt

SEQ ID NO: 284688 - DNA, 20 bp, Artificial Sequence
  Description of Artificial Sequence: Synthetic oligonucleotide
  Target: LAMA2; (-) strand; PAM type: YTN; PAM sequence: CTA
tgtttcccaggctgatctca

SEQ ID NO: 284689 - DNA, 20 bp, Artificial Sequence
  Description of Artificial Sequence: Synthetic oligonucleotide
  Target: LAMA2; (-) strand; PAM type: YTN; PAM sequence: TTG
ctatgtttcccaggctgatc

SEQ ID NO: 284690 - DNA, 20 bp, Artificial Sequence
  Description of Artificial Sequence: Synthetic oligonucleotide
  Target: LAMA2; (-) strand; PAM type: YTN; PAM sequence: CTT
gctatgtttcccaggctgat

SEQ ID NO: 284691 - DNA, 20 bp, Artificial Sequence
  Description of Artificial Sequence: Synthetic oligonucleotide
  Target: LAMA2; (-) strand; PAM type: YTN; PAM sequence: TTG
tagagatagagtcttgctat

SEQ ID NO: 284692 - DNA, 20 bp, Artificial Sequence
  Description of Artificial Sequence: Synthetic oligonucleotide
  Target: LAMA2; (-) strand; PAM type: YTN; PAM sequence: TTT
gtagagatagagtcttgcta

SEQ ID NO: 284693 - DNA, 20 bp, Artificial Sequence
  Description of Artificial Sequence: Synthetic oligonucleotide
  Target: LAMA2; (-) strand; PAM type: YTN; PAM sequence: TTT
tgtagagatagagtcttgct

SEQ ID NO: 284694 - DNA, 20 bp, Artificial Sequence
  Description of Artificial Sequence: Synthetic oligonucleotide
  Target: LAMA2; (-) strand; PAM type: YTN; PAM sequence: TTT
ttgtagagatagagtcttgc

SEQ ID NO: 284695 - DNA, 20 bp, Artificial Sequence
  Description of Artificial Sequence: Synthetic oligonucleotide
  Target: LAMA2; (-) strand; PAM type: YTN; PAM sequence: CTT
tttgtagagatagagtcttg

SEQ ID NO: 284696 - DNA, 20 bp, Artificial Sequence
  Description of Artificial Sequence: Synthetic oligonucleotide
  Target: LAMA2; (-) strand; PAM type: YTN; PAM sequence: TTC
ctttttgtagagatagagtc

SEQ ID NO: 284697 - DNA, 20 bp, Artificial Sequence
  Description of Artificial Sequence: Synthetic oligonucleotide
  Target: LAMA2; (-) strand; PAM type: YTN; PAM sequence: TTT
cctttttgtagagatagagt

SEQ ID NO: 284698 - DNA, 20 bp, Artificial Sequence
  Description of Artificial Sequence: Synthetic oligonucleotide
  Target: LAMA2; (-) strand; PAM type: YTN; PAM sequence: TTT
tcctttttgtagagatagag

SEQ ID NO: 284699 - DNA, 20 bp, Artificial Sequence
  Description of Artificial Sequence: Synthetic oligonucleotide
  Target: LAMA2; (-) strand; PAM type: YTN; PAM sequence: TTT
ttcctttttgtagagataga

SEQ ID NO: 284700 - DNA, 20 bp, Artificial Sequence
  Description of Artificial Sequence: Synthetic oligonucleotide
  Target: LAMA2; (-) strand; PAM type: YTN; PAM sequence: CTC
atttttcctttttgtagaga

SEQ ID NO: 284701 - DNA, 20 bp, Artificial Sequence
  Description of Artificial Sequence: Synthetic oligonucleotide
  Target: LAMA2; (-) strand; PAM type: YTN; PAM sequence: TTC
actcatttttcctttttgta

SEQ ID NO: 284702 - DNA, 20 bp, Artificial Sequence
  Description of Artificial Sequence: Synthetic oligonucleotide
  Target: LAMA2; (-) strand; PAM type: YTN; PAM sequence: TTT
cactcatttttcctttttgt

SEQ ID NO: 284703 - DNA, 20 bp, Artificial Sequence
  Description of Artificial Sequence: Synthetic oligonucleotide
  Target: LAMA2; (-) strand; PAM type: YTN; PAM sequence: CTA
tcatacagatatttcactca

SEQ ID NO: 284704 - DNA, 20 bp, Artificial Sequence
  Description of Artificial Sequence: Synthetic oligonucleotide
  Target: LAMA2; (-) strand; PAM type: YTN; PAM sequence: TTA
tgtggctatcatacagatat

SEQ ID NO: 284705 - DNA, 20 bp, Artificial Sequence
  Description of Artificial Sequence: Synthetic oligonucleotide
  Target: LAMA2; (-) strand; PAM type: YTN; PAM sequence: TTT
atgtggctatcatacagata

SEQ ID NO: 284706 - DNA, 20 bp, Artificial Sequence
  Description of Artificial Sequence: Synthetic oligonucleotide
  Target: LAMA2; (-) strand; PAM type: YTN; PAM sequence: TTT
tatgtggctatcatacagat

SEQ ID NO: 284707 - DNA, 20 bp, Artificial Sequence
  Description of Artificial Sequence: Synthetic oligonucleotide
  Target: LAMA2; (-) strand; PAM type: YTN; PAM sequence: CTT
ttatgtggctatcatacaga

SEQ ID NO: 284708 - DNA, 20 bp, Artificial Sequence
  Description of Artificial Sequence: Synthetic oligonucleotide
  Target: LAMA2; (-) strand; PAM type: YTN; PAM sequence: TTC
cacttttatgtggctatcat

SEQ ID NO: 284709 - DNA, 20 bp, Artificial Sequence
  Description of Artificial Sequence: Synthetic oligonucleotide
  Target: LAMA2; (-) strand; PAM type: YTN; PAM sequence: TTT
ccacttttatgtggctatca

SEQ ID NO: 284710 - DNA, 20 bp, Artificial Sequence
  Description of Artificial Sequence: Synthetic oligonucleotide
  Target: LAMA2; (-) strand; PAM type: YTN; PAM sequence: TTT
tccacttttatgtggctatc

SEQ ID NO: 284711 - DNA, 20 bp, Artificial Sequence
  Description of Artificial Sequence: Synthetic oligonucleotide
  Target: LAMA2; (-) strand; PAM type: YTN; PAM sequence: TTC
agttttccacttttatgtgg

SEQ ID NO: 284712 - DNA, 20 bp, Artificial Sequence
  Description of Artificial Sequence: Synthetic oligonucleotide
  Target: LAMA2; (-) strand; PAM type: YTN; PAM sequence: CTA
tagagaaattcagttttcca

SEQ ID NO: 284713 - DNA, 20 bp, Artificial Sequence
  Description of Artificial Sequence: Synthetic oligonucleotide
  Target: LAMA2; (-) strand; PAM type: YTN; PAM sequence: TTC
tatagagaaattcagttttc

SEQ ID NO: 284714 - DNA, 20 bp, Artificial Sequence
  Description of Artificial Sequence: Synthetic oligonucleotide
  Target: LAMA2; (-) strand; PAM type: YTN; PAM sequence: TTA
attctatagagaaattcagt

SEQ ID NO: 284715 - DNA, 20 bp, Artificial Sequence
  Description of Artificial Sequence: Synthetic oligonucleotide
  Target: LAMA2; (-) strand; PAM type: YTN; PAM sequence: CTA
gttaattctatagagaaatt

SEQ ID NO: 284716 - DNA, 20 bp, Artificial Sequence
  Description of Artificial Sequence: Synthetic oligonucleotide
  Target: LAMA2; (-) strand; PAM type: YTN; PAM sequence: TTA
tcagaaacagcataatctag

SEQ ID NO: 284717 - DNA, 20 bp, Artificial Sequence
  Description of Artificial Sequence: Synthetic oligonucleotide
  Target: LAMA2; (-) strand; PAM type: YTN; PAM sequence: TTG
tgttatcagaaacagcataa

SEQ ID NO: 284718 - DNA, 20 bp, Artificial Sequence
  Description of Artificial Sequence: Synthetic oligonucleotide
  Target: LAMA2; (-) strand; PAM type: YTN; PAM sequence: TTT
gtgttatcagaaacagcata

SEQ ID NO: 284719 - DNA, 20 bp, Artificial Sequence
  Description of Artificial Sequence: Synthetic oligonucleotide
  Target: LAMA2; (-) strand; PAM type: YTN; PAM sequence: TTG
gggtgaatttgtgttatcag

SEQ ID NO: 284720 - DNA, 20 bp, Artificial Sequence
  Description of Artificial Sequence: Synthetic oligonucleotide
  Target: LAMA2; (-) strand; PAM type: YTN; PAM sequence: TTC
gtgtgttggggtgaatttgt

SEQ ID NO: 284721 - DNA, 20 bp, Artificial Sequence
  Description of Artificial Sequence: Synthetic oligonucleotide
  Target: LAMA2; (-) strand; PAM type: YTN; PAM sequence: TTA
agtcattcgtgtgttggggt

SEQ ID NO: 284722 - DNA, 20 bp, Artificial Sequence
  Description of Artificial Sequence: Synthetic oligonucleotide
  Target: LAMA2; (-) strand; PAM type: YTN; PAM sequence: TTG
caattaagtcattcgtgtgt

SEQ ID NO: 284723 - DNA, 20 bp, Artificial Sequence
  Description of Artificial Sequence: Synthetic oligonucleotide
  Target: LAMA2; (-) strand; PAM type: YTN; PAM sequence: CTT
gcaattaagtcattcgtgtg

SEQ ID NO: 284724 - DNA, 20 bp, Artificial Sequence
  Description of Artificial Sequence: Synthetic oligonucleotide
  Target: LAMA2; (-) strand; PAM type: YTN; PAM sequence: CTC
ttgcaattaagtcattcgtg

SEQ ID NO: 284725 - DNA, 20 bp, Artificial Sequence
  Description of Artificial Sequence: Synthetic oligonucleotide
  Target: LAMA2; (-) strand; PAM type: YTN; PAM sequence: TTA
atcctcttgcaattaagtca

SEQ ID NO: 284726 - DNA, 20 bp, Artificial Sequence
  Description of Artificial Sequence: Synthetic oligonucleotide
  Target: LAMA2; (-) strand; PAM type: YTN; PAM sequence: TTT
aatcctcttgcaattaagtc

SEQ ID NO: 284727 - DNA, 20 bp, Artificial Sequence
  Description of Artificial Sequence: Synthetic oligonucleotide
  Target: LAMA2; (-) strand; PAM type: YTN; PAM sequence: TTT
taatcctcttgcaattaagt

SEQ ID NO: 284728 - DNA, 20 bp, Artificial Sequence
  Description of Artificial Sequence: Synthetic oligonucleotide
  Target: LAMA2; (-) strand; PAM type: YTN; PAM sequence: CTA
ttttaatcctcttgcaatta

SEQ ID NO: 284729 - DNA, 20 bp, Artificial Sequence
  Description of Artificial Sequence: Synthetic oligonucleotide
  Target: LAMA2; (-) strand; PAM type: YTN; PAM sequence: TTA
tctattttaatcctcttgca

SEQ ID NO: 284730 - DNA, 20 bp, Artificial Sequence
  Description of Artificial Sequence: Synthetic oligonucleotide
  Target: LAMA2; (-) strand; PAM type: YTN; PAM sequence: CTT
atctattttaatcctcttgc

SEQ ID NO: 284731 - DNA, 20 bp, Artificial Sequence
  Description of Artificial Sequence: Synthetic oligonucleotide
  Target: LAMA2; (-) strand; PAM type: YTN; PAM sequence: TTC
agtgggtaaaaacaacaaca

SEQ ID NO: 284732 - DNA, 20 bp, Artificial Sequence
  Description of Artificial Sequence: Synthetic oligonucleotide
  Target: LAMA2; (-) strand; PAM type: YTN; PAM sequence: CTT
cagtgggtaaaaacaacaac

SEQ ID NO: 284733 - DNA, 20 bp, Artificial Sequence
  Description of Artificial Sequence: Synthetic oligonucleotide
  Target: LAMA2; (-) strand; PAM type: YTN; PAM sequence: TTA
caaggagaggaaaaagtgag

SEQ ID NO: 284734 - DNA, 20 bp, Artificial Sequence
  Description of Artificial Sequence: Synthetic oligonucleotide
  Target: LAMA2; (-) strand; PAM type: YTN; PAM sequence: TTG
agaataattacaaggagagg

SEQ ID NO: 284735 - DNA, 20 bp, Artificial Sequence
  Description of Artificial Sequence: Synthetic oligonucleotide
  Target: LAMA2; (-) strand; PAM type: YTN; PAM sequence: CTA
cagaagttgagaataattac

SEQ ID NO: 284736 - DNA, 20 bp, Artificial Sequence
  Description of Artificial Sequence: Synthetic oligonucleotide
  Target: LAMA2; (-) strand; PAM type: YTN; PAM sequence: TTC
tacagaagttgagaataatt

SEQ ID NO: 284737 - DNA, 20 bp, Artificial Sequence
  Description of Artificial Sequence: Synthetic oligonucleotide
  Target: LAMA2; (-) strand; PAM type: YTN; PAM sequence: CTC
caaatataattctacagaag

SEQ ID NO: 284738 - DNA, 20 bp, Artificial Sequence
  Description of Artificial Sequence: Synthetic oligonucleotide
  Target: LAMA2; (-) strand; PAM type: YTN; PAM sequence: TTC
tccaaatataattctacaga

SEQ ID NO: 284739 - DNA, 20 bp, Artificial Sequence
  Description of Artificial Sequence: Synthetic oligonucleotide
  Target: LAMA2; (-) strand; PAM type: YTN; PAM sequence: TTT
ctccaaatataattctacag

SEQ ID NO: 284740 - DNA, 20 bp, Artificial Sequence
  Description of Artificial Sequence: Synthetic oligonucleotide
  Target: LAMA2; (-) strand; PAM type: YTN; PAM sequence: TTA
tgtgtttctccaaatataat

SEQ ID NO: 284741 - DNA, 20 bp, Artificial Sequence
  Description of Artificial Sequence: Synthetic oligonucleotide
  Target: LAMA2; (-) strand; PAM type: YTN; PAM sequence: TTA
ttatgtgtttctccaaatat

SEQ ID NO: 284742 - DNA, 20 bp, Artificial Sequence
  Description of Artificial Sequence: Synthetic oligonucleotide
  Target: LAMA2; (-) strand; PAM type: YTN; PAM sequence: TTT
attatgtgtttctccaaata

SEQ ID NO: 284743 - DNA, 20 bp, Artificial Sequence
  Description of Artificial Sequence: Synthetic oligonucleotide
  Target: LAMA2; (-) strand; PAM type: YTN; PAM sequence: TTT
tattatgtgtttctccaaat

SEQ ID NO: 284744 - DNA, 20 bp, Artificial Sequence
  Description of Artificial Sequence: Synthetic oligonucleotide
  Target: LAMA2; (-) strand; PAM type: YTN; PAM sequence: CTA
gttttattatgtgtttctcc

SEQ ID NO: 284745 - DNA, 20 bp, Artificial Sequence
  Description of Artificial Sequence: Synthetic oligonucleotide
  Target: LAMA2; (-) strand; PAM type: YTN; PAM sequence: TTA
agacctagttttattatgtg

SEQ ID NO: 284746 - DNA, 20 bp, Artificial Sequence
  Description of Artificial Sequence: Synthetic oligonucleotide
  Target: LAMA2; (-) strand; PAM type: YTN; PAM sequence: TTG
ttaagacctagttttattat

SEQ ID NO: 284747 - DNA, 20 bp, Artificial Sequence
  Description of Artificial Sequence: Synthetic oligonucleotide
  Target: LAMA2; (-) strand; PAM type: YTN; PAM sequence: TTT
gttaagacctagttttatta

SEQ ID NO: 284748 - DNA, 20 bp, Artificial Sequence
  Description of Artificial Sequence: Synthetic oligonucleotide
  Target: LAMA2; (-) strand; PAM type: YTN; PAM sequence: TTC
atttgttaagacctagtttt

SEQ ID NO: 284749 - DNA, 20 bp, Artificial Sequence
  Description of Artificial Sequence: Synthetic oligonucleotide
  Target: LAMA2; (-) strand; PAM type: YTN; PAM sequence: TTG
ttcatttgttaagacctagt

SEQ ID NO: 284750 - DNA, 20 bp, Artificial Sequence
  Description of Artificial Sequence: Synthetic oligonucleotide
  Target: LAMA2; (-) strand; PAM type: YTN; PAM sequence: TTG
atatcccagtagttgttcat

SEQ ID NO: 284751 - DNA, 20 bp, Artificial Sequence
  Description of Artificial Sequence: Synthetic oligonucleotide
  Target: LAMA2; (-) strand; PAM type: YTN; PAM sequence: TTT
gatatcccagtagttgttca

SEQ ID NO: 284752 - DNA, 20 bp, Artificial Sequence
  Description of Artificial Sequence: Synthetic oligonucleotide
  Target: LAMA2; (-) strand; PAM type: YTN; PAM sequence: TTT
tgatatcccagtagttgttc

SEQ ID NO: 284753 - DNA, 20 bp, Artificial Sequence
  Description of Artificial Sequence: Synthetic oligonucleotide
  Target: LAMA2; (-) strand; PAM type: YTN; PAM sequence: TTA
agagagaacattttgatatc

SEQ ID NO: 284754 - DNA, 20 bp, Artificial Sequence
  Description of Artificial Sequence: Synthetic oligonucleotide
  Target: LAMA2; (-) strand; PAM type: YTN; PAM sequence: TTT
aagagagaacattttgatat

SEQ ID NO: 284755 - DNA, 20 bp, Artificial Sequence
  Description of Artificial Sequence: Synthetic oligonucleotide
  Target: LAMA2; (-) strand; PAM type: YTN; PAM sequence: CTG
tgggatgtttaagagagaac

SEQ ID NO: 284756 - DNA, 20 bp, Artificial Sequence
  Description of Artificial Sequence: Synthetic oligonucleotide
  Target: LAMA2; (-) strand; PAM type: YTN; PAM sequence: TTA
aactgtgggatgtttaagag

SEQ ID NO: 284757 - DNA, 20 bp, Artificial Sequence
  Description of Artificial Sequence: Synthetic oligonucleotide
  Target: LAMA2; (-) strand; PAM type: YTN; PAM sequence: TTT
aaactgtgggatgtttaaga

SEQ ID NO: 284758 - DNA, 20 bp, Artificial Sequence
  Description of Artificial Sequence: Synthetic oligonucleotide
  Target: LAMA2; (-) strand; PAM type: YTN; PAM sequence: TTC
aatttaaactgtgggatgtt

SEQ ID NO: 284759 - DNA, 20 bp, Artificial Sequence
  Description of Artificial Sequence: Synthetic oligonucleotide
  Target: LAMA2; (-) strand; PAM type: YTN; PAM sequence: TTT
caatttaaactgtgggatgt

SEQ ID NO: 284760 - DNA, 20 bp, Artificial Sequence
  Description of Artificial Sequence: Synthetic oligonucleotide
  Target: LAMA2; (-) strand; PAM type: YTN; PAM sequence: CTT
tcaatttaaactgtgggatg

SEQ ID NO: 284761 - DNA, 20 bp, Artificial Sequence
  Description of Artificial Sequence: Synthetic oligonucleotide
  Target: LAMA2; (-) strand; PAM type: YTN; PAM sequence: TTG
actttcaatttaaactgtgg

SEQ ID NO: 284762 - DNA, 20 bp, Artificial Sequence
  Description of Artificial Sequence: Synthetic oligonucleotide
  Target: LAMA2; (-) strand; PAM type: YTN; PAM sequence: CTT
gactttcaatttaaactgtg

SEQ ID NO: 284763 - DNA, 20 bp, Artificial Sequence
  Description of Artificial Sequence: Synthetic oligonucleotide
  Target: LAMA2; (-) strand; PAM type: YTN; PAM sequence: TTC
ttgactttcaatttaaactg

SEQ ID NO: 284764 - DNA, 20 bp, Artificial Sequence
  Description of Artificial Sequence: Synthetic oligonucleotide
  Target: LAMA2; (-) strand; PAM type: YTN; PAM sequence: TTT
cttgactttcaatttaaact

SEQ ID NO: 284765 - DNA, 20 bp, Artificial Sequence
  Description of Artificial Sequence: Synthetic oligonucleotide
  Target: LAMA2; (-) strand; PAM type: YTN; PAM sequence: TTT
tcttgactttcaatttaaac

SEQ ID NO: 284766 - DNA, 20 bp, Artificial Sequence
  Description of Artificial Sequence: Synthetic oligonucleotide
  Target: LAMA2; (-) strand; PAM type: YTN; PAM sequence: TTT
ttcttgactttcaatttaaa

SEQ ID NO: 284767 - DNA, 20 bp, Artificial Sequence
  Description of Artificial Sequence: Synthetic oligonucleotide
  Target: LAMA2; (-) strand; PAM type: YTN; PAM sequence: TTA
gtttttcttgactttcaatt

SEQ ID NO: 284768 - DNA, 20 bp, Artificial Sequence
  Description of Artificial Sequence: Synthetic oligonucleotide
  Target: LAMA2; (-) strand; PAM type: YTN; PAM sequence: TTT
agtttttcttgactttcaat

SEQ ID NO: 284769 - DNA, 20 bp, Artificial Sequence
  Description of Artificial Sequence: Synthetic oligonucleotide
  Target: LAMA2; (-) strand; PAM type: YTN; PAM sequence: TTT
tagtttttcttgactttcaa

SEQ ID NO: 284770 - DNA, 20 bp, Artificial Sequence
  Description of Artificial Sequence: Synthetic oligonucleotide
  Target: LAMA2; (-) strand; PAM type: YTN; PAM sequence: TTT
ttagtttttcttgactttca

SEQ ID NO: 284771 - DNA, 20 bp, Artificial Sequence
  Description of Artificial Sequence: Synthetic oligonucleotide
  Target: LAMA2; (-) strand; PAM type: YTN; PAM sequence: TTT
tttagtttttcttgactttc

SEQ ID NO: 284772 - DNA, 20 bp, Artificial Sequence
  Description of Artificial Sequence: Synthetic oligonucleotide
  Target: LAMA2; (-) strand; PAM type: YTN; PAM sequence: TTT
ttttagtttttcttgacttt

SEQ ID NO: 284773 - DNA, 20 bp, Artificial Sequence
  Description of Artificial Sequence: Synthetic oligonucleotide
  Target: LAMA2; (-) strand; PAM type: YTN; PAM sequence: CTA
tttttttagtttttcttgac

SEQ ID NO: 284774 - DNA, 20 bp, Artificial Sequence
  Description of Artificial Sequence: Synthetic oligonucleotide
  Target: LAMA2; (-) strand; PAM type: YTN; PAM sequence: TTG
tagctatttttttagttttt

SEQ ID NO: 284775 - DNA, 20 bp, Artificial Sequence
  Description of Artificial Sequence: Synthetic oligonucleotide
  Target: LAMA2; (-) strand; PAM type: YTN; PAM sequence: TTT
gtagctatttttttagtttt

SEQ ID NO: 284776 - DNA, 20 bp, Artificial Sequence
  Description of Artificial Sequence: Synthetic oligonucleotide
  Target: LAMA2; (-) strand; PAM type: YTN; PAM sequence: TTT
tgtagctatttttttagttt

SEQ ID NO: 284777 - DNA, 20 bp, Artificial Sequence
  Description of Artificial Sequence: Synthetic oligonucleotide
  Target: LAMA2; (-) strand; PAM type: YTN; PAM sequence: TTT
ttgtagctatttttttagtt

SEQ ID NO: 284778 - DNA, 20 bp, Artificial Sequence
  Description of Artificial Sequence: Synthetic oligonucleotide
  Target: LAMA2; (-) strand; PAM type: YTN; PAM sequence: TTT
tttgtagctatttttttagt

SEQ ID NO: 284779 - DNA, 20 bp, Artificial Sequence
  Description of Artificial Sequence: Synthetic oligonucleotide
  Target: LAMA2; (-) strand; PAM type: YTN; PAM sequence: TTA
ttttttgtagctattttttt

SEQ ID NO: 284780 - DNA, 20 bp, Artificial Sequence
  Description of Artificial Sequence: Synthetic oligonucleotide
  Target: LAMA2; (-) strand; PAM type: YTN; PAM sequence: TTA
ttattttttgtagctatttt

SEQ ID NO: 284781 - DNA, 20 bp, Artificial Sequence
  Description of Artificial Sequence: Synthetic oligonucleotide
  Target: LAMA2; (-) strand; PAM type: YTN; PAM sequence: TTG
ttattattttttgtagctat

SEQ ID NO: 284782 - DNA, 20 bp, Artificial Sequence
  Description of Artificial Sequence: Synthetic oligonucleotide
  Target: LAMA2; (-) strand; PAM type: YTN; PAM sequence: CTT
gttattattttttgtagcta

SEQ ID NO: 284783 - DNA, 20 bp, Artificial Sequence
  Description of Artificial Sequence: Synthetic oligonucleotide
  Target: LAMA2; (-) strand; PAM type: YTN; PAM sequence: TTC
ttgttattattttttgtagc

SEQ ID NO: 284784 - DNA, 20 bp, Artificial Sequence
  Description of Artificial Sequence: Synthetic oligonucleotide
  Target: LAMA2; (-) strand; PAM type: YTN; PAM sequence: TTA
ttcttgttattattttttgt

SEQ ID NO: 284785 - DNA, 20 bp, Artificial Sequence
  Description of Artificial Sequence: Synthetic oligonucleotide
  Target: LAMA2; (-) strand; PAM type: YTN; PAM sequence: TTG
ttattcttgttattattttt

SEQ ID NO: 284786 - DNA, 20 bp, Artificial Sequence
  Description of Artificial Sequence: Synthetic oligonucleotide
  Target: LAMA2; (-) strand; PAM type: YTN; PAM sequence: TTT
gttattcttgttattatttt

SEQ ID NO: 284787 - DNA, 20 bp, Artificial Sequence
  Description of Artificial Sequence: Synthetic oligonucleotide
  Target: LAMA2; (-) strand; PAM type: YTN; PAM sequence: TTT
tgttattcttgttattattt

SEQ ID NO: 284788 - DNA, 20 bp, Artificial Sequence
  Description of Artificial Sequence: Synthetic oligonucleotide
  Target: LAMA2; (-) strand; PAM type: YTN; PAM sequence: TTA
aattttgttattcttgttat

SEQ ID NO: 284789 - DNA, 20 bp, Artificial Sequence
  Description of Artificial Sequence: Synthetic oligonucleotide
  Target: LAMA2; (-) strand; PAM type: YTN; PAM sequence: TTC
aaatagtgatatattaaatt

SEQ ID NO: 284790 - DNA, 20 bp, Artificial Sequence
  Description of Artificial Sequence: Synthetic oligonucleotide
  Target: LAMA2; (-) strand; PAM type: YTN; PAM sequence: TTT
caaatagtgatatattaaat

SEQ ID NO: 284791 - DNA, 20 bp, Artificial Sequence
  Description of Artificial Sequence: Synthetic oligonucleotide
  Target: LAMA2; (-) strand; PAM type: YTN; PAM sequence: TTT
tcaaatagtgatatattaaa

SEQ ID NO: 284792 - DNA, 20 bp, Artificial Sequence
  Description of Artificial Sequence: Synthetic oligonucleotide
  Target: LAMA2; (-) strand; PAM type: YTN; PAM sequence: TTT
ttcaaatagtgatatattaa

SEQ ID NO: 284793 - DNA, 20 bp, Artificial Sequence
  Description of Artificial Sequence: Synthetic oligonucleotide
  Target: LAMA2; (-) strand; PAM type: YTN; PAM sequence: TTG
gtcatatttttcaaatagtg

SEQ ID NO: 284794 - DNA, 20 bp, Artificial Sequence
  Description of Artificial Sequence: Synthetic oligonucleotide
  Target: LAMA2; (-) strand; PAM type: YTN; PAM sequence: CTT
ggtcatatttttcaaatagt

SEQ ID NO: 284795 - DNA, 20 bp, Artificial Sequence
  Description of Artificial Sequence: Synthetic oligonucleotide
  Target: LAMA2; (-) strand; PAM type: YTN; PAM sequence: CTC
ttggtcatatttttcaaata

SEQ ID NO: 284796 - DNA, 20 bp, Artificial Sequence
  Description of Artificial Sequence: Synthetic oligonucleotide
  Target: LAMA2; (-) strand; PAM type: YTN; PAM sequence: CTG
aggacactcttggtcatatt

SEQ ID NO: 284797 - DNA, 20 bp, Artificial Sequence
  Description of Artificial Sequence: Synthetic oligonucleotide
  Target: LAMA2; (-) strand; PAM type: YTN; PAM sequence: TTC
cgctgaggacactcttggtc

SEQ ID NO: 284798 - DNA, 20 bp, Artificial Sequence
  Description of Artificial Sequence: Synthetic oligonucleotide
  Target: LAMA2; (-) strand; PAM type: YTN; PAM sequence: TTT
ccgctgaggacactcttggt

SEQ ID NO: 284799 - DNA, 20 bp, Artificial Sequence
  Description of Artificial Sequence: Synthetic oligonucleotide
  Target: LAMA2; (-) strand; PAM type: YTN; PAM sequence: TTT
tccgctgaggacactcttgg

SEQ ID NO: 284800 - DNA, 20 bp, Artificial Sequence
  Description of Artificial Sequence: Synthetic oligonucleotide
  Target: LAMA2; (-) strand; PAM type: YTN; PAM sequence: CTC
attttccgctgaggacactc

SEQ ID NO: 284801 - DNA, 20 bp, Artificial Sequence
  Description of Artificial Sequence: Synthetic oligonucleotide
  Target: LAMA2; (-) strand; PAM type: YTN; PAM sequence: CTC
tcattttccgctgaggacac

SEQ ID NO: 284802 - DNA, 20 bp, Artificial Sequence
  Description of Artificial Sequence: Synthetic oligonucleotide
  Target: LAMA2; (-) strand; PAM type: YTN; PAM sequence: TTG
ctctcattttccgctgagga

SEQ ID NO: 284803 - DNA, 20 bp, Artificial Sequence
  Description of Artificial Sequence: Synthetic oligonucleotide
  Target: LAMA2; (-) strand; PAM type: YTN; PAM sequence: TTA
gtaatgtagttgctctcatt

SEQ ID NO: 284804 - DNA, 20 bp, Artificial Sequence
  Description of Artificial Sequence: Synthetic oligonucleotide
  Target: LAMA2; (-) strand; PAM type: YTN; PAM sequence: TTT
agtaatgtagttgctctcat

SEQ ID NO: 284805 - DNA, 20 bp, Artificial Sequence
  Description of Artificial Sequence: Synthetic oligonucleotide
  Target: LAMA2; (-) strand; PAM type: YTN; PAM sequence: TTC
aatgatggtttagtaatgta

SEQ ID NO: 284806 - DNA, 20 bp, Artificial Sequence
  Description of Artificial Sequence: Synthetic oligonucleotide
  Target: LAMA2; (-) strand; PAM type: YTN; PAM sequence: TTT
caatgatggtttagtaatgt

SEQ ID NO: 284807 - DNA, 20 bp, Artificial Sequence
  Description of Artificial Sequence: Synthetic oligonucleotide
  Target: LAMA2; (-) strand; PAM type: YTN; PAM sequence: TTA
tttcaatgatggtttagtaa

SEQ ID NO: 284808 - DNA, 20 bp, Artificial Sequence
  Description of Artificial Sequence: Synthetic oligonucleotide
  Target: LAMA2; (-) strand; PAM type: YTN; PAM sequence: TTG
ttatttcaatgatggtttag

SEQ ID NO: 284809 - DNA, 20 bp, Artificial Sequence
  Description of Artificial Sequence: Synthetic oligonucleotide
  Target: LAMA2; (-) strand; PAM type: YTN; PAM sequence: TTA
gaattgttatttcaatgatg

SEQ ID NO: 284810 - DNA, 20 bp, Artificial Sequence
  Description of Artificial Sequence: Synthetic oligonucleotide
  Target: LAMA2; (-) strand; PAM type: YTN; PAM sequence: TTT
agaattgttatttcaatgat

SEQ ID NO: 284811 - DNA, 20 bp, Artificial Sequence
  Description of Artificial Sequence: Synthetic oligonucleotide
  Target: LAMA2; (-) strand; PAM type: YTN; PAM sequence: TTG
tttagaattgttatttcaat

SEQ ID NO: 284812 - DNA, 20 bp, Artificial Sequence
  Description of Artificial Sequence: Synthetic oligonucleotide
  Target: LAMA2; (-) strand; PAM type: YTN; PAM sequence: TTG
attgtttagaattgttattt

SEQ ID NO: 284813 - DNA, 20 bp, Artificial Sequence
  Description of Artificial Sequence: Synthetic oligonucleotide
  Target: LAMA2; (-) strand; PAM type: YTN; PAM sequence: CTA
aagtcagcaaagttgattgt

SEQ ID NO: 284814 - DNA, 20 bp, Artificial Sequence
  Description of Artificial Sequence: Synthetic oligonucleotide
  Target: LAMA2; (-) strand; PAM type: YTN; PAM sequence: TTC
taaagtcagcaaagttgatt

SEQ ID NO: 284815 - DNA, 20 bp, Artificial Sequence
  Description of Artificial Sequence: Synthetic oligonucleotide
  Target: LAMA2; (-) strand; PAM type: YTN; PAM sequence: TTT
ctaaagtcagcaaagttgat

SEQ ID NO: 284816 - DNA, 20 bp, Artificial Sequence
  Description of Artificial Sequence: Synthetic oligonucleotide
  Target: LAMA2; (-) strand; PAM type: YTN; PAM sequence: TTT
tctaaagtcagcaaagttga

SEQ ID NO: 284817 - DNA, 20 bp, Artificial Sequence
  Description of Artificial Sequence: Synthetic oligonucleotide
  Target: LAMA2; (-) strand; PAM type: YTN; PAM sequence: TTT
ttctaaagtcagcaaagttg

SEQ ID NO: 284818 - DNA, 20 bp, Artificial Sequence
  Description of Artificial Sequence: Synthetic oligonucleotide
  Target: LAMA2; (-) strand; PAM type: YTN; PAM sequence: CTT
tttctaaagtcagcaaagtt

SEQ ID NO: 284819 - DNA, 20 bp, Artificial Sequence
  Description of Artificial Sequence: Synthetic oligonucleotide
  Target: LAMA2; (-) strand; PAM type: YTN; PAM sequence: CTG
ctttttctaaagtcagcaaa

SEQ ID NO: 284820 - DNA, 20 bp, Artificial Sequence
  Description of Artificial Sequence: Synthetic oligonucleotide
  Target: LAMA2; (-) strand; PAM type: YTN; PAM sequence: CTC
tgctttttctaaagtcagca

SEQ ID NO: 284821 - DNA, 20 bp, Artificial Sequence
  Description of Artificial Sequence: Synthetic oligonucleotide
  Target: LAMA2; (-) strand; PAM type: YTN; PAM sequence: TTA
actctgctttttctaaagtc

SEQ ID NO: 284822 - DNA, 20 bp, Artificial Sequence
  Description of Artificial Sequence: Synthetic oligonucleotide
  Target: LAMA2; (-) strand; PAM type: YTN; PAM sequence: TTA
agttaactctgctttttcta

SEQ ID NO: 284823 - DNA, 20 bp, Artificial Sequence
  Description of Artificial Sequence: Synthetic oligonucleotide
  Target: LAMA2; (-) strand; PAM type: YTN; PAM sequence: TTT
aagttaactctgctttttct

SEQ ID NO: 284824 - DNA, 20 bp, Artificial Sequence
  Description of Artificial Sequence: Synthetic oligonucleotide
  Target: LAMA2; (-) strand; PAM type: YTN; PAM sequence: CTT
taagttaactctgctttttc

SEQ ID NO: 284825 - DNA, 20 bp, Artificial Sequence
  Description of Artificial Sequence: Synthetic oligonucleotide
  Target: LAMA2; (-) strand; PAM type: YTN; PAM sequence: TTC
tttaagttaactctgctttt

SEQ ID NO: 284826 - DNA, 20 bp, Artificial Sequence
  Description of Artificial Sequence: Synthetic oligonucleotide
  Target: LAMA2; (-) strand; PAM type: YTN; PAM sequence: TTC
attctttaagttaactctgc

SEQ ID NO: 284827 - DNA, 20 bp, Artificial Sequence
  Description of Artificial Sequence: Synthetic oligonucleotide
  Target: LAMA2; (-) strand; PAM type: YTN; PAM sequence: TTT
cattctttaagttaactctg

SEQ ID NO: 284828 - DNA, 20 bp, Artificial Sequence
  Description of Artificial Sequence: Synthetic oligonucleotide
  Target: LAMA2; (-) strand; PAM type: YTN; PAM sequence: TTT
tcattctttaagttaactct

SEQ ID NO: 284829 - DNA, 20 bp, Artificial Sequence
  Description of Artificial Sequence: Synthetic oligonucleotide
  Target: LAMA2; (-) strand; PAM type: YTN; PAM sequence: TTT
ttcattctttaagttaactc

SEQ ID NO: 284830 - DNA, 20 bp, Artificial Sequence
  Description of Artificial Sequence: Synthetic oligonucleotide
  Target: LAMA2; (-) strand; PAM type: YTN; PAM sequence: CTT
tttcattctttaagttaact

SEQ ID NO: 284831 - DNA, 20 bp, Artificial Sequence
  Description of Artificial Sequence: Synthetic oligonucleotide
  Target: LAMA2; (-) strand; PAM type: YTN; PAM sequence: TTC
catctttttcattctttaag

SEQ ID NO: 284832 - DNA, 20 bp, Artificial Sequence
  Description of Artificial Sequence: Synthetic oligonucleotide
  Target: LAMA2; (-) strand; PAM type: YTN; PAM sequence: TTT
ccatctttttcattctttaa

SEQ ID NO: 284833 - DNA, 20 bp, Artificial Sequence
  Description of Artificial Sequence: Synthetic oligonucleotide
  Target: LAMA2; (-) strand; PAM type: YTN; PAM sequence: TTT
tccatctttttcattcttta

SEQ ID NO: 284834 - DNA, 20 bp, Artificial Sequence
  Description of Artificial Sequence: Synthetic oligonucleotide
  Target: LAMA2; (-) strand; PAM type: YTN; PAM sequence: TTT
ttccatctttttcattcttt

SEQ ID NO: 284835 - DNA, 20 bp, Artificial Sequence
  Description of Artificial Sequence: Synthetic oligonucleotide
  Target: LAMA2; (-) strand; PAM type: YTN; PAM sequence: TTA
atttttccatctttttcatt

SEQ ID NO: 284836 - DNA, 20 bp, Artificial Sequence
  Description of Artificial Sequence: Synthetic oligonucleotide
  Target: LAMA2; (-) strand; PAM type: YTN; PAM sequence: TTC
attaatttttccatcttttt

SEQ ID NO: 284837 - DNA, 20 bp, Artificial Sequence
  Description of Artificial Sequence: Synthetic oligonucleotide
  Target: LAMA2; (-) strand; PAM type: YTN; PAM sequence: TTC
aaattcattaatttttccat

SEQ ID NO: 284838 - DNA, 20 bp, Artificial Sequence
  Description of Artificial Sequence: Synthetic oligonucleotide
  Target: LAMA2; (-) strand; PAM type: YTN; PAM sequence: CTT
caaattcattaatttttcca

SEQ ID NO: 284839 - DNA, 20 bp, Artificial Sequence
  Description of Artificial Sequence: Synthetic oligonucleotide
  Target: LAMA2; (-) strand; PAM type: YTN; PAM sequence: CTG
tcttcaaattcattaatttt

SEQ ID NO: 284840 - DNA, 20 bp, Artificial Sequence
  Description of Artificial Sequence: Synthetic oligonucleotide
  Target: LAMA2; (-) strand; PAM type: YTN; PAM sequence: TTC
tgtcttcaaattcattaatt

SEQ ID NO: 284841 - DNA, 20 bp, Artificial Sequence
  Description of Artificial Sequence: Synthetic oligonucleotide
  Target: LAMA2; (-) strand; PAM type: YTN; PAM sequence: TTT
ctgtcttcaaattcattaat

SEQ ID NO: 284842 - DNA, 20 bp, Artificial Sequence
  Description of Artificial Sequence: Synthetic oligonucleotide
  Target: LAMA2; (-) strand; PAM type: YTN; PAM sequence: TTT
tctgtcttcaaattcattaa

SEQ ID NO: 284843 - DNA, 20 bp, Artificial Sequence
  Description of Artificial Sequence: Synthetic oligonucleotide
  Target: LAMA2; (-) strand; PAM type: YTN; PAM sequence: CTA
atattttctgtcttcaaatt

SEQ ID NO: 284844 - DNA, 20 bp, Artificial Sequence
  Description of Artificial Sequence: Synthetic oligonucleotide
  Target: LAMA2; (-) strand; PAM type: YTN; PAM sequence: TTA
tcaggtctaatattttctgt

SEQ ID NO: 284845 - DNA, 20 bp, Artificial Sequence
  Description of Artificial Sequence: Synthetic oligonucleotide
  Target: LAMA2; (-) strand; PAM type: YTN; PAM sequence: TTT
atcaggtctaatattttctg

SEQ ID NO: 284846 - DNA, 20 bp, Artificial Sequence
  Description of Artificial Sequence: Synthetic oligonucleotide
  Target: LAMA2; (-) strand; PAM type: YTN; PAM sequence: TTG
atttatcaggtctaatattt

SEQ ID NO: 284847 - DNA, 20 bp, Artificial Sequence
  Description of Artificial Sequence: Synthetic oligonucleotide
  Target: LAMA2; (-) strand; PAM type: YTN; PAM sequence: TTT
gatttatcaggtctaatatt

SEQ ID NO: 284848 - DNA, 20 bp, Artificial Sequence
  Description of Artificial Sequence: Synthetic oligonucleotide
  Target: LAMA2; (-) strand; PAM type: YTN; PAM sequence: TTT
tgatttatcaggtctaatat

SEQ ID NO: 284849 - DNA, 20 bp, Artificial Sequence
  Description of Artificial Sequence: Synthetic oligonucleotide
  Target: LAMA2; (-) strand; PAM type: YTN; PAM sequence: TTT
ttgatttatcaggtctaata

SEQ ID NO: 284850 - DNA, 20 bp, Artificial Sequence
  Description of Artificial Sequence: Synthetic oligonucleotide
  Target: LAMA2; (-) strand; PAM type: YTN; PAM sequence: CTT
tttgatttatcaggtctaat

SEQ ID NO: 284851 - DNA, 20 bp, Artificial Sequence
  Description of Artificial Sequence: Synthetic oligonucleotide
  Target: LAMA2; (-) strand; PAM type: YTN; PAM sequence: CTA
aggagtcacctttttgattt

SEQ ID NO: 284852 - DNA, 20 bp, Artificial Sequence
  Description of Artificial Sequence: Synthetic oligonucleotide
  Target: LAMA2; (-) strand; PAM type: YTN; PAM sequence: TTC
ctaaggagtcacctttttga

SEQ ID NO: 284853 - DNA, 20 bp, Artificial Sequence
  Description of Artificial Sequence: Synthetic oligonucleotide
  Target: LAMA2; (-) strand; PAM type: YTN; PAM sequence: CTA
tattcctaaggagtcacctt

SEQ ID NO: 284854 - DNA, 20 bp, Artificial Sequence
  Description of Artificial Sequence: Synthetic oligonucleotide
  Target: LAMA2; (-) strand; PAM type: YTN; PAM sequence: TTA
atctatattcctaaggagtc

SEQ ID NO: 284855 - DNA, 20 bp, Artificial Sequence
  Description of Artificial Sequence: Synthetic oligonucleotide
  Target: LAMA2; (-) strand; PAM type: YTN; PAM sequence: TTT
aatctatattcctaaggagt

SEQ ID NO: 284856 - DNA, 20 bp, Artificial Sequence
  Description of Artificial Sequence: Synthetic oligonucleotide
  Target: LAMA2; (-) strand; PAM type: YTN; PAM sequence: TTT
taatctatattcctaaggag

SEQ ID NO: 284857 - DNA, 20 bp, Artificial Sequence
  Description of Artificial Sequence: Synthetic oligonucleotide
  Target: LAMA2; (-) strand; PAM type: YTN; PAM sequence: TTT
ttaatctatattcctaagga

SEQ ID NO: 284858 - DNA, 20 bp, Artificial Sequence
  Description of Artificial Sequence: Synthetic oligonucleotide
  Target: LAMA2; (-) strand; PAM type: YTN; PAM sequence: TTA
atttttaatctatattccta

SEQ ID NO: 284859 - DNA, 20 bp, Artificial Sequence
  Description of Artificial Sequence: Synthetic oligonucleotide
  Target: LAMA2; (-) strand; PAM type: YTN; PAM sequence: CTT
aatttttaatctatattcct

SEQ ID NO: 284860 - DNA, 20 bp, Artificial Sequence
  Description of Artificial Sequence: Synthetic oligonucleotide
  Target: LAMA2; (-) strand; PAM type: YTN; PAM sequence: TTG
acaatcacttaatttttaat

SEQ ID NO: 284861 - DNA, 20 bp, Artificial Sequence
  Description of Artificial Sequence: Synthetic oligonucleotide
  Target: LAMA2; (-) strand; PAM type: YTN; PAM sequence: CTT
gacaatcacttaatttttaa

SEQ ID NO: 284862 - DNA, 20 bp, Artificial Sequence
  Description of Artificial Sequence: Synthetic oligonucleotide
  Target: LAMA2; (-) strand; PAM type: YTN; PAM sequence: TTG
atgaaacttgacaatcactt

SEQ ID NO: 284863 - DNA, 20 bp, Artificial Sequence
  Description of Artificial Sequence: Synthetic oligonucleotide
  Target: LAMA2; (-) strand; PAM type: YTN; PAM sequence: CTT
gatgaaacttgacaatcact

SEQ ID NO: 284864 - DNA, 20 bp, Artificial Sequence
  Description of Artificial Sequence: Synthetic oligonucleotide
  Target: LAMA2; (-) strand; PAM type: YTN; PAM sequence: TTC
ttgatgaaacttgacaatca

SEQ ID NO: 284865 - DNA, 20 bp, Artificial Sequence
  Description of Artificial Sequence: Synthetic oligonucleotide
  Target: LAMA2; (-) strand; PAM type: YTN; PAM sequence: TTT
cttgatgaaacttgacaatc

SEQ ID NO: 284866 - DNA, 20 bp, Artificial Sequence
  Description of Artificial Sequence: Synthetic oligonucleotide
  Target: LAMA2; (-) strand; PAM type: YTN; PAM sequence: TTT
tcttgatgaaacttgacaat

SEQ ID NO: 284867 - DNA, 20 bp, Artificial Sequence
  Description of Artificial Sequence: Synthetic oligonucleotide
  Target: LAMA2; (-) strand; PAM type: YTN; PAM sequence: TTT
ttcttgatgaaacttgacaa

SEQ ID NO: 284868 - DNA, 20 bp, Artificial Sequence
  Description of Artificial Sequence: Synthetic oligonucleotide
  Target: LAMA2; (-) strand; PAM type: YTN; PAM sequence: TTA
tttttcttgatgaaacttga

SEQ ID NO: 284869 - DNA, 20 bp, Artificial Sequence
  Description of Artificial Sequence: Synthetic oligonucleotide
  Target: LAMA2; (-) strand; PAM type: YTN; PAM sequence: TTT
atttttcttgatgaaacttg

SEQ ID NO: 284870 - DNA, 20 bp, Artificial Sequence
  Description of Artificial Sequence: Synthetic oligonucleotide
  Target: LAMA2; (-) strand; PAM type: YTN; PAM sequence: CTT
tatttttcttgatgaaactt

SEQ ID NO: 284871 - DNA, 20 bp, Artificial Sequence
  Description of Artificial Sequence: Synthetic oligonucleotide
  Target: LAMA2; (-) strand; PAM type: YTN; PAM sequence: TTG
tcctttatttttcttgatga

SEQ ID NO: 284872 - DNA, 20 bp, Artificial Sequence
  Description of Artificial Sequence: Synthetic oligonucleotide
  Target: LAMA2; (-) strand; PAM type: YTN; PAM sequence: TTT
gtcctttatttttcttgatg

SEQ ID NO: 284873 - DNA, 20 bp, Artificial Sequence
  Description of Artificial Sequence: Synthetic oligonucleotide
  Target: LAMA2; (-) strand; PAM type: YTN; PAM sequence: CTA
tttgtcctttatttttcttg

SEQ ID NO: 284874 - DNA, 20 bp, Artificial Sequence
  Description of Artificial Sequence: Synthetic oligonucleotide
  Target: LAMA2; (-) strand; PAM type: YTN; PAM sequence: TTG
cctatttgtcctttattttt

SEQ ID NO: 284875 - DNA, 20 bp, Artificial Sequence
  Description of Artificial Sequence: Synthetic oligonucleotide
  Target: LAMA2; (-) strand; PAM type: YTN; PAM sequence: TTT
gcctatttgtcctttatttt

SEQ ID NO: 284876 - DNA, 20 bp, Artificial Sequence
  Description of Artificial Sequence: Synthetic oligonucleotide
  Target: LAMA2; (-) strand; PAM type: YTN; PAM sequence: CTT
tgcctatttgtcctttattt

SEQ ID NO: 284877 - DNA, 20 bp, Artificial Sequence
  Description of Artificial Sequence: Synthetic oligonucleotide
  Target: LAMA2; (-) strand; PAM type: YTN; PAM sequence: TTA
gagctttgcctatttgtcct

SEQ ID NO: 284878 - DNA, 20 bp, Artificial Sequence
  Description of Artificial Sequence: Synthetic oligonucleotide
  Target: LAMA2; (-) strand; PAM type: YTN; PAM sequence: TTT
agagctttgcctatttgtcc

SEQ ID NO: 284879 - DNA, 20 bp, Artificial Sequence
  Description of Artificial Sequence: Synthetic oligonucleotide
  Target: LAMA2; (-) strand; PAM type: YTN; PAM sequence: TTT
tagagctttgcctatttgtc

SEQ ID NO: 284880 - DNA, 20 bp, Artificial Sequence
  Description of Artificial Sequence: Synthetic oligonucleotide
  Target: LAMA2; (-) strand; PAM type: YTN; PAM sequence: CTT
ttagagctttgcctatttgt

SEQ ID NO: 284881 - DNA, 20 bp, Artificial Sequence
  Description of Artificial Sequence: Synthetic oligonucleotide
  Target: LAMA2; (-) strand; PAM type: YTN; PAM sequence: CTC
ttttagagctttgcctattt

SEQ ID NO: 284882 - DNA, 20 bp, Artificial Sequence
  Description of Artificial Sequence: Synthetic oligonucleotide
  Target: LAMA2; (-) strand; PAM type: YTN; PAM sequence: CTA
gtgatacctcttttagagct

SEQ ID NO: 284883 - DNA, 20 bp, Artificial Sequence
  Description of Artificial Sequence: Synthetic oligonucleotide
  Target: LAMA2; (-) strand; PAM type: YTN; PAM sequence: TTG
tctagtgatacctcttttag

SEQ ID NO: 284884 - DNA, 20 bp, Artificial Sequence
  Description of Artificial Sequence: Synthetic oligonucleotide
  Target: LAMA2; (-) strand; PAM type: YTN; PAM sequence: CTT
gtctagtgatacctctttta

SEQ ID NO: 284885 - DNA, 20 bp, Artificial Sequence
  Description of Artificial Sequence: Synthetic oligonucleotide
  Target: LAMA2; (-) strand; PAM type: YTN; PAM sequence: CTC
ccttgtctagtgatacctct

SEQ ID NO: 284886 - DNA, 20 bp, Artificial Sequence
  Description of Artificial Sequence: Synthetic oligonucleotide
  Target: LAMA2; (-) strand; PAM type: YTN; PAM sequence: TTC
ctcccttgtctagtgatacc

SEQ ID NO: 284887 - DNA, 20 bp, Artificial Sequence
  Description of Artificial Sequence: Synthetic oligonucleotide
  Target: LAMA2; (-) strand; PAM type: YTN; PAM sequence: TTT
cctcccttgtctagtgatac

SEQ ID NO: 284888 - DNA, 20 bp, Artificial Sequence
  Description of Artificial Sequence: Synthetic oligonucleotide
  Target: LAMA2; (-) strand; PAM type: YTN; PAM sequence: TTA
aatttcctcccttgtctagt

SEQ ID NO: 284889 - DNA, 20 bp, Artificial Sequence
  Description of Artificial Sequence: Synthetic oligonucleotide
  Target: LAMA2; (-) strand; PAM type: YTN; PAM sequence: TTA
tgtgttaaatttcctccctt

SEQ ID NO: 284890 - DNA, 20 bp, Artificial Sequence
  Description of Artificial Sequence: Synthetic oligonucleotide
  Target: LAMA2; (-) strand; PAM type: YTN; PAM sequence: CTT
atgtgttaaatttcctccct

SEQ ID NO: 284891 - DNA, 20 bp, Artificial Sequence
  Description of Artificial Sequence: Synthetic oligonucleotide
  Target: LAMA2; (-) strand; PAM type: YTN; PAM sequence: CTC
ttatgtgttaaatttcctcc

SEQ ID NO: 284892 - DNA, 20 bp, Artificial Sequence
  Description of Artificial Sequence: Synthetic oligonucleotide
  Target: LAMA2; (-) strand; PAM type: YTN; PAM sequence: TTC
caagtgatctcttatgtgtt

SEQ ID NO: 284893 - DNA, 20 bp, Artificial Sequence
  Description of Artificial Sequence: Synthetic oligonucleotide
  Target: LAMA2; (-) strand; PAM type: YTN; PAM sequence: TTT
ccaagtgatctcttatgtgt

SEQ ID NO: 284894 - DNA, 20 bp, Artificial Sequence
  Description of Artificial Sequence: Synthetic oligonucleotide
  Target: LAMA2; (-) strand; PAM type: YTN; PAM sequence: TTT
tccaagtgatctcttatgtg

SEQ ID NO: 284895 - DNA, 20 bp, Artificial Sequence
  Description of Artificial Sequence: Synthetic oligonucleotide
  Target: LAMA2; (-) strand; PAM type: YTN; PAM sequence: TTT
ttccaagtgatctcttatgt

SEQ ID NO: 284896 - DNA, 20 bp, Artificial Sequence
  Description of Artificial Sequence: Synthetic oligonucleotide
  Target: LAMA2; (-) strand; PAM type: YTN; PAM sequence: TTG
aagtttttccaagtgatctc

SEQ ID NO: 284897 - DNA, 20 bp, Artificial Sequence
  Description of Artificial Sequence: Synthetic oligonucleotide
  Target: LAMA2; (-) strand; PAM type: YTN; PAM sequence: CTC
cggagcagttgaagtttttc

SEQ ID NO: 284898 - DNA, 20 bp, Artificial Sequence
  Description of Artificial Sequence: Synthetic oligonucleotide
  Target: LAMA2; (-) strand; PAM type: YTN; PAM sequence: TTC
tccggagcagttgaagtttt

SEQ ID NO: 284899 - DNA, 20 bp, Artificial Sequence
  Description of Artificial Sequence: Synthetic oligonucleotide
  Target: LAMA2; (-) strand; PAM type: YTN; PAM sequence: CTA
ttctccggagcagttgaagt

SEQ ID NO: 284900 - DNA, 20 bp, Artificial Sequence
  Description of Artificial Sequence: Synthetic oligonucleotide
  Target: LAMA2; (-) strand; PAM type: YTN; PAM sequence: CTC
tattctccggagcagttgaa

SEQ ID NO: 284901 - DNA, 20 bp, Artificial Sequence
  Description of Artificial Sequence: Synthetic oligonucleotide
  Target: LAMA2; (-) strand; PAM type: YTN; PAM sequence: TTC
ctctattctccggagcagtt

SEQ ID NO: 284902 - DNA, 20 bp, Artificial Sequence
  Description of Artificial Sequence: Synthetic oligonucleotide
  Target: LAMA2; (-) strand; PAM type: YTN; PAM sequence: TTT
cctctattctccggagcagt

SEQ ID NO: 284903 - DNA, 20 bp, Artificial Sequence
  Description of Artificial Sequence: Synthetic oligonucleotide
  Target: LAMA2; (-) strand; PAM type: YTN; PAM sequence: TTT
tcctctattctccggagcag

SEQ ID NO: 284904 - DNA, 20 bp, Artificial Sequence
  Description of Artificial Sequence: Synthetic oligonucleotide
  Target: LAMA2; (-) strand; PAM type: YTN; PAM sequence: TTT
ttcctctattctccggagca

SEQ ID NO: 284905 - DNA, 20 bp, Artificial Sequence
  Description of Artificial Sequence: Synthetic oligonucleotide
  Target: LAMA2; (-) strand; PAM type: YTN; PAM sequence: CTT
tttcctctattctccggagc

SEQ ID NO: 284906 - DNA, 20 bp, Artificial Sequence
  Description of Artificial Sequence: Synthetic oligonucleotide
  Target: LAMA2; (-) strand; PAM type: YTN; PAM sequence: CTC
tttttcctctattctccgga

SEQ ID NO: 284907 - DNA, 20 bp, Artificial Sequence
  Description of Artificial Sequence: Synthetic oligonucleotide
  Target: LAMA2; (-) strand; PAM type: YTN; PAM sequence: CTC
ccctctttttcctctattct

SEQ ID NO: 284908 - DNA, 20 bp, Artificial Sequence
  Description of Artificial Sequence: Synthetic oligonucleotide
  Target: LAMA2; (-) strand; PAM type: YTN; PAM sequence: TTC
tcccctctttttcctctatt

SEQ ID NO: 284909 - DNA, 20 bp, Artificial Sequence
  Description of Artificial Sequence: Synthetic oligonucleotide
  Target: LAMA2; (-) strand; PAM type: YTN; PAM sequence: CTT
ctcccctctttttcctctat

SEQ ID NO: 284910 - DNA, 20 bp, Artificial Sequence
  Description of Artificial Sequence: Synthetic oligonucleotide
  Target: LAMA2; (-) strand; PAM type: YTN; PAM sequence: CTC
ttctcccctctttttcctct

SEQ ID NO: 284911 - DNA, 20 bp, Artificial Sequence
  Description of Artificial Sequence: Synthetic oligonucleotide
  Target: LAMA2; (-) strand; PAM type: YTN; PAM sequence: TTC
ctcttctcccctctttttcc

SEQ ID NO: 284912 - DNA, 20 bp, Artificial Sequence
  Description of Artificial Sequence: Synthetic oligonucleotide
  Target: LAMA2; (-) strand; PAM type: YTN; PAM sequence: TTG
gaagttcctcttctcccctc

SEQ ID NO: 284913 - DNA, 20 bp, Artificial Sequence
  Description of Artificial Sequence: Synthetic oligonucleotide
  Target: LAMA2; (-) strand; PAM type: YTN; PAM sequence: CTT
ggaagttcctcttctcccct

SEQ ID NO: 284914 - DNA, 20 bp, Artificial Sequence
  Description of Artificial Sequence: Synthetic oligonucleotide
  Target: LAMA2; (-) strand; PAM type: YTN; PAM sequence: TTC
aaaatggaacttggaagttc

SEQ ID NO: 284915 - DNA, 20 bp, Artificial Sequence
  Description of Artificial Sequence: Synthetic oligonucleotide
  Target: LAMA2; (-) strand; PAM type: YTN; PAM sequence: TTT
caaaatggaacttggaagtt

SEQ ID NO: 284916 - DNA, 20 bp, Artificial Sequence
  Description of Artificial Sequence: Synthetic oligonucleotide
  Target: LAMA2; (-) strand; PAM type: YTN; PAM sequence: TTG
ccaaatgtttcaaaatggaa

SEQ ID NO: 284917 - DNA, 20 bp, Artificial Sequence
  Description of Artificial Sequence: Synthetic oligonucleotide
  Target: LAMA2; (-) strand; PAM type: YTN; PAM sequence: TTT
gccaaatgtttcaaaatgga

SEQ ID NO: 284918 - DNA, 20 bp, Artificial Sequence
  Description of Artificial Sequence: Synthetic oligonucleotide
  Target: LAMA2; (-) strand; PAM type: YTN; PAM sequence: TTT
tgccaaatgtttcaaaatgg

SEQ ID NO: 284919 - DNA, 20 bp, Artificial Sequence
  Description of Artificial Sequence: Synthetic oligonucleotide
  Target: LAMA2; (-) strand; PAM type: YTN; PAM sequence: TTT
ttgccaaatgtttcaaaatg

SEQ ID NO: 284920 - DNA, 20 bp, Artificial Sequence
  Description of Artificial Sequence: Synthetic oligonucleotide
  Target: LAMA2; (-) strand; PAM type: YTN; PAM sequence: CTC
agaagtttttgccaaatgtt

SEQ ID NO: 284921 - DNA, 20 bp, Artificial Sequence
  Description of Artificial Sequence: Synthetic oligonucleotide
  Target: LAMA2; (-) strand; PAM type: YTN; PAM sequence: TTC
tcagaagtttttgccaaatg

SEQ ID NO: 284922 - DNA, 20 bp, Artificial Sequence
  Description of Artificial Sequence: Synthetic oligonucleotide
  Target: LAMA2; (-) strand; PAM type: YTN; PAM sequence: TTC
acaagttctcagaagttttt

SEQ ID NO: 284923 - DNA, 20 bp, Artificial Sequence
  Description of Artificial Sequence: Synthetic oligonucleotide
  Target: LAMA2; (-) strand; PAM type: YTN; PAM sequence: TTA
ttcacaagttctcagaagtt

SEQ ID NO: 284924 - DNA, 20 bp, Artificial Sequence
  Description of Artificial Sequence: Synthetic oligonucleotide
  Target: LAMA2; (-) strand; PAM type: YTN; PAM sequence: TTT
attcacaagttctcagaagt

SEQ ID NO: 284925 - DNA, 20 bp, Artificial Sequence
  Description of Artificial Sequence: Synthetic oligonucleotide
  Target: LAMA2; (-) strand; PAM type: YTN; PAM sequence: TTT
tattcacaagttctcagaag

SEQ ID NO: 284926 - DNA, 20 bp, Artificial Sequence
  Description of Artificial Sequence: Synthetic oligonucleotide
  Target: LAMA2; (-) strand; PAM type: YTN; PAM sequence: CTT
ttattcacaagttctcagaa

SEQ ID NO: 284927 - DNA, 20 bp, Artificial Sequence
  Description of Artificial Sequence: Synthetic oligonucleotide
  Target: LAMA2; (-) strand; PAM type: YTN; PAM sequence: TTA
cagacccttttattcacaag

SEQ ID NO: 284928 - DNA, 20 bp, Artificial Sequence
  Description of Artificial Sequence: Synthetic oligonucleotide
  Target: LAMA2; (-) strand; PAM type: YTN; PAM sequence: TTA
ggcaaattacagaccctttt

SEQ ID NO: 284929 - DNA, 20 bp, Artificial Sequence
  Description of Artificial Sequence: Synthetic oligonucleotide
  Target: LAMA2; (-) strand; PAM type: YTN; PAM sequence: CTT
aggcaaattacagacccttt

SEQ ID NO: 284930 - DNA, 20 bp, Artificial Sequence
  Description of Artificial Sequence: Synthetic oligonucleotide
  Target: LAMA2; (-) strand; PAM type: YTN; PAM sequence: TTA
gacttaggcaaattacagac

SEQ ID NO: 284931 - DNA, 20 bp, Artificial Sequence
  Description of Artificial Sequence: Synthetic oligonucleotide
  Target: LAMA2; (-) strand; PAM type: YTN; PAM sequence: CTT
agacttaggcaaattacaga

SEQ ID NO: 284932 - DNA, 20 bp, Artificial Sequence
  Description of Artificial Sequence: Synthetic oligonucleotide
  Target: LAMA2; (-) strand; PAM type: YTN; PAM sequence: CTA
cttagacttaggcaaattac

SEQ ID NO: 284933 - DNA, 20 bp, Artificial Sequence
  Description of Artificial Sequence: Synthetic oligonucleotide
  Target: LAMA2; (-) strand; PAM type: YTN; PAM sequence: TTA
aagactacttagacttaggc

SEQ ID NO: 284934 - DNA, 20 bp, Artificial Sequence
  Description of Artificial Sequence: Synthetic oligonucleotide
  Target: LAMA2; (-) strand; PAM type: YTN; PAM sequence: TTA
atgagaaagagcaaaagtag

SEQ ID NO: 284935 - DNA, 20 bp, Artificial Sequence
  Description of Artificial Sequence: Synthetic oligonucleotide
  Target: LAMA2; (-) strand; PAM type: YTN; PAM sequence: TTA
gattaatgagaaagagcaaa

SEQ ID NO: 284936 - DNA, 20 bp, Artificial Sequence
  Description of Artificial Sequence: Synthetic oligonucleotide
  Target: LAMA2; (-) strand; PAM type: YTN; PAM sequence: TTT
agattaatgagaaagagcaa

SEQ ID NO: 284937 - DNA, 20 bp, Artificial Sequence
  Description of Artificial Sequence: Synthetic oligonucleotide
  Target: LAMA2; (-) strand; PAM type: YTN; PAM sequence: TTA
gatttagattaatgagaaag

SEQ ID NO: 284938 - DNA, 20 bp, Artificial Sequence
  Description of Artificial Sequence: Synthetic oligonucleotide
  Target: LAMA2; (-) strand; PAM type: YTN; PAM sequence: TTT
agatttagattaatgagaaa

SEQ ID NO: 284939 - DNA, 20 bp, Artificial Sequence
  Description of Artificial Sequence: Synthetic oligonucleotide
  Target: LAMA2; (-) strand; PAM type: YTN; PAM sequence: CTG
aggcaaaatgatttagattt

SEQ ID NO: 284940 - DNA, 20 bp, Artificial Sequence
  Description of Artificial Sequence: Synthetic oligonucleotide
  Target: LAMA2; (-) strand; PAM type: YTN; PAM sequence: CTA
aaactgaggcaaaatgattt

SEQ ID NO: 284941 - DNA, 20 bp, Artificial Sequence
  Description of Artificial Sequence: Synthetic oligonucleotide
  Target: LAMA2; (-) strand; PAM type: YTN; PAM sequence: TTC
taaaactgaggcaaaatgat

SEQ ID NO: 284942 - DNA, 20 bp, Artificial Sequence
  Description of Artificial Sequence: Synthetic oligonucleotide
  Target: LAMA2; (-) strand; PAM type: YTN; PAM sequence: TTA
ttctaaaactgaggcaaaat

SEQ ID NO: 284943 - DNA, 20 bp, Artificial Sequence
  Description of Artificial Sequence: Synthetic oligonucleotide
  Target: LAMA2; (-) strand; PAM type: YTN; PAM sequence: CTA
caaattattctaaaactgag

SEQ ID NO: 284944 - DNA, 20 bp, Artificial Sequence
  Description of Artificial Sequence: Synthetic oligonucleotide
  Target: LAMA2; (-) strand; PAM type: YTN; PAM sequence: TTC
tacaaattattctaaaactg

SEQ ID NO: 284945 - DNA, 20 bp, Artificial Sequence
  Description of Artificial Sequence: Synthetic oligonucleotide
  Target: LAMA2; (-) strand; PAM type: YTN; PAM sequence: CTG
acattctacaaattattcta

SEQ ID NO: 284946 - DNA, 20 bp, Artificial Sequence
  Description of Artificial Sequence: Synthetic oligonucleotide
  Target: LAMA2; (-) strand; PAM type: YTN; PAM sequence: TTC
tgacattctacaaattattc

SEQ ID NO: 284947 - DNA, 20 bp, Artificial Sequence
  Description of Artificial Sequence: Synthetic oligonucleotide
  Target: LAMA2; (-) strand; PAM type: YTN; PAM sequence: TTA
ttctgacattctacaaatta

SEQ ID NO: 284948 - DNA, 20 bp, Artificial Sequence
  Description of Artificial Sequence: Synthetic oligonucleotide
  Target: LAMA2; (-) strand; PAM type: YTN; PAM sequence: TTG
ttattctgacattctacaaa

SEQ ID NO: 284949 - DNA, 20 bp, Artificial Sequence
  Description of Artificial Sequence: Synthetic oligonucleotide
  Target: LAMA2; (-) strand; PAM type: YTN; PAM sequence: CTC
cattgttattctgacattct

SEQ ID NO: 284950 - DNA, 20 bp, Artificial Sequence
  Description of Artificial Sequence: Synthetic oligonucleotide
  Target: LAMA2; (-) strand; PAM type: YTN; PAM sequence: TTC
tccattgttattctgacatt

SEQ ID NO: 284951 - DNA, 20 bp, Artificial Sequence
  Description of Artificial Sequence: Synthetic oligonucleotide
  Target: LAMA2; (-) strand; PAM type: YTN; PAM sequence: TTA
attctccattgttattctga

SEQ ID NO: 284952 - DNA, 20 bp, Artificial Sequence
  Description of Artificial Sequence: Synthetic oligonucleotide
  Target: LAMA2; (-) strand; PAM type: YTN; PAM sequence: TTT
aattctccattgttattctg

SEQ ID NO: 284953 - DNA, 20 bp, Artificial Sequence
  Description of Artificial Sequence: Synthetic oligonucleotide
  Target: LAMA2; (-) strand; PAM type: YTN; PAM sequence: CTT
taattctccattgttattct

SEQ ID NO: 284954 - DNA, 20 bp, Artificial Sequence
  Description of Artificial Sequence: Synthetic oligonucleotide
  Target: LAMA2; (-) strand; PAM type: YTN; PAM sequence: TTC
ctttaattctccattgttat

SEQ ID NO: 284955 - DNA, 20 bp, Artificial Sequence
  Description of Artificial Sequence: Synthetic oligonucleotide
  Target: LAMA2; (-) strand; PAM type: YTN; PAM sequence: CTT
cctttaattctccattgtta

SEQ ID NO: 284956 - DNA, 20 bp, Artificial Sequence
  Description of Artificial Sequence: Synthetic oligonucleotide
  Target: LAMA2; (-) strand; PAM type: YTN; PAM sequence: TTC
ccttcctttaattctccatt

SEQ ID NO: 284957 - DNA, 20 bp, Artificial Sequence
  Description of Artificial Sequence: Synthetic oligonucleotide
  Target: LAMA2; (-) strand; PAM type: YTN; PAM sequence: TTT
cccttcctttaattctccat

SEQ ID NO: 284958 - DNA, 20 bp, Artificial Sequence
  Description of Artificial Sequence: Synthetic oligonucleotide
  Target: LAMA2; (-) strand; PAM type: YTN; PAM sequence: TTT
tcccttcctttaattctcca

SEQ ID NO: 284959 - DNA, 20 bp, Artificial Sequence
  Description of Artificial Sequence: Synthetic oligonucleotide
  Target: LAMA2; (-) strand; PAM type: YTN; PAM sequence: TTT
ttcccttcctttaattctcc

SEQ ID NO: 284960 - DNA, 20 bp, Artificial Sequence
  Description of Artificial Sequence: Synthetic oligonucleotide
  Target: LAMA2; (-) strand; PAM type: YTN; PAM sequence: TTC
atttttcccttcctttaatt

SEQ ID NO: 284961 - DNA, 20 bp, Artificial Sequence
  Description of Artificial Sequence: Synthetic oligonucleotide
  Target: LAMA2; (-) strand; PAM type: YTN; PAM sequence: TTG
ttcatttttcccttccttta

SEQ ID NO: 284962 - DNA, 20 bp, Artificial Sequence
  Description of Artificial Sequence: Synthetic oligonucleotide
  Target: LAMA2; (-) strand; PAM type: YTN; PAM sequence: TTT
gttcatttttcccttccttt

SEQ ID NO: 284963 - DNA, 20 bp, Artificial Sequence
  Description of Artificial Sequence: Synthetic oligonucleotide
  Target: LAMA2; (-) strand; PAM type: YTN; PAM sequence: TTA
ataaaccgtttgttcatttt

SEQ ID NO: 284964 - DNA, 20 bp, Artificial Sequence
  Description of Artificial Sequence: Synthetic oligonucleotide
  Target: LAMA2; (-) strand; PAM type: YTN; PAM sequence: TTT
aataaaccgtttgttcattt

SEQ ID NO: 284965 - DNA, 20 bp, Artificial Sequence
  Description of Artificial Sequence: Synthetic oligonucleotide
  Target: LAMA2; (-) strand; PAM type: YTN; PAM sequence: TTT
taataaaccgtttgttcatt

SEQ ID NO: 284966 - DNA, 20 bp, Artificial Sequence
  Description of Artificial Sequence: Synthetic oligonucleotide
  Target: LAMA2; (-) strand; PAM type: YTN; PAM sequence: CTT
ttaataaaccgtttgttcat

SEQ ID NO: 284967 - DNA, 20 bp, Artificial Sequence
  Description of Artificial Sequence: Synthetic oligonucleotide
  Target: LAMA2; (-) strand; PAM type: YTN; PAM sequence: TTG
tatgcttttaataaaccgtt

SEQ ID NO: 284968 - DNA, 20 bp, Artificial Sequence
  Description of Artificial Sequence: Synthetic oligonucleotide
  Target: LAMA2; (-) strand; PAM type: YTN; PAM sequence: TTT
gtatgcttttaataaaccgt

SEQ ID NO: 284969 - DNA, 20 bp, Artificial Sequence
  Description of Artificial Sequence: Synthetic oligonucleotide
  Target: LAMA2; (-) strand; PAM type: YTN; PAM sequence: TTT
tgtatgcttttaataaaccg

SEQ ID NO: 284970 - DNA, 20 bp, Artificial Sequence
  Description of Artificial Sequence: Synthetic oligonucleotide
  Target: LAMA2; (-) strand; PAM type: YTN; PAM sequence: TTA
ttttgtatgcttttaataaa

SEQ ID NO: 284971 - DNA, 20 bp, Artificial Sequence
  Description of Artificial Sequence: Synthetic oligonucleotide
  Target: LAMA2; (-) strand; PAM type: YTN; PAM sequence: TTT
attttgtatgcttttaataa

SEQ ID NO: 284972 - DNA, 20 bp, Artificial Sequence
  Description of Artificial Sequence: Synthetic oligonucleotide
  Target: LAMA2; (-) strand; PAM type: YTN; PAM sequence: CTT
tattttgtatgcttttaata

SEQ ID NO: 284973 - DNA, 20 bp, Artificial Sequence
  Description of Artificial Sequence: Synthetic oligonucleotide
  Target: LAMA2; (-) strand; PAM type: YTN; PAM sequence: TTA
tatcatcatacagatagcat

SEQ ID NO: 284974 - DNA, 20 bp, Artificial Sequence
  Description of Artificial Sequence: Synthetic oligonucleotide
  Target: LAMA2; (-) strand; PAM type: YTN; PAM sequence: TTG
ttatatcatcatacagatag

SEQ ID NO: 284975 - DNA, 20 bp, Artificial Sequence
  Description of Artificial Sequence: Synthetic oligonucleotide
  Target: LAMA2; (-) strand; PAM type: YTN; PAM sequence: TTT
gttatatcatcatacagata

SEQ ID NO: 284976 - DNA, 20 bp, Artificial Sequence
  Description of Artificial Sequence: Synthetic oligonucleotide
  Target: LAMA2; (-) strand; PAM type: YTN; PAM sequence: CTG
gatagaaatgtttgttatat

SEQ ID NO: 284977 - DNA, 20 bp, Artificial Sequence
  Description of Artificial Sequence: Synthetic oligonucleotide
  Target: LAMA2; (-) strand; PAM type: YTN; PAM sequence: TTA
tctggatagaaatgtttgtt

SEQ ID NO: 284978 - DNA, 20 bp, Artificial Sequence
  Description of Artificial Sequence: Synthetic oligonucleotide
  Target: LAMA2; (-) strand; PAM type: YTN; PAM sequence: CTG
aaatgcatgttatctggata

SEQ ID NO: 284979 - DNA, 20 bp, Artificial Sequence
  Description of Artificial Sequence: Synthetic oligonucleotide
  Target: LAMA2; (-) strand; PAM type: YTN; PAM sequence: TTC
ctgaaatgcatgttatctgg

SEQ ID NO: 284980 - DNA, 20 bp, Artificial Sequence
  Description of Artificial Sequence: Synthetic oligonucleotide
  Target: LAMA2; (-) strand; PAM type: YTN; PAM sequence: CTT
cctgaaatgcatgttatctg

SEQ ID NO: 284981 - DNA, 20 bp, Artificial Sequence
  Description of Artificial Sequence: Synthetic oligonucleotide
  Target: LAMA2; (-) strand; PAM type: YTN; PAM sequence: TTC
ttcctgaaatgcatgttatc

SEQ ID NO: 284982 - DNA, 20 bp, Artificial Sequence
  Description of Artificial Sequence: Synthetic oligonucleotide
  Target: LAMA2; (-) strand; PAM type: YTN; PAM sequence: TTT
cttcctgaaatgcatgttat

SEQ ID NO: 284983 - DNA, 20 bp, Artificial Sequence
  Description of Artificial Sequence: Synthetic oligonucleotide
  Target: LAMA2; (-) strand; PAM type: YTN; PAM sequence: TTT
tcttcctgaaatgcatgtta

SEQ ID NO: 284984 - DNA, 20 bp, Artificial Sequence
  Description of Artificial Sequence: Synthetic oligonucleotide
  Target: LAMA2; (-) strand; PAM type: YTN; PAM sequence: CTG
agtgcagtattttcttcctg

SEQ ID NO: 284985 - DNA, 20 bp, Artificial Sequence
  Description of Artificial Sequence: Synthetic oligonucleotide
  Target: LAMA2; (-) strand; PAM type: YTN; PAM sequence: CTA
tatcaagaactgagtgcagt

SEQ ID NO: 284986 - DNA, 20 bp, Artificial Sequence
  Description of Artificial Sequence: Synthetic oligonucleotide
  Target: LAMA2; (-) strand; PAM type: YTN; PAM sequence: TTG
ctatatcaagaactgagtgc

SEQ ID NO: 284987 - DNA, 20 bp, Artificial Sequence
  Description of Artificial Sequence: Synthetic oligonucleotide
  Target: LAMA2; (-) strand; PAM type: YTN; PAM sequence: TTT
gctatatcaagaactgagtg

SEQ ID NO: 284988 - DNA, 20 bp, Artificial Sequence
  Description of Artificial Sequence: Synthetic oligonucleotide
  Target: LAMA2; (-) strand; PAM type: YTN; PAM sequence: CTA
atagatttgctatatcaaga

SEQ ID NO: 284989 - DNA, 20 bp, Artificial Sequence
  Description of Artificial Sequence: Synthetic oligonucleotide
  Target: LAMA2; (-) strand; PAM type: YTN; PAM sequence: TTA
actaatagatttgctatatc

SEQ ID NO: 284990 - DNA, 20 bp, Artificial Sequence
  Description of Artificial Sequence: Synthetic oligonucleotide
  Target: LAMA2; (-) strand; PAM type: YTN; PAM sequence: TTT
aactaatagatttgctatat

SEQ ID NO: 284991 - DNA, 20 bp, Artificial Sequence
  Description of Artificial Sequence: Synthetic oligonucleotide
  Target: LAMA2; (-) strand; PAM type: YTN; PAM sequence: TTA
aatttaactaatagatttgc

SEQ ID NO: 284992 - DNA, 20 bp, Artificial Sequence
  Description of Artificial Sequence: Synthetic oligonucleotide
  Target: LAMA2; (-) strand; PAM type: YTN; PAM sequence: TTA
ttaaatttaactaatagatt

SEQ ID NO: 284993 - DNA, 20 bp, Artificial Sequence
  Description of Artificial Sequence: Synthetic oligonucleotide
  Target: LAMA2; (-) strand; PAM type: YTN; PAM sequence: CTA
ttattaaatttaactaatag

SEQ ID NO: 284994 - DNA, 20 bp, Artificial Sequence
  Description of Artificial Sequence: Synthetic oligonucleotide
  Target: LAMA2; (-) strand; PAM type: YTN; PAM sequence: TTA
aaaagaacataggtctatta

SEQ ID NO: 284995 - DNA, 20 bp, Artificial Sequence
  Description of Artificial Sequence: Synthetic oligonucleotide
  Target: LAMA2; (-) strand; PAM type: YTN; PAM sequence: TTT
aaaaagaacataggtctatt

SEQ ID NO: 284996 - DNA, 20 bp, Artificial Sequence
  Description of Artificial Sequence: Synthetic oligonucleotide
  Target: LAMA2; (-) strand; PAM type: YTN; PAM sequence: TTA
gcggcatttaaaaagaacat

SEQ ID NO: 284997 - DNA, 20 bp, Artificial Sequence
  Description of Artificial Sequence: Synthetic oligonucleotide
  Target: LAMA2; (-) strand; PAM type: YTN; PAM sequence: CTG
ttagcggcatttaaaaagaa

SEQ ID NO: 284998 - DNA, 20 bp, Artificial Sequence
  Description of Artificial Sequence: Synthetic oligonucleotide
  Target: LAMA2; (-) strand; PAM type: YTN; PAM sequence: TTA
tgctgttagcggcatttaaa

SEQ ID NO: 284999 - DNA, 20 bp, Artificial Sequence
  Description of Artificial Sequence: Synthetic oligonucleotide
  Target: LAMA2; (-) strand; PAM type: YTN; PAM sequence: CTT
atgctgttagcggcatttaa

SEQ ID NO: 285000 - DNA, 20 bp, Artificial Sequence
  Description of Artificial Sequence: Synthetic oligonucleotide
  Target: LAMA2; (-) strand; PAM type: YTN; PAM sequence: CTC
ataagtatgacttatgctgt

SEQ ID NO: 285001 - DNA, 20 bp, Artificial Sequence
  Description of Artificial Sequence: Synthetic oligonucleotide
  Target: LAMA2; (-) strand; PAM type: YTN; PAM sequence: TTG
aactcataagtatgacttat

SEQ ID NO: 285002 - DNA, 20 bp, Artificial Sequence
  Description of Artificial Sequence: Synthetic oligonucleotide
  Target: LAMA2; (-) strand; PAM type: YTN; PAM sequence: TTT
gaactcataagtatgactta

SEQ ID NO: 285003 - DNA, 20 bp, Artificial Sequence
  Description of Artificial Sequence: Synthetic oligonucleotide
  Target: LAMA2; (-) strand; PAM type: YTN; PAM sequence: TTT
tgaactcataagtatgactt

SEQ ID NO: 285004 - DNA, 20 bp, Artificial Sequence
  Description of Artificial Sequence: Synthetic oligonucleotide
  Target: LAMA2; (-) strand; PAM type: YTN; PAM sequence: TTA
aagtaggtattttgaactca

SEQ ID NO: 285005 - DNA, 20 bp, Artificial Sequence
  Description of Artificial Sequence: Synthetic oligonucleotide
  Target: LAMA2; (-) strand; PAM type: YTN; PAM sequence: TTT
aaagtaggtattttgaactc

SEQ ID NO: 285006 - DNA, 20 bp, Artificial Sequence
  Description of Artificial Sequence: Synthetic oligonucleotide
  Target: LAMA2; (-) strand; PAM type: YTN; PAM sequence: TTT
taaagtaggtattttgaact

SEQ ID NO: 285007 - DNA, 20 bp, Artificial Sequence
  Description of Artificial Sequence: Synthetic oligonucleotide
  Target: LAMA2; (-) strand; PAM type: YTN; PAM sequence: TTA
ggttttaaagtaggtatttt

SEQ ID NO: 285008 - DNA, 20 bp, Artificial Sequence
  Description of Artificial Sequence: Synthetic oligonucleotide
  Target: LAMA2; (-) strand; PAM type: YTN; PAM sequence: TTA
aaattaggttttaaagtagg

SEQ ID NO: 285009 - DNA, 20 bp, Artificial Sequence
  Description of Artificial Sequence: Synthetic oligonucleotide
  Target: LAMA2; (-) strand; PAM type: YTN; PAM sequence: TTT
aaaattaggttttaaagtag

SEQ ID NO: 285010 - DNA, 20 bp, Artificial Sequence
  Description of Artificial Sequence: Synthetic oligonucleotide
  Target: LAMA2; (-) strand; PAM type: YTN; PAM sequence: TTT
taaaattaggttttaaagta

SEQ ID NO: 285011 - DNA, 20 bp, Artificial Sequence
  Description of Artificial Sequence: Synthetic oligonucleotide
  Target: LAMA2; (-) strand; PAM type: YTN; PAM sequence: TTT
ttaaaattaggttttaaagt

SEQ ID NO: 285012 - DNA, 20 bp, Artificial Sequence
  Description of Artificial Sequence: Synthetic oligonucleotide
  Target: LAMA2; (-) strand; PAM type: YTN; PAM sequence: TTT
tttaaaattaggttttaaag

SEQ ID NO: 285013 - DNA, 20 bp, Artificial Sequence
  Description of Artificial Sequence: Synthetic oligonucleotide
  Target: LAMA2; (-) strand; PAM type: YTN; PAM sequence: TTT
ttttaaaattaggttttaaa

SEQ ID NO: 285014 - DNA, 20 bp, Artificial Sequence
  Description of Artificial Sequence: Synthetic oligonucleotide
  Target: LAMA2; (-) strand; PAM type: YTN; PAM sequence: TTA
tcatttttttaaaattaggt

SEQ ID NO: 285015 - DNA, 20 bp, Artificial Sequence
  Description of Artificial Sequence: Synthetic oligonucleotide
  Target: LAMA2; (-) strand; PAM type: YTN; PAM sequence: CTC
aaagggaagtaaattatcat

SEQ ID NO: 285016 - DNA, 20 bp, Artificial Sequence
  Description of Artificial Sequence: Synthetic oligonucleotide
  Target: LAMA2; (-) strand; PAM type: YTN; PAM sequence: CTC
aggaacgaatcacatgtgct

SEQ ID NO: 285017 - DNA, 20 bp, Artificial Sequence
  Description of Artificial Sequence: Synthetic oligonucleotide
  Target: LAMA2; (-) strand; PAM type: YTN; PAM sequence: CTA
accctcaggaacgaatcaca

SEQ ID NO: 285018 - DNA, 20 bp, Artificial Sequence
  Description of Artificial Sequence: Synthetic oligonucleotide
  Target: LAMA2; (-) strand; PAM type: YTN; PAM sequence: CTG
agaactaaccctcaggaacg

SEQ ID NO: 285019 - DNA, 20 bp, Artificial Sequence
  Description of Artificial Sequence: Synthetic oligonucleotide
  Target: LAMA2; (-) strand; PAM type: YTN; PAM sequence: CTG
acatacaaccactgagaact

SEQ ID NO: 285020 - DNA, 20 bp, Artificial Sequence
  Description of Artificial Sequence: Synthetic oligonucleotide
  Target: LAMA2; (-) strand; PAM type: YTN; PAM sequence: TTG
cggctgacatacaaccactg

SEQ ID NO: 285021 - DNA, 20 bp, Artificial Sequence
  Description of Artificial Sequence: Synthetic oligonucleotide
  Target: LAMA2; (-) strand; PAM type: YTN; PAM sequence: TTT
gcggctgacatacaaccact

SEQ ID NO: 285022 - DNA, 20 bp, Artificial Sequence
  Description of Artificial Sequence: Synthetic oligonucleotide
  Target: LAMA2; (-) strand; PAM type: YTN; PAM sequence: CTT
tgcggctgacatacaaccac

SEQ ID NO: 285023 - DNA, 20 bp, Artificial Sequence
  Description of Artificial Sequence: Synthetic oligonucleotide
  Target: LAMA2; (-) strand; PAM type: YTN; PAM sequence: CTG
ctttgcggctgacatacaac

SEQ ID NO: 285024 - DNA, 20 bp, Artificial Sequence
  Description of Artificial Sequence: Synthetic oligonucleotide
  Target: LAMA2; (-) strand; PAM type: YTN; PAM sequence: CTG
aatgatctgctttgcggctg

SEQ ID NO: 285025 - DNA, 20 bp, Artificial Sequence
  Description of Artificial Sequence: Synthetic oligonucleotide
  Target: LAMA2; (-) strand; PAM type: YTN; PAM sequence: CTC
tgaatgatctgctttgcggc

SEQ ID NO: 285026 - DNA, 20 bp, Artificial Sequence
  Description of Artificial Sequence: Synthetic oligonucleotide
  Target: LAMA2; (-) strand; PAM type: YTN; PAM sequence: TTA
gactctgaatgatctgcttt

SEQ ID NO: 285027 - DNA, 20 bp, Artificial Sequence
  Description of Artificial Sequence: Synthetic oligonucleotide
  Target: LAMA2; (-) strand; PAM type: YTN; PAM sequence: CTG
tgttagactctgaatgatct

SEQ ID NO: 285028 - DNA, 20 bp, Artificial Sequence
  Description of Artificial Sequence: Synthetic oligonucleotide
  Target: LAMA2; (-) strand; PAM type: YTN; PAM sequence: CTA
catgctgtgttagactctga

SEQ ID NO: 285029 - DNA, 20 bp, Artificial Sequence
  Description of Artificial Sequence: Synthetic oligonucleotide
  Target: LAMA2; (-) strand; PAM type: YTN; PAM sequence: TTC
aaggctacatgctgtgttag

SEQ ID NO: 285030 - DNA, 20 bp, Artificial Sequence
  Description of Artificial Sequence: Synthetic oligonucleotide
  Target: LAMA2; (-) strand; PAM type: YTN; PAM sequence: TTA
aggttcaaggctacatgctg

SEQ ID NO: 285031 - DNA, 20 bp, Artificial Sequence
  Description of Artificial Sequence: Synthetic oligonucleotide
  Target: LAMA2; (-) strand; PAM type: YTN; PAM sequence: CTT
aaggttcaaggctacatgct

SEQ ID NO: 285032 - DNA, 20 bp, Artificial Sequence
  Description of Artificial Sequence: Synthetic oligonucleotide
  Target: LAMA2; (-) strand; PAM type: YTN; PAM sequence: CTG
cttaaggttcaaggctacat

SEQ ID NO: 285033 - DNA, 20 bp, Artificial Sequence
  Description of Artificial Sequence: Synthetic oligonucleotide
  Target: LAMA2; (-) strand; PAM type: YTN; PAM sequence: TTA
aactgcttaaggttcaaggc

SEQ ID NO: 285034 - DNA, 20 bp, Artificial Sequence
  Description of Artificial Sequence: Synthetic oligonucleotide
  Target: LAMA2; (-) strand; PAM type: YTN; PAM sequence: CTG
atgaaaaagttaaactgctt

SEQ ID NO: 285035 - DNA, 20 bp, Artificial Sequence
  Description of Artificial Sequence: Synthetic oligonucleotide
  Target: LAMA2; (-) strand; PAM type: YTN; PAM sequence: CTC
tgatgaaaaagttaaactgc

SEQ ID NO: 285036 - DNA, 20 bp, Artificial Sequence
  Description of Artificial Sequence: Synthetic oligonucleotide
  Target: LAMA2; (-) strand; PAM type: YTN; PAM sequence: CTG
tgactctgatgaaaaagtta

SEQ ID NO: 285037 - DNA, 20 bp, Artificial Sequence
  Description of Artificial Sequence: Synthetic oligonucleotide
  Target: LAMA2; (-) strand; PAM type: YTN; PAM sequence: CTG
tcactgtgactctgatgaaa

SEQ ID NO: 285038 - DNA, 20 bp, Artificial Sequence
  Description of Artificial Sequence: Synthetic oligonucleotide
  Target: LAMA2; (-) strand; PAM type: YTN; PAM sequence: TTC
tgtcactgtgactctgatga

SEQ ID NO: 285039 - DNA, 20 bp, Artificial Sequence
  Description of Artificial Sequence: Synthetic oligonucleotide
  Target: LAMA2; (-) strand; PAM type: YTN; PAM sequence: TTT
ctgtcactgtgactctgatg

SEQ ID NO: 285040 - DNA, 20 bp, Artificial Sequence
  Description of Artificial Sequence: Synthetic oligonucleotide
  Target: LAMA2; (-) strand; PAM type: YTN; PAM sequence: CTT
tctgtcactgtgactctgat

SEQ ID NO: 285041 - DNA, 20 bp, Artificial Sequence
  Description of Artificial Sequence: Synthetic oligonucleotide
  Target: LAMA2; (-) strand; PAM type: YTN; PAM sequence: TTC
aactttctgtcactgtgact

SEQ ID NO: 285042 - DNA, 20 bp, Artificial Sequence
  Description of Artificial Sequence: Synthetic oligonucleotide
  Target: LAMA2; (-) strand; PAM type: YTN; PAM sequence: TTG
ttcaactttctgtcactgtg

SEQ ID NO: 285043 - DNA, 20 bp, Artificial Sequence
  Description of Artificial Sequence: Synthetic oligonucleotide
  Target: LAMA2; (-) strand; PAM type: YTN; PAM sequence: TTA
agtgtgtattgttcaacttt

SEQ ID NO: 285044 - DNA, 20 bp, Artificial Sequence
  Description of Artificial Sequence: Synthetic oligonucleotide
  Target: LAMA2; (-) strand; PAM type: YTN; PAM sequence: CTG
attaagtgtgtattgttcaa

SEQ ID NO: 285045 - DNA, 20 bp, Artificial Sequence
  Description of Artificial Sequence: Synthetic oligonucleotide
  Target: LAMA2; (-) strand; PAM type: YTN; PAM sequence: TTA
tctgattaagtgtgtattgt

SEQ ID NO: 285046 - DNA, 20 bp, Artificial Sequence
  Description of Artificial Sequence: Synthetic oligonucleotide
  Target: LAMA2; (-) strand; PAM type: YTN; PAM sequence: TTA
ttatctgattaagtgtgtat

SEQ ID NO: 285047 - DNA, 20 bp, Artificial Sequence
  Description of Artificial Sequence: Synthetic oligonucleotide
  Target: LAMA2; (-) strand; PAM type: YTN; PAM sequence: TTT
attatctgattaagtgtgta

SEQ ID NO: 285048 - DNA, 20 bp, Artificial Sequence
  Description of Artificial Sequence: Synthetic oligonucleotide
  Target: LAMA2; (-) strand; PAM type: YTN; PAM sequence: CTA
tgtcatttattatctgatta

SEQ ID NO: 285049 - DNA, 20 bp, Artificial Sequence
  Description of Artificial Sequence: Synthetic oligonucleotide
  Target: LAMA2; (-) strand; PAM type: YTN; PAM sequence: CTC
atccacactatgtcatttat

SEQ ID NO: 285050 - DNA, 20 bp, Artificial Sequence
  Description of Artificial Sequence: Synthetic oligonucleotide
  Target: LAMA2; (-) strand; PAM type: YTN; PAM sequence: CTG
gcagtctcatccacactatg

SEQ ID NO: 285051 - DNA, 20 bp, Artificial Sequence
  Description of Artificial Sequence: Synthetic oligonucleotide
  Target: LAMA2; (-) strand; PAM type: YTN; PAM sequence: CTG
ggatgctggcagtctcatcc

SEQ ID NO: 285052 - DNA, 20 bp, Artificial Sequence
  Description of Artificial Sequence: Synthetic oligonucleotide
  Target: LAMA2; (-) strand; PAM type: YTN; PAM sequence: TTG
ctgggatgctggcagtctca

SEQ ID NO: 285053 - DNA, 20 bp, Artificial Sequence
  Description of Artificial Sequence: Synthetic oligonucleotide
  Target: LAMA2; (-) strand; PAM type: YTN; PAM sequence: CTA
ttgctgggatgctggcagtc

SEQ ID NO: 285054 - DNA, 20 bp, Artificial Sequence
  Description of Artificial Sequence: Synthetic oligonucleotide
  Target: LAMA2; (-) strand; PAM type: YTN; PAM sequence: TTC
tattgctgggatgctggcag

SEQ ID NO: 285055 - DNA, 20 bp, Artificial Sequence
  Description of Artificial Sequence: Synthetic oligonucleotide
  Target: LAMA2; (-) strand; PAM type: YTN; PAM sequence: TTA
ttctattgctgggatgctgg

SEQ ID NO: 285056 - DNA, 20 bp, Artificial Sequence
  Description of Artificial Sequence: Synthetic oligonucleotide
  Target: LAMA2; (-) strand; PAM type: YTN; PAM sequence: CTT
attctattgctgggatgctg

SEQ ID NO: 285057 - DNA, 20 bp, Artificial Sequence
  Description of Artificial Sequence: Synthetic oligonucleotide
  Target: LAMA2; (-) strand; PAM type: YTN; PAM sequence: CTA
tgccacgtggtaaaccactt

SEQ ID NO: 285058 - DNA, 20 bp, Artificial Sequence
  Description of Artificial Sequence: Synthetic oligonucleotide
  Target: LAMA2; (-) strand; PAM type: YTN; PAM sequence: TTC
aagggagggcctatgccacg

SEQ ID NO: 285059 - DNA, 20 bp, Artificial Sequence
  Description of Artificial Sequence: Synthetic oligonucleotide
  Target: LAMA2; (-) strand; PAM type: YTN; PAM sequence: TTT
caagggagggcctatgccac

SEQ ID NO: 285060 - DNA, 20 bp, Artificial Sequence
  Description of Artificial Sequence: Synthetic oligonucleotide
  Target: LAMA2; (-) strand; PAM type: YTN; PAM sequence: TTT
tcaagggagggcctatgcca

SEQ ID NO: 285061 - DNA, 20 bp, Artificial Sequence
  Description of Artificial Sequence: Synthetic oligonucleotide
  Target: LAMA2; (-) strand; PAM type: YTN; PAM sequence: CTT
ttcaagggagggcctatgcc

SEQ ID NO: 285062 - DNA, 20 bp, Artificial Sequence
  Description of Artificial Sequence: Synthetic oligonucleotide
  Target: LAMA2; (-) strand; PAM type: YTN; PAM sequence: TTC
agtatgtgcttttcaaggga

SEQ ID NO: 285063 - DNA, 20 bp, Artificial Sequence
  Description of Artificial Sequence: Synthetic oligonucleotide
  Target: LAMA2; (-) strand; PAM type: YTN; PAM sequence: TTT
cagtatgtgcttttcaaggg

SEQ ID NO: 285064 - DNA, 20 bp, Artificial Sequence
  Description of Artificial Sequence: Synthetic oligonucleotide
  Target: LAMA2; (-) strand; PAM type: YTN; PAM sequence: CTT
tcagtatgtgcttttcaagg

SEQ ID NO: 285065 - DNA, 20 bp, Artificial Sequence
  Description of Artificial Sequence: Synthetic oligonucleotide
  Target: LAMA2; (-) strand; PAM type: YTN; PAM sequence: CTG
atccatagactttcagtatg

SEQ ID NO: 285066 - DNA, 20 bp, Artificial Sequence
  Description of Artificial Sequence: Synthetic oligonucleotide
  Target: LAMA2; (-) strand; PAM type: YTN; PAM sequence: TTG
aaggtcatcactgatccata

SEQ ID NO: 285067 - DNA, 20 bp, Artificial Sequence
  Description of Artificial Sequence: Synthetic oligonucleotide
  Target: LAMA2; (-) strand; PAM type: YTN; PAM sequence: CTA
aaatagttgaaggtcatcac

SEQ ID NO: 285068 - DNA, 20 bp, Artificial Sequence
  Description of Artificial Sequence: Synthetic oligonucleotide
  Target: LAMA2; (-) strand; PAM type: YTN; PAM sequence: TTC
aaccctaaaatagttgaagg

SEQ ID NO: 285069 - DNA, 20 bp, Artificial Sequence
  Description of Artificial Sequence: Synthetic oligonucleotide
  Target: LAMA2; (-) strand; PAM type: YTN; PAM sequence: TTT
caaccctaaaatagttgaag

SEQ ID NO: 285070 - DNA, 20 bp, Artificial Sequence
  Description of Artificial Sequence: Synthetic oligonucleotide
  Target: LAMA2; (-) strand; PAM type: YTN; PAM sequence: TTC
aaagtttcaaccctaaaata

SEQ ID NO: 285071 - DNA, 20 bp, Artificial Sequence
  Description of Artificial Sequence: Synthetic oligonucleotide
  Target: LAMA2; (-) strand; PAM type: YTN; PAM sequence: TTT
caaagtttcaaccctaaaat

SEQ ID NO: 285072 - DNA, 20 bp, Artificial Sequence
  Description of Artificial Sequence: Synthetic oligonucleotide
  Target: LAMA2; (-) strand; PAM type: YTN; PAM sequence: TTG
gcaatttcaaagtttcaacc

SEQ ID NO: 285073 - DNA, 20 bp, Artificial Sequence
  Description of Artificial Sequence: Synthetic oligonucleotide
  Target: LAMA2; (-) strand; PAM type: YTN; PAM sequence: TTA
catattggcaatttcaaagt

SEQ ID NO: 285074 - DNA, 20 bp, Artificial Sequence
  Description of Artificial Sequence: Synthetic oligonucleotide
  Target: LAMA2; (-) strand; PAM type: YTN; PAM sequence: TTA
aaaaaaataaagggttacat

SEQ ID NO: 285075 - DNA, 20 bp, Artificial Sequence
  Description of Artificial Sequence: Synthetic oligonucleotide
  Target: LAMA2; (-) strand; PAM type: YTN; PAM sequence: TTG
taggttaaaaaaaataaagg

SEQ ID NO: 285076 - DNA, 20 bp, Artificial Sequence
  Description of Artificial Sequence: Synthetic oligonucleotide
  Target: LAMA2; (-) strand; PAM type: YTN; PAM sequence: TTT
gtaggttaaaaaaaataaag

SEQ ID NO: 285077 - DNA, 20 bp, Artificial Sequence
  Description of Artificial Sequence: Synthetic oligonucleotide
  Target: LAMA2; (-) strand; PAM type: YTN; PAM sequence: TTT
tgtaggttaaaaaaaataaa

SEQ ID NO: 285078 - DNA, 20 bp, Artificial Sequence
  Description of Artificial Sequence: Synthetic oligonucleotide
  Target: LAMA2; (-) strand; PAM type: YTN; PAM sequence: TTT
ttgtaggttaaaaaaaataa

SEQ ID NO: 285079 - DNA, 20 bp, Artificial Sequence
  Description of Artificial Sequence: Synthetic oligonucleotide
  Target: LAMA2; (-) strand; PAM type: YTN; PAM sequence: CTG
tttttgtaggttaaaaaaaa

SEQ ID NO: 285080 - DNA, 20 bp, Artificial Sequence
  Description of Artificial Sequence: Synthetic oligonucleotide
  Target: LAMA2; (-) strand; PAM type: YTN; PAM sequence: TTA
aacagctgtttttgtaggtt

SEQ ID NO: 285081 - DNA, 20 bp, Artificial Sequence
  Description of Artificial Sequence: Synthetic oligonucleotide
  Target: LAMA2; (-) strand; PAM type: YTN; PAM sequence: CTA
tattaaacagctgtttttgt

SEQ ID NO: 285082 - DNA, 20 bp, Artificial Sequence
  Description of Artificial Sequence: Synthetic oligonucleotide
  Target: LAMA2; (-) strand; PAM type: YTN; PAM sequence: TTG
acctatattaaacagctgtt

SEQ ID NO: 285083 - DNA, 20 bp, Artificial Sequence
  Description of Artificial Sequence: Synthetic oligonucleotide
  Target: LAMA2; (-) strand; PAM type: YTN; PAM sequence: TTA
ggttgacctatattaaacag

SEQ ID NO: 285084 - DNA, 20 bp, Artificial Sequence
  Description of Artificial Sequence: Synthetic oligonucleotide
  Target: LAMA2; (-) strand; PAM type: YTN; PAM sequence: TTA
catattaggttgacctatat

SEQ ID NO: 285085 - DNA, 20 bp, Artificial Sequence
  Description of Artificial Sequence: Synthetic oligonucleotide
  Target: LAMA2; (-) strand; PAM type: YTN; PAM sequence: CTG
tgttacatattaggttgacc

SEQ ID NO: 285086 - DNA, 20 bp, Artificial Sequence
  Description of Artificial Sequence: Synthetic oligonucleotide
  Target: LAMA2; (-) strand; PAM type: YTN; PAM sequence: TTA
ccctgtgttacatattaggt

SEQ ID NO: 285087 - DNA, 20 bp, Artificial Sequence
  Description of Artificial Sequence: Synthetic oligonucleotide
  Target: LAMA2; (-) strand; PAM type: YTN; PAM sequence: TTG
attaccctgtgttacatatt

SEQ ID NO: 285088 - DNA, 20 bp, Artificial Sequence
  Description of Artificial Sequence: Synthetic oligonucleotide
  Target: LAMA2; (-) strand; PAM type: YTN; PAM sequence: TTG
aagaatagttgattaccctg

SEQ ID NO: 285089 - DNA, 20 bp, Artificial Sequence
  Description of Artificial Sequence: Synthetic oligonucleotide
  Target: LAMA2; (-) strand; PAM type: YTN; PAM sequence: TTT
gaagaatagttgattaccct

SEQ ID NO: 285090 - DNA, 20 bp, Artificial Sequence
  Description of Artificial Sequence: Synthetic oligonucleotide
  Target: LAMA2; (-) strand; PAM type: YTN; PAM sequence: TTT
tgaagaatagttgattaccc

SEQ ID NO: 285091 - DNA, 20 bp, Artificial Sequence
  Description of Artificial Sequence: Synthetic oligonucleotide
  Target: LAMA2; (-) strand; PAM type: YTN; PAM sequence: TTC
attttgaagaatagttgatt

SEQ ID NO: 285092 - DNA, 20 bp, Artificial Sequence
  Description of Artificial Sequence: Synthetic oligonucleotide
  Target: LAMA2; (-) strand; PAM type: YTN; PAM sequence: TTT
cattttgaagaatagttgat

SEQ ID NO: 285093 - DNA, 20 bp, Artificial Sequence
  Description of Artificial Sequence: Synthetic oligonucleotide
  Target: LAMA2; (-) strand; PAM type: YTN; PAM sequence: TTC
aatttcattttgaagaatag

SEQ ID NO: 285094 - DNA, 20 bp, Artificial Sequence
  Description of Artificial Sequence: Synthetic oligonucleotide
  Target: LAMA2; (-) strand; PAM type: YTN; PAM sequence: TTC
atggtgcagttcaatttcat

SEQ ID NO: 285095 - DNA, 20 bp, Artificial Sequence
  Description of Artificial Sequence: Synthetic oligonucleotide
  Target: LAMA2; (-) strand; PAM type: YTN; PAM sequence: TTT
catggtgcagttcaatttca

SEQ ID NO: 285096 - DNA, 20 bp, Artificial Sequence
  Description of Artificial Sequence: Synthetic oligonucleotide
  Target: LAMA2; (-) strand; PAM type: YTN; PAM sequence: CTT
tcatggtgcagttcaatttc

SEQ ID NO: 285097 - DNA, 20 bp, Artificial Sequence
  Description of Artificial Sequence: Synthetic oligonucleotide
  Target: LAMA2; (-) strand; PAM type: YTN; PAM sequence: TTA
aatctttcatggtgcagttc

SEQ ID NO: 285098 - DNA, 20 bp, Artificial Sequence
  Description of Artificial Sequence: Synthetic oligonucleotide
  Target: LAMA2; (-) strand; PAM type: YTN; PAM sequence: TTA
attaaatctttcatggtgca

SEQ ID NO: 285099 - DNA, 20 bp, Artificial Sequence
  Description of Artificial Sequence: Synthetic oligonucleotide
  Target: LAMA2; (-) strand; PAM type: YTN; PAM sequence: TTT
aattaaatctttcatggtgc

SEQ ID NO: 285100 - DNA, 20 bp, Artificial Sequence
  Description of Artificial Sequence: Synthetic oligonucleotide
  Target: LAMA2; (-) strand; PAM type: YTN; PAM sequence: CTA
catttaattaaatctttcat

SEQ ID NO: 285101 - DNA, 20 bp, Artificial Sequence
  Description of Artificial Sequence: Synthetic oligonucleotide
  Target: LAMA2; (-) strand; PAM type: YTN; PAM sequence: CTA
aaggcctacatttaattaaa

SEQ ID NO: 285102 - DNA, 20 bp, Artificial Sequence
  Description of Artificial Sequence: Synthetic oligonucleotide
  Target: LAMA2; (-) strand; PAM type: YTN; PAM sequence: TTA
gactaaaggcctacatttaa

SEQ ID NO: 285103 - DNA, 20 bp, Artificial Sequence
  Description of Artificial Sequence: Synthetic oligonucleotide
  Target: LAMA2; (-) strand; PAM type: YTN; PAM sequence: CTT
agactaaaggcctacattta

SEQ ID NO: 285104 - DNA, 20 bp, Artificial Sequence
  Description of Artificial Sequence: Synthetic oligonucleotide
  Target: LAMA2; (-) strand; PAM type: YTN; PAM sequence: TTG
aaaaacccttagactaaagg

SEQ ID NO: 285105 - DNA, 20 bp, Artificial Sequence
  Description of Artificial Sequence: Synthetic oligonucleotide
  Target: LAMA2; (-) strand; PAM type: YTN; PAM sequence: TTG
atgttgaaaaacccttagac

SEQ ID NO: 285106 - DNA, 20 bp, Artificial Sequence
  Description of Artificial Sequence: Synthetic oligonucleotide
  Target: LAMA2; (-) strand; PAM type: YTN; PAM sequence: TTT
gatgttgaaaaacccttaga

SEQ ID NO: 285107 - DNA, 20 bp, Artificial Sequence
  Description of Artificial Sequence: Synthetic oligonucleotide
  Target: LAMA2; (-) strand; PAM type: YTN; PAM sequence: TTT
tgatgttgaaaaacccttag

SEQ ID NO: 285108 - DNA, 20 bp, Artificial Sequence
  Description of Artificial Sequence: Synthetic oligonucleotide
  Target: LAMA2; (-) strand; PAM type: YTN; PAM sequence: TTG
aagaacattttgatgttgaa

SEQ ID NO: 285109 - DNA, 20 bp, Artificial Sequence
  Description of Artificial Sequence: Synthetic oligonucleotide
  Target: LAMA2; (-) strand; PAM type: YTN; PAM sequence: TTT
gaagaacattttgatgttga

SEQ ID NO: 285110 - DNA, 20 bp, Artificial Sequence
  Description of Artificial Sequence: Synthetic oligonucleotide
  Target: LAMA2; (-) strand; PAM type: YTN; PAM sequence: TTT
tgaagaacattttgatgttg

SEQ ID NO: 285111 - DNA, 20 bp, Artificial Sequence
  Description of Artificial Sequence: Synthetic oligonucleotide
  Target: LAMA2; (-) strand; PAM type: YTN; PAM sequence: CTT
ttgaagaacattttgatgtt

SEQ ID NO: 285112 - DNA, 20 bp, Artificial Sequence
  Description of Artificial Sequence: Synthetic oligonucleotide
  Target: LAMA2; (-) strand; PAM type: YTN; PAM sequence: CTA
tcaaaatgtcttttgaagaa

SEQ ID NO: 285113 - DNA, 20 bp, Artificial Sequence
  Description of Artificial Sequence: Synthetic oligonucleotide
  Target: LAMA2; (-) strand; PAM type: YTN; PAM sequence: TTA
aagagagaagctatcaaaat

SEQ ID NO: 285114 - DNA, 20 bp, Artificial Sequence
  Description of Artificial Sequence: Synthetic oligonucleotide
  Target: LAMA2; (-) strand; PAM type: YTN; PAM sequence: CTT
aaagagagaagctatcaaaa

SEQ ID NO: 285115 - DNA, 20 bp, Artificial Sequence
  Description of Artificial Sequence: Synthetic oligonucleotide
  Target: LAMA2; (-) strand; PAM type: YTN; PAM sequence: TTG
cacatcttaaagagagaagc

SEQ ID NO: 285116 - DNA, 20 bp, Artificial Sequence
  Description of Artificial Sequence: Synthetic oligonucleotide
  Target: LAMA2; (-) strand; PAM type: YTN; PAM sequence: TTT
gcacatcttaaagagagaag

SEQ ID NO: 285117 - DNA, 20 bp, Artificial Sequence
  Description of Artificial Sequence: Synthetic oligonucleotide
  Target: LAMA2; (-) strand; PAM type: YTN; PAM sequence: TTT
tgcacatcttaaagagagaa

SEQ ID NO: 285118 - DNA, 20 bp, Artificial Sequence
  Description of Artificial Sequence: Synthetic oligonucleotide
  Target: LAMA2; (-) strand; PAM type: YTN; PAM sequence: TTT
ttgcacatcttaaagagaga

SEQ ID NO: 285119 - DNA, 20 bp, Artificial Sequence
  Description of Artificial Sequence: Synthetic oligonucleotide
  Target: LAMA2; (-) strand; PAM type: YTN; PAM sequence: TTT
tttgcacatcttaaagagag

SEQ ID NO: 285120 - DNA, 20 bp, Artificial Sequence
  Description of Artificial Sequence: Synthetic oligonucleotide
  Target: LAMA2; (-) strand; PAM type: YTN; PAM sequence: TTT
ttttgcacatcttaaagaga

SEQ ID NO: 285121 - DNA, 20 bp, Artificial Sequence
  Description of Artificial Sequence: Synthetic oligonucleotide
  Target: LAMA2; (-) strand; PAM type: YTN; PAM sequence: CTT
tttttgcacatcttaaagag

SEQ ID NO: 285122 - DNA, 20 bp, Artificial Sequence
  Description of Artificial Sequence: Synthetic oligonucleotide
  Target: LAMA2; (-) strand; PAM type: YTN; PAM sequence: CTC
accgtctttttttgcacatc

SEQ ID NO: 285123 - DNA, 20 bp, Artificial Sequence
  Description of Artificial Sequence: Synthetic oligonucleotide
  Target: LAMA2; (-) strand; PAM type: YTN; PAM sequence: TTC
tcaccgtctttttttgcaca

SEQ ID NO: 285124 - DNA, 20 bp, Artificial Sequence
  Description of Artificial Sequence: Synthetic oligonucleotide
  Target: LAMA2; (-) strand; PAM type: YTN; PAM sequence: TTT
ctcaccgtctttttttgcac

SEQ ID NO: 285125 - DNA, 20 bp, Artificial Sequence
  Description of Artificial Sequence: Synthetic oligonucleotide
  Target: LAMA2; (-) strand; PAM type: YTN; PAM sequence: TTT
tctcaccgtctttttttgca

SEQ ID NO: 285126 - DNA, 20 bp, Artificial Sequence
  Description of Artificial Sequence: Synthetic oligonucleotide
  Target: LAMA2; (-) strand; PAM type: YTN; PAM sequence: TTT
ttctcaccgtctttttttgc

SEQ ID NO: 285127 - DNA, 20 bp, Artificial Sequence
  Description of Artificial Sequence: Synthetic oligonucleotide
  Target: LAMA2; (-) strand; PAM type: YTN; PAM sequence: CTT
tttctcaccgtctttttttg

SEQ ID NO: 285128 - DNA, 20 bp, Artificial Sequence
  Description of Artificial Sequence: Synthetic oligonucleotide
  Target: LAMA2; (-) strand; PAM type: YTN; PAM sequence: TTC
tttttctcaccgtctttttt

SEQ ID NO: 285129 - DNA, 20 bp, Artificial Sequence
  Description of Artificial Sequence: Synthetic oligonucleotide
  Target: LAMA2; (-) strand; PAM type: YTN; PAM sequence: TTT
ctttttctcaccgtcttttt

SEQ ID NO: 285130 - DNA, 20 bp, Artificial Sequence
  Description of Artificial Sequence: Synthetic oligonucleotide
  Target: LAMA2; (-) strand; PAM type: YTN; PAM sequence: CTT
tctttttctcaccgtctttt

SEQ ID NO: 285131 - DNA, 20 bp, Artificial Sequence
  Description of Artificial Sequence: Synthetic oligonucleotide
  Target: LAMA2; (-) strand; PAM type: YTN; PAM sequence: TTC
tttctttttctcaccgtctt

SEQ ID NO: 285132 - DNA, 20 bp, Artificial Sequence
  Description of Artificial Sequence: Synthetic oligonucleotide
  Target: LAMA2; (-) strand; PAM type: YTN; PAM sequence: TTT
ctttctttttctcaccgtct

SEQ ID NO: 285133 - DNA, 20 bp, Artificial Sequence
  Description of Artificial Sequence: Synthetic oligonucleotide
  Target: LAMA2; (-) strand; PAM type: YTN; PAM sequence: TTT
tctttctttttctcaccgtc

SEQ ID NO: 285134 - DNA, 20 bp, Artificial Sequence
  Description of Artificial Sequence: Synthetic oligonucleotide
  Target: LAMA2; (-) strand; PAM type: YTN; PAM sequence: TTG
gttttctttctttttctcac

SEQ ID NO: 285135 - DNA, 20 bp, Artificial Sequence
  Description of Artificial Sequence: Synthetic oligonucleotide
  Target: LAMA2; (-) strand; PAM type: YTN; PAM sequence: TTA
cacaaaattggttttctttc

SEQ ID NO: 285136 - DNA, 20 bp, Artificial Sequence
  Description of Artificial Sequence: Synthetic oligonucleotide
  Target: LAMA2; (-) strand; PAM type: YTN; PAM sequence: TTT
acacaaaattggttttcttt

SEQ ID NO: 285137 - DNA, 20 bp, Artificial Sequence
  Description of Artificial Sequence: Synthetic oligonucleotide
  Target: LAMA2; (-) strand; PAM type: YTN; PAM sequence: TTT
tacacaaaattggttttctt

SEQ ID NO: 285138 - DNA, 20 bp, Artificial Sequence
  Description of Artificial Sequence: Synthetic oligonucleotide
  Target: LAMA2; (-) strand; PAM type: YTN; PAM sequence: TTT
ttacacaaaattggttttct

SEQ ID NO: 285139 - DNA, 20 bp, Artificial Sequence
  Description of Artificial Sequence: Synthetic oligonucleotide
  Target: LAMA2; (-) strand; PAM type: YTN; PAM sequence: TTA
aatcagggtttttacacaaa

SEQ ID NO: 285140 - DNA, 20 bp, Artificial Sequence
  Description of Artificial Sequence: Synthetic oligonucleotide
  Target: LAMA2; (-) strand; PAM type: YTN; PAM sequence: TTT
aaatcagggtttttacacaa

SEQ ID NO: 285141 - DNA, 20 bp, Artificial Sequence
  Description of Artificial Sequence: Synthetic oligonucleotide
  Target: LAMA2; (-) strand; PAM type: YTN; PAM sequence: CTG
tatttaaatcagggttttta

SEQ ID NO: 285142 - DNA, 20 bp, Artificial Sequence
  Description of Artificial Sequence: Synthetic oligonucleotide
  Target: LAMA2; (-) strand; PAM type: YTN; PAM sequence: CTG
tccaagccagaactgtattt

SEQ ID NO: 285143 - DNA, 20 bp, Artificial Sequence
  Description of Artificial Sequence: Synthetic oligonucleotide
  Target: LAMA2; (-) strand; PAM type: YTN; PAM sequence: CTA
gtctgtccaagccagaactg

SEQ ID NO: 285144 - DNA, 20 bp, Artificial Sequence
  Description of Artificial Sequence: Synthetic oligonucleotide
  Target: LAMA2; (-) strand; PAM type: YTN; PAM sequence: TTA
aaatgtcacctagtctgtcc

SEQ ID NO: 285145 - DNA, 20 bp, Artificial Sequence
  Description of Artificial Sequence: Synthetic oligonucleotide
  Target: LAMA2; (-) strand; PAM type: YTN; PAM sequence: TTT
aaaatgtcacctagtctgtc

SEQ ID NO: 285146 - DNA, 20 bp, Artificial Sequence
  Description of Artificial Sequence: Synthetic oligonucleotide
  Target: LAMA2; (-) strand; PAM type: YTN; PAM sequence: CTT
taaaatgtcacctagtctgt

SEQ ID NO: 285147 - DNA, 20 bp, Artificial Sequence
  Description of Artificial Sequence: Synthetic oligonucleotide
  Target: LAMA2; (-) strand; PAM type: YTN; PAM sequence: TTA
gtcacagaagcaaggaaatg

SEQ ID NO: 285148 - DNA, 20 bp, Artificial Sequence
  Description of Artificial Sequence: Synthetic oligonucleotide
  Target: LAMA2; (-) strand; PAM type: YTN; PAM sequence: TTT
agtcacagaagcaaggaaat

SEQ ID NO: 285149 - DNA, 20 bp, Artificial Sequence
  Description of Artificial Sequence: Synthetic oligonucleotide
  Target: LAMA2; (-) strand; PAM type: YTN; PAM sequence: CTT
tagtcacagaagcaaggaaa

SEQ ID NO: 285150 - DNA, 20 bp, Artificial Sequence
  Description of Artificial Sequence: Synthetic oligonucleotide
  Target: LAMA2; (-) strand; PAM type: YTN; PAM sequence: TTA
cagaatagaactttagtcac

SEQ ID NO: 285151 - DNA, 20 bp, Artificial Sequence
  Description of Artificial Sequence: Synthetic oligonucleotide
  Target: LAMA2; (-) strand; PAM type: YTN; PAM sequence: TTT
acagaatagaactttagtca

SEQ ID NO: 285152 - DNA, 20 bp, Artificial Sequence
  Description of Artificial Sequence: Synthetic oligonucleotide
  Target: LAMA2; (-) strand; PAM type: YTN; PAM sequence: CTT
tacagaatagaactttagtc

SEQ ID NO: 285153 - DNA, 20 bp, Artificial Sequence
  Description of Artificial Sequence: Synthetic oligonucleotide
  Target: LAMA2; (-) strand; PAM type: YTN; PAM sequence: TTA
acctttacagaatagaactt

SEQ ID NO: 285154 - DNA, 20 bp, Artificial Sequence
  Description of Artificial Sequence: Synthetic oligonucleotide
  Target: LAMA2; (-) strand; PAM type: YTN; PAM sequence: TTC
agccaaaaagttaaccttta

SEQ ID NO: 285155 - DNA, 20 bp, Artificial Sequence
  Description of Artificial Sequence: Synthetic oligonucleotide
  Target: LAMA2; (-) strand; PAM type: YTN; PAM sequence: CTT
cagccaaaaagttaaccttt

SEQ ID NO: 285156 - DNA, 20 bp, Artificial Sequence
  Description of Artificial Sequence: Synthetic oligonucleotide
  Target: LAMA2; (-) strand; PAM type: YTN; PAM sequence: CTA
acttcagccaaaaagttaac

SEQ ID NO: 285157 - DNA, 20 bp, Artificial Sequence
  Description of Artificial Sequence: Synthetic oligonucleotide
  Target: LAMA2; (-) strand; PAM type: YTN; PAM sequence: TTC
taacttcagccaaaaagtta

SEQ ID NO: 285158 - DNA, 20 bp, Artificial Sequence
  Description of Artificial Sequence: Synthetic oligonucleotide
  Target: LAMA2; (-) strand; PAM type: YTN; PAM sequence: TTT
ctaacttcagccaaaaagtt

SEQ ID NO: 285159 - DNA, 20 bp, Artificial Sequence
  Description of Artificial Sequence: Synthetic oligonucleotide
  Target: LAMA2; (-) strand; PAM type: YTN; PAM sequence: TTA
atttctaacttcagccaaaa

SEQ ID NO: 285160 - DNA, 20 bp, Artificial Sequence
  Description of Artificial Sequence: Synthetic oligonucleotide
  Target: LAMA2; (-) strand; PAM type: YTN; PAM sequence: CTT
aatttctaacttcagccaaa

SEQ ID NO: 285161 - DNA, 20 bp, Artificial Sequence
  Description of Artificial Sequence: Synthetic oligonucleotide
  Target: LAMA2; (-) strand; PAM type: YTN; PAM sequence: TTC
aatgcttaatttctaacttc

SEQ ID NO: 285162 - DNA, 20 bp, Artificial Sequence
  Description of Artificial Sequence: Synthetic oligonucleotide
  Target: LAMA2; (-) strand; PAM type: YTN; PAM sequence: TTA
attcaatgcttaatttctaa

SEQ ID NO: 285163 - DNA, 20 bp, Artificial Sequence
  Description of Artificial Sequence: Synthetic oligonucleotide
  Target: LAMA2; (-) strand; PAM type: YTN; PAM sequence: CTT
aattcaatgcttaatttcta

SEQ ID NO: 285164 - DNA, 20 bp, Artificial Sequence
  Description of Artificial Sequence: Synthetic oligonucleotide
  Target: LAMA2; (-) strand; PAM type: YTN; PAM sequence: TTG
aaggtagagaatatgaagaa

SEQ ID NO: 285165 - DNA, 20 bp, Artificial Sequence
  Description of Artificial Sequence: Synthetic oligonucleotide
  Target: LAMA2; (-) strand; PAM type: YTN; PAM sequence: TTA
gcattgaaggtagagaatat

SEQ ID NO: 285166 - DNA, 20 bp, Artificial Sequence
  Description of Artificial Sequence: Synthetic oligonucleotide
  Target: LAMA2; (-) strand; PAM type: YTN; PAM sequence: TTA
aggtaaaaattagcattgaa

SEQ ID NO: 285167 - DNA, 20 bp, Artificial Sequence
  Description of Artificial Sequence: Synthetic oligonucleotide
  Target: LAMA2; (-) strand; PAM type: YTN; PAM sequence: TTG
attaaggtaaaaattagcat

SEQ ID NO: 285168 - DNA, 20 bp, Artificial Sequence
  Description of Artificial Sequence: Synthetic oligonucleotide
  Target: LAMA2; (-) strand; PAM type: YTN; PAM sequence: TTT
gattaaggtaaaaattagca

SEQ ID NO: 285169 - DNA, 20 bp, Artificial Sequence
  Description of Artificial Sequence: Synthetic oligonucleotide
  Target: LAMA2; (-) strand; PAM type: YTN; PAM sequence: TTT
tgattaaggtaaaaattagc

SEQ ID NO: 285170 - DNA, 20 bp, Artificial Sequence
  Description of Artificial Sequence: Synthetic oligonucleotide
  Target: LAMA2; (-) strand; PAM type: YTN; PAM sequence: TTT
ttgattaaggtaaaaattag

SEQ ID NO: 285171 - DNA, 20 bp, Artificial Sequence
  Description of Artificial Sequence: Synthetic oligonucleotide
  Target: LAMA2; (-) strand; PAM type: YTN; PAM sequence: CTT
tttgattaaggtaaaaatta

SEQ ID NO: 285172 - DNA, 20 bp, Artificial Sequence
  Description of Artificial Sequence: Synthetic oligonucleotide
  Target: LAMA2; (-) strand; PAM type: YTN; PAM sequence: TTC
tttttgattaaggtaaaaat

SEQ ID NO: 285173 - DNA, 20 bp, Artificial Sequence
  Description of Artificial Sequence: Synthetic oligonucleotide
  Target: LAMA2; (-) strand; PAM type: YTN; PAM sequence: TTT
ctttttgattaaggtaaaaa

SEQ ID NO: 285174 - DNA, 20 bp, Artificial Sequence
  Description of Artificial Sequence: Synthetic oligonucleotide
  Target: LAMA2; (-) strand; PAM type: YTN; PAM sequence: TTT
tctttttgattaaggtaaaa

SEQ ID NO: 285175 - DNA, 20 bp, Artificial Sequence
  Description of Artificial Sequence: Synthetic oligonucleotide
  Target: LAMA2; (-) strand; PAM type: YTN; PAM sequence: TTT
ttctttttgattaaggtaaa

SEQ ID NO: 285176 - DNA, 20 bp, Artificial Sequence
  Description of Artificial Sequence: Synthetic oligonucleotide
  Target: LAMA2; (-) strand; PAM type: YTN; PAM sequence: CTT
tttctttttgattaaggtaa

SEQ ID NO: 285177 - DNA, 20 bp, Artificial Sequence
  Description of Artificial Sequence: Synthetic oligonucleotide
  Target: LAMA2; (-) strand; PAM type: YTN; PAM sequence: TTA
ggacagagggccaccacttt

SEQ ID NO: 285178 - DNA, 20 bp, Artificial Sequence
  Description of Artificial Sequence: Synthetic oligonucleotide
  Target: LAMA2; (-) strand; PAM type: YTN; PAM sequence: CTC
aagcaggccaggggagtaga

SEQ ID NO: 285179 - DNA, 20 bp, Artificial Sequence
  Description of Artificial Sequence: Synthetic oligonucleotide
  Target: LAMA2; (-) strand; PAM type: YTN; PAM sequence: TTG
agactcaagcaggccagggg

SEQ ID NO: 285180 - DNA, 20 bp, Artificial Sequence
  Description of Artificial Sequence: Synthetic oligonucleotide
  Target: LAMA2; (-) strand; PAM type: YTN; PAM sequence: TTA
gttgagactcaagcaggcca

SEQ ID NO: 285181 - DNA, 20 bp, Artificial Sequence
  Description of Artificial Sequence: Synthetic oligonucleotide
  Target: LAMA2; (-) strand; PAM type: YTN; PAM sequence: TTT
agttgagactcaagcaggcc

SEQ ID NO: 285182 - DNA, 20 bp, Artificial Sequence
  Description of Artificial Sequence: Synthetic oligonucleotide
  Target: LAMA2; (-) strand; PAM type: YTN; PAM sequence: TTT
tagttgagactcaagcaggc

SEQ ID NO: 285183 - DNA, 20 bp, Artificial Sequence
  Description of Artificial Sequence: Synthetic oligonucleotide
  Target: LAMA2; (-) strand; PAM type: YTN; PAM sequence: CTA
aagcaaaatgtgtgatggca

SEQ ID NO: 285184 - DNA, 20 bp, Artificial Sequence
  Description of Artificial Sequence: Synthetic oligonucleotide
  Target: LAMA2; (-) strand; PAM type: YTN; PAM sequence: TTA
atgtgacaaagcatggccat

SEQ ID NO: 285185 - DNA, 20 bp, Artificial Sequence
  Description of Artificial Sequence: Synthetic oligonucleotide
  Target: LAMA2; (-) strand; PAM type: YTN; PAM sequence: TTA
ttaatgtgacaaagcatggc

SEQ ID NO: 285186 - DNA, 20 bp, Artificial Sequence
  Description of Artificial Sequence: Synthetic oligonucleotide
  Target: LAMA2; (-) strand; PAM type: YTN; PAM sequence: CTT
attaatgtgacaaagcatgg

SEQ ID NO: 285187 - DNA, 20 bp, Artificial Sequence
  Description of Artificial Sequence: Synthetic oligonucleotide
  Target: LAMA2; (-) strand; PAM type: YTN; PAM sequence: TTC
atcttattaatgtgacaaag

SEQ ID NO: 285188 - DNA, 20 bp, Artificial Sequence
  Description of Artificial Sequence: Synthetic oligonucleotide
  Target: LAMA2; (-) strand; PAM type: YTN; PAM sequence: TTT
catcttattaatgtgacaaa

SEQ ID NO: 285189 - DNA, 20 bp, Artificial Sequence
  Description of Artificial Sequence: Synthetic oligonucleotide
  Target: LAMA2; (-) strand; PAM type: YTN; PAM sequence: TTA
accaaacaatttcatcttat

SEQ ID NO: 285190 - DNA, 20 bp, Artificial Sequence
  Description of Artificial Sequence: Synthetic oligonucleotide
  Target: LAMA2; (-) strand; PAM type: YTN; PAM sequence: CTT
aaccaaacaatttcatctta

SEQ ID NO: 285191 - DNA, 20 bp, Artificial Sequence
  Description of Artificial Sequence: Synthetic oligonucleotide
  Target: LAMA2; (-) strand; PAM type: YTN; PAM sequence: TTA
gaatagcagtatgcttaacc

SEQ ID NO: 285192 - DNA, 20 bp, Artificial Sequence
  Description of Artificial Sequence: Synthetic oligonucleotide
  Target: LAMA2; (-) strand; PAM type: YTN; PAM sequence: TTA
gtgtgcatgtatatgcatgc

SEQ ID NO: 285193 - DNA, 20 bp, Artificial Sequence
  Description of Artificial Sequence: Synthetic oligonucleotide
  Target: LAMA2; (-) strand; PAM type: YTN; PAM sequence: CTG
catagaacaaaattagtgtg

SEQ ID NO: 285194 - DNA, 20 bp, Artificial Sequence
  Description of Artificial Sequence: Synthetic oligonucleotide
  Target: LAMA2; (-) strand; PAM type: YTN; PAM sequence: CTG
catcggcaactgcatagaac

SEQ ID NO: 285195 - DNA, 20 bp, Artificial Sequence
  Description of Artificial Sequence: Synthetic oligonucleotide
  Target: LAMA2; (-) strand; PAM type: YTN; PAM sequence: TTG
acagtggcatctgcatcggc

SEQ ID NO: 285196 - DNA, 20 bp, Artificial Sequence
  Description of Artificial Sequence: Synthetic oligonucleotide
  Target: LAMA2; (-) strand; PAM type: YTN; PAM sequence: TTT
gacagtggcatctgcatcgg

SEQ ID NO: 285197 - DNA, 20 bp, Artificial Sequence
  Description of Artificial Sequence: Synthetic oligonucleotide
  Target: LAMA2; (-) strand; PAM type: YTN; PAM sequence: TTT
tgacagtggcatctgcatcg

SEQ ID NO: 285198 - DNA, 20 bp, Artificial Sequence
  Description of Artificial Sequence: Synthetic oligonucleotide
  Target: LAMA2; (-) strand; PAM type: YTN; PAM sequence: TTT
ttgacagtggcatctgcatc

SEQ ID NO: 285199 - DNA, 20 bp, Artificial Sequence
  Description of Artificial Sequence: Synthetic oligonucleotide
  Target: LAMA2; (-) strand; PAM type: YTN; PAM sequence: CTA
aatttttgacagtggcatct

SEQ ID NO: 285200 - DNA, 20 bp, Artificial Sequence
  Description of Artificial Sequence: Synthetic oligonucleotide
  Target: LAMA2; (-) strand; PAM type: YTN; PAM sequence: TTC
taaatttttgacagtggcat

SEQ ID NO: 285201 - DNA, 20 bp, Artificial Sequence
  Description of Artificial Sequence: Synthetic oligonucleotide
  Target: LAMA2; (-) strand; PAM type: YTN; PAM sequence: CTG
ttctaaatttttgacagtgg

SEQ ID NO: 285202 - DNA, 20 bp, Artificial Sequence
  Description of Artificial Sequence: Synthetic oligonucleotide
  Target: LAMA2; (-) strand; PAM type: YTN; PAM sequence: TTC
ctgttctaaatttttgacag

SEQ ID NO: 285203 - DNA, 20 bp, Artificial Sequence
  Description of Artificial Sequence: Synthetic oligonucleotide
  Target: LAMA2; (-) strand; PAM type: YTN; PAM sequence: CTT
cctgttctaaatttttgaca

SEQ ID NO: 285204 - DNA, 20 bp, Artificial Sequence
  Description of Artificial Sequence: Synthetic oligonucleotide
  Target: LAMA2; (-) strand; PAM type: YTN; PAM sequence: TTA
gccggtcagcttcctgttct

SEQ ID NO: 285205 - DNA, 20 bp, Artificial Sequence
  Description of Artificial Sequence: Synthetic oligonucleotide
  Target: LAMA2; (-) strand; PAM type: YTN; PAM sequence: CTA
ttagccggtcagcttcctgt

SEQ ID NO: 285206 - DNA, 20 bp, Artificial Sequence
  Description of Artificial Sequence: Synthetic oligonucleotide
  Target: LAMA2; (-) strand; PAM type: YTN; PAM sequence: TTA
tctattagccggtcagcttc

SEQ ID NO: 285207 - DNA, 20 bp, Artificial Sequence
  Description of Artificial Sequence: Synthetic oligonucleotide
  Target: LAMA2; (-) strand; PAM type: YTN; PAM sequence: TTT
atctattagccggtcagctt

SEQ ID NO: 285208 - DNA, 20 bp, Artificial Sequence
  Description of Artificial Sequence: Synthetic oligonucleotide
  Target: LAMA2; (-) strand; PAM type: YTN; PAM sequence: TTG
agtttatctattagccggtc

SEQ ID NO: 285209 - DNA, 20 bp, Artificial Sequence
  Description of Artificial Sequence: Synthetic oligonucleotide
  Target: LAMA2; (-) strand; PAM type: YTN; PAM sequence: TTT
gagtttatctattagccggt

SEQ ID NO: 285210 - DNA, 20 bp, Artificial Sequence
  Description of Artificial Sequence: Synthetic oligonucleotide
  Target: LAMA2; (-) strand; PAM type: YTN; PAM sequence: TTG
atgggtttgagtttatctat

SEQ ID NO: 285211 - DNA, 20 bp, Artificial Sequence
  Description of Artificial Sequence: Synthetic oligonucleotide
  Target: LAMA2; (-) strand; PAM type: YTN; PAM sequence: CTT
gatgggtttgagtttatcta

SEQ ID NO: 285212 - DNA, 20 bp, Artificial Sequence
  Description of Artificial Sequence: Synthetic oligonucleotide
  Target: LAMA2; (-) strand; PAM type: YTN; PAM sequence: TTC
cttgatgggtttgagtttat

SEQ ID NO: 285213 - DNA, 20 bp, Artificial Sequence
  Description of Artificial Sequence: Synthetic oligonucleotide
  Target: LAMA2; (-) strand; PAM type: YTN; PAM sequence: CTC
aagttccttgatgggtttga

SEQ ID NO: 285214 - DNA, 20 bp, Artificial Sequence
  Description of Artificial Sequence: Synthetic oligonucleotide
  Target: LAMA2; (-) strand; PAM type: YTN; PAM sequence: TTA
tcctcaagttccttgatggg

SEQ ID NO: 285215 - DNA, 20 bp, Artificial Sequence
  Description of Artificial Sequence: Synthetic oligonucleotide
  Target: LAMA2; (-) strand; PAM type: YTN; PAM sequence: TTA
ggttatcctcaagttccttg

SEQ ID NO: 285216 - DNA, 20 bp, Artificial Sequence
  Description of Artificial Sequence: Synthetic oligonucleotide
  Target: LAMA2; (-) strand; PAM type: YTN; PAM sequence: TTT
aggttatcctcaagttcctt

SEQ ID NO: 285217 - DNA, 20 bp, Artificial Sequence
  Description of Artificial Sequence: Synthetic oligonucleotide
  Target: LAMA2; (-) strand; PAM type: YTN; PAM sequence: CTT
taggttatcctcaagttcct

SEQ ID NO: 285218 - DNA, 20 bp, Artificial Sequence
  Description of Artificial Sequence: Synthetic oligonucleotide
  Target: LAMA2; (-) strand; PAM type: YTN; PAM sequence: TTC
tttaggttatcctcaagttc

SEQ ID NO: 285219 - DNA, 20 bp, Artificial Sequence
  Description of Artificial Sequence: Synthetic oligonucleotide
  Target: LAMA2; (-) strand; PAM type: YTN; PAM sequence: TTT
ctttaggttatcctcaagtt

SEQ ID NO: 285220 - DNA, 20 bp, Artificial Sequence
  Description of Artificial Sequence: Synthetic oligonucleotide
  Target: LAMA2; (-) strand; PAM type: YTN; PAM sequence: TTT
tctttaggttatcctcaagt

SEQ ID NO: 285221 - DNA, 20 bp, Artificial Sequence
  Description of Artificial Sequence: Synthetic oligonucleotide
  Target: LAMA2; (-) strand; PAM type: YTN; PAM sequence: TTT
ttctttaggttatcctcaag

SEQ ID NO: 285222 - DNA, 20 bp, Artificial Sequence
  Description of Artificial Sequence: Synthetic oligonucleotide
  Target: LAMA2; (-) strand; PAM type: YTN; PAM sequence: CTC
agagatgtttttctttaggt

SEQ ID NO: 285223 - DNA, 20 bp, Artificial Sequence
  Description of Artificial Sequence: Synthetic oligonucleotide
  Target: LAMA2; (-) strand; PAM type: YTN; PAM sequence: TTA
tctcagagatgtttttcttt

SEQ ID NO: 285224 - DNA, 20 bp, Artificial Sequence
  Description of Artificial Sequence: Synthetic oligonucleotide
  Target: LAMA2; (-) strand; PAM type: YTN; PAM sequence: TTT
atctcagagatgtttttctt

SEQ ID NO: 285225 - DNA, 20 bp, Artificial Sequence
  Description of Artificial Sequence: Synthetic oligonucleotide
  Target: LAMA2; (-) strand; PAM type: YTN; PAM sequence: CTT
tatctcagagatgtttttct

SEQ ID NO: 285226 - DNA, 20 bp, Artificial Sequence
  Description of Artificial Sequence: Synthetic oligonucleotide
  Target: LAMA2; (-) strand; PAM type: YTN; PAM sequence: TTC
ctttatctcagagatgtttt

SEQ ID NO: 285227 - DNA, 20 bp, Artificial Sequence
  Description of Artificial Sequence: Synthetic oligonucleotide
  Target: LAMA2; (-) strand; PAM type: YTN; PAM sequence: TTA
tcaattcctttatctcagag

SEQ ID NO: 285228 - DNA, 20 bp, Artificial Sequence
  Description of Artificial Sequence: Synthetic oligonucleotide
  Target: LAMA2; (-) strand; PAM type: YTN; PAM sequence: TTT
atcaattcctttatctcaga

SEQ ID NO: 285229 - DNA, 20 bp, Artificial Sequence
  Description of Artificial Sequence: Synthetic oligonucleotide
  Target: LAMA2; (-) strand; PAM type: YTN; PAM sequence: TTG
gtttatcaattcctttatct

SEQ ID NO: 285230 - DNA, 20 bp, Artificial Sequence
  Description of Artificial Sequence: Synthetic oligonucleotide
  Target: LAMA2; (-) strand; PAM type: YTN; PAM sequence: CTT
ggtttatcaattcctttatc

SEQ ID NO: 285231 - DNA, 20 bp, Artificial Sequence
  Description of Artificial Sequence: Synthetic oligonucleotide
  Target: LAMA2; (-) strand; PAM type: YTN; PAM sequence: TTC
cgagcttggtttatcaattc

SEQ ID NO: 285232 - DNA, 20 bp, Artificial Sequence
  Description of Artificial Sequence: Synthetic oligonucleotide
  Target: LAMA2; (-) strand; PAM type: YTN; PAM sequence: TTT
ccgagcttggtttatcaatt

SEQ ID NO: 285233 - DNA, 20 bp, Artificial Sequence
  Description of Artificial Sequence: Synthetic oligonucleotide
  Target: LAMA2; (-) strand; PAM type: YTN; PAM sequence: TTG
tttccgagcttggtttatca

SEQ ID NO: 285234 - DNA, 20 bp, Artificial Sequence
  Description of Artificial Sequence: Synthetic oligonucleotide
  Target: LAMA2; (-) strand; PAM type: YTN; PAM sequence: CTT
gtttccgagcttggtttatc

SEQ ID NO: 285235 - DNA, 20 bp, Artificial Sequence
  Description of Artificial Sequence: Synthetic oligonucleotide
  Target: LAMA2; (-) strand; PAM type: YTN; PAM sequence: TTG
gcttgtttccgagcttggtt

SEQ ID NO: 285236 - DNA, 20 bp, Artificial Sequence
  Description of Artificial Sequence: Synthetic oligonucleotide
  Target: LAMA2; (-) strand; PAM type: YTN; PAM sequence: TTA
cagaattggcttgtttccga

SEQ ID NO: 285237 - DNA, 20 bp, Artificial Sequence
  Description of Artificial Sequence: Synthetic oligonucleotide
  Target: LAMA2; (-) strand; PAM type: YTN; PAM sequence: CTT
acagaattggcttgtttccg

SEQ ID NO: 285238 - DNA, 20 bp, Artificial Sequence
  Description of Artificial Sequence: Synthetic oligonucleotide
  Target: LAMA2; (-) strand; PAM type: YTN; PAM sequence: CTG
acgataaaaagaacttacag

SEQ ID NO: 285239 - DNA, 20 bp, Artificial Sequence
  Description of Artificial Sequence: Synthetic oligonucleotide
  Target: LAMA2; (-) strand; PAM type: YTN; PAM sequence: CTG
atactgacgataaaaagaac

SEQ ID NO: 285240 - DNA, 20 bp, Artificial Sequence
  Description of Artificial Sequence: Synthetic oligonucleotide
  Target: LAMA2; (-) strand; PAM type: YTN; PAM sequence: TTA
ctgatactgacgataaaaag

SEQ ID NO: 285241 - DNA, 20 bp, Artificial Sequence
  Description of Artificial Sequence: Synthetic oligonucleotide
  Target: LAMA2; (-) strand; PAM type: YTN; PAM sequence: TTA
caatcagttactgatactga

SEQ ID NO: 285242 - DNA, 20 bp, Artificial Sequence
  Description of Artificial Sequence: Synthetic oligonucleotide
  Target: LAMA2; (-) strand; PAM type: YTN; PAM sequence: CTA
tgaataatccaacaattaca

SEQ ID NO: 285243 - DNA, 20 bp, Artificial Sequence
  Description of Artificial Sequence: Synthetic oligonucleotide
  Target: LAMA2; (-) strand; PAM type: YTN; PAM sequence: CTC
tatgaataatccaacaatta

SEQ ID NO: 285244 - DNA, 20 bp, Artificial Sequence
  Description of Artificial Sequence: Synthetic oligonucleotide
  Target: LAMA2; (-) strand; PAM type: YTN; PAM sequence: TTC
cctctatgaataatccaaca

SEQ ID NO: 285245 - DNA, 20 bp, Artificial Sequence
  Description of Artificial Sequence: Synthetic oligonucleotide
  Target: LAMA2; (-) strand; PAM type: YTN; PAM sequence: CTG
gggaaagacattccctctat

SEQ ID NO: 285246 - DNA, 20 bp, Artificial Sequence
  Description of Artificial Sequence: Synthetic oligonucleotide
  Target: LAMA2; (-) strand; PAM type: YTN; PAM sequence: TTC
aacggggaatcctggggaaa

SEQ ID NO: 285247 - DNA, 20 bp, Artificial Sequence
  Description of Artificial Sequence: Synthetic oligonucleotide
  Target: LAMA2; (-) strand; PAM type: YTN; PAM sequence: TTA
aaggaaaaggacccaagatc

SEQ ID NO: 285248 - DNA, 20 bp, Artificial Sequence
  Description of Artificial Sequence: Synthetic oligonucleotide
  Target: LAMA2; (-) strand; PAM type: YTN; PAM sequence: TTC
gagttaaaggaaaaggaccc

SEQ ID NO: 285249 - DNA, 20 bp, Artificial Sequence
  Description of Artificial Sequence: Synthetic oligonucleotide
  Target: LAMA2; (-) strand; PAM type: YTN; PAM sequence: CTT
cgagttaaaggaaaaggacc

SEQ ID NO: 285250 - DNA, 20 bp, Artificial Sequence
  Description of Artificial Sequence: Synthetic oligonucleotide
  Target: LAMA2; (-) strand; PAM type: YTN; PAM sequence: CTA
ccccaaatcgcttcgagtta

SEQ ID NO: 285251 - DNA, 20 bp, Artificial Sequence
  Description of Artificial Sequence: Synthetic oligonucleotide
  Target: LAMA2; (-) strand; PAM type: YTN; PAM sequence: CTC
ctaccccaaatcgcttcgag

SEQ ID NO: 285252 - DNA, 20 bp, Artificial Sequence
  Description of Artificial Sequence: Synthetic oligonucleotide
  Target: LAMA2; (-) strand; PAM type: YTN; PAM sequence: CTC
caacccctcctaccccaaat

SEQ ID NO: 285253 - DNA, 20 bp, Artificial Sequence
  Description of Artificial Sequence: Synthetic oligonucleotide
  Target: LAMA2; (-) strand; PAM type: YTN; PAM sequence: CTC
ccccactccaacccctccta

SEQ ID NO: 285254 - DNA, 20 bp, Artificial Sequence
  Description of Artificial Sequence: Synthetic oligonucleotide
  Target: LAMA2; (-) strand; PAM type: YTN; PAM sequence: CTC
tcccccactccaacccctcc

SEQ ID NO: 285255 - DNA, 20 bp, Artificial Sequence
  Description of Artificial Sequence: Synthetic oligonucleotide
  Target: LAMA2; (-) strand; PAM type: YTN; PAM sequence: CTA
acctctcccccactccaacc

SEQ ID NO: 285256 - DNA, 20 bp, Artificial Sequence
  Description of Artificial Sequence: Synthetic oligonucleotide
  Target: LAMA2; (-) strand; PAM type: YTN; PAM sequence: TTA
caaacaaaacaaaactaacc

SEQ ID NO: 285257 - DNA, 20 bp, Artificial Sequence
  Description of Artificial Sequence: Synthetic oligonucleotide
  Target: LAMA2; (-) strand; PAM type: YTN; PAM sequence: TTT
acaaacaaaacaaaactaac

SEQ ID NO: 285258 - DNA, 20 bp, Artificial Sequence
  Description of Artificial Sequence: Synthetic oligonucleotide
  Target: LAMA2; (-) strand; PAM type: YTN; PAM sequence: TTG
aaatttacaaacaaaacaaa

SEQ ID NO: 285259 - DNA, 20 bp, Artificial Sequence
  Description of Artificial Sequence: Synthetic oligonucleotide
  Target: LAMA2; (-) strand; PAM type: YTN; PAM sequence: TTT
gaaatttacaaacaaaacaa

SEQ ID NO: 285260 - DNA, 20 bp, Artificial Sequence
  Description of Artificial Sequence: Synthetic oligonucleotide
  Target: LAMA2; (-) strand; PAM type: YTN; PAM sequence: TTT
tgaaatttacaaacaaaaca

SEQ ID NO: 285261 - DNA, 20 bp, Artificial Sequence
  Description of Artificial Sequence: Synthetic oligonucleotide
  Target: LAMA2; (-) strand; PAM type: YTN; PAM sequence: CTT
ttgaaatttacaaacaaaac

SEQ ID NO: 285262 - DNA, 20 bp, Artificial Sequence
  Description of Artificial Sequence: Synthetic oligonucleotide
  Target: LAMA2; (-) strand; PAM type: YTN; PAM sequence: CTC
atgaaatgtcttttgaaatt

SEQ ID NO: 285263 - DNA, 20 bp, Artificial Sequence
  Description of Artificial Sequence: Synthetic oligonucleotide
  Target: LAMA2; (-) strand; PAM type: YTN; PAM sequence: TTC
tcatgaaatgtcttttgaaa

SEQ ID NO: 285264 - DNA, 20 bp, Artificial Sequence
  Description of Artificial Sequence: Synthetic oligonucleotide
  Target: LAMA2; (-) strand; PAM type: YTN; PAM sequence: TTA
tcattctcatgaaatgtctt

SEQ ID NO: 285265 - DNA, 20 bp, Artificial Sequence
  Description of Artificial Sequence: Synthetic oligonucleotide
  Target: LAMA2; (-) strand; PAM type: YTN; PAM sequence: TTA
aaacaataagtggtgattat

SEQ ID NO: 285266 - DNA, 20 bp, Artificial Sequence
  Description of Artificial Sequence: Synthetic oligonucleotide
  Target: LAMA2; (-) strand; PAM type: YTN; PAM sequence: TTT
aaaacaataagtggtgatta

SEQ ID NO: 285267 - DNA, 20 bp, Artificial Sequence
  Description of Artificial Sequence: Synthetic oligonucleotide
  Target: LAMA2; (-) strand; PAM type: YTN; PAM sequence: TTT
taaaacaataagtggtgatt

SEQ ID NO: 285268 - DNA, 20 bp, Artificial Sequence
  Description of Artificial Sequence: Synthetic oligonucleotide
  Target: LAMA2; (-) strand; PAM type: YTN; PAM sequence: TTC
ccagttttaaaacaataagt

SEQ ID NO: 285269 - DNA, 20 bp, Artificial Sequence
  Description of Artificial Sequence: Synthetic oligonucleotide
  Target: LAMA2; (-) strand; PAM type: YTN; PAM sequence: CTA
tgcaaatagtaatagaatat

SEQ ID NO: 285270 - DNA, 20 bp, Artificial Sequence
  Description of Artificial Sequence: Synthetic oligonucleotide
  Target: LAMA2; (-) strand; PAM type: YTN; PAM sequence: TTC
tatgcaaatagtaatagaat

SEQ ID NO: 285271 - DNA, 20 bp, Artificial Sequence
  Description of Artificial Sequence: Synthetic oligonucleotide
  Target: LAMA2; (-) strand; PAM type: YTN; PAM sequence: TTA
ttctatgcaaatagtaatag

SEQ ID NO: 285272 - DNA, 20 bp, Artificial Sequence
  Description of Artificial Sequence: Synthetic oligonucleotide
  Target: LAMA2; (-) strand; PAM type: YTN; PAM sequence: TTG
tattattctatgcaaatagt

SEQ ID NO: 285273 - DNA, 20 bp, Artificial Sequence
  Description of Artificial Sequence: Synthetic oligonucleotide
  Target: LAMA2; (-) strand; PAM type: YTN; PAM sequence: TTT
gtattattctatgcaaatag

SEQ ID NO: 285274 - DNA, 20 bp, Artificial Sequence
  Description of Artificial Sequence: Synthetic oligonucleotide
  Target: LAMA2; (-) strand; PAM type: YTN; PAM sequence: CTA
tttgtattattctatgcaaa

SEQ ID NO: 285275 - DNA, 20 bp, Artificial Sequence
  Description of Artificial Sequence: Synthetic oligonucleotide
  Target: LAMA2; (-) strand; PAM type: YTN; PAM sequence: TTG
ctatttgtattattctatgc

SEQ ID NO: 285276 - DNA, 20 bp, Artificial Sequence
  Description of Artificial Sequence: Synthetic oligonucleotide
  Target: LAMA2; (-) strand; PAM type: YTN; PAM sequence: CTT
gctatttgtattattctatg

SEQ ID NO: 285277 - DNA, 20 bp, Artificial Sequence
  Description of Artificial Sequence: Synthetic oligonucleotide
  Target: LAMA2; (-) strand; PAM type: YTN; PAM sequence: TTC
ttgctatttgtattattcta

SEQ ID NO: 285278 - DNA, 20 bp, Artificial Sequence
  Description of Artificial Sequence: Synthetic oligonucleotide
  Target: LAMA2; (-) strand; PAM type: YTN; PAM sequence: TTT
cttgctatttgtattattct

SEQ ID NO: 285279 - DNA, 20 bp, Artificial Sequence
  Description of Artificial Sequence: Synthetic oligonucleotide
  Target: LAMA2; (-) strand; PAM type: YTN; PAM sequence: CTT
tcttgctatttgtattattc

SEQ ID NO: 285280 - DNA, 20 bp, Artificial Sequence
  Description of Artificial Sequence: Synthetic oligonucleotide
  Target: LAMA2; (-) strand; PAM type: YTN; PAM sequence: TTC
tttcttgctatttgtattat

SEQ ID NO: 285281 - DNA, 20 bp, Artificial Sequence
  Description of Artificial Sequence: Synthetic oligonucleotide
  Target: LAMA2; (-) strand; PAM type: YTN; PAM sequence: TTT
ctttcttgctatttgtatta

SEQ ID NO: 285282 - DNA, 20 bp, Artificial Sequence
  Description of Artificial Sequence: Synthetic oligonucleotide
  Target: LAMA2; (-) strand; PAM type: YTN; PAM sequence: TTT
tctttcttgctatttgtatt

SEQ ID NO: 285283 - DNA, 20 bp, Artificial Sequence
  Description of Artificial Sequence: Synthetic oligonucleotide
  Target: LAMA2; (-) strand; PAM type: YTN; PAM sequence: TTA
gtatacaataataaggtttt

SEQ ID NO: 285284 - DNA, 20 bp, Artificial Sequence
  Description of Artificial Sequence: Synthetic oligonucleotide
  Target: LAMA2; (-) strand; PAM type: YTN; PAM sequence: TTT
agtatacaataataaggttt

SEQ ID NO: 285285 - DNA, 20 bp, Artificial Sequence
  Description of Artificial Sequence: Synthetic oligonucleotide
  Target: LAMA2; (-) strand; PAM type: YTN; PAM sequence: TTT
tagtatacaataataaggtt

SEQ ID NO: 285286 - DNA, 20 bp, Artificial Sequence
  Description of Artificial Sequence: Synthetic oligonucleotide
  Target: LAMA2; (-) strand; PAM type: YTN; PAM sequence: TTT
ttagtatacaataataaggt

SEQ ID NO: 285287 - DNA, 20 bp, Artificial Sequence
  Description of Artificial Sequence: Synthetic oligonucleotide
  Target: LAMA2; (-) strand; PAM type: YTN; PAM sequence: CTT
tttagtatacaataataagg

SEQ ID NO: 285288 - DNA, 20 bp, Artificial Sequence
  Description of Artificial Sequence: Synthetic oligonucleotide
  Target: LAMA2; (-) strand; PAM type: YTN; PAM sequence: CTC
atccatggctttttagtata

SEQ ID NO: 285289 - DNA, 20 bp, Artificial Sequence
  Description of Artificial Sequence: Synthetic oligonucleotide
  Target: LAMA2; (-) strand; PAM type: YTN; PAM sequence: CTC
tcatccatggctttttagta

SEQ ID NO: 285290 - DNA, 20 bp, Artificial Sequence
  Description of Artificial Sequence: Synthetic oligonucleotide
  Target: LAMA2; (-) strand; PAM type: YTN; PAM sequence: TTA
gcaagaggaaggtactctca

SEQ ID NO: 285291 - DNA, 20 bp, Artificial Sequence
  Description of Artificial Sequence: Synthetic oligonucleotide
  Target: LAMA2; (-) strand; PAM type: YTN; PAM sequence: TTT
agcaagaggaaggtactctc

SEQ ID NO: 285292 - DNA, 20 bp, Artificial Sequence
  Description of Artificial Sequence: Synthetic oligonucleotide
  Target: LAMA2; (-) strand; PAM type: YTN; PAM sequence: TTT
tagcaagaggaaggtactct

SEQ ID NO: 285293 - DNA, 20 bp, Artificial Sequence
  Description of Artificial Sequence: Synthetic oligonucleotide
  Target: LAMA2; (-) strand; PAM type: YTN; PAM sequence: TTT
ttagcaagaggaaggtactc

SEQ ID NO: 285294 - DNA, 20 bp, Artificial Sequence
  Description of Artificial Sequence: Synthetic oligonucleotide
  Target: LAMA2; (-) strand; PAM type: YTN; PAM sequence: TTG
tttttagcaagaggaaggta

SEQ ID NO: 285295 - DNA, 20 bp, Artificial Sequence
  Description of Artificial Sequence: Synthetic oligonucleotide
  Target: LAMA2; (-) strand; PAM type: YTN; PAM sequence: TTT
gtttttagcaagaggaaggt

SEQ ID NO: 285296 - DNA, 20 bp, Artificial Sequence
  Description of Artificial Sequence: Synthetic oligonucleotide
  Target: LAMA2; (-) strand; PAM type: YTN; PAM sequence: TTG
gtttgtttttagcaagagga

SEQ ID NO: 285297 - DNA, 20 bp, Artificial Sequence
  Description of Artificial Sequence: Synthetic oligonucleotide
  Target: LAMA2; (-) strand; PAM type: YTN; PAM sequence: TTT
ggtttgtttttagcaagagg

SEQ ID NO: 285298 - DNA, 20 bp, Artificial Sequence
  Description of Artificial Sequence: Synthetic oligonucleotide
  Target: LAMA2; (-) strand; PAM type: YTN; PAM sequence: TTT
tggtttgtttttagcaagag

SEQ ID NO: 285299 - DNA, 20 bp, Artificial Sequence
  Description of Artificial Sequence: Synthetic oligonucleotide
  Target: LAMA2; (-) strand; PAM type: YTN; PAM sequence: TTT
ttggtttgtttttagcaaga

SEQ ID NO: 285300 - DNA, 20 bp, Artificial Sequence
  Description of Artificial Sequence: Synthetic oligonucleotide
  Target: LAMA2; (-) strand; PAM type: YTN; PAM sequence: TTT
tttggtttgtttttagcaag

SEQ ID NO: 285301 - DNA, 20 bp, Artificial Sequence
  Description of Artificial Sequence: Synthetic oligonucleotide
  Target: LAMA2; (-) strand; PAM type: YTN; PAM sequence: TTT
ttttggtttgtttttagcaa

SEQ ID NO: 285302 - DNA, 20 bp, Artificial Sequence
  Description of Artificial Sequence: Synthetic oligonucleotide
  Target: LAMA2; (-) strand; PAM type: YTN; PAM sequence: TTT
tttttggtttgtttttagca

SEQ ID NO: 285303 - DNA, 20 bp, Artificial Sequence
  Description of Artificial Sequence: Synthetic oligonucleotide
  Target: LAMA2; (-) strand; PAM type: YTN; PAM sequence: TTT
ttttttggtttgtttttagc

SEQ ID NO: 285304 - DNA, 20 bp, Artificial Sequence
  Description of Artificial Sequence: Synthetic oligonucleotide
  Target: LAMA2; (-) strand; PAM type: YTN; PAM sequence: CTT
tttttttggtttgtttttag

SEQ ID NO: 285305 - DNA, 20 bp, Artificial Sequence
  Description of Artificial Sequence: Synthetic oligonucleotide
  Target: LAMA2; (-) strand; PAM type: YTN; PAM sequence: TTG
gcctttttttttggtttgtt

SEQ ID NO: 285306 - DNA, 20 bp, Artificial Sequence
  Description of Artificial Sequence: Synthetic oligonucleotide
  Target: LAMA2; (-) strand; PAM type: YTN; PAM sequence: TTA
gttggcctttttttttggtt

SEQ ID NO: 285307 - DNA, 20 bp, Artificial Sequence
  Description of Artificial Sequence: Synthetic oligonucleotide
  Target: LAMA2; (-) strand; PAM type: YTN; PAM sequence: CTG
ccataaccccattagttggc

SEQ ID NO: 285308 - DNA, 20 bp, Artificial Sequence
  Description of Artificial Sequence: Synthetic oligonucleotide
  Target: LAMA2; (-) strand; PAM type: YTN; PAM sequence: TTC
ctgccataaccccattagtt

SEQ ID NO: 285309 - DNA, 20 bp, Artificial Sequence
  Description of Artificial Sequence: Synthetic oligonucleotide
  Target: LAMA2; (-) strand; PAM type: YTN; PAM sequence: TTC
attcctgccataaccccatt

SEQ ID NO: 285310 - DNA, 20 bp, Artificial Sequence
  Description of Artificial Sequence: Synthetic oligonucleotide
  Target: LAMA2; (-) strand; PAM type: YTN; PAM sequence: CTT
cattcctgccataaccccat

SEQ ID NO: 285311 - DNA, 20 bp, Artificial Sequence
  Description of Artificial Sequence: Synthetic oligonucleotide
  Target: LAMA2; (-) strand; PAM type: YTN; PAM sequence: TTC
cttcattcctgccataaccc

SEQ ID NO: 285312 - DNA, 20 bp, Artificial Sequence
  Description of Artificial Sequence: Synthetic oligonucleotide
  Target: LAMA2; (-) strand; PAM type: YTN; PAM sequence: TTG
ttccttcattcctgccataa

SEQ ID NO: 285313 - DNA, 20 bp, Artificial Sequence
  Description of Artificial Sequence: Synthetic oligonucleotide
  Target: LAMA2; (-) strand; PAM type: YTN; PAM sequence: CTG
tatattgttccttcattcct

SEQ ID NO: 285314 - DNA, 20 bp, Artificial Sequence
  Description of Artificial Sequence: Synthetic oligonucleotide
  Target: LAMA2; (-) strand; PAM type: YTN; PAM sequence: TTC
tgtatattgttccttcattc

SEQ ID NO: 285315 - DNA, 20 bp, Artificial Sequence
  Description of Artificial Sequence: Synthetic oligonucleotide
  Target: LAMA2; (-) strand; PAM type: YTN; PAM sequence: TTA
ttctgtatattgttccttca

SEQ ID NO: 285316 - DNA, 20 bp, Artificial Sequence
  Description of Artificial Sequence: Synthetic oligonucleotide
  Target: LAMA2; (-) strand; PAM type: YTN; PAM sequence: CTT
attctgtatattgttccttc

SEQ ID NO: 285317 - DNA, 20 bp, Artificial Sequence
  Description of Artificial Sequence: Synthetic oligonucleotide
  Target: LAMA2; (-) strand; PAM type: YTN; PAM sequence: CTC
ttattctgtatattgttcct

SEQ ID NO: 285318 - DNA, 20 bp, Artificial Sequence
  Description of Artificial Sequence: Synthetic oligonucleotide
  Target: LAMA2; (-) strand; PAM type: YTN; PAM sequence: TTG
ctcttattctgtatattgtt

SEQ ID NO: 285319 - DNA, 20 bp, Artificial Sequence
  Description of Artificial Sequence: Synthetic oligonucleotide
  Target: LAMA2; (-) strand; PAM type: YTN; PAM sequence: TTT
gctcttattctgtatattgt

SEQ ID NO: 285320 - DNA, 20 bp, Artificial Sequence
  Description of Artificial Sequence: Synthetic oligonucleotide
  Target: LAMA2; (-) strand; PAM type: YTN; PAM sequence: CTT
tgctcttattctgtatattg

SEQ ID NO: 285321 - DNA, 20 bp, Artificial Sequence
  Description of Artificial Sequence: Synthetic oligonucleotide
  Target: LAMA2; (-) strand; PAM type: YTN; PAM sequence: CTC
tttgctcttattctgtatat

SEQ ID NO: 285322 - DNA, 20 bp, Artificial Sequence
  Description of Artificial Sequence: Synthetic oligonucleotide
  Target: LAMA2; (-) strand; PAM type: YTN; PAM sequence: TTC
tctttgctcttattctgtat

SEQ ID NO: 285323 - DNA, 20 bp, Artificial Sequence
  Description of Artificial Sequence: Synthetic oligonucleotide
  Target: LAMA2; (-) strand; PAM type: YTN; PAM sequence: TTT
ctctttgctcttattctgta

SEQ ID NO: 285324 - DNA, 20 bp, Artificial Sequence
  Description of Artificial Sequence: Synthetic oligonucleotide
  Target: LAMA2; (-) strand; PAM type: YTN; PAM sequence: TTG
tttctctttgctcttattct

SEQ ID NO: 285325 - DNA, 20 bp, Artificial Sequence
  Description of Artificial Sequence: Synthetic oligonucleotide
  Target: LAMA2; (-) strand; PAM type: YTN; PAM sequence: TTT
gtttctctttgctcttattc

SEQ ID NO: 285326 - DNA, 20 bp, Artificial Sequence
  Description of Artificial Sequence: Synthetic oligonucleotide
  Target: LAMA2; (-) strand; PAM type: YTN; PAM sequence: TTA
taccagacaaaagaatatat

SEQ ID NO: 285327 - DNA, 20 bp, Artificial Sequence
  Description of Artificial Sequence: Synthetic oligonucleotide
  Target: LAMA2; (-) strand; PAM type: YTN; PAM sequence: TTT
ataccagacaaaagaatata

SEQ ID NO: 285328 - DNA, 20 bp, Artificial Sequence
  Description of Artificial Sequence: Synthetic oligonucleotide
  Target: LAMA2; (-) strand; PAM type: YTN; PAM sequence: TTG
tttataccagacaaaagaat

SEQ ID NO: 285329 - DNA, 20 bp, Artificial Sequence
  Description of Artificial Sequence: Synthetic oligonucleotide
  Target: LAMA2; (-) strand; PAM type: YTN; PAM sequence: TTG
ttgtttataccagacaaaag

SEQ ID NO: 285330 - DNA, 20 bp, Artificial Sequence
  Description of Artificial Sequence: Synthetic oligonucleotide
  Target: LAMA2; (-) strand; PAM type: YTN; PAM sequence: TTA
ttgttgtttataccagacaa

SEQ ID NO: 285331 - DNA, 20 bp, Artificial Sequence
  Description of Artificial Sequence: Synthetic oligonucleotide
  Target: LAMA2; (-) strand; PAM type: YTN; PAM sequence: TTT
attgttgtttataccagaca

SEQ ID NO: 285332 - DNA, 20 bp, Artificial Sequence
  Description of Artificial Sequence: Synthetic oligonucleotide
  Target: LAMA2; (-) strand; PAM type: YTN; PAM sequence: TTT
tattgttgtttataccagac

SEQ ID NO: 285333 - DNA, 20 bp, Artificial Sequence
  Description of Artificial Sequence: Synthetic oligonucleotide
  Target: LAMA2; (-) strand; PAM type: YTN; PAM sequence: TTT
ttattgttgtttataccaga

SEQ ID NO: 285334 - DNA, 20 bp, Artificial Sequence
  Description of Artificial Sequence: Synthetic oligonucleotide
  Target: LAMA2; (-) strand; PAM type: YTN; PAM sequence: CTC
caaaacaaaaaataaatgta

SEQ ID NO: 285335 - DNA, 20 bp, Artificial Sequence
  Description of Artificial Sequence: Synthetic oligonucleotide
  Target: LAMA2; (-) strand; PAM type: YTN; PAM sequence: CTA
ctccaaaacaaaaaataaat

SEQ ID NO: 285336 - DNA, 20 bp, Artificial Sequence
  Description of Artificial Sequence: Synthetic oligonucleotide
  Target: LAMA2; (-) strand; PAM type: YTN; PAM sequence: CTA
tctactccaaaacaaaaaat

SEQ ID NO: 285337 - DNA, 20 bp, Artificial Sequence
  Description of Artificial Sequence: Synthetic oligonucleotide
  Target: LAMA2; (-) strand; PAM type: YTN; PAM sequence: TTC
ctatctactccaaaacaaaa

SEQ ID NO: 285338 - DNA, 20 bp, Artificial Sequence
  Description of Artificial Sequence: Synthetic oligonucleotide
  Target: LAMA2; (-) strand; PAM type: YTN; PAM sequence: TTT
cctatctactccaaaacaaa

SEQ ID NO: 285339 - DNA, 20 bp, Artificial Sequence
  Description of Artificial Sequence: Synthetic oligonucleotide
  Target: LAMA2; (-) strand; PAM type: YTN; PAM sequence: CTA
tttcctatctactccaaaac

SEQ ID NO: 285340 - DNA, 20 bp, Artificial Sequence
  Description of Artificial Sequence: Synthetic oligonucleotide
  Target: LAMA2; (-) strand; PAM type: YTN; PAM sequence: TTG
agacaaatcagctatttcct

SEQ ID NO: 285341 - DNA, 20 bp, Artificial Sequence
  Description of Artificial Sequence: Synthetic oligonucleotide
  Target: LAMA2; (-) strand; PAM type: YTN; PAM sequence: TTT
gagacaaatcagctatttcc

SEQ ID NO: 285342 - DNA, 20 bp, Artificial Sequence
  Description of Artificial Sequence: Synthetic oligonucleotide
  Target: LAMA2; (-) strand; PAM type: YTN; PAM sequence: TTT
tgagacaaatcagctatttc

SEQ ID NO: 285343 - DNA, 20 bp, Artificial Sequence
  Description of Artificial Sequence: Synthetic oligonucleotide
  Target: LAMA2; (-) strand; PAM type: YTN; PAM sequence: TTG
ggtaagtaaagagcaaaatt

SEQ ID NO: 285344 - DNA, 20 bp, Artificial Sequence
  Description of Artificial Sequence: Synthetic oligonucleotide
  Target: LAMA2; (-) strand; PAM type: YTN; PAM sequence: CTA
attgggtaagtaaagagcaa

SEQ ID NO: 285345 - DNA, 20 bp, Artificial Sequence
  Description of Artificial Sequence: Synthetic oligonucleotide
  Target: LAMA2; (-) strand; PAM type: YTN; PAM sequence: TTC
taattgggtaagtaaagagc

SEQ ID NO: 285346 - DNA, 20 bp, Artificial Sequence
  Description of Artificial Sequence: Synthetic oligonucleotide
  Target: LAMA2; (-) strand; PAM type: YTN; PAM sequence: CTT
ctaattgggtaagtaaagag

SEQ ID NO: 285347 - DNA, 20 bp, Artificial Sequence
  Description of Artificial Sequence: Synthetic oligonucleotide
  Target: LAMA2; (-) strand; PAM type: YTN; PAM sequence: CTA
gtaaacttctaattgggtaa

SEQ ID NO: 285348 - DNA, 20 bp, Artificial Sequence
  Description of Artificial Sequence: Synthetic oligonucleotide
  Target: LAMA2; (-) strand; PAM type: YTN; PAM sequence: CTA
tcctagtaaacttctaattg

SEQ ID NO: 285349 - DNA, 20 bp, Artificial Sequence
  Description of Artificial Sequence: Synthetic oligonucleotide
  Target: LAMA2; (-) strand; PAM type: YTN; PAM sequence: TTC
tatcctagtaaacttctaat

SEQ ID NO: 285350 - DNA, 20 bp, Artificial Sequence
  Description of Artificial Sequence: Synthetic oligonucleotide
  Target: LAMA2; (-) strand; PAM type: YTN; PAM sequence: TTT
ctatcctagtaaacttctaa

SEQ ID NO: 285351 - DNA, 20 bp, Artificial Sequence
  Description of Artificial Sequence: Synthetic oligonucleotide
  Target: LAMA2; (-) strand; PAM type: YTN; PAM sequence: CTG
tttctatcctagtaaacttc

SEQ ID NO: 285352 - DNA, 20 bp, Artificial Sequence
  Description of Artificial Sequence: Synthetic oligonucleotide
  Target: LAMA2; (-) strand; PAM type: YTN; PAM sequence: CTC
tgtttctatcctagtaaact

SEQ ID NO: 285353 - DNA, 20 bp, Artificial Sequence
  Description of Artificial Sequence: Synthetic oligonucleotide
  Target: LAMA2; (-) strand; PAM type: YTN; PAM sequence: CTA
gaaagctctgtttctatcct

SEQ ID NO: 285354 - DNA, 20 bp, Artificial Sequence
  Description of Artificial Sequence: Synthetic oligonucleotide
  Target: LAMA2; (-) strand; PAM type: YTN; PAM sequence: TTC
tagaaagctctgtttctatc

SEQ ID NO: 285355 - DNA, 20 bp, Artificial Sequence
  Description of Artificial Sequence: Synthetic oligonucleotide
  Target: LAMA2; (-) strand; PAM type: YTN; PAM sequence: CTT
ctagaaagctctgtttctat

SEQ ID NO: 285356 - DNA, 20 bp, Artificial Sequence
  Description of Artificial Sequence: Synthetic oligonucleotide
  Target: LAMA2; (-) strand; PAM type: YTN; PAM sequence: CTA
ccttctagaaagctctgttt

SEQ ID NO: 285357 - DNA, 20 bp, Artificial Sequence
  Description of Artificial Sequence: Synthetic oligonucleotide
  Target: LAMA2; (-) strand; PAM type: YTN; PAM sequence: TTA
gcatgctaccttctagaaag

SEQ ID NO: 285358 - DNA, 20 bp, Artificial Sequence
  Description of Artificial Sequence: Synthetic oligonucleotide
  Target: LAMA2; (-) strand; PAM type: YTN; PAM sequence: CTC
attagcatgctaccttctag

SEQ ID NO: 285359 - DNA, 20 bp, Artificial Sequence
  Description of Artificial Sequence: Synthetic oligonucleotide
  Target: LAMA2; (-) strand; PAM type: YTN; PAM sequence: CTG
gctcattagcatgctacctt

SEQ ID NO: 285360 - DNA, 20 bp, Artificial Sequence
  Description of Artificial Sequence: Synthetic oligonucleotide
  Target: LAMA2; (-) strand; PAM type: YTN; PAM sequence: CTG
ccctggctcattagcatgct

SEQ ID NO: 285361 - DNA, 20 bp, Artificial Sequence
  Description of Artificial Sequence: Synthetic oligonucleotide
  Target: LAMA2; (-) strand; PAM type: YTN; PAM sequence: CTC
tgccctggctcattagcatg

SEQ ID NO: 285362 - DNA, 20 bp, Artificial Sequence
  Description of Artificial Sequence: Synthetic oligonucleotide
  Target: LAMA2; (-) strand; PAM type: YTN; PAM sequence: TTA
gcaactctgccctggctcat

SEQ ID NO: 285363 - DNA, 20 bp, Artificial Sequence
  Description of Artificial Sequence: Synthetic oligonucleotide
  Target: LAMA2; (-) strand; PAM type: YTN; PAM sequence: CTT
agcaactctgccctggctca

SEQ ID NO: 285364 - DNA, 20 bp, Artificial Sequence
  Description of Artificial Sequence: Synthetic oligonucleotide
  Target: LAMA2; (-) strand; PAM type: YTN; PAM sequence: TTG
ccacttagcaactctgccct

SEQ ID NO: 285365 - DNA, 20 bp, Artificial Sequence
  Description of Artificial Sequence: Synthetic oligonucleotide
  Target: LAMA2; (-) strand; PAM type: YTN; PAM sequence: TTC
acgttgccacttagcaactc

SEQ ID NO: 285366 - DNA, 20 bp, Artificial Sequence
  Description of Artificial Sequence: Synthetic oligonucleotide
  Target: LAMA2; (-) strand; PAM type: YTN; PAM sequence: TTT
cacgttgccacttagcaact

SEQ ID NO: 285367 - DNA, 20 bp, Artificial Sequence
  Description of Artificial Sequence: Synthetic oligonucleotide
  Target: LAMA2; (-) strand; PAM type: YTN; PAM sequence: CTA
aagtttcacgttgccactta

SEQ ID NO: 285368 - DNA, 20 bp, Artificial Sequence
  Description of Artificial Sequence: Synthetic oligonucleotide
  Target: LAMA2; (-) strand; PAM type: YTN; PAM sequence: TTG
actaaagtttcacgttgcca

SEQ ID NO: 285369 - DNA, 20 bp, Artificial Sequence
  Description of Artificial Sequence: Synthetic oligonucleotide
  Target: LAMA2; (-) strand; PAM type: YTN; PAM sequence: TTT
gactaaagtttcacgttgcc

SEQ ID NO: 285370 - DNA, 20 bp, Artificial Sequence
  Description of Artificial Sequence: Synthetic oligonucleotide
  Target: LAMA2; (-) strand; PAM type: YTN; PAM sequence: CTT
tgactaaagtttcacgttgc

SEQ ID NO: 285371 - DNA, 20 bp, Artificial Sequence
  Description of Artificial Sequence: Synthetic oligonucleotide
  Target: LAMA2; (-) strand; PAM type: YTN; PAM sequence: TTC
ctttgactaaagtttcacgt

SEQ ID NO: 285372 - DNA, 20 bp, Artificial Sequence
  Description of Artificial Sequence: Synthetic oligonucleotide
  Target: LAMA2; (-) strand; PAM type: YTN; PAM sequence: CTT
cctttgactaaagtttcacg

SEQ ID NO: 285373 - DNA, 20 bp, Artificial Sequence
  Description of Artificial Sequence: Synthetic oligonucleotide
  Target: LAMA2; (-) strand; PAM type: YTN; PAM sequence: TTC
cttcctttgactaaagtttc

SEQ ID NO: 285374 - DNA, 20 bp, Artificial Sequence
  Description of Artificial Sequence: Synthetic oligonucleotide
  Target: LAMA2; (-) strand; PAM type: YTN; PAM sequence: CTT
ccttcctttgactaaagttt

SEQ ID NO: 285375 - DNA, 20 bp, Artificial Sequence
  Description of Artificial Sequence: Synthetic oligonucleotide
  Target: LAMA2; (-) strand; PAM type: YTN; PAM sequence: TTA
cttccttcctttgactaaag

SEQ ID NO: 285376 - DNA, 20 bp, Artificial Sequence
  Description of Artificial Sequence: Synthetic oligonucleotide
  Target: LAMA2; (-) strand; PAM type: YTN; PAM sequence: CTT
acttccttcctttgactaaa

SEQ ID NO: 285377 - DNA, 20 bp, Artificial Sequence
  Description of Artificial Sequence: Synthetic oligonucleotide
  Target: LAMA2; (-) strand; PAM type: YTN; PAM sequence: TTC
ccttacttccttcctttgac

SEQ ID NO: 285378 - DNA, 20 bp, Artificial Sequence
  Description of Artificial Sequence: Synthetic oligonucleotide
  Target: LAMA2; (-) strand; PAM type: YTN; PAM sequence: CTT
cccttacttccttcctttga

SEQ ID NO: 285379 - DNA, 20 bp, Artificial Sequence
  Description of Artificial Sequence: Synthetic oligonucleotide
  Target: LAMA2; (-) strand; PAM type: YTN; PAM sequence: CTC
cccttcccttacttccttcc

SEQ ID NO: 285380 - DNA, 20 bp, Artificial Sequence
  Description of Artificial Sequence: Synthetic oligonucleotide
  Target: LAMA2; (-) strand; PAM type: YTN; PAM sequence: CTC
ctccccttcccttacttcct

SEQ ID NO: 285381 - DNA, 20 bp, Artificial Sequence
  Description of Artificial Sequence: Synthetic oligonucleotide
  Target: LAMA2; (-) strand; PAM type: YTN; PAM sequence: CTC
tcctccccttcccttacttc

SEQ ID NO: 285382 - DNA, 20 bp, Artificial Sequence
  Description of Artificial Sequence: Synthetic oligonucleotide
  Target: LAMA2; (-) strand; PAM type: YTN; PAM sequence: CTC
ccctctcctccccttccctt

SEQ ID NO: 285383 - DNA, 20 bp, Artificial Sequence
  Description of Artificial Sequence: Synthetic oligonucleotide
  Target: LAMA2; (-) strand; PAM type: YTN; PAM sequence: CTC
ccctcccctctcctcccctt

SEQ ID NO: 285384 - DNA, 20 bp, Artificial Sequence
  Description of Artificial Sequence: Synthetic oligonucleotide
  Target: LAMA2; (-) strand; PAM type: YTN; PAM sequence: CTC
ccctcccctcccctctcctc

SEQ ID NO: 285385 - DNA, 20 bp, Artificial Sequence
  Description of Artificial Sequence: Synthetic oligonucleotide
  Target: LAMA2; (-) strand; PAM type: YTN; PAM sequence: CTC
ccctcccctcccctcccctc

SEQ ID NO: 285386 - DNA, 20 bp, Artificial Sequence
  Description of Artificial Sequence: Synthetic oligonucleotide
  Target: LAMA2; (-) strand; PAM type: YTN; PAM sequence: CTC
gcctcccctcccctcccctc

SEQ ID NO: 285387 - DNA, 20 bp, Artificial Sequence
  Description of Artificial Sequence: Synthetic oligonucleotide
  Target: LAMA2; (-) strand; PAM type: YTN; PAM sequence: CTC
ccctcgcctcccctcccctc

SEQ ID NO: 285388 - DNA, 20 bp, Artificial Sequence
  Description of Artificial Sequence: Synthetic oligonucleotide
  Target: LAMA2; (-) strand; PAM type: YTN; PAM sequence: CTC
ccctcccctcgcctcccctc

SEQ ID NO: 285389 - DNA, 20 bp, Artificial Sequence
  Description of Artificial Sequence: Synthetic oligonucleotide
  Target: LAMA2; (-) strand; PAM type: YTN; PAM sequence: CTC
ccctcccctcccctcgcctc

SEQ ID NO: 285390 - DNA, 20 bp, Artificial Sequence
  Description of Artificial Sequence: Synthetic oligonucleotide
  Target: LAMA2; (-) strand; PAM type: YTN; PAM sequence: CTC
ccctcccctcccctcccctc

SEQ ID NO: 285391 - DNA, 20 bp, Artificial Sequence
  Description of Artificial Sequence: Synthetic oligonucleotide
  Target: LAMA2; (-) strand; PAM type: YTN; PAM sequence: CTC
ccctcccctcccctcccctc

SEQ ID NO: 285392 - DNA, 20 bp, Artificial Sequence
  Description of Artificial Sequence: Synthetic oligonucleotide
  Target: LAMA2; (-) strand; PAM type: YTN; PAM sequence: CTC
ccctcccctcccctcccctc

SEQ ID NO: 285393 - DNA, 20 bp, Artificial Sequence
  Description of Artificial Sequence: Synthetic oligonucleotide
  Target: LAMA2; (-) strand; PAM type: YTN; PAM sequence: CTC
ccctcccctcccctcccctc

SEQ ID NO: 285394 - DNA, 20 bp, Artificial Sequence
  Description of Artificial Sequence: Synthetic oligonucleotide
  Target: LAMA2; (-) strand; PAM type: YTN; PAM sequence: CTA
ccacccctcccctcccctcc

SEQ ID NO: 285395 - DNA, 20 bp, Artificial Sequence
  Description of Artificial Sequence: Synthetic oligonucleotide
  Target: LAMA2; (-) strand; PAM type: YTN; PAM sequence: TTC
taccacccctcccctcccct

SEQ ID NO: 285396 - DNA, 20 bp, Artificial Sequence
  Description of Artificial Sequence: Synthetic oligonucleotide
  Target: LAMA2; (-) strand; PAM type: YTN; PAM sequence: TTT
ctaccacccctcccctcccc

SEQ ID NO: 285397 - DNA, 20 bp, Artificial Sequence
  Description of Artificial Sequence: Synthetic oligonucleotide
  Target: LAMA2; (-) strand; PAM type: YTN; PAM sequence: CTT
tctaccacccctcccctccc

SEQ ID NO: 285398 - DNA, 20 bp, Artificial Sequence
  Description of Artificial Sequence: Synthetic oligonucleotide
  Target: LAMA2; (-) strand; PAM type: YTN; PAM sequence: TTC
tttctaccacccctcccctc

SEQ ID NO: 285399 - DNA, 20 bp, Artificial Sequence
  Description of Artificial Sequence: Synthetic oligonucleotide
  Target: LAMA2; (-) strand; PAM type: YTN; PAM sequence: TTT
ctttctaccacccctcccct

SEQ ID NO: 285400 - DNA, 20 bp, Artificial Sequence
  Description of Artificial Sequence: Synthetic oligonucleotide
  Target: LAMA2; (-) strand; PAM type: YTN; PAM sequence: CTT
tctttctaccacccctcccc

SEQ ID NO: 285401 - DNA, 20 bp, Artificial Sequence
  Description of Artificial Sequence: Synthetic oligonucleotide
  Target: LAMA2; (-) strand; PAM type: YTN; PAM sequence: TTC
tttctttctaccacccctcc

SEQ ID NO: 285402 - DNA, 20 bp, Artificial Sequence
  Description of Artificial Sequence: Synthetic oligonucleotide
  Target: LAMA2; (-) strand; PAM type: YTN; PAM sequence: CTT
ctttctttctaccacccctc

SEQ ID NO: 285403 - DNA, 20 bp, Artificial Sequence
  Description of Artificial Sequence: Synthetic oligonucleotide
  Target: LAMA2; (-) strand; PAM type: YTN; PAM sequence: TTC
cttctttctttctaccaccc

SEQ ID NO: 285404 - DNA, 20 bp, Artificial Sequence
  Description of Artificial Sequence: Synthetic oligonucleotide
  Target: LAMA2; (-) strand; PAM type: YTN; PAM sequence: CTT
ccttctttctttctaccacc

SEQ ID NO: 285405 - DNA, 20 bp, Artificial Sequence
  Description of Artificial Sequence: Synthetic oligonucleotide
  Target: LAMA2; (-) strand; PAM type: YTN; PAM sequence: CTG
cccttccttctttctttcta

SEQ ID NO: 285406 - DNA, 20 bp, Artificial Sequence
  Description of Artificial Sequence: Synthetic oligonucleotide
  Target: LAMA2; (-) strand; PAM type: YTN; PAM sequence: TTC
aaacaagaaaactgcccttc

SEQ ID NO: 285407 - DNA, 20 bp, Artificial Sequence
  Description of Artificial Sequence: Synthetic oligonucleotide
  Target: LAMA2; (-) strand; PAM type: YTN; PAM sequence: TTG
ttcaaacaagaaaactgccc

SEQ ID NO: 285408 - DNA, 20 bp, Artificial Sequence
  Description of Artificial Sequence: Synthetic oligonucleotide
  Target: LAMA2; (-) strand; PAM type: YTN; PAM sequence: CTT
gttcaaacaagaaaactgcc

SEQ ID NO: 285409 - DNA, 20 bp, Artificial Sequence
  Description of Artificial Sequence: Synthetic oligonucleotide
  Target: LAMA2; (-) strand; PAM type: YTN; PAM sequence: TTC
ttgttcaaacaagaaaactg

SEQ ID NO: 285410 - DNA, 20 bp, Artificial Sequence
  Description of Artificial Sequence: Synthetic oligonucleotide
  Target: LAMA2; (-) strand; PAM type: YTN; PAM sequence: TTT
cttgttcaaacaagaaaact

SEQ ID NO: 285411 - DNA, 20 bp, Artificial Sequence
  Description of Artificial Sequence: Synthetic oligonucleotide
  Target: LAMA2; (-) strand; PAM type: YTN; PAM sequence: CTT
tcttgttcaaacaagaaaac

SEQ ID NO: 285412 - DNA, 20 bp, Artificial Sequence
  Description of Artificial Sequence: Synthetic oligonucleotide
  Target: LAMA2; (-) strand; PAM type: YTN; PAM sequence: TTC
aagcctttcttgttcaaaca

SEQ ID NO: 285413 - DNA, 20 bp, Artificial Sequence
  Description of Artificial Sequence: Synthetic oligonucleotide
  Target: LAMA2; (-) strand; PAM type: YTN; PAM sequence: TTG
agttcaagcctttcttgttc

SEQ ID NO: 285414 - DNA, 20 bp, Artificial Sequence
  Description of Artificial Sequence: Synthetic oligonucleotide
  Target: LAMA2; (-) strand; PAM type: YTN; PAM sequence: TTT
gagttcaagcctttcttgtt

SEQ ID NO: 285415 - DNA, 20 bp, Artificial Sequence
  Description of Artificial Sequence: Synthetic oligonucleotide
  Target: LAMA2; (-) strand; PAM type: YTN; PAM sequence: CTA
aaaaggtttgagttcaagcc

SEQ ID NO: 285416 - DNA, 20 bp, Artificial Sequence
  Description of Artificial Sequence: Synthetic oligonucleotide
  Target: LAMA2; (-) strand; PAM type: YTN; PAM sequence: CTG
aggtatctaaaaaggtttga

SEQ ID NO: 285417 - DNA, 20 bp, Artificial Sequence
  Description of Artificial Sequence: Synthetic oligonucleotide
  Target: LAMA2; (-) strand; PAM type: YTN; PAM sequence: TTG
acatggaaaactgaggtatc

SEQ ID NO: 285418 - DNA, 20 bp, Artificial Sequence
  Description of Artificial Sequence: Synthetic oligonucleotide
  Target: LAMA2; (-) strand; PAM type: YTN; PAM sequence: TTT
gacatggaaaactgaggtat

SEQ ID NO: 285419 - DNA, 20 bp, Artificial Sequence
  Description of Artificial Sequence: Synthetic oligonucleotide
  Target: LAMA2; (-) strand; PAM type: YTN; PAM sequence: TTT
tgacatggaaaactgaggta

SEQ ID NO: 285420 - DNA, 20 bp, Artificial Sequence
  Description of Artificial Sequence: Synthetic oligonucleotide
  Target: LAMA2; (-) strand; PAM type: YTN; PAM sequence: TTT
ttgacatggaaaactgaggt

SEQ ID NO: 285421 - DNA, 20 bp, Artificial Sequence
  Description of Artificial Sequence: Synthetic oligonucleotide
  Target: LAMA2; (-) strand; PAM type: YTN; PAM sequence: TTC
aaaaaacagaatttttgaca

SEQ ID NO: 285422 - DNA, 20 bp, Artificial Sequence
  Description of Artificial Sequence: Synthetic oligonucleotide
  Target: LAMA2; (-) strand; PAM type: YTN; PAM sequence: TTG
ttcaaaaaacagaatttttg

SEQ ID NO: 285423 - DNA, 20 bp, Artificial Sequence
  Description of Artificial Sequence: Synthetic oligonucleotide
  Target: LAMA2; (-) strand; PAM type: YTN; PAM sequence: TTC
caaagttgttcaaaaaacag

SEQ ID NO: 285424 - DNA, 20 bp, Artificial Sequence
  Description of Artificial Sequence: Synthetic oligonucleotide
  Target: LAMA2; (-) strand; PAM type: YTN; PAM sequence: CTA
gttccaaagttgttcaaaaa

SEQ ID NO: 285425 - DNA, 20 bp, Artificial Sequence
  Description of Artificial Sequence: Synthetic oligonucleotide
  Target: LAMA2; (-) strand; PAM type: YTN; PAM sequence: CTG
atcatcctagttccaaagtt

SEQ ID NO: 285426 - DNA, 20 bp, Artificial Sequence
  Description of Artificial Sequence: Synthetic oligonucleotide
  Target: LAMA2; (-) strand; PAM type: YTN; PAM sequence: TTC
tgatcatcctagttccaaag

SEQ ID NO: 285427 - DNA, 20 bp, Artificial Sequence
  Description of Artificial Sequence: Synthetic oligonucleotide
  Target: LAMA2; (-) strand; PAM type: YTN; PAM sequence: TTT
ctgatcatcctagttccaaa

SEQ ID NO: 285428 - DNA, 20 bp, Artificial Sequence
  Description of Artificial Sequence: Synthetic oligonucleotide
  Target: LAMA2; (-) strand; PAM type: YTN; PAM sequence: TTT
tctgatcatcctagttccaa

SEQ ID NO: 285429 - DNA, 20 bp, Artificial Sequence
  Description of Artificial Sequence: Synthetic oligonucleotide
  Target: LAMA2; (-) strand; PAM type: YTN; PAM sequence: CTT
ttctgatcatcctagttcca

SEQ ID NO: 285430 - DNA, 20 bp, Artificial Sequence
  Description of Artificial Sequence: Synthetic oligonucleotide
  Target: LAMA2; (-) strand; PAM type: YTN; PAM sequence: CTA
agaaagggcttttctgatca

SEQ ID NO: 285431 - DNA, 20 bp, Artificial Sequence
  Description of Artificial Sequence: Synthetic oligonucleotide
  Target: LAMA2; (-) strand; PAM type: YTN; PAM sequence: CTG
atgaactaagaaagggcttt

SEQ ID NO: 285432 - DNA, 20 bp, Artificial Sequence
  Description of Artificial Sequence: Synthetic oligonucleotide
  Target: LAMA2; (-) strand; PAM type: YTN; PAM sequence: CTA
aaaatataaactgatgaact

SEQ ID NO: 285433 - DNA, 20 bp, Artificial Sequence
  Description of Artificial Sequence: Synthetic oligonucleotide
  Target: LAMA2; (-) strand; PAM type: YTN; PAM sequence: CTA
ctaaaaatataaactgatga

SEQ ID NO: 285434 - DNA, 20 bp, Artificial Sequence
  Description of Artificial Sequence: Synthetic oligonucleotide
  Target: LAMA2; (-) strand; PAM type: YTN; PAM sequence: TTA
aatactactaaaaatataaa

SEQ ID NO: 285435 - DNA, 20 bp, Artificial Sequence
  Description of Artificial Sequence: Synthetic oligonucleotide
  Target: LAMA2; (-) strand; PAM type: YTN; PAM sequence: CTT
aaatactactaaaaatataa

SEQ ID NO: 285436 - DNA, 20 bp, Artificial Sequence
  Description of Artificial Sequence: Synthetic oligonucleotide
  Target: LAMA2; (-) strand; PAM type: YTN; PAM sequence: TTC
ttaaatactactaaaaatat

SEQ ID NO: 285437 - DNA, 20 bp, Artificial Sequence
  Description of Artificial Sequence: Synthetic oligonucleotide
  Target: LAMA2; (-) strand; PAM type: YTN; PAM sequence: CTG
gagcatcgtattcttaaata

SEQ ID NO: 285438 - DNA, 20 bp, Artificial Sequence
  Description of Artificial Sequence: Synthetic oligonucleotide
  Target: LAMA2; (-) strand; PAM type: YTN; PAM sequence: TTA
ctggagcatcgtattcttaa

SEQ ID NO: 285439 - DNA, 20 bp, Artificial Sequence
  Description of Artificial Sequence: Synthetic oligonucleotide
  Target: LAMA2; (-) strand; PAM type: YTN; PAM sequence: CTG
ttactggagcatcgtattct

SEQ ID NO: 285440 - DNA, 20 bp, Artificial Sequence
  Description of Artificial Sequence: Synthetic oligonucleotide
  Target: LAMA2; (-) strand; PAM type: YTN; PAM sequence: TTA
gatgtgaataaggaggaaaa

SEQ ID NO: 285441 - DNA, 20 bp, Artificial Sequence
  Description of Artificial Sequence: Synthetic oligonucleotide
  Target: LAMA2; (-) strand; PAM type: YTN; PAM sequence: TTA
gaagtgttagatgtgaataa

SEQ ID NO: 285442 - DNA, 20 bp, Artificial Sequence
  Description of Artificial Sequence: Synthetic oligonucleotide
  Target: LAMA2; (-) strand; PAM type: YTN; PAM sequence: TTT
agaagtgttagatgtgaata

SEQ ID NO: 285443 - DNA, 20 bp, Artificial Sequence
  Description of Artificial Sequence: Synthetic oligonucleotide
  Target: LAMA2; (-) strand; PAM type: YTN; PAM sequence: TTG
tttagaagtgttagatgtga

SEQ ID NO: 285444 - DNA, 20 bp, Artificial Sequence
  Description of Artificial Sequence: Synthetic oligonucleotide
  Target: LAMA2; (-) strand; PAM type: YTN; PAM sequence: TTG
gagttgtttagaagtgttag

SEQ ID NO: 285445 - DNA, 20 bp, Artificial Sequence
  Description of Artificial Sequence: Synthetic oligonucleotide
  Target: LAMA2; (-) strand; PAM type: YTN; PAM sequence: CTT
ggagttgtttagaagtgtta

SEQ ID NO: 285446 - DNA, 20 bp, Artificial Sequence
  Description of Artificial Sequence: Synthetic oligonucleotide
  Target: LAMA2; (-) strand; PAM type: YTN; PAM sequence: CTG
tcttggagttgtttagaagt

SEQ ID NO: 285447 - DNA, 20 bp, Artificial Sequence
  Description of Artificial Sequence: Synthetic oligonucleotide
  Target: LAMA2; (-) strand; PAM type: YTN; PAM sequence: TTA
ctgtcttggagttgtttaga

SEQ ID NO: 285448 - DNA, 20 bp, Artificial Sequence
  Description of Artificial Sequence: Synthetic oligonucleotide
  Target: LAMA2; (-) strand; PAM type: YTN; PAM sequence: CTT
actgtcttggagttgtttag

SEQ ID NO: 285449 - DNA, 20 bp, Artificial Sequence
  Description of Artificial Sequence: Synthetic oligonucleotide
  Target: LAMA2; (-) strand; PAM type: YTN; PAM sequence: TTG
aacttactgtcttggagttg

SEQ ID NO: 285450 - DNA, 20 bp, Artificial Sequence
  Description of Artificial Sequence: Synthetic oligonucleotide
  Target: LAMA2; (-) strand; PAM type: YTN; PAM sequence: CTT
gaacttactgtcttggagtt

SEQ ID NO: 285451 - DNA, 20 bp, Artificial Sequence
  Description of Artificial Sequence: Synthetic oligonucleotide
  Target: LAMA2; (-) strand; PAM type: YTN; PAM sequence: TTC
accttgaacttactgtcttg

SEQ ID NO: 285452 - DNA, 20 bp, Artificial Sequence
  Description of Artificial Sequence: Synthetic oligonucleotide
  Target: LAMA2; (-) strand; PAM type: YTN; PAM sequence: TTC
aatgttcaccttgaacttac

SEQ ID NO: 285453 - DNA, 20 bp, Artificial Sequence
  Description of Artificial Sequence: Synthetic oligonucleotide
  Target: LAMA2; (-) strand; PAM type: YTN; PAM sequence: TTT
caatgttcaccttgaactta

SEQ ID NO: 285454 - DNA, 20 bp, Artificial Sequence
  Description of Artificial Sequence: Synthetic oligonucleotide
  Target: LAMA2; (-) strand; PAM type: YTN; PAM sequence: TTT
tcaatgttcaccttgaactt

SEQ ID NO: 285455 - DNA, 20 bp, Artificial Sequence
  Description of Artificial Sequence: Synthetic oligonucleotide
  Target: LAMA2; (-) strand; PAM type: YTN; PAM sequence: CTT
ttcaatgttcaccttgaact

SEQ ID NO: 285456 - DNA, 20 bp, Artificial Sequence
  Description of Artificial Sequence: Synthetic oligonucleotide
  Target: LAMA2; (-) strand; PAM type: YTN; PAM sequence: TTC
cttttcaatgttcaccttga

SEQ ID NO: 285457 - DNA, 20 bp, Artificial Sequence
  Description of Artificial Sequence: Synthetic oligonucleotide
  Target: LAMA2; (-) strand; PAM type: YTN; PAM sequence: TTC
agtcagtcgtgaattccttt

SEQ ID NO: 285458 - DNA, 20 bp, Artificial Sequence
  Description of Artificial Sequence: Synthetic oligonucleotide
  Target: LAMA2; (-) strand; PAM type: YTN; PAM sequence: TTT
cagtcagtcgtgaattcctt

SEQ ID NO: 285459 - DNA, 20 bp, Artificial Sequence
  Description of Artificial Sequence: Synthetic oligonucleotide
  Target: LAMA2; (-) strand; PAM type: YTN; PAM sequence: TTT
tcagtcagtcgtgaattcct

SEQ ID NO: 285460 - DNA, 20 bp, Artificial Sequence
  Description of Artificial Sequence: Synthetic oligonucleotide
  Target: LAMA2; (-) strand; PAM type: YTN; PAM sequence: TTT
ttcagtcagtcgtgaattcc

SEQ ID NO: 285461 - DNA, 20 bp, Artificial Sequence
  Description of Artificial Sequence: Synthetic oligonucleotide
  Target: LAMA2; (-) strand; PAM type: YTN; PAM sequence: TTT
tttcagtcagtcgtgaattc

SEQ ID NO: 285462 - DNA, 20 bp, Artificial Sequence
  Description of Artificial Sequence: Synthetic oligonucleotide
  Target: LAMA2; (-) strand; PAM type: YTN; PAM sequence: TTT
ttttcagtcagtcgtgaatt

SEQ ID NO: 285463 - DNA, 20 bp, Artificial Sequence
  Description of Artificial Sequence: Synthetic oligonucleotide
  Target: LAMA2; (-) strand; PAM type: YTN; PAM sequence: TTT
tttttcagtcagtcgtgaat

SEQ ID NO: 285464 - DNA, 20 bp, Artificial Sequence
  Description of Artificial Sequence: Synthetic oligonucleotide
  Target: LAMA2; (-) strand; PAM type: YTN; PAM sequence: CTA
ggttttttttcagtcagtcg

SEQ ID NO: 285465 - DNA, 20 bp, Artificial Sequence
  Description of Artificial Sequence: Synthetic oligonucleotide
  Target: LAMA2; (-) strand; PAM type: YTN; PAM sequence: TTC
taggttttttttcagtcagt

SEQ ID NO: 285466 - DNA, 20 bp, Artificial Sequence
  Description of Artificial Sequence: Synthetic oligonucleotide
  Target: LAMA2; (-) strand; PAM type: YTN; PAM sequence: TTT
ctaggttttttttcagtcag

SEQ ID NO: 285467 - DNA, 20 bp, Artificial Sequence
  Description of Artificial Sequence: Synthetic oligonucleotide
  Target: LAMA2; (-) strand; PAM type: YTN; PAM sequence: TTT
tctaggttttttttcagtca

SEQ ID NO: 285468 - DNA, 20 bp, Artificial Sequence
  Description of Artificial Sequence: Synthetic oligonucleotide
  Target: LAMA2; (-) strand; PAM type: YTN; PAM sequence: TTG
ttttctaggttttttttcag

SEQ ID NO: 285469 - DNA, 20 bp, Artificial Sequence
  Description of Artificial Sequence: Synthetic oligonucleotide
  Target: LAMA2; (-) strand; PAM type: YTN; PAM sequence: TTG
ttgttttctaggtttttttt

SEQ ID NO: 285470 - DNA, 20 bp, Artificial Sequence
  Description of Artificial Sequence: Synthetic oligonucleotide
  Target: LAMA2; (-) strand; PAM type: YTN; PAM sequence: TTT
gttgttttctaggttttttt

SEQ ID NO: 285471 - DNA, 20 bp, Artificial Sequence
  Description of Artificial Sequence: Synthetic oligonucleotide
  Target: LAMA2; (-) strand; PAM type: YTN; PAM sequence: TTT
tgttgttttctaggtttttt

SEQ ID NO: 285472 - DNA, 20 bp, Artificial Sequence
  Description of Artificial Sequence: Synthetic oligonucleotide
  Target: LAMA2; (-) strand; PAM type: YTN; PAM sequence: TTT
ttgttgttttctaggttttt

SEQ ID NO: 285473 - DNA, 20 bp, Artificial Sequence
  Description of Artificial Sequence: Synthetic oligonucleotide
  Target: LAMA2; (-) strand; PAM type: YTN; PAM sequence: CTT
tttgttgttttctaggtttt

SEQ ID NO: 285474 - DNA, 20 bp, Artificial Sequence
  Description of Artificial Sequence: Synthetic oligonucleotide
  Target: LAMA2; (-) strand; PAM type: YTN; PAM sequence: CTA
atctttttgttgttttctag

SEQ ID NO: 285475 - DNA, 20 bp, Artificial Sequence
  Description of Artificial Sequence: Synthetic oligonucleotide
  Target: LAMA2; (-) strand; PAM type: YTN; PAM sequence: TTC
actaatctttttgttgtttt

SEQ ID NO: 285476 - DNA, 20 bp, Artificial Sequence
  Description of Artificial Sequence: Synthetic oligonucleotide
  Target: LAMA2; (-) strand; PAM type: YTN; PAM sequence: CTT
cactaatctttttgttgttt

SEQ ID NO: 285477 - DNA, 20 bp, Artificial Sequence
  Description of Artificial Sequence: Synthetic oligonucleotide
  Target: LAMA2; (-) strand; PAM type: YTN; PAM sequence: TTA
tgtaacatcatcttcactaa

SEQ ID NO: 285478 - DNA, 20 bp, Artificial Sequence
  Description of Artificial Sequence: Synthetic oligonucleotide
  Target: LAMA2; (-) strand; PAM type: YTN; PAM sequence: CTT
atgtaacatcatcttcacta

SEQ ID NO: 285479 - DNA, 20 bp, Artificial Sequence
  Description of Artificial Sequence: Synthetic oligonucleotide
  Target: LAMA2; (-) strand; PAM type: YTN; PAM sequence: CTG
atcttatgtaacatcatctt

SEQ ID NO: 285480 - DNA, 20 bp, Artificial Sequence
  Description of Artificial Sequence: Synthetic oligonucleotide
  Target: LAMA2; (-) strand; PAM type: YTN; PAM sequence: CTC
tgatcttatgtaacatcatc

SEQ ID NO: 285481 - DNA, 20 bp, Artificial Sequence
  Description of Artificial Sequence: Synthetic oligonucleotide
  Target: LAMA2; (-) strand; PAM type: YTN; PAM sequence: CTA
ctctgatcttatgtaacatc

SEQ ID NO: 285482 - DNA, 20 bp, Artificial Sequence
  Description of Artificial Sequence: Synthetic oligonucleotide
  Target: LAMA2; (-) strand; PAM type: YTN; PAM sequence: TTA
ctactctgatcttatgtaac

SEQ ID NO: 285483 - DNA, 20 bp, Artificial Sequence
  Description of Artificial Sequence: Synthetic oligonucleotide
  Target: LAMA2; (-) strand; PAM type: YTN; PAM sequence: TTT
actactctgatcttatgtaa

SEQ ID NO: 285484 - DNA, 20 bp, Artificial Sequence
  Description of Artificial Sequence: Synthetic oligonucleotide
  Target: LAMA2; (-) strand; PAM type: YTN; PAM sequence: CTG
atttactactctgatcttat

SEQ ID NO: 285485 - DNA, 20 bp, Artificial Sequence
  Description of Artificial Sequence: Synthetic oligonucleotide
  Target: LAMA2; (-) strand; PAM type: YTN; PAM sequence: TTC
actgatttactactctgatc

SEQ ID NO: 285486 - DNA, 20 bp, Artificial Sequence
  Description of Artificial Sequence: Synthetic oligonucleotide
  Target: LAMA2; (-) strand; PAM type: YTN; PAM sequence: TTT
cactgatttactactctgat

SEQ ID NO: 285487 - DNA, 20 bp, Artificial Sequence
  Description of Artificial Sequence: Synthetic oligonucleotide
  Target: LAMA2; (-) strand; PAM type: YTN; PAM sequence: TTT
tcactgatttactactctga

SEQ ID NO: 285488 - DNA, 20 bp, Artificial Sequence
  Description of Artificial Sequence: Synthetic oligonucleotide
  Target: LAMA2; (-) strand; PAM type: YTN; PAM sequence: CTT
ttcactgatttactactctg

SEQ ID NO: 285489 - DNA, 20 bp, Artificial Sequence
  Description of Artificial Sequence: Synthetic oligonucleotide
  Target: LAMA2; (-) strand; PAM type: YTN; PAM sequence: CTC
agatcttttcactgatttac

SEQ ID NO: 285490 - DNA, 20 bp, Artificial Sequence
  Description of Artificial Sequence: Synthetic oligonucleotide
  Target: LAMA2; (-) strand; PAM type: YTN; PAM sequence: TTC
tcagatcttttcactgattt

SEQ ID NO: 285491 - DNA, 20 bp, Artificial Sequence
  Description of Artificial Sequence: Synthetic oligonucleotide
  Target: LAMA2; (-) strand; PAM type: YTN; PAM sequence: TTT
ctcagatcttttcactgatt

SEQ ID NO: 285492 - DNA, 20 bp, Artificial Sequence
  Description of Artificial Sequence: Synthetic oligonucleotide
  Target: LAMA2; (-) strand; PAM type: YTN; PAM sequence: TTT
tctcagatcttttcactgat

SEQ ID NO: 285493 - DNA, 20 bp, Artificial Sequence
  Description of Artificial Sequence: Synthetic oligonucleotide
  Target: LAMA2; (-) strand; PAM type: YTN; PAM sequence: CTG
aatatatgttttctcagatc

SEQ ID NO: 285494 - DNA, 20 bp, Artificial Sequence
  Description of Artificial Sequence: Synthetic oligonucleotide
  Target: LAMA2; (-) strand; PAM type: YTN; PAM sequence: CTA
gctgaatatatgttttctca

SEQ ID NO: 285495 - DNA, 20 bp, Artificial Sequence
  Description of Artificial Sequence: Synthetic oligonucleotide
  Target: LAMA2; (-) strand; PAM type: YTN; PAM sequence: TTC
tagctgaatatatgttttct

SEQ ID NO: 285496 - DNA, 20 bp, Artificial Sequence
  Description of Artificial Sequence: Synthetic oligonucleotide
  Target: LAMA2; (-) strand; PAM type: YTN; PAM sequence: TTC
atattctagctgaatatatg

SEQ ID NO: 285497 - DNA, 20 bp, Artificial Sequence
  Description of Artificial Sequence: Synthetic oligonucleotide
  Target: LAMA2; (-) strand; PAM type: YTN; PAM sequence: TTT
catattctagctgaatatat

SEQ ID NO: 285498 - DNA, 20 bp, Artificial Sequence
  Description of Artificial Sequence: Synthetic oligonucleotide
  Target: LAMA2; (-) strand; PAM type: YTN; PAM sequence: CTT
tcatattctagctgaatata

SEQ ID NO: 285499 - DNA, 20 bp, Artificial Sequence
  Description of Artificial Sequence: Synthetic oligonucleotide
  Target: LAMA2; (-) strand; PAM type: YTN; PAM sequence: CTG
gctttcatattctagctgaa

SEQ ID NO: 285500 - DNA, 20 bp, Artificial Sequence
  Description of Artificial Sequence: Synthetic oligonucleotide
  Target: LAMA2; (-) strand; PAM type: YTN; PAM sequence: CTG
cctggctttcatattctagc

SEQ ID NO: 285501 - DNA, 20 bp, Artificial Sequence
  Description of Artificial Sequence: Synthetic oligonucleotide
  Target: LAMA2; (-) strand; PAM type: YTN; PAM sequence: TTA
catacataatgatcacatgt

SEQ ID NO: 285502 - DNA, 20 bp, Artificial Sequence
  Description of Artificial Sequence: Synthetic oligonucleotide
  Target: LAMA2; (-) strand; PAM type: YTN; PAM sequence: TTT
acatacataatgatcacatg

SEQ ID NO: 285503 - DNA, 20 bp, Artificial Sequence
  Description of Artificial Sequence: Synthetic oligonucleotide
  Target: LAMA2; (-) strand; PAM type: YTN; PAM sequence: CTT
tacatacataatgatcacat

SEQ ID NO: 285504 - DNA, 20 bp, Artificial Sequence
  Description of Artificial Sequence: Synthetic oligonucleotide
  Target: LAMA2; (-) strand; PAM type: YTN; PAM sequence: TTG
tgctttacatacataatgat

SEQ ID NO: 285505 - DNA, 20 bp, Artificial Sequence
  Description of Artificial Sequence: Synthetic oligonucleotide
  Target: LAMA2; (-) strand; PAM type: YTN; PAM sequence: CTT
gtgctttacatacataatga

SEQ ID NO: 285506 - DNA, 20 bp, Artificial Sequence
  Description of Artificial Sequence: Synthetic oligonucleotide
  Target: LAMA2; (-) strand; PAM type: YTN; PAM sequence: TTA
atcttgtgctttacatacat

SEQ ID NO: 285507 - DNA, 20 bp, Artificial Sequence
  Description of Artificial Sequence: Synthetic oligonucleotide
  Target: LAMA2; (-) strand; PAM type: YTN; PAM sequence: TTT
aatcttgtgctttacataca

SEQ ID NO: 285508 - DNA, 20 bp, Artificial Sequence
  Description of Artificial Sequence: Synthetic oligonucleotide
  Target: LAMA2; (-) strand; PAM type: YTN; PAM sequence: TTT
taatcttgtgctttacatac

SEQ ID NO: 285509 - DNA, 20 bp, Artificial Sequence
  Description of Artificial Sequence: Synthetic oligonucleotide
  Target: LAMA2; (-) strand; PAM type: YTN; PAM sequence: CTT
ttaatcttgtgctttacata

SEQ ID NO: 285510 - DNA, 20 bp, Artificial Sequence
  Description of Artificial Sequence: Synthetic oligonucleotide
  Target: LAMA2; (-) strand; PAM type: YTN; PAM sequence: TTC
ttttaatcttgtgctttaca

SEQ ID NO: 285511 - DNA, 20 bp, Artificial Sequence
  Description of Artificial Sequence: Synthetic oligonucleotide
  Target: LAMA2; (-) strand; PAM type: YTN; PAM sequence: TTT
cttttaatcttgtgctttac

SEQ ID NO: 285512 - DNA, 20 bp, Artificial Sequence
  Description of Artificial Sequence: Synthetic oligonucleotide
  Target: LAMA2; (-) strand; PAM type: YTN; PAM sequence: CTG
gtttcttttaatcttgtgct

SEQ ID NO: 285513 - DNA, 20 bp, Artificial Sequence
  Description of Artificial Sequence: Synthetic oligonucleotide
  Target: LAMA2; (-) strand; PAM type: YTN; PAM sequence: TTG
aagtaacatctggtttcttt

SEQ ID NO: 285514 - DNA, 20 bp, Artificial Sequence
  Description of Artificial Sequence: Synthetic oligonucleotide
  Target: LAMA2; (-) strand; PAM type: YTN; PAM sequence: CTT
gaagtaacatctggtttctt

SEQ ID NO: 285515 - DNA, 20 bp, Artificial Sequence
  Description of Artificial Sequence: Synthetic oligonucleotide
  Target: LAMA2; (-) strand; PAM type: YTN; PAM sequence: TTC
aaaccttgaagtaacatctg

SEQ ID NO: 285516 - DNA, 20 bp, Artificial Sequence
  Description of Artificial Sequence: Synthetic oligonucleotide
  Target: LAMA2; (-) strand; PAM type: YTN; PAM sequence: CTT
caaaccttgaagtaacatct

SEQ ID NO: 285517 - DNA, 20 bp, Artificial Sequence
  Description of Artificial Sequence: Synthetic oligonucleotide
  Target: LAMA2; (-) strand; PAM type: YTN; PAM sequence: TTA
cataaaacttcaaaccttga

SEQ ID NO: 285518 - DNA, 20 bp, Artificial Sequence
  Description of Artificial Sequence: Synthetic oligonucleotide
  Target: LAMA2; (-) strand; PAM type: YTN; PAM sequence: CTT
acataaaacttcaaaccttg

SEQ ID NO: 285519 - DNA, 20 bp, Artificial Sequence
  Description of Artificial Sequence: Synthetic oligonucleotide
  Target: LAMA2; (-) strand; PAM type: YTN; PAM sequence: CTA
aatcttacataaaacttcaa

SEQ ID NO: 285520 - DNA, 20 bp, Artificial Sequence
  Description of Artificial Sequence: Synthetic oligonucleotide
  Target: LAMA2; (-) strand; PAM type: YTN; PAM sequence: TTG
gctaaatcttacataaaact

SEQ ID NO: 285521 - DNA, 20 bp, Artificial Sequence
  Description of Artificial Sequence: Synthetic oligonucleotide
  Target: LAMA2; (-) strand; PAM type: YTN; PAM sequence: TTC
catgttggctaaatcttaca

SEQ ID NO: 285522 - DNA, 20 bp, Artificial Sequence
  Description of Artificial Sequence: Synthetic oligonucleotide
  Target: LAMA2; (-) strand; PAM type: YTN; PAM sequence: TTT
ccatgttggctaaatcttac

SEQ ID NO: 285523 - DNA, 20 bp, Artificial Sequence
  Description of Artificial Sequence: Synthetic oligonucleotide
  Target: LAMA2; (-) strand; PAM type: YTN; PAM sequence: TTT
tccatgttggctaaatctta

SEQ ID NO: 285524 - DNA, 20 bp, Artificial Sequence
  Description of Artificial Sequence: Synthetic oligonucleotide
  Target: LAMA2; (-) strand; PAM type: YTN; PAM sequence: TTT
ttccatgttggctaaatctt

SEQ ID NO: 285525 - DNA, 20 bp, Artificial Sequence
  Description of Artificial Sequence: Synthetic oligonucleotide
  Target: LAMA2; (-) strand; PAM type: YTN; PAM sequence: CTT
tttccatgttggctaaatct

SEQ ID NO: 285526 - DNA, 20 bp, Artificial Sequence
  Description of Artificial Sequence: Synthetic oligonucleotide
  Target: LAMA2; (-) strand; PAM type: YTN; PAM sequence: CTG
aacatagtagaggctttttc

SEQ ID NO: 285527 - DNA, 20 bp, Artificial Sequence
  Description of Artificial Sequence: Synthetic oligonucleotide
  Target: LAMA2; (-) strand; PAM type: YTN; PAM sequence: TTA
cggaaagtaacactgaacat

SEQ ID NO: 285528 - DNA, 20 bp, Artificial Sequence
  Description of Artificial Sequence: Synthetic oligonucleotide
  Target: LAMA2; (-) strand; PAM type: YTN; PAM sequence: CTT
acggaaagtaacactgaaca

SEQ ID NO: 285529 - DNA, 20 bp, Artificial Sequence
  Description of Artificial Sequence: Synthetic oligonucleotide
  Target: LAMA2; (-) strand; PAM type: YTN; PAM sequence: TTG
tgtaccttacggaaagtaac

SEQ ID NO: 285530 - DNA, 20 bp, Artificial Sequence
  Description of Artificial Sequence: Synthetic oligonucleotide
  Target: LAMA2; (-) strand; PAM type: YTN; PAM sequence: TTT
gtgtaccttacggaaagtaa

SEQ ID NO: 285531 - DNA, 20 bp, Artificial Sequence
  Description of Artificial Sequence: Synthetic oligonucleotide
  Target: LAMA2; (-) strand; PAM type: YTN; PAM sequence: CTT
tgtgtaccttacggaaagta

SEQ ID NO: 285532 - DNA, 20 bp, Artificial Sequence
  Description of Artificial Sequence: Synthetic oligonucleotide
  Target: LAMA2; (-) strand; PAM type: YTN; PAM sequence: TTC
gtctttgtgtaccttacgga

SEQ ID NO: 285533 - DNA, 20 bp, Artificial Sequence
  Description of Artificial Sequence: Synthetic oligonucleotide
  Target: LAMA2; (-) strand; PAM type: YTN; PAM sequence: TTA
ttcgtctttgtgtaccttac

SEQ ID NO: 285534 - DNA, 20 bp, Artificial Sequence
  Description of Artificial Sequence: Synthetic oligonucleotide
  Target: LAMA2; (-) strand; PAM type: YTN; PAM sequence: TTT
attcgtctttgtgtacctta

SEQ ID NO: 285535 - DNA, 20 bp, Artificial Sequence
  Description of Artificial Sequence: Synthetic oligonucleotide
  Target: LAMA2; (-) strand; PAM type: YTN; PAM sequence: CTT
tattcgtctttgtgtacctt

SEQ ID NO: 285536 - DNA, 20 bp, Artificial Sequence
  Description of Artificial Sequence: Synthetic oligonucleotide
  Target: LAMA2; (-) strand; PAM type: YTN; PAM sequence: CTC
ctttattcgtctttgtgtac

SEQ ID NO: 285537 - DNA, 20 bp, Artificial Sequence
  Description of Artificial Sequence: Synthetic oligonucleotide
  Target: LAMA2; (-) strand; PAM type: YTN; PAM sequence: TTG
tgagtgaaagaactccttta

SEQ ID NO: 285538 - DNA, 20 bp, Artificial Sequence
  Description of Artificial Sequence: Synthetic oligonucleotide
  Target: LAMA2; (-) strand; PAM type: YTN; PAM sequence: TTT
gtgagtgaaagaactccttt

SEQ ID NO: 285539 - DNA, 20 bp, Artificial Sequence
  Description of Artificial Sequence: Synthetic oligonucleotide
  Target: LAMA2; (-) strand; PAM type: YTN; PAM sequence: CTT
tgtgagtgaaagaactcctt

SEQ ID NO: 285540 - DNA, 20 bp, Artificial Sequence
  Description of Artificial Sequence: Synthetic oligonucleotide
  Target: LAMA2; (-) strand; PAM type: YTN; PAM sequence: TTA
taaactttgtgagtgaaaga

SEQ ID NO: 285541 - DNA, 20 bp, Artificial Sequence
  Description of Artificial Sequence: Synthetic oligonucleotide
  Target: LAMA2; (-) strand; PAM type: YTN; PAM sequence: TTT
ataaactttgtgagtgaaag

SEQ ID NO: 285542 - DNA, 20 bp, Artificial Sequence
  Description of Artificial Sequence: Synthetic oligonucleotide
  Target: LAMA2; (-) strand; PAM type: YTN; PAM sequence: TTT
tataaactttgtgagtgaaa

SEQ ID NO: 285543 - DNA, 20 bp, Artificial Sequence
  Description of Artificial Sequence: Synthetic oligonucleotide
  Target: LAMA2; (-) strand; PAM type: YTN; PAM sequence: CTA
ttttataaactttgtgagtg

SEQ ID NO: 285544 - DNA, 20 bp, Artificial Sequence
  Description of Artificial Sequence: Synthetic oligonucleotide
  Target: LAMA2; (-) strand; PAM type: YTN; PAM sequence: CTA
ctattttataaactttgtga

SEQ ID NO: 285545 - DNA, 20 bp, Artificial Sequence
  Description of Artificial Sequence: Synthetic oligonucleotide
  Target: LAMA2; (-) strand; PAM type: YTN; PAM sequence: TTC
cctactattttataaacttt

SEQ ID NO: 285546 - DNA, 20 bp, Artificial Sequence
  Description of Artificial Sequence: Synthetic oligonucleotide
  Target: LAMA2; (-) strand; PAM type: YTN; PAM sequence: TTT
ccctactattttataaactt

SEQ ID NO: 285547 - DNA, 20 bp, Artificial Sequence
  Description of Artificial Sequence: Synthetic oligonucleotide
  Target: LAMA2; (-) strand; PAM type: YTN; PAM sequence: TTT
tccctactattttataaact

SEQ ID NO: 285548 - DNA, 20 bp, Artificial Sequence
  Description of Artificial Sequence: Synthetic oligonucleotide
  Target: LAMA2; (-) strand; PAM type: YTN; PAM sequence: TTA
ttttccctactattttataa

SEQ ID NO: 285549 - DNA, 20 bp, Artificial Sequence
  Description of Artificial Sequence: Synthetic oligonucleotide
  Target: LAMA2; (-) strand; PAM type: YTN; PAM sequence: TTT
attttccctactattttata

SEQ ID NO: 285550 - DNA, 20 bp, Artificial Sequence
  Description of Artificial Sequence: Synthetic oligonucleotide
  Target: LAMA2; (-) strand; PAM type: YTN; PAM sequence: TTT
tattttccctactattttat

SEQ ID NO: 285551 - DNA, 20 bp, Artificial Sequence
  Description of Artificial Sequence: Synthetic oligonucleotide
  Target: LAMA2; (-) strand; PAM type: YTN; PAM sequence: TTG
tgtgacaaggtacgtgtaca

SEQ ID NO: 285552 - DNA, 20 bp, Artificial Sequence
  Description of Artificial Sequence: Synthetic oligonucleotide
  Target: LAMA2; (-) strand; PAM type: YTN; PAM sequence: CTG
cattgtgtgacaaggtacgt

SEQ ID NO: 285553 - DNA, 20 bp, Artificial Sequence
  Description of Artificial Sequence: Synthetic oligonucleotide
  Target: LAMA2; (-) strand; PAM type: YTN; PAM sequence: TTC
tgcattgtgtgacaaggtac

SEQ ID NO: 285554 - DNA, 20 bp, Artificial Sequence
  Description of Artificial Sequence: Synthetic oligonucleotide
  Target: LAMA2; (-) strand; PAM type: YTN; PAM sequence: CTA
taatgtggcataacattctg

SEQ ID NO: 285555 - DNA, 20 bp, Artificial Sequence
  Description of Artificial Sequence: Synthetic oligonucleotide
  Target: LAMA2; (-) strand; PAM type: YTN; PAM sequence: TTC
tataatgtggcataacattc

SEQ ID NO: 285556 - DNA, 20 bp, Artificial Sequence
  Description of Artificial Sequence: Synthetic oligonucleotide
  Target: LAMA2; (-) strand; PAM type: YTN; PAM sequence: CTT
ctataatgtggcataacatt

SEQ ID NO: 285557 - DNA, 20 bp, Artificial Sequence
  Description of Artificial Sequence: Synthetic oligonucleotide
  Target: LAMA2; (-) strand; PAM type: YTN; PAM sequence: CTC
acggcttctataatgtggca

SEQ ID NO: 285558 - DNA, 20 bp, Artificial Sequence
  Description of Artificial Sequence: Synthetic oligonucleotide
  Target: LAMA2; (-) strand; PAM type: YTN; PAM sequence: TTC
tcacggcttctataatgtgg

SEQ ID NO: 285559 - DNA, 20 bp, Artificial Sequence
  Description of Artificial Sequence: Synthetic oligonucleotide
  Target: LAMA2; (-) strand; PAM type: YTN; PAM sequence: CTT
ctcacggcttctataatgtg

SEQ ID NO: 285560 - DNA, 20 bp, Artificial Sequence
  Description of Artificial Sequence: Synthetic oligonucleotide
  Target: LAMA2; (-) strand; PAM type: YTN; PAM sequence: TTA
tgtcacttctcacggcttct

SEQ ID NO: 285561 - DNA, 20 bp, Artificial Sequence
  Description of Artificial Sequence: Synthetic oligonucleotide
  Target: LAMA2; (-) strand; PAM type: YTN; PAM sequence: TTT
atgtcacttctcacggcttc

SEQ ID NO: 285562 - DNA, 20 bp, Artificial Sequence
  Description of Artificial Sequence: Synthetic oligonucleotide
  Target: LAMA2; (-) strand; PAM type: YTN; PAM sequence: TTT
tatgtcacttctcacggctt

SEQ ID NO: 285563 - DNA, 20 bp, Artificial Sequence
  Description of Artificial Sequence: Synthetic oligonucleotide
  Target: LAMA2; (-) strand; PAM type: YTN; PAM sequence: CTT
ttatgtcacttctcacggct

SEQ ID NO: 285564 - DNA, 20 bp, Artificial Sequence
  Description of Artificial Sequence: Synthetic oligonucleotide
  Target: LAMA2; (-) strand; PAM type: YTN; PAM sequence: CTA
gaacttttatgtcacttctc

SEQ ID NO: 285565 - DNA, 20 bp, Artificial Sequence
  Description of Artificial Sequence: Synthetic oligonucleotide
  Target: LAMA2; (-) strand; PAM type: YTN; PAM sequence: TTC
tagaacttttatgtcacttc

SEQ ID NO: 285566 - DNA, 20 bp, Artificial Sequence
  Description of Artificial Sequence: Synthetic oligonucleotide
  Target: LAMA2; (-) strand; PAM type: YTN; PAM sequence: TTT
ctagaacttttatgtcactt

SEQ ID NO: 285567 - DNA, 20 bp, Artificial Sequence
  Description of Artificial Sequence: Synthetic oligonucleotide
  Target: LAMA2; (-) strand; PAM type: YTN; PAM sequence: CTT
tctagaacttttatgtcact

SEQ ID NO: 285568 - DNA, 20 bp, Artificial Sequence
  Description of Artificial Sequence: Synthetic oligonucleotide
  Target: LAMA2; (-) strand; PAM type: YTN; PAM sequence: TTC
tttctagaacttttatgtca

SEQ ID NO: 285569 - DNA, 20 bp, Artificial Sequence
  Description of Artificial Sequence: Synthetic oligonucleotide
  Target: LAMA2; (-) strand; PAM type: YTN; PAM sequence: TTG
ttctttctagaacttttatg

SEQ ID NO: 285570 - DNA, 20 bp, Artificial Sequence
  Description of Artificial Sequence: Synthetic oligonucleotide
  Target: LAMA2; (-) strand; PAM type: YTN; PAM sequence: CTA
gaggtgattgttctttctag

SEQ ID NO: 285571 - DNA, 20 bp, Artificial Sequence
  Description of Artificial Sequence: Synthetic oligonucleotide
  Target: LAMA2; (-) strand; PAM type: YTN; PAM sequence: CTA
ctagaggtgattgttctttc

SEQ ID NO: 285572 - DNA, 20 bp, Artificial Sequence
  Description of Artificial Sequence: Synthetic oligonucleotide
  Target: LAMA2; (-) strand; PAM type: YTN; PAM sequence: TTC
aggccctactagaggtgatt

SEQ ID NO: 285573 - DNA, 20 bp, Artificial Sequence
  Description of Artificial Sequence: Synthetic oligonucleotide
  Target: LAMA2; (-) strand; PAM type: YTN; PAM sequence: CTT
caggccctactagaggtgat

SEQ ID NO: 285574 - DNA, 20 bp, Artificial Sequence
  Description of Artificial Sequence: Synthetic oligonucleotide
  Target: LAMA2; (-) strand; PAM type: YTN; PAM sequence: TTC
aggaaatcttcaggccctac

SEQ ID NO: 285575 - DNA, 20 bp, Artificial Sequence
  Description of Artificial Sequence: Synthetic oligonucleotide
  Target: LAMA2; (-) strand; PAM type: YTN; PAM sequence: CTT
caggaaatcttcaggcccta

SEQ ID NO: 285576 - DNA, 20 bp, Artificial Sequence
  Description of Artificial Sequence: Synthetic oligonucleotide
  Target: LAMA2; (-) strand; PAM type: YTN; PAM sequence: TTC
ccttcaggaaatcttcaggc

SEQ ID NO: 285577 - DNA, 20 bp, Artificial Sequence
  Description of Artificial Sequence: Synthetic oligonucleotide
  Target: LAMA2; (-) strand; PAM type: YTN; PAM sequence: CTT
cccttcaggaaatcttcagg

SEQ ID NO: 285578 - DNA, 20 bp, Artificial Sequence
  Description of Artificial Sequence: Synthetic oligonucleotide
  Target: LAMA2; (-) strand; PAM type: YTN; PAM sequence: CTC
aaatccttcccttcaggaaa

SEQ ID NO: 285579 - DNA, 20 bp, Artificial Sequence
  Description of Artificial Sequence: Synthetic oligonucleotide
  Target: LAMA2; (-) strand; PAM type: YTN; PAM sequence: CTG
gctcaaatccttcccttcag

SEQ ID NO: 285580 - DNA, 20 bp, Artificial Sequence
  Description of Artificial Sequence: Synthetic oligonucleotide
  Target: LAMA2; (-) strand; PAM type: YTN; PAM sequence: CTC
aatgcctggctcaaatcctt

SEQ ID NO: 285581 - DNA, 20 bp, Artificial Sequence
  Description of Artificial Sequence: Synthetic oligonucleotide
  Target: LAMA2; (-) strand; PAM type: YTN; PAM sequence: CTA
tcccacctcaatgcctggct

SEQ ID NO: 285582 - DNA, 20 bp, Artificial Sequence
  Description of Artificial Sequence: Synthetic oligonucleotide
  Target: LAMA2; (-) strand; PAM type: YTN; PAM sequence: CTC
cccagcactatcccacctca

SEQ ID NO: 285583 - DNA, 20 bp, Artificial Sequence
  Description of Artificial Sequence: Synthetic oligonucleotide
  Target: LAMA2; (-) strand; PAM type: YTN; PAM sequence: CTC
cacccccaactccccagcac

SEQ ID NO: 285584 - DNA, 20 bp, Artificial Sequence
  Description of Artificial Sequence: Synthetic oligonucleotide
  Target: LAMA2; (-) strand; PAM type: YTN; PAM sequence: CTG
actccacccccaactcccca

SEQ ID NO: 285585 - DNA, 20 bp, Artificial Sequence
  Description of Artificial Sequence: Synthetic oligonucleotide
  Target: LAMA2; (-) strand; PAM type: YTN; PAM sequence: TTA
cctgactccacccccaactc

SEQ ID NO: 285586 - DNA, 20 bp, Artificial Sequence
  Description of Artificial Sequence: Synthetic oligonucleotide
  Target: LAMA2; (-) strand; PAM type: YTN; PAM sequence: CTG
ttacctgactccacccccaa

SEQ ID NO: 285587 - DNA, 20 bp, Artificial Sequence
  Description of Artificial Sequence: Synthetic oligonucleotide
  Target: LAMA2; (-) strand; PAM type: YTN; PAM sequence: CTC
cctgttacctgactccaccc

SEQ ID NO: 285588 - DNA, 20 bp, Artificial Sequence
  Description of Artificial Sequence: Synthetic oligonucleotide
  Target: LAMA2; (-) strand; PAM type: YTN; PAM sequence: CTC
tccctgttacctgactccac

SEQ ID NO: 285589 - DNA, 20 bp, Artificial Sequence
  Description of Artificial Sequence: Synthetic oligonucleotide
  Target: LAMA2; (-) strand; PAM type: YTN; PAM sequence: CTC
agaatactctccctgttacc

SEQ ID NO: 285590 - DNA, 20 bp, Artificial Sequence
  Description of Artificial Sequence: Synthetic oligonucleotide
  Target: LAMA2; (-) strand; PAM type: YTN; PAM sequence: TTC
tcagaatactctccctgtta

SEQ ID NO: 285591 - DNA, 20 bp, Artificial Sequence
  Description of Artificial Sequence: Synthetic oligonucleotide
  Target: LAMA2; (-) strand; PAM type: YTN; PAM sequence: CTT
ctcagaatactctccctgtt

SEQ ID NO: 285592 - DNA, 20 bp, Artificial Sequence
  Description of Artificial Sequence: Synthetic oligonucleotide
  Target: LAMA2; (-) strand; PAM type: YTN; PAM sequence: CTC
ttctcagaatactctccctg

SEQ ID NO: 285593 - DNA, 20 bp, Artificial Sequence
  Description of Artificial Sequence: Synthetic oligonucleotide
  Target: LAMA2; (-) strand; PAM type: YTN; PAM sequence: TTC
cctcttctcagaatactctc

SEQ ID NO: 285594 - DNA, 20 bp, Artificial Sequence
  Description of Artificial Sequence: Synthetic oligonucleotide
  Target: LAMA2; (-) strand; PAM type: YTN; PAM sequence: TTA
agtcattccctcttctcaga

SEQ ID NO: 285595 - DNA, 20 bp, Artificial Sequence
  Description of Artificial Sequence: Synthetic oligonucleotide
  Target: LAMA2; (-) strand; PAM type: YTN; PAM sequence: TTT
aagtcattccctcttctcag

SEQ ID NO: 285596 - DNA, 20 bp, Artificial Sequence
  Description of Artificial Sequence: Synthetic oligonucleotide
  Target: LAMA2; (-) strand; PAM type: YTN; PAM sequence: TTG
gtttaagtcattccctcttc

SEQ ID NO: 285597 - DNA, 20 bp, Artificial Sequence
  Description of Artificial Sequence: Synthetic oligonucleotide
  Target: LAMA2; (-) strand; PAM type: YTN; PAM sequence: CTT
ggtttaagtcattccctctt

SEQ ID NO: 285598 - DNA, 20 bp, Artificial Sequence
  Description of Artificial Sequence: Synthetic oligonucleotide
  Target: LAMA2; (-) strand; PAM type: YTN; PAM sequence: CTG
ccttggtttaagtcattccc

SEQ ID NO: 285599 - DNA, 20 bp, Artificial Sequence
  Description of Artificial Sequence: Synthetic oligonucleotide
  Target: LAMA2; (-) strand; PAM type: YTN; PAM sequence: CTC
ccactgccttggtttaagtc

SEQ ID NO: 285600 - DNA, 20 bp, Artificial Sequence
  Description of Artificial Sequence: Synthetic oligonucleotide
  Target: LAMA2; (-) strand; PAM type: YTN; PAM sequence: TTC
tcccactgccttggtttaag

SEQ ID NO: 285601 - DNA, 20 bp, Artificial Sequence
  Description of Artificial Sequence: Synthetic oligonucleotide
  Target: LAMA2; (-) strand; PAM type: YTN; PAM sequence: CTT
ctcccactgccttggtttaa

SEQ ID NO: 285602 - DNA, 20 bp, Artificial Sequence
  Description of Artificial Sequence: Synthetic oligonucleotide
  Target: LAMA2; (-) strand; PAM type: YTN; PAM sequence: TTC
cttctcccactgccttggtt

SEQ ID NO: 285603 - DNA, 20 bp, Artificial Sequence
  Description of Artificial Sequence: Synthetic oligonucleotide
  Target: LAMA2; (-) strand; PAM type: YTN; PAM sequence: CTT
ccttctcccactgccttggt

SEQ ID NO: 285604 - DNA, 20 bp, Artificial Sequence
  Description of Artificial Sequence: Synthetic oligonucleotide
  Target: LAMA2; (-) strand; PAM type: YTN; PAM sequence: CTA
aaacttccttctcccactgc

SEQ ID NO: 285605 - DNA, 20 bp, Artificial Sequence
  Description of Artificial Sequence: Synthetic oligonucleotide
  Target: LAMA2; (-) strand; PAM type: YTN; PAM sequence: CTA
aatggaccctaaaacttcct

SEQ ID NO: 285606 - DNA, 20 bp, Artificial Sequence
  Description of Artificial Sequence: Synthetic oligonucleotide
  Target: LAMA2; (-) strand; PAM type: YTN; PAM sequence: TTC
ctaaatggaccctaaaactt

SEQ ID NO: 285607 - DNA, 20 bp, Artificial Sequence
  Description of Artificial Sequence: Synthetic oligonucleotide
  Target: LAMA2; (-) strand; PAM type: YTN; PAM sequence: TTT
cctaaatggaccctaaaact

SEQ ID NO: 285608 - DNA, 20 bp, Artificial Sequence
  Description of Artificial Sequence: Synthetic oligonucleotide
  Target: LAMA2; (-) strand; PAM type: YTN; PAM sequence: TTT
tcctaaatggaccctaaaac

SEQ ID NO: 285609 - DNA, 20 bp, Artificial Sequence
  Description of Artificial Sequence: Synthetic oligonucleotide
  Target: LAMA2; (-) strand; PAM type: YTN; PAM sequence: TTT
ttcctaaatggaccctaaaa

SEQ ID NO: 285610 - DNA, 20 bp, Artificial Sequence
  Description of Artificial Sequence: Synthetic oligonucleotide
  Target: LAMA2; (-) strand; PAM type: YTN; PAM sequence: CTT
tttcctaaatggaccctaaa

SEQ ID NO: 285611 - DNA, 20 bp, Artificial Sequence
  Description of Artificial Sequence: Synthetic oligonucleotide
  Target: LAMA2; (-) strand; PAM type: YTN; PAM sequence: TTC
tttttcctaaatggacccta

SEQ ID NO: 285612 - DNA, 20 bp, Artificial Sequence
  Description of Artificial Sequence: Synthetic oligonucleotide
  Target: LAMA2; (-) strand; PAM type: YTN; PAM sequence: CTT
ctttttcctaaatggaccct

SEQ ID NO: 285613 - DNA, 20 bp, Artificial Sequence
  Description of Artificial Sequence: Synthetic oligonucleotide
  Target: LAMA2; (-) strand; PAM type: YTN; PAM sequence: CTG
gacttctttttcctaaatgg

SEQ ID NO: 285614 - DNA, 20 bp, Artificial Sequence
  Description of Artificial Sequence: Synthetic oligonucleotide
  Target: LAMA2; (-) strand; PAM type: YTN; PAM sequence: CTG
ggcaaactggacttcttttt

SEQ ID NO: 285615 - DNA, 20 bp, Artificial Sequence
  Description of Artificial Sequence: Synthetic oligonucleotide
  Target: LAMA2; (-) strand; PAM type: YTN; PAM sequence: CTC
tgggcaaactggacttcttt

SEQ ID NO: 285616 - DNA, 20 bp, Artificial Sequence
  Description of Artificial Sequence: Synthetic oligonucleotide
  Target: LAMA2; (-) strand; PAM type: YTN; PAM sequence: TTA
ctctgggcaaactggacttc

SEQ ID NO: 285617 - DNA, 20 bp, Artificial Sequence
  Description of Artificial Sequence: Synthetic oligonucleotide
  Target: LAMA2; (-) strand; PAM type: YTN; PAM sequence: TTA
tcaattactctgggcaaact

SEQ ID NO: 285618 - DNA, 20 bp, Artificial Sequence
  Description of Artificial Sequence: Synthetic oligonucleotide
  Target: LAMA2; (-) strand; PAM type: YTN; PAM sequence: TTT
atcaattactctgggcaaac

SEQ ID NO: 285619 - DNA, 20 bp, Artificial Sequence
  Description of Artificial Sequence: Synthetic oligonucleotide
  Target: LAMA2; (-) strand; PAM type: YTN; PAM sequence: CTT
tatcaattactctgggcaaa

SEQ ID NO: 285620 - DNA, 20 bp, Artificial Sequence
  Description of Artificial Sequence: Synthetic oligonucleotide
  Target: LAMA2; (-) strand; PAM type: YTN; PAM sequence: TTC
ctttatcaattactctgggc

SEQ ID NO: 285621 - DNA, 20 bp, Artificial Sequence
  Description of Artificial Sequence: Synthetic oligonucleotide
  Target: LAMA2; (-) strand; PAM type: YTN; PAM sequence: TTT
cctttatcaattactctggg

SEQ ID NO: 285622 - DNA, 20 bp, Artificial Sequence
  Description of Artificial Sequence: Synthetic oligonucleotide
  Target: LAMA2; (-) strand; PAM type: YTN; PAM sequence: TTA
tgtgtttcctttatcaatta

SEQ ID NO: 285623 - DNA, 20 bp, Artificial Sequence
  Description of Artificial Sequence: Synthetic oligonucleotide
  Target: LAMA2; (-) strand; PAM type: YTN; PAM sequence: CTG
gttatgtgtttcctttatca

SEQ ID NO: 285624 - DNA, 20 bp, Artificial Sequence
  Description of Artificial Sequence: Synthetic oligonucleotide
  Target: LAMA2; (-) strand; PAM type: YTN; PAM sequence: TTC
tggttatgtgtttcctttat

SEQ ID NO: 285625 - DNA, 20 bp, Artificial Sequence
  Description of Artificial Sequence: Synthetic oligonucleotide
  Target: LAMA2; (-) strand; PAM type: YTN; PAM sequence: TTT
ctggttatgtgtttccttta

SEQ ID NO: 285626 - DNA, 20 bp, Artificial Sequence
  Description of Artificial Sequence: Synthetic oligonucleotide
  Target: LAMA2; (-) strand; PAM type: YTN; PAM sequence: CTT
tctggttatgtgtttccttt

SEQ ID NO: 285627 - DNA, 20 bp, Artificial Sequence
  Description of Artificial Sequence: Synthetic oligonucleotide
  Target: LAMA2; (-) strand; PAM type: YTN; PAM sequence: TTG
atctttctggttatgtgttt

SEQ ID NO: 285628 - DNA, 20 bp, Artificial Sequence
  Description of Artificial Sequence: Synthetic oligonucleotide
  Target: LAMA2; (-) strand; PAM type: YTN; PAM sequence: CTG
ttgatctttctggttatgtg

SEQ ID NO: 285629 - DNA, 20 bp, Artificial Sequence
  Description of Artificial Sequence: Synthetic oligonucleotide
  Target: LAMA2; (-) strand; PAM type: YTN; PAM sequence: CTC
tgttgatctttctggttatg

SEQ ID NO: 285630 - DNA, 20 bp, Artificial Sequence
  Description of Artificial Sequence: Synthetic oligonucleotide
  Target: LAMA2; (-) strand; PAM type: YTN; PAM sequence: CTG
gcctctgttgatctttctgg

SEQ ID NO: 285631 - DNA, 20 bp, Artificial Sequence
  Description of Artificial Sequence: Synthetic oligonucleotide
  Target: LAMA2; (-) strand; PAM type: YTN; PAM sequence: CTG
acgagacctggcctctgttg

SEQ ID NO: 285632 - DNA, 20 bp, Artificial Sequence
  Description of Artificial Sequence: Synthetic oligonucleotide
  Target: LAMA2; (-) strand; PAM type: YTN; PAM sequence: TTG
aaggcctgacgagacctggc

SEQ ID NO: 285633 - DNA, 20 bp, Artificial Sequence
  Description of Artificial Sequence: Synthetic oligonucleotide
  Target: LAMA2; (-) strand; PAM type: YTN; PAM sequence: TTA
ttgaaggcctgacgagacct

SEQ ID NO: 285634 - DNA, 20 bp, Artificial Sequence
  Description of Artificial Sequence: Synthetic oligonucleotide
  Target: LAMA2; (-) strand; PAM type: YTN; PAM sequence: CTG
attattgaaggcctgacgag

SEQ ID NO: 285635 - DNA, 20 bp, Artificial Sequence
  Description of Artificial Sequence: Synthetic oligonucleotide
  Target: LAMA2; (-) strand; PAM type: YTN; PAM sequence: TTA
actgattattgaaggcctga

SEQ ID NO: 285636 - DNA, 20 bp, Artificial Sequence
  Description of Artificial Sequence: Synthetic oligonucleotide
  Target: LAMA2; (-) strand; PAM type: YTN; PAM sequence: CTT
aactgattattgaaggcctg

SEQ ID NO: 285637 - DNA, 20 bp, Artificial Sequence
  Description of Artificial Sequence: Synthetic oligonucleotide
  Target: LAMA2; (-) strand; PAM type: YTN; PAM sequence: TTG
cttaactgattattgaaggc

SEQ ID NO: 285638 - DNA, 20 bp, Artificial Sequence
  Description of Artificial Sequence: Synthetic oligonucleotide
  Target: LAMA2; (-) strand; PAM type: YTN; PAM sequence: TTA
aatgaaattgcttaactgat

SEQ ID NO: 285639 - DNA, 20 bp, Artificial Sequence
  Description of Artificial Sequence: Synthetic oligonucleotide
  Target: LAMA2; (-) strand; PAM type: YTN; PAM sequence: TTG
ttaaatgaaattgcttaact

SEQ ID NO: 285640 - DNA, 20 bp, Artificial Sequence
  Description of Artificial Sequence: Synthetic oligonucleotide
  Target: LAMA2; (-) strand; PAM type: YTN; PAM sequence: TTA
tcccaagtaccagtgttgtt

SEQ ID NO: 285641 - DNA, 20 bp, Artificial Sequence
  Description of Artificial Sequence: Synthetic oligonucleotide
  Target: LAMA2; (-) strand; PAM type: YTN; PAM sequence: CTT
atcccaagtaccagtgttgt

SEQ ID NO: 285642 - DNA, 20 bp, Artificial Sequence
  Description of Artificial Sequence: Synthetic oligonucleotide
  Target: LAMA2; (-) strand; PAM type: YTN; PAM sequence: CTA
accagtgaggcttatcccaa

SEQ ID NO: 285643 - DNA, 20 bp, Artificial Sequence
  Description of Artificial Sequence: Synthetic oligonucleotide
  Target: LAMA2; (-) strand; PAM type: YTN; PAM sequence: TTA
tcctaaccagtgaggcttat

SEQ ID NO: 285644 - DNA, 20 bp, Artificial Sequence
  Description of Artificial Sequence: Synthetic oligonucleotide
  Target: LAMA2; (-) strand; PAM type: YTN; PAM sequence: CTT
atcctaaccagtgaggctta

SEQ ID NO: 285645 - DNA, 20 bp, Artificial Sequence
  Description of Artificial Sequence: Synthetic oligonucleotide
  Target: LAMA2; (-) strand; PAM type: YTN; PAM sequence: TTC
agcttatcctaaccagtgag

SEQ ID NO: 285646 - DNA, 20 bp, Artificial Sequence
  Description of Artificial Sequence: Synthetic oligonucleotide
  Target: LAMA2; (-) strand; PAM type: YTN; PAM sequence: TTT
cagcttatcctaaccagtga

SEQ ID NO: 285647 - DNA, 20 bp, Artificial Sequence
  Description of Artificial Sequence: Synthetic oligonucleotide
  Target: LAMA2; (-) strand; PAM type: YTN; PAM sequence: CTT
tcagcttatcctaaccagtg

SEQ ID NO: 285648 - DNA, 20 bp, Artificial Sequence
  Description of Artificial Sequence: Synthetic oligonucleotide
  Target: LAMA2; (-) strand; PAM type: YTN; PAM sequence: CTC
aaagctttcagcttatccta

SEQ ID NO: 285649 - DNA, 20 bp, Artificial Sequence
  Description of Artificial Sequence: Synthetic oligonucleotide
  Target: LAMA2; (-) strand; PAM type: YTN; PAM sequence: TTC
catgctcaaagctttcagct

SEQ ID NO: 285650 - DNA, 20 bp, Artificial Sequence
  Description of Artificial Sequence: Synthetic oligonucleotide
  Target: LAMA2; (-) strand; PAM type: YTN; PAM sequence: CTG
tgttccatgctcaaagcttt

SEQ ID NO: 285651 - DNA, 20 bp, Artificial Sequence
  Description of Artificial Sequence: Synthetic oligonucleotide
  Target: LAMA2; (-) strand; PAM type: YTN; PAM sequence: TTA
tactgtgttccatgctcaaa

SEQ ID NO: 285652 - DNA, 20 bp, Artificial Sequence
  Description of Artificial Sequence: Synthetic oligonucleotide
  Target: LAMA2; (-) strand; PAM type: YTN; PAM sequence: CTG
attatactgtgttccatgct

SEQ ID NO: 285653 - DNA, 20 bp, Artificial Sequence
  Description of Artificial Sequence: Synthetic oligonucleotide
  Target: LAMA2; (-) strand; PAM type: YTN; PAM sequence: CTC
tgattatactgtgttccatg

SEQ ID NO: 285654 - DNA, 20 bp, Artificial Sequence
  Description of Artificial Sequence: Synthetic oligonucleotide
  Target: LAMA2; (-) strand; PAM type: YTN; PAM sequence: TTA
aaaagcacagctctgattat

SEQ ID NO: 285655 - DNA, 20 bp, Artificial Sequence
  Description of Artificial Sequence: Synthetic oligonucleotide
  Target: LAMA2; (-) strand; PAM type: YTN; PAM sequence: TTT
aaaaagcacagctctgatta

SEQ ID NO: 285656 - DNA, 20 bp, Artificial Sequence
  Description of Artificial Sequence: Synthetic oligonucleotide
  Target: LAMA2; (-) strand; PAM type: YTN; PAM sequence: TTA
tatttaaaaagcacagctct

SEQ ID NO: 285657 - DNA, 20 bp, Artificial Sequence
  Description of Artificial Sequence: Synthetic oligonucleotide
  Target: LAMA2; (-) strand; PAM type: YTN; PAM sequence: TTT
atatttaaaaagcacagctc

SEQ ID NO: 285658 - DNA, 20 bp, Artificial Sequence
  Description of Artificial Sequence: Synthetic oligonucleotide
  Target: LAMA2; (-) strand; PAM type: YTN; PAM sequence: CTG
gatttatatttaaaaagcac

SEQ ID NO: 285659 - DNA, 20 bp, Artificial Sequence
  Description of Artificial Sequence: Synthetic oligonucleotide
  Target: LAMA2; (-) strand; PAM type: YTN; PAM sequence: TTC
tggatttatatttaaaaagc

SEQ ID NO: 285660 - DNA, 20 bp, Artificial Sequence
  Description of Artificial Sequence: Synthetic oligonucleotide
  Target: LAMA2; (-) strand; PAM type: YTN; PAM sequence: CTT
ctggatttatatttaaaaag

SEQ ID NO: 285661 - DNA, 20 bp, Artificial Sequence
  Description of Artificial Sequence: Synthetic oligonucleotide
  Target: LAMA2; (-) strand; PAM type: YTN; PAM sequence: CTG
cttctggatttatatttaaa

SEQ ID NO: 285662 - DNA, 20 bp, Artificial Sequence
  Description of Artificial Sequence: Synthetic oligonucleotide
  Target: LAMA2; (-) strand; PAM type: YTN; PAM sequence: CTA
ccccatacactgcttctgga

SEQ ID NO: 285663 - DNA, 20 bp, Artificial Sequence
  Description of Artificial Sequence: Synthetic oligonucleotide
  Target: LAMA2; (-) strand; PAM type: YTN; PAM sequence: TTC
atctaccccatacactgctt

SEQ ID NO: 285664 - DNA, 20 bp, Artificial Sequence
  Description of Artificial Sequence: Synthetic oligonucleotide
  Target: LAMA2; (-) strand; PAM type: YTN; PAM sequence: TTT
catctaccccatacactgct

SEQ ID NO: 285665 - DNA, 20 bp, Artificial Sequence
  Description of Artificial Sequence: Synthetic oligonucleotide
  Target: LAMA2; (-) strand; PAM type: YTN; PAM sequence: CTT
tcatctaccccatacactgc

SEQ ID NO: 285666 - DNA, 20 bp, Artificial Sequence
  Description of Artificial Sequence: Synthetic oligonucleotide
  Target: LAMA2; (-) strand; PAM type: YTN; PAM sequence: TTC
tttcatctaccccatacact

SEQ ID NO: 285667 - DNA, 20 bp, Artificial Sequence
  Description of Artificial Sequence: Synthetic oligonucleotide
  Target: LAMA2; (-) strand; PAM type: YTN; PAM sequence: TTT
ctttcatctaccccatacac

SEQ ID NO: 285668 - DNA, 20 bp, Artificial Sequence
  Description of Artificial Sequence: Synthetic oligonucleotide
  Target: LAMA2; (-) strand; PAM type: YTN; PAM sequence: CTT
tctttcatctaccccataca

SEQ ID NO: 285669 - DNA, 20 bp, Artificial Sequence
  Description of Artificial Sequence: Synthetic oligonucleotide
  Target: LAMA2; (-) strand; PAM type: YTN; PAM sequence: TTC
tttctttcatctaccccata

SEQ ID NO: 285670 - DNA, 20 bp, Artificial Sequence
  Description of Artificial Sequence: Synthetic oligonucleotide
  Target: LAMA2; (-) strand; PAM type: YTN; PAM sequence: CTT
ctttctttcatctaccccat

SEQ ID NO: 285671 - DNA, 20 bp, Artificial Sequence
  Description of Artificial Sequence: Synthetic oligonucleotide
  Target: LAMA2; (-) strand; PAM type: YTN; PAM sequence: TTC
ttctttctttcatctacccc

SEQ ID NO: 285672 - DNA, 20 bp, Artificial Sequence
  Description of Artificial Sequence: Synthetic oligonucleotide
  Target: LAMA2; (-) strand; PAM type: YTN; PAM sequence: TTC
attcttctttctttcatcta

SEQ ID NO: 285673 - DNA, 20 bp, Artificial Sequence
  Description of Artificial Sequence: Synthetic oligonucleotide
  Target: LAMA2; (-) strand; PAM type: YTN; PAM sequence: CTT
cattcttctttctttcatct

SEQ ID NO: 285674 - DNA, 20 bp, Artificial Sequence
  Description of Artificial Sequence: Synthetic oligonucleotide
  Target: LAMA2; (-) strand; PAM type: YTN; PAM sequence: TTG
ggtccttcattcttctttct

SEQ ID NO: 285675 - DNA, 20 bp, Artificial Sequence
  Description of Artificial Sequence: Synthetic oligonucleotide
  Target: LAMA2; (-) strand; PAM type: YTN; PAM sequence: CTA
tagttgggtccttcattctt

SEQ ID NO: 285676 - DNA, 20 bp, Artificial Sequence
  Description of Artificial Sequence: Synthetic oligonucleotide
  Target: LAMA2; (-) strand; PAM type: YTN; PAM sequence: TTG
ccacagctatagttgggtcc

SEQ ID NO: 285677 - DNA, 20 bp, Artificial Sequence
  Description of Artificial Sequence: Synthetic oligonucleotide
  Target: LAMA2; (-) strand; PAM type: YTN; PAM sequence: CTT
gccacagctatagttgggtc

SEQ ID NO: 285678 - DNA, 20 bp, Artificial Sequence
  Description of Artificial Sequence: Synthetic oligonucleotide
  Target: LAMA2; (-) strand; PAM type: YTN; PAM sequence: CTC
ttgccacagctatagttggg

SEQ ID NO: 285679 - DNA, 20 bp, Artificial Sequence
  Description of Artificial Sequence: Synthetic oligonucleotide
  Target: LAMA2; (-) strand; PAM type: YTN; PAM sequence: TTC
tcttgccacagctatagttg

SEQ ID NO: 285680 - DNA, 20 bp, Artificial Sequence
  Description of Artificial Sequence: Synthetic oligonucleotide
  Target: LAMA2; (-) strand; PAM type: YTN; PAM sequence: TTT
ctcttgccacagctatagtt

SEQ ID NO: 285681 - DNA, 20 bp, Artificial Sequence
  Description of Artificial Sequence: Synthetic oligonucleotide
  Target: LAMA2; (-) strand; PAM type: YTN; PAM sequence: TTT
tctcttgccacagctatagt

SEQ ID NO: 285682 - DNA, 20 bp, Artificial Sequence
  Description of Artificial Sequence: Synthetic oligonucleotide
  Target: LAMA2; (-) strand; PAM type: YTN; PAM sequence: CTT
ttctcttgccacagctatag

SEQ ID NO: 285683 - DNA, 20 bp, Artificial Sequence
  Description of Artificial Sequence: Synthetic oligonucleotide
  Target: LAMA2; (-) strand; PAM type: YTN; PAM sequence: TTC
ttttctcttgccacagctat

SEQ ID NO: 285684 - DNA, 20 bp, Artificial Sequence
  Description of Artificial Sequence: Synthetic oligonucleotide
  Target: LAMA2; (-) strand; PAM type: YTN; PAM sequence: CTT
cttttctcttgccacagcta

SEQ ID NO: 285685 - DNA, 20 bp, Artificial Sequence
  Description of Artificial Sequence: Synthetic oligonucleotide
  Target: LAMA2; (-) strand; PAM type: YTN; PAM sequence: TTC
ttcttttctcttgccacagc

SEQ ID NO: 285686 - DNA, 20 bp, Artificial Sequence
  Description of Artificial Sequence: Synthetic oligonucleotide
  Target: LAMA2; (-) strand; PAM type: YTN; PAM sequence: TTG
caaaatataggagtggtaca

SEQ ID NO: 285687 - DNA, 20 bp, Artificial Sequence
  Description of Artificial Sequence: Synthetic oligonucleotide
  Target: LAMA2; (-) strand; PAM type: YTN; PAM sequence: TTA
acattgcaaaatataggagt

SEQ ID NO: 285688 - DNA, 20 bp, Artificial Sequence
  Description of Artificial Sequence: Synthetic oligonucleotide
  Target: LAMA2; (-) strand; PAM type: YTN; PAM sequence: TTC
caagttaacattgcaaaata

SEQ ID NO: 285689 - DNA, 20 bp, Artificial Sequence
  Description of Artificial Sequence: Synthetic oligonucleotide
  Target: LAMA2; (-) strand; PAM type: YTN; PAM sequence: CTT
ccaagttaacattgcaaaat

SEQ ID NO: 285690 - DNA, 20 bp, Artificial Sequence
  Description of Artificial Sequence: Synthetic oligonucleotide
  Target: LAMA2; (-) strand; PAM type: YTN; PAM sequence: TTC
ttccaagttaacattgcaaa

SEQ ID NO: 285691 - DNA, 20 bp, Artificial Sequence
  Description of Artificial Sequence: Synthetic oligonucleotide
  Target: LAMA2; (-) strand; PAM type: YTN; PAM sequence: CTT
cttccaagttaacattgcaa

SEQ ID NO: 285692 - DNA, 20 bp, Artificial Sequence
  Description of Artificial Sequence: Synthetic oligonucleotide
  Target: LAMA2; (-) strand; PAM type: YTN; PAM sequence: TTG
cttcttccaagttaacattg

SEQ ID NO: 285693 - DNA, 20 bp, Artificial Sequence
  Description of Artificial Sequence: Synthetic oligonucleotide
  Target: LAMA2; (-) strand; PAM type: YTN; PAM sequence: TTA
ttgcttcttccaagttaaca

SEQ ID NO: 285694 - DNA, 20 bp, Artificial Sequence
  Description of Artificial Sequence: Synthetic oligonucleotide
  Target: LAMA2; (-) strand; PAM type: YTN; PAM sequence: CTT
attgcttcttccaagttaac

SEQ ID NO: 285695 - DNA, 20 bp, Artificial Sequence
  Description of Artificial Sequence: Synthetic oligonucleotide
  Target: LAMA2; (-) strand; PAM type: YTN; PAM sequence: CTC
ttattgcttcttccaagtta

SEQ ID NO: 285696 - DNA, 20 bp, Artificial Sequence
  Description of Artificial Sequence: Synthetic oligonucleotide
  Target: LAMA2; (-) strand; PAM type: YTN; PAM sequence: TTA
ctcttattgcttcttccaag

SEQ ID NO: 285697 - DNA, 20 bp, Artificial Sequence
  Description of Artificial Sequence: Synthetic oligonucleotide
  Target: LAMA2; (-) strand; PAM type: YTN; PAM sequence: TTT
actcttattgcttcttccaa

SEQ ID NO: 285698 - DNA, 20 bp, Artificial Sequence
  Description of Artificial Sequence: Synthetic oligonucleotide
  Target: LAMA2; (-) strand; PAM type: YTN; PAM sequence: TTC
acaaaataatatttactctt

SEQ ID NO: 285699 - DNA, 20 bp, Artificial Sequence
  Description of Artificial Sequence: Synthetic oligonucleotide
  Target: LAMA2; (-) strand; PAM type: YTN; PAM sequence: CTA
aatgtgagattcacaaaata

SEQ ID NO: 285700 - DNA, 20 bp, Artificial Sequence
  Description of Artificial Sequence: Synthetic oligonucleotide
  Target: LAMA2; (-) strand; PAM type: YTN; PAM sequence: CTA
agtcagaaaatgtggctaaa

SEQ ID NO: 285701 - DNA, 20 bp, Artificial Sequence
  Description of Artificial Sequence: Synthetic oligonucleotide
  Target: LAMA2; (-) strand; PAM type: YTN; PAM sequence: TTG
atgactaagtcagaaaatgt

SEQ ID NO: 285702 - DNA, 20 bp, Artificial Sequence
  Description of Artificial Sequence: Synthetic oligonucleotide
  Target: LAMA2; (-) strand; PAM type: YTN; PAM sequence: CTT
gatgactaagtcagaaaatg

SEQ ID NO: 285703 - DNA, 20 bp, Artificial Sequence
  Description of Artificial Sequence: Synthetic oligonucleotide
  Target: LAMA2; (-) strand; PAM type: YTN; PAM sequence: CTC
cacttgatgactaagtcaga

SEQ ID NO: 285704 - DNA, 20 bp, Artificial Sequence
  Description of Artificial Sequence: Synthetic oligonucleotide
  Target: LAMA2; (-) strand; PAM type: YTN; PAM sequence: TTC
tccacttgatgactaagtca

SEQ ID NO: 285705 - DNA, 20 bp, Artificial Sequence
  Description of Artificial Sequence: Synthetic oligonucleotide
  Target: LAMA2; (-) strand; PAM type: YTN; PAM sequence: TTT
ctccacttgatgactaagtc

SEQ ID NO: 285706 - DNA, 20 bp, Artificial Sequence
  Description of Artificial Sequence: Synthetic oligonucleotide
  Target: LAMA2; (-) strand; PAM type: YTN; PAM sequence: CTA
gatttctccacttgatgact

SEQ ID NO: 285707 - DNA, 20 bp, Artificial Sequence
  Description of Artificial Sequence: Synthetic oligonucleotide
  Target: LAMA2; (-) strand; PAM type: YTN; PAM sequence: TTA
caatgaagaaataataaaaa

SEQ ID NO: 285708 - DNA, 20 bp, Artificial Sequence
  Description of Artificial Sequence: Synthetic oligonucleotide
  Target: LAMA2; (-) strand; PAM type: YTN; PAM sequence: TTT
acaatgaagaaataataaaa

SEQ ID NO: 285709 - DNA, 20 bp, Artificial Sequence
  Description of Artificial Sequence: Synthetic oligonucleotide
  Target: LAMA2; (-) strand; PAM type: YTN; PAM sequence: CTT
tacaatgaagaaataataaa

SEQ ID NO: 285710 - DNA, 20 bp, Artificial Sequence
  Description of Artificial Sequence: Synthetic oligonucleotide
  Target: LAMA2; (-) strand; PAM type: YTN; PAM sequence: CTC
agaaatctttacaatgaaga

SEQ ID NO: 285711 - DNA, 20 bp, Artificial Sequence
  Description of Artificial Sequence: Synthetic oligonucleotide
  Target: LAMA2; (-) strand; PAM type: YTN; PAM sequence: TTG
tgaggaggggaaaagcactc

SEQ ID NO: 285712 - DNA, 20 bp, Artificial Sequence
  Description of Artificial Sequence: Synthetic oligonucleotide
  Target: LAMA2; (-) strand; PAM type: YTN; PAM sequence: TTT
gtgaggaggggaaaagcact

SEQ ID NO: 285713 - DNA, 20 bp, Artificial Sequence
  Description of Artificial Sequence: Synthetic oligonucleotide
  Target: LAMA2; (-) strand; PAM type: YTN; PAM sequence: TTT
tgtgaggaggggaaaagcac

SEQ ID NO: 285714 - DNA, 20 bp, Artificial Sequence
  Description of Artificial Sequence: Synthetic oligonucleotide
  Target: LAMA2; (-) strand; PAM type: YTN; PAM sequence: TTC
accgttttgtgaggagggga

SEQ ID NO: 285715 - DNA, 20 bp, Artificial Sequence
  Description of Artificial Sequence: Synthetic oligonucleotide
  Target: LAMA2; (-) strand; PAM type: YTN; PAM sequence: TTT
caccgttttgtgaggagggg

SEQ ID NO: 285716 - DNA, 20 bp, Artificial Sequence
  Description of Artificial Sequence: Synthetic oligonucleotide
  Target: LAMA2; (-) strand; PAM type: YTN; PAM sequence: CTG
aatttcaccgttttgtgagg

SEQ ID NO: 285717 - DNA, 20 bp, Artificial Sequence
  Description of Artificial Sequence: Synthetic oligonucleotide
  Target: LAMA2; (-) strand; PAM type: YTN; PAM sequence: TTA
catgtctgaatttcaccgtt

SEQ ID NO: 285718 - DNA, 20 bp, Artificial Sequence
  Description of Artificial Sequence: Synthetic oligonucleotide
  Target: LAMA2; (-) strand; PAM type: YTN; PAM sequence: CTT
acatgtctgaatttcaccgt

SEQ ID NO: 285719 - DNA, 20 bp, Artificial Sequence
  Description of Artificial Sequence: Synthetic oligonucleotide
  Target: LAMA2; (-) strand; PAM type: YTN; PAM sequence: TTA
tatgcttacatgtctgaatt

SEQ ID NO: 285720 - DNA, 20 bp, Artificial Sequence
  Description of Artificial Sequence: Synthetic oligonucleotide
  Target: LAMA2; (-) strand; PAM type: YTN; PAM sequence: TTT
atatgcttacatgtctgaat

SEQ ID NO: 285721 - DNA, 20 bp, Artificial Sequence
  Description of Artificial Sequence: Synthetic oligonucleotide
  Target: LAMA2; (-) strand; PAM type: YTN; PAM sequence: TTT
tatatgcttacatgtctgaa

SEQ ID NO: 285722 - DNA, 20 bp, Artificial Sequence
  Description of Artificial Sequence: Synthetic oligonucleotide
  Target: LAMA2; (-) strand; PAM type: YTN; PAM sequence: TTA
agacaggttttatatgctta

SEQ ID NO: 285723 - DNA, 20 bp, Artificial Sequence
  Description of Artificial Sequence: Synthetic oligonucleotide
  Target: LAMA2; (-) strand; PAM type: YTN; PAM sequence: TTT
aagacaggttttatatgctt

SEQ ID NO: 285724 - DNA, 20 bp, Artificial Sequence
  Description of Artificial Sequence: Synthetic oligonucleotide
  Target: LAMA2; (-) strand; PAM type: YTN; PAM sequence: CTT
taagacaggttttatatgct

SEQ ID NO: 285725 - DNA, 20 bp, Artificial Sequence
  Description of Artificial Sequence: Synthetic oligonucleotide
  Target: LAMA2; (-) strand; PAM type: YTN; PAM sequence: TTG
tactttaagacaggttttat

SEQ ID NO: 285726 - DNA, 20 bp, Artificial Sequence
  Description of Artificial Sequence: Synthetic oligonucleotide
  Target: LAMA2; (-) strand; PAM type: YTN; PAM sequence: TTT
gtactttaagacaggtttta

SEQ ID NO: 285727 - DNA, 20 bp, Artificial Sequence
  Description of Artificial Sequence: Synthetic oligonucleotide
  Target: LAMA2; (-) strand; PAM type: YTN; PAM sequence: TTT
tgtactttaagacaggtttt

SEQ ID NO: 285728 - DNA, 20 bp, Artificial Sequence
  Description of Artificial Sequence: Synthetic oligonucleotide
  Target: LAMA2; (-) strand; PAM type: YTN; PAM sequence: TTA
ttttgtactttaagacaggt

SEQ ID NO: 285729 - DNA, 20 bp, Artificial Sequence
  Description of Artificial Sequence: Synthetic oligonucleotide
  Target: LAMA2; (-) strand; PAM type: YTN; PAM sequence: TTT
attttgtactttaagacagg

SEQ ID NO: 285730 - DNA, 20 bp, Artificial Sequence
  Description of Artificial Sequence: Synthetic oligonucleotide
  Target: LAMA2; (-) strand; PAM type: YTN; PAM sequence: TTT
tattttgtactttaagacag

SEQ ID NO: 285731 - DNA, 20 bp, Artificial Sequence
  Description of Artificial Sequence: Synthetic oligonucleotide
  Target: LAMA2; (-) strand; PAM type: YTN; PAM sequence: CTT
ttattttgtactttaagaca

SEQ ID NO: 285732 - DNA, 20 bp, Artificial Sequence
  Description of Artificial Sequence: Synthetic oligonucleotide
  Target: LAMA2; (-) strand; PAM type: YTN; PAM sequence: TTC
ttttattttgtactttaaga

SEQ ID NO: 285733 - DNA, 20 bp, Artificial Sequence
  Description of Artificial Sequence: Synthetic oligonucleotide
  Target: LAMA2; (-) strand; PAM type: YTN; PAM sequence: TTT
cttttattttgtactttaag

SEQ ID NO: 285734 - DNA, 20 bp, Artificial Sequence
  Description of Artificial Sequence: Synthetic oligonucleotide
  Target: LAMA2; (-) strand; PAM type: YTN; PAM sequence: TTT
tcttttattttgtactttaa

SEQ ID NO: 285735 - DNA, 20 bp, Artificial Sequence
  Description of Artificial Sequence: Synthetic oligonucleotide
  Target: LAMA2; (-) strand; PAM type: YTN; PAM sequence: CTT
ttcttttattttgtacttta

SEQ ID NO: 285736 - DNA, 20 bp, Artificial Sequence
  Description of Artificial Sequence: Synthetic oligonucleotide
  Target: LAMA2; (-) strand; PAM type: YTN; PAM sequence: CTA
tacttttcttttattttgta

SEQ ID NO: 285737 - DNA, 20 bp, Artificial Sequence
  Description of Artificial Sequence: Synthetic oligonucleotide
  Target: LAMA2; (-) strand; PAM type: YTN; PAM sequence: TTG
agccaccatgcccagcctat

SEQ ID NO: 285738 - DNA, 20 bp, Artificial Sequence
  Description of Artificial Sequence: Synthetic oligonucleotide
  Target: LAMA2; (-) strand; PAM type: YTN; PAM sequence: CTT
gagccaccatgcccagccta

SEQ ID NO: 285739 - DNA, 20 bp, Artificial Sequence
  Description of Artificial Sequence: Synthetic oligonucleotide
  Target: LAMA2; (-) strand; PAM type: YTN; PAM sequence: TTG
ggatgacaggcttgagccac

SEQ ID NO: 285740 - DNA, 20 bp, Artificial Sequence
  Description of Artificial Sequence: Synthetic oligonucleotide
  Target: LAMA2; (-) strand; PAM type: YTN; PAM sequence: CTC
ccaaagtgttgggatgacag

SEQ ID NO: 285741 - DNA, 20 bp, Artificial Sequence
  Description of Artificial Sequence: Synthetic oligonucleotide
  Target: LAMA2; (-) strand; PAM type: YTN; PAM sequence: CTC
agcctcccaaagtgttggga

SEQ ID NO: 285742 - DNA, 20 bp, Artificial Sequence
  Description of Artificial Sequence: Synthetic oligonucleotide
  Target: LAMA2; (-) strand; PAM type: YTN; PAM sequence: CTG
cctcagcctcccaaagtgtt

SEQ ID NO: 285743 - DNA, 20 bp, Artificial Sequence
  Description of Artificial Sequence: Synthetic oligonucleotide
  Target: LAMA2; (-) strand; PAM type: YTN; PAM sequence: CTG
cctgcctcagcctcccaaag

SEQ ID NO: 285744 - DNA, 20 bp, Artificial Sequence
  Description of Artificial Sequence: Synthetic oligonucleotide
  Target: LAMA2; (-) strand; PAM type: YTN; PAM sequence: TTC
atgcaatctgcctgcctcag

SEQ ID NO: 285745 - DNA, 20 bp, Artificial Sequence
  Description of Artificial Sequence: Synthetic oligonucleotide
  Target: LAMA2; (-) strand; PAM type: YTN; PAM sequence: CTG
agttcatgcaatctgcctgc

SEQ ID NO: 285746 - DNA, 20 bp, Artificial Sequence
  Description of Artificial Sequence: Synthetic oligonucleotide
  Target: LAMA2; (-) strand; PAM type: YTN; PAM sequence: CTC
ctgagttcatgcaatctgcc

SEQ ID NO: 285747 - DNA, 20 bp, Artificial Sequence
  Description of Artificial Sequence: Synthetic oligonucleotide
  Target: LAMA2; (-) strand; PAM type: YTN; PAM sequence: CTC
aaactcctgagttcatgcaa

SEQ ID NO: 285748 - DNA, 20 bp, Artificial Sequence
  Description of Artificial Sequence: Synthetic oligonucleotide
  Target: LAMA2; (-) strand; PAM type: YTN; PAM sequence: CTG
gtctcaaactcctgagttca

SEQ ID NO: 285749 - DNA, 20 bp, Artificial Sequence
  Description of Artificial Sequence: Synthetic oligonucleotide
  Target: LAMA2; (-) strand; PAM type: YTN; PAM sequence: TTG
tgacatggcccaggctggtc

SEQ ID NO: 285750 - DNA, 20 bp, Artificial Sequence
  Description of Artificial Sequence: Synthetic oligonucleotide
  Target: LAMA2; (-) strand; PAM type: YTN; PAM sequence: TTT
gtgacatggcccaggctggt

SEQ ID NO: 285751 - DNA, 20 bp, Artificial Sequence
  Description of Artificial Sequence: Synthetic oligonucleotide
  Target: LAMA2; (-) strand; PAM type: YTN; PAM sequence: TTT
tgtgacatggcccaggctgg

SEQ ID NO: 285752 - DNA, 20 bp, Artificial Sequence
  Description of Artificial Sequence: Synthetic oligonucleotide
  Target: LAMA2; (-) strand; PAM type: YTN; PAM sequence: TTG
tagagatgtggttttgtgac

SEQ ID NO: 285753 - DNA, 20 bp, Artificial Sequence
  Description of Artificial Sequence: Synthetic oligonucleotide
  Target: LAMA2; (-) strand; PAM type: YTN; PAM sequence: TTT
gtagagatgtggttttgtga

SEQ ID NO: 285754 - DNA, 20 bp, Artificial Sequence
  Description of Artificial Sequence: Synthetic oligonucleotide
  Target: LAMA2; (-) strand; PAM type: YTN; PAM sequence: TTT
tgtagagatgtggttttgtg

SEQ ID NO: 285755 - DNA, 20 bp, Artificial Sequence
  Description of Artificial Sequence: Synthetic oligonucleotide
  Target: LAMA2; (-) strand; PAM type: YTN; PAM sequence: TTT
ttgtagagatgtggttttgt

SEQ ID NO: 285756 - DNA, 20 bp, Artificial Sequence
  Description of Artificial Sequence: Synthetic oligonucleotide
  Target: LAMA2; (-) strand; PAM type: YTN; PAM sequence: TTT
tttgtagagatgtggttttg

SEQ ID NO: 285757 - DNA, 20 bp, Artificial Sequence
  Description of Artificial Sequence: Synthetic oligonucleotide
  Target: LAMA2; (-) strand; PAM type: YTN; PAM sequence: TTC
aattttttgtagagatgtgg

SEQ ID NO: 285758 - DNA, 20 bp, Artificial Sequence
  Description of Artificial Sequence: Synthetic oligonucleotide
  Target: LAMA2; (-) strand; PAM type: YTN; PAM sequence: TTT
caattttttgtagagatgtg

SEQ ID NO: 285759 - DNA, 20 bp, Artificial Sequence
  Description of Artificial Sequence: Synthetic oligonucleotide
  Target: LAMA2; (-) strand; PAM type: YTN; PAM sequence: TTT
tcaattttttgtagagatgt

SEQ ID NO: 285760 - DNA, 20 bp, Artificial Sequence
  Description of Artificial Sequence: Synthetic oligonucleotide
  Target: LAMA2; (-) strand; PAM type: YTN; PAM sequence: TTT
ttcaattttttgtagagatg

SEQ ID NO: 285761 - DNA, 20 bp, Artificial Sequence
  Description of Artificial Sequence: Synthetic oligonucleotide
  Target: LAMA2; (-) strand; PAM type: YTN; PAM sequence: CTA
taggcatgtaccatgcccag

SEQ ID NO: 285762 - DNA, 20 bp, Artificial Sequence
  Description of Artificial Sequence: Synthetic oligonucleotide
  Target: LAMA2; (-) strand; PAM type: YTN; PAM sequence: CTG
ggactataggcatgtaccat

SEQ ID NO: 285763 - DNA, 20 bp, Artificial Sequence
  Description of Artificial Sequence: Synthetic oligonucleotide
  Target: LAMA2; (-) strand; PAM type: YTN; PAM sequence: CTC
cccaagtagctgggactata

SEQ ID NO: 285764 - DNA, 20 bp, Artificial Sequence
  Description of Artificial Sequence: Synthetic oligonucleotide
  Target: LAMA2; (-) strand; PAM type: YTN; PAM sequence: CTC
atctccccaagtagctggga

SEQ ID NO: 285765 - DNA, 20 bp, Artificial Sequence
  Description of Artificial Sequence: Synthetic oligonucleotide
  Target: LAMA2; (-) strand; PAM type: YTN; PAM sequence: CTC
ccacctcatctccccaagta

SEQ ID NO: 285766 - DNA, 20 bp, Artificial Sequence
  Description of Artificial Sequence: Synthetic oligonucleotide
  Target: LAMA2; (-) strand; PAM type: YTN; PAM sequence: CTC
cagagcaagtgatcctccca

SEQ ID NO: 285767 - DNA, 20 bp, Artificial Sequence
  Description of Artificial Sequence: Synthetic oligonucleotide
  Target: LAMA2; (-) strand; PAM type: YTN; PAM sequence: CTC
atcctccagagcaagtgatc

SEQ ID NO: 285768 - DNA, 20 bp, Artificial Sequence
  Description of Artificial Sequence: Synthetic oligonucleotide
  Target: LAMA2; (-) strand; PAM type: YTN; PAM sequence: CTG
cagcctcatcctccagagca

SEQ ID NO: 285769 - DNA, 20 bp, Artificial Sequence
  Description of Artificial Sequence: Synthetic oligonucleotide
  Target: LAMA2; (-) strand; PAM type: YTN; PAM sequence: CTC
actgcagcctcatcctccag

SEQ ID NO: 285770 - DNA, 20 bp, Artificial Sequence
  Description of Artificial Sequence: Synthetic oligonucleotide
  Target: LAMA2; (-) strand; PAM type: YTN; PAM sequence: CTG
gagtgccatggtgcaaacat

SEQ ID NO: 285771 - DNA, 20 bp, Artificial Sequence
  Description of Artificial Sequence: Synthetic oligonucleotide
  Target: LAMA2; (-) strand; PAM type: YTN; PAM sequence: TTG
ccacccaggctggagtgcca

SEQ ID NO: 285772 - DNA, 20 bp, Artificial Sequence
  Description of Artificial Sequence: Synthetic oligonucleotide
  Target: LAMA2; (-) strand; PAM type: YTN; PAM sequence: TTT
gccacccaggctggagtgcc

SEQ ID NO: 285773 - DNA, 20 bp, Artificial Sequence
  Description of Artificial Sequence: Synthetic oligonucleotide
  Target: LAMA2; (-) strand; PAM type: YTN; PAM sequence: CTA
tttgccacccaggctggagt

SEQ ID NO: 285774 - DNA, 20 bp, Artificial Sequence
  Description of Artificial Sequence: Synthetic oligonucleotide
  Target: LAMA2; (-) strand; PAM type: YTN; PAM sequence: TTC
tatttgccacccaggctgga

SEQ ID NO: 285775 - DNA, 20 bp, Artificial Sequence
  Description of Artificial Sequence: Synthetic oligonucleotide
  Target: LAMA2; (-) strand; PAM type: YTN; PAM sequence: TTT
ctatttgccacccaggctgg

SEQ ID NO: 285776 - DNA, 20 bp, Artificial Sequence
  Description of Artificial Sequence: Synthetic oligonucleotide
  Target: LAMA2; (-) strand; PAM type: YTN; PAM sequence: TTG
gggggggacagggtttctat

SEQ ID NO: 285777 - DNA, 20 bp, Artificial Sequence
  Description of Artificial Sequence: Synthetic oligonucleotide
  Target: LAMA2; (-) strand; PAM type: YTN; PAM sequence: TTT
ggggggggacagggtttcta

SEQ ID NO: 285778 - DNA, 20 bp, Artificial Sequence
  Description of Artificial Sequence: Synthetic oligonucleotide
  Target: LAMA2; (-) strand; PAM type: YTN; PAM sequence: TTT
tggggggggacagggtttct

SEQ ID NO: 285779 - DNA, 20 bp, Artificial Sequence
  Description of Artificial Sequence: Synthetic oligonucleotide
  Target: LAMA2; (-) strand; PAM type: YTN; PAM sequence: TTT
ttggggggggacagggtttc

SEQ ID NO: 285780 - DNA, 20 bp, Artificial Sequence
  Description of Artificial Sequence: Synthetic oligonucleotide
  Target: LAMA2; (-) strand; PAM type: YTN; PAM sequence: TTT
tttggggggggacagggttt

SEQ ID NO: 285781 - DNA, 20 bp, Artificial Sequence
  Description of Artificial Sequence: Synthetic oligonucleotide
  Target: LAMA2; (-) strand; PAM type: YTN; PAM sequence: TTT
ttttggggggggacagggtt

SEQ ID NO: 285782 - DNA, 20 bp, Artificial Sequence
  Description of Artificial Sequence: Synthetic oligonucleotide
  Target: LAMA2; (-) strand; PAM type: YTN; PAM sequence: TTT
tttttggggggggacagggt

SEQ ID NO: 285783 - DNA, 20 bp, Artificial Sequence
  Description of Artificial Sequence: Synthetic oligonucleotide
  Target: LAMA2; (-) strand; PAM type: YTN; PAM sequence: TTT
ttttttggggggggacaggg

SEQ ID NO: 285784 - DNA, 20 bp, Artificial Sequence
  Description of Artificial Sequence: Synthetic oligonucleotide
  Target: LAMA2; (-) strand; PAM type: YTN; PAM sequence: CTT
tttttttggggggggacagg

SEQ ID NO: 285785 - DNA, 20 bp, Artificial Sequence
  Description of Artificial Sequence: Synthetic oligonucleotide
  Target: LAMA2; (-) strand; PAM type: YTN; PAM sequence: CTC
tttttttttggggggggaca

SEQ ID NO: 285786 - DNA, 20 bp, Artificial Sequence
  Description of Artificial Sequence: Synthetic oligonucleotide
  Target: LAMA2; (-) strand; PAM type: YTN; PAM sequence: TTC
tctttttttttgggggggga

SEQ ID NO: 285787 - DNA, 20 bp, Artificial Sequence
  Description of Artificial Sequence: Synthetic oligonucleotide
  Target: LAMA2; (-) strand; PAM type: YTN; PAM sequence: CTT
ctctttttttttgggggggg

SEQ ID NO: 285788 - DNA, 20 bp, Artificial Sequence
  Description of Artificial Sequence: Synthetic oligonucleotide
  Target: LAMA2; (-) strand; PAM type: YTN; PAM sequence: TTC
ttctctttttttttgggggg

SEQ ID NO: 285789 - DNA, 20 bp, Artificial Sequence
  Description of Artificial Sequence: Synthetic oligonucleotide
  Target: LAMA2; (-) strand; PAM type: YTN; PAM sequence: TTT
cttctctttttttttggggg

SEQ ID NO: 285790 - DNA, 20 bp, Artificial Sequence
  Description of Artificial Sequence: Synthetic oligonucleotide
  Target: LAMA2; (-) strand; PAM type: YTN; PAM sequence: TTT
tcttctctttttttttgggg

SEQ ID NO: 285791 - DNA, 20 bp, Artificial Sequence
  Description of Artificial Sequence: Synthetic oligonucleotide
  Target: LAMA2; (-) strand; PAM type: YTN; PAM sequence: TTT
ttcttctctttttttttggg

SEQ ID NO: 285792 - DNA, 20 bp, Artificial Sequence
  Description of Artificial Sequence: Synthetic oligonucleotide
  Target: LAMA2; (-) strand; PAM type: YTN; PAM sequence: TTT
tttcttctctttttttttgg

SEQ ID NO: 285793 - DNA, 20 bp, Artificial Sequence
  Description of Artificial Sequence: Synthetic oligonucleotide
  Target: LAMA2; (-) strand; PAM type: YTN; PAM sequence: TTT
ttttcttctctttttttttg

SEQ ID NO: 285794 - DNA, 20 bp, Artificial Sequence
  Description of Artificial Sequence: Synthetic oligonucleotide
  Target: LAMA2; (-) strand; PAM type: YTN; PAM sequence: CTT
tttttcttctcttttttttt

SEQ ID NO: 285795 - DNA, 20 bp, Artificial Sequence
  Description of Artificial Sequence: Synthetic oligonucleotide
  Target: LAMA2; (-) strand; PAM type: YTN; PAM sequence: TTC
tttttttcttctcttttttt

SEQ ID NO: 285796 - DNA, 20 bp, Artificial Sequence
  Description of Artificial Sequence: Synthetic oligonucleotide
  Target: LAMA2; (-) strand; PAM type: YTN; PAM sequence: TTT
ctttttttcttctctttttt

SEQ ID NO: 285797 - DNA, 20 bp, Artificial Sequence
  Description of Artificial Sequence: Synthetic oligonucleotide
  Target: LAMA2; (-) strand; PAM type: YTN; PAM sequence: CTT
tctttttttcttctcttttt

SEQ ID NO: 285798 - DNA, 20 bp, Artificial Sequence
  Description of Artificial Sequence: Synthetic oligonucleotide
  Target: LAMA2; (-) strand; PAM type: YTN; PAM sequence: TTG
tacctttctttttttcttct

SEQ ID NO: 285799 - DNA, 20 bp, Artificial Sequence
  Description of Artificial Sequence: Synthetic oligonucleotide
  Target: LAMA2; (-) strand; PAM type: YTN; PAM sequence: TTT
gtacctttctttttttcttc

SEQ ID NO: 285800 - DNA, 20 bp, Artificial Sequence
  Description of Artificial Sequence: Synthetic oligonucleotide
  Target: LAMA2; (-) strand; PAM type: YTN; PAM sequence: TTT
tgtacctttctttttttctt

SEQ ID NO: 285801 - DNA, 20 bp, Artificial Sequence
  Description of Artificial Sequence: Synthetic oligonucleotide
  Target: LAMA2; (-) strand; PAM type: YTN; PAM sequence: CTT
ttgtacctttctttttttct

SEQ ID NO: 285802 - DNA, 20 bp, Artificial Sequence
  Description of Artificial Sequence: Synthetic oligonucleotide
  Target: LAMA2; (-) strand; PAM type: YTN; PAM sequence: TTA
cttttgtacctttctttttt

SEQ ID NO: 285803 - DNA, 20 bp, Artificial Sequence
  Description of Artificial Sequence: Synthetic oligonucleotide
  Target: LAMA2; (-) strand; PAM type: YTN; PAM sequence: TTA
acgttacttttgtacctttc

SEQ ID NO: 285804 - DNA, 20 bp, Artificial Sequence
  Description of Artificial Sequence: Synthetic oligonucleotide
  Target: LAMA2; (-) strand; PAM type: YTN; PAM sequence: CTT
aacgttacttttgtaccttt

SEQ ID NO: 285805 - DNA, 20 bp, Artificial Sequence
  Description of Artificial Sequence: Synthetic oligonucleotide
  Target: LAMA2; (-) strand; PAM type: YTN; PAM sequence: TTC
ttaacgttacttttgtacct

SEQ ID NO: 285806 - DNA, 20 bp, Artificial Sequence
  Description of Artificial Sequence: Synthetic oligonucleotide
  Target: LAMA2; (-) strand; PAM type: YTN; PAM sequence: TTT
cttaacgttacttttgtacc

SEQ ID NO: 285807 - DNA, 20 bp, Artificial Sequence
  Description of Artificial Sequence: Synthetic oligonucleotide
  Target: LAMA2; (-) strand; PAM type: YTN; PAM sequence: TTT
tcttaacgttacttttgtac

SEQ ID NO: 285808 - DNA, 20 bp, Artificial Sequence
  Description of Artificial Sequence: Synthetic oligonucleotide
  Target: LAMA2; (-) strand; PAM type: YTN; PAM sequence: TTT
ttcttaacgttacttttgta

SEQ ID NO: 285809 - DNA, 20 bp, Artificial Sequence
  Description of Artificial Sequence: Synthetic oligonucleotide
  Target: LAMA2; (-) strand; PAM type: YTN; PAM sequence: CTT
tttcttaacgttacttttgt

SEQ ID NO: 285810 - DNA, 20 bp, Artificial Sequence
  Description of Artificial Sequence: Synthetic oligonucleotide
  Target: LAMA2; (-) strand; PAM type: YTN; PAM sequence: TTA
ctttttcttaacgttacttt

SEQ ID NO: 285811 - DNA, 20 bp, Artificial Sequence
  Description of Artificial Sequence: Synthetic oligonucleotide
  Target: LAMA2; (-) strand; PAM type: YTN; PAM sequence: TTG
aaatgcatggacaatgatta

SEQ ID NO: 285812 - DNA, 20 bp, Artificial Sequence
  Description of Artificial Sequence: Synthetic oligonucleotide
  Target: LAMA2; (-) strand; PAM type: YTN; PAM sequence: TTT
gaaatgcatggacaatgatt

SEQ ID NO: 285813 - DNA, 20 bp, Artificial Sequence
  Description of Artificial Sequence: Synthetic oligonucleotide
  Target: LAMA2; (-) strand; PAM type: YTN; PAM sequence: CTT
tgaaatgcatggacaatgat

SEQ ID NO: 285814 - DNA, 20 bp, Artificial Sequence
  Description of Artificial Sequence: Synthetic oligonucleotide
  Target: LAMA2; (-) strand; PAM type: YTN; PAM sequence: TTC
tttgaaatgcatggacaatg

SEQ ID NO: 285815 - DNA, 20 bp, Artificial Sequence
  Description of Artificial Sequence: Synthetic oligonucleotide
  Target: LAMA2; (-) strand; PAM type: YTN; PAM sequence: TTT
ctttgaaatgcatggacaat

SEQ ID NO: 285816 - DNA, 20 bp, Artificial Sequence
  Description of Artificial Sequence: Synthetic oligonucleotide
  Target: LAMA2; (-) strand; PAM type: YTN; PAM sequence: TTG
ggaatttctttgaaatgcat

SEQ ID NO: 285817 - DNA, 20 bp, Artificial Sequence
  Description of Artificial Sequence: Synthetic oligonucleotide
  Target: LAMA2; (-) strand; PAM type: YTN; PAM sequence: CTG
attgggaatttctttgaaat

SEQ ID NO: 285818 - DNA, 20 bp, Artificial Sequence
  Description of Artificial Sequence: Synthetic oligonucleotide
  Target: LAMA2; (-) strand; PAM type: YTN; PAM sequence: TTC
caaaactgattgggaatttc

SEQ ID NO: 285819 - DNA, 20 bp, Artificial Sequence
  Description of Artificial Sequence: Synthetic oligonucleotide
  Target: LAMA2; (-) strand; PAM type: YTN; PAM sequence: TTT
ccaaaactgattgggaattt

SEQ ID NO: 285820 - DNA, 20 bp, Artificial Sequence
  Description of Artificial Sequence: Synthetic oligonucleotide
  Target: LAMA2; (-) strand; PAM type: YTN; PAM sequence: TTC
catttccaaaactgattggg

SEQ ID NO: 285821 - DNA, 20 bp, Artificial Sequence
  Description of Artificial Sequence: Synthetic oligonucleotide
  Target: LAMA2; (-) strand; PAM type: YTN; PAM sequence: TTG
taattccatttccaaaactg

SEQ ID NO: 285822 - DNA, 20 bp, Artificial Sequence
  Description of Artificial Sequence: Synthetic oligonucleotide
  Target: LAMA2; (-) strand; PAM type: YTN; PAM sequence: TTG
tgttgtaattccatttccaa

SEQ ID NO: 285823 - DNA, 20 bp, Artificial Sequence
  Description of Artificial Sequence: Synthetic oligonucleotide
  Target: LAMA2; (-) strand; PAM type: YTN; PAM sequence: TTA
caaaaaataaggcattgtgt

SEQ ID NO: 285824 - DNA, 20 bp, Artificial Sequence
  Description of Artificial Sequence: Synthetic oligonucleotide
  Target: LAMA2; (-) strand; PAM type: YTN; PAM sequence: CTT
acaaaaaataaggcattgtg

SEQ ID NO: 285825 - DNA, 20 bp, Artificial Sequence
  Description of Artificial Sequence: Synthetic oligonucleotide
  Target: LAMA2; (-) strand; PAM type: YTN; PAM sequence: CTA
acgtcttacaaaaaataagg

SEQ ID NO: 285826 - DNA, 20 bp, Artificial Sequence
  Description of Artificial Sequence: Synthetic oligonucleotide
  Target: LAMA2; (-) strand; PAM type: YTN; PAM sequence: TTC
taacgtcttacaaaaaataa

SEQ ID NO: 285827 - DNA, 20 bp, Artificial Sequence
  Description of Artificial Sequence: Synthetic oligonucleotide
  Target: LAMA2; (-) strand; PAM type: YTN; PAM sequence: TTT
ctaacgtcttacaaaaaata

SEQ ID NO: 285828 - DNA, 20 bp, Artificial Sequence
  Description of Artificial Sequence: Synthetic oligonucleotide
  Target: LAMA2; (-) strand; PAM type: YTN; PAM sequence: TTG
catatttctaacgtcttaca

SEQ ID NO: 285829 - DNA, 20 bp, Artificial Sequence
  Description of Artificial Sequence: Synthetic oligonucleotide
  Target: LAMA2; (-) strand; PAM type: YTN; PAM sequence: CTT
gcatatttctaacgtcttac

SEQ ID NO: 285830 - DNA, 20 bp, Artificial Sequence
  Description of Artificial Sequence: Synthetic oligonucleotide
  Target: LAMA2; (-) strand; PAM type: YTN; PAM sequence: CTA
cttgcatatttctaacgtct

SEQ ID NO: 285831 - DNA, 20 bp, Artificial Sequence
  Description of Artificial Sequence: Synthetic oligonucleotide
  Target: LAMA2; (-) strand; PAM type: YTN; PAM sequence: TTG
gctacttgcatatttctaac

SEQ ID NO: 285832 - DNA, 20 bp, Artificial Sequence
  Description of Artificial Sequence: Synthetic oligonucleotide
  Target: LAMA2; (-) strand; PAM type: YTN; PAM sequence: TTG
gaaaaaaattggctacttgc

SEQ ID NO: 285833 - DNA, 20 bp, Artificial Sequence
  Description of Artificial Sequence: Synthetic oligonucleotide
  Target: LAMA2; (-) strand; PAM type: YTN; PAM sequence: TTT
ggaaaaaaattggctacttg

SEQ ID NO: 285834 - DNA, 20 bp, Artificial Sequence
  Description of Artificial Sequence: Synthetic oligonucleotide
  Target: LAMA2; (-) strand; PAM type: YTN; PAM sequence: CTC
atttggaaaaaaattggcta

SEQ ID NO: 285835 - DNA, 20 bp, Artificial Sequence
  Description of Artificial Sequence: Synthetic oligonucleotide
  Target: LAMA2; (-) strand; PAM type: YTN; PAM sequence: TTA
gtacaaaactcatttggaaa

SEQ ID NO: 285836 - DNA, 20 bp, Artificial Sequence
  Description of Artificial Sequence: Synthetic oligonucleotide
  Target: LAMA2; (-) strand; PAM type: YTN; PAM sequence: TTT
agtacaaaactcatttggaa

SEQ ID NO: 285837 - DNA, 20 bp, Artificial Sequence
  Description of Artificial Sequence: Synthetic oligonucleotide
  Target: LAMA2; (-) strand; PAM type: YTN; PAM sequence: TTC
atttagtacaaaactcattt

SEQ ID NO: 285838 - DNA, 20 bp, Artificial Sequence
  Description of Artificial Sequence: Synthetic oligonucleotide
  Target: LAMA2; (-) strand; PAM type: YTN; PAM sequence: TTA
caaatcagaaaatgtaatat

SEQ ID NO: 285839 - DNA, 20 bp, Artificial Sequence
  Description of Artificial Sequence: Synthetic oligonucleotide
  Target: LAMA2; (-) strand; PAM type: YTN; PAM sequence: TTT
acaaatcagaaaatgtaata

SEQ ID NO: 285840 - DNA, 20 bp, Artificial Sequence
  Description of Artificial Sequence: Synthetic oligonucleotide
  Target: LAMA2; (-) strand; PAM type: YTN; PAM sequence: TTA
aggtcatatccagatatcca

SEQ ID NO: 285841 - DNA, 20 bp, Artificial Sequence
  Description of Artificial Sequence: Synthetic oligonucleotide
  Target: LAMA2; (-) strand; PAM type: YTN; PAM sequence: TTG
gtcatgtcaagtatgtgtta

SEQ ID NO: 285842 - DNA, 20 bp, Artificial Sequence
  Description of Artificial Sequence: Synthetic oligonucleotide
  Target: LAMA2; (-) strand; PAM type: YTN; PAM sequence: TTT
ggtcatgtcaagtatgtgtt

SEQ ID NO: 285843 - DNA, 20 bp, Artificial Sequence
  Description of Artificial Sequence: Synthetic oligonucleotide
  Target: LAMA2; (-) strand; PAM type: YTN; PAM sequence: TTT
tggtcatgtcaagtatgtgt

SEQ ID NO: 285844 - DNA, 20 bp, Artificial Sequence
  Description of Artificial Sequence: Synthetic oligonucleotide
  Target: LAMA2; (-) strand; PAM type: YTN; PAM sequence: TTA
atgttttggtcatgtcaagt

SEQ ID NO: 285845 - DNA, 20 bp, Artificial Sequence
  Description of Artificial Sequence: Synthetic oligonucleotide
  Target: LAMA2; (-) strand; PAM type: YTN; PAM sequence: TTT
aatgttttggtcatgtcaag

SEQ ID NO: 285846 - DNA, 20 bp, Artificial Sequence
  Description of Artificial Sequence: Synthetic oligonucleotide
  Target: LAMA2; (-) strand; PAM type: YTN; PAM sequence: CTT
taatgttttggtcatgtcaa

SEQ ID NO: 285847 - DNA, 20 bp, Artificial Sequence
  Description of Artificial Sequence: Synthetic oligonucleotide
  Target: LAMA2; (-) strand; PAM type: YTN; PAM sequence: TTA
aaataaatgtctttaatgtt

SEQ ID NO: 285848 - DNA, 20 bp, Artificial Sequence
  Description of Artificial Sequence: Synthetic oligonucleotide
  Target: LAMA2; (-) strand; PAM type: YTN; PAM sequence: TTT
aaaataaatgtctttaatgt

SEQ ID NO: 285849 - DNA, 20 bp, Artificial Sequence
  Description of Artificial Sequence: Synthetic oligonucleotide
  Target: LAMA2; (-) strand; PAM type: YTN; PAM sequence: CTT
taaaataaatgtctttaatg

SEQ ID NO: 285850 - DNA, 20 bp, Artificial Sequence
  Description of Artificial Sequence: Synthetic oligonucleotide
  Target: LAMA2; (-) strand; PAM type: YTN; PAM sequence: CTA
ctttaaaataaatgtcttta

SEQ ID NO: 285851 - DNA, 20 bp, Artificial Sequence
  Description of Artificial Sequence: Synthetic oligonucleotide
  Target: LAMA2; (-) strand; PAM type: YTN; PAM sequence: TTC
agaatcaacaaacccagaga

SEQ ID NO: 285852 - DNA, 20 bp, Artificial Sequence
  Description of Artificial Sequence: Synthetic oligonucleotide
  Target: LAMA2; (-) strand; PAM type: YTN; PAM sequence: TTT
cagaatcaacaaacccagag

SEQ ID NO: 285853 - DNA, 20 bp, Artificial Sequence
  Description of Artificial Sequence: Synthetic oligonucleotide
  Target: LAMA2; (-) strand; PAM type: YTN; PAM sequence: CTC
aatttcagaatcaacaaacc

SEQ ID NO: 285854 - DNA, 20 bp, Artificial Sequence
  Description of Artificial Sequence: Synthetic oligonucleotide
  Target: LAMA2; (-) strand; PAM type: YTN; PAM sequence: TTA
aaggagtatcagccactcaa

SEQ ID NO: 285855 - DNA, 20 bp, Artificial Sequence
  Description of Artificial Sequence: Synthetic oligonucleotide
  Target: LAMA2; (-) strand; PAM type: YTN; PAM sequence: TTT
aaaggagtatcagccactca

SEQ ID NO: 285856 - DNA, 20 bp, Artificial Sequence
  Description of Artificial Sequence: Synthetic oligonucleotide
  Target: LAMA2; (-) strand; PAM type: YTN; PAM sequence: TTC
atttaaaggagtatcagcca

SEQ ID NO: 285857 - DNA, 20 bp, Artificial Sequence
  Description of Artificial Sequence: Synthetic oligonucleotide
  Target: LAMA2; (-) strand; PAM type: YTN; PAM sequence: TTC
atccagtaagtaggtcattc

SEQ ID NO: 285858 - DNA, 20 bp, Artificial Sequence
  Description of Artificial Sequence: Synthetic oligonucleotide
  Target: LAMA2; (-) strand; PAM type: YTN; PAM sequence: TTT
catccagtaagtaggtcatt

SEQ ID NO: 285859 - DNA, 20 bp, Artificial Sequence
  Description of Artificial Sequence: Synthetic oligonucleotide
  Target: LAMA2; (-) strand; PAM type: YTN; PAM sequence: TTT
tcatccagtaagtaggtcat

SEQ ID NO: 285860 - DNA, 20 bp, Artificial Sequence
  Description of Artificial Sequence: Synthetic oligonucleotide
  Target: LAMA2; (-) strand; PAM type: YTN; PAM sequence: TTT
ttcatccagtaagtaggtca

SEQ ID NO: 285861 - DNA, 20 bp, Artificial Sequence
  Description of Artificial Sequence: Synthetic oligonucleotide
  Target: LAMA2; (-) strand; PAM type: YTN; PAM sequence: CTG
catttttcatccagtaagta

SEQ ID NO: 285862 - DNA, 20 bp, Artificial Sequence
  Description of Artificial Sequence: Synthetic oligonucleotide
  Target: LAMA2; (-) strand; PAM type: YTN; PAM sequence: TTC
actgcatttttcatccagta

SEQ ID NO: 285863 - DNA, 20 bp, Artificial Sequence
  Description of Artificial Sequence: Synthetic oligonucleotide
  Target: LAMA2; (-) strand; PAM type: YTN; PAM sequence: TTT
cactgcatttttcatccagt

SEQ ID NO: 285864 - DNA, 20 bp, Artificial Sequence
  Description of Artificial Sequence: Synthetic oligonucleotide
  Target: LAMA2; (-) strand; PAM type: YTN; PAM sequence: TTT
tcactgcatttttcatccag

SEQ ID NO: 285865 - DNA, 20 bp, Artificial Sequence
  Description of Artificial Sequence: Synthetic oligonucleotide
  Target: LAMA2; (-) strand; PAM type: YTN; PAM sequence: TTG
gattttcactgcatttttca

SEQ ID NO: 285866 - DNA, 20 bp, Artificial Sequence
  Description of Artificial Sequence: Synthetic oligonucleotide
  Target: LAMA2; (-) strand; PAM type: YTN; PAM sequence: CTA
ttggattttcactgcatttt

SEQ ID NO: 285867 - DNA, 20 bp, Artificial Sequence
  Description of Artificial Sequence: Synthetic oligonucleotide
  Target: LAMA2; (-) strand; PAM type: YTN; PAM sequence: TTA
tatctattggattttcactg

SEQ ID NO: 285868 - DNA, 20 bp, Artificial Sequence
  Description of Artificial Sequence: Synthetic oligonucleotide
  Target: LAMA2; (-) strand; PAM type: YTN; PAM sequence: TTA
ttatatctattggattttca

SEQ ID NO: 285869 - DNA, 20 bp, Artificial Sequence
  Description of Artificial Sequence: Synthetic oligonucleotide
  Target: LAMA2; (-) strand; PAM type: YTN; PAM sequence: TTG
agtatcccattattatatct

SEQ ID NO: 285870 - DNA, 20 bp, Artificial Sequence
  Description of Artificial Sequence: Synthetic oligonucleotide
  Target: LAMA2; (-) strand; PAM type: YTN; PAM sequence: TTA
ttgagtatcccattattata

SEQ ID NO: 285871 - DNA, 20 bp, Artificial Sequence
  Description of Artificial Sequence: Synthetic oligonucleotide
  Target: LAMA2; (-) strand; PAM type: YTN; PAM sequence: CTC
aaacattattgagtatccca

SEQ ID NO: 285872 - DNA, 20 bp, Artificial Sequence
  Description of Artificial Sequence: Synthetic oligonucleotide
  Target: LAMA2; (-) strand; PAM type: YTN; PAM sequence: TTA
atcatgatgaactcaaacat

SEQ ID NO: 285873 - DNA, 20 bp, Artificial Sequence
  Description of Artificial Sequence: Synthetic oligonucleotide
  Target: LAMA2; (-) strand; PAM type: YTN; PAM sequence: TTA
ccagttaatcatgatgaact

SEQ ID NO: 285874 - DNA, 20 bp, Artificial Sequence
  Description of Artificial Sequence: Synthetic oligonucleotide
  Target: LAMA2; (-) strand; PAM type: YTN; PAM sequence: TTT
accagttaatcatgatgaac

SEQ ID NO: 285875 - DNA, 20 bp, Artificial Sequence
  Description of Artificial Sequence: Synthetic oligonucleotide
  Target: LAMA2; (-) strand; PAM type: YTN; PAM sequence: TTA
tttaccagttaatcatgatg

SEQ ID NO: 285876 - DNA, 20 bp, Artificial Sequence
  Description of Artificial Sequence: Synthetic oligonucleotide
  Target: LAMA2; (-) strand; PAM type: YTN; PAM sequence: CTG
caacattatttaccagttaa

SEQ ID NO: 285877 - DNA, 20 bp, Artificial Sequence
  Description of Artificial Sequence: Synthetic oligonucleotide
  Target: LAMA2; (-) strand; PAM type: YTN; PAM sequence: TTC
aatactgcaacattatttac

SEQ ID NO: 285878 - DNA, 20 bp, Artificial Sequence
  Description of Artificial Sequence: Synthetic oligonucleotide
  Target: LAMA2; (-) strand; PAM type: YTN; PAM sequence: TTT
caatactgcaacattattta

SEQ ID NO: 285879 - DNA, 20 bp, Artificial Sequence
  Description of Artificial Sequence: Synthetic oligonucleotide
  Target: LAMA2; (-) strand; PAM type: YTN; PAM sequence: TTA
aggcatttcaatactgcaac

SEQ ID NO: 285880 - DNA, 20 bp, Artificial Sequence
  Description of Artificial Sequence: Synthetic oligonucleotide
  Target: LAMA2; (-) strand; PAM type: YTN; PAM sequence: TTT
aaggcatttcaatactgcaa

SEQ ID NO: 285881 - DNA, 20 bp, Artificial Sequence
  Description of Artificial Sequence: Synthetic oligonucleotide
  Target: LAMA2; (-) strand; PAM type: YTN; PAM sequence: CTT
taaggcatttcaatactgca

SEQ ID NO: 285882 - DNA, 20 bp, Artificial Sequence
  Description of Artificial Sequence: Synthetic oligonucleotide
  Target: LAMA2; (-) strand; PAM type: YTN; PAM sequence: TTA
agtatctttaaggcatttca

SEQ ID NO: 285883 - DNA, 20 bp, Artificial Sequence
  Description of Artificial Sequence: Synthetic oligonucleotide
  Target: LAMA2; (-) strand; PAM type: YTN; PAM sequence: CTA
agcattaagtatctttaagg

SEQ ID NO: 285884 - DNA, 20 bp, Artificial Sequence
  Description of Artificial Sequence: Synthetic oligonucleotide
  Target: LAMA2; (-) strand; PAM type: YTN; PAM sequence: CTA
aagaaaaatcactaagcatt

SEQ ID NO: 285885 - DNA, 20 bp, Artificial Sequence
  Description of Artificial Sequence: Synthetic oligonucleotide
  Target: LAMA2; (-) strand; PAM type: YTN; PAM sequence: TTA
gtaagacatctaaagaaaaa

SEQ ID NO: 285886 - DNA, 20 bp, Artificial Sequence
  Description of Artificial Sequence: Synthetic oligonucleotide
  Target: LAMA2; (-) strand; PAM type: YTN; PAM sequence: CTT
agtaagacatctaaagaaaa

SEQ ID NO: 285887 - DNA, 20 bp, Artificial Sequence
  Description of Artificial Sequence: Synthetic oligonucleotide
  Target: LAMA2; (-) strand; PAM type: YTN; PAM sequence: CTA
atgcagatccttagtaagac

SEQ ID NO: 285888 - DNA, 20 bp, Artificial Sequence
  Description of Artificial Sequence: Synthetic oligonucleotide
  Target: LAMA2; (-) strand; PAM type: YTN; PAM sequence: TTC
taatgcagatccttagtaag

SEQ ID NO: 285889 - DNA, 20 bp, Artificial Sequence
  Description of Artificial Sequence: Synthetic oligonucleotide
  Target: LAMA2; (-) strand; PAM type: YTN; PAM sequence: TTT
ctaatgcagatccttagtaa

SEQ ID NO: 285890 - DNA, 20 bp, Artificial Sequence
  Description of Artificial Sequence: Synthetic oligonucleotide
  Target: LAMA2; (-) strand; PAM type: YTN; PAM sequence: TTA
tttctaatgcagatccttag

SEQ ID NO: 285891 - DNA, 20 bp, Artificial Sequence
  Description of Artificial Sequence: Synthetic oligonucleotide
  Target: LAMA2; (-) strand; PAM type: YTN; PAM sequence: TTG
ttatttctaatgcagatcct

SEQ ID NO: 285892 - DNA, 20 bp, Artificial Sequence
  Description of Artificial Sequence: Synthetic oligonucleotide
  Target: LAMA2; (-) strand; PAM type: YTN; PAM sequence: TTA
ttgttatttctaatgcagat

SEQ ID NO: 285893 - DNA, 20 bp, Artificial Sequence
  Description of Artificial Sequence: Synthetic oligonucleotide
  Target: LAMA2; (-) strand; PAM type: YTN; PAM sequence: CTA
tcaattattgttatttctaa

SEQ ID NO: 285894 - DNA, 20 bp, Artificial Sequence
  Description of Artificial Sequence: Synthetic oligonucleotide
  Target: LAMA2; (-) strand; PAM type: YTN; PAM sequence: CTC
tatcaattattgttatttct

SEQ ID NO: 285895 - DNA, 20 bp, Artificial Sequence
  Description of Artificial Sequence: Synthetic oligonucleotide
  Target: LAMA2; (-) strand; PAM type: YTN; PAM sequence: TTG
gctctatcaattattgttat

SEQ ID NO: 285896 - DNA, 20 bp, Artificial Sequence
  Description of Artificial Sequence: Synthetic oligonucleotide
  Target: LAMA2; (-) strand; PAM type: YTN; PAM sequence: TTT
ggctctatcaattattgtta

SEQ ID NO: 285897 - DNA, 20 bp, Artificial Sequence
  Description of Artificial Sequence: Synthetic oligonucleotide
  Target: LAMA2; (-) strand; PAM type: YTN; PAM sequence: TTA
gaatgtttggctctatcaat

SEQ ID NO: 285898 - DNA, 20 bp, Artificial Sequence
  Description of Artificial Sequence: Synthetic oligonucleotide
  Target: LAMA2; (-) strand; PAM type: YTN; PAM sequence: TTT
agaatgtttggctctatcaa

SEQ ID NO: 285899 - DNA, 20 bp, Artificial Sequence
  Description of Artificial Sequence: Synthetic oligonucleotide
  Target: LAMA2; (-) strand; PAM type: YTN; PAM sequence: TTT
tagaatgtttggctctatca

SEQ ID NO: 285900 - DNA, 20 bp, Artificial Sequence
  Description of Artificial Sequence: Synthetic oligonucleotide
  Target: LAMA2; (-) strand; PAM type: YTN; PAM sequence: CTT
ttagaatgtttggctctatc

SEQ ID NO: 285901 - DNA, 20 bp, Artificial Sequence
  Description of Artificial Sequence: Synthetic oligonucleotide
  Target: LAMA2; (-) strand; PAM type: YTN; PAM sequence: TTC
aaacatccttttagaatgtt

SEQ ID NO: 285902 - DNA, 20 bp, Artificial Sequence
  Description of Artificial Sequence: Synthetic oligonucleotide
  Target: LAMA2; (-) strand; PAM type: YTN; PAM sequence: CTG
aaattcaaacatccttttag

SEQ ID NO: 285903 - DNA, 20 bp, Artificial Sequence
  Description of Artificial Sequence: Synthetic oligonucleotide
  Target: LAMA2; (-) strand; PAM type: YTN; PAM sequence: TTC
tgaaattcaaacatcctttt

SEQ ID NO: 285904 - DNA, 20 bp, Artificial Sequence
  Description of Artificial Sequence: Synthetic oligonucleotide
  Target: LAMA2; (-) strand; PAM type: YTN; PAM sequence: TTT
ctgaaattcaaacatccttt

SEQ ID NO: 285905 - DNA, 20 bp, Artificial Sequence
  Description of Artificial Sequence: Synthetic oligonucleotide
  Target: LAMA2; (-) strand; PAM type: YTN; PAM sequence: TTG
taagaggaaagaaatttctg

SEQ ID NO: 285906 - DNA, 20 bp, Artificial Sequence
  Description of Artificial Sequence: Synthetic oligonucleotide
  Target: LAMA2; (-) strand; PAM type: YTN; PAM sequence: CTT
gtaagaggaaagaaatttct

SEQ ID NO: 285907 - DNA, 20 bp, Artificial Sequence
  Description of Artificial Sequence: Synthetic oligonucleotide
  Target: LAMA2; (-) strand; PAM type: YTN; PAM sequence: CTC
ttgtaagaggaaagaaattt

SEQ ID NO: 285908 - DNA, 20 bp, Artificial Sequence
  Description of Artificial Sequence: Synthetic oligonucleotide
  Target: LAMA2; (-) strand; PAM type: YTN; PAM sequence: TTA
ggatatgtcactcttgtaag

SEQ ID NO: 285909 - DNA, 20 bp, Artificial Sequence
  Description of Artificial Sequence: Synthetic oligonucleotide
  Target: LAMA2; (-) strand; PAM type: YTN; PAM sequence: TTT
aggatatgtcactcttgtaa

SEQ ID NO: 285910 - DNA, 20 bp, Artificial Sequence
  Description of Artificial Sequence: Synthetic oligonucleotide
  Target: LAMA2; (-) strand; PAM type: YTN; PAM sequence: CTT
taggatatgtcactcttgta

SEQ ID NO: 285911 - DNA, 20 bp, Artificial Sequence
  Description of Artificial Sequence: Synthetic oligonucleotide
  Target: LAMA2; (-) strand; PAM type: YTN; PAM sequence: CTA
gaagaaatctttaggatatg

SEQ ID NO: 285912 - DNA, 20 bp, Artificial Sequence
  Description of Artificial Sequence: Synthetic oligonucleotide
  Target: LAMA2; (-) strand; PAM type: YTN; PAM sequence: CTC
tagaagaaatctttaggata

SEQ ID NO: 285913 - DNA, 20 bp, Artificial Sequence
  Description of Artificial Sequence: Synthetic oligonucleotide
  Target: LAMA2; (-) strand; PAM type: YTN; PAM sequence: CTG
tatctctagaagaaatcttt

SEQ ID NO: 285914 - DNA, 20 bp, Artificial Sequence
  Description of Artificial Sequence: Synthetic oligonucleotide
  Target: LAMA2; (-) strand; PAM type: YTN; PAM sequence: CTA
gaagaaatcaggtaaatcaa

SEQ ID NO: 285915 - DNA, 20 bp, Artificial Sequence
  Description of Artificial Sequence: Synthetic oligonucleotide
  Target: LAMA2; (-) strand; PAM type: YTN; PAM sequence: CTC
tagaagaaatcaggtaaatc

SEQ ID NO: 285916 - DNA, 20 bp, Artificial Sequence
  Description of Artificial Sequence: Synthetic oligonucleotide
  Target: LAMA2; (-) strand; PAM type: YTN; PAM sequence: CTA
tatctctagaagaaatcagg

SEQ ID NO: 285917 - DNA, 20 bp, Artificial Sequence
  Description of Artificial Sequence: Synthetic oligonucleotide
  Target: LAMA2; (-) strand; PAM type: YTN; PAM sequence: CTA
gaagaaatcaggtaaatcaa

SEQ ID NO: 285918 - DNA, 20 bp, Artificial Sequence
  Description of Artificial Sequence: Synthetic oligonucleotide
  Target: LAMA2; (-) strand; PAM type: YTN; PAM sequence: CTC
tagaagaaatcaggtaaatc

SEQ ID NO: 285919 - DNA, 20 bp, Artificial Sequence
  Description of Artificial Sequence: Synthetic oligonucleotide
  Target: LAMA2; (-) strand; PAM type: YTN; PAM sequence: CTG
tatctctagaagaaatcagg

SEQ ID NO: 285920 - DNA, 20 bp, Artificial Sequence
  Description of Artificial Sequence: Synthetic oligonucleotide
  Target: LAMA2; (-) strand; PAM type: YTN; PAM sequence: TTA
aaacaggtaaatcaaaatac

SEQ ID NO: 285921 - DNA, 20 bp, Artificial Sequence
  Description of Artificial Sequence: Synthetic oligonucleotide
  Target: LAMA2; (-) strand; PAM type: YTN; PAM sequence: CTT
aaaacaggtaaatcaaaata

SEQ ID NO: 285922 - DNA, 20 bp, Artificial Sequence
  Description of Artificial Sequence: Synthetic oligonucleotide
  Target: LAMA2; (-) strand; PAM type: YTN; PAM sequence: TTA
aacaacttaaaacaggtaaa

SEQ ID NO: 285923 - DNA, 20 bp, Artificial Sequence
  Description of Artificial Sequence: Synthetic oligonucleotide
  Target: LAMA2; (-) strand; PAM type: YTN; PAM sequence: TTT
aaacaacttaaaacaggtaa

SEQ ID NO: 285924 - DNA, 20 bp, Artificial Sequence
  Description of Artificial Sequence: Synthetic oligonucleotide
  Target: LAMA2; (-) strand; PAM type: YTN; PAM sequence: TTT
taaacaacttaaaacaggta

SEQ ID NO: 285925 - DNA, 20 bp, Artificial Sequence
  Description of Artificial Sequence: Synthetic oligonucleotide
  Target: LAMA2; (-) strand; PAM type: YTN; PAM sequence: CTT
ttaaacaacttaaaacaggt

SEQ ID NO: 285926 - DNA, 20 bp, Artificial Sequence
  Description of Artificial Sequence: Synthetic oligonucleotide
  Target: LAMA2; (-) strand; PAM type: YTN; PAM sequence: TTC
ttttaaacaacttaaaacag

SEQ ID NO: 285927 - DNA, 20 bp, Artificial Sequence
  Description of Artificial Sequence: Synthetic oligonucleotide
  Target: LAMA2; (-) strand; PAM type: YTN; PAM sequence: TTT
cttttaaacaacttaaaaca

SEQ ID NO: 285928 - DNA, 20 bp, Artificial Sequence
  Description of Artificial Sequence: Synthetic oligonucleotide
  Target: LAMA2; (-) strand; PAM type: YTN; PAM sequence: TTA
taggtatttcttttaaacaa

SEQ ID NO: 285929 - DNA, 20 bp, Artificial Sequence
  Description of Artificial Sequence: Synthetic oligonucleotide
  Target: LAMA2; (-) strand; PAM type: YTN; PAM sequence: TTC
agttataggtatttctttta

SEQ ID NO: 285930 - DNA, 20 bp, Artificial Sequence
  Description of Artificial Sequence: Synthetic oligonucleotide
  Target: LAMA2; (-) strand; PAM type: YTN; PAM sequence: TTT
cagttataggtatttctttt

SEQ ID NO: 285931 - DNA, 20 bp, Artificial Sequence
  Description of Artificial Sequence: Synthetic oligonucleotide
  Target: LAMA2; (-) strand; PAM type: YTN; PAM sequence: TTT
tcagttataggtatttcttt

SEQ ID NO: 285932 - DNA, 20 bp, Artificial Sequence
  Description of Artificial Sequence: Synthetic oligonucleotide
  Target: LAMA2; (-) strand; PAM type: YTN; PAM sequence: TTG
attttcagttataggtattt

SEQ ID NO: 285933 - DNA, 20 bp, Artificial Sequence
  Description of Artificial Sequence: Synthetic oligonucleotide
  Target: LAMA2; (-) strand; PAM type: YTN; PAM sequence: TTT
gattttcagttataggtatt

SEQ ID NO: 285934 - DNA, 20 bp, Artificial Sequence
  Description of Artificial Sequence: Synthetic oligonucleotide
  Target: LAMA2; (-) strand; PAM type: YTN; PAM sequence: TTT
tgattttcagttataggtat

SEQ ID NO: 285935 - DNA, 20 bp, Artificial Sequence
  Description of Artificial Sequence: Synthetic oligonucleotide
  Target: LAMA2; (-) strand; PAM type: YTN; PAM sequence: CTG
ttttgattttcagttatagg

SEQ ID NO: 285936 - DNA, 20 bp, Artificial Sequence
  Description of Artificial Sequence: Synthetic oligonucleotide
  Target: LAMA2; (-) strand; PAM type: YTN; PAM sequence: TTC
tgttttgattttcagttata

SEQ ID NO: 285937 - DNA, 20 bp, Artificial Sequence
  Description of Artificial Sequence: Synthetic oligonucleotide
  Target: LAMA2; (-) strand; PAM type: YTN; PAM sequence: TTT
ctgttttgattttcagttat

SEQ ID NO: 285938 - DNA, 20 bp, Artificial Sequence
  Description of Artificial Sequence: Synthetic oligonucleotide
  Target: LAMA2; (-) strand; PAM type: YTN; PAM sequence: CTT
tctgttttgattttcagtta

SEQ ID NO: 285939 - DNA, 20 bp, Artificial Sequence
  Description of Artificial Sequence: Synthetic oligonucleotide
  Target: LAMA2; (-) strand; PAM type: YTN; PAM sequence: TTG
aatactttctgttttgattt

SEQ ID NO: 285940 - DNA, 20 bp, Artificial Sequence
  Description of Artificial Sequence: Synthetic oligonucleotide
  Target: LAMA2; (-) strand; PAM type: YTN; PAM sequence: TTT
gaatactttctgttttgatt

SEQ ID NO: 285941 - DNA, 20 bp, Artificial Sequence
  Description of Artificial Sequence: Synthetic oligonucleotide
  Target: LAMA2; (-) strand; PAM type: YTN; PAM sequence: TTT
tgaatactttctgttttgat

SEQ ID NO: 285942 - DNA, 20 bp, Artificial Sequence
  Description of Artificial Sequence: Synthetic oligonucleotide
  Target: LAMA2; (-) strand; PAM type: YTN; PAM sequence: CTT
ttgaatactttctgttttga

SEQ ID NO: 285943 - DNA, 20 bp, Artificial Sequence
  Description of Artificial Sequence: Synthetic oligonucleotide
  Target: LAMA2; (-) strand; PAM type: YTN; PAM sequence: TTC
cttttgaatactttctgttt

SEQ ID NO: 285944 - DNA, 20 bp, Artificial Sequence
  Description of Artificial Sequence: Synthetic oligonucleotide
  Target: LAMA2; (-) strand; PAM type: YTN; PAM sequence: TTT
ccttttgaatactttctgtt

SEQ ID NO: 285945 - DNA, 20 bp, Artificial Sequence
  Description of Artificial Sequence: Synthetic oligonucleotide
  Target: LAMA2; (-) strand; PAM type: YTN; PAM sequence: TTT
tccttttgaatactttctgt

SEQ ID NO: 285946 - DNA, 20 bp, Artificial Sequence
  Description of Artificial Sequence: Synthetic oligonucleotide
  Target: LAMA2; (-) strand; PAM type: YTN; PAM sequence: CTT
ttccttttgaatactttctg

SEQ ID NO: 285947 - DNA, 20 bp, Artificial Sequence
  Description of Artificial Sequence: Synthetic oligonucleotide
  Target: LAMA2; (-) strand; PAM type: YTN; PAM sequence: TTG
acagccagtacataatcagt

SEQ ID NO: 285948 - DNA, 20 bp, Artificial Sequence
  Description of Artificial Sequence: Synthetic oligonucleotide
  Target: LAMA2; (-) strand; PAM type: YTN; PAM sequence: CTG
ttgacagccagtacataatc

SEQ ID NO: 285949 - DNA, 20 bp, Artificial Sequence
  Description of Artificial Sequence: Synthetic oligonucleotide
  Target: LAMA2; (-) strand; PAM type: YTN; PAM sequence: TTA
gcccaaactgttgacagcca

SEQ ID NO: 285950 - DNA, 20 bp, Artificial Sequence
  Description of Artificial Sequence: Synthetic oligonucleotide
  Target: LAMA2; (-) strand; PAM type: YTN; PAM sequence: CTT
agcccaaactgttgacagcc

SEQ ID NO: 285951 - DNA, 20 bp, Artificial Sequence
  Description of Artificial Sequence: Synthetic oligonucleotide
  Target: LAMA2; (-) strand; PAM type: YTN; PAM sequence: TTC
acttagcccaaactgttgac

SEQ ID NO: 285952 - DNA, 20 bp, Artificial Sequence
  Description of Artificial Sequence: Synthetic oligonucleotide
  Target: LAMA2; (-) strand; PAM type: YTN; PAM sequence: CTG
aaacattcacttagcccaaa

SEQ ID NO: 285953 - DNA, 20 bp, Artificial Sequence
  Description of Artificial Sequence: Synthetic oligonucleotide
  Target: LAMA2; (-) strand; PAM type: YTN; PAM sequence: CTC
agaaactgaaacattcactt

SEQ ID NO: 285954 - DNA, 20 bp, Artificial Sequence
  Description of Artificial Sequence: Synthetic oligonucleotide
  Target: LAMA2; (-) strand; PAM type: YTN; PAM sequence: CTC
tcagaaactgaaacattcac

SEQ ID NO: 285955 - DNA, 20 bp, Artificial Sequence
  Description of Artificial Sequence: Synthetic oligonucleotide
  Target: LAMA2; (-) strand; PAM type: YTN; PAM sequence: TTG
aatatactctcagaaactga

SEQ ID NO: 285956 - DNA, 20 bp, Artificial Sequence
  Description of Artificial Sequence: Synthetic oligonucleotide
  Target: LAMA2; (-) strand; PAM type: YTN; PAM sequence: TTT
gaatatactctcagaaactg

SEQ ID NO: 285957 - DNA, 20 bp, Artificial Sequence
  Description of Artificial Sequence: Synthetic oligonucleotide
  Target: LAMA2; (-) strand; PAM type: YTN; PAM sequence: TTT
tgaatatactctcagaaact

SEQ ID NO: 285958 - DNA, 20 bp, Artificial Sequence
  Description of Artificial Sequence: Synthetic oligonucleotide
  Target: LAMA2; (-) strand; PAM type: YTN; PAM sequence: CTG
gttttgaatatactctcaga

SEQ ID NO: 285959 - DNA, 20 bp, Artificial Sequence
  Description of Artificial Sequence: Synthetic oligonucleotide
  Target: LAMA2; (-) strand; PAM type: YTN; PAM sequence: TTC
tggttttgaatatactctca

SEQ ID NO: 285960 - DNA, 20 bp, Artificial Sequence
  Description of Artificial Sequence: Synthetic oligonucleotide
  Target: LAMA2; (-) strand; PAM type: YTN; PAM sequence: TTT
ctggttttgaatatactctc

SEQ ID NO: 285961 - DNA, 20 bp, Artificial Sequence
  Description of Artificial Sequence: Synthetic oligonucleotide
  Target: LAMA2; (-) strand; PAM type: YTN; PAM sequence: TTT
tctggttttgaatatactct

SEQ ID NO: 285962 - DNA, 20 bp, Artificial Sequence
  Description of Artificial Sequence: Synthetic oligonucleotide
  Target: LAMA2; (-) strand; PAM type: YTN; PAM sequence: CTG
ttttctggttttgaatatac

SEQ ID NO: 285963 - DNA, 20 bp, Artificial Sequence
  Description of Artificial Sequence: Synthetic oligonucleotide
  Target: LAMA2; (-) strand; PAM type: YTN; PAM sequence: TTC
tgttttctggttttgaatat

SEQ ID NO: 285964 - DNA, 20 bp, Artificial Sequence
  Description of Artificial Sequence: Synthetic oligonucleotide
  Target: LAMA2; (-) strand; PAM type: YTN; PAM sequence: TTT
ctgttttctggttttgaata

SEQ ID NO: 285965 - DNA, 20 bp, Artificial Sequence
  Description of Artificial Sequence: Synthetic oligonucleotide
  Target: LAMA2; (-) strand; PAM type: YTN; PAM sequence: CTT
tctgttttctggttttgaat

SEQ ID NO: 285966 - DNA, 20 bp, Artificial Sequence
  Description of Artificial Sequence: Synthetic oligonucleotide
  Target: LAMA2; (-) strand; PAM type: YTN; PAM sequence: CTG
ctttctgttttctggttttg

SEQ ID NO: 285967 - DNA, 20 bp, Artificial Sequence
  Description of Artificial Sequence: Synthetic oligonucleotide
  Target: LAMA2; (-) strand; PAM type: YTN; PAM sequence: TTA
cctgctttctgttttctggt

SEQ ID NO: 285968 - DNA, 20 bp, Artificial Sequence
  Description of Artificial Sequence: Synthetic oligonucleotide
  Target: LAMA2; (-) strand; PAM type: YTN; PAM sequence: TTG
gattacctgctttctgtttt

SEQ ID NO: 285969 - DNA, 20 bp, Artificial Sequence
  Description of Artificial Sequence: Synthetic oligonucleotide
  Target: LAMA2; (-) strand; PAM type: YTN; PAM sequence: CTT
ggattacctgctttctgttt

SEQ ID NO: 285970 - DNA, 20 bp, Artificial Sequence
  Description of Artificial Sequence: Synthetic oligonucleotide
  Target: LAMA2; (-) strand; PAM type: YTN; PAM sequence: CTC
ttggattacctgctttctgt

SEQ ID NO: 285971 - DNA, 20 bp, Artificial Sequence
  Description of Artificial Sequence: Synthetic oligonucleotide
  Target: LAMA2; (-) strand; PAM type: YTN; PAM sequence: TTC
atatagaaaatactcttgga

SEQ ID NO: 285972 - DNA, 20 bp, Artificial Sequence
  Description of Artificial Sequence: Synthetic oligonucleotide
  Target: LAMA2; (-) strand; PAM type: YTN; PAM sequence: CTC
acacattcatatagaaaata

SEQ ID NO: 285973 - DNA, 20 bp, Artificial Sequence
  Description of Artificial Sequence: Synthetic oligonucleotide
  Target: LAMA2; (-) strand; PAM type: YTN; PAM sequence: CTC
tcacacattcatatagaaaa

SEQ ID NO: 285974 - DNA, 20 bp, Artificial Sequence
  Description of Artificial Sequence: Synthetic oligonucleotide
  Target: LAMA2; (-) strand; PAM type: YTN; PAM sequence: TTG
cccagctctcacacattcat

SEQ ID NO: 285975 - DNA, 20 bp, Artificial Sequence
  Description of Artificial Sequence: Synthetic oligonucleotide
  Target: LAMA2; (-) strand; PAM type: YTN; PAM sequence: CTA
ttgcccagctctcacacatt

SEQ ID NO: 285976 - DNA, 20 bp, Artificial Sequence
  Description of Artificial Sequence: Synthetic oligonucleotide
  Target: LAMA2; (-) strand; PAM type: YTN; PAM sequence: CTA
gacagtaatctattgcccag

SEQ ID NO: 285977 - DNA, 20 bp, Artificial Sequence
  Description of Artificial Sequence: Synthetic oligonucleotide
  Target: LAMA2; (-) strand; PAM type: YTN; PAM sequence: CTG
tcacagcagcatgaagtgga

SEQ ID NO: 285978 - DNA, 20 bp, Artificial Sequence
  Description of Artificial Sequence: Synthetic oligonucleotide
  Target: LAMA2; (-) strand; PAM type: YTN; PAM sequence: CTC
tgtcacagcagcatgaagtg

SEQ ID NO: 285979 - DNA, 20 bp, Artificial Sequence
  Description of Artificial Sequence: Synthetic oligonucleotide
  Target: LAMA2; (-) strand; PAM type: YTN; PAM sequence: CTG
taatactctgtcacagcagc

SEQ ID NO: 285980 - DNA, 20 bp, Artificial Sequence
  Description of Artificial Sequence: Synthetic oligonucleotide
  Target: LAMA2; (-) strand; PAM type: YTN; PAM sequence: TTA
cccagtctgtaatactctgt

SEQ ID NO: 285981 - DNA, 20 bp, Artificial Sequence
  Description of Artificial Sequence: Synthetic oligonucleotide
  Target: LAMA2; (-) strand; PAM type: YTN; PAM sequence: TTA
taaattacccagtctgtaat

SEQ ID NO: 285982 - DNA, 20 bp, Artificial Sequence
  Description of Artificial Sequence: Synthetic oligonucleotide
  Target: LAMA2; (-) strand; PAM type: YTN; PAM sequence: TTT
ataaattacccagtctgtaa

SEQ ID NO: 285983 - DNA, 20 bp, Artificial Sequence
  Description of Artificial Sequence: Synthetic oligonucleotide
  Target: LAMA2; (-) strand; PAM type: YTN; PAM sequence: CTT
tataaattacccagtctgta

SEQ ID NO: 285984 - DNA, 20 bp, Artificial Sequence
  Description of Artificial Sequence: Synthetic oligonucleotide
  Target: LAMA2; (-) strand; PAM type: YTN; PAM sequence: TTC
tttataaattacccagtctg

SEQ ID NO: 285985 - DNA, 20 bp, Artificial Sequence
  Description of Artificial Sequence: Synthetic oligonucleotide
  Target: LAMA2; (-) strand; PAM type: YTN; PAM sequence: TTT
ctttataaattacccagtct

SEQ ID NO: 285986 - DNA, 20 bp, Artificial Sequence
  Description of Artificial Sequence: Synthetic oligonucleotide
  Target: LAMA2; (-) strand; PAM type: YTN; PAM sequence: TTT
tctttataaattacccagtc

SEQ ID NO: 285987 - DNA, 20 bp, Artificial Sequence
  Description of Artificial Sequence: Synthetic oligonucleotide
  Target: LAMA2; (-) strand; PAM type: YTN; PAM sequence: TTA
ttttctttataaattaccca

SEQ ID NO: 285988 - DNA, 20 bp, Artificial Sequence
  Description of Artificial Sequence: Synthetic oligonucleotide
  Target: LAMA2; (-) strand; PAM type: YTN; PAM sequence: TTT
attttctttataaattaccc

SEQ ID NO: 285989 - DNA, 20 bp, Artificial Sequence
  Description of Artificial Sequence: Synthetic oligonucleotide
  Target: LAMA2; (-) strand; PAM type: YTN; PAM sequence: CTG
tgagaataaatttattttct

SEQ ID NO: 285990 - DNA, 20 bp, Artificial Sequence
  Description of Artificial Sequence: Synthetic oligonucleotide
  Target: LAMA2; (-) strand; PAM type: YTN; PAM sequence: CTC
cagaactgtgagaataaatt

SEQ ID NO: 285991 - DNA, 20 bp, Artificial Sequence
  Description of Artificial Sequence: Synthetic oligonucleotide
  Target: LAMA2; (-) strand; PAM type: YTN; PAM sequence: TTC
ccagtctccagaactgtgag

SEQ ID NO: 285992 - DNA, 20 bp, Artificial Sequence
  Description of Artificial Sequence: Synthetic oligonucleotide
  Target: LAMA2; (-) strand; PAM type: YTN; PAM sequence: CTT
cccagtctccagaactgtga

SEQ ID NO: 285993 - DNA, 20 bp, Artificial Sequence
  Description of Artificial Sequence: Synthetic oligonucleotide
  Target: LAMA2; (-) strand; PAM type: YTN; PAM sequence: TTG
gacttcccagtctccagaac

SEQ ID NO: 285994 - DNA, 20 bp, Artificial Sequence
  Description of Artificial Sequence: Synthetic oligonucleotide
  Target: LAMA2; (-) strand; PAM type: YTN; PAM sequence: CTT
ggacttcccagtctccagaa

SEQ ID NO: 285995 - DNA, 20 bp, Artificial Sequence
  Description of Artificial Sequence: Synthetic oligonucleotide
  Target: LAMA2; (-) strand; PAM type: YTN; PAM sequence: TTG
atcttggacttcccagtctc

SEQ ID NO: 285996 - DNA, 20 bp, Artificial Sequence
  Description of Artificial Sequence: Synthetic oligonucleotide
  Target: LAMA2; (-) strand; PAM type: YTN; PAM sequence: CTT
gatcttggacttcccagtct

SEQ ID NO: 285997 - DNA, 20 bp, Artificial Sequence
  Description of Artificial Sequence: Synthetic oligonucleotide
  Target: LAMA2; (-) strand; PAM type: YTN; PAM sequence: CTG
ccagcatcttgatcttggac

SEQ ID NO: 285998 - DNA, 20 bp, Artificial Sequence
  Description of Artificial Sequence: Synthetic oligonucleotide
  Target: LAMA2; (-) strand; PAM type: YTN; PAM sequence: CTA
acctgccagcatcttgatct

SEQ ID NO: 285999 - DNA, 20 bp, Artificial Sequence
  Description of Artificial Sequence: Synthetic oligonucleotide
  Target: LAMA2; (-) strand; PAM type: YTN; PAM sequence: TTG
gaagcataaaaacaggtccc

SEQ ID NO: 286000 - DNA, 20 bp, Artificial Sequence
  Description of Artificial Sequence: Synthetic oligonucleotide
  Target: LAMA2; (-) strand; PAM type: YTN; PAM sequence: CTT
ggaagcataaaaacaggtcc

SEQ ID NO: 286001 - DNA, 20 bp, Artificial Sequence
  Description of Artificial Sequence: Synthetic oligonucleotide
  Target: LAMA2; (-) strand; PAM type: YTN; PAM sequence: TTC
aaagtgccatcttggaagca

SEQ ID NO: 286002 - DNA, 20 bp, Artificial Sequence
  Description of Artificial Sequence: Synthetic oligonucleotide
  Target: LAMA2; (-) strand; PAM type: YTN; PAM sequence: CTG
agcattcaaagtgccatctt

SEQ ID NO: 286003 - DNA, 20 bp, Artificial Sequence
  Description of Artificial Sequence: Synthetic oligonucleotide
  Target: LAMA2; (-) strand; PAM type: YTN; PAM sequence: CTC
ctgagcattcaaagtgccat

SEQ ID NO: 286004 - DNA, 20 bp, Artificial Sequence
  Description of Artificial Sequence: Synthetic oligonucleotide
  Target: LAMA2; (-) strand; PAM type: YTN; PAM sequence: CTC
tcctgagcattcaaagtgcc

SEQ ID NO: 286005 - DNA, 20 bp, Artificial Sequence
  Description of Artificial Sequence: Synthetic oligonucleotide
  Target: LAMA2; (-) strand; PAM type: YTN; PAM sequence: CTC
ctctcctgagcattcaaagt

SEQ ID NO: 286006 - DNA, 20 bp, Artificial Sequence
  Description of Artificial Sequence: Synthetic oligonucleotide
  Target: LAMA2; (-) strand; PAM type: YTN; PAM sequence: TTC
ctcctctcctgagcattcaa

SEQ ID NO: 286007 - DNA, 20 bp, Artificial Sequence
  Description of Artificial Sequence: Synthetic oligonucleotide
  Target: LAMA2; (-) strand; PAM type: YTN; PAM sequence: CTG
ccatgtgagggcacaatgtt

SEQ ID NO: 286008 - DNA, 20 bp, Artificial Sequence
  Description of Artificial Sequence: Synthetic oligonucleotide
  Target: LAMA2; (-) strand; PAM type: YTN; PAM sequence: TTC
tgccatgtgagggcacaatg

SEQ ID NO: 286009 - DNA, 20 bp, Artificial Sequence
  Description of Artificial Sequence: Synthetic oligonucleotide
  Target: LAMA2; (-) strand; PAM type: YTN; PAM sequence: CTT
ctgccatgtgagggcacaat

SEQ ID NO: 286010 - DNA, 20 bp, Artificial Sequence
  Description of Artificial Sequence: Synthetic oligonucleotide
  Target: LAMA2; (-) strand; PAM type: YTN; PAM sequence: CTC
ttctgccatgtgagggcaca

SEQ ID NO: 286011 - DNA, 20 bp, Artificial Sequence
  Description of Artificial Sequence: Synthetic oligonucleotide
  Target: LAMA2; (-) strand; PAM type: YTN; PAM sequence: TTG
ctcttctgccatgtgagggc

SEQ ID NO: 286012 - DNA, 20 bp, Artificial Sequence
  Description of Artificial Sequence: Synthetic oligonucleotide
  Target: LAMA2; (-) strand; PAM type: YTN; PAM sequence: CTT
gctcttctgccatgtgaggg

SEQ ID NO: 286013 - DNA, 20 bp, Artificial Sequence
  Description of Artificial Sequence: Synthetic oligonucleotide
  Target: LAMA2; (-) strand; PAM type: YTN; PAM sequence: CTC
ttgctcttctgccatgtgag

SEQ ID NO: 286014 - DNA, 20 bp, Artificial Sequence
  Description of Artificial Sequence: Synthetic oligonucleotide
  Target: LAMA2; (-) strand; PAM type: YTN; PAM sequence: CTC
tcttgctcttctgccatgtg

SEQ ID NO: 286015 - DNA, 20 bp, Artificial Sequence
  Description of Artificial Sequence: Synthetic oligonucleotide
  Target: LAMA2; (-) strand; PAM type: YTN; PAM sequence: CTC
tctcttgctcttctgccatg

SEQ ID NO: 286016 - DNA, 20 bp, Artificial Sequence
  Description of Artificial Sequence: Synthetic oligonucleotide
  Target: LAMA2; (-) strand; PAM type: YTN; PAM sequence: CTC
tctctcttgctcttctgcca

SEQ ID NO: 286017 - DNA, 20 bp, Artificial Sequence
  Description of Artificial Sequence: Synthetic oligonucleotide
  Target: LAMA2; (-) strand; PAM type: YTN; PAM sequence: CTC
tctctctcttgctcttctgc

SEQ ID NO: 286018 - DNA, 20 bp, Artificial Sequence
  Description of Artificial Sequence: Synthetic oligonucleotide
  Target: LAMA2; (-) strand; PAM type: YTN; PAM sequence: TTA
caggggtgagagctctctct

SEQ ID NO: 286019 - DNA, 20 bp, Artificial Sequence
  Description of Artificial Sequence: Synthetic oligonucleotide
  Target: LAMA2; (-) strand; PAM type: YTN; PAM sequence: CTT
acaggggtgagagctctctc

SEQ ID NO: 286020 - DNA, 20 bp, Artificial Sequence
  Description of Artificial Sequence: Synthetic oligonucleotide
  Target: LAMA2; (-) strand; PAM type: YTN; PAM sequence: TTA
aaaaggcttacaggggtgag

SEQ ID NO: 286021 - DNA, 20 bp, Artificial Sequence
  Description of Artificial Sequence: Synthetic oligonucleotide
  Target: LAMA2; (-) strand; PAM type: YTN; PAM sequence: CTA
ttaaaaaggcttacaggggt

SEQ ID NO: 286022 - DNA, 20 bp, Artificial Sequence
  Description of Artificial Sequence: Synthetic oligonucleotide
  Target: LAMA2; (-) strand; PAM type: YTN; PAM sequence: TTG
atgccactattaaaaaggct

SEQ ID NO: 286023 - DNA, 20 bp, Artificial Sequence
  Description of Artificial Sequence: Synthetic oligonucleotide
  Target: LAMA2; (-) strand; PAM type: YTN; PAM sequence: CTC
atgaatgaattgatgccact

SEQ ID NO: 286024 - DNA, 20 bp, Artificial Sequence
  Description of Artificial Sequence: Synthetic oligonucleotide
  Target: LAMA2; (-) strand; PAM type: YTN; PAM sequence: CTG
tcctcatgaatgaattgatg

SEQ ID NO: 286025 - DNA, 20 bp, Artificial Sequence
  Description of Artificial Sequence: Synthetic oligonucleotide
  Target: LAMA2; (-) strand; PAM type: YTN; PAM sequence: CTC
tgtcctcatgaatgaattga

SEQ ID NO: 286026 - DNA, 20 bp, Artificial Sequence
  Description of Artificial Sequence: Synthetic oligonucleotide
  Target: LAMA2; (-) strand; PAM type: YTN; PAM sequence: TTC
ggtcatgagggctctgtcct

SEQ ID NO: 286027 - DNA, 20 bp, Artificial Sequence
  Description of Artificial Sequence: Synthetic oligonucleotide
  Target: LAMA2; (-) strand; PAM type: YTN; PAM sequence: TTT
cggtcatgagggctctgtcc

SEQ ID NO: 286028 - DNA, 20 bp, Artificial Sequence
  Description of Artificial Sequence: Synthetic oligonucleotide
  Target: LAMA2; (-) strand; PAM type: YTN; PAM sequence: TTG
ggaagtgtttcggtcatgag

SEQ ID NO: 286029 - DNA, 20 bp, Artificial Sequence
  Description of Artificial Sequence: Synthetic oligonucleotide
  Target: LAMA2; (-) strand; PAM type: YTN; PAM sequence: TTT
gggaagtgtttcggtcatga

SEQ ID NO: 286030 - DNA, 20 bp, Artificial Sequence
  Description of Artificial Sequence: Synthetic oligonucleotide
  Target: LAMA2; (-) strand; PAM type: YTN; PAM sequence: TTT
tgggaagtgtttcggtcatg

SEQ ID NO: 286031 - DNA, 20 bp, Artificial Sequence
  Description of Artificial Sequence: Synthetic oligonucleotide
  Target: LAMA2; (-) strand; PAM type: YTN; PAM sequence: CTT
ttgggaagtgtttcggtcat

SEQ ID NO: 286032 - DNA, 20 bp, Artificial Sequence
  Description of Artificial Sequence: Synthetic oligonucleotide
  Target: LAMA2; (-) strand; PAM type: YTN; PAM sequence: TTG
ggaggggggccttttgggaa

SEQ ID NO: 286033 - DNA, 20 bp, Artificial Sequence
  Description of Artificial Sequence: Synthetic oligonucleotide
  Target: LAMA2; (-) strand; PAM type: YTN; PAM sequence: CTC
agtgcaacagtgttgggagg

SEQ ID NO: 286034 - DNA, 20 bp, Artificial Sequence
  Description of Artificial Sequence: Synthetic oligonucleotide
  Target: LAMA2; (-) strand; PAM type: YTN; PAM sequence: TTA
atcctcagtgcaacagtgtt

SEQ ID NO: 286035 - DNA, 20 bp, Artificial Sequence
  Description of Artificial Sequence: Synthetic oligonucleotide
  Target: LAMA2; (-) strand; PAM type: YTN; PAM sequence: TTT
aatcctcagtgcaacagtgt

SEQ ID NO: 286036 - DNA, 20 bp, Artificial Sequence
  Description of Artificial Sequence: Synthetic oligonucleotide
  Target: LAMA2; (-) strand; PAM type: YTN; PAM sequence: TTG
aaatttaatcctcagtgcaa

SEQ ID NO: 286037 - DNA, 20 bp, Artificial Sequence
  Description of Artificial Sequence: Synthetic oligonucleotide
  Target: LAMA2; (-) strand; PAM type: YTN; PAM sequence: CTT
gaaatttaatcctcagtgca

SEQ ID NO: 286038 - DNA, 20 bp, Artificial Sequence
  Description of Artificial Sequence: Synthetic oligonucleotide
  Target: LAMA2; (-) strand; PAM type: YTN; PAM sequence: TTG
cttgaaatttaatcctcagt

SEQ ID NO: 286039 - DNA, 20 bp, Artificial Sequence
  Description of Artificial Sequence: Synthetic oligonucleotide
  Target: LAMA2; (-) strand; PAM type: YTN; PAM sequence: TTT
gcttgaaatttaatcctcag

SEQ ID NO: 286040 - DNA, 20 bp, Artificial Sequence
  Description of Artificial Sequence: Synthetic oligonucleotide
  Target: LAMA2; (-) strand; PAM type: YTN; PAM sequence: TTC
atttgcttgaaatttaatcc

SEQ ID NO: 286041 - DNA, 20 bp, Artificial Sequence
  Description of Artificial Sequence: Synthetic oligonucleotide
  Target: LAMA2; (-) strand; PAM type: YTN; PAM sequence: TTG
aatgtgtccaacaaaattca

SEQ ID NO: 286042 - DNA, 20 bp, Artificial Sequence
  Description of Artificial Sequence: Synthetic oligonucleotide
  Target: LAMA2; (-) strand; PAM type: YTN; PAM sequence: CTT
gaatgtgtccaacaaaattc

SEQ ID NO: 286043 - DNA, 20 bp, Artificial Sequence
  Description of Artificial Sequence: Synthetic oligonucleotide
  Target: LAMA2; (-) strand; PAM type: YTN; PAM sequence: CTA
tggcttgaatgtgtccaaca

SEQ ID NO: 286044 - DNA, 20 bp, Artificial Sequence
  Description of Artificial Sequence: Synthetic oligonucleotide
  Target: LAMA2; (-) strand; PAM type: YTN; PAM sequence: CTG
ctatggcttgaatgtgtcca

SEQ ID NO: 286045 - DNA, 20 bp, Artificial Sequence
  Description of Artificial Sequence: Synthetic oligonucleotide
  Target: LAMA2; (-) strand; PAM type: YTN; PAM sequence: CTA
cagagtaactgctatggctt

SEQ ID NO: 286046 - DNA, 20 bp, Artificial Sequence
  Description of Artificial Sequence: Synthetic oligonucleotide
  Target: LAMA2; (-) strand; PAM type: YTN; PAM sequence: TTA
atcctacagagtaactgcta

SEQ ID NO: 286047 - DNA, 20 bp, Artificial Sequence
  Description of Artificial Sequence: Synthetic oligonucleotide
  Target: LAMA2; (-) strand; PAM type: YTN; PAM sequence: TTA
tacccaatatgccggcaatt

SEQ ID NO: 286048 - DNA, 20 bp, Artificial Sequence
  Description of Artificial Sequence: Synthetic oligonucleotide
  Target: LAMA2; (-) strand; PAM type: YTN; PAM sequence: TTG
ttatacccaatatgccggca

SEQ ID NO: 286049 - DNA, 20 bp, Artificial Sequence
  Description of Artificial Sequence: Synthetic oligonucleotide
  Target: LAMA2; (-) strand; PAM type: YTN; PAM sequence: TTG
aagcaaaatgatgttgttat

SEQ ID NO: 286050 - DNA, 20 bp, Artificial Sequence
  Description of Artificial Sequence: Synthetic oligonucleotide
  Target: LAMA2; (-) strand; PAM type: YTN; PAM sequence: CTT
gaagcaaaatgatgttgtta

SEQ ID NO: 286051 - DNA, 20 bp, Artificial Sequence
  Description of Artificial Sequence: Synthetic oligonucleotide
  Target: LAMA2; (-) strand; PAM type: YTN; PAM sequence: TTC
ttgaagcaaaatgatgttgt

SEQ ID NO: 286052 - DNA, 20 bp, Artificial Sequence
  Description of Artificial Sequence: Synthetic oligonucleotide
  Target: LAMA2; (-) strand; PAM type: YTN; PAM sequence: CTA
acaaatatgattcttgaagc

SEQ ID NO: 286053 - DNA, 20 bp, Artificial Sequence
  Description of Artificial Sequence: Synthetic oligonucleotide
  Target: LAMA2; (-) strand; PAM type: YTN; PAM sequence: TTG
tatagaatacatatctaaca

SEQ ID NO: 286054 - DNA, 20 bp, Artificial Sequence
  Description of Artificial Sequence: Synthetic oligonucleotide
  Target: LAMA2; (-) strand; PAM type: YTN; PAM sequence: CTA
ttgtatagaatacatatcta

SEQ ID NO: 286055 - DNA, 20 bp, Artificial Sequence
  Description of Artificial Sequence: Synthetic oligonucleotide
  Target: LAMA2; (-) strand; PAM type: YTN; PAM sequence: TTA
caaccaatctattgtataga

SEQ ID NO: 286056 - DNA, 20 bp, Artificial Sequence
  Description of Artificial Sequence: Synthetic oligonucleotide
  Target: LAMA2; (-) strand; PAM type: YTN; PAM sequence: CTA
gaggttacaaccaatctatt

SEQ ID NO: 286057 - DNA, 20 bp, Artificial Sequence
  Description of Artificial Sequence: Synthetic oligonucleotide
  Target: LAMA2; (-) strand; PAM type: YTN; PAM sequence: CTA
atgtcactagaggttacaac

SEQ ID NO: 286058 - DNA, 20 bp, Artificial Sequence
  Description of Artificial Sequence: Synthetic oligonucleotide
  Target: LAMA2; (-) strand; PAM type: YTN; PAM sequence: CTG
agtatctaatgtcactagag

SEQ ID NO: 286059 - DNA, 20 bp, Artificial Sequence
  Description of Artificial Sequence: Synthetic oligonucleotide
  Target: LAMA2; (-) strand; PAM type: YTN; PAM sequence: TTA
aaactgagtatctaatgtca

SEQ ID NO: 286060 - DNA, 20 bp, Artificial Sequence
  Description of Artificial Sequence: Synthetic oligonucleotide
  Target: LAMA2; (-) strand; PAM type: YTN; PAM sequence: TTT
aaaactgagtatctaatgtc

SEQ ID NO: 286061 - DNA, 20 bp, Artificial Sequence
  Description of Artificial Sequence: Synthetic oligonucleotide
  Target: LAMA2; (-) strand; PAM type: YTN; PAM sequence: TTT
taaaactgagtatctaatgt

SEQ ID NO: 286062 - DNA, 20 bp, Artificial Sequence
  Description of Artificial Sequence: Synthetic oligonucleotide
  Target: LAMA2; (-) strand; PAM type: YTN; PAM sequence: CTA
agagagaagccattttaaaa

SEQ ID NO: 286063 - DNA, 20 bp, Artificial Sequence
  Description of Artificial Sequence: Synthetic oligonucleotide
  Target: LAMA2; (-) strand; PAM type: YTN; PAM sequence: CTC
caagtctaagagagaagcca

SEQ ID NO: 286064 - DNA, 20 bp, Artificial Sequence
  Description of Artificial Sequence: Synthetic oligonucleotide
  Target: LAMA2; (-) strand; PAM type: YTN; PAM sequence: CTG
agaactccaagtctaagaga

SEQ ID NO: 286065 - DNA, 20 bp, Artificial Sequence
  Description of Artificial Sequence: Synthetic oligonucleotide
  Target: LAMA2; (-) strand; PAM type: YTN; PAM sequence: CTC
tgagaactccaagtctaaga

SEQ ID NO: 286066 - DNA, 20 bp, Artificial Sequence
  Description of Artificial Sequence: Synthetic oligonucleotide
  Target: LAMA2; (-) strand; PAM type: YTN; PAM sequence: CTG
ctctgagaactccaagtcta

SEQ ID NO: 286067 - DNA, 20 bp, Artificial Sequence
  Description of Artificial Sequence: Synthetic oligonucleotide
  Target: LAMA2; (-) strand; PAM type: YTN; PAM sequence: CTA
actgctctgagaactccaag

SEQ ID NO: 286068 - DNA, 20 bp, Artificial Sequence
  Description of Artificial Sequence: Synthetic oligonucleotide
  Target: LAMA2; (-) strand; PAM type: YTN; PAM sequence: CTA
aaatctaactgctctgagaa

SEQ ID NO: 286069 - DNA, 20 bp, Artificial Sequence
  Description of Artificial Sequence: Synthetic oligonucleotide
  Target: LAMA2; (-) strand; PAM type: YTN; PAM sequence: CTC
aaaaaaaaaaaaaaaaaaaa

SEQ ID NO: 286070 - DNA, 20 bp, Artificial Sequence
  Description of Artificial Sequence: Synthetic oligonucleotide
  Target: LAMA2; (-) strand; PAM type: YTN; PAM sequence: TTC
catctcaaaaaaaaaaaaaa

SEQ ID NO: 286071 - DNA, 20 bp, Artificial Sequence
  Description of Artificial Sequence: Synthetic oligonucleotide
  Target: LAMA2; (-) strand; PAM type: YTN; PAM sequence: CTG
gccacagagtgagattccat

SEQ ID NO: 286072 - DNA, 20 bp, Artificial Sequence
  Description of Artificial Sequence: Synthetic oligonucleotide
  Target: LAMA2; (-) strand; PAM type: YTN; PAM sequence: CTC
cagcctggccacagagtgag

SEQ ID NO: 286073 - DNA, 20 bp, Artificial Sequence
  Description of Artificial Sequence: Synthetic oligonucleotide
  Target: LAMA2; (-) strand; PAM type: YTN; PAM sequence: CTG
cactccagcctggccacaga

SEQ ID NO: 286074 - DNA, 20 bp, Artificial Sequence
  Description of Artificial Sequence: Synthetic oligonucleotide
  Target: LAMA2; (-) strand; PAM type: YTN; PAM sequence: CTC
cactgcactccagcctggcc

SEQ ID NO: 286075 - DNA, 20 bp, Artificial Sequence
  Description of Artificial Sequence: Synthetic oligonucleotide
  Target: LAMA2; (-) strand; PAM type: YTN; PAM sequence: TTG
ctccactgcactccagcctg

SEQ ID NO: 286076 - DNA, 20 bp, Artificial Sequence
  Description of Artificial Sequence: Synthetic oligonucleotide
  Target: LAMA2; (-) strand; PAM type: YTN; PAM sequence: CTG
agattgctccactgcactcc

SEQ ID NO: 286077 - DNA, 20 bp, Artificial Sequence
  Description of Artificial Sequence: Synthetic oligonucleotide
  Target: LAMA2; (-) strand; PAM type: YTN; PAM sequence: CTG
cagtgagctgagattgctcc

SEQ ID NO: 286078 - DNA, 20 bp, Artificial Sequence
  Description of Artificial Sequence: Synthetic oligonucleotide
  Target: LAMA2; (-) strand; PAM type: YTN; PAM sequence: CTG
ggaggcggaggctgcagtga

SEQ ID NO: 286079 - DNA, 20 bp, Artificial Sequence
  Description of Artificial Sequence: Synthetic oligonucleotide
  Target: LAMA2; (-) strand; PAM type: YTN; PAM sequence: TTG
aacctgggaggcggaggctg

SEQ ID NO: 286080 - DNA, 20 bp, Artificial Sequence
  Description of Artificial Sequence: Synthetic oligonucleotide
  Target: LAMA2; (-) strand; PAM type: YTN; PAM sequence: CTT
gaacctgggaggcggaggct

SEQ ID NO: 286081 - DNA, 20 bp, Artificial Sequence
  Description of Artificial Sequence: Synthetic oligonucleotide
  Target: LAMA2; (-) strand; PAM type: YTN; PAM sequence: TTG
cttgaacctgggaggcggag

SEQ ID NO: 286082 - DNA, 20 bp, Artificial Sequence
  Description of Artificial Sequence: Synthetic oligonucleotide
  Target: LAMA2; (-) strand; PAM type: YTN; PAM sequence: CTG
aggcaggagaattgcttgaa

SEQ ID NO: 286083 - DNA, 20 bp, Artificial Sequence
  Description of Artificial Sequence: Synthetic oligonucleotide
  Target: LAMA2; (-) strand; PAM type: YTN; PAM sequence: CTC
aggaggctgaggcaggagaa

SEQ ID NO: 286084 - DNA, 20 bp, Artificial Sequence
  Description of Artificial Sequence: Synthetic oligonucleotide
  Target: LAMA2; (-) strand; PAM type: YTN; PAM sequence: CTA
ctcaggaggctgaggcagga

SEQ ID NO: 286085 - DNA, 20 bp, Artificial Sequence
  Description of Artificial Sequence: Synthetic oligonucleotide
  Target: LAMA2; (-) strand; PAM type: YTN; PAM sequence: CTG
tagtcccagctactcaggag

SEQ ID NO: 286086 - DNA, 20 bp, Artificial Sequence
  Description of Artificial Sequence: Synthetic oligonucleotide
  Target: LAMA2; (-) strand; PAM type: YTN; PAM sequence: CTG
ggcgtggtgacatgtgcctg

SEQ ID NO: 286087 - DNA, 20 bp, Artificial Sequence
  Description of Artificial Sequence: Synthetic oligonucleotide
  Target: LAMA2; (-) strand; PAM type: YTN; PAM sequence: TTA
gctgggcgtggtgacatgtg

SEQ ID NO: 286088 - DNA, 20 bp, Artificial Sequence
  Description of Artificial Sequence: Synthetic oligonucleotide
  Target: LAMA2; (-) strand; PAM type: YTN; PAM sequence: CTA
aaaatacaaaaacaattagc

SEQ ID NO: 286089 - DNA, 20 bp, Artificial Sequence
  Description of Artificial Sequence: Synthetic oligonucleotide
  Target: LAMA2; (-) strand; PAM type: YTN; PAM sequence: CTG
tatcaactaaaaatacaaaa

SEQ ID NO: 286090 - DNA, 20 bp, Artificial Sequence
  Description of Artificial Sequence: Synthetic oligonucleotide
  Target: LAMA2; (-) strand; PAM type: YTN; PAM sequence: CTG
gccaacatggtgaagccctg

SEQ ID NO: 286091 - DNA, 20 bp, Artificial Sequence
  Description of Artificial Sequence: Synthetic oligonucleotide
  Target: LAMA2; (-) strand; PAM type: YTN; PAM sequence: TTG
agacaatcctggccaacatg

SEQ ID NO: 286092 - DNA, 20 bp, Artificial Sequence
  Description of Artificial Sequence: Synthetic oligonucleotide
  Target: LAMA2; (-) strand; PAM type: YTN; PAM sequence: TTG
ggaggccaaggcaggcggat

SEQ ID NO: 286093 - DNA, 20 bp, Artificial Sequence
  Description of Artificial Sequence: Synthetic oligonucleotide
  Target: LAMA2; (-) strand; PAM type: YTN; PAM sequence: TTT
gggaggccaaggcaggcgga

SEQ ID NO: 286094 - DNA, 20 bp, Artificial Sequence
  Description of Artificial Sequence: Synthetic oligonucleotide
  Target: LAMA2; (-) strand; PAM type: YTN; PAM sequence: CTT
tgggaggccaaggcaggcgg

SEQ ID NO: 286095 - DNA, 20 bp, Artificial Sequence
  Description of Artificial Sequence: Synthetic oligonucleotide
  Target: LAMA2; (-) strand; PAM type: YTN; PAM sequence: CTG
taatcccagaactttgggag

SEQ ID NO: 286096 - DNA, 20 bp, Artificial Sequence
  Description of Artificial Sequence: Synthetic oligonucleotide
  Target: LAMA2; (-) strand; PAM type: YTN; PAM sequence: CTC
acgcctgtaatcccagaact

SEQ ID NO: 286097 - DNA, 20 bp, Artificial Sequence
  Description of Artificial Sequence: Synthetic oligonucleotide
  Target: LAMA2; (-) strand; PAM type: YTN; PAM sequence: TTG
ccaaagtgtaacagacagag

SEQ ID NO: 286098 - DNA, 20 bp, Artificial Sequence
  Description of Artificial Sequence: Synthetic oligonucleotide
  Target: LAMA2; (-) strand; PAM type: YTN; PAM sequence: TTG
aaaagggggttgccaaagtg

SEQ ID NO: 286099 - DNA, 20 bp, Artificial Sequence
  Description of Artificial Sequence: Synthetic oligonucleotide
  Target: LAMA2; (-) strand; PAM type: YTN; PAM sequence: TTA
gtgtgttgaaaagggggttg

SEQ ID NO: 286100 - DNA, 20 bp, Artificial Sequence
  Description of Artificial Sequence: Synthetic oligonucleotide
  Target: LAMA2; (-) strand; PAM type: YTN; PAM sequence: TTC
catgattagtgtgttgaaaa

SEQ ID NO: 286101 - DNA, 20 bp, Artificial Sequence
  Description of Artificial Sequence: Synthetic oligonucleotide
  Target: LAMA2; (-) strand; PAM type: YTN; PAM sequence: CTG
gtaaaaaaaaaaaaacggga

SEQ ID NO: 286102 - DNA, 20 bp, Artificial Sequence
  Description of Artificial Sequence: Synthetic oligonucleotide
  Target: LAMA2; (-) strand; PAM type: YTN; PAM sequence: TTA
ggtaagcctggtaaaaaaaa

SEQ ID NO: 286103 - DNA, 20 bp, Artificial Sequence
  Description of Artificial Sequence: Synthetic oligonucleotide
  Target: LAMA2; (-) strand; PAM type: YTN; PAM sequence: CTT
aggtaagcctggtaaaaaaa

SEQ ID NO: 286104 - DNA, 20 bp, Artificial Sequence
  Description of Artificial Sequence: Synthetic oligonucleotide
  Target: LAMA2; (-) strand; PAM type: YTN; PAM sequence: TTG
cttaggtaagcctggtaaaa

SEQ ID NO: 286105 - DNA, 20 bp, Artificial Sequence
  Description of Artificial Sequence: Synthetic oligonucleotide
  Target: LAMA2; (-) strand; PAM type: YTN; PAM sequence: TTC
agtcattgcttaggtaagcc

SEQ ID NO: 286106 - DNA, 20 bp, Artificial Sequence
  Description of Artificial Sequence: Synthetic oligonucleotide
  Target: LAMA2; (-) strand; PAM type: YTN; PAM sequence: TTT
cagtcattgcttaggtaagc

SEQ ID NO: 286107 - DNA, 20 bp, Artificial Sequence
  Description of Artificial Sequence: Synthetic oligonucleotide
  Target: LAMA2; (-) strand; PAM type: YTN; PAM sequence: TTG
gtcacagaatgaatttcagt

SEQ ID NO: 286108 - DNA, 20 bp, Artificial Sequence
  Description of Artificial Sequence: Synthetic oligonucleotide
  Target: LAMA2; (-) strand; PAM type: YTN; PAM sequence: TTT
ggtcacagaatgaatttcag

SEQ ID NO: 286109 - DNA, 20 bp, Artificial Sequence
  Description of Artificial Sequence: Synthetic oligonucleotide
  Target: LAMA2; (-) strand; PAM type: YTN; PAM sequence: CTC
aatataaatgtaatatgtga

SEQ ID NO: 286110 - DNA, 20 bp, Artificial Sequence
  Description of Artificial Sequence: Synthetic oligonucleotide
  Target: LAMA2; (-) strand; PAM type: YTN; PAM sequence: TTA
gagaagagatgactcaatat

SEQ ID NO: 286111 - DNA, 20 bp, Artificial Sequence
  Description of Artificial Sequence: Synthetic oligonucleotide
  Target: LAMA2; (-) strand; PAM type: YTN; PAM sequence: TTT
agagaagagatgactcaata

SEQ ID NO: 286112 - DNA, 20 bp, Artificial Sequence
  Description of Artificial Sequence: Synthetic oligonucleotide
  Target: LAMA2; (-) strand; PAM type: YTN; PAM sequence: TTA
tttagagaagagatgactca

SEQ ID NO: 286113 - DNA, 20 bp, Artificial Sequence
  Description of Artificial Sequence: Synthetic oligonucleotide
  Target: LAMA2; (-) strand; PAM type: YTN; PAM sequence: TTA
ttatttagagaagagatgac

SEQ ID NO: 286114 - DNA, 20 bp, Artificial Sequence
  Description of Artificial Sequence: Synthetic oligonucleotide
  Target: LAMA2; (-) strand; PAM type: YTN; PAM sequence: CTC
agttattatttagagaagag

SEQ ID NO: 286115 - DNA, 20 bp, Artificial Sequence
  Description of Artificial Sequence: Synthetic oligonucleotide
  Target: LAMA2; (-) strand; PAM type: YTN; PAM sequence: TTG
aataatatccctcagttatt

SEQ ID NO: 286116 - DNA, 20 bp, Artificial Sequence
  Description of Artificial Sequence: Synthetic oligonucleotide
  Target: LAMA2; (-) strand; PAM type: YTN; PAM sequence: CTC
catgtcaaaacaaaacaaaa

SEQ ID NO: 286117 - DNA, 20 bp, Artificial Sequence
  Description of Artificial Sequence: Synthetic oligonucleotide
  Target: LAMA2; (-) strand; PAM type: YTN; PAM sequence: CTG
ggtgacaaagtgagactcca

SEQ ID NO: 286118 - DNA, 20 bp, Artificial Sequence
  Description of Artificial Sequence: Synthetic oligonucleotide
  Target: LAMA2; (-) strand; PAM type: YTN; PAM sequence: CTC
cagcctgggtgacaaagtga

SEQ ID NO: 286119 - DNA, 20 bp, Artificial Sequence
  Description of Artificial Sequence: Synthetic oligonucleotide
  Target: LAMA2; (-) strand; PAM type: YTN; PAM sequence: CTG
tactccagcctgggtgacaa

SEQ ID NO: 286120 - DNA, 20 bp, Artificial Sequence
  Description of Artificial Sequence: Synthetic oligonucleotide
  Target: LAMA2; (-) strand; PAM type: YTN; PAM sequence: CTG
agatcgtgccactgtactcc

SEQ ID NO: 286121 - DNA, 20 bp, Artificial Sequence
  Description of Artificial Sequence: Synthetic oligonucleotide
  Target: LAMA2; (-) strand; PAM type: YTN; PAM sequence: TTG
cagtgagctgagatcgtgcc

SEQ ID NO: 286122 - DNA, 20 bp, Artificial Sequence
  Description of Artificial Sequence: Synthetic oligonucleotide
  Target: LAMA2; (-) strand; PAM type: YTN; PAM sequence: TTG
aacccaagaggcagaggttg

SEQ ID NO: 286123 - DNA, 20 bp, Artificial Sequence
  Description of Artificial Sequence: Synthetic oligonucleotide
  Target: LAMA2; (-) strand; PAM type: YTN; PAM sequence: CTT
gaacccaagaggcagaggtt

SEQ ID NO: 286124 - DNA, 20 bp, Artificial Sequence
  Description of Artificial Sequence: Synthetic oligonucleotide
  Target: LAMA2; (-) strand; PAM type: YTN; PAM sequence: TTG
cttgaacccaagaggcagag

SEQ ID NO: 286125 - DNA, 20 bp, Artificial Sequence
  Description of Artificial Sequence: Synthetic oligonucleotide
  Target: LAMA2; (-) strand; PAM type: YTN; PAM sequence: CTG
agtcaggagaattgcttgaa

SEQ ID NO: 286126 - DNA, 20 bp, Artificial Sequence
  Description of Artificial Sequence: Synthetic oligonucleotide
  Target: LAMA2; (-) strand; PAM type: YTN; PAM sequence: CTC
aggaggctgagtcaggagaa

SEQ ID NO: 286127 - DNA, 20 bp, Artificial Sequence
  Description of Artificial Sequence: Synthetic oligonucleotide
  Target: LAMA2; (-) strand; PAM type: YTN; PAM sequence: CTA
ctcaggaggctgagtcagga

SEQ ID NO: 286128 - DNA, 20 bp, Artificial Sequence
  Description of Artificial Sequence: Synthetic oligonucleotide
  Target: LAMA2; (-) strand; PAM type: YTN; PAM sequence: CTG
tagtcccagctactcaggag

SEQ ID NO: 286129 - DNA, 20 bp, Artificial Sequence
  Description of Artificial Sequence: Synthetic oligonucleotide
  Target: LAMA2; (-) strand; PAM type: YTN; PAM sequence: TTA
gccggccatggtggtggcat

SEQ ID NO: 286130 - DNA, 20 bp, Artificial Sequence
  Description of Artificial Sequence: Synthetic oligonucleotide
  Target: LAMA2; (-) strand; PAM type: YTN; PAM sequence: CTA
aaaatacaaaaattagccgg

SEQ ID NO: 286131 - DNA, 20 bp, Artificial Sequence
  Description of Artificial Sequence: Synthetic oligonucleotide
  Target: LAMA2; (-) strand; PAM type: YTN; PAM sequence: CTA
ctaaaaatacaaaaattagc

SEQ ID NO: 286132 - DNA, 20 bp, Artificial Sequence
  Description of Artificial Sequence: Synthetic oligonucleotide
  Target: LAMA2; (-) strand; PAM type: YTN; PAM sequence: CTC
tactaaaaatacaaaaatta

SEQ ID NO: 286133 - DNA, 20 bp, Artificial Sequence
  Description of Artificial Sequence: Synthetic oligonucleotide
  Target: LAMA2; (-) strand; PAM type: YTN; PAM sequence: CTG
tctctactaaaaatacaaaa

SEQ ID NO: 286134 - DNA, 20 bp, Artificial Sequence
  Description of Artificial Sequence: Synthetic oligonucleotide
  Target: LAMA2; (-) strand; PAM type: YTN; PAM sequence: CTG
gccaacatggtgaaaccctg

SEQ ID NO: 286135 - DNA, 20 bp, Artificial Sequence
  Description of Artificial Sequence: Synthetic oligonucleotide
  Target: LAMA2; (-) strand; PAM type: YTN; PAM sequence: CTG
agatgggcggatcatgaggt

SEQ ID NO: 286136 - DNA, 20 bp, Artificial Sequence
  Description of Artificial Sequence: Synthetic oligonucleotide
  Target: LAMA2; (-) strand; PAM type: YTN; PAM sequence: TTG
ggaggctgagatgggcggat

SEQ ID NO: 286137 - DNA, 20 bp, Artificial Sequence
  Description of Artificial Sequence: Synthetic oligonucleotide
  Target: LAMA2; (-) strand; PAM type: YTN; PAM sequence: TTT
gggaggctgagatgggcgga

SEQ ID NO: 286138 - DNA, 20 bp, Artificial Sequence
  Description of Artificial Sequence: Synthetic oligonucleotide
  Target: LAMA2; (-) strand; PAM type: YTN; PAM sequence: CTT
tgggaggctgagatgggcgg

SEQ ID NO: 286139 - DNA, 20 bp, Artificial Sequence
  Description of Artificial Sequence: Synthetic oligonucleotide
  Target: LAMA2; (-) strand; PAM type: YTN; PAM sequence: CTG
taatcccagcactttgggag

SEQ ID NO: 286140 - DNA, 20 bp, Artificial Sequence
  Description of Artificial Sequence: Synthetic oligonucleotide
  Target: LAMA2; (-) strand; PAM type: YTN; PAM sequence: CTC
acatctgtaatcccagcact

SEQ ID NO: 286141 - DNA, 20 bp, Artificial Sequence
  Description of Artificial Sequence: Synthetic oligonucleotide
  Target: LAMA2; (-) strand; PAM type: YTN; PAM sequence: CTG
ggtgtgatggctcacatctg

SEQ ID NO: 286142 - DNA, 20 bp, Artificial Sequence
  Description of Artificial Sequence: Synthetic oligonucleotide
  Target: LAMA2; (-) strand; PAM type: YTN; PAM sequence: TTG
aggctgggtgtgatggctca

SEQ ID NO: 286143 - DNA, 20 bp, Artificial Sequence
  Description of Artificial Sequence: Synthetic oligonucleotide
  Target: LAMA2; (-) strand; PAM type: YTN; PAM sequence: TTA
aaaaacacagttgaggctgg

SEQ ID NO: 286144 - DNA, 20 bp, Artificial Sequence
  Description of Artificial Sequence: Synthetic oligonucleotide
  Target: LAMA2; (-) strand; PAM type: YTN; PAM sequence: TTT
aaaaaacacagttgaggctg

SEQ ID NO: 286145 - DNA, 20 bp, Artificial Sequence
  Description of Artificial Sequence: Synthetic oligonucleotide
  Target: LAMA2; (-) strand; PAM type: YTN; PAM sequence: TTG
tttaaaaaacacagttgagg

SEQ ID NO: 286146 - DNA, 20 bp, Artificial Sequence
  Description of Artificial Sequence: Synthetic oligonucleotide
  Target: LAMA2; (-) strand; PAM type: YTN; PAM sequence: TTT
gtttaaaaaacacagttgag

SEQ ID NO: 286147 - DNA, 20 bp, Artificial Sequence
  Description of Artificial Sequence: Synthetic oligonucleotide
  Target: LAMA2; (-) strand; PAM type: YTN; PAM sequence: TTT
tgtttaaaaaacacagttga

SEQ ID NO: 286148 - DNA, 20 bp, Artificial Sequence
  Description of Artificial Sequence: Synthetic oligonucleotide
  Target: LAMA2; (-) strand; PAM type: YTN; PAM sequence: CTA
ataaatcagttttgtttaaa

SEQ ID NO: 286149 - DNA, 20 bp, Artificial Sequence
  Description of Artificial Sequence: Synthetic oligonucleotide
  Target: LAMA2; (-) strand; PAM type: YTN; PAM sequence: TTC
ctaataaatcagttttgttt

SEQ ID NO: 286150 - DNA, 20 bp, Artificial Sequence
  Description of Artificial Sequence: Synthetic oligonucleotide
  Target: LAMA2; (-) strand; PAM type: YTN; PAM sequence: TTA
attcctaataaatcagtttt

SEQ ID NO: 286151 - DNA, 20 bp, Artificial Sequence
  Description of Artificial Sequence: Synthetic oligonucleotide
  Target: LAMA2; (-) strand; PAM type: YTN; PAM sequence: TTT
aattcctaataaatcagttt

SEQ ID NO: 286152 - DNA, 20 bp, Artificial Sequence
  Description of Artificial Sequence: Synthetic oligonucleotide
  Target: LAMA2; (-) strand; PAM type: YTN; PAM sequence: CTA
gtttaattcctaataaatca

SEQ ID NO: 286153 - DNA, 20 bp, Artificial Sequence
  Description of Artificial Sequence: Synthetic oligonucleotide
  Target: LAMA2; (-) strand; PAM type: YTN; PAM sequence: TTA
tggctagtttaattcctaat

SEQ ID NO: 286154 - DNA, 20 bp, Artificial Sequence
  Description of Artificial Sequence: Synthetic oligonucleotide
  Target: LAMA2; (-) strand; PAM type: YTN; PAM sequence: CTG
tattatggctagtttaattc

SEQ ID NO: 286155 - DNA, 20 bp, Artificial Sequence
  Description of Artificial Sequence: Synthetic oligonucleotide
  Target: LAMA2; (-) strand; PAM type: YTN; PAM sequence: CTA
tggctgtattatggctagtt

SEQ ID NO: 286156 - DNA, 20 bp, Artificial Sequence
  Description of Artificial Sequence: Synthetic oligonucleotide
  Target: LAMA2; (-) strand; PAM type: YTN; PAM sequence: TTG
gccctatggctgtattatgg

SEQ ID NO: 286157 - DNA, 20 bp, Artificial Sequence
  Description of Artificial Sequence: Synthetic oligonucleotide
  Target: LAMA2; (-) strand; PAM type: YTN; PAM sequence: CTT
ggccctatggctgtattatg

SEQ ID NO: 286158 - DNA, 20 bp, Artificial Sequence
  Description of Artificial Sequence: Synthetic oligonucleotide
  Target: LAMA2; (-) strand; PAM type: YTN; PAM sequence: TTA
tagcttggccctatggctgt

SEQ ID NO: 286159 - DNA, 20 bp, Artificial Sequence
  Description of Artificial Sequence: Synthetic oligonucleotide
  Target: LAMA2; (-) strand; PAM type: YTN; PAM sequence: TTT
atagcttggccctatggctg

SEQ ID NO: 286160 - DNA, 20 bp, Artificial Sequence
  Description of Artificial Sequence: Synthetic oligonucleotide
  Target: LAMA2; (-) strand; PAM type: YTN; PAM sequence: CTT
tatagcttggccctatggct

SEQ ID NO: 286161 - DNA, 20 bp, Artificial Sequence
  Description of Artificial Sequence: Synthetic oligonucleotide
  Target: LAMA2; (-) strand; PAM type: YTN; PAM sequence: TTA
ataaatgctttatagcttgg

SEQ ID NO: 286162 - DNA, 20 bp, Artificial Sequence
  Description of Artificial Sequence: Synthetic oligonucleotide
  Target: LAMA2; (-) strand; PAM type: YTN; PAM sequence: TTT
aataaatgctttatagcttg

SEQ ID NO: 286163 - DNA, 20 bp, Artificial Sequence
  Description of Artificial Sequence: Synthetic oligonucleotide
  Target: LAMA2; (-) strand; PAM type: YTN; PAM sequence: TTA
tttaataaatgctttatagc

SEQ ID NO: 286164 - DNA, 20 bp, Artificial Sequence
  Description of Artificial Sequence: Synthetic oligonucleotide
  Target: LAMA2; (-) strand; PAM type: YTN; PAM sequence: TTT
atttaataaatgctttatag

SEQ ID NO: 286165 - DNA, 20 bp, Artificial Sequence
  Description of Artificial Sequence: Synthetic oligonucleotide
  Target: LAMA2; (-) strand; PAM type: YTN; PAM sequence: TTT
tatttaataaatgctttata

SEQ ID NO: 286166 - DNA, 20 bp, Artificial Sequence
  Description of Artificial Sequence: Synthetic oligonucleotide
  Target: LAMA2; (-) strand; PAM type: YTN; PAM sequence: TTT
ttatttaataaatgctttat

SEQ ID NO: 286167 - DNA, 20 bp, Artificial Sequence
  Description of Artificial Sequence: Synthetic oligonucleotide
  Target: LAMA2; (-) strand; PAM type: YTN; PAM sequence: TTC
atttttatttaataaatgct

SEQ ID NO: 286168 - DNA, 20 bp, Artificial Sequence
  Description of Artificial Sequence: Synthetic oligonucleotide
  Target: LAMA2; (-) strand; PAM type: YTN; PAM sequence: CTT
catttttatttaataaatgc

SEQ ID NO: 286169 - DNA, 20 bp, Artificial Sequence
  Description of Artificial Sequence: Synthetic oligonucleotide
  Target: LAMA2; (-) strand; PAM type: YTN; PAM sequence: TTA
cttcatttttatttaataaa

SEQ ID NO: 286170 - DNA, 20 bp, Artificial Sequence
  Description of Artificial Sequence: Synthetic oligonucleotide
  Target: LAMA2; (-) strand; PAM type: YTN; PAM sequence: TTT
acttcatttttatttaataa

SEQ ID NO: 286171 - DNA, 20 bp, Artificial Sequence
  Description of Artificial Sequence: Synthetic oligonucleotide
  Target: LAMA2; (-) strand; PAM type: YTN; PAM sequence: CTG
tatgtagtttacttcatttt

SEQ ID NO: 286172 - DNA, 20 bp, Artificial Sequence
  Description of Artificial Sequence: Synthetic oligonucleotide
  Target: LAMA2; (-) strand; PAM type: YTN; PAM sequence: TTA
gtagtcaaagcgactgtatg

SEQ ID NO: 286173 - DNA, 20 bp, Artificial Sequence
  Description of Artificial Sequence: Synthetic oligonucleotide
  Target: LAMA2; (-) strand; PAM type: YTN; PAM sequence: CTG
aattagtagtcaaagcgact

SEQ ID NO: 286174 - DNA, 20 bp, Artificial Sequence
  Description of Artificial Sequence: Synthetic oligonucleotide
  Target: LAMA2; (-) strand; PAM type: YTN; PAM sequence: CTG
aatggggctgaattagtagt

SEQ ID NO: 286175 - DNA, 20 bp, Artificial Sequence
  Description of Artificial Sequence: Synthetic oligonucleotide
  Target: LAMA2; (-) strand; PAM type: YTN; PAM sequence: TTC
tgaatggggctgaattagta

SEQ ID NO: 286176 - DNA, 20 bp, Artificial Sequence
  Description of Artificial Sequence: Synthetic oligonucleotide
  Target: LAMA2; (-) strand; PAM type: YTN; PAM sequence: CTG
gcagacaatcatatccaatt

SEQ ID NO: 286177 - DNA, 20 bp, Artificial Sequence
  Description of Artificial Sequence: Synthetic oligonucleotide
  Target: LAMA2; (-) strand; PAM type: YTN; PAM sequence: TTA
tccctggcagacaatcatat

SEQ ID NO: 286178 - DNA, 20 bp, Artificial Sequence
  Description of Artificial Sequence: Synthetic oligonucleotide
  Target: LAMA2; (-) strand; PAM type: YTN; PAM sequence: CTG
aatagcatagtgcgttatcc

SEQ ID NO: 286179 - DNA, 20 bp, Artificial Sequence
  Description of Artificial Sequence: Synthetic oligonucleotide
  Target: LAMA2; (-) strand; PAM type: YTN; PAM sequence: TTC
atgagtagaactgaatagca

SEQ ID NO: 286180 - DNA, 20 bp, Artificial Sequence
  Description of Artificial Sequence: Synthetic oligonucleotide
  Target: LAMA2; (-) strand; PAM type: YTN; PAM sequence: CTG
gaattcatgagtagaactga

SEQ ID NO: 286181 - DNA, 20 bp, Artificial Sequence
  Description of Artificial Sequence: Synthetic oligonucleotide
  Target: LAMA2; (-) strand; PAM type: YTN; PAM sequence: CTG
actggaattcatgagtagaa

SEQ ID NO: 286182 - DNA, 20 bp, Artificial Sequence
  Description of Artificial Sequence: Synthetic oligonucleotide
  Target: LAMA2; (-) strand; PAM type: YTN; PAM sequence: TTG
acatcataagaggatcaaag

SEQ ID NO: 286183 - DNA, 20 bp, Artificial Sequence
  Description of Artificial Sequence: Synthetic oligonucleotide
  Target: LAMA2; (-) strand; PAM type: YTN; PAM sequence: CTA
tacgtaccattgacatcata

SEQ ID NO: 286184 - DNA, 20 bp, Artificial Sequence
  Description of Artificial Sequence: Synthetic oligonucleotide
  Target: LAMA2; (-) strand; PAM type: YTN; PAM sequence: CTG
aggcaggctatacgtaccat

SEQ ID NO: 286185 - DNA, 20 bp, Artificial Sequence
  Description of Artificial Sequence: Synthetic oligonucleotide
  Target: LAMA2; (-) strand; PAM type: YTN; PAM sequence: TTA
atatctgaggcaggctatac

SEQ ID NO: 286186 - DNA, 20 bp, Artificial Sequence
  Description of Artificial Sequence: Synthetic oligonucleotide
  Target: LAMA2; (-) strand; PAM type: YTN; PAM sequence: TTT
aatatctgaggcaggctata

SEQ ID NO: 286187 - DNA, 20 bp, Artificial Sequence
  Description of Artificial Sequence: Synthetic oligonucleotide
  Target: LAMA2; (-) strand; PAM type: YTN; PAM sequence: TTG
agaaaatttaatatctgagg

SEQ ID NO: 286188 - DNA, 20 bp, Artificial Sequence
  Description of Artificial Sequence: Synthetic oligonucleotide
  Target: LAMA2; (-) strand; PAM type: YTN; PAM sequence: TTG
gcattgagaaaatttaatat

SEQ ID NO: 286189 - DNA, 20 bp, Artificial Sequence
  Description of Artificial Sequence: Synthetic oligonucleotide
  Target: LAMA2; (-) strand; PAM type: YTN; PAM sequence: CTT
ggcattgagaaaatttaata

SEQ ID NO: 286190 - DNA, 20 bp, Artificial Sequence
  Description of Artificial Sequence: Synthetic oligonucleotide
  Target: LAMA2; (-) strand; PAM type: YTN; PAM sequence: TTA
tcagagaagaccttggcatt

SEQ ID NO: 286191 - DNA, 20 bp, Artificial Sequence
  Description of Artificial Sequence: Synthetic oligonucleotide
  Target: LAMA2; (-) strand; PAM type: YTN; PAM sequence: CTG
aaagtgaaccaaaatcatta

SEQ ID NO: 286192 - DNA, 20 bp, Artificial Sequence
  Description of Artificial Sequence: Synthetic oligonucleotide
  Target: LAMA2; (-) strand; PAM type: YTN; PAM sequence: CTG
ctgaaagtgaaccaaaatca

SEQ ID NO: 286193 - DNA, 20 bp, Artificial Sequence
  Description of Artificial Sequence: Synthetic oligonucleotide
  Target: LAMA2; (-) strand; PAM type: YTN; PAM sequence: TTA
gcaagctgctgaaagtgaac

SEQ ID NO: 286194 - DNA, 20 bp, Artificial Sequence
  Description of Artificial Sequence: Synthetic oligonucleotide
  Target: LAMA2; (-) strand; PAM type: YTN; PAM sequence: TTT
agcaagctgctgaaagtgaa

SEQ ID NO: 286195 - DNA, 20 bp, Artificial Sequence
  Description of Artificial Sequence: Synthetic oligonucleotide
  Target: LAMA2; (-) strand; PAM type: YTN; PAM sequence: TTT
tagcaagctgctgaaagtga

SEQ ID NO: 286196 - DNA, 20 bp, Artificial Sequence
  Description of Artificial Sequence: Synthetic oligonucleotide
  Target: LAMA2; (-) strand; PAM type: YTN; PAM sequence: TTT
ttagcaagctgctgaaagtg

SEQ ID NO: 286197 - DNA, 20 bp, Artificial Sequence
  Description of Artificial Sequence: Synthetic oligonucleotide
  Target: LAMA2; (-) strand; PAM type: YTN; PAM sequence: TTT
tttagcaagctgctgaaagt

SEQ ID NO: 286198 - DNA, 20 bp, Artificial Sequence
  Description of Artificial Sequence: Synthetic oligonucleotide
  Target: LAMA2; (-) strand; PAM type: YTN; PAM sequence: TTC
aggaaagggtgtcagatata

SEQ ID NO: 286199 - DNA, 20 bp, Artificial Sequence
  Description of Artificial Sequence: Synthetic oligonucleotide
  Target: LAMA2; (-) strand; PAM type: YTN; PAM sequence: TTA
atgttcaggaaagggtgtca

SEQ ID NO: 286200 - DNA, 20 bp, Artificial Sequence
  Description of Artificial Sequence: Synthetic oligonucleotide
  Target: LAMA2; (-) strand; PAM type: YTN; PAM sequence: TTT
aatgttcaggaaagggtgtc

SEQ ID NO: 286201 - DNA, 20 bp, Artificial Sequence
  Description of Artificial Sequence: Synthetic oligonucleotide
  Target: LAMA2; (-) strand; PAM type: YTN; PAM sequence: TTT
taatgttcaggaaagggtgt

SEQ ID NO: 286202 - DNA, 20 bp, Artificial Sequence
  Description of Artificial Sequence: Synthetic oligonucleotide
  Target: LAMA2; (-) strand; PAM type: YTN; PAM sequence: TTT
ttaatgttcaggaaagggtg

SEQ ID NO: 286203 - DNA, 20 bp, Artificial Sequence
  Description of Artificial Sequence: Synthetic oligonucleotide
  Target: LAMA2; (-) strand; PAM type: YTN; PAM sequence: TTC
agatatttttaatgttcagg

SEQ ID NO: 286204 - DNA, 20 bp, Artificial Sequence
  Description of Artificial Sequence: Synthetic oligonucleotide
  Target: LAMA2; (-) strand; PAM type: YTN; PAM sequence: CTT
cagatatttttaatgttcag

SEQ ID NO: 286205 - DNA, 20 bp, Artificial Sequence
  Description of Artificial Sequence: Synthetic oligonucleotide
  Target: LAMA2; (-) strand; PAM type: YTN; PAM sequence: TTA
gagataaaaagagagaagca

SEQ ID NO: 286206 - DNA, 20 bp, Artificial Sequence
  Description of Artificial Sequence: Synthetic oligonucleotide
  Target: LAMA2; (-) strand; PAM type: YTN; PAM sequence: CTA
taccaagggtcatccaaggg

SEQ ID NO: 286207 - DNA, 20 bp, Artificial Sequence
  Description of Artificial Sequence: Synthetic oligonucleotide
  Target: LAMA2; (-) strand; PAM type: YTN; PAM sequence: CTG
tgatacaatggcagctatac

SEQ ID NO: 286208 - DNA, 20 bp, Artificial Sequence
  Description of Artificial Sequence: Synthetic oligonucleotide
  Target: LAMA2; (-) strand; PAM type: YTN; PAM sequence: TTC
tgtgatacaatggcagctat

SEQ ID NO: 286209 - DNA, 20 bp, Artificial Sequence
  Description of Artificial Sequence: Synthetic oligonucleotide
  Target: LAMA2; (-) strand; PAM type: YTN; PAM sequence: TTG
gcaaagggtgttctgtgata

SEQ ID NO: 286210 - DNA, 20 bp, Artificial Sequence
  Description of Artificial Sequence: Synthetic oligonucleotide
  Target: LAMA2; (-) strand; PAM type: YTN; PAM sequence: CTT
ggcaaagggtgttctgtgat

SEQ ID NO: 286211 - DNA, 20 bp, Artificial Sequence
  Description of Artificial Sequence: Synthetic oligonucleotide
  Target: LAMA2; (-) strand; PAM type: YTN; PAM sequence: TTA
atatggcaaagcagatgagc

SEQ ID NO: 286212 - DNA, 20 bp, Artificial Sequence
  Description of Artificial Sequence: Synthetic oligonucleotide
  Target: LAMA2; (-) strand; PAM type: YTN; PAM sequence: TTG
gatgttaatatggcaaagca

SEQ ID NO: 286213 - DNA, 20 bp, Artificial Sequence
  Description of Artificial Sequence: Synthetic oligonucleotide
  Target: LAMA2; (-) strand; PAM type: YTN; PAM sequence: CTT
ggatgttaatatggcaaagc

SEQ ID NO: 286214 - DNA, 20 bp, Artificial Sequence
  Description of Artificial Sequence: Synthetic oligonucleotide
  Target: LAMA2; (-) strand; PAM type: YTN; PAM sequence: TTA
cttggatgttaatatggcaa

SEQ ID NO: 286215 - DNA, 20 bp, Artificial Sequence
  Description of Artificial Sequence: Synthetic oligonucleotide
  Target: LAMA2; (-) strand; PAM type: YTN; PAM sequence: TTT
acttggatgttaatatggca

SEQ ID NO: 286216 - DNA, 20 bp, Artificial Sequence
  Description of Artificial Sequence: Synthetic oligonucleotide
  Target: LAMA2; (-) strand; PAM type: YTN; PAM sequence: TTT
tacttggatgttaatatggc

SEQ ID NO: 286217 - DNA, 20 bp, Artificial Sequence
  Description of Artificial Sequence: Synthetic oligonucleotide
  Target: LAMA2; (-) strand; PAM type: YTN; PAM sequence: TTT
ttacttggatgttaatatgg

SEQ ID NO: 286218 - DNA, 20 bp, Artificial Sequence
  Description of Artificial Sequence: Synthetic oligonucleotide
  Target: LAMA2; (-) strand; PAM type: YTN; PAM sequence: TTG
caaaacaatggaggtaggaa

SEQ ID NO: 286219 - DNA, 20 bp, Artificial Sequence
  Description of Artificial Sequence: Synthetic oligonucleotide
  Target: LAMA2; (-) strand; PAM type: YTN; PAM sequence: TTG
agagtaggtgagtgaaaatg

SEQ ID NO: 286220 - DNA, 20 bp, Artificial Sequence
  Description of Artificial Sequence: Synthetic oligonucleotide
  Target: LAMA2; (-) strand; PAM type: YTN; PAM sequence: CTA
catacagtgttgagagtagg

SEQ ID NO: 286221 - DNA, 20 bp, Artificial Sequence
  Description of Artificial Sequence: Synthetic oligonucleotide
  Target: LAMA2; (-) strand; PAM type: YTN; PAM sequence: TTC
tacatacagtgttgagagta

SEQ ID NO: 286222 - DNA, 20 bp, Artificial Sequence
  Description of Artificial Sequence: Synthetic oligonucleotide
  Target: LAMA2; (-) strand; PAM type: YTN; PAM sequence: CTT
ctacatacagtgttgagagt

SEQ ID NO: 286223 - DNA, 20 bp, Artificial Sequence
  Description of Artificial Sequence: Synthetic oligonucleotide
  Target: LAMA2; (-) strand; PAM type: YTN; PAM sequence: TTC
ccttctacatacagtgttga

SEQ ID NO: 286224 - DNA, 20 bp, Artificial Sequence
  Description of Artificial Sequence: Synthetic oligonucleotide
  Target: LAMA2; (-) strand; PAM type: YTN; PAM sequence: TTT
cccttctacatacagtgttg

SEQ ID NO: 286225 - DNA, 20 bp, Artificial Sequence
  Description of Artificial Sequence: Synthetic oligonucleotide
  Target: LAMA2; (-) strand; PAM type: YTN; PAM sequence: TTC
acaaatcatggaatttccct

SEQ ID NO: 286226 - DNA, 20 bp, Artificial Sequence
  Description of Artificial Sequence: Synthetic oligonucleotide
  Target: LAMA2; (-) strand; PAM type: YTN; PAM sequence: CTT
cacaaatcatggaatttccc

SEQ ID NO: 286227 - DNA, 20 bp, Artificial Sequence
  Description of Artificial Sequence: Synthetic oligonucleotide
  Target: LAMA2; (-) strand; PAM type: YTN; PAM sequence: CTG
cttcacaaatcatggaattt

SEQ ID NO: 286228 - DNA, 20 bp, Artificial Sequence
  Description of Artificial Sequence: Synthetic oligonucleotide
  Target: LAMA2; (-) strand; PAM type: YTN; PAM sequence: TTC
ctgcttcacaaatcatggaa

SEQ ID NO: 286229 - DNA, 20 bp, Artificial Sequence
  Description of Artificial Sequence: Synthetic oligonucleotide
  Target: LAMA2; (-) strand; PAM type: YTN; PAM sequence: TTA
gttcctgcttcacaaatcat

SEQ ID NO: 286230 - DNA, 20 bp, Artificial Sequence
  Description of Artificial Sequence: Synthetic oligonucleotide
  Target: LAMA2; (-) strand; PAM type: YTN; PAM sequence: TTG
ggaagttagttcctgcttca

SEQ ID NO: 286231 - DNA, 20 bp, Artificial Sequence
  Description of Artificial Sequence: Synthetic oligonucleotide
  Target: LAMA2; (-) strand; PAM type: YTN; PAM sequence: TTC
agttgggaagttagttcctg

SEQ ID NO: 286232 - DNA, 20 bp, Artificial Sequence
  Description of Artificial Sequence: Synthetic oligonucleotide
  Target: LAMA2; (-) strand; PAM type: YTN; PAM sequence: TTT
cagttgggaagttagttcct

SEQ ID NO: 286233 - DNA, 20 bp, Artificial Sequence
  Description of Artificial Sequence: Synthetic oligonucleotide
  Target: LAMA2; (-) strand; PAM type: YTN; PAM sequence: TTT
tcagttgggaagttagttcc

SEQ ID NO: 286234 - DNA, 20 bp, Artificial Sequence
  Description of Artificial Sequence: Synthetic oligonucleotide
  Target: LAMA2; (-) strand; PAM type: YTN; PAM sequence: CTG
gatagggtggttttcagttg

SEQ ID NO: 286235 - DNA, 20 bp, Artificial Sequence
  Description of Artificial Sequence: Synthetic oligonucleotide
  Target: LAMA2; (-) strand; PAM type: YTN; PAM sequence: TTC
tggatagggtggttttcagt

SEQ ID NO: 286236 - DNA, 20 bp, Artificial Sequence
  Description of Artificial Sequence: Synthetic oligonucleotide
  Target: LAMA2; (-) strand; PAM type: YTN; PAM sequence: CTT
ctggatagggtggttttcag

SEQ ID NO: 286237 - DNA, 20 bp, Artificial Sequence
  Description of Artificial Sequence: Synthetic oligonucleotide
  Target: LAMA2; (-) strand; PAM type: YTN; PAM sequence: CTA
gggagacagtcttctggata

SEQ ID NO: 286238 - DNA, 20 bp, Artificial Sequence
  Description of Artificial Sequence: Synthetic oligonucleotide
  Target: LAMA2; (-) strand; PAM type: YTN; PAM sequence: CTG
tgtcctagggagacagtctt

SEQ ID NO: 286239 - DNA, 20 bp, Artificial Sequence
  Description of Artificial Sequence: Synthetic oligonucleotide
  Target: LAMA2; (-) strand; PAM type: YTN; PAM sequence: TTC
tgtgtcctagggagacagtc

SEQ ID NO: 286240 - DNA, 20 bp, Artificial Sequence
  Description of Artificial Sequence: Synthetic oligonucleotide
  Target: LAMA2; (-) strand; PAM type: YTN; PAM sequence: TTG
ttctgtgtcctagggagaca

SEQ ID NO: 286241 - DNA, 20 bp, Artificial Sequence
  Description of Artificial Sequence: Synthetic oligonucleotide
  Target: LAMA2; (-) strand; PAM type: YTN; PAM sequence: TTT
gttctgtgtcctagggagac

SEQ ID NO: 286242 - DNA, 20 bp, Artificial Sequence
  Description of Artificial Sequence: Synthetic oligonucleotide
  Target: LAMA2; (-) strand; PAM type: YTN; PAM sequence: CTC
agagtgtttgttctgtgtcc

SEQ ID NO: 286243 - DNA, 20 bp, Artificial Sequence
  Description of Artificial Sequence: Synthetic oligonucleotide
  Target: LAMA2; (-) strand; PAM type: YTN; PAM sequence: CTA
tggtcctcagagtgtttgtt

SEQ ID NO: 286244 - DNA, 20 bp, Artificial Sequence
  Description of Artificial Sequence: Synthetic oligonucleotide
  Target: LAMA2; (-) strand; PAM type: YTN; PAM sequence: CTC
agggccaactatggtcctca

SEQ ID NO: 286245 - DNA, 20 bp, Artificial Sequence
  Description of Artificial Sequence: Synthetic oligonucleotide
  Target: LAMA2; (-) strand; PAM type: YTN; PAM sequence: CTG
ggtgcaggactcagggccaa

SEQ ID NO: 286246 - DNA, 20 bp, Artificial Sequence
  Description of Artificial Sequence: Synthetic oligonucleotide
  Target: LAMA2; (-) strand; PAM type: YTN; PAM sequence: CTG
ctgggtgcaggactcagggc

SEQ ID NO: 286247 - DNA, 20 bp, Artificial Sequence
  Description of Artificial Sequence: Synthetic oligonucleotide
  Target: LAMA2; (-) strand; PAM type: YTN; PAM sequence: CTG
ccaactgctgggtgcaggac

SEQ ID NO: 286248 - DNA, 20 bp, Artificial Sequence
  Description of Artificial Sequence: Synthetic oligonucleotide
  Target: LAMA2; (-) strand; PAM type: YTN; PAM sequence: TTC
cccaaaaaggtggggccagc

SEQ ID NO: 286249 - DNA, 20 bp, Artificial Sequence
  Description of Artificial Sequence: Synthetic oligonucleotide
  Target: LAMA2; (-) strand; PAM type: YTN; PAM sequence: CTT
ccccaaaaaggtggggccag

SEQ ID NO: 286250 - DNA, 20 bp, Artificial Sequence
  Description of Artificial Sequence: Synthetic oligonucleotide
  Target: LAMA2; (-) strand; PAM type: YTN; PAM sequence: TTG
ccttccccaaaaaggtgggg

SEQ ID NO: 286251 - DNA, 20 bp, Artificial Sequence
  Description of Artificial Sequence: Synthetic oligonucleotide
  Target: LAMA2; (-) strand; PAM type: YTN; PAM sequence: CTT
gccttccccaaaaaggtggg

SEQ ID NO: 286252 - DNA, 20 bp, Artificial Sequence
  Description of Artificial Sequence: Synthetic oligonucleotide
  Target: LAMA2; (-) strand; PAM type: YTN; PAM sequence: TTC
ttgccttccccaaaaaggtg

SEQ ID NO: 286253 - DNA, 20 bp, Artificial Sequence
  Description of Artificial Sequence: Synthetic oligonucleotide
  Target: LAMA2; (-) strand; PAM type: YTN; PAM sequence: TTA
ttcttgccttccccaaaaag

SEQ ID NO: 286254 - DNA, 20 bp, Artificial Sequence
  Description of Artificial Sequence: Synthetic oligonucleotide
  Target: LAMA2; (-) strand; PAM type: YTN; PAM sequence: CTT
attcttgccttccccaaaaa

SEQ ID NO: 286255 - DNA, 20 bp, Artificial Sequence
  Description of Artificial Sequence: Synthetic oligonucleotide
  Target: LAMA2; (-) strand; PAM type: YTN; PAM sequence: TTC
ttattcttgccttccccaaa

SEQ ID NO: 286256 - DNA, 20 bp, Artificial Sequence
  Description of Artificial Sequence: Synthetic oligonucleotide
  Target: LAMA2; (-) strand; PAM type: YTN; PAM sequence: TTT
cttattcttgccttccccaa

SEQ ID NO: 286257 - DNA, 20 bp, Artificial Sequence
  Description of Artificial Sequence: Synthetic oligonucleotide
  Target: LAMA2; (-) strand; PAM type: YTN; PAM sequence: CTT
tcttattcttgccttcccca

SEQ ID NO: 286258 - DNA, 20 bp, Artificial Sequence
  Description of Artificial Sequence: Synthetic oligonucleotide
  Target: LAMA2; (-) strand; PAM type: YTN; PAM sequence: TTA
aaccactttcttattcttgc

SEQ ID NO: 286259 - DNA, 20 bp, Artificial Sequence
  Description of Artificial Sequence: Synthetic oligonucleotide
  Target: LAMA2; (-) strand; PAM type: YTN; PAM sequence: CTT
aaaccactttcttattcttg

SEQ ID NO: 286260 - DNA, 20 bp, Artificial Sequence
  Description of Artificial Sequence: Synthetic oligonucleotide
  Target: LAMA2; (-) strand; PAM type: YTN; PAM sequence: CTG
cttaaaccactttcttattc

SEQ ID NO: 286261 - DNA, 20 bp, Artificial Sequence
  Description of Artificial Sequence: Synthetic oligonucleotide
  Target: LAMA2; (-) strand; PAM type: YTN; PAM sequence: CTA
ctgcttaaaccactttctta

SEQ ID NO: 286262 - DNA, 20 bp, Artificial Sequence
  Description of Artificial Sequence: Synthetic oligonucleotide
  Target: LAMA2; (-) strand; PAM type: YTN; PAM sequence: TTC
caggaagcctactgcttaaa

SEQ ID NO: 286263 - DNA, 20 bp, Artificial Sequence
  Description of Artificial Sequence: Synthetic oligonucleotide
  Target: LAMA2; (-) strand; PAM type: YTN; PAM sequence: CTG
gacattccaggaagcctact

SEQ ID NO: 286264 - DNA, 20 bp, Artificial Sequence
  Description of Artificial Sequence: Synthetic oligonucleotide
  Target: LAMA2; (-) strand; PAM type: YTN; PAM sequence: CTG
gggctggacattccaggaag

SEQ ID NO: 286265 - DNA, 20 bp, Artificial Sequence
  Description of Artificial Sequence: Synthetic oligonucleotide
  Target: LAMA2; (-) strand; PAM type: YTN; PAM sequence: CTG
agtgtggtggcctggggctg

SEQ ID NO: 286266 - DNA, 20 bp, Artificial Sequence
  Description of Artificial Sequence: Synthetic oligonucleotide
  Target: LAMA2; (-) strand; PAM type: YTN; PAM sequence: CTG
gaggcctgagtgtggtggcc

SEQ ID NO: 286267 - DNA, 20 bp, Artificial Sequence
  Description of Artificial Sequence: Synthetic oligonucleotide
  Target: LAMA2; (-) strand; PAM type: YTN; PAM sequence: CTG
ctggaggcctgagtgtggtg

SEQ ID NO: 286268 - DNA, 20 bp, Artificial Sequence
  Description of Artificial Sequence: Synthetic oligonucleotide
  Target: LAMA2; (-) strand; PAM type: YTN; PAM sequence: CTC
caccacccagaggagggtga

SEQ ID NO: 286269 - DNA, 20 bp, Artificial Sequence
  Description of Artificial Sequence: Synthetic oligonucleotide
  Target: LAMA2; (-) strand; PAM type: YTN; PAM sequence: TTC
ctccaccacccagaggaggg

SEQ ID NO: 286270 - DNA, 20 bp, Artificial Sequence
  Description of Artificial Sequence: Synthetic oligonucleotide
  Target: LAMA2; (-) strand; PAM type: YTN; PAM sequence: TTT
cctccaccacccagaggagg

SEQ ID NO: 286271 - DNA, 20 bp, Artificial Sequence
  Description of Artificial Sequence: Synthetic oligonucleotide
  Target: LAMA2; (-) strand; PAM type: YTN; PAM sequence: CTG
tttcctccaccacccagagg

SEQ ID NO: 286272 - DNA, 20 bp, Artificial Sequence
  Description of Artificial Sequence: Synthetic oligonucleotide
  Target: LAMA2; (-) strand; PAM type: YTN; PAM sequence: CTG
gagagaaacaggggctgttt

SEQ ID NO: 286273 - DNA, 20 bp, Artificial Sequence
  Description of Artificial Sequence: Synthetic oligonucleotide
  Target: LAMA2; (-) strand; PAM type: YTN; PAM sequence: TTC
tggagagaaacaggggctgt

SEQ ID NO: 286274 - DNA, 20 bp, Artificial Sequence
  Description of Artificial Sequence: Synthetic oligonucleotide
  Target: LAMA2; (-) strand; PAM type: YTN; PAM sequence: CTG
tgttctggagagaaacaggg

SEQ ID NO: 286275 - DNA, 20 bp, Artificial Sequence
  Description of Artificial Sequence: Synthetic oligonucleotide
  Target: LAMA2; (-) strand; PAM type: YTN; PAM sequence: CTC
catgaagaggacactgtgtt

SEQ ID NO: 286276 - DNA, 20 bp, Artificial Sequence
  Description of Artificial Sequence: Synthetic oligonucleotide
  Target: LAMA2; (-) strand; PAM type: YTN; PAM sequence: TTG
tatctccatgaagaggacac

SEQ ID NO: 286277 - DNA, 20 bp, Artificial Sequence
  Description of Artificial Sequence: Synthetic oligonucleotide
  Target: LAMA2; (-) strand; PAM type: YTN; PAM sequence: CTA
atcaaattgtatctccatga

SEQ ID NO: 286278 - DNA, 20 bp, Artificial Sequence
  Description of Artificial Sequence: Synthetic oligonucleotide
  Target: LAMA2; (-) strand; PAM type: YTN; PAM sequence: CTG
ctaatcaaattgtatctcca

SEQ ID NO: 286279 - DNA, 20 bp, Artificial Sequence
  Description of Artificial Sequence: Synthetic oligonucleotide
  Target: LAMA2; (-) strand; PAM type: YTN; PAM sequence: CTG
atctgctaatcaaattgtat

SEQ ID NO: 286280 - DNA, 20 bp, Artificial Sequence
  Description of Artificial Sequence: Synthetic oligonucleotide
  Target: LAMA2; (-) strand; PAM type: YTN; PAM sequence: CTC
acctgatctgctaatcaaat

SEQ ID NO: 286281 - DNA, 20 bp, Artificial Sequence
  Description of Artificial Sequence: Synthetic oligonucleotide
  Target: LAMA2; (-) strand; PAM type: YTN; PAM sequence: TTG
cctcacctgatctgctaatc

SEQ ID NO: 286282 - DNA, 20 bp, Artificial Sequence
  Description of Artificial Sequence: Synthetic oligonucleotide
  Target: LAMA2; (-) strand; PAM type: YTN; PAM sequence: TTG
ttgcctcacctgatctgcta

SEQ ID NO: 286283 - DNA, 20 bp, Artificial Sequence
  Description of Artificial Sequence: Synthetic oligonucleotide
  Target: LAMA2; (-) strand; PAM type: YTN; PAM sequence: TTG
ttgttgcctcacctgatctg

SEQ ID NO: 286284 - DNA, 20 bp, Artificial Sequence
  Description of Artificial Sequence: Synthetic oligonucleotide
  Target: LAMA2; (-) strand; PAM type: YTN; PAM sequence: TTA
ttgttgttgcctcacctgat

SEQ ID NO: 286285 - DNA, 20 bp, Artificial Sequence
  Description of Artificial Sequence: Synthetic oligonucleotide
  Target: LAMA2; (-) strand; PAM type: YTN; PAM sequence: TTT
attgttgttgcctcacctga

SEQ ID NO: 286286 - DNA, 20 bp, Artificial Sequence
  Description of Artificial Sequence: Synthetic oligonucleotide
  Target: LAMA2; (-) strand; PAM type: YTN; PAM sequence: TTG
tttattgttgttgcctcacc

SEQ ID NO: 286287 - DNA, 20 bp, Artificial Sequence
  Description of Artificial Sequence: Synthetic oligonucleotide
  Target: LAMA2; (-) strand; PAM type: YTN; PAM sequence: TTT
gtttattgttgttgcctcac

SEQ ID NO: 286288 - DNA, 20 bp, Artificial Sequence
  Description of Artificial Sequence: Synthetic oligonucleotide
  Target: LAMA2; (-) strand; PAM type: YTN; PAM sequence: TTA
tttgtttattgttgttgcct

SEQ ID NO: 286289 - DNA, 20 bp, Artificial Sequence
  Description of Artificial Sequence: Synthetic oligonucleotide
  Target: LAMA2; (-) strand; PAM type: YTN; PAM sequence: TTT
atttgtttattgttgttgcc

SEQ ID NO: 286290 - DNA, 20 bp, Artificial Sequence
  Description of Artificial Sequence: Synthetic oligonucleotide
  Target: LAMA2; (-) strand; PAM type: YTN; PAM sequence: CTC
ccacagaccgcataagtcat

SEQ ID NO: 286291 - DNA, 20 bp, Artificial Sequence
  Description of Artificial Sequence: Synthetic oligonucleotide
  Target: LAMA2; (-) strand; PAM type: YTN; PAM sequence: TTA
cgtctcccacagaccgcata

SEQ ID NO: 286292 - DNA, 20 bp, Artificial Sequence
  Description of Artificial Sequence: Synthetic oligonucleotide
  Target: LAMA2; (-) strand; PAM type: YTN; PAM sequence: CTG
ttacgtctcccacagaccgc

SEQ ID NO: 286293 - DNA, 20 bp, Artificial Sequence
  Description of Artificial Sequence: Synthetic oligonucleotide
  Target: LAMA2; (-) strand; PAM type: YTN; PAM sequence: CTG
gggatacagaagatctgtta

SEQ ID NO: 286294 - DNA, 20 bp, Artificial Sequence
  Description of Artificial Sequence: Synthetic oligonucleotide
  Target: LAMA2; (-) strand; PAM type: YTN; PAM sequence: TTC
tggggatacagaagatctgt

SEQ ID NO: 286295 - DNA, 20 bp, Artificial Sequence
  Description of Artificial Sequence: Synthetic oligonucleotide
  Target: LAMA2; (-) strand; PAM type: YTN; PAM sequence: CTT
ctggggatacagaagatctg

SEQ ID NO: 286296 - DNA, 20 bp, Artificial Sequence
  Description of Artificial Sequence: Synthetic oligonucleotide
  Target: LAMA2; (-) strand; PAM type: YTN; PAM sequence: TTG
agaccttctggggatacaga

SEQ ID NO: 286297 - DNA, 20 bp, Artificial Sequence
  Description of Artificial Sequence: Synthetic oligonucleotide
  Target: LAMA2; (-) strand; PAM type: YTN; PAM sequence: TTT
gagaccttctggggatacag

SEQ ID NO: 286298 - DNA, 20 bp, Artificial Sequence
  Description of Artificial Sequence: Synthetic oligonucleotide
  Target: LAMA2; (-) strand; PAM type: YTN; PAM sequence: TTC
atatagatttgagaccttct

SEQ ID NO: 286299 - DNA, 20 bp, Artificial Sequence
  Description of Artificial Sequence: Synthetic oligonucleotide
  Target: LAMA2; (-) strand; PAM type: YTN; PAM sequence: TTG
caataggtaaattcatatag

SEQ ID NO: 286300 - DNA, 20 bp, Artificial Sequence
  Description of Artificial Sequence: Synthetic oligonucleotide
  Target: LAMA2; (-) strand; PAM type: YTN; PAM sequence: TTT
gcaataggtaaattcatata

SEQ ID NO: 286301 - DNA, 20 bp, Artificial Sequence
  Description of Artificial Sequence: Synthetic oligonucleotide
  Target: LAMA2; (-) strand; PAM type: YTN; PAM sequence: TTT
tgcaataggtaaattcatat

SEQ ID NO: 286302 - DNA, 20 bp, Artificial Sequence
  Description of Artificial Sequence: Synthetic oligonucleotide
  Target: LAMA2; (-) strand; PAM type: YTN; PAM sequence: TTT
ttgcaataggtaaattcata

SEQ ID NO: 286303 - DNA, 20 bp, Artificial Sequence
  Description of Artificial Sequence: Synthetic oligonucleotide
  Target: LAMA2; (-) strand; PAM type: YTN; PAM sequence: CTA
aagagggatttttgcaatag

SEQ ID NO: 286304 - DNA, 20 bp, Artificial Sequence
  Description of Artificial Sequence: Synthetic oligonucleotide
  Target: LAMA2; (-) strand; PAM type: YTN; PAM sequence: TTC
aaaagagaaggctaaagagg

SEQ ID NO: 286305 - DNA, 20 bp, Artificial Sequence
  Description of Artificial Sequence: Synthetic oligonucleotide
  Target: LAMA2; (-) strand; PAM type: YTN; PAM sequence: TTG
gattcaaaagagaaggctaa

SEQ ID NO: 286306 - DNA, 20 bp, Artificial Sequence
  Description of Artificial Sequence: Synthetic oligonucleotide
  Target: LAMA2; (-) strand; PAM type: YTN; PAM sequence: TTG
gttggattcaaaagagaagg

SEQ ID NO: 286307 - DNA, 20 bp, Artificial Sequence
  Description of Artificial Sequence: Synthetic oligonucleotide
  Target: LAMA2; (-) strand; PAM type: YTN; PAM sequence: TTG
ggtgccaaattggttggatt

SEQ ID NO: 286308 - DNA, 20 bp, Artificial Sequence
  Description of Artificial Sequence: Synthetic oligonucleotide
  Target: LAMA2; (-) strand; PAM type: YTN; PAM sequence: CTG
caaaggttgggtgccaaatt

SEQ ID NO: 286309 - DNA, 20 bp, Artificial Sequence
  Description of Artificial Sequence: Synthetic oligonucleotide
  Target: LAMA2; (-) strand; PAM type: YTN; PAM sequence: CTC
caagggtcatgcaagtatac

SEQ ID NO: 286310 - DNA, 20 bp, Artificial Sequence
  Description of Artificial Sequence: Synthetic oligonucleotide
  Target: LAMA2; (-) strand; PAM type: YTN; PAM sequence: TTC
tccaagggtcatgcaagtat

SEQ ID NO: 286311 - DNA, 20 bp, Artificial Sequence
  Description of Artificial Sequence: Synthetic oligonucleotide
  Target: LAMA2; (-) strand; PAM type: YTN; PAM sequence: CTT
ctccaagggtcatgcaagta

SEQ ID NO: 286312 - DNA, 20 bp, Artificial Sequence
  Description of Artificial Sequence: Synthetic oligonucleotide
  Target: LAMA2; (-) strand; PAM type: YTN; PAM sequence: CTG
tggcccttctccaagggtca

SEQ ID NO: 286313 - DNA, 20 bp, Artificial Sequence
  Description of Artificial Sequence: Synthetic oligonucleotide
  Target: LAMA2; (-) strand; PAM type: YTN; PAM sequence: TTG
agtatgggcagaactgtggc

SEQ ID NO: 286314 - DNA, 20 bp, Artificial Sequence
  Description of Artificial Sequence: Synthetic oligonucleotide
  Target: LAMA2; (-) strand; PAM type: YTN; PAM sequence: TTT
gagtatgggcagaactgtgg

SEQ ID NO: 286315 - DNA, 20 bp, Artificial Sequence
  Description of Artificial Sequence: Synthetic oligonucleotide
  Target: LAMA2; (-) strand; PAM type: YTN; PAM sequence: TTG
tgtttgagtatgggcagaac

SEQ ID NO: 286316 - DNA, 20 bp, Artificial Sequence
  Description of Artificial Sequence: Synthetic oligonucleotide
  Target: LAMA2; (-) strand; PAM type: YTN; PAM sequence: TTT
gtgtttgagtatgggcagaa

SEQ ID NO: 286317 - DNA, 20 bp, Artificial Sequence
  Description of Artificial Sequence: Synthetic oligonucleotide
  Target: LAMA2; (-) strand; PAM type: YTN; PAM sequence: CTC
atttgtgtttgagtatgggc

SEQ ID NO: 286318 - DNA, 20 bp, Artificial Sequence
  Description of Artificial Sequence: Synthetic oligonucleotide
  Target: LAMA2; (-) strand; PAM type: YTN; PAM sequence: CTC
caagagcctcatttgtgttt

SEQ ID NO: 286319 - DNA, 20 bp, Artificial Sequence
  Description of Artificial Sequence: Synthetic oligonucleotide
  Target: LAMA2; (-) strand; PAM type: YTN; PAM sequence: CTC
catatgatcatgacaccagg

SEQ ID NO: 286320 - DNA, 20 bp, Artificial Sequence
  Description of Artificial Sequence: Synthetic oligonucleotide
  Target: LAMA2; (-) strand; PAM type: YTN; PAM sequence: CTA
gaaaccaaaacagcctccat

SEQ ID NO: 286321 - DNA, 20 bp, Artificial Sequence
  Description of Artificial Sequence: Synthetic oligonucleotide
  Target: LAMA2; (-) strand; PAM type: YTN; PAM sequence: CTC
ccaacaagatagcctagaaa

SEQ ID NO: 286322 - DNA, 20 bp, Artificial Sequence
  Description of Artificial Sequence: Synthetic oligonucleotide
  Target: LAMA2; (-) strand; PAM type: YTN; PAM sequence: CTG
tgcagactcccaacaagata

SEQ ID NO: 286323 - DNA, 20 bp, Artificial Sequence
  Description of Artificial Sequence: Synthetic oligonucleotide
  Target: LAMA2; (-) strand; PAM type: YTN; PAM sequence: CTC
catgaaagggctgtgcagac

SEQ ID NO: 286324 - DNA, 20 bp, Artificial Sequence
  Description of Artificial Sequence: Synthetic oligonucleotide
  Target: LAMA2; (-) strand; PAM type: YTN; PAM sequence: TTA
cctccatgaaagggctgtgc

SEQ ID NO: 286325 - DNA, 20 bp, Artificial Sequence
  Description of Artificial Sequence: Synthetic oligonucleotide
  Target: LAMA2; (-) strand; PAM type: YTN; PAM sequence: CTA
gcatcatcattacctccatg

SEQ ID NO: 286326 - DNA, 20 bp, Artificial Sequence
  Description of Artificial Sequence: Synthetic oligonucleotide
  Target: LAMA2; (-) strand; PAM type: YTN; PAM sequence: TTG
gaagaaaaccaactagcatc

SEQ ID NO: 286327 - DNA, 20 bp, Artificial Sequence
  Description of Artificial Sequence: Synthetic oligonucleotide
  Target: LAMA2; (-) strand; PAM type: YTN; PAM sequence: TTT
ggaagaaaaccaactagcat

SEQ ID NO: 286328 - DNA, 20 bp, Artificial Sequence
  Description of Artificial Sequence: Synthetic oligonucleotide
  Target: LAMA2; (-) strand; PAM type: YTN; PAM sequence: TTG
cacatttggaagaaaaccaa

SEQ ID NO: 286329 - DNA, 20 bp, Artificial Sequence
  Description of Artificial Sequence: Synthetic oligonucleotide
  Target: LAMA2; (-) strand; PAM type: YTN; PAM sequence: TTT
gcacatttggaagaaaacca

SEQ ID NO: 286330 - DNA, 20 bp, Artificial Sequence
  Description of Artificial Sequence: Synthetic oligonucleotide
  Target: LAMA2; (-) strand; PAM type: YTN; PAM sequence: CTC
atgtaatttgcacatttgga

SEQ ID NO: 286331 - DNA, 20 bp, Artificial Sequence
  Description of Artificial Sequence: Synthetic oligonucleotide
  Target: LAMA2; (-) strand; PAM type: YTN; PAM sequence: CTA
ctcatgtaatttgcacattt

SEQ ID NO: 286332 - DNA, 20 bp, Artificial Sequence
  Description of Artificial Sequence: Synthetic oligonucleotide
  Target: LAMA2; (-) strand; PAM type: YTN; PAM sequence: TTG
tgctactcatgtaatttgca

SEQ ID NO: 286333 - DNA, 20 bp, Artificial Sequence
  Description of Artificial Sequence: Synthetic oligonucleotide
  Target: LAMA2; (-) strand; PAM type: YTN; PAM sequence: TTT
gtgctactcatgtaatttgc

SEQ ID NO: 286334 - DNA, 20 bp, Artificial Sequence
  Description of Artificial Sequence: Synthetic oligonucleotide
  Target: LAMA2; (-) strand; PAM type: YTN; PAM sequence: TTT
tgtgctactcatgtaatttg

SEQ ID NO: 286335 - DNA, 20 bp, Artificial Sequence
  Description of Artificial Sequence: Synthetic oligonucleotide
  Target: LAMA2; (-) strand; PAM type: YTN; PAM sequence: CTA
gcattttgtgctactcatgt

SEQ ID NO: 286336 - DNA, 20 bp, Artificial Sequence
  Description of Artificial Sequence: Synthetic oligonucleotide
  Target: LAMA2; (-) strand; PAM type: YTN; PAM sequence: TTC
tagcattttgtgctactcat

SEQ ID NO: 286337 - DNA, 20 bp, Artificial Sequence
  Description of Artificial Sequence: Synthetic oligonucleotide
  Target: LAMA2; (-) strand; PAM type: YTN; PAM sequence: CTT
ctagcattttgtgctactca

SEQ ID NO: 286338 - DNA, 20 bp, Artificial Sequence
  Description of Artificial Sequence: Synthetic oligonucleotide
  Target: LAMA2; (-) strand; PAM type: YTN; PAM sequence: TTC
ttctagcattttgtgctact

SEQ ID NO: 286339 - DNA, 20 bp, Artificial Sequence
  Description of Artificial Sequence: Synthetic oligonucleotide
  Target: LAMA2; (-) strand; PAM type: YTN; PAM sequence: TTT
cttctagcattttgtgctac

SEQ ID NO: 286340 - DNA, 20 bp, Artificial Sequence
  Description of Artificial Sequence: Synthetic oligonucleotide
  Target: LAMA2; (-) strand; PAM type: YTN; PAM sequence: TTC
atttcttctagcattttgtg

SEQ ID NO: 286341 - DNA, 20 bp, Artificial Sequence
  Description of Artificial Sequence: Synthetic oligonucleotide
  Target: LAMA2; (-) strand; PAM type: YTN; PAM sequence: TTT
catttcttctagcattttgt

SEQ ID NO: 286342 - DNA, 20 bp, Artificial Sequence
  Description of Artificial Sequence: Synthetic oligonucleotide
  Target: LAMA2; (-) strand; PAM type: YTN; PAM sequence: TTT
tcatttcttctagcattttg

SEQ ID NO: 286343 - DNA, 20 bp, Artificial Sequence
  Description of Artificial Sequence: Synthetic oligonucleotide
  Target: LAMA2; (-) strand; PAM type: YTN; PAM sequence: TTT
ttcatttcttctagcatttt

SEQ ID NO: 286344 - DNA, 20 bp, Artificial Sequence
  Description of Artificial Sequence: Synthetic oligonucleotide
  Target: LAMA2; (-) strand; PAM type: YTN; PAM sequence: TTT
tttcatttcttctagcattt

SEQ ID NO: 286345 - DNA, 20 bp, Artificial Sequence
  Description of Artificial Sequence: Synthetic oligonucleotide
  Target: LAMA2; (-) strand; PAM type: YTN; PAM sequence: TTC
cattttttcatttcttctag

SEQ ID NO: 286346 - DNA, 20 bp, Artificial Sequence
  Description of Artificial Sequence: Synthetic oligonucleotide
  Target: LAMA2; (-) strand; PAM type: YTN; PAM sequence: TTT
ccattttttcatttcttcta

SEQ ID NO: 286347 - DNA, 20 bp, Artificial Sequence
  Description of Artificial Sequence: Synthetic oligonucleotide
  Target: LAMA2; (-) strand; PAM type: YTN; PAM sequence: CTA
gcagtgaatttccatttttt

SEQ ID NO: 286348 - DNA, 20 bp, Artificial Sequence
  Description of Artificial Sequence: Synthetic oligonucleotide
  Target: LAMA2; (-) strand; PAM type: YTN; PAM sequence: TTC
actagcagtgaatttccatt

SEQ ID NO: 286349 - DNA, 20 bp, Artificial Sequence
  Description of Artificial Sequence: Synthetic oligonucleotide
  Target: LAMA2; (-) strand; PAM type: YTN; PAM sequence: CTT
cactagcagtgaatttccat

SEQ ID NO: 286350 - DNA, 20 bp, Artificial Sequence
  Description of Artificial Sequence: Synthetic oligonucleotide
  Target: LAMA2; (-) strand; PAM type: YTN; PAM sequence: TTG
gccttcactagcagtgaatt

SEQ ID NO: 286351 - DNA, 20 bp, Artificial Sequence
  Description of Artificial Sequence: Synthetic oligonucleotide
  Target: LAMA2; (-) strand; PAM type: YTN; PAM sequence: CTT
ggccttcactagcagtgaat

SEQ ID NO: 286352 - DNA, 20 bp, Artificial Sequence
  Description of Artificial Sequence: Synthetic oligonucleotide
  Target: LAMA2; (-) strand; PAM type: YTN; PAM sequence: CTC
ttggccttcactagcagtga

SEQ ID NO: 286353 - DNA, 20 bp, Artificial Sequence
  Description of Artificial Sequence: Synthetic oligonucleotide
  Target: LAMA2; (-) strand; PAM type: YTN; PAM sequence: TTC
aaatgccctcttggccttca

SEQ ID NO: 286354 - DNA, 20 bp, Artificial Sequence
  Description of Artificial Sequence: Synthetic oligonucleotide
  Target: LAMA2; (-) strand; PAM type: YTN; PAM sequence: TTG
ttcaaatgccctcttggcct

SEQ ID NO: 286355 - DNA, 20 bp, Artificial Sequence
  Description of Artificial Sequence: Synthetic oligonucleotide
  Target: LAMA2; (-) strand; PAM type: YTN; PAM sequence: TTT
gttcaaatgccctcttggcc

SEQ ID NO: 286356 - DNA, 20 bp, Artificial Sequence
  Description of Artificial Sequence: Synthetic oligonucleotide
  Target: LAMA2; (-) strand; PAM type: YTN; PAM sequence: TTG
ccatttgttcaaatgccctc

SEQ ID NO: 286357 - DNA, 20 bp, Artificial Sequence
  Description of Artificial Sequence: Synthetic oligonucleotide
  Target: LAMA2; (-) strand; PAM type: YTN; PAM sequence: TTT
gccatttgttcaaatgccct

SEQ ID NO: 286358 - DNA, 20 bp, Artificial Sequence
  Description of Artificial Sequence: Synthetic oligonucleotide
  Target: LAMA2; (-) strand; PAM type: YTN; PAM sequence: CTT
tgccatttgttcaaatgccc

SEQ ID NO: 286359 - DNA, 20 bp, Artificial Sequence
  Description of Artificial Sequence: Synthetic oligonucleotide
  Target: LAMA2; (-) strand; PAM type: YTN; PAM sequence: CTC
tttgccatttgttcaaatgc

SEQ ID NO: 286360 - DNA, 20 bp, Artificial Sequence
  Description of Artificial Sequence: Synthetic oligonucleotide
  Target: LAMA2; (-) strand; PAM type: YTN; PAM sequence: CTC
tctttgccatttgttcaaat

SEQ ID NO: 286361 - DNA, 20 bp, Artificial Sequence
  Description of Artificial Sequence: Synthetic oligonucleotide
  Target: LAMA2; (-) strand; PAM type: YTN; PAM sequence: CTC
cagaaggaggcagagagagg

SEQ ID NO: 286362 - DNA, 20 bp, Artificial Sequence
  Description of Artificial Sequence: Synthetic oligonucleotide
  Target: LAMA2; (-) strand; PAM type: YTN; PAM sequence: TTG
atagcgctccagaaggaggc

SEQ ID NO: 286363 - DNA, 20 bp, Artificial Sequence
  Description of Artificial Sequence: Synthetic oligonucleotide
  Target: LAMA2; (-) strand; PAM type: YTN; PAM sequence: TTC
attgatagcgctccagaagg

SEQ ID NO: 286364 - DNA, 20 bp, Artificial Sequence
  Description of Artificial Sequence: Synthetic oligonucleotide
  Target: LAMA2; (-) strand; PAM type: YTN; PAM sequence: TTG
ttcattgatagcgctccaga

SEQ ID NO: 286365 - DNA, 20 bp, Artificial Sequence
  Description of Artificial Sequence: Synthetic oligonucleotide
  Target: LAMA2; (-) strand; PAM type: YTN; PAM sequence: TTT
gttcattgatagcgctccag

SEQ ID NO: 286366 - DNA, 20 bp, Artificial Sequence
  Description of Artificial Sequence: Synthetic oligonucleotide
  Target: LAMA2; (-) strand; PAM type: YTN; PAM sequence: CTT
tgttcattgatagcgctcca

SEQ ID NO: 286367 - DNA, 20 bp, Artificial Sequence
  Description of Artificial Sequence: Synthetic oligonucleotide
  Target: LAMA2; (-) strand; PAM type: YTN; PAM sequence: CTG
taactttgttcattgatagc

SEQ ID NO: 286368 - DNA, 20 bp, Artificial Sequence
  Description of Artificial Sequence: Synthetic oligonucleotide
  Target: LAMA2; (-) strand; PAM type: YTN; PAM sequence: CTC
agagagaatctgtaactttg

SEQ ID NO: 286369 - DNA, 20 bp, Artificial Sequence
  Description of Artificial Sequence: Synthetic oligonucleotide
  Target: LAMA2; (-) strand; PAM type: YTN; PAM sequence: TTG
gactcagagagaatctgtaa

SEQ ID NO: 286370 - DNA, 20 bp, Artificial Sequence
  Description of Artificial Sequence: Synthetic oligonucleotide
  Target: LAMA2; (-) strand; PAM type: YTN; PAM sequence: CTT
ggactcagagagaatctgta

SEQ ID NO: 286371 - DNA, 20 bp, Artificial Sequence
  Description of Artificial Sequence: Synthetic oligonucleotide
  Target: LAMA2; (-) strand; PAM type: YTN; PAM sequence: TTG
cttggactcagagagaatct

SEQ ID NO: 286372 - DNA, 20 bp, Artificial Sequence
  Description of Artificial Sequence: Synthetic oligonucleotide
  Target: LAMA2; (-) strand; PAM type: YTN; PAM sequence: TTC
aggatagcaaaatagttgct

SEQ ID NO: 286373 - DNA, 20 bp, Artificial Sequence
  Description of Artificial Sequence: Synthetic oligonucleotide
  Target: LAMA2; (-) strand; PAM type: YTN; PAM sequence: TTT
caggatagcaaaatagttgc

SEQ ID NO: 286374 - DNA, 20 bp, Artificial Sequence
  Description of Artificial Sequence: Synthetic oligonucleotide
  Target: LAMA2; (-) strand; PAM type: YTN; PAM sequence: CTT
tcaggatagcaaaatagttg

SEQ ID NO: 286375 - DNA, 20 bp, Artificial Sequence
  Description of Artificial Sequence: Synthetic oligonucleotide
  Target: LAMA2; (-) strand; PAM type: YTN; PAM sequence: TTA
ctttcaggatagcaaaatag

SEQ ID NO: 286376 - DNA, 20 bp, Artificial Sequence
  Description of Artificial Sequence: Synthetic oligonucleotide
  Target: LAMA2; (-) strand; PAM type: YTN; PAM sequence: CTG
tagggtcagatggaaaatca

SEQ ID NO: 286377 - DNA, 20 bp, Artificial Sequence
  Description of Artificial Sequence: Synthetic oligonucleotide
  Target: LAMA2; (-) strand; PAM type: YTN; PAM sequence: TTC
tgtagggtcagatggaaaat

SEQ ID NO: 286378 - DNA, 20 bp, Artificial Sequence
  Description of Artificial Sequence: Synthetic oligonucleotide
  Target: LAMA2; (-) strand; PAM type: YTN; PAM sequence: TTT
ctgtagggtcagatggaaaa

SEQ ID NO: 286379 - DNA, 20 bp, Artificial Sequence
  Description of Artificial Sequence: Synthetic oligonucleotide
  Target: LAMA2; (-) strand; PAM type: YTN; PAM sequence: TTA
atttctgtagggtcagatgg

SEQ ID NO: 286380 - DNA, 20 bp, Artificial Sequence
  Description of Artificial Sequence: Synthetic oligonucleotide
  Target: LAMA2; (-) strand; PAM type: YTN; PAM sequence: TTT
aatttctgtagggtcagatg

SEQ ID NO: 286381 - DNA, 20 bp, Artificial Sequence
  Description of Artificial Sequence: Synthetic oligonucleotide
  Target: LAMA2; (-) strand; PAM type: YTN; PAM sequence: TTG
atttaatttctgtagggtca

SEQ ID NO: 286382 - DNA, 20 bp, Artificial Sequence
  Description of Artificial Sequence: Synthetic oligonucleotide
  Target: LAMA2; (-) strand; PAM type: YTN; PAM sequence: TTT
gatttaatttctgtagggtc

SEQ ID NO: 286383 - DNA, 20 bp, Artificial Sequence
  Description of Artificial Sequence: Synthetic oligonucleotide
  Target: LAMA2; (-) strand; PAM type: YTN; PAM sequence: TTA
tttgatttaatttctgtagg

SEQ ID NO: 286384 - DNA, 20 bp, Artificial Sequence
  Description of Artificial Sequence: Synthetic oligonucleotide
  Target: LAMA2; (-) strand; PAM type: YTN; PAM sequence: TTG
attatttgatttaatttctg

SEQ ID NO: 286385 - DNA, 20 bp, Artificial Sequence
  Description of Artificial Sequence: Synthetic oligonucleotide
  Target: LAMA2; (-) strand; PAM type: YTN; PAM sequence: CTA
gttgattatttgatttaatt

SEQ ID NO: 286386 - DNA, 20 bp, Artificial Sequence
  Description of Artificial Sequence: Synthetic oligonucleotide
  Target: LAMA2; (-) strand; PAM type: YTN; PAM sequence: TTC
aatcataaataacactagtt

SEQ ID NO: 286387 - DNA, 20 bp, Artificial Sequence
  Description of Artificial Sequence: Synthetic oligonucleotide
  Target: LAMA2; (-) strand; PAM type: YTN; PAM sequence: CTT
caatcataaataacactagt

SEQ ID NO: 286388 - DNA, 20 bp, Artificial Sequence
  Description of Artificial Sequence: Synthetic oligonucleotide
  Target: LAMA2; (-) strand; PAM type: YTN; PAM sequence: TTC
cttcaatcataaataacact

SEQ ID NO: 286389 - DNA, 20 bp, Artificial Sequence
  Description of Artificial Sequence: Synthetic oligonucleotide
  Target: LAMA2; (-) strand; PAM type: YTN; PAM sequence: CTT
ccttcaatcataaataacac

SEQ ID NO: 286390 - DNA, 20 bp, Artificial Sequence
  Description of Artificial Sequence: Synthetic oligonucleotide
  Target: LAMA2; (-) strand; PAM type: YTN; PAM sequence: TTA
gagagccttccttcaatcat

SEQ ID NO: 286391 - DNA, 20 bp, Artificial Sequence
  Description of Artificial Sequence: Synthetic oligonucleotide
  Target: LAMA2; (-) strand; PAM type: YTN; PAM sequence: TTT
agagagccttccttcaatca

SEQ ID NO: 286392 - DNA, 20 bp, Artificial Sequence
  Description of Artificial Sequence: Synthetic oligonucleotide
  Target: LAMA2; (-) strand; PAM type: YTN; PAM sequence: TTA
tatttagagagccttccttc

SEQ ID NO: 286393 - DNA, 20 bp, Artificial Sequence
  Description of Artificial Sequence: Synthetic oligonucleotide
  Target: LAMA2; (-) strand; PAM type: YTN; PAM sequence: CTT
atatttagagagccttcctt

SEQ ID NO: 286394 - DNA, 20 bp, Artificial Sequence
  Description of Artificial Sequence: Synthetic oligonucleotide
  Target: LAMA2; (-) strand; PAM type: YTN; PAM sequence: TTA
cttatatttagagagccttc

SEQ ID NO: 286395 - DNA, 20 bp, Artificial Sequence
  Description of Artificial Sequence: Synthetic oligonucleotide
  Target: LAMA2; (-) strand; PAM type: YTN; PAM sequence: TTT
acttatatttagagagcctt

SEQ ID NO: 286396 - DNA, 20 bp, Artificial Sequence
  Description of Artificial Sequence: Synthetic oligonucleotide
  Target: LAMA2; (-) strand; PAM type: YTN; PAM sequence: TTT
tacttatatttagagagcct

SEQ ID NO: 286397 - DNA, 20 bp, Artificial Sequence
  Description of Artificial Sequence: Synthetic oligonucleotide
  Target: LAMA2; (-) strand; PAM type: YTN; PAM sequence: TTT
ttacttatatttagagagcc

SEQ ID NO: 286398 - DNA, 20 bp, Artificial Sequence
  Description of Artificial Sequence: Synthetic oligonucleotide
  Target: LAMA2; (-) strand; PAM type: YTN; PAM sequence: TTC
ataccaatttttacttatat

SEQ ID NO: 286399 - DNA, 20 bp, Artificial Sequence
  Description of Artificial Sequence: Synthetic oligonucleotide
  Target: LAMA2; (-) strand; PAM type: YTN; PAM sequence: CTG
ttcataccaatttttactta

SEQ ID NO: 286400 - DNA, 20 bp, Artificial Sequence
  Description of Artificial Sequence: Synthetic oligonucleotide
  Target: LAMA2; (-) strand; PAM type: YTN; PAM sequence: CTA
tatgaatagagtaatactgt

SEQ ID NO: 286401 - DNA, 20 bp, Artificial Sequence
  Description of Artificial Sequence: Synthetic oligonucleotide
  Target: LAMA2; (-) strand; PAM type: YTN; PAM sequence: CTA
aaaaaggaatgcctatatga

SEQ ID NO: 286402 - DNA, 20 bp, Artificial Sequence
  Description of Artificial Sequence: Synthetic oligonucleotide
  Target: LAMA2; (-) strand; PAM type: YTN; PAM sequence: TTG
ctaaaaaaggaatgcctata

SEQ ID NO: 286403 - DNA, 20 bp, Artificial Sequence
  Description of Artificial Sequence: Synthetic oligonucleotide
  Target: LAMA2; (-) strand; PAM type: YTN; PAM sequence: CTA
taaattgctaaaaaaggaat

SEQ ID NO: 286404 - DNA, 20 bp, Artificial Sequence
  Description of Artificial Sequence: Synthetic oligonucleotide
  Target: LAMA2; (-) strand; PAM type: YTN; PAM sequence: TTA
ctataaattgctaaaaaagg

SEQ ID NO: 286405 - DNA, 20 bp, Artificial Sequence
  Description of Artificial Sequence: Synthetic oligonucleotide
  Target: LAMA2; (-) strand; PAM type: YTN; PAM sequence: TTA
aaaattactataaattgcta

SEQ ID NO: 286406 - DNA, 20 bp, Artificial Sequence
  Description of Artificial Sequence: Synthetic oligonucleotide
  Target: LAMA2; (-) strand; PAM type: YTN; PAM sequence: CTT
aaaaattactataaattgct

SEQ ID NO: 286407 - DNA, 20 bp, Artificial Sequence
  Description of Artificial Sequence: Synthetic oligonucleotide
  Target: LAMA2; (-) strand; PAM type: YTN; PAM sequence: TTG
aataataccttaaaaattac

SEQ ID NO: 286408 - DNA, 20 bp, Artificial Sequence
  Description of Artificial Sequence: Synthetic oligonucleotide
  Target: LAMA2; (-) strand; PAM type: YTN; PAM sequence: TTT
gaataataccttaaaaatta

SEQ ID NO: 286409 - DNA, 20 bp, Artificial Sequence
  Description of Artificial Sequence: Synthetic oligonucleotide
  Target: LAMA2; (-) strand; PAM type: YTN; PAM sequence: TTT
tgaataataccttaaaaatt

SEQ ID NO: 286410 - DNA, 20 bp, Artificial Sequence
  Description of Artificial Sequence: Synthetic oligonucleotide
  Target: LAMA2; (-) strand; PAM type: YTN; PAM sequence: CTT
ttgaataataccttaaaaat

SEQ ID NO: 286411 - DNA, 20 bp, Artificial Sequence
  Description of Artificial Sequence: Synthetic oligonucleotide
  Target: LAMA2; (-) strand; PAM type: YTN; PAM sequence: TTC
ttttgaataataccttaaaa

SEQ ID NO: 286412 - DNA, 20 bp, Artificial Sequence
  Description of Artificial Sequence: Synthetic oligonucleotide
  Target: LAMA2; (-) strand; PAM type: YTN; PAM sequence: TTT
cttttgaataataccttaaa

SEQ ID NO: 286413 - DNA, 20 bp, Artificial Sequence
  Description of Artificial Sequence: Synthetic oligonucleotide
  Target: LAMA2; (-) strand; PAM type: YTN; PAM sequence: TTT
tcttttgaataataccttaa

SEQ ID NO: 286414 - DNA, 20 bp, Artificial Sequence
  Description of Artificial Sequence: Synthetic oligonucleotide
  Target: LAMA2; (-) strand; PAM type: YTN; PAM sequence: CTT
ttcttttgaataatacctta

SEQ ID NO: 286415 - DNA, 20 bp, Artificial Sequence
  Description of Artificial Sequence: Synthetic oligonucleotide
  Target: LAMA2; (-) strand; PAM type: YTN; PAM sequence: CTC
ccttttcttttgaataatac

SEQ ID NO: 286416 - DNA, 20 bp, Artificial Sequence
  Description of Artificial Sequence: Synthetic oligonucleotide
  Target: LAMA2; (-) strand; PAM type: YTN; PAM sequence: TTA
acagctcccttttcttttga

SEQ ID NO: 286417 - DNA, 20 bp, Artificial Sequence
  Description of Artificial Sequence: Synthetic oligonucleotide
  Target: LAMA2; (-) strand; PAM type: YTN; PAM sequence: TTT
aacagctcccttttcttttg

SEQ ID NO: 286418 - DNA, 20 bp, Artificial Sequence
  Description of Artificial Sequence: Synthetic oligonucleotide
  Target: LAMA2; (-) strand; PAM type: YTN; PAM sequence: TTA
atgtatttaacagctccctt

SEQ ID NO: 286419 - DNA, 20 bp, Artificial Sequence
  Description of Artificial Sequence: Synthetic oligonucleotide
  Target: LAMA2; (-) strand; PAM type: YTN; PAM sequence: CTA
ttaatgtatttaacagctcc

SEQ ID NO: 286420 - DNA, 20 bp, Artificial Sequence
  Description of Artificial Sequence: Synthetic oligonucleotide
  Target: LAMA2; (-) strand; PAM type: YTN; PAM sequence: CTA
tcactattaatgtatttaac

SEQ ID NO: 286421 - DNA, 20 bp, Artificial Sequence
  Description of Artificial Sequence: Synthetic oligonucleotide
  Target: LAMA2; (-) strand; PAM type: YTN; PAM sequence: TTC
caatggctatcactattaat

SEQ ID NO: 286422 - DNA, 20 bp, Artificial Sequence
  Description of Artificial Sequence: Synthetic oligonucleotide
  Target: LAMA2; (-) strand; PAM type: YTN; PAM sequence: TTT
ccaatggctatcactattaa

SEQ ID NO: 286423 - DNA, 20 bp, Artificial Sequence
  Description of Artificial Sequence: Synthetic oligonucleotide
  Target: LAMA2; (-) strand; PAM type: YTN; PAM sequence: TTG
tcaggaaatgaaatggaaat

SEQ ID NO: 286424 - DNA, 20 bp, Artificial Sequence
  Description of Artificial Sequence: Synthetic oligonucleotide
  Target: LAMA2; (-) strand; PAM type: YTN; PAM sequence: TTC
atgaagttgtcaggaaatga

SEQ ID NO: 286425 - DNA, 20 bp, Artificial Sequence
  Description of Artificial Sequence: Synthetic oligonucleotide
  Target: LAMA2; (-) strand; PAM type: YTN; PAM sequence: TTT
catgaagttgtcaggaaatg

SEQ ID NO: 286426 - DNA, 20 bp, Artificial Sequence
  Description of Artificial Sequence: Synthetic oligonucleotide
  Target: LAMA2; (-) strand; PAM type: YTN; PAM sequence: TTT
tcatgaagttgtcaggaaat

SEQ ID NO: 286427 - DNA, 20 bp, Artificial Sequence
  Description of Artificial Sequence: Synthetic oligonucleotide
  Target: LAMA2; (-) strand; PAM type: YTN; PAM sequence: CTT
ttcatgaagttgtcaggaaa

SEQ ID NO: 286428 - DNA, 20 bp, Artificial Sequence
  Description of Artificial Sequence: Synthetic oligonucleotide
  Target: LAMA2; (-) strand; PAM type: YTN; PAM sequence: TTG
taccttttcatgaagttgtc

SEQ ID NO: 286429 - DNA, 20 bp, Artificial Sequence
  Description of Artificial Sequence: Synthetic oligonucleotide
  Target: LAMA2; (-) strand; PAM type: YTN; PAM sequence: TTC
agaataaattgtaccttttc

SEQ ID NO: 286430 - DNA, 20 bp, Artificial Sequence
  Description of Artificial Sequence: Synthetic oligonucleotide
  Target: LAMA2; (-) strand; PAM type: YTN; PAM sequence: TTT
cagaataaattgtacctttt

SEQ ID NO: 286431 - DNA, 20 bp, Artificial Sequence
  Description of Artificial Sequence: Synthetic oligonucleotide
  Target: LAMA2; (-) strand; PAM type: YTN; PAM sequence: CTC
agaacatacatttcagaata

SEQ ID NO: 286432 - DNA, 20 bp, Artificial Sequence
  Description of Artificial Sequence: Synthetic oligonucleotide
  Target: LAMA2; (-) strand; PAM type: YTN; PAM sequence: CTA
ctcagaacatacatttcaga

SEQ ID NO: 286433 - DNA, 20 bp, Artificial Sequence
  Description of Artificial Sequence: Synthetic oligonucleotide
  Target: LAMA2; (-) strand; PAM type: YTN; PAM sequence: TTC
tactcagaacatacatttca

SEQ ID NO: 286434 - DNA, 20 bp, Artificial Sequence
  Description of Artificial Sequence: Synthetic oligonucleotide
  Target: LAMA2; (-) strand; PAM type: YTN; PAM sequence: TTA
atcattctactcagaacata

SEQ ID NO: 286435 - DNA, 20 bp, Artificial Sequence
  Description of Artificial Sequence: Synthetic oligonucleotide
  Target: LAMA2; (-) strand; PAM type: YTN; PAM sequence: CTA
acaataagaagaatattaat

SEQ ID NO: 286436 - DNA, 20 bp, Artificial Sequence
  Description of Artificial Sequence: Synthetic oligonucleotide
  Target: LAMA2; (-) strand; PAM type: YTN; PAM sequence: TTC
taacaataagaagaatatta

SEQ ID NO: 286437 - DNA, 20 bp, Artificial Sequence
  Description of Artificial Sequence: Synthetic oligonucleotide
  Target: LAMA2; (-) strand; PAM type: YTN; PAM sequence: CTA
gatgttctaacaataagaag

SEQ ID NO: 286438 - DNA, 20 bp, Artificial Sequence
  Description of Artificial Sequence: Synthetic oligonucleotide
  Target: LAMA2; (-) strand; PAM type: YTN; PAM sequence: TTC
tagatgttctaacaataaga

SEQ ID NO: 286439 - DNA, 20 bp, Artificial Sequence
  Description of Artificial Sequence: Synthetic oligonucleotide
  Target: LAMA2; (-) strand; PAM type: YTN; PAM sequence: TTG
ttctagatgttctaacaata

SEQ ID NO: 286440 - DNA, 20 bp, Artificial Sequence
  Description of Artificial Sequence: Synthetic oligonucleotide
  Target: LAMA2; (-) strand; PAM type: YTN; PAM sequence: TTT
gttctagatgttctaacaat

SEQ ID NO: 286441 - DNA, 20 bp, Artificial Sequence
  Description of Artificial Sequence: Synthetic oligonucleotide
  Target: LAMA2; (-) strand; PAM type: YTN; PAM sequence: TTT
tgttctagatgttctaacaa

SEQ ID NO: 286442 - DNA, 20 bp, Artificial Sequence
  Description of Artificial Sequence: Synthetic oligonucleotide
  Target: LAMA2; (-) strand; PAM type: YTN; PAM sequence: TTG
aaagaggacaaatagatttt

SEQ ID NO: 286443 - DNA, 20 bp, Artificial Sequence
  Description of Artificial Sequence: Synthetic oligonucleotide
  Target: LAMA2; (-) strand; PAM type: YTN; PAM sequence: TTA
cagttgaaagaggacaaata

SEQ ID NO: 286444 - DNA, 20 bp, Artificial Sequence
  Description of Artificial Sequence: Synthetic oligonucleotide
  Target: LAMA2; (-) strand; PAM type: YTN; PAM sequence: CTT
acagttgaaagaggacaaat

SEQ ID NO: 286445 - DNA, 20 bp, Artificial Sequence
  Description of Artificial Sequence: Synthetic oligonucleotide
  Target: LAMA2; (-) strand; PAM type: YTN; PAM sequence: CTC
ttacagttgaaagaggacaa

SEQ ID NO: 286446 - DNA, 20 bp, Artificial Sequence
  Description of Artificial Sequence: Synthetic oligonucleotide
  Target: LAMA2; (-) strand; PAM type: YTN; PAM sequence: CTA
tactcttacagttgaaagag

SEQ ID NO: 286447 - DNA, 20 bp, Artificial Sequence
  Description of Artificial Sequence: Synthetic oligonucleotide
  Target: LAMA2; (-) strand; PAM type: YTN; PAM sequence: CTC
ctatactcttacagttgaaa

SEQ ID NO: 286448 - DNA, 20 bp, Artificial Sequence
  Description of Artificial Sequence: Synthetic oligonucleotide
  Target: LAMA2; (-) strand; PAM type: YTN; PAM sequence: TTA
ccaaccctcctatactctta

SEQ ID NO: 286449 - DNA, 20 bp, Artificial Sequence
  Description of Artificial Sequence: Synthetic oligonucleotide
  Target: LAMA2; (-) strand; PAM type: YTN; PAM sequence: TTC
aagaggaaattaccaaccct

SEQ ID NO: 286450 - DNA, 20 bp, Artificial Sequence
  Description of Artificial Sequence: Synthetic oligonucleotide
  Target: LAMA2; (-) strand; PAM type: YTN; PAM sequence: TTT
caagaggaaattaccaaccc

SEQ ID NO: 286451 - DNA, 20 bp, Artificial Sequence
  Description of Artificial Sequence: Synthetic oligonucleotide
  Target: LAMA2; (-) strand; PAM type: YTN; PAM sequence: TTT
tcaagaggaaattaccaacc

SEQ ID NO: 286452 - DNA, 20 bp, Artificial Sequence
  Description of Artificial Sequence: Synthetic oligonucleotide
  Target: LAMA2; (-) strand; PAM type: YTN; PAM sequence: TTA
gttttcaagaggaaattacc

SEQ ID NO: 286453 - DNA, 20 bp, Artificial Sequence
  Description of Artificial Sequence: Synthetic oligonucleotide
  Target: LAMA2; (-) strand; PAM type: YTN; PAM sequence: TTT
agttttcaagaggaaattac

SEQ ID NO: 286454 - DNA, 20 bp, Artificial Sequence
  Description of Artificial Sequence: Synthetic oligonucleotide
  Target: LAMA2; (-) strand; PAM type: YTN; PAM sequence: TTT
tagttttcaagaggaaatta

SEQ ID NO: 286455 - DNA, 20 bp, Artificial Sequence
  Description of Artificial Sequence: Synthetic oligonucleotide
  Target: LAMA2; (-) strand; PAM type: YTN; PAM sequence: CTT
ttagttttcaagaggaaatt

SEQ ID NO: 286456 - DNA, 20 bp, Artificial Sequence
  Description of Artificial Sequence: Synthetic oligonucleotide
  Target: LAMA2; (-) strand; PAM type: YTN; PAM sequence: TTC
ttttagttttcaagaggaaa

SEQ ID NO: 286457 - DNA, 20 bp, Artificial Sequence
  Description of Artificial Sequence: Synthetic oligonucleotide
  Target: LAMA2; (-) strand; PAM type: YTN; PAM sequence: TTT
cttttagttttcaagaggaa

SEQ ID NO: 286458 - DNA, 20 bp, Artificial Sequence
  Description of Artificial Sequence: Synthetic oligonucleotide
  Target: LAMA2; (-) strand; PAM type: YTN; PAM sequence: TTT
tcttttagttttcaagagga

SEQ ID NO: 286459 - DNA, 20 bp, Artificial Sequence
  Description of Artificial Sequence: Synthetic oligonucleotide
  Target: LAMA2; (-) strand; PAM type: YTN; PAM sequence: TTT
ttcttttagttttcaagagg

SEQ ID NO: 286460 - DNA, 20 bp, Artificial Sequence
  Description of Artificial Sequence: Synthetic oligonucleotide
  Target: LAMA2; (-) strand; PAM type: YTN; PAM sequence: CTA
tttttcttttagttttcaag

SEQ ID NO: 286461 - DNA, 20 bp, Artificial Sequence
  Description of Artificial Sequence: Synthetic oligonucleotide
  Target: LAMA2; (-) strand; PAM type: YTN; PAM sequence: CTA
agaaactatttttcttttag

SEQ ID NO: 286462 - DNA, 20 bp, Artificial Sequence
  Description of Artificial Sequence: Synthetic oligonucleotide
  Target: LAMA2; (-) strand; PAM type: YTN; PAM sequence: TTA
aactaagaaactatttttct

SEQ ID NO: 286463 - DNA, 20 bp, Artificial Sequence
  Description of Artificial Sequence: Synthetic oligonucleotide
  Target: LAMA2; (-) strand; PAM type: YTN; PAM sequence: CTT
aaactaagaaactatttttc

SEQ ID NO: 286464 - DNA, 20 bp, Artificial Sequence
  Description of Artificial Sequence: Synthetic oligonucleotide
  Target: LAMA2; (-) strand; PAM type: YTN; PAM sequence: TTG
gtatcacttaaactaagaaa

SEQ ID NO: 286465 - DNA, 20 bp, Artificial Sequence
  Description of Artificial Sequence: Synthetic oligonucleotide
  Target: LAMA2; (-) strand; PAM type: YTN; PAM sequence: TTT
ggtatcacttaaactaagaa

SEQ ID NO: 286466 - DNA, 20 bp, Artificial Sequence
  Description of Artificial Sequence: Synthetic oligonucleotide
  Target: LAMA2; (-) strand; PAM type: YTN; PAM sequence: TTT
tggtatcacttaaactaaga

SEQ ID NO: 286467 - DNA, 20 bp, Artificial Sequence
  Description of Artificial Sequence: Synthetic oligonucleotide
  Target: LAMA2; (-) strand; PAM type: YTN; PAM sequence: TTC
agcggttttggtatcactta

SEQ ID NO: 286468 - DNA, 20 bp, Artificial Sequence
  Description of Artificial Sequence: Synthetic oligonucleotide
  Target: LAMA2; (-) strand; PAM type: YTN; PAM sequence: TTT
cagcggttttggtatcactt

SEQ ID NO: 286469 - DNA, 20 bp, Artificial Sequence
  Description of Artificial Sequence: Synthetic oligonucleotide
  Target: LAMA2; (-) strand; PAM type: YTN; PAM sequence: TTG
aaatttcagcggttttggta

SEQ ID NO: 286470 - DNA, 20 bp, Artificial Sequence
  Description of Artificial Sequence: Synthetic oligonucleotide
  Target: LAMA2; (-) strand; PAM type: YTN; PAM sequence: TTA
caattgaaatttcagcggtt

SEQ ID NO: 286471 - DNA, 20 bp, Artificial Sequence
  Description of Artificial Sequence: Synthetic oligonucleotide
  Target: LAMA2; (-) strand; PAM type: YTN; PAM sequence: TTT
acaattgaaatttcagcggt

SEQ ID NO: 286472 - DNA, 20 bp, Artificial Sequence
  Description of Artificial Sequence: Synthetic oligonucleotide
  Target: LAMA2; (-) strand; PAM type: YTN; PAM sequence: TTT
tacaattgaaatttcagcgg

SEQ ID NO: 286473 - DNA, 20 bp, Artificial Sequence
  Description of Artificial Sequence: Synthetic oligonucleotide
  Target: LAMA2; (-) strand; PAM type: YTN; PAM sequence: TTA
atgaaattttacaattgaaa

SEQ ID NO: 286474 - DNA, 20 bp, Artificial Sequence
  Description of Artificial Sequence: Synthetic oligonucleotide
  Target: LAMA2; (-) strand; PAM type: YTN; PAM sequence: TTT
aatgaaattttacaattgaa

SEQ ID NO: 286475 - DNA, 20 bp, Artificial Sequence
  Description of Artificial Sequence: Synthetic oligonucleotide
  Target: LAMA2; (-) strand; PAM type: YTN; PAM sequence: TTG
tttaatgaaattttacaatt

SEQ ID NO: 286476 - DNA, 20 bp, Artificial Sequence
  Description of Artificial Sequence: Synthetic oligonucleotide
  Target: LAMA2; (-) strand; PAM type: YTN; PAM sequence: TTA
aggttgtttaatgaaatttt

SEQ ID NO: 286477 - DNA, 20 bp, Artificial Sequence
  Description of Artificial Sequence: Synthetic oligonucleotide
  Target: LAMA2; (-) strand; PAM type: YTN; PAM sequence: TTC
attaaggttgtttaatgaaa

SEQ ID NO: 286478 - DNA, 20 bp, Artificial Sequence
  Description of Artificial Sequence: Synthetic oligonucleotide
  Target: LAMA2; (-) strand; PAM type: YTN; PAM sequence: CTT
cattaaggttgtttaatgaa

SEQ ID NO: 286479 - DNA, 20 bp, Artificial Sequence
  Description of Artificial Sequence: Synthetic oligonucleotide
  Target: LAMA2; (-) strand; PAM type: YTN; PAM sequence: CTA
atgagaatgaccttcattaa

SEQ ID NO: 286480 - DNA, 20 bp, Artificial Sequence
  Description of Artificial Sequence: Synthetic oligonucleotide
  Target: LAMA2; (-) strand; PAM type: YTN; PAM sequence: TTA
catggagctaatgagaatga

SEQ ID NO: 286481 - DNA, 20 bp, Artificial Sequence
  Description of Artificial Sequence: Synthetic oligonucleotide
  Target: LAMA2; (-) strand; PAM type: YTN; PAM sequence: TTT
acatggagctaatgagaatg

SEQ ID NO: 286482 - DNA, 20 bp, Artificial Sequence
  Description of Artificial Sequence: Synthetic oligonucleotide
  Target: LAMA2; (-) strand; PAM type: YTN; PAM sequence: TTT
tacatggagctaatgagaat

SEQ ID NO: 286483 - DNA, 20 bp, Artificial Sequence
  Description of Artificial Sequence: Synthetic oligonucleotide
  Target: LAMA2; (-) strand; PAM type: YTN; PAM sequence: TTA
ggcaggtgattttacatgga

SEQ ID NO: 286484 - DNA, 20 bp, Artificial Sequence
  Description of Artificial Sequence: Synthetic oligonucleotide
  Target: LAMA2; (-) strand; PAM type: YTN; PAM sequence: TTT
aggcaggtgattttacatgg

SEQ ID NO: 286485 - DNA, 20 bp, Artificial Sequence
  Description of Artificial Sequence: Synthetic oligonucleotide
  Target: LAMA2; (-) strand; PAM type: YTN; PAM sequence: TTT
taggcaggtgattttacatg

SEQ ID NO: 286486 - DNA, 20 bp, Artificial Sequence
  Description of Artificial Sequence: Synthetic oligonucleotide
  Target: LAMA2; (-) strand; PAM type: YTN; PAM sequence: TTA
tcaatatgggaacgttttag

SEQ ID NO: 286487 - DNA, 20 bp, Artificial Sequence
  Description of Artificial Sequence: Synthetic oligonucleotide
  Target: LAMA2; (-) strand; PAM type: YTN; PAM sequence: CTC
cattatcaatatgggaacgt

SEQ ID NO: 286488 - DNA, 20 bp, Artificial Sequence
  Description of Artificial Sequence: Synthetic oligonucleotide
  Target: LAMA2; (-) strand; PAM type: YTN; PAM sequence: TTC
tccattatcaatatgggaac

SEQ ID NO: 286489 - DNA, 20 bp, Artificial Sequence
  Description of Artificial Sequence: Synthetic oligonucleotide
  Target: LAMA2; (-) strand; PAM type: YTN; PAM sequence: TTT
ctccattatcaatatgggaa

SEQ ID NO: 286490 - DNA, 20 bp, Artificial Sequence
  Description of Artificial Sequence: Synthetic oligonucleotide
  Target: LAMA2; (-) strand; PAM type: YTN; PAM sequence: CTA
acgtcatacatttctccatt

SEQ ID NO: 286491 - DNA, 20 bp, Artificial Sequence
  Description of Artificial Sequence: Synthetic oligonucleotide
  Target: LAMA2; (-) strand; PAM type: YTN; PAM sequence: TTC
taacgtcatacatttctcca

SEQ ID NO: 286492 - DNA, 20 bp, Artificial Sequence
  Description of Artificial Sequence: Synthetic oligonucleotide
  Target: LAMA2; (-) strand; PAM type: YTN; PAM sequence: CTT
ctaacgtcatacatttctcc

SEQ ID NO: 286493 - DNA, 20 bp, Artificial Sequence
  Description of Artificial Sequence: Synthetic oligonucleotide
  Target: LAMA2; (-) strand; PAM type: YTN; PAM sequence: CTA
acaaacttctaacgtcatac

SEQ ID NO: 286494 - DNA, 20 bp, Artificial Sequence
  Description of Artificial Sequence: Synthetic oligonucleotide
  Target: LAMA2; (-) strand; PAM type: YTN; PAM sequence: TTG
aagcatgcaactaacaaact

SEQ ID NO: 286495 - DNA, 20 bp, Artificial Sequence
  Description of Artificial Sequence: Synthetic oligonucleotide
  Target: LAMA2; (-) strand; PAM type: YTN; PAM sequence: TTT
gaagcatgcaactaacaaac

SEQ ID NO: 286496 - DNA, 20 bp, Artificial Sequence
  Description of Artificial Sequence: Synthetic oligonucleotide
  Target: LAMA2; (-) strand; PAM type: YTN; PAM sequence: TTT
tgaagcatgcaactaacaaa

SEQ ID NO: 286497 - DNA, 20 bp, Artificial Sequence
  Description of Artificial Sequence: Synthetic oligonucleotide
  Target: LAMA2; (-) strand; PAM type: YTN; PAM sequence: TTT
ttgaagcatgcaactaacaa

SEQ ID NO: 286498 - DNA, 20 bp, Artificial Sequence
  Description of Artificial Sequence: Synthetic oligonucleotide
  Target: LAMA2; (-) strand; PAM type: YTN; PAM sequence: TTT
tttgaagcatgcaactaaca

SEQ ID NO: 286499 - DNA, 20 bp, Artificial Sequence
  Description of Artificial Sequence: Synthetic oligonucleotide
  Target: LAMA2; (-) strand; PAM type: YTN; PAM sequence: CTA
ttttttgaagcatgcaacta

SEQ ID NO: 286500 - DNA, 20 bp, Artificial Sequence
  Description of Artificial Sequence: Synthetic oligonucleotide
  Target: LAMA2; (-) strand; PAM type: YTN; PAM sequence: TTA
gcatactattttttgaagca

SEQ ID NO: 286501 - DNA, 20 bp, Artificial Sequence
  Description of Artificial Sequence: Synthetic oligonucleotide
  Target: LAMA2; (-) strand; PAM type: YTN; PAM sequence: TTG
ttagcatactattttttgaa

SEQ ID NO: 286502 - DNA, 20 bp, Artificial Sequence
  Description of Artificial Sequence: Synthetic oligonucleotide
  Target: LAMA2; (-) strand; PAM type: YTN; PAM sequence: CTT
gttagcatactattttttga

SEQ ID NO: 286503 - DNA, 20 bp, Artificial Sequence
  Description of Artificial Sequence: Synthetic oligonucleotide
  Target: LAMA2; (-) strand; PAM type: YTN; PAM sequence: TTC
catgtcttgttagcatacta

SEQ ID NO: 286504 - DNA, 20 bp, Artificial Sequence
  Description of Artificial Sequence: Synthetic oligonucleotide
  Target: LAMA2; (-) strand; PAM type: YTN; PAM sequence: TTC
acagttccatgtcttgttag

SEQ ID NO: 286505 - DNA, 20 bp, Artificial Sequence
  Description of Artificial Sequence: Synthetic oligonucleotide
  Target: LAMA2; (-) strand; PAM type: YTN; PAM sequence: CTG
ttcacagttccatgtcttgt

SEQ ID NO: 286506 - DNA, 20 bp, Artificial Sequence
  Description of Artificial Sequence: Synthetic oligonucleotide
  Target: LAMA2; (-) strand; PAM type: YTN; PAM sequence: CTA
tgagctgttcacagttccat

SEQ ID NO: 286507 - DNA, 20 bp, Artificial Sequence
  Description of Artificial Sequence: Synthetic oligonucleotide
  Target: LAMA2; (-) strand; PAM type: YTN; PAM sequence: TTG
actatgagctgttcacagtt

SEQ ID NO: 286508 - DNA, 20 bp, Artificial Sequence
  Description of Artificial Sequence: Synthetic oligonucleotide
  Target: LAMA2; (-) strand; PAM type: YTN; PAM sequence: TTT
gactatgagctgttcacagt

SEQ ID NO: 286509 - DNA, 20 bp, Artificial Sequence
  Description of Artificial Sequence: Synthetic oligonucleotide
  Target: LAMA2; (-) strand; PAM type: YTN; PAM sequence: TTT
tgactatgagctgttcacag

SEQ ID NO: 286510 - DNA, 20 bp, Artificial Sequence
  Description of Artificial Sequence: Synthetic oligonucleotide
  Target: LAMA2; (-) strand; PAM type: YTN; PAM sequence: CTA
gaattttgactatgagctgt

SEQ ID NO: 286511 - DNA, 20 bp, Artificial Sequence
  Description of Artificial Sequence: Synthetic oligonucleotide
  Target: LAMA2; (-) strand; PAM type: YTN; PAM sequence: TTC
cactagaattttgactatga

SEQ ID NO: 286512 - DNA, 20 bp, Artificial Sequence
  Description of Artificial Sequence: Synthetic oligonucleotide
  Target: LAMA2; (-) strand; PAM type: YTN; PAM sequence: TTT
ccactagaattttgactatg

SEQ ID NO: 286513 - DNA, 20 bp, Artificial Sequence
  Description of Artificial Sequence: Synthetic oligonucleotide
  Target: LAMA2; (-) strand; PAM type: YTN; PAM sequence: TTT
tccactagaattttgactat

SEQ ID NO: 286514 - DNA, 20 bp, Artificial Sequence
  Description of Artificial Sequence: Synthetic oligonucleotide
  Target: LAMA2; (-) strand; PAM type: YTN; PAM sequence: TTA
atgagggcacagaagagcag

SEQ ID NO: 286515 - DNA, 20 bp, Artificial Sequence
  Description of Artificial Sequence: Synthetic oligonucleotide
  Target: LAMA2; (-) strand; PAM type: YTN; PAM sequence: CTC
attaatgagggcacagaaga

SEQ ID NO: 286516 - DNA, 20 bp, Artificial Sequence
  Description of Artificial Sequence: Synthetic oligonucleotide
  Target: LAMA2; (-) strand; PAM type: YTN; PAM sequence: TTA
tactcattaatgagggcaca

SEQ ID NO: 286517 - DNA, 20 bp, Artificial Sequence
  Description of Artificial Sequence: Synthetic oligonucleotide
  Target: LAMA2; (-) strand; PAM type: YTN; PAM sequence: TTA
aacacccatatgcagacacc

SEQ ID NO: 286518 - DNA, 20 bp, Artificial Sequence
  Description of Artificial Sequence: Synthetic oligonucleotide
  Target: LAMA2; (-) strand; PAM type: YTN; PAM sequence: CTA
tcattaaacacccatatgca

SEQ ID NO: 286519 - DNA, 20 bp, Artificial Sequence
  Description of Artificial Sequence: Synthetic oligonucleotide
  Target: LAMA2; (-) strand; PAM type: YTN; PAM sequence: CTA
tcatcaaatactatcattaa

SEQ ID NO: 286520 - DNA, 20 bp, Artificial Sequence
  Description of Artificial Sequence: Synthetic oligonucleotide
  Target: LAMA2; (-) strand; PAM type: YTN; PAM sequence: TTC
tatcatcaaatactatcatt

SEQ ID NO: 286521 - DNA, 20 bp, Artificial Sequence
  Description of Artificial Sequence: Synthetic oligonucleotide
  Target: LAMA2; (-) strand; PAM type: YTN; PAM sequence: TTT
ctatcatcaaatactatcat

SEQ ID NO: 286522 - DNA, 20 bp, Artificial Sequence
  Description of Artificial Sequence: Synthetic oligonucleotide
  Target: LAMA2; (-) strand; PAM type: YTN; PAM sequence: TTT
tctatcatcaaatactatca

SEQ ID NO: 286523 - DNA, 20 bp, Artificial Sequence
  Description of Artificial Sequence: Synthetic oligonucleotide
  Target: LAMA2; (-) strand; PAM type: YTN; PAM sequence: TTA
ttttctatcatcaaatacta

SEQ ID NO: 286524 - DNA, 20 bp, Artificial Sequence
  Description of Artificial Sequence: Synthetic oligonucleotide
  Target: LAMA2; (-) strand; PAM type: YTN; PAM sequence: TTG
aagttattttctatcatcaa

SEQ ID NO: 286525 - DNA, 20 bp, Artificial Sequence
  Description of Artificial Sequence: Synthetic oligonucleotide
  Target: LAMA2; (-) strand; PAM type: YTN; PAM sequence: TTT
gaagttattttctatcatca

SEQ ID NO: 286526 - DNA, 20 bp, Artificial Sequence
  Description of Artificial Sequence: Synthetic oligonucleotide
  Target: LAMA2; (-) strand; PAM type: YTN; PAM sequence: CTT
tgaagttattttctatcatc

SEQ ID NO: 286527 - DNA, 20 bp, Artificial Sequence
  Description of Artificial Sequence: Synthetic oligonucleotide
  Target: LAMA2; (-) strand; PAM type: YTN; PAM sequence: TTC
tttgaagttattttctatca

SEQ ID NO: 286528 - DNA, 20 bp, Artificial Sequence
  Description of Artificial Sequence: Synthetic oligonucleotide
  Target: LAMA2; (-) strand; PAM type: YTN; PAM sequence: CTT
ctttgaagttattttctatc

SEQ ID NO: 286529 - DNA, 20 bp, Artificial Sequence
  Description of Artificial Sequence: Synthetic oligonucleotide
  Target: LAMA2; (-) strand; PAM type: YTN; PAM sequence: TTC
ttctttgaagttattttcta

SEQ ID NO: 286530 - DNA, 20 bp, Artificial Sequence
  Description of Artificial Sequence: Synthetic oligonucleotide
  Target: LAMA2; (-) strand; PAM type: YTN; PAM sequence: TTT
cttctttgaagttattttct

SEQ ID NO: 286531 - DNA, 20 bp, Artificial Sequence
  Description of Artificial Sequence: Synthetic oligonucleotide
  Target: LAMA2; (-) strand; PAM type: YTN; PAM sequence: TTC
catacaaccacaaagccatc

SEQ ID NO: 286532 - DNA, 20 bp, Artificial Sequence
  Description of Artificial Sequence: Synthetic oligonucleotide
  Target: LAMA2; (-) strand; PAM type: YTN; PAM sequence: CTT
ccatacaaccacaaagccat

SEQ ID NO: 286533 - DNA, 20 bp, Artificial Sequence
  Description of Artificial Sequence: Synthetic oligonucleotide
  Target: LAMA2; (-) strand; PAM type: YTN; PAM sequence: TTG
aagtagcttccatacaacca

SEQ ID NO: 286534 - DNA, 20 bp, Artificial Sequence
  Description of Artificial Sequence: Synthetic oligonucleotide
  Target: LAMA2; (-) strand; PAM type: YTN; PAM sequence: TTT
gaagtagcttccatacaacc

SEQ ID NO: 286535 - DNA, 20 bp, Artificial Sequence
  Description of Artificial Sequence: Synthetic oligonucleotide
  Target: LAMA2; (-) strand; PAM type: YTN; PAM sequence: CTC
agaaagtttgaagtagcttc

SEQ ID NO: 286536 - DNA, 20 bp, Artificial Sequence
  Description of Artificial Sequence: Synthetic oligonucleotide
  Target: LAMA2; (-) strand; PAM type: YTN; PAM sequence: CTC
tcagaaagtttgaagtagct

SEQ ID NO: 286537 - DNA, 20 bp, Artificial Sequence
  Description of Artificial Sequence: Synthetic oligonucleotide
  Target: LAMA2; (-) strand; PAM type: YTN; PAM sequence: TTA
aaaaaaacaagatacaaaga

SEQ ID NO: 286538 - DNA, 20 bp, Artificial Sequence
  Description of Artificial Sequence: Synthetic oligonucleotide
  Target: LAMA2; (-) strand; PAM type: YTN; PAM sequence: TTT
aaaaaaaacaagatacaaag

SEQ ID NO: 286539 - DNA, 20 bp, Artificial Sequence
  Description of Artificial Sequence: Synthetic oligonucleotide
  Target: LAMA2; (-) strand; PAM type: YTN; PAM sequence: CTT
taaaaaaaacaagatacaaa

SEQ ID NO: 286540 - DNA, 20 bp, Artificial Sequence
  Description of Artificial Sequence: Synthetic oligonucleotide
  Target: LAMA2; (-) strand; PAM type: YTN; PAM sequence: TTG
atctttaaaaaaaacaagat

SEQ ID NO: 286541 - DNA, 20 bp, Artificial Sequence
  Description of Artificial Sequence: Synthetic oligonucleotide
  Target: LAMA2; (-) strand; PAM type: YTN; PAM sequence: TTT
gatctttaaaaaaaacaaga

SEQ ID NO: 286542 - DNA, 20 bp, Artificial Sequence
  Description of Artificial Sequence: Synthetic oligonucleotide
  Target: LAMA2; (-) strand; PAM type: YTN; PAM sequence: CTT
tgatctttaaaaaaaacaag

SEQ ID NO: 286543 - DNA, 20 bp, Artificial Sequence
  Description of Artificial Sequence: Synthetic oligonucleotide
  Target: LAMA2; (-) strand; PAM type: YTN; PAM sequence: CTG
aagacacagatactttgatc

SEQ ID NO: 286544 - DNA, 20 bp, Artificial Sequence
  Description of Artificial Sequence: Synthetic oligonucleotide
  Target: LAMA2; (-) strand; PAM type: YTN; PAM sequence: CTC
ctgaagacacagatactttg

SEQ ID NO: 286545 - DNA, 20 bp, Artificial Sequence
  Description of Artificial Sequence: Synthetic oligonucleotide
  Target: LAMA2; (-) strand; PAM type: YTN; PAM sequence: TTC
gaatgcagtcacctcctgaa

SEQ ID NO: 286546 - DNA, 20 bp, Artificial Sequence
  Description of Artificial Sequence: Synthetic oligonucleotide
  Target: LAMA2; (-) strand; PAM type: YTN; PAM sequence: TTG
tatgttcgaatgcagtcacc

SEQ ID NO: 286547 - DNA, 20 bp, Artificial Sequence
  Description of Artificial Sequence: Synthetic oligonucleotide
  Target: LAMA2; (-) strand; PAM type: YTN; PAM sequence: TTT
gtatgttcgaatgcagtcac

SEQ ID NO: 286548 - DNA, 20 bp, Artificial Sequence
  Description of Artificial Sequence: Synthetic oligonucleotide
  Target: LAMA2; (-) strand; PAM type: YTN; PAM sequence: CTG
gtttgtatgttcgaatgcag

SEQ ID NO: 286549 - DNA, 20 bp, Artificial Sequence
  Description of Artificial Sequence: Synthetic oligonucleotide
  Target: LAMA2; (-) strand; PAM type: YTN; PAM sequence: TTC
tggtttgtatgttcgaatgc

SEQ ID NO: 286550 - DNA, 20 bp, Artificial Sequence
  Description of Artificial Sequence: Synthetic oligonucleotide
  Target: LAMA2; (-) strand; PAM type: YTN; PAM sequence: TTT
ctggtttgtatgttcgaatg

SEQ ID NO: 286551 - DNA, 20 bp, Artificial Sequence
  Description of Artificial Sequence: Synthetic oligonucleotide
  Target: LAMA2; (-) strand; PAM type: YTN; PAM sequence: TTG
atttctggtttgtatgttcg

SEQ ID NO: 286552 - DNA, 20 bp, Artificial Sequence
  Description of Artificial Sequence: Synthetic oligonucleotide
  Target: LAMA2; (-) strand; PAM type: YTN; PAM sequence: CTT
gatttctggtttgtatgttc

SEQ ID NO: 286553 - DNA, 20 bp, Artificial Sequence
  Description of Artificial Sequence: Synthetic oligonucleotide
  Target: LAMA2; (-) strand; PAM type: YTN; PAM sequence: TTC
ttgatttctggtttgtatgt

SEQ ID NO: 286554 - DNA, 20 bp, Artificial Sequence
  Description of Artificial Sequence: Synthetic oligonucleotide
  Target: LAMA2; (-) strand; PAM type: YTN; PAM sequence: TTT
cttgatttctggtttgtatg

SEQ ID NO: 286555 - DNA, 20 bp, Artificial Sequence
  Description of Artificial Sequence: Synthetic oligonucleotide
  Target: LAMA2; (-) strand; PAM type: YTN; PAM sequence: CTT
tcttgatttctggtttgtat

SEQ ID NO: 286556 - DNA, 20 bp, Artificial Sequence
  Description of Artificial Sequence: Synthetic oligonucleotide
  Target: LAMA2; (-) strand; PAM type: YTN; PAM sequence: TTC
ctttcttgatttctggtttg

SEQ ID NO: 286557 - DNA, 20 bp, Artificial Sequence
  Description of Artificial Sequence: Synthetic oligonucleotide
  Target: LAMA2; (-) strand; PAM type: YTN; PAM sequence: CTT
cctttcttgatttctggttt

SEQ ID NO: 286558 - DNA, 20 bp, Artificial Sequence
  Description of Artificial Sequence: Synthetic oligonucleotide
  Target: LAMA2; (-) strand; PAM type: YTN; PAM sequence: TTG
taacttcctttcttgatttc

SEQ ID NO: 286559 - DNA, 20 bp, Artificial Sequence
  Description of Artificial Sequence: Synthetic oligonucleotide
  Target: LAMA2; (-) strand; PAM type: YTN; PAM sequence: TTA
ttgtaacttcctttcttgat

SEQ ID NO: 286560 - DNA, 20 bp, Artificial Sequence
  Description of Artificial Sequence: Synthetic oligonucleotide
  Target: LAMA2; (-) strand; PAM type: YTN; PAM sequence: TTG
acaacaatattattgtaact

SEQ ID NO: 286561 - DNA, 20 bp, Artificial Sequence
  Description of Artificial Sequence: Synthetic oligonucleotide
  Target: LAMA2; (-) strand; PAM type: YTN; PAM sequence: TTA
cgttgacaacaatattattg

SEQ ID NO: 286562 - DNA, 20 bp, Artificial Sequence
  Description of Artificial Sequence: Synthetic oligonucleotide
  Target: LAMA2; (-) strand; PAM type: YTN; PAM sequence: TTT
acgttgacaacaatattatt

SEQ ID NO: 286563 - DNA, 20 bp, Artificial Sequence
  Description of Artificial Sequence: Synthetic oligonucleotide
  Target: LAMA2; (-) strand; PAM type: YTN; PAM sequence: CTT
tacgttgacaacaatattat

SEQ ID NO: 286564 - DNA, 20 bp, Artificial Sequence
  Description of Artificial Sequence: Synthetic oligonucleotide
  Target: LAMA2; (-) strand; PAM type: YTN; PAM sequence: CTG
tctttacgttgacaacaata

SEQ ID NO: 286565 - DNA, 20 bp, Artificial Sequence
  Description of Artificial Sequence: Synthetic oligonucleotide
  Target: LAMA2; (-) strand; PAM type: YTN; PAM sequence: TTA
tcagcaacagctgtctttac

SEQ ID NO: 286566 - DNA, 20 bp, Artificial Sequence
  Description of Artificial Sequence: Synthetic oligonucleotide
  Target: LAMA2; (-) strand; PAM type: YTN; PAM sequence: TTC
caagataaaagaggaggtta

SEQ ID NO: 286567 - DNA, 20 bp, Artificial Sequence
  Description of Artificial Sequence: Synthetic oligonucleotide
  Target: LAMA2; (-) strand; PAM type: YTN; PAM sequence: CTT
ccaagataaaagaggaggtt

SEQ ID NO: 286568 - DNA, 20 bp, Artificial Sequence
  Description of Artificial Sequence: Synthetic oligonucleotide
  Target: LAMA2; (-) strand; PAM type: YTN; PAM sequence: TTG
gcacttccaagataaaagag

SEQ ID NO: 286569 - DNA, 20 bp, Artificial Sequence
  Description of Artificial Sequence: Synthetic oligonucleotide
  Target: LAMA2; (-) strand; PAM type: YTN; PAM sequence: TTT
ggcacttccaagataaaaga

SEQ ID NO: 286570 - DNA, 20 bp, Artificial Sequence
  Description of Artificial Sequence: Synthetic oligonucleotide
  Target: LAMA2; (-) strand; PAM type: YTN; PAM sequence: TTA
caaatttggcacttccaaga

SEQ ID NO: 286571 - DNA, 20 bp, Artificial Sequence
  Description of Artificial Sequence: Synthetic oligonucleotide
  Target: LAMA2; (-) strand; PAM type: YTN; PAM sequence: CTT
acaaatttggcacttccaag

SEQ ID NO: 286572 - DNA, 20 bp, Artificial Sequence
  Description of Artificial Sequence: Synthetic oligonucleotide
  Target: LAMA2; (-) strand; PAM type: YTN; PAM sequence: TTA
gacttacaaatttggcactt

SEQ ID NO: 286573 - DNA, 20 bp, Artificial Sequence
  Description of Artificial Sequence: Synthetic oligonucleotide
  Target: LAMA2; (-) strand; PAM type: YTN; PAM sequence: TTG
aatattagacttacaaattt

SEQ ID NO: 286574 - DNA, 20 bp, Artificial Sequence
  Description of Artificial Sequence: Synthetic oligonucleotide
  Target: LAMA2; (-) strand; PAM type: YTN; PAM sequence: CTA
atgaaaagttgaatattaga

SEQ ID NO: 286575 - DNA, 20 bp, Artificial Sequence
  Description of Artificial Sequence: Synthetic oligonucleotide
  Target: LAMA2; (-) strand; PAM type: YTN; PAM sequence: CTA
tacacatacagcagcctaat

SEQ ID NO: 286576 - DNA, 20 bp, Artificial Sequence
  Description of Artificial Sequence: Synthetic oligonucleotide
  Target: LAMA2; (-) strand; PAM type: YTN; PAM sequence: CTA
gctatacacatacagcagcc

SEQ ID NO: 286577 - DNA, 20 bp, Artificial Sequence
  Description of Artificial Sequence: Synthetic oligonucleotide
  Target: LAMA2; (-) strand; PAM type: YTN; PAM sequence: CTC
tagctatacacatacagcag

SEQ ID NO: 286578 - DNA, 20 bp, Artificial Sequence
  Description of Artificial Sequence: Synthetic oligonucleotide
  Target: LAMA2; (-) strand; PAM type: YTN; PAM sequence: TTA
acctctagctatacacatac

SEQ ID NO: 286579 - DNA, 20 bp, Artificial Sequence
  Description of Artificial Sequence: Synthetic oligonucleotide
  Target: LAMA2; (-) strand; PAM type: YTN; PAM sequence: TTC
agattaacctctagctatac

SEQ ID NO: 286580 - DNA, 20 bp, Artificial Sequence
  Description of Artificial Sequence: Synthetic oligonucleotide
  Target: LAMA2; (-) strand; PAM type: YTN; PAM sequence: TTT
cagattaacctctagctata

SEQ ID NO: 286581 - DNA, 20 bp, Artificial Sequence
  Description of Artificial Sequence: Synthetic oligonucleotide
  Target: LAMA2; (-) strand; PAM type: YTN; PAM sequence: TTT
tcagattaacctctagctat

SEQ ID NO: 286582 - DNA, 20 bp, Artificial Sequence
  Description of Artificial Sequence: Synthetic oligonucleotide
  Target: LAMA2; (-) strand; PAM type: YTN; PAM sequence: CTA
tacattttcagattaacctc

SEQ ID NO: 286583 - DNA, 20 bp, Artificial Sequence
  Description of Artificial Sequence: Synthetic oligonucleotide
  Target: LAMA2; (-) strand; PAM type: YTN; PAM sequence: TTC
tatacattttcagattaacc

SEQ ID NO: 286584 - DNA, 20 bp, Artificial Sequence
  Description of Artificial Sequence: Synthetic oligonucleotide
  Target: LAMA2; (-) strand; PAM type: YTN; PAM sequence: TTG
gggattctatacattttcag

SEQ ID NO: 286585 - DNA, 20 bp, Artificial Sequence
  Description of Artificial Sequence: Synthetic oligonucleotide
  Target: LAMA2; (-) strand; PAM type: YTN; PAM sequence: TTT
ggggattctatacattttca

SEQ ID NO: 286586 - DNA, 20 bp, Artificial Sequence
  Description of Artificial Sequence: Synthetic oligonucleotide
  Target: LAMA2; (-) strand; PAM type: YTN; PAM sequence: TTG
gggaccatatacatttgggg

SEQ ID NO: 286587 - DNA, 20 bp, Artificial Sequence
  Description of Artificial Sequence: Synthetic oligonucleotide
  Target: LAMA2; (-) strand; PAM type: YTN; PAM sequence: TTT
ggggaccatatacatttggg

SEQ ID NO: 286588 - DNA, 20 bp, Artificial Sequence
  Description of Artificial Sequence: Synthetic oligonucleotide
  Target: LAMA2; (-) strand; PAM type: YTN; PAM sequence: TTA
gaccatttggggaccatata

SEQ ID NO: 286589 - DNA, 20 bp, Artificial Sequence
  Description of Artificial Sequence: Synthetic oligonucleotide
  Target: LAMA2; (-) strand; PAM type: YTN; PAM sequence: CTA
cgttagaccatttggggacc

SEQ ID NO: 286590 - DNA, 20 bp, Artificial Sequence
  Description of Artificial Sequence: Synthetic oligonucleotide
  Target: LAMA2; (-) strand; PAM type: YTN; PAM sequence: CTG
aaagcctacgttagaccatt

SEQ ID NO: 286591 - DNA, 20 bp, Artificial Sequence
  Description of Artificial Sequence: Synthetic oligonucleotide
  Target: LAMA2; (-) strand; PAM type: YTN; PAM sequence: TTC
aaatctgaaagcctacgtta

SEQ ID NO: 286592 - DNA, 20 bp, Artificial Sequence
  Description of Artificial Sequence: Synthetic oligonucleotide
  Target: LAMA2; (-) strand; PAM type: YTN; PAM sequence: TTT
caaatctgaaagcctacgtt

SEQ ID NO: 286593 - DNA, 20 bp, Artificial Sequence
  Description of Artificial Sequence: Synthetic oligonucleotide
  Target: LAMA2; (-) strand; PAM type: YTN; PAM sequence: TTT
tcaaatctgaaagcctacgt

SEQ ID NO: 286594 - DNA, 20 bp, Artificial Sequence
  Description of Artificial Sequence: Synthetic oligonucleotide
  Target: LAMA2; (-) strand; PAM type: YTN; PAM sequence: TTG
aggttttcaaatctgaaagc

SEQ ID NO: 286595 - DNA, 20 bp, Artificial Sequence
  Description of Artificial Sequence: Synthetic oligonucleotide
  Target: LAMA2; (-) strand; PAM type: YTN; PAM sequence: TTG
taaggtaagacgttgaggtt

SEQ ID NO: 286596 - DNA, 20 bp, Artificial Sequence
  Description of Artificial Sequence: Synthetic oligonucleotide
  Target: LAMA2; (-) strand; PAM type: YTN; PAM sequence: TTT
gtaaggtaagacgttgaggt

SEQ ID NO: 286597 - DNA, 20 bp, Artificial Sequence
  Description of Artificial Sequence: Synthetic oligonucleotide
  Target: LAMA2; (-) strand; PAM type: YTN; PAM sequence: TTT
tgtaaggtaagacgttgagg

SEQ ID NO: 286598 - DNA, 20 bp, Artificial Sequence
  Description of Artificial Sequence: Synthetic oligonucleotide
  Target: LAMA2; (-) strand; PAM type: YTN; PAM sequence: TTC
agaattttgtaaggtaagac

SEQ ID NO: 286599 - DNA, 20 bp, Artificial Sequence
  Description of Artificial Sequence: Synthetic oligonucleotide
  Target: LAMA2; (-) strand; PAM type: YTN; PAM sequence: CTT
cagaattttgtaaggtaaga

SEQ ID NO: 286600 - DNA, 20 bp, Artificial Sequence
  Description of Artificial Sequence: Synthetic oligonucleotide
  Target: LAMA2; (-) strand; PAM type: YTN; PAM sequence: CTC
ttcagaattttgtaaggtaa

SEQ ID NO: 286601 - DNA, 20 bp, Artificial Sequence
  Description of Artificial Sequence: Synthetic oligonucleotide
  Target: LAMA2; (-) strand; PAM type: YTN; PAM sequence: TTG
actcttcagaattttgtaag

SEQ ID NO: 286602 - DNA, 20 bp, Artificial Sequence
  Description of Artificial Sequence: Synthetic oligonucleotide
  Target: LAMA2; (-) strand; PAM type: YTN; PAM sequence: TTT
gactcttcagaattttgtaa

SEQ ID NO: 286603 - DNA, 20 bp, Artificial Sequence
  Description of Artificial Sequence: Synthetic oligonucleotide
  Target: LAMA2; (-) strand; PAM type: YTN; PAM sequence: TTA
atttgactcttcagaatttt

SEQ ID NO: 286604 - DNA, 20 bp, Artificial Sequence
  Description of Artificial Sequence: Synthetic oligonucleotide
  Target: LAMA2; (-) strand; PAM type: YTN; PAM sequence: CTT
aatttgactcttcagaattt

SEQ ID NO: 286605 - DNA, 20 bp, Artificial Sequence
  Description of Artificial Sequence: Synthetic oligonucleotide
  Target: LAMA2; (-) strand; PAM type: YTN; PAM sequence: CTA
acttaatttgactcttcaga

SEQ ID NO: 286606 - DNA, 20 bp, Artificial Sequence
  Description of Artificial Sequence: Synthetic oligonucleotide
  Target: LAMA2; (-) strand; PAM type: YTN; PAM sequence: TTC
taacttaatttgactcttca

SEQ ID NO: 286607 - DNA, 20 bp, Artificial Sequence
  Description of Artificial Sequence: Synthetic oligonucleotide
  Target: LAMA2; (-) strand; PAM type: YTN; PAM sequence: CTT
ctaacttaatttgactcttc

SEQ ID NO: 286608 - DNA, 20 bp, Artificial Sequence
  Description of Artificial Sequence: Synthetic oligonucleotide
  Target: LAMA2; (-) strand; PAM type: YTN; PAM sequence: TTG
ccttctaacttaatttgact

SEQ ID NO: 286609 - DNA, 20 bp, Artificial Sequence
  Description of Artificial Sequence: Synthetic oligonucleotide
  Target: LAMA2; (-) strand; PAM type: YTN; PAM sequence: TTT
gccttctaacttaatttgac

SEQ ID NO: 286610 - DNA, 20 bp, Artificial Sequence
  Description of Artificial Sequence: Synthetic oligonucleotide
  Target: LAMA2; (-) strand; PAM type: YTN; PAM sequence: TTC
atttgccttctaacttaatt

SEQ ID NO: 286611 - DNA, 20 bp, Artificial Sequence
  Description of Artificial Sequence: Synthetic oligonucleotide
  Target: LAMA2; (-) strand; PAM type: YTN; PAM sequence: TTT
catttgccttctaacttaat

SEQ ID NO: 286612 - DNA, 20 bp, Artificial Sequence
  Description of Artificial Sequence: Synthetic oligonucleotide
  Target: LAMA2; (-) strand; PAM type: YTN; PAM sequence: CTT
tcatttgccttctaacttaa

SEQ ID NO: 286613 - DNA, 20 bp, Artificial Sequence
  Description of Artificial Sequence: Synthetic oligonucleotide
  Target: LAMA2; (-) strand; PAM type: YTN; PAM sequence: TTC
ctttcatttgccttctaact

SEQ ID NO: 286614 - DNA, 20 bp, Artificial Sequence
  Description of Artificial Sequence: Synthetic oligonucleotide
  Target: LAMA2; (-) strand; PAM type: YTN; PAM sequence: CTT
cctttcatttgccttctaac

SEQ ID NO: 286615 - DNA, 20 bp, Artificial Sequence
  Description of Artificial Sequence: Synthetic oligonucleotide
  Target: LAMA2; (-) strand; PAM type: YTN; PAM sequence: TTC
ttcctttcatttgccttcta

SEQ ID NO: 286616 - DNA, 20 bp, Artificial Sequence
  Description of Artificial Sequence: Synthetic oligonucleotide
  Target: LAMA2; (-) strand; PAM type: YTN; PAM sequence: TTT
cttcctttcatttgccttct

SEQ ID NO: 286617 - DNA, 20 bp, Artificial Sequence
  Description of Artificial Sequence: Synthetic oligonucleotide
  Target: LAMA2; (-) strand; PAM type: YTN; PAM sequence: TTT
tcttcctttcatttgccttc

SEQ ID NO: 286618 - DNA, 20 bp, Artificial Sequence
  Description of Artificial Sequence: Synthetic oligonucleotide
  Target: LAMA2; (-) strand; PAM type: YTN; PAM sequence: CTG
tagttttcttcctttcattt

SEQ ID NO: 286619 - DNA, 20 bp, Artificial Sequence
  Description of Artificial Sequence: Synthetic oligonucleotide
  Target: LAMA2; (-) strand; PAM type: YTN; PAM sequence: CTA
aacactgtagttttcttcct

SEQ ID NO: 286620 - DNA, 20 bp, Artificial Sequence
  Description of Artificial Sequence: Synthetic oligonucleotide
  Target: LAMA2; (-) strand; PAM type: YTN; PAM sequence: CTG
acaaatgaaagtaaatgtga

SEQ ID NO: 286621 - DNA, 20 bp, Artificial Sequence
  Description of Artificial Sequence: Synthetic oligonucleotide
  Target: LAMA2; (-) strand; PAM type: YTN; PAM sequence: TTA
acagaaatgatggtatactg

SEQ ID NO: 286622 - DNA, 20 bp, Artificial Sequence
  Description of Artificial Sequence: Synthetic oligonucleotide
  Target: LAMA2; (-) strand; PAM type: YTN; PAM sequence: TTT
aacagaaatgatggtatact

SEQ ID NO: 286623 - DNA, 20 bp, Artificial Sequence
  Description of Artificial Sequence: Synthetic oligonucleotide
  Target: LAMA2; (-) strand; PAM type: YTN; PAM sequence: CTG
aaagtataatttaacagaaa

SEQ ID NO: 286624 - DNA, 20 bp, Artificial Sequence
  Description of Artificial Sequence: Synthetic oligonucleotide
  Target: LAMA2; (-) strand; PAM type: YTN; PAM sequence: CTG
gatctgaaagtataatttaa

SEQ ID NO: 286625 - DNA, 20 bp, Artificial Sequence
  Description of Artificial Sequence: Synthetic oligonucleotide
  Target: LAMA2; (-) strand; PAM type: YTN; PAM sequence: TTA
aatcactggatctgaaagta

SEQ ID NO: 286626 - DNA, 20 bp, Artificial Sequence
  Description of Artificial Sequence: Synthetic oligonucleotide
  Target: LAMA2; (-) strand; PAM type: YTN; PAM sequence: CTT
aaatcactggatctgaaagt

SEQ ID NO: 286627 - DNA, 20 bp, Artificial Sequence
  Description of Artificial Sequence: Synthetic oligonucleotide
  Target: LAMA2; (-) strand; PAM type: YTN; PAM sequence: TTC
ttaaatcactggatctgaaa

SEQ ID NO: 286628 - DNA, 20 bp, Artificial Sequence
  Description of Artificial Sequence: Synthetic oligonucleotide
  Target: LAMA2; (-) strand; PAM type: YTN; PAM sequence: TTA
gcattcttaaatcactggat

SEQ ID NO: 286629 - DNA, 20 bp, Artificial Sequence
  Description of Artificial Sequence: Synthetic oligonucleotide
  Target: LAMA2; (-) strand; PAM type: YTN; PAM sequence: CTC
attagcattcttaaatcact

SEQ ID NO: 286630 - DNA, 20 bp, Artificial Sequence
  Description of Artificial Sequence: Synthetic oligonucleotide
  Target: LAMA2; (-) strand; PAM type: YTN; PAM sequence: TTC
tcattagcattcttaaatca

SEQ ID NO: 286631 - DNA, 20 bp, Artificial Sequence
  Description of Artificial Sequence: Synthetic oligonucleotide
  Target: LAMA2; (-) strand; PAM type: YTN; PAM sequence: TTA
ttctcattagcattcttaaa

SEQ ID NO: 286632 - DNA, 20 bp, Artificial Sequence
  Description of Artificial Sequence: Synthetic oligonucleotide
  Target: LAMA2; (-) strand; PAM type: YTN; PAM sequence: TTT
attctcattagcattcttaa

SEQ ID NO: 286633 - DNA, 20 bp, Artificial Sequence
  Description of Artificial Sequence: Synthetic oligonucleotide
  Target: LAMA2; (-) strand; PAM type: YTN; PAM sequence: CTT
tattctcattagcattctta

SEQ ID NO: 286634 - DNA, 20 bp, Artificial Sequence
  Description of Artificial Sequence: Synthetic oligonucleotide
  Target: LAMA2; (-) strand; PAM type: YTN; PAM sequence: TTG
aacagtaaataagataaata

SEQ ID NO: 286635 - DNA, 20 bp, Artificial Sequence
  Description of Artificial Sequence: Synthetic oligonucleotide
  Target: LAMA2; (-) strand; PAM type: YTN; PAM sequence: TTT
gaacagtaaataagataaat

SEQ ID NO: 286636 - DNA, 20 bp, Artificial Sequence
  Description of Artificial Sequence: Synthetic oligonucleotide
  Target: LAMA2; (-) strand; PAM type: YTN; PAM sequence: TTA
gtttgaacagtaaataagat

SEQ ID NO: 286637 - DNA, 20 bp, Artificial Sequence
  Description of Artificial Sequence: Synthetic oligonucleotide
  Target: LAMA2; (-) strand; PAM type: YTN; PAM sequence: TTT
agtttgaacagtaaataaga

SEQ ID NO: 286638 - DNA, 20 bp, Artificial Sequence
  Description of Artificial Sequence: Synthetic oligonucleotide
  Target: LAMA2; (-) strand; PAM type: YTN; PAM sequence: TTG
taatttagtttgaacagtaa

SEQ ID NO: 286639 - DNA, 20 bp, Artificial Sequence
  Description of Artificial Sequence: Synthetic oligonucleotide
  Target: LAMA2; (-) strand; PAM type: YTN; PAM sequence: TTA
ttgtaatttagtttgaacag

SEQ ID NO: 286640 - DNA, 20 bp, Artificial Sequence
  Description of Artificial Sequence: Synthetic oligonucleotide
  Target: LAMA2; (-) strand; PAM type: YTN; PAM sequence: TTT
attgtaatttagtttgaaca

SEQ ID NO: 286641 - DNA, 20 bp, Artificial Sequence
  Description of Artificial Sequence: Synthetic oligonucleotide
  Target: LAMA2; (-) strand; PAM type: YTN; PAM sequence: TTA
acggaagagtttattgtaat

SEQ ID NO: 286642 - DNA, 20 bp, Artificial Sequence
  Description of Artificial Sequence: Synthetic oligonucleotide
  Target: LAMA2; (-) strand; PAM type: YTN; PAM sequence: TTC
attaacggaagagtttattg

SEQ ID NO: 286643 - DNA, 20 bp, Artificial Sequence
  Description of Artificial Sequence: Synthetic oligonucleotide
  Target: LAMA2; (-) strand; PAM type: YTN; PAM sequence: TTT
cattaacggaagagtttatt

SEQ ID NO: 286644 - DNA, 20 bp, Artificial Sequence
  Description of Artificial Sequence: Synthetic oligonucleotide
  Target: LAMA2; (-) strand; PAM type: YTN; PAM sequence: TTC
atttcattaacggaagagtt

SEQ ID NO: 286645 - DNA, 20 bp, Artificial Sequence
  Description of Artificial Sequence: Synthetic oligonucleotide
  Target: LAMA2; (-) strand; PAM type: YTN; PAM sequence: TTT
catttcattaacggaagagt

SEQ ID NO: 286646 - DNA, 20 bp, Artificial Sequence
  Description of Artificial Sequence: Synthetic oligonucleotide
  Target: LAMA2; (-) strand; PAM type: YTN; PAM sequence: TTT
tcatttcattaacggaagag

SEQ ID NO: 286647 - DNA, 20 bp, Artificial Sequence
  Description of Artificial Sequence: Synthetic oligonucleotide
  Target: LAMA2; (-) strand; PAM type: YTN; PAM sequence: CTA
ttttcatttcattaacggaa

SEQ ID NO: 286648 - DNA, 20 bp, Artificial Sequence
  Description of Artificial Sequence: Synthetic oligonucleotide
  Target: LAMA2; (-) strand; PAM type: YTN; PAM sequence: TTG
ctattttcatttcattaacg

SEQ ID NO: 286649 - DNA, 20 bp, Artificial Sequence
  Description of Artificial Sequence: Synthetic oligonucleotide
  Target: LAMA2; (-) strand; PAM type: YTN; PAM sequence: TTT
gctattttcatttcattaac

SEQ ID NO: 286650 - DNA, 20 bp, Artificial Sequence
  Description of Artificial Sequence: Synthetic oligonucleotide
  Target: LAMA2; (-) strand; PAM type: YTN; PAM sequence: CTT
tgctattttcatttcattaa

SEQ ID NO: 286651 - DNA, 20 bp, Artificial Sequence
  Description of Artificial Sequence: Synthetic oligonucleotide
  Target: LAMA2; (-) strand; PAM type: YTN; PAM sequence: TTG
gtaaaaaaaatagtacacac

SEQ ID NO: 286652 - DNA, 20 bp, Artificial Sequence
  Description of Artificial Sequence: Synthetic oligonucleotide
  Target: LAMA2; (-) strand; PAM type: YTN; PAM sequence: TTC
cattggtaaaaaaaatagta

SEQ ID NO: 286653 - DNA, 20 bp, Artificial Sequence
  Description of Artificial Sequence: Synthetic oligonucleotide
  Target: LAMA2; (-) strand; PAM type: YTN; PAM sequence: TTT
ccattggtaaaaaaaatagt

SEQ ID NO: 286654 - DNA, 20 bp, Artificial Sequence
  Description of Artificial Sequence: Synthetic oligonucleotide
  Target: LAMA2; (-) strand; PAM type: YTN; PAM sequence: TTA
gaagagtttccattggtaaa

SEQ ID NO: 286655 - DNA, 20 bp, Artificial Sequence
  Description of Artificial Sequence: Synthetic oligonucleotide
  Target: LAMA2; (-) strand; PAM type: YTN; PAM sequence: TTC
aacacaagttagaagagttt

SEQ ID NO: 286656 - DNA, 20 bp, Artificial Sequence
  Description of Artificial Sequence: Synthetic oligonucleotide
  Target: LAMA2; (-) strand; PAM type: YTN; PAM sequence: TTC
aggtcataaattcaacacaa

SEQ ID NO: 286657 - DNA, 20 bp, Artificial Sequence
  Description of Artificial Sequence: Synthetic oligonucleotide
  Target: LAMA2; (-) strand; PAM type: YTN; PAM sequence: TTC
agttcaggtcataaattcaa

SEQ ID NO: 286658 - DNA, 20 bp, Artificial Sequence
  Description of Artificial Sequence: Synthetic oligonucleotide
  Target: LAMA2; (-) strand; PAM type: YTN; PAM sequence: TTT
cagttcaggtcataaattca

SEQ ID NO: 286659 - DNA, 20 bp, Artificial Sequence
  Description of Artificial Sequence: Synthetic oligonucleotide
  Target: LAMA2; (-) strand; PAM type: YTN; PAM sequence: TTA
tttcagttcaggtcataaat

SEQ ID NO: 286660 - DNA, 20 bp, Artificial Sequence
  Description of Artificial Sequence: Synthetic oligonucleotide
  Target: LAMA2; (-) strand; PAM type: YTN; PAM sequence: CTG
tgttatttcagttcaggtca

SEQ ID NO: 286661 - DNA, 20 bp, Artificial Sequence
  Description of Artificial Sequence: Synthetic oligonucleotide
  Target: LAMA2; (-) strand; PAM type: YTN; PAM sequence: TTG
tagatataatctgtgttatt

SEQ ID NO: 286662 - DNA, 20 bp, Artificial Sequence
  Description of Artificial Sequence: Synthetic oligonucleotide
  Target: LAMA2; (-) strand; PAM type: YTN; PAM sequence: TTT
gtagatataatctgtgttat

SEQ ID NO: 286663 - DNA, 20 bp, Artificial Sequence
  Description of Artificial Sequence: Synthetic oligonucleotide
  Target: LAMA2; (-) strand; PAM type: YTN; PAM sequence: TTT
tgtagatataatctgtgtta

SEQ ID NO: 286664 - DNA, 20 bp, Artificial Sequence
  Description of Artificial Sequence: Synthetic oligonucleotide
  Target: LAMA2; (-) strand; PAM type: YTN; PAM sequence: CTT
ttgtagatataatctgtgtt

SEQ ID NO: 286665 - DNA, 20 bp, Artificial Sequence
  Description of Artificial Sequence: Synthetic oligonucleotide
  Target: LAMA2; (-) strand; PAM type: YTN; PAM sequence: TTA
tgggtgggcttttgtagata

SEQ ID NO: 286666 - DNA, 20 bp, Artificial Sequence
  Description of Artificial Sequence: Synthetic oligonucleotide
  Target: LAMA2; (-) strand; PAM type: YTN; PAM sequence: TTT
atgggtgggcttttgtagat

SEQ ID NO: 286667 - DNA, 20 bp, Artificial Sequence
  Description of Artificial Sequence: Synthetic oligonucleotide
  Target: LAMA2; (-) strand; PAM type: YTN; PAM sequence: CTT
tatgggtgggcttttgtaga

SEQ ID NO: 286668 - DNA, 20 bp, Artificial Sequence
  Description of Artificial Sequence: Synthetic oligonucleotide
  Target: LAMA2; (-) strand; PAM type: YTN; PAM sequence: TTA
gaactttatgggtgggcttt

SEQ ID NO: 286669 - DNA, 20 bp, Artificial Sequence
  Description of Artificial Sequence: Synthetic oligonucleotide
  Target: LAMA2; (-) strand; PAM type: YTN; PAM sequence: TTC
aaatggaagaaattagaact

SEQ ID NO: 286670 - DNA, 20 bp, Artificial Sequence
  Description of Artificial Sequence: Synthetic oligonucleotide
  Target: LAMA2; (-) strand; PAM type: YTN; PAM sequence: TTG
gaaaatccccatgcatgcaa

SEQ ID NO: 286671 - DNA, 20 bp, Artificial Sequence
  Description of Artificial Sequence: Synthetic oligonucleotide
  Target: LAMA2; (-) strand; PAM type: YTN; PAM sequence: TTT
ggaaaatccccatgcatgca

SEQ ID NO: 286672 - DNA, 20 bp, Artificial Sequence
  Description of Artificial Sequence: Synthetic oligonucleotide
  Target: LAMA2; (-) strand; PAM type: YTN; PAM sequence: TTT
tggaaaatccccatgcatgc

SEQ ID NO: 286673 - DNA, 20 bp, Artificial Sequence
  Description of Artificial Sequence: Synthetic oligonucleotide
  Target: LAMA2; (-) strand; PAM type: YTN; PAM sequence: TTC
attttggaaaatccccatgc

SEQ ID NO: 286674 - DNA, 20 bp, Artificial Sequence
  Description of Artificial Sequence: Synthetic oligonucleotide
  Target: LAMA2; (-) strand; PAM type: YTN; PAM sequence: TTA
agaagtcatattcattttgg

SEQ ID NO: 286675 - DNA, 20 bp, Artificial Sequence
  Description of Artificial Sequence: Synthetic oligonucleotide
  Target: LAMA2; (-) strand; PAM type: YTN; PAM sequence: TTG
ttaagaagtcatattcattt

SEQ ID NO: 286676 - DNA, 20 bp, Artificial Sequence
  Description of Artificial Sequence: Synthetic oligonucleotide
  Target: LAMA2; (-) strand; PAM type: YTN; PAM sequence: TTT
gttaagaagtcatattcatt

SEQ ID NO: 286677 - DNA, 20 bp, Artificial Sequence
  Description of Artificial Sequence: Synthetic oligonucleotide
  Target: LAMA2; (-) strand; PAM type: YTN; PAM sequence: TTA
tgccatgaatgatttgttaa

SEQ ID NO: 286678 - DNA, 20 bp, Artificial Sequence
  Description of Artificial Sequence: Synthetic oligonucleotide
  Target: LAMA2; (-) strand; PAM type: YTN; PAM sequence: CTT
atgccatgaatgatttgtta

SEQ ID NO: 286679 - DNA, 20 bp, Artificial Sequence
  Description of Artificial Sequence: Synthetic oligonucleotide
  Target: LAMA2; (-) strand; PAM type: YTN; PAM sequence: TTG
acttatgccatgaatgattt

SEQ ID NO: 286680 - DNA, 20 bp, Artificial Sequence
  Description of Artificial Sequence: Synthetic oligonucleotide
  Target: LAMA2; (-) strand; PAM type: YTN; PAM sequence: TTA
cccaaatggcaaatattgac

SEQ ID NO: 286681 - DNA, 20 bp, Artificial Sequence
  Description of Artificial Sequence: Synthetic oligonucleotide
  Target: LAMA2; (-) strand; PAM type: YTN; PAM sequence: CTT
acccaaatggcaaatattga

SEQ ID NO: 286682 - DNA, 20 bp, Artificial Sequence
  Description of Artificial Sequence: Synthetic oligonucleotide
  Target: LAMA2; (-) strand; PAM type: YTN; PAM sequence: TTC
cttacccaaatggcaaatat

SEQ ID NO: 286683 - DNA, 20 bp, Artificial Sequence
  Description of Artificial Sequence: Synthetic oligonucleotide
  Target: LAMA2; (-) strand; PAM type: YTN; PAM sequence: TTG
acccagaattccttacccaa

SEQ ID NO: 286684 - DNA, 20 bp, Artificial Sequence
  Description of Artificial Sequence: Synthetic oligonucleotide
  Target: LAMA2; (-) strand; PAM type: YTN; PAM sequence: TTC
ccaaattgacccagaattcc

SEQ ID NO: 286685 - DNA, 20 bp, Artificial Sequence
  Description of Artificial Sequence: Synthetic oligonucleotide
  Target: LAMA2; (-) strand; PAM type: YTN; PAM sequence: TTT
cccaaattgacccagaattc

SEQ ID NO: 286686 - DNA, 20 bp, Artificial Sequence
  Description of Artificial Sequence: Synthetic oligonucleotide
  Target: LAMA2; (-) strand; PAM type: YTN; PAM sequence: TTA
tttcccaaattgacccagaa

SEQ ID NO: 286687 - DNA, 20 bp, Artificial Sequence
  Description of Artificial Sequence: Synthetic oligonucleotide
  Target: LAMA2; (-) strand; PAM type: YTN; PAM sequence: TTT
atttcccaaattgacccaga

SEQ ID NO: 286688 - DNA, 20 bp, Artificial Sequence
  Description of Artificial Sequence: Synthetic oligonucleotide
  Target: LAMA2; (-) strand; PAM type: YTN; PAM sequence: TTT
tatttcccaaattgacccag

SEQ ID NO: 286689 - DNA, 20 bp, Artificial Sequence
  Description of Artificial Sequence: Synthetic oligonucleotide
  Target: LAMA2; (-) strand; PAM type: YTN; PAM sequence: CTA
tgattttatttcccaaattg

SEQ ID NO: 286690 - DNA, 20 bp, Artificial Sequence
  Description of Artificial Sequence: Synthetic oligonucleotide
  Target: LAMA2; (-) strand; PAM type: YTN; PAM sequence: TTG
agggggcagctatgatttta

SEQ ID NO: 286691 - DNA, 20 bp, Artificial Sequence
  Description of Artificial Sequence: Synthetic oligonucleotide
  Target: LAMA2; (-) strand; PAM type: YTN; PAM sequence: TTT
gagggggcagctatgatttt

SEQ ID NO: 286692 - DNA, 20 bp, Artificial Sequence
  Description of Artificial Sequence: Synthetic oligonucleotide
  Target: LAMA2; (-) strand; PAM type: YTN; PAM sequence: TTT
tgagggggcagctatgattt

SEQ ID NO: 286693 - DNA, 20 bp, Artificial Sequence
  Description of Artificial Sequence: Synthetic oligonucleotide
  Target: LAMA2; (-) strand; PAM type: YTN; PAM sequence: TTT
ttgagggggcagctatgatt

SEQ ID NO: 286694 - DNA, 20 bp, Artificial Sequence
  Description of Artificial Sequence: Synthetic oligonucleotide
  Target: LAMA2; (-) strand; PAM type: YTN; PAM sequence: CTG
acatttttgagggggcagct

SEQ ID NO: 286695 - DNA, 20 bp, Artificial Sequence
  Description of Artificial Sequence: Synthetic oligonucleotide
  Target: LAMA2; (-) strand; PAM type: YTN; PAM sequence: TTC
accaaggacactgacatttt

SEQ ID NO: 286696 - DNA, 20 bp, Artificial Sequence
  Description of Artificial Sequence: Synthetic oligonucleotide
  Target: LAMA2; (-) strand; PAM type: YTN; PAM sequence: TTT
caccaaggacactgacattt

SEQ ID NO: 286697 - DNA, 20 bp, Artificial Sequence
  Description of Artificial Sequence: Synthetic oligonucleotide
  Target: LAMA2; (-) strand; PAM type: YTN; PAM sequence: TTT
tcaccaaggacactgacatt

SEQ ID NO: 286698 - DNA, 20 bp, Artificial Sequence
  Description of Artificial Sequence: Synthetic oligonucleotide
  Target: LAMA2; (-) strand; PAM type: YTN; PAM sequence: TTA
ttttcaccaaggacactgac

SEQ ID NO: 286699 - DNA, 20 bp, Artificial Sequence
  Description of Artificial Sequence: Synthetic oligonucleotide
  Target: LAMA2; (-) strand; PAM type: YTN; PAM sequence: TTA
ttattttcaccaaggacact

SEQ ID NO: 286700 - DNA, 20 bp, Artificial Sequence
  Description of Artificial Sequence: Synthetic oligonucleotide
  Target: LAMA2; (-) strand; PAM type: YTN; PAM sequence: TTC
agaatccattattattttca

SEQ ID NO: 286701 - DNA, 20 bp, Artificial Sequence
  Description of Artificial Sequence: Synthetic oligonucleotide
  Target: LAMA2; (-) strand; PAM type: YTN; PAM sequence: TTA
aattcagaatccattattat

SEQ ID NO: 286702 - DNA, 20 bp, Artificial Sequence
  Description of Artificial Sequence: Synthetic oligonucleotide
  Target: LAMA2; (-) strand; PAM type: YTN; PAM sequence: TTT
aaattcagaatccattatta

SEQ ID NO: 286703 - DNA, 20 bp, Artificial Sequence
  Description of Artificial Sequence: Synthetic oligonucleotide
  Target: LAMA2; (-) strand; PAM type: YTN; PAM sequence: TTG
tggtaaagataaaaacaaat

SEQ ID NO: 286704 - DNA, 20 bp, Artificial Sequence
  Description of Artificial Sequence: Synthetic oligonucleotide
  Target: LAMA2; (-) strand; PAM type: YTN; PAM sequence: CTT
gtggtaaagataaaaacaaa

SEQ ID NO: 286705 - DNA, 20 bp, Artificial Sequence
  Description of Artificial Sequence: Synthetic oligonucleotide
  Target: LAMA2; (-) strand; PAM type: YTN; PAM sequence: CTG
atacttgtggtaaagataaa

SEQ ID NO: 286706 - DNA, 20 bp, Artificial Sequence
  Description of Artificial Sequence: Synthetic oligonucleotide
  Target: LAMA2; (-) strand; PAM type: YTN; PAM sequence: CTC
tgatacttgtggtaaagata

SEQ ID NO: 286707 - DNA, 20 bp, Artificial Sequence
  Description of Artificial Sequence: Synthetic oligonucleotide
  Target: LAMA2; (-) strand; PAM type: YTN; PAM sequence: CTC
actctgatacttgtggtaaa

SEQ ID NO: 286708 - DNA, 20 bp, Artificial Sequence
  Description of Artificial Sequence: Synthetic oligonucleotide
  Target: LAMA2; (-) strand; PAM type: YTN; PAM sequence: TTC
tcactctgatacttgtggta

SEQ ID NO: 286709 - DNA, 20 bp, Artificial Sequence
  Description of Artificial Sequence: Synthetic oligonucleotide
  Target: LAMA2; (-) strand; PAM type: YTN; PAM sequence: TTT
ctcactctgatacttgtggt

SEQ ID NO: 286710 - DNA, 20 bp, Artificial Sequence
  Description of Artificial Sequence: Synthetic oligonucleotide
  Target: LAMA2; (-) strand; PAM type: YTN; PAM sequence: CTT
tctcactctgatacttgtgg

SEQ ID NO: 286711 - DNA, 20 bp, Artificial Sequence
  Description of Artificial Sequence: Synthetic oligonucleotide
  Target: LAMA2; (-) strand; PAM type: YTN; PAM sequence: TTG
agaccaaagcctttctcact

SEQ ID NO: 286712 - DNA, 20 bp, Artificial Sequence
  Description of Artificial Sequence: Synthetic oligonucleotide
  Target: LAMA2; (-) strand; PAM type: YTN; PAM sequence: TTT
gagaccaaagcctttctcac

SEQ ID NO: 286713 - DNA, 20 bp, Artificial Sequence
  Description of Artificial Sequence: Synthetic oligonucleotide
  Target: LAMA2; (-) strand; PAM type: YTN; PAM sequence: TTT
tgagaccaaagcctttctca

SEQ ID NO: 286714 - DNA, 20 bp, Artificial Sequence
  Description of Artificial Sequence: Synthetic oligonucleotide
  Target: LAMA2; (-) strand; PAM type: YTN; PAM sequence: CTA
attttgagaccaaagccttt

SEQ ID NO: 286715 - DNA, 20 bp, Artificial Sequence
  Description of Artificial Sequence: Synthetic oligonucleotide
  Target: LAMA2; (-) strand; PAM type: YTN; PAM sequence: TTA
agtctaattttgagaccaaa

SEQ ID NO: 286716 - DNA, 20 bp, Artificial Sequence
  Description of Artificial Sequence: Synthetic oligonucleotide
  Target: LAMA2; (-) strand; PAM type: YTN; PAM sequence: TTC
aaattaagtctaattttgag

SEQ ID NO: 286717 - DNA, 20 bp, Artificial Sequence
  Description of Artificial Sequence: Synthetic oligonucleotide
  Target: LAMA2; (-) strand; PAM type: YTN; PAM sequence: TTA
ccaattcaaattaagtctaa

SEQ ID NO: 286718 - DNA, 20 bp, Artificial Sequence
  Description of Artificial Sequence: Synthetic oligonucleotide
  Target: LAMA2; (-) strand; PAM type: YTN; PAM sequence: TTT
accaattcaaattaagtcta

SEQ ID NO: 286719 - DNA, 20 bp, Artificial Sequence
  Description of Artificial Sequence: Synthetic oligonucleotide
  Target: LAMA2; (-) strand; PAM type: YTN; PAM sequence: TTT
taccaattcaaattaagtct

SEQ ID NO: 286720 - DNA, 20 bp, Artificial Sequence
  Description of Artificial Sequence: Synthetic oligonucleotide
  Target: LAMA2; (-) strand; PAM type: YTN; PAM sequence: TTA
attttaccaattcaaattaa

SEQ ID NO: 286721 - DNA, 20 bp, Artificial Sequence
  Description of Artificial Sequence: Synthetic oligonucleotide
  Target: LAMA2; (-) strand; PAM type: YTN; PAM sequence: TTG
ttaattttaccaattcaaat

SEQ ID NO: 286722 - DNA, 20 bp, Artificial Sequence
  Description of Artificial Sequence: Synthetic oligonucleotide
  Target: LAMA2; (-) strand; PAM type: YTN; PAM sequence: TTT
gttaattttaccaattcaaa

SEQ ID NO: 286723 - DNA, 20 bp, Artificial Sequence
  Description of Artificial Sequence: Synthetic oligonucleotide
  Target: LAMA2; (-) strand; PAM type: YTN; PAM sequence: CTC
aggcatgtttgttaatttta

SEQ ID NO: 286724 - DNA, 20 bp, Artificial Sequence
  Description of Artificial Sequence: Synthetic oligonucleotide
  Target: LAMA2; (-) strand; PAM type: YTN; PAM sequence: TTA
aagcaaaaaaaaaaaaagtc

SEQ ID NO: 286725 - DNA, 20 bp, Artificial Sequence
  Description of Artificial Sequence: Synthetic oligonucleotide
  Target: LAMA2; (-) strand; PAM type: YTN; PAM sequence: CTT
aaagcaaaaaaaaaaaaagt

SEQ ID NO: 286726 - DNA, 20 bp, Artificial Sequence
  Description of Artificial Sequence: Synthetic oligonucleotide
  Target: LAMA2; (-) strand; PAM type: YTN; PAM sequence: TTA
tatccttaaagcaaaaaaaa

SEQ ID NO: 286727 - DNA, 20 bp, Artificial Sequence
  Description of Artificial Sequence: Synthetic oligonucleotide
  Target: LAMA2; (-) strand; PAM type: YTN; PAM sequence: TTT
atatccttaaagcaaaaaaa

SEQ ID NO: 286728 - DNA, 20 bp, Artificial Sequence
  Description of Artificial Sequence: Synthetic oligonucleotide
  Target: LAMA2; (-) strand; PAM type: YTN; PAM sequence: TTT
tatatccttaaagcaaaaaa

SEQ ID NO: 286729 - DNA, 20 bp, Artificial Sequence
  Description of Artificial Sequence: Synthetic oligonucleotide
  Target: LAMA2; (-) strand; PAM type: YTN; PAM sequence: TTT
ttatatccttaaagcaaaaa

SEQ ID NO: 286730 - DNA, 20 bp, Artificial Sequence
  Description of Artificial Sequence: Synthetic oligonucleotide
  Target: LAMA2; (-) strand; PAM type: YTN; PAM sequence: TTA
tttttatatccttaaagcaa

SEQ ID NO: 286731 - DNA, 20 bp, Artificial Sequence
  Description of Artificial Sequence: Synthetic oligonucleotide
  Target: LAMA2; (-) strand; PAM type: YTN; PAM sequence: TTT
atttttatatccttaaagca

SEQ ID NO: 286732 - DNA, 20 bp, Artificial Sequence
  Description of Artificial Sequence: Synthetic oligonucleotide
  Target: LAMA2; (-) strand; PAM type: YTN; PAM sequence: TTT
tatttttatatccttaaagc

SEQ ID NO: 286733 - DNA, 20 bp, Artificial Sequence
  Description of Artificial Sequence: Synthetic oligonucleotide
  Target: LAMA2; (-) strand; PAM type: YTN; PAM sequence: TTA
aaataatattttatttttat

SEQ ID NO: 286734 - DNA, 20 bp, Artificial Sequence
  Description of Artificial Sequence: Synthetic oligonucleotide
  Target: LAMA2; (-) strand; PAM type: YTN; PAM sequence: TTA
ttaaaataatattttatttt

SEQ ID NO: 286735 - DNA, 20 bp, Artificial Sequence
  Description of Artificial Sequence: Synthetic oligonucleotide
  Target: LAMA2; (-) strand; PAM type: YTN; PAM sequence: TTA
tacattattaaaataatatt

SEQ ID NO: 286736 - DNA, 20 bp, Artificial Sequence
  Description of Artificial Sequence: Synthetic oligonucleotide
  Target: LAMA2; (-) strand; PAM type: YTN; PAM sequence: TTA
ttatacattattaaaataat

SEQ ID NO: 286737 - DNA, 20 bp, Artificial Sequence
  Description of Artificial Sequence: Synthetic oligonucleotide
  Target: LAMA2; (-) strand; PAM type: YTN; PAM sequence: TTA
ttattatacattattaaaat

SEQ ID NO: 286738 - DNA, 20 bp, Artificial Sequence
  Description of Artificial Sequence: Synthetic oligonucleotide
  Target: LAMA2; (-) strand; PAM type: YTN; PAM sequence: TTT
attattatacattattaaaa

SEQ ID NO: 286739 - DNA, 20 bp, Artificial Sequence
  Description of Artificial Sequence: Synthetic oligonucleotide
  Target: LAMA2; (-) strand; PAM type: YTN; PAM sequence: TTA
tttattattatacattatta

SEQ ID NO: 286740 - DNA, 20 bp, Artificial Sequence
  Description of Artificial Sequence: Synthetic oligonucleotide
  Target: LAMA2; (-) strand; PAM type: YTN; PAM sequence: TTG
tcaaataatattatttatta

SEQ ID NO: 286741 - DNA, 20 bp, Artificial Sequence
  Description of Artificial Sequence: Synthetic oligonucleotide
  Target: LAMA2; (-) strand; PAM type: YTN; PAM sequence: CTT
gtcaaataatattatttatt

SEQ ID NO: 286742 - DNA, 20 bp, Artificial Sequence
  Description of Artificial Sequence: Synthetic oligonucleotide
  Target: LAMA2; (-) strand; PAM type: YTN; PAM sequence: TTC
atgataatacttgtcaaata

SEQ ID NO: 286743 - DNA, 20 bp, Artificial Sequence
  Description of Artificial Sequence: Synthetic oligonucleotide
  Target: LAMA2; (-) strand; PAM type: YTN; PAM sequence: CTT
catgataatacttgtcaaat

SEQ ID NO: 286744 - DNA, 20 bp, Artificial Sequence
  Description of Artificial Sequence: Synthetic oligonucleotide
  Target: LAMA2; (-) strand; PAM type: YTN; PAM sequence: TTA
ggagcttcatgataatactt

SEQ ID NO: 286745 - DNA, 20 bp, Artificial Sequence
  Description of Artificial Sequence: Synthetic oligonucleotide
  Target: LAMA2; (-) strand; PAM type: YTN; PAM sequence: TTG
cagacatgtgaaatgattag

SEQ ID NO: 286746 - DNA, 20 bp, Artificial Sequence
  Description of Artificial Sequence: Synthetic oligonucleotide
  Target: LAMA2; (-) strand; PAM type: YTN; PAM sequence: TTT
gcagacatgtgaaatgatta

SEQ ID NO: 286747 - DNA, 20 bp, Artificial Sequence
  Description of Artificial Sequence: Synthetic oligonucleotide
  Target: LAMA2; (-) strand; PAM type: YTN; PAM sequence: TTC
aataagcgccatttgcagac

SEQ ID NO: 286748 - DNA, 20 bp, Artificial Sequence
  Description of Artificial Sequence: Synthetic oligonucleotide
  Target: LAMA2; (-) strand; PAM type: YTN; PAM sequence: TTT
caataagcgccatttgcaga

SEQ ID NO: 286749 - DNA, 20 bp, Artificial Sequence
  Description of Artificial Sequence: Synthetic oligonucleotide
  Target: LAMA2; (-) strand; PAM type: YTN; PAM sequence: TTT
tcaataagcgccatttgcag

SEQ ID NO: 286750 - DNA, 20 bp, Artificial Sequence
  Description of Artificial Sequence: Synthetic oligonucleotide
  Target: LAMA2; (-) strand; PAM type: YTN; PAM sequence: TTT
ttcaataagcgccatttgca

SEQ ID NO: 286751 - DNA, 20 bp, Artificial Sequence
  Description of Artificial Sequence: Synthetic oligonucleotide
  Target: LAMA2; (-) strand; PAM type: YTN; PAM sequence: TTA
aagaggagaccagcagagtg

SEQ ID NO: 286752 - DNA, 20 bp, Artificial Sequence
  Description of Artificial Sequence: Synthetic oligonucleotide
  Target: LAMA2; (-) strand; PAM type: YTN; PAM sequence: TTT
aaagaggagaccagcagagt

SEQ ID NO: 286753 - DNA, 20 bp, Artificial Sequence
  Description of Artificial Sequence: Synthetic oligonucleotide
  Target: LAMA2; (-) strand; PAM type: YTN; PAM sequence: CTT
taaagaggagaccagcagag

SEQ ID NO: 286754 - DNA, 20 bp, Artificial Sequence
  Description of Artificial Sequence: Synthetic oligonucleotide
  Target: LAMA2; (-) strand; PAM type: YTN; PAM sequence: TTC
agagaaatacaaaaacaaga

SEQ ID NO: 286755 - DNA, 20 bp, Artificial Sequence
  Description of Artificial Sequence: Synthetic oligonucleotide
  Target: LAMA2; (-) strand; PAM type: YTN; PAM sequence: CTA
gttcagagaaatacaaaaac

SEQ ID NO: 286756 - DNA, 20 bp, Artificial Sequence
  Description of Artificial Sequence: Synthetic oligonucleotide
  Target: LAMA2; (-) strand; PAM type: YTN; PAM sequence: CTA
tagccagaaagtcaatctag

SEQ ID NO: 286757 - DNA, 20 bp, Artificial Sequence
  Description of Artificial Sequence: Synthetic oligonucleotide
  Target: LAMA2; (-) strand; PAM type: YTN; PAM sequence: TTC
tatagccagaaagtcaatct

SEQ ID NO: 286758 - DNA, 20 bp, Artificial Sequence
  Description of Artificial Sequence: Synthetic oligonucleotide
  Target: LAMA2; (-) strand; PAM type: YTN; PAM sequence: TTT
ctatagccagaaagtcaatc

SEQ ID NO: 286759 - DNA, 20 bp, Artificial Sequence
  Description of Artificial Sequence: Synthetic oligonucleotide
  Target: LAMA2; (-) strand; PAM type: YTN; PAM sequence: TTA
cgcatttctatagccagaaa

SEQ ID NO: 286760 - DNA, 20 bp, Artificial Sequence
  Description of Artificial Sequence: Synthetic oligonucleotide
  Target: LAMA2; (-) strand; PAM type: YTN; PAM sequence: TTT
acgcatttctatagccagaa

SEQ ID NO: 286761 - DNA, 20 bp, Artificial Sequence
  Description of Artificial Sequence: Synthetic oligonucleotide
  Target: LAMA2; (-) strand; PAM type: YTN; PAM sequence: CTT
tacgcatttctatagccaga

SEQ ID NO: 286762 - DNA, 20 bp, Artificial Sequence
  Description of Artificial Sequence: Synthetic oligonucleotide
  Target: LAMA2; (-) strand; PAM type: YTN; PAM sequence: TTG
cctttacgcatttctatagc

SEQ ID NO: 286763 - DNA, 20 bp, Artificial Sequence
  Description of Artificial Sequence: Synthetic oligonucleotide
  Target: LAMA2; (-) strand; PAM type: YTN; PAM sequence: TTT
gcctttacgcatttctatag

SEQ ID NO: 286764 - DNA, 20 bp, Artificial Sequence
  Description of Artificial Sequence: Synthetic oligonucleotide
  Target: LAMA2; (-) strand; PAM type: YTN; PAM sequence: CTT
tgcctttacgcatttctata

SEQ ID NO: 286765 - DNA, 20 bp, Artificial Sequence
  Description of Artificial Sequence: Synthetic oligonucleotide
  Target: LAMA2; (-) strand; PAM type: YTN; PAM sequence: CTG
actttgcctttacgcatttc

SEQ ID NO: 286766 - DNA, 20 bp, Artificial Sequence
  Description of Artificial Sequence: Synthetic oligonucleotide
  Target: LAMA2; (-) strand; PAM type: YTN; PAM sequence: CTC
cagatccaacatcccagagg

SEQ ID NO: 286767 - DNA, 20 bp, Artificial Sequence
  Description of Artificial Sequence: Synthetic oligonucleotide
  Target: LAMA2; (-) strand; PAM type: YTN; PAM sequence: CTA
cacgtccaactccagatcca

SEQ ID NO: 286768 - DNA, 20 bp, Artificial Sequence
  Description of Artificial Sequence: Synthetic oligonucleotide
  Target: LAMA2; (-) strand; PAM type: YTN; PAM sequence: CTC
tacacgtccaactccagatc

SEQ ID NO: 286769 - DNA, 20 bp, Artificial Sequence
  Description of Artificial Sequence: Synthetic oligonucleotide
  Target: LAMA2; (-) strand; PAM type: YTN; PAM sequence: CTG
ggtactctacacgtccaact

SEQ ID NO: 286770 - DNA, 20 bp, Artificial Sequence
  Description of Artificial Sequence: Synthetic oligonucleotide
  Target: LAMA2; (-) strand; PAM type: YTN; PAM sequence: CTA
cgatacggtaccaatatgag

SEQ ID NO: 286771 - DNA, 20 bp, Artificial Sequence
  Description of Artificial Sequence: Synthetic oligonucleotide
  Target: LAMA2; (-) strand; PAM type: YTN; PAM sequence: TTG
atgctacgatacggtaccaa

SEQ ID NO: 286772 - DNA, 20 bp, Artificial Sequence
  Description of Artificial Sequence: Synthetic oligonucleotide
  Target: LAMA2; (-) strand; PAM type: YTN; PAM sequence: CTT
gatgctacgatacggtacca

SEQ ID NO: 286773 - DNA, 20 bp, Artificial Sequence
  Description of Artificial Sequence: Synthetic oligonucleotide
  Target: LAMA2; (-) strand; PAM type: YTN; PAM sequence: TTA
ccttgatgctacgatacggt

SEQ ID NO: 286774 - DNA, 20 bp, Artificial Sequence
  Description of Artificial Sequence: Synthetic oligonucleotide
  Target: LAMA2; (-) strand; PAM type: YTN; PAM sequence: TTG
gttaccttgatgctacgata

SEQ ID NO: 286775 - DNA, 20 bp, Artificial Sequence
  Description of Artificial Sequence: Synthetic oligonucleotide
  Target: LAMA2; (-) strand; PAM type: YTN; PAM sequence: TTA
agttggttaccttgatgcta

SEQ ID NO: 286776 - DNA, 20 bp, Artificial Sequence
  Description of Artificial Sequence: Synthetic oligonucleotide
  Target: LAMA2; (-) strand; PAM type: YTN; PAM sequence: TTA
ttaagttggttaccttgatg

SEQ ID NO: 286777 - DNA, 20 bp, Artificial Sequence
  Description of Artificial Sequence: Synthetic oligonucleotide
  Target: LAMA2; (-) strand; PAM type: YTN; PAM sequence: TTT
attaagttggttaccttgat

SEQ ID NO: 286778 - DNA, 20 bp, Artificial Sequence
  Description of Artificial Sequence: Synthetic oligonucleotide
  Target: LAMA2; (-) strand; PAM type: YTN; PAM sequence: CTT
tattaagttggttaccttga

SEQ ID NO: 286779 - DNA, 20 bp, Artificial Sequence
  Description of Artificial Sequence: Synthetic oligonucleotide
  Target: LAMA2; (-) strand; PAM type: YTN; PAM sequence: TTA
atctttattaagttggttac

SEQ ID NO: 286780 - DNA, 20 bp, Artificial Sequence
  Description of Artificial Sequence: Synthetic oligonucleotide
  Target: LAMA2; (-) strand; PAM type: YTN; PAM sequence: CTT
aatctttattaagttggtta

SEQ ID NO: 286781 - DNA, 20 bp, Artificial Sequence
  Description of Artificial Sequence: Synthetic oligonucleotide
  Target: LAMA2; (-) strand; PAM type: YTN; PAM sequence: TTA
tcttaatctttattaagttg

SEQ ID NO: 286782 - DNA, 20 bp, Artificial Sequence
  Description of Artificial Sequence: Synthetic oligonucleotide
  Target: LAMA2; (-) strand; PAM type: YTN; PAM sequence: TTA
attatcttaatctttattaa

SEQ ID NO: 286783 - DNA, 20 bp, Artificial Sequence
  Description of Artificial Sequence: Synthetic oligonucleotide
  Target: LAMA2; (-) strand; PAM type: YTN; PAM sequence: TTT
aattatcttaatctttatta

SEQ ID NO: 286784 - DNA, 20 bp, Artificial Sequence
  Description of Artificial Sequence: Synthetic oligonucleotide
  Target: LAMA2; (-) strand; PAM type: YTN; PAM sequence: CTA
tcatttaattatcttaatct

SEQ ID NO: 286785 - DNA, 20 bp, Artificial Sequence
  Description of Artificial Sequence: Synthetic oligonucleotide
  Target: LAMA2; (-) strand; PAM type: YTN; PAM sequence: TTC
tatcatttaattatcttaat

SEQ ID NO: 286786 - DNA, 20 bp, Artificial Sequence
  Description of Artificial Sequence: Synthetic oligonucleotide
  Target: LAMA2; (-) strand; PAM type: YTN; PAM sequence: TTC
aaaattctatcatttaatta

SEQ ID NO: 286787 - DNA, 20 bp, Artificial Sequence
  Description of Artificial Sequence: Synthetic oligonucleotide
  Target: LAMA2; (-) strand; PAM type: YTN; PAM sequence: CTT
caaaattctatcatttaatt

SEQ ID NO: 286788 - DNA, 20 bp, Artificial Sequence
  Description of Artificial Sequence: Synthetic oligonucleotide
  Target: LAMA2; (-) strand; PAM type: YTN; PAM sequence: CTA
cttcaaaattctatcattta

SEQ ID NO: 286789 - DNA, 20 bp, Artificial Sequence
  Description of Artificial Sequence: Synthetic oligonucleotide
  Target: LAMA2; (-) strand; PAM type: YTN; PAM sequence: CTG
ggaaactacttcaaaattct

SEQ ID NO: 286790 - DNA, 20 bp, Artificial Sequence
  Description of Artificial Sequence: Synthetic oligonucleotide
  Target: LAMA2; (-) strand; PAM type: YTN; PAM sequence: TTA
taaactgggaaactacttca

SEQ ID NO: 286791 - DNA, 20 bp, Artificial Sequence
  Description of Artificial Sequence: Synthetic oligonucleotide
  Target: LAMA2; (-) strand; PAM type: YTN; PAM sequence: CTT
ataaactgggaaactacttc

SEQ ID NO: 286792 - DNA, 20 bp, Artificial Sequence
  Description of Artificial Sequence: Synthetic oligonucleotide
  Target: LAMA2; (-) strand; PAM type: YTN; PAM sequence: TTC
ttataaactgggaaactact

SEQ ID NO: 286793 - DNA, 20 bp, Artificial Sequence
  Description of Artificial Sequence: Synthetic oligonucleotide
  Target: LAMA2; (-) strand; PAM type: YTN; PAM sequence: TTT
cttataaactgggaaactac

SEQ ID NO: 286794 - DNA, 20 bp, Artificial Sequence
  Description of Artificial Sequence: Synthetic oligonucleotide
  Target: LAMA2; (-) strand; PAM type: YTN; PAM sequence: TTT
tcttataaactgggaaacta

SEQ ID NO: 286795 - DNA, 20 bp, Artificial Sequence
  Description of Artificial Sequence: Synthetic oligonucleotide
  Target: LAMA2; (-) strand; PAM type: YTN; PAM sequence: TTG
aaatggaaataggagttttc

SEQ ID NO: 286796 - DNA, 20 bp, Artificial Sequence
  Description of Artificial Sequence: Synthetic oligonucleotide
  Target: LAMA2; (-) strand; PAM type: YTN; PAM sequence: TTA
ttgaaatggaaataggagtt

SEQ ID NO: 286797 - DNA, 20 bp, Artificial Sequence
  Description of Artificial Sequence: Synthetic oligonucleotide
  Target: LAMA2; (-) strand; PAM type: YTN; PAM sequence: CTT
attgaaatggaaataggagt

SEQ ID NO: 286798 - DNA, 20 bp, Artificial Sequence
  Description of Artificial Sequence: Synthetic oligonucleotide
  Target: LAMA2; (-) strand; PAM type: YTN; PAM sequence: TTA
ccttattgaaatggaaatag

SEQ ID NO: 286799 - DNA, 20 bp, Artificial Sequence
  Description of Artificial Sequence: Synthetic oligonucleotide
  Target: LAMA2; (-) strand; PAM type: YTN; PAM sequence: TTA
catgcatacacagttacctt

SEQ ID NO: 286800 - DNA, 20 bp, Artificial Sequence
  Description of Artificial Sequence: Synthetic oligonucleotide
  Target: LAMA2; (-) strand; PAM type: YTN; PAM sequence: TTT
acatgcatacacagttacct

SEQ ID NO: 286801 - DNA, 20 bp, Artificial Sequence
  Description of Artificial Sequence: Synthetic oligonucleotide
  Target: LAMA2; (-) strand; PAM type: YTN; PAM sequence: TTC
atacacatgtgtttacatgc

SEQ ID NO: 286802 - DNA, 20 bp, Artificial Sequence
  Description of Artificial Sequence: Synthetic oligonucleotide
  Target: LAMA2; (-) strand; PAM type: YTN; PAM sequence: CTC
ccagacatgtataaaattca

SEQ ID NO: 286803 - DNA, 20 bp, Artificial Sequence
  Description of Artificial Sequence: Synthetic oligonucleotide
  Target: LAMA2; (-) strand; PAM type: YTN; PAM sequence: CTA
agaagtatgacaaacatacc

SEQ ID NO: 286804 - DNA, 20 bp, Artificial Sequence
  Description of Artificial Sequence: Synthetic oligonucleotide
  Target: LAMA2; (-) strand; PAM type: YTN; PAM sequence: TTC
ctaagaagtatgacaaacat

SEQ ID NO: 286805 - DNA, 20 bp, Artificial Sequence
  Description of Artificial Sequence: Synthetic oligonucleotide
  Target: LAMA2; (-) strand; PAM type: YTN; PAM sequence: TTG
tcagttcctaagaagtatga

SEQ ID NO: 286806 - DNA, 20 bp, Artificial Sequence
  Description of Artificial Sequence: Synthetic oligonucleotide
  Target: LAMA2; (-) strand; PAM type: YTN; PAM sequence: TTT
gtcagttcctaagaagtatg

SEQ ID NO: 286807 - DNA, 20 bp, Artificial Sequence
  Description of Artificial Sequence: Synthetic oligonucleotide
  Target: LAMA2; (-) strand; PAM type: YTN; PAM sequence: CTG
gaaggtttgtcagttcctaa

SEQ ID NO: 286808 - DNA, 20 bp, Artificial Sequence
  Description of Artificial Sequence: Synthetic oligonucleotide
  Target: LAMA2; (-) strand; PAM type: YTN; PAM sequence: CTG
gtcaatacctggaaggtttg

SEQ ID NO: 286809 - DNA, 20 bp, Artificial Sequence
  Description of Artificial Sequence: Synthetic oligonucleotide
  Target: LAMA2; (-) strand; PAM type: YTN; PAM sequence: CTC
tggtcaatacctggaaggtt

SEQ ID NO: 286810 - DNA, 20 bp, Artificial Sequence
  Description of Artificial Sequence: Synthetic oligonucleotide
  Target: LAMA2; (-) strand; PAM type: YTN; PAM sequence: TTC
ctctggtcaatacctggaag

SEQ ID NO: 286811 - DNA, 20 bp, Artificial Sequence
  Description of Artificial Sequence: Synthetic oligonucleotide
  Target: LAMA2; (-) strand; PAM type: YTN; PAM sequence: TTG
ttcctctggtcaatacctgg

SEQ ID NO: 286812 - DNA, 20 bp, Artificial Sequence
  Description of Artificial Sequence: Synthetic oligonucleotide
  Target: LAMA2; (-) strand; PAM type: YTN; PAM sequence: CTA
ccagacacaagatgaagggg

SEQ ID NO: 286813 - DNA, 20 bp, Artificial Sequence
  Description of Artificial Sequence: Synthetic oligonucleotide
  Target: LAMA2; (-) strand; PAM type: YTN; PAM sequence: TTC
ctaccagacacaagatgaag

SEQ ID NO: 286814 - DNA, 20 bp, Artificial Sequence
  Description of Artificial Sequence: Synthetic oligonucleotide
  Target: LAMA2; (-) strand; PAM type: YTN; PAM sequence: CTG
aaacagcgacacccccaaat

SEQ ID NO: 286815 - DNA, 20 bp, Artificial Sequence
  Description of Artificial Sequence: Synthetic oligonucleotide
  Target: LAMA2; (-) strand; PAM type: YTN; PAM sequence: TTC
aggcaaaataggaagcctga

SEQ ID NO: 286816 - DNA, 20 bp, Artificial Sequence
  Description of Artificial Sequence: Synthetic oligonucleotide
  Target: LAMA2; (-) strand; PAM type: YTN; PAM sequence: CTT
caggcaaaataggaagcctg

SEQ ID NO: 286817 - DNA, 20 bp, Artificial Sequence
  Description of Artificial Sequence: Synthetic oligonucleotide
  Target: LAMA2; (-) strand; PAM type: YTN; PAM sequence: TTC
ttcaggcaaaataggaagcc

SEQ ID NO: 286818 - DNA, 20 bp, Artificial Sequence
  Description of Artificial Sequence: Synthetic oligonucleotide
  Target: LAMA2; (-) strand; PAM type: YTN; PAM sequence: TTT
cttcaggcaaaataggaagc

SEQ ID NO: 286819 - DNA, 20 bp, Artificial Sequence
  Description of Artificial Sequence: Synthetic oligonucleotide
  Target: LAMA2; (-) strand; PAM type: YTN; PAM sequence: CTT
tcttcaggcaaaataggaag

SEQ ID NO: 286820 - DNA, 20 bp, Artificial Sequence
  Description of Artificial Sequence: Synthetic oligonucleotide
  Target: LAMA2; (-) strand; PAM type: YTN; PAM sequence: TTG
cataagaataagtggcagta

SEQ ID NO: 286821 - DNA, 20 bp, Artificial Sequence
  Description of Artificial Sequence: Synthetic oligonucleotide
  Target: LAMA2; (-) strand; PAM type: YTN; PAM sequence: TTG
tattgcataagaataagtgg

SEQ ID NO: 286822 - DNA, 20 bp, Artificial Sequence
  Description of Artificial Sequence: Synthetic oligonucleotide
  Target: LAMA2; (-) strand; PAM type: YTN; PAM sequence: CTT
gtattgcataagaataagtg

SEQ ID NO: 286823 - DNA, 20 bp, Artificial Sequence
  Description of Artificial Sequence: Synthetic oligonucleotide
  Target: LAMA2; (-) strand; PAM type: YTN; PAM sequence: TTG
gcttgtattgcataagaata

SEQ ID NO: 286824 - DNA, 20 bp, Artificial Sequence
  Description of Artificial Sequence: Synthetic oligonucleotide
  Target: LAMA2; (-) strand; PAM type: YTN; PAM sequence: TTT
ggcttgtattgcataagaat

SEQ ID NO: 286825 - DNA, 20 bp, Artificial Sequence
  Description of Artificial Sequence: Synthetic oligonucleotide
  Target: LAMA2; (-) strand; PAM type: YTN; PAM sequence: CTT
tggcttgtattgcataagaa

SEQ ID NO: 286826 - DNA, 20 bp, Artificial Sequence
  Description of Artificial Sequence: Synthetic oligonucleotide
  Target: LAMA2; (-) strand; PAM type: YTN; PAM sequence: TTA
tgctttggcttgtattgcat

SEQ ID NO: 286827 - DNA, 20 bp, Artificial Sequence
  Description of Artificial Sequence: Synthetic oligonucleotide
  Target: LAMA2; (-) strand; PAM type: YTN; PAM sequence: CTT
atgctttggcttgtattgca

SEQ ID NO: 286828 - DNA, 20 bp, Artificial Sequence
  Description of Artificial Sequence: Synthetic oligonucleotide
  Target: LAMA2; (-) strand; PAM type: YTN; PAM sequence: CTC
ttatgctttggcttgtattg

SEQ ID NO: 286829 - DNA, 20 bp, Artificial Sequence
  Description of Artificial Sequence: Synthetic oligonucleotide
  Target: LAMA2; (-) strand; PAM type: YTN; PAM sequence: CTG
tgtacaacaaagacaagcaa

SEQ ID NO: 286830 - DNA, 20 bp, Artificial Sequence
  Description of Artificial Sequence: Synthetic oligonucleotide
  Target: LAMA2; (-) strand; PAM type: YTN; PAM sequence: CTA
aaggaggagctgtgtacaac

SEQ ID NO: 286831 - DNA, 20 bp, Artificial Sequence
  Description of Artificial Sequence: Synthetic oligonucleotide
  Target: LAMA2; (-) strand; PAM type: YTN; PAM sequence: CTA
tgtagactaaaggaggagct

SEQ ID NO: 286832 - DNA, 20 bp, Artificial Sequence
  Description of Artificial Sequence: Synthetic oligonucleotide
  Target: LAMA2; (-) strand; PAM type: YTN; PAM sequence: CTA
tggtggctatgtagactaaa

SEQ ID NO: 286833 - DNA, 20 bp, Artificial Sequence
  Description of Artificial Sequence: Synthetic oligonucleotide
  Target: LAMA2; (-) strand; PAM type: YTN; PAM sequence: TTC
tatggtggctatgtagacta

SEQ ID NO: 286834 - DNA, 20 bp, Artificial Sequence
  Description of Artificial Sequence: Synthetic oligonucleotide
  Target: LAMA2; (-) strand; PAM type: YTN; PAM sequence: TTT
ctatggtggctatgtagact

SEQ ID NO: 286835 - DNA, 20 bp, Artificial Sequence
  Description of Artificial Sequence: Synthetic oligonucleotide
  Target: LAMA2; (-) strand; PAM type: YTN; PAM sequence: TTT
tctatggtggctatgtagac

SEQ ID NO: 286836 - DNA, 20 bp, Artificial Sequence
  Description of Artificial Sequence: Synthetic oligonucleotide
  Target: LAMA2; (-) strand; PAM type: YTN; PAM sequence: TTT
ttctatggtggctatgtaga

SEQ ID NO: 286837 - DNA, 20 bp, Artificial Sequence
  Description of Artificial Sequence: Synthetic oligonucleotide
  Target: LAMA2; (-) strand; PAM type: YTN; PAM sequence: CTG
catttttctatggtggctat

SEQ ID NO: 286838 - DNA, 20 bp, Artificial Sequence
  Description of Artificial Sequence: Synthetic oligonucleotide
  Target: LAMA2; (-) strand; PAM type: YTN; PAM sequence: TTG
aaactgcatttttctatggt

SEQ ID NO: 286839 - DNA, 20 bp, Artificial Sequence
  Description of Artificial Sequence: Synthetic oligonucleotide
  Target: LAMA2; (-) strand; PAM type: YTN; PAM sequence: TTT
gaaactgcatttttctatgg

SEQ ID NO: 286840 - DNA, 20 bp, Artificial Sequence
  Description of Artificial Sequence: Synthetic oligonucleotide
  Target: LAMA2; (-) strand; PAM type: YTN; PAM sequence: TTT
tgaaactgcatttttctatg

SEQ ID NO: 286841 - DNA, 20 bp, Artificial Sequence
  Description of Artificial Sequence: Synthetic oligonucleotide
  Target: LAMA2; (-) strand; PAM type: YTN; PAM sequence: TTC
agtgttttgaaactgcattt

SEQ ID NO: 286842 - DNA, 20 bp, Artificial Sequence
  Description of Artificial Sequence: Synthetic oligonucleotide
  Target: LAMA2; (-) strand; PAM type: YTN; PAM sequence: TTT
cagtgttttgaaactgcatt

SEQ ID NO: 286843 - DNA, 20 bp, Artificial Sequence
  Description of Artificial Sequence: Synthetic oligonucleotide
  Target: LAMA2; (-) strand; PAM type: YTN; PAM sequence: TTA
cataagaatttcagtgtttt

SEQ ID NO: 286844 - DNA, 20 bp, Artificial Sequence
  Description of Artificial Sequence: Synthetic oligonucleotide
  Target: LAMA2; (-) strand; PAM type: YTN; PAM sequence: CTG
gtatgttacataagaatttc

SEQ ID NO: 286845 - DNA, 20 bp, Artificial Sequence
  Description of Artificial Sequence: Synthetic oligonucleotide
  Target: LAMA2; (-) strand; PAM type: YTN; PAM sequence: TTA
agtagggtggacctggtatg

SEQ ID NO: 286846 - DNA, 20 bp, Artificial Sequence
  Description of Artificial Sequence: Synthetic oligonucleotide
  Target: LAMA2; (-) strand; PAM type: YTN; PAM sequence: TTT
aagtagggtggacctggtat

SEQ ID NO: 286847 - DNA, 20 bp, Artificial Sequence
  Description of Artificial Sequence: Synthetic oligonucleotide
  Target: LAMA2; (-) strand; PAM type: YTN; PAM sequence: TTT
taagtagggtggacctggta

SEQ ID NO: 286848 - DNA, 20 bp, Artificial Sequence
  Description of Artificial Sequence: Synthetic oligonucleotide
  Target: LAMA2; (-) strand; PAM type: YTN; PAM sequence: TTC
ccattttaagtagggtggac

SEQ ID NO: 286849 - DNA, 20 bp, Artificial Sequence
  Description of Artificial Sequence: Synthetic oligonucleotide
  Target: LAMA2; (-) strand; PAM type: YTN; PAM sequence: CTT
cccattttaagtagggtgga

SEQ ID NO: 286850 - DNA, 20 bp, Artificial Sequence
  Description of Artificial Sequence: Synthetic oligonucleotide
  Target: LAMA2; (-) strand; PAM type: YTN; PAM sequence: TTA
cttcccattttaagtagggt

SEQ ID NO: 286851 - DNA, 20 bp, Artificial Sequence
  Description of Artificial Sequence: Synthetic oligonucleotide
  Target: LAMA2; (-) strand; PAM type: YTN; PAM sequence: CTC
agttacttcccattttaagt

SEQ ID NO: 286852 - DNA, 20 bp, Artificial Sequence
  Description of Artificial Sequence: Synthetic oligonucleotide
  Target: LAMA2; (-) strand; PAM type: YTN; PAM sequence: TTC
tcagttacttcccattttaa

SEQ ID NO: 286853 - DNA, 20 bp, Artificial Sequence
  Description of Artificial Sequence: Synthetic oligonucleotide
  Target: LAMA2; (-) strand; PAM type: YTN; PAM sequence: CTG
aatcagttctcagttacttc

SEQ ID NO: 286854 - DNA, 20 bp, Artificial Sequence
  Description of Artificial Sequence: Synthetic oligonucleotide
  Target: LAMA2; (-) strand; PAM type: YTN; PAM sequence: CTC
caaagatagaataactgaat

SEQ ID NO: 286855 - DNA, 20 bp, Artificial Sequence
  Description of Artificial Sequence: Synthetic oligonucleotide
  Target: LAMA2; (-) strand; PAM type: YTN; PAM sequence: TTA
aagctccaaagatagaataa

SEQ ID NO: 286856 - DNA, 20 bp, Artificial Sequence
  Description of Artificial Sequence: Synthetic oligonucleotide
  Target: LAMA2; (-) strand; PAM type: YTN; PAM sequence: TTG
cattaaagctccaaagatag

SEQ ID NO: 286857 - DNA, 20 bp, Artificial Sequence
  Description of Artificial Sequence: Synthetic oligonucleotide
  Target: LAMA2; (-) strand; PAM type: YTN; PAM sequence: TTG
ataattgcattaaagctcca

SEQ ID NO: 286858 - DNA, 20 bp, Artificial Sequence
  Description of Artificial Sequence: Synthetic oligonucleotide
  Target: LAMA2; (-) strand; PAM type: YTN; PAM sequence: CTA
gatgttgataattgcattaa

SEQ ID NO: 286859 - DNA, 20 bp, Artificial Sequence
  Description of Artificial Sequence: Synthetic oligonucleotide
  Target: LAMA2; (-) strand; PAM type: YTN; PAM sequence: CTA
tatggtactagatgttgata

SEQ ID NO: 286860 - DNA, 20 bp, Artificial Sequence
  Description of Artificial Sequence: Synthetic oligonucleotide
  Target: LAMA2; (-) strand; PAM type: YTN; PAM sequence: CTA
taagtaatctatatggtact

SEQ ID NO: 286861 - DNA, 20 bp, Artificial Sequence
  Description of Artificial Sequence: Synthetic oligonucleotide
  Target: LAMA2; (-) strand; PAM type: YTN; PAM sequence: TTC
tataagtaatctatatggta

SEQ ID NO: 286862 - DNA, 20 bp, Artificial Sequence
  Description of Artificial Sequence: Synthetic oligonucleotide
  Target: LAMA2; (-) strand; PAM type: YTN; PAM sequence: CTG
aagacagggatagttctata

SEQ ID NO: 286863 - DNA, 20 bp, Artificial Sequence
  Description of Artificial Sequence: Synthetic oligonucleotide
  Target: LAMA2; (-) strand; PAM type: YTN; PAM sequence: TTG
ggaaaacaagaagagaaaat

SEQ ID NO: 286864 - DNA, 20 bp, Artificial Sequence
  Description of Artificial Sequence: Synthetic oligonucleotide
  Target: LAMA2; (-) strand; PAM type: YTN; PAM sequence: TTG
agaattgggaaaacaagaag

SEQ ID NO: 286865 - DNA, 20 bp, Artificial Sequence
  Description of Artificial Sequence: Synthetic oligonucleotide
  Target: LAMA2; (-) strand; PAM type: YTN; PAM sequence: TTA
acagggagttgagaattggg

SEQ ID NO: 286866 - DNA, 20 bp, Artificial Sequence
  Description of Artificial Sequence: Synthetic oligonucleotide
  Target: LAMA2; (-) strand; PAM type: YTN; PAM sequence: TTT
aacagggagttgagaattgg

SEQ ID NO: 286867 - DNA, 20 bp, Artificial Sequence
  Description of Artificial Sequence: Synthetic oligonucleotide
  Target: LAMA2; (-) strand; PAM type: YTN; PAM sequence: TTG
ggtttaacagggagttgaga

SEQ ID NO: 286868 - DNA, 20 bp, Artificial Sequence
  Description of Artificial Sequence: Synthetic oligonucleotide
  Target: LAMA2; (-) strand; PAM type: YTN; PAM sequence: TTT
gggtttaacagggagttgag

SEQ ID NO: 286869 - DNA, 20 bp, Artificial Sequence
  Description of Artificial Sequence: Synthetic oligonucleotide
  Target: LAMA2; (-) strand; PAM type: YTN; PAM sequence: CTT
tgggtttaacagggagttga

SEQ ID NO: 286870 - DNA, 20 bp, Artificial Sequence
  Description of Artificial Sequence: Synthetic oligonucleotide
  Target: LAMA2; (-) strand; PAM type: YTN; PAM sequence: CTG
ctttgggtttaacagggagt

SEQ ID NO: 286871 - DNA, 20 bp, Artificial Sequence
  Description of Artificial Sequence: Synthetic oligonucleotide
  Target: LAMA2; (-) strand; PAM type: YTN; PAM sequence: TTA
gctgctttgggtttaacagg

SEQ ID NO: 286872 - DNA, 20 bp, Artificial Sequence
  Description of Artificial Sequence: Synthetic oligonucleotide
  Target: LAMA2; (-) strand; PAM type: YTN; PAM sequence: CTG
ttagctgctttgggtttaac

SEQ ID NO: 286873 - DNA, 20 bp, Artificial Sequence
  Description of Artificial Sequence: Synthetic oligonucleotide
  Target: LAMA2; (-) strand; PAM type: YTN; PAM sequence: TTC
aactgttagctgctttgggt

SEQ ID NO: 286874 - DNA, 20 bp, Artificial Sequence
  Description of Artificial Sequence: Synthetic oligonucleotide
  Target: LAMA2; (-) strand; PAM type: YTN; PAM sequence: TTT
caactgttagctgctttggg

SEQ ID NO: 286875 - DNA, 20 bp, Artificial Sequence
  Description of Artificial Sequence: Synthetic oligonucleotide
  Target: LAMA2; (-) strand; PAM type: YTN; PAM sequence: CTT
tcaactgttagctgctttgg

SEQ ID NO: 286876 - DNA, 20 bp, Artificial Sequence
  Description of Artificial Sequence: Synthetic oligonucleotide
  Target: LAMA2; (-) strand; PAM type: YTN; PAM sequence: TTA
accatacctttcaactgtta

SEQ ID NO: 286877 - DNA, 20 bp, Artificial Sequence
  Description of Artificial Sequence: Synthetic oligonucleotide
  Target: LAMA2; (-) strand; PAM type: YTN; PAM sequence: CTT
aaccatacctttcaactgtt

SEQ ID NO: 286878 - DNA, 20 bp, Artificial Sequence
  Description of Artificial Sequence: Synthetic oligonucleotide
  Target: LAMA2; (-) strand; PAM type: YTN; PAM sequence: CTA
ggcccttaaccatacctttc

SEQ ID NO: 286879 - DNA, 20 bp, Artificial Sequence
  Description of Artificial Sequence: Synthetic oligonucleotide
  Target: LAMA2; (-) strand; PAM type: YTN; PAM sequence: CTA
gccctaggcccttaaccata

SEQ ID NO: 286880 - DNA, 20 bp, Artificial Sequence
  Description of Artificial Sequence: Synthetic oligonucleotide
  Target: LAMA2; (-) strand; PAM type: YTN; PAM sequence: TTC
atgtctagccctaggccctt

SEQ ID NO: 286881 - DNA, 20 bp, Artificial Sequence
  Description of Artificial Sequence: Synthetic oligonucleotide
  Target: LAMA2; (-) strand; PAM type: YTN; PAM sequence: CTT
catgtctagccctaggccct

SEQ ID NO: 286882 - DNA, 20 bp, Artificial Sequence
  Description of Artificial Sequence: Synthetic oligonucleotide
  Target: LAMA2; (-) strand; PAM type: YTN; PAM sequence: CTG
atcagcttcatgtctagccc

SEQ ID NO: 286883 - DNA, 20 bp, Artificial Sequence
  Description of Artificial Sequence: Synthetic oligonucleotide
  Target: LAMA2; (-) strand; PAM type: YTN; PAM sequence: CTC
tgatcagcttcatgtctagc

SEQ ID NO: 286884 - DNA, 20 bp, Artificial Sequence
  Description of Artificial Sequence: Synthetic oligonucleotide
  Target: LAMA2; (-) strand; PAM type: YTN; PAM sequence: CTG
tctctgatcagcttcatgtc

SEQ ID NO: 286885 - DNA, 20 bp, Artificial Sequence
  Description of Artificial Sequence: Synthetic oligonucleotide
  Target: LAMA2; (-) strand; PAM type: YTN; PAM sequence: CTC
tgtctctgatcagcttcatg

SEQ ID NO: 286886 - DNA, 20 bp, Artificial Sequence
  Description of Artificial Sequence: Synthetic oligonucleotide
  Target: LAMA2; (-) strand; PAM type: YTN; PAM sequence: TTC
tctgtctctgatcagcttca

SEQ ID NO: 286887 - DNA, 20 bp, Artificial Sequence
  Description of Artificial Sequence: Synthetic oligonucleotide
  Target: LAMA2; (-) strand; PAM type: YTN; PAM sequence: CTT
ctctgtctctgatcagcttc

SEQ ID NO: 286888 - DNA, 20 bp, Artificial Sequence
  Description of Artificial Sequence: Synthetic oligonucleotide
  Target: LAMA2; (-) strand; PAM type: YTN; PAM sequence: TTA
agtcttctctgtctctgatc

SEQ ID NO: 286889 - DNA, 20 bp, Artificial Sequence
  Description of Artificial Sequence: Synthetic oligonucleotide
  Target: LAMA2; (-) strand; PAM type: YTN; PAM sequence: TTT
aagtcttctctgtctctgat

SEQ ID NO: 286890 - DNA, 20 bp, Artificial Sequence
  Description of Artificial Sequence: Synthetic oligonucleotide
  Target: LAMA2; (-) strand; PAM type: YTN; PAM sequence: CTT
taagtcttctctgtctctga

SEQ ID NO: 286891 - DNA, 20 bp, Artificial Sequence
  Description of Artificial Sequence: Synthetic oligonucleotide
  Target: LAMA2; (-) strand; PAM type: YTN; PAM sequence: TTC
tttaagtcttctctgtctct

SEQ ID NO: 286892 - DNA, 20 bp, Artificial Sequence
  Description of Artificial Sequence: Synthetic oligonucleotide
  Target: LAMA2; (-) strand; PAM type: YTN; PAM sequence: TTA
accagttctttaagtcttct

SEQ ID NO: 286893 - DNA, 20 bp, Artificial Sequence
  Description of Artificial Sequence: Synthetic oligonucleotide
  Target: LAMA2; (-) strand; PAM type: YTN; PAM sequence: CTA
tgtatcacccagagtcaaca

SEQ ID NO: 286894 - DNA, 20 bp, Artificial Sequence
  Description of Artificial Sequence: Synthetic oligonucleotide
  Target: LAMA2; (-) strand; PAM type: YTN; PAM sequence: CTC
tatgtatcacccagagtcaa

SEQ ID NO: 286895 - DNA, 20 bp, Artificial Sequence
  Description of Artificial Sequence: Synthetic oligonucleotide
  Target: LAMA2; (-) strand; PAM type: YTN; PAM sequence: CTA
caaacagcatgaaactctat

SEQ ID NO: 286896 - DNA, 20 bp, Artificial Sequence
  Description of Artificial Sequence: Synthetic oligonucleotide
  Target: LAMA2; (-) strand; PAM type: YTN; PAM sequence: TTA
agtatctacaaacagcatga

SEQ ID NO: 286897 - DNA, 20 bp, Artificial Sequence
  Description of Artificial Sequence: Synthetic oligonucleotide
  Target: LAMA2; (-) strand; PAM type: YTN; PAM sequence: TTA
tggaaaaaattaagtatcta

SEQ ID NO: 286898 - DNA, 20 bp, Artificial Sequence
  Description of Artificial Sequence: Synthetic oligonucleotide
  Target: LAMA2; (-) strand; PAM type: YTN; PAM sequence: TTA
ttatggaaaaaattaagtat

SEQ ID NO: 286899 - DNA, 20 bp, Artificial Sequence
  Description of Artificial Sequence: Synthetic oligonucleotide
  Target: LAMA2; (-) strand; PAM type: YTN; PAM sequence: TTT
attatggaaaaaattaagta

SEQ ID NO: 286900 - DNA, 20 bp, Artificial Sequence
  Description of Artificial Sequence: Synthetic oligonucleotide
  Target: LAMA2; (-) strand; PAM type: YTN; PAM sequence: TTT
tattatggaaaaaattaagt

SEQ ID NO: 286901 - DNA, 20 bp, Artificial Sequence
  Description of Artificial Sequence: Synthetic oligonucleotide
  Target: LAMA2; (-) strand; PAM type: YTN; PAM sequence: TTT
ttattatggaaaaaattaag

SEQ ID NO: 286902 - DNA, 20 bp, Artificial Sequence
  Description of Artificial Sequence: Synthetic oligonucleotide
  Target: LAMA2; (-) strand; PAM type: YTN; PAM sequence: CTT
tttattatggaaaaaattaa

SEQ ID NO: 286903 - DNA, 20 bp, Artificial Sequence
  Description of Artificial Sequence: Synthetic oligonucleotide
  Target: LAMA2; (-) strand; PAM type: YTN; PAM sequence: TTA
aactttttattatggaaaaa

SEQ ID NO: 286904 - DNA, 20 bp, Artificial Sequence
  Description of Artificial Sequence: Synthetic oligonucleotide
  Target: LAMA2; (-) strand; PAM type: YTN; PAM sequence: TTT
aaactttttattatggaaaa

SEQ ID NO: 286905 - DNA, 20 bp, Artificial Sequence
  Description of Artificial Sequence: Synthetic oligonucleotide
  Target: LAMA2; (-) strand; PAM type: YTN; PAM sequence: TTT
taaactttttattatggaaa

SEQ ID NO: 286906 - DNA, 20 bp, Artificial Sequence
  Description of Artificial Sequence: Synthetic oligonucleotide
  Target: LAMA2; (-) strand; PAM type: YTN; PAM sequence: CTT
ttaaactttttattatggaa

SEQ ID NO: 286907 - DNA, 20 bp, Artificial Sequence
  Description of Artificial Sequence: Synthetic oligonucleotide
  Target: LAMA2; (-) strand; PAM type: YTN; PAM sequence: TTC
ttttaaactttttattatgg

SEQ ID NO: 286908 - DNA, 20 bp, Artificial Sequence
  Description of Artificial Sequence: Synthetic oligonucleotide
  Target: LAMA2; (-) strand; PAM type: YTN; PAM sequence: TTT
cttttaaactttttattatg

SEQ ID NO: 286909 - DNA, 20 bp, Artificial Sequence
  Description of Artificial Sequence: Synthetic oligonucleotide
  Target: LAMA2; (-) strand; PAM type: YTN; PAM sequence: CTT
tcttttaaactttttattat

SEQ ID NO: 286910 - DNA, 20 bp, Artificial Sequence
  Description of Artificial Sequence: Synthetic oligonucleotide
  Target: LAMA2; (-) strand; PAM type: YTN; PAM sequence: CTC
tttcttttaaactttttatt

SEQ ID NO: 286911 - DNA, 20 bp, Artificial Sequence
  Description of Artificial Sequence: Synthetic oligonucleotide
  Target: LAMA2; (-) strand; PAM type: YTN; PAM sequence: TTG
cacatggctctttcttttaa

SEQ ID NO: 286912 - DNA, 20 bp, Artificial Sequence
  Description of Artificial Sequence: Synthetic oligonucleotide
  Target: LAMA2; (-) strand; PAM type: YTN; PAM sequence: CTA
cagcacatgccattgcacat

SEQ ID NO: 286913 - DNA, 20 bp, Artificial Sequence
  Description of Artificial Sequence: Synthetic oligonucleotide
  Target: LAMA2; (-) strand; PAM type: YTN; PAM sequence: CTG
ggactacagcacatgccatt

SEQ ID NO: 286914 - DNA, 20 bp, Artificial Sequence
  Description of Artificial Sequence: Synthetic oligonucleotide
  Target: LAMA2; (-) strand; PAM type: YTN; PAM sequence: CTC
ccaagtagctgggactacag

SEQ ID NO: 286915 - DNA, 20 bp, Artificial Sequence
  Description of Artificial Sequence: Synthetic oligonucleotide
  Target: LAMA2; (-) strand; PAM type: YTN; PAM sequence: CTC
agcctcccaagtagctggga

SEQ ID NO: 286916 - DNA, 20 bp, Artificial Sequence
  Description of Artificial Sequence: Synthetic oligonucleotide
  Target: LAMA2; (-) strand; PAM type: YTN; PAM sequence: CTG
cctcagcctcccaagtagct

SEQ ID NO: 286917 - DNA, 20 bp, Artificial Sequence
  Description of Artificial Sequence: Synthetic oligonucleotide
  Target: LAMA2; (-) strand; PAM type: YTN; PAM sequence: CTC
ctgcctcagcctcccaagta

SEQ ID NO: 286918 - DNA, 20 bp, Artificial Sequence
  Description of Artificial Sequence: Synthetic oligonucleotide
  Target: LAMA2; (-) strand; PAM type: YTN; PAM sequence: CTG
aagtgatcctcctgcctcag

SEQ ID NO: 286919 - DNA, 20 bp, Artificial Sequence
  Description of Artificial Sequence: Synthetic oligonucleotide
  Target: LAMA2; (-) strand; PAM type: YTN; PAM sequence: CTG
ggctgaagtgatcctcctgc

SEQ ID NO: 286920 - DNA, 20 bp, Artificial Sequence
  Description of Artificial Sequence: Synthetic oligonucleotide
  Target: LAMA2; (-) strand; PAM type: YTN; PAM sequence: TTC
ctgggctgaagtgatcctcc

SEQ ID NO: 286921 - DNA, 20 bp, Artificial Sequence
  Description of Artificial Sequence: Synthetic oligonucleotide
  Target: LAMA2; (-) strand; PAM type: YTN; PAM sequence: TTG
aattcctgggctgaagtgat

SEQ ID NO: 286922 - DNA, 20 bp, Artificial Sequence
  Description of Artificial Sequence: Synthetic oligonucleotide
  Target: LAMA2; (-) strand; PAM type: YTN; PAM sequence: CTT
gaattcctgggctgaagtga

SEQ ID NO: 286923 - DNA, 20 bp, Artificial Sequence
  Description of Artificial Sequence: Synthetic oligonucleotide
  Target: LAMA2; (-) strand; PAM type: YTN; PAM sequence: TTC
acaggcatgatcatcatgga

SEQ ID NO: 286924 - DNA, 20 bp, Artificial Sequence
  Description of Artificial Sequence: Synthetic oligonucleotide
  Target: LAMA2; (-) strand; PAM type: YTN; PAM sequence: TTA
ttcacaggcatgatcatcat

SEQ ID NO: 286925 - DNA, 20 bp, Artificial Sequence
  Description of Artificial Sequence: Synthetic oligonucleotide
  Target: LAMA2; (-) strand; PAM type: YTN; PAM sequence: CTG
cagtggttattcacaggcat

SEQ ID NO: 286926 - DNA, 20 bp, Artificial Sequence
  Description of Artificial Sequence: Synthetic oligonucleotide
  Target: LAMA2; (-) strand; PAM type: YTN; PAM sequence: CTG
gactgcagtggttattcaca

SEQ ID NO: 286927 - DNA, 20 bp, Artificial Sequence
  Description of Artificial Sequence: Synthetic oligonucleotide
  Target: LAMA2; (-) strand; PAM type: YTN; PAM sequence: TTG
cccaggctggactgcagtgg

SEQ ID NO: 286928 - DNA, 20 bp, Artificial Sequence
  Description of Artificial Sequence: Synthetic oligonucleotide
  Target: LAMA2; (-) strand; PAM type: YTN; PAM sequence: CTA
tgttgcccaggctggactgc

SEQ ID NO: 286929 - DNA, 20 bp, Artificial Sequence
  Description of Artificial Sequence: Synthetic oligonucleotide
  Target: LAMA2; (-) strand; PAM type: YTN; PAM sequence: TTG
ctatgttgcccaggctggac

SEQ ID NO: 286930 - DNA, 20 bp, Artificial Sequence
  Description of Artificial Sequence: Synthetic oligonucleotide
  Target: LAMA2; (-) strand; PAM type: YTN; PAM sequence: CTT
gctatgttgcccaggctgga

SEQ ID NO: 286931 - DNA, 20 bp, Artificial Sequence
  Description of Artificial Sequence: Synthetic oligonucleotide
  Target: LAMA2; (-) strand; PAM type: YTN; PAM sequence: TTA
agagatgaagtcttgctatg

SEQ ID NO: 286932 - DNA, 20 bp, Artificial Sequence
  Description of Artificial Sequence: Synthetic oligonucleotide
  Target: LAMA2; (-) strand; PAM type: YTN; PAM sequence: TTT
aagagatgaagtcttgctat

SEQ ID NO: 286933 - DNA, 20 bp, Artificial Sequence
  Description of Artificial Sequence: Synthetic oligonucleotide
  Target: LAMA2; (-) strand; PAM type: YTN; PAM sequence: TTT
taagagatgaagtcttgcta

SEQ ID NO: 286934 - DNA, 20 bp, Artificial Sequence
  Description of Artificial Sequence: Synthetic oligonucleotide
  Target: LAMA2; (-) strand; PAM type: YTN; PAM sequence: TTT
ttaagagatgaagtcttgct

SEQ ID NO: 286935 - DNA, 20 bp, Artificial Sequence
  Description of Artificial Sequence: Synthetic oligonucleotide
  Target: LAMA2; (-) strand; PAM type: YTN; PAM sequence: TTT
tttaagagatgaagtcttgc

SEQ ID NO: 286936 - DNA, 20 bp, Artificial Sequence
  Description of Artificial Sequence: Synthetic oligonucleotide
  Target: LAMA2; (-) strand; PAM type: YTN; PAM sequence: TTT
ttttaagagatgaagtcttg

SEQ ID NO: 286937 - DNA, 20 bp, Artificial Sequence
  Description of Artificial Sequence: Synthetic oligonucleotide
  Target: LAMA2; (-) strand; PAM type: YTN; PAM sequence: TTT
tttttaagagatgaagtctt

SEQ ID NO: 286938 - DNA, 20 bp, Artificial Sequence
  Description of Artificial Sequence: Synthetic oligonucleotide
  Target: LAMA2; (-) strand; PAM type: YTN; PAM sequence: TTT
ttttttaagagatgaagtct

SEQ ID NO: 286939 - DNA, 20 bp, Artificial Sequence
  Description of Artificial Sequence: Synthetic oligonucleotide
  Target: LAMA2; (-) strand; PAM type: YTN; PAM sequence: TTT
tttttttaagagatgaagtc

SEQ ID NO: 286940 - DNA, 20 bp, Artificial Sequence
  Description of Artificial Sequence: Synthetic oligonucleotide
  Target: LAMA2; (-) strand; PAM type: YTN; PAM sequence: CTT
ttttttttaagagatgaagt

SEQ ID NO: 286941 - DNA, 20 bp, Artificial Sequence
  Description of Artificial Sequence: Synthetic oligonucleotide
  Target: LAMA2; (-) strand; PAM type: YTN; PAM sequence: TTA
taacttttttttttaagaga

SEQ ID NO: 286942 - DNA, 20 bp, Artificial Sequence
  Description of Artificial Sequence: Synthetic oligonucleotide
  Target: LAMA2; (-) strand; PAM type: YTN; PAM sequence: TTT
ataacttttttttttaagag

SEQ ID NO: 286943 - DNA, 20 bp, Artificial Sequence
  Description of Artificial Sequence: Synthetic oligonucleotide
  Target: LAMA2; (-) strand; PAM type: YTN; PAM sequence: TTT
tataacttttttttttaaga

SEQ ID NO: 286944 - DNA, 20 bp, Artificial Sequence
  Description of Artificial Sequence: Synthetic oligonucleotide
  Target: LAMA2; (-) strand; PAM type: YTN; PAM sequence: TTT
ttataacttttttttttaag

SEQ ID NO: 286945 - DNA, 20 bp, Artificial Sequence
  Description of Artificial Sequence: Synthetic oligonucleotide
  Target: LAMA2; (-) strand; PAM type: YTN; PAM sequence: TTT
tttataacttttttttttaa

SEQ ID NO: 286946 - DNA, 20 bp, Artificial Sequence
  Description of Artificial Sequence: Synthetic oligonucleotide
  Target: LAMA2; (-) strand; PAM type: YTN; PAM sequence: TTT
ttttataactttttttttta

SEQ ID NO: 286947 - DNA, 20 bp, Artificial Sequence
  Description of Artificial Sequence: Synthetic oligonucleotide
  Target: LAMA2; (-) strand; PAM type: YTN; PAM sequence: TTT
tttttataactttttttttt

SEQ ID NO: 286948 - DNA, 20 bp, Artificial Sequence
  Description of Artificial Sequence: Synthetic oligonucleotide
  Target: LAMA2; (-) strand; PAM type: YTN; PAM sequence: TTT
ttttttataacttttttttt

SEQ ID NO: 286949 - DNA, 20 bp, Artificial Sequence
  Description of Artificial Sequence: Synthetic oligonucleotide
  Target: LAMA2; (-) strand; PAM type: YTN; PAM sequence: CTC
atttttttttataacttttt

SEQ ID NO: 286950 - DNA, 20 bp, Artificial Sequence
  Description of Artificial Sequence: Synthetic oligonucleotide
  Target: LAMA2; (-) strand; PAM type: YTN; PAM sequence: TTC
tcatttttttttataacttt

SEQ ID NO: 286951 - DNA, 20 bp, Artificial Sequence
  Description of Artificial Sequence: Synthetic oligonucleotide
  Target: LAMA2; (-) strand; PAM type: YTN; PAM sequence: CTT
ctcatttttttttataactt

SEQ ID NO: 286952 - DNA, 20 bp, Artificial Sequence
  Description of Artificial Sequence: Synthetic oligonucleotide
  Target: LAMA2; (-) strand; PAM type: YTN; PAM sequence: TTG
cttctcatttttttttataa

SEQ ID NO: 286953 - DNA, 20 bp, Artificial Sequence
  Description of Artificial Sequence: Synthetic oligonucleotide
  Target: LAMA2; (-) strand; PAM type: YTN; PAM sequence: CTA
aaaatattgcttctcatttt

SEQ ID NO: 286954 - DNA, 20 bp, Artificial Sequence
  Description of Artificial Sequence: Synthetic oligonucleotide
  Target: LAMA2; (-) strand; PAM type: YTN; PAM sequence: TTA
aaaagaactaaaaatattgc

SEQ ID NO: 286955 - DNA, 20 bp, Artificial Sequence
  Description of Artificial Sequence: Synthetic oligonucleotide
  Target: LAMA2; (-) strand; PAM type: YTN; PAM sequence: CTT
aaaaagaactaaaaatattg

SEQ ID NO: 286956 - DNA, 20 bp, Artificial Sequence
  Description of Artificial Sequence: Synthetic oligonucleotide
  Target: LAMA2; (-) strand; PAM type: YTN; PAM sequence: TTC
cttaaaaagaactaaaaata

SEQ ID NO: 286957 - DNA, 20 bp, Artificial Sequence
  Description of Artificial Sequence: Synthetic oligonucleotide
  Target: LAMA2; (-) strand; PAM type: YTN; PAM sequence: CTT
ccttaaaaagaactaaaaat

SEQ ID NO: 286958 - DNA, 20 bp, Artificial Sequence
  Description of Artificial Sequence: Synthetic oligonucleotide
  Target: LAMA2; (-) strand; PAM type: YTN; PAM sequence: CTG
aaaaacttccttaaaaagaa

SEQ ID NO: 286959 - DNA, 20 bp, Artificial Sequence
  Description of Artificial Sequence: Synthetic oligonucleotide
  Target: LAMA2; (-) strand; PAM type: YTN; PAM sequence: TTG
ctgaaaaacttccttaaaaa

SEQ ID NO: 286960 - DNA, 20 bp, Artificial Sequence
  Description of Artificial Sequence: Synthetic oligonucleotide
  Target: LAMA2; (-) strand; PAM type: YTN; PAM sequence: TTT
gctgaaaaacttccttaaaa

SEQ ID NO: 286961 - DNA, 20 bp, Artificial Sequence
  Description of Artificial Sequence: Synthetic oligonucleotide
  Target: LAMA2; (-) strand; PAM type: YTN; PAM sequence: TTT
tgctgaaaaacttccttaaa

SEQ ID NO: 286962 - DNA, 20 bp, Artificial Sequence
  Description of Artificial Sequence: Synthetic oligonucleotide
  Target: LAMA2; (-) strand; PAM type: YTN; PAM sequence: CTT
ttgctgaaaaacttccttaa

SEQ ID NO: 286963 - DNA, 20 bp, Artificial Sequence
  Description of Artificial Sequence: Synthetic oligonucleotide
  Target: LAMA2; (-) strand; PAM type: YTN; PAM sequence: CTC
acacatgcacacacactttt

SEQ ID NO: 286964 - DNA, 20 bp, Artificial Sequence
  Description of Artificial Sequence: Synthetic oligonucleotide
  Target: LAMA2; (-) strand; PAM type: YTN; PAM sequence: CTC
tcacacatgcacacacactt

SEQ ID NO: 286965 - DNA, 20 bp, Artificial Sequence
  Description of Artificial Sequence: Synthetic oligonucleotide
  Target: LAMA2; (-) strand; PAM type: YTN; PAM sequence: CTC
tctcacacatgcacacacac

SEQ ID NO: 286966 - DNA, 20 bp, Artificial Sequence
  Description of Artificial Sequence: Synthetic oligonucleotide
  Target: LAMA2; (-) strand; PAM type: YTN; PAM sequence: CTC
tctctcacacatgcacacac

SEQ ID NO: 286967 - DNA, 20 bp, Artificial Sequence
  Description of Artificial Sequence: Synthetic oligonucleotide
  Target: LAMA2; (-) strand; PAM type: YTN; PAM sequence: CTG
tcactctctctcacacatgc

SEQ ID NO: 286968 - DNA, 20 bp, Artificial Sequence
  Description of Artificial Sequence: Synthetic oligonucleotide
  Target: LAMA2; (-) strand; PAM type: YTN; PAM sequence: CTC
tgtcactctctctcacacat

SEQ ID NO: 286969 - DNA, 20 bp, Artificial Sequence
  Description of Artificial Sequence: Synthetic oligonucleotide
  Target: LAMA2; (-) strand; PAM type: YTN; PAM sequence: CTC
aacaccaccaaacacgcaag

SEQ ID NO: 286970 - DNA, 20 bp, Artificial Sequence
  Description of Artificial Sequence: Synthetic oligonucleotide
  Target: LAMA2; (-) strand; PAM type: YTN; PAM sequence: TTC
cctcaacaccaccaaacacg

SEQ ID NO: 286971 - DNA, 20 bp, Artificial Sequence
  Description of Artificial Sequence: Synthetic oligonucleotide
  Target: LAMA2; (-) strand; PAM type: YTN; PAM sequence: TTA
attccctcaacaccaccaaa

SEQ ID NO: 286972 - DNA, 20 bp, Artificial Sequence
  Description of Artificial Sequence: Synthetic oligonucleotide
  Target: LAMA2; (-) strand; PAM type: YTN; PAM sequence: CTT
aattccctcaacaccaccaa

SEQ ID NO: 286973 - DNA, 20 bp, Artificial Sequence
  Description of Artificial Sequence: Synthetic oligonucleotide
  Target: LAMA2; (-) strand; PAM type: YTN; PAM sequence: TTA
agtacttaattccctcaaca

SEQ ID NO: 286974 - DNA, 20 bp, Artificial Sequence
  Description of Artificial Sequence: Synthetic oligonucleotide
  Target: LAMA2; (-) strand; PAM type: YTN; PAM sequence: TTA
aacccggttaagtacttaat

SEQ ID NO: 286975 - DNA, 20 bp, Artificial Sequence
  Description of Artificial Sequence: Synthetic oligonucleotide
  Target: LAMA2; (-) strand; PAM type: YTN; PAM sequence: CTT
aaacccggttaagtacttaa

SEQ ID NO: 286976 - DNA, 20 bp, Artificial Sequence
  Description of Artificial Sequence: Synthetic oligonucleotide
  Target: LAMA2; (-) strand; PAM type: YTN; PAM sequence: TTA
tgagtataaatgtccttaaa

SEQ ID NO: 286977 - DNA, 20 bp, Artificial Sequence
  Description of Artificial Sequence: Synthetic oligonucleotide
  Target: LAMA2; (-) strand; PAM type: YTN; PAM sequence: TTT
atgagtataaatgtccttaa

SEQ ID NO: 286978 - DNA, 20 bp, Artificial Sequence
  Description of Artificial Sequence: Synthetic oligonucleotide
  Target: LAMA2; (-) strand; PAM type: YTN; PAM sequence: CTT
tatgagtataaatgtcctta

SEQ ID NO: 286979 - DNA, 20 bp, Artificial Sequence
  Description of Artificial Sequence: Synthetic oligonucleotide
  Target: LAMA2; (-) strand; PAM type: YTN; PAM sequence: CTG
cactttatgagtataaatgt

SEQ ID NO: 286980 - DNA, 20 bp, Artificial Sequence
  Description of Artificial Sequence: Synthetic oligonucleotide
  Target: LAMA2; (-) strand; PAM type: YTN; PAM sequence: CTG
aaagaagaactgcactttat

SEQ ID NO: 286981 - DNA, 20 bp, Artificial Sequence
  Description of Artificial Sequence: Synthetic oligonucleotide
  Target: LAMA2; (-) strand; PAM type: YTN; PAM sequence: TTC
tgaaagaagaactgcacttt

SEQ ID NO: 286982 - DNA, 20 bp, Artificial Sequence
  Description of Artificial Sequence: Synthetic oligonucleotide
  Target: LAMA2; (-) strand; PAM type: YTN; PAM sequence: TTT
ctgaaagaagaactgcactt

SEQ ID NO: 286983 - DNA, 20 bp, Artificial Sequence
  Description of Artificial Sequence: Synthetic oligonucleotide
  Target: LAMA2; (-) strand; PAM type: YTN; PAM sequence: TTT
tctgaaagaagaactgcact

SEQ ID NO: 286984 - DNA, 20 bp, Artificial Sequence
  Description of Artificial Sequence: Synthetic oligonucleotide
  Target: LAMA2; (-) strand; PAM type: YTN; PAM sequence: CTT
ttctgaaagaagaactgcac

SEQ ID NO: 286985 - DNA, 20 bp, Artificial Sequence
  Description of Artificial Sequence: Synthetic oligonucleotide
  Target: LAMA2; (-) strand; PAM type: YTN; PAM sequence: TTA
acagaatgtatcttttctga

SEQ ID NO: 286986 - DNA, 20 bp, Artificial Sequence
  Description of Artificial Sequence: Synthetic oligonucleotide
  Target: LAMA2; (-) strand; PAM type: YTN; PAM sequence: TTT
aacagaatgtatcttttctg

SEQ ID NO: 286987 - DNA, 20 bp, Artificial Sequence
  Description of Artificial Sequence: Synthetic oligonucleotide
  Target: LAMA2; (-) strand; PAM type: YTN; PAM sequence: CTT
taacagaatgtatcttttct

SEQ ID NO: 286988 - DNA, 20 bp, Artificial Sequence
  Description of Artificial Sequence: Synthetic oligonucleotide
  Target: LAMA2; (-) strand; PAM type: YTN; PAM sequence: TTC
tttaacagaatgtatctttt

SEQ ID NO: 286989 - DNA, 20 bp, Artificial Sequence
  Description of Artificial Sequence: Synthetic oligonucleotide
  Target: LAMA2; (-) strand; PAM type: YTN; PAM sequence: CTT
ctttaacagaatgtatcttt

SEQ ID NO: 286990 - DNA, 20 bp, Artificial Sequence
  Description of Artificial Sequence: Synthetic oligonucleotide
  Target: LAMA2; (-) strand; PAM type: YTN; PAM sequence: TTC
accttctttaacagaatgta

SEQ ID NO: 286991 - DNA, 20 bp, Artificial Sequence
  Description of Artificial Sequence: Synthetic oligonucleotide
  Target: LAMA2; (-) strand; PAM type: YTN; PAM sequence: TTA
tcaaataaggttcaccttct

SEQ ID NO: 286992 - DNA, 20 bp, Artificial Sequence
  Description of Artificial Sequence: Synthetic oligonucleotide
  Target: LAMA2; (-) strand; PAM type: YTN; PAM sequence: TTT
atcaaataaggttcaccttc

SEQ ID NO: 286993 - DNA, 20 bp, Artificial Sequence
  Description of Artificial Sequence: Synthetic oligonucleotide
  Target: LAMA2; (-) strand; PAM type: YTN; PAM sequence: TTA
agtgaaatacatggtaacaa

SEQ ID NO: 286994 - DNA, 20 bp, Artificial Sequence
  Description of Artificial Sequence: Synthetic oligonucleotide
  Target: LAMA2; (-) strand; PAM type: YTN; PAM sequence: TTG
aggatgcaatgttaagtgaa

SEQ ID NO: 286995 - DNA, 20 bp, Artificial Sequence
  Description of Artificial Sequence: Synthetic oligonucleotide
  Target: LAMA2; (-) strand; PAM type: YTN; PAM sequence: TTT
gaggatgcaatgttaagtga

SEQ ID NO: 286996 - DNA, 20 bp, Artificial Sequence
  Description of Artificial Sequence: Synthetic oligonucleotide
  Target: LAMA2; (-) strand; PAM type: YTN; PAM sequence: CTT
tgaggatgcaatgttaagtg

SEQ ID NO: 286997 - DNA, 20 bp, Artificial Sequence
  Description of Artificial Sequence: Synthetic oligonucleotide
  Target: LAMA2; (-) strand; PAM type: YTN; PAM sequence: TTC
tttgaggatgcaatgttaag

SEQ ID NO: 286998 - DNA, 20 bp, Artificial Sequence
  Description of Artificial Sequence: Synthetic oligonucleotide
  Target: LAMA2; (-) strand; PAM type: YTN; PAM sequence: TTT
ctttgaggatgcaatgttaa

SEQ ID NO: 286999 - DNA, 20 bp, Artificial Sequence
  Description of Artificial Sequence: Synthetic oligonucleotide
  Target: LAMA2; (-) strand; PAM type: YTN; PAM sequence: TTT
tctttgaggatgcaatgtta

SEQ ID NO: 287000 - DNA, 20 bp, Artificial Sequence
  Description of Artificial Sequence: Synthetic oligonucleotide
  Target: LAMA2; (-) strand; PAM type: YTN; PAM sequence: TTT
ttctttgaggatgcaatgtt

SEQ ID NO: 287001 - DNA, 20 bp, Artificial Sequence
  Description of Artificial Sequence: Synthetic oligonucleotide
  Target: LAMA2; (-) strand; PAM type: YTN; PAM sequence: TTT
tttctttgaggatgcaatgt

SEQ ID NO: 287002 - DNA, 20 bp, Artificial Sequence
  Description of Artificial Sequence: Synthetic oligonucleotide
  Target: LAMA2; (-) strand; PAM type: YTN; PAM sequence: CTT
ttttctttgaggatgcaatg

SEQ ID NO: 287003 - DNA, 20 bp, Artificial Sequence
  Description of Artificial Sequence: Synthetic oligonucleotide
  Target: LAMA2; (-) strand; PAM type: YTN; PAM sequence: TTG
gtaatcttttttctttgagg

SEQ ID NO: 287004 - DNA, 20 bp, Artificial Sequence
  Description of Artificial Sequence: Synthetic oligonucleotide
  Target: LAMA2; (-) strand; PAM type: YTN; PAM sequence: TTT
ggtaatcttttttctttgag

SEQ ID NO: 287005 - DNA, 20 bp, Artificial Sequence
  Description of Artificial Sequence: Synthetic oligonucleotide
  Target: LAMA2; (-) strand; PAM type: YTN; PAM sequence: CTT
tggtaatcttttttctttga

SEQ ID NO: 287006 - DNA, 20 bp, Artificial Sequence
  Description of Artificial Sequence: Synthetic oligonucleotide
  Target: LAMA2; (-) strand; PAM type: YTN; PAM sequence: CTC
actttggtaatcttttttct

SEQ ID NO: 287007 - DNA, 20 bp, Artificial Sequence
  Description of Artificial Sequence: Synthetic oligonucleotide
  Target: LAMA2; (-) strand; PAM type: YTN; PAM sequence: CTG
tctcactttggtaatctttt

SEQ ID NO: 287008 - DNA, 20 bp, Artificial Sequence
  Description of Artificial Sequence: Synthetic oligonucleotide
  Target: LAMA2; (-) strand; PAM type: YTN; PAM sequence: CTG
ctgtctcactttggtaatct

SEQ ID NO: 287009 - DNA, 20 bp, Artificial Sequence
  Description of Artificial Sequence: Synthetic oligonucleotide
  Target: LAMA2; (-) strand; PAM type: YTN; PAM sequence: CTG
actgctgtctcactttggta

SEQ ID NO: 287010 - DNA, 20 bp, Artificial Sequence
  Description of Artificial Sequence: Synthetic oligonucleotide
  Target: LAMA2; (-) strand; PAM type: YTN; PAM sequence: TTC
cctgactgctgtctcacttt

SEQ ID NO: 287011 - DNA, 20 bp, Artificial Sequence
  Description of Artificial Sequence: Synthetic oligonucleotide
  Target: LAMA2; (-) strand; PAM type: YTN; PAM sequence: TTT
ccctgactgctgtctcactt

SEQ ID NO: 287012 - DNA, 20 bp, Artificial Sequence
  Description of Artificial Sequence: Synthetic oligonucleotide
  Target: LAMA2; (-) strand; PAM type: YTN; PAM sequence: TTC
gatgtcatatttccctgact

SEQ ID NO: 287013 - DNA, 20 bp, Artificial Sequence
  Description of Artificial Sequence: Synthetic oligonucleotide
  Target: LAMA2; (-) strand; PAM type: YTN; PAM sequence: CTT
cgatgtcatatttccctgac

SEQ ID NO: 287014 - DNA, 20 bp, Artificial Sequence
  Description of Artificial Sequence: Synthetic oligonucleotide
  Target: LAMA2; (-) strand; PAM type: YTN; PAM sequence: TTG
agacaagcagtcataacaaa

SEQ ID NO: 287015 - DNA, 20 bp, Artificial Sequence
  Description of Artificial Sequence: Synthetic oligonucleotide
  Target: LAMA2; (-) strand; PAM type: YTN; PAM sequence: TTT
gagacaagcagtcataacaa

SEQ ID NO: 287016 - DNA, 20 bp, Artificial Sequence
  Description of Artificial Sequence: Synthetic oligonucleotide
  Target: LAMA2; (-) strand; PAM type: YTN; PAM sequence: TTT
tgagacaagcagtcataaca

SEQ ID NO: 287017 - DNA, 20 bp, Artificial Sequence
  Description of Artificial Sequence: Synthetic oligonucleotide
  Target: LAMA2; (-) strand; PAM type: YTN; PAM sequence: CTT
ttgagacaagcagtcataac

SEQ ID NO: 287018 - DNA, 20 bp, Artificial Sequence
  Description of Artificial Sequence: Synthetic oligonucleotide
  Target: LAMA2; (-) strand; PAM type: YTN; PAM sequence: CTC
ttttgagacaagcagtcata

SEQ ID NO: 287019 - DNA, 20 bp, Artificial Sequence
  Description of Artificial Sequence: Synthetic oligonucleotide
  Target: LAMA2; (-) strand; PAM type: YTN; PAM sequence: CTC
tcttttgagacaagcagtca

SEQ ID NO: 287020 - DNA, 20 bp, Artificial Sequence
  Description of Artificial Sequence: Synthetic oligonucleotide
  Target: LAMA2; (-) strand; PAM type: YTN; PAM sequence: CTG
gtctctcttttgagacaagc

SEQ ID NO: 287021 - DNA, 20 bp, Artificial Sequence
  Description of Artificial Sequence: Synthetic oligonucleotide
  Target: LAMA2; (-) strand; PAM type: YTN; PAM sequence: TTA
aatatgaaaatctggtctct

SEQ ID NO: 287022 - DNA, 20 bp, Artificial Sequence
  Description of Artificial Sequence: Synthetic oligonucleotide
  Target: LAMA2; (-) strand; PAM type: YTN; PAM sequence: CTG
ttaaatatgaaaatctggtc

SEQ ID NO: 287023 - DNA, 20 bp, Artificial Sequence
  Description of Artificial Sequence: Synthetic oligonucleotide
  Target: LAMA2; (-) strand; PAM type: YTN; PAM sequence: TTC
catgagctgttaaatatgaa

SEQ ID NO: 287024 - DNA, 20 bp, Artificial Sequence
  Description of Artificial Sequence: Synthetic oligonucleotide
  Target: LAMA2; (-) strand; PAM type: YTN; PAM sequence: TTT
ccatgagctgttaaatatga

SEQ ID NO: 287025 - DNA, 20 bp, Artificial Sequence
  Description of Artificial Sequence: Synthetic oligonucleotide
  Target: LAMA2; (-) strand; PAM type: YTN; PAM sequence: TTG
atttccatgagctgttaaat

SEQ ID NO: 287026 - DNA, 20 bp, Artificial Sequence
  Description of Artificial Sequence: Synthetic oligonucleotide
  Target: LAMA2; (-) strand; PAM type: YTN; PAM sequence: TTA
agtgattgatttccatgagc

SEQ ID NO: 287027 - DNA, 20 bp, Artificial Sequence
  Description of Artificial Sequence: Synthetic oligonucleotide
  Target: LAMA2; (-) strand; PAM type: YTN; PAM sequence: TTT
aagtgattgatttccatgag

SEQ ID NO: 287028 - DNA, 20 bp, Artificial Sequence
  Description of Artificial Sequence: Synthetic oligonucleotide
  Target: LAMA2; (-) strand; PAM type: YTN; PAM sequence: TTT
taagtgattgatttccatga

SEQ ID NO: 287029 - DNA, 20 bp, Artificial Sequence
  Description of Artificial Sequence: Synthetic oligonucleotide
  Target: LAMA2; (-) strand; PAM type: YTN; PAM sequence: TTT
ttaagtgattgatttccatg

SEQ ID NO: 287030 - DNA, 20 bp, Artificial Sequence
  Description of Artificial Sequence: Synthetic oligonucleotide
  Target: LAMA2; (-) strand; PAM type: YTN; PAM sequence: TTT
tttaagtgattgatttccat

SEQ ID NO: 287031 - DNA, 20 bp, Artificial Sequence
  Description of Artificial Sequence: Synthetic oligonucleotide
  Target: LAMA2; (-) strand; PAM type: YTN; PAM sequence: CTT
ttttaagtgattgatttcca

SEQ ID NO: 287032 - DNA, 20 bp, Artificial Sequence
  Description of Artificial Sequence: Synthetic oligonucleotide
  Target: LAMA2; (-) strand; PAM type: YTN; PAM sequence: TTC
ttttttaagtgattgatttc

SEQ ID NO: 287033 - DNA, 20 bp, Artificial Sequence
  Description of Artificial Sequence: Synthetic oligonucleotide
  Target: LAMA2; (-) strand; PAM type: YTN; PAM sequence: TTT
cttttttaagtgattgattt

SEQ ID NO: 287034 - DNA, 20 bp, Artificial Sequence
  Description of Artificial Sequence: Synthetic oligonucleotide
  Target: LAMA2; (-) strand; PAM type: YTN; PAM sequence: TTT
tcttttttaagtgattgatt

SEQ ID NO: 287035 - DNA, 20 bp, Artificial Sequence
  Description of Artificial Sequence: Synthetic oligonucleotide
  Target: LAMA2; (-) strand; PAM type: YTN; PAM sequence: TTC
attttcttttttaagtgatt

SEQ ID NO: 287036 - DNA, 20 bp, Artificial Sequence
  Description of Artificial Sequence: Synthetic oligonucleotide
  Target: LAMA2; (-) strand; PAM type: YTN; PAM sequence: TTT
cattttcttttttaagtgat

SEQ ID NO: 287037 - DNA, 20 bp, Artificial Sequence
  Description of Artificial Sequence: Synthetic oligonucleotide
  Target: LAMA2; (-) strand; PAM type: YTN; PAM sequence: TTA
tttcattttcttttttaagt

SEQ ID NO: 287038 - DNA, 20 bp, Artificial Sequence
  Description of Artificial Sequence: Synthetic oligonucleotide
  Target: LAMA2; (-) strand; PAM type: YTN; PAM sequence: TTT
atttcattttcttttttaag

SEQ ID NO: 287039 - DNA, 20 bp, Artificial Sequence
  Description of Artificial Sequence: Synthetic oligonucleotide
  Target: LAMA2; (-) strand; PAM type: YTN; PAM sequence: TTT
tatttcattttcttttttaa

SEQ ID NO: 287040 - DNA, 20 bp, Artificial Sequence
  Description of Artificial Sequence: Synthetic oligonucleotide
  Target: LAMA2; (-) strand; PAM type: YTN; PAM sequence: TTA
tcattttatttcattttctt

SEQ ID NO: 287041 - DNA, 20 bp, Artificial Sequence
  Description of Artificial Sequence: Synthetic oligonucleotide
  Target: LAMA2; (-) strand; PAM type: YTN; PAM sequence: CTA
ttatcattttatttcatttt

SEQ ID NO: 287042 - DNA, 20 bp, Artificial Sequence
  Description of Artificial Sequence: Synthetic oligonucleotide
  Target: LAMA2; (-) strand; PAM type: YTN; PAM sequence: TTG
aaagctattatcattttatt

SEQ ID NO: 287043 - DNA, 20 bp, Artificial Sequence
  Description of Artificial Sequence: Synthetic oligonucleotide
  Target: LAMA2; (-) strand; PAM type: YTN; PAM sequence: TTT
gaaagctattatcattttat

SEQ ID NO: 287044 - DNA, 20 bp, Artificial Sequence
  Description of Artificial Sequence: Synthetic oligonucleotide
  Target: LAMA2; (-) strand; PAM type: YTN; PAM sequence: TTT
tgaaagctattatcatttta

SEQ ID NO: 287045 - DNA, 20 bp, Artificial Sequence
  Description of Artificial Sequence: Synthetic oligonucleotide
  Target: LAMA2; (-) strand; PAM type: YTN; PAM sequence: TTA
acagaattttgaaagctatt

SEQ ID NO: 287046 - DNA, 20 bp, Artificial Sequence
  Description of Artificial Sequence: Synthetic oligonucleotide
  Target: LAMA2; (-) strand; PAM type: YTN; PAM sequence: TTC
aattaacagaattttgaaag

SEQ ID NO: 287047 - DNA, 20 bp, Artificial Sequence
  Description of Artificial Sequence: Synthetic oligonucleotide
  Target: LAMA2; (-) strand; PAM type: YTN; PAM sequence: TTA
aattcaattaacagaatttt

SEQ ID NO: 287048 - DNA, 20 bp, Artificial Sequence
  Description of Artificial Sequence: Synthetic oligonucleotide
  Target: LAMA2; (-) strand; PAM type: YTN; PAM sequence: TTT
aaattcaattaacagaattt

SEQ ID NO: 287049 - DNA, 20 bp, Artificial Sequence
  Description of Artificial Sequence: Synthetic oligonucleotide
  Target: LAMA2; (-) strand; PAM type: YTN; PAM sequence: TTT
taaattcaattaacagaatt

SEQ ID NO: 287050 - DNA, 20 bp, Artificial Sequence
  Description of Artificial Sequence: Synthetic oligonucleotide
  Target: LAMA2; (-) strand; PAM type: YTN; PAM sequence: TTT
ttaaattcaattaacagaat

SEQ ID NO: 287051 - DNA, 20 bp, Artificial Sequence
  Description of Artificial Sequence: Synthetic oligonucleotide
  Target: LAMA2; (-) strand; PAM type: YTN; PAM sequence: TTC
atttttaaattcaattaaca

SEQ ID NO: 287052 - DNA, 20 bp, Artificial Sequence
  Description of Artificial Sequence: Synthetic oligonucleotide
  Target: LAMA2; (-) strand; PAM type: YTN; PAM sequence: TTG
catagaagttcatttttaaa

SEQ ID NO: 287053 - DNA, 20 bp, Artificial Sequence
  Description of Artificial Sequence: Synthetic oligonucleotide
  Target: LAMA2; (-) strand; PAM type: YTN; PAM sequence: TTC
agtgtacaaattgcatagaa

SEQ ID NO: 287054 - DNA, 20 bp, Artificial Sequence
  Description of Artificial Sequence: Synthetic oligonucleotide
  Target: LAMA2; (-) strand; PAM type: YTN; PAM sequence: TTT
cagtgtacaaattgcataga

SEQ ID NO: 287055 - DNA, 20 bp, Artificial Sequence
  Description of Artificial Sequence: Synthetic oligonucleotide
  Target: LAMA2; (-) strand; PAM type: YTN; PAM sequence: TTC
agatttcagtgtacaaattg

SEQ ID NO: 287056 - DNA, 20 bp, Artificial Sequence
  Description of Artificial Sequence: Synthetic oligonucleotide
  Target: LAMA2; (-) strand; PAM type: YTN; PAM sequence: CTT
cagatttcagtgtacaaatt

SEQ ID NO: 287057 - DNA, 20 bp, Artificial Sequence
  Description of Artificial Sequence: Synthetic oligonucleotide
  Target: LAMA2; (-) strand; PAM type: YTN; PAM sequence: CTA
atgtatacagtacaatatcc

SEQ ID NO: 287058 - DNA, 20 bp, Artificial Sequence
  Description of Artificial Sequence: Synthetic oligonucleotide
  Target: LAMA2; (-) strand; PAM type: YTN; PAM sequence: TTG
gcacagcatactaatgtata

SEQ ID NO: 287059 - DNA, 20 bp, Artificial Sequence
  Description of Artificial Sequence: Synthetic oligonucleotide
  Target: LAMA2; (-) strand; PAM type: YTN; PAM sequence: TTT
ggcacagcatactaatgtat

SEQ ID NO: 287060 - DNA, 20 bp, Artificial Sequence
  Description of Artificial Sequence: Synthetic oligonucleotide
  Target: LAMA2; (-) strand; PAM type: YTN; PAM sequence: TTG
tttggcacagcatactaatg

SEQ ID NO: 287061 - DNA, 20 bp, Artificial Sequence
  Description of Artificial Sequence: Synthetic oligonucleotide
  Target: LAMA2; (-) strand; PAM type: YTN; PAM sequence: TTA
ttgtttggcacagcatacta

SEQ ID NO: 287062 - DNA, 20 bp, Artificial Sequence
  Description of Artificial Sequence: Synthetic oligonucleotide
  Target: LAMA2; (-) strand; PAM type: YTN; PAM sequence: TTT
attgtttggcacagcatact

SEQ ID NO: 287063 - DNA, 20 bp, Artificial Sequence
  Description of Artificial Sequence: Synthetic oligonucleotide
  Target: LAMA2; (-) strand; PAM type: YTN; PAM sequence: TTT
tattgtttggcacagcatac

SEQ ID NO: 287064 - DNA, 20 bp, Artificial Sequence
  Description of Artificial Sequence: Synthetic oligonucleotide
  Target: LAMA2; (-) strand; PAM type: YTN; PAM sequence: CTT
ttattgtttggcacagcata

SEQ ID NO: 287065 - DNA, 20 bp, Artificial Sequence
  Description of Artificial Sequence: Synthetic oligonucleotide
  Target: LAMA2; (-) strand; PAM type: YTN; PAM sequence: CTA
gaatggtatatcttttattg

SEQ ID NO: 287066 - DNA, 20 bp, Artificial Sequence
  Description of Artificial Sequence: Synthetic oligonucleotide
  Target: LAMA2; (-) strand; PAM type: YTN; PAM sequence: TTC
ctagaatggtatatctttta

SEQ ID NO: 287067 - DNA, 20 bp, Artificial Sequence
  Description of Artificial Sequence: Synthetic oligonucleotide
  Target: LAMA2; (-) strand; PAM type: YTN; PAM sequence: CTT
cctagaatggtatatctttt

SEQ ID NO: 287068 - DNA, 20 bp, Artificial Sequence
  Description of Artificial Sequence: Synthetic oligonucleotide
  Target: LAMA2; (-) strand; PAM type: YTN; PAM sequence: TTG
aagtagtcttcctagaatgg

SEQ ID NO: 287069 - DNA, 20 bp, Artificial Sequence
  Description of Artificial Sequence: Synthetic oligonucleotide
  Target: LAMA2; (-) strand; PAM type: YTN; PAM sequence: TTG
ttgaagtagtcttcctagaa

SEQ ID NO: 287070 - DNA, 20 bp, Artificial Sequence
  Description of Artificial Sequence: Synthetic oligonucleotide
  Target: LAMA2; (-) strand; PAM type: YTN; PAM sequence: TTT
gttgaagtagtcttcctaga

SEQ ID NO: 287071 - DNA, 20 bp, Artificial Sequence
  Description of Artificial Sequence: Synthetic oligonucleotide
  Target: LAMA2; (-) strand; PAM type: YTN; PAM sequence: TTG
gatcccagtttgttgaagta

SEQ ID NO: 287072 - DNA, 20 bp, Artificial Sequence
  Description of Artificial Sequence: Synthetic oligonucleotide
  Target: LAMA2; (-) strand; PAM type: YTN; PAM sequence: CTT
ggatcccagtttgttgaagt

SEQ ID NO: 287073 - DNA, 20 bp, Artificial Sequence
  Description of Artificial Sequence: Synthetic oligonucleotide
  Target: LAMA2; (-) strand; PAM type: YTN; PAM sequence: TTA
taatatcttggatcccagtt

SEQ ID NO: 287074 - DNA, 20 bp, Artificial Sequence
  Description of Artificial Sequence: Synthetic oligonucleotide
  Target: LAMA2; (-) strand; PAM type: YTN; PAM sequence: TTT
ataatatcttggatcccagt

SEQ ID NO: 287075 - DNA, 20 bp, Artificial Sequence
  Description of Artificial Sequence: Synthetic oligonucleotide
  Target: LAMA2; (-) strand; PAM type: YTN; PAM sequence: CTT
tataatatcttggatcccag

SEQ ID NO: 287076 - DNA, 20 bp, Artificial Sequence
  Description of Artificial Sequence: Synthetic oligonucleotide
  Target: LAMA2; (-) strand; PAM type: YTN; PAM sequence: TTC
tttataatatcttggatccc

SEQ ID NO: 287077 - DNA, 20 bp, Artificial Sequence
  Description of Artificial Sequence: Synthetic oligonucleotide
  Target: LAMA2; (-) strand; PAM type: YTN; PAM sequence: CTA
aaattctttataatatcttg

SEQ ID NO: 287078 - DNA, 20 bp, Artificial Sequence
  Description of Artificial Sequence: Synthetic oligonucleotide
  Target: LAMA2; (-) strand; PAM type: YTN; PAM sequence: CTC
ctaaaattctttataatatc

SEQ ID NO: 287079 - DNA, 20 bp, Artificial Sequence
  Description of Artificial Sequence: Synthetic oligonucleotide
  Target: LAMA2; (-) strand; PAM type: YTN; PAM sequence: TTC
tcctaaaattctttataata

SEQ ID NO: 287080 - DNA, 20 bp, Artificial Sequence
  Description of Artificial Sequence: Synthetic oligonucleotide
  Target: LAMA2; (-) strand; PAM type: YTN; PAM sequence: TTT
ctcctaaaattctttataat

SEQ ID NO: 287081 - DNA, 20 bp, Artificial Sequence
  Description of Artificial Sequence: Synthetic oligonucleotide
  Target: LAMA2; (-) strand; PAM type: YTN; PAM sequence: CTG
catgatttctcctaaaattc

SEQ ID NO: 287082 - DNA, 20 bp, Artificial Sequence
  Description of Artificial Sequence: Synthetic oligonucleotide
  Target: LAMA2; (-) strand; PAM type: YTN; PAM sequence: TTC
atatcataagctgcatgatt

SEQ ID NO: 287083 - DNA, 20 bp, Artificial Sequence
  Description of Artificial Sequence: Synthetic oligonucleotide
  Target: LAMA2; (-) strand; PAM type: YTN; PAM sequence: TTT
catatcataagctgcatgat

SEQ ID NO: 287084 - DNA, 20 bp, Artificial Sequence
  Description of Artificial Sequence: Synthetic oligonucleotide
  Target: LAMA2; (-) strand; PAM type: YTN; PAM sequence: CTT
tcatatcataagctgcatga

SEQ ID NO: 287085 - DNA, 20 bp, Artificial Sequence
  Description of Artificial Sequence: Synthetic oligonucleotide
  Target: LAMA2; (-) strand; PAM type: YTN; PAM sequence: CTA
gtggaccccaaatgagccac

SEQ ID NO: 287086 - DNA, 20 bp, Artificial Sequence
  Description of Artificial Sequence: Synthetic oligonucleotide
  Target: LAMA2; (-) strand; PAM type: YTN; PAM sequence: TTC
agctagtggaccccaaatga

SEQ ID NO: 287087 - DNA, 20 bp, Artificial Sequence
  Description of Artificial Sequence: Synthetic oligonucleotide
  Target: LAMA2; (-) strand; PAM type: YTN; PAM sequence: TTA
attcagctagtggaccccaa

SEQ ID NO: 287088 - DNA, 20 bp, Artificial Sequence
  Description of Artificial Sequence: Synthetic oligonucleotide
  Target: LAMA2; (-) strand; PAM type: YTN; PAM sequence: TTT
aattcagctagtggacccca

SEQ ID NO: 287089 - DNA, 20 bp, Artificial Sequence
  Description of Artificial Sequence: Synthetic oligonucleotide
  Target: LAMA2; (-) strand; PAM type: YTN; PAM sequence: CTA
atttaattcagctagtggac

SEQ ID NO: 287090 - DNA, 20 bp, Artificial Sequence
  Description of Artificial Sequence: Synthetic oligonucleotide
  Target: LAMA2; (-) strand; PAM type: YTN; PAM sequence: TTG
tctaatttaattcagctagt

SEQ ID NO: 287091 - DNA, 20 bp, Artificial Sequence
  Description of Artificial Sequence: Synthetic oligonucleotide
  Target: LAMA2; (-) strand; PAM type: YTN; PAM sequence: TTT
gtctaatttaattcagctag

SEQ ID NO: 287092 - DNA, 20 bp, Artificial Sequence
  Description of Artificial Sequence: Synthetic oligonucleotide
  Target: LAMA2; (-) strand; PAM type: YTN; PAM sequence: TTT
tgtctaatttaattcagcta

SEQ ID NO: 287093 - DNA, 20 bp, Artificial Sequence
  Description of Artificial Sequence: Synthetic oligonucleotide
  Target: LAMA2; (-) strand; PAM type: YTN; PAM sequence: TTC
agcattttgtctaatttaat

SEQ ID NO: 287094 - DNA, 20 bp, Artificial Sequence
  Description of Artificial Sequence: Synthetic oligonucleotide
  Target: LAMA2; (-) strand; PAM type: YTN; PAM sequence: TTA
ttcagcattttgtctaattt

SEQ ID NO: 287095 - DNA, 20 bp, Artificial Sequence
  Description of Artificial Sequence: Synthetic oligonucleotide
  Target: LAMA2; (-) strand; PAM type: YTN; PAM sequence: TTT
attcagcattttgtctaatt

SEQ ID NO: 287096 - DNA, 20 bp, Artificial Sequence
  Description of Artificial Sequence: Synthetic oligonucleotide
  Target: LAMA2; (-) strand; PAM type: YTN; PAM sequence: CTT
tattcagcattttgtctaat

SEQ ID NO: 287097 - DNA, 20 bp, Artificial Sequence
  Description of Artificial Sequence: Synthetic oligonucleotide
  Target: LAMA2; (-) strand; PAM type: YTN; PAM sequence: TTA
ctttattcagcattttgtct

SEQ ID NO: 287098 - DNA, 20 bp, Artificial Sequence
  Description of Artificial Sequence: Synthetic oligonucleotide
  Target: LAMA2; (-) strand; PAM type: YTN; PAM sequence: TTA
tattactttattcagcattt

SEQ ID NO: 287099 - DNA, 20 bp, Artificial Sequence
  Description of Artificial Sequence: Synthetic oligonucleotide
  Target: LAMA2; (-) strand; PAM type: YTN; PAM sequence: TTT
atattactttattcagcatt

SEQ ID NO: 287100 - DNA, 20 bp, Artificial Sequence
  Description of Artificial Sequence: Synthetic oligonucleotide
  Target: LAMA2; (-) strand; PAM type: YTN; PAM sequence: TTA
tgcaagtttatattacttta

SEQ ID NO: 287101 - DNA, 20 bp, Artificial Sequence
  Description of Artificial Sequence: Synthetic oligonucleotide
  Target: LAMA2; (-) strand; PAM type: YTN; PAM sequence: TTT
atgcaagtttatattacttt

SEQ ID NO: 287102 - DNA, 20 bp, Artificial Sequence
  Description of Artificial Sequence: Synthetic oligonucleotide
  Target: LAMA2; (-) strand; PAM type: YTN; PAM sequence: TTA
ccaacacatacaatttatgc

SEQ ID NO: 287103 - DNA, 20 bp, Artificial Sequence
  Description of Artificial Sequence: Synthetic oligonucleotide
  Target: LAMA2; (-) strand; PAM type: YTN; PAM sequence: TTT
accaacacatacaatttatg

SEQ ID NO: 287104 - DNA, 20 bp, Artificial Sequence
  Description of Artificial Sequence: Synthetic oligonucleotide
  Target: LAMA2; (-) strand; PAM type: YTN; PAM sequence: CTA
tttaccaacacatacaattt

SEQ ID NO: 287105 - DNA, 20 bp, Artificial Sequence
  Description of Artificial Sequence: Synthetic oligonucleotide
  Target: LAMA2; (-) strand; PAM type: YTN; PAM sequence: TTA
ctatttaccaacacatacaa

SEQ ID NO: 287106 - DNA, 20 bp, Artificial Sequence
  Description of Artificial Sequence: Synthetic oligonucleotide
  Target: LAMA2; (-) strand; PAM type: YTN; PAM sequence: TTT
actatttaccaacacataca

SEQ ID NO: 287107 - DNA, 20 bp, Artificial Sequence
  Description of Artificial Sequence: Synthetic oligonucleotide
  Target: LAMA2; (-) strand; PAM type: YTN; PAM sequence: TTA
cataataatttactatttac

SEQ ID NO: 287108 - DNA, 20 bp, Artificial Sequence
  Description of Artificial Sequence: Synthetic oligonucleotide
  Target: LAMA2; (-) strand; PAM type: YTN; PAM sequence: CTT
acataataatttactattta

SEQ ID NO: 287109 - DNA, 20 bp, Artificial Sequence
  Description of Artificial Sequence: Synthetic oligonucleotide
  Target: LAMA2; (-) strand; PAM type: YTN; PAM sequence: CTA
tggcttacataataatttac

SEQ ID NO: 287110 - DNA, 20 bp, Artificial Sequence
  Description of Artificial Sequence: Synthetic oligonucleotide
  Target: LAMA2; (-) strand; PAM type: YTN; PAM sequence: TTC
ctatggcttacataataatt

SEQ ID NO: 287111 - DNA, 20 bp, Artificial Sequence
  Description of Artificial Sequence: Synthetic oligonucleotide
  Target: LAMA2; (-) strand; PAM type: YTN; PAM sequence: TTT
cctatggcttacataataat

SEQ ID NO: 287112 - DNA, 20 bp, Artificial Sequence
  Description of Artificial Sequence: Synthetic oligonucleotide
  Target: LAMA2; (-) strand; PAM type: YTN; PAM sequence: TTT
tcctatggcttacataataa

SEQ ID NO: 287113 - DNA, 20 bp, Artificial Sequence
  Description of Artificial Sequence: Synthetic oligonucleotide
  Target: LAMA2; (-) strand; PAM type: YTN; PAM sequence: TTT
ttcctatggcttacataata

SEQ ID NO: 287114 - DNA, 20 bp, Artificial Sequence
  Description of Artificial Sequence: Synthetic oligonucleotide
  Target: LAMA2; (-) strand; PAM type: YTN; PAM sequence: CTT
tttcctatggcttacataat

SEQ ID NO: 287115 - DNA, 20 bp, Artificial Sequence
  Description of Artificial Sequence: Synthetic oligonucleotide
  Target: LAMA2; (-) strand; PAM type: YTN; PAM sequence: TTA
agtggaaagcctttttccta

SEQ ID NO: 287116 - DNA, 20 bp, Artificial Sequence
  Description of Artificial Sequence: Synthetic oligonucleotide
  Target: LAMA2; (-) strand; PAM type: YTN; PAM sequence: TTG
gttaagtggaaagccttttt

SEQ ID NO: 287117 - DNA, 20 bp, Artificial Sequence
  Description of Artificial Sequence: Synthetic oligonucleotide
  Target: LAMA2; (-) strand; PAM type: YTN; PAM sequence: CTA
ttggttaagtggaaagcctt

SEQ ID NO: 287118 - DNA, 20 bp, Artificial Sequence
  Description of Artificial Sequence: Synthetic oligonucleotide
  Target: LAMA2; (-) strand; PAM type: YTN; PAM sequence: TTG
ctattggttaagtggaaagc

SEQ ID NO: 287119 - DNA, 20 bp, Artificial Sequence
  Description of Artificial Sequence: Synthetic oligonucleotide
  Target: LAMA2; (-) strand; PAM type: YTN; PAM sequence: CTG
atggaattgctattggttaa

SEQ ID NO: 287120 - DNA, 20 bp, Artificial Sequence
  Description of Artificial Sequence: Synthetic oligonucleotide
  Target: LAMA2; (-) strand; PAM type: YTN; PAM sequence: TTA
actgatggaattgctattgg

SEQ ID NO: 287121 - DNA, 20 bp, Artificial Sequence
  Description of Artificial Sequence: Synthetic oligonucleotide
  Target: LAMA2; (-) strand; PAM type: YTN; PAM sequence: TTG
acatgaaatgacacagcagc

SEQ ID NO: 287122 - DNA, 20 bp, Artificial Sequence
  Description of Artificial Sequence: Synthetic oligonucleotide
  Target: LAMA2; (-) strand; PAM type: YTN; PAM sequence: TTC
attgacatgaaatgacacag

SEQ ID NO: 287123 - DNA, 20 bp, Artificial Sequence
  Description of Artificial Sequence: Synthetic oligonucleotide
  Target: LAMA2; (-) strand; PAM type: YTN; PAM sequence: CTG
tgtgtgttcattgacatgaa

SEQ ID NO: 287124 - DNA, 20 bp, Artificial Sequence
  Description of Artificial Sequence: Synthetic oligonucleotide
  Target: LAMA2; (-) strand; PAM type: YTN; PAM sequence: TTC
tgtgtgtgttcattgacatg

SEQ ID NO: 287125 - DNA, 20 bp, Artificial Sequence
  Description of Artificial Sequence: Synthetic oligonucleotide
  Target: LAMA2; (-) strand; PAM type: YTN; PAM sequence: CTG
attctgtgtgtgttcattga

SEQ ID NO: 287126 - DNA, 20 bp, Artificial Sequence
  Description of Artificial Sequence: Synthetic oligonucleotide
  Target: LAMA2; (-) strand; PAM type: YTN; PAM sequence: TTC
aaccagaaccagtgagcacc

SEQ ID NO: 287127 - DNA, 20 bp, Artificial Sequence
  Description of Artificial Sequence: Synthetic oligonucleotide
  Target: LAMA2; (-) strand; PAM type: YTN; PAM sequence: TTT
caaccagaaccagtgagcac

SEQ ID NO: 287128 - DNA, 20 bp, Artificial Sequence
  Description of Artificial Sequence: Synthetic oligonucleotide
  Target: LAMA2; (-) strand; PAM type: YTN; PAM sequence: TTA
catcagtttcaaccagaacc

SEQ ID NO: 287129 - DNA, 20 bp, Artificial Sequence
  Description of Artificial Sequence: Synthetic oligonucleotide
  Target: LAMA2; (-) strand; PAM type: YTN; PAM sequence: CTT
acatcagtttcaaccagaac

SEQ ID NO: 287130 - DNA, 20 bp, Artificial Sequence
  Description of Artificial Sequence: Synthetic oligonucleotide
  Target: LAMA2; (-) strand; PAM type: YTN; PAM sequence: CTC
aacacttacatcagtttcaa

SEQ ID NO: 287131 - DNA, 20 bp, Artificial Sequence
  Description of Artificial Sequence: Synthetic oligonucleotide
  Target: LAMA2; (-) strand; PAM type: YTN; PAM sequence: TTG
gctcaacacttacatcagtt

SEQ ID NO: 287132 - DNA, 20 bp, Artificial Sequence
  Description of Artificial Sequence: Synthetic oligonucleotide
  Target: LAMA2; (-) strand; PAM type: YTN; PAM sequence: CTT
ggctcaacacttacatcagt

SEQ ID NO: 287133 - DNA, 20 bp, Artificial Sequence
  Description of Artificial Sequence: Synthetic oligonucleotide
  Target: LAMA2; (-) strand; PAM type: YTN; PAM sequence: CTG
atcttggctcaacacttaca

SEQ ID NO: 287134 - DNA, 20 bp, Artificial Sequence
  Description of Artificial Sequence: Synthetic oligonucleotide
  Target: LAMA2; (-) strand; PAM type: YTN; PAM sequence: CTC
agagtctgatcttggctcaa

SEQ ID NO: 287135 - DNA, 20 bp, Artificial Sequence
  Description of Artificial Sequence: Synthetic oligonucleotide
  Target: LAMA2; (-) strand; PAM type: YTN; PAM sequence: CTC
gaatcaatactcagagtctg

SEQ ID NO: 287136 - DNA, 20 bp, Artificial Sequence
  Description of Artificial Sequence: Synthetic oligonucleotide
  Target: LAMA2; (-) strand; PAM type: YTN; PAM sequence: TTA
gatctcgaatcaatactcag

SEQ ID NO: 287137 - DNA, 20 bp, Artificial Sequence
  Description of Artificial Sequence: Synthetic oligonucleotide
  Target: LAMA2; (-) strand; PAM type: YTN; PAM sequence: TTC
attagatctcgaatcaatac

SEQ ID NO: 287138 - DNA, 20 bp, Artificial Sequence
  Description of Artificial Sequence: Synthetic oligonucleotide
  Target: LAMA2; (-) strand; PAM type: YTN; PAM sequence: TTC
caaattcattagatctcgaa

SEQ ID NO: 287139 - DNA, 20 bp, Artificial Sequence
  Description of Artificial Sequence: Synthetic oligonucleotide
  Target: LAMA2; (-) strand; PAM type: YTN; PAM sequence: CTA
acattccaaattcattagat

SEQ ID NO: 287140 - DNA, 20 bp, Artificial Sequence
  Description of Artificial Sequence: Synthetic oligonucleotide
  Target: LAMA2; (-) strand; PAM type: YTN; PAM sequence: TTC
taacattccaaattcattag

SEQ ID NO: 287141 - DNA, 20 bp, Artificial Sequence
  Description of Artificial Sequence: Synthetic oligonucleotide
  Target: LAMA2; (-) strand; PAM type: YTN; PAM sequence: TTT
ctaacattccaaattcatta

SEQ ID NO: 287142 - DNA, 20 bp, Artificial Sequence
  Description of Artificial Sequence: Synthetic oligonucleotide
  Target: LAMA2; (-) strand; PAM type: YTN; PAM sequence: TTA
gtttctaacattccaaattc

SEQ ID NO: 287143 - DNA, 20 bp, Artificial Sequence
  Description of Artificial Sequence: Synthetic oligonucleotide
  Target: LAMA2; (-) strand; PAM type: YTN; PAM sequence: TTT
agtttctaacattccaaatt

SEQ ID NO: 287144 - DNA, 20 bp, Artificial Sequence
  Description of Artificial Sequence: Synthetic oligonucleotide
  Target: LAMA2; (-) strand; PAM type: YTN; PAM sequence: CTG
tttagtttctaacattccaa

SEQ ID NO: 287145 - DNA, 20 bp, Artificial Sequence
  Description of Artificial Sequence: Synthetic oligonucleotide
  Target: LAMA2; (-) strand; PAM type: YTN; PAM sequence: CTG
gctgtttagtttctaacatt

SEQ ID NO: 287146 - DNA, 20 bp, Artificial Sequence
  Description of Artificial Sequence: Synthetic oligonucleotide
  Target: LAMA2; (-) strand; PAM type: YTN; PAM sequence: TTA
agagaaaactggctgtttag

SEQ ID NO: 287147 - DNA, 20 bp, Artificial Sequence
  Description of Artificial Sequence: Synthetic oligonucleotide
  Target: LAMA2; (-) strand; PAM type: YTN; PAM sequence: TTT
aagagaaaactggctgttta

SEQ ID NO: 287148 - DNA, 20 bp, Artificial Sequence
  Description of Artificial Sequence: Synthetic oligonucleotide
  Target: LAMA2; (-) strand; PAM type: YTN; PAM sequence: TTA
agaatttaagagaaaactgg

SEQ ID NO: 287149 - DNA, 20 bp, Artificial Sequence
  Description of Artificial Sequence: Synthetic oligonucleotide
  Target: LAMA2; (-) strand; PAM type: YTN; PAM sequence: TTT
aagaatttaagagaaaactg

SEQ ID NO: 287150 - DNA, 20 bp, Artificial Sequence
  Description of Artificial Sequence: Synthetic oligonucleotide
  Target: LAMA2; (-) strand; PAM type: YTN; PAM sequence: TTT
taagaatttaagagaaaact

SEQ ID NO: 287151 - DNA, 20 bp, Artificial Sequence
  Description of Artificial Sequence: Synthetic oligonucleotide
  Target: LAMA2; (-) strand; PAM type: YTN; PAM sequence: TTT
ttaagaatttaagagaaaac

SEQ ID NO: 287152 - DNA, 20 bp, Artificial Sequence
  Description of Artificial Sequence: Synthetic oligonucleotide
  Target: LAMA2; (-) strand; PAM type: YTN; PAM sequence: TTG
tttttaagaatttaagagaa

SEQ ID NO: 287153 - DNA, 20 bp, Artificial Sequence
  Description of Artificial Sequence: Synthetic oligonucleotide
  Target: LAMA2; (-) strand; PAM type: YTN; PAM sequence: CTT
gtttttaagaatttaagaga

SEQ ID NO: 287154 - DNA, 20 bp, Artificial Sequence
  Description of Artificial Sequence: Synthetic oligonucleotide
  Target: LAMA2; (-) strand; PAM type: YTN; PAM sequence: TTA
aaagatataaaatgcggaga

SEQ ID NO: 287155 - DNA, 20 bp, Artificial Sequence
  Description of Artificial Sequence: Synthetic oligonucleotide
  Target: LAMA2; (-) strand; PAM type: YTN; PAM sequence: TTT
aaaagatataaaatgcggag

SEQ ID NO: 287156 - DNA, 20 bp, Artificial Sequence
  Description of Artificial Sequence: Synthetic oligonucleotide
  Target: LAMA2; (-) strand; PAM type: YTN; PAM sequence: TTC
cagatttaaaagatataaaa

SEQ ID NO: 287157 - DNA, 20 bp, Artificial Sequence
  Description of Artificial Sequence: Synthetic oligonucleotide
  Target: LAMA2; (-) strand; PAM type: YTN; PAM sequence: CTG
gtaattccagatttaaaaga

SEQ ID NO: 287158 - DNA, 20 bp, Artificial Sequence
  Description of Artificial Sequence: Synthetic oligonucleotide
  Target: LAMA2; (-) strand; PAM type: YTN; PAM sequence: TTC
tggtaattccagatttaaaa

SEQ ID NO: 287159 - DNA, 20 bp, Artificial Sequence
  Description of Artificial Sequence: Synthetic oligonucleotide
  Target: LAMA2; (-) strand; PAM type: YTN; PAM sequence: TTT
ctggtaattccagatttaaa

SEQ ID NO: 287160 - DNA, 20 bp, Artificial Sequence
  Description of Artificial Sequence: Synthetic oligonucleotide
  Target: LAMA2; (-) strand; PAM type: YTN; PAM sequence: TTG
aagtgaaggggaggaacata

SEQ ID NO: 287161 - DNA, 20 bp, Artificial Sequence
  Description of Artificial Sequence: Synthetic oligonucleotide
  Target: LAMA2; (-) strand; PAM type: YTN; PAM sequence: TTC
aagggtacgtgttgaagtga

SEQ ID NO: 287162 - DNA, 20 bp, Artificial Sequence
  Description of Artificial Sequence: Synthetic oligonucleotide
  Target: LAMA2; (-) strand; PAM type: YTN; PAM sequence: CTT
caagggtacgtgttgaagtg

SEQ ID NO: 287163 - DNA, 20 bp, Artificial Sequence
  Description of Artificial Sequence: Synthetic oligonucleotide
  Target: LAMA2; (-) strand; PAM type: YTN; PAM sequence: TTC
ttcaagggtacgtgttgaag

SEQ ID NO: 287164 - DNA, 20 bp, Artificial Sequence
  Description of Artificial Sequence: Synthetic oligonucleotide
  Target: LAMA2; (-) strand; PAM type: YTN; PAM sequence: CTC
ccagttcttcaagggtacgt

SEQ ID NO: 287165 - DNA, 20 bp, Artificial Sequence
  Description of Artificial Sequence: Synthetic oligonucleotide
  Target: LAMA2; (-) strand; PAM type: YTN; PAM sequence: TTC
tcccagttcttcaagggtac

SEQ ID NO: 287166 - DNA, 20 bp, Artificial Sequence
  Description of Artificial Sequence: Synthetic oligonucleotide
  Target: LAMA2; (-) strand; PAM type: YTN; PAM sequence: TTT
ctcccagttcttcaagggta

SEQ ID NO: 287167 - DNA, 20 bp, Artificial Sequence
  Description of Artificial Sequence: Synthetic oligonucleotide
  Target: LAMA2; (-) strand; PAM type: YTN; PAM sequence: TTC
catttctcccagttcttcaa

SEQ ID NO: 287168 - DNA, 20 bp, Artificial Sequence
  Description of Artificial Sequence: Synthetic oligonucleotide
  Target: LAMA2; (-) strand; PAM type: YTN; PAM sequence: CTC
acagaaatagttccatttct

SEQ ID NO: 287169 - DNA, 20 bp, Artificial Sequence
  Description of Artificial Sequence: Synthetic oligonucleotide
  Target: LAMA2; (-) strand; PAM type: YTN; PAM sequence: CTC
tcacagaaatagttccattt

SEQ ID NO: 287170 - DNA, 20 bp, Artificial Sequence
  Description of Artificial Sequence: Synthetic oligonucleotide
  Target: LAMA2; (-) strand; PAM type: YTN; PAM sequence: TTG
ggtccatccagggctctcac

SEQ ID NO: 287171 - DNA, 20 bp, Artificial Sequence
  Description of Artificial Sequence: Synthetic oligonucleotide
  Target: LAMA2; (-) strand; PAM type: YTN; PAM sequence: TTT
gggtccatccagggctctca

SEQ ID NO: 287172 - DNA, 20 bp, Artificial Sequence
  Description of Artificial Sequence: Synthetic oligonucleotide
  Target: LAMA2; (-) strand; PAM type: YTN; PAM sequence: CTT
tgggtccatccagggctctc

SEQ ID NO: 287173 - DNA, 20 bp, Artificial Sequence
  Description of Artificial Sequence: Synthetic oligonucleotide
  Target: LAMA2; (-) strand; PAM type: YTN; PAM sequence: CTG
gctttgggtccatccagggc

SEQ ID NO: 287174 - DNA, 20 bp, Artificial Sequence
  Description of Artificial Sequence: Synthetic oligonucleotide
  Target: LAMA2; (-) strand; PAM type: YTN; PAM sequence: CTG
ggcacaatgctggctttggg

SEQ ID NO: 287175 - DNA, 20 bp, Artificial Sequence
  Description of Artificial Sequence: Synthetic oligonucleotide
  Target: LAMA2; (-) strand; PAM type: YTN; PAM sequence: CTG
gaggagacgtcgaatggtgt

SEQ ID NO: 287176 - DNA, 20 bp, Artificial Sequence
  Description of Artificial Sequence: Synthetic oligonucleotide
  Target: LAMA2; (-) strand; PAM type: YTN; PAM sequence: CTA
gaatcgtgtaccctggagga

SEQ ID NO: 287177 - DNA, 20 bp, Artificial Sequence
  Description of Artificial Sequence: Synthetic oligonucleotide
  Target: LAMA2; (-) strand; PAM type: YTN; PAM sequence: TTG
catccacatctagaatcgtg

SEQ ID NO: 287178 - DNA, 20 bp, Artificial Sequence
  Description of Artificial Sequence: Synthetic oligonucleotide
  Target: LAMA2; (-) strand; PAM type: YTN; PAM sequence: TTT
gcatccacatctagaatcgt

SEQ ID NO: 287179 - DNA, 20 bp, Artificial Sequence
  Description of Artificial Sequence: Synthetic oligonucleotide
  Target: LAMA2; (-) strand; PAM type: YTN; PAM sequence: TTG
catttgcatccacatctaga

SEQ ID NO: 287180 - DNA, 20 bp, Artificial Sequence
  Description of Artificial Sequence: Synthetic oligonucleotide
  Target: LAMA2; (-) strand; PAM type: YTN; PAM sequence: TTC
ccagtcaggccaccaacaaa

SEQ ID NO: 287181 - DNA, 20 bp, Artificial Sequence
  Description of Artificial Sequence: Synthetic oligonucleotide
  Target: LAMA2; (-) strand; PAM type: YTN; PAM sequence: TTT
cccagtcaggccaccaacaa

SEQ ID NO: 287182 - DNA, 20 bp, Artificial Sequence
  Description of Artificial Sequence: Synthetic oligonucleotide
  Target: LAMA2; (-) strand; PAM type: YTN; PAM sequence: TTA
atttcccagtcaggccacca

SEQ ID NO: 287183 - DNA, 20 bp, Artificial Sequence
  Description of Artificial Sequence: Synthetic oligonucleotide
  Target: LAMA2; (-) strand; PAM type: YTN; PAM sequence: TTT
aatttcccagtcaggccacc

SEQ ID NO: 287184 - DNA, 20 bp, Artificial Sequence
  Description of Artificial Sequence: Synthetic oligonucleotide
  Target: LAMA2; (-) strand; PAM type: YTN; PAM sequence: CTT
taatttcccagtcaggccac

SEQ ID NO: 287185 - DNA, 20 bp, Artificial Sequence
  Description of Artificial Sequence: Synthetic oligonucleotide
  Target: LAMA2; (-) strand; PAM type: YTN; PAM sequence: TTA
cctttaatttcccagtcagg

SEQ ID NO: 287186 - DNA, 20 bp, Artificial Sequence
  Description of Artificial Sequence: Synthetic oligonucleotide
  Target: LAMA2; (-) strand; PAM type: YTN; PAM sequence: TTA
tgtcaggagatgtcaacaaa

SEQ ID NO: 287187 - DNA, 20 bp, Artificial Sequence
  Description of Artificial Sequence: Synthetic oligonucleotide
  Target: LAMA2; (-) strand; PAM type: YTN; PAM sequence: CTG
aagtaattatgtcaggagat

SEQ ID NO: 287188 - DNA, 20 bp, Artificial Sequence
  Description of Artificial Sequence: Synthetic oligonucleotide
  Target: LAMA2; (-) strand; PAM type: YTN; PAM sequence: CTC
ctgaagtaattatgtcagga

SEQ ID NO: 287189 - DNA, 20 bp, Artificial Sequence
  Description of Artificial Sequence: Synthetic oligonucleotide
  Target: LAMA2; (-) strand; PAM type: YTN; PAM sequence: TTC
tcctgaagtaattatgtcag

SEQ ID NO: 287190 - DNA, 20 bp, Artificial Sequence
  Description of Artificial Sequence: Synthetic oligonucleotide
  Target: LAMA2; (-) strand; PAM type: YTN; PAM sequence: CTT
ctcctgaagtaattatgtca

SEQ ID NO: 287191 - DNA, 20 bp, Artificial Sequence
  Description of Artificial Sequence: Synthetic oligonucleotide
  Target: LAMA2; (-) strand; PAM type: YTN; PAM sequence: TTA
tcataccttctcctgaagta

SEQ ID NO: 287192 - DNA, 20 bp, Artificial Sequence
  Description of Artificial Sequence: Synthetic oligonucleotide
  Target: LAMA2; (-) strand; PAM type: YTN; PAM sequence: TTT
atcataccttctcctgaagt

SEQ ID NO: 287193 - DNA, 20 bp, Artificial Sequence
  Description of Artificial Sequence: Synthetic oligonucleotide
  Target: LAMA2; (-) strand; PAM type: YTN; PAM sequence: CTT
tatcataccttctcctgaag

SEQ ID NO: 287194 - DNA, 20 bp, Artificial Sequence
  Description of Artificial Sequence: Synthetic oligonucleotide
  Target: LAMA2; (-) strand; PAM type: YTN; PAM sequence: TTA
cagagctttatcataccttc

SEQ ID NO: 287195 - DNA, 20 bp, Artificial Sequence
  Description of Artificial Sequence: Synthetic oligonucleotide
  Target: LAMA2; (-) strand; PAM type: YTN; PAM sequence: TTT
acagagctttatcatacctt

SEQ ID NO: 287196 - DNA, 20 bp, Artificial Sequence
  Description of Artificial Sequence: Synthetic oligonucleotide
  Target: LAMA2; (-) strand; PAM type: YTN; PAM sequence: TTT
tacagagctttatcatacct

SEQ ID NO: 287197 - DNA, 20 bp, Artificial Sequence
  Description of Artificial Sequence: Synthetic oligonucleotide
  Target: LAMA2; (-) strand; PAM type: YTN; PAM sequence: TTA
agtaaaacgtgatcaagttt

SEQ ID NO: 287198 - DNA, 20 bp, Artificial Sequence
  Description of Artificial Sequence: Synthetic oligonucleotide
  Target: LAMA2; (-) strand; PAM type: YTN; PAM sequence: TTC
ataaatgcaagttaagtaaa

SEQ ID NO: 287199 - DNA, 20 bp, Artificial Sequence
  Description of Artificial Sequence: Synthetic oligonucleotide
  Target: LAMA2; (-) strand; PAM type: YTN; PAM sequence: TTT
cataaatgcaagttaagtaa

SEQ ID NO: 287200 - DNA, 20 bp, Artificial Sequence
  Description of Artificial Sequence: Synthetic oligonucleotide
  Target: LAMA2; (-) strand; PAM type: YTN; PAM sequence: TTT
tcataaatgcaagttaagta

SEQ ID NO: 287201 - DNA, 20 bp, Artificial Sequence
  Description of Artificial Sequence: Synthetic oligonucleotide
  Target: LAMA2; (-) strand; PAM type: YTN; PAM sequence: TTC
atgttttcataaatgcaagt

SEQ ID NO: 287202 - DNA, 20 bp, Artificial Sequence
  Description of Artificial Sequence: Synthetic oligonucleotide
  Target: LAMA2; (-) strand; PAM type: YTN; PAM sequence: CTC
aaagtaaattcatgttttca

SEQ ID NO: 287203 - DNA, 20 bp, Artificial Sequence
  Description of Artificial Sequence: Synthetic oligonucleotide
  Target: LAMA2; (-) strand; PAM type: YTN; PAM sequence: TTA
ctcaaagtaaattcatgttt

SEQ ID NO: 287204 - DNA, 20 bp, Artificial Sequence
  Description of Artificial Sequence: Synthetic oligonucleotide
  Target: LAMA2; (-) strand; PAM type: YTN; PAM sequence: CTT
actcaaagtaaattcatgtt

SEQ ID NO: 287205 - DNA, 20 bp, Artificial Sequence
  Description of Artificial Sequence: Synthetic oligonucleotide
  Target: LAMA2; (-) strand; PAM type: YTN; PAM sequence: TTC
ttactcaaagtaaattcatg

SEQ ID NO: 287206 - DNA, 20 bp, Artificial Sequence
  Description of Artificial Sequence: Synthetic oligonucleotide
  Target: LAMA2; (-) strand; PAM type: YTN; PAM sequence: TTG
aatcgtcaaagaagaaaatt

SEQ ID NO: 287207 - DNA, 20 bp, Artificial Sequence
  Description of Artificial Sequence: Synthetic oligonucleotide
  Target: LAMA2; (-) strand; PAM type: YTN; PAM sequence: TTC
caggttgaatcgtcaaagaa

SEQ ID NO: 287208 - DNA, 20 bp, Artificial Sequence
  Description of Artificial Sequence: Synthetic oligonucleotide
  Target: LAMA2; (-) strand; PAM type: YTN; PAM sequence: TTT
ccaggttgaatcgtcaaaga

SEQ ID NO: 287209 - DNA, 20 bp, Artificial Sequence
  Description of Artificial Sequence: Synthetic oligonucleotide
  Target: LAMA2; (-) strand; PAM type: YTN; PAM sequence: TTG
tgtttccaggttgaatcgtc

SEQ ID NO: 287210 - DNA, 20 bp, Artificial Sequence
  Description of Artificial Sequence: Synthetic oligonucleotide
  Target: LAMA2; (-) strand; PAM type: YTN; PAM sequence: TTA
aaaatattgtgtttccaggt

SEQ ID NO: 287211 - DNA, 20 bp, Artificial Sequence
  Description of Artificial Sequence: Synthetic oligonucleotide
  Target: LAMA2; (-) strand; PAM type: YTN; PAM sequence: CTT
aaaaatattgtgtttccagg

SEQ ID NO: 287212 - DNA, 20 bp, Artificial Sequence
  Description of Artificial Sequence: Synthetic oligonucleotide
  Target: LAMA2; (-) strand; PAM type: YTN; PAM sequence: TTA
aataaatacacataggctta

SEQ ID NO: 287213 - DNA, 20 bp, Artificial Sequence
  Description of Artificial Sequence: Synthetic oligonucleotide
  Target: LAMA2; (-) strand; PAM type: YTN; PAM sequence: TTT
aaataaatacacataggctt

SEQ ID NO: 287214 - DNA, 20 bp, Artificial Sequence
  Description of Artificial Sequence: Synthetic oligonucleotide
  Target: LAMA2; (-) strand; PAM type: YTN; PAM sequence: CTG
tttaaataaatacacatagg

SEQ ID NO: 287215 - DNA, 20 bp, Artificial Sequence
  Description of Artificial Sequence: Synthetic oligonucleotide
  Target: LAMA2; (-) strand; PAM type: YTN; PAM sequence: CTG
atgccacagataaagacaaa

SEQ ID NO: 287216 - DNA, 20 bp, Artificial Sequence
  Description of Artificial Sequence: Synthetic oligonucleotide
  Target: LAMA2; (-) strand; PAM type: YTN; PAM sequence: CTA
aaacaagaatatacaaaaaa

SEQ ID NO: 287217 - DNA, 20 bp, Artificial Sequence
  Description of Artificial Sequence: Synthetic oligonucleotide
  Target: LAMA2; (-) strand; PAM type: YTN; PAM sequence: TTG
aggcaactaaaacaagaata

SEQ ID NO: 287218 - DNA, 20 bp, Artificial Sequence
  Description of Artificial Sequence: Synthetic oligonucleotide
  Target: LAMA2; (-) strand; PAM type: YTN; PAM sequence: CTT
gaggcaactaaaacaagaat

SEQ ID NO: 287219 - DNA, 20 bp, Artificial Sequence
  Description of Artificial Sequence: Synthetic oligonucleotide
  Target: LAMA2; (-) strand; PAM type: YTN; PAM sequence: CTC
ttgaggcaactaaaacaaga

SEQ ID NO: 287220 - DNA, 20 bp, Artificial Sequence
  Description of Artificial Sequence: Synthetic oligonucleotide
  Target: LAMA2; (-) strand; PAM type: YTN; PAM sequence: TTG
ctcttgaggcaactaaaaca

SEQ ID NO: 287221 - DNA, 20 bp, Artificial Sequence
  Description of Artificial Sequence: Synthetic oligonucleotide
  Target: LAMA2; (-) strand; PAM type: YTN; PAM sequence: TTT
gctcttgaggcaactaaaac

SEQ ID NO: 287222 - DNA, 20 bp, Artificial Sequence
  Description of Artificial Sequence: Synthetic oligonucleotide
  Target: LAMA2; (-) strand; PAM type: YTN; PAM sequence: CTT
tgctcttgaggcaactaaaa

SEQ ID NO: 287223 - DNA, 20 bp, Artificial Sequence
  Description of Artificial Sequence: Synthetic oligonucleotide
  Target: LAMA2; (-) strand; PAM type: YTN; PAM sequence: TTA
aaaaacactttgctcttgag

SEQ ID NO: 287224 - DNA, 20 bp, Artificial Sequence
  Description of Artificial Sequence: Synthetic oligonucleotide
  Target: LAMA2; (-) strand; PAM type: YTN; PAM sequence: CTT
aaaaaacactttgctcttga

SEQ ID NO: 287225 - DNA, 20 bp, Artificial Sequence
  Description of Artificial Sequence: Synthetic oligonucleotide
  Target: LAMA2; (-) strand; PAM type: YTN; PAM sequence: TTC
agaagatgaggtatacttaa

SEQ ID NO: 287226 - DNA, 20 bp, Artificial Sequence
  Description of Artificial Sequence: Synthetic oligonucleotide
  Target: LAMA2; (-) strand; PAM type: YTN; PAM sequence: CTA
taaatcataaatcgattcag

SEQ ID NO: 287227 - DNA, 20 bp, Artificial Sequence
  Description of Artificial Sequence: Synthetic oligonucleotide
  Target: LAMA2; (-) strand; PAM type: YTN; PAM sequence: TTC
atatctataaatcataaatc

SEQ ID NO: 287228 - DNA, 20 bp, Artificial Sequence
  Description of Artificial Sequence: Synthetic oligonucleotide
  Target: LAMA2; (-) strand; PAM type: YTN; PAM sequence: CTT
catatctataaatcataaat

SEQ ID NO: 287229 - DNA, 20 bp, Artificial Sequence
  Description of Artificial Sequence: Synthetic oligonucleotide
  Target: LAMA2; (-) strand; PAM type: YTN; PAM sequence: TTA
tagcacttcatatctataaa

SEQ ID NO: 287230 - DNA, 20 bp, Artificial Sequence
  Description of Artificial Sequence: Synthetic oligonucleotide
  Target: LAMA2; (-) strand; PAM type: YTN; PAM sequence: TTT
atagcacttcatatctataa

SEQ ID NO: 287231 - DNA, 20 bp, Artificial Sequence
  Description of Artificial Sequence: Synthetic oligonucleotide
  Target: LAMA2; (-) strand; PAM type: YTN; PAM sequence: CTT
tatagcacttcatatctata

SEQ ID NO: 287232 - DNA, 20 bp, Artificial Sequence
  Description of Artificial Sequence: Synthetic oligonucleotide
  Target: LAMA2; (-) strand; PAM type: YTN; PAM sequence: TTA
gatgtgagtatgaactttat

SEQ ID NO: 287233 - DNA, 20 bp, Artificial Sequence
  Description of Artificial Sequence: Synthetic oligonucleotide
  Target: LAMA2; (-) strand; PAM type: YTN; PAM sequence: TTA
attagatgtgagtatgaact

SEQ ID NO: 287234 - DNA, 20 bp, Artificial Sequence
  Description of Artificial Sequence: Synthetic oligonucleotide
  Target: LAMA2; (-) strand; PAM type: YTN; PAM sequence: TTT
aattagatgtgagtatgaac

SEQ ID NO: 287235 - DNA, 20 bp, Artificial Sequence
  Description of Artificial Sequence: Synthetic oligonucleotide
  Target: LAMA2; (-) strand; PAM type: YTN; PAM sequence: TTT
taattagatgtgagtatgaa

SEQ ID NO: 287236 - DNA, 20 bp, Artificial Sequence
  Description of Artificial Sequence: Synthetic oligonucleotide
  Target: LAMA2; (-) strand; PAM type: YTN; PAM sequence: CTT
ttaattagatgtgagtatga

SEQ ID NO: 287237 - DNA, 20 bp, Artificial Sequence
  Description of Artificial Sequence: Synthetic oligonucleotide
  Target: LAMA2; (-) strand; PAM type: YTN; PAM sequence: TTC
ataaatcttttaattagatg

SEQ ID NO: 287238 - DNA, 20 bp, Artificial Sequence
  Description of Artificial Sequence: Synthetic oligonucleotide
  Target: LAMA2; (-) strand; PAM type: YTN; PAM sequence: TTC
ccaaagtattcataaatctt

SEQ ID NO: 287239 - DNA, 20 bp, Artificial Sequence
  Description of Artificial Sequence: Synthetic oligonucleotide
  Target: LAMA2; (-) strand; PAM type: YTN; PAM sequence: TTT
cccaaagtattcataaatct

SEQ ID NO: 287240 - DNA, 20 bp, Artificial Sequence
  Description of Artificial Sequence: Synthetic oligonucleotide
  Target: LAMA2; (-) strand; PAM type: YTN; PAM sequence: CTG
tgatatttcccaaagtattc

SEQ ID NO: 287241 - DNA, 20 bp, Artificial Sequence
  Description of Artificial Sequence: Synthetic oligonucleotide
  Target: LAMA2; (-) strand; PAM type: YTN; PAM sequence: CTC
ctgtgatatttcccaaagta

SEQ ID NO: 287242 - DNA, 20 bp, Artificial Sequence
  Description of Artificial Sequence: Synthetic oligonucleotide
  Target: LAMA2; (-) strand; PAM type: YTN; PAM sequence: TTA
tagctcctgtgatatttccc

SEQ ID NO: 287243 - DNA, 20 bp, Artificial Sequence
  Description of Artificial Sequence: Synthetic oligonucleotide
  Target: LAMA2; (-) strand; PAM type: YTN; PAM sequence: CTT
atagctcctgtgatatttcc

SEQ ID NO: 287244 - DNA, 20 bp, Artificial Sequence
  Description of Artificial Sequence: Synthetic oligonucleotide
  Target: LAMA2; (-) strand; PAM type: YTN; PAM sequence: TTG
aaagcttatagctcctgtga

SEQ ID NO: 287245 - DNA, 20 bp, Artificial Sequence
  Description of Artificial Sequence: Synthetic oligonucleotide
  Target: LAMA2; (-) strand; PAM type: YTN; PAM sequence: TTT
gaaagcttatagctcctgtg

SEQ ID NO: 287246 - DNA, 20 bp, Artificial Sequence
  Description of Artificial Sequence: Synthetic oligonucleotide
  Target: LAMA2; (-) strand; PAM type: YTN; PAM sequence: TTT
tgaaagcttatagctcctgt

SEQ ID NO: 287247 - DNA, 20 bp, Artificial Sequence
  Description of Artificial Sequence: Synthetic oligonucleotide
  Target: LAMA2; (-) strand; PAM type: YTN; PAM sequence: TTA
aaaaccagatcatgttttga

SEQ ID NO: 287248 - DNA, 20 bp, Artificial Sequence
  Description of Artificial Sequence: Synthetic oligonucleotide
  Target: LAMA2; (-) strand; PAM type: YTN; PAM sequence: TTT
aaaaaccagatcatgttttg

SEQ ID NO: 287249 - DNA, 20 bp, Artificial Sequence
  Description of Artificial Sequence: Synthetic oligonucleotide
  Target: LAMA2; (-) strand; PAM type: YTN; PAM sequence: CTT
taaaaaccagatcatgtttt

SEQ ID NO: 287250 - DNA, 20 bp, Artificial Sequence
  Description of Artificial Sequence: Synthetic oligonucleotide
  Target: LAMA2; (-) strand; PAM type: YTN; PAM sequence: TTG
agaactttaaaaaccagatc

SEQ ID NO: 287251 - DNA, 20 bp, Artificial Sequence
  Description of Artificial Sequence: Synthetic oligonucleotide
  Target: LAMA2; (-) strand; PAM type: YTN; PAM sequence: CTT
gagaactttaaaaaccagat

SEQ ID NO: 287252 - DNA, 20 bp, Artificial Sequence
  Description of Artificial Sequence: Synthetic oligonucleotide
  Target: LAMA2; (-) strand; PAM type: YTN; PAM sequence: CTA
taagaataagagcaacttga

SEQ ID NO: 287253 - DNA, 20 bp, Artificial Sequence
  Description of Artificial Sequence: Synthetic oligonucleotide
  Target: LAMA2; (-) strand; PAM type: YTN; PAM sequence: TTA
agtgcatcatcctataagaa

SEQ ID NO: 287254 - DNA, 20 bp, Artificial Sequence
  Description of Artificial Sequence: Synthetic oligonucleotide
  Target: LAMA2; (-) strand; PAM type: YTN; PAM sequence: TTA
tgaatattaagtgcatcatc

SEQ ID NO: 287255 - DNA, 20 bp, Artificial Sequence
  Description of Artificial Sequence: Synthetic oligonucleotide
  Target: LAMA2; (-) strand; PAM type: YTN; PAM sequence: CTG
tcatgaagcaattatgaata

SEQ ID NO: 287256 - DNA, 20 bp, Artificial Sequence
  Description of Artificial Sequence: Synthetic oligonucleotide
  Target: LAMA2; (-) strand; PAM type: YTN; PAM sequence: TTG
aaatgcgcaaggactgtcat

SEQ ID NO: 287257 - DNA, 20 bp, Artificial Sequence
  Description of Artificial Sequence: Synthetic oligonucleotide
  Target: LAMA2; (-) strand; PAM type: YTN; PAM sequence: TTT
gaaatgcgcaaggactgtca

SEQ ID NO: 287258 - DNA, 20 bp, Artificial Sequence
  Description of Artificial Sequence: Synthetic oligonucleotide
  Target: LAMA2; (-) strand; PAM type: YTN; PAM sequence: CTG
caatttgaaatgcgcaagga

SEQ ID NO: 287259 - DNA, 20 bp, Artificial Sequence
  Description of Artificial Sequence: Synthetic oligonucleotide
  Target: LAMA2; (-) strand; PAM type: YTN; PAM sequence: TTC
tgcaatttgaaatgcgcaag

SEQ ID NO: 287260 - DNA, 20 bp, Artificial Sequence
  Description of Artificial Sequence: Synthetic oligonucleotide
  Target: LAMA2; (-) strand; PAM type: YTN; PAM sequence: TTA
aaaggcaggcattctgcaat

SEQ ID NO: 287261 - DNA, 20 bp, Artificial Sequence
  Description of Artificial Sequence: Synthetic oligonucleotide
  Target: LAMA2; (-) strand; PAM type: YTN; PAM sequence: TTT
aaaaggcaggcattctgcaa

SEQ ID NO: 287262 - DNA, 20 bp, Artificial Sequence
  Description of Artificial Sequence: Synthetic oligonucleotide
  Target: LAMA2; (-) strand; PAM type: YTN; PAM sequence: CTT
taaaaggcaggcattctgca

SEQ ID NO: 287263 - DNA, 20 bp, Artificial Sequence
  Description of Artificial Sequence: Synthetic oligonucleotide
  Target: LAMA2; (-) strand; PAM type: YTN; PAM sequence: TTC
tttaaaaggcaggcattctg

SEQ ID NO: 287264 - DNA, 20 bp, Artificial Sequence
  Description of Artificial Sequence: Synthetic oligonucleotide
  Target: LAMA2; (-) strand; PAM type: YTN; PAM sequence: CTT
ctttaaaaggcaggcattct

SEQ ID NO: 287265 - DNA, 20 bp, Artificial Sequence
  Description of Artificial Sequence: Synthetic oligonucleotide
  Target: LAMA2; (-) strand; PAM type: YTN; PAM sequence: TTA
atcaacacaagcttctttaa

SEQ ID NO: 287266 - DNA, 20 bp, Artificial Sequence
  Description of Artificial Sequence: Synthetic oligonucleotide
  Target: LAMA2; (-) strand; PAM type: YTN; PAM sequence: TTT
aatcaacacaagcttcttta

SEQ ID NO: 287267 - DNA, 20 bp, Artificial Sequence
  Description of Artificial Sequence: Synthetic oligonucleotide
  Target: LAMA2; (-) strand; PAM type: YTN; PAM sequence: TTC
catttaatcaacacaagctt

SEQ ID NO: 287268 - DNA, 20 bp, Artificial Sequence
  Description of Artificial Sequence: Synthetic oligonucleotide
  Target: LAMA2; (-) strand; PAM type: YTN; PAM sequence: CTA
attccatttaatcaacacaa

SEQ ID NO: 287269 - DNA, 20 bp, Artificial Sequence
  Description of Artificial Sequence: Synthetic oligonucleotide
  Target: LAMA2; (-) strand; PAM type: YTN; PAM sequence: TTC
ccaacacctaattccattta

SEQ ID NO: 287270 - DNA, 20 bp, Artificial Sequence
  Description of Artificial Sequence: Synthetic oligonucleotide
  Target: LAMA2; (-) strand; PAM type: YTN; PAM sequence: TTT
cccaacacctaattccattt

SEQ ID NO: 287271 - DNA, 20 bp, Artificial Sequence
  Description of Artificial Sequence: Synthetic oligonucleotide
  Target: LAMA2; (-) strand; PAM type: YTN; PAM sequence: CTC
acccatagtggtttcccaac

SEQ ID NO: 287272 - DNA, 20 bp, Artificial Sequence
  Description of Artificial Sequence: Synthetic oligonucleotide
  Target: LAMA2; (-) strand; PAM type: YTN; PAM sequence: CTG
catctcacccatagtggttt

SEQ ID NO: 287273 - DNA, 20 bp, Artificial Sequence
  Description of Artificial Sequence: Synthetic oligonucleotide
  Target: LAMA2; (-) strand; PAM type: YTN; PAM sequence: CTC
ctgcatctcacccatagtgg

SEQ ID NO: 287274 - DNA, 20 bp, Artificial Sequence
  Description of Artificial Sequence: Synthetic oligonucleotide
  Target: LAMA2; (-) strand; PAM type: YTN; PAM sequence: TTG
tgctcctgcatctcacccat

SEQ ID NO: 287275 - DNA, 20 bp, Artificial Sequence
  Description of Artificial Sequence: Synthetic oligonucleotide
  Target: LAMA2; (-) strand; PAM type: YTN; PAM sequence: TTG
gttgtgctcctgcatctcac

SEQ ID NO: 287276 - DNA, 20 bp, Artificial Sequence
  Description of Artificial Sequence: Synthetic oligonucleotide
  Target: LAMA2; (-) strand; PAM type: YTN; PAM sequence: TTT
ggttgtgctcctgcatctca

SEQ ID NO: 287277 - DNA, 20 bp, Artificial Sequence
  Description of Artificial Sequence: Synthetic oligonucleotide
  Target: LAMA2; (-) strand; PAM type: YTN; PAM sequence: TTA
tatttggttgtgctcctgca

SEQ ID NO: 287278 - DNA, 20 bp, Artificial Sequence
  Description of Artificial Sequence: Synthetic oligonucleotide
  Target: LAMA2; (-) strand; PAM type: YTN; PAM sequence: TTA
tccattatatttggttgtgc

SEQ ID NO: 287279 - DNA, 20 bp, Artificial Sequence
  Description of Artificial Sequence: Synthetic oligonucleotide
  Target: LAMA2; (-) strand; PAM type: YTN; PAM sequence: CTG
acaagcccaggattatccat

SEQ ID NO: 287280 - DNA, 20 bp, Artificial Sequence
  Description of Artificial Sequence: Synthetic oligonucleotide
  Target: LAMA2; (-) strand; PAM type: YTN; PAM sequence: TTC
tgacaagcccaggattatcc

SEQ ID NO: 287281 - DNA, 20 bp, Artificial Sequence
  Description of Artificial Sequence: Synthetic oligonucleotide
  Target: LAMA2; (-) strand; PAM type: YTN; PAM sequence: CTC
aggatgattctgacaagccc

SEQ ID NO: 287282 - DNA, 20 bp, Artificial Sequence
  Description of Artificial Sequence: Synthetic oligonucleotide
  Target: LAMA2; (-) strand; PAM type: YTN; PAM sequence: CTC
aactcaggatgattctgaca

SEQ ID NO: 287283 - DNA, 20 bp, Artificial Sequence
  Description of Artificial Sequence: Synthetic oligonucleotide
  Target: LAMA2; (-) strand; PAM type: YTN; PAM sequence: CTA
atctcaactcaggatgattc

SEQ ID NO: 287284 - DNA, 20 bp, Artificial Sequence
  Description of Artificial Sequence: Synthetic oligonucleotide
  Target: LAMA2; (-) strand; PAM type: YTN; PAM sequence: CTG
actaatctcaactcaggatg

SEQ ID NO: 287285 - DNA, 20 bp, Artificial Sequence
  Description of Artificial Sequence: Synthetic oligonucleotide
  Target: LAMA2; (-) strand; PAM type: YTN; PAM sequence: TTC
tgactaatctcaactcagga

SEQ ID NO: 287286 - DNA, 20 bp, Artificial Sequence
  Description of Artificial Sequence: Synthetic oligonucleotide
  Target: LAMA2; (-) strand; PAM type: YTN; PAM sequence: TTT
ctgactaatctcaactcagg

SEQ ID NO: 287287 - DNA, 20 bp, Artificial Sequence
  Description of Artificial Sequence: Synthetic oligonucleotide
  Target: LAMA2; (-) strand; PAM type: YTN; PAM sequence: TTT
tctgactaatctcaactcag

SEQ ID NO: 287288 - DNA, 20 bp, Artificial Sequence
  Description of Artificial Sequence: Synthetic oligonucleotide
  Target: LAMA2; (-) strand; PAM type: YTN; PAM sequence: TTC
acattttctgactaatctca

SEQ ID NO: 287289 - DNA, 20 bp, Artificial Sequence
  Description of Artificial Sequence: Synthetic oligonucleotide
  Target: LAMA2; (-) strand; PAM type: YTN; PAM sequence: TTT
cacattttctgactaatctc

SEQ ID NO: 287290 - DNA, 20 bp, Artificial Sequence
  Description of Artificial Sequence: Synthetic oligonucleotide
  Target: LAMA2; (-) strand; PAM type: YTN; PAM sequence: TTT
tcacattttctgactaatct

SEQ ID NO: 287291 - DNA, 20 bp, Artificial Sequence
  Description of Artificial Sequence: Synthetic oligonucleotide
  Target: LAMA2; (-) strand; PAM type: YTN; PAM sequence: CTT
ttcacattttctgactaatc

SEQ ID NO: 287292 - DNA, 20 bp, Artificial Sequence
  Description of Artificial Sequence: Synthetic oligonucleotide
  Target: LAMA2; (-) strand; PAM type: YTN; PAM sequence: CTG
gcttttcacattttctgact

SEQ ID NO: 287293 - DNA, 20 bp, Artificial Sequence
  Description of Artificial Sequence: Synthetic oligonucleotide
  Target: LAMA2; (-) strand; PAM type: YTN; PAM sequence: TTG
gggtcaccctggcttttcac

SEQ ID NO: 287294 - DNA, 20 bp, Artificial Sequence
  Description of Artificial Sequence: Synthetic oligonucleotide
  Target: LAMA2; (-) strand; PAM type: YTN; PAM sequence: TTT
ggggtcaccctggcttttca

SEQ ID NO: 287295 - DNA, 20 bp, Artificial Sequence
  Description of Artificial Sequence: Synthetic oligonucleotide
  Target: LAMA2; (-) strand; PAM type: YTN; PAM sequence: CTC
ataaatttggggtcaccctg

SEQ ID NO: 287296 - DNA, 20 bp, Artificial Sequence
  Description of Artificial Sequence: Synthetic oligonucleotide
  Target: LAMA2; (-) strand; PAM type: YTN; PAM sequence: TTG
agtcctcataaatttggggt

SEQ ID NO: 287297 - DNA, 20 bp, Artificial Sequence
  Description of Artificial Sequence: Synthetic oligonucleotide
  Target: LAMA2; (-) strand; PAM type: YTN; PAM sequence: CTA
tatgaaggttgagtcctcat

SEQ ID NO: 287298 - DNA, 20 bp, Artificial Sequence
  Description of Artificial Sequence: Synthetic oligonucleotide
  Target: LAMA2; (-) strand; PAM type: YTN; PAM sequence: TTC
tatatgaaggttgagtcctc

SEQ ID NO: 287299 - DNA, 20 bp, Artificial Sequence
  Description of Artificial Sequence: Synthetic oligonucleotide
  Target: LAMA2; (-) strand; PAM type: YTN; PAM sequence: CTC
attctatatgaaggttgagt

SEQ ID NO: 287300 - DNA, 20 bp, Artificial Sequence
  Description of Artificial Sequence: Synthetic oligonucleotide
  Target: LAMA2; (-) strand; PAM type: YTN; PAM sequence: CTC
aaagtaaataaaataacctc

SEQ ID NO: 287301 - DNA, 20 bp, Artificial Sequence
  Description of Artificial Sequence: Synthetic oligonucleotide
  Target: LAMA2; (-) strand; PAM type: YTN; PAM sequence: CTC
gtactcaaagtaaataaaat

SEQ ID NO: 287302 - DNA, 20 bp, Artificial Sequence
  Description of Artificial Sequence: Synthetic oligonucleotide
  Target: LAMA2; (-) strand; PAM type: YTN; PAM sequence: TTA
gagtcacatctcgtactcaa

SEQ ID NO: 287303 - DNA, 20 bp, Artificial Sequence
  Description of Artificial Sequence: Synthetic oligonucleotide
  Target: LAMA2; (-) strand; PAM type: YTN; PAM sequence: TTT
agagtcacatctcgtactca

SEQ ID NO: 287304 - DNA, 20 bp, Artificial Sequence
  Description of Artificial Sequence: Synthetic oligonucleotide
  Target: LAMA2; (-) strand; PAM type: YTN; PAM sequence: CTT
tagagtcacatctcgtactc

SEQ ID NO: 287305 - DNA, 20 bp, Artificial Sequence
  Description of Artificial Sequence: Synthetic oligonucleotide
  Target: LAMA2; (-) strand; PAM type: YTN; PAM sequence: CTC
atactttagagtcacatctc

SEQ ID NO: 287306 - DNA, 20 bp, Artificial Sequence
  Description of Artificial Sequence: Synthetic oligonucleotide
  Target: LAMA2; (-) strand; PAM type: YTN; PAM sequence: TTC
tcatactttagagtcacatc

SEQ ID NO: 287307 - DNA, 20 bp, Artificial Sequence
  Description of Artificial Sequence: Synthetic oligonucleotide
  Target: LAMA2; (-) strand; PAM type: YTN; PAM sequence: TTG
gaataaattctcatacttta

SEQ ID NO: 287308 - DNA, 20 bp, Artificial Sequence
  Description of Artificial Sequence: Synthetic oligonucleotide
  Target: LAMA2; (-) strand; PAM type: YTN; PAM sequence: TTT
ggaataaattctcatacttt

SEQ ID NO: 287309 - DNA, 20 bp, Artificial Sequence
  Description of Artificial Sequence: Synthetic oligonucleotide
  Target: LAMA2; (-) strand; PAM type: YTN; PAM sequence: TTT
tggaataaattctcatactt

SEQ ID NO: 287310 - DNA, 20 bp, Artificial Sequence
  Description of Artificial Sequence: Synthetic oligonucleotide
  Target: LAMA2; (-) strand; PAM type: YTN; PAM sequence: TTC
agcgtgtggttttggaataa

SEQ ID NO: 287311 - DNA, 20 bp, Artificial Sequence
  Description of Artificial Sequence: Synthetic oligonucleotide
  Target: LAMA2; (-) strand; PAM type: YTN; PAM sequence: CTT
cagcgtgtggttttggaata

SEQ ID NO: 287312 - DNA, 20 bp, Artificial Sequence
  Description of Artificial Sequence: Synthetic oligonucleotide
  Target: LAMA2; (-) strand; PAM type: YTN; PAM sequence: CTA
agaaacgaggataacttcag

SEQ ID NO: 287313 - DNA, 20 bp, Artificial Sequence
  Description of Artificial Sequence: Synthetic oligonucleotide
  Target: LAMA2; (-) strand; PAM type: YTN; PAM sequence: TTC
taagaaacgaggataacttc

SEQ ID NO: 287314 - DNA, 20 bp, Artificial Sequence
  Description of Artificial Sequence: Synthetic oligonucleotide
  Target: LAMA2; (-) strand; PAM type: YTN; PAM sequence: TTA
tatgaagttctaagaaacga

SEQ ID NO: 287315 - DNA, 20 bp, Artificial Sequence
  Description of Artificial Sequence: Synthetic oligonucleotide
  Target: LAMA2; (-) strand; PAM type: YTN; PAM sequence: TTT
atatgaagttctaagaaacg

SEQ ID NO: 287316 - DNA, 20 bp, Artificial Sequence
  Description of Artificial Sequence: Synthetic oligonucleotide
  Target: LAMA2; (-) strand; PAM type: YTN; PAM sequence: CTA
tgtaccatatacatttatat

SEQ ID NO: 287317 - DNA, 20 bp, Artificial Sequence
  Description of Artificial Sequence: Synthetic oligonucleotide
  Target: LAMA2; (-) strand; PAM type: YTN; PAM sequence: TTA
ctatgtaccatatacattta

SEQ ID NO: 287318 - DNA, 20 bp, Artificial Sequence
  Description of Artificial Sequence: Synthetic oligonucleotide
  Target: LAMA2; (-) strand; PAM type: YTN; PAM sequence: CTA
tatattactatgtaccatat

SEQ ID NO: 287319 - DNA, 20 bp, Artificial Sequence
  Description of Artificial Sequence: Synthetic oligonucleotide
  Target: LAMA2; (-) strand; PAM type: YTN; PAM sequence: TTG
ataatatgactatatattac

SEQ ID NO: 287320 - DNA, 20 bp, Artificial Sequence
  Description of Artificial Sequence: Synthetic oligonucleotide
  Target: LAMA2; (-) strand; PAM type: YTN; PAM sequence: CTG
tgaaggagagaaagttgata

SEQ ID NO: 287321 - DNA, 20 bp, Artificial Sequence
  Description of Artificial Sequence: Synthetic oligonucleotide
  Target: LAMA2; (-) strand; PAM type: YTN; PAM sequence: CTA
tctgtgaaggagagaaagtt

SEQ ID NO: 287322 - DNA, 20 bp, Artificial Sequence
  Description of Artificial Sequence: Synthetic oligonucleotide
  Target: LAMA2; (-) strand; PAM type: YTN; PAM sequence: TTA
tctatctgtgaaggagagaa

SEQ ID NO: 287323 - DNA, 20 bp, Artificial Sequence
  Description of Artificial Sequence: Synthetic oligonucleotide
  Target: LAMA2; (-) strand; PAM type: YTN; PAM sequence: TTT
atctatctgtgaaggagaga

SEQ ID NO: 287324 - DNA, 20 bp, Artificial Sequence
  Description of Artificial Sequence: Synthetic oligonucleotide
  Target: LAMA2; (-) strand; PAM type: YTN; PAM sequence: CTA
tatttatctatctgtgaagg

SEQ ID NO: 287325 - DNA, 20 bp, Artificial Sequence
  Description of Artificial Sequence: Synthetic oligonucleotide
  Target: LAMA2; (-) strand; PAM type: YTN; PAM sequence: CTA
tccctatatttatctatctg

SEQ ID NO: 287326 - DNA, 20 bp, Artificial Sequence
  Description of Artificial Sequence: Synthetic oligonucleotide
  Target: LAMA2; (-) strand; PAM type: YTN; PAM sequence: CTG
tgtgctatccctatatttat

SEQ ID NO: 287327 - DNA, 20 bp, Artificial Sequence
  Description of Artificial Sequence: Synthetic oligonucleotide
  Target: LAMA2; (-) strand; PAM type: YTN; PAM sequence: CTA
ctgtgtgctatccctatatt

SEQ ID NO: 287328 - DNA, 20 bp, Artificial Sequence
  Description of Artificial Sequence: Synthetic oligonucleotide
  Target: LAMA2; (-) strand; PAM type: YTN; PAM sequence: TTG
tactactgtgtgctatccct

SEQ ID NO: 287329 - DNA, 20 bp, Artificial Sequence
  Description of Artificial Sequence: Synthetic oligonucleotide
  Target: LAMA2; (-) strand; PAM type: YTN; PAM sequence: TTT
gtactactgtgtgctatccc

SEQ ID NO: 287330 - DNA, 20 bp, Artificial Sequence
  Description of Artificial Sequence: Synthetic oligonucleotide
  Target: LAMA2; (-) strand; PAM type: YTN; PAM sequence: TTT
tgtactactgtgtgctatcc

SEQ ID NO: 287331 - DNA, 20 bp, Artificial Sequence
  Description of Artificial Sequence: Synthetic oligonucleotide
  Target: LAMA2; (-) strand; PAM type: YTN; PAM sequence: CTT
ttgtactactgtgtgctatc

SEQ ID NO: 287332 - DNA, 20 bp, Artificial Sequence
  Description of Artificial Sequence: Synthetic oligonucleotide
  Target: LAMA2; (-) strand; PAM type: YTN; PAM sequence: TTC
atggcttttgtactactgtg

SEQ ID NO: 287333 - DNA, 20 bp, Artificial Sequence
  Description of Artificial Sequence: Synthetic oligonucleotide
  Target: LAMA2; (-) strand; PAM type: YTN; PAM sequence: TTC
aaaattcatggcttttgtac

SEQ ID NO: 287334 - DNA, 20 bp, Artificial Sequence
  Description of Artificial Sequence: Synthetic oligonucleotide
  Target: LAMA2; (-) strand; PAM type: YTN; PAM sequence: TTT
caaaattcatggcttttgta

SEQ ID NO: 287335 - DNA, 20 bp, Artificial Sequence
  Description of Artificial Sequence: Synthetic oligonucleotide
  Target: LAMA2; (-) strand; PAM type: YTN; PAM sequence: TTG
atttcaaaattcatggcttt

SEQ ID NO: 287336 - DNA, 20 bp, Artificial Sequence
  Description of Artificial Sequence: Synthetic oligonucleotide
  Target: LAMA2; (-) strand; PAM type: YTN; PAM sequence: TTT
gatttcaaaattcatggctt

SEQ ID NO: 287337 - DNA, 20 bp, Artificial Sequence
  Description of Artificial Sequence: Synthetic oligonucleotide
  Target: LAMA2; (-) strand; PAM type: YTN; PAM sequence: CTG
gatttgatttcaaaattcat

SEQ ID NO: 287338 - DNA, 20 bp, Artificial Sequence
  Description of Artificial Sequence: Synthetic oligonucleotide
  Target: LAMA2; (-) strand; PAM type: YTN; PAM sequence: TTA
gcaagtggaagaggaggaaa

SEQ ID NO: 287339 - DNA, 20 bp, Artificial Sequence
  Description of Artificial Sequence: Synthetic oligonucleotide
  Target: LAMA2; (-) strand; PAM type: YTN; PAM sequence: TTT
agcaagtggaagaggaggaa

SEQ ID NO: 287340 - DNA, 20 bp, Artificial Sequence
  Description of Artificial Sequence: Synthetic oligonucleotide
  Target: LAMA2; (-) strand; PAM type: YTN; PAM sequence: TTT
tagcaagtggaagaggagga

SEQ ID NO: 287341 - DNA, 20 bp, Artificial Sequence
  Description of Artificial Sequence: Synthetic oligonucleotide
  Target: LAMA2; (-) strand; PAM type: YTN; PAM sequence: TTA
tattttagcaagtggaagag

SEQ ID NO: 287342 - DNA, 20 bp, Artificial Sequence
  Description of Artificial Sequence: Synthetic oligonucleotide
  Target: LAMA2; (-) strand; PAM type: YTN; PAM sequence: CTA
aggttatattttagcaagtg

SEQ ID NO: 287343 - DNA, 20 bp, Artificial Sequence
  Description of Artificial Sequence: Synthetic oligonucleotide
  Target: LAMA2; (-) strand; PAM type: YTN; PAM sequence: TTG
tctaaggttatattttagca

SEQ ID NO: 287344 - DNA, 20 bp, Artificial Sequence
  Description of Artificial Sequence: Synthetic oligonucleotide
  Target: LAMA2; (-) strand; PAM type: YTN; PAM sequence: CTT
gtctaaggttatattttagc

SEQ ID NO: 287345 - DNA, 20 bp, Artificial Sequence
  Description of Artificial Sequence: Synthetic oligonucleotide
  Target: LAMA2; (-) strand; PAM type: YTN; PAM sequence: TTA
agtgacttgtctaaggttat

SEQ ID NO: 287346 - DNA, 20 bp, Artificial Sequence
  Description of Artificial Sequence: Synthetic oligonucleotide
  Target: LAMA2; (-) strand; PAM type: YTN; PAM sequence: TTG
agataaccaaagcccaaggg

SEQ ID NO: 287347 - DNA, 20 bp, Artificial Sequence
  Description of Artificial Sequence: Synthetic oligonucleotide
  Target: LAMA2; (-) strand; PAM type: YTN; PAM sequence: CTA
gttgagataaccaaagccca

SEQ ID NO: 287348 - DNA, 20 bp, Artificial Sequence
  Description of Artificial Sequence: Synthetic oligonucleotide
  Target: LAMA2; (-) strand; PAM type: YTN; PAM sequence: TTC
tagttgagataaccaaagcc

SEQ ID NO: 287349 - DNA, 20 bp, Artificial Sequence
  Description of Artificial Sequence: Synthetic oligonucleotide
  Target: LAMA2; (-) strand; PAM type: YTN; PAM sequence: TTT
ctagttgagataaccaaagc

SEQ ID NO: 287350 - DNA, 20 bp, Artificial Sequence
  Description of Artificial Sequence: Synthetic oligonucleotide
  Target: LAMA2; (-) strand; PAM type: YTN; PAM sequence: TTT
tctagttgagataaccaaag

SEQ ID NO: 287351 - DNA, 20 bp, Artificial Sequence
  Description of Artificial Sequence: Synthetic oligonucleotide
  Target: LAMA2; (-) strand; PAM type: YTN; PAM sequence: CTT
ttctagttgagataaccaaa

SEQ ID NO: 287352 - DNA, 20 bp, Artificial Sequence
  Description of Artificial Sequence: Synthetic oligonucleotide
  Target: LAMA2; (-) strand; PAM type: YTN; PAM sequence: TTC
ttttctagttgagataacca

SEQ ID NO: 287353 - DNA, 20 bp, Artificial Sequence
  Description of Artificial Sequence: Synthetic oligonucleotide
  Target: LAMA2; (-) strand; PAM type: YTN; PAM sequence: TTA
tcattcttttctagttgaga

SEQ ID NO: 287354 - DNA, 20 bp, Artificial Sequence
  Description of Artificial Sequence: Synthetic oligonucleotide
  Target: LAMA2; (-) strand; PAM type: YTN; PAM sequence: TTT
atcattcttttctagttgag

SEQ ID NO: 287355 - DNA, 20 bp, Artificial Sequence
  Description of Artificial Sequence: Synthetic oligonucleotide
  Target: LAMA2; (-) strand; PAM type: YTN; PAM sequence: TTT
tatcattcttttctagttga

SEQ ID NO: 287356 - DNA, 20 bp, Artificial Sequence
  Description of Artificial Sequence: Synthetic oligonucleotide
  Target: LAMA2; (-) strand; PAM type: YTN; PAM sequence: TTT
ttatcattcttttctagttg

SEQ ID NO: 287357 - DNA, 20 bp, Artificial Sequence
  Description of Artificial Sequence: Synthetic oligonucleotide
  Target: LAMA2; (-) strand; PAM type: YTN; PAM sequence: CTA
caatatgcaagcaaggtaga

SEQ ID NO: 287358 - DNA, 20 bp, Artificial Sequence
  Description of Artificial Sequence: Synthetic oligonucleotide
  Target: LAMA2; (-) strand; PAM type: YTN; PAM sequence: TTG
tatcctacaatatgcaagca

SEQ ID NO: 287359 - DNA, 20 bp, Artificial Sequence
  Description of Artificial Sequence: Synthetic oligonucleotide
  Target: LAMA2; (-) strand; PAM type: YTN; PAM sequence: TTA
ttgtatcctacaatatgcaa

SEQ ID NO: 287360 - DNA, 20 bp, Artificial Sequence
  Description of Artificial Sequence: Synthetic oligonucleotide
  Target: LAMA2; (-) strand; PAM type: YTN; PAM sequence: TTA
aaaaatgtattattgtatcc

SEQ ID NO: 287361 - DNA, 20 bp, Artificial Sequence
  Description of Artificial Sequence: Synthetic oligonucleotide
  Target: LAMA2; (-) strand; PAM type: YTN; PAM sequence: TTA
taagaatattaaaaaatgta

SEQ ID NO: 287362 - DNA, 20 bp, Artificial Sequence
  Description of Artificial Sequence: Synthetic oligonucleotide
  Target: LAMA2; (-) strand; PAM type: YTN; PAM sequence: TTA
gcatataggaagagttataa

SEQ ID NO: 287363 - DNA, 20 bp, Artificial Sequence
  Description of Artificial Sequence: Synthetic oligonucleotide
  Target: LAMA2; (-) strand; PAM type: YTN; PAM sequence: CTT
agcatataggaagagttata

SEQ ID NO: 287364 - DNA, 20 bp, Artificial Sequence
  Description of Artificial Sequence: Synthetic oligonucleotide
  Target: LAMA2; (-) strand; PAM type: YTN; PAM sequence: TTA
cttagcatataggaagagtt

SEQ ID NO: 287365 - DNA, 20 bp, Artificial Sequence
  Description of Artificial Sequence: Synthetic oligonucleotide
  Target: LAMA2; (-) strand; PAM type: YTN; PAM sequence: CTG
agaacattacttagcatata

SEQ ID NO: 287366 - DNA, 20 bp, Artificial Sequence
  Description of Artificial Sequence: Synthetic oligonucleotide
  Target: LAMA2; (-) strand; PAM type: YTN; PAM sequence: TTA
ctgagaacattacttagcat

SEQ ID NO: 287367 - DNA, 20 bp, Artificial Sequence
  Description of Artificial Sequence: Synthetic oligonucleotide
  Target: LAMA2; (-) strand; PAM type: YTN; PAM sequence: TTC
atgtaaattactgagaacat

SEQ ID NO: 287368 - DNA, 20 bp, Artificial Sequence
  Description of Artificial Sequence: Synthetic oligonucleotide
  Target: LAMA2; (-) strand; PAM type: YTN; PAM sequence: TTA
attcatgtaaattactgaga

SEQ ID NO: 287369 - DNA, 20 bp, Artificial Sequence
  Description of Artificial Sequence: Synthetic oligonucleotide
  Target: LAMA2; (-) strand; PAM type: YTN; PAM sequence: TTA
aacaagttaattcatgtaaa

SEQ ID NO: 287370 - DNA, 20 bp, Artificial Sequence
  Description of Artificial Sequence: Synthetic oligonucleotide
  Target: LAMA2; (-) strand; PAM type: YTN; PAM sequence: TTG
taaaaattaaacaagttaat

SEQ ID NO: 287371 - DNA, 20 bp, Artificial Sequence
  Description of Artificial Sequence: Synthetic oligonucleotide
  Target: LAMA2; (-) strand; PAM type: YTN; PAM sequence: TTG
ttgtaaaaattaaacaagtt

SEQ ID NO: 287372 - DNA, 20 bp, Artificial Sequence
  Description of Artificial Sequence: Synthetic oligonucleotide
  Target: LAMA2; (-) strand; PAM type: YTN; PAM sequence: TTG
gggttgttgtaaaaattaaa

SEQ ID NO: 287373 - DNA, 20 bp, Artificial Sequence
  Description of Artificial Sequence: Synthetic oligonucleotide
  Target: LAMA2; (-) strand; PAM type: YTN; PAM sequence: TTT
ggggttgttgtaaaaattaa

SEQ ID NO: 287374 - DNA, 20 bp, Artificial Sequence
  Description of Artificial Sequence: Synthetic oligonucleotide
  Target: LAMA2; (-) strand; PAM type: YTN; PAM sequence: TTT
tggggttgttgtaaaaatta

SEQ ID NO: 287375 - DNA, 20 bp, Artificial Sequence
  Description of Artificial Sequence: Synthetic oligonucleotide
  Target: LAMA2; (-) strand; PAM type: YTN; PAM sequence: TTT
ttggggttgttgtaaaaatt

SEQ ID NO: 287376 - DNA, 20 bp, Artificial Sequence
  Description of Artificial Sequence: Synthetic oligonucleotide
  Target: LAMA2; (-) strand; PAM type: YTN; PAM sequence: CTT
tttggggttgttgtaaaaat

SEQ ID NO: 287377 - DNA, 20 bp, Artificial Sequence
  Description of Artificial Sequence: Synthetic oligonucleotide
  Target: LAMA2; (-) strand; PAM type: YTN; PAM sequence: CTA
agacatactttttggggttg

SEQ ID NO: 287378 - DNA, 20 bp, Artificial Sequence
  Description of Artificial Sequence: Synthetic oligonucleotide
  Target: LAMA2; (-) strand; PAM type: YTN; PAM sequence: CTA
atggactaagacatactttt

SEQ ID NO: 287379 - DNA, 20 bp, Artificial Sequence
  Description of Artificial Sequence: Synthetic oligonucleotide
  Target: LAMA2; (-) strand; PAM type: YTN; PAM sequence: TTA
tagcagccctaatggactaa

SEQ ID NO: 287380 - DNA, 20 bp, Artificial Sequence
  Description of Artificial Sequence: Synthetic oligonucleotide
  Target: LAMA2; (-) strand; PAM type: YTN; PAM sequence: CTT
atagcagccctaatggacta

SEQ ID NO: 287381 - DNA, 20 bp, Artificial Sequence
  Description of Artificial Sequence: Synthetic oligonucleotide
  Target: LAMA2; (-) strand; PAM type: YTN; PAM sequence: TTC
ttatagcagccctaatggac

SEQ ID NO: 287382 - DNA, 20 bp, Artificial Sequence
  Description of Artificial Sequence: Synthetic oligonucleotide
  Target: LAMA2; (-) strand; PAM type: YTN; PAM sequence: TTT
cttatagcagccctaatgga

SEQ ID NO: 287383 - DNA, 20 bp, Artificial Sequence
  Description of Artificial Sequence: Synthetic oligonucleotide
  Target: LAMA2; (-) strand; PAM type: YTN; PAM sequence: TTT
tcttatagcagccctaatgg

SEQ ID NO: 287384 - DNA, 20 bp, Artificial Sequence
  Description of Artificial Sequence: Synthetic oligonucleotide
  Target: LAMA2; (-) strand; PAM type: YTN; PAM sequence: TTT
ttcttatagcagccctaatg

SEQ ID NO: 287385 - DNA, 20 bp, Artificial Sequence
  Description of Artificial Sequence: Synthetic oligonucleotide
  Target: LAMA2; (-) strand; PAM type: YTN; PAM sequence: TTC
atggtatttttcttatagca

SEQ ID NO: 287386 - DNA, 20 bp, Artificial Sequence
  Description of Artificial Sequence: Synthetic oligonucleotide
  Target: LAMA2; (-) strand; PAM type: YTN; PAM sequence: TTT
catggtatttttcttatagc

SEQ ID NO: 287387 - DNA, 20 bp, Artificial Sequence
  Description of Artificial Sequence: Synthetic oligonucleotide
  Target: LAMA2; (-) strand; PAM type: YTN; PAM sequence: CTA
cccagtttcatggtattttt

SEQ ID NO: 287388 - DNA, 20 bp, Artificial Sequence
  Description of Artificial Sequence: Synthetic oligonucleotide
  Target: LAMA2; (-) strand; PAM type: YTN; PAM sequence: TTA
taaactacccagtttcatgg

SEQ ID NO: 287389 - DNA, 20 bp, Artificial Sequence
  Description of Artificial Sequence: Synthetic oligonucleotide
  Target: LAMA2; (-) strand; PAM type: YTN; PAM sequence: TTT
ataaactacccagtttcatg

SEQ ID NO: 287390 - DNA, 20 bp, Artificial Sequence
  Description of Artificial Sequence: Synthetic oligonucleotide
  Target: LAMA2; (-) strand; PAM type: YTN; PAM sequence: TTA
tttataaactacccagtttc

SEQ ID NO: 287391 - DNA, 20 bp, Artificial Sequence
  Description of Artificial Sequence: Synthetic oligonucleotide
  Target: LAMA2; (-) strand; PAM type: YTN; PAM sequence: TTT
atttataaactacccagttt

SEQ ID NO: 287392 - DNA, 20 bp, Artificial Sequence
  Description of Artificial Sequence: Synthetic oligonucleotide
  Target: LAMA2; (-) strand; PAM type: YTN; PAM sequence: TTG
tttatttataaactacccag

SEQ ID NO: 287393 - DNA, 20 bp, Artificial Sequence
  Description of Artificial Sequence: Synthetic oligonucleotide
  Target: LAMA2; (-) strand; PAM type: YTN; PAM sequence: TTT
gtttatttataaactaccca

SEQ ID NO: 287394 - DNA, 20 bp, Artificial Sequence
  Description of Artificial Sequence: Synthetic oligonucleotide
  Target: LAMA2; (-) strand; PAM type: YTN; PAM sequence: TTG
tgagaaataaatgtttgttt

SEQ ID NO: 287395 - DNA, 20 bp, Artificial Sequence
  Description of Artificial Sequence: Synthetic oligonucleotide
  Target: LAMA2; (-) strand; PAM type: YTN; PAM sequence: TTC
aagaattgtgagaaataaat

SEQ ID NO: 287396 - DNA, 20 bp, Artificial Sequence
  Description of Artificial Sequence: Synthetic oligonucleotide
  Target: LAMA2; (-) strand; PAM type: YTN; PAM sequence: CTT
caagaattgtgagaaataaa

SEQ ID NO: 287397 - DNA, 20 bp, Artificial Sequence
  Description of Artificial Sequence: Synthetic oligonucleotide
  Target: LAMA2; (-) strand; PAM type: YTN; PAM sequence: TTA
gcttcaagaattgtgagaaa

SEQ ID NO: 287398 - DNA, 20 bp, Artificial Sequence
  Description of Artificial Sequence: Synthetic oligonucleotide
  Target: LAMA2; (-) strand; PAM type: YTN; PAM sequence: CTT
agcttcaagaattgtgagaa

SEQ ID NO: 287399 - DNA, 20 bp, Artificial Sequence
  Description of Artificial Sequence: Synthetic oligonucleotide
  Target: LAMA2; (-) strand; PAM type: YTN; PAM sequence: TTC
ttagcttcaagaattgtgag

SEQ ID NO: 287400 - DNA, 20 bp, Artificial Sequence
  Description of Artificial Sequence: Synthetic oligonucleotide
  Target: LAMA2; (-) strand; PAM type: YTN; PAM sequence: CTT
cttagcttcaagaattgtga

SEQ ID NO: 287401 - DNA, 20 bp, Artificial Sequence
  Description of Artificial Sequence: Synthetic oligonucleotide
  Target: LAMA2; (-) strand; PAM type: YTN; PAM sequence: CTC
agacttcttagcttcaagaa

SEQ ID NO: 287402 - DNA, 20 bp, Artificial Sequence
  Description of Artificial Sequence: Synthetic oligonucleotide
  Target: LAMA2; (-) strand; PAM type: YTN; PAM sequence: TTG
atctcagacttcttagcttc

SEQ ID NO: 287403 - DNA, 20 bp, Artificial Sequence
  Description of Artificial Sequence: Synthetic oligonucleotide
  Target: LAMA2; (-) strand; PAM type: YTN; PAM sequence: CTT
gatctcagacttcttagctt

SEQ ID NO: 287404 - DNA, 20 bp, Artificial Sequence
  Description of Artificial Sequence: Synthetic oligonucleotide
  Target: LAMA2; (-) strand; PAM type: YTN; PAM sequence: CTG
ccagtaccttgatctcagac

SEQ ID NO: 287405 - DNA, 20 bp, Artificial Sequence
  Description of Artificial Sequence: Synthetic oligonucleotide
  Target: LAMA2; (-) strand; PAM type: YTN; PAM sequence: CTA
aacaccaaatctgccagtac

SEQ ID NO: 287406 - DNA, 20 bp, Artificial Sequence
  Description of Artificial Sequence: Synthetic oligonucleotide
  Target: LAMA2; (-) strand; PAM type: YTN; PAM sequence: CTC
actaaacaccaaatctgcca

SEQ ID NO: 287407 - DNA, 20 bp, Artificial Sequence
  Description of Artificial Sequence: Synthetic oligonucleotide
  Target: LAMA2; (-) strand; PAM type: YTN; PAM sequence: CTC
tcactaaacaccaaatctgc

SEQ ID NO: 287408 - DNA, 20 bp, Artificial Sequence
  Description of Artificial Sequence: Synthetic oligonucleotide
  Target: LAMA2; (-) strand; PAM type: YTN; PAM sequence: CTG
gctctcactaaacaccaaat

SEQ ID NO: 287409 - DNA, 20 bp, Artificial Sequence
  Description of Artificial Sequence: Synthetic oligonucleotide
  Target: LAMA2; (-) strand; PAM type: YTN; PAM sequence: CTA
tgaaaaactggctctcacta

SEQ ID NO: 287410 - DNA, 20 bp, Artificial Sequence
  Description of Artificial Sequence: Synthetic oligonucleotide
  Target: LAMA2; (-) strand; PAM type: YTN; PAM sequence: TTC
tatgaaaaactggctctcac

SEQ ID NO: 287411 - DNA, 20 bp, Artificial Sequence
  Description of Artificial Sequence: Synthetic oligonucleotide
  Target: LAMA2; (-) strand; PAM type: YTN; PAM sequence: CTT
ctatgaaaaactggctctca

SEQ ID NO: 287412 - DNA, 20 bp, Artificial Sequence
  Description of Artificial Sequence: Synthetic oligonucleotide
  Target: LAMA2; (-) strand; PAM type: YTN; PAM sequence: CTC
cttctatgaaaaactggctc

SEQ ID NO: 287413 - DNA, 20 bp, Artificial Sequence
  Description of Artificial Sequence: Synthetic oligonucleotide
  Target: LAMA2; (-) strand; PAM type: YTN; PAM sequence: CTA
tgtgagaacagcaagaagcc

SEQ ID NO: 287414 - DNA, 20 bp, Artificial Sequence
  Description of Artificial Sequence: Synthetic oligonucleotide
  Target: LAMA2; (-) strand; PAM type: YTN; PAM sequence: CTA
ctatgtgagaacagcaagaa

SEQ ID NO: 287415 - DNA, 20 bp, Artificial Sequence
  Description of Artificial Sequence: Synthetic oligonucleotide
  Target: LAMA2; (-) strand; PAM type: YTN; PAM sequence: TTC
tactatgtgagaacagcaag

SEQ ID NO: 287416 - DNA, 20 bp, Artificial Sequence
  Description of Artificial Sequence: Synthetic oligonucleotide
  Target: LAMA2; (-) strand; PAM type: YTN; PAM sequence: TTT
ctactatgtgagaacagcaa

SEQ ID NO: 287417 - DNA, 20 bp, Artificial Sequence
  Description of Artificial Sequence: Synthetic oligonucleotide
  Target: LAMA2; (-) strand; PAM type: YTN; PAM sequence: CTT
tctactatgtgagaacagca

SEQ ID NO: 287418 - DNA, 20 bp, Artificial Sequence
  Description of Artificial Sequence: Synthetic oligonucleotide
  Target: LAMA2; (-) strand; PAM type: YTN; PAM sequence: CTC
tttctactatgtgagaacag

SEQ ID NO: 287419 - DNA, 20 bp, Artificial Sequence
  Description of Artificial Sequence: Synthetic oligonucleotide
  Target: LAMA2; (-) strand; PAM type: YTN; PAM sequence: TTC
actctttctactatgtgaga

SEQ ID NO: 287420 - DNA, 20 bp, Artificial Sequence
  Description of Artificial Sequence: Synthetic oligonucleotide
  Target: LAMA2; (-) strand; PAM type: YTN; PAM sequence: TTG
ttcactctttctactatgtg

SEQ ID NO: 287421 - DNA, 20 bp, Artificial Sequence
  Description of Artificial Sequence: Synthetic oligonucleotide
  Target: LAMA2; (-) strand; PAM type: YTN; PAM sequence: CTT
gttcactctttctactatgt

SEQ ID NO: 287422 - DNA, 20 bp, Artificial Sequence
  Description of Artificial Sequence: Synthetic oligonucleotide
  Target: LAMA2; (-) strand; PAM type: YTN; PAM sequence: TTA
taaaataggtccaaaggagc

SEQ ID NO: 287423 - DNA, 20 bp, Artificial Sequence
  Description of Artificial Sequence: Synthetic oligonucleotide
  Target: LAMA2; (-) strand; PAM type: YTN; PAM sequence: CTT
ataaaataggtccaaaggag

SEQ ID NO: 287424 - DNA, 20 bp, Artificial Sequence
  Description of Artificial Sequence: Synthetic oligonucleotide
  Target: LAMA2; (-) strand; PAM type: YTN; PAM sequence: TTA
gtgcccttataaaataggtc

SEQ ID NO: 287425 - DNA, 20 bp, Artificial Sequence
  Description of Artificial Sequence: Synthetic oligonucleotide
  Target: LAMA2; (-) strand; PAM type: YTN; PAM sequence: TTC
atgaatgaaattagtgccct

SEQ ID NO: 287426 - DNA, 20 bp, Artificial Sequence
  Description of Artificial Sequence: Synthetic oligonucleotide
  Target: LAMA2; (-) strand; PAM type: YTN; PAM sequence: CTT
catgaatgaaattagtgccc

SEQ ID NO: 287427 - DNA, 20 bp, Artificial Sequence
  Description of Artificial Sequence: Synthetic oligonucleotide
  Target: LAMA2; (-) strand; PAM type: YTN; PAM sequence: TTA
gatggtgaggggcagggcct

SEQ ID NO: 287428 - DNA, 20 bp, Artificial Sequence
  Description of Artificial Sequence: Synthetic oligonucleotide
  Target: LAMA2; (-) strand; PAM type: YTN; PAM sequence: TTT
agatggtgaggggcagggcc

SEQ ID NO: 287429 - DNA, 20 bp, Artificial Sequence
  Description of Artificial Sequence: Synthetic oligonucleotide
  Target: LAMA2; (-) strand; PAM type: YTN; PAM sequence: TTT
tagatggtgaggggcagggc

SEQ ID NO: 287430 - DNA, 20 bp, Artificial Sequence
  Description of Artificial Sequence: Synthetic oligonucleotide
  Target: LAMA2; (-) strand; PAM type: YTN; PAM sequence: TTG
agaggtgagttttagatggt

SEQ ID NO: 287431 - DNA, 20 bp, Artificial Sequence
  Description of Artificial Sequence: Synthetic oligonucleotide
  Target: LAMA2; (-) strand; PAM type: YTN; PAM sequence: TTT
gagaggtgagttttagatgg

SEQ ID NO: 287432 - DNA, 20 bp, Artificial Sequence
  Description of Artificial Sequence: Synthetic oligonucleotide
  Target: LAMA2; (-) strand; PAM type: YTN; PAM sequence: TTA
gcaggcagggcatttgagag

SEQ ID NO: 287433 - DNA, 20 bp, Artificial Sequence
  Description of Artificial Sequence: Synthetic oligonucleotide
  Target: LAMA2; (-) strand; PAM type: YTN; PAM sequence: CTA
cccgccaaagtgatggtatt

SEQ ID NO: 287434 - DNA, 20 bp, Artificial Sequence
  Description of Artificial Sequence: Synthetic oligonucleotide
  Target: LAMA2; (-) strand; PAM type: YTN; PAM sequence: TTA
aaatcctacccgccaaagtg

SEQ ID NO: 287435 - DNA, 20 bp, Artificial Sequence
  Description of Artificial Sequence: Synthetic oligonucleotide
  Target: LAMA2; (-) strand; PAM type: YTN; PAM sequence: TTA
tgttaaaatcctacccgcca

SEQ ID NO: 287436 - DNA, 20 bp, Artificial Sequence
  Description of Artificial Sequence: Synthetic oligonucleotide
  Target: LAMA2; (-) strand; PAM type: YTN; PAM sequence: CTT
atgttaaaatcctacccgcc

SEQ ID NO: 287437 - DNA, 20 bp, Artificial Sequence
  Description of Artificial Sequence: Synthetic oligonucleotide
  Target: LAMA2; (-) strand; PAM type: YTN; PAM sequence: TTC
ttatgttaaaatcctacccg

SEQ ID NO: 287438 - DNA, 20 bp, Artificial Sequence
  Description of Artificial Sequence: Synthetic oligonucleotide
  Target: LAMA2; (-) strand; PAM type: YTN; PAM sequence: CTC
aaaattcttatgttaaaatc

SEQ ID NO: 287439 - DNA, 20 bp, Artificial Sequence
  Description of Artificial Sequence: Synthetic oligonucleotide
  Target: LAMA2; (-) strand; PAM type: YTN; PAM sequence: CTC
tcaaaattcttatgttaaaa

SEQ ID NO: 287440 - DNA, 20 bp, Artificial Sequence
  Description of Artificial Sequence: Synthetic oligonucleotide
  Target: LAMA2; (-) strand; PAM type: YTN; PAM sequence: CTG
tgtccctctcaaaattctta

SEQ ID NO: 287441 - DNA, 20 bp, Artificial Sequence
  Description of Artificial Sequence: Synthetic oligonucleotide
  Target: LAMA2; (-) strand; PAM type: YTN; PAM sequence: CTA
tagtgtgaatgtctgtgtcc

SEQ ID NO: 287442 - DNA, 20 bp, Artificial Sequence
  Description of Artificial Sequence: Synthetic oligonucleotide
  Target: LAMA2; (-) strand; PAM type: YTN; PAM sequence: TTG
ctatagtgtgaatgtctgtg

SEQ ID NO: 287443 - DNA, 20 bp, Artificial Sequence
  Description of Artificial Sequence: Synthetic oligonucleotide
  Target: LAMA2; (-) strand; PAM type: YTN; PAM sequence: CTT
gctatagtgtgaatgtctgt

SEQ ID NO: 287444 - DNA, 20 bp, Artificial Sequence
  Description of Artificial Sequence: Synthetic oligonucleotide
  Target: LAMA2; (-) strand; PAM type: YTN; PAM sequence: CTG
ccttgctatagtgtgaatgt

SEQ ID NO: 287445 - DNA, 20 bp, Artificial Sequence
  Description of Artificial Sequence: Synthetic oligonucleotide
  Target: LAMA2; (-) strand; PAM type: YTN; PAM sequence: TTA
gtatctgccttgctatagtg

SEQ ID NO: 287446 - DNA, 20 bp, Artificial Sequence
  Description of Artificial Sequence: Synthetic oligonucleotide
  Target: LAMA2; (-) strand; PAM type: YTN; PAM sequence: CTA
cagaatgagaatattagtat

SEQ ID NO: 287447 - DNA, 20 bp, Artificial Sequence
  Description of Artificial Sequence: Synthetic oligonucleotide
  Target: LAMA2; (-) strand; PAM type: YTN; PAM sequence: TTA
actacagaatgagaatatta

SEQ ID NO: 287448 - DNA, 20 bp, Artificial Sequence
  Description of Artificial Sequence: Synthetic oligonucleotide
  Target: LAMA2; (-) strand; PAM type: YTN; PAM sequence: CTT
aactacagaatgagaatatt

SEQ ID NO: 287449 - DNA, 20 bp, Artificial Sequence
  Description of Artificial Sequence: Synthetic oligonucleotide
  Target: LAMA2; (-) strand; PAM type: YTN; PAM sequence: TTC
cttaactacagaatgagaat

SEQ ID NO: 287450 - DNA, 20 bp, Artificial Sequence
  Description of Artificial Sequence: Synthetic oligonucleotide
  Target: LAMA2; (-) strand; PAM type: YTN; PAM sequence: TTC
agattccttaactacagaat

SEQ ID NO: 287451 - DNA, 20 bp, Artificial Sequence
  Description of Artificial Sequence: Synthetic oligonucleotide
  Target: LAMA2; (-) strand; PAM type: YTN; PAM sequence: CTT
cagattccttaactacagaa

SEQ ID NO: 287452 - DNA, 20 bp, Artificial Sequence
  Description of Artificial Sequence: Synthetic oligonucleotide
  Target: LAMA2; (-) strand; PAM type: YTN; PAM sequence: TTC
ttcagattccttaactacag

SEQ ID NO: 287453 - DNA, 20 bp, Artificial Sequence
  Description of Artificial Sequence: Synthetic oligonucleotide
  Target: LAMA2; (-) strand; PAM type: YTN; PAM sequence: CTT
cttcagattccttaactaca

SEQ ID NO: 287454 - DNA, 20 bp, Artificial Sequence
  Description of Artificial Sequence: Synthetic oligonucleotide
  Target: LAMA2; (-) strand; PAM type: YTN; PAM sequence: CTC
ttcttcagattccttaacta

SEQ ID NO: 287455 - DNA, 20 bp, Artificial Sequence
  Description of Artificial Sequence: Synthetic oligonucleotide
  Target: LAMA2; (-) strand; PAM type: YTN; PAM sequence: CTC
tcttcttcagattccttaac

SEQ ID NO: 287456 - DNA, 20 bp, Artificial Sequence
  Description of Artificial Sequence: Synthetic oligonucleotide
  Target: LAMA2; (-) strand; PAM type: YTN; PAM sequence: TTA
acatctctcttcttcagatt

SEQ ID NO: 287457 - DNA, 20 bp, Artificial Sequence
  Description of Artificial Sequence: Synthetic oligonucleotide
  Target: LAMA2; (-) strand; PAM type: YTN; PAM sequence: TTT
aacatctctcttcttcagat

SEQ ID NO: 287458 - DNA, 20 bp, Artificial Sequence
  Description of Artificial Sequence: Synthetic oligonucleotide
  Target: LAMA2; (-) strand; PAM type: YTN; PAM sequence: CTG
tgtgaccatggtcaagacat

SEQ ID NO: 287459 - DNA, 20 bp, Artificial Sequence
  Description of Artificial Sequence: Synthetic oligonucleotide
  Target: LAMA2; (-) strand; PAM type: YTN; PAM sequence: TTA
ctgtgtgaccatggtcaaga

SEQ ID NO: 287460 - DNA, 20 bp, Artificial Sequence
  Description of Artificial Sequence: Synthetic oligonucleotide
  Target: LAMA2; (-) strand; PAM type: YTN; PAM sequence: CTA
attactgtgtgaccatggtc

SEQ ID NO: 287461 - DNA, 20 bp, Artificial Sequence
  Description of Artificial Sequence: Synthetic oligonucleotide
  Target: LAMA2; (-) strand; PAM type: YTN; PAM sequence: CTG
ctaattactgtgtgaccatg

SEQ ID NO: 287462 - DNA, 20 bp, Artificial Sequence
  Description of Artificial Sequence: Synthetic oligonucleotide
  Target: LAMA2; (-) strand; PAM type: YTN; PAM sequence: CTC
tgctaattactgtgtgacca

SEQ ID NO: 287463 - DNA, 20 bp, Artificial Sequence
  Description of Artificial Sequence: Synthetic oligonucleotide
  Target: LAMA2; (-) strand; PAM type: YTN; PAM sequence: TTC
aaatcccagctctgctaatt

SEQ ID NO: 287464 - DNA, 20 bp, Artificial Sequence
  Description of Artificial Sequence: Synthetic oligonucleotide
  Target: LAMA2; (-) strand; PAM type: YTN; PAM sequence: CTA
tgttcaaatcccagctctgc

SEQ ID NO: 287465 - DNA, 20 bp, Artificial Sequence
  Description of Artificial Sequence: Synthetic oligonucleotide
  Target: LAMA2; (-) strand; PAM type: YTN; PAM sequence: TTA
acctatgttcaaatcccagc

SEQ ID NO: 287466 - DNA, 20 bp, Artificial Sequence
  Description of Artificial Sequence: Synthetic oligonucleotide
  Target: LAMA2; (-) strand; PAM type: YTN; PAM sequence: CTA
ttaacctatgttcaaatccc

SEQ ID NO: 287467 - DNA, 20 bp, Artificial Sequence
  Description of Artificial Sequence: Synthetic oligonucleotide
  Target: LAMA2; (-) strand; PAM type: YTN; PAM sequence: CTG
tgcctattaacctatgttca

SEQ ID NO: 287468 - DNA, 20 bp, Artificial Sequence
  Description of Artificial Sequence: Synthetic oligonucleotide
  Target: LAMA2; (-) strand; PAM type: YTN; PAM sequence: TTG
agagtgaagaccactgtgcc

SEQ ID NO: 287469 - DNA, 20 bp, Artificial Sequence
  Description of Artificial Sequence: Synthetic oligonucleotide
  Target: LAMA2; (-) strand; PAM type: YTN; PAM sequence: TTG
tggcagtgaagcaagatgtt

SEQ ID NO: 287470 - DNA, 20 bp, Artificial Sequence
  Description of Artificial Sequence: Synthetic oligonucleotide
  Target: LAMA2; (-) strand; PAM type: YTN; PAM sequence: TTC
attgtggcagtgaagcaaga

SEQ ID NO: 287471 - DNA, 20 bp, Artificial Sequence
  Description of Artificial Sequence: Synthetic oligonucleotide
  Target: LAMA2; (-) strand; PAM type: YTN; PAM sequence: CTA
ttcattgtggcagtgaagca

SEQ ID NO: 287472 - DNA, 20 bp, Artificial Sequence
  Description of Artificial Sequence: Synthetic oligonucleotide
  Target: LAMA2; (-) strand; PAM type: YTN; PAM sequence: CTC
actattcattgtggcagtga

SEQ ID NO: 287473 - DNA, 20 bp, Artificial Sequence
  Description of Artificial Sequence: Synthetic oligonucleotide
  Target: LAMA2; (-) strand; PAM type: YTN; PAM sequence: CTA
tggtagtgtgtgtctcacta

SEQ ID NO: 287474 - DNA, 20 bp, Artificial Sequence
  Description of Artificial Sequence: Synthetic oligonucleotide
  Target: LAMA2; (-) strand; PAM type: YTN; PAM sequence: CTC
tatggtagtgtgtgtctcac

SEQ ID NO: 287475 - DNA, 20 bp, Artificial Sequence
  Description of Artificial Sequence: Synthetic oligonucleotide
  Target: LAMA2; (-) strand; PAM type: YTN; PAM sequence: TTA
tacacacactctatggtagt

SEQ ID NO: 287476 - DNA, 20 bp, Artificial Sequence
  Description of Artificial Sequence: Synthetic oligonucleotide
  Target: LAMA2; (-) strand; PAM type: YTN; PAM sequence: TTT
atacacacactctatggtag

SEQ ID NO: 287477 - DNA, 20 bp, Artificial Sequence
  Description of Artificial Sequence: Synthetic oligonucleotide
  Target: LAMA2; (-) strand; PAM type: YTN; PAM sequence: TTT
tatacacacactctatggta

SEQ ID NO: 287478 - DNA, 20 bp, Artificial Sequence
  Description of Artificial Sequence: Synthetic oligonucleotide
  Target: LAMA2; (-) strand; PAM type: YTN; PAM sequence: TTG
ccatatattttatacacaca

SEQ ID NO: 287479 - DNA, 20 bp, Artificial Sequence
  Description of Artificial Sequence: Synthetic oligonucleotide
  Target: LAMA2; (-) strand; PAM type: YTN; PAM sequence: TTT
gccatatattttatacacac

SEQ ID NO: 287480 - DNA, 20 bp, Artificial Sequence
  Description of Artificial Sequence: Synthetic oligonucleotide
  Target: LAMA2; (-) strand; PAM type: YTN; PAM sequence: CTA
tttgccatatattttataca

SEQ ID NO: 287481 - DNA, 20 bp, Artificial Sequence
  Description of Artificial Sequence: Synthetic oligonucleotide
  Target: LAMA2; (-) strand; PAM type: YTN; PAM sequence: CTC
agctatttgccatatatttt

SEQ ID NO: 287482 - DNA, 20 bp, Artificial Sequence
  Description of Artificial Sequence: Synthetic oligonucleotide
  Target: LAMA2; (-) strand; PAM type: YTN; PAM sequence: CTA
ccacatctcagctatttgcc

SEQ ID NO: 287483 - DNA, 20 bp, Artificial Sequence
  Description of Artificial Sequence: Synthetic oligonucleotide
  Target: LAMA2; (-) strand; PAM type: YTN; PAM sequence: TTA
aggtgtgactaccacatctc

SEQ ID NO: 287484 - DNA, 20 bp, Artificial Sequence
  Description of Artificial Sequence: Synthetic oligonucleotide
  Target: LAMA2; (-) strand; PAM type: YTN; PAM sequence: TTT
aaggtgtgactaccacatct

SEQ ID NO: 287485 - DNA, 20 bp, Artificial Sequence
  Description of Artificial Sequence: Synthetic oligonucleotide
  Target: LAMA2; (-) strand; PAM type: YTN; PAM sequence: TTA
aggtacaatttaaggtgtga

SEQ ID NO: 287486 - DNA, 20 bp, Artificial Sequence
  Description of Artificial Sequence: Synthetic oligonucleotide
  Target: LAMA2; (-) strand; PAM type: YTN; PAM sequence: TTA
ttaaggtacaatttaaggtg

SEQ ID NO: 287487 - DNA, 20 bp, Artificial Sequence
  Description of Artificial Sequence: Synthetic oligonucleotide
  Target: LAMA2; (-) strand; PAM type: YTN; PAM sequence: TTG
cataataattattaaggtac

SEQ ID NO: 287488 - DNA, 20 bp, Artificial Sequence
  Description of Artificial Sequence: Synthetic oligonucleotide
  Target: LAMA2; (-) strand; PAM type: YTN; PAM sequence: TTT
gcataataattattaaggta

SEQ ID NO: 287489 - DNA, 20 bp, Artificial Sequence
  Description of Artificial Sequence: Synthetic oligonucleotide
  Target: LAMA2; (-) strand; PAM type: YTN; PAM sequence: TTA
catttgcataataattatta

SEQ ID NO: 287490 - DNA, 20 bp, Artificial Sequence
  Description of Artificial Sequence: Synthetic oligonucleotide
  Target: LAMA2; (-) strand; PAM type: YTN; PAM sequence: TTG
tgccaattacatttgcataa

SEQ ID NO: 287491 - DNA, 20 bp, Artificial Sequence
  Description of Artificial Sequence: Synthetic oligonucleotide
  Target: LAMA2; (-) strand; PAM type: YTN; PAM sequence: TTT
gtgccaattacatttgcata

SEQ ID NO: 287492 - DNA, 20 bp, Artificial Sequence
  Description of Artificial Sequence: Synthetic oligonucleotide
  Target: LAMA2; (-) strand; PAM type: YTN; PAM sequence: TTT
tgtgccaattacatttgcat

SEQ ID NO: 287493 - DNA, 20 bp, Artificial Sequence
  Description of Artificial Sequence: Synthetic oligonucleotide
  Target: LAMA2; (-) strand; PAM type: YTN; PAM sequence: TTT
ttgtgccaattacatttgca

SEQ ID NO: 287494 - DNA, 20 bp, Artificial Sequence
  Description of Artificial Sequence: Synthetic oligonucleotide
  Target: LAMA2; (-) strand; PAM type: YTN; PAM sequence: CTG
tttttgtgccaattacattt

SEQ ID NO: 287495 - DNA, 20 bp, Artificial Sequence
  Description of Artificial Sequence: Synthetic oligonucleotide
  Target: LAMA2; (-) strand; PAM type: YTN; PAM sequence: CTG
atagaatactgtttttgtgc

SEQ ID NO: 287496 - DNA, 20 bp, Artificial Sequence
  Description of Artificial Sequence: Synthetic oligonucleotide
  Target: LAMA2; (-) strand; PAM type: YTN; PAM sequence: CTG
agactgatagaatactgttt

SEQ ID NO: 287497 - DNA, 20 bp, Artificial Sequence
  Description of Artificial Sequence: Synthetic oligonucleotide
  Target: LAMA2; (-) strand; PAM type: YTN; PAM sequence: TTC
tgagactgatagaatactgt

SEQ ID NO: 287498 - DNA, 20 bp, Artificial Sequence
  Description of Artificial Sequence: Synthetic oligonucleotide
  Target: LAMA2; (-) strand; PAM type: YTN; PAM sequence: TTT
ctgagactgatagaatactg

SEQ ID NO: 287499 - DNA, 20 bp, Artificial Sequence
  Description of Artificial Sequence: Synthetic oligonucleotide
  Target: LAMA2; (-) strand; PAM type: YTN; PAM sequence: TTT
tctgagactgatagaatact

SEQ ID NO: 287500 - DNA, 20 bp, Artificial Sequence
  Description of Artificial Sequence: Synthetic oligonucleotide
  Target: LAMA2; (-) strand; PAM type: YTN; PAM sequence: TTT
ttctgagactgatagaatac

SEQ ID NO: 287501 - DNA, 20 bp, Artificial Sequence
  Description of Artificial Sequence: Synthetic oligonucleotide
  Target: LAMA2; (-) strand; PAM type: YTN; PAM sequence: CTT
tttctgagactgatagaata

SEQ ID NO: 287502 - DNA, 20 bp, Artificial Sequence
  Description of Artificial Sequence: Synthetic oligonucleotide
  Target: LAMA2; (-) strand; PAM type: YTN; PAM sequence: TTC
tttttctgagactgatagaa

SEQ ID NO: 287503 - DNA, 20 bp, Artificial Sequence
  Description of Artificial Sequence: Synthetic oligonucleotide
  Target: LAMA2; (-) strand; PAM type: YTN; PAM sequence: TTT
ctttttctgagactgataga

SEQ ID NO: 287504 - DNA, 20 bp, Artificial Sequence
  Description of Artificial Sequence: Synthetic oligonucleotide
  Target: LAMA2; (-) strand; PAM type: YTN; PAM sequence: CTT
tctttttctgagactgatag

SEQ ID NO: 287505 - DNA, 20 bp, Artificial Sequence
  Description of Artificial Sequence: Synthetic oligonucleotide
  Target: LAMA2; (-) strand; PAM type: YTN; PAM sequence: TTC
tttctttttctgagactgat

SEQ ID NO: 287506 - DNA, 20 bp, Artificial Sequence
  Description of Artificial Sequence: Synthetic oligonucleotide
  Target: LAMA2; (-) strand; PAM type: YTN; PAM sequence: TTT
ctttctttttctgagactga

SEQ ID NO: 287507 - DNA, 20 bp, Artificial Sequence
  Description of Artificial Sequence: Synthetic oligonucleotide
  Target: LAMA2; (-) strand; PAM type: YTN; PAM sequence: TTT
tctttctttttctgagactg

SEQ ID NO: 287508 - DNA, 20 bp, Artificial Sequence
  Description of Artificial Sequence: Synthetic oligonucleotide
  Target: LAMA2; (-) strand; PAM type: YTN; PAM sequence: TTC
atgttttctttctttttctg

SEQ ID NO: 287509 - DNA, 20 bp, Artificial Sequence
  Description of Artificial Sequence: Synthetic oligonucleotide
  Target: LAMA2; (-) strand; PAM type: YTN; PAM sequence: TTG
ttcatgttttctttcttttt

SEQ ID NO: 287510 - DNA, 20 bp, Artificial Sequence
  Description of Artificial Sequence: Synthetic oligonucleotide
  Target: LAMA2; (-) strand; PAM type: YTN; PAM sequence: TTT
gttcatgttttctttctttt

SEQ ID NO: 287511 - DNA, 20 bp, Artificial Sequence
  Description of Artificial Sequence: Synthetic oligonucleotide
  Target: LAMA2; (-) strand; PAM type: YTN; PAM sequence: TTC
atttgttcatgttttctttc

SEQ ID NO: 287512 - DNA, 20 bp, Artificial Sequence
  Description of Artificial Sequence: Synthetic oligonucleotide
  Target: LAMA2; (-) strand; PAM type: YTN; PAM sequence: TTT
catttgttcatgttttcttt

SEQ ID NO: 287513 - DNA, 20 bp, Artificial Sequence
  Description of Artificial Sequence: Synthetic oligonucleotide
  Target: LAMA2; (-) strand; PAM type: YTN; PAM sequence: CTA
tagatttcatttgttcatgt

SEQ ID NO: 287514 - DNA, 20 bp, Artificial Sequence
  Description of Artificial Sequence: Synthetic oligonucleotide
  Target: LAMA2; (-) strand; PAM type: YTN; PAM sequence: TTG
ctatagatttcatttgttca

SEQ ID NO: 287515 - DNA, 20 bp, Artificial Sequence
  Description of Artificial Sequence: Synthetic oligonucleotide
  Target: LAMA2; (-) strand; PAM type: YTN; PAM sequence: TTT
gctatagatttcatttgttc

SEQ ID NO: 287516 - DNA, 20 bp, Artificial Sequence
  Description of Artificial Sequence: Synthetic oligonucleotide
  Target: LAMA2; (-) strand; PAM type: YTN; PAM sequence: CTA
aggtttgctatagatttcat

SEQ ID NO: 287517 - DNA, 20 bp, Artificial Sequence
  Description of Artificial Sequence: Synthetic oligonucleotide
  Target: LAMA2; (-) strand; PAM type: YTN; PAM sequence: TTC
ctaaggtttgctatagattt

SEQ ID NO: 287518 - DNA, 20 bp, Artificial Sequence
  Description of Artificial Sequence: Synthetic oligonucleotide
  Target: LAMA2; (-) strand; PAM type: YTN; PAM sequence: TTT
cctaaggtttgctatagatt

SEQ ID NO: 287519 - DNA, 20 bp, Artificial Sequence
  Description of Artificial Sequence: Synthetic oligonucleotide
  Target: LAMA2; (-) strand; PAM type: YTN; PAM sequence: TTG
gccaaaatgatttcctaagg

SEQ ID NO: 287520 - DNA, 20 bp, Artificial Sequence
  Description of Artificial Sequence: Synthetic oligonucleotide
  Target: LAMA2; (-) strand; PAM type: YTN; PAM sequence: CTT
ggccaaaatgatttcctaag

SEQ ID NO: 287521 - DNA, 20 bp, Artificial Sequence
  Description of Artificial Sequence: Synthetic oligonucleotide
  Target: LAMA2; (-) strand; PAM type: YTN; PAM sequence: TTC
ttggccaaaatgatttccta

SEQ ID NO: 287522 - DNA, 20 bp, Artificial Sequence
  Description of Artificial Sequence: Synthetic oligonucleotide
  Target: LAMA2; (-) strand; PAM type: YTN; PAM sequence: TTG
aaattcttggccaaaatgat

SEQ ID NO: 287523 - DNA, 20 bp, Artificial Sequence
  Description of Artificial Sequence: Synthetic oligonucleotide
  Target: LAMA2; (-) strand; PAM type: YTN; PAM sequence: CTT
gaaattcttggccaaaatga

SEQ ID NO: 287524 - DNA, 20 bp, Artificial Sequence
  Description of Artificial Sequence: Synthetic oligonucleotide
  Target: LAMA2; (-) strand; PAM type: YTN; PAM sequence: CTG
gtgtggcagtagtcttgaaa

SEQ ID NO: 287525 - DNA, 20 bp, Artificial Sequence
  Description of Artificial Sequence: Synthetic oligonucleotide
  Target: LAMA2; (-) strand; PAM type: YTN; PAM sequence: TTC
tggtgtggcagtagtcttga

SEQ ID NO: 287526 - DNA, 20 bp, Artificial Sequence
  Description of Artificial Sequence: Synthetic oligonucleotide
  Target: LAMA2; (-) strand; PAM type: YTN; PAM sequence: TTC
atattctggtgtggcagtag

SEQ ID NO: 287527 - DNA, 20 bp, Artificial Sequence
  Description of Artificial Sequence: Synthetic oligonucleotide
  Target: LAMA2; (-) strand; PAM type: YTN; PAM sequence: TTG
gttcatattctggtgtggca

SEQ ID NO: 287528 - DNA, 20 bp, Artificial Sequence
  Description of Artificial Sequence: Synthetic oligonucleotide
  Target: LAMA2; (-) strand; PAM type: YTN; PAM sequence: TTT
ggttcatattctggtgtggc

SEQ ID NO: 287529 - DNA, 20 bp, Artificial Sequence
  Description of Artificial Sequence: Synthetic oligonucleotide
  Target: LAMA2; (-) strand; PAM type: YTN; PAM sequence: TTT
tggttcatattctggtgtgg

SEQ ID NO: 287530 - DNA, 20 bp, Artificial Sequence
  Description of Artificial Sequence: Synthetic oligonucleotide
  Target: LAMA2; (-) strand; PAM type: YTN; PAM sequence: CTT
ttggttcatattctggtgtg

SEQ ID NO: 287531 - DNA, 20 bp, Artificial Sequence
  Description of Artificial Sequence: Synthetic oligonucleotide
  Target: LAMA2; (-) strand; PAM type: YTN; PAM sequence: TTC
agcttttggttcatattctg

SEQ ID NO: 287532 - DNA, 20 bp, Artificial Sequence
  Description of Artificial Sequence: Synthetic oligonucleotide
  Target: LAMA2; (-) strand; PAM type: YTN; PAM sequence: TTT
cagcttttggttcatattct

SEQ ID NO: 287533 - DNA, 20 bp, Artificial Sequence
  Description of Artificial Sequence: Synthetic oligonucleotide
  Target: LAMA2; (-) strand; PAM type: YTN; PAM sequence: TTT
tcagcttttggttcatattc

SEQ ID NO: 287534 - DNA, 20 bp, Artificial Sequence
  Description of Artificial Sequence: Synthetic oligonucleotide
  Target: LAMA2; (-) strand; PAM type: YTN; PAM sequence: TTG
ttttcagcttttggttcata

SEQ ID NO: 287535 - DNA, 20 bp, Artificial Sequence
  Description of Artificial Sequence: Synthetic oligonucleotide
  Target: LAMA2; (-) strand; PAM type: YTN; PAM sequence: TTA
gttgttttcagcttttggtt

SEQ ID NO: 287536 - DNA, 20 bp, Artificial Sequence
  Description of Artificial Sequence: Synthetic oligonucleotide
  Target: LAMA2; (-) strand; PAM type: YTN; PAM sequence: TTT
agttgttttcagcttttggt

SEQ ID NO: 287537 - DNA, 20 bp, Artificial Sequence
  Description of Artificial Sequence: Synthetic oligonucleotide
  Target: LAMA2; (-) strand; PAM type: YTN; PAM sequence: TTC
atttagttgttttcagcttt

SEQ ID NO: 287538 - DNA, 20 bp, Artificial Sequence
  Description of Artificial Sequence: Synthetic oligonucleotide
  Target: LAMA2; (-) strand; PAM type: YTN; PAM sequence: CTC
atgagcaagttcatttagtt

SEQ ID NO: 287539 - DNA, 20 bp, Artificial Sequence
  Description of Artificial Sequence: Synthetic oligonucleotide
  Target: LAMA2; (-) strand; PAM type: YTN; PAM sequence: TTC
tcatgagcaagttcatttag

SEQ ID NO: 287540 - DNA, 20 bp, Artificial Sequence
  Description of Artificial Sequence: Synthetic oligonucleotide
  Target: LAMA2; (-) strand; PAM type: YTN; PAM sequence: TTG
aattctcatgagcaagttca

SEQ ID NO: 287541 - DNA, 20 bp, Artificial Sequence
  Description of Artificial Sequence: Synthetic oligonucleotide
  Target: LAMA2; (-) strand; PAM type: YTN; PAM sequence: TTT
gaattctcatgagcaagttc

SEQ ID NO: 287542 - DNA, 20 bp, Artificial Sequence
  Description of Artificial Sequence: Synthetic oligonucleotide
  Target: LAMA2; (-) strand; PAM type: YTN; PAM sequence: CTC
atttgaattctcatgagcaa

SEQ ID NO: 287543 - DNA, 20 bp, Artificial Sequence
  Description of Artificial Sequence: Synthetic oligonucleotide
  Target: LAMA2; (-) strand; PAM type: YTN; PAM sequence: CTG
ctcatttgaattctcatgag

SEQ ID NO: 287544 - DNA, 20 bp, Artificial Sequence
  Description of Artificial Sequence: Synthetic oligonucleotide
  Target: LAMA2; (-) strand; PAM type: YTN; PAM sequence: TTC
ctgctcatttgaattctcat

SEQ ID NO: 287545 - DNA, 20 bp, Artificial Sequence
  Description of Artificial Sequence: Synthetic oligonucleotide
  Target: LAMA2; (-) strand; PAM type: YTN; PAM sequence: TTT
cctgctcatttgaattctca

SEQ ID NO: 287546 - DNA, 20 bp, Artificial Sequence
  Description of Artificial Sequence: Synthetic oligonucleotide
  Target: LAMA2; (-) strand; PAM type: YTN; PAM sequence: TTT
tcctgctcatttgaattctc

SEQ ID NO: 287547 - DNA, 20 bp, Artificial Sequence
  Description of Artificial Sequence: Synthetic oligonucleotide
  Target: LAMA2; (-) strand; PAM type: YTN; PAM sequence: TTG
agagattttcctgctcattt

SEQ ID NO: 287548 - DNA, 20 bp, Artificial Sequence
  Description of Artificial Sequence: Synthetic oligonucleotide
  Target: LAMA2; (-) strand; PAM type: YTN; PAM sequence: TTT
gagagattttcctgctcatt

SEQ ID NO: 287549 - DNA, 20 bp, Artificial Sequence
  Description of Artificial Sequence: Synthetic oligonucleotide
  Target: LAMA2; (-) strand; PAM type: YTN; PAM sequence: CTA
tatttgagagattttcctgc

SEQ ID NO: 287550 - DNA, 20 bp, Artificial Sequence
  Description of Artificial Sequence: Synthetic oligonucleotide
  Target: LAMA2; (-) strand; PAM type: YTN; PAM sequence: CTG
aaaagctatatttgagagat

SEQ ID NO: 287551 - DNA, 20 bp, Artificial Sequence
  Description of Artificial Sequence: Synthetic oligonucleotide
  Target: LAMA2; (-) strand; PAM type: YTN; PAM sequence: TTG
catcctgaaaagctatattt

SEQ ID NO: 287552 - DNA, 20 bp, Artificial Sequence
  Description of Artificial Sequence: Synthetic oligonucleotide
  Target: LAMA2; (-) strand; PAM type: YTN; PAM sequence: CTT
gcatcctgaaaagctatatt

SEQ ID NO: 287553 - DNA, 20 bp, Artificial Sequence
  Description of Artificial Sequence: Synthetic oligonucleotide
  Target: LAMA2; (-) strand; PAM type: YTN; PAM sequence: TTC
ttgcatcctgaaaagctata

SEQ ID NO: 287554 - DNA, 20 bp, Artificial Sequence
  Description of Artificial Sequence: Synthetic oligonucleotide
  Target: LAMA2; (-) strand; PAM type: YTN; PAM sequence: CTT
cttgcatcctgaaaagctat

SEQ ID NO: 287555 - DNA, 20 bp, Artificial Sequence
  Description of Artificial Sequence: Synthetic oligonucleotide
  Target: LAMA2; (-) strand; PAM type: YTN; PAM sequence: TTC
ttcttgcatcctgaaaagct

SEQ ID NO: 287556 - DNA, 20 bp, Artificial Sequence
  Description of Artificial Sequence: Synthetic oligonucleotide
  Target: LAMA2; (-) strand; PAM type: YTN; PAM sequence: CTT
cttcttgcatcctgaaaagc

SEQ ID NO: 287557 - DNA, 20 bp, Artificial Sequence
  Description of Artificial Sequence: Synthetic oligonucleotide
  Target: LAMA2; (-) strand; PAM type: YTN; PAM sequence: TTG
cttcttcttgcatcctgaaa

SEQ ID NO: 287558 - DNA, 20 bp, Artificial Sequence
  Description of Artificial Sequence: Synthetic oligonucleotide
  Target: LAMA2; (-) strand; PAM type: YTN; PAM sequence: TTT
gcttcttcttgcatcctgaa

SEQ ID NO: 287559 - DNA, 20 bp, Artificial Sequence
  Description of Artificial Sequence: Synthetic oligonucleotide
  Target: LAMA2; (-) strand; PAM type: YTN; PAM sequence: TTT
tgcttcttcttgcatcctga

SEQ ID NO: 287560 - DNA, 20 bp, Artificial Sequence
  Description of Artificial Sequence: Synthetic oligonucleotide
  Target: LAMA2; (-) strand; PAM type: YTN; PAM sequence: TTT
ttgcttcttcttgcatcctg

SEQ ID NO: 287561 - DNA, 20 bp, Artificial Sequence
  Description of Artificial Sequence: Synthetic oligonucleotide
  Target: LAMA2; (-) strand; PAM type: YTN; PAM sequence: CTT
tttgcttcttcttgcatcct

SEQ ID NO: 287562 - DNA, 20 bp, Artificial Sequence
  Description of Artificial Sequence: Synthetic oligonucleotide
  Target: LAMA2; (-) strand; PAM type: YTN; PAM sequence: TTG
ctttttgcttcttcttgcat

SEQ ID NO: 287563 - DNA, 20 bp, Artificial Sequence
  Description of Artificial Sequence: Synthetic oligonucleotide
  Target: LAMA2; (-) strand; PAM type: YTN; PAM sequence: CTT
gctttttgcttcttcttgca

SEQ ID NO: 287564 - DNA, 20 bp, Artificial Sequence
  Description of Artificial Sequence: Synthetic oligonucleotide
  Target: LAMA2; (-) strand; PAM type: YTN; PAM sequence: CTG
cttgctttttgcttcttctt

SEQ ID NO: 287565 - DNA, 20 bp, Artificial Sequence
  Description of Artificial Sequence: Synthetic oligonucleotide
  Target: LAMA2; (-) strand; PAM type: YTN; PAM sequence: TTC
tgcttgctttttgcttcttc

SEQ ID NO: 287566 - DNA, 20 bp, Artificial Sequence
  Description of Artificial Sequence: Synthetic oligonucleotide
  Target: LAMA2; (-) strand; PAM type: YTN; PAM sequence: TTG
tgaattctgcttgctttttg

SEQ ID NO: 287567 - DNA, 20 bp, Artificial Sequence
  Description of Artificial Sequence: Synthetic oligonucleotide
  Target: LAMA2; (-) strand; PAM type: YTN; PAM sequence: CTT
gtgaattctgcttgcttttt

SEQ ID NO: 287568 - DNA, 20 bp, Artificial Sequence
  Description of Artificial Sequence: Synthetic oligonucleotide
  Target: LAMA2; (-) strand; PAM type: YTN; PAM sequence: CTA
cttgtgaattctgcttgctt

SEQ ID NO: 287569 - DNA, 20 bp, Artificial Sequence
  Description of Artificial Sequence: Synthetic oligonucleotide
  Target: LAMA2; (-) strand; PAM type: YTN; PAM sequence: TTA
tcctacttgtgaattctgct

SEQ ID NO: 287570 - DNA, 20 bp, Artificial Sequence
  Description of Artificial Sequence: Synthetic oligonucleotide
  Target: LAMA2; (-) strand; PAM type: YTN; PAM sequence: TTG
attatcctacttgtgaattc

SEQ ID NO: 287571 - DNA, 20 bp, Artificial Sequence
  Description of Artificial Sequence: Synthetic oligonucleotide
  Target: LAMA2; (-) strand; PAM type: YTN; PAM sequence: CTA
gagattgattatcctacttg

SEQ ID NO: 287572 - DNA, 20 bp, Artificial Sequence
  Description of Artificial Sequence: Synthetic oligonucleotide
  Target: LAMA2; (-) strand; PAM type: YTN; PAM sequence: TTC
tagagattgattatcctact

SEQ ID NO: 287573 - DNA, 20 bp, Artificial Sequence
  Description of Artificial Sequence: Synthetic oligonucleotide
  Target: LAMA2; (-) strand; PAM type: YTN; PAM sequence: TTT
ctagagattgattatcctac

SEQ ID NO: 287574 - DNA, 20 bp, Artificial Sequence
  Description of Artificial Sequence: Synthetic oligonucleotide
  Target: LAMA2; (-) strand; PAM type: YTN; PAM sequence: TTT
tctagagattgattatccta

SEQ ID NO: 287575 - DNA, 20 bp, Artificial Sequence
  Description of Artificial Sequence: Synthetic oligonucleotide
  Target: LAMA2; (-) strand; PAM type: YTN; PAM sequence: TTA
attttctagagattgattat

SEQ ID NO: 287576 - DNA, 20 bp, Artificial Sequence
  Description of Artificial Sequence: Synthetic oligonucleotide
  Target: LAMA2; (-) strand; PAM type: YTN; PAM sequence: CTT
aattttctagagattgatta

SEQ ID NO: 287577 - DNA, 20 bp, Artificial Sequence
  Description of Artificial Sequence: Synthetic oligonucleotide
  Target: LAMA2; (-) strand; PAM type: YTN; PAM sequence: CTC
ttaattttctagagattgat

SEQ ID NO: 287578 - DNA, 20 bp, Artificial Sequence
  Description of Artificial Sequence: Synthetic oligonucleotide
  Target: LAMA2; (-) strand; PAM type: YTN; PAM sequence: CTG
aacctcttaattttctagag

SEQ ID NO: 287579 - DNA, 20 bp, Artificial Sequence
  Description of Artificial Sequence: Synthetic oligonucleotide
  Target: LAMA2; (-) strand; PAM type: YTN; PAM sequence: CTC
tgaacctcttaattttctag

SEQ ID NO: 287580 - DNA, 20 bp, Artificial Sequence
  Description of Artificial Sequence: Synthetic oligonucleotide
  Target: LAMA2; (-) strand; PAM type: YTN; PAM sequence: CTG
tcatcactctgaacctctta

SEQ ID NO: 287581 - DNA, 20 bp, Artificial Sequence
  Description of Artificial Sequence: Synthetic oligonucleotide
  Target: LAMA2; (-) strand; PAM type: YTN; PAM sequence: CTC
tgtcatcactctgaacctct

SEQ ID NO: 287582 - DNA, 20 bp, Artificial Sequence
  Description of Artificial Sequence: Synthetic oligonucleotide
  Target: LAMA2; (-) strand; PAM type: YTN; PAM sequence: TTG
caatgctctgtcatcactct

SEQ ID NO: 287583 - DNA, 20 bp, Artificial Sequence
  Description of Artificial Sequence: Synthetic oligonucleotide
  Target: LAMA2; (-) strand; PAM type: YTN; PAM sequence: CTT
gcaatgctctgtcatcactc

SEQ ID NO: 287584 - DNA, 20 bp, Artificial Sequence
  Description of Artificial Sequence: Synthetic oligonucleotide
  Target: LAMA2; (-) strand; PAM type: YTN; PAM sequence: TTG
gagtcgtccttgcaatgctc

SEQ ID NO: 287585 - DNA, 20 bp, Artificial Sequence
  Description of Artificial Sequence: Synthetic oligonucleotide
  Target: LAMA2; (-) strand; PAM type: YTN; PAM sequence: TTG
cacattggagtcgtccttgc

SEQ ID NO: 287586 - DNA, 20 bp, Artificial Sequence
  Description of Artificial Sequence: Synthetic oligonucleotide
  Target: LAMA2; (-) strand; PAM type: YTN; PAM sequence: CTT
gcacattggagtcgtccttg

SEQ ID NO: 287587 - DNA, 20 bp, Artificial Sequence
  Description of Artificial Sequence: Synthetic oligonucleotide
  Target: LAMA2; (-) strand; PAM type: YTN; PAM sequence: CTG
acttgcacattggagtcgtc

SEQ ID NO: 287588 - DNA, 20 bp, Artificial Sequence
  Description of Artificial Sequence: Synthetic oligonucleotide
  Target: LAMA2; (-) strand; PAM type: YTN; PAM sequence: TTG
atcggagcccctgacttgca

SEQ ID NO: 287589 - DNA, 20 bp, Artificial Sequence
  Description of Artificial Sequence: Synthetic oligonucleotide
  Target: LAMA2; (-) strand; PAM type: YTN; PAM sequence: TTG
ttgatcggagcccctgactt

SEQ ID NO: 287590 - DNA, 20 bp, Artificial Sequence
  Description of Artificial Sequence: Synthetic oligonucleotide
  Target: LAMA2; (-) strand; PAM type: YTN; PAM sequence: TTG
cacagccgcatagaaagatt

SEQ ID NO: 287591 - DNA, 20 bp, Artificial Sequence
  Description of Artificial Sequence: Synthetic oligonucleotide
  Target: LAMA2; (-) strand; PAM type: YTN; PAM sequence: CTG
tgaccatgtattgcacagcc

SEQ ID NO: 287592 - DNA, 20 bp, Artificial Sequence
  Description of Artificial Sequence: Synthetic oligonucleotide
  Target: LAMA2; (-) strand; PAM type: YTN; PAM sequence: CTG
ctgtgaccatgtattgcaca

SEQ ID NO: 287593 - DNA, 20 bp, Artificial Sequence
  Description of Artificial Sequence: Synthetic oligonucleotide
  Target: LAMA2; (-) strand; PAM type: YTN; PAM sequence: TTC
ccactgctgtgaccatgtat

SEQ ID NO: 287594 - DNA, 20 bp, Artificial Sequence
  Description of Artificial Sequence: Synthetic oligonucleotide
  Target: LAMA2; (-) strand; PAM type: YTN; PAM sequence: TTT
cccactgctgtgaccatgta

SEQ ID NO: 287595 - DNA, 20 bp, Artificial Sequence
  Description of Artificial Sequence: Synthetic oligonucleotide
  Target: LAMA2; (-) strand; PAM type: YTN; PAM sequence: TTA
aacccatcaacatgtacatt

SEQ ID NO: 287596 - DNA, 20 bp, Artificial Sequence
  Description of Artificial Sequence: Synthetic oligonucleotide
  Target: LAMA2; (-) strand; PAM type: YTN; PAM sequence: TTA
ggttaaacccatcaacatgt

SEQ ID NO: 287597 - DNA, 20 bp, Artificial Sequence
  Description of Artificial Sequence: Synthetic oligonucleotide
  Target: LAMA2; (-) strand; PAM type: YTN; PAM sequence: TTT
aggttaaacccatcaacatg

SEQ ID NO: 287598 - DNA, 20 bp, Artificial Sequence
  Description of Artificial Sequence: Synthetic oligonucleotide
  Target: LAMA2; (-) strand; PAM type: YTN; PAM sequence: TTT
taggttaaacccatcaacat

SEQ ID NO: 287599 - DNA, 20 bp, Artificial Sequence
  Description of Artificial Sequence: Synthetic oligonucleotide
  Target: LAMA2; (-) strand; PAM type: YTN; PAM sequence: CTA
tggttttaggttaaacccat

SEQ ID NO: 287600 - DNA, 20 bp, Artificial Sequence
  Description of Artificial Sequence: Synthetic oligonucleotide
  Target: LAMA2; (-) strand; PAM type: YTN; PAM sequence: CTG
ctatggttttaggttaaacc

SEQ ID NO: 287601 - DNA, 20 bp, Artificial Sequence
  Description of Artificial Sequence: Synthetic oligonucleotide
  Target: LAMA2; (-) strand; PAM type: YTN; PAM sequence: CTA
ctgctatggttttaggttaa

SEQ ID NO: 287602 - DNA, 20 bp, Artificial Sequence
  Description of Artificial Sequence: Synthetic oligonucleotide
  Target: LAMA2; (-) strand; PAM type: YTN; PAM sequence: CTA
tggtatagcctactgctatg

SEQ ID NO: 287603 - DNA, 20 bp, Artificial Sequence
  Description of Artificial Sequence: Synthetic oligonucleotide
  Target: LAMA2; (-) strand; PAM type: YTN; PAM sequence: CTC
tatggtatagcctactgcta

SEQ ID NO: 287604 - DNA, 20 bp, Artificial Sequence
  Description of Artificial Sequence: Synthetic oligonucleotide
  Target: LAMA2; (-) strand; PAM type: YTN; PAM sequence: CTA
ggctctatggtatagcctac

SEQ ID NO: 287605 - DNA, 20 bp, Artificial Sequence
  Description of Artificial Sequence: Synthetic oligonucleotide
  Target: LAMA2; (-) strand; PAM type: YTN; PAM sequence: CTA
cacacctaggctctatggta

SEQ ID NO: 287606 - DNA, 20 bp, Artificial Sequence
  Description of Artificial Sequence: Synthetic oligonucleotide
  Target: LAMA2; (-) strand; PAM type: YTN; PAM sequence: CTA
ctacacacctaggctctatg

SEQ ID NO: 287607 - DNA, 20 bp, Artificial Sequence
  Description of Artificial Sequence: Synthetic oligonucleotide
  Target: LAMA2; (-) strand; PAM type: YTN; PAM sequence: CTA
gatggtatagcctactacac

SEQ ID NO: 287608 - DNA, 20 bp, Artificial Sequence
  Description of Artificial Sequence: Synthetic oligonucleotide
  Target: LAMA2; (-) strand; PAM type: YTN; PAM sequence: TTG
cacaaatctagatggtatag

SEQ ID NO: 287609 - DNA, 20 bp, Artificial Sequence
  Description of Artificial Sequence: Synthetic oligonucleotide
  Target: LAMA2; (-) strand; PAM type: YTN; PAM sequence: CTT
gcacaaatctagatggtata

SEQ ID NO: 287610 - DNA, 20 bp, Artificial Sequence
  Description of Artificial Sequence: Synthetic oligonucleotide
  Target: LAMA2; (-) strand; PAM type: YTN; PAM sequence: CTG
tacagtacttgcacaaatct

SEQ ID NO: 287611 - DNA, 20 bp, Artificial Sequence
  Description of Artificial Sequence: Synthetic oligonucleotide
  Target: LAMA2; (-) strand; PAM type: YTN; PAM sequence: TTA
aaagcatagactgtacagta

SEQ ID NO: 287612 - DNA, 20 bp, Artificial Sequence
  Description of Artificial Sequence: Synthetic oligonucleotide
  Target: LAMA2; (-) strand; PAM type: YTN; PAM sequence: CTG
aatagttaaaagcatagact

SEQ ID NO: 287613 - DNA, 20 bp, Artificial Sequence
  Description of Artificial Sequence: Synthetic oligonucleotide
  Target: LAMA2; (-) strand; PAM type: YTN; PAM sequence: TTA
ctgaatagttaaaagcatag

SEQ ID NO: 287614 - DNA, 20 bp, Artificial Sequence
  Description of Artificial Sequence: Synthetic oligonucleotide
  Target: LAMA2; (-) strand; PAM type: YTN; PAM sequence: TTA
aatagtaaaatcagttactg

SEQ ID NO: 287615 - DNA, 20 bp, Artificial Sequence
  Description of Artificial Sequence: Synthetic oligonucleotide
  Target: LAMA2; (-) strand; PAM type: YTN; PAM sequence: TTT
aaatagtaaaatcagttact

SEQ ID NO: 287616 - DNA, 20 bp, Artificial Sequence
  Description of Artificial Sequence: Synthetic oligonucleotide
  Target: LAMA2; (-) strand; PAM type: YTN; PAM sequence: TTT
taaatagtaaaatcagttac

SEQ ID NO: 287617 - DNA, 20 bp, Artificial Sequence
  Description of Artificial Sequence: Synthetic oligonucleotide
  Target: LAMA2; (-) strand; PAM type: YTN; PAM sequence: TTA
aaattttaaatagtaaaatc

SEQ ID NO: 287618 - DNA, 20 bp, Artificial Sequence
  Description of Artificial Sequence: Synthetic oligonucleotide
  Target: LAMA2; (-) strand; PAM type: YTN; PAM sequence: CTG
aatagttaaaattttaaata

SEQ ID NO: 287619 - DNA, 20 bp, Artificial Sequence
  Description of Artificial Sequence: Synthetic oligonucleotide
  Target: LAMA2; (-) strand; PAM type: YTN; PAM sequence: TTA
ctgaatagttaaaattttaa

SEQ ID NO: 287620 - DNA, 20 bp, Artificial Sequence
  Description of Artificial Sequence: Synthetic oligonucleotide
  Target: LAMA2; (-) strand; PAM type: YTN; PAM sequence: TTA
gaacacacataagaaaacag

SEQ ID NO: 287621 - DNA, 20 bp, Artificial Sequence
  Description of Artificial Sequence: Synthetic oligonucleotide
  Target: LAMA2; (-) strand; PAM type: YTN; PAM sequence: TTT
agaacacacataagaaaaca

SEQ ID NO: 287622 - DNA, 20 bp, Artificial Sequence
  Description of Artificial Sequence: Synthetic oligonucleotide
  Target: LAMA2; (-) strand; PAM type: YTN; PAM sequence: TTT
tagaacacacataagaaaac

SEQ ID NO: 287623 - DNA, 20 bp, Artificial Sequence
  Description of Artificial Sequence: Synthetic oligonucleotide
  Target: LAMA2; (-) strand; PAM type: YTN; PAM sequence: TTT
ttagaacacacataagaaaa

SEQ ID NO: 287624 - DNA, 20 bp, Artificial Sequence
  Description of Artificial Sequence: Synthetic oligonucleotide
  Target: LAMA2; (-) strand; PAM type: YTN; PAM sequence: TTG
gtttttagaacacacataag

SEQ ID NO: 287625 - DNA, 20 bp, Artificial Sequence
  Description of Artificial Sequence: Synthetic oligonucleotide
  Target: LAMA2; (-) strand; PAM type: YTN; PAM sequence: TTT
ggtttttagaacacacataa

SEQ ID NO: 287626 - DNA, 20 bp, Artificial Sequence
  Description of Artificial Sequence: Synthetic oligonucleotide
  Target: LAMA2; (-) strand; PAM type: YTN; PAM sequence: CTC
atttggtttttagaacacac

SEQ ID NO: 287627 - DNA, 20 bp, Artificial Sequence
  Description of Artificial Sequence: Synthetic oligonucleotide
  Target: LAMA2; (-) strand; PAM type: YTN; PAM sequence: TTG
actcatttggtttttagaac

SEQ ID NO: 287628 - DNA, 20 bp, Artificial Sequence
  Description of Artificial Sequence: Synthetic oligonucleotide
  Target: LAMA2; (-) strand; PAM type: YTN; PAM sequence: CTG
ggaaaaacatgcattgactc

SEQ ID NO: 287629 - DNA, 20 bp, Artificial Sequence
  Description of Artificial Sequence: Synthetic oligonucleotide
  Target: LAMA2; (-) strand; PAM type: YTN; PAM sequence: TTA
tctgggaaaaacatgcattg

SEQ ID NO: 287630 - DNA, 20 bp, Artificial Sequence
  Description of Artificial Sequence: Synthetic oligonucleotide
  Target: LAMA2; (-) strand; PAM type: YTN; PAM sequence: CTC
agattatctgggaaaaacat

SEQ ID NO: 287631 - DNA, 20 bp, Artificial Sequence
  Description of Artificial Sequence: Synthetic oligonucleotide
  Target: LAMA2; (-) strand; PAM type: YTN; PAM sequence: TTA
ctcagattatctgggaaaaa

SEQ ID NO: 287632 - DNA, 20 bp, Artificial Sequence
  Description of Artificial Sequence: Synthetic oligonucleotide
  Target: LAMA2; (-) strand; PAM type: YTN; PAM sequence: TTT
actcagattatctgggaaaa

SEQ ID NO: 287633 - DNA, 20 bp, Artificial Sequence
  Description of Artificial Sequence: Synthetic oligonucleotide
  Target: LAMA2; (-) strand; PAM type: YTN; PAM sequence: CTG
tgccaaagtgaacccatatt

SEQ ID NO: 287634 - DNA, 20 bp, Artificial Sequence
  Description of Artificial Sequence: Synthetic oligonucleotide
  Target: LAMA2; (-) strand; PAM type: YTN; PAM sequence: CTC
tgtgccaaagtgaacccata

SEQ ID NO: 287635 - DNA, 20 bp, Artificial Sequence
  Description of Artificial Sequence: Synthetic oligonucleotide
  Target: LAMA2; (-) strand; PAM type: YTN; PAM sequence: TTA
aaaactctgtgccaaagtga

SEQ ID NO: 287636 - DNA, 20 bp, Artificial Sequence
  Description of Artificial Sequence: Synthetic oligonucleotide
  Target: LAMA2; (-) strand; PAM type: YTN; PAM sequence: TTT
aaaaactctgtgccaaagtg

SEQ ID NO: 287637 - DNA, 20 bp, Artificial Sequence
  Description of Artificial Sequence: Synthetic oligonucleotide
  Target: LAMA2; (-) strand; PAM type: YTN; PAM sequence: CTT
taaaaactctgtgccaaagt

SEQ ID NO: 287638 - DNA, 20 bp, Artificial Sequence
  Description of Artificial Sequence: Synthetic oligonucleotide
  Target: LAMA2; (-) strand; PAM type: YTN; PAM sequence: CTA
caactttaaaaactctgtgc

SEQ ID NO: 287639 - DNA, 20 bp, Artificial Sequence
  Description of Artificial Sequence: Synthetic oligonucleotide
  Target: LAMA2; (-) strand; PAM type: YTN; PAM sequence: CTG
gtgcctacaactttaaaaac

SEQ ID NO: 287640 - DNA, 20 bp, Artificial Sequence
  Description of Artificial Sequence: Synthetic oligonucleotide
  Target: LAMA2; (-) strand; PAM type: YTN; PAM sequence: TTC
tggtgcctacaactttaaaa

SEQ ID NO: 287641 - DNA, 20 bp, Artificial Sequence
  Description of Artificial Sequence: Synthetic oligonucleotide
  Target: LAMA2; (-) strand; PAM type: YTN; PAM sequence: TTA
tattctggtgcctacaactt

SEQ ID NO: 287642 - DNA, 20 bp, Artificial Sequence
  Description of Artificial Sequence: Synthetic oligonucleotide
  Target: LAMA2; (-) strand; PAM type: YTN; PAM sequence: CTG
tattatattctggtgcctac

SEQ ID NO: 287643 - DNA, 20 bp, Artificial Sequence
  Description of Artificial Sequence: Synthetic oligonucleotide
  Target: LAMA2; (-) strand; PAM type: YTN; PAM sequence: TTG
agtgacacatgactgtatta

SEQ ID NO: 287644 - DNA, 20 bp, Artificial Sequence
  Description of Artificial Sequence: Synthetic oligonucleotide
  Target: LAMA2; (-) strand; PAM type: YTN; PAM sequence: TTG
tcattgagtgacacatgact

SEQ ID NO: 287645 - DNA, 20 bp, Artificial Sequence
  Description of Artificial Sequence: Synthetic oligonucleotide
  Target: LAMA2; (-) strand; PAM type: YTN; PAM sequence: CTT
gtcattgagtgacacatgac

SEQ ID NO: 287646 - DNA, 20 bp, Artificial Sequence
  Description of Artificial Sequence: Synthetic oligonucleotide
  Target: LAMA2; (-) strand; PAM type: YTN; PAM sequence: TTC
ttgtcattgagtgacacatg

SEQ ID NO: 287647 - DNA, 20 bp, Artificial Sequence
  Description of Artificial Sequence: Synthetic oligonucleotide
  Target: LAMA2; (-) strand; PAM type: YTN; PAM sequence: CTC
agaatgtattcttgtcattg

SEQ ID NO: 287648 - DNA, 20 bp, Artificial Sequence
  Description of Artificial Sequence: Synthetic oligonucleotide
  Target: LAMA2; (-) strand; PAM type: YTN; PAM sequence: TTC
tcagaatgtattcttgtcat

SEQ ID NO: 287649 - DNA, 20 bp, Artificial Sequence
  Description of Artificial Sequence: Synthetic oligonucleotide
  Target: LAMA2; (-) strand; PAM type: YTN; PAM sequence: TTT
ctcagaatgtattcttgtca

SEQ ID NO: 287650 - DNA, 20 bp, Artificial Sequence
  Description of Artificial Sequence: Synthetic oligonucleotide
  Target: LAMA2; (-) strand; PAM type: YTN; PAM sequence: CTT
tctcagaatgtattcttgtc

SEQ ID NO: 287651 - DNA, 20 bp, Artificial Sequence
  Description of Artificial Sequence: Synthetic oligonucleotide
  Target: LAMA2; (-) strand; PAM type: YTN; PAM sequence: TTC
caactttctcagaatgtatt

SEQ ID NO: 287652 - DNA, 20 bp, Artificial Sequence
  Description of Artificial Sequence: Synthetic oligonucleotide
  Target: LAMA2; (-) strand; PAM type: YTN; PAM sequence: CTA
attccaactttctcagaatg

SEQ ID NO: 287653 - DNA, 20 bp, Artificial Sequence
  Description of Artificial Sequence: Synthetic oligonucleotide
  Target: LAMA2; (-) strand; PAM type: YTN; PAM sequence: TTG
cctaattccaactttctcag

SEQ ID NO: 287654 - DNA, 20 bp, Artificial Sequence
  Description of Artificial Sequence: Synthetic oligonucleotide
  Target: LAMA2; (-) strand; PAM type: YTN; PAM sequence: TTG
aggaaattgcctaattccaa

SEQ ID NO: 287655 - DNA, 20 bp, Artificial Sequence
  Description of Artificial Sequence: Synthetic oligonucleotide
  Target: LAMA2; (-) strand; PAM type: YTN; PAM sequence: TTG
cacattgaggaaattgccta

SEQ ID NO: 287656 - DNA, 20 bp, Artificial Sequence
  Description of Artificial Sequence: Synthetic oligonucleotide
  Target: LAMA2; (-) strand; PAM type: YTN; PAM sequence: TTT
gcacattgaggaaattgcct

SEQ ID NO: 287657 - DNA, 20 bp, Artificial Sequence
  Description of Artificial Sequence: Synthetic oligonucleotide
  Target: LAMA2; (-) strand; PAM type: YTN; PAM sequence: TTA
tgatgtttgcacattgagga

SEQ ID NO: 287658 - DNA, 20 bp, Artificial Sequence
  Description of Artificial Sequence: Synthetic oligonucleotide
  Target: LAMA2; (-) strand; PAM type: YTN; PAM sequence: TTT
atgatgtttgcacattgagg

SEQ ID NO: 287659 - DNA, 20 bp, Artificial Sequence
  Description of Artificial Sequence: Synthetic oligonucleotide
  Target: LAMA2; (-) strand; PAM type: YTN; PAM sequence: CTT
tatgatgtttgcacattgag

SEQ ID NO: 287660 - DNA, 20 bp, Artificial Sequence
  Description of Artificial Sequence: Synthetic oligonucleotide
  Target: LAMA2; (-) strand; PAM type: YTN; PAM sequence: CTG
tacactttatgatgtttgca

SEQ ID NO: 287661 - DNA, 20 bp, Artificial Sequence
  Description of Artificial Sequence: Synthetic oligonucleotide
  Target: LAMA2; (-) strand; PAM type: YTN; PAM sequence: TTG
tgcaagtactgtacacttta

SEQ ID NO: 287662 - DNA, 20 bp, Artificial Sequence
  Description of Artificial Sequence: Synthetic oligonucleotide
  Target: LAMA2; (-) strand; PAM type: YTN; PAM sequence: TTT
gtgcaagtactgtacacttt

SEQ ID NO: 287663 - DNA, 20 bp, Artificial Sequence
  Description of Artificial Sequence: Synthetic oligonucleotide
  Target: LAMA2; (-) strand; PAM type: YTN; PAM sequence: CTA
gatttgtgcaagtactgtac

SEQ ID NO: 287664 - DNA, 20 bp, Artificial Sequence
  Description of Artificial Sequence: Synthetic oligonucleotide
  Target: LAMA2; (-) strand; PAM type: YTN; PAM sequence: CTG
taccatctagatttgtgcaa

SEQ ID NO: 287665 - DNA, 20 bp, Artificial Sequence
  Description of Artificial Sequence: Synthetic oligonucleotide
  Target: LAMA2; (-) strand; PAM type: YTN; PAM sequence: CTA
ggtgtgtagtaggctgtacc

SEQ ID NO: 287666 - DNA, 20 bp, Artificial Sequence
  Description of Artificial Sequence: Synthetic oligonucleotide
  Target: LAMA2; (-) strand; PAM type: YTN; PAM sequence: CTA
taccataaagcctaggtgtg

SEQ ID NO: 287667 - DNA, 20 bp, Artificial Sequence
  Description of Artificial Sequence: Synthetic oligonucleotide
  Target: LAMA2; (-) strand; PAM type: YTN; PAM sequence: TTG
gagcagtaggctataccata

SEQ ID NO: 287668 - DNA, 20 bp, Artificial Sequence
  Description of Artificial Sequence: Synthetic oligonucleotide
  Target: LAMA2; (-) strand; PAM type: YTN; PAM sequence: CTT
ggagcagtaggctataccat

SEQ ID NO: 287669 - DNA, 20 bp, Artificial Sequence
  Description of Artificial Sequence: Synthetic oligonucleotide
  Target: LAMA2; (-) strand; PAM type: YTN; PAM sequence: CTA
gccttggagcagtaggctat

SEQ ID NO: 287670 - DNA, 20 bp, Artificial Sequence
  Description of Artificial Sequence: Synthetic oligonucleotide
  Target: LAMA2; (-) strand; PAM type: YTN; PAM sequence: CTC
tagccttggagcagtaggct

SEQ ID NO: 287671 - DNA, 20 bp, Artificial Sequence
  Description of Artificial Sequence: Synthetic oligonucleotide
  Target: LAMA2; (-) strand; PAM type: YTN; PAM sequence: CTG
tacaggctctagccttggag

SEQ ID NO: 287672 - DNA, 20 bp, Artificial Sequence
  Description of Artificial Sequence: Synthetic oligonucleotide
  Target: LAMA2; (-) strand; PAM type: YTN; PAM sequence: TTC
agtggaggaacatgctgtac

SEQ ID NO: 287673 - DNA, 20 bp, Artificial Sequence
  Description of Artificial Sequence: Synthetic oligonucleotide
  Target: LAMA2; (-) strand; PAM type: YTN; PAM sequence: CTA
cagcattcagtggaggaaca

SEQ ID NO: 287674 - DNA, 20 bp, Artificial Sequence
  Description of Artificial Sequence: Synthetic oligonucleotide
  Target: LAMA2; (-) strand; PAM type: YTN; PAM sequence: CTG
cctacagcattcagtggagg

SEQ ID NO: 287675 - DNA, 20 bp, Artificial Sequence
  Description of Artificial Sequence: Synthetic oligonucleotide
  Target: LAMA2; (-) strand; PAM type: YTN; PAM sequence: TTA
caactgcctacagcattcag

SEQ ID NO: 287676 - DNA, 20 bp, Artificial Sequence
  Description of Artificial Sequence: Synthetic oligonucleotide
  Target: LAMA2; (-) strand; PAM type: YTN; PAM sequence: TTG
agttacaactgcctacagca

SEQ ID NO: 287677 - DNA, 20 bp, Artificial Sequence
  Description of Artificial Sequence: Synthetic oligonucleotide
  Target: LAMA2; (-) strand; PAM type: YTN; PAM sequence: TTA
ccattgagttacaactgcct

SEQ ID NO: 287678 - DNA, 20 bp, Artificial Sequence
  Description of Artificial Sequence: Synthetic oligonucleotide
  Target: LAMA2; (-) strand; PAM type: YTN; PAM sequence: CTT
accattgagttacaactgcc

SEQ ID NO: 287679 - DNA, 20 bp, Artificial Sequence
  Description of Artificial Sequence: Synthetic oligonucleotide
  Target: LAMA2; (-) strand; PAM type: YTN; PAM sequence: TTA
ggtacacaaatacttaccat

SEQ ID NO: 287680 - DNA, 20 bp, Artificial Sequence
  Description of Artificial Sequence: Synthetic oligonucleotide
  Target: LAMA2; (-) strand; PAM type: YTN; PAM sequence: TTT
aggtacacaaatacttacca

SEQ ID NO: 287681 - DNA, 20 bp, Artificial Sequence
  Description of Artificial Sequence: Synthetic oligonucleotide
  Target: LAMA2; (-) strand; PAM type: YTN; PAM sequence: TTA
tgtttaggtacacaaatact

SEQ ID NO: 287682 - DNA, 20 bp, Artificial Sequence
  Description of Artificial Sequence: Synthetic oligonucleotide
  Target: LAMA2; (-) strand; PAM type: YTN; PAM sequence: TTT
atgtttaggtacacaaatac

SEQ ID NO: 287683 - DNA, 20 bp, Artificial Sequence
  Description of Artificial Sequence: Synthetic oligonucleotide
  Target: LAMA2; (-) strand; PAM type: YTN; PAM sequence: TTG
tttatgtttaggtacacaaa

SEQ ID NO: 287684 - DNA, 20 bp, Artificial Sequence
  Description of Artificial Sequence: Synthetic oligonucleotide
  Target: LAMA2; (-) strand; PAM type: YTN; PAM sequence: CTT
gtttatgtttaggtacacaa

SEQ ID NO: 287685 - DNA, 20 bp, Artificial Sequence
  Description of Artificial Sequence: Synthetic oligonucleotide
  Target: LAMA2; (-) strand; PAM type: YTN; PAM sequence: CTG
taccttgtttatgtttaggt

SEQ ID NO: 287686 - DNA, 20 bp, Artificial Sequence
  Description of Artificial Sequence: Synthetic oligonucleotide
  Target: LAMA2; (-) strand; PAM type: YTN; PAM sequence: TTA
ctgtaccttgtttatgttta

SEQ ID NO: 287687 - DNA, 20 bp, Artificial Sequence
  Description of Artificial Sequence: Synthetic oligonucleotide
  Target: LAMA2; (-) strand; PAM type: YTN; PAM sequence: TTT
actgtaccttgtttatgttt

SEQ ID NO: 287688 - DNA, 20 bp, Artificial Sequence
  Description of Artificial Sequence: Synthetic oligonucleotide
  Target: LAMA2; (-) strand; PAM type: YTN; PAM sequence: TTT
tactgtaccttgtttatgtt

SEQ ID NO: 287689 - DNA, 20 bp, Artificial Sequence
  Description of Artificial Sequence: Synthetic oligonucleotide
  Target: LAMA2; (-) strand; PAM type: YTN; PAM sequence: TTT
ttactgtaccttgtttatgt

SEQ ID NO: 287690 - DNA, 20 bp, Artificial Sequence
  Description of Artificial Sequence: Synthetic oligonucleotide
  Target: LAMA2; (-) strand; PAM type: YTN; PAM sequence: CTG
tatttttactgtaccttgtt

SEQ ID NO: 287691 - DNA, 20 bp, Artificial Sequence
  Description of Artificial Sequence: Synthetic oligonucleotide
  Target: LAMA2; (-) strand; PAM type: YTN; PAM sequence: TTA
taatactgtatttttactgt

SEQ ID NO: 287692 - DNA, 20 bp, Artificial Sequence
  Description of Artificial Sequence: Synthetic oligonucleotide
  Target: LAMA2; (-) strand; PAM type: YTN; PAM sequence: TTC
cataaaattataatactgta

SEQ ID NO: 287693 - DNA, 20 bp, Artificial Sequence
  Description of Artificial Sequence: Synthetic oligonucleotide
  Target: LAMA2; (-) strand; PAM type: YTN; PAM sequence: CTT
ccataaaattataatactgt

SEQ ID NO: 287694 - DNA, 20 bp, Artificial Sequence
  Description of Artificial Sequence: Synthetic oligonucleotide
  Target: LAMA2; (-) strand; PAM type: YTN; PAM sequence: TTG
gtaaatgacagatcacatat

SEQ ID NO: 287695 - DNA, 20 bp, Artificial Sequence
  Description of Artificial Sequence: Synthetic oligonucleotide
  Target: LAMA2; (-) strand; PAM type: YTN; PAM sequence: TTT
ggtaaatgacagatcacata

SEQ ID NO: 287696 - DNA, 20 bp, Artificial Sequence
  Description of Artificial Sequence: Synthetic oligonucleotide
  Target: LAMA2; (-) strand; PAM type: YTN; PAM sequence: TTT
tggtaaatgacagatcacat

SEQ ID NO: 287697 - DNA, 20 bp, Artificial Sequence
  Description of Artificial Sequence: Synthetic oligonucleotide
  Target: LAMA2; (-) strand; PAM type: YTN; PAM sequence: TTA
caaatgttttggtaaatgac

SEQ ID NO: 287698 - DNA, 20 bp, Artificial Sequence
  Description of Artificial Sequence: Synthetic oligonucleotide
  Target: LAMA2; (-) strand; PAM type: YTN; PAM sequence: TTG
acacattacaaatgttttgg

SEQ ID NO: 287699 - DNA, 20 bp, Artificial Sequence
  Description of Artificial Sequence: Synthetic oligonucleotide
  Target: LAMA2; (-) strand; PAM type: YTN; PAM sequence: TTG
gcattgacacattacaaatg

SEQ ID NO: 287700 - DNA, 20 bp, Artificial Sequence
  Description of Artificial Sequence: Synthetic oligonucleotide
  Target: LAMA2; (-) strand; PAM type: YTN; PAM sequence: TTT
ggcattgacacattacaaat

SEQ ID NO: 287701 - DNA, 20 bp, Artificial Sequence
  Description of Artificial Sequence: Synthetic oligonucleotide
  Target: LAMA2; (-) strand; PAM type: YTN; PAM sequence: TTT
tggcattgacacattacaaa

SEQ ID NO: 287702 - DNA, 20 bp, Artificial Sequence
  Description of Artificial Sequence: Synthetic oligonucleotide
  Target: LAMA2; (-) strand; PAM type: YTN; PAM sequence: CTG
ttttggcattgacacattac

SEQ ID NO: 287703 - DNA, 20 bp, Artificial Sequence
  Description of Artificial Sequence: Synthetic oligonucleotide
  Target: LAMA2; (-) strand; PAM type: YTN; PAM sequence: TTG
aaacaactgttttggcattg

SEQ ID NO: 287704 - DNA, 20 bp, Artificial Sequence
  Description of Artificial Sequence: Synthetic oligonucleotide
  Target: LAMA2; (-) strand; PAM type: YTN; PAM sequence: TTG
taaattgaaacaactgtttt

SEQ ID NO: 287705 - DNA, 20 bp, Artificial Sequence
  Description of Artificial Sequence: Synthetic oligonucleotide
  Target: LAMA2; (-) strand; PAM type: YTN; PAM sequence: TTG
ttgtaaattgaaacaactgt

SEQ ID NO: 287706 - DNA, 20 bp, Artificial Sequence
  Description of Artificial Sequence: Synthetic oligonucleotide
  Target: LAMA2; (-) strand; PAM type: YTN; PAM sequence: TTT
gttgtaaattgaaacaactg

SEQ ID NO: 287707 - DNA, 20 bp, Artificial Sequence
  Description of Artificial Sequence: Synthetic oligonucleotide
  Target: LAMA2; (-) strand; PAM type: YTN; PAM sequence: CTA
gagaagtttgttgtaaattg

SEQ ID NO: 287708 - DNA, 20 bp, Artificial Sequence
  Description of Artificial Sequence: Synthetic oligonucleotide
  Target: LAMA2; (-) strand; PAM type: YTN; PAM sequence: CTC
ctagagaagtttgttgtaaa

SEQ ID NO: 287709 - DNA, 20 bp, Artificial Sequence
  Description of Artificial Sequence: Synthetic oligonucleotide
  Target: LAMA2; (-) strand; PAM type: YTN; PAM sequence: CTG
gtccctcctagagaagtttg

SEQ ID NO: 287710 - DNA, 20 bp, Artificial Sequence
  Description of Artificial Sequence: Synthetic oligonucleotide
  Target: LAMA2; (-) strand; PAM type: YTN; PAM sequence: TTG
atacacaatcatgaagaaag

SEQ ID NO: 287711 - DNA, 20 bp, Artificial Sequence
  Description of Artificial Sequence: Synthetic oligonucleotide
  Target: LAMA2; (-) strand; PAM type: YTN; PAM sequence: CTT
gatacacaatcatgaagaaa

SEQ ID NO: 287712 - DNA, 20 bp, Artificial Sequence
  Description of Artificial Sequence: Synthetic oligonucleotide
  Target: LAMA2; (-) strand; PAM type: YTN; PAM sequence: TTA
ggcttgatacacaatcatga

SEQ ID NO: 287713 - DNA, 20 bp, Artificial Sequence
  Description of Artificial Sequence: Synthetic oligonucleotide
  Target: LAMA2; (-) strand; PAM type: YTN; PAM sequence: CTT
aggcttgatacacaatcatg

SEQ ID NO: 287714 - DNA, 20 bp, Artificial Sequence
  Description of Artificial Sequence: Synthetic oligonucleotide
  Target: LAMA2; (-) strand; PAM type: YTN; PAM sequence: TTC
acaggaaaagtcttaggctt

SEQ ID NO: 287715 - DNA, 20 bp, Artificial Sequence
  Description of Artificial Sequence: Synthetic oligonucleotide
  Target: LAMA2; (-) strand; PAM type: YTN; PAM sequence: TTT
cacaggaaaagtcttaggct

SEQ ID NO: 287716 - DNA, 20 bp, Artificial Sequence
  Description of Artificial Sequence: Synthetic oligonucleotide
  Target: LAMA2; (-) strand; PAM type: YTN; PAM sequence: TTT
tcacaggaaaagtcttaggc

SEQ ID NO: 287717 - DNA, 20 bp, Artificial Sequence
  Description of Artificial Sequence: Synthetic oligonucleotide
  Target: LAMA2; (-) strand; PAM type: YTN; PAM sequence: CTG
gtgtcattttcacaggaaaa

SEQ ID NO: 287718 - DNA, 20 bp, Artificial Sequence
  Description of Artificial Sequence: Synthetic oligonucleotide
  Target: LAMA2; (-) strand; PAM type: YTN; PAM sequence: TTC
aatcctggtgtcattttcac

SEQ ID NO: 287719 - DNA, 20 bp, Artificial Sequence
  Description of Artificial Sequence: Synthetic oligonucleotide
  Target: LAMA2; (-) strand; PAM type: YTN; PAM sequence: CTG
atcaaattcaatcctggtgt

SEQ ID NO: 287720 - DNA, 20 bp, Artificial Sequence
  Description of Artificial Sequence: Synthetic oligonucleotide
  Target: LAMA2; (-) strand; PAM type: YTN; PAM sequence: CTG
gagtcaaatagagaatcgac

SEQ ID NO: 287721 - DNA, 20 bp, Artificial Sequence
  Description of Artificial Sequence: Synthetic oligonucleotide
  Target: LAMA2; (-) strand; PAM type: YTN; PAM sequence: TTG
tatacacagcacagggcctg

SEQ ID NO: 287722 - DNA, 20 bp, Artificial Sequence
  Description of Artificial Sequence: Synthetic oligonucleotide
  Target: LAMA2; (-) strand; PAM type: YTN; PAM sequence: CTT
gtatacacagcacagggcct

SEQ ID NO: 287723 - DNA, 20 bp, Artificial Sequence
  Description of Artificial Sequence: Synthetic oligonucleotide
  Target: LAMA2; (-) strand; PAM type: YTN; PAM sequence: TTG
cttgtatacacagcacaggg

SEQ ID NO: 287724 - DNA, 20 bp, Artificial Sequence
  Description of Artificial Sequence: Synthetic oligonucleotide
  Target: LAMA2; (-) strand; PAM type: YTN; PAM sequence: TTT
gcttgtatacacagcacagg

SEQ ID NO: 287725 - DNA, 20 bp, Artificial Sequence
  Description of Artificial Sequence: Synthetic oligonucleotide
  Target: LAMA2; (-) strand; PAM type: YTN; PAM sequence: TTG
gtgtcgtttgcttgtataca

SEQ ID NO: 287726 - DNA, 20 bp, Artificial Sequence
  Description of Artificial Sequence: Synthetic oligonucleotide
  Target: LAMA2; (-) strand; PAM type: YTN; PAM sequence: TTG
taggaaatgagaccacattg

SEQ ID NO: 287727 - DNA, 20 bp, Artificial Sequence
  Description of Artificial Sequence: Synthetic oligonucleotide
  Target: LAMA2; (-) strand; PAM type: YTN; PAM sequence: TTT
gtaggaaatgagaccacatt

SEQ ID NO: 287728 - DNA, 20 bp, Artificial Sequence
  Description of Artificial Sequence: Synthetic oligonucleotide
  Target: LAMA2; (-) strand; PAM type: YTN; PAM sequence: CTT
tgtaggaaatgagaccacat

SEQ ID NO: 287729 - DNA, 20 bp, Artificial Sequence
  Description of Artificial Sequence: Synthetic oligonucleotide
  Target: LAMA2; (-) strand; PAM type: YTN; PAM sequence: TTC
aagggaataaagaaaaagta

SEQ ID NO: 287730 - DNA, 20 bp, Artificial Sequence
  Description of Artificial Sequence: Synthetic oligonucleotide
  Target: LAMA2; (-) strand; PAM type: YTN; PAM sequence: TTC
gagttcaagggaataaagaa

SEQ ID NO: 287731 - DNA, 20 bp, Artificial Sequence
  Description of Artificial Sequence: Synthetic oligonucleotide
  Target: LAMA2; (-) strand; PAM type: YTN; PAM sequence: TTT
cgagttcaagggaataaaga

SEQ ID NO: 287732 - DNA, 20 bp, Artificial Sequence
  Description of Artificial Sequence: Synthetic oligonucleotide
  Target: LAMA2; (-) strand; PAM type: YTN; PAM sequence: TTC
acagccaagaagatttcgag

SEQ ID NO: 287733 - DNA, 20 bp, Artificial Sequence
  Description of Artificial Sequence: Synthetic oligonucleotide
  Target: LAMA2; (-) strand; PAM type: YTN; PAM sequence: CTG
ttcacagccaagaagatttc

SEQ ID NO: 287734 - DNA, 20 bp, Artificial Sequence
  Description of Artificial Sequence: Synthetic oligonucleotide
  Target: LAMA2; (-) strand; PAM type: YTN; PAM sequence: TTC
tgttcacagccaagaagatt

SEQ ID NO: 287735 - DNA, 20 bp, Artificial Sequence
  Description of Artificial Sequence: Synthetic oligonucleotide
  Target: LAMA2; (-) strand; PAM type: YTN; PAM sequence: TTT
ctgttcacagccaagaagat

SEQ ID NO: 287736 - DNA, 20 bp, Artificial Sequence
  Description of Artificial Sequence: Synthetic oligonucleotide
  Target: LAMA2; (-) strand; PAM type: YTN; PAM sequence: TTA
aatttctgttcacagccaag

SEQ ID NO: 287737 - DNA, 20 bp, Artificial Sequence
  Description of Artificial Sequence: Synthetic oligonucleotide
  Target: LAMA2; (-) strand; PAM type: YTN; PAM sequence: TTT
aaatttctgttcacagccaa

SEQ ID NO: 287738 - DNA, 20 bp, Artificial Sequence
  Description of Artificial Sequence: Synthetic oligonucleotide
  Target: LAMA2; (-) strand; PAM type: YTN; PAM sequence: TTT
taaatttctgttcacagcca

SEQ ID NO: 287739 - DNA, 20 bp, Artificial Sequence
  Description of Artificial Sequence: Synthetic oligonucleotide
  Target: LAMA2; (-) strand; PAM type: YTN; PAM sequence: TTT
ttaaatttctgttcacagcc

SEQ ID NO: 287740 - DNA, 20 bp, Artificial Sequence
  Description of Artificial Sequence: Synthetic oligonucleotide
  Target: LAMA2; (-) strand; PAM type: YTN; PAM sequence: CTG
taaatttttaaatttctgtt

SEQ ID NO: 287741 - DNA, 20 bp, Artificial Sequence
  Description of Artificial Sequence: Synthetic oligonucleotide
  Target: LAMA2; (-) strand; PAM type: YTN; PAM sequence: CTG
ctgtaaatttttaaatttct

SEQ ID NO: 287742 - DNA, 20 bp, Artificial Sequence
  Description of Artificial Sequence: Synthetic oligonucleotide
  Target: LAMA2; (-) strand; PAM type: YTN; PAM sequence: CTA
tggtagtgctgctgtaaatt

SEQ ID NO: 287743 - DNA, 20 bp, Artificial Sequence
  Description of Artificial Sequence: Synthetic oligonucleotide
  Target: LAMA2; (-) strand; PAM type: YTN; PAM sequence: CTC
tatggtagtgctgctgtaaa

SEQ ID NO: 287744 - DNA, 20 bp, Artificial Sequence
  Description of Artificial Sequence: Synthetic oligonucleotide
  Target: LAMA2; (-) strand; PAM type: YTN; PAM sequence: TTG
tataaatcactctatggtag

SEQ ID NO: 287745 - DNA, 20 bp, Artificial Sequence
  Description of Artificial Sequence: Synthetic oligonucleotide
  Target: LAMA2; (-) strand; PAM type: YTN; PAM sequence: CTT
gtataaatcactctatggta

SEQ ID NO: 287746 - DNA, 20 bp, Artificial Sequence
  Description of Artificial Sequence: Synthetic oligonucleotide
  Target: LAMA2; (-) strand; PAM type: YTN; PAM sequence: TTA
aaagcacttgtataaatcac

SEQ ID NO: 287747 - DNA, 20 bp, Artificial Sequence
  Description of Artificial Sequence: Synthetic oligonucleotide
  Target: LAMA2; (-) strand; PAM type: YTN; PAM sequence: TTT
aaaagcacttgtataaatca

SEQ ID NO: 287748 - DNA, 20 bp, Artificial Sequence
  Description of Artificial Sequence: Synthetic oligonucleotide
  Target: LAMA2; (-) strand; PAM type: YTN; PAM sequence: TTT
taaaagcacttgtataaatc

SEQ ID NO: 287749 - DNA, 20 bp, Artificial Sequence
  Description of Artificial Sequence: Synthetic oligonucleotide
  Target: LAMA2; (-) strand; PAM type: YTN; PAM sequence: TTT
ttaaaagcacttgtataaat

SEQ ID NO: 287750 - DNA, 20 bp, Artificial Sequence
  Description of Artificial Sequence: Synthetic oligonucleotide
  Target: LAMA2; (-) strand; PAM type: YTN; PAM sequence: TTT
tttaaaagcacttgtataaa

SEQ ID NO: 287751 - DNA, 20 bp, Artificial Sequence
  Description of Artificial Sequence: Synthetic oligonucleotide
  Target: LAMA2; (-) strand; PAM type: YTN; PAM sequence: CTG
atgacatagaagagattttt

SEQ ID NO: 287752 - DNA, 20 bp, Artificial Sequence
  Description of Artificial Sequence: Synthetic oligonucleotide
  Target: LAMA2; (-) strand; PAM type: YTN; PAM sequence: CTG
agatcagaagaaaggggaca

SEQ ID NO: 287753 - DNA, 20 bp, Artificial Sequence
  Description of Artificial Sequence: Synthetic oligonucleotide
  Target: LAMA2; (-) strand; PAM type: YTN; PAM sequence: TTC
ccctgagatcagaagaaagg

SEQ ID NO: 287754 - DNA, 20 bp, Artificial Sequence
  Description of Artificial Sequence: Synthetic oligonucleotide
  Target: LAMA2; (-) strand; PAM type: YTN; PAM sequence: TTT
cccctgagatcagaagaaag

SEQ ID NO: 287755 - DNA, 20 bp, Artificial Sequence
  Description of Artificial Sequence: Synthetic oligonucleotide
  Target: LAMA2; (-) strand; PAM type: YTN; PAM sequence: TTT
tcccctgagatcagaagaaa

SEQ ID NO: 287756 - DNA, 20 bp, Artificial Sequence
  Description of Artificial Sequence: Synthetic oligonucleotide
  Target: LAMA2; (-) strand; PAM type: YTN; PAM sequence: TTT
ttcccctgagatcagaagaa

SEQ ID NO: 287757 - DNA, 20 bp, Artificial Sequence
  Description of Artificial Sequence: Synthetic oligonucleotide
  Target: LAMA2; (-) strand; PAM type: YTN; PAM sequence: CTT
tttcccctgagatcagaaga

SEQ ID NO: 287758 - DNA, 20 bp, Artificial Sequence
  Description of Artificial Sequence: Synthetic oligonucleotide
  Target: LAMA2; (-) strand; PAM type: YTN; PAM sequence: TTG
ggccatgcatacacaaagct

SEQ ID NO: 287759 - DNA, 20 bp, Artificial Sequence
  Description of Artificial Sequence: Synthetic oligonucleotide
  Target: LAMA2; (-) strand; PAM type: YTN; PAM sequence: TTT
gggccatgcatacacaaagc

SEQ ID NO: 287760 - DNA, 20 bp, Artificial Sequence
  Description of Artificial Sequence: Synthetic oligonucleotide
  Target: LAMA2; (-) strand; PAM type: YTN; PAM sequence: TTG
ggcaaatttgggccatgcat

SEQ ID NO: 287761 - DNA, 20 bp, Artificial Sequence
  Description of Artificial Sequence: Synthetic oligonucleotide
  Target: LAMA2; (-) strand; PAM type: YTN; PAM sequence: TTT
gggcaaatttgggccatgca

SEQ ID NO: 287762 - DNA, 20 bp, Artificial Sequence
  Description of Artificial Sequence: Synthetic oligonucleotide
  Target: LAMA2; (-) strand; PAM type: YTN; PAM sequence: CTT
tgggcaaatttgggccatgc

SEQ ID NO: 287763 - DNA, 20 bp, Artificial Sequence
  Description of Artificial Sequence: Synthetic oligonucleotide
  Target: LAMA2; (-) strand; PAM type: YTN; PAM sequence: TTC
tttgggcaaatttgggccat

SEQ ID NO: 287764 - DNA, 20 bp, Artificial Sequence
  Description of Artificial Sequence: Synthetic oligonucleotide
  Target: LAMA2; (-) strand; PAM type: YTN; PAM sequence: TTT
ctttgggcaaatttgggcca

SEQ ID NO: 287765 - DNA, 20 bp, Artificial Sequence
  Description of Artificial Sequence: Synthetic oligonucleotide
  Target: LAMA2; (-) strand; PAM type: YTN; PAM sequence: TTT
tctttgggcaaatttgggcc

SEQ ID NO: 287766 - DNA, 20 bp, Artificial Sequence
  Description of Artificial Sequence: Synthetic oligonucleotide
  Target: LAMA2; (-) strand; PAM type: YTN; PAM sequence: CTA
cataattttctttgggcaaa

SEQ ID NO: 287767 - DNA, 20 bp, Artificial Sequence
  Description of Artificial Sequence: Synthetic oligonucleotide
  Target: LAMA2; (-) strand; PAM type: YTN; PAM sequence: CTC
ctacataattttctttgggc

SEQ ID NO: 287768 - DNA, 20 bp, Artificial Sequence
  Description of Artificial Sequence: Synthetic oligonucleotide
  Target: LAMA2; (-) strand; PAM type: YTN; PAM sequence: CTA
gtgctcctacataattttct

SEQ ID NO: 287769 - DNA, 20 bp, Artificial Sequence
  Description of Artificial Sequence: Synthetic oligonucleotide
  Target: LAMA2; (-) strand; PAM type: YTN; PAM sequence: TTC
aataaatgctagtgctccta

SEQ ID NO: 287770 - DNA, 20 bp, Artificial Sequence
  Description of Artificial Sequence: Synthetic oligonucleotide
  Target: LAMA2; (-) strand; PAM type: YTN; PAM sequence: CTG
atatacagaaggtgttcaat

SEQ ID NO: 287771 - DNA, 20 bp, Artificial Sequence
  Description of Artificial Sequence: Synthetic oligonucleotide
  Target: LAMA2; (-) strand; PAM type: YTN; PAM sequence: CTC
agtgcctgatatacagaagg

SEQ ID NO: 287772 - DNA, 20 bp, Artificial Sequence
  Description of Artificial Sequence: Synthetic oligonucleotide
  Target: LAMA2; (-) strand; PAM type: YTN; PAM sequence: TTA
tgacaccaatctcagtgcct

SEQ ID NO: 287773 - DNA, 20 bp, Artificial Sequence
  Description of Artificial Sequence: Synthetic oligonucleotide
  Target: LAMA2; (-) strand; PAM type: YTN; PAM sequence: TTT
atgacaccaatctcagtgcc

SEQ ID NO: 287774 - DNA, 20 bp, Artificial Sequence
  Description of Artificial Sequence: Synthetic oligonucleotide
  Target: LAMA2; (-) strand; PAM type: YTN; PAM sequence: TTA
tttatgacaccaatctcagt

SEQ ID NO: 287775 - DNA, 20 bp, Artificial Sequence
  Description of Artificial Sequence: Synthetic oligonucleotide
  Target: LAMA2; (-) strand; PAM type: YTN; PAM sequence: TTT
atttatgacaccaatctcag

SEQ ID NO: 287776 - DNA, 20 bp, Artificial Sequence
  Description of Artificial Sequence: Synthetic oligonucleotide
  Target: LAMA2; (-) strand; PAM type: YTN; PAM sequence: TTA
gataatttatttatgacacc

SEQ ID NO: 287777 - DNA, 20 bp, Artificial Sequence
  Description of Artificial Sequence: Synthetic oligonucleotide
  Target: LAMA2; (-) strand; PAM type: YTN; PAM sequence: TTG
tgagaataaagttagataat

SEQ ID NO: 287778 - DNA, 20 bp, Artificial Sequence
  Description of Artificial Sequence: Synthetic oligonucleotide
  Target: LAMA2; (-) strand; PAM type: YTN; PAM sequence: TTT
gtgagaataaagttagataa

SEQ ID NO: 287779 - DNA, 20 bp, Artificial Sequence
  Description of Artificial Sequence: Synthetic oligonucleotide
  Target: LAMA2; (-) strand; PAM type: YTN; PAM sequence: TTT
tgtgagaataaagttagata

SEQ ID NO: 287780 - DNA, 20 bp, Artificial Sequence
  Description of Artificial Sequence: Synthetic oligonucleotide
  Target: LAMA2; (-) strand; PAM type: YTN; PAM sequence: TTT
ttgtgagaataaagttagat

SEQ ID NO: 287781 - DNA, 20 bp, Artificial Sequence
  Description of Artificial Sequence: Synthetic oligonucleotide
  Target: LAMA2; (-) strand; PAM type: YTN; PAM sequence: CTG
taatgtggaatttttgtgag

SEQ ID NO: 287782 - DNA, 20 bp, Artificial Sequence
  Description of Artificial Sequence: Synthetic oligonucleotide
  Target: LAMA2; (-) strand; PAM type: YTN; PAM sequence: TTG
tctgtaatgtggaatttttg

SEQ ID NO: 287783 - DNA, 20 bp, Artificial Sequence
  Description of Artificial Sequence: Synthetic oligonucleotide
  Target: LAMA2; (-) strand; PAM type: YTN; PAM sequence: TTT
gtctgtaatgtggaattttt

SEQ ID NO: 287784 - DNA, 20 bp, Artificial Sequence
  Description of Artificial Sequence: Synthetic oligonucleotide
  Target: LAMA2; (-) strand; PAM type: YTN; PAM sequence: TTT
tgtctgtaatgtggaatttt

SEQ ID NO: 287785 - DNA, 20 bp, Artificial Sequence
  Description of Artificial Sequence: Synthetic oligonucleotide
  Target: LAMA2; (-) strand; PAM type: YTN; PAM sequence: CTT
ttgtctgtaatgtggaattt

SEQ ID NO: 287786 - DNA, 20 bp, Artificial Sequence
  Description of Artificial Sequence: Synthetic oligonucleotide
  Target: LAMA2; (-) strand; PAM type: YTN; PAM sequence: TTC
ttttgtctgtaatgtggaat

SEQ ID NO: 287787 - DNA, 20 bp, Artificial Sequence
  Description of Artificial Sequence: Synthetic oligonucleotide
  Target: LAMA2; (-) strand; PAM type: YTN; PAM sequence: CTA
ttcttttgtctgtaatgtgg

SEQ ID NO: 287788 - DNA, 20 bp, Artificial Sequence
  Description of Artificial Sequence: Synthetic oligonucleotide
  Target: LAMA2; (-) strand; PAM type: YTN; PAM sequence: TTC
tattcttttgtctgtaatgt

SEQ ID NO: 287789 - DNA, 20 bp, Artificial Sequence
  Description of Artificial Sequence: Synthetic oligonucleotide
  Target: LAMA2; (-) strand; PAM type: YTN; PAM sequence: CTC
cacaattctattcttttgtc

SEQ ID NO: 287790 - DNA, 20 bp, Artificial Sequence
  Description of Artificial Sequence: Synthetic oligonucleotide
  Target: LAMA2; (-) strand; PAM type: YTN; PAM sequence: TTC
tccacaattctattcttttg

SEQ ID NO: 287791 - DNA, 20 bp, Artificial Sequence
  Description of Artificial Sequence: Synthetic oligonucleotide
  Target: LAMA2; (-) strand; PAM type: YTN; PAM sequence: CTT
ctccacaattctattctttt

SEQ ID NO: 287792 - DNA, 20 bp, Artificial Sequence
  Description of Artificial Sequence: Synthetic oligonucleotide
  Target: LAMA2; (-) strand; PAM type: YTN; PAM sequence: CTG
accttctccacaattctatt

SEQ ID NO: 287793 - DNA, 20 bp, Artificial Sequence
  Description of Artificial Sequence: Synthetic oligonucleotide
  Target: LAMA2; (-) strand; PAM type: YTN; PAM sequence: CTG
ctgaccttctccacaattct

SEQ ID NO: 287794 - DNA, 20 bp, Artificial Sequence
  Description of Artificial Sequence: Synthetic oligonucleotide
  Target: LAMA2; (-) strand; PAM type: YTN; PAM sequence: TTA
ggtgagctgctgaccttctc

SEQ ID NO: 287795 - DNA, 20 bp, Artificial Sequence
  Description of Artificial Sequence: Synthetic oligonucleotide
  Target: LAMA2; (-) strand; PAM type: YTN; PAM sequence: TTT
aggtgagctgctgaccttct

SEQ ID NO: 287796 - DNA, 20 bp, Artificial Sequence
  Description of Artificial Sequence: Synthetic oligonucleotide
  Target: LAMA2; (-) strand; PAM type: YTN; PAM sequence: CTT
taggtgagctgctgaccttc

SEQ ID NO: 287797 - DNA, 20 bp, Artificial Sequence
  Description of Artificial Sequence: Synthetic oligonucleotide
  Target: LAMA2; (-) strand; PAM type: YTN; PAM sequence: CTA
actttaggtgagctgctgac

SEQ ID NO: 287798 - DNA, 20 bp, Artificial Sequence
  Description of Artificial Sequence: Synthetic oligonucleotide
  Target: LAMA2; (-) strand; PAM type: YTN; PAM sequence: TTC
taactttaggtgagctgctg

SEQ ID NO: 287799 - DNA, 20 bp, Artificial Sequence
  Description of Artificial Sequence: Synthetic oligonucleotide
  Target: LAMA2; (-) strand; PAM type: YTN; PAM sequence: CTT
ctaactttaggtgagctgct

SEQ ID NO: 287800 - DNA, 20 bp, Artificial Sequence
  Description of Artificial Sequence: Synthetic oligonucleotide
  Target: LAMA2; (-) strand; PAM type: YTN; PAM sequence: CTA
gcttctaactttaggtgagc

SEQ ID NO: 287801 - DNA, 20 bp, Artificial Sequence
  Description of Artificial Sequence: Synthetic oligonucleotide
  Target: LAMA2; (-) strand; PAM type: YTN; PAM sequence: TTC
ctagcttctaactttaggtg

SEQ ID NO: 287802 - DNA, 20 bp, Artificial Sequence
  Description of Artificial Sequence: Synthetic oligonucleotide
  Target: LAMA2; (-) strand; PAM type: YTN; PAM sequence: CTT
cctagcttctaactttaggt

SEQ ID NO: 287803 - DNA, 20 bp, Artificial Sequence
  Description of Artificial Sequence: Synthetic oligonucleotide
  Target: LAMA2; (-) strand; PAM type: YTN; PAM sequence: TTC
atcatcagtaaataaacact

SEQ ID NO: 287804 - DNA, 20 bp, Artificial Sequence
  Description of Artificial Sequence: Synthetic oligonucleotide
  Target: LAMA2; (-) strand; PAM type: YTN; PAM sequence: TTT
catcatcagtaaataaacac

SEQ ID NO: 287805 - DNA, 20 bp, Artificial Sequence
  Description of Artificial Sequence: Synthetic oligonucleotide
  Target: LAMA2; (-) strand; PAM type: YTN; PAM sequence: TTT
tcatcatcagtaaataaaca

SEQ ID NO: 287806 - DNA, 20 bp, Artificial Sequence
  Description of Artificial Sequence: Synthetic oligonucleotide
  Target: LAMA2; (-) strand; PAM type: YTN; PAM sequence: CTA
taccagttttcatcatcagt

SEQ ID NO: 287807 - DNA, 20 bp, Artificial Sequence
  Description of Artificial Sequence: Synthetic oligonucleotide
  Target: LAMA2; (-) strand; PAM type: YTN; PAM sequence: TTG
ctataccagttttcatcatc

SEQ ID NO: 287808 - DNA, 20 bp, Artificial Sequence
  Description of Artificial Sequence: Synthetic oligonucleotide
  Target: LAMA2; (-) strand; PAM type: YTN; PAM sequence: TTT
gctataccagttttcatcat

SEQ ID NO: 287809 - DNA, 20 bp, Artificial Sequence
  Description of Artificial Sequence: Synthetic oligonucleotide
  Target: LAMA2; (-) strand; PAM type: YTN; PAM sequence: TTT
tgctataccagttttcatca

SEQ ID NO: 287810 - DNA, 20 bp, Artificial Sequence
  Description of Artificial Sequence: Synthetic oligonucleotide
  Target: LAMA2; (-) strand; PAM type: YTN; PAM sequence: TTT
ttgctataccagttttcatc

SEQ ID NO: 287811 - DNA, 20 bp, Artificial Sequence
  Description of Artificial Sequence: Synthetic oligonucleotide
  Target: LAMA2; (-) strand; PAM type: YTN; PAM sequence: CTT
tttgctataccagttttcat

SEQ ID NO: 287812 - DNA, 20 bp, Artificial Sequence
  Description of Artificial Sequence: Synthetic oligonucleotide
  Target: LAMA2; (-) strand; PAM type: YTN; PAM sequence: TTA
ctttttgctataccagtttt

SEQ ID NO: 287813 - DNA, 20 bp, Artificial Sequence
  Description of Artificial Sequence: Synthetic oligonucleotide
  Target: LAMA2; (-) strand; PAM type: YTN; PAM sequence: CTG
attactttttgctataccag

SEQ ID NO: 287814 - DNA, 20 bp, Artificial Sequence
  Description of Artificial Sequence: Synthetic oligonucleotide
  Target: LAMA2; (-) strand; PAM type: YTN; PAM sequence: TTA
atccacgaatgctgattact

SEQ ID NO: 287815 - DNA, 20 bp, Artificial Sequence
  Description of Artificial Sequence: Synthetic oligonucleotide
  Target: LAMA2; (-) strand; PAM type: YTN; PAM sequence: TTT
aatccacgaatgctgattac

SEQ ID NO: 287816 - DNA, 20 bp, Artificial Sequence
  Description of Artificial Sequence: Synthetic oligonucleotide
  Target: LAMA2; (-) strand; PAM type: YTN; PAM sequence: CTA
tttaatccacgaatgctgat

SEQ ID NO: 287817 - DNA, 20 bp, Artificial Sequence
  Description of Artificial Sequence: Synthetic oligonucleotide
  Target: LAMA2; (-) strand; PAM type: YTN; PAM sequence: CTC
aactatttaatccacgaatg

SEQ ID NO: 287818 - DNA, 20 bp, Artificial Sequence
  Description of Artificial Sequence: Synthetic oligonucleotide
  Target: LAMA2; (-) strand; PAM type: YTN; PAM sequence: CTA
caggatgagtcaacaacagg

SEQ ID NO: 287819 - DNA, 20 bp, Artificial Sequence
  Description of Artificial Sequence: Synthetic oligonucleotide
  Target: LAMA2; (-) strand; PAM type: YTN; PAM sequence: CTA
ctacaggatgagtcaacaac

SEQ ID NO: 287820 - DNA, 20 bp, Artificial Sequence
  Description of Artificial Sequence: Synthetic oligonucleotide
  Target: LAMA2; (-) strand; PAM type: YTN; PAM sequence: TTA
gagctactacaggatgagtc

SEQ ID NO: 287821 - DNA, 20 bp, Artificial Sequence
  Description of Artificial Sequence: Synthetic oligonucleotide
  Target: LAMA2; (-) strand; PAM type: YTN; PAM sequence: CTT
agagctactacaggatgagt

SEQ ID NO: 287822 - DNA, 20 bp, Artificial Sequence
  Description of Artificial Sequence: Synthetic oligonucleotide
  Target: LAMA2; (-) strand; PAM type: YTN; PAM sequence: CTG
tccgtatccttagagctact

SEQ ID NO: 287823 - DNA, 20 bp, Artificial Sequence
  Description of Artificial Sequence: Synthetic oligonucleotide
  Target: LAMA2; (-) strand; PAM type: YTN; PAM sequence: TTC
atcatagtctgtccgtatcc

SEQ ID NO: 287824 - DNA, 20 bp, Artificial Sequence
  Description of Artificial Sequence: Synthetic oligonucleotide
  Target: LAMA2; (-) strand; PAM type: YTN; PAM sequence: TTT
catcatagtctgtccgtatc

SEQ ID NO: 287825 - DNA, 20 bp, Artificial Sequence
  Description of Artificial Sequence: Synthetic oligonucleotide
  Target: LAMA2; (-) strand; PAM type: YTN; PAM sequence: TTT
tcatcatagtctgtccgtat

SEQ ID NO: 287826 - DNA, 20 bp, Artificial Sequence
  Description of Artificial Sequence: Synthetic oligonucleotide
  Target: LAMA2; (-) strand; PAM type: YTN; PAM sequence: CTT
ttcatcatagtctgtccgta

SEQ ID NO: 287827 - DNA, 20 bp, Artificial Sequence
  Description of Artificial Sequence: Synthetic oligonucleotide
  Target: LAMA2; (-) strand; PAM type: YTN; PAM sequence: TTC
atcttttcatcatagtctgt

SEQ ID NO: 287828 - DNA, 20 bp, Artificial Sequence
  Description of Artificial Sequence: Synthetic oligonucleotide
  Target: LAMA2; (-) strand; PAM type: YTN; PAM sequence: TTG
gcatatgtacatattcatct

SEQ ID NO: 287829 - DNA, 20 bp, Artificial Sequence
  Description of Artificial Sequence: Synthetic oligonucleotide
  Target: LAMA2; (-) strand; PAM type: YTN; PAM sequence: TTT
ggcatatgtacatattcatc

SEQ ID NO: 287830 - DNA, 20 bp, Artificial Sequence
  Description of Artificial Sequence: Synthetic oligonucleotide
  Target: LAMA2; (-) strand; PAM type: YTN; PAM sequence: TTT
tggcatatgtacatattcat

SEQ ID NO: 287831 - DNA, 20 bp, Artificial Sequence
  Description of Artificial Sequence: Synthetic oligonucleotide
  Target: LAMA2; (-) strand; PAM type: YTN; PAM sequence: CTG
atattttggcatatgtacat

SEQ ID NO: 287832 - DNA, 20 bp, Artificial Sequence
  Description of Artificial Sequence: Synthetic oligonucleotide
  Target: LAMA2; (-) strand; PAM type: YTN; PAM sequence: TTC
tgatattttggcatatgtac

SEQ ID NO: 287833 - DNA, 20 bp, Artificial Sequence
  Description of Artificial Sequence: Synthetic oligonucleotide
  Target: LAMA2; (-) strand; PAM type: YTN; PAM sequence: TTT
ctgatattttggcatatgta

SEQ ID NO: 287834 - DNA, 20 bp, Artificial Sequence
  Description of Artificial Sequence: Synthetic oligonucleotide
  Target: LAMA2; (-) strand; PAM type: YTN; PAM sequence: CTT
tctgatattttggcatatgt

SEQ ID NO: 287835 - DNA, 20 bp, Artificial Sequence
  Description of Artificial Sequence: Synthetic oligonucleotide
  Target: LAMA2; (-) strand; PAM type: YTN; PAM sequence: TTC
tttctgatattttggcatat

SEQ ID NO: 287836 - DNA, 20 bp, Artificial Sequence
  Description of Artificial Sequence: Synthetic oligonucleotide
  Target: LAMA2; (-) strand; PAM type: YTN; PAM sequence: TTA
tccattctttctgatatttt

SEQ ID NO: 287837 - DNA, 20 bp, Artificial Sequence
  Description of Artificial Sequence: Synthetic oligonucleotide
  Target: LAMA2; (-) strand; PAM type: YTN; PAM sequence: TTA
tcattatccattctttctga

SEQ ID NO: 287838 - DNA, 20 bp, Artificial Sequence
  Description of Artificial Sequence: Synthetic oligonucleotide
  Target: LAMA2; (-) strand; PAM type: YTN; PAM sequence: CTA
aagttatcattatccattct

SEQ ID NO: 287839 - DNA, 20 bp, Artificial Sequence
  Description of Artificial Sequence: Synthetic oligonucleotide
  Target: LAMA2; (-) strand; PAM type: YTN; PAM sequence: TTA
tcagcagaaactaaagttat

SEQ ID NO: 287840 - DNA, 20 bp, Artificial Sequence
  Description of Artificial Sequence: Synthetic oligonucleotide
  Target: LAMA2; (-) strand; PAM type: YTN; PAM sequence: TTA
ttatcagcagaaactaaagt

SEQ ID NO: 287841 - DNA, 20 bp, Artificial Sequence
  Description of Artificial Sequence: Synthetic oligonucleotide
  Target: LAMA2; (-) strand; PAM type: YTN; PAM sequence: TTA
tccatgagagttattatcag

SEQ ID NO: 287842 - DNA, 20 bp, Artificial Sequence
  Description of Artificial Sequence: Synthetic oligonucleotide
  Target: LAMA2; (-) strand; PAM type: YTN; PAM sequence: TTT
atccatgagagttattatca

SEQ ID NO: 287843 - DNA, 20 bp, Artificial Sequence
  Description of Artificial Sequence: Synthetic oligonucleotide
  Target: LAMA2; (-) strand; PAM type: YTN; PAM sequence: TTG
gtttatccatgagagttatt

SEQ ID NO: 287844 - DNA, 20 bp, Artificial Sequence
  Description of Artificial Sequence: Synthetic oligonucleotide
  Target: LAMA2; (-) strand; PAM type: YTN; PAM sequence: CTT
ggtttatccatgagagttat

SEQ ID NO: 287845 - DNA, 20 bp, Artificial Sequence
  Description of Artificial Sequence: Synthetic oligonucleotide
  Target: LAMA2; (-) strand; PAM type: YTN; PAM sequence: TTC
acaaataatcttggtttatc

SEQ ID NO: 287846 - DNA, 20 bp, Artificial Sequence
  Description of Artificial Sequence: Synthetic oligonucleotide
  Target: LAMA2; (-) strand; PAM type: YTN; PAM sequence: TTT
cacaaataatcttggtttat

SEQ ID NO: 287847 - DNA, 20 bp, Artificial Sequence
  Description of Artificial Sequence: Synthetic oligonucleotide
  Target: LAMA2; (-) strand; PAM type: YTN; PAM sequence: TTG
gaatttcacaaataatcttg

SEQ ID NO: 287848 - DNA, 20 bp, Artificial Sequence
  Description of Artificial Sequence: Synthetic oligonucleotide
  Target: LAMA2; (-) strand; PAM type: YTN; PAM sequence: TTT
ggaatttcacaaataatctt

SEQ ID NO: 287849 - DNA, 20 bp, Artificial Sequence
  Description of Artificial Sequence: Synthetic oligonucleotide
  Target: LAMA2; (-) strand; PAM type: YTN; PAM sequence: CTA
gaatttggaatttcacaaat

SEQ ID NO: 287850 - DNA, 20 bp, Artificial Sequence
  Description of Artificial Sequence: Synthetic oligonucleotide
  Target: LAMA2; (-) strand; PAM type: YTN; PAM sequence: TTG
ctagaatttggaatttcaca

SEQ ID NO: 287851 - DNA, 20 bp, Artificial Sequence
  Description of Artificial Sequence: Synthetic oligonucleotide
  Target: LAMA2; (-) strand; PAM type: YTN; PAM sequence: TTT
gctagaatttggaatttcac

SEQ ID NO: 287852 - DNA, 20 bp, Artificial Sequence
  Description of Artificial Sequence: Synthetic oligonucleotide
  Target: LAMA2; (-) strand; PAM type: YTN; PAM sequence: TTA
tttgctagaatttggaattt

SEQ ID NO: 287853 - DNA, 20 bp, Artificial Sequence
  Description of Artificial Sequence: Synthetic oligonucleotide
  Target: LAMA2; (-) strand; PAM type: YTN; PAM sequence: CTG
cagaaagaaataccgttatt

SEQ ID NO: 287854 - DNA, 20 bp, Artificial Sequence
  Description of Artificial Sequence: Synthetic oligonucleotide
  Target: LAMA2; (-) strand; PAM type: YTN; PAM sequence: TTC
tgcagaaagaaataccgtta

SEQ ID NO: 287855 - DNA, 20 bp, Artificial Sequence
  Description of Artificial Sequence: Synthetic oligonucleotide
  Target: LAMA2; (-) strand; PAM type: YTN; PAM sequence: CTT
ctgcagaaagaaataccgtt

SEQ ID NO: 287856 - DNA, 20 bp, Artificial Sequence
  Description of Artificial Sequence: Synthetic oligonucleotide
  Target: LAMA2; (-) strand; PAM type: YTN; PAM sequence: CTC
ccatgcagccagtgaatgta

SEQ ID NO: 287857 - DNA, 20 bp, Artificial Sequence
  Description of Artificial Sequence: Synthetic oligonucleotide
  Target: LAMA2; (-) strand; PAM type: YTN; PAM sequence: TTC
tcccatgcagccagtgaatg

SEQ ID NO: 287858 - DNA, 20 bp, Artificial Sequence
  Description of Artificial Sequence: Synthetic oligonucleotide
  Target: LAMA2; (-) strand; PAM type: YTN; PAM sequence: TTT
ctcccatgcagccagtgaat

SEQ ID NO: 287859 - DNA, 20 bp, Artificial Sequence
  Description of Artificial Sequence: Synthetic oligonucleotide
  Target: LAMA2; (-) strand; PAM type: YTN; PAM sequence: TTG
tcaaagtatgtttctcccat

SEQ ID NO: 287860 - DNA, 20 bp, Artificial Sequence
  Description of Artificial Sequence: Synthetic oligonucleotide
  Target: LAMA2; (-) strand; PAM type: YTN; PAM sequence: TTG
ttgtcaaagtatgtttctcc

SEQ ID NO: 287861 - DNA, 20 bp, Artificial Sequence
  Description of Artificial Sequence: Synthetic oligonucleotide
  Target: LAMA2; (-) strand; PAM type: YTN; PAM sequence: TTT
gttgtcaaagtatgtttctc

SEQ ID NO: 287862 - DNA, 20 bp, Artificial Sequence
  Description of Artificial Sequence: Synthetic oligonucleotide
  Target: LAMA2; (-) strand; PAM type: YTN; PAM sequence: CTA
taggtttgttgtcaaagtat

SEQ ID NO: 287863 - DNA, 20 bp, Artificial Sequence
  Description of Artificial Sequence: Synthetic oligonucleotide
  Target: LAMA2; (-) strand; PAM type: YTN; PAM sequence: TTC
cacaaacctataggtttgtt

SEQ ID NO: 287864 - DNA, 20 bp, Artificial Sequence
  Description of Artificial Sequence: Synthetic oligonucleotide
  Target: LAMA2; (-) strand; PAM type: YTN; PAM sequence: CTC
ggaaattccacaaacctata

SEQ ID NO: 287865 - DNA, 20 bp, Artificial Sequence
  Description of Artificial Sequence: Synthetic oligonucleotide
  Target: LAMA2; (-) strand; PAM type: YTN; PAM sequence: TTC
tcggaaattccacaaaccta

SEQ ID NO: 287866 - DNA, 20 bp, Artificial Sequence
  Description of Artificial Sequence: Synthetic oligonucleotide
  Target: LAMA2; (-) strand; PAM type: YTN; PAM sequence: TTT
ctcggaaattccacaaacct

SEQ ID NO: 287867 - DNA, 20 bp, Artificial Sequence
  Description of Artificial Sequence: Synthetic oligonucleotide
  Target: LAMA2; (-) strand; PAM type: YTN; PAM sequence: TTT
tctcggaaattccacaaacc

SEQ ID NO: 287868 - DNA, 20 bp, Artificial Sequence
  Description of Artificial Sequence: Synthetic oligonucleotide
  Target: LAMA2; (-) strand; PAM type: YTN; PAM sequence: TTT
ttctcggaaattccacaaac

SEQ ID NO: 287869 - DNA, 20 bp, Artificial Sequence
  Description of Artificial Sequence: Synthetic oligonucleotide
  Target: LAMA2; (-) strand; PAM type: YTN; PAM sequence: CTT
tttctcggaaattccacaaa

SEQ ID NO: 287870 - DNA, 20 bp, Artificial Sequence
  Description of Artificial Sequence: Synthetic oligonucleotide
  Target: LAMA2; (-) strand; PAM type: YTN; PAM sequence: TTC
tttttctcggaaattccaca

SEQ ID NO: 287871 - DNA, 20 bp, Artificial Sequence
  Description of Artificial Sequence: Synthetic oligonucleotide
  Target: LAMA2; (-) strand; PAM type: YTN; PAM sequence: CTT
ctttttctcggaaattccac

SEQ ID NO: 287872 - DNA, 20 bp, Artificial Sequence
  Description of Artificial Sequence: Synthetic oligonucleotide
  Target: LAMA2; (-) strand; PAM type: YTN; PAM sequence: TTG
cagtcaccttctttttctcg

SEQ ID NO: 287873 - DNA, 20 bp, Artificial Sequence
  Description of Artificial Sequence: Synthetic oligonucleotide
  Target: LAMA2; (-) strand; PAM type: YTN; PAM sequence: TTT
gcagtcaccttctttttctc

SEQ ID NO: 287874 - DNA, 20 bp, Artificial Sequence
  Description of Artificial Sequence: Synthetic oligonucleotide
  Target: LAMA2; (-) strand; PAM type: YTN; PAM sequence: CTT
tgcagtcaccttctttttct

SEQ ID NO: 287875 - DNA, 20 bp, Artificial Sequence
  Description of Artificial Sequence: Synthetic oligonucleotide
  Target: LAMA2; (-) strand; PAM type: YTN; PAM sequence: CTG
acagtgcatcctttgcagtc

SEQ ID NO: 287876 - DNA, 20 bp, Artificial Sequence
  Description of Artificial Sequence: Synthetic oligonucleotide
  Target: LAMA2; (-) strand; PAM type: YTN; PAM sequence: CTA
acctgacagtgcatcctttg

SEQ ID NO: 287877 - DNA, 20 bp, Artificial Sequence
  Description of Artificial Sequence: Synthetic oligonucleotide
  Target: LAMA2; (-) strand; PAM type: YTN; PAM sequence: CTC
aactaacctgacagtgcatc

SEQ ID NO: 287878 - DNA, 20 bp, Artificial Sequence
  Description of Artificial Sequence: Synthetic oligonucleotide
  Target: LAMA2; (-) strand; PAM type: YTN; PAM sequence: CTC
atctcaactaacctgacagt

SEQ ID NO: 287879 - DNA, 20 bp, Artificial Sequence
  Description of Artificial Sequence: Synthetic oligonucleotide
  Target: LAMA2; (-) strand; PAM type: YTN; PAM sequence: TTC
tcatctcaactaacctgaca

SEQ ID NO: 287880 - DNA, 20 bp, Artificial Sequence
  Description of Artificial Sequence: Synthetic oligonucleotide
  Target: LAMA2; (-) strand; PAM type: YTN; PAM sequence: CTG
ggagagttctcatctcaact

SEQ ID NO: 287881 - DNA, 20 bp, Artificial Sequence
  Description of Artificial Sequence: Synthetic oligonucleotide
  Target: LAMA2; (-) strand; PAM type: YTN; PAM sequence: TTA
tgcacaggacagaccctggg

SEQ ID NO: 287882 - DNA, 20 bp, Artificial Sequence
  Description of Artificial Sequence: Synthetic oligonucleotide
  Target: LAMA2; (-) strand; PAM type: YTN; PAM sequence: TTA
ttatgcacaggacagaccct

SEQ ID NO: 287883 - DNA, 20 bp, Artificial Sequence
  Description of Artificial Sequence: Synthetic oligonucleotide
  Target: LAMA2; (-) strand; PAM type: YTN; PAM sequence: TTT
attatgcacaggacagaccc

SEQ ID NO: 287884 - DNA, 20 bp, Artificial Sequence
  Description of Artificial Sequence: Synthetic oligonucleotide
  Target: LAMA2; (-) strand; PAM type: YTN; PAM sequence: TTT
tattatgcacaggacagacc

SEQ ID NO: 287885 - DNA, 20 bp, Artificial Sequence
  Description of Artificial Sequence: Synthetic oligonucleotide
  Target: LAMA2; (-) strand; PAM type: YTN; PAM sequence: CTT
ttattatgcacaggacagac

SEQ ID NO: 287886 - DNA, 20 bp, Artificial Sequence
  Description of Artificial Sequence: Synthetic oligonucleotide
  Target: LAMA2; (-) strand; PAM type: YTN; PAM sequence: TTA
tgcaataaaatcgaagcttt

SEQ ID NO: 287887 - DNA, 20 bp, Artificial Sequence
  Description of Artificial Sequence: Synthetic oligonucleotide
  Target: LAMA2; (-) strand; PAM type: YTN; PAM sequence: CTC
cacatcatccacatgataat

SEQ ID NO: 287888 - DNA, 20 bp, Artificial Sequence
  Description of Artificial Sequence: Synthetic oligonucleotide
  Target: LAMA2; (-) strand; PAM type: YTN; PAM sequence: CTG
ctccacatcatccacatgat

SEQ ID NO: 287889 - DNA, 20 bp, Artificial Sequence
  Description of Artificial Sequence: Synthetic oligonucleotide
  Target: LAMA2; (-) strand; PAM type: YTN; PAM sequence: TTC
aaacctgctccacatcatcc

SEQ ID NO: 287890 - DNA, 20 bp, Artificial Sequence
  Description of Artificial Sequence: Synthetic oligonucleotide
  Target: LAMA2; (-) strand; PAM type: YTN; PAM sequence: TTT
caaacctgctccacatcatc

SEQ ID NO: 287891 - DNA, 20 bp, Artificial Sequence
  Description of Artificial Sequence: Synthetic oligonucleotide
  Target: LAMA2; (-) strand; PAM type: YTN; PAM sequence: CTT
tcaaacctgctccacatcat

SEQ ID NO: 287892 - DNA, 20 bp, Artificial Sequence
  Description of Artificial Sequence: Synthetic oligonucleotide
  Target: LAMA2; (-) strand; PAM type: YTN; PAM sequence: CTG
agtataatcctttcaaacct

SEQ ID NO: 287893 - DNA, 20 bp, Artificial Sequence
  Description of Artificial Sequence: Synthetic oligonucleotide
  Target: LAMA2; (-) strand; PAM type: YTN; PAM sequence: CTC
tgagtataatcctttcaaac

SEQ ID NO: 287894 - DNA, 20 bp, Artificial Sequence
  Description of Artificial Sequence: Synthetic oligonucleotide
  Target: LAMA2; (-) strand; PAM type: YTN; PAM sequence: TTC
cacctctgagtataatcctt

SEQ ID NO: 287895 - DNA, 20 bp, Artificial Sequence
  Description of Artificial Sequence: Synthetic oligonucleotide
  Target: LAMA2; (-) strand; PAM type: YTN; PAM sequence: TTG
tggtaattccacctctgagt

SEQ ID NO: 287896 - DNA, 20 bp, Artificial Sequence
  Description of Artificial Sequence: Synthetic oligonucleotide
  Target: LAMA2; (-) strand; PAM type: YTN; PAM sequence: TTT
gtggtaattccacctctgag

SEQ ID NO: 287897 - DNA, 20 bp, Artificial Sequence
  Description of Artificial Sequence: Synthetic oligonucleotide
  Target: LAMA2; (-) strand; PAM type: YTN; PAM sequence: TTT
tgtggtaattccacctctga

SEQ ID NO: 287898 - DNA, 20 bp, Artificial Sequence
  Description of Artificial Sequence: Synthetic oligonucleotide
  Target: LAMA2; (-) strand; PAM type: YTN; PAM sequence: TTA
gttttgtggtaattccacct

SEQ ID NO: 287899 - DNA, 20 bp, Artificial Sequence
  Description of Artificial Sequence: Synthetic oligonucleotide
  Target: LAMA2; (-) strand; PAM type: YTN; PAM sequence: TTC
attagttttgtggtaattcc

SEQ ID NO: 287900 - DNA, 20 bp, Artificial Sequence
  Description of Artificial Sequence: Synthetic oligonucleotide
  Target: LAMA2; (-) strand; PAM type: YTN; PAM sequence: TTG
aagattcattagttttgtgg

SEQ ID NO: 287901 - DNA, 20 bp, Artificial Sequence
  Description of Artificial Sequence: Synthetic oligonucleotide
  Target: LAMA2; (-) strand; PAM type: YTN; PAM sequence: CTT
gaagattcattagttttgtg

SEQ ID NO: 287902 - DNA, 20 bp, Artificial Sequence
  Description of Artificial Sequence: Synthetic oligonucleotide
  Target: LAMA2; (-) strand; PAM type: YTN; PAM sequence: CTG
tgcaaatgcaggcagggact

SEQ ID NO: 287903 - DNA, 20 bp, Artificial Sequence
  Description of Artificial Sequence: Synthetic oligonucleotide
  Target: LAMA2; (-) strand; PAM type: YTN; PAM sequence: TTG
aaaaatgcctgtgcaaatgc

SEQ ID NO: 287904 - DNA, 20 bp, Artificial Sequence
  Description of Artificial Sequence: Synthetic oligonucleotide
  Target: LAMA2; (-) strand; PAM type: YTN; PAM sequence: CTT
gaaaaatgcctgtgcaaatg

SEQ ID NO: 287905 - DNA, 20 bp, Artificial Sequence
  Description of Artificial Sequence: Synthetic oligonucleotide
  Target: LAMA2; (-) strand; PAM type: YTN; PAM sequence: CTC
ccagggccttgaaaaatgcc

SEQ ID NO: 287906 - DNA, 20 bp, Artificial Sequence
  Description of Artificial Sequence: Synthetic oligonucleotide
  Target: LAMA2; (-) strand; PAM type: YTN; PAM sequence: CTA
gtatacctcccagggccttg

SEQ ID NO: 287907 - DNA, 20 bp, Artificial Sequence
  Description of Artificial Sequence: Synthetic oligonucleotide
  Target: LAMA2; (-) strand; PAM type: YTN; PAM sequence: CTG
ctagtatacctcccagggcc

SEQ ID NO: 287908 - DNA, 20 bp, Artificial Sequence
  Description of Artificial Sequence: Synthetic oligonucleotide
  Target: LAMA2; (-) strand; PAM type: YTN; PAM sequence: CTA
tgcaaatgtactgctagtat

SEQ ID NO: 287909 - DNA, 20 bp, Artificial Sequence
  Description of Artificial Sequence: Synthetic oligonucleotide
  Target: LAMA2; (-) strand; PAM type: YTN; PAM sequence: TTA
taaaaacatatgactatgca

SEQ ID NO: 287910 - DNA, 20 bp, Artificial Sequence
  Description of Artificial Sequence: Synthetic oligonucleotide
  Target: LAMA2; (-) strand; PAM type: YTN; PAM sequence: TTT
ataaaaacatatgactatgc

SEQ ID NO: 287911 - DNA, 20 bp, Artificial Sequence
  Description of Artificial Sequence: Synthetic oligonucleotide
  Target: LAMA2; (-) strand; PAM type: YTN; PAM sequence: TTT
tataaaaacatatgactatg

SEQ ID NO: 287912 - DNA, 20 bp, Artificial Sequence
  Description of Artificial Sequence: Synthetic oligonucleotide
  Target: LAMA2; (-) strand; PAM type: YTN; PAM sequence: TTG
caaattttataaaaacatat

SEQ ID NO: 287913 - DNA, 20 bp, Artificial Sequence
  Description of Artificial Sequence: Synthetic oligonucleotide
  Target: LAMA2; (-) strand; PAM type: YTN; PAM sequence: TTT
gcaaattttataaaaacata

SEQ ID NO: 287914 - DNA, 20 bp, Artificial Sequence
  Description of Artificial Sequence: Synthetic oligonucleotide
  Target: LAMA2; (-) strand; PAM type: YTN; PAM sequence: CTT
tgcaaattttataaaaacat

SEQ ID NO: 287915 - DNA, 20 bp, Artificial Sequence
  Description of Artificial Sequence: Synthetic oligonucleotide
  Target: LAMA2; (-) strand; PAM type: YTN; PAM sequence: TTA
cctttgcaaattttataaaa

SEQ ID NO: 287916 - DNA, 20 bp, Artificial Sequence
  Description of Artificial Sequence: Synthetic oligonucleotide
  Target: LAMA2; (-) strand; PAM type: YTN; PAM sequence: CTT
acctttgcaaattttataaa

SEQ ID NO: 287917 - DNA, 20 bp, Artificial Sequence
  Description of Artificial Sequence: Synthetic oligonucleotide
  Target: LAMA2; (-) strand; PAM type: YTN; PAM sequence: CTC
ttacctttgcaaattttata

SEQ ID NO: 287918 - DNA, 20 bp, Artificial Sequence
  Description of Artificial Sequence: Synthetic oligonucleotide
  Target: LAMA2; (-) strand; PAM type: YTN; PAM sequence: TTG
tagccaaaatctcttacctt

SEQ ID NO: 287919 - DNA, 20 bp, Artificial Sequence
  Description of Artificial Sequence: Synthetic oligonucleotide
  Target: LAMA2; (-) strand; PAM type: YTN; PAM sequence: CTG
attgtagccaaaatctctta

SEQ ID NO: 287920 - DNA, 20 bp, Artificial Sequence
  Description of Artificial Sequence: Synthetic oligonucleotide
  Target: LAMA2; (-) strand; PAM type: YTN; PAM sequence: TTA
actgattgtagccaaaatct

SEQ ID NO: 287921 - DNA, 20 bp, Artificial Sequence
  Description of Artificial Sequence: Synthetic oligonucleotide
  Target: LAMA2; (-) strand; PAM type: YTN; PAM sequence: CTT
aactgattgtagccaaaatc

SEQ ID NO: 287922 - DNA, 20 bp, Artificial Sequence
  Description of Artificial Sequence: Synthetic oligonucleotide
  Target: LAMA2; (-) strand; PAM type: YTN; PAM sequence: TTG
gagtggaaacttaactgatt

SEQ ID NO: 287923 - DNA, 20 bp, Artificial Sequence
  Description of Artificial Sequence: Synthetic oligonucleotide
  Target: LAMA2; (-) strand; PAM type: YTN; PAM sequence: CTC
gacatgaaagaacattggag

SEQ ID NO: 287924 - DNA, 20 bp, Artificial Sequence
  Description of Artificial Sequence: Synthetic oligonucleotide
  Target: LAMA2; (-) strand; PAM type: YTN; PAM sequence: CTC
acagacacaaaaaaacccct

SEQ ID NO: 287925 - DNA, 20 bp, Artificial Sequence
  Description of Artificial Sequence: Synthetic oligonucleotide
  Target: LAMA2; (-) strand; PAM type: YTN; PAM sequence: TTA
taacaatgaggtactcacag

SEQ ID NO: 287926 - DNA, 20 bp, Artificial Sequence
  Description of Artificial Sequence: Synthetic oligonucleotide
  Target: LAMA2; (-) strand; PAM type: YTN; PAM sequence: TTA
ggaaaaaaaaattataacaa

SEQ ID NO: 287927 - DNA, 20 bp, Artificial Sequence
  Description of Artificial Sequence: Synthetic oligonucleotide
  Target: LAMA2; (-) strand; PAM type: YTN; PAM sequence: TTT
aggaaaaaaaaattataaca

SEQ ID NO: 287928 - DNA, 20 bp, Artificial Sequence
  Description of Artificial Sequence: Synthetic oligonucleotide
  Target: LAMA2; (-) strand; PAM type: YTN; PAM sequence: CTT
taggaaaaaaaaattataac

SEQ ID NO: 287929 - DNA, 20 bp, Artificial Sequence
  Description of Artificial Sequence: Synthetic oligonucleotide
  Target: LAMA2; (-) strand; PAM type: YTN; PAM sequence: CTC
tttaggaaaaaaaaattata

SEQ ID NO: 287930 - DNA, 20 bp, Artificial Sequence
  Description of Artificial Sequence: Synthetic oligonucleotide
  Target: LAMA2; (-) strand; PAM type: YTN; PAM sequence: CTC
tctttaggaaaaaaaaatta

SEQ ID NO: 287931 - DNA, 20 bp, Artificial Sequence
  Description of Artificial Sequence: Synthetic oligonucleotide
  Target: LAMA2; (-) strand; PAM type: YTN; PAM sequence: TTG
gggaaagctctctttaggaa

SEQ ID NO: 287932 - DNA, 20 bp, Artificial Sequence
  Description of Artificial Sequence: Synthetic oligonucleotide
  Target: LAMA2; (-) strand; PAM type: YTN; PAM sequence: TTT
ggggaaagctctctttagga

SEQ ID NO: 287933 - DNA, 20 bp, Artificial Sequence
  Description of Artificial Sequence: Synthetic oligonucleotide
  Target: LAMA2; (-) strand; PAM type: YTN; PAM sequence: TTA
atcagtttggggaaagctct

SEQ ID NO: 287934 - DNA, 20 bp, Artificial Sequence
  Description of Artificial Sequence: Synthetic oligonucleotide
  Target: LAMA2; (-) strand; PAM type: YTN; PAM sequence: CTT
aatcagtttggggaaagctc

SEQ ID NO: 287935 - DNA, 20 bp, Artificial Sequence
  Description of Artificial Sequence: Synthetic oligonucleotide
  Target: LAMA2; (-) strand; PAM type: YTN; PAM sequence: CTG
aaacttaatcagtttgggga

SEQ ID NO: 287936 - DNA, 20 bp, Artificial Sequence
  Description of Artificial Sequence: Synthetic oligonucleotide
  Target: LAMA2; (-) strand; PAM type: YTN; PAM sequence: CTC
agcaagacctgaaacttaat

SEQ ID NO: 287937 - DNA, 20 bp, Artificial Sequence
  Description of Artificial Sequence: Synthetic oligonucleotide
  Target: LAMA2; (-) strand; PAM type: YTN; PAM sequence: TTC
atgctcagcaagacctgaaa

SEQ ID NO: 287938 - DNA, 20 bp, Artificial Sequence
  Description of Artificial Sequence: Synthetic oligonucleotide
  Target: LAMA2; (-) strand; PAM type: YTN; PAM sequence: TTA
taaacataaatatagtgaat

SEQ ID NO: 287939 - DNA, 20 bp, Artificial Sequence
  Description of Artificial Sequence: Synthetic oligonucleotide
  Target: LAMA2; (-) strand; PAM type: YTN; PAM sequence: TTG
ttataaacataaatatagtg

SEQ ID NO: 287940 - DNA, 20 bp, Artificial Sequence
  Description of Artificial Sequence: Synthetic oligonucleotide
  Target: LAMA2; (-) strand; PAM type: YTN; PAM sequence: TTT
gttataaacataaatatagt

SEQ ID NO: 287941 - DNA, 20 bp, Artificial Sequence
  Description of Artificial Sequence: Synthetic oligonucleotide
  Target: LAMA2; (-) strand; PAM type: YTN; PAM sequence: TTT
tgttataaacataaatatag

SEQ ID NO: 287942 - DNA, 20 bp, Artificial Sequence
  Description of Artificial Sequence: Synthetic oligonucleotide
  Target: LAMA2; (-) strand; PAM type: YTN; PAM sequence: CTA
attttgttataaacataaat

SEQ ID NO: 287943 - DNA, 20 bp, Artificial Sequence
  Description of Artificial Sequence: Synthetic oligonucleotide
  Target: LAMA2; (-) strand; PAM type: YTN; PAM sequence: TTC
taattttgttataaacataa

SEQ ID NO: 287944 - DNA, 20 bp, Artificial Sequence
  Description of Artificial Sequence: Synthetic oligonucleotide
  Target: LAMA2; (-) strand; PAM type: YTN; PAM sequence: CTG
gggttctaattttgttataa

SEQ ID NO: 287945 - DNA, 20 bp, Artificial Sequence
  Description of Artificial Sequence: Synthetic oligonucleotide
  Target: LAMA2; (-) strand; PAM type: YTN; PAM sequence: CTA
ggctggggttctaattttgt

SEQ ID NO: 287946 - DNA, 20 bp, Artificial Sequence
  Description of Artificial Sequence: Synthetic oligonucleotide
  Target: LAMA2; (-) strand; PAM type: YTN; PAM sequence: CTG
taagagataaaacctaggct

SEQ ID NO: 287947 - DNA, 20 bp, Artificial Sequence
  Description of Artificial Sequence: Synthetic oligonucleotide
  Target: LAMA2; (-) strand; PAM type: YTN; PAM sequence: TTA
aaaaaaaatcctgtaagaga

SEQ ID NO: 287948 - DNA, 20 bp, Artificial Sequence
  Description of Artificial Sequence: Synthetic oligonucleotide
  Target: LAMA2; (-) strand; PAM type: YTN; PAM sequence: CTA
tgtgtcaattaaaaaaaaat

SEQ ID NO: 287949 - DNA, 20 bp, Artificial Sequence
  Description of Artificial Sequence: Synthetic oligonucleotide
  Target: LAMA2; (-) strand; PAM type: YTN; PAM sequence: TTG
taggatcctatgtgtcaatt

SEQ ID NO: 287950 - DNA, 20 bp, Artificial Sequence
  Description of Artificial Sequence: Synthetic oligonucleotide
  Target: LAMA2; (-) strand; PAM type: YTN; PAM sequence: CTT
gtaggatcctatgtgtcaat

SEQ ID NO: 287951 - DNA, 20 bp, Artificial Sequence
  Description of Artificial Sequence: Synthetic oligonucleotide
  Target: LAMA2; (-) strand; PAM type: YTN; PAM sequence: TTG
aagcacttgtaggatcctat

SEQ ID NO: 287952 - DNA, 20 bp, Artificial Sequence
  Description of Artificial Sequence: Synthetic oligonucleotide
  Target: LAMA2; (-) strand; PAM type: YTN; PAM sequence: TTC
cagttgaagcacttgtagga

SEQ ID NO: 287953 - DNA, 20 bp, Artificial Sequence
  Description of Artificial Sequence: Synthetic oligonucleotide
  Target: LAMA2; (-) strand; PAM type: YTN; PAM sequence: TTT
ccagttgaagcacttgtagg

SEQ ID NO: 287954 - DNA, 20 bp, Artificial Sequence
  Description of Artificial Sequence: Synthetic oligonucleotide
  Target: LAMA2; (-) strand; PAM type: YTN; PAM sequence: TTA
aatcccataggtttccagtt

SEQ ID NO: 287955 - DNA, 20 bp, Artificial Sequence
  Description of Artificial Sequence: Synthetic oligonucleotide
  Target: LAMA2; (-) strand; PAM type: YTN; PAM sequence: TTG
aagcagaatcattaaatccc

SEQ ID NO: 287956 - DNA, 20 bp, Artificial Sequence
  Description of Artificial Sequence: Synthetic oligonucleotide
  Target: LAMA2; (-) strand; PAM type: YTN; PAM sequence: CTT
gaagcagaatcattaaatcc

SEQ ID NO: 287957 - DNA, 20 bp, Artificial Sequence
  Description of Artificial Sequence: Synthetic oligonucleotide
  Target: LAMA2; (-) strand; PAM type: YTN; PAM sequence: CTC
ttgaagcagaatcattaaat

SEQ ID NO: 287958 - DNA, 20 bp, Artificial Sequence
  Description of Artificial Sequence: Synthetic oligonucleotide
  Target: LAMA2; (-) strand; PAM type: YTN; PAM sequence: CTC
tcttgaagcagaatcattaa

SEQ ID NO: 287959 - DNA, 20 bp, Artificial Sequence
  Description of Artificial Sequence: Synthetic oligonucleotide
  Target: LAMA2; (-) strand; PAM type: YTN; PAM sequence: TTC
tctcttgaagcagaatcatt

SEQ ID NO: 287960 - DNA, 20 bp, Artificial Sequence
  Description of Artificial Sequence: Synthetic oligonucleotide
  Target: LAMA2; (-) strand; PAM type: YTN; PAM sequence: CTT
ctctcttgaagcagaatcat

SEQ ID NO: 287961 - DNA, 20 bp, Artificial Sequence
  Description of Artificial Sequence: Synthetic oligonucleotide
  Target: LAMA2; (-) strand; PAM type: YTN; PAM sequence: CTC
cttctctcttgaagcagaat

SEQ ID NO: 287962 - DNA, 20 bp, Artificial Sequence
  Description of Artificial Sequence: Synthetic oligonucleotide
  Target: LAMA2; (-) strand; PAM type: YTN; PAM sequence: TTC
tccttctctcttgaagcaga

SEQ ID NO: 287963 - DNA, 20 bp, Artificial Sequence
  Description of Artificial Sequence: Synthetic oligonucleotide
  Target: LAMA2; (-) strand; PAM type: YTN; PAM sequence: TTG
ttctccttctctcttgaagc

SEQ ID NO: 287964 - DNA, 20 bp, Artificial Sequence
  Description of Artificial Sequence: Synthetic oligonucleotide
  Target: LAMA2; (-) strand; PAM type: YTN; PAM sequence: CTT
gttctccttctctcttgaag

SEQ ID NO: 287965 - DNA, 20 bp, Artificial Sequence
  Description of Artificial Sequence: Synthetic oligonucleotide
  Target: LAMA2; (-) strand; PAM type: YTN; PAM sequence: CTC
ggccccttgttctccttctc

SEQ ID NO: 287966 - DNA, 20 bp, Artificial Sequence
  Description of Artificial Sequence: Synthetic oligonucleotide
  Target: LAMA2; (-) strand; PAM type: YTN; PAM sequence: CTA
tctcggccccttgttctcct

SEQ ID NO: 287967 - DNA, 20 bp, Artificial Sequence
  Description of Artificial Sequence: Synthetic oligonucleotide
  Target: LAMA2; (-) strand; PAM type: YTN; PAM sequence: CTG
gactatctcggccccttgtt

SEQ ID NO: 287968 - DNA, 20 bp, Artificial Sequence
  Description of Artificial Sequence: Synthetic oligonucleotide
  Target: LAMA2; (-) strand; PAM type: YTN; PAM sequence: CTC
ctggactatctcggcccctt

SEQ ID NO: 287969 - DNA, 20 bp, Artificial Sequence
  Description of Artificial Sequence: Synthetic oligonucleotide
  Target: LAMA2; (-) strand; PAM type: YTN; PAM sequence: TTC
ctcctggactatctcggccc

SEQ ID NO: 287970 - DNA, 20 bp, Artificial Sequence
  Description of Artificial Sequence: Synthetic oligonucleotide
  Target: LAMA2; (-) strand; PAM type: YTN; PAM sequence: TTT
cctcctggactatctcggcc

SEQ ID NO: 287971 - DNA, 20 bp, Artificial Sequence
  Description of Artificial Sequence: Synthetic oligonucleotide
  Target: LAMA2; (-) strand; PAM type: YTN; PAM sequence: CTT
tcctcctggactatctcggc

SEQ ID NO: 287972 - DNA, 20 bp, Artificial Sequence
  Description of Artificial Sequence: Synthetic oligonucleotide
  Target: LAMA2; (-) strand; PAM type: YTN; PAM sequence: TTA
ggaactttcctcctggacta

SEQ ID NO: 287973 - DNA, 20 bp, Artificial Sequence
  Description of Artificial Sequence: Synthetic oligonucleotide
  Target: LAMA2; (-) strand; PAM type: YTN; PAM sequence: TTG
aggtcatgtattaggaactt

SEQ ID NO: 287974 - DNA, 20 bp, Artificial Sequence
  Description of Artificial Sequence: Synthetic oligonucleotide
  Target: LAMA2; (-) strand; PAM type: YTN; PAM sequence: TTA
taattgaggtcatgtattag

SEQ ID NO: 287975 - DNA, 20 bp, Artificial Sequence
  Description of Artificial Sequence: Synthetic oligonucleotide
  Target: LAMA2; (-) strand; PAM type: YTN; PAM sequence: CTT
ataattgaggtcatgtatta

SEQ ID NO: 287976 - DNA, 20 bp, Artificial Sequence
  Description of Artificial Sequence: Synthetic oligonucleotide
  Target: LAMA2; (-) strand; PAM type: YTN; PAM sequence: CTA
tcttataattgaggtcatgt

SEQ ID NO: 287977 - DNA, 20 bp, Artificial Sequence
  Description of Artificial Sequence: Synthetic oligonucleotide
  Target: LAMA2; (-) strand; PAM type: YTN; PAM sequence: CTC
tatcttataattgaggtcat

SEQ ID NO: 287978 - DNA, 20 bp, Artificial Sequence
  Description of Artificial Sequence: Synthetic oligonucleotide
  Target: LAMA2; (-) strand; PAM type: YTN; PAM sequence: CTA
ccctctatcttataattgag

SEQ ID NO: 287979 - DNA, 20 bp, Artificial Sequence
  Description of Artificial Sequence: Synthetic oligonucleotide
  Target: LAMA2; (-) strand; PAM type: YTN; PAM sequence: TTC
taccctctatcttataattg

SEQ ID NO: 287980 - DNA, 20 bp, Artificial Sequence
  Description of Artificial Sequence: Synthetic oligonucleotide
  Target: LAMA2; (-) strand; PAM type: YTN; PAM sequence: TTC
attctaccctctatcttata

SEQ ID NO: 287981 - DNA, 20 bp, Artificial Sequence
  Description of Artificial Sequence: Synthetic oligonucleotide
  Target: LAMA2; (-) strand; PAM type: YTN; PAM sequence: CTA
ttcattctaccctctatctt

SEQ ID NO: 287982 - DNA, 20 bp, Artificial Sequence
  Description of Artificial Sequence: Synthetic oligonucleotide
  Target: LAMA2; (-) strand; PAM type: YTN; PAM sequence: TTC
ctattcattctaccctctat

SEQ ID NO: 287983 - DNA, 20 bp, Artificial Sequence
  Description of Artificial Sequence: Synthetic oligonucleotide
  Target: LAMA2; (-) strand; PAM type: YTN; PAM sequence: TTC
aaattcctattcattctacc

SEQ ID NO: 287984 - DNA, 20 bp, Artificial Sequence
  Description of Artificial Sequence: Synthetic oligonucleotide
  Target: LAMA2; (-) strand; PAM type: YTN; PAM sequence: TTT
caaattcctattcattctac

SEQ ID NO: 287985 - DNA, 20 bp, Artificial Sequence
  Description of Artificial Sequence: Synthetic oligonucleotide
  Target: LAMA2; (-) strand; PAM type: YTN; PAM sequence: TTT
tcaaattcctattcattcta

SEQ ID NO: 287986 - DNA, 20 bp, Artificial Sequence
  Description of Artificial Sequence: Synthetic oligonucleotide
  Target: LAMA2; (-) strand; PAM type: YTN; PAM sequence: TTA
aatattttcaaattcctatt

SEQ ID NO: 287987 - DNA, 20 bp, Artificial Sequence
  Description of Artificial Sequence: Synthetic oligonucleotide
  Target: LAMA2; (-) strand; PAM type: YTN; PAM sequence: TTA
gtatgataggatgttaaata

SEQ ID NO: 287988 - DNA, 20 bp, Artificial Sequence
  Description of Artificial Sequence: Synthetic oligonucleotide
  Target: LAMA2; (-) strand; PAM type: YTN; PAM sequence: CTT
agtatgataggatgttaaat

SEQ ID NO: 287989 - DNA, 20 bp, Artificial Sequence
  Description of Artificial Sequence: Synthetic oligonucleotide
  Target: LAMA2; (-) strand; PAM type: YTN; PAM sequence: CTA
cacatgcttagtatgatagg

SEQ ID NO: 287990 - DNA, 20 bp, Artificial Sequence
  Description of Artificial Sequence: Synthetic oligonucleotide
  Target: LAMA2; (-) strand; PAM type: YTN; PAM sequence: CTC
tacacatgcttagtatgata

SEQ ID NO: 287991 - DNA, 20 bp, Artificial Sequence
  Description of Artificial Sequence: Synthetic oligonucleotide
  Target: LAMA2; (-) strand; PAM type: YTN; PAM sequence: TTC
tctacacatgcttagtatga

SEQ ID NO: 287992 - DNA, 20 bp, Artificial Sequence
  Description of Artificial Sequence: Synthetic oligonucleotide
  Target: LAMA2; (-) strand; PAM type: YTN; PAM sequence: TTA
ttctctacacatgcttagta

SEQ ID NO: 287993 - DNA, 20 bp, Artificial Sequence
  Description of Artificial Sequence: Synthetic oligonucleotide
  Target: LAMA2; (-) strand; PAM type: YTN; PAM sequence: TTT
attctctacacatgcttagt

SEQ ID NO: 287994 - DNA, 20 bp, Artificial Sequence
  Description of Artificial Sequence: Synthetic oligonucleotide
  Target: LAMA2; (-) strand; PAM type: YTN; PAM sequence: TTA
tataaaagtgtttattctct

SEQ ID NO: 287995 - DNA, 20 bp, Artificial Sequence
  Description of Artificial Sequence: Synthetic oligonucleotide
  Target: LAMA2; (-) strand; PAM type: YTN; PAM sequence: TTT
atataaaagtgtttattctc

SEQ ID NO: 287996 - DNA, 20 bp, Artificial Sequence
  Description of Artificial Sequence: Synthetic oligonucleotide
  Target: LAMA2; (-) strand; PAM type: YTN; PAM sequence: TTT
tatataaaagtgtttattct

SEQ ID NO: 287997 - DNA, 20 bp, Artificial Sequence
  Description of Artificial Sequence: Synthetic oligonucleotide
  Target: LAMA2; (-) strand; PAM type: YTN; PAM sequence: TTT
ttatataaaagtgtttattc

SEQ ID NO: 287998 - DNA, 20 bp, Artificial Sequence
  Description of Artificial Sequence: Synthetic oligonucleotide
  Target: LAMA2; (-) strand; PAM type: YTN; PAM sequence: TTC
atttttatataaaagtgttt

SEQ ID NO: 287999 - DNA, 20 bp, Artificial Sequence
  Description of Artificial Sequence: Synthetic oligonucleotide
  Target: LAMA2; (-) strand; PAM type: YTN; PAM sequence: CTG
tattcatttttatataaaag

SEQ ID NO: 288000 - DNA, 20 bp, Artificial Sequence
  Description of Artificial Sequence: Synthetic oligonucleotide
  Target: LAMA2; (-) strand; PAM type: YTN; PAM sequence: TTA
tatcctgtattcatttttat

SEQ ID NO: 288001 - DNA, 20 bp, Artificial Sequence
  Description of Artificial Sequence: Synthetic oligonucleotide
  Target: LAMA2; (-) strand; PAM type: YTN; PAM sequence: TTT
atatcctgtattcattttta

SEQ ID NO: 288002 - DNA, 20 bp, Artificial Sequence
  Description of Artificial Sequence: Synthetic oligonucleotide
  Target: LAMA2; (-) strand; PAM type: YTN; PAM sequence: TTT
tatatcctgtattcattttt

SEQ ID NO: 288003 - DNA, 20 bp, Artificial Sequence
  Description of Artificial Sequence: Synthetic oligonucleotide
  Target: LAMA2; (-) strand; PAM type: YTN; PAM sequence: CTA
aatattttatatcctgtatt

SEQ ID NO: 288004 - DNA, 20 bp, Artificial Sequence
  Description of Artificial Sequence: Synthetic oligonucleotide
  Target: LAMA2; (-) strand; PAM type: YTN; PAM sequence: TTA
tagctaaatattttatatcc

SEQ ID NO: 288005 - DNA, 20 bp, Artificial Sequence
  Description of Artificial Sequence: Synthetic oligonucleotide
  Target: LAMA2; (-) strand; PAM type: YTN; PAM sequence: CTT
atagctaaatattttatatc

SEQ ID NO: 288006 - DNA, 20 bp, Artificial Sequence
  Description of Artificial Sequence: Synthetic oligonucleotide
  Target: LAMA2; (-) strand; PAM type: YTN; PAM sequence: CTA
cttatagctaaatattttat

SEQ ID NO: 288007 - DNA, 20 bp, Artificial Sequence
  Description of Artificial Sequence: Synthetic oligonucleotide
  Target: LAMA2; (-) strand; PAM type: YTN; PAM sequence: CTC
tacttatagctaaatatttt

SEQ ID NO: 288008 - DNA, 20 bp, Artificial Sequence
  Description of Artificial Sequence: Synthetic oligonucleotide
  Target: LAMA2; (-) strand; PAM type: YTN; PAM sequence: CTG
agaaatcctctacttatagc

SEQ ID NO: 288009 - DNA, 20 bp, Artificial Sequence
  Description of Artificial Sequence: Synthetic oligonucleotide
  Target: LAMA2; (-) strand; PAM type: YTN; PAM sequence: TTA
tgctgagaaatcctctactt

SEQ ID NO: 288010 - DNA, 20 bp, Artificial Sequence
  Description of Artificial Sequence: Synthetic oligonucleotide
  Target: LAMA2; (-) strand; PAM type: YTN; PAM sequence: TTT
atgctgagaaatcctctact

SEQ ID NO: 288011 - DNA, 20 bp, Artificial Sequence
  Description of Artificial Sequence: Synthetic oligonucleotide
  Target: LAMA2; (-) strand; PAM type: YTN; PAM sequence: TTT
tatgctgagaaatcctctac

SEQ ID NO: 288012 - DNA, 20 bp, Artificial Sequence
  Description of Artificial Sequence: Synthetic oligonucleotide
  Target: LAMA2; (-) strand; PAM type: YTN; PAM sequence: TTT
ttatgctgagaaatcctcta

SEQ ID NO: 288013 - DNA, 20 bp, Artificial Sequence
  Description of Artificial Sequence: Synthetic oligonucleotide
  Target: LAMA2; (-) strand; PAM type: YTN; PAM sequence: CTA
agatttttatgctgagaaat

SEQ ID NO: 288014 - DNA, 20 bp, Artificial Sequence
  Description of Artificial Sequence: Synthetic oligonucleotide
  Target: LAMA2; (-) strand; PAM type: YTN; PAM sequence: CTC
taagatttttatgctgagaa

SEQ ID NO: 288015 - DNA, 20 bp, Artificial Sequence
  Description of Artificial Sequence: Synthetic oligonucleotide
  Target: LAMA2; (-) strand; PAM type: YTN; PAM sequence: TTG
ggtgataagtgggctctaag

SEQ ID NO: 288016 - DNA, 20 bp, Artificial Sequence
  Description of Artificial Sequence: Synthetic oligonucleotide
  Target: LAMA2; (-) strand; PAM type: YTN; PAM sequence: CTT
gggtgataagtgggctctaa

SEQ ID NO: 288017 - DNA, 20 bp, Artificial Sequence
  Description of Artificial Sequence: Synthetic oligonucleotide
  Target: LAMA2; (-) strand; PAM type: YTN; PAM sequence: TTA
ggcttgggtgataagtgggc

SEQ ID NO: 288018 - DNA, 20 bp, Artificial Sequence
  Description of Artificial Sequence: Synthetic oligonucleotide
  Target: LAMA2; (-) strand; PAM type: YTN; PAM sequence: TTT
aggcttgggtgataagtggg

SEQ ID NO: 288019 - DNA, 20 bp, Artificial Sequence
  Description of Artificial Sequence: Synthetic oligonucleotide
  Target: LAMA2; (-) strand; PAM type: YTN; PAM sequence: CTT
taggcttgggtgataagtgg

SEQ ID NO: 288020 - DNA, 20 bp, Artificial Sequence
  Description of Artificial Sequence: Synthetic oligonucleotide
  Target: LAMA2; (-) strand; PAM type: YTN; PAM sequence: TTG
ctttaggcttgggtgataag

SEQ ID NO: 288021 - DNA, 20 bp, Artificial Sequence
  Description of Artificial Sequence: Synthetic oligonucleotide
  Target: LAMA2; (-) strand; PAM type: YTN; PAM sequence: TTA
acaaaattgctttaggcttg

SEQ ID NO: 288022 - DNA, 20 bp, Artificial Sequence
  Description of Artificial Sequence: Synthetic oligonucleotide
  Target: LAMA2; (-) strand; PAM type: YTN; PAM sequence: TTT
aacaaaattgctttaggctt

SEQ ID NO: 288023 - DNA, 20 bp, Artificial Sequence
  Description of Artificial Sequence: Synthetic oligonucleotide
  Target: LAMA2; (-) strand; PAM type: YTN; PAM sequence: TTA
atttaacaaaattgctttag

SEQ ID NO: 288024 - DNA, 20 bp, Artificial Sequence
  Description of Artificial Sequence: Synthetic oligonucleotide
  Target: LAMA2; (-) strand; PAM type: YTN; PAM sequence: TTT
aatttaacaaaattgcttta

SEQ ID NO: 288025 - DNA, 20 bp, Artificial Sequence
  Description of Artificial Sequence: Synthetic oligonucleotide
  Target: LAMA2; (-) strand; PAM type: YTN; PAM sequence: TTT
taatttaacaaaattgcttt

SEQ ID NO: 288026 - DNA, 20 bp, Artificial Sequence
  Description of Artificial Sequence: Synthetic oligonucleotide
  Target: LAMA2; (-) strand; PAM type: YTN; PAM sequence: TTA
tagttttaatttaacaaaat

SEQ ID NO: 288027 - DNA, 20 bp, Artificial Sequence
  Description of Artificial Sequence: Synthetic oligonucleotide
  Target: LAMA2; (-) strand; PAM type: YTN; PAM sequence: TTT
atagttttaatttaacaaaa

SEQ ID NO: 288028 - DNA, 20 bp, Artificial Sequence
  Description of Artificial Sequence: Synthetic oligonucleotide
  Target: LAMA2; (-) strand; PAM type: YTN; PAM sequence: TTT
tatagttttaatttaacaaa

SEQ ID NO: 288029 - DNA, 20 bp, Artificial Sequence
  Description of Artificial Sequence: Synthetic oligonucleotide
  Target: LAMA2; (-) strand; PAM type: YTN; PAM sequence: TTA
aagtatgttttatagtttta

SEQ ID NO: 288030 - DNA, 20 bp, Artificial Sequence
  Description of Artificial Sequence: Synthetic oligonucleotide
  Target: LAMA2; (-) strand; PAM type: YTN; PAM sequence: TTT
aaagtatgttttatagtttt

SEQ ID NO: 288031 - DNA, 20 bp, Artificial Sequence
  Description of Artificial Sequence: Synthetic oligonucleotide
  Target: LAMA2; (-) strand; PAM type: YTN; PAM sequence: TTG
caggtatttaaagtatgttt

SEQ ID NO: 288032 - DNA, 20 bp, Artificial Sequence
  Description of Artificial Sequence: Synthetic oligonucleotide
  Target: LAMA2; (-) strand; PAM type: YTN; PAM sequence: TTT
gcaggtatttaaagtatgtt

SEQ ID NO: 288033 - DNA, 20 bp, Artificial Sequence
  Description of Artificial Sequence: Synthetic oligonucleotide
  Target: LAMA2; (-) strand; PAM type: YTN; PAM sequence: CTT
tgcaggtatttaaagtatgt

SEQ ID NO: 288034 - DNA, 20 bp, Artificial Sequence
  Description of Artificial Sequence: Synthetic oligonucleotide
  Target: LAMA2; (-) strand; PAM type: YTN; PAM sequence: TTA
actttgcaggtatttaaagt

SEQ ID NO: 288035 - DNA, 20 bp, Artificial Sequence
  Description of Artificial Sequence: Synthetic oligonucleotide
  Target: LAMA2; (-) strand; PAM type: YTN; PAM sequence: TTA
tgacatgttaactttgcagg

SEQ ID NO: 288036 - DNA, 20 bp, Artificial Sequence
  Description of Artificial Sequence: Synthetic oligonucleotide
  Target: LAMA2; (-) strand; PAM type: YTN; PAM sequence: CTG
ttatgacatgttaactttgc

SEQ ID NO: 288037 - DNA, 20 bp, Artificial Sequence
  Description of Artificial Sequence: Synthetic oligonucleotide
  Target: LAMA2; (-) strand; PAM type: YTN; PAM sequence: TTG
ctgttatgacatgttaactt

SEQ ID NO: 288038 - DNA, 20 bp, Artificial Sequence
  Description of Artificial Sequence: Synthetic oligonucleotide
  Target: LAMA2; (-) strand; PAM type: YTN; PAM sequence: TTG
agttgctgttatgacatgtt

SEQ ID NO: 288039 - DNA, 20 bp, Artificial Sequence
  Description of Artificial Sequence: Synthetic oligonucleotide
  Target: LAMA2; (-) strand; PAM type: YTN; PAM sequence: TTT
gagttgctgttatgacatgt

SEQ ID NO: 288040 - DNA, 20 bp, Artificial Sequence
  Description of Artificial Sequence: Synthetic oligonucleotide
  Target: LAMA2; (-) strand; PAM type: YTN; PAM sequence: TTT
tgagttgctgttatgacatg

SEQ ID NO: 288041 - DNA, 20 bp, Artificial Sequence
  Description of Artificial Sequence: Synthetic oligonucleotide
  Target: LAMA2; (-) strand; PAM type: YTN; PAM sequence: TTT
ttgagttgctgttatgacat

SEQ ID NO: 288042 - DNA, 20 bp, Artificial Sequence
  Description of Artificial Sequence: Synthetic oligonucleotide
  Target: LAMA2; (-) strand; PAM type: YTN; PAM sequence: TTA
atggtttttgagttgctgtt

SEQ ID NO: 288043 - DNA, 20 bp, Artificial Sequence
  Description of Artificial Sequence: Synthetic oligonucleotide
  Target: LAMA2; (-) strand; PAM type: YTN; PAM sequence: CTT
aatggtttttgagttgctgt

SEQ ID NO: 288044 - DNA, 20 bp, Artificial Sequence
  Description of Artificial Sequence: Synthetic oligonucleotide
  Target: LAMA2; (-) strand; PAM type: YTN; PAM sequence: TTA
gcacttaatggtttttgagt

SEQ ID NO: 288045 - DNA, 20 bp, Artificial Sequence
  Description of Artificial Sequence: Synthetic oligonucleotide
  Target: LAMA2; (-) strand; PAM type: YTN; PAM sequence: CTT
agcacttaatggtttttgag

SEQ ID NO: 288046 - DNA, 20 bp, Artificial Sequence
  Description of Artificial Sequence: Synthetic oligonucleotide
  Target: LAMA2; (-) strand; PAM type: YTN; PAM sequence: CTC
cttagcacttaatggttttt

SEQ ID NO: 288047 - DNA, 20 bp, Artificial Sequence
  Description of Artificial Sequence: Synthetic oligonucleotide
  Target: LAMA2; (-) strand; PAM type: YTN; PAM sequence: TTA
aatggaaaataacacaaact

SEQ ID NO: 288048 - DNA, 20 bp, Artificial Sequence
  Description of Artificial Sequence: Synthetic oligonucleotide
  Target: LAMA2; (-) strand; PAM type: YTN; PAM sequence: TTT
aaatggaaaataacacaaac

SEQ ID NO: 288049 - DNA, 20 bp, Artificial Sequence
  Description of Artificial Sequence: Synthetic oligonucleotide
  Target: LAMA2; (-) strand; PAM type: YTN; PAM sequence: CTT
taaatggaaaataacacaaa

SEQ ID NO: 288050 - DNA, 20 bp, Artificial Sequence
  Description of Artificial Sequence: Synthetic oligonucleotide
  Target: LAMA2; (-) strand; PAM type: YTN; PAM sequence: CTA
gaaacgtatgtatatccttt

SEQ ID NO: 288051 - DNA, 20 bp, Artificial Sequence
  Description of Artificial Sequence: Synthetic oligonucleotide
  Target: LAMA2; (-) strand; PAM type: YTN; PAM sequence: TTG
ggtcctagaaacgtatgtat

SEQ ID NO: 288052 - DNA, 20 bp, Artificial Sequence
  Description of Artificial Sequence: Synthetic oligonucleotide
  Target: LAMA2; (-) strand; PAM type: YTN; PAM sequence: TTT
gggtcctagaaacgtatgta

SEQ ID NO: 288053 - DNA, 20 bp, Artificial Sequence
  Description of Artificial Sequence: Synthetic oligonucleotide
  Target: LAMA2; (-) strand; PAM type: YTN; PAM sequence: CTA
ggatttgggtcctagaaacg

SEQ ID NO: 288054 - DNA, 20 bp, Artificial Sequence
  Description of Artificial Sequence: Synthetic oligonucleotide
  Target: LAMA2; (-) strand; PAM type: YTN; PAM sequence: TTG
ctaggatttgggtcctagaa

SEQ ID NO: 288055 - DNA, 20 bp, Artificial Sequence
  Description of Artificial Sequence: Synthetic oligonucleotide
  Target: LAMA2; (-) strand; PAM type: YTN; PAM sequence: TTT
gctaggatttgggtcctaga

SEQ ID NO: 288056 - DNA, 20 bp, Artificial Sequence
  Description of Artificial Sequence: Synthetic oligonucleotide
  Target: LAMA2; (-) strand; PAM type: YTN; PAM sequence: CTT
tgctaggatttgggtcctag

SEQ ID NO: 288057 - DNA, 20 bp, Artificial Sequence
  Description of Artificial Sequence: Synthetic oligonucleotide
  Target: LAMA2; (-) strand; PAM type: YTN; PAM sequence: CTA
gagatgtagagaaagaaatg

SEQ ID NO: 288058 - DNA, 20 bp, Artificial Sequence
  Description of Artificial Sequence: Synthetic oligonucleotide
  Target: LAMA2; (-) strand; PAM type: YTN; PAM sequence: CTC
tagagatgtagagaaagaaa

SEQ ID NO: 288059 - DNA, 20 bp, Artificial Sequence
  Description of Artificial Sequence: Synthetic oligonucleotide
  Target: LAMA2; (-) strand; PAM type: YTN; PAM sequence: CTA
tgaaactctagagatgtaga

SEQ ID NO: 288060 - DNA, 20 bp, Artificial Sequence
  Description of Artificial Sequence: Synthetic oligonucleotide
  Target: LAMA2; (-) strand; PAM type: YTN; PAM sequence: TTC
tatgaaactctagagatgta

SEQ ID NO: 288061 - DNA, 20 bp, Artificial Sequence
  Description of Artificial Sequence: Synthetic oligonucleotide
  Target: LAMA2; (-) strand; PAM type: YTN; PAM sequence: CTT
ctatgaaactctagagatgt

SEQ ID NO: 288062 - DNA, 20 bp, Artificial Sequence
  Description of Artificial Sequence: Synthetic oligonucleotide
  Target: LAMA2; (-) strand; PAM type: YTN; PAM sequence: TTC
ttctatgaaactctagagat

SEQ ID NO: 288063 - DNA, 20 bp, Artificial Sequence
  Description of Artificial Sequence: Synthetic oligonucleotide
  Target: LAMA2; (-) strand; PAM type: YTN; PAM sequence: TTT
cttctatgaaactctagaga

SEQ ID NO: 288064 - DNA, 20 bp, Artificial Sequence
  Description of Artificial Sequence: Synthetic oligonucleotide
  Target: LAMA2; (-) strand; PAM type: YTN; PAM sequence: CTT
tcttctatgaaactctagag

SEQ ID NO: 288065 - DNA, 20 bp, Artificial Sequence
  Description of Artificial Sequence: Synthetic oligonucleotide
  Target: LAMA2; (-) strand; PAM type: YTN; PAM sequence: CTA
ctttcttctatgaaactcta

SEQ ID NO: 288066 - DNA, 20 bp, Artificial Sequence
  Description of Artificial Sequence: Synthetic oligonucleotide
  Target: LAMA2; (-) strand; PAM type: YTN; PAM sequence: TTG
gggctactttcttctatgaa

SEQ ID NO: 288067 - DNA, 20 bp, Artificial Sequence
  Description of Artificial Sequence: Synthetic oligonucleotide
  Target: LAMA2; (-) strand; PAM type: YTN; PAM sequence: TTT
ggggctactttcttctatga

SEQ ID NO: 288068 - DNA, 20 bp, Artificial Sequence
  Description of Artificial Sequence: Synthetic oligonucleotide
  Target: LAMA2; (-) strand; PAM type: YTN; PAM sequence: TTT
tggggctactttcttctatg

SEQ ID NO: 288069 - DNA, 20 bp, Artificial Sequence
  Description of Artificial Sequence: Synthetic oligonucleotide
  Target: LAMA2; (-) strand; PAM type: YTN; PAM sequence: TTA
gagggataacattttggggc

SEQ ID NO: 288070 - DNA, 20 bp, Artificial Sequence
  Description of Artificial Sequence: Synthetic oligonucleotide
  Target: LAMA2; (-) strand; PAM type: YTN; PAM sequence: TTT
agagggataacattttgggg

SEQ ID NO: 288071 - DNA, 20 bp, Artificial Sequence
  Description of Artificial Sequence: Synthetic oligonucleotide
  Target: LAMA2; (-) strand; PAM type: YTN; PAM sequence: TTT
tagagggataacattttggg

SEQ ID NO: 288072 - DNA, 20 bp, Artificial Sequence
  Description of Artificial Sequence: Synthetic oligonucleotide
  Target: LAMA2; (-) strand; PAM type: YTN; PAM sequence: CTT
ttagagggataacattttgg

SEQ ID NO: 288073 - DNA, 20 bp, Artificial Sequence
  Description of Artificial Sequence: Synthetic oligonucleotide
  Target: LAMA2; (-) strand; PAM type: YTN; PAM sequence: TTA
agacttttagagggataaca

SEQ ID NO: 288074 - DNA, 20 bp, Artificial Sequence
  Description of Artificial Sequence: Synthetic oligonucleotide
  Target: LAMA2; (-) strand; PAM type: YTN; PAM sequence: TTG
gaagttaagacttttagagg

SEQ ID NO: 288075 - DNA, 20 bp, Artificial Sequence
  Description of Artificial Sequence: Synthetic oligonucleotide
  Target: LAMA2; (-) strand; PAM type: YTN; PAM sequence: TTG
acaagtccatgatgtcaaaa

SEQ ID NO: 288076 - DNA, 20 bp, Artificial Sequence
  Description of Artificial Sequence: Synthetic oligonucleotide
  Target: LAMA2; (-) strand; PAM type: YTN; PAM sequence: TTC
atgttgacaagtccatgatg

SEQ ID NO: 288077 - DNA, 20 bp, Artificial Sequence
  Description of Artificial Sequence: Synthetic oligonucleotide
  Target: LAMA2; (-) strand; PAM type: YTN; PAM sequence: TTT
catgttgacaagtccatgat

SEQ ID NO: 288078 - DNA, 20 bp, Artificial Sequence
  Description of Artificial Sequence: Synthetic oligonucleotide
  Target: LAMA2; (-) strand; PAM type: YTN; PAM sequence: CTC
aatttcatgttgacaagtcc

SEQ ID NO: 288079 - DNA, 20 bp, Artificial Sequence
  Description of Artificial Sequence: Synthetic oligonucleotide
  Target: LAMA2; (-) strand; PAM type: YTN; PAM sequence: CTA
tcctcaatttcatgttgaca

SEQ ID NO: 288080 - DNA, 20 bp, Artificial Sequence
  Description of Artificial Sequence: Synthetic oligonucleotide
  Target: LAMA2; (-) strand; PAM type: YTN; PAM sequence: TTC
aaactatcctcaatttcatg

SEQ ID NO: 288081 - DNA, 20 bp, Artificial Sequence
  Description of Artificial Sequence: Synthetic oligonucleotide
  Target: LAMA2; (-) strand; PAM type: YTN; PAM sequence: TTT
caaactatcctcaatttcat

SEQ ID NO: 288082 - DNA, 20 bp, Artificial Sequence
  Description of Artificial Sequence: Synthetic oligonucleotide
  Target: LAMA2; (-) strand; PAM type: YTN; PAM sequence: CTT
tcaaactatcctcaatttca

SEQ ID NO: 288083 - DNA, 20 bp, Artificial Sequence
  Description of Artificial Sequence: Synthetic oligonucleotide
  Target: LAMA2; (-) strand; PAM type: YTN; PAM sequence: TTA
aacaatgaatgggtcacgct

SEQ ID NO: 288084 - DNA, 20 bp, Artificial Sequence
  Description of Artificial Sequence: Synthetic oligonucleotide
  Target: LAMA2; (-) strand; PAM type: YTN; PAM sequence: TTT
aaacaatgaatgggtcacgc

SEQ ID NO: 288085 - DNA, 20 bp, Artificial Sequence
  Description of Artificial Sequence: Synthetic oligonucleotide
  Target: LAMA2; (-) strand; PAM type: YTN; PAM sequence: TTT
taaacaatgaatgggtcacg

SEQ ID NO: 288086 - DNA, 20 bp, Artificial Sequence
  Description of Artificial Sequence: Synthetic oligonucleotide
  Target: LAMA2; (-) strand; PAM type: YTN; PAM sequence: TTG
acaaaaccattttaaacaat

SEQ ID NO: 288087 - DNA, 20 bp, Artificial Sequence
  Description of Artificial Sequence: Synthetic oligonucleotide
  Target: LAMA2; (-) strand; PAM type: YTN; PAM sequence: TTA
ttgacaaaaccattttaaac

SEQ ID NO: 288088 - DNA, 20 bp, Artificial Sequence
  Description of Artificial Sequence: Synthetic oligonucleotide
  Target: LAMA2; (-) strand; PAM type: YTN; PAM sequence: TTA
agattattgacaaaaccatt

SEQ ID NO: 288089 - DNA, 20 bp, Artificial Sequence
  Description of Artificial Sequence: Synthetic oligonucleotide
  Target: LAMA2; (-) strand; PAM type: YTN; PAM sequence: TTT
aagattattgacaaaaccat

SEQ ID NO: 288090 - DNA, 20 bp, Artificial Sequence
  Description of Artificial Sequence: Synthetic oligonucleotide
  Target: LAMA2; (-) strand; PAM type: YTN; PAM sequence: TTG
tttaagattattgacaaaac

SEQ ID NO: 288091 - DNA, 20 bp, Artificial Sequence
  Description of Artificial Sequence: Synthetic oligonucleotide
  Target: LAMA2; (-) strand; PAM type: YTN; PAM sequence: TTT
gtttaagattattgacaaaa

SEQ ID NO: 288092 - DNA, 20 bp, Artificial Sequence
  Description of Artificial Sequence: Synthetic oligonucleotide
  Target: LAMA2; (-) strand; PAM type: YTN; PAM sequence: TTT
tgtttaagattattgacaaa

SEQ ID NO: 288093 - DNA, 20 bp, Artificial Sequence
  Description of Artificial Sequence: Synthetic oligonucleotide
  Target: LAMA2; (-) strand; PAM type: YTN; PAM sequence: TTA
aattttgtttaagattattg

SEQ ID NO: 288094 - DNA, 20 bp, Artificial Sequence
  Description of Artificial Sequence: Synthetic oligonucleotide
  Target: LAMA2; (-) strand; PAM type: YTN; PAM sequence: TTC
catgttaaattttgtttaag

SEQ ID NO: 288095 - DNA, 20 bp, Artificial Sequence
  Description of Artificial Sequence: Synthetic oligonucleotide
  Target: LAMA2; (-) strand; PAM type: YTN; PAM sequence: CTT
ccatgttaaattttgtttaa

SEQ ID NO: 288096 - DNA, 20 bp, Artificial Sequence
  Description of Artificial Sequence: Synthetic oligonucleotide
  Target: LAMA2; (-) strand; PAM type: YTN; PAM sequence: TTA
cagacaaccttccatgttaa

SEQ ID NO: 288097 - DNA, 20 bp, Artificial Sequence
  Description of Artificial Sequence: Synthetic oligonucleotide
  Target: LAMA2; (-) strand; PAM type: YTN; PAM sequence: TTT
acagacaaccttccatgtta

SEQ ID NO: 288098 - DNA, 20 bp, Artificial Sequence
  Description of Artificial Sequence: Synthetic oligonucleotide
  Target: LAMA2; (-) strand; PAM type: YTN; PAM sequence: TTT
tacagacaaccttccatgtt

SEQ ID NO: 288099 - DNA, 20 bp, Artificial Sequence
  Description of Artificial Sequence: Synthetic oligonucleotide
  Target: LAMA2; (-) strand; PAM type: YTN; PAM sequence: TTG
aaagaattttacagacaacc

SEQ ID NO: 288100 - DNA, 20 bp, Artificial Sequence
  Description of Artificial Sequence: Synthetic oligonucleotide
  Target: LAMA2; (-) strand; PAM type: YTN; PAM sequence: TTC
atgtattgaaagaattttac

SEQ ID NO: 288101 - DNA, 20 bp, Artificial Sequence
  Description of Artificial Sequence: Synthetic oligonucleotide
  Target: LAMA2; (-) strand; PAM type: YTN; PAM sequence: TTT
catgtattgaaagaatttta

SEQ ID NO: 288102 - DNA, 20 bp, Artificial Sequence
  Description of Artificial Sequence: Synthetic oligonucleotide
  Target: LAMA2; (-) strand; PAM type: YTN; PAM sequence: CTT
tcatgtattgaaagaatttt

SEQ ID NO: 288103 - DNA, 20 bp, Artificial Sequence
  Description of Artificial Sequence: Synthetic oligonucleotide
  Target: LAMA2; (-) strand; PAM type: YTN; PAM sequence: CTG
tctttcatgtattgaaagaa

SEQ ID NO: 288104 - DNA, 20 bp, Artificial Sequence
  Description of Artificial Sequence: Synthetic oligonucleotide
  Target: LAMA2; (-) strand; PAM type: YTN; PAM sequence: TTC
actgtctttcatgtattgaa

SEQ ID NO: 288105 - DNA, 20 bp, Artificial Sequence
  Description of Artificial Sequence: Synthetic oligonucleotide
  Target: LAMA2; (-) strand; PAM type: YTN; PAM sequence: CTT
cactgtctttcatgtattga

SEQ ID NO: 288106 - DNA, 20 bp, Artificial Sequence
  Description of Artificial Sequence: Synthetic oligonucleotide
  Target: LAMA2; (-) strand; PAM type: YTN; PAM sequence: TTA
atgtgggcttcactgtcttt

SEQ ID NO: 288107 - DNA, 20 bp, Artificial Sequence
  Description of Artificial Sequence: Synthetic oligonucleotide
  Target: LAMA2; (-) strand; PAM type: YTN; PAM sequence: TTG
tgagtagcagaatattaatg

SEQ ID NO: 288108 - DNA, 20 bp, Artificial Sequence
  Description of Artificial Sequence: Synthetic oligonucleotide
  Target: LAMA2; (-) strand; PAM type: YTN; PAM sequence: TTT
gtgagtagcagaatattaat

SEQ ID NO: 288109 - DNA, 20 bp, Artificial Sequence
  Description of Artificial Sequence: Synthetic oligonucleotide
  Target: LAMA2; (-) strand; PAM type: YTN; PAM sequence: TTG
gtttgtgagtagcagaatat

SEQ ID NO: 288110 - DNA, 20 bp, Artificial Sequence
  Description of Artificial Sequence: Synthetic oligonucleotide
  Target: LAMA2; (-) strand; PAM type: YTN; PAM sequence: TTG
gtgttggtttgtgagtagca

SEQ ID NO: 288111 - DNA, 20 bp, Artificial Sequence
  Description of Artificial Sequence: Synthetic oligonucleotide
  Target: LAMA2; (-) strand; PAM type: YTN; PAM sequence: TTA
gggaaaagttggtgttggtt

SEQ ID NO: 288112 - DNA, 20 bp, Artificial Sequence
  Description of Artificial Sequence: Synthetic oligonucleotide
  Target: LAMA2; (-) strand; PAM type: YTN; PAM sequence: CTT
agggaaaagttggtgttggt

SEQ ID NO: 288113 - DNA, 20 bp, Artificial Sequence
  Description of Artificial Sequence: Synthetic oligonucleotide
  Target: LAMA2; (-) strand; PAM type: YTN; PAM sequence: TTA
ccaaagaaacgcttagggaa

SEQ ID NO: 288114 - DNA, 20 bp, Artificial Sequence
  Description of Artificial Sequence: Synthetic oligonucleotide
  Target: LAMA2; (-) strand; PAM type: YTN; PAM sequence: TTT
accaaagaaacgcttaggga

SEQ ID NO: 288115 - DNA, 20 bp, Artificial Sequence
  Description of Artificial Sequence: Synthetic oligonucleotide
  Target: LAMA2; (-) strand; PAM type: YTN; PAM sequence: TTA
gaagtttaccaaagaaacgc

SEQ ID NO: 288116 - DNA, 20 bp, Artificial Sequence
  Description of Artificial Sequence: Synthetic oligonucleotide
  Target: LAMA2; (-) strand; PAM type: YTN; PAM sequence: CTT
agaagtttaccaaagaaacg

SEQ ID NO: 288117 - DNA, 20 bp, Artificial Sequence
  Description of Artificial Sequence: Synthetic oligonucleotide
  Target: LAMA2; (-) strand; PAM type: YTN; PAM sequence: CTA
cttagaagtttaccaaagaa

SEQ ID NO: 288118 - DNA, 20 bp, Artificial Sequence
  Description of Artificial Sequence: Synthetic oligonucleotide
  Target: LAMA2; (-) strand; PAM type: YTN; PAM sequence: TTG
aaaatcctacttagaagttt

SEQ ID NO: 288119 - DNA, 20 bp, Artificial Sequence
  Description of Artificial Sequence: Synthetic oligonucleotide
  Target: LAMA2; (-) strand; PAM type: YTN; PAM sequence: TTT
gaaaatcctacttagaagtt

SEQ ID NO: 288120 - DNA, 20 bp, Artificial Sequence
  Description of Artificial Sequence: Synthetic oligonucleotide
  Target: LAMA2; (-) strand; PAM type: YTN; PAM sequence: TTT
tgaaaatcctacttagaagt

SEQ ID NO: 288121 - DNA, 20 bp, Artificial Sequence
  Description of Artificial Sequence: Synthetic oligonucleotide
  Target: LAMA2; (-) strand; PAM type: YTN; PAM sequence: CTT
ttgaaaatcctacttagaag

SEQ ID NO: 288122 - DNA, 20 bp, Artificial Sequence
  Description of Artificial Sequence: Synthetic oligonucleotide
  Target: LAMA2; (-) strand; PAM type: YTN; PAM sequence: TTG
ataataggcttttgaaaatc

SEQ ID NO: 288123 - DNA, 20 bp, Artificial Sequence
  Description of Artificial Sequence: Synthetic oligonucleotide
  Target: LAMA2; (-) strand; PAM type: YTN; PAM sequence: TTG
ttgataataggcttttgaaa

SEQ ID NO: 288124 - DNA, 20 bp, Artificial Sequence
  Description of Artificial Sequence: Synthetic oligonucleotide
  Target: LAMA2; (-) strand; PAM type: YTN; PAM sequence: TTG
ttgttgataataggcttttg

SEQ ID NO: 288125 - DNA, 20 bp, Artificial Sequence
  Description of Artificial Sequence: Synthetic oligonucleotide
  Target: LAMA2; (-) strand; PAM type: YTN; PAM sequence: TTT
gttgttgataataggctttt

SEQ ID NO: 288126 - DNA, 20 bp, Artificial Sequence
  Description of Artificial Sequence: Synthetic oligonucleotide
  Target: LAMA2; (-) strand; PAM type: YTN; PAM sequence: TTT
tgttgttgataataggcttt

SEQ ID NO: 288127 - DNA, 20 bp, Artificial Sequence
  Description of Artificial Sequence: Synthetic oligonucleotide
  Target: LAMA2; (-) strand; PAM type: YTN; PAM sequence: TTA
gatgttttgttgttgataat

SEQ ID NO: 288128 - DNA, 20 bp, Artificial Sequence
  Description of Artificial Sequence: Synthetic oligonucleotide
  Target: LAMA2; (-) strand; PAM type: YTN; PAM sequence: CTT
agatgttttgttgttgataa

SEQ ID NO: 288129 - DNA, 20 bp, Artificial Sequence
  Description of Artificial Sequence: Synthetic oligonucleotide
  Target: LAMA2; (-) strand; PAM type: YTN; PAM sequence: TTA
aatgccttagatgttttgtt

SEQ ID NO: 288130 - DNA, 20 bp, Artificial Sequence
  Description of Artificial Sequence: Synthetic oligonucleotide
  Target: LAMA2; (-) strand; PAM type: YTN; PAM sequence: TTT
aaatgccttagatgttttgt

SEQ ID NO: 288131 - DNA, 20 bp, Artificial Sequence
  Description of Artificial Sequence: Synthetic oligonucleotide
  Target: LAMA2; (-) strand; PAM type: YTN; PAM sequence: CTG
aatggatatttaaatgcctt

SEQ ID NO: 288132 - DNA, 20 bp, Artificial Sequence
  Description of Artificial Sequence: Synthetic oligonucleotide
  Target: LAMA2; (-) strand; PAM type: YTN; PAM sequence: CTG
ctgaatggatatttaaatgc

SEQ ID NO: 288133 - DNA, 20 bp, Artificial Sequence
  Description of Artificial Sequence: Synthetic oligonucleotide
  Target: LAMA2; (-) strand; PAM type: YTN; PAM sequence: TTC
acatgacatgcactgctgaa

SEQ ID NO: 288134 - DNA, 20 bp, Artificial Sequence
  Description of Artificial Sequence: Synthetic oligonucleotide
  Target: LAMA2; (-) strand; PAM type: YTN; PAM sequence: TTT
cacatgacatgcactgctga

SEQ ID NO: 288135 - DNA, 20 bp, Artificial Sequence
  Description of Artificial Sequence: Synthetic oligonucleotide
  Target: LAMA2; (-) strand; PAM type: YTN; PAM sequence: TTA
cagtttcacatgacatgcac

SEQ ID NO: 288136 - DNA, 20 bp, Artificial Sequence
  Description of Artificial Sequence: Synthetic oligonucleotide
  Target: LAMA2; (-) strand; PAM type: YTN; PAM sequence: TTA
gtgatgttacagtttcacat

SEQ ID NO: 288137 - DNA, 20 bp, Artificial Sequence
  Description of Artificial Sequence: Synthetic oligonucleotide
  Target: LAMA2; (-) strand; PAM type: YTN; PAM sequence: TTG
ataattagtgatgttacagt

SEQ ID NO: 288138 - DNA, 20 bp, Artificial Sequence
  Description of Artificial Sequence: Synthetic oligonucleotide
  Target: LAMA2; (-) strand; PAM type: YTN; PAM sequence: TTG
cagaattgataattagtgat

SEQ ID NO: 288139 - DNA, 20 bp, Artificial Sequence
  Description of Artificial Sequence: Synthetic oligonucleotide
  Target: LAMA2; (-) strand; PAM type: YTN; PAM sequence: TTT
gcagaattgataattagtga

SEQ ID NO: 288140 - DNA, 20 bp, Artificial Sequence
  Description of Artificial Sequence: Synthetic oligonucleotide
  Target: LAMA2; (-) strand; PAM type: YTN; PAM sequence: CTT
tgcagaattgataattagtg

SEQ ID NO: 288141 - DNA, 20 bp, Artificial Sequence
  Description of Artificial Sequence: Synthetic oligonucleotide
  Target: LAMA2; (-) strand; PAM type: YTN; PAM sequence: TTG
aagtgcaaaatctttgcaga

SEQ ID NO: 288142 - DNA, 20 bp, Artificial Sequence
  Description of Artificial Sequence: Synthetic oligonucleotide
  Target: LAMA2; (-) strand; PAM type: YTN; PAM sequence: TTA
tgtgttgaagtgcaaaatct

SEQ ID NO: 288143 - DNA, 20 bp, Artificial Sequence
  Description of Artificial Sequence: Synthetic oligonucleotide
  Target: LAMA2; (-) strand; PAM type: YTN; PAM sequence: TTT
atgtgttgaagtgcaaaatc

SEQ ID NO: 288144 - DNA, 20 bp, Artificial Sequence
  Description of Artificial Sequence: Synthetic oligonucleotide
  Target: LAMA2; (-) strand; PAM type: YTN; PAM sequence: CTT
tatgtgttgaagtgcaaaat

SEQ ID NO: 288145 - DNA, 20 bp, Artificial Sequence
  Description of Artificial Sequence: Synthetic oligonucleotide
  Target: LAMA2; (-) strand; PAM type: YTN; PAM sequence: TTA
gcataatactttatgtgttg

SEQ ID NO: 288146 - DNA, 20 bp, Artificial Sequence
  Description of Artificial Sequence: Synthetic oligonucleotide
  Target: LAMA2; (-) strand; PAM type: YTN; PAM sequence: TTA
taatcataaattagcataat

SEQ ID NO: 288147 - DNA, 20 bp, Artificial Sequence
  Description of Artificial Sequence: Synthetic oligonucleotide
  Target: LAMA2; (-) strand; PAM type: YTN; PAM sequence: CTT
ataatcataaattagcataa

SEQ ID NO: 288148 - DNA, 20 bp, Artificial Sequence
  Description of Artificial Sequence: Synthetic oligonucleotide
  Target: LAMA2; (-) strand; PAM type: YTN; PAM sequence: CTC
ttataatcataaattagcat

SEQ ID NO: 288149 - DNA, 20 bp, Artificial Sequence
  Description of Artificial Sequence: Synthetic oligonucleotide
  Target: LAMA2; (-) strand; PAM type: YTN; PAM sequence: CTA
cgtatacataggaatactct

SEQ ID NO: 288150 - DNA, 20 bp, Artificial Sequence
  Description of Artificial Sequence: Synthetic oligonucleotide
  Target: LAMA2; (-) strand; PAM type: YTN; PAM sequence: CTA
caaaacaccctacgtataca

SEQ ID NO: 288151 - DNA, 20 bp, Artificial Sequence
  Description of Artificial Sequence: Synthetic oligonucleotide
  Target: LAMA2; (-) strand; PAM type: YTN; PAM sequence: CTG
caacctacaaaacaccctac

SEQ ID NO: 288152 - DNA, 20 bp, Artificial Sequence
  Description of Artificial Sequence: Synthetic oligonucleotide
  Target: LAMA2; (-) strand; PAM type: YTN; PAM sequence: CTC
tgcaacctacaaaacaccct

SEQ ID NO: 288153 - DNA, 20 bp, Artificial Sequence
  Description of Artificial Sequence: Synthetic oligonucleotide
  Target: LAMA2; (-) strand; PAM type: YTN; PAM sequence: TTG
taaacgtgaatctctgcaac

SEQ ID NO: 288154 - DNA, 20 bp, Artificial Sequence
  Description of Artificial Sequence: Synthetic oligonucleotide
  Target: LAMA2; (-) strand; PAM type: YTN; PAM sequence: CTA
gcatcaggagaagttgtaaa

SEQ ID NO: 288155 - DNA, 20 bp, Artificial Sequence
  Description of Artificial Sequence: Synthetic oligonucleotide
  Target: LAMA2; (-) strand; PAM type: YTN; PAM sequence: TTC
tagcatcaggagaagttgta

SEQ ID NO: 288156 - DNA, 20 bp, Artificial Sequence
  Description of Artificial Sequence: Synthetic oligonucleotide
  Target: LAMA2; (-) strand; PAM type: YTN; PAM sequence: TTC
attctagcatcaggagaagt

SEQ ID NO: 288157 - DNA, 20 bp, Artificial Sequence
  Description of Artificial Sequence: Synthetic oligonucleotide
  Target: LAMA2; (-) strand; PAM type: YTN; PAM sequence: CTG
tattcattctagcatcagga

SEQ ID NO: 288158 - DNA, 20 bp, Artificial Sequence
  Description of Artificial Sequence: Synthetic oligonucleotide
  Target: LAMA2; (-) strand; PAM type: YTN; PAM sequence: CTA
ggctgtattcattctagcat

SEQ ID NO: 288159 - DNA, 20 bp, Artificial Sequence
  Description of Artificial Sequence: Synthetic oligonucleotide
  Target: LAMA2; (-) strand; PAM type: YTN; PAM sequence: CTA
ggactaggctgtattcattc

SEQ ID NO: 288160 - DNA, 20 bp, Artificial Sequence
  Description of Artificial Sequence: Synthetic oligonucleotide
  Target: LAMA2; (-) strand; PAM type: YTN; PAM sequence: TTC
atggctaggactaggctgta

SEQ ID NO: 288161 - DNA, 20 bp, Artificial Sequence
  Description of Artificial Sequence: Synthetic oligonucleotide
  Target: LAMA2; (-) strand; PAM type: YTN; PAM sequence: TTT
catggctaggactaggctgt

SEQ ID NO: 288162 - DNA, 20 bp, Artificial Sequence
  Description of Artificial Sequence: Synthetic oligonucleotide
  Target: LAMA2; (-) strand; PAM type: YTN; PAM sequence: TTT
tcatggctaggactaggctg

SEQ ID NO: 288163 - DNA, 20 bp, Artificial Sequence
  Description of Artificial Sequence: Synthetic oligonucleotide
  Target: LAMA2; (-) strand; PAM type: YTN; PAM sequence: CTT
ttcatggctaggactaggct

SEQ ID NO: 288164 - DNA, 20 bp, Artificial Sequence
  Description of Artificial Sequence: Synthetic oligonucleotide
  Target: LAMA2; (-) strand; PAM type: YTN; PAM sequence: CTG
gtgatgtcttttcatggcta

SEQ ID NO: 288165 - DNA, 20 bp, Artificial Sequence
  Description of Artificial Sequence: Synthetic oligonucleotide
  Target: LAMA2; (-) strand; PAM type: YTN; PAM sequence: TTC
ctggtgatgtcttttcatgg

SEQ ID NO: 288166 - DNA, 20 bp, Artificial Sequence
  Description of Artificial Sequence: Synthetic oligonucleotide
  Target: LAMA2; (-) strand; PAM type: YTN; PAM sequence: CTT
cctggtgatgtcttttcatg

SEQ ID NO: 288167 - DNA, 20 bp, Artificial Sequence
  Description of Artificial Sequence: Synthetic oligonucleotide
  Target: LAMA2; (-) strand; PAM type: YTN; PAM sequence: CTC
ccttcctggtgatgtctttt

SEQ ID NO: 288168 - DNA, 20 bp, Artificial Sequence
  Description of Artificial Sequence: Synthetic oligonucleotide
  Target: LAMA2; (-) strand; PAM type: YTN; PAM sequence: TTC
ctcccttcctggtgatgtct

SEQ ID NO: 288169 - DNA, 20 bp, Artificial Sequence
  Description of Artificial Sequence: Synthetic oligonucleotide
  Target: LAMA2; (-) strand; PAM type: YTN; PAM sequence: TTT
cctcccttcctggtgatgtc

SEQ ID NO: 288170 - DNA, 20 bp, Artificial Sequence
  Description of Artificial Sequence: Synthetic oligonucleotide
  Target: LAMA2; (-) strand; PAM type: YTN; PAM sequence: TTT
tcctcccttcctggtgatgt

SEQ ID NO: 288171 - DNA, 20 bp, Artificial Sequence
  Description of Artificial Sequence: Synthetic oligonucleotide
  Target: LAMA2; (-) strand; PAM type: YTN; PAM sequence: TTT
ttcctcccttcctggtgatg

SEQ ID NO: 288172 - DNA, 20 bp, Artificial Sequence
  Description of Artificial Sequence: Synthetic oligonucleotide
  Target: LAMA2; (-) strand; PAM type: YTN; PAM sequence: TTT
tttcctcccttcctggtgat

SEQ ID NO: 288173 - DNA, 20 bp, Artificial Sequence
  Description of Artificial Sequence: Synthetic oligonucleotide
  Target: LAMA2; (-) strand; PAM type: YTN; PAM sequence: TTG
ttttttcctcccttcctggt

SEQ ID NO: 288174 - DNA, 20 bp, Artificial Sequence
  Description of Artificial Sequence: Synthetic oligonucleotide
  Target: LAMA2; (-) strand; PAM type: YTN; PAM sequence: TTT
gttttttcctcccttcctgg

SEQ ID NO: 288175 - DNA, 20 bp, Artificial Sequence
  Description of Artificial Sequence: Synthetic oligonucleotide
  Target: LAMA2; (-) strand; PAM type: YTN; PAM sequence: TTA
gtatttgttttttcctccct

SEQ ID NO: 288176 - DNA, 20 bp, Artificial Sequence
  Description of Artificial Sequence: Synthetic oligonucleotide
  Target: LAMA2; (-) strand; PAM type: YTN; PAM sequence: TTT
agtatttgttttttcctccc

SEQ ID NO: 288177 - DNA, 20 bp, Artificial Sequence
  Description of Artificial Sequence: Synthetic oligonucleotide
  Target: LAMA2; (-) strand; PAM type: YTN; PAM sequence: TTT
tagtatttgttttttcctcc

SEQ ID NO: 288178 - DNA, 20 bp, Artificial Sequence
  Description of Artificial Sequence: Synthetic oligonucleotide
  Target: LAMA2; (-) strand; PAM type: YTN; PAM sequence: CTA
ttttagtatttgttttttcc

SEQ ID NO: 288179 - DNA, 20 bp, Artificial Sequence
  Description of Artificial Sequence: Synthetic oligonucleotide
  Target: LAMA2; (-) strand; PAM type: YTN; PAM sequence: TTG
aactattttagtatttgttt

SEQ ID NO: 288180 - DNA, 20 bp, Artificial Sequence
  Description of Artificial Sequence: Synthetic oligonucleotide
  Target: LAMA2; (-) strand; PAM type: YTN; PAM sequence: TTT
gaactattttagtatttgtt

SEQ ID NO: 288181 - DNA, 20 bp, Artificial Sequence
  Description of Artificial Sequence: Synthetic oligonucleotide
  Target: LAMA2; (-) strand; PAM type: YTN; PAM sequence: CTG
atatttgaactattttagta

SEQ ID NO: 288182 - DNA, 20 bp, Artificial Sequence
  Description of Artificial Sequence: Synthetic oligonucleotide
  Target: LAMA2; (-) strand; PAM type: YTN; PAM sequence: TTA
tgcctgatatttgaactatt

SEQ ID NO: 288183 - DNA, 20 bp, Artificial Sequence
  Description of Artificial Sequence: Synthetic oligonucleotide
  Target: LAMA2; (-) strand; PAM type: YTN; PAM sequence: TTA
ttatgcctgatatttgaact

SEQ ID NO: 288184 - DNA, 20 bp, Artificial Sequence
  Description of Artificial Sequence: Synthetic oligonucleotide
  Target: LAMA2; (-) strand; PAM type: YTN; PAM sequence: TTT
attatgcctgatatttgaac

SEQ ID NO: 288185 - DNA, 20 bp, Artificial Sequence
  Description of Artificial Sequence: Synthetic oligonucleotide
  Target: LAMA2; (-) strand; PAM type: YTN; PAM sequence: TTT
tattatgcctgatatttgaa

SEQ ID NO: 288186 - DNA, 20 bp, Artificial Sequence
  Description of Artificial Sequence: Synthetic oligonucleotide
  Target: LAMA2; (-) strand; PAM type: YTN; PAM sequence: CTT
ttattatgcctgatatttga

SEQ ID NO: 288187 - DNA, 20 bp, Artificial Sequence
  Description of Artificial Sequence: Synthetic oligonucleotide
  Target: LAMA2; (-) strand; PAM type: YTN; PAM sequence: TTA
aagggacttttattatgcct

SEQ ID NO: 288188 - DNA, 20 bp, Artificial Sequence
  Description of Artificial Sequence: Synthetic oligonucleotide
  Target: LAMA2; (-) strand; PAM type: YTN; PAM sequence: TTT
aaagggacttttattatgcc

SEQ ID NO: 288189 - DNA, 20 bp, Artificial Sequence
  Description of Artificial Sequence: Synthetic oligonucleotide
  Target: LAMA2; (-) strand; PAM type: YTN; PAM sequence: TTT
taaagggacttttattatgc

SEQ ID NO: 288190 - DNA, 20 bp, Artificial Sequence
  Description of Artificial Sequence: Synthetic oligonucleotide
  Target: LAMA2; (-) strand; PAM type: YTN; PAM sequence: TTT
ttaaagggacttttattatg

SEQ ID NO: 288191 - DNA, 20 bp, Artificial Sequence
  Description of Artificial Sequence: Synthetic oligonucleotide
  Target: LAMA2; (-) strand; PAM type: YTN; PAM sequence: CTT
tttaaagggacttttattat

SEQ ID NO: 288192 - DNA, 20 bp, Artificial Sequence
  Description of Artificial Sequence: Synthetic oligonucleotide
  Target: LAMA2; (-) strand; PAM type: YTN; PAM sequence: CTC
caaatgtgcctttttaaagg

SEQ ID NO: 288193 - DNA, 20 bp, Artificial Sequence
  Description of Artificial Sequence: Synthetic oligonucleotide
  Target: LAMA2; (-) strand; PAM type: YTN; PAM sequence: TTG
tagtatactccaaatgtgcc

SEQ ID NO: 288194 - DNA, 20 bp, Artificial Sequence
  Description of Artificial Sequence: Synthetic oligonucleotide
  Target: LAMA2; (-) strand; PAM type: YTN; PAM sequence: CTG
atgtgggtaattgtagtata

SEQ ID NO: 288195 - DNA, 20 bp, Artificial Sequence
  Description of Artificial Sequence: Synthetic oligonucleotide
  Target: LAMA2; (-) strand; PAM type: YTN; PAM sequence: TTA
atctgatgtgggtaattgta

SEQ ID NO: 288196 - DNA, 20 bp, Artificial Sequence
  Description of Artificial Sequence: Synthetic oligonucleotide
  Target: LAMA2; (-) strand; PAM type: YTN; PAM sequence: CTT
aatctgatgtgggtaattgt

SEQ ID NO: 288197 - DNA, 20 bp, Artificial Sequence
  Description of Artificial Sequence: Synthetic oligonucleotide
  Target: LAMA2; (-) strand; PAM type: YTN; PAM sequence: CTG
tgaagcagatcatgatgccc

SEQ ID NO: 288198 - DNA, 20 bp, Artificial Sequence
  Description of Artificial Sequence: Synthetic oligonucleotide
  Target: LAMA2; (-) strand; PAM type: YTN; PAM sequence: CTC
tgtgaagcagatcatgatgc

SEQ ID NO: 288199 - DNA, 20 bp, Artificial Sequence
  Description of Artificial Sequence: Synthetic oligonucleotide
  Target: LAMA2; (-) strand; PAM type: YTN; PAM sequence: CTC
ctctgtgaagcagatcatga

SEQ ID NO: 288200 - DNA, 20 bp, Artificial Sequence
  Description of Artificial Sequence: Synthetic oligonucleotide
  Target: LAMA2; (-) strand; PAM type: YTN; PAM sequence: TTC
aaatgtcacctcctctgtga

SEQ ID NO: 288201 - DNA, 20 bp, Artificial Sequence
  Description of Artificial Sequence: Synthetic oligonucleotide
  Target: LAMA2; (-) strand; PAM type: YTN; PAM sequence: TTT
caaatgtcacctcctctgtg

SEQ ID NO: 288202 - DNA, 20 bp, Artificial Sequence
  Description of Artificial Sequence: Synthetic oligonucleotide
  Target: LAMA2; (-) strand; PAM type: YTN; PAM sequence: CTC
aggtcaagaccatttcaaat

SEQ ID NO: 288203 - DNA, 20 bp, Artificial Sequence
  Description of Artificial Sequence: Synthetic oligonucleotide
  Target: LAMA2; (-) strand; PAM type: YTN; PAM sequence: TTA
cctcaggtcaagaccatttc

SEQ ID NO: 288204 - DNA, 20 bp, Artificial Sequence
  Description of Artificial Sequence: Synthetic oligonucleotide
  Target: LAMA2; (-) strand; PAM type: YTN; PAM sequence: CTT
acctcaggtcaagaccattt

SEQ ID NO: 288205 - DNA, 20 bp, Artificial Sequence
  Description of Artificial Sequence: Synthetic oligonucleotide
  Target: LAMA2; (-) strand; PAM type: YTN; PAM sequence: CTC
ttacctcaggtcaagaccat

SEQ ID NO: 288206 - DNA, 20 bp, Artificial Sequence
  Description of Artificial Sequence: Synthetic oligonucleotide
  Target: LAMA2; (-) strand; PAM type: YTN; PAM sequence: TTG
gactcttacctcaggtcaag

SEQ ID NO: 288207 - DNA, 20 bp, Artificial Sequence
  Description of Artificial Sequence: Synthetic oligonucleotide
  Target: LAMA2; (-) strand; PAM type: YTN; PAM sequence: TTT
ggactcttacctcaggtcaa

SEQ ID NO: 288208 - DNA, 20 bp, Artificial Sequence
  Description of Artificial Sequence: Synthetic oligonucleotide
  Target: LAMA2; (-) strand; PAM type: YTN; PAM sequence: TTT
tggactcttacctcaggtca

SEQ ID NO: 288209 - DNA, 20 bp, Artificial Sequence
  Description of Artificial Sequence: Synthetic oligonucleotide
  Target: LAMA2; (-) strand; PAM type: YTN; PAM sequence: TTT
ttggactcttacctcaggtc

SEQ ID NO: 288210 - DNA, 20 bp, Artificial Sequence
  Description of Artificial Sequence: Synthetic oligonucleotide
  Target: LAMA2; (-) strand; PAM type: YTN; PAM sequence: CTT
tttggactcttacctcaggt

SEQ ID NO: 288211 - DNA, 20 bp, Artificial Sequence
  Description of Artificial Sequence: Synthetic oligonucleotide
  Target: LAMA2; (-) strand; PAM type: YTN; PAM sequence: CTC
tttttggactcttacctcag

SEQ ID NO: 288212 - DNA, 20 bp, Artificial Sequence
  Description of Artificial Sequence: Synthetic oligonucleotide
  Target: LAMA2; (-) strand; PAM type: YTN; PAM sequence: CTC
ctctttttggactcttacct

SEQ ID NO: 288213 - DNA, 20 bp, Artificial Sequence
  Description of Artificial Sequence: Synthetic oligonucleotide
  Target: LAMA2; (-) strand; PAM type: YTN; PAM sequence: CTA
tctcctctttttggactctt

SEQ ID NO: 288214 - DNA, 20 bp, Artificial Sequence
  Description of Artificial Sequence: Synthetic oligonucleotide
  Target: LAMA2; (-) strand; PAM type: YTN; PAM sequence: CTG
ctatctcctctttttggact

SEQ ID NO: 288215 - DNA, 20 bp, Artificial Sequence
  Description of Artificial Sequence: Synthetic oligonucleotide
  Target: LAMA2; (-) strand; PAM type: YTN; PAM sequence: TTC
tgctatctcctctttttgga

SEQ ID NO: 288216 - DNA, 20 bp, Artificial Sequence
  Description of Artificial Sequence: Synthetic oligonucleotide
  Target: LAMA2; (-) strand; PAM type: YTN; PAM sequence: CTT
ctgctatctcctctttttgg

SEQ ID NO: 288217 - DNA, 20 bp, Artificial Sequence
  Description of Artificial Sequence: Synthetic oligonucleotide
  Target: LAMA2; (-) strand; PAM type: YTN; PAM sequence: TTC
ttctgctatctcctcttttt

SEQ ID NO: 288218 - DNA, 20 bp, Artificial Sequence
  Description of Artificial Sequence: Synthetic oligonucleotide
  Target: LAMA2; (-) strand; PAM type: YTN; PAM sequence: TTT
cttctgctatctcctctttt

SEQ ID NO: 288219 - DNA, 20 bp, Artificial Sequence
  Description of Artificial Sequence: Synthetic oligonucleotide
  Target: LAMA2; (-) strand; PAM type: YTN; PAM sequence: TTC
acatttcttctgctatctcc

SEQ ID NO: 288220 - DNA, 20 bp, Artificial Sequence
  Description of Artificial Sequence: Synthetic oligonucleotide
  Target: LAMA2; (-) strand; PAM type: YTN; PAM sequence: CTT
cacatttcttctgctatctc

SEQ ID NO: 288221 - DNA, 20 bp, Artificial Sequence
  Description of Artificial Sequence: Synthetic oligonucleotide
  Target: LAMA2; (-) strand; PAM type: YTN; PAM sequence: TTC
ttcacatttcttctgctatc

SEQ ID NO: 288222 - DNA, 20 bp, Artificial Sequence
  Description of Artificial Sequence: Synthetic oligonucleotide
  Target: LAMA2; (-) strand; PAM type: YTN; PAM sequence: TTA
gaatgttcttcacatttctt

SEQ ID NO: 288223 - DNA, 20 bp, Artificial Sequence
  Description of Artificial Sequence: Synthetic oligonucleotide
  Target: LAMA2; (-) strand; PAM type: YTN; PAM sequence: TTC
aggaattagaatgttcttca

SEQ ID NO: 288224 - DNA, 20 bp, Artificial Sequence
  Description of Artificial Sequence: Synthetic oligonucleotide
  Target: LAMA2; (-) strand; PAM type: YTN; PAM sequence: TTT
caggaattagaatgttcttc

SEQ ID NO: 288225 - DNA, 20 bp, Artificial Sequence
  Description of Artificial Sequence: Synthetic oligonucleotide
  Target: LAMA2; (-) strand; PAM type: YTN; PAM sequence: CTG
gtttcaggaattagaatgtt

SEQ ID NO: 288226 - DNA, 20 bp, Artificial Sequence
  Description of Artificial Sequence: Synthetic oligonucleotide
  Target: LAMA2; (-) strand; PAM type: YTN; PAM sequence: TTA
ctggtttcaggaattagaat

SEQ ID NO: 288227 - DNA, 20 bp, Artificial Sequence
  Description of Artificial Sequence: Synthetic oligonucleotide
  Target: LAMA2; (-) strand; PAM type: YTN; PAM sequence: CTT
actggtttcaggaattagaa

SEQ ID NO: 288228 - DNA, 20 bp, Artificial Sequence
  Description of Artificial Sequence: Synthetic oligonucleotide
  Target: LAMA2; (-) strand; PAM type: YTN; PAM sequence: CTC
ttactggtttcaggaattag

SEQ ID NO: 288229 - DNA, 20 bp, Artificial Sequence
  Description of Artificial Sequence: Synthetic oligonucleotide
  Target: LAMA2; (-) strand; PAM type: YTN; PAM sequence: TTG
ctcttactggtttcaggaat

SEQ ID NO: 288230 - DNA, 20 bp, Artificial Sequence
  Description of Artificial Sequence: Synthetic oligonucleotide
  Target: LAMA2; (-) strand; PAM type: YTN; PAM sequence: TTT
gctcttactggtttcaggaa

SEQ ID NO: 288231 - DNA, 20 bp, Artificial Sequence
  Description of Artificial Sequence: Synthetic oligonucleotide
  Target: LAMA2; (-) strand; PAM type: YTN; PAM sequence: CTT
tgctcttactggtttcagga

SEQ ID NO: 288232 - DNA, 20 bp, Artificial Sequence
  Description of Artificial Sequence: Synthetic oligonucleotide
  Target: LAMA2; (-) strand; PAM type: YTN; PAM sequence: CTC
cctttgctcttactggtttc

SEQ ID NO: 288233 - DNA, 20 bp, Artificial Sequence
  Description of Artificial Sequence: Synthetic oligonucleotide
  Target: LAMA2; (-) strand; PAM type: YTN; PAM sequence: TTC
ctccctttgctcttactggt

SEQ ID NO: 288234 - DNA, 20 bp, Artificial Sequence
  Description of Artificial Sequence: Synthetic oligonucleotide
  Target: LAMA2; (-) strand; PAM type: YTN; PAM sequence: CTT
cctccctttgctcttactgg

SEQ ID NO: 288235 - DNA, 20 bp, Artificial Sequence
  Description of Artificial Sequence: Synthetic oligonucleotide
  Target: LAMA2; (-) strand; PAM type: YTN; PAM sequence: CTC
ttcctccctttgctcttact

SEQ ID NO: 288236 - DNA, 20 bp, Artificial Sequence
  Description of Artificial Sequence: Synthetic oligonucleotide
  Target: LAMA2; (-) strand; PAM type: YTN; PAM sequence: TTC
ccactcttcctccctttgct

SEQ ID NO: 288237 - DNA, 20 bp, Artificial Sequence
  Description of Artificial Sequence: Synthetic oligonucleotide
  Target: LAMA2; (-) strand; PAM type: YTN; PAM sequence: CTT
cccactcttcctccctttgc

SEQ ID NO: 288238 - DNA, 20 bp, Artificial Sequence
  Description of Artificial Sequence: Synthetic oligonucleotide
  Target: LAMA2; (-) strand; PAM type: YTN; PAM sequence: CTC
cggcttcccactcttcctcc

SEQ ID NO: 288239 - DNA, 20 bp, Artificial Sequence
  Description of Artificial Sequence: Synthetic oligonucleotide
  Target: LAMA2; (-) strand; PAM type: YTN; PAM sequence: CTA
aaaacactccggcttcccac

SEQ ID NO: 288240 - DNA, 20 bp, Artificial Sequence
  Description of Artificial Sequence: Synthetic oligonucleotide
  Target: LAMA2; (-) strand; PAM type: YTN; PAM sequence: TTC
taaaaacactccggcttccc

SEQ ID NO: 288241 - DNA, 20 bp, Artificial Sequence
  Description of Artificial Sequence: Synthetic oligonucleotide
  Target: LAMA2; (-) strand; PAM type: YTN; PAM sequence: TTT
ctaaaaacactccggcttcc

SEQ ID NO: 288242 - DNA, 20 bp, Artificial Sequence
  Description of Artificial Sequence: Synthetic oligonucleotide
  Target: LAMA2; (-) strand; PAM type: YTN; PAM sequence: TTT
tctaaaaacactccggcttc

SEQ ID NO: 288243 - DNA, 20 bp, Artificial Sequence
  Description of Artificial Sequence: Synthetic oligonucleotide
  Target: LAMA2; (-) strand; PAM type: YTN; PAM sequence: CTT
ttctaaaaacactccggctt

SEQ ID NO: 288244 - DNA, 20 bp, Artificial Sequence
  Description of Artificial Sequence: Synthetic oligonucleotide
  Target: LAMA2; (-) strand; PAM type: YTN; PAM sequence: TTC
ttttctaaaaacactccggc

SEQ ID NO: 288245 - DNA, 20 bp, Artificial Sequence
  Description of Artificial Sequence: Synthetic oligonucleotide
  Target: LAMA2; (-) strand; PAM type: YTN; PAM sequence: TTG
ttcttttctaaaaacactcc

SEQ ID NO: 288246 - DNA, 20 bp, Artificial Sequence
  Description of Artificial Sequence: Synthetic oligonucleotide
  Target: LAMA2; (-) strand; PAM type: YTN; PAM sequence: CTT
gttcttttctaaaaacactc

SEQ ID NO: 288247 - DNA, 20 bp, Artificial Sequence
  Description of Artificial Sequence: Synthetic oligonucleotide
  Target: LAMA2; (-) strand; PAM type: YTN; PAM sequence: TTC
acacttgttcttttctaaaa

SEQ ID NO: 288248 - DNA, 20 bp, Artificial Sequence
  Description of Artificial Sequence: Synthetic oligonucleotide
  Target: LAMA2; (-) strand; PAM type: YTN; PAM sequence: TTG
tatgagtgaattcacacttg

SEQ ID NO: 288249 - DNA, 20 bp, Artificial Sequence
  Description of Artificial Sequence: Synthetic oligonucleotide
  Target: LAMA2; (-) strand; PAM type: YTN; PAM sequence: CTT
gtatgagtgaattcacactt

SEQ ID NO: 288250 - DNA, 20 bp, Artificial Sequence
  Description of Artificial Sequence: Synthetic oligonucleotide
  Target: LAMA2; (-) strand; PAM type: YTN; PAM sequence: TTG
ccaatcttgtatgagtgaat

SEQ ID NO: 288251 - DNA, 20 bp, Artificial Sequence
  Description of Artificial Sequence: Synthetic oligonucleotide
  Target: LAMA2; (-) strand; PAM type: YTN; PAM sequence: TTT
gccaatcttgtatgagtgaa

SEQ ID NO: 288252 - DNA, 20 bp, Artificial Sequence
  Description of Artificial Sequence: Synthetic oligonucleotide
  Target: LAMA2; (-) strand; PAM type: YTN; PAM sequence: CTC
ccatttgccaatcttgtatg

SEQ ID NO: 288253 - DNA, 20 bp, Artificial Sequence
  Description of Artificial Sequence: Synthetic oligonucleotide
  Target: LAMA2; (-) strand; PAM type: YTN; PAM sequence: TTC
tcccatttgccaatcttgta

SEQ ID NO: 288254 - DNA, 20 bp, Artificial Sequence
  Description of Artificial Sequence: Synthetic oligonucleotide
  Target: LAMA2; (-) strand; PAM type: YTN; PAM sequence: TTA
cccgaatcattctcccattt

SEQ ID NO: 288255 - DNA, 20 bp, Artificial Sequence
  Description of Artificial Sequence: Synthetic oligonucleotide
  Target: LAMA2; (-) strand; PAM type: YTN; PAM sequence: CTT
acccgaatcattctcccatt

SEQ ID NO: 288256 - DNA, 20 bp, Artificial Sequence
  Description of Artificial Sequence: Synthetic oligonucleotide
  Target: LAMA2; (-) strand; PAM type: YTN; PAM sequence: CTG
catcttacccgaatcattct

SEQ ID NO: 288257 - DNA, 20 bp, Artificial Sequence
  Description of Artificial Sequence: Synthetic oligonucleotide
  Target: LAMA2; (-) strand; PAM type: YTN; PAM sequence: CTA
tgtggccactgcatcttacc

SEQ ID NO: 288258 - DNA, 20 bp, Artificial Sequence
  Description of Artificial Sequence: Synthetic oligonucleotide
  Target: LAMA2; (-) strand; PAM type: YTN; PAM sequence: CTG
ggaagaagtgtgtatgaacc

SEQ ID NO: 288259 - DNA, 20 bp, Artificial Sequence
  Description of Artificial Sequence: Synthetic oligonucleotide
  Target: LAMA2; (-) strand; PAM type: YTN; PAM sequence: TTA
tgctgggaagaagtgtgtat

SEQ ID NO: 288260 - DNA, 20 bp, Artificial Sequence
  Description of Artificial Sequence: Synthetic oligonucleotide
  Target: LAMA2; (-) strand; PAM type: YTN; PAM sequence: TTA
tagggtagaaaaaaaaacat

SEQ ID NO: 288261 - DNA, 20 bp, Artificial Sequence
  Description of Artificial Sequence: Synthetic oligonucleotide
  Target: LAMA2; (-) strand; PAM type: YTN; PAM sequence: CTA
ccgttatagggtagaaaaaa

SEQ ID NO: 288262 - DNA, 20 bp, Artificial Sequence
  Description of Artificial Sequence: Synthetic oligonucleotide
  Target: LAMA2; (-) strand; PAM type: YTN; PAM sequence: TTC
agctaccgttatagggtaga

SEQ ID NO: 288263 - DNA, 20 bp, Artificial Sequence
  Description of Artificial Sequence: Synthetic oligonucleotide
  Target: LAMA2; (-) strand; PAM type: YTN; PAM sequence: TTG
gattcagctaccgttatagg

SEQ ID NO: 288264 - DNA, 20 bp, Artificial Sequence
  Description of Artificial Sequence: Synthetic oligonucleotide
  Target: LAMA2; (-) strand; PAM type: YTN; PAM sequence: TTT
ggattcagctaccgttatag

SEQ ID NO: 288265 - DNA, 20 bp, Artificial Sequence
  Description of Artificial Sequence: Synthetic oligonucleotide
  Target: LAMA2; (-) strand; PAM type: YTN; PAM sequence: CTT
tggattcagctaccgttata

SEQ ID NO: 288266 - DNA, 20 bp, Artificial Sequence
  Description of Artificial Sequence: Synthetic oligonucleotide
  Target: LAMA2; (-) strand; PAM type: YTN; PAM sequence: TTA
ctttggattcagctaccgtt

SEQ ID NO: 288267 - DNA, 20 bp, Artificial Sequence
  Description of Artificial Sequence: Synthetic oligonucleotide
  Target: LAMA2; (-) strand; PAM type: YTN; PAM sequence: TTT
actttggattcagctaccgt

SEQ ID NO: 288268 - DNA, 20 bp, Artificial Sequence
  Description of Artificial Sequence: Synthetic oligonucleotide
  Target: LAMA2; (-) strand; PAM type: YTN; PAM sequence: TTG
gtttactttggattcagcta

SEQ ID NO: 288269 - DNA, 20 bp, Artificial Sequence
  Description of Artificial Sequence: Synthetic oligonucleotide
  Target: LAMA2; (-) strand; PAM type: YTN; PAM sequence: CTA
tgttggtttactttggattc

SEQ ID NO: 288270 - DNA, 20 bp, Artificial Sequence
  Description of Artificial Sequence: Synthetic oligonucleotide
  Target: LAMA2; (-) strand; PAM type: YTN; PAM sequence: TTC
agctatgttggtttactttg

SEQ ID NO: 288271 - DNA, 20 bp, Artificial Sequence
  Description of Artificial Sequence: Synthetic oligonucleotide
  Target: LAMA2; (-) strand; PAM type: YTN; PAM sequence: CTT
cagctatgttggtttacttt

SEQ ID NO: 288272 - DNA, 20 bp, Artificial Sequence
  Description of Artificial Sequence: Synthetic oligonucleotide
  Target: LAMA2; (-) strand; PAM type: YTN; PAM sequence: TTG
gtgtcttcagctatgttggt

SEQ ID NO: 288273 - DNA, 20 bp, Artificial Sequence
  Description of Artificial Sequence: Synthetic oligonucleotide
  Target: LAMA2; (-) strand; PAM type: YTN; PAM sequence: TTG
aggttggtgtcttcagctat

SEQ ID NO: 288274 - DNA, 20 bp, Artificial Sequence
  Description of Artificial Sequence: Synthetic oligonucleotide
  Target: LAMA2; (-) strand; PAM type: YTN; PAM sequence: TTT
gaggttggtgtcttcagcta

SEQ ID NO: 288275 - DNA, 20 bp, Artificial Sequence
  Description of Artificial Sequence: Synthetic oligonucleotide
  Target: LAMA2; (-) strand; PAM type: YTN; PAM sequence: CTT
tgaggttggtgtcttcagct

SEQ ID NO: 288276 - DNA, 20 bp, Artificial Sequence
  Description of Artificial Sequence: Synthetic oligonucleotide
  Target: LAMA2; (-) strand; PAM type: YTN; PAM sequence: TTG
tggcacagtactttgaggtt

SEQ ID NO: 288277 - DNA, 20 bp, Artificial Sequence
  Description of Artificial Sequence: Synthetic oligonucleotide
  Target: LAMA2; (-) strand; PAM type: YTN; PAM sequence: CTG
tgttgtggcacagtactttg

SEQ ID NO: 288278 - DNA, 20 bp, Artificial Sequence
  Description of Artificial Sequence: Synthetic oligonucleotide
  Target: LAMA2; (-) strand; PAM type: YTN; PAM sequence: CTG
tgtacaggctgtgttgtggc

SEQ ID NO: 288279 - DNA, 20 bp, Artificial Sequence
  Description of Artificial Sequence: Synthetic oligonucleotide
  Target: LAMA2; (-) strand; PAM type: YTN; PAM sequence: CTG
aaggcaggcatatgggtgaa

SEQ ID NO: 288280 - DNA, 20 bp, Artificial Sequence
  Description of Artificial Sequence: Synthetic oligonucleotide
  Target: LAMA2; (-) strand; PAM type: YTN; PAM sequence: CTA
aatcaagctgaaggcaggca

SEQ ID NO: 288281 - DNA, 20 bp, Artificial Sequence
  Description of Artificial Sequence: Synthetic oligonucleotide
  Target: LAMA2; (-) strand; PAM type: YTN; PAM sequence: TTG
gctaaatcaagctgaaggca

SEQ ID NO: 288282 - DNA, 20 bp, Artificial Sequence
  Description of Artificial Sequence: Synthetic oligonucleotide
  Target: LAMA2; (-) strand; PAM type: YTN; PAM sequence: CTT
ggctaaatcaagctgaaggc

SEQ ID NO: 288283 - DNA, 20 bp, Artificial Sequence
  Description of Artificial Sequence: Synthetic oligonucleotide
  Target: LAMA2; (-) strand; PAM type: YTN; PAM sequence: TTC
cgagatagagtgcttggcta

SEQ ID NO: 288284 - DNA, 20 bp, Artificial Sequence
  Description of Artificial Sequence: Synthetic oligonucleotide
  Target: LAMA2; (-) strand; PAM type: YTN; PAM sequence: TTT
ccgagatagagtgcttggct

SEQ ID NO: 288285 - DNA, 20 bp, Artificial Sequence
  Description of Artificial Sequence: Synthetic oligonucleotide
  Target: LAMA2; (-) strand; PAM type: YTN; PAM sequence: TTA
gcgatggggcaaaaatgcac

SEQ ID NO: 288286 - DNA, 20 bp, Artificial Sequence
  Description of Artificial Sequence: Synthetic oligonucleotide
  Target: LAMA2; (-) strand; PAM type: YTN; PAM sequence: CTG
ccaagtgttagcgatggggc

SEQ ID NO: 288287 - DNA, 20 bp, Artificial Sequence
  Description of Artificial Sequence: Synthetic oligonucleotide
  Target: LAMA2; (-) strand; PAM type: YTN; PAM sequence: CTG
acactgccaagtgttagcga

SEQ ID NO: 288288 - DNA, 20 bp, Artificial Sequence
  Description of Artificial Sequence: Synthetic oligonucleotide
  Target: LAMA2; (-) strand; PAM type: YTN; PAM sequence: TTG
atgacaaggggtataagaaa

SEQ ID NO: 288289 - DNA, 20 bp, Artificial Sequence
  Description of Artificial Sequence: Synthetic oligonucleotide
  Target: LAMA2; (-) strand; PAM type: YTN; PAM sequence: TTT
gatgacaaggggtataagaa

SEQ ID NO: 288290 - DNA, 20 bp, Artificial Sequence
  Description of Artificial Sequence: Synthetic oligonucleotide
  Target: LAMA2; (-) strand; PAM type: YTN; PAM sequence: TTA
aaaggaaaatgtgaatatag

SEQ ID NO: 288291 - DNA, 20 bp, Artificial Sequence
  Description of Artificial Sequence: Synthetic oligonucleotide
  Target: LAMA2; (-) strand; PAM type: YTN; PAM sequence: CTT
aaaaggaaaatgtgaatata

SEQ ID NO: 288292 - DNA, 20 bp, Artificial Sequence
  Description of Artificial Sequence: Synthetic oligonucleotide
  Target: LAMA2; (-) strand; PAM type: YTN; PAM sequence: TTC
accttaaaaggaaaatgtga

SEQ ID NO: 288293 - DNA, 20 bp, Artificial Sequence
  Description of Artificial Sequence: Synthetic oligonucleotide
  Target: LAMA2; (-) strand; PAM type: YTN; PAM sequence: CTT
caccttaaaaggaaaatgtg

SEQ ID NO: 288294 - DNA, 20 bp, Artificial Sequence
  Description of Artificial Sequence: Synthetic oligonucleotide
  Target: LAMA2; (-) strand; PAM type: YTN; PAM sequence: TTC
agtatacatatcacttcacc

SEQ ID NO: 288295 - DNA, 20 bp, Artificial Sequence
  Description of Artificial Sequence: Synthetic oligonucleotide
  Target: LAMA2; (-) strand; PAM type: YTN; PAM sequence: TTT
cagtatacatatcacttcac

SEQ ID NO: 288296 - DNA, 20 bp, Artificial Sequence
  Description of Artificial Sequence: Synthetic oligonucleotide
  Target: LAMA2; (-) strand; PAM type: YTN; PAM sequence: TTA
tttcagtatacatatcactt

SEQ ID NO: 288297 - DNA, 20 bp, Artificial Sequence
  Description of Artificial Sequence: Synthetic oligonucleotide
  Target: LAMA2; (-) strand; PAM type: YTN; PAM sequence: TTA
aaaaatataggattatttca

SEQ ID NO: 288298 - DNA, 20 bp, Artificial Sequence
  Description of Artificial Sequence: Synthetic oligonucleotide
  Target: LAMA2; (-) strand; PAM type: YTN; PAM sequence: CTA
aaacattaaaaaatatagga

SEQ ID NO: 288299 - DNA, 20 bp, Artificial Sequence
  Description of Artificial Sequence: Synthetic oligonucleotide
  Target: LAMA2; (-) strand; PAM type: YTN; PAM sequence: CTC
aaaaagatacactaaaacat

SEQ ID NO: 288300 - DNA, 20 bp, Artificial Sequence
  Description of Artificial Sequence: Synthetic oligonucleotide
  Target: LAMA2; (-) strand; PAM type: YTN; PAM sequence: TTA
gcacagctcaaaaagataca

SEQ ID NO: 288301 - DNA, 20 bp, Artificial Sequence
  Description of Artificial Sequence: Synthetic oligonucleotide
  Target: LAMA2; (-) strand; PAM type: YTN; PAM sequence: CTG
atcaaagtattagcacagct

SEQ ID NO: 288302 - DNA, 20 bp, Artificial Sequence
  Description of Artificial Sequence: Synthetic oligonucleotide
  Target: LAMA2; (-) strand; PAM type: YTN; PAM sequence: CTC
acaaaacaataacaatcctg

SEQ ID NO: 288303 - DNA, 20 bp, Artificial Sequence
  Description of Artificial Sequence: Synthetic oligonucleotide
  Target: LAMA2; (-) strand; PAM type: YTN; PAM sequence: TTA
gagaactcacaaaacaataa

SEQ ID NO: 288304 - DNA, 20 bp, Artificial Sequence
  Description of Artificial Sequence: Synthetic oligonucleotide
  Target: LAMA2; (-) strand; PAM type: YTN; PAM sequence: TTA
cacaagtgtgtaattagaga

SEQ ID NO: 288305 - DNA, 20 bp, Artificial Sequence
  Description of Artificial Sequence: Synthetic oligonucleotide
  Target: LAMA2; (-) strand; PAM type: YTN; PAM sequence: CTT
acacaagtgtgtaattagag

SEQ ID NO: 288306 - DNA, 20 bp, Artificial Sequence
  Description of Artificial Sequence: Synthetic oligonucleotide
  Target: LAMA2; (-) strand; PAM type: YTN; PAM sequence: CTA
aaaacttacacaagtgtgta

SEQ ID NO: 288307 - DNA, 20 bp, Artificial Sequence
  Description of Artificial Sequence: Synthetic oligonucleotide
  Target: LAMA2; (-) strand; PAM type: YTN; PAM sequence: CTG
ctaaaaacttacacaagtgt

SEQ ID NO: 288308 - DNA, 20 bp, Artificial Sequence
  Description of Artificial Sequence: Synthetic oligonucleotide
  Target: LAMA2; (-) strand; PAM type: YTN; PAM sequence: CTG
acctgctaaaaacttacaca

SEQ ID NO: 288309 - DNA, 20 bp, Artificial Sequence
  Description of Artificial Sequence: Synthetic oligonucleotide
  Target: LAMA2; (-) strand; PAM type: YTN; PAM sequence: TTG
gggctgacctgctaaaaact

SEQ ID NO: 288310 - DNA, 20 bp, Artificial Sequence
  Description of Artificial Sequence: Synthetic oligonucleotide
  Target: LAMA2; (-) strand; PAM type: YTN; PAM sequence: TTA
tgggaaaatagggttggggc

SEQ ID NO: 288311 - DNA, 20 bp, Artificial Sequence
  Description of Artificial Sequence: Synthetic oligonucleotide
  Target: LAMA2; (-) strand; PAM type: YTN; PAM sequence: CTT
atgggaaaatagggttgggg

SEQ ID NO: 288312 - DNA, 20 bp, Artificial Sequence
  Description of Artificial Sequence: Synthetic oligonucleotide
  Target: LAMA2; (-) strand; PAM type: YTN; PAM sequence: TTA
caaataacagggcttatggg

SEQ ID NO: 288313 - DNA, 20 bp, Artificial Sequence
  Description of Artificial Sequence: Synthetic oligonucleotide
  Target: LAMA2; (-) strand; PAM type: YTN; PAM sequence: CTT
acaaataacagggcttatgg

SEQ ID NO: 288314 - DNA, 20 bp, Artificial Sequence
  Description of Artificial Sequence: Synthetic oligonucleotide
  Target: LAMA2; (-) strand; PAM type: YTN; PAM sequence: TTC
ttacaaataacagggcttat

SEQ ID NO: 288315 - DNA, 20 bp, Artificial Sequence
  Description of Artificial Sequence: Synthetic oligonucleotide
  Target: LAMA2; (-) strand; PAM type: YTN; PAM sequence: TTA
ttcttacaaataacagggct

SEQ ID NO: 288316 - DNA, 20 bp, Artificial Sequence
  Description of Artificial Sequence: Synthetic oligonucleotide
  Target: LAMA2; (-) strand; PAM type: YTN; PAM sequence: CTA
taaaaattattcttacaaat

SEQ ID NO: 288317 - DNA, 20 bp, Artificial Sequence
  Description of Artificial Sequence: Synthetic oligonucleotide
  Target: LAMA2; (-) strand; PAM type: YTN; PAM sequence: TTC
tataaaaattattcttacaa

SEQ ID NO: 288318 - DNA, 20 bp, Artificial Sequence
  Description of Artificial Sequence: Synthetic oligonucleotide
  Target: LAMA2; (-) strand; PAM type: YTN; PAM sequence: CTG
aaagcaacaaataaacaaac

SEQ ID NO: 288319 - DNA, 20 bp, Artificial Sequence
  Description of Artificial Sequence: Synthetic oligonucleotide
  Target: LAMA2; (-) strand; PAM type: YTN; PAM sequence: TTC
ctgaaagcaacaaataaaca

SEQ ID NO: 288320 - DNA, 20 bp, Artificial Sequence
  Description of Artificial Sequence: Synthetic oligonucleotide
  Target: LAMA2; (-) strand; PAM type: YTN; PAM sequence: TTT
cctgaaagcaacaaataaac

SEQ ID NO: 288321 - DNA, 20 bp, Artificial Sequence
  Description of Artificial Sequence: Synthetic oligonucleotide
  Target: LAMA2; (-) strand; PAM type: YTN; PAM sequence: TTT
tcctgaaagcaacaaataaa

SEQ ID NO: 288322 - DNA, 20 bp, Artificial Sequence
  Description of Artificial Sequence: Synthetic oligonucleotide
  Target: LAMA2; (-) strand; PAM type: YTN; PAM sequence: TTC
aaatgtgataagtgttttcc

SEQ ID NO: 288323 - DNA, 20 bp, Artificial Sequence
  Description of Artificial Sequence: Synthetic oligonucleotide
  Target: LAMA2; (-) strand; PAM type: YTN; PAM sequence: TTA
tgttcaaatgtgataagtgt

SEQ ID NO: 288324 - DNA, 20 bp, Artificial Sequence
  Description of Artificial Sequence: Synthetic oligonucleotide
  Target: LAMA2; (-) strand; PAM type: YTN; PAM sequence: TTT
atgttcaaatgtgataagtg

SEQ ID NO: 288325 - DNA, 20 bp, Artificial Sequence
  Description of Artificial Sequence: Synthetic oligonucleotide
  Target: LAMA2; (-) strand; PAM type: YTN; PAM sequence: CTT
tatgttcaaatgtgataagt

SEQ ID NO: 288326 - DNA, 20 bp, Artificial Sequence
  Description of Artificial Sequence: Synthetic oligonucleotide
  Target: LAMA2; (-) strand; PAM type: YTN; PAM sequence: CTC
tttatgttcaaatgtgataa

SEQ ID NO: 288327 - DNA, 20 bp, Artificial Sequence
  Description of Artificial Sequence: Synthetic oligonucleotide
  Target: LAMA2; (-) strand; PAM type: YTN; PAM sequence: TTG
ctctttatgttcaaatgtga

SEQ ID NO: 288328 - DNA, 20 bp, Artificial Sequence
  Description of Artificial Sequence: Synthetic oligonucleotide
  Target: LAMA2; (-) strand; PAM type: YTN; PAM sequence: TTA
gtaggaatgattgctcttta

SEQ ID NO: 288329 - DNA, 20 bp, Artificial Sequence
  Description of Artificial Sequence: Synthetic oligonucleotide
  Target: LAMA2; (-) strand; PAM type: YTN; PAM sequence: TTT
agtaggaatgattgctcttt

SEQ ID NO: 288330 - DNA, 20 bp, Artificial Sequence
  Description of Artificial Sequence: Synthetic oligonucleotide
  Target: LAMA2; (-) strand; PAM type: YTN; PAM sequence: CTT
tagtaggaatgattgctctt

SEQ ID NO: 288331 - DNA, 20 bp, Artificial Sequence
  Description of Artificial Sequence: Synthetic oligonucleotide
  Target: LAMA2; (-) strand; PAM type: YTN; PAM sequence: CTC
tttagtaggaatgattgctc

SEQ ID NO: 288332 - DNA, 20 bp, Artificial Sequence
  Description of Artificial Sequence: Synthetic oligonucleotide
  Target: LAMA2; (-) strand; PAM type: YTN; PAM sequence: CTG
ctctttagtaggaatgattg

SEQ ID NO: 288333 - DNA, 20 bp, Artificial Sequence
  Description of Artificial Sequence: Synthetic oligonucleotide
  Target: LAMA2; (-) strand; PAM type: YTN; PAM sequence: CTC
ctgctctttagtaggaatga

SEQ ID NO: 288334 - DNA, 20 bp, Artificial Sequence
  Description of Artificial Sequence: Synthetic oligonucleotide
  Target: LAMA2; (-) strand; PAM type: YTN; PAM sequence: CTC
catgaaatcactcctgctct

SEQ ID NO: 288335 - DNA, 20 bp, Artificial Sequence
  Description of Artificial Sequence: Synthetic oligonucleotide
  Target: LAMA2; (-) strand; PAM type: YTN; PAM sequence: TTC
tccatgaaatcactcctgct

SEQ ID NO: 288336 - DNA, 20 bp, Artificial Sequence
  Description of Artificial Sequence: Synthetic oligonucleotide
  Target: LAMA2; (-) strand; PAM type: YTN; PAM sequence: CTT
ctccatgaaatcactcctgc

SEQ ID NO: 288337 - DNA, 20 bp, Artificial Sequence
  Description of Artificial Sequence: Synthetic oligonucleotide
  Target: LAMA2; (-) strand; PAM type: YTN; PAM sequence: TTA
catcttctccatgaaatcac

SEQ ID NO: 288338 - DNA, 20 bp, Artificial Sequence
  Description of Artificial Sequence: Synthetic oligonucleotide
  Target: LAMA2; (-) strand; PAM type: YTN; PAM sequence: TTT
acatcttctccatgaaatca

SEQ ID NO: 288339 - DNA, 20 bp, Artificial Sequence
  Description of Artificial Sequence: Synthetic oligonucleotide
  Target: LAMA2; (-) strand; PAM type: YTN; PAM sequence: TTT
tacatcttctccatgaaatc

SEQ ID NO: 288340 - DNA, 20 bp, Artificial Sequence
  Description of Artificial Sequence: Synthetic oligonucleotide
  Target: LAMA2; (-) strand; PAM type: YTN; PAM sequence: CTT
ttacatcttctccatgaaat

SEQ ID NO: 288341 - DNA, 20 bp, Artificial Sequence
  Description of Artificial Sequence: Synthetic oligonucleotide
  Target: LAMA2; (-) strand; PAM type: YTN; PAM sequence: CTC
acttttacatcttctccatg

SEQ ID NO: 288342 - DNA, 20 bp, Artificial Sequence
  Description of Artificial Sequence: Synthetic oligonucleotide
  Target: LAMA2; (-) strand; PAM type: YTN; PAM sequence: TTA
gcctcacttttacatcttct

SEQ ID NO: 288343 - DNA, 20 bp, Artificial Sequence
  Description of Artificial Sequence: Synthetic oligonucleotide
  Target: LAMA2; (-) strand; PAM type: YTN; PAM sequence: TTT
agcctcacttttacatcttc

SEQ ID NO: 288344 - DNA, 20 bp, Artificial Sequence
  Description of Artificial Sequence: Synthetic oligonucleotide
  Target: LAMA2; (-) strand; PAM type: YTN; PAM sequence: TTT
tagcctcacttttacatctt

SEQ ID NO: 288345 - DNA, 20 bp, Artificial Sequence
  Description of Artificial Sequence: Synthetic oligonucleotide
  Target: LAMA2; (-) strand; PAM type: YTN; PAM sequence: CTT
ttagcctcacttttacatct

SEQ ID NO: 288346 - DNA, 20 bp, Artificial Sequence
  Description of Artificial Sequence: Synthetic oligonucleotide
  Target: LAMA2; (-) strand; PAM type: YTN; PAM sequence: CTC
ttttagcctcacttttacat

SEQ ID NO: 288347 - DNA, 20 bp, Artificial Sequence
  Description of Artificial Sequence: Synthetic oligonucleotide
  Target: LAMA2; (-) strand; PAM type: YTN; PAM sequence: CTA
cctcttttagcctcactttt

SEQ ID NO: 288348 - DNA, 20 bp, Artificial Sequence
  Description of Artificial Sequence: Synthetic oligonucleotide
  Target: LAMA2; (-) strand; PAM type: YTN; PAM sequence: TTA
gtctacctcttttagcctca

SEQ ID NO: 288349 - DNA, 20 bp, Artificial Sequence
  Description of Artificial Sequence: Synthetic oligonucleotide
  Target: LAMA2; (-) strand; PAM type: YTN; PAM sequence: CTT
agtctacctcttttagcctc

SEQ ID NO: 288350 - DNA, 20 bp, Artificial Sequence
  Description of Artificial Sequence: Synthetic oligonucleotide
  Target: LAMA2; (-) strand; PAM type: YTN; PAM sequence: TTC
ttagtctacctcttttagcc

SEQ ID NO: 288351 - DNA, 20 bp, Artificial Sequence
  Description of Artificial Sequence: Synthetic oligonucleotide
  Target: LAMA2; (-) strand; PAM type: YTN; PAM sequence: TTT
cttagtctacctcttttagc

SEQ ID NO: 288352 - DNA, 20 bp, Artificial Sequence
  Description of Artificial Sequence: Synthetic oligonucleotide
  Target: LAMA2; (-) strand; PAM type: YTN; PAM sequence: TTT
tcttagtctacctcttttag

SEQ ID NO: 288353 - DNA, 20 bp, Artificial Sequence
  Description of Artificial Sequence: Synthetic oligonucleotide
  Target: LAMA2; (-) strand; PAM type: YTN; PAM sequence: TTA
tgacattttcttagtctacc

SEQ ID NO: 288354 - DNA, 20 bp, Artificial Sequence
  Description of Artificial Sequence: Synthetic oligonucleotide
  Target: LAMA2; (-) strand; PAM type: YTN; PAM sequence: TTT
atgacattttcttagtctac

SEQ ID NO: 288355 - DNA, 20 bp, Artificial Sequence
  Description of Artificial Sequence: Synthetic oligonucleotide
  Target: LAMA2; (-) strand; PAM type: YTN; PAM sequence: CTT
tatgacattttcttagtcta

SEQ ID NO: 288356 - DNA, 20 bp, Artificial Sequence
  Description of Artificial Sequence: Synthetic oligonucleotide
  Target: LAMA2; (-) strand; PAM type: YTN; PAM sequence: CTA
aggtctttatgacattttct

SEQ ID NO: 288357 - DNA, 20 bp, Artificial Sequence
  Description of Artificial Sequence: Synthetic oligonucleotide
  Target: LAMA2; (-) strand; PAM type: YTN; PAM sequence: TTC
taaggtctttatgacatttt

SEQ ID NO: 288358 - DNA, 20 bp, Artificial Sequence
  Description of Artificial Sequence: Synthetic oligonucleotide
  Target: LAMA2; (-) strand; PAM type: YTN; PAM sequence: CTG
acattctaaggtctttatga

SEQ ID NO: 288359 - DNA, 20 bp, Artificial Sequence
  Description of Artificial Sequence: Synthetic oligonucleotide
  Target: LAMA2; (-) strand; PAM type: YTN; PAM sequence: CTA
aaactgacattctaaggtct

SEQ ID NO: 288360 - DNA, 20 bp, Artificial Sequence
  Description of Artificial Sequence: Synthetic oligonucleotide
  Target: LAMA2; (-) strand; PAM type: YTN; PAM sequence: TTC
taaaactgacattctaaggt

SEQ ID NO: 288361 - DNA, 20 bp, Artificial Sequence
  Description of Artificial Sequence: Synthetic oligonucleotide
  Target: LAMA2; (-) strand; PAM type: YTN; PAM sequence: TTT
ctaaaactgacattctaagg

SEQ ID NO: 288362 - DNA, 20 bp, Artificial Sequence
  Description of Artificial Sequence: Synthetic oligonucleotide
  Target: LAMA2; (-) strand; PAM type: YTN; PAM sequence: TTG
aataaatgcaaatttctaaa

SEQ ID NO: 288363 - DNA, 20 bp, Artificial Sequence
  Description of Artificial Sequence: Synthetic oligonucleotide
  Target: LAMA2; (-) strand; PAM type: YTN; PAM sequence: CTA
ttgaataaatgcaaatttct

SEQ ID NO: 288364 - DNA, 20 bp, Artificial Sequence
  Description of Artificial Sequence: Synthetic oligonucleotide
  Target: LAMA2; (-) strand; PAM type: YTN; PAM sequence: CTG
actattgaataaatgcaaat

SEQ ID NO: 288365 - DNA, 20 bp, Artificial Sequence
  Description of Artificial Sequence: Synthetic oligonucleotide
  Target: LAMA2; (-) strand; PAM type: YTN; PAM sequence: CTA
ctgactattgaataaatgca

SEQ ID NO: 288366 - DNA, 20 bp, Artificial Sequence
  Description of Artificial Sequence: Synthetic oligonucleotide
  Target: LAMA2; (-) strand; PAM type: YTN; PAM sequence: TTC
tactgactattgaataaatg

SEQ ID NO: 288367 - DNA, 20 bp, Artificial Sequence
  Description of Artificial Sequence: Synthetic oligonucleotide
  Target: LAMA2; (-) strand; PAM type: YTN; PAM sequence: CTT
ctactgactattgaataaat

SEQ ID NO: 288368 - DNA, 20 bp, Artificial Sequence
  Description of Artificial Sequence: Synthetic oligonucleotide
  Target: LAMA2; (-) strand; PAM type: YTN; PAM sequence: CTC
ttctactgactattgaataa

SEQ ID NO: 288369 - DNA, 20 bp, Artificial Sequence
  Description of Artificial Sequence: Synthetic oligonucleotide
  Target: LAMA2; (-) strand; PAM type: YTN; PAM sequence: TTA
tctcttctactgactattga

SEQ ID NO: 288370 - DNA, 20 bp, Artificial Sequence
  Description of Artificial Sequence: Synthetic oligonucleotide
  Target: LAMA2; (-) strand; PAM type: YTN; PAM sequence: TTT
atctcttctactgactattg

SEQ ID NO: 288371 - DNA, 20 bp, Artificial Sequence
  Description of Artificial Sequence: Synthetic oligonucleotide
  Target: LAMA2; (-) strand; PAM type: YTN; PAM sequence: TTT
tatctcttctactgactatt

SEQ ID NO: 288372 - DNA, 20 bp, Artificial Sequence
  Description of Artificial Sequence: Synthetic oligonucleotide
  Target: LAMA2; (-) strand; PAM type: YTN; PAM sequence: CTA
aagcataacaacaattttat

SEQ ID NO: 288373 - DNA, 20 bp, Artificial Sequence
  Description of Artificial Sequence: Synthetic oligonucleotide
  Target: LAMA2; (-) strand; PAM type: YTN; PAM sequence: TTC
taaagcataacaacaatttt

SEQ ID NO: 288374 - DNA, 20 bp, Artificial Sequence
  Description of Artificial Sequence: Synthetic oligonucleotide
  Target: LAMA2; (-) strand; PAM type: YTN; PAM sequence: TTT
ctaaagcataacaacaattt

SEQ ID NO: 288375 - DNA, 20 bp, Artificial Sequence
  Description of Artificial Sequence: Synthetic oligonucleotide
  Target: LAMA2; (-) strand; PAM type: YTN; PAM sequence: CTT
tctaaagcataacaacaatt

SEQ ID NO: 288376 - DNA, 20 bp, Artificial Sequence
  Description of Artificial Sequence: Synthetic oligonucleotide
  Target: LAMA2; (-) strand; PAM type: YTN; PAM sequence: CTC
tttctaaagcataacaacaa

SEQ ID NO: 288377 - DNA, 20 bp, Artificial Sequence
  Description of Artificial Sequence: Synthetic oligonucleotide
  Target: LAMA2; (-) strand; PAM type: YTN; PAM sequence: TTA
ctctttctaaagcataacaa

SEQ ID NO: 288378 - DNA, 20 bp, Artificial Sequence
  Description of Artificial Sequence: Synthetic oligonucleotide
  Target: LAMA2; (-) strand; PAM type: YTN; PAM sequence: TTG
acagattactctttctaaag

SEQ ID NO: 288379 - DNA, 20 bp, Artificial Sequence
  Description of Artificial Sequence: Synthetic oligonucleotide
  Target: LAMA2; (-) strand; PAM type: YTN; PAM sequence: TTT
gacagattactctttctaaa

SEQ ID NO: 288380 - DNA, 20 bp, Artificial Sequence
  Description of Artificial Sequence: Synthetic oligonucleotide
  Target: LAMA2; (-) strand; PAM type: YTN; PAM sequence: CTT
tgacagattactctttctaa

SEQ ID NO: 288381 - DNA, 20 bp, Artificial Sequence
  Description of Artificial Sequence: Synthetic oligonucleotide
  Target: LAMA2; (-) strand; PAM type: YTN; PAM sequence: TTA
aaaatatctttgacagatta

SEQ ID NO: 288382 - DNA, 20 bp, Artificial Sequence
  Description of Artificial Sequence: Synthetic oligonucleotide
  Target: LAMA2; (-) strand; PAM type: YTN; PAM sequence: TTT
aaaaatatctttgacagatt

SEQ ID NO: 288383 - DNA, 20 bp, Artificial Sequence
  Description of Artificial Sequence: Synthetic oligonucleotide
  Target: LAMA2; (-) strand; PAM type: YTN; PAM sequence: TTT
taaaaatatctttgacagat

SEQ ID NO: 288384 - DNA, 20 bp, Artificial Sequence
  Description of Artificial Sequence: Synthetic oligonucleotide
  Target: LAMA2; (-) strand; PAM type: YTN; PAM sequence: CTT
ttaaaaatatctttgacaga

SEQ ID NO: 288385 - DNA, 20 bp, Artificial Sequence
  Description of Artificial Sequence: Synthetic oligonucleotide
  Target: LAMA2; (-) strand; PAM type: YTN; PAM sequence: TTA
gaagcatgagaaaaataaga

SEQ ID NO: 288386 - DNA, 20 bp, Artificial Sequence
  Description of Artificial Sequence: Synthetic oligonucleotide
  Target: LAMA2; (-) strand; PAM type: YTN; PAM sequence: TTT
agaagcatgagaaaaataag

SEQ ID NO: 288387 - DNA, 20 bp, Artificial Sequence
  Description of Artificial Sequence: Synthetic oligonucleotide
  Target: LAMA2; (-) strand; PAM type: YTN; PAM sequence: TTT
tagaagcatgagaaaaataa

SEQ ID NO: 288388 - DNA, 20 bp, Artificial Sequence
  Description of Artificial Sequence: Synthetic oligonucleotide
  Target: LAMA2; (-) strand; PAM type: YTN; PAM sequence: TTA
atgtgaattttagaagcatg

SEQ ID NO: 288389 - DNA, 20 bp, Artificial Sequence
  Description of Artificial Sequence: Synthetic oligonucleotide
  Target: LAMA2; (-) strand; PAM type: YTN; PAM sequence: CTT
aatgtgaattttagaagcat

SEQ ID NO: 288390 - DNA, 20 bp, Artificial Sequence
  Description of Artificial Sequence: Synthetic oligonucleotide
  Target: LAMA2; (-) strand; PAM type: YTN; PAM sequence: TTA
atcttaatgtgaattttaga

SEQ ID NO: 288391 - DNA, 20 bp, Artificial Sequence
  Description of Artificial Sequence: Synthetic oligonucleotide
  Target: LAMA2; (-) strand; PAM type: YTN; PAM sequence: TTT
aatcttaatgtgaattttag

SEQ ID NO: 288392 - DNA, 20 bp, Artificial Sequence
  Description of Artificial Sequence: Synthetic oligonucleotide
  Target: LAMA2; (-) strand; PAM type: YTN; PAM sequence: CTT
taatcttaatgtgaatttta

SEQ ID NO: 288393 - DNA, 20 bp, Artificial Sequence
  Description of Artificial Sequence: Synthetic oligonucleotide
  Target: LAMA2; (-) strand; PAM type: YTN; PAM sequence: TTA
ctttaatcttaatgtgaatt

SEQ ID NO: 288394 - DNA, 20 bp, Artificial Sequence
  Description of Artificial Sequence: Synthetic oligonucleotide
  Target: LAMA2; (-) strand; PAM type: YTN; PAM sequence: CTT
actttaatcttaatgtgaat

SEQ ID NO: 288395 - DNA, 20 bp, Artificial Sequence
  Description of Artificial Sequence: Synthetic oligonucleotide
  Target: LAMA2; (-) strand; PAM type: YTN; PAM sequence: TTC
cccttactttaatcttaatg

SEQ ID NO: 288396 - DNA, 20 bp, Artificial Sequence
  Description of Artificial Sequence: Synthetic oligonucleotide
  Target: LAMA2; (-) strand; PAM type: YTN; PAM sequence: TTT
ccccttactttaatcttaat

SEQ ID NO: 288397 - DNA, 20 bp, Artificial Sequence
  Description of Artificial Sequence: Synthetic oligonucleotide
  Target: LAMA2; (-) strand; PAM type: YTN; PAM sequence: TTT
tccccttactttaatcttaa

SEQ ID NO: 288398 - DNA, 20 bp, Artificial Sequence
  Description of Artificial Sequence: Synthetic oligonucleotide
  Target: LAMA2; (-) strand; PAM type: YTN; PAM sequence: TTT
ttccccttactttaatctta

SEQ ID NO: 288399 - DNA, 20 bp, Artificial Sequence
  Description of Artificial Sequence: Synthetic oligonucleotide
  Target: LAMA2; (-) strand; PAM type: YTN; PAM sequence: TTG
cagcagatttttccccttac

SEQ ID NO: 288400 - DNA, 20 bp, Artificial Sequence
  Description of Artificial Sequence: Synthetic oligonucleotide
  Target: LAMA2; (-) strand; PAM type: YTN; PAM sequence: CTT
gcagcagatttttcccctta

SEQ ID NO: 288401 - DNA, 20 bp, Artificial Sequence
  Description of Artificial Sequence: Synthetic oligonucleotide
  Target: LAMA2; (-) strand; PAM type: YTN; PAM sequence: TTA
cttgcagcagatttttcccc

SEQ ID NO: 288402 - DNA, 20 bp, Artificial Sequence
  Description of Artificial Sequence: Synthetic oligonucleotide
  Target: LAMA2; (-) strand; PAM type: YTN; PAM sequence: TTT
acttgcagcagatttttccc

SEQ ID NO: 288403 - DNA, 20 bp, Artificial Sequence
  Description of Artificial Sequence: Synthetic oligonucleotide
  Target: LAMA2; (-) strand; PAM type: YTN; PAM sequence: TTT
tacttgcagcagatttttcc

SEQ ID NO: 288404 - DNA, 20 bp, Artificial Sequence
  Description of Artificial Sequence: Synthetic oligonucleotide
  Target: LAMA2; (-) strand; PAM type: YTN; PAM sequence: CTA
aattttacttgcagcagatt

SEQ ID NO: 288405 - DNA, 20 bp, Artificial Sequence
  Description of Artificial Sequence: Synthetic oligonucleotide
  Target: LAMA2; (-) strand; PAM type: YTN; PAM sequence: CTA
actaaattttacttgcagca

SEQ ID NO: 288406 - DNA, 20 bp, Artificial Sequence
  Description of Artificial Sequence: Synthetic oligonucleotide
  Target: LAMA2; (-) strand; PAM type: YTN; PAM sequence: CTC
agctaactaaattttacttg

SEQ ID NO: 288407 - DNA, 20 bp, Artificial Sequence
  Description of Artificial Sequence: Synthetic oligonucleotide
  Target: LAMA2; (-) strand; PAM type: YTN; PAM sequence: TTC
aatgctcagctaactaaatt

SEQ ID NO: 288408 - DNA, 20 bp, Artificial Sequence
  Description of Artificial Sequence: Synthetic oligonucleotide
  Target: LAMA2; (-) strand; PAM type: YTN; PAM sequence: TTT
caatgctcagctaactaaat

SEQ ID NO: 288409 - DNA, 20 bp, Artificial Sequence
  Description of Artificial Sequence: Synthetic oligonucleotide
  Target: LAMA2; (-) strand; PAM type: YTN; PAM sequence: TTA
aaatatcaccatttcaatgc

SEQ ID NO: 288410 - DNA, 20 bp, Artificial Sequence
  Description of Artificial Sequence: Synthetic oligonucleotide
  Target: LAMA2; (-) strand; PAM type: YTN; PAM sequence: CTA
ttaaaatatcaccatttcaa

SEQ ID NO: 288411 - DNA, 20 bp, Artificial Sequence
  Description of Artificial Sequence: Synthetic oligonucleotide
  Target: LAMA2; (-) strand; PAM type: YTN; PAM sequence: CTA
agtctattaaaatatcacca

SEQ ID NO: 288412 - DNA, 20 bp, Artificial Sequence
  Description of Artificial Sequence: Synthetic oligonucleotide
  Target: LAMA2; (-) strand; PAM type: YTN; PAM sequence: TTG
gggctaagtctattaaaata

SEQ ID NO: 288413 - DNA, 20 bp, Artificial Sequence
  Description of Artificial Sequence: Synthetic oligonucleotide
  Target: LAMA2; (-) strand; PAM type: YTN; PAM sequence: CTA
ggtgaatattggggctaagt

SEQ ID NO: 288414 - DNA, 20 bp, Artificial Sequence
  Description of Artificial Sequence: Synthetic oligonucleotide
  Target: LAMA2; (-) strand; PAM type: YTN; PAM sequence: TTC
taggtgaatattggggctaa

SEQ ID NO: 288415 - DNA, 20 bp, Artificial Sequence
  Description of Artificial Sequence: Synthetic oligonucleotide
  Target: LAMA2; (-) strand; PAM type: YTN; PAM sequence: CTA
cgttctaggtgaatattggg

SEQ ID NO: 288416 - DNA, 20 bp, Artificial Sequence
  Description of Artificial Sequence: Synthetic oligonucleotide
  Target: LAMA2; (-) strand; PAM type: YTN; PAM sequence: TTG
gagcagctacgttctaggtg

SEQ ID NO: 288417 - DNA, 20 bp, Artificial Sequence
  Description of Artificial Sequence: Synthetic oligonucleotide
  Target: LAMA2; (-) strand; PAM type: YTN; PAM sequence: TTT
ggagcagctacgttctaggt

SEQ ID NO: 288418 - DNA, 20 bp, Artificial Sequence
  Description of Artificial Sequence: Synthetic oligonucleotide
  Target: LAMA2; (-) strand; PAM type: YTN; PAM sequence: TTT
tggagcagctacgttctagg

SEQ ID NO: 288419 - DNA, 20 bp, Artificial Sequence
  Description of Artificial Sequence: Synthetic oligonucleotide
  Target: LAMA2; (-) strand; PAM type: YTN; PAM sequence: CTA
ttttggagcagctacgttct

SEQ ID NO: 288420 - DNA, 20 bp, Artificial Sequence
  Description of Artificial Sequence: Synthetic oligonucleotide
  Target: LAMA2; (-) strand; PAM type: YTN; PAM sequence: TTA
tgctattttggagcagctac

SEQ ID NO: 288421 - DNA, 20 bp, Artificial Sequence
  Description of Artificial Sequence: Synthetic oligonucleotide
  Target: LAMA2; (-) strand; PAM type: YTN; PAM sequence: TTA
attatgctattttggagcag

SEQ ID NO: 288422 - DNA, 20 bp, Artificial Sequence
  Description of Artificial Sequence: Synthetic oligonucleotide
  Target: LAMA2; (-) strand; PAM type: YTN; PAM sequence: TTA
gtatagattaattatgctat

SEQ ID NO: 288423 - DNA, 20 bp, Artificial Sequence
  Description of Artificial Sequence: Synthetic oligonucleotide
  Target: LAMA2; (-) strand; PAM type: YTN; PAM sequence: CTG
gtaaagttagtatagattaa

SEQ ID NO: 288424 - DNA, 20 bp, Artificial Sequence
  Description of Artificial Sequence: Synthetic oligonucleotide
  Target: LAMA2; (-) strand; PAM type: YTN; PAM sequence: TTG
atgtctggtaaagttagtat

SEQ ID NO: 288425 - DNA, 20 bp, Artificial Sequence
  Description of Artificial Sequence: Synthetic oligonucleotide
  Target: LAMA2; (-) strand; PAM type: YTN; PAM sequence: CTT
gatgtctggtaaagttagta

SEQ ID NO: 288426 - DNA, 20 bp, Artificial Sequence
  Description of Artificial Sequence: Synthetic oligonucleotide
  Target: LAMA2; (-) strand; PAM type: YTN; PAM sequence: TTG
aaccttgatgtctggtaaag

SEQ ID NO: 288427 - DNA, 20 bp, Artificial Sequence
  Description of Artificial Sequence: Synthetic oligonucleotide
  Target: LAMA2; (-) strand; PAM type: YTN; PAM sequence: TTT
gaaccttgatgtctggtaaa

SEQ ID NO: 288428 - DNA, 20 bp, Artificial Sequence
  Description of Artificial Sequence: Synthetic oligonucleotide
  Target: LAMA2; (-) strand; PAM type: YTN; PAM sequence: TTT
tgaaccttgatgtctggtaa

SEQ ID NO: 288429 - DNA, 20 bp, Artificial Sequence
  Description of Artificial Sequence: Synthetic oligonucleotide
  Target: LAMA2; (-) strand; PAM type: YTN; PAM sequence: CTT
ttgaaccttgatgtctggta

SEQ ID NO: 288430 - DNA, 20 bp, Artificial Sequence
  Description of Artificial Sequence: Synthetic oligonucleotide
  Target: LAMA2; (-) strand; PAM type: YTN; PAM sequence: CTC
ttttgaaccttgatgtctgg

SEQ ID NO: 288431 - DNA, 20 bp, Artificial Sequence
  Description of Artificial Sequence: Synthetic oligonucleotide
  Target: LAMA2; (-) strand; PAM type: YTN; PAM sequence: TTC
tcttttgaaccttgatgtct

SEQ ID NO: 288432 - DNA, 20 bp, Artificial Sequence
  Description of Artificial Sequence: Synthetic oligonucleotide
  Target: LAMA2; (-) strand; PAM type: YTN; PAM sequence: TTT
ctcttttgaaccttgatgtc

SEQ ID NO: 288433 - DNA, 20 bp, Artificial Sequence
  Description of Artificial Sequence: Synthetic oligonucleotide
  Target: LAMA2; (-) strand; PAM type: YTN; PAM sequence: TTG
tttctcttttgaaccttgat

SEQ ID NO: 288434 - DNA, 20 bp, Artificial Sequence
  Description of Artificial Sequence: Synthetic oligonucleotide
  Target: LAMA2; (-) strand; PAM type: YTN; PAM sequence: TTT
gtttctcttttgaaccttga

SEQ ID NO: 288435 - DNA, 20 bp, Artificial Sequence
  Description of Artificial Sequence: Synthetic oligonucleotide
  Target: LAMA2; (-) strand; PAM type: YTN; PAM sequence: TTT
tgtttctcttttgaaccttg

SEQ ID NO: 288436 - DNA, 20 bp, Artificial Sequence
  Description of Artificial Sequence: Synthetic oligonucleotide
  Target: LAMA2; (-) strand; PAM type: YTN; PAM sequence: CTT
ttgtttctcttttgaacctt

SEQ ID NO: 288437 - DNA, 20 bp, Artificial Sequence
  Description of Artificial Sequence: Synthetic oligonucleotide
  Target: LAMA2; (-) strand; PAM type: YTN; PAM sequence: TTG
ccttttgtttctcttttgaa

SEQ ID NO: 288438 - DNA, 20 bp, Artificial Sequence
  Description of Artificial Sequence: Synthetic oligonucleotide
  Target: LAMA2; (-) strand; PAM type: YTN; PAM sequence: TTT
gccttttgtttctcttttga

SEQ ID NO: 288439 - DNA, 20 bp, Artificial Sequence
  Description of Artificial Sequence: Synthetic oligonucleotide
  Target: LAMA2; (-) strand; PAM type: YTN; PAM sequence: TTA
atttgccttttgtttctctt

SEQ ID NO: 288440 - DNA, 20 bp, Artificial Sequence
  Description of Artificial Sequence: Synthetic oligonucleotide
  Target: LAMA2; (-) strand; PAM type: YTN; PAM sequence: CTT
aatttgccttttgtttctct

SEQ ID NO: 288441 - DNA, 20 bp, Artificial Sequence
  Description of Artificial Sequence: Synthetic oligonucleotide
  Target: LAMA2; (-) strand; PAM type: YTN; PAM sequence: TTC
ttaatttgccttttgtttct

SEQ ID NO: 288442 - DNA, 20 bp, Artificial Sequence
  Description of Artificial Sequence: Synthetic oligonucleotide
  Target: LAMA2; (-) strand; PAM type: YTN; PAM sequence: CTT
cttaatttgccttttgtttc

SEQ ID NO: 288443 - DNA, 20 bp, Artificial Sequence
  Description of Artificial Sequence: Synthetic oligonucleotide
  Target: LAMA2; (-) strand; PAM type: YTN; PAM sequence: CTA
ggcttcttaatttgcctttt

SEQ ID NO: 288444 - DNA, 20 bp, Artificial Sequence
  Description of Artificial Sequence: Synthetic oligonucleotide
  Target: LAMA2; (-) strand; PAM type: YTN; PAM sequence: TTA
ataaatgctaggcttcttaa

SEQ ID NO: 288445 - DNA, 20 bp, Artificial Sequence
  Description of Artificial Sequence: Synthetic oligonucleotide
  Target: LAMA2; (-) strand; PAM type: YTN; PAM sequence: TTC
ataattaataaatgctaggc

SEQ ID NO: 288446 - DNA, 20 bp, Artificial Sequence
  Description of Artificial Sequence: Synthetic oligonucleotide
  Target: LAMA2; (-) strand; PAM type: YTN; PAM sequence: TTT
cataattaataaatgctagg

SEQ ID NO: 288447 - DNA, 20 bp, Artificial Sequence
  Description of Artificial Sequence: Synthetic oligonucleotide
  Target: LAMA2; (-) strand; PAM type: YTN; PAM sequence: CTT
tcataattaataaatgctag

SEQ ID NO: 288448 - DNA, 20 bp, Artificial Sequence
  Description of Artificial Sequence: Synthetic oligonucleotide
  Target: LAMA2; (-) strand; PAM type: YTN; PAM sequence: TTC
tttcataattaataaatgct

SEQ ID NO: 288449 - DNA, 20 bp, Artificial Sequence
  Description of Artificial Sequence: Synthetic oligonucleotide
  Target: LAMA2; (-) strand; PAM type: YTN; PAM sequence: CTA
ttctttcataattaataaat

SEQ ID NO: 288450 - DNA, 20 bp, Artificial Sequence
  Description of Artificial Sequence: Synthetic oligonucleotide
  Target: LAMA2; (-) strand; PAM type: YTN; PAM sequence: CTA
aaaaagcccctattctttca

SEQ ID NO: 288451 - DNA, 20 bp, Artificial Sequence
  Description of Artificial Sequence: Synthetic oligonucleotide
  Target: LAMA2; (-) strand; PAM type: YTN; PAM sequence: TTA
ctaaaaaagcccctattctt

SEQ ID NO: 288452 - DNA, 20 bp, Artificial Sequence
  Description of Artificial Sequence: Synthetic oligonucleotide
  Target: LAMA2; (-) strand; PAM type: YTN; PAM sequence: TTT
actaaaaaagcccctattct

SEQ ID NO: 288453 - DNA, 20 bp, Artificial Sequence
  Description of Artificial Sequence: Synthetic oligonucleotide
  Target: LAMA2; (-) strand; PAM type: YTN; PAM sequence: CTG
aatgcatttactaaaaaagc

SEQ ID NO: 288454 - DNA, 20 bp, Artificial Sequence
  Description of Artificial Sequence: Synthetic oligonucleotide
  Target: LAMA2; (-) strand; PAM type: YTN; PAM sequence: TTC
tgaatgcatttactaaaaaa

SEQ ID NO: 288455 - DNA, 20 bp, Artificial Sequence
  Description of Artificial Sequence: Synthetic oligonucleotide
  Target: LAMA2; (-) strand; PAM type: YTN; PAM sequence: TTC
attctgaatgcatttactaa

SEQ ID NO: 288456 - DNA, 20 bp, Artificial Sequence
  Description of Artificial Sequence: Synthetic oligonucleotide
  Target: LAMA2; (-) strand; PAM type: YTN; PAM sequence: CTA
ttcattctgaatgcatttac

SEQ ID NO: 288457 - DNA, 20 bp, Artificial Sequence
  Description of Artificial Sequence: Synthetic oligonucleotide
  Target: LAMA2; (-) strand; PAM type: YTN; PAM sequence: TTA
tcctattcattctgaatgca

SEQ ID NO: 288458 - DNA, 20 bp, Artificial Sequence
  Description of Artificial Sequence: Synthetic oligonucleotide
  Target: LAMA2; (-) strand; PAM type: YTN; PAM sequence: TTC
gacatagaatagaatagagt

SEQ ID NO: 288459 - DNA, 20 bp, Artificial Sequence
  Description of Artificial Sequence: Synthetic oligonucleotide
  Target: LAMA2; (-) strand; PAM type: YTN; PAM sequence: TTT
cgacatagaatagaatagag

SEQ ID NO: 288460 - DNA, 20 bp, Artificial Sequence
  Description of Artificial Sequence: Synthetic oligonucleotide
  Target: LAMA2; (-) strand; PAM type: YTN; PAM sequence: CTA
taatatttcgacatagaata

SEQ ID NO: 288461 - DNA, 20 bp, Artificial Sequence
  Description of Artificial Sequence: Synthetic oligonucleotide
  Target: LAMA2; (-) strand; PAM type: YTN; PAM sequence: CTC
tataatatttcgacatagaa

SEQ ID NO: 288462 - DNA, 20 bp, Artificial Sequence
  Description of Artificial Sequence: Synthetic oligonucleotide
  Target: LAMA2; (-) strand; PAM type: YTN; PAM sequence: TTC
caggtacactctataatatt

SEQ ID NO: 288463 - DNA, 20 bp, Artificial Sequence
  Description of Artificial Sequence: Synthetic oligonucleotide
  Target: LAMA2; (-) strand; PAM type: YTN; PAM sequence: CTT
ccaggtacactctataatat

SEQ ID NO: 288464 - DNA, 20 bp, Artificial Sequence
  Description of Artificial Sequence: Synthetic oligonucleotide
  Target: LAMA2; (-) strand; PAM type: YTN; PAM sequence: CTA
tgggatgagaaataatatga

SEQ ID NO: 288465 - DNA, 20 bp, Artificial Sequence
  Description of Artificial Sequence: Synthetic oligonucleotide
  Target: LAMA2; (-) strand; PAM type: YTN; PAM sequence: TTG
gtgactatgggatgagaaat

SEQ ID NO: 288466 - DNA, 20 bp, Artificial Sequence
  Description of Artificial Sequence: Synthetic oligonucleotide
  Target: LAMA2; (-) strand; PAM type: YTN; PAM sequence: TTG
aattggtgactatgggatga

SEQ ID NO: 288467 - DNA, 20 bp, Artificial Sequence
  Description of Artificial Sequence: Synthetic oligonucleotide
  Target: LAMA2; (-) strand; PAM type: YTN; PAM sequence: TTT
gaattggtgactatgggatg

SEQ ID NO: 288468 - DNA, 20 bp, Artificial Sequence
  Description of Artificial Sequence: Synthetic oligonucleotide
  Target: LAMA2; (-) strand; PAM type: YTN; PAM sequence: CTT
tgaattggtgactatgggat

SEQ ID NO: 288469 - DNA, 20 bp, Artificial Sequence
  Description of Artificial Sequence: Synthetic oligonucleotide
  Target: LAMA2; (-) strand; PAM type: YTN; PAM sequence: CTG
gctttgaattggtgactatg

SEQ ID NO: 288470 - DNA, 20 bp, Artificial Sequence
  Description of Artificial Sequence: Synthetic oligonucleotide
  Target: LAMA2; (-) strand; PAM type: YTN; PAM sequence: CTA
ggagaaacaaggtaagtctg

SEQ ID NO: 288471 - DNA, 20 bp, Artificial Sequence
  Description of Artificial Sequence: Synthetic oligonucleotide
  Target: LAMA2; (-) strand; PAM type: YTN; PAM sequence: TTA
gaaaacactaggagaaacaa

SEQ ID NO: 288472 - DNA, 20 bp, Artificial Sequence
  Description of Artificial Sequence: Synthetic oligonucleotide
  Target: LAMA2; (-) strand; PAM type: YTN; PAM sequence: TTC
attagaaaacactaggagaa

SEQ ID NO: 288473 - DNA, 20 bp, Artificial Sequence
  Description of Artificial Sequence: Synthetic oligonucleotide
  Target: LAMA2; (-) strand; PAM type: YTN; PAM sequence: TTA
attcattagaaaacactagg

SEQ ID NO: 288474 - DNA, 20 bp, Artificial Sequence
  Description of Artificial Sequence: Synthetic oligonucleotide
  Target: LAMA2; (-) strand; PAM type: YTN; PAM sequence: TTT
aattcattagaaaacactag

SEQ ID NO: 288475 - DNA, 20 bp, Artificial Sequence
  Description of Artificial Sequence: Synthetic oligonucleotide
  Target: LAMA2; (-) strand; PAM type: YTN; PAM sequence: TTC
atttaattcattagaaaaca

SEQ ID NO: 288476 - DNA, 20 bp, Artificial Sequence
  Description of Artificial Sequence: Synthetic oligonucleotide
  Target: LAMA2; (-) strand; PAM type: YTN; PAM sequence: CTG
tagatccccccagttcattt

SEQ ID NO: 288477 - DNA, 20 bp, Artificial Sequence
  Description of Artificial Sequence: Synthetic oligonucleotide
  Target: LAMA2; (-) strand; PAM type: YTN; PAM sequence: CTA
aacacagagctgtagatccc

SEQ ID NO: 288478 - DNA, 20 bp, Artificial Sequence
  Description of Artificial Sequence: Synthetic oligonucleotide
  Target: LAMA2; (-) strand; PAM type: YTN; PAM sequence: CTG
ggagtggctaaacacagagc

SEQ ID NO: 288479 - DNA, 20 bp, Artificial Sequence
  Description of Artificial Sequence: Synthetic oligonucleotide
  Target: LAMA2; (-) strand; PAM type: YTN; PAM sequence: TTG
tggactgggagtggctaaac

SEQ ID NO: 288480 - DNA, 20 bp, Artificial Sequence
  Description of Artificial Sequence: Synthetic oligonucleotide
  Target: LAMA2; (-) strand; PAM type: YTN; PAM sequence: CTG
cgggaaagagttgtggactg

SEQ ID NO: 288481 - DNA, 20 bp, Artificial Sequence
  Description of Artificial Sequence: Synthetic oligonucleotide
  Target: LAMA2; (-) strand; PAM type: YTN; PAM sequence: TTG
tggagatacctgcgggaaag

SEQ ID NO: 288482 - DNA, 20 bp, Artificial Sequence
  Description of Artificial Sequence: Synthetic oligonucleotide
  Target: LAMA2; (-) strand; PAM type: YTN; PAM sequence: CTG
cgattgtggagatacctgcg

SEQ ID NO: 288483 - DNA, 20 bp, Artificial Sequence
  Description of Artificial Sequence: Synthetic oligonucleotide
  Target: LAMA2; (-) strand; PAM type: YTN; PAM sequence: TTA
ctgcgattgtggagatacct

SEQ ID NO: 288484 - DNA, 20 bp, Artificial Sequence
  Description of Artificial Sequence: Synthetic oligonucleotide
  Target: LAMA2; (-) strand; PAM type: YTN; PAM sequence: CTG
atgttactgcgattgtggag

SEQ ID NO: 288485 - DNA, 20 bp, Artificial Sequence
  Description of Artificial Sequence: Synthetic oligonucleotide
  Target: LAMA2; (-) strand; PAM type: YTN; PAM sequence: CTG
tctgatgttactgcgattgt

SEQ ID NO: 288486 - DNA, 20 bp, Artificial Sequence
  Description of Artificial Sequence: Synthetic oligonucleotide
  Target: LAMA2; (-) strand; PAM type: YTN; PAM sequence: CTA
tctgtctgatgttactgcga

SEQ ID NO: 288487 - DNA, 20 bp, Artificial Sequence
  Description of Artificial Sequence: Synthetic oligonucleotide
  Target: LAMA2; (-) strand; PAM type: YTN; PAM sequence: CTA
cctatctgtctgatgttact

SEQ ID NO: 288488 - DNA, 20 bp, Artificial Sequence
  Description of Artificial Sequence: Synthetic oligonucleotide
  Target: LAMA2; (-) strand; PAM type: YTN; PAM sequence: CTA
cctacctatctgtctgatgt

SEQ ID NO: 288489 - DNA, 20 bp, Artificial Sequence
  Description of Artificial Sequence: Synthetic oligonucleotide
  Target: LAMA2; (-) strand; PAM type: YTN; PAM sequence: CTA
tctacctacctatctgtctg

SEQ ID NO: 288490 - DNA, 20 bp, Artificial Sequence
  Description of Artificial Sequence: Synthetic oligonucleotide
  Target: LAMA2; (-) strand; PAM type: YTN; PAM sequence: CTG
tctatctacctacctatctg

SEQ ID NO: 288491 - DNA, 20 bp, Artificial Sequence
  Description of Artificial Sequence: Synthetic oligonucleotide
  Target: LAMA2; (-) strand; PAM type: YTN; PAM sequence: TTA
tgtatctgtctatctaccta

SEQ ID NO: 288492 - DNA, 20 bp, Artificial Sequence
  Description of Artificial Sequence: Synthetic oligonucleotide
  Target: LAMA2; (-) strand; PAM type: YTN; PAM sequence: TTT
atgtatctgtctatctacct

SEQ ID NO: 288493 - DNA, 20 bp, Artificial Sequence
  Description of Artificial Sequence: Synthetic oligonucleotide
  Target: LAMA2; (-) strand; PAM type: YTN; PAM sequence: TTT
tatgtatctgtctatctacc

SEQ ID NO: 288494 - DNA, 20 bp, Artificial Sequence
  Description of Artificial Sequence: Synthetic oligonucleotide
  Target: LAMA2; (-) strand; PAM type: YTN; PAM sequence: TTT
ttatgtatctgtctatctac

SEQ ID NO: 288495 - DNA, 20 bp, Artificial Sequence
  Description of Artificial Sequence: Synthetic oligonucleotide
  Target: LAMA2; (-) strand; PAM type: YTN; PAM sequence: CTA
tttttatgtatctgtctatc

SEQ ID NO: 288496 - DNA, 20 bp, Artificial Sequence
  Description of Artificial Sequence: Synthetic oligonucleotide
  Target: LAMA2; (-) strand; PAM type: YTN; PAM sequence: TTC
caaacatgaggctattttta

SEQ ID NO: 288497 - DNA, 20 bp, Artificial Sequence
  Description of Artificial Sequence: Synthetic oligonucleotide
  Target: LAMA2; (-) strand; PAM type: YTN; PAM sequence: TTT
ccaaacatgaggctattttt

SEQ ID NO: 288498 - DNA, 20 bp, Artificial Sequence
  Description of Artificial Sequence: Synthetic oligonucleotide
  Target: LAMA2; (-) strand; PAM type: YTN; PAM sequence: TTT
tccaaacatgaggctatttt

SEQ ID NO: 288499 - DNA, 20 bp, Artificial Sequence
  Description of Artificial Sequence: Synthetic oligonucleotide
  Target: LAMA2; (-) strand; PAM type: YTN; PAM sequence: TTT
ttccaaacatgaggctattt

SEQ ID NO: 288500 - DNA, 20 bp, Artificial Sequence
  Description of Artificial Sequence: Synthetic oligonucleotide
  Target: LAMA2; (-) strand; PAM type: YTN; PAM sequence: TTT
tttccaaacatgaggctatt

SEQ ID NO: 288501 - DNA, 20 bp, Artificial Sequence
  Description of Artificial Sequence: Synthetic oligonucleotide
  Target: LAMA2; (-) strand; PAM type: YTN; PAM sequence: TTA
aaatattttttccaaacatg

SEQ ID NO: 288502 - DNA, 20 bp, Artificial Sequence
  Description of Artificial Sequence: Synthetic oligonucleotide
  Target: LAMA2; (-) strand; PAM type: YTN; PAM sequence: TTT
aaaatattttttccaaacat

SEQ ID NO: 288503 - DNA, 20 bp, Artificial Sequence
  Description of Artificial Sequence: Synthetic oligonucleotide
  Target: LAMA2; (-) strand; PAM type: YTN; PAM sequence: TTG
tgaatacatttaaaatattt

SEQ ID NO: 288504 - DNA, 20 bp, Artificial Sequence
  Description of Artificial Sequence: Synthetic oligonucleotide
  Target: LAMA2; (-) strand; PAM type: YTN; PAM sequence: CTT
gtgaatacatttaaaatatt

SEQ ID NO: 288505 - DNA, 20 bp, Artificial Sequence
  Description of Artificial Sequence: Synthetic oligonucleotide
  Target: LAMA2; (-) strand; PAM type: YTN; PAM sequence: CTA
agataagtcttgtgaataca

SEQ ID NO: 288506 - DNA, 20 bp, Artificial Sequence
  Description of Artificial Sequence: Synthetic oligonucleotide
  Target: LAMA2; (-) strand; PAM type: YTN; PAM sequence: TTA
atgaatatctaagataagtc

SEQ ID NO: 288507 - DNA, 20 bp, Artificial Sequence
  Description of Artificial Sequence: Synthetic oligonucleotide
  Target: LAMA2; (-) strand; PAM type: YTN; PAM sequence: TTG
gatgcataattaatgaatat

SEQ ID NO: 288508 - DNA, 20 bp, Artificial Sequence
  Description of Artificial Sequence: Synthetic oligonucleotide
  Target: LAMA2; (-) strand; PAM type: YTN; PAM sequence: TTA
atcaatattggatgcataat

SEQ ID NO: 288509 - DNA, 20 bp, Artificial Sequence
  Description of Artificial Sequence: Synthetic oligonucleotide
  Target: LAMA2; (-) strand; PAM type: YTN; PAM sequence: TTT
aatcaatattggatgcataa

SEQ ID NO: 288510 - DNA, 20 bp, Artificial Sequence
  Description of Artificial Sequence: Synthetic oligonucleotide
  Target: LAMA2; (-) strand; PAM type: YTN; PAM sequence: CTC
acagagaatatatgtttaat

SEQ ID NO: 288511 - DNA, 20 bp, Artificial Sequence
  Description of Artificial Sequence: Synthetic oligonucleotide
  Target: LAMA2; (-) strand; PAM type: YTN; PAM sequence: TTG
cctcacagagaatatatgtt

SEQ ID NO: 288512 - DNA, 20 bp, Artificial Sequence
  Description of Artificial Sequence: Synthetic oligonucleotide
  Target: LAMA2; (-) strand; PAM type: YTN; PAM sequence: TTA
gtatagcaaattgcctcaca

SEQ ID NO: 288513 - DNA, 20 bp, Artificial Sequence
  Description of Artificial Sequence: Synthetic oligonucleotide
  Target: LAMA2; (-) strand; PAM type: YTN; PAM sequence: TTT
agtatagcaaattgcctcac

SEQ ID NO: 288514 - DNA, 20 bp, Artificial Sequence
  Description of Artificial Sequence: Synthetic oligonucleotide
  Target: LAMA2; (-) strand; PAM type: YTN; PAM sequence: TTT
tagtatagcaaattgcctca

SEQ ID NO: 288515 - DNA, 20 bp, Artificial Sequence
  Description of Artificial Sequence: Synthetic oligonucleotide
  Target: LAMA2; (-) strand; PAM type: YTN; PAM sequence: TTG
taggatgacaaagattttag

SEQ ID NO: 288516 - DNA, 20 bp, Artificial Sequence
  Description of Artificial Sequence: Synthetic oligonucleotide
  Target: LAMA2; (-) strand; PAM type: YTN; PAM sequence: TTT
gtaggatgacaaagatttta

SEQ ID NO: 288517 - DNA, 20 bp, Artificial Sequence
  Description of Artificial Sequence: Synthetic oligonucleotide
  Target: LAMA2; (-) strand; PAM type: YTN; PAM sequence: TTG
atgtttgtaggatgacaaag

SEQ ID NO: 288518 - DNA, 20 bp, Artificial Sequence
  Description of Artificial Sequence: Synthetic oligonucleotide
  Target: LAMA2; (-) strand; PAM type: YTN; PAM sequence: CTA
gaatccagttgatgtttgta

SEQ ID NO: 288519 - DNA, 20 bp, Artificial Sequence
  Description of Artificial Sequence: Synthetic oligonucleotide
  Target: LAMA2; (-) strand; PAM type: YTN; PAM sequence: TTG
gatcctagaatccagttgat

SEQ ID NO: 288520 - DNA, 20 bp, Artificial Sequence
  Description of Artificial Sequence: Synthetic oligonucleotide
  Target: LAMA2; (-) strand; PAM type: YTN; PAM sequence: CTT
ggatcctagaatccagttga

SEQ ID NO: 288521 - DNA, 20 bp, Artificial Sequence
  Description of Artificial Sequence: Synthetic oligonucleotide
  Target: LAMA2; (-) strand; PAM type: YTN; PAM sequence: CTA
gtacatacaatacagtactt

SEQ ID NO: 288522 - DNA, 20 bp, Artificial Sequence
  Description of Artificial Sequence: Synthetic oligonucleotide
  Target: LAMA2; (-) strand; PAM type: YTN; PAM sequence: CTC
aaaacatctagtacatacaa

SEQ ID NO: 288523 - DNA, 20 bp, Artificial Sequence
  Description of Artificial Sequence: Synthetic oligonucleotide
  Target: LAMA2; (-) strand; PAM type: YTN; PAM sequence: CTA
tgtcaggcacaaactcaaaa

SEQ ID NO: 288524 - DNA, 20 bp, Artificial Sequence
  Description of Artificial Sequence: Synthetic oligonucleotide
  Target: LAMA2; (-) strand; PAM type: YTN; PAM sequence: CTA
ggtcctatgtcaggcacaaa

SEQ ID NO: 288525 - DNA, 20 bp, Artificial Sequence
  Description of Artificial Sequence: Synthetic oligonucleotide
  Target: LAMA2; (-) strand; PAM type: YTN; PAM sequence: TTA
tgggctaggtcctatgtcag

SEQ ID NO: 288526 - DNA, 20 bp, Artificial Sequence
  Description of Artificial Sequence: Synthetic oligonucleotide
  Target: LAMA2; (-) strand; PAM type: YTN; PAM sequence: CTA
agagattatgggctaggtcc

SEQ ID NO: 288527 - DNA, 20 bp, Artificial Sequence
  Description of Artificial Sequence: Synthetic oligonucleotide
  Target: LAMA2; (-) strand; PAM type: YTN; PAM sequence: TTC
atgagaccatctaagagatt

SEQ ID NO: 288528 - DNA, 20 bp, Artificial Sequence
  Description of Artificial Sequence: Synthetic oligonucleotide
  Target: LAMA2; (-) strand; PAM type: YTN; PAM sequence: TTT
catgagaccatctaagagat

SEQ ID NO: 288529 - DNA, 20 bp, Artificial Sequence
  Description of Artificial Sequence: Synthetic oligonucleotide
  Target: LAMA2; (-) strand; PAM type: YTN; PAM sequence: CTA
gaatgtaaatttcatgagac

SEQ ID NO: 288530 - DNA, 20 bp, Artificial Sequence
  Description of Artificial Sequence: Synthetic oligonucleotide
  Target: LAMA2; (-) strand; PAM type: YTN; PAM sequence: TTC
actagaatgtaaatttcatg

SEQ ID NO: 288531 - DNA, 20 bp, Artificial Sequence
  Description of Artificial Sequence: Synthetic oligonucleotide
  Target: LAMA2; (-) strand; PAM type: YTN; PAM sequence: CTT
cactagaatgtaaatttcat

SEQ ID NO: 288532 - DNA, 20 bp, Artificial Sequence
  Description of Artificial Sequence: Synthetic oligonucleotide
  Target: LAMA2; (-) strand; PAM type: YTN; PAM sequence: CTC
cttcactagaatgtaaattt

SEQ ID NO: 288533 - DNA, 20 bp, Artificial Sequence
  Description of Artificial Sequence: Synthetic oligonucleotide
  Target: LAMA2; (-) strand; PAM type: YTN; PAM sequence: CTG
tctccttcactagaatgtaa

SEQ ID NO: 288534 - DNA, 20 bp, Artificial Sequence
  Description of Artificial Sequence: Synthetic oligonucleotide
  Target: LAMA2; (-) strand; PAM type: YTN; PAM sequence: TTC
tgtctccttcactagaatgt

SEQ ID NO: 288535 - DNA, 20 bp, Artificial Sequence
  Description of Artificial Sequence: Synthetic oligonucleotide
  Target: LAMA2; (-) strand; PAM type: YTN; PAM sequence: CTT
ctgtctccttcactagaatg

SEQ ID NO: 288536 - DNA, 20 bp, Artificial Sequence
  Description of Artificial Sequence: Synthetic oligonucleotide
  Target: LAMA2; (-) strand; PAM type: YTN; PAM sequence: TTC
ttctgtctccttcactagaa

SEQ ID NO: 288537 - DNA, 20 bp, Artificial Sequence
  Description of Artificial Sequence: Synthetic oligonucleotide
  Target: LAMA2; (-) strand; PAM type: YTN; PAM sequence: TTT
cttctgtctccttcactaga

SEQ ID NO: 288538 - DNA, 20 bp, Artificial Sequence
  Description of Artificial Sequence: Synthetic oligonucleotide
  Target: LAMA2; (-) strand; PAM type: YTN; PAM sequence: TTA
tggtttcttctgtctccttc

SEQ ID NO: 288539 - DNA, 20 bp, Artificial Sequence
  Description of Artificial Sequence: Synthetic oligonucleotide
  Target: LAMA2; (-) strand; PAM type: YTN; PAM sequence: TTT
atggtttcttctgtctcctt

SEQ ID NO: 288540 - DNA, 20 bp, Artificial Sequence
  Description of Artificial Sequence: Synthetic oligonucleotide
  Target: LAMA2; (-) strand; PAM type: YTN; PAM sequence: TTT
tatggtttcttctgtctcct

SEQ ID NO: 288541 - DNA, 20 bp, Artificial Sequence
  Description of Artificial Sequence: Synthetic oligonucleotide
  Target: LAMA2; (-) strand; PAM type: YTN; PAM sequence: TTT
ttatggtttcttctgtctcc

SEQ ID NO: 288542 - DNA, 20 bp, Artificial Sequence
  Description of Artificial Sequence: Synthetic oligonucleotide
  Target: LAMA2; (-) strand; PAM type: YTN; PAM sequence: TTA
tttttatggtttcttctgtc

SEQ ID NO: 288543 - DNA, 20 bp, Artificial Sequence
  Description of Artificial Sequence: Synthetic oligonucleotide
  Target: LAMA2; (-) strand; PAM type: YTN; PAM sequence: TTT
atttttatggtttcttctgt

SEQ ID NO: 288544 - DNA, 20 bp, Artificial Sequence
  Description of Artificial Sequence: Synthetic oligonucleotide
  Target: LAMA2; (-) strand; PAM type: YTN; PAM sequence: CTG
tatttatttttatggtttct

SEQ ID NO: 288545 - DNA, 20 bp, Artificial Sequence
  Description of Artificial Sequence: Synthetic oligonucleotide
  Target: LAMA2; (-) strand; PAM type: YTN; PAM sequence: TTA
aggaggcctgtatttatttt

SEQ ID NO: 288546 - DNA, 20 bp, Artificial Sequence
  Description of Artificial Sequence: Synthetic oligonucleotide
  Target: LAMA2; (-) strand; PAM type: YTN; PAM sequence: TTC
agacgattaaggaggcctgt

SEQ ID NO: 288547 - DNA, 20 bp, Artificial Sequence
  Description of Artificial Sequence: Synthetic oligonucleotide
  Target: LAMA2; (-) strand; PAM type: YTN; PAM sequence: TTA
gattcagacgattaaggagg

SEQ ID NO: 288548 - DNA, 20 bp, Artificial Sequence
  Description of Artificial Sequence: Synthetic oligonucleotide
  Target: LAMA2; (-) strand; PAM type: YTN; PAM sequence: CTG
gaacaaattagattcagacg

SEQ ID NO: 288549 - DNA, 20 bp, Artificial Sequence
  Description of Artificial Sequence: Synthetic oligonucleotide
  Target: LAMA2; (-) strand; PAM type: YTN; PAM sequence: TTC
tggaacaaattagattcaga

SEQ ID NO: 288550 - DNA, 20 bp, Artificial Sequence
  Description of Artificial Sequence: Synthetic oligonucleotide
  Target: LAMA2; (-) strand; PAM type: YTN; PAM sequence: TTT
ctggaacaaattagattcag

SEQ ID NO: 288551 - DNA, 20 bp, Artificial Sequence
  Description of Artificial Sequence: Synthetic oligonucleotide
  Target: LAMA2; (-) strand; PAM type: YTN; PAM sequence: TTT
tctggaacaaattagattca

SEQ ID NO: 288552 - DNA, 20 bp, Artificial Sequence
  Description of Artificial Sequence: Synthetic oligonucleotide
  Target: LAMA2; (-) strand; PAM type: YTN; PAM sequence: TTT
ttctggaacaaattagattc

SEQ ID NO: 288553 - DNA, 20 bp, Artificial Sequence
  Description of Artificial Sequence: Synthetic oligonucleotide
  Target: LAMA2; (-) strand; PAM type: YTN; PAM sequence: TTC
caacaaatttttctggaaca

SEQ ID NO: 288554 - DNA, 20 bp, Artificial Sequence
  Description of Artificial Sequence: Synthetic oligonucleotide
  Target: LAMA2; (-) strand; PAM type: YTN; PAM sequence: CTT
ccaacaaatttttctggaac

SEQ ID NO: 288555 - DNA, 20 bp, Artificial Sequence
  Description of Artificial Sequence: Synthetic oligonucleotide
  Target: LAMA2; (-) strand; PAM type: YTN; PAM sequence: TTG
ccttccaacaaatttttctg

SEQ ID NO: 288556 - DNA, 20 bp, Artificial Sequence
  Description of Artificial Sequence: Synthetic oligonucleotide
  Target: LAMA2; (-) strand; PAM type: YTN; PAM sequence: TTT
gccttccaacaaatttttct

SEQ ID NO: 288557 - DNA, 20 bp, Artificial Sequence
  Description of Artificial Sequence: Synthetic oligonucleotide
  Target: LAMA2; (-) strand; PAM type: YTN; PAM sequence: CTG
aatatttgccttccaacaaa

SEQ ID NO: 288558 - DNA, 20 bp, Artificial Sequence
  Description of Artificial Sequence: Synthetic oligonucleotide
  Target: LAMA2; (-) strand; PAM type: YTN; PAM sequence: CTC
tgaatatttgccttccaaca

SEQ ID NO: 288559 - DNA, 20 bp, Artificial Sequence
  Description of Artificial Sequence: Synthetic oligonucleotide
  Target: LAMA2; (-) strand; PAM type: YTN; PAM sequence: CTA
ctctgaatatttgccttcca

SEQ ID NO: 288560 - DNA, 20 bp, Artificial Sequence
  Description of Artificial Sequence: Synthetic oligonucleotide
  Target: LAMA2; (-) strand; PAM type: YTN; PAM sequence: TTA
tatataggatcctactctga

SEQ ID NO: 288561 - DNA, 20 bp, Artificial Sequence
  Description of Artificial Sequence: Synthetic oligonucleotide
  Target: LAMA2; (-) strand; PAM type: YTN; PAM sequence: CTT
atatataggatcctactctg

SEQ ID NO: 288562 - DNA, 20 bp, Artificial Sequence
  Description of Artificial Sequence: Synthetic oligonucleotide
  Target: LAMA2; (-) strand; PAM type: YTN; PAM sequence: TTC
ttatatataggatcctactc

SEQ ID NO: 288563 - DNA, 20 bp, Artificial Sequence
  Description of Artificial Sequence: Synthetic oligonucleotide
  Target: LAMA2; (-) strand; PAM type: YTN; PAM sequence: TTT
cttatatataggatcctact

SEQ ID NO: 288564 - DNA, 20 bp, Artificial Sequence
  Description of Artificial Sequence: Synthetic oligonucleotide
  Target: LAMA2; (-) strand; PAM type: YTN; PAM sequence: TTA
catttcttatatataggatc

SEQ ID NO: 288565 - DNA, 20 bp, Artificial Sequence
  Description of Artificial Sequence: Synthetic oligonucleotide
  Target: LAMA2; (-) strand; PAM type: YTN; PAM sequence: TTA
ttacatttcttatatatagg

SEQ ID NO: 288566 - DNA, 20 bp, Artificial Sequence
  Description of Artificial Sequence: Synthetic oligonucleotide
  Target: LAMA2; (-) strand; PAM type: YTN; PAM sequence: CTG
agaatacattattacatttc

SEQ ID NO: 288567 - DNA, 20 bp, Artificial Sequence
  Description of Artificial Sequence: Synthetic oligonucleotide
  Target: LAMA2; (-) strand; PAM type: YTN; PAM sequence: CTG
gatgggctgagaatacatta

SEQ ID NO: 288568 - DNA, 20 bp, Artificial Sequence
  Description of Artificial Sequence: Synthetic oligonucleotide
  Target: LAMA2; (-) strand; PAM type: YTN; PAM sequence: TTC
tggatgggctgagaatacat

SEQ ID NO: 288569 - DNA, 20 bp, Artificial Sequence
  Description of Artificial Sequence: Synthetic oligonucleotide
  Target: LAMA2; (-) strand; PAM type: YTN; PAM sequence: TTT
ctggatgggctgagaataca

SEQ ID NO: 288570 - DNA, 20 bp, Artificial Sequence
  Description of Artificial Sequence: Synthetic oligonucleotide
  Target: LAMA2; (-) strand; PAM type: YTN; PAM sequence: TTG
ggcaaaggggcggggtttct

SEQ ID NO: 288571 - DNA, 20 bp, Artificial Sequence
  Description of Artificial Sequence: Synthetic oligonucleotide
  Target: LAMA2; (-) strand; PAM type: YTN; PAM sequence: TTT
gggcaaaggggcggggtttc

SEQ ID NO: 288572 - DNA, 20 bp, Artificial Sequence
  Description of Artificial Sequence: Synthetic oligonucleotide
  Target: LAMA2; (-) strand; PAM type: YTN; PAM sequence: TTA
gtggtatttgggcaaagggg

SEQ ID NO: 288573 - DNA, 20 bp, Artificial Sequence
  Description of Artificial Sequence: Synthetic oligonucleotide
  Target: LAMA2; (-) strand; PAM type: YTN; PAM sequence: CTT
agtggtatttgggcaaaggg

SEQ ID NO: 288574 - DNA, 20 bp, Artificial Sequence
  Description of Artificial Sequence: Synthetic oligonucleotide
  Target: LAMA2; (-) strand; PAM type: YTN; PAM sequence: TTA
agggtgtcttagtggtattt

SEQ ID NO: 288575 - DNA, 20 bp, Artificial Sequence
  Description of Artificial Sequence: Synthetic oligonucleotide
  Target: LAMA2; (-) strand; PAM type: YTN; PAM sequence: CTT
aagggtgtcttagtggtatt

SEQ ID NO: 288576 - DNA, 20 bp, Artificial Sequence
  Description of Artificial Sequence: Synthetic oligonucleotide
  Target: LAMA2; (-) strand; PAM type: YTN; PAM sequence: TTG
atgcttaagggtgtcttagt

SEQ ID NO: 288577 - DNA, 20 bp, Artificial Sequence
  Description of Artificial Sequence: Synthetic oligonucleotide
  Target: LAMA2; (-) strand; PAM type: YTN; PAM sequence: TTA
tattgatgcttaagggtgtc

SEQ ID NO: 288578 - DNA, 20 bp, Artificial Sequence
  Description of Artificial Sequence: Synthetic oligonucleotide
  Target: LAMA2; (-) strand; PAM type: YTN; PAM sequence: TTG
gtagtagatagttatattga

SEQ ID NO: 288579 - DNA, 20 bp, Artificial Sequence
  Description of Artificial Sequence: Synthetic oligonucleotide
  Target: LAMA2; (-) strand; PAM type: YTN; PAM sequence: CTT
ggtagtagatagttatattg

SEQ ID NO: 288580 - DNA, 20 bp, Artificial Sequence
  Description of Artificial Sequence: Synthetic oligonucleotide
  Target: LAMA2; (-) strand; PAM type: YTN; PAM sequence: TTG
taaaagcacttggtagtaga

SEQ ID NO: 288581 - DNA, 20 bp, Artificial Sequence
  Description of Artificial Sequence: Synthetic oligonucleotide
  Target: LAMA2; (-) strand; PAM type: YTN; PAM sequence: TTT
gtaaaagcacttggtagtag

SEQ ID NO: 288582 - DNA, 20 bp, Artificial Sequence
  Description of Artificial Sequence: Synthetic oligonucleotide
  Target: LAMA2; (-) strand; PAM type: YTN; PAM sequence: TTT
tgtaaaagcacttggtagta

SEQ ID NO: 288583 - DNA, 20 bp, Artificial Sequence
  Description of Artificial Sequence: Synthetic oligonucleotide
  Target: LAMA2; (-) strand; PAM type: YTN; PAM sequence: TTA
tgttttgtaaaagcacttgg

SEQ ID NO: 288584 - DNA, 20 bp, Artificial Sequence
  Description of Artificial Sequence: Synthetic oligonucleotide
  Target: LAMA2; (-) strand; PAM type: YTN; PAM sequence: TTT
atgttttgtaaaagcacttg

SEQ ID NO: 288585 - DNA, 20 bp, Artificial Sequence
  Description of Artificial Sequence: Synthetic oligonucleotide
  Target: LAMA2; (-) strand; PAM type: YTN; PAM sequence: CTT
tatgttttgtaaaagcactt

SEQ ID NO: 288586 - DNA, 20 bp, Artificial Sequence
  Description of Artificial Sequence: Synthetic oligonucleotide
  Target: LAMA2; (-) strand; PAM type: YTN; PAM sequence: TTA
agtgctttatgttttgtaaa

SEQ ID NO: 288587 - DNA, 20 bp, Artificial Sequence
  Description of Artificial Sequence: Synthetic oligonucleotide
  Target: LAMA2; (-) strand; PAM type: YTN; PAM sequence: TTT
aagtgctttatgttttgtaa

SEQ ID NO: 288588 - DNA, 20 bp, Artificial Sequence
  Description of Artificial Sequence: Synthetic oligonucleotide
  Target: LAMA2; (-) strand; PAM type: YTN; PAM sequence: TTT
taagtgctttatgttttgta

SEQ ID NO: 288589 - DNA, 20 bp, Artificial Sequence
  Description of Artificial Sequence: Synthetic oligonucleotide
  Target: LAMA2; (-) strand; PAM type: YTN; PAM sequence: TTT
ttaagtgctttatgttttgt

SEQ ID NO: 288590 - DNA, 20 bp, Artificial Sequence
  Description of Artificial Sequence: Synthetic oligonucleotide
  Target: LAMA2; (-) strand; PAM type: YTN; PAM sequence: TTT
tttaagtgctttatgttttg

SEQ ID NO: 288591 - DNA, 20 bp, Artificial Sequence
  Description of Artificial Sequence: Synthetic oligonucleotide
  Target: LAMA2; (-) strand; PAM type: YTN; PAM sequence: TTT
ttttaagtgctttatgtttt

SEQ ID NO: 288592 - DNA, 20 bp, Artificial Sequence
  Description of Artificial Sequence: Synthetic oligonucleotide
  Target: LAMA2; (-) strand; PAM type: YTN; PAM sequence: TTA
gtttttttaagtgctttatg

SEQ ID NO: 288593 - DNA, 20 bp, Artificial Sequence
  Description of Artificial Sequence: Synthetic oligonucleotide
  Target: LAMA2; (-) strand; PAM type: YTN; PAM sequence: CTA
agtcattagtttttttaagt

SEQ ID NO: 288594 - DNA, 20 bp, Artificial Sequence
  Description of Artificial Sequence: Synthetic oligonucleotide
  Target: LAMA2; (-) strand; PAM type: YTN; PAM sequence: TTC
atgaggtgtgcaataactaa

SEQ ID NO: 288595 - DNA, 20 bp, Artificial Sequence
  Description of Artificial Sequence: Synthetic oligonucleotide
  Target: LAMA2; (-) strand; PAM type: YTN; PAM sequence: TTT
catgaggtgtgcaataacta

SEQ ID NO: 288596 - DNA, 20 bp, Artificial Sequence
  Description of Artificial Sequence: Synthetic oligonucleotide
  Target: LAMA2; (-) strand; PAM type: YTN; PAM sequence: CTT
tcatgaggtgtgcaataact

SEQ ID NO: 288597 - DNA, 20 bp, Artificial Sequence
  Description of Artificial Sequence: Synthetic oligonucleotide
  Target: LAMA2; (-) strand; PAM type: YTN; PAM sequence: CTC
acctttcatgaggtgtgcaa

SEQ ID NO: 288598 - DNA, 20 bp, Artificial Sequence
  Description of Artificial Sequence: Synthetic oligonucleotide
  Target: LAMA2; (-) strand; PAM type: YTN; PAM sequence: CTC
tcacctttcatgaggtgtgc

SEQ ID NO: 288599 - DNA, 20 bp, Artificial Sequence
  Description of Artificial Sequence: Synthetic oligonucleotide
  Target: LAMA2; (-) strand; PAM type: YTN; PAM sequence: CTA
gaataagtaaaaaccacctc

SEQ ID NO: 288600 - DNA, 20 bp, Artificial Sequence
  Description of Artificial Sequence: Synthetic oligonucleotide
  Target: LAMA2; (-) strand; PAM type: YTN; PAM sequence: CTG
ccaccgtgctagaataagta

SEQ ID NO: 288601 - DNA, 20 bp, Artificial Sequence
  Description of Artificial Sequence: Synthetic oligonucleotide
  Target: LAMA2; (-) strand; PAM type: YTN; PAM sequence: CTA
ctgccaccgtgctagaataa

SEQ ID NO: 288602 - DNA, 20 bp, Artificial Sequence
  Description of Artificial Sequence: Synthetic oligonucleotide
  Target: LAMA2; (-) strand; PAM type: YTN; PAM sequence: CTC
tactgccaccgtgctagaat

SEQ ID NO: 288603 - DNA, 20 bp, Artificial Sequence
  Description of Artificial Sequence: Synthetic oligonucleotide
  Target: LAMA2; (-) strand; PAM type: YTN; PAM sequence: CTC
catctctactgccaccgtgc

SEQ ID NO: 288604 - DNA, 20 bp, Artificial Sequence
  Description of Artificial Sequence: Synthetic oligonucleotide
  Target: LAMA2; (-) strand; PAM type: YTN; PAM sequence: TTA
tctccatctctactgccacc

SEQ ID NO: 288605 - DNA, 20 bp, Artificial Sequence
  Description of Artificial Sequence: Synthetic oligonucleotide
  Target: LAMA2; (-) strand; PAM type: YTN; PAM sequence: CTT
atctccatctctactgccac

SEQ ID NO: 288606 - DNA, 20 bp, Artificial Sequence
  Description of Artificial Sequence: Synthetic oligonucleotide
  Target: LAMA2; (-) strand; PAM type: YTN; PAM sequence: TTC
cacttatctccatctctact

SEQ ID NO: 288607 - DNA, 20 bp, Artificial Sequence
  Description of Artificial Sequence: Synthetic oligonucleotide
  Target: LAMA2; (-) strand; PAM type: YTN; PAM sequence: CTT
ccacttatctccatctctac

SEQ ID NO: 288608 - DNA, 20 bp, Artificial Sequence
  Description of Artificial Sequence: Synthetic oligonucleotide
  Target: LAMA2; (-) strand; PAM type: YTN; PAM sequence: TTC
cttccacttatctccatctc

SEQ ID NO: 288609 - DNA, 20 bp, Artificial Sequence
  Description of Artificial Sequence: Synthetic oligonucleotide
  Target: LAMA2; (-) strand; PAM type: YTN; PAM sequence: TTC
attccttccacttatctcca

SEQ ID NO: 288610 - DNA, 20 bp, Artificial Sequence
  Description of Artificial Sequence: Synthetic oligonucleotide
  Target: LAMA2; (-) strand; PAM type: YTN; PAM sequence: CTT
cattccttccacttatctcc

SEQ ID NO: 288611 - DNA, 20 bp, Artificial Sequence
  Description of Artificial Sequence: Synthetic oligonucleotide
  Target: LAMA2; (-) strand; PAM type: YTN; PAM sequence: CTA
aatacatcttcattccttcc

SEQ ID NO: 288612 - DNA, 20 bp, Artificial Sequence
  Description of Artificial Sequence: Synthetic oligonucleotide
  Target: LAMA2; (-) strand; PAM type: YTN; PAM sequence: TTG
tagggcaggaaataccctaa

SEQ ID NO: 288613 - DNA, 20 bp, Artificial Sequence
  Description of Artificial Sequence: Synthetic oligonucleotide
  Target: LAMA2; (-) strand; PAM type: YTN; PAM sequence: CTG
ttgtagggcaggaaataccc

SEQ ID NO: 288614 - DNA, 20 bp, Artificial Sequence
  Description of Artificial Sequence: Synthetic oligonucleotide
  Target: LAMA2; (-) strand; PAM type: YTN; PAM sequence: CTA
taggctgttgtagggcagga

SEQ ID NO: 288615 - DNA, 20 bp, Artificial Sequence
  Description of Artificial Sequence: Synthetic oligonucleotide
  Target: LAMA2; (-) strand; PAM type: YTN; PAM sequence: CTG
aatagcaatgagactatagg

SEQ ID NO: 288616 - DNA, 20 bp, Artificial Sequence
  Description of Artificial Sequence: Synthetic oligonucleotide
  Target: LAMA2; (-) strand; PAM type: YTN; PAM sequence: TTC
aatgcatcactgaatagcaa

SEQ ID NO: 288617 - DNA, 20 bp, Artificial Sequence
  Description of Artificial Sequence: Synthetic oligonucleotide
  Target: LAMA2; (-) strand; PAM type: YTN; PAM sequence: TTA
ttcaatgcatcactgaatag

SEQ ID NO: 288618 - DNA, 20 bp, Artificial Sequence
  Description of Artificial Sequence: Synthetic oligonucleotide
  Target: LAMA2; (-) strand; PAM type: YTN; PAM sequence: CTG
tcattattcaatgcatcact

SEQ ID NO: 288619 - DNA, 20 bp, Artificial Sequence
  Description of Artificial Sequence: Synthetic oligonucleotide
  Target: LAMA2; (-) strand; PAM type: YTN; PAM sequence: TTC
agtctgtcattattcaatgc

SEQ ID NO: 288620 - DNA, 20 bp, Artificial Sequence
  Description of Artificial Sequence: Synthetic oligonucleotide
  Target: LAMA2; (-) strand; PAM type: YTN; PAM sequence: CTA
ttcagtctgtcattattcaa

SEQ ID NO: 288621 - DNA, 20 bp, Artificial Sequence
  Description of Artificial Sequence: Synthetic oligonucleotide
  Target: LAMA2; (-) strand; PAM type: YTN; PAM sequence: TTC
acatgaatcagatcatatct

SEQ ID NO: 288622 - DNA, 20 bp, Artificial Sequence
  Description of Artificial Sequence: Synthetic oligonucleotide
  Target: LAMA2; (-) strand; PAM type: YTN; PAM sequence: TTT
cacatgaatcagatcatatc

SEQ ID NO: 288623 - DNA, 20 bp, Artificial Sequence
  Description of Artificial Sequence: Synthetic oligonucleotide
  Target: LAMA2; (-) strand; PAM type: YTN; PAM sequence: CTG
agaagagagacatttcacat

SEQ ID NO: 288624 - DNA, 20 bp, Artificial Sequence
  Description of Artificial Sequence: Synthetic oligonucleotide
  Target: LAMA2; (-) strand; PAM type: YTN; PAM sequence: CTG
aggactgagaagagagacat

SEQ ID NO: 288625 - DNA, 20 bp, Artificial Sequence
  Description of Artificial Sequence: Synthetic oligonucleotide
  Target: LAMA2; (-) strand; PAM type: YTN; PAM sequence: TTC
cacctgaggactgagaagag

SEQ ID NO: 288626 - DNA, 20 bp, Artificial Sequence
  Description of Artificial Sequence: Synthetic oligonucleotide
  Target: LAMA2; (-) strand; PAM type: YTN; PAM sequence: CTT
ccacctgaggactgagaaga

SEQ ID NO: 288627 - DNA, 20 bp, Artificial Sequence
  Description of Artificial Sequence: Synthetic oligonucleotide
  Target: LAMA2; (-) strand; PAM type: YTN; PAM sequence: CTA
tcttccacctgaggactgag

SEQ ID NO: 288628 - DNA, 20 bp, Artificial Sequence
  Description of Artificial Sequence: Synthetic oligonucleotide
  Target: LAMA2; (-) strand; PAM type: YTN; PAM sequence: CTC
actatcttccacctgaggac

SEQ ID NO: 288629 - DNA, 20 bp, Artificial Sequence
  Description of Artificial Sequence: Synthetic oligonucleotide
  Target: LAMA2; (-) strand; PAM type: YTN; PAM sequence: TTG
aatagtcccctcactatctt

SEQ ID NO: 288630 - DNA, 20 bp, Artificial Sequence
  Description of Artificial Sequence: Synthetic oligonucleotide
  Target: LAMA2; (-) strand; PAM type: YTN; PAM sequence: CTC
catcaaattgaatagtcccc

SEQ ID NO: 288631 - DNA, 20 bp, Artificial Sequence
  Description of Artificial Sequence: Synthetic oligonucleotide
  Target: LAMA2; (-) strand; PAM type: YTN; PAM sequence: TTC
tccatcaaattgaatagtcc

SEQ ID NO: 288632 - DNA, 20 bp, Artificial Sequence
  Description of Artificial Sequence: Synthetic oligonucleotide
  Target: LAMA2; (-) strand; PAM type: YTN; PAM sequence: CTT
ctccatcaaattgaatagtc

SEQ ID NO: 288633 - DNA, 20 bp, Artificial Sequence
  Description of Artificial Sequence: Synthetic oligonucleotide
  Target: LAMA2; (-) strand; PAM type: YTN; PAM sequence: CTG
accaatgcataaccttctcc

SEQ ID NO: 288634 - DNA, 20 bp, Artificial Sequence
  Description of Artificial Sequence: Synthetic oligonucleotide
  Target: LAMA2; (-) strand; PAM type: YTN; PAM sequence: TTG
gggtaccagcgaatgggacg

SEQ ID NO: 288635 - DNA, 20 bp, Artificial Sequence
  Description of Artificial Sequence: Synthetic oligonucleotide
  Target: LAMA2; (-) strand; PAM type: YTN; PAM sequence: TTG
aacatgacagtggagatgtt

SEQ ID NO: 288636 - DNA, 20 bp, Artificial Sequence
  Description of Artificial Sequence: Synthetic oligonucleotide
  Target: LAMA2; (-) strand; PAM type: YTN; PAM sequence: CTT
gaacatgacagtggagatgt

SEQ ID NO: 288637 - DNA, 20 bp, Artificial Sequence
  Description of Artificial Sequence: Synthetic oligonucleotide
  Target: LAMA2; (-) strand; PAM type: YTN; PAM sequence: CTG
aacttgaacatgacagtgga

SEQ ID NO: 288638 - DNA, 20 bp, Artificial Sequence
  Description of Artificial Sequence: Synthetic oligonucleotide
  Target: LAMA2; (-) strand; PAM type: YTN; PAM sequence: TTC
tgaacttgaacatgacagtg

SEQ ID NO: 288639 - DNA, 20 bp, Artificial Sequence
  Description of Artificial Sequence: Synthetic oligonucleotide
  Target: LAMA2; (-) strand; PAM type: YTN; PAM sequence: CTC
gaagaaaatgttctgaactt

SEQ ID NO: 288640 - DNA, 20 bp, Artificial Sequence
  Description of Artificial Sequence: Synthetic oligonucleotide
  Target: LAMA2; (-) strand; PAM type: YTN; PAM sequence: CTC
gtgtggcaagatacatcaga

SEQ ID NO: 288641 - DNA, 20 bp, Artificial Sequence
  Description of Artificial Sequence: Synthetic oligonucleotide
  Target: LAMA2; (-) strand; PAM type: YTN; PAM sequence: TTA
ccaggtctcgtgtggcaaga

SEQ ID NO: 288642 - DNA, 20 bp, Artificial Sequence
  Description of Artificial Sequence: Synthetic oligonucleotide
  Target: LAMA2; (-) strand; PAM type: YTN; PAM sequence: TTT
accaggtctcgtgtggcaag

SEQ ID NO: 288643 - DNA, 20 bp, Artificial Sequence
  Description of Artificial Sequence: Synthetic oligonucleotide
  Target: LAMA2; (-) strand; PAM type: YTN; PAM sequence: CTT
taccaggtctcgtgtggcaa

SEQ ID NO: 288644 - DNA, 20 bp, Artificial Sequence
  Description of Artificial Sequence: Synthetic oligonucleotide
  Target: LAMA2; (-) strand; PAM type: YTN; PAM sequence: CTA
tgcatatgatctttaccagg

SEQ ID NO: 288645 - DNA, 20 bp, Artificial Sequence
  Description of Artificial Sequence: Synthetic oligonucleotide
  Target: LAMA2; (-) strand; PAM type: YTN; PAM sequence: CTG
ctatgcatatgatctttacc

SEQ ID NO: 288646 - DNA, 20 bp, Artificial Sequence
  Description of Artificial Sequence: Synthetic oligonucleotide
  Target: LAMA2; (-) strand; PAM type: YTN; PAM sequence: CTC
tgctatgcatatgatcttta

SEQ ID NO: 288647 - DNA, 20 bp, Artificial Sequence
  Description of Artificial Sequence: Synthetic oligonucleotide
  Target: LAMA2; (-) strand; PAM type: YTN; PAM sequence: TTA
gtcacggaaactctgctatg

SEQ ID NO: 288648 - DNA, 20 bp, Artificial Sequence
  Description of Artificial Sequence: Synthetic oligonucleotide
  Target: LAMA2; (-) strand; PAM type: YTN; PAM sequence: TTT
agtcacggaaactctgctat

SEQ ID NO: 288649 - DNA, 20 bp, Artificial Sequence
  Description of Artificial Sequence: Synthetic oligonucleotide
  Target: LAMA2; (-) strand; PAM type: YTN; PAM sequence: TTT
tagtcacggaaactctgcta

SEQ ID NO: 288650 - DNA, 20 bp, Artificial Sequence
  Description of Artificial Sequence: Synthetic oligonucleotide
  Target: LAMA2; (-) strand; PAM type: YTN; PAM sequence: CTG
ataaaagaagcaaacgcatt

SEQ ID NO: 288651 - DNA, 20 bp, Artificial Sequence
  Description of Artificial Sequence: Synthetic oligonucleotide
  Target: LAMA2; (-) strand; PAM type: YTN; PAM sequence: TTA
ccaataactgataaaagaag

SEQ ID NO: 288652 - DNA, 20 bp, Artificial Sequence
  Description of Artificial Sequence: Synthetic oligonucleotide
  Target: LAMA2; (-) strand; PAM type: YTN; PAM sequence: TTT
accaataactgataaaagaa

SEQ ID NO: 288653 - DNA, 20 bp, Artificial Sequence
  Description of Artificial Sequence: Synthetic oligonucleotide
  Target: LAMA2; (-) strand; PAM type: YTN; PAM sequence: TTT
taccaataactgataaaaga

SEQ ID NO: 288654 - DNA, 20 bp, Artificial Sequence
  Description of Artificial Sequence: Synthetic oligonucleotide
  Target: LAMA2; (-) strand; PAM type: YTN; PAM sequence: CTG
atgattttaccaataactga

SEQ ID NO: 288655 - DNA, 20 bp, Artificial Sequence
  Description of Artificial Sequence: Synthetic oligonucleotide
  Target: LAMA2; (-) strand; PAM type: YTN; PAM sequence: TTA
ccaataactgatgattttac

SEQ ID NO: 288656 - DNA, 20 bp, Artificial Sequence
  Description of Artificial Sequence: Synthetic oligonucleotide
  Target: LAMA2; (-) strand; PAM type: YTN; PAM sequence: TTT
accaataactgatgatttta

SEQ ID NO: 288657 - DNA, 20 bp, Artificial Sequence
  Description of Artificial Sequence: Synthetic oligonucleotide
  Target: LAMA2; (-) strand; PAM type: YTN; PAM sequence: TTT
taccaataactgatgatttt

SEQ ID NO: 288658 - DNA, 20 bp, Artificial Sequence
  Description of Artificial Sequence: Synthetic oligonucleotide
  Target: LAMA2; (-) strand; PAM type: YTN; PAM sequence: CTG
ataattttaccaataactga

SEQ ID NO: 288659 - DNA, 20 bp, Artificial Sequence
  Description of Artificial Sequence: Synthetic oligonucleotide
  Target: LAMA2; (-) strand; PAM type: YTN; PAM sequence: TTA
gaaaataactgataatttta

SEQ ID NO: 288660 - DNA, 20 bp, Artificial Sequence
  Description of Artificial Sequence: Synthetic oligonucleotide
  Target: LAMA2; (-) strand; PAM type: YTN; PAM sequence: TTT
agaaaataactgataatttt

SEQ ID NO: 288661 - DNA, 20 bp, Artificial Sequence
  Description of Artificial Sequence: Synthetic oligonucleotide
  Target: LAMA2; (-) strand; PAM type: YTN; PAM sequence: TTT
tagaaaataactgataattt

SEQ ID NO: 288662 - DNA, 20 bp, Artificial Sequence
  Description of Artificial Sequence: Synthetic oligonucleotide
  Target: LAMA2; (-) strand; PAM type: YTN; PAM sequence: TTT
ttagaaaataactgataatt

SEQ ID NO: 288663 - DNA, 20 bp, Artificial Sequence
  Description of Artificial Sequence: Synthetic oligonucleotide
  Target: LAMA2; (-) strand; PAM type: YTN; PAM sequence: CTT
tttagaaaataactgataat

SEQ ID NO: 288664 - DNA, 20 bp, Artificial Sequence
  Description of Artificial Sequence: Synthetic oligonucleotide
  Target: LAMA2; (-) strand; PAM type: YTN; PAM sequence: CTG
ccagacaatcatcccaggct

SEQ ID NO: 288665 - DNA, 20 bp, Artificial Sequence
  Description of Artificial Sequence: Synthetic oligonucleotide
  Target: LAMA2; (-) strand; PAM type: YTN; PAM sequence: TTG
gctgccagacaatcatccca

SEQ ID NO: 288666 - DNA, 20 bp, Artificial Sequence
  Description of Artificial Sequence: Synthetic oligonucleotide
  Target: LAMA2; (-) strand; PAM type: YTN; PAM sequence: CTT
ggctgccagacaatcatccc

SEQ ID NO: 288667 - DNA, 20 bp, Artificial Sequence
  Description of Artificial Sequence: Synthetic oligonucleotide
  Target: LAMA2; (-) strand; PAM type: YTN; PAM sequence: TTC
ttggctgccagacaatcatc

SEQ ID NO: 288668 - DNA, 20 bp, Artificial Sequence
  Description of Artificial Sequence: Synthetic oligonucleotide
  Target: LAMA2; (-) strand; PAM type: YTN; PAM sequence: CTG
tatcacccattcttggctgc

SEQ ID NO: 288669 - DNA, 20 bp, Artificial Sequence
  Description of Artificial Sequence: Synthetic oligonucleotide
  Target: LAMA2; (-) strand; PAM type: YTN; PAM sequence: CTA
tctgtatcacccattcttgg

SEQ ID NO: 288670 - DNA, 20 bp, Artificial Sequence
  Description of Artificial Sequence: Synthetic oligonucleotide
  Target: LAMA2; (-) strand; PAM type: YTN; PAM sequence: TTG
aaaatatataagcactatct

SEQ ID NO: 288671 - DNA, 20 bp, Artificial Sequence
  Description of Artificial Sequence: Synthetic oligonucleotide
  Target: LAMA2; (-) strand; PAM type: YTN; PAM sequence: TTA
ttgaaaatatataagcacta

SEQ ID NO: 288672 - DNA, 20 bp, Artificial Sequence
  Description of Artificial Sequence: Synthetic oligonucleotide
  Target: LAMA2; (-) strand; PAM type: YTN; PAM sequence: TTA
ttattgaaaatatataagca

SEQ ID NO: 288673 - DNA, 20 bp, Artificial Sequence
  Description of Artificial Sequence: Synthetic oligonucleotide
  Target: LAMA2; (-) strand; PAM type: YTN; PAM sequence: TTA
aagttattattgaaaatata

SEQ ID NO: 288674 - DNA, 20 bp, Artificial Sequence
  Description of Artificial Sequence: Synthetic oligonucleotide
  Target: LAMA2; (-) strand; PAM type: YTN; PAM sequence: CTG
tgattaaagttattattgaa

SEQ ID NO: 288675 - DNA, 20 bp, Artificial Sequence
  Description of Artificial Sequence: Synthetic oligonucleotide
  Target: LAMA2; (-) strand; PAM type: YTN; PAM sequence: TTG
tatctgtgattaaagttatt

SEQ ID NO: 288676 - DNA, 20 bp, Artificial Sequence
  Description of Artificial Sequence: Synthetic oligonucleotide
  Target: LAMA2; (-) strand; PAM type: YTN; PAM sequence: TTA
aattgtatctgtgattaaag

SEQ ID NO: 288677 - DNA, 20 bp, Artificial Sequence
  Description of Artificial Sequence: Synthetic oligonucleotide
  Target: LAMA2; (-) strand; PAM type: YTN; PAM sequence: TTG
aaaataaatagtaattaaat

SEQ ID NO: 288678 - DNA, 20 bp, Artificial Sequence
  Description of Artificial Sequence: Synthetic oligonucleotide
  Target: LAMA2; (-) strand; PAM type: YTN; PAM sequence: TTG
tattgaaaataaatagtaat

SEQ ID NO: 288679 - DNA, 20 bp, Artificial Sequence
  Description of Artificial Sequence: Synthetic oligonucleotide
  Target: LAMA2; (-) strand; PAM type: YTN; PAM sequence: TTA
tgtggggagttgtattgaaa

SEQ ID NO: 288680 - DNA, 20 bp, Artificial Sequence
  Description of Artificial Sequence: Synthetic oligonucleotide
  Target: LAMA2; (-) strand; PAM type: YTN; PAM sequence: TTA
aaggattatgtggggagttg

SEQ ID NO: 288681 - DNA, 20 bp, Artificial Sequence
  Description of Artificial Sequence: Synthetic oligonucleotide
  Target: LAMA2; (-) strand; PAM type: YTN; PAM sequence: CTT
aaaggattatgtggggagtt

SEQ ID NO: 288682 - DNA, 20 bp, Artificial Sequence
  Description of Artificial Sequence: Synthetic oligonucleotide
  Target: LAMA2; (-) strand; PAM type: YTN; PAM sequence: TTG
cttaaaggattatgtgggga

SEQ ID NO: 288683 - DNA, 20 bp, Artificial Sequence
  Description of Artificial Sequence: Synthetic oligonucleotide
  Target: LAMA2; (-) strand; PAM type: YTN; PAM sequence: TTA
ccggatgtattgcttaaagg

SEQ ID NO: 288684 - DNA, 20 bp, Artificial Sequence
  Description of Artificial Sequence: Synthetic oligonucleotide
  Target: LAMA2; (-) strand; PAM type: YTN; PAM sequence: TTA
ttaccggatgtattgcttaa

SEQ ID NO: 288685 - DNA, 20 bp, Artificial Sequence
  Description of Artificial Sequence: Synthetic oligonucleotide
  Target: LAMA2; (-) strand; PAM type: YTN; PAM sequence: CTG
ggaaaaattattaccggatg

SEQ ID NO: 288686 - DNA, 20 bp, Artificial Sequence
  Description of Artificial Sequence: Synthetic oligonucleotide
  Target: LAMA2; (-) strand; PAM type: YTN; PAM sequence: CTC
catgctgggaaaaattatta

SEQ ID NO: 288687 - DNA, 20 bp, Artificial Sequence
  Description of Artificial Sequence: Synthetic oligonucleotide
  Target: LAMA2; (-) strand; PAM type: YTN; PAM sequence: CTG
tatggctccatgctgggaaa

SEQ ID NO: 288688 - DNA, 20 bp, Artificial Sequence
  Description of Artificial Sequence: Synthetic oligonucleotide
  Target: LAMA2; (-) strand; PAM type: YTN; PAM sequence: CTG
ctgtatggctccatgctggg

SEQ ID NO: 288689 - DNA, 20 bp, Artificial Sequence
  Description of Artificial Sequence: Synthetic oligonucleotide
  Target: LAMA2; (-) strand; PAM type: YTN; PAM sequence: TTG
ctgctgtatggctccatgct

SEQ ID NO: 288690 - DNA, 20 bp, Artificial Sequence
  Description of Artificial Sequence: Synthetic oligonucleotide
  Target: LAMA2; (-) strand; PAM type: YTN; PAM sequence: TTT
gctgctgtatggctccatgc

SEQ ID NO: 288691 - DNA, 20 bp, Artificial Sequence
  Description of Artificial Sequence: Synthetic oligonucleotide
  Target: LAMA2; (-) strand; PAM type: YTN; PAM sequence: TTT
tgctgctgtatggctccatg

SEQ ID NO: 288692 - DNA, 20 bp, Artificial Sequence
  Description of Artificial Sequence: Synthetic oligonucleotide
  Target: LAMA2; (-) strand; PAM type: YTN; PAM sequence: TTA
aggaagcattttgctgctgt

SEQ ID NO: 288693 - DNA, 20 bp, Artificial Sequence
  Description of Artificial Sequence: Synthetic oligonucleotide
  Target: LAMA2; (-) strand; PAM type: YTN; PAM sequence: CTG
aaagaagattaaggaagcat

SEQ ID NO: 288694 - DNA, 20 bp, Artificial Sequence
  Description of Artificial Sequence: Synthetic oligonucleotide
  Target: LAMA2; (-) strand; PAM type: YTN; PAM sequence: CTC
tgaaagaagattaaggaagc

SEQ ID NO: 288695 - DNA, 20 bp, Artificial Sequence
  Description of Artificial Sequence: Synthetic oligonucleotide
  Target: LAMA2; (-) strand; PAM type: YTN; PAM sequence: CTC
aggtctctgaaagaagatta

SEQ ID NO: 288696 - DNA, 20 bp, Artificial Sequence
  Description of Artificial Sequence: Synthetic oligonucleotide
  Target: LAMA2; (-) strand; PAM type: YTN; PAM sequence: TTC
aactcaggtctctgaaagaa

SEQ ID NO: 288697 - DNA, 20 bp, Artificial Sequence
  Description of Artificial Sequence: Synthetic oligonucleotide
  Target: LAMA2; (-) strand; PAM type: YTN; PAM sequence: TTT
caactcaggtctctgaaaga

SEQ ID NO: 288698 - DNA, 20 bp, Artificial Sequence
  Description of Artificial Sequence: Synthetic oligonucleotide
  Target: LAMA2; (-) strand; PAM type: YTN; PAM sequence: TTT
tcaactcaggtctctgaaag

SEQ ID NO: 288699 - DNA, 20 bp, Artificial Sequence
  Description of Artificial Sequence: Synthetic oligonucleotide
  Target: LAMA2; (-) strand; PAM type: YTN; PAM sequence: CTT
ttcaactcaggtctctgaaa

SEQ ID NO: 288700 - DNA, 20 bp, Artificial Sequence
  Description of Artificial Sequence: Synthetic oligonucleotide
  Target: LAMA2; (-) strand; PAM type: YTN; PAM sequence: TTA
taatcaccttttcaactcag

SEQ ID NO: 288701 - DNA, 20 bp, Artificial Sequence
  Description of Artificial Sequence: Synthetic oligonucleotide
  Target: LAMA2; (-) strand; PAM type: YTN; PAM sequence: CTT
ataatcaccttttcaactca

SEQ ID NO: 288702 - DNA, 20 bp, Artificial Sequence
  Description of Artificial Sequence: Synthetic oligonucleotide
  Target: LAMA2; (-) strand; PAM type: YTN; PAM sequence: CTG
accagaaaaaaatgaggcca

SEQ ID NO: 288703 - DNA, 20 bp, Artificial Sequence
  Description of Artificial Sequence: Synthetic oligonucleotide
  Target: LAMA2; (-) strand; PAM type: YTN; PAM sequence: TTC
agtaagaaatactgaccaga

SEQ ID NO: 288704 - DNA, 20 bp, Artificial Sequence
  Description of Artificial Sequence: Synthetic oligonucleotide
  Target: LAMA2; (-) strand; PAM type: YTN; PAM sequence: TTC
ccagaaagaattcagtaaga

SEQ ID NO: 288705 - DNA, 20 bp, Artificial Sequence
  Description of Artificial Sequence: Synthetic oligonucleotide
  Target: LAMA2; (-) strand; PAM type: YTN; PAM sequence: TTA
agtgaaccaaaaggtatgtt

SEQ ID NO: 288706 - DNA, 20 bp, Artificial Sequence
  Description of Artificial Sequence: Synthetic oligonucleotide
  Target: LAMA2; (-) strand; PAM type: YTN; PAM sequence: TTG
aaaacatattaagtgaacca

SEQ ID NO: 288707 - DNA, 20 bp, Artificial Sequence
  Description of Artificial Sequence: Synthetic oligonucleotide
  Target: LAMA2; (-) strand; PAM type: YTN; PAM sequence: TTT
gaaaacatattaagtgaacc

SEQ ID NO: 288708 - DNA, 20 bp, Artificial Sequence
  Description of Artificial Sequence: Synthetic oligonucleotide
  Target: LAMA2; (-) strand; PAM type: YTN; PAM sequence: TTC
atttgaaaacatattaagtg

SEQ ID NO: 288709 - DNA, 20 bp, Artificial Sequence
  Description of Artificial Sequence: Synthetic oligonucleotide
  Target: LAMA2; (-) strand; PAM type: YTN; PAM sequence: TTA
cagtcgtaaaatgtgagttc

SEQ ID NO: 288710 - DNA, 20 bp, Artificial Sequence
  Description of Artificial Sequence: Synthetic oligonucleotide
  Target: LAMA2; (-) strand; PAM type: YTN; PAM sequence: TTA
ttacagtcgtaaaatgtgag

SEQ ID NO: 288711 - DNA, 20 bp, Artificial Sequence
  Description of Artificial Sequence: Synthetic oligonucleotide
  Target: LAMA2; (-) strand; PAM type: YTN; PAM sequence: TTT
attacagtcgtaaaatgtga

SEQ ID NO: 288712 - DNA, 20 bp, Artificial Sequence
  Description of Artificial Sequence: Synthetic oligonucleotide
  Target: LAMA2; (-) strand; PAM type: YTN; PAM sequence: TTT
tattacagtcgtaaaatgtg

SEQ ID NO: 288713 - DNA, 20 bp, Artificial Sequence
  Description of Artificial Sequence: Synthetic oligonucleotide
  Target: LAMA2; (-) strand; PAM type: YTN; PAM sequence: CTT
ttattacagtcgtaaaatgt

SEQ ID NO: 288714 - DNA, 20 bp, Artificial Sequence
  Description of Artificial Sequence: Synthetic oligonucleotide
  Target: LAMA2; (-) strand; PAM type: YTN; PAM sequence: CTA
agacatatccttttattaca

SEQ ID NO: 288715 - DNA, 20 bp, Artificial Sequence
  Description of Artificial Sequence: Synthetic oligonucleotide
  Target: LAMA2; (-) strand; PAM type: YTN; PAM sequence: TTC
taagacatatccttttatta

SEQ ID NO: 288716 - DNA, 20 bp, Artificial Sequence
  Description of Artificial Sequence: Synthetic oligonucleotide
  Target: LAMA2; (-) strand; PAM type: YTN; PAM sequence: TTT
ctaagacatatccttttatt

SEQ ID NO: 288717 - DNA, 20 bp, Artificial Sequence
  Description of Artificial Sequence: Synthetic oligonucleotide
  Target: LAMA2; (-) strand; PAM type: YTN; PAM sequence: TTA
tgatgcacatggtcacaaca

SEQ ID NO: 288718 - DNA, 20 bp, Artificial Sequence
  Description of Artificial Sequence: Synthetic oligonucleotide
  Target: LAMA2; (-) strand; PAM type: YTN; PAM sequence: CTG
tgatattatgatgcacatgg

SEQ ID NO: 288719 - DNA, 20 bp, Artificial Sequence
  Description of Artificial Sequence: Synthetic oligonucleotide
  Target: LAMA2; (-) strand; PAM type: YTN; PAM sequence: TTG
tggctgtgatattatgatgc

SEQ ID NO: 288720 - DNA, 20 bp, Artificial Sequence
  Description of Artificial Sequence: Synthetic oligonucleotide
  Target: LAMA2; (-) strand; PAM type: YTN; PAM sequence: TTT
gtggctgtgatattatgatg

SEQ ID NO: 288721 - DNA, 20 bp, Artificial Sequence
  Description of Artificial Sequence: Synthetic oligonucleotide
  Target: LAMA2; (-) strand; PAM type: YTN; PAM sequence: TTT
tgtggctgtgatattatgat

SEQ ID NO: 288722 - DNA, 20 bp, Artificial Sequence
  Description of Artificial Sequence: Synthetic oligonucleotide
  Target: LAMA2; (-) strand; PAM type: YTN; PAM sequence: TTT
ttgtggctgtgatattatga

SEQ ID NO: 288723 - DNA, 20 bp, Artificial Sequence
  Description of Artificial Sequence: Synthetic oligonucleotide
  Target: LAMA2; (-) strand; PAM type: YTN; PAM sequence: CTG
aatttttgtggctgtgatat

SEQ ID NO: 288724 - DNA, 20 bp, Artificial Sequence
  Description of Artificial Sequence: Synthetic oligonucleotide
  Target: LAMA2; (-) strand; PAM type: YTN; PAM sequence: TTC
tgaatttttgtggctgtgat

SEQ ID NO: 288725 - DNA, 20 bp, Artificial Sequence
  Description of Artificial Sequence: Synthetic oligonucleotide
  Target: LAMA2; (-) strand; PAM type: YTN; PAM sequence: TTT
ctgaatttttgtggctgtga

SEQ ID NO: 288726 - DNA, 20 bp, Artificial Sequence
  Description of Artificial Sequence: Synthetic oligonucleotide
  Target: LAMA2; (-) strand; PAM type: YTN; PAM sequence: TTT
tctgaatttttgtggctgtg

SEQ ID NO: 288727 - DNA, 20 bp, Artificial Sequence
  Description of Artificial Sequence: Synthetic oligonucleotide
  Target: LAMA2; (-) strand; PAM type: YTN; PAM sequence: CTA
ttttctgaatttttgtggct

SEQ ID NO: 288728 - DNA, 20 bp, Artificial Sequence
  Description of Artificial Sequence: Synthetic oligonucleotide
  Target: LAMA2; (-) strand; PAM type: YTN; PAM sequence: TTA
ctattttctgaatttttgtg

SEQ ID NO: 288729 - DNA, 20 bp, Artificial Sequence
  Description of Artificial Sequence: Synthetic oligonucleotide
  Target: LAMA2; (-) strand; PAM type: YTN; PAM sequence: TTG
gtgttactattttctgaatt

SEQ ID NO: 288730 - DNA, 20 bp, Artificial Sequence
  Description of Artificial Sequence: Synthetic oligonucleotide
  Target: LAMA2; (-) strand; PAM type: YTN; PAM sequence: TTG
aaaatagaattggtgttact

SEQ ID NO: 288731 - DNA, 20 bp, Artificial Sequence
  Description of Artificial Sequence: Synthetic oligonucleotide
  Target: LAMA2; (-) strand; PAM type: YTN; PAM sequence: TTT
gaaaatagaattggtgttac

SEQ ID NO: 288732 - DNA, 20 bp, Artificial Sequence
  Description of Artificial Sequence: Synthetic oligonucleotide
  Target: LAMA2; (-) strand; PAM type: YTN; PAM sequence: TTT
tgaaaatagaattggtgtta

SEQ ID NO: 288733 - DNA, 20 bp, Artificial Sequence
  Description of Artificial Sequence: Synthetic oligonucleotide
  Target: LAMA2; (-) strand; PAM type: YTN; PAM sequence: TTG
cagaaatccattttgaaaat

SEQ ID NO: 288734 - DNA, 20 bp, Artificial Sequence
  Description of Artificial Sequence: Synthetic oligonucleotide
  Target: LAMA2; (-) strand; PAM type: YTN; PAM sequence: CTG
ttgcagaaatccattttgaa

SEQ ID NO: 288735 - DNA, 20 bp, Artificial Sequence
  Description of Artificial Sequence: Synthetic oligonucleotide
  Target: LAMA2; (-) strand; PAM type: YTN; PAM sequence: CTC
tgttgcagaaatccattttg

SEQ ID NO: 288736 - DNA, 20 bp, Artificial Sequence
  Description of Artificial Sequence: Synthetic oligonucleotide
  Target: LAMA2; (-) strand; PAM type: YTN; PAM sequence: CTG
aatatgtcactctgttgcag

SEQ ID NO: 288737 - DNA, 20 bp, Artificial Sequence
  Description of Artificial Sequence: Synthetic oligonucleotide
  Target: LAMA2; (-) strand; PAM type: YTN; PAM sequence: TTG
ctgaatatgtcactctgttg

SEQ ID NO: 288738 - DNA, 20 bp, Artificial Sequence
  Description of Artificial Sequence: Synthetic oligonucleotide
  Target: LAMA2; (-) strand; PAM type: YTN; PAM sequence: CTA
aattgctgaatatgtcactc

SEQ ID NO: 288739 - DNA, 20 bp, Artificial Sequence
  Description of Artificial Sequence: Synthetic oligonucleotide
  Target: LAMA2; (-) strand; PAM type: YTN; PAM sequence: TTG
tggctaaattgctgaatatg

SEQ ID NO: 288740 - DNA, 20 bp, Artificial Sequence
  Description of Artificial Sequence: Synthetic oligonucleotide
  Target: LAMA2; (-) strand; PAM type: YTN; PAM sequence: CTT
gtggctaaattgctgaatat

SEQ ID NO: 288741 - DNA, 20 bp, Artificial Sequence
  Description of Artificial Sequence: Synthetic oligonucleotide
  Target: LAMA2; (-) strand; PAM type: YTN; PAM sequence: TTA
gggtcttgtggctaaattgc

SEQ ID NO: 288742 - DNA, 20 bp, Artificial Sequence
  Description of Artificial Sequence: Synthetic oligonucleotide
  Target: LAMA2; (-) strand; PAM type: YTN; PAM sequence: TTA
tgttagggtcttgtggctaa

SEQ ID NO: 288743 - DNA, 20 bp, Artificial Sequence
  Description of Artificial Sequence: Synthetic oligonucleotide
  Target: LAMA2; (-) strand; PAM type: YTN; PAM sequence: TTT
atgttagggtcttgtggcta

SEQ ID NO: 288744 - DNA, 20 bp, Artificial Sequence
  Description of Artificial Sequence: Synthetic oligonucleotide
  Target: LAMA2; (-) strand; PAM type: YTN; PAM sequence: TTG
tgtggtttatgttagggtct

SEQ ID NO: 288745 - DNA, 20 bp, Artificial Sequence
  Description of Artificial Sequence: Synthetic oligonucleotide
  Target: LAMA2; (-) strand; PAM type: YTN; PAM sequence: CTT
gtgtggtttatgttagggtc

SEQ ID NO: 288746 - DNA, 20 bp, Artificial Sequence
  Description of Artificial Sequence: Synthetic oligonucleotide
  Target: LAMA2; (-) strand; PAM type: YTN; PAM sequence: TTC
ttgtgtggtttatgttaggg

SEQ ID NO: 288747 - DNA, 20 bp, Artificial Sequence
  Description of Artificial Sequence: Synthetic oligonucleotide
  Target: LAMA2; (-) strand; PAM type: YTN; PAM sequence: TTT
cttgtgtggtttatgttagg

SEQ ID NO: 288748 - DNA, 20 bp, Artificial Sequence
  Description of Artificial Sequence: Synthetic oligonucleotide
  Target: LAMA2; (-) strand; PAM type: YTN; PAM sequence: TTT
tcttgtgtggtttatgttag

SEQ ID NO: 288749 - DNA, 20 bp, Artificial Sequence
  Description of Artificial Sequence: Synthetic oligonucleotide
  Target: LAMA2; (-) strand; PAM type: YTN; PAM sequence: CTT
ttcttgtgtggtttatgtta

SEQ ID NO: 288750 - DNA, 20 bp, Artificial Sequence
  Description of Artificial Sequence: Synthetic oligonucleotide
  Target: LAMA2; (-) strand; PAM type: YTN; PAM sequence: TTC
acttttcttgtgtggtttat

SEQ ID NO: 288751 - DNA, 20 bp, Artificial Sequence
  Description of Artificial Sequence: Synthetic oligonucleotide
  Target: LAMA2; (-) strand; PAM type: YTN; PAM sequence: TTA
gatacacagagaagtatatg

SEQ ID NO: 288752 - DNA, 20 bp, Artificial Sequence
  Description of Artificial Sequence: Synthetic oligonucleotide
  Target: LAMA2; (-) strand; PAM type: YTN; PAM sequence: TTA
atagagtaaacataccccag

SEQ ID NO: 288753 - DNA, 20 bp, Artificial Sequence
  Description of Artificial Sequence: Synthetic oligonucleotide
  Target: LAMA2; (-) strand; PAM type: YTN; PAM sequence: CTA
ttaatagagtaaacataccc

SEQ ID NO: 288754 - DNA, 20 bp, Artificial Sequence
  Description of Artificial Sequence: Synthetic oligonucleotide
  Target: LAMA2; (-) strand; PAM type: YTN; PAM sequence: CTC
tattaatagagtaaacatac

SEQ ID NO: 288755 - DNA, 20 bp, Artificial Sequence
  Description of Artificial Sequence: Synthetic oligonucleotide
  Target: LAMA2; (-) strand; PAM type: YTN; PAM sequence: CTC
tctattaatagagtaaacat

SEQ ID NO: 288756 - DNA, 20 bp, Artificial Sequence
  Description of Artificial Sequence: Synthetic oligonucleotide
  Target: LAMA2; (-) strand; PAM type: YTN; PAM sequence: CTC
atgaaatctctctattaata

SEQ ID NO: 288757 - DNA, 20 bp, Artificial Sequence
  Description of Artificial Sequence: Synthetic oligonucleotide
  Target: LAMA2; (-) strand; PAM type: YTN; PAM sequence: CTC
cacactcatgaaatctctct

SEQ ID NO: 288758 - DNA, 20 bp, Artificial Sequence
  Description of Artificial Sequence: Synthetic oligonucleotide
  Target: LAMA2; (-) strand; PAM type: YTN; PAM sequence: TTA
tgtgcccatcagtgagctcc

SEQ ID NO: 288759 - DNA, 20 bp, Artificial Sequence
  Description of Artificial Sequence: Synthetic oligonucleotide
  Target: LAMA2; (-) strand; PAM type: YTN; PAM sequence: TTT
atgtgcccatcagtgagctc

SEQ ID NO: 288760 - DNA, 20 bp, Artificial Sequence
  Description of Artificial Sequence: Synthetic oligonucleotide
  Target: LAMA2; (-) strand; PAM type: YTN; PAM sequence: TTT
tatgtgcccatcagtgagct

SEQ ID NO: 288761 - DNA, 20 bp, Artificial Sequence
  Description of Artificial Sequence: Synthetic oligonucleotide
  Target: LAMA2; (-) strand; PAM type: YTN; PAM sequence: CTT
ttatgtgcccatcagtgagc

SEQ ID NO: 288762 - DNA, 20 bp, Artificial Sequence
  Description of Artificial Sequence: Synthetic oligonucleotide
  Target: LAMA2; (-) strand; PAM type: YTN; PAM sequence: CTG
acttttatgtgcccatcagt

SEQ ID NO: 288763 - DNA, 20 bp, Artificial Sequence
  Description of Artificial Sequence: Synthetic oligonucleotide
  Target: LAMA2; (-) strand; PAM type: YTN; PAM sequence: CTG
agcccagatcgtaactgact

SEQ ID NO: 288764 - DNA, 20 bp, Artificial Sequence
  Description of Artificial Sequence: Synthetic oligonucleotide
  Target: LAMA2; (-) strand; PAM type: YTN; PAM sequence: TTC
ctgagcccagatcgtaactg

SEQ ID NO: 288765 - DNA, 20 bp, Artificial Sequence
  Description of Artificial Sequence: Synthetic oligonucleotide
  Target: LAMA2; (-) strand; PAM type: YTN; PAM sequence: CTG
acaacggaagccattcctga

SEQ ID NO: 288766 - DNA, 20 bp, Artificial Sequence
  Description of Artificial Sequence: Synthetic oligonucleotide
  Target: LAMA2; (-) strand; PAM type: YTN; PAM sequence: TTG
ctgacaacggaagccattcc

SEQ ID NO: 288767 - DNA, 20 bp, Artificial Sequence
  Description of Artificial Sequence: Synthetic oligonucleotide
  Target: LAMA2; (-) strand; PAM type: YTN; PAM sequence: TTG
attgctgacaacggaagcca

SEQ ID NO: 288768 - DNA, 20 bp, Artificial Sequence
  Description of Artificial Sequence: Synthetic oligonucleotide
  Target: LAMA2; (-) strand; PAM type: YTN; PAM sequence: TTT
gattgctgacaacggaagcc

SEQ ID NO: 288769 - DNA, 20 bp, Artificial Sequence
  Description of Artificial Sequence: Synthetic oligonucleotide
  Target: LAMA2; (-) strand; PAM type: YTN; PAM sequence: TTT
tgattgctgacaacggaagc

SEQ ID NO: 288770 - DNA, 20 bp, Artificial Sequence
  Description of Artificial Sequence: Synthetic oligonucleotide
  Target: LAMA2; (-) strand; PAM type: YTN; PAM sequence: TTA
tggttttgattgctgacaac

SEQ ID NO: 288771 - DNA, 20 bp, Artificial Sequence
  Description of Artificial Sequence: Synthetic oligonucleotide
  Target: LAMA2; (-) strand; PAM type: YTN; PAM sequence: TTC
ccatcattatggttttgatt

SEQ ID NO: 288772 - DNA, 20 bp, Artificial Sequence
  Description of Artificial Sequence: Synthetic oligonucleotide
  Target: LAMA2; (-) strand; PAM type: YTN; PAM sequence: TTT
cccatcattatggttttgat

SEQ ID NO: 288773 - DNA, 20 bp, Artificial Sequence
  Description of Artificial Sequence: Synthetic oligonucleotide
  Target: LAMA2; (-) strand; PAM type: YTN; PAM sequence: TTC
catttcccatcattatggtt

SEQ ID NO: 288774 - DNA, 20 bp, Artificial Sequence
  Description of Artificial Sequence: Synthetic oligonucleotide
  Target: LAMA2; (-) strand; PAM type: YTN; PAM sequence: TTT
ccatttcccatcattatggt

SEQ ID NO: 288775 - DNA, 20 bp, Artificial Sequence
  Description of Artificial Sequence: Synthetic oligonucleotide
  Target: LAMA2; (-) strand; PAM type: YTN; PAM sequence: TTG
acagagtgaatgatttccat

SEQ ID NO: 288776 - DNA, 20 bp, Artificial Sequence
  Description of Artificial Sequence: Synthetic oligonucleotide
  Target: LAMA2; (-) strand; PAM type: YTN; PAM sequence: CTT
gacagagtgaatgatttcca

SEQ ID NO: 288777 - DNA, 20 bp, Artificial Sequence
  Description of Artificial Sequence: Synthetic oligonucleotide
  Target: LAMA2; (-) strand; PAM type: YTN; PAM sequence: TTC
ttgacagagtgaatgatttc

SEQ ID NO: 288778 - DNA, 20 bp, Artificial Sequence
  Description of Artificial Sequence: Synthetic oligonucleotide
  Target: LAMA2; (-) strand; PAM type: YTN; PAM sequence: TTG
aattcttgacagagtgaatg

SEQ ID NO: 288779 - DNA, 20 bp, Artificial Sequence
  Description of Artificial Sequence: Synthetic oligonucleotide
  Target: LAMA2; (-) strand; PAM type: YTN; PAM sequence: TTT
gaattcttgacagagtgaat

SEQ ID NO: 288780 - DNA, 20 bp, Artificial Sequence
  Description of Artificial Sequence: Synthetic oligonucleotide
  Target: LAMA2; (-) strand; PAM type: YTN; PAM sequence: TTT
tgaattcttgacagagtgaa

SEQ ID NO: 288781 - DNA, 20 bp, Artificial Sequence
  Description of Artificial Sequence: Synthetic oligonucleotide
  Target: LAMA2; (-) strand; PAM type: YTN; PAM sequence: TTT
ttgaattcttgacagagtga

SEQ ID NO: 288782 - DNA, 20 bp, Artificial Sequence
  Description of Artificial Sequence: Synthetic oligonucleotide
  Target: LAMA2; (-) strand; PAM type: YTN; PAM sequence: TTG
tttttgaattcttgacagag

SEQ ID NO: 288783 - DNA, 20 bp, Artificial Sequence
  Description of Artificial Sequence: Synthetic oligonucleotide
  Target: LAMA2; (-) strand; PAM type: YTN; PAM sequence: CTT
gtttttgaattcttgacaga

SEQ ID NO: 288784 - DNA, 20 bp, Artificial Sequence
  Description of Artificial Sequence: Synthetic oligonucleotide
  Target: LAMA2; (-) strand; PAM type: YTN; PAM sequence: CTC
accttgtttttgaattcttg

SEQ ID NO: 288785 - DNA, 20 bp, Artificial Sequence
  Description of Artificial Sequence: Synthetic oligonucleotide
  Target: LAMA2; (-) strand; PAM type: YTN; PAM sequence: CTG
taaaaactcaccttgttttt

SEQ ID NO: 288786 - DNA, 20 bp, Artificial Sequence
  Description of Artificial Sequence: Synthetic oligonucleotide
  Target: LAMA2; (-) strand; PAM type: YTN; PAM sequence: TTA
ctgtaaaaactcaccttgtt

SEQ ID NO: 288787 - DNA, 20 bp, Artificial Sequence
  Description of Artificial Sequence: Synthetic oligonucleotide
  Target: LAMA2; (-) strand; PAM type: YTN; PAM sequence: TTA
ttactgtaaaaactcacctt

SEQ ID NO: 288788 - DNA, 20 bp, Artificial Sequence
  Description of Artificial Sequence: Synthetic oligonucleotide
  Target: LAMA2; (-) strand; PAM type: YTN; PAM sequence: TTG
cattattactgtaaaaactc

SEQ ID NO: 288789 - DNA, 20 bp, Artificial Sequence
  Description of Artificial Sequence: Synthetic oligonucleotide
  Target: LAMA2; (-) strand; PAM type: YTN; PAM sequence: CTA
tattgcattattactgtaaa

SEQ ID NO: 288790 - DNA, 20 bp, Artificial Sequence
  Description of Artificial Sequence: Synthetic oligonucleotide
  Target: LAMA2; (-) strand; PAM type: YTN; PAM sequence: TTA
aggcctatattgcattatta

SEQ ID NO: 288791 - DNA, 20 bp, Artificial Sequence
  Description of Artificial Sequence: Synthetic oligonucleotide
  Target: LAMA2; (-) strand; PAM type: YTN; PAM sequence: TTC
atgattaaggcctatattgc

SEQ ID NO: 288792 - DNA, 20 bp, Artificial Sequence
  Description of Artificial Sequence: Synthetic oligonucleotide
  Target: LAMA2; (-) strand; PAM type: YTN; PAM sequence: TTT
catgattaaggcctatattg

SEQ ID NO: 288793 - DNA, 20 bp, Artificial Sequence
  Description of Artificial Sequence: Synthetic oligonucleotide
  Target: LAMA2; (-) strand; PAM type: YTN; PAM sequence: TTG
gatttcatgattaaggccta

SEQ ID NO: 288794 - DNA, 20 bp, Artificial Sequence
  Description of Artificial Sequence: Synthetic oligonucleotide
  Target: LAMA2; (-) strand; PAM type: YTN; PAM sequence: TTT
ggatttcatgattaaggcct

SEQ ID NO: 288795 - DNA, 20 bp, Artificial Sequence
  Description of Artificial Sequence: Synthetic oligonucleotide
  Target: LAMA2; (-) strand; PAM type: YTN; PAM sequence: CTT
tggatttcatgattaaggcc

SEQ ID NO: 288796 - DNA, 20 bp, Artificial Sequence
  Description of Artificial Sequence: Synthetic oligonucleotide
  Target: LAMA2; (-) strand; PAM type: YTN; PAM sequence: TTG
atcaggtacatgtgcacttt

SEQ ID NO: 288797 - DNA, 20 bp, Artificial Sequence
  Description of Artificial Sequence: Synthetic oligonucleotide
  Target: LAMA2; (-) strand; PAM type: YTN; PAM sequence: CTT
gatcaggtacatgtgcactt

SEQ ID NO: 288798 - DNA, 20 bp, Artificial Sequence
  Description of Artificial Sequence: Synthetic oligonucleotide
  Target: LAMA2; (-) strand; PAM type: YTN; PAM sequence: CTC
ttgatcaggtacatgtgcac

SEQ ID NO: 288799 - DNA, 20 bp, Artificial Sequence
  Description of Artificial Sequence: Synthetic oligonucleotide
  Target: LAMA2; (-) strand; PAM type: YTN; PAM sequence: TTC
ctcttgatcaggtacatgtg

SEQ ID NO: 288800 - DNA, 20 bp, Artificial Sequence
  Description of Artificial Sequence: Synthetic oligonucleotide
  Target: LAMA2; (-) strand; PAM type: YTN; PAM sequence: CTT
cctcttgatcaggtacatgt

SEQ ID NO: 288801 - DNA, 20 bp, Artificial Sequence
  Description of Artificial Sequence: Synthetic oligonucleotide
  Target: LAMA2; (-) strand; PAM type: YTN; PAM sequence: TTA
tagacggagccttcctcttg

SEQ ID NO: 288802 - DNA, 20 bp, Artificial Sequence
  Description of Artificial Sequence: Synthetic oligonucleotide
  Target: LAMA2; (-) strand; PAM type: YTN; PAM sequence: CTA
aaattatagacggagccttc

SEQ ID NO: 288803 - DNA, 20 bp, Artificial Sequence
  Description of Artificial Sequence: Synthetic oligonucleotide
  Target: LAMA2; (-) strand; PAM type: YTN; PAM sequence: CTC
gtgagtagctaaaattatag

SEQ ID NO: 288804 - DNA, 20 bp, Artificial Sequence
  Description of Artificial Sequence: Synthetic oligonucleotide
  Target: LAMA2; (-) strand; PAM type: YTN; PAM sequence: CTG
aactcgtgagtagctaaaat

SEQ ID NO: 288805 - DNA, 20 bp, Artificial Sequence
  Description of Artificial Sequence: Synthetic oligonucleotide
  Target: LAMA2; (-) strand; PAM type: YTN; PAM sequence: TTC
actgaactcgtgagtagcta

SEQ ID NO: 288806 - DNA, 20 bp, Artificial Sequence
  Description of Artificial Sequence: Synthetic oligonucleotide
  Target: LAMA2; (-) strand; PAM type: YTN; PAM sequence: TTT
cactgaactcgtgagtagct

SEQ ID NO: 288807 - DNA, 20 bp, Artificial Sequence
  Description of Artificial Sequence: Synthetic oligonucleotide
  Target: LAMA2; (-) strand; PAM type: YTN; PAM sequence: TTT
tcactgaactcgtgagtagc

SEQ ID NO: 288808 - DNA, 20 bp, Artificial Sequence
  Description of Artificial Sequence: Synthetic oligonucleotide
  Target: LAMA2; (-) strand; PAM type: YTN; PAM sequence: TTT
ttcactgaactcgtgagtag

SEQ ID NO: 288809 - DNA, 20 bp, Artificial Sequence
  Description of Artificial Sequence: Synthetic oligonucleotide
  Target: LAMA2; (-) strand; PAM type: YTN; PAM sequence: CTG
tataaatttttcactgaact

SEQ ID NO: 288810 - DNA, 20 bp, Artificial Sequence
  Description of Artificial Sequence: Synthetic oligonucleotide
  Target: LAMA2; (-) strand; PAM type: YTN; PAM sequence: CTA
agccaaaaaaatgactgtat

SEQ ID NO: 288811 - DNA, 20 bp, Artificial Sequence
  Description of Artificial Sequence: Synthetic oligonucleotide
  Target: LAMA2; (-) strand; PAM type: YTN; PAM sequence: CTA
taatctaagccaaaaaaatg

SEQ ID NO: 288812 - DNA, 20 bp, Artificial Sequence
  Description of Artificial Sequence: Synthetic oligonucleotide
  Target: LAMA2; (-) strand; PAM type: YTN; PAM sequence: CTA
acccaaatcacctataatct

SEQ ID NO: 288813 - DNA, 20 bp, Artificial Sequence
  Description of Artificial Sequence: Synthetic oligonucleotide
  Target: LAMA2; (-) strand; PAM type: YTN; PAM sequence: TTC
aatcagtcatgtctaaccca

SEQ ID NO: 288814 - DNA, 20 bp, Artificial Sequence
  Description of Artificial Sequence: Synthetic oligonucleotide
  Target: LAMA2; (-) strand; PAM type: YTN; PAM sequence: CTT
caatcagtcatgtctaaccc

SEQ ID NO: 288815 - DNA, 20 bp, Artificial Sequence
  Description of Artificial Sequence: Synthetic oligonucleotide
  Target: LAMA2; (-) strand; PAM type: YTN; PAM sequence: CTC
ttcaatcagtcatgtctaac

SEQ ID NO: 288816 - DNA, 20 bp, Artificial Sequence
  Description of Artificial Sequence: Synthetic oligonucleotide
  Target: LAMA2; (-) strand; PAM type: YTN; PAM sequence: TTG
gctcttcaatcagtcatgtc

SEQ ID NO: 288817 - DNA, 20 bp, Artificial Sequence
  Description of Artificial Sequence: Synthetic oligonucleotide
  Target: LAMA2; (-) strand; PAM type: YTN; PAM sequence: TTT
ggctcttcaatcagtcatgt

SEQ ID NO: 288818 - DNA, 20 bp, Artificial Sequence
  Description of Artificial Sequence: Synthetic oligonucleotide
  Target: LAMA2; (-) strand; PAM type: YTN; PAM sequence: TTC
aaaagaaaatgatagagaag

SEQ ID NO: 288819 - DNA, 20 bp, Artificial Sequence
  Description of Artificial Sequence: Synthetic oligonucleotide
  Target: LAMA2; (-) strand; PAM type: YTN; PAM sequence: TTT
caaaagaaaatgatagagaa

SEQ ID NO: 288820 - DNA, 20 bp, Artificial Sequence
  Description of Artificial Sequence: Synthetic oligonucleotide
  Target: LAMA2; (-) strand; PAM type: YTN; PAM sequence: CTC
agtttcaaaagaaaatgata

SEQ ID NO: 288821 - DNA, 20 bp, Artificial Sequence
  Description of Artificial Sequence: Synthetic oligonucleotide
  Target: LAMA2; (-) strand; PAM type: YTN; PAM sequence: CTC
tcagtttcaaaagaaaatga

SEQ ID NO: 288822 - DNA, 20 bp, Artificial Sequence
  Description of Artificial Sequence: Synthetic oligonucleotide
  Target: LAMA2; (-) strand; PAM type: YTN; PAM sequence: TTA
agctctcagtttcaaaagaa

SEQ ID NO: 288823 - DNA, 20 bp, Artificial Sequence
  Description of Artificial Sequence: Synthetic oligonucleotide
  Target: LAMA2; (-) strand; PAM type: YTN; PAM sequence: TTC
aaattaagctctcagtttca

SEQ ID NO: 288824 - DNA, 20 bp, Artificial Sequence
  Description of Artificial Sequence: Synthetic oligonucleotide
  Target: LAMA2; (-) strand; PAM type: YTN; PAM sequence: TTT
caaattaagctctcagtttc

SEQ ID NO: 288825 - DNA, 20 bp, Artificial Sequence
  Description of Artificial Sequence: Synthetic oligonucleotide
  Target: LAMA2; (-) strand; PAM type: YTN; PAM sequence: CTT
tcaaattaagctctcagttt

SEQ ID NO: 288826 - DNA, 20 bp, Artificial Sequence
  Description of Artificial Sequence: Synthetic oligonucleotide
  Target: LAMA2; (-) strand; PAM type: YTN; PAM sequence: TTA
tgctttcaaattaagctctc

SEQ ID NO: 288827 - DNA, 20 bp, Artificial Sequence
  Description of Artificial Sequence: Synthetic oligonucleotide
  Target: LAMA2; (-) strand; PAM type: YTN; PAM sequence: TTT
atgctttcaaattaagctct

SEQ ID NO: 288828 - DNA, 20 bp, Artificial Sequence
  Description of Artificial Sequence: Synthetic oligonucleotide
  Target: LAMA2; (-) strand; PAM type: YTN; PAM sequence: TTT
tatgctttcaaattaagctc

SEQ ID NO: 288829 - DNA, 20 bp, Artificial Sequence
  Description of Artificial Sequence: Synthetic oligonucleotide
  Target: LAMA2; (-) strand; PAM type: YTN; PAM sequence: TTG
taagacagttttatgctttc

SEQ ID NO: 288830 - DNA, 20 bp, Artificial Sequence
  Description of Artificial Sequence: Synthetic oligonucleotide
  Target: LAMA2; (-) strand; PAM type: YTN; PAM sequence: TTG
caagttgtaagacagtttta

SEQ ID NO: 288831 - DNA, 20 bp, Artificial Sequence
  Description of Artificial Sequence: Synthetic oligonucleotide
  Target: LAMA2; (-) strand; PAM type: YTN; PAM sequence: TTT
gcaagttgtaagacagtttt

SEQ ID NO: 288832 - DNA, 20 bp, Artificial Sequence
  Description of Artificial Sequence: Synthetic oligonucleotide
  Target: LAMA2; (-) strand; PAM type: YTN; PAM sequence: TTT
tgcaagttgtaagacagttt

SEQ ID NO: 288833 - DNA, 20 bp, Artificial Sequence
  Description of Artificial Sequence: Synthetic oligonucleotide
  Target: LAMA2; (-) strand; PAM type: YTN; PAM sequence: TTA
caggatataattttgcaagt

SEQ ID NO: 288834 - DNA, 20 bp, Artificial Sequence
  Description of Artificial Sequence: Synthetic oligonucleotide
  Target: LAMA2; (-) strand; PAM type: YTN; PAM sequence: TTC
aaacatattacaggatataa

SEQ ID NO: 288835 - DNA, 20 bp, Artificial Sequence
  Description of Artificial Sequence: Synthetic oligonucleotide
  Target: LAMA2; (-) strand; PAM type: YTN; PAM sequence: TTT
caaacatattacaggatata

SEQ ID NO: 288836 - DNA, 20 bp, Artificial Sequence
  Description of Artificial Sequence: Synthetic oligonucleotide
  Target: LAMA2; (-) strand; PAM type: YTN; PAM sequence: TTT
tcaaacatattacaggatat

SEQ ID NO: 288837 - DNA, 20 bp, Artificial Sequence
  Description of Artificial Sequence: Synthetic oligonucleotide
  Target: LAMA2; (-) strand; PAM type: YTN; PAM sequence: TTT
ttcaaacatattacaggata

SEQ ID NO: 288838 - DNA, 20 bp, Artificial Sequence
  Description of Artificial Sequence: Synthetic oligonucleotide
  Target: LAMA2; (-) strand; PAM type: YTN; PAM sequence: TTG
acaaaatagggagaaaagaa

SEQ ID NO: 288839 - DNA, 20 bp, Artificial Sequence
  Description of Artificial Sequence: Synthetic oligonucleotide
  Target: LAMA2; (-) strand; PAM type: YTN; PAM sequence: CTT
gacaaaatagggagaaaaga

SEQ ID NO: 288840 - DNA, 20 bp, Artificial Sequence
  Description of Artificial Sequence: Synthetic oligonucleotide
  Target: LAMA2; (-) strand; PAM type: YTN; PAM sequence: TTA
aaggaaacatcttgacaaaa

SEQ ID NO: 288841 - DNA, 20 bp, Artificial Sequence
  Description of Artificial Sequence: Synthetic oligonucleotide
  Target: LAMA2; (-) strand; PAM type: YTN; PAM sequence: TTT
aaaggaaacatcttgacaaa

SEQ ID NO: 288842 - DNA, 20 bp, Artificial Sequence
  Description of Artificial Sequence: Synthetic oligonucleotide
  Target: LAMA2; (-) strand; PAM type: YTN; PAM sequence: CTT
taaaggaaacatcttgacaa

SEQ ID NO: 288843 - DNA, 20 bp, Artificial Sequence
  Description of Artificial Sequence: Synthetic oligonucleotide
  Target: LAMA2; (-) strand; PAM type: YTN; PAM sequence: CTG
tgggccactttaaaggaaac

SEQ ID NO: 288844 - DNA, 20 bp, Artificial Sequence
  Description of Artificial Sequence: Synthetic oligonucleotide
  Target: LAMA2; (-) strand; PAM type: YTN; PAM sequence: TTC
cactgtgggccactttaaag

SEQ ID NO: 288845 - DNA, 20 bp, Artificial Sequence
  Description of Artificial Sequence: Synthetic oligonucleotide
  Target: LAMA2; (-) strand; PAM type: YTN; PAM sequence: CTA
tagattccactgtgggccac

SEQ ID NO: 288846 - DNA, 20 bp, Artificial Sequence
  Description of Artificial Sequence: Synthetic oligonucleotide
  Target: LAMA2; (-) strand; PAM type: YTN; PAM sequence: CTC
ctatagattccactgtgggc

SEQ ID NO: 288847 - DNA, 20 bp, Artificial Sequence
  Description of Artificial Sequence: Synthetic oligonucleotide
  Target: LAMA2; (-) strand; PAM type: YTN; PAM sequence: CTA
ccactcctatagattccact

SEQ ID NO: 288848 - DNA, 20 bp, Artificial Sequence
  Description of Artificial Sequence: Synthetic oligonucleotide
  Target: LAMA2; (-) strand; PAM type: YTN; PAM sequence: CTA
tgccctaccactcctataga

SEQ ID NO: 288849 - DNA, 20 bp, Artificial Sequence
  Description of Artificial Sequence: Synthetic oligonucleotide
  Target: LAMA2; (-) strand; PAM type: YTN; PAM sequence: CTG
ataactatgccctaccactc

SEQ ID NO: 288850 - DNA, 20 bp, Artificial Sequence
  Description of Artificial Sequence: Synthetic oligonucleotide
  Target: LAMA2; (-) strand; PAM type: YTN; PAM sequence: TTA
aatgagcaaagaactgataa

SEQ ID NO: 288851 - DNA, 20 bp, Artificial Sequence
  Description of Artificial Sequence: Synthetic oligonucleotide
  Target: LAMA2; (-) strand; PAM type: YTN; PAM sequence: TTT
aaatgagcaaagaactgata

SEQ ID NO: 288852 - DNA, 20 bp, Artificial Sequence
  Description of Artificial Sequence: Synthetic oligonucleotide
  Target: LAMA2; (-) strand; PAM type: YTN; PAM sequence: TTG
gcaatttaaatgagcaaaga

SEQ ID NO: 288853 - DNA, 20 bp, Artificial Sequence
  Description of Artificial Sequence: Synthetic oligonucleotide
  Target: LAMA2; (-) strand; PAM type: YTN; PAM sequence: TTT
ggcaatttaaatgagcaaag

SEQ ID NO: 288854 - DNA, 20 bp, Artificial Sequence
  Description of Artificial Sequence: Synthetic oligonucleotide
  Target: LAMA2; (-) strand; PAM type: YTN; PAM sequence: TTG
caggcatacaaatgtttggc

SEQ ID NO: 288855 - DNA, 20 bp, Artificial Sequence
  Description of Artificial Sequence: Synthetic oligonucleotide
  Target: LAMA2; (-) strand; PAM type: YTN; PAM sequence: CTT
gcaggcatacaaatgtttgg

SEQ ID NO: 288856 - DNA, 20 bp, Artificial Sequence
  Description of Artificial Sequence: Synthetic oligonucleotide
  Target: LAMA2; (-) strand; PAM type: YTN; PAM sequence: TTA
cttgcaggcatacaaatgtt

SEQ ID NO: 288857 - DNA, 20 bp, Artificial Sequence
  Description of Artificial Sequence: Synthetic oligonucleotide
  Target: LAMA2; (-) strand; PAM type: YTN; PAM sequence: TTT
acttgcaggcatacaaatgt

SEQ ID NO: 288858 - DNA, 20 bp, Artificial Sequence
  Description of Artificial Sequence: Synthetic oligonucleotide
  Target: LAMA2; (-) strand; PAM type: YTN; PAM sequence: TTA
tttacttgcaggcatacaaa

SEQ ID NO: 288859 - DNA, 20 bp, Artificial Sequence
  Description of Artificial Sequence: Synthetic oligonucleotide
  Target: LAMA2; (-) strand; PAM type: YTN; PAM sequence: TTG
atcaattatttacttgcagg

SEQ ID NO: 288860 - DNA, 20 bp, Artificial Sequence
  Description of Artificial Sequence: Synthetic oligonucleotide
  Target: LAMA2; (-) strand; PAM type: YTN; PAM sequence: CTA
ttgatcaattatttacttgc

SEQ ID NO: 288861 - DNA, 20 bp, Artificial Sequence
  Description of Artificial Sequence: Synthetic oligonucleotide
  Target: LAMA2; (-) strand; PAM type: YTN; PAM sequence: TTA
ctattgatcaattatttact

SEQ ID NO: 288862 - DNA, 20 bp, Artificial Sequence
  Description of Artificial Sequence: Synthetic oligonucleotide
  Target: LAMA2; (-) strand; PAM type: YTN; PAM sequence: TTA
aaatgtccccgaatcataaa

SEQ ID NO: 288863 - DNA, 20 bp, Artificial Sequence
  Description of Artificial Sequence: Synthetic oligonucleotide
  Target: LAMA2; (-) strand; PAM type: YTN; PAM sequence: TTT
aaaatgtccccgaatcataa

SEQ ID NO: 288864 - DNA, 20 bp, Artificial Sequence
  Description of Artificial Sequence: Synthetic oligonucleotide
  Target: LAMA2; (-) strand; PAM type: YTN; PAM sequence: TTT
taaaatgtccccgaatcata

SEQ ID NO: 288865 - DNA, 20 bp, Artificial Sequence
  Description of Artificial Sequence: Synthetic oligonucleotide
  Target: LAMA2; (-) strand; PAM type: YTN; PAM sequence: TTG
tgaaagtgttttaaaatgtc

SEQ ID NO: 288866 - DNA, 20 bp, Artificial Sequence
  Description of Artificial Sequence: Synthetic oligonucleotide
  Target: LAMA2; (-) strand; PAM type: YTN; PAM sequence: TTT
gtgaaagtgttttaaaatgt

SEQ ID NO: 288867 - DNA, 20 bp, Artificial Sequence
  Description of Artificial Sequence: Synthetic oligonucleotide
  Target: LAMA2; (-) strand; PAM type: YTN; PAM sequence: TTA
tgtgatcagataaaacaatg

SEQ ID NO: 288868 - DNA, 20 bp, Artificial Sequence
  Description of Artificial Sequence: Synthetic oligonucleotide
  Target: LAMA2; (-) strand; PAM type: YTN; PAM sequence: CTT
atgtgatcagataaaacaat

SEQ ID NO: 288869 - DNA, 20 bp, Artificial Sequence
  Description of Artificial Sequence: Synthetic oligonucleotide
  Target: LAMA2; (-) strand; PAM type: YTN; PAM sequence: CTG
cttatgtgatcagataaaac

SEQ ID NO: 288870 - DNA, 20 bp, Artificial Sequence
  Description of Artificial Sequence: Synthetic oligonucleotide
  Target: LAMA2; (-) strand; PAM type: YTN; PAM sequence: CTG
gaacaaaatacctgcttatg

SEQ ID NO: 288871 - DNA, 20 bp, Artificial Sequence
  Description of Artificial Sequence: Synthetic oligonucleotide
  Target: LAMA2; (-) strand; PAM type: YTN; PAM sequence: CTA
acactggaacaaaatacctg

SEQ ID NO: 288872 - DNA, 20 bp, Artificial Sequence
  Description of Artificial Sequence: Synthetic oligonucleotide
  Target: LAMA2; (-) strand; PAM type: YTN; PAM sequence: CTC
taacactggaacaaaatacc

SEQ ID NO: 288873 - DNA, 20 bp, Artificial Sequence
  Description of Artificial Sequence: Synthetic oligonucleotide
  Target: LAMA2; (-) strand; PAM type: YTN; PAM sequence: TTC
tctaacactggaacaaaata

SEQ ID NO: 288874 - DNA, 20 bp, Artificial Sequence
  Description of Artificial Sequence: Synthetic oligonucleotide
  Target: LAMA2; (-) strand; PAM type: YTN; PAM sequence: TTT
ctctaacactggaacaaaat

SEQ ID NO: 288875 - DNA, 20 bp, Artificial Sequence
  Description of Artificial Sequence: Synthetic oligonucleotide
  Target: LAMA2; (-) strand; PAM type: YTN; PAM sequence: CTT
tctctaacactggaacaaaa

SEQ ID NO: 288876 - DNA, 20 bp, Artificial Sequence
  Description of Artificial Sequence: Synthetic oligonucleotide
  Target: LAMA2; (-) strand; PAM type: YTN; PAM sequence: TTA
ctttctctaacactggaaca

SEQ ID NO: 288877 - DNA, 20 bp, Artificial Sequence
  Description of Artificial Sequence: Synthetic oligonucleotide
  Target: LAMA2; (-) strand; PAM type: YTN; PAM sequence: TTT
actttctctaacactggaac

SEQ ID NO: 288878 - DNA, 20 bp, Artificial Sequence
  Description of Artificial Sequence: Synthetic oligonucleotide
  Target: LAMA2; (-) strand; PAM type: YTN; PAM sequence: TTT
tactttctctaacactggaa

SEQ ID NO: 288879 - DNA, 20 bp, Artificial Sequence
  Description of Artificial Sequence: Synthetic oligonucleotide
  Target: LAMA2; (-) strand; PAM type: YTN; PAM sequence: TTG
agtgtatattttactttctc

SEQ ID NO: 288880 - DNA, 20 bp, Artificial Sequence
  Description of Artificial Sequence: Synthetic oligonucleotide
  Target: LAMA2; (-) strand; PAM type: YTN; PAM sequence: TTT
gagtgtatattttactttct

SEQ ID NO: 288881 - DNA, 20 bp, Artificial Sequence
  Description of Artificial Sequence: Synthetic oligonucleotide
  Target: LAMA2; (-) strand; PAM type: YTN; PAM sequence: CTG
tgaccacataaaagtttgag

SEQ ID NO: 288882 - DNA, 20 bp, Artificial Sequence
  Description of Artificial Sequence: Synthetic oligonucleotide
  Target: LAMA2; (-) strand; PAM type: YTN; PAM sequence: TTA
tatatatgtctgtgaccaca

SEQ ID NO: 288883 - DNA, 20 bp, Artificial Sequence
  Description of Artificial Sequence: Synthetic oligonucleotide
  Target: LAMA2; (-) strand; PAM type: YTN; PAM sequence: TTT
atatatatgtctgtgaccac

SEQ ID NO: 288884 - DNA, 20 bp, Artificial Sequence
  Description of Artificial Sequence: Synthetic oligonucleotide
  Target: LAMA2; (-) strand; PAM type: YTN; PAM sequence: TTT
tatatatatgtctgtgacca

SEQ ID NO: 288885 - DNA, 20 bp, Artificial Sequence
  Description of Artificial Sequence: Synthetic oligonucleotide
  Target: LAMA2; (-) strand; PAM type: YTN; PAM sequence: CTT
ttatatatatgtctgtgacc

SEQ ID NO: 288886 - DNA, 20 bp, Artificial Sequence
  Description of Artificial Sequence: Synthetic oligonucleotide
  Target: LAMA2; (-) strand; PAM type: YTN; PAM sequence: TTG
tgagatcttttatatatatg

SEQ ID NO: 288887 - DNA, 20 bp, Artificial Sequence
  Description of Artificial Sequence: Synthetic oligonucleotide
  Target: LAMA2; (-) strand; PAM type: YTN; PAM sequence: TTG
gttgtgagatcttttatata

SEQ ID NO: 288888 - DNA, 20 bp, Artificial Sequence
  Description of Artificial Sequence: Synthetic oligonucleotide
  Target: LAMA2; (-) strand; PAM type: YTN; PAM sequence: CTT
ggttgtgagatcttttatat

SEQ ID NO: 288889 - DNA, 20 bp, Artificial Sequence
  Description of Artificial Sequence: Synthetic oligonucleotide
  Target: LAMA2; (-) strand; PAM type: YTN; PAM sequence: CTG
tcttggttgtgagatctttt

SEQ ID NO: 288890 - DNA, 20 bp, Artificial Sequence
  Description of Artificial Sequence: Synthetic oligonucleotide
  Target: LAMA2; (-) strand; PAM type: YTN; PAM sequence: TTC
tgtcttggttgtgagatctt

SEQ ID NO: 288891 - DNA, 20 bp, Artificial Sequence
  Description of Artificial Sequence: Synthetic oligonucleotide
  Target: LAMA2; (-) strand; PAM type: YTN; PAM sequence: TTT
ctgtcttggttgtgagatct

SEQ ID NO: 288892 - DNA, 20 bp, Artificial Sequence
  Description of Artificial Sequence: Synthetic oligonucleotide
  Target: LAMA2; (-) strand; PAM type: YTN; PAM sequence: TTG
gatttctgtcttggttgtga

SEQ ID NO: 288893 - DNA, 20 bp, Artificial Sequence
  Description of Artificial Sequence: Synthetic oligonucleotide
  Target: LAMA2; (-) strand; PAM type: YTN; PAM sequence: CTT
ggatttctgtcttggttgtg

SEQ ID NO: 288894 - DNA, 20 bp, Artificial Sequence
  Description of Artificial Sequence: Synthetic oligonucleotide
  Target: LAMA2; (-) strand; PAM type: YTN; PAM sequence: TTA
atagacttggatttctgtct

SEQ ID NO: 288895 - DNA, 20 bp, Artificial Sequence
  Description of Artificial Sequence: Synthetic oligonucleotide
  Target: LAMA2; (-) strand; PAM type: YTN; PAM sequence: CTC
agaattaatagacttggatt

SEQ ID NO: 288896 - DNA, 20 bp, Artificial Sequence
  Description of Artificial Sequence: Synthetic oligonucleotide
  Target: LAMA2; (-) strand; PAM type: YTN; PAM sequence: CTA
cactcagaattaatagactt

SEQ ID NO: 288897 - DNA, 20 bp, Artificial Sequence
  Description of Artificial Sequence: Synthetic oligonucleotide
  Target: LAMA2; (-) strand; PAM type: YTN; PAM sequence: TTA
aaaagcaatagcactacact

SEQ ID NO: 288898 - DNA, 20 bp, Artificial Sequence
  Description of Artificial Sequence: Synthetic oligonucleotide
  Target: LAMA2; (-) strand; PAM type: YTN; PAM sequence: CTT
aaaaagcaatagcactacac

SEQ ID NO: 288899 - DNA, 20 bp, Artificial Sequence
  Description of Artificial Sequence: Synthetic oligonucleotide
  Target: LAMA2; (-) strand; PAM type: YTN; PAM sequence: TTA
tatacttaaaaagcaatagc

SEQ ID NO: 288900 - DNA, 20 bp, Artificial Sequence
  Description of Artificial Sequence: Synthetic oligonucleotide
  Target: LAMA2; (-) strand; PAM type: YTN; PAM sequence: TTA
gagcaattatatacttaaaa

SEQ ID NO: 288901 - DNA, 20 bp, Artificial Sequence
  Description of Artificial Sequence: Synthetic oligonucleotide
  Target: LAMA2; (-) strand; PAM type: YTN; PAM sequence: CTA
cacagaattagagcaattat

SEQ ID NO: 288902 - DNA, 20 bp, Artificial Sequence
  Description of Artificial Sequence: Synthetic oligonucleotide
  Target: LAMA2; (-) strand; PAM type: YTN; PAM sequence: TTG
gtaatgccatactacacaga

SEQ ID NO: 288903 - DNA, 20 bp, Artificial Sequence
  Description of Artificial Sequence: Synthetic oligonucleotide
  Target: LAMA2; (-) strand; PAM type: YTN; PAM sequence: TTG
cagatattggtaatgccata

SEQ ID NO: 288904 - DNA, 20 bp, Artificial Sequence
  Description of Artificial Sequence: Synthetic oligonucleotide
  Target: LAMA2; (-) strand; PAM type: YTN; PAM sequence: TTT
gcagatattggtaatgccat

SEQ ID NO: 288905 - DNA, 20 bp, Artificial Sequence
  Description of Artificial Sequence: Synthetic oligonucleotide
  Target: LAMA2; (-) strand; PAM type: YTN; PAM sequence: CTC
atttgcagatattggtaatg

SEQ ID NO: 288906 - DNA, 20 bp, Artificial Sequence
  Description of Artificial Sequence: Synthetic oligonucleotide
  Target: LAMA2; (-) strand; PAM type: YTN; PAM sequence: TTA
gcagaagtaacaaagtctca

SEQ ID NO: 288907 - DNA, 20 bp, Artificial Sequence
  Description of Artificial Sequence: Synthetic oligonucleotide
  Target: LAMA2; (-) strand; PAM type: YTN; PAM sequence: TTA
tattagcagaagtaacaaag

SEQ ID NO: 288908 - DNA, 20 bp, Artificial Sequence
  Description of Artificial Sequence: Synthetic oligonucleotide
  Target: LAMA2; (-) strand; PAM type: YTN; PAM sequence: TTT
atattagcagaagtaacaaa

SEQ ID NO: 288909 - DNA, 20 bp, Artificial Sequence
  Description of Artificial Sequence: Synthetic oligonucleotide
  Target: LAMA2; (-) strand; PAM type: YTN; PAM sequence: CTA
tttatattagcagaagtaac

SEQ ID NO: 288910 - DNA, 20 bp, Artificial Sequence
  Description of Artificial Sequence: Synthetic oligonucleotide
  Target: LAMA2; (-) strand; PAM type: YTN; PAM sequence: TTG
agtctatttatattagcaga

SEQ ID NO: 288911 - DNA, 20 bp, Artificial Sequence
  Description of Artificial Sequence: Synthetic oligonucleotide
  Target: LAMA2; (-) strand; PAM type: YTN; PAM sequence: TTA
attgagtctatttatattag

SEQ ID NO: 288912 - DNA, 20 bp, Artificial Sequence
  Description of Artificial Sequence: Synthetic oligonucleotide
  Target: LAMA2; (-) strand; PAM type: YTN; PAM sequence: TTG
gcaacattaattgagtctat

SEQ ID NO: 288913 - DNA, 20 bp, Artificial Sequence
  Description of Artificial Sequence: Synthetic oligonucleotide
  Target: LAMA2; (-) strand; PAM type: YTN; PAM sequence: CTG
gcattggcaacattaattga

SEQ ID NO: 288914 - DNA, 20 bp, Artificial Sequence
  Description of Artificial Sequence: Synthetic oligonucleotide
  Target: LAMA2; (-) strand; PAM type: YTN; PAM sequence: TTC
atgaaatgtcacactggcat

SEQ ID NO: 288915 - DNA, 20 bp, Artificial Sequence
  Description of Artificial Sequence: Synthetic oligonucleotide
  Target: LAMA2; (-) strand; PAM type: YTN; PAM sequence: TTT
catgaaatgtcacactggca

SEQ ID NO: 288916 - DNA, 20 bp, Artificial Sequence
  Description of Artificial Sequence: Synthetic oligonucleotide
  Target: LAMA2; (-) strand; PAM type: YTN; PAM sequence: TTT
tcatgaaatgtcacactggc

SEQ ID NO: 288917 - DNA, 20 bp, Artificial Sequence
  Description of Artificial Sequence: Synthetic oligonucleotide
  Target: LAMA2; (-) strand; PAM type: YTN; PAM sequence: TTA
aacgtaaattttcatgaaat

SEQ ID NO: 288918 - DNA, 20 bp, Artificial Sequence
  Description of Artificial Sequence: Synthetic oligonucleotide
  Target: LAMA2; (-) strand; PAM type: YTN; PAM sequence: TTT
aaacgtaaattttcatgaaa

SEQ ID NO: 288919 - DNA, 20 bp, Artificial Sequence
  Description of Artificial Sequence: Synthetic oligonucleotide
  Target: LAMA2; (-) strand; PAM type: YTN; PAM sequence: TTA
aatttaaacgtaaattttca

SEQ ID NO: 288920 - DNA, 20 bp, Artificial Sequence
  Description of Artificial Sequence: Synthetic oligonucleotide
  Target: LAMA2; (-) strand; PAM type: YTN; PAM sequence: TTT
aaatttaaacgtaaattttc

SEQ ID NO: 288921 - DNA, 20 bp, Artificial Sequence
  Description of Artificial Sequence: Synthetic oligonucleotide
  Target: LAMA2; (-) strand; PAM type: YTN; PAM sequence: TTA
aatgcagaaatgaaagacgg

SEQ ID NO: 288922 - DNA, 20 bp, Artificial Sequence
  Description of Artificial Sequence: Synthetic oligonucleotide
  Target: LAMA2; (-) strand; PAM type: YTN; PAM sequence: CTG
gcagatatgtattaaatgca

SEQ ID NO: 288923 - DNA, 20 bp, Artificial Sequence
  Description of Artificial Sequence: Synthetic oligonucleotide
  Target: LAMA2; (-) strand; PAM type: YTN; PAM sequence: TTA
gaaggtgcctggcagatatg

SEQ ID NO: 288924 - DNA, 20 bp, Artificial Sequence
  Description of Artificial Sequence: Synthetic oligonucleotide
  Target: LAMA2; (-) strand; PAM type: YTN; PAM sequence: CTT
agaaggtgcctggcagatat

SEQ ID NO: 288925 - DNA, 20 bp, Artificial Sequence
  Description of Artificial Sequence: Synthetic oligonucleotide
  Target: LAMA2; (-) strand; PAM type: YTN; PAM sequence: TTA
catggtacttagaaggtgcc

SEQ ID NO: 288926 - DNA, 20 bp, Artificial Sequence
  Description of Artificial Sequence: Synthetic oligonucleotide
  Target: LAMA2; (-) strand; PAM type: YTN; PAM sequence: CTT
acatggtacttagaaggtgc

SEQ ID NO: 288927 - DNA, 20 bp, Artificial Sequence
  Description of Artificial Sequence: Synthetic oligonucleotide
  Target: LAMA2; (-) strand; PAM type: YTN; PAM sequence: TTC
ttacatggtacttagaaggt

SEQ ID NO: 288928 - DNA, 20 bp, Artificial Sequence
  Description of Artificial Sequence: Synthetic oligonucleotide
  Target: LAMA2; (-) strand; PAM type: YTN; PAM sequence: TTA
gttcttacatggtacttaga

SEQ ID NO: 288929 - DNA, 20 bp, Artificial Sequence
  Description of Artificial Sequence: Synthetic oligonucleotide
  Target: LAMA2; (-) strand; PAM type: YTN; PAM sequence: TTT
agttcttacatggtacttag

SEQ ID NO: 288930 - DNA, 20 bp, Artificial Sequence
  Description of Artificial Sequence: Synthetic oligonucleotide
  Target: LAMA2; (-) strand; PAM type: YTN; PAM sequence: TTC
atttagttcttacatggtac

SEQ ID NO: 288931 - DNA, 20 bp, Artificial Sequence
  Description of Artificial Sequence: Synthetic oligonucleotide
  Target: LAMA2; (-) strand; PAM type: YTN; PAM sequence: CTT
catttagttcttacatggta

SEQ ID NO: 288932 - DNA, 20 bp, Artificial Sequence
  Description of Artificial Sequence: Synthetic oligonucleotide
  Target: LAMA2; (-) strand; PAM type: YTN; PAM sequence: TTA
gaacttcatttagttcttac

SEQ ID NO: 288933 - DNA, 20 bp, Artificial Sequence
  Description of Artificial Sequence: Synthetic oligonucleotide
  Target: LAMA2; (-) strand; PAM type: YTN; PAM sequence: CTT
agaacttcatttagttctta

SEQ ID NO: 288934 - DNA, 20 bp, Artificial Sequence
  Description of Artificial Sequence: Synthetic oligonucleotide
  Target: LAMA2; (-) strand; PAM type: YTN; PAM sequence: TTG
aaggcaagaacttagaactt

SEQ ID NO: 288935 - DNA, 20 bp, Artificial Sequence
  Description of Artificial Sequence: Synthetic oligonucleotide
  Target: LAMA2; (-) strand; PAM type: YTN; PAM sequence: CTT
gaaggcaagaacttagaact

SEQ ID NO: 288936 - DNA, 20 bp, Artificial Sequence
  Description of Artificial Sequence: Synthetic oligonucleotide
  Target: LAMA2; (-) strand; PAM type: YTN; PAM sequence: TTC
cttgaaggcaagaacttaga

SEQ ID NO: 288937 - DNA, 20 bp, Artificial Sequence
  Description of Artificial Sequence: Synthetic oligonucleotide
  Target: LAMA2; (-) strand; PAM type: YTN; PAM sequence: TTC
gatgcaagttccttgaaggc

SEQ ID NO: 288938 - DNA, 20 bp, Artificial Sequence
  Description of Artificial Sequence: Synthetic oligonucleotide
  Target: LAMA2; (-) strand; PAM type: YTN; PAM sequence: CTC
cccagttcgatgcaagttcc

SEQ ID NO: 288939 - DNA, 20 bp, Artificial Sequence
  Description of Artificial Sequence: Synthetic oligonucleotide
  Target: LAMA2; (-) strand; PAM type: YTN; PAM sequence: CTA
tctccccagttcgatgcaag

SEQ ID NO: 288940 - DNA, 20 bp, Artificial Sequence
  Description of Artificial Sequence: Synthetic oligonucleotide
  Target: LAMA2; (-) strand; PAM type: YTN; PAM sequence: TTG
tctatctccccagttcgatg

SEQ ID NO: 288941 - DNA, 20 bp, Artificial Sequence
  Description of Artificial Sequence: Synthetic oligonucleotide
  Target: LAMA2; (-) strand; PAM type: YTN; PAM sequence: CTT
gtctatctccccagttcgat

SEQ ID NO: 288942 - DNA, 20 bp, Artificial Sequence
  Description of Artificial Sequence: Synthetic oligonucleotide
  Target: LAMA2; (-) strand; PAM type: YTN; PAM sequence: TTG
atacttgtctatctccccag

SEQ ID NO: 288943 - DNA, 20 bp, Artificial Sequence
  Description of Artificial Sequence: Synthetic oligonucleotide
  Target: LAMA2; (-) strand; PAM type: YTN; PAM sequence: CTA
accattgatacttgtctatc

SEQ ID NO: 288944 - DNA, 20 bp, Artificial Sequence
  Description of Artificial Sequence: Synthetic oligonucleotide
  Target: LAMA2; (-) strand; PAM type: YTN; PAM sequence: CTC
taaccattgatacttgtcta

SEQ ID NO: 288945 - DNA, 20 bp, Artificial Sequence
  Description of Artificial Sequence: Synthetic oligonucleotide
  Target: LAMA2; (-) strand; PAM type: YTN; PAM sequence: CTA
tcctctaaccattgatactt

SEQ ID NO: 288946 - DNA, 20 bp, Artificial Sequence
  Description of Artificial Sequence: Synthetic oligonucleotide
  Target: LAMA2; (-) strand; PAM type: YTN; PAM sequence: CTC
tatcctctaaccattgatac

SEQ ID NO: 288947 - DNA, 20 bp, Artificial Sequence
  Description of Artificial Sequence: Synthetic oligonucleotide
  Target: LAMA2; (-) strand; PAM type: YTN; PAM sequence: CTC
tctatcctctaaccattgat

SEQ ID NO: 288948 - DNA, 20 bp, Artificial Sequence
  Description of Artificial Sequence: Synthetic oligonucleotide
  Target: LAMA2; (-) strand; PAM type: YTN; PAM sequence: TTA
gctctctatcctctaaccat

SEQ ID NO: 288949 - DNA, 20 bp, Artificial Sequence
  Description of Artificial Sequence: Synthetic oligonucleotide
  Target: LAMA2; (-) strand; PAM type: YTN; PAM sequence: CTA
tcacagcaattagctctcta

SEQ ID NO: 288950 - DNA, 20 bp, Artificial Sequence
  Description of Artificial Sequence: Synthetic oligonucleotide
  Target: LAMA2; (-) strand; PAM type: YTN; PAM sequence: CTC
tatcacagcaattagctctc

SEQ ID NO: 288951 - DNA, 20 bp, Artificial Sequence
  Description of Artificial Sequence: Synthetic oligonucleotide
  Target: LAMA2; (-) strand; PAM type: YTN; PAM sequence: CTA
catacatctctatcacagca

SEQ ID NO: 288952 - DNA, 20 bp, Artificial Sequence
  Description of Artificial Sequence: Synthetic oligonucleotide
  Target: LAMA2; (-) strand; PAM type: YTN; PAM sequence: CTG
gctacatacatctctatcac

SEQ ID NO: 288953 - DNA, 20 bp, Artificial Sequence
  Description of Artificial Sequence: Synthetic oligonucleotide
  Target: LAMA2; (-) strand; PAM type: YTN; PAM sequence: CTC
gctggctacatacatctcta

SEQ ID NO: 288954 - DNA, 20 bp, Artificial Sequence
  Description of Artificial Sequence: Synthetic oligonucleotide
  Target: LAMA2; (-) strand; PAM type: YTN; PAM sequence: TTG
ctcgctggctacatacatct

SEQ ID NO: 288955 - DNA, 20 bp, Artificial Sequence
  Description of Artificial Sequence: Synthetic oligonucleotide
  Target: LAMA2; (-) strand; PAM type: YTN; PAM sequence: CTG
agattgctcgctggctacat

SEQ ID NO: 288956 - DNA, 20 bp, Artificial Sequence
  Description of Artificial Sequence: Synthetic oligonucleotide
  Target: LAMA2; (-) strand; PAM type: YTN; PAM sequence: TTC
tgagattgctcgctggctac

SEQ ID NO: 288957 - DNA, 20 bp, Artificial Sequence
  Description of Artificial Sequence: Synthetic oligonucleotide
  Target: LAMA2; (-) strand; PAM type: YTN; PAM sequence: CTT
ctgagattgctcgctggcta

SEQ ID NO: 288958 - DNA, 20 bp, Artificial Sequence
  Description of Artificial Sequence: Synthetic oligonucleotide
  Target: LAMA2; (-) strand; PAM type: YTN; PAM sequence: CTC
ttctgagattgctcgctggc

SEQ ID NO: 288959 - DNA, 20 bp, Artificial Sequence
  Description of Artificial Sequence: Synthetic oligonucleotide
  Target: LAMA2; (-) strand; PAM type: YTN; PAM sequence: CTC
tcttctgagattgctcgctg

SEQ ID NO: 288960 - DNA, 20 bp, Artificial Sequence
  Description of Artificial Sequence: Synthetic oligonucleotide
  Target: LAMA2; (-) strand; PAM type: YTN; PAM sequence: CTC
aagtgtctctcttctgagat

SEQ ID NO: 288961 - DNA, 20 bp, Artificial Sequence
  Description of Artificial Sequence: Synthetic oligonucleotide
  Target: LAMA2; (-) strand; PAM type: YTN; PAM sequence: TTG
actcaagtgtctctcttctg

SEQ ID NO: 288962 - DNA, 20 bp, Artificial Sequence
  Description of Artificial Sequence: Synthetic oligonucleotide
  Target: LAMA2; (-) strand; PAM type: YTN; PAM sequence: TTT
gactcaagtgtctctcttct

SEQ ID NO: 288963 - DNA, 20 bp, Artificial Sequence
  Description of Artificial Sequence: Synthetic oligonucleotide
  Target: LAMA2; (-) strand; PAM type: YTN; PAM sequence: CTG
tttgactcaagtgtctctct

SEQ ID NO: 288964 - DNA, 20 bp, Artificial Sequence
  Description of Artificial Sequence: Synthetic oligonucleotide
  Target: LAMA2; (-) strand; PAM type: YTN; PAM sequence: CTC
tgtttgactcaagtgtctct

SEQ ID NO: 288965 - DNA, 20 bp, Artificial Sequence
  Description of Artificial Sequence: Synthetic oligonucleotide
  Target: LAMA2; (-) strand; PAM type: YTN; PAM sequence: CTC
tctgtttgactcaagtgtct

SEQ ID NO: 288966 - DNA, 20 bp, Artificial Sequence
  Description of Artificial Sequence: Synthetic oligonucleotide
  Target: LAMA2; (-) strand; PAM type: YTN; PAM sequence: CTG
acctctctgtttgactcaag

SEQ ID NO: 288967 - DNA, 20 bp, Artificial Sequence
  Description of Artificial Sequence: Synthetic oligonucleotide
  Target: LAMA2; (-) strand; PAM type: YTN; PAM sequence: CTC
cagtggaaactgacctctct

SEQ ID NO: 288968 - DNA, 20 bp, Artificial Sequence
  Description of Artificial Sequence: Synthetic oligonucleotide
  Target: LAMA2; (-) strand; PAM type: YTN; PAM sequence: CTC
agggtcactccagtggaaac

SEQ ID NO: 288969 - DNA, 20 bp, Artificial Sequence
  Description of Artificial Sequence: Synthetic oligonucleotide
  Target: LAMA2; (-) strand; PAM type: YTN; PAM sequence: TTG
tgcctcagggtcactccagt

SEQ ID NO: 288970 - DNA, 20 bp, Artificial Sequence
  Description of Artificial Sequence: Synthetic oligonucleotide
  Target: LAMA2; (-) strand; PAM type: YTN; PAM sequence: CTT
gtgcctcagggtcactccag

SEQ ID NO: 288971 - DNA, 20 bp, Artificial Sequence
  Description of Artificial Sequence: Synthetic oligonucleotide
  Target: LAMA2; (-) strand; PAM type: YTN; PAM sequence: CTC
atccagcttgtgcctcaggg

SEQ ID NO: 288972 - DNA, 20 bp, Artificial Sequence
  Description of Artificial Sequence: Synthetic oligonucleotide
  Target: LAMA2; (-) strand; PAM type: YTN; PAM sequence: CTC
ctcatccagcttgtgcctca

SEQ ID NO: 288973 - DNA, 20 bp, Artificial Sequence
  Description of Artificial Sequence: Synthetic oligonucleotide
  Target: LAMA2; (-) strand; PAM type: YTN; PAM sequence: CTA
actcctcatccagcttgtgc

SEQ ID NO: 288974 - DNA, 20 bp, Artificial Sequence
  Description of Artificial Sequence: Synthetic oligonucleotide
  Target: LAMA2; (-) strand; PAM type: YTN; PAM sequence: TTC
atccagctaactcctcatcc

SEQ ID NO: 288975 - DNA, 20 bp, Artificial Sequence
  Description of Artificial Sequence: Synthetic oligonucleotide
  Target: LAMA2; (-) strand; PAM type: YTN; PAM sequence: TTT
catccagctaactcctcatc

SEQ ID NO: 288976 - DNA, 20 bp, Artificial Sequence
  Description of Artificial Sequence: Synthetic oligonucleotide
  Target: LAMA2; (-) strand; PAM type: YTN; PAM sequence: TTT
tcatccagctaactcctcat

SEQ ID NO: 288977 - DNA, 20 bp, Artificial Sequence
  Description of Artificial Sequence: Synthetic oligonucleotide
  Target: LAMA2; (-) strand; PAM type: YTN; PAM sequence: CTT
ttcatccagctaactcctca

SEQ ID NO: 288978 - DNA, 20 bp, Artificial Sequence
  Description of Artificial Sequence: Synthetic oligonucleotide
  Target: LAMA2; (-) strand; PAM type: YTN; PAM sequence: CTG
aaatgtccatacatgctttt

SEQ ID NO: 288979 - DNA, 20 bp, Artificial Sequence
  Description of Artificial Sequence: Synthetic oligonucleotide
  Target: LAMA2; (-) strand; PAM type: YTN; PAM sequence: CTC
tgaaatgtccatacatgctt

SEQ ID NO: 288980 - DNA, 20 bp, Artificial Sequence
  Description of Artificial Sequence: Synthetic oligonucleotide
  Target: LAMA2; (-) strand; PAM type: YTN; PAM sequence: CTA
ctctgaaatgtccatacatg

SEQ ID NO: 288981 - DNA, 20 bp, Artificial Sequence
  Description of Artificial Sequence: Synthetic oligonucleotide
  Target: LAMA2; (-) strand; PAM type: YTN; PAM sequence: TTC
actactctgaaatgtccata

SEQ ID NO: 288982 - DNA, 20 bp, Artificial Sequence
  Description of Artificial Sequence: Synthetic oligonucleotide
  Target: LAMA2; (-) strand; PAM type: YTN; PAM sequence: TTT
cactactctgaaatgtccat

SEQ ID NO: 288983 - DNA, 20 bp, Artificial Sequence
  Description of Artificial Sequence: Synthetic oligonucleotide
  Target: LAMA2; (-) strand; PAM type: YTN; PAM sequence: CTT
tcactactctgaaatgtcca

SEQ ID NO: 288984 - DNA, 20 bp, Artificial Sequence
  Description of Artificial Sequence: Synthetic oligonucleotide
  Target: LAMA2; (-) strand; PAM type: YTN; PAM sequence: TTC
acacaactttcactactctg

SEQ ID NO: 288985 - DNA, 20 bp, Artificial Sequence
  Description of Artificial Sequence: Synthetic oligonucleotide
  Target: LAMA2; (-) strand; PAM type: YTN; PAM sequence: TTT
cacacaactttcactactct

SEQ ID NO: 288986 - DNA, 20 bp, Artificial Sequence
  Description of Artificial Sequence: Synthetic oligonucleotide
  Target: LAMA2; (-) strand; PAM type: YTN; PAM sequence: CTT
tcacacaactttcactactc

SEQ ID NO: 288987 - DNA, 20 bp, Artificial Sequence
  Description of Artificial Sequence: Synthetic oligonucleotide
  Target: LAMA2; (-) strand; PAM type: YTN; PAM sequence: CTC
caggctttcacacaactttc

SEQ ID NO: 288988 - DNA, 20 bp, Artificial Sequence
  Description of Artificial Sequence: Synthetic oligonucleotide
  Target: LAMA2; (-) strand; PAM type: YTN; PAM sequence: CTG
atgactccaggctttcacac

SEQ ID NO: 288989 - DNA, 20 bp, Artificial Sequence
  Description of Artificial Sequence: Synthetic oligonucleotide
  Target: LAMA2; (-) strand; PAM type: YTN; PAM sequence: CTC
tgatgactccaggctttcac

SEQ ID NO: 288990 - DNA, 20 bp, Artificial Sequence
  Description of Artificial Sequence: Synthetic oligonucleotide
  Target: LAMA2; (-) strand; PAM type: YTN; PAM sequence: CTC
tctgatgactccaggctttc

SEQ ID NO: 288991 - DNA, 20 bp, Artificial Sequence
  Description of Artificial Sequence: Synthetic oligonucleotide
  Target: LAMA2; (-) strand; PAM type: YTN; PAM sequence: TTC
tctctgatgactccaggctt

SEQ ID NO: 288992 - DNA, 20 bp, Artificial Sequence
  Description of Artificial Sequence: Synthetic oligonucleotide
  Target: LAMA2; (-) strand; PAM type: YTN; PAM sequence: TTA
ttctctctgatgactccagg

SEQ ID NO: 288993 - DNA, 20 bp, Artificial Sequence
  Description of Artificial Sequence: Synthetic oligonucleotide
  Target: LAMA2; (-) strand; PAM type: YTN; PAM sequence: CTG
gaaaaggatgtgttattctc

SEQ ID NO: 288994 - DNA, 20 bp, Artificial Sequence
  Description of Artificial Sequence: Synthetic oligonucleotide
  Target: LAMA2; (-) strand; PAM type: YTN; PAM sequence: TTG
gaaatgcagctggaaaagga

SEQ ID NO: 288995 - DNA, 20 bp, Artificial Sequence
  Description of Artificial Sequence: Synthetic oligonucleotide
  Target: LAMA2; (-) strand; PAM type: YTN; PAM sequence: CTG
ttggaaatgcagctggaaaa

SEQ ID NO: 288996 - DNA, 20 bp, Artificial Sequence
  Description of Artificial Sequence: Synthetic oligonucleotide
  Target: LAMA2; (-) strand; PAM type: YTN; PAM sequence: TTC
ctgttggaaatgcagctgga

SEQ ID NO: 288997 - DNA, 20 bp, Artificial Sequence
  Description of Artificial Sequence: Synthetic oligonucleotide
  Target: LAMA2; (-) strand; PAM type: YTN; PAM sequence: TTT
cctgttggaaatgcagctgg

SEQ ID NO: 288998 - DNA, 20 bp, Artificial Sequence
  Description of Artificial Sequence: Synthetic oligonucleotide
  Target: LAMA2; (-) strand; PAM type: YTN; PAM sequence: CTA
gagtttcctgttggaaatgc

SEQ ID NO: 288999 - DNA, 20 bp, Artificial Sequence
  Description of Artificial Sequence: Synthetic oligonucleotide
  Target: LAMA2; (-) strand; PAM type: YTN; PAM sequence: CTC
tagagtttcctgttggaaat

SEQ ID NO: 289000 - DNA, 20 bp, Artificial Sequence
  Description of Artificial Sequence: Synthetic oligonucleotide
  Target: LAMA2; (-) strand; PAM type: YTN; PAM sequence: TTC
tctagagtttcctgttggaa

SEQ ID NO: 289001 - DNA, 20 bp, Artificial Sequence
  Description of Artificial Sequence: Synthetic oligonucleotide
  Target: LAMA2; (-) strand; PAM type: YTN; PAM sequence: TTT
ctctagagtttcctgttgga

SEQ ID NO: 289002 - DNA, 20 bp, Artificial Sequence
  Description of Artificial Sequence: Synthetic oligonucleotide
  Target: LAMA2; (-) strand; PAM type: YTN; PAM sequence: TTG
tcccatatgagaggtttctc

SEQ ID NO: 289003 - DNA, 20 bp, Artificial Sequence
  Description of Artificial Sequence: Synthetic oligonucleotide
  Target: LAMA2; (-) strand; PAM type: YTN; PAM sequence: TTT
gtcccatatgagaggtttct

SEQ ID NO: 289004 - DNA, 20 bp, Artificial Sequence
  Description of Artificial Sequence: Synthetic oligonucleotide
  Target: LAMA2; (-) strand; PAM type: YTN; PAM sequence: TTT
tgtcccatatgagaggtttc

SEQ ID NO: 289005 - DNA, 20 bp, Artificial Sequence
  Description of Artificial Sequence: Synthetic oligonucleotide
  Target: LAMA2; (-) strand; PAM type: YTN; PAM sequence: TTT
ttgtcccatatgagaggttt

SEQ ID NO: 289006 - DNA, 20 bp, Artificial Sequence
  Description of Artificial Sequence: Synthetic oligonucleotide
  Target: LAMA2; (-) strand; PAM type: YTN; PAM sequence: TTG
caaagccagtttttgtccca

SEQ ID NO: 289007 - DNA, 20 bp, Artificial Sequence
  Description of Artificial Sequence: Synthetic oligonucleotide
  Target: LAMA2; (-) strand; PAM type: YTN; PAM sequence: CTC
caaaataaagaattgcaaag

SEQ ID NO: 289008 - DNA, 20 bp, Artificial Sequence
  Description of Artificial Sequence: Synthetic oligonucleotide
  Target: LAMA2; (-) strand; PAM type: YTN; PAM sequence: TTA
cacaggaacaatgtatgcag

SEQ ID NO: 289009 - DNA, 20 bp, Artificial Sequence
  Description of Artificial Sequence: Synthetic oligonucleotide
  Target: LAMA2; (-) strand; PAM type: YTN; PAM sequence: CTT
acacaggaacaatgtatgca

SEQ ID NO: 289010 - DNA, 20 bp, Artificial Sequence
  Description of Artificial Sequence: Synthetic oligonucleotide
  Target: LAMA2; (-) strand; PAM type: YTN; PAM sequence: CTC
ttacacaggaacaatgtatg

SEQ ID NO: 289011 - DNA, 20 bp, Artificial Sequence
  Description of Artificial Sequence: Synthetic oligonucleotide
  Target: LAMA2; (-) strand; PAM type: YTN; PAM sequence: CTC
tcttacacaggaacaatgta

SEQ ID NO: 289012 - DNA, 20 bp, Artificial Sequence
  Description of Artificial Sequence: Synthetic oligonucleotide
  Target: LAMA2; (-) strand; PAM type: YTN; PAM sequence: TTG
tgcctctcttacacaggaac

SEQ ID NO: 289013 - DNA, 20 bp, Artificial Sequence
  Description of Artificial Sequence: Synthetic oligonucleotide
  Target: LAMA2; (-) strand; PAM type: YTN; PAM sequence: CTG
acatgcaaatgtgcattgtg

SEQ ID NO: 289014 - DNA, 20 bp, Artificial Sequence
  Description of Artificial Sequence: Synthetic oligonucleotide
  Target: LAMA2; (-) strand; PAM type: YTN; PAM sequence: TTC
tgacatgcaaatgtgcattg

SEQ ID NO: 289015 - DNA, 20 bp, Artificial Sequence
  Description of Artificial Sequence: Synthetic oligonucleotide
  Target: LAMA2; (-) strand; PAM type: YTN; PAM sequence: CTT
ctgacatgcaaatgtgcatt

SEQ ID NO: 289016 - DNA, 20 bp, Artificial Sequence
  Description of Artificial Sequence: Synthetic oligonucleotide
  Target: LAMA2; (-) strand; PAM type: YTN; PAM sequence: CTA
cacagagcttctgacatgca

SEQ ID NO: 289017 - DNA, 20 bp, Artificial Sequence
  Description of Artificial Sequence: Synthetic oligonucleotide
  Target: LAMA2; (-) strand; PAM type: YTN; PAM sequence: CTA
actacacagagcttctgaca

SEQ ID NO: 289018 - DNA, 20 bp, Artificial Sequence
  Description of Artificial Sequence: Synthetic oligonucleotide
  Target: LAMA2; (-) strand; PAM type: YTN; PAM sequence: CTG
aacaactaactacacagagc

SEQ ID NO: 289019 - DNA, 20 bp, Artificial Sequence
  Description of Artificial Sequence: Synthetic oligonucleotide
  Target: LAMA2; (-) strand; PAM type: YTN; PAM sequence: TTA
ctgaacaactaactacacag

SEQ ID NO: 289020 - DNA, 20 bp, Artificial Sequence
  Description of Artificial Sequence: Synthetic oligonucleotide
  Target: LAMA2; (-) strand; PAM type: YTN; PAM sequence: CTT
actgaacaactaactacaca

SEQ ID NO: 289021 - DNA, 20 bp, Artificial Sequence
  Description of Artificial Sequence: Synthetic oligonucleotide
  Target: LAMA2; (-) strand; PAM type: YTN; PAM sequence: TTC
ttactgaacaactaactaca

SEQ ID NO: 289022 - DNA, 20 bp, Artificial Sequence
  Description of Artificial Sequence: Synthetic oligonucleotide
  Target: LAMA2; (-) strand; PAM type: YTN; PAM sequence: CTT
cttactgaacaactaactac

SEQ ID NO: 289023 - DNA, 20 bp, Artificial Sequence
  Description of Artificial Sequence: Synthetic oligonucleotide
  Target: LAMA2; (-) strand; PAM type: YTN; PAM sequence: TTC
ttcttactgaacaactaact

SEQ ID NO: 289024 - DNA, 20 bp, Artificial Sequence
  Description of Artificial Sequence: Synthetic oligonucleotide
  Target: LAMA2; (-) strand; PAM type: YTN; PAM sequence: CTA
aacattcttcttactgaaca

SEQ ID NO: 289025 - DNA, 20 bp, Artificial Sequence
  Description of Artificial Sequence: Synthetic oligonucleotide
  Target: LAMA2; (-) strand; PAM type: YTN; PAM sequence: TTA
aacagctaaacattcttctt

SEQ ID NO: 289026 - DNA, 20 bp, Artificial Sequence
  Description of Artificial Sequence: Synthetic oligonucleotide
  Target: LAMA2; (-) strand; PAM type: YTN; PAM sequence: CTG
ggttaaacagctaaacattc

SEQ ID NO: 289027 - DNA, 20 bp, Artificial Sequence
  Description of Artificial Sequence: Synthetic oligonucleotide
  Target: LAMA2; (-) strand; PAM type: YTN; PAM sequence: TTG
ggaaatgctgggttaaacag

SEQ ID NO: 289028 - DNA, 20 bp, Artificial Sequence
  Description of Artificial Sequence: Synthetic oligonucleotide
  Target: LAMA2; (-) strand; PAM type: YTN; PAM sequence: TTT
gggaaatgctgggttaaaca

SEQ ID NO: 289029 - DNA, 20 bp, Artificial Sequence
  Description of Artificial Sequence: Synthetic oligonucleotide
  Target: LAMA2; (-) strand; PAM type: YTN; PAM sequence: TTA
aagaaatttgggaaatgctg

SEQ ID NO: 289030 - DNA, 20 bp, Artificial Sequence
  Description of Artificial Sequence: Synthetic oligonucleotide
  Target: LAMA2; (-) strand; PAM type: YTN; PAM sequence: CTG
attaaagaaatttgggaaat

SEQ ID NO: 289031 - DNA, 20 bp, Artificial Sequence
  Description of Artificial Sequence: Synthetic oligonucleotide
  Target: LAMA2; (-) strand; PAM type: YTN; PAM sequence: CTC
tgattaaagaaatttgggaa

SEQ ID NO: 289032 - DNA, 20 bp, Artificial Sequence
  Description of Artificial Sequence: Synthetic oligonucleotide
  Target: LAMA2; (-) strand; PAM type: YTN; PAM sequence: TTC
tctgattaaagaaatttggg

SEQ ID NO: 289033 - DNA, 20 bp, Artificial Sequence
  Description of Artificial Sequence: Synthetic oligonucleotide
  Target: LAMA2; (-) strand; PAM type: YTN; PAM sequence: TTT
ctctgattaaagaaatttgg

SEQ ID NO: 289034 - DNA, 20 bp, Artificial Sequence
  Description of Artificial Sequence: Synthetic oligonucleotide
  Target: LAMA2; (-) strand; PAM type: YTN; PAM sequence: TTA
caggaatggaaggatttctc

SEQ ID NO: 289035 - DNA, 20 bp, Artificial Sequence
  Description of Artificial Sequence: Synthetic oligonucleotide
  Target: LAMA2; (-) strand; PAM type: YTN; PAM sequence: CTA
gtattacaggaatggaagga

SEQ ID NO: 289036 - DNA, 20 bp, Artificial Sequence
  Description of Artificial Sequence: Synthetic oligonucleotide
  Target: LAMA2; (-) strand; PAM type: YTN; PAM sequence: TTC
agcagaatgctagtattaca

SEQ ID NO: 289037 - DNA, 20 bp, Artificial Sequence
  Description of Artificial Sequence: Synthetic oligonucleotide
  Target: LAMA2; (-) strand; PAM type: YTN; PAM sequence: TTC
cccaaagtgtgttcagcaga

SEQ ID NO: 289038 - DNA, 20 bp, Artificial Sequence
  Description of Artificial Sequence: Synthetic oligonucleotide
  Target: LAMA2; (-) strand; PAM type: YTN; PAM sequence: CTA
aagcattccccaaagtgtgt

SEQ ID NO: 289039 - DNA, 20 bp, Artificial Sequence
  Description of Artificial Sequence: Synthetic oligonucleotide
  Target: LAMA2; (-) strand; PAM type: YTN; PAM sequence: TTA
ctaaagcattccccaaagtg

SEQ ID NO: 289040 - DNA, 20 bp, Artificial Sequence
  Description of Artificial Sequence: Synthetic oligonucleotide
  Target: LAMA2; (-) strand; PAM type: YTN; PAM sequence: TTG
tagttactaaagcattcccc

SEQ ID NO: 289041 - DNA, 20 bp, Artificial Sequence
  Description of Artificial Sequence: Synthetic oligonucleotide
  Target: LAMA2; (-) strand; PAM type: YTN; PAM sequence: CTT
gtagttactaaagcattccc

SEQ ID NO: 289042 - DNA, 20 bp, Artificial Sequence
  Description of Artificial Sequence: Synthetic oligonucleotide
  Target: LAMA2; (-) strand; PAM type: YTN; PAM sequence: TTC
acttgtagttactaaagcat

SEQ ID NO: 289043 - DNA, 20 bp, Artificial Sequence
  Description of Artificial Sequence: Synthetic oligonucleotide
  Target: LAMA2; (-) strand; PAM type: YTN; PAM sequence: CTA
tggattcacttgtagttact

SEQ ID NO: 289044 - DNA, 20 bp, Artificial Sequence
  Description of Artificial Sequence: Synthetic oligonucleotide
  Target: LAMA2; (-) strand; PAM type: YTN; PAM sequence: TTC
gtgtaggctatggattcact

SEQ ID NO: 289045 - DNA, 20 bp, Artificial Sequence
  Description of Artificial Sequence: Synthetic oligonucleotide
  Target: LAMA2; (-) strand; PAM type: YTN; PAM sequence: TTC
attcgtgtaggctatggatt

SEQ ID NO: 289046 - DNA, 20 bp, Artificial Sequence
  Description of Artificial Sequence: Synthetic oligonucleotide
  Target: LAMA2; (-) strand; PAM type: YTN; PAM sequence: CTG
ccaacattcattcgtgtagg

SEQ ID NO: 289047 - DNA, 20 bp, Artificial Sequence
  Description of Artificial Sequence: Synthetic oligonucleotide
  Target: LAMA2; (-) strand; PAM type: YTN; PAM sequence: TTC
ctgccaacattcattcgtgt

SEQ ID NO: 289048 - DNA, 20 bp, Artificial Sequence
  Description of Artificial Sequence: Synthetic oligonucleotide
  Target: LAMA2; (-) strand; PAM type: YTN; PAM sequence: TTT
cctgccaacattcattcgtg

SEQ ID NO: 289049 - DNA, 20 bp, Artificial Sequence
  Description of Artificial Sequence: Synthetic oligonucleotide
  Target: LAMA2; (-) strand; PAM type: YTN; PAM sequence: CTG
ataatttcctgccaacattc

SEQ ID NO: 289050 - DNA, 20 bp, Artificial Sequence
  Description of Artificial Sequence: Synthetic oligonucleotide
  Target: LAMA2; (-) strand; PAM type: YTN; PAM sequence: CTA
ctgataatttcctgccaaca

SEQ ID NO: 289051 - DNA, 20 bp, Artificial Sequence
  Description of Artificial Sequence: Synthetic oligonucleotide
  Target: LAMA2; (-) strand; PAM type: YTN; PAM sequence: TTG
gcccctactgataatttcct

SEQ ID NO: 289052 - DNA, 20 bp, Artificial Sequence
  Description of Artificial Sequence: Synthetic oligonucleotide
  Target: LAMA2; (-) strand; PAM type: YTN; PAM sequence: CTT
ggcccctactgataatttcc

SEQ ID NO: 289053 - DNA, 20 bp, Artificial Sequence
  Description of Artificial Sequence: Synthetic oligonucleotide
  Target: LAMA2; (-) strand; PAM type: YTN; PAM sequence: CTC
ttggcccctactgataattt

SEQ ID NO: 289054 - DNA, 20 bp, Artificial Sequence
  Description of Artificial Sequence: Synthetic oligonucleotide
  Target: LAMA2; (-) strand; PAM type: YTN; PAM sequence: TTA
tctcttggcccctactgata

SEQ ID NO: 289055 - DNA, 20 bp, Artificial Sequence
  Description of Artificial Sequence: Synthetic oligonucleotide
  Target: LAMA2; (-) strand; PAM type: YTN; PAM sequence: CTG
ttatctcttggcccctactg

SEQ ID NO: 289056 - DNA, 20 bp, Artificial Sequence
  Description of Artificial Sequence: Synthetic oligonucleotide
  Target: LAMA2; (-) strand; PAM type: YTN; PAM sequence: TTC
tgttatctcttggcccctac

SEQ ID NO: 289057 - DNA, 20 bp, Artificial Sequence
  Description of Artificial Sequence: Synthetic oligonucleotide
  Target: LAMA2; (-) strand; PAM type: YTN; PAM sequence: CTG
gttctgttatctcttggccc

SEQ ID NO: 289058 - DNA, 20 bp, Artificial Sequence
  Description of Artificial Sequence: Synthetic oligonucleotide
  Target: LAMA2; (-) strand; PAM type: YTN; PAM sequence: TTA
tgcactggttctgttatctc

SEQ ID NO: 289059 - DNA, 20 bp, Artificial Sequence
  Description of Artificial Sequence: Synthetic oligonucleotide
  Target: LAMA2; (-) strand; PAM type: YTN; PAM sequence: CTT
atgcactggttctgttatct

SEQ ID NO: 289060 - DNA, 20 bp, Artificial Sequence
  Description of Artificial Sequence: Synthetic oligonucleotide
  Target: LAMA2; (-) strand; PAM type: YTN; PAM sequence: CTC
atatgtccccttatgcactg

SEQ ID NO: 289061 - DNA, 20 bp, Artificial Sequence
  Description of Artificial Sequence: Synthetic oligonucleotide
  Target: LAMA2; (-) strand; PAM type: YTN; PAM sequence: TTA
gctcatatgtccccttatgc

SEQ ID NO: 289062 - DNA, 20 bp, Artificial Sequence
  Description of Artificial Sequence: Synthetic oligonucleotide
  Target: LAMA2; (-) strand; PAM type: YTN; PAM sequence: CTT
agctcatatgtccccttatg

SEQ ID NO: 289063 - DNA, 20 bp, Artificial Sequence
  Description of Artificial Sequence: Synthetic oligonucleotide
  Target: LAMA2; (-) strand; PAM type: YTN; PAM sequence: CTC
acttagctcatatgtcccct

SEQ ID NO: 289064 - DNA, 20 bp, Artificial Sequence
  Description of Artificial Sequence: Synthetic oligonucleotide
  Target: LAMA2; (-) strand; PAM type: YTN; PAM sequence: CTC
actcacttagctcatatgtc

SEQ ID NO: 289065 - DNA, 20 bp, Artificial Sequence
  Description of Artificial Sequence: Synthetic oligonucleotide
  Target: LAMA2; (-) strand; PAM type: YTN; PAM sequence: CTG
aaactcactcacttagctca

SEQ ID NO: 289066 - DNA, 20 bp, Artificial Sequence
  Description of Artificial Sequence: Synthetic oligonucleotide
  Target: LAMA2; (-) strand; PAM type: YTN; PAM sequence: TTC
aggataaagctgaaactcac

SEQ ID NO: 289067 - DNA, 20 bp, Artificial Sequence
  Description of Artificial Sequence: Synthetic oligonucleotide
  Target: LAMA2; (-) strand; PAM type: YTN; PAM sequence: TTT
caggataaagctgaaactca

SEQ ID NO: 289068 - DNA, 20 bp, Artificial Sequence
  Description of Artificial Sequence: Synthetic oligonucleotide
  Target: LAMA2; (-) strand; PAM type: YTN; PAM sequence: CTT
tcaggataaagctgaaactc

SEQ ID NO: 289069 - DNA, 20 bp, Artificial Sequence
  Description of Artificial Sequence: Synthetic oligonucleotide
  Target: LAMA2; (-) strand; PAM type: YTN; PAM sequence: CTA
tggctttcaggataaagctg

SEQ ID NO: 289070 - DNA, 20 bp, Artificial Sequence
  Description of Artificial Sequence: Synthetic oligonucleotide
  Target: LAMA2; (-) strand; PAM type: YTN; PAM sequence: CTC
ggtatccctatggctttcag

SEQ ID NO: 289071 - DNA, 20 bp, Artificial Sequence
  Description of Artificial Sequence: Synthetic oligonucleotide
  Target: LAMA2; (-) strand; PAM type: YTN; PAM sequence: TTC
tcggtatccctatggctttc

SEQ ID NO: 289072 - DNA, 20 bp, Artificial Sequence
  Description of Artificial Sequence: Synthetic oligonucleotide
  Target: LAMA2; (-) strand; PAM type: YTN; PAM sequence: TTA
gagttctcggtatccctatg

SEQ ID NO: 289073 - DNA, 20 bp, Artificial Sequence
  Description of Artificial Sequence: Synthetic oligonucleotide
  Target: LAMA2; (-) strand; PAM type: YTN; PAM sequence: CTT
agagttctcggtatccctat

SEQ ID NO: 289074 - DNA, 20 bp, Artificial Sequence
  Description of Artificial Sequence: Synthetic oligonucleotide
  Target: LAMA2; (-) strand; PAM type: YTN; PAM sequence: CTC
ttagagttctcggtatccct

SEQ ID NO: 289075 - DNA, 20 bp, Artificial Sequence
  Description of Artificial Sequence: Synthetic oligonucleotide
  Target: LAMA2; (-) strand; PAM type: YTN; PAM sequence: TTA
aaactcttagagttctcggt

SEQ ID NO: 289076 - DNA, 20 bp, Artificial Sequence
  Description of Artificial Sequence: Synthetic oligonucleotide
  Target: LAMA2; (-) strand; PAM type: YTN; PAM sequence: CTT
aaaactcttagagttctcgg

SEQ ID NO: 289077 - DNA, 20 bp, Artificial Sequence
  Description of Artificial Sequence: Synthetic oligonucleotide
  Target: LAMA2; (-) strand; PAM type: YTN; PAM sequence: TTC
ttaaaactcttagagttctc

SEQ ID NO: 289078 - DNA, 20 bp, Artificial Sequence
  Description of Artificial Sequence: Synthetic oligonucleotide
  Target: LAMA2; (-) strand; PAM type: YTN; PAM sequence: TTT
cttaaaactcttagagttct

SEQ ID NO: 289079 - DNA, 20 bp, Artificial Sequence
  Description of Artificial Sequence: Synthetic oligonucleotide
  Target: LAMA2; (-) strand; PAM type: YTN; PAM sequence: CTT
tcttaaaactcttagagttc

SEQ ID NO: 289080 - DNA, 20 bp, Artificial Sequence
  Description of Artificial Sequence: Synthetic oligonucleotide
  Target: LAMA2; (-) strand; PAM type: YTN; PAM sequence: TTA
tgatatcacaccctttctta

SEQ ID NO: 289081 - DNA, 20 bp, Artificial Sequence
  Description of Artificial Sequence: Synthetic oligonucleotide
  Target: LAMA2; (-) strand; PAM type: YTN; PAM sequence: CTT
atgatatcacaccctttctt

SEQ ID NO: 289082 - DNA, 20 bp, Artificial Sequence
  Description of Artificial Sequence: Synthetic oligonucleotide
  Target: LAMA2; (-) strand; PAM type: YTN; PAM sequence: CTA
aagcacaagtcttatgatat

SEQ ID NO: 289083 - DNA, 20 bp, Artificial Sequence
  Description of Artificial Sequence: Synthetic oligonucleotide
  Target: LAMA2; (-) strand; PAM type: YTN; PAM sequence: TTA
ctaaagcacaagtcttatga

SEQ ID NO: 289084 - DNA, 20 bp, Artificial Sequence
  Description of Artificial Sequence: Synthetic oligonucleotide
  Target: LAMA2; (-) strand; PAM type: YTN; PAM sequence: TTT
actaaagcacaagtcttatg

SEQ ID NO: 289085 - DNA, 20 bp, Artificial Sequence
  Description of Artificial Sequence: Synthetic oligonucleotide
  Target: LAMA2; (-) strand; PAM type: YTN; PAM sequence: CTT
tactaaagcacaagtcttat

SEQ ID NO: 289086 - DNA, 20 bp, Artificial Sequence
  Description of Artificial Sequence: Synthetic oligonucleotide
  Target: LAMA2; (-) strand; PAM type: YTN; PAM sequence: CTA
aagaaactttactaaagcac

SEQ ID NO: 289087 - DNA, 20 bp, Artificial Sequence
  Description of Artificial Sequence: Synthetic oligonucleotide
  Target: LAMA2; (-) strand; PAM type: YTN; PAM sequence: CTG
ctaaagaaactttactaaag

SEQ ID NO: 289088 - DNA, 20 bp, Artificial Sequence
  Description of Artificial Sequence: Synthetic oligonucleotide
  Target: LAMA2; (-) strand; PAM type: YTN; PAM sequence: CTG
ctgctaaagaaactttacta

SEQ ID NO: 289089 - DNA, 20 bp, Artificial Sequence
  Description of Artificial Sequence: Synthetic oligonucleotide
  Target: LAMA2; (-) strand; PAM type: YTN; PAM sequence: CTC
caaactgctgctaaagaaac

SEQ ID NO: 289090 - DNA, 20 bp, Artificial Sequence
  Description of Artificial Sequence: Synthetic oligonucleotide
  Target: LAMA2; (-) strand; PAM type: YTN; PAM sequence: TTA
catatctccaaactgctgct

SEQ ID NO: 289091 - DNA, 20 bp, Artificial Sequence
  Description of Artificial Sequence: Synthetic oligonucleotide
  Target: LAMA2; (-) strand; PAM type: YTN; PAM sequence: TTG
ttacatatctccaaactgct

SEQ ID NO: 289092 - DNA, 20 bp, Artificial Sequence
  Description of Artificial Sequence: Synthetic oligonucleotide
  Target: LAMA2; (-) strand; PAM type: YTN; PAM sequence: CTA
aattgttacatatctccaaa

SEQ ID NO: 289093 - DNA, 20 bp, Artificial Sequence
  Description of Artificial Sequence: Synthetic oligonucleotide
  Target: LAMA2; (-) strand; PAM type: YTN; PAM sequence: CTC
cgtagcatcctaaattgtta

SEQ ID NO: 289094 - DNA, 20 bp, Artificial Sequence
  Description of Artificial Sequence: Synthetic oligonucleotide
  Target: LAMA2; (-) strand; PAM type: YTN; PAM sequence: CTC
accagactccgtagcatcct

SEQ ID NO: 289095 - DNA, 20 bp, Artificial Sequence
  Description of Artificial Sequence: Synthetic oligonucleotide
  Target: LAMA2; (-) strand; PAM type: YTN; PAM sequence: CTA
ggctcaccagactccgtagc

SEQ ID NO: 289096 - DNA, 20 bp, Artificial Sequence
  Description of Artificial Sequence: Synthetic oligonucleotide
  Target: LAMA2; (-) strand; PAM type: YTN; PAM sequence: TTG
gtggggagacactaggctca

SEQ ID NO: 289097 - DNA, 20 bp, Artificial Sequence
  Description of Artificial Sequence: Synthetic oligonucleotide
  Target: LAMA2; (-) strand; PAM type: YTN; PAM sequence: CTA
tagaagagaagttggtgggg

SEQ ID NO: 289098 - DNA, 20 bp, Artificial Sequence
  Description of Artificial Sequence: Synthetic oligonucleotide
  Target: LAMA2; (-) strand; PAM type: YTN; PAM sequence: CTA
ctatagaagagaagttggtg

SEQ ID NO: 289099 - DNA, 20 bp, Artificial Sequence
  Description of Artificial Sequence: Synthetic oligonucleotide
  Target: LAMA2; (-) strand; PAM type: YTN; PAM sequence: CTA
ctactatagaagagaagttg

SEQ ID NO: 289100 - DNA, 20 bp, Artificial Sequence
  Description of Artificial Sequence: Synthetic oligonucleotide
  Target: LAMA2; (-) strand; PAM type: YTN; PAM sequence: TTC
tactactatagaagagaagt

SEQ ID NO: 289101 - DNA, 20 bp, Artificial Sequence
  Description of Artificial Sequence: Synthetic oligonucleotide
  Target: LAMA2; (-) strand; PAM type: YTN; PAM sequence: TTA
ttctactactatagaagaga

SEQ ID NO: 289102 - DNA, 20 bp, Artificial Sequence
  Description of Artificial Sequence: Synthetic oligonucleotide
  Target: LAMA2; (-) strand; PAM type: YTN; PAM sequence: CTG
ttattctactactatagaag

SEQ ID NO: 289103 - DNA, 20 bp, Artificial Sequence
  Description of Artificial Sequence: Synthetic oligonucleotide
  Target: LAMA2; (-) strand; PAM type: YTN; PAM sequence: TTC
aaatctgttattctactact

SEQ ID NO: 289104 - DNA, 20 bp, Artificial Sequence
  Description of Artificial Sequence: Synthetic oligonucleotide
  Target: LAMA2; (-) strand; PAM type: YTN; PAM sequence: CTT
caaatctgttattctactac

SEQ ID NO: 289105 - DNA, 20 bp, Artificial Sequence
  Description of Artificial Sequence: Synthetic oligonucleotide
  Target: LAMA2; (-) strand; PAM type: YTN; PAM sequence: TTC
ttcaaatctgttattctact

SEQ ID NO: 289106 - DNA, 20 bp, Artificial Sequence
  Description of Artificial Sequence: Synthetic oligonucleotide
  Target: LAMA2; (-) strand; PAM type: YTN; PAM sequence: TTT
cttcaaatctgttattctac

SEQ ID NO: 289107 - DNA, 20 bp, Artificial Sequence
  Description of Artificial Sequence: Synthetic oligonucleotide
  Target: LAMA2; (-) strand; PAM type: YTN; PAM sequence: CTT
tcttcaaatctgttattcta

SEQ ID NO: 289108 - DNA, 20 bp, Artificial Sequence
  Description of Artificial Sequence: Synthetic oligonucleotide
  Target: LAMA2; (-) strand; PAM type: YTN; PAM sequence: TTC
tttcttcaaatctgttattc

SEQ ID NO: 289109 - DNA, 20 bp, Artificial Sequence
  Description of Artificial Sequence: Synthetic oligonucleotide
  Target: LAMA2; (-) strand; PAM type: YTN; PAM sequence: CTT
ctttcttcaaatctgttatt

SEQ ID NO: 289110 - DNA, 20 bp, Artificial Sequence
  Description of Artificial Sequence: Synthetic oligonucleotide
  Target: LAMA2; (-) strand; PAM type: YTN; PAM sequence: CTC
cttctttcttcaaatctgtt

SEQ ID NO: 289111 - DNA, 20 bp, Artificial Sequence
  Description of Artificial Sequence: Synthetic oligonucleotide
  Target: LAMA2; (-) strand; PAM type: YTN; PAM sequence: TTC
tccttctttcttcaaatctg

SEQ ID NO: 289112 - DNA, 20 bp, Artificial Sequence
  Description of Artificial Sequence: Synthetic oligonucleotide
  Target: LAMA2; (-) strand; PAM type: YTN; PAM sequence: CTT
ctccttctttcttcaaatct

SEQ ID NO: 289113 - DNA, 20 bp, Artificial Sequence
  Description of Artificial Sequence: Synthetic oligonucleotide
  Target: LAMA2; (-) strand; PAM type: YTN; PAM sequence: TTA
taatgcatatccatcttctc

SEQ ID NO: 289114 - DNA, 20 bp, Artificial Sequence
  Description of Artificial Sequence: Synthetic oligonucleotide
  Target: LAMA2; (-) strand; PAM type: YTN; PAM sequence: TTT
ataatgcatatccatcttct

SEQ ID NO: 289115 - DNA, 20 bp, Artificial Sequence
  Description of Artificial Sequence: Synthetic oligonucleotide
  Target: LAMA2; (-) strand; PAM type: YTN; PAM sequence: TTT
tataatgcatatccatcttc

SEQ ID NO: 289116 - DNA, 20 bp, Artificial Sequence
  Description of Artificial Sequence: Synthetic oligonucleotide
  Target: LAMA2; (-) strand; PAM type: YTN; PAM sequence: CTT
ttataatgcatatccatctt

SEQ ID NO: 289117 - DNA, 20 bp, Artificial Sequence
  Description of Artificial Sequence: Synthetic oligonucleotide
  Target: LAMA2; (-) strand; PAM type: YTN; PAM sequence: TTC
ttttataatgcatatccatc

SEQ ID NO: 289118 - DNA, 20 bp, Artificial Sequence
  Description of Artificial Sequence: Synthetic oligonucleotide
  Target: LAMA2; (-) strand; PAM type: YTN; PAM sequence: TTT
cttttataatgcatatccat

SEQ ID NO: 289119 - DNA, 20 bp, Artificial Sequence
  Description of Artificial Sequence: Synthetic oligonucleotide
  Target: LAMA2; (-) strand; PAM type: YTN; PAM sequence: TTT
tcttttataatgcatatcca

SEQ ID NO: 289120 - DNA, 20 bp, Artificial Sequence
  Description of Artificial Sequence: Synthetic oligonucleotide
  Target: LAMA2; (-) strand; PAM type: YTN; PAM sequence: TTT
ttcttttataatgcatatcc

SEQ ID NO: 289121 - DNA, 20 bp, Artificial Sequence
  Description of Artificial Sequence: Synthetic oligonucleotide
  Target: LAMA2; (-) strand; PAM type: YTN; PAM sequence: TTT
tttcttttataatgcatatc

SEQ ID NO: 289122 - DNA, 20 bp, Artificial Sequence
  Description of Artificial Sequence: Synthetic oligonucleotide
  Target: LAMA2; (-) strand; PAM type: YTN; PAM sequence: TTT
ttttcttttataatgcatat

SEQ ID NO: 289123 - DNA, 20 bp, Artificial Sequence
  Description of Artificial Sequence: Synthetic oligonucleotide
  Target: LAMA2; (-) strand; PAM type: YTN; PAM sequence: CTT
tttttcttttataatgcata

SEQ ID NO: 289124 - DNA, 20 bp, Artificial Sequence
  Description of Artificial Sequence: Synthetic oligonucleotide
  Target: LAMA2; (-) strand; PAM type: YTN; PAM sequence: TTG
tctttttttcttttataatg

SEQ ID NO: 289125 - DNA, 20 bp, Artificial Sequence
  Description of Artificial Sequence: Synthetic oligonucleotide
  Target: LAMA2; (-) strand; PAM type: YTN; PAM sequence: TTA
ggttgtctttttttctttta

SEQ ID NO: 289126 - DNA, 20 bp, Artificial Sequence
  Description of Artificial Sequence: Synthetic oligonucleotide
  Target: LAMA2; (-) strand; PAM type: YTN; PAM sequence: TTT
aggttgtctttttttctttt

SEQ ID NO: 289127 - DNA, 20 bp, Artificial Sequence
  Description of Artificial Sequence: Synthetic oligonucleotide
  Target: LAMA2; (-) strand; PAM type: YTN; PAM sequence: TTG
atggacatttaggttgtctt

SEQ ID NO: 289128 - DNA, 20 bp, Artificial Sequence
  Description of Artificial Sequence: Synthetic oligonucleotide
  Target: LAMA2; (-) strand; PAM type: YTN; PAM sequence: CTG
ttgatggacatttaggttgt

SEQ ID NO: 289129 - DNA, 20 bp, Artificial Sequence
  Description of Artificial Sequence: Synthetic oligonucleotide
  Target: LAMA2; (-) strand; PAM type: YTN; PAM sequence: CTC
agtcatctgttgatggacat

SEQ ID NO: 289130 - DNA, 20 bp, Artificial Sequence
  Description of Artificial Sequence: Synthetic oligonucleotide
  Target: LAMA2; (-) strand; PAM type: YTN; PAM sequence: TTC
tcagtcatctgttgatggac

SEQ ID NO: 289131 - DNA, 20 bp, Artificial Sequence
  Description of Artificial Sequence: Synthetic oligonucleotide
  Target: LAMA2; (-) strand; PAM type: YTN; PAM sequence: TTT
ctcagtcatctgttgatgga

SEQ ID NO: 289132 - DNA, 20 bp, Artificial Sequence
  Description of Artificial Sequence: Synthetic oligonucleotide
  Target: LAMA2; (-) strand; PAM type: YTN; PAM sequence: TTT
tctcagtcatctgttgatgg

SEQ ID NO: 289133 - DNA, 20 bp, Artificial Sequence
  Description of Artificial Sequence: Synthetic oligonucleotide
  Target: LAMA2; (-) strand; PAM type: YTN; PAM sequence: CTT
ttctcagtcatctgttgatg

SEQ ID NO: 289134 - DNA, 20 bp, Artificial Sequence
  Description of Artificial Sequence: Synthetic oligonucleotide
  Target: LAMA2; (-) strand; PAM type: YTN; PAM sequence: TTC
ttttctcagtcatctgttga

SEQ ID NO: 289135 - DNA, 20 bp, Artificial Sequence
  Description of Artificial Sequence: Synthetic oligonucleotide
  Target: LAMA2; (-) strand; PAM type: YTN; PAM sequence: TTT
cttttctcagtcatctgttg

SEQ ID NO: 289136 - DNA, 20 bp, Artificial Sequence
  Description of Artificial Sequence: Synthetic oligonucleotide
  Target: LAMA2; (-) strand; PAM type: YTN; PAM sequence: TTT
tcttttctcagtcatctgtt

SEQ ID NO: 289137 - DNA, 20 bp, Artificial Sequence
  Description of Artificial Sequence: Synthetic oligonucleotide
  Target: LAMA2; (-) strand; PAM type: YTN; PAM sequence: CTG
tggtgtatatataccacatt

SEQ ID NO: 289138 - DNA, 20 bp, Artificial Sequence
  Description of Artificial Sequence: Synthetic oligonucleotide
  Target: LAMA2; (-) strand; PAM type: YTN; PAM sequence: TTC
tgtggtgtatatataccaca

SEQ ID NO: 289139 - DNA, 20 bp, Artificial Sequence
  Description of Artificial Sequence: Synthetic oligonucleotide
  Target: LAMA2; (-) strand; PAM type: YTN; PAM sequence: CTG
catagtattctgtggtgtat

SEQ ID NO: 289140 - DNA, 20 bp, Artificial Sequence
  Description of Artificial Sequence: Synthetic oligonucleotide
  Target: LAMA2; (-) strand; PAM type: YTN; PAM sequence: TTA
tggctgcatagtattctgtg

SEQ ID NO: 289141 - DNA, 20 bp, Artificial Sequence
  Description of Artificial Sequence: Synthetic oligonucleotide
  Target: LAMA2; (-) strand; PAM type: YTN; PAM sequence: TTT
atggctgcatagtattctgt

SEQ ID NO: 289142 - DNA, 20 bp, Artificial Sequence
  Description of Artificial Sequence: Synthetic oligonucleotide
  Target: LAMA2; (-) strand; PAM type: YTN; PAM sequence: TTT
tatggctgcatagtattctg

SEQ ID NO: 289143 - DNA, 20 bp, Artificial Sequence
  Description of Artificial Sequence: Synthetic oligonucleotide
  Target: LAMA2; (-) strand; PAM type: YTN; PAM sequence: TTT
ttatggctgcatagtattct

SEQ ID NO: 289144 - DNA, 20 bp, Artificial Sequence
  Description of Artificial Sequence: Synthetic oligonucleotide
  Target: LAMA2; (-) strand; PAM type: YTN; PAM sequence: TTT
tttatggctgcatagtattc

SEQ ID NO: 289145 - DNA, 20 bp, Artificial Sequence
  Description of Artificial Sequence: Synthetic oligonucleotide
  Target: LAMA2; (-) strand; PAM type: YTN; PAM sequence: TTT
ttttatggctgcatagtatt

SEQ ID NO: 289146 - DNA, 20 bp, Artificial Sequence
  Description of Artificial Sequence: Synthetic oligonucleotide
  Target: LAMA2; (-) strand; PAM type: YTN; PAM sequence: CTT
tttttatggctgcatagtat

SEQ ID NO: 289147 - DNA, 20 bp, Artificial Sequence
  Description of Artificial Sequence: Synthetic oligonucleotide
  Target: LAMA2; (-) strand; PAM type: YTN; PAM sequence: TTC
tttttttatggctgcatagt

SEQ ID NO: 289148 - DNA, 20 bp, Artificial Sequence
  Description of Artificial Sequence: Synthetic oligonucleotide
  Target: LAMA2; (-) strand; PAM type: YTN; PAM sequence: CTT
ctttttttatggctgcatag

SEQ ID NO: 289149 - DNA, 20 bp, Artificial Sequence
  Description of Artificial Sequence: Synthetic oligonucleotide
  Target: LAMA2; (-) strand; PAM type: YTN; PAM sequence: TTC
cttctttttttatggctgca

SEQ ID NO: 289150 - DNA, 20 bp, Artificial Sequence
  Description of Artificial Sequence: Synthetic oligonucleotide
  Target: LAMA2; (-) strand; PAM type: YTN; PAM sequence: TTT
ccttctttttttatggctgc

SEQ ID NO: 289151 - DNA, 20 bp, Artificial Sequence
  Description of Artificial Sequence: Synthetic oligonucleotide
  Target: LAMA2; (-) strand; PAM type: YTN; PAM sequence: CTG
caaaagacatgatttccttc

SEQ ID NO: 289152 - DNA, 20 bp, Artificial Sequence
  Description of Artificial Sequence: Synthetic oligonucleotide
  Target: LAMA2; (-) strand; PAM type: YTN; PAM sequence: TTG
ctgcaaaagacatgatttcc

SEQ ID NO: 289153 - DNA, 20 bp, Artificial Sequence
  Description of Artificial Sequence: Synthetic oligonucleotide
  Target: LAMA2; (-) strand; PAM type: YTN; PAM sequence: CTG
ttgctgcaaaagacatgatt

SEQ ID NO: 289154 - DNA, 20 bp, Artificial Sequence
  Description of Artificial Sequence: Synthetic oligonucleotide
  Target: LAMA2; (-) strand; PAM type: YTN; PAM sequence: TTC
ctgttgctgcaaaagacatg

SEQ ID NO: 289155 - DNA, 20 bp, Artificial Sequence
  Description of Artificial Sequence: Synthetic oligonucleotide
  Target: LAMA2; (-) strand; PAM type: YTN; PAM sequence: CTC
caggtccattcctgttgctg

SEQ ID NO: 289156 - DNA, 20 bp, Artificial Sequence
  Description of Artificial Sequence: Synthetic oligonucleotide
  Target: LAMA2; (-) strand; PAM type: YTN; PAM sequence: TTA
ggataatgacctccaggtcc

SEQ ID NO: 289157 - DNA, 20 bp, Artificial Sequence
  Description of Artificial Sequence: Synthetic oligonucleotide
  Target: LAMA2; (-) strand; PAM type: YTN; PAM sequence: CTT
aggataatgacctccaggtc

SEQ ID NO: 289158 - DNA, 20 bp, Artificial Sequence
  Description of Artificial Sequence: Synthetic oligonucleotide
  Target: LAMA2; (-) strand; PAM type: YTN; PAM sequence: TTA
tgtcacttaggataatgacc

SEQ ID NO: 289159 - DNA, 20 bp, Artificial Sequence
  Description of Artificial Sequence: Synthetic oligonucleotide
  Target: LAMA2; (-) strand; PAM type: YTN; PAM sequence: CTG
ggttatgtcacttaggataa

SEQ ID NO: 289160 - DNA, 20 bp, Artificial Sequence
  Description of Artificial Sequence: Synthetic oligonucleotide
  Target: LAMA2; (-) strand; PAM type: YTN; PAM sequence: TTC
tgggttatgtcacttaggat

SEQ ID NO: 289161 - DNA, 20 bp, Artificial Sequence
  Description of Artificial Sequence: Synthetic oligonucleotide
  Target: LAMA2; (-) strand; PAM type: YTN; PAM sequence: TTT
ctgggttatgtcacttagga

SEQ ID NO: 289162 - DNA, 20 bp, Artificial Sequence
  Description of Artificial Sequence: Synthetic oligonucleotide
  Target: LAMA2; (-) strand; PAM type: YTN; PAM sequence: CTG
tttctgggttatgtcactta

SEQ ID NO: 289163 - DNA, 20 bp, Artificial Sequence
  Description of Artificial Sequence: Synthetic oligonucleotide
  Target: LAMA2; (-) strand; PAM type: YTN; PAM sequence: TTC
tgtttctgggttatgtcact

SEQ ID NO: 289164 - DNA, 20 bp, Artificial Sequence
  Description of Artificial Sequence: Synthetic oligonucleotide
  Target: LAMA2; (-) strand; PAM type: YTN; PAM sequence: TTT
ctgtttctgggttatgtcac

SEQ ID NO: 289165 - DNA, 20 bp, Artificial Sequence
  Description of Artificial Sequence: Synthetic oligonucleotide
  Target: LAMA2; (-) strand; PAM type: YTN; PAM sequence: TTT
tctgtttctgggttatgtca

SEQ ID NO: 289166 - DNA, 20 bp, Artificial Sequence
  Description of Artificial Sequence: Synthetic oligonucleotide
  Target: LAMA2; (-) strand; PAM type: YTN; PAM sequence: TTG
gattttctgtttctgggtta

SEQ ID NO: 289167 - DNA, 20 bp, Artificial Sequence
  Description of Artificial Sequence: Synthetic oligonucleotide
  Target: LAMA2; (-) strand; PAM type: YTN; PAM sequence: TTG
taagtgagaacatatggtat

SEQ ID NO: 289168 - DNA, 20 bp, Artificial Sequence
  Description of Artificial Sequence: Synthetic oligonucleotide
  Target: LAMA2; (-) strand; PAM type: YTN; PAM sequence: CTT
gtaagtgagaacatatggta

SEQ ID NO: 289169 - DNA, 20 bp, Artificial Sequence
  Description of Artificial Sequence: Synthetic oligonucleotide
  Target: LAMA2; (-) strand; PAM type: YTN; PAM sequence: CTC
gccttgtaagtgagaacata

SEQ ID NO: 289170 - DNA, 20 bp, Artificial Sequence
  Description of Artificial Sequence: Synthetic oligonucleotide
  Target: LAMA2; (-) strand; PAM type: YTN; PAM sequence: TTC
tcgccttgtaagtgagaaca

SEQ ID NO: 289171 - DNA, 20 bp, Artificial Sequence
  Description of Artificial Sequence: Synthetic oligonucleotide
  Target: LAMA2; (-) strand; PAM type: YTN; PAM sequence: CTT
ctcgccttgtaagtgagaac

SEQ ID NO: 289172 - DNA, 20 bp, Artificial Sequence
  Description of Artificial Sequence: Synthetic oligonucleotide
  Target: LAMA2; (-) strand; PAM type: YTN; PAM sequence: TTA
gcttctcgccttgtaagtga

SEQ ID NO: 289173 - DNA, 20 bp, Artificial Sequence
  Description of Artificial Sequence: Synthetic oligonucleotide
  Target: LAMA2; (-) strand; PAM type: YTN; PAM sequence: TTT
agcttctcgccttgtaagtg

SEQ ID NO: 289174 - DNA, 20 bp, Artificial Sequence
  Description of Artificial Sequence: Synthetic oligonucleotide
  Target: LAMA2; (-) strand; PAM type: YTN; PAM sequence: TTG
tttagcttctcgccttgtaa

SEQ ID NO: 289175 - DNA, 20 bp, Artificial Sequence
  Description of Artificial Sequence: Synthetic oligonucleotide
  Target: LAMA2; (-) strand; PAM type: YTN; PAM sequence: TTC
gtgtatccattgtttagctt

SEQ ID NO: 289176 - DNA, 20 bp, Artificial Sequence
  Description of Artificial Sequence: Synthetic oligonucleotide
  Target: LAMA2; (-) strand; PAM type: YTN; PAM sequence: CTT
cgtgtatccattgtttagct

SEQ ID NO: 289177 - DNA, 20 bp, Artificial Sequence
  Description of Artificial Sequence: Synthetic oligonucleotide
  Target: LAMA2; (-) strand; PAM type: YTN; PAM sequence: TTC
acgtcttcgtgtatccattg

SEQ ID NO: 289178 - DNA, 20 bp, Artificial Sequence
  Description of Artificial Sequence: Synthetic oligonucleotide
  Target: LAMA2; (-) strand; PAM type: YTN; PAM sequence: CTT
cacgtcttcgtgtatccatt

SEQ ID NO: 289179 - DNA, 20 bp, Artificial Sequence
  Description of Artificial Sequence: Synthetic oligonucleotide
  Target: LAMA2; (-) strand; PAM type: YTN; PAM sequence: TTC
catcttcacgtcttcgtgta

SEQ ID NO: 289180 - DNA, 20 bp, Artificial Sequence
  Description of Artificial Sequence: Synthetic oligonucleotide
  Target: LAMA2; (-) strand; PAM type: YTN; PAM sequence: TTT
ccatcttcacgtcttcgtgt

SEQ ID NO: 289181 - DNA, 20 bp, Artificial Sequence
  Description of Artificial Sequence: Synthetic oligonucleotide
  Target: LAMA2; (-) strand; PAM type: YTN; PAM sequence: TTG
tttccatcttcacgtcttcg

SEQ ID NO: 289182 - DNA, 20 bp, Artificial Sequence
  Description of Artificial Sequence: Synthetic oligonucleotide
  Target: LAMA2; (-) strand; PAM type: YTN; PAM sequence: CTA
ttgtttccatcttcacgtct

SEQ ID NO: 289183 - DNA, 20 bp, Artificial Sequence
  Description of Artificial Sequence: Synthetic oligonucleotide
  Target: LAMA2; (-) strand; PAM type: YTN; PAM sequence: TTG
gagtccccagtgtctattgt

SEQ ID NO: 289184 - DNA, 20 bp, Artificial Sequence
  Description of Artificial Sequence: Synthetic oligonucleotide
  Target: LAMA2; (-) strand; PAM type: YTN; PAM sequence: TTT
ggagtccccagtgtctattg

SEQ ID NO: 289185 - DNA, 20 bp, Artificial Sequence
  Description of Artificial Sequence: Synthetic oligonucleotide
  Target: LAMA2; (-) strand; PAM type: YTN; PAM sequence: TTT
tggagtccccagtgtctatt

SEQ ID NO: 289186 - DNA, 20 bp, Artificial Sequence
  Description of Artificial Sequence: Synthetic oligonucleotide
  Target: LAMA2; (-) strand; PAM type: YTN; PAM sequence: CTT
ttggagtccccagtgtctat

SEQ ID NO: 289187 - DNA, 20 bp, Artificial Sequence
  Description of Artificial Sequence: Synthetic oligonucleotide
  Target: LAMA2; (-) strand; PAM type: YTN; PAM sequence: CTC
cccccttttggagtccccag

SEQ ID NO: 289188 - DNA, 20 bp, Artificial Sequence
  Description of Artificial Sequence: Synthetic oligonucleotide
  Target: LAMA2; (-) strand; PAM type: YTN; PAM sequence: CTC
cctccccccttttggagtcc

SEQ ID NO: 289189 - DNA, 20 bp, Artificial Sequence
  Description of Artificial Sequence: Synthetic oligonucleotide
  Target: LAMA2; (-) strand; PAM type: YTN; PAM sequence: CTC
ctccctccccccttttggag

SEQ ID NO: 289190 - DNA, 20 bp, Artificial Sequence
  Description of Artificial Sequence: Synthetic oligonucleotide
  Target: LAMA2; (-) strand; PAM type: YTN; PAM sequence: TTC
tcctccctccccccttttgg

SEQ ID NO: 289191 - DNA, 20 bp, Artificial Sequence
  Description of Artificial Sequence: Synthetic oligonucleotide
  Target: LAMA2; (-) strand; PAM type: YTN; PAM sequence: CTT
ctcctccctccccccttttg

SEQ ID NO: 289192 - DNA, 20 bp, Artificial Sequence
  Description of Artificial Sequence: Synthetic oligonucleotide
  Target: LAMA2; (-) strand; PAM type: YTN; PAM sequence: TTC
accccttctcctccctcccc

SEQ ID NO: 289193 - DNA, 20 bp, Artificial Sequence
  Description of Artificial Sequence: Synthetic oligonucleotide
  Target: LAMA2; (-) strand; PAM type: YTN; PAM sequence: CTT
caccccttctcctccctccc

SEQ ID NO: 289194 - DNA, 20 bp, Artificial Sequence
  Description of Artificial Sequence: Synthetic oligonucleotide
  Target: LAMA2; (-) strand; PAM type: YTN; PAM sequence: TTA
aatcttcaccccttctcctc

SEQ ID NO: 289195 - DNA, 20 bp, Artificial Sequence
  Description of Artificial Sequence: Synthetic oligonucleotide
  Target: LAMA2; (-) strand; PAM type: YTN; PAM sequence: TTT
aaatcttcaccccttctcct

SEQ ID NO: 289196 - DNA, 20 bp, Artificial Sequence
  Description of Artificial Sequence: Synthetic oligonucleotide
  Target: LAMA2; (-) strand; PAM type: YTN; PAM sequence: TTT
taaatcttcaccccttctcc

SEQ ID NO: 289197 - DNA, 20 bp, Artificial Sequence
  Description of Artificial Sequence: Synthetic oligonucleotide
  Target: LAMA2; (-) strand; PAM type: YTN; PAM sequence: TTT
ttaaatcttcaccccttctc

SEQ ID NO: 289198 - DNA, 20 bp, Artificial Sequence
  Description of Artificial Sequence: Synthetic oligonucleotide
  Target: LAMA2; (-) strand; PAM type: YTN; PAM sequence: CTG
tacccaacaggcgattttta

SEQ ID NO: 289199 - DNA, 20 bp, Artificial Sequence
  Description of Artificial Sequence: Synthetic oligonucleotide
  Target: LAMA2; (-) strand; PAM type: YTN; PAM sequence: CTA
gtggacccatcacccacaca

SEQ ID NO: 289200 - DNA, 20 bp, Artificial Sequence
  Description of Artificial Sequence: Synthetic oligonucleotide
  Target: LAMA2; (-) strand; PAM type: YTN; PAM sequence: TTC
tagtggacccatcacccaca

SEQ ID NO: 289201 - DNA, 20 bp, Artificial Sequence
  Description of Artificial Sequence: Synthetic oligonucleotide
  Target: LAMA2; (-) strand; PAM type: YTN; PAM sequence: CTT
ctagtggacccatcacccac

SEQ ID NO: 289202 - DNA, 20 bp, Artificial Sequence
  Description of Artificial Sequence: Synthetic oligonucleotide
  Target: LAMA2; (-) strand; PAM type: YTN; PAM sequence: TTG
ggcttctagtggacccatca

SEQ ID NO: 289203 - DNA, 20 bp, Artificial Sequence
  Description of Artificial Sequence: Synthetic oligonucleotide
  Target: LAMA2; (-) strand; PAM type: YTN; PAM sequence: TTT
gggcttctagtggacccatc

SEQ ID NO: 289204 - DNA, 20 bp, Artificial Sequence
  Description of Artificial Sequence: Synthetic oligonucleotide
  Target: LAMA2; (-) strand; PAM type: YTN; PAM sequence: TTG
cataagagtgaagtttgggc

SEQ ID NO: 289205 - DNA, 20 bp, Artificial Sequence
  Description of Artificial Sequence: Synthetic oligonucleotide
  Target: LAMA2; (-) strand; PAM type: YTN; PAM sequence: TTC
atggatatattgcataagag

SEQ ID NO: 289206 - DNA, 20 bp, Artificial Sequence
  Description of Artificial Sequence: Synthetic oligonucleotide
  Target: LAMA2; (-) strand; PAM type: YTN; PAM sequence: TTT
catggatatattgcataaga

SEQ ID NO: 289207 - DNA, 20 bp, Artificial Sequence
  Description of Artificial Sequence: Synthetic oligonucleotide
  Target: LAMA2; (-) strand; PAM type: YTN; PAM sequence: TTG
tttcatggatatattgcata

SEQ ID NO: 289208 - DNA, 20 bp, Artificial Sequence
  Description of Artificial Sequence: Synthetic oligonucleotide
  Target: LAMA2; (-) strand; PAM type: YTN; PAM sequence: TTT
gtttcatggatatattgcat

SEQ ID NO: 289209 - DNA, 20 bp, Artificial Sequence
  Description of Artificial Sequence: Synthetic oligonucleotide
  Target: LAMA2; (-) strand; PAM type: YTN; PAM sequence: TTA
gatccaggtggtgcatatga

SEQ ID NO: 289210 - DNA, 20 bp, Artificial Sequence
  Description of Artificial Sequence: Synthetic oligonucleotide
  Target: LAMA2; (-) strand; PAM type: YTN; PAM sequence: TTT
agatccaggtggtgcatatg

SEQ ID NO: 289211 - DNA, 20 bp, Artificial Sequence
  Description of Artificial Sequence: Synthetic oligonucleotide
  Target: LAMA2; (-) strand; PAM type: YTN; PAM sequence: TTT
tagatccaggtggtgcatat

SEQ ID NO: 289212 - DNA, 20 bp, Artificial Sequence
  Description of Artificial Sequence: Synthetic oligonucleotide
  Target: LAMA2; (-) strand; PAM type: YTN; PAM sequence: TTC
acaattttagatccaggtgg

SEQ ID NO: 289213 - DNA, 20 bp, Artificial Sequence
  Description of Artificial Sequence: Synthetic oligonucleotide
  Target: LAMA2; (-) strand; PAM type: YTN; PAM sequence: TTT
cacaattttagatccaggtg

SEQ ID NO: 289214 - DNA, 20 bp, Artificial Sequence
  Description of Artificial Sequence: Synthetic oligonucleotide
  Target: LAMA2; (-) strand; PAM type: YTN; PAM sequence: TTA
tttcacaattttagatccag

SEQ ID NO: 289215 - DNA, 20 bp, Artificial Sequence
  Description of Artificial Sequence: Synthetic oligonucleotide
  Target: LAMA2; (-) strand; PAM type: YTN; PAM sequence: TTA
ttatttcacaattttagatc

SEQ ID NO: 289216 - DNA, 20 bp, Artificial Sequence
  Description of Artificial Sequence: Synthetic oligonucleotide
  Target: LAMA2; (-) strand; PAM type: YTN; PAM sequence: TTT
attatttcacaattttagat

SEQ ID NO: 289217 - DNA, 20 bp, Artificial Sequence
  Description of Artificial Sequence: Synthetic oligonucleotide
  Target: LAMA2; (-) strand; PAM type: YTN; PAM sequence: TTT
tattatttcacaattttaga

SEQ ID NO: 289218 - DNA, 20 bp, Artificial Sequence
  Description of Artificial Sequence: Synthetic oligonucleotide
  Target: LAMA2; (-) strand; PAM type: YTN; PAM sequence: TTT
ttattatttcacaattttag

SEQ ID NO: 289219 - DNA, 20 bp, Artificial Sequence
  Description of Artificial Sequence: Synthetic oligonucleotide
  Target: LAMA2; (-) strand; PAM type: YTN; PAM sequence: TTA
tttttattatttcacaattt

SEQ ID NO: 289220 - DNA, 20 bp, Artificial Sequence
  Description of Artificial Sequence: Synthetic oligonucleotide
  Target: LAMA2; (-) strand; PAM type: YTN; PAM sequence: TTT
atttttattatttcacaatt

SEQ ID NO: 289221 - DNA, 20 bp, Artificial Sequence
  Description of Artificial Sequence: Synthetic oligonucleotide
  Target: LAMA2; (-) strand; PAM type: YTN; PAM sequence: TTT
tatttttattatttcacaat

SEQ ID NO: 289222 - DNA, 20 bp, Artificial Sequence
  Description of Artificial Sequence: Synthetic oligonucleotide
  Target: LAMA2; (-) strand; PAM type: YTN; PAM sequence: TTT
ttatttttattatttcacaa

SEQ ID NO: 289223 - DNA, 20 bp, Artificial Sequence
  Description of Artificial Sequence: Synthetic oligonucleotide
  Target: LAMA2; (-) strand; PAM type: YTN; PAM sequence: TTA
tttttatttttattatttca

SEQ ID NO: 289224 - DNA, 20 bp, Artificial Sequence
  Description of Artificial Sequence: Synthetic oligonucleotide
  Target: LAMA2; (-) strand; PAM type: YTN; PAM sequence: TTT
atttttatttttattatttc

SEQ ID NO: 289225 - DNA, 20 bp, Artificial Sequence
  Description of Artificial Sequence: Synthetic oligonucleotide
  Target: LAMA2; (-) strand; PAM type: YTN; PAM sequence: CTT
tatttttatttttattattt

SEQ ID NO: 289226 - DNA, 20 bp, Artificial Sequence
  Description of Artificial Sequence: Synthetic oligonucleotide
  Target: LAMA2; (-) strand; PAM type: YTN; PAM sequence: TTC
cgaatgtctttatttttatt

SEQ ID NO: 289227 - DNA, 20 bp, Artificial Sequence
  Description of Artificial Sequence: Synthetic oligonucleotide
  Target: LAMA2; (-) strand; PAM type: YTN; PAM sequence: TTA
gtgttccgaatgtctttatt

SEQ ID NO: 289228 - DNA, 20 bp, Artificial Sequence
  Description of Artificial Sequence: Synthetic oligonucleotide
  Target: LAMA2; (-) strand; PAM type: YTN; PAM sequence: CTT
agtgttccgaatgtctttat

SEQ ID NO: 289229 - DNA, 20 bp, Artificial Sequence
  Description of Artificial Sequence: Synthetic oligonucleotide
  Target: LAMA2; (-) strand; PAM type: YTN; PAM sequence: TTC
agcttagtgttccgaatgtc

SEQ ID NO: 289230 - DNA, 20 bp, Artificial Sequence
  Description of Artificial Sequence: Synthetic oligonucleotide
  Target: LAMA2; (-) strand; PAM type: YTN; PAM sequence: TTA
gccaattcagcttagtgttc

SEQ ID NO: 289231 - DNA, 20 bp, Artificial Sequence
  Description of Artificial Sequence: Synthetic oligonucleotide
  Target: LAMA2; (-) strand; PAM type: YTN; PAM sequence: TTA
tagcattagccaattcagct

SEQ ID NO: 289232 - DNA, 20 bp, Artificial Sequence
  Description of Artificial Sequence: Synthetic oligonucleotide
  Target: LAMA2; (-) strand; PAM type: YTN; PAM sequence: TTT
atagcattagccaattcagc

SEQ ID NO: 289233 - DNA, 20 bp, Artificial Sequence
  Description of Artificial Sequence: Synthetic oligonucleotide
  Target: LAMA2; (-) strand; PAM type: YTN; PAM sequence: TTA
gagtttatagcattagccaa

SEQ ID NO: 289234 - DNA, 20 bp, Artificial Sequence
  Description of Artificial Sequence: Synthetic oligonucleotide
  Target: LAMA2; (-) strand; PAM type: YTN; PAM sequence: TTT
agagtttatagcattagcca

SEQ ID NO: 289235 - DNA, 20 bp, Artificial Sequence
  Description of Artificial Sequence: Synthetic oligonucleotide
  Target: LAMA2; (-) strand; PAM type: YTN; PAM sequence: CTT
tagagtttatagcattagcc

SEQ ID NO: 289236 - DNA, 20 bp, Artificial Sequence
  Description of Artificial Sequence: Synthetic oligonucleotide
  Target: LAMA2; (-) strand; PAM type: YTN; PAM sequence: CTA
tctttagagtttatagcatt

SEQ ID NO: 289237 - DNA, 20 bp, Artificial Sequence
  Description of Artificial Sequence: Synthetic oligonucleotide
  Target: LAMA2; (-) strand; PAM type: YTN; PAM sequence: TTA
ctatctttagagtttatagc

SEQ ID NO: 289238 - DNA, 20 bp, Artificial Sequence
  Description of Artificial Sequence: Synthetic oligonucleotide
  Target: LAMA2; (-) strand; PAM type: YTN; PAM sequence: CTA
ccaagcatattactatcttt

SEQ ID NO: 289239 - DNA, 20 bp, Artificial Sequence
  Description of Artificial Sequence: Synthetic oligonucleotide
  Target: LAMA2; (-) strand; PAM type: YTN; PAM sequence: TTA
taccgtacatctaccaagca

SEQ ID NO: 289240 - DNA, 20 bp, Artificial Sequence
  Description of Artificial Sequence: Synthetic oligonucleotide
  Target: LAMA2; (-) strand; PAM type: YTN; PAM sequence: TTG
ttataccgtacatctaccaa

SEQ ID NO: 289241 - DNA, 20 bp, Artificial Sequence
  Description of Artificial Sequence: Synthetic oligonucleotide
  Target: LAMA2; (-) strand; PAM type: YTN; PAM sequence: TTT
gttataccgtacatctacca

SEQ ID NO: 289242 - DNA, 20 bp, Artificial Sequence
  Description of Artificial Sequence: Synthetic oligonucleotide
  Target: LAMA2; (-) strand; PAM type: YTN; PAM sequence: CTG
tttgttataccgtacatcta

SEQ ID NO: 289243 - DNA, 20 bp, Artificial Sequence
  Description of Artificial Sequence: Synthetic oligonucleotide
  Target: LAMA2; (-) strand; PAM type: YTN; PAM sequence: TTA
tccctgtttgttataccgta

SEQ ID NO: 289244 - DNA, 20 bp, Artificial Sequence
  Description of Artificial Sequence: Synthetic oligonucleotide
  Target: LAMA2; (-) strand; PAM type: YTN; PAM sequence: TTT
atccctgtttgttataccgt

SEQ ID NO: 289245 - DNA, 20 bp, Artificial Sequence
  Description of Artificial Sequence: Synthetic oligonucleotide
  Target: LAMA2; (-) strand; PAM type: YTN; PAM sequence: TTT
tatccctgtttgttataccg

SEQ ID NO: 289246 - DNA, 20 bp, Artificial Sequence
  Description of Artificial Sequence: Synthetic oligonucleotide
  Target: LAMA2; (-) strand; PAM type: YTN; PAM sequence: TTG
aatcattttatccctgtttg

SEQ ID NO: 289247 - DNA, 20 bp, Artificial Sequence
  Description of Artificial Sequence: Synthetic oligonucleotide
  Target: LAMA2; (-) strand; PAM type: YTN; PAM sequence: TTG
ttgaatcattttatccctgt

SEQ ID NO: 289248 - DNA, 20 bp, Artificial Sequence
  Description of Artificial Sequence: Synthetic oligonucleotide
  Target: LAMA2; (-) strand; PAM type: YTN; PAM sequence: CTA
agttgttgaatcattttatc

SEQ ID NO: 289249 - DNA, 20 bp, Artificial Sequence
  Description of Artificial Sequence: Synthetic oligonucleotide
  Target: LAMA2; (-) strand; PAM type: YTN; PAM sequence: CTC
ctaagttgttgaatcatttt

SEQ ID NO: 289250 - DNA, 20 bp, Artificial Sequence
  Description of Artificial Sequence: Synthetic oligonucleotide
  Target: LAMA2; (-) strand; PAM type: YTN; PAM sequence: TTC
tcctaagttgttgaatcatt

SEQ ID NO: 289251 - DNA, 20 bp, Artificial Sequence
  Description of Artificial Sequence: Synthetic oligonucleotide
  Target: LAMA2; (-) strand; PAM type: YTN; PAM sequence: TTG
ttctcctaagttgttgaatc

SEQ ID NO: 289252 - DNA, 20 bp, Artificial Sequence
  Description of Artificial Sequence: Synthetic oligonucleotide
  Target: LAMA2; (-) strand; PAM type: YTN; PAM sequence: TTA
taaaaattgttctcctaagt

SEQ ID NO: 289253 - DNA, 20 bp, Artificial Sequence
  Description of Artificial Sequence: Synthetic oligonucleotide
  Target: LAMA2; (-) strand; PAM type: YTN; PAM sequence: TTT
ataaaaattgttctcctaag

SEQ ID NO: 289254 - DNA, 20 bp, Artificial Sequence
  Description of Artificial Sequence: Synthetic oligonucleotide
  Target: LAMA2; (-) strand; PAM type: YTN; PAM sequence: TTC
caagatgaccatttataaaa

SEQ ID NO: 289255 - DNA, 20 bp, Artificial Sequence
  Description of Artificial Sequence: Synthetic oligonucleotide
  Target: LAMA2; (-) strand; PAM type: YTN; PAM sequence: TTT
ccaagatgaccatttataaa

SEQ ID NO: 289256 - DNA, 20 bp, Artificial Sequence
  Description of Artificial Sequence: Synthetic oligonucleotide
  Target: LAMA2; (-) strand; PAM type: YTN; PAM sequence: TTA
gcgtttccaagatgaccatt

SEQ ID NO: 289257 - DNA, 20 bp, Artificial Sequence
  Description of Artificial Sequence: Synthetic oligonucleotide
  Target: LAMA2; (-) strand; PAM type: YTN; PAM sequence: TTA
tggaaattagcgtttccaag

SEQ ID NO: 289258 - DNA, 20 bp, Artificial Sequence
  Description of Artificial Sequence: Synthetic oligonucleotide
  Target: LAMA2; (-) strand; PAM type: YTN; PAM sequence: CTG
attatggaaattagcgtttc

SEQ ID NO: 289259 - DNA, 20 bp, Artificial Sequence
  Description of Artificial Sequence: Synthetic oligonucleotide
  Target: LAMA2; (-) strand; PAM type: YTN; PAM sequence: TTG
agatagcagactgattatgg

SEQ ID NO: 289260 - DNA, 20 bp, Artificial Sequence
  Description of Artificial Sequence: Synthetic oligonucleotide
  Target: LAMA2; (-) strand; PAM type: YTN; PAM sequence: TTA
atggatagaataaaagttga

SEQ ID NO: 289261 - DNA, 20 bp, Artificial Sequence
  Description of Artificial Sequence: Synthetic oligonucleotide
  Target: LAMA2; (-) strand; PAM type: YTN; PAM sequence: TTT
aatggatagaataaaagttg

SEQ ID NO: 289262 - DNA, 20 bp, Artificial Sequence
  Description of Artificial Sequence: Synthetic oligonucleotide
  Target: LAMA2; (-) strand; PAM type: YTN; PAM sequence: TTT
taatggatagaataaaagtt

SEQ ID NO: 289263 - DNA, 20 bp, Artificial Sequence
  Description of Artificial Sequence: Synthetic oligonucleotide
  Target: LAMA2; (-) strand; PAM type: YTN; PAM sequence: TTG
ttttaatggatagaataaaa

SEQ ID NO: 289264 - DNA, 20 bp, Artificial Sequence
  Description of Artificial Sequence: Synthetic oligonucleotide
  Target: LAMA2; (-) strand; PAM type: YTN; PAM sequence: TTT
gttttaatggatagaataaa

SEQ ID NO: 289265 - DNA, 20 bp, Artificial Sequence
  Description of Artificial Sequence: Synthetic oligonucleotide
  Target: LAMA2; (-) strand; PAM type: YTN; PAM sequence: TTA
tttgttttaatggatagaat

SEQ ID NO: 289266 - DNA, 20 bp, Artificial Sequence
  Description of Artificial Sequence: Synthetic oligonucleotide
  Target: LAMA2; (-) strand; PAM type: YTN; PAM sequence: TTT
atttgttttaatggatagaa

SEQ ID NO: 289267 - DNA, 20 bp, Artificial Sequence
  Description of Artificial Sequence: Synthetic oligonucleotide
  Target: LAMA2; (-) strand; PAM type: YTN; PAM sequence: TTG
tttatttgttttaatggata

SEQ ID NO: 289268 - DNA, 20 bp, Artificial Sequence
  Description of Artificial Sequence: Synthetic oligonucleotide
  Target: LAMA2; (-) strand; PAM type: YTN; PAM sequence: TTT
gtttatttgttttaatggat

SEQ ID NO: 289269 - DNA, 20 bp, Artificial Sequence
  Description of Artificial Sequence: Synthetic oligonucleotide
  Target: LAMA2; (-) strand; PAM type: YTN; PAM sequence: TTT
tgtttatttgttttaatgga

SEQ ID NO: 289270 - DNA, 20 bp, Artificial Sequence
  Description of Artificial Sequence: Synthetic oligonucleotide
  Target: LAMA2; (-) strand; PAM type: YTN; PAM sequence: CTT
ttgtttatttgttttaatgg

SEQ ID NO: 289271 - DNA, 20 bp, Artificial Sequence
  Description of Artificial Sequence: Synthetic oligonucleotide
  Target: LAMA2; (-) strand; PAM type: YTN; PAM sequence: TTC
agagcacagatcttttgttt

SEQ ID NO: 289272 - DNA, 20 bp, Artificial Sequence
  Description of Artificial Sequence: Synthetic oligonucleotide
  Target: LAMA2; (-) strand; PAM type: YTN; PAM sequence: TTG
attcagagcacagatctttt

SEQ ID NO: 289273 - DNA, 20 bp, Artificial Sequence
  Description of Artificial Sequence: Synthetic oligonucleotide
  Target: LAMA2; (-) strand; PAM type: YTN; PAM sequence: CTA
atattgattcagagcacaga

SEQ ID NO: 289274 - DNA, 20 bp, Artificial Sequence
  Description of Artificial Sequence: Synthetic oligonucleotide
  Target: LAMA2; (-) strand; PAM type: YTN; PAM sequence: TTG
actaatattgattcagagca

SEQ ID NO: 289275 - DNA, 20 bp, Artificial Sequence
  Description of Artificial Sequence: Synthetic oligonucleotide
  Target: LAMA2; (-) strand; PAM type: YTN; PAM sequence: TTT
gactaatattgattcagagc

SEQ ID NO: 289276 - DNA, 20 bp, Artificial Sequence
  Description of Artificial Sequence: Synthetic oligonucleotide
  Target: LAMA2; (-) strand; PAM type: YTN; PAM sequence: CTT
tgactaatattgattcagag

SEQ ID NO: 289277 - DNA, 20 bp, Artificial Sequence
  Description of Artificial Sequence: Synthetic oligonucleotide
  Target: LAMA2; (-) strand; PAM type: YTN; PAM sequence: TTG
acctttgactaatattgatt

SEQ ID NO: 289278 - DNA, 20 bp, Artificial Sequence
  Description of Artificial Sequence: Synthetic oligonucleotide
  Target: LAMA2; (-) strand; PAM type: YTN; PAM sequence: CTT
gacctttgactaatattgat

SEQ ID NO: 289279 - DNA, 20 bp, Artificial Sequence
  Description of Artificial Sequence: Synthetic oligonucleotide
  Target: LAMA2; (-) strand; PAM type: YTN; PAM sequence: CTG
taacttgacctttgactaat

SEQ ID NO: 289280 - DNA, 20 bp, Artificial Sequence
  Description of Artificial Sequence: Synthetic oligonucleotide
  Target: LAMA2; (-) strand; PAM type: YTN; PAM sequence: TTC
tgtaacttgacctttgacta

SEQ ID NO: 289281 - DNA, 20 bp, Artificial Sequence
  Description of Artificial Sequence: Synthetic oligonucleotide
  Target: LAMA2; (-) strand; PAM type: YTN; PAM sequence: TTA
tatgattctgtaacttgacc

SEQ ID NO: 289282 - DNA, 20 bp, Artificial Sequence
  Description of Artificial Sequence: Synthetic oligonucleotide
  Target: LAMA2; (-) strand; PAM type: YTN; PAM sequence: TTT
atatgattctgtaacttgac

SEQ ID NO: 289283 - DNA, 20 bp, Artificial Sequence
  Description of Artificial Sequence: Synthetic oligonucleotide
  Target: LAMA2; (-) strand; PAM type: YTN; PAM sequence: TTC
acatttatatgattctgtaa

SEQ ID NO: 289284 - DNA, 20 bp, Artificial Sequence
  Description of Artificial Sequence: Synthetic oligonucleotide
  Target: LAMA2; (-) strand; PAM type: YTN; PAM sequence: TTT
cacatttatatgattctgta

SEQ ID NO: 289285 - DNA, 20 bp, Artificial Sequence
  Description of Artificial Sequence: Synthetic oligonucleotide
  Target: LAMA2; (-) strand; PAM type: YTN; PAM sequence: CTT
tcacatttatatgattctgt

SEQ ID NO: 289286 - DNA, 20 bp, Artificial Sequence
  Description of Artificial Sequence: Synthetic oligonucleotide
  Target: LAMA2; (-) strand; PAM type: YTN; PAM sequence: CTA
ctttcacatttatatgattc

SEQ ID NO: 289287 - DNA, 20 bp, Artificial Sequence
  Description of Artificial Sequence: Synthetic oligonucleotide
  Target: LAMA2; (-) strand; PAM type: YTN; PAM sequence: TTA
actactttcacatttatatg

SEQ ID NO: 289288 - DNA, 20 bp, Artificial Sequence
  Description of Artificial Sequence: Synthetic oligonucleotide
  Target: LAMA2; (-) strand; PAM type: YTN; PAM sequence: TTT
aactactttcacatttatat

SEQ ID NO: 289289 - DNA, 20 bp, Artificial Sequence
  Description of Artificial Sequence: Synthetic oligonucleotide
  Target: LAMA2; (-) strand; PAM type: YTN; PAM sequence: TTT
taactactttcacatttata

SEQ ID NO: 289290 - DNA, 20 bp, Artificial Sequence
  Description of Artificial Sequence: Synthetic oligonucleotide
  Target: LAMA2; (-) strand; PAM type: YTN; PAM sequence: TTT
ttaactactttcacatttat

SEQ ID NO: 289291 - DNA, 20 bp, Artificial Sequence
  Description of Artificial Sequence: Synthetic oligonucleotide
  Target: LAMA2; (-) strand; PAM type: YTN; PAM sequence: CTA
aaacatatttttaactactt

SEQ ID NO: 289292 - DNA, 20 bp, Artificial Sequence
  Description of Artificial Sequence: Synthetic oligonucleotide
  Target: LAMA2; (-) strand; PAM type: YTN; PAM sequence: TTA
cagtaaacctaaaacatatt

SEQ ID NO: 289293 - DNA, 20 bp, Artificial Sequence
  Description of Artificial Sequence: Synthetic oligonucleotide
  Target: LAMA2; (-) strand; PAM type: YTN; PAM sequence: CTG
tagttacagtaaacctaaaa

SEQ ID NO: 289294 - DNA, 20 bp, Artificial Sequence
  Description of Artificial Sequence: Synthetic oligonucleotide
  Target: LAMA2; (-) strand; PAM type: YTN; PAM sequence: TTG
atggaatgctgtagttacag

SEQ ID NO: 289295 - DNA, 20 bp, Artificial Sequence
  Description of Artificial Sequence: Synthetic oligonucleotide
  Target: LAMA2; (-) strand; PAM type: YTN; PAM sequence: CTG
aattgatggaatgctgtagt

SEQ ID NO: 289296 - DNA, 20 bp, Artificial Sequence
  Description of Artificial Sequence: Synthetic oligonucleotide
  Target: LAMA2; (-) strand; PAM type: YTN; PAM sequence: TTC
tgaattgatggaatgctgta

SEQ ID NO: 289297 - DNA, 20 bp, Artificial Sequence
  Description of Artificial Sequence: Synthetic oligonucleotide
  Target: LAMA2; (-) strand; PAM type: YTN; PAM sequence: TTT
ctgaattgatggaatgctgt

SEQ ID NO: 289298 - DNA, 20 bp, Artificial Sequence
  Description of Artificial Sequence: Synthetic oligonucleotide
  Target: LAMA2; (-) strand; PAM type: YTN; PAM sequence: CTT
tctgaattgatggaatgctg

SEQ ID NO: 289299 - DNA, 20 bp, Artificial Sequence
  Description of Artificial Sequence: Synthetic oligonucleotide
  Target: LAMA2; (-) strand; PAM type: YTN; PAM sequence: TTG
ggggaagaactttctgaatt

SEQ ID NO: 289300 - DNA, 20 bp, Artificial Sequence
  Description of Artificial Sequence: Synthetic oligonucleotide
  Target: LAMA2; (-) strand; PAM type: YTN; PAM sequence: CTA
ttgggggaagaactttctga

SEQ ID NO: 289301 - DNA, 20 bp, Artificial Sequence
  Description of Artificial Sequence: Synthetic oligonucleotide
  Target: LAMA2; (-) strand; PAM type: YTN; PAM sequence: TTA
gacctattgggggaagaact

SEQ ID NO: 289302 - DNA, 20 bp, Artificial Sequence
  Description of Artificial Sequence: Synthetic oligonucleotide
  Target: LAMA2; (-) strand; PAM type: YTN; PAM sequence: CTG
gaaaaattagacctattggg

SEQ ID NO: 289303 - DNA, 20 bp, Artificial Sequence
  Description of Artificial Sequence: Synthetic oligonucleotide
  Target: LAMA2; (-) strand; PAM type: YTN; PAM sequence: CTA
gtaaaatctggaaaaattag

SEQ ID NO: 289304 - DNA, 20 bp, Artificial Sequence
  Description of Artificial Sequence: Synthetic oligonucleotide
  Target: LAMA2; (-) strand; PAM type: YTN; PAM sequence: CTC
tagtaaaatctggaaaaatt

SEQ ID NO: 289305 - DNA, 20 bp, Artificial Sequence
  Description of Artificial Sequence: Synthetic oligonucleotide
  Target: LAMA2; (-) strand; PAM type: YTN; PAM sequence: TTA
gtagctctagtaaaatctgg

SEQ ID NO: 289306 - DNA, 20 bp, Artificial Sequence
  Description of Artificial Sequence: Synthetic oligonucleotide
  Target: LAMA2; (-) strand; PAM type: YTN; PAM sequence: CTG
gaccacagagtagtaacagt

SEQ ID NO: 289307 - DNA, 20 bp, Artificial Sequence
  Description of Artificial Sequence: Synthetic oligonucleotide
  Target: LAMA2; (-) strand; PAM type: YTN; PAM sequence: TTC
tggaccacagagtagtaaca

SEQ ID NO: 289308 - DNA, 20 bp, Artificial Sequence
  Description of Artificial Sequence: Synthetic oligonucleotide
  Target: LAMA2; (-) strand; PAM type: YTN; PAM sequence: TTT
ctggaccacagagtagtaac

SEQ ID NO: 289309 - DNA, 20 bp, Artificial Sequence
  Description of Artificial Sequence: Synthetic oligonucleotide
  Target: LAMA2; (-) strand; PAM type: YTN; PAM sequence: CTG
atttctggaccacagagtag

SEQ ID NO: 289310 - DNA, 20 bp, Artificial Sequence
  Description of Artificial Sequence: Synthetic oligonucleotide
  Target: LAMA2; (-) strand; PAM type: YTN; PAM sequence: TTC
tgatttctggaccacagagt

SEQ ID NO: 289311 - DNA, 20 bp, Artificial Sequence
  Description of Artificial Sequence: Synthetic oligonucleotide
  Target: LAMA2; (-) strand; PAM type: YTN; PAM sequence: TTT
ctgatttctggaccacagag

SEQ ID NO: 289312 - DNA, 20 bp, Artificial Sequence
  Description of Artificial Sequence: Synthetic oligonucleotide
  Target: LAMA2; (-) strand; PAM type: YTN; PAM sequence: CTT
tctgatttctggaccacaga

SEQ ID NO: 289313 - DNA, 20 bp, Artificial Sequence
  Description of Artificial Sequence: Synthetic oligonucleotide
  Target: LAMA2; (-) strand; PAM type: YTN; PAM sequence: TTC
tttctgatttctggaccaca

SEQ ID NO: 289314 - DNA, 20 bp, Artificial Sequence
  Description of Artificial Sequence: Synthetic oligonucleotide
  Target: LAMA2; (-) strand; PAM type: YTN; PAM sequence: CTG
ggataaaggaaaattctttc

SEQ ID NO: 289315 - DNA, 20 bp, Artificial Sequence
  Description of Artificial Sequence: Synthetic oligonucleotide
  Target: LAMA2; (-) strand; PAM type: YTN; PAM sequence: CTG
agtaggctgggataaaggaa

SEQ ID NO: 289316 - DNA, 20 bp, Artificial Sequence
  Description of Artificial Sequence: Synthetic oligonucleotide
  Target: LAMA2; (-) strand; PAM type: YTN; PAM sequence: CTA
gaaaccagaaatgtcacaga

SEQ ID NO: 289317 - DNA, 20 bp, Artificial Sequence
  Description of Artificial Sequence: Synthetic oligonucleotide
  Target: LAMA2; (-) strand; PAM type: YTN; PAM sequence: TTG
aactagaaaccagaaatgtc

SEQ ID NO: 289318 - DNA, 20 bp, Artificial Sequence
  Description of Artificial Sequence: Synthetic oligonucleotide
  Target: LAMA2; (-) strand; PAM type: YTN; PAM sequence: CTG
tgtcaaagggattgaactag

SEQ ID NO: 289319 - DNA, 20 bp, Artificial Sequence
  Description of Artificial Sequence: Synthetic oligonucleotide
  Target: LAMA2; (-) strand; PAM type: YTN; PAM sequence: TTA
taaatgagaaggtatcagcc

SEQ ID NO: 289320 - DNA, 20 bp, Artificial Sequence
  Description of Artificial Sequence: Synthetic oligonucleotide
  Target: LAMA2; (-) strand; PAM type: YTN; PAM sequence: CTT
ataaatgagaaggtatcagc

SEQ ID NO: 289321 - DNA, 20 bp, Artificial Sequence
  Description of Artificial Sequence: Synthetic oligonucleotide
  Target: LAMA2; (-) strand; PAM type: YTN; PAM sequence: TTG
aaagccaaggagaagactta

SEQ ID NO: 289322 - DNA, 20 bp, Artificial Sequence
  Description of Artificial Sequence: Synthetic oligonucleotide
  Target: LAMA2; (-) strand; PAM type: YTN; PAM sequence: TTT
gaaagccaaggagaagactt

SEQ ID NO: 289323 - DNA, 20 bp, Artificial Sequence
  Description of Artificial Sequence: Synthetic oligonucleotide
  Target: LAMA2; (-) strand; PAM type: YTN; PAM sequence: CTA
gagtcaatttgaaagccaag

SEQ ID NO: 289324 - DNA, 20 bp, Artificial Sequence
  Description of Artificial Sequence: Synthetic oligonucleotide
  Target: LAMA2; (-) strand; PAM type: YTN; PAM sequence: TTC
agaaaggcaaaaagcaatgt

SEQ ID NO: 289325 - DNA, 20 bp, Artificial Sequence
  Description of Artificial Sequence: Synthetic oligonucleotide
  Target: LAMA2; (-) strand; PAM type: YTN; PAM sequence: TTG
acaggagtattcagaaaggc

SEQ ID NO: 289326 - DNA, 20 bp, Artificial Sequence
  Description of Artificial Sequence: Synthetic oligonucleotide
  Target: LAMA2; (-) strand; PAM type: YTN; PAM sequence: TTT
gacaggagtattcagaaagg

SEQ ID NO: 289327 - DNA, 20 bp, Artificial Sequence
  Description of Artificial Sequence: Synthetic oligonucleotide
  Target: LAMA2; (-) strand; PAM type: YTN; PAM sequence: TTG
gtgcatttgacaggagtatt

SEQ ID NO: 289328 - DNA, 20 bp, Artificial Sequence
  Description of Artificial Sequence: Synthetic oligonucleotide
  Target: LAMA2; (-) strand; PAM type: YTN; PAM sequence: CTT
ggtgcatttgacaggagtat

SEQ ID NO: 289329 - DNA, 20 bp, Artificial Sequence
  Description of Artificial Sequence: Synthetic oligonucleotide
  Target: LAMA2; (-) strand; PAM type: YTN; PAM sequence: CTG
cttggtgcatttgacaggag

SEQ ID NO: 289330 - DNA, 20 bp, Artificial Sequence
  Description of Artificial Sequence: Synthetic oligonucleotide
  Target: LAMA2; (-) strand; PAM type: YTN; PAM sequence: TTA
atacccaaaataaaagtgag

SEQ ID NO: 289331 - DNA, 20 bp, Artificial Sequence
  Description of Artificial Sequence: Synthetic oligonucleotide
  Target: LAMA2; (-) strand; PAM type: YTN; PAM sequence: TTC
atgtcattaatacccaaaat

SEQ ID NO: 289332 - DNA, 20 bp, Artificial Sequence
  Description of Artificial Sequence: Synthetic oligonucleotide
  Target: LAMA2; (-) strand; PAM type: YTN; PAM sequence: TTA
acggtgataccatagagata

SEQ ID NO: 289333 - DNA, 20 bp, Artificial Sequence
  Description of Artificial Sequence: Synthetic oligonucleotide
  Target: LAMA2; (-) strand; PAM type: YTN; PAM sequence: TTT
aacggtgataccatagagat

SEQ ID NO: 289334 - DNA, 20 bp, Artificial Sequence
  Description of Artificial Sequence: Synthetic oligonucleotide
  Target: LAMA2; (-) strand; PAM type: YTN; PAM sequence: TTT
taacggtgataccatagaga

SEQ ID NO: 289335 - DNA, 20 bp, Artificial Sequence
  Description of Artificial Sequence: Synthetic oligonucleotide
  Target: LAMA2; (-) strand; PAM type: YTN; PAM sequence: TTT
ttaacggtgataccatagag

SEQ ID NO: 289336 - DNA, 20 bp, Artificial Sequence
  Description of Artificial Sequence: Synthetic oligonucleotide
  Target: LAMA2; (-) strand; PAM type: YTN; PAM sequence: CTT
tttaacggtgataccataga

SEQ ID NO: 289337 - DNA, 20 bp, Artificial Sequence
  Description of Artificial Sequence: Synthetic oligonucleotide
  Target: LAMA2; (-) strand; PAM type: YTN; PAM sequence: TTC
tttttaacggtgataccata

SEQ ID NO: 289338 - DNA, 20 bp, Artificial Sequence
  Description of Artificial Sequence: Synthetic oligonucleotide
  Target: LAMA2; (-) strand; PAM type: YTN; PAM sequence: TTT
ctttttaacggtgataccat

SEQ ID NO: 289339 - DNA, 20 bp, Artificial Sequence
  Description of Artificial Sequence: Synthetic oligonucleotide
  Target: LAMA2; (-) strand; PAM type: YTN; PAM sequence: TTA
atttctttttaacggtgata

SEQ ID NO: 289340 - DNA, 20 bp, Artificial Sequence
  Description of Artificial Sequence: Synthetic oligonucleotide
  Target: LAMA2; (-) strand; PAM type: YTN; PAM sequence: CTT
aatttctttttaacggtgat

SEQ ID NO: 289341 - DNA, 20 bp, Artificial Sequence
  Description of Artificial Sequence: Synthetic oligonucleotide
  Target: LAMA2; (-) strand; PAM type: YTN; PAM sequence: CTC
atagggcttaatttcttttt

SEQ ID NO: 289342 - DNA, 20 bp, Artificial Sequence
  Description of Artificial Sequence: Synthetic oligonucleotide
  Target: LAMA2; (-) strand; PAM type: YTN; PAM sequence: CTA
aacctcatagggcttaattt

SEQ ID NO: 289343 - DNA, 20 bp, Artificial Sequence
  Description of Artificial Sequence: Synthetic oligonucleotide
  Target: LAMA2; (-) strand; PAM type: YTN; PAM sequence: CTG
aacaactaaacctcataggg

SEQ ID NO: 289344 - DNA, 20 bp, Artificial Sequence
  Description of Artificial Sequence: Synthetic oligonucleotide
  Target: LAMA2; (-) strand; PAM type: YTN; PAM sequence: TTC
tgaacaactaaacctcatag

SEQ ID NO: 289345 - DNA, 20 bp, Artificial Sequence
  Description of Artificial Sequence: Synthetic oligonucleotide
  Target: LAMA2; (-) strand; PAM type: YTN; PAM sequence: TTA
agaatcaaaattctgaacaa

SEQ ID NO: 289346 - DNA, 20 bp, Artificial Sequence
  Description of Artificial Sequence: Synthetic oligonucleotide
  Target: LAMA2; (-) strand; PAM type: YTN; PAM sequence: TTT
aagaatcaaaattctgaaca

SEQ ID NO: 289347 - DNA, 20 bp, Artificial Sequence
  Description of Artificial Sequence: Synthetic oligonucleotide
  Target: LAMA2; (-) strand; PAM type: YTN; PAM sequence: CTA
atttaagaatcaaaattctg

SEQ ID NO: 289348 - DNA, 20 bp, Artificial Sequence
  Description of Artificial Sequence: Synthetic oligonucleotide
  Target: LAMA2; (-) strand; PAM type: YTN; PAM sequence: TTC
ccagtctaatttaagaatca

SEQ ID NO: 289349 - DNA, 20 bp, Artificial Sequence
  Description of Artificial Sequence: Synthetic oligonucleotide
  Target: LAMA2; (-) strand; PAM type: YTN; PAM sequence: TTG
tggtgagacaccagagataa

SEQ ID NO: 289350 - DNA, 20 bp, Artificial Sequence
  Description of Artificial Sequence: Synthetic oligonucleotide
  Target: LAMA2; (-) strand; PAM type: YTN; PAM sequence: TTT
gtggtgagacaccagagata

SEQ ID NO: 289351 - DNA, 20 bp, Artificial Sequence
  Description of Artificial Sequence: Synthetic oligonucleotide
  Target: LAMA2; (-) strand; PAM type: YTN; PAM sequence: TTG
agaaatttgtggtgagacac

SEQ ID NO: 289352 - DNA, 20 bp, Artificial Sequence
  Description of Artificial Sequence: Synthetic oligonucleotide
  Target: LAMA2; (-) strand; PAM type: YTN; PAM sequence: CTT
gagaaatttgtggtgagaca

SEQ ID NO: 289353 - DNA, 20 bp, Artificial Sequence
  Description of Artificial Sequence: Synthetic oligonucleotide
  Target: LAMA2; (-) strand; PAM type: YTN; PAM sequence: TTA
acttgagaaatttgtggtga

SEQ ID NO: 289354 - DNA, 20 bp, Artificial Sequence
  Description of Artificial Sequence: Synthetic oligonucleotide
  Target: LAMA2; (-) strand; PAM type: YTN; PAM sequence: TTT
aacttgagaaatttgtggtg

SEQ ID NO: 289355 - DNA, 20 bp, Artificial Sequence
  Description of Artificial Sequence: Synthetic oligonucleotide
  Target: LAMA2; (-) strand; PAM type: YTN; PAM sequence: CTG
tttaacttgagaaatttgtg

SEQ ID NO: 289356 - DNA, 20 bp, Artificial Sequence
  Description of Artificial Sequence: Synthetic oligonucleotide
  Target: LAMA2; (-) strand; PAM type: YTN; PAM sequence: TTC
acctgtttaacttgagaaat

SEQ ID NO: 289357 - DNA, 20 bp, Artificial Sequence
  Description of Artificial Sequence: Synthetic oligonucleotide
  Target: LAMA2; (-) strand; PAM type: YTN; PAM sequence: TTT
cacctgtttaacttgagaaa

SEQ ID NO: 289358 - DNA, 20 bp, Artificial Sequence
  Description of Artificial Sequence: Synthetic oligonucleotide
  Target: LAMA2; (-) strand; PAM type: YTN; PAM sequence: TTA
taataaaaaatttcacctgt

SEQ ID NO: 289359 - DNA, 20 bp, Artificial Sequence
  Description of Artificial Sequence: Synthetic oligonucleotide
  Target: LAMA2; (-) strand; PAM type: YTN; PAM sequence: TTA
ttataataaaaaatttcacc

SEQ ID NO: 289360 - DNA, 20 bp, Artificial Sequence
  Description of Artificial Sequence: Synthetic oligonucleotide
  Target: LAMA2; (-) strand; PAM type: YTN; PAM sequence: TTT
attataataaaaaatttcac

SEQ ID NO: 289361 - DNA, 20 bp, Artificial Sequence
  Description of Artificial Sequence: Synthetic oligonucleotide
  Target: LAMA2; (-) strand; PAM type: YTN; PAM sequence: TTT
tattataataaaaaatttca

SEQ ID NO: 289362 - DNA, 20 bp, Artificial Sequence
  Description of Artificial Sequence: Synthetic oligonucleotide
  Target: LAMA2; (-) strand; PAM type: YTN; PAM sequence: CTA
tagttttattataataaaaa

SEQ ID NO: 289363 - DNA, 20 bp, Artificial Sequence
  Description of Artificial Sequence: Synthetic oligonucleotide
  Target: LAMA2; (-) strand; PAM type: YTN; PAM sequence: TTG
gatatatgagaagacatgtg

SEQ ID NO: 289364 - DNA, 20 bp, Artificial Sequence
  Description of Artificial Sequence: Synthetic oligonucleotide
  Target: LAMA2; (-) strand; PAM type: YTN; PAM sequence: TTA
gagaaaatatattggatata

SEQ ID NO: 289365 - DNA, 20 bp, Artificial Sequence
  Description of Artificial Sequence: Synthetic oligonucleotide
  Target: LAMA2; (-) strand; PAM type: YTN; PAM sequence: TTA
aaagtattagagaaaatata

SEQ ID NO: 289366 - DNA, 20 bp, Artificial Sequence
  Description of Artificial Sequence: Synthetic oligonucleotide
  Target: LAMA2; (-) strand; PAM type: YTN; PAM sequence: TTT
aaaagtattagagaaaatat

SEQ ID NO: 289367 - DNA, 20 bp, Artificial Sequence
  Description of Artificial Sequence: Synthetic oligonucleotide
  Target: LAMA2; (-) strand; PAM type: YTN; PAM sequence: CTT
taaaagtattagagaaaata

SEQ ID NO: 289368 - DNA, 20 bp, Artificial Sequence
  Description of Artificial Sequence: Synthetic oligonucleotide
  Target: LAMA2; (-) strand; PAM type: YTN; PAM sequence: CTA
tagtaataaaatactttaaa

SEQ ID NO: 289369 - DNA, 20 bp, Artificial Sequence
  Description of Artificial Sequence: Synthetic oligonucleotide
  Target: LAMA2; (-) strand; PAM type: YTN; PAM sequence: CTG
ctatagtaataaaatacttt

SEQ ID NO: 289370 - DNA, 20 bp, Artificial Sequence
  Description of Artificial Sequence: Synthetic oligonucleotide
  Target: LAMA2; (-) strand; PAM type: YTN; PAM sequence: CTG
acctgctatagtaataaaat

SEQ ID NO: 289371 - DNA, 20 bp, Artificial Sequence
  Description of Artificial Sequence: Synthetic oligonucleotide
  Target: LAMA2; (-) strand; PAM type: YTN; PAM sequence: TTA
actgacctgctatagtaata

SEQ ID NO: 289372 - DNA, 20 bp, Artificial Sequence
  Description of Artificial Sequence: Synthetic oligonucleotide
  Target: LAMA2; (-) strand; PAM type: YTN; PAM sequence: TTA
atacatattaactgacctgc

SEQ ID NO: 289373 - DNA, 20 bp, Artificial Sequence
  Description of Artificial Sequence: Synthetic oligonucleotide
  Target: LAMA2; (-) strand; PAM type: YTN; PAM sequence: TTA
taaggaaaaattaatacata

SEQ ID NO: 289374 - DNA, 20 bp, Artificial Sequence
  Description of Artificial Sequence: Synthetic oligonucleotide
  Target: LAMA2; (-) strand; PAM type: YTN; PAM sequence: TTT
ataaggaaaaattaatacat

SEQ ID NO: 289375 - DNA, 20 bp, Artificial Sequence
  Description of Artificial Sequence: Synthetic oligonucleotide
  Target: LAMA2; (-) strand; PAM type: YTN; PAM sequence: TTT
tataaggaaaaattaataca

SEQ ID NO: 289376 - DNA, 20 bp, Artificial Sequence
  Description of Artificial Sequence: Synthetic oligonucleotide
  Target: LAMA2; (-) strand; PAM type: YTN; PAM sequence: TTT
ttataaggaaaaattaatac

SEQ ID NO: 289377 - DNA, 20 bp, Artificial Sequence
  Description of Artificial Sequence: Synthetic oligonucleotide
  Target: LAMA2; (-) strand; PAM type: YTN; PAM sequence: CTT
tttataaggaaaaattaata

SEQ ID NO: 289378 - DNA, 20 bp, Artificial Sequence
  Description of Artificial Sequence: Synthetic oligonucleotide
  Target: LAMA2; (-) strand; PAM type: YTN; PAM sequence: TTC
tttttataaggaaaaattaa

SEQ ID NO: 289379 - DNA, 20 bp, Artificial Sequence
  Description of Artificial Sequence: Synthetic oligonucleotide
  Target: LAMA2; (-) strand; PAM type: YTN; PAM sequence: TTT
ctttttataaggaaaaatta

SEQ ID NO: 289380 - DNA, 20 bp, Artificial Sequence
  Description of Artificial Sequence: Synthetic oligonucleotide
  Target: LAMA2; (-) strand; PAM type: YTN; PAM sequence: TTT
tctttttataaggaaaaatt

SEQ ID NO: 289381 - DNA, 20 bp, Artificial Sequence
  Description of Artificial Sequence: Synthetic oligonucleotide
  Target: LAMA2; (-) strand; PAM type: YTN; PAM sequence: CTT
ttctttttataaggaaaaat

SEQ ID NO: 289382 - DNA, 20 bp, Artificial Sequence
  Description of Artificial Sequence: Synthetic oligonucleotide
  Target: LAMA2; (-) strand; PAM type: YTN; PAM sequence: TTC
gatgcttttctttttataag

SEQ ID NO: 289383 - DNA, 20 bp, Artificial Sequence
  Description of Artificial Sequence: Synthetic oligonucleotide
  Target: LAMA2; (-) strand; PAM type: YTN; PAM sequence: CTT
cgatgcttttctttttataa

SEQ ID NO: 289384 - DNA, 20 bp, Artificial Sequence
  Description of Artificial Sequence: Synthetic oligonucleotide
  Target: LAMA2; (-) strand; PAM type: YTN; PAM sequence: TTG
cagcttcgatgcttttcttt

SEQ ID NO: 289385 - DNA, 20 bp, Artificial Sequence
  Description of Artificial Sequence: Synthetic oligonucleotide
  Target: LAMA2; (-) strand; PAM type: YTN; PAM sequence: TTC
cattgcagcttcgatgcttt

SEQ ID NO: 289386 - DNA, 20 bp, Artificial Sequence
  Description of Artificial Sequence: Synthetic oligonucleotide
  Target: LAMA2; (-) strand; PAM type: YTN; PAM sequence: TTT
ccattgcagcttcgatgctt

SEQ ID NO: 289387 - DNA, 20 bp, Artificial Sequence
  Description of Artificial Sequence: Synthetic oligonucleotide
  Target: LAMA2; (-) strand; PAM type: YTN; PAM sequence: TTT
tccattgcagcttcgatgct

SEQ ID NO: 289388 - DNA, 20 bp, Artificial Sequence
  Description of Artificial Sequence: Synthetic oligonucleotide
  Target: LAMA2; (-) strand; PAM type: YTN; PAM sequence: TTT
ttccattgcagcttcgatgc

SEQ ID NO: 289389 - DNA, 20 bp, Artificial Sequence
  Description of Artificial Sequence: Synthetic oligonucleotide
  Target: LAMA2; (-) strand; PAM type: YTN; PAM sequence: CTT
tttccattgcagcttcgatg

SEQ ID NO: 289390 - DNA, 20 bp, Artificial Sequence
  Description of Artificial Sequence: Synthetic oligonucleotide
  Target: LAMA2; (-) strand; PAM type: YTN; PAM sequence: TTG
ctttttccattgcagcttcg

SEQ ID NO: 289391 - DNA, 20 bp, Artificial Sequence
  Description of Artificial Sequence: Synthetic oligonucleotide
  Target: LAMA2; (-) strand; PAM type: YTN; PAM sequence: TTT
gctttttccattgcagcttc

SEQ ID NO: 289392 - DNA, 20 bp, Artificial Sequence
  Description of Artificial Sequence: Synthetic oligonucleotide
  Target: LAMA2; (-) strand; PAM type: YTN; PAM sequence: TTA
taacatttgctttttccatt

SEQ ID NO: 289393 - DNA, 20 bp, Artificial Sequence
  Description of Artificial Sequence: Synthetic oligonucleotide
  Target: LAMA2; (-) strand; PAM type: YTN; PAM sequence: TTT
ataacatttgctttttccat

SEQ ID NO: 289394 - DNA, 20 bp, Artificial Sequence
  Description of Artificial Sequence: Synthetic oligonucleotide
  Target: LAMA2; (-) strand; PAM type: YTN; PAM sequence: TTG
tttataacatttgctttttc

SEQ ID NO: 289395 - DNA, 20 bp, Artificial Sequence
  Description of Artificial Sequence: Synthetic oligonucleotide
  Target: LAMA2; (-) strand; PAM type: YTN; PAM sequence: TTT
gtttataacatttgcttttt

SEQ ID NO: 289396 - DNA, 20 bp, Artificial Sequence
  Description of Artificial Sequence: Synthetic oligonucleotide
  Target: LAMA2; (-) strand; PAM type: YTN; PAM sequence: TTA
tttgtttataacatttgctt

SEQ ID NO: 289397 - DNA, 20 bp, Artificial Sequence
  Description of Artificial Sequence: Synthetic oligonucleotide
  Target: LAMA2; (-) strand; PAM type: YTN; PAM sequence: TTG
tgaattatttgtttataaca

SEQ ID NO: 289398 - DNA, 20 bp, Artificial Sequence
  Description of Artificial Sequence: Synthetic oligonucleotide
  Target: LAMA2; (-) strand; PAM type: YTN; PAM sequence: TTT
gtgaattatttgtttataac

SEQ ID NO: 289399 - DNA, 20 bp, Artificial Sequence
  Description of Artificial Sequence: Synthetic oligonucleotide
  Target: LAMA2; (-) strand; PAM type: YTN; PAM sequence: TTT
tgtgaattatttgtttataa

SEQ ID NO: 289400 - DNA, 20 bp, Artificial Sequence
  Description of Artificial Sequence: Synthetic oligonucleotide
  Target: LAMA2; (-) strand; PAM type: YTN; PAM sequence: CTT
ttgtgaattatttgtttata

SEQ ID NO: 289401 - DNA, 20 bp, Artificial Sequence
  Description of Artificial Sequence: Synthetic oligonucleotide
  Target: LAMA2; (-) strand; PAM type: YTN; PAM sequence: TTC
ttttgtgaattatttgttta

SEQ ID NO: 289402 - DNA, 20 bp, Artificial Sequence
  Description of Artificial Sequence: Synthetic oligonucleotide
  Target: LAMA2; (-) strand; PAM type: YTN; PAM sequence: TTT
cttttgtgaattatttgttt

SEQ ID NO: 289403 - DNA, 20 bp, Artificial Sequence
  Description of Artificial Sequence: Synthetic oligonucleotide
  Target: LAMA2; (-) strand; PAM type: YTN; PAM sequence: TTT
tcttttgtgaattatttgtt

SEQ ID NO: 289404 - DNA, 20 bp, Artificial Sequence
  Description of Artificial Sequence: Synthetic oligonucleotide
  Target: LAMA2; (-) strand; PAM type: YTN; PAM sequence: TTT
ttcttttgtgaattatttgt

SEQ ID NO: 289405 - DNA, 20 bp, Artificial Sequence
  Description of Artificial Sequence: Synthetic oligonucleotide
  Target: LAMA2; (-) strand; PAM type: YTN; PAM sequence: TTG
catttttcttttgtgaatta

SEQ ID NO: 289406 - DNA, 20 bp, Artificial Sequence
  Description of Artificial Sequence: Synthetic oligonucleotide
  Target: LAMA2; (-) strand; PAM type: YTN; PAM sequence: TTT
gcatttttcttttgtgaatt

SEQ ID NO: 289407 - DNA, 20 bp, Artificial Sequence
  Description of Artificial Sequence: Synthetic oligonucleotide
  Target: LAMA2; (-) strand; PAM type: YTN; PAM sequence: TTA
tgtaagaagtttgcattttt

SEQ ID NO: 289408 - DNA, 20 bp, Artificial Sequence
  Description of Artificial Sequence: Synthetic oligonucleotide
  Target: LAMA2; (-) strand; PAM type: YTN; PAM sequence: TTT
atgtaagaagtttgcatttt

SEQ ID NO: 289409 - DNA, 20 bp, Artificial Sequence
  Description of Artificial Sequence: Synthetic oligonucleotide
  Target: LAMA2; (-) strand; PAM type: YTN; PAM sequence: CTT
tatgtaagaagtttgcattt

SEQ ID NO: 289410 - DNA, 20 bp, Artificial Sequence
  Description of Artificial Sequence: Synthetic oligonucleotide
  Target: LAMA2; (-) strand; PAM type: YTN; PAM sequence: TTC
aactttatgtaagaagtttg

SEQ ID NO: 289411 - DNA, 20 bp, Artificial Sequence
  Description of Artificial Sequence: Synthetic oligonucleotide
  Target: LAMA2; (-) strand; PAM type: YTN; PAM sequence: TTT
caactttatgtaagaagttt

SEQ ID NO: 289412 - DNA, 20 bp, Artificial Sequence
  Description of Artificial Sequence: Synthetic oligonucleotide
  Target: LAMA2; (-) strand; PAM type: YTN; PAM sequence: TTT
tcaactttatgtaagaagtt

SEQ ID NO: 289413 - DNA, 20 bp, Artificial Sequence
  Description of Artificial Sequence: Synthetic oligonucleotide
  Target: LAMA2; (-) strand; PAM type: YTN; PAM sequence: TTT
ttcaactttatgtaagaagt

SEQ ID NO: 289414 - DNA, 20 bp, Artificial Sequence
  Description of Artificial Sequence: Synthetic oligonucleotide
  Target: LAMA2; (-) strand; PAM type: YTN; PAM sequence: TTG
catttttcaactttatgtaa

SEQ ID NO: 289415 - DNA, 20 bp, Artificial Sequence
  Description of Artificial Sequence: Synthetic oligonucleotide
  Target: LAMA2; (-) strand; PAM type: YTN; PAM sequence: TTG
agattgcatttttcaacttt

SEQ ID NO: 289416 - DNA, 20 bp, Artificial Sequence
  Description of Artificial Sequence: Synthetic oligonucleotide
  Target: LAMA2; (-) strand; PAM type: YTN; PAM sequence: CTA
ttgagattgcatttttcaac

SEQ ID NO: 289417 - DNA, 20 bp, Artificial Sequence
  Description of Artificial Sequence: Synthetic oligonucleotide
  Target: LAMA2; (-) strand; PAM type: YTN; PAM sequence: TTG
tcatctattgagattgcatt

SEQ ID NO: 289418 - DNA, 20 bp, Artificial Sequence
  Description of Artificial Sequence: Synthetic oligonucleotide
  Target: LAMA2; (-) strand; PAM type: YTN; PAM sequence: CTT
gtcatctattgagattgcat

SEQ ID NO: 289419 - DNA, 20 bp, Artificial Sequence
  Description of Artificial Sequence: Synthetic oligonucleotide
  Target: LAMA2; (-) strand; PAM type: YTN; PAM sequence: CTG
caagtcaatgaccatatgct

SEQ ID NO: 289420 - DNA, 20 bp, Artificial Sequence
  Description of Artificial Sequence: Synthetic oligonucleotide
  Target: LAMA2; (-) strand; PAM type: YTN; PAM sequence: CTA
ctgcaagtcaatgaccatat

SEQ ID NO: 289421 - DNA, 20 bp, Artificial Sequence
  Description of Artificial Sequence: Synthetic oligonucleotide
  Target: LAMA2; (-) strand; PAM type: YTN; PAM sequence: TTG
ctactgcaagtcaatgacca

SEQ ID NO: 289422 - DNA, 20 bp, Artificial Sequence
  Description of Artificial Sequence: Synthetic oligonucleotide
  Target: LAMA2; (-) strand; PAM type: YTN; PAM sequence: TTG
gatattgctactgcaagtca

SEQ ID NO: 289423 - DNA, 20 bp, Artificial Sequence
  Description of Artificial Sequence: Synthetic oligonucleotide
  Target: LAMA2; (-) strand; PAM type: YTN; PAM sequence: TTT
ggatattgctactgcaagtc

SEQ ID NO: 289424 - DNA, 20 bp, Artificial Sequence
  Description of Artificial Sequence: Synthetic oligonucleotide
  Target: LAMA2; (-) strand; PAM type: YTN; PAM sequence: CTT
tggatattgctactgcaagt

SEQ ID NO: 289425 - DNA, 20 bp, Artificial Sequence
  Description of Artificial Sequence: Synthetic oligonucleotide
  Target: LAMA2; (-) strand; PAM type: YTN; PAM sequence: TTA
agtgtgatctttggatattg

SEQ ID NO: 289426 - DNA, 20 bp, Artificial Sequence
  Description of Artificial Sequence: Synthetic oligonucleotide
  Target: LAMA2; (-) strand; PAM type: YTN; PAM sequence: TTT
aagtgtgatctttggatatt

SEQ ID NO: 289427 - DNA, 20 bp, Artificial Sequence
  Description of Artificial Sequence: Synthetic oligonucleotide
  Target: LAMA2; (-) strand; PAM type: YTN; PAM sequence: CTT
taagtgtgatctttggatat

SEQ ID NO: 289428 - DNA, 20 bp, Artificial Sequence
  Description of Artificial Sequence: Synthetic oligonucleotide
  Target: LAMA2; (-) strand; PAM type: YTN; PAM sequence: CTG
ctttaagtgtgatctttgga

SEQ ID NO: 289429 - DNA, 20 bp, Artificial Sequence
  Description of Artificial Sequence: Synthetic oligonucleotide
  Target: LAMA2; (-) strand; PAM type: YTN; PAM sequence: TTA
ctgctttaagtgtgatcttt

SEQ ID NO: 289430 - DNA, 20 bp, Artificial Sequence
  Description of Artificial Sequence: Synthetic oligonucleotide
  Target: LAMA2; (-) strand; PAM type: YTN; PAM sequence: TTT
actgctttaagtgtgatctt

SEQ ID NO: 289431 - DNA, 20 bp, Artificial Sequence
  Description of Artificial Sequence: Synthetic oligonucleotide
  Target: LAMA2; (-) strand; PAM type: YTN; PAM sequence: TTT
tactgctttaagtgtgatct

SEQ ID NO: 289432 - DNA, 20 bp, Artificial Sequence
  Description of Artificial Sequence: Synthetic oligonucleotide
  Target: LAMA2; (-) strand; PAM type: YTN; PAM sequence: TTA
gattttactgctttaagtgt

SEQ ID NO: 289433 - DNA, 20 bp, Artificial Sequence
  Description of Artificial Sequence: Synthetic oligonucleotide
  Target: LAMA2; (-) strand; PAM type: YTN; PAM sequence: TTT
agattttactgctttaagtg

SEQ ID NO: 289434 - DNA, 20 bp, Artificial Sequence
  Description of Artificial Sequence: Synthetic oligonucleotide
  Target: LAMA2; (-) strand; PAM type: YTN; PAM sequence: TTA
aatttagattttactgcttt

SEQ ID NO: 289435 - DNA, 20 bp, Artificial Sequence
  Description of Artificial Sequence: Synthetic oligonucleotide
  Target: LAMA2; (-) strand; PAM type: YTN; PAM sequence: TTT
aaatttagattttactgctt

SEQ ID NO: 289436 - DNA, 20 bp, Artificial Sequence
  Description of Artificial Sequence: Synthetic oligonucleotide
  Target: LAMA2; (-) strand; PAM type: YTN; PAM sequence: TTT
taaatttagattttactgct

SEQ ID NO: 289437 - DNA, 20 bp, Artificial Sequence
  Description of Artificial Sequence: Synthetic oligonucleotide
  Target: LAMA2; (-) strand; PAM type: YTN; PAM sequence: CTT
ttaaatttagattttactgc

SEQ ID NO: 289438 - DNA, 20 bp, Artificial Sequence
  Description of Artificial Sequence: Synthetic oligonucleotide
  Target: LAMA2; (-) strand; PAM type: YTN; PAM sequence: TTC
cttttaaatttagattttac

SEQ ID NO: 289439 - DNA, 20 bp, Artificial Sequence
  Description of Artificial Sequence: Synthetic oligonucleotide
  Target: LAMA2; (-) strand; PAM type: YTN; PAM sequence: TTT
ccttttaaatttagatttta

SEQ ID NO: 289440 - DNA, 20 bp, Artificial Sequence
  Description of Artificial Sequence: Synthetic oligonucleotide
  Target: LAMA2; (-) strand; PAM type: YTN; PAM sequence: TTT
tccttttaaatttagatttt

SEQ ID NO: 289441 - DNA, 20 bp, Artificial Sequence
  Description of Artificial Sequence: Synthetic oligonucleotide
  Target: LAMA2; (-) strand; PAM type: YTN; PAM sequence: CTT
ttccttttaaatttagattt

SEQ ID NO: 289442 - DNA, 20 bp, Artificial Sequence
  Description of Artificial Sequence: Synthetic oligonucleotide
  Target: LAMA2; (-) strand; PAM type: YTN; PAM sequence: TTC
ttttccttttaaatttagat

SEQ ID NO: 289443 - DNA, 20 bp, Artificial Sequence
  Description of Artificial Sequence: Synthetic oligonucleotide
  Target: LAMA2; (-) strand; PAM type: YTN; PAM sequence: CTT
cttttccttttaaatttaga

SEQ ID NO: 289444 - DNA, 20 bp, Artificial Sequence
  Description of Artificial Sequence: Synthetic oligonucleotide
  Target: LAMA2; (-) strand; PAM type: YTN; PAM sequence: TTC
ttcttttccttttaaattta

SEQ ID NO: 289445 - DNA, 20 bp, Artificial Sequence
  Description of Artificial Sequence: Synthetic oligonucleotide
  Target: LAMA2; (-) strand; PAM type: YTN; PAM sequence: TTT
cttcttttccttttaaattt

SEQ ID NO: 289446 - DNA, 20 bp, Artificial Sequence
  Description of Artificial Sequence: Synthetic oligonucleotide
  Target: LAMA2; (-) strand; PAM type: YTN; PAM sequence: CTT
tcttcttttccttttaaatt

SEQ ID NO: 289447 - DNA, 20 bp, Artificial Sequence
  Description of Artificial Sequence: Synthetic oligonucleotide
  Target: LAMA2; (-) strand; PAM type: YTN; PAM sequence: TTG
ccaagcctttcttcttttcc

SEQ ID NO: 289448 - DNA, 20 bp, Artificial Sequence
  Description of Artificial Sequence: Synthetic oligonucleotide
  Target: LAMA2; (-) strand; PAM type: YTN; PAM sequence: TTT
gccaagcctttcttcttttc

SEQ ID NO: 289449 - DNA, 20 bp, Artificial Sequence
  Description of Artificial Sequence: Synthetic oligonucleotide
  Target: LAMA2; (-) strand; PAM type: YTN; PAM sequence: TTT
tgccaagcctttcttctttt

SEQ ID NO: 289450 - DNA, 20 bp, Artificial Sequence
  Description of Artificial Sequence: Synthetic oligonucleotide
  Target: LAMA2; (-) strand; PAM type: YTN; PAM sequence: TTA
ttttgccaagcctttcttct

SEQ ID NO: 289451 - DNA, 20 bp, Artificial Sequence
  Description of Artificial Sequence: Synthetic oligonucleotide
  Target: LAMA2; (-) strand; PAM type: YTN; PAM sequence: TTA
tcaaagcaggtagtaaggtt

SEQ ID NO: 289452 - DNA, 20 bp, Artificial Sequence
  Description of Artificial Sequence: Synthetic oligonucleotide
  Target: LAMA2; (-) strand; PAM type: YTN; PAM sequence: CTT
atcaaagcaggtagtaaggt

SEQ ID NO: 289453 - DNA, 20 bp, Artificial Sequence
  Description of Artificial Sequence: Synthetic oligonucleotide
  Target: LAMA2; (-) strand; PAM type: YTN; PAM sequence: CTA
atcttatcaaagcaggtagt

SEQ ID NO: 289454 - DNA, 20 bp, Artificial Sequence
  Description of Artificial Sequence: Synthetic oligonucleotide
  Target: LAMA2; (-) strand; PAM type: YTN; PAM sequence: CTG
taagagctaatcttatcaaa

SEQ ID NO: 289455 - DNA, 20 bp, Artificial Sequence
  Description of Artificial Sequence: Synthetic oligonucleotide
  Target: LAMA2; (-) strand; PAM type: YTN; PAM sequence: TTA
ataaatgtgtcctgtaagag

SEQ ID NO: 289456 - DNA, 20 bp, Artificial Sequence
  Description of Artificial Sequence: Synthetic oligonucleotide
  Target: LAMA2; (-) strand; PAM type: YTN; PAM sequence: TTT
aataaatgtgtcctgtaaga

SEQ ID NO: 289457 - DNA, 20 bp, Artificial Sequence
  Description of Artificial Sequence: Synthetic oligonucleotide
  Target: LAMA2; (-) strand; PAM type: YTN; PAM sequence: TTG
gtatttaataaatgtgtcct

SEQ ID NO: 289458 - DNA, 20 bp, Artificial Sequence
  Description of Artificial Sequence: Synthetic oligonucleotide
  Target: LAMA2; (-) strand; PAM type: YTN; PAM sequence: CTG
atgcatagttggtatttaat

SEQ ID NO: 289459 - DNA, 20 bp, Artificial Sequence
  Description of Artificial Sequence: Synthetic oligonucleotide
  Target: LAMA2; (-) strand; PAM type: YTN; PAM sequence: CTG
atgcagcacagcatctgatg

SEQ ID NO: 289460 - DNA, 20 bp, Artificial Sequence
  Description of Artificial Sequence: Synthetic oligonucleotide
  Target: LAMA2; (-) strand; PAM type: YTN; PAM sequence: TTC
actgatgcagcacagcatct

SEQ ID NO: 289461 - DNA, 20 bp, Artificial Sequence
  Description of Artificial Sequence: Synthetic oligonucleotide
  Target: LAMA2; (-) strand; PAM type: YTN; PAM sequence: CTT
cactgatgcagcacagcatc

SEQ ID NO: 289462 - DNA, 20 bp, Artificial Sequence
  Description of Artificial Sequence: Synthetic oligonucleotide
  Target: LAMA2; (-) strand; PAM type: YTN; PAM sequence: CTC
aagggtaggaaccgtatgca

SEQ ID NO: 289463 - DNA, 20 bp, Artificial Sequence
  Description of Artificial Sequence: Synthetic oligonucleotide
  Target: LAMA2; (-) strand; PAM type: YTN; PAM sequence: TTA
ctcaagggtaggaaccgtat

SEQ ID NO: 289464 - DNA, 20 bp, Artificial Sequence
  Description of Artificial Sequence: Synthetic oligonucleotide
  Target: LAMA2; (-) strand; PAM type: YTN; PAM sequence: TTG
tgcagcaggtaagttactca

SEQ ID NO: 289465 - DNA, 20 bp, Artificial Sequence
  Description of Artificial Sequence: Synthetic oligonucleotide
  Target: LAMA2; (-) strand; PAM type: YTN; PAM sequence: CTT
gtgcagcaggtaagttactc

SEQ ID NO: 289466 - DNA, 20 bp, Artificial Sequence
  Description of Artificial Sequence: Synthetic oligonucleotide
  Target: LAMA2; (-) strand; PAM type: YTN; PAM sequence: CTA
cttgtgcagcaggtaagtta

SEQ ID NO: 289467 - DNA, 20 bp, Artificial Sequence
  Description of Artificial Sequence: Synthetic oligonucleotide
  Target: LAMA2; (-) strand; PAM type: YTN; PAM sequence: TTG
ctacttgtgcagcaggtaag

SEQ ID NO: 289468 - DNA, 20 bp, Artificial Sequence
  Description of Artificial Sequence: Synthetic oligonucleotide
  Target: LAMA2; (-) strand; PAM type: YTN; PAM sequence: TTT
gctacttgtgcagcaggtaa

SEQ ID NO: 289469 - DNA, 20 bp, Artificial Sequence
  Description of Artificial Sequence: Synthetic oligonucleotide
  Target: LAMA2; (-) strand; PAM type: YTN; PAM sequence: CTA
aacagatacagtaatttgct

SEQ ID NO: 289470 - DNA, 20 bp, Artificial Sequence
  Description of Artificial Sequence: Synthetic oligonucleotide
  Target: LAMA2; (-) strand; PAM type: YTN; PAM sequence: CTG
tatcctaaacagatacagta

SEQ ID NO: 289471 - DNA, 20 bp, Artificial Sequence
  Description of Artificial Sequence: Synthetic oligonucleotide
  Target: LAMA2; (-) strand; PAM type: YTN; PAM sequence: TTA
ctgtatcctaaacagataca

SEQ ID NO: 289472 - DNA, 20 bp, Artificial Sequence
  Description of Artificial Sequence: Synthetic oligonucleotide
  Target: LAMA2; (-) strand; PAM type: YTN; PAM sequence: TTT
actgtatcctaaacagatac

SEQ ID NO: 289473 - DNA, 20 bp, Artificial Sequence
  Description of Artificial Sequence: Synthetic oligonucleotide
  Target: LAMA2; (-) strand; PAM type: YTN; PAM sequence: TTG
gtgtttactgtatcctaaac

SEQ ID NO: 289474 - DNA, 20 bp, Artificial Sequence
  Description of Artificial Sequence: Synthetic oligonucleotide
  Target: LAMA2; (-) strand; PAM type: YTN; PAM sequence: CTT
ggtgtttactgtatcctaaa

SEQ ID NO: 289475 - DNA, 20 bp, Artificial Sequence
  Description of Artificial Sequence: Synthetic oligonucleotide
  Target: LAMA2; (-) strand; PAM type: YTN; PAM sequence: CTC
ccttggtgtttactgtatcc

SEQ ID NO: 289476 - DNA, 20 bp, Artificial Sequence
  Description of Artificial Sequence: Synthetic oligonucleotide
  Target: LAMA2; (-) strand; PAM type: YTN; PAM sequence: CTC
catatgtctcccttggtgtt

SEQ ID NO: 289477 - DNA, 20 bp, Artificial Sequence
  Description of Artificial Sequence: Synthetic oligonucleotide
  Target: LAMA2; (-) strand; PAM type: YTN; PAM sequence: CTC
cctccatatgtctcccttgg

SEQ ID NO: 289478 - DNA, 20 bp, Artificial Sequence
  Description of Artificial Sequence: Synthetic oligonucleotide
  Target: LAMA2; (-) strand; PAM type: YTN; PAM sequence: CTC
tccctccatatgtctccctt

SEQ ID NO: 289479 - DNA, 20 bp, Artificial Sequence
  Description of Artificial Sequence: Synthetic oligonucleotide
  Target: LAMA2; (-) strand; PAM type: YTN; PAM sequence: TTC
tctccctccatatgtctccc

SEQ ID NO: 289480 - DNA, 20 bp, Artificial Sequence
  Description of Artificial Sequence: Synthetic oligonucleotide
  Target: LAMA2; (-) strand; PAM type: YTN; PAM sequence: TTT
ctctccctccatatgtctcc

SEQ ID NO: 289481 - DNA, 20 bp, Artificial Sequence
  Description of Artificial Sequence: Synthetic oligonucleotide
  Target: LAMA2; (-) strand; PAM type: YTN; PAM sequence: TTA
tttctctccctccatatgtc

SEQ ID NO: 289482 - DNA, 20 bp, Artificial Sequence
  Description of Artificial Sequence: Synthetic oligonucleotide
  Target: LAMA2; (-) strand; PAM type: YTN; PAM sequence: CTT
atttctctccctccatatgt

SEQ ID NO: 289483 - DNA, 20 bp, Artificial Sequence
  Description of Artificial Sequence: Synthetic oligonucleotide
  Target: LAMA2; (-) strand; PAM type: YTN; PAM sequence: TTA
gtgccttatttctctccctc

SEQ ID NO: 289484 - DNA, 20 bp, Artificial Sequence
  Description of Artificial Sequence: Synthetic oligonucleotide
  Target: LAMA2; (-) strand; PAM type: YTN; PAM sequence: CTC
agttagtgccttatttctct

SEQ ID NO: 289485 - DNA, 20 bp, Artificial Sequence
  Description of Artificial Sequence: Synthetic oligonucleotide
  Target: LAMA2; (-) strand; PAM type: YTN; PAM sequence: TTA
gggctcagttagtgccttat

SEQ ID NO: 289486 - DNA, 20 bp, Artificial Sequence
  Description of Artificial Sequence: Synthetic oligonucleotide
  Target: LAMA2; (-) strand; PAM type: YTN; PAM sequence: CTT
agggctcagttagtgcctta

SEQ ID NO: 289487 - DNA, 20 bp, Artificial Sequence
  Description of Artificial Sequence: Synthetic oligonucleotide
  Target: LAMA2; (-) strand; PAM type: YTN; PAM sequence: CTA
aaaaaggacttagggctcag

SEQ ID NO: 289488 - DNA, 20 bp, Artificial Sequence
  Description of Artificial Sequence: Synthetic oligonucleotide
  Target: LAMA2; (-) strand; PAM type: YTN; PAM sequence: CTC
aactaaaaaaggacttaggg

SEQ ID NO: 289489 - DNA, 20 bp, Artificial Sequence
  Description of Artificial Sequence: Synthetic oligonucleotide
  Target: LAMA2; (-) strand; PAM type: YTN; PAM sequence: CTA
ccccctcaactaaaaaagga

SEQ ID NO: 289490 - DNA, 20 bp, Artificial Sequence
  Description of Artificial Sequence: Synthetic oligonucleotide
  Target: LAMA2; (-) strand; PAM type: YTN; PAM sequence: CTC
ctaccccctcaactaaaaaa

SEQ ID NO: 289491 - DNA, 20 bp, Artificial Sequence
  Description of Artificial Sequence: Synthetic oligonucleotide
  Target: LAMA2; (-) strand; PAM type: YTN; PAM sequence: TTC
cacccctcctaccccctcaa

SEQ ID NO: 289492 - DNA, 20 bp, Artificial Sequence
  Description of Artificial Sequence: Synthetic oligonucleotide
  Target: LAMA2; (-) strand; PAM type: YTN; PAM sequence: CTT
ccacccctcctaccccctca

SEQ ID NO: 289493 - DNA, 20 bp, Artificial Sequence
  Description of Artificial Sequence: Synthetic oligonucleotide
  Target: LAMA2; (-) strand; PAM type: YTN; PAM sequence: CTG
cttccacccctcctaccccc

SEQ ID NO: 289494 - DNA, 20 bp, Artificial Sequence
  Description of Artificial Sequence: Synthetic oligonucleotide
  Target: LAMA2; (-) strand; PAM type: YTN; PAM sequence: CTG
caactgcttccacccctcct

SEQ ID NO: 289495 - DNA, 20 bp, Artificial Sequence
  Description of Artificial Sequence: Synthetic oligonucleotide
  Target: LAMA2; (-) strand; PAM type: YTN; PAM sequence: CTG
gatcgcctgcaactgcttcc

SEQ ID NO: 289496 - DNA, 20 bp, Artificial Sequence
  Description of Artificial Sequence: Synthetic oligonucleotide
  Target: LAMA2; (-) strand; PAM type: YTN; PAM sequence: TTG
gcctggatcgcctgcaactg

SEQ ID NO: 289497 - DNA, 20 bp, Artificial Sequence
  Description of Artificial Sequence: Synthetic oligonucleotide
  Target: LAMA2; (-) strand; PAM type: YTN; PAM sequence: TTT
ggcctggatcgcctgcaact

SEQ ID NO: 289498 - DNA, 20 bp, Artificial Sequence
  Description of Artificial Sequence: Synthetic oligonucleotide
  Target: LAMA2; (-) strand; PAM type: YTN; PAM sequence: TTT
tggcctggatcgcctgcaac

SEQ ID NO: 289499 - DNA, 20 bp, Artificial Sequence
  Description of Artificial Sequence: Synthetic oligonucleotide
  Target: LAMA2; (-) strand; PAM type: YTN; PAM sequence: TTT
ttggcctggatcgcctgcaa

SEQ ID NO: 289500 - DNA, 20 bp, Artificial Sequence
  Description of Artificial Sequence: Synthetic oligonucleotide
  Target: LAMA2; (-) strand; PAM type: YTN; PAM sequence: CTT
tttggcctggatcgcctgca

SEQ ID NO: 289501 - DNA, 20 bp, Artificial Sequence
  Description of Artificial Sequence: Synthetic oligonucleotide
  Target: LAMA2; (-) strand; PAM type: YTN; PAM sequence: TTC
atatgatgctttttggcctg

SEQ ID NO: 289502 - DNA, 20 bp, Artificial Sequence
  Description of Artificial Sequence: Synthetic oligonucleotide
  Target: LAMA2; (-) strand; PAM type: YTN; PAM sequence: TTT
catatgatgctttttggcct

SEQ ID NO: 289503 - DNA, 20 bp, Artificial Sequence
  Description of Artificial Sequence: Synthetic oligonucleotide
  Target: LAMA2; (-) strand; PAM type: YTN; PAM sequence: TTT
tcatatgatgctttttggcc

SEQ ID NO: 289504 - DNA, 20 bp, Artificial Sequence
  Description of Artificial Sequence: Synthetic oligonucleotide
  Target: LAMA2; (-) strand; PAM type: YTN; PAM sequence: CTT
ttcatatgatgctttttggc

SEQ ID NO: 289505 - DNA, 20 bp, Artificial Sequence
  Description of Artificial Sequence: Synthetic oligonucleotide
  Target: LAMA2; (-) strand; PAM type: YTN; PAM sequence: TTA
tcttttcatatgatgctttt

SEQ ID NO: 289506 - DNA, 20 bp, Artificial Sequence
  Description of Artificial Sequence: Synthetic oligonucleotide
  Target: LAMA2; (-) strand; PAM type: YTN; PAM sequence: TTT
atcttttcatatgatgcttt

SEQ ID NO: 289507 - DNA, 20 bp, Artificial Sequence
  Description of Artificial Sequence: Synthetic oligonucleotide
  Target: LAMA2; (-) strand; PAM type: YTN; PAM sequence: TTA
tacatgtttatcttttcata

SEQ ID NO: 289508 - DNA, 20 bp, Artificial Sequence
  Description of Artificial Sequence: Synthetic oligonucleotide
  Target: LAMA2; (-) strand; PAM type: YTN; PAM sequence: TTT
atacatgtttatcttttcat

SEQ ID NO: 289509 - DNA, 20 bp, Artificial Sequence
  Description of Artificial Sequence: Synthetic oligonucleotide
  Target: LAMA2; (-) strand; PAM type: YTN; PAM sequence: TTT
tatacatgtttatcttttca

SEQ ID NO: 289510 - DNA, 20 bp, Artificial Sequence
  Description of Artificial Sequence: Synthetic oligonucleotide
  Target: LAMA2; (-) strand; PAM type: YTN; PAM sequence: TTT
ttatacatgtttatcttttc

SEQ ID NO: 289511 - DNA, 20 bp, Artificial Sequence
  Description of Artificial Sequence: Synthetic oligonucleotide
  Target: LAMA2; (-) strand; PAM type: YTN; PAM sequence: TTC
atgtttttatacatgtttat

SEQ ID NO: 289512 - DNA, 20 bp, Artificial Sequence
  Description of Artificial Sequence: Synthetic oligonucleotide
  Target: LAMA2; (-) strand; PAM type: YTN; PAM sequence: CTG
cccaaataattcatgttttt

SEQ ID NO: 289513 - DNA, 20 bp, Artificial Sequence
  Description of Artificial Sequence: Synthetic oligonucleotide
  Target: LAMA2; (-) strand; PAM type: YTN; PAM sequence: TTA
caacagctgcccaaataatt

SEQ ID NO: 289514 - DNA, 20 bp, Artificial Sequence
  Description of Artificial Sequence: Synthetic oligonucleotide
  Target: LAMA2; (-) strand; PAM type: YTN; PAM sequence: CTG
attacaacagctgcccaaat

SEQ ID NO: 289515 - DNA, 20 bp, Artificial Sequence
  Description of Artificial Sequence: Synthetic oligonucleotide
  Target: LAMA2; (-) strand; PAM type: YTN; PAM sequence: TTC
aaactgattacaacagctgc

SEQ ID NO: 289516 - DNA, 20 bp, Artificial Sequence
  Description of Artificial Sequence: Synthetic oligonucleotide
  Target: LAMA2; (-) strand; PAM type: YTN; PAM sequence: CTC
caataattcaaactgattac

SEQ ID NO: 289517 - DNA, 20 bp, Artificial Sequence
  Description of Artificial Sequence: Synthetic oligonucleotide
  Target: LAMA2; (-) strand; PAM type: YTN; PAM sequence: TTA
aactccaataattcaaactg

SEQ ID NO: 289518 - DNA, 20 bp, Artificial Sequence
  Description of Artificial Sequence: Synthetic oligonucleotide
  Target: LAMA2; (-) strand; PAM type: YTN; PAM sequence: TTT
aaactccaataattcaaact

SEQ ID NO: 289519 - DNA, 20 bp, Artificial Sequence
  Description of Artificial Sequence: Synthetic oligonucleotide
  Target: LAMA2; (-) strand; PAM type: YTN; PAM sequence: TTG
aaatttaaactccaataatt

SEQ ID NO: 289520 - DNA, 20 bp, Artificial Sequence
  Description of Artificial Sequence: Synthetic oligonucleotide
  Target: LAMA2; (-) strand; PAM type: YTN; PAM sequence: TTT
gaaatttaaactccaataat

SEQ ID NO: 289521 - DNA, 20 bp, Artificial Sequence
  Description of Artificial Sequence: Synthetic oligonucleotide
  Target: LAMA2; (-) strand; PAM type: YTN; PAM sequence: TTT
tgaaatttaaactccaataa

SEQ ID NO: 289522 - DNA, 20 bp, Artificial Sequence
  Description of Artificial Sequence: Synthetic oligonucleotide
  Target: LAMA2; (-) strand; PAM type: YTN; PAM sequence: CTT
ttgaaatttaaactccaata

SEQ ID NO: 289523 - DNA, 20 bp, Artificial Sequence
  Description of Artificial Sequence: Synthetic oligonucleotide
  Target: LAMA2; (-) strand; PAM type: YTN; PAM sequence: CTC
ttttgaaatttaaactccaa

SEQ ID NO: 289524 - DNA, 20 bp, Artificial Sequence
  Description of Artificial Sequence: Synthetic oligonucleotide
  Target: LAMA2; (-) strand; PAM type: YTN; PAM sequence: CTA
tcactcttttgaaatttaaa

SEQ ID NO: 289525 - DNA, 20 bp, Artificial Sequence
  Description of Artificial Sequence: Synthetic oligonucleotide
  Target: LAMA2; (-) strand; PAM type: YTN; PAM sequence: TTC
tatcactcttttgaaattta

SEQ ID NO: 289526 - DNA, 20 bp, Artificial Sequence
  Description of Artificial Sequence: Synthetic oligonucleotide
  Target: LAMA2; (-) strand; PAM type: YTN; PAM sequence: CTT
ctatcactcttttgaaattt

SEQ ID NO: 289527 - DNA, 20 bp, Artificial Sequence
  Description of Artificial Sequence: Synthetic oligonucleotide
  Target: LAMA2; (-) strand; PAM type: YTN; PAM sequence: TTA
tcttctatcactcttttgaa

SEQ ID NO: 289528 - DNA, 20 bp, Artificial Sequence
  Description of Artificial Sequence: Synthetic oligonucleotide
  Target: LAMA2; (-) strand; PAM type: YTN; PAM sequence: TTG
ccaacatgcccagcgttatc

SEQ ID NO: 289529 - DNA, 20 bp, Artificial Sequence
  Description of Artificial Sequence: Synthetic oligonucleotide
  Target: LAMA2; (-) strand; PAM type: YTN; PAM sequence: CTT
gccaacatgcccagcgttat

SEQ ID NO: 289530 - DNA, 20 bp, Artificial Sequence
  Description of Artificial Sequence: Synthetic oligonucleotide
  Target: LAMA2; (-) strand; PAM type: YTN; PAM sequence: CTG
gcccttgccaacatgcccag

SEQ ID NO: 289531 - DNA, 20 bp, Artificial Sequence
  Description of Artificial Sequence: Synthetic oligonucleotide
  Target: LAMA2; (-) strand; PAM type: YTN; PAM sequence: CTG
tgatctggcccttgccaaca

SEQ ID NO: 289532 - DNA, 20 bp, Artificial Sequence
  Description of Artificial Sequence: Synthetic oligonucleotide
  Target: LAMA2; (-) strand; PAM type: YTN; PAM sequence: TTC
ctgtgatctggcccttgcca

SEQ ID NO: 289533 - DNA, 20 bp, Artificial Sequence
  Description of Artificial Sequence: Synthetic oligonucleotide
  Target: LAMA2; (-) strand; PAM type: YTN; PAM sequence: CTT
cctgtgatctggcccttgcc

SEQ ID NO: 289534 - DNA, 20 bp, Artificial Sequence
  Description of Artificial Sequence: Synthetic oligonucleotide
  Target: LAMA2; (-) strand; PAM type: YTN; PAM sequence: TTA
aacagcttcctgtgatctgg

SEQ ID NO: 289535 - DNA, 20 bp, Artificial Sequence
  Description of Artificial Sequence: Synthetic oligonucleotide
  Target: LAMA2; (-) strand; PAM type: YTN; PAM sequence: TTT
aaacagcttcctgtgatctg

SEQ ID NO: 289536 - DNA, 20 bp, Artificial Sequence
  Description of Artificial Sequence: Synthetic oligonucleotide
  Target: LAMA2; (-) strand; PAM type: YTN; PAM sequence: CTC
aacacagtttaaacagcttc

SEQ ID NO: 289537 - DNA, 20 bp, Artificial Sequence
  Description of Artificial Sequence: Synthetic oligonucleotide
  Target: LAMA2; (-) strand; PAM type: YTN; PAM sequence: CTC
ctcaacacagtttaaacagc

SEQ ID NO: 289538 - DNA, 20 bp, Artificial Sequence
  Description of Artificial Sequence: Synthetic oligonucleotide
  Target: LAMA2; (-) strand; PAM type: YTN; PAM sequence: TTC
atcaagatgaaatgcaaact

SEQ ID NO: 289539 - DNA, 20 bp, Artificial Sequence
  Description of Artificial Sequence: Synthetic oligonucleotide
  Target: LAMA2; (-) strand; PAM type: YTN; PAM sequence: TTA
aaatcaagttcatcaagatg

SEQ ID NO: 289540 - DNA, 20 bp, Artificial Sequence
  Description of Artificial Sequence: Synthetic oligonucleotide
  Target: LAMA2; (-) strand; PAM type: YTN; PAM sequence: CTT
aaaatcaagttcatcaagat

SEQ ID NO: 289541 - DNA, 20 bp, Artificial Sequence
  Description of Artificial Sequence: Synthetic oligonucleotide
  Target: LAMA2; (-) strand; PAM type: YTN; PAM sequence: CTA
cttaaaatcaagttcatcaa

SEQ ID NO: 289542 - DNA, 20 bp, Artificial Sequence
  Description of Artificial Sequence: Synthetic oligonucleotide
  Target: LAMA2; (-) strand; PAM type: YTN; PAM sequence: CTC
tacttaaaatcaagttcatc

SEQ ID NO: 289543 - DNA, 20 bp, Artificial Sequence
  Description of Artificial Sequence: Synthetic oligonucleotide
  Target: LAMA2; (-) strand; PAM type: YTN; PAM sequence: CTG
tcacatctctacttaaaatc

SEQ ID NO: 289544 - DNA, 20 bp, Artificial Sequence
  Description of Artificial Sequence: Synthetic oligonucleotide
  Target: LAMA2; (-) strand; PAM type: YTN; PAM sequence: TTA
ccctgtcacatctctactta

SEQ ID NO: 289545 - DNA, 20 bp, Artificial Sequence
  Description of Artificial Sequence: Synthetic oligonucleotide
  Target: LAMA2; (-) strand; PAM type: YTN; PAM sequence: TTG
aaattaccctgtcacatctc

SEQ ID NO: 289546 - DNA, 20 bp, Artificial Sequence
  Description of Artificial Sequence: Synthetic oligonucleotide
  Target: LAMA2; (-) strand; PAM type: YTN; PAM sequence: TTA
aattgaaattaccctgtcac

SEQ ID NO: 289547 - DNA, 20 bp, Artificial Sequence
  Description of Artificial Sequence: Synthetic oligonucleotide
  Target: LAMA2; (-) strand; PAM type: YTN; PAM sequence: CTT
aaattgaaattaccctgtca

SEQ ID NO: 289548 - DNA, 20 bp, Artificial Sequence
  Description of Artificial Sequence: Synthetic oligonucleotide
  Target: LAMA2; (-) strand; PAM type: YTN; PAM sequence: CTC
gagtaatatacttaaattga

SEQ ID NO: 289549 - DNA, 20 bp, Artificial Sequence
  Description of Artificial Sequence: Synthetic oligonucleotide
  Target: LAMA2; (-) strand; PAM type: YTN; PAM sequence: CTG
acacctcgagtaatatactt

SEQ ID NO: 289550 - DNA, 20 bp, Artificial Sequence
  Description of Artificial Sequence: Synthetic oligonucleotide
  Target: LAMA2; (-) strand; PAM type: YTN; PAM sequence: TTC
cacactgacacctcgagtaa

SEQ ID NO: 289551 - DNA, 20 bp, Artificial Sequence
  Description of Artificial Sequence: Synthetic oligonucleotide
  Target: LAMA2; (-) strand; PAM type: YTN; PAM sequence: CTT
ccacactgacacctcgagta

SEQ ID NO: 289552 - DNA, 20 bp, Artificial Sequence
  Description of Artificial Sequence: Synthetic oligonucleotide
  Target: LAMA2; (-) strand; PAM type: YTN; PAM sequence: CTG
acaatatgtcttccacactg

SEQ ID NO: 289553 - DNA, 20 bp, Artificial Sequence
  Description of Artificial Sequence: Synthetic oligonucleotide
  Target: LAMA2; (-) strand; PAM type: YTN; PAM sequence: TTC
tgacaatatgtcttccacac

SEQ ID NO: 289554 - DNA, 20 bp, Artificial Sequence
  Description of Artificial Sequence: Synthetic oligonucleotide
  Target: LAMA2; (-) strand; PAM type: YTN; PAM sequence: CTT
ctgacaatatgtcttccaca

SEQ ID NO: 289555 - DNA, 20 bp, Artificial Sequence
  Description of Artificial Sequence: Synthetic oligonucleotide
  Target: LAMA2; (-) strand; PAM type: YTN; PAM sequence: TTG
gtcttctgacaatatgtctt

SEQ ID NO: 289556 - DNA, 20 bp, Artificial Sequence
  Description of Artificial Sequence: Synthetic oligonucleotide
  Target: LAMA2; (-) strand; PAM type: YTN; PAM sequence: TTT
ggtcttctgacaatatgtct

SEQ ID NO: 289557 - DNA, 20 bp, Artificial Sequence
  Description of Artificial Sequence: Synthetic oligonucleotide
  Target: LAMA2; (-) strand; PAM type: YTN; PAM sequence: TTC
agtttggtcttctgacaata

SEQ ID NO: 289558 - DNA, 20 bp, Artificial Sequence
  Description of Artificial Sequence: Synthetic oligonucleotide
  Target: LAMA2; (-) strand; PAM type: YTN; PAM sequence: CTT
cagtttggtcttctgacaat

SEQ ID NO: 289559 - DNA, 20 bp, Artificial Sequence
  Description of Artificial Sequence: Synthetic oligonucleotide
  Target: LAMA2; (-) strand; PAM type: YTN; PAM sequence: TTG
tcttcagtttggtcttctga

SEQ ID NO: 289560 - DNA, 20 bp, Artificial Sequence
  Description of Artificial Sequence: Synthetic oligonucleotide
  Target: LAMA2; (-) strand; PAM type: YTN; PAM sequence: TTT
gtcttcagtttggtcttctg

SEQ ID NO: 289561 - DNA, 20 bp, Artificial Sequence
  Description of Artificial Sequence: Synthetic oligonucleotide
  Target: LAMA2; (-) strand; PAM type: YTN; PAM sequence: CTT
tgtcttcagtttggtcttct

SEQ ID NO: 289562 - DNA, 20 bp, Artificial Sequence
  Description of Artificial Sequence: Synthetic oligonucleotide
  Target: LAMA2; (-) strand; PAM type: YTN; PAM sequence: TTC
gctttgtcttcagtttggtc

SEQ ID NO: 289563 - DNA, 20 bp, Artificial Sequence
  Description of Artificial Sequence: Synthetic oligonucleotide
  Target: LAMA2; (-) strand; PAM type: YTN; PAM sequence: TTG
ttcgctttgtcttcagtttg

SEQ ID NO: 289564 - DNA, 20 bp, Artificial Sequence
  Description of Artificial Sequence: Synthetic oligonucleotide
  Target: LAMA2; (-) strand; PAM type: YTN; PAM sequence: TTG
aatccaattgttcgctttgt

SEQ ID NO: 289565 - DNA, 20 bp, Artificial Sequence
  Description of Artificial Sequence: Synthetic oligonucleotide
  Target: LAMA2; (-) strand; PAM type: YTN; PAM sequence: TTA
ttgaatccaattgttcgctt

SEQ ID NO: 289566 - DNA, 20 bp, Artificial Sequence
  Description of Artificial Sequence: Synthetic oligonucleotide
  Target: LAMA2; (-) strand; PAM type: YTN; PAM sequence: CTA
ttattgaatccaattgttcg

SEQ ID NO: 289567 - DNA, 20 bp, Artificial Sequence
  Description of Artificial Sequence: Synthetic oligonucleotide
  Target: LAMA2; (-) strand; PAM type: YTN; PAM sequence: CTA
gactattattgaatccaatt

SEQ ID NO: 289568 - DNA, 20 bp, Artificial Sequence
  Description of Artificial Sequence: Synthetic oligonucleotide
  Target: LAMA2; (-) strand; PAM type: YTN; PAM sequence: CTG
cctagactattattgaatcc

SEQ ID NO: 289569 - DNA, 20 bp, Artificial Sequence
  Description of Artificial Sequence: Synthetic oligonucleotide
  Target: LAMA2; (-) strand; PAM type: YTN; PAM sequence: CTC
ctgcctagactattattgaa

SEQ ID NO: 289570 - DNA, 20 bp, Artificial Sequence
  Description of Artificial Sequence: Synthetic oligonucleotide
  Target: LAMA2; (-) strand; PAM type: YTN; PAM sequence: TTA
cctcctgcctagactattat

SEQ ID NO: 289571 - DNA, 20 bp, Artificial Sequence
  Description of Artificial Sequence: Synthetic oligonucleotide
  Target: LAMA2; (-) strand; PAM type: YTN; PAM sequence: TTT
acctcctgcctagactatta

SEQ ID NO: 289572 - DNA, 20 bp, Artificial Sequence
  Description of Artificial Sequence: Synthetic oligonucleotide
  Target: LAMA2; (-) strand; PAM type: YTN; PAM sequence: TTC
aagcataatttacctcctgc

SEQ ID NO: 289573 - DNA, 20 bp, Artificial Sequence
  Description of Artificial Sequence: Synthetic oligonucleotide
  Target: LAMA2; (-) strand; PAM type: YTN; PAM sequence: CTT
caagcataatttacctcctg

SEQ ID NO: 289574 - DNA, 20 bp, Artificial Sequence
  Description of Artificial Sequence: Synthetic oligonucleotide
  Target: LAMA2; (-) strand; PAM type: YTN; PAM sequence: TTA
cttcaagcataatttacctc

SEQ ID NO: 289575 - DNA, 20 bp, Artificial Sequence
  Description of Artificial Sequence: Synthetic oligonucleotide
  Target: LAMA2; (-) strand; PAM type: YTN; PAM sequence: CTT
acttcaagcataatttacct

SEQ ID NO: 289576 - DNA, 20 bp, Artificial Sequence
  Description of Artificial Sequence: Synthetic oligonucleotide
  Target: LAMA2; (-) strand; PAM type: YTN; PAM sequence: CTC
ttacttcaagcataatttac

SEQ ID NO: 289577 - DNA, 20 bp, Artificial Sequence
  Description of Artificial Sequence: Synthetic oligonucleotide
  Target: LAMA2; (-) strand; PAM type: YTN; PAM sequence: CTG
catctcttacttcaagcata

SEQ ID NO: 289578 - DNA, 20 bp, Artificial Sequence
  Description of Artificial Sequence: Synthetic oligonucleotide
  Target: LAMA2; (-) strand; PAM type: YTN; PAM sequence: TTC
ccactgcatctcttacttca

SEQ ID NO: 289579 - DNA, 20 bp, Artificial Sequence
  Description of Artificial Sequence: Synthetic oligonucleotide
  Target: LAMA2; (-) strand; PAM type: YTN; PAM sequence: TTG
atgtcaattcccactgcatc

SEQ ID NO: 289580 - DNA, 20 bp, Artificial Sequence
  Description of Artificial Sequence: Synthetic oligonucleotide
  Target: LAMA2; (-) strand; PAM type: YTN; PAM sequence: TTT
gatgtcaattcccactgcat

SEQ ID NO: 289581 - DNA, 20 bp, Artificial Sequence
  Description of Artificial Sequence: Synthetic oligonucleotide
  Target: LAMA2; (-) strand; PAM type: YTN; PAM sequence: CTT
tgatgtcaattcccactgca

SEQ ID NO: 289582 - DNA, 20 bp, Artificial Sequence
  Description of Artificial Sequence: Synthetic oligonucleotide
  Target: LAMA2; (-) strand; PAM type: YTN; PAM sequence: TTC
tttgatgtcaattcccactg

SEQ ID NO: 289583 - DNA, 20 bp, Artificial Sequence
  Description of Artificial Sequence: Synthetic oligonucleotide
  Target: LAMA2; (-) strand; PAM type: YTN; PAM sequence: TTT
ctttgatgtcaattcccact

SEQ ID NO: 289584 - DNA, 20 bp, Artificial Sequence
  Description of Artificial Sequence: Synthetic oligonucleotide
  Target: LAMA2; (-) strand; PAM type: YTN; PAM sequence: CTG
catttctttgatgtcaattc

SEQ ID NO: 289585 - DNA, 20 bp, Artificial Sequence
  Description of Artificial Sequence: Synthetic oligonucleotide
  Target: LAMA2; (-) strand; PAM type: YTN; PAM sequence: TTC
tgcatttctttgatgtcaat

SEQ ID NO: 289586 - DNA, 20 bp, Artificial Sequence
  Description of Artificial Sequence: Synthetic oligonucleotide
  Target: LAMA2; (-) strand; PAM type: YTN; PAM sequence: TTA
ttctgcatttctttgatgtc

SEQ ID NO: 289587 - DNA, 20 bp, Artificial Sequence
  Description of Artificial Sequence: Synthetic oligonucleotide
  Target: LAMA2; (-) strand; PAM type: YTN; PAM sequence: TTT
attctgcatttctttgatgt

SEQ ID NO: 289588 - DNA, 20 bp, Artificial Sequence
  Description of Artificial Sequence: Synthetic oligonucleotide
  Target: LAMA2; (-) strand; PAM type: YTN; PAM sequence: CTG
tgtaatggtatcacatggtg

SEQ ID NO: 289589 - DNA, 20 bp, Artificial Sequence
  Description of Artificial Sequence: Synthetic oligonucleotide
  Target: LAMA2; (-) strand; PAM type: YTN; PAM sequence: CTA
atagctgtgtaatggtatca

SEQ ID NO: 289590 - DNA, 20 bp, Artificial Sequence
  Description of Artificial Sequence: Synthetic oligonucleotide
  Target: LAMA2; (-) strand; PAM type: YTN; PAM sequence: TTC
taatagctgtgtaatggtat

SEQ ID NO: 289591 - DNA, 20 bp, Artificial Sequence
  Description of Artificial Sequence: Synthetic oligonucleotide
  Target: LAMA2; (-) strand; PAM type: YTN; PAM sequence: TTA
gtcattctaatagctgtgta

SEQ ID NO: 289592 - DNA, 20 bp, Artificial Sequence
  Description of Artificial Sequence: Synthetic oligonucleotide
  Target: LAMA2; (-) strand; PAM type: YTN; PAM sequence: TTT
agtcattctaatagctgtgt

SEQ ID NO: 289593 - DNA, 20 bp, Artificial Sequence
  Description of Artificial Sequence: Synthetic oligonucleotide
  Target: LAMA2; (-) strand; PAM type: YTN; PAM sequence: TTT
tagtcattctaatagctgtg

SEQ ID NO: 289594 - DNA, 20 bp, Artificial Sequence
  Description of Artificial Sequence: Synthetic oligonucleotide
  Target: LAMA2; (-) strand; PAM type: YTN; PAM sequence: TTA
attttagtcattctaatagc

SEQ ID NO: 289595 - DNA, 20 bp, Artificial Sequence
  Description of Artificial Sequence: Synthetic oligonucleotide
  Target: LAMA2; (-) strand; PAM type: YTN; PAM sequence: TTT
aattttagtcattctaatag

SEQ ID NO: 289596 - DNA, 20 bp, Artificial Sequence
  Description of Artificial Sequence: Synthetic oligonucleotide
  Target: LAMA2; (-) strand; PAM type: YTN; PAM sequence: TTT
taattttagtcattctaata

SEQ ID NO: 289597 - DNA, 20 bp, Artificial Sequence
  Description of Artificial Sequence: Synthetic oligonucleotide
  Target: LAMA2; (-) strand; PAM type: YTN; PAM sequence: TTT
ttaattttagtcattctaat

SEQ ID NO: 289598 - DNA, 20 bp, Artificial Sequence
  Description of Artificial Sequence: Synthetic oligonucleotide
  Target: LAMA2; (-) strand; PAM type: YTN; PAM sequence: CTT
tttaattttagtcattctaa

SEQ ID NO: 289599 - DNA, 20 bp, Artificial Sequence
  Description of Artificial Sequence: Synthetic oligonucleotide
  Target: LAMA2; (-) strand; PAM type: YTN; PAM sequence: CTG
agtatggtcagtctttttaa

SEQ ID NO: 289600 - DNA, 20 bp, Artificial Sequence
  Description of Artificial Sequence: Synthetic oligonucleotide
  Target: LAMA2; (-) strand; PAM type: YTN; PAM sequence: CTG
ccagtactgagtatggtcag

SEQ ID NO: 289601 - DNA, 20 bp, Artificial Sequence
  Description of Artificial Sequence: Synthetic oligonucleotide
  Target: LAMA2; (-) strand; PAM type: YTN; PAM sequence: TTC
tgccagtactgagtatggtc

SEQ ID NO: 289602 - DNA, 20 bp, Artificial Sequence
  Description of Artificial Sequence: Synthetic oligonucleotide
  Target: LAMA2; (-) strand; PAM type: YTN; PAM sequence: CTT
ctgccagtactgagtatggt

SEQ ID NO: 289603 - DNA, 20 bp, Artificial Sequence
  Description of Artificial Sequence: Synthetic oligonucleotide
  Target: LAMA2; (-) strand; PAM type: YTN; PAM sequence: CTC
caccttctgccagtactgag

SEQ ID NO: 289604 - DNA, 20 bp, Artificial Sequence
  Description of Artificial Sequence: Synthetic oligonucleotide
  Target: LAMA2; (-) strand; PAM type: YTN; PAM sequence: TTC
cagtgtctccaccttctgcc

SEQ ID NO: 289605 - DNA, 20 bp, Artificial Sequence
  Description of Artificial Sequence: Synthetic oligonucleotide
  Target: LAMA2; (-) strand; PAM type: YTN; PAM sequence: CTC
agcagcagtgtatgagttcc

SEQ ID NO: 289606 - DNA, 20 bp, Artificial Sequence
  Description of Artificial Sequence: Synthetic oligonucleotide
  Target: LAMA2; (-) strand; PAM type: YTN; PAM sequence: TTA
tatcctcagcagcagtgtat

SEQ ID NO: 289607 - DNA, 20 bp, Artificial Sequence
  Description of Artificial Sequence: Synthetic oligonucleotide
  Target: LAMA2; (-) strand; PAM type: YTN; PAM sequence: TTT
atatcctcagcagcagtgta

SEQ ID NO: 289608 - DNA, 20 bp, Artificial Sequence
  Description of Artificial Sequence: Synthetic oligonucleotide
  Target: LAMA2; (-) strand; PAM type: YTN; PAM sequence: CTT
tatatcctcagcagcagtgt

SEQ ID NO: 289609 - DNA, 20 bp, Artificial Sequence
  Description of Artificial Sequence: Synthetic oligonucleotide
  Target: LAMA2; (-) strand; PAM type: YTN; PAM sequence: TTA
tgccactttatatcctcagc

SEQ ID NO: 289610 - DNA, 20 bp, Artificial Sequence
  Description of Artificial Sequence: Synthetic oligonucleotide
  Target: LAMA2; (-) strand; PAM type: YTN; PAM sequence: TTC
caatgttatgccactttata

SEQ ID NO: 289611 - DNA, 20 bp, Artificial Sequence
  Description of Artificial Sequence: Synthetic oligonucleotide
  Target: LAMA2; (-) strand; PAM type: YTN; PAM sequence: CTT
ccaatgttatgccactttat

SEQ ID NO: 289612 - DNA, 20 bp, Artificial Sequence
  Description of Artificial Sequence: Synthetic oligonucleotide
  Target: LAMA2; (-) strand; PAM type: YTN; PAM sequence: CTC
ttccaatgttatgccacttt

SEQ ID NO: 289613 - DNA, 20 bp, Artificial Sequence
  Description of Artificial Sequence: Synthetic oligonucleotide
  Target: LAMA2; (-) strand; PAM type: YTN; PAM sequence: TTA
agaaatggccaacctcttcc

SEQ ID NO: 289614 - DNA, 20 bp, Artificial Sequence
  Description of Artificial Sequence: Synthetic oligonucleotide
  Target: LAMA2; (-) strand; PAM type: YTN; PAM sequence: TTT
aagaaatggccaacctcttc

SEQ ID NO: 289615 - DNA, 20 bp, Artificial Sequence
  Description of Artificial Sequence: Synthetic oligonucleotide
  Target: LAMA2; (-) strand; PAM type: YTN; PAM sequence: TTT
taagaaatggccaacctctt

SEQ ID NO: 289616 - DNA, 20 bp, Artificial Sequence
  Description of Artificial Sequence: Synthetic oligonucleotide
  Target: LAMA2; (-) strand; PAM type: YTN; PAM sequence: CTT
ttaagaaatggccaacctct

SEQ ID NO: 289617 - DNA, 20 bp, Artificial Sequence
  Description of Artificial Sequence: Synthetic oligonucleotide
  Target: LAMA2; (-) strand; PAM type: YTN; PAM sequence: TTA
gtcttttaagaaatggccaa

SEQ ID NO: 289618 - DNA, 20 bp, Artificial Sequence
  Description of Artificial Sequence: Synthetic oligonucleotide
  Target: LAMA2; (-) strand; PAM type: YTN; PAM sequence: TTT
agtcttttaagaaatggcca

SEQ ID NO: 289619 - DNA, 20 bp, Artificial Sequence
  Description of Artificial Sequence: Synthetic oligonucleotide
  Target: LAMA2; (-) strand; PAM type: YTN; PAM sequence: TTG
tatggtagatgtatatttag

SEQ ID NO: 289620 - DNA, 20 bp, Artificial Sequence
  Description of Artificial Sequence: Synthetic oligonucleotide
  Target: LAMA2; (-) strand; PAM type: YTN; PAM sequence: TTT
gtatggtagatgtatattta

SEQ ID NO: 289621 - DNA, 20 bp, Artificial Sequence
  Description of Artificial Sequence: Synthetic oligonucleotide
  Target: LAMA2; (-) strand; PAM type: YTN; PAM sequence: TTG
gtttgtatggtagatgtata

SEQ ID NO: 289622 - DNA, 20 bp, Artificial Sequence
  Description of Artificial Sequence: Synthetic oligonucleotide
  Target: LAMA2; (-) strand; PAM type: YTN; PAM sequence: TTA
ggagtgaaatgattggtttg

SEQ ID NO: 289623 - DNA, 20 bp, Artificial Sequence
  Description of Artificial Sequence: Synthetic oligonucleotide
  Target: LAMA2; (-) strand; PAM type: YTN; PAM sequence: CTG
ggtgaataattaggagtgaa

SEQ ID NO: 289624 - DNA, 20 bp, Artificial Sequence
  Description of Artificial Sequence: Synthetic oligonucleotide
  Target: LAMA2; (-) strand; PAM type: YTN; PAM sequence: TTG
tgtcctgggtgaataattag

SEQ ID NO: 289625 - DNA, 20 bp, Artificial Sequence
  Description of Artificial Sequence: Synthetic oligonucleotide
  Target: LAMA2; (-) strand; PAM type: YTN; PAM sequence: CTT
gtgtcctgggtgaataatta

SEQ ID NO: 289626 - DNA, 20 bp, Artificial Sequence
  Description of Artificial Sequence: Synthetic oligonucleotide
  Target: LAMA2; (-) strand; PAM type: YTN; PAM sequence: TTC
ttgtgtcctgggtgaataat

SEQ ID NO: 289627 - DNA, 20 bp, Artificial Sequence
  Description of Artificial Sequence: Synthetic oligonucleotide
  Target: LAMA2; (-) strand; PAM type: YTN; PAM sequence: TTT
cttgtgtcctgggtgaataa

SEQ ID NO: 289628 - DNA, 20 bp, Artificial Sequence
  Description of Artificial Sequence: Synthetic oligonucleotide
  Target: LAMA2; (-) strand; PAM type: YTN; PAM sequence: CTT
tcttgtgtcctgggtgaata

SEQ ID NO: 289629 - DNA, 20 bp, Artificial Sequence
  Description of Artificial Sequence: Synthetic oligonucleotide
  Target: LAMA2; (-) strand; PAM type: YTN; PAM sequence: CTA
taaaaaatatgctttcttgt

SEQ ID NO: 289630 - DNA, 20 bp, Artificial Sequence
  Description of Artificial Sequence: Synthetic oligonucleotide
  Target: LAMA2; (-) strand; PAM type: YTN; PAM sequence: TTC
tataaaaaatatgctttctt

SEQ ID NO: 289631 - DNA, 20 bp, Artificial Sequence
  Description of Artificial Sequence: Synthetic oligonucleotide
  Target: LAMA2; (-) strand; PAM type: YTN; PAM sequence: TTT
ctataaaaaatatgctttct

SEQ ID NO: 289632 - DNA, 20 bp, Artificial Sequence
  Description of Artificial Sequence: Synthetic oligonucleotide
  Target: LAMA2; (-) strand; PAM type: YTN; PAM sequence: CTT
tctataaaaaatatgctttc

SEQ ID NO: 289633 - DNA, 20 bp, Artificial Sequence
  Description of Artificial Sequence: Synthetic oligonucleotide
  Target: LAMA2; (-) strand; PAM type: YTN; PAM sequence: TTG
gtacaagtctttctataaaa

SEQ ID NO: 289634 - DNA, 20 bp, Artificial Sequence
  Description of Artificial Sequence: Synthetic oligonucleotide
  Target: LAMA2; (-) strand; PAM type: YTN; PAM sequence: TTT
ggtacaagtctttctataaa

SEQ ID NO: 289635 - DNA, 20 bp, Artificial Sequence
  Description of Artificial Sequence: Synthetic oligonucleotide
  Target: LAMA2; (-) strand; PAM type: YTN; PAM sequence: TTT
tggtacaagtctttctataa

SEQ ID NO: 289636 - DNA, 20 bp, Artificial Sequence
  Description of Artificial Sequence: Synthetic oligonucleotide
  Target: LAMA2; (-) strand; PAM type: YTN; PAM sequence: TTG
agtaacacagataaaagtaa

SEQ ID NO: 289637 - DNA, 20 bp, Artificial Sequence
  Description of Artificial Sequence: Synthetic oligonucleotide
  Target: LAMA2; (-) strand; PAM type: YTN; PAM sequence: TTT
gagtaacacagataaaagta

SEQ ID NO: 289638 - DNA, 20 bp, Artificial Sequence
  Description of Artificial Sequence: Synthetic oligonucleotide
  Target: LAMA2; (-) strand; PAM type: YTN; PAM sequence: TTT
tgagtaacacagataaaagt

SEQ ID NO: 289639 - DNA, 20 bp, Artificial Sequence
  Description of Artificial Sequence: Synthetic oligonucleotide
  Target: LAMA2; (-) strand; PAM type: YTN; PAM sequence: TTT
ttgagtaacacagataaaag

SEQ ID NO: 289640 - DNA, 20 bp, Artificial Sequence
  Description of Artificial Sequence: Synthetic oligonucleotide
  Target: LAMA2; (-) strand; PAM type: YTN; PAM sequence: TTC
agtttttgagtaacacagat

SEQ ID NO: 289641 - DNA, 20 bp, Artificial Sequence
  Description of Artificial Sequence: Synthetic oligonucleotide
  Target: LAMA2; (-) strand; PAM type: YTN; PAM sequence: TTT
cagtttttgagtaacacaga

SEQ ID NO: 289642 - DNA, 20 bp, Artificial Sequence
  Description of Artificial Sequence: Synthetic oligonucleotide
  Target: LAMA2; (-) strand; PAM type: YTN; PAM sequence: TTT
tcagtttttgagtaacacag

SEQ ID NO: 289643 - DNA, 20 bp, Artificial Sequence
  Description of Artificial Sequence: Synthetic oligonucleotide
  Target: LAMA2; (-) strand; PAM type: YTN; PAM sequence: TTG
ttttcagtttttgagtaaca

SEQ ID NO: 289644 - DNA, 20 bp, Artificial Sequence
  Description of Artificial Sequence: Synthetic oligonucleotide
  Target: LAMA2; (-) strand; PAM type: YTN; PAM sequence: TTT
gttttcagtttttgagtaac

SEQ ID NO: 289645 - DNA, 20 bp, Artificial Sequence
  Description of Artificial Sequence: Synthetic oligonucleotide
  Target: LAMA2; (-) strand; PAM type: YTN; PAM sequence: CTG
tcgatggatatgtgatttgt

SEQ ID NO: 289646 - DNA, 20 bp, Artificial Sequence
  Description of Artificial Sequence: Synthetic oligonucleotide
  Target: LAMA2; (-) strand; PAM type: YTN; PAM sequence: TTA
cctgtcgatggatatgtgat

SEQ ID NO: 289647 - DNA, 20 bp, Artificial Sequence
  Description of Artificial Sequence: Synthetic oligonucleotide
  Target: LAMA2; (-) strand; PAM type: YTN; PAM sequence: TTT
acctgtcgatggatatgtga

SEQ ID NO: 289648 - DNA, 20 bp, Artificial Sequence
  Description of Artificial Sequence: Synthetic oligonucleotide
  Target: LAMA2; (-) strand; PAM type: YTN; PAM sequence: CTA
tttacctgtcgatggatatg

SEQ ID NO: 289649 - DNA, 20 bp, Artificial Sequence
  Description of Artificial Sequence: Synthetic oligonucleotide
  Target: LAMA2; (-) strand; PAM type: YTN; PAM sequence: TTA
tgtatatctatttacctgtc

SEQ ID NO: 289650 - DNA, 20 bp, Artificial Sequence
  Description of Artificial Sequence: Synthetic oligonucleotide
  Target: LAMA2; (-) strand; PAM type: YTN; PAM sequence: TTT
atgtatatctatttacctgt

SEQ ID NO: 289651 - DNA, 20 bp, Artificial Sequence
  Description of Artificial Sequence: Synthetic oligonucleotide
  Target: LAMA2; (-) strand; PAM type: YTN; PAM sequence: TTG
tatgagtataccacaattta

SEQ ID NO: 289652 - DNA, 20 bp, Artificial Sequence
  Description of Artificial Sequence: Synthetic oligonucleotide
  Target: LAMA2; (-) strand; PAM type: YTN; PAM sequence: TTC
cattgtatgagtataccaca

SEQ ID NO: 289653 - DNA, 20 bp, Artificial Sequence
  Description of Artificial Sequence: Synthetic oligonucleotide
  Target: LAMA2; (-) strand; PAM type: YTN; PAM sequence: CTA
gtattccattgtatgagtat

SEQ ID NO: 289654 - DNA, 20 bp, Artificial Sequence
  Description of Artificial Sequence: Synthetic oligonucleotide
  Target: LAMA2; (-) strand; PAM type: YTN; PAM sequence: TTG
ctagtattccattgtatgag

SEQ ID NO: 289655 - DNA, 20 bp, Artificial Sequence
  Description of Artificial Sequence: Synthetic oligonucleotide
  Target: LAMA2; (-) strand; PAM type: YTN; PAM sequence: TTA
ttgctagtattccattgtat

SEQ ID NO: 289656 - DNA, 20 bp, Artificial Sequence
  Description of Artificial Sequence: Synthetic oligonucleotide
  Target: LAMA2; (-) strand; PAM type: YTN; PAM sequence: TTT
attgctagtattccattgta

SEQ ID NO: 289657 - DNA, 20 bp, Artificial Sequence
  Description of Artificial Sequence: Synthetic oligonucleotide
  Target: LAMA2; (-) strand; PAM type: YTN; PAM sequence: TTT
tattgctagtattccattgt

SEQ ID NO: 289658 - DNA, 20 bp, Artificial Sequence
  Description of Artificial Sequence: Synthetic oligonucleotide
  Target: LAMA2; (-) strand; PAM type: YTN; PAM sequence: CTG
agtattttattgctagtatt

SEQ ID NO: 289659 - DNA, 20 bp, Artificial Sequence
  Description of Artificial Sequence: Synthetic oligonucleotide
  Target: LAMA2; (-) strand; PAM type: YTN; PAM sequence: TTG
ctgagtattttattgctagt

SEQ ID NO: 289660 - DNA, 20 bp, Artificial Sequence
  Description of Artificial Sequence: Synthetic oligonucleotide
  Target: LAMA2; (-) strand; PAM type: YTN; PAM sequence: TTA
ttgctgagtattttattgct

SEQ ID NO: 289661 - DNA, 20 bp, Artificial Sequence
  Description of Artificial Sequence: Synthetic oligonucleotide
  Target: LAMA2; (-) strand; PAM type: YTN; PAM sequence: TTT
attgctgagtattttattgc

SEQ ID NO: 289662 - DNA, 20 bp, Artificial Sequence
  Description of Artificial Sequence: Synthetic oligonucleotide
  Target: LAMA2; (-) strand; PAM type: YTN; PAM sequence: TTT
tattgctgagtattttattg

SEQ ID NO: 289663 - DNA, 20 bp, Artificial Sequence
  Description of Artificial Sequence: Synthetic oligonucleotide
  Target: LAMA2; (-) strand; PAM type: YTN; PAM sequence: TTT
ttattgctgagtattttatt

SEQ ID NO: 289664 - DNA, 20 bp, Artificial Sequence
  Description of Artificial Sequence: Synthetic oligonucleotide
  Target: LAMA2; (-) strand; PAM type: YTN; PAM sequence: TTT
tttattgctgagtattttat

SEQ ID NO: 289665 - DNA, 20 bp, Artificial Sequence
  Description of Artificial Sequence: Synthetic oligonucleotide
  Target: LAMA2; (-) strand; PAM type: YTN; PAM sequence: TTA
ttttttattgctgagtattt

SEQ ID NO: 289666 - DNA, 20 bp, Artificial Sequence
  Description of Artificial Sequence: Synthetic oligonucleotide
  Target: LAMA2; (-) strand; PAM type: YTN; PAM sequence: TTT
attttttattgctgagtatt

SEQ ID NO: 289667 - DNA, 20 bp, Artificial Sequence
  Description of Artificial Sequence: Synthetic oligonucleotide
  Target: LAMA2; (-) strand; PAM type: YTN; PAM sequence: CTT
tattttttattgctgagtat

SEQ ID NO: 289668 - DNA, 20 bp, Artificial Sequence
  Description of Artificial Sequence: Synthetic oligonucleotide
  Target: LAMA2; (-) strand; PAM type: YTN; PAM sequence: TTA
atactttattttttattgct

SEQ ID NO: 289669 - DNA, 20 bp, Artificial Sequence
  Description of Artificial Sequence: Synthetic oligonucleotide
  Target: LAMA2; (-) strand; PAM type: YTN; PAM sequence: CTA
tattaatactttatttttta

SEQ ID NO: 289670 - DNA, 20 bp, Artificial Sequence
  Description of Artificial Sequence: Synthetic oligonucleotide
  Target: LAMA2; (-) strand; PAM type: YTN; PAM sequence: TTG
tatctatattaatactttat

SEQ ID NO: 289671 - DNA, 20 bp, Artificial Sequence
  Description of Artificial Sequence: Synthetic oligonucleotide
  Target: LAMA2; (-) strand; PAM type: YTN; PAM sequence: TTT
gtatctatattaatacttta

SEQ ID NO: 289672 - DNA, 20 bp, Artificial Sequence
  Description of Artificial Sequence: Synthetic oligonucleotide
  Target: LAMA2; (-) strand; PAM type: YTN; PAM sequence: TTT
tgtatctatattaatacttt

SEQ ID NO: 289673 - DNA, 20 bp, Artificial Sequence
  Description of Artificial Sequence: Synthetic oligonucleotide
  Target: LAMA2; (-) strand; PAM type: YTN; PAM sequence: TTC
atccattttgtatctatatt

SEQ ID NO: 289674 - DNA, 20 bp, Artificial Sequence
  Description of Artificial Sequence: Synthetic oligonucleotide
  Target: LAMA2; (-) strand; PAM type: YTN; PAM sequence: TTG
gatattcatccattttgtat

SEQ ID NO: 289675 - DNA, 20 bp, Artificial Sequence
  Description of Artificial Sequence: Synthetic oligonucleotide
  Target: LAMA2; (-) strand; PAM type: YTN; PAM sequence: TTT
ggatattcatccattttgta

SEQ ID NO: 289676 - DNA, 20 bp, Artificial Sequence
  Description of Artificial Sequence: Synthetic oligonucleotide
  Target: LAMA2; (-) strand; PAM type: YTN; PAM sequence: CTA
tttggatattcatccatttt

SEQ ID NO: 289677 - DNA, 20 bp, Artificial Sequence
  Description of Artificial Sequence: Synthetic oligonucleotide
  Target: LAMA2; (-) strand; PAM type: YTN; PAM sequence: CTG
cctatttggatattcatcca

SEQ ID NO: 289678 - DNA, 20 bp, Artificial Sequence
  Description of Artificial Sequence: Synthetic oligonucleotide
  Target: LAMA2; (-) strand; PAM type: YTN; PAM sequence: TTG
tctgcctatttggatattca

SEQ ID NO: 289679 - DNA, 20 bp, Artificial Sequence
  Description of Artificial Sequence: Synthetic oligonucleotide
  Target: LAMA2; (-) strand; PAM type: YTN; PAM sequence: TTT
gtctgcctatttggatattc

SEQ ID NO: 289680 - DNA, 20 bp, Artificial Sequence
  Description of Artificial Sequence: Synthetic oligonucleotide
  Target: LAMA2; (-) strand; PAM type: YTN; PAM sequence: TTT
tgtctgcctatttggatatt

SEQ ID NO: 289681 - DNA, 20 bp, Artificial Sequence
  Description of Artificial Sequence: Synthetic oligonucleotide
  Target: LAMA2; (-) strand; PAM type: YTN; PAM sequence: TTT
ttgtctgcctatttggatat

SEQ ID NO: 289682 - DNA, 20 bp, Artificial Sequence
  Description of Artificial Sequence: Synthetic oligonucleotide
  Target: LAMA2; (-) strand; PAM type: YTN; PAM sequence: TTT
tttgtctgcctatttggata

SEQ ID NO: 289683 - DNA, 20 bp, Artificial Sequence
  Description of Artificial Sequence: Synthetic oligonucleotide
  Target: LAMA2; (-) strand; PAM type: YTN; PAM sequence: CTT
ttttgtctgcctatttggat

SEQ ID NO: 289684 - DNA, 20 bp, Artificial Sequence
  Description of Artificial Sequence: Synthetic oligonucleotide
  Target: LAMA2; (-) strand; PAM type: YTN; PAM sequence: TTG
ccttttttgtctgcctattt

SEQ ID NO: 289685 - DNA, 20 bp, Artificial Sequence
  Description of Artificial Sequence: Synthetic oligonucleotide
  Target: LAMA2; (-) strand; PAM type: YTN; PAM sequence: TTT
gccttttttgtctgcctatt

SEQ ID NO: 289686 - DNA, 20 bp, Artificial Sequence
  Description of Artificial Sequence: Synthetic oligonucleotide
  Target: LAMA2; (-) strand; PAM type: YTN; PAM sequence: CTA
aatttgccttttttgtctgc

SEQ ID NO: 289687 - DNA, 20 bp, Artificial Sequence
  Description of Artificial Sequence: Synthetic oligonucleotide
  Target: LAMA2; (-) strand; PAM type: YTN; PAM sequence: CTG
cctaaatttgccttttttgt

SEQ ID NO: 289688 - DNA, 20 bp, Artificial Sequence
  Description of Artificial Sequence: Synthetic oligonucleotide
  Target: LAMA2; (-) strand; PAM type: YTN; PAM sequence: TTG
tgtctgcctaaatttgcctt

SEQ ID NO: 289689 - DNA, 20 bp, Artificial Sequence
  Description of Artificial Sequence: Synthetic oligonucleotide
  Target: LAMA2; (-) strand; PAM type: YTN; PAM sequence: TTT
gtgtctgcctaaatttgcct

SEQ ID NO: 289690 - DNA, 20 bp, Artificial Sequence
  Description of Artificial Sequence: Synthetic oligonucleotide
  Target: LAMA2; (-) strand; PAM type: YTN; PAM sequence: TTT
tgtgtctgcctaaatttgcc

SEQ ID NO: 289691 - DNA, 20 bp, Artificial Sequence
  Description of Artificial Sequence: Synthetic oligonucleotide
  Target: LAMA2; (-) strand; PAM type: YTN; PAM sequence: TTT
ttgtgtctgcctaaatttgc

SEQ ID NO: 289692 - DNA, 20 bp, Artificial Sequence
  Description of Artificial Sequence: Synthetic oligonucleotide
  Target: LAMA2; (-) strand; PAM type: YTN; PAM sequence: TTT
tttgtgtctgcctaaatttg

SEQ ID NO: 289693 - DNA, 20 bp, Artificial Sequence
  Description of Artificial Sequence: Synthetic oligonucleotide
  Target: LAMA2; (-) strand; PAM type: YTN; PAM sequence: TTT
ttttgtgtctgcctaaattt

SEQ ID NO: 289694 - DNA, 20 bp, Artificial Sequence
  Description of Artificial Sequence: Synthetic oligonucleotide
  Target: LAMA2; (-) strand; PAM type: YTN; PAM sequence: TTA
tacaaatgtatttttttgtg

SEQ ID NO: 289695 - DNA, 20 bp, Artificial Sequence
  Description of Artificial Sequence: Synthetic oligonucleotide
  Target: LAMA2; (-) strand; PAM type: YTN; PAM sequence: TTT
atacaaatgtatttttttgt

SEQ ID NO: 289696 - DNA, 20 bp, Artificial Sequence
  Description of Artificial Sequence: Synthetic oligonucleotide
  Target: LAMA2; (-) strand; PAM type: YTN; PAM sequence: TTT
tatacaaatgtatttttttg

SEQ ID NO: 289697 - DNA, 20 bp, Artificial Sequence
  Description of Artificial Sequence: Synthetic oligonucleotide
  Target: LAMA2; (-) strand; PAM type: YTN; PAM sequence: CTA
tgtaattttatacaaatgta

SEQ ID NO: 289698 - DNA, 20 bp, Artificial Sequence
  Description of Artificial Sequence: Synthetic oligonucleotide
  Target: LAMA2; (-) strand; PAM type: YTN; PAM sequence: TTC
tatgtaattttatacaaatg

SEQ ID NO: 289699 - DNA, 20 bp, Artificial Sequence
  Description of Artificial Sequence: Synthetic oligonucleotide
  Target: LAMA2; (-) strand; PAM type: YTN; PAM sequence: TTT
ctatgtaattttatacaaat

SEQ ID NO: 289700 - DNA, 20 bp, Artificial Sequence
  Description of Artificial Sequence: Synthetic oligonucleotide
  Target: LAMA2; (-) strand; PAM type: YTN; PAM sequence: TTT
tctatgtaattttatacaaa

SEQ ID NO: 289701 - DNA, 20 bp, Artificial Sequence
  Description of Artificial Sequence: Synthetic oligonucleotide
  Target: LAMA2; (-) strand; PAM type: YTN; PAM sequence: TTA
cattttctatgtaattttat

SEQ ID NO: 289702 - DNA, 20 bp, Artificial Sequence
  Description of Artificial Sequence: Synthetic oligonucleotide
  Target: LAMA2; (-) strand; PAM type: YTN; PAM sequence: TTT
acattttctatgtaatttta

SEQ ID NO: 289703 - DNA, 20 bp, Artificial Sequence
  Description of Artificial Sequence: Synthetic oligonucleotide
  Target: LAMA2; (-) strand; PAM type: YTN; PAM sequence: TTA
gtttacattttctatgtaat

SEQ ID NO: 289704 - DNA, 20 bp, Artificial Sequence
  Description of Artificial Sequence: Synthetic oligonucleotide
  Target: LAMA2; (-) strand; PAM type: YTN; PAM sequence: CTA
tagattagtttacattttct

SEQ ID NO: 289705 - DNA, 20 bp, Artificial Sequence
  Description of Artificial Sequence: Synthetic oligonucleotide
  Target: LAMA2; (-) strand; PAM type: YTN; PAM sequence: CTG
tgactatagattagtttaca

SEQ ID NO: 289706 - DNA, 20 bp, Artificial Sequence
  Description of Artificial Sequence: Synthetic oligonucleotide
  Target: LAMA2; (-) strand; PAM type: YTN; PAM sequence: TTC
tgtgactatagattagttta

SEQ ID NO: 289707 - DNA, 20 bp, Artificial Sequence
  Description of Artificial Sequence: Synthetic oligonucleotide
  Target: LAMA2; (-) strand; PAM type: YTN; PAM sequence: TTT
ctgtgactatagattagttt

SEQ ID NO: 289708 - DNA, 20 bp, Artificial Sequence
  Description of Artificial Sequence: Synthetic oligonucleotide
  Target: LAMA2; (-) strand; PAM type: YTN; PAM sequence: CTT
tctgtgactatagattagtt

SEQ ID NO: 289709 - DNA, 20 bp, Artificial Sequence
  Description of Artificial Sequence: Synthetic oligonucleotide
  Target: LAMA2; (-) strand; PAM type: YTN; PAM sequence: CTG
ctttctgtgactatagatta

SEQ ID NO: 289710 - DNA, 20 bp, Artificial Sequence
  Description of Artificial Sequence: Synthetic oligonucleotide
  Target: LAMA2; (-) strand; PAM type: YTN; PAM sequence: TTC
acaagtagcatccgtctgct

SEQ ID NO: 289711 - DNA, 20 bp, Artificial Sequence
  Description of Artificial Sequence: Synthetic oligonucleotide
  Target: LAMA2; (-) strand; PAM type: YTN; PAM sequence: TTC
gtacatataccattcacaag

SEQ ID NO: 289712 - DNA, 20 bp, Artificial Sequence
  Description of Artificial Sequence: Synthetic oligonucleotide
  Target: LAMA2; (-) strand; PAM type: YTN; PAM sequence: TTT
cgtacatataccattcacaa

SEQ ID NO: 289713 - DNA, 20 bp, Artificial Sequence
  Description of Artificial Sequence: Synthetic oligonucleotide
  Target: LAMA2; (-) strand; PAM type: YTN; PAM sequence: TTT
tcgtacatataccattcaca

SEQ ID NO: 289714 - DNA, 20 bp, Artificial Sequence
  Description of Artificial Sequence: Synthetic oligonucleotide
  Target: LAMA2; (-) strand; PAM type: YTN; PAM sequence: CTT
ttcgtacatataccattcac

SEQ ID NO: 289715 - DNA, 20 bp, Artificial Sequence
  Description of Artificial Sequence: Synthetic oligonucleotide
  Target: LAMA2; (-) strand; PAM type: YTN; PAM sequence: TTG
ccttttcgtacatataccat

SEQ ID NO: 289716 - DNA, 20 bp, Artificial Sequence
  Description of Artificial Sequence: Synthetic oligonucleotide
  Target: LAMA2; (-) strand; PAM type: YTN; PAM sequence: TTT
gccttttcgtacatatacca

SEQ ID NO: 289717 - DNA, 20 bp, Artificial Sequence
  Description of Artificial Sequence: Synthetic oligonucleotide
  Target: LAMA2; (-) strand; PAM type: YTN; PAM sequence: TTT
tgccttttcgtacatatacc

SEQ ID NO: 289718 - DNA, 20 bp, Artificial Sequence
  Description of Artificial Sequence: Synthetic oligonucleotide
  Target: LAMA2; (-) strand; PAM type: YTN; PAM sequence: TTT
ttgccttttcgtacatatac

SEQ ID NO: 289719 - DNA, 20 bp, Artificial Sequence
  Description of Artificial Sequence: Synthetic oligonucleotide
  Target: LAMA2; (-) strand; PAM type: YTN; PAM sequence: CTT
tttgccttttcgtacatata

SEQ ID NO: 289720 - DNA, 20 bp, Artificial Sequence
  Description of Artificial Sequence: Synthetic oligonucleotide
  Target: LAMA2; (-) strand; PAM type: YTN; PAM sequence: CTC
ctttttgccttttcgtacat

SEQ ID NO: 289721 - DNA, 20 bp, Artificial Sequence
  Description of Artificial Sequence: Synthetic oligonucleotide
  Target: LAMA2; (-) strand; PAM type: YTN; PAM sequence: TTG
taatccctcctttttgcctt

SEQ ID NO: 289722 - DNA, 20 bp, Artificial Sequence
  Description of Artificial Sequence: Synthetic oligonucleotide
  Target: LAMA2; (-) strand; PAM type: YTN; PAM sequence: TTT
gtaatccctcctttttgcct

SEQ ID NO: 289723 - DNA, 20 bp, Artificial Sequence
  Description of Artificial Sequence: Synthetic oligonucleotide
  Target: LAMA2; (-) strand; PAM type: YTN; PAM sequence: CTC
atttgtaatccctccttttt

SEQ ID NO: 289724 - DNA, 20 bp, Artificial Sequence
  Description of Artificial Sequence: Synthetic oligonucleotide
  Target: LAMA2; (-) strand; PAM type: YTN; PAM sequence: TTA
tgctcatttgtaatccctcc

SEQ ID NO: 289725 - DNA, 20 bp, Artificial Sequence
  Description of Artificial Sequence: Synthetic oligonucleotide
  Target: LAMA2; (-) strand; PAM type: YTN; PAM sequence: TTT
atgctcatttgtaatccctc

SEQ ID NO: 289726 - DNA, 20 bp, Artificial Sequence
  Description of Artificial Sequence: Synthetic oligonucleotide
  Target: LAMA2; (-) strand; PAM type: YTN; PAM sequence: CTT
tatgctcatttgtaatccct

SEQ ID NO: 289727 - DNA, 20 bp, Artificial Sequence
  Description of Artificial Sequence: Synthetic oligonucleotide
  Target: LAMA2; (-) strand; PAM type: YTN; PAM sequence: TTC
tttatgctcatttgtaatcc

SEQ ID NO: 289728 - DNA, 20 bp, Artificial Sequence
  Description of Artificial Sequence: Synthetic oligonucleotide
  Target: LAMA2; (-) strand; PAM type: YTN; PAM sequence: TTT
ctttatgctcatttgtaatc

SEQ ID NO: 289729 - DNA, 20 bp, Artificial Sequence
  Description of Artificial Sequence: Synthetic oligonucleotide
  Target: LAMA2; (-) strand; PAM type: YTN; PAM sequence: CTC
aatgaacacatccatcaccc

SEQ ID NO: 289730 - DNA, 20 bp, Artificial Sequence
  Description of Artificial Sequence: Synthetic oligonucleotide
  Target: LAMA2; (-) strand; PAM type: YTN; PAM sequence: CTG
cagaaccaccaccacactca

SEQ ID NO: 289731 - DNA, 20 bp, Artificial Sequence
  Description of Artificial Sequence: Synthetic oligonucleotide
  Target: LAMA2; (-) strand; PAM type: YTN; PAM sequence: TTG
tatacacctgcagaaccacc

SEQ ID NO: 289732 - DNA, 20 bp, Artificial Sequence
  Description of Artificial Sequence: Synthetic oligonucleotide
  Target: LAMA2; (-) strand; PAM type: YTN; PAM sequence: TTG
taacatgtaattgtatacac

SEQ ID NO: 289733 - DNA, 20 bp, Artificial Sequence
  Description of Artificial Sequence: Synthetic oligonucleotide
  Target: LAMA2; (-) strand; PAM type: YTN; PAM sequence: TTT
gtaacatgtaattgtataca

SEQ ID NO: 289734 - DNA, 20 bp, Artificial Sequence
  Description of Artificial Sequence: Synthetic oligonucleotide
  Target: LAMA2; (-) strand; PAM type: YTN; PAM sequence: TTA
aaccatgtttgtaacatgta

SEQ ID NO: 289735 - DNA, 20 bp, Artificial Sequence
  Description of Artificial Sequence: Synthetic oligonucleotide
  Target: LAMA2; (-) strand; PAM type: YTN; PAM sequence: TTT
aaaccatgtttgtaacatgt

SEQ ID NO: 289736 - DNA, 20 bp, Artificial Sequence
  Description of Artificial Sequence: Synthetic oligonucleotide
  Target: LAMA2; (-) strand; PAM type: YTN; PAM sequence: CTA
taatttaaaccatgtttgta

SEQ ID NO: 289737 - DNA, 20 bp, Artificial Sequence
  Description of Artificial Sequence: Synthetic oligonucleotide
  Target: LAMA2; (-) strand; PAM type: YTN; PAM sequence: TTA
acatgctataatttaaacca

SEQ ID NO: 289738 - DNA, 20 bp, Artificial Sequence
  Description of Artificial Sequence: Synthetic oligonucleotide
  Target: LAMA2; (-) strand; PAM type: YTN; PAM sequence: CTG
aggaataattaacatgctat

SEQ ID NO: 289739 - DNA, 20 bp, Artificial Sequence
  Description of Artificial Sequence: Synthetic oligonucleotide
  Target: LAMA2; (-) strand; PAM type: YTN; PAM sequence: TTA
ctgaggaataattaacatgc

SEQ ID NO: 289740 - DNA, 20 bp, Artificial Sequence
  Description of Artificial Sequence: Synthetic oligonucleotide
  Target: LAMA2; (-) strand; PAM type: YTN; PAM sequence: TTT
actgaggaataattaacatg

SEQ ID NO: 289741 - DNA, 20 bp, Artificial Sequence
  Description of Artificial Sequence: Synthetic oligonucleotide
  Target: LAMA2; (-) strand; PAM type: YTN; PAM sequence: TTT
tactgaggaataattaacat

SEQ ID NO: 289742 - DNA, 20 bp, Artificial Sequence
  Description of Artificial Sequence: Synthetic oligonucleotide
  Target: LAMA2; (-) strand; PAM type: YTN; PAM sequence: TTA
aaacagttttactgaggaat

SEQ ID NO: 289743 - DNA, 20 bp, Artificial Sequence
  Description of Artificial Sequence: Synthetic oligonucleotide
  Target: LAMA2; (-) strand; PAM type: YTN; PAM sequence: TTT
aaaacagttttactgaggaa

SEQ ID NO: 289744 - DNA, 20 bp, Artificial Sequence
  Description of Artificial Sequence: Synthetic oligonucleotide
  Target: LAMA2; (-) strand; PAM type: YTN; PAM sequence: TTT
taaaacagttttactgagga

SEQ ID NO: 289745 - DNA, 20 bp, Artificial Sequence
  Description of Artificial Sequence: Synthetic oligonucleotide
  Target: LAMA2; (-) strand; PAM type: YTN; PAM sequence: TTT
ttaaaacagttttactgagg

SEQ ID NO: 289746 - DNA, 20 bp, Artificial Sequence
  Description of Artificial Sequence: Synthetic oligonucleotide
  Target: LAMA2; (-) strand; PAM type: YTN; PAM sequence: CTA
tttttaaaacagttttactg

SEQ ID NO: 289747 - DNA, 20 bp, Artificial Sequence
  Description of Artificial Sequence: Synthetic oligonucleotide
  Target: LAMA2; (-) strand; PAM type: YTN; PAM sequence: CTG
tcctatttttaaaacagttt

SEQ ID NO: 289748 - DNA, 20 bp, Artificial Sequence
  Description of Artificial Sequence: Synthetic oligonucleotide
  Target: LAMA2; (-) strand; PAM type: YTN; PAM sequence: CTA
atatctgtcctatttttaaa

SEQ ID NO: 289749 - DNA, 20 bp, Artificial Sequence
  Description of Artificial Sequence: Synthetic oligonucleotide
  Target: LAMA2; (-) strand; PAM type: YTN; PAM sequence: CTC
taatatctgtcctattttta

SEQ ID NO: 289750 - DNA, 20 bp, Artificial Sequence
  Description of Artificial Sequence: Synthetic oligonucleotide
  Target: LAMA2; (-) strand; PAM type: YTN; PAM sequence: CTA
aatacctctaatatctgtcc

SEQ ID NO: 289751 - DNA, 20 bp, Artificial Sequence
  Description of Artificial Sequence: Synthetic oligonucleotide
  Target: LAMA2; (-) strand; PAM type: YTN; PAM sequence: CTC
ctaaatacctctaatatctg

SEQ ID NO: 289752 - DNA, 20 bp, Artificial Sequence
  Description of Artificial Sequence: Synthetic oligonucleotide
  Target: LAMA2; (-) strand; PAM type: YTN; PAM sequence: TTC
tcctaaatacctctaatatc

SEQ ID NO: 289753 - DNA, 20 bp, Artificial Sequence
  Description of Artificial Sequence: Synthetic oligonucleotide
  Target: LAMA2; (-) strand; PAM type: YTN; PAM sequence: CTT
ctcctaaatacctctaatat

SEQ ID NO: 289754 - DNA, 20 bp, Artificial Sequence
  Description of Artificial Sequence: Synthetic oligonucleotide
  Target: LAMA2; (-) strand; PAM type: YTN; PAM sequence: TTC
ttctcctaaatacctctaat

SEQ ID NO: 289755 - DNA, 20 bp, Artificial Sequence
  Description of Artificial Sequence: Synthetic oligonucleotide
  Target: LAMA2; (-) strand; PAM type: YTN; PAM sequence: TTT
cttctcctaaatacctctaa

SEQ ID NO: 289756 - DNA, 20 bp, Artificial Sequence
  Description of Artificial Sequence: Synthetic oligonucleotide
  Target: LAMA2; (-) strand; PAM type: YTN; PAM sequence: CTA
atttcttctcctaaatacct

SEQ ID NO: 289757 - DNA, 20 bp, Artificial Sequence
  Description of Artificial Sequence: Synthetic oligonucleotide
  Target: LAMA2; (-) strand; PAM type: YTN; PAM sequence: TTC
actaatttcttctcctaaat

SEQ ID NO: 289758 - DNA, 20 bp, Artificial Sequence
  Description of Artificial Sequence: Synthetic oligonucleotide
  Target: LAMA2; (-) strand; PAM type: YTN; PAM sequence: CTT
cactaatttcttctcctaaa

SEQ ID NO: 289759 - DNA, 20 bp, Artificial Sequence
  Description of Artificial Sequence: Synthetic oligonucleotide
  Target: LAMA2; (-) strand; PAM type: YTN; PAM sequence: CTA
atcaatcaacagcttcacta

SEQ ID NO: 289760 - DNA, 20 bp, Artificial Sequence
  Description of Artificial Sequence: Synthetic oligonucleotide
  Target: LAMA2; (-) strand; PAM type: YTN; PAM sequence: CTC
accacatctaatcaatcaac

SEQ ID NO: 289761 - DNA, 20 bp, Artificial Sequence
  Description of Artificial Sequence: Synthetic oligonucleotide
  Target: LAMA2; (-) strand; PAM type: YTN; PAM sequence: CTC
ctcaccacatctaatcaatc

SEQ ID NO: 289762 - DNA, 20 bp, Artificial Sequence
  Description of Artificial Sequence: Synthetic oligonucleotide
  Target: LAMA2; (-) strand; PAM type: YTN; PAM sequence: TTC
tcctcaccacatctaatcaa

SEQ ID NO: 289763 - DNA, 20 bp, Artificial Sequence
  Description of Artificial Sequence: Synthetic oligonucleotide
  Target: LAMA2; (-) strand; PAM type: YTN; PAM sequence: TTT
ctcctcaccacatctaatca

SEQ ID NO: 289764 - DNA, 20 bp, Artificial Sequence
  Description of Artificial Sequence: Synthetic oligonucleotide
  Target: LAMA2; (-) strand; PAM type: YTN; PAM sequence: CTT
tctcctcaccacatctaatc

SEQ ID NO: 289765 - DNA, 20 bp, Artificial Sequence
  Description of Artificial Sequence: Synthetic oligonucleotide
  Target: LAMA2; (-) strand; PAM type: YTN; PAM sequence: CTG
actttctcctcaccacatct

SEQ ID NO: 289766 - DNA, 20 bp, Artificial Sequence
  Description of Artificial Sequence: Synthetic oligonucleotide
  Target: LAMA2; (-) strand; PAM type: YTN; PAM sequence: CTA
gagagtcatcctgactttct

SEQ ID NO: 289767 - DNA, 20 bp, Artificial Sequence
  Description of Artificial Sequence: Synthetic oligonucleotide
  Target: LAMA2; (-) strand; PAM type: YTN; PAM sequence: CTA
aactagagagtcatcctgac

SEQ ID NO: 289768 - DNA, 20 bp, Artificial Sequence
  Description of Artificial Sequence: Synthetic oligonucleotide
  Target: LAMA2; (-) strand; PAM type: YTN; PAM sequence: CTA
ctaaactagagagtcatcct

SEQ ID NO: 289769 - DNA, 20 bp, Artificial Sequence
  Description of Artificial Sequence: Synthetic oligonucleotide
  Target: LAMA2; (-) strand; PAM type: YTN; PAM sequence: TTA
tgacccccccacccaatcta

SEQ ID NO: 289770 - DNA, 20 bp, Artificial Sequence
  Description of Artificial Sequence: Synthetic oligonucleotide
  Target: LAMA2; (-) strand; PAM type: YTN; PAM sequence: CTT
atgacccccccacccaatct

SEQ ID NO: 289771 - DNA, 20 bp, Artificial Sequence
  Description of Artificial Sequence: Synthetic oligonucleotide
  Target: LAMA2; (-) strand; PAM type: YTN; PAM sequence: TTG
gtcttatgacccccccaccc

SEQ ID NO: 289772 - DNA, 20 bp, Artificial Sequence
  Description of Artificial Sequence: Synthetic oligonucleotide
  Target: LAMA2; (-) strand; PAM type: YTN; PAM sequence: TTG
ttggtcttatgaccccccca

SEQ ID NO: 289773 - DNA, 20 bp, Artificial Sequence
  Description of Artificial Sequence: Synthetic oligonucleotide
  Target: LAMA2; (-) strand; PAM type: YTN; PAM sequence: TTT
gttggtcttatgaccccccc

SEQ ID NO: 289774 - DNA, 20 bp, Artificial Sequence
  Description of Artificial Sequence: Synthetic oligonucleotide
  Target: LAMA2; (-) strand; PAM type: YTN; PAM sequence: TTT
tgttggtcttatgacccccc

SEQ ID NO: 289775 - DNA, 20 bp, Artificial Sequence
  Description of Artificial Sequence: Synthetic oligonucleotide
  Target: LAMA2; (-) strand; PAM type: YTN; PAM sequence: TTT
ttgttggtcttatgaccccc

SEQ ID NO: 289776 - DNA, 20 bp, Artificial Sequence
  Description of Artificial Sequence: Synthetic oligonucleotide
  Target: LAMA2; (-) strand; PAM type: YTN; PAM sequence: TTT
tttgttggtcttatgacccc

SEQ ID NO: 289777 - DNA, 20 bp, Artificial Sequence
  Description of Artificial Sequence: Synthetic oligonucleotide
  Target: LAMA2; (-) strand; PAM type: YTN; PAM sequence: TTT
ttttgttggtcttatgaccc

SEQ ID NO: 289778 - DNA, 20 bp, Artificial Sequence
  Description of Artificial Sequence: Synthetic oligonucleotide
  Target: LAMA2; (-) strand; PAM type: YTN; PAM sequence: TTT
tttttgttggtcttatgacc

SEQ ID NO: 289779 - DNA, 20 bp, Artificial Sequence
  Description of Artificial Sequence: Synthetic oligonucleotide
  Target: LAMA2; (-) strand; PAM type: YTN; PAM sequence: CTT
ttttttgttggtcttatgac

SEQ ID NO: 289780 - DNA, 20 bp, Artificial Sequence
  Description of Artificial Sequence: Synthetic oligonucleotide
  Target: LAMA2; (-) strand; PAM type: YTN; PAM sequence: TTA
cttttttttgttggtcttat

SEQ ID NO: 289781 - DNA, 20 bp, Artificial Sequence
  Description of Artificial Sequence: Synthetic oligonucleotide
  Target: LAMA2; (-) strand; PAM type: YTN; PAM sequence: CTT
acttttttttgttggtctta

SEQ ID NO: 289782 - DNA, 20 bp, Artificial Sequence
  Description of Artificial Sequence: Synthetic oligonucleotide
  Target: LAMA2; (-) strand; PAM type: YTN; PAM sequence: TTA
acttacttttttttgttggt

SEQ ID NO: 289783 - DNA, 20 bp, Artificial Sequence
  Description of Artificial Sequence: Synthetic oligonucleotide
  Target: LAMA2; (-) strand; PAM type: YTN; PAM sequence: CTT
aacttacttttttttgttgg

SEQ ID NO: 289784 - DNA, 20 bp, Artificial Sequence
  Description of Artificial Sequence: Synthetic oligonucleotide
  Target: LAMA2; (-) strand; PAM type: YTN; PAM sequence: TTA
cttaacttacttttttttgt

SEQ ID NO: 289785 - DNA, 20 bp, Artificial Sequence
  Description of Artificial Sequence: Synthetic oligonucleotide
  Target: LAMA2; (-) strand; PAM type: YTN; PAM sequence: CTG
tattacttaacttacttttt

SEQ ID NO: 289786 - DNA, 20 bp, Artificial Sequence
  Description of Artificial Sequence: Synthetic oligonucleotide
  Target: LAMA2; (-) strand; PAM type: YTN; PAM sequence: CTC
ccaaatctgtattacttaac

SEQ ID NO: 289787 - DNA, 20 bp, Artificial Sequence
  Description of Artificial Sequence: Synthetic oligonucleotide
  Target: LAMA2; (-) strand; PAM type: YTN; PAM sequence: CTA
actcccaaatctgtattact

SEQ ID NO: 289788 - DNA, 20 bp, Artificial Sequence
  Description of Artificial Sequence: Synthetic oligonucleotide
  Target: LAMA2; (-) strand; PAM type: YTN; PAM sequence: TTA
tcatctaactcccaaatctg

SEQ ID NO: 289789 - DNA, 20 bp, Artificial Sequence
  Description of Artificial Sequence: Synthetic oligonucleotide
  Target: LAMA2; (-) strand; PAM type: YTN; PAM sequence: TTC
caaatcaaaataattatcat

SEQ ID NO: 289790 - DNA, 20 bp, Artificial Sequence
  Description of Artificial Sequence: Synthetic oligonucleotide
  Target: LAMA2; (-) strand; PAM type: YTN; PAM sequence: CTA
aacattccaaatcaaaataa

SEQ ID NO: 289791 - DNA, 20 bp, Artificial Sequence
  Description of Artificial Sequence: Synthetic oligonucleotide
  Target: LAMA2; (-) strand; PAM type: YTN; PAM sequence: TTA
agctaaacattccaaatcaa

SEQ ID NO: 289792 - DNA, 20 bp, Artificial Sequence
  Description of Artificial Sequence: Synthetic oligonucleotide
  Target: LAMA2; (-) strand; PAM type: YTN; PAM sequence: TTT
aagctaaacattccaaatca

SEQ ID NO: 289793 - DNA, 20 bp, Artificial Sequence
  Description of Artificial Sequence: Synthetic oligonucleotide
  Target: LAMA2; (-) strand; PAM type: YTN; PAM sequence: CTT
taagctaaacattccaaatc

SEQ ID NO: 289794 - DNA, 20 bp, Artificial Sequence
  Description of Artificial Sequence: Synthetic oligonucleotide
  Target: LAMA2; (-) strand; PAM type: YTN; PAM sequence: TTG
cgtactttaagctaaacatt

SEQ ID NO: 289795 - DNA, 20 bp, Artificial Sequence
  Description of Artificial Sequence: Synthetic oligonucleotide
  Target: LAMA2; (-) strand; PAM type: YTN; PAM sequence: CTT
gcgtactttaagctaaacat

SEQ ID NO: 289796 - DNA, 20 bp, Artificial Sequence
  Description of Artificial Sequence: Synthetic oligonucleotide
  Target: LAMA2; (-) strand; PAM type: YTN; PAM sequence: TTC
cttgcgtactttaagctaaa

SEQ ID NO: 289797 - DNA, 20 bp, Artificial Sequence
  Description of Artificial Sequence: Synthetic oligonucleotide
  Target: LAMA2; (-) strand; PAM type: YTN; PAM sequence: TTT
ccttgcgtactttaagctaa

SEQ ID NO: 289798 - DNA, 20 bp, Artificial Sequence
  Description of Artificial Sequence: Synthetic oligonucleotide
  Target: LAMA2; (-) strand; PAM type: YTN; PAM sequence: TTT
tccttgcgtactttaagcta

SEQ ID NO: 289799 - DNA, 20 bp, Artificial Sequence
  Description of Artificial Sequence: Synthetic oligonucleotide
  Target: LAMA2; (-) strand; PAM type: YTN; PAM sequence: CTA
tattttccttgcgtacttta

SEQ ID NO: 289800 - DNA, 20 bp, Artificial Sequence
  Description of Artificial Sequence: Synthetic oligonucleotide
  Target: LAMA2; (-) strand; PAM type: YTN; PAM sequence: TTC
aacaggtgagacaccatcat

SEQ ID NO: 289801 - DNA, 20 bp, Artificial Sequence
  Description of Artificial Sequence: Synthetic oligonucleotide
  Target: LAMA2; (-) strand; PAM type: YTN; PAM sequence: CTA
aaagtccacattcaacaggt

SEQ ID NO: 289802 - DNA, 20 bp, Artificial Sequence
  Description of Artificial Sequence: Synthetic oligonucleotide
  Target: LAMA2; (-) strand; PAM type: YTN; PAM sequence: TTG
cctaaaagtccacattcaac

SEQ ID NO: 289803 - DNA, 20 bp, Artificial Sequence
  Description of Artificial Sequence: Synthetic oligonucleotide
  Target: LAMA2; (-) strand; PAM type: YTN; PAM sequence: TTT
gcctaaaagtccacattcaa

SEQ ID NO: 289804 - DNA, 20 bp, Artificial Sequence
  Description of Artificial Sequence: Synthetic oligonucleotide
  Target: LAMA2; (-) strand; PAM type: YTN; PAM sequence: TTT
tgcctaaaagtccacattca

SEQ ID NO: 289805 - DNA, 20 bp, Artificial Sequence
  Description of Artificial Sequence: Synthetic oligonucleotide
  Target: LAMA2; (-) strand; PAM type: YTN; PAM sequence: TTT
ttgcctaaaagtccacattc

SEQ ID NO: 289806 - DNA, 20 bp, Artificial Sequence
  Description of Artificial Sequence: Synthetic oligonucleotide
  Target: LAMA2; (-) strand; PAM type: YTN; PAM sequence: CTG
atttttgcctaaaagtccac

SEQ ID NO: 289807 - DNA, 20 bp, Artificial Sequence
  Description of Artificial Sequence: Synthetic oligonucleotide
  Target: LAMA2; (-) strand; PAM type: YTN; PAM sequence: TTG
gacctgatttttgcctaaaa

SEQ ID NO: 289808 - DNA, 20 bp, Artificial Sequence
  Description of Artificial Sequence: Synthetic oligonucleotide
  Target: LAMA2; (-) strand; PAM type: YTN; PAM sequence: CTT
ggacctgatttttgcctaaa

SEQ ID NO: 289809 - DNA, 20 bp, Artificial Sequence
  Description of Artificial Sequence: Synthetic oligonucleotide
  Target: LAMA2; (-) strand; PAM type: YTN; PAM sequence: TTA
aatgtatgtatgcttggacc

SEQ ID NO: 289810 - DNA, 20 bp, Artificial Sequence
  Description of Artificial Sequence: Synthetic oligonucleotide
  Target: LAMA2; (-) strand; PAM type: YTN; PAM sequence: CTT
aaatgtatgtatgcttggac

SEQ ID NO: 289811 - DNA, 20 bp, Artificial Sequence
  Description of Artificial Sequence: Synthetic oligonucleotide
  Target: LAMA2; (-) strand; PAM type: YTN; PAM sequence: TTG
atgacttaaatgtatgtatg

SEQ ID NO: 289812 - DNA, 20 bp, Artificial Sequence
  Description of Artificial Sequence: Synthetic oligonucleotide
  Target: LAMA2; (-) strand; PAM type: YTN; PAM sequence: TTA
caatgtattgatgacttaaa

SEQ ID NO: 289813 - DNA, 20 bp, Artificial Sequence
  Description of Artificial Sequence: Synthetic oligonucleotide
  Target: LAMA2; (-) strand; PAM type: YTN; PAM sequence: CTT
acaatgtattgatgacttaa

SEQ ID NO: 289814 - DNA, 20 bp, Artificial Sequence
  Description of Artificial Sequence: Synthetic oligonucleotide
  Target: LAMA2; (-) strand; PAM type: YTN; PAM sequence: CTA
cttacaatgtattgatgact

SEQ ID NO: 289815 - DNA, 20 bp, Artificial Sequence
  Description of Artificial Sequence: Synthetic oligonucleotide
  Target: LAMA2; (-) strand; PAM type: YTN; PAM sequence: TTA
tatctacttacaatgtattg

SEQ ID NO: 289816 - DNA, 20 bp, Artificial Sequence
  Description of Artificial Sequence: Synthetic oligonucleotide
  Target: LAMA2; (-) strand; PAM type: YTN; PAM sequence: TTT
atatctacttacaatgtatt

SEQ ID NO: 289817 - DNA, 20 bp, Artificial Sequence
  Description of Artificial Sequence: Synthetic oligonucleotide
  Target: LAMA2; (-) strand; PAM type: YTN; PAM sequence: CTC
aagtttatatctacttacaa

SEQ ID NO: 289818 - DNA, 20 bp, Artificial Sequence
  Description of Artificial Sequence: Synthetic oligonucleotide
  Target: LAMA2; (-) strand; PAM type: YTN; PAM sequence: CTG
ggcaaactcaagtttatatc

SEQ ID NO: 289819 - DNA, 20 bp, Artificial Sequence
  Description of Artificial Sequence: Synthetic oligonucleotide
  Target: LAMA2; (-) strand; PAM type: YTN; PAM sequence: TTA
gccatctgggcaaactcaag

SEQ ID NO: 289820 - DNA, 20 bp, Artificial Sequence
  Description of Artificial Sequence: Synthetic oligonucleotide
  Target: LAMA2; (-) strand; PAM type: YTN; PAM sequence: TTT
agccatctgggcaaactcaa

SEQ ID NO: 289821 - DNA, 20 bp, Artificial Sequence
  Description of Artificial Sequence: Synthetic oligonucleotide
  Target: LAMA2; (-) strand; PAM type: YTN; PAM sequence: TTT
tagccatctgggcaaactca

SEQ ID NO: 289822 - DNA, 20 bp, Artificial Sequence
  Description of Artificial Sequence: Synthetic oligonucleotide
  Target: LAMA2; (-) strand; PAM type: YTN; PAM sequence: CTC
aggttttagccatctgggca

SEQ ID NO: 289823 - DNA, 20 bp, Artificial Sequence
  Description of Artificial Sequence: Synthetic oligonucleotide
  Target: LAMA2; (-) strand; PAM type: YTN; PAM sequence: TTG
cccacatctcaggttttagc

SEQ ID NO: 289824 - DNA, 20 bp, Artificial Sequence
  Description of Artificial Sequence: Synthetic oligonucleotide
  Target: LAMA2; (-) strand; PAM type: YTN; PAM sequence: TTT
gcccacatctcaggttttag

SEQ ID NO: 289825 - DNA, 20 bp, Artificial Sequence
  Description of Artificial Sequence: Synthetic oligonucleotide
  Target: LAMA2; (-) strand; PAM type: YTN; PAM sequence: CTT
tgcccacatctcaggtttta

SEQ ID NO: 289826 - DNA, 20 bp, Artificial Sequence
  Description of Artificial Sequence: Synthetic oligonucleotide
  Target: LAMA2; (-) strand; PAM type: YTN; PAM sequence: TTC
ctttgcccacatctcaggtt

SEQ ID NO: 289827 - DNA, 20 bp, Artificial Sequence
  Description of Artificial Sequence: Synthetic oligonucleotide
  Target: LAMA2; (-) strand; PAM type: YTN; PAM sequence: CTT
cctttgcccacatctcaggt

SEQ ID NO: 289828 - DNA, 20 bp, Artificial Sequence
  Description of Artificial Sequence: Synthetic oligonucleotide
  Target: LAMA2; (-) strand; PAM type: YTN; PAM sequence: TTA
taatatcccttcctttgccc

SEQ ID NO: 289829 - DNA, 20 bp, Artificial Sequence
  Description of Artificial Sequence: Synthetic oligonucleotide
  Target: LAMA2; (-) strand; PAM type: YTN; PAM sequence: TTT
ataatatcccttcctttgcc

SEQ ID NO: 289830 - DNA, 20 bp, Artificial Sequence
  Description of Artificial Sequence: Synthetic oligonucleotide
  Target: LAMA2; (-) strand; PAM type: YTN; PAM sequence: TTT
tataatatcccttcctttgc

SEQ ID NO: 289831 - DNA, 20 bp, Artificial Sequence
  Description of Artificial Sequence: Synthetic oligonucleotide
  Target: LAMA2; (-) strand; PAM type: YTN; PAM sequence: TTG
atgttttataatatcccttc

SEQ ID NO: 289832 - DNA, 20 bp, Artificial Sequence
  Description of Artificial Sequence: Synthetic oligonucleotide
  Target: LAMA2; (-) strand; PAM type: YTN; PAM sequence: CTA
aaatgttgatgttttataat

SEQ ID NO: 289833 - DNA, 20 bp, Artificial Sequence
  Description of Artificial Sequence: Synthetic oligonucleotide
  Target: LAMA2; (-) strand; PAM type: YTN; PAM sequence: TTC
taaaatgttgatgttttata

SEQ ID NO: 289834 - DNA, 20 bp, Artificial Sequence
  Description of Artificial Sequence: Synthetic oligonucleotide
  Target: LAMA2; (-) strand; PAM type: YTN; PAM sequence: CTT
ctaaaatgttgatgttttat

SEQ ID NO: 289835 - DNA, 20 bp, Artificial Sequence
  Description of Artificial Sequence: Synthetic oligonucleotide
  Target: LAMA2; (-) strand; PAM type: YTN; PAM sequence: TTG
aacacttctaaaatgttgat

SEQ ID NO: 289836 - DNA, 20 bp, Artificial Sequence
  Description of Artificial Sequence: Synthetic oligonucleotide
  Target: LAMA2; (-) strand; PAM type: YTN; PAM sequence: TTT
gaacacttctaaaatgttga

SEQ ID NO: 289837 - DNA, 20 bp, Artificial Sequence
  Description of Artificial Sequence: Synthetic oligonucleotide
  Target: LAMA2; (-) strand; PAM type: YTN; PAM sequence: TTT
tgaacacttctaaaatgttg

SEQ ID NO: 289838 - DNA, 20 bp, Artificial Sequence
  Description of Artificial Sequence: Synthetic oligonucleotide
  Target: LAMA2; (-) strand; PAM type: YTN; PAM sequence: TTT
ttgaacacttctaaaatgtt

SEQ ID NO: 289839 - DNA, 20 bp, Artificial Sequence
  Description of Artificial Sequence: Synthetic oligonucleotide
  Target: LAMA2; (-) strand; PAM type: YTN; PAM sequence: CTA
tttttgaacacttctaaaat

SEQ ID NO: 289840 - DNA, 20 bp, Artificial Sequence
  Description of Artificial Sequence: Synthetic oligonucleotide
  Target: LAMA2; (-) strand; PAM type: YTN; PAM sequence: CTG
gggtctatttttgaacactt

SEQ ID NO: 289841 - DNA, 20 bp, Artificial Sequence
  Description of Artificial Sequence: Synthetic oligonucleotide
  Target: LAMA2; (-) strand; PAM type: YTN; PAM sequence: CTA
ccctggggtctatttttgaa

SEQ ID NO: 289842 - DNA, 20 bp, Artificial Sequence
  Description of Artificial Sequence: Synthetic oligonucleotide
  Target: LAMA2; (-) strand; PAM type: YTN; PAM sequence: CTC
ctaccctggggtctattttt

SEQ ID NO: 289843 - DNA, 20 bp, Artificial Sequence
  Description of Artificial Sequence: Synthetic oligonucleotide
  Target: LAMA2; (-) strand; PAM type: YTN; PAM sequence: CTC
aatctcctaccctggggtct

SEQ ID NO: 289844 - DNA, 20 bp, Artificial Sequence
  Description of Artificial Sequence: Synthetic oligonucleotide
  Target: LAMA2; (-) strand; PAM type: YTN; PAM sequence: TTC
tcaatctcctaccctggggt

SEQ ID NO: 289845 - DNA, 20 bp, Artificial Sequence
  Description of Artificial Sequence: Synthetic oligonucleotide
  Target: LAMA2; (-) strand; PAM type: YTN; PAM sequence: TTC
attctcaatctcctaccctg

SEQ ID NO: 289846 - DNA, 20 bp, Artificial Sequence
  Description of Artificial Sequence: Synthetic oligonucleotide
  Target: LAMA2; (-) strand; PAM type: YTN; PAM sequence: TTT
cattctcaatctcctaccct

SEQ ID NO: 289847 - DNA, 20 bp, Artificial Sequence
  Description of Artificial Sequence: Synthetic oligonucleotide
  Target: LAMA2; (-) strand; PAM type: YTN; PAM sequence: CTT
tcattctcaatctcctaccc

SEQ ID NO: 289848 - DNA, 20 bp, Artificial Sequence
  Description of Artificial Sequence: Synthetic oligonucleotide
  Target: LAMA2; (-) strand; PAM type: YTN; PAM sequence: TTA
cctttcattctcaatctcct

SEQ ID NO: 289849 - DNA, 20 bp, Artificial Sequence
  Description of Artificial Sequence: Synthetic oligonucleotide
  Target: LAMA2; (-) strand; PAM type: YTN; PAM sequence: TTT
acctttcattctcaatctcc

SEQ ID NO: 289850 - DNA, 20 bp, Artificial Sequence
  Description of Artificial Sequence: Synthetic oligonucleotide
  Target: LAMA2; (-) strand; PAM type: YTN; PAM sequence: TTT
tacctttcattctcaatctc

SEQ ID NO: 289851 - DNA, 20 bp, Artificial Sequence
  Description of Artificial Sequence: Synthetic oligonucleotide
  Target: LAMA2; (-) strand; PAM type: YTN; PAM sequence: CTT
ttacctttcattctcaatct

SEQ ID NO: 289852 - DNA, 20 bp, Artificial Sequence
  Description of Artificial Sequence: Synthetic oligonucleotide
  Target: LAMA2; (-) strand; PAM type: YTN; PAM sequence: TTC
ttttacctttcattctcaat

SEQ ID NO: 289853 - DNA, 20 bp, Artificial Sequence
  Description of Artificial Sequence: Synthetic oligonucleotide
  Target: LAMA2; (-) strand; PAM type: YTN; PAM sequence: CTT
cttttacctttcattctcaa

SEQ ID NO: 289854 - DNA, 20 bp, Artificial Sequence
  Description of Artificial Sequence: Synthetic oligonucleotide
  Target: LAMA2; (-) strand; PAM type: YTN; PAM sequence: CTG
gcttcttttacctttcattc

SEQ ID NO: 289855 - DNA, 20 bp, Artificial Sequence
  Description of Artificial Sequence: Synthetic oligonucleotide
  Target: LAMA2; (-) strand; PAM type: YTN; PAM sequence: CTC
tggcttcttttacctttcat

SEQ ID NO: 289856 - DNA, 20 bp, Artificial Sequence
  Description of Artificial Sequence: Synthetic oligonucleotide
  Target: LAMA2; (-) strand; PAM type: YTN; PAM sequence: CTC
tctggcttcttttacctttc

SEQ ID NO: 289857 - DNA, 20 bp, Artificial Sequence
  Description of Artificial Sequence: Synthetic oligonucleotide
  Target: LAMA2; (-) strand; PAM type: YTN; PAM sequence: TTC
cataatgtcaagctctctgg

SEQ ID NO: 289858 - DNA, 20 bp, Artificial Sequence
  Description of Artificial Sequence: Synthetic oligonucleotide
  Target: LAMA2; (-) strand; PAM type: YTN; PAM sequence: CTT
ccataatgtcaagctctctg

SEQ ID NO: 289859 - DNA, 20 bp, Artificial Sequence
  Description of Artificial Sequence: Synthetic oligonucleotide
  Target: LAMA2; (-) strand; PAM type: YTN; PAM sequence: CTG
gcttccataatgtcaagctc

SEQ ID NO: 289860 - DNA, 20 bp, Artificial Sequence
  Description of Artificial Sequence: Synthetic oligonucleotide
  Target: LAMA2; (-) strand; PAM type: YTN; PAM sequence: TTC
tggcttccataatgtcaagc

SEQ ID NO: 289861 - DNA, 20 bp, Artificial Sequence
  Description of Artificial Sequence: Synthetic oligonucleotide
  Target: LAMA2; (-) strand; PAM type: YTN; PAM sequence: CTT
ctggcttccataatgtcaag

SEQ ID NO: 289862 - DNA, 20 bp, Artificial Sequence
  Description of Artificial Sequence: Synthetic oligonucleotide
  Target: LAMA2; (-) strand; PAM type: YTN; PAM sequence: TTC
ttctggcttccataatgtca

SEQ ID NO: 289863 - DNA, 20 bp, Artificial Sequence
  Description of Artificial Sequence: Synthetic oligonucleotide
  Target: LAMA2; (-) strand; PAM type: YTN; PAM sequence: TTT
cttctggcttccataatgtc

SEQ ID NO: 289864 - DNA, 20 bp, Artificial Sequence
  Description of Artificial Sequence: Synthetic oligonucleotide
  Target: LAMA2; (-) strand; PAM type: YTN; PAM sequence: CTA
taggaaatttcttctggctt

SEQ ID NO: 289865 - DNA, 20 bp, Artificial Sequence
  Description of Artificial Sequence: Synthetic oligonucleotide
  Target: LAMA2; (-) strand; PAM type: YTN; PAM sequence: TTC
cctataggaaatttcttctg

SEQ ID NO: 289866 - DNA, 20 bp, Artificial Sequence
  Description of Artificial Sequence: Synthetic oligonucleotide
  Target: LAMA2; (-) strand; PAM type: YTN; PAM sequence: CTT
ccctataggaaatttcttct

SEQ ID NO: 289867 - DNA, 20 bp, Artificial Sequence
  Description of Artificial Sequence: Synthetic oligonucleotide
  Target: LAMA2; (-) strand; PAM type: YTN; PAM sequence: TTC
cttccctataggaaatttct

SEQ ID NO: 289868 - DNA, 20 bp, Artificial Sequence
  Description of Artificial Sequence: Synthetic oligonucleotide
  Target: LAMA2; (-) strand; PAM type: YTN; PAM sequence: TTT
ccttccctataggaaatttc

SEQ ID NO: 289869 - DNA, 20 bp, Artificial Sequence
  Description of Artificial Sequence: Synthetic oligonucleotide
  Target: LAMA2; (-) strand; PAM type: YTN; PAM sequence: TTA
gcatttccttccctatagga

SEQ ID NO: 289870 - DNA, 20 bp, Artificial Sequence
  Description of Artificial Sequence: Synthetic oligonucleotide
  Target: LAMA2; (-) strand; PAM type: YTN; PAM sequence: CTG
ttagcatttccttccctata

SEQ ID NO: 289871 - DNA, 20 bp, Artificial Sequence
  Description of Artificial Sequence: Synthetic oligonucleotide
  Target: LAMA2; (-) strand; PAM type: YTN; PAM sequence: TTA
atgctgttagcatttccttc

SEQ ID NO: 289872 - DNA, 20 bp, Artificial Sequence
  Description of Artificial Sequence: Synthetic oligonucleotide
  Target: LAMA2; (-) strand; PAM type: YTN; PAM sequence: TTT
aatgctgttagcatttcctt

SEQ ID NO: 289873 - DNA, 20 bp, Artificial Sequence
  Description of Artificial Sequence: Synthetic oligonucleotide
  Target: LAMA2; (-) strand; PAM type: YTN; PAM sequence: TTG
tgcaatatttaatgctgtta

SEQ ID NO: 289874 - DNA, 20 bp, Artificial Sequence
  Description of Artificial Sequence: Synthetic oligonucleotide
  Target: LAMA2; (-) strand; PAM type: YTN; PAM sequence: TTT
gtgcaatatttaatgctgtt

SEQ ID NO: 289875 - DNA, 20 bp, Artificial Sequence
  Description of Artificial Sequence: Synthetic oligonucleotide
  Target: LAMA2; (-) strand; PAM type: YTN; PAM sequence: TTC
atgtttgtgcaatatttaat

SEQ ID NO: 289876 - DNA, 20 bp, Artificial Sequence
  Description of Artificial Sequence: Synthetic oligonucleotide
  Target: LAMA2; (-) strand; PAM type: YTN; PAM sequence: CTG
aattcatgtttgtgcaatat

SEQ ID NO: 289877 - DNA, 20 bp, Artificial Sequence
  Description of Artificial Sequence: Synthetic oligonucleotide
  Target: LAMA2; (-) strand; PAM type: YTN; PAM sequence: TTA
tctgaattcatgtttgtgca

SEQ ID NO: 289878 - DNA, 20 bp, Artificial Sequence
  Description of Artificial Sequence: Synthetic oligonucleotide
  Target: LAMA2; (-) strand; PAM type: YTN; PAM sequence: TTT
atctgaattcatgtttgtgc

SEQ ID NO: 289879 - DNA, 20 bp, Artificial Sequence
  Description of Artificial Sequence: Synthetic oligonucleotide
  Target: LAMA2; (-) strand; PAM type: YTN; PAM sequence: CTT
tatctgaattcatgtttgtg

SEQ ID NO: 289880 - DNA, 20 bp, Artificial Sequence
  Description of Artificial Sequence: Synthetic oligonucleotide
  Target: LAMA2; (-) strand; PAM type: YTN; PAM sequence: TTA
aactttatctgaattcatgt

SEQ ID NO: 289881 - DNA, 20 bp, Artificial Sequence
  Description of Artificial Sequence: Synthetic oligonucleotide
  Target: LAMA2; (-) strand; PAM type: YTN; PAM sequence: TTT
aaactttatctgaattcatg

SEQ ID NO: 289882 - DNA, 20 bp, Artificial Sequence
  Description of Artificial Sequence: Synthetic oligonucleotide
  Target: LAMA2; (-) strand; PAM type: YTN; PAM sequence: TTT
taaactttatctgaattcat

SEQ ID NO: 289883 - DNA, 20 bp, Artificial Sequence
  Description of Artificial Sequence: Synthetic oligonucleotide
  Target: LAMA2; (-) strand; PAM type: YTN; PAM sequence: CTT
ttaaactttatctgaattca

SEQ ID NO: 289884 - DNA, 20 bp, Artificial Sequence
  Description of Artificial Sequence: Synthetic oligonucleotide
  Target: LAMA2; (-) strand; PAM type: YTN; PAM sequence: TTC
ttttaaactttatctgaatt

SEQ ID NO: 289885 - DNA, 20 bp, Artificial Sequence
  Description of Artificial Sequence: Synthetic oligonucleotide
  Target: LAMA2; (-) strand; PAM type: YTN; PAM sequence: CTC
agtggagttcttttaaactt

SEQ ID NO: 289886 - DNA, 20 bp, Artificial Sequence
  Description of Artificial Sequence: Synthetic oligonucleotide
  Target: LAMA2; (-) strand; PAM type: YTN; PAM sequence: CTA
tacccaaactcagtggagtt

SEQ ID NO: 289887 - DNA, 20 bp, Artificial Sequence
  Description of Artificial Sequence: Synthetic oligonucleotide
  Target: LAMA2; (-) strand; PAM type: YTN; PAM sequence: CTG
cctatacccaaactcagtgg

SEQ ID NO: 289888 - DNA, 20 bp, Artificial Sequence
  Description of Artificial Sequence: Synthetic oligonucleotide
  Target: LAMA2; (-) strand; PAM type: YTN; PAM sequence: CTC
agggacctgcctatacccaa

SEQ ID NO: 289889 - DNA, 20 bp, Artificial Sequence
  Description of Artificial Sequence: Synthetic oligonucleotide
  Target: LAMA2; (-) strand; PAM type: YTN; PAM sequence: CTA
aagtcctcagggacctgcct

SEQ ID NO: 289890 - DNA, 20 bp, Artificial Sequence
  Description of Artificial Sequence: Synthetic oligonucleotide
  Target: LAMA2; (-) strand; PAM type: YTN; PAM sequence: TTG
ctaaagtcctcagggacctg

SEQ ID NO: 289891 - DNA, 20 bp, Artificial Sequence
  Description of Artificial Sequence: Synthetic oligonucleotide
  Target: LAMA2; (-) strand; PAM type: YTN; PAM sequence: CTT
gctaaagtcctcagggacct

SEQ ID NO: 289892 - DNA, 20 bp, Artificial Sequence
  Description of Artificial Sequence: Synthetic oligonucleotide
  Target: LAMA2; (-) strand; PAM type: YTN; PAM sequence: CTG
gtcttgctaaagtcctcagg

SEQ ID NO: 289893 - DNA, 20 bp, Artificial Sequence
  Description of Artificial Sequence: Synthetic oligonucleotide
  Target: LAMA2; (-) strand; PAM type: YTN; PAM sequence: CTC
tggtcttgctaaagtcctca

SEQ ID NO: 289894 - DNA, 20 bp, Artificial Sequence
  Description of Artificial Sequence: Synthetic oligonucleotide
  Target: LAMA2; (-) strand; PAM type: YTN; PAM sequence: CTG
tcatctctggtcttgctaaa

SEQ ID NO: 289895 - DNA, 20 bp, Artificial Sequence
  Description of Artificial Sequence: Synthetic oligonucleotide
  Target: LAMA2; (-) strand; PAM type: YTN; PAM sequence: CTC
tgtcatctctggtcttgcta

SEQ ID NO: 289896 - DNA, 20 bp, Artificial Sequence
  Description of Artificial Sequence: Synthetic oligonucleotide
  Target: LAMA2; (-) strand; PAM type: YTN; PAM sequence: CTA
ctctgtcatctctggtcttg

SEQ ID NO: 289897 - DNA, 20 bp, Artificial Sequence
  Description of Artificial Sequence: Synthetic oligonucleotide
  Target: LAMA2; (-) strand; PAM type: YTN; PAM sequence: CTC
ccactactctgtcatctctg

SEQ ID NO: 289898 - DNA, 20 bp, Artificial Sequence
  Description of Artificial Sequence: Synthetic oligonucleotide
  Target: LAMA2; (-) strand; PAM type: YTN; PAM sequence: CTC
tcccactactctgtcatctc

SEQ ID NO: 289899 - DNA, 20 bp, Artificial Sequence
  Description of Artificial Sequence: Synthetic oligonucleotide
  Target: LAMA2; (-) strand; PAM type: YTN; PAM sequence: TTC
ctctcccactactctgtcat

SEQ ID NO: 289900 - DNA, 20 bp, Artificial Sequence
  Description of Artificial Sequence: Synthetic oligonucleotide
  Target: LAMA2; (-) strand; PAM type: YTN; PAM sequence: TTC
aattcctctcccactactct

SEQ ID NO: 289901 - DNA, 20 bp, Artificial Sequence
  Description of Artificial Sequence: Synthetic oligonucleotide
  Target: LAMA2; (-) strand; PAM type: YTN; PAM sequence: TTT
caattcctctcccactactc

SEQ ID NO: 289902 - DNA, 20 bp, Artificial Sequence
  Description of Artificial Sequence: Synthetic oligonucleotide
  Target: LAMA2; (-) strand; PAM type: YTN; PAM sequence: TTA
tttcaattcctctcccacta

SEQ ID NO: 289903 - DNA, 20 bp, Artificial Sequence
  Description of Artificial Sequence: Synthetic oligonucleotide
  Target: LAMA2; (-) strand; PAM type: YTN; PAM sequence: CTT
atttcaattcctctcccact

SEQ ID NO: 289904 - DNA, 20 bp, Artificial Sequence
  Description of Artificial Sequence: Synthetic oligonucleotide
  Target: LAMA2; (-) strand; PAM type: YTN; PAM sequence: CTG
gagccttatttcaattcctc

SEQ ID NO: 289905 - DNA, 20 bp, Artificial Sequence
  Description of Artificial Sequence: Synthetic oligonucleotide
  Target: LAMA2; (-) strand; PAM type: YTN; PAM sequence: TTG
ctggagccttatttcaattc

SEQ ID NO: 289906 - DNA, 20 bp, Artificial Sequence
  Description of Artificial Sequence: Synthetic oligonucleotide
  Target: LAMA2; (-) strand; PAM type: YTN; PAM sequence: CTG
aaaaggagcaatcatccaca

SEQ ID NO: 289907 - DNA, 20 bp, Artificial Sequence
  Description of Artificial Sequence: Synthetic oligonucleotide
  Target: LAMA2; (-) strand; PAM type: YTN; PAM sequence: CTG
gtcactgaaaaggagcaatc

SEQ ID NO: 289908 - DNA, 20 bp, Artificial Sequence
  Description of Artificial Sequence: Synthetic oligonucleotide
  Target: LAMA2; (-) strand; PAM type: YTN; PAM sequence: TTC
atataaaacaaataatctgg

SEQ ID NO: 289909 - DNA, 20 bp, Artificial Sequence
  Description of Artificial Sequence: Synthetic oligonucleotide
  Target: LAMA2; (-) strand; PAM type: YTN; PAM sequence: TTG
agaataattcatataaaaca

SEQ ID NO: 289910 - DNA, 20 bp, Artificial Sequence
  Description of Artificial Sequence: Synthetic oligonucleotide
  Target: LAMA2; (-) strand; PAM type: YTN; PAM sequence: CTA
gttgagaataattcatataa

SEQ ID NO: 289911 - DNA, 20 bp, Artificial Sequence
  Description of Artificial Sequence: Synthetic oligonucleotide
  Target: LAMA2; (-) strand; PAM type: YTN; PAM sequence: TTG
ccaactagttgagaataatt

SEQ ID NO: 289912 - DNA, 20 bp, Artificial Sequence
  Description of Artificial Sequence: Synthetic oligonucleotide
  Target: LAMA2; (-) strand; PAM type: YTN; PAM sequence: CTT
gccaactagttgagaataat

SEQ ID NO: 289913 - DNA, 20 bp, Artificial Sequence
  Description of Artificial Sequence: Synthetic oligonucleotide
  Target: LAMA2; (-) strand; PAM type: YTN; PAM sequence: CTC
ttgccaactagttgagaata

SEQ ID NO: 289914 - DNA, 20 bp, Artificial Sequence
  Description of Artificial Sequence: Synthetic oligonucleotide
  Target: LAMA2; (-) strand; PAM type: YTN; PAM sequence: TTC
aagagacagtgctcttgcca

SEQ ID NO: 289915 - DNA, 20 bp, Artificial Sequence
  Description of Artificial Sequence: Synthetic oligonucleotide
  Target: LAMA2; (-) strand; PAM type: YTN; PAM sequence: TTT
caagagacagtgctcttgcc

SEQ ID NO: 289916 - DNA, 20 bp, Artificial Sequence
  Description of Artificial Sequence: Synthetic oligonucleotide
  Target: LAMA2; (-) strand; PAM type: YTN; PAM sequence: TTG
aatttcaagagacagtgctc

SEQ ID NO: 289917 - DNA, 20 bp, Artificial Sequence
  Description of Artificial Sequence: Synthetic oligonucleotide
  Target: LAMA2; (-) strand; PAM type: YTN; PAM sequence: CTT
gaatttcaagagacagtgct

SEQ ID NO: 289918 - DNA, 20 bp, Artificial Sequence
  Description of Artificial Sequence: Synthetic oligonucleotide
  Target: LAMA2; (-) strand; PAM type: YTN; PAM sequence: CTG
tacttgaatttcaagagaca

SEQ ID NO: 289919 - DNA, 20 bp, Artificial Sequence
  Description of Artificial Sequence: Synthetic oligonucleotide
  Target: LAMA2; (-) strand; PAM type: YTN; PAM sequence: CTG
aaggactgtacttgaatttc

SEQ ID NO: 289920 - DNA, 20 bp, Artificial Sequence
  Description of Artificial Sequence: Synthetic oligonucleotide
  Target: LAMA2; (-) strand; PAM type: YTN; PAM sequence: CTC
ctgaaggactgtacttgaat

SEQ ID NO: 289921 - DNA, 20 bp, Artificial Sequence
  Description of Artificial Sequence: Synthetic oligonucleotide
  Target: LAMA2; (-) strand; PAM type: YTN; PAM sequence: CTC
aagaaagatggggaacactc

SEQ ID NO: 289922 - DNA, 20 bp, Artificial Sequence
  Description of Artificial Sequence: Synthetic oligonucleotide
  Target: LAMA2; (-) strand; PAM type: YTN; PAM sequence: CTG
actcaagaaagatggggaac

SEQ ID NO: 289923 - DNA, 20 bp, Artificial Sequence
  Description of Artificial Sequence: Synthetic oligonucleotide
  Target: LAMA2; (-) strand; PAM type: YTN; PAM sequence: CTG
taactgactcaagaaagatg

SEQ ID NO: 289924 - DNA, 20 bp, Artificial Sequence
  Description of Artificial Sequence: Synthetic oligonucleotide
  Target: LAMA2; (-) strand; PAM type: YTN; PAM sequence: TTC
tgtaactgactcaagaaaga

SEQ ID NO: 289925 - DNA, 20 bp, Artificial Sequence
  Description of Artificial Sequence: Synthetic oligonucleotide
  Target: LAMA2; (-) strand; PAM type: YTN; PAM sequence: CTG
tggttctgtaactgactcaa

SEQ ID NO: 289926 - DNA, 20 bp, Artificial Sequence
  Description of Artificial Sequence: Synthetic oligonucleotide
  Target: LAMA2; (-) strand; PAM type: YTN; PAM sequence: CTG
tcagggactgtggttctgta

SEQ ID NO: 289927 - DNA, 20 bp, Artificial Sequence
  Description of Artificial Sequence: Synthetic oligonucleotide
  Target: LAMA2; (-) strand; PAM type: YTN; PAM sequence: TTC
tgtcagggactgtggttctg

SEQ ID NO: 289928 - DNA, 20 bp, Artificial Sequence
  Description of Artificial Sequence: Synthetic oligonucleotide
  Target: LAMA2; (-) strand; PAM type: YTN; PAM sequence: CTT
ctgtcagggactgtggttct

SEQ ID NO: 289929 - DNA, 20 bp, Artificial Sequence
  Description of Artificial Sequence: Synthetic oligonucleotide
  Target: LAMA2; (-) strand; PAM type: YTN; PAM sequence: TTA
ggggatagggcacacttctg

SEQ ID NO: 289930 - DNA, 20 bp, Artificial Sequence
  Description of Artificial Sequence: Synthetic oligonucleotide
  Target: LAMA2; (-) strand; PAM type: YTN; PAM sequence: TTT
aggggatagggcacacttct

SEQ ID NO: 289931 - DNA, 20 bp, Artificial Sequence
  Description of Artificial Sequence: Synthetic oligonucleotide
  Target: LAMA2; (-) strand; PAM type: YTN; PAM sequence: TTG
atgcatttaggggatagggc

SEQ ID NO: 289932 - DNA, 20 bp, Artificial Sequence
  Description of Artificial Sequence: Synthetic oligonucleotide
  Target: LAMA2; (-) strand; PAM type: YTN; PAM sequence: CTT
gatgcatttaggggataggg

SEQ ID NO: 289933 - DNA, 20 bp, Artificial Sequence
  Description of Artificial Sequence: Synthetic oligonucleotide
  Target: LAMA2; (-) strand; PAM type: YTN; PAM sequence: CTA
cttgatgcatttaggggata

SEQ ID NO: 289934 - DNA, 20 bp, Artificial Sequence
  Description of Artificial Sequence: Synthetic oligonucleotide
  Target: LAMA2; (-) strand; PAM type: YTN; PAM sequence: TTG
catcctacttgatgcattta

SEQ ID NO: 289935 - DNA, 20 bp, Artificial Sequence
  Description of Artificial Sequence: Synthetic oligonucleotide
  Target: LAMA2; (-) strand; PAM type: YTN; PAM sequence: TTT
gcatcctacttgatgcattt

SEQ ID NO: 289936 - DNA, 20 bp, Artificial Sequence
  Description of Artificial Sequence: Synthetic oligonucleotide
  Target: LAMA2; (-) strand; PAM type: YTN; PAM sequence: CTT
tgcatcctacttgatgcatt

SEQ ID NO: 289937 - DNA, 20 bp, Artificial Sequence
  Description of Artificial Sequence: Synthetic oligonucleotide
  Target: LAMA2; (-) strand; PAM type: YTN; PAM sequence: CTC
aactttgcatcctacttgat

SEQ ID NO: 289938 - DNA, 20 bp, Artificial Sequence
  Description of Artificial Sequence: Synthetic oligonucleotide
  Target: LAMA2; (-) strand; PAM type: YTN; PAM sequence: TTC
tcaactttgcatcctacttg

SEQ ID NO: 289939 - DNA, 20 bp, Artificial Sequence
  Description of Artificial Sequence: Synthetic oligonucleotide
  Target: LAMA2; (-) strand; PAM type: YTN; PAM sequence: TTG
agtgttctcaactttgcatc

SEQ ID NO: 289940 - DNA, 20 bp, Artificial Sequence
  Description of Artificial Sequence: Synthetic oligonucleotide
  Target: LAMA2; (-) strand; PAM type: YTN; PAM sequence: CTA
attgagtgttctcaactttg

SEQ ID NO: 289941 - DNA, 20 bp, Artificial Sequence
  Description of Artificial Sequence: Synthetic oligonucleotide
  Target: LAMA2; (-) strand; PAM type: YTN; PAM sequence: CTG
aaaatctaattgagtgttct

SEQ ID NO: 289942 - DNA, 20 bp, Artificial Sequence
  Description of Artificial Sequence: Synthetic oligonucleotide
  Target: LAMA2; (-) strand; PAM type: YTN; PAM sequence: TTG
atccactgaaaatctaattg

SEQ ID NO: 289943 - DNA, 20 bp, Artificial Sequence
  Description of Artificial Sequence: Synthetic oligonucleotide
  Target: LAMA2; (-) strand; PAM type: YTN; PAM sequence: CTT
gatccactgaaaatctaatt

SEQ ID NO: 289944 - DNA, 20 bp, Artificial Sequence
  Description of Artificial Sequence: Synthetic oligonucleotide
  Target: LAMA2; (-) strand; PAM type: YTN; PAM sequence: TTC
ttgatccactgaaaatctaa

SEQ ID NO: 289945 - DNA, 20 bp, Artificial Sequence
  Description of Artificial Sequence: Synthetic oligonucleotide
  Target: LAMA2; (-) strand; PAM type: YTN; PAM sequence: TTT
cttgatccactgaaaatcta

SEQ ID NO: 289946 - DNA, 20 bp, Artificial Sequence
  Description of Artificial Sequence: Synthetic oligonucleotide
  Target: LAMA2; (-) strand; PAM type: YTN; PAM sequence: CTT
tcttgatccactgaaaatct

SEQ ID NO: 289947 - DNA, 20 bp, Artificial Sequence
  Description of Artificial Sequence: Synthetic oligonucleotide
  Target: LAMA2; (-) strand; PAM type: YTN; PAM sequence: CTC
tttcttgatccactgaaaat

SEQ ID NO: 289948 - DNA, 20 bp, Artificial Sequence
  Description of Artificial Sequence: Synthetic oligonucleotide
  Target: LAMA2; (-) strand; PAM type: YTN; PAM sequence: TTC
tctttcttgatccactgaaa

SEQ ID NO: 289949 - DNA, 20 bp, Artificial Sequence
  Description of Artificial Sequence: Synthetic oligonucleotide
  Target: LAMA2; (-) strand; PAM type: YTN; PAM sequence: TTG
ttctctttcttgatccactg

SEQ ID NO: 289950 - DNA, 20 bp, Artificial Sequence
  Description of Artificial Sequence: Synthetic oligonucleotide
  Target: LAMA2; (-) strand; PAM type: YTN; PAM sequence: TTT
gttctctttcttgatccact

SEQ ID NO: 289951 - DNA, 20 bp, Artificial Sequence
  Description of Artificial Sequence: Synthetic oligonucleotide
  Target: LAMA2; (-) strand; PAM type: YTN; PAM sequence: TTT
tgttctctttcttgatccac

SEQ ID NO: 289952 - DNA, 20 bp, Artificial Sequence
  Description of Artificial Sequence: Synthetic oligonucleotide
  Target: LAMA2; (-) strand; PAM type: YTN; PAM sequence: CTT
ttgttctctttcttgatcca

SEQ ID NO: 289953 - DNA, 20 bp, Artificial Sequence
  Description of Artificial Sequence: Synthetic oligonucleotide
  Target: LAMA2; (-) strand; PAM type: YTN; PAM sequence: TTC
ttttgttctctttcttgatc

SEQ ID NO: 289954 - DNA, 20 bp, Artificial Sequence
  Description of Artificial Sequence: Synthetic oligonucleotide
  Target: LAMA2; (-) strand; PAM type: YTN; PAM sequence: TTA
ttcttttgttctctttcttg

SEQ ID NO: 289955 - DNA, 20 bp, Artificial Sequence
  Description of Artificial Sequence: Synthetic oligonucleotide
  Target: LAMA2; (-) strand; PAM type: YTN; PAM sequence: CTA
ttattcttttgttctctttc

SEQ ID NO: 289956 - DNA, 20 bp, Artificial Sequence
  Description of Artificial Sequence: Synthetic oligonucleotide
  Target: LAMA2; (-) strand; PAM type: YTN; PAM sequence: TTG
gctattattcttttgttctc

SEQ ID NO: 289957 - DNA, 20 bp, Artificial Sequence
  Description of Artificial Sequence: Synthetic oligonucleotide
  Target: LAMA2; (-) strand; PAM type: YTN; PAM sequence: TTT
ggctattattcttttgttct

SEQ ID NO: 289958 - DNA, 20 bp, Artificial Sequence
  Description of Artificial Sequence: Synthetic oligonucleotide
  Target: LAMA2; (-) strand; PAM type: YTN; PAM sequence: CTT
tggctattattcttttgttc

SEQ ID NO: 289959 - DNA, 20 bp, Artificial Sequence
  Description of Artificial Sequence: Synthetic oligonucleotide
  Target: LAMA2; (-) strand; PAM type: YTN; PAM sequence: TTA
ctttggctattattcttttg

SEQ ID NO: 289960 - DNA, 20 bp, Artificial Sequence
  Description of Artificial Sequence: Synthetic oligonucleotide
  Target: LAMA2; (-) strand; PAM type: YTN; PAM sequence: TTT
actttggctattattctttt

SEQ ID NO: 289961 - DNA, 20 bp, Artificial Sequence
  Description of Artificial Sequence: Synthetic oligonucleotide
  Target: LAMA2; (-) strand; PAM type: YTN; PAM sequence: TTT
tactttggctattattcttt

SEQ ID NO: 289962 - DNA, 20 bp, Artificial Sequence
  Description of Artificial Sequence: Synthetic oligonucleotide
  Target: LAMA2; (-) strand; PAM type: YTN; PAM sequence: TTT
ttactttggctattattctt

SEQ ID NO: 289963 - DNA, 20 bp, Artificial Sequence
  Description of Artificial Sequence: Synthetic oligonucleotide
  Target: LAMA2; (-) strand; PAM type: YTN; PAM sequence: CTA
agtgtttttactttggctat

SEQ ID NO: 289964 - DNA, 20 bp, Artificial Sequence
  Description of Artificial Sequence: Synthetic oligonucleotide
  Target: LAMA2; (-) strand; PAM type: YTN; PAM sequence: TTA
taagctaagtgtttttactt

SEQ ID NO: 289965 - DNA, 20 bp, Artificial Sequence
  Description of Artificial Sequence: Synthetic oligonucleotide
  Target: LAMA2; (-) strand; PAM type: YTN; PAM sequence: TTG
ttataagctaagtgttttta

SEQ ID NO: 289966 - DNA, 20 bp, Artificial Sequence
  Description of Artificial Sequence: Synthetic oligonucleotide
  Target: LAMA2; (-) strand; PAM type: YTN; PAM sequence: CTG
agttgttataagctaagtgt

SEQ ID NO: 289967 - DNA, 20 bp, Artificial Sequence
  Description of Artificial Sequence: Synthetic oligonucleotide
  Target: LAMA2; (-) strand; PAM type: YTN; PAM sequence: TTA
taatcaatgctgagttgtta

SEQ ID NO: 289968 - DNA, 20 bp, Artificial Sequence
  Description of Artificial Sequence: Synthetic oligonucleotide
  Target: LAMA2; (-) strand; PAM type: YTN; PAM sequence: TTT
ataatcaatgctgagttgtt

SEQ ID NO: 289969 - DNA, 20 bp, Artificial Sequence
  Description of Artificial Sequence: Synthetic oligonucleotide
  Target: LAMA2; (-) strand; PAM type: YTN; PAM sequence: TTT
tataatcaatgctgagttgt

SEQ ID NO: 289970 - DNA, 20 bp, Artificial Sequence
  Description of Artificial Sequence: Synthetic oligonucleotide
  Target: LAMA2; (-) strand; PAM type: YTN; PAM sequence: TTA
agaaatattttataatcaat

SEQ ID NO: 289971 - DNA, 20 bp, Artificial Sequence
  Description of Artificial Sequence: Synthetic oligonucleotide
  Target: LAMA2; (-) strand; PAM type: YTN; PAM sequence: CTT
aagaaatattttataatcaa

SEQ ID NO: 289972 - DNA, 20 bp, Artificial Sequence
  Description of Artificial Sequence: Synthetic oligonucleotide
  Target: LAMA2; (-) strand; PAM type: YTN; PAM sequence: TTA
aataatagacacagagtagg

SEQ ID NO: 289973 - DNA, 20 bp, Artificial Sequence
  Description of Artificial Sequence: Synthetic oligonucleotide
  Target: LAMA2; (-) strand; PAM type: YTN; PAM sequence: TTA
ttaaataatagacacagagt

SEQ ID NO: 289974 - DNA, 20 bp, Artificial Sequence
  Description of Artificial Sequence: Synthetic oligonucleotide
  Target: LAMA2; (-) strand; PAM type: YTN; PAM sequence: TTT
attaaataatagacacagag

SEQ ID NO: 289975 - DNA, 20 bp, Artificial Sequence
  Description of Artificial Sequence: Synthetic oligonucleotide
  Target: LAMA2; (-) strand; PAM type: YTN; PAM sequence: TTT
tattaaataatagacacaga

SEQ ID NO: 289976 - DNA, 20 bp, Artificial Sequence
  Description of Artificial Sequence: Synthetic oligonucleotide
  Target: LAMA2; (-) strand; PAM type: YTN; PAM sequence: TTA
taagtaggtagggaaataag

SEQ ID NO: 289977 - DNA, 20 bp, Artificial Sequence
  Description of Artificial Sequence: Synthetic oligonucleotide
  Target: LAMA2; (-) strand; PAM type: YTN; PAM sequence: TTT
ataagtaggtagggaaataa

SEQ ID NO: 289978 - DNA, 20 bp, Artificial Sequence
  Description of Artificial Sequence: Synthetic oligonucleotide
  Target: LAMA2; (-) strand; PAM type: YTN; PAM sequence: TTC
agatgtgatttataagtagg

SEQ ID NO: 289979 - DNA, 20 bp, Artificial Sequence
  Description of Artificial Sequence: Synthetic oligonucleotide
  Target: LAMA2; (-) strand; PAM type: YTN; PAM sequence: TTG
atgagttcagatgtgattta

SEQ ID NO: 289980 - DNA, 20 bp, Artificial Sequence
  Description of Artificial Sequence: Synthetic oligonucleotide
  Target: LAMA2; (-) strand; PAM type: YTN; PAM sequence: TTC
acagttgatgagttcagatg

SEQ ID NO: 289981 - DNA, 20 bp, Artificial Sequence
  Description of Artificial Sequence: Synthetic oligonucleotide
  Target: LAMA2; (-) strand; PAM type: YTN; PAM sequence: TTT
cacagttgatgagttcagat

SEQ ID NO: 289982 - DNA, 20 bp, Artificial Sequence
  Description of Artificial Sequence: Synthetic oligonucleotide
  Target: LAMA2; (-) strand; PAM type: YTN; PAM sequence: TTG
acacaaaatttcacagttga

SEQ ID NO: 289983 - DNA, 20 bp, Artificial Sequence
  Description of Artificial Sequence: Synthetic oligonucleotide
  Target: LAMA2; (-) strand; PAM type: YTN; PAM sequence: CTA
ttgacacaaaatttcacagt

SEQ ID NO: 289984 - DNA, 20 bp, Artificial Sequence
  Description of Artificial Sequence: Synthetic oligonucleotide
  Target: LAMA2; (-) strand; PAM type: YTN; PAM sequence: TTA
caaaatagaaaagtaggcta

SEQ ID NO: 289985 - DNA, 20 bp, Artificial Sequence
  Description of Artificial Sequence: Synthetic oligonucleotide
  Target: LAMA2; (-) strand; PAM type: YTN; PAM sequence: TTT
acaaaatagaaaagtaggct

SEQ ID NO: 289986 - DNA, 20 bp, Artificial Sequence
  Description of Artificial Sequence: Synthetic oligonucleotide
  Target: LAMA2; (-) strand; PAM type: YTN; PAM sequence: CTT
tacaaaatagaaaagtaggc

SEQ ID NO: 289987 - DNA, 20 bp, Artificial Sequence
  Description of Artificial Sequence: Synthetic oligonucleotide
  Target: LAMA2; (-) strand; PAM type: YTN; PAM sequence: TTC
tttacaaaatagaaaagtag

SEQ ID NO: 289988 - DNA, 20 bp, Artificial Sequence
  Description of Artificial Sequence: Synthetic oligonucleotide
  Target: LAMA2; (-) strand; PAM type: YTN; PAM sequence: TTT
ctttacaaaatagaaaagta

SEQ ID NO: 289989 - DNA, 20 bp, Artificial Sequence
  Description of Artificial Sequence: Synthetic oligonucleotide
  Target: LAMA2; (-) strand; PAM type: YTN; PAM sequence: TTT
tctttacaaaatagaaaagt

SEQ ID NO: 289990 - DNA, 20 bp, Artificial Sequence
  Description of Artificial Sequence: Synthetic oligonucleotide
  Target: LAMA2; (-) strand; PAM type: YTN; PAM sequence: CTT
ttctttacaaaatagaaaag

SEQ ID NO: 289991 - DNA, 20 bp, Artificial Sequence
  Description of Artificial Sequence: Synthetic oligonucleotide
  Target: LAMA2; (-) strand; PAM type: YTN; PAM sequence: TTC
ttttctttacaaaatagaaa

SEQ ID NO: 289992 - DNA, 20 bp, Artificial Sequence
  Description of Artificial Sequence: Synthetic oligonucleotide
  Target: LAMA2; (-) strand; PAM type: YTN; PAM sequence: TTT
cttttctttacaaaatagaa

SEQ ID NO: 289993 - DNA, 20 bp, Artificial Sequence
  Description of Artificial Sequence: Synthetic oligonucleotide
  Target: LAMA2; (-) strand; PAM type: YTN; PAM sequence: CTA
tttcttttctttacaaaata

SEQ ID NO: 289994 - DNA, 20 bp, Artificial Sequence
  Description of Artificial Sequence: Synthetic oligonucleotide
  Target: LAMA2; (-) strand; PAM type: YTN; PAM sequence: TTA
ccctatttcttttctttaca

SEQ ID NO: 289995 - DNA, 20 bp, Artificial Sequence
  Description of Artificial Sequence: Synthetic oligonucleotide
  Target: LAMA2; (-) strand; PAM type: YTN; PAM sequence: CTT
accctatttcttttctttac

SEQ ID NO: 289996 - DNA, 20 bp, Artificial Sequence
  Description of Artificial Sequence: Synthetic oligonucleotide
  Target: LAMA2; (-) strand; PAM type: YTN; PAM sequence: TTC
ttaccctatttcttttcttt

SEQ ID NO: 289997 - DNA, 20 bp, Artificial Sequence
  Description of Artificial Sequence: Synthetic oligonucleotide
  Target: LAMA2; (-) strand; PAM type: YTN; PAM sequence: TTT
cttaccctatttcttttctt

SEQ ID NO: 289998 - DNA, 20 bp, Artificial Sequence
  Description of Artificial Sequence: Synthetic oligonucleotide
  Target: LAMA2; (-) strand; PAM type: YTN; PAM sequence: TTA
tttcttaccctatttctttt

SEQ ID NO: 289999 - DNA, 20 bp, Artificial Sequence
  Description of Artificial Sequence: Synthetic oligonucleotide
  Target: LAMA2; (-) strand; PAM type: YTN; PAM sequence: TTT
atttcttaccctatttcttt

SEQ ID NO: 290000 - DNA, 20 bp, Artificial Sequence
  Description of Artificial Sequence: Synthetic oligonucleotide
  Target: LAMA2; (-) strand; PAM type: YTN; PAM sequence: TTT
tatttcttaccctatttctt

SEQ ID NO: 290001 - DNA, 20 bp, Artificial Sequence
  Description of Artificial Sequence: Synthetic oligonucleotide
  Target: LAMA2; (-) strand; PAM type: YTN; PAM sequence: CTT
ttatttcttaccctatttct

SEQ ID NO: 290002 - DNA, 20 bp, Artificial Sequence
  Description of Artificial Sequence: Synthetic oligonucleotide
  Target: LAMA2; (-) strand; PAM type: YTN; PAM sequence: TTG
cttttatttcttaccctatt

SEQ ID NO: 290003 - DNA, 20 bp, Artificial Sequence
  Description of Artificial Sequence: Synthetic oligonucleotide
  Target: LAMA2; (-) strand; PAM type: YTN; PAM sequence: CTT
gcttttatttcttaccctat

SEQ ID NO: 290004 - DNA, 20 bp, Artificial Sequence
  Description of Artificial Sequence: Synthetic oligonucleotide
  Target: LAMA2; (-) strand; PAM type: YTN; PAM sequence: CTA
atgcttgcttttatttctta

SEQ ID NO: 290005 - DNA, 20 bp, Artificial Sequence
  Description of Artificial Sequence: Synthetic oligonucleotide
  Target: LAMA2; (-) strand; PAM type: YTN; PAM sequence: CTA
gtaaatgctaatgcttgctt

SEQ ID NO: 290006 - DNA, 20 bp, Artificial Sequence
  Description of Artificial Sequence: Synthetic oligonucleotide
  Target: LAMA2; (-) strand; PAM type: YTN; PAM sequence: CTA
ccaggaaatgctagtaaatg

SEQ ID NO: 290007 - DNA, 20 bp, Artificial Sequence
  Description of Artificial Sequence: Synthetic oligonucleotide
  Target: LAMA2; (-) strand; PAM type: YTN; PAM sequence: TTC
taccaggaaatgctagtaaa

SEQ ID NO: 290008 - DNA, 20 bp, Artificial Sequence
  Description of Artificial Sequence: Synthetic oligonucleotide
  Target: LAMA2; (-) strand; PAM type: YTN; PAM sequence: TTC
atgagtgatagcgatgaagt

SEQ ID NO: 290009 - DNA, 20 bp, Artificial Sequence
  Description of Artificial Sequence: Synthetic oligonucleotide
  Target: LAMA2; (-) strand; PAM type: YTN; PAM sequence: CTT
catgagtgatagcgatgaag

SEQ ID NO: 290010 - DNA, 20 bp, Artificial Sequence
  Description of Artificial Sequence: Synthetic oligonucleotide
  Target: LAMA2; (-) strand; PAM type: YTN; PAM sequence: CTA
tccttcatgagtgatagcga

SEQ ID NO: 290011 - DNA, 20 bp, Artificial Sequence
  Description of Artificial Sequence: Synthetic oligonucleotide
  Target: LAMA2; (-) strand; PAM type: YTN; PAM sequence: CTC
tatccttcatgagtgatagc

SEQ ID NO: 290012 - DNA, 20 bp, Artificial Sequence
  Description of Artificial Sequence: Synthetic oligonucleotide
  Target: LAMA2; (-) strand; PAM type: YTN; PAM sequence: TTA
ctctatccttcatgagtgat

SEQ ID NO: 290013 - DNA, 20 bp, Artificial Sequence
  Description of Artificial Sequence: Synthetic oligonucleotide
  Target: LAMA2; (-) strand; PAM type: YTN; PAM sequence: TTT
actctatccttcatgagtga

SEQ ID NO: 290014 - DNA, 20 bp, Artificial Sequence
  Description of Artificial Sequence: Synthetic oligonucleotide
  Target: LAMA2; (-) strand; PAM type: YTN; PAM sequence: CTT
tactctatccttcatgagtg

SEQ ID NO: 290015 - DNA, 20 bp, Artificial Sequence
  Description of Artificial Sequence: Synthetic oligonucleotide
  Target: LAMA2; (-) strand; PAM type: YTN; PAM sequence: TTA
aagggagtgctttactctat

SEQ ID NO: 290016 - DNA, 20 bp, Artificial Sequence
  Description of Artificial Sequence: Synthetic oligonucleotide
  Target: LAMA2; (-) strand; PAM type: YTN; PAM sequence: CTT
aaagggagtgctttactcta

SEQ ID NO: 290017 - DNA, 20 bp, Artificial Sequence
  Description of Artificial Sequence: Synthetic oligonucleotide
  Target: LAMA2; (-) strand; PAM type: YTN; PAM sequence: CTG
acttaaagggagtgctttac

SEQ ID NO: 290018 - DNA, 20 bp, Artificial Sequence
  Description of Artificial Sequence: Synthetic oligonucleotide
  Target: LAMA2; (-) strand; PAM type: YTN; PAM sequence: TTA
ctgacttaaagggagtgctt

SEQ ID NO: 290019 - DNA, 20 bp, Artificial Sequence
  Description of Artificial Sequence: Synthetic oligonucleotide
  Target: LAMA2; (-) strand; PAM type: YTN; PAM sequence: TTT
actgacttaaagggagtgct

SEQ ID NO: 290020 - DNA, 20 bp, Artificial Sequence
  Description of Artificial Sequence: Synthetic oligonucleotide
  Target: LAMA2; (-) strand; PAM type: YTN; PAM sequence: TTT
tactgacttaaagggagtgc

SEQ ID NO: 290021 - DNA, 20 bp, Artificial Sequence
  Description of Artificial Sequence: Synthetic oligonucleotide
  Target: LAMA2; (-) strand; PAM type: YTN; PAM sequence: TTT
ttactgacttaaagggagtg

SEQ ID NO: 290022 - DNA, 20 bp, Artificial Sequence
  Description of Artificial Sequence: Synthetic oligonucleotide
  Target: LAMA2; (-) strand; PAM type: YTN; PAM sequence: CTG
gcagagagacaggatggcat

SEQ ID NO: 290023 - DNA, 20 bp, Artificial Sequence
  Description of Artificial Sequence: Synthetic oligonucleotide
  Target: LAMA2; (-) strand; PAM type: YTN; PAM sequence: CTG
gcccaaaaggtaactggcag

SEQ ID NO: 290024 - DNA, 20 bp, Artificial Sequence
  Description of Artificial Sequence: Synthetic oligonucleotide
  Target: LAMA2; (-) strand; PAM type: YTN; PAM sequence: TTC
actggcccaaaaggtaactg

SEQ ID NO: 290025 - DNA, 20 bp, Artificial Sequence
  Description of Artificial Sequence: Synthetic oligonucleotide
  Target: LAMA2; (-) strand; PAM type: YTN; PAM sequence: TTG
aaattcactggcccaaaagg

SEQ ID NO: 290026 - DNA, 20 bp, Artificial Sequence
  Description of Artificial Sequence: Synthetic oligonucleotide
  Target: LAMA2; (-) strand; PAM type: YTN; PAM sequence: TTG
aattgaaattcactggccca

SEQ ID NO: 290027 - DNA, 20 bp, Artificial Sequence
  Description of Artificial Sequence: Synthetic oligonucleotide
  Target: LAMA2; (-) strand; PAM type: YTN; PAM sequence: TTA
aagagcagcaacacaattga

SEQ ID NO: 290028 - DNA, 20 bp, Artificial Sequence
  Description of Artificial Sequence: Synthetic oligonucleotide
  Target: LAMA2; (-) strand; PAM type: YTN; PAM sequence: CTA
agaaaacatgattaaagagc

SEQ ID NO: 290029 - DNA, 20 bp, Artificial Sequence
  Description of Artificial Sequence: Synthetic oligonucleotide
  Target: LAMA2; (-) strand; PAM type: YTN; PAM sequence: TTC
taagaaaacatgattaaaga

SEQ ID NO: 290030 - DNA, 20 bp, Artificial Sequence
  Description of Artificial Sequence: Synthetic oligonucleotide
  Target: LAMA2; (-) strand; PAM type: YTN; PAM sequence: TTA
gaaatcattctaagaaaaca

SEQ ID NO: 290031 - DNA, 20 bp, Artificial Sequence
  Description of Artificial Sequence: Synthetic oligonucleotide
  Target: LAMA2; (-) strand; PAM type: YTN; PAM sequence: TTT
agaaatcattctaagaaaac

SEQ ID NO: 290032 - DNA, 20 bp, Artificial Sequence
  Description of Artificial Sequence: Synthetic oligonucleotide
  Target: LAMA2; (-) strand; PAM type: YTN; PAM sequence: TTT
tagaaatcattctaagaaaa

SEQ ID NO: 290033 - DNA, 20 bp, Artificial Sequence
  Description of Artificial Sequence: Synthetic oligonucleotide
  Target: LAMA2; (-) strand; PAM type: YTN; PAM sequence: TTT
ttagaaatcattctaagaaa

SEQ ID NO: 290034 - DNA, 20 bp, Artificial Sequence
  Description of Artificial Sequence: Synthetic oligonucleotide
  Target: LAMA2; (-) strand; PAM type: YTN; PAM sequence: TTA
tccatgaatgaatatatgca

SEQ ID NO: 290035 - DNA, 20 bp, Artificial Sequence
  Description of Artificial Sequence: Synthetic oligonucleotide
  Target: LAMA2; (-) strand; PAM type: YTN; PAM sequence: CTT
atccatgaatgaatatatgc

SEQ ID NO: 290036 - DNA, 20 bp, Artificial Sequence
  Description of Artificial Sequence: Synthetic oligonucleotide
  Target: LAMA2; (-) strand; PAM type: YTN; PAM sequence: CTC
cttatccatgaatgaatata

SEQ ID NO: 290037 - DNA, 20 bp, Artificial Sequence
  Description of Artificial Sequence: Synthetic oligonucleotide
  Target: LAMA2; (-) strand; PAM type: YTN; PAM sequence: TTC
ctccttatccatgaatgaat

SEQ ID NO: 290038 - DNA, 20 bp, Artificial Sequence
  Description of Artificial Sequence: Synthetic oligonucleotide
  Target: LAMA2; (-) strand; PAM type: YTN; PAM sequence: TTT
cctccttatccatgaatgaa

SEQ ID NO: 290039 - DNA, 20 bp, Artificial Sequence
  Description of Artificial Sequence: Synthetic oligonucleotide
  Target: LAMA2; (-) strand; PAM type: YTN; PAM sequence: TTT
tcctccttatccatgaatga

SEQ ID NO: 290040 - DNA, 20 bp, Artificial Sequence
  Description of Artificial Sequence: Synthetic oligonucleotide
  Target: LAMA2; (-) strand; PAM type: YTN; PAM sequence: CTG
gaggtggttttcctccttat

SEQ ID NO: 290041 - DNA, 20 bp, Artificial Sequence
  Description of Artificial Sequence: Synthetic oligonucleotide
  Target: LAMA2; (-) strand; PAM type: YTN; PAM sequence: CTA
tcacaggcaagccagtgact

SEQ ID NO: 290042 - DNA, 20 bp, Artificial Sequence
  Description of Artificial Sequence: Synthetic oligonucleotide
  Target: LAMA2; (-) strand; PAM type: YTN; PAM sequence: CTC
tatcacaggcaagccagtga

SEQ ID NO: 290043 - DNA, 20 bp, Artificial Sequence
  Description of Artificial Sequence: Synthetic oligonucleotide
  Target: LAMA2; (-) strand; PAM type: YTN; PAM sequence: CTC
tctatcacaggcaagccagt

SEQ ID NO: 290044 - DNA, 20 bp, Artificial Sequence
  Description of Artificial Sequence: Synthetic oligonucleotide
  Target: LAMA2; (-) strand; PAM type: YTN; PAM sequence: CTG
cctctctatcacaggcaagc

SEQ ID NO: 290045 - DNA, 20 bp, Artificial Sequence
  Description of Artificial Sequence: Synthetic oligonucleotide
  Target: LAMA2; (-) strand; PAM type: YTN; PAM sequence: TTC
tgcctctctatcacaggcaa

SEQ ID NO: 290046 - DNA, 20 bp, Artificial Sequence
  Description of Artificial Sequence: Synthetic oligonucleotide
  Target: LAMA2; (-) strand; PAM type: YTN; PAM sequence: CTG
aaaatgagattctgcctctc

SEQ ID NO: 290047 - DNA, 20 bp, Artificial Sequence
  Description of Artificial Sequence: Synthetic oligonucleotide
  Target: LAMA2; (-) strand; PAM type: YTN; PAM sequence: TTA
atggtgtctgaaaatgagat

SEQ ID NO: 290048 - DNA, 20 bp, Artificial Sequence
  Description of Artificial Sequence: Synthetic oligonucleotide
  Target: LAMA2; (-) strand; PAM type: YTN; PAM sequence: TTT
aatggtgtctgaaaatgaga

SEQ ID NO: 290049 - DNA, 20 bp, Artificial Sequence
  Description of Artificial Sequence: Synthetic oligonucleotide
  Target: LAMA2; (-) strand; PAM type: YTN; PAM sequence: TTT
taatggtgtctgaaaatgag

SEQ ID NO: 290050 - DNA, 20 bp, Artificial Sequence
  Description of Artificial Sequence: Synthetic oligonucleotide
  Target: LAMA2; (-) strand; PAM type: YTN; PAM sequence: TTG
gtgggtattttaatggtgtc

SEQ ID NO: 290051 - DNA, 20 bp, Artificial Sequence
  Description of Artificial Sequence: Synthetic oligonucleotide
  Target: LAMA2; (-) strand; PAM type: YTN; PAM sequence: CTT
ggtgggtattttaatggtgt

SEQ ID NO: 290052 - DNA, 20 bp, Artificial Sequence
  Description of Artificial Sequence: Synthetic oligonucleotide
  Target: LAMA2; (-) strand; PAM type: YTN; PAM sequence: CTA
cagacttggtgggtatttta

SEQ ID NO: 290053 - DNA, 20 bp, Artificial Sequence
  Description of Artificial Sequence: Synthetic oligonucleotide
  Target: LAMA2; (-) strand; PAM type: YTN; PAM sequence: TTC
tacagacttggtgggtattt

SEQ ID NO: 290054 - DNA, 20 bp, Artificial Sequence
  Description of Artificial Sequence: Synthetic oligonucleotide
  Target: LAMA2; (-) strand; PAM type: YTN; PAM sequence: TTT
ctacagacttggtgggtatt

SEQ ID NO: 290055 - DNA, 20 bp, Artificial Sequence
  Description of Artificial Sequence: Synthetic oligonucleotide
  Target: LAMA2; (-) strand; PAM type: YTN; PAM sequence: CTT
tctacagacttggtgggtat

SEQ ID NO: 290056 - DNA, 20 bp, Artificial Sequence
  Description of Artificial Sequence: Synthetic oligonucleotide
  Target: LAMA2; (-) strand; PAM type: YTN; PAM sequence: CTC
tttctacagacttggtgggt

SEQ ID NO: 290057 - DNA, 20 bp, Artificial Sequence
  Description of Artificial Sequence: Synthetic oligonucleotide
  Target: LAMA2; (-) strand; PAM type: YTN; PAM sequence: CTG
gaagatgaaaatagtctctt

SEQ ID NO: 290058 - DNA, 20 bp, Artificial Sequence
  Description of Artificial Sequence: Synthetic oligonucleotide
  Target: LAMA2; (-) strand; PAM type: YTN; PAM sequence: TTG
actggaagatgaaaatagtc

SEQ ID NO: 290059 - DNA, 20 bp, Artificial Sequence
  Description of Artificial Sequence: Synthetic oligonucleotide
  Target: LAMA2; (-) strand; PAM type: YTN; PAM sequence: CTG
ttgactggaagatgaaaata

SEQ ID NO: 290060 - DNA, 20 bp, Artificial Sequence
  Description of Artificial Sequence: Synthetic oligonucleotide
  Target: LAMA2; (-) strand; PAM type: YTN; PAM sequence: TTC
atatggggctgttgactgga

SEQ ID NO: 290061 - DNA, 20 bp, Artificial Sequence
  Description of Artificial Sequence: Synthetic oligonucleotide
  Target: LAMA2; (-) strand; PAM type: YTN; PAM sequence: TTT
catatggggctgttgactgg

SEQ ID NO: 290062 - DNA, 20 bp, Artificial Sequence
  Description of Artificial Sequence: Synthetic oligonucleotide
  Target: LAMA2; (-) strand; PAM type: YTN; PAM sequence: TTT
tcatatggggctgttgactg

SEQ ID NO: 290063 - DNA, 20 bp, Artificial Sequence
  Description of Artificial Sequence: Synthetic oligonucleotide
  Target: LAMA2; (-) strand; PAM type: YTN; PAM sequence: CTA
gatcggcaaaggtattttca

SEQ ID NO: 290064 - DNA, 20 bp, Artificial Sequence
  Description of Artificial Sequence: Synthetic oligonucleotide
  Target: LAMA2; (-) strand; PAM type: YTN; PAM sequence: TTA
tctagatcggcaaaggtatt

SEQ ID NO: 290065 - DNA, 20 bp, Artificial Sequence
  Description of Artificial Sequence: Synthetic oligonucleotide
  Target: LAMA2; (-) strand; PAM type: YTN; PAM sequence: TTT
atctagatcggcaaaggtat

SEQ ID NO: 290066 - DNA, 20 bp, Artificial Sequence
  Description of Artificial Sequence: Synthetic oligonucleotide
  Target: LAMA2; (-) strand; PAM type: YTN; PAM sequence: TTT
tatctagatcggcaaaggta

SEQ ID NO: 290067 - DNA, 20 bp, Artificial Sequence
  Description of Artificial Sequence: Synthetic oligonucleotide
  Target: LAMA2; (-) strand; PAM type: YTN; PAM sequence: TTT
ttatctagatcggcaaaggt

SEQ ID NO: 290068 - DNA, 20 bp, Artificial Sequence
  Description of Artificial Sequence: Synthetic oligonucleotide
  Target: LAMA2; (-) strand; PAM type: YTN; PAM sequence: CTT
tttatctagatcggcaaagg

SEQ ID NO: 290069 - DNA, 20 bp, Artificial Sequence
  Description of Artificial Sequence: Synthetic oligonucleotide
  Target: LAMA2; (-) strand; PAM type: YTN; PAM sequence: TTC
ctttttatctagatcggcaa

SEQ ID NO: 290070 - DNA, 20 bp, Artificial Sequence
  Description of Artificial Sequence: Synthetic oligonucleotide
  Target: LAMA2; (-) strand; PAM type: YTN; PAM sequence: TTC
atatacattcctttttatct

SEQ ID NO: 290071 - DNA, 20 bp, Artificial Sequence
  Description of Artificial Sequence: Synthetic oligonucleotide
  Target: LAMA2; (-) strand; PAM type: YTN; PAM sequence: TTT
catatacattcctttttatc

SEQ ID NO: 290072 - DNA, 20 bp, Artificial Sequence
  Description of Artificial Sequence: Synthetic oligonucleotide
  Target: LAMA2; (-) strand; PAM type: YTN; PAM sequence: TTT
tcatatacattcctttttat

SEQ ID NO: 290073 - DNA, 20 bp, Artificial Sequence
  Description of Artificial Sequence: Synthetic oligonucleotide
  Target: LAMA2; (-) strand; PAM type: YTN; PAM sequence: TTT
ttcatatacattccttttta

SEQ ID NO: 290074 - DNA, 20 bp, Artificial Sequence
  Description of Artificial Sequence: Synthetic oligonucleotide
  Target: LAMA2; (-) strand; PAM type: YTN; PAM sequence: CTT
tttcatatacattccttttt

SEQ ID NO: 290075 - DNA, 20 bp, Artificial Sequence
  Description of Artificial Sequence: Synthetic oligonucleotide
  Target: LAMA2; (-) strand; PAM type: YTN; PAM sequence: TTC
aagactttttcatatacatt

SEQ ID NO: 290076 - DNA, 20 bp, Artificial Sequence
  Description of Artificial Sequence: Synthetic oligonucleotide
  Target: LAMA2; (-) strand; PAM type: YTN; PAM sequence: TTT
caagactttttcatatacat

SEQ ID NO: 290077 - DNA, 20 bp, Artificial Sequence
  Description of Artificial Sequence: Synthetic oligonucleotide
  Target: LAMA2; (-) strand; PAM type: YTN; PAM sequence: TTT
tcaagactttttcatataca

SEQ ID NO: 290078 - DNA, 20 bp, Artificial Sequence
  Description of Artificial Sequence: Synthetic oligonucleotide
  Target: LAMA2; (-) strand; PAM type: YTN; PAM sequence: CTG
ttttcaagactttttcatat

SEQ ID NO: 290079 - DNA, 20 bp, Artificial Sequence
  Description of Artificial Sequence: Synthetic oligonucleotide
  Target: LAMA2; (-) strand; PAM type: YTN; PAM sequence: TTA
taaaactgttttcaagactt

SEQ ID NO: 290080 - DNA, 20 bp, Artificial Sequence
  Description of Artificial Sequence: Synthetic oligonucleotide
  Target: LAMA2; (-) strand; PAM type: YTN; PAM sequence: TTT
ataaaactgttttcaagact

SEQ ID NO: 290081 - DNA, 20 bp, Artificial Sequence
  Description of Artificial Sequence: Synthetic oligonucleotide
  Target: LAMA2; (-) strand; PAM type: YTN; PAM sequence: CTA
aaagaaaatagatttataaa

SEQ ID NO: 290082 - DNA, 20 bp, Artificial Sequence
  Description of Artificial Sequence: Synthetic oligonucleotide
  Target: LAMA2; (-) strand; PAM type: YTN; PAM sequence: CTG
ggggctaaaagaaaatagat

SEQ ID NO: 290083 - DNA, 20 bp, Artificial Sequence
  Description of Artificial Sequence: Synthetic oligonucleotide
  Target: LAMA2; (-) strand; PAM type: YTN; PAM sequence: CTG
gactgggggctaaaagaaaa

SEQ ID NO: 290084 - DNA, 20 bp, Artificial Sequence
  Description of Artificial Sequence: Synthetic oligonucleotide
  Target: LAMA2; (-) strand; PAM type: YTN; PAM sequence: TTG
actggactgggggctaaaag

SEQ ID NO: 290085 - DNA, 20 bp, Artificial Sequence
  Description of Artificial Sequence: Synthetic oligonucleotide
  Target: LAMA2; (-) strand; PAM type: YTN; PAM sequence: CTT
gactggactgggggctaaaa

SEQ ID NO: 290086 - DNA, 20 bp, Artificial Sequence
  Description of Artificial Sequence: Synthetic oligonucleotide
  Target: LAMA2; (-) strand; PAM type: YTN; PAM sequence: CTC
cttgactggactgggggcta

SEQ ID NO: 290087 - DNA, 20 bp, Artificial Sequence
  Description of Artificial Sequence: Synthetic oligonucleotide
  Target: LAMA2; (-) strand; PAM type: YTN; PAM sequence: TTC
atacacatatatctccttga

SEQ ID NO: 290088 - DNA, 20 bp, Artificial Sequence
  Description of Artificial Sequence: Synthetic oligonucleotide
  Target: LAMA2; (-) strand; PAM type: YTN; PAM sequence: TTT
catacacatatatctccttg

SEQ ID NO: 290089 - DNA, 20 bp, Artificial Sequence
  Description of Artificial Sequence: Synthetic oligonucleotide
  Target: LAMA2; (-) strand; PAM type: YTN; PAM sequence: TTA
gtttcatacacatatatctc

SEQ ID NO: 290090 - DNA, 20 bp, Artificial Sequence
  Description of Artificial Sequence: Synthetic oligonucleotide
  Target: LAMA2; (-) strand; PAM type: YTN; PAM sequence: TTA
tatacataattagtttcata

SEQ ID NO: 290091 - DNA, 20 bp, Artificial Sequence
  Description of Artificial Sequence: Synthetic oligonucleotide
  Target: LAMA2; (-) strand; PAM type: YTN; PAM sequence: TTT
atatacataattagtttcat

SEQ ID NO: 290092 - DNA, 20 bp, Artificial Sequence
  Description of Artificial Sequence: Synthetic oligonucleotide
  Target: LAMA2; (-) strand; PAM type: YTN; PAM sequence: TTT
tatatacataattagtttca

SEQ ID NO: 290093 - DNA, 20 bp, Artificial Sequence
  Description of Artificial Sequence: Synthetic oligonucleotide
  Target: LAMA2; (-) strand; PAM type: YTN; PAM sequence: TTT
ttatatacataattagtttc

SEQ ID NO: 290094 - DNA, 20 bp, Artificial Sequence
  Description of Artificial Sequence: Synthetic oligonucleotide
  Target: LAMA2; (-) strand; PAM type: YTN; PAM sequence: TTA
tttttatatacataattagt

SEQ ID NO: 290095 - DNA, 20 bp, Artificial Sequence
  Description of Artificial Sequence: Synthetic oligonucleotide
  Target: LAMA2; (-) strand; PAM type: YTN; PAM sequence: TTA
ttatttttatatacataatt

SEQ ID NO: 290096 - DNA, 20 bp, Artificial Sequence
  Description of Artificial Sequence: Synthetic oligonucleotide
  Target: LAMA2; (-) strand; PAM type: YTN; PAM sequence: TTT
attatttttatatacataat

SEQ ID NO: 290097 - DNA, 20 bp, Artificial Sequence
  Description of Artificial Sequence: Synthetic oligonucleotide
  Target: LAMA2; (-) strand; PAM type: YTN; PAM sequence: TTT
tattatttttatatacataa

SEQ ID NO: 290098 - DNA, 20 bp, Artificial Sequence
  Description of Artificial Sequence: Synthetic oligonucleotide
  Target: LAMA2; (-) strand; PAM type: YTN; PAM sequence: CTA
ttttattatttttatataca

SEQ ID NO: 290099 - DNA, 20 bp, Artificial Sequence
  Description of Artificial Sequence: Synthetic oligonucleotide
  Target: LAMA2; (-) strand; PAM type: YTN; PAM sequence: TTC
acacacctattttattattt

SEQ ID NO: 290100 - DNA, 20 bp, Artificial Sequence
  Description of Artificial Sequence: Synthetic oligonucleotide
  Target: LAMA2; (-) strand; PAM type: YTN; PAM sequence: TTT
cacacacctattttattatt

SEQ ID NO: 290101 - DNA, 20 bp, Artificial Sequence
  Description of Artificial Sequence: Synthetic oligonucleotide
  Target: LAMA2; (-) strand; PAM type: YTN; PAM sequence: CTT
tcacacacctattttattat

SEQ ID NO: 290102 - DNA, 20 bp, Artificial Sequence
  Description of Artificial Sequence: Synthetic oligonucleotide
  Target: LAMA2; (-) strand; PAM type: YTN; PAM sequence: TTA
ctttcacacacctattttat

SEQ ID NO: 290103 - DNA, 20 bp, Artificial Sequence
  Description of Artificial Sequence: Synthetic oligonucleotide
  Target: LAMA2; (-) strand; PAM type: YTN; PAM sequence: TTG
aattactttcacacacctat

SEQ ID NO: 290104 - DNA, 20 bp, Artificial Sequence
  Description of Artificial Sequence: Synthetic oligonucleotide
  Target: LAMA2; (-) strand; PAM type: YTN; PAM sequence: TTA
aaattgaattactttcacac

SEQ ID NO: 290105 - DNA, 20 bp, Artificial Sequence
  Description of Artificial Sequence: Synthetic oligonucleotide
  Target: LAMA2; (-) strand; PAM type: YTN; PAM sequence: TTT
aaaattgaattactttcaca

SEQ ID NO: 290106 - DNA, 20 bp, Artificial Sequence
  Description of Artificial Sequence: Synthetic oligonucleotide
  Target: LAMA2; (-) strand; PAM type: YTN; PAM sequence: TTT
taaaattgaattactttcac

SEQ ID NO: 290107 - DNA, 20 bp, Artificial Sequence
  Description of Artificial Sequence: Synthetic oligonucleotide
  Target: LAMA2; (-) strand; PAM type: YTN; PAM sequence: TTA
agattttaaaattgaattac

SEQ ID NO: 290108 - DNA, 20 bp, Artificial Sequence
  Description of Artificial Sequence: Synthetic oligonucleotide
  Target: LAMA2; (-) strand; PAM type: YTN; PAM sequence: CTA
gcaagttaagattttaaaat

SEQ ID NO: 290109 - DNA, 20 bp, Artificial Sequence
  Description of Artificial Sequence: Synthetic oligonucleotide
  Target: LAMA2; (-) strand; PAM type: YTN; PAM sequence: TTA
aatatagctagcaagttaag

SEQ ID NO: 290110 - DNA, 20 bp, Artificial Sequence
  Description of Artificial Sequence: Synthetic oligonucleotide
  Target: LAMA2; (-) strand; PAM type: YTN; PAM sequence: CTA
ttaaatatagctagcaagtt

SEQ ID NO: 290111 - DNA, 20 bp, Artificial Sequence
  Description of Artificial Sequence: Synthetic oligonucleotide
  Target: LAMA2; (-) strand; PAM type: YTN; PAM sequence: TTG
tcctattaaatatagctagc

SEQ ID NO: 290112 - DNA, 20 bp, Artificial Sequence
  Description of Artificial Sequence: Synthetic oligonucleotide
  Target: LAMA2; (-) strand; PAM type: YTN; PAM sequence: CTA
aaagaataattgtcctatta

SEQ ID NO: 290113 - DNA, 20 bp, Artificial Sequence
  Description of Artificial Sequence: Synthetic oligonucleotide
  Target: LAMA2; (-) strand; PAM type: YTN; PAM sequence: TTG
taaaaacaaacaagaaaaat

SEQ ID NO: 290114 - DNA, 20 bp, Artificial Sequence
  Description of Artificial Sequence: Synthetic oligonucleotide
  Target: LAMA2; (-) strand; PAM type: YTN; PAM sequence: TTT
gtaaaaacaaacaagaaaaa

SEQ ID NO: 290115 - DNA, 20 bp, Artificial Sequence
  Description of Artificial Sequence: Synthetic oligonucleotide
  Target: LAMA2; (-) strand; PAM type: YTN; PAM sequence: TTT
tgtaaaaacaaacaagaaaa

SEQ ID NO: 290116 - DNA, 20 bp, Artificial Sequence
  Description of Artificial Sequence: Synthetic oligonucleotide
  Target: LAMA2; (-) strand; PAM type: YTN; PAM sequence: CTT
ttgtaaaaacaaacaagaaa

SEQ ID NO: 290117 - DNA, 20 bp, Artificial Sequence
  Description of Artificial Sequence: Synthetic oligonucleotide
  Target: LAMA2; (-) strand; PAM type: YTN; PAM sequence: CTC
aaaccagacttttgtaaaaa

SEQ ID NO: 290118 - DNA, 20 bp, Artificial Sequence
  Description of Artificial Sequence: Synthetic oligonucleotide
  Target: LAMA2; (-) strand; PAM type: YTN; PAM sequence: CTA
aaatacacataccaatggac

SEQ ID NO: 290119 - DNA, 20 bp, Artificial Sequence
  Description of Artificial Sequence: Synthetic oligonucleotide
  Target: LAMA2; (-) strand; PAM type: YTN; PAM sequence: TTA
aaaaaggactaaaatacaca

SEQ ID NO: 290120 - DNA, 20 bp, Artificial Sequence
  Description of Artificial Sequence: Synthetic oligonucleotide
  Target: LAMA2; (-) strand; PAM type: YTN; PAM sequence: TTA
ttaaaaaaggactaaaatac

SEQ ID NO: 290121 - DNA, 20 bp, Artificial Sequence
  Description of Artificial Sequence: Synthetic oligonucleotide
  Target: LAMA2; (-) strand; PAM type: YTN; PAM sequence: CTT
attaaaaaaggactaaaata

SEQ ID NO: 290122 - DNA, 20 bp, Artificial Sequence
  Description of Artificial Sequence: Synthetic oligonucleotide
  Target: LAMA2; (-) strand; PAM type: YTN; PAM sequence: TTG
ccttattaaaaaaggactaa

SEQ ID NO: 290123 - DNA, 20 bp, Artificial Sequence
  Description of Artificial Sequence: Synthetic oligonucleotide
  Target: LAMA2; (-) strand; PAM type: YTN; PAM sequence: TTC
aataaaatcaaacacaattg

SEQ ID NO: 290124 - DNA, 20 bp, Artificial Sequence
  Description of Artificial Sequence: Synthetic oligonucleotide
  Target: LAMA2; (-) strand; PAM type: YTN; PAM sequence: CTT
caataaaatcaaacacaatt

SEQ ID NO: 290125 - DNA, 20 bp, Artificial Sequence
  Description of Artificial Sequence: Synthetic oligonucleotide
  Target: LAMA2; (-) strand; PAM type: YTN; PAM sequence: TTC
aaaaagatgtgtcttcaata

SEQ ID NO: 290126 - DNA, 20 bp, Artificial Sequence
  Description of Artificial Sequence: Synthetic oligonucleotide
  Target: LAMA2; (-) strand; PAM type: YTN; PAM sequence: TTT
caaaaagatgtgtcttcaat

SEQ ID NO: 290127 - DNA, 20 bp, Artificial Sequence
  Description of Artificial Sequence: Synthetic oligonucleotide
  Target: LAMA2; (-) strand; PAM type: YTN; PAM sequence: CTA
tcatttcaaaaagatgtgtc

SEQ ID NO: 290128 - DNA, 20 bp, Artificial Sequence
  Description of Artificial Sequence: Synthetic oligonucleotide
  Target: LAMA2; (-) strand; PAM type: YTN; PAM sequence: TTA
tagccctatcatttcaaaaa

SEQ ID NO: 290129 - DNA, 20 bp, Artificial Sequence
  Description of Artificial Sequence: Synthetic oligonucleotide
  Target: LAMA2; (-) strand; PAM type: YTN; PAM sequence: TTT
atagccctatcatttcaaaa

SEQ ID NO: 290130 - DNA, 20 bp, Artificial Sequence
  Description of Artificial Sequence: Synthetic oligonucleotide
  Target: LAMA2; (-) strand; PAM type: YTN; PAM sequence: TTG
aagtttatagccctatcatt

SEQ ID NO: 290131 - DNA, 20 bp, Artificial Sequence
  Description of Artificial Sequence: Synthetic oligonucleotide
  Target: LAMA2; (-) strand; PAM type: YTN; PAM sequence: CTT
gaagtttatagccctatcat

SEQ ID NO: 290132 - DNA, 20 bp, Artificial Sequence
  Description of Artificial Sequence: Synthetic oligonucleotide
  Target: LAMA2; (-) strand; PAM type: YTN; PAM sequence: TTC
ccttgaagtttatagcccta

SEQ ID NO: 290133 - DNA, 20 bp, Artificial Sequence
  Description of Artificial Sequence: Synthetic oligonucleotide
  Target: LAMA2; (-) strand; PAM type: YTN; PAM sequence: TTC
caaaattcccttgaagttta

SEQ ID NO: 290134 - DNA, 20 bp, Artificial Sequence
  Description of Artificial Sequence: Synthetic oligonucleotide
  Target: LAMA2; (-) strand; PAM type: YTN; PAM sequence: TTG
gaaaacagagagaaacatca

SEQ ID NO: 290135 - DNA, 20 bp, Artificial Sequence
  Description of Artificial Sequence: Synthetic oligonucleotide
  Target: LAMA2; (-) strand; PAM type: YTN; PAM sequence: TTT
ggaaaacagagagaaacatc

SEQ ID NO: 290136 - DNA, 20 bp, Artificial Sequence
  Description of Artificial Sequence: Synthetic oligonucleotide
  Target: LAMA2; (-) strand; PAM type: YTN; PAM sequence: CTT
tggaaaacagagagaaacat

SEQ ID NO: 290137 - DNA, 20 bp, Artificial Sequence
  Description of Artificial Sequence: Synthetic oligonucleotide
  Target: LAMA2; (-) strand; PAM type: YTN; PAM sequence: TTC
tttggaaaacagagagaaac

SEQ ID NO: 290138 - DNA, 20 bp, Artificial Sequence
  Description of Artificial Sequence: Synthetic oligonucleotide
  Target: LAMA2; (-) strand; PAM type: YTN; PAM sequence: TTC
agaatcagtgttctttggaa

SEQ ID NO: 290139 - DNA, 20 bp, Artificial Sequence
  Description of Artificial Sequence: Synthetic oligonucleotide
  Target: LAMA2; (-) strand; PAM type: YTN; PAM sequence: TTT
cagaatcagtgttctttgga

SEQ ID NO: 290140 - DNA, 20 bp, Artificial Sequence
  Description of Artificial Sequence: Synthetic oligonucleotide
  Target: LAMA2; (-) strand; PAM type: YTN; PAM sequence: CTT
tcagaatcagtgttctttgg

SEQ ID NO: 290141 - DNA, 20 bp, Artificial Sequence
  Description of Artificial Sequence: Synthetic oligonucleotide
  Target: LAMA2; (-) strand; PAM type: YTN; PAM sequence: CTC
atcatctttcagaatcagtg

SEQ ID NO: 290142 - DNA, 20 bp, Artificial Sequence
  Description of Artificial Sequence: Synthetic oligonucleotide
  Target: LAMA2; (-) strand; PAM type: YTN; PAM sequence: CTC
aactcatcatctttcagaat

SEQ ID NO: 290143 - DNA, 20 bp, Artificial Sequence
  Description of Artificial Sequence: Synthetic oligonucleotide
  Target: LAMA2; (-) strand; PAM type: YTN; PAM sequence: TTC
actcaactcatcatctttca

SEQ ID NO: 290144 - DNA, 20 bp, Artificial Sequence
  Description of Artificial Sequence: Synthetic oligonucleotide
  Target: LAMA2; (-) strand; PAM type: YTN; PAM sequence: TTT
cactcaactcatcatctttc

SEQ ID NO: 290145 - DNA, 20 bp, Artificial Sequence
  Description of Artificial Sequence: Synthetic oligonucleotide
  Target: LAMA2; (-) strand; PAM type: YTN; PAM sequence: TTT
tcactcaactcatcatcttt

SEQ ID NO: 290146 - DNA, 20 bp, Artificial Sequence
  Description of Artificial Sequence: Synthetic oligonucleotide
  Target: LAMA2; (-) strand; PAM type: YTN; PAM sequence: TTA
ttttcactcaactcatcatc

SEQ ID NO: 290147 - DNA, 20 bp, Artificial Sequence
  Description of Artificial Sequence: Synthetic oligonucleotide
  Target: LAMA2; (-) strand; PAM type: YTN; PAM sequence: CTA
ttattttcactcaactcatc

SEQ ID NO: 290148 - DNA, 20 bp, Artificial Sequence
  Description of Artificial Sequence: Synthetic oligonucleotide
  Target: LAMA2; (-) strand; PAM type: YTN; PAM sequence: TTG
accacgaaatactattattt

SEQ ID NO: 290149 - DNA, 20 bp, Artificial Sequence
  Description of Artificial Sequence: Synthetic oligonucleotide
  Target: LAMA2; (-) strand; PAM type: YTN; PAM sequence: TTT
gaccacgaaatactattatt

SEQ ID NO: 290150 - DNA, 20 bp, Artificial Sequence
  Description of Artificial Sequence: Synthetic oligonucleotide
  Target: LAMA2; (-) strand; PAM type: YTN; PAM sequence: TTA
tttgaccacgaaatactatt

SEQ ID NO: 290151 - DNA, 20 bp, Artificial Sequence
  Description of Artificial Sequence: Synthetic oligonucleotide
  Target: LAMA2; (-) strand; PAM type: YTN; PAM sequence: TTT
atttgaccacgaaatactat

SEQ ID NO: 290152 - DNA, 20 bp, Artificial Sequence
  Description of Artificial Sequence: Synthetic oligonucleotide
  Target: LAMA2; (-) strand; PAM type: YTN; PAM sequence: TTC
ccaaatttatttgaccacga

SEQ ID NO: 290153 - DNA, 20 bp, Artificial Sequence
  Description of Artificial Sequence: Synthetic oligonucleotide
  Target: LAMA2; (-) strand; PAM type: YTN; PAM sequence: TTT
cccaaatttatttgaccacg

SEQ ID NO: 290154 - DNA, 20 bp, Artificial Sequence
  Description of Artificial Sequence: Synthetic oligonucleotide
  Target: LAMA2; (-) strand; PAM type: YTN; PAM sequence: CTA
gagaaggacatagagcaaaa

SEQ ID NO: 290155 - DNA, 20 bp, Artificial Sequence
  Description of Artificial Sequence: Synthetic oligonucleotide
  Target: LAMA2; (-) strand; PAM type: YTN; PAM sequence: TTC
ctagagaaggacatagagca

SEQ ID NO: 290156 - DNA, 20 bp, Artificial Sequence
  Description of Artificial Sequence: Synthetic oligonucleotide
  Target: LAMA2; (-) strand; PAM type: YTN; PAM sequence: CTA
atatgcaatgcaatgttcct

SEQ ID NO: 290157 - DNA, 20 bp, Artificial Sequence
  Description of Artificial Sequence: Synthetic oligonucleotide
  Target: LAMA2; (-) strand; PAM type: YTN; PAM sequence: TTC
agcatgctaatatgcaatgc

SEQ ID NO: 290158 - DNA, 20 bp, Artificial Sequence
  Description of Artificial Sequence: Synthetic oligonucleotide
  Target: LAMA2; (-) strand; PAM type: YTN; PAM sequence: TTT
cagcatgctaatatgcaatg

SEQ ID NO: 290159 - DNA, 20 bp, Artificial Sequence
  Description of Artificial Sequence: Synthetic oligonucleotide
  Target: LAMA2; (-) strand; PAM type: YTN; PAM sequence: CTT
tcagcatgctaatatgcaat

SEQ ID NO: 290160 - DNA, 20 bp, Artificial Sequence
  Description of Artificial Sequence: Synthetic oligonucleotide
  Target: LAMA2; (-) strand; PAM type: YTN; PAM sequence: CTG
cccagatctttcagcatgct

SEQ ID NO: 290161 - DNA, 20 bp, Artificial Sequence
  Description of Artificial Sequence: Synthetic oligonucleotide
  Target: LAMA2; (-) strand; PAM type: YTN; PAM sequence: TTA
tagctgcccagatctttcag

SEQ ID NO: 290162 - DNA, 20 bp, Artificial Sequence
  Description of Artificial Sequence: Synthetic oligonucleotide
  Target: LAMA2; (-) strand; PAM type: YTN; PAM sequence: TTT
atagctgcccagatctttca

SEQ ID NO: 290163 - DNA, 20 bp, Artificial Sequence
  Description of Artificial Sequence: Synthetic oligonucleotide
  Target: LAMA2; (-) strand; PAM type: YTN; PAM sequence: TTT
tatagctgcccagatctttc

SEQ ID NO: 290164 - DNA, 20 bp, Artificial Sequence
  Description of Artificial Sequence: Synthetic oligonucleotide
  Target: LAMA2; (-) strand; PAM type: YTN; PAM sequence: TTA
attttatagctgcccagatc

SEQ ID NO: 290165 - DNA, 20 bp, Artificial Sequence
  Description of Artificial Sequence: Synthetic oligonucleotide
  Target: LAMA2; (-) strand; PAM type: YTN; PAM sequence: CTT
aattttatagctgcccagat

SEQ ID NO: 290166 - DNA, 20 bp, Artificial Sequence
  Description of Artificial Sequence: Synthetic oligonucleotide
  Target: LAMA2; (-) strand; PAM type: YTN; PAM sequence: TTC
ttaattttatagctgcccag

SEQ ID NO: 290167 - DNA, 20 bp, Artificial Sequence
  Description of Artificial Sequence: Synthetic oligonucleotide
  Target: LAMA2; (-) strand; PAM type: YTN; PAM sequence: CTT
cttaattttatagctgccca

SEQ ID NO: 290168 - DNA, 20 bp, Artificial Sequence
  Description of Artificial Sequence: Synthetic oligonucleotide
  Target: LAMA2; (-) strand; PAM type: YTN; PAM sequence: TTA
aacatgtatcttcttaattt

SEQ ID NO: 290169 - DNA, 20 bp, Artificial Sequence
  Description of Artificial Sequence: Synthetic oligonucleotide
  Target: LAMA2; (-) strand; PAM type: YTN; PAM sequence: TTA
tacaaagttaaacatgtatc

SEQ ID NO: 290170 - DNA, 20 bp, Artificial Sequence
  Description of Artificial Sequence: Synthetic oligonucleotide
  Target: LAMA2; (-) strand; PAM type: YTN; PAM sequence: CTG
ggttatacaaagttaaacat

SEQ ID NO: 290171 - DNA, 20 bp, Artificial Sequence
  Description of Artificial Sequence: Synthetic oligonucleotide
  Target: LAMA2; (-) strand; PAM type: YTN; PAM sequence: CTC
aaataaatatgacaaatact

SEQ ID NO: 290172 - DNA, 20 bp, Artificial Sequence
  Description of Artificial Sequence: Synthetic oligonucleotide
  Target: LAMA2; (-) strand; PAM type: YTN; PAM sequence: CTG
gctcaaataaatatgacaaa

SEQ ID NO: 290173 - DNA, 20 bp, Artificial Sequence
  Description of Artificial Sequence: Synthetic oligonucleotide
  Target: LAMA2; (-) strand; PAM type: YTN; PAM sequence: TTC
ctggctcaaataaatatgac

SEQ ID NO: 290174 - DNA, 20 bp, Artificial Sequence
  Description of Artificial Sequence: Synthetic oligonucleotide
  Target: LAMA2; (-) strand; PAM type: YTN; PAM sequence: TTG
gatgttcctggctcaaataa

SEQ ID NO: 290175 - DNA, 20 bp, Artificial Sequence
  Description of Artificial Sequence: Synthetic oligonucleotide
  Target: LAMA2; (-) strand; PAM type: YTN; PAM sequence: CTT
ggatgttcctggctcaaata

SEQ ID NO: 290176 - DNA, 20 bp, Artificial Sequence
  Description of Artificial Sequence: Synthetic oligonucleotide
  Target: LAMA2; (-) strand; PAM type: YTN; PAM sequence: TTC
ttggatgttcctggctcaaa

SEQ ID NO: 290177 - DNA, 20 bp, Artificial Sequence
  Description of Artificial Sequence: Synthetic oligonucleotide
  Target: LAMA2; (-) strand; PAM type: YTN; PAM sequence: TTT
cttggatgttcctggctcaa

SEQ ID NO: 290178 - DNA, 20 bp, Artificial Sequence
  Description of Artificial Sequence: Synthetic oligonucleotide
  Target: LAMA2; (-) strand; PAM type: YTN; PAM sequence: CTA
gtttcttggatgttcctggc

SEQ ID NO: 290179 - DNA, 20 bp, Artificial Sequence
  Description of Artificial Sequence: Synthetic oligonucleotide
  Target: LAMA2; (-) strand; PAM type: YTN; PAM sequence: TTA
ggatgctagtttcttggatg

SEQ ID NO: 290180 - DNA, 20 bp, Artificial Sequence
  Description of Artificial Sequence: Synthetic oligonucleotide
  Target: LAMA2; (-) strand; PAM type: YTN; PAM sequence: TTT
aggatgctagtttcttggat

SEQ ID NO: 290181 - DNA, 20 bp, Artificial Sequence
  Description of Artificial Sequence: Synthetic oligonucleotide
  Target: LAMA2; (-) strand; PAM type: YTN; PAM sequence: CTT
taggatgctagtttcttgga

SEQ ID NO: 290182 - DNA, 20 bp, Artificial Sequence
  Description of Artificial Sequence: Synthetic oligonucleotide
  Target: LAMA2; (-) strand; PAM type: YTN; PAM sequence: TTC
tttaggatgctagtttcttg

SEQ ID NO: 290183 - DNA, 20 bp, Artificial Sequence
  Description of Artificial Sequence: Synthetic oligonucleotide
  Target: LAMA2; (-) strand; PAM type: YTN; PAM sequence: TTA
ttctttaggatgctagtttc

SEQ ID NO: 290184 - DNA, 20 bp, Artificial Sequence
  Description of Artificial Sequence: Synthetic oligonucleotide
  Target: LAMA2; (-) strand; PAM type: YTN; PAM sequence: TTT
attctttaggatgctagttt

SEQ ID NO: 290185 - DNA, 20 bp, Artificial Sequence
  Description of Artificial Sequence: Synthetic oligonucleotide
  Target: LAMA2; (-) strand; PAM type: YTN; PAM sequence: CTA
aatgtttattctttaggatg

SEQ ID NO: 290186 - DNA, 20 bp, Artificial Sequence
  Description of Artificial Sequence: Synthetic oligonucleotide
  Target: LAMA2; (-) strand; PAM type: YTN; PAM sequence: TTC
taaatgtttattctttagga

SEQ ID NO: 290187 - DNA, 20 bp, Artificial Sequence
  Description of Artificial Sequence: Synthetic oligonucleotide
  Target: LAMA2; (-) strand; PAM type: YTN; PAM sequence: TTT
ctaaatgtttattctttagg

SEQ ID NO: 290188 - DNA, 20 bp, Artificial Sequence
  Description of Artificial Sequence: Synthetic oligonucleotide
  Target: LAMA2; (-) strand; PAM type: YTN; PAM sequence: TTA
taagggaatttctaaatgtt

SEQ ID NO: 290189 - DNA, 20 bp, Artificial Sequence
  Description of Artificial Sequence: Synthetic oligonucleotide
  Target: LAMA2; (-) strand; PAM type: YTN; PAM sequence: TTG
aaccagtgggttataaggga

SEQ ID NO: 290190 - DNA, 20 bp, Artificial Sequence
  Description of Artificial Sequence: Synthetic oligonucleotide
  Target: LAMA2; (-) strand; PAM type: YTN; PAM sequence: TTT
gaaccagtgggttataaggg

SEQ ID NO: 290191 - DNA, 20 bp, Artificial Sequence
  Description of Artificial Sequence: Synthetic oligonucleotide
  Target: LAMA2; (-) strand; PAM type: YTN; PAM sequence: TTG
aaaatgggcatttgaaccag

SEQ ID NO: 290192 - DNA, 20 bp, Artificial Sequence
  Description of Artificial Sequence: Synthetic oligonucleotide
  Target: LAMA2; (-) strand; PAM type: YTN; PAM sequence: TTT
gaaaatgggcatttgaacca

SEQ ID NO: 290193 - DNA, 20 bp, Artificial Sequence
  Description of Artificial Sequence: Synthetic oligonucleotide
  Target: LAMA2; (-) strand; PAM type: YTN; PAM sequence: CTG
aataagcaagggtttgaaaa

SEQ ID NO: 290194 - DNA, 20 bp, Artificial Sequence
  Description of Artificial Sequence: Synthetic oligonucleotide
  Target: LAMA2; (-) strand; PAM type: YTN; PAM sequence: CTG
atgtaggatctgaataagca

SEQ ID NO: 290195 - DNA, 20 bp, Artificial Sequence
  Description of Artificial Sequence: Synthetic oligonucleotide
  Target: LAMA2; (-) strand; PAM type: YTN; PAM sequence: TTG
tctgatgtaggatctgaata

SEQ ID NO: 290196 - DNA, 20 bp, Artificial Sequence
  Description of Artificial Sequence: Synthetic oligonucleotide
  Target: LAMA2; (-) strand; PAM type: YTN; PAM sequence: TTT
gtctgatgtaggatctgaat

SEQ ID NO: 290197 - DNA, 20 bp, Artificial Sequence
  Description of Artificial Sequence: Synthetic oligonucleotide
  Target: LAMA2; (-) strand; PAM type: YTN; PAM sequence: CTT
tgtctgatgtaggatctgaa

SEQ ID NO: 290198 - DNA, 20 bp, Artificial Sequence
  Description of Artificial Sequence: Synthetic oligonucleotide
  Target: LAMA2; (-) strand; PAM type: YTN; PAM sequence: CTA
aacctttgtctgatgtagga

SEQ ID NO: 290199 - DNA, 20 bp, Artificial Sequence
  Description of Artificial Sequence: Synthetic oligonucleotide
  Target: LAMA2; (-) strand; PAM type: YTN; PAM sequence: CTC
taaacctttgtctgatgtag

SEQ ID NO: 290200 - DNA, 20 bp, Artificial Sequence
  Description of Artificial Sequence: Synthetic oligonucleotide
  Target: LAMA2; (-) strand; PAM type: YTN; PAM sequence: TTG
gcctctaaacctttgtctga

SEQ ID NO: 290201 - DNA, 20 bp, Artificial Sequence
  Description of Artificial Sequence: Synthetic oligonucleotide
  Target: LAMA2; (-) strand; PAM type: YTN; PAM sequence: TTT
ggcctctaaacctttgtctg

SEQ ID NO: 290202 - DNA, 20 bp, Artificial Sequence
  Description of Artificial Sequence: Synthetic oligonucleotide
  Target: LAMA2; (-) strand; PAM type: YTN; PAM sequence: TTG
acatcagtcccgtaagatga

SEQ ID NO: 290203 - DNA, 20 bp, Artificial Sequence
  Description of Artificial Sequence: Synthetic oligonucleotide
  Target: LAMA2; (-) strand; PAM type: YTN; PAM sequence: TTG
atgcgtattgacatcagtcc

SEQ ID NO: 290204 - DNA, 20 bp, Artificial Sequence
  Description of Artificial Sequence: Synthetic oligonucleotide
  Target: LAMA2; (-) strand; PAM type: YTN; PAM sequence: CTT
gatgcgtattgacatcagtc

SEQ ID NO: 290205 - DNA, 20 bp, Artificial Sequence
  Description of Artificial Sequence: Synthetic oligonucleotide
  Target: LAMA2; (-) strand; PAM type: YTN; PAM sequence: TTC
atatgcatccttgatgcgta

SEQ ID NO: 290206 - DNA, 20 bp, Artificial Sequence
  Description of Artificial Sequence: Synthetic oligonucleotide
  Target: LAMA2; (-) strand; PAM type: YTN; PAM sequence: CTT
catatgcatccttgatgcgt

SEQ ID NO: 290207 - DNA, 20 bp, Artificial Sequence
  Description of Artificial Sequence: Synthetic oligonucleotide
  Target: LAMA2; (-) strand; PAM type: YTN; PAM sequence: CTA
cttcatatgcatccttgatg

SEQ ID NO: 290208 - DNA, 20 bp, Artificial Sequence
  Description of Artificial Sequence: Synthetic oligonucleotide
  Target: LAMA2; (-) strand; PAM type: YTN; PAM sequence: TTA
actacttcatatgcatcctt

SEQ ID NO: 290209 - DNA, 20 bp, Artificial Sequence
  Description of Artificial Sequence: Synthetic oligonucleotide
  Target: LAMA2; (-) strand; PAM type: YTN; PAM sequence: TTT
aactacttcatatgcatcct

SEQ ID NO: 290210 - DNA, 20 bp, Artificial Sequence
  Description of Artificial Sequence: Synthetic oligonucleotide
  Target: LAMA2; (-) strand; PAM type: YTN; PAM sequence: CTT
taactacttcatatgcatcc

SEQ ID NO: 290211 - DNA, 20 bp, Artificial Sequence
  Description of Artificial Sequence: Synthetic oligonucleotide
  Target: LAMA2; (-) strand; PAM type: YTN; PAM sequence: CTA
gcctttaactacttcatatg

SEQ ID NO: 290212 - DNA, 20 bp, Artificial Sequence
  Description of Artificial Sequence: Synthetic oligonucleotide
  Target: LAMA2; (-) strand; PAM type: YTN; PAM sequence: TTA
gatctagcctttaactactt

SEQ ID NO: 290213 - DNA, 20 bp, Artificial Sequence
  Description of Artificial Sequence: Synthetic oligonucleotide
  Target: LAMA2; (-) strand; PAM type: YTN; PAM sequence: CTT
agatctagcctttaactact

SEQ ID NO: 290214 - DNA, 20 bp, Artificial Sequence
  Description of Artificial Sequence: Synthetic oligonucleotide
  Target: LAMA2; (-) strand; PAM type: YTN; PAM sequence: CTA
ccacatgtccttagatctag

SEQ ID NO: 290215 - DNA, 20 bp, Artificial Sequence
  Description of Artificial Sequence: Synthetic oligonucleotide
  Target: LAMA2; (-) strand; PAM type: YTN; PAM sequence: TTC
taccacatgtccttagatct

SEQ ID NO: 290216 - DNA, 20 bp, Artificial Sequence
  Description of Artificial Sequence: Synthetic oligonucleotide
  Target: LAMA2; (-) strand; PAM type: YTN; PAM sequence: TTT
ctaccacatgtccttagatc

SEQ ID NO: 290217 - DNA, 20 bp, Artificial Sequence
  Description of Artificial Sequence: Synthetic oligonucleotide
  Target: LAMA2; (-) strand; PAM type: YTN; PAM sequence: TTT
tctaccacatgtccttagat

SEQ ID NO: 290218 - DNA, 20 bp, Artificial Sequence
  Description of Artificial Sequence: Synthetic oligonucleotide
  Target: LAMA2; (-) strand; PAM type: YTN; PAM sequence: CTT
ttctaccacatgtccttaga

SEQ ID NO: 290219 - DNA, 20 bp, Artificial Sequence
  Description of Artificial Sequence: Synthetic oligonucleotide
  Target: LAMA2; (-) strand; PAM type: YTN; PAM sequence: TTA
catgcttttctaccacatgt

SEQ ID NO: 290220 - DNA, 20 bp, Artificial Sequence
  Description of Artificial Sequence: Synthetic oligonucleotide
  Target: LAMA2; (-) strand; PAM type: YTN; PAM sequence: CTG
aattacatgcttttctacca

SEQ ID NO: 290221 - DNA, 20 bp, Artificial Sequence
  Description of Artificial Sequence: Synthetic oligonucleotide
  Target: LAMA2; (-) strand; PAM type: YTN; PAM sequence: TTC
tgaattacatgcttttctac

SEQ ID NO: 290222 - DNA, 20 bp, Artificial Sequence
  Description of Artificial Sequence: Synthetic oligonucleotide
  Target: LAMA2; (-) strand; PAM type: YTN; PAM sequence: TTT
ctgaattacatgcttttcta

SEQ ID NO: 290223 - DNA, 20 bp, Artificial Sequence
  Description of Artificial Sequence: Synthetic oligonucleotide
  Target: LAMA2; (-) strand; PAM type: YTN; PAM sequence: TTT
tctgaattacatgcttttct

SEQ ID NO: 290224 - DNA, 20 bp, Artificial Sequence
  Description of Artificial Sequence: Synthetic oligonucleotide
  Target: LAMA2; (-) strand; PAM type: YTN; PAM sequence: TTT
ttctgaattacatgcttttc

SEQ ID NO: 290225 - DNA, 20 bp, Artificial Sequence
  Description of Artificial Sequence: Synthetic oligonucleotide
  Target: LAMA2; (-) strand; PAM type: YTN; PAM sequence: CTT
tttctgaattacatgctttt

SEQ ID NO: 290226 - DNA, 20 bp, Artificial Sequence
  Description of Artificial Sequence: Synthetic oligonucleotide
  Target: LAMA2; (-) strand; PAM type: YTN; PAM sequence: CTA
ggctttttctgaattacatg

SEQ ID NO: 290227 - DNA, 20 bp, Artificial Sequence
  Description of Artificial Sequence: Synthetic oligonucleotide
  Target: LAMA2; (-) strand; PAM type: YTN; PAM sequence: TTA
ggggtcaagctaggcttttt

SEQ ID NO: 290228 - DNA, 20 bp, Artificial Sequence
  Description of Artificial Sequence: Synthetic oligonucleotide
  Target: LAMA2; (-) strand; PAM type: YTN; PAM sequence: CTT
aggggtcaagctaggctttt

SEQ ID NO: 290229 - DNA, 20 bp, Artificial Sequence
  Description of Artificial Sequence: Synthetic oligonucleotide
  Target: LAMA2; (-) strand; PAM type: YTN; PAM sequence: TTC
ttaggggtcaagctaggctt

SEQ ID NO: 290230 - DNA, 20 bp, Artificial Sequence
  Description of Artificial Sequence: Synthetic oligonucleotide
  Target: LAMA2; (-) strand; PAM type: YTN; PAM sequence: CTT
cttaggggtcaagctaggct

SEQ ID NO: 290231 - DNA, 20 bp, Artificial Sequence
  Description of Artificial Sequence: Synthetic oligonucleotide
  Target: LAMA2; (-) strand; PAM type: YTN; PAM sequence: CTA
ccgcccccttcttaggggtc

SEQ ID NO: 290232 - DNA, 20 bp, Artificial Sequence
  Description of Artificial Sequence: Synthetic oligonucleotide
  Target: LAMA2; (-) strand; PAM type: YTN; PAM sequence: CTC
actaccgcccccttcttagg

SEQ ID NO: 290233 - DNA, 20 bp, Artificial Sequence
  Description of Artificial Sequence: Synthetic oligonucleotide
  Target: LAMA2; (-) strand; PAM type: YTN; PAM sequence: CTC
tcactaccgcccccttctta

SEQ ID NO: 290234 - DNA, 20 bp, Artificial Sequence
  Description of Artificial Sequence: Synthetic oligonucleotide
  Target: LAMA2; (-) strand; PAM type: YTN; PAM sequence: TTG
atccctctcactaccgcccc

SEQ ID NO: 290235 - DNA, 20 bp, Artificial Sequence
  Description of Artificial Sequence: Synthetic oligonucleotide
  Target: LAMA2; (-) strand; PAM type: YTN; PAM sequence: CTC
attgatccctctcactaccg

SEQ ID NO: 290236 - DNA, 20 bp, Artificial Sequence
  Description of Artificial Sequence: Synthetic oligonucleotide
  Target: LAMA2; (-) strand; PAM type: YTN; PAM sequence: TTA
tctcattgatccctctcact

SEQ ID NO: 290237 - DNA, 20 bp, Artificial Sequence
  Description of Artificial Sequence: Synthetic oligonucleotide
  Target: LAMA2; (-) strand; PAM type: YTN; PAM sequence: CTT
atctcattgatccctctcac

SEQ ID NO: 290238 - DNA, 20 bp, Artificial Sequence
  Description of Artificial Sequence: Synthetic oligonucleotide
  Target: LAMA2; (-) strand; PAM type: YTN; PAM sequence: CTC
cttatctcattgatccctct

SEQ ID NO: 290239 - DNA, 20 bp, Artificial Sequence
  Description of Artificial Sequence: Synthetic oligonucleotide
  Target: LAMA2; (-) strand; PAM type: YTN; PAM sequence: TTA
gaaagcagacaggaactcct

SEQ ID NO: 290240 - DNA, 20 bp, Artificial Sequence
  Description of Artificial Sequence: Synthetic oligonucleotide
  Target: LAMA2; (-) strand; PAM type: YTN; PAM sequence: TTT
agaaagcagacaggaactcc

SEQ ID NO: 290241 - DNA, 20 bp, Artificial Sequence
  Description of Artificial Sequence: Synthetic oligonucleotide
  Target: LAMA2; (-) strand; PAM type: YTN; PAM sequence: TTG
tttagaaagcagacaggaac

SEQ ID NO: 290242 - DNA, 20 bp, Artificial Sequence
  Description of Artificial Sequence: Synthetic oligonucleotide
  Target: LAMA2; (-) strand; PAM type: YTN; PAM sequence: CTG
cattgtttagaaagcagaca

SEQ ID NO: 290243 - DNA, 20 bp, Artificial Sequence
  Description of Artificial Sequence: Synthetic oligonucleotide
  Target: LAMA2; (-) strand; PAM type: YTN; PAM sequence: TTC
aaactgcattgtttagaaag

SEQ ID NO: 290244 - DNA, 20 bp, Artificial Sequence
  Description of Artificial Sequence: Synthetic oligonucleotide
  Target: LAMA2; (-) strand; PAM type: YTN; PAM sequence: CTG
ttcaaactgcattgtttaga

SEQ ID NO: 290245 - DNA, 20 bp, Artificial Sequence
  Description of Artificial Sequence: Synthetic oligonucleotide
  Target: LAMA2; (-) strand; PAM type: YTN; PAM sequence: CTC
tgttcaaactgcattgttta

SEQ ID NO: 290246 - DNA, 20 bp, Artificial Sequence
  Description of Artificial Sequence: Synthetic oligonucleotide
  Target: LAMA2; (-) strand; PAM type: YTN; PAM sequence: TTC
tctgttcaaactgcattgtt

SEQ ID NO: 290247 - DNA, 20 bp, Artificial Sequence
  Description of Artificial Sequence: Synthetic oligonucleotide
  Target: LAMA2; (-) strand; PAM type: YTN; PAM sequence: CTT
ctctgttcaaactgcattgt

SEQ ID NO: 290248 - DNA, 20 bp, Artificial Sequence
  Description of Artificial Sequence: Synthetic oligonucleotide
  Target: LAMA2; (-) strand; PAM type: YTN; PAM sequence: TTC
agaaatagatggaaaaaagg

SEQ ID NO: 290249 - DNA, 20 bp, Artificial Sequence
  Description of Artificial Sequence: Synthetic oligonucleotide
  Target: LAMA2; (-) strand; PAM type: YTN; PAM sequence: TTA
atgtgatgaagataagaatt

SEQ ID NO: 290250 - DNA, 20 bp, Artificial Sequence
  Description of Artificial Sequence: Synthetic oligonucleotide
  Target: LAMA2; (-) strand; PAM type: YTN; PAM sequence: TTT
aatgtgatgaagataagaat

SEQ ID NO: 290251 - DNA, 20 bp, Artificial Sequence
  Description of Artificial Sequence: Synthetic oligonucleotide
  Target: LAMA2; (-) strand; PAM type: YTN; PAM sequence: TTT
taatgtgatgaagataagaa

SEQ ID NO: 290252 - DNA, 20 bp, Artificial Sequence
  Description of Artificial Sequence: Synthetic oligonucleotide
  Target: LAMA2; (-) strand; PAM type: YTN; PAM sequence: TTT
ttaatgtgatgaagataaga

SEQ ID NO: 290253 - DNA, 20 bp, Artificial Sequence
  Description of Artificial Sequence: Synthetic oligonucleotide
  Target: LAMA2; (-) strand; PAM type: YTN; PAM sequence: CTC
aaggtatttttaatgtgatg

SEQ ID NO: 290254 - DNA, 20 bp, Artificial Sequence
  Description of Artificial Sequence: Synthetic oligonucleotide
  Target: LAMA2; (-) strand; PAM type: YTN; PAM sequence: CTC
tcaaggtatttttaatgtga

SEQ ID NO: 290255 - DNA, 20 bp, Artificial Sequence
  Description of Artificial Sequence: Synthetic oligonucleotide
  Target: LAMA2; (-) strand; PAM type: YTN; PAM sequence: TTG
ggtctctcaaggtattttta

SEQ ID NO: 290256 - DNA, 20 bp, Artificial Sequence
  Description of Artificial Sequence: Synthetic oligonucleotide
  Target: LAMA2; (-) strand; PAM type: YTN; PAM sequence: TTT
gggtctctcaaggtattttt

SEQ ID NO: 290257 - DNA, 20 bp, Artificial Sequence
  Description of Artificial Sequence: Synthetic oligonucleotide
  Target: LAMA2; (-) strand; PAM type: YTN; PAM sequence: TTT
tgggtctctcaaggtatttt

SEQ ID NO: 290258 - DNA, 20 bp, Artificial Sequence
  Description of Artificial Sequence: Synthetic oligonucleotide
  Target: LAMA2; (-) strand; PAM type: YTN; PAM sequence: CTT
ttgggtctctcaaggtattt

SEQ ID NO: 290259 - DNA, 20 bp, Artificial Sequence
  Description of Artificial Sequence: Synthetic oligonucleotide
  Target: LAMA2; (-) strand; PAM type: YTN; PAM sequence: TTC
ttttgggtctctcaaggtat

SEQ ID NO: 290260 - DNA, 20 bp, Artificial Sequence
  Description of Artificial Sequence: Synthetic oligonucleotide
  Target: LAMA2; (-) strand; PAM type: YTN; PAM sequence: TTT
cttttgggtctctcaaggta

SEQ ID NO: 290261 - DNA, 20 bp, Artificial Sequence
  Description of Artificial Sequence: Synthetic oligonucleotide
  Target: LAMA2; (-) strand; PAM type: YTN; PAM sequence: TTT
tcttttgggtctctcaaggt

SEQ ID NO: 290262 - DNA, 20 bp, Artificial Sequence
  Description of Artificial Sequence: Synthetic oligonucleotide
  Target: LAMA2; (-) strand; PAM type: YTN; PAM sequence: CTT
ttcttttgggtctctcaagg

SEQ ID NO: 290263 - DNA, 20 bp, Artificial Sequence
  Description of Artificial Sequence: Synthetic oligonucleotide
  Target: LAMA2; (-) strand; PAM type: YTN; PAM sequence: TTG
cttttcttttgggtctctca

SEQ ID NO: 290264 - DNA, 20 bp, Artificial Sequence
  Description of Artificial Sequence: Synthetic oligonucleotide
  Target: LAMA2; (-) strand; PAM type: YTN; PAM sequence: CTT
gcttttcttttgggtctctc

SEQ ID NO: 290265 - DNA, 20 bp, Artificial Sequence
  Description of Artificial Sequence: Synthetic oligonucleotide
  Target: LAMA2; (-) strand; PAM type: YTN; PAM sequence: TTC
ttgcttttcttttgggtctc

SEQ ID NO: 290266 - DNA, 20 bp, Artificial Sequence
  Description of Artificial Sequence: Synthetic oligonucleotide
  Target: LAMA2; (-) strand; PAM type: YTN; PAM sequence: CTT
cttgcttttcttttgggtct

SEQ ID NO: 290267 - DNA, 20 bp, Artificial Sequence
  Description of Artificial Sequence: Synthetic oligonucleotide
  Target: LAMA2; (-) strand; PAM type: YTN; PAM sequence: CTC
atgccttcttgcttttcttt

SEQ ID NO: 290268 - DNA, 20 bp, Artificial Sequence
  Description of Artificial Sequence: Synthetic oligonucleotide
  Target: LAMA2; (-) strand; PAM type: YTN; PAM sequence: TTG
tgacagaggtacagtcctca

SEQ ID NO: 290269 - DNA, 20 bp, Artificial Sequence
  Description of Artificial Sequence: Synthetic oligonucleotide
  Target: LAMA2; (-) strand; PAM type: YTN; PAM sequence: CTA
agtgttgtgacagaggtaca

SEQ ID NO: 290270 - DNA, 20 bp, Artificial Sequence
  Description of Artificial Sequence: Synthetic oligonucleotide
  Target: LAMA2; (-) strand; PAM type: YTN; PAM sequence: TTA
gaccaggatgctaagtgttg

SEQ ID NO: 290271 - DNA, 20 bp, Artificial Sequence
  Description of Artificial Sequence: Synthetic oligonucleotide
  Target: LAMA2; (-) strand; PAM type: YTN; PAM sequence: TTT
agaccaggatgctaagtgtt

SEQ ID NO: 290272 - DNA, 20 bp, Artificial Sequence
  Description of Artificial Sequence: Synthetic oligonucleotide
  Target: LAMA2; (-) strand; PAM type: YTN; PAM sequence: TTT
tagaccaggatgctaagtgt

SEQ ID NO: 290273 - DNA, 20 bp, Artificial Sequence
  Description of Artificial Sequence: Synthetic oligonucleotide
  Target: LAMA2; (-) strand; PAM type: YTN; PAM sequence: TTA
cattttagaccaggatgcta

SEQ ID NO: 290274 - DNA, 20 bp, Artificial Sequence
  Description of Artificial Sequence: Synthetic oligonucleotide
  Target: LAMA2; (-) strand; PAM type: YTN; PAM sequence: CTG
taaattacattttagaccag

SEQ ID NO: 290275 - DNA, 20 bp, Artificial Sequence
  Description of Artificial Sequence: Synthetic oligonucleotide
  Target: LAMA2; (-) strand; PAM type: YTN; PAM sequence: TTG
tacaaggaagtggtgagatc

SEQ ID NO: 290276 - DNA, 20 bp, Artificial Sequence
  Description of Artificial Sequence: Synthetic oligonucleotide
  Target: LAMA2; (-) strand; PAM type: YTN; PAM sequence: TTG
tacatggaagtggaagggga

SEQ ID NO: 290277 - DNA, 20 bp, Artificial Sequence
  Description of Artificial Sequence: Synthetic oligonucleotide
  Target: LAMA2; (-) strand; PAM type: YTN; PAM sequence: TTG
taaaatatgattgtacatgg

SEQ ID NO: 290278 - DNA, 20 bp, Artificial Sequence
  Description of Artificial Sequence: Synthetic oligonucleotide
  Target: LAMA2; (-) strand; PAM type: YTN; PAM sequence: CTG
ttgtaaaatatgattgtaca

SEQ ID NO: 290279 - DNA, 20 bp, Artificial Sequence
  Description of Artificial Sequence: Synthetic oligonucleotide
  Target: LAMA2; (-) strand; PAM type: YTN; PAM sequence: CTG
caaagtgtcactgttgtaaa

SEQ ID NO: 290280 - DNA, 20 bp, Artificial Sequence
  Description of Artificial Sequence: Synthetic oligonucleotide
  Target: LAMA2; (-) strand; PAM type: YTN; PAM sequence: CTC
atctgcaaagtgtcactgtt

SEQ ID NO: 290281 - DNA, 20 bp, Artificial Sequence
  Description of Artificial Sequence: Synthetic oligonucleotide
  Target: LAMA2; (-) strand; PAM type: YTN; PAM sequence: TTA
gactcatctgcaaagtgtca

SEQ ID NO: 290282 - DNA, 20 bp, Artificial Sequence
  Description of Artificial Sequence: Synthetic oligonucleotide
  Target: LAMA2; (-) strand; PAM type: YTN; PAM sequence: TTT
agactcatctgcaaagtgtc

SEQ ID NO: 290283 - DNA, 20 bp, Artificial Sequence
  Description of Artificial Sequence: Synthetic oligonucleotide
  Target: LAMA2; (-) strand; PAM type: YTN; PAM sequence: CTG
ggatttagactcatctgcaa

SEQ ID NO: 290284 - DNA, 20 bp, Artificial Sequence
  Description of Artificial Sequence: Synthetic oligonucleotide
  Target: LAMA2; (-) strand; PAM type: YTN; PAM sequence: CTA
ctgggatttagactcatctg

SEQ ID NO: 290285 - DNA, 20 bp, Artificial Sequence
  Description of Artificial Sequence: Synthetic oligonucleotide
  Target: LAMA2; (-) strand; PAM type: YTN; PAM sequence: CTA
tccacaggaactactgggat

SEQ ID NO: 290286 - DNA, 20 bp, Artificial Sequence
  Description of Artificial Sequence: Synthetic oligonucleotide
  Target: LAMA2; (-) strand; PAM type: YTN; PAM sequence: TTA
ctatccacaggaactactgg

SEQ ID NO: 290287 - DNA, 20 bp, Artificial Sequence
  Description of Artificial Sequence: Synthetic oligonucleotide
  Target: LAMA2; (-) strand; PAM type: YTN; PAM sequence: TTT
actatccacaggaactactg

SEQ ID NO: 290288 - DNA, 20 bp, Artificial Sequence
  Description of Artificial Sequence: Synthetic oligonucleotide
  Target: LAMA2; (-) strand; PAM type: YTN; PAM sequence: TTT
tactatccacaggaactact

SEQ ID NO: 290289 - DNA, 20 bp, Artificial Sequence
  Description of Artificial Sequence: Synthetic oligonucleotide
  Target: LAMA2; (-) strand; PAM type: YTN; PAM sequence: CTG
taagttttactatccacagg

SEQ ID NO: 290290 - DNA, 20 bp, Artificial Sequence
  Description of Artificial Sequence: Synthetic oligonucleotide
  Target: LAMA2; (-) strand; PAM type: YTN; PAM sequence: TTC
tgtaagttttactatccaca

SEQ ID NO: 290291 - DNA, 20 bp, Artificial Sequence
  Description of Artificial Sequence: Synthetic oligonucleotide
  Target: LAMA2; (-) strand; PAM type: YTN; PAM sequence: TTT
ctgtaagttttactatccac

SEQ ID NO: 290292 - DNA, 20 bp, Artificial Sequence
  Description of Artificial Sequence: Synthetic oligonucleotide
  Target: LAMA2; (-) strand; PAM type: YTN; PAM sequence: CTT
tctgtaagttttactatcca

SEQ ID NO: 290293 - DNA, 20 bp, Artificial Sequence
  Description of Artificial Sequence: Synthetic oligonucleotide
  Target: LAMA2; (-) strand; PAM type: YTN; PAM sequence: CTC
tttctgtaagttttactatc

SEQ ID NO: 290294 - DNA, 20 bp, Artificial Sequence
  Description of Artificial Sequence: Synthetic oligonucleotide
  Target: LAMA2; (-) strand; PAM type: YTN; PAM sequence: CTA
tggctctttctgtaagtttt

SEQ ID NO: 290295 - DNA, 20 bp, Artificial Sequence
  Description of Artificial Sequence: Synthetic oligonucleotide
  Target: LAMA2; (-) strand; PAM type: YTN; PAM sequence: CTA
atctatggctctttctgtaa

SEQ ID NO: 290296 - DNA, 20 bp, Artificial Sequence
  Description of Artificial Sequence: Synthetic oligonucleotide
  Target: LAMA2; (-) strand; PAM type: YTN; PAM sequence: TTA
gaaatatgcctaatctatgg

SEQ ID NO: 290297 - DNA, 20 bp, Artificial Sequence
  Description of Artificial Sequence: Synthetic oligonucleotide
  Target: LAMA2; (-) strand; PAM type: YTN; PAM sequence: TTA
attagaaatatgcctaatct

SEQ ID NO: 290298 - DNA, 20 bp, Artificial Sequence
  Description of Artificial Sequence: Synthetic oligonucleotide
  Target: LAMA2; (-) strand; PAM type: YTN; PAM sequence: TTA
ggaatcagataattaattag

SEQ ID NO: 290299 - DNA, 20 bp, Artificial Sequence
  Description of Artificial Sequence: Synthetic oligonucleotide
  Target: LAMA2; (-) strand; PAM type: YTN; PAM sequence: CTA
attaggaatcagataattaa

SEQ ID NO: 290300 - DNA, 20 bp, Artificial Sequence
  Description of Artificial Sequence: Synthetic oligonucleotide
  Target: LAMA2; (-) strand; PAM type: YTN; PAM sequence: CTA
aataacaaagatatctaatt

SEQ ID NO: 290301 - DNA, 20 bp, Artificial Sequence
  Description of Artificial Sequence: Synthetic oligonucleotide
  Target: LAMA2; (-) strand; PAM type: YTN; PAM sequence: TTA
aaaatgctaaataacaaaga

SEQ ID NO: 290302 - DNA, 20 bp, Artificial Sequence
  Description of Artificial Sequence: Synthetic oligonucleotide
  Target: LAMA2; (-) strand; PAM type: YTN; PAM sequence: TTA
gaaaataaagcaaggttaaa

SEQ ID NO: 290303 - DNA, 20 bp, Artificial Sequence
  Description of Artificial Sequence: Synthetic oligonucleotide
  Target: LAMA2; (-) strand; PAM type: YTN; PAM sequence: CTA
gataagtagttagaaaataa

SEQ ID NO: 290304 - DNA, 20 bp, Artificial Sequence
  Description of Artificial Sequence: Synthetic oligonucleotide
  Target: LAMA2; (-) strand; PAM type: YTN; PAM sequence: CTA
taatctagataagtagttag

SEQ ID NO: 290305 - DNA, 20 bp, Artificial Sequence
  Description of Artificial Sequence: Synthetic oligonucleotide
  Target: LAMA2; (-) strand; PAM type: YTN; PAM sequence: TTC
tataatctagataagtagtt

SEQ ID NO: 290306 - DNA, 20 bp, Artificial Sequence
  Description of Artificial Sequence: Synthetic oligonucleotide
  Target: LAMA2; (-) strand; PAM type: YTN; PAM sequence: TTT
ctataatctagataagtagt

SEQ ID NO: 290307 - DNA, 20 bp, Artificial Sequence
  Description of Artificial Sequence: Synthetic oligonucleotide
  Target: LAMA2; (-) strand; PAM type: YTN; PAM sequence: TTT
tctataatctagataagtag

SEQ ID NO: 290308 - DNA, 20 bp, Artificial Sequence
  Description of Artificial Sequence: Synthetic oligonucleotide
  Target: LAMA2; (-) strand; PAM type: YTN; PAM sequence: TTG
atgtagttttctataatcta

SEQ ID NO: 290309 - DNA, 20 bp, Artificial Sequence
  Description of Artificial Sequence: Synthetic oligonucleotide
  Target: LAMA2; (-) strand; PAM type: YTN; PAM sequence: TTT
gatgtagttttctataatct

SEQ ID NO: 290310 - DNA, 20 bp, Artificial Sequence
  Description of Artificial Sequence: Synthetic oligonucleotide
  Target: LAMA2; (-) strand; PAM type: YTN; PAM sequence: CTG
aacatcaaagatccatttga

SEQ ID NO: 290311 - DNA, 20 bp, Artificial Sequence
  Description of Artificial Sequence: Synthetic oligonucleotide
  Target: LAMA2; (-) strand; PAM type: YTN; PAM sequence: CTA
taactgaacatcaaagatcc

SEQ ID NO: 290312 - DNA, 20 bp, Artificial Sequence
  Description of Artificial Sequence: Synthetic oligonucleotide
  Target: LAMA2; (-) strand; PAM type: YTN; PAM sequence: TTG
aacaccagtgaaggcaaacc

SEQ ID NO: 290313 - DNA, 20 bp, Artificial Sequence
  Description of Artificial Sequence: Synthetic oligonucleotide
  Target: LAMA2; (-) strand; PAM type: YTN; PAM sequence: CTT
gaacaccagtgaaggcaaac

SEQ ID NO: 290314 - DNA, 20 bp, Artificial Sequence
  Description of Artificial Sequence: Synthetic oligonucleotide
  Target: LAMA2; (-) strand; PAM type: YTN; PAM sequence: CTA
tcccccaaagagcatgaaaa

SEQ ID NO: 290315 - DNA, 20 bp, Artificial Sequence
  Description of Artificial Sequence: Synthetic oligonucleotide
  Target: LAMA2; (-) strand; PAM type: YTN; PAM sequence: TTA
aactatcccccaaagagcat

SEQ ID NO: 290316 - DNA, 20 bp, Artificial Sequence
  Description of Artificial Sequence: Synthetic oligonucleotide
  Target: LAMA2; (-) strand; PAM type: YTN; PAM sequence: TTA
ttaaactatcccccaaagag

SEQ ID NO: 290317 - DNA, 20 bp, Artificial Sequence
  Description of Artificial Sequence: Synthetic oligonucleotide
  Target: LAMA2; (-) strand; PAM type: YTN; PAM sequence: TTA
cagaaataacatcaataaaa

SEQ ID NO: 290318 - DNA, 20 bp, Artificial Sequence
  Description of Artificial Sequence: Synthetic oligonucleotide
  Target: LAMA2; (-) strand; PAM type: YTN; PAM sequence: TTA
ataattacagaaataacatc

SEQ ID NO: 290319 - DNA, 20 bp, Artificial Sequence
  Description of Artificial Sequence: Synthetic oligonucleotide
  Target: LAMA2; (-) strand; PAM type: YTN; PAM sequence: TTT
aataattacagaaataacat

SEQ ID NO: 290320 - DNA, 20 bp, Artificial Sequence
  Description of Artificial Sequence: Synthetic oligonucleotide
  Target: LAMA2; (-) strand; PAM type: YTN; PAM sequence: TTA
gcaatttaataattacagaa

SEQ ID NO: 290321 - DNA, 20 bp, Artificial Sequence
  Description of Artificial Sequence: Synthetic oligonucleotide
  Target: LAMA2; (-) strand; PAM type: YTN; PAM sequence: TTT
agcaatttaataattacaga

SEQ ID NO: 290322 - DNA, 20 bp, Artificial Sequence
  Description of Artificial Sequence: Synthetic oligonucleotide
  Target: LAMA2; (-) strand; PAM type: YTN; PAM sequence: CTA
tatttagcaatttaataatt

SEQ ID NO: 290323 - DNA, 20 bp, Artificial Sequence
  Description of Artificial Sequence: Synthetic oligonucleotide
  Target: LAMA2; (-) strand; PAM type: YTN; PAM sequence: TTG
cactatatttagcaatttaa

SEQ ID NO: 290324 - DNA, 20 bp, Artificial Sequence
  Description of Artificial Sequence: Synthetic oligonucleotide
  Target: LAMA2; (-) strand; PAM type: YTN; PAM sequence: CTT
gcactatatttagcaattta

SEQ ID NO: 290325 - DNA, 20 bp, Artificial Sequence
  Description of Artificial Sequence: Synthetic oligonucleotide
  Target: LAMA2; (-) strand; PAM type: YTN; PAM sequence: CTC
aagcacttgcactatattta

SEQ ID NO: 290326 - DNA, 20 bp, Artificial Sequence
  Description of Artificial Sequence: Synthetic oligonucleotide
  Target: LAMA2; (-) strand; PAM type: YTN; PAM sequence: TTC
tcaagcacttgcactatatt

SEQ ID NO: 290327 - DNA, 20 bp, Artificial Sequence
  Description of Artificial Sequence: Synthetic oligonucleotide
  Target: LAMA2; (-) strand; PAM type: YTN; PAM sequence: TTT
ctcaagcacttgcactatat

SEQ ID NO: 290328 - DNA, 20 bp, Artificial Sequence
  Description of Artificial Sequence: Synthetic oligonucleotide
  Target: LAMA2; (-) strand; PAM type: YTN; PAM sequence: CTT
tctcaagcacttgcactata

SEQ ID NO: 290329 - DNA, 20 bp, Artificial Sequence
  Description of Artificial Sequence: Synthetic oligonucleotide
  Target: LAMA2; (-) strand; PAM type: YTN; PAM sequence: TTG
actttctcaagcacttgcac

SEQ ID NO: 290330 - DNA, 20 bp, Artificial Sequence
  Description of Artificial Sequence: Synthetic oligonucleotide
  Target: LAMA2; (-) strand; PAM type: YTN; PAM sequence: TTA
acattgactttctcaagcac

SEQ ID NO: 290331 - DNA, 20 bp, Artificial Sequence
  Description of Artificial Sequence: Synthetic oligonucleotide
  Target: LAMA2; (-) strand; PAM type: YTN; PAM sequence: TTC
gagaattaacattgactttc

SEQ ID NO: 290332 - DNA, 20 bp, Artificial Sequence
  Description of Artificial Sequence: Synthetic oligonucleotide
  Target: LAMA2; (-) strand; PAM type: YTN; PAM sequence: TTA
attcgagaattaacattgac

SEQ ID NO: 290333 - DNA, 20 bp, Artificial Sequence
  Description of Artificial Sequence: Synthetic oligonucleotide
  Target: LAMA2; (-) strand; PAM type: YTN; PAM sequence: TTT
aattcgagaattaacattga

SEQ ID NO: 290334 - DNA, 20 bp, Artificial Sequence
  Description of Artificial Sequence: Synthetic oligonucleotide
  Target: LAMA2; (-) strand; PAM type: YTN; PAM sequence: TTG
gtttaattcgagaattaaca

SEQ ID NO: 290335 - DNA, 20 bp, Artificial Sequence
  Description of Artificial Sequence: Synthetic oligonucleotide
  Target: LAMA2; (-) strand; PAM type: YTN; PAM sequence: TTT
ggtttaattcgagaattaac

SEQ ID NO: 290336 - DNA, 20 bp, Artificial Sequence
  Description of Artificial Sequence: Synthetic oligonucleotide
  Target: LAMA2; (-) strand; PAM type: YTN; PAM sequence: TTC
aagacaaatttggtttaatt

SEQ ID NO: 290337 - DNA, 20 bp, Artificial Sequence
  Description of Artificial Sequence: Synthetic oligonucleotide
  Target: LAMA2; (-) strand; PAM type: YTN; PAM sequence: CTT
caagacaaatttggtttaat

SEQ ID NO: 290338 - DNA, 20 bp, Artificial Sequence
  Description of Artificial Sequence: Synthetic oligonucleotide
  Target: LAMA2; (-) strand; PAM type: YTN; PAM sequence: TTA
atacttcaagacaaatttgg

SEQ ID NO: 290339 - DNA, 20 bp, Artificial Sequence
  Description of Artificial Sequence: Synthetic oligonucleotide
  Target: LAMA2; (-) strand; PAM type: YTN; PAM sequence: CTA
tatcatcattaatacttcaa

SEQ ID NO: 290340 - DNA, 20 bp, Artificial Sequence
  Description of Artificial Sequence: Synthetic oligonucleotide
  Target: LAMA2; (-) strand; PAM type: YTN; PAM sequence: TTG
agcaatatcaaccacatcta

SEQ ID NO: 290341 - DNA, 20 bp, Artificial Sequence
  Description of Artificial Sequence: Synthetic oligonucleotide
  Target: LAMA2; (-) strand; PAM type: YTN; PAM sequence: TTT
gagcaatatcaaccacatct

SEQ ID NO: 290342 - DNA, 20 bp, Artificial Sequence
  Description of Artificial Sequence: Synthetic oligonucleotide
  Target: LAMA2; (-) strand; PAM type: YTN; PAM sequence: TTA
tttgagcaatatcaaccaca

SEQ ID NO: 290343 - DNA, 20 bp, Artificial Sequence
  Description of Artificial Sequence: Synthetic oligonucleotide
  Target: LAMA2; (-) strand; PAM type: YTN; PAM sequence: TTT
atttgagcaatatcaaccac

SEQ ID NO: 290344 - DNA, 20 bp, Artificial Sequence
  Description of Artificial Sequence: Synthetic oligonucleotide
  Target: LAMA2; (-) strand; PAM type: YTN; PAM sequence: TTT
tatttgagcaatatcaacca

SEQ ID NO: 290345 - DNA, 20 bp, Artificial Sequence
  Description of Artificial Sequence: Synthetic oligonucleotide
  Target: LAMA2; (-) strand; PAM type: YTN; PAM sequence: TTA
acattttatttgagcaatat

SEQ ID NO: 290346 - DNA, 20 bp, Artificial Sequence
  Description of Artificial Sequence: Synthetic oligonucleotide
  Target: LAMA2; (-) strand; PAM type: YTN; PAM sequence: TTT
aacattttatttgagcaata

SEQ ID NO: 290347 - DNA, 20 bp, Artificial Sequence
  Description of Artificial Sequence: Synthetic oligonucleotide
  Target: LAMA2; (-) strand; PAM type: YTN; PAM sequence: CTG
taaaggagaaagaaagttta

SEQ ID NO: 290348 - DNA, 20 bp, Artificial Sequence
  Description of Artificial Sequence: Synthetic oligonucleotide
  Target: LAMA2; (-) strand; PAM type: YTN; PAM sequence: TTG
gctgtaaaggagaaagaaag

SEQ ID NO: 290349 - DNA, 20 bp, Artificial Sequence
  Description of Artificial Sequence: Synthetic oligonucleotide
  Target: LAMA2; (-) strand; PAM type: YTN; PAM sequence: TTG
atatattggctgtaaaggag

SEQ ID NO: 290350 - DNA, 20 bp, Artificial Sequence
  Description of Artificial Sequence: Synthetic oligonucleotide
  Target: LAMA2; (-) strand; PAM type: YTN; PAM sequence: CTA
caattgatatattggctgta

SEQ ID NO: 290351 - DNA, 20 bp, Artificial Sequence
  Description of Artificial Sequence: Synthetic oligonucleotide
  Target: LAMA2; (-) strand; PAM type: YTN; PAM sequence: CTA
tatctacaattgatatattg

SEQ ID NO: 290352 - DNA, 20 bp, Artificial Sequence
  Description of Artificial Sequence: Synthetic oligonucleotide
  Target: LAMA2; (-) strand; PAM type: YTN; PAM sequence: TTA
gtatctatatctacaattga

SEQ ID NO: 290353 - DNA, 20 bp, Artificial Sequence
  Description of Artificial Sequence: Synthetic oligonucleotide
  Target: LAMA2; (-) strand; PAM type: YTN; PAM sequence: CTG
attagtatctatatctacaa

SEQ ID NO: 290354 - DNA, 20 bp, Artificial Sequence
  Description of Artificial Sequence: Synthetic oligonucleotide
  Target: LAMA2; (-) strand; PAM type: YTN; PAM sequence: CTC
ctgattagtatctatatcta

SEQ ID NO: 290355 - DNA, 20 bp, Artificial Sequence
  Description of Artificial Sequence: Synthetic oligonucleotide
  Target: LAMA2; (-) strand; PAM type: YTN; PAM sequence: CTC
ctcctgattagtatctatat

SEQ ID NO: 290356 - DNA, 20 bp, Artificial Sequence
  Description of Artificial Sequence: Synthetic oligonucleotide
  Target: LAMA2; (-) strand; PAM type: YTN; PAM sequence: TTC
tcctcctgattagtatctat

SEQ ID NO: 290357 - DNA, 20 bp, Artificial Sequence
  Description of Artificial Sequence: Synthetic oligonucleotide
  Target: LAMA2; (-) strand; PAM type: YTN; PAM sequence: CTA
tattctcctcctgattagta

SEQ ID NO: 290358 - DNA, 20 bp, Artificial Sequence
  Description of Artificial Sequence: Synthetic oligonucleotide
  Target: LAMA2; (-) strand; PAM type: YTN; PAM sequence: TTG
ctatattctcctcctgatta

SEQ ID NO: 290359 - DNA, 20 bp, Artificial Sequence
  Description of Artificial Sequence: Synthetic oligonucleotide
  Target: LAMA2; (-) strand; PAM type: YTN; PAM sequence: TTC
cagaagacgaagttgctata

SEQ ID NO: 290360 - DNA, 20 bp, Artificial Sequence
  Description of Artificial Sequence: Synthetic oligonucleotide
  Target: LAMA2; (-) strand; PAM type: YTN; PAM sequence: TTT
ccagaagacgaagttgctat

SEQ ID NO: 290361 - DNA, 20 bp, Artificial Sequence
  Description of Artificial Sequence: Synthetic oligonucleotide
  Target: LAMA2; (-) strand; PAM type: YTN; PAM sequence: TTG
tttccagaagacgaagttgc

SEQ ID NO: 290362 - DNA, 20 bp, Artificial Sequence
  Description of Artificial Sequence: Synthetic oligonucleotide
  Target: LAMA2; (-) strand; PAM type: YTN; PAM sequence: TTC
aagtcaagaccaaagttgtt

SEQ ID NO: 290363 - DNA, 20 bp, Artificial Sequence
  Description of Artificial Sequence: Synthetic oligonucleotide
  Target: LAMA2; (-) strand; PAM type: YTN; PAM sequence: TTT
caagtcaagaccaaagttgt

SEQ ID NO: 290364 - DNA, 20 bp, Artificial Sequence
  Description of Artificial Sequence: Synthetic oligonucleotide
  Target: LAMA2; (-) strand; PAM type: YTN; PAM sequence: CTT
tcaagtcaagaccaaagttg

SEQ ID NO: 290365 - DNA, 20 bp, Artificial Sequence
  Description of Artificial Sequence: Synthetic oligonucleotide
  Target: LAMA2; (-) strand; PAM type: YTN; PAM sequence: CTG
ctttcaagtcaagaccaaag

SEQ ID NO: 290366 - DNA, 20 bp, Artificial Sequence
  Description of Artificial Sequence: Synthetic oligonucleotide
  Target: LAMA2; (-) strand; PAM type: YTN; PAM sequence: TTG
tcatctgctttcaagtcaag

SEQ ID NO: 290367 - DNA, 20 bp, Artificial Sequence
  Description of Artificial Sequence: Synthetic oligonucleotide
  Target: LAMA2; (-) strand; PAM type: YTN; PAM sequence: TTT
gtcatctgctttcaagtcaa

SEQ ID NO: 290368 - DNA, 20 bp, Artificial Sequence
  Description of Artificial Sequence: Synthetic oligonucleotide
  Target: LAMA2; (-) strand; PAM type: YTN; PAM sequence: TTT
tgtcatctgctttcaagtca

SEQ ID NO: 290369 - DNA, 20 bp, Artificial Sequence
  Description of Artificial Sequence: Synthetic oligonucleotide
  Target: LAMA2; (-) strand; PAM type: YTN; PAM sequence: TTG
gcaggccaccaaaatatatt

SEQ ID NO: 290370 - DNA, 20 bp, Artificial Sequence
  Description of Artificial Sequence: Synthetic oligonucleotide
  Target: LAMA2; (-) strand; PAM type: YTN; PAM sequence: CTC
agcgttggcaggccaccaaa

SEQ ID NO: 290371 - DNA, 20 bp, Artificial Sequence
  Description of Artificial Sequence: Synthetic oligonucleotide
  Target: LAMA2; (-) strand; PAM type: YTN; PAM sequence: TTC
tcagcgttggcaggccacca

SEQ ID NO: 290372 - DNA, 20 bp, Artificial Sequence
  Description of Artificial Sequence: Synthetic oligonucleotide
  Target: LAMA2; (-) strand; PAM type: YTN; PAM sequence: TTT
ctcagcgttggcaggccacc

SEQ ID NO: 290373 - DNA, 20 bp, Artificial Sequence
  Description of Artificial Sequence: Synthetic oligonucleotide
  Target: LAMA2; (-) strand; PAM type: YTN; PAM sequence: CTC
aagtttctcagcgttggcag

SEQ ID NO: 290374 - DNA, 20 bp, Artificial Sequence
  Description of Artificial Sequence: Synthetic oligonucleotide
  Target: LAMA2; (-) strand; PAM type: YTN; PAM sequence: TTA
cctcaagtttctcagcgttg

SEQ ID NO: 290375 - DNA, 20 bp, Artificial Sequence
  Description of Artificial Sequence: Synthetic oligonucleotide
  Target: LAMA2; (-) strand; PAM type: YTN; PAM sequence: CTA
aattacctcaagtttctcag

SEQ ID NO: 290376 - DNA, 20 bp, Artificial Sequence
  Description of Artificial Sequence: Synthetic oligonucleotide
  Target: LAMA2; (-) strand; PAM type: YTN; PAM sequence: TTA
catataaactaaattacctc

SEQ ID NO: 290377 - DNA, 20 bp, Artificial Sequence
  Description of Artificial Sequence: Synthetic oligonucleotide
  Target: LAMA2; (-) strand; PAM type: YTN; PAM sequence: TTT
acatataaactaaattacct

SEQ ID NO: 290378 - DNA, 20 bp, Artificial Sequence
  Description of Artificial Sequence: Synthetic oligonucleotide
  Target: LAMA2; (-) strand; PAM type: YTN; PAM sequence: CTT
tacatataaactaaattacc

SEQ ID NO: 290379 - DNA, 20 bp, Artificial Sequence
  Description of Artificial Sequence: Synthetic oligonucleotide
  Target: LAMA2; (-) strand; PAM type: YTN; PAM sequence: TTA
gctttacatataaactaaat

SEQ ID NO: 290380 - DNA, 20 bp, Artificial Sequence
  Description of Artificial Sequence: Synthetic oligonucleotide
  Target: LAMA2; (-) strand; PAM type: YTN; PAM sequence: CTT
agctttacatataaactaaa

SEQ ID NO: 290381 - DNA, 20 bp, Artificial Sequence
  Description of Artificial Sequence: Synthetic oligonucleotide
  Target: LAMA2; (-) strand; PAM type: YTN; PAM sequence: TTA
atccttagctttacatataa

SEQ ID NO: 290382 - DNA, 20 bp, Artificial Sequence
  Description of Artificial Sequence: Synthetic oligonucleotide
  Target: LAMA2; (-) strand; PAM type: YTN; PAM sequence: CTT
aatccttagctttacatata

SEQ ID NO: 290383 - DNA, 20 bp, Artificial Sequence
  Description of Artificial Sequence: Synthetic oligonucleotide
  Target: LAMA2; (-) strand; PAM type: YTN; PAM sequence: TTA
aaacttaatccttagcttta

SEQ ID NO: 290384 - DNA, 20 bp, Artificial Sequence
  Description of Artificial Sequence: Synthetic oligonucleotide
  Target: LAMA2; (-) strand; PAM type: YTN; PAM sequence: TTA
attaaaacttaatccttagc

SEQ ID NO: 290385 - DNA, 20 bp, Artificial Sequence
  Description of Artificial Sequence: Synthetic oligonucleotide
  Target: LAMA2; (-) strand; PAM type: YTN; PAM sequence: TTT
aattaaaacttaatccttag

SEQ ID NO: 290386 - DNA, 20 bp, Artificial Sequence
  Description of Artificial Sequence: Synthetic oligonucleotide
  Target: LAMA2; (-) strand; PAM type: YTN; PAM sequence: CTA
gtgagcatagtggtcattta

SEQ ID NO: 290387 - DNA, 20 bp, Artificial Sequence
  Description of Artificial Sequence: Synthetic oligonucleotide
  Target: LAMA2; (-) strand; PAM type: YTN; PAM sequence: CTC
tagtgagcatagtggtcatt

SEQ ID NO: 290388 - DNA, 20 bp, Artificial Sequence
  Description of Artificial Sequence: Synthetic oligonucleotide
  Target: LAMA2; (-) strand; PAM type: YTN; PAM sequence: TTC
agaactctagtgagcatagt

SEQ ID NO: 290389 - DNA, 20 bp, Artificial Sequence
  Description of Artificial Sequence: Synthetic oligonucleotide
  Target: LAMA2; (-) strand; PAM type: YTN; PAM sequence: CTT
cagaactctagtgagcatag

SEQ ID NO: 290390 - DNA, 20 bp, Artificial Sequence
  Description of Artificial Sequence: Synthetic oligonucleotide
  Target: LAMA2; (-) strand; PAM type: YTN; PAM sequence: TTA
aacttcagaactctagtgag

SEQ ID NO: 290391 - DNA, 20 bp, Artificial Sequence
  Description of Artificial Sequence: Synthetic oligonucleotide
  Target: LAMA2; (-) strand; PAM type: YTN; PAM sequence: TTG
taattaaacttcagaactct

SEQ ID NO: 290392 - DNA, 20 bp, Artificial Sequence
  Description of Artificial Sequence: Synthetic oligonucleotide
  Target: LAMA2; (-) strand; PAM type: YTN; PAM sequence: TTA
ttgtaattaaacttcagaac

SEQ ID NO: 290393 - DNA, 20 bp, Artificial Sequence
  Description of Artificial Sequence: Synthetic oligonucleotide
  Target: LAMA2; (-) strand; PAM type: YTN; PAM sequence: CTT
attgtaattaaacttcagaa

SEQ ID NO: 290394 - DNA, 20 bp, Artificial Sequence
  Description of Artificial Sequence: Synthetic oligonucleotide
  Target: LAMA2; (-) strand; PAM type: YTN; PAM sequence: TTC
ttattgtaattaaacttcag

SEQ ID NO: 290395 - DNA, 20 bp, Artificial Sequence
  Description of Artificial Sequence: Synthetic oligonucleotide
  Target: LAMA2; (-) strand; PAM type: YTN; PAM sequence: TTA
tatgacattcttattgtaat

SEQ ID NO: 290396 - DNA, 20 bp, Artificial Sequence
  Description of Artificial Sequence: Synthetic oligonucleotide
  Target: LAMA2; (-) strand; PAM type: YTN; PAM sequence: CTG
caaccaagggttatatgaca

SEQ ID NO: 290397 - DNA, 20 bp, Artificial Sequence
  Description of Artificial Sequence: Synthetic oligonucleotide
  Target: LAMA2; (-) strand; PAM type: YTN; PAM sequence: TTC
tgcaaccaagggttatatga

SEQ ID NO: 290398 - DNA, 20 bp, Artificial Sequence
  Description of Artificial Sequence: Synthetic oligonucleotide
  Target: LAMA2; (-) strand; PAM type: YTN; PAM sequence: TTT
ctgcaaccaagggttatatg

SEQ ID NO: 290399 - DNA, 20 bp, Artificial Sequence
  Description of Artificial Sequence: Synthetic oligonucleotide
  Target: LAMA2; (-) strand; PAM type: YTN; PAM sequence: CTT
tctgcaaccaagggttatat

SEQ ID NO: 290400 - DNA, 20 bp, Artificial Sequence
  Description of Artificial Sequence: Synthetic oligonucleotide
  Target: LAMA2; (-) strand; PAM type: YTN; PAM sequence: TTA
ggcctttctgcaaccaaggg

SEQ ID NO: 290401 - DNA, 20 bp, Artificial Sequence
  Description of Artificial Sequence: Synthetic oligonucleotide
  Target: LAMA2; (-) strand; PAM type: YTN; PAM sequence: TTG
attaggcctttctgcaacca

SEQ ID NO: 290402 - DNA, 20 bp, Artificial Sequence
  Description of Artificial Sequence: Synthetic oligonucleotide
  Target: LAMA2; (-) strand; PAM type: YTN; PAM sequence: TTT
gattaggcctttctgcaacc

SEQ ID NO: 290403 - DNA, 20 bp, Artificial Sequence
  Description of Artificial Sequence: Synthetic oligonucleotide
  Target: LAMA2; (-) strand; PAM type: YTN; PAM sequence: TTT
tgattaggcctttctgcaac

SEQ ID NO: 290404 - DNA, 20 bp, Artificial Sequence
  Description of Artificial Sequence: Synthetic oligonucleotide
  Target: LAMA2; (-) strand; PAM type: YTN; PAM sequence: TTT
ttgattaggcctttctgcaa

SEQ ID NO: 290405 - DNA, 20 bp, Artificial Sequence
  Description of Artificial Sequence: Synthetic oligonucleotide
  Target: LAMA2; (-) strand; PAM type: YTN; PAM sequence: CTA
acatgcaacatgatgttttt

SEQ ID NO: 290406 - DNA, 20 bp, Artificial Sequence
  Description of Artificial Sequence: Synthetic oligonucleotide
  Target: LAMA2; (-) strand; PAM type: YTN; PAM sequence: TTC
taacatgcaacatgatgttt

SEQ ID NO: 290407 - DNA, 20 bp, Artificial Sequence
  Description of Artificial Sequence: Synthetic oligonucleotide
  Target: LAMA2; (-) strand; PAM type: YTN; PAM sequence: TTG
ttctaacatgcaacatgatg

SEQ ID NO: 290408 - DNA, 20 bp, Artificial Sequence
  Description of Artificial Sequence: Synthetic oligonucleotide
  Target: LAMA2; (-) strand; PAM type: YTN; PAM sequence: CTG
gtgttgttctaacatgcaac

SEQ ID NO: 290409 - DNA, 20 bp, Artificial Sequence
  Description of Artificial Sequence: Synthetic oligonucleotide
  Target: LAMA2; (-) strand; PAM type: YTN; PAM sequence: CTA
aatcctggtgttgttctaac

SEQ ID NO: 290410 - DNA, 20 bp, Artificial Sequence
  Description of Artificial Sequence: Synthetic oligonucleotide
  Target: LAMA2; (-) strand; PAM type: YTN; PAM sequence: TTC
taaatcctggtgttgttcta

SEQ ID NO: 290411 - DNA, 20 bp, Artificial Sequence
  Description of Artificial Sequence: Synthetic oligonucleotide
  Target: LAMA2; (-) strand; PAM type: YTN; PAM sequence: TTT
ctaaatcctggtgttgttct

SEQ ID NO: 290412 - DNA, 20 bp, Artificial Sequence
  Description of Artificial Sequence: Synthetic oligonucleotide
  Target: LAMA2; (-) strand; PAM type: YTN; PAM sequence: TTG
gtttctaaatcctggtgttg

SEQ ID NO: 290413 - DNA, 20 bp, Artificial Sequence
  Description of Artificial Sequence: Synthetic oligonucleotide
  Target: LAMA2; (-) strand; PAM type: YTN; PAM sequence: TTT
ggtttctaaatcctggtgtt

SEQ ID NO: 290414 - DNA, 20 bp, Artificial Sequence
  Description of Artificial Sequence: Synthetic oligonucleotide
  Target: LAMA2; (-) strand; PAM type: YTN; PAM sequence: CTT
tggtttctaaatcctggtgt

SEQ ID NO: 290415 - DNA, 20 bp, Artificial Sequence
  Description of Artificial Sequence: Synthetic oligonucleotide
  Target: LAMA2; (-) strand; PAM type: YTN; PAM sequence: TTA
gtcctttggtttctaaatcc

SEQ ID NO: 290416 - DNA, 20 bp, Artificial Sequence
  Description of Artificial Sequence: Synthetic oligonucleotide
  Target: LAMA2; (-) strand; PAM type: YTN; PAM sequence: TTC
aacaaagatgtcaaattagt

SEQ ID NO: 290417 - DNA, 20 bp, Artificial Sequence
  Description of Artificial Sequence: Synthetic oligonucleotide
  Target: LAMA2; (-) strand; PAM type: YTN; PAM sequence: CTT
caacaaagatgtcaaattag

SEQ ID NO: 290418 - DNA, 20 bp, Artificial Sequence
  Description of Artificial Sequence: Synthetic oligonucleotide
  Target: LAMA2; (-) strand; PAM type: YTN; PAM sequence: CTC
ttcaacaaagatgtcaaatt

SEQ ID NO: 290419 - DNA, 20 bp, Artificial Sequence
  Description of Artificial Sequence: Synthetic oligonucleotide
  Target: LAMA2; (-) strand; PAM type: YTN; PAM sequence: CTC
caatccatctcttcaacaaa

SEQ ID NO: 290420 - DNA, 20 bp, Artificial Sequence
  Description of Artificial Sequence: Synthetic oligonucleotide
  Target: LAMA2; (-) strand; PAM type: YTN; PAM sequence: TTC
agcaggtgcatataaaggaa

SEQ ID NO: 290421 - DNA, 20 bp, Artificial Sequence
  Description of Artificial Sequence: Synthetic oligonucleotide
  Target: LAMA2; (-) strand; PAM type: YTN; PAM sequence: TTT
cagcaggtgcatataaagga

SEQ ID NO: 290422 - DNA, 20 bp, Artificial Sequence
  Description of Artificial Sequence: Synthetic oligonucleotide
  Target: LAMA2; (-) strand; PAM type: YTN; PAM sequence: TTT
tcagcaggtgcatataaagg

SEQ ID NO: 290423 - DNA, 20 bp, Artificial Sequence
  Description of Artificial Sequence: Synthetic oligonucleotide
  Target: LAMA2; (-) strand; PAM type: YTN; PAM sequence: CTT
ttcagcaggtgcatataaag

SEQ ID NO: 290424 - DNA, 20 bp, Artificial Sequence
  Description of Artificial Sequence: Synthetic oligonucleotide
  Target: LAMA2; (-) strand; PAM type: YTN; PAM sequence: TTC
ttttcagcaggtgcatataa

SEQ ID NO: 290425 - DNA, 20 bp, Artificial Sequence
  Description of Artificial Sequence: Synthetic oligonucleotide
  Target: LAMA2; (-) strand; PAM type: YTN; PAM sequence: TTC
ataattcttttcagcaggtg

SEQ ID NO: 290426 - DNA, 20 bp, Artificial Sequence
  Description of Artificial Sequence: Synthetic oligonucleotide
  Target: LAMA2; (-) strand; PAM type: YTN; PAM sequence: TTT
cataattcttttcagcaggt

SEQ ID NO: 290427 - DNA, 20 bp, Artificial Sequence
  Description of Artificial Sequence: Synthetic oligonucleotide
  Target: LAMA2; (-) strand; PAM type: YTN; PAM sequence: CTT
tcataattcttttcagcagg

SEQ ID NO: 290428 - DNA, 20 bp, Artificial Sequence
  Description of Artificial Sequence: Synthetic oligonucleotide
  Target: LAMA2; (-) strand; PAM type: YTN; PAM sequence: TTA
ctttcataattcttttcagc

SEQ ID NO: 290429 - DNA, 20 bp, Artificial Sequence
  Description of Artificial Sequence: Synthetic oligonucleotide
  Target: LAMA2; (-) strand; PAM type: YTN; PAM sequence: TTA
attactttcataattctttt

SEQ ID NO: 290430 - DNA, 20 bp, Artificial Sequence
  Description of Artificial Sequence: Synthetic oligonucleotide
  Target: LAMA2; (-) strand; PAM type: YTN; PAM sequence: TTT
aattactttcataattcttt

SEQ ID NO: 290431 - DNA, 20 bp, Artificial Sequence
  Description of Artificial Sequence: Synthetic oligonucleotide
  Target: LAMA2; (-) strand; PAM type: YTN; PAM sequence: CTT
taattactttcataattctt

SEQ ID NO: 290432 - DNA, 20 bp, Artificial Sequence
  Description of Artificial Sequence: Synthetic oligonucleotide
  Target: LAMA2; (-) strand; PAM type: YTN; PAM sequence: CTA
cctttaattactttcataat

SEQ ID NO: 290433 - DNA, 20 bp, Artificial Sequence
  Description of Artificial Sequence: Synthetic oligonucleotide
  Target: LAMA2; (-) strand; PAM type: YTN; PAM sequence: TTC
tacctttaattactttcata

SEQ ID NO: 290434 - DNA, 20 bp, Artificial Sequence
  Description of Artificial Sequence: Synthetic oligonucleotide
  Target: LAMA2; (-) strand; PAM type: YTN; PAM sequence: CTT
ctacctttaattactttcat

SEQ ID NO: 290435 - DNA, 20 bp, Artificial Sequence
  Description of Artificial Sequence: Synthetic oligonucleotide
  Target: LAMA2; (-) strand; PAM type: YTN; PAM sequence: CTG
gcttctacctttaattactt

SEQ ID NO: 290436 - DNA, 20 bp, Artificial Sequence
  Description of Artificial Sequence: Synthetic oligonucleotide
  Target: LAMA2; (-) strand; PAM type: YTN; PAM sequence: CTC
tggcttctacctttaattac

SEQ ID NO: 290437 - DNA, 20 bp, Artificial Sequence
  Description of Artificial Sequence: Synthetic oligonucleotide
  Target: LAMA2; (-) strand; PAM type: YTN; PAM sequence: TTC
aactctggcttctaccttta

SEQ ID NO: 290438 - DNA, 20 bp, Artificial Sequence
  Description of Artificial Sequence: Synthetic oligonucleotide
  Target: LAMA2; (-) strand; PAM type: YTN; PAM sequence: TTA
caagatccacattcaactct

SEQ ID NO: 290439 - DNA, 20 bp, Artificial Sequence
  Description of Artificial Sequence: Synthetic oligonucleotide
  Target: LAMA2; (-) strand; PAM type: YTN; PAM sequence: CTC
cagtgaatgtagaaggagaa

SEQ ID NO: 290440 - DNA, 20 bp, Artificial Sequence
  Description of Artificial Sequence: Synthetic oligonucleotide
  Target: LAMA2; (-) strand; PAM type: YTN; PAM sequence: TTA
tctccagtgaatgtagaagg

SEQ ID NO: 290441 - DNA, 20 bp, Artificial Sequence
  Description of Artificial Sequence: Synthetic oligonucleotide
  Target: LAMA2; (-) strand; PAM type: YTN; PAM sequence: CTA
agcaatgtcagagtgccatt

SEQ ID NO: 290442 - DNA, 20 bp, Artificial Sequence
  Description of Artificial Sequence: Synthetic oligonucleotide
  Target: LAMA2; (-) strand; PAM type: YTN; PAM sequence: TTC
ggaacactaagcaatgtcag

SEQ ID NO: 290443 - DNA, 20 bp, Artificial Sequence
  Description of Artificial Sequence: Synthetic oligonucleotide
  Target: LAMA2; (-) strand; PAM type: YTN; PAM sequence: TTT
cggaacactaagcaatgtca

SEQ ID NO: 290444 - DNA, 20 bp, Artificial Sequence
  Description of Artificial Sequence: Synthetic oligonucleotide
  Target: LAMA2; (-) strand; PAM type: YTN; PAM sequence: TTT
tcggaacactaagcaatgtc

SEQ ID NO: 290445 - DNA, 20 bp, Artificial Sequence
  Description of Artificial Sequence: Synthetic oligonucleotide
  Target: LAMA2; (-) strand; PAM type: YTN; PAM sequence: CTA
attttcggaacactaagcaa

SEQ ID NO: 290446 - DNA, 20 bp, Artificial Sequence
  Description of Artificial Sequence: Synthetic oligonucleotide
  Target: LAMA2; (-) strand; PAM type: YTN; PAM sequence: CTG
actaattttcggaacactaa

SEQ ID NO: 290447 - DNA, 20 bp, Artificial Sequence
  Description of Artificial Sequence: Synthetic oligonucleotide
  Target: LAMA2; (-) strand; PAM type: YTN; PAM sequence: CTG
gaacactgactaattttcgg

SEQ ID NO: 290448 - DNA, 20 bp, Artificial Sequence
  Description of Artificial Sequence: Synthetic oligonucleotide
  Target: LAMA2; (-) strand; PAM type: YTN; PAM sequence: CTC
atagcatcctggaacactga

SEQ ID NO: 290449 - DNA, 20 bp, Artificial Sequence
  Description of Artificial Sequence: Synthetic oligonucleotide
  Target: LAMA2; (-) strand; PAM type: YTN; PAM sequence: TTA
tactcatagcatcctggaac

SEQ ID NO: 290450 - DNA, 20 bp, Artificial Sequence
  Description of Artificial Sequence: Synthetic oligonucleotide
  Target: LAMA2; (-) strand; PAM type: YTN; PAM sequence: TTA
gcaataaaataggttatact

SEQ ID NO: 290451 - DNA, 20 bp, Artificial Sequence
  Description of Artificial Sequence: Synthetic oligonucleotide
  Target: LAMA2; (-) strand; PAM type: YTN; PAM sequence: CTT
agcaataaaataggttatac

SEQ ID NO: 290452 - DNA, 20 bp, Artificial Sequence
  Description of Artificial Sequence: Synthetic oligonucleotide
  Target: LAMA2; (-) strand; PAM type: YTN; PAM sequence: CTA
atgcttagcaataaaatagg

SEQ ID NO: 290453 - DNA, 20 bp, Artificial Sequence
  Description of Artificial Sequence: Synthetic oligonucleotide
  Target: LAMA2; (-) strand; PAM type: YTN; PAM sequence: TTA
tgatgctaatgcttagcaat

SEQ ID NO: 290454 - DNA, 20 bp, Artificial Sequence
  Description of Artificial Sequence: Synthetic oligonucleotide
  Target: LAMA2; (-) strand; PAM type: YTN; PAM sequence: CTC
caacacgccattatgatgct

SEQ ID NO: 290455 - DNA, 20 bp, Artificial Sequence
  Description of Artificial Sequence: Synthetic oligonucleotide
  Target: LAMA2; (-) strand; PAM type: YTN; PAM sequence: TTA
ggcatatgggaaagctccaa

SEQ ID NO: 290456 - DNA, 20 bp, Artificial Sequence
  Description of Artificial Sequence: Synthetic oligonucleotide
  Target: LAMA2; (-) strand; PAM type: YTN; PAM sequence: TTG
tattaggcatatgggaaagc

SEQ ID NO: 290457 - DNA, 20 bp, Artificial Sequence
  Description of Artificial Sequence: Synthetic oligonucleotide
  Target: LAMA2; (-) strand; PAM type: YTN; PAM sequence: CTT
gtattaggcatatgggaaag

SEQ ID NO: 290458 - DNA, 20 bp, Artificial Sequence
  Description of Artificial Sequence: Synthetic oligonucleotide
  Target: LAMA2; (-) strand; PAM type: YTN; PAM sequence: TTC
ttgtattaggcatatgggaa

SEQ ID NO: 290459 - DNA, 20 bp, Artificial Sequence
  Description of Artificial Sequence: Synthetic oligonucleotide
  Target: LAMA2; (-) strand; PAM type: YTN; PAM sequence: CTA
atatagttcttgtattaggc

SEQ ID NO: 290460 - DNA, 20 bp, Artificial Sequence
  Description of Artificial Sequence: Synthetic oligonucleotide
  Target: LAMA2; (-) strand; PAM type: YTN; PAM sequence: TTG
gcatgggcatgagaacaact

SEQ ID NO: 290461 - DNA, 20 bp, Artificial Sequence
  Description of Artificial Sequence: Synthetic oligonucleotide
  Target: LAMA2; (-) strand; PAM type: YTN; PAM sequence: TTA
aaaaaaaatgttggcatggg

SEQ ID NO: 290462 - DNA, 20 bp, Artificial Sequence
  Description of Artificial Sequence: Synthetic oligonucleotide
  Target: LAMA2; (-) strand; PAM type: YTN; PAM sequence: CTA
aaaagcatatgtgaaattaa

SEQ ID NO: 290463 - DNA, 20 bp, Artificial Sequence
  Description of Artificial Sequence: Synthetic oligonucleotide
  Target: LAMA2; (-) strand; PAM type: YTN; PAM sequence: CTA
gctaaaaagcatatgtgaaa

SEQ ID NO: 290464 - DNA, 20 bp, Artificial Sequence
  Description of Artificial Sequence: Synthetic oligonucleotide
  Target: LAMA2; (-) strand; PAM type: YTN; PAM sequence: CTG
ctagctaaaaagcatatgtg

SEQ ID NO: 290465 - DNA, 20 bp, Artificial Sequence
  Description of Artificial Sequence: Synthetic oligonucleotide
  Target: LAMA2; (-) strand; PAM type: YTN; PAM sequence: CTC
cccatactgctagctaaaaa

SEQ ID NO: 290466 - DNA, 20 bp, Artificial Sequence
  Description of Artificial Sequence: Synthetic oligonucleotide
  Target: LAMA2; (-) strand; PAM type: YTN; PAM sequence: TTA
ggaagcaaatgtgtctcccc

SEQ ID NO: 290467 - DNA, 20 bp, Artificial Sequence
  Description of Artificial Sequence: Synthetic oligonucleotide
  Target: LAMA2; (-) strand; PAM type: YTN; PAM sequence: CTA
aattaggaagcaaatgtgtc

SEQ ID NO: 290468 - DNA, 20 bp, Artificial Sequence
  Description of Artificial Sequence: Synthetic oligonucleotide
  Target: LAMA2; (-) strand; PAM type: YTN; PAM sequence: CTA
actaaattaggaagcaaatg

SEQ ID NO: 290469 - DNA, 20 bp, Artificial Sequence
  Description of Artificial Sequence: Synthetic oligonucleotide
  Target: LAMA2; (-) strand; PAM type: YTN; PAM sequence: TTG
aactaactaaattaggaagc

SEQ ID NO: 290470 - DNA, 20 bp, Artificial Sequence
  Description of Artificial Sequence: Synthetic oligonucleotide
  Target: LAMA2; (-) strand; PAM type: YTN; PAM sequence: TTT
gaactaactaaattaggaag

SEQ ID NO: 290471 - DNA, 20 bp, Artificial Sequence
  Description of Artificial Sequence: Synthetic oligonucleotide
  Target: LAMA2; (-) strand; PAM type: YTN; PAM sequence: TTT
tgaactaactaaattaggaa

SEQ ID NO: 290472 - DNA, 20 bp, Artificial Sequence
  Description of Artificial Sequence: Synthetic oligonucleotide
  Target: LAMA2; (-) strand; PAM type: YTN; PAM sequence: TTT
ttgaactaactaaattagga

SEQ ID NO: 290473 - DNA, 20 bp, Artificial Sequence
  Description of Artificial Sequence: Synthetic oligonucleotide
  Target: LAMA2; (-) strand; PAM type: YTN; PAM sequence: TTT
tttgaactaactaaattagg

SEQ ID NO: 290474 - DNA, 20 bp, Artificial Sequence
  Description of Artificial Sequence: Synthetic oligonucleotide
  Target: LAMA2; (-) strand; PAM type: YTN; PAM sequence: TTA
ttttttgaactaactaaatt

SEQ ID NO: 290475 - DNA, 20 bp, Artificial Sequence
  Description of Artificial Sequence: Synthetic oligonucleotide
  Target: LAMA2; (-) strand; PAM type: YTN; PAM sequence: TTT
attttttgaactaactaaat

SEQ ID NO: 290476 - DNA, 20 bp, Artificial Sequence
  Description of Artificial Sequence: Synthetic oligonucleotide
  Target: LAMA2; (-) strand; PAM type: YTN; PAM sequence: CTT
tattttttgaactaactaaa

SEQ ID NO: 290477 - DNA, 20 bp, Artificial Sequence
  Description of Artificial Sequence: Synthetic oligonucleotide
  Target: LAMA2; (-) strand; PAM type: YTN; PAM sequence: TTA
ctttattttttgaactaact

SEQ ID NO: 290478 - DNA, 20 bp, Artificial Sequence
  Description of Artificial Sequence: Synthetic oligonucleotide
  Target: LAMA2; (-) strand; PAM type: YTN; PAM sequence: TTA
gttactttattttttgaact

SEQ ID NO: 290479 - DNA, 20 bp, Artificial Sequence
  Description of Artificial Sequence: Synthetic oligonucleotide
  Target: LAMA2; (-) strand; PAM type: YTN; PAM sequence: TTT
agttactttattttttgaac

SEQ ID NO: 290480 - DNA, 20 bp, Artificial Sequence
  Description of Artificial Sequence: Synthetic oligonucleotide
  Target: LAMA2; (-) strand; PAM type: YTN; PAM sequence: TTT
tagttactttattttttgaa

SEQ ID NO: 290481 - DNA, 20 bp, Artificial Sequence
  Description of Artificial Sequence: Synthetic oligonucleotide
  Target: LAMA2; (-) strand; PAM type: YTN; PAM sequence: TTT
ttagttactttattttttga

SEQ ID NO: 290482 - DNA, 20 bp, Artificial Sequence
  Description of Artificial Sequence: Synthetic oligonucleotide
  Target: LAMA2; (-) strand; PAM type: YTN; PAM sequence: TTT
tttagttactttattttttg

SEQ ID NO: 290483 - DNA, 20 bp, Artificial Sequence
  Description of Artificial Sequence: Synthetic oligonucleotide
  Target: LAMA2; (-) strand; PAM type: YTN; PAM sequence: CTG
acattttttagttactttat

SEQ ID NO: 290484 - DNA, 20 bp, Artificial Sequence
  Description of Artificial Sequence: Synthetic oligonucleotide
  Target: LAMA2; (-) strand; PAM type: YTN; PAM sequence: TTC
tgacattttttagttacttt

SEQ ID NO: 290485 - DNA, 20 bp, Artificial Sequence
  Description of Artificial Sequence: Synthetic oligonucleotide
  Target: LAMA2; (-) strand; PAM type: YTN; PAM sequence: TTT
ctgacattttttagttactt

SEQ ID NO: 290486 - DNA, 20 bp, Artificial Sequence
  Description of Artificial Sequence: Synthetic oligonucleotide
  Target: LAMA2; (-) strand; PAM type: YTN; PAM sequence: TTT
tctgacattttttagttact

SEQ ID NO: 290487 - DNA, 20 bp, Artificial Sequence
  Description of Artificial Sequence: Synthetic oligonucleotide
  Target: LAMA2; (-) strand; PAM type: YTN; PAM sequence: CTA
cacagcacgtgagtattttc

SEQ ID NO: 290488 - DNA, 20 bp, Artificial Sequence
  Description of Artificial Sequence: Synthetic oligonucleotide
  Target: LAMA2; (-) strand; PAM type: YTN; PAM sequence: TTA
actacacagcacgtgagtat

SEQ ID NO: 290489 - DNA, 20 bp, Artificial Sequence
  Description of Artificial Sequence: Synthetic oligonucleotide
  Target: LAMA2; (-) strand; PAM type: YTN; PAM sequence: TTA
taatgagcagtaaattaact

SEQ ID NO: 290490 - DNA, 20 bp, Artificial Sequence
  Description of Artificial Sequence: Synthetic oligonucleotide
  Target: LAMA2; (-) strand; PAM type: YTN; PAM sequence: TTT
ataatgagcagtaaattaac

SEQ ID NO: 290491 - DNA, 20 bp, Artificial Sequence
  Description of Artificial Sequence: Synthetic oligonucleotide
  Target: LAMA2; (-) strand; PAM type: YTN; PAM sequence: TTT
tataatgagcagtaaattaa

SEQ ID NO: 290492 - DNA, 20 bp, Artificial Sequence
  Description of Artificial Sequence: Synthetic oligonucleotide
  Target: LAMA2; (-) strand; PAM type: YTN; PAM sequence: TTA
tgttttataatgagcagtaa

SEQ ID NO: 290493 - DNA, 20 bp, Artificial Sequence
  Description of Artificial Sequence: Synthetic oligonucleotide
  Target: LAMA2; (-) strand; PAM type: YTN; PAM sequence: CTA
tgttatgttttataatgagc

SEQ ID NO: 290494 - DNA, 20 bp, Artificial Sequence
  Description of Artificial Sequence: Synthetic oligonucleotide
  Target: LAMA2; (-) strand; PAM type: YTN; PAM sequence: TTA
tagactatgttatgttttat

SEQ ID NO: 290495 - DNA, 20 bp, Artificial Sequence
  Description of Artificial Sequence: Synthetic oligonucleotide
  Target: LAMA2; (-) strand; PAM type: YTN; PAM sequence: CTT
atagactatgttatgtttta

SEQ ID NO: 290496 - DNA, 20 bp, Artificial Sequence
  Description of Artificial Sequence: Synthetic oligonucleotide
  Target: LAMA2; (-) strand; PAM type: YTN; PAM sequence: TTG
agcaccaagtaccatcctta

SEQ ID NO: 290497 - DNA, 20 bp, Artificial Sequence
  Description of Artificial Sequence: Synthetic oligonucleotide
  Target: LAMA2; (-) strand; PAM type: YTN; PAM sequence: TTA
ttgagcaccaagtaccatcc

SEQ ID NO: 290498 - DNA, 20 bp, Artificial Sequence
  Description of Artificial Sequence: Synthetic oligonucleotide
  Target: LAMA2; (-) strand; PAM type: YTN; PAM sequence: TTT
attgagcaccaagtaccatc

SEQ ID NO: 290499 - DNA, 20 bp, Artificial Sequence
  Description of Artificial Sequence: Synthetic oligonucleotide
  Target: LAMA2; (-) strand; PAM type: YTN; PAM sequence: TTA
acatttattgagcaccaagt

SEQ ID NO: 290500 - DNA, 20 bp, Artificial Sequence
  Description of Artificial Sequence: Synthetic oligonucleotide
  Target: LAMA2; (-) strand; PAM type: YTN; PAM sequence: TTA
gagtgtaattaacatttatt

SEQ ID NO: 290501 - DNA, 20 bp, Artificial Sequence
  Description of Artificial Sequence: Synthetic oligonucleotide
  Target: LAMA2; (-) strand; PAM type: YTN; PAM sequence: CTA
attagagtgtaattaacatt

SEQ ID NO: 290502 - DNA, 20 bp, Artificial Sequence
  Description of Artificial Sequence: Synthetic oligonucleotide
  Target: LAMA2; (-) strand; PAM type: YTN; PAM sequence: TTC
taattagagtgtaattaaca

SEQ ID NO: 290503 - DNA, 20 bp, Artificial Sequence
  Description of Artificial Sequence: Synthetic oligonucleotide
  Target: LAMA2; (-) strand; PAM type: YTN; PAM sequence: TTA
atcccattctaattagagtg

SEQ ID NO: 290504 - DNA, 20 bp, Artificial Sequence
  Description of Artificial Sequence: Synthetic oligonucleotide
  Target: LAMA2; (-) strand; PAM type: YTN; PAM sequence: TTA
accaaatcaattaatcccat

SEQ ID NO: 290505 - DNA, 20 bp, Artificial Sequence
  Description of Artificial Sequence: Synthetic oligonucleotide
  Target: LAMA2; (-) strand; PAM type: YTN; PAM sequence: TTT
aaccaaatcaattaatccca

SEQ ID NO: 290506 - DNA, 20 bp, Artificial Sequence
  Description of Artificial Sequence: Synthetic oligonucleotide
  Target: LAMA2; (-) strand; PAM type: YTN; PAM sequence: TTA
cggtttaaccaaatcaatta

SEQ ID NO: 290507 - DNA, 20 bp, Artificial Sequence
  Description of Artificial Sequence: Synthetic oligonucleotide
  Target: LAMA2; (-) strand; PAM type: YTN; PAM sequence: CTT
acggtttaaccaaatcaatt

SEQ ID NO: 290508 - DNA, 20 bp, Artificial Sequence
  Description of Artificial Sequence: Synthetic oligonucleotide
  Target: LAMA2; (-) strand; PAM type: YTN; PAM sequence: CTC
ttacggtttaaccaaatcaa

SEQ ID NO: 290509 - DNA, 20 bp, Artificial Sequence
  Description of Artificial Sequence: Synthetic oligonucleotide
  Target: LAMA2; (-) strand; PAM type: YTN; PAM sequence: CTG
taataaactcttacggttta

SEQ ID NO: 290510 - DNA, 20 bp, Artificial Sequence
  Description of Artificial Sequence: Synthetic oligonucleotide
  Target: LAMA2; (-) strand; PAM type: YTN; PAM sequence: TTA
aaaacatggtagtctgtaat

SEQ ID NO: 290511 - DNA, 20 bp, Artificial Sequence
  Description of Artificial Sequence: Synthetic oligonucleotide
  Target: LAMA2; (-) strand; PAM type: YTN; PAM sequence: TTA
aacaaaacaaaaaattaaaa

SEQ ID NO: 290512 - DNA, 20 bp, Artificial Sequence
  Description of Artificial Sequence: Synthetic oligonucleotide
  Target: LAMA2; (-) strand; PAM type: YTN; PAM sequence: CTA
attaaacaaaacaaaaaatt

SEQ ID NO: 290513 - DNA, 20 bp, Artificial Sequence
  Description of Artificial Sequence: Synthetic oligonucleotide
  Target: LAMA2; (-) strand; PAM type: YTN; PAM sequence: TTA
aaaaataccaaactaattaa

SEQ ID NO: 290514 - DNA, 20 bp, Artificial Sequence
  Description of Artificial Sequence: Synthetic oligonucleotide
  Target: LAMA2; (-) strand; PAM type: YTN; PAM sequence: TTT
aaaaaataccaaactaatta

SEQ ID NO: 290515 - DNA, 20 bp, Artificial Sequence
  Description of Artificial Sequence: Synthetic oligonucleotide
  Target: LAMA2; (-) strand; PAM type: YTN; PAM sequence: CTT
taaaaaataccaaactaatt

SEQ ID NO: 290516 - DNA, 20 bp, Artificial Sequence
  Description of Artificial Sequence: Synthetic oligonucleotide
  Target: LAMA2; (-) strand; PAM type: YTN; PAM sequence: TTA
taccctttaaaaaataccaa

SEQ ID NO: 290517 - DNA, 20 bp, Artificial Sequence
  Description of Artificial Sequence: Synthetic oligonucleotide
  Target: LAMA2; (-) strand; PAM type: YTN; PAM sequence: TTT
ataccctttaaaaaatacca

SEQ ID NO: 290518 - DNA, 20 bp, Artificial Sequence
  Description of Artificial Sequence: Synthetic oligonucleotide
  Target: LAMA2; (-) strand; PAM type: YTN; PAM sequence: TTT
tataccctttaaaaaatacc

SEQ ID NO: 290519 - DNA, 20 bp, Artificial Sequence
  Description of Artificial Sequence: Synthetic oligonucleotide
  Target: LAMA2; (-) strand; PAM type: YTN; PAM sequence: CTT
ttataccctttaaaaaatac

SEQ ID NO: 290520 - DNA, 20 bp, Artificial Sequence
  Description of Artificial Sequence: Synthetic oligonucleotide
  Target: LAMA2; (-) strand; PAM type: YTN; PAM sequence: CTG
gacagaacttttataccctt

SEQ ID NO: 290521 - DNA, 20 bp, Artificial Sequence
  Description of Artificial Sequence: Synthetic oligonucleotide
  Target: LAMA2; (-) strand; PAM type: YTN; PAM sequence: TTG
gagtagaaacacctggacag

SEQ ID NO: 290522 - DNA, 20 bp, Artificial Sequence
  Description of Artificial Sequence: Synthetic oligonucleotide
  Target: LAMA2; (-) strand; PAM type: YTN; PAM sequence: TTT
ggagtagaaacacctggaca

SEQ ID NO: 290523 - DNA, 20 bp, Artificial Sequence
  Description of Artificial Sequence: Synthetic oligonucleotide
  Target: LAMA2; (-) strand; PAM type: YTN; PAM sequence: TTT
tggagtagaaacacctggac

SEQ ID NO: 290524 - DNA, 20 bp, Artificial Sequence
  Description of Artificial Sequence: Synthetic oligonucleotide
  Target: LAMA2; (-) strand; PAM type: YTN; PAM sequence: TTT
ttggagtagaaacacctgga

SEQ ID NO: 290525 - DNA, 20 bp, Artificial Sequence
  Description of Artificial Sequence: Synthetic oligonucleotide
  Target: LAMA2; (-) strand; PAM type: YTN; PAM sequence: CTT
tttggagtagaaacacctgg

SEQ ID NO: 290526 - DNA, 20 bp, Artificial Sequence
  Description of Artificial Sequence: Synthetic oligonucleotide
  Target: LAMA2; (-) strand; PAM type: YTN; PAM sequence: CTG
tctttttggagtagaaacac

SEQ ID NO: 290527 - DNA, 20 bp, Artificial Sequence
  Description of Artificial Sequence: Synthetic oligonucleotide
  Target: LAMA2; (-) strand; PAM type: YTN; PAM sequence: TTC
caaacataatctgtcttttt

SEQ ID NO: 290528 - DNA, 20 bp, Artificial Sequence
  Description of Artificial Sequence: Synthetic oligonucleotide
  Target: LAMA2; (-) strand; PAM type: YTN; PAM sequence: TTT
ccaaacataatctgtctttt

SEQ ID NO: 290529 - DNA, 20 bp, Artificial Sequence
  Description of Artificial Sequence: Synthetic oligonucleotide
  Target: LAMA2; (-) strand; PAM type: YTN; PAM sequence: TTT
tccaaacataatctgtcttt

SEQ ID NO: 290530 - DNA, 20 bp, Artificial Sequence
  Description of Artificial Sequence: Synthetic oligonucleotide
  Target: LAMA2; (-) strand; PAM type: YTN; PAM sequence: TTT
ttccaaacataatctgtctt

SEQ ID NO: 290531 - DNA, 20 bp, Artificial Sequence
  Description of Artificial Sequence: Synthetic oligonucleotide
  Target: LAMA2; (-) strand; PAM type: YTN; PAM sequence: CTG
ggatttttccaaacataatc

SEQ ID NO: 290532 - DNA, 20 bp, Artificial Sequence
  Description of Artificial Sequence: Synthetic oligonucleotide
  Target: LAMA2; (-) strand; PAM type: YTN; PAM sequence: TTC
tgggatttttccaaacataa

SEQ ID NO: 290533 - DNA, 20 bp, Artificial Sequence
  Description of Artificial Sequence: Synthetic oligonucleotide
  Target: LAMA2; (-) strand; PAM type: YTN; PAM sequence: CTA
ttctgggatttttccaaaca

SEQ ID NO: 290534 - DNA, 20 bp, Artificial Sequence
  Description of Artificial Sequence: Synthetic oligonucleotide
  Target: LAMA2; (-) strand; PAM type: YTN; PAM sequence: TTC
agctattctgggatttttcc

SEQ ID NO: 290535 - DNA, 20 bp, Artificial Sequence
  Description of Artificial Sequence: Synthetic oligonucleotide
  Target: LAMA2; (-) strand; PAM type: YTN; PAM sequence: TTT
cagctattctgggatttttc

SEQ ID NO: 290536 - DNA, 20 bp, Artificial Sequence
  Description of Artificial Sequence: Synthetic oligonucleotide
  Target: LAMA2; (-) strand; PAM type: YTN; PAM sequence: TTT
tcagctattctgggattttt

SEQ ID NO: 290537 - DNA, 20 bp, Artificial Sequence
  Description of Artificial Sequence: Synthetic oligonucleotide
  Target: LAMA2; (-) strand; PAM type: YTN; PAM sequence: CTT
ttcagctattctgggatttt

SEQ ID NO: 290538 - DNA, 20 bp, Artificial Sequence
  Description of Artificial Sequence: Synthetic oligonucleotide
  Target: LAMA2; (-) strand; PAM type: YTN; PAM sequence: CTG
accatcacacttttcagcta

SEQ ID NO: 290539 - DNA, 20 bp, Artificial Sequence
  Description of Artificial Sequence: Synthetic oligonucleotide
  Target: LAMA2; (-) strand; PAM type: YTN; PAM sequence: TTA
gaaatgtgaaaataactgac

SEQ ID NO: 290540 - DNA, 20 bp, Artificial Sequence
  Description of Artificial Sequence: Synthetic oligonucleotide
  Target: LAMA2; (-) strand; PAM type: YTN; PAM sequence: TTT
agaaatgtgaaaataactga

SEQ ID NO: 290541 - DNA, 20 bp, Artificial Sequence
  Description of Artificial Sequence: Synthetic oligonucleotide
  Target: LAMA2; (-) strand; PAM type: YTN; PAM sequence: CTC
gtttagaaatgtgaaaataa

SEQ ID NO: 290542 - DNA, 20 bp, Artificial Sequence
  Description of Artificial Sequence: Synthetic oligonucleotide
  Target: LAMA2; (-) strand; PAM type: YTN; PAM sequence: CTG
ctcgtttagaaatgtgaaaa

SEQ ID NO: 290543 - DNA, 20 bp, Artificial Sequence
  Description of Artificial Sequence: Synthetic oligonucleotide
  Target: LAMA2; (-) strand; PAM type: YTN; PAM sequence: TTC
actgctcgtttagaaatgtg

SEQ ID NO: 290544 - DNA, 20 bp, Artificial Sequence
  Description of Artificial Sequence: Synthetic oligonucleotide
  Target: LAMA2; (-) strand; PAM type: YTN; PAM sequence: TTT
cactgctcgtttagaaatgt

SEQ ID NO: 290545 - DNA, 20 bp, Artificial Sequence
  Description of Artificial Sequence: Synthetic oligonucleotide
  Target: LAMA2; (-) strand; PAM type: YTN; PAM sequence: CTT
tcactgctcgtttagaaatg

SEQ ID NO: 290546 - DNA, 20 bp, Artificial Sequence
  Description of Artificial Sequence: Synthetic oligonucleotide
  Target: LAMA2; (-) strand; PAM type: YTN; PAM sequence: CTG
aactttcactgctcgtttag

SEQ ID NO: 290547 - DNA, 20 bp, Artificial Sequence
  Description of Artificial Sequence: Synthetic oligonucleotide
  Target: LAMA2; (-) strand; PAM type: YTN; PAM sequence: CTG
tcatagaatgagactgaact

SEQ ID NO: 290548 - DNA, 20 bp, Artificial Sequence
  Description of Artificial Sequence: Synthetic oligonucleotide
  Target: LAMA2; (-) strand; PAM type: YTN; PAM sequence: CTA
gctgtcatagaatgagactg

SEQ ID NO: 290549 - DNA, 20 bp, Artificial Sequence
  Description of Artificial Sequence: Synthetic oligonucleotide
  Target: LAMA2; (-) strand; PAM type: YTN; PAM sequence: CTG
cacactagctgtcatagaat

SEQ ID NO: 290550 - DNA, 20 bp, Artificial Sequence
  Description of Artificial Sequence: Synthetic oligonucleotide
  Target: LAMA2; (-) strand; PAM type: YTN; PAM sequence: TTC
agcctgcacactagctgtca

SEQ ID NO: 290551 - DNA, 20 bp, Artificial Sequence
  Description of Artificial Sequence: Synthetic oligonucleotide
  Target: LAMA2; (-) strand; PAM type: YTN; PAM sequence: TTT
cagcctgcacactagctgtc

SEQ ID NO: 290552 - DNA, 20 bp, Artificial Sequence
  Description of Artificial Sequence: Synthetic oligonucleotide
  Target: LAMA2; (-) strand; PAM type: YTN; PAM sequence: TTG
gggagaagaaatttcagcct

SEQ ID NO: 290553 - DNA, 20 bp, Artificial Sequence
  Description of Artificial Sequence: Synthetic oligonucleotide
  Target: LAMA2; (-) strand; PAM type: YTN; PAM sequence: TTT
ggggagaagaaatttcagcc

SEQ ID NO: 290554 - DNA, 20 bp, Artificial Sequence
  Description of Artificial Sequence: Synthetic oligonucleotide
  Target: LAMA2; (-) strand; PAM type: YTN; PAM sequence: TTA
gatttggggagaagaaattt

SEQ ID NO: 290555 - DNA, 20 bp, Artificial Sequence
  Description of Artificial Sequence: Synthetic oligonucleotide
  Target: LAMA2; (-) strand; PAM type: YTN; PAM sequence: TTT
agatttggggagaagaaatt

SEQ ID NO: 290556 - DNA, 20 bp, Artificial Sequence
  Description of Artificial Sequence: Synthetic oligonucleotide
  Target: LAMA2; (-) strand; PAM type: YTN; PAM sequence: CTA
tgagtttagatttggggaga

SEQ ID NO: 290557 - DNA, 20 bp, Artificial Sequence
  Description of Artificial Sequence: Synthetic oligonucleotide
  Target: LAMA2; (-) strand; PAM type: YTN; PAM sequence: TTC
atctatgagtttagatttgg

SEQ ID NO: 290558 - DNA, 20 bp, Artificial Sequence
  Description of Artificial Sequence: Synthetic oligonucleotide
  Target: LAMA2; (-) strand; PAM type: YTN; PAM sequence: CTT
catctatgagtttagatttg

SEQ ID NO: 290559 - DNA, 20 bp, Artificial Sequence
  Description of Artificial Sequence: Synthetic oligonucleotide
  Target: LAMA2; (-) strand; PAM type: YTN; PAM sequence: TTG
cttcatctatgagtttagat

SEQ ID NO: 290560 - DNA, 20 bp, Artificial Sequence
  Description of Artificial Sequence: Synthetic oligonucleotide
  Target: LAMA2; (-) strand; PAM type: YTN; PAM sequence: TTA
gacagttgcttcatctatga

SEQ ID NO: 290561 - DNA, 20 bp, Artificial Sequence
  Description of Artificial Sequence: Synthetic oligonucleotide
  Target: LAMA2; (-) strand; PAM type: YTN; PAM sequence: CTC
atcagataattagacagttg

SEQ ID NO: 290562 - DNA, 20 bp, Artificial Sequence
  Description of Artificial Sequence: Synthetic oligonucleotide
  Target: LAMA2; (-) strand; PAM type: YTN; PAM sequence: TTG
caccatgaagctcatcagat

SEQ ID NO: 290563 - DNA, 20 bp, Artificial Sequence
  Description of Artificial Sequence: Synthetic oligonucleotide
  Target: LAMA2; (-) strand; PAM type: YTN; PAM sequence: TTT
gcaccatgaagctcatcaga

SEQ ID NO: 290564 - DNA, 20 bp, Artificial Sequence
  Description of Artificial Sequence: Synthetic oligonucleotide
  Target: LAMA2; (-) strand; PAM type: YTN; PAM sequence: TTA
tttgcaccatgaagctcatc

SEQ ID NO: 290565 - DNA, 20 bp, Artificial Sequence
  Description of Artificial Sequence: Synthetic oligonucleotide
  Target: LAMA2; (-) strand; PAM type: YTN; PAM sequence: TTT
atttgcaccatgaagctcat

SEQ ID NO: 290566 - DNA, 20 bp, Artificial Sequence
  Description of Artificial Sequence: Synthetic oligonucleotide
  Target: LAMA2; (-) strand; PAM type: YTN; PAM sequence: TTA
caatgaatgcagagccaatt

SEQ ID NO: 290567 - DNA, 20 bp, Artificial Sequence
  Description of Artificial Sequence: Synthetic oligonucleotide
  Target: LAMA2; (-) strand; PAM type: YTN; PAM sequence: CTA
acacaaatacattacaatga

SEQ ID NO: 290568 - DNA, 20 bp, Artificial Sequence
  Description of Artificial Sequence: Synthetic oligonucleotide
  Target: LAMA2; (-) strand; PAM type: YTN; PAM sequence: TTC
taacacaaatacattacaat

SEQ ID NO: 290569 - DNA, 20 bp, Artificial Sequence
  Description of Artificial Sequence: Synthetic oligonucleotide
  Target: LAMA2; (-) strand; PAM type: YTN; PAM sequence: TTT
ctaacacaaatacattacaa

SEQ ID NO: 290570 - DNA, 20 bp, Artificial Sequence
  Description of Artificial Sequence: Synthetic oligonucleotide
  Target: LAMA2; (-) strand; PAM type: YTN; PAM sequence: TTT
tctaacacaaatacattaca

SEQ ID NO: 290571 - DNA, 20 bp, Artificial Sequence
  Description of Artificial Sequence: Synthetic oligonucleotide
  Target: LAMA2; (-) strand; PAM type: YTN; PAM sequence: TTT
ttctaacacaaatacattac

SEQ ID NO: 290572 - DNA, 20 bp, Artificial Sequence
  Description of Artificial Sequence: Synthetic oligonucleotide
  Target: LAMA2; (-) strand; PAM type: YTN; PAM sequence: TTA
tttttctaacacaaatacat

SEQ ID NO: 290573 - DNA, 20 bp, Artificial Sequence
  Description of Artificial Sequence: Synthetic oligonucleotide
  Target: LAMA2; (-) strand; PAM type: YTN; PAM sequence: TTT
atttttctaacacaaataca

SEQ ID NO: 290574 - DNA, 20 bp, Artificial Sequence
  Description of Artificial Sequence: Synthetic oligonucleotide
  Target: LAMA2; (-) strand; PAM type: YTN; PAM sequence: TTA
aatttatttttctaacacaa

SEQ ID NO: 290575 - DNA, 20 bp, Artificial Sequence
  Description of Artificial Sequence: Synthetic oligonucleotide
  Target: LAMA2; (-) strand; PAM type: YTN; PAM sequence: TTT
aaatttatttttctaacaca

SEQ ID NO: 290576 - DNA, 20 bp, Artificial Sequence
  Description of Artificial Sequence: Synthetic oligonucleotide
  Target: LAMA2; (-) strand; PAM type: YTN; PAM sequence: CTT
taaatttatttttctaacac

SEQ ID NO: 290577 - DNA, 20 bp, Artificial Sequence
  Description of Artificial Sequence: Synthetic oligonucleotide
  Target: LAMA2; (-) strand; PAM type: YTN; PAM sequence: TTG
acactttaaatttatttttc

SEQ ID NO: 290578 - DNA, 20 bp, Artificial Sequence
  Description of Artificial Sequence: Synthetic oligonucleotide
  Target: LAMA2; (-) strand; PAM type: YTN; PAM sequence: CTT
gacactttaaatttattttt

SEQ ID NO: 290579 - DNA, 20 bp, Artificial Sequence
  Description of Artificial Sequence: Synthetic oligonucleotide
  Target: LAMA2; (-) strand; PAM type: YTN; PAM sequence: CTG
acttgacactttaaatttat

SEQ ID NO: 290580 - DNA, 20 bp, Artificial Sequence
  Description of Artificial Sequence: Synthetic oligonucleotide
  Target: LAMA2; (-) strand; PAM type: YTN; PAM sequence: TTC
tgacttgacactttaaattt

SEQ ID NO: 290581 - DNA, 20 bp, Artificial Sequence
  Description of Artificial Sequence: Synthetic oligonucleotide
  Target: LAMA2; (-) strand; PAM type: YTN; PAM sequence: TTT
ctgacttgacactttaaatt

SEQ ID NO: 290582 - DNA, 20 bp, Artificial Sequence
  Description of Artificial Sequence: Synthetic oligonucleotide
  Target: LAMA2; (-) strand; PAM type: YTN; PAM sequence: TTT
tctgacttgacactttaaat

SEQ ID NO: 290583 - DNA, 20 bp, Artificial Sequence
  Description of Artificial Sequence: Synthetic oligonucleotide
  Target: LAMA2; (-) strand; PAM type: YTN; PAM sequence: TTT
ttctgacttgacactttaaa

SEQ ID NO: 290584 - DNA, 20 bp, Artificial Sequence
  Description of Artificial Sequence: Synthetic oligonucleotide
  Target: LAMA2; (-) strand; PAM type: YTN; PAM sequence: TTG
taatgtttttctgacttgac

SEQ ID NO: 290585 - DNA, 20 bp, Artificial Sequence
  Description of Artificial Sequence: Synthetic oligonucleotide
  Target: LAMA2; (-) strand; PAM type: YTN; PAM sequence: TTT
gtaatgtttttctgacttga

SEQ ID NO: 290586 - DNA, 20 bp, Artificial Sequence
  Description of Artificial Sequence: Synthetic oligonucleotide
  Target: LAMA2; (-) strand; PAM type: YTN; PAM sequence: TTG
atttgtaatgtttttctgac

SEQ ID NO: 290587 - DNA, 20 bp, Artificial Sequence
  Description of Artificial Sequence: Synthetic oligonucleotide
  Target: LAMA2; (-) strand; PAM type: YTN; PAM sequence: TTT
gatttgtaatgtttttctga

SEQ ID NO: 290588 - DNA, 20 bp, Artificial Sequence
  Description of Artificial Sequence: Synthetic oligonucleotide
  Target: LAMA2; (-) strand; PAM type: YTN; PAM sequence: TTA
aatttgatttgtaatgtttt

SEQ ID NO: 290589 - DNA, 20 bp, Artificial Sequence
  Description of Artificial Sequence: Synthetic oligonucleotide
  Target: LAMA2; (-) strand; PAM type: YTN; PAM sequence: TTT
aaatttgatttgtaatgttt

SEQ ID NO: 290590 - DNA, 20 bp, Artificial Sequence
  Description of Artificial Sequence: Synthetic oligonucleotide
  Target: LAMA2; (-) strand; PAM type: YTN; PAM sequence: CTA
tttaaatttgatttgtaatg

SEQ ID NO: 290591 - DNA, 20 bp, Artificial Sequence
  Description of Artificial Sequence: Synthetic oligonucleotide
  Target: LAMA2; (-) strand; PAM type: YTN; PAM sequence: CTG
tggtactatttaaatttgat

SEQ ID NO: 290592 - DNA, 20 bp, Artificial Sequence
  Description of Artificial Sequence: Synthetic oligonucleotide
  Target: LAMA2; (-) strand; PAM type: YTN; PAM sequence: CTA
ggtaataactgtggtactat

SEQ ID NO: 290593 - DNA, 20 bp, Artificial Sequence
  Description of Artificial Sequence: Synthetic oligonucleotide
  Target: LAMA2; (-) strand; PAM type: YTN; PAM sequence: TTC
taggtaataactgtggtact

SEQ ID NO: 290594 - DNA, 20 bp, Artificial Sequence
  Description of Artificial Sequence: Synthetic oligonucleotide
  Target: LAMA2; (-) strand; PAM type: YTN; PAM sequence: TTT
ctaggtaataactgtggtac

SEQ ID NO: 290595 - DNA, 20 bp, Artificial Sequence
  Description of Artificial Sequence: Synthetic oligonucleotide
  Target: LAMA2; (-) strand; PAM type: YTN; PAM sequence: CTG
gcaaatgaatttctaggtaa

SEQ ID NO: 290596 - DNA, 20 bp, Artificial Sequence
  Description of Artificial Sequence: Synthetic oligonucleotide
  Target: LAMA2; (-) strand; PAM type: YTN; PAM sequence: TTG
gtgaatgactggcaaatgaa

SEQ ID NO: 290597 - DNA, 20 bp, Artificial Sequence
  Description of Artificial Sequence: Synthetic oligonucleotide
  Target: LAMA2; (-) strand; PAM type: YTN; PAM sequence: TTT
ggtgaatgactggcaaatga

SEQ ID NO: 290598 - DNA, 20 bp, Artificial Sequence
  Description of Artificial Sequence: Synthetic oligonucleotide
  Target: LAMA2; (-) strand; PAM type: YTN; PAM sequence: TTT
tggtgaatgactggcaaatg

SEQ ID NO: 290599 - DNA, 20 bp, Artificial Sequence
  Description of Artificial Sequence: Synthetic oligonucleotide
  Target: LAMA2; (-) strand; PAM type: YTN; PAM sequence: CTT
ttggtgaatgactggcaaat

SEQ ID NO: 290600 - DNA, 20 bp, Artificial Sequence
  Description of Artificial Sequence: Synthetic oligonucleotide
  Target: LAMA2; (-) strand; PAM type: YTN; PAM sequence: CTC
aacaaacttttggtgaatga

SEQ ID NO: 290601 - DNA, 20 bp, Artificial Sequence
  Description of Artificial Sequence: Synthetic oligonucleotide
  Target: LAMA2; (-) strand; PAM type: YTN; PAM sequence: CTG
tcacatagtagatactcaac

SEQ ID NO: 290602 - DNA, 20 bp, Artificial Sequence
  Description of Artificial Sequence: Synthetic oligonucleotide
  Target: LAMA2; (-) strand; PAM type: YTN; PAM sequence: TTG
gtatggagcctgtcacatag

SEQ ID NO: 290603 - DNA, 20 bp, Artificial Sequence
  Description of Artificial Sequence: Synthetic oligonucleotide
  Target: LAMA2; (-) strand; PAM type: YTN; PAM sequence: TTT
ggtatggagcctgtcacata

SEQ ID NO: 290604 - DNA, 20 bp, Artificial Sequence
  Description of Artificial Sequence: Synthetic oligonucleotide
  Target: LAMA2; (-) strand; PAM type: YTN; PAM sequence: CTA
gtatttggtatggagcctgt

SEQ ID NO: 290605 - DNA, 20 bp, Artificial Sequence
  Description of Artificial Sequence: Synthetic oligonucleotide
  Target: LAMA2; (-) strand; PAM type: YTN; PAM sequence: TTC
ctagtatttggtatggagcc

SEQ ID NO: 290606 - DNA, 20 bp, Artificial Sequence
  Description of Artificial Sequence: Synthetic oligonucleotide
  Target: LAMA2; (-) strand; PAM type: YTN; PAM sequence: CTG
gattcctagtatttggtatg

SEQ ID NO: 290607 - DNA, 20 bp, Artificial Sequence
  Description of Artificial Sequence: Synthetic oligonucleotide
  Target: LAMA2; (-) strand; PAM type: YTN; PAM sequence: TTG
aacaaccactggattcctag

SEQ ID NO: 290608 - DNA, 20 bp, Artificial Sequence
  Description of Artificial Sequence: Synthetic oligonucleotide
  Target: LAMA2; (-) strand; PAM type: YTN; PAM sequence: TTT
gaacaaccactggattccta

SEQ ID NO: 290609 - DNA, 20 bp, Artificial Sequence
  Description of Artificial Sequence: Synthetic oligonucleotide
  Target: LAMA2; (-) strand; PAM type: YTN; PAM sequence: TTA
gatttgaacaaccactggat

SEQ ID NO: 290610 - DNA, 20 bp, Artificial Sequence
  Description of Artificial Sequence: Synthetic oligonucleotide
  Target: LAMA2; (-) strand; PAM type: YTN; PAM sequence: CTT
agatttgaacaaccactgga

SEQ ID NO: 290611 - DNA, 20 bp, Artificial Sequence
  Description of Artificial Sequence: Synthetic oligonucleotide
  Target: LAMA2; (-) strand; PAM type: YTN; PAM sequence: TTG
taaagcaaatcttagatttg

SEQ ID NO: 290612 - DNA, 20 bp, Artificial Sequence
  Description of Artificial Sequence: Synthetic oligonucleotide
  Target: LAMA2; (-) strand; PAM type: YTN; PAM sequence: CTT
gtaaagcaaatcttagattt

SEQ ID NO: 290613 - DNA, 20 bp, Artificial Sequence
  Description of Artificial Sequence: Synthetic oligonucleotide
  Target: LAMA2; (-) strand; PAM type: YTN; PAM sequence: TTA
atgatcttgtaaagcaaatc

SEQ ID NO: 290614 - DNA, 20 bp, Artificial Sequence
  Description of Artificial Sequence: Synthetic oligonucleotide
  Target: LAMA2; (-) strand; PAM type: YTN; PAM sequence: CTC
aataatatatggttaatgat

SEQ ID NO: 290615 - DNA, 20 bp, Artificial Sequence
  Description of Artificial Sequence: Synthetic oligonucleotide
  Target: LAMA2; (-) strand; PAM type: YTN; PAM sequence: TTC
actcaataatatatggttaa

SEQ ID NO: 290616 - DNA, 20 bp, Artificial Sequence
  Description of Artificial Sequence: Synthetic oligonucleotide
  Target: LAMA2; (-) strand; PAM type: YTN; PAM sequence: TTA
attcactcaataatatatgg

SEQ ID NO: 290617 - DNA, 20 bp, Artificial Sequence
  Description of Artificial Sequence: Synthetic oligonucleotide
  Target: LAMA2; (-) strand; PAM type: YTN; PAM sequence: TTT
aattcactcaataatatatg

SEQ ID NO: 290618 - DNA, 20 bp, Artificial Sequence
  Description of Artificial Sequence: Synthetic oligonucleotide
  Target: LAMA2; (-) strand; PAM type: YTN; PAM sequence: CTG
tatttaattcactcaataat

SEQ ID NO: 290619 - DNA, 20 bp, Artificial Sequence
  Description of Artificial Sequence: Synthetic oligonucleotide
  Target: LAMA2; (-) strand; PAM type: YTN; PAM sequence: TTG
gctgtatttaattcactcaa

SEQ ID NO: 290620 - DNA, 20 bp, Artificial Sequence
  Description of Artificial Sequence: Synthetic oligonucleotide
  Target: LAMA2; (-) strand; PAM type: YTN; PAM sequence: TTT
ggctgtatttaattcactca

SEQ ID NO: 290621 - DNA, 20 bp, Artificial Sequence
  Description of Artificial Sequence: Synthetic oligonucleotide
  Target: LAMA2; (-) strand; PAM type: YTN; PAM sequence: TTA
ggtttggctgtatttaattc

SEQ ID NO: 290622 - DNA, 20 bp, Artificial Sequence
  Description of Artificial Sequence: Synthetic oligonucleotide
  Target: LAMA2; (-) strand; PAM type: YTN; PAM sequence: CTT
aggtttggctgtatttaatt

SEQ ID NO: 290623 - DNA, 20 bp, Artificial Sequence
  Description of Artificial Sequence: Synthetic oligonucleotide
  Target: LAMA2; (-) strand; PAM type: YTN; PAM sequence: TTG
aataaccttaggtttggctg

SEQ ID NO: 290624 - DNA, 20 bp, Artificial Sequence
  Description of Artificial Sequence: Synthetic oligonucleotide
  Target: LAMA2; (-) strand; PAM type: YTN; PAM sequence: TTT
gaataaccttaggtttggct

SEQ ID NO: 290625 - DNA, 20 bp, Artificial Sequence
  Description of Artificial Sequence: Synthetic oligonucleotide
  Target: LAMA2; (-) strand; PAM type: YTN; PAM sequence: CTA
gatttgaataaccttaggtt

SEQ ID NO: 290626 - DNA, 20 bp, Artificial Sequence
  Description of Artificial Sequence: Synthetic oligonucleotide
  Target: LAMA2; (-) strand; PAM type: YTN; PAM sequence: CTA
gaataaatgaagctagattt

SEQ ID NO: 290627 - DNA, 20 bp, Artificial Sequence
  Description of Artificial Sequence: Synthetic oligonucleotide
  Target: LAMA2; (-) strand; PAM type: YTN; PAM sequence: TTA
aaatcatcactagaataaat

SEQ ID NO: 290628 - DNA, 20 bp, Artificial Sequence
  Description of Artificial Sequence: Synthetic oligonucleotide
  Target: LAMA2; (-) strand; PAM type: YTN; PAM sequence: TTA
tgataattaaaatcatcact

SEQ ID NO: 290629 - DNA, 20 bp, Artificial Sequence
  Description of Artificial Sequence: Synthetic oligonucleotide
  Target: LAMA2; (-) strand; PAM type: YTN; PAM sequence: TTT
atgataattaaaatcatcac

SEQ ID NO: 290630 - DNA, 20 bp, Artificial Sequence
  Description of Artificial Sequence: Synthetic oligonucleotide
  Target: LAMA2; (-) strand; PAM type: YTN; PAM sequence: TTT
tatgataattaaaatcatca

SEQ ID NO: 290631 - DNA, 20 bp, Artificial Sequence
  Description of Artificial Sequence: Synthetic oligonucleotide
  Target: LAMA2; (-) strand; PAM type: YTN; PAM sequence: TTA
ttttatgataattaaaatca

SEQ ID NO: 290632 - DNA, 20 bp, Artificial Sequence
  Description of Artificial Sequence: Synthetic oligonucleotide
  Target: LAMA2; (-) strand; PAM type: YTN; PAM sequence: CTA
aaaattattttatgataatt

SEQ ID NO: 290633 - DNA, 20 bp, Artificial Sequence
  Description of Artificial Sequence: Synthetic oligonucleotide
  Target: LAMA2; (-) strand; PAM type: YTN; PAM sequence: TTC
ctaaaaattattttatgata

SEQ ID NO: 290634 - DNA, 20 bp, Artificial Sequence
  Description of Artificial Sequence: Synthetic oligonucleotide
  Target: LAMA2; (-) strand; PAM type: YTN; PAM sequence: TTA
tagataattcctaaaaatta

SEQ ID NO: 290635 - DNA, 20 bp, Artificial Sequence
  Description of Artificial Sequence: Synthetic oligonucleotide
  Target: LAMA2; (-) strand; PAM type: YTN; PAM sequence: TTT
atagataattcctaaaaatt

SEQ ID NO: 290636 - DNA, 20 bp, Artificial Sequence
  Description of Artificial Sequence: Synthetic oligonucleotide
  Target: LAMA2; (-) strand; PAM type: YTN; PAM sequence: CTT
tatagataattcctaaaaat

SEQ ID NO: 290637 - DNA, 20 bp, Artificial Sequence
  Description of Artificial Sequence: Synthetic oligonucleotide
  Target: LAMA2; (-) strand; PAM type: YTN; PAM sequence: TTA
acaggcacacctttatagat

SEQ ID NO: 290638 - DNA, 20 bp, Artificial Sequence
  Description of Artificial Sequence: Synthetic oligonucleotide
  Target: LAMA2; (-) strand; PAM type: YTN; PAM sequence: TTT
aacaggcacacctttataga

SEQ ID NO: 290639 - DNA, 20 bp, Artificial Sequence
  Description of Artificial Sequence: Synthetic oligonucleotide
  Target: LAMA2; (-) strand; PAM type: YTN; PAM sequence: TTA
tagaatttaacaggcacacc

SEQ ID NO: 290640 - DNA, 20 bp, Artificial Sequence
  Description of Artificial Sequence: Synthetic oligonucleotide
  Target: LAMA2; (-) strand; PAM type: YTN; PAM sequence: TTT
atagaatttaacaggcacac

SEQ ID NO: 290641 - DNA, 20 bp, Artificial Sequence
  Description of Artificial Sequence: Synthetic oligonucleotide
  Target: LAMA2; (-) strand; PAM type: YTN; PAM sequence: TTT
tatagaatttaacaggcaca

SEQ ID NO: 290642 - DNA, 20 bp, Artificial Sequence
  Description of Artificial Sequence: Synthetic oligonucleotide
  Target: LAMA2; (-) strand; PAM type: YTN; PAM sequence: TTA
acagattttatagaatttaa

SEQ ID NO: 290643 - DNA, 20 bp, Artificial Sequence
  Description of Artificial Sequence: Synthetic oligonucleotide
  Target: LAMA2; (-) strand; PAM type: YTN; PAM sequence: TTT
aacagattttatagaattta

SEQ ID NO: 290644 - DNA, 20 bp, Artificial Sequence
  Description of Artificial Sequence: Synthetic oligonucleotide
  Target: LAMA2; (-) strand; PAM type: YTN; PAM sequence: TTT
taacagattttatagaattt

SEQ ID NO: 290645 - DNA, 20 bp, Artificial Sequence
  Description of Artificial Sequence: Synthetic oligonucleotide
  Target: LAMA2; (-) strand; PAM type: YTN; PAM sequence: TTC
agattttaacagattttata

SEQ ID NO: 290646 - DNA, 20 bp, Artificial Sequence
  Description of Artificial Sequence: Synthetic oligonucleotide
  Target: LAMA2; (-) strand; PAM type: YTN; PAM sequence: TTA
acagattcagattttaacag

SEQ ID NO: 290647 - DNA, 20 bp, Artificial Sequence
  Description of Artificial Sequence: Synthetic oligonucleotide
  Target: LAMA2; (-) strand; PAM type: YTN; PAM sequence: TTT
aacagattcagattttaaca

SEQ ID NO: 290648 - DNA, 20 bp, Artificial Sequence
  Description of Artificial Sequence: Synthetic oligonucleotide
  Target: LAMA2; (-) strand; PAM type: YTN; PAM sequence: TTC
atttaacagattcagatttt

SEQ ID NO: 290649 - DNA, 20 bp, Artificial Sequence
  Description of Artificial Sequence: Synthetic oligonucleotide
  Target: LAMA2; (-) strand; PAM type: YTN; PAM sequence: TTA
gtgataaagattcatttaac

SEQ ID NO: 290650 - DNA, 20 bp, Artificial Sequence
  Description of Artificial Sequence: Synthetic oligonucleotide
  Target: LAMA2; (-) strand; PAM type: YTN; PAM sequence: TTT
agtgataaagattcatttaa

SEQ ID NO: 290651 - DNA, 20 bp, Artificial Sequence
  Description of Artificial Sequence: Synthetic oligonucleotide
  Target: LAMA2; (-) strand; PAM type: YTN; PAM sequence: TTT
tagtgataaagattcattta

SEQ ID NO: 290652 - DNA, 20 bp, Artificial Sequence
  Description of Artificial Sequence: Synthetic oligonucleotide
  Target: LAMA2; (-) strand; PAM type: YTN; PAM sequence: CTG
tatcatgaaagtaaaaacat

SEQ ID NO: 290653 - DNA, 20 bp, Artificial Sequence
  Description of Artificial Sequence: Synthetic oligonucleotide
  Target: LAMA2; (-) strand; PAM type: YTN; PAM sequence: TTA
tgcaatgctgtatcatgaaa

SEQ ID NO: 290654 - DNA, 20 bp, Artificial Sequence
  Description of Artificial Sequence: Synthetic oligonucleotide
  Target: LAMA2; (-) strand; PAM type: YTN; PAM sequence: CTG
taattatgcaatgctgtatc

SEQ ID NO: 290655 - DNA, 20 bp, Artificial Sequence
  Description of Artificial Sequence: Synthetic oligonucleotide
  Target: LAMA2; (-) strand; PAM type: YTN; PAM sequence: TTG
aaataatgtgccacaccatg

SEQ ID NO: 290656 - DNA, 20 bp, Artificial Sequence
  Description of Artificial Sequence: Synthetic oligonucleotide
  Target: LAMA2; (-) strand; PAM type: YTN; PAM sequence: TTT
gaaataatgtgccacaccat

SEQ ID NO: 290657 - DNA, 20 bp, Artificial Sequence
  Description of Artificial Sequence: Synthetic oligonucleotide
  Target: LAMA2; (-) strand; PAM type: YTN; PAM sequence: TTT
tgaaataatgtgccacacca

SEQ ID NO: 290658 - DNA, 20 bp, Artificial Sequence
  Description of Artificial Sequence: Synthetic oligonucleotide
  Target: LAMA2; (-) strand; PAM type: YTN; PAM sequence: CTG
ttttgaaataatgtgccaca

SEQ ID NO: 290659 - DNA, 20 bp, Artificial Sequence
  Description of Artificial Sequence: Synthetic oligonucleotide
  Target: LAMA2; (-) strand; PAM type: YTN; PAM sequence: CTA
atggctgttttgaaataatg

SEQ ID NO: 290660 - DNA, 20 bp, Artificial Sequence
  Description of Artificial Sequence: Synthetic oligonucleotide
  Target: LAMA2; (-) strand; PAM type: YTN; PAM sequence: CTC
taatggctgttttgaaataa

SEQ ID NO: 290661 - DNA, 20 bp, Artificial Sequence
  Description of Artificial Sequence: Synthetic oligonucleotide
  Target: LAMA2; (-) strand; PAM type: YTN; PAM sequence: TTA
tcaatcacaaatatacctct

SEQ ID NO: 290662 - DNA, 20 bp, Artificial Sequence
  Description of Artificial Sequence: Synthetic oligonucleotide
  Target: LAMA2; (-) strand; PAM type: YTN; PAM sequence: TTT
atcaatcacaaatatacctc

SEQ ID NO: 290663 - DNA, 20 bp, Artificial Sequence
  Description of Artificial Sequence: Synthetic oligonucleotide
  Target: LAMA2; (-) strand; PAM type: YTN; PAM sequence: CTT
tatcaatcacaaatatacct

SEQ ID NO: 290664 - DNA, 20 bp, Artificial Sequence
  Description of Artificial Sequence: Synthetic oligonucleotide
  Target: LAMA2; (-) strand; PAM type: YTN; PAM sequence: TTC
ctttatcaatcacaaatata

SEQ ID NO: 290665 - DNA, 20 bp, Artificial Sequence
  Description of Artificial Sequence: Synthetic oligonucleotide
  Target: LAMA2; (-) strand; PAM type: YTN; PAM sequence: TTG
gttcctttatcaatcacaaa

SEQ ID NO: 290666 - DNA, 20 bp, Artificial Sequence
  Description of Artificial Sequence: Synthetic oligonucleotide
  Target: LAMA2; (-) strand; PAM type: YTN; PAM sequence: TTT
ggttcctttatcaatcacaa

SEQ ID NO: 290667 - DNA, 20 bp, Artificial Sequence
  Description of Artificial Sequence: Synthetic oligonucleotide
  Target: LAMA2; (-) strand; PAM type: YTN; PAM sequence: CTA
tgaatgtttggttcctttat

SEQ ID NO: 290668 - DNA, 20 bp, Artificial Sequence
  Description of Artificial Sequence: Synthetic oligonucleotide
  Target: LAMA2; (-) strand; PAM type: YTN; PAM sequence: CTG
caggcaaaataacaggtaac

SEQ ID NO: 290669 - DNA, 20 bp, Artificial Sequence
  Description of Artificial Sequence: Synthetic oligonucleotide
  Target: LAMA2; (-) strand; PAM type: YTN; PAM sequence: CTG
tctgcaggcaaaataacagg

SEQ ID NO: 290670 - DNA, 20 bp, Artificial Sequence
  Description of Artificial Sequence: Synthetic oligonucleotide
  Target: LAMA2; (-) strand; PAM type: YTN; PAM sequence: CTG
agaacctgtctgcaggcaaa

SEQ ID NO: 290671 - DNA, 20 bp, Artificial Sequence
  Description of Artificial Sequence: Synthetic oligonucleotide
  Target: LAMA2; (-) strand; PAM type: YTN; PAM sequence: TTG
tcatactgagaacctgtctg

SEQ ID NO: 290672 - DNA, 20 bp, Artificial Sequence
  Description of Artificial Sequence: Synthetic oligonucleotide
  Target: LAMA2; (-) strand; PAM type: YTN; PAM sequence: TTT
gtcatactgagaacctgtct

SEQ ID NO: 290673 - DNA, 20 bp, Artificial Sequence
  Description of Artificial Sequence: Synthetic oligonucleotide
  Target: LAMA2; (-) strand; PAM type: YTN; PAM sequence: CTT
tgtcatactgagaacctgtc

SEQ ID NO: 290674 - DNA, 20 bp, Artificial Sequence
  Description of Artificial Sequence: Synthetic oligonucleotide
  Target: LAMA2; (-) strand; PAM type: YTN; PAM sequence: TTG
cactttgtcatactgagaac

SEQ ID NO: 290675 - DNA, 20 bp, Artificial Sequence
  Description of Artificial Sequence: Synthetic oligonucleotide
  Target: LAMA2; (-) strand; PAM type: YTN; PAM sequence: TTT
gcactttgtcatactgagaa

SEQ ID NO: 290676 - DNA, 20 bp, Artificial Sequence
  Description of Artificial Sequence: Synthetic oligonucleotide
  Target: LAMA2; (-) strand; PAM type: YTN; PAM sequence: TTT
tgcactttgtcatactgaga

SEQ ID NO: 290677 - DNA, 20 bp, Artificial Sequence
  Description of Artificial Sequence: Synthetic oligonucleotide
  Target: LAMA2; (-) strand; PAM type: YTN; PAM sequence: CTT
ttgcactttgtcatactgag

SEQ ID NO: 290678 - DNA, 20 bp, Artificial Sequence
  Description of Artificial Sequence: Synthetic oligonucleotide
  Target: LAMA2; (-) strand; PAM type: YTN; PAM sequence: TTA
ccacatcttttgcactttgt

SEQ ID NO: 290679 - DNA, 20 bp, Artificial Sequence
  Description of Artificial Sequence: Synthetic oligonucleotide
  Target: LAMA2; (-) strand; PAM type: YTN; PAM sequence: TTT
accacatcttttgcactttg

SEQ ID NO: 290680 - DNA, 20 bp, Artificial Sequence
  Description of Artificial Sequence: Synthetic oligonucleotide
  Target: LAMA2; (-) strand; PAM type: YTN; PAM sequence: TTA
tgtttaccacatcttttgca

SEQ ID NO: 290681 - DNA, 20 bp, Artificial Sequence
  Description of Artificial Sequence: Synthetic oligonucleotide
  Target: LAMA2; (-) strand; PAM type: YTN; PAM sequence: TTT
atgtttaccacatcttttgc

SEQ ID NO: 290682 - DNA, 20 bp, Artificial Sequence
  Description of Artificial Sequence: Synthetic oligonucleotide
  Target: LAMA2; (-) strand; PAM type: YTN; PAM sequence: TTA
acaatgcatgtaaaaataat

SEQ ID NO: 290683 - DNA, 20 bp, Artificial Sequence
  Description of Artificial Sequence: Synthetic oligonucleotide
  Target: LAMA2; (-) strand; PAM type: YTN; PAM sequence: CTT
aacaatgcatgtaaaaataa

SEQ ID NO: 290684 - DNA, 20 bp, Artificial Sequence
  Description of Artificial Sequence: Synthetic oligonucleotide
  Target: LAMA2; (-) strand; PAM type: YTN; PAM sequence: TTG
agcttaacaatgcatgtaaa

SEQ ID NO: 290685 - DNA, 20 bp, Artificial Sequence
  Description of Artificial Sequence: Synthetic oligonucleotide
  Target: LAMA2; (-) strand; PAM type: YTN; PAM sequence: CTT
gagcttaacaatgcatgtaa

SEQ ID NO: 290686 - DNA, 20 bp, Artificial Sequence
  Description of Artificial Sequence: Synthetic oligonucleotide
  Target: LAMA2; (-) strand; PAM type: YTN; PAM sequence: CTC
aaacagcttgagcttaacaa

SEQ ID NO: 290687 - DNA, 20 bp, Artificial Sequence
  Description of Artificial Sequence: Synthetic oligonucleotide
  Target: LAMA2; (-) strand; PAM type: YTN; PAM sequence: CTC
tcaaacagcttgagcttaac

SEQ ID NO: 290688 - DNA, 20 bp, Artificial Sequence
  Description of Artificial Sequence: Synthetic oligonucleotide
  Target: LAMA2; (-) strand; PAM type: YTN; PAM sequence: TTG
cctctcaaacagcttgagct

SEQ ID NO: 290689 - DNA, 20 bp, Artificial Sequence
  Description of Artificial Sequence: Synthetic oligonucleotide
  Target: LAMA2; (-) strand; PAM type: YTN; PAM sequence: TTA
taaatattgcctctcaaaca

SEQ ID NO: 290690 - DNA, 20 bp, Artificial Sequence
  Description of Artificial Sequence: Synthetic oligonucleotide
  Target: LAMA2; (-) strand; PAM type: YTN; PAM sequence: CTT
ataaatattgcctctcaaac

SEQ ID NO: 290691 - DNA, 20 bp, Artificial Sequence
  Description of Artificial Sequence: Synthetic oligonucleotide
  Target: LAMA2; (-) strand; PAM type: YTN; PAM sequence: TTC
atgaatggcttataaatatt

SEQ ID NO: 290692 - DNA, 20 bp, Artificial Sequence
  Description of Artificial Sequence: Synthetic oligonucleotide
  Target: LAMA2; (-) strand; PAM type: YTN; PAM sequence: CTG
tagtgttcatgaatggctta

SEQ ID NO: 290693 - DNA, 20 bp, Artificial Sequence
  Description of Artificial Sequence: Synthetic oligonucleotide
  Target: LAMA2; (-) strand; PAM type: YTN; PAM sequence: TTC
tgtagtgttcatgaatggct

SEQ ID NO: 290694 - DNA, 20 bp, Artificial Sequence
  Description of Artificial Sequence: Synthetic oligonucleotide
  Target: LAMA2; (-) strand; PAM type: YTN; PAM sequence: CTA
ttctgtagtgttcatgaatg

SEQ ID NO: 290695 - DNA, 20 bp, Artificial Sequence
  Description of Artificial Sequence: Synthetic oligonucleotide
  Target: LAMA2; (-) strand; PAM type: YTN; PAM sequence: CTA
ataaatgggaaaatgtacaa

SEQ ID NO: 290696 - DNA, 20 bp, Artificial Sequence
  Description of Artificial Sequence: Synthetic oligonucleotide
  Target: LAMA2; (-) strand; PAM type: YTN; PAM sequence: TTA
tcaatctaataaatgggaaa

SEQ ID NO: 290697 - DNA, 20 bp, Artificial Sequence
  Description of Artificial Sequence: Synthetic oligonucleotide
  Target: LAMA2; (-) strand; PAM type: YTN; PAM sequence: CTT
atcaatctaataaatgggaa

SEQ ID NO: 290698 - DNA, 20 bp, Artificial Sequence
  Description of Artificial Sequence: Synthetic oligonucleotide
  Target: LAMA2; (-) strand; PAM type: YTN; PAM sequence: TTC
ttatcaatctaataaatggg

SEQ ID NO: 290699 - DNA, 20 bp, Artificial Sequence
  Description of Artificial Sequence: Synthetic oligonucleotide
  Target: LAMA2; (-) strand; PAM type: YTN; PAM sequence: TTG
ttcttatcaatctaataaat

SEQ ID NO: 290700 - DNA, 20 bp, Artificial Sequence
  Description of Artificial Sequence: Synthetic oligonucleotide
  Target: LAMA2; (-) strand; PAM type: YTN; PAM sequence: CTT
gttcttatcaatctaataaa

SEQ ID NO: 290701 - DNA, 20 bp, Artificial Sequence
  Description of Artificial Sequence: Synthetic oligonucleotide
  Target: LAMA2; (-) strand; PAM type: YTN; PAM sequence: TTA
aagtacttgttcttatcaat

SEQ ID NO: 290702 - DNA, 20 bp, Artificial Sequence
  Description of Artificial Sequence: Synthetic oligonucleotide
  Target: LAMA2; (-) strand; PAM type: YTN; PAM sequence: TTT
aaagtacttgttcttatcaa

SEQ ID NO: 290703 - DNA, 20 bp, Artificial Sequence
  Description of Artificial Sequence: Synthetic oligonucleotide
  Target: LAMA2; (-) strand; PAM type: YTN; PAM sequence: TTG
aaatatgaatttaaagtact

SEQ ID NO: 290704 - DNA, 20 bp, Artificial Sequence
  Description of Artificial Sequence: Synthetic oligonucleotide
  Target: LAMA2; (-) strand; PAM type: YTN; PAM sequence: TTT
gaaatatgaatttaaagtac

SEQ ID NO: 290705 - DNA, 20 bp, Artificial Sequence
  Description of Artificial Sequence: Synthetic oligonucleotide
  Target: LAMA2; (-) strand; PAM type: YTN; PAM sequence: CTT
tgaaatatgaatttaaagta

SEQ ID NO: 290706 - DNA, 20 bp, Artificial Sequence
  Description of Artificial Sequence: Synthetic oligonucleotide
  Target: LAMA2; (-) strand; PAM type: YTN; PAM sequence: TTA
ctttgaaatatgaatttaaa

SEQ ID NO: 290707 - DNA, 20 bp, Artificial Sequence
  Description of Artificial Sequence: Synthetic oligonucleotide
  Target: LAMA2; (-) strand; PAM type: YTN; PAM sequence: TTT
actttgaaatatgaatttaa

SEQ ID NO: 290708 - DNA, 20 bp, Artificial Sequence
  Description of Artificial Sequence: Synthetic oligonucleotide
  Target: LAMA2; (-) strand; PAM type: YTN; PAM sequence: TTT
tactttgaaatatgaattta

SEQ ID NO: 290709 - DNA, 20 bp, Artificial Sequence
  Description of Artificial Sequence: Synthetic oligonucleotide
  Target: LAMA2; (-) strand; PAM type: YTN; PAM sequence: TTT
ttactttgaaatatgaattt

SEQ ID NO: 290710 - DNA, 20 bp, Artificial Sequence
  Description of Artificial Sequence: Synthetic oligonucleotide
  Target: LAMA2; (-) strand; PAM type: YTN; PAM sequence: TTG
gaaaatttttactttgaaat

SEQ ID NO: 290711 - DNA, 20 bp, Artificial Sequence
  Description of Artificial Sequence: Synthetic oligonucleotide
  Target: LAMA2; (-) strand; PAM type: YTN; PAM sequence: CTT
ggaaaatttttactttgaaa

SEQ ID NO: 290712 - DNA, 20 bp, Artificial Sequence
  Description of Artificial Sequence: Synthetic oligonucleotide
  Target: LAMA2; (-) strand; PAM type: YTN; PAM sequence: CTC
acaatatcagcttggaaaat

SEQ ID NO: 290713 - DNA, 20 bp, Artificial Sequence
  Description of Artificial Sequence: Synthetic oligonucleotide
  Target: LAMA2; (-) strand; PAM type: YTN; PAM sequence: TTA
gaatcaaaatatgaccgtag

SEQ ID NO: 290714 - DNA, 20 bp, Artificial Sequence
  Description of Artificial Sequence: Synthetic oligonucleotide
  Target: LAMA2; (-) strand; PAM type: YTN; PAM sequence: TTG
acggcagtgaaattagaatc

SEQ ID NO: 290715 - DNA, 20 bp, Artificial Sequence
  Description of Artificial Sequence: Synthetic oligonucleotide
  Target: LAMA2; (-) strand; PAM type: YTN; PAM sequence: CTT
gacggcagtgaaattagaat

SEQ ID NO: 290716 - DNA, 20 bp, Artificial Sequence
  Description of Artificial Sequence: Synthetic oligonucleotide
  Target: LAMA2; (-) strand; PAM type: YTN; PAM sequence: TTA
tacccttgacggcagtgaaa

SEQ ID NO: 290717 - DNA, 20 bp, Artificial Sequence
  Description of Artificial Sequence: Synthetic oligonucleotide
  Target: LAMA2; (-) strand; PAM type: YTN; PAM sequence: CTT
atacccttgacggcagtgaa

SEQ ID NO: 290718 - DNA, 20 bp, Artificial Sequence
  Description of Artificial Sequence: Synthetic oligonucleotide
  Target: LAMA2; (-) strand; PAM type: YTN; PAM sequence: CTA
aaaatagacttatacccttg

SEQ ID NO: 290719 - DNA, 20 bp, Artificial Sequence
  Description of Artificial Sequence: Synthetic oligonucleotide
  Target: LAMA2; (-) strand; PAM type: YTN; PAM sequence: CTA
caaaggaaagaaatgcaaaa

SEQ ID NO: 290720 - DNA, 20 bp, Artificial Sequence
  Description of Artificial Sequence: Synthetic oligonucleotide
  Target: LAMA2; (-) strand; PAM type: YTN; PAM sequence: TTC
acagggatctacaaaggaaa

SEQ ID NO: 290721 - DNA, 20 bp, Artificial Sequence
  Description of Artificial Sequence: Synthetic oligonucleotide
  Target: LAMA2; (-) strand; PAM type: YTN; PAM sequence: TTT
cacagggatctacaaaggaa

SEQ ID NO: 290722 - DNA, 20 bp, Artificial Sequence
  Description of Artificial Sequence: Synthetic oligonucleotide
  Target: LAMA2; (-) strand; PAM type: YTN; PAM sequence: TTA
aaaaatcatttcacagggat

SEQ ID NO: 290723 - DNA, 20 bp, Artificial Sequence
  Description of Artificial Sequence: Synthetic oligonucleotide
  Target: LAMA2; (-) strand; PAM type: YTN; PAM sequence: TTT
aaaaaatcatttcacaggga

SEQ ID NO: 290724 - DNA, 20 bp, Artificial Sequence
  Description of Artificial Sequence: Synthetic oligonucleotide
  Target: LAMA2; (-) strand; PAM type: YTN; PAM sequence: CTT
taaaaaatcatttcacaggg

SEQ ID NO: 290725 - DNA, 20 bp, Artificial Sequence
  Description of Artificial Sequence: Synthetic oligonucleotide
  Target: LAMA2; (-) strand; PAM type: YTN; PAM sequence: TTA
atcataaatctttaaaaaat

SEQ ID NO: 290726 - DNA, 20 bp, Artificial Sequence
  Description of Artificial Sequence: Synthetic oligonucleotide
  Target: LAMA2; (-) strand; PAM type: YTN; PAM sequence: TTT
aatcataaatctttaaaaaa

SEQ ID NO: 290727 - DNA, 20 bp, Artificial Sequence
  Description of Artificial Sequence: Synthetic oligonucleotide
  Target: LAMA2; (-) strand; PAM type: YTN; PAM sequence: CTT
taatcataaatctttaaaaa

SEQ ID NO: 290728 - DNA, 20 bp, Artificial Sequence
  Description of Artificial Sequence: Synthetic oligonucleotide
  Target: LAMA2; (-) strand; PAM type: YTN; PAM sequence: TTA
gtaaaacaataaactttaat

SEQ ID NO: 290729 - DNA, 20 bp, Artificial Sequence
  Description of Artificial Sequence: Synthetic oligonucleotide
  Target: LAMA2; (-) strand; PAM type: YTN; PAM sequence: TTT
agtaaaacaataaactttaa

SEQ ID NO: 290730 - DNA, 20 bp, Artificial Sequence
  Description of Artificial Sequence: Synthetic oligonucleotide
  Target: LAMA2; (-) strand; PAM type: YTN; PAM sequence: TTC
atttagtaaaacaataaact

SEQ ID NO: 290731 - DNA, 20 bp, Artificial Sequence
  Description of Artificial Sequence: Synthetic oligonucleotide
  Target: LAMA2; (-) strand; PAM type: YTN; PAM sequence: TTT
catttagtaaaacaataaac

SEQ ID NO: 290732 - DNA, 20 bp, Artificial Sequence
  Description of Artificial Sequence: Synthetic oligonucleotide
  Target: LAMA2; (-) strand; PAM type: YTN; PAM sequence: TTT
tcatttagtaaaacaataaa

SEQ ID NO: 290733 - DNA, 20 bp, Artificial Sequence
  Description of Artificial Sequence: Synthetic oligonucleotide
  Target: LAMA2; (-) strand; PAM type: YTN; PAM sequence: TTA
cattttcatttagtaaaaca

SEQ ID NO: 290734 - DNA, 20 bp, Artificial Sequence
  Description of Artificial Sequence: Synthetic oligonucleotide
  Target: LAMA2; (-) strand; PAM type: YTN; PAM sequence: TTA
taattacattttcatttagt

SEQ ID NO: 290735 - DNA, 20 bp, Artificial Sequence
  Description of Artificial Sequence: Synthetic oligonucleotide
  Target: LAMA2; (-) strand; PAM type: YTN; PAM sequence: CTT
ataattacattttcatttag

SEQ ID NO: 290736 - DNA, 20 bp, Artificial Sequence
  Description of Artificial Sequence: Synthetic oligonucleotide
  Target: LAMA2; (-) strand; PAM type: YTN; PAM sequence: TTA
cttataattacattttcatt

SEQ ID NO: 290737 - DNA, 20 bp, Artificial Sequence
  Description of Artificial Sequence: Synthetic oligonucleotide
  Target: LAMA2; (-) strand; PAM type: YTN; PAM sequence: TTT
acttataattacattttcat

SEQ ID NO: 290738 - DNA, 20 bp, Artificial Sequence
  Description of Artificial Sequence: Synthetic oligonucleotide
  Target: LAMA2; (-) strand; PAM type: YTN; PAM sequence: CTA
gataacgggaaagaggaaaa

SEQ ID NO: 290739 - DNA, 20 bp, Artificial Sequence
  Description of Artificial Sequence: Synthetic oligonucleotide
  Target: LAMA2; (-) strand; PAM type: YTN; PAM sequence: TTC
atactagataacgggaaaga

SEQ ID NO: 290740 - DNA, 20 bp, Artificial Sequence
  Description of Artificial Sequence: Synthetic oligonucleotide
  Target: LAMA2; (-) strand; PAM type: YTN; PAM sequence: TTT
catactagataacgggaaag

SEQ ID NO: 290741 - DNA, 20 bp, Artificial Sequence
  Description of Artificial Sequence: Synthetic oligonucleotide
  Target: LAMA2; (-) strand; PAM type: YTN; PAM sequence: CTT
tcatactagataacgggaaa

SEQ ID NO: 290742 - DNA, 20 bp, Artificial Sequence
  Description of Artificial Sequence: Synthetic oligonucleotide
  Target: LAMA2; (-) strand; PAM type: YTN; PAM sequence: TTG
ctttcatactagataacggg

SEQ ID NO: 290743 - DNA, 20 bp, Artificial Sequence
  Description of Artificial Sequence: Synthetic oligonucleotide
  Target: LAMA2; (-) strand; PAM type: YTN; PAM sequence: CTT
gctttcatactagataacgg

SEQ ID NO: 290744 - DNA, 20 bp, Artificial Sequence
  Description of Artificial Sequence: Synthetic oligonucleotide
  Target: LAMA2; (-) strand; PAM type: YTN; PAM sequence: TTA
ccttgctttcatactagata

SEQ ID NO: 290745 - DNA, 20 bp, Artificial Sequence
  Description of Artificial Sequence: Synthetic oligonucleotide
  Target: LAMA2; (-) strand; PAM type: YTN; PAM sequence: TTT
accttgctttcatactagat

SEQ ID NO: 290746 - DNA, 20 bp, Artificial Sequence
  Description of Artificial Sequence: Synthetic oligonucleotide
  Target: LAMA2; (-) strand; PAM type: YTN; PAM sequence: TTT
taccttgctttcatactaga

SEQ ID NO: 290747 - DNA, 20 bp, Artificial Sequence
  Description of Artificial Sequence: Synthetic oligonucleotide
  Target: LAMA2; (-) strand; PAM type: YTN; PAM sequence: TTA
aattttaccttgctttcata

SEQ ID NO: 290748 - DNA, 20 bp, Artificial Sequence
  Description of Artificial Sequence: Synthetic oligonucleotide
  Target: LAMA2; (-) strand; PAM type: YTN; PAM sequence: TTT
aaattttaccttgctttcat

SEQ ID NO: 290749 - DNA, 20 bp, Artificial Sequence
  Description of Artificial Sequence: Synthetic oligonucleotide
  Target: LAMA2; (-) strand; PAM type: YTN; PAM sequence: CTC
gaagaaggcatgcataaatt

SEQ ID NO: 290750 - DNA, 20 bp, Artificial Sequence
  Description of Artificial Sequence: Synthetic oligonucleotide
  Target: LAMA2; (-) strand; PAM type: YTN; PAM sequence: TTA
cccaacccatgcactcgaag

SEQ ID NO: 290751 - DNA, 20 bp, Artificial Sequence
  Description of Artificial Sequence: Synthetic oligonucleotide
  Target: LAMA2; (-) strand; PAM type: YTN; PAM sequence: TTT
acccaacccatgcactcgaa

SEQ ID NO: 290752 - DNA, 20 bp, Artificial Sequence
  Description of Artificial Sequence: Synthetic oligonucleotide
  Target: LAMA2; (-) strand; PAM type: YTN; PAM sequence: CTA
agaagccacatttacccaac

SEQ ID NO: 290753 - DNA, 20 bp, Artificial Sequence
  Description of Artificial Sequence: Synthetic oligonucleotide
  Target: LAMA2; (-) strand; PAM type: YTN; PAM sequence: TTA
tctaagaagccacatttacc

SEQ ID NO: 290754 - DNA, 20 bp, Artificial Sequence
  Description of Artificial Sequence: Synthetic oligonucleotide
  Target: LAMA2; (-) strand; PAM type: YTN; PAM sequence: TTT
atctaagaagccacatttac

SEQ ID NO: 290755 - DNA, 20 bp, Artificial Sequence
  Description of Artificial Sequence: Synthetic oligonucleotide
  Target: LAMA2; (-) strand; PAM type: YTN; PAM sequence: CTT
tatctaagaagccacattta

SEQ ID NO: 290756 - DNA, 20 bp, Artificial Sequence
  Description of Artificial Sequence: Synthetic oligonucleotide
  Target: LAMA2; (-) strand; PAM type: YTN; PAM sequence: CTG
ctttatctaagaagccacat

SEQ ID NO: 290757 - DNA, 20 bp, Artificial Sequence
  Description of Artificial Sequence: Synthetic oligonucleotide
  Target: LAMA2; (-) strand; PAM type: YTN; PAM sequence: CTG
cacggctgctttatctaaga

SEQ ID NO: 290758 - DNA, 20 bp, Artificial Sequence
  Description of Artificial Sequence: Synthetic oligonucleotide
  Target: LAMA2; (-) strand; PAM type: YTN; PAM sequence: TTC
tgcacggctgctttatctaa

SEQ ID NO: 290759 - DNA, 20 bp, Artificial Sequence
  Description of Artificial Sequence: Synthetic oligonucleotide
  Target: LAMA2; (-) strand; PAM type: YTN; PAM sequence: CTT
ctgcacggctgctttatcta

SEQ ID NO: 290760 - DNA, 20 bp, Artificial Sequence
  Description of Artificial Sequence: Synthetic oligonucleotide
  Target: LAMA2; (-) strand; PAM type: YTN; PAM sequence: CTG
cttctgcacggctgctttat

SEQ ID NO: 290761 - DNA, 20 bp, Artificial Sequence
  Description of Artificial Sequence: Synthetic oligonucleotide
  Target: LAMA2; (-) strand; PAM type: YTN; PAM sequence: CTC
tgcttctgcacggctgcttt

SEQ ID NO: 290762 - DNA, 20 bp, Artificial Sequence
  Description of Artificial Sequence: Synthetic oligonucleotide
  Target: LAMA2; (-) strand; PAM type: YTN; PAM sequence: TTG
ctctgcttctgcacggctgc

SEQ ID NO: 290763 - DNA, 20 bp, Artificial Sequence
  Description of Artificial Sequence: Synthetic oligonucleotide
  Target: LAMA2; (-) strand; PAM type: YTN; PAM sequence: CTG
gtgttgctctgcttctgcac

SEQ ID NO: 290764 - DNA, 20 bp, Artificial Sequence
  Description of Artificial Sequence: Synthetic oligonucleotide
  Target: LAMA2; (-) strand; PAM type: YTN; PAM sequence: CTG
tactggtgttgctctgcttc

SEQ ID NO: 290765 - DNA, 20 bp, Artificial Sequence
  Description of Artificial Sequence: Synthetic oligonucleotide
  Target: LAMA2; (-) strand; PAM type: YTN; PAM sequence: CTA
tgaacaaagctgtactggtg

SEQ ID NO: 290766 - DNA, 20 bp, Artificial Sequence
  Description of Artificial Sequence: Synthetic oligonucleotide
  Target: LAMA2; (-) strand; PAM type: YTN; PAM sequence: CTC
gtgaaacatactatgaacaa

SEQ ID NO: 290767 - DNA, 20 bp, Artificial Sequence
  Description of Artificial Sequence: Synthetic oligonucleotide
  Target: LAMA2; (-) strand; PAM type: YTN; PAM sequence: TTG
ctcgtgaaacatactatgaa

SEQ ID NO: 290768 - DNA, 20 bp, Artificial Sequence
  Description of Artificial Sequence: Synthetic oligonucleotide
  Target: LAMA2; (-) strand; PAM type: YTN; PAM sequence: CTT
gctcgtgaaacatactatga

SEQ ID NO: 290769 - DNA, 20 bp, Artificial Sequence
  Description of Artificial Sequence: Synthetic oligonucleotide
  Target: LAMA2; (-) strand; PAM type: YTN; PAM sequence: CTC
acagaatgcacggcttgctc

SEQ ID NO: 290770 - DNA, 20 bp, Artificial Sequence
  Description of Artificial Sequence: Synthetic oligonucleotide
  Target: LAMA2; (-) strand; PAM type: YTN; PAM sequence: CTC
tcacagaatgcacggcttgc

SEQ ID NO: 290771 - DNA, 20 bp, Artificial Sequence
  Description of Artificial Sequence: Synthetic oligonucleotide
  Target: LAMA2; (-) strand; PAM type: YTN; PAM sequence: CTG
atggtgggtaagcagcagaa

SEQ ID NO: 290772 - DNA, 20 bp, Artificial Sequence
  Description of Artificial Sequence: Synthetic oligonucleotide
  Target: LAMA2; (-) strand; PAM type: YTN; PAM sequence: TTG
cagcccaactgatggtgggt

SEQ ID NO: 290773 - DNA, 20 bp, Artificial Sequence
  Description of Artificial Sequence: Synthetic oligonucleotide
  Target: LAMA2; (-) strand; PAM type: YTN; PAM sequence: CTC
aaattgcagcccaactgatg

SEQ ID NO: 290774 - DNA, 20 bp, Artificial Sequence
  Description of Artificial Sequence: Synthetic oligonucleotide
  Target: LAMA2; (-) strand; PAM type: YTN; PAM sequence: CTG
gtgagacaactcaaattgca

SEQ ID NO: 290775 - DNA, 20 bp, Artificial Sequence
  Description of Artificial Sequence: Synthetic oligonucleotide
  Target: LAMA2; (-) strand; PAM type: YTN; PAM sequence: CTG
ctggtgagacaactcaaatt

SEQ ID NO: 290776 - DNA, 20 bp, Artificial Sequence
  Description of Artificial Sequence: Synthetic oligonucleotide
  Target: LAMA2; (-) strand; PAM type: YTN; PAM sequence: CTC
atcactgctggtgagacaac

SEQ ID NO: 290777 - DNA, 20 bp, Artificial Sequence
  Description of Artificial Sequence: Synthetic oligonucleotide
  Target: LAMA2; (-) strand; PAM type: YTN; PAM sequence: TTG
aacaagtgagcagagcaaat

SEQ ID NO: 290778 - DNA, 20 bp, Artificial Sequence
  Description of Artificial Sequence: Synthetic oligonucleotide
  Target: LAMA2; (-) strand; PAM type: YTN; PAM sequence: CTG
tgtgcagatggttgaacaag

SEQ ID NO: 290779 - DNA, 20 bp, Artificial Sequence
  Description of Artificial Sequence: Synthetic oligonucleotide
  Target: LAMA2; (-) strand; PAM type: YTN; PAM sequence: CTG
gtcaccaggggcactgtgtg

SEQ ID NO: 290780 - DNA, 20 bp, Artificial Sequence
  Description of Artificial Sequence: Synthetic oligonucleotide
  Target: LAMA2; (-) strand; PAM type: YTN; PAM sequence: CTG
ctggtcaccaggggcactgt

SEQ ID NO: 290781 - DNA, 20 bp, Artificial Sequence
  Description of Artificial Sequence: Synthetic oligonucleotide
  Target: LAMA2; (-) strand; PAM type: YTN; PAM sequence: TTG
agtgtgtgctgctggtcacc

SEQ ID NO: 290782 - DNA, 20 bp, Artificial Sequence
  Description of Artificial Sequence: Synthetic oligonucleotide
  Target: LAMA2; (-) strand; PAM type: YTN; PAM sequence: TTT
gagtgtgtgctgctggtcac

SEQ ID NO: 290783 - DNA, 20 bp, Artificial Sequence
  Description of Artificial Sequence: Synthetic oligonucleotide
  Target: LAMA2; (-) strand; PAM type: YTN; PAM sequence: TTT
tgagtgtgtgctgctggtca

SEQ ID NO: 290784 - DNA, 20 bp, Artificial Sequence
  Description of Artificial Sequence: Synthetic oligonucleotide
  Target: LAMA2; (-) strand; PAM type: YTN; PAM sequence: CTT
ttgagtgtgtgctgctggtc

SEQ ID NO: 290785 - DNA, 20 bp, Artificial Sequence
  Description of Artificial Sequence: Synthetic oligonucleotide
  Target: LAMA2; (-) strand; PAM type: YTN; PAM sequence: CTG
ccttttgagtgtgtgctgct

SEQ ID NO: 290786 - DNA, 20 bp, Artificial Sequence
  Description of Artificial Sequence: Synthetic oligonucleotide
  Target: LAMA2; (-) strand; PAM type: YTN; PAM sequence: TTG
accagctgccttttgagtgt

SEQ ID NO: 290787 - DNA, 20 bp, Artificial Sequence
  Description of Artificial Sequence: Synthetic oligonucleotide
  Target: LAMA2; (-) strand; PAM type: YTN; PAM sequence: CTG
tgtaccagaaattgaccagc

SEQ ID NO: 290788 - DNA, 20 bp, Artificial Sequence
  Description of Artificial Sequence: Synthetic oligonucleotide
  Target: LAMA2; (-) strand; PAM type: YTN; PAM sequence: CTA
gactgtgtaccagaaattga

SEQ ID NO: 290789 - DNA, 20 bp, Artificial Sequence
  Description of Artificial Sequence: Synthetic oligonucleotide
  Target: LAMA2; (-) strand; PAM type: YTN; PAM sequence: TTC
ccagaactagactgtgtacc

SEQ ID NO: 290790 - DNA, 20 bp, Artificial Sequence
  Description of Artificial Sequence: Synthetic oligonucleotide
  Target: LAMA2; (-) strand; PAM type: YTN; PAM sequence: TTT
cccagaactagactgtgtac

SEQ ID NO: 290791 - DNA, 20 bp, Artificial Sequence
  Description of Artificial Sequence: Synthetic oligonucleotide
  Target: LAMA2; (-) strand; PAM type: YTN; PAM sequence: TTA
ccgtgtttcccagaactaga

SEQ ID NO: 290792 - DNA, 20 bp, Artificial Sequence
  Description of Artificial Sequence: Synthetic oligonucleotide
  Target: LAMA2; (-) strand; PAM type: YTN; PAM sequence: TTT
accgtgtttcccagaactag

SEQ ID NO: 290793 - DNA, 20 bp, Artificial Sequence
  Description of Artificial Sequence: Synthetic oligonucleotide
  Target: LAMA2; (-) strand; PAM type: YTN; PAM sequence: CTT
taccgtgtttcccagaacta

SEQ ID NO: 290794 - DNA, 20 bp, Artificial Sequence
  Description of Artificial Sequence: Synthetic oligonucleotide
  Target: LAMA2; (-) strand; PAM type: YTN; PAM sequence: CTC
aagagaccactttaccgtgt

SEQ ID NO: 290795 - DNA, 20 bp, Artificial Sequence
  Description of Artificial Sequence: Synthetic oligonucleotide
  Target: LAMA2; (-) strand; PAM type: YTN; PAM sequence: TTC
aactcaagagaccactttac

SEQ ID NO: 290796 - DNA, 20 bp, Artificial Sequence
  Description of Artificial Sequence: Synthetic oligonucleotide
  Target: LAMA2; (-) strand; PAM type: YTN; PAM sequence: CTA
gggaggccagggcccggggt

SEQ ID NO: 290797 - DNA, 20 bp, Artificial Sequence
  Description of Artificial Sequence: Synthetic oligonucleotide
  Target: LAMA2; (-) strand; PAM type: YTN; PAM sequence: TTC
agcagacagcatggcactag

SEQ ID NO: 290798 - DNA, 20 bp, Artificial Sequence
  Description of Artificial Sequence: Synthetic oligonucleotide
  Target: LAMA2; (-) strand; PAM type: YTN; PAM sequence: CTT
cagcagacagcatggcacta

SEQ ID NO: 290799 - DNA, 20 bp, Artificial Sequence
  Description of Artificial Sequence: Synthetic oligonucleotide
  Target: LAMA2; (-) strand; PAM type: YTN; PAM sequence: TTC
ttcagcagacagcatggcac

SEQ ID NO: 290800 - DNA, 20 bp, Artificial Sequence
  Description of Artificial Sequence: Synthetic oligonucleotide
  Target: LAMA2; (-) strand; PAM type: YTN; PAM sequence: TTG
attcttcagcagacagcatg

SEQ ID NO: 290801 - DNA, 20 bp, Artificial Sequence
  Description of Artificial Sequence: Synthetic oligonucleotide
  Target: LAMA2; (-) strand; PAM type: YTN; PAM sequence: TTT
gattcttcagcagacagcat

SEQ ID NO: 290802 - DNA, 20 bp, Artificial Sequence
  Description of Artificial Sequence: Synthetic oligonucleotide
  Target: LAMA2; (-) strand; PAM type: YTN; PAM sequence: CTG
caaaaagcaagaaggcagtg

SEQ ID NO: 290803 - DNA, 20 bp, Artificial Sequence
  Description of Artificial Sequence: Synthetic oligonucleotide
  Target: LAMA2; (-) strand; PAM type: YTN; PAM sequence: CTG
caggcctgcaaaaagcaaga

SEQ ID NO: 290804 - DNA, 20 bp, Artificial Sequence
  Description of Artificial Sequence: Synthetic oligonucleotide
  Target: LAMA2; (-) strand; PAM type: YTN; PAM sequence: TTG
catatctgcaggcctgcaaa

SEQ ID NO: 290805 - DNA, 20 bp, Artificial Sequence
  Description of Artificial Sequence: Synthetic oligonucleotide
  Target: LAMA2; (-) strand; PAM type: YTN; PAM sequence: TTT
gcatatctgcaggcctgcaa

SEQ ID NO: 290806 - DNA, 20 bp, Artificial Sequence
  Description of Artificial Sequence: Synthetic oligonucleotide
  Target: LAMA2; (-) strand; PAM type: YTN; PAM sequence: CTG
tgtaaatgtttgcatatctg

SEQ ID NO: 290807 - DNA, 20 bp, Artificial Sequence
  Description of Artificial Sequence: Synthetic oligonucleotide
  Target: LAMA2; (-) strand; PAM type: YTN; PAM sequence: TTG
acaagaggtgcaaaggctgt

SEQ ID NO: 290808 - DNA, 20 bp, Artificial Sequence
  Description of Artificial Sequence: Synthetic oligonucleotide
  Target: LAMA2; (-) strand; PAM type: YTN; PAM sequence: TTT
gacaagaggtgcaaaggctg

SEQ ID NO: 290809 - DNA, 20 bp, Artificial Sequence
  Description of Artificial Sequence: Synthetic oligonucleotide
  Target: LAMA2; (-) strand; PAM type: YTN; PAM sequence: CTT
tgacaagaggtgcaaaggct

SEQ ID NO: 290810 - DNA, 20 bp, Artificial Sequence
  Description of Artificial Sequence: Synthetic oligonucleotide
  Target: LAMA2; (-) strand; PAM type: YTN; PAM sequence: TTA
aataaacatgtcaatagata

SEQ ID NO: 290811 - DNA, 20 bp, Artificial Sequence
  Description of Artificial Sequence: Synthetic oligonucleotide
  Target: LAMA2; (-) strand; PAM type: YTN; PAM sequence: TTT
aaataaacatgtcaatagat

SEQ ID NO: 290812 - DNA, 20 bp, Artificial Sequence
  Description of Artificial Sequence: Synthetic oligonucleotide
  Target: LAMA2; (-) strand; PAM type: YTN; PAM sequence: TTT
taaataaacatgtcaataga

SEQ ID NO: 290813 - DNA, 20 bp, Artificial Sequence
  Description of Artificial Sequence: Synthetic oligonucleotide
  Target: LAMA2; (-) strand; PAM type: YTN; PAM sequence: CTA
gttttaaataaacatgtcaa

SEQ ID NO: 290814 - DNA, 20 bp, Artificial Sequence
  Description of Artificial Sequence: Synthetic oligonucleotide
  Target: LAMA2; (-) strand; PAM type: YTN; PAM sequence: CTG
gcaccatagctagttttaaa

SEQ ID NO: 290815 - DNA, 20 bp, Artificial Sequence
  Description of Artificial Sequence: Synthetic oligonucleotide
  Target: LAMA2; (-) strand; PAM type: YTN; PAM sequence: TTC
atctggcaccatagctagtt

SEQ ID NO: 290816 - DNA, 20 bp, Artificial Sequence
  Description of Artificial Sequence: Synthetic oligonucleotide
  Target: LAMA2; (-) strand; PAM type: YTN; PAM sequence: CTT
catctggcaccatagctagt

SEQ ID NO: 290817 - DNA, 20 bp, Artificial Sequence
  Description of Artificial Sequence: Synthetic oligonucleotide
  Target: LAMA2; (-) strand; PAM type: YTN; PAM sequence: TTC
cttcatctggcaccatagct

SEQ ID NO: 290818 - DNA, 20 bp, Artificial Sequence
  Description of Artificial Sequence: Synthetic oligonucleotide
  Target: LAMA2; (-) strand; PAM type: YTN; PAM sequence: TTC
cagagattccttcatctggc

SEQ ID NO: 290819 - DNA, 20 bp, Artificial Sequence
  Description of Artificial Sequence: Synthetic oligonucleotide
  Target: LAMA2; (-) strand; PAM type: YTN; PAM sequence: TTT
ccagagattccttcatctgg

SEQ ID NO: 290820 - DNA, 20 bp, Artificial Sequence
  Description of Artificial Sequence: Synthetic oligonucleotide
  Target: LAMA2; (-) strand; PAM type: YTN; PAM sequence: TTA
aatatagtatttccagagat

SEQ ID NO: 290821 - DNA, 20 bp, Artificial Sequence
  Description of Artificial Sequence: Synthetic oligonucleotide
  Target: LAMA2; (-) strand; PAM type: YTN; PAM sequence: TTT
aaatatagtatttccagaga

SEQ ID NO: 290822 - DNA, 20 bp, Artificial Sequence
  Description of Artificial Sequence: Synthetic oligonucleotide
  Target: LAMA2; (-) strand; PAM type: YTN; PAM sequence: TTT
taaatatagtatttccagag

SEQ ID NO: 290823 - DNA, 20 bp, Artificial Sequence
  Description of Artificial Sequence: Synthetic oligonucleotide
  Target: LAMA2; (-) strand; PAM type: YTN; PAM sequence: TTA
ttttaaatatagtatttcca

SEQ ID NO: 290824 - DNA, 20 bp, Artificial Sequence
  Description of Artificial Sequence: Synthetic oligonucleotide
  Target: LAMA2; (-) strand; PAM type: YTN; PAM sequence: CTT
attttaaatatagtatttcc

SEQ ID NO: 290825 - DNA, 20 bp, Artificial Sequence
  Description of Artificial Sequence: Synthetic oligonucleotide
  Target: LAMA2; (-) strand; PAM type: YTN; PAM sequence: TTA
acgcaaatacttattttaaa

SEQ ID NO: 290826 - DNA, 20 bp, Artificial Sequence
  Description of Artificial Sequence: Synthetic oligonucleotide
  Target: LAMA2; (-) strand; PAM type: YTN; PAM sequence: CTA
ttaacgcaaatacttatttt

SEQ ID NO: 290827 - DNA, 20 bp, Artificial Sequence
  Description of Artificial Sequence: Synthetic oligonucleotide
  Target: LAMA2; (-) strand; PAM type: YTN; PAM sequence: TTA
ctattaacgcaaatacttat

SEQ ID NO: 290828 - DNA, 20 bp, Artificial Sequence
  Description of Artificial Sequence: Synthetic oligonucleotide
  Target: LAMA2; (-) strand; PAM type: YTN; PAM sequence: TTT
actattaacgcaaatactta

SEQ ID NO: 290829 - DNA, 20 bp, Artificial Sequence
  Description of Artificial Sequence: Synthetic oligonucleotide
  Target: LAMA2; (-) strand; PAM type: YTN; PAM sequence: CTT
tactattaacgcaaatactt

SEQ ID NO: 290830 - DNA, 20 bp, Artificial Sequence
  Description of Artificial Sequence: Synthetic oligonucleotide
  Target: LAMA2; (-) strand; PAM type: YTN; PAM sequence: TTC
tttactattaacgcaaatac

SEQ ID NO: 290831 - DNA, 20 bp, Artificial Sequence
  Description of Artificial Sequence: Synthetic oligonucleotide
  Target: LAMA2; (-) strand; PAM type: YTN; PAM sequence: CTT
ctttactattaacgcaaata

SEQ ID NO: 290832 - DNA, 20 bp, Artificial Sequence
  Description of Artificial Sequence: Synthetic oligonucleotide
  Target: LAMA2; (-) strand; PAM type: YTN; PAM sequence: CTC
acacttctttactattaacg

SEQ ID NO: 290833 - DNA, 20 bp, Artificial Sequence
  Description of Artificial Sequence: Synthetic oligonucleotide
  Target: LAMA2; (-) strand; PAM type: YTN; PAM sequence: CTA
tctcacacttctttactatt

SEQ ID NO: 290834 - DNA, 20 bp, Artificial Sequence
  Description of Artificial Sequence: Synthetic oligonucleotide
  Target: LAMA2; (-) strand; PAM type: YTN; PAM sequence: CTA
ggagaactatctcacacttc

SEQ ID NO: 290835 - DNA, 20 bp, Artificial Sequence
  Description of Artificial Sequence: Synthetic oligonucleotide
  Target: LAMA2; (-) strand; PAM type: YTN; PAM sequence: CTG
agaagctaggagaactatct

SEQ ID NO: 290836 - DNA, 20 bp, Artificial Sequence
  Description of Artificial Sequence: Synthetic oligonucleotide
  Target: LAMA2; (-) strand; PAM type: YTN; PAM sequence: CTC
ctgagaagctaggagaacta

SEQ ID NO: 290837 - DNA, 20 bp, Artificial Sequence
  Description of Artificial Sequence: Synthetic oligonucleotide
  Target: LAMA2; (-) strand; PAM type: YTN; PAM sequence: TTA
aaatgctcctgagaagctag

SEQ ID NO: 290838 - DNA, 20 bp, Artificial Sequence
  Description of Artificial Sequence: Synthetic oligonucleotide
  Target: LAMA2; (-) strand; PAM type: YTN; PAM sequence: CTA
gtaagaattaaaatgctcct

SEQ ID NO: 290839 - DNA, 20 bp, Artificial Sequence
  Description of Artificial Sequence: Synthetic oligonucleotide
  Target: LAMA2; (-) strand; PAM type: YTN; PAM sequence: CTA
atgctagtaagaattaaaat

SEQ ID NO: 290840 - DNA, 20 bp, Artificial Sequence
  Description of Artificial Sequence: Synthetic oligonucleotide
  Target: LAMA2; (-) strand; PAM type: YTN; PAM sequence: TTA
tgctaatgctagtaagaatt

SEQ ID NO: 290841 - DNA, 20 bp, Artificial Sequence
  Description of Artificial Sequence: Synthetic oligonucleotide
  Target: LAMA2; (-) strand; PAM type: YTN; PAM sequence: TTT
atgctaatgctagtaagaat

SEQ ID NO: 290842 - DNA, 20 bp, Artificial Sequence
  Description of Artificial Sequence: Synthetic oligonucleotide
  Target: LAMA2; (-) strand; PAM type: YTN; PAM sequence: TTT
tatgctaatgctagtaagaa

SEQ ID NO: 290843 - DNA, 20 bp, Artificial Sequence
  Description of Artificial Sequence: Synthetic oligonucleotide
  Target: LAMA2; (-) strand; PAM type: YTN; PAM sequence: CTT
ttatgctaatgctagtaaga

SEQ ID NO: 290844 - DNA, 20 bp, Artificial Sequence
  Description of Artificial Sequence: Synthetic oligonucleotide
  Target: LAMA2; (-) strand; PAM type: YTN; PAM sequence: CTC
acagcttttatgctaatgct

SEQ ID NO: 290845 - DNA, 20 bp, Artificial Sequence
  Description of Artificial Sequence: Synthetic oligonucleotide
  Target: LAMA2; (-) strand; PAM type: YTN; PAM sequence: TTG
ctcacagcttttatgctaat

SEQ ID NO: 290846 - DNA, 20 bp, Artificial Sequence
  Description of Artificial Sequence: Synthetic oligonucleotide
  Target: LAMA2; (-) strand; PAM type: YTN; PAM sequence: TTA
tggaggcccattgctcacag

SEQ ID NO: 290847 - DNA, 20 bp, Artificial Sequence
  Description of Artificial Sequence: Synthetic oligonucleotide
  Target: LAMA2; (-) strand; PAM type: YTN; PAM sequence: TTT
atggaggcccattgctcaca

SEQ ID NO: 290848 - DNA, 20 bp, Artificial Sequence
  Description of Artificial Sequence: Synthetic oligonucleotide
  Target: LAMA2; (-) strand; PAM type: YTN; PAM sequence: TTC
agccatttatggaggcccat

SEQ ID NO: 290849 - DNA, 20 bp, Artificial Sequence
  Description of Artificial Sequence: Synthetic oligonucleotide
  Target: LAMA2; (-) strand; PAM type: YTN; PAM sequence: TTG
ttcagccatttatggaggcc

SEQ ID NO: 290850 - DNA, 20 bp, Artificial Sequence
  Description of Artificial Sequence: Synthetic oligonucleotide
  Target: LAMA2; (-) strand; PAM type: YTN; PAM sequence: TTT
gttcagccatttatggaggc

SEQ ID NO: 290851 - DNA, 20 bp, Artificial Sequence
  Description of Artificial Sequence: Synthetic oligonucleotide
  Target: LAMA2; (-) strand; PAM type: YTN; PAM sequence: CTG
aggtttgttcagccatttat

SEQ ID NO: 290852 - DNA, 20 bp, Artificial Sequence
  Description of Artificial Sequence: Synthetic oligonucleotide
  Target: LAMA2; (-) strand; PAM type: YTN; PAM sequence: CTC
tgaggtttgttcagccattt

SEQ ID NO: 290853 - DNA, 20 bp, Artificial Sequence
  Description of Artificial Sequence: Synthetic oligonucleotide
  Target: LAMA2; (-) strand; PAM type: YTN; PAM sequence: CTG
cacatctctgaggtttgttc

SEQ ID NO: 290854 - DNA, 20 bp, Artificial Sequence
  Description of Artificial Sequence: Synthetic oligonucleotide
  Target: LAMA2; (-) strand; PAM type: YTN; PAM sequence: CTA
gccagaggataccagccctg

SEQ ID NO: 290855 - DNA, 20 bp, Artificial Sequence
  Description of Artificial Sequence: Synthetic oligonucleotide
  Target: LAMA2; (-) strand; PAM type: YTN; PAM sequence: CTC
tagccagaggataccagccc

SEQ ID NO: 290856 - DNA, 20 bp, Artificial Sequence
  Description of Artificial Sequence: Synthetic oligonucleotide
  Target: LAMA2; (-) strand; PAM type: YTN; PAM sequence: TTA
gctctagccagaggatacca

SEQ ID NO: 290857 - DNA, 20 bp, Artificial Sequence
  Description of Artificial Sequence: Synthetic oligonucleotide
  Target: LAMA2; (-) strand; PAM type: YTN; PAM sequence: TTT
agctctagccagaggatacc

SEQ ID NO: 290858 - DNA, 20 bp, Artificial Sequence
  Description of Artificial Sequence: Synthetic oligonucleotide
  Target: LAMA2; (-) strand; PAM type: YTN; PAM sequence: TTT
tagctctagccagaggatac

SEQ ID NO: 290859 - DNA, 20 bp, Artificial Sequence
  Description of Artificial Sequence: Synthetic oligonucleotide
  Target: LAMA2; (-) strand; PAM type: YTN; PAM sequence: CTT
ttagctctagccagaggata

SEQ ID NO: 290860 - DNA, 20 bp, Artificial Sequence
  Description of Artificial Sequence: Synthetic oligonucleotide
  Target: LAMA2; (-) strand; PAM type: YTN; PAM sequence: CTG
aaatgccaaaacaccaggct

SEQ ID NO: 290861 - DNA, 20 bp, Artificial Sequence
  Description of Artificial Sequence: Synthetic oligonucleotide
  Target: LAMA2; (-) strand; PAM type: YTN; PAM sequence: CTC
tgaaatgccaaaacaccagg

SEQ ID NO: 290862 - DNA, 20 bp, Artificial Sequence
  Description of Artificial Sequence: Synthetic oligonucleotide
  Target: LAMA2; (-) strand; PAM type: YTN; PAM sequence: CTG
ggctctgaaatgccaaaaca

SEQ ID NO: 290863 - DNA, 20 bp, Artificial Sequence
  Description of Artificial Sequence: Synthetic oligonucleotide
  Target: LAMA2; (-) strand; PAM type: YTN; PAM sequence: CTG
gcacagctgggctctgaaat

SEQ ID NO: 290864 - DNA, 20 bp, Artificial Sequence
  Description of Artificial Sequence: Synthetic oligonucleotide
  Target: LAMA2; (-) strand; PAM type: YTN; PAM sequence: TTC
cagaaatctggcacagctgg

SEQ ID NO: 290865 - DNA, 20 bp, Artificial Sequence
  Description of Artificial Sequence: Synthetic oligonucleotide
  Target: LAMA2; (-) strand; PAM type: YTN; PAM sequence: TTT
ccagaaatctggcacagctg

SEQ ID NO: 290866 - DNA, 20 bp, Artificial Sequence
  Description of Artificial Sequence: Synthetic oligonucleotide
  Target: LAMA2; (-) strand; PAM type: YTN; PAM sequence: CTT
tccagaaatctggcacagct

SEQ ID NO: 290867 - DNA, 20 bp, Artificial Sequence
  Description of Artificial Sequence: Synthetic oligonucleotide
  Target: LAMA2; (-) strand; PAM type: YTN; PAM sequence: TTC
tttccagaaatctggcacag

SEQ ID NO: 290868 - DNA, 20 bp, Artificial Sequence
  Description of Artificial Sequence: Synthetic oligonucleotide
  Target: LAMA2; (-) strand; PAM type: YTN; PAM sequence: CTT
ctttccagaaatctggcaca

SEQ ID NO: 290869 - DNA, 20 bp, Artificial Sequence
  Description of Artificial Sequence: Synthetic oligonucleotide
  Target: LAMA2; (-) strand; PAM type: YTN; PAM sequence: TTA
tcttctttccagaaatctgg

SEQ ID NO: 290870 - DNA, 20 bp, Artificial Sequence
  Description of Artificial Sequence: Synthetic oligonucleotide
  Target: LAMA2; (-) strand; PAM type: YTN; PAM sequence: TTA
ttatcttctttccagaaatc

SEQ ID NO: 290871 - DNA, 20 bp, Artificial Sequence
  Description of Artificial Sequence: Synthetic oligonucleotide
  Target: LAMA2; (-) strand; PAM type: YTN; PAM sequence: TTT
attatcttctttccagaaat

SEQ ID NO: 290872 - DNA, 20 bp, Artificial Sequence
  Description of Artificial Sequence: Synthetic oligonucleotide
  Target: LAMA2; (-) strand; PAM type: YTN; PAM sequence: CTT
tattatcttctttccagaaa

SEQ ID NO: 290873 - DNA, 20 bp, Artificial Sequence
  Description of Artificial Sequence: Synthetic oligonucleotide
  Target: LAMA2; (-) strand; PAM type: YTN; PAM sequence: TTC
ggctttattatcttctttcc

SEQ ID NO: 290874 - DNA, 20 bp, Artificial Sequence
  Description of Artificial Sequence: Synthetic oligonucleotide
  Target: LAMA2; (-) strand; PAM type: YTN; PAM sequence: TTG
gatcagttcggctttattat

SEQ ID NO: 290875 - DNA, 20 bp, Artificial Sequence
  Description of Artificial Sequence: Synthetic oligonucleotide
  Target: LAMA2; (-) strand; PAM type: YTN; PAM sequence: CTT
ggatcagttcggctttatta

SEQ ID NO: 290876 - DNA, 20 bp, Artificial Sequence
  Description of Artificial Sequence: Synthetic oligonucleotide
  Target: LAMA2; (-) strand; PAM type: YTN; PAM sequence: TTC
ttggatcagttcggctttat

SEQ ID NO: 290877 - DNA, 20 bp, Artificial Sequence
  Description of Artificial Sequence: Synthetic oligonucleotide
  Target: LAMA2; (-) strand; PAM type: YTN; PAM sequence: TTT
cttggatcagttcggcttta

SEQ ID NO: 290878 - DNA, 20 bp, Artificial Sequence
  Description of Artificial Sequence: Synthetic oligonucleotide
  Target: LAMA2; (-) strand; PAM type: YTN; PAM sequence: TTA
aaaatttcttggatcagttc

SEQ ID NO: 290879 - DNA, 20 bp, Artificial Sequence
  Description of Artificial Sequence: Synthetic oligonucleotide
  Target: LAMA2; (-) strand; PAM type: YTN; PAM sequence: TTT
aaaaatttcttggatcagtt

SEQ ID NO: 290880 - DNA, 20 bp, Artificial Sequence
  Description of Artificial Sequence: Synthetic oligonucleotide
  Target: LAMA2; (-) strand; PAM type: YTN; PAM sequence: TTT
taaaaatttcttggatcagt

SEQ ID NO: 290881 - DNA, 20 bp, Artificial Sequence
  Description of Artificial Sequence: Synthetic oligonucleotide
  Target: LAMA2; (-) strand; PAM type: YTN; PAM sequence: CTC
ggttttaaaaatttcttgga

SEQ ID NO: 290882 - DNA, 20 bp, Artificial Sequence
  Description of Artificial Sequence: Synthetic oligonucleotide
  Target: LAMA2; (-) strand; PAM type: YTN; PAM sequence: CTA
gcctcggttttaaaaatttc

SEQ ID NO: 290883 - DNA, 20 bp, Artificial Sequence
  Description of Artificial Sequence: Synthetic oligonucleotide
  Target: LAMA2; (-) strand; PAM type: YTN; PAM sequence: TTA
aaaatctagcctcggtttta

SEQ ID NO: 290884 - DNA, 20 bp, Artificial Sequence
  Description of Artificial Sequence: Synthetic oligonucleotide
  Target: LAMA2; (-) strand; PAM type: YTN; PAM sequence: TTA
ttaaaaatctagcctcggtt

SEQ ID NO: 290885 - DNA, 20 bp, Artificial Sequence
  Description of Artificial Sequence: Synthetic oligonucleotide
  Target: LAMA2; (-) strand; PAM type: YTN; PAM sequence: CTT
attaaaaatctagcctcggt

SEQ ID NO: 290886 - DNA, 20 bp, Artificial Sequence
  Description of Artificial Sequence: Synthetic oligonucleotide
  Target: LAMA2; (-) strand; PAM type: YTN; PAM sequence: CTC
ttattaaaaatctagcctcg

SEQ ID NO: 290887 - DNA, 20 bp, Artificial Sequence
  Description of Artificial Sequence: Synthetic oligonucleotide
  Target: LAMA2; (-) strand; PAM type: YTN; PAM sequence: TTC
tcttattaaaaatctagcct

SEQ ID NO: 290888 - DNA, 20 bp, Artificial Sequence
  Description of Artificial Sequence: Synthetic oligonucleotide
  Target: LAMA2; (-) strand; PAM type: YTN; PAM sequence: TTT
ctcttattaaaaatctagcc

SEQ ID NO: 290889 - DNA, 20 bp, Artificial Sequence
  Description of Artificial Sequence: Synthetic oligonucleotide
  Target: LAMA2; (-) strand; PAM type: YTN; PAM sequence: CTA
tttctcttattaaaaatcta

SEQ ID NO: 290890 - DNA, 20 bp, Artificial Sequence
  Description of Artificial Sequence: Synthetic oligonucleotide
  Target: LAMA2; (-) strand; PAM type: YTN; PAM sequence: TTC
tatttctcttattaaaaatc

SEQ ID NO: 290891 - DNA, 20 bp, Artificial Sequence
  Description of Artificial Sequence: Synthetic oligonucleotide
  Target: LAMA2; (-) strand; PAM type: YTN; PAM sequence: CTG
tatattctatttctcttatt

SEQ ID NO: 290892 - DNA, 20 bp, Artificial Sequence
  Description of Artificial Sequence: Synthetic oligonucleotide
  Target: LAMA2; (-) strand; PAM type: YTN; PAM sequence: TTC
tgtatattctatttctctta

SEQ ID NO: 290893 - DNA, 20 bp, Artificial Sequence
  Description of Artificial Sequence: Synthetic oligonucleotide
  Target: LAMA2; (-) strand; PAM type: YTN; PAM sequence: TTT
ctgtatattctatttctctt

SEQ ID NO: 290894 - DNA, 20 bp, Artificial Sequence
  Description of Artificial Sequence: Synthetic oligonucleotide
  Target: LAMA2; (-) strand; PAM type: YTN; PAM sequence: TTC
atttctgtatattctatttc

SEQ ID NO: 290895 - DNA, 20 bp, Artificial Sequence
  Description of Artificial Sequence: Synthetic oligonucleotide
  Target: LAMA2; (-) strand; PAM type: YTN; PAM sequence: TTT
catttctgtatattctattt

SEQ ID NO: 290896 - DNA, 20 bp, Artificial Sequence
  Description of Artificial Sequence: Synthetic oligonucleotide
  Target: LAMA2; (-) strand; PAM type: YTN; PAM sequence: CTT
tcatttctgtatattctatt

SEQ ID NO: 290897 - DNA, 20 bp, Artificial Sequence
  Description of Artificial Sequence: Synthetic oligonucleotide
  Target: LAMA2; (-) strand; PAM type: YTN; PAM sequence: CTA
ctttcatttctgtatattct

SEQ ID NO: 290898 - DNA, 20 bp, Artificial Sequence
  Description of Artificial Sequence: Synthetic oligonucleotide
  Target: LAMA2; (-) strand; PAM type: YTN; PAM sequence: TTC
cctactttcatttctgtata

SEQ ID NO: 290899 - DNA, 20 bp, Artificial Sequence
  Description of Artificial Sequence: Synthetic oligonucleotide
  Target: LAMA2; (-) strand; PAM type: YTN; PAM sequence: TTT
ccctactttcatttctgtat

SEQ ID NO: 290900 - DNA, 20 bp, Artificial Sequence
  Description of Artificial Sequence: Synthetic oligonucleotide
  Target: LAMA2; (-) strand; PAM type: YTN; PAM sequence: TTT
tccctactttcatttctgta

SEQ ID NO: 290901 - DNA, 20 bp, Artificial Sequence
  Description of Artificial Sequence: Synthetic oligonucleotide
  Target: LAMA2; (-) strand; PAM type: YTN; PAM sequence: TTT
ttccctactttcatttctgt

SEQ ID NO: 290902 - DNA, 20 bp, Artificial Sequence
  Description of Artificial Sequence: Synthetic oligonucleotide
  Target: LAMA2; (-) strand; PAM type: YTN; PAM sequence: TTA
tttttccctactttcatttc

SEQ ID NO: 290903 - DNA, 20 bp, Artificial Sequence
  Description of Artificial Sequence: Synthetic oligonucleotide
  Target: LAMA2; (-) strand; PAM type: YTN; PAM sequence: TTT
atttttccctactttcattt

SEQ ID NO: 290904 - DNA, 20 bp, Artificial Sequence
  Description of Artificial Sequence: Synthetic oligonucleotide
  Target: LAMA2; (-) strand; PAM type: YTN; PAM sequence: CTG
tatcatgataaaacgcatgg

SEQ ID NO: 290905 - DNA, 20 bp, Artificial Sequence
  Description of Artificial Sequence: Synthetic oligonucleotide
  Target: LAMA2; (-) strand; PAM type: YTN; PAM sequence: TTA
caactgtatcatgataaaac

SEQ ID NO: 290906 - DNA, 20 bp, Artificial Sequence
  Description of Artificial Sequence: Synthetic oligonucleotide
  Target: LAMA2; (-) strand; PAM type: YTN; PAM sequence: CTT
acaactgtatcatgataaaa

SEQ ID NO: 290907 - DNA, 20 bp, Artificial Sequence
  Description of Artificial Sequence: Synthetic oligonucleotide
  Target: LAMA2; (-) strand; PAM type: YTN; PAM sequence: CTA
gtggtcttacaactgtatca

SEQ ID NO: 290908 - DNA, 20 bp, Artificial Sequence
  Description of Artificial Sequence: Synthetic oligonucleotide
  Target: LAMA2; (-) strand; PAM type: YTN; PAM sequence: CTC
agcaaatgtagcacaactag

SEQ ID NO: 290909 - DNA, 20 bp, Artificial Sequence
  Description of Artificial Sequence: Synthetic oligonucleotide
  Target: LAMA2; (-) strand; PAM type: YTN; PAM sequence: TTA
gccatctcagcaaatgtagc

SEQ ID NO: 290910 - DNA, 20 bp, Artificial Sequence
  Description of Artificial Sequence: Synthetic oligonucleotide
  Target: LAMA2; (-) strand; PAM type: YTN; PAM sequence: TTT
agccatctcagcaaatgtag

SEQ ID NO: 290911 - DNA, 20 bp, Artificial Sequence
  Description of Artificial Sequence: Synthetic oligonucleotide
  Target: LAMA2; (-) strand; PAM type: YTN; PAM sequence: TTT
tagccatctcagcaaatgta

SEQ ID NO: 290912 - DNA, 20 bp, Artificial Sequence
  Description of Artificial Sequence: Synthetic oligonucleotide
  Target: LAMA2; (-) strand; PAM type: YTN; PAM sequence: TTT
ttagccatctcagcaaatgt

SEQ ID NO: 290913 - DNA, 20 bp, Artificial Sequence
  Description of Artificial Sequence: Synthetic oligonucleotide
  Target: LAMA2; (-) strand; PAM type: YTN; PAM sequence: CTT
tttagccatctcagcaaatg

SEQ ID NO: 290914 - DNA, 20 bp, Artificial Sequence
  Description of Artificial Sequence: Synthetic oligonucleotide
  Target: LAMA2; (-) strand; PAM type: YTN; PAM sequence: TTC
gctttttagccatctcagca

SEQ ID NO: 290915 - DNA, 20 bp, Artificial Sequence
  Description of Artificial Sequence: Synthetic oligonucleotide
  Target: LAMA2; (-) strand; PAM type: YTN; PAM sequence: CTT
cgctttttagccatctcagc

SEQ ID NO: 290916 - DNA, 20 bp, Artificial Sequence
  Description of Artificial Sequence: Synthetic oligonucleotide
  Target: LAMA2; (-) strand; PAM type: YTN; PAM sequence: TTC
catgaaagccagccttcgct

SEQ ID NO: 290917 - DNA, 20 bp, Artificial Sequence
  Description of Artificial Sequence: Synthetic oligonucleotide
  Target: LAMA2; (-) strand; PAM type: YTN; PAM sequence: TTT
ccatgaaagccagccttcgc

SEQ ID NO: 290918 - DNA, 20 bp, Artificial Sequence
  Description of Artificial Sequence: Synthetic oligonucleotide
  Target: LAMA2; (-) strand; PAM type: YTN; PAM sequence: TTA
acatatatttccatgaaagc

SEQ ID NO: 290919 - DNA, 20 bp, Artificial Sequence
  Description of Artificial Sequence: Synthetic oligonucleotide
  Target: LAMA2; (-) strand; PAM type: YTN; PAM sequence: TTA
ttaacatatatttccatgaa

SEQ ID NO: 290920 - DNA, 20 bp, Artificial Sequence
  Description of Artificial Sequence: Synthetic oligonucleotide
  Target: LAMA2; (-) strand; PAM type: YTN; PAM sequence: TTT
attaacatatatttccatga

SEQ ID NO: 290921 - DNA, 20 bp, Artificial Sequence
  Description of Artificial Sequence: Synthetic oligonucleotide
  Target: LAMA2; (-) strand; PAM type: YTN; PAM sequence: TTT
tattaacatatatttccatg

SEQ ID NO: 290922 - DNA, 20 bp, Artificial Sequence
  Description of Artificial Sequence: Synthetic oligonucleotide
  Target: LAMA2; (-) strand; PAM type: YTN; PAM sequence: CTA
cacagtgccatcccagaatt

SEQ ID NO: 290923 - DNA, 20 bp, Artificial Sequence
  Description of Artificial Sequence: Synthetic oligonucleotide
  Target: LAMA2; (-) strand; PAM type: YTN; PAM sequence: TTA
caaacctacacagtgccatc

SEQ ID NO: 290924 - DNA, 20 bp, Artificial Sequence
  Description of Artificial Sequence: Synthetic oligonucleotide
  Target: LAMA2; (-) strand; PAM type: YTN; PAM sequence: CTC
aaaggcaaaattacaaacct

SEQ ID NO: 290925 - DNA, 20 bp, Artificial Sequence
  Description of Artificial Sequence: Synthetic oligonucleotide
  Target: LAMA2; (-) strand; PAM type: YTN; PAM sequence: TTG
agggtcaccactcaaaggca

SEQ ID NO: 290926 - DNA, 20 bp, Artificial Sequence
  Description of Artificial Sequence: Synthetic oligonucleotide
  Target: LAMA2; (-) strand; PAM type: YTN; PAM sequence: CTT
gagggtcaccactcaaaggc

SEQ ID NO: 290927 - DNA, 20 bp, Artificial Sequence
  Description of Artificial Sequence: Synthetic oligonucleotide
  Target: LAMA2; (-) strand; PAM type: YTN; PAM sequence: TTC
ttgagggtcaccactcaaag

SEQ ID NO: 290928 - DNA, 20 bp, Artificial Sequence
  Description of Artificial Sequence: Synthetic oligonucleotide
  Target: LAMA2; (-) strand; PAM type: YTN; PAM sequence: TTT
cttgagggtcaccactcaaa

SEQ ID NO: 290929 - DNA, 20 bp, Artificial Sequence
  Description of Artificial Sequence: Synthetic oligonucleotide
  Target: LAMA2; (-) strand; PAM type: YTN; PAM sequence: CTG
tttcttgagggtcaccactc

SEQ ID NO: 290930 - DNA, 20 bp, Artificial Sequence
  Description of Artificial Sequence: Synthetic oligonucleotide
  Target: LAMA2; (-) strand; PAM type: YTN; PAM sequence: CTC
aatggtaaccacgggtccct

SEQ ID NO: 290931 - DNA, 20 bp, Artificial Sequence
  Description of Artificial Sequence: Synthetic oligonucleotide
  Target: LAMA2; (-) strand; PAM type: YTN; PAM sequence: CTG
gactcaatggtaaccacggg

SEQ ID NO: 290932 - DNA, 20 bp, Artificial Sequence
  Description of Artificial Sequence: Synthetic oligonucleotide
  Target: LAMA2; (-) strand; PAM type: YTN; PAM sequence: TTA
caggggataaatagtcacat

SEQ ID NO: 290933 - DNA, 20 bp, Artificial Sequence
  Description of Artificial Sequence: Synthetic oligonucleotide
  Target: LAMA2; (-) strand; PAM type: YTN; PAM sequence: TTA
ggacaattacaggggataaa

SEQ ID NO: 290934 - DNA, 20 bp, Artificial Sequence
  Description of Artificial Sequence: Synthetic oligonucleotide
  Target: LAMA2; (-) strand; PAM type: YTN; PAM sequence: CTC
aatattaggacaattacagg

SEQ ID NO: 290935 - DNA, 20 bp, Artificial Sequence
  Description of Artificial Sequence: Synthetic oligonucleotide
  Target: LAMA2; (-) strand; PAM type: YTN; PAM sequence: TTA
gcaacctcaatattaggaca

SEQ ID NO: 290936 - DNA, 20 bp, Artificial Sequence
  Description of Artificial Sequence: Synthetic oligonucleotide
  Target: LAMA2; (-) strand; PAM type: YTN; PAM sequence: TTT
agcaacctcaatattaggac

SEQ ID NO: 290937 - DNA, 20 bp, Artificial Sequence
  Description of Artificial Sequence: Synthetic oligonucleotide
  Target: LAMA2; (-) strand; PAM type: YTN; PAM sequence: TTC
caaaatatgatttagcaacc

SEQ ID NO: 290938 - DNA, 20 bp, Artificial Sequence
  Description of Artificial Sequence: Synthetic oligonucleotide
  Target: LAMA2; (-) strand; PAM type: YTN; PAM sequence: TTC
atggaaacacaaagaaccat

SEQ ID NO: 290939 - DNA, 20 bp, Artificial Sequence
  Description of Artificial Sequence: Synthetic oligonucleotide
  Target: LAMA2; (-) strand; PAM type: YTN; PAM sequence: TTT
catggaaacacaaagaacca

SEQ ID NO: 290940 - DNA, 20 bp, Artificial Sequence
  Description of Artificial Sequence: Synthetic oligonucleotide
  Target: LAMA2; (-) strand; PAM type: YTN; PAM sequence: TTG
tttcatggaaacacaaagaa

SEQ ID NO: 290941 - DNA, 20 bp, Artificial Sequence
  Description of Artificial Sequence: Synthetic oligonucleotide
  Target: LAMA2; (-) strand; PAM type: YTN; PAM sequence: TTA
ttgtttcatggaaacacaaa

SEQ ID NO: 290942 - DNA, 20 bp, Artificial Sequence
  Description of Artificial Sequence: Synthetic oligonucleotide
  Target: LAMA2; (-) strand; PAM type: YTN; PAM sequence: TTT
attgtttcatggaaacacaa

SEQ ID NO: 290943 - DNA, 20 bp, Artificial Sequence
  Description of Artificial Sequence: Synthetic oligonucleotide
  Target: LAMA2; (-) strand; PAM type: YTN; PAM sequence: TTA
tatagtttattgtttcatgg

SEQ ID NO: 290944 - DNA, 20 bp, Artificial Sequence
  Description of Artificial Sequence: Synthetic oligonucleotide
  Target: LAMA2; (-) strand; PAM type: YTN; PAM sequence: CTA
caagttatatagtttattgt

SEQ ID NO: 290945 - DNA, 20 bp, Artificial Sequence
  Description of Artificial Sequence: Synthetic oligonucleotide
  Target: LAMA2; (-) strand; PAM type: YTN; PAM sequence: CTC
ctacaagttatatagtttat

SEQ ID NO: 290946 - DNA, 20 bp, Artificial Sequence
  Description of Artificial Sequence: Synthetic oligonucleotide
  Target: LAMA2; (-) strand; PAM type: YTN; PAM sequence: CTA
aagtaaatcactcctacaag

SEQ ID NO: 290947 - DNA, 20 bp, Artificial Sequence
  Description of Artificial Sequence: Synthetic oligonucleotide
  Target: LAMA2; (-) strand; PAM type: YTN; PAM sequence: TTA
ctaaagtaaatcactcctac

SEQ ID NO: 290948 - DNA, 20 bp, Artificial Sequence
  Description of Artificial Sequence: Synthetic oligonucleotide
  Target: LAMA2; (-) strand; PAM type: YTN; PAM sequence: TTG
ttactaaagtaaatcactcc

SEQ ID NO: 290949 - DNA, 20 bp, Artificial Sequence
  Description of Artificial Sequence: Synthetic oligonucleotide
  Target: LAMA2; (-) strand; PAM type: YTN; PAM sequence: CTT
gttactaaagtaaatcactc

SEQ ID NO: 290950 - DNA, 20 bp, Artificial Sequence
  Description of Artificial Sequence: Synthetic oligonucleotide
  Target: LAMA2; (-) strand; PAM type: YTN; PAM sequence: TTC
agaggtcttgttactaaagt

SEQ ID NO: 290951 - DNA, 20 bp, Artificial Sequence
  Description of Artificial Sequence: Synthetic oligonucleotide
  Target: LAMA2; (-) strand; PAM type: YTN; PAM sequence: TTT
cagaggtcttgttactaaag

SEQ ID NO: 290952 - DNA, 20 bp, Artificial Sequence
  Description of Artificial Sequence: Synthetic oligonucleotide
  Target: LAMA2; (-) strand; PAM type: YTN; PAM sequence: TTT
tcagaggtcttgttactaaa

SEQ ID NO: 290953 - DNA, 20 bp, Artificial Sequence
  Description of Artificial Sequence: Synthetic oligonucleotide
  Target: LAMA2; (-) strand; PAM type: YTN; PAM sequence: TTT
ttcagaggtcttgttactaa

SEQ ID NO: 290954 - DNA, 20 bp, Artificial Sequence
  Description of Artificial Sequence: Synthetic oligonucleotide
  Target: LAMA2; (-) strand; PAM type: YTN; PAM sequence: TTT
tttcagaggtcttgttacta

SEQ ID NO: 290955 - DNA, 20 bp, Artificial Sequence
  Description of Artificial Sequence: Synthetic oligonucleotide
  Target: LAMA2; (-) strand; PAM type: YTN; PAM sequence: TTT
ttttcagaggtcttgttact

SEQ ID NO: 290956 - DNA, 20 bp, Artificial Sequence
  Description of Artificial Sequence: Synthetic oligonucleotide
  Target: LAMA2; (-) strand; PAM type: YTN; PAM sequence: TTA
tcaccatttttttcagaggt

SEQ ID NO: 290957 - DNA, 20 bp, Artificial Sequence
  Description of Artificial Sequence: Synthetic oligonucleotide
  Target: LAMA2; (-) strand; PAM type: YTN; PAM sequence: CTT
atcaccatttttttcagagg

SEQ ID NO: 290958 - DNA, 20 bp, Artificial Sequence
  Description of Artificial Sequence: Synthetic oligonucleotide
  Target: LAMA2; (-) strand; PAM type: YTN; PAM sequence: CTG
acttatcaccatttttttca

SEQ ID NO: 290959 - DNA, 20 bp, Artificial Sequence
  Description of Artificial Sequence: Synthetic oligonucleotide
  Target: LAMA2; (-) strand; PAM type: YTN; PAM sequence: TTA
tggaaagactgacttatcac

SEQ ID NO: 290960 - DNA, 20 bp, Artificial Sequence
  Description of Artificial Sequence: Synthetic oligonucleotide
  Target: LAMA2; (-) strand; PAM type: YTN; PAM sequence: TTT
atggaaagactgacttatca

SEQ ID NO: 290961 - DNA, 20 bp, Artificial Sequence
  Description of Artificial Sequence: Synthetic oligonucleotide
  Target: LAMA2; (-) strand; PAM type: YTN; PAM sequence: CTT
tatggaaagactgacttatc

SEQ ID NO: 290962 - DNA, 20 bp, Artificial Sequence
  Description of Artificial Sequence: Synthetic oligonucleotide
  Target: LAMA2; (-) strand; PAM type: YTN; PAM sequence: TTC
ctttatggaaagactgactt

SEQ ID NO: 290963 - DNA, 20 bp, Artificial Sequence
  Description of Artificial Sequence: Synthetic oligonucleotide
  Target: LAMA2; (-) strand; PAM type: YTN; PAM sequence: TTT
cctttatggaaagactgact

SEQ ID NO: 290964 - DNA, 20 bp, Artificial Sequence
  Description of Artificial Sequence: Synthetic oligonucleotide
  Target: LAMA2; (-) strand; PAM type: YTN; PAM sequence: TTT
tcctttatggaaagactgac

SEQ ID NO: 290965 - DNA, 20 bp, Artificial Sequence
  Description of Artificial Sequence: Synthetic oligonucleotide
  Target: LAMA2; (-) strand; PAM type: YTN; PAM sequence: TTC
catattttcctttatggaaa

SEQ ID NO: 290966 - DNA, 20 bp, Artificial Sequence
  Description of Artificial Sequence: Synthetic oligonucleotide
  Target: LAMA2; (-) strand; PAM type: YTN; PAM sequence: CTT
ccatattttcctttatggaa

SEQ ID NO: 290967 - DNA, 20 bp, Artificial Sequence
  Description of Artificial Sequence: Synthetic oligonucleotide
  Target: LAMA2; (-) strand; PAM type: YTN; PAM sequence: TTG
cttccatattttcctttatg

SEQ ID NO: 290968 - DNA, 20 bp, Artificial Sequence
  Description of Artificial Sequence: Synthetic oligonucleotide
  Target: LAMA2; (-) strand; PAM type: YTN; PAM sequence: CTT
gcttccatattttcctttat

SEQ ID NO: 290969 - DNA, 20 bp, Artificial Sequence
  Description of Artificial Sequence: Synthetic oligonucleotide
  Target: LAMA2; (-) strand; PAM type: YTN; PAM sequence: TTC
acttgcttccatattttcct

SEQ ID NO: 290970 - DNA, 20 bp, Artificial Sequence
  Description of Artificial Sequence: Synthetic oligonucleotide
  Target: LAMA2; (-) strand; PAM type: YTN; PAM sequence: TTA
acagtgttcacttgcttcca

SEQ ID NO: 290971 - DNA, 20 bp, Artificial Sequence
  Description of Artificial Sequence: Synthetic oligonucleotide
  Target: LAMA2; (-) strand; PAM type: YTN; PAM sequence: TTC
attaacagtgttcacttgct

SEQ ID NO: 290972 - DNA, 20 bp, Artificial Sequence
  Description of Artificial Sequence: Synthetic oligonucleotide
  Target: LAMA2; (-) strand; PAM type: YTN; PAM sequence: TTT
cattaacagtgttcacttgc

SEQ ID NO: 290973 - DNA, 20 bp, Artificial Sequence
  Description of Artificial Sequence: Synthetic oligonucleotide
  Target: LAMA2; (-) strand; PAM type: YTN; PAM sequence: TTG
cataatgcacagagaaggtg

SEQ ID NO: 290974 - DNA, 20 bp, Artificial Sequence
  Description of Artificial Sequence: Synthetic oligonucleotide
  Target: LAMA2; (-) strand; PAM type: YTN; PAM sequence: CTT
gcataatgcacagagaaggt

SEQ ID NO: 290975 - DNA, 20 bp, Artificial Sequence
  Description of Artificial Sequence: Synthetic oligonucleotide
  Target: LAMA2; (-) strand; PAM type: YTN; PAM sequence: TTC
ttgcataatgcacagagaag

SEQ ID NO: 290976 - DNA, 20 bp, Artificial Sequence
  Description of Artificial Sequence: Synthetic oligonucleotide
  Target: LAMA2; (-) strand; PAM type: YTN; PAM sequence: TTT
cttgcataatgcacagagaa

SEQ ID NO: 290977 - DNA, 20 bp, Artificial Sequence
  Description of Artificial Sequence: Synthetic oligonucleotide
  Target: LAMA2; (-) strand; PAM type: YTN; PAM sequence: TTT
tcttgcataatgcacagaga

SEQ ID NO: 290978 - DNA, 20 bp, Artificial Sequence
  Description of Artificial Sequence: Synthetic oligonucleotide
  Target: LAMA2; (-) strand; PAM type: YTN; PAM sequence: TTT
ttcttgcataatgcacagag

SEQ ID NO: 290979 - DNA, 20 bp, Artificial Sequence
  Description of Artificial Sequence: Synthetic oligonucleotide
  Target: LAMA2; (-) strand; PAM type: YTN; PAM sequence: TTA
tatttttcttgcataatgca

SEQ ID NO: 290980 - DNA, 20 bp, Artificial Sequence
  Description of Artificial Sequence: Synthetic oligonucleotide
  Target: LAMA2; (-) strand; PAM type: YTN; PAM sequence: CTT
atatttttcttgcataatgc

SEQ ID NO: 290981 - DNA, 20 bp, Artificial Sequence
  Description of Artificial Sequence: Synthetic oligonucleotide
  Target: LAMA2; (-) strand; PAM type: YTN; PAM sequence: CTG
cttatatttttcttgcataa

SEQ ID NO: 290982 - DNA, 20 bp, Artificial Sequence
  Description of Artificial Sequence: Synthetic oligonucleotide
  Target: LAMA2; (-) strand; PAM type: YTN; PAM sequence: TTC
tgcttatatttttcttgcat

SEQ ID NO: 290983 - DNA, 20 bp, Artificial Sequence
  Description of Artificial Sequence: Synthetic oligonucleotide
  Target: LAMA2; (-) strand; PAM type: YTN; PAM sequence: CTG
tagggtgagaattctgctta

SEQ ID NO: 290984 - DNA, 20 bp, Artificial Sequence
  Description of Artificial Sequence: Synthetic oligonucleotide
  Target: LAMA2; (-) strand; PAM type: YTN; PAM sequence: TTA
taaagaacatgcccaactgt

SEQ ID NO: 290985 - DNA, 20 bp, Artificial Sequence
  Description of Artificial Sequence: Synthetic oligonucleotide
  Target: LAMA2; (-) strand; PAM type: YTN; PAM sequence: TTG
ttataaagaacatgcccaac

SEQ ID NO: 290986 - DNA, 20 bp, Artificial Sequence
  Description of Artificial Sequence: Synthetic oligonucleotide
  Target: LAMA2; (-) strand; PAM type: YTN; PAM sequence: CTG
gttgttataaagaacatgcc

SEQ ID NO: 290987 - DNA, 20 bp, Artificial Sequence
  Description of Artificial Sequence: Synthetic oligonucleotide
  Target: LAMA2; (-) strand; PAM type: YTN; PAM sequence: TTC
agtcagtcagctggttgtta

SEQ ID NO: 290988 - DNA, 20 bp, Artificial Sequence
  Description of Artificial Sequence: Synthetic oligonucleotide
  Target: LAMA2; (-) strand; PAM type: YTN; PAM sequence: TTC
gttcagtcagtcagctggtt

SEQ ID NO: 290989 - DNA, 20 bp, Artificial Sequence
  Description of Artificial Sequence: Synthetic oligonucleotide
  Target: LAMA2; (-) strand; PAM type: YTN; PAM sequence: TTT
cgttcagtcagtcagctggt

SEQ ID NO: 290990 - DNA, 20 bp, Artificial Sequence
  Description of Artificial Sequence: Synthetic oligonucleotide
  Target: LAMA2; (-) strand; PAM type: YTN; PAM sequence: TTT
tcgttcagtcagtcagctgg

SEQ ID NO: 290991 - DNA, 20 bp, Artificial Sequence
  Description of Artificial Sequence: Synthetic oligonucleotide
  Target: LAMA2; (-) strand; PAM type: YTN; PAM sequence: CTT
ttcgttcagtcagtcagctg

SEQ ID NO: 290992 - DNA, 20 bp, Artificial Sequence
  Description of Artificial Sequence: Synthetic oligonucleotide
  Target: LAMA2; (-) strand; PAM type: YTN; PAM sequence: TTC
ttttcgttcagtcagtcagc

SEQ ID NO: 290993 - DNA, 20 bp, Artificial Sequence
  Description of Artificial Sequence: Synthetic oligonucleotide
  Target: LAMA2; (-) strand; PAM type: YTN; PAM sequence: TTT
cttttcgttcagtcagtcag

SEQ ID NO: 290994 - DNA, 20 bp, Artificial Sequence
  Description of Artificial Sequence: Synthetic oligonucleotide
  Target: LAMA2; (-) strand; PAM type: YTN; PAM sequence: TTT
tcttttcgttcagtcagtca

SEQ ID NO: 290995 - DNA, 20 bp, Artificial Sequence
  Description of Artificial Sequence: Synthetic oligonucleotide
  Target: LAMA2; (-) strand; PAM type: YTN; PAM sequence: TTC
ccaaggttttcttttcgttc

SEQ ID NO: 290996 - DNA, 20 bp, Artificial Sequence
  Description of Artificial Sequence: Synthetic oligonucleotide
  Target: LAMA2; (-) strand; PAM type: YTN; PAM sequence: TTG
ttcccaaggttttcttttcg

SEQ ID NO: 290997 - DNA, 20 bp, Artificial Sequence
  Description of Artificial Sequence: Synthetic oligonucleotide
  Target: LAMA2; (-) strand; PAM type: YTN; PAM sequence: CTT
gttcccaaggttttcttttc

SEQ ID NO: 290998 - DNA, 20 bp, Artificial Sequence
  Description of Artificial Sequence: Synthetic oligonucleotide
  Target: LAMA2; (-) strand; PAM type: YTN; PAM sequence: TTC
cttgttcccaaggttttctt

SEQ ID NO: 290999 - DNA, 20 bp, Artificial Sequence
  Description of Artificial Sequence: Synthetic oligonucleotide
  Target: LAMA2; (-) strand; PAM type: YTN; PAM sequence: TTT
ccttgttcccaaggttttct

SEQ ID NO: 291000 - DNA, 20 bp, Artificial Sequence
  Description of Artificial Sequence: Synthetic oligonucleotide
  Target: LAMA2; (-) strand; PAM type: YTN; PAM sequence: TTT
tccttgttcccaaggttttc

SEQ ID NO: 291001 - DNA, 20 bp, Artificial Sequence
  Description of Artificial Sequence: Synthetic oligonucleotide
  Target: LAMA2; (-) strand; PAM type: YTN; PAM sequence: TTT
ttccttgttcccaaggtttt

SEQ ID NO: 291002 - DNA, 20 bp, Artificial Sequence
  Description of Artificial Sequence: Synthetic oligonucleotide
  Target: LAMA2; (-) strand; PAM type: YTN; PAM sequence: TTG
ataatttttccttgttccca

SEQ ID NO: 291003 - DNA, 20 bp, Artificial Sequence
  Description of Artificial Sequence: Synthetic oligonucleotide
  Target: LAMA2; (-) strand; PAM type: YTN; PAM sequence: TTC
attgataatttttccttgtt

SEQ ID NO: 291004 - DNA, 20 bp, Artificial Sequence
  Description of Artificial Sequence: Synthetic oligonucleotide
  Target: LAMA2; (-) strand; PAM type: YTN; PAM sequence: TTT
cattgataatttttccttgt

SEQ ID NO: 291005 - DNA, 20 bp, Artificial Sequence
  Description of Artificial Sequence: Synthetic oligonucleotide
  Target: LAMA2; (-) strand; PAM type: YTN; PAM sequence: TTT
tcattgataatttttccttg

SEQ ID NO: 291006 - DNA, 20 bp, Artificial Sequence
  Description of Artificial Sequence: Synthetic oligonucleotide
  Target: LAMA2; (-) strand; PAM type: YTN; PAM sequence: TTA
ttttcattgataatttttcc

SEQ ID NO: 291007 - DNA, 20 bp, Artificial Sequence
  Description of Artificial Sequence: Synthetic oligonucleotide
  Target: LAMA2; (-) strand; PAM type: YTN; PAM sequence: TTT
attttcattgataatttttc

SEQ ID NO: 291008 - DNA, 20 bp, Artificial Sequence
  Description of Artificial Sequence: Synthetic oligonucleotide
  Target: LAMA2; (-) strand; PAM type: YTN; PAM sequence: CTT
tattttcattgataattttt

SEQ ID NO: 291009 - DNA, 20 bp, Artificial Sequence
  Description of Artificial Sequence: Synthetic oligonucleotide
  Target: LAMA2; (-) strand; PAM type: YTN; PAM sequence: TTC
tttattttcattgataattt

SEQ ID NO: 291010 - DNA, 20 bp, Artificial Sequence
  Description of Artificial Sequence: Synthetic oligonucleotide
  Target: LAMA2; (-) strand; PAM type: YTN; PAM sequence: CTT
ctttattttcattgataatt

SEQ ID NO: 291011 - DNA, 20 bp, Artificial Sequence
  Description of Artificial Sequence: Synthetic oligonucleotide
  Target: LAMA2; (-) strand; PAM type: YTN; PAM sequence: CTG
gaacttctttattttcattg

SEQ ID NO: 291012 - DNA, 20 bp, Artificial Sequence
  Description of Artificial Sequence: Synthetic oligonucleotide
  Target: LAMA2; (-) strand; PAM type: YTN; PAM sequence: TTC
tggaacttctttattttcat

SEQ ID NO: 291013 - DNA, 20 bp, Artificial Sequence
  Description of Artificial Sequence: Synthetic oligonucleotide
  Target: LAMA2; (-) strand; PAM type: YTN; PAM sequence: TTT
ctggaacttctttattttca

SEQ ID NO: 291014 - DNA, 20 bp, Artificial Sequence
  Description of Artificial Sequence: Synthetic oligonucleotide
  Target: LAMA2; (-) strand; PAM type: YTN; PAM sequence: CTT
tctggaacttctttattttc

SEQ ID NO: 291015 - DNA, 20 bp, Artificial Sequence
  Description of Artificial Sequence: Synthetic oligonucleotide
  Target: LAMA2; (-) strand; PAM type: YTN; PAM sequence: CTC
ctttctggaacttctttatt

SEQ ID NO: 291016 - DNA, 20 bp, Artificial Sequence
  Description of Artificial Sequence: Synthetic oligonucleotide
  Target: LAMA2; (-) strand; PAM type: YTN; PAM sequence: TTC
cacccccgcactcctttctg

SEQ ID NO: 291017 - DNA, 20 bp, Artificial Sequence
  Description of Artificial Sequence: Synthetic oligonucleotide
  Target: LAMA2; (-) strand; PAM type: YTN; PAM sequence: TTT
ccacccccgcactcctttct

SEQ ID NO: 291018 - DNA, 20 bp, Artificial Sequence
  Description of Artificial Sequence: Synthetic oligonucleotide
  Target: LAMA2; (-) strand; PAM type: YTN; PAM sequence: CTG
tttccacccccgcactcctt

SEQ ID NO: 291019 - DNA, 20 bp, Artificial Sequence
  Description of Artificial Sequence: Synthetic oligonucleotide
  Target: LAMA2; (-) strand; PAM type: YTN; PAM sequence: CTG
tctgtttccacccccgcact

SEQ ID NO: 291020 - DNA, 20 bp, Artificial Sequence
  Description of Artificial Sequence: Synthetic oligonucleotide
  Target: LAMA2; (-) strand; PAM type: YTN; PAM sequence: TTC
atgtcaggtgtctgtctgtt

SEQ ID NO: 291021 - DNA, 20 bp, Artificial Sequence
  Description of Artificial Sequence: Synthetic oligonucleotide
  Target: LAMA2; (-) strand; PAM type: YTN; PAM sequence: TTT
catgtcaggtgtctgtctgt

SEQ ID NO: 291022 - DNA, 20 bp, Artificial Sequence
  Description of Artificial Sequence: Synthetic oligonucleotide
  Target: LAMA2; (-) strand; PAM type: YTN; PAM sequence: TTA
tttcatgtcaggtgtctgtc

SEQ ID NO: 291023 - DNA, 20 bp, Artificial Sequence
  Description of Artificial Sequence: Synthetic oligonucleotide
  Target: LAMA2; (-) strand; PAM type: YTN; PAM sequence: TTT
atttcatgtcaggtgtctgt

SEQ ID NO: 291024 - DNA, 20 bp, Artificial Sequence
  Description of Artificial Sequence: Synthetic oligonucleotide
  Target: LAMA2; (-) strand; PAM type: YTN; PAM sequence: TTG
gcagtgtatatcaggtgatt

SEQ ID NO: 291025 - DNA, 20 bp, Artificial Sequence
  Description of Artificial Sequence: Synthetic oligonucleotide
  Target: LAMA2; (-) strand; PAM type: YTN; PAM sequence: CTT
ggcagtgtatatcaggtgat

SEQ ID NO: 291026 - DNA, 20 bp, Artificial Sequence
  Description of Artificial Sequence: Synthetic oligonucleotide
  Target: LAMA2; (-) strand; PAM type: YTN; PAM sequence: TTA
gaccttggcagtgtatatca

SEQ ID NO: 291027 - DNA, 20 bp, Artificial Sequence
  Description of Artificial Sequence: Synthetic oligonucleotide
  Target: LAMA2; (-) strand; PAM type: YTN; PAM sequence: TTA
atgaaaaacacatggcatga

SEQ ID NO: 291028 - DNA, 20 bp, Artificial Sequence
  Description of Artificial Sequence: Synthetic oligonucleotide
  Target: LAMA2; (-) strand; PAM type: YTN; PAM sequence: CTT
aatgaaaaacacatggcatg

SEQ ID NO: 291029 - DNA, 20 bp, Artificial Sequence
  Description of Artificial Sequence: Synthetic oligonucleotide
  Target: LAMA2; (-) strand; PAM type: YTN; PAM sequence: TTA
tcttaatgaaaaacacatgg

SEQ ID NO: 291030 - DNA, 20 bp, Artificial Sequence
  Description of Artificial Sequence: Synthetic oligonucleotide
  Target: LAMA2; (-) strand; PAM type: YTN; PAM sequence: TTT
atcttaatgaaaaacacatg

SEQ ID NO: 291031 - DNA, 20 bp, Artificial Sequence
  Description of Artificial Sequence: Synthetic oligonucleotide
  Target: LAMA2; (-) strand; PAM type: YTN; PAM sequence: TTT
tatcttaatgaaaaacacat

SEQ ID NO: 291032 - DNA, 20 bp, Artificial Sequence
  Description of Artificial Sequence: Synthetic oligonucleotide
  Target: LAMA2; (-) strand; PAM type: YTN; PAM sequence: TTT
ttatcttaatgaaaaacaca

SEQ ID NO: 291033 - DNA, 20 bp, Artificial Sequence
  Description of Artificial Sequence: Synthetic oligonucleotide
  Target: LAMA2; (-) strand; PAM type: YTN; PAM sequence: TTT
tttatcttaatgaaaaacac

SEQ ID NO: 291034 - DNA, 20 bp, Artificial Sequence
  Description of Artificial Sequence: Synthetic oligonucleotide
  Target: LAMA2; (-) strand; PAM type: YTN; PAM sequence: TTT
ttttatcttaatgaaaaaca

SEQ ID NO: 291035 - DNA, 20 bp, Artificial Sequence
  Description of Artificial Sequence: Synthetic oligonucleotide
  Target: LAMA2; (-) strand; PAM type: YTN; PAM sequence: CTT
tttttatcttaatgaaaaac

SEQ ID NO: 291036 - DNA, 20 bp, Artificial Sequence
  Description of Artificial Sequence: Synthetic oligonucleotide
  Target: LAMA2; (-) strand; PAM type: YTN; PAM sequence: TTC
ctttttttatcttaatgaaa

SEQ ID NO: 291037 - DNA, 20 bp, Artificial Sequence
  Description of Artificial Sequence: Synthetic oligonucleotide
  Target: LAMA2; (-) strand; PAM type: YTN; PAM sequence: TTG
tcccatgatgccaagttcct

SEQ ID NO: 291038 - DNA, 20 bp, Artificial Sequence
  Description of Artificial Sequence: Synthetic oligonucleotide
  Target: LAMA2; (-) strand; PAM type: YTN; PAM sequence: CTC
attgtcccatgatgccaagt

SEQ ID NO: 291039 - DNA, 20 bp, Artificial Sequence
  Description of Artificial Sequence: Synthetic oligonucleotide
  Target: LAMA2; (-) strand; PAM type: YTN; PAM sequence: CTC
ctcattgtcccatgatgcca

SEQ ID NO: 291040 - DNA, 20 bp, Artificial Sequence
  Description of Artificial Sequence: Synthetic oligonucleotide
  Target: LAMA2; (-) strand; PAM type: YTN; PAM sequence: CTC
tcctcattgtcccatgatgc

SEQ ID NO: 291041 - DNA, 20 bp, Artificial Sequence
  Description of Artificial Sequence: Synthetic oligonucleotide
  Target: LAMA2; (-) strand; PAM type: YTN; PAM sequence: TTC
tctcctcattgtcccatgat

SEQ ID NO: 291042 - DNA, 20 bp, Artificial Sequence
  Description of Artificial Sequence: Synthetic oligonucleotide
  Target: LAMA2; (-) strand; PAM type: YTN; PAM sequence: TTA
attctctcctcattgtccca

SEQ ID NO: 291043 - DNA, 20 bp, Artificial Sequence
  Description of Artificial Sequence: Synthetic oligonucleotide
  Target: LAMA2; (-) strand; PAM type: YTN; PAM sequence: TTG
atagggtgatgattaattct

SEQ ID NO: 291044 - DNA, 20 bp, Artificial Sequence
  Description of Artificial Sequence: Synthetic oligonucleotide
  Target: LAMA2; (-) strand; PAM type: YTN; PAM sequence: TTG
tagttgatagggtgatgatt

SEQ ID NO: 291045 - DNA, 20 bp, Artificial Sequence
  Description of Artificial Sequence: Synthetic oligonucleotide
  Target: LAMA2; (-) strand; PAM type: YTN; PAM sequence: CTG
tccagtcggcatcaatatat

SEQ ID NO: 291046 - DNA, 20 bp, Artificial Sequence
  Description of Artificial Sequence: Synthetic oligonucleotide
  Target: LAMA2; (-) strand; PAM type: YTN; PAM sequence: TTA
tgtggtggtaatcagcatcg

SEQ ID NO: 291047 - DNA, 20 bp, Artificial Sequence
  Description of Artificial Sequence: Synthetic oligonucleotide
  Target: LAMA2; (-) strand; PAM type: YTN; PAM sequence: TTT
atgtggtggtaatcagcatc

SEQ ID NO: 291048 - DNA, 20 bp, Artificial Sequence
  Description of Artificial Sequence: Synthetic oligonucleotide
  Target: LAMA2; (-) strand; PAM type: YTN; PAM sequence: CTT
tatgtggtggtaatcagcat

SEQ ID NO: 291049 - DNA, 20 bp, Artificial Sequence
  Description of Artificial Sequence: Synthetic oligonucleotide
  Target: LAMA2; (-) strand; PAM type: YTN; PAM sequence: TTC
tttatgtggtggtaatcagc

SEQ ID NO: 291050 - DNA, 20 bp, Artificial Sequence
  Description of Artificial Sequence: Synthetic oligonucleotide
  Target: LAMA2; (-) strand; PAM type: YTN; PAM sequence: TTG
aatagtgaaggtatatagaa

SEQ ID NO: 291051 - DNA, 20 bp, Artificial Sequence
  Description of Artificial Sequence: Synthetic oligonucleotide
  Target: LAMA2; (-) strand; PAM type: YTN; PAM sequence: TTT
gaatagtgaaggtatataga

SEQ ID NO: 291052 - DNA, 20 bp, Artificial Sequence
  Description of Artificial Sequence: Synthetic oligonucleotide
  Target: LAMA2; (-) strand; PAM type: YTN; PAM sequence: TTT
tgaatagtgaaggtatatag

SEQ ID NO: 291053 - DNA, 20 bp, Artificial Sequence
  Description of Artificial Sequence: Synthetic oligonucleotide
  Target: LAMA2; (-) strand; PAM type: YTN; PAM sequence: CTA
ttttgaatagtgaaggtata

SEQ ID NO: 291054 - DNA, 20 bp, Artificial Sequence
  Description of Artificial Sequence: Synthetic oligonucleotide
  Target: LAMA2; (-) strand; PAM type: YTN; PAM sequence: CTA
ctattttgaatagtgaaggt

SEQ ID NO: 291055 - DNA, 20 bp, Artificial Sequence
  Description of Artificial Sequence: Synthetic oligonucleotide
  Target: LAMA2; (-) strand; PAM type: YTN; PAM sequence: TTG
tggctactattttgaatagt

SEQ ID NO: 291056 - DNA, 20 bp, Artificial Sequence
  Description of Artificial Sequence: Synthetic oligonucleotide
  Target: LAMA2; (-) strand; PAM type: YTN; PAM sequence: CTT
gtggctactattttgaatag

SEQ ID NO: 291057 - DNA, 20 bp, Artificial Sequence
  Description of Artificial Sequence: Synthetic oligonucleotide
  Target: LAMA2; (-) strand; PAM type: YTN; PAM sequence: CTG
tgacttgtggctactatttt

SEQ ID NO: 291058 - DNA, 20 bp, Artificial Sequence
  Description of Artificial Sequence: Synthetic oligonucleotide
  Target: LAMA2; (-) strand; PAM type: YTN; PAM sequence: CTA
ctgtgacttgtggctactat

SEQ ID NO: 291059 - DNA, 20 bp, Artificial Sequence
  Description of Artificial Sequence: Synthetic oligonucleotide
  Target: LAMA2; (-) strand; PAM type: YTN; PAM sequence: TTA
aatagctactgtgacttgtg

SEQ ID NO: 291060 - DNA, 20 bp, Artificial Sequence
  Description of Artificial Sequence: Synthetic oligonucleotide
  Target: LAMA2; (-) strand; PAM type: YTN; PAM sequence: TTA
caattaaatagctactgtga

SEQ ID NO: 291061 - DNA, 20 bp, Artificial Sequence
  Description of Artificial Sequence: Synthetic oligonucleotide
  Target: LAMA2; (-) strand; PAM type: YTN; PAM sequence: TTT
acaattaaatagctactgtg

SEQ ID NO: 291062 - DNA, 20 bp, Artificial Sequence
  Description of Artificial Sequence: Synthetic oligonucleotide
  Target: LAMA2; (-) strand; PAM type: YTN; PAM sequence: TTA
atttacaattaaatagctac

SEQ ID NO: 291063 - DNA, 20 bp, Artificial Sequence
  Description of Artificial Sequence: Synthetic oligonucleotide
  Target: LAMA2; (-) strand; PAM type: YTN; PAM sequence: TTT
aatttacaattaaatagcta

SEQ ID NO: 291064 - DNA, 20 bp, Artificial Sequence
  Description of Artificial Sequence: Synthetic oligonucleotide
  Target: LAMA2; (-) strand; PAM type: YTN; PAM sequence: TTG
atttaatttacaattaaata

SEQ ID NO: 291065 - DNA, 20 bp, Artificial Sequence
  Description of Artificial Sequence: Synthetic oligonucleotide
  Target: LAMA2; (-) strand; PAM type: YTN; PAM sequence: TTT
gatttaatttacaattaaat

SEQ ID NO: 291066 - DNA, 20 bp, Artificial Sequence
  Description of Artificial Sequence: Synthetic oligonucleotide
  Target: LAMA2; (-) strand; PAM type: YTN; PAM sequence: TTA
atttgatttaatttacaatt

SEQ ID NO: 291067 - DNA, 20 bp, Artificial Sequence
  Description of Artificial Sequence: Synthetic oligonucleotide
  Target: LAMA2; (-) strand; PAM type: YTN; PAM sequence: TTT
aatttgatttaatttacaat

SEQ ID NO: 291068 - DNA, 20 bp, Artificial Sequence
  Description of Artificial Sequence: Synthetic oligonucleotide
  Target: LAMA2; (-) strand; PAM type: YTN; PAM sequence: TTA
tttaatttgatttaatttac

SEQ ID NO: 291069 - DNA, 20 bp, Artificial Sequence
  Description of Artificial Sequence: Synthetic oligonucleotide
  Target: LAMA2; (-) strand; PAM type: YTN; PAM sequence: TTG
ttatttaatttgatttaatt

SEQ ID NO: 291070 - DNA, 20 bp, Artificial Sequence
  Description of Artificial Sequence: Synthetic oligonucleotide
  Target: LAMA2; (-) strand; PAM type: YTN; PAM sequence: TTA
ttgttatttaatttgattta

SEQ ID NO: 291071 - DNA, 20 bp, Artificial Sequence
  Description of Artificial Sequence: Synthetic oligonucleotide
  Target: LAMA2; (-) strand; PAM type: YTN; PAM sequence: TTT
attgttatttaatttgattt

SEQ ID NO: 291072 - DNA, 20 bp, Artificial Sequence
  Description of Artificial Sequence: Synthetic oligonucleotide
  Target: LAMA2; (-) strand; PAM type: YTN; PAM sequence: CTG
aatatttattgttatttaat

SEQ ID NO: 291073 - DNA, 20 bp, Artificial Sequence
  Description of Artificial Sequence: Synthetic oligonucleotide
  Target: LAMA2; (-) strand; PAM type: YTN; PAM sequence: CTC
aatgagaaactgaatattta

SEQ ID NO: 291074 - DNA, 20 bp, Artificial Sequence
  Description of Artificial Sequence: Synthetic oligonucleotide
  Target: LAMA2; (-) strand; PAM type: YTN; PAM sequence: TTG
tctcaatgagaaactgaata

SEQ ID NO: 291075 - DNA, 20 bp, Artificial Sequence
  Description of Artificial Sequence: Synthetic oligonucleotide
  Target: LAMA2; (-) strand; PAM type: YTN; PAM sequence: CTT
gtctcaatgagaaactgaat

SEQ ID NO: 291076 - DNA, 20 bp, Artificial Sequence
  Description of Artificial Sequence: Synthetic oligonucleotide
  Target: LAMA2; (-) strand; PAM type: YTN; PAM sequence: TTG
aaatgtagcttgtctcaatg

SEQ ID NO: 291077 - DNA, 20 bp, Artificial Sequence
  Description of Artificial Sequence: Synthetic oligonucleotide
  Target: LAMA2; (-) strand; PAM type: YTN; PAM sequence: CTT
gaaatgtagcttgtctcaat

SEQ ID NO: 291078 - DNA, 20 bp, Artificial Sequence
  Description of Artificial Sequence: Synthetic oligonucleotide
  Target: LAMA2; (-) strand; PAM type: YTN; PAM sequence: TTA
ggacttgaaatgtagcttgt

SEQ ID NO: 291079 - DNA, 20 bp, Artificial Sequence
  Description of Artificial Sequence: Synthetic oligonucleotide
  Target: LAMA2; (-) strand; PAM type: YTN; PAM sequence: CTA
ttaggacttgaaatgtagct

SEQ ID NO: 291080 - DNA, 20 bp, Artificial Sequence
  Description of Artificial Sequence: Synthetic oligonucleotide
  Target: LAMA2; (-) strand; PAM type: YTN; PAM sequence: CTA
gccacatgtggctattagga

SEQ ID NO: 291081 - DNA, 20 bp, Artificial Sequence
  Description of Artificial Sequence: Synthetic oligonucleotide
  Target: LAMA2; (-) strand; PAM type: YTN; PAM sequence: TTA
ctagccacatgtggctatta

SEQ ID NO: 291082 - DNA, 20 bp, Artificial Sequence
  Description of Artificial Sequence: Synthetic oligonucleotide
  Target: LAMA2; (-) strand; PAM type: YTN; PAM sequence: CTG
tccaaatcagtagttactag

SEQ ID NO: 291083 - DNA, 20 bp, Artificial Sequence
  Description of Artificial Sequence: Synthetic oligonucleotide
  Target: LAMA2; (-) strand; PAM type: YTN; PAM sequence: CTG
cactgtccaaatcagtagtt

SEQ ID NO: 291084 - DNA, 20 bp, Artificial Sequence
  Description of Artificial Sequence: Synthetic oligonucleotide
  Target: LAMA2; (-) strand; PAM type: YTN; PAM sequence: TTC
tgcactgtccaaatcagtag

SEQ ID NO: 291085 - DNA, 20 bp, Artificial Sequence
  Description of Artificial Sequence: Synthetic oligonucleotide
  Target: LAMA2; (-) strand; PAM type: YTN; PAM sequence: TTT
ctgcactgtccaaatcagta

SEQ ID NO: 291086 - DNA, 20 bp, Artificial Sequence
  Description of Artificial Sequence: Synthetic oligonucleotide
  Target: LAMA2; (-) strand; PAM type: YTN; PAM sequence: TTT
tctgcactgtccaaatcagt

SEQ ID NO: 291087 - DNA, 20 bp, Artificial Sequence
  Description of Artificial Sequence: Synthetic oligonucleotide
  Target: LAMA2; (-) strand; PAM type: YTN; PAM sequence: CTG
ttttctgcactgtccaaatc

SEQ ID NO: 291088 - DNA, 20 bp, Artificial Sequence
  Description of Artificial Sequence: Synthetic oligonucleotide
  Target: LAMA2; (-) strand; PAM type: YTN; PAM sequence: TTG
tctgttttctgcactgtcca

SEQ ID NO: 291089 - DNA, 20 bp, Artificial Sequence
  Description of Artificial Sequence: Synthetic oligonucleotide
  Target: LAMA2; (-) strand; PAM type: YTN; PAM sequence: CTG
tgatgatggatattgtctgt

SEQ ID NO: 291090 - DNA, 20 bp, Artificial Sequence
  Description of Artificial Sequence: Synthetic oligonucleotide
  Target: LAMA2; (-) strand; PAM type: YTN; PAM sequence: TTC
ctgtgatgatggatattgtc

SEQ ID NO: 291091 - DNA, 20 bp, Artificial Sequence
  Description of Artificial Sequence: Synthetic oligonucleotide
  Target: LAMA2; (-) strand; PAM type: YTN; PAM sequence: CTT
cctgtgatgatggatattgt

SEQ ID NO: 291092 - DNA, 20 bp, Artificial Sequence
  Description of Artificial Sequence: Synthetic oligonucleotide
  Target: LAMA2; (-) strand; PAM type: YTN; PAM sequence: TTC
cacagaacttcctgtgatga

SEQ ID NO: 291093 - DNA, 20 bp, Artificial Sequence
  Description of Artificial Sequence: Synthetic oligonucleotide
  Target: LAMA2; (-) strand; PAM type: YTN; PAM sequence: CTA
ttccacagaacttcctgtga

SEQ ID NO: 291094 - DNA, 20 bp, Artificial Sequence
  Description of Artificial Sequence: Synthetic oligonucleotide
  Target: LAMA2; (-) strand; PAM type: YTN; PAM sequence: TTA
taacagtgctattccacaga

SEQ ID NO: 291095 - DNA, 20 bp, Artificial Sequence
  Description of Artificial Sequence: Synthetic oligonucleotide
  Target: LAMA2; (-) strand; PAM type: YTN; PAM sequence: TTA
attataacagtgctattcca

SEQ ID NO: 291096 - DNA, 20 bp, Artificial Sequence
  Description of Artificial Sequence: Synthetic oligonucleotide
  Target: LAMA2; (-) strand; PAM type: YTN; PAM sequence: TTT
aattataacagtgctattcc

SEQ ID NO: 291097 - DNA, 20 bp, Artificial Sequence
  Description of Artificial Sequence: Synthetic oligonucleotide
  Target: LAMA2; (-) strand; PAM type: YTN; PAM sequence: CTT
taattataacagtgctattc

SEQ ID NO: 291098 - DNA, 20 bp, Artificial Sequence
  Description of Artificial Sequence: Synthetic oligonucleotide
  Target: LAMA2; (-) strand; PAM type: YTN; PAM sequence: TTC
tttaattataacagtgctat

SEQ ID NO: 291099 - DNA, 20 bp, Artificial Sequence
  Description of Artificial Sequence: Synthetic oligonucleotide
  Target: LAMA2; (-) strand; PAM type: YTN; PAM sequence: CTT
ctttaattataacagtgcta

SEQ ID NO: 291100 - DNA, 20 bp, Artificial Sequence
  Description of Artificial Sequence: Synthetic oligonucleotide
  Target: LAMA2; (-) strand; PAM type: YTN; PAM sequence: CTA
tcagaatgtcagtgatgatg

SEQ ID NO: 291101 - DNA, 20 bp, Artificial Sequence
  Description of Artificial Sequence: Synthetic oligonucleotide
  Target: LAMA2; (-) strand; PAM type: YTN; PAM sequence: CTC
aacaaacaaaggctatcaga

SEQ ID NO: 291102 - DNA, 20 bp, Artificial Sequence
  Description of Artificial Sequence: Synthetic oligonucleotide
  Target: LAMA2; (-) strand; PAM type: YTN; PAM sequence: CTG
cacacagtaagtgctcaaca

SEQ ID NO: 291103 - DNA, 20 bp, Artificial Sequence
  Description of Artificial Sequence: Synthetic oligonucleotide
  Target: LAMA2; (-) strand; PAM type: YTN; PAM sequence: TTA
aggaatagcactgcacacag

SEQ ID NO: 291104 - DNA, 20 bp, Artificial Sequence
  Description of Artificial Sequence: Synthetic oligonucleotide
  Target: LAMA2; (-) strand; PAM type: YTN; PAM sequence: TTA
ataaattaaggaatagcact

SEQ ID NO: 291105 - DNA, 20 bp, Artificial Sequence
  Description of Artificial Sequence: Synthetic oligonucleotide
  Target: LAMA2; (-) strand; PAM type: YTN; PAM sequence: TTT
aataaattaaggaatagcac

SEQ ID NO: 291106 - DNA, 20 bp, Artificial Sequence
  Description of Artificial Sequence: Synthetic oligonucleotide
  Target: LAMA2; (-) strand; PAM type: YTN; PAM sequence: TTG
caaaggtttaataaattaag

SEQ ID NO: 291107 - DNA, 20 bp, Artificial Sequence
  Description of Artificial Sequence: Synthetic oligonucleotide
  Target: LAMA2; (-) strand; PAM type: YTN; PAM sequence: CTA
cataatcaaattgcaaaggt

SEQ ID NO: 291108 - DNA, 20 bp, Artificial Sequence
  Description of Artificial Sequence: Synthetic oligonucleotide
  Target: LAMA2; (-) strand; PAM type: YTN; PAM sequence: TTA
tatgtgaaatgggcatgata

SEQ ID NO: 291109 - DNA, 20 bp, Artificial Sequence
  Description of Artificial Sequence: Synthetic oligonucleotide
  Target: LAMA2; (-) strand; PAM type: YTN; PAM sequence: CTT
atatgtgaaatgggcatgat

SEQ ID NO: 291110 - DNA, 20 bp, Artificial Sequence
  Description of Artificial Sequence: Synthetic oligonucleotide
  Target: LAMA2; (-) strand; PAM type: YTN; PAM sequence: TTC
ttatatgtgaaatgggcatg

SEQ ID NO: 291111 - DNA, 20 bp, Artificial Sequence
  Description of Artificial Sequence: Synthetic oligonucleotide
  Target: LAMA2; (-) strand; PAM type: YTN; PAM sequence: CTC
agtgttcttatatgtgaaat

SEQ ID NO: 291112 - DNA, 20 bp, Artificial Sequence
  Description of Artificial Sequence: Synthetic oligonucleotide
  Target: LAMA2; (-) strand; PAM type: YTN; PAM sequence: CTC
caagactcagtgttcttata

SEQ ID NO: 291113 - DNA, 20 bp, Artificial Sequence
  Description of Artificial Sequence: Synthetic oligonucleotide
  Target: LAMA2; (-) strand; PAM type: YTN; PAM sequence: TTC
tccaagactcagtgttctta

SEQ ID NO: 291114 - DNA, 20 bp, Artificial Sequence
  Description of Artificial Sequence: Synthetic oligonucleotide
  Target: LAMA2; (-) strand; PAM type: YTN; PAM sequence: CTA
agttctccaagactcagtgt

SEQ ID NO: 291115 - DNA, 20 bp, Artificial Sequence
  Description of Artificial Sequence: Synthetic oligonucleotide
  Target: LAMA2; (-) strand; PAM type: YTN; PAM sequence: TTG
caagtgatctaagttctcca

SEQ ID NO: 291116 - DNA, 20 bp, Artificial Sequence
  Description of Artificial Sequence: Synthetic oligonucleotide
  Target: LAMA2; (-) strand; PAM type: YTN; PAM sequence: TTG
agtccagatgttgcaagtga

SEQ ID NO: 291117 - DNA, 20 bp, Artificial Sequence
  Description of Artificial Sequence: Synthetic oligonucleotide
  Target: LAMA2; (-) strand; PAM type: YTN; PAM sequence: CTT
gagtccagatgttgcaagtg

SEQ ID NO: 291118 - DNA, 20 bp, Artificial Sequence
  Description of Artificial Sequence: Synthetic oligonucleotide
  Target: LAMA2; (-) strand; PAM type: YTN; PAM sequence: TTG
cccttgagtccagatgttgc

SEQ ID NO: 291119 - DNA, 20 bp, Artificial Sequence
  Description of Artificial Sequence: Synthetic oligonucleotide
  Target: LAMA2; (-) strand; PAM type: YTN; PAM sequence: CTT
gcccttgagtccagatgttg

SEQ ID NO: 291120 - DNA, 20 bp, Artificial Sequence
  Description of Artificial Sequence: Synthetic oligonucleotide
  Target: LAMA2; (-) strand; PAM type: YTN; PAM sequence: TTA
ggaaatgaagtccttgccct

SEQ ID NO: 291121 - DNA, 20 bp, Artificial Sequence
  Description of Artificial Sequence: Synthetic oligonucleotide
  Target: LAMA2; (-) strand; PAM type: YTN; PAM sequence: TTC
ataaaatggggcaagtgtgc

SEQ ID NO: 291122 - DNA, 20 bp, Artificial Sequence
  Description of Artificial Sequence: Synthetic oligonucleotide
  Target: LAMA2; (-) strand; PAM type: YTN; PAM sequence: CTT
cataaaatggggcaagtgtg

SEQ ID NO: 291123 - DNA, 20 bp, Artificial Sequence
  Description of Artificial Sequence: Synthetic oligonucleotide
  Target: LAMA2; (-) strand; PAM type: YTN; PAM sequence: CTA
cttcataaaatggggcaagt

SEQ ID NO: 291124 - DNA, 20 bp, Artificial Sequence
  Description of Artificial Sequence: Synthetic oligonucleotide
  Target: LAMA2; (-) strand; PAM type: YTN; PAM sequence: TTG
catactacttcataaaatgg

SEQ ID NO: 291125 - DNA, 20 bp, Artificial Sequence
  Description of Artificial Sequence: Synthetic oligonucleotide
  Target: LAMA2; (-) strand; PAM type: YTN; PAM sequence: TTT
gcatactacttcataaaatg

SEQ ID NO: 291126 - DNA, 20 bp, Artificial Sequence
  Description of Artificial Sequence: Synthetic oligonucleotide
  Target: LAMA2; (-) strand; PAM type: YTN; PAM sequence: TTT
tgcatactacttcataaaat

SEQ ID NO: 291127 - DNA, 20 bp, Artificial Sequence
  Description of Artificial Sequence: Synthetic oligonucleotide
  Target: LAMA2; (-) strand; PAM type: YTN; PAM sequence: CTT
ttgcatactacttcataaaa

SEQ ID NO: 291128 - DNA, 20 bp, Artificial Sequence
  Description of Artificial Sequence: Synthetic oligonucleotide
  Target: LAMA2; (-) strand; PAM type: YTN; PAM sequence: TTA
cttttgcatactacttcata

SEQ ID NO: 291129 - DNA, 20 bp, Artificial Sequence
  Description of Artificial Sequence: Synthetic oligonucleotide
  Target: LAMA2; (-) strand; PAM type: YTN; PAM sequence: TTT
acttttgcatactacttcat

SEQ ID NO: 291130 - DNA, 20 bp, Artificial Sequence
  Description of Artificial Sequence: Synthetic oligonucleotide
  Target: LAMA2; (-) strand; PAM type: YTN; PAM sequence: TTG
aatgtttacttttgcatact

SEQ ID NO: 291131 - DNA, 20 bp, Artificial Sequence
  Description of Artificial Sequence: Synthetic oligonucleotide
  Target: LAMA2; (-) strand; PAM type: YTN; PAM sequence: CTT
gaatgtttacttttgcatac

SEQ ID NO: 291132 - DNA, 20 bp, Artificial Sequence
  Description of Artificial Sequence: Synthetic oligonucleotide
  Target: LAMA2; (-) strand; PAM type: YTN; PAM sequence: CTA
cacttgaatgtttacttttg

SEQ ID NO: 291133 - DNA, 20 bp, Artificial Sequence
  Description of Artificial Sequence: Synthetic oligonucleotide
  Target: LAMA2; (-) strand; PAM type: YTN; PAM sequence: CTC
aaactacacttgaatgttta

SEQ ID NO: 291134 - DNA, 20 bp, Artificial Sequence
  Description of Artificial Sequence: Synthetic oligonucleotide
  Target: LAMA2; (-) strand; PAM type: YTN; PAM sequence: TTA
tactcaaactacacttgaat

SEQ ID NO: 291135 - DNA, 20 bp, Artificial Sequence
  Description of Artificial Sequence: Synthetic oligonucleotide
  Target: LAMA2; (-) strand; PAM type: YTN; PAM sequence: TTT
atactcaaactacacttgaa

SEQ ID NO: 291136 - DNA, 20 bp, Artificial Sequence
  Description of Artificial Sequence: Synthetic oligonucleotide
  Target: LAMA2; (-) strand; PAM type: YTN; PAM sequence: TTT
tatactcaaactacacttga

SEQ ID NO: 291137 - DNA, 20 bp, Artificial Sequence
  Description of Artificial Sequence: Synthetic oligonucleotide
  Target: LAMA2; (-) strand; PAM type: YTN; PAM sequence: CTT
ttatactcaaactacacttg

SEQ ID NO: 291138 - DNA, 20 bp, Artificial Sequence
  Description of Artificial Sequence: Synthetic oligonucleotide
  Target: LAMA2; (-) strand; PAM type: YTN; PAM sequence: TTG
aaaaatgacttttatactca

SEQ ID NO: 291139 - DNA, 20 bp, Artificial Sequence
  Description of Artificial Sequence: Synthetic oligonucleotide
  Target: LAMA2; (-) strand; PAM type: YTN; PAM sequence: TTC
aataaaattgaaaaatgact

SEQ ID NO: 291140 - DNA, 20 bp, Artificial Sequence
  Description of Artificial Sequence: Synthetic oligonucleotide
  Target: LAMA2; (-) strand; PAM type: YTN; PAM sequence: TTT
caataaaattgaaaaatgac

SEQ ID NO: 291141 - DNA, 20 bp, Artificial Sequence
  Description of Artificial Sequence: Synthetic oligonucleotide
  Target: LAMA2; (-) strand; PAM type: YTN; PAM sequence: TTT
tcaataaaattgaaaaatga

SEQ ID NO: 291142 - DNA, 20 bp, Artificial Sequence
  Description of Artificial Sequence: Synthetic oligonucleotide
  Target: LAMA2; (-) strand; PAM type: YTN; PAM sequence: TTT
ttcaataaaattgaaaaatg

SEQ ID NO: 291143 - DNA, 20 bp, Artificial Sequence
  Description of Artificial Sequence: Synthetic oligonucleotide
  Target: LAMA2; (-) strand; PAM type: YTN; PAM sequence: TTT
tttcaataaaattgaaaaat

SEQ ID NO: 291144 - DNA, 20 bp, Artificial Sequence
  Description of Artificial Sequence: Synthetic oligonucleotide
  Target: LAMA2; (-) strand; PAM type: YTN; PAM sequence: TTA
ttttttcaataaaattgaaa

SEQ ID NO: 291145 - DNA, 20 bp, Artificial Sequence
  Description of Artificial Sequence: Synthetic oligonucleotide
  Target: LAMA2; (-) strand; PAM type: YTN; PAM sequence: TTT
attttttcaataaaattgaa

SEQ ID NO: 291146 - DNA, 20 bp, Artificial Sequence
  Description of Artificial Sequence: Synthetic oligonucleotide
  Target: LAMA2; (-) strand; PAM type: YTN; PAM sequence: TTT
tattttttcaataaaattga

SEQ ID NO: 291147 - DNA, 20 bp, Artificial Sequence
  Description of Artificial Sequence: Synthetic oligonucleotide
  Target: LAMA2; (-) strand; PAM type: YTN; PAM sequence: TTA
gaacaataacaaaataaagc

SEQ ID NO: 291148 - DNA, 20 bp, Artificial Sequence
  Description of Artificial Sequence: Synthetic oligonucleotide
  Target: LAMA2; (-) strand; PAM type: YTN; PAM sequence: CTA
cattagaacaataacaaaat

SEQ ID NO: 291149 - DNA, 20 bp, Artificial Sequence
  Description of Artificial Sequence: Synthetic oligonucleotide
  Target: LAMA2; (-) strand; PAM type: YTN; PAM sequence: TTC
tacattagaacaataacaaa

SEQ ID NO: 291150 - DNA, 20 bp, Artificial Sequence
  Description of Artificial Sequence: Synthetic oligonucleotide
  Target: LAMA2; (-) strand; PAM type: YTN; PAM sequence: CTG
tattctacattagaacaata

SEQ ID NO: 291151 - DNA, 20 bp, Artificial Sequence
  Description of Artificial Sequence: Synthetic oligonucleotide
  Target: LAMA2; (-) strand; PAM type: YTN; PAM sequence: TTG
accccaaagtctgtattcta

SEQ ID NO: 291152 - DNA, 20 bp, Artificial Sequence
  Description of Artificial Sequence: Synthetic oligonucleotide
  Target: LAMA2; (-) strand; PAM type: YTN; PAM sequence: TTA
cagattgaccccaaagtctg

SEQ ID NO: 291153 - DNA, 20 bp, Artificial Sequence
  Description of Artificial Sequence: Synthetic oligonucleotide
  Target: LAMA2; (-) strand; PAM type: YTN; PAM sequence: TTT
acagattgaccccaaagtct

SEQ ID NO: 291154 - DNA, 20 bp, Artificial Sequence
  Description of Artificial Sequence: Synthetic oligonucleotide
  Target: LAMA2; (-) strand; PAM type: YTN; PAM sequence: TTA
gtttacagattgaccccaaa

SEQ ID NO: 291155 - DNA, 20 bp, Artificial Sequence
  Description of Artificial Sequence: Synthetic oligonucleotide
  Target: LAMA2; (-) strand; PAM type: YTN; PAM sequence: TTT
agtttacagattgaccccaa

SEQ ID NO: 291156 - DNA, 20 bp, Artificial Sequence
  Description of Artificial Sequence: Synthetic oligonucleotide
  Target: LAMA2; (-) strand; PAM type: YTN; PAM sequence: TTA
atttagtttacagattgacc

SEQ ID NO: 291157 - DNA, 20 bp, Artificial Sequence
  Description of Artificial Sequence: Synthetic oligonucleotide
  Target: LAMA2; (-) strand; PAM type: YTN; PAM sequence: TTA
acagattaatttagtttaca

SEQ ID NO: 291158 - DNA, 20 bp, Artificial Sequence
  Description of Artificial Sequence: Synthetic oligonucleotide
  Target: LAMA2; (-) strand; PAM type: YTN; PAM sequence: TTT
aacagattaatttagtttac

SEQ ID NO: 291159 - DNA, 20 bp, Artificial Sequence
  Description of Artificial Sequence: Synthetic oligonucleotide
  Target: LAMA2; (-) strand; PAM type: YTN; PAM sequence: TTT
taacagattaatttagttta

SEQ ID NO: 291160 - DNA, 20 bp, Artificial Sequence
  Description of Artificial Sequence: Synthetic oligonucleotide
  Target: LAMA2; (-) strand; PAM type: YTN; PAM sequence: TTT
ttaacagattaatttagttt

SEQ ID NO: 291161 - DNA, 20 bp, Artificial Sequence
  Description of Artificial Sequence: Synthetic oligonucleotide
  Target: LAMA2; (-) strand; PAM type: YTN; PAM sequence: TTT
tttaacagattaatttagtt

SEQ ID NO: 291162 - DNA, 20 bp, Artificial Sequence
  Description of Artificial Sequence: Synthetic oligonucleotide
  Target: LAMA2; (-) strand; PAM type: YTN; PAM sequence: TTT
ttttaacagattaatttagt

SEQ ID NO: 291163 - DNA, 20 bp, Artificial Sequence
  Description of Artificial Sequence: Synthetic oligonucleotide
  Target: LAMA2; (-) strand; PAM type: YTN; PAM sequence: TTT
tttttaacagattaatttag

SEQ ID NO: 291164 - DNA, 20 bp, Artificial Sequence
  Description of Artificial Sequence: Synthetic oligonucleotide
  Target: LAMA2; (-) strand; PAM type: YTN; PAM sequence: TTT
ttttttaacagattaattta

SEQ ID NO: 291165 - DNA, 20 bp, Artificial Sequence
  Description of Artificial Sequence: Synthetic oligonucleotide
  Target: LAMA2; (-) strand; PAM type: YTN; PAM sequence: CTC
aaaataaaaaaatgtttttt

SEQ ID NO: 291166 - DNA, 20 bp, Artificial Sequence
  Description of Artificial Sequence: Synthetic oligonucleotide
  Target: LAMA2; (-) strand; PAM type: YTN; PAM sequence: CTG
tctcaaaataaaaaaatgtt

SEQ ID NO: 291167 - DNA, 20 bp, Artificial Sequence
  Description of Artificial Sequence: Synthetic oligonucleotide
  Target: LAMA2; (-) strand; PAM type: YTN; PAM sequence: CTA
cagagtgagatccctgtctc

SEQ ID NO: 291168 - DNA, 20 bp, Artificial Sequence
  Description of Artificial Sequence: Synthetic oligonucleotide
  Target: LAMA2; (-) strand; PAM type: YTN; PAM sequence: CTG
ggctacagagtgagatccct

SEQ ID NO: 291169 - DNA, 20 bp, Artificial Sequence
  Description of Artificial Sequence: Synthetic oligonucleotide
  Target: LAMA2; (-) strand; PAM type: YTN; PAM sequence: CTC
cagcctgggctacagagtga

SEQ ID NO: 291170 - DNA, 20 bp, Artificial Sequence
  Description of Artificial Sequence: Synthetic oligonucleotide
  Target: LAMA2; (-) strand; PAM type: YTN; PAM sequence: CTG
cactccagcctgggctacag

SEQ ID NO: 291171 - DNA, 20 bp, Artificial Sequence
  Description of Artificial Sequence: Synthetic oligonucleotide
  Target: LAMA2; (-) strand; PAM type: YTN; PAM sequence: TTG
tgccactgcactccagcctg

SEQ ID NO: 291172 - DNA, 20 bp, Artificial Sequence
  Description of Artificial Sequence: Synthetic oligonucleotide
  Target: LAMA2; (-) strand; PAM type: YTN; PAM sequence: TTA
tggttgtgccactgcactcc

SEQ ID NO: 291173 - DNA, 20 bp, Artificial Sequence
  Description of Artificial Sequence: Synthetic oligonucleotide
  Target: LAMA2; (-) strand; PAM type: YTN; PAM sequence: CTG
cagtgaattatggttgtgcc

SEQ ID NO: 291174 - DNA, 20 bp, Artificial Sequence
  Description of Artificial Sequence: Synthetic oligonucleotide
  Target: LAMA2; (-) strand; PAM type: YTN; PAM sequence: TTG
agcccaggaggccaaggctg

SEQ ID NO: 291175 - DNA, 20 bp, Artificial Sequence
  Description of Artificial Sequence: Synthetic oligonucleotide
  Target: LAMA2; (-) strand; PAM type: YTN; PAM sequence: TTT
gagcccaggaggccaaggct

SEQ ID NO: 291176 - DNA, 20 bp, Artificial Sequence
  Description of Artificial Sequence: Synthetic oligonucleotide
  Target: LAMA2; (-) strand; PAM type: YTN; PAM sequence: TTT
tgagcccaggaggccaaggc

SEQ ID NO: 291177 - DNA, 20 bp, Artificial Sequence
  Description of Artificial Sequence: Synthetic oligonucleotide
  Target: LAMA2; (-) strand; PAM type: YTN; PAM sequence: CTT
ttgagcccaggaggccaagg

SEQ ID NO: 291178 - DNA, 20 bp, Artificial Sequence
  Description of Artificial Sequence: Synthetic oligonucleotide
  Target: LAMA2; (-) strand; PAM type: YTN; PAM sequence: CTG
aggagagaggatcttttgag

SEQ ID NO: 291179 - DNA, 20 bp, Artificial Sequence
  Description of Artificial Sequence: Synthetic oligonucleotide
  Target: LAMA2; (-) strand; PAM type: YTN; PAM sequence: TTG
gagatgctgaggagagagga

SEQ ID NO: 291180 - DNA, 20 bp, Artificial Sequence
  Description of Artificial Sequence: Synthetic oligonucleotide
  Target: LAMA2; (-) strand; PAM type: YTN; PAM sequence: CTT
ggagatgctgaggagagagg

SEQ ID NO: 291181 - DNA, 20 bp, Artificial Sequence
  Description of Artificial Sequence: Synthetic oligonucleotide
  Target: LAMA2; (-) strand; PAM type: YTN; PAM sequence: TTA
cttggagatgctgaggagag

SEQ ID NO: 291182 - DNA, 20 bp, Artificial Sequence
  Description of Artificial Sequence: Synthetic oligonucleotide
  Target: LAMA2; (-) strand; PAM type: YTN; PAM sequence: CTG
gagtcccagttacttggaga

SEQ ID NO: 291183 - DNA, 20 bp, Artificial Sequence
  Description of Artificial Sequence: Synthetic oligonucleotide
  Target: LAMA2; (-) strand; PAM type: YTN; PAM sequence: TTG
gtgtgtgcctggagtcccag

SEQ ID NO: 291184 - DNA, 20 bp, Artificial Sequence
  Description of Artificial Sequence: Synthetic oligonucleotide
  Target: LAMA2; (-) strand; PAM type: YTN; PAM sequence: CTG
ggcatgttggtgtgtgcctg

SEQ ID NO: 291185 - DNA, 20 bp, Artificial Sequence
  Description of Artificial Sequence: Synthetic oligonucleotide
  Target: LAMA2; (-) strand; PAM type: YTN; PAM sequence: CTC
caaaaaaagtagctgggcat

SEQ ID NO: 291186 - DNA, 20 bp, Artificial Sequence
  Description of Artificial Sequence: Synthetic oligonucleotide
  Target: LAMA2; (-) strand; PAM type: YTN; PAM sequence: CTC
ccctccaaaaaaagtagctg

SEQ ID NO: 291187 - DNA, 20 bp, Artificial Sequence
  Description of Artificial Sequence: Synthetic oligonucleotide
  Target: LAMA2; (-) strand; PAM type: YTN; PAM sequence: TTG
ccctcccctccaaaaaaagt

SEQ ID NO: 291188 - DNA, 20 bp, Artificial Sequence
  Description of Artificial Sequence: Synthetic oligonucleotide
  Target: LAMA2; (-) strand; PAM type: YTN; PAM sequence: TTT
gccctcccctccaaaaaaag

SEQ ID NO: 291189 - DNA, 20 bp, Artificial Sequence
  Description of Artificial Sequence: Synthetic oligonucleotide
  Target: LAMA2; (-) strand; PAM type: YTN; PAM sequence: CTT
tgccctcccctccaaaaaaa

SEQ ID NO: 291190 - DNA, 20 bp, Artificial Sequence
  Description of Artificial Sequence: Synthetic oligonucleotide
  Target: LAMA2; (-) strand; PAM type: YTN; PAM sequence: CTG
tctttgccctcccctccaaa

SEQ ID NO: 291191 - DNA, 20 bp, Artificial Sequence
  Description of Artificial Sequence: Synthetic oligonucleotide
  Target: LAMA2; (-) strand; PAM type: YTN; PAM sequence: CTG
aggcaacagagtgagaccct

SEQ ID NO: 291192 - DNA, 20 bp, Artificial Sequence
  Description of Artificial Sequence: Synthetic oligonucleotide
  Target: LAMA2; (-) strand; PAM type: YTN; PAM sequence: TTC
aagacaagaccagcctgagg

SEQ ID NO: 291193 - DNA, 20 bp, Artificial Sequence
  Description of Artificial Sequence: Synthetic oligonucleotide
  Target: LAMA2; (-) strand; PAM type: YTN; PAM sequence: TTG
aggccacgagttcaagacaa

SEQ ID NO: 291194 - DNA, 20 bp, Artificial Sequence
  Description of Artificial Sequence: Synthetic oligonucleotide
  Target: LAMA2; (-) strand; PAM type: YTN; PAM sequence: CTT
gaggccacgagttcaagaca

SEQ ID NO: 291195 - DNA, 20 bp, Artificial Sequence
  Description of Artificial Sequence: Synthetic oligonucleotide
  Target: LAMA2; (-) strand; PAM type: YTN; PAM sequence: TTG
ggaggccgaagagggaggat

SEQ ID NO: 291196 - DNA, 20 bp, Artificial Sequence
  Description of Artificial Sequence: Synthetic oligonucleotide
  Target: LAMA2; (-) strand; PAM type: YTN; PAM sequence: TTT
gggaggccgaagagggagga

SEQ ID NO: 291197 - DNA, 20 bp, Artificial Sequence
  Description of Artificial Sequence: Synthetic oligonucleotide
  Target: LAMA2; (-) strand; PAM type: YTN; PAM sequence: TTT
tgggaggccgaagagggagg

SEQ ID NO: 291198 - DNA, 20 bp, Artificial Sequence
  Description of Artificial Sequence: Synthetic oligonucleotide
  Target: LAMA2; (-) strand; PAM type: YTN; PAM sequence: CTG
cattttgggaggccgaagag

SEQ ID NO: 291199 - DNA, 20 bp, Artificial Sequence
  Description of Artificial Sequence: Synthetic oligonucleotide
  Target: LAMA2; (-) strand; PAM type: YTN; PAM sequence: CTG
taatccctgcattttgggag

SEQ ID NO: 291200 - DNA, 20 bp, Artificial Sequence
  Description of Artificial Sequence: Synthetic oligonucleotide
  Target: LAMA2; (-) strand; PAM type: YTN; PAM sequence: TTC
ctgtaatccctgcattttgg

SEQ ID NO: 291201 - DNA, 20 bp, Artificial Sequence
  Description of Artificial Sequence: Synthetic oligonucleotide
  Target: LAMA2; (-) strand; PAM type: YTN; PAM sequence: CTC
attcctgtaatccctgcatt

SEQ ID NO: 291202 - DNA, 20 bp, Artificial Sequence
  Description of Artificial Sequence: Synthetic oligonucleotide
  Target: LAMA2; (-) strand; PAM type: YTN; PAM sequence: CTG
gccgagtgtagtggctcatt

SEQ ID NO: 291203 - DNA, 20 bp, Artificial Sequence
  Description of Artificial Sequence: Synthetic oligonucleotide
  Target: LAMA2; (-) strand; PAM type: YTN; PAM sequence: TTA
ctggccgagtgtagtggctc

SEQ ID NO: 291204 - DNA, 20 bp, Artificial Sequence
  Description of Artificial Sequence: Synthetic oligonucleotide
  Target: LAMA2; (-) strand; PAM type: YTN; PAM sequence: TTT
actggccgagtgtagtggct

SEQ ID NO: 291205 - DNA, 20 bp, Artificial Sequence
  Description of Artificial Sequence: Synthetic oligonucleotide
  Target: LAMA2; (-) strand; PAM type: YTN; PAM sequence: TTA
ggtttactggccgagtgtag

SEQ ID NO: 291206 - DNA, 20 bp, Artificial Sequence
  Description of Artificial Sequence: Synthetic oligonucleotide
  Target: LAMA2; (-) strand; PAM type: YTN; PAM sequence: TTA
aaaattaggtttactggccg

SEQ ID NO: 291207 - DNA, 20 bp, Artificial Sequence
  Description of Artificial Sequence: Synthetic oligonucleotide
  Target: LAMA2; (-) strand; PAM type: YTN; PAM sequence: TTT
aaaaattaggtttactggcc

SEQ ID NO: 291208 - DNA, 20 bp, Artificial Sequence
  Description of Artificial Sequence: Synthetic oligonucleotide
  Target: LAMA2; (-) strand; PAM type: YTN; PAM sequence: CTA
aaaaacagatgtttaaaaat

SEQ ID NO: 291209 - DNA, 20 bp, Artificial Sequence
  Description of Artificial Sequence: Synthetic oligonucleotide
  Target: LAMA2; (-) strand; PAM type: YTN; PAM sequence: TTA
tatagtctaaaaaacagatg

SEQ ID NO: 291210 - DNA, 20 bp, Artificial Sequence
  Description of Artificial Sequence: Synthetic oligonucleotide
  Target: LAMA2; (-) strand; PAM type: YTN; PAM sequence: TTG
gattatatagtctaaaaaac

SEQ ID NO: 291211 - DNA, 20 bp, Artificial Sequence
  Description of Artificial Sequence: Synthetic oligonucleotide
  Target: LAMA2; (-) strand; PAM type: YTN; PAM sequence: TTT
ggattatatagtctaaaaaa

SEQ ID NO: 291212 - DNA, 20 bp, Artificial Sequence
  Description of Artificial Sequence: Synthetic oligonucleotide
  Target: LAMA2; (-) strand; PAM type: YTN; PAM sequence: TTT
tggattatatagtctaaaaa

SEQ ID NO: 291213 - DNA, 20 bp, Artificial Sequence
  Description of Artificial Sequence: Synthetic oligonucleotide
  Target: LAMA2; (-) strand; PAM type: YTN; PAM sequence: CTT
ttggattatatagtctaaaa

SEQ ID NO: 291214 - DNA, 20 bp, Artificial Sequence
  Description of Artificial Sequence: Synthetic oligonucleotide
  Target: LAMA2; (-) strand; PAM type: YTN; PAM sequence: TTC
ttttggattatatagtctaa

SEQ ID NO: 291215 - DNA, 20 bp, Artificial Sequence
  Description of Artificial Sequence: Synthetic oligonucleotide
  Target: LAMA2; (-) strand; PAM type: YTN; PAM sequence: TTA
agtaaaacaaagtccaagaa

SEQ ID NO: 291216 - DNA, 20 bp, Artificial Sequence
  Description of Artificial Sequence: Synthetic oligonucleotide
  Target: LAMA2; (-) strand; PAM type: YTN; PAM sequence: TTT
aagtaaaacaaagtccaaga

SEQ ID NO: 291217 - DNA, 20 bp, Artificial Sequence
  Description of Artificial Sequence: Synthetic oligonucleotide
  Target: LAMA2; (-) strand; PAM type: YTN; PAM sequence: TTT
taagtaaaacaaagtccaag

SEQ ID NO: 291218 - DNA, 20 bp, Artificial Sequence
  Description of Artificial Sequence: Synthetic oligonucleotide
  Target: LAMA2; (-) strand; PAM type: YTN; PAM sequence: CTT
ttaagtaaaacaaagtccaa

SEQ ID NO: 291219 - DNA, 20 bp, Artificial Sequence
  Description of Artificial Sequence: Synthetic oligonucleotide
  Target: LAMA2; (-) strand; PAM type: YTN; PAM sequence: TTA
aggcttttaagtaaaacaaa

SEQ ID NO: 291220 - DNA, 20 bp, Artificial Sequence
  Description of Artificial Sequence: Synthetic oligonucleotide
  Target: LAMA2; (-) strand; PAM type: YTN; PAM sequence: TTT
aaggcttttaagtaaaacaa

SEQ ID NO: 291221 - DNA, 20 bp, Artificial Sequence
  Description of Artificial Sequence: Synthetic oligonucleotide
  Target: LAMA2; (-) strand; PAM type: YTN; PAM sequence: CTT
taaggcttttaagtaaaaca

SEQ ID NO: 291222 - DNA, 20 bp, Artificial Sequence
  Description of Artificial Sequence: Synthetic oligonucleotide
  Target: LAMA2; (-) strand; PAM type: YTN; PAM sequence: CTC
tttaaggcttttaagtaaaa

SEQ ID NO: 291223 - DNA, 20 bp, Artificial Sequence
  Description of Artificial Sequence: Synthetic oligonucleotide
  Target: LAMA2; (-) strand; PAM type: YTN; PAM sequence: TTA
catatctctttaaggctttt

SEQ ID NO: 291224 - DNA, 20 bp, Artificial Sequence
  Description of Artificial Sequence: Synthetic oligonucleotide
  Target: LAMA2; (-) strand; PAM type: YTN; PAM sequence: CTA
aaaaataagataatattaca

SEQ ID NO: 291225 - DNA, 20 bp, Artificial Sequence
  Description of Artificial Sequence: Synthetic oligonucleotide
  Target: LAMA2; (-) strand; PAM type: YTN; PAM sequence: TTG
ggagatagctaaaaaataag

SEQ ID NO: 291226 - DNA, 20 bp, Artificial Sequence
  Description of Artificial Sequence: Synthetic oligonucleotide
  Target: LAMA2; (-) strand; PAM type: YTN; PAM sequence: CTT
gggagatagctaaaaaataa

SEQ ID NO: 291227 - DNA, 20 bp, Artificial Sequence
  Description of Artificial Sequence: Synthetic oligonucleotide
  Target: LAMA2; (-) strand; PAM type: YTN; PAM sequence: TTC
ttgggagatagctaaaaaat

SEQ ID NO: 291228 - DNA, 20 bp, Artificial Sequence
  Description of Artificial Sequence: Synthetic oligonucleotide
  Target: LAMA2; (-) strand; PAM type: YTN; PAM sequence: TTT
cttgggagatagctaaaaaa

SEQ ID NO: 291229 - DNA, 20 bp, Artificial Sequence
  Description of Artificial Sequence: Synthetic oligonucleotide
  Target: LAMA2; (-) strand; PAM type: YTN; PAM sequence: TTT
tcttgggagatagctaaaaa

SEQ ID NO: 291230 - DNA, 20 bp, Artificial Sequence
  Description of Artificial Sequence: Synthetic oligonucleotide
  Target: LAMA2; (-) strand; PAM type: YTN; PAM sequence: TTT
ttcttgggagatagctaaaa

SEQ ID NO: 291231 - DNA, 20 bp, Artificial Sequence
  Description of Artificial Sequence: Synthetic oligonucleotide
  Target: LAMA2; (-) strand; PAM type: YTN; PAM sequence: CTT
tttcttgggagatagctaaa

SEQ ID NO: 291232 - DNA, 20 bp, Artificial Sequence
  Description of Artificial Sequence: Synthetic oligonucleotide
  Target: LAMA2; (-) strand; PAM type: YTN; PAM sequence: TTG
aggctttttcttgggagata

SEQ ID NO: 291233 - DNA, 20 bp, Artificial Sequence
  Description of Artificial Sequence: Synthetic oligonucleotide
  Target: LAMA2; (-) strand; PAM type: YTN; PAM sequence: TTT
gaggctttttcttgggagat

SEQ ID NO: 291234 - DNA, 20 bp, Artificial Sequence
  Description of Artificial Sequence: Synthetic oligonucleotide
  Target: LAMA2; (-) strand; PAM type: YTN; PAM sequence: TTA
tttgaggctttttcttggga

SEQ ID NO: 291235 - DNA, 20 bp, Artificial Sequence
  Description of Artificial Sequence: Synthetic oligonucleotide
  Target: LAMA2; (-) strand; PAM type: YTN; PAM sequence: TTT
atttgaggctttttcttggg

SEQ ID NO: 291236 - DNA, 20 bp, Artificial Sequence
  Description of Artificial Sequence: Synthetic oligonucleotide
  Target: LAMA2; (-) strand; PAM type: YTN; PAM sequence: TTT
tatttgaggctttttcttgg

SEQ ID NO: 291237 - DNA, 20 bp, Artificial Sequence
  Description of Artificial Sequence: Synthetic oligonucleotide
  Target: LAMA2; (-) strand; PAM type: YTN; PAM sequence: TTT
ttatttgaggctttttcttg

SEQ ID NO: 291238 - DNA, 20 bp, Artificial Sequence
  Description of Artificial Sequence: Synthetic oligonucleotide
  Target: LAMA2; (-) strand; PAM type: YTN; PAM sequence: TTT
tttatttgaggctttttctt

SEQ ID NO: 291239 - DNA, 20 bp, Artificial Sequence
  Description of Artificial Sequence: Synthetic oligonucleotide
  Target: LAMA2; (-) strand; PAM type: YTN; PAM sequence: TTT
ttttatttgaggctttttct

SEQ ID NO: 291240 - DNA, 20 bp, Artificial Sequence
  Description of Artificial Sequence: Synthetic oligonucleotide
  Target: LAMA2; (-) strand; PAM type: YTN; PAM sequence: TTT
tttttatttgaggctttttc

SEQ ID NO: 291241 - DNA, 20 bp, Artificial Sequence
  Description of Artificial Sequence: Synthetic oligonucleotide
  Target: LAMA2; (-) strand; PAM type: YTN; PAM sequence: TTT
ttttttatttgaggcttttt

SEQ ID NO: 291242 - DNA, 20 bp, Artificial Sequence
  Description of Artificial Sequence: Synthetic oligonucleotide
  Target: LAMA2; (-) strand; PAM type: YTN; PAM sequence: TTG
aaaaagatttttttttattt

SEQ ID NO: 291243 - DNA, 20 bp, Artificial Sequence
  Description of Artificial Sequence: Synthetic oligonucleotide
  Target: LAMA2; (-) strand; PAM type: YTN; PAM sequence: TTT
gaaaaagatttttttttatt

SEQ ID NO: 291244 - DNA, 20 bp, Artificial Sequence
  Description of Artificial Sequence: Synthetic oligonucleotide
  Target: LAMA2; (-) strand; PAM type: YTN; PAM sequence: TTT
tgaaaaagatttttttttat

SEQ ID NO: 291245 - DNA, 20 bp, Artificial Sequence
  Description of Artificial Sequence: Synthetic oligonucleotide
  Target: LAMA2; (-) strand; PAM type: YTN; PAM sequence: TTA
ttttgaaaaagatttttttt

SEQ ID NO: 291246 - DNA, 20 bp, Artificial Sequence
  Description of Artificial Sequence: Synthetic oligonucleotide
  Target: LAMA2; (-) strand; PAM type: YTN; PAM sequence: TTT
attttgaaaaagattttttt

SEQ ID NO: 291247 - DNA, 20 bp, Artificial Sequence
  Description of Artificial Sequence: Synthetic oligonucleotide
  Target: LAMA2; (-) strand; PAM type: YTN; PAM sequence: TTA
tttattttgaaaaagatttt

SEQ ID NO: 291248 - DNA, 20 bp, Artificial Sequence
  Description of Artificial Sequence: Synthetic oligonucleotide
  Target: LAMA2; (-) strand; PAM type: YTN; PAM sequence: TTT
atttattttgaaaaagattt

SEQ ID NO: 291249 - DNA, 20 bp, Artificial Sequence
  Description of Artificial Sequence: Synthetic oligonucleotide
  Target: LAMA2; (-) strand; PAM type: YTN; PAM sequence: CTG
aaaacgtttatttattttga

SEQ ID NO: 291250 - DNA, 20 bp, Artificial Sequence
  Description of Artificial Sequence: Synthetic oligonucleotide
  Target: LAMA2; (-) strand; PAM type: YTN; PAM sequence: TTA
gaaaaaaaaatctgaaaacg

SEQ ID NO: 291251 - DNA, 20 bp, Artificial Sequence
  Description of Artificial Sequence: Synthetic oligonucleotide
  Target: LAMA2; (-) strand; PAM type: YTN; PAM sequence: CTC
aaaagttagaaaaaaaaatc

SEQ ID NO: 291252 - DNA, 20 bp, Artificial Sequence
  Description of Artificial Sequence: Synthetic oligonucleotide
  Target: LAMA2; (-) strand; PAM type: YTN; PAM sequence: TTG
ctcaaaagttagaaaaaaaa

SEQ ID NO: 291253 - DNA, 20 bp, Artificial Sequence
  Description of Artificial Sequence: Synthetic oligonucleotide
  Target: LAMA2; (-) strand; PAM type: YTN; PAM sequence: CTT
gctcaaaagttagaaaaaaa

SEQ ID NO: 291254 - DNA, 20 bp, Artificial Sequence
  Description of Artificial Sequence: Synthetic oligonucleotide
  Target: LAMA2; (-) strand; PAM type: YTN; PAM sequence: TTA
aaaaccttgctcaaaagtta

SEQ ID NO: 291255 - DNA, 20 bp, Artificial Sequence
  Description of Artificial Sequence: Synthetic oligonucleotide
  Target: LAMA2; (-) strand; PAM type: YTN; PAM sequence: TTT
aaaaaccttgctcaaaagtt

SEQ ID NO: 291256 - DNA, 20 bp, Artificial Sequence
  Description of Artificial Sequence: Synthetic oligonucleotide
  Target: LAMA2; (-) strand; PAM type: YTN; PAM sequence: TTT
taaaaaccttgctcaaaagt

SEQ ID NO: 291257 - DNA, 20 bp, Artificial Sequence
  Description of Artificial Sequence: Synthetic oligonucleotide
  Target: LAMA2; (-) strand; PAM type: YTN; PAM sequence: TTT
ttaaaaaccttgctcaaaag

SEQ ID NO: 291258 - DNA, 20 bp, Artificial Sequence
  Description of Artificial Sequence: Synthetic oligonucleotide
  Target: LAMA2; (-) strand; PAM type: YTN; PAM sequence: CTA
tataccaaaaagtttttaaa

SEQ ID NO: 291259 - DNA, 20 bp, Artificial Sequence
  Description of Artificial Sequence: Synthetic oligonucleotide
  Target: LAMA2; (-) strand; PAM type: YTN; PAM sequence: TTG
cataggcagcataaacaaac

SEQ ID NO: 291260 - DNA, 20 bp, Artificial Sequence
  Description of Artificial Sequence: Synthetic oligonucleotide
  Target: LAMA2; (-) strand; PAM type: YTN; PAM sequence: TTC
accaaagagaagataattgc

SEQ ID NO: 291261 - DNA, 20 bp, Artificial Sequence
  Description of Artificial Sequence: Synthetic oligonucleotide
  Target: LAMA2; (-) strand; PAM type: YTN; PAM sequence: TTT
caccaaagagaagataattg

SEQ ID NO: 291262 - DNA, 20 bp, Artificial Sequence
  Description of Artificial Sequence: Synthetic oligonucleotide
  Target: LAMA2; (-) strand; PAM type: YTN; PAM sequence: TTT
tcaccaaagagaagataatt

SEQ ID NO: 291263 - DNA, 20 bp, Artificial Sequence
  Description of Artificial Sequence: Synthetic oligonucleotide
  Target: LAMA2; (-) strand; PAM type: YTN; PAM sequence: TTT
ttcaccaaagagaagataat

SEQ ID NO: 291264 - DNA, 20 bp, Artificial Sequence
  Description of Artificial Sequence: Synthetic oligonucleotide
  Target: LAMA2; (-) strand; PAM type: YTN; PAM sequence: TTT
tttcaccaaagagaagataa

SEQ ID NO: 291265 - DNA, 20 bp, Artificial Sequence
  Description of Artificial Sequence: Synthetic oligonucleotide
  Target: LAMA2; (-) strand; PAM type: YTN; PAM sequence: TTT
ttttcaccaaagagaagata

SEQ ID NO: 291266 - DNA, 20 bp, Artificial Sequence
  Description of Artificial Sequence: Synthetic oligonucleotide
  Target: LAMA2; (-) strand; PAM type: YTN; PAM sequence: TTA
tttttttcaccaaagagaag

SEQ ID NO: 291267 - DNA, 20 bp, Artificial Sequence
  Description of Artificial Sequence: Synthetic oligonucleotide
  Target: LAMA2; (-) strand; PAM type: YTN; PAM sequence: TTT
atttttttcaccaaagagaa

SEQ ID NO: 291268 - DNA, 20 bp, Artificial Sequence
  Description of Artificial Sequence: Synthetic oligonucleotide
  Target: LAMA2; (-) strand; PAM type: YTN; PAM sequence: TTT
tatttttttcaccaaagaga

SEQ ID NO: 291269 - DNA, 20 bp, Artificial Sequence
  Description of Artificial Sequence: Synthetic oligonucleotide
  Target: LAMA2; (-) strand; PAM type: YTN; PAM sequence: TTA
tatgtgtaatgaaataagtt

SEQ ID NO: 291270 - DNA, 20 bp, Artificial Sequence
  Description of Artificial Sequence: Synthetic oligonucleotide
  Target: LAMA2; (-) strand; PAM type: YTN; PAM sequence: TTT
atatgtgtaatgaaataagt

SEQ ID NO: 291271 - DNA, 20 bp, Artificial Sequence
  Description of Artificial Sequence: Synthetic oligonucleotide
  Target: LAMA2; (-) strand; PAM type: YTN; PAM sequence: CTT
tatatgtgtaatgaaataag

SEQ ID NO: 291272 - DNA, 20 bp, Artificial Sequence
  Description of Artificial Sequence: Synthetic oligonucleotide
  Target: LAMA2; (-) strand; PAM type: YTN; PAM sequence: TTG
atgctttatatgtgtaatga

SEQ ID NO: 291273 - DNA, 20 bp, Artificial Sequence
  Description of Artificial Sequence: Synthetic oligonucleotide
  Target: LAMA2; (-) strand; PAM type: YTN; PAM sequence: TTA
ttgatgctttatatgtgtaa

SEQ ID NO: 291274 - DNA, 20 bp, Artificial Sequence
  Description of Artificial Sequence: Synthetic oligonucleotide
  Target: LAMA2; (-) strand; PAM type: YTN; PAM sequence: CTT
attgatgctttatatgtgta

SEQ ID NO: 291275 - DNA, 20 bp, Artificial Sequence
  Description of Artificial Sequence: Synthetic oligonucleotide
  Target: LAMA2; (-) strand; PAM type: YTN; PAM sequence: TTC
ttattgatgctttatatgtg

SEQ ID NO: 291276 - DNA, 20 bp, Artificial Sequence
  Description of Artificial Sequence: Synthetic oligonucleotide
  Target: LAMA2; (-) strand; PAM type: YTN; PAM sequence: CTT
cttattgatgctttatatgt

SEQ ID NO: 291277 - DNA, 20 bp, Artificial Sequence
  Description of Artificial Sequence: Synthetic oligonucleotide
  Target: LAMA2; (-) strand; PAM type: YTN; PAM sequence: CTG
acttcttattgatgctttat

SEQ ID NO: 291278 - DNA, 20 bp, Artificial Sequence
  Description of Artificial Sequence: Synthetic oligonucleotide
  Target: LAMA2; (-) strand; PAM type: YTN; PAM sequence: TTA
actgacttcttattgatgct

SEQ ID NO: 291279 - DNA, 20 bp, Artificial Sequence
  Description of Artificial Sequence: Synthetic oligonucleotide
  Target: LAMA2; (-) strand; PAM type: YTN; PAM sequence: TTA
aacatgaggtacaggaatta

SEQ ID NO: 291280 - DNA, 20 bp, Artificial Sequence
  Description of Artificial Sequence: Synthetic oligonucleotide
  Target: LAMA2; (-) strand; PAM type: YTN; PAM sequence: TTT
aaacatgaggtacaggaatt

SEQ ID NO: 291281 - DNA, 20 bp, Artificial Sequence
  Description of Artificial Sequence: Synthetic oligonucleotide
  Target: LAMA2; (-) strand; PAM type: YTN; PAM sequence: CTC
acccacagcatttaaacatg

SEQ ID NO: 291282 - DNA, 20 bp, Artificial Sequence
  Description of Artificial Sequence: Synthetic oligonucleotide
  Target: LAMA2; (-) strand; PAM type: YTN; PAM sequence: TTA
gcaataatctcacccacagc

SEQ ID NO: 291283 - DNA, 20 bp, Artificial Sequence
  Description of Artificial Sequence: Synthetic oligonucleotide
  Target: LAMA2; (-) strand; PAM type: YTN; PAM sequence: TTT
agcaataatctcacccacag

SEQ ID NO: 291284 - DNA, 20 bp, Artificial Sequence
  Description of Artificial Sequence: Synthetic oligonucleotide
  Target: LAMA2; (-) strand; PAM type: YTN; PAM sequence: CTT
tagcaataatctcacccaca

SEQ ID NO: 291285 - DNA, 20 bp, Artificial Sequence
  Description of Artificial Sequence: Synthetic oligonucleotide
  Target: LAMA2; (-) strand; PAM type: YTN; PAM sequence: CTC
ccctttagcaataatctcac

SEQ ID NO: 291286 - DNA, 20 bp, Artificial Sequence
  Description of Artificial Sequence: Synthetic oligonucleotide
  Target: LAMA2; (-) strand; PAM type: YTN; PAM sequence: TTC
tcccctttagcaataatctc

SEQ ID NO: 291287 - DNA, 20 bp, Artificial Sequence
  Description of Artificial Sequence: Synthetic oligonucleotide
  Target: LAMA2; (-) strand; PAM type: YTN; PAM sequence: CTT
ctcccctttagcaataatct

SEQ ID NO: 291288 - DNA, 20 bp, Artificial Sequence
  Description of Artificial Sequence: Synthetic oligonucleotide
  Target: LAMA2; (-) strand; PAM type: YTN; PAM sequence: TTG
tagtccttctcccctttagc

SEQ ID NO: 291289 - DNA, 20 bp, Artificial Sequence
  Description of Artificial Sequence: Synthetic oligonucleotide
  Target: LAMA2; (-) strand; PAM type: YTN; PAM sequence: TTT
gtagtccttctcccctttag

SEQ ID NO: 291290 - DNA, 20 bp, Artificial Sequence
  Description of Artificial Sequence: Synthetic oligonucleotide
  Target: LAMA2; (-) strand; PAM type: YTN; PAM sequence: TTT
tgtagtccttctccccttta

SEQ ID NO: 291291 - DNA, 20 bp, Artificial Sequence
  Description of Artificial Sequence: Synthetic oligonucleotide
  Target: LAMA2; (-) strand; PAM type: YTN; PAM sequence: TTT
ttgtagtccttctccccttt

SEQ ID NO: 291292 - DNA, 20 bp, Artificial Sequence
  Description of Artificial Sequence: Synthetic oligonucleotide
  Target: LAMA2; (-) strand; PAM type: YTN; PAM sequence: CTT
tttgtagtccttctcccctt

SEQ ID NO: 291293 - DNA, 20 bp, Artificial Sequence
  Description of Artificial Sequence: Synthetic oligonucleotide
  Target: LAMA2; (-) strand; PAM type: YTN; PAM sequence: CTG
cagaaggagtctttttgtag

SEQ ID NO: 291294 - DNA, 20 bp, Artificial Sequence
  Description of Artificial Sequence: Synthetic oligonucleotide
  Target: LAMA2; (-) strand; PAM type: YTN; PAM sequence: TTA
tcctgcagaaggagtctttt

SEQ ID NO: 291295 - DNA, 20 bp, Artificial Sequence
  Description of Artificial Sequence: Synthetic oligonucleotide
  Target: LAMA2; (-) strand; PAM type: YTN; PAM sequence: TTC
atgttatcctgcagaaggag

SEQ ID NO: 291296 - DNA, 20 bp, Artificial Sequence
  Description of Artificial Sequence: Synthetic oligonucleotide
  Target: LAMA2; (-) strand; PAM type: YTN; PAM sequence: CTA
aatggatgttcatgttatcc

SEQ ID NO: 291297 - DNA, 20 bp, Artificial Sequence
  Description of Artificial Sequence: Synthetic oligonucleotide
  Target: LAMA2; (-) strand; PAM type: YTN; PAM sequence: TTG
gtctaaatggatgttcatgt

SEQ ID NO: 291298 - DNA, 20 bp, Artificial Sequence
  Description of Artificial Sequence: Synthetic oligonucleotide
  Target: LAMA2; (-) strand; PAM type: YTN; PAM sequence: CTG
gttggtctaaatggatgttc

SEQ ID NO: 291299 - DNA, 20 bp, Artificial Sequence
  Description of Artificial Sequence: Synthetic oligonucleotide
  Target: LAMA2; (-) strand; PAM type: YTN; PAM sequence: CTA
ctggttggtctaaatggatg

SEQ ID NO: 291300 - DNA, 20 bp, Artificial Sequence
  Description of Artificial Sequence: Synthetic oligonucleotide
  Target: LAMA2; (-) strand; PAM type: YTN; PAM sequence: TTG
tctactggttggtctaaatg

SEQ ID NO: 291301 - DNA, 20 bp, Artificial Sequence
  Description of Artificial Sequence: Synthetic oligonucleotide
  Target: LAMA2; (-) strand; PAM type: YTN; PAM sequence: TTC
cattgtctactggttggtct

SEQ ID NO: 291302 - DNA, 20 bp, Artificial Sequence
  Description of Artificial Sequence: Synthetic oligonucleotide
  Target: LAMA2; (-) strand; PAM type: YTN; PAM sequence: TTT
ccattgtctactggttggtc

SEQ ID NO: 291303 - DNA, 20 bp, Artificial Sequence
  Description of Artificial Sequence: Synthetic oligonucleotide
  Target: LAMA2; (-) strand; PAM type: YTN; PAM sequence: CTG
gtttccattgtctactggtt

SEQ ID NO: 291304 - DNA, 20 bp, Artificial Sequence
  Description of Artificial Sequence: Synthetic oligonucleotide
  Target: LAMA2; (-) strand; PAM type: YTN; PAM sequence: CTC
tggtttccattgtctactgg

SEQ ID NO: 291305 - DNA, 20 bp, Artificial Sequence
  Description of Artificial Sequence: Synthetic oligonucleotide
  Target: LAMA2; (-) strand; PAM type: YTN; PAM sequence: CTG
tgcacacgtgtacccagcaa

SEQ ID NO: 291306 - DNA, 20 bp, Artificial Sequence
  Description of Artificial Sequence: Synthetic oligonucleotide
  Target: LAMA2; (-) strand; PAM type: YTN; PAM sequence: CTA
tcaaactgtgcacacgtgta

SEQ ID NO: 291307 - DNA, 20 bp, Artificial Sequence
  Description of Artificial Sequence: Synthetic oligonucleotide
  Target: LAMA2; (-) strand; PAM type: YTN; PAM sequence: TTG
tggagcagacacatgcaggc

SEQ ID NO: 291308 - DNA, 20 bp, Artificial Sequence
  Description of Artificial Sequence: Synthetic oligonucleotide
  Target: LAMA2; (-) strand; PAM type: YTN; PAM sequence: CTT
gtggagcagacacatgcagg

SEQ ID NO: 291309 - DNA, 20 bp, Artificial Sequence
  Description of Artificial Sequence: Synthetic oligonucleotide
  Target: LAMA2; (-) strand; PAM type: YTN; PAM sequence: CTA
tgggaaggaagccttgtgga

SEQ ID NO: 291310 - DNA, 20 bp, Artificial Sequence
  Description of Artificial Sequence: Synthetic oligonucleotide
  Target: LAMA2; (-) strand; PAM type: YTN; PAM sequence: CTG
actatgggaaggaagccttg

SEQ ID NO: 291311 - DNA, 20 bp, Artificial Sequence
  Description of Artificial Sequence: Synthetic oligonucleotide
  Target: LAMA2; (-) strand; PAM type: YTN; PAM sequence: CTC
tgactatgggaaggaagcct

SEQ ID NO: 291312 - DNA, 20 bp, Artificial Sequence
  Description of Artificial Sequence: Synthetic oligonucleotide
  Target: LAMA2; (-) strand; PAM type: YTN; PAM sequence: TTA
gggtgatggtagtgtagtct

SEQ ID NO: 291313 - DNA, 20 bp, Artificial Sequence
  Description of Artificial Sequence: Synthetic oligonucleotide
  Target: LAMA2; (-) strand; PAM type: YTN; PAM sequence: TTG
aatagtcaaatgaaaagcaa

SEQ ID NO: 291314 - DNA, 20 bp, Artificial Sequence
  Description of Artificial Sequence: Synthetic oligonucleotide
  Target: LAMA2; (-) strand; PAM type: YTN; PAM sequence: CTA
ttgaatagtcaaatgaaaag

SEQ ID NO: 291315 - DNA, 20 bp, Artificial Sequence
  Description of Artificial Sequence: Synthetic oligonucleotide
  Target: LAMA2; (-) strand; PAM type: YTN; PAM sequence: CTG
gcctattgaatagtcaaatg

SEQ ID NO: 291316 - DNA, 20 bp, Artificial Sequence
  Description of Artificial Sequence: Synthetic oligonucleotide
  Target: LAMA2; (-) strand; PAM type: YTN; PAM sequence: TTC
tggcctattgaatagtcaaa

SEQ ID NO: 291317 - DNA, 20 bp, Artificial Sequence
  Description of Artificial Sequence: Synthetic oligonucleotide
  Target: LAMA2; (-) strand; PAM type: YTN; PAM sequence: CTT
ctggcctattgaatagtcaa

SEQ ID NO: 291318 - DNA, 20 bp, Artificial Sequence
  Description of Artificial Sequence: Synthetic oligonucleotide
  Target: LAMA2; (-) strand; PAM type: YTN; PAM sequence: TTA
cttctggcctattgaatagt

SEQ ID NO: 291319 - DNA, 20 bp, Artificial Sequence
  Description of Artificial Sequence: Synthetic oligonucleotide
  Target: LAMA2; (-) strand; PAM type: YTN; PAM sequence: TTT
acttctggcctattgaatag

SEQ ID NO: 291320 - DNA, 20 bp, Artificial Sequence
  Description of Artificial Sequence: Synthetic oligonucleotide
  Target: LAMA2; (-) strand; PAM type: YTN; PAM sequence: TTC
agatttacttctggcctatt

SEQ ID NO: 291321 - DNA, 20 bp, Artificial Sequence
  Description of Artificial Sequence: Synthetic oligonucleotide
  Target: LAMA2; (-) strand; PAM type: YTN; PAM sequence: CTT
cagatttacttctggcctat

SEQ ID NO: 291322 - DNA, 20 bp, Artificial Sequence
  Description of Artificial Sequence: Synthetic oligonucleotide
  Target: LAMA2; (-) strand; PAM type: YTN; PAM sequence: TTC
ttcagatttacttctggcct

SEQ ID NO: 291323 - DNA, 20 bp, Artificial Sequence
  Description of Artificial Sequence: Synthetic oligonucleotide
  Target: LAMA2; (-) strand; PAM type: YTN; PAM sequence: TTT
cttcagatttacttctggcc

SEQ ID NO: 291324 - DNA, 20 bp, Artificial Sequence
  Description of Artificial Sequence: Synthetic oligonucleotide
  Target: LAMA2; (-) strand; PAM type: YTN; PAM sequence: TTG
aggcagccggaatatttctt

SEQ ID NO: 291325 - DNA, 20 bp, Artificial Sequence
  Description of Artificial Sequence: Synthetic oligonucleotide
  Target: LAMA2; (-) strand; PAM type: YTN; PAM sequence: TTT
gaggcagccggaatatttct

SEQ ID NO: 291326 - DNA, 20 bp, Artificial Sequence
  Description of Artificial Sequence: Synthetic oligonucleotide
  Target: LAMA2; (-) strand; PAM type: YTN; PAM sequence: CTT
tgaggcagccggaatatttc

SEQ ID NO: 291327 - DNA, 20 bp, Artificial Sequence
  Description of Artificial Sequence: Synthetic oligonucleotide
  Target: LAMA2; (-) strand; PAM type: YTN; PAM sequence: TTC
aatatctttgaggcagccgg

SEQ ID NO: 291328 - DNA, 20 bp, Artificial Sequence
  Description of Artificial Sequence: Synthetic oligonucleotide
  Target: LAMA2; (-) strand; PAM type: YTN; PAM sequence: TTT
caatatctttgaggcagccg

SEQ ID NO: 291329 - DNA, 20 bp, Artificial Sequence
  Description of Artificial Sequence: Synthetic oligonucleotide
  Target: LAMA2; (-) strand; PAM type: YTN; PAM sequence: TTG
aaatttcaatatctttgagg

SEQ ID NO: 291330 - DNA, 20 bp, Artificial Sequence
  Description of Artificial Sequence: Synthetic oligonucleotide
  Target: LAMA2; (-) strand; PAM type: YTN; PAM sequence: CTT
gaaatttcaatatctttgag

SEQ ID NO: 291331 - DNA, 20 bp, Artificial Sequence
  Description of Artificial Sequence: Synthetic oligonucleotide
  Target: LAMA2; (-) strand; PAM type: YTN; PAM sequence: TTC
ttgaaatttcaatatctttg

SEQ ID NO: 291332 - DNA, 20 bp, Artificial Sequence
  Description of Artificial Sequence: Synthetic oligonucleotide
  Target: LAMA2; (-) strand; PAM type: YTN; PAM sequence: TTG
tacggagttcttgaaatttc

SEQ ID NO: 291333 - DNA, 20 bp, Artificial Sequence
  Description of Artificial Sequence: Synthetic oligonucleotide
  Target: LAMA2; (-) strand; PAM type: YTN; PAM sequence: CTG
agtatattgtacggagttct

SEQ ID NO: 291334 - DNA, 20 bp, Artificial Sequence
  Description of Artificial Sequence: Synthetic oligonucleotide
  Target: LAMA2; (-) strand; PAM type: YTN; PAM sequence: CTA
ctgagtatattgtacggagt

SEQ ID NO: 291335 - DNA, 20 bp, Artificial Sequence
  Description of Artificial Sequence: Synthetic oligonucleotide
  Target: LAMA2; (-) strand; PAM type: YTN; PAM sequence: TTG
gtaacaccaacataatcggg

SEQ ID NO: 291336 - DNA, 20 bp, Artificial Sequence
  Description of Artificial Sequence: Synthetic oligonucleotide
  Target: LAMA2; (-) strand; PAM type: YTN; PAM sequence: TTT
ggtaacaccaacataatcgg

SEQ ID NO: 291337 - DNA, 20 bp, Artificial Sequence
  Description of Artificial Sequence: Synthetic oligonucleotide
  Target: LAMA2; (-) strand; PAM type: YTN; PAM sequence: CTT
tggtaacaccaacataatcg

SEQ ID NO: 291338 - DNA, 20 bp, Artificial Sequence
  Description of Artificial Sequence: Synthetic oligonucleotide
  Target: LAMA2; (-) strand; PAM type: YTN; PAM sequence: CTC
cagggaacatcctttggtaa

SEQ ID NO: 291339 - DNA, 20 bp, Artificial Sequence
  Description of Artificial Sequence: Synthetic oligonucleotide
  Target: LAMA2; (-) strand; PAM type: YTN; PAM sequence: CTA
tcaaaaacagaccaacctcc

SEQ ID NO: 291340 - DNA, 20 bp, Artificial Sequence
  Description of Artificial Sequence: Synthetic oligonucleotide
  Target: LAMA2; (-) strand; PAM type: YTN; PAM sequence: TTA
gagaactatcaaaaacagac

SEQ ID NO: 291341 - DNA, 20 bp, Artificial Sequence
  Description of Artificial Sequence: Synthetic oligonucleotide
  Target: LAMA2; (-) strand; PAM type: YTN; PAM sequence: TTT
agagaactatcaaaaacaga

SEQ ID NO: 291342 - DNA, 20 bp, Artificial Sequence
  Description of Artificial Sequence: Synthetic oligonucleotide
  Target: LAMA2; (-) strand; PAM type: YTN; PAM sequence: CTG
atataaatgtgtttagagaa

SEQ ID NO: 291343 - DNA, 20 bp, Artificial Sequence
  Description of Artificial Sequence: Synthetic oligonucleotide
  Target: LAMA2; (-) strand; PAM type: YTN; PAM sequence: CTA
agtaagtgaaatctgatata

SEQ ID NO: 291344 - DNA, 20 bp, Artificial Sequence
  Description of Artificial Sequence: Synthetic oligonucleotide
  Target: LAMA2; (-) strand; PAM type: YTN; PAM sequence: TTG
taggagcagccacactaagt

SEQ ID NO: 291345 - DNA, 20 bp, Artificial Sequence
  Description of Artificial Sequence: Synthetic oligonucleotide
  Target: LAMA2; (-) strand; PAM type: YTN; PAM sequence: CTT
gtaggagcagccacactaag

SEQ ID NO: 291346 - DNA, 20 bp, Artificial Sequence
  Description of Artificial Sequence: Synthetic oligonucleotide
  Target: LAMA2; (-) strand; PAM type: YTN; PAM sequence: CTG
atccttgtaggagcagccac

SEQ ID NO: 291347 - DNA, 20 bp, Artificial Sequence
  Description of Artificial Sequence: Synthetic oligonucleotide
  Target: LAMA2; (-) strand; PAM type: YTN; PAM sequence: TTA
acaaaagactgatccttgta

SEQ ID NO: 291348 - DNA, 20 bp, Artificial Sequence
  Description of Artificial Sequence: Synthetic oligonucleotide
  Target: LAMA2; (-) strand; PAM type: YTN; PAM sequence: TTA
agagtaggatcagtagaaaa

SEQ ID NO: 291349 - DNA, 20 bp, Artificial Sequence
  Description of Artificial Sequence: Synthetic oligonucleotide
  Target: LAMA2; (-) strand; PAM type: YTN; PAM sequence: TTT
aagagtaggatcagtagaaa

SEQ ID NO: 291350 - DNA, 20 bp, Artificial Sequence
  Description of Artificial Sequence: Synthetic oligonucleotide
  Target: LAMA2; (-) strand; PAM type: YTN; PAM sequence: TTA
tcgtttaagagtaggatcag

SEQ ID NO: 291351 - DNA, 20 bp, Artificial Sequence
  Description of Artificial Sequence: Synthetic oligonucleotide
  Target: LAMA2; (-) strand; PAM type: YTN; PAM sequence: TTT
atcgtttaagagtaggatca

SEQ ID NO: 291352 - DNA, 20 bp, Artificial Sequence
  Description of Artificial Sequence: Synthetic oligonucleotide
  Target: LAMA2; (-) strand; PAM type: YTN; PAM sequence: CTT
tatcgtttaagagtaggatc

SEQ ID NO: 291353 - DNA, 20 bp, Artificial Sequence
  Description of Artificial Sequence: Synthetic oligonucleotide
  Target: LAMA2; (-) strand; PAM type: YTN; PAM sequence: TTG
ctttatcgtttaagagtagg

SEQ ID NO: 291354 - DNA, 20 bp, Artificial Sequence
  Description of Artificial Sequence: Synthetic oligonucleotide
  Target: LAMA2; (-) strand; PAM type: YTN; PAM sequence: CTT
gctttatcgtttaagagtag

SEQ ID NO: 291355 - DNA, 20 bp, Artificial Sequence
  Description of Artificial Sequence: Synthetic oligonucleotide
  Target: LAMA2; (-) strand; PAM type: YTN; PAM sequence: TTA
atcttgctttatcgtttaag

SEQ ID NO: 291356 - DNA, 20 bp, Artificial Sequence
  Description of Artificial Sequence: Synthetic oligonucleotide
  Target: LAMA2; (-) strand; PAM type: YTN; PAM sequence: TTT
aatcttgctttatcgtttaa

SEQ ID NO: 291357 - DNA, 20 bp, Artificial Sequence
  Description of Artificial Sequence: Synthetic oligonucleotide
  Target: LAMA2; (-) strand; PAM type: YTN; PAM sequence: CTT
taatcttgctttatcgttta

SEQ ID NO: 291358 - DNA, 20 bp, Artificial Sequence
  Description of Artificial Sequence: Synthetic oligonucleotide
  Target: LAMA2; (-) strand; PAM type: YTN; PAM sequence: TTA
gagaatgctttaatcttgct

SEQ ID NO: 291359 - DNA, 20 bp, Artificial Sequence
  Description of Artificial Sequence: Synthetic oligonucleotide
  Target: LAMA2; (-) strand; PAM type: YTN; PAM sequence: TTT
agagaatgctttaatcttgc

SEQ ID NO: 291360 - DNA, 20 bp, Artificial Sequence
  Description of Artificial Sequence: Synthetic oligonucleotide
  Target: LAMA2; (-) strand; PAM type: YTN; PAM sequence: TTA
tcatggtaatttagagaatg

SEQ ID NO: 291361 - DNA, 20 bp, Artificial Sequence
  Description of Artificial Sequence: Synthetic oligonucleotide
  Target: LAMA2; (-) strand; PAM type: YTN; PAM sequence: TTT
atcatggtaatttagagaat

SEQ ID NO: 291362 - DNA, 20 bp, Artificial Sequence
  Description of Artificial Sequence: Synthetic oligonucleotide
  Target: LAMA2; (-) strand; PAM type: YTN; PAM sequence: TTT
tatcatggtaatttagagaa

SEQ ID NO: 291363 - DNA, 20 bp, Artificial Sequence
  Description of Artificial Sequence: Synthetic oligonucleotide
  Target: LAMA2; (-) strand; PAM type: YTN; PAM sequence: TTT
ttatcatggtaatttagaga

SEQ ID NO: 291364 - DNA, 20 bp, Artificial Sequence
  Description of Artificial Sequence: Synthetic oligonucleotide
  Target: LAMA2; (-) strand; PAM type: YTN; PAM sequence: TTT
tttatcatggtaatttagag

SEQ ID NO: 291365 - DNA, 20 bp, Artificial Sequence
  Description of Artificial Sequence: Synthetic oligonucleotide
  Target: LAMA2; (-) strand; PAM type: YTN; PAM sequence: TTC
ataataccattttttatcat

SEQ ID NO: 291366 - DNA, 20 bp, Artificial Sequence
  Description of Artificial Sequence: Synthetic oligonucleotide
  Target: LAMA2; (-) strand; PAM type: YTN; PAM sequence: CTT
cataataccattttttatca

SEQ ID NO: 291367 - DNA, 20 bp, Artificial Sequence
  Description of Artificial Sequence: Synthetic oligonucleotide
  Target: LAMA2; (-) strand; PAM type: YTN; PAM sequence: CTA
ggacttcataataccatttt

SEQ ID NO: 291368 - DNA, 20 bp, Artificial Sequence
  Description of Artificial Sequence: Synthetic oligonucleotide
  Target: LAMA2; (-) strand; PAM type: YTN; PAM sequence: TTC
taggacttcataataccatt

SEQ ID NO: 291369 - DNA, 20 bp, Artificial Sequence
  Description of Artificial Sequence: Synthetic oligonucleotide
  Target: LAMA2; (-) strand; PAM type: YTN; PAM sequence: TTG
gatcacaattctaggacttc

SEQ ID NO: 291370 - DNA, 20 bp, Artificial Sequence
  Description of Artificial Sequence: Synthetic oligonucleotide
  Target: LAMA2; (-) strand; PAM type: YTN; PAM sequence: TTG
gaaaattggatcacaattct

SEQ ID NO: 291371 - DNA, 20 bp, Artificial Sequence
  Description of Artificial Sequence: Synthetic oligonucleotide
  Target: LAMA2; (-) strand; PAM type: YTN; PAM sequence: TTT
ggaaaattggatcacaattc

SEQ ID NO: 291372 - DNA, 20 bp, Artificial Sequence
  Description of Artificial Sequence: Synthetic oligonucleotide
  Target: LAMA2; (-) strand; PAM type: YTN; PAM sequence: CTA
tacatttggaaaattggatc

SEQ ID NO: 291373 - DNA, 20 bp, Artificial Sequence
  Description of Artificial Sequence: Synthetic oligonucleotide
  Target: LAMA2; (-) strand; PAM type: YTN; PAM sequence: CTA
taaagagctatacatttgga

SEQ ID NO: 291374 - DNA, 20 bp, Artificial Sequence
  Description of Artificial Sequence: Synthetic oligonucleotide
  Target: LAMA2; (-) strand; PAM type: YTN; PAM sequence: TTA
atgatatgtgctataaagag

SEQ ID NO: 291375 - DNA, 20 bp, Artificial Sequence
  Description of Artificial Sequence: Synthetic oligonucleotide
  Target: LAMA2; (-) strand; PAM type: YTN; PAM sequence: TTA
gtattaatgatatgtgctat

SEQ ID NO: 291376 - DNA, 20 bp, Artificial Sequence
  Description of Artificial Sequence: Synthetic oligonucleotide
  Target: LAMA2; (-) strand; PAM type: YTN; PAM sequence: TTG
gaaaaaaagagaaaaacaga

SEQ ID NO: 291377 - DNA, 20 bp, Artificial Sequence
  Description of Artificial Sequence: Synthetic oligonucleotide
  Target: LAMA2; (-) strand; PAM type: YTN; PAM sequence: TTA
aaatggatgacaaaaataag

SEQ ID NO: 291378 - DNA, 20 bp, Artificial Sequence
  Description of Artificial Sequence: Synthetic oligonucleotide
  Target: LAMA2; (-) strand; PAM type: YTN; PAM sequence: TTT
aaaatggatgacaaaaataa

SEQ ID NO: 291379 - DNA, 20 bp, Artificial Sequence
  Description of Artificial Sequence: Synthetic oligonucleotide
  Target: LAMA2; (-) strand; PAM type: YTN; PAM sequence: CTA
tatacaacacataaaagtaa

SEQ ID NO: 291380 - DNA, 20 bp, Artificial Sequence
  Description of Artificial Sequence: Synthetic oligonucleotide
  Target: LAMA2; (-) strand; PAM type: YTN; PAM sequence: CTA
ataaagctatatacaacaca

SEQ ID NO: 291381 - DNA, 20 bp, Artificial Sequence
  Description of Artificial Sequence: Synthetic oligonucleotide
  Target: LAMA2; (-) strand; PAM type: YTN; PAM sequence: TTG
ctaataaagctatatacaac

SEQ ID NO: 291382 - DNA, 20 bp, Artificial Sequence
  Description of Artificial Sequence: Synthetic oligonucleotide
  Target: LAMA2; (-) strand; PAM type: YTN; PAM sequence: TTC
cagaaaaaatgtaaggttgc

SEQ ID NO: 291383 - DNA, 20 bp, Artificial Sequence
  Description of Artificial Sequence: Synthetic oligonucleotide
  Target: LAMA2; (-) strand; PAM type: YTN; PAM sequence: TTC
aatggttccagaaaaaatgt

SEQ ID NO: 291384 - DNA, 20 bp, Artificial Sequence
  Description of Artificial Sequence: Synthetic oligonucleotide
  Target: LAMA2; (-) strand; PAM type: YTN; PAM sequence: CTT
caatggttccagaaaaaatg

SEQ ID NO: 291385 - DNA, 20 bp, Artificial Sequence
  Description of Artificial Sequence: Synthetic oligonucleotide
  Target: LAMA2; (-) strand; PAM type: YTN; PAM sequence: TTG
tgtaaacttcaatggttcca

SEQ ID NO: 291386 - DNA, 20 bp, Artificial Sequence
  Description of Artificial Sequence: Synthetic oligonucleotide
  Target: LAMA2; (-) strand; PAM type: YTN; PAM sequence: CTT
gtgtaaacttcaatggttcc

SEQ ID NO: 291387 - DNA, 20 bp, Artificial Sequence
  Description of Artificial Sequence: Synthetic oligonucleotide
  Target: LAMA2; (-) strand; PAM type: YTN; PAM sequence: CTA
cttgtgtaaacttcaatggt

SEQ ID NO: 291388 - DNA, 20 bp, Artificial Sequence
  Description of Artificial Sequence: Synthetic oligonucleotide
  Target: LAMA2; (-) strand; PAM type: YTN; PAM sequence: TTG
ctacttgtgtaaacttcaat

SEQ ID NO: 291389 - DNA, 20 bp, Artificial Sequence
  Description of Artificial Sequence: Synthetic oligonucleotide
  Target: LAMA2; (-) strand; PAM type: YTN; PAM sequence: CTT
gctacttgtgtaaacttcaa

SEQ ID NO: 291390 - DNA, 20 bp, Artificial Sequence
  Description of Artificial Sequence: Synthetic oligonucleotide
  Target: LAMA2; (-) strand; PAM type: YTN; PAM sequence: CTA
cttgctacttgtgtaaactt

SEQ ID NO: 291391 - DNA, 20 bp, Artificial Sequence
  Description of Artificial Sequence: Synthetic oligonucleotide
  Target: LAMA2; (-) strand; PAM type: YTN; PAM sequence: TTA
ctacttgctacttgtgtaaa

SEQ ID NO: 291392 - DNA, 20 bp, Artificial Sequence
  Description of Artificial Sequence: Synthetic oligonucleotide
  Target: LAMA2; (-) strand; PAM type: YTN; PAM sequence: CTA
cggtgtaaattactacttgc

SEQ ID NO: 291393 - DNA, 20 bp, Artificial Sequence
  Description of Artificial Sequence: Synthetic oligonucleotide
  Target: LAMA2; (-) strand; PAM type: YTN; PAM sequence: CTA
atggctacggtgtaaattac

SEQ ID NO: 291394 - DNA, 20 bp, Artificial Sequence
  Description of Artificial Sequence: Synthetic oligonucleotide
  Target: LAMA2; (-) strand; PAM type: YTN; PAM sequence: CTA
tgcactaatggctacggtgt

SEQ ID NO: 291395 - DNA, 20 bp, Artificial Sequence
  Description of Artificial Sequence: Synthetic oligonucleotide
  Target: LAMA2; (-) strand; PAM type: YTN; PAM sequence: TTG
tagacaacagactatgcact

SEQ ID NO: 291396 - DNA, 20 bp, Artificial Sequence
  Description of Artificial Sequence: Synthetic oligonucleotide
  Target: LAMA2; (-) strand; PAM type: YTN; PAM sequence: TTT
gtagacaacagactatgcac

SEQ ID NO: 291397 - DNA, 20 bp, Artificial Sequence
  Description of Artificial Sequence: Synthetic oligonucleotide
  Target: LAMA2; (-) strand; PAM type: YTN; PAM sequence: TTC
aagtttgtagacaacagact

SEQ ID NO: 291398 - DNA, 20 bp, Artificial Sequence
  Description of Artificial Sequence: Synthetic oligonucleotide
  Target: LAMA2; (-) strand; PAM type: YTN; PAM sequence: CTT
caagtttgtagacaacagac

SEQ ID NO: 291399 - DNA, 20 bp, Artificial Sequence
  Description of Artificial Sequence: Synthetic oligonucleotide
  Target: LAMA2; (-) strand; PAM type: YTN; PAM sequence: CTA
gacttcaagtttgtagacaa

SEQ ID NO: 291400 - DNA, 20 bp, Artificial Sequence
  Description of Artificial Sequence: Synthetic oligonucleotide
  Target: LAMA2; (-) strand; PAM type: YTN; PAM sequence: TTC
aaagacaagggggctagact

SEQ ID NO: 291401 - DNA, 20 bp, Artificial Sequence
  Description of Artificial Sequence: Synthetic oligonucleotide
  Target: LAMA2; (-) strand; PAM type: YTN; PAM sequence: TTT
caaagacaagggggctagac

SEQ ID NO: 291402 - DNA, 20 bp, Artificial Sequence
  Description of Artificial Sequence: Synthetic oligonucleotide
  Target: LAMA2; (-) strand; PAM type: YTN; PAM sequence: TTA
tttcaaagacaagggggcta

SEQ ID NO: 291403 - DNA, 20 bp, Artificial Sequence
  Description of Artificial Sequence: Synthetic oligonucleotide
  Target: LAMA2; (-) strand; PAM type: YTN; PAM sequence: CTA
tgttatttcaaagacaaggg

SEQ ID NO: 291404 - DNA, 20 bp, Artificial Sequence
  Description of Artificial Sequence: Synthetic oligonucleotide
  Target: LAMA2; (-) strand; PAM type: YTN; PAM sequence: TTG
ccacaggtcccagtctatgt

SEQ ID NO: 291405 - DNA, 20 bp, Artificial Sequence
  Description of Artificial Sequence: Synthetic oligonucleotide
  Target: LAMA2; (-) strand; PAM type: YTN; PAM sequence: TTG
attgccacaggtcccagtct

SEQ ID NO: 291406 - DNA, 20 bp, Artificial Sequence
  Description of Artificial Sequence: Synthetic oligonucleotide
  Target: LAMA2; (-) strand; PAM type: YTN; PAM sequence: TTG
cagagttgattgccacaggt

SEQ ID NO: 291407 - DNA, 20 bp, Artificial Sequence
  Description of Artificial Sequence: Synthetic oligonucleotide
  Target: LAMA2; (-) strand; PAM type: YTN; PAM sequence: TTT
gcagagttgattgccacagg

SEQ ID NO: 291408 - DNA, 20 bp, Artificial Sequence
  Description of Artificial Sequence: Synthetic oligonucleotide
  Target: LAMA2; (-) strand; PAM type: YTN; PAM sequence: CTT
tgcagagttgattgccacag

SEQ ID NO: 291409 - DNA, 20 bp, Artificial Sequence
  Description of Artificial Sequence: Synthetic oligonucleotide
  Target: LAMA2; (-) strand; PAM type: YTN; PAM sequence: TTG
caggcatgtcaaacacaagt

SEQ ID NO: 291410 - DNA, 20 bp, Artificial Sequence
  Description of Artificial Sequence: Synthetic oligonucleotide
  Target: LAMA2; (-) strand; PAM type: YTN; PAM sequence: TTT
gcaggcatgtcaaacacaag

SEQ ID NO: 291411 - DNA, 20 bp, Artificial Sequence
  Description of Artificial Sequence: Synthetic oligonucleotide
  Target: LAMA2; (-) strand; PAM type: YTN; PAM sequence: CTT
tgcaggcatgtcaaacacaa

SEQ ID NO: 291412 - DNA, 20 bp, Artificial Sequence
  Description of Artificial Sequence: Synthetic oligonucleotide
  Target: LAMA2; (-) strand; PAM type: YTN; PAM sequence: CTA
acaaaggactttgcaggcat

SEQ ID NO: 291413 - DNA, 20 bp, Artificial Sequence
  Description of Artificial Sequence: Synthetic oligonucleotide
  Target: LAMA2; (-) strand; PAM type: YTN; PAM sequence: CTG
aggatatcagctaacaaagg

SEQ ID NO: 291414 - DNA, 20 bp, Artificial Sequence
  Description of Artificial Sequence: Synthetic oligonucleotide
  Target: LAMA2; (-) strand; PAM type: YTN; PAM sequence: TTA
ctgaggatatcagctaacaa

SEQ ID NO: 291415 - DNA, 20 bp, Artificial Sequence
  Description of Artificial Sequence: Synthetic oligonucleotide
  Target: LAMA2; (-) strand; PAM type: YTN; PAM sequence: TTA
gcatcaaagaagagttactg

SEQ ID NO: 291416 - DNA, 20 bp, Artificial Sequence
  Description of Artificial Sequence: Synthetic oligonucleotide
  Target: LAMA2; (-) strand; PAM type: YTN; PAM sequence: TTT
agcatcaaagaagagttact

SEQ ID NO: 291417 - DNA, 20 bp, Artificial Sequence
  Description of Artificial Sequence: Synthetic oligonucleotide
  Target: LAMA2; (-) strand; PAM type: YTN; PAM sequence: CTT
tagcatcaaagaagagttac

SEQ ID NO: 291418 - DNA, 20 bp, Artificial Sequence
  Description of Artificial Sequence: Synthetic oligonucleotide
  Target: LAMA2; (-) strand; PAM type: YTN; PAM sequence: CTA
ggatgctttagcatcaaaga

SEQ ID NO: 291419 - DNA, 20 bp, Artificial Sequence
  Description of Artificial Sequence: Synthetic oligonucleotide
  Target: LAMA2; (-) strand; PAM type: YTN; PAM sequence: TTA
aacgaaaataggggaatgct

SEQ ID NO: 291420 - DNA, 20 bp, Artificial Sequence
  Description of Artificial Sequence: Synthetic oligonucleotide
  Target: LAMA2; (-) strand; PAM type: YTN; PAM sequence: CTG
aagaaacagtgcaaaatagt

SEQ ID NO: 291421 - DNA, 20 bp, Artificial Sequence
  Description of Artificial Sequence: Synthetic oligonucleotide
  Target: LAMA2; (-) strand; PAM type: YTN; PAM sequence: CTC
acatatgggtcagtgtcaac

SEQ ID NO: 291422 - DNA, 20 bp, Artificial Sequence
  Description of Artificial Sequence: Synthetic oligonucleotide
  Target: LAMA2; (-) strand; PAM type: YTN; PAM sequence: TTC
tcacatatgggtcagtgtca

SEQ ID NO: 291423 - DNA, 20 bp, Artificial Sequence
  Description of Artificial Sequence: Synthetic oligonucleotide
  Target: LAMA2; (-) strand; PAM type: YTN; PAM sequence: TTT
ctcacatatgggtcagtgtc

SEQ ID NO: 291424 - DNA, 20 bp, Artificial Sequence
  Description of Artificial Sequence: Synthetic oligonucleotide
  Target: LAMA2; (-) strand; PAM type: YTN; PAM sequence: CTT
tctcacatatgggtcagtgt

SEQ ID NO: 291425 - DNA, 20 bp, Artificial Sequence
  Description of Artificial Sequence: Synthetic oligonucleotide
  Target: LAMA2; (-) strand; PAM type: YTN; PAM sequence: CTA
tggccggggtctttctcaca

SEQ ID NO: 291426 - DNA, 20 bp, Artificial Sequence
  Description of Artificial Sequence: Synthetic oligonucleotide
  Target: LAMA2; (-) strand; PAM type: YTN; PAM sequence: TTA
agagagtagagctatggccg

SEQ ID NO: 291427 - DNA, 20 bp, Artificial Sequence
  Description of Artificial Sequence: Synthetic oligonucleotide
  Target: LAMA2; (-) strand; PAM type: YTN; PAM sequence: TTT
aagagagtagagctatggcc

SEQ ID NO: 291428 - DNA, 20 bp, Artificial Sequence
  Description of Artificial Sequence: Synthetic oligonucleotide
  Target: LAMA2; (-) strand; PAM type: YTN; PAM sequence: TTT
taagagagtagagctatggc

SEQ ID NO: 291429 - DNA, 20 bp, Artificial Sequence
  Description of Artificial Sequence: Synthetic oligonucleotide
  Target: LAMA2; (-) strand; PAM type: YTN; PAM sequence: TTA
tggatattttaagagagtag

SEQ ID NO: 291430 - DNA, 20 bp, Artificial Sequence
  Description of Artificial Sequence: Synthetic oligonucleotide
  Target: LAMA2; (-) strand; PAM type: YTN; PAM sequence: CTT
atggatattttaagagagta

SEQ ID NO: 291431 - DNA, 20 bp, Artificial Sequence
  Description of Artificial Sequence: Synthetic oligonucleotide
  Target: LAMA2; (-) strand; PAM type: YTN; PAM sequence: TTG
cttatggatattttaagaga

SEQ ID NO: 291432 - DNA, 20 bp, Artificial Sequence
  Description of Artificial Sequence: Synthetic oligonucleotide
  Target: LAMA2; (-) strand; PAM type: YTN; PAM sequence: CTT
gcttatggatattttaagag

SEQ ID NO: 291433 - DNA, 20 bp, Artificial Sequence
  Description of Artificial Sequence: Synthetic oligonucleotide
  Target: LAMA2; (-) strand; PAM type: YTN; PAM sequence: CTC
ttgcttatggatattttaag

SEQ ID NO: 291434 - DNA, 20 bp, Artificial Sequence
  Description of Artificial Sequence: Synthetic oligonucleotide
  Target: LAMA2; (-) strand; PAM type: YTN; PAM sequence: TTG
actcttgcttatggatattt

SEQ ID NO: 291435 - DNA, 20 bp, Artificial Sequence
  Description of Artificial Sequence: Synthetic oligonucleotide
  Target: LAMA2; (-) strand; PAM type: YTN; PAM sequence: CTA
ttgactcttgcttatggata

SEQ ID NO: 291436 - DNA, 20 bp, Artificial Sequence
  Description of Artificial Sequence: Synthetic oligonucleotide
  Target: LAMA2; (-) strand; PAM type: YTN; PAM sequence: TTG
actattgactcttgcttatg

SEQ ID NO: 291437 - DNA, 20 bp, Artificial Sequence
  Description of Artificial Sequence: Synthetic oligonucleotide
  Target: LAMA2; (-) strand; PAM type: YTN; PAM sequence: CTG
ttgactattgactcttgctt

SEQ ID NO: 291438 - DNA, 20 bp, Artificial Sequence
  Description of Artificial Sequence: Synthetic oligonucleotide
  Target: LAMA2; (-) strand; PAM type: YTN; PAM sequence: TTG
ctgttgactattgactcttg

SEQ ID NO: 291439 - DNA, 20 bp, Artificial Sequence
  Description of Artificial Sequence: Synthetic oligonucleotide
  Target: LAMA2; (-) strand; PAM type: YTN; PAM sequence: TTT
gctgttgactattgactctt

SEQ ID NO: 291440 - DNA, 20 bp, Artificial Sequence
  Description of Artificial Sequence: Synthetic oligonucleotide
  Target: LAMA2; (-) strand; PAM type: YTN; PAM sequence: CTA
atatttgctgttgactattg

SEQ ID NO: 291441 - DNA, 20 bp, Artificial Sequence
  Description of Artificial Sequence: Synthetic oligonucleotide
  Target: LAMA2; (-) strand; PAM type: YTN; PAM sequence: TTG
ctaatatttgctgttgacta

SEQ ID NO: 291442 - DNA, 20 bp, Artificial Sequence
  Description of Artificial Sequence: Synthetic oligonucleotide
  Target: LAMA2; (-) strand; PAM type: YTN; PAM sequence: CTT
gctaatatttgctgttgact

SEQ ID NO: 291443 - DNA, 20 bp, Artificial Sequence
  Description of Artificial Sequence: Synthetic oligonucleotide
  Target: LAMA2; (-) strand; PAM type: YTN; PAM sequence: TTC
ttgctaatatttgctgttga

SEQ ID NO: 291444 - DNA, 20 bp, Artificial Sequence
  Description of Artificial Sequence: Synthetic oligonucleotide
  Target: LAMA2; (-) strand; PAM type: YTN; PAM sequence: CTA
taaaattcttgctaatattt

SEQ ID NO: 291445 - DNA, 20 bp, Artificial Sequence
  Description of Artificial Sequence: Synthetic oligonucleotide
  Target: LAMA2; (-) strand; PAM type: YTN; PAM sequence: TTC
tataaaattcttgctaatat

SEQ ID NO: 291446 - DNA, 20 bp, Artificial Sequence
  Description of Artificial Sequence: Synthetic oligonucleotide
  Target: LAMA2; (-) strand; PAM type: YTN; PAM sequence: TTT
ctataaaattcttgctaata

SEQ ID NO: 291447 - DNA, 20 bp, Artificial Sequence
  Description of Artificial Sequence: Synthetic oligonucleotide
  Target: LAMA2; (-) strand; PAM type: YTN; PAM sequence: TTG
agtttctataaaattcttgc

SEQ ID NO: 291448 - DNA, 20 bp, Artificial Sequence
  Description of Artificial Sequence: Synthetic oligonucleotide
  Target: LAMA2; (-) strand; PAM type: YTN; PAM sequence: CTA
ttgagtttctataaaattct

SEQ ID NO: 291449 - DNA, 20 bp, Artificial Sequence
  Description of Artificial Sequence: Synthetic oligonucleotide
  Target: LAMA2; (-) strand; PAM type: YTN; PAM sequence: CTG
atcactattgagtttctata

SEQ ID NO: 291450 - DNA, 20 bp, Artificial Sequence
  Description of Artificial Sequence: Synthetic oligonucleotide
  Target: LAMA2; (-) strand; PAM type: YTN; PAM sequence: TTA
aaaacaagctgatcactatt

SEQ ID NO: 291451 - DNA, 20 bp, Artificial Sequence
  Description of Artificial Sequence: Synthetic oligonucleotide
  Target: LAMA2; (-) strand; PAM type: YTN; PAM sequence: TTT
aaaaacaagctgatcactat

SEQ ID NO: 291452 - DNA, 20 bp, Artificial Sequence
  Description of Artificial Sequence: Synthetic oligonucleotide
  Target: LAMA2; (-) strand; PAM type: YTN; PAM sequence: TTT
taaaaacaagctgatcacta

SEQ ID NO: 291453 - DNA, 20 bp, Artificial Sequence
  Description of Artificial Sequence: Synthetic oligonucleotide
  Target: LAMA2; (-) strand; PAM type: YTN; PAM sequence: TTC
attttaaaaacaagctgatc

SEQ ID NO: 291454 - DNA, 20 bp, Artificial Sequence
  Description of Artificial Sequence: Synthetic oligonucleotide
  Target: LAMA2; (-) strand; PAM type: YTN; PAM sequence: TTT
cattttaaaaacaagctgat

SEQ ID NO: 291455 - DNA, 20 bp, Artificial Sequence
  Description of Artificial Sequence: Synthetic oligonucleotide
  Target: LAMA2; (-) strand; PAM type: YTN; PAM sequence: TTT
tcattttaaaaacaagctga

SEQ ID NO: 291456 - DNA, 20 bp, Artificial Sequence
  Description of Artificial Sequence: Synthetic oligonucleotide
  Target: LAMA2; (-) strand; PAM type: YTN; PAM sequence: TTA
acgttttcattttaaaaaca

SEQ ID NO: 291457 - DNA, 20 bp, Artificial Sequence
  Description of Artificial Sequence: Synthetic oligonucleotide
  Target: LAMA2; (-) strand; PAM type: YTN; PAM sequence: TTT
aacgttttcattttaaaaac

SEQ ID NO: 291458 - DNA, 20 bp, Artificial Sequence
  Description of Artificial Sequence: Synthetic oligonucleotide
  Target: LAMA2; (-) strand; PAM type: YTN; PAM sequence: TTA
aaaatgtatgagaatgacat

SEQ ID NO: 291459 - DNA, 20 bp, Artificial Sequence
  Description of Artificial Sequence: Synthetic oligonucleotide
  Target: LAMA2; (-) strand; PAM type: YTN; PAM sequence: TTA
tgataggataattaaaaatg

SEQ ID NO: 291460 - DNA, 20 bp, Artificial Sequence
  Description of Artificial Sequence: Synthetic oligonucleotide
  Target: LAMA2; (-) strand; PAM type: YTN; PAM sequence: TTG
tattatgataggataattaa

SEQ ID NO: 291461 - DNA, 20 bp, Artificial Sequence
  Description of Artificial Sequence: Synthetic oligonucleotide
  Target: LAMA2; (-) strand; PAM type: YTN; PAM sequence: TTA
gaagcagcagacaaaatgaa

SEQ ID NO: 291462 - DNA, 20 bp, Artificial Sequence
  Description of Artificial Sequence: Synthetic oligonucleotide
  Target: LAMA2; (-) strand; PAM type: YTN; PAM sequence: TTG
attagaagcagcagacaaaa

SEQ ID NO: 291463 - DNA, 20 bp, Artificial Sequence
  Description of Artificial Sequence: Synthetic oligonucleotide
  Target: LAMA2; (-) strand; PAM type: YTN; PAM sequence: TTT
gattagaagcagcagacaaa

SEQ ID NO: 291464 - DNA, 20 bp, Artificial Sequence
  Description of Artificial Sequence: Synthetic oligonucleotide
  Target: LAMA2; (-) strand; PAM type: YTN; PAM sequence: TTT
tgattagaagcagcagacaa

SEQ ID NO: 291465 - DNA, 20 bp, Artificial Sequence
  Description of Artificial Sequence: Synthetic oligonucleotide
  Target: LAMA2; (-) strand; PAM type: YTN; PAM sequence: TTA
agataattttgattagaagc

SEQ ID NO: 291466 - DNA, 20 bp, Artificial Sequence
  Description of Artificial Sequence: Synthetic oligonucleotide
  Target: LAMA2; (-) strand; PAM type: YTN; PAM sequence: TTT
aagataattttgattagaag

SEQ ID NO: 291467 - DNA, 20 bp, Artificial Sequence
  Description of Artificial Sequence: Synthetic oligonucleotide
  Target: LAMA2; (-) strand; PAM type: YTN; PAM sequence: TTG
gagtggtttaagataatttt

SEQ ID NO: 291468 - DNA, 20 bp, Artificial Sequence
  Description of Artificial Sequence: Synthetic oligonucleotide
  Target: LAMA2; (-) strand; PAM type: YTN; PAM sequence: CTA
ttggagtggtttaagataat

SEQ ID NO: 291469 - DNA, 20 bp, Artificial Sequence
  Description of Artificial Sequence: Synthetic oligonucleotide
  Target: LAMA2; (-) strand; PAM type: YTN; PAM sequence: TTC
tattggagtggtttaagata

SEQ ID NO: 291470 - DNA, 20 bp, Artificial Sequence
  Description of Artificial Sequence: Synthetic oligonucleotide
  Target: LAMA2; (-) strand; PAM type: YTN; PAM sequence: CTA
attctattggagtggtttaa

SEQ ID NO: 291471 - DNA, 20 bp, Artificial Sequence
  Description of Artificial Sequence: Synthetic oligonucleotide
  Target: LAMA2; (-) strand; PAM type: YTN; PAM sequence: TTC
cctaattctattggagtggt

SEQ ID NO: 291472 - DNA, 20 bp, Artificial Sequence
  Description of Artificial Sequence: Synthetic oligonucleotide
  Target: LAMA2; (-) strand; PAM type: YTN; PAM sequence: TTT
ccctaattctattggagtgg

SEQ ID NO: 291473 - DNA, 20 bp, Artificial Sequence
  Description of Artificial Sequence: Synthetic oligonucleotide
  Target: LAMA2; (-) strand; PAM type: YTN; PAM sequence: TTC
atttccctaattctattgga

SEQ ID NO: 291474 - DNA, 20 bp, Artificial Sequence
  Description of Artificial Sequence: Synthetic oligonucleotide
  Target: LAMA2; (-) strand; PAM type: YTN; PAM sequence: CTT
catttccctaattctattgg

SEQ ID NO: 291475 - DNA, 20 bp, Artificial Sequence
  Description of Artificial Sequence: Synthetic oligonucleotide
  Target: LAMA2; (-) strand; PAM type: YTN; PAM sequence: TTC
ccttcatttccctaattcta

SEQ ID NO: 291476 - DNA, 20 bp, Artificial Sequence
  Description of Artificial Sequence: Synthetic oligonucleotide
  Target: LAMA2; (-) strand; PAM type: YTN; PAM sequence: TTT
cccttcatttccctaattct

SEQ ID NO: 291477 - DNA, 20 bp, Artificial Sequence
  Description of Artificial Sequence: Synthetic oligonucleotide
  Target: LAMA2; (-) strand; PAM type: YTN; PAM sequence: TTT
tcccttcatttccctaattc

SEQ ID NO: 291478 - DNA, 20 bp, Artificial Sequence
  Description of Artificial Sequence: Synthetic oligonucleotide
  Target: LAMA2; (-) strand; PAM type: YTN; PAM sequence: TTA
cccacattttcccttcattt

SEQ ID NO: 291479 - DNA, 20 bp, Artificial Sequence
  Description of Artificial Sequence: Synthetic oligonucleotide
  Target: LAMA2; (-) strand; PAM type: YTN; PAM sequence: TTT
acccacattttcccttcatt

SEQ ID NO: 291480 - DNA, 20 bp, Artificial Sequence
  Description of Artificial Sequence: Synthetic oligonucleotide
  Target: LAMA2; (-) strand; PAM type: YTN; PAM sequence: CTT
tacccacattttcccttcat

SEQ ID NO: 291481 - DNA, 20 bp, Artificial Sequence
  Description of Artificial Sequence: Synthetic oligonucleotide
  Target: LAMA2; (-) strand; PAM type: YTN; PAM sequence: TTC
tttacccacattttcccttc

SEQ ID NO: 291482 - DNA, 20 bp, Artificial Sequence
  Description of Artificial Sequence: Synthetic oligonucleotide
  Target: LAMA2; (-) strand; PAM type: YTN; PAM sequence: TTT
ctttacccacattttccctt

SEQ ID NO: 291483 - DNA, 20 bp, Artificial Sequence
  Description of Artificial Sequence: Synthetic oligonucleotide
  Target: LAMA2; (-) strand; PAM type: YTN; PAM sequence: TTT
tctttacccacattttccct

SEQ ID NO: 291484 - DNA, 20 bp, Artificial Sequence
  Description of Artificial Sequence: Synthetic oligonucleotide
  Target: LAMA2; (-) strand; PAM type: YTN; PAM sequence: TTT
ttctttacccacattttccc

SEQ ID NO: 291485 - DNA, 20 bp, Artificial Sequence
  Description of Artificial Sequence: Synthetic oligonucleotide
  Target: LAMA2; (-) strand; PAM type: YTN; PAM sequence: TTT
tttctttacccacattttcc

SEQ ID NO: 291486 - DNA, 20 bp, Artificial Sequence
  Description of Artificial Sequence: Synthetic oligonucleotide
  Target: LAMA2; (-) strand; PAM type: YTN; PAM sequence: CTT
ttttctttacccacattttc

SEQ ID NO: 291487 - DNA, 20 bp, Artificial Sequence
  Description of Artificial Sequence: Synthetic oligonucleotide
  Target: LAMA2; (-) strand; PAM type: YTN; PAM sequence: TTA
cttttttctttacccacatt

SEQ ID NO: 291488 - DNA, 20 bp, Artificial Sequence
  Description of Artificial Sequence: Synthetic oligonucleotide
  Target: LAMA2; (-) strand; PAM type: YTN; PAM sequence: TTT
acttttttctttacccacat

SEQ ID NO: 291489 - DNA, 20 bp, Artificial Sequence
  Description of Artificial Sequence: Synthetic oligonucleotide
  Target: LAMA2; (-) strand; PAM type: YTN; PAM sequence: TTC
aagtggtggatttacttttt

SEQ ID NO: 291490 - DNA, 20 bp, Artificial Sequence
  Description of Artificial Sequence: Synthetic oligonucleotide
  Target: LAMA2; (-) strand; PAM type: YTN; PAM sequence: CTC
atcattcaagtggtggattt

SEQ ID NO: 291491 - DNA, 20 bp, Artificial Sequence
  Description of Artificial Sequence: Synthetic oligonucleotide
  Target: LAMA2; (-) strand; PAM type: YTN; PAM sequence: TTA
aacctcatcattcaagtggt

SEQ ID NO: 291492 - DNA, 20 bp, Artificial Sequence
  Description of Artificial Sequence: Synthetic oligonucleotide
  Target: LAMA2; (-) strand; PAM type: YTN; PAM sequence: TTT
aaacctcatcattcaagtgg

SEQ ID NO: 291493 - DNA, 20 bp, Artificial Sequence
  Description of Artificial Sequence: Synthetic oligonucleotide
  Target: LAMA2; (-) strand; PAM type: YTN; PAM sequence: CTT
taaacctcatcattcaagtg

SEQ ID NO: 291494 - DNA, 20 bp, Artificial Sequence
  Description of Artificial Sequence: Synthetic oligonucleotide
  Target: LAMA2; (-) strand; PAM type: YTN; PAM sequence: TTC
cagtctttaaacctcatcat

SEQ ID NO: 291495 - DNA, 20 bp, Artificial Sequence
  Description of Artificial Sequence: Synthetic oligonucleotide
  Target: LAMA2; (-) strand; PAM type: YTN; PAM sequence: CTG
ttccagtctttaaacctcat

SEQ ID NO: 291496 - DNA, 20 bp, Artificial Sequence
  Description of Artificial Sequence: Synthetic oligonucleotide
  Target: LAMA2; (-) strand; PAM type: YTN; PAM sequence: TTC
tgttccagtctttaaacctc

SEQ ID NO: 291497 - DNA, 20 bp, Artificial Sequence
  Description of Artificial Sequence: Synthetic oligonucleotide
  Target: LAMA2; (-) strand; PAM type: YTN; PAM sequence: CTG
aaagttctgttccagtcttt

SEQ ID NO: 291498 - DNA, 20 bp, Artificial Sequence
  Description of Artificial Sequence: Synthetic oligonucleotide
  Target: LAMA2; (-) strand; PAM type: YTN; PAM sequence: CTA
tgaacaatgaagatcctgaa

SEQ ID NO: 291499 - DNA, 20 bp, Artificial Sequence
  Description of Artificial Sequence: Synthetic oligonucleotide
  Target: LAMA2; (-) strand; PAM type: YTN; PAM sequence: CTG
tagctatgaacaatgaagat

SEQ ID NO: 291500 - DNA, 20 bp, Artificial Sequence
  Description of Artificial Sequence: Synthetic oligonucleotide
  Target: LAMA2; (-) strand; PAM type: YTN; PAM sequence: TTG
gagcctgtagctatgaacaa

SEQ ID NO: 291501 - DNA, 20 bp, Artificial Sequence
  Description of Artificial Sequence: Synthetic oligonucleotide
  Target: LAMA2; (-) strand; PAM type: YTN; PAM sequence: TTC
caaattggagcctgtagcta

SEQ ID NO: 291502 - DNA, 20 bp, Artificial Sequence
  Description of Artificial Sequence: Synthetic oligonucleotide
  Target: LAMA2; (-) strand; PAM type: YTN; PAM sequence: CTA
tggccaattccaaattggag

SEQ ID NO: 291503 - DNA, 20 bp, Artificial Sequence
  Description of Artificial Sequence: Synthetic oligonucleotide
  Target: LAMA2; (-) strand; PAM type: YTN; PAM sequence: CTC
agagtgggtgtctatggcca

SEQ ID NO: 291504 - DNA, 20 bp, Artificial Sequence
  Description of Artificial Sequence: Synthetic oligonucleotide
  Target: LAMA2; (-) strand; PAM type: YTN; PAM sequence: TTC
tcagagtgggtgtctatggc

SEQ ID NO: 291505 - DNA, 20 bp, Artificial Sequence
  Description of Artificial Sequence: Synthetic oligonucleotide
  Target: LAMA2; (-) strand; PAM type: YTN; PAM sequence: CTT
ctcagagtgggtgtctatgg

SEQ ID NO: 291506 - DNA, 20 bp, Artificial Sequence
  Description of Artificial Sequence: Synthetic oligonucleotide
  Target: LAMA2; (-) strand; PAM type: YTN; PAM sequence: TTC
ccaaacttctcagagtgggt

SEQ ID NO: 291507 - DNA, 20 bp, Artificial Sequence
  Description of Artificial Sequence: Synthetic oligonucleotide
  Target: LAMA2; (-) strand; PAM type: YTN; PAM sequence: TTA
ttcccaaacttctcagagtg

SEQ ID NO: 291508 - DNA, 20 bp, Artificial Sequence
  Description of Artificial Sequence: Synthetic oligonucleotide
  Target: LAMA2; (-) strand; PAM type: YTN; PAM sequence: CTT
attcccaaacttctcagagt

SEQ ID NO: 291509 - DNA, 20 bp, Artificial Sequence
  Description of Artificial Sequence: Synthetic oligonucleotide
  Target: LAMA2; (-) strand; PAM type: YTN; PAM sequence: TTC
ttattcccaaacttctcaga

SEQ ID NO: 291510 - DNA, 20 bp, Artificial Sequence
  Description of Artificial Sequence: Synthetic oligonucleotide
  Target: LAMA2; (-) strand; PAM type: YTN; PAM sequence: TTT
cttattcccaaacttctcag

SEQ ID NO: 291511 - DNA, 20 bp, Artificial Sequence
  Description of Artificial Sequence: Synthetic oligonucleotide
  Target: LAMA2; (-) strand; PAM type: YTN; PAM sequence: TTT
tcttattcccaaacttctca

SEQ ID NO: 291512 - DNA, 20 bp, Artificial Sequence
  Description of Artificial Sequence: Synthetic oligonucleotide
  Target: LAMA2; (-) strand; PAM type: YTN; PAM sequence: CTT
ttcttattcccaaacttctc

SEQ ID NO: 291513 - DNA, 20 bp, Artificial Sequence
  Description of Artificial Sequence: Synthetic oligonucleotide
  Target: LAMA2; (-) strand; PAM type: YTN; PAM sequence: CTC
ttttcttattcccaaacttc

SEQ ID NO: 291514 - DNA, 20 bp, Artificial Sequence
  Description of Artificial Sequence: Synthetic oligonucleotide
  Target: LAMA2; (-) strand; PAM type: YTN; PAM sequence: TTC
tcttttcttattcccaaact

SEQ ID NO: 291515 - DNA, 20 bp, Artificial Sequence
  Description of Artificial Sequence: Synthetic oligonucleotide
  Target: LAMA2; (-) strand; PAM type: YTN; PAM sequence: TTT
ctcttttcttattcccaaac

SEQ ID NO: 291516 - DNA, 20 bp, Artificial Sequence
  Description of Artificial Sequence: Synthetic oligonucleotide
  Target: LAMA2; (-) strand; PAM type: YTN; PAM sequence: TTT
tctcttttcttattcccaaa

SEQ ID NO: 291517 - DNA, 20 bp, Artificial Sequence
  Description of Artificial Sequence: Synthetic oligonucleotide
  Target: LAMA2; (-) strand; PAM type: YTN; PAM sequence: TTA
atgtgttttctcttttctta

SEQ ID NO: 291518 - DNA, 20 bp, Artificial Sequence
  Description of Artificial Sequence: Synthetic oligonucleotide
  Target: LAMA2; (-) strand; PAM type: YTN; PAM sequence: CTT
aatgtgttttctcttttctt

SEQ ID NO: 291519 - DNA, 20 bp, Artificial Sequence
  Description of Artificial Sequence: Synthetic oligonucleotide
  Target: LAMA2; (-) strand; PAM type: YTN; PAM sequence: TTC
ttaatgtgttttctcttttc

SEQ ID NO: 291520 - DNA, 20 bp, Artificial Sequence
  Description of Artificial Sequence: Synthetic oligonucleotide
  Target: LAMA2; (-) strand; PAM type: YTN; PAM sequence: TTA
gttcttaatgtgttttctct

SEQ ID NO: 291521 - DNA, 20 bp, Artificial Sequence
  Description of Artificial Sequence: Synthetic oligonucleotide
  Target: LAMA2; (-) strand; PAM type: YTN; PAM sequence: TTT
agttcttaatgtgttttctc

SEQ ID NO: 291522 - DNA, 20 bp, Artificial Sequence
  Description of Artificial Sequence: Synthetic oligonucleotide
  Target: LAMA2; (-) strand; PAM type: YTN; PAM sequence: TTT
tagttcttaatgtgttttct

SEQ ID NO: 291523 - DNA, 20 bp, Artificial Sequence
  Description of Artificial Sequence: Synthetic oligonucleotide
  Target: LAMA2; (-) strand; PAM type: YTN; PAM sequence: TTA
cagttttagttcttaatgtg

SEQ ID NO: 291524 - DNA, 20 bp, Artificial Sequence
  Description of Artificial Sequence: Synthetic oligonucleotide
  Target: LAMA2; (-) strand; PAM type: YTN; PAM sequence: CTT
acagttttagttcttaatgt

SEQ ID NO: 291525 - DNA, 20 bp, Artificial Sequence
  Description of Artificial Sequence: Synthetic oligonucleotide
  Target: LAMA2; (-) strand; PAM type: YTN; PAM sequence: TTA
agaagccagtatgggtcctt

SEQ ID NO: 291526 - DNA, 20 bp, Artificial Sequence
  Description of Artificial Sequence: Synthetic oligonucleotide
  Target: LAMA2; (-) strand; PAM type: YTN; PAM sequence: TTT
aagaagccagtatgggtcct

SEQ ID NO: 291527 - DNA, 20 bp, Artificial Sequence
  Description of Artificial Sequence: Synthetic oligonucleotide
  Target: LAMA2; (-) strand; PAM type: YTN; PAM sequence: CTT
taagaagccagtatgggtcc

SEQ ID NO: 291528 - DNA, 20 bp, Artificial Sequence
  Description of Artificial Sequence: Synthetic oligonucleotide
  Target: LAMA2; (-) strand; PAM type: YTN; PAM sequence: TTC
ctttaagaagccagtatggg

SEQ ID NO: 291529 - DNA, 20 bp, Artificial Sequence
  Description of Artificial Sequence: Synthetic oligonucleotide
  Target: LAMA2; (-) strand; PAM type: YTN; PAM sequence: CTT
cctttaagaagccagtatgg

SEQ ID NO: 291530 - DNA, 20 bp, Artificial Sequence
  Description of Artificial Sequence: Synthetic oligonucleotide
  Target: LAMA2; (-) strand; PAM type: YTN; PAM sequence: CTC
agtaaaacttcctttaagaa

SEQ ID NO: 291531 - DNA, 20 bp, Artificial Sequence
  Description of Artificial Sequence: Synthetic oligonucleotide
  Target: LAMA2; (-) strand; PAM type: YTN; PAM sequence: TTC
tcagtaaaacttcctttaag

SEQ ID NO: 291532 - DNA, 20 bp, Artificial Sequence
  Description of Artificial Sequence: Synthetic oligonucleotide
  Target: LAMA2; (-) strand; PAM type: YTN; PAM sequence: TTA
aaattctcagtaaaacttcc

SEQ ID NO: 291533 - DNA, 20 bp, Artificial Sequence
  Description of Artificial Sequence: Synthetic oligonucleotide
  Target: LAMA2; (-) strand; PAM type: YTN; PAM sequence: TTG
aagattaaaattctcagtaa

SEQ ID NO: 291534 - DNA, 20 bp, Artificial Sequence
  Description of Artificial Sequence: Synthetic oligonucleotide
  Target: LAMA2; (-) strand; PAM type: YTN; PAM sequence: TTT
gaagattaaaattctcagta

SEQ ID NO: 291535 - DNA, 20 bp, Artificial Sequence
  Description of Artificial Sequence: Synthetic oligonucleotide
  Target: LAMA2; (-) strand; PAM type: YTN; PAM sequence: CTT
tgaagattaaaattctcagt

SEQ ID NO: 291536 - DNA, 20 bp, Artificial Sequence
  Description of Artificial Sequence: Synthetic oligonucleotide
  Target: LAMA2; (-) strand; PAM type: YTN; PAM sequence: TTA
ggctttgaagattaaaattc

SEQ ID NO: 291537 - DNA, 20 bp, Artificial Sequence
  Description of Artificial Sequence: Synthetic oligonucleotide
  Target: LAMA2; (-) strand; PAM type: YTN; PAM sequence: TTG
aatgtgaatgagagttaggc

SEQ ID NO: 291538 - DNA, 20 bp, Artificial Sequence
  Description of Artificial Sequence: Synthetic oligonucleotide
  Target: LAMA2; (-) strand; PAM type: YTN; PAM sequence: TTT
gaatgtgaatgagagttagg

SEQ ID NO: 291539 - DNA, 20 bp, Artificial Sequence
  Description of Artificial Sequence: Synthetic oligonucleotide
  Target: LAMA2; (-) strand; PAM type: YTN; PAM sequence: TTT
tgaatgtgaatgagagttag

SEQ ID NO: 291540 - DNA, 20 bp, Artificial Sequence
  Description of Artificial Sequence: Synthetic oligonucleotide
  Target: LAMA2; (-) strand; PAM type: YTN; PAM sequence: CTT
ttgaatgtgaatgagagtta

SEQ ID NO: 291541 - DNA, 20 bp, Artificial Sequence
  Description of Artificial Sequence: Synthetic oligonucleotide
  Target: LAMA2; (-) strand; PAM type: YTN; PAM sequence: CTC
atgtatatatcttttgaatg

SEQ ID NO: 291542 - DNA, 20 bp, Artificial Sequence
  Description of Artificial Sequence: Synthetic oligonucleotide
  Target: LAMA2; (-) strand; PAM type: YTN; PAM sequence: TTC
catcctcatgtatatatctt

SEQ ID NO: 291543 - DNA, 20 bp, Artificial Sequence
  Description of Artificial Sequence: Synthetic oligonucleotide
  Target: LAMA2; (-) strand; PAM type: YTN; PAM sequence: TTT
ccatcctcatgtatatatct

SEQ ID NO: 291544 - DNA, 20 bp, Artificial Sequence
  Description of Artificial Sequence: Synthetic oligonucleotide
  Target: LAMA2; (-) strand; PAM type: YTN; PAM sequence: TTC
cggacagtttccatcctcat

SEQ ID NO: 291545 - DNA, 20 bp, Artificial Sequence
  Description of Artificial Sequence: Synthetic oligonucleotide
  Target: LAMA2; (-) strand; PAM type: YTN; PAM sequence: TTT
ccggacagtttccatcctca

SEQ ID NO: 291546 - DNA, 20 bp, Artificial Sequence
  Description of Artificial Sequence: Synthetic oligonucleotide
  Target: LAMA2; (-) strand; PAM type: YTN; PAM sequence: TTT
tccggacagtttccatcctc

SEQ ID NO: 291547 - DNA, 20 bp, Artificial Sequence
  Description of Artificial Sequence: Synthetic oligonucleotide
  Target: LAMA2; (-) strand; PAM type: YTN; PAM sequence: TTC
attttccggacagtttccat

SEQ ID NO: 291548 - DNA, 20 bp, Artificial Sequence
  Description of Artificial Sequence: Synthetic oligonucleotide
  Target: LAMA2; (-) strand; PAM type: YTN; PAM sequence: CTA
ttcattttccggacagtttc

SEQ ID NO: 291549 - DNA, 20 bp, Artificial Sequence
  Description of Artificial Sequence: Synthetic oligonucleotide
  Target: LAMA2; (-) strand; PAM type: YTN; PAM sequence: TTC
cacgtgcagaggctattcat

SEQ ID NO: 291550 - DNA, 20 bp, Artificial Sequence
  Description of Artificial Sequence: Synthetic oligonucleotide
  Target: LAMA2; (-) strand; PAM type: YTN; PAM sequence: TTT
ccacgtgcagaggctattca

SEQ ID NO: 291551 - DNA, 20 bp, Artificial Sequence
  Description of Artificial Sequence: Synthetic oligonucleotide
  Target: LAMA2; (-) strand; PAM type: YTN; PAM sequence: TTA
gggaatcataatttccacgt

SEQ ID NO: 291552 - DNA, 20 bp, Artificial Sequence
  Description of Artificial Sequence: Synthetic oligonucleotide
  Target: LAMA2; (-) strand; PAM type: YTN; PAM sequence: TTT
agggaatcataatttccacg

SEQ ID NO: 291553 - DNA, 20 bp, Artificial Sequence
  Description of Artificial Sequence: Synthetic oligonucleotide
  Target: LAMA2; (-) strand; PAM type: YTN; PAM sequence: CTT
tagggaatcataatttccac

SEQ ID NO: 291554 - DNA, 20 bp, Artificial Sequence
  Description of Artificial Sequence: Synthetic oligonucleotide
  Target: LAMA2; (-) strand; PAM type: YTN; PAM sequence: CTG
caaagtgcctttagggaatc

SEQ ID NO: 291555 - DNA, 20 bp, Artificial Sequence
  Description of Artificial Sequence: Synthetic oligonucleotide
  Target: LAMA2; (-) strand; PAM type: YTN; PAM sequence: TTA
ctgcaaagtgcctttaggga

SEQ ID NO: 291556 - DNA, 20 bp, Artificial Sequence
  Description of Artificial Sequence: Synthetic oligonucleotide
  Target: LAMA2; (-) strand; PAM type: YTN; PAM sequence: CTG
gttactgcaaagtgccttta

SEQ ID NO: 291557 - DNA, 20 bp, Artificial Sequence
  Description of Artificial Sequence: Synthetic oligonucleotide
  Target: LAMA2; (-) strand; PAM type: YTN; PAM sequence: TTC
ctggttactgcaaagtgcct

SEQ ID NO: 291558 - DNA, 20 bp, Artificial Sequence
  Description of Artificial Sequence: Synthetic oligonucleotide
  Target: LAMA2; (-) strand; PAM type: YTN; PAM sequence: TTG
caaaataattcctggttact

SEQ ID NO: 291559 - DNA, 20 bp, Artificial Sequence
  Description of Artificial Sequence: Synthetic oligonucleotide
  Target: LAMA2; (-) strand; PAM type: YTN; PAM sequence: TTA
gttgcaaaataattcctggt

SEQ ID NO: 291560 - DNA, 20 bp, Artificial Sequence
  Description of Artificial Sequence: Synthetic oligonucleotide
  Target: LAMA2; (-) strand; PAM type: YTN; PAM sequence: TTT
agttgcaaaataattcctgg

SEQ ID NO: 291561 - DNA, 20 bp, Artificial Sequence
  Description of Artificial Sequence: Synthetic oligonucleotide
  Target: LAMA2; (-) strand; PAM type: YTN; PAM sequence: TTT
tagttgcaaaataattcctg

SEQ ID NO: 291562 - DNA, 20 bp, Artificial Sequence
  Description of Artificial Sequence: Synthetic oligonucleotide
  Target: LAMA2; (-) strand; PAM type: YTN; PAM sequence: CTC
atattttagttgcaaaataa

SEQ ID NO: 291563 - DNA, 20 bp, Artificial Sequence
  Description of Artificial Sequence: Synthetic oligonucleotide
  Target: LAMA2; (-) strand; PAM type: YTN; PAM sequence: CTG
cctcatattttagttgcaaa

SEQ ID NO: 291564 - DNA, 20 bp, Artificial Sequence
  Description of Artificial Sequence: Synthetic oligonucleotide
  Target: LAMA2; (-) strand; PAM type: YTN; PAM sequence: TTC
tgcctcatattttagttgca

SEQ ID NO: 291565 - DNA, 20 bp, Artificial Sequence
  Description of Artificial Sequence: Synthetic oligonucleotide
  Target: LAMA2; (-) strand; PAM type: YTN; PAM sequence: TTT
ctgcctcatattttagttgc

SEQ ID NO: 291566 - DNA, 20 bp, Artificial Sequence
  Description of Artificial Sequence: Synthetic oligonucleotide
  Target: LAMA2; (-) strand; PAM type: YTN; PAM sequence: TTA
tccacatcaaatttctgcct

SEQ ID NO: 291567 - DNA, 20 bp, Artificial Sequence
  Description of Artificial Sequence: Synthetic oligonucleotide
  Target: LAMA2; (-) strand; PAM type: YTN; PAM sequence: TTT
atccacatcaaatttctgcc

SEQ ID NO: 291568 - DNA, 20 bp, Artificial Sequence
  Description of Artificial Sequence: Synthetic oligonucleotide
  Target: LAMA2; (-) strand; PAM type: YTN; PAM sequence: TTC
aatatttatccacatcaaat

SEQ ID NO: 291569 - DNA, 20 bp, Artificial Sequence
  Description of Artificial Sequence: Synthetic oligonucleotide
  Target: LAMA2; (-) strand; PAM type: YTN; PAM sequence: TTT
caatatttatccacatcaaa

SEQ ID NO: 291570 - DNA, 20 bp, Artificial Sequence
  Description of Artificial Sequence: Synthetic oligonucleotide
  Target: LAMA2; (-) strand; PAM type: YTN; PAM sequence: TTT
tcaatatttatccacatcaa

SEQ ID NO: 291571 - DNA, 20 bp, Artificial Sequence
  Description of Artificial Sequence: Synthetic oligonucleotide
  Target: LAMA2; (-) strand; PAM type: YTN; PAM sequence: CTT
ttcaatatttatccacatca

SEQ ID NO: 291572 - DNA, 20 bp, Artificial Sequence
  Description of Artificial Sequence: Synthetic oligonucleotide
  Target: LAMA2; (-) strand; PAM type: YTN; PAM sequence: CTG
tgcagacttttcaatattta

SEQ ID NO: 291573 - DNA, 20 bp, Artificial Sequence
  Description of Artificial Sequence: Synthetic oligonucleotide
  Target: LAMA2; (-) strand; PAM type: YTN; PAM sequence: CTA
ctgtgcagacttttcaatat

SEQ ID NO: 291574 - DNA, 20 bp, Artificial Sequence
  Description of Artificial Sequence: Synthetic oligonucleotide
  Target: LAMA2; (-) strand; PAM type: YTN; PAM sequence: TTC
agataaaactactgtgcaga

SEQ ID NO: 291575 - DNA, 20 bp, Artificial Sequence
  Description of Artificial Sequence: Synthetic oligonucleotide
  Target: LAMA2; (-) strand; PAM type: YTN; PAM sequence: TTA
gatagttcagataaaactac

SEQ ID NO: 291576 - DNA, 20 bp, Artificial Sequence
  Description of Artificial Sequence: Synthetic oligonucleotide
  Target: LAMA2; (-) strand; PAM type: YTN; PAM sequence: TTT
agatagttcagataaaacta

SEQ ID NO: 291577 - DNA, 20 bp, Artificial Sequence
  Description of Artificial Sequence: Synthetic oligonucleotide
  Target: LAMA2; (-) strand; PAM type: YTN; PAM sequence: TTT
tagatagttcagataaaact

SEQ ID NO: 291578 - DNA, 20 bp, Artificial Sequence
  Description of Artificial Sequence: Synthetic oligonucleotide
  Target: LAMA2; (-) strand; PAM type: YTN; PAM sequence: TTC
aaatcatggagttttagata

SEQ ID NO: 291579 - DNA, 20 bp, Artificial Sequence
  Description of Artificial Sequence: Synthetic oligonucleotide
  Target: LAMA2; (-) strand; PAM type: YTN; PAM sequence: TTT
caaatcatggagttttagat

SEQ ID NO: 291580 - DNA, 20 bp, Artificial Sequence
  Description of Artificial Sequence: Synthetic oligonucleotide
  Target: LAMA2; (-) strand; PAM type: YTN; PAM sequence: TTT
tcaaatcatggagttttaga

SEQ ID NO: 291581 - DNA, 20 bp, Artificial Sequence
  Description of Artificial Sequence: Synthetic oligonucleotide
  Target: LAMA2; (-) strand; PAM type: YTN; PAM sequence: TTC
caattttcaaatcatggagt

SEQ ID NO: 291582 - DNA, 20 bp, Artificial Sequence
  Description of Artificial Sequence: Synthetic oligonucleotide
  Target: LAMA2; (-) strand; PAM type: YTN; PAM sequence: CTA
ttccaattttcaaatcatgg

SEQ ID NO: 291583 - DNA, 20 bp, Artificial Sequence
  Description of Artificial Sequence: Synthetic oligonucleotide
  Target: LAMA2; (-) strand; PAM type: YTN; PAM sequence: TTC
tattccaattttcaaatcat

SEQ ID NO: 291584 - DNA, 20 bp, Artificial Sequence
  Description of Artificial Sequence: Synthetic oligonucleotide
  Target: LAMA2; (-) strand; PAM type: YTN; PAM sequence: TTT
ctattccaattttcaaatca

SEQ ID NO: 291585 - DNA, 20 bp, Artificial Sequence
  Description of Artificial Sequence: Synthetic oligonucleotide
  Target: LAMA2; (-) strand; PAM type: YTN; PAM sequence: TTT
tctattccaattttcaaatc

SEQ ID NO: 291586 - DNA, 20 bp, Artificial Sequence
  Description of Artificial Sequence: Synthetic oligonucleotide
  Target: LAMA2; (-) strand; PAM type: YTN; PAM sequence: CTG
ttttctattccaattttcaa

SEQ ID NO: 291587 - DNA, 20 bp, Artificial Sequence
  Description of Artificial Sequence: Synthetic oligonucleotide
  Target: LAMA2; (-) strand; PAM type: YTN; PAM sequence: CTG
gtaaaatgtataatctgttt

SEQ ID NO: 291588 - DNA, 20 bp, Artificial Sequence
  Description of Artificial Sequence: Synthetic oligonucleotide
  Target: LAMA2; (-) strand; PAM type: YTN; PAM sequence: TTA
aatgacacaagagctggtaa

SEQ ID NO: 291589 - DNA, 20 bp, Artificial Sequence
  Description of Artificial Sequence: Synthetic oligonucleotide
  Target: LAMA2; (-) strand; PAM type: YTN; PAM sequence: TTC
aagaccagttaaatgacaca

SEQ ID NO: 291590 - DNA, 20 bp, Artificial Sequence
  Description of Artificial Sequence: Synthetic oligonucleotide
  Target: LAMA2; (-) strand; PAM type: YTN; PAM sequence: TTT
caagaccagttaaatgacac

SEQ ID NO: 291591 - DNA, 20 bp, Artificial Sequence
  Description of Artificial Sequence: Synthetic oligonucleotide
  Target: LAMA2; (-) strand; PAM type: YTN; PAM sequence: CTC
ccacagtgtttcaagaccag

SEQ ID NO: 291592 - DNA, 20 bp, Artificial Sequence
  Description of Artificial Sequence: Synthetic oligonucleotide
  Target: LAMA2; (-) strand; PAM type: YTN; PAM sequence: TTC
ctcccacagtgtttcaagac

SEQ ID NO: 291593 - DNA, 20 bp, Artificial Sequence
  Description of Artificial Sequence: Synthetic oligonucleotide
  Target: LAMA2; (-) strand; PAM type: YTN; PAM sequence: TTT
cctcccacagtgtttcaaga

SEQ ID NO: 291594 - DNA, 20 bp, Artificial Sequence
  Description of Artificial Sequence: Synthetic oligonucleotide
  Target: LAMA2; (-) strand; PAM type: YTN; PAM sequence: TTT
tcctcccacagtgtttcaag

SEQ ID NO: 291595 - DNA, 20 bp, Artificial Sequence
  Description of Artificial Sequence: Synthetic oligonucleotide
  Target: LAMA2; (-) strand; PAM type: YTN; PAM sequence: CTA
ttttcctcccacagtgtttc

SEQ ID NO: 291596 - DNA, 20 bp, Artificial Sequence
  Description of Artificial Sequence: Synthetic oligonucleotide
  Target: LAMA2; (-) strand; PAM type: YTN; PAM sequence: TTA
atgtaggctattttcctccc

SEQ ID NO: 291597 - DNA, 20 bp, Artificial Sequence
  Description of Artificial Sequence: Synthetic oligonucleotide
  Target: LAMA2; (-) strand; PAM type: YTN; PAM sequence: TTT
aatgtaggctattttcctcc

SEQ ID NO: 291598 - DNA, 20 bp, Artificial Sequence
  Description of Artificial Sequence: Synthetic oligonucleotide
  Target: LAMA2; (-) strand; PAM type: YTN; PAM sequence: CTT
taatgtaggctattttcctc

SEQ ID NO: 291599 - DNA, 20 bp, Artificial Sequence
  Description of Artificial Sequence: Synthetic oligonucleotide
  Target: LAMA2; (-) strand; PAM type: YTN; PAM sequence: TTG
taggagtaaaagcaaagaat

SEQ ID NO: 291600 - DNA, 20 bp, Artificial Sequence
  Description of Artificial Sequence: Synthetic oligonucleotide
  Target: LAMA2; (-) strand; PAM type: YTN; PAM sequence: TTT
gtaggagtaaaagcaaagaa

SEQ ID NO: 291601 - DNA, 20 bp, Artificial Sequence
  Description of Artificial Sequence: Synthetic oligonucleotide
  Target: LAMA2; (-) strand; PAM type: YTN; PAM sequence: TTT
tgtaggagtaaaagcaaaga

SEQ ID NO: 291602 - DNA, 20 bp, Artificial Sequence
  Description of Artificial Sequence: Synthetic oligonucleotide
  Target: LAMA2; (-) strand; PAM type: YTN; PAM sequence: CTA
gattttgtaggagtaaaagc

SEQ ID NO: 291603 - DNA, 20 bp, Artificial Sequence
  Description of Artificial Sequence: Synthetic oligonucleotide
  Target: LAMA2; (-) strand; PAM type: YTN; PAM sequence: TTA
aagtcctagattttgtagga

SEQ ID NO: 291604 - DNA, 20 bp, Artificial Sequence
  Description of Artificial Sequence: Synthetic oligonucleotide
  Target: LAMA2; (-) strand; PAM type: YTN; PAM sequence: TTT
aaagtcctagattttgtagg

SEQ ID NO: 291605 - DNA, 20 bp, Artificial Sequence
  Description of Artificial Sequence: Synthetic oligonucleotide
  Target: LAMA2; (-) strand; PAM type: YTN; PAM sequence: TTT
taaagtcctagattttgtag

SEQ ID NO: 291606 - DNA, 20 bp, Artificial Sequence
  Description of Artificial Sequence: Synthetic oligonucleotide
  Target: LAMA2; (-) strand; PAM type: YTN; PAM sequence: TTT
ttaaagtcctagattttgta

SEQ ID NO: 291607 - DNA, 20 bp, Artificial Sequence
  Description of Artificial Sequence: Synthetic oligonucleotide
  Target: LAMA2; (-) strand; PAM type: YTN; PAM sequence: TTC
atttttaaagtcctagattt

SEQ ID NO: 291608 - DNA, 20 bp, Artificial Sequence
  Description of Artificial Sequence: Synthetic oligonucleotide
  Target: LAMA2; (-) strand; PAM type: YTN; PAM sequence: TTA
aaatattcatttttaaagtc

SEQ ID NO: 291609 - DNA, 20 bp, Artificial Sequence
  Description of Artificial Sequence: Synthetic oligonucleotide
  Target: LAMA2; (-) strand; PAM type: YTN; PAM sequence: CTT
aaaatattcatttttaaagt

SEQ ID NO: 291610 - DNA, 20 bp, Artificial Sequence
  Description of Artificial Sequence: Synthetic oligonucleotide
  Target: LAMA2; (-) strand; PAM type: YTN; PAM sequence: TTA
aagtgcttaaaatattcatt

SEQ ID NO: 291611 - DNA, 20 bp, Artificial Sequence
  Description of Artificial Sequence: Synthetic oligonucleotide
  Target: LAMA2; (-) strand; PAM type: YTN; PAM sequence: TTT
aaagtgcttaaaatattcat

SEQ ID NO: 291612 - DNA, 20 bp, Artificial Sequence
  Description of Artificial Sequence: Synthetic oligonucleotide
  Target: LAMA2; (-) strand; PAM type: YTN; PAM sequence: TTA
ggaatttaaagtgcttaaaa

SEQ ID NO: 291613 - DNA, 20 bp, Artificial Sequence
  Description of Artificial Sequence: Synthetic oligonucleotide
  Target: LAMA2; (-) strand; PAM type: YTN; PAM sequence: TTA
agcaagcccatgtagttagg

SEQ ID NO: 291614 - DNA, 20 bp, Artificial Sequence
  Description of Artificial Sequence: Synthetic oligonucleotide
  Target: LAMA2; (-) strand; PAM type: YTN; PAM sequence: TTT
aagcaagcccatgtagttag

SEQ ID NO: 291615 - DNA, 20 bp, Artificial Sequence
  Description of Artificial Sequence: Synthetic oligonucleotide
  Target: LAMA2; (-) strand; PAM type: YTN; PAM sequence: TTA
tttaagcaagcccatgtagt

SEQ ID NO: 291616 - DNA, 20 bp, Artificial Sequence
  Description of Artificial Sequence: Synthetic oligonucleotide
  Target: LAMA2; (-) strand; PAM type: YTN; PAM sequence: TTT
atttaagcaagcccatgtag

SEQ ID NO: 291617 - DNA, 20 bp, Artificial Sequence
  Description of Artificial Sequence: Synthetic oligonucleotide
  Target: LAMA2; (-) strand; PAM type: YTN; PAM sequence: CTA
gtatttatttaagcaagccc

SEQ ID NO: 291618 - DNA, 20 bp, Artificial Sequence
  Description of Artificial Sequence: Synthetic oligonucleotide
  Target: LAMA2; (-) strand; PAM type: YTN; PAM sequence: TTG
ctagtatttatttaagcaag

SEQ ID NO: 291619 - DNA, 20 bp, Artificial Sequence
  Description of Artificial Sequence: Synthetic oligonucleotide
  Target: LAMA2; (-) strand; PAM type: YTN; PAM sequence: TTT
gctagtatttatttaagcaa

SEQ ID NO: 291620 - DNA, 20 bp, Artificial Sequence
  Description of Artificial Sequence: Synthetic oligonucleotide
  Target: LAMA2; (-) strand; PAM type: YTN; PAM sequence: TTA
tgaatttgctagtatttatt

SEQ ID NO: 291621 - DNA, 20 bp, Artificial Sequence
  Description of Artificial Sequence: Synthetic oligonucleotide
  Target: LAMA2; (-) strand; PAM type: YTN; PAM sequence: TTT
atgaatttgctagtatttat

SEQ ID NO: 291622 - DNA, 20 bp, Artificial Sequence
  Description of Artificial Sequence: Synthetic oligonucleotide
  Target: LAMA2; (-) strand; PAM type: YTN; PAM sequence: CTT
tatgaatttgctagtattta

SEQ ID NO: 291623 - DNA, 20 bp, Artificial Sequence
  Description of Artificial Sequence: Synthetic oligonucleotide
  Target: LAMA2; (-) strand; PAM type: YTN; PAM sequence: CTA
ctttatgaatttgctagtat

SEQ ID NO: 291624 - DNA, 20 bp, Artificial Sequence
  Description of Artificial Sequence: Synthetic oligonucleotide
  Target: LAMA2; (-) strand; PAM type: YTN; PAM sequence: TTC
tactttatgaatttgctagt

SEQ ID NO: 291625 - DNA, 20 bp, Artificial Sequence
  Description of Artificial Sequence: Synthetic oligonucleotide
  Target: LAMA2; (-) strand; PAM type: YTN; PAM sequence: TTT
ctactttatgaatttgctag

SEQ ID NO: 291626 - DNA, 20 bp, Artificial Sequence
  Description of Artificial Sequence: Synthetic oligonucleotide
  Target: LAMA2; (-) strand; PAM type: YTN; PAM sequence: CTT
tctactttatgaatttgcta

SEQ ID NO: 291627 - DNA, 20 bp, Artificial Sequence
  Description of Artificial Sequence: Synthetic oligonucleotide
  Target: LAMA2; (-) strand; PAM type: YTN; PAM sequence: TTA
atggcaggaggactttctac

SEQ ID NO: 291628 - DNA, 20 bp, Artificial Sequence
  Description of Artificial Sequence: Synthetic oligonucleotide
  Target: LAMA2; (-) strand; PAM type: YTN; PAM sequence: TTT
aatggcaggaggactttcta

SEQ ID NO: 291629 - DNA, 20 bp, Artificial Sequence
  Description of Artificial Sequence: Synthetic oligonucleotide
  Target: LAMA2; (-) strand; PAM type: YTN; PAM sequence: TTT
taatggcaggaggactttct

SEQ ID NO: 291630 - DNA, 20 bp, Artificial Sequence
  Description of Artificial Sequence: Synthetic oligonucleotide
  Target: LAMA2; (-) strand; PAM type: YTN; PAM sequence: CTT
ttaatggcaggaggactttc

SEQ ID NO: 291631 - DNA, 20 bp, Artificial Sequence
  Description of Artificial Sequence: Synthetic oligonucleotide
  Target: LAMA2; (-) strand; PAM type: YTN; PAM sequence: CTC
agtaaatgtagatagtcact

SEQ ID NO: 291632 - DNA, 20 bp, Artificial Sequence
  Description of Artificial Sequence: Synthetic oligonucleotide
  Target: LAMA2; (-) strand; PAM type: YTN; PAM sequence: CTC
tcagtaaatgtagatagtca

SEQ ID NO: 291633 - DNA, 20 bp, Artificial Sequence
  Description of Artificial Sequence: Synthetic oligonucleotide
  Target: LAMA2; (-) strand; PAM type: YTN; PAM sequence: CTC
tctcagtaaatgtagatagt

SEQ ID NO: 291634 - DNA, 20 bp, Artificial Sequence
  Description of Artificial Sequence: Synthetic oligonucleotide
  Target: LAMA2; (-) strand; PAM type: YTN; PAM sequence: TTA
catatgtggaagatatcact

SEQ ID NO: 291635 - DNA, 20 bp, Artificial Sequence
  Description of Artificial Sequence: Synthetic oligonucleotide
  Target: LAMA2; (-) strand; PAM type: YTN; PAM sequence: CTT
acatatgtggaagatatcac

SEQ ID NO: 291636 - DNA, 20 bp, Artificial Sequence
  Description of Artificial Sequence: Synthetic oligonucleotide
  Target: LAMA2; (-) strand; PAM type: YTN; PAM sequence: TTC
ttacatatgtggaagatatc

SEQ ID NO: 291637 - DNA, 20 bp, Artificial Sequence
  Description of Artificial Sequence: Synthetic oligonucleotide
  Target: LAMA2; (-) strand; PAM type: YTN; PAM sequence: TTT
cttacatatgtggaagatat

SEQ ID NO: 291638 - DNA, 20 bp, Artificial Sequence
  Description of Artificial Sequence: Synthetic oligonucleotide
  Target: LAMA2; (-) strand; PAM type: YTN; PAM sequence: TTT
tcttacatatgtggaagata

SEQ ID NO: 291639 - DNA, 20 bp, Artificial Sequence
  Description of Artificial Sequence: Synthetic oligonucleotide
  Target: LAMA2; (-) strand; PAM type: YTN; PAM sequence: TTT
ttcttacatatgtggaagat

SEQ ID NO: 291640 - DNA, 20 bp, Artificial Sequence
  Description of Artificial Sequence: Synthetic oligonucleotide
  Target: LAMA2; (-) strand; PAM type: YTN; PAM sequence: TTT
tttcttacatatgtggaaga

SEQ ID NO: 291641 - DNA, 20 bp, Artificial Sequence
  Description of Artificial Sequence: Synthetic oligonucleotide
  Target: LAMA2; (-) strand; PAM type: YTN; PAM sequence: TTT
ttttcttacatatgtggaag

SEQ ID NO: 291642 - DNA, 20 bp, Artificial Sequence
  Description of Artificial Sequence: Synthetic oligonucleotide
  Target: LAMA2; (-) strand; PAM type: YTN; PAM sequence: TTT
tttttcttacatatgtggaa

SEQ ID NO: 291643 - DNA, 20 bp, Artificial Sequence
  Description of Artificial Sequence: Synthetic oligonucleotide
  Target: LAMA2; (-) strand; PAM type: YTN; PAM sequence: CTT
ttttttcttacatatgtgga

SEQ ID NO: 291644 - DNA, 20 bp, Artificial Sequence
  Description of Artificial Sequence: Synthetic oligonucleotide
  Target: LAMA2; (-) strand; PAM type: YTN; PAM sequence: CTA
atgacttttttttcttacat

SEQ ID NO: 291645 - DNA, 20 bp, Artificial Sequence
  Description of Artificial Sequence: Synthetic oligonucleotide
  Target: LAMA2; (-) strand; PAM type: YTN; PAM sequence: TTC
ctaatgacttttttttctta

SEQ ID NO: 291646 - DNA, 20 bp, Artificial Sequence
  Description of Artificial Sequence: Synthetic oligonucleotide
  Target: LAMA2; (-) strand; PAM type: YTN; PAM sequence: TTC
attcctaatgactttttttt

SEQ ID NO: 291647 - DNA, 20 bp, Artificial Sequence
  Description of Artificial Sequence: Synthetic oligonucleotide
  Target: LAMA2; (-) strand; PAM type: YTN; PAM sequence: TTG
atagacatgttcattcctaa

SEQ ID NO: 291648 - DNA, 20 bp, Artificial Sequence
  Description of Artificial Sequence: Synthetic oligonucleotide
  Target: LAMA2; (-) strand; PAM type: YTN; PAM sequence: CTT
gatagacatgttcattccta

SEQ ID NO: 291649 - DNA, 20 bp, Artificial Sequence
  Description of Artificial Sequence: Synthetic oligonucleotide
  Target: LAMA2; (-) strand; PAM type: YTN; PAM sequence: TTA
aaatgaatcttgatagacat

SEQ ID NO: 291650 - DNA, 20 bp, Artificial Sequence
  Description of Artificial Sequence: Synthetic oligonucleotide
  Target: LAMA2; (-) strand; PAM type: YTN; PAM sequence: TTT
aaaatgaatcttgatagaca

SEQ ID NO: 291651 - DNA, 20 bp, Artificial Sequence
  Description of Artificial Sequence: Synthetic oligonucleotide
  Target: LAMA2; (-) strand; PAM type: YTN; PAM sequence: CTG
tatttaaaatgaatcttgat

SEQ ID NO: 291652 - DNA, 20 bp, Artificial Sequence
  Description of Artificial Sequence: Synthetic oligonucleotide
  Target: LAMA2; (-) strand; PAM type: YTN; PAM sequence: CTC
cctgtatttaaaatgaatct

SEQ ID NO: 291653 - DNA, 20 bp, Artificial Sequence
  Description of Artificial Sequence: Synthetic oligonucleotide
  Target: LAMA2; (-) strand; PAM type: YTN; PAM sequence: CTC
ctccctgtatttaaaatgaa

SEQ ID NO: 291654 - DNA, 20 bp, Artificial Sequence
  Description of Artificial Sequence: Synthetic oligonucleotide
  Target: LAMA2; (-) strand; PAM type: YTN; PAM sequence: CTC
ctcctccctgtatttaaaat

SEQ ID NO: 291655 - DNA, 20 bp, Artificial Sequence
  Description of Artificial Sequence: Synthetic oligonucleotide
  Target: LAMA2; (-) strand; PAM type: YTN; PAM sequence: CTC
tcctcctccctgtatttaaa

SEQ ID NO: 291656 - DNA, 20 bp, Artificial Sequence
  Description of Artificial Sequence: Synthetic oligonucleotide
  Target: LAMA2; (-) strand; PAM type: YTN; PAM sequence: CTC
tctcctcctccctgtattta

SEQ ID NO: 291657 - DNA, 20 bp, Artificial Sequence
  Description of Artificial Sequence: Synthetic oligonucleotide
  Target: LAMA2; (-) strand; PAM type: YTN; PAM sequence: TTC
ctctctcctcctccctgtat

SEQ ID NO: 291658 - DNA, 20 bp, Artificial Sequence
  Description of Artificial Sequence: Synthetic oligonucleotide
  Target: LAMA2; (-) strand; PAM type: YTN; PAM sequence: CTT
cctctctcctcctccctgta

SEQ ID NO: 291659 - DNA, 20 bp, Artificial Sequence
  Description of Artificial Sequence: Synthetic oligonucleotide
  Target: LAMA2; (-) strand; PAM type: YTN; PAM sequence: TTG
ccatcttcctctctcctcct

SEQ ID NO: 291660 - DNA, 20 bp, Artificial Sequence
  Description of Artificial Sequence: Synthetic oligonucleotide
  Target: LAMA2; (-) strand; PAM type: YTN; PAM sequence: CTT
gccatcttcctctctcctcc

SEQ ID NO: 291661 - DNA, 20 bp, Artificial Sequence
  Description of Artificial Sequence: Synthetic oligonucleotide
  Target: LAMA2; (-) strand; PAM type: YTN; PAM sequence: TTC
acaaccttgccatcttcctc

SEQ ID NO: 291662 - DNA, 20 bp, Artificial Sequence
  Description of Artificial Sequence: Synthetic oligonucleotide
  Target: LAMA2; (-) strand; PAM type: YTN; PAM sequence: TTT
cacaaccttgccatcttcct

SEQ ID NO: 291663 - DNA, 20 bp, Artificial Sequence
  Description of Artificial Sequence: Synthetic oligonucleotide
  Target: LAMA2; (-) strand; PAM type: YTN; PAM sequence: CTT
tcacaaccttgccatcttcc

SEQ ID NO: 291664 - DNA, 20 bp, Artificial Sequence
  Description of Artificial Sequence: Synthetic oligonucleotide
  Target: LAMA2; (-) strand; PAM type: YTN; PAM sequence: CTC
tttcacaaccttgccatctt

SEQ ID NO: 291665 - DNA, 20 bp, Artificial Sequence
  Description of Artificial Sequence: Synthetic oligonucleotide
  Target: LAMA2; (-) strand; PAM type: YTN; PAM sequence: TTC
actctttcacaaccttgcca

SEQ ID NO: 291666 - DNA, 20 bp, Artificial Sequence
  Description of Artificial Sequence: Synthetic oligonucleotide
  Target: LAMA2; (-) strand; PAM type: YTN; PAM sequence: TTC
attcactctttcacaacctt

SEQ ID NO: 291667 - DNA, 20 bp, Artificial Sequence
  Description of Artificial Sequence: Synthetic oligonucleotide
  Target: LAMA2; (-) strand; PAM type: YTN; PAM sequence: TTC
attcattcactctttcacaa

SEQ ID NO: 291668 - DNA, 20 bp, Artificial Sequence
  Description of Artificial Sequence: Synthetic oligonucleotide
  Target: LAMA2; (-) strand; PAM type: YTN; PAM sequence: TTC
attcattcattcactctttc

SEQ ID NO: 291669 - DNA, 20 bp, Artificial Sequence
  Description of Artificial Sequence: Synthetic oligonucleotide
  Target: LAMA2; (-) strand; PAM type: YTN; PAM sequence: TTC
attcattcattcattcactc

SEQ ID NO: 291670 - DNA, 20 bp, Artificial Sequence
  Description of Artificial Sequence: Synthetic oligonucleotide
  Target: LAMA2; (-) strand; PAM type: YTN; PAM sequence: TTC
attcattcattcattcattc

SEQ ID NO: 291671 - DNA, 20 bp, Artificial Sequence
  Description of Artificial Sequence: Synthetic oligonucleotide
  Target: LAMA2; (-) strand; PAM type: YTN; PAM sequence: CTA
taattcattcattcattcat

SEQ ID NO: 291672 - DNA, 20 bp, Artificial Sequence
  Description of Artificial Sequence: Synthetic oligonucleotide
  Target: LAMA2; (-) strand; PAM type: YTN; PAM sequence: TTC
tataattcattcattcattc

SEQ ID NO: 291673 - DNA, 20 bp, Artificial Sequence
  Description of Artificial Sequence: Synthetic oligonucleotide
  Target: LAMA2; (-) strand; PAM type: YTN; PAM sequence: TTT
ctataattcattcattcatt

SEQ ID NO: 291674 - DNA, 20 bp, Artificial Sequence
  Description of Artificial Sequence: Synthetic oligonucleotide
  Target: LAMA2; (-) strand; PAM type: YTN; PAM sequence: CTT
tctataattcattcattcat

SEQ ID NO: 291675 - DNA, 20 bp, Artificial Sequence
  Description of Artificial Sequence: Synthetic oligonucleotide
  Target: LAMA2; (-) strand; PAM type: YTN; PAM sequence: CTG
tgcagaagcatatagctttc

SEQ ID NO: 291676 - DNA, 20 bp, Artificial Sequence
  Description of Artificial Sequence: Synthetic oligonucleotide
  Target: LAMA2; (-) strand; PAM type: YTN; PAM sequence: CTC
aaagctgtgcagaagcatat

SEQ ID NO: 291677 - DNA, 20 bp, Artificial Sequence
  Description of Artificial Sequence: Synthetic oligonucleotide
  Target: LAMA2; (-) strand; PAM type: YTN; PAM sequence: CTC
aatctcaaagctgtgcagaa

SEQ ID NO: 291678 - DNA, 20 bp, Artificial Sequence
  Description of Artificial Sequence: Synthetic oligonucleotide
  Target: LAMA2; (-) strand; PAM type: YTN; PAM sequence: CTC
cccatctcaatctcaaagct

SEQ ID NO: 291679 - DNA, 20 bp, Artificial Sequence
  Description of Artificial Sequence: Synthetic oligonucleotide
  Target: LAMA2; (-) strand; PAM type: YTN; PAM sequence: TTC
aagtagaaatgtaaataagg

SEQ ID NO: 291680 - DNA, 20 bp, Artificial Sequence
  Description of Artificial Sequence: Synthetic oligonucleotide
  Target: LAMA2; (-) strand; PAM type: YTN; PAM sequence: TTT
caagtagaaatgtaaataag

SEQ ID NO: 291681 - DNA, 20 bp, Artificial Sequence
  Description of Artificial Sequence: Synthetic oligonucleotide
  Target: LAMA2; (-) strand; PAM type: YTN; PAM sequence: TTA
catttcaagtagaaatgtaa

SEQ ID NO: 291682 - DNA, 20 bp, Artificial Sequence
  Description of Artificial Sequence: Synthetic oligonucleotide
  Target: LAMA2; (-) strand; PAM type: YTN; PAM sequence: TTA
aaacagttacatttcaagta

SEQ ID NO: 291683 - DNA, 20 bp, Artificial Sequence
  Description of Artificial Sequence: Synthetic oligonucleotide
  Target: LAMA2; (-) strand; PAM type: YTN; PAM sequence: CTC
agtataaaattaaaacagtt

SEQ ID NO: 291684 - DNA, 20 bp, Artificial Sequence
  Description of Artificial Sequence: Synthetic oligonucleotide
  Target: LAMA2; (-) strand; PAM type: YTN; PAM sequence: TTG
ctcagtataaaattaaaaca

SEQ ID NO: 291685 - DNA, 20 bp, Artificial Sequence
  Description of Artificial Sequence: Synthetic oligonucleotide
  Target: LAMA2; (-) strand; PAM type: YTN; PAM sequence: CTT
gctcagtataaaattaaaac

SEQ ID NO: 291686 - DNA, 20 bp, Artificial Sequence
  Description of Artificial Sequence: Synthetic oligonucleotide
  Target: LAMA2; (-) strand; PAM type: YTN; PAM sequence: TTG
tccttgctcagtataaaatt

SEQ ID NO: 291687 - DNA, 20 bp, Artificial Sequence
  Description of Artificial Sequence: Synthetic oligonucleotide
  Target: LAMA2; (-) strand; PAM type: YTN; PAM sequence: TTA
aagtaataccattgtccttg

SEQ ID NO: 291688 - DNA, 20 bp, Artificial Sequence
  Description of Artificial Sequence: Synthetic oligonucleotide
  Target: LAMA2; (-) strand; PAM type: YTN; PAM sequence: CTC
aatattaaagtaataccatt

SEQ ID NO: 291689 - DNA, 20 bp, Artificial Sequence
  Description of Artificial Sequence: Synthetic oligonucleotide
  Target: LAMA2; (-) strand; PAM type: YTN; PAM sequence: TTC
tcaatattaaagtaatacca

SEQ ID NO: 291690 - DNA, 20 bp, Artificial Sequence
  Description of Artificial Sequence: Synthetic oligonucleotide
  Target: LAMA2; (-) strand; PAM type: YTN; PAM sequence: TTT
ctcaatattaaagtaatacc

SEQ ID NO: 291691 - DNA, 20 bp, Artificial Sequence
  Description of Artificial Sequence: Synthetic oligonucleotide
  Target: LAMA2; (-) strand; PAM type: YTN; PAM sequence: TTT
tctcaatattaaagtaatac

SEQ ID NO: 291692 - DNA, 20 bp, Artificial Sequence
  Description of Artificial Sequence: Synthetic oligonucleotide
  Target: LAMA2; (-) strand; PAM type: YTN; PAM sequence: TTT
ttctcaatattaaagtaata

SEQ ID NO: 291693 - DNA, 20 bp, Artificial Sequence
  Description of Artificial Sequence: Synthetic oligonucleotide
  Target: LAMA2; (-) strand; PAM type: YTN; PAM sequence: TTT
tttctcaatattaaagtaat

SEQ ID NO: 291694 - DNA, 20 bp, Artificial Sequence
  Description of Artificial Sequence: Synthetic oligonucleotide
  Target: LAMA2; (-) strand; PAM type: YTN; PAM sequence: CTA
gttttttctcaatattaaag

SEQ ID NO: 291695 - DNA, 20 bp, Artificial Sequence
  Description of Artificial Sequence: Synthetic oligonucleotide
  Target: LAMA2; (-) strand; PAM type: YTN; PAM sequence: TTA
aaaataaataaaacaaacat

SEQ ID NO: 291696 - DNA, 20 bp, Artificial Sequence
  Description of Artificial Sequence: Synthetic oligonucleotide
  Target: LAMA2; (-) strand; PAM type: YTN; PAM sequence: CTT
aaaaataaataaaacaaaca

SEQ ID NO: 291697 - DNA, 20 bp, Artificial Sequence
  Description of Artificial Sequence: Synthetic oligonucleotide
  Target: LAMA2; (-) strand; PAM type: YTN; PAM sequence: TTC
cccagtgataagaccaaacc

SEQ ID NO: 291698 - DNA, 20 bp, Artificial Sequence
  Description of Artificial Sequence: Synthetic oligonucleotide
  Target: LAMA2; (-) strand; PAM type: YTN; PAM sequence: TTT
ccccagtgataagaccaaac

SEQ ID NO: 291699 - DNA, 20 bp, Artificial Sequence
  Description of Artificial Sequence: Synthetic oligonucleotide
  Target: LAMA2; (-) strand; PAM type: YTN; PAM sequence: TTT
tccccagtgataagaccaaa

SEQ ID NO: 291700 - DNA, 20 bp, Artificial Sequence
  Description of Artificial Sequence: Synthetic oligonucleotide
  Target: LAMA2; (-) strand; PAM type: YTN; PAM sequence: TTT
ttccccagtgataagaccaa

SEQ ID NO: 291701 - DNA, 20 bp, Artificial Sequence
  Description of Artificial Sequence: Synthetic oligonucleotide
  Target: LAMA2; (-) strand; PAM type: YTN; PAM sequence: CTG
catttttccccagtgataag

SEQ ID NO: 291702 - DNA, 20 bp, Artificial Sequence
  Description of Artificial Sequence: Synthetic oligonucleotide
  Target: LAMA2; (-) strand; PAM type: YTN; PAM sequence: CTG
tgtctgcatttttccccagt

SEQ ID NO: 291703 - DNA, 20 bp, Artificial Sequence
  Description of Artificial Sequence: Synthetic oligonucleotide
  Target: LAMA2; (-) strand; PAM type: YTN; PAM sequence: TTA
tctgtgtctgcatttttccc

SEQ ID NO: 291704 - DNA, 20 bp, Artificial Sequence
  Description of Artificial Sequence: Synthetic oligonucleotide
  Target: LAMA2; (-) strand; PAM type: YTN; PAM sequence: TTA
cagatgggtatgaccattat

SEQ ID NO: 291705 - DNA, 20 bp, Artificial Sequence
  Description of Artificial Sequence: Synthetic oligonucleotide
  Target: LAMA2; (-) strand; PAM type: YTN; PAM sequence: TTT
acagatgggtatgaccatta

SEQ ID NO: 291706 - DNA, 20 bp, Artificial Sequence
  Description of Artificial Sequence: Synthetic oligonucleotide
  Target: LAMA2; (-) strand; PAM type: YTN; PAM sequence: TTT
tacagatgggtatgaccatt

SEQ ID NO: 291707 - DNA, 20 bp, Artificial Sequence
  Description of Artificial Sequence: Synthetic oligonucleotide
  Target: LAMA2; (-) strand; PAM type: YTN; PAM sequence: TTA
tgttttacagatgggtatga

SEQ ID NO: 291708 - DNA, 20 bp, Artificial Sequence
  Description of Artificial Sequence: Synthetic oligonucleotide
  Target: LAMA2; (-) strand; PAM type: YTN; PAM sequence: TTT
atgttttacagatgggtatg

SEQ ID NO: 291709 - DNA, 20 bp, Artificial Sequence
  Description of Artificial Sequence: Synthetic oligonucleotide
  Target: LAMA2; (-) strand; PAM type: YTN; PAM sequence: TTG
tttatgttttacagatgggt

SEQ ID NO: 291710 - DNA, 20 bp, Artificial Sequence
  Description of Artificial Sequence: Synthetic oligonucleotide
  Target: LAMA2; (-) strand; PAM type: YTN; PAM sequence: TTA
attgtttatgttttacagat

SEQ ID NO: 291711 - DNA, 20 bp, Artificial Sequence
  Description of Artificial Sequence: Synthetic oligonucleotide
  Target: LAMA2; (-) strand; PAM type: YTN; PAM sequence: CTT
aattgtttatgttttacaga

SEQ ID NO: 291712 - DNA, 20 bp, Artificial Sequence
  Description of Artificial Sequence: Synthetic oligonucleotide
  Target: LAMA2; (-) strand; PAM type: YTN; PAM sequence: CTA
tcacttaattgtttatgttt

SEQ ID NO: 291713 - DNA, 20 bp, Artificial Sequence
  Description of Artificial Sequence: Synthetic oligonucleotide
  Target: LAMA2; (-) strand; PAM type: YTN; PAM sequence: CTC
tatcacttaattgtttatgt

SEQ ID NO: 291714 - DNA, 20 bp, Artificial Sequence
  Description of Artificial Sequence: Synthetic oligonucleotide
  Target: LAMA2; (-) strand; PAM type: YTN; PAM sequence: TTG
aataaactctatcacttaat

SEQ ID NO: 291715 - DNA, 20 bp, Artificial Sequence
  Description of Artificial Sequence: Synthetic oligonucleotide
  Target: LAMA2; (-) strand; PAM type: YTN; PAM sequence: CTT
gaataaactctatcacttaa

SEQ ID NO: 291716 - DNA, 20 bp, Artificial Sequence
  Description of Artificial Sequence: Synthetic oligonucleotide
  Target: LAMA2; (-) strand; PAM type: YTN; PAM sequence: CTC
ttgaataaactctatcactt

SEQ ID NO: 291717 - DNA, 20 bp, Artificial Sequence
  Description of Artificial Sequence: Synthetic oligonucleotide
  Target: LAMA2; (-) strand; PAM type: YTN; PAM sequence: CTG
taacgaatatctcttgaata

SEQ ID NO: 291718 - DNA, 20 bp, Artificial Sequence
  Description of Artificial Sequence: Synthetic oligonucleotide
  Target: LAMA2; (-) strand; PAM type: YTN; PAM sequence: TTG
aaaacactgtaacgaatatc

SEQ ID NO: 291719 - DNA, 20 bp, Artificial Sequence
  Description of Artificial Sequence: Synthetic oligonucleotide
  Target: LAMA2; (-) strand; PAM type: YTN; PAM sequence: TTT
gaaaacactgtaacgaatat

SEQ ID NO: 291720 - DNA, 20 bp, Artificial Sequence
  Description of Artificial Sequence: Synthetic oligonucleotide
  Target: LAMA2; (-) strand; PAM type: YTN; PAM sequence: CTT
tgaaaacactgtaacgaata

SEQ ID NO: 291721 - DNA, 20 bp, Artificial Sequence
  Description of Artificial Sequence: Synthetic oligonucleotide
  Target: LAMA2; (-) strand; PAM type: YTN; PAM sequence: TTC
ctttgaaaacactgtaacga

SEQ ID NO: 291722 - DNA, 20 bp, Artificial Sequence
  Description of Artificial Sequence: Synthetic oligonucleotide
  Target: LAMA2; (-) strand; PAM type: YTN; PAM sequence: TTT
cctttgaaaacactgtaacg

SEQ ID NO: 291723 - DNA, 20 bp, Artificial Sequence
  Description of Artificial Sequence: Synthetic oligonucleotide
  Target: LAMA2; (-) strand; PAM type: YTN; PAM sequence: CTA
agtttcctttgaaaacactg

SEQ ID NO: 291724 - DNA, 20 bp, Artificial Sequence
  Description of Artificial Sequence: Synthetic oligonucleotide
  Target: LAMA2; (-) strand; PAM type: YTN; PAM sequence: TTG
tccctaagtttcctttgaaa

SEQ ID NO: 291725 - DNA, 20 bp, Artificial Sequence
  Description of Artificial Sequence: Synthetic oligonucleotide
  Target: LAMA2; (-) strand; PAM type: YTN; PAM sequence: CTA
gggagattgtccctaagttt

SEQ ID NO: 291726 - DNA, 20 bp, Artificial Sequence
  Description of Artificial Sequence: Synthetic oligonucleotide
  Target: LAMA2; (-) strand; PAM type: YTN; PAM sequence: CTG
acacacaagcaggtacatgt

SEQ ID NO: 291727 - DNA, 20 bp, Artificial Sequence
  Description of Artificial Sequence: Synthetic oligonucleotide
  Target: LAMA2; (-) strand; PAM type: YTN; PAM sequence: TTA
agtcaaactgacacacaagc

SEQ ID NO: 291728 - DNA, 20 bp, Artificial Sequence
  Description of Artificial Sequence: Synthetic oligonucleotide
  Target: LAMA2; (-) strand; PAM type: YTN; PAM sequence: TTT
aagtcaaactgacacacaag

SEQ ID NO: 291729 - DNA, 20 bp, Artificial Sequence
  Description of Artificial Sequence: Synthetic oligonucleotide
  Target: LAMA2; (-) strand; PAM type: YTN; PAM sequence: TTA
aaccaaagatttaagtcaaa

SEQ ID NO: 291730 - DNA, 20 bp, Artificial Sequence
  Description of Artificial Sequence: Synthetic oligonucleotide
  Target: LAMA2; (-) strand; PAM type: YTN; PAM sequence: TTT
aaaccaaagatttaagtcaa

SEQ ID NO: 291731 - DNA, 20 bp, Artificial Sequence
  Description of Artificial Sequence: Synthetic oligonucleotide
  Target: LAMA2; (-) strand; PAM type: YTN; PAM sequence: TTG
tttaaaccaaagatttaagt

SEQ ID NO: 291732 - DNA, 20 bp, Artificial Sequence
  Description of Artificial Sequence: Synthetic oligonucleotide
  Target: LAMA2; (-) strand; PAM type: YTN; PAM sequence: TTG
ttgtttaaaccaaagattta

SEQ ID NO: 291733 - DNA, 20 bp, Artificial Sequence
  Description of Artificial Sequence: Synthetic oligonucleotide
  Target: LAMA2; (-) strand; PAM type: YTN; PAM sequence: TTG
ttgttgtttaaaccaaagat

SEQ ID NO: 291734 - DNA, 20 bp, Artificial Sequence
  Description of Artificial Sequence: Synthetic oligonucleotide
  Target: LAMA2; (-) strand; PAM type: YTN; PAM sequence: TTG
ttgttgttgtttaaaccaaa

SEQ ID NO: 291735 - DNA, 20 bp, Artificial Sequence
  Description of Artificial Sequence: Synthetic oligonucleotide
  Target: LAMA2; (-) strand; PAM type: YTN; PAM sequence: TTT
gttgttgttgtttaaaccaa

SEQ ID NO: 291736 - DNA, 20 bp, Artificial Sequence
  Description of Artificial Sequence: Synthetic oligonucleotide
  Target: LAMA2; (-) strand; PAM type: YTN; PAM sequence: TTT
tgttgttgttgtttaaacca

SEQ ID NO: 291737 - DNA, 20 bp, Artificial Sequence
  Description of Artificial Sequence: Synthetic oligonucleotide
  Target: LAMA2; (-) strand; PAM type: YTN; PAM sequence: TTT
ttgttgttgttgtttaaacc

SEQ ID NO: 291738 - DNA, 20 bp, Artificial Sequence
  Description of Artificial Sequence: Synthetic oligonucleotide
  Target: LAMA2; (-) strand; PAM type: YTN; PAM sequence: TTT
tttgttgttgttgtttaaac

SEQ ID NO: 291739 - DNA, 20 bp, Artificial Sequence
  Description of Artificial Sequence: Synthetic oligonucleotide
  Target: LAMA2; (-) strand; PAM type: YTN; PAM sequence: TTT
ttttgttgttgttgtttaaa

SEQ ID NO: 291740 - DNA, 20 bp, Artificial Sequence
  Description of Artificial Sequence: Synthetic oligonucleotide
  Target: LAMA2; (-) strand; PAM type: YTN; PAM sequence: CTT
tttttgttgttgttgtttaa

SEQ ID NO: 291741 - DNA, 20 bp, Artificial Sequence
  Description of Artificial Sequence: Synthetic oligonucleotide
  Target: LAMA2; (-) strand; PAM type: YTN; PAM sequence: TTA
ggtacctttttttgttgttg

SEQ ID NO: 291742 - DNA, 20 bp, Artificial Sequence
  Description of Artificial Sequence: Synthetic oligonucleotide
  Target: LAMA2; (-) strand; PAM type: YTN; PAM sequence: CTG
ttaggtacctttttttgttg

SEQ ID NO: 291743 - DNA, 20 bp, Artificial Sequence
  Description of Artificial Sequence: Synthetic oligonucleotide
  Target: LAMA2; (-) strand; PAM type: YTN; PAM sequence: TTA
tcactgttaggtaccttttt

SEQ ID NO: 291744 - DNA, 20 bp, Artificial Sequence
  Description of Artificial Sequence: Synthetic oligonucleotide
  Target: LAMA2; (-) strand; PAM type: YTN; PAM sequence: TTA
aatatagaagattatcactg

SEQ ID NO: 291745 - DNA, 20 bp, Artificial Sequence
  Description of Artificial Sequence: Synthetic oligonucleotide
  Target: LAMA2; (-) strand; PAM type: YTN; PAM sequence: TTT
aaatatagaagattatcact

SEQ ID NO: 291746 - DNA, 20 bp, Artificial Sequence
  Description of Artificial Sequence: Synthetic oligonucleotide
  Target: LAMA2; (-) strand; PAM type: YTN; PAM sequence: TTT
taaatatagaagattatcac

SEQ ID NO: 291747 - DNA, 20 bp, Artificial Sequence
  Description of Artificial Sequence: Synthetic oligonucleotide
  Target: LAMA2; (-) strand; PAM type: YTN; PAM sequence: TTG
attttaaatatagaagatta

SEQ ID NO: 291748 - DNA, 20 bp, Artificial Sequence
  Description of Artificial Sequence: Synthetic oligonucleotide
  Target: LAMA2; (-) strand; PAM type: YTN; PAM sequence: TTT
gattttaaatatagaagatt

SEQ ID NO: 291749 - DNA, 20 bp, Artificial Sequence
  Description of Artificial Sequence: Synthetic oligonucleotide
  Target: LAMA2; (-) strand; PAM type: YTN; PAM sequence: TTT
tgattttaaatatagaagat

SEQ ID NO: 291750 - DNA, 20 bp, Artificial Sequence
  Description of Artificial Sequence: Synthetic oligonucleotide
  Target: LAMA2; (-) strand; PAM type: YTN; PAM sequence: CTT
ttgattttaaatatagaaga

SEQ ID NO: 291751 - DNA, 20 bp, Artificial Sequence
  Description of Artificial Sequence: Synthetic oligonucleotide
  Target: LAMA2; (-) strand; PAM type: YTN; PAM sequence: CTA
gagcttttgattttaaatat

SEQ ID NO: 291752 - DNA, 20 bp, Artificial Sequence
  Description of Artificial Sequence: Synthetic oligonucleotide
  Target: LAMA2; (-) strand; PAM type: YTN; PAM sequence: TTC
tagagcttttgattttaaat

SEQ ID NO: 291753 - DNA, 20 bp, Artificial Sequence
  Description of Artificial Sequence: Synthetic oligonucleotide
  Target: LAMA2; (-) strand; PAM type: YTN; PAM sequence: TTA
ttctagagcttttgatttta

SEQ ID NO: 291754 - DNA, 20 bp, Artificial Sequence
  Description of Artificial Sequence: Synthetic oligonucleotide
  Target: LAMA2; (-) strand; PAM type: YTN; PAM sequence: TTT
attctagagcttttgatttt

SEQ ID NO: 291755 - DNA, 20 bp, Artificial Sequence
  Description of Artificial Sequence: Synthetic oligonucleotide
  Target: LAMA2; (-) strand; PAM type: YTN; PAM sequence: TTT
tattctagagcttttgattt

SEQ ID NO: 291756 - DNA, 20 bp, Artificial Sequence
  Description of Artificial Sequence: Synthetic oligonucleotide
  Target: LAMA2; (-) strand; PAM type: YTN; PAM sequence: CTT
ttattctagagcttttgatt

SEQ ID NO: 291757 - DNA, 20 bp, Artificial Sequence
  Description of Artificial Sequence: Synthetic oligonucleotide
  Target: LAMA2; (-) strand; PAM type: YTN; PAM sequence: CTA
cttttattctagagcttttg

SEQ ID NO: 291758 - DNA, 20 bp, Artificial Sequence
  Description of Artificial Sequence: Synthetic oligonucleotide
  Target: LAMA2; (-) strand; PAM type: YTN; PAM sequence: CTC
tacttttattctagagcttt

SEQ ID NO: 291759 - DNA, 20 bp, Artificial Sequence
  Description of Artificial Sequence: Synthetic oligonucleotide
  Target: LAMA2; (-) strand; PAM type: YTN; PAM sequence: TTA
tagcctctacttttattcta

SEQ ID NO: 291760 - DNA, 20 bp, Artificial Sequence
  Description of Artificial Sequence: Synthetic oligonucleotide
  Target: LAMA2; (-) strand; PAM type: YTN; PAM sequence: TTA
aaatcagaattatagcctct

SEQ ID NO: 291761 - DNA, 20 bp, Artificial Sequence
  Description of Artificial Sequence: Synthetic oligonucleotide
  Target: LAMA2; (-) strand; PAM type: YTN; PAM sequence: TTG
ttaaaatcagaattatagcc

SEQ ID NO: 291762 - DNA, 20 bp, Artificial Sequence
  Description of Artificial Sequence: Synthetic oligonucleotide
  Target: LAMA2; (-) strand; PAM type: YTN; PAM sequence: TTT
gttaaaatcagaattatagc

SEQ ID NO: 291763 - DNA, 20 bp, Artificial Sequence
  Description of Artificial Sequence: Synthetic oligonucleotide
  Target: LAMA2; (-) strand; PAM type: YTN; PAM sequence: TTT
tgttaaaatcagaattatag

SEQ ID NO: 291764 - DNA, 20 bp, Artificial Sequence
  Description of Artificial Sequence: Synthetic oligonucleotide
  Target: LAMA2; (-) strand; PAM type: YTN; PAM sequence: TTT
ttgttaaaatcagaattata

SEQ ID NO: 291765 - DNA, 20 bp, Artificial Sequence
  Description of Artificial Sequence: Synthetic oligonucleotide
  Target: LAMA2; (-) strand; PAM type: YTN; PAM sequence: CTG
agcagtttttgttaaaatca

SEQ ID NO: 291766 - DNA, 20 bp, Artificial Sequence
  Description of Artificial Sequence: Synthetic oligonucleotide
  Target: LAMA2; (-) strand; PAM type: YTN; PAM sequence: TTC
tgagcagtttttgttaaaat

SEQ ID NO: 291767 - DNA, 20 bp, Artificial Sequence
  Description of Artificial Sequence: Synthetic oligonucleotide
  Target: LAMA2; (-) strand; PAM type: YTN; PAM sequence: CTT
ctgagcagtttttgttaaaa

SEQ ID NO: 291768 - DNA, 20 bp, Artificial Sequence
  Description of Artificial Sequence: Synthetic oligonucleotide
  Target: LAMA2; (-) strand; PAM type: YTN; PAM sequence: TTC
aaatcttctgagcagttttt

SEQ ID NO: 291769 - DNA, 20 bp, Artificial Sequence
  Description of Artificial Sequence: Synthetic oligonucleotide
  Target: LAMA2; (-) strand; PAM type: YTN; PAM sequence: CTT
caaatcttctgagcagtttt

SEQ ID NO: 291770 - DNA, 20 bp, Artificial Sequence
  Description of Artificial Sequence: Synthetic oligonucleotide
  Target: LAMA2; (-) strand; PAM type: YTN; PAM sequence: TTA
tatgataacttcaaatcttc

SEQ ID NO: 291771 - DNA, 20 bp, Artificial Sequence
  Description of Artificial Sequence: Synthetic oligonucleotide
  Target: LAMA2; (-) strand; PAM type: YTN; PAM sequence: CTA
gttatatgataacttcaaat

SEQ ID NO: 291772 - DNA, 20 bp, Artificial Sequence
  Description of Artificial Sequence: Synthetic oligonucleotide
  Target: LAMA2; (-) strand; PAM type: YTN; PAM sequence: TTC
tagttatatgataacttcaa

SEQ ID NO: 291773 - DNA, 20 bp, Artificial Sequence
  Description of Artificial Sequence: Synthetic oligonucleotide
  Target: LAMA2; (-) strand; PAM type: YTN; PAM sequence: TTT
ctagttatatgataacttca

SEQ ID NO: 291774 - DNA, 20 bp, Artificial Sequence
  Description of Artificial Sequence: Synthetic oligonucleotide
  Target: LAMA2; (-) strand; PAM type: YTN; PAM sequence: TTA
tttctagttatatgataact

SEQ ID NO: 291775 - DNA, 20 bp, Artificial Sequence
  Description of Artificial Sequence: Synthetic oligonucleotide
  Target: LAMA2; (-) strand; PAM type: YTN; PAM sequence: TTG
aagaaatattatttctagtt

SEQ ID NO: 291776 - DNA, 20 bp, Artificial Sequence
  Description of Artificial Sequence: Synthetic oligonucleotide
  Target: LAMA2; (-) strand; PAM type: YTN; PAM sequence: TTA
agagcagttgaagaaatatt

SEQ ID NO: 291777 - DNA, 20 bp, Artificial Sequence
  Description of Artificial Sequence: Synthetic oligonucleotide
  Target: LAMA2; (-) strand; PAM type: YTN; PAM sequence: TTT
aagagcagttgaagaaatat

SEQ ID NO: 291778 - DNA, 20 bp, Artificial Sequence
  Description of Artificial Sequence: Synthetic oligonucleotide
  Target: LAMA2; (-) strand; PAM type: YTN; PAM sequence: TTA
gaaagcaggaaaacatggaa

SEQ ID NO: 291779 - DNA, 20 bp, Artificial Sequence
  Description of Artificial Sequence: Synthetic oligonucleotide
  Target: LAMA2; (-) strand; PAM type: YTN; PAM sequence: TTT
agaaagcaggaaaacatgga

SEQ ID NO: 291780 - DNA, 20 bp, Artificial Sequence
  Description of Artificial Sequence: Synthetic oligonucleotide
  Target: LAMA2; (-) strand; PAM type: YTN; PAM sequence: TTA
tgaaatacatcataggttta

SEQ ID NO: 291781 - DNA, 20 bp, Artificial Sequence
  Description of Artificial Sequence: Synthetic oligonucleotide
  Target: LAMA2; (-) strand; PAM type: YTN; PAM sequence: TTA
atgtgattatgaaatacatc

SEQ ID NO: 291782 - DNA, 20 bp, Artificial Sequence
  Description of Artificial Sequence: Synthetic oligonucleotide
  Target: LAMA2; (-) strand; PAM type: YTN; PAM sequence: CTC
gatgcaattaatgtgattat

SEQ ID NO: 291783 - DNA, 20 bp, Artificial Sequence
  Description of Artificial Sequence: Synthetic oligonucleotide
  Target: LAMA2; (-) strand; PAM type: YTN; PAM sequence: CTC
ctcgatgcaattaatgtgat

SEQ ID NO: 291784 - DNA, 20 bp, Artificial Sequence
  Description of Artificial Sequence: Synthetic oligonucleotide
  Target: LAMA2; (-) strand; PAM type: YTN; PAM sequence: CTC
accctcctcgatgcaattaa

SEQ ID NO: 291785 - DNA, 20 bp, Artificial Sequence
  Description of Artificial Sequence: Synthetic oligonucleotide
  Target: LAMA2; (-) strand; PAM type: YTN; PAM sequence: CTC
actcaccctcctcgatgcaa

SEQ ID NO: 291786 - DNA, 20 bp, Artificial Sequence
  Description of Artificial Sequence: Synthetic oligonucleotide
  Target: LAMA2; (-) strand; PAM type: YTN; PAM sequence: CTC
catctcactcaccctcctcg

SEQ ID NO: 291787 - DNA, 20 bp, Artificial Sequence
  Description of Artificial Sequence: Synthetic oligonucleotide
  Target: LAMA2; (-) strand; PAM type: YTN; PAM sequence: TTC
tccatctcactcaccctcct

SEQ ID NO: 291788 - DNA, 20 bp, Artificial Sequence
  Description of Artificial Sequence: Synthetic oligonucleotide
  Target: LAMA2; (-) strand; PAM type: YTN; PAM sequence: TTA
aataagttctccatctcact

SEQ ID NO: 291789 - DNA, 20 bp, Artificial Sequence
  Description of Artificial Sequence: Synthetic oligonucleotide
  Target: LAMA2; (-) strand; PAM type: YTN; PAM sequence: TTT
aaataagttctccatctcac

SEQ ID NO: 291790 - DNA, 20 bp, Artificial Sequence
  Description of Artificial Sequence: Synthetic oligonucleotide
  Target: LAMA2; (-) strand; PAM type: YTN; PAM sequence: TTA
gaaatgaaaatttaaataag

SEQ ID NO: 291791 - DNA, 20 bp, Artificial Sequence
  Description of Artificial Sequence: Synthetic oligonucleotide
  Target: LAMA2; (-) strand; PAM type: YTN; PAM sequence: CTG
tgagtaaaggaaaagaagag

SEQ ID NO: 291792 - DNA, 20 bp, Artificial Sequence
  Description of Artificial Sequence: Synthetic oligonucleotide
  Target: LAMA2; (-) strand; PAM type: YTN; PAM sequence: TTC
tgtgagtaaaggaaaagaag

SEQ ID NO: 291793 - DNA, 20 bp, Artificial Sequence
  Description of Artificial Sequence: Synthetic oligonucleotide
  Target: LAMA2; (-) strand; PAM type: YTN; PAM sequence: CTG
tgtaaacattctgtgagtaa

SEQ ID NO: 291794 - DNA, 20 bp, Artificial Sequence
  Description of Artificial Sequence: Synthetic oligonucleotide
  Target: LAMA2; (-) strand; PAM type: YTN; PAM sequence: CTA
actgtgtaaacattctgtga

SEQ ID NO: 291795 - DNA, 20 bp, Artificial Sequence
  Description of Artificial Sequence: Synthetic oligonucleotide
  Target: LAMA2; (-) strand; PAM type: YTN; PAM sequence: TTA
ggaaagctaactgtgtaaac

SEQ ID NO: 291796 - DNA, 20 bp, Artificial Sequence
  Description of Artificial Sequence: Synthetic oligonucleotide
  Target: LAMA2; (-) strand; PAM type: YTN; PAM sequence: CTT
aggaaagctaactgtgtaaa

SEQ ID NO: 291797 - DNA, 20 bp, Artificial Sequence
  Description of Artificial Sequence: Synthetic oligonucleotide
  Target: LAMA2; (-) strand; PAM type: YTN; PAM sequence: CTC
cacaaaaccaggcttaggaa

SEQ ID NO: 291798 - DNA, 20 bp, Artificial Sequence
  Description of Artificial Sequence: Synthetic oligonucleotide
  Target: LAMA2; (-) strand; PAM type: YTN; PAM sequence: TTG
gcacaggggagagctccaca

SEQ ID NO: 291799 - DNA, 20 bp, Artificial Sequence
  Description of Artificial Sequence: Synthetic oligonucleotide
  Target: LAMA2; (-) strand; PAM type: YTN; PAM sequence: CTA
catcaattggcacaggggag

SEQ ID NO: 291800 - DNA, 20 bp, Artificial Sequence
  Description of Artificial Sequence: Synthetic oligonucleotide
  Target: LAMA2; (-) strand; PAM type: YTN; PAM sequence: TTC
ctacatcaattggcacaggg

SEQ ID NO: 291801 - DNA, 20 bp, Artificial Sequence
  Description of Artificial Sequence: Synthetic oligonucleotide
  Target: LAMA2; (-) strand; PAM type: YTN; PAM sequence: CTG
ttcctacatcaattggcaca

SEQ ID NO: 291802 - DNA, 20 bp, Artificial Sequence
  Description of Artificial Sequence: Synthetic oligonucleotide
  Target: LAMA2; (-) strand; PAM type: YTN; PAM sequence: TTC
tgttcctacatcaattggca

SEQ ID NO: 291803 - DNA, 20 bp, Artificial Sequence
  Description of Artificial Sequence: Synthetic oligonucleotide
  Target: LAMA2; (-) strand; PAM type: YTN; PAM sequence: TTT
ctgttcctacatcaattggc

SEQ ID NO: 291804 - DNA, 20 bp, Artificial Sequence
  Description of Artificial Sequence: Synthetic oligonucleotide
  Target: LAMA2; (-) strand; PAM type: YTN; PAM sequence: TTG
atttctgttcctacatcaat

SEQ ID NO: 291805 - DNA, 20 bp, Artificial Sequence
  Description of Artificial Sequence: Synthetic oligonucleotide
  Target: LAMA2; (-) strand; PAM type: YTN; PAM sequence: CTG
aatgacaggttgatttctgt

SEQ ID NO: 291806 - DNA, 20 bp, Artificial Sequence
  Description of Artificial Sequence: Synthetic oligonucleotide
  Target: LAMA2; (-) strand; PAM type: YTN; PAM sequence: TTG
gtgctgaatgacaggttgat

SEQ ID NO: 291807 - DNA, 20 bp, Artificial Sequence
  Description of Artificial Sequence: Synthetic oligonucleotide
  Target: LAMA2; (-) strand; PAM type: YTN; PAM sequence: CTT
ggtgctgaatgacaggttga

SEQ ID NO: 291808 - DNA, 20 bp, Artificial Sequence
  Description of Artificial Sequence: Synthetic oligonucleotide
  Target: LAMA2; (-) strand; PAM type: YTN; PAM sequence: TTC
ttggtgctgaatgacaggtt

SEQ ID NO: 291809 - DNA, 20 bp, Artificial Sequence
  Description of Artificial Sequence: Synthetic oligonucleotide
  Target: LAMA2; (-) strand; PAM type: YTN; PAM sequence: CTC
attcttggtgctgaatgaca

SEQ ID NO: 291810 - DNA, 20 bp, Artificial Sequence
  Description of Artificial Sequence: Synthetic oligonucleotide
  Target: LAMA2; (-) strand; PAM type: YTN; PAM sequence: TTC
ccaaaagaatgatgccggac

SEQ ID NO: 291811 - DNA, 20 bp, Artificial Sequence
  Description of Artificial Sequence: Synthetic oligonucleotide
  Target: LAMA2; (-) strand; PAM type: YTN; PAM sequence: CTT
cccaaaagaatgatgccgga

SEQ ID NO: 291812 - DNA, 20 bp, Artificial Sequence
  Description of Artificial Sequence: Synthetic oligonucleotide
  Target: LAMA2; (-) strand; PAM type: YTN; PAM sequence: CTC
cacttcccaaaagaatgatg

SEQ ID NO: 291813 - DNA, 20 bp, Artificial Sequence
  Description of Artificial Sequence: Synthetic oligonucleotide
  Target: LAMA2; (-) strand; PAM type: YTN; PAM sequence: CTG
gtgtccctccacttcccaaa

SEQ ID NO: 291814 - DNA, 20 bp, Artificial Sequence
  Description of Artificial Sequence: Synthetic oligonucleotide
  Target: LAMA2; (-) strand; PAM type: YTN; PAM sequence: CTA
ggtggtgctggtgtccctcc

SEQ ID NO: 291815 - DNA, 20 bp, Artificial Sequence
  Description of Artificial Sequence: Synthetic oligonucleotide
  Target: LAMA2; (-) strand; PAM type: YTN; PAM sequence: CTC
ctaggtggtgctggtgtccc

SEQ ID NO: 291816 - DNA, 20 bp, Artificial Sequence
  Description of Artificial Sequence: Synthetic oligonucleotide
  Target: LAMA2; (-) strand; PAM type: YTN; PAM sequence: TTC
tcctaggtggtgctggtgtc

SEQ ID NO: 291817 - DNA, 20 bp, Artificial Sequence
  Description of Artificial Sequence: Synthetic oligonucleotide
  Target: LAMA2; (-) strand; PAM type: YTN; PAM sequence: TTT
ctcctaggtggtgctggtgt

SEQ ID NO: 291818 - DNA, 20 bp, Artificial Sequence
  Description of Artificial Sequence: Synthetic oligonucleotide
  Target: LAMA2; (-) strand; PAM type: YTN; PAM sequence: TTT
tctcctaggtggtgctggtg

SEQ ID NO: 291819 - DNA, 20 bp, Artificial Sequence
  Description of Artificial Sequence: Synthetic oligonucleotide
  Target: LAMA2; (-) strand; PAM type: YTN; PAM sequence: TTC
gttttctcctaggtggtgct

SEQ ID NO: 291820 - DNA, 20 bp, Artificial Sequence
  Description of Artificial Sequence: Synthetic oligonucleotide
  Target: LAMA2; (-) strand; PAM type: YTN; PAM sequence: CTT
cgttttctcctaggtggtgc

SEQ ID NO: 291821 - DNA, 20 bp, Artificial Sequence
  Description of Artificial Sequence: Synthetic oligonucleotide
  Target: LAMA2; (-) strand; PAM type: YTN; PAM sequence: CTG
ccttcgttttctcctaggtg

SEQ ID NO: 291822 - DNA, 20 bp, Artificial Sequence
  Description of Artificial Sequence: Synthetic oligonucleotide
  Target: LAMA2; (-) strand; PAM type: YTN; PAM sequence: CTG
tccagtctgccttcgttttc

SEQ ID NO: 291823 - DNA, 20 bp, Artificial Sequence
  Description of Artificial Sequence: Synthetic oligonucleotide
  Target: LAMA2; (-) strand; PAM type: YTN; PAM sequence: CTA
ggtgtgagggtacctgtcca

SEQ ID NO: 291824 - DNA, 20 bp, Artificial Sequence
  Description of Artificial Sequence: Synthetic oligonucleotide
  Target: LAMA2; (-) strand; PAM type: YTN; PAM sequence: TTA
tcagctaggtgtgagggtac

SEQ ID NO: 291825 - DNA, 20 bp, Artificial Sequence
  Description of Artificial Sequence: Synthetic oligonucleotide
  Target: LAMA2; (-) strand; PAM type: YTN; PAM sequence: TTA
gggaaaatgcattatcagct

SEQ ID NO: 291826 - DNA, 20 bp, Artificial Sequence
  Description of Artificial Sequence: Synthetic oligonucleotide
  Target: LAMA2; (-) strand; PAM type: YTN; PAM sequence: TTA
tataagcattagggaaaatg

SEQ ID NO: 291827 - DNA, 20 bp, Artificial Sequence
  Description of Artificial Sequence: Synthetic oligonucleotide
  Target: LAMA2; (-) strand; PAM type: YTN; PAM sequence: TTT
atataagcattagggaaaat

SEQ ID NO: 291828 - DNA, 20 bp, Artificial Sequence
  Description of Artificial Sequence: Synthetic oligonucleotide
  Target: LAMA2; (-) strand; PAM type: YTN; PAM sequence: CTT
tatataagcattagggaaaa

SEQ ID NO: 291829 - DNA, 20 bp, Artificial Sequence
  Description of Artificial Sequence: Synthetic oligonucleotide
  Target: LAMA2; (-) strand; PAM type: YTN; PAM sequence: CTG
ctttatataagcattaggga

SEQ ID NO: 291830 - DNA, 20 bp, Artificial Sequence
  Description of Artificial Sequence: Synthetic oligonucleotide
  Target: LAMA2; (-) strand; PAM type: YTN; PAM sequence: TTA
actgctttatataagcatta

SEQ ID NO: 291831 - DNA, 20 bp, Artificial Sequence
  Description of Artificial Sequence: Synthetic oligonucleotide
  Target: LAMA2; (-) strand; PAM type: YTN; PAM sequence: CTA
aaaatacaaaagtaagttaa

SEQ ID NO: 291832 - DNA, 20 bp, Artificial Sequence
  Description of Artificial Sequence: Synthetic oligonucleotide
  Target: LAMA2; (-) strand; PAM type: YTN; PAM sequence: CTA
gccaagatgagagcagaaat

SEQ ID NO: 291833 - DNA, 20 bp, Artificial Sequence
  Description of Artificial Sequence: Synthetic oligonucleotide
  Target: LAMA2; (-) strand; PAM type: YTN; PAM sequence: TTG
ctagccaagatgagagcaga

SEQ ID NO: 291834 - DNA, 20 bp, Artificial Sequence
  Description of Artificial Sequence: Synthetic oligonucleotide
  Target: LAMA2; (-) strand; PAM type: YTN; PAM sequence: CTT
gctagccaagatgagagcag

SEQ ID NO: 291835 - DNA, 20 bp, Artificial Sequence
  Description of Artificial Sequence: Synthetic oligonucleotide
  Target: LAMA2; (-) strand; PAM type: YTN; PAM sequence: TTC
agtccttgctagccaagatg

SEQ ID NO: 291836 - DNA, 20 bp, Artificial Sequence
  Description of Artificial Sequence: Synthetic oligonucleotide
  Target: LAMA2; (-) strand; PAM type: YTN; PAM sequence: CTG
gggagatgatgtgagtgaaa

SEQ ID NO: 291837 - DNA, 20 bp, Artificial Sequence
  Description of Artificial Sequence: Synthetic oligonucleotide
  Target: LAMA2; (-) strand; PAM type: YTN; PAM sequence: TTG
tcctggggagatgatgtgag

SEQ ID NO: 291838 - DNA, 20 bp, Artificial Sequence
  Description of Artificial Sequence: Synthetic oligonucleotide
  Target: LAMA2; (-) strand; PAM type: YTN; PAM sequence: CTA
gagaagacaattgtcctggg

SEQ ID NO: 291839 - DNA, 20 bp, Artificial Sequence
  Description of Artificial Sequence: Synthetic oligonucleotide
  Target: LAMA2; (-) strand; PAM type: YTN; PAM sequence: TTG
atcaacaggaacatcctaga

SEQ ID NO: 291840 - DNA, 20 bp, Artificial Sequence
  Description of Artificial Sequence: Synthetic oligonucleotide
  Target: LAMA2; (-) strand; PAM type: YTN; PAM sequence: CTA
caattgatcaacaggaacat

SEQ ID NO: 291841 - DNA, 20 bp, Artificial Sequence
  Description of Artificial Sequence: Synthetic oligonucleotide
  Target: LAMA2; (-) strand; PAM type: YTN; PAM sequence: TTG
cacctacaattgatcaacag

SEQ ID NO: 291842 - DNA, 20 bp, Artificial Sequence
  Description of Artificial Sequence: Synthetic oligonucleotide
  Target: LAMA2; (-) strand; PAM type: YTN; PAM sequence: TTT
gcacctacaattgatcaaca

SEQ ID NO: 291843 - DNA, 20 bp, Artificial Sequence
  Description of Artificial Sequence: Synthetic oligonucleotide
  Target: LAMA2; (-) strand; PAM type: YTN; PAM sequence: CTT
tgcacctacaattgatcaac

SEQ ID NO: 291844 - DNA, 20 bp, Artificial Sequence
  Description of Artificial Sequence: Synthetic oligonucleotide
  Target: LAMA2; (-) strand; PAM type: YTN; PAM sequence: TTA
aacccataggaaatataggt

SEQ ID NO: 291845 - DNA, 20 bp, Artificial Sequence
  Description of Artificial Sequence: Synthetic oligonucleotide
  Target: LAMA2; (-) strand; PAM type: YTN; PAM sequence: TTA
catatgcatatgttaaaccc

SEQ ID NO: 291846 - DNA, 20 bp, Artificial Sequence
  Description of Artificial Sequence: Synthetic oligonucleotide
  Target: LAMA2; (-) strand; PAM type: YTN; PAM sequence: TTT
acatatgcatatgttaaacc

SEQ ID NO: 291847 - DNA, 20 bp, Artificial Sequence
  Description of Artificial Sequence: Synthetic oligonucleotide
  Target: LAMA2; (-) strand; PAM type: YTN; PAM sequence: CTT
tacatatgcatatgttaaac

SEQ ID NO: 291848 - DNA, 20 bp, Artificial Sequence
  Description of Artificial Sequence: Synthetic oligonucleotide
  Target: LAMA2; (-) strand; PAM type: YTN; PAM sequence: CTC
tttacatatgcatatgttaa

SEQ ID NO: 291849 - DNA, 20 bp, Artificial Sequence
  Description of Artificial Sequence: Synthetic oligonucleotide
  Target: LAMA2; (-) strand; PAM type: YTN; PAM sequence: CTG
tcctctttacatatgcatat

SEQ ID NO: 291850 - DNA, 20 bp, Artificial Sequence
  Description of Artificial Sequence: Synthetic oligonucleotide
  Target: LAMA2; (-) strand; PAM type: YTN; PAM sequence: TTA
agctgtcctctttacatatg

SEQ ID NO: 291851 - DNA, 20 bp, Artificial Sequence
  Description of Artificial Sequence: Synthetic oligonucleotide
  Target: LAMA2; (-) strand; PAM type: YTN; PAM sequence: TTT
aagctgtcctctttacatat

SEQ ID NO: 291852 - DNA, 20 bp, Artificial Sequence
  Description of Artificial Sequence: Synthetic oligonucleotide
  Target: LAMA2; (-) strand; PAM type: YTN; PAM sequence: TTT
taagctgtcctctttacata

SEQ ID NO: 291853 - DNA, 20 bp, Artificial Sequence
  Description of Artificial Sequence: Synthetic oligonucleotide
  Target: LAMA2; (-) strand; PAM type: YTN; PAM sequence: TTA
agataatgtgaatatatttt

SEQ ID NO: 291854 - DNA, 20 bp, Artificial Sequence
  Description of Artificial Sequence: Synthetic oligonucleotide
  Target: LAMA2; (-) strand; PAM type: YTN; PAM sequence: TTG
gagacagtagaaattaagat

SEQ ID NO: 291855 - DNA, 20 bp, Artificial Sequence
  Description of Artificial Sequence: Synthetic oligonucleotide
  Target: LAMA2; (-) strand; PAM type: YTN; PAM sequence: CTT
ggagacagtagaaattaaga

SEQ ID NO: 291856 - DNA, 20 bp, Artificial Sequence
  Description of Artificial Sequence: Synthetic oligonucleotide
  Target: LAMA2; (-) strand; PAM type: YTN; PAM sequence: TTG
gtaaggagtcggacttggag

SEQ ID NO: 291857 - DNA, 20 bp, Artificial Sequence
  Description of Artificial Sequence: Synthetic oligonucleotide
  Target: LAMA2; (-) strand; PAM type: YTN; PAM sequence: TTT
ggtaaggagtcggacttgga

SEQ ID NO: 291858 - DNA, 20 bp, Artificial Sequence
  Description of Artificial Sequence: Synthetic oligonucleotide
  Target: LAMA2; (-) strand; PAM type: YTN; PAM sequence: CTA
cagatttggtaaggagtcgg

SEQ ID NO: 291859 - DNA, 20 bp, Artificial Sequence
  Description of Artificial Sequence: Synthetic oligonucleotide
  Target: LAMA2; (-) strand; PAM type: YTN; PAM sequence: CTG
tctacagatttggtaaggag

SEQ ID NO: 291860 - DNA, 20 bp, Artificial Sequence
  Description of Artificial Sequence: Synthetic oligonucleotide
  Target: LAMA2; (-) strand; PAM type: YTN; PAM sequence: CTG
actgtctacagatttggtaa

SEQ ID NO: 291861 - DNA, 20 bp, Artificial Sequence
  Description of Artificial Sequence: Synthetic oligonucleotide
  Target: LAMA2; (-) strand; PAM type: YTN; PAM sequence: TTA
agggaccgaagctgactgtc

SEQ ID NO: 291862 - DNA, 20 bp, Artificial Sequence
  Description of Artificial Sequence: Synthetic oligonucleotide
  Target: LAMA2; (-) strand; PAM type: YTN; PAM sequence: TTT
aagggaccgaagctgactgt

SEQ ID NO: 291863 - DNA, 20 bp, Artificial Sequence
  Description of Artificial Sequence: Synthetic oligonucleotide
  Target: LAMA2; (-) strand; PAM type: YTN; PAM sequence: TTA
aatttaagggaccgaagctg

SEQ ID NO: 291864 - DNA, 20 bp, Artificial Sequence
  Description of Artificial Sequence: Synthetic oligonucleotide
  Target: LAMA2; (-) strand; PAM type: YTN; PAM sequence: TTT
aaatttaagggaccgaagct

SEQ ID NO: 291865 - DNA, 20 bp, Artificial Sequence
  Description of Artificial Sequence: Synthetic oligonucleotide
  Target: LAMA2; (-) strand; PAM type: YTN; PAM sequence: TTA
catttaaatttaagggaccg

SEQ ID NO: 291866 - DNA, 20 bp, Artificial Sequence
  Description of Artificial Sequence: Synthetic oligonucleotide
  Target: LAMA2; (-) strand; PAM type: YTN; PAM sequence: TTT
acatttaaatttaagggacc

SEQ ID NO: 291867 - DNA, 20 bp, Artificial Sequence
  Description of Artificial Sequence: Synthetic oligonucleotide
  Target: LAMA2; (-) strand; PAM type: YTN; PAM sequence: TTA
gaggaatttacatttaaatt

SEQ ID NO: 291868 - DNA, 20 bp, Artificial Sequence
  Description of Artificial Sequence: Synthetic oligonucleotide
  Target: LAMA2; (-) strand; PAM type: YTN; PAM sequence: CTT
agaggaatttacatttaaat

SEQ ID NO: 291869 - DNA, 20 bp, Artificial Sequence
  Description of Artificial Sequence: Synthetic oligonucleotide
  Target: LAMA2; (-) strand; PAM type: YTN; PAM sequence: CTG
ggaaaatgatcttagaggaa

SEQ ID NO: 291870 - DNA, 20 bp, Artificial Sequence
  Description of Artificial Sequence: Synthetic oligonucleotide
  Target: LAMA2; (-) strand; PAM type: YTN; PAM sequence: TTG
tgcaactgggaaaatgatct

SEQ ID NO: 291871 - DNA, 20 bp, Artificial Sequence
  Description of Artificial Sequence: Synthetic oligonucleotide
  Target: LAMA2; (-) strand; PAM type: YTN; PAM sequence: CTT
gtgcaactgggaaaatgatc

SEQ ID NO: 291872 - DNA, 20 bp, Artificial Sequence
  Description of Artificial Sequence: Synthetic oligonucleotide
  Target: LAMA2; (-) strand; PAM type: YTN; PAM sequence: TTC
agcttgtgcaactgggaaaa

SEQ ID NO: 291873 - DNA, 20 bp, Artificial Sequence
  Description of Artificial Sequence: Synthetic oligonucleotide
  Target: LAMA2; (-) strand; PAM type: YTN; PAM sequence: CTT
cagcttgtgcaactgggaaa

SEQ ID NO: 291874 - DNA, 20 bp, Artificial Sequence
  Description of Artificial Sequence: Synthetic oligonucleotide
  Target: LAMA2; (-) strand; PAM type: YTN; PAM sequence: TTA
cttcagcttgtgcaactggg

SEQ ID NO: 291875 - DNA, 20 bp, Artificial Sequence
  Description of Artificial Sequence: Synthetic oligonucleotide
  Target: LAMA2; (-) strand; PAM type: YTN; PAM sequence: CTA
ttacttcagcttgtgcaact

SEQ ID NO: 291876 - DNA, 20 bp, Artificial Sequence
  Description of Artificial Sequence: Synthetic oligonucleotide
  Target: LAMA2; (-) strand; PAM type: YTN; PAM sequence: TTG
tgtccagagaggatgggatg

SEQ ID NO: 291877 - DNA, 20 bp, Artificial Sequence
  Description of Artificial Sequence: Synthetic oligonucleotide
  Target: LAMA2; (-) strand; PAM type: YTN; PAM sequence: TTT
gtgtccagagaggatgggat

SEQ ID NO: 291878 - DNA, 20 bp, Artificial Sequence
  Description of Artificial Sequence: Synthetic oligonucleotide
  Target: LAMA2; (-) strand; PAM type: YTN; PAM sequence: CTT
tgtgtccagagaggatggga

SEQ ID NO: 291879 - DNA, 20 bp, Artificial Sequence
  Description of Artificial Sequence: Synthetic oligonucleotide
  Target: LAMA2; (-) strand; PAM type: YTN; PAM sequence: TTC
tttgtgtccagagaggatgg

SEQ ID NO: 291880 - DNA, 20 bp, Artificial Sequence
  Description of Artificial Sequence: Synthetic oligonucleotide
  Target: LAMA2; (-) strand; PAM type: YTN; PAM sequence: CTT
ctttgtgtccagagaggatg

SEQ ID NO: 291881 - DNA, 20 bp, Artificial Sequence
  Description of Artificial Sequence: Synthetic oligonucleotide
  Target: LAMA2; (-) strand; PAM type: YTN; PAM sequence: CTG
cccttctttgtgtccagaga

SEQ ID NO: 291882 - DNA, 20 bp, Artificial Sequence
  Description of Artificial Sequence: Synthetic oligonucleotide
  Target: LAMA2; (-) strand; PAM type: YTN; PAM sequence: TTC
tgcccttctttgtgtccaga

SEQ ID NO: 291883 - DNA, 20 bp, Artificial Sequence
  Description of Artificial Sequence: Synthetic oligonucleotide
  Target: LAMA2; (-) strand; PAM type: YTN; PAM sequence: TTT
ctgcccttctttgtgtccag

SEQ ID NO: 291884 - DNA, 20 bp, Artificial Sequence
  Description of Artificial Sequence: Synthetic oligonucleotide
  Target: LAMA2; (-) strand; PAM type: YTN; PAM sequence: TTT
tctgcccttctttgtgtcca

SEQ ID NO: 291885 - DNA, 20 bp, Artificial Sequence
  Description of Artificial Sequence: Synthetic oligonucleotide
  Target: LAMA2; (-) strand; PAM type: YTN; PAM sequence: CTC
ccagatccattttctgccct

SEQ ID NO: 291886 - DNA, 20 bp, Artificial Sequence
  Description of Artificial Sequence: Synthetic oligonucleotide
  Target: LAMA2; (-) strand; PAM type: YTN; PAM sequence: TTC
tcccagatccattttctgcc

SEQ ID NO: 291887 - DNA, 20 bp, Artificial Sequence
  Description of Artificial Sequence: Synthetic oligonucleotide
  Target: LAMA2; (-) strand; PAM type: YTN; PAM sequence: TTT
ctcccagatccattttctgc

SEQ ID NO: 291888 - DNA, 20 bp, Artificial Sequence
  Description of Artificial Sequence: Synthetic oligonucleotide
  Target: LAMA2; (-) strand; PAM type: YTN; PAM sequence: CTT
tctcccagatccattttctg

SEQ ID NO: 291889 - DNA, 20 bp, Artificial Sequence
  Description of Artificial Sequence: Synthetic oligonucleotide
  Target: LAMA2; (-) strand; PAM type: YTN; PAM sequence: TTG
ctttctcccagatccatttt

SEQ ID NO: 291890 - DNA, 20 bp, Artificial Sequence
  Description of Artificial Sequence: Synthetic oligonucleotide
  Target: LAMA2; (-) strand; PAM type: YTN; PAM sequence: CTT
gctttctcccagatccattt

SEQ ID NO: 291891 - DNA, 20 bp, Artificial Sequence
  Description of Artificial Sequence: Synthetic oligonucleotide
  Target: LAMA2; (-) strand; PAM type: YTN; PAM sequence: CTA
cttgctttctcccagatcca

SEQ ID NO: 291892 - DNA, 20 bp, Artificial Sequence
  Description of Artificial Sequence: Synthetic oligonucleotide
  Target: LAMA2; (-) strand; PAM type: YTN; PAM sequence: TTC
tacttgctttctcccagatc

SEQ ID NO: 291893 - DNA, 20 bp, Artificial Sequence
  Description of Artificial Sequence: Synthetic oligonucleotide
  Target: LAMA2; (-) strand; PAM type: YTN; PAM sequence: TTG
tgttctacttgctttctccc

SEQ ID NO: 291894 - DNA, 20 bp, Artificial Sequence
  Description of Artificial Sequence: Synthetic oligonucleotide
  Target: LAMA2; (-) strand; PAM type: YTN; PAM sequence: TTG
gttgtgttctacttgctttc

SEQ ID NO: 291895 - DNA, 20 bp, Artificial Sequence
  Description of Artificial Sequence: Synthetic oligonucleotide
  Target: LAMA2; (-) strand; PAM type: YTN; PAM sequence: CTG
tgttggttgtgttctacttg

SEQ ID NO: 291896 - DNA, 20 bp, Artificial Sequence
  Description of Artificial Sequence: Synthetic oligonucleotide
  Target: LAMA2; (-) strand; PAM type: YTN; PAM sequence: CTG
tctgtgttggttgtgttcta

SEQ ID NO: 291897 - DNA, 20 bp, Artificial Sequence
  Description of Artificial Sequence: Synthetic oligonucleotide
  Target: LAMA2; (-) strand; PAM type: YTN; PAM sequence: TTG
tccctgtctgtgttggttgt

SEQ ID NO: 291898 - DNA, 20 bp, Artificial Sequence
  Description of Artificial Sequence: Synthetic oligonucleotide
  Target: LAMA2; (-) strand; PAM type: YTN; PAM sequence: TTG
ggataaaattgtccctgtct

SEQ ID NO: 291899 - DNA, 20 bp, Artificial Sequence
  Description of Artificial Sequence: Synthetic oligonucleotide
  Target: LAMA2; (-) strand; PAM type: YTN; PAM sequence: CTA
ttgggataaaattgtccctg

SEQ ID NO: 291900 - DNA, 20 bp, Artificial Sequence
  Description of Artificial Sequence: Synthetic oligonucleotide
  Target: LAMA2; (-) strand; PAM type: YTN; PAM sequence: TTG
aatgctattgggataaaatt

SEQ ID NO: 291901 - DNA, 20 bp, Artificial Sequence
  Description of Artificial Sequence: Synthetic oligonucleotide
  Target: LAMA2; (-) strand; PAM type: YTN; PAM sequence: CTT
gaatgctattgggataaaat

SEQ ID NO: 291902 - DNA, 20 bp, Artificial Sequence
  Description of Artificial Sequence: Synthetic oligonucleotide
  Target: LAMA2; (-) strand; PAM type: YTN; PAM sequence: TTA
acatccttgaatgctattgg

SEQ ID NO: 291903 - DNA, 20 bp, Artificial Sequence
  Description of Artificial Sequence: Synthetic oligonucleotide
  Target: LAMA2; (-) strand; PAM type: YTN; PAM sequence: TTT
aacatccttgaatgctattg

SEQ ID NO: 291904 - DNA, 20 bp, Artificial Sequence
  Description of Artificial Sequence: Synthetic oligonucleotide
  Target: LAMA2; (-) strand; PAM type: YTN; PAM sequence: CTT
taacatccttgaatgctatt

SEQ ID NO: 291905 - DNA, 20 bp, Artificial Sequence
  Description of Artificial Sequence: Synthetic oligonucleotide
  Target: LAMA2; (-) strand; PAM type: YTN; PAM sequence: TTA
ggctttaacatccttgaatg

SEQ ID NO: 291906 - DNA, 20 bp, Artificial Sequence
  Description of Artificial Sequence: Synthetic oligonucleotide
  Target: LAMA2; (-) strand; PAM type: YTN; PAM sequence: TTT
aggctttaacatccttgaat

SEQ ID NO: 291907 - DNA, 20 bp, Artificial Sequence
  Description of Artificial Sequence: Synthetic oligonucleotide
  Target: LAMA2; (-) strand; PAM type: YTN; PAM sequence: CTT
taggctttaacatccttgaa

SEQ ID NO: 291908 - DNA, 20 bp, Artificial Sequence
  Description of Artificial Sequence: Synthetic oligonucleotide
  Target: LAMA2; (-) strand; PAM type: YTN; PAM sequence: TTC
tttaggctttaacatccttg

SEQ ID NO: 291909 - DNA, 20 bp, Artificial Sequence
  Description of Artificial Sequence: Synthetic oligonucleotide
  Target: LAMA2; (-) strand; PAM type: YTN; PAM sequence: TTG
acattctttaggctttaaca

SEQ ID NO: 291910 - DNA, 20 bp, Artificial Sequence
  Description of Artificial Sequence: Synthetic oligonucleotide
  Target: LAMA2; (-) strand; PAM type: YTN; PAM sequence: CTG
gttgacattctttaggcttt

SEQ ID NO: 291911 - DNA, 20 bp, Artificial Sequence
  Description of Artificial Sequence: Synthetic oligonucleotide
  Target: LAMA2; (-) strand; PAM type: YTN; PAM sequence: CTA
cacccggctggttgacattc

SEQ ID NO: 291912 - DNA, 20 bp, Artificial Sequence
  Description of Artificial Sequence: Synthetic oligonucleotide
  Target: LAMA2; (-) strand; PAM type: YTN; PAM sequence: TTA
cagacatgggccactacacc

SEQ ID NO: 291913 - DNA, 20 bp, Artificial Sequence
  Description of Artificial Sequence: Synthetic oligonucleotide
  Target: LAMA2; (-) strand; PAM type: YTN; PAM sequence: CTG
ggattacagacatgggccac

SEQ ID NO: 291914 - DNA, 20 bp, Artificial Sequence
  Description of Artificial Sequence: Synthetic oligonucleotide
  Target: LAMA2; (-) strand; PAM type: YTN; PAM sequence: CTG
ccaaagtgctgggattacag

SEQ ID NO: 291915 - DNA, 20 bp, Artificial Sequence
  Description of Artificial Sequence: Synthetic oligonucleotide
  Target: LAMA2; (-) strand; PAM type: YTN; PAM sequence: TTG
acctgccaaagtgctgggat

SEQ ID NO: 291916 - DNA, 20 bp, Artificial Sequence
  Description of Artificial Sequence: Synthetic oligonucleotide
  Target: LAMA2; (-) strand; PAM type: YTN; PAM sequence: TTT
gacctgccaaagtgctggga

SEQ ID NO: 291917 - DNA, 20 bp, Artificial Sequence
  Description of Artificial Sequence: Synthetic oligonucleotide
  Target: LAMA2; (-) strand; PAM type: YTN; PAM sequence: CTT
tgacctgccaaagtgctggg

SEQ ID NO: 291918 - DNA, 20 bp, Artificial Sequence
  Description of Artificial Sequence: Synthetic oligonucleotide
  Target: LAMA2; (-) strand; PAM type: YTN; PAM sequence: CTG
ctttgacctgccaaagtgct

SEQ ID NO: 291919 - DNA, 20 bp, Artificial Sequence
  Description of Artificial Sequence: Synthetic oligonucleotide
  Target: LAMA2; (-) strand; PAM type: YTN; PAM sequence: CTC
ctgctttgacctgccaaagt

SEQ ID NO: 291920 - DNA, 20 bp, Artificial Sequence
  Description of Artificial Sequence: Synthetic oligonucleotide
  Target: LAMA2; (-) strand; PAM type: YTN; PAM sequence: CTC
aaacgatcctcctgctttga

SEQ ID NO: 291921 - DNA, 20 bp, Artificial Sequence
  Description of Artificial Sequence: Synthetic oligonucleotide
  Target: LAMA2; (-) strand; PAM type: YTN; PAM sequence: CTG
ggctcaaacgatcctcctgc

SEQ ID NO: 291922 - DNA, 20 bp, Artificial Sequence
  Description of Artificial Sequence: Synthetic oligonucleotide
  Target: LAMA2; (-) strand; PAM type: YTN; PAM sequence: CTC
ctgggctcaaacgatcctcc

SEQ ID NO: 291923 - DNA, 20 bp, Artificial Sequence
  Description of Artificial Sequence: Synthetic oligonucleotide
  Target: LAMA2; (-) strand; PAM type: YTN; PAM sequence: TTC
aaactcctgggctcaaacga

SEQ ID NO: 291924 - DNA, 20 bp, Artificial Sequence
  Description of Artificial Sequence: Synthetic oligonucleotide
  Target: LAMA2; (-) strand; PAM type: YTN; PAM sequence: TTT
caaactcctgggctcaaacg

SEQ ID NO: 291925 - DNA, 20 bp, Artificial Sequence
  Description of Artificial Sequence: Synthetic oligonucleotide
  Target: LAMA2; (-) strand; PAM type: YTN; PAM sequence: CTA
gtttcaaactcctgggctca

SEQ ID NO: 291926 - DNA, 20 bp, Artificial Sequence
  Description of Artificial Sequence: Synthetic oligonucleotide
  Target: LAMA2; (-) strand; PAM type: YTN; PAM sequence: CTA
gcctagtttcaaactcctgg

SEQ ID NO: 291927 - DNA, 20 bp, Artificial Sequence
  Description of Artificial Sequence: Synthetic oligonucleotide
  Target: LAMA2; (-) strand; PAM type: YTN; PAM sequence: CTG
cctagcctagtttcaaactc

SEQ ID NO: 291928 - DNA, 20 bp, Artificial Sequence
  Description of Artificial Sequence: Synthetic oligonucleotide
  Target: LAMA2; (-) strand; PAM type: YTN; PAM sequence: TTA
tcatgctgcctagcctagtt

SEQ ID NO: 291929 - DNA, 20 bp, Artificial Sequence
  Description of Artificial Sequence: Synthetic oligonucleotide
  Target: LAMA2; (-) strand; PAM type: YTN; PAM sequence: CTT
atcatgctgcctagcctagt

SEQ ID NO: 291930 - DNA, 20 bp, Artificial Sequence
  Description of Artificial Sequence: Synthetic oligonucleotide
  Target: LAMA2; (-) strand; PAM type: YTN; PAM sequence: TTG
tagagaaagggtcttatcat

SEQ ID NO: 291931 - DNA, 20 bp, Artificial Sequence
  Description of Artificial Sequence: Synthetic oligonucleotide
  Target: LAMA2; (-) strand; PAM type: YTN; PAM sequence: TTT
gtagagaaagggtcttatca

SEQ ID NO: 291932 - DNA, 20 bp, Artificial Sequence
  Description of Artificial Sequence: Synthetic oligonucleotide
  Target: LAMA2; (-) strand; PAM type: YTN; PAM sequence: TTT
tgtagagaaagggtcttatc

SEQ ID NO: 291933 - DNA, 20 bp, Artificial Sequence
  Description of Artificial Sequence: Synthetic oligonucleotide
  Target: LAMA2; (-) strand; PAM type: YTN; PAM sequence: TTT
ttgtagagaaagggtcttat

SEQ ID NO: 291934 - DNA, 20 bp, Artificial Sequence
  Description of Artificial Sequence: Synthetic oligonucleotide
  Target: LAMA2; (-) strand; PAM type: YTN; PAM sequence: TTT
tttgtagagaaagggtctta

SEQ ID NO: 291935 - DNA, 20 bp, Artificial Sequence
  Description of Artificial Sequence: Synthetic oligonucleotide
  Target: LAMA2; (-) strand; PAM type: YTN; PAM sequence: TTA
aacattttttgtagagaaag

SEQ ID NO: 291936 - DNA, 20 bp, Artificial Sequence
  Description of Artificial Sequence: Synthetic oligonucleotide
  Target: LAMA2; (-) strand; PAM type: YTN; PAM sequence: TTT
aaacattttttgtagagaaa

SEQ ID NO: 291937 - DNA, 20 bp, Artificial Sequence
  Description of Artificial Sequence: Synthetic oligonucleotide
  Target: LAMA2; (-) strand; PAM type: YTN; PAM sequence: TTT
taaacattttttgtagagaa

SEQ ID NO: 291938 - DNA, 20 bp, Artificial Sequence
  Description of Artificial Sequence: Synthetic oligonucleotide
  Target: LAMA2; (-) strand; PAM type: YTN; PAM sequence: TTT
ttaaacattttttgtagaga

SEQ ID NO: 291939 - DNA, 20 bp, Artificial Sequence
  Description of Artificial Sequence: Synthetic oligonucleotide
  Target: LAMA2; (-) strand; PAM type: YTN; PAM sequence: TTA
atttttaaacattttttgta

SEQ ID NO: 291940 - DNA, 20 bp, Artificial Sequence
  Description of Artificial Sequence: Synthetic oligonucleotide
  Target: LAMA2; (-) strand; PAM type: YTN; PAM sequence: TTT
aatttttaaacattttttgt

SEQ ID NO: 291941 - DNA, 20 bp, Artificial Sequence
  Description of Artificial Sequence: Synthetic oligonucleotide
  Target: LAMA2; (-) strand; PAM type: YTN; PAM sequence: TTG
tgcacgaccatgcccattta

SEQ ID NO: 291942 - DNA, 20 bp, Artificial Sequence
  Description of Artificial Sequence: Synthetic oligonucleotide
  Target: LAMA2; (-) strand; PAM type: YTN; PAM sequence: CTG
gaatcacagttgtgcacgac

SEQ ID NO: 291943 - DNA, 20 bp, Artificial Sequence
  Description of Artificial Sequence: Synthetic oligonucleotide
  Target: LAMA2; (-) strand; PAM type: YTN; PAM sequence: CTG
aatagctggaatcacagttg

SEQ ID NO: 291944 - DNA, 20 bp, Artificial Sequence
  Description of Artificial Sequence: Synthetic oligonucleotide
  Target: LAMA2; (-) strand; PAM type: YTN; PAM sequence: CTG
aatagcagtcctgaatagct

SEQ ID NO: 291945 - DNA, 20 bp, Artificial Sequence
  Description of Artificial Sequence: Synthetic oligonucleotide
  Target: LAMA2; (-) strand; PAM type: YTN; PAM sequence: CTA
gagtgtggtggcgtgaacag

SEQ ID NO: 291946 - DNA, 20 bp, Artificial Sequence
  Description of Artificial Sequence: Synthetic oligonucleotide
  Target: LAMA2; (-) strand; PAM type: YTN; PAM sequence: CTG
tcatccaggctagagtgtgg

SEQ ID NO: 291947 - DNA, 20 bp, Artificial Sequence
  Description of Artificial Sequence: Synthetic oligonucleotide
  Target: LAMA2; (-) strand; PAM type: YTN; PAM sequence: CTC
tgtcatccaggctagagtgt

SEQ ID NO: 291948 - DNA, 20 bp, Artificial Sequence
  Description of Artificial Sequence: Synthetic oligonucleotide
  Target: LAMA2; (-) strand; PAM type: YTN; PAM sequence: CTC
actctgtcatccaggctaga

SEQ ID NO: 291949 - DNA, 20 bp, Artificial Sequence
  Description of Artificial Sequence: Synthetic oligonucleotide
  Target: LAMA2; (-) strand; PAM type: YTN; PAM sequence: TTG
agacagagtctcactctgtc

SEQ ID NO: 291950 - DNA, 20 bp, Artificial Sequence
  Description of Artificial Sequence: Synthetic oligonucleotide
  Target: LAMA2; (-) strand; PAM type: YTN; PAM sequence: TTT
gagacagagtctcactctgt

SEQ ID NO: 291951 - DNA, 20 bp, Artificial Sequence
  Description of Artificial Sequence: Synthetic oligonucleotide
  Target: LAMA2; (-) strand; PAM type: YTN; PAM sequence: TTT
tgagacagagtctcactctg

SEQ ID NO: 291952 - DNA, 20 bp, Artificial Sequence
  Description of Artificial Sequence: Synthetic oligonucleotide
  Target: LAMA2; (-) strand; PAM type: YTN; PAM sequence: TTA
aaaaaagttttgagacagag

SEQ ID NO: 291953 - DNA, 20 bp, Artificial Sequence
  Description of Artificial Sequence: Synthetic oligonucleotide
  Target: LAMA2; (-) strand; PAM type: YTN; PAM sequence: TTT
aaaaaaagttttgagacaga

SEQ ID NO: 291954 - DNA, 20 bp, Artificial Sequence
  Description of Artificial Sequence: Synthetic oligonucleotide
  Target: LAMA2; (-) strand; PAM type: YTN; PAM sequence: TTT
taaaaaaagttttgagacag

SEQ ID NO: 291955 - DNA, 20 bp, Artificial Sequence
  Description of Artificial Sequence: Synthetic oligonucleotide
  Target: LAMA2; (-) strand; PAM type: YTN; PAM sequence: TTT
ttaaaaaaagttttgagaca

SEQ ID NO: 291956 - DNA, 20 bp, Artificial Sequence
  Description of Artificial Sequence: Synthetic oligonucleotide
  Target: LAMA2; (-) strand; PAM type: YTN; PAM sequence: TTT
tttaaaaaaagttttgagac

SEQ ID NO: 291957 - DNA, 20 bp, Artificial Sequence
  Description of Artificial Sequence: Synthetic oligonucleotide
  Target: LAMA2; (-) strand; PAM type: YTN; PAM sequence: CTT
ttttaaaaaaagttttgaga

SEQ ID NO: 291958 - DNA, 20 bp, Artificial Sequence
  Description of Artificial Sequence: Synthetic oligonucleotide
  Target: LAMA2; (-) strand; PAM type: YTN; PAM sequence: CTC
ttttttaaaaaaagttttga

SEQ ID NO: 291959 - DNA, 20 bp, Artificial Sequence
  Description of Artificial Sequence: Synthetic oligonucleotide
  Target: LAMA2; (-) strand; PAM type: YTN; PAM sequence: TTG
atactcttttttaaaaaaag

SEQ ID NO: 291960 - DNA, 20 bp, Artificial Sequence
  Description of Artificial Sequence: Synthetic oligonucleotide
  Target: LAMA2; (-) strand; PAM type: YTN; PAM sequence: TTG
caaaattgatactctttttt

SEQ ID NO: 291961 - DNA, 20 bp, Artificial Sequence
  Description of Artificial Sequence: Synthetic oligonucleotide
  Target: LAMA2; (-) strand; PAM type: YTN; PAM sequence: CTT
gcaaaattgatactcttttt

SEQ ID NO: 291962 - DNA, 20 bp, Artificial Sequence
  Description of Artificial Sequence: Synthetic oligonucleotide
  Target: LAMA2; (-) strand; PAM type: YTN; PAM sequence: TTA
tgtccttgcaaaattgatac

SEQ ID NO: 291963 - DNA, 20 bp, Artificial Sequence
  Description of Artificial Sequence: Synthetic oligonucleotide
  Target: LAMA2; (-) strand; PAM type: YTN; PAM sequence: TTT
atgtccttgcaaaattgata

SEQ ID NO: 291964 - DNA, 20 bp, Artificial Sequence
  Description of Artificial Sequence: Synthetic oligonucleotide
  Target: LAMA2; (-) strand; PAM type: YTN; PAM sequence: CTA
aagtttatgtccttgcaaaa

SEQ ID NO: 291965 - DNA, 20 bp, Artificial Sequence
  Description of Artificial Sequence: Synthetic oligonucleotide
  Target: LAMA2; (-) strand; PAM type: YTN; PAM sequence: TTA
acagaatcaaatggacaggg

SEQ ID NO: 291966 - DNA, 20 bp, Artificial Sequence
  Description of Artificial Sequence: Synthetic oligonucleotide
  Target: LAMA2; (-) strand; PAM type: YTN; PAM sequence: TTT
aacagaatcaaatggacagg

SEQ ID NO: 291967 - DNA, 20 bp, Artificial Sequence
  Description of Artificial Sequence: Synthetic oligonucleotide
  Target: LAMA2; (-) strand; PAM type: YTN; PAM sequence: TTT
taacagaatcaaatggacag

SEQ ID NO: 291968 - DNA, 20 bp, Artificial Sequence
  Description of Artificial Sequence: Synthetic oligonucleotide
  Target: LAMA2; (-) strand; PAM type: YTN; PAM sequence: CTT
ttaacagaatcaaatggaca

SEQ ID NO: 291969 - DNA, 20 bp, Artificial Sequence
  Description of Artificial Sequence: Synthetic oligonucleotide
  Target: LAMA2; (-) strand; PAM type: YTN; PAM sequence: TTG
cttttaacagaatcaaatgg

SEQ ID NO: 291970 - DNA, 20 bp, Artificial Sequence
  Description of Artificial Sequence: Synthetic oligonucleotide
  Target: LAMA2; (-) strand; PAM type: YTN; PAM sequence: TTG
agggattgcttttaacagaa

SEQ ID NO: 291971 - DNA, 20 bp, Artificial Sequence
  Description of Artificial Sequence: Synthetic oligonucleotide
  Target: LAMA2; (-) strand; PAM type: YTN; PAM sequence: CTG
ggcagttgagggattgcttt

SEQ ID NO: 291972 - DNA, 20 bp, Artificial Sequence
  Description of Artificial Sequence: Synthetic oligonucleotide
  Target: LAMA2; (-) strand; PAM type: YTN; PAM sequence: TTA
aatctgggcagttgagggat

SEQ ID NO: 291973 - DNA, 20 bp, Artificial Sequence
  Description of Artificial Sequence: Synthetic oligonucleotide
  Target: LAMA2; (-) strand; PAM type: YTN; PAM sequence: CTT
aaatctgggcagttgaggga

SEQ ID NO: 291974 - DNA, 20 bp, Artificial Sequence
  Description of Artificial Sequence: Synthetic oligonucleotide
  Target: LAMA2; (-) strand; PAM type: YTN; PAM sequence: TTA
aagaataccaaggcaataag

SEQ ID NO: 291975 - DNA, 20 bp, Artificial Sequence
  Description of Artificial Sequence: Synthetic oligonucleotide
  Target: LAMA2; (-) strand; PAM type: YTN; PAM sequence: TTG
aagatattaaagaataccaa

SEQ ID NO: 291976 - DNA, 20 bp, Artificial Sequence
  Description of Artificial Sequence: Synthetic oligonucleotide
  Target: LAMA2; (-) strand; PAM type: YTN; PAM sequence: TTA
aaaaatgtgattgaagatat

SEQ ID NO: 291977 - DNA, 20 bp, Artificial Sequence
  Description of Artificial Sequence: Synthetic oligonucleotide
  Target: LAMA2; (-) strand; PAM type: YTN; PAM sequence: TTT
aaaaaatgtgattgaagata

SEQ ID NO: 291978 - DNA, 20 bp, Artificial Sequence
  Description of Artificial Sequence: Synthetic oligonucleotide
  Target: LAMA2; (-) strand; PAM type: YTN; PAM sequence: TTT
taaaaaatgtgattgaagat

SEQ ID NO: 291979 - DNA, 20 bp, Artificial Sequence
  Description of Artificial Sequence: Synthetic oligonucleotide
  Target: LAMA2; (-) strand; PAM type: YTN; PAM sequence: TTA
cgttttaaaaaatgtgattg

SEQ ID NO: 291980 - DNA, 20 bp, Artificial Sequence
  Description of Artificial Sequence: Synthetic oligonucleotide
  Target: LAMA2; (-) strand; PAM type: YTN; PAM sequence: TTA
aatggaaaattacgttttaa

SEQ ID NO: 291981 - DNA, 20 bp, Artificial Sequence
  Description of Artificial Sequence: Synthetic oligonucleotide
  Target: LAMA2; (-) strand; PAM type: YTN; PAM sequence: CTA
gattaaatggaaaattacgt

SEQ ID NO: 291982 - DNA, 20 bp, Artificial Sequence
  Description of Artificial Sequence: Synthetic oligonucleotide
  Target: LAMA2; (-) strand; PAM type: YTN; PAM sequence: TTG
agaaaaactagattaaatgg

SEQ ID NO: 291983 - DNA, 20 bp, Artificial Sequence
  Description of Artificial Sequence: Synthetic oligonucleotide
  Target: LAMA2; (-) strand; PAM type: YTN; PAM sequence: TTC
attgagaaaaactagattaa

SEQ ID NO: 291984 - DNA, 20 bp, Artificial Sequence
  Description of Artificial Sequence: Synthetic oligonucleotide
  Target: LAMA2; (-) strand; PAM type: YTN; PAM sequence: TTT
cattgagaaaaactagatta

SEQ ID NO: 291985 - DNA, 20 bp, Artificial Sequence
  Description of Artificial Sequence: Synthetic oligonucleotide
  Target: LAMA2; (-) strand; PAM type: YTN; PAM sequence: CTT
tcattgagaaaaactagatt

SEQ ID NO: 291986 - DNA, 20 bp, Artificial Sequence
  Description of Artificial Sequence: Synthetic oligonucleotide
  Target: LAMA2; (-) strand; PAM type: YTN; PAM sequence: CTA
tgaaccctttcattgagaaa

SEQ ID NO: 291987 - DNA, 20 bp, Artificial Sequence
  Description of Artificial Sequence: Synthetic oligonucleotide
  Target: LAMA2; (-) strand; PAM type: YTN; PAM sequence: TTC
ctatgaaccctttcattgag

SEQ ID NO: 291988 - DNA, 20 bp, Artificial Sequence
  Description of Artificial Sequence: Synthetic oligonucleotide
  Target: LAMA2; (-) strand; PAM type: YTN; PAM sequence: TTG
gtcatggcagacaaaataat

SEQ ID NO: 291989 - DNA, 20 bp, Artificial Sequence
  Description of Artificial Sequence: Synthetic oligonucleotide
  Target: LAMA2; (-) strand; PAM type: YTN; PAM sequence: TTT
ggtcatggcagacaaaataa

SEQ ID NO: 291990 - DNA, 20 bp, Artificial Sequence
  Description of Artificial Sequence: Synthetic oligonucleotide
  Target: LAMA2; (-) strand; PAM type: YTN; PAM sequence: TTT
tggtcatggcagacaaaata

SEQ ID NO: 291991 - DNA, 20 bp, Artificial Sequence
  Description of Artificial Sequence: Synthetic oligonucleotide
  Target: LAMA2; (-) strand; PAM type: YTN; PAM sequence: CTT
ttggtcatggcagacaaaat

SEQ ID NO: 291992 - DNA, 20 bp, Artificial Sequence
  Description of Artificial Sequence: Synthetic oligonucleotide
  Target: LAMA2; (-) strand; PAM type: YTN; PAM sequence: TTC
ttttggtcatggcagacaaa

SEQ ID NO: 291993 - DNA, 20 bp, Artificial Sequence
  Description of Artificial Sequence: Synthetic oligonucleotide
  Target: LAMA2; (-) strand; PAM type: YTN; PAM sequence: TTG
tgttcttttggtcatggcag

SEQ ID NO: 291994 - DNA, 20 bp, Artificial Sequence
  Description of Artificial Sequence: Synthetic oligonucleotide
  Target: LAMA2; (-) strand; PAM type: YTN; PAM sequence: TTG
taaagcattgtgttcttttg

SEQ ID NO: 291995 - DNA, 20 bp, Artificial Sequence
  Description of Artificial Sequence: Synthetic oligonucleotide
  Target: LAMA2; (-) strand; PAM type: YTN; PAM sequence: TTT
gtaaagcattgtgttctttt

SEQ ID NO: 291996 - DNA, 20 bp, Artificial Sequence
  Description of Artificial Sequence: Synthetic oligonucleotide
  Target: LAMA2; (-) strand; PAM type: YTN; PAM sequence: TTA
aggatatatttgtaaagcat

SEQ ID NO: 291997 - DNA, 20 bp, Artificial Sequence
  Description of Artificial Sequence: Synthetic oligonucleotide
  Target: LAMA2; (-) strand; PAM type: YTN; PAM sequence: CTT
aaggatatatttgtaaagca

SEQ ID NO: 291998 - DNA, 20 bp, Artificial Sequence
  Description of Artificial Sequence: Synthetic oligonucleotide
  Target: LAMA2; (-) strand; PAM type: YTN; PAM sequence: TTA
caagggtatgtgcatactta

SEQ ID NO: 291999 - DNA, 20 bp, Artificial Sequence
  Description of Artificial Sequence: Synthetic oligonucleotide
  Target: LAMA2; (-) strand; PAM type: YTN; PAM sequence: TTT
acaagggtatgtgcatactt

SEQ ID NO: 292000 - DNA, 20 bp, Artificial Sequence
  Description of Artificial Sequence: Synthetic oligonucleotide
  Target: LAMA2; (-) strand; PAM type: YTN; PAM sequence: CTG
gtttacaagggtatgtgcat

SEQ ID NO: 292001 - DNA, 20 bp, Artificial Sequence
  Description of Artificial Sequence: Synthetic oligonucleotide
  Target: LAMA2; (-) strand; PAM type: YTN; PAM sequence: TTA
aaacacgtaatcacaaataa

SEQ ID NO: 292002 - DNA, 20 bp, Artificial Sequence
  Description of Artificial Sequence: Synthetic oligonucleotide
  Target: LAMA2; (-) strand; PAM type: YTN; PAM sequence: TTT
aaaacacgtaatcacaaata

SEQ ID NO: 292003 - DNA, 20 bp, Artificial Sequence
  Description of Artificial Sequence: Synthetic oligonucleotide
  Target: LAMA2; (-) strand; PAM type: YTN; PAM sequence: TTT
taaaacacgtaatcacaaat

SEQ ID NO: 292004 - DNA, 20 bp, Artificial Sequence
  Description of Artificial Sequence: Synthetic oligonucleotide
  Target: LAMA2; (-) strand; PAM type: YTN; PAM sequence: TTT
ttaaaacacgtaatcacaaa

SEQ ID NO: 292005 - DNA, 20 bp, Artificial Sequence
  Description of Artificial Sequence: Synthetic oligonucleotide
  Target: LAMA2; (-) strand; PAM type: YTN; PAM sequence: TTG
atttttaaaacacgtaatca

SEQ ID NO: 292006 - DNA, 20 bp, Artificial Sequence
  Description of Artificial Sequence: Synthetic oligonucleotide
  Target: LAMA2; (-) strand; PAM type: YTN; PAM sequence: CTA
aaattgatttttaaaacacg

SEQ ID NO: 292007 - DNA, 20 bp, Artificial Sequence
  Description of Artificial Sequence: Synthetic oligonucleotide
  Target: LAMA2; (-) strand; PAM type: YTN; PAM sequence: TTA
catactaaaattgattttta

SEQ ID NO: 292008 - DNA, 20 bp, Artificial Sequence
  Description of Artificial Sequence: Synthetic oligonucleotide
  Target: LAMA2; (-) strand; PAM type: YTN; PAM sequence: CTA
aatgttacatactaaaattg

SEQ ID NO: 292009 - DNA, 20 bp, Artificial Sequence
  Description of Artificial Sequence: Synthetic oligonucleotide
  Target: LAMA2; (-) strand; PAM type: YTN; PAM sequence: TTG
atcactaaatgttacatact

SEQ ID NO: 292010 - DNA, 20 bp, Artificial Sequence
  Description of Artificial Sequence: Synthetic oligonucleotide
  Target: LAMA2; (-) strand; PAM type: YTN; PAM sequence: TTA
cataatatgattgatcacta

SEQ ID NO: 292011 - DNA, 20 bp, Artificial Sequence
  Description of Artificial Sequence: Synthetic oligonucleotide
  Target: LAMA2; (-) strand; PAM type: YTN; PAM sequence: TTG
ttacataatatgattgatca

SEQ ID NO: 292012 - DNA, 20 bp, Artificial Sequence
  Description of Artificial Sequence: Synthetic oligonucleotide
  Target: LAMA2; (-) strand; PAM type: YTN; PAM sequence: TTT
gttacataatatgattgatc

SEQ ID NO: 292013 - DNA, 20 bp, Artificial Sequence
  Description of Artificial Sequence: Synthetic oligonucleotide
  Target: LAMA2; (-) strand; PAM type: YTN; PAM sequence: TTA
gaaaaataaataagatttgt

SEQ ID NO: 292014 - DNA, 20 bp, Artificial Sequence
  Description of Artificial Sequence: Synthetic oligonucleotide
  Target: LAMA2; (-) strand; PAM type: YTN; PAM sequence: TTT
agaaaaataaataagatttg

SEQ ID NO: 292015 - DNA, 20 bp, Artificial Sequence
  Description of Artificial Sequence: Synthetic oligonucleotide
  Target: LAMA2; (-) strand; PAM type: YTN; PAM sequence: TTT
tagaaaaataaataagattt

SEQ ID NO: 292016 - DNA, 20 bp, Artificial Sequence
  Description of Artificial Sequence: Synthetic oligonucleotide
  Target: LAMA2; (-) strand; PAM type: YTN; PAM sequence: TTT
ttagaaaaataaataagatt

SEQ ID NO: 292017 - DNA, 20 bp, Artificial Sequence
  Description of Artificial Sequence: Synthetic oligonucleotide
  Target: LAMA2; (-) strand; PAM type: YTN; PAM sequence: TTT
tttagaaaaataaataagat

SEQ ID NO: 292018 - DNA, 20 bp, Artificial Sequence
  Description of Artificial Sequence: Synthetic oligonucleotide
  Target: LAMA2; (-) strand; PAM type: YTN; PAM sequence: TTG
tattttttagaaaaataaat

SEQ ID NO: 292019 - DNA, 20 bp, Artificial Sequence
  Description of Artificial Sequence: Synthetic oligonucleotide
  Target: LAMA2; (-) strand; PAM type: YTN; PAM sequence: TTT
gtattttttagaaaaataaa

SEQ ID NO: 292020 - DNA, 20 bp, Artificial Sequence
  Description of Artificial Sequence: Synthetic oligonucleotide
  Target: LAMA2; (-) strand; PAM type: YTN; PAM sequence: CTT
tgtattttttagaaaaataa

SEQ ID NO: 292021 - DNA, 20 bp, Artificial Sequence
  Description of Artificial Sequence: Synthetic oligonucleotide
  Target: LAMA2; (-) strand; PAM type: YTN; PAM sequence: TTG
tgtgggctttgtatttttta

SEQ ID NO: 292022 - DNA, 20 bp, Artificial Sequence
  Description of Artificial Sequence: Synthetic oligonucleotide
  Target: LAMA2; (-) strand; PAM type: YTN; PAM sequence: TTT
gtgtgggctttgtatttttt

SEQ ID NO: 292023 - DNA, 20 bp, Artificial Sequence
  Description of Artificial Sequence: Synthetic oligonucleotide
  Target: LAMA2; (-) strand; PAM type: YTN; PAM sequence: TTT
tgtgtgggctttgtattttt

SEQ ID NO: 292024 - DNA, 20 bp, Artificial Sequence
  Description of Artificial Sequence: Synthetic oligonucleotide
  Target: LAMA2; (-) strand; PAM type: YTN; PAM sequence: TTG
tgaatattttgtgtgggctt

SEQ ID NO: 292025 - DNA, 20 bp, Artificial Sequence
  Description of Artificial Sequence: Synthetic oligonucleotide
  Target: LAMA2; (-) strand; PAM type: YTN; PAM sequence: TTT
gtgaatattttgtgtgggct

SEQ ID NO: 292026 - DNA, 20 bp, Artificial Sequence
  Description of Artificial Sequence: Synthetic oligonucleotide
  Target: LAMA2; (-) strand; PAM type: YTN; PAM sequence: CTT
tgtgaatattttgtgtgggc

SEQ ID NO: 292027 - DNA, 20 bp, Artificial Sequence
  Description of Artificial Sequence: Synthetic oligonucleotide
  Target: LAMA2; (-) strand; PAM type: YTN; PAM sequence: CTC
tttgtgaatattttgtgtgg

SEQ ID NO: 292028 - DNA, 20 bp, Artificial Sequence
  Description of Artificial Sequence: Synthetic oligonucleotide
  Target: LAMA2; (-) strand; PAM type: YTN; PAM sequence: TTC
tctttgtgaatattttgtgt

SEQ ID NO: 292029 - DNA, 20 bp, Artificial Sequence
  Description of Artificial Sequence: Synthetic oligonucleotide
  Target: LAMA2; (-) strand; PAM type: YTN; PAM sequence: TTG
ggttctctttgtgaatattt

SEQ ID NO: 292030 - DNA, 20 bp, Artificial Sequence
  Description of Artificial Sequence: Synthetic oligonucleotide
  Target: LAMA2; (-) strand; PAM type: YTN; PAM sequence: TTT
gggttctctttgtgaatatt

SEQ ID NO: 292031 - DNA, 20 bp, Artificial Sequence
  Description of Artificial Sequence: Synthetic oligonucleotide
  Target: LAMA2; (-) strand; PAM type: YTN; PAM sequence: CTT
tgggttctctttgtgaatat

SEQ ID NO: 292032 - DNA, 20 bp, Artificial Sequence
  Description of Artificial Sequence: Synthetic oligonucleotide
  Target: LAMA2; (-) strand; PAM type: YTN; PAM sequence: TTA
tacatctttgggttctcttt

SEQ ID NO: 292033 - DNA, 20 bp, Artificial Sequence
  Description of Artificial Sequence: Synthetic oligonucleotide
  Target: LAMA2; (-) strand; PAM type: YTN; PAM sequence: CTC
gtggttatacatctttgggt

SEQ ID NO: 292034 - DNA, 20 bp, Artificial Sequence
  Description of Artificial Sequence: Synthetic oligonucleotide
  Target: LAMA2; (-) strand; PAM type: YTN; PAM sequence: TTA
ctcgtggttatacatctttg

SEQ ID NO: 292035 - DNA, 20 bp, Artificial Sequence
  Description of Artificial Sequence: Synthetic oligonucleotide
  Target: LAMA2; (-) strand; PAM type: YTN; PAM sequence: CTG
aaataatccaagttactcgt

SEQ ID NO: 292036 - DNA, 20 bp, Artificial Sequence
  Description of Artificial Sequence: Synthetic oligonucleotide
  Target: LAMA2; (-) strand; PAM type: YTN; PAM sequence: TTC
ctgaaataatccaagttact

SEQ ID NO: 292037 - DNA, 20 bp, Artificial Sequence
  Description of Artificial Sequence: Synthetic oligonucleotide
  Target: LAMA2; (-) strand; PAM type: YTN; PAM sequence: CTG
cattcctgaaataatccaag

SEQ ID NO: 292038 - DNA, 20 bp, Artificial Sequence
  Description of Artificial Sequence: Synthetic oligonucleotide
  Target: LAMA2; (-) strand; PAM type: YTN; PAM sequence: TTC
tgcattcctgaaataatcca

SEQ ID NO: 292039 - DNA, 20 bp, Artificial Sequence
  Description of Artificial Sequence: Synthetic oligonucleotide
  Target: LAMA2; (-) strand; PAM type: YTN; PAM sequence: CTT
ctgcattcctgaaataatcc

SEQ ID NO: 292040 - DNA, 20 bp, Artificial Sequence
  Description of Artificial Sequence: Synthetic oligonucleotide
  Target: LAMA2; (-) strand; PAM type: YTN; PAM sequence: TTA
aaccacttctgcattcctga

SEQ ID NO: 292041 - DNA, 20 bp, Artificial Sequence
  Description of Artificial Sequence: Synthetic oligonucleotide
  Target: LAMA2; (-) strand; PAM type: YTN; PAM sequence: CTA
acattaaaccacttctgcat

SEQ ID NO: 292042 - DNA, 20 bp, Artificial Sequence
  Description of Artificial Sequence: Synthetic oligonucleotide
  Target: LAMA2; (-) strand; PAM type: YTN; PAM sequence: TTC
taacattaaaccacttctgc

SEQ ID NO: 292043 - DNA, 20 bp, Artificial Sequence
  Description of Artificial Sequence: Synthetic oligonucleotide
  Target: LAMA2; (-) strand; PAM type: YTN; PAM sequence: TTT
ctaacattaaaccacttctg

SEQ ID NO: 292044 - DNA, 20 bp, Artificial Sequence
  Description of Artificial Sequence: Synthetic oligonucleotide
  Target: LAMA2; (-) strand; PAM type: YTN; PAM sequence: TTT
tctaacattaaaccacttct

SEQ ID NO: 292045 - DNA, 20 bp, Artificial Sequence
  Description of Artificial Sequence: Synthetic oligonucleotide
  Target: LAMA2; (-) strand; PAM type: YTN; PAM sequence: TTG
attttctaacattaaaccac

SEQ ID NO: 292046 - DNA, 20 bp, Artificial Sequence
  Description of Artificial Sequence: Synthetic oligonucleotide
  Target: LAMA2; (-) strand; PAM type: YTN; PAM sequence: TTT
gattttctaacattaaacca

SEQ ID NO: 292047 - DNA, 20 bp, Artificial Sequence
  Description of Artificial Sequence: Synthetic oligonucleotide
  Target: LAMA2; (-) strand; PAM type: YTN; PAM sequence: TTT
tgattttctaacattaaacc

SEQ ID NO: 292048 - DNA, 20 bp, Artificial Sequence
  Description of Artificial Sequence: Synthetic oligonucleotide
  Target: LAMA2; (-) strand; PAM type: YTN; PAM sequence: CTG
atattttgattttctaacat

SEQ ID NO: 292049 - DNA, 20 bp, Artificial Sequence
  Description of Artificial Sequence: Synthetic oligonucleotide
  Target: LAMA2; (-) strand; PAM type: YTN; PAM sequence: CTG
gctgatattttgattttcta

SEQ ID NO: 292050 - DNA, 20 bp, Artificial Sequence
  Description of Artificial Sequence: Synthetic oligonucleotide
  Target: LAMA2; (-) strand; PAM type: YTN; PAM sequence: CTG
tgcctggctgatattttgat

SEQ ID NO: 292051 - DNA, 20 bp, Artificial Sequence
  Description of Artificial Sequence: Synthetic oligonucleotide
  Target: LAMA2; (-) strand; PAM type: YTN; PAM sequence: TTA
caggcgtgagccactgtgcc

SEQ ID NO: 292052 - DNA, 20 bp, Artificial Sequence
  Description of Artificial Sequence: Synthetic oligonucleotide
  Target: LAMA2; (-) strand; PAM type: YTN; PAM sequence: CTG
ggattacaggcgtgagccac

SEQ ID NO: 292053 - DNA, 20 bp, Artificial Sequence
  Description of Artificial Sequence: Synthetic oligonucleotide
  Target: LAMA2; (-) strand; PAM type: YTN; PAM sequence: CTC
ccaaagtgctgggattacag

SEQ ID NO: 292054 - DNA, 20 bp, Artificial Sequence
  Description of Artificial Sequence: Synthetic oligonucleotide
  Target: LAMA2; (-) strand; PAM type: YTN; PAM sequence: TTG
gcctcccaaagtgctgggat

SEQ ID NO: 292055 - DNA, 20 bp, Artificial Sequence
  Description of Artificial Sequence: Synthetic oligonucleotide
  Target: LAMA2; (-) strand; PAM type: YTN; PAM sequence: CTT
ggcctcccaaagtgctggga

SEQ ID NO: 292056 - DNA, 20 bp, Artificial Sequence
  Description of Artificial Sequence: Synthetic oligonucleotide
  Target: LAMA2; (-) strand; PAM type: YTN; PAM sequence: CTA
cccaccttggcctcccaaag

SEQ ID NO: 292057 - DNA, 20 bp, Artificial Sequence
  Description of Artificial Sequence: Synthetic oligonucleotide
  Target: LAMA2; (-) strand; PAM type: YTN; PAM sequence: TTG
tgatctacccaccttggcct

SEQ ID NO: 292058 - DNA, 20 bp, Artificial Sequence
  Description of Artificial Sequence: Synthetic oligonucleotide
  Target: LAMA2; (-) strand; PAM type: YTN; PAM sequence: CTT
gtgatctacccaccttggcc

SEQ ID NO: 292059 - DNA, 20 bp, Artificial Sequence
  Description of Artificial Sequence: Synthetic oligonucleotide
  Target: LAMA2; (-) strand; PAM type: YTN; PAM sequence: CTG
accttgtgatctacccacct

SEQ ID NO: 292060 - DNA, 20 bp, Artificial Sequence
  Description of Artificial Sequence: Synthetic oligonucleotide
  Target: LAMA2; (-) strand; PAM type: YTN; PAM sequence: CTC
gaaatcctgaccttgtgatc

SEQ ID NO: 292061 - DNA, 20 bp, Artificial Sequence
  Description of Artificial Sequence: Synthetic oligonucleotide
  Target: LAMA2; (-) strand; PAM type: YTN; PAM sequence: CTG
gtctcgaaatcctgaccttg

SEQ ID NO: 292062 - DNA, 20 bp, Artificial Sequence
  Description of Artificial Sequence: Synthetic oligonucleotide
  Target: LAMA2; (-) strand; PAM type: YTN; PAM sequence: TTG
gccaggctggtctcgaaatc

SEQ ID NO: 292063 - DNA, 20 bp, Artificial Sequence
  Description of Artificial Sequence: Synthetic oligonucleotide
  Target: LAMA2; (-) strand; PAM type: YTN; PAM sequence: CTA
tgttggccaggctggtctcg

SEQ ID NO: 292064 - DNA, 20 bp, Artificial Sequence
  Description of Artificial Sequence: Synthetic oligonucleotide
  Target: LAMA2; (-) strand; PAM type: YTN; PAM sequence: TTC
actatgttggccaggctggt

SEQ ID NO: 292065 - DNA, 20 bp, Artificial Sequence
  Description of Artificial Sequence: Synthetic oligonucleotide
  Target: LAMA2; (-) strand; PAM type: YTN; PAM sequence: TTT
cactatgttggccaggctgg

SEQ ID NO: 292066 - DNA, 20 bp, Artificial Sequence
  Description of Artificial Sequence: Synthetic oligonucleotide
  Target: LAMA2; (-) strand; PAM type: YTN; PAM sequence: TTA
gacaggatttcactatgttg

SEQ ID NO: 292067 - DNA, 20 bp, Artificial Sequence
  Description of Artificial Sequence: Synthetic oligonucleotide
  Target: LAMA2; (-) strand; PAM type: YTN; PAM sequence: TTA
gtatacaaattagacaggat

SEQ ID NO: 292068 - DNA, 20 bp, Artificial Sequence
  Description of Artificial Sequence: Synthetic oligonucleotide
  Target: LAMA2; (-) strand; PAM type: YTN; PAM sequence: TTT
agtatacaaattagacagga

SEQ ID NO: 292069 - DNA, 20 bp, Artificial Sequence
  Description of Artificial Sequence: Synthetic oligonucleotide
  Target: LAMA2; (-) strand; PAM type: YTN; PAM sequence: TTT
tagtatacaaattagacagg

SEQ ID NO: 292070 - DNA, 20 bp, Artificial Sequence
  Description of Artificial Sequence: Synthetic oligonucleotide
  Target: LAMA2; (-) strand; PAM type: YTN; PAM sequence: TTT
ttagtatacaaattagacag

SEQ ID NO: 292071 - DNA, 20 bp, Artificial Sequence
  Description of Artificial Sequence: Synthetic oligonucleotide
  Target: LAMA2; (-) strand; PAM type: YTN; PAM sequence: TTG
tatttttagtatacaaatta

SEQ ID NO: 292072 - DNA, 20 bp, Artificial Sequence
  Description of Artificial Sequence: Synthetic oligonucleotide
  Target: LAMA2; (-) strand; PAM type: YTN; PAM sequence: TTT
gtatttttagtatacaaatt

SEQ ID NO: 292073 - DNA, 20 bp, Artificial Sequence
  Description of Artificial Sequence: Synthetic oligonucleotide
  Target: LAMA2; (-) strand; PAM type: YTN; PAM sequence: TTT
tgtatttttagtatacaaat

SEQ ID NO: 292074 - DNA, 20 bp, Artificial Sequence
  Description of Artificial Sequence: Synthetic oligonucleotide
  Target: LAMA2; (-) strand; PAM type: YTN; PAM sequence: TTT
ttgtatttttagtatacaaa

SEQ ID NO: 292075 - DNA, 20 bp, Artificial Sequence
  Description of Artificial Sequence: Synthetic oligonucleotide
  Target: LAMA2; (-) strand; PAM type: YTN; PAM sequence: TTT
tttgtatttttagtatacaa

SEQ ID NO: 292076 - DNA, 20 bp, Artificial Sequence
  Description of Artificial Sequence: Synthetic oligonucleotide
  Target: LAMA2; (-) strand; PAM type: YTN; PAM sequence: CTA
attttttgtatttttagtat

SEQ ID NO: 292077 - DNA, 20 bp, Artificial Sequence
  Description of Artificial Sequence: Synthetic oligonucleotide
  Target: LAMA2; (-) strand; PAM type: YTN; PAM sequence: CTG
gctaattttttgtattttta

SEQ ID NO: 292078 - DNA, 20 bp, Artificial Sequence
  Description of Artificial Sequence: Synthetic oligonucleotide
  Target: LAMA2; (-) strand; PAM type: YTN; PAM sequence: CTA
ccatgcctggctaatttttt

SEQ ID NO: 292079 - DNA, 20 bp, Artificial Sequence
  Description of Artificial Sequence: Synthetic oligonucleotide
  Target: LAMA2; (-) strand; PAM type: YTN; PAM sequence: CTG
ctaccatgcctggctaattt

SEQ ID NO: 292080 - DNA, 20 bp, Artificial Sequence
  Description of Artificial Sequence: Synthetic oligonucleotide
  Target: LAMA2; (-) strand; PAM type: YTN; PAM sequence: TTA
taggcacctgctaccatgcc

SEQ ID NO: 292081 - DNA, 20 bp, Artificial Sequence
  Description of Artificial Sequence: Synthetic oligonucleotide
  Target: LAMA2; (-) strand; PAM type: YTN; PAM sequence: CTG
ggattataggcacctgctac

SEQ ID NO: 292082 - DNA, 20 bp, Artificial Sequence
  Description of Artificial Sequence: Synthetic oligonucleotide
  Target: LAMA2; (-) strand; PAM type: YTN; PAM sequence: CTC
ccaagtaactgggattatag

SEQ ID NO: 292083 - DNA, 20 bp, Artificial Sequence
  Description of Artificial Sequence: Synthetic oligonucleotide
  Target: LAMA2; (-) strand; PAM type: YTN; PAM sequence: CTC
agcctcccaagtaactggga

SEQ ID NO: 292084 - DNA, 20 bp, Artificial Sequence
  Description of Artificial Sequence: Synthetic oligonucleotide
  Target: LAMA2; (-) strand; PAM type: YTN; PAM sequence: CTG
cctcagcctcccaagtaact

SEQ ID NO: 292085 - DNA, 20 bp, Artificial Sequence
  Description of Artificial Sequence: Synthetic oligonucleotide
  Target: LAMA2; (-) strand; PAM type: YTN; PAM sequence: CTC
ctgcctcagcctcccaagta

SEQ ID NO: 292086 - DNA, 20 bp, Artificial Sequence
  Description of Artificial Sequence: Synthetic oligonucleotide
  Target: LAMA2; (-) strand; PAM type: YTN; PAM sequence: TTC
tcctgcctcagcctcccaag

SEQ ID NO: 292087 - DNA, 20 bp, Artificial Sequence
  Description of Artificial Sequence: Synthetic oligonucleotide
  Target: LAMA2; (-) strand; PAM type: YTN; PAM sequence: TTC
aagcaattctcctgcctcag

SEQ ID NO: 292088 - DNA, 20 bp, Artificial Sequence
  Description of Artificial Sequence: Synthetic oligonucleotide
  Target: LAMA2; (-) strand; PAM type: YTN; PAM sequence: CTC
ccaggttcaagcaattctcc

SEQ ID NO: 292089 - DNA, 20 bp, Artificial Sequence
  Description of Artificial Sequence: Synthetic oligonucleotide
  Target: LAMA2; (-) strand; PAM type: YTN; PAM sequence: CTC
ggcctcccaggttcaagcaa

SEQ ID NO: 292090 - DNA, 20 bp, Artificial Sequence
  Description of Artificial Sequence: Synthetic oligonucleotide
  Target: LAMA2; (-) strand; PAM type: YTN; PAM sequence: CTG
caacctcggcctcccaggtt

SEQ ID NO: 292091 - DNA, 20 bp, Artificial Sequence
  Description of Artificial Sequence: Synthetic oligonucleotide
  Target: LAMA2; (-) strand; PAM type: YTN; PAM sequence: CTC
actgcaacctcggcctccca

SEQ ID NO: 292092 - DNA, 20 bp, Artificial Sequence
  Description of Artificial Sequence: Synthetic oligonucleotide
  Target: LAMA2; (-) strand; PAM type: YTN; PAM sequence: CTC
ggctcactgcaacctcggcc

SEQ ID NO: 292093 - DNA, 20 bp, Artificial Sequence
  Description of Artificial Sequence: Synthetic oligonucleotide
  Target: LAMA2; (-) strand; PAM type: YTN; PAM sequence: CTG
gagtgcaatggcacaatctc

SEQ ID NO: 292094 - DNA, 20 bp, Artificial Sequence
  Description of Artificial Sequence: Synthetic oligonucleotide
  Target: LAMA2; (-) strand; PAM type: YTN; PAM sequence: TTG
tcgcgcaggctggagtgcaa

SEQ ID NO: 292095 - DNA, 20 bp, Artificial Sequence
  Description of Artificial Sequence: Synthetic oligonucleotide
  Target: LAMA2; (-) strand; PAM type: YTN; PAM sequence: CTC
acattgtcgcgcaggctgga

SEQ ID NO: 292096 - DNA, 20 bp, Artificial Sequence
  Description of Artificial Sequence: Synthetic oligonucleotide
  Target: LAMA2; (-) strand; PAM type: YTN; PAM sequence: TTC
gagtcggagtctcacattgt

SEQ ID NO: 292097 - DNA, 20 bp, Artificial Sequence
  Description of Artificial Sequence: Synthetic oligonucleotide
  Target: LAMA2; (-) strand; PAM type: YTN; PAM sequence: TTT
cgagtcggagtctcacattg

SEQ ID NO: 292098 - DNA, 20 bp, Artificial Sequence
  Description of Artificial Sequence: Synthetic oligonucleotide
  Target: LAMA2; (-) strand; PAM type: YTN; PAM sequence: TTT
tcgagtcggagtctcacatt

SEQ ID NO: 292099 - DNA, 20 bp, Artificial Sequence
  Description of Artificial Sequence: Synthetic oligonucleotide
  Target: LAMA2; (-) strand; PAM type: YTN; PAM sequence: TTT
ttcgagtcggagtctcacat

SEQ ID NO: 292100 - DNA, 20 bp, Artificial Sequence
  Description of Artificial Sequence: Synthetic oligonucleotide
  Target: LAMA2; (-) strand; PAM type: YTN; PAM sequence: TTT
tttcgagtcggagtctcaca

SEQ ID NO: 292101 - DNA, 20 bp, Artificial Sequence
  Description of Artificial Sequence: Synthetic oligonucleotide
  Target: LAMA2; (-) strand; PAM type: YTN; PAM sequence: TTT
ttttcgagtcggagtctcac

SEQ ID NO: 292102 - DNA, 20 bp, Artificial Sequence
  Description of Artificial Sequence: Synthetic oligonucleotide
  Target: LAMA2; (-) strand; PAM type: YTN; PAM sequence: TTT
tttttcgagtcggagtctca

SEQ ID NO: 292103 - DNA, 20 bp, Artificial Sequence
  Description of Artificial Sequence: Synthetic oligonucleotide
  Target: LAMA2; (-) strand; PAM type: YTN; PAM sequence: TTT
ttttttcgagtcggagtctc

SEQ ID NO: 292104 - DNA, 20 bp, Artificial Sequence
  Description of Artificial Sequence: Synthetic oligonucleotide
  Target: LAMA2; (-) strand; PAM type: YTN; PAM sequence: TTT
tttttttcgagtcggagtct

SEQ ID NO: 292105 - DNA, 20 bp, Artificial Sequence
  Description of Artificial Sequence: Synthetic oligonucleotide
  Target: LAMA2; (-) strand; PAM type: YTN; PAM sequence: TTT
ttttttttcgagtcggagtc

SEQ ID NO: 292106 - DNA, 20 bp, Artificial Sequence
  Description of Artificial Sequence: Synthetic oligonucleotide
  Target: LAMA2; (-) strand; PAM type: YTN; PAM sequence: TTT
tttttttttcgagtcggagt

SEQ ID NO: 292107 - DNA, 20 bp, Artificial Sequence
  Description of Artificial Sequence: Synthetic oligonucleotide
  Target: LAMA2; (-) strand; PAM type: YTN; PAM sequence: TTT
ttttttttttcgagtcggag

SEQ ID NO: 292108 - DNA, 20 bp, Artificial Sequence
  Description of Artificial Sequence: Synthetic oligonucleotide
  Target: LAMA2; (-) strand; PAM type: YTN; PAM sequence: TTT
tttttttttttcgagtcgga

SEQ ID NO: 292109 - DNA, 20 bp, Artificial Sequence
  Description of Artificial Sequence: Synthetic oligonucleotide
  Target: LAMA2; (-) strand; PAM type: YTN; PAM sequence: TTT
ttttttttttttcgagtcgg

SEQ ID NO: 292110 - DNA, 20 bp, Artificial Sequence
  Description of Artificial Sequence: Synthetic oligonucleotide
  Target: LAMA2; (-) strand; PAM type: YTN; PAM sequence: CTT
tttttttttttttcgagtcg

SEQ ID NO: 292111 - DNA, 20 bp, Artificial Sequence
  Description of Artificial Sequence: Synthetic oligonucleotide
  Target: LAMA2; (-) strand; PAM type: YTN; PAM sequence: TTC
tttttttttttttttcgagt

SEQ ID NO: 292112 - DNA, 20 bp, Artificial Sequence
  Description of Artificial Sequence: Synthetic oligonucleotide
  Target: LAMA2; (-) strand; PAM type: YTN; PAM sequence: TTT
ctttttttttttttttcgag

SEQ ID NO: 292113 - DNA, 20 bp, Artificial Sequence
  Description of Artificial Sequence: Synthetic oligonucleotide
  Target: LAMA2; (-) strand; PAM type: YTN; PAM sequence: TTT
tctttttttttttttttcga

SEQ ID NO: 292114 - DNA, 20 bp, Artificial Sequence
  Description of Artificial Sequence: Synthetic oligonucleotide
  Target: LAMA2; (-) strand; PAM type: YTN; PAM sequence: TTT
ttctttttttttttttttcg

SEQ ID NO: 292115 - DNA, 20 bp, Artificial Sequence
  Description of Artificial Sequence: Synthetic oligonucleotide
  Target: LAMA2; (-) strand; PAM type: YTN; PAM sequence: CTT
tttctttttttttttttttc

SEQ ID NO: 292116 - DNA, 20 bp, Artificial Sequence
  Description of Artificial Sequence: Synthetic oligonucleotide
  Target: LAMA2; (-) strand; PAM type: YTN; PAM sequence: TTC
tttttctttttttttttttt

SEQ ID NO: 292117 - DNA, 20 bp, Artificial Sequence
  Description of Artificial Sequence: Synthetic oligonucleotide
  Target: LAMA2; (-) strand; PAM type: YTN; PAM sequence: TTT
ctttttcttttttttttttt

SEQ ID NO: 292118 - DNA, 20 bp, Artificial Sequence
  Description of Artificial Sequence: Synthetic oligonucleotide
  Target: LAMA2; (-) strand; PAM type: YTN; PAM sequence: TTT
tctttttctttttttttttt

SEQ ID NO: 292119 - DNA, 20 bp, Artificial Sequence
  Description of Artificial Sequence: Synthetic oligonucleotide
  Target: LAMA2; (-) strand; PAM type: YTN; PAM sequence: TTT
ttctttttcttttttttttt

SEQ ID NO: 292120 - DNA, 20 bp, Artificial Sequence
  Description of Artificial Sequence: Synthetic oligonucleotide
  Target: LAMA2; (-) strand; PAM type: YTN; PAM sequence: TTT
tttctttttctttttttttt

SEQ ID NO: 292121 - DNA, 20 bp, Artificial Sequence
  Description of Artificial Sequence: Synthetic oligonucleotide
  Target: LAMA2; (-) strand; PAM type: YTN; PAM sequence: TTT
ttttctttttcttttttttt

SEQ ID NO: 292122 - DNA, 20 bp, Artificial Sequence
  Description of Artificial Sequence: Synthetic oligonucleotide
  Target: LAMA2; (-) strand; PAM type: YTN; PAM sequence: TTT
tttttctttttctttttttt

SEQ ID NO: 292123 - DNA, 20 bp, Artificial Sequence
  Description of Artificial Sequence: Synthetic oligonucleotide
  Target: LAMA2; (-) strand; PAM type: YTN; PAM sequence: CTT
ttttttctttttcttttttt

SEQ ID NO: 292124 - DNA, 20 bp, Artificial Sequence
  Description of Artificial Sequence: Synthetic oligonucleotide
  Target: LAMA2; (-) strand; PAM type: YTN; PAM sequence: TTC
ttttttttctttttcttttt

SEQ ID NO: 292125 - DNA, 20 bp, Artificial Sequence
  Description of Artificial Sequence: Synthetic oligonucleotide
  Target: LAMA2; (-) strand; PAM type: YTN; PAM sequence: TTT
cttttttttctttttctttt

SEQ ID NO: 292126 - DNA, 20 bp, Artificial Sequence
  Description of Artificial Sequence: Synthetic oligonucleotide
  Target: LAMA2; (-) strand; PAM type: YTN; PAM sequence: TTT
tcttttttttctttttcttt

SEQ ID NO: 292127 - DNA, 20 bp, Artificial Sequence
  Description of Artificial Sequence: Synthetic oligonucleotide
  Target: LAMA2; (-) strand; PAM type: YTN; PAM sequence: TTA
gattttcttttttttctttt

SEQ ID NO: 292128 - DNA, 20 bp, Artificial Sequence
  Description of Artificial Sequence: Synthetic oligonucleotide
  Target: LAMA2; (-) strand; PAM type: YTN; PAM sequence: TTT
agattttcttttttttcttt

SEQ ID NO: 292129 - DNA, 20 bp, Artificial Sequence
  Description of Artificial Sequence: Synthetic oligonucleotide
  Target: LAMA2; (-) strand; PAM type: YTN; PAM sequence: TTT
tagattttcttttttttctt

SEQ ID NO: 292130 - DNA, 20 bp, Artificial Sequence
  Description of Artificial Sequence: Synthetic oligonucleotide
  Target: LAMA2; (-) strand; PAM type: YTN; PAM sequence: TTT
ttagattttcttttttttct

SEQ ID NO: 292131 - DNA, 20 bp, Artificial Sequence
  Description of Artificial Sequence: Synthetic oligonucleotide
  Target: LAMA2; (-) strand; PAM type: YTN; PAM sequence: TTA
tttttagattttcttttttt

SEQ ID NO: 292132 - DNA, 20 bp, Artificial Sequence
  Description of Artificial Sequence: Synthetic oligonucleotide
  Target: LAMA2; (-) strand; PAM type: YTN; PAM sequence: TTA
tattatttttagattttctt

SEQ ID NO: 292133 - DNA, 20 bp, Artificial Sequence
  Description of Artificial Sequence: Synthetic oligonucleotide
  Target: LAMA2; (-) strand; PAM type: YTN; PAM sequence: TTG
acaagattatattattttta

SEQ ID NO: 292134 - DNA, 20 bp, Artificial Sequence
  Description of Artificial Sequence: Synthetic oligonucleotide
  Target: LAMA2; (-) strand; PAM type: YTN; PAM sequence: CTA
ttgacaagattatattattt

SEQ ID NO: 292135 - DNA, 20 bp, Artificial Sequence
  Description of Artificial Sequence: Synthetic oligonucleotide
  Target: LAMA2; (-) strand; PAM type: YTN; PAM sequence: CTA
tctattgacaagattatatt

SEQ ID NO: 292136 - DNA, 20 bp, Artificial Sequence
  Description of Artificial Sequence: Synthetic oligonucleotide
  Target: LAMA2; (-) strand; PAM type: YTN; PAM sequence: TTA
ctatctattgacaagattat

SEQ ID NO: 292137 - DNA, 20 bp, Artificial Sequence
  Description of Artificial Sequence: Synthetic oligonucleotide
  Target: LAMA2; (-) strand; PAM type: YTN; PAM sequence: TTT
actatctattgacaagatta

SEQ ID NO: 292138 - DNA, 20 bp, Artificial Sequence
  Description of Artificial Sequence: Synthetic oligonucleotide
  Target: LAMA2; (-) strand; PAM type: YTN; PAM sequence: TTT
tactatctattgacaagatt

SEQ ID NO: 292139 - DNA, 20 bp, Artificial Sequence
  Description of Artificial Sequence: Synthetic oligonucleotide
  Target: LAMA2; (-) strand; PAM type: YTN; PAM sequence: TTT
ttactatctattgacaagat

SEQ ID NO: 292140 - DNA, 20 bp, Artificial Sequence
  Description of Artificial Sequence: Synthetic oligonucleotide
  Target: LAMA2; (-) strand; PAM type: YTN; PAM sequence: TTA
ccaaatgtttttactatcta

SEQ ID NO: 292141 - DNA, 20 bp, Artificial Sequence
  Description of Artificial Sequence: Synthetic oligonucleotide
  Target: LAMA2; (-) strand; PAM type: YTN; PAM sequence: TTT
accaaatgtttttactatct

SEQ ID NO: 292142 - DNA, 20 bp, Artificial Sequence
  Description of Artificial Sequence: Synthetic oligonucleotide
  Target: LAMA2; (-) strand; PAM type: YTN; PAM sequence: TTT
taccaaatgtttttactatc

SEQ ID NO: 292143 - DNA, 20 bp, Artificial Sequence
  Description of Artificial Sequence: Synthetic oligonucleotide
  Target: LAMA2; (-) strand; PAM type: YTN; PAM sequence: TTA
aattttaccaaatgttttta

SEQ ID NO: 292144 - DNA, 20 bp, Artificial Sequence
  Description of Artificial Sequence: Synthetic oligonucleotide
  Target: LAMA2; (-) strand; PAM type: YTN; PAM sequence: CTG
ttaaattttaccaaatgttt

SEQ ID NO: 292145 - DNA, 20 bp, Artificial Sequence
  Description of Artificial Sequence: Synthetic oligonucleotide
  Target: LAMA2; (-) strand; PAM type: YTN; PAM sequence: TTA
aaaatcatgaatgactgtta

SEQ ID NO: 292146 - DNA, 20 bp, Artificial Sequence
  Description of Artificial Sequence: Synthetic oligonucleotide
  Target: LAMA2; (-) strand; PAM type: YTN; PAM sequence: TTT
aaaaatcatgaatgactgtt

SEQ ID NO: 292147 - DNA, 20 bp, Artificial Sequence
  Description of Artificial Sequence: Synthetic oligonucleotide
  Target: LAMA2; (-) strand; PAM type: YTN; PAM sequence: TTT
taaaaatcatgaatgactgt

SEQ ID NO: 292148 - DNA, 20 bp, Artificial Sequence
  Description of Artificial Sequence: Synthetic oligonucleotide
  Target: LAMA2; (-) strand; PAM type: YTN; PAM sequence: TTT
ttaaaaatcatgaatgactg

SEQ ID NO: 292149 - DNA, 20 bp, Artificial Sequence
  Description of Artificial Sequence: Synthetic oligonucleotide
  Target: LAMA2; (-) strand; PAM type: YTN; PAM sequence: TTT
tttaaaaatcatgaatgact

SEQ ID NO: 292150 - DNA, 20 bp, Artificial Sequence
  Description of Artificial Sequence: Synthetic oligonucleotide
  Target: LAMA2; (-) strand; PAM type: YTN; PAM sequence: TTA
agtattttttaaaaatcatg

SEQ ID NO: 292151 - DNA, 20 bp, Artificial Sequence
  Description of Artificial Sequence: Synthetic oligonucleotide
  Target: LAMA2; (-) strand; PAM type: YTN; PAM sequence: CTT
aagtattttttaaaaatcat

SEQ ID NO: 292152 - DNA, 20 bp, Artificial Sequence
  Description of Artificial Sequence: Synthetic oligonucleotide
  Target: LAMA2; (-) strand; PAM type: YTN; PAM sequence: TTA
cttaagtattttttaaaaat

SEQ ID NO: 292153 - DNA, 20 bp, Artificial Sequence
  Description of Artificial Sequence: Synthetic oligonucleotide
  Target: LAMA2; (-) strand; PAM type: YTN; PAM sequence: TTT
acttaagtattttttaaaaa

SEQ ID NO: 292154 - DNA, 20 bp, Artificial Sequence
  Description of Artificial Sequence: Synthetic oligonucleotide
  Target: LAMA2; (-) strand; PAM type: YTN; PAM sequence: TTA
gtttacttaagtatttttta

SEQ ID NO: 292155 - DNA, 20 bp, Artificial Sequence
  Description of Artificial Sequence: Synthetic oligonucleotide
  Target: LAMA2; (-) strand; PAM type: YTN; PAM sequence: CTT
agtttacttaagtatttttt

SEQ ID NO: 292156 - DNA, 20 bp, Artificial Sequence
  Description of Artificial Sequence: Synthetic oligonucleotide
  Target: LAMA2; (-) strand; PAM type: YTN; PAM sequence: CTC
ttagtttacttaagtatttt

SEQ ID NO: 292157 - DNA, 20 bp, Artificial Sequence
  Description of Artificial Sequence: Synthetic oligonucleotide
  Target: LAMA2; (-) strand; PAM type: YTN; PAM sequence: TTC
ctcttagtttacttaagtat

SEQ ID NO: 292158 - DNA, 20 bp, Artificial Sequence
  Description of Artificial Sequence: Synthetic oligonucleotide
  Target: LAMA2; (-) strand; PAM type: YTN; PAM sequence: CTT
cctcttagtttacttaagta

SEQ ID NO: 292159 - DNA, 20 bp, Artificial Sequence
  Description of Artificial Sequence: Synthetic oligonucleotide
  Target: LAMA2; (-) strand; PAM type: YTN; PAM sequence: TTC
cttcctcttagtttacttaa

SEQ ID NO: 292160 - DNA, 20 bp, Artificial Sequence
  Description of Artificial Sequence: Synthetic oligonucleotide
  Target: LAMA2; (-) strand; PAM type: YTN; PAM sequence: CTA
aggaagttccttcctcttag

SEQ ID NO: 292161 - DNA, 20 bp, Artificial Sequence
  Description of Artificial Sequence: Synthetic oligonucleotide
  Target: LAMA2; (-) strand; PAM type: YTN; PAM sequence: TTA
tagatggctaaggaagttcc

SEQ ID NO: 292162 - DNA, 20 bp, Artificial Sequence
  Description of Artificial Sequence: Synthetic oligonucleotide
  Target: LAMA2; (-) strand; PAM type: YTN; PAM sequence: TTT
atagatggctaaggaagttc

SEQ ID NO: 292163 - DNA, 20 bp, Artificial Sequence
  Description of Artificial Sequence: Synthetic oligonucleotide
  Target: LAMA2; (-) strand; PAM type: YTN; PAM sequence: TTT
tatagatggctaaggaagtt

SEQ ID NO: 292164 - DNA, 20 bp, Artificial Sequence
  Description of Artificial Sequence: Synthetic oligonucleotide
  Target: LAMA2; (-) strand; PAM type: YTN; PAM sequence: TTT
ttatagatggctaaggaagt

SEQ ID NO: 292165 - DNA, 20 bp, Artificial Sequence
  Description of Artificial Sequence: Synthetic oligonucleotide
  Target: LAMA2; (-) strand; PAM type: YTN; PAM sequence: TTT
tttatagatggctaaggaag

SEQ ID NO: 292166 - DNA, 20 bp, Artificial Sequence
  Description of Artificial Sequence: Synthetic oligonucleotide
  Target: LAMA2; (-) strand; PAM type: YTN; PAM sequence: TTT
ttttatagatggctaaggaa

SEQ ID NO: 292167 - DNA, 20 bp, Artificial Sequence
  Description of Artificial Sequence: Synthetic oligonucleotide
  Target: LAMA2; (-) strand; PAM type: YTN; PAM sequence: TTT
tttttatagatggctaagga

SEQ ID NO: 292168 - DNA, 20 bp, Artificial Sequence
  Description of Artificial Sequence: Synthetic oligonucleotide
  Target: LAMA2; (-) strand; PAM type: YTN; PAM sequence: TTT
ttttttatagatggctaagg

SEQ ID NO: 292169 - DNA, 20 bp, Artificial Sequence
  Description of Artificial Sequence: Synthetic oligonucleotide
  Target: LAMA2; (-) strand; PAM type: YTN; PAM sequence: TTT
tttttttatagatggctaag

SEQ ID NO: 292170 - DNA, 20 bp, Artificial Sequence
  Description of Artificial Sequence: Synthetic oligonucleotide
  Target: LAMA2; (-) strand; PAM type: YTN; PAM sequence: TTA
tagttttttttttatagatg

SEQ ID NO: 292171 - DNA, 20 bp, Artificial Sequence
  Description of Artificial Sequence: Synthetic oligonucleotide
  Target: LAMA2; (-) strand; PAM type: YTN; PAM sequence: TTG
ttatagttttttttttatag

SEQ ID NO: 292172 - DNA, 20 bp, Artificial Sequence
  Description of Artificial Sequence: Synthetic oligonucleotide
  Target: LAMA2; (-) strand; PAM type: YTN; PAM sequence: CTT
gttatagttttttttttata

SEQ ID NO: 292173 - DNA, 20 bp, Artificial Sequence
  Description of Artificial Sequence: Synthetic oligonucleotide
  Target: LAMA2; (-) strand; PAM type: YTN; PAM sequence: TTA
aatcaggaatacttgttata

SEQ ID NO: 292174 - DNA, 20 bp, Artificial Sequence
  Description of Artificial Sequence: Synthetic oligonucleotide
  Target: LAMA2; (-) strand; PAM type: YTN; PAM sequence: TTT
aaatcaggaatacttgttat

SEQ ID NO: 292175 - DNA, 20 bp, Artificial Sequence
  Description of Artificial Sequence: Synthetic oligonucleotide
  Target: LAMA2; (-) strand; PAM type: YTN; PAM sequence: TTT
taaatcaggaatacttgtta

SEQ ID NO: 292176 - DNA, 20 bp, Artificial Sequence
  Description of Artificial Sequence: Synthetic oligonucleotide
  Target: LAMA2; (-) strand; PAM type: YTN; PAM sequence: TTT
ttaaatcaggaatacttgtt

SEQ ID NO: 292177 - DNA, 20 bp, Artificial Sequence
  Description of Artificial Sequence: Synthetic oligonucleotide
  Target: LAMA2; (-) strand; PAM type: YTN; PAM sequence: TTT
tttaaatcaggaatacttgt

SEQ ID NO: 292178 - DNA, 20 bp, Artificial Sequence
  Description of Artificial Sequence: Synthetic oligonucleotide
  Target: LAMA2; (-) strand; PAM type: YTN; PAM sequence: TTT
ttttaaatcaggaatacttg

SEQ ID NO: 292179 - DNA, 20 bp, Artificial Sequence
  Description of Artificial Sequence: Synthetic oligonucleotide
  Target: LAMA2; (-) strand; PAM type: YTN; PAM sequence: TTT
tttttaaatcaggaatactt

SEQ ID NO: 292180 - DNA, 20 bp, Artificial Sequence
  Description of Artificial Sequence: Synthetic oligonucleotide
  Target: LAMA2; (-) strand; PAM type: YTN; PAM sequence: CTT
ttttttaaatcaggaatact

SEQ ID NO: 292181 - DNA, 20 bp, Artificial Sequence
  Description of Artificial Sequence: Synthetic oligonucleotide
  Target: LAMA2; (-) strand; PAM type: YTN; PAM sequence: TTA
taatgtcttttttttaaatc

SEQ ID NO: 292182 - DNA, 20 bp, Artificial Sequence
  Description of Artificial Sequence: Synthetic oligonucleotide
  Target: LAMA2; (-) strand; PAM type: YTN; PAM sequence: TTT
ataatgtcttttttttaaat

SEQ ID NO: 292183 - DNA, 20 bp, Artificial Sequence
  Description of Artificial Sequence: Synthetic oligonucleotide
  Target: LAMA2; (-) strand; PAM type: YTN; PAM sequence: TTA
tagcaaatgtttataatgtc

SEQ ID NO: 292184 - DNA, 20 bp, Artificial Sequence
  Description of Artificial Sequence: Synthetic oligonucleotide
  Target: LAMA2; (-) strand; PAM type: YTN; PAM sequence: TTT
atagcaaatgtttataatgt

SEQ ID NO: 292185 - DNA, 20 bp, Artificial Sequence
  Description of Artificial Sequence: Synthetic oligonucleotide
  Target: LAMA2; (-) strand; PAM type: YTN; PAM sequence: TTT
tatagcaaatgtttataatg

SEQ ID NO: 292186 - DNA, 20 bp, Artificial Sequence
  Description of Artificial Sequence: Synthetic oligonucleotide
  Target: LAMA2; (-) strand; PAM type: YTN; PAM sequence: TTG
attttatagcaaatgtttat

SEQ ID NO: 292187 - DNA, 20 bp, Artificial Sequence
  Description of Artificial Sequence: Synthetic oligonucleotide
  Target: LAMA2; (-) strand; PAM type: YTN; PAM sequence: CTT
gattttatagcaaatgttta

SEQ ID NO: 292188 - DNA, 20 bp, Artificial Sequence
  Description of Artificial Sequence: Synthetic oligonucleotide
  Target: LAMA2; (-) strand; PAM type: YTN; PAM sequence: TTG
ggcttgattttatagcaaat

SEQ ID NO: 292189 - DNA, 20 bp, Artificial Sequence
  Description of Artificial Sequence: Synthetic oligonucleotide
  Target: LAMA2; (-) strand; PAM type: YTN; PAM sequence: CTT
gggcttgattttatagcaaa

SEQ ID NO: 292190 - DNA, 20 bp, Artificial Sequence
  Description of Artificial Sequence: Synthetic oligonucleotide
  Target: LAMA2; (-) strand; PAM type: YTN; PAM sequence: TTC
ttgggcttgattttatagca

SEQ ID NO: 292191 - DNA, 20 bp, Artificial Sequence
  Description of Artificial Sequence: Synthetic oligonucleotide
  Target: LAMA2; (-) strand; PAM type: YTN; PAM sequence: TTT
cttgggcttgattttatagc

SEQ ID NO: 292192 - DNA, 20 bp, Artificial Sequence
  Description of Artificial Sequence: Synthetic oligonucleotide
  Target: LAMA2; (-) strand; PAM type: YTN; PAM sequence: CTG
tttcttgggcttgattttat

SEQ ID NO: 292193 - DNA, 20 bp, Artificial Sequence
  Description of Artificial Sequence: Synthetic oligonucleotide
  Target: LAMA2; (-) strand; PAM type: YTN; PAM sequence: CTA
agatcagtgcagtcaaaata

SEQ ID NO: 292194 - DNA, 20 bp, Artificial Sequence
  Description of Artificial Sequence: Synthetic oligonucleotide
  Target: LAMA2; (-) strand; PAM type: YTN; PAM sequence: CTA
gctaagatcagtgcagtcaa

SEQ ID NO: 292195 - DNA, 20 bp, Artificial Sequence
  Description of Artificial Sequence: Synthetic oligonucleotide
  Target: LAMA2; (-) strand; PAM type: YTN; PAM sequence: CTA
tgctagctaagatcagtgca

SEQ ID NO: 292196 - DNA, 20 bp, Artificial Sequence
  Description of Artificial Sequence: Synthetic oligonucleotide
  Target: LAMA2; (-) strand; PAM type: YTN; PAM sequence: TTA
ctatgctagctaagatcagt

SEQ ID NO: 292197 - DNA, 20 bp, Artificial Sequence
  Description of Artificial Sequence: Synthetic oligonucleotide
  Target: LAMA2; (-) strand; PAM type: YTN; PAM sequence: CTT
actatgctagctaagatcag

SEQ ID NO: 292198 - DNA, 20 bp, Artificial Sequence
  Description of Artificial Sequence: Synthetic oligonucleotide
  Target: LAMA2; (-) strand; PAM type: YTN; PAM sequence: TTC
ttactatgctagctaagatc

SEQ ID NO: 292199 - DNA, 20 bp, Artificial Sequence
  Description of Artificial Sequence: Synthetic oligonucleotide
  Target: LAMA2; (-) strand; PAM type: YTN; PAM sequence: TTT
cttactatgctagctaagat

SEQ ID NO: 292200 - DNA, 20 bp, Artificial Sequence
  Description of Artificial Sequence: Synthetic oligonucleotide
  Target: LAMA2; (-) strand; PAM type: YTN; PAM sequence: TTT
tcttactatgctagctaaga

SEQ ID NO: 292201 - DNA, 20 bp, Artificial Sequence
  Description of Artificial Sequence: Synthetic oligonucleotide
  Target: LAMA2; (-) strand; PAM type: YTN; PAM sequence: CTT
ttcttactatgctagctaag

SEQ ID NO: 292202 - DNA, 20 bp, Artificial Sequence
  Description of Artificial Sequence: Synthetic oligonucleotide
  Target: LAMA2; (-) strand; PAM type: YTN; PAM sequence: TTC
ttttcttactatgctagcta

SEQ ID NO: 292203 - DNA, 20 bp, Artificial Sequence
  Description of Artificial Sequence: Synthetic oligonucleotide
  Target: LAMA2; (-) strand; PAM type: YTN; PAM sequence: TTG
ttcttttcttactatgctag

SEQ ID NO: 292204 - DNA, 20 bp, Artificial Sequence
  Description of Artificial Sequence: Synthetic oligonucleotide
  Target: LAMA2; (-) strand; PAM type: YTN; PAM sequence: CTT
gttcttttcttactatgcta

SEQ ID NO: 292205 - DNA, 20 bp, Artificial Sequence
  Description of Artificial Sequence: Synthetic oligonucleotide
  Target: LAMA2; (-) strand; PAM type: YTN; PAM sequence: TTA
cttgttcttttcttactatg

SEQ ID NO: 292206 - DNA, 20 bp, Artificial Sequence
  Description of Artificial Sequence: Synthetic oligonucleotide
  Target: LAMA2; (-) strand; PAM type: YTN; PAM sequence: TTT
acttgttcttttcttactat

SEQ ID NO: 292207 - DNA, 20 bp, Artificial Sequence
  Description of Artificial Sequence: Synthetic oligonucleotide
  Target: LAMA2; (-) strand; PAM type: YTN; PAM sequence: CTA
tatttacttgttcttttctt

SEQ ID NO: 292208 - DNA, 20 bp, Artificial Sequence
  Description of Artificial Sequence: Synthetic oligonucleotide
  Target: LAMA2; (-) strand; PAM type: YTN; PAM sequence: TTG
tgctatatttacttgttctt

SEQ ID NO: 292209 - DNA, 20 bp, Artificial Sequence
  Description of Artificial Sequence: Synthetic oligonucleotide
  Target: LAMA2; (-) strand; PAM type: YTN; PAM sequence: CTT
gtgctatatttacttgttct

SEQ ID NO: 292210 - DNA, 20 bp, Artificial Sequence
  Description of Artificial Sequence: Synthetic oligonucleotide
  Target: LAMA2; (-) strand; PAM type: YTN; PAM sequence: TTC
ttgtgctatatttacttgtt

SEQ ID NO: 292211 - DNA, 20 bp, Artificial Sequence
  Description of Artificial Sequence: Synthetic oligonucleotide
  Target: LAMA2; (-) strand; PAM type: YTN; PAM sequence: TTG
ttcttgtgctatatttactt

SEQ ID NO: 292212 - DNA, 20 bp, Artificial Sequence
  Description of Artificial Sequence: Synthetic oligonucleotide
  Target: LAMA2; (-) strand; PAM type: YTN; PAM sequence: CTT
gttcttgtgctatatttact

SEQ ID NO: 292213 - DNA, 20 bp, Artificial Sequence
  Description of Artificial Sequence: Synthetic oligonucleotide
  Target: LAMA2; (-) strand; PAM type: YTN; PAM sequence: TTC
ttgttcttgtgctatattta

SEQ ID NO: 292214 - DNA, 20 bp, Artificial Sequence
  Description of Artificial Sequence: Synthetic oligonucleotide
  Target: LAMA2; (-) strand; PAM type: YTN; PAM sequence: TTA
ttcttgttcttgtgctatat

SEQ ID NO: 292215 - DNA, 20 bp, Artificial Sequence
  Description of Artificial Sequence: Synthetic oligonucleotide
  Target: LAMA2; (-) strand; PAM type: YTN; PAM sequence: CTT
attcttgttcttgtgctata

SEQ ID NO: 292216 - DNA, 20 bp, Artificial Sequence
  Description of Artificial Sequence: Synthetic oligonucleotide
  Target: LAMA2; (-) strand; PAM type: YTN; PAM sequence: TTC
ttattcttgttcttgtgcta

SEQ ID NO: 292217 - DNA, 20 bp, Artificial Sequence
  Description of Artificial Sequence: Synthetic oligonucleotide
  Target: LAMA2; (-) strand; PAM type: YTN; PAM sequence: TTG
ttcttattcttgttcttgtg

SEQ ID NO: 292218 - DNA, 20 bp, Artificial Sequence
  Description of Artificial Sequence: Synthetic oligonucleotide
  Target: LAMA2; (-) strand; PAM type: YTN; PAM sequence: TTT
gttcttattcttgttcttgt

SEQ ID NO: 292219 - DNA, 20 bp, Artificial Sequence
  Description of Artificial Sequence: Synthetic oligonucleotide
  Target: LAMA2; (-) strand; PAM type: YTN; PAM sequence: TTA
tatatttgttcttattcttg

SEQ ID NO: 292220 - DNA, 20 bp, Artificial Sequence
  Description of Artificial Sequence: Synthetic oligonucleotide
  Target: LAMA2; (-) strand; PAM type: YTN; PAM sequence: TTA
aattatatatttgttcttat

SEQ ID NO: 292221 - DNA, 20 bp, Artificial Sequence
  Description of Artificial Sequence: Synthetic oligonucleotide
  Target: LAMA2; (-) strand; PAM type: YTN; PAM sequence: CTT
aaattatatatttgttctta

SEQ ID NO: 292222 - DNA, 20 bp, Artificial Sequence
  Description of Artificial Sequence: Synthetic oligonucleotide
  Target: LAMA2; (-) strand; PAM type: YTN; PAM sequence: TTC
ttaaattatatatttgttct

SEQ ID NO: 292223 - DNA, 20 bp, Artificial Sequence
  Description of Artificial Sequence: Synthetic oligonucleotide
  Target: LAMA2; (-) strand; PAM type: YTN; PAM sequence: TTA
taatgattcttaaattatat

SEQ ID NO: 292224 - DNA, 20 bp, Artificial Sequence
  Description of Artificial Sequence: Synthetic oligonucleotide
  Target: LAMA2; (-) strand; PAM type: YTN; PAM sequence: TTG
ttataatgattcttaaatta

SEQ ID NO: 292225 - DNA, 20 bp, Artificial Sequence
  Description of Artificial Sequence: Synthetic oligonucleotide
  Target: LAMA2; (-) strand; PAM type: YTN; PAM sequence: TTT
gttataatgattcttaaatt

SEQ ID NO: 292226 - DNA, 20 bp, Artificial Sequence
  Description of Artificial Sequence: Synthetic oligonucleotide
  Target: LAMA2; (-) strand; PAM type: YTN; PAM sequence: TTT
tgttataatgattcttaaat

SEQ ID NO: 292227 - DNA, 20 bp, Artificial Sequence
  Description of Artificial Sequence: Synthetic oligonucleotide
  Target: LAMA2; (-) strand; PAM type: YTN; PAM sequence: CTA
ttttgttataatgattctta

SEQ ID NO: 292228 - DNA, 20 bp, Artificial Sequence
  Description of Artificial Sequence: Synthetic oligonucleotide
  Target: LAMA2; (-) strand; PAM type: YTN; PAM sequence: TTA
tgtctattttgttataatga

SEQ ID NO: 292229 - DNA, 20 bp, Artificial Sequence
  Description of Artificial Sequence: Synthetic oligonucleotide
  Target: LAMA2; (-) strand; PAM type: YTN; PAM sequence: TTT
atgtctattttgttataatg

SEQ ID NO: 292230 - DNA, 20 bp, Artificial Sequence
  Description of Artificial Sequence: Synthetic oligonucleotide
  Target: LAMA2; (-) strand; PAM type: YTN; PAM sequence: CTT
tatgtctattttgttataat

SEQ ID NO: 292231 - DNA, 20 bp, Artificial Sequence
  Description of Artificial Sequence: Synthetic oligonucleotide
  Target: LAMA2; (-) strand; PAM type: YTN; PAM sequence: CTC
catatgggctttatgtctat

SEQ ID NO: 292232 - DNA, 20 bp, Artificial Sequence
  Description of Artificial Sequence: Synthetic oligonucleotide
  Target: LAMA2; (-) strand; PAM type: YTN; PAM sequence: TTC
tccatatgggctttatgtct

SEQ ID NO: 292233 - DNA, 20 bp, Artificial Sequence
  Description of Artificial Sequence: Synthetic oligonucleotide
  Target: LAMA2; (-) strand; PAM type: YTN; PAM sequence: TTT
ctccatatgggctttatgtc

SEQ ID NO: 292234 - DNA, 20 bp, Artificial Sequence
  Description of Artificial Sequence: Synthetic oligonucleotide
  Target: LAMA2; (-) strand; PAM type: YTN; PAM sequence: TTT
tctccatatgggctttatgt

SEQ ID NO: 292235 - DNA, 20 bp, Artificial Sequence
  Description of Artificial Sequence: Synthetic oligonucleotide
  Target: LAMA2; (-) strand; PAM type: YTN; PAM sequence: TTA
taattttctccatatgggct

SEQ ID NO: 292236 - DNA, 20 bp, Artificial Sequence
  Description of Artificial Sequence: Synthetic oligonucleotide
  Target: LAMA2; (-) strand; PAM type: YTN; PAM sequence: TTT
ataattttctccatatgggc

SEQ ID NO: 292237 - DNA, 20 bp, Artificial Sequence
  Description of Artificial Sequence: Synthetic oligonucleotide
  Target: LAMA2; (-) strand; PAM type: YTN; PAM sequence: TTT
tataattttctccatatggg

SEQ ID NO: 292238 - DNA, 20 bp, Artificial Sequence
  Description of Artificial Sequence: Synthetic oligonucleotide
  Target: LAMA2; (-) strand; PAM type: YTN; PAM sequence: TTC
aatgaaattttataattttc

SEQ ID NO: 292239 - DNA, 20 bp, Artificial Sequence
  Description of Artificial Sequence: Synthetic oligonucleotide
  Target: LAMA2; (-) strand; PAM type: YTN; PAM sequence: TTG
gtatcattcaatgaaatttt

SEQ ID NO: 292240 - DNA, 20 bp, Artificial Sequence
  Description of Artificial Sequence: Synthetic oligonucleotide
  Target: LAMA2; (-) strand; PAM type: YTN; PAM sequence: TTT
ggtatcattcaatgaaattt

SEQ ID NO: 292241 - DNA, 20 bp, Artificial Sequence
  Description of Artificial Sequence: Synthetic oligonucleotide
  Target: LAMA2; (-) strand; PAM type: YTN; PAM sequence: CTT
tggtatcattcaatgaaatt

SEQ ID NO: 292242 - DNA, 20 bp, Artificial Sequence
  Description of Artificial Sequence: Synthetic oligonucleotide
  Target: LAMA2; (-) strand; PAM type: YTN; PAM sequence: TTG
agaaatactttggtatcatt

SEQ ID NO: 292243 - DNA, 20 bp, Artificial Sequence
  Description of Artificial Sequence: Synthetic oligonucleotide
  Target: LAMA2; (-) strand; PAM type: YTN; PAM sequence: CTA
taatcattgagaaatacttt

SEQ ID NO: 292244 - DNA, 20 bp, Artificial Sequence
  Description of Artificial Sequence: Synthetic oligonucleotide
  Target: LAMA2; (-) strand; PAM type: YTN; PAM sequence: TTG
actataatcattgagaaata

SEQ ID NO: 292245 - DNA, 20 bp, Artificial Sequence
  Description of Artificial Sequence: Synthetic oligonucleotide
  Target: LAMA2; (-) strand; PAM type: YTN; PAM sequence: TTA
ttgactataatcattgagaa

SEQ ID NO: 292246 - DNA, 20 bp, Artificial Sequence
  Description of Artificial Sequence: Synthetic oligonucleotide
  Target: LAMA2; (-) strand; PAM type: YTN; PAM sequence: TTT
attgactataatcattgaga

SEQ ID NO: 292247 - DNA, 20 bp, Artificial Sequence
  Description of Artificial Sequence: Synthetic oligonucleotide
  Target: LAMA2; (-) strand; PAM type: YTN; PAM sequence: CTA
taccaatttattgactataa

SEQ ID NO: 292248 - DNA, 20 bp, Artificial Sequence
  Description of Artificial Sequence: Synthetic oligonucleotide
  Target: LAMA2; (-) strand; PAM type: YTN; PAM sequence: TTG
actataccaatttattgact

SEQ ID NO: 292249 - DNA, 20 bp, Artificial Sequence
  Description of Artificial Sequence: Synthetic oligonucleotide
  Target: LAMA2; (-) strand; PAM type: YTN; PAM sequence: TTA
acatgttgactataccaatt

SEQ ID NO: 292250 - DNA, 20 bp, Artificial Sequence
  Description of Artificial Sequence: Synthetic oligonucleotide
  Target: LAMA2; (-) strand; PAM type: YTN; PAM sequence: TTC
attaacatgttgactatacc

SEQ ID NO: 292251 - DNA, 20 bp, Artificial Sequence
  Description of Artificial Sequence: Synthetic oligonucleotide
  Target: LAMA2; (-) strand; PAM type: YTN; PAM sequence: CTT
cattaacatgttgactatac

SEQ ID NO: 292252 - DNA, 20 bp, Artificial Sequence
  Description of Artificial Sequence: Synthetic oligonucleotide
  Target: LAMA2; (-) strand; PAM type: YTN; PAM sequence: TTA
atatcttcattaacatgttg

SEQ ID NO: 292253 - DNA, 20 bp, Artificial Sequence
  Description of Artificial Sequence: Synthetic oligonucleotide
  Target: LAMA2; (-) strand; PAM type: YTN; PAM sequence: TTT
aatatcttcattaacatgtt

SEQ ID NO: 292254 - DNA, 20 bp, Artificial Sequence
  Description of Artificial Sequence: Synthetic oligonucleotide
  Target: LAMA2; (-) strand; PAM type: YTN; PAM sequence: CTT
taatatcttcattaacatgt

SEQ ID NO: 292255 - DNA, 20 bp, Artificial Sequence
  Description of Artificial Sequence: Synthetic oligonucleotide
  Target: LAMA2; (-) strand; PAM type: YTN; PAM sequence: TTG
agtctttaatatcttcatta

SEQ ID NO: 292256 - DNA, 20 bp, Artificial Sequence
  Description of Artificial Sequence: Synthetic oligonucleotide
  Target: LAMA2; (-) strand; PAM type: YTN; PAM sequence: TTA
atattgagtctttaatatct

SEQ ID NO: 292257 - DNA, 20 bp, Artificial Sequence
  Description of Artificial Sequence: Synthetic oligonucleotide
  Target: LAMA2; (-) strand; PAM type: YTN; PAM sequence: TTT
aatattgagtctttaatatc

SEQ ID NO: 292258 - DNA, 20 bp, Artificial Sequence
  Description of Artificial Sequence: Synthetic oligonucleotide
  Target: LAMA2; (-) strand; PAM type: YTN; PAM sequence: TTT
taatattgagtctttaatat

SEQ ID NO: 292259 - DNA, 20 bp, Artificial Sequence
  Description of Artificial Sequence: Synthetic oligonucleotide
  Target: LAMA2; (-) strand; PAM type: YTN; PAM sequence: TTT
ttaatattgagtctttaata

SEQ ID NO: 292260 - DNA, 20 bp, Artificial Sequence
  Description of Artificial Sequence: Synthetic oligonucleotide
  Target: LAMA2; (-) strand; PAM type: YTN; PAM sequence: TTG
gggagaaatgacatattttt

SEQ ID NO: 292261 - DNA, 20 bp, Artificial Sequence
  Description of Artificial Sequence: Synthetic oligonucleotide
  Target: LAMA2; (-) strand; PAM type: YTN; PAM sequence: TTT
ggggagaaatgacatatttt

SEQ ID NO: 292262 - DNA, 20 bp, Artificial Sequence
  Description of Artificial Sequence: Synthetic oligonucleotide
  Target: LAMA2; (-) strand; PAM type: YTN; PAM sequence: TTT
tggggagaaatgacatattt

SEQ ID NO: 292263 - DNA, 20 bp, Artificial Sequence
  Description of Artificial Sequence: Synthetic oligonucleotide
  Target: LAMA2; (-) strand; PAM type: YTN; PAM sequence: CTA
catatcattttggggagaaa

SEQ ID NO: 292264 - DNA, 20 bp, Artificial Sequence
  Description of Artificial Sequence: Synthetic oligonucleotide
  Target: LAMA2; (-) strand; PAM type: YTN; PAM sequence: TTG
aatctacatatcattttggg

SEQ ID NO: 292265 - DNA, 20 bp, Artificial Sequence
  Description of Artificial Sequence: Synthetic oligonucleotide
  Target: LAMA2; (-) strand; PAM type: YTN; PAM sequence: TTA
taattgaatctacatatcat

SEQ ID NO: 292266 - DNA, 20 bp, Artificial Sequence
  Description of Artificial Sequence: Synthetic oligonucleotide
  Target: LAMA2; (-) strand; PAM type: YTN; PAM sequence: TTA
ttataattgaatctacatat

SEQ ID NO: 292267 - DNA, 20 bp, Artificial Sequence
  Description of Artificial Sequence: Synthetic oligonucleotide
  Target: LAMA2; (-) strand; PAM type: YTN; PAM sequence: TTT
attataattgaatctacata

SEQ ID NO: 292268 - DNA, 20 bp, Artificial Sequence
  Description of Artificial Sequence: Synthetic oligonucleotide
  Target: LAMA2; (-) strand; PAM type: YTN; PAM sequence: TTT
tattataattgaatctacat

SEQ ID NO: 292269 - DNA, 20 bp, Artificial Sequence
  Description of Artificial Sequence: Synthetic oligonucleotide
  Target: LAMA2; (-) strand; PAM type: YTN; PAM sequence: TTT
ttattataattgaatctaca

SEQ ID NO: 292270 - DNA, 20 bp, Artificial Sequence
  Description of Artificial Sequence: Synthetic oligonucleotide
  Target: LAMA2; (-) strand; PAM type: YTN; PAM sequence: TTC
acagaaaaataaggtgatat

SEQ ID NO: 292271 - DNA, 20 bp, Artificial Sequence
  Description of Artificial Sequence: Synthetic oligonucleotide
  Target: LAMA2; (-) strand; PAM type: YTN; PAM sequence: CTG
tcatgattcacagaaaaata

SEQ ID NO: 292272 - DNA, 20 bp, Artificial Sequence
  Description of Artificial Sequence: Synthetic oligonucleotide
  Target: LAMA2; (-) strand; PAM type: YTN; PAM sequence: TTA
gaataagctgtcatgattca

SEQ ID NO: 292273 - DNA, 20 bp, Artificial Sequence
  Description of Artificial Sequence: Synthetic oligonucleotide
  Target: LAMA2; (-) strand; PAM type: YTN; PAM sequence: TTT
agaataagctgtcatgattc

SEQ ID NO: 292274 - DNA, 20 bp, Artificial Sequence
  Description of Artificial Sequence: Synthetic oligonucleotide
  Target: LAMA2; (-) strand; PAM type: YTN; PAM sequence: TTT
tagaataagctgtcatgatt

SEQ ID NO: 292275 - DNA, 20 bp, Artificial Sequence
  Description of Artificial Sequence: Synthetic oligonucleotide
  Target: LAMA2; (-) strand; PAM type: YTN; PAM sequence: TTG
atataaattttagaataagc

SEQ ID NO: 292276 - DNA, 20 bp, Artificial Sequence
  Description of Artificial Sequence: Synthetic oligonucleotide
  Target: LAMA2; (-) strand; PAM type: YTN; PAM sequence: TTT
gatataaattttagaataag

SEQ ID NO: 292277 - DNA, 20 bp, Artificial Sequence
  Description of Artificial Sequence: Synthetic oligonucleotide
  Target: LAMA2; (-) strand; PAM type: YTN; PAM sequence: CTT
tgatataaattttagaataa

SEQ ID NO: 292278 - DNA, 20 bp, Artificial Sequence
  Description of Artificial Sequence: Synthetic oligonucleotide
  Target: LAMA2; (-) strand; PAM type: YTN; PAM sequence: TTC
atctttgatataaattttag

SEQ ID NO: 292279 - DNA, 20 bp, Artificial Sequence
  Description of Artificial Sequence: Synthetic oligonucleotide
  Target: LAMA2; (-) strand; PAM type: YTN; PAM sequence: TTT
catctttgatataaatttta

SEQ ID NO: 292280 - DNA, 20 bp, Artificial Sequence
  Description of Artificial Sequence: Synthetic oligonucleotide
  Target: LAMA2; (-) strand; PAM type: YTN; PAM sequence: CTA
ggaatttcatctttgatata

SEQ ID NO: 292281 - DNA, 20 bp, Artificial Sequence
  Description of Artificial Sequence: Synthetic oligonucleotide
  Target: LAMA2; (-) strand; PAM type: YTN; PAM sequence: TTC
taggaatttcatctttgata

SEQ ID NO: 292282 - DNA, 20 bp, Artificial Sequence
  Description of Artificial Sequence: Synthetic oligonucleotide
  Target: LAMA2; (-) strand; PAM type: YTN; PAM sequence: CTA
ttctaggaatttcatctttg

SEQ ID NO: 292283 - DNA, 20 bp, Artificial Sequence
  Description of Artificial Sequence: Synthetic oligonucleotide
  Target: LAMA2; (-) strand; PAM type: YTN; PAM sequence: TTC
tattctaggaatttcatctt

SEQ ID NO: 292284 - DNA, 20 bp, Artificial Sequence
  Description of Artificial Sequence: Synthetic oligonucleotide
  Target: LAMA2; (-) strand; PAM type: YTN; PAM sequence: CTT
ctattctaggaatttcatct

SEQ ID NO: 292285 - DNA, 20 bp, Artificial Sequence
  Description of Artificial Sequence: Synthetic oligonucleotide
  Target: LAMA2; (-) strand; PAM type: YTN; PAM sequence: TTC
ttctattctaggaatttcat

SEQ ID NO: 292286 - DNA, 20 bp, Artificial Sequence
  Description of Artificial Sequence: Synthetic oligonucleotide
  Target: LAMA2; (-) strand; PAM type: YTN; PAM sequence: CTA
ttcttctattctaggaattt

SEQ ID NO: 292287 - DNA, 20 bp, Artificial Sequence
  Description of Artificial Sequence: Synthetic oligonucleotide
  Target: LAMA2; (-) strand; PAM type: YTN; PAM sequence: CTA
cgctattcttctattctagg

SEQ ID NO: 292288 - DNA, 20 bp, Artificial Sequence
  Description of Artificial Sequence: Synthetic oligonucleotide
  Target: LAMA2; (-) strand; PAM type: YTN; PAM sequence: CTG
gtggaacagccccaactacg

SEQ ID NO: 292289 - DNA, 20 bp, Artificial Sequence
  Description of Artificial Sequence: Synthetic oligonucleotide
  Target: LAMA2; (-) strand; PAM type: YTN; PAM sequence: CTG
atatctggtggaacagcccc

SEQ ID NO: 292290 - DNA, 20 bp, Artificial Sequence
  Description of Artificial Sequence: Synthetic oligonucleotide
  Target: LAMA2; (-) strand; PAM type: YTN; PAM sequence: CTA
atgtgctgatatctggtgga

SEQ ID NO: 292291 - DNA, 20 bp, Artificial Sequence
  Description of Artificial Sequence: Synthetic oligonucleotide
  Target: LAMA2; (-) strand; PAM type: YTN; PAM sequence: TTC
taatgtgctgatatctggtg

SEQ ID NO: 292292 - DNA, 20 bp, Artificial Sequence
  Description of Artificial Sequence: Synthetic oligonucleotide
  Target: LAMA2; (-) strand; PAM type: YTN; PAM sequence: CTT
ctaatgtgctgatatctggt

SEQ ID NO: 292293 - DNA, 20 bp, Artificial Sequence
  Description of Artificial Sequence: Synthetic oligonucleotide
  Target: LAMA2; (-) strand; PAM type: YTN; PAM sequence: TTA
ccttctaatgtgctgatatc

SEQ ID NO: 292294 - DNA, 20 bp, Artificial Sequence
  Description of Artificial Sequence: Synthetic oligonucleotide
  Target: LAMA2; (-) strand; PAM type: YTN; PAM sequence: TTT
accttctaatgtgctgatat

SEQ ID NO: 292295 - DNA, 20 bp, Artificial Sequence
  Description of Artificial Sequence: Synthetic oligonucleotide
  Target: LAMA2; (-) strand; PAM type: YTN; PAM sequence: CTT
taccttctaatgtgctgata

SEQ ID NO: 292296 - DNA, 20 bp, Artificial Sequence
  Description of Artificial Sequence: Synthetic oligonucleotide
  Target: LAMA2; (-) strand; PAM type: YTN; PAM sequence: CTC
cacaatacaaaactttacct

SEQ ID NO: 292297 - DNA, 20 bp, Artificial Sequence
  Description of Artificial Sequence: Synthetic oligonucleotide
  Target: LAMA2; (-) strand; PAM type: YTN; PAM sequence: TTA
acatgatagctccacaatac

SEQ ID NO: 292298 - DNA, 20 bp, Artificial Sequence
  Description of Artificial Sequence: Synthetic oligonucleotide
  Target: LAMA2; (-) strand; PAM type: YTN; PAM sequence: TTA
tacatgaattaacatgatag

SEQ ID NO: 292299 - DNA, 20 bp, Artificial Sequence
  Description of Artificial Sequence: Synthetic oligonucleotide
  Target: LAMA2; (-) strand; PAM type: YTN; PAM sequence: TTG
cacagttatacatgaattaa

SEQ ID NO: 292300 - DNA, 20 bp, Artificial Sequence
  Description of Artificial Sequence: Synthetic oligonucleotide
  Target: LAMA2; (-) strand; PAM type: YTN; PAM sequence: TTT
gcacagttatacatgaatta

SEQ ID NO: 292301 - DNA, 20 bp, Artificial Sequence
  Description of Artificial Sequence: Synthetic oligonucleotide
  Target: LAMA2; (-) strand; PAM type: YTN; PAM sequence: CTA
tttgcacagttatacatgaa

SEQ ID NO: 292302 - DNA, 20 bp, Artificial Sequence
  Description of Artificial Sequence: Synthetic oligonucleotide
  Target: LAMA2; (-) strand; PAM type: YTN; PAM sequence: TTC
ctatttgcacagttatacat

SEQ ID NO: 292303 - DNA, 20 bp, Artificial Sequence
  Description of Artificial Sequence: Synthetic oligonucleotide
  Target: LAMA2; (-) strand; PAM type: YTN; PAM sequence: TTT
cctatttgcacagttataca

SEQ ID NO: 292304 - DNA, 20 bp, Artificial Sequence
  Description of Artificial Sequence: Synthetic oligonucleotide
  Target: LAMA2; (-) strand; PAM type: YTN; PAM sequence: CTT
tcctatttgcacagttatac

SEQ ID NO: 292305 - DNA, 20 bp, Artificial Sequence
  Description of Artificial Sequence: Synthetic oligonucleotide
  Target: LAMA2; (-) strand; PAM type: YTN; PAM sequence: TTC
tttcctatttgcacagttat

SEQ ID NO: 292306 - DNA, 20 bp, Artificial Sequence
  Description of Artificial Sequence: Synthetic oligonucleotide
  Target: LAMA2; (-) strand; PAM type: YTN; PAM sequence: CTC
aattctttcctatttgcaca

SEQ ID NO: 292307 - DNA, 20 bp, Artificial Sequence
  Description of Artificial Sequence: Synthetic oligonucleotide
  Target: LAMA2; (-) strand; PAM type: YTN; PAM sequence: TTC
tcaattctttcctatttgca

SEQ ID NO: 292308 - DNA, 20 bp, Artificial Sequence
  Description of Artificial Sequence: Synthetic oligonucleotide
  Target: LAMA2; (-) strand; PAM type: YTN; PAM sequence: TTC
agggttctcaattctttcct

SEQ ID NO: 292309 - DNA, 20 bp, Artificial Sequence
  Description of Artificial Sequence: Synthetic oligonucleotide
  Target: LAMA2; (-) strand; PAM type: YTN; PAM sequence: TTT
cagggttctcaattctttcc

SEQ ID NO: 292310 - DNA, 20 bp, Artificial Sequence
  Description of Artificial Sequence: Synthetic oligonucleotide
  Target: LAMA2; (-) strand; PAM type: YTN; PAM sequence: TTT
tcagggttctcaattctttc

SEQ ID NO: 292311 - DNA, 20 bp, Artificial Sequence
  Description of Artificial Sequence: Synthetic oligonucleotide
  Target: LAMA2; (-) strand; PAM type: YTN; PAM sequence: TTG
tgtattttcagggttctcaa

SEQ ID NO: 292312 - DNA, 20 bp, Artificial Sequence
  Description of Artificial Sequence: Synthetic oligonucleotide
  Target: LAMA2; (-) strand; PAM type: YTN; PAM sequence: CTT
gtgtattttcagggttctca

SEQ ID NO: 292313 - DNA, 20 bp, Artificial Sequence
  Description of Artificial Sequence: Synthetic oligonucleotide
  Target: LAMA2; (-) strand; PAM type: YTN; PAM sequence: CTA
tgcttgtgtattttcagggt

SEQ ID NO: 292314 - DNA, 20 bp, Artificial Sequence
  Description of Artificial Sequence: Synthetic oligonucleotide
  Target: LAMA2; (-) strand; PAM type: YTN; PAM sequence: TTC
catctatgcttgtgtatttt

SEQ ID NO: 292315 - DNA, 20 bp, Artificial Sequence
  Description of Artificial Sequence: Synthetic oligonucleotide
  Target: LAMA2; (-) strand; PAM type: YTN; PAM sequence: TTT
ccatctatgcttgtgtattt

SEQ ID NO: 292316 - DNA, 20 bp, Artificial Sequence
  Description of Artificial Sequence: Synthetic oligonucleotide
  Target: LAMA2; (-) strand; PAM type: YTN; PAM sequence: CTG
tttccatctatgcttgtgta

SEQ ID NO: 292317 - DNA, 20 bp, Artificial Sequence
  Description of Artificial Sequence: Synthetic oligonucleotide
  Target: LAMA2; (-) strand; PAM type: YTN; PAM sequence: TTG
tcaaatgctgtttccatcta

SEQ ID NO: 292318 - DNA, 20 bp, Artificial Sequence
  Description of Artificial Sequence: Synthetic oligonucleotide
  Target: LAMA2; (-) strand; PAM type: YTN; PAM sequence: TTA
ttgtcaaatgctgtttccat

SEQ ID NO: 292319 - DNA, 20 bp, Artificial Sequence
  Description of Artificial Sequence: Synthetic oligonucleotide
  Target: LAMA2; (-) strand; PAM type: YTN; PAM sequence: CTT
attgtcaaatgctgtttcca

SEQ ID NO: 292320 - DNA, 20 bp, Artificial Sequence
  Description of Artificial Sequence: Synthetic oligonucleotide
  Target: LAMA2; (-) strand; PAM type: YTN; PAM sequence: TTA
aatgaaatgcaatgccactt

SEQ ID NO: 292321 - DNA, 20 bp, Artificial Sequence
  Description of Artificial Sequence: Synthetic oligonucleotide
  Target: LAMA2; (-) strand; PAM type: YTN; PAM sequence: TTT
aaatgaaatgcaatgccact

SEQ ID NO: 292322 - DNA, 20 bp, Artificial Sequence
  Description of Artificial Sequence: Synthetic oligonucleotide
  Target: LAMA2; (-) strand; PAM type: YTN; PAM sequence: TTT
taaatgaaatgcaatgccac

SEQ ID NO: 292323 - DNA, 20 bp, Artificial Sequence
  Description of Artificial Sequence: Synthetic oligonucleotide
  Target: LAMA2; (-) strand; PAM type: YTN; PAM sequence: TTT
ttaaatgaaatgcaatgcca

SEQ ID NO: 292324 - DNA, 20 bp, Artificial Sequence
  Description of Artificial Sequence: Synthetic oligonucleotide
  Target: LAMA2; (-) strand; PAM type: YTN; PAM sequence: TTT
tttaaatgaaatgcaatgcc

SEQ ID NO: 292325 - DNA, 20 bp, Artificial Sequence
  Description of Artificial Sequence: Synthetic oligonucleotide
  Target: LAMA2; (-) strand; PAM type: YTN; PAM sequence: CTT
ttttaaatgaaatgcaatgc

SEQ ID NO: 292326 - DNA, 20 bp, Artificial Sequence
  Description of Artificial Sequence: Synthetic oligonucleotide
  Target: LAMA2; (-) strand; PAM type: YTN; PAM sequence: TTG
tcttttttaaatgaaatgca

SEQ ID NO: 292327 - DNA, 20 bp, Artificial Sequence
  Description of Artificial Sequence: Synthetic oligonucleotide
  Target: LAMA2; (-) strand; PAM type: YTN; PAM sequence: CTG
ttgtcttttttaaatgaaat

SEQ ID NO: 292328 - DNA, 20 bp, Artificial Sequence
  Description of Artificial Sequence: Synthetic oligonucleotide
  Target: LAMA2; (-) strand; PAM type: YTN; PAM sequence: TTC
actgttgtcttttttaaatg

SEQ ID NO: 292329 - DNA, 20 bp, Artificial Sequence
  Description of Artificial Sequence: Synthetic oligonucleotide
  Target: LAMA2; (-) strand; PAM type: YTN; PAM sequence: CTG
aacagttcactgttgtcttt

SEQ ID NO: 292330 - DNA, 20 bp, Artificial Sequence
  Description of Artificial Sequence: Synthetic oligonucleotide
  Target: LAMA2; (-) strand; PAM type: YTN; PAM sequence: TTC
actgaacagttcactgttgt

SEQ ID NO: 292331 - DNA, 20 bp, Artificial Sequence
  Description of Artificial Sequence: Synthetic oligonucleotide
  Target: LAMA2; (-) strand; PAM type: YTN; PAM sequence: CTG
aaatcattcactgaacagtt

SEQ ID NO: 292332 - DNA, 20 bp, Artificial Sequence
  Description of Artificial Sequence: Synthetic oligonucleotide
  Target: LAMA2; (-) strand; PAM type: YTN; PAM sequence: TTG
ccctgaaatcattcactgaa

SEQ ID NO: 292333 - DNA, 20 bp, Artificial Sequence
  Description of Artificial Sequence: Synthetic oligonucleotide
  Target: LAMA2; (-) strand; PAM type: YTN; PAM sequence: TTC
catatgaataaccaattgcc

SEQ ID NO: 292334 - DNA, 20 bp, Artificial Sequence
  Description of Artificial Sequence: Synthetic oligonucleotide
  Target: LAMA2; (-) strand; PAM type: YTN; PAM sequence: TTT
ccatatgaataaccaattgc

SEQ ID NO: 292335 - DNA, 20 bp, Artificial Sequence
  Description of Artificial Sequence: Synthetic oligonucleotide
  Target: LAMA2; (-) strand; PAM type: YTN; PAM sequence: TTT
tccatatgaataaccaattg

SEQ ID NO: 292336 - DNA, 20 bp, Artificial Sequence
  Description of Artificial Sequence: Synthetic oligonucleotide
  Target: LAMA2; (-) strand; PAM type: YTN; PAM sequence: CTT
ttccatatgaataaccaatt

SEQ ID NO: 292337 - DNA, 20 bp, Artificial Sequence
  Description of Artificial Sequence: Synthetic oligonucleotide
  Target: LAMA2; (-) strand; PAM type: YTN; PAM sequence: TTC
atcttttccatatgaataac

SEQ ID NO: 292338 - DNA, 20 bp, Artificial Sequence
  Description of Artificial Sequence: Synthetic oligonucleotide
  Target: LAMA2; (-) strand; PAM type: YTN; PAM sequence: TTT
catcttttccatatgaataa

SEQ ID NO: 292339 - DNA, 20 bp, Artificial Sequence
  Description of Artificial Sequence: Synthetic oligonucleotide
  Target: LAMA2; (-) strand; PAM type: YTN; PAM sequence: TTA
gtttcatcttttccatatga

SEQ ID NO: 292340 - DNA, 20 bp, Artificial Sequence
  Description of Artificial Sequence: Synthetic oligonucleotide
  Target: LAMA2; (-) strand; PAM type: YTN; PAM sequence: TTT
agtttcatcttttccatatg

SEQ ID NO: 292341 - DNA, 20 bp, Artificial Sequence
  Description of Artificial Sequence: Synthetic oligonucleotide
  Target: LAMA2; (-) strand; PAM type: YTN; PAM sequence: TTG
atatgaaaaagaaatttagt

SEQ ID NO: 292342 - DNA, 20 bp, Artificial Sequence
  Description of Artificial Sequence: Synthetic oligonucleotide
  Target: LAMA2; (-) strand; PAM type: YTN; PAM sequence: TTT
gatatgaaaaagaaatttag

SEQ ID NO: 292343 - DNA, 20 bp, Artificial Sequence
  Description of Artificial Sequence: Synthetic oligonucleotide
  Target: LAMA2; (-) strand; PAM type: YTN; PAM sequence: TTG
gtttgatatgaaaaagaaat

SEQ ID NO: 292344 - DNA, 20 bp, Artificial Sequence
  Description of Artificial Sequence: Synthetic oligonucleotide
  Target: LAMA2; (-) strand; PAM type: YTN; PAM sequence: TTT
ggtttgatatgaaaaagaaa

SEQ ID NO: 292345 - DNA, 20 bp, Artificial Sequence
  Description of Artificial Sequence: Synthetic oligonucleotide
  Target: LAMA2; (-) strand; PAM type: YTN; PAM sequence: TTT
tggtttgatatgaaaaagaa

SEQ ID NO: 292346 - DNA, 20 bp, Artificial Sequence
  Description of Artificial Sequence: Synthetic oligonucleotide
  Target: LAMA2; (-) strand; PAM type: YTN; PAM sequence: TTT
ttggtttgatatgaaaaaga

SEQ ID NO: 292347 - DNA, 20 bp, Artificial Sequence
  Description of Artificial Sequence: Synthetic oligonucleotide
  Target: LAMA2; (-) strand; PAM type: YTN; PAM sequence: TTT
tttggtttgatatgaaaaag

SEQ ID NO: 292348 - DNA, 20 bp, Artificial Sequence
  Description of Artificial Sequence: Synthetic oligonucleotide
  Target: LAMA2; (-) strand; PAM type: YTN; PAM sequence: TTA
ttttttggtttgatatgaaa

SEQ ID NO: 292349 - DNA, 20 bp, Artificial Sequence
  Description of Artificial Sequence: Synthetic oligonucleotide
  Target: LAMA2; (-) strand; PAM type: YTN; PAM sequence: TTT
attttttggtttgatatgaa

SEQ ID NO: 292350 - DNA, 20 bp, Artificial Sequence
  Description of Artificial Sequence: Synthetic oligonucleotide
  Target: LAMA2; (-) strand; PAM type: YTN; PAM sequence: TTG
tgaatttattttttggtttg

SEQ ID NO: 292351 - DNA, 20 bp, Artificial Sequence
  Description of Artificial Sequence: Synthetic oligonucleotide
  Target: LAMA2; (-) strand; PAM type: YTN; PAM sequence: TTA
ttgtgaatttattttttggt

SEQ ID NO: 292352 - DNA, 20 bp, Artificial Sequence
  Description of Artificial Sequence: Synthetic oligonucleotide
  Target: LAMA2; (-) strand; PAM type: YTN; PAM sequence: TTT
attgtgaatttattttttgg

SEQ ID NO: 292353 - DNA, 20 bp, Artificial Sequence
  Description of Artificial Sequence: Synthetic oligonucleotide
  Target: LAMA2; (-) strand; PAM type: YTN; PAM sequence: TTA
atttattgtgaatttatttt

SEQ ID NO: 292354 - DNA, 20 bp, Artificial Sequence
  Description of Artificial Sequence: Synthetic oligonucleotide
  Target: LAMA2; (-) strand; PAM type: YTN; PAM sequence: TTT
aatttattgtgaatttattt

SEQ ID NO: 292355 - DNA, 20 bp, Artificial Sequence
  Description of Artificial Sequence: Synthetic oligonucleotide
  Target: LAMA2; (-) strand; PAM type: YTN; PAM sequence: CTT
taatttattgtgaatttatt

SEQ ID NO: 292356 - DNA, 20 bp, Artificial Sequence
  Description of Artificial Sequence: Synthetic oligonucleotide
  Target: LAMA2; (-) strand; PAM type: YTN; PAM sequence: TTA
agactttaatttattgtgaa

SEQ ID NO: 292357 - DNA, 20 bp, Artificial Sequence
  Description of Artificial Sequence: Synthetic oligonucleotide
  Target: LAMA2; (-) strand; PAM type: YTN; PAM sequence: TTT
aagactttaatttattgtga

SEQ ID NO: 292358 - DNA, 20 bp, Artificial Sequence
  Description of Artificial Sequence: Synthetic oligonucleotide
  Target: LAMA2; (-) strand; PAM type: YTN; PAM sequence: TTC
catatttaagactttaattt

SEQ ID NO: 292359 - DNA, 20 bp, Artificial Sequence
  Description of Artificial Sequence: Synthetic oligonucleotide
  Target: LAMA2; (-) strand; PAM type: YTN; PAM sequence: CTT
ccatatttaagactttaatt

SEQ ID NO: 292360 - DNA, 20 bp, Artificial Sequence
  Description of Artificial Sequence: Synthetic oligonucleotide
  Target: LAMA2; (-) strand; PAM type: YTN; PAM sequence: TTG
tccttccatatttaagactt

SEQ ID NO: 292361 - DNA, 20 bp, Artificial Sequence
  Description of Artificial Sequence: Synthetic oligonucleotide
  Target: LAMA2; (-) strand; PAM type: YTN; PAM sequence: TTT
gtccttccatatttaagact

SEQ ID NO: 292362 - DNA, 20 bp, Artificial Sequence
  Description of Artificial Sequence: Synthetic oligonucleotide
  Target: LAMA2; (-) strand; PAM type: YTN; PAM sequence: TTT
tgtccttccatatttaagac

SEQ ID NO: 292363 - DNA, 20 bp, Artificial Sequence
  Description of Artificial Sequence: Synthetic oligonucleotide
  Target: LAMA2; (-) strand; PAM type: YTN; PAM sequence: TTT
ttgtccttccatatttaaga

SEQ ID NO: 292364 - DNA, 20 bp, Artificial Sequence
  Description of Artificial Sequence: Synthetic oligonucleotide
  Target: LAMA2; (-) strand; PAM type: YTN; PAM sequence: TTA
aagatttttgtccttccata

SEQ ID NO: 292365 - DNA, 20 bp, Artificial Sequence
  Description of Artificial Sequence: Synthetic oligonucleotide
  Target: LAMA2; (-) strand; PAM type: YTN; PAM sequence: TTT
aaagatttttgtccttccat

SEQ ID NO: 292366 - DNA, 20 bp, Artificial Sequence
  Description of Artificial Sequence: Synthetic oligonucleotide
  Target: LAMA2; (-) strand; PAM type: YTN; PAM sequence: TTT
taaagatttttgtccttcca

SEQ ID NO: 292367 - DNA, 20 bp, Artificial Sequence
  Description of Artificial Sequence: Synthetic oligonucleotide
  Target: LAMA2; (-) strand; PAM type: YTN; PAM sequence: CTA
agaattttaaagatttttgt

SEQ ID NO: 292368 - DNA, 20 bp, Artificial Sequence
  Description of Artificial Sequence: Synthetic oligonucleotide
  Target: LAMA2; (-) strand; PAM type: YTN; PAM sequence: TTC
taagaattttaaagattttt

SEQ ID NO: 292369 - DNA, 20 bp, Artificial Sequence
  Description of Artificial Sequence: Synthetic oligonucleotide
  Target: LAMA2; (-) strand; PAM type: YTN; PAM sequence: CTT
ctaagaattttaaagatttt

SEQ ID NO: 292370 - DNA, 20 bp, Artificial Sequence
  Description of Artificial Sequence: Synthetic oligonucleotide
  Target: LAMA2; (-) strand; PAM type: YTN; PAM sequence: TTC
ttctaagaattttaaagatt

SEQ ID NO: 292371 - DNA, 20 bp, Artificial Sequence
  Description of Artificial Sequence: Synthetic oligonucleotide
  Target: LAMA2; (-) strand; PAM type: YTN; PAM sequence: TTT
cttctaagaattttaaagat

SEQ ID NO: 292372 - DNA, 20 bp, Artificial Sequence
  Description of Artificial Sequence: Synthetic oligonucleotide
  Target: LAMA2; (-) strand; PAM type: YTN; PAM sequence: TTT
tcttctaagaattttaaaga

SEQ ID NO: 292373 - DNA, 20 bp, Artificial Sequence
  Description of Artificial Sequence: Synthetic oligonucleotide
  Target: LAMA2; (-) strand; PAM type: YTN; PAM sequence: CTG
gtatattttcttctaagaat

SEQ ID NO: 292374 - DNA, 20 bp, Artificial Sequence
  Description of Artificial Sequence: Synthetic oligonucleotide
  Target: LAMA2; (-) strand; PAM type: YTN; PAM sequence: TTA
atcctggtatattttcttct

SEQ ID NO: 292375 - DNA, 20 bp, Artificial Sequence
  Description of Artificial Sequence: Synthetic oligonucleotide
  Target: LAMA2; (-) strand; PAM type: YTN; PAM sequence: TTT
aatcctggtatattttcttc

SEQ ID NO: 292376 - DNA, 20 bp, Artificial Sequence
  Description of Artificial Sequence: Synthetic oligonucleotide
  Target: LAMA2; (-) strand; PAM type: YTN; PAM sequence: TTC
ccgaaggtcaaaatttaatc

SEQ ID NO: 292377 - DNA, 20 bp, Artificial Sequence
  Description of Artificial Sequence: Synthetic oligonucleotide
  Target: LAMA2; (-) strand; PAM type: YTN; PAM sequence: TTT
cccgaaggtcaaaatttaat

SEQ ID NO: 292378 - DNA, 20 bp, Artificial Sequence
  Description of Artificial Sequence: Synthetic oligonucleotide
  Target: LAMA2; (-) strand; PAM type: YTN; PAM sequence: TTT
tcccgaaggtcaaaatttaa

SEQ ID NO: 292379 - DNA, 20 bp, Artificial Sequence
  Description of Artificial Sequence: Synthetic oligonucleotide
  Target: LAMA2; (-) strand; PAM type: YTN; PAM sequence: CTT
ttcccgaaggtcaaaattta

SEQ ID NO: 292380 - DNA, 20 bp, Artificial Sequence
  Description of Artificial Sequence: Synthetic oligonucleotide
  Target: LAMA2; (-) strand; PAM type: YTN; PAM sequence: TTC
ttttcccgaaggtcaaaatt

SEQ ID NO: 292381 - DNA, 20 bp, Artificial Sequence
  Description of Artificial Sequence: Synthetic oligonucleotide
  Target: LAMA2; (-) strand; PAM type: YTN; PAM sequence: TTC
aatcaagtgttcttttcccg

SEQ ID NO: 292382 - DNA, 20 bp, Artificial Sequence
  Description of Artificial Sequence: Synthetic oligonucleotide
  Target: LAMA2; (-) strand; PAM type: YTN; PAM sequence: TTG
ttcaatcaagtgttcttttc

SEQ ID NO: 292383 - DNA, 20 bp, Artificial Sequence
  Description of Artificial Sequence: Synthetic oligonucleotide
  Target: LAMA2; (-) strand; PAM type: YTN; PAM sequence: TTT
gttcaatcaagtgttctttt

SEQ ID NO: 292384 - DNA, 20 bp, Artificial Sequence
  Description of Artificial Sequence: Synthetic oligonucleotide
  Target: LAMA2; (-) strand; PAM type: YTN; PAM sequence: TTT
tgttcaatcaagtgttcttt

SEQ ID NO: 292385 - DNA, 20 bp, Artificial Sequence
  Description of Artificial Sequence: Synthetic oligonucleotide
  Target: LAMA2; (-) strand; PAM type: YTN; PAM sequence: TTG
ttttgttcaatcaagtgttc

SEQ ID NO: 292386 - DNA, 20 bp, Artificial Sequence
  Description of Artificial Sequence: Synthetic oligonucleotide
  Target: LAMA2; (-) strand; PAM type: YTN; PAM sequence: CTT
gttttgttcaatcaagtgtt

SEQ ID NO: 292387 - DNA, 20 bp, Artificial Sequence
  Description of Artificial Sequence: Synthetic oligonucleotide
  Target: LAMA2; (-) strand; PAM type: YTN; PAM sequence: CTC
ataatcttgttttgttcaat

SEQ ID NO: 292388 - DNA, 20 bp, Artificial Sequence
  Description of Artificial Sequence: Synthetic oligonucleotide
  Target: LAMA2; (-) strand; PAM type: YTN; PAM sequence: TTC
cactcataatcttgttttgt

SEQ ID NO: 292389 - DNA, 20 bp, Artificial Sequence
  Description of Artificial Sequence: Synthetic oligonucleotide
  Target: LAMA2; (-) strand; PAM type: YTN; PAM sequence: TTA
atgcagttccactcataatc

SEQ ID NO: 292390 - DNA, 20 bp, Artificial Sequence
  Description of Artificial Sequence: Synthetic oligonucleotide
  Target: LAMA2; (-) strand; PAM type: YTN; PAM sequence: TTT
aatgcagttccactcataat

SEQ ID NO: 292391 - DNA, 20 bp, Artificial Sequence
  Description of Artificial Sequence: Synthetic oligonucleotide
  Target: LAMA2; (-) strand; PAM type: YTN; PAM sequence: TTT
taatgcagttccactcataa

SEQ ID NO: 292392 - DNA, 20 bp, Artificial Sequence
  Description of Artificial Sequence: Synthetic oligonucleotide
  Target: LAMA2; (-) strand; PAM type: YTN; PAM sequence: TTA
attttaatgcagttccactc

SEQ ID NO: 292393 - DNA, 20 bp, Artificial Sequence
  Description of Artificial Sequence: Synthetic oligonucleotide
  Target: LAMA2; (-) strand; PAM type: YTN; PAM sequence: TTT
aattttaatgcagttccact

SEQ ID NO: 292394 - DNA, 20 bp, Artificial Sequence
  Description of Artificial Sequence: Synthetic oligonucleotide
  Target: LAMA2; (-) strand; PAM type: YTN; PAM sequence: TTG
atgaccaaagagtttaattt

SEQ ID NO: 292395 - DNA, 20 bp, Artificial Sequence
  Description of Artificial Sequence: Synthetic oligonucleotide
  Target: LAMA2; (-) strand; PAM type: YTN; PAM sequence: TTT
gatgaccaaagagtttaatt

SEQ ID NO: 292396 - DNA, 20 bp, Artificial Sequence
  Description of Artificial Sequence: Synthetic oligonucleotide
  Target: LAMA2; (-) strand; PAM type: YTN; PAM sequence: TTG
tttgatgaccaaagagttta

SEQ ID NO: 292397 - DNA, 20 bp, Artificial Sequence
  Description of Artificial Sequence: Synthetic oligonucleotide
  Target: LAMA2; (-) strand; PAM type: YTN; PAM sequence: TTG
tgttgtttgatgaccaaaga

SEQ ID NO: 292398 - DNA, 20 bp, Artificial Sequence
  Description of Artificial Sequence: Synthetic oligonucleotide
  Target: LAMA2; (-) strand; PAM type: YTN; PAM sequence: TTT
gtgttgtttgatgaccaaag

SEQ ID NO: 292399 - DNA, 20 bp, Artificial Sequence
  Description of Artificial Sequence: Synthetic oligonucleotide
  Target: LAMA2; (-) strand; PAM type: YTN; PAM sequence: TTT
tgtgttgtttgatgaccaaa

SEQ ID NO: 292400 - DNA, 20 bp, Artificial Sequence
  Description of Artificial Sequence: Synthetic oligonucleotide
  Target: LAMA2; (-) strand; PAM type: YTN; PAM sequence: TTG
tgttttgtgttgtttgatga

SEQ ID NO: 292401 - DNA, 20 bp, Artificial Sequence
  Description of Artificial Sequence: Synthetic oligonucleotide
  Target: LAMA2; (-) strand; PAM type: YTN; PAM sequence: CTT
gtgttttgtgttgtttgatg

SEQ ID NO: 292402 - DNA, 20 bp, Artificial Sequence
  Description of Artificial Sequence: Synthetic oligonucleotide
  Target: LAMA2; (-) strand; PAM type: YTN; PAM sequence: CTG
aggcttgtgttttgtgttgt

SEQ ID NO: 292403 - DNA, 20 bp, Artificial Sequence
  Description of Artificial Sequence: Synthetic oligonucleotide
  Target: LAMA2; (-) strand; PAM type: YTN; PAM sequence: TTC
cagactgaggcttgtgtttt

SEQ ID NO: 292404 - DNA, 20 bp, Artificial Sequence
  Description of Artificial Sequence: Synthetic oligonucleotide
  Target: LAMA2; (-) strand; PAM type: YTN; PAM sequence: TTT
ccagactgaggcttgtgttt

SEQ ID NO: 292405 - DNA, 20 bp, Artificial Sequence
  Description of Artificial Sequence: Synthetic oligonucleotide
  Target: LAMA2; (-) strand; PAM type: YTN; PAM sequence: CTG
tacatttccagactgaggct

SEQ ID NO: 292406 - DNA, 20 bp, Artificial Sequence
  Description of Artificial Sequence: Synthetic oligonucleotide
  Target: LAMA2; (-) strand; PAM type: YTN; PAM sequence: TTA
tatatactgtacatttccag

SEQ ID NO: 292407 - DNA, 20 bp, Artificial Sequence
  Description of Artificial Sequence: Synthetic oligonucleotide
  Target: LAMA2; (-) strand; PAM type: YTN; PAM sequence: CTG
tagattatatatactgtaca

SEQ ID NO: 292408 - DNA, 20 bp, Artificial Sequence
  Description of Artificial Sequence: Synthetic oligonucleotide
  Target: LAMA2; (-) strand; PAM type: YTN; PAM sequence: TTC
cctgtagattatatatactg

SEQ ID NO: 292409 - DNA, 20 bp, Artificial Sequence
  Description of Artificial Sequence: Synthetic oligonucleotide
  Target: LAMA2; (-) strand; PAM type: YTN; PAM sequence: CTG
tattccctgtagattatata

SEQ ID NO: 292410 - DNA, 20 bp, Artificial Sequence
  Description of Artificial Sequence: Synthetic oligonucleotide
  Target: LAMA2; (-) strand; PAM type: YTN; PAM sequence: TTG
gggacaaggactgtattccc

SEQ ID NO: 292411 - DNA, 20 bp, Artificial Sequence
  Description of Artificial Sequence: Synthetic oligonucleotide
  Target: LAMA2; (-) strand; PAM type: YTN; PAM sequence: TTT
ggggacaaggactgtattcc

SEQ ID NO: 292412 - DNA, 20 bp, Artificial Sequence
  Description of Artificial Sequence: Synthetic oligonucleotide
  Target: LAMA2; (-) strand; PAM type: YTN; PAM sequence: TTT
tggggacaaggactgtattc

SEQ ID NO: 292413 - DNA, 20 bp, Artificial Sequence
  Description of Artificial Sequence: Synthetic oligonucleotide
  Target: LAMA2; (-) strand; PAM type: YTN; PAM sequence: CTT
ttggggacaaggactgtatt

SEQ ID NO: 292414 - DNA, 20 bp, Artificial Sequence
  Description of Artificial Sequence: Synthetic oligonucleotide
  Target: LAMA2; (-) strand; PAM type: YTN; PAM sequence: TTC
cccttttggggacaaggact

SEQ ID NO: 292415 - DNA, 20 bp, Artificial Sequence
  Description of Artificial Sequence: Synthetic oligonucleotide
  Target: LAMA2; (-) strand; PAM type: YTN; PAM sequence: TTT
ccccttttggggacaaggac

SEQ ID NO: 292416 - DNA, 20 bp, Artificial Sequence
  Description of Artificial Sequence: Synthetic oligonucleotide
  Target: LAMA2; (-) strand; PAM type: YTN; PAM sequence: TTT
tccccttttggggacaagga

SEQ ID NO: 292417 - DNA, 20 bp, Artificial Sequence
  Description of Artificial Sequence: Synthetic oligonucleotide
  Target: LAMA2; (-) strand; PAM type: YTN; PAM sequence: CTT
ttccccttttggggacaagg

SEQ ID NO: 292418 - DNA, 20 bp, Artificial Sequence
  Description of Artificial Sequence: Synthetic oligonucleotide
  Target: LAMA2; (-) strand; PAM type: YTN; PAM sequence: CTG
cagtgagcttttcccctttt

SEQ ID NO: 292419 - DNA, 20 bp, Artificial Sequence
  Description of Artificial Sequence: Synthetic oligonucleotide
  Target: LAMA2; (-) strand; PAM type: YTN; PAM sequence: TTA
taaactgcagtgagcttttc

SEQ ID NO: 292420 - DNA, 20 bp, Artificial Sequence
  Description of Artificial Sequence: Synthetic oligonucleotide
  Target: LAMA2; (-) strand; PAM type: YTN; PAM sequence: TTC
gatatcccattataaactgc

SEQ ID NO: 292421 - DNA, 20 bp, Artificial Sequence
  Description of Artificial Sequence: Synthetic oligonucleotide
  Target: LAMA2; (-) strand; PAM type: YTN; PAM sequence: TTT
cgatatcccattataaactg

SEQ ID NO: 292422 - DNA, 20 bp, Artificial Sequence
  Description of Artificial Sequence: Synthetic oligonucleotide
  Target: LAMA2; (-) strand; PAM type: YTN; PAM sequence: CTA
taacaaccagtatggtttcg

SEQ ID NO: 292423 - DNA, 20 bp, Artificial Sequence
  Description of Artificial Sequence: Synthetic oligonucleotide
  Target: LAMA2; (-) strand; PAM type: YTN; PAM sequence: CTA
atactataacaaccagtatg

SEQ ID NO: 292424 - DNA, 20 bp, Artificial Sequence
  Description of Artificial Sequence: Synthetic oligonucleotide
  Target: LAMA2; (-) strand; PAM type: YTN; PAM sequence: TTC
taatactataacaaccagta

SEQ ID NO: 292425 - DNA, 20 bp, Artificial Sequence
  Description of Artificial Sequence: Synthetic oligonucleotide
  Target: LAMA2; (-) strand; PAM type: YTN; PAM sequence: TTT
ctaatactataacaaccagt

SEQ ID NO: 292426 - DNA, 20 bp, Artificial Sequence
  Description of Artificial Sequence: Synthetic oligonucleotide
  Target: LAMA2; (-) strand; PAM type: YTN; PAM sequence: CTT
tctaatactataacaaccag

SEQ ID NO: 292427 - DNA, 20 bp, Artificial Sequence
  Description of Artificial Sequence: Synthetic oligonucleotide
  Target: LAMA2; (-) strand; PAM type: YTN; PAM sequence: TTC
tttctaatactataacaacc

SEQ ID NO: 292428 - DNA, 20 bp, Artificial Sequence
  Description of Artificial Sequence: Synthetic oligonucleotide
  Target: LAMA2; (-) strand; PAM type: YTN; PAM sequence: CTG
ttctttctaatactataaca

SEQ ID NO: 292429 - DNA, 20 bp, Artificial Sequence
  Description of Artificial Sequence: Synthetic oligonucleotide
  Target: LAMA2; (-) strand; PAM type: YTN; PAM sequence: TTC
caatactgttctttctaata

SEQ ID NO: 292430 - DNA, 20 bp, Artificial Sequence
  Description of Artificial Sequence: Synthetic oligonucleotide
  Target: LAMA2; (-) strand; PAM type: YTN; PAM sequence: TTT
ccaatactgttctttctaat

SEQ ID NO: 292431 - DNA, 20 bp, Artificial Sequence
  Description of Artificial Sequence: Synthetic oligonucleotide
  Target: LAMA2; (-) strand; PAM type: YTN; PAM sequence: CTT
tccaatactgttctttctaa

SEQ ID NO: 292432 - DNA, 20 bp, Artificial Sequence
  Description of Artificial Sequence: Synthetic oligonucleotide
  Target: LAMA2; (-) strand; PAM type: YTN; PAM sequence: TTC
acatctttccaatactgttc

SEQ ID NO: 292433 - DNA, 20 bp, Artificial Sequence
  Description of Artificial Sequence: Synthetic oligonucleotide
  Target: LAMA2; (-) strand; PAM type: YTN; PAM sequence: TTG
attcacatctttccaatact

SEQ ID NO: 292434 - DNA, 20 bp, Artificial Sequence
  Description of Artificial Sequence: Synthetic oligonucleotide
  Target: LAMA2; (-) strand; PAM type: YTN; PAM sequence: TTT
gattcacatctttccaatac

SEQ ID NO: 292435 - DNA, 20 bp, Artificial Sequence
  Description of Artificial Sequence: Synthetic oligonucleotide
  Target: LAMA2; (-) strand; PAM type: YTN; PAM sequence: CTT
tgattcacatctttccaata

SEQ ID NO: 292436 - DNA, 20 bp, Artificial Sequence
  Description of Artificial Sequence: Synthetic oligonucleotide
  Target: LAMA2; (-) strand; PAM type: YTN; PAM sequence: CTC
tttgattcacatctttccaa

SEQ ID NO: 292437 - DNA, 20 bp, Artificial Sequence
  Description of Artificial Sequence: Synthetic oligonucleotide
  Target: LAMA2; (-) strand; PAM type: YTN; PAM sequence: CTA
ccagcagtgatcaagggcac

SEQ ID NO: 292438 - DNA, 20 bp, Artificial Sequence
  Description of Artificial Sequence: Synthetic oligonucleotide
  Target: LAMA2; (-) strand; PAM type: YTN; PAM sequence: TTC
taccagcagtgatcaagggc

SEQ ID NO: 292439 - DNA, 20 bp, Artificial Sequence
  Description of Artificial Sequence: Synthetic oligonucleotide
  Target: LAMA2; (-) strand; PAM type: YTN; PAM sequence: TTT
ctaccagcagtgatcaaggg

SEQ ID NO: 292440 - DNA, 20 bp, Artificial Sequence
  Description of Artificial Sequence: Synthetic oligonucleotide
  Target: LAMA2; (-) strand; PAM type: YTN; PAM sequence: TTT
tctaccagcagtgatcaagg

SEQ ID NO: 292441 - DNA, 20 bp, Artificial Sequence
  Description of Artificial Sequence: Synthetic oligonucleotide
  Target: LAMA2; (-) strand; PAM type: YTN; PAM sequence: TTT
ttctaccagcagtgatcaag

SEQ ID NO: 292442 - DNA, 20 bp, Artificial Sequence
  Description of Artificial Sequence: Synthetic oligonucleotide
  Target: LAMA2; (-) strand; PAM type: YTN; PAM sequence: CTT
tttctaccagcagtgatcaa

SEQ ID NO: 292443 - DNA, 20 bp, Artificial Sequence
  Description of Artificial Sequence: Synthetic oligonucleotide
  Target: LAMA2; (-) strand; PAM type: YTN; PAM sequence: TTA
ctttttctaccagcagtgat

SEQ ID NO: 292444 - DNA, 20 bp, Artificial Sequence
  Description of Artificial Sequence: Synthetic oligonucleotide
  Target: LAMA2; (-) strand; PAM type: YTN; PAM sequence: TTT
actttttctaccagcagtga

SEQ ID NO: 292445 - DNA, 20 bp, Artificial Sequence
  Description of Artificial Sequence: Synthetic oligonucleotide
  Target: LAMA2; (-) strand; PAM type: YTN; PAM sequence: TTA
gaaatttactttttctacca

SEQ ID NO: 292446 - DNA, 20 bp, Artificial Sequence
  Description of Artificial Sequence: Synthetic oligonucleotide
  Target: LAMA2; (-) strand; PAM type: YTN; PAM sequence: TTT
agaaatttactttttctacc

SEQ ID NO: 292447 - DNA, 20 bp, Artificial Sequence
  Description of Artificial Sequence: Synthetic oligonucleotide
  Target: LAMA2; (-) strand; PAM type: YTN; PAM sequence: CTT
tagaaatttactttttctac

SEQ ID NO: 292448 - DNA, 20 bp, Artificial Sequence
  Description of Artificial Sequence: Synthetic oligonucleotide
  Target: LAMA2; (-) strand; PAM type: YTN; PAM sequence: TTC
caaagtgactttagaaattt

SEQ ID NO: 292449 - DNA, 20 bp, Artificial Sequence
  Description of Artificial Sequence: Synthetic oligonucleotide
  Target: LAMA2; (-) strand; PAM type: YTN; PAM sequence: TTT
ccaaagtgactttagaaatt

SEQ ID NO: 292450 - DNA, 20 bp, Artificial Sequence
  Description of Artificial Sequence: Synthetic oligonucleotide
  Target: LAMA2; (-) strand; PAM type: YTN; PAM sequence: TTT
tccaaagtgactttagaaat

SEQ ID NO: 292451 - DNA, 20 bp, Artificial Sequence
  Description of Artificial Sequence: Synthetic oligonucleotide
  Target: LAMA2; (-) strand; PAM type: YTN; PAM sequence: TTG
ttttccaaagtgactttaga

SEQ ID NO: 292452 - DNA, 20 bp, Artificial Sequence
  Description of Artificial Sequence: Synthetic oligonucleotide
  Target: LAMA2; (-) strand; PAM type: YTN; PAM sequence: TTC
aggagatagtgccaaattgt

SEQ ID NO: 292453 - DNA, 20 bp, Artificial Sequence
  Description of Artificial Sequence: Synthetic oligonucleotide
  Target: LAMA2; (-) strand; PAM type: YTN; PAM sequence: CTT
caggagatagtgccaaattg

SEQ ID NO: 292454 - DNA, 20 bp, Artificial Sequence
  Description of Artificial Sequence: Synthetic oligonucleotide
  Target: LAMA2; (-) strand; PAM type: YTN; PAM sequence: TTC
aacttcaggagatagtgcca

SEQ ID NO: 292455 - DNA, 20 bp, Artificial Sequence
  Description of Artificial Sequence: Synthetic oligonucleotide
  Target: LAMA2; (-) strand; PAM type: YTN; PAM sequence: TTG
tagagagtatgcacatgttc

SEQ ID NO: 292456 - DNA, 20 bp, Artificial Sequence
  Description of Artificial Sequence: Synthetic oligonucleotide
  Target: LAMA2; (-) strand; PAM type: YTN; PAM sequence: CTT
gtagagagtatgcacatgtt

SEQ ID NO: 292457 - DNA, 20 bp, Artificial Sequence
  Description of Artificial Sequence: Synthetic oligonucleotide
  Target: LAMA2; (-) strand; PAM type: YTN; PAM sequence: CTG
gcttgtagagagtatgcaca

SEQ ID NO: 292458 - DNA, 20 bp, Artificial Sequence
  Description of Artificial Sequence: Synthetic oligonucleotide
  Target: LAMA2; (-) strand; PAM type: YTN; PAM sequence: TTG
ctggcttgtagagagtatgc

SEQ ID NO: 292459 - DNA, 20 bp, Artificial Sequence
  Description of Artificial Sequence: Synthetic oligonucleotide
  Target: LAMA2; (-) strand; PAM type: YTN; PAM sequence: CTG
tacccaggagtggaattgct

SEQ ID NO: 292460 - DNA, 20 bp, Artificial Sequence
  Description of Artificial Sequence: Synthetic oligonucleotide
  Target: LAMA2; (-) strand; PAM type: YTN; PAM sequence: CTG
ggtctgtacccaggagtgga

SEQ ID NO: 292461 - DNA, 20 bp, Artificial Sequence
  Description of Artificial Sequence: Synthetic oligonucleotide
  Target: LAMA2; (-) strand; PAM type: YTN; PAM sequence: TTA
tgcccatgtgcaaaaatctg

SEQ ID NO: 292462 - DNA, 20 bp, Artificial Sequence
  Description of Artificial Sequence: Synthetic oligonucleotide
  Target: LAMA2; (-) strand; PAM type: YTN; PAM sequence: TTA
ttatgcccatgtgcaaaaat

SEQ ID NO: 292463 - DNA, 20 bp, Artificial Sequence
  Description of Artificial Sequence: Synthetic oligonucleotide
  Target: LAMA2; (-) strand; PAM type: YTN; PAM sequence: CTT
attatgcccatgtgcaaaaa

SEQ ID NO: 292464 - DNA, 20 bp, Artificial Sequence
  Description of Artificial Sequence: Synthetic oligonucleotide
  Target: LAMA2; (-) strand; PAM type: YTN; PAM sequence: TTG
tacatgtcttattatgccca

SEQ ID NO: 292465 - DNA, 20 bp, Artificial Sequence
  Description of Artificial Sequence: Synthetic oligonucleotide
  Target: LAMA2; (-) strand; PAM type: YTN; PAM sequence: CTT
gtacatgtcttattatgccc

SEQ ID NO: 292466 - DNA, 20 bp, Artificial Sequence
  Description of Artificial Sequence: Synthetic oligonucleotide
  Target: LAMA2; (-) strand; PAM type: YTN; PAM sequence: TTC
ttgtacatgtcttattatgc

SEQ ID NO: 292467 - DNA, 20 bp, Artificial Sequence
  Description of Artificial Sequence: Synthetic oligonucleotide
  Target: LAMA2; (-) strand; PAM type: YTN; PAM sequence: CTA
taaacattcttgtacatgtc

SEQ ID NO: 292468 - DNA, 20 bp, Artificial Sequence
  Description of Artificial Sequence: Synthetic oligonucleotide
  Target: LAMA2; (-) strand; PAM type: YTN; PAM sequence: TTC
tataaacattcttgtacatg

SEQ ID NO: 292469 - DNA, 20 bp, Artificial Sequence
  Description of Artificial Sequence: Synthetic oligonucleotide
  Target: LAMA2; (-) strand; PAM type: YTN; PAM sequence: CTT
ctataaacattcttgtacat

SEQ ID NO: 292470 - DNA, 20 bp, Artificial Sequence
  Description of Artificial Sequence: Synthetic oligonucleotide
  Target: LAMA2; (-) strand; PAM type: YTN; PAM sequence: TTA
taaagaatacttctataaac

SEQ ID NO: 292471 - DNA, 20 bp, Artificial Sequence
  Description of Artificial Sequence: Synthetic oligonucleotide
  Target: LAMA2; (-) strand; PAM type: YTN; PAM sequence: CTA
ttataaagaatacttctata

SEQ ID NO: 292472 - DNA, 20 bp, Artificial Sequence
  Description of Artificial Sequence: Synthetic oligonucleotide
  Target: LAMA2; (-) strand; PAM type: YTN; PAM sequence: CTG
ctattataaagaatacttct

SEQ ID NO: 292473 - DNA, 20 bp, Artificial Sequence
  Description of Artificial Sequence: Synthetic oligonucleotide
  Target: LAMA2; (-) strand; PAM type: YTN; PAM sequence: CTC
tgctattataaagaatactt

SEQ ID NO: 292474 - DNA, 20 bp, Artificial Sequence
  Description of Artificial Sequence: Synthetic oligonucleotide
  Target: LAMA2; (-) strand; PAM type: YTN; PAM sequence: TTC
tctgctattataaagaatac

SEQ ID NO: 292475 - DNA, 20 bp, Artificial Sequence
  Description of Artificial Sequence: Synthetic oligonucleotide
  Target: LAMA2; (-) strand; PAM type: YTN; PAM sequence: TTT
ctctgctattataaagaata

SEQ ID NO: 292476 - DNA, 20 bp, Artificial Sequence
  Description of Artificial Sequence: Synthetic oligonucleotide
  Target: LAMA2; (-) strand; PAM type: YTN; PAM sequence: CTA
gtttctctgctattataaag

SEQ ID NO: 292477 - DNA, 20 bp, Artificial Sequence
  Description of Artificial Sequence: Synthetic oligonucleotide
  Target: LAMA2; (-) strand; PAM type: YTN; PAM sequence: TTC
tagtttctctgctattataa

SEQ ID NO: 292478 - DNA, 20 bp, Artificial Sequence
  Description of Artificial Sequence: Synthetic oligonucleotide
  Target: LAMA2; (-) strand; PAM type: YTN; PAM sequence: TTT
ctagtttctctgctattata

SEQ ID NO: 292479 - DNA, 20 bp, Artificial Sequence
  Description of Artificial Sequence: Synthetic oligonucleotide
  Target: LAMA2; (-) strand; PAM type: YTN; PAM sequence: TTG
tttctagtttctctgctatt

SEQ ID NO: 292480 - DNA, 20 bp, Artificial Sequence
  Description of Artificial Sequence: Synthetic oligonucleotide
  Target: LAMA2; (-) strand; PAM type: YTN; PAM sequence: TTG
ggttgtttctagtttctctg

SEQ ID NO: 292481 - DNA, 20 bp, Artificial Sequence
  Description of Artificial Sequence: Synthetic oligonucleotide
  Target: LAMA2; (-) strand; PAM type: YTN; PAM sequence: CTT
gggttgtttctagtttctct

SEQ ID NO: 292482 - DNA, 20 bp, Artificial Sequence
  Description of Artificial Sequence: Synthetic oligonucleotide
  Target: LAMA2; (-) strand; PAM type: YTN; PAM sequence: CTG
atgaacacttgggttgtttc

SEQ ID NO: 292483 - DNA, 20 bp, Artificial Sequence
  Description of Artificial Sequence: Synthetic oligonucleotide
  Target: LAMA2; (-) strand; PAM type: YTN; PAM sequence: CTC
cagctgatgaacacttgggt

SEQ ID NO: 292484 - DNA, 20 bp, Artificial Sequence
  Description of Artificial Sequence: Synthetic oligonucleotide
  Target: LAMA2; (-) strand; PAM type: YTN; PAM sequence: TTC
tccagctgatgaacacttgg

SEQ ID NO: 292485 - DNA, 20 bp, Artificial Sequence
  Description of Artificial Sequence: Synthetic oligonucleotide
  Target: LAMA2; (-) strand; PAM type: YTN; PAM sequence: CTG
ttctccagctgatgaacact

SEQ ID NO: 292486 - DNA, 20 bp, Artificial Sequence
  Description of Artificial Sequence: Synthetic oligonucleotide
  Target: LAMA2; (-) strand; PAM type: YTN; PAM sequence: CTC
tgttctccagctgatgaaca

SEQ ID NO: 292487 - DNA, 20 bp, Artificial Sequence
  Description of Artificial Sequence: Synthetic oligonucleotide
  Target: LAMA2; (-) strand; PAM type: YTN; PAM sequence: CTC
tctgttctccagctgatgaa

SEQ ID NO: 292488 - DNA, 20 bp, Artificial Sequence
  Description of Artificial Sequence: Synthetic oligonucleotide
  Target: LAMA2; (-) strand; PAM type: YTN; PAM sequence: TTG
cctctctgttctccagctga

SEQ ID NO: 292489 - DNA, 20 bp, Artificial Sequence
  Description of Artificial Sequence: Synthetic oligonucleotide
  Target: LAMA2; (-) strand; PAM type: YTN; PAM sequence: TTT
gcctctctgttctccagctg

SEQ ID NO: 292490 - DNA, 20 bp, Artificial Sequence
  Description of Artificial Sequence: Synthetic oligonucleotide
  Target: LAMA2; (-) strand; PAM type: YTN; PAM sequence: TTA
tgcaaaagtgccacagtttg

SEQ ID NO: 292491 - DNA, 20 bp, Artificial Sequence
  Description of Artificial Sequence: Synthetic oligonucleotide
  Target: LAMA2; (-) strand; PAM type: YTN; PAM sequence: TTG
atatcccattatgcaaaagt

SEQ ID NO: 292492 - DNA, 20 bp, Artificial Sequence
  Description of Artificial Sequence: Synthetic oligonucleotide
  Target: LAMA2; (-) strand; PAM type: YTN; PAM sequence: CTT
gatatcccattatgcaaaag

SEQ ID NO: 292493 - DNA, 20 bp, Artificial Sequence
  Description of Artificial Sequence: Synthetic oligonucleotide
  Target: LAMA2; (-) strand; PAM type: YTN; PAM sequence: TTC
cttgatatcccattatgcaa

SEQ ID NO: 292494 - DNA, 20 bp, Artificial Sequence
  Description of Artificial Sequence: Synthetic oligonucleotide
  Target: LAMA2; (-) strand; PAM type: YTN; PAM sequence: TTA
ttccttgatatcccattatg

SEQ ID NO: 292495 - DNA, 20 bp, Artificial Sequence
  Description of Artificial Sequence: Synthetic oligonucleotide
  Target: LAMA2; (-) strand; PAM type: YTN; PAM sequence: CTT
attccttgatatcccattat

SEQ ID NO: 292496 - DNA, 20 bp, Artificial Sequence
  Description of Artificial Sequence: Synthetic oligonucleotide
  Target: LAMA2; (-) strand; PAM type: YTN; PAM sequence: TTC
ttattccttgatatcccatt

SEQ ID NO: 292497 - DNA, 20 bp, Artificial Sequence
  Description of Artificial Sequence: Synthetic oligonucleotide
  Target: LAMA2; (-) strand; PAM type: YTN; PAM sequence: TTT
cttattccttgatatcccat

SEQ ID NO: 292498 - DNA, 20 bp, Artificial Sequence
  Description of Artificial Sequence: Synthetic oligonucleotide
  Target: LAMA2; (-) strand; PAM type: YTN; PAM sequence: TTT
tcttattccttgatatccca

SEQ ID NO: 292499 - DNA, 20 bp, Artificial Sequence
  Description of Artificial Sequence: Synthetic oligonucleotide
  Target: LAMA2; (-) strand; PAM type: YTN; PAM sequence: TTT
ttcttattccttgatatccc

SEQ ID NO: 292500 - DNA, 20 bp, Artificial Sequence
  Description of Artificial Sequence: Synthetic oligonucleotide
  Target: LAMA2; (-) strand; PAM type: YTN; PAM sequence: CTT
tttcttattccttgatatcc

SEQ ID NO: 292501 - DNA, 20 bp, Artificial Sequence
  Description of Artificial Sequence: Synthetic oligonucleotide
  Target: LAMA2; (-) strand; PAM type: YTN; PAM sequence: TTC
ctttttcttattccttgata

SEQ ID NO: 292502 - DNA, 20 bp, Artificial Sequence
  Description of Artificial Sequence: Synthetic oligonucleotide
  Target: LAMA2; (-) strand; PAM type: YTN; PAM sequence: TTA
ttcctttttcttattccttg

SEQ ID NO: 292503 - DNA, 20 bp, Artificial Sequence
  Description of Artificial Sequence: Synthetic oligonucleotide
  Target: LAMA2; (-) strand; PAM type: YTN; PAM sequence: TTT
attcctttttcttattcctt

SEQ ID NO: 292504 - DNA, 20 bp, Artificial Sequence
  Description of Artificial Sequence: Synthetic oligonucleotide
  Target: LAMA2; (-) strand; PAM type: YTN; PAM sequence: TTA
taatttattcctttttctta

SEQ ID NO: 292505 - DNA, 20 bp, Artificial Sequence
  Description of Artificial Sequence: Synthetic oligonucleotide
  Target: LAMA2; (-) strand; PAM type: YTN; PAM sequence: TTA
gttataatttattccttttt

SEQ ID NO: 292506 - DNA, 20 bp, Artificial Sequence
  Description of Artificial Sequence: Synthetic oligonucleotide
  Target: LAMA2; (-) strand; PAM type: YTN; PAM sequence: TTT
agttataatttattcctttt

SEQ ID NO: 292507 - DNA, 20 bp, Artificial Sequence
  Description of Artificial Sequence: Synthetic oligonucleotide
  Target: LAMA2; (-) strand; PAM type: YTN; PAM sequence: TTA
tatttagttataatttattc

SEQ ID NO: 292508 - DNA, 20 bp, Artificial Sequence
  Description of Artificial Sequence: Synthetic oligonucleotide
  Target: LAMA2; (-) strand; PAM type: YTN; PAM sequence: TTG
ttatatttagttataattta

SEQ ID NO: 292509 - DNA, 20 bp, Artificial Sequence
  Description of Artificial Sequence: Synthetic oligonucleotide
  Target: LAMA2; (-) strand; PAM type: YTN; PAM sequence: TTA
tgttgttatatttagttata

SEQ ID NO: 292510 - DNA, 20 bp, Artificial Sequence
  Description of Artificial Sequence: Synthetic oligonucleotide
  Target: LAMA2; (-) strand; PAM type: YTN; PAM sequence: TTA
ttatgttgttatatttagtt

SEQ ID NO: 292511 - DNA, 20 bp, Artificial Sequence
  Description of Artificial Sequence: Synthetic oligonucleotide
  Target: LAMA2; (-) strand; PAM type: YTN; PAM sequence: TTT
attatgttgttatatttagt

SEQ ID NO: 292512 - DNA, 20 bp, Artificial Sequence
  Description of Artificial Sequence: Synthetic oligonucleotide
  Target: LAMA2; (-) strand; PAM type: YTN; PAM sequence: CTA
tttattatgttgttatattt

SEQ ID NO: 292513 - DNA, 20 bp, Artificial Sequence
  Description of Artificial Sequence: Synthetic oligonucleotide
  Target: LAMA2; (-) strand; PAM type: YTN; PAM sequence: TTC
tatttattatgttgttatat

SEQ ID NO: 292514 - DNA, 20 bp, Artificial Sequence
  Description of Artificial Sequence: Synthetic oligonucleotide
  Target: LAMA2; (-) strand; PAM type: YTN; PAM sequence: TTT
ctatttattatgttgttata

SEQ ID NO: 292515 - DNA, 20 bp, Artificial Sequence
  Description of Artificial Sequence: Synthetic oligonucleotide
  Target: LAMA2; (-) strand; PAM type: YTN; PAM sequence: TTT
tctatttattatgttgttat

SEQ ID NO: 292516 - DNA, 20 bp, Artificial Sequence
  Description of Artificial Sequence: Synthetic oligonucleotide
  Target: LAMA2; (-) strand; PAM type: YTN; PAM sequence: TTA
ttttctatttattatgttgt

SEQ ID NO: 292517 - DNA, 20 bp, Artificial Sequence
  Description of Artificial Sequence: Synthetic oligonucleotide
  Target: LAMA2; (-) strand; PAM type: YTN; PAM sequence: TTT
attttctatttattatgttg

SEQ ID NO: 292518 - DNA, 20 bp, Artificial Sequence
  Description of Artificial Sequence: Synthetic oligonucleotide
  Target: LAMA2; (-) strand; PAM type: YTN; PAM sequence: TTA
tttattttctatttattatg

SEQ ID NO: 292519 - DNA, 20 bp, Artificial Sequence
  Description of Artificial Sequence: Synthetic oligonucleotide
  Target: LAMA2; (-) strand; PAM type: YTN; PAM sequence: TTT
atttattttctatttattat

SEQ ID NO: 292520 - DNA, 20 bp, Artificial Sequence
  Description of Artificial Sequence: Synthetic oligonucleotide
  Target: LAMA2; (-) strand; PAM type: YTN; PAM sequence: TTT
tatttattttctatttatta

SEQ ID NO: 292521 - DNA, 20 bp, Artificial Sequence
  Description of Artificial Sequence: Synthetic oligonucleotide
  Target: LAMA2; (-) strand; PAM type: YTN; PAM sequence: TTT
ttatttattttctatttatt

SEQ ID NO: 292522 - DNA, 20 bp, Artificial Sequence
  Description of Artificial Sequence: Synthetic oligonucleotide
  Target: LAMA2; (-) strand; PAM type: YTN; PAM sequence: TTC
atttttatttattttctatt

SEQ ID NO: 292523 - DNA, 20 bp, Artificial Sequence
  Description of Artificial Sequence: Synthetic oligonucleotide
  Target: LAMA2; (-) strand; PAM type: YTN; PAM sequence: TTT
catttttatttattttctat

SEQ ID NO: 292524 - DNA, 20 bp, Artificial Sequence
  Description of Artificial Sequence: Synthetic oligonucleotide
  Target: LAMA2; (-) strand; PAM type: YTN; PAM sequence: TTT
tcatttttatttattttcta

SEQ ID NO: 292525 - DNA, 20 bp, Artificial Sequence
  Description of Artificial Sequence: Synthetic oligonucleotide
  Target: LAMA2; (-) strand; PAM type: YTN; PAM sequence: TTT
ttcatttttatttattttct

SEQ ID NO: 292526 - DNA, 20 bp, Artificial Sequence
  Description of Artificial Sequence: Synthetic oligonucleotide
  Target: LAMA2; (-) strand; PAM type: YTN; PAM sequence: CTA
caaaaatggtaccatatagc

SEQ ID NO: 292527 - DNA, 20 bp, Artificial Sequence
  Description of Artificial Sequence: Synthetic oligonucleotide
  Target: LAMA2; (-) strand; PAM type: YTN; PAM sequence: TTG
tatgagaaatctacaaaaat

SEQ ID NO: 292528 - DNA, 20 bp, Artificial Sequence
  Description of Artificial Sequence: Synthetic oligonucleotide
  Target: LAMA2; (-) strand; PAM type: YTN; PAM sequence: CTT
gtatgagaaatctacaaaaa

SEQ ID NO: 292529 - DNA, 20 bp, Artificial Sequence
  Description of Artificial Sequence: Synthetic oligonucleotide
  Target: LAMA2; (-) strand; PAM type: YTN; PAM sequence: CTA
cttgtatgagaaatctacaa

SEQ ID NO: 292530 - DNA, 20 bp, Artificial Sequence
  Description of Artificial Sequence: Synthetic oligonucleotide
  Target: LAMA2; (-) strand; PAM type: YTN; PAM sequence: TTA
gtgctacttgtatgagaaat

SEQ ID NO: 292531 - DNA, 20 bp, Artificial Sequence
  Description of Artificial Sequence: Synthetic oligonucleotide
  Target: LAMA2; (-) strand; PAM type: YTN; PAM sequence: TTT
agtgctacttgtatgagaaa

SEQ ID NO: 292532 - DNA, 20 bp, Artificial Sequence
  Description of Artificial Sequence: Synthetic oligonucleotide
  Target: LAMA2; (-) strand; PAM type: YTN; PAM sequence: TTG
tttagtgctacttgtatgag

SEQ ID NO: 292533 - DNA, 20 bp, Artificial Sequence
  Description of Artificial Sequence: Synthetic oligonucleotide
  Target: LAMA2; (-) strand; PAM type: YTN; PAM sequence: CTG
taaacaatatgttgtttagt

SEQ ID NO: 292534 - DNA, 20 bp, Artificial Sequence
  Description of Artificial Sequence: Synthetic oligonucleotide
  Target: LAMA2; (-) strand; PAM type: YTN; PAM sequence: TTC
acatgtgtctgtaaacaata

SEQ ID NO: 292535 - DNA, 20 bp, Artificial Sequence
  Description of Artificial Sequence: Synthetic oligonucleotide
  Target: LAMA2; (-) strand; PAM type: YTN; PAM sequence: TTG
aaattcacatgtgtctgtaa

SEQ ID NO: 292536 - DNA, 20 bp, Artificial Sequence
  Description of Artificial Sequence: Synthetic oligonucleotide
  Target: LAMA2; (-) strand; PAM type: YTN; PAM sequence: TTT
gaaattcacatgtgtctgta

SEQ ID NO: 292537 - DNA, 20 bp, Artificial Sequence
  Description of Artificial Sequence: Synthetic oligonucleotide
  Target: LAMA2; (-) strand; PAM type: YTN; PAM sequence: TTT
tgaaattcacatgtgtctgt

SEQ ID NO: 292538 - DNA, 20 bp, Artificial Sequence
  Description of Artificial Sequence: Synthetic oligonucleotide
  Target: LAMA2; (-) strand; PAM type: YTN; PAM sequence: TTT
ttgaaattcacatgtgtctg

SEQ ID NO: 292539 - DNA, 20 bp, Artificial Sequence
  Description of Artificial Sequence: Synthetic oligonucleotide
  Target: LAMA2; (-) strand; PAM type: YTN; PAM sequence: TTA
aaaaatatttttgaaattca

SEQ ID NO: 292540 - DNA, 20 bp, Artificial Sequence
  Description of Artificial Sequence: Synthetic oligonucleotide
  Target: LAMA2; (-) strand; PAM type: YTN; PAM sequence: TTT
aaaaaatatttttgaaattc

SEQ ID NO: 292541 - DNA, 20 bp, Artificial Sequence
  Description of Artificial Sequence: Synthetic oligonucleotide
  Target: LAMA2; (-) strand; PAM type: YTN; PAM sequence: TTT
taaaaaatatttttgaaatt

SEQ ID NO: 292542 - DNA, 20 bp, Artificial Sequence
  Description of Artificial Sequence: Synthetic oligonucleotide
  Target: LAMA2; (-) strand; PAM type: YTN; PAM sequence: CTT
ttaaaaaatatttttgaaat

SEQ ID NO: 292543 - DNA, 20 bp, Artificial Sequence
  Description of Artificial Sequence: Synthetic oligonucleotide
  Target: LAMA2; (-) strand; PAM type: YTN; PAM sequence: TTA
cttttaaaaaatatttttga

SEQ ID NO: 292544 - DNA, 20 bp, Artificial Sequence
  Description of Artificial Sequence: Synthetic oligonucleotide
  Target: LAMA2; (-) strand; PAM type: YTN; PAM sequence: CTT
acttttaaaaaatatttttg

SEQ ID NO: 292545 - DNA, 20 bp, Artificial Sequence
  Description of Artificial Sequence: Synthetic oligonucleotide
  Target: LAMA2; (-) strand; PAM type: YTN; PAM sequence: TTA
ccttacttttaaaaaatatt

SEQ ID NO: 292546 - DNA, 20 bp, Artificial Sequence
  Description of Artificial Sequence: Synthetic oligonucleotide
  Target: LAMA2; (-) strand; PAM type: YTN; PAM sequence: TTA
tcattaccttacttttaaaa

SEQ ID NO: 292547 - DNA, 20 bp, Artificial Sequence
  Description of Artificial Sequence: Synthetic oligonucleotide
  Target: LAMA2; (-) strand; PAM type: YTN; PAM sequence: TTT
atcattaccttacttttaaa

SEQ ID NO: 292548 - DNA, 20 bp, Artificial Sequence
  Description of Artificial Sequence: Synthetic oligonucleotide
  Target: LAMA2; (-) strand; PAM type: YTN; PAM sequence: TTA
tgtttatcattaccttactt

SEQ ID NO: 292549 - DNA, 20 bp, Artificial Sequence
  Description of Artificial Sequence: Synthetic oligonucleotide
  Target: LAMA2; (-) strand; PAM type: YTN; PAM sequence: TTT
atgtttatcattaccttact

SEQ ID NO: 292550 - DNA, 20 bp, Artificial Sequence
  Description of Artificial Sequence: Synthetic oligonucleotide
  Target: LAMA2; (-) strand; PAM type: YTN; PAM sequence: TTT
tatgtttatcattaccttac

SEQ ID NO: 292551 - DNA, 20 bp, Artificial Sequence
  Description of Artificial Sequence: Synthetic oligonucleotide
  Target: LAMA2; (-) strand; PAM type: YTN; PAM sequence: CTC
agaggtaaccacaaatgtgg

SEQ ID NO: 292552 - DNA, 20 bp, Artificial Sequence
  Description of Artificial Sequence: Synthetic oligonucleotide
  Target: LAMA2; (-) strand; PAM type: YTN; PAM sequence: CTC
catctcagaggtaaccacaa

SEQ ID NO: 292553 - DNA, 20 bp, Artificial Sequence
  Description of Artificial Sequence: Synthetic oligonucleotide
  Target: LAMA2; (-) strand; PAM type: YTN; PAM sequence: TTC
tccatctcagaggtaaccac

SEQ ID NO: 292554 - DNA, 20 bp, Artificial Sequence
  Description of Artificial Sequence: Synthetic oligonucleotide
  Target: LAMA2; (-) strand; PAM type: YTN; PAM sequence: CTT
ctccatctcagaggtaacca

SEQ ID NO: 292555 - DNA, 20 bp, Artificial Sequence
  Description of Artificial Sequence: Synthetic oligonucleotide
  Target: LAMA2; (-) strand; PAM type: YTN; PAM sequence: TTG
cttctccatctcagaggtaa

SEQ ID NO: 292556 - DNA, 20 bp, Artificial Sequence
  Description of Artificial Sequence: Synthetic oligonucleotide
  Target: LAMA2; (-) strand; PAM type: YTN; PAM sequence: CTT
gcttctccatctcagaggta

SEQ ID NO: 292557 - DNA, 20 bp, Artificial Sequence
  Description of Artificial Sequence: Synthetic oligonucleotide
  Target: LAMA2; (-) strand; PAM type: YTN; PAM sequence: CTC
cttgcttctccatctcagag

SEQ ID NO: 292558 - DNA, 20 bp, Artificial Sequence
  Description of Artificial Sequence: Synthetic oligonucleotide
  Target: LAMA2; (-) strand; PAM type: YTN; PAM sequence: CTA
ataccatctccttgcttctc

SEQ ID NO: 292559 - DNA, 20 bp, Artificial Sequence
  Description of Artificial Sequence: Synthetic oligonucleotide
  Target: LAMA2; (-) strand; PAM type: YTN; PAM sequence: TTC
taataccatctccttgcttc

SEQ ID NO: 292560 - DNA, 20 bp, Artificial Sequence
  Description of Artificial Sequence: Synthetic oligonucleotide
  Target: LAMA2; (-) strand; PAM type: YTN; PAM sequence: TTT
ctaataccatctccttgctt

SEQ ID NO: 292561 - DNA, 20 bp, Artificial Sequence
  Description of Artificial Sequence: Synthetic oligonucleotide
  Target: LAMA2; (-) strand; PAM type: YTN; PAM sequence: CTT
tctaataccatctccttgct

SEQ ID NO: 292562 - DNA, 20 bp, Artificial Sequence
  Description of Artificial Sequence: Synthetic oligonucleotide
  Target: LAMA2; (-) strand; PAM type: YTN; PAM sequence: TTC
tttctaataccatctccttg

SEQ ID NO: 292563 - DNA, 20 bp, Artificial Sequence
  Description of Artificial Sequence: Synthetic oligonucleotide
  Target: LAMA2; (-) strand; PAM type: YTN; PAM sequence: TTT
ctttctaataccatctcctt

SEQ ID NO: 292564 - DNA, 20 bp, Artificial Sequence
  Description of Artificial Sequence: Synthetic oligonucleotide
  Target: LAMA2; (-) strand; PAM type: YTN; PAM sequence: TTA
tgagtttctttctaatacca

SEQ ID NO: 292565 - DNA, 20 bp, Artificial Sequence
  Description of Artificial Sequence: Synthetic oligonucleotide
  Target: LAMA2; (-) strand; PAM type: YTN; PAM sequence: CTT
atgagtttctttctaatacc

SEQ ID NO: 292566 - DNA, 20 bp, Artificial Sequence
  Description of Artificial Sequence: Synthetic oligonucleotide
  Target: LAMA2; (-) strand; PAM type: YTN; PAM sequence: CTC
ttatgagtttctttctaata

SEQ ID NO: 292567 - DNA, 20 bp, Artificial Sequence
  Description of Artificial Sequence: Synthetic oligonucleotide
  Target: LAMA2; (-) strand; PAM type: YTN; PAM sequence: TTG
catctcttatgagtttcttt

SEQ ID NO: 292568 - DNA, 20 bp, Artificial Sequence
  Description of Artificial Sequence: Synthetic oligonucleotide
  Target: LAMA2; (-) strand; PAM type: YTN; PAM sequence: TTC
agaaacaataccattgcatc

SEQ ID NO: 292569 - DNA, 20 bp, Artificial Sequence
  Description of Artificial Sequence: Synthetic oligonucleotide
  Target: LAMA2; (-) strand; PAM type: YTN; PAM sequence: TTT
cagaaacaataccattgcat

SEQ ID NO: 292570 - DNA, 20 bp, Artificial Sequence
  Description of Artificial Sequence: Synthetic oligonucleotide
  Target: LAMA2; (-) strand; PAM type: YTN; PAM sequence: CTA
ccaccaaatttcagaaacaa

SEQ ID NO: 292571 - DNA, 20 bp, Artificial Sequence
  Description of Artificial Sequence: Synthetic oligonucleotide
  Target: LAMA2; (-) strand; PAM type: YTN; PAM sequence: CTG
taaatctaccaccaaatttc

SEQ ID NO: 292572 - DNA, 20 bp, Artificial Sequence
  Description of Artificial Sequence: Synthetic oligonucleotide
  Target: LAMA2; (-) strand; PAM type: YTN; PAM sequence: CTG
tataataacatgaatacctg

SEQ ID NO: 292573 - DNA, 20 bp, Artificial Sequence
  Description of Artificial Sequence: Synthetic oligonucleotide
  Target: LAMA2; (-) strand; PAM type: YTN; PAM sequence: TTA
acactgtataataacatgaa

SEQ ID NO: 292574 - DNA, 20 bp, Artificial Sequence
  Description of Artificial Sequence: Synthetic oligonucleotide
  Target: LAMA2; (-) strand; PAM type: YTN; PAM sequence: CTG
cgttaacactgtataataac

SEQ ID NO: 292575 - DNA, 20 bp, Artificial Sequence
  Description of Artificial Sequence: Synthetic oligonucleotide
  Target: LAMA2; (-) strand; PAM type: YTN; PAM sequence: TTC
acaatatgagtgatatacat

SEQ ID NO: 292576 - DNA, 20 bp, Artificial Sequence
  Description of Artificial Sequence: Synthetic oligonucleotide
  Target: LAMA2; (-) strand; PAM type: YTN; PAM sequence: CTT
cacaatatgagtgatataca

SEQ ID NO: 292577 - DNA, 20 bp, Artificial Sequence
  Description of Artificial Sequence: Synthetic oligonucleotide
  Target: LAMA2; (-) strand; PAM type: YTN; PAM sequence: TTC
ttcacaatatgagtgatata

SEQ ID NO: 292578 - DNA, 20 bp, Artificial Sequence
  Description of Artificial Sequence: Synthetic oligonucleotide
  Target: LAMA2; (-) strand; PAM type: YTN; PAM sequence: TTG
atatattcttcacaatatga

SEQ ID NO: 292579 - DNA, 20 bp, Artificial Sequence
  Description of Artificial Sequence: Synthetic oligonucleotide
  Target: LAMA2; (-) strand; PAM type: YTN; PAM sequence: TTT
gatatattcttcacaatatg

SEQ ID NO: 292580 - DNA, 20 bp, Artificial Sequence
  Description of Artificial Sequence: Synthetic oligonucleotide
  Target: LAMA2; (-) strand; PAM type: YTN; PAM sequence: CTA
tttgatatattcttcacaat

SEQ ID NO: 292581 - DNA, 20 bp, Artificial Sequence
  Description of Artificial Sequence: Synthetic oligonucleotide
  Target: LAMA2; (-) strand; PAM type: YTN; PAM sequence: TTA
cgactatttgatatattctt

SEQ ID NO: 292582 - DNA, 20 bp, Artificial Sequence
  Description of Artificial Sequence: Synthetic oligonucleotide
  Target: LAMA2; (-) strand; PAM type: YTN; PAM sequence: TTA
ttacgactatttgatatatt

SEQ ID NO: 292583 - DNA, 20 bp, Artificial Sequence
  Description of Artificial Sequence: Synthetic oligonucleotide
  Target: LAMA2; (-) strand; PAM type: YTN; PAM sequence: TTT
attacgactatttgatatat

SEQ ID NO: 292584 - DNA, 20 bp, Artificial Sequence
  Description of Artificial Sequence: Synthetic oligonucleotide
  Target: LAMA2; (-) strand; PAM type: YTN; PAM sequence: TTT
tattacgactatttgatata

SEQ ID NO: 292585 - DNA, 20 bp, Artificial Sequence
  Description of Artificial Sequence: Synthetic oligonucleotide
  Target: LAMA2; (-) strand; PAM type: YTN; PAM sequence: TTT
ttattacgactatttgatat

SEQ ID NO: 292586 - DNA, 20 bp, Artificial Sequence
  Description of Artificial Sequence: Synthetic oligonucleotide
  Target: LAMA2; (-) strand; PAM type: YTN; PAM sequence: TTC
aaaaatatttttattacgac

SEQ ID NO: 292587 - DNA, 20 bp, Artificial Sequence
  Description of Artificial Sequence: Synthetic oligonucleotide
  Target: LAMA2; (-) strand; PAM type: YTN; PAM sequence: CTT
caaaaatatttttattacga

SEQ ID NO: 292588 - DNA, 20 bp, Artificial Sequence
  Description of Artificial Sequence: Synthetic oligonucleotide
  Target: LAMA2; (-) strand; PAM type: YTN; PAM sequence: CTC
ttcaaaaatatttttattac

SEQ ID NO: 292589 - DNA, 20 bp, Artificial Sequence
  Description of Artificial Sequence: Synthetic oligonucleotide
  Target: LAMA2; (-) strand; PAM type: YTN; PAM sequence: CTA
ctcttcaaaaatatttttat

SEQ ID NO: 292590 - DNA, 20 bp, Artificial Sequence
  Description of Artificial Sequence: Synthetic oligonucleotide
  Target: LAMA2; (-) strand; PAM type: YTN; PAM sequence: CTC
tactcttcaaaaatattttt

SEQ ID NO: 292591 - DNA, 20 bp, Artificial Sequence
  Description of Artificial Sequence: Synthetic oligonucleotide
  Target: LAMA2; (-) strand; PAM type: YTN; PAM sequence: CTC
cctctactcttcaaaaatat

SEQ ID NO: 292592 - DNA, 20 bp, Artificial Sequence
  Description of Artificial Sequence: Synthetic oligonucleotide
  Target: LAMA2; (-) strand; PAM type: YTN; PAM sequence: TTC
tccctctactcttcaaaaat

SEQ ID NO: 292593 - DNA, 20 bp, Artificial Sequence
  Description of Artificial Sequence: Synthetic oligonucleotide
  Target: LAMA2; (-) strand; PAM type: YTN; PAM sequence: TTT
ctccctctactcttcaaaaa

SEQ ID NO: 292594 - DNA, 20 bp, Artificial Sequence
  Description of Artificial Sequence: Synthetic oligonucleotide
  Target: LAMA2; (-) strand; PAM type: YTN; PAM sequence: TTT
tctccctctactcttcaaaa

SEQ ID NO: 292595 - DNA, 20 bp, Artificial Sequence
  Description of Artificial Sequence: Synthetic oligonucleotide
  Target: LAMA2; (-) strand; PAM type: YTN; PAM sequence: CTT
ttctccctctactcttcaaa

SEQ ID NO: 292596 - DNA, 20 bp, Artificial Sequence
  Description of Artificial Sequence: Synthetic oligonucleotide
  Target: LAMA2; (-) strand; PAM type: YTN; PAM sequence: TTA
tgtgtagtaagaaatgaaat

SEQ ID NO: 292597 - DNA, 20 bp, Artificial Sequence
  Description of Artificial Sequence: Synthetic oligonucleotide
  Target: LAMA2; (-) strand; PAM type: YTN; PAM sequence: TTA
ttatgtgtagtaagaaatga

SEQ ID NO: 292598 - DNA, 20 bp, Artificial Sequence
  Description of Artificial Sequence: Synthetic oligonucleotide
  Target: LAMA2; (-) strand; PAM type: YTN; PAM sequence: CTT
attatgtgtagtaagaaatg

SEQ ID NO: 292599 - DNA, 20 bp, Artificial Sequence
  Description of Artificial Sequence: Synthetic oligonucleotide
  Target: LAMA2; (-) strand; PAM type: YTN; PAM sequence: TTA
gtgcttattatgtgtagtaa

SEQ ID NO: 292600 - DNA, 20 bp, Artificial Sequence
  Description of Artificial Sequence: Synthetic oligonucleotide
  Target: LAMA2; (-) strand; PAM type: YTN; PAM sequence: TTT
agtgcttattatgtgtagta

SEQ ID NO: 292601 - DNA, 20 bp, Artificial Sequence
  Description of Artificial Sequence: Synthetic oligonucleotide
  Target: LAMA2; (-) strand; PAM type: YTN; PAM sequence: TTA
tttagtgcttattatgtgta

SEQ ID NO: 292602 - DNA, 20 bp, Artificial Sequence
  Description of Artificial Sequence: Synthetic oligonucleotide
  Target: LAMA2; (-) strand; PAM type: YTN; PAM sequence: TTT
atttagtgcttattatgtgt

SEQ ID NO: 292603 - DNA, 20 bp, Artificial Sequence
  Description of Artificial Sequence: Synthetic oligonucleotide
  Target: LAMA2; (-) strand; PAM type: YTN; PAM sequence: TTA
tatttatttagtgcttatta

SEQ ID NO: 292604 - DNA, 20 bp, Artificial Sequence
  Description of Artificial Sequence: Synthetic oligonucleotide
  Target: LAMA2; (-) strand; PAM type: YTN; PAM sequence: TTT
atatttatttagtgcttatt

SEQ ID NO: 292605 - DNA, 20 bp, Artificial Sequence
  Description of Artificial Sequence: Synthetic oligonucleotide
  Target: LAMA2; (-) strand; PAM type: YTN; PAM sequence: TTT
tatatttatttagtgcttat

SEQ ID NO: 292606 - DNA, 20 bp, Artificial Sequence
  Description of Artificial Sequence: Synthetic oligonucleotide
  Target: LAMA2; (-) strand; PAM type: YTN; PAM sequence: TTG
tattttatatttatttagtg

SEQ ID NO: 292607 - DNA, 20 bp, Artificial Sequence
  Description of Artificial Sequence: Synthetic oligonucleotide
  Target: LAMA2; (-) strand; PAM type: YTN; PAM sequence: TTT
gtattttatatttatttagt

SEQ ID NO: 292608 - DNA, 20 bp, Artificial Sequence
  Description of Artificial Sequence: Synthetic oligonucleotide
  Target: LAMA2; (-) strand; PAM type: YTN; PAM sequence: TTG
acgagggcatttgtatttta

SEQ ID NO: 292609 - DNA, 20 bp, Artificial Sequence
  Description of Artificial Sequence: Synthetic oligonucleotide
  Target: LAMA2; (-) strand; PAM type: YTN; PAM sequence: TTC
aagataaacaaaaaaattga

SEQ ID NO: 292610 - DNA, 20 bp, Artificial Sequence
  Description of Artificial Sequence: Synthetic oligonucleotide
  Target: LAMA2; (-) strand; PAM type: YTN; PAM sequence: TTT
caagataaacaaaaaaattg

SEQ ID NO: 292611 - DNA, 20 bp, Artificial Sequence
  Description of Artificial Sequence: Synthetic oligonucleotide
  Target: LAMA2; (-) strand; PAM type: YTN; PAM sequence: TTT
tcaagataaacaaaaaaatt

SEQ ID NO: 292612 - DNA, 20 bp, Artificial Sequence
  Description of Artificial Sequence: Synthetic oligonucleotide
  Target: LAMA2; (-) strand; PAM type: YTN; PAM sequence: TTT
ttcaagataaacaaaaaaat

SEQ ID NO: 292613 - DNA, 20 bp, Artificial Sequence
  Description of Artificial Sequence: Synthetic oligonucleotide
  Target: LAMA2; (-) strand; PAM type: YTN; PAM sequence: TTA
tttttcaagataaacaaaaa

SEQ ID NO: 292614 - DNA, 20 bp, Artificial Sequence
  Description of Artificial Sequence: Synthetic oligonucleotide
  Target: LAMA2; (-) strand; PAM type: YTN; PAM sequence: TTT
atttttcaagataaacaaaa

SEQ ID NO: 292615 - DNA, 20 bp, Artificial Sequence
  Description of Artificial Sequence: Synthetic oligonucleotide
  Target: LAMA2; (-) strand; PAM type: YTN; PAM sequence: TTG
caatatgagaaaaaagttta

SEQ ID NO: 292616 - DNA, 20 bp, Artificial Sequence
  Description of Artificial Sequence: Synthetic oligonucleotide
  Target: LAMA2; (-) strand; PAM type: YTN; PAM sequence: TTT
gcaatatgagaaaaaagttt

SEQ ID NO: 292617 - DNA, 20 bp, Artificial Sequence
  Description of Artificial Sequence: Synthetic oligonucleotide
  Target: LAMA2; (-) strand; PAM type: YTN; PAM sequence: TTA
tcatttgcaatatgagaaaa

SEQ ID NO: 292618 - DNA, 20 bp, Artificial Sequence
  Description of Artificial Sequence: Synthetic oligonucleotide
  Target: LAMA2; (-) strand; PAM type: YTN; PAM sequence: CTT
atcatttgcaatatgagaaa

SEQ ID NO: 292619 - DNA, 20 bp, Artificial Sequence
  Description of Artificial Sequence: Synthetic oligonucleotide
  Target: LAMA2; (-) strand; PAM type: YTN; PAM sequence: CTA
gcttatcatttgcaatatga

SEQ ID NO: 292620 - DNA, 20 bp, Artificial Sequence
  Description of Artificial Sequence: Synthetic oligonucleotide
  Target: LAMA2; (-) strand; PAM type: YTN; PAM sequence: TTA
taactagcttatcatttgca

SEQ ID NO: 292621 - DNA, 20 bp, Artificial Sequence
  Description of Artificial Sequence: Synthetic oligonucleotide
  Target: LAMA2; (-) strand; PAM type: YTN; PAM sequence: TTA
ttataactagcttatcattt

SEQ ID NO: 292622 - DNA, 20 bp, Artificial Sequence
  Description of Artificial Sequence: Synthetic oligonucleotide
  Target: LAMA2; (-) strand; PAM type: YTN; PAM sequence: CTT
attataactagcttatcatt

SEQ ID NO: 292623 - DNA, 20 bp, Artificial Sequence
  Description of Artificial Sequence: Synthetic oligonucleotide
  Target: LAMA2; (-) strand; PAM type: YTN; PAM sequence: TTC
ttattataactagcttatca

SEQ ID NO: 292624 - DNA, 20 bp, Artificial Sequence
  Description of Artificial Sequence: Synthetic oligonucleotide
  Target: LAMA2; (-) strand; PAM type: YTN; PAM sequence: CTG
gtattcttattataactagc

SEQ ID NO: 292625 - DNA, 20 bp, Artificial Sequence
  Description of Artificial Sequence: Synthetic oligonucleotide
  Target: LAMA2; (-) strand; PAM type: YTN; PAM sequence: TTG
atctggtattcttattataa

SEQ ID NO: 292626 - DNA, 20 bp, Artificial Sequence
  Description of Artificial Sequence: Synthetic oligonucleotide
  Target: LAMA2; (-) strand; PAM type: YTN; PAM sequence: TTT
gatctggtattcttattata

SEQ ID NO: 292627 - DNA, 20 bp, Artificial Sequence
  Description of Artificial Sequence: Synthetic oligonucleotide
  Target: LAMA2; (-) strand; PAM type: YTN; PAM sequence: TTC
agaatatttgatctggtatt

SEQ ID NO: 292628 - DNA, 20 bp, Artificial Sequence
  Description of Artificial Sequence: Synthetic oligonucleotide
  Target: LAMA2; (-) strand; PAM type: YTN; PAM sequence: TTT
cagaatatttgatctggtat

SEQ ID NO: 292629 - DNA, 20 bp, Artificial Sequence
  Description of Artificial Sequence: Synthetic oligonucleotide
  Target: LAMA2; (-) strand; PAM type: YTN; PAM sequence: CTA
tttcagaatatttgatctgg

SEQ ID NO: 292630 - DNA, 20 bp, Artificial Sequence
  Description of Artificial Sequence: Synthetic oligonucleotide
  Target: LAMA2; (-) strand; PAM type: YTN; PAM sequence: TTA
gtggaaatctatttcagaat

SEQ ID NO: 292631 - DNA, 20 bp, Artificial Sequence
  Description of Artificial Sequence: Synthetic oligonucleotide
  Target: LAMA2; (-) strand; PAM type: YTN; PAM sequence: TTT
agtggaaatctatttcagaa

SEQ ID NO: 292632 - DNA, 20 bp, Artificial Sequence
  Description of Artificial Sequence: Synthetic oligonucleotide
  Target: LAMA2; (-) strand; PAM type: YTN; PAM sequence: CTT
tagtggaaatctatttcaga

SEQ ID NO: 292633 - DNA, 20 bp, Artificial Sequence
  Description of Artificial Sequence: Synthetic oligonucleotide
  Target: LAMA2; (-) strand; PAM type: YTN; PAM sequence: CTG
gcaatgatgaaggaatcaag

SEQ ID NO: 292634 - DNA, 20 bp, Artificial Sequence
  Description of Artificial Sequence: Synthetic oligonucleotide
  Target: LAMA2; (-) strand; PAM type: YTN; PAM sequence: TTA
aatatctggcaatgatgaag

SEQ ID NO: 292635 - DNA, 20 bp, Artificial Sequence
  Description of Artificial Sequence: Synthetic oligonucleotide
  Target: LAMA2; (-) strand; PAM type: YTN; PAM sequence: TTT
aaatatctggcaatgatgaa

SEQ ID NO: 292636 - DNA, 20 bp, Artificial Sequence
  Description of Artificial Sequence: Synthetic oligonucleotide
  Target: LAMA2; (-) strand; PAM type: YTN; PAM sequence: TTG
gagccagtaggtagtgttta

SEQ ID NO: 292637 - DNA, 20 bp, Artificial Sequence
  Description of Artificial Sequence: Synthetic oligonucleotide
  Target: LAMA2; (-) strand; PAM type: YTN; PAM sequence: TTT
ggagccagtaggtagtgttt

SEQ ID NO: 292638 - DNA, 20 bp, Artificial Sequence
  Description of Artificial Sequence: Synthetic oligonucleotide
  Target: LAMA2; (-) strand; PAM type: YTN; PAM sequence: TTG
aagaggagaaatttggagcc

SEQ ID NO: 292639 - DNA, 20 bp, Artificial Sequence
  Description of Artificial Sequence: Synthetic oligonucleotide
  Target: LAMA2; (-) strand; PAM type: YTN; PAM sequence: CTT
gaagaggagaaatttggagc

SEQ ID NO: 292640 - DNA, 20 bp, Artificial Sequence
  Description of Artificial Sequence: Synthetic oligonucleotide
  Target: LAMA2; (-) strand; PAM type: YTN; PAM sequence: TTA
tcttgaagaggagaaatttg

SEQ ID NO: 292641 - DNA, 20 bp, Artificial Sequence
  Description of Artificial Sequence: Synthetic oligonucleotide
  Target: LAMA2; (-) strand; PAM type: YTN; PAM sequence: TTT
atcttgaagaggagaaattt

SEQ ID NO: 292642 - DNA, 20 bp, Artificial Sequence
  Description of Artificial Sequence: Synthetic oligonucleotide
  Target: LAMA2; (-) strand; PAM type: YTN; PAM sequence: TTT
tatcttgaagaggagaaatt

SEQ ID NO: 292643 - DNA, 20 bp, Artificial Sequence
  Description of Artificial Sequence: Synthetic oligonucleotide
  Target: LAMA2; (-) strand; PAM type: YTN; PAM sequence: CTT
ttatcttgaagaggagaaat

SEQ ID NO: 292644 - DNA, 20 bp, Artificial Sequence
  Description of Artificial Sequence: Synthetic oligonucleotide
  Target: LAMA2; (-) strand; PAM type: YTN; PAM sequence: TTC
ttttatcttgaagaggagaa

SEQ ID NO: 292645 - DNA, 20 bp, Artificial Sequence
  Description of Artificial Sequence: Synthetic oligonucleotide
  Target: LAMA2; (-) strand; PAM type: YTN; PAM sequence: TTT
cttttatcttgaagaggaga

SEQ ID NO: 292646 - DNA, 20 bp, Artificial Sequence
  Description of Artificial Sequence: Synthetic oligonucleotide
  Target: LAMA2; (-) strand; PAM type: YTN; PAM sequence: TTC
atttcttttatcttgaagag

SEQ ID NO: 292647 - DNA, 20 bp, Artificial Sequence
  Description of Artificial Sequence: Synthetic oligonucleotide
  Target: LAMA2; (-) strand; PAM type: YTN; PAM sequence: TTC
acattcatttcttttatctt

SEQ ID NO: 292648 - DNA, 20 bp, Artificial Sequence
  Description of Artificial Sequence: Synthetic oligonucleotide
  Target: LAMA2; (-) strand; PAM type: YTN; PAM sequence: CTG
gtgattcacattcatttctt

SEQ ID NO: 292649 - DNA, 20 bp, Artificial Sequence
  Description of Artificial Sequence: Synthetic oligonucleotide
  Target: LAMA2; (-) strand; PAM type: YTN; PAM sequence: CTG
aaagctggtgattcacattc

SEQ ID NO: 292650 - DNA, 20 bp, Artificial Sequence
  Description of Artificial Sequence: Synthetic oligonucleotide
  Target: LAMA2; (-) strand; PAM type: YTN; PAM sequence: CTA
tcctgaaagctggtgattca

SEQ ID NO: 292651 - DNA, 20 bp, Artificial Sequence
  Description of Artificial Sequence: Synthetic oligonucleotide
  Target: LAMA2; (-) strand; PAM type: YTN; PAM sequence: TTA
agcactatcctgaaagctgg

SEQ ID NO: 292652 - DNA, 20 bp, Artificial Sequence
  Description of Artificial Sequence: Synthetic oligonucleotide
  Target: LAMA2; (-) strand; PAM type: YTN; PAM sequence: TTT
aagcactatcctgaaagctg

SEQ ID NO: 292653 - DNA, 20 bp, Artificial Sequence
  Description of Artificial Sequence: Synthetic oligonucleotide
  Target: LAMA2; (-) strand; PAM type: YTN; PAM sequence: TTT
taagcactatcctgaaagct

SEQ ID NO: 292654 - DNA, 20 bp, Artificial Sequence
  Description of Artificial Sequence: Synthetic oligonucleotide
  Target: LAMA2; (-) strand; PAM type: YTN; PAM sequence: TTA
ttttaagcactatcctgaaa

SEQ ID NO: 292655 - DNA, 20 bp, Artificial Sequence
  Description of Artificial Sequence: Synthetic oligonucleotide
  Target: LAMA2; (-) strand; PAM type: YTN; PAM sequence: TTT
attttaagcactatcctgaa

SEQ ID NO: 292656 - DNA, 20 bp, Artificial Sequence
  Description of Artificial Sequence: Synthetic oligonucleotide
  Target: LAMA2; (-) strand; PAM type: YTN; PAM sequence: TTT
tattttaagcactatcctga

SEQ ID NO: 292657 - DNA, 20 bp, Artificial Sequence
  Description of Artificial Sequence: Synthetic oligonucleotide
  Target: LAMA2; (-) strand; PAM type: YTN; PAM sequence: CTG
ttttattttaagcactatcc

SEQ ID NO: 292658 - DNA, 20 bp, Artificial Sequence
  Description of Artificial Sequence: Synthetic oligonucleotide
  Target: LAMA2; (-) strand; PAM type: YTN; PAM sequence: TTA
ataggaatctgttttatttt

SEQ ID NO: 292659 - DNA, 20 bp, Artificial Sequence
  Description of Artificial Sequence: Synthetic oligonucleotide
  Target: LAMA2; (-) strand; PAM type: YTN; PAM sequence: TTT
aataggaatctgttttattt

SEQ ID NO: 292660 - DNA, 20 bp, Artificial Sequence
  Description of Artificial Sequence: Synthetic oligonucleotide
  Target: LAMA2; (-) strand; PAM type: YTN; PAM sequence: TTT
taataggaatctgttttatt

SEQ ID NO: 292661 - DNA, 20 bp, Artificial Sequence
  Description of Artificial Sequence: Synthetic oligonucleotide
  Target: LAMA2; (-) strand; PAM type: YTN; PAM sequence: TTG
ttttaataggaatctgtttt

SEQ ID NO: 292662 - DNA, 20 bp, Artificial Sequence
  Description of Artificial Sequence: Synthetic oligonucleotide
  Target: LAMA2; (-) strand; PAM type: YTN; PAM sequence: TTG
taattgttttaataggaatc

SEQ ID NO: 292663 - DNA, 20 bp, Artificial Sequence
  Description of Artificial Sequence: Synthetic oligonucleotide
  Target: LAMA2; (-) strand; PAM type: YTN; PAM sequence: TTA
ttgtaattgttttaatagga

SEQ ID NO: 292664 - DNA, 20 bp, Artificial Sequence
  Description of Artificial Sequence: Synthetic oligonucleotide
  Target: LAMA2; (-) strand; PAM type: YTN; PAM sequence: CTT
attgtaattgttttaatagg

SEQ ID NO: 292665 - DNA, 20 bp, Artificial Sequence
  Description of Artificial Sequence: Synthetic oligonucleotide
  Target: LAMA2; (-) strand; PAM type: YTN; PAM sequence: TTC
ttattgtaattgttttaata

SEQ ID NO: 292666 - DNA, 20 bp, Artificial Sequence
  Description of Artificial Sequence: Synthetic oligonucleotide
  Target: LAMA2; (-) strand; PAM type: YTN; PAM sequence: TTT
cttattgtaattgttttaat

SEQ ID NO: 292667 - DNA, 20 bp, Artificial Sequence
  Description of Artificial Sequence: Synthetic oligonucleotide
  Target: LAMA2; (-) strand; PAM type: YTN; PAM sequence: TTT
tcttattgtaattgttttaa

SEQ ID NO: 292668 - DNA, 20 bp, Artificial Sequence
  Description of Artificial Sequence: Synthetic oligonucleotide
  Target: LAMA2; (-) strand; PAM type: YTN; PAM sequence: CTA
catagtgttttcttattgta

SEQ ID NO: 292669 - DNA, 20 bp, Artificial Sequence
  Description of Artificial Sequence: Synthetic oligonucleotide
  Target: LAMA2; (-) strand; PAM type: YTN; PAM sequence: CTA
tactacatagtgttttctta

SEQ ID NO: 292670 - DNA, 20 bp, Artificial Sequence
  Description of Artificial Sequence: Synthetic oligonucleotide
  Target: LAMA2; (-) strand; PAM type: YTN; PAM sequence: TTA
tactatactacatagtgttt

SEQ ID NO: 292671 - DNA, 20 bp, Artificial Sequence
  Description of Artificial Sequence: Synthetic oligonucleotide
  Target: LAMA2; (-) strand; PAM type: YTN; PAM sequence: TTT
atactatactacatagtgtt

SEQ ID NO: 292672 - DNA, 20 bp, Artificial Sequence
  Description of Artificial Sequence: Synthetic oligonucleotide
  Target: LAMA2; (-) strand; PAM type: YTN; PAM sequence: CTT
tatactatactacatagtgt

SEQ ID NO: 292673 - DNA, 20 bp, Artificial Sequence
  Description of Artificial Sequence: Synthetic oligonucleotide
  Target: LAMA2; (-) strand; PAM type: YTN; PAM sequence: TTA
ctttatactatactacatag

SEQ ID NO: 292674 - DNA, 20 bp, Artificial Sequence
  Description of Artificial Sequence: Synthetic oligonucleotide
  Target: LAMA2; (-) strand; PAM type: YTN; PAM sequence: CTT
actttatactatactacata

SEQ ID NO: 292675 - DNA, 20 bp, Artificial Sequence
  Description of Artificial Sequence: Synthetic oligonucleotide
  Target: LAMA2; (-) strand; PAM type: YTN; PAM sequence: TTA
acttactttatactatacta

SEQ ID NO: 292676 - DNA, 20 bp, Artificial Sequence
  Description of Artificial Sequence: Synthetic oligonucleotide
  Target: LAMA2; (-) strand; PAM type: YTN; PAM sequence: TTT
aacttactttatactatact

SEQ ID NO: 292677 - DNA, 20 bp, Artificial Sequence
  Description of Artificial Sequence: Synthetic oligonucleotide
  Target: LAMA2; (-) strand; PAM type: YTN; PAM sequence: TTT
taacttactttatactatac

SEQ ID NO: 292678 - DNA, 20 bp, Artificial Sequence
  Description of Artificial Sequence: Synthetic oligonucleotide
  Target: LAMA2; (-) strand; PAM type: YTN; PAM sequence: TTA
aaatgtcattttaacttact

SEQ ID NO: 292679 - DNA, 20 bp, Artificial Sequence
  Description of Artificial Sequence: Synthetic oligonucleotide
  Target: LAMA2; (-) strand; PAM type: YTN; PAM sequence: TTA
aaacattaaaatgtcatttt

SEQ ID NO: 292680 - DNA, 20 bp, Artificial Sequence
  Description of Artificial Sequence: Synthetic oligonucleotide
  Target: LAMA2; (-) strand; PAM type: YTN; PAM sequence: TTA
aaatgttaaaacattaaaat

SEQ ID NO: 292681 - DNA, 20 bp, Artificial Sequence
  Description of Artificial Sequence: Synthetic oligonucleotide
  Target: LAMA2; (-) strand; PAM type: YTN; PAM sequence: TTA
ttaaaatgttaaaacattaa

SEQ ID NO: 292682 - DNA, 20 bp, Artificial Sequence
  Description of Artificial Sequence: Synthetic oligonucleotide
  Target: LAMA2; (-) strand; PAM type: YTN; PAM sequence: TTA
taaagtagatatgagttatt

SEQ ID NO: 292683 - DNA, 20 bp, Artificial Sequence
  Description of Artificial Sequence: Synthetic oligonucleotide
  Target: LAMA2; (-) strand; PAM type: YTN; PAM sequence: TTT
ataaagtagatatgagttat

SEQ ID NO: 292684 - DNA, 20 bp, Artificial Sequence
  Description of Artificial Sequence: Synthetic oligonucleotide
  Target: LAMA2; (-) strand; PAM type: YTN; PAM sequence: TTT
tataaagtagatatgagtta

SEQ ID NO: 292685 - DNA, 20 bp, Artificial Sequence
  Description of Artificial Sequence: Synthetic oligonucleotide
  Target: LAMA2; (-) strand; PAM type: YTN; PAM sequence: CTA
tgatattttataaagtagat

SEQ ID NO: 292686 - DNA, 20 bp, Artificial Sequence
  Description of Artificial Sequence: Synthetic oligonucleotide
  Target: LAMA2; (-) strand; PAM type: YTN; PAM sequence: TTC
agatagcatatactatgata

SEQ ID NO: 292687 - DNA, 20 bp, Artificial Sequence
  Description of Artificial Sequence: Synthetic oligonucleotide
  Target: LAMA2; (-) strand; PAM type: YTN; PAM sequence: CTT
cagatagcatatactatgat

SEQ ID NO: 292688 - DNA, 20 bp, Artificial Sequence
  Description of Artificial Sequence: Synthetic oligonucleotide
  Target: LAMA2; (-) strand; PAM type: YTN; PAM sequence: CTC
cttcagatagcatatactat

SEQ ID NO: 292689 - DNA, 20 bp, Artificial Sequence
  Description of Artificial Sequence: Synthetic oligonucleotide
  Target: LAMA2; (-) strand; PAM type: YTN; PAM sequence: TTC
ctccttcagatagcatatac

SEQ ID NO: 292690 - DNA, 20 bp, Artificial Sequence
  Description of Artificial Sequence: Synthetic oligonucleotide
  Target: LAMA2; (-) strand; PAM type: YTN; PAM sequence: TTG
gttcctccttcagatagcat

SEQ ID NO: 292691 - DNA, 20 bp, Artificial Sequence
  Description of Artificial Sequence: Synthetic oligonucleotide
  Target: LAMA2; (-) strand; PAM type: YTN; PAM sequence: TTA
acattggttcctccttcaga

SEQ ID NO: 292692 - DNA, 20 bp, Artificial Sequence
  Description of Artificial Sequence: Synthetic oligonucleotide
  Target: LAMA2; (-) strand; PAM type: YTN; PAM sequence: TTT
aacattggttcctccttcag

SEQ ID NO: 292693 - DNA, 20 bp, Artificial Sequence
  Description of Artificial Sequence: Synthetic oligonucleotide
  Target: LAMA2; (-) strand; PAM type: YTN; PAM sequence: CTA
tttaacattggttcctcctt

SEQ ID NO: 292694 - DNA, 20 bp, Artificial Sequence
  Description of Artificial Sequence: Synthetic oligonucleotide
  Target: LAMA2; (-) strand; PAM type: YTN; PAM sequence: TTA
tactatttaacattggttcc

SEQ ID NO: 292695 - DNA, 20 bp, Artificial Sequence
  Description of Artificial Sequence: Synthetic oligonucleotide
  Target: LAMA2; (-) strand; PAM type: YTN; PAM sequence: CTT
atactatttaacattggttc

SEQ ID NO: 292696 - DNA, 20 bp, Artificial Sequence
  Description of Artificial Sequence: Synthetic oligonucleotide
  Target: LAMA2; (-) strand; PAM type: YTN; PAM sequence: CTA
acagacttatactatttaac

SEQ ID NO: 292697 - DNA, 20 bp, Artificial Sequence
  Description of Artificial Sequence: Synthetic oligonucleotide
  Target: LAMA2; (-) strand; PAM type: YTN; PAM sequence: TTA
tgtctaacagacttatacta

SEQ ID NO: 292698 - DNA, 20 bp, Artificial Sequence
  Description of Artificial Sequence: Synthetic oligonucleotide
  Target: LAMA2; (-) strand; PAM type: YTN; PAM sequence: CTA
attatgtctaacagacttat

SEQ ID NO: 292699 - DNA, 20 bp, Artificial Sequence
  Description of Artificial Sequence: Synthetic oligonucleotide
  Target: LAMA2; (-) strand; PAM type: YTN; PAM sequence: CTA
aatctaattatgtctaacag

SEQ ID NO: 292700 - DNA, 20 bp, Artificial Sequence
  Description of Artificial Sequence: Synthetic oligonucleotide
  Target: LAMA2; (-) strand; PAM type: YTN; PAM sequence: CTG
aatctaaatctaattatgtc

SEQ ID NO: 292701 - DNA, 20 bp, Artificial Sequence
  Description of Artificial Sequence: Synthetic oligonucleotide
  Target: LAMA2; (-) strand; PAM type: YTN; PAM sequence: TTA
accagcactgaatctaaatc

SEQ ID NO: 292702 - DNA, 20 bp, Artificial Sequence
  Description of Artificial Sequence: Synthetic oligonucleotide
  Target: LAMA2; (-) strand; PAM type: YTN; PAM sequence: TTT
aaccagcactgaatctaaat

SEQ ID NO: 292703 - DNA, 20 bp, Artificial Sequence
  Description of Artificial Sequence: Synthetic oligonucleotide
  Target: LAMA2; (-) strand; PAM type: YTN; PAM sequence: TTG
tcaatttaaccagcactgaa

SEQ ID NO: 292704 - DNA, 20 bp, Artificial Sequence
  Description of Artificial Sequence: Synthetic oligonucleotide
  Target: LAMA2; (-) strand; PAM type: YTN; PAM sequence: CTT
gtcaatttaaccagcactga

SEQ ID NO: 292705 - DNA, 20 bp, Artificial Sequence
  Description of Artificial Sequence: Synthetic oligonucleotide
  Target: LAMA2; (-) strand; PAM type: YTN; PAM sequence: TTG
aaatataaaacttgtcaatt

SEQ ID NO: 292706 - DNA, 20 bp, Artificial Sequence
  Description of Artificial Sequence: Synthetic oligonucleotide
  Target: LAMA2; (-) strand; PAM type: YTN; PAM sequence: TTT
gaaatataaaacttgtcaat

SEQ ID NO: 292707 - DNA, 20 bp, Artificial Sequence
  Description of Artificial Sequence: Synthetic oligonucleotide
  Target: LAMA2; (-) strand; PAM type: YTN; PAM sequence: CTT
tgaaatataaaacttgtcaa

SEQ ID NO: 292708 - DNA, 20 bp, Artificial Sequence
  Description of Artificial Sequence: Synthetic oligonucleotide
  Target: LAMA2; (-) strand; PAM type: YTN; PAM sequence: TTA
gctttgaaatataaaacttg

SEQ ID NO: 292709 - DNA, 20 bp, Artificial Sequence
  Description of Artificial Sequence: Synthetic oligonucleotide
  Target: LAMA2; (-) strand; PAM type: YTN; PAM sequence: CTA
tgggtatcaaaaccgttagc

SEQ ID NO: 292710 - DNA, 20 bp, Artificial Sequence
  Description of Artificial Sequence: Synthetic oligonucleotide
  Target: LAMA2; (-) strand; PAM type: YTN; PAM sequence: CTC
tatgggtatcaaaaccgtta

SEQ ID NO: 292711 - DNA, 20 bp, Artificial Sequence
  Description of Artificial Sequence: Synthetic oligonucleotide
  Target: LAMA2; (-) strand; PAM type: YTN; PAM sequence: TTA
gcagaaaggaatcacaaata

SEQ ID NO: 292712 - DNA, 20 bp, Artificial Sequence
  Description of Artificial Sequence: Synthetic oligonucleotide
  Target: LAMA2; (-) strand; PAM type: YTN; PAM sequence: TTT
agcagaaaggaatcacaaat

SEQ ID NO: 292713 - DNA, 20 bp, Artificial Sequence
  Description of Artificial Sequence: Synthetic oligonucleotide
  Target: LAMA2; (-) strand; PAM type: YTN; PAM sequence: TTG
ccatatcaaacccatttagc

SEQ ID NO: 292714 - DNA, 20 bp, Artificial Sequence
  Description of Artificial Sequence: Synthetic oligonucleotide
  Target: LAMA2; (-) strand; PAM type: YTN; PAM sequence: TTT
gccatatcaaacccatttag

SEQ ID NO: 292715 - DNA, 20 bp, Artificial Sequence
  Description of Artificial Sequence: Synthetic oligonucleotide
  Target: LAMA2; (-) strand; PAM type: YTN; PAM sequence: CTC
atggatggtttgccatatca

SEQ ID NO: 292716 - DNA, 20 bp, Artificial Sequence
  Description of Artificial Sequence: Synthetic oligonucleotide
  Target: LAMA2; (-) strand; PAM type: YTN; PAM sequence: TTA
gctcatggatggtttgccat

SEQ ID NO: 292717 - DNA, 20 bp, Artificial Sequence
  Description of Artificial Sequence: Synthetic oligonucleotide
  Target: LAMA2; (-) strand; PAM type: YTN; PAM sequence: CTT
agctcatggatggtttgcca

SEQ ID NO: 292718 - DNA, 20 bp, Artificial Sequence
  Description of Artificial Sequence: Synthetic oligonucleotide
  Target: LAMA2; (-) strand; PAM type: YTN; PAM sequence: TTC
cttagctcatggatggtttg

SEQ ID NO: 292719 - DNA, 20 bp, Artificial Sequence
  Description of Artificial Sequence: Synthetic oligonucleotide
  Target: LAMA2; (-) strand; PAM type: YTN; PAM sequence: TTA
aaaattccttagctcatgga

SEQ ID NO: 292720 - DNA, 20 bp, Artificial Sequence
  Description of Artificial Sequence: Synthetic oligonucleotide
  Target: LAMA2; (-) strand; PAM type: YTN; PAM sequence: CTC
aattaaaaattccttagctc

SEQ ID NO: 292721 - DNA, 20 bp, Artificial Sequence
  Description of Artificial Sequence: Synthetic oligonucleotide
  Target: LAMA2; (-) strand; PAM type: YTN; PAM sequence: CTA
ctcaattaaaaattccttag

SEQ ID NO: 292722 - DNA, 20 bp, Artificial Sequence
  Description of Artificial Sequence: Synthetic oligonucleotide
  Target: LAMA2; (-) strand; PAM type: YTN; PAM sequence: CTG
tcaaagggaaaacacaaact

SEQ ID NO: 292723 - DNA, 20 bp, Artificial Sequence
  Description of Artificial Sequence: Synthetic oligonucleotide
  Target: LAMA2; (-) strand; PAM type: YTN; PAM sequence: CTC
accatctgtcaaagggaaaa

SEQ ID NO: 292724 - DNA, 20 bp, Artificial Sequence
  Description of Artificial Sequence: Synthetic oligonucleotide
  Target: LAMA2; (-) strand; PAM type: YTN; PAM sequence: CTG
gataagtgctcaccatctgt

SEQ ID NO: 292725 - DNA, 20 bp, Artificial Sequence
  Description of Artificial Sequence: Synthetic oligonucleotide
  Target: LAMA2; (-) strand; PAM type: YTN; PAM sequence: TTG
aggatctggataagtgctca

SEQ ID NO: 292726 - DNA, 20 bp, Artificial Sequence
  Description of Artificial Sequence: Synthetic oligonucleotide
  Target: LAMA2; (-) strand; PAM type: YTN; PAM sequence: TTT
gaggatctggataagtgctc

SEQ ID NO: 292727 - DNA, 20 bp, Artificial Sequence
  Description of Artificial Sequence: Synthetic oligonucleotide
  Target: LAMA2; (-) strand; PAM type: YTN; PAM sequence: TTT
tgaggatctggataagtgct

SEQ ID NO: 292728 - DNA, 20 bp, Artificial Sequence
  Description of Artificial Sequence: Synthetic oligonucleotide
  Target: LAMA2; (-) strand; PAM type: YTN; PAM sequence: TTA
cgtgtccaccacagaacatt

SEQ ID NO: 292729 - DNA, 20 bp, Artificial Sequence
  Description of Artificial Sequence: Synthetic oligonucleotide
  Target: LAMA2; (-) strand; PAM type: YTN; PAM sequence: CTA
aatcatgtatgtagttacgt

SEQ ID NO: 292730 - DNA, 20 bp, Artificial Sequence
  Description of Artificial Sequence: Synthetic oligonucleotide
  Target: LAMA2; (-) strand; PAM type: YTN; PAM sequence: TTA
ctaaatcatgtatgtagtta

SEQ ID NO: 292731 - DNA, 20 bp, Artificial Sequence
  Description of Artificial Sequence: Synthetic oligonucleotide
  Target: LAMA2; (-) strand; PAM type: YTN; PAM sequence: TTT
actaaatcatgtatgtagtt

SEQ ID NO: 292732 - DNA, 20 bp, Artificial Sequence
  Description of Artificial Sequence: Synthetic oligonucleotide
  Target: LAMA2; (-) strand; PAM type: YTN; PAM sequence: TTC
caataatttactaaatcatg

SEQ ID NO: 292733 - DNA, 20 bp, Artificial Sequence
  Description of Artificial Sequence: Synthetic oligonucleotide
  Target: LAMA2; (-) strand; PAM type: YTN; PAM sequence: TTC
catcaaacatcatcatgttc

SEQ ID NO: 292734 - DNA, 20 bp, Artificial Sequence
  Description of Artificial Sequence: Synthetic oligonucleotide
  Target: LAMA2; (-) strand; PAM type: YTN; PAM sequence: CTA
tggtggtagagacagattcc

SEQ ID NO: 292735 - DNA, 20 bp, Artificial Sequence
  Description of Artificial Sequence: Synthetic oligonucleotide
  Target: LAMA2; (-) strand; PAM type: YTN; PAM sequence: CTC
catgagtcatctatggtggt

SEQ ID NO: 292736 - DNA, 20 bp, Artificial Sequence
  Description of Artificial Sequence: Synthetic oligonucleotide
  Target: LAMA2; (-) strand; PAM type: YTN; PAM sequence: TTC
tccatgagtcatctatggtg

SEQ ID NO: 292737 - DNA, 20 bp, Artificial Sequence
  Description of Artificial Sequence: Synthetic oligonucleotide
  Target: LAMA2; (-) strand; PAM type: YTN; PAM sequence: CTC
agttctccatgagtcatcta

SEQ ID NO: 292738 - DNA, 20 bp, Artificial Sequence
  Description of Artificial Sequence: Synthetic oligonucleotide
  Target: LAMA2; (-) strand; PAM type: YTN; PAM sequence: CTG
ccacacagtgatggctcagt

SEQ ID NO: 292739 - DNA, 20 bp, Artificial Sequence
  Description of Artificial Sequence: Synthetic oligonucleotide
  Target: LAMA2; (-) strand; PAM type: YTN; PAM sequence: TTG
tggagtatgggggcacctgc

SEQ ID NO: 292740 - DNA, 20 bp, Artificial Sequence
  Description of Artificial Sequence: Synthetic oligonucleotide
  Target: LAMA2; (-) strand; PAM type: YTN; PAM sequence: CTT
gtggagtatgggggcacctg

SEQ ID NO: 292741 - DNA, 20 bp, Artificial Sequence
  Description of Artificial Sequence: Synthetic oligonucleotide
  Target: LAMA2; (-) strand; PAM type: YTN; PAM sequence: TTC
ttgtggagtatgggggcacc

SEQ ID NO: 292742 - DNA, 20 bp, Artificial Sequence
  Description of Artificial Sequence: Synthetic oligonucleotide
  Target: LAMA2; (-) strand; PAM type: YTN; PAM sequence: TTT
cttgtggagtatgggggcac

SEQ ID NO: 292743 - DNA, 20 bp, Artificial Sequence
  Description of Artificial Sequence: Synthetic oligonucleotide
  Target: LAMA2; (-) strand; PAM type: YTN; PAM sequence: CTT
tcttgtggagtatgggggca

SEQ ID NO: 292744 - DNA, 20 bp, Artificial Sequence
  Description of Artificial Sequence: Synthetic oligonucleotide
  Target: LAMA2; (-) strand; PAM type: YTN; PAM sequence: CTC
cctttcttgtggagtatggg

SEQ ID NO: 292745 - DNA, 20 bp, Artificial Sequence
  Description of Artificial Sequence: Synthetic oligonucleotide
  Target: LAMA2; (-) strand; PAM type: YTN; PAM sequence: CTC
tccctttcttgtggagtatg

SEQ ID NO: 292746 - DNA, 20 bp, Artificial Sequence
  Description of Artificial Sequence: Synthetic oligonucleotide
  Target: LAMA2; (-) strand; PAM type: YTN; PAM sequence: CTG
atgccacgtgctctcccttt

SEQ ID NO: 292747 - DNA, 20 bp, Artificial Sequence
  Description of Artificial Sequence: Synthetic oligonucleotide
  Target: LAMA2; (-) strand; PAM type: YTN; PAM sequence: CTA
gagctgatgccacgtgctct

SEQ ID NO: 292748 - DNA, 20 bp, Artificial Sequence
  Description of Artificial Sequence: Synthetic oligonucleotide
  Target: LAMA2; (-) strand; PAM type: YTN; PAM sequence: TTG
tccctagagctgatgccacg

SEQ ID NO: 292749 - DNA, 20 bp, Artificial Sequence
  Description of Artificial Sequence: Synthetic oligonucleotide
  Target: LAMA2; (-) strand; PAM type: YTN; PAM sequence: CTT
gtccctagagctgatgccac

SEQ ID NO: 292750 - DNA, 20 bp, Artificial Sequence
  Description of Artificial Sequence: Synthetic oligonucleotide
  Target: LAMA2; (-) strand; PAM type: YTN; PAM sequence: CTG
aatgcagtccttgtccctag

SEQ ID NO: 292751 - DNA, 20 bp, Artificial Sequence
  Description of Artificial Sequence: Synthetic oligonucleotide
  Target: LAMA2; (-) strand; PAM type: YTN; PAM sequence: TTG
atatcccatcatgaacccca

SEQ ID NO: 292752 - DNA, 20 bp, Artificial Sequence
  Description of Artificial Sequence: Synthetic oligonucleotide
  Target: LAMA2; (-) strand; PAM type: YTN; PAM sequence: TTT
gatatcccatcatgaacccc

SEQ ID NO: 292753 - DNA, 20 bp, Artificial Sequence
  Description of Artificial Sequence: Synthetic oligonucleotide
  Target: LAMA2; (-) strand; PAM type: YTN; PAM sequence: TTT
tgatatcccatcatgaaccc

SEQ ID NO: 292754 - DNA, 20 bp, Artificial Sequence
  Description of Artificial Sequence: Synthetic oligonucleotide
  Target: LAMA2; (-) strand; PAM type: YTN; PAM sequence: CTA
tagcaaccagtgtggttttg

SEQ ID NO: 292755 - DNA, 20 bp, Artificial Sequence
  Description of Artificial Sequence: Synthetic oligonucleotide
  Target: LAMA2; (-) strand; PAM type: YTN; PAM sequence: TTA
ctatagcaaccagtgtggtt

SEQ ID NO: 292756 - DNA, 20 bp, Artificial Sequence
  Description of Artificial Sequence: Synthetic oligonucleotide
  Target: LAMA2; (-) strand; PAM type: YTN; PAM sequence: CTG
ttactatagcaaccagtgtg

SEQ ID NO: 292757 - DNA, 20 bp, Artificial Sequence
  Description of Artificial Sequence: Synthetic oligonucleotide
  Target: LAMA2; (-) strand; PAM type: YTN; PAM sequence: CTA
ctgttactatagcaaccagt

SEQ ID NO: 292758 - DNA, 20 bp, Artificial Sequence
  Description of Artificial Sequence: Synthetic oligonucleotide
  Target: LAMA2; (-) strand; PAM type: YTN; PAM sequence: TTG
ctactgttactatagcaacc

SEQ ID NO: 292759 - DNA, 20 bp, Artificial Sequence
  Description of Artificial Sequence: Synthetic oligonucleotide
  Target: LAMA2; (-) strand; PAM type: YTN; PAM sequence: CTT
gctactgttactatagcaac

SEQ ID NO: 292760 - DNA, 20 bp, Artificial Sequence
  Description of Artificial Sequence: Synthetic oligonucleotide
  Target: LAMA2; (-) strand; PAM type: YTN; PAM sequence: TTC
ttgctactgttactatagca

SEQ ID NO: 292761 - DNA, 20 bp, Artificial Sequence
  Description of Artificial Sequence: Synthetic oligonucleotide
  Target: LAMA2; (-) strand; PAM type: YTN; PAM sequence: CTT
cttgctactgttactatagc

SEQ ID NO: 292762 - DNA, 20 bp, Artificial Sequence
  Description of Artificial Sequence: Synthetic oligonucleotide
  Target: LAMA2; (-) strand; PAM type: YTN; PAM sequence: TTC
ttcttgctactgttactata

SEQ ID NO: 292763 - DNA, 20 bp, Artificial Sequence
  Description of Artificial Sequence: Synthetic oligonucleotide
  Target: LAMA2; (-) strand; PAM type: YTN; PAM sequence: TTT
cttcttgctactgttactat

SEQ ID NO: 292764 - DNA, 20 bp, Artificial Sequence
  Description of Artificial Sequence: Synthetic oligonucleotide
  Target: LAMA2; (-) strand; PAM type: YTN; PAM sequence: CTT
tcttcttgctactgttacta

SEQ ID NO: 292765 - DNA, 20 bp, Artificial Sequence
  Description of Artificial Sequence: Synthetic oligonucleotide
  Target: LAMA2; (-) strand; PAM type: YTN; PAM sequence: CTG
ctttcttcttgctactgtta

SEQ ID NO: 292766 - DNA, 20 bp, Artificial Sequence
  Description of Artificial Sequence: Synthetic oligonucleotide
  Target: LAMA2; (-) strand; PAM type: YTN; PAM sequence: TTC
atccacaagcatgcctgctt

SEQ ID NO: 292767 - DNA, 20 bp, Artificial Sequence
  Description of Artificial Sequence: Synthetic oligonucleotide
  Target: LAMA2; (-) strand; PAM type: YTN; PAM sequence: TTT
catccacaagcatgcctgct

SEQ ID NO: 292768 - DNA, 20 bp, Artificial Sequence
  Description of Artificial Sequence: Synthetic oligonucleotide
  Target: LAMA2; (-) strand; PAM type: YTN; PAM sequence: TTT
tcatccacaagcatgcctgc

SEQ ID NO: 292769 - DNA, 20 bp, Artificial Sequence
  Description of Artificial Sequence: Synthetic oligonucleotide
  Target: LAMA2; (-) strand; PAM type: YTN; PAM sequence: TTT
ttcatccacaagcatgcctg

SEQ ID NO: 292770 - DNA, 20 bp, Artificial Sequence
  Description of Artificial Sequence: Synthetic oligonucleotide
  Target: LAMA2; (-) strand; PAM type: YTN; PAM sequence: TTA
gaaagaaggaagataatttt

SEQ ID NO: 292771 - DNA, 20 bp, Artificial Sequence
  Description of Artificial Sequence: Synthetic oligonucleotide
  Target: LAMA2; (-) strand; PAM type: YTN; PAM sequence: TTT
agaaagaaggaagataattt

SEQ ID NO: 292772 - DNA, 20 bp, Artificial Sequence
  Description of Artificial Sequence: Synthetic oligonucleotide
  Target: LAMA2; (-) strand; PAM type: YTN; PAM sequence: CTC
ccacatttagaaagaaggaa

SEQ ID NO: 292773 - DNA, 20 bp, Artificial Sequence
  Description of Artificial Sequence: Synthetic oligonucleotide
  Target: LAMA2; (-) strand; PAM type: YTN; PAM sequence: CTG
cctcccacatttagaaagaa

SEQ ID NO: 292774 - DNA, 20 bp, Artificial Sequence
  Description of Artificial Sequence: Synthetic oligonucleotide
  Target: LAMA2; (-) strand; PAM type: YTN; PAM sequence: CTA
tcacaaacatgtaacctgcc

SEQ ID NO: 292775 - DNA, 20 bp, Artificial Sequence
  Description of Artificial Sequence: Synthetic oligonucleotide
  Target: LAMA2; (-) strand; PAM type: YTN; PAM sequence: CTG
gtagaatagatcgctatcac

SEQ ID NO: 292776 - DNA, 20 bp, Artificial Sequence
  Description of Artificial Sequence: Synthetic oligonucleotide
  Target: LAMA2; (-) strand; PAM type: YTN; PAM sequence: CTG
agctggtagaatagatcgct

SEQ ID NO: 292777 - DNA, 20 bp, Artificial Sequence
  Description of Artificial Sequence: Synthetic oligonucleotide
  Target: LAMA2; (-) strand; PAM type: YTN; PAM sequence: CTC
tgagctggtagaatagatcg

SEQ ID NO: 292778 - DNA, 20 bp, Artificial Sequence
  Description of Artificial Sequence: Synthetic oligonucleotide
  Target: LAMA2; (-) strand; PAM type: YTN; PAM sequence: TTC
tctgagctggtagaatagat

SEQ ID NO: 292779 - DNA, 20 bp, Artificial Sequence
  Description of Artificial Sequence: Synthetic oligonucleotide
  Target: LAMA2; (-) strand; PAM type: YTN; PAM sequence: TTG
ttctctgagctggtagaata

SEQ ID NO: 292780 - DNA, 20 bp, Artificial Sequence
  Description of Artificial Sequence: Synthetic oligonucleotide
  Target: LAMA2; (-) strand; PAM type: YTN; PAM sequence: TTT
gttctctgagctggtagaat

SEQ ID NO: 292781 - DNA, 20 bp, Artificial Sequence
  Description of Artificial Sequence: Synthetic oligonucleotide
  Target: LAMA2; (-) strand; PAM type: YTN; PAM sequence: TTC
aatttgttctctgagctggt

SEQ ID NO: 292782 - DNA, 20 bp, Artificial Sequence
  Description of Artificial Sequence: Synthetic oligonucleotide
  Target: LAMA2; (-) strand; PAM type: YTN; PAM sequence: CTT
caatttgttctctgagctgg

SEQ ID NO: 292783 - DNA, 20 bp, Artificial Sequence
  Description of Artificial Sequence: Synthetic oligonucleotide
  Target: LAMA2; (-) strand; PAM type: YTN; PAM sequence: TTA
gacttcaatttgttctctga

SEQ ID NO: 292784 - DNA, 20 bp, Artificial Sequence
  Description of Artificial Sequence: Synthetic oligonucleotide
  Target: LAMA2; (-) strand; PAM type: YTN; PAM sequence: TTT
agacttcaatttgttctctg

SEQ ID NO: 292785 - DNA, 20 bp, Artificial Sequence
  Description of Artificial Sequence: Synthetic oligonucleotide
  Target: LAMA2; (-) strand; PAM type: YTN; PAM sequence: CTG
agtatttagacttcaatttg

SEQ ID NO: 292786 - DNA, 20 bp, Artificial Sequence
  Description of Artificial Sequence: Synthetic oligonucleotide
  Target: LAMA2; (-) strand; PAM type: YTN; PAM sequence: TTC
tgagtatttagacttcaatt

SEQ ID NO: 292787 - DNA, 20 bp, Artificial Sequence
  Description of Artificial Sequence: Synthetic oligonucleotide
  Target: LAMA2; (-) strand; PAM type: YTN; PAM sequence: TTG
tggcattctgagtatttaga

SEQ ID NO: 292788 - DNA, 20 bp, Artificial Sequence
  Description of Artificial Sequence: Synthetic oligonucleotide
  Target: LAMA2; (-) strand; PAM type: YTN; PAM sequence: CTT
gtggcattctgagtatttag

SEQ ID NO: 292789 - DNA, 20 bp, Artificial Sequence
  Description of Artificial Sequence: Synthetic oligonucleotide
  Target: LAMA2; (-) strand; PAM type: YTN; PAM sequence: CTC
ccaaccttgtggcattctga

SEQ ID NO: 292790 - DNA, 20 bp, Artificial Sequence
  Description of Artificial Sequence: Synthetic oligonucleotide
  Target: LAMA2; (-) strand; PAM type: YTN; PAM sequence: CTG
actcccaaccttgtggcatt

SEQ ID NO: 292791 - DNA, 20 bp, Artificial Sequence
  Description of Artificial Sequence: Synthetic oligonucleotide
  Target: LAMA2; (-) strand; PAM type: YTN; PAM sequence: CTG
agaatcaggcctgactccca

SEQ ID NO: 292792 - DNA, 20 bp, Artificial Sequence
  Description of Artificial Sequence: Synthetic oligonucleotide
  Target: LAMA2; (-) strand; PAM type: YTN; PAM sequence: TTC
tgagaatcaggcctgactcc

SEQ ID NO: 292793 - DNA, 20 bp, Artificial Sequence
  Description of Artificial Sequence: Synthetic oligonucleotide
  Target: LAMA2; (-) strand; PAM type: YTN; PAM sequence: CTT
ctgagaatcaggcctgactc

SEQ ID NO: 292794 - DNA, 20 bp, Artificial Sequence
  Description of Artificial Sequence: Synthetic oligonucleotide
  Target: LAMA2; (-) strand; PAM type: YTN; PAM sequence: CTA
gcttctgagaatcaggcctg

SEQ ID NO: 292795 - DNA, 20 bp, Artificial Sequence
  Description of Artificial Sequence: Synthetic oligonucleotide
  Target: LAMA2; (-) strand; PAM type: YTN; PAM sequence: TTC
acaagtggacagctagcttc

SEQ ID NO: 292796 - DNA, 20 bp, Artificial Sequence
  Description of Artificial Sequence: Synthetic oligonucleotide
  Target: LAMA2; (-) strand; PAM type: YTN; PAM sequence: TTA
tattcacaagtggacagcta

SEQ ID NO: 292797 - DNA, 20 bp, Artificial Sequence
  Description of Artificial Sequence: Synthetic oligonucleotide
  Target: LAMA2; (-) strand; PAM type: YTN; PAM sequence: CTT
atattcacaagtggacagct

SEQ ID NO: 292798 - DNA, 20 bp, Artificial Sequence
  Description of Artificial Sequence: Synthetic oligonucleotide
  Target: LAMA2; (-) strand; PAM type: YTN; PAM sequence: CTC
ccttatattcacaagtggac

SEQ ID NO: 292799 - DNA, 20 bp, Artificial Sequence
  Description of Artificial Sequence: Synthetic oligonucleotide
  Target: LAMA2; (-) strand; PAM type: YTN; PAM sequence: CTC
tcccttatattcacaagtgg

SEQ ID NO: 292800 - DNA, 20 bp, Artificial Sequence
  Description of Artificial Sequence: Synthetic oligonucleotide
  Target: LAMA2; (-) strand; PAM type: YTN; PAM sequence: TTA
taaaacccatcaggagacaa

SEQ ID NO: 292801 - DNA, 20 bp, Artificial Sequence
  Description of Artificial Sequence: Synthetic oligonucleotide
  Target: LAMA2; (-) strand; PAM type: YTN; PAM sequence: CTT
ataaaacccatcaggagaca

SEQ ID NO: 292802 - DNA, 20 bp, Artificial Sequence
  Description of Artificial Sequence: Synthetic oligonucleotide
  Target: LAMA2; (-) strand; PAM type: YTN; PAM sequence: CTA
acttataaaacccatcagga

SEQ ID NO: 292803 - DNA, 20 bp, Artificial Sequence
  Description of Artificial Sequence: Synthetic oligonucleotide
  Target: LAMA2; (-) strand; PAM type: YTN; PAM sequence: CTC
taacttataaaacccatcag

SEQ ID NO: 292804 - DNA, 20 bp, Artificial Sequence
  Description of Artificial Sequence: Synthetic oligonucleotide
  Target: LAMA2; (-) strand; PAM type: YTN; PAM sequence: TTG
gtcctctaacttataaaacc

SEQ ID NO: 292805 - DNA, 20 bp, Artificial Sequence
  Description of Artificial Sequence: Synthetic oligonucleotide
  Target: LAMA2; (-) strand; PAM type: YTN; PAM sequence: TTG
cgttggtcctctaacttata

SEQ ID NO: 292806 - DNA, 20 bp, Artificial Sequence
  Description of Artificial Sequence: Synthetic oligonucleotide
  Target: LAMA2; (-) strand; PAM type: YTN; PAM sequence: CTT
gcgttggtcctctaacttat

SEQ ID NO: 292807 - DNA, 20 bp, Artificial Sequence
  Description of Artificial Sequence: Synthetic oligonucleotide
  Target: LAMA2; (-) strand; PAM type: YTN; PAM sequence: CTG
tgcttgcgttggtcctctaa

SEQ ID NO: 292808 - DNA, 20 bp, Artificial Sequence
  Description of Artificial Sequence: Synthetic oligonucleotide
  Target: LAMA2; (-) strand; PAM type: YTN; PAM sequence: CTG
aaagtaacagctgtgcttgc

SEQ ID NO: 292809 - DNA, 20 bp, Artificial Sequence
  Description of Artificial Sequence: Synthetic oligonucleotide
  Target: LAMA2; (-) strand; PAM type: YTN; PAM sequence: TTG
tgatgctgaaagtaacagct

SEQ ID NO: 292810 - DNA, 20 bp, Artificial Sequence
  Description of Artificial Sequence: Synthetic oligonucleotide
  Target: LAMA2; (-) strand; PAM type: YTN; PAM sequence: TTT
gtgatgctgaaagtaacagc

SEQ ID NO: 292811 - DNA, 20 bp, Artificial Sequence
  Description of Artificial Sequence: Synthetic oligonucleotide
  Target: LAMA2; (-) strand; PAM type: YTN; PAM sequence: CTG
caaagcagatttgtgatgct

SEQ ID NO: 292812 - DNA, 20 bp, Artificial Sequence
  Description of Artificial Sequence: Synthetic oligonucleotide
  Target: LAMA2; (-) strand; PAM type: YTN; PAM sequence: CTC
tgcaaagcagatttgtgatg

SEQ ID NO: 292813 - DNA, 20 bp, Artificial Sequence
  Description of Artificial Sequence: Synthetic oligonucleotide
  Target: LAMA2; (-) strand; PAM type: YTN; PAM sequence: TTC
tctgcaaagcagatttgtga

SEQ ID NO: 292814 - DNA, 20 bp, Artificial Sequence
  Description of Artificial Sequence: Synthetic oligonucleotide
  Target: LAMA2; (-) strand; PAM type: YTN; PAM sequence: TTA
atatagcagttctctgcaaa

SEQ ID NO: 292815 - DNA, 20 bp, Artificial Sequence
  Description of Artificial Sequence: Synthetic oligonucleotide
  Target: LAMA2; (-) strand; PAM type: YTN; PAM sequence: CTG
gaaagtggatatattaatat

SEQ ID NO: 292816 - DNA, 20 bp, Artificial Sequence
  Description of Artificial Sequence: Synthetic oligonucleotide
  Target: LAMA2; (-) strand; PAM type: YTN; PAM sequence: TTG
tgagatgatctggaaagtgg

SEQ ID NO: 292817 - DNA, 20 bp, Artificial Sequence
  Description of Artificial Sequence: Synthetic oligonucleotide
  Target: LAMA2; (-) strand; PAM type: YTN; PAM sequence: CTT
gtgagatgatctggaaagtg

SEQ ID NO: 292818 - DNA, 20 bp, Artificial Sequence
  Description of Artificial Sequence: Synthetic oligonucleotide
  Target: LAMA2; (-) strand; PAM type: YTN; PAM sequence: TTG
cttgtgagatgatctggaaa

SEQ ID NO: 292819 - DNA, 20 bp, Artificial Sequence
  Description of Artificial Sequence: Synthetic oligonucleotide
  Target: LAMA2; (-) strand; PAM type: YTN; PAM sequence: TTT
gcttgtgagatgatctggaa

SEQ ID NO: 292820 - DNA, 20 bp, Artificial Sequence
  Description of Artificial Sequence: Synthetic oligonucleotide
  Target: LAMA2; (-) strand; PAM type: YTN; PAM sequence: TTT
tgcttgtgagatgatctgga

SEQ ID NO: 292821 - DNA, 20 bp, Artificial Sequence
  Description of Artificial Sequence: Synthetic oligonucleotide
  Target: LAMA2; (-) strand; PAM type: YTN; PAM sequence: TTT
ttgcttgtgagatgatctgg

SEQ ID NO: 292822 - DNA, 20 bp, Artificial Sequence
  Description of Artificial Sequence: Synthetic oligonucleotide
  Target: LAMA2; (-) strand; PAM type: YTN; PAM sequence: TTA
ccatttttgcttgtgagatg

SEQ ID NO: 292823 - DNA, 20 bp, Artificial Sequence
  Description of Artificial Sequence: Synthetic oligonucleotide
  Target: LAMA2; (-) strand; PAM type: YTN; PAM sequence: TTT
accatttttgcttgtgagat

SEQ ID NO: 292824 - DNA, 20 bp, Artificial Sequence
  Description of Artificial Sequence: Synthetic oligonucleotide
  Target: LAMA2; (-) strand; PAM type: YTN; PAM sequence: CTA
atcatttaccatttttgctt

SEQ ID NO: 292825 - DNA, 20 bp, Artificial Sequence
  Description of Artificial Sequence: Synthetic oligonucleotide
  Target: LAMA2; (-) strand; PAM type: YTN; PAM sequence: TTC
taatcatttaccatttttgc

SEQ ID NO: 292826 - DNA, 20 bp, Artificial Sequence
  Description of Artificial Sequence: Synthetic oligonucleotide
  Target: LAMA2; (-) strand; PAM type: YTN; PAM sequence: TTT
ctaatcatttaccatttttg

SEQ ID NO: 292827 - DNA, 20 bp, Artificial Sequence
  Description of Artificial Sequence: Synthetic oligonucleotide
  Target: LAMA2; (-) strand; PAM type: YTN; PAM sequence: CTT
tctaatcatttaccattttt

SEQ ID NO: 292828 - DNA, 20 bp, Artificial Sequence
  Description of Artificial Sequence: Synthetic oligonucleotide
  Target: LAMA2; (-) strand; PAM type: YTN; PAM sequence: CTG
gaaatatctttctaatcatt

SEQ ID NO: 292829 - DNA, 20 bp, Artificial Sequence
  Description of Artificial Sequence: Synthetic oligonucleotide
  Target: LAMA2; (-) strand; PAM type: YTN; PAM sequence: TTG
aaaacagctggaaatatctt

SEQ ID NO: 292830 - DNA, 20 bp, Artificial Sequence
  Description of Artificial Sequence: Synthetic oligonucleotide
  Target: LAMA2; (-) strand; PAM type: YTN; PAM sequence: TTT
gaaaacagctggaaatatct

SEQ ID NO: 292831 - DNA, 20 bp, Artificial Sequence
  Description of Artificial Sequence: Synthetic oligonucleotide
  Target: LAMA2; (-) strand; PAM type: YTN; PAM sequence: TTT
tgaaaacagctggaaatatc

SEQ ID NO: 292832 - DNA, 20 bp, Artificial Sequence
  Description of Artificial Sequence: Synthetic oligonucleotide
  Target: LAMA2; (-) strand; PAM type: YTN; PAM sequence: CTC
aaacggttttgaaaacagct

SEQ ID NO: 292833 - DNA, 20 bp, Artificial Sequence
  Description of Artificial Sequence: Synthetic oligonucleotide
  Target: LAMA2; (-) strand; PAM type: YTN; PAM sequence: TTC
tcaaacggttttgaaaacag

SEQ ID NO: 292834 - DNA, 20 bp, Artificial Sequence
  Description of Artificial Sequence: Synthetic oligonucleotide
  Target: LAMA2; (-) strand; PAM type: YTN; PAM sequence: TTT
ctcaaacggttttgaaaaca

SEQ ID NO: 292835 - DNA, 20 bp, Artificial Sequence
  Description of Artificial Sequence: Synthetic oligonucleotide
  Target: LAMA2; (-) strand; PAM type: YTN; PAM sequence: TTT
tctcaaacggttttgaaaac

SEQ ID NO: 292836 - DNA, 20 bp, Artificial Sequence
  Description of Artificial Sequence: Synthetic oligonucleotide
  Target: LAMA2; (-) strand; PAM type: YTN; PAM sequence: TTA
ttttctcaaacggttttgaa

SEQ ID NO: 292837 - DNA, 20 bp, Artificial Sequence
  Description of Artificial Sequence: Synthetic oligonucleotide
  Target: LAMA2; (-) strand; PAM type: YTN; PAM sequence: TTT
attttctcaaacggttttga

SEQ ID NO: 292838 - DNA, 20 bp, Artificial Sequence
  Description of Artificial Sequence: Synthetic oligonucleotide
  Target: LAMA2; (-) strand; PAM type: YTN; PAM sequence: CTT
tattttctcaaacggttttg

SEQ ID NO: 292839 - DNA, 20 bp, Artificial Sequence
  Description of Artificial Sequence: Synthetic oligonucleotide
  Target: LAMA2; (-) strand; PAM type: YTN; PAM sequence: TTA
agactttattttctcaaacg

SEQ ID NO: 292840 - DNA, 20 bp, Artificial Sequence
  Description of Artificial Sequence: Synthetic oligonucleotide
  Target: LAMA2; (-) strand; PAM type: YTN; PAM sequence: CTG
agaaattaagactttatttt

SEQ ID NO: 292841 - DNA, 20 bp, Artificial Sequence
  Description of Artificial Sequence: Synthetic oligonucleotide
  Target: LAMA2; (-) strand; PAM type: YTN; PAM sequence: TTA
cctgagaaattaagacttta

SEQ ID NO: 292842 - DNA, 20 bp, Artificial Sequence
  Description of Artificial Sequence: Synthetic oligonucleotide
  Target: LAMA2; (-) strand; PAM type: YTN; PAM sequence: CTT
acctgagaaattaagacttt

SEQ ID NO: 292843 - DNA, 20 bp, Artificial Sequence
  Description of Artificial Sequence: Synthetic oligonucleotide
  Target: LAMA2; (-) strand; PAM type: YTN; PAM sequence: CTG
agatcttacctgagaaatta

SEQ ID NO: 292844 - DNA, 20 bp, Artificial Sequence
  Description of Artificial Sequence: Synthetic oligonucleotide
  Target: LAMA2; (-) strand; PAM type: YTN; PAM sequence: CTC
tgagatcttacctgagaaat

SEQ ID NO: 292845 - DNA, 20 bp, Artificial Sequence
  Description of Artificial Sequence: Synthetic oligonucleotide
  Target: LAMA2; (-) strand; PAM type: YTN; PAM sequence: CTG
ctctgagatcttacctgaga

SEQ ID NO: 292846 - DNA, 20 bp, Artificial Sequence
  Description of Artificial Sequence: Synthetic oligonucleotide
  Target: LAMA2; (-) strand; PAM type: YTN; PAM sequence: TTC
gtctgctctgagatcttacc

SEQ ID NO: 292847 - DNA, 20 bp, Artificial Sequence
  Description of Artificial Sequence: Synthetic oligonucleotide
  Target: LAMA2; (-) strand; PAM type: YTN; PAM sequence: CTG
gcagaaccacaggttcgtct

SEQ ID NO: 292848 - DNA, 20 bp, Artificial Sequence
  Description of Artificial Sequence: Synthetic oligonucleotide
  Target: LAMA2; (-) strand; PAM type: YTN; PAM sequence: TTC
cctggcagaaccacaggttc

SEQ ID NO: 292849 - DNA, 20 bp, Artificial Sequence
  Description of Artificial Sequence: Synthetic oligonucleotide
  Target: LAMA2; (-) strand; PAM type: YTN; PAM sequence: TTA
gagattccctggcagaacca

SEQ ID NO: 292850 - DNA, 20 bp, Artificial Sequence
  Description of Artificial Sequence: Synthetic oligonucleotide
  Target: LAMA2; (-) strand; PAM type: YTN; PAM sequence: TTT
agagattccctggcagaacc

SEQ ID NO: 292851 - DNA, 20 bp, Artificial Sequence
  Description of Artificial Sequence: Synthetic oligonucleotide
  Target: LAMA2; (-) strand; PAM type: YTN; PAM sequence: CTT
tagagattccctggcagaac

SEQ ID NO: 292852 - DNA, 20 bp, Artificial Sequence
  Description of Artificial Sequence: Synthetic oligonucleotide
  Target: LAMA2; (-) strand; PAM type: YTN; PAM sequence: TTA
gctttagagattccctggca

SEQ ID NO: 292853 - DNA, 20 bp, Artificial Sequence
  Description of Artificial Sequence: Synthetic oligonucleotide
  Target: LAMA2; (-) strand; PAM type: YTN; PAM sequence: CTT
agctttagagattccctggc

SEQ ID NO: 292854 - DNA, 20 bp, Artificial Sequence
  Description of Artificial Sequence: Synthetic oligonucleotide
  Target: LAMA2; (-) strand; PAM type: YTN; PAM sequence: TTA
tggcttagctttagagattc

SEQ ID NO: 292855 - DNA, 20 bp, Artificial Sequence
  Description of Artificial Sequence: Synthetic oligonucleotide
  Target: LAMA2; (-) strand; PAM type: YTN; PAM sequence: TTT
atggcttagctttagagatt

SEQ ID NO: 292856 - DNA, 20 bp, Artificial Sequence
  Description of Artificial Sequence: Synthetic oligonucleotide
  Target: LAMA2; (-) strand; PAM type: YTN; PAM sequence: CTC
atttatggcttagctttaga

SEQ ID NO: 292857 - DNA, 20 bp, Artificial Sequence
  Description of Artificial Sequence: Synthetic oligonucleotide
  Target: LAMA2; (-) strand; PAM type: YTN; PAM sequence: TTA
aacagaagtctcatttatgg

SEQ ID NO: 292858 - DNA, 20 bp, Artificial Sequence
  Description of Artificial Sequence: Synthetic oligonucleotide
  Target: LAMA2; (-) strand; PAM type: YTN; PAM sequence: TTG
aagattaaacagaagtctca

SEQ ID NO: 292859 - DNA, 20 bp, Artificial Sequence
  Description of Artificial Sequence: Synthetic oligonucleotide
  Target: LAMA2; (-) strand; PAM type: YTN; PAM sequence: TTA
ttgaagattaaacagaagtc

SEQ ID NO: 292860 - DNA, 20 bp, Artificial Sequence
  Description of Artificial Sequence: Synthetic oligonucleotide
  Target: LAMA2; (-) strand; PAM type: YTN; PAM sequence: CTG
caacagcaagtggttattga

SEQ ID NO: 292861 - DNA, 20 bp, Artificial Sequence
  Description of Artificial Sequence: Synthetic oligonucleotide
  Target: LAMA2; (-) strand; PAM type: YTN; PAM sequence: TTG
cataataggcctgcaacagc

SEQ ID NO: 292862 - DNA, 20 bp, Artificial Sequence
  Description of Artificial Sequence: Synthetic oligonucleotide
  Target: LAMA2; (-) strand; PAM type: YTN; PAM sequence: TTG
aggagtattgcataataggc

SEQ ID NO: 292863 - DNA, 20 bp, Artificial Sequence
  Description of Artificial Sequence: Synthetic oligonucleotide
  Target: LAMA2; (-) strand; PAM type: YTN; PAM sequence: CTG
ttgaggagtattgcataata

SEQ ID NO: 292864 - DNA, 20 bp, Artificial Sequence
  Description of Artificial Sequence: Synthetic oligonucleotide
  Target: LAMA2; (-) strand; PAM type: YTN; PAM sequence: TTC
cagacggcccctgttgagga

SEQ ID NO: 292865 - DNA, 20 bp, Artificial Sequence
  Description of Artificial Sequence: Synthetic oligonucleotide
  Target: LAMA2; (-) strand; PAM type: YTN; PAM sequence: CTT
ccagacggcccctgttgagg

SEQ ID NO: 292866 - DNA, 20 bp, Artificial Sequence
  Description of Artificial Sequence: Synthetic oligonucleotide
  Target: LAMA2; (-) strand; PAM type: YTN; PAM sequence: CTG
tggagagatgcacttccaga

SEQ ID NO: 292867 - DNA, 20 bp, Artificial Sequence
  Description of Artificial Sequence: Synthetic oligonucleotide
  Target: LAMA2; (-) strand; PAM type: YTN; PAM sequence: TTC
gtgcccctgtggagagatgc

SEQ ID NO: 292868 - DNA, 20 bp, Artificial Sequence
  Description of Artificial Sequence: Synthetic oligonucleotide
  Target: LAMA2; (-) strand; PAM type: YTN; PAM sequence: TTG
ttcgtgcccctgtggagaga

SEQ ID NO: 292869 - DNA, 20 bp, Artificial Sequence
  Description of Artificial Sequence: Synthetic oligonucleotide
  Target: LAMA2; (-) strand; PAM type: YTN; PAM sequence: CTC
attgttcgtgcccctgtgga

SEQ ID NO: 292870 - DNA, 20 bp, Artificial Sequence
  Description of Artificial Sequence: Synthetic oligonucleotide
  Target: LAMA2; (-) strand; PAM type: YTN; PAM sequence: TTC
ctcattgttcgtgcccctgt

SEQ ID NO: 292871 - DNA, 20 bp, Artificial Sequence
  Description of Artificial Sequence: Synthetic oligonucleotide
  Target: LAMA2; (-) strand; PAM type: YTN; PAM sequence: TTT
cctcattgttcgtgcccctg

SEQ ID NO: 292872 - DNA, 20 bp, Artificial Sequence
  Description of Artificial Sequence: Synthetic oligonucleotide
  Target: LAMA2; (-) strand; PAM type: YTN; PAM sequence: TTT
tcctcattgttcgtgcccct

SEQ ID NO: 292873 - DNA, 20 bp, Artificial Sequence
  Description of Artificial Sequence: Synthetic oligonucleotide
  Target: LAMA2; (-) strand; PAM type: YTN; PAM sequence: CTG
atcacaattttcctcattgt

SEQ ID NO: 292874 - DNA, 20 bp, Artificial Sequence
  Description of Artificial Sequence: Synthetic oligonucleotide
  Target: LAMA2; (-) strand; PAM type: YTN; PAM sequence: CTG
gtctgatcacaattttcctc

SEQ ID NO: 292875 - DNA, 20 bp, Artificial Sequence
  Description of Artificial Sequence: Synthetic oligonucleotide
  Target: LAMA2; (-) strand; PAM type: YTN; PAM sequence: CTC
tggtctgatcacaattttcc

SEQ ID NO: 292876 - DNA, 20 bp, Artificial Sequence
  Description of Artificial Sequence: Synthetic oligonucleotide
  Target: LAMA2; (-) strand; PAM type: YTN; PAM sequence: TTC
ggctctggtctgatcacaat

SEQ ID NO: 292877 - DNA, 20 bp, Artificial Sequence
  Description of Artificial Sequence: Synthetic oligonucleotide
  Target: LAMA2; (-) strand; PAM type: YTN; PAM sequence: TTC
catcatgaaacagattcggc

SEQ ID NO: 292878 - DNA, 20 bp, Artificial Sequence
  Description of Artificial Sequence: Synthetic oligonucleotide
  Target: LAMA2; (-) strand; PAM type: YTN; PAM sequence: CTT
ccatcatgaaacagattcgg

SEQ ID NO: 292879 - DNA, 20 bp, Artificial Sequence
  Description of Artificial Sequence: Synthetic oligonucleotide
  Target: LAMA2; (-) strand; PAM type: YTN; PAM sequence: CTC
ttccatcatgaaacagattc

SEQ ID NO: 292880 - DNA, 20 bp, Artificial Sequence
  Description of Artificial Sequence: Synthetic oligonucleotide
  Target: LAMA2; (-) strand; PAM type: YTN; PAM sequence: TTC
tcttccatcatgaaacagat

SEQ ID NO: 292881 - DNA, 20 bp, Artificial Sequence
  Description of Artificial Sequence: Synthetic oligonucleotide
  Target: LAMA2; (-) strand; PAM type: YTN; PAM sequence: CTA
catgaacggaatgttctctt

SEQ ID NO: 292882 - DNA, 20 bp, Artificial Sequence
  Description of Artificial Sequence: Synthetic oligonucleotide
  Target: LAMA2; (-) strand; PAM type: YTN; PAM sequence: CTC
tacatgaacggaatgttctc

SEQ ID NO: 292883 - DNA, 20 bp, Artificial Sequence
  Description of Artificial Sequence: Synthetic oligonucleotide
  Target: LAMA2; (-) strand; PAM type: YTN; PAM sequence: TTC
gctctacatgaacggaatgt

SEQ ID NO: 292884 - DNA, 20 bp, Artificial Sequence
  Description of Artificial Sequence: Synthetic oligonucleotide
  Target: LAMA2; (-) strand; PAM type: YTN; PAM sequence: CTA
gttcgctctacatgaacgga

SEQ ID NO: 292885 - DNA, 20 bp, Artificial Sequence
  Description of Artificial Sequence: Synthetic oligonucleotide
  Target: LAMA2; (-) strand; PAM type: YTN; PAM sequence: CTC
tagttcgctctacatgaacg

SEQ ID NO: 292886 - DNA, 20 bp, Artificial Sequence
  Description of Artificial Sequence: Synthetic oligonucleotide
  Target: LAMA2; (-) strand; PAM type: YTN; PAM sequence: TTA
ccctctagttcgctctacat

SEQ ID NO: 292887 - DNA, 20 bp, Artificial Sequence
  Description of Artificial Sequence: Synthetic oligonucleotide
  Target: LAMA2; (-) strand; PAM type: YTN; PAM sequence: TTG
ttaccctctagttcgctcta

SEQ ID NO: 292888 - DNA, 20 bp, Artificial Sequence
  Description of Artificial Sequence: Synthetic oligonucleotide
  Target: LAMA2; (-) strand; PAM type: YTN; PAM sequence: CTA
ttgttaccctctagttcgct

SEQ ID NO: 292889 - DNA, 20 bp, Artificial Sequence
  Description of Artificial Sequence: Synthetic oligonucleotide
  Target: LAMA2; (-) strand; PAM type: YTN; PAM sequence: TTA
gtgctattgttaccctctag

SEQ ID NO: 292890 - DNA, 20 bp, Artificial Sequence
  Description of Artificial Sequence: Synthetic oligonucleotide
  Target: LAMA2; (-) strand; PAM type: YTN; PAM sequence: TTT
agtgctattgttaccctcta

SEQ ID NO: 292891 - DNA, 20 bp, Artificial Sequence
  Description of Artificial Sequence: Synthetic oligonucleotide
  Target: LAMA2; (-) strand; PAM type: YTN; PAM sequence: TTT
tagtgctattgttaccctct

SEQ ID NO: 292892 - DNA, 20 bp, Artificial Sequence
  Description of Artificial Sequence: Synthetic oligonucleotide
  Target: LAMA2; (-) strand; PAM type: YTN; PAM sequence: TTA
caataataaatattttagtg

SEQ ID NO: 292893 - DNA, 20 bp, Artificial Sequence
  Description of Artificial Sequence: Synthetic oligonucleotide
  Target: LAMA2; (-) strand; PAM type: YTN; PAM sequence: CTG
agttacaataataaatattt

SEQ ID NO: 292894 - DNA, 20 bp, Artificial Sequence
  Description of Artificial Sequence: Synthetic oligonucleotide
  Target: LAMA2; (-) strand; PAM type: YTN; PAM sequence: TTC
acctgagttacaataataaa

SEQ ID NO: 292895 - DNA, 20 bp, Artificial Sequence
  Description of Artificial Sequence: Synthetic oligonucleotide
  Target: LAMA2; (-) strand; PAM type: YTN; PAM sequence: CTA
gcaaaggaagttcacctgag

SEQ ID NO: 292896 - DNA, 20 bp, Artificial Sequence
  Description of Artificial Sequence: Synthetic oligonucleotide
  Target: LAMA2; (-) strand; PAM type: YTN; PAM sequence: CTG
atagataccgatgctagcaa

SEQ ID NO: 292897 - DNA, 20 bp, Artificial Sequence
  Description of Artificial Sequence: Synthetic oligonucleotide
  Target: LAMA2; (-) strand; PAM type: YTN; PAM sequence: TTC
aggcagatactgatagatac

SEQ ID NO: 292898 - DNA, 20 bp, Artificial Sequence
  Description of Artificial Sequence: Synthetic oligonucleotide
  Target: LAMA2; (-) strand; PAM type: YTN; PAM sequence: TTG
caatgcatagtaggtccaca

SEQ ID NO: 292899 - DNA, 20 bp, Artificial Sequence
  Description of Artificial Sequence: Synthetic oligonucleotide
  Target: LAMA2; (-) strand; PAM type: YTN; PAM sequence: TTT
gcaatgcatagtaggtccac

SEQ ID NO: 292900 - DNA, 20 bp, Artificial Sequence
  Description of Artificial Sequence: Synthetic oligonucleotide
  Target: LAMA2; (-) strand; PAM type: YTN; PAM sequence: TTT
tgcaatgcatagtaggtcca

SEQ ID NO: 292901 - DNA, 20 bp, Artificial Sequence
  Description of Artificial Sequence: Synthetic oligonucleotide
  Target: LAMA2; (-) strand; PAM type: YTN; PAM sequence: CTT
ttgcaatgcatagtaggtcc

SEQ ID NO: 292902 - DNA, 20 bp, Artificial Sequence
  Description of Artificial Sequence: Synthetic oligonucleotide
  Target: LAMA2; (-) strand; PAM type: YTN; PAM sequence: CTA
cggtatccttttgcaatgca

SEQ ID NO: 292903 - DNA, 20 bp, Artificial Sequence
  Description of Artificial Sequence: Synthetic oligonucleotide
  Target: LAMA2; (-) strand; PAM type: YTN; PAM sequence: TTA
agctacggtatccttttgca

SEQ ID NO: 292904 - DNA, 20 bp, Artificial Sequence
  Description of Artificial Sequence: Synthetic oligonucleotide
  Target: LAMA2; (-) strand; PAM type: YTN; PAM sequence: TTC
ccgaagtatgaaaagtaaag

SEQ ID NO: 292905 - DNA, 20 bp, Artificial Sequence
  Description of Artificial Sequence: Synthetic oligonucleotide
  Target: LAMA2; (-) strand; PAM type: YTN; PAM sequence: CTG
aggcaaatgaggttcccgaa

SEQ ID NO: 292906 - DNA, 20 bp, Artificial Sequence
  Description of Artificial Sequence: Synthetic oligonucleotide
  Target: LAMA2; (-) strand; PAM type: YTN; PAM sequence: CTA
agggctgaggcaaatgaggt

SEQ ID NO: 292907 - DNA, 20 bp, Artificial Sequence
  Description of Artificial Sequence: Synthetic oligonucleotide
  Target: LAMA2; (-) strand; PAM type: YTN; PAM sequence: CTC
ctaagggctgaggcaaatga

SEQ ID NO: 292908 - DNA, 20 bp, Artificial Sequence
  Description of Artificial Sequence: Synthetic oligonucleotide
  Target: LAMA2; (-) strand; PAM type: YTN; PAM sequence: TTA
agggtagaactcctaagggc

SEQ ID NO: 292909 - DNA, 20 bp, Artificial Sequence
  Description of Artificial Sequence: Synthetic oligonucleotide
  Target: LAMA2; (-) strand; PAM type: YTN; PAM sequence: CTG
cacgaataaaaatgttaagg

SEQ ID NO: 292910 - DNA, 20 bp, Artificial Sequence
  Description of Artificial Sequence: Synthetic oligonucleotide
  Target: LAMA2; (-) strand; PAM type: YTN; PAM sequence: TTC
caaaggtggagataactgca

SEQ ID NO: 292911 - DNA, 20 bp, Artificial Sequence
  Description of Artificial Sequence: Synthetic oligonucleotide
  Target: LAMA2; (-) strand; PAM type: YTN; PAM sequence: TTT
ccaaaggtggagataactgc

SEQ ID NO: 292912 - DNA, 20 bp, Artificial Sequence
  Description of Artificial Sequence: Synthetic oligonucleotide
  Target: LAMA2; (-) strand; PAM type: YTN; PAM sequence: TTT
tccaaaggtggagataactg

SEQ ID NO: 292913 - DNA, 20 bp, Artificial Sequence
  Description of Artificial Sequence: Synthetic oligonucleotide
  Target: LAMA2; (-) strand; PAM type: YTN; PAM sequence: TTT
ttccaaaggtggagataact

SEQ ID NO: 292914 - DNA, 20 bp, Artificial Sequence
  Description of Artificial Sequence: Synthetic oligonucleotide
  Target: LAMA2; (-) strand; PAM type: YTN; PAM sequence: TTG
gtttttccaaaggtggagat

SEQ ID NO: 292915 - DNA, 20 bp, Artificial Sequence
  Description of Artificial Sequence: Synthetic oligonucleotide
  Target: LAMA2; (-) strand; PAM type: YTN; PAM sequence: TTT
ggtttttccaaaggtggaga

SEQ ID NO: 292916 - DNA, 20 bp, Artificial Sequence
  Description of Artificial Sequence: Synthetic oligonucleotide
  Target: LAMA2; (-) strand; PAM type: YTN; PAM sequence: TTC
agaaaatgcatttggttttt

SEQ ID NO: 292917 - DNA, 20 bp, Artificial Sequence
  Description of Artificial Sequence: Synthetic oligonucleotide
  Target: LAMA2; (-) strand; PAM type: YTN; PAM sequence: CTT
cagaaaatgcatttggtttt

SEQ ID NO: 292918 - DNA, 20 bp, Artificial Sequence
  Description of Artificial Sequence: Synthetic oligonucleotide
  Target: LAMA2; (-) strand; PAM type: YTN; PAM sequence: TTA
tagcttcagaaaatgcattt

SEQ ID NO: 292919 - DNA, 20 bp, Artificial Sequence
  Description of Artificial Sequence: Synthetic oligonucleotide
  Target: LAMA2; (-) strand; PAM type: YTN; PAM sequence: TTT
atagcttcagaaaatgcatt

SEQ ID NO: 292920 - DNA, 20 bp, Artificial Sequence
  Description of Artificial Sequence: Synthetic oligonucleotide
  Target: LAMA2; (-) strand; PAM type: YTN; PAM sequence: TTA
tttatagcttcagaaaatgc

SEQ ID NO: 292921 - DNA, 20 bp, Artificial Sequence
  Description of Artificial Sequence: Synthetic oligonucleotide
  Target: LAMA2; (-) strand; PAM type: YTN; PAM sequence: CTT
atttatagcttcagaaaatg

SEQ ID NO: 292922 - DNA, 20 bp, Artificial Sequence
  Description of Artificial Sequence: Synthetic oligonucleotide
  Target: LAMA2; (-) strand; PAM type: YTN; PAM sequence: TTC
ttatttatagcttcagaaaa

SEQ ID NO: 292923 - DNA, 20 bp, Artificial Sequence
  Description of Artificial Sequence: Synthetic oligonucleotide
  Target: LAMA2; (-) strand; PAM type: YTN; PAM sequence: TTT
cttatttatagcttcagaaa

SEQ ID NO: 292924 - DNA, 20 bp, Artificial Sequence
  Description of Artificial Sequence: Synthetic oligonucleotide
  Target: LAMA2; (-) strand; PAM type: YTN; PAM sequence: TTT
tcttatttatagcttcagaa

SEQ ID NO: 292925 - DNA, 20 bp, Artificial Sequence
  Description of Artificial Sequence: Synthetic oligonucleotide
  Target: LAMA2; (-) strand; PAM type: YTN; PAM sequence: TTT
ttcttatttatagcttcaga

SEQ ID NO: 292926 - DNA, 20 bp, Artificial Sequence
  Description of Artificial Sequence: Synthetic oligonucleotide
  Target: LAMA2; (-) strand; PAM type: YTN; PAM sequence: TTA
agaggggcagagggagggat

SEQ ID NO: 292927 - DNA, 20 bp, Artificial Sequence
  Description of Artificial Sequence: Synthetic oligonucleotide
  Target: LAMA2; (-) strand; PAM type: YTN; PAM sequence: TTT
aagaggggcagagggaggga

SEQ ID NO: 292928 - DNA, 20 bp, Artificial Sequence
  Description of Artificial Sequence: Synthetic oligonucleotide
  Target: LAMA2; (-) strand; PAM type: YTN; PAM sequence: TTG
aggaggtaatatttaagagg

SEQ ID NO: 292929 - DNA, 20 bp, Artificial Sequence
  Description of Artificial Sequence: Synthetic oligonucleotide
  Target: LAMA2; (-) strand; PAM type: YTN; PAM sequence: TTT
gaggaggtaatatttaagag

SEQ ID NO: 292930 - DNA, 20 bp, Artificial Sequence
  Description of Artificial Sequence: Synthetic oligonucleotide
  Target: LAMA2; (-) strand; PAM type: YTN; PAM sequence: TTA
tttgaggaggtaatatttaa

SEQ ID NO: 292931 - DNA, 20 bp, Artificial Sequence
  Description of Artificial Sequence: Synthetic oligonucleotide
  Target: LAMA2; (-) strand; PAM type: YTN; PAM sequence: CTT
atttgaggaggtaatattta

SEQ ID NO: 292932 - DNA, 20 bp, Artificial Sequence
  Description of Artificial Sequence: Synthetic oligonucleotide
  Target: LAMA2; (-) strand; PAM type: YTN; PAM sequence: CTG
tgtgcataccttatttgagg

SEQ ID NO: 292933 - DNA, 20 bp, Artificial Sequence
  Description of Artificial Sequence: Synthetic oligonucleotide
  Target: LAMA2; (-) strand; PAM type: YTN; PAM sequence: TTG
ctgtgtgcataccttatttg

SEQ ID NO: 292934 - DNA, 20 bp, Artificial Sequence
  Description of Artificial Sequence: Synthetic oligonucleotide
  Target: LAMA2; (-) strand; PAM type: YTN; PAM sequence: TTT
gctgtgtgcataccttattt

SEQ ID NO: 292935 - DNA, 20 bp, Artificial Sequence
  Description of Artificial Sequence: Synthetic oligonucleotide
  Target: LAMA2; (-) strand; PAM type: YTN; PAM sequence: TTT
tgctgtgtgcataccttatt

SEQ ID NO: 292936 - DNA, 20 bp, Artificial Sequence
  Description of Artificial Sequence: Synthetic oligonucleotide
  Target: LAMA2; (-) strand; PAM type: YTN; PAM sequence: TTG
tgagttttgctgtgtgcata

SEQ ID NO: 292937 - DNA, 20 bp, Artificial Sequence
  Description of Artificial Sequence: Synthetic oligonucleotide
  Target: LAMA2; (-) strand; PAM type: YTN; PAM sequence: TTT
gtgagttttgctgtgtgcat

SEQ ID NO: 292938 - DNA, 20 bp, Artificial Sequence
  Description of Artificial Sequence: Synthetic oligonucleotide
  Target: LAMA2; (-) strand; PAM type: YTN; PAM sequence: CTG
atttgtgagttttgctgtgt

SEQ ID NO: 292939 - DNA, 20 bp, Artificial Sequence
  Description of Artificial Sequence: Synthetic oligonucleotide
  Target: LAMA2; (-) strand; PAM type: YTN; PAM sequence: CTC
cagtggagctgatttgtgag

SEQ ID NO: 292940 - DNA, 20 bp, Artificial Sequence
  Description of Artificial Sequence: Synthetic oligonucleotide
  Target: LAMA2; (-) strand; PAM type: YTN; PAM sequence: CTG
gctccagtggagctgatttg

SEQ ID NO: 292941 - DNA, 20 bp, Artificial Sequence
  Description of Artificial Sequence: Synthetic oligonucleotide
  Target: LAMA2; (-) strand; PAM type: YTN; PAM sequence: CTG
ctggctccagtggagctgat

SEQ ID NO: 292942 - DNA, 20 bp, Artificial Sequence
  Description of Artificial Sequence: Synthetic oligonucleotide
  Target: LAMA2; (-) strand; PAM type: YTN; PAM sequence: CTG
aatgagatagaaaccgccaa

SEQ ID NO: 292943 - DNA, 20 bp, Artificial Sequence
  Description of Artificial Sequence: Synthetic oligonucleotide
  Target: LAMA2; (-) strand; PAM type: YTN; PAM sequence: TTG
gaacctgaatgagatagaaa

SEQ ID NO: 292944 - DNA, 20 bp, Artificial Sequence
  Description of Artificial Sequence: Synthetic oligonucleotide
  Target: LAMA2; (-) strand; PAM type: YTN; PAM sequence: TTT
ggaacctgaatgagatagaa

SEQ ID NO: 292945 - DNA, 20 bp, Artificial Sequence
  Description of Artificial Sequence: Synthetic oligonucleotide
  Target: LAMA2; (-) strand; PAM type: YTN; PAM sequence: CTT
tggaacctgaatgagataga

SEQ ID NO: 292946 - DNA, 20 bp, Artificial Sequence
  Description of Artificial Sequence: Synthetic oligonucleotide
  Target: LAMA2; (-) strand; PAM type: YTN; PAM sequence: CTG
ctttggaacctgaatgagat

SEQ ID NO: 292947 - DNA, 20 bp, Artificial Sequence
  Description of Artificial Sequence: Synthetic oligonucleotide
  Target: LAMA2; (-) strand; PAM type: YTN; PAM sequence: CTG
ccataactgctttggaacct

SEQ ID NO: 292948 - DNA, 20 bp, Artificial Sequence
  Description of Artificial Sequence: Synthetic oligonucleotide
  Target: LAMA2; (-) strand; PAM type: YTN; PAM sequence: CTA
agcagctgccataactgctt

SEQ ID NO: 292949 - DNA, 20 bp, Artificial Sequence
  Description of Artificial Sequence: Synthetic oligonucleotide
  Target: LAMA2; (-) strand; PAM type: YTN; PAM sequence: CTG
tgacagctaagcagctgcca

SEQ ID NO: 292950 - DNA, 20 bp, Artificial Sequence
  Description of Artificial Sequence: Synthetic oligonucleotide
  Target: LAMA2; (-) strand; PAM type: YTN; PAM sequence: CTG
tatctgtgacagctaagcag

SEQ ID NO: 292951 - DNA, 20 bp, Artificial Sequence
  Description of Artificial Sequence: Synthetic oligonucleotide
  Target: LAMA2; (-) strand; PAM type: YTN; PAM sequence: CTC
tgtatctgtgacagctaagc

SEQ ID NO: 292952 - DNA, 20 bp, Artificial Sequence
  Description of Artificial Sequence: Synthetic oligonucleotide
  Target: LAMA2; (-) strand; PAM type: YTN; PAM sequence: CTG
ccacactctgtatctgtgac

SEQ ID NO: 292953 - DNA, 20 bp, Artificial Sequence
  Description of Artificial Sequence: Synthetic oligonucleotide
  Target: LAMA2; (-) strand; PAM type: YTN; PAM sequence: CTG
ctgccacactctgtatctgt

SEQ ID NO: 292954 - DNA, 20 bp, Artificial Sequence
  Description of Artificial Sequence: Synthetic oligonucleotide
  Target: LAMA2; (-) strand; PAM type: YTN; PAM sequence: CTG
cagctgctgccacactctgt

SEQ ID NO: 292955 - DNA, 20 bp, Artificial Sequence
  Description of Artificial Sequence: Synthetic oligonucleotide
  Target: LAMA2; (-) strand; PAM type: YTN; PAM sequence: CTC
aataggtcctgcagctgctg

SEQ ID NO: 292956 - DNA, 20 bp, Artificial Sequence
  Description of Artificial Sequence: Synthetic oligonucleotide
  Target: LAMA2; (-) strand; PAM type: YTN; PAM sequence: TTA
ataggctcaataggtcctgc

SEQ ID NO: 292957 - DNA, 20 bp, Artificial Sequence
  Description of Artificial Sequence: Synthetic oligonucleotide
  Target: LAMA2; (-) strand; PAM type: YTN; PAM sequence: CTT
aataggctcaataggtcctg

SEQ ID NO: 292958 - DNA, 20 bp, Artificial Sequence
  Description of Artificial Sequence: Synthetic oligonucleotide
  Target: LAMA2; (-) strand; PAM type: YTN; PAM sequence: TTG
ggaagggggacagggacaag

SEQ ID NO: 292959 - DNA, 20 bp, Artificial Sequence
  Description of Artificial Sequence: Synthetic oligonucleotide
  Target: LAMA2; (-) strand; PAM type: YTN; PAM sequence: CTT
gggaagggggacagggacaa

SEQ ID NO: 292960 - DNA, 20 bp, Artificial Sequence
  Description of Artificial Sequence: Synthetic oligonucleotide
  Target: LAMA2; (-) strand; PAM type: YTN; PAM sequence: CTG
caaaccttgggaagggggac

SEQ ID NO: 292961 - DNA, 20 bp, Artificial Sequence
  Description of Artificial Sequence: Synthetic oligonucleotide
  Target: LAMA2; (-) strand; PAM type: YTN; PAM sequence: CTG
cagggaccctgcaaaccttg

SEQ ID NO: 292962 - DNA, 20 bp, Artificial Sequence
  Description of Artificial Sequence: Synthetic oligonucleotide
  Target: LAMA2; (-) strand; PAM type: YTN; PAM sequence: CTC
tgcagggaccctgcaaacct

SEQ ID NO: 292963 - DNA, 20 bp, Artificial Sequence
  Description of Artificial Sequence: Synthetic oligonucleotide
  Target: LAMA2; (-) strand; PAM type: YTN; PAM sequence: CTC
agaaagccactctgcaggga

SEQ ID NO: 292964 - DNA, 20 bp, Artificial Sequence
  Description of Artificial Sequence: Synthetic oligonucleotide
  Target: LAMA2; (-) strand; PAM type: YTN; PAM sequence: TTC
cctcagaaagccactctgca

SEQ ID NO: 292965 - DNA, 20 bp, Artificial Sequence
  Description of Artificial Sequence: Synthetic oligonucleotide
  Target: LAMA2; (-) strand; PAM type: YTN; PAM sequence: CTG
ttccctcagaaagccactct

SEQ ID NO: 292966 - DNA, 20 bp, Artificial Sequence
  Description of Artificial Sequence: Synthetic oligonucleotide
  Target: LAMA2; (-) strand; PAM type: YTN; PAM sequence: TTC
tgttccctcagaaagccact

SEQ ID NO: 292967 - DNA, 20 bp, Artificial Sequence
  Description of Artificial Sequence: Synthetic oligonucleotide
  Target: LAMA2; (-) strand; PAM type: YTN; PAM sequence: TTG
attctgttccctcagaaagc

SEQ ID NO: 292968 - DNA, 20 bp, Artificial Sequence
  Description of Artificial Sequence: Synthetic oligonucleotide
  Target: LAMA2; (-) strand; PAM type: YTN; PAM sequence: CTT
gattctgttccctcagaaag

SEQ ID NO: 292969 - DNA, 20 bp, Artificial Sequence
  Description of Artificial Sequence: Synthetic oligonucleotide
  Target: LAMA2; (-) strand; PAM type: YTN; PAM sequence: CTC
ccttgattctgttccctcag

SEQ ID NO: 292970 - DNA, 20 bp, Artificial Sequence
  Description of Artificial Sequence: Synthetic oligonucleotide
  Target: LAMA2; (-) strand; PAM type: YTN; PAM sequence: CTC
ccctcccttgattctgttcc

SEQ ID NO: 292971 - DNA, 20 bp, Artificial Sequence
  Description of Artificial Sequence: Synthetic oligonucleotide
  Target: LAMA2; (-) strand; PAM type: YTN; PAM sequence: TTC
ctcccctcccttgattctgt

SEQ ID NO: 292972 - DNA, 20 bp, Artificial Sequence
  Description of Artificial Sequence: Synthetic oligonucleotide
  Target: LAMA2; (-) strand; PAM type: YTN; PAM sequence: TTT
cctcccctcccttgattctg

SEQ ID NO: 292973 - DNA, 20 bp, Artificial Sequence
  Description of Artificial Sequence: Synthetic oligonucleotide
  Target: LAMA2; (-) strand; PAM type: YTN; PAM sequence: TTT
tcctcccctcccttgattct

SEQ ID NO: 292974 - DNA, 20 bp, Artificial Sequence
  Description of Artificial Sequence: Synthetic oligonucleotide
  Target: LAMA2; (-) strand; PAM type: YTN; PAM sequence: CTC
agggcagcagtcattttcct

SEQ ID NO: 292975 - DNA, 20 bp, Artificial Sequence
  Description of Artificial Sequence: Synthetic oligonucleotide
  Target: LAMA2; (-) strand; PAM type: YTN; PAM sequence: TTG
taaaaaggtggccaggctca

SEQ ID NO: 292976 - DNA, 20 bp, Artificial Sequence
  Description of Artificial Sequence: Synthetic oligonucleotide
  Target: LAMA2; (-) strand; PAM type: YTN; PAM sequence: TTT
gtaaaaaggtggccaggctc

SEQ ID NO: 292977 - DNA, 20 bp, Artificial Sequence
  Description of Artificial Sequence: Synthetic oligonucleotide
  Target: LAMA2; (-) strand; PAM type: YTN; PAM sequence: CTG
gtagatttgtaaaaaggtgg

SEQ ID NO: 292978 - DNA, 20 bp, Artificial Sequence
  Description of Artificial Sequence: Synthetic oligonucleotide
  Target: LAMA2; (-) strand; PAM type: YTN; PAM sequence: CTC
tggtagatttgtaaaaaggt

SEQ ID NO: 292979 - DNA, 20 bp, Artificial Sequence
  Description of Artificial Sequence: Synthetic oligonucleotide
  Target: LAMA2; (-) strand; PAM type: YTN; PAM sequence: CTG
gggcaagcactctggtagat

SEQ ID NO: 292980 - DNA, 20 bp, Artificial Sequence
  Description of Artificial Sequence: Synthetic oligonucleotide
  Target: LAMA2; (-) strand; PAM type: YTN; PAM sequence: CTG
gcccagggctggggcaagca

SEQ ID NO: 292981 - DNA, 20 bp, Artificial Sequence
  Description of Artificial Sequence: Synthetic oligonucleotide
  Target: LAMA2; (-) strand; PAM type: YTN; PAM sequence: TTC
cctggcccagggctggggca

SEQ ID NO: 292982 - DNA, 20 bp, Artificial Sequence
  Description of Artificial Sequence: Synthetic oligonucleotide
  Target: LAMA2; (-) strand; PAM type: YTN; PAM sequence: TTG
tgcatgagtaaagccaattc

SEQ ID NO: 292983 - DNA, 20 bp, Artificial Sequence
  Description of Artificial Sequence: Synthetic oligonucleotide
  Target: LAMA2; (-) strand; PAM type: YTN; PAM sequence: TTT
gtgcatgagtaaagccaatt

SEQ ID NO: 292984 - DNA, 20 bp, Artificial Sequence
  Description of Artificial Sequence: Synthetic oligonucleotide
  Target: LAMA2; (-) strand; PAM type: YTN; PAM sequence: CTA
aagaaagtcatcagtttgtg

SEQ ID NO: 292985 - DNA, 20 bp, Artificial Sequence
  Description of Artificial Sequence: Synthetic oligonucleotide
  Target: LAMA2; (-) strand; PAM type: YTN; PAM sequence: TTC
taaagaaagtcatcagtttg

SEQ ID NO: 292986 - DNA, 20 bp, Artificial Sequence
  Description of Artificial Sequence: Synthetic oligonucleotide
  Target: LAMA2; (-) strand; PAM type: YTN; PAM sequence: TTG
cagcattctaaagaaagtca

SEQ ID NO: 292987 - DNA, 20 bp, Artificial Sequence
  Description of Artificial Sequence: Synthetic oligonucleotide
  Target: LAMA2; (-) strand; PAM type: YTN; PAM sequence: CTA
ataaagtaagtataaagtat

SEQ ID NO: 292988 - DNA, 20 bp, Artificial Sequence
  Description of Artificial Sequence: Synthetic oligonucleotide
  Target: LAMA2; (-) strand; PAM type: YTN; PAM sequence: TTC
ctaataaagtaagtataaag

SEQ ID NO: 292989 - DNA, 20 bp, Artificial Sequence
  Description of Artificial Sequence: Synthetic oligonucleotide
  Target: LAMA2; (-) strand; PAM type: YTN; PAM sequence: TTT
cctaataaagtaagtataaa

SEQ ID NO: 292990 - DNA, 20 bp, Artificial Sequence
  Description of Artificial Sequence: Synthetic oligonucleotide
  Target: LAMA2; (-) strand; PAM type: YTN; PAM sequence: CTT
tcctaataaagtaagtataa

SEQ ID NO: 292991 - DNA, 20 bp, Artificial Sequence
  Description of Artificial Sequence: Synthetic oligonucleotide
  Target: LAMA2; (-) strand; PAM type: YTN; PAM sequence: TTG
atgaaaaatacagatgactt

SEQ ID NO: 292992 - DNA, 20 bp, Artificial Sequence
  Description of Artificial Sequence: Synthetic oligonucleotide
  Target: LAMA2; (-) strand; PAM type: YTN; PAM sequence: TTT
gatgaaaaatacagatgact

SEQ ID NO: 292993 - DNA, 20 bp, Artificial Sequence
  Description of Artificial Sequence: Synthetic oligonucleotide
  Target: LAMA2; (-) strand; PAM type: YTN; PAM sequence: TTT
tgatgaaaaatacagatgac

SEQ ID NO: 292994 - DNA, 20 bp, Artificial Sequence
  Description of Artificial Sequence: Synthetic oligonucleotide
  Target: LAMA2; (-) strand; PAM type: YTN; PAM sequence: TTG
tcatacaatattttgatgaa

SEQ ID NO: 292995 - DNA, 20 bp, Artificial Sequence
  Description of Artificial Sequence: Synthetic oligonucleotide
  Target: LAMA2; (-) strand; PAM type: YTN; PAM sequence: CTG
agttgtcatacaatattttg

SEQ ID NO: 292996 - DNA, 20 bp, Artificial Sequence
  Description of Artificial Sequence: Synthetic oligonucleotide
  Target: LAMA2; (-) strand; PAM type: YTN; PAM sequence: CTC
tgagttgtcatacaatattt

SEQ ID NO: 292997 - DNA, 20 bp, Artificial Sequence
  Description of Artificial Sequence: Synthetic oligonucleotide
  Target: LAMA2; (-) strand; PAM type: YTN; PAM sequence: CTC
tctgagttgtcatacaatat

SEQ ID NO: 292998 - DNA, 20 bp, Artificial Sequence
  Description of Artificial Sequence: Synthetic oligonucleotide
  Target: LAMA2; (-) strand; PAM type: YTN; PAM sequence: TTA
tctctctgagttgtcataca

SEQ ID NO: 292999 - DNA, 20 bp, Artificial Sequence
  Description of Artificial Sequence: Synthetic oligonucleotide
  Target: LAMA2; (-) strand; PAM type: YTN; PAM sequence: CTA
attatctctctgagttgtca

SEQ ID NO: 293000 - DNA, 20 bp, Artificial Sequence
  Description of Artificial Sequence: Synthetic oligonucleotide
  Target: LAMA2; (-) strand; PAM type: YTN; PAM sequence: CTA
aactaattatctctctgagt

SEQ ID NO: 293001 - DNA, 20 bp, Artificial Sequence
  Description of Artificial Sequence: Synthetic oligonucleotide
  Target: LAMA2; (-) strand; PAM type: YTN; PAM sequence: TTC
taaactaattatctctctga

SEQ ID NO: 293002 - DNA, 20 bp, Artificial Sequence
  Description of Artificial Sequence: Synthetic oligonucleotide
  Target: LAMA2; (-) strand; PAM type: YTN; PAM sequence: CTT
ctaaactaattatctctctg

SEQ ID NO: 293003 - DNA, 20 bp, Artificial Sequence
  Description of Artificial Sequence: Synthetic oligonucleotide
  Target: LAMA2; (-) strand; PAM type: YTN; PAM sequence: TTG
tccttctaaactaattatct

SEQ ID NO: 293004 - DNA, 20 bp, Artificial Sequence
  Description of Artificial Sequence: Synthetic oligonucleotide
  Target: LAMA2; (-) strand; PAM type: YTN; PAM sequence: CTA
attgtccttctaaactaatt

SEQ ID NO: 293005 - DNA, 20 bp, Artificial Sequence
  Description of Artificial Sequence: Synthetic oligonucleotide
  Target: LAMA2; (-) strand; PAM type: YTN; PAM sequence: CTC
taattgtccttctaaactaa

SEQ ID NO: 293006 - DNA, 20 bp, Artificial Sequence
  Description of Artificial Sequence: Synthetic oligonucleotide
  Target: LAMA2; (-) strand; PAM type: YTN; PAM sequence: TTC
tctaattgtccttctaaact

SEQ ID NO: 293007 - DNA, 20 bp, Artificial Sequence
  Description of Artificial Sequence: Synthetic oligonucleotide
  Target: LAMA2; (-) strand; PAM type: YTN; PAM sequence: TTT
ctctaattgtccttctaaac

SEQ ID NO: 293008 - DNA, 20 bp, Artificial Sequence
  Description of Artificial Sequence: Synthetic oligonucleotide
  Target: LAMA2; (-) strand; PAM type: YTN; PAM sequence: TTT
tctctaattgtccttctaaa

SEQ ID NO: 293009 - DNA, 20 bp, Artificial Sequence
  Description of Artificial Sequence: Synthetic oligonucleotide
  Target: LAMA2; (-) strand; PAM type: YTN; PAM sequence: TTT
ttctctaattgtccttctaa

SEQ ID NO: 293010 - DNA, 20 bp, Artificial Sequence
  Description of Artificial Sequence: Synthetic oligonucleotide
  Target: LAMA2; (-) strand; PAM type: YTN; PAM sequence: TTT
tttctctaattgtccttcta

SEQ ID NO: 293011 - DNA, 20 bp, Artificial Sequence
  Description of Artificial Sequence: Synthetic oligonucleotide
  Target: LAMA2; (-) strand; PAM type: YTN; PAM sequence: CTT
ttttctctaattgtccttct

SEQ ID NO: 293012 - DNA, 20 bp, Artificial Sequence
  Description of Artificial Sequence: Synthetic oligonucleotide
  Target: LAMA2; (-) strand; PAM type: YTN; PAM sequence: TTC
ttttttctctaattgtcctt

SEQ ID NO: 293013 - DNA, 20 bp, Artificial Sequence
  Description of Artificial Sequence: Synthetic oligonucleotide
  Target: LAMA2; (-) strand; PAM type: YTN; PAM sequence: TTT
cttttttctctaattgtcct

SEQ ID NO: 293014 - DNA, 20 bp, Artificial Sequence
  Description of Artificial Sequence: Synthetic oligonucleotide
  Target: LAMA2; (-) strand; PAM type: YTN; PAM sequence: CTG
tttcttttttctctaattgt

SEQ ID NO: 293015 - DNA, 20 bp, Artificial Sequence
  Description of Artificial Sequence: Synthetic oligonucleotide
  Target: LAMA2; (-) strand; PAM type: YTN; PAM sequence: TTC
tgtttcttttttctctaatt

SEQ ID NO: 293016 - DNA, 20 bp, Artificial Sequence
  Description of Artificial Sequence: Synthetic oligonucleotide
  Target: LAMA2; (-) strand; PAM type: YTN; PAM sequence: CTT
ctgtttcttttttctctaat

SEQ ID NO: 293017 - DNA, 20 bp, Artificial Sequence
  Description of Artificial Sequence: Synthetic oligonucleotide
  Target: LAMA2; (-) strand; PAM type: YTN; PAM sequence: CTG
ggcttctgtttcttttttct

SEQ ID NO: 293018 - DNA, 20 bp, Artificial Sequence
  Description of Artificial Sequence: Synthetic oligonucleotide
  Target: LAMA2; (-) strand; PAM type: YTN; PAM sequence: CTC
tgggcttctgtttctttttt

SEQ ID NO: 293019 - DNA, 20 bp, Artificial Sequence
  Description of Artificial Sequence: Synthetic oligonucleotide
  Target: LAMA2; (-) strand; PAM type: YTN; PAM sequence: CTG
aagtctctgggcttctgttt

SEQ ID NO: 293020 - DNA, 20 bp, Artificial Sequence
  Description of Artificial Sequence: Synthetic oligonucleotide
  Target: LAMA2; (-) strand; PAM type: YTN; PAM sequence: CTG
aacccctgaagtctctgggc

SEQ ID NO: 293021 - DNA, 20 bp, Artificial Sequence
  Description of Artificial Sequence: Synthetic oligonucleotide
  Target: LAMA2; (-) strand; PAM type: YTN; PAM sequence: TTG
gaggtctgaacccctgaagt

SEQ ID NO: 293022 - DNA, 20 bp, Artificial Sequence
  Description of Artificial Sequence: Synthetic oligonucleotide
  Target: LAMA2; (-) strand; PAM type: YTN; PAM sequence: CTT
ggaggtctgaacccctgaag

SEQ ID NO: 293023 - DNA, 20 bp, Artificial Sequence
  Description of Artificial Sequence: Synthetic oligonucleotide
  Target: LAMA2; (-) strand; PAM type: YTN; PAM sequence: CTG
gcttggaggtctgaacccct

SEQ ID NO: 293024 - DNA, 20 bp, Artificial Sequence
  Description of Artificial Sequence: Synthetic oligonucleotide
  Target: LAMA2; (-) strand; PAM type: YTN; PAM sequence: TTG
ctggcttggaggtctgaacc

SEQ ID NO: 293025 - DNA, 20 bp, Artificial Sequence
  Description of Artificial Sequence: Synthetic oligonucleotide
  Target: LAMA2; (-) strand; PAM type: YTN; PAM sequence: CTG
ataaatggattgctggcttg

SEQ ID NO: 293026 - DNA, 20 bp, Artificial Sequence
  Description of Artificial Sequence: Synthetic oligonucleotide
  Target: LAMA2; (-) strand; PAM type: YTN; PAM sequence: TTC
agtctgataaatggattgct

SEQ ID NO: 293027 - DNA, 20 bp, Artificial Sequence
  Description of Artificial Sequence: Synthetic oligonucleotide
  Target: LAMA2; (-) strand; PAM type: YTN; PAM sequence: CTT
cagtctgataaatggattgc

SEQ ID NO: 293028 - DNA, 20 bp, Artificial Sequence
  Description of Artificial Sequence: Synthetic oligonucleotide
  Target: LAMA2; (-) strand; PAM type: YTN; PAM sequence: CTA
tgtcttcagtctgataaatg

SEQ ID NO: 293029 - DNA, 20 bp, Artificial Sequence
  Description of Artificial Sequence: Synthetic oligonucleotide
  Target: LAMA2; (-) strand; PAM type: YTN; PAM sequence: TTC
tatgtcttcagtctgataaa

SEQ ID NO: 293030 - DNA, 20 bp, Artificial Sequence
  Description of Artificial Sequence: Synthetic oligonucleotide
  Target: LAMA2; (-) strand; PAM type: YTN; PAM sequence: TTT
ctatgtcttcagtctgataa

SEQ ID NO: 293031 - DNA, 20 bp, Artificial Sequence
  Description of Artificial Sequence: Synthetic oligonucleotide
  Target: LAMA2; (-) strand; PAM type: YTN; PAM sequence: TTT
tctatgtcttcagtctgata

SEQ ID NO: 293032 - DNA, 20 bp, Artificial Sequence
  Description of Artificial Sequence: Synthetic oligonucleotide
  Target: LAMA2; (-) strand; PAM type: YTN; PAM sequence: CTT
ttctatgtcttcagtctgat

SEQ ID NO: 293033 - DNA, 20 bp, Artificial Sequence
  Description of Artificial Sequence: Synthetic oligonucleotide
  Target: LAMA2; (-) strand; PAM type: YTN; PAM sequence: TTC
ttttctatgtcttcagtctg

SEQ ID NO: 293034 - DNA, 20 bp, Artificial Sequence
  Description of Artificial Sequence: Synthetic oligonucleotide
  Target: LAMA2; (-) strand; PAM type: YTN; PAM sequence: TTC
cagttcttttctatgtcttc

SEQ ID NO: 293035 - DNA, 20 bp, Artificial Sequence
  Description of Artificial Sequence: Synthetic oligonucleotide
  Target: LAMA2; (-) strand; PAM type: YTN; PAM sequence: TTT
ccagttcttttctatgtctt

SEQ ID NO: 293036 - DNA, 20 bp, Artificial Sequence
  Description of Artificial Sequence: Synthetic oligonucleotide
  Target: LAMA2; (-) strand; PAM type: YTN; PAM sequence: TTG
gatttccagttcttttctat

SEQ ID NO: 293037 - DNA, 20 bp, Artificial Sequence
  Description of Artificial Sequence: Synthetic oligonucleotide
  Target: LAMA2; (-) strand; PAM type: YTN; PAM sequence: CTC
atcaaattggatttccagtt

SEQ ID NO: 293038 - DNA, 20 bp, Artificial Sequence
  Description of Artificial Sequence: Synthetic oligonucleotide
  Target: LAMA2; (-) strand; PAM type: YTN; PAM sequence: TTG
aggcctcatcaaattggatt

SEQ ID NO: 293039 - DNA, 20 bp, Artificial Sequence
  Description of Artificial Sequence: Synthetic oligonucleotide
  Target: LAMA2; (-) strand; PAM type: YTN; PAM sequence: TTT
gaggcctcatcaaattggat

SEQ ID NO: 293040 - DNA, 20 bp, Artificial Sequence
  Description of Artificial Sequence: Synthetic oligonucleotide
  Target: LAMA2; (-) strand; PAM type: YTN; PAM sequence: TTT
tgaggcctcatcaaattgga

SEQ ID NO: 293041 - DNA, 20 bp, Artificial Sequence
  Description of Artificial Sequence: Synthetic oligonucleotide
  Target: LAMA2; (-) strand; PAM type: YTN; PAM sequence: CTG
tgttttgaggcctcatcaaa

SEQ ID NO: 293042 - DNA, 20 bp, Artificial Sequence
  Description of Artificial Sequence: Synthetic oligonucleotide
  Target: LAMA2; (-) strand; PAM type: YTN; PAM sequence: CTC
tgtgttttgaggcctcatca

SEQ ID NO: 293043 - DNA, 20 bp, Artificial Sequence
  Description of Artificial Sequence: Synthetic oligonucleotide
  Target: LAMA2; (-) strand; PAM type: YTN; PAM sequence: TTA
aaagtatcctctgtgttttg

SEQ ID NO: 293044 - DNA, 20 bp, Artificial Sequence
  Description of Artificial Sequence: Synthetic oligonucleotide
  Target: LAMA2; (-) strand; PAM type: YTN; PAM sequence: TTT
aaaagtatcctctgtgtttt

SEQ ID NO: 293045 - DNA, 20 bp, Artificial Sequence
  Description of Artificial Sequence: Synthetic oligonucleotide
  Target: LAMA2; (-) strand; PAM type: YTN; PAM sequence: TTG
catttaaaagtatcctctgt

SEQ ID NO: 293046 - DNA, 20 bp, Artificial Sequence
  Description of Artificial Sequence: Synthetic oligonucleotide
  Target: LAMA2; (-) strand; PAM type: YTN; PAM sequence: CTC
gttgcatttaaaagtatcct

SEQ ID NO: 293047 - DNA, 20 bp, Artificial Sequence
  Description of Artificial Sequence: Synthetic oligonucleotide
  Target: LAMA2; (-) strand; PAM type: YTN; PAM sequence: TTC
atactcgttgcatttaaaag

SEQ ID NO: 293048 - DNA, 20 bp, Artificial Sequence
  Description of Artificial Sequence: Synthetic oligonucleotide
  Target: LAMA2; (-) strand; PAM type: YTN; PAM sequence: CTA
catattcatactcgttgcat

SEQ ID NO: 293049 - DNA, 20 bp, Artificial Sequence
  Description of Artificial Sequence: Synthetic oligonucleotide
  Target: LAMA2; (-) strand; PAM type: YTN; PAM sequence: CTG
ctacatattcatactcgttg

SEQ ID NO: 293050 - DNA, 20 bp, Artificial Sequence
  Description of Artificial Sequence: Synthetic oligonucleotide
  Target: LAMA2; (-) strand; PAM type: YTN; PAM sequence: CTA
ctgctacatattcatactcg

SEQ ID NO: 293051 - DNA, 20 bp, Artificial Sequence
  Description of Artificial Sequence: Synthetic oligonucleotide
  Target: LAMA2; (-) strand; PAM type: YTN; PAM sequence: CTG
aactactgctacatattcat

SEQ ID NO: 293052 - DNA, 20 bp, Artificial Sequence
  Description of Artificial Sequence: Synthetic oligonucleotide
  Target: LAMA2; (-) strand; PAM type: YTN; PAM sequence: TTG
gctgaactactgctacatat

SEQ ID NO: 293053 - DNA, 20 bp, Artificial Sequence
  Description of Artificial Sequence: Synthetic oligonucleotide
  Target: LAMA2; (-) strand; PAM type: YTN; PAM sequence: CTT
ggctgaactactgctacata

SEQ ID NO: 293054 - DNA, 20 bp, Artificial Sequence
  Description of Artificial Sequence: Synthetic oligonucleotide
  Target: LAMA2; (-) strand; PAM type: YTN; PAM sequence: TTG
gcttggctgaactactgcta

SEQ ID NO: 293055 - DNA, 20 bp, Artificial Sequence
  Description of Artificial Sequence: Synthetic oligonucleotide
  Target: LAMA2; (-) strand; PAM type: YTN; PAM sequence: CTG
caggatagtattggcttggc

SEQ ID NO: 293056 - DNA, 20 bp, Artificial Sequence
  Description of Artificial Sequence: Synthetic oligonucleotide
  Target: LAMA2; (-) strand; PAM type: YTN; PAM sequence: TTC
actgcaggatagtattggct

SEQ ID NO: 293057 - DNA, 20 bp, Artificial Sequence
  Description of Artificial Sequence: Synthetic oligonucleotide
  Target: LAMA2; (-) strand; PAM type: YTN; PAM sequence: TTT
cactgcaggatagtattggc

SEQ ID NO: 293058 - DNA, 20 bp, Artificial Sequence
  Description of Artificial Sequence: Synthetic oligonucleotide
  Target: LAMA2; (-) strand; PAM type: YTN; PAM sequence: CTT
tcactgcaggatagtattgg

SEQ ID NO: 293059 - DNA, 20 bp, Artificial Sequence
  Description of Artificial Sequence: Synthetic oligonucleotide
  Target: LAMA2; (-) strand; PAM type: YTN; PAM sequence: TTA
gtaaatgtaggtctttcact

SEQ ID NO: 293060 - DNA, 20 bp, Artificial Sequence
  Description of Artificial Sequence: Synthetic oligonucleotide
  Target: LAMA2; (-) strand; PAM type: YTN; PAM sequence: TTC
cccaagaggataattagtaa

SEQ ID NO: 293061 - DNA, 20 bp, Artificial Sequence
  Description of Artificial Sequence: Synthetic oligonucleotide
  Target: LAMA2; (-) strand; PAM type: YTN; PAM sequence: TTT
ccccaagaggataattagta

SEQ ID NO: 293062 - DNA, 20 bp, Artificial Sequence
  Description of Artificial Sequence: Synthetic oligonucleotide
  Target: LAMA2; (-) strand; PAM type: YTN; PAM sequence: TTT
tccccaagaggataattagt

SEQ ID NO: 293063 - DNA, 20 bp, Artificial Sequence
  Description of Artificial Sequence: Synthetic oligonucleotide
  Target: LAMA2; (-) strand; PAM type: YTN; PAM sequence: CTA
aatgttttccccaagaggat

SEQ ID NO: 293064 - DNA, 20 bp, Artificial Sequence
  Description of Artificial Sequence: Synthetic oligonucleotide
  Target: LAMA2; (-) strand; PAM type: YTN; PAM sequence: TTA
tctaaatgttttccccaaga

SEQ ID NO: 293065 - DNA, 20 bp, Artificial Sequence
  Description of Artificial Sequence: Synthetic oligonucleotide
  Target: LAMA2; (-) strand; PAM type: YTN; PAM sequence: CTT
atctaaatgttttccccaag

SEQ ID NO: 293066 - DNA, 20 bp, Artificial Sequence
  Description of Artificial Sequence: Synthetic oligonucleotide
  Target: LAMA2; (-) strand; PAM type: YTN; PAM sequence: TTG
cttatctaaatgttttcccc

SEQ ID NO: 293067 - DNA, 20 bp, Artificial Sequence
  Description of Artificial Sequence: Synthetic oligonucleotide
  Target: LAMA2; (-) strand; PAM type: YTN; PAM sequence: TTA
ttgcttatctaaatgttttc

SEQ ID NO: 293068 - DNA, 20 bp, Artificial Sequence
  Description of Artificial Sequence: Synthetic oligonucleotide
  Target: LAMA2; (-) strand; PAM type: YTN; PAM sequence: TTT
attgcttatctaaatgtttt

SEQ ID NO: 293069 - DNA, 20 bp, Artificial Sequence
  Description of Artificial Sequence: Synthetic oligonucleotide
  Target: LAMA2; (-) strand; PAM type: YTN; PAM sequence: CTT
tattgcttatctaaatgttt

SEQ ID NO: 293070 - DNA, 20 bp, Artificial Sequence
  Description of Artificial Sequence: Synthetic oligonucleotide
  Target: LAMA2; (-) strand; PAM type: YTN; PAM sequence: TTA
gaaggtaagaaatctttatt

SEQ ID NO: 293071 - DNA, 20 bp, Artificial Sequence
  Description of Artificial Sequence: Synthetic oligonucleotide
  Target: LAMA2; (-) strand; PAM type: YTN; PAM sequence: CTT
agaaggtaagaaatctttat

SEQ ID NO: 293072 - DNA, 20 bp, Artificial Sequence
  Description of Artificial Sequence: Synthetic oligonucleotide
  Target: LAMA2; (-) strand; PAM type: YTN; PAM sequence: TTA
cttagaaggtaagaaatctt

SEQ ID NO: 293073 - DNA, 20 bp, Artificial Sequence
  Description of Artificial Sequence: Synthetic oligonucleotide
  Target: LAMA2; (-) strand; PAM type: YTN; PAM sequence: TTT
acttagaaggtaagaaatct

SEQ ID NO: 293074 - DNA, 20 bp, Artificial Sequence
  Description of Artificial Sequence: Synthetic oligonucleotide
  Target: LAMA2; (-) strand; PAM type: YTN; PAM sequence: TTG
tttacttagaaggtaagaaa

SEQ ID NO: 293075 - DNA, 20 bp, Artificial Sequence
  Description of Artificial Sequence: Synthetic oligonucleotide
  Target: LAMA2; (-) strand; PAM type: YTN; PAM sequence: TTG
ttgtttacttagaaggtaag

SEQ ID NO: 293076 - DNA, 20 bp, Artificial Sequence
  Description of Artificial Sequence: Synthetic oligonucleotide
  Target: LAMA2; (-) strand; PAM type: YTN; PAM sequence: TTT
gttgtttacttagaaggtaa

SEQ ID NO: 293077 - DNA, 20 bp, Artificial Sequence
  Description of Artificial Sequence: Synthetic oligonucleotide
  Target: LAMA2; (-) strand; PAM type: YTN; PAM sequence: CTT
tgttgtttacttagaaggta

SEQ ID NO: 293078 - DNA, 20 bp, Artificial Sequence
  Description of Artificial Sequence: Synthetic oligonucleotide
  Target: LAMA2; (-) strand; PAM type: YTN; PAM sequence: CTG
aggaaagctttgttgtttac

SEQ ID NO: 293079 - DNA, 20 bp, Artificial Sequence
  Description of Artificial Sequence: Synthetic oligonucleotide
  Target: LAMA2; (-) strand; PAM type: YTN; PAM sequence: CTA
ataataataataataaaaac

SEQ ID NO: 293080 - DNA, 20 bp, Artificial Sequence
  Description of Artificial Sequence: Synthetic oligonucleotide
  Target: LAMA2; (-) strand; PAM type: YTN; PAM sequence: CTA
cctaataataataataataa

SEQ ID NO: 293081 - DNA, 20 bp, Artificial Sequence
  Description of Artificial Sequence: Synthetic oligonucleotide
  Target: LAMA2; (-) strand; PAM type: YTN; PAM sequence: CTC
tacctaataataataataat

SEQ ID NO: 293082 - DNA, 20 bp, Artificial Sequence
  Description of Artificial Sequence: Synthetic oligonucleotide
  Target: LAMA2; (-) strand; PAM type: YTN; PAM sequence: CTA
atcctctacctaataataat

SEQ ID NO: 293083 - DNA, 20 bp, Artificial Sequence
  Description of Artificial Sequence: Synthetic oligonucleotide
  Target: LAMA2; (-) strand; PAM type: YTN; PAM sequence: CTA
cagcctaatcctctacctaa

SEQ ID NO: 293084 - DNA, 20 bp, Artificial Sequence
  Description of Artificial Sequence: Synthetic oligonucleotide
  Target: LAMA2; (-) strand; PAM type: YTN; PAM sequence: TTC
atcctacagcctaatcctct

SEQ ID NO: 293085 - DNA, 20 bp, Artificial Sequence
  Description of Artificial Sequence: Synthetic oligonucleotide
  Target: LAMA2; (-) strand; PAM type: YTN; PAM sequence: TTG
tatcaattcatcctacagcc

SEQ ID NO: 293086 - DNA, 20 bp, Artificial Sequence
  Description of Artificial Sequence: Synthetic oligonucleotide
  Target: LAMA2; (-) strand; PAM type: YTN; PAM sequence: TTT
gtatcaattcatcctacagc

SEQ ID NO: 293087 - DNA, 20 bp, Artificial Sequence
  Description of Artificial Sequence: Synthetic oligonucleotide
  Target: LAMA2; (-) strand; PAM type: YTN; PAM sequence: CTT
tgtatcaattcatcctacag

SEQ ID NO: 293088 - DNA, 20 bp, Artificial Sequence
  Description of Artificial Sequence: Synthetic oligonucleotide
  Target: LAMA2; (-) strand; PAM type: YTN; PAM sequence: CTG
catgaacgctttgtatcaat

SEQ ID NO: 293089 - DNA, 20 bp, Artificial Sequence
  Description of Artificial Sequence: Synthetic oligonucleotide
  Target: LAMA2; (-) strand; PAM type: YTN; PAM sequence: TTC
tgcatgaacgctttgtatca

SEQ ID NO: 293090 - DNA, 20 bp, Artificial Sequence
  Description of Artificial Sequence: Synthetic oligonucleotide
  Target: LAMA2; (-) strand; PAM type: YTN; PAM sequence: CTC
agtagccattctgcatgaac

SEQ ID NO: 293091 - DNA, 20 bp, Artificial Sequence
  Description of Artificial Sequence: Synthetic oligonucleotide
  Target: LAMA2; (-) strand; PAM type: YTN; PAM sequence: CTA
aacgtctcagtagccattct

SEQ ID NO: 293092 - DNA, 20 bp, Artificial Sequence
  Description of Artificial Sequence: Synthetic oligonucleotide
  Target: LAMA2; (-) strand; PAM type: YTN; PAM sequence: TTC
taaacgtctcagtagccatt

SEQ ID NO: 293093 - DNA, 20 bp, Artificial Sequence
  Description of Artificial Sequence: Synthetic oligonucleotide
  Target: LAMA2; (-) strand; PAM type: YTN; PAM sequence: TTT
ctaaacgtctcagtagccat

SEQ ID NO: 293094 - DNA, 20 bp, Artificial Sequence
  Description of Artificial Sequence: Synthetic oligonucleotide
  Target: LAMA2; (-) strand; PAM type: YTN; PAM sequence: CTC
gatcatggtttctaaacgtc

SEQ ID NO: 293095 - DNA, 20 bp, Artificial Sequence
  Description of Artificial Sequence: Synthetic oligonucleotide
  Target: LAMA2; (-) strand; PAM type: YTN; PAM sequence: TTG
tctcgatcatggtttctaaa

SEQ ID NO: 293096 - DNA, 20 bp, Artificial Sequence
  Description of Artificial Sequence: Synthetic oligonucleotide
  Target: LAMA2; (-) strand; PAM type: YTN; PAM sequence: TTT
gtctcgatcatggtttctaa

SEQ ID NO: 293097 - DNA, 20 bp, Artificial Sequence
  Description of Artificial Sequence: Synthetic oligonucleotide
  Target: LAMA2; (-) strand; PAM type: YTN; PAM sequence: CTC
atttgtctcgatcatggttt

SEQ ID NO: 293098 - DNA, 20 bp, Artificial Sequence
  Description of Artificial Sequence: Synthetic oligonucleotide
  Target: LAMA2; (-) strand; PAM type: YTN; PAM sequence: TTG
tccaaataaatgatccctca

SEQ ID NO: 293099 - DNA, 20 bp, Artificial Sequence
  Description of Artificial Sequence: Synthetic oligonucleotide
  Target: LAMA2; (-) strand; PAM type: YTN; PAM sequence: TTT
gtccaaataaatgatccctc

SEQ ID NO: 293100 - DNA, 20 bp, Artificial Sequence
  Description of Artificial Sequence: Synthetic oligonucleotide
  Target: LAMA2; (-) strand; PAM type: YTN; PAM sequence: CTC
agtttgtccaaataaatgat

SEQ ID NO: 293101 - DNA, 20 bp, Artificial Sequence
  Description of Artificial Sequence: Synthetic oligonucleotide
  Target: LAMA2; (-) strand; PAM type: YTN; PAM sequence: TTC
tcagtttgtccaaataaatg

SEQ ID NO: 293102 - DNA, 20 bp, Artificial Sequence
  Description of Artificial Sequence: Synthetic oligonucleotide
  Target: LAMA2; (-) strand; PAM type: YTN; PAM sequence: TTA
gtaaaagttctcagtttgtc

SEQ ID NO: 293103 - DNA, 20 bp, Artificial Sequence
  Description of Artificial Sequence: Synthetic oligonucleotide
  Target: LAMA2; (-) strand; PAM type: YTN; PAM sequence: TTA
gattagtaaaagttctcagt

SEQ ID NO: 293104 - DNA, 20 bp, Artificial Sequence
  Description of Artificial Sequence: Synthetic oligonucleotide
  Target: LAMA2; (-) strand; PAM type: YTN; PAM sequence: CTG
ttagattagtaaaagttctc

SEQ ID NO: 293105 - DNA, 20 bp, Artificial Sequence
  Description of Artificial Sequence: Synthetic oligonucleotide
  Target: LAMA2; (-) strand; PAM type: YTN; PAM sequence: CTG
gctgttagattagtaaaagt

SEQ ID NO: 293106 - DNA, 20 bp, Artificial Sequence
  Description of Artificial Sequence: Synthetic oligonucleotide
  Target: LAMA2; (-) strand; PAM type: YTN; PAM sequence: CTA
caatatctggctgttagatt

SEQ ID NO: 293107 - DNA, 20 bp, Artificial Sequence
  Description of Artificial Sequence: Synthetic oligonucleotide
  Target: LAMA2; (-) strand; PAM type: YTN; PAM sequence: CTC
agagaccatgactacaatat

SEQ ID NO: 293108 - DNA, 20 bp, Artificial Sequence
  Description of Artificial Sequence: Synthetic oligonucleotide
  Target: LAMA2; (-) strand; PAM type: YTN; PAM sequence: CTC
ctcagagaccatgactacaa

SEQ ID NO: 293109 - DNA, 20 bp, Artificial Sequence
  Description of Artificial Sequence: Synthetic oligonucleotide
  Target: LAMA2; (-) strand; PAM type: YTN; PAM sequence: TTC
tcctcagagaccatgactac

SEQ ID NO: 293110 - DNA, 20 bp, Artificial Sequence
  Description of Artificial Sequence: Synthetic oligonucleotide
  Target: LAMA2; (-) strand; PAM type: YTN; PAM sequence: TTT
ctcctcagagaccatgacta

SEQ ID NO: 293111 - DNA, 20 bp, Artificial Sequence
  Description of Artificial Sequence: Synthetic oligonucleotide
  Target: LAMA2; (-) strand; PAM type: YTN; PAM sequence: TTG
catttctcctcagagaccat

SEQ ID NO: 293112 - DNA, 20 bp, Artificial Sequence
  Description of Artificial Sequence: Synthetic oligonucleotide
  Target: LAMA2; (-) strand; PAM type: YTN; PAM sequence: TTT
gcatttctcctcagagacca

SEQ ID NO: 293113 - DNA, 20 bp, Artificial Sequence
  Description of Artificial Sequence: Synthetic oligonucleotide
  Target: LAMA2; (-) strand; PAM type: YTN; PAM sequence: TTC
agtttgcatttctcctcaga

SEQ ID NO: 293114 - DNA, 20 bp, Artificial Sequence
  Description of Artificial Sequence: Synthetic oligonucleotide
  Target: LAMA2; (-) strand; PAM type: YTN; PAM sequence: TTC
aaatgagagcattcagtttg

SEQ ID NO: 293115 - DNA, 20 bp, Artificial Sequence
  Description of Artificial Sequence: Synthetic oligonucleotide
  Target: LAMA2; (-) strand; PAM type: YTN; PAM sequence: CTA
agattcaaatgagagcattc

SEQ ID NO: 293116 - DNA, 20 bp, Artificial Sequence
  Description of Artificial Sequence: Synthetic oligonucleotide
  Target: LAMA2; (-) strand; PAM type: YTN; PAM sequence: TTC
taagattcaaatgagagcat

SEQ ID NO: 293117 - DNA, 20 bp, Artificial Sequence
  Description of Artificial Sequence: Synthetic oligonucleotide
  Target: LAMA2; (-) strand; PAM type: YTN; PAM sequence: CTA
aagcattctaagattcaaat

SEQ ID NO: 293118 - DNA, 20 bp, Artificial Sequence
  Description of Artificial Sequence: Synthetic oligonucleotide
  Target: LAMA2; (-) strand; PAM type: YTN; PAM sequence: TTC
taaagcattctaagattcaa

SEQ ID NO: 293119 - DNA, 20 bp, Artificial Sequence
  Description of Artificial Sequence: Synthetic oligonucleotide
  Target: LAMA2; (-) strand; PAM type: YTN; PAM sequence: CTA
gaagacatgtgaaaccagga

SEQ ID NO: 293120 - DNA, 20 bp, Artificial Sequence
  Description of Artificial Sequence: Synthetic oligonucleotide
  Target: LAMA2; (-) strand; PAM type: YTN; PAM sequence: CTA
atctagaagacatgtgaaac

SEQ ID NO: 293121 - DNA, 20 bp, Artificial Sequence
  Description of Artificial Sequence: Synthetic oligonucleotide
  Target: LAMA2; (-) strand; PAM type: YTN; PAM sequence: CTA
acatctaatctagaagacat

SEQ ID NO: 293122 - DNA, 20 bp, Artificial Sequence
  Description of Artificial Sequence: Synthetic oligonucleotide
  Target: LAMA2; (-) strand; PAM type: YTN; PAM sequence: TTG
tcaaagggcctaacatctaa

SEQ ID NO: 293123 - DNA, 20 bp, Artificial Sequence
  Description of Artificial Sequence: Synthetic oligonucleotide
  Target: LAMA2; (-) strand; PAM type: YTN; PAM sequence: TTT
gtcaaagggcctaacatcta

SEQ ID NO: 293124 - DNA, 20 bp, Artificial Sequence
  Description of Artificial Sequence: Synthetic oligonucleotide
  Target: LAMA2; (-) strand; PAM type: YTN; PAM sequence: TTA
aagtttgtcaaagggcctaa

SEQ ID NO: 293125 - DNA, 20 bp, Artificial Sequence
  Description of Artificial Sequence: Synthetic oligonucleotide
  Target: LAMA2; (-) strand; PAM type: YTN; PAM sequence: TTC
cgcaatgaaaaggattaaag

SEQ ID NO: 293126 - DNA, 20 bp, Artificial Sequence
  Description of Artificial Sequence: Synthetic oligonucleotide
  Target: LAMA2; (-) strand; PAM type: YTN; PAM sequence: TTT
ccgcaatgaaaaggattaaa

SEQ ID NO: 293127 - DNA, 20 bp, Artificial Sequence
  Description of Artificial Sequence: Synthetic oligonucleotide
  Target: LAMA2; (-) strand; PAM type: YTN; PAM sequence: CTT
tccgcaatgaaaaggattaa

SEQ ID NO: 293128 - DNA, 20 bp, Artificial Sequence
  Description of Artificial Sequence: Synthetic oligonucleotide
  Target: LAMA2; (-) strand; PAM type: YTN; PAM sequence: TTA
aaaagtcctttccgcaatga

SEQ ID NO: 293129 - DNA, 20 bp, Artificial Sequence
  Description of Artificial Sequence: Synthetic oligonucleotide
  Target: LAMA2; (-) strand; PAM type: YTN; PAM sequence: TTT
aaaaagtcctttccgcaatg

SEQ ID NO: 293130 - DNA, 20 bp, Artificial Sequence
  Description of Artificial Sequence: Synthetic oligonucleotide
  Target: LAMA2; (-) strand; PAM type: YTN; PAM sequence: TTT
taaaaagtcctttccgcaat

SEQ ID NO: 293131 - DNA, 20 bp, Artificial Sequence
  Description of Artificial Sequence: Synthetic oligonucleotide
  Target: LAMA2; (-) strand; PAM type: YTN; PAM sequence: CTT
ttaaaaagtcctttccgcaa

SEQ ID NO: 293132 - DNA, 20 bp, Artificial Sequence
  Description of Artificial Sequence: Synthetic oligonucleotide
  Target: LAMA2; (-) strand; PAM type: YTN; PAM sequence: TTA
aatcttttaaaaagtccttt

SEQ ID NO: 293133 - DNA, 20 bp, Artificial Sequence
  Description of Artificial Sequence: Synthetic oligonucleotide
  Target: LAMA2; (-) strand; PAM type: YTN; PAM sequence: TTT
aaatcttttaaaaagtcctt

SEQ ID NO: 293134 - DNA, 20 bp, Artificial Sequence
  Description of Artificial Sequence: Synthetic oligonucleotide
  Target: LAMA2; (-) strand; PAM type: YTN; PAM sequence: CTA
aagtttaaatcttttaaaaa

SEQ ID NO: 293135 - DNA, 20 bp, Artificial Sequence
  Description of Artificial Sequence: Synthetic oligonucleotide
  Target: LAMA2; (-) strand; PAM type: YTN; PAM sequence: TTA
caggtgtgagccaccacgcc

SEQ ID NO: 293136 - DNA, 20 bp, Artificial Sequence
  Description of Artificial Sequence: Synthetic oligonucleotide
  Target: LAMA2; (-) strand; PAM type: YTN; PAM sequence: CTG
ggattacaggtgtgagccac

SEQ ID NO: 293137 - DNA, 20 bp, Artificial Sequence
  Description of Artificial Sequence: Synthetic oligonucleotide
  Target: LAMA2; (-) strand; PAM type: YTN; PAM sequence: CTC
ccaaagtgctgggattacag

SEQ ID NO: 293138 - DNA, 20 bp, Artificial Sequence
  Description of Artificial Sequence: Synthetic oligonucleotide
  Target: LAMA2; (-) strand; PAM type: YTN; PAM sequence: TTG
gcctcccaaagtgctgggat

SEQ ID NO: 293139 - DNA, 20 bp, Artificial Sequence
  Description of Artificial Sequence: Synthetic oligonucleotide
  Target: LAMA2; (-) strand; PAM type: YTN; PAM sequence: CTT
ggcctcccaaagtgctggga

SEQ ID NO: 293140 - DNA, 20 bp, Artificial Sequence
  Description of Artificial Sequence: Synthetic oligonucleotide
  Target: LAMA2; (-) strand; PAM type: YTN; PAM sequence: CTG
ccttggcctcccaaagtgct

SEQ ID NO: 293141 - DNA, 20 bp, Artificial Sequence
  Description of Artificial Sequence: Synthetic oligonucleotide
  Target: LAMA2; (-) strand; PAM type: YTN; PAM sequence: CTC
atgatccacctgccttggcc

SEQ ID NO: 293142 - DNA, 20 bp, Artificial Sequence
  Description of Artificial Sequence: Synthetic oligonucleotide
  Target: LAMA2; (-) strand; PAM type: YTN; PAM sequence: CTG
acctcatgatccacctgcct

SEQ ID NO: 293143 - DNA, 20 bp, Artificial Sequence
  Description of Artificial Sequence: Synthetic oligonucleotide
  Target: LAMA2; (-) strand; PAM type: YTN; PAM sequence: CTC
ctgacctcatgatccacctg

SEQ ID NO: 293144 - DNA, 20 bp, Artificial Sequence
  Description of Artificial Sequence: Synthetic oligonucleotide
  Target: LAMA2; (-) strand; PAM type: YTN; PAM sequence: CTC
gaactcctgacctcatgatc

SEQ ID NO: 293145 - DNA, 20 bp, Artificial Sequence
  Description of Artificial Sequence: Synthetic oligonucleotide
  Target: LAMA2; (-) strand; PAM type: YTN; PAM sequence: CTG
gtctcgaactcctgacctca

SEQ ID NO: 293146 - DNA, 20 bp, Artificial Sequence
  Description of Artificial Sequence: Synthetic oligonucleotide
  Target: LAMA2; (-) strand; PAM type: YTN; PAM sequence: TTG
gccaggctggtctcgaactc

SEQ ID NO: 293147 - DNA, 20 bp, Artificial Sequence
  Description of Artificial Sequence: Synthetic oligonucleotide
  Target: LAMA2; (-) strand; PAM type: YTN; PAM sequence: TTC
accatattggccaggctggt

SEQ ID NO: 293148 - DNA, 20 bp, Artificial Sequence
  Description of Artificial Sequence: Synthetic oligonucleotide
  Target: LAMA2; (-) strand; PAM type: YTN; PAM sequence: TTT
caccatattggccaggctgg

SEQ ID NO: 293149 - DNA, 20 bp, Artificial Sequence
  Description of Artificial Sequence: Synthetic oligonucleotide
  Target: LAMA2; (-) strand; PAM type: YTN; PAM sequence: TTA
gtagagacggggtttcacca

SEQ ID NO: 293150 - DNA, 20 bp, Artificial Sequence
  Description of Artificial Sequence: Synthetic oligonucleotide
  Target: LAMA2; (-) strand; PAM type: YTN; PAM sequence: TTT
agtagagacggggtttcacc

SEQ ID NO: 293151 - DNA, 20 bp, Artificial Sequence
  Description of Artificial Sequence: Synthetic oligonucleotide
  Target: LAMA2; (-) strand; PAM type: YTN; PAM sequence: TTT
tagtagagacggggtttcac

SEQ ID NO: 293152 - DNA, 20 bp, Artificial Sequence
  Description of Artificial Sequence: Synthetic oligonucleotide
  Target: LAMA2; (-) strand; PAM type: YTN; PAM sequence: TTT
ttagtagagacggggtttca

SEQ ID NO: 293153 - DNA, 20 bp, Artificial Sequence
  Description of Artificial Sequence: Synthetic oligonucleotide
  Target: LAMA2; (-) strand; PAM type: YTN; PAM sequence: TTG
catttttagtagagacgggg

SEQ ID NO: 293154 - DNA, 20 bp, Artificial Sequence
  Description of Artificial Sequence: Synthetic oligonucleotide
  Target: LAMA2; (-) strand; PAM type: YTN; PAM sequence: TTT
gcatttttagtagagacggg

SEQ ID NO: 293155 - DNA, 20 bp, Artificial Sequence
  Description of Artificial Sequence: Synthetic oligonucleotide
  Target: LAMA2; (-) strand; PAM type: YTN; PAM sequence: TTT
tgcatttttagtagagacgg

SEQ ID NO: 293156 - DNA, 20 bp, Artificial Sequence
  Description of Artificial Sequence: Synthetic oligonucleotide
  Target: LAMA2; (-) strand; PAM type: YTN; PAM sequence: TTT
ttgcatttttagtagagacg

SEQ ID NO: 293157 - DNA, 20 bp, Artificial Sequence
  Description of Artificial Sequence: Synthetic oligonucleotide
  Target: LAMA2; (-) strand; PAM type: YTN; PAM sequence: CTA
atgtttttgcatttttagta

SEQ ID NO: 293158 - DNA, 20 bp, Artificial Sequence
  Description of Artificial Sequence: Synthetic oligonucleotide
  Target: LAMA2; (-) strand; PAM type: YTN; PAM sequence: CTG
gctaatgtttttgcattttt

SEQ ID NO: 293159 - DNA, 20 bp, Artificial Sequence
  Description of Artificial Sequence: Synthetic oligonucleotide
  Target: LAMA2; (-) strand; PAM type: YTN; PAM sequence: CTA
ccaccatgtctggctaatgt

SEQ ID NO: 293160 - DNA, 20 bp, Artificial Sequence
  Description of Artificial Sequence: Synthetic oligonucleotide
  Target: LAMA2; (-) strand; PAM type: YTN; PAM sequence: TTA
caggcgcctaccaccatgtc

SEQ ID NO: 293161 - DNA, 20 bp, Artificial Sequence
  Description of Artificial Sequence: Synthetic oligonucleotide
  Target: LAMA2; (-) strand; PAM type: YTN; PAM sequence: CTG
tgattacaggcgcctaccac

SEQ ID NO: 293162 - DNA, 20 bp, Artificial Sequence
  Description of Artificial Sequence: Synthetic oligonucleotide
  Target: LAMA2; (-) strand; PAM type: YTN; PAM sequence: CTC
cagagtagctgtgattacag

SEQ ID NO: 293163 - DNA, 20 bp, Artificial Sequence
  Description of Artificial Sequence: Synthetic oligonucleotide
  Target: LAMA2; (-) strand; PAM type: YTN; PAM sequence: CTC
agcctccagagtagctgtga

SEQ ID NO: 293164 - DNA, 20 bp, Artificial Sequence
  Description of Artificial Sequence: Synthetic oligonucleotide
  Target: LAMA2; (-) strand; PAM type: YTN; PAM sequence: CTG
cctcagcctccagagtagct

SEQ ID NO: 293165 - DNA, 20 bp, Artificial Sequence
  Description of Artificial Sequence: Synthetic oligonucleotide
  Target: LAMA2; (-) strand; PAM type: YTN; PAM sequence: CTC
ctgcctcagcctccagagta

SEQ ID NO: 293166 - DNA, 20 bp, Artificial Sequence
  Description of Artificial Sequence: Synthetic oligonucleotide
  Target: LAMA2; (-) strand; PAM type: YTN; PAM sequence: TTC
tcctgcctcagcctccagag

SEQ ID NO: 293167 - DNA, 20 bp, Artificial Sequence
  Description of Artificial Sequence: Synthetic oligonucleotide
  Target: LAMA2; (-) strand; PAM type: YTN; PAM sequence: TTT
ctcctgcctcagcctccaga

SEQ ID NO: 293168 - DNA, 20 bp, Artificial Sequence
  Description of Artificial Sequence: Synthetic oligonucleotide
  Target: LAMA2; (-) strand; PAM type: YTN; PAM sequence: TTA
agcatttctcctgcctcagc

SEQ ID NO: 293169 - DNA, 20 bp, Artificial Sequence
  Description of Artificial Sequence: Synthetic oligonucleotide
  Target: LAMA2; (-) strand; PAM type: YTN; PAM sequence: TTT
aagcatttctcctgcctcag

SEQ ID NO: 293170 - DNA, 20 bp, Artificial Sequence
  Description of Artificial Sequence: Synthetic oligonucleotide
  Target: LAMA2; (-) strand; PAM type: YTN; PAM sequence: CTG
gtttaagcatttctcctgcc

SEQ ID NO: 293171 - DNA, 20 bp, Artificial Sequence
  Description of Artificial Sequence: Synthetic oligonucleotide
  Target: LAMA2; (-) strand; PAM type: YTN; PAM sequence: CTG
tccccctggtttaagcattt

SEQ ID NO: 293172 - DNA, 20 bp, Artificial Sequence
  Description of Artificial Sequence: Synthetic oligonucleotide
  Target: LAMA2; (-) strand; PAM type: YTN; PAM sequence: CTC
tgtccccctggtttaagcat

SEQ ID NO: 293173 - DNA, 20 bp, Artificial Sequence
  Description of Artificial Sequence: Synthetic oligonucleotide
  Target: LAMA2; (-) strand; PAM type: YTN; PAM sequence: CTG
aaacctctgtccccctggtt

SEQ ID NO: 293174 - DNA, 20 bp, Artificial Sequence
  Description of Artificial Sequence: Synthetic oligonucleotide
  Target: LAMA2; (-) strand; PAM type: YTN; PAM sequence: CTC
actgaaacctctgtccccct

SEQ ID NO: 293175 - DNA, 20 bp, Artificial Sequence
  Description of Artificial Sequence: Synthetic oligonucleotide
  Target: LAMA2; (-) strand; PAM type: YTN; PAM sequence: CTC
ggctcactgaaacctctgtc

SEQ ID NO: 293176 - DNA, 20 bp, Artificial Sequence
  Description of Artificial Sequence: Synthetic oligonucleotide
  Target: LAMA2; (-) strand; PAM type: YTN; PAM sequence: CTG
gagtgcagtggtgcgatctc

SEQ ID NO: 293177 - DNA, 20 bp, Artificial Sequence
  Description of Artificial Sequence: Synthetic oligonucleotide
  Target: LAMA2; (-) strand; PAM type: YTN; PAM sequence: TTG
cccaggctggagtgcagtgg

SEQ ID NO: 293178 - DNA, 20 bp, Artificial Sequence
  Description of Artificial Sequence: Synthetic oligonucleotide
  Target: LAMA2; (-) strand; PAM type: YTN; PAM sequence: CTG
ttgcccaggctggagtgcag

SEQ ID NO: 293179 - DNA, 20 bp, Artificial Sequence
  Description of Artificial Sequence: Synthetic oligonucleotide
  Target: LAMA2; (-) strand; PAM type: YTN; PAM sequence: CTC
tgttgcccaggctggagtgc

SEQ ID NO: 293180 - DNA, 20 bp, Artificial Sequence
  Description of Artificial Sequence: Synthetic oligonucleotide
  Target: LAMA2; (-) strand; PAM type: YTN; PAM sequence: TTG
ctctgttgcccaggctggag

SEQ ID NO: 293181 - DNA, 20 bp, Artificial Sequence
  Description of Artificial Sequence: Synthetic oligonucleotide
  Target: LAMA2; (-) strand; PAM type: YTN; PAM sequence: CTT
gctctgttgcccaggctgga

SEQ ID NO: 293182 - DNA, 20 bp, Artificial Sequence
  Description of Artificial Sequence: Synthetic oligonucleotide
  Target: LAMA2; (-) strand; PAM type: YTN; PAM sequence: TTG
gagtcttgctctgttgccca

SEQ ID NO: 293183 - DNA, 20 bp, Artificial Sequence
  Description of Artificial Sequence: Synthetic oligonucleotide
  Target: LAMA2; (-) strand; PAM type: YTN; PAM sequence: TTC
cgagttggagtcttgctctg

SEQ ID NO: 293184 - DNA, 20 bp, Artificial Sequence
  Description of Artificial Sequence: Synthetic oligonucleotide
  Target: LAMA2; (-) strand; PAM type: YTN; PAM sequence: TTT
ccgagttggagtcttgctct

SEQ ID NO: 293185 - DNA, 20 bp, Artificial Sequence
  Description of Artificial Sequence: Synthetic oligonucleotide
  Target: LAMA2; (-) strand; PAM type: YTN; PAM sequence: TTT
tccgagttggagtcttgctc

SEQ ID NO: 293186 - DNA, 20 bp, Artificial Sequence
  Description of Artificial Sequence: Synthetic oligonucleotide
  Target: LAMA2; (-) strand; PAM type: YTN; PAM sequence: TTT
ttccgagttggagtcttgct

SEQ ID NO: 293187 - DNA, 20 bp, Artificial Sequence
  Description of Artificial Sequence: Synthetic oligonucleotide
  Target: LAMA2; (-) strand; PAM type: YTN; PAM sequence: TTT
tttccgagttggagtcttgc

SEQ ID NO: 293188 - DNA, 20 bp, Artificial Sequence
  Description of Artificial Sequence: Synthetic oligonucleotide
  Target: LAMA2; (-) strand; PAM type: YTN; PAM sequence: TTG
ttttttccgagttggagtct

SEQ ID NO: 293189 - DNA, 20 bp, Artificial Sequence
  Description of Artificial Sequence: Synthetic oligonucleotide
  Target: LAMA2; (-) strand; PAM type: YTN; PAM sequence: TTT
gttttttccgagttggagtc

SEQ ID NO: 293190 - DNA, 20 bp, Artificial Sequence
  Description of Artificial Sequence: Synthetic oligonucleotide
  Target: LAMA2; (-) strand; PAM type: YTN; PAM sequence: TTT
tgttttttccgagttggagt

SEQ ID NO: 293191 - DNA, 20 bp, Artificial Sequence
  Description of Artificial Sequence: Synthetic oligonucleotide
  Target: LAMA2; (-) strand; PAM type: YTN; PAM sequence: TTG
ttttgttttttccgagttgg

SEQ ID NO: 293192 - DNA, 20 bp, Artificial Sequence
  Description of Artificial Sequence: Synthetic oligonucleotide
  Target: LAMA2; (-) strand; PAM type: YTN; PAM sequence: TTT
gttttgttttttccgagttg

SEQ ID NO: 293193 - DNA, 20 bp, Artificial Sequence
  Description of Artificial Sequence: Synthetic oligonucleotide
  Target: LAMA2; (-) strand; PAM type: YTN; PAM sequence: TTT
tgttttgttttttccgagtt

SEQ ID NO: 293194 - DNA, 20 bp, Artificial Sequence
  Description of Artificial Sequence: Synthetic oligonucleotide
  Target: LAMA2; (-) strand; PAM type: YTN; PAM sequence: TTG
ttttgttttgttttttccga

SEQ ID NO: 293195 - DNA, 20 bp, Artificial Sequence
  Description of Artificial Sequence: Synthetic oligonucleotide
  Target: LAMA2; (-) strand; PAM type: YTN; PAM sequence: TTT
gttttgttttgttttttccg

SEQ ID NO: 293196 - DNA, 20 bp, Artificial Sequence
  Description of Artificial Sequence: Synthetic oligonucleotide
  Target: LAMA2; (-) strand; PAM type: YTN; PAM sequence: TTT
tgttttgttttgttttttcc

SEQ ID NO: 293197 - DNA, 20 bp, Artificial Sequence
  Description of Artificial Sequence: Synthetic oligonucleotide
  Target: LAMA2; (-) strand; PAM type: YTN; PAM sequence: TTT
ttgttttgttttgttttttc

SEQ ID NO: 293198 - DNA, 20 bp, Artificial Sequence
  Description of Artificial Sequence: Synthetic oligonucleotide
  Target: LAMA2; (-) strand; PAM type: YTN; PAM sequence: TTA
aatgtttttgttttgttttg

SEQ ID NO: 293199 - DNA, 20 bp, Artificial Sequence
  Description of Artificial Sequence: Synthetic oligonucleotide
  Target: LAMA2; (-) strand; PAM type: YTN; PAM sequence: TTT
aaatgtttttgttttgtttt

SEQ ID NO: 293200 - DNA, 20 bp, Artificial Sequence
  Description of Artificial Sequence: Synthetic oligonucleotide
  Target: LAMA2; (-) strand; PAM type: YTN; PAM sequence: TTA
aagtttaaatgtttttgttt

SEQ ID NO: 293201 - DNA, 20 bp, Artificial Sequence
  Description of Artificial Sequence: Synthetic oligonucleotide
  Target: LAMA2; (-) strand; PAM type: YTN; PAM sequence: CTT
aaagtttaaatgtttttgtt

SEQ ID NO: 293202 - DNA, 20 bp, Artificial Sequence
  Description of Artificial Sequence: Synthetic oligonucleotide
  Target: LAMA2; (-) strand; PAM type: YTN; PAM sequence: TTC
cttaaagtttaaatgttttt

SEQ ID NO: 293203 - DNA, 20 bp, Artificial Sequence
  Description of Artificial Sequence: Synthetic oligonucleotide
  Target: LAMA2; (-) strand; PAM type: YTN; PAM sequence: TTG
aaattccttaaagtttaaat

SEQ ID NO: 293204 - DNA, 20 bp, Artificial Sequence
  Description of Artificial Sequence: Synthetic oligonucleotide
  Target: LAMA2; (-) strand; PAM type: YTN; PAM sequence: TTA
ttgaaattccttaaagttta

SEQ ID NO: 293205 - DNA, 20 bp, Artificial Sequence
  Description of Artificial Sequence: Synthetic oligonucleotide
  Target: LAMA2; (-) strand; PAM type: YTN; PAM sequence: CTT
attgaaattccttaaagttt

SEQ ID NO: 293206 - DNA, 20 bp, Artificial Sequence
  Description of Artificial Sequence: Synthetic oligonucleotide
  Target: LAMA2; (-) strand; PAM type: YTN; PAM sequence: TTA
cttattgaaattccttaaag

SEQ ID NO: 293207 - DNA, 20 bp, Artificial Sequence
  Description of Artificial Sequence: Synthetic oligonucleotide
  Target: LAMA2; (-) strand; PAM type: YTN; PAM sequence: CTG
cagttacttattgaaattcc

SEQ ID NO: 293208 - DNA, 20 bp, Artificial Sequence
  Description of Artificial Sequence: Synthetic oligonucleotide
  Target: LAMA2; (-) strand; PAM type: YTN; PAM sequence: CTC
aaatctgcagttacttattg

SEQ ID NO: 293209 - DNA, 20 bp, Artificial Sequence
  Description of Artificial Sequence: Synthetic oligonucleotide
  Target: LAMA2; (-) strand; PAM type: YTN; PAM sequence: TTC
tcaaatctgcagttacttat

SEQ ID NO: 293210 - DNA, 20 bp, Artificial Sequence
  Description of Artificial Sequence: Synthetic oligonucleotide
  Target: LAMA2; (-) strand; PAM type: YTN; PAM sequence: TTT
ctcaaatctgcagttactta

SEQ ID NO: 293211 - DNA, 20 bp, Artificial Sequence
  Description of Artificial Sequence: Synthetic oligonucleotide
  Target: LAMA2; (-) strand; PAM type: YTN; PAM sequence: CTA
atttctcaaatctgcagtta

SEQ ID NO: 293212 - DNA, 20 bp, Artificial Sequence
  Description of Artificial Sequence: Synthetic oligonucleotide
  Target: LAMA2; (-) strand; PAM type: YTN; PAM sequence: TTC
ggtaaactaatttctcaaat

SEQ ID NO: 293213 - DNA, 20 bp, Artificial Sequence
  Description of Artificial Sequence: Synthetic oligonucleotide
  Target: LAMA2; (-) strand; PAM type: YTN; PAM sequence: TTT
cggtaaactaatttctcaaa

SEQ ID NO: 293214 - DNA, 20 bp, Artificial Sequence
  Description of Artificial Sequence: Synthetic oligonucleotide
  Target: LAMA2; (-) strand; PAM type: YTN; PAM sequence: TTG
agtgatttcggtaaactaat

SEQ ID NO: 293215 - DNA, 20 bp, Artificial Sequence
  Description of Artificial Sequence: Synthetic oligonucleotide
  Target: LAMA2; (-) strand; PAM type: YTN; PAM sequence: TTT
gagtgatttcggtaaactaa

SEQ ID NO: 293216 - DNA, 20 bp, Artificial Sequence
  Description of Artificial Sequence: Synthetic oligonucleotide
  Target: LAMA2; (-) strand; PAM type: YTN; PAM sequence: TTT
tgagtgatttcggtaaacta

SEQ ID NO: 293217 - DNA, 20 bp, Artificial Sequence
  Description of Artificial Sequence: Synthetic oligonucleotide
  Target: LAMA2; (-) strand; PAM type: YTN; PAM sequence: CTC
aacaaaataacacattttga

SEQ ID NO: 293218 - DNA, 20 bp, Artificial Sequence
  Description of Artificial Sequence: Synthetic oligonucleotide
  Target: LAMA2; (-) strand; PAM type: YTN; PAM sequence: TTC
tcaacaaaataacacatttt

SEQ ID NO: 293219 - DNA, 20 bp, Artificial Sequence
  Description of Artificial Sequence: Synthetic oligonucleotide
  Target: LAMA2; (-) strand; PAM type: YTN; PAM sequence: TTT
ctcaacaaaataacacattt

SEQ ID NO: 293220 - DNA, 20 bp, Artificial Sequence
  Description of Artificial Sequence: Synthetic oligonucleotide
  Target: LAMA2; (-) strand; PAM type: YTN; PAM sequence: CTT
tctcaacaaaataacacatt

SEQ ID NO: 293221 - DNA, 20 bp, Artificial Sequence
  Description of Artificial Sequence: Synthetic oligonucleotide
  Target: LAMA2; (-) strand; PAM type: YTN; PAM sequence: TTC
tttctcaacaaaataacaca

SEQ ID NO: 293222 - DNA, 20 bp, Artificial Sequence
  Description of Artificial Sequence: Synthetic oligonucleotide
  Target: LAMA2; (-) strand; PAM type: YTN; PAM sequence: TTC
cagaattctttctcaacaaa

SEQ ID NO: 293223 - DNA, 20 bp, Artificial Sequence
  Description of Artificial Sequence: Synthetic oligonucleotide
  Target: LAMA2; (-) strand; PAM type: YTN; PAM sequence: TTG
ggaattccagaattctttct

SEQ ID NO: 293224 - DNA, 20 bp, Artificial Sequence
  Description of Artificial Sequence: Synthetic oligonucleotide
  Target: LAMA2; (-) strand; PAM type: YTN; PAM sequence: TTT
gggaattccagaattctttc

SEQ ID NO: 293225 - DNA, 20 bp, Artificial Sequence
  Description of Artificial Sequence: Synthetic oligonucleotide
  Target: LAMA2; (-) strand; PAM type: YTN; PAM sequence: TTA
aaaggacatagtggcatagt

SEQ ID NO: 293226 - DNA, 20 bp, Artificial Sequence
  Description of Artificial Sequence: Synthetic oligonucleotide
  Target: LAMA2; (-) strand; PAM type: YTN; PAM sequence: CTG
ttaaaaggacatagtggcat

SEQ ID NO: 293227 - DNA, 20 bp, Artificial Sequence
  Description of Artificial Sequence: Synthetic oligonucleotide
  Target: LAMA2; (-) strand; PAM type: YTN; PAM sequence: TTG
aagaagcacctgttaaaagg

SEQ ID NO: 293228 - DNA, 20 bp, Artificial Sequence
  Description of Artificial Sequence: Synthetic oligonucleotide
  Target: LAMA2; (-) strand; PAM type: YTN; PAM sequence: CTT
gaagaagcacctgttaaaag

SEQ ID NO: 293229 - DNA, 20 bp, Artificial Sequence
  Description of Artificial Sequence: Synthetic oligonucleotide
  Target: LAMA2; (-) strand; PAM type: YTN; PAM sequence: TTC
ttgaagaagcacctgttaaa

SEQ ID NO: 293230 - DNA, 20 bp, Artificial Sequence
  Description of Artificial Sequence: Synthetic oligonucleotide
  Target: LAMA2; (-) strand; PAM type: YTN; PAM sequence: CTT
cttgaagaagcacctgttaa

SEQ ID NO: 293231 - DNA, 20 bp, Artificial Sequence
  Description of Artificial Sequence: Synthetic oligonucleotide
  Target: LAMA2; (-) strand; PAM type: YTN; PAM sequence: TTG
gcataataaaatgcccttct

SEQ ID NO: 293232 - DNA, 20 bp, Artificial Sequence
  Description of Artificial Sequence: Synthetic oligonucleotide
  Target: LAMA2; (-) strand; PAM type: YTN; PAM sequence: CTG
tgaagttggcataataaaat

SEQ ID NO: 293233 - DNA, 20 bp, Artificial Sequence
  Description of Artificial Sequence: Synthetic oligonucleotide
  Target: LAMA2; (-) strand; PAM type: YTN; PAM sequence: TTG
atggtcaacagctgtgaagt

SEQ ID NO: 293234 - DNA, 20 bp, Artificial Sequence
  Description of Artificial Sequence: Synthetic oligonucleotide
  Target: LAMA2; (-) strand; PAM type: YTN; PAM sequence: TTG
gattgatggtcaacagctgt

SEQ ID NO: 293235 - DNA, 20 bp, Artificial Sequence
  Description of Artificial Sequence: Synthetic oligonucleotide
  Target: LAMA2; (-) strand; PAM type: YTN; PAM sequence: TTA
atcaaataaaggttggattg

SEQ ID NO: 293236 - DNA, 20 bp, Artificial Sequence
  Description of Artificial Sequence: Synthetic oligonucleotide
  Target: LAMA2; (-) strand; PAM type: YTN; PAM sequence: CTT
aatcaaataaaggttggatt

SEQ ID NO: 293237 - DNA, 20 bp, Artificial Sequence
  Description of Artificial Sequence: Synthetic oligonucleotide
  Target: LAMA2; (-) strand; PAM type: YTN; PAM sequence: CTG
agcttaatcaaataaaggtt

SEQ ID NO: 293238 - DNA, 20 bp, Artificial Sequence
  Description of Artificial Sequence: Synthetic oligonucleotide
  Target: LAMA2; (-) strand; PAM type: YTN; PAM sequence: CTA
tatactgagcttaatcaaat

SEQ ID NO: 293239 - DNA, 20 bp, Artificial Sequence
  Description of Artificial Sequence: Synthetic oligonucleotide
  Target: LAMA2; (-) strand; PAM type: YTN; PAM sequence: TTC
cagtgatgtactatatactg

SEQ ID NO: 293240 - DNA, 20 bp, Artificial Sequence
  Description of Artificial Sequence: Synthetic oligonucleotide
  Target: LAMA2; (-) strand; PAM type: YTN; PAM sequence: TTT
ccagtgatgtactatatact

SEQ ID NO: 293241 - DNA, 20 bp, Artificial Sequence
  Description of Artificial Sequence: Synthetic oligonucleotide
  Target: LAMA2; (-) strand; PAM type: YTN; PAM sequence: CTG
gtttccagtgatgtactata

SEQ ID NO: 293242 - DNA, 20 bp, Artificial Sequence
  Description of Artificial Sequence: Synthetic oligonucleotide
  Target: LAMA2; (-) strand; PAM type: YTN; PAM sequence: CTA
aatgactggtttccagtgat

SEQ ID NO: 293243 - DNA, 20 bp, Artificial Sequence
  Description of Artificial Sequence: Synthetic oligonucleotide
  Target: LAMA2; (-) strand; PAM type: YTN; PAM sequence: TTA
actaaatgactggtttccag

SEQ ID NO: 293244 - DNA, 20 bp, Artificial Sequence
  Description of Artificial Sequence: Synthetic oligonucleotide
  Target: LAMA2; (-) strand; PAM type: YTN; PAM sequence: TTA
tatggccaattaactaaatg

SEQ ID NO: 293245 - DNA, 20 bp, Artificial Sequence
  Description of Artificial Sequence: Synthetic oligonucleotide
  Target: LAMA2; (-) strand; PAM type: YTN; PAM sequence: TTT
atatggccaattaactaaat

SEQ ID NO: 293246 - DNA, 20 bp, Artificial Sequence
  Description of Artificial Sequence: Synthetic oligonucleotide
  Target: LAMA2; (-) strand; PAM type: YTN; PAM sequence: TTC
gtttatatggccaattaact

SEQ ID NO: 293247 - DNA, 20 bp, Artificial Sequence
  Description of Artificial Sequence: Synthetic oligonucleotide
  Target: LAMA2; (-) strand; PAM type: YTN; PAM sequence: CTG
ttcgtttatatggccaatta

SEQ ID NO: 293248 - DNA, 20 bp, Artificial Sequence
  Description of Artificial Sequence: Synthetic oligonucleotide
  Target: LAMA2; (-) strand; PAM type: YTN; PAM sequence: TTA
acaatgaatggcaaaactgt

SEQ ID NO: 293249 - DNA, 20 bp, Artificial Sequence
  Description of Artificial Sequence: Synthetic oligonucleotide
  Target: LAMA2; (-) strand; PAM type: YTN; PAM sequence: CTG
taattaacaatgaatggcaa

SEQ ID NO: 293250 - DNA, 20 bp, Artificial Sequence
  Description of Artificial Sequence: Synthetic oligonucleotide
  Target: LAMA2; (-) strand; PAM type: YTN; PAM sequence: TTA
tcctgtaattaacaatgaat

SEQ ID NO: 293251 - DNA, 20 bp, Artificial Sequence
  Description of Artificial Sequence: Synthetic oligonucleotide
  Target: LAMA2; (-) strand; PAM type: YTN; PAM sequence: CTA
atatgtcatatattatcctg

SEQ ID NO: 293252 - DNA, 20 bp, Artificial Sequence
  Description of Artificial Sequence: Synthetic oligonucleotide
  Target: LAMA2; (-) strand; PAM type: YTN; PAM sequence: CTA
cacactaatatgtcatatat

SEQ ID NO: 293253 - DNA, 20 bp, Artificial Sequence
  Description of Artificial Sequence: Synthetic oligonucleotide
  Target: LAMA2; (-) strand; PAM type: YTN; PAM sequence: TTC
agtgactacacactaatatg

SEQ ID NO: 293254 - DNA, 20 bp, Artificial Sequence
  Description of Artificial Sequence: Synthetic oligonucleotide
  Target: LAMA2; (-) strand; PAM type: YTN; PAM sequence: TTG
gcacagagttcagtgactac

SEQ ID NO: 293255 - DNA, 20 bp, Artificial Sequence
  Description of Artificial Sequence: Synthetic oligonucleotide
  Target: LAMA2; (-) strand; PAM type: YTN; PAM sequence: TTT
ggcacagagttcagtgacta

SEQ ID NO: 293256 - DNA, 20 bp, Artificial Sequence
  Description of Artificial Sequence: Synthetic oligonucleotide
  Target: LAMA2; (-) strand; PAM type: YTN; PAM sequence: TTT
tggcacagagttcagtgact

SEQ ID NO: 293257 - DNA, 20 bp, Artificial Sequence
  Description of Artificial Sequence: Synthetic oligonucleotide
  Target: LAMA2; (-) strand; PAM type: YTN; PAM sequence: CTG
ttttggcacagagttcagtg

SEQ ID NO: 293258 - DNA, 20 bp, Artificial Sequence
  Description of Artificial Sequence: Synthetic oligonucleotide
  Target: LAMA2; (-) strand; PAM type: YTN; PAM sequence: TTA
ctgttttggcacagagttca

SEQ ID NO: 293259 - DNA, 20 bp, Artificial Sequence
  Description of Artificial Sequence: Synthetic oligonucleotide
  Target: LAMA2; (-) strand; PAM type: YTN; PAM sequence: TTA
tggtagcaaatgtattactg

SEQ ID NO: 293260 - DNA, 20 bp, Artificial Sequence
  Description of Artificial Sequence: Synthetic oligonucleotide
  Target: LAMA2; (-) strand; PAM type: YTN; PAM sequence: TTA
gagtgccgaatgagccatta

SEQ ID NO: 293261 - DNA, 20 bp, Artificial Sequence
  Description of Artificial Sequence: Synthetic oligonucleotide
  Target: LAMA2; (-) strand; PAM type: YTN; PAM sequence: CTT
agagtgccgaatgagccatt

SEQ ID NO: 293262 - DNA, 20 bp, Artificial Sequence
  Description of Artificial Sequence: Synthetic oligonucleotide
  Target: LAMA2; (-) strand; PAM type: YTN; PAM sequence: TTA
accttagagtgccgaatgag

SEQ ID NO: 293263 - DNA, 20 bp, Artificial Sequence
  Description of Artificial Sequence: Synthetic oligonucleotide
  Target: LAMA2; (-) strand; PAM type: YTN; PAM sequence: TTT
aaccttagagtgccgaatga

SEQ ID NO: 293264 - DNA, 20 bp, Artificial Sequence
  Description of Artificial Sequence: Synthetic oligonucleotide
  Target: LAMA2; (-) strand; PAM type: YTN; PAM sequence: TTT
taaccttagagtgccgaatg

SEQ ID NO: 293265 - DNA, 20 bp, Artificial Sequence
  Description of Artificial Sequence: Synthetic oligonucleotide
  Target: LAMA2; (-) strand; PAM type: YTN; PAM sequence: TTG
cattttaaccttagagtgcc

SEQ ID NO: 293266 - DNA, 20 bp, Artificial Sequence
  Description of Artificial Sequence: Synthetic oligonucleotide
  Target: LAMA2; (-) strand; PAM type: YTN; PAM sequence: TTA
tagagtagattgcattttaa

SEQ ID NO: 293267 - DNA, 20 bp, Artificial Sequence
  Description of Artificial Sequence: Synthetic oligonucleotide
  Target: LAMA2; (-) strand; PAM type: YTN; PAM sequence: CTT
atagagtagattgcatttta

SEQ ID NO: 293268 - DNA, 20 bp, Artificial Sequence
  Description of Artificial Sequence: Synthetic oligonucleotide
  Target: LAMA2; (-) strand; PAM type: YTN; PAM sequence: TTG
cttatagagtagattgcatt

SEQ ID NO: 293269 - DNA, 20 bp, Artificial Sequence
  Description of Artificial Sequence: Synthetic oligonucleotide
  Target: LAMA2; (-) strand; PAM type: YTN; PAM sequence: CTT
gcttatagagtagattgcat

SEQ ID NO: 293270 - DNA, 20 bp, Artificial Sequence
  Description of Artificial Sequence: Synthetic oligonucleotide
  Target: LAMA2; (-) strand; PAM type: YTN; PAM sequence: TTA
atgtggcacttgcttataga

SEQ ID NO: 293271 - DNA, 20 bp, Artificial Sequence
  Description of Artificial Sequence: Synthetic oligonucleotide
  Target: LAMA2; (-) strand; PAM type: YTN; PAM sequence: TTT
aatgtggcacttgcttatag

SEQ ID NO: 293272 - DNA, 20 bp, Artificial Sequence
  Description of Artificial Sequence: Synthetic oligonucleotide
  Target: LAMA2; (-) strand; PAM type: YTN; PAM sequence: CTG
gtcaatcagtttaatgtggc

SEQ ID NO: 293273 - DNA, 20 bp, Artificial Sequence
  Description of Artificial Sequence: Synthetic oligonucleotide
  Target: LAMA2; (-) strand; PAM type: YTN; PAM sequence: CTC
tggtcaatcagtttaatgtg

SEQ ID NO: 293274 - DNA, 20 bp, Artificial Sequence
  Description of Artificial Sequence: Synthetic oligonucleotide
  Target: LAMA2; (-) strand; PAM type: YTN; PAM sequence: TTG
cgatctctggtcaatcagtt

SEQ ID NO: 293275 - DNA, 20 bp, Artificial Sequence
  Description of Artificial Sequence: Synthetic oligonucleotide
  Target: LAMA2; (-) strand; PAM type: YTN; PAM sequence: CTT
gcgatctctggtcaatcagt

SEQ ID NO: 293276 - DNA, 20 bp, Artificial Sequence
  Description of Artificial Sequence: Synthetic oligonucleotide
  Target: LAMA2; (-) strand; PAM type: YTN; PAM sequence: CTC
atggtcacttgcgatctctg

SEQ ID NO: 293277 - DNA, 20 bp, Artificial Sequence
  Description of Artificial Sequence: Synthetic oligonucleotide
  Target: LAMA2; (-) strand; PAM type: YTN; PAM sequence: TTC
tcatggtcacttgcgatctc

SEQ ID NO: 293278 - DNA, 20 bp, Artificial Sequence
  Description of Artificial Sequence: Synthetic oligonucleotide
  Target: LAMA2; (-) strand; PAM type: YTN; PAM sequence: CTG
ggtgaagttctcatggtcac

SEQ ID NO: 293279 - DNA, 20 bp, Artificial Sequence
  Description of Artificial Sequence: Synthetic oligonucleotide
  Target: LAMA2; (-) strand; PAM type: YTN; PAM sequence: TTC
tgggtgaagttctcatggtc

SEQ ID NO: 293280 - DNA, 20 bp, Artificial Sequence
  Description of Artificial Sequence: Synthetic oligonucleotide
  Target: LAMA2; (-) strand; PAM type: YTN; PAM sequence: TTT
ctgggtgaagttctcatggt

SEQ ID NO: 293281 - DNA, 20 bp, Artificial Sequence
  Description of Artificial Sequence: Synthetic oligonucleotide
  Target: LAMA2; (-) strand; PAM type: YTN; PAM sequence: TTT
tctgggtgaagttctcatgg

SEQ ID NO: 293282 - DNA, 20 bp, Artificial Sequence
  Description of Artificial Sequence: Synthetic oligonucleotide
  Target: LAMA2; (-) strand; PAM type: YTN; PAM sequence: TTT
ttctgggtgaagttctcatg

SEQ ID NO: 293283 - DNA, 20 bp, Artificial Sequence
  Description of Artificial Sequence: Synthetic oligonucleotide
  Target: LAMA2; (-) strand; PAM type: YTN; PAM sequence: TTT
tttctgggtgaagttctcat

SEQ ID NO: 293284 - DNA, 20 bp, Artificial Sequence
  Description of Artificial Sequence: Synthetic oligonucleotide
  Target: LAMA2; (-) strand; PAM type: YTN; PAM sequence: TTA
aaaattttttctgggtgaag

SEQ ID NO: 293285 - DNA, 20 bp, Artificial Sequence
  Description of Artificial Sequence: Synthetic oligonucleotide
  Target: LAMA2; (-) strand; PAM type: YTN; PAM sequence: CTA
gtatgtgacacaaatcatgc

SEQ ID NO: 293286 - DNA, 20 bp, Artificial Sequence
  Description of Artificial Sequence: Synthetic oligonucleotide
  Target: LAMA2; (-) strand; PAM type: YTN; PAM sequence: TTG
tctagtatgtgacacaaatc

SEQ ID NO: 293287 - DNA, 20 bp, Artificial Sequence
  Description of Artificial Sequence: Synthetic oligonucleotide
  Target: LAMA2; (-) strand; PAM type: YTN; PAM sequence: TTT
gtctagtatgtgacacaaat

SEQ ID NO: 293288 - DNA, 20 bp, Artificial Sequence
  Description of Artificial Sequence: Synthetic oligonucleotide
  Target: LAMA2; (-) strand; PAM type: YTN; PAM sequence: CTT
tgtctagtatgtgacacaaa

SEQ ID NO: 293289 - DNA, 20 bp, Artificial Sequence
  Description of Artificial Sequence: Synthetic oligonucleotide
  Target: LAMA2; (-) strand; PAM type: YTN; PAM sequence: TTC
agaacaatgaaaacaaatca

SEQ ID NO: 293290 - DNA, 20 bp, Artificial Sequence
  Description of Artificial Sequence: Synthetic oligonucleotide
  Target: LAMA2; (-) strand; PAM type: YTN; PAM sequence: CTC
acatacattcagaacaatga

SEQ ID NO: 293291 - DNA, 20 bp, Artificial Sequence
  Description of Artificial Sequence: Synthetic oligonucleotide
  Target: LAMA2; (-) strand; PAM type: YTN; PAM sequence: TTA
cagatctcacatacattcag

SEQ ID NO: 293292 - DNA, 20 bp, Artificial Sequence
  Description of Artificial Sequence: Synthetic oligonucleotide
  Target: LAMA2; (-) strand; PAM type: YTN; PAM sequence: TTA
ttacagatctcacatacatt

SEQ ID NO: 293293 - DNA, 20 bp, Artificial Sequence
  Description of Artificial Sequence: Synthetic oligonucleotide
  Target: LAMA2; (-) strand; PAM type: YTN; PAM sequence: CTG
tgatgaaaggatgttattac

SEQ ID NO: 293294 - DNA, 20 bp, Artificial Sequence
  Description of Artificial Sequence: Synthetic oligonucleotide
  Target: LAMA2; (-) strand; PAM type: YTN; PAM sequence: CTC
atctgtgatgaaaggatgtt

SEQ ID NO: 293295 - DNA, 20 bp, Artificial Sequence
  Description of Artificial Sequence: Synthetic oligonucleotide
  Target: LAMA2; (-) strand; PAM type: YTN; PAM sequence: TTC
tcatctgtgatgaaaggatg

SEQ ID NO: 293296 - DNA, 20 bp, Artificial Sequence
  Description of Artificial Sequence: Synthetic oligonucleotide
  Target: LAMA2; (-) strand; PAM type: YTN; PAM sequence: TTT
ctcatctgtgatgaaaggat

SEQ ID NO: 293297 - DNA, 20 bp, Artificial Sequence
  Description of Artificial Sequence: Synthetic oligonucleotide
  Target: LAMA2; (-) strand; PAM type: YTN; PAM sequence: TTT
tctcatctgtgatgaaagga

SEQ ID NO: 293298 - DNA, 20 bp, Artificial Sequence
  Description of Artificial Sequence: Synthetic oligonucleotide
  Target: LAMA2; (-) strand; PAM type: YTN; PAM sequence: TTA
atattttctcatctgtgatg

SEQ ID NO: 293299 - DNA, 20 bp, Artificial Sequence
  Description of Artificial Sequence: Synthetic oligonucleotide
  Target: LAMA2; (-) strand; PAM type: YTN; PAM sequence: TTA
gttaatattttctcatctgt

SEQ ID NO: 293300 - DNA, 20 bp, Artificial Sequence
  Description of Artificial Sequence: Synthetic oligonucleotide
  Target: LAMA2; (-) strand; PAM type: YTN; PAM sequence: TTG
ggcaggttagttaatatttt

SEQ ID NO: 293301 - DNA, 20 bp, Artificial Sequence
  Description of Artificial Sequence: Synthetic oligonucleotide
  Target: LAMA2; (-) strand; PAM type: YTN; PAM sequence: TTT
gggcaggttagttaatattt

SEQ ID NO: 293302 - DNA, 20 bp, Artificial Sequence
  Description of Artificial Sequence: Synthetic oligonucleotide
  Target: LAMA2; (-) strand; PAM type: YTN; PAM sequence: TTT
tgggcaggttagttaatatt

SEQ ID NO: 293303 - DNA, 20 bp, Artificial Sequence
  Description of Artificial Sequence: Synthetic oligonucleotide
  Target: LAMA2; (-) strand; PAM type: YTN; PAM sequence: TTG
tagtacatgattttgggcag

SEQ ID NO: 293304 - DNA, 20 bp, Artificial Sequence
  Description of Artificial Sequence: Synthetic oligonucleotide
  Target: LAMA2; (-) strand; PAM type: YTN; PAM sequence: TTT
gtagtacatgattttgggca

SEQ ID NO: 293305 - DNA, 20 bp, Artificial Sequence
  Description of Artificial Sequence: Synthetic oligonucleotide
  Target: LAMA2; (-) strand; PAM type: YTN; PAM sequence: TTA
tttgtagtacatgattttgg

SEQ ID NO: 293306 - DNA, 20 bp, Artificial Sequence
  Description of Artificial Sequence: Synthetic oligonucleotide
  Target: LAMA2; (-) strand; PAM type: YTN; PAM sequence: CTG
ttatttgtagtacatgattt

SEQ ID NO: 293307 - DNA, 20 bp, Artificial Sequence
  Description of Artificial Sequence: Synthetic oligonucleotide
  Target: LAMA2; (-) strand; PAM type: YTN; PAM sequence: CTG
gtcctgttatttgtagtaca

SEQ ID NO: 293308 - DNA, 20 bp, Artificial Sequence
  Description of Artificial Sequence: Synthetic oligonucleotide
  Target: LAMA2; (-) strand; PAM type: YTN; PAM sequence: TTA
atacctggtcctgttatttg

SEQ ID NO: 293309 - DNA, 20 bp, Artificial Sequence
  Description of Artificial Sequence: Synthetic oligonucleotide
  Target: LAMA2; (-) strand; PAM type: YTN; PAM sequence: TTT
aatacctggtcctgttattt

SEQ ID NO: 293310 - DNA, 20 bp, Artificial Sequence
  Description of Artificial Sequence: Synthetic oligonucleotide
  Target: LAMA2; (-) strand; PAM type: YTN; PAM sequence: CTC
atttaatacctggtcctgtt

SEQ ID NO: 293311 - DNA, 20 bp, Artificial Sequence
  Description of Artificial Sequence: Synthetic oligonucleotide
  Target: LAMA2; (-) strand; PAM type: YTN; PAM sequence: TTA
agtcaaatatatcatctcat

SEQ ID NO: 293312 - DNA, 20 bp, Artificial Sequence
  Description of Artificial Sequence: Synthetic oligonucleotide
  Target: LAMA2; (-) strand; PAM type: YTN; PAM sequence: TTT
aagtcaaatatatcatctca

SEQ ID NO: 293313 - DNA, 20 bp, Artificial Sequence
  Description of Artificial Sequence: Synthetic oligonucleotide
  Target: LAMA2; (-) strand; PAM type: YTN; PAM sequence: CTG
tgcatagatggaggtattta

SEQ ID NO: 293314 - DNA, 20 bp, Artificial Sequence
  Description of Artificial Sequence: Synthetic oligonucleotide
  Target: LAMA2; (-) strand; PAM type: YTN; PAM sequence: TTG
gctgtgcatagatggaggta

SEQ ID NO: 293315 - DNA, 20 bp, Artificial Sequence
  Description of Artificial Sequence: Synthetic oligonucleotide
  Target: LAMA2; (-) strand; PAM type: YTN; PAM sequence: CTA
ttggctgtgcatagatggag

SEQ ID NO: 293316 - DNA, 20 bp, Artificial Sequence
  Description of Artificial Sequence: Synthetic oligonucleotide
  Target: LAMA2; (-) strand; PAM type: YTN; PAM sequence: TTA
tggtcacacaaaaatgtaag

SEQ ID NO: 293317 - DNA, 20 bp, Artificial Sequence
  Description of Artificial Sequence: Synthetic oligonucleotide
  Target: LAMA2; (-) strand; PAM type: YTN; PAM sequence: TTT
atggtcacacaaaaatgtaa

SEQ ID NO: 293318 - DNA, 20 bp, Artificial Sequence
  Description of Artificial Sequence: Synthetic oligonucleotide
  Target: LAMA2; (-) strand; PAM type: YTN; PAM sequence: CTT
tatggtcacacaaaaatgta

SEQ ID NO: 293319 - DNA, 20 bp, Artificial Sequence
  Description of Artificial Sequence: Synthetic oligonucleotide
  Target: LAMA2; (-) strand; PAM type: YTN; PAM sequence: TTA
gtaatataaacctttatggt

SEQ ID NO: 293320 - DNA, 20 bp, Artificial Sequence
  Description of Artificial Sequence: Synthetic oligonucleotide
  Target: LAMA2; (-) strand; PAM type: YTN; PAM sequence: TTT
agtaatataaacctttatgg

SEQ ID NO: 293321 - DNA, 20 bp, Artificial Sequence
  Description of Artificial Sequence: Synthetic oligonucleotide
  Target: LAMA2; (-) strand; PAM type: YTN; PAM sequence: TTA
ataatcatacatcataatca

SEQ ID NO: 293322 - DNA, 20 bp, Artificial Sequence
  Description of Artificial Sequence: Synthetic oligonucleotide
  Target: LAMA2; (-) strand; PAM type: YTN; PAM sequence: CTC
caaattaataatcatacatc

SEQ ID NO: 293323 - DNA, 20 bp, Artificial Sequence
  Description of Artificial Sequence: Synthetic oligonucleotide
  Target: LAMA2; (-) strand; PAM type: YTN; PAM sequence: TTG
ggataatgcaaatatctcca

SEQ ID NO: 293324 - DNA, 20 bp, Artificial Sequence
  Description of Artificial Sequence: Synthetic oligonucleotide
  Target: LAMA2; (-) strand; PAM type: YTN; PAM sequence: CTG
aaaagtgttgggataatgca

SEQ ID NO: 293325 - DNA, 20 bp, Artificial Sequence
  Description of Artificial Sequence: Synthetic oligonucleotide
  Target: LAMA2; (-) strand; PAM type: YTN; PAM sequence: CTG
aaaatctgaaaagtgttggg

SEQ ID NO: 293326 - DNA, 20 bp, Artificial Sequence
  Description of Artificial Sequence: Synthetic oligonucleotide
  Target: LAMA2; (-) strand; PAM type: YTN; PAM sequence: CTG
acatgcatagtctgaaaatc

SEQ ID NO: 293327 - DNA, 20 bp, Artificial Sequence
  Description of Artificial Sequence: Synthetic oligonucleotide
  Target: LAMA2; (-) strand; PAM type: YTN; PAM sequence: TTA
ggaaaagaaatgatgactga

SEQ ID NO: 293328 - DNA, 20 bp, Artificial Sequence
  Description of Artificial Sequence: Synthetic oligonucleotide
  Target: LAMA2; (-) strand; PAM type: YTN; PAM sequence: TTT
aggaaaagaaatgatgactg

SEQ ID NO: 293329 - DNA, 20 bp, Artificial Sequence
  Description of Artificial Sequence: Synthetic oligonucleotide
  Target: LAMA2; (-) strand; PAM type: YTN; PAM sequence: TTT
taggaaaagaaatgatgact

SEQ ID NO: 293330 - DNA, 20 bp, Artificial Sequence
  Description of Artificial Sequence: Synthetic oligonucleotide
  Target: LAMA2; (-) strand; PAM type: YTN; PAM sequence: TTG
tccaggattttaggaaaaga

SEQ ID NO: 293331 - DNA, 20 bp, Artificial Sequence
  Description of Artificial Sequence: Synthetic oligonucleotide
  Target: LAMA2; (-) strand; PAM type: YTN; PAM sequence: TTT
gtccaggattttaggaaaag

SEQ ID NO: 293332 - DNA, 20 bp, Artificial Sequence
  Description of Artificial Sequence: Synthetic oligonucleotide
  Target: LAMA2; (-) strand; PAM type: YTN; PAM sequence: TTT
tgtccaggattttaggaaaa

SEQ ID NO: 293333 - DNA, 20 bp, Artificial Sequence
  Description of Artificial Sequence: Synthetic oligonucleotide
  Target: LAMA2; (-) strand; PAM type: YTN; PAM sequence: CTA
tcattttgtccaggatttta

SEQ ID NO: 293334 - DNA, 20 bp, Artificial Sequence
  Description of Artificial Sequence: Synthetic oligonucleotide
  Target: LAMA2; (-) strand; PAM type: YTN; PAM sequence: TTA
aagctatcattttgtccagg

SEQ ID NO: 293335 - DNA, 20 bp, Artificial Sequence
  Description of Artificial Sequence: Synthetic oligonucleotide
  Target: LAMA2; (-) strand; PAM type: YTN; PAM sequence: TTG
tgaggcggtattaaagctat

SEQ ID NO: 293336 - DNA, 20 bp, Artificial Sequence
  Description of Artificial Sequence: Synthetic oligonucleotide
  Target: LAMA2; (-) strand; PAM type: YTN; PAM sequence: TTT
gtgaggcggtattaaagcta

SEQ ID NO: 293337 - DNA, 20 bp, Artificial Sequence
  Description of Artificial Sequence: Synthetic oligonucleotide
  Target: LAMA2; (-) strand; PAM type: YTN; PAM sequence: TTT
tgtgaggcggtattaaagct

SEQ ID NO: 293338 - DNA, 20 bp, Artificial Sequence
  Description of Artificial Sequence: Synthetic oligonucleotide
  Target: LAMA2; (-) strand; PAM type: YTN; PAM sequence: TTA
ttttgtgaggcggtattaaa

SEQ ID NO: 293339 - DNA, 20 bp, Artificial Sequence
  Description of Artificial Sequence: Synthetic oligonucleotide
  Target: LAMA2; (-) strand; PAM type: YTN; PAM sequence: TTG
gtgaaaatccaattattttg

SEQ ID NO: 293340 - DNA, 20 bp, Artificial Sequence
  Description of Artificial Sequence: Synthetic oligonucleotide
  Target: LAMA2; (-) strand; PAM type: YTN; PAM sequence: TTT
ggtgaaaatccaattatttt

SEQ ID NO: 293341 - DNA, 20 bp, Artificial Sequence
  Description of Artificial Sequence: Synthetic oligonucleotide
  Target: LAMA2; (-) strand; PAM type: YTN; PAM sequence: TTG
gcccccagtttggtgaaaat

SEQ ID NO: 293342 - DNA, 20 bp, Artificial Sequence
  Description of Artificial Sequence: Synthetic oligonucleotide
  Target: LAMA2; (-) strand; PAM type: YTN; PAM sequence: CTT
ggcccccagtttggtgaaaa

SEQ ID NO: 293343 - DNA, 20 bp, Artificial Sequence
  Description of Artificial Sequence: Synthetic oligonucleotide
  Target: LAMA2; (-) strand; PAM type: YTN; PAM sequence: TTG
agaagcttggcccccagttt

SEQ ID NO: 293344 - DNA, 20 bp, Artificial Sequence
  Description of Artificial Sequence: Synthetic oligonucleotide
  Target: LAMA2; (-) strand; PAM type: YTN; PAM sequence: CTT
gagaagcttggcccccagtt

SEQ ID NO: 293345 - DNA, 20 bp, Artificial Sequence
  Description of Artificial Sequence: Synthetic oligonucleotide
  Target: LAMA2; (-) strand; PAM type: YTN; PAM sequence: TTC
ttgagaagcttggcccccag

SEQ ID NO: 293346 - DNA, 20 bp, Artificial Sequence
  Description of Artificial Sequence: Synthetic oligonucleotide
  Target: LAMA2; (-) strand; PAM type: YTN; PAM sequence: CTT
cttgagaagcttggccccca

SEQ ID NO: 293347 - DNA, 20 bp, Artificial Sequence
  Description of Artificial Sequence: Synthetic oligonucleotide
  Target: LAMA2; (-) strand; PAM type: YTN; PAM sequence: TTC
cagatgaaggggtggaaggg

SEQ ID NO: 293348 - DNA, 20 bp, Artificial Sequence
  Description of Artificial Sequence: Synthetic oligonucleotide
  Target: LAMA2; (-) strand; PAM type: YTN; PAM sequence: TTT
ccagatgaaggggtggaagg

SEQ ID NO: 293349 - DNA, 20 bp, Artificial Sequence
  Description of Artificial Sequence: Synthetic oligonucleotide
  Target: LAMA2; (-) strand; PAM type: YTN; PAM sequence: TTT
tccagatgaaggggtggaag

SEQ ID NO: 293350 - DNA, 20 bp, Artificial Sequence
  Description of Artificial Sequence: Synthetic oligonucleotide
  Target: LAMA2; (-) strand; PAM type: YTN; PAM sequence: TTT
ttccagatgaaggggtggaa

SEQ ID NO: 293351 - DNA, 20 bp, Artificial Sequence
  Description of Artificial Sequence: Synthetic oligonucleotide
  Target: LAMA2; (-) strand; PAM type: YTN; PAM sequence: CTA
aagggagatttttccagatg

SEQ ID NO: 293352 - DNA, 20 bp, Artificial Sequence
  Description of Artificial Sequence: Synthetic oligonucleotide
  Target: LAMA2; (-) strand; PAM type: YTN; PAM sequence: TTA
gataccaaagtgactaaagg

SEQ ID NO: 293353 - DNA, 20 bp, Artificial Sequence
  Description of Artificial Sequence: Synthetic oligonucleotide
  Target: LAMA2; (-) strand; PAM type: YTN; PAM sequence: CTG
gagtgccaagaaattagata

SEQ ID NO: 293354 - DNA, 20 bp, Artificial Sequence
  Description of Artificial Sequence: Synthetic oligonucleotide
  Target: LAMA2; (-) strand; PAM type: YTN; PAM sequence: CTG
gccaccaaggcggatgccag

SEQ ID NO: 293355 - DNA, 20 bp, Artificial Sequence
  Description of Artificial Sequence: Synthetic oligonucleotide
  Target: LAMA2; (-) strand; PAM type: YTN; PAM sequence: CTG
ctggccaccaaggcggatgc

SEQ ID NO: 293356 - DNA, 20 bp, Artificial Sequence
  Description of Artificial Sequence: Synthetic oligonucleotide
  Target: LAMA2; (-) strand; PAM type: YTN; PAM sequence: TTG
tccagtaagaactgctggcc

SEQ ID NO: 293357 - DNA, 20 bp, Artificial Sequence
  Description of Artificial Sequence: Synthetic oligonucleotide
  Target: LAMA2; (-) strand; PAM type: YTN; PAM sequence: TTT
gtccagtaagaactgctggc

SEQ ID NO: 293358 - DNA, 20 bp, Artificial Sequence
  Description of Artificial Sequence: Synthetic oligonucleotide
  Target: LAMA2; (-) strand; PAM type: YTN; PAM sequence: TTT
tgtccagtaagaactgctgg

SEQ ID NO: 293359 - DNA, 20 bp, Artificial Sequence
  Description of Artificial Sequence: Synthetic oligonucleotide
  Target: LAMA2; (-) strand; PAM type: YTN; PAM sequence: TTT
ttgtccagtaagaactgctg

SEQ ID NO: 293360 - DNA, 20 bp, Artificial Sequence
  Description of Artificial Sequence: Synthetic oligonucleotide
  Target: LAMA2; (-) strand; PAM type: YTN; PAM sequence: TTG
atgtttttgtccagtaagaa

SEQ ID NO: 293361 - DNA, 20 bp, Artificial Sequence
  Description of Artificial Sequence: Synthetic oligonucleotide
  Target: LAMA2; (-) strand; PAM type: YTN; PAM sequence: TTT
gatgtttttgtccagtaaga

SEQ ID NO: 293362 - DNA, 20 bp, Artificial Sequence
  Description of Artificial Sequence: Synthetic oligonucleotide
  Target: LAMA2; (-) strand; PAM type: YTN; PAM sequence: TTA
gggtttgatgtttttgtcca

SEQ ID NO: 293363 - DNA, 20 bp, Artificial Sequence
  Description of Artificial Sequence: Synthetic oligonucleotide
  Target: LAMA2; (-) strand; PAM type: YTN; PAM sequence: CTT
agggtttgatgtttttgtcc

SEQ ID NO: 293364 - DNA, 20 bp, Artificial Sequence
  Description of Artificial Sequence: Synthetic oligonucleotide
  Target: LAMA2; (-) strand; PAM type: YTN; PAM sequence: CTC
ttagggtttgatgtttttgt

SEQ ID NO: 293365 - DNA, 20 bp, Artificial Sequence
  Description of Artificial Sequence: Synthetic oligonucleotide
  Target: LAMA2; (-) strand; PAM type: YTN; PAM sequence: TTC
aggctcttagggtttgatgt

SEQ ID NO: 293366 - DNA, 20 bp, Artificial Sequence
  Description of Artificial Sequence: Synthetic oligonucleotide
  Target: LAMA2; (-) strand; PAM type: YTN; PAM sequence: CTT
caggctcttagggtttgatg

SEQ ID NO: 293367 - DNA, 20 bp, Artificial Sequence
  Description of Artificial Sequence: Synthetic oligonucleotide
  Target: LAMA2; (-) strand; PAM type: YTN; PAM sequence: CTA
cttcaggctcttagggtttg

SEQ ID NO: 293368 - DNA, 20 bp, Artificial Sequence
  Description of Artificial Sequence: Synthetic oligonucleotide
  Target: LAMA2; (-) strand; PAM type: YTN; PAM sequence: TTA
agtaactacttcaggctctt

SEQ ID NO: 293369 - DNA, 20 bp, Artificial Sequence
  Description of Artificial Sequence: Synthetic oligonucleotide
  Target: LAMA2; (-) strand; PAM type: YTN; PAM sequence: CTT
aagtaactacttcaggctct

SEQ ID NO: 293370 - DNA, 20 bp, Artificial Sequence
  Description of Artificial Sequence: Synthetic oligonucleotide
  Target: LAMA2; (-) strand; PAM type: YTN; PAM sequence: TTG
cttaagtaactacttcaggc

SEQ ID NO: 293371 - DNA, 20 bp, Artificial Sequence
  Description of Artificial Sequence: Synthetic oligonucleotide
  Target: LAMA2; (-) strand; PAM type: YTN; PAM sequence: TTT
gcttaagtaactacttcagg

SEQ ID NO: 293372 - DNA, 20 bp, Artificial Sequence
  Description of Artificial Sequence: Synthetic oligonucleotide
  Target: LAMA2; (-) strand; PAM type: YTN; PAM sequence: CTA
tttgcttaagtaactacttc

SEQ ID NO: 293373 - DNA, 20 bp, Artificial Sequence
  Description of Artificial Sequence: Synthetic oligonucleotide
  Target: LAMA2; (-) strand; PAM type: YTN; PAM sequence: TTG
tcctatttgcttaagtaact

SEQ ID NO: 293374 - DNA, 20 bp, Artificial Sequence
  Description of Artificial Sequence: Synthetic oligonucleotide
  Target: LAMA2; (-) strand; PAM type: YTN; PAM sequence: CTT
gtcctatttgcttaagtaac

SEQ ID NO: 293375 - DNA, 20 bp, Artificial Sequence
  Description of Artificial Sequence: Synthetic oligonucleotide
  Target: LAMA2; (-) strand; PAM type: YTN; PAM sequence: TTG
cttgtcctatttgcttaagt

SEQ ID NO: 293376 - DNA, 20 bp, Artificial Sequence
  Description of Artificial Sequence: Synthetic oligonucleotide
  Target: LAMA2; (-) strand; PAM type: YTN; PAM sequence: TTC
agttgcttgtcctatttgct

SEQ ID NO: 293377 - DNA, 20 bp, Artificial Sequence
  Description of Artificial Sequence: Synthetic oligonucleotide
  Target: LAMA2; (-) strand; PAM type: YTN; PAM sequence: CTC
agttcagttgcttgtcctat

SEQ ID NO: 293378 - DNA, 20 bp, Artificial Sequence
  Description of Artificial Sequence: Synthetic oligonucleotide
  Target: LAMA2; (-) strand; PAM type: YTN; PAM sequence: TTC
ccagaagaaaaactcagttc

SEQ ID NO: 293379 - DNA, 20 bp, Artificial Sequence
  Description of Artificial Sequence: Synthetic oligonucleotide
  Target: LAMA2; (-) strand; PAM type: YTN; PAM sequence: TTT
cccagaagaaaaactcagtt

SEQ ID NO: 293380 - DNA, 20 bp, Artificial Sequence
  Description of Artificial Sequence: Synthetic oligonucleotide
  Target: LAMA2; (-) strand; PAM type: YTN; PAM sequence: CTT
tcccagaagaaaaactcagt

SEQ ID NO: 293381 - DNA, 20 bp, Artificial Sequence
  Description of Artificial Sequence: Synthetic oligonucleotide
  Target: LAMA2; (-) strand; PAM type: YTN; PAM sequence: CTG
tgtgaagaaagctttcccag

SEQ ID NO: 293382 - DNA, 20 bp, Artificial Sequence
  Description of Artificial Sequence: Synthetic oligonucleotide
  Target: LAMA2; (-) strand; PAM type: YTN; PAM sequence: CTG
tacctgtgtgaagaaagctt

SEQ ID NO: 293383 - DNA, 20 bp, Artificial Sequence
  Description of Artificial Sequence: Synthetic oligonucleotide
  Target: LAMA2; (-) strand; PAM type: YTN; PAM sequence: TTC
tgtacctgtgtgaagaaagc

SEQ ID NO: 293384 - DNA, 20 bp, Artificial Sequence
  Description of Artificial Sequence: Synthetic oligonucleotide
  Target: LAMA2; (-) strand; PAM type: YTN; PAM sequence: TTT
ctgtacctgtgtgaagaaag

SEQ ID NO: 293385 - DNA, 20 bp, Artificial Sequence
  Description of Artificial Sequence: Synthetic oligonucleotide
  Target: LAMA2; (-) strand; PAM type: YTN; PAM sequence: CTA
tttctgtacctgtgtgaaga

SEQ ID NO: 293386 - DNA, 20 bp, Artificial Sequence
  Description of Artificial Sequence: Synthetic oligonucleotide
  Target: LAMA2; (-) strand; PAM type: YTN; PAM sequence: TTA
gcctatttctgtacctgtgt

SEQ ID NO: 293387 - DNA, 20 bp, Artificial Sequence
  Description of Artificial Sequence: Synthetic oligonucleotide
  Target: LAMA2; (-) strand; PAM type: YTN; PAM sequence: TTT
agcctatttctgtacctgtg

SEQ ID NO: 293388 - DNA, 20 bp, Artificial Sequence
  Description of Artificial Sequence: Synthetic oligonucleotide
  Target: LAMA2; (-) strand; PAM type: YTN; PAM sequence: CTT
tagcctatttctgtacctgt

SEQ ID NO: 293389 - DNA, 20 bp, Artificial Sequence
  Description of Artificial Sequence: Synthetic oligonucleotide
  Target: LAMA2; (-) strand; PAM type: YTN; PAM sequence: CTG
acctttagcctatttctgta

SEQ ID NO: 293390 - DNA, 20 bp, Artificial Sequence
  Description of Artificial Sequence: Synthetic oligonucleotide
  Target: LAMA2; (-) strand; PAM type: YTN; PAM sequence: TTC
ctgacctttagcctatttct

SEQ ID NO: 293391 - DNA, 20 bp, Artificial Sequence
  Description of Artificial Sequence: Synthetic oligonucleotide
  Target: LAMA2; (-) strand; PAM type: YTN; PAM sequence: CTT
cctgacctttagcctatttc

SEQ ID NO: 293392 - DNA, 20 bp, Artificial Sequence
  Description of Artificial Sequence: Synthetic oligonucleotide
  Target: LAMA2; (-) strand; PAM type: YTN; PAM sequence: CTA
cttcctgacctttagcctat

SEQ ID NO: 293393 - DNA, 20 bp, Artificial Sequence
  Description of Artificial Sequence: Synthetic oligonucleotide
  Target: LAMA2; (-) strand; PAM type: YTN; PAM sequence: CTC
accctacttcctgaccttta

SEQ ID NO: 293394 - DNA, 20 bp, Artificial Sequence
  Description of Artificial Sequence: Synthetic oligonucleotide
  Target: LAMA2; (-) strand; PAM type: YTN; PAM sequence: CTA
aaatatctcaccctacttcc

SEQ ID NO: 293395 - DNA, 20 bp, Artificial Sequence
  Description of Artificial Sequence: Synthetic oligonucleotide
  Target: LAMA2; (-) strand; PAM type: YTN; PAM sequence: CTC
ctaaaatatctcaccctact

SEQ ID NO: 293396 - DNA, 20 bp, Artificial Sequence
  Description of Artificial Sequence: Synthetic oligonucleotide
  Target: LAMA2; (-) strand; PAM type: YTN; PAM sequence: CTG
gaaaccccaaatgactccta

SEQ ID NO: 293397 - DNA, 20 bp, Artificial Sequence
  Description of Artificial Sequence: Synthetic oligonucleotide
  Target: LAMA2; (-) strand; PAM type: YTN; PAM sequence: TTC
tggaaaccccaaatgactcc

SEQ ID NO: 293398 - DNA, 20 bp, Artificial Sequence
  Description of Artificial Sequence: Synthetic oligonucleotide
  Target: LAMA2; (-) strand; PAM type: YTN; PAM sequence: CTC
attctggaaaccccaaatga

SEQ ID NO: 293399 - DNA, 20 bp, Artificial Sequence
  Description of Artificial Sequence: Synthetic oligonucleotide
  Target: LAMA2; (-) strand; PAM type: YTN; PAM sequence: TTA
tctcattctggaaaccccaa

SEQ ID NO: 293400 - DNA, 20 bp, Artificial Sequence
  Description of Artificial Sequence: Synthetic oligonucleotide
  Target: LAMA2; (-) strand; PAM type: YTN; PAM sequence: TTT
atctcattctggaaacccca

SEQ ID NO: 293401 - DNA, 20 bp, Artificial Sequence
  Description of Artificial Sequence: Synthetic oligonucleotide
  Target: LAMA2; (-) strand; PAM type: YTN; PAM sequence: CTT
tatctcattctggaaacccc

SEQ ID NO: 293402 - DNA, 20 bp, Artificial Sequence
  Description of Artificial Sequence: Synthetic oligonucleotide
  Target: LAMA2; (-) strand; PAM type: YTN; PAM sequence: TTA
aaatctttatctcattctgg

SEQ ID NO: 293403 - DNA, 20 bp, Artificial Sequence
  Description of Artificial Sequence: Synthetic oligonucleotide
  Target: LAMA2; (-) strand; PAM type: YTN; PAM sequence: TTC
agtgttaaaatctttatctc

SEQ ID NO: 293404 - DNA, 20 bp, Artificial Sequence
  Description of Artificial Sequence: Synthetic oligonucleotide
  Target: LAMA2; (-) strand; PAM type: YTN; PAM sequence: TTA
gggttcagtgttaaaatctt

SEQ ID NO: 293405 - DNA, 20 bp, Artificial Sequence
  Description of Artificial Sequence: Synthetic oligonucleotide
  Target: LAMA2; (-) strand; PAM type: YTN; PAM sequence: TTT
agggttcagtgttaaaatct

SEQ ID NO: 293406 - DNA, 20 bp, Artificial Sequence
  Description of Artificial Sequence: Synthetic oligonucleotide
  Target: LAMA2; (-) strand; PAM type: YTN; PAM sequence: TTA
agaaagaaaatatttagggt

SEQ ID NO: 293407 - DNA, 20 bp, Artificial Sequence
  Description of Artificial Sequence: Synthetic oligonucleotide
  Target: LAMA2; (-) strand; PAM type: YTN; PAM sequence: TTG
gatgttaagaaagaaaatat

SEQ ID NO: 293408 - DNA, 20 bp, Artificial Sequence
  Description of Artificial Sequence: Synthetic oligonucleotide
  Target: LAMA2; (-) strand; PAM type: YTN; PAM sequence: TTT
ggatgttaagaaagaaaata

SEQ ID NO: 293409 - DNA, 20 bp, Artificial Sequence
  Description of Artificial Sequence: Synthetic oligonucleotide
  Target: LAMA2; (-) strand; PAM type: YTN; PAM sequence: CTT
tggatgttaagaaagaaaat

SEQ ID NO: 293410 - DNA, 20 bp, Artificial Sequence
  Description of Artificial Sequence: Synthetic oligonucleotide
  Target: LAMA2; (-) strand; PAM type: YTN; PAM sequence: TTG
aacatactttggatgttaag

SEQ ID NO: 293411 - DNA, 20 bp, Artificial Sequence
  Description of Artificial Sequence: Synthetic oligonucleotide
  Target: LAMA2; (-) strand; PAM type: YTN; PAM sequence: TTT
gaacatactttggatgttaa

SEQ ID NO: 293412 - DNA, 20 bp, Artificial Sequence
  Description of Artificial Sequence: Synthetic oligonucleotide
  Target: LAMA2; (-) strand; PAM type: YTN; PAM sequence: CTG
tttgaacatactttggatgt

SEQ ID NO: 293413 - DNA, 20 bp, Artificial Sequence
  Description of Artificial Sequence: Synthetic oligonucleotide
  Target: LAMA2; (-) strand; PAM type: YTN; PAM sequence: TTC
tgtttgaacatactttggat

SEQ ID NO: 293414 - DNA, 20 bp, Artificial Sequence
  Description of Artificial Sequence: Synthetic oligonucleotide
  Target: LAMA2; (-) strand; PAM type: YTN; PAM sequence: TTT
ctgtttgaacatactttgga

SEQ ID NO: 293415 - DNA, 20 bp, Artificial Sequence
  Description of Artificial Sequence: Synthetic oligonucleotide
  Target: LAMA2; (-) strand; PAM type: YTN; PAM sequence: TTT
tctgtttgaacatactttgg

SEQ ID NO: 293416 - DNA, 20 bp, Artificial Sequence
  Description of Artificial Sequence: Synthetic oligonucleotide
  Target: LAMA2; (-) strand; PAM type: YTN; PAM sequence: TTT
ttctgtttgaacatactttg

SEQ ID NO: 293417 - DNA, 20 bp, Artificial Sequence
  Description of Artificial Sequence: Synthetic oligonucleotide
  Target: LAMA2; (-) strand; PAM type: YTN; PAM sequence: TTT
tttctgtttgaacatacttt

SEQ ID NO: 293418 - DNA, 20 bp, Artificial Sequence
  Description of Artificial Sequence: Synthetic oligonucleotide
  Target: LAMA2; (-) strand; PAM type: YTN; PAM sequence: CTT
ttttctgtttgaacatactt

SEQ ID NO: 293419 - DNA, 20 bp, Artificial Sequence
  Description of Artificial Sequence: Synthetic oligonucleotide
  Target: LAMA2; (-) strand; PAM type: YTN; PAM sequence: CTA
atcttttttctgtttgaaca

SEQ ID NO: 293420 - DNA, 20 bp, Artificial Sequence
  Description of Artificial Sequence: Synthetic oligonucleotide
  Target: LAMA2; (-) strand; PAM type: YTN; PAM sequence: TTA
cataataaatagaatctaat

SEQ ID NO: 293421 - DNA, 20 bp, Artificial Sequence
  Description of Artificial Sequence: Synthetic oligonucleotide
  Target: LAMA2; (-) strand; PAM type: YTN; PAM sequence: TTT
acataataaatagaatctaa

SEQ ID NO: 293422 - DNA, 20 bp, Artificial Sequence
  Description of Artificial Sequence: Synthetic oligonucleotide
  Target: LAMA2; (-) strand; PAM type: YTN; PAM sequence: TTG
taatttacataataaataga

SEQ ID NO: 293423 - DNA, 20 bp, Artificial Sequence
  Description of Artificial Sequence: Synthetic oligonucleotide
  Target: LAMA2; (-) strand; PAM type: YTN; PAM sequence: TTT
gtaatttacataataaatag

SEQ ID NO: 293424 - DNA, 20 bp, Artificial Sequence
  Description of Artificial Sequence: Synthetic oligonucleotide
  Target: LAMA2; (-) strand; PAM type: YTN; PAM sequence: CTA
atgtttgtaatttacataat

SEQ ID NO: 293425 - DNA, 20 bp, Artificial Sequence
  Description of Artificial Sequence: Synthetic oligonucleotide
  Target: LAMA2; (-) strand; PAM type: YTN; PAM sequence: TTA
agagaaatgtgtcctaatgt

SEQ ID NO: 293426 - DNA, 20 bp, Artificial Sequence
  Description of Artificial Sequence: Synthetic oligonucleotide
  Target: LAMA2; (-) strand; PAM type: YTN; PAM sequence: TTG
catacgtggaagaagatatt

SEQ ID NO: 293427 - DNA, 20 bp, Artificial Sequence
  Description of Artificial Sequence: Synthetic oligonucleotide
  Target: LAMA2; (-) strand; PAM type: YTN; PAM sequence: TTG
gattgcatacgtggaagaag

SEQ ID NO: 293428 - DNA, 20 bp, Artificial Sequence
  Description of Artificial Sequence: Synthetic oligonucleotide
  Target: LAMA2; (-) strand; PAM type: YTN; PAM sequence: TTA
aaaccatatcagttggattg

SEQ ID NO: 293429 - DNA, 20 bp, Artificial Sequence
  Description of Artificial Sequence: Synthetic oligonucleotide
  Target: LAMA2; (-) strand; PAM type: YTN; PAM sequence: TTT
aaaaccatatcagttggatt

SEQ ID NO: 293430 - DNA, 20 bp, Artificial Sequence
  Description of Artificial Sequence: Synthetic oligonucleotide
  Target: LAMA2; (-) strand; PAM type: YTN; PAM sequence: TTT
taaaaccatatcagttggat

SEQ ID NO: 293431 - DNA, 20 bp, Artificial Sequence
  Description of Artificial Sequence: Synthetic oligonucleotide
  Target: LAMA2; (-) strand; PAM type: YTN; PAM sequence: TTT
ttaaaaccatatcagttgga

SEQ ID NO: 293432 - DNA, 20 bp, Artificial Sequence
  Description of Artificial Sequence: Synthetic oligonucleotide
  Target: LAMA2; (-) strand; PAM type: YTN; PAM sequence: TTT
tttaaaaccatatcagttgg

SEQ ID NO: 293433 - DNA, 20 bp, Artificial Sequence
  Description of Artificial Sequence: Synthetic oligonucleotide
  Target: LAMA2; (-) strand; PAM type: YTN; PAM sequence: TTT
ttttaaaaccatatcagttg

SEQ ID NO: 293434 - DNA, 20 bp, Artificial Sequence
  Description of Artificial Sequence: Synthetic oligonucleotide
  Target: LAMA2; (-) strand; PAM type: YTN; PAM sequence: TTT
tttttaaaaccatatcagtt

SEQ ID NO: 293435 - DNA, 20 bp, Artificial Sequence
  Description of Artificial Sequence: Synthetic oligonucleotide
  Target: LAMA2; (-) strand; PAM type: YTN; PAM sequence: TTA
agattttttttaaaaccata

SEQ ID NO: 293436 - DNA, 20 bp, Artificial Sequence
  Description of Artificial Sequence: Synthetic oligonucleotide
  Target: LAMA2; (-) strand; PAM type: YTN; PAM sequence: TTT
aagattttttttaaaaccat

SEQ ID NO: 293437 - DNA, 20 bp, Artificial Sequence
  Description of Artificial Sequence: Synthetic oligonucleotide
  Target: LAMA2; (-) strand; PAM type: YTN; PAM sequence: TTG
gaatgtgggtttaagatttt

SEQ ID NO: 293438 - DNA, 20 bp, Artificial Sequence
  Description of Artificial Sequence: Synthetic oligonucleotide
  Target: LAMA2; (-) strand; PAM type: YTN; PAM sequence: TTT
ggaatgtgggtttaagattt

SEQ ID NO: 293439 - DNA, 20 bp, Artificial Sequence
  Description of Artificial Sequence: Synthetic oligonucleotide
  Target: LAMA2; (-) strand; PAM type: YTN; PAM sequence: TTG
tttggaatgtgggtttaaga

SEQ ID NO: 293440 - DNA, 20 bp, Artificial Sequence
  Description of Artificial Sequence: Synthetic oligonucleotide
  Target: LAMA2; (-) strand; PAM type: YTN; PAM sequence: TTT
gtttggaatgtgggtttaag

SEQ ID NO: 293441 - DNA, 20 bp, Artificial Sequence
  Description of Artificial Sequence: Synthetic oligonucleotide
  Target: LAMA2; (-) strand; PAM type: YTN; PAM sequence: TTA
tttgtttggaatgtgggttt

SEQ ID NO: 293442 - DNA, 20 bp, Artificial Sequence
  Description of Artificial Sequence: Synthetic oligonucleotide
  Target: LAMA2; (-) strand; PAM type: YTN; PAM sequence: CTT
atttgtttggaatgtgggtt

SEQ ID NO: 293443 - DNA, 20 bp, Artificial Sequence
  Description of Artificial Sequence: Synthetic oligonucleotide
  Target: LAMA2; (-) strand; PAM type: YTN; PAM sequence: TTC
ttatttgtttggaatgtggg

SEQ ID NO: 293444 - DNA, 20 bp, Artificial Sequence
  Description of Artificial Sequence: Synthetic oligonucleotide
  Target: LAMA2; (-) strand; PAM type: YTN; PAM sequence: TTT
cttatttgtttggaatgtgg

SEQ ID NO: 293445 - DNA, 20 bp, Artificial Sequence
  Description of Artificial Sequence: Synthetic oligonucleotide
  Target: LAMA2; (-) strand; PAM type: YTN; PAM sequence: CTA
tttcttatttgtttggaatg

SEQ ID NO: 293446 - DNA, 20 bp, Artificial Sequence
  Description of Artificial Sequence: Synthetic oligonucleotide
  Target: LAMA2; (-) strand; PAM type: YTN; PAM sequence: TTA
taccctatttcttatttgtt

SEQ ID NO: 293447 - DNA, 20 bp, Artificial Sequence
  Description of Artificial Sequence: Synthetic oligonucleotide
  Target: LAMA2; (-) strand; PAM type: YTN; PAM sequence: CTT
ataccctatttcttatttgt

SEQ ID NO: 293448 - DNA, 20 bp, Artificial Sequence
  Description of Artificial Sequence: Synthetic oligonucleotide
  Target: LAMA2; (-) strand; PAM type: YTN; PAM sequence: TTA
cttataccctatttcttatt

SEQ ID NO: 293449 - DNA, 20 bp, Artificial Sequence
  Description of Artificial Sequence: Synthetic oligonucleotide
  Target: LAMA2; (-) strand; PAM type: YTN; PAM sequence: TTG
attacttataccctatttct

SEQ ID NO: 293450 - DNA, 20 bp, Artificial Sequence
  Description of Artificial Sequence: Synthetic oligonucleotide
  Target: LAMA2; (-) strand; PAM type: YTN; PAM sequence: CTT
gattacttataccctatttc

SEQ ID NO: 293451 - DNA, 20 bp, Artificial Sequence
  Description of Artificial Sequence: Synthetic oligonucleotide
  Target: LAMA2; (-) strand; PAM type: YTN; PAM sequence: TTA
cttgattacttataccctat

SEQ ID NO: 293452 - DNA, 20 bp, Artificial Sequence
  Description of Artificial Sequence: Synthetic oligonucleotide
  Target: LAMA2; (-) strand; PAM type: YTN; PAM sequence: TTC
ataattacttgattacttat

SEQ ID NO: 293453 - DNA, 20 bp, Artificial Sequence
  Description of Artificial Sequence: Synthetic oligonucleotide
  Target: LAMA2; (-) strand; PAM type: YTN; PAM sequence: TTT
cataattacttgattactta

SEQ ID NO: 293454 - DNA, 20 bp, Artificial Sequence
  Description of Artificial Sequence: Synthetic oligonucleotide
  Target: LAMA2; (-) strand; PAM type: YTN; PAM sequence: TTA
gagtttcataattacttgat

SEQ ID NO: 293455 - DNA, 20 bp, Artificial Sequence
  Description of Artificial Sequence: Synthetic oligonucleotide
  Target: LAMA2; (-) strand; PAM type: YTN; PAM sequence: CTT
agagtttcataattacttga

SEQ ID NO: 293456 - DNA, 20 bp, Artificial Sequence
  Description of Artificial Sequence: Synthetic oligonucleotide
  Target: LAMA2; (-) strand; PAM type: YTN; PAM sequence: TTC
ttagagtttcataattactt

SEQ ID NO: 293457 - DNA, 20 bp, Artificial Sequence
  Description of Artificial Sequence: Synthetic oligonucleotide
  Target: LAMA2; (-) strand; PAM type: YTN; PAM sequence: CTG
attcttagagtttcataatt

SEQ ID NO: 293458 - DNA, 20 bp, Artificial Sequence
  Description of Artificial Sequence: Synthetic oligonucleotide
  Target: LAMA2; (-) strand; PAM type: YTN; PAM sequence: TTC
agtggctgattcttagagtt

SEQ ID NO: 293459 - DNA, 20 bp, Artificial Sequence
  Description of Artificial Sequence: Synthetic oligonucleotide
  Target: LAMA2; (-) strand; PAM type: YTN; PAM sequence: TTT
cagtggctgattcttagagt

SEQ ID NO: 293460 - DNA, 20 bp, Artificial Sequence
  Description of Artificial Sequence: Synthetic oligonucleotide
  Target: LAMA2; (-) strand; PAM type: YTN; PAM sequence: TTA
cagtttcagtggctgattct

SEQ ID NO: 293461 - DNA, 20 bp, Artificial Sequence
  Description of Artificial Sequence: Synthetic oligonucleotide
  Target: LAMA2; (-) strand; PAM type: YTN; PAM sequence: TTT
acagtttcagtggctgattc

SEQ ID NO: 293462 - DNA, 20 bp, Artificial Sequence
  Description of Artificial Sequence: Synthetic oligonucleotide
  Target: LAMA2; (-) strand; PAM type: YTN; PAM sequence: TTT
tacagtttcagtggctgatt

SEQ ID NO: 293463 - DNA, 20 bp, Artificial Sequence
  Description of Artificial Sequence: Synthetic oligonucleotide
  Target: LAMA2; (-) strand; PAM type: YTN; PAM sequence: TTT
ttacagtttcagtggctgat

SEQ ID NO: 293464 - DNA, 20 bp, Artificial Sequence
  Description of Artificial Sequence: Synthetic oligonucleotide
  Target: LAMA2; (-) strand; PAM type: YTN; PAM sequence: TTT
tttacagtttcagtggctga

SEQ ID NO: 293465 - DNA, 20 bp, Artificial Sequence
  Description of Artificial Sequence: Synthetic oligonucleotide
  Target: LAMA2; (-) strand; PAM type: YTN; PAM sequence: TTT
ttttacagtttcagtggctg

SEQ ID NO: 293466 - DNA, 20 bp, Artificial Sequence
  Description of Artificial Sequence: Synthetic oligonucleotide
  Target: LAMA2; (-) strand; PAM type: YTN; PAM sequence: TTT
tttttacagtttcagtggct

SEQ ID NO: 293467 - DNA, 20 bp, Artificial Sequence
  Description of Artificial Sequence: Synthetic oligonucleotide
  Target: LAMA2; (-) strand; PAM type: YTN; PAM sequence: TTT
ttttttacagtttcagtggc

SEQ ID NO: 293468 - DNA, 20 bp, Artificial Sequence
  Description of Artificial Sequence: Synthetic oligonucleotide
  Target: LAMA2; (-) strand; PAM type: YTN; PAM sequence: TTT
tttttttacagtttcagtgg

SEQ ID NO: 293469 - DNA, 20 bp, Artificial Sequence
  Description of Artificial Sequence: Synthetic oligonucleotide
  Target: LAMA2; (-) strand; PAM type: YTN; PAM sequence: TTT
ttttttttacagtttcagtg

SEQ ID NO: 293470 - DNA, 20 bp, Artificial Sequence
  Description of Artificial Sequence: Synthetic oligonucleotide
  Target: LAMA2; (-) strand; PAM type: YTN; PAM sequence: TTT
tttttttttacagtttcagt

SEQ ID NO: 293471 - DNA, 20 bp, Artificial Sequence
  Description of Artificial Sequence: Synthetic oligonucleotide
  Target: LAMA2; (-) strand; PAM type: YTN; PAM sequence: TTA
ttttttttttttacagtttc

SEQ ID NO: 293472 - DNA, 20 bp, Artificial Sequence
  Description of Artificial Sequence: Synthetic oligonucleotide
  Target: LAMA2; (-) strand; PAM type: YTN; PAM sequence: TTT
attttttttttttacagttt

SEQ ID NO: 293473 - DNA, 20 bp, Artificial Sequence
  Description of Artificial Sequence: Synthetic oligonucleotide
  Target: LAMA2; (-) strand; PAM type: YTN; PAM sequence: CTT
tattttttttttttacagtt

SEQ ID NO: 293474 - DNA, 20 bp, Artificial Sequence
  Description of Artificial Sequence: Synthetic oligonucleotide
  Target: LAMA2; (-) strand; PAM type: YTN; PAM sequence: TTG
taataggtcagctttatttt

SEQ ID NO: 293475 - DNA, 20 bp, Artificial Sequence
  Description of Artificial Sequence: Synthetic oligonucleotide
  Target: LAMA2; (-) strand; PAM type: YTN; PAM sequence: TTA
gtattgtaataggtcagctt

SEQ ID NO: 293476 - DNA, 20 bp, Artificial Sequence
  Description of Artificial Sequence: Synthetic oligonucleotide
  Target: LAMA2; (-) strand; PAM type: YTN; PAM sequence: TTT
agtattgtaataggtcagct

SEQ ID NO: 293477 - DNA, 20 bp, Artificial Sequence
  Description of Artificial Sequence: Synthetic oligonucleotide
  Target: LAMA2; (-) strand; PAM type: YTN; PAM sequence: CTT
tagtattgtaataggtcagc

SEQ ID NO: 293478 - DNA, 20 bp, Artificial Sequence
  Description of Artificial Sequence: Synthetic oligonucleotide
  Target: LAMA2; (-) strand; PAM type: YTN; PAM sequence: TTA
ctttagtattgtaataggtc

SEQ ID NO: 293479 - DNA, 20 bp, Artificial Sequence
  Description of Artificial Sequence: Synthetic oligonucleotide
  Target: LAMA2; (-) strand; PAM type: YTN; PAM sequence: TTG
tattactttagtattgtaat

SEQ ID NO: 293480 - DNA, 20 bp, Artificial Sequence
  Description of Artificial Sequence: Synthetic oligonucleotide
  Target: LAMA2; (-) strand; PAM type: YTN; PAM sequence: TTT
gtattactttagtattgtaa

SEQ ID NO: 293481 - DNA, 20 bp, Artificial Sequence
  Description of Artificial Sequence: Synthetic oligonucleotide
  Target: LAMA2; (-) strand; PAM type: YTN; PAM sequence: CTT
tgtattactttagtattgta

SEQ ID NO: 293482 - DNA, 20 bp, Artificial Sequence
  Description of Artificial Sequence: Synthetic oligonucleotide
  Target: LAMA2; (-) strand; PAM type: YTN; PAM sequence: TTA
aactttgtattactttagta

SEQ ID NO: 293483 - DNA, 20 bp, Artificial Sequence
  Description of Artificial Sequence: Synthetic oligonucleotide
  Target: LAMA2; (-) strand; PAM type: YTN; PAM sequence: CTA
tgtgcaaaaaggtacattaa

SEQ ID NO: 293484 - DNA, 20 bp, Artificial Sequence
  Description of Artificial Sequence: Synthetic oligonucleotide
  Target: LAMA2; (-) strand; PAM type: YTN; PAM sequence: CTG
ctatgtgcaaaaaggtacat

SEQ ID NO: 293485 - DNA, 20 bp, Artificial Sequence
  Description of Artificial Sequence: Synthetic oligonucleotide
  Target: LAMA2; (-) strand; PAM type: YTN; PAM sequence: CTG
aggcctgctatgtgcaaaaa

SEQ ID NO: 293486 - DNA, 20 bp, Artificial Sequence
  Description of Artificial Sequence: Synthetic oligonucleotide
  Target: LAMA2; (-) strand; PAM type: YTN; PAM sequence: TTA
ctgaggcctgctatgtgcaa

SEQ ID NO: 293487 - DNA, 20 bp, Artificial Sequence
  Description of Artificial Sequence: Synthetic oligonucleotide
  Target: LAMA2; (-) strand; PAM type: YTN; PAM sequence: TTT
actgaggcctgctatgtgca

SEQ ID NO: 293488 - DNA, 20 bp, Artificial Sequence
  Description of Artificial Sequence: Synthetic oligonucleotide
  Target: LAMA2; (-) strand; PAM type: YTN; PAM sequence: TTT
tactgaggcctgctatgtgc

SEQ ID NO: 293489 - DNA, 20 bp, Artificial Sequence
  Description of Artificial Sequence: Synthetic oligonucleotide
  Target: LAMA2; (-) strand; PAM type: YTN; PAM sequence: TTT
ttactgaggcctgctatgtg

SEQ ID NO: 293490 - DNA, 20 bp, Artificial Sequence
  Description of Artificial Sequence: Synthetic oligonucleotide
  Target: LAMA2; (-) strand; PAM type: YTN; PAM sequence: CTT
tttactgaggcctgctatgt

SEQ ID NO: 293491 - DNA, 20 bp, Artificial Sequence
  Description of Artificial Sequence: Synthetic oligonucleotide
  Target: LAMA2; (-) strand; PAM type: YTN; PAM sequence: TTA
acagctttttactgaggcct

SEQ ID NO: 293492 - DNA, 20 bp, Artificial Sequence
  Description of Artificial Sequence: Synthetic oligonucleotide
  Target: LAMA2; (-) strand; PAM type: YTN; PAM sequence: TTT
aacagctttttactgaggcc

SEQ ID NO: 293493 - DNA, 20 bp, Artificial Sequence
  Description of Artificial Sequence: Synthetic oligonucleotide
  Target: LAMA2; (-) strand; PAM type: YTN; PAM sequence: TTA
tttaacagctttttactgag

SEQ ID NO: 293494 - DNA, 20 bp, Artificial Sequence
  Description of Artificial Sequence: Synthetic oligonucleotide
  Target: LAMA2; (-) strand; PAM type: YTN; PAM sequence: TTT
atttaacagctttttactga

SEQ ID NO: 293495 - DNA, 20 bp, Artificial Sequence
  Description of Artificial Sequence: Synthetic oligonucleotide
  Target: LAMA2; (-) strand; PAM type: YTN; PAM sequence: TTA
aaaagtatttatttaacagc

SEQ ID NO: 293496 - DNA, 20 bp, Artificial Sequence
  Description of Artificial Sequence: Synthetic oligonucleotide
  Target: LAMA2; (-) strand; PAM type: YTN; PAM sequence: TTT
aaaaagtatttatttaacag

SEQ ID NO: 293497 - DNA, 20 bp, Artificial Sequence
  Description of Artificial Sequence: Synthetic oligonucleotide
  Target: LAMA2; (-) strand; PAM type: YTN; PAM sequence: TTT
taaaaagtatttatttaaca

SEQ ID NO: 293498 - DNA, 20 bp, Artificial Sequence
  Description of Artificial Sequence: Synthetic oligonucleotide
  Target: LAMA2; (-) strand; PAM type: YTN; PAM sequence: TTT
ttaaaaagtatttatttaac

SEQ ID NO: 293499 - DNA, 20 bp, Artificial Sequence
  Description of Artificial Sequence: Synthetic oligonucleotide
  Target: LAMA2; (-) strand; PAM type: YTN; PAM sequence: TTC
catttttaaaaagtatttat

SEQ ID NO: 293500 - DNA, 20 bp, Artificial Sequence
  Description of Artificial Sequence: Synthetic oligonucleotide
  Target: LAMA2; (-) strand; PAM type: YTN; PAM sequence: TTT
ccatttttaaaaagtattta

SEQ ID NO: 293501 - DNA, 20 bp, Artificial Sequence
  Description of Artificial Sequence: Synthetic oligonucleotide
  Target: LAMA2; (-) strand; PAM type: YTN; PAM sequence: TTT
tccatttttaaaaagtattt

SEQ ID NO: 293502 - DNA, 20 bp, Artificial Sequence
  Description of Artificial Sequence: Synthetic oligonucleotide
  Target: LAMA2; (-) strand; PAM type: YTN; PAM sequence: CTG
gtgtgttttccatttttaaa

SEQ ID NO: 293503 - DNA, 20 bp, Artificial Sequence
  Description of Artificial Sequence: Synthetic oligonucleotide
  Target: LAMA2; (-) strand; PAM type: YTN; PAM sequence: TTC
tggtgtgttttccattttta

SEQ ID NO: 293504 - DNA, 20 bp, Artificial Sequence
  Description of Artificial Sequence: Synthetic oligonucleotide
  Target: LAMA2; (-) strand; PAM type: YTN; PAM sequence: TTA
tgattctggtgtgttttcca

SEQ ID NO: 293505 - DNA, 20 bp, Artificial Sequence
  Description of Artificial Sequence: Synthetic oligonucleotide
  Target: LAMA2; (-) strand; PAM type: YTN; PAM sequence: TTG
ccaatatgtccattatgatt

SEQ ID NO: 293506 - DNA, 20 bp, Artificial Sequence
  Description of Artificial Sequence: Synthetic oligonucleotide
  Target: LAMA2; (-) strand; PAM type: YTN; PAM sequence: TTG
agaaggacattgccaatatg

SEQ ID NO: 293507 - DNA, 20 bp, Artificial Sequence
  Description of Artificial Sequence: Synthetic oligonucleotide
  Target: LAMA2; (-) strand; PAM type: YTN; PAM sequence: TTA
ttgagaaggacattgccaat

SEQ ID NO: 293508 - DNA, 20 bp, Artificial Sequence
  Description of Artificial Sequence: Synthetic oligonucleotide
  Target: LAMA2; (-) strand; PAM type: YTN; PAM sequence: TTT
attgagaaggacattgccaa

SEQ ID NO: 293509 - DNA, 20 bp, Artificial Sequence
  Description of Artificial Sequence: Synthetic oligonucleotide
  Target: LAMA2; (-) strand; PAM type: YTN; PAM sequence: TTT
tattgagaaggacattgcca

SEQ ID NO: 293510 - DNA, 20 bp, Artificial Sequence
  Description of Artificial Sequence: Synthetic oligonucleotide
  Target: LAMA2; (-) strand; PAM type: YTN; PAM sequence: TTT
ttattgagaaggacattgcc

SEQ ID NO: 293511 - DNA, 20 bp, Artificial Sequence
  Description of Artificial Sequence: Synthetic oligonucleotide
  Target: LAMA2; (-) strand; PAM type: YTN; PAM sequence: TTA
gtttttattgagaaggacat

SEQ ID NO: 293512 - DNA, 20 bp, Artificial Sequence
  Description of Artificial Sequence: Synthetic oligonucleotide
  Target: LAMA2; (-) strand; PAM type: YTN; PAM sequence: TTT
agtttttattgagaaggaca

SEQ ID NO: 293513 - DNA, 20 bp, Artificial Sequence
  Description of Artificial Sequence: Synthetic oligonucleotide
  Target: LAMA2; (-) strand; PAM type: YTN; PAM sequence: CTT
tagtttttattgagaaggac

SEQ ID NO: 293514 - DNA, 20 bp, Artificial Sequence
  Description of Artificial Sequence: Synthetic oligonucleotide
  Target: LAMA2; (-) strand; PAM type: YTN; PAM sequence: TTC
tttagtttttattgagaagg

SEQ ID NO: 293515 - DNA, 20 bp, Artificial Sequence
  Description of Artificial Sequence: Synthetic oligonucleotide
  Target: LAMA2; (-) strand; PAM type: YTN; PAM sequence: TTT
ctttagtttttattgagaag

SEQ ID NO: 293516 - DNA, 20 bp, Artificial Sequence
  Description of Artificial Sequence: Synthetic oligonucleotide
  Target: LAMA2; (-) strand; PAM type: YTN; PAM sequence: CTA
gatcatttctttagttttta

SEQ ID NO: 293517 - DNA, 20 bp, Artificial Sequence
  Description of Artificial Sequence: Synthetic oligonucleotide
  Target: LAMA2; (-) strand; PAM type: YTN; PAM sequence: TTA
ggaacatcaaatctagatca

SEQ ID NO: 293518 - DNA, 20 bp, Artificial Sequence
  Description of Artificial Sequence: Synthetic oligonucleotide
  Target: LAMA2; (-) strand; PAM type: YTN; PAM sequence: TTT
aggaacatcaaatctagatc

SEQ ID NO: 293519 - DNA, 20 bp, Artificial Sequence
  Description of Artificial Sequence: Synthetic oligonucleotide
  Target: LAMA2; (-) strand; PAM type: YTN; PAM sequence: TTT
taggaacatcaaatctagat

SEQ ID NO: 293520 - DNA, 20 bp, Artificial Sequence
  Description of Artificial Sequence: Synthetic oligonucleotide
  Target: LAMA2; (-) strand; PAM type: YTN; PAM sequence: CTT
ttaggaacatcaaatctaga

SEQ ID NO: 293521 - DNA, 20 bp, Artificial Sequence
  Description of Artificial Sequence: Synthetic oligonucleotide
  Target: LAMA2; (-) strand; PAM type: YTN; PAM sequence: TTA
ccttttaggaacatcaaatc

SEQ ID NO: 293522 - DNA, 20 bp, Artificial Sequence
  Description of Artificial Sequence: Synthetic oligonucleotide
  Target: LAMA2; (-) strand; PAM type: YTN; PAM sequence: TTT
accttttaggaacatcaaat

SEQ ID NO: 293523 - DNA, 20 bp, Artificial Sequence
  Description of Artificial Sequence: Synthetic oligonucleotide
  Target: LAMA2; (-) strand; PAM type: YTN; PAM sequence: TTT
taccttttaggaacatcaaa

SEQ ID NO: 293524 - DNA, 20 bp, Artificial Sequence
  Description of Artificial Sequence: Synthetic oligonucleotide
  Target: LAMA2; (-) strand; PAM type: YTN; PAM sequence: CTA
ttttaccttttaggaacatc

SEQ ID NO: 293525 - DNA, 20 bp, Artificial Sequence
  Description of Artificial Sequence: Synthetic oligonucleotide
  Target: LAMA2; (-) strand; PAM type: YTN; PAM sequence: CTC
ctattttaccttttaggaac

SEQ ID NO: 293526 - DNA, 20 bp, Artificial Sequence
  Description of Artificial Sequence: Synthetic oligonucleotide
  Target: LAMA2; (-) strand; PAM type: YTN; PAM sequence: CTG
ctcctattttaccttttagg

SEQ ID NO: 293527 - DNA, 20 bp, Artificial Sequence
  Description of Artificial Sequence: Synthetic oligonucleotide
  Target: LAMA2; (-) strand; PAM type: YTN; PAM sequence: CTA
aatcctgctcctattttacc

SEQ ID NO: 293528 - DNA, 20 bp, Artificial Sequence
  Description of Artificial Sequence: Synthetic oligonucleotide
  Target: LAMA2; (-) strand; PAM type: YTN; PAM sequence: CTA
cagctaaatcctgctcctat

SEQ ID NO: 293529 - DNA, 20 bp, Artificial Sequence
  Description of Artificial Sequence: Synthetic oligonucleotide
  Target: LAMA2; (-) strand; PAM type: YTN; PAM sequence: CTA
gaaaactacagctaaatcct

SEQ ID NO: 293530 - DNA, 20 bp, Artificial Sequence
  Description of Artificial Sequence: Synthetic oligonucleotide
  Target: LAMA2; (-) strand; PAM type: YTN; PAM sequence: TTG
ctagaaaactacagctaaat

SEQ ID NO: 293531 - DNA, 20 bp, Artificial Sequence
  Description of Artificial Sequence: Synthetic oligonucleotide
  Target: LAMA2; (-) strand; PAM type: YTN; PAM sequence: TTA
aaaagggcattgctagaaaa

SEQ ID NO: 293532 - DNA, 20 bp, Artificial Sequence
  Description of Artificial Sequence: Synthetic oligonucleotide
  Target: LAMA2; (-) strand; PAM type: YTN; PAM sequence: CTT
aaaaagggcattgctagaaa

SEQ ID NO: 293533 - DNA, 20 bp, Artificial Sequence
  Description of Artificial Sequence: Synthetic oligonucleotide
  Target: LAMA2; (-) strand; PAM type: YTN; PAM sequence: TTA
cttaaaaagggcattgctag

SEQ ID NO: 293534 - DNA, 20 bp, Artificial Sequence
  Description of Artificial Sequence: Synthetic oligonucleotide
  Target: LAMA2; (-) strand; PAM type: YTN; PAM sequence: CTG
tattacttaaaaagggcatt

SEQ ID NO: 293535 - DNA, 20 bp, Artificial Sequence
  Description of Artificial Sequence: Synthetic oligonucleotide
  Target: LAMA2; (-) strand; PAM type: YTN; PAM sequence: CTG
aggctgtattacttaaaaag

SEQ ID NO: 293536 - DNA, 20 bp, Artificial Sequence
  Description of Artificial Sequence: Synthetic oligonucleotide
  Target: LAMA2; (-) strand; PAM type: YTN; PAM sequence: TTG
ccctgaggctgtattactta

SEQ ID NO: 293537 - DNA, 20 bp, Artificial Sequence
  Description of Artificial Sequence: Synthetic oligonucleotide
  Target: LAMA2; (-) strand; PAM type: YTN; PAM sequence: TTA
agggattgccctgaggctgt

SEQ ID NO: 293538 - DNA, 20 bp, Artificial Sequence
  Description of Artificial Sequence: Synthetic oligonucleotide
  Target: LAMA2; (-) strand; PAM type: YTN; PAM sequence: TTA
attaagggattgccctgagg

SEQ ID NO: 293539 - DNA, 20 bp, Artificial Sequence
  Description of Artificial Sequence: Synthetic oligonucleotide
  Target: LAMA2; (-) strand; PAM type: YTN; PAM sequence: TTC
aaacagcggaaaatattaat

SEQ ID NO: 293540 - DNA, 20 bp, Artificial Sequence
  Description of Artificial Sequence: Synthetic oligonucleotide
  Target: LAMA2; (-) strand; PAM type: YTN; PAM sequence: CTT
caaacagcggaaaatattaa

SEQ ID NO: 293541 - DNA, 20 bp, Artificial Sequence
  Description of Artificial Sequence: Synthetic oligonucleotide
  Target: LAMA2; (-) strand; PAM type: YTN; PAM sequence: CTA
cttcaaacagcggaaaatat

SEQ ID NO: 293542 - DNA, 20 bp, Artificial Sequence
  Description of Artificial Sequence: Synthetic oligonucleotide
  Target: LAMA2; (-) strand; PAM type: YTN; PAM sequence: TTA
taagatggagataaaaatac

SEQ ID NO: 293543 - DNA, 20 bp, Artificial Sequence
  Description of Artificial Sequence: Synthetic oligonucleotide
  Target: LAMA2; (-) strand; PAM type: YTN; PAM sequence: TTT
ataagatggagataaaaata

SEQ ID NO: 293544 - DNA, 20 bp, Artificial Sequence
  Description of Artificial Sequence: Synthetic oligonucleotide
  Target: LAMA2; (-) strand; PAM type: YTN; PAM sequence: TTC
atttataagatggagataaa

SEQ ID NO: 293545 - DNA, 20 bp, Artificial Sequence
  Description of Artificial Sequence: Synthetic oligonucleotide
  Target: LAMA2; (-) strand; PAM type: YTN; PAM sequence: TTC
attcatttataagatggaga

SEQ ID NO: 293546 - DNA, 20 bp, Artificial Sequence
  Description of Artificial Sequence: Synthetic oligonucleotide
  Target: LAMA2; (-) strand; PAM type: YTN; PAM sequence: TTT
cattcatttataagatggag

SEQ ID NO: 293547 - DNA, 20 bp, Artificial Sequence
  Description of Artificial Sequence: Synthetic oligonucleotide
  Target: LAMA2; (-) strand; PAM type: YTN; PAM sequence: CTC
aggtccatttcattcattta

SEQ ID NO: 293548 - DNA, 20 bp, Artificial Sequence
  Description of Artificial Sequence: Synthetic oligonucleotide
  Target: LAMA2; (-) strand; PAM type: YTN; PAM sequence: TTA
atcatgctcaggtccatttc

SEQ ID NO: 293549 - DNA, 20 bp, Artificial Sequence
  Description of Artificial Sequence: Synthetic oligonucleotide
  Target: LAMA2; (-) strand; PAM type: YTN; PAM sequence: TTT
aatcatgctcaggtccattt

SEQ ID NO: 293550 - DNA, 20 bp, Artificial Sequence
  Description of Artificial Sequence: Synthetic oligonucleotide
  Target: LAMA2; (-) strand; PAM type: YTN; PAM sequence: TTA
tttaatcatgctcaggtcca

SEQ ID NO: 293551 - DNA, 20 bp, Artificial Sequence
  Description of Artificial Sequence: Synthetic oligonucleotide
  Target: LAMA2; (-) strand; PAM type: YTN; PAM sequence: TTG
ggcaagttatttaatcatgc

SEQ ID NO: 293552 - DNA, 20 bp, Artificial Sequence
  Description of Artificial Sequence: Synthetic oligonucleotide
  Target: LAMA2; (-) strand; PAM type: YTN; PAM sequence: CTT
gggcaagttatttaatcatg

SEQ ID NO: 293553 - DNA, 20 bp, Artificial Sequence
  Description of Artificial Sequence: Synthetic oligonucleotide
  Target: LAMA2; (-) strand; PAM type: YTN; PAM sequence: CTG
tgtgaccttgggcaagttat

SEQ ID NO: 293554 - DNA, 20 bp, Artificial Sequence
  Description of Artificial Sequence: Synthetic oligonucleotide
  Target: LAMA2; (-) strand; PAM type: YTN; PAM sequence: CTA
gctgtgtgaccttgggcaag

SEQ ID NO: 293555 - DNA, 20 bp, Artificial Sequence
  Description of Artificial Sequence: Synthetic oligonucleotide
  Target: LAMA2; (-) strand; PAM type: YTN; PAM sequence: TTA
ctagctgtgtgaccttgggc

SEQ ID NO: 293556 - DNA, 20 bp, Artificial Sequence
  Description of Artificial Sequence: Synthetic oligonucleotide
  Target: LAMA2; (-) strand; PAM type: YTN; PAM sequence: CTT
actagctgtgtgaccttggg

SEQ ID NO: 293557 - DNA, 20 bp, Artificial Sequence
  Description of Artificial Sequence: Synthetic oligonucleotide
  Target: LAMA2; (-) strand; PAM type: YTN; PAM sequence: CTA
gtgtggaagcttactagctg

SEQ ID NO: 293558 - DNA, 20 bp, Artificial Sequence
  Description of Artificial Sequence: Synthetic oligonucleotide
  Target: LAMA2; (-) strand; PAM type: YTN; PAM sequence: TTA
agtactagtgtggaagctta

SEQ ID NO: 293559 - DNA, 20 bp, Artificial Sequence
  Description of Artificial Sequence: Synthetic oligonucleotide
  Target: LAMA2; (-) strand; PAM type: YTN; PAM sequence: CTG
gaattaagtactagtgtgga

SEQ ID NO: 293560 - DNA, 20 bp, Artificial Sequence
  Description of Artificial Sequence: Synthetic oligonucleotide
  Target: LAMA2; (-) strand; PAM type: YTN; PAM sequence: TTC
aggaggaacatactggaatt

SEQ ID NO: 293561 - DNA, 20 bp, Artificial Sequence
  Description of Artificial Sequence: Synthetic oligonucleotide
  Target: LAMA2; (-) strand; PAM type: YTN; PAM sequence: TTT
caggaggaacatactggaat

SEQ ID NO: 293562 - DNA, 20 bp, Artificial Sequence
  Description of Artificial Sequence: Synthetic oligonucleotide
  Target: LAMA2; (-) strand; PAM type: YTN; PAM sequence: CTT
tcaggaggaacatactggaa

SEQ ID NO: 293563 - DNA, 20 bp, Artificial Sequence
  Description of Artificial Sequence: Synthetic oligonucleotide
  Target: LAMA2; (-) strand; PAM type: YTN; PAM sequence: TTC
acagggtggtgatggagaat

SEQ ID NO: 293564 - DNA, 20 bp, Artificial Sequence
  Description of Artificial Sequence: Synthetic oligonucleotide
  Target: LAMA2; (-) strand; PAM type: YTN; PAM sequence: TTA
aaccaattcacagggtggtg

SEQ ID NO: 293565 - DNA, 20 bp, Artificial Sequence
  Description of Artificial Sequence: Synthetic oligonucleotide
  Target: LAMA2; (-) strand; PAM type: YTN; PAM sequence: TTT
aaaccaattcacagggtggt

SEQ ID NO: 293566 - DNA, 20 bp, Artificial Sequence
  Description of Artificial Sequence: Synthetic oligonucleotide
  Target: LAMA2; (-) strand; PAM type: YTN; PAM sequence: TTT
taaaccaattcacagggtgg

SEQ ID NO: 293567 - DNA, 20 bp, Artificial Sequence
  Description of Artificial Sequence: Synthetic oligonucleotide
  Target: LAMA2; (-) strand; PAM type: YTN; PAM sequence: TTT
ttaaaccaattcacagggtg

SEQ ID NO: 293568 - DNA, 20 bp, Artificial Sequence
  Description of Artificial Sequence: Synthetic oligonucleotide
  Target: LAMA2; (-) strand; PAM type: YTN; PAM sequence: TTT
tttaaaccaattcacagggt

SEQ ID NO: 293569 - DNA, 20 bp, Artificial Sequence
  Description of Artificial Sequence: Synthetic oligonucleotide
  Target: LAMA2; (-) strand; PAM type: YTN; PAM sequence: TTT
ttttaaaccaattcacaggg

SEQ ID NO: 293570 - DNA, 20 bp, Artificial Sequence
  Description of Artificial Sequence: Synthetic oligonucleotide
  Target: LAMA2; (-) strand; PAM type: YTN; PAM sequence: TTT
tttttaaaccaattcacagg

SEQ ID NO: 293571 - DNA, 20 bp, Artificial Sequence
  Description of Artificial Sequence: Synthetic oligonucleotide
  Target: LAMA2; (-) strand; PAM type: YTN; PAM sequence: TTA
ttttttttaaaccaattcac

SEQ ID NO: 293572 - DNA, 20 bp, Artificial Sequence
  Description of Artificial Sequence: Synthetic oligonucleotide
  Target: LAMA2; (-) strand; PAM type: YTN; PAM sequence: CTT
attttttttaaaccaattca

SEQ ID NO: 293573 - DNA, 20 bp, Artificial Sequence
  Description of Artificial Sequence: Synthetic oligonucleotide
  Target: LAMA2; (-) strand; PAM type: YTN; PAM sequence: CTG
ccacaaggaccatcatagtg

SEQ ID NO: 293574 - DNA, 20 bp, Artificial Sequence
  Description of Artificial Sequence: Synthetic oligonucleotide
  Target: LAMA2; (-) strand; PAM type: YTN; PAM sequence: TTC
tgccacaaggaccatcatag

SEQ ID NO: 293575 - DNA, 20 bp, Artificial Sequence
  Description of Artificial Sequence: Synthetic oligonucleotide
  Target: LAMA2; (-) strand; PAM type: YTN; PAM sequence: CTG
tagtgtggttctgccacaag

SEQ ID NO: 293576 - DNA, 20 bp, Artificial Sequence
  Description of Artificial Sequence: Synthetic oligonucleotide
  Target: LAMA2; (-) strand; PAM type: YTN; PAM sequence: CTC
tgtagtgtggttctgccaca

SEQ ID NO: 293577 - DNA, 20 bp, Artificial Sequence
  Description of Artificial Sequence: Synthetic oligonucleotide
  Target: LAMA2; (-) strand; PAM type: YTN; PAM sequence: CTC
tctgtagtgtggttctgcca

SEQ ID NO: 293578 - DNA, 20 bp, Artificial Sequence
  Description of Artificial Sequence: Synthetic oligonucleotide
  Target: LAMA2; (-) strand; PAM type: YTN; PAM sequence: CTC
tctctgtagtgtggttctgc

SEQ ID NO: 293579 - DNA, 20 bp, Artificial Sequence
  Description of Artificial Sequence: Synthetic oligonucleotide
  Target: LAMA2; (-) strand; PAM type: YTN; PAM sequence: CTG
gtgtagcctctctctgtagt

SEQ ID NO: 293580 - DNA, 20 bp, Artificial Sequence
  Description of Artificial Sequence: Synthetic oligonucleotide
  Target: LAMA2; (-) strand; PAM type: YTN; PAM sequence: TTC
tggtgtagcctctctctgta

SEQ ID NO: 293581 - DNA, 20 bp, Artificial Sequence
  Description of Artificial Sequence: Synthetic oligonucleotide
  Target: LAMA2; (-) strand; PAM type: YTN; PAM sequence: TTT
ctggtgtagcctctctctgt

SEQ ID NO: 293582 - DNA, 20 bp, Artificial Sequence
  Description of Artificial Sequence: Synthetic oligonucleotide
  Target: LAMA2; (-) strand; PAM type: YTN; PAM sequence: CTT
tctggtgtagcctctctctg

SEQ ID NO: 293583 - DNA, 20 bp, Artificial Sequence
  Description of Artificial Sequence: Synthetic oligonucleotide
  Target: LAMA2; (-) strand; PAM type: YTN; PAM sequence: CTC
tttctggtgtagcctctctc

SEQ ID NO: 293584 - DNA, 20 bp, Artificial Sequence
  Description of Artificial Sequence: Synthetic oligonucleotide
  Target: LAMA2; (-) strand; PAM type: YTN; PAM sequence: TTC
ctctttctggtgtagcctct

SEQ ID NO: 293585 - DNA, 20 bp, Artificial Sequence
  Description of Artificial Sequence: Synthetic oligonucleotide
  Target: LAMA2; (-) strand; PAM type: YTN; PAM sequence: CTT
cctctttctggtgtagcctc

SEQ ID NO: 293586 - DNA, 20 bp, Artificial Sequence
  Description of Artificial Sequence: Synthetic oligonucleotide
  Target: LAMA2; (-) strand; PAM type: YTN; PAM sequence: CTA
gaggccttcctctttctggt

SEQ ID NO: 293587 - DNA, 20 bp, Artificial Sequence
  Description of Artificial Sequence: Synthetic oligonucleotide
  Target: LAMA2; (-) strand; PAM type: YTN; PAM sequence: TTA
aaaagctagaggccttcctc

SEQ ID NO: 293588 - DNA, 20 bp, Artificial Sequence
  Description of Artificial Sequence: Synthetic oligonucleotide
  Target: LAMA2; (-) strand; PAM type: YTN; PAM sequence: TTT
aaaaagctagaggccttcct

SEQ ID NO: 293589 - DNA, 20 bp, Artificial Sequence
  Description of Artificial Sequence: Synthetic oligonucleotide
  Target: LAMA2; (-) strand; PAM type: YTN; PAM sequence: TTT
taaaaagctagaggccttcc

SEQ ID NO: 293590 - DNA, 20 bp, Artificial Sequence
  Description of Artificial Sequence: Synthetic oligonucleotide
  Target: LAMA2; (-) strand; PAM type: YTN; PAM sequence: TTA
gaattttaaaaagctagagg

SEQ ID NO: 293591 - DNA, 20 bp, Artificial Sequence
  Description of Artificial Sequence: Synthetic oligonucleotide
  Target: LAMA2; (-) strand; PAM type: YTN; PAM sequence: TTG
attagaattttaaaaagcta

SEQ ID NO: 293592 - DNA, 20 bp, Artificial Sequence
  Description of Artificial Sequence: Synthetic oligonucleotide
  Target: LAMA2; (-) strand; PAM type: YTN; PAM sequence: CTT
gattagaattttaaaaagct

SEQ ID NO: 293593 - DNA, 20 bp, Artificial Sequence
  Description of Artificial Sequence: Synthetic oligonucleotide
  Target: LAMA2; (-) strand; PAM type: YTN; PAM sequence: TTC
ttgattagaattttaaaaag

SEQ ID NO: 293594 - DNA, 20 bp, Artificial Sequence
  Description of Artificial Sequence: Synthetic oligonucleotide
  Target: LAMA2; (-) strand; PAM type: YTN; PAM sequence: CTG
ttcttgattagaattttaaa

SEQ ID NO: 293595 - DNA, 20 bp, Artificial Sequence
  Description of Artificial Sequence: Synthetic oligonucleotide
  Target: LAMA2; (-) strand; PAM type: YTN; PAM sequence: CTC
tgttcttgattagaatttta

SEQ ID NO: 293596 - DNA, 20 bp, Artificial Sequence
  Description of Artificial Sequence: Synthetic oligonucleotide
  Target: LAMA2; (-) strand; PAM type: YTN; PAM sequence: TTG
tccaaggagagtaaatctct

SEQ ID NO: 293597 - DNA, 20 bp, Artificial Sequence
  Description of Artificial Sequence: Synthetic oligonucleotide
  Target: LAMA2; (-) strand; PAM type: YTN; PAM sequence: TTA
aagattgtccaaggagagta

SEQ ID NO: 293598 - DNA, 20 bp, Artificial Sequence
  Description of Artificial Sequence: Synthetic oligonucleotide
  Target: LAMA2; (-) strand; PAM type: YTN; PAM sequence: CTG
ttaaagattgtccaaggaga

SEQ ID NO: 293599 - DNA, 20 bp, Artificial Sequence
  Description of Artificial Sequence: Synthetic oligonucleotide
  Target: LAMA2; (-) strand; PAM type: YTN; PAM sequence: CTC
tgttaaagattgtccaagga

SEQ ID NO: 293600 - DNA, 20 bp, Artificial Sequence
  Description of Artificial Sequence: Synthetic oligonucleotide
  Target: LAMA2; (-) strand; PAM type: YTN; PAM sequence: TTA
atgaaggatataagcctctg

SEQ ID NO: 293601 - DNA, 20 bp, Artificial Sequence
  Description of Artificial Sequence: Synthetic oligonucleotide
  Target: LAMA2; (-) strand; PAM type: YTN; PAM sequence: TTT
aatgaaggatataagcctct

SEQ ID NO: 293602 - DNA, 20 bp, Artificial Sequence
  Description of Artificial Sequence: Synthetic oligonucleotide
  Target: LAMA2; (-) strand; PAM type: YTN; PAM sequence: TTT
taatgaaggatataagcctc

SEQ ID NO: 293603 - DNA, 20 bp, Artificial Sequence
  Description of Artificial Sequence: Synthetic oligonucleotide
  Target: LAMA2; (-) strand; PAM type: YTN; PAM sequence: CTA
aggttttaatgaaggatata

SEQ ID NO: 293604 - DNA, 20 bp, Artificial Sequence
  Description of Artificial Sequence: Synthetic oligonucleotide
  Target: LAMA2; (-) strand; PAM type: YTN; PAM sequence: TTC
taaggttttaatgaaggata

SEQ ID NO: 293605 - DNA, 20 bp, Artificial Sequence
  Description of Artificial Sequence: Synthetic oligonucleotide
  Target: LAMA2; (-) strand; PAM type: YTN; PAM sequence: CTT
ctaaggttttaatgaaggat

SEQ ID NO: 293606 - DNA, 20 bp, Artificial Sequence
  Description of Artificial Sequence: Synthetic oligonucleotide
  Target: LAMA2; (-) strand; PAM type: YTN; PAM sequence: TTA
gcaacatgatatcacagggc

SEQ ID NO: 293607 - DNA, 20 bp, Artificial Sequence
  Description of Artificial Sequence: Synthetic oligonucleotide
  Target: LAMA2; (-) strand; PAM type: YTN; PAM sequence: CTT
agcaacatgatatcacaggg

SEQ ID NO: 293608 - DNA, 20 bp, Artificial Sequence
  Description of Artificial Sequence: Synthetic oligonucleotide
  Target: LAMA2; (-) strand; PAM type: YTN; PAM sequence: TTC
ttagcaacatgatatcacag

SEQ ID NO: 293609 - DNA, 20 bp, Artificial Sequence
  Description of Artificial Sequence: Synthetic oligonucleotide
  Target: LAMA2; (-) strand; PAM type: YTN; PAM sequence: CTT
cttagcaacatgatatcaca

SEQ ID NO: 293610 - DNA, 20 bp, Artificial Sequence
  Description of Artificial Sequence: Synthetic oligonucleotide
  Target: LAMA2; (-) strand; PAM type: YTN; PAM sequence: CTC
ttcttagcaacatgatatca

SEQ ID NO: 293611 - DNA, 20 bp, Artificial Sequence
  Description of Artificial Sequence: Synthetic oligonucleotide
  Target: LAMA2; (-) strand; PAM type: YTN; PAM sequence: CTG
aaagcagcctcttcttagca

SEQ ID NO: 293612 - DNA, 20 bp, Artificial Sequence
  Description of Artificial Sequence: Synthetic oligonucleotide
  Target: LAMA2; (-) strand; PAM type: YTN; PAM sequence: TTA
gctgaaagcagcctcttctt

SEQ ID NO: 293613 - DNA, 20 bp, Artificial Sequence
  Description of Artificial Sequence: Synthetic oligonucleotide
  Target: LAMA2; (-) strand; PAM type: YTN; PAM sequence: TTT
agctgaaagcagcctcttct

SEQ ID NO: 293614 - DNA, 20 bp, Artificial Sequence
  Description of Artificial Sequence: Synthetic oligonucleotide
  Target: LAMA2; (-) strand; PAM type: YTN; PAM sequence: CTT
tagctgaaagcagcctcttc

SEQ ID NO: 293615 - DNA, 20 bp, Artificial Sequence
  Description of Artificial Sequence: Synthetic oligonucleotide
  Target: LAMA2; (-) strand; PAM type: YTN; PAM sequence: TTC
ccctttagctgaaagcagcc

SEQ ID NO: 293616 - DNA, 20 bp, Artificial Sequence
  Description of Artificial Sequence: Synthetic oligonucleotide
  Target: LAMA2; (-) strand; PAM type: YTN; PAM sequence: TTT
cccctttagctgaaagcagc

SEQ ID NO: 293617 - DNA, 20 bp, Artificial Sequence
  Description of Artificial Sequence: Synthetic oligonucleotide
  Target: LAMA2; (-) strand; PAM type: YTN; PAM sequence: TTT
tcccctttagctgaaagcag

SEQ ID NO: 293618 - DNA, 20 bp, Artificial Sequence
  Description of Artificial Sequence: Synthetic oligonucleotide
  Target: LAMA2; (-) strand; PAM type: YTN; PAM sequence: TTT
ttcccctttagctgaaagca

SEQ ID NO: 293619 - DNA, 20 bp, Artificial Sequence
  Description of Artificial Sequence: Synthetic oligonucleotide
  Target: LAMA2; (-) strand; PAM type: YTN; PAM sequence: CTT
tttcccctttagctgaaagc

SEQ ID NO: 293620 - DNA, 20 bp, Artificial Sequence
  Description of Artificial Sequence: Synthetic oligonucleotide
  Target: LAMA2; (-) strand; PAM type: YTN; PAM sequence: CTC
tttttcccctttagctgaaa

SEQ ID NO: 293621 - DNA, 20 bp, Artificial Sequence
  Description of Artificial Sequence: Synthetic oligonucleotide
  Target: LAMA2; (-) strand; PAM type: YTN; PAM sequence: CTA
cactctttttcccctttagc

SEQ ID NO: 293622 - DNA, 20 bp, Artificial Sequence
  Description of Artificial Sequence: Synthetic oligonucleotide
  Target: LAMA2; (-) strand; PAM type: YTN; PAM sequence: CTC
ccctacactctttttcccct

SEQ ID NO: 293623 - DNA, 20 bp, Artificial Sequence
  Description of Artificial Sequence: Synthetic oligonucleotide
  Target: LAMA2; (-) strand; PAM type: YTN; PAM sequence: CTG
agaagcccctcccctacact

SEQ ID NO: 293624 - DNA, 20 bp, Artificial Sequence
  Description of Artificial Sequence: Synthetic oligonucleotide
  Target: LAMA2; (-) strand; PAM type: YTN; PAM sequence: CTC
actgagaagcccctccccta

SEQ ID NO: 293625 - DNA, 20 bp, Artificial Sequence
  Description of Artificial Sequence: Synthetic oligonucleotide
  Target: LAMA2; (-) strand; PAM type: YTN; PAM sequence: TTC
cgggtatgtgtgactcactg

SEQ ID NO: 293626 - DNA, 20 bp, Artificial Sequence
  Description of Artificial Sequence: Synthetic oligonucleotide
  Target: LAMA2; (-) strand; PAM type: YTN; PAM sequence: CTT
ccgggtatgtgtgactcact

SEQ ID NO: 293627 - DNA, 20 bp, Artificial Sequence
  Description of Artificial Sequence: Synthetic oligonucleotide
  Target: LAMA2; (-) strand; PAM type: YTN; PAM sequence: CTC
acttccgggtatgtgtgact

SEQ ID NO: 293628 - DNA, 20 bp, Artificial Sequence
  Description of Artificial Sequence: Synthetic oligonucleotide
  Target: LAMA2; (-) strand; PAM type: YTN; PAM sequence: TTC
agaaaaccactcacttccgg

SEQ ID NO: 293629 - DNA, 20 bp, Artificial Sequence
  Description of Artificial Sequence: Synthetic oligonucleotide
  Target: LAMA2; (-) strand; PAM type: YTN; PAM sequence: TTT
cagaaaaccactcacttccg

SEQ ID NO: 293630 - DNA, 20 bp, Artificial Sequence
  Description of Artificial Sequence: Synthetic oligonucleotide
  Target: LAMA2; (-) strand; PAM type: YTN; PAM sequence: CTG
agacgagaatttcagaaaac

SEQ ID NO: 293631 - DNA, 20 bp, Artificial Sequence
  Description of Artificial Sequence: Synthetic oligonucleotide
  Target: LAMA2; (-) strand; PAM type: YTN; PAM sequence: TTC
ctgagacgagaatttcagaa

SEQ ID NO: 293632 - DNA, 20 bp, Artificial Sequence
  Description of Artificial Sequence: Synthetic oligonucleotide
  Target: LAMA2; (-) strand; PAM type: YTN; PAM sequence: TTT
cctgagacgagaatttcaga

SEQ ID NO: 293633 - DNA, 20 bp, Artificial Sequence
  Description of Artificial Sequence: Synthetic oligonucleotide
  Target: LAMA2; (-) strand; PAM type: YTN; PAM sequence: CTA
agagtgtcggtggtttcctg

SEQ ID NO: 293634 - DNA, 20 bp, Artificial Sequence
  Description of Artificial Sequence: Synthetic oligonucleotide
  Target: LAMA2; (-) strand; PAM type: YTN; PAM sequence: TTG
ctaagagtgtcggtggtttc

SEQ ID NO: 293635 - DNA, 20 bp, Artificial Sequence
  Description of Artificial Sequence: Synthetic oligonucleotide
  Target: LAMA2; (-) strand; PAM type: YTN; PAM sequence: CTT
gctaagagtgtcggtggttt

SEQ ID NO: 293636 - DNA, 20 bp, Artificial Sequence
  Description of Artificial Sequence: Synthetic oligonucleotide
  Target: LAMA2; (-) strand; PAM type: YTN; PAM sequence: TTC
cttgctaagagtgtcggtgg

SEQ ID NO: 293637 - DNA, 20 bp, Artificial Sequence
  Description of Artificial Sequence: Synthetic oligonucleotide
  Target: LAMA2; (-) strand; PAM type: YTN; PAM sequence: CTT
ccttgctaagagtgtcggtg

SEQ ID NO: 293638 - DNA, 20 bp, Artificial Sequence
  Description of Artificial Sequence: Synthetic oligonucleotide
  Target: LAMA2; (-) strand; PAM type: YTN; PAM sequence: TTC
agcttccttgctaagagtgt

SEQ ID NO: 293639 - DNA, 20 bp, Artificial Sequence
  Description of Artificial Sequence: Synthetic oligonucleotide
  Target: LAMA2; (-) strand; PAM type: YTN; PAM sequence: TTG
gcaaaacccaggaggttcag

SEQ ID NO: 293640 - DNA, 20 bp, Artificial Sequence
  Description of Artificial Sequence: Synthetic oligonucleotide
  Target: LAMA2; (-) strand; PAM type: YTN; PAM sequence: CTA
tggaaaaatgtgttggcaaa

SEQ ID NO: 293641 - DNA, 20 bp, Artificial Sequence
  Description of Artificial Sequence: Synthetic oligonucleotide
  Target: LAMA2; (-) strand; PAM type: YTN; PAM sequence: TTA
ccaaactatggaaaaatgtg

SEQ ID NO: 293642 - DNA, 20 bp, Artificial Sequence
  Description of Artificial Sequence: Synthetic oligonucleotide
  Target: LAMA2; (-) strand; PAM type: YTN; PAM sequence: TTT
accaaactatggaaaaatgt

SEQ ID NO: 293643 - DNA, 20 bp, Artificial Sequence
  Description of Artificial Sequence: Synthetic oligonucleotide
  Target: LAMA2; (-) strand; PAM type: YTN; PAM sequence: CTT
taccaaactatggaaaaatg

SEQ ID NO: 293644 - DNA, 20 bp, Artificial Sequence
  Description of Artificial Sequence: Synthetic oligonucleotide
  Target: LAMA2; (-) strand; PAM type: YTN; PAM sequence: TTC
tttaccaaactatggaaaaa

SEQ ID NO: 293645 - DNA, 20 bp, Artificial Sequence
  Description of Artificial Sequence: Synthetic oligonucleotide
  Target: LAMA2; (-) strand; PAM type: YTN; PAM sequence: TTT
ctttaccaaactatggaaaa

SEQ ID NO: 293646 - DNA, 20 bp, Artificial Sequence
  Description of Artificial Sequence: Synthetic oligonucleotide
  Target: LAMA2; (-) strand; PAM type: YTN; PAM sequence: CTT
tctttaccaaactatggaaa

SEQ ID NO: 293647 - DNA, 20 bp, Artificial Sequence
  Description of Artificial Sequence: Synthetic oligonucleotide
  Target: LAMA2; (-) strand; PAM type: YTN; PAM sequence: TTC
tttctttaccaaactatgga

SEQ ID NO: 293648 - DNA, 20 bp, Artificial Sequence
  Description of Artificial Sequence: Synthetic oligonucleotide
  Target: LAMA2; (-) strand; PAM type: YTN; PAM sequence: TTT
ctttctttaccaaactatgg

SEQ ID NO: 293649 - DNA, 20 bp, Artificial Sequence
  Description of Artificial Sequence: Synthetic oligonucleotide
  Target: LAMA2; (-) strand; PAM type: YTN; PAM sequence: TTG
aggtttctttctttaccaaa

SEQ ID NO: 293650 - DNA, 20 bp, Artificial Sequence
  Description of Artificial Sequence: Synthetic oligonucleotide
  Target: LAMA2; (-) strand; PAM type: YTN; PAM sequence: TTT
gaggtttctttctttaccaa

SEQ ID NO: 293651 - DNA, 20 bp, Artificial Sequence
  Description of Artificial Sequence: Synthetic oligonucleotide
  Target: LAMA2; (-) strand; PAM type: YTN; PAM sequence: TTT
tgaggtttctttctttacca

SEQ ID NO: 293652 - DNA, 20 bp, Artificial Sequence
  Description of Artificial Sequence: Synthetic oligonucleotide
  Target: LAMA2; (-) strand; PAM type: YTN; PAM sequence: CTT
ttgaggtttctttctttacc

SEQ ID NO: 293653 - DNA, 20 bp, Artificial Sequence
  Description of Artificial Sequence: Synthetic oligonucleotide
  Target: LAMA2; (-) strand; PAM type: YTN; PAM sequence: TTC
aaagagaaaatagggggaaa

SEQ ID NO: 293654 - DNA, 20 bp, Artificial Sequence
  Description of Artificial Sequence: Synthetic oligonucleotide
  Target: LAMA2; (-) strand; PAM type: YTN; PAM sequence: TTT
caaagagaaaatagggggaa

SEQ ID NO: 293655 - DNA, 20 bp, Artificial Sequence
  Description of Artificial Sequence: Synthetic oligonucleotide
  Target: LAMA2; (-) strand; PAM type: YTN; PAM sequence: TTA
gtttcaaagagaaaataggg

SEQ ID NO: 293656 - DNA, 20 bp, Artificial Sequence
  Description of Artificial Sequence: Synthetic oligonucleotide
  Target: LAMA2; (-) strand; PAM type: YTN; PAM sequence: TTT
agtttcaaagagaaaatagg

SEQ ID NO: 293657 - DNA, 20 bp, Artificial Sequence
  Description of Artificial Sequence: Synthetic oligonucleotide
  Target: LAMA2; (-) strand; PAM type: YTN; PAM sequence: TTA
agggggtgaagaagggaccg

SEQ ID NO: 293658 - DNA, 20 bp, Artificial Sequence
  Description of Artificial Sequence: Synthetic oligonucleotide
  Target: LAMA2; (-) strand; PAM type: YTN; PAM sequence: CTG
ttaagggggtgaagaaggga

SEQ ID NO: 293659 - DNA, 20 bp, Artificial Sequence
  Description of Artificial Sequence: Synthetic oligonucleotide
  Target: LAMA2; (-) strand; PAM type: YTN; PAM sequence: CTC
aaaaacgtcactgttaaggg

SEQ ID NO: 293660 - DNA, 20 bp, Artificial Sequence
  Description of Artificial Sequence: Synthetic oligonucleotide
  Target: LAMA2; (-) strand; PAM type: YTN; PAM sequence: CTG
tggctcaaaaacgtcactgt

SEQ ID NO: 293661 - DNA, 20 bp, Artificial Sequence
  Description of Artificial Sequence: Synthetic oligonucleotide
  Target: LAMA2; (-) strand; PAM type: YTN; PAM sequence: TTC
gctgtggctcaaaaacgtca

SEQ ID NO: 293662 - DNA, 20 bp, Artificial Sequence
  Description of Artificial Sequence: Synthetic oligonucleotide
  Target: LAMA2; (-) strand; PAM type: YTN; PAM sequence: TTT
cgctgtggctcaaaaacgtc

SEQ ID NO: 293663 - DNA, 20 bp, Artificial Sequence
  Description of Artificial Sequence: Synthetic oligonucleotide
  Target: LAMA2; (-) strand; PAM type: YTN; PAM sequence: TTC
aaaagtaagagaaagggaca

SEQ ID NO: 293664 - DNA, 20 bp, Artificial Sequence
  Description of Artificial Sequence: Synthetic oligonucleotide
  Target: LAMA2; (-) strand; PAM type: YTN; PAM sequence: TTA
caagtaagataattcaaaag

SEQ ID NO: 293665 - DNA, 20 bp, Artificial Sequence
  Description of Artificial Sequence: Synthetic oligonucleotide
  Target: LAMA2; (-) strand; PAM type: YTN; PAM sequence: TTT
acaagtaagataattcaaaa

SEQ ID NO: 293666 - DNA, 20 bp, Artificial Sequence
  Description of Artificial Sequence: Synthetic oligonucleotide
  Target: LAMA2; (-) strand; PAM type: YTN; PAM sequence: CTT
tacaagtaagataattcaaa

SEQ ID NO: 293667 - DNA, 20 bp, Artificial Sequence
  Description of Artificial Sequence: Synthetic oligonucleotide
  Target: LAMA2; (-) strand; PAM type: YTN; PAM sequence: TTG
gcactttacaagtaagataa

SEQ ID NO: 293668 - DNA, 20 bp, Artificial Sequence
  Description of Artificial Sequence: Synthetic oligonucleotide
  Target: LAMA2; (-) strand; PAM type: YTN; PAM sequence: CTG
aattggcactttacaagtaa

SEQ ID NO: 293669 - DNA, 20 bp, Artificial Sequence
  Description of Artificial Sequence: Synthetic oligonucleotide
  Target: LAMA2; (-) strand; PAM type: YTN; PAM sequence: CTC
tgaattggcactttacaagt

SEQ ID NO: 293670 - DNA, 20 bp, Artificial Sequence
  Description of Artificial Sequence: Synthetic oligonucleotide
  Target: LAMA2; (-) strand; PAM type: YTN; PAM sequence: CTG
gaaaaaacaataagccaggg

SEQ ID NO: 293671 - DNA, 20 bp, Artificial Sequence
  Description of Artificial Sequence: Synthetic oligonucleotide
  Target: LAMA2; (-) strand; PAM type: YTN; PAM sequence: TTA
taaagaagtaaaaccacatg

SEQ ID NO: 293672 - DNA, 20 bp, Artificial Sequence
  Description of Artificial Sequence: Synthetic oligonucleotide
  Target: LAMA2; (-) strand; PAM type: YTN; PAM sequence: TTT
ataaagaagtaaaaccacat

SEQ ID NO: 293673 - DNA, 20 bp, Artificial Sequence
  Description of Artificial Sequence: Synthetic oligonucleotide
  Target: LAMA2; (-) strand; PAM type: YTN; PAM sequence: CTT
tataaagaagtaaaaccaca

SEQ ID NO: 293674 - DNA, 20 bp, Artificial Sequence
  Description of Artificial Sequence: Synthetic oligonucleotide
  Target: LAMA2; (-) strand; PAM type: YTN; PAM sequence: TTG
actttataaagaagtaaaac

SEQ ID NO: 293675 - DNA, 20 bp, Artificial Sequence
  Description of Artificial Sequence: Synthetic oligonucleotide
  Target: LAMA2; (-) strand; PAM type: YTN; PAM sequence: CTT
gactttataaagaagtaaaa

SEQ ID NO: 293676 - DNA, 20 bp, Artificial Sequence
  Description of Artificial Sequence: Synthetic oligonucleotide
  Target: LAMA2; (-) strand; PAM type: YTN; PAM sequence: TTA
cttgactttataaagaagta

SEQ ID NO: 293677 - DNA, 20 bp, Artificial Sequence
  Description of Artificial Sequence: Synthetic oligonucleotide
  Target: LAMA2; (-) strand; PAM type: YTN; PAM sequence: CTT
acttgactttataaagaagt

SEQ ID NO: 293678 - DNA, 20 bp, Artificial Sequence
  Description of Artificial Sequence: Synthetic oligonucleotide
  Target: LAMA2; (-) strand; PAM type: YTN; PAM sequence: CTC
ttacttgactttataaagaa

SEQ ID NO: 293679 - DNA, 20 bp, Artificial Sequence
  Description of Artificial Sequence: Synthetic oligonucleotide
  Target: LAMA2; (-) strand; PAM type: YTN; PAM sequence: CTA
aagtaccctcttacttgact

SEQ ID NO: 293680 - DNA, 20 bp, Artificial Sequence
  Description of Artificial Sequence: Synthetic oligonucleotide
  Target: LAMA2; (-) strand; PAM type: YTN; PAM sequence: CTC
agtcctaaagtaccctctta

SEQ ID NO: 293681 - DNA, 20 bp, Artificial Sequence
  Description of Artificial Sequence: Synthetic oligonucleotide
  Target: LAMA2; (-) strand; PAM type: YTN; PAM sequence: TTG
gatggaaacctcagtcctaa

SEQ ID NO: 293682 - DNA, 20 bp, Artificial Sequence
  Description of Artificial Sequence: Synthetic oligonucleotide
  Target: LAMA2; (-) strand; PAM type: YTN; PAM sequence: CTT
ggatggaaacctcagtccta

SEQ ID NO: 293683 - DNA, 20 bp, Artificial Sequence
  Description of Artificial Sequence: Synthetic oligonucleotide
  Target: LAMA2; (-) strand; PAM type: YTN; PAM sequence: CTG
gagagaaaaccggagtactt

SEQ ID NO: 293684 - DNA, 20 bp, Artificial Sequence
  Description of Artificial Sequence: Synthetic oligonucleotide
  Target: LAMA2; (-) strand; PAM type: YTN; PAM sequence: TTC
atatctggagagaaaaccgg

SEQ ID NO: 293685 - DNA, 20 bp, Artificial Sequence
  Description of Artificial Sequence: Synthetic oligonucleotide
  Target: LAMA2; (-) strand; PAM type: YTN; PAM sequence: CTT
catatctggagagaaaaccg

SEQ ID NO: 293686 - DNA, 20 bp, Artificial Sequence
  Description of Artificial Sequence: Synthetic oligonucleotide
  Target: LAMA2; (-) strand; PAM type: YTN; PAM sequence: TTA
cttcatatctggagagaaaa

SEQ ID NO: 293687 - DNA, 20 bp, Artificial Sequence
  Description of Artificial Sequence: Synthetic oligonucleotide
  Target: LAMA2; (-) strand; PAM type: YTN; PAM sequence: CTT
acttcatatctggagagaaa

SEQ ID NO: 293688 - DNA, 20 bp, Artificial Sequence
  Description of Artificial Sequence: Synthetic oligonucleotide
  Target: LAMA2; (-) strand; PAM type: YTN; PAM sequence: CTG
aaaacttacttcatatctgg

SEQ ID NO: 293689 - DNA, 20 bp, Artificial Sequence
  Description of Artificial Sequence: Synthetic oligonucleotide
  Target: LAMA2; (-) strand; PAM type: YTN; PAM sequence: TTA
ctgaaaacttacttcatatc

SEQ ID NO: 293690 - DNA, 20 bp, Artificial Sequence
  Description of Artificial Sequence: Synthetic oligonucleotide
  Target: LAMA2; (-) strand; PAM type: YTN; PAM sequence: CTG
gggatcatgaatggattact

SEQ ID NO: 293691 - DNA, 20 bp, Artificial Sequence
  Description of Artificial Sequence: Synthetic oligonucleotide
  Target: LAMA2; (-) strand; PAM type: YTN; PAM sequence: CTA
gcctggggatcatgaatgga

SEQ ID NO: 293692 - DNA, 20 bp, Artificial Sequence
  Description of Artificial Sequence: Synthetic oligonucleotide
  Target: LAMA2; (-) strand; PAM type: YTN; PAM sequence: TTA
gtcactagcctggggatcat

SEQ ID NO: 293693 - DNA, 20 bp, Artificial Sequence
  Description of Artificial Sequence: Synthetic oligonucleotide
  Target: LAMA2; (-) strand; PAM type: YTN; PAM sequence: TTA
gtcataagcattagtcacta

SEQ ID NO: 293694 - DNA, 20 bp, Artificial Sequence
  Description of Artificial Sequence: Synthetic oligonucleotide
  Target: LAMA2; (-) strand; PAM type: YTN; PAM sequence: CTA
ttagtcataagcattagtca

SEQ ID NO: 293695 - DNA, 20 bp, Artificial Sequence
  Description of Artificial Sequence: Synthetic oligonucleotide
  Target: LAMA2; (-) strand; PAM type: YTN; PAM sequence: TTA
acagtcatcatggtgctatt

SEQ ID NO: 293696 - DNA, 20 bp, Artificial Sequence
  Description of Artificial Sequence: Synthetic oligonucleotide
  Target: LAMA2; (-) strand; PAM type: YTN; PAM sequence: CTT
aacagtcatcatggtgctat

SEQ ID NO: 293697 - DNA, 20 bp, Artificial Sequence
  Description of Artificial Sequence: Synthetic oligonucleotide
  Target: LAMA2; (-) strand; PAM type: YTN; PAM sequence: TTC
ggtcttaacagtcatcatgg

SEQ ID NO: 293698 - DNA, 20 bp, Artificial Sequence
  Description of Artificial Sequence: Synthetic oligonucleotide
  Target: LAMA2; (-) strand; PAM type: YTN; PAM sequence: TTT
cggtcttaacagtcatcatg

SEQ ID NO: 293699 - DNA, 20 bp, Artificial Sequence
  Description of Artificial Sequence: Synthetic oligonucleotide
  Target: LAMA2; (-) strand; PAM type: YTN; PAM sequence: TTG
agtttcggtcttaacagtca

SEQ ID NO: 293700 - DNA, 20 bp, Artificial Sequence
  Description of Artificial Sequence: Synthetic oligonucleotide
  Target: LAMA2; (-) strand; PAM type: YTN; PAM sequence: TTT
gagtttcggtcttaacagtc

SEQ ID NO: 293701 - DNA, 20 bp, Artificial Sequence
  Description of Artificial Sequence: Synthetic oligonucleotide
  Target: LAMA2; (-) strand; PAM type: YTN; PAM sequence: TTT
tgagtttcggtcttaacagt

SEQ ID NO: 293702 - DNA, 20 bp, Artificial Sequence
  Description of Artificial Sequence: Synthetic oligonucleotide
  Target: LAMA2; (-) strand; PAM type: YTN; PAM sequence: TTC
cggaagcaagttttgagttt

SEQ ID NO: 293703 - DNA, 20 bp, Artificial Sequence
  Description of Artificial Sequence: Synthetic oligonucleotide
  Target: LAMA2; (-) strand; PAM type: YTN; PAM sequence: TTG
ttccggaagcaagttttgag

SEQ ID NO: 293704 - DNA, 20 bp, Artificial Sequence
  Description of Artificial Sequence: Synthetic oligonucleotide
  Target: LAMA2; (-) strand; PAM type: YTN; PAM sequence: TTT
gttccggaagcaagttttga

SEQ ID NO: 293705 - DNA, 20 bp, Artificial Sequence
  Description of Artificial Sequence: Synthetic oligonucleotide
  Target: LAMA2; (-) strand; PAM type: YTN; PAM sequence: TTT
tgttccggaagcaagttttg

SEQ ID NO: 293706 - DNA, 20 bp, Artificial Sequence
  Description of Artificial Sequence: Synthetic oligonucleotide
  Target: LAMA2; (-) strand; PAM type: YTN; PAM sequence: CTT
ttgttccggaagcaagtttt

SEQ ID NO: 293707 - DNA, 20 bp, Artificial Sequence
  Description of Artificial Sequence: Synthetic oligonucleotide
  Target: LAMA2; (-) strand; PAM type: YTN; PAM sequence: CTC
ttttgttccggaagcaagtt

SEQ ID NO: 293708 - DNA, 20 bp, Artificial Sequence
  Description of Artificial Sequence: Synthetic oligonucleotide
  Target: LAMA2; (-) strand; PAM type: YTN; PAM sequence: TTC
tcttttgttccggaagcaag

SEQ ID NO: 293709 - DNA, 20 bp, Artificial Sequence
  Description of Artificial Sequence: Synthetic oligonucleotide
  Target: LAMA2; (-) strand; PAM type: YTN; PAM sequence: TTT
ctcttttgttccggaagcaa

SEQ ID NO: 293710 - DNA, 20 bp, Artificial Sequence
  Description of Artificial Sequence: Synthetic oligonucleotide
  Target: LAMA2; (-) strand; PAM type: YTN; PAM sequence: TTT
tctcttttgttccggaagca

SEQ ID NO: 293711 - DNA, 20 bp, Artificial Sequence
  Description of Artificial Sequence: Synthetic oligonucleotide
  Target: LAMA2; (-) strand; PAM type: YTN; PAM sequence: CTG
atgaaaatgaccaaaggcat

SEQ ID NO: 293712 - DNA, 20 bp, Artificial Sequence
  Description of Artificial Sequence: Synthetic oligonucleotide
  Target: LAMA2; (-) strand; PAM type: YTN; PAM sequence: TTC
tgatgaaaatgaccaaaggc

SEQ ID NO: 293713 - DNA, 20 bp, Artificial Sequence
  Description of Artificial Sequence: Synthetic oligonucleotide
  Target: LAMA2; (-) strand; PAM type: YTN; PAM sequence: CTG
ggccaagaatcagaaggaga

SEQ ID NO: 293714 - DNA, 20 bp, Artificial Sequence
  Description of Artificial Sequence: Synthetic oligonucleotide
  Target: LAMA2; (-) strand; PAM type: YTN; PAM sequence: TTG
gatccctgggccaagaatca

SEQ ID NO: 293715 - DNA, 20 bp, Artificial Sequence
  Description of Artificial Sequence: Synthetic oligonucleotide
  Target: LAMA2; (-) strand; PAM type: YTN; PAM sequence: CTT
ggatccctgggccaagaatc

SEQ ID NO: 293716 - DNA, 20 bp, Artificial Sequence
  Description of Artificial Sequence: Synthetic oligonucleotide
  Target: LAMA2; (-) strand; PAM type: YTN; PAM sequence: TTA
caacaatccttggatccctg

SEQ ID NO: 293717 - DNA, 20 bp, Artificial Sequence
  Description of Artificial Sequence: Synthetic oligonucleotide
  Target: LAMA2; (-) strand; PAM type: YTN; PAM sequence: TTT
acaacaatccttggatccct

SEQ ID NO: 293718 - DNA, 20 bp, Artificial Sequence
  Description of Artificial Sequence: Synthetic oligonucleotide
  Target: LAMA2; (-) strand; PAM type: YTN; PAM sequence: TTA
tttacaacaatccttggatc

SEQ ID NO: 293719 - DNA, 20 bp, Artificial Sequence
  Description of Artificial Sequence: Synthetic oligonucleotide
  Target: LAMA2; (-) strand; PAM type: YTN; PAM sequence: CTT
atttacaacaatccttggat

SEQ ID NO: 293720 - DNA, 20 bp, Artificial Sequence
  Description of Artificial Sequence: Synthetic oligonucleotide
  Target: LAMA2; (-) strand; PAM type: YTN; PAM sequence: CTA
cttatttacaacaatccttg

SEQ ID NO: 293721 - DNA, 20 bp, Artificial Sequence
  Description of Artificial Sequence: Synthetic oligonucleotide
  Target: LAMA2; (-) strand; PAM type: YTN; PAM sequence: CTC
atgctacttatttacaacaa

SEQ ID NO: 293722 - DNA, 20 bp, Artificial Sequence
  Description of Artificial Sequence: Synthetic oligonucleotide
  Target: LAMA2; (-) strand; PAM type: YTN; PAM sequence: TTG
agaacctcatgctacttatt

SEQ ID NO: 293723 - DNA, 20 bp, Artificial Sequence
  Description of Artificial Sequence: Synthetic oligonucleotide
  Target: LAMA2; (-) strand; PAM type: YTN; PAM sequence: CTA
attgagaacctcatgctact

SEQ ID NO: 293724 - DNA, 20 bp, Artificial Sequence
  Description of Artificial Sequence: Synthetic oligonucleotide
  Target: LAMA2; (-) strand; PAM type: YTN; PAM sequence: CTG
ctaattgagaacctcatgct

SEQ ID NO: 293725 - DNA, 20 bp, Artificial Sequence
  Description of Artificial Sequence: Synthetic oligonucleotide
  Target: LAMA2; (-) strand; PAM type: YTN; PAM sequence: CTC
acacactgctaattgagaac

SEQ ID NO: 293726 - DNA, 20 bp, Artificial Sequence
  Description of Artificial Sequence: Synthetic oligonucleotide
  Target: LAMA2; (-) strand; PAM type: YTN; PAM sequence: TTA
tgagagagaactcacacact

SEQ ID NO: 293727 - DNA, 20 bp, Artificial Sequence
  Description of Artificial Sequence: Synthetic oligonucleotide
  Target: LAMA2; (-) strand; PAM type: YTN; PAM sequence: CTT
atgagagagaactcacacac

SEQ ID NO: 293728 - DNA, 20 bp, Artificial Sequence
  Description of Artificial Sequence: Synthetic oligonucleotide
  Target: LAMA2; (-) strand; PAM type: YTN; PAM sequence: TTG
cttatgagagagaactcaca

SEQ ID NO: 293729 - DNA, 20 bp, Artificial Sequence
  Description of Artificial Sequence: Synthetic oligonucleotide
  Target: LAMA2; (-) strand; PAM type: YTN; PAM sequence: TTT
gcttatgagagagaactcac

SEQ ID NO: 293730 - DNA, 20 bp, Artificial Sequence
  Description of Artificial Sequence: Synthetic oligonucleotide
  Target: LAMA2; (-) strand; PAM type: YTN; PAM sequence: CTA
atttgcttatgagagagaac

SEQ ID NO: 293731 - DNA, 20 bp, Artificial Sequence
  Description of Artificial Sequence: Synthetic oligonucleotide
  Target: LAMA2; (-) strand; PAM type: YTN; PAM sequence: TTC
ctaatttgcttatgagagag

SEQ ID NO: 293732 - DNA, 20 bp, Artificial Sequence
  Description of Artificial Sequence: Synthetic oligonucleotide
  Target: LAMA2; (-) strand; PAM type: YTN; PAM sequence: TTT
cctaatttgcttatgagaga

SEQ ID NO: 293733 - DNA, 20 bp, Artificial Sequence
  Description of Artificial Sequence: Synthetic oligonucleotide
  Target: LAMA2; (-) strand; PAM type: YTN; PAM sequence: TTT
tcctaatttgcttatgagag

SEQ ID NO: 293734 - DNA, 20 bp, Artificial Sequence
  Description of Artificial Sequence: Synthetic oligonucleotide
  Target: LAMA2; (-) strand; PAM type: YTN; PAM sequence: TTA
attttcctaatttgcttatg

SEQ ID NO: 293735 - DNA, 20 bp, Artificial Sequence
  Description of Artificial Sequence: Synthetic oligonucleotide
  Target: LAMA2; (-) strand; PAM type: YTN; PAM sequence: TTC
attaattttcctaatttgct

SEQ ID NO: 293736 - DNA, 20 bp, Artificial Sequence
  Description of Artificial Sequence: Synthetic oligonucleotide
  Target: LAMA2; (-) strand; PAM type: YTN; PAM sequence: TTT
cattaattttcctaatttgc

SEQ ID NO: 293737 - DNA, 20 bp, Artificial Sequence
  Description of Artificial Sequence: Synthetic oligonucleotide
  Target: LAMA2; (-) strand; PAM type: YTN; PAM sequence: CTG
tttcattaattttcctaatt

SEQ ID NO: 293738 - DNA, 20 bp, Artificial Sequence
  Description of Artificial Sequence: Synthetic oligonucleotide
  Target: LAMA2; (-) strand; PAM type: YTN; PAM sequence: TTA
gtggctgtttcattaatttt

SEQ ID NO: 293739 - DNA, 20 bp, Artificial Sequence
  Description of Artificial Sequence: Synthetic oligonucleotide
  Target: LAMA2; (-) strand; PAM type: YTN; PAM sequence: CTT
agtggctgtttcattaattt

SEQ ID NO: 293740 - DNA, 20 bp, Artificial Sequence
  Description of Artificial Sequence: Synthetic oligonucleotide
  Target: LAMA2; (-) strand; PAM type: YTN; PAM sequence: TTC
cttagtggctgtttcattaa

SEQ ID NO: 293741 - DNA, 20 bp, Artificial Sequence
  Description of Artificial Sequence: Synthetic oligonucleotide
  Target: LAMA2; (-) strand; PAM type: YTN; PAM sequence: TTT
ccttagtggctgtttcatta

SEQ ID NO: 293742 - DNA, 20 bp, Artificial Sequence
  Description of Artificial Sequence: Synthetic oligonucleotide
  Target: LAMA2; (-) strand; PAM type: YTN; PAM sequence: TTT
tccttagtggctgtttcatt

SEQ ID NO: 293743 - DNA, 20 bp, Artificial Sequence
  Description of Artificial Sequence: Synthetic oligonucleotide
  Target: LAMA2; (-) strand; PAM type: YTN; PAM sequence: TTG
caatgattttccttagtggc

SEQ ID NO: 293744 - DNA, 20 bp, Artificial Sequence
  Description of Artificial Sequence: Synthetic oligonucleotide
  Target: LAMA2; (-) strand; PAM type: YTN; PAM sequence: CTT
gcaatgattttccttagtgg

SEQ ID NO: 293745 - DNA, 20 bp, Artificial Sequence
  Description of Artificial Sequence: Synthetic oligonucleotide
  Target: LAMA2; (-) strand; PAM type: YTN; PAM sequence: TTC
cttgcaatgattttccttag

SEQ ID NO: 293746 - DNA, 20 bp, Artificial Sequence
  Description of Artificial Sequence: Synthetic oligonucleotide
  Target: LAMA2; (-) strand; PAM type: YTN; PAM sequence: TTG
ttccttgcaatgattttcct

SEQ ID NO: 293747 - DNA, 20 bp, Artificial Sequence
  Description of Artificial Sequence: Synthetic oligonucleotide
  Target: LAMA2; (-) strand; PAM type: YTN; PAM sequence: CTA
attgttccttgcaatgattt

SEQ ID NO: 293748 - DNA, 20 bp, Artificial Sequence
  Description of Artificial Sequence: Synthetic oligonucleotide
  Target: LAMA2; (-) strand; PAM type: YTN; PAM sequence: CTG
ctaattgttccttgcaatga

SEQ ID NO: 293749 - DNA, 20 bp, Artificial Sequence
  Description of Artificial Sequence: Synthetic oligonucleotide
  Target: LAMA2; (-) strand; PAM type: YTN; PAM sequence: TTG
aatagaagaggcaggcaagg

SEQ ID NO: 293750 - DNA, 20 bp, Artificial Sequence
  Description of Artificial Sequence: Synthetic oligonucleotide
  Target: LAMA2; (-) strand; PAM type: YTN; PAM sequence: TTT
gaatagaagaggcaggcaag

SEQ ID NO: 293751 - DNA, 20 bp, Artificial Sequence
  Description of Artificial Sequence: Synthetic oligonucleotide
  Target: LAMA2; (-) strand; PAM type: YTN; PAM sequence: TTT
tgaatagaagaggcaggcaa

SEQ ID NO: 293752 - DNA, 20 bp, Artificial Sequence
  Description of Artificial Sequence: Synthetic oligonucleotide
  Target: LAMA2; (-) strand; PAM type: YTN; PAM sequence: CTT
ttgaatagaagaggcaggca

SEQ ID NO: 293753 - DNA, 20 bp, Artificial Sequence
  Description of Artificial Sequence: Synthetic oligonucleotide
  Target: LAMA2; (-) strand; PAM type: YTN; PAM sequence: CTG
atggcttttgaatagaagag

SEQ ID NO: 293754 - DNA, 20 bp, Artificial Sequence
  Description of Artificial Sequence: Synthetic oligonucleotide
  Target: LAMA2; (-) strand; PAM type: YTN; PAM sequence: TTA
taaagaatgtagctgatggc

SEQ ID NO: 293755 - DNA, 20 bp, Artificial Sequence
  Description of Artificial Sequence: Synthetic oligonucleotide
  Target: LAMA2; (-) strand; PAM type: YTN; PAM sequence: TTT
ataaagaatgtagctgatgg

SEQ ID NO: 293756 - DNA, 20 bp, Artificial Sequence
  Description of Artificial Sequence: Synthetic oligonucleotide
  Target: LAMA2; (-) strand; PAM type: YTN; PAM sequence: TTT
tataaagaatgtagctgatg

SEQ ID NO: 293757 - DNA, 20 bp, Artificial Sequence
  Description of Artificial Sequence: Synthetic oligonucleotide
  Target: LAMA2; (-) strand; PAM type: YTN; PAM sequence: CTT
ttataaagaatgtagctgat

SEQ ID NO: 293758 - DNA, 20 bp, Artificial Sequence
  Description of Artificial Sequence: Synthetic oligonucleotide
  Target: LAMA2; (-) strand; PAM type: YTN; PAM sequence: TTA
aagcaccttttataaagaat

SEQ ID NO: 293759 - DNA, 20 bp, Artificial Sequence
  Description of Artificial Sequence: Synthetic oligonucleotide
  Target: LAMA2; (-) strand; PAM type: YTN; PAM sequence: CTT
aaagcaccttttataaagaa

SEQ ID NO: 293760 - DNA, 20 bp, Artificial Sequence
  Description of Artificial Sequence: Synthetic oligonucleotide
  Target: LAMA2; (-) strand; PAM type: YTN; PAM sequence: TTG
caggaatcaacagcaaacac

SEQ ID NO: 293761 - DNA, 20 bp, Artificial Sequence
  Description of Artificial Sequence: Synthetic oligonucleotide
  Target: LAMA2; (-) strand; PAM type: YTN; PAM sequence: TTA
gattgcaggaatcaacagca

SEQ ID NO: 293762 - DNA, 20 bp, Artificial Sequence
  Description of Artificial Sequence: Synthetic oligonucleotide
  Target: LAMA2; (-) strand; PAM type: YTN; PAM sequence: CTT
agattgcaggaatcaacagc

SEQ ID NO: 293763 - DNA, 20 bp, Artificial Sequence
  Description of Artificial Sequence: Synthetic oligonucleotide
  Target: LAMA2; (-) strand; PAM type: YTN; PAM sequence: CTG
agagcttagattgcaggaat

SEQ ID NO: 293764 - DNA, 20 bp, Artificial Sequence
  Description of Artificial Sequence: Synthetic oligonucleotide
  Target: LAMA2; (-) strand; PAM type: YTN; PAM sequence: CTC
ctgagagcttagattgcagg

SEQ ID NO: 293765 - DNA, 20 bp, Artificial Sequence
  Description of Artificial Sequence: Synthetic oligonucleotide
  Target: LAMA2; (-) strand; PAM type: YTN; PAM sequence: CTA
gggaacaaaccatgctcctg

SEQ ID NO: 293766 - DNA, 20 bp, Artificial Sequence
  Description of Artificial Sequence: Synthetic oligonucleotide
  Target: LAMA2; (-) strand; PAM type: YTN; PAM sequence: TTG
ctagggaacaaaccatgctc

SEQ ID NO: 293767 - DNA, 20 bp, Artificial Sequence
  Description of Artificial Sequence: Synthetic oligonucleotide
  Target: LAMA2; (-) strand; PAM type: YTN; PAM sequence: CTT
gctagggaacaaaccatgct

SEQ ID NO: 293768 - DNA, 20 bp, Artificial Sequence
  Description of Artificial Sequence: Synthetic oligonucleotide
  Target: LAMA2; (-) strand; PAM type: YTN; PAM sequence: TTC
ttgctagggaacaaaccatg

SEQ ID NO: 293769 - DNA, 20 bp, Artificial Sequence
  Description of Artificial Sequence: Synthetic oligonucleotide
  Target: LAMA2; (-) strand; PAM type: YTN; PAM sequence: CTT
cttgctagggaacaaaccat

SEQ ID NO: 293770 - DNA, 20 bp, Artificial Sequence
  Description of Artificial Sequence: Synthetic oligonucleotide
  Target: LAMA2; (-) strand; PAM type: YTN; PAM sequence: TTA
tcttcttgctagggaacaaa

SEQ ID NO: 293771 - DNA, 20 bp, Artificial Sequence
  Description of Artificial Sequence: Synthetic oligonucleotide
  Target: LAMA2; (-) strand; PAM type: YTN; PAM sequence: CTA
ttatcttcttgctagggaac

SEQ ID NO: 293772 - DNA, 20 bp, Artificial Sequence
  Description of Artificial Sequence: Synthetic oligonucleotide
  Target: LAMA2; (-) strand; PAM type: YTN; PAM sequence: CTG
gctattatcttcttgctagg

SEQ ID NO: 293773 - DNA, 20 bp, Artificial Sequence
  Description of Artificial Sequence: Synthetic oligonucleotide
  Target: LAMA2; (-) strand; PAM type: YTN; PAM sequence: TTG
tgctggctattatcttcttg

SEQ ID NO: 293774 - DNA, 20 bp, Artificial Sequence
  Description of Artificial Sequence: Synthetic oligonucleotide
  Target: LAMA2; (-) strand; PAM type: YTN; PAM sequence: TTG
ggttgtgctggctattatct

SEQ ID NO: 293775 - DNA, 20 bp, Artificial Sequence
  Description of Artificial Sequence: Synthetic oligonucleotide
  Target: LAMA2; (-) strand; PAM type: YTN; PAM sequence: CTT
gggttgtgctggctattatc

SEQ ID NO: 293776 - DNA, 20 bp, Artificial Sequence
  Description of Artificial Sequence: Synthetic oligonucleotide
  Target: LAMA2; (-) strand; PAM type: YTN; PAM sequence: TTC
cttgggttgtgctggctatt

SEQ ID NO: 293777 - DNA, 20 bp, Artificial Sequence
  Description of Artificial Sequence: Synthetic oligonucleotide
  Target: LAMA2; (-) strand; PAM type: YTN; PAM sequence: CTT
ccttgggttgtgctggctat

SEQ ID NO: 293778 - DNA, 20 bp, Artificial Sequence
  Description of Artificial Sequence: Synthetic oligonucleotide
  Target: LAMA2; (-) strand; PAM type: YTN; PAM sequence: TTA
gcaaagcatggggtcttcct

SEQ ID NO: 293779 - DNA, 20 bp, Artificial Sequence
  Description of Artificial Sequence: Synthetic oligonucleotide
  Target: LAMA2; (-) strand; PAM type: YTN; PAM sequence: TTT
agcaaagcatggggtcttcc

SEQ ID NO: 293780 - DNA, 20 bp, Artificial Sequence
  Description of Artificial Sequence: Synthetic oligonucleotide
  Target: LAMA2; (-) strand; PAM type: YTN; PAM sequence: TTG
gcaggtttagcaaagcatgg

SEQ ID NO: 293781 - DNA, 20 bp, Artificial Sequence
  Description of Artificial Sequence: Synthetic oligonucleotide
  Target: LAMA2; (-) strand; PAM type: YTN; PAM sequence: CTA
accgtataagggttggcagg

SEQ ID NO: 293782 - DNA, 20 bp, Artificial Sequence
  Description of Artificial Sequence: Synthetic oligonucleotide
  Target: LAMA2; (-) strand; PAM type: YTN; PAM sequence: CTG
cagtgtgcagtaatgtctaa

SEQ ID NO: 293783 - DNA, 20 bp, Artificial Sequence
  Description of Artificial Sequence: Synthetic oligonucleotide
  Target: LAMA2; (-) strand; PAM type: YTN; PAM sequence: TTC
tgcagtgtgcagtaatgtct

SEQ ID NO: 293784 - DNA, 20 bp, Artificial Sequence
  Description of Artificial Sequence: Synthetic oligonucleotide
  Target: LAMA2; (-) strand; PAM type: YTN; PAM sequence: CTT
ctgcagtgtgcagtaatgtc

SEQ ID NO: 293785 - DNA, 20 bp, Artificial Sequence
  Description of Artificial Sequence: Synthetic oligonucleotide
  Target: LAMA2; (-) strand; PAM type: YTN; PAM sequence: CTG
aggcttctgcagtgtgcagt

SEQ ID NO: 293786 - DNA, 20 bp, Artificial Sequence
  Description of Artificial Sequence: Synthetic oligonucleotide
  Target: LAMA2; (-) strand; PAM type: YTN; PAM sequence: CTG
tgagaactgaggcttctgca

SEQ ID NO: 293787 - DNA, 20 bp, Artificial Sequence
  Description of Artificial Sequence: Synthetic oligonucleotide
  Target: LAMA2; (-) strand; PAM type: YTN; PAM sequence: CTG
tgcagcccaacacatgagcc

SEQ ID NO: 293788 - DNA, 20 bp, Artificial Sequence
  Description of Artificial Sequence: Synthetic oligonucleotide
  Target: LAMA2; (-) strand; PAM type: YTN; PAM sequence: CTG
acaacagcgctgtgcagccc

SEQ ID NO: 293789 - DNA, 20 bp, Artificial Sequence
  Description of Artificial Sequence: Synthetic oligonucleotide
  Target: LAMA2; (-) strand; PAM type: YTN; PAM sequence: TTG
tagagctgacaacagcgctg

SEQ ID NO: 293790 - DNA, 20 bp, Artificial Sequence
  Description of Artificial Sequence: Synthetic oligonucleotide
  Target: LAMA2; (-) strand; PAM type: YTN; PAM sequence: CTT
gtagagctgacaacagcgct

SEQ ID NO: 293791 - DNA, 20 bp, Artificial Sequence
  Description of Artificial Sequence: Synthetic oligonucleotide
  Target: LAMA2; (-) strand; PAM type: YTN; PAM sequence: CTC
ttgtagagctgacaacagcg

SEQ ID NO: 293792 - DNA, 20 bp, Artificial Sequence
  Description of Artificial Sequence: Synthetic oligonucleotide
  Target: LAMA2; (-) strand; PAM type: YTN; PAM sequence: TTA
gcctcttgtagagctgacaa

SEQ ID NO: 293793 - DNA, 20 bp, Artificial Sequence
  Description of Artificial Sequence: Synthetic oligonucleotide
  Target: LAMA2; (-) strand; PAM type: YTN; PAM sequence: CTG
caacattagcctcttgtaga

SEQ ID NO: 293794 - DNA, 20 bp, Artificial Sequence
  Description of Artificial Sequence: Synthetic oligonucleotide
  Target: LAMA2; (-) strand; PAM type: YTN; PAM sequence: CTG
aaaccaggtcatggcgcact

SEQ ID NO: 293795 - DNA, 20 bp, Artificial Sequence
  Description of Artificial Sequence: Synthetic oligonucleotide
  Target: LAMA2; (-) strand; PAM type: YTN; PAM sequence: TTA
ctgaaaccaggtcatggcgc

SEQ ID NO: 293796 - DNA, 20 bp, Artificial Sequence
  Description of Artificial Sequence: Synthetic oligonucleotide
  Target: LAMA2; (-) strand; PAM type: YTN; PAM sequence: TTT
actgaaaccaggtcatggcg

SEQ ID NO: 293797 - DNA, 20 bp, Artificial Sequence
  Description of Artificial Sequence: Synthetic oligonucleotide
  Target: LAMA2; (-) strand; PAM type: YTN; PAM sequence: CTG
aaagtttactgaaaccaggt

SEQ ID NO: 293798 - DNA, 20 bp, Artificial Sequence
  Description of Artificial Sequence: Synthetic oligonucleotide
  Target: LAMA2; (-) strand; PAM type: YTN; PAM sequence: TTC
ctgaaagtttactgaaacca

SEQ ID NO: 293799 - DNA, 20 bp, Artificial Sequence
  Description of Artificial Sequence: Synthetic oligonucleotide
  Target: LAMA2; (-) strand; PAM type: YTN; PAM sequence: CTT
cctgaaagtttactgaaacc

SEQ ID NO: 293800 - DNA, 20 bp, Artificial Sequence
  Description of Artificial Sequence: Synthetic oligonucleotide
  Target: LAMA2; (-) strand; PAM type: YTN; PAM sequence: CTC
ttcctgaaagtttactgaaa

SEQ ID NO: 293801 - DNA, 20 bp, Artificial Sequence
  Description of Artificial Sequence: Synthetic oligonucleotide
  Target: LAMA2; (-) strand; PAM type: YTN; PAM sequence: TTC
actcttcctgaaagtttact

SEQ ID NO: 293802 - DNA, 20 bp, Artificial Sequence
  Description of Artificial Sequence: Synthetic oligonucleotide
  Target: LAMA2; (-) strand; PAM type: YTN; PAM sequence: CTC
gttcactcttcctgaaagtt

SEQ ID NO: 293803 - DNA, 20 bp, Artificial Sequence
  Description of Artificial Sequence: Synthetic oligonucleotide
  Target: LAMA2; (-) strand; PAM type: YTN; PAM sequence: CTC
cctcgttcactcttcctgaa

SEQ ID NO: 293804 - DNA, 20 bp, Artificial Sequence
  Description of Artificial Sequence: Synthetic oligonucleotide
  Target: LAMA2; (-) strand; PAM type: YTN; PAM sequence: TTC
catgactccctcgttcactc

SEQ ID NO: 293805 - DNA, 20 bp, Artificial Sequence
  Description of Artificial Sequence: Synthetic oligonucleotide
  Target: LAMA2; (-) strand; PAM type: YTN; PAM sequence: CTC
gttccatgactccctcgttc

SEQ ID NO: 293806 - DNA, 20 bp, Artificial Sequence
  Description of Artificial Sequence: Synthetic oligonucleotide
  Target: LAMA2; (-) strand; PAM type: YTN; PAM sequence: CTC
aggatctcgttccatgactc

SEQ ID NO: 293807 - DNA, 20 bp, Artificial Sequence
  Description of Artificial Sequence: Synthetic oligonucleotide
  Target: LAMA2; (-) strand; PAM type: YTN; PAM sequence: TTC
tcaggatctcgttccatgac

SEQ ID NO: 293808 - DNA, 20 bp, Artificial Sequence
  Description of Artificial Sequence: Synthetic oligonucleotide
  Target: LAMA2; (-) strand; PAM type: YTN; PAM sequence: CTG
ttctcaggatctcgttccat

SEQ ID NO: 293809 - DNA, 20 bp, Artificial Sequence
  Description of Artificial Sequence: Synthetic oligonucleotide
  Target: LAMA2; (-) strand; PAM type: YTN; PAM sequence: CTA
agcaaacgctgttctcagga

SEQ ID NO: 293810 - DNA, 20 bp, Artificial Sequence
  Description of Artificial Sequence: Synthetic oligonucleotide
  Target: LAMA2; (-) strand; PAM type: YTN; PAM sequence: CTA
cactaagcaaacgctgttct

SEQ ID NO: 293811 - DNA, 20 bp, Artificial Sequence
  Description of Artificial Sequence: Synthetic oligonucleotide
  Target: LAMA2; (-) strand; PAM type: YTN; PAM sequence: TTC
tacactaagcaaacgctgtt

SEQ ID NO: 293812 - DNA, 20 bp, Artificial Sequence
  Description of Artificial Sequence: Synthetic oligonucleotide
  Target: LAMA2; (-) strand; PAM type: YTN; PAM sequence: TTA
ggaattctacactaagcaaa

SEQ ID NO: 293813 - DNA, 20 bp, Artificial Sequence
  Description of Artificial Sequence: Synthetic oligonucleotide
  Target: LAMA2; (-) strand; PAM type: YTN; PAM sequence: CTT
aggaattctacactaagcaa

SEQ ID NO: 293814 - DNA, 20 bp, Artificial Sequence
  Description of Artificial Sequence: Synthetic oligonucleotide
  Target: LAMA2; (-) strand; PAM type: YTN; PAM sequence: TTG
gatgcttaggaattctacac

SEQ ID NO: 293815 - DNA, 20 bp, Artificial Sequence
  Description of Artificial Sequence: Synthetic oligonucleotide
  Target: LAMA2; (-) strand; PAM type: YTN; PAM sequence: TTA
agggagccaaaattggatgc

SEQ ID NO: 293816 - DNA, 20 bp, Artificial Sequence
  Description of Artificial Sequence: Synthetic oligonucleotide
  Target: LAMA2; (-) strand; PAM type: YTN; PAM sequence: TTT
aagggagccaaaattggatg

SEQ ID NO: 293817 - DNA, 20 bp, Artificial Sequence
  Description of Artificial Sequence: Synthetic oligonucleotide
  Target: LAMA2; (-) strand; PAM type: YTN; PAM sequence: TTT
taagggagccaaaattggat

SEQ ID NO: 293818 - DNA, 20 bp, Artificial Sequence
  Description of Artificial Sequence: Synthetic oligonucleotide
  Target: LAMA2; (-) strand; PAM type: YTN; PAM sequence: CTT
ttaagggagccaaaattgga

SEQ ID NO: 293819 - DNA, 20 bp, Artificial Sequence
  Description of Artificial Sequence: Synthetic oligonucleotide
  Target: LAMA2; (-) strand; PAM type: YTN; PAM sequence: CTC
aaccatagcttttaagggag

SEQ ID NO: 293820 - DNA, 20 bp, Artificial Sequence
  Description of Artificial Sequence: Synthetic oligonucleotide
  Target: LAMA2; (-) strand; PAM type: YTN; PAM sequence: CTC
tcaaccatagcttttaaggg

SEQ ID NO: 293821 - DNA, 20 bp, Artificial Sequence
  Description of Artificial Sequence: Synthetic oligonucleotide
  Target: LAMA2; (-) strand; PAM type: YTN; PAM sequence: TTC
acccctctcaaccatagctt

SEQ ID NO: 293822 - DNA, 20 bp, Artificial Sequence
  Description of Artificial Sequence: Synthetic oligonucleotide
  Target: LAMA2; (-) strand; PAM type: YTN; PAM sequence: CTT
cacccctctcaaccatagct

SEQ ID NO: 293823 - DNA, 20 bp, Artificial Sequence
  Description of Artificial Sequence: Synthetic oligonucleotide
  Target: LAMA2; (-) strand; PAM type: YTN; PAM sequence: CTG
ccacccttcacccctctcaa

SEQ ID NO: 293824 - DNA, 20 bp, Artificial Sequence
  Description of Artificial Sequence: Synthetic oligonucleotide
  Target: LAMA2; (-) strand; PAM type: YTN; PAM sequence: TTC
ctgccacccttcacccctct

SEQ ID NO: 293825 - DNA, 20 bp, Artificial Sequence
  Description of Artificial Sequence: Synthetic oligonucleotide
  Target: LAMA2; (-) strand; PAM type: YTN; PAM sequence: TTT
cctgccacccttcacccctc

SEQ ID NO: 293826 - DNA, 20 bp, Artificial Sequence
  Description of Artificial Sequence: Synthetic oligonucleotide
  Target: LAMA2; (-) strand; PAM type: YTN; PAM sequence: CTT
tcctgccacccttcacccct

SEQ ID NO: 293827 - DNA, 20 bp, Artificial Sequence
  Description of Artificial Sequence: Synthetic oligonucleotide
  Target: LAMA2; (-) strand; PAM type: YTN; PAM sequence: TTC
tttcctgccacccttcaccc

SEQ ID NO: 293828 - DNA, 20 bp, Artificial Sequence
  Description of Artificial Sequence: Synthetic oligonucleotide
  Target: LAMA2; (-) strand; PAM type: YTN; PAM sequence: TTG
gaaatcaaattctttcctgc

SEQ ID NO: 293829 - DNA, 20 bp, Artificial Sequence
  Description of Artificial Sequence: Synthetic oligonucleotide
  Target: LAMA2; (-) strand; PAM type: YTN; PAM sequence: TTC
aatacagttggaaatcaaat

SEQ ID NO: 293830 - DNA, 20 bp, Artificial Sequence
  Description of Artificial Sequence: Synthetic oligonucleotide
  Target: LAMA2; (-) strand; PAM type: YTN; PAM sequence: CTG
attcaatacagttggaaatc

SEQ ID NO: 293831 - DNA, 20 bp, Artificial Sequence
  Description of Artificial Sequence: Synthetic oligonucleotide
  Target: LAMA2; (-) strand; PAM type: YTN; PAM sequence: TTA
aaaataaacaagtataagtc

SEQ ID NO: 293832 - DNA, 20 bp, Artificial Sequence
  Description of Artificial Sequence: Synthetic oligonucleotide
  Target: LAMA2; (-) strand; PAM type: YTN; PAM sequence: CTG
ataaaatattaaaaataaac

SEQ ID NO: 293833 - DNA, 20 bp, Artificial Sequence
  Description of Artificial Sequence: Synthetic oligonucleotide
  Target: LAMA2; (-) strand; PAM type: YTN; PAM sequence: CTG
taaagatgctgataaaatat

SEQ ID NO: 293834 - DNA, 20 bp, Artificial Sequence
  Description of Artificial Sequence: Synthetic oligonucleotide
  Target: LAMA2; (-) strand; PAM type: YTN; PAM sequence: TTG
aactgtaaagatgctgataa

SEQ ID NO: 293835 - DNA, 20 bp, Artificial Sequence
  Description of Artificial Sequence: Synthetic oligonucleotide
  Target: LAMA2; (-) strand; PAM type: YTN; PAM sequence: CTT
gaactgtaaagatgctgata

SEQ ID NO: 293836 - DNA, 20 bp, Artificial Sequence
  Description of Artificial Sequence: Synthetic oligonucleotide
  Target: LAMA2; (-) strand; PAM type: YTN; PAM sequence: TTC
atccacttgaactgtaaaga

SEQ ID NO: 293837 - DNA, 20 bp, Artificial Sequence
  Description of Artificial Sequence: Synthetic oligonucleotide
  Target: LAMA2; (-) strand; PAM type: YTN; PAM sequence: TTT
catccacttgaactgtaaag

SEQ ID NO: 293838 - DNA, 20 bp, Artificial Sequence
  Description of Artificial Sequence: Synthetic oligonucleotide
  Target: LAMA2; (-) strand; PAM type: YTN; PAM sequence: TTT
tcatccacttgaactgtaaa

SEQ ID NO: 293839 - DNA, 20 bp, Artificial Sequence
  Description of Artificial Sequence: Synthetic oligonucleotide
  Target: LAMA2; (-) strand; PAM type: YTN; PAM sequence: CTG
ttttcatccacttgaactgt

SEQ ID NO: 293840 - DNA, 20 bp, Artificial Sequence
  Description of Artificial Sequence: Synthetic oligonucleotide
  Target: LAMA2; (-) strand; PAM type: YTN; PAM sequence: TTC
tgttttcatccacttgaact

SEQ ID NO: 293841 - DNA, 20 bp, Artificial Sequence
  Description of Artificial Sequence: Synthetic oligonucleotide
  Target: LAMA2; (-) strand; PAM type: YTN; PAM sequence: CTT
ctgttttcatccacttgaac

SEQ ID NO: 293842 - DNA, 20 bp, Artificial Sequence
  Description of Artificial Sequence: Synthetic oligonucleotide
  Target: LAMA2; (-) strand; PAM type: YTN; PAM sequence: TTG
catgtatcttctgttttcat

SEQ ID NO: 293843 - DNA, 20 bp, Artificial Sequence
  Description of Artificial Sequence: Synthetic oligonucleotide
  Target: LAMA2; (-) strand; PAM type: YTN; PAM sequence: TTT
gcatgtatcttctgttttca

SEQ ID NO: 293844 - DNA, 20 bp, Artificial Sequence
  Description of Artificial Sequence: Synthetic oligonucleotide
  Target: LAMA2; (-) strand; PAM type: YTN; PAM sequence: TTT
tgcatgtatcttctgttttc

SEQ ID NO: 293845 - DNA, 20 bp, Artificial Sequence
  Description of Artificial Sequence: Synthetic oligonucleotide
  Target: LAMA2; (-) strand; PAM type: YTN; PAM sequence: CTG
tcaggttttgcatgtatctt

SEQ ID NO: 293846 - DNA, 20 bp, Artificial Sequence
  Description of Artificial Sequence: Synthetic oligonucleotide
  Target: LAMA2; (-) strand; PAM type: YTN; PAM sequence: TTC
aactgtcaggttttgcatgt

SEQ ID NO: 293847 - DNA, 20 bp, Artificial Sequence
  Description of Artificial Sequence: Synthetic oligonucleotide
  Target: LAMA2; (-) strand; PAM type: YTN; PAM sequence: CTG
ttcaactgtcaggttttgca

SEQ ID NO: 293848 - DNA, 20 bp, Artificial Sequence
  Description of Artificial Sequence: Synthetic oligonucleotide
  Target: LAMA2; (-) strand; PAM type: YTN; PAM sequence: TTC
gataggctgttcaactgtca

SEQ ID NO: 293849 - DNA, 20 bp, Artificial Sequence
  Description of Artificial Sequence: Synthetic oligonucleotide
  Target: LAMA2; (-) strand; PAM type: YTN; PAM sequence: CTT
cgataggctgttcaactgtc

SEQ ID NO: 293850 - DNA, 20 bp, Artificial Sequence
  Description of Artificial Sequence: Synthetic oligonucleotide
  Target: LAMA2; (-) strand; PAM type: YTN; PAM sequence: TTA
acttcgataggctgttcaac

SEQ ID NO: 293851 - DNA, 20 bp, Artificial Sequence
  Description of Artificial Sequence: Synthetic oligonucleotide
  Target: LAMA2; (-) strand; PAM type: YTN; PAM sequence: TTT
aacttcgataggctgttcaa

SEQ ID NO: 293852 - DNA, 20 bp, Artificial Sequence
  Description of Artificial Sequence: Synthetic oligonucleotide
  Target: LAMA2; (-) strand; PAM type: YTN; PAM sequence: TTT
taacttcgataggctgttca

SEQ ID NO: 293853 - DNA, 20 bp, Artificial Sequence
  Description of Artificial Sequence: Synthetic oligonucleotide
  Target: LAMA2; (-) strand; PAM type: YTN; PAM sequence: TTT
ttaacttcgataggctgttc

SEQ ID NO: 293854 - DNA, 20 bp, Artificial Sequence
  Description of Artificial Sequence: Synthetic oligonucleotide
  Target: LAMA2; (-) strand; PAM type: YTN; PAM sequence: CTT
tttaacttcgataggctgtt

SEQ ID NO: 293855 - DNA, 20 bp, Artificial Sequence
  Description of Artificial Sequence: Synthetic oligonucleotide
  Target: LAMA2; (-) strand; PAM type: YTN; PAM sequence: TTC
aggtggagcacccccaacga

SEQ ID NO: 293856 - DNA, 20 bp, Artificial Sequence
  Description of Artificial Sequence: Synthetic oligonucleotide
  Target: LAMA2; (-) strand; PAM type: YTN; PAM sequence: TTG
aaattcaggtggagcacccc

SEQ ID NO: 293857 - DNA, 20 bp, Artificial Sequence
  Description of Artificial Sequence: Synthetic oligonucleotide
  Target: LAMA2; (-) strand; PAM type: YTN; PAM sequence: CTG
agtggggaaggttgaaattc

SEQ ID NO: 293858 - DNA, 20 bp, Artificial Sequence
  Description of Artificial Sequence: Synthetic oligonucleotide
  Target: LAMA2; (-) strand; PAM type: YTN; PAM sequence: TTC
tgagtggggaaggttgaaat

SEQ ID NO: 293859 - DNA, 20 bp, Artificial Sequence
  Description of Artificial Sequence: Synthetic oligonucleotide
  Target: LAMA2; (-) strand; PAM type: YTN; PAM sequence: TTT
ctgagtggggaaggttgaaa

SEQ ID NO: 293860 - DNA, 20 bp, Artificial Sequence
  Description of Artificial Sequence: Synthetic oligonucleotide
  Target: LAMA2; (-) strand; PAM type: YTN; PAM sequence: TTC
aaaaggaggaatatttctga

SEQ ID NO: 293861 - DNA, 20 bp, Artificial Sequence
  Description of Artificial Sequence: Synthetic oligonucleotide
  Target: LAMA2; (-) strand; PAM type: YTN; PAM sequence: CTT
caaaaggaggaatatttctg

SEQ ID NO: 293862 - DNA, 20 bp, Artificial Sequence
  Description of Artificial Sequence: Synthetic oligonucleotide
  Target: LAMA2; (-) strand; PAM type: YTN; PAM sequence: TTC
catatgcagccttcaaaagg

SEQ ID NO: 293863 - DNA, 20 bp, Artificial Sequence
  Description of Artificial Sequence: Synthetic oligonucleotide
  Target: LAMA2; (-) strand; PAM type: YTN; PAM sequence: TTA
ataacaagattccatatgca

SEQ ID NO: 293864 - DNA, 20 bp, Artificial Sequence
  Description of Artificial Sequence: Synthetic oligonucleotide
  Target: LAMA2; (-) strand; PAM type: YTN; PAM sequence: TTA
cacagagttaataacaagat

SEQ ID NO: 293865 - DNA, 20 bp, Artificial Sequence
  Description of Artificial Sequence: Synthetic oligonucleotide
  Target: LAMA2; (-) strand; PAM type: YTN; PAM sequence: CTT
acacagagttaataacaaga

SEQ ID NO: 293866 - DNA, 20 bp, Artificial Sequence
  Description of Artificial Sequence: Synthetic oligonucleotide
  Target: LAMA2; (-) strand; PAM type: YTN; PAM sequence: TTA
gtagtagtaatgaggagatc

SEQ ID NO: 293867 - DNA, 20 bp, Artificial Sequence
  Description of Artificial Sequence: Synthetic oligonucleotide
  Target: LAMA2; (-) strand; PAM type: YTN; PAM sequence: CTA
atagcaagaaataaaaataa

SEQ ID NO: 293868 - DNA, 20 bp, Artificial Sequence
  Description of Artificial Sequence: Synthetic oligonucleotide
  Target: LAMA2; (-) strand; PAM type: YTN; PAM sequence: TTG
ggacccctaatagcaagaaa

SEQ ID NO: 293869 - DNA, 20 bp, Artificial Sequence
  Description of Artificial Sequence: Synthetic oligonucleotide
  Target: LAMA2; (-) strand; PAM type: YTN; PAM sequence: CTG
tagacaatgtagatgcattg

SEQ ID NO: 293870 - DNA, 20 bp, Artificial Sequence
  Description of Artificial Sequence: Synthetic oligonucleotide
  Target: LAMA2; (-) strand; PAM type: YTN; PAM sequence: CTG
catagctgtagacaatgtag

SEQ ID NO: 293871 - DNA, 20 bp, Artificial Sequence
  Description of Artificial Sequence: Synthetic oligonucleotide
  Target: LAMA2; (-) strand; PAM type: YTN; PAM sequence: CTC
ccctgcatagctgtagacaa

SEQ ID NO: 293872 - DNA, 20 bp, Artificial Sequence
  Description of Artificial Sequence: Synthetic oligonucleotide
  Target: LAMA2; (-) strand; PAM type: YTN; PAM sequence: CTC
ctcccctgcatagctgtaga

SEQ ID NO: 293873 - DNA, 20 bp, Artificial Sequence
  Description of Artificial Sequence: Synthetic oligonucleotide
  Target: LAMA2; (-) strand; PAM type: YTN; PAM sequence: TTC
cctcctcccctgcatagctg

SEQ ID NO: 293874 - DNA, 20 bp, Artificial Sequence
  Description of Artificial Sequence: Synthetic oligonucleotide
  Target: LAMA2; (-) strand; PAM type: YTN; PAM sequence: TTT
ccctcctcccctgcatagct

SEQ ID NO: 293875 - DNA, 20 bp, Artificial Sequence
  Description of Artificial Sequence: Synthetic oligonucleotide
  Target: LAMA2; (-) strand; PAM type: YTN; PAM sequence: TTG
tttccctcctcccctgcata

SEQ ID NO: 293876 - DNA, 20 bp, Artificial Sequence
  Description of Artificial Sequence: Synthetic oligonucleotide
  Target: LAMA2; (-) strand; PAM type: YTN; PAM sequence: CTC
attgtttccctcctcccctg

SEQ ID NO: 293877 - DNA, 20 bp, Artificial Sequence
  Description of Artificial Sequence: Synthetic oligonucleotide
  Target: LAMA2; (-) strand; PAM type: YTN; PAM sequence: TTG
aagatcctcattgtttccct

SEQ ID NO: 293878 - DNA, 20 bp, Artificial Sequence
  Description of Artificial Sequence: Synthetic oligonucleotide
  Target: LAMA2; (-) strand; PAM type: YTN; PAM sequence: CTA
agttgaagatcctcattgtt

SEQ ID NO: 293879 - DNA, 20 bp, Artificial Sequence
  Description of Artificial Sequence: Synthetic oligonucleotide
  Target: LAMA2; (-) strand; PAM type: YTN; PAM sequence: CTC
agtctaagttgaagatcctc

SEQ ID NO: 293880 - DNA, 20 bp, Artificial Sequence
  Description of Artificial Sequence: Synthetic oligonucleotide
  Target: LAMA2; (-) strand; PAM type: YTN; PAM sequence: TTC
tcagtctaagttgaagatcc

SEQ ID NO: 293881 - DNA, 20 bp, Artificial Sequence
  Description of Artificial Sequence: Synthetic oligonucleotide
  Target: LAMA2; (-) strand; PAM type: YTN; PAM sequence: TTT
ctcagtctaagttgaagatc

SEQ ID NO: 293882 - DNA, 20 bp, Artificial Sequence
  Description of Artificial Sequence: Synthetic oligonucleotide
  Target: LAMA2; (-) strand; PAM type: YTN; PAM sequence: TTT
tctcagtctaagttgaagat

SEQ ID NO: 293883 - DNA, 20 bp, Artificial Sequence
  Description of Artificial Sequence: Synthetic oligonucleotide
  Target: LAMA2; (-) strand; PAM type: YTN; PAM sequence: CTT
ttctcagtctaagttgaaga

SEQ ID NO: 293884 - DNA, 20 bp, Artificial Sequence
  Description of Artificial Sequence: Synthetic oligonucleotide
  Target: LAMA2; (-) strand; PAM type: YTN; PAM sequence: TTA
gtgtgcttttctcagtctaa

SEQ ID NO: 293885 - DNA, 20 bp, Artificial Sequence
  Description of Artificial Sequence: Synthetic oligonucleotide
  Target: LAMA2; (-) strand; PAM type: YTN; PAM sequence: TTA
agtccattagtgtgcttttc

SEQ ID NO: 293886 - DNA, 20 bp, Artificial Sequence
  Description of Artificial Sequence: Synthetic oligonucleotide
  Target: LAMA2; (-) strand; PAM type: YTN; PAM sequence: TTT
aagtccattagtgtgctttt

SEQ ID NO: 293887 - DNA, 20 bp, Artificial Sequence
  Description of Artificial Sequence: Synthetic oligonucleotide
  Target: LAMA2; (-) strand; PAM type: YTN; PAM sequence: TTT
taagtccattagtgtgcttt

SEQ ID NO: 293888 - DNA, 20 bp, Artificial Sequence
  Description of Artificial Sequence: Synthetic oligonucleotide
  Target: LAMA2; (-) strand; PAM type: YTN; PAM sequence: TTT
ttaagtccattagtgtgctt

SEQ ID NO: 293889 - DNA, 20 bp, Artificial Sequence
  Description of Artificial Sequence: Synthetic oligonucleotide
  Target: LAMA2; (-) strand; PAM type: YTN; PAM sequence: CTT
tttaagtccattagtgtgct

SEQ ID NO: 293890 - DNA, 20 bp, Artificial Sequence
  Description of Artificial Sequence: Synthetic oligonucleotide
  Target: LAMA2; (-) strand; PAM type: YTN; PAM sequence: TTA
agcccaatccccgcatgcct

SEQ ID NO: 293891 - DNA, 20 bp, Artificial Sequence
  Description of Artificial Sequence: Synthetic oligonucleotide
  Target: LAMA2; (-) strand; PAM type: YTN; PAM sequence: TTA
caattaagcccaatccccgc

SEQ ID NO: 293892 - DNA, 20 bp, Artificial Sequence
  Description of Artificial Sequence: Synthetic oligonucleotide
  Target: LAMA2; (-) strand; PAM type: YTN; PAM sequence: CTT
acaattaagcccaatccccg

SEQ ID NO: 293893 - DNA, 20 bp, Artificial Sequence
  Description of Artificial Sequence: Synthetic oligonucleotide
  Target: LAMA2; (-) strand; PAM type: YTN; PAM sequence: TTC
cttacaattaagcccaatcc

SEQ ID NO: 293894 - DNA, 20 bp, Artificial Sequence
  Description of Artificial Sequence: Synthetic oligonucleotide
  Target: LAMA2; (-) strand; PAM type: YTN; PAM sequence: CTT
ccttacaattaagcccaatc

SEQ ID NO: 293895 - DNA, 20 bp, Artificial Sequence
  Description of Artificial Sequence: Synthetic oligonucleotide
  Target: LAMA2; (-) strand; PAM type: YTN; PAM sequence: TTG
cttccttacaattaagccca

SEQ ID NO: 293896 - DNA, 20 bp, Artificial Sequence
  Description of Artificial Sequence: Synthetic oligonucleotide
  Target: LAMA2; (-) strand; PAM type: YTN; PAM sequence: TTT
gcttccttacaattaagccc

SEQ ID NO: 293897 - DNA, 20 bp, Artificial Sequence
  Description of Artificial Sequence: Synthetic oligonucleotide
  Target: LAMA2; (-) strand; PAM type: YTN; PAM sequence: TTT
tgcttccttacaattaagcc

SEQ ID NO: 293898 - DNA, 20 bp, Artificial Sequence
  Description of Artificial Sequence: Synthetic oligonucleotide
  Target: LAMA2; (-) strand; PAM type: YTN; PAM sequence: TTT
ttgcttccttacaattaagc

SEQ ID NO: 293899 - DNA, 20 bp, Artificial Sequence
  Description of Artificial Sequence: Synthetic oligonucleotide
  Target: LAMA2; (-) strand; PAM type: YTN; PAM sequence: TTT
tttgcttccttacaattaag

SEQ ID NO: 293900 - DNA, 20 bp, Artificial Sequence
  Description of Artificial Sequence: Synthetic oligonucleotide
  Target: LAMA2; (-) strand; PAM type: YTN; PAM sequence: TTT
ttttgcttccttacaattaa

SEQ ID NO: 293901 - DNA, 20 bp, Artificial Sequence
  Description of Artificial Sequence: Synthetic oligonucleotide
  Target: LAMA2; (-) strand; PAM type: YTN; PAM sequence: TTC
gtttttttgcttccttacaa

SEQ ID NO: 293902 - DNA, 20 bp, Artificial Sequence
  Description of Artificial Sequence: Synthetic oligonucleotide
  Target: LAMA2; (-) strand; PAM type: YTN; PAM sequence: TTT
cgtttttttgcttccttaca

SEQ ID NO: 293903 - DNA, 20 bp, Artificial Sequence
  Description of Artificial Sequence: Synthetic oligonucleotide
  Target: LAMA2; (-) strand; PAM type: YTN; PAM sequence: TTT
tcgtttttttgcttccttac

SEQ ID NO: 293904 - DNA, 20 bp, Artificial Sequence
  Description of Artificial Sequence: Synthetic oligonucleotide
  Target: LAMA2; (-) strand; PAM type: YTN; PAM sequence: TTA
ttttcgtttttttgcttcct

SEQ ID NO: 293905 - DNA, 20 bp, Artificial Sequence
  Description of Artificial Sequence: Synthetic oligonucleotide
  Target: LAMA2; (-) strand; PAM type: YTN; PAM sequence: TTT
attttcgtttttttgcttcc

SEQ ID NO: 293906 - DNA, 20 bp, Artificial Sequence
  Description of Artificial Sequence: Synthetic oligonucleotide
  Target: LAMA2; (-) strand; PAM type: YTN; PAM sequence: TTT
tattttcgtttttttgcttc

SEQ ID NO: 293907 - DNA, 20 bp, Artificial Sequence
  Description of Artificial Sequence: Synthetic oligonucleotide
  Target: LAMA2; (-) strand; PAM type: YTN; PAM sequence: TTT
ttattttcgtttttttgctt

SEQ ID NO: 293908 - DNA, 20 bp, Artificial Sequence
  Description of Artificial Sequence: Synthetic oligonucleotide
  Target: LAMA2; (-) strand; PAM type: YTN; PAM sequence: TTT
tttattttcgtttttttgct

SEQ ID NO: 293909 - DNA, 20 bp, Artificial Sequence
  Description of Artificial Sequence: Synthetic oligonucleotide
  Target: LAMA2; (-) strand; PAM type: YTN; PAM sequence: TTT
ttttattttcgtttttttgc

SEQ ID NO: 293910 - DNA, 20 bp, Artificial Sequence
  Description of Artificial Sequence: Synthetic oligonucleotide
  Target: LAMA2; (-) strand; PAM type: YTN; PAM sequence: CTA
atagaatgtaataaataaga

SEQ ID NO: 293911 - DNA, 20 bp, Artificial Sequence
  Description of Artificial Sequence: Synthetic oligonucleotide
  Target: LAMA2; (-) strand; PAM type: YTN; PAM sequence: TTG
caaagtccatggggctaata

SEQ ID NO: 293912 - DNA, 20 bp, Artificial Sequence
  Description of Artificial Sequence: Synthetic oligonucleotide
  Target: LAMA2; (-) strand; PAM type: YTN; PAM sequence: CTT
gcaaagtccatggggctaat

SEQ ID NO: 293913 - DNA, 20 bp, Artificial Sequence
  Description of Artificial Sequence: Synthetic oligonucleotide
  Target: LAMA2; (-) strand; PAM type: YTN; PAM sequence: TTG
aaggacacaggccttgcaaa

SEQ ID NO: 293914 - DNA, 20 bp, Artificial Sequence
  Description of Artificial Sequence: Synthetic oligonucleotide
  Target: LAMA2; (-) strand; PAM type: YTN; PAM sequence: TTT
gaaggacacaggccttgcaa

SEQ ID NO: 293915 - DNA, 20 bp, Artificial Sequence
  Description of Artificial Sequence: Synthetic oligonucleotide
  Target: LAMA2; (-) strand; PAM type: YTN; PAM sequence: TTT
tgaaggacacaggccttgca

SEQ ID NO: 293916 - DNA, 20 bp, Artificial Sequence
  Description of Artificial Sequence: Synthetic oligonucleotide
  Target: LAMA2; (-) strand; PAM type: YTN; PAM sequence: TTT
ttgaaggacacaggccttgc

SEQ ID NO: 293917 - DNA, 20 bp, Artificial Sequence
  Description of Artificial Sequence: Synthetic oligonucleotide
  Target: LAMA2; (-) strand; PAM type: YTN; PAM sequence: CTG
atgggcacagcgaccaatgt

SEQ ID NO: 293918 - DNA, 20 bp, Artificial Sequence
  Description of Artificial Sequence: Synthetic oligonucleotide
  Target: LAMA2; (-) strand; PAM type: YTN; PAM sequence: TTC
tgatgggcacagcgaccaat

SEQ ID NO: 293919 - DNA, 20 bp, Artificial Sequence
  Description of Artificial Sequence: Synthetic oligonucleotide
  Target: LAMA2; (-) strand; PAM type: YTN; PAM sequence: TTT
ctgatgggcacagcgaccaa

SEQ ID NO: 293920 - DNA, 20 bp, Artificial Sequence
  Description of Artificial Sequence: Synthetic oligonucleotide
  Target: LAMA2; (-) strand; PAM type: YTN; PAM sequence: TTC
acggagtttctgatgggcac

SEQ ID NO: 293921 - DNA, 20 bp, Artificial Sequence
  Description of Artificial Sequence: Synthetic oligonucleotide
  Target: LAMA2; (-) strand; PAM type: YTN; PAM sequence: CTT
cacggagtttctgatgggca

SEQ ID NO: 293922 - DNA, 20 bp, Artificial Sequence
  Description of Artificial Sequence: Synthetic oligonucleotide
  Target: LAMA2; (-) strand; PAM type: YTN; PAM sequence: TTC
atcttcacggagtttctgat

SEQ ID NO: 293923 - DNA, 20 bp, Artificial Sequence
  Description of Artificial Sequence: Synthetic oligonucleotide
  Target: LAMA2; (-) strand; PAM type: YTN; PAM sequence: CTT
catcttcacggagtttctga

SEQ ID NO: 293924 - DNA, 20 bp, Artificial Sequence
  Description of Artificial Sequence: Synthetic oligonucleotide
  Target: LAMA2; (-) strand; PAM type: YTN; PAM sequence: CTC
catcttcatcttcacggagt

SEQ ID NO: 293925 - DNA, 20 bp, Artificial Sequence
  Description of Artificial Sequence: Synthetic oligonucleotide
  Target: LAMA2; (-) strand; PAM type: YTN; PAM sequence: CTG
ctccatcttcatcttcacgg

SEQ ID NO: 293926 - DNA, 20 bp, Artificial Sequence
  Description of Artificial Sequence: Synthetic oligonucleotide
  Target: LAMA2; (-) strand; PAM type: YTN; PAM sequence: CTG
gagctgctccatcttcatct

SEQ ID NO: 293927 - DNA, 20 bp, Artificial Sequence
  Description of Artificial Sequence: Synthetic oligonucleotide
  Target: LAMA2; (-) strand; PAM type: YTN; PAM sequence: TTC
agctggagctgctccatctt

SEQ ID NO: 293928 - DNA, 20 bp, Artificial Sequence
  Description of Artificial Sequence: Synthetic oligonucleotide
  Target: LAMA2; (-) strand; PAM type: YTN; PAM sequence: TTT
cagctggagctgctccatct

SEQ ID NO: 293929 - DNA, 20 bp, Artificial Sequence
  Description of Artificial Sequence: Synthetic oligonucleotide
  Target: LAMA2; (-) strand; PAM type: YTN; PAM sequence: CTA
tttcagctggagctgctcca

SEQ ID NO: 293930 - DNA, 20 bp, Artificial Sequence
  Description of Artificial Sequence: Synthetic oligonucleotide
  Target: LAMA2; (-) strand; PAM type: YTN; PAM sequence: CTG
gataactatttcagctggag

SEQ ID NO: 293931 - DNA, 20 bp, Artificial Sequence
  Description of Artificial Sequence: Synthetic oligonucleotide
  Target: LAMA2; (-) strand; PAM type: YTN; PAM sequence: CTC
aggctggataactatttcag

SEQ ID NO: 293932 - DNA, 20 bp, Artificial Sequence
  Description of Artificial Sequence: Synthetic oligonucleotide
  Target: LAMA2; (-) strand; PAM type: YTN; PAM sequence: CTG
gctcaggctggataactatt

SEQ ID NO: 293933 - DNA, 20 bp, Artificial Sequence
  Description of Artificial Sequence: Synthetic oligonucleotide
  Target: LAMA2; (-) strand; PAM type: YTN; PAM sequence: CTG
gggtgggaactggctcaggc

SEQ ID NO: 293934 - DNA, 20 bp, Artificial Sequence
  Description of Artificial Sequence: Synthetic oligonucleotide
  Target: LAMA2; (-) strand; PAM type: YTN; PAM sequence: CTG
gggtgggcgtaggaaaggct

SEQ ID NO: 293935 - DNA, 20 bp, Artificial Sequence
  Description of Artificial Sequence: Synthetic oligonucleotide
  Target: LAMA2; (-) strand; PAM type: YTN; PAM sequence: TTA
catgtgtcagaactggggtg

SEQ ID NO: 293936 - DNA, 20 bp, Artificial Sequence
  Description of Artificial Sequence: Synthetic oligonucleotide
  Target: LAMA2; (-) strand; PAM type: YTN; PAM sequence: CTT
acatgtgtcagaactggggt

SEQ ID NO: 293937 - DNA, 20 bp, Artificial Sequence
  Description of Artificial Sequence: Synthetic oligonucleotide
  Target: LAMA2; (-) strand; PAM type: YTN; PAM sequence: TTA
gaaagcaatggggataatat

SEQ ID NO: 293938 - DNA, 20 bp, Artificial Sequence
  Description of Artificial Sequence: Synthetic oligonucleotide
  Target: LAMA2; (-) strand; PAM type: YTN; PAM sequence: CTG
ggtaaaaattagaaagcaat

SEQ ID NO: 293939 - DNA, 20 bp, Artificial Sequence
  Description of Artificial Sequence: Synthetic oligonucleotide
  Target: LAMA2; (-) strand; PAM type: YTN; PAM sequence: CTC
agaatactgggtaaaaatta

SEQ ID NO: 293940 - DNA, 20 bp, Artificial Sequence
  Description of Artificial Sequence: Synthetic oligonucleotide
  Target: LAMA2; (-) strand; PAM type: YTN; PAM sequence: CTG
aaatgactcagaatactggg

SEQ ID NO: 293941 - DNA, 20 bp, Artificial Sequence
  Description of Artificial Sequence: Synthetic oligonucleotide
  Target: LAMA2; (-) strand; PAM type: YTN; PAM sequence: TTC
tgaaatgactcagaatactg

SEQ ID NO: 293942 - DNA, 20 bp, Artificial Sequence
  Description of Artificial Sequence: Synthetic oligonucleotide
  Target: LAMA2; (-) strand; PAM type: YTN; PAM sequence: CTT
ctgaaatgactcagaatact

SEQ ID NO: 293943 - DNA, 20 bp, Artificial Sequence
  Description of Artificial Sequence: Synthetic oligonucleotide
  Target: LAMA2; (-) strand; PAM type: YTN; PAM sequence: TTC
cttctgaaatgactcagaat

SEQ ID NO: 293944 - DNA, 20 bp, Artificial Sequence
  Description of Artificial Sequence: Synthetic oligonucleotide
  Target: LAMA2; (-) strand; PAM type: YTN; PAM sequence: CTT
ccttctgaaatgactcagaa

SEQ ID NO: 293945 - DNA, 20 bp, Artificial Sequence
  Description of Artificial Sequence: Synthetic oligonucleotide
  Target: LAMA2; (-) strand; PAM type: YTN; PAM sequence: CTG
aataatcttccttctgaaat

SEQ ID NO: 293946 - DNA, 20 bp, Artificial Sequence
  Description of Artificial Sequence: Synthetic oligonucleotide
  Target: LAMA2; (-) strand; PAM type: YTN; PAM sequence: CTA
gatatcctgaataatcttcc

SEQ ID NO: 293947 - DNA, 20 bp, Artificial Sequence
  Description of Artificial Sequence: Synthetic oligonucleotide
  Target: LAMA2; (-) strand; PAM type: YTN; PAM sequence: CTA
atatcagagtgtactagata

SEQ ID NO: 293948 - DNA, 20 bp, Artificial Sequence
  Description of Artificial Sequence: Synthetic oligonucleotide
  Target: LAMA2; (-) strand; PAM type: YTN; PAM sequence: TTC
taatatcagagtgtactaga

SEQ ID NO: 293949 - DNA, 20 bp, Artificial Sequence
  Description of Artificial Sequence: Synthetic oligonucleotide
  Target: LAMA2; (-) strand; PAM type: YTN; PAM sequence: TTC
aattctaatatcagagtgta

SEQ ID NO: 293950 - DNA, 20 bp, Artificial Sequence
  Description of Artificial Sequence: Synthetic oligonucleotide
  Target: LAMA2; (-) strand; PAM type: YTN; PAM sequence: TTT
caattctaatatcagagtgt

SEQ ID NO: 293951 - DNA, 20 bp, Artificial Sequence
  Description of Artificial Sequence: Synthetic oligonucleotide
  Target: LAMA2; (-) strand; PAM type: YTN; PAM sequence: CTT
tcaattctaatatcagagtg

SEQ ID NO: 293952 - DNA, 20 bp, Artificial Sequence
  Description of Artificial Sequence: Synthetic oligonucleotide
  Target: LAMA2; (-) strand; PAM type: YTN; PAM sequence: TTC
tttcaattctaatatcagag

SEQ ID NO: 293953 - DNA, 20 bp, Artificial Sequence
  Description of Artificial Sequence: Synthetic oligonucleotide
  Target: LAMA2; (-) strand; PAM type: YTN; PAM sequence: TTT
ctttcaattctaatatcaga

SEQ ID NO: 293954 - DNA, 20 bp, Artificial Sequence
  Description of Artificial Sequence: Synthetic oligonucleotide
  Target: LAMA2; (-) strand; PAM type: YTN; PAM sequence: TTA
tatttctttcaattctaata

SEQ ID NO: 293955 - DNA, 20 bp, Artificial Sequence
  Description of Artificial Sequence: Synthetic oligonucleotide
  Target: LAMA2; (-) strand; PAM type: YTN; PAM sequence: TTA
gataggttatatttctttca

SEQ ID NO: 293956 - DNA, 20 bp, Artificial Sequence
  Description of Artificial Sequence: Synthetic oligonucleotide
  Target: LAMA2; (-) strand; PAM type: YTN; PAM sequence: TTT
agataggttatatttctttc

SEQ ID NO: 293957 - DNA, 20 bp, Artificial Sequence
  Description of Artificial Sequence: Synthetic oligonucleotide
  Target: LAMA2; (-) strand; PAM type: YTN; PAM sequence: TTC
aatgaagatgtaagaatagg

SEQ ID NO: 293958 - DNA, 20 bp, Artificial Sequence
  Description of Artificial Sequence: Synthetic oligonucleotide
  Target: LAMA2; (-) strand; PAM type: YTN; PAM sequence: TTG
aagatggaaatataggtaag

SEQ ID NO: 293959 - DNA, 20 bp, Artificial Sequence
  Description of Artificial Sequence: Synthetic oligonucleotide
  Target: LAMA2; (-) strand; PAM type: YTN; PAM sequence: TTG
taaacaaaattgaagatgga

SEQ ID NO: 293960 - DNA, 20 bp, Artificial Sequence
  Description of Artificial Sequence: Synthetic oligonucleotide
  Target: LAMA2; (-) strand; PAM type: YTN; PAM sequence: TTT
gtaaacaaaattgaagatgg

SEQ ID NO: 293961 - DNA, 20 bp, Artificial Sequence
  Description of Artificial Sequence: Synthetic oligonucleotide
  Target: LAMA2; (-) strand; PAM type: YTN; PAM sequence: TTT
tgtaaacaaaattgaagatg

SEQ ID NO: 293962 - DNA, 20 bp, Artificial Sequence
  Description of Artificial Sequence: Synthetic oligonucleotide
  Target: LAMA2; (-) strand; PAM type: YTN; PAM sequence: CTG
ttttgtaaacaaaattgaag

SEQ ID NO: 293963 - DNA, 20 bp, Artificial Sequence
  Description of Artificial Sequence: Synthetic oligonucleotide
  Target: LAMA2; (-) strand; PAM type: YTN; PAM sequence: CTG
aaaatgtactgttttgtaaa

SEQ ID NO: 293964 - DNA, 20 bp, Artificial Sequence
  Description of Artificial Sequence: Synthetic oligonucleotide
  Target: LAMA2; (-) strand; PAM type: YTN; PAM sequence: TTC
aactgaaaatgtactgtttt

SEQ ID NO: 293965 - DNA, 20 bp, Artificial Sequence
  Description of Artificial Sequence: Synthetic oligonucleotide
  Target: LAMA2; (-) strand; PAM type: YTN; PAM sequence: TTT
caactgaaaatgtactgttt

SEQ ID NO: 293966 - DNA, 20 bp, Artificial Sequence
  Description of Artificial Sequence: Synthetic oligonucleotide
  Target: LAMA2; (-) strand; PAM type: YTN; PAM sequence: TTC
caacatttcaactgaaaatg

SEQ ID NO: 293967 - DNA, 20 bp, Artificial Sequence
  Description of Artificial Sequence: Synthetic oligonucleotide
  Target: LAMA2; (-) strand; PAM type: YTN; PAM sequence: TTT
ccaacatttcaactgaaaat

SEQ ID NO: 293968 - DNA, 20 bp, Artificial Sequence
  Description of Artificial Sequence: Synthetic oligonucleotide
  Target: LAMA2; (-) strand; PAM type: YTN; PAM sequence: TTT
tccaacatttcaactgaaaa

SEQ ID NO: 293969 - DNA, 20 bp, Artificial Sequence
  Description of Artificial Sequence: Synthetic oligonucleotide
  Target: LAMA2; (-) strand; PAM type: YTN; PAM sequence: CTG
tgttttccaacatttcaact

SEQ ID NO: 293970 - DNA, 20 bp, Artificial Sequence
  Description of Artificial Sequence: Synthetic oligonucleotide
  Target: LAMA2; (-) strand; PAM type: YTN; PAM sequence: TTC
tgtgttttccaacatttcaa

SEQ ID NO: 293971 - DNA, 20 bp, Artificial Sequence
  Description of Artificial Sequence: Synthetic oligonucleotide
  Target: LAMA2; (-) strand; PAM type: YTN; PAM sequence: TTT
ctgtgttttccaacatttca

SEQ ID NO: 293972 - DNA, 20 bp, Artificial Sequence
  Description of Artificial Sequence: Synthetic oligonucleotide
  Target: LAMA2; (-) strand; PAM type: YTN; PAM sequence: CTG
gatatttctgtgttttccaa

SEQ ID NO: 293973 - DNA, 20 bp, Artificial Sequence
  Description of Artificial Sequence: Synthetic oligonucleotide
  Target: LAMA2; (-) strand; PAM type: YTN; PAM sequence: TTC
tggatatttctgtgttttcc

SEQ ID NO: 293974 - DNA, 20 bp, Artificial Sequence
  Description of Artificial Sequence: Synthetic oligonucleotide
  Target: LAMA2; (-) strand; PAM type: YTN; PAM sequence: TTC
atgattctggatatttctgt

SEQ ID NO: 293975 - DNA, 20 bp, Artificial Sequence
  Description of Artificial Sequence: Synthetic oligonucleotide
  Target: LAMA2; (-) strand; PAM type: YTN; PAM sequence: TTA
ttcatgattctggatatttc

SEQ ID NO: 293976 - DNA, 20 bp, Artificial Sequence
  Description of Artificial Sequence: Synthetic oligonucleotide
  Target: LAMA2; (-) strand; PAM type: YTN; PAM sequence: TTT
attcatgattctggatattt

SEQ ID NO: 293977 - DNA, 20 bp, Artificial Sequence
  Description of Artificial Sequence: Synthetic oligonucleotide
  Target: LAMA2; (-) strand; PAM type: YTN; PAM sequence: TTT
tattcatgattctggatatt

SEQ ID NO: 293978 - DNA, 20 bp, Artificial Sequence
  Description of Artificial Sequence: Synthetic oligonucleotide
  Target: LAMA2; (-) strand; PAM type: YTN; PAM sequence: CTT
ttattcatgattctggatat

SEQ ID NO: 293979 - DNA, 20 bp, Artificial Sequence
  Description of Artificial Sequence: Synthetic oligonucleotide
  Target: LAMA2; (-) strand; PAM type: YTN; PAM sequence: TTA
taagtgtcttttattcatga

SEQ ID NO: 293980 - DNA, 20 bp, Artificial Sequence
  Description of Artificial Sequence: Synthetic oligonucleotide
  Target: LAMA2; (-) strand; PAM type: YTN; PAM sequence: CTG
tcatggtattataagtgtct

SEQ ID NO: 293981 - DNA, 20 bp, Artificial Sequence
  Description of Artificial Sequence: Synthetic oligonucleotide
  Target: LAMA2; (-) strand; PAM type: YTN; PAM sequence: CTC
tgtcatggtattataagtgt

SEQ ID NO: 293982 - DNA, 20 bp, Artificial Sequence
  Description of Artificial Sequence: Synthetic oligonucleotide
  Target: LAMA2; (-) strand; PAM type: YTN; PAM sequence: TTG
cctctgtcatggtattataa

SEQ ID NO: 293983 - DNA, 20 bp, Artificial Sequence
  Description of Artificial Sequence: Synthetic oligonucleotide
  Target: LAMA2; (-) strand; PAM type: YTN; PAM sequence: CTG
gaaaccaacatggttgcctc

SEQ ID NO: 293984 - DNA, 20 bp, Artificial Sequence
  Description of Artificial Sequence: Synthetic oligonucleotide
  Target: LAMA2; (-) strand; PAM type: YTN; PAM sequence: CTA
tgcagataaaagggcctgga

SEQ ID NO: 293985 - DNA, 20 bp, Artificial Sequence
  Description of Artificial Sequence: Synthetic oligonucleotide
  Target: LAMA2; (-) strand; PAM type: YTN; PAM sequence: CTA
ctatgcagataaaagggcct

SEQ ID NO: 293986 - DNA, 20 bp, Artificial Sequence
  Description of Artificial Sequence: Synthetic oligonucleotide
  Target: LAMA2; (-) strand; PAM type: YTN; PAM sequence: TTG
tatacaaggtaggacatcta

SEQ ID NO: 293987 - DNA, 20 bp, Artificial Sequence
  Description of Artificial Sequence: Synthetic oligonucleotide
  Target: LAMA2; (-) strand; PAM type: YTN; PAM sequence: CTA
aaaacaggacaccaaattgt

SEQ ID NO: 293988 - DNA, 20 bp, Artificial Sequence
  Description of Artificial Sequence: Synthetic oligonucleotide
  Target: LAMA2; (-) strand; PAM type: YTN; PAM sequence: TTC
taaaaacaggacaccaaatt

SEQ ID NO: 293989 - DNA, 20 bp, Artificial Sequence
  Description of Artificial Sequence: Synthetic oligonucleotide
  Target: LAMA2; (-) strand; PAM type: YTN; PAM sequence: TTT
ctaaaaacaggacaccaaat

SEQ ID NO: 293990 - DNA, 20 bp, Artificial Sequence
  Description of Artificial Sequence: Synthetic oligonucleotide
  Target: LAMA2; (-) strand; PAM type: YTN; PAM sequence: CTA
gtttctaaaaacaggacacc

SEQ ID NO: 293991 - DNA, 20 bp, Artificial Sequence
  Description of Artificial Sequence: Synthetic oligonucleotide
  Target: LAMA2; (-) strand; PAM type: YTN; PAM sequence: TTA
ctagtttctaaaaacaggac

SEQ ID NO: 293992 - DNA, 20 bp, Artificial Sequence
  Description of Artificial Sequence: Synthetic oligonucleotide
  Target: LAMA2; (-) strand; PAM type: YTN; PAM sequence: TTA
gtggtgtattactagtttct

SEQ ID NO: 293993 - DNA, 20 bp, Artificial Sequence
  Description of Artificial Sequence: Synthetic oligonucleotide
  Target: LAMA2; (-) strand; PAM type: YTN; PAM sequence: TTT
agtggtgtattactagtttc

SEQ ID NO: 293994 - DNA, 20 bp, Artificial Sequence
  Description of Artificial Sequence: Synthetic oligonucleotide
  Target: LAMA2; (-) strand; PAM type: YTN; PAM sequence: TTT
tagtggtgtattactagttt

SEQ ID NO: 293995 - DNA, 20 bp, Artificial Sequence
  Description of Artificial Sequence: Synthetic oligonucleotide
  Target: LAMA2; (-) strand; PAM type: YTN; PAM sequence: CTA
gaaacagttttagtggtgta

SEQ ID NO: 293996 - DNA, 20 bp, Artificial Sequence
  Description of Artificial Sequence: Synthetic oligonucleotide
  Target: LAMA2; (-) strand; PAM type: YTN; PAM sequence: CTG
gcctagaaacagttttagtg

SEQ ID NO: 293997 - DNA, 20 bp, Artificial Sequence
  Description of Artificial Sequence: Synthetic oligonucleotide
  Target: LAMA2; (-) strand; PAM type: YTN; PAM sequence: TTA
caggcgtgagccaccgcgcc

SEQ ID NO: 293998 - DNA, 20 bp, Artificial Sequence
  Description of Artificial Sequence: Synthetic oligonucleotide
  Target: LAMA2; (-) strand; PAM type: YTN; PAM sequence: CTA
ggattacaggcgtgagccac

SEQ ID NO: 293999 - DNA, 20 bp, Artificial Sequence
  Description of Artificial Sequence: Synthetic oligonucleotide
  Target: LAMA2; (-) strand; PAM type: YTN; PAM sequence: CTC
ccaaagtgctaggattacag

SEQ ID NO: 294000 - DNA, 20 bp, Artificial Sequence
  Description of Artificial Sequence: Synthetic oligonucleotide
  Target: LAMA2; (-) strand; PAM type: YTN; PAM sequence: TTG
gcctcccaaagtgctaggat

SEQ ID NO: 294001 - DNA, 20 bp, Artificial Sequence
  Description of Artificial Sequence: Synthetic oligonucleotide
  Target: LAMA2; (-) strand; PAM type: YTN; PAM sequence: CTT
ggcctcccaaagtgctagga

SEQ ID NO: 294002 - DNA, 20 bp, Artificial Sequence
  Description of Artificial Sequence: Synthetic oligonucleotide
  Target: LAMA2; (-) strand; PAM type: YTN; PAM sequence: CTG
ccttggcctcccaaagtgct

SEQ ID NO: 294003 - DNA, 20 bp, Artificial Sequence
  Description of Artificial Sequence: Synthetic oligonucleotide
  Target: LAMA2; (-) strand; PAM type: YTN; PAM sequence: CTG
cctgccttggcctcccaaag

SEQ ID NO: 294004 - DNA, 20 bp, Artificial Sequence
  Description of Artificial Sequence: Synthetic oligonucleotide
  Target: LAMA2; (-) strand; PAM type: YTN; PAM sequence: CTC
aggcaatctgcctgccttgg

SEQ ID NO: 294005 - DNA, 20 bp, Artificial Sequence
  Description of Artificial Sequence: Synthetic oligonucleotide
  Target: LAMA2; (-) strand; PAM type: YTN; PAM sequence: CTG
agctcaggcaatctgcctgc

SEQ ID NO: 294006 - DNA, 20 bp, Artificial Sequence
  Description of Artificial Sequence: Synthetic oligonucleotide
  Target: LAMA2; (-) strand; PAM type: YTN; PAM sequence: CTC
ctgagctcaggcaatctgcc

SEQ ID NO: 294007 - DNA, 20 bp, Artificial Sequence
  Description of Artificial Sequence: Synthetic oligonucleotide
  Target: LAMA2; (-) strand; PAM type: YTN; PAM sequence: CTC
gaactcctgagctcaggcaa

SEQ ID NO: 294008 - DNA, 20 bp, Artificial Sequence
  Description of Artificial Sequence: Synthetic oligonucleotide
  Target: LAMA2; (-) strand; PAM type: YTN; PAM sequence: CTG
gtctcgaactcctgagctca

SEQ ID NO: 294009 - DNA, 20 bp, Artificial Sequence
  Description of Artificial Sequence: Synthetic oligonucleotide
  Target: LAMA2; (-) strand; PAM type: YTN; PAM sequence: TTG
cccaggctggtctcgaactc

SEQ ID NO: 294010 - DNA, 20 bp, Artificial Sequence
  Description of Artificial Sequence: Synthetic oligonucleotide
  Target: LAMA2; (-) strand; PAM type: YTN; PAM sequence: TTC
accgtggttgcccaggctgg

SEQ ID NO: 294011 - DNA, 20 bp, Artificial Sequence
  Description of Artificial Sequence: Synthetic oligonucleotide
  Target: LAMA2; (-) strand; PAM type: YTN; PAM sequence: TTT
caccgtggttgcccaggctg

SEQ ID NO: 294012 - DNA, 20 bp, Artificial Sequence
  Description of Artificial Sequence: Synthetic oligonucleotide
  Target: LAMA2; (-) strand; PAM type: YTN; PAM sequence: TTA
gaagagacggggtttcaccg

SEQ ID NO: 294013 - DNA, 20 bp, Artificial Sequence
  Description of Artificial Sequence: Synthetic oligonucleotide
  Target: LAMA2; (-) strand; PAM type: YTN; PAM sequence: TTT
agaagagacggggtttcacc

SEQ ID NO: 294014 - DNA, 20 bp, Artificial Sequence
  Description of Artificial Sequence: Synthetic oligonucleotide
  Target: LAMA2; (-) strand; PAM type: YTN; PAM sequence: TTT
tagaagagacggggtttcac

SEQ ID NO: 294015 - DNA, 20 bp, Artificial Sequence
  Description of Artificial Sequence: Synthetic oligonucleotide
  Target: LAMA2; (-) strand; PAM type: YTN; PAM sequence: TTG
tattttagaagagacggggt

SEQ ID NO: 294016 - DNA, 20 bp, Artificial Sequence
  Description of Artificial Sequence: Synthetic oligonucleotide
  Target: LAMA2; (-) strand; PAM type: YTN; PAM sequence: TTT
gtattttagaagagacgggg

SEQ ID NO: 294017 - DNA, 20 bp, Artificial Sequence
  Description of Artificial Sequence: Synthetic oligonucleotide
  Target: LAMA2; (-) strand; PAM type: YTN; PAM sequence: TTT
tgtattttagaagagacggg

SEQ ID NO: 294018 - DNA, 20 bp, Artificial Sequence
  Description of Artificial Sequence: Synthetic oligonucleotide
  Target: LAMA2; (-) strand; PAM type: YTN; PAM sequence: TTT
ttgtattttagaagagacgg

SEQ ID NO: 294019 - DNA, 20 bp, Artificial Sequence
  Description of Artificial Sequence: Synthetic oligonucleotide
  Target: LAMA2; (-) strand; PAM type: YTN; PAM sequence: TTT
tttgtattttagaagagacg

SEQ ID NO: 294020 - DNA, 20 bp, Artificial Sequence
  Description of Artificial Sequence: Synthetic oligonucleotide
  Target: LAMA2; (-) strand; PAM type: YTN; PAM sequence: TTT
ttttgtattttagaagagac

SEQ ID NO: 294021 - DNA, 20 bp, Artificial Sequence
  Description of Artificial Sequence: Synthetic oligonucleotide
  Target: LAMA2; (-) strand; PAM type: YTN; PAM sequence: CTA
tttttttgtattttagaaga

SEQ ID NO: 294022 - DNA, 20 bp, Artificial Sequence
  Description of Artificial Sequence: Synthetic oligonucleotide
  Target: LAMA2; (-) strand; PAM type: YTN; PAM sequence: CTA
caggtgcacaccgccatgcc

SEQ ID NO: 294023 - DNA, 20 bp, Artificial Sequence
  Description of Artificial Sequence: Synthetic oligonucleotide
  Target: LAMA2; (-) strand; PAM type: YTN; PAM sequence: CTG
ggactacaggtgcacaccgc

SEQ ID NO: 294024 - DNA, 20 bp, Artificial Sequence
  Description of Artificial Sequence: Synthetic oligonucleotide
  Target: LAMA2; (-) strand; PAM type: YTN; PAM sequence: CTG
agtagctgggactacaggtg

SEQ ID NO: 294025 - DNA, 20 bp, Artificial Sequence
  Description of Artificial Sequence: Synthetic oligonucleotide
  Target: LAMA2; (-) strand; PAM type: YTN; PAM sequence: CTA
ctgagtagctgggactacag

SEQ ID NO: 294026 - DNA, 20 bp, Artificial Sequence
  Description of Artificial Sequence: Synthetic oligonucleotide
  Target: LAMA2; (-) strand; PAM type: YTN; PAM sequence: CTC
agcctactgagtagctggga

SEQ ID NO: 294027 - DNA, 20 bp, Artificial Sequence
  Description of Artificial Sequence: Synthetic oligonucleotide
  Target: LAMA2; (-) strand; PAM type: YTN; PAM sequence: CTG
cctcagcctactgagtagct

SEQ ID NO: 294028 - DNA, 20 bp, Artificial Sequence
  Description of Artificial Sequence: Synthetic oligonucleotide
  Target: LAMA2; (-) strand; PAM type: YTN; PAM sequence: CTC
ctgcctcagcctactgagta

SEQ ID NO: 294029 - DNA, 20 bp, Artificial Sequence
  Description of Artificial Sequence: Synthetic oligonucleotide
  Target: LAMA2; (-) strand; PAM type: YTN; PAM sequence: TTC
tcctgcctcagcctactgag

SEQ ID NO: 294030 - DNA, 20 bp, Artificial Sequence
  Description of Artificial Sequence: Synthetic oligonucleotide
  Target: LAMA2; (-) strand; PAM type: YTN; PAM sequence: TTC
aagcgattctcctgcctcag

SEQ ID NO: 294031 - DNA, 20 bp, Artificial Sequence
  Description of Artificial Sequence: Synthetic oligonucleotide
  Target: LAMA2; (-) strand; PAM type: YTN; PAM sequence: CTG
ggttcaagcgattctcctgc

SEQ ID NO: 294032 - DNA, 20 bp, Artificial Sequence
  Description of Artificial Sequence: Synthetic oligonucleotide
  Target: LAMA2; (-) strand; PAM type: YTN; PAM sequence: CTC
ctgggttcaagcgattctcc

SEQ ID NO: 294033 - DNA, 20 bp, Artificial Sequence
  Description of Artificial Sequence: Synthetic oligonucleotide
  Target: LAMA2; (-) strand; PAM type: YTN; PAM sequence: CTC
cgcctcctgggttcaagcga

SEQ ID NO: 294034 - DNA, 20 bp, Artificial Sequence
  Description of Artificial Sequence: Synthetic oligonucleotide
  Target: LAMA2; (-) strand; PAM type: YTN; PAM sequence: CTG
caacctccgcctcctgggtt

SEQ ID NO: 294035 - DNA, 20 bp, Artificial Sequence
  Description of Artificial Sequence: Synthetic oligonucleotide
  Target: LAMA2; (-) strand; PAM type: YTN; PAM sequence: CTC
actgcaacctccgcctcctg

SEQ ID NO: 294036 - DNA, 20 bp, Artificial Sequence
  Description of Artificial Sequence: Synthetic oligonucleotide
  Target: LAMA2; (-) strand; PAM type: YTN; PAM sequence: CTC
ggctcactgcaacctccgcc

SEQ ID NO: 294037 - DNA, 20 bp, Artificial Sequence
  Description of Artificial Sequence: Synthetic oligonucleotide
  Target: LAMA2; (-) strand; PAM type: YTN; PAM sequence: CTG
gagtacagtggcgtgatctc

SEQ ID NO: 294038 - DNA, 20 bp, Artificial Sequence
  Description of Artificial Sequence: Synthetic oligonucleotide
  Target: LAMA2; (-) strand; PAM type: YTN; PAM sequence: TTG
cccaggctggagtacagtgg

SEQ ID NO: 294039 - DNA, 20 bp, Artificial Sequence
  Description of Artificial Sequence: Synthetic oligonucleotide
  Target: LAMA2; (-) strand; PAM type: YTN; PAM sequence: CTG
ttgcccaggctggagtacag

SEQ ID NO: 294040 - DNA, 20 bp, Artificial Sequence
  Description of Artificial Sequence: Synthetic oligonucleotide
  Target: LAMA2; (-) strand; PAM type: YTN; PAM sequence: CTC
tgttgcccaggctggagtac

SEQ ID NO: 294041 - DNA, 20 bp, Artificial Sequence
  Description of Artificial Sequence: Synthetic oligonucleotide
  Target: LAMA2; (-) strand; PAM type: YTN; PAM sequence: CTC
gctctgttgcccaggctgga

SEQ ID NO: 294042 - DNA, 20 bp, Artificial Sequence
  Description of Artificial Sequence: Synthetic oligonucleotide
  Target: LAMA2; (-) strand; PAM type: YTN; PAM sequence: TTG
gagatggagtctcgctctgt

SEQ ID NO: 294043 - DNA, 20 bp, Artificial Sequence
  Description of Artificial Sequence: Synthetic oligonucleotide
  Target: LAMA2; (-) strand; PAM type: YTN; PAM sequence: TTT
ggagatggagtctcgctctg

SEQ ID NO: 294044 - DNA, 20 bp, Artificial Sequence
  Description of Artificial Sequence: Synthetic oligonucleotide
  Target: LAMA2; (-) strand; PAM type: YTN; PAM sequence: TTT
tggagatggagtctcgctct

SEQ ID NO: 294045 - DNA, 20 bp, Artificial Sequence
  Description of Artificial Sequence: Synthetic oligonucleotide
  Target: LAMA2; (-) strand; PAM type: YTN; PAM sequence: TTT
ttggagatggagtctcgctc

SEQ ID NO: 294046 - DNA, 20 bp, Artificial Sequence
  Description of Artificial Sequence: Synthetic oligonucleotide
  Target: LAMA2; (-) strand; PAM type: YTN; PAM sequence: TTT
tttggagatggagtctcgct

SEQ ID NO: 294047 - DNA, 20 bp, Artificial Sequence
  Description of Artificial Sequence: Synthetic oligonucleotide
  Target: LAMA2; (-) strand; PAM type: YTN; PAM sequence: TTA
ttttttggagatggagtctc

SEQ ID NO: 294048 - DNA, 20 bp, Artificial Sequence
  Description of Artificial Sequence: Synthetic oligonucleotide
  Target: LAMA2; (-) strand; PAM type: YTN; PAM sequence: TTT
attttttggagatggagtct

SEQ ID NO: 294049 - DNA, 20 bp, Artificial Sequence
  Description of Artificial Sequence: Synthetic oligonucleotide
  Target: LAMA2; (-) strand; PAM type: YTN; PAM sequence: TTT
tattttttggagatggagtc

SEQ ID NO: 294050 - DNA, 20 bp, Artificial Sequence
  Description of Artificial Sequence: Synthetic oligonucleotide
  Target: LAMA2; (-) strand; PAM type: YTN; PAM sequence: TTT
ttattttttggagatggagt

SEQ ID NO: 294051 - DNA, 20 bp, Artificial Sequence
  Description of Artificial Sequence: Synthetic oligonucleotide
  Target: LAMA2; (-) strand; PAM type: YTN; PAM sequence: TTA
tttttattttttggagatgg

SEQ ID NO: 294052 - DNA, 20 bp, Artificial Sequence
  Description of Artificial Sequence: Synthetic oligonucleotide
  Target: LAMA2; (-) strand; PAM type: YTN; PAM sequence: TTT
atttttattttttggagatg

SEQ ID NO: 294053 - DNA, 20 bp, Artificial Sequence
  Description of Artificial Sequence: Synthetic oligonucleotide
  Target: LAMA2; (-) strand; PAM type: YTN; PAM sequence: TTA
tttatttttattttttggag

SEQ ID NO: 294054 - DNA, 20 bp, Artificial Sequence
  Description of Artificial Sequence: Synthetic oligonucleotide
  Target: LAMA2; (-) strand; PAM type: YTN; PAM sequence: TTT
atttatttttattttttgga

SEQ ID NO: 294055 - DNA, 20 bp, Artificial Sequence
  Description of Artificial Sequence: Synthetic oligonucleotide
  Target: LAMA2; (-) strand; PAM type: YTN; PAM sequence: TTA
tttatttatttttatttttt

SEQ ID NO: 294056 - DNA, 20 bp, Artificial Sequence
  Description of Artificial Sequence: Synthetic oligonucleotide
  Target: LAMA2; (-) strand; PAM type: YTN; PAM sequence: TTT
atttatttatttttattttt

SEQ ID NO: 294057 - DNA, 20 bp, Artificial Sequence
  Description of Artificial Sequence: Synthetic oligonucleotide
  Target: LAMA2; (-) strand; PAM type: YTN; PAM sequence: TTA
tttatttatttatttttatt

SEQ ID NO: 294058 - DNA, 20 bp, Artificial Sequence
  Description of Artificial Sequence: Synthetic oligonucleotide
  Target: LAMA2; (-) strand; PAM type: YTN; PAM sequence: TTT
atttatttatttatttttat

SEQ ID NO: 294059 - DNA, 20 bp, Artificial Sequence
  Description of Artificial Sequence: Synthetic oligonucleotide
  Target: LAMA2; (-) strand; PAM type: YTN; PAM sequence: TTT
tatttatttatttattttta

SEQ ID NO: 294060 - DNA, 20 bp, Artificial Sequence
  Description of Artificial Sequence: Synthetic oligonucleotide
  Target: LAMA2; (-) strand; PAM type: YTN; PAM sequence: TTT
ttatttatttatttattttt

SEQ ID NO: 294061 - DNA, 20 bp, Artificial Sequence
  Description of Artificial Sequence: Synthetic oligonucleotide
  Target: LAMA2; (-) strand; PAM type: YTN; PAM sequence: TTA
gatacagtttttatttattt

SEQ ID NO: 294062 - DNA, 20 bp, Artificial Sequence
  Description of Artificial Sequence: Synthetic oligonucleotide
  Target: LAMA2; (-) strand; PAM type: YTN; PAM sequence: TTT
agatacagtttttatttatt

SEQ ID NO: 294063 - DNA, 20 bp, Artificial Sequence
  Description of Artificial Sequence: Synthetic oligonucleotide
  Target: LAMA2; (-) strand; PAM type: YTN; PAM sequence: TTA
tatgatgtttagatacagtt

SEQ ID NO: 294064 - DNA, 20 bp, Artificial Sequence
  Description of Artificial Sequence: Synthetic oligonucleotide
  Target: LAMA2; (-) strand; PAM type: YTN; PAM sequence: TTT
atatgatgtttagatacagt

SEQ ID NO: 294065 - DNA, 20 bp, Artificial Sequence
  Description of Artificial Sequence: Synthetic oligonucleotide
  Target: LAMA2; (-) strand; PAM type: YTN; PAM sequence: TTA
gacatacacatttatatgat

SEQ ID NO: 294066 - DNA, 20 bp, Artificial Sequence
  Description of Artificial Sequence: Synthetic oligonucleotide
  Target: LAMA2; (-) strand; PAM type: YTN; PAM sequence: TTA
acataaaatcatattagaca

SEQ ID NO: 294067 - DNA, 20 bp, Artificial Sequence
  Description of Artificial Sequence: Synthetic oligonucleotide
  Target: LAMA2; (-) strand; PAM type: YTN; PAM sequence: CTT
aacataaaatcatattagac

SEQ ID NO: 294068 - DNA, 20 bp, Artificial Sequence
  Description of Artificial Sequence: Synthetic oligonucleotide
  Target: LAMA2; (-) strand; PAM type: YTN; PAM sequence: CTG
tgtgtatatatacttaacat

SEQ ID NO: 294069 - DNA, 20 bp, Artificial Sequence
  Description of Artificial Sequence: Synthetic oligonucleotide
  Target: LAMA2; (-) strand; PAM type: YTN; PAM sequence: CTC
tgtgtgtatatatacttaac

SEQ ID NO: 294070 - DNA, 20 bp, Artificial Sequence
  Description of Artificial Sequence: Synthetic oligonucleotide
  Target: LAMA2; (-) strand; PAM type: YTN; PAM sequence: TTG
tgtgtctctgtgtgtatata

SEQ ID NO: 294071 - DNA, 20 bp, Artificial Sequence
  Description of Artificial Sequence: Synthetic oligonucleotide
  Target: LAMA2; (-) strand; PAM type: YTN; PAM sequence: CTA
taaaatagttgtgtgtctct

SEQ ID NO: 294072 - DNA, 20 bp, Artificial Sequence
  Description of Artificial Sequence: Synthetic oligonucleotide
  Target: LAMA2; (-) strand; PAM type: YTN; PAM sequence: CTC
caatactataaaatagttgt

SEQ ID NO: 294073 - DNA, 20 bp, Artificial Sequence
  Description of Artificial Sequence: Synthetic oligonucleotide
  Target: LAMA2; (-) strand; PAM type: YTN; PAM sequence: CTA
tatgacctccaatactataa

SEQ ID NO: 294074 - DNA, 20 bp, Artificial Sequence
  Description of Artificial Sequence: Synthetic oligonucleotide
  Target: LAMA2; (-) strand; PAM type: YTN; PAM sequence: CTA
atcaaggctatatgacctcc

SEQ ID NO: 294075 - DNA, 20 bp, Artificial Sequence
  Description of Artificial Sequence: Synthetic oligonucleotide
  Target: LAMA2; (-) strand; PAM type: YTN; PAM sequence: CTC
taatcaaggctatatgacct

SEQ ID NO: 294076 - DNA, 20 bp, Artificial Sequence
  Description of Artificial Sequence: Synthetic oligonucleotide
  Target: LAMA2; (-) strand; PAM type: YTN; PAM sequence: TTG
agcccatgctctaatcaagg

SEQ ID NO: 294077 - DNA, 20 bp, Artificial Sequence
  Description of Artificial Sequence: Synthetic oligonucleotide
  Target: LAMA2; (-) strand; PAM type: YTN; PAM sequence: CTT
gagcccatgctctaatcaag

SEQ ID NO: 294078 - DNA, 20 bp, Artificial Sequence
  Description of Artificial Sequence: Synthetic oligonucleotide
  Target: LAMA2; (-) strand; PAM type: YTN; PAM sequence: CTG
acttgagcccatgctctaat

SEQ ID NO: 294079 - DNA, 20 bp, Artificial Sequence
  Description of Artificial Sequence: Synthetic oligonucleotide
  Target: LAMA2; (-) strand; PAM type: YTN; PAM sequence: TTG
aataccagcagtctgacttg

SEQ ID NO: 294080 - DNA, 20 bp, Artificial Sequence
  Description of Artificial Sequence: Synthetic oligonucleotide
  Target: LAMA2; (-) strand; PAM type: YTN; PAM sequence: TTT
gaataccagcagtctgactt

SEQ ID NO: 294081 - DNA, 20 bp, Artificial Sequence
  Description of Artificial Sequence: Synthetic oligonucleotide
  Target: LAMA2; (-) strand; PAM type: YTN; PAM sequence: CTG
ggatttgaataccagcagtc

SEQ ID NO: 294082 - DNA, 20 bp, Artificial Sequence
  Description of Artificial Sequence: Synthetic oligonucleotide
  Target: LAMA2; (-) strand; PAM type: YTN; PAM sequence: TTA
cagtgctgggatttgaatac

SEQ ID NO: 294083 - DNA, 20 bp, Artificial Sequence
  Description of Artificial Sequence: Synthetic oligonucleotide
  Target: LAMA2; (-) strand; PAM type: YTN; PAM sequence: TTC
acacagatggtcggttacag

SEQ ID NO: 294084 - DNA, 20 bp, Artificial Sequence
  Description of Artificial Sequence: Synthetic oligonucleotide
  Target: LAMA2; (-) strand; PAM type: YTN; PAM sequence: TTC
ccaaattcacacagatggtc

SEQ ID NO: 294085 - DNA, 20 bp, Artificial Sequence
  Description of Artificial Sequence: Synthetic oligonucleotide
  Target: LAMA2; (-) strand; PAM type: YTN; PAM sequence: TTT
cccaaattcacacagatggt

SEQ ID NO: 294086 - DNA, 20 bp, Artificial Sequence
  Description of Artificial Sequence: Synthetic oligonucleotide
  Target: LAMA2; (-) strand; PAM type: YTN; PAM sequence: CTT
tcccaaattcacacagatgg

SEQ ID NO: 294087 - DNA, 20 bp, Artificial Sequence
  Description of Artificial Sequence: Synthetic oligonucleotide
  Target: LAMA2; (-) strand; PAM type: YTN; PAM sequence: TTG
gacaggtagctttcccaaat

SEQ ID NO: 294088 - DNA, 20 bp, Artificial Sequence
  Description of Artificial Sequence: Synthetic oligonucleotide
  Target: LAMA2; (-) strand; PAM type: YTN; PAM sequence: CTG
agaaatagattggacaggta

SEQ ID NO: 294089 - DNA, 20 bp, Artificial Sequence
  Description of Artificial Sequence: Synthetic oligonucleotide
  Target: LAMA2; (-) strand; PAM type: YTN; PAM sequence: TTG
gatgggaaactgagaaatag

SEQ ID NO: 294090 - DNA, 20 bp, Artificial Sequence
  Description of Artificial Sequence: Synthetic oligonucleotide
  Target: LAMA2; (-) strand; PAM type: YTN; PAM sequence: CTT
ggatgggaaactgagaaata

SEQ ID NO: 294091 - DNA, 20 bp, Artificial Sequence
  Description of Artificial Sequence: Synthetic oligonucleotide
  Target: LAMA2; (-) strand; PAM type: YTN; PAM sequence: TTA
gtacttggatgggaaactga

SEQ ID NO: 294092 - DNA, 20 bp, Artificial Sequence
  Description of Artificial Sequence: Synthetic oligonucleotide
  Target: LAMA2; (-) strand; PAM type: YTN; PAM sequence: TTG
ggcccggttagtacttggat

SEQ ID NO: 294093 - DNA, 20 bp, Artificial Sequence
  Description of Artificial Sequence: Synthetic oligonucleotide
  Target: LAMA2; (-) strand; PAM type: YTN; PAM sequence: CTA
agcagggttgggcccggtta

SEQ ID NO: 294094 - DNA, 20 bp, Artificial Sequence
  Description of Artificial Sequence: Synthetic oligonucleotide
  Target: LAMA2; (-) strand; PAM type: YTN; PAM sequence: CTC
aaaagctaagcagggttggg

SEQ ID NO: 294095 - DNA, 20 bp, Artificial Sequence
  Description of Artificial Sequence: Synthetic oligonucleotide
  Target: LAMA2; (-) strand; PAM type: YTN; PAM sequence: CTG
atctcaaaagctaagcaggg

SEQ ID NO: 294096 - DNA, 20 bp, Artificial Sequence
  Description of Artificial Sequence: Synthetic oligonucleotide
  Target: LAMA2; (-) strand; PAM type: YTN; PAM sequence: TTC
tgatctcaaaagctaagcag

SEQ ID NO: 294097 - DNA, 20 bp, Artificial Sequence
  Description of Artificial Sequence: Synthetic oligonucleotide
  Target: LAMA2; (-) strand; PAM type: YTN; PAM sequence: TTT
ctgatctcaaaagctaagca

SEQ ID NO: 294098 - DNA, 20 bp, Artificial Sequence
  Description of Artificial Sequence: Synthetic oligonucleotide
  Target: LAMA2; (-) strand; PAM type: YTN; PAM sequence: TTT
tctgatctcaaaagctaagc

SEQ ID NO: 294099 - DNA, 20 bp, Artificial Sequence
  Description of Artificial Sequence: Synthetic oligonucleotide
  Target: LAMA2; (-) strand; PAM type: YTN; PAM sequence: CTT
ttctgatctcaaaagctaag

SEQ ID NO: 294100 - DNA, 20 bp, Artificial Sequence
  Description of Artificial Sequence: Synthetic oligonucleotide
  Target: LAMA2; (-) strand; PAM type: YTN; PAM sequence: CTG
aaagcatccgatcttttctg

SEQ ID NO: 294101 - DNA, 20 bp, Artificial Sequence
  Description of Artificial Sequence: Synthetic oligonucleotide
  Target: LAMA2; (-) strand; PAM type: YTN; PAM sequence: CTA
tggccaaatcaccctgaaag

SEQ ID NO: 294102 - DNA, 20 bp, Artificial Sequence
  Description of Artificial Sequence: Synthetic oligonucleotide
  Target: LAMA2; (-) strand; PAM type: YTN; PAM sequence: TTG
acagatgaggaaacagaaat

SEQ ID NO: 294103 - DNA, 20 bp, Artificial Sequence
  Description of Artificial Sequence: Synthetic oligonucleotide
  Target: LAMA2; (-) strand; PAM type: YTN; PAM sequence: TTT
gacagatgaggaaacagaaa

SEQ ID NO: 294104 - DNA, 20 bp, Artificial Sequence
  Description of Artificial Sequence: Synthetic oligonucleotide
  Target: LAMA2; (-) strand; PAM type: YTN; PAM sequence: CTC
atttgacagatgaggaaaca

SEQ ID NO: 294105 - DNA, 20 bp, Artificial Sequence
  Description of Artificial Sequence: Synthetic oligonucleotide
  Target: LAMA2; (-) strand; PAM type: YTN; PAM sequence: TTA
atatcctcatttgacagatg

SEQ ID NO: 294106 - DNA, 20 bp, Artificial Sequence
  Description of Artificial Sequence: Synthetic oligonucleotide
  Target: LAMA2; (-) strand; PAM type: YTN; PAM sequence: CTG
ttaatatcctcatttgacag

SEQ ID NO: 294107 - DNA, 20 bp, Artificial Sequence
  Description of Artificial Sequence: Synthetic oligonucleotide
  Target: LAMA2; (-) strand; PAM type: YTN; PAM sequence: CTG
tgctgttaatatcctcattt

SEQ ID NO: 294108 - DNA, 20 bp, Artificial Sequence
  Description of Artificial Sequence: Synthetic oligonucleotide
  Target: LAMA2; (-) strand; PAM type: YTN; PAM sequence: TTG
atgtctgtgctgttaatatc

SEQ ID NO: 294109 - DNA, 20 bp, Artificial Sequence
  Description of Artificial Sequence: Synthetic oligonucleotide
  Target: LAMA2; (-) strand; PAM type: YTN; PAM sequence: TTT
gatgtctgtgctgttaatat

SEQ ID NO: 294110 - DNA, 20 bp, Artificial Sequence
  Description of Artificial Sequence: Synthetic oligonucleotide
  Target: LAMA2; (-) strand; PAM type: YTN; PAM sequence: CTT
tgatgtctgtgctgttaata

SEQ ID NO: 294111 - DNA, 20 bp, Artificial Sequence
  Description of Artificial Sequence: Synthetic oligonucleotide
  Target: LAMA2; (-) strand; PAM type: YTN; PAM sequence: CTG
atacaaagtctttgatgtct

SEQ ID NO: 294112 - DNA, 20 bp, Artificial Sequence
  Description of Artificial Sequence: Synthetic oligonucleotide
  Target: LAMA2; (-) strand; PAM type: YTN; PAM sequence: CTC
tgatacaaagtctttgatgt

SEQ ID NO: 294113 - DNA, 20 bp, Artificial Sequence
  Description of Artificial Sequence: Synthetic oligonucleotide
  Target: LAMA2; (-) strand; PAM type: YTN; PAM sequence: TTA
aaactctgatacaaagtctt

SEQ ID NO: 294114 - DNA, 20 bp, Artificial Sequence
  Description of Artificial Sequence: Synthetic oligonucleotide
  Target: LAMA2; (-) strand; PAM type: YTN; PAM sequence: TTT
aaaactctgatacaaagtct

SEQ ID NO: 294115 - DNA, 20 bp, Artificial Sequence
  Description of Artificial Sequence: Synthetic oligonucleotide
  Target: LAMA2; (-) strand; PAM type: YTN; PAM sequence: TTT
taaaactctgatacaaagtc

SEQ ID NO: 294116 - DNA, 20 bp, Artificial Sequence
  Description of Artificial Sequence: Synthetic oligonucleotide
  Target: LAMA2; (-) strand; PAM type: YTN; PAM sequence: CTT
ttaaaactctgatacaaagt

SEQ ID NO: 294117 - DNA, 20 bp, Artificial Sequence
  Description of Artificial Sequence: Synthetic oligonucleotide
  Target: LAMA2; (-) strand; PAM type: YTN; PAM sequence: TTA
tcttttaaaactctgataca

SEQ ID NO: 294118 - DNA, 20 bp, Artificial Sequence
  Description of Artificial Sequence: Synthetic oligonucleotide
  Target: LAMA2; (-) strand; PAM type: YTN; PAM sequence: TTG
aacaaacattatcttttaaa

SEQ ID NO: 294119 - DNA, 20 bp, Artificial Sequence
  Description of Artificial Sequence: Synthetic oligonucleotide
  Target: LAMA2; (-) strand; PAM type: YTN; PAM sequence: TTC
agtatatgtgagtcattgaa

SEQ ID NO: 294120 - DNA, 20 bp, Artificial Sequence
  Description of Artificial Sequence: Synthetic oligonucleotide
  Target: LAMA2; (-) strand; PAM type: YTN; PAM sequence: TTA
aacgttcagtatatgtgagt

SEQ ID NO: 294121 - DNA, 20 bp, Artificial Sequence
  Description of Artificial Sequence: Synthetic oligonucleotide
  Target: LAMA2; (-) strand; PAM type: YTN; PAM sequence: TTA
ttaaacgttcagtatatgtg

SEQ ID NO: 294122 - DNA, 20 bp, Artificial Sequence
  Description of Artificial Sequence: Synthetic oligonucleotide
  Target: LAMA2; (-) strand; PAM type: YTN; PAM sequence: TTT
attaaacgttcagtatatgt

SEQ ID NO: 294123 - DNA, 20 bp, Artificial Sequence
  Description of Artificial Sequence: Synthetic oligonucleotide
  Target: LAMA2; (-) strand; PAM type: YTN; PAM sequence: TTA
tgccatttattaaacgttca

SEQ ID NO: 294124 - DNA, 20 bp, Artificial Sequence
  Description of Artificial Sequence: Synthetic oligonucleotide
  Target: LAMA2; (-) strand; PAM type: YTN; PAM sequence: CTT
atgccatttattaaacgttc

SEQ ID NO: 294125 - DNA, 20 bp, Artificial Sequence
  Description of Artificial Sequence: Synthetic oligonucleotide
  Target: LAMA2; (-) strand; PAM type: YTN; PAM sequence: CTA
catagtacttatgccattta

SEQ ID NO: 294126 - DNA, 20 bp, Artificial Sequence
  Description of Artificial Sequence: Synthetic oligonucleotide
  Target: LAMA2; (-) strand; PAM type: YTN; PAM sequence: TTA
ctacatagtacttatgccat

SEQ ID NO: 294127 - DNA, 20 bp, Artificial Sequence
  Description of Artificial Sequence: Synthetic oligonucleotide
  Target: LAMA2; (-) strand; PAM type: YTN; PAM sequence: TTA
tcattactacatagtactta

SEQ ID NO: 294128 - DNA, 20 bp, Artificial Sequence
  Description of Artificial Sequence: Synthetic oligonucleotide
  Target: LAMA2; (-) strand; PAM type: YTN; PAM sequence: TTA
ttatcattactacatagtac

SEQ ID NO: 294129 - DNA, 20 bp, Artificial Sequence
  Description of Artificial Sequence: Synthetic oligonucleotide
  Target: LAMA2; (-) strand; PAM type: YTN; PAM sequence: CTC
attattatcattactacata

SEQ ID NO: 294130 - DNA, 20 bp, Artificial Sequence
  Description of Artificial Sequence: Synthetic oligonucleotide
  Target: LAMA2; (-) strand; PAM type: YTN; PAM sequence: CTG
gtgaaagtactcattattat

SEQ ID NO: 294131 - DNA, 20 bp, Artificial Sequence
  Description of Artificial Sequence: Synthetic oligonucleotide
  Target: LAMA2; (-) strand; PAM type: YTN; PAM sequence: CTG
ggctggtgaaagtactcatt

SEQ ID NO: 294132 - DNA, 20 bp, Artificial Sequence
  Description of Artificial Sequence: Synthetic oligonucleotide
  Target: LAMA2; (-) strand; PAM type: YTN; PAM sequence: TTA
gccctgggctggtgaaagta

SEQ ID NO: 294133 - DNA, 20 bp, Artificial Sequence
  Description of Artificial Sequence: Synthetic oligonucleotide
  Target: LAMA2; (-) strand; PAM type: YTN; PAM sequence: TTT
agccctgggctggtgaaagt

SEQ ID NO: 294134 - DNA, 20 bp, Artificial Sequence
  Description of Artificial Sequence: Synthetic oligonucleotide
  Target: LAMA2; (-) strand; PAM type: YTN; PAM sequence: TTG
tttagccctgggctggtgaa

SEQ ID NO: 294135 - DNA, 20 bp, Artificial Sequence
  Description of Artificial Sequence: Synthetic oligonucleotide
  Target: LAMA2; (-) strand; PAM type: YTN; PAM sequence: TTG
aatgaaaattgtttagccct

SEQ ID NO: 294136 - DNA, 20 bp, Artificial Sequence
  Description of Artificial Sequence: Synthetic oligonucleotide
  Target: LAMA2; (-) strand; PAM type: YTN; PAM sequence: TTA
catataatattgaatgaaaa

SEQ ID NO: 294137 - DNA, 20 bp, Artificial Sequence
  Description of Artificial Sequence: Synthetic oligonucleotide
  Target: LAMA2; (-) strand; PAM type: YTN; PAM sequence: TTA
tgagaattacatataatatt

SEQ ID NO: 294138 - DNA, 20 bp, Artificial Sequence
  Description of Artificial Sequence: Synthetic oligonucleotide
  Target: LAMA2; (-) strand; PAM type: YTN; PAM sequence: TTA
cagagccgttatgagaatta

SEQ ID NO: 294139 - DNA, 20 bp, Artificial Sequence
  Description of Artificial Sequence: Synthetic oligonucleotide
  Target: LAMA2; (-) strand; PAM type: YTN; PAM sequence: TTT
acagagccgttatgagaatt

SEQ ID NO: 294140 - DNA, 20 bp, Artificial Sequence
  Description of Artificial Sequence: Synthetic oligonucleotide
  Target: LAMA2; (-) strand; PAM type: YTN; PAM sequence: TTT
tacagagccgttatgagaat

SEQ ID NO: 294141 - DNA, 20 bp, Artificial Sequence
  Description of Artificial Sequence: Synthetic oligonucleotide
  Target: LAMA2; (-) strand; PAM type: YTN; PAM sequence: CTA
tattttacagagccgttatg

SEQ ID NO: 294142 - DNA, 20 bp, Artificial Sequence
  Description of Artificial Sequence: Synthetic oligonucleotide
  Target: LAMA2; (-) strand; PAM type: YTN; PAM sequence: CTA
aaagtagaaagactatattt

SEQ ID NO: 294143 - DNA, 20 bp, Artificial Sequence
  Description of Artificial Sequence: Synthetic oligonucleotide
  Target: LAMA2; (-) strand; PAM type: YTN; PAM sequence: CTC
gactaaaagtagaaagacta

SEQ ID NO: 294144 - DNA, 20 bp, Artificial Sequence
  Description of Artificial Sequence: Synthetic oligonucleotide
  Target: LAMA2; (-) strand; PAM type: YTN; PAM sequence: TTA
actcgactaaaagtagaaag

SEQ ID NO: 294145 - DNA, 20 bp, Artificial Sequence
  Description of Artificial Sequence: Synthetic oligonucleotide
  Target: LAMA2; (-) strand; PAM type: YTN; PAM sequence: TTA
ttaactcgactaaaagtaga

SEQ ID NO: 294146 - DNA, 20 bp, Artificial Sequence
  Description of Artificial Sequence: Synthetic oligonucleotide
  Target: LAMA2; (-) strand; PAM type: YTN; PAM sequence: CTT
attaactcgactaaaagtag

SEQ ID NO: 294147 - DNA, 20 bp, Artificial Sequence
  Description of Artificial Sequence: Synthetic oligonucleotide
  Target: LAMA2; (-) strand; PAM type: YTN; PAM sequence: TTC
ttattaactcgactaaaagt

SEQ ID NO: 294148 - DNA, 20 bp, Artificial Sequence
  Description of Artificial Sequence: Synthetic oligonucleotide
  Target: LAMA2; (-) strand; PAM type: YTN; PAM sequence: CTA
attcttattaactcgactaa

SEQ ID NO: 294149 - DNA, 20 bp, Artificial Sequence
  Description of Artificial Sequence: Synthetic oligonucleotide
  Target: LAMA2; (-) strand; PAM type: YTN; PAM sequence: TTA
agatagctaattcttattaa

SEQ ID NO: 294150 - DNA, 20 bp, Artificial Sequence
  Description of Artificial Sequence: Synthetic oligonucleotide
  Target: LAMA2; (-) strand; PAM type: YTN; PAM sequence: CTT
aagatagctaattcttatta

SEQ ID NO: 294151 - DNA, 20 bp, Artificial Sequence
  Description of Artificial Sequence: Synthetic oligonucleotide
  Target: LAMA2; (-) strand; PAM type: YTN; PAM sequence: TTG
cttaagatagctaattctta

SEQ ID NO: 294152 - DNA, 20 bp, Artificial Sequence
  Description of Artificial Sequence: Synthetic oligonucleotide
  Target: LAMA2; (-) strand; PAM type: YTN; PAM sequence: TTG
gttgcttaagatagctaatt

SEQ ID NO: 294153 - DNA, 20 bp, Artificial Sequence
  Description of Artificial Sequence: Synthetic oligonucleotide
  Target: LAMA2; (-) strand; PAM type: YTN; PAM sequence: CTA
gtggtgtgagtgggttggtt

SEQ ID NO: 294154 - DNA, 20 bp, Artificial Sequence
  Description of Artificial Sequence: Synthetic oligonucleotide
  Target: LAMA2; (-) strand; PAM type: YTN; PAM sequence: TTA
ctagtggtgtgagtgggttg

SEQ ID NO: 294155 - DNA, 20 bp, Artificial Sequence
  Description of Artificial Sequence: Synthetic oligonucleotide
  Target: LAMA2; (-) strand; PAM type: YTN; PAM sequence: TTT
actagtggtgtgagtgggtt

SEQ ID NO: 294156 - DNA, 20 bp, Artificial Sequence
  Description of Artificial Sequence: Synthetic oligonucleotide
  Target: LAMA2; (-) strand; PAM type: YTN; PAM sequence: TTT
tactagtggtgtgagtgggt

SEQ ID NO: 294157 - DNA, 20 bp, Artificial Sequence
  Description of Artificial Sequence: Synthetic oligonucleotide
  Target: LAMA2; (-) strand; PAM type: YTN; PAM sequence: CTT
ttactagtggtgtgagtggg

SEQ ID NO: 294158 - DNA, 20 bp, Artificial Sequence
  Description of Artificial Sequence: Synthetic oligonucleotide
  Target: LAMA2; (-) strand; PAM type: YTN; PAM sequence: CTG
ccttttactagtggtgtgag

SEQ ID NO: 294159 - DNA, 20 bp, Artificial Sequence
  Description of Artificial Sequence: Synthetic oligonucleotide
  Target: LAMA2; (-) strand; PAM type: YTN; PAM sequence: CTC
tgccttttactagtggtgtg

SEQ ID NO: 294160 - DNA, 20 bp, Artificial Sequence
  Description of Artificial Sequence: Synthetic oligonucleotide
  Target: LAMA2; (-) strand; PAM type: YTN; PAM sequence: TTA
ctctgccttttactagtggt

SEQ ID NO: 294161 - DNA, 20 bp, Artificial Sequence
  Description of Artificial Sequence: Synthetic oligonucleotide
  Target: LAMA2; (-) strand; PAM type: YTN; PAM sequence: CTT
actctgccttttactagtgg

SEQ ID NO: 294162 - DNA, 20 bp, Artificial Sequence
  Description of Artificial Sequence: Synthetic oligonucleotide
  Target: LAMA2; (-) strand; PAM type: YTN; PAM sequence: TTC
ttactctgccttttactagt

SEQ ID NO: 294163 - DNA, 20 bp, Artificial Sequence
  Description of Artificial Sequence: Synthetic oligonucleotide
  Target: LAMA2; (-) strand; PAM type: YTN; PAM sequence: CTA
gaataaaattcttactctgc

SEQ ID NO: 294164 - DNA, 20 bp, Artificial Sequence
  Description of Artificial Sequence: Synthetic oligonucleotide
  Target: LAMA2; (-) strand; PAM type: YTN; PAM sequence: CTC
gctagaataaaattcttact

SEQ ID NO: 294165 - DNA, 20 bp, Artificial Sequence
  Description of Artificial Sequence: Synthetic oligonucleotide
  Target: LAMA2; (-) strand; PAM type: YTN; PAM sequence: CTG
actcgctagaataaaattct

SEQ ID NO: 294166 - DNA, 20 bp, Artificial Sequence
  Description of Artificial Sequence: Synthetic oligonucleotide
  Target: LAMA2; (-) strand; PAM type: YTN; PAM sequence: TTG
gagtctgactcgctagaata

SEQ ID NO: 294167 - DNA, 20 bp, Artificial Sequence
  Description of Artificial Sequence: Synthetic oligonucleotide
  Target: LAMA2; (-) strand; PAM type: YTN; PAM sequence: TTT
ggagtctgactcgctagaat

SEQ ID NO: 294168 - DNA, 20 bp, Artificial Sequence
  Description of Artificial Sequence: Synthetic oligonucleotide
  Target: LAMA2; (-) strand; PAM type: YTN; PAM sequence: CTT
tggagtctgactcgctagaa

SEQ ID NO: 294169 - DNA, 20 bp, Artificial Sequence
  Description of Artificial Sequence: Synthetic oligonucleotide
  Target: LAMA2; (-) strand; PAM type: YTN; PAM sequence: TTC
cagagataaggagtcagact

SEQ ID NO: 294170 - DNA, 20 bp, Artificial Sequence
  Description of Artificial Sequence: Synthetic oligonucleotide
  Target: LAMA2; (-) strand; PAM type: YTN; PAM sequence: TTG
gaaaggcagagtgttccaga

SEQ ID NO: 294171 - DNA, 20 bp, Artificial Sequence
  Description of Artificial Sequence: Synthetic oligonucleotide
  Target: LAMA2; (-) strand; PAM type: YTN; PAM sequence: TTA
aaagtagaataaattggaaa

SEQ ID NO: 294172 - DNA, 20 bp, Artificial Sequence
  Description of Artificial Sequence: Synthetic oligonucleotide
  Target: LAMA2; (-) strand; PAM type: YTN; PAM sequence: CTA
ttaaaagtagaataaattgg

SEQ ID NO: 294173 - DNA, 20 bp, Artificial Sequence
  Description of Artificial Sequence: Synthetic oligonucleotide
  Target: LAMA2; (-) strand; PAM type: YTN; PAM sequence: CTA
ccatggtctattaaaagtag

SEQ ID NO: 294174 - DNA, 20 bp, Artificial Sequence
  Description of Artificial Sequence: Synthetic oligonucleotide
  Target: LAMA2; (-) strand; PAM type: YTN; PAM sequence: CTC
aatagcctaccatggtctat

SEQ ID NO: 294175 - DNA, 20 bp, Artificial Sequence
  Description of Artificial Sequence: Synthetic oligonucleotide
  Target: LAMA2; (-) strand; PAM type: YTN; PAM sequence: CTC
tcaatagcctaccatggtct

SEQ ID NO: 294176 - DNA, 20 bp, Artificial Sequence
  Description of Artificial Sequence: Synthetic oligonucleotide
  Target: LAMA2; (-) strand; PAM type: YTN; PAM sequence: CTG
gaaacactctcaatagccta

SEQ ID NO: 294177 - DNA, 20 bp, Artificial Sequence
  Description of Artificial Sequence: Synthetic oligonucleotide
  Target: LAMA2; (-) strand; PAM type: YTN; PAM sequence: CTA
atagtgaaaaactggaaaca

SEQ ID NO: 294178 - DNA, 20 bp, Artificial Sequence
  Description of Artificial Sequence: Synthetic oligonucleotide
  Target: LAMA2; (-) strand; PAM type: YTN; PAM sequence: TTC
taatagtgaaaaactggaaa

SEQ ID NO: 294179 - DNA, 20 bp, Artificial Sequence
  Description of Artificial Sequence: Synthetic oligonucleotide
  Target: LAMA2; (-) strand; PAM type: YTN; PAM sequence: TTT
ctaatagtgaaaaactggaa

SEQ ID NO: 294180 - DNA, 20 bp, Artificial Sequence
  Description of Artificial Sequence: Synthetic oligonucleotide
  Target: LAMA2; (-) strand; PAM type: YTN; PAM sequence: CTC
atcagagtatagtttctaat

SEQ ID NO: 294181 - DNA, 20 bp, Artificial Sequence
  Description of Artificial Sequence: Synthetic oligonucleotide
  Target: LAMA2; (-) strand; PAM type: YTN; PAM sequence: TTG
atgcatagaggagctcatca

SEQ ID NO: 294182 - DNA, 20 bp, Artificial Sequence
  Description of Artificial Sequence: Synthetic oligonucleotide
  Target: LAMA2; (-) strand; PAM type: YTN; PAM sequence: CTT
gatgcatagaggagctcatc

SEQ ID NO: 294183 - DNA, 20 bp, Artificial Sequence
  Description of Artificial Sequence: Synthetic oligonucleotide
  Target: LAMA2; (-) strand; PAM type: YTN; PAM sequence: CTG
gaaataatgaaaaagcttga

SEQ ID NO: 294184 - DNA, 20 bp, Artificial Sequence
  Description of Artificial Sequence: Synthetic oligonucleotide
  Target: LAMA2; (-) strand; PAM type: YTN; PAM sequence: TTA
agaataactggaaataatga

SEQ ID NO: 294185 - DNA, 20 bp, Artificial Sequence
  Description of Artificial Sequence: Synthetic oligonucleotide
  Target: LAMA2; (-) strand; PAM type: YTN; PAM sequence: TTT
aagaataactggaaataatg

SEQ ID NO: 294186 - DNA, 20 bp, Artificial Sequence
  Description of Artificial Sequence: Synthetic oligonucleotide
  Target: LAMA2; (-) strand; PAM type: YTN; PAM sequence: TTT
taagaataactggaaataat

SEQ ID NO: 294187 - DNA, 20 bp, Artificial Sequence
  Description of Artificial Sequence: Synthetic oligonucleotide
  Target: LAMA2; (-) strand; PAM type: YTN; PAM sequence: CTA
ttttaagaataactggaaat

SEQ ID NO: 294188 - DNA, 20 bp, Artificial Sequence
  Description of Artificial Sequence: Synthetic oligonucleotide
  Target: LAMA2; (-) strand; PAM type: YTN; PAM sequence: TTA
tctattttaagaataactgg

SEQ ID NO: 294189 - DNA, 20 bp, Artificial Sequence
  Description of Artificial Sequence: Synthetic oligonucleotide
  Target: LAMA2; (-) strand; PAM type: YTN; PAM sequence: CTT
atctattttaagaataactg

SEQ ID NO: 294190 - DNA, 20 bp, Artificial Sequence
  Description of Artificial Sequence: Synthetic oligonucleotide
  Target: LAMA2; (-) strand; PAM type: YTN; PAM sequence: CTA
cttatctattttaagaataa

SEQ ID NO: 294191 - DNA, 20 bp, Artificial Sequence
  Description of Artificial Sequence: Synthetic oligonucleotide
  Target: LAMA2; (-) strand; PAM type: YTN; PAM sequence: CTA
actacttatctattttaaga

SEQ ID NO: 294192 - DNA, 20 bp, Artificial Sequence
  Description of Artificial Sequence: Synthetic oligonucleotide
  Target: LAMA2; (-) strand; PAM type: YTN; PAM sequence: TTC
ctaactacttatctatttta

SEQ ID NO: 294193 - DNA, 20 bp, Artificial Sequence
  Description of Artificial Sequence: Synthetic oligonucleotide
  Target: LAMA2; (-) strand; PAM type: YTN; PAM sequence: TTT
cctaactacttatctatttt

SEQ ID NO: 294194 - DNA, 20 bp, Artificial Sequence
  Description of Artificial Sequence: Synthetic oligonucleotide
  Target: LAMA2; (-) strand; PAM type: YTN; PAM sequence: TTA
taatttcctaactacttatc

SEQ ID NO: 294195 - DNA, 20 bp, Artificial Sequence
  Description of Artificial Sequence: Synthetic oligonucleotide
  Target: LAMA2; (-) strand; PAM type: YTN; PAM sequence: CTT
ataatttcctaactacttat

SEQ ID NO: 294196 - DNA, 20 bp, Artificial Sequence
  Description of Artificial Sequence: Synthetic oligonucleotide
  Target: LAMA2; (-) strand; PAM type: YTN; PAM sequence: TTG
gccttataatttcctaacta

SEQ ID NO: 294197 - DNA, 20 bp, Artificial Sequence
  Description of Artificial Sequence: Synthetic oligonucleotide
  Target: LAMA2; (-) strand; PAM type: YTN; PAM sequence: TTT
ggccttataatttcctaact

SEQ ID NO: 294198 - DNA, 20 bp, Artificial Sequence
  Description of Artificial Sequence: Synthetic oligonucleotide
  Target: LAMA2; (-) strand; PAM type: YTN; PAM sequence: TTT
tggccttataatttcctaac

SEQ ID NO: 294199 - DNA, 20 bp, Artificial Sequence
  Description of Artificial Sequence: Synthetic oligonucleotide
  Target: LAMA2; (-) strand; PAM type: YTN; PAM sequence: CTT
ttggccttataatttcctaa

SEQ ID NO: 294200 - DNA, 20 bp, Artificial Sequence
  Description of Artificial Sequence: Synthetic oligonucleotide
  Target: LAMA2; (-) strand; PAM type: YTN; PAM sequence: TTC
atcttttggccttataattt

SEQ ID NO: 294201 - DNA, 20 bp, Artificial Sequence
  Description of Artificial Sequence: Synthetic oligonucleotide
  Target: LAMA2; (-) strand; PAM type: YTN; PAM sequence: TTA
gacatattcatcttttggcc

SEQ ID NO: 294202 - DNA, 20 bp, Artificial Sequence
  Description of Artificial Sequence: Synthetic oligonucleotide
  Target: LAMA2; (-) strand; PAM type: YTN; PAM sequence: CTT
agacatattcatcttttggc

SEQ ID NO: 294203 - DNA, 20 bp, Artificial Sequence
  Description of Artificial Sequence: Synthetic oligonucleotide
  Target: LAMA2; (-) strand; PAM type: YTN; PAM sequence: TTG
aaaaccttagacatattcat

SEQ ID NO: 294204 - DNA, 20 bp, Artificial Sequence
  Description of Artificial Sequence: Synthetic oligonucleotide
  Target: LAMA2; (-) strand; PAM type: YTN; PAM sequence: TTC
aggtatgtgtattgaaaacc

SEQ ID NO: 294205 - DNA, 20 bp, Artificial Sequence
  Description of Artificial Sequence: Synthetic oligonucleotide
  Target: LAMA2; (-) strand; PAM type: YTN; PAM sequence: CTG
tggaagaaacaattcaggta

SEQ ID NO: 294206 - DNA, 20 bp, Artificial Sequence
  Description of Artificial Sequence: Synthetic oligonucleotide
  Target: LAMA2; (-) strand; PAM type: YTN; PAM sequence: TTG
gcatagcctgtggaagaaac

SEQ ID NO: 294207 - DNA, 20 bp, Artificial Sequence
  Description of Artificial Sequence: Synthetic oligonucleotide
  Target: LAMA2; (-) strand; PAM type: YTN; PAM sequence: TTG
gtgataagaatgtaaattgg

SEQ ID NO: 294208 - DNA, 20 bp, Artificial Sequence
  Description of Artificial Sequence: Synthetic oligonucleotide
  Target: LAMA2; (-) strand; PAM type: YTN; PAM sequence: TTG
tattggtgataagaatgtaa

SEQ ID NO: 294209 - DNA, 20 bp, Artificial Sequence
  Description of Artificial Sequence: Synthetic oligonucleotide
  Target: LAMA2; (-) strand; PAM type: YTN; PAM sequence: TTG
ttgtattggtgataagaatg

SEQ ID NO: 294210 - DNA, 20 bp, Artificial Sequence
  Description of Artificial Sequence: Synthetic oligonucleotide
  Target: LAMA2; (-) strand; PAM type: YTN; PAM sequence: TTT
gttgtattggtgataagaat

SEQ ID NO: 294211 - DNA, 20 bp, Artificial Sequence
  Description of Artificial Sequence: Synthetic oligonucleotide
  Target: LAMA2; (-) strand; PAM type: YTN; PAM sequence: CTT
tgttgtattggtgataagaa

SEQ ID NO: 294212 - DNA, 20 bp, Artificial Sequence
  Description of Artificial Sequence: Synthetic oligonucleotide
  Target: LAMA2; (-) strand; PAM type: YTN; PAM sequence: CTG
tgaccatctttgttgtattg

SEQ ID NO: 294213 - DNA, 20 bp, Artificial Sequence
  Description of Artificial Sequence: Synthetic oligonucleotide
  Target: LAMA2; (-) strand; PAM type: YTN; PAM sequence: CTG
taaagagtgtagtgactgtg

SEQ ID NO: 294214 - DNA, 20 bp, Artificial Sequence
  Description of Artificial Sequence: Synthetic oligonucleotide
  Target: LAMA2; (-) strand; PAM type: YTN; PAM sequence: CTG
gtatggaatataaccacaac

SEQ ID NO: 294215 - DNA, 20 bp, Artificial Sequence
  Description of Artificial Sequence: Synthetic oligonucleotide
  Target: LAMA2; (-) strand; PAM type: YTN; PAM sequence: TTA
ctggtatggaatataaccac

SEQ ID NO: 294216 - DNA, 20 bp, Artificial Sequence
  Description of Artificial Sequence: Synthetic oligonucleotide
  Target: LAMA2; (-) strand; PAM type: YTN; PAM sequence: TTG
cccacccattactggtatgg

SEQ ID NO: 294217 - DNA, 20 bp, Artificial Sequence
  Description of Artificial Sequence: Synthetic oligonucleotide
  Target: LAMA2; (-) strand; PAM type: YTN; PAM sequence: CTC
aagacaacattgcccaccca

SEQ ID NO: 294218 - DNA, 20 bp, Artificial Sequence
  Description of Artificial Sequence: Synthetic oligonucleotide
  Target: LAMA2; (-) strand; PAM type: YTN; PAM sequence: CTG
cactcaagacaacattgccc

SEQ ID NO: 294219 - DNA, 20 bp, Artificial Sequence
  Description of Artificial Sequence: Synthetic oligonucleotide
  Target: LAMA2; (-) strand; PAM type: YTN; PAM sequence: TTC
aagatctgcactcaagacaa

SEQ ID NO: 294220 - DNA, 20 bp, Artificial Sequence
  Description of Artificial Sequence: Synthetic oligonucleotide
  Target: LAMA2; (-) strand; PAM type: YTN; PAM sequence: TTT
caagatctgcactcaagaca

SEQ ID NO: 294221 - DNA, 20 bp, Artificial Sequence
  Description of Artificial Sequence: Synthetic oligonucleotide
  Target: LAMA2; (-) strand; PAM type: YTN; PAM sequence: TTT
tcaagatctgcactcaagac

SEQ ID NO: 294222 - DNA, 20 bp, Artificial Sequence
  Description of Artificial Sequence: Synthetic oligonucleotide
  Target: LAMA2; (-) strand; PAM type: YTN; PAM sequence: TTC
aagagttttcaagatctgca

SEQ ID NO: 294223 - DNA, 20 bp, Artificial Sequence
  Description of Artificial Sequence: Synthetic oligonucleotide
  Target: LAMA2; (-) strand; PAM type: YTN; PAM sequence: CTA
aggaagagaatgagatattc

SEQ ID NO: 294224 - DNA, 20 bp, Artificial Sequence
  Description of Artificial Sequence: Synthetic oligonucleotide
  Target: LAMA2; (-) strand; PAM type: YTN; PAM sequence: TTC
catcgtggacactaaggaag

SEQ ID NO: 294225 - DNA, 20 bp, Artificial Sequence
  Description of Artificial Sequence: Synthetic oligonucleotide
  Target: LAMA2; (-) strand; PAM type: YTN; PAM sequence: CTC
aaccaattccatcgtggaca

SEQ ID NO: 294226 - DNA, 20 bp, Artificial Sequence
  Description of Artificial Sequence: Synthetic oligonucleotide
  Target: LAMA2; (-) strand; PAM type: YTN; PAM sequence: TTG
ctcaaccaattccatcgtgg

SEQ ID NO: 294227 - DNA, 20 bp, Artificial Sequence
  Description of Artificial Sequence: Synthetic oligonucleotide
  Target: LAMA2; (-) strand; PAM type: YTN; PAM sequence: CTA
gtgcaaggagcacattgctc

SEQ ID NO: 294228 - DNA, 20 bp, Artificial Sequence
  Description of Artificial Sequence: Synthetic oligonucleotide
  Target: LAMA2; (-) strand; PAM type: YTN; PAM sequence: TTC
tagtgcaaggagcacattgc

SEQ ID NO: 294229 - DNA, 20 bp, Artificial Sequence
  Description of Artificial Sequence: Synthetic oligonucleotide
  Target: LAMA2; (-) strand; PAM type: YTN; PAM sequence: TTT
ctagtgcaaggagcacattg

SEQ ID NO: 294230 - DNA, 20 bp, Artificial Sequence
  Description of Artificial Sequence: Synthetic oligonucleotide
  Target: LAMA2; (-) strand; PAM type: YTN; PAM sequence: CTA
tttctagtgcaaggagcaca

SEQ ID NO: 294231 - DNA, 20 bp, Artificial Sequence
  Description of Artificial Sequence: Synthetic oligonucleotide
  Target: LAMA2; (-) strand; PAM type: YTN; PAM sequence: TTG
aataactatttctagtgcaa

SEQ ID NO: 294232 - DNA, 20 bp, Artificial Sequence
  Description of Artificial Sequence: Synthetic oligonucleotide
  Target: LAMA2; (-) strand; PAM type: YTN; PAM sequence: CTC
attgaataactatttctagt

SEQ ID NO: 294233 - DNA, 20 bp, Artificial Sequence
  Description of Artificial Sequence: Synthetic oligonucleotide
  Target: LAMA2; (-) strand; PAM type: YTN; PAM sequence: CTC
tcattgaataactatttcta

SEQ ID NO: 294234 - DNA, 20 bp, Artificial Sequence
  Description of Artificial Sequence: Synthetic oligonucleotide
  Target: LAMA2; (-) strand; PAM type: YTN; PAM sequence: CTG
gcctctcattgaataactat

SEQ ID NO: 294235 - DNA, 20 bp, Artificial Sequence
  Description of Artificial Sequence: Synthetic oligonucleotide
  Target: LAMA2; (-) strand; PAM type: YTN; PAM sequence: TTA
tctggcctctcattgaataa

SEQ ID NO: 294236 - DNA, 20 bp, Artificial Sequence
  Description of Artificial Sequence: Synthetic oligonucleotide
  Target: LAMA2; (-) strand; PAM type: YTN; PAM sequence: TTG
aatgatggttatctggcctc

SEQ ID NO: 294237 - DNA, 20 bp, Artificial Sequence
  Description of Artificial Sequence: Synthetic oligonucleotide
  Target: LAMA2; (-) strand; PAM type: YTN; PAM sequence: CTT
gaatgatggttatctggcct

SEQ ID NO: 294238 - DNA, 20 bp, Artificial Sequence
  Description of Artificial Sequence: Synthetic oligonucleotide
  Target: LAMA2; (-) strand; PAM type: YTN; PAM sequence: TTC
ttgaatgatggttatctggc

SEQ ID NO: 294239 - DNA, 20 bp, Artificial Sequence
  Description of Artificial Sequence: Synthetic oligonucleotide
  Target: LAMA2; (-) strand; PAM type: YTN; PAM sequence: TTT
cttgaatgatggttatctgg

SEQ ID NO: 294240 - DNA, 20 bp, Artificial Sequence
  Description of Artificial Sequence: Synthetic oligonucleotide
  Target: LAMA2; (-) strand; PAM type: YTN; PAM sequence: TTT
tcttgaatgatggttatctg

SEQ ID NO: 294241 - DNA, 20 bp, Artificial Sequence
  Description of Artificial Sequence: Synthetic oligonucleotide
  Target: LAMA2; (-) strand; PAM type: YTN; PAM sequence: TTG
gagtaaataaccagttttct

SEQ ID NO: 294242 - DNA, 20 bp, Artificial Sequence
  Description of Artificial Sequence: Synthetic oligonucleotide
  Target: LAMA2; (-) strand; PAM type: YTN; PAM sequence: CTT
ggagtaaataaccagttttc

SEQ ID NO: 294243 - DNA, 20 bp, Artificial Sequence
  Description of Artificial Sequence: Synthetic oligonucleotide
  Target: LAMA2; (-) strand; PAM type: YTN; PAM sequence: TTA
caaaggatgaaaggatgctt

SEQ ID NO: 294244 - DNA, 20 bp, Artificial Sequence
  Description of Artificial Sequence: Synthetic oligonucleotide
  Target: LAMA2; (-) strand; PAM type: YTN; PAM sequence: TTT
acaaaggatgaaaggatgct

SEQ ID NO: 294245 - DNA, 20 bp, Artificial Sequence
  Description of Artificial Sequence: Synthetic oligonucleotide
  Target: LAMA2; (-) strand; PAM type: YTN; PAM sequence: TTT
tacaaaggatgaaaggatgc

SEQ ID NO: 294246 - DNA, 20 bp, Artificial Sequence
  Description of Artificial Sequence: Synthetic oligonucleotide
  Target: LAMA2; (-) strand; PAM type: YTN; PAM sequence: CTA
ttttacaaaggatgaaagga

SEQ ID NO: 294247 - DNA, 20 bp, Artificial Sequence
  Description of Artificial Sequence: Synthetic oligonucleotide
  Target: LAMA2; (-) strand; PAM type: YTN; PAM sequence: CTC
tattttacaaaggatgaaag

SEQ ID NO: 294248 - DNA, 20 bp, Artificial Sequence
  Description of Artificial Sequence: Synthetic oligonucleotide
  Target: LAMA2; (-) strand; PAM type: YTN; PAM sequence: TTG
taggcaagatagatgaaata

SEQ ID NO: 294249 - DNA, 20 bp, Artificial Sequence
  Description of Artificial Sequence: Synthetic oligonucleotide
  Target: LAMA2; (-) strand; PAM type: YTN; PAM sequence: CTA
tgttgtaggcaagatagatg

SEQ ID NO: 294250 - DNA, 20 bp, Artificial Sequence
  Description of Artificial Sequence: Synthetic oligonucleotide
  Target: LAMA2; (-) strand; PAM type: YTN; PAM sequence: CTC
tatgttgtaggcaagataga

SEQ ID NO: 294251 - DNA, 20 bp, Artificial Sequence
  Description of Artificial Sequence: Synthetic oligonucleotide
  Target: LAMA2; (-) strand; PAM type: YTN; PAM sequence: TTC
ataactctatgttgtaggca

SEQ ID NO: 294252 - DNA, 20 bp, Artificial Sequence
  Description of Artificial Sequence: Synthetic oligonucleotide
  Target: LAMA2; (-) strand; PAM type: YTN; PAM sequence: TTT
cataactctatgttgtaggc

SEQ ID NO: 294253 - DNA, 20 bp, Artificial Sequence
  Description of Artificial Sequence: Synthetic oligonucleotide
  Target: LAMA2; (-) strand; PAM type: YTN; PAM sequence: TTT
tcataactctatgttgtagg

SEQ ID NO: 294254 - DNA, 20 bp, Artificial Sequence
  Description of Artificial Sequence: Synthetic oligonucleotide
  Target: LAMA2; (-) strand; PAM type: YTN; PAM sequence: TTT
ttcataactctatgttgtag

SEQ ID NO: 294255 - DNA, 20 bp, Artificial Sequence
  Description of Artificial Sequence: Synthetic oligonucleotide
  Target: LAMA2; (-) strand; PAM type: YTN; PAM sequence: TTG
atttttcataactctatgtt

SEQ ID NO: 294256 - DNA, 20 bp, Artificial Sequence
  Description of Artificial Sequence: Synthetic oligonucleotide
  Target: LAMA2; (-) strand; PAM type: YTN; PAM sequence: TTT
gatttttcataactctatgt

SEQ ID NO: 294257 - DNA, 20 bp, Artificial Sequence
  Description of Artificial Sequence: Synthetic oligonucleotide
  Target: LAMA2; (-) strand; PAM type: YTN; PAM sequence: TTA
tcccatttgatttttcataa

SEQ ID NO: 294258 - DNA, 20 bp, Artificial Sequence
  Description of Artificial Sequence: Synthetic oligonucleotide
  Target: LAMA2; (-) strand; PAM type: YTN; PAM sequence: TTC
cgcatacattatcccatttg

SEQ ID NO: 294259 - DNA, 20 bp, Artificial Sequence
  Description of Artificial Sequence: Synthetic oligonucleotide
  Target: LAMA2; (-) strand; PAM type: YTN; PAM sequence: CTT
ccgcatacattatcccattt

SEQ ID NO: 294260 - DNA, 20 bp, Artificial Sequence
  Description of Artificial Sequence: Synthetic oligonucleotide
  Target: LAMA2; (-) strand; PAM type: YTN; PAM sequence: TTC
agataacttccgcatacatt

SEQ ID NO: 294261 - DNA, 20 bp, Artificial Sequence
  Description of Artificial Sequence: Synthetic oligonucleotide
  Target: LAMA2; (-) strand; PAM type: YTN; PAM sequence: TTT
cagataacttccgcatacat

SEQ ID NO: 294262 - DNA, 20 bp, Artificial Sequence
  Description of Artificial Sequence: Synthetic oligonucleotide
  Target: LAMA2; (-) strand; PAM type: YTN; PAM sequence: TTT
tcagataacttccgcataca

SEQ ID NO: 294263 - DNA, 20 bp, Artificial Sequence
  Description of Artificial Sequence: Synthetic oligonucleotide
  Target: LAMA2; (-) strand; PAM type: YTN; PAM sequence: TTC
cagttttcagataacttccg

SEQ ID NO: 294264 - DNA, 20 bp, Artificial Sequence
  Description of Artificial Sequence: Synthetic oligonucleotide
  Target: LAMA2; (-) strand; PAM type: YTN; PAM sequence: TTT
ccagttttcagataacttcc

SEQ ID NO: 294265 - DNA, 20 bp, Artificial Sequence
  Description of Artificial Sequence: Synthetic oligonucleotide
  Target: LAMA2; (-) strand; PAM type: YTN; PAM sequence: TTT
tccagttttcagataacttc

SEQ ID NO: 294266 - DNA, 20 bp, Artificial Sequence
  Description of Artificial Sequence: Synthetic oligonucleotide
  Target: LAMA2; (-) strand; PAM type: YTN; PAM sequence: TTT
ttccagttttcagataactt

SEQ ID NO: 294267 - DNA, 20 bp, Artificial Sequence
  Description of Artificial Sequence: Synthetic oligonucleotide
  Target: LAMA2; (-) strand; PAM type: YTN; PAM sequence: CTT
tttccagttttcagataact

SEQ ID NO: 294268 - DNA, 20 bp, Artificial Sequence
  Description of Artificial Sequence: Synthetic oligonucleotide
  Target: LAMA2; (-) strand; PAM type: YTN; PAM sequence: CTA
tgtgggtatgctttttccag

SEQ ID NO: 294269 - DNA, 20 bp, Artificial Sequence
  Description of Artificial Sequence: Synthetic oligonucleotide
  Target: LAMA2; (-) strand; PAM type: YTN; PAM sequence: CTC
agagtgtctatgtgggtatg

SEQ ID NO: 294270 - DNA, 20 bp, Artificial Sequence
  Description of Artificial Sequence: Synthetic oligonucleotide
  Target: LAMA2; (-) strand; PAM type: YTN; PAM sequence: TTC
ctcagagtgtctatgtgggt

SEQ ID NO: 294271 - DNA, 20 bp, Artificial Sequence
  Description of Artificial Sequence: Synthetic oligonucleotide
  Target: LAMA2; (-) strand; PAM type: YTN; PAM sequence: CTA
aatgcagggattcctcagag

SEQ ID NO: 294272 - DNA, 20 bp, Artificial Sequence
  Description of Artificial Sequence: Synthetic oligonucleotide
  Target: LAMA2; (-) strand; PAM type: YTN; PAM sequence: TTC
actaaatgcagggattcctc

SEQ ID NO: 294273 - DNA, 20 bp, Artificial Sequence
  Description of Artificial Sequence: Synthetic oligonucleotide
  Target: LAMA2; (-) strand; PAM type: YTN; PAM sequence: TTA
ttcactaaatgcagggattc

SEQ ID NO: 294274 - DNA, 20 bp, Artificial Sequence
  Description of Artificial Sequence: Synthetic oligonucleotide
  Target: LAMA2; (-) strand; PAM type: YTN; PAM sequence: CTG
gacacatagtagttattcac

SEQ ID NO: 294275 - DNA, 20 bp, Artificial Sequence
  Description of Artificial Sequence: Synthetic oligonucleotide
  Target: LAMA2; (-) strand; PAM type: YTN; PAM sequence: CTG
gcagagtactggacacatag

SEQ ID NO: 294276 - DNA, 20 bp, Artificial Sequence
  Description of Artificial Sequence: Synthetic oligonucleotide
  Target: LAMA2; (-) strand; PAM type: YTN; PAM sequence: CTG
gcaatataaataaatgtaaa

SEQ ID NO: 294277 - DNA, 20 bp, Artificial Sequence
  Description of Artificial Sequence: Synthetic oligonucleotide
  Target: LAMA2; (-) strand; PAM type: YTN; PAM sequence: TTC
tggcaatataaataaatgta

SEQ ID NO: 294278 - DNA, 20 bp, Artificial Sequence
  Description of Artificial Sequence: Synthetic oligonucleotide
  Target: LAMA2; (-) strand; PAM type: YTN; PAM sequence: CTT
ctggcaatataaataaatgt

SEQ ID NO: 294279 - DNA, 20 bp, Artificial Sequence
  Description of Artificial Sequence: Synthetic oligonucleotide
  Target: LAMA2; (-) strand; PAM type: YTN; PAM sequence: TTG
tgaaatataatacttctggc

SEQ ID NO: 294280 - DNA, 20 bp, Artificial Sequence
  Description of Artificial Sequence: Synthetic oligonucleotide
  Target: LAMA2; (-) strand; PAM type: YTN; PAM sequence: TTT
gtgaaatataatacttctgg

SEQ ID NO: 294281 - DNA, 20 bp, Artificial Sequence
  Description of Artificial Sequence: Synthetic oligonucleotide
  Target: LAMA2; (-) strand; PAM type: YTN; PAM sequence: CTT
tgtgaaatataatacttctg

SEQ ID NO: 294282 - DNA, 20 bp, Artificial Sequence
  Description of Artificial Sequence: Synthetic oligonucleotide
  Target: LAMA2; (-) strand; PAM type: YTN; PAM sequence: TTC
ctttgtgaaatataatactt

SEQ ID NO: 294283 - DNA, 20 bp, Artificial Sequence
  Description of Artificial Sequence: Synthetic oligonucleotide
  Target: LAMA2; (-) strand; PAM type: YTN; PAM sequence: TTT
cctttgtgaaatataatact

SEQ ID NO: 294284 - DNA, 20 bp, Artificial Sequence
  Description of Artificial Sequence: Synthetic oligonucleotide
  Target: LAMA2; (-) strand; PAM type: YTN; PAM sequence: TTT
tcctttgtgaaatataatac

SEQ ID NO: 294285 - DNA, 20 bp, Artificial Sequence
  Description of Artificial Sequence: Synthetic oligonucleotide
  Target: LAMA2; (-) strand; PAM type: YTN; PAM sequence: TTA
ggtattttcctttgtgaaat

SEQ ID NO: 294286 - DNA, 20 bp, Artificial Sequence
  Description of Artificial Sequence: Synthetic oligonucleotide
  Target: LAMA2; (-) strand; PAM type: YTN; PAM sequence: CTT
aggtattttcctttgtgaaa

SEQ ID NO: 294287 - DNA, 20 bp, Artificial Sequence
  Description of Artificial Sequence: Synthetic oligonucleotide
  Target: LAMA2; (-) strand; PAM type: YTN; PAM sequence: CTG
tgtgatcttaggtattttcc

SEQ ID NO: 294288 - DNA, 20 bp, Artificial Sequence
  Description of Artificial Sequence: Synthetic oligonucleotide
  Target: LAMA2; (-) strand; PAM type: YTN; PAM sequence: CTA
gctgtgtgatcttaggtatt

SEQ ID NO: 294289 - DNA, 20 bp, Artificial Sequence
  Description of Artificial Sequence: Synthetic oligonucleotide
  Target: LAMA2; (-) strand; PAM type: YTN; PAM sequence: TTG
ctagctgtgtgatcttaggt

SEQ ID NO: 294290 - DNA, 20 bp, Artificial Sequence
  Description of Artificial Sequence: Synthetic oligonucleotide
  Target: LAMA2; (-) strand; PAM type: YTN; PAM sequence: CTT
gctagctgtgtgatcttagg

SEQ ID NO: 294291 - DNA, 20 bp, Artificial Sequence
  Description of Artificial Sequence: Synthetic oligonucleotide
  Target: LAMA2; (-) strand; PAM type: YTN; PAM sequence: TTC
cacttgctagctgtgtgatc

SEQ ID NO: 294292 - DNA, 20 bp, Artificial Sequence
  Description of Artificial Sequence: Synthetic oligonucleotide
  Target: LAMA2; (-) strand; PAM type: YTN; PAM sequence: TTT
ccacttgctagctgtgtgat

SEQ ID NO: 294293 - DNA, 20 bp, Artificial Sequence
  Description of Artificial Sequence: Synthetic oligonucleotide
  Target: LAMA2; (-) strand; PAM type: YTN; PAM sequence: CTT
tccacttgctagctgtgtga

SEQ ID NO: 294294 - DNA, 20 bp, Artificial Sequence
  Description of Artificial Sequence: Synthetic oligonucleotide
  Target: LAMA2; (-) strand; PAM type: YTN; PAM sequence: CTG
acagctttccacttgctagc

SEQ ID NO: 294295 - DNA, 20 bp, Artificial Sequence
  Description of Artificial Sequence: Synthetic oligonucleotide
  Target: LAMA2; (-) strand; PAM type: YTN; PAM sequence: CTA
accccccatgactgacagct

SEQ ID NO: 294296 - DNA, 20 bp, Artificial Sequence
  Description of Artificial Sequence: Synthetic oligonucleotide
  Target: LAMA2; (-) strand; PAM type: YTN; PAM sequence: CTG
gaactaaccccccatgactg

SEQ ID NO: 294297 - DNA, 20 bp, Artificial Sequence
  Description of Artificial Sequence: Synthetic oligonucleotide
  Target: LAMA2; (-) strand; PAM type: YTN; PAM sequence: CTC
ctggaactaaccccccatga

SEQ ID NO: 294298 - DNA, 20 bp, Artificial Sequence
  Description of Artificial Sequence: Synthetic oligonucleotide
  Target: LAMA2; (-) strand; PAM type: YTN; PAM sequence: TTA
ggatgaaatcaactcctgga

SEQ ID NO: 294299 - DNA, 20 bp, Artificial Sequence
  Description of Artificial Sequence: Synthetic oligonucleotide
  Target: LAMA2; (-) strand; PAM type: YTN; PAM sequence: TTT
aggatgaaatcaactcctgg

SEQ ID NO: 294300 - DNA, 20 bp, Artificial Sequence
  Description of Artificial Sequence: Synthetic oligonucleotide
  Target: LAMA2; (-) strand; PAM type: YTN; PAM sequence: CTT
taggatgaaatcaactcctg

SEQ ID NO: 294301 - DNA, 20 bp, Artificial Sequence
  Description of Artificial Sequence: Synthetic oligonucleotide
  Target: LAMA2; (-) strand; PAM type: YTN; PAM sequence: CTC
aggaatgctttaggatgaaa

SEQ ID NO: 294302 - DNA, 20 bp, Artificial Sequence
  Description of Artificial Sequence: Synthetic oligonucleotide
  Target: LAMA2; (-) strand; PAM type: YTN; PAM sequence: CTG
aaatccatgtggcagatctc

SEQ ID NO: 294303 - DNA, 20 bp, Artificial Sequence
  Description of Artificial Sequence: Synthetic oligonucleotide
  Target: LAMA2; (-) strand; PAM type: YTN; PAM sequence: TTC
tgaaatccatgtggcagatc

SEQ ID NO: 294304 - DNA, 20 bp, Artificial Sequence
  Description of Artificial Sequence: Synthetic oligonucleotide
  Target: LAMA2; (-) strand; PAM type: YTN; PAM sequence: CTG
aggaaacattctgaaatcca

SEQ ID NO: 294305 - DNA, 20 bp, Artificial Sequence
  Description of Artificial Sequence: Synthetic oligonucleotide
  Target: LAMA2; (-) strand; PAM type: YTN; PAM sequence: TTA
tgaaagagctgaggaaacat

SEQ ID NO: 294306 - DNA, 20 bp, Artificial Sequence
  Description of Artificial Sequence: Synthetic oligonucleotide
  Target: LAMA2; (-) strand; PAM type: YTN; PAM sequence: CTG
aattatgaaagagctgagga

SEQ ID NO: 294307 - DNA, 20 bp, Artificial Sequence
  Description of Artificial Sequence: Synthetic oligonucleotide
  Target: LAMA2; (-) strand; PAM type: YTN; PAM sequence: CTG
tggctgaattatgaaagagc

SEQ ID NO: 294308 - DNA, 20 bp, Artificial Sequence
  Description of Artificial Sequence: Synthetic oligonucleotide
  Target: LAMA2; (-) strand; PAM type: YTN; PAM sequence: CTA
acctgtggctgaattatgaa

SEQ ID NO: 294309 - DNA, 20 bp, Artificial Sequence
  Description of Artificial Sequence: Synthetic oligonucleotide
  Target: LAMA2; (-) strand; PAM type: YTN; PAM sequence: CTA
agcaaagatctaacctgtgg

SEQ ID NO: 294310 - DNA, 20 bp, Artificial Sequence
  Description of Artificial Sequence: Synthetic oligonucleotide
  Target: LAMA2; (-) strand; PAM type: YTN; PAM sequence: TTG
ctaagcaaagatctaacctg

SEQ ID NO: 294311 - DNA, 20 bp, Artificial Sequence
  Description of Artificial Sequence: Synthetic oligonucleotide
  Target: LAMA2; (-) strand; PAM type: YTN; PAM sequence: TTT
gctaagcaaagatctaacct

SEQ ID NO: 294312 - DNA, 20 bp, Artificial Sequence
  Description of Artificial Sequence: Synthetic oligonucleotide
  Target: LAMA2; (-) strand; PAM type: YTN; PAM sequence: CTT
tgctaagcaaagatctaacc

SEQ ID NO: 294313 - DNA, 20 bp, Artificial Sequence
  Description of Artificial Sequence: Synthetic oligonucleotide
  Target: LAMA2; (-) strand; PAM type: YTN; PAM sequence: TTA
cctttgctaagcaaagatct

SEQ ID NO: 294314 - DNA, 20 bp, Artificial Sequence
  Description of Artificial Sequence: Synthetic oligonucleotide
  Target: LAMA2; (-) strand; PAM type: YTN; PAM sequence: CTT
acctttgctaagcaaagatc

SEQ ID NO: 294315 - DNA, 20 bp, Artificial Sequence
  Description of Artificial Sequence: Synthetic oligonucleotide
  Target: LAMA2; (-) strand; PAM type: YTN; PAM sequence: TTA
accttacctttgctaagcaa

SEQ ID NO: 294316 - DNA, 20 bp, Artificial Sequence
  Description of Artificial Sequence: Synthetic oligonucleotide
  Target: LAMA2; (-) strand; PAM type: YTN; PAM sequence: TTC
aggtatatgagggtgaagag

SEQ ID NO: 294317 - DNA, 20 bp, Artificial Sequence
  Description of Artificial Sequence: Synthetic oligonucleotide
  Target: LAMA2; (-) strand; PAM type: YTN; PAM sequence: TTT
caggtatatgagggtgaaga

SEQ ID NO: 294318 - DNA, 20 bp, Artificial Sequence
  Description of Artificial Sequence: Synthetic oligonucleotide
  Target: LAMA2; (-) strand; PAM type: YTN; PAM sequence: TTT
tcaggtatatgagggtgaag

SEQ ID NO: 294319 - DNA, 20 bp, Artificial Sequence
  Description of Artificial Sequence: Synthetic oligonucleotide
  Target: LAMA2; (-) strand; PAM type: YTN; PAM sequence: CTG
agaaacacatgattttcagg

SEQ ID NO: 294320 - DNA, 20 bp, Artificial Sequence
  Description of Artificial Sequence: Synthetic oligonucleotide
  Target: LAMA2; (-) strand; PAM type: YTN; PAM sequence: TTA
tgagtctgagaaacacatga

SEQ ID NO: 294321 - DNA, 20 bp, Artificial Sequence
  Description of Artificial Sequence: Synthetic oligonucleotide
  Target: LAMA2; (-) strand; PAM type: YTN; PAM sequence: TTT
atgagtctgagaaacacatg

SEQ ID NO: 294322 - DNA, 20 bp, Artificial Sequence
  Description of Artificial Sequence: Synthetic oligonucleotide
  Target: LAMA2; (-) strand; PAM type: YTN; PAM sequence: CTG
aaaacatgtttatgagtctg

SEQ ID NO: 294323 - DNA, 20 bp, Artificial Sequence
  Description of Artificial Sequence: Synthetic oligonucleotide
  Target: LAMA2; (-) strand; PAM type: YTN; PAM sequence: TTC
aactgaaaacatgtttatga

SEQ ID NO: 294324 - DNA, 20 bp, Artificial Sequence
  Description of Artificial Sequence: Synthetic oligonucleotide
  Target: LAMA2; (-) strand; PAM type: YTN; PAM sequence: CTT
caactgaaaacatgtttatg

SEQ ID NO: 294325 - DNA, 20 bp, Artificial Sequence
  Description of Artificial Sequence: Synthetic oligonucleotide
  Target: LAMA2; (-) strand; PAM type: YTN; PAM sequence: TTC
ttcaactgaaaacatgttta

SEQ ID NO: 294326 - DNA, 20 bp, Artificial Sequence
  Description of Artificial Sequence: Synthetic oligonucleotide
  Target: LAMA2; (-) strand; PAM type: YTN; PAM sequence: CTA
attcttcaactgaaaacatg

SEQ ID NO: 294327 - DNA, 20 bp, Artificial Sequence
  Description of Artificial Sequence: Synthetic oligonucleotide
  Target: LAMA2; (-) strand; PAM type: YTN; PAM sequence: TTC
taattcttcaactgaaaaca

SEQ ID NO: 294328 - DNA, 20 bp, Artificial Sequence
  Description of Artificial Sequence: Synthetic oligonucleotide
  Target: LAMA2; (-) strand; PAM type: YTN; PAM sequence: TTT
ctaattcttcaactgaaaac

SEQ ID NO: 294329 - DNA, 20 bp, Artificial Sequence
  Description of Artificial Sequence: Synthetic oligonucleotide
  Target: LAMA2; (-) strand; PAM type: YTN; PAM sequence: TTT
tctaattcttcaactgaaaa

SEQ ID NO: 294330 - DNA, 20 bp, Artificial Sequence
  Description of Artificial Sequence: Synthetic oligonucleotide
  Target: LAMA2; (-) strand; PAM type: YTN; PAM sequence: CTC
atgatgttttctaattcttc

SEQ ID NO: 294331 - DNA, 20 bp, Artificial Sequence
  Description of Artificial Sequence: Synthetic oligonucleotide
  Target: LAMA2; (-) strand; PAM type: YTN; PAM sequence: TTC
aactcatgatgttttctaat

SEQ ID NO: 294332 - DNA, 20 bp, Artificial Sequence
  Description of Artificial Sequence: Synthetic oligonucleotide
  Target: LAMA2; (-) strand; PAM type: YTN; PAM sequence: TTA
ttcaactcatgatgttttct

SEQ ID NO: 294333 - DNA, 20 bp, Artificial Sequence
  Description of Artificial Sequence: Synthetic oligonucleotide
  Target: LAMA2; (-) strand; PAM type: YTN; PAM sequence: TTT
attcaactcatgatgttttc

SEQ ID NO: 294334 - DNA, 20 bp, Artificial Sequence
  Description of Artificial Sequence: Synthetic oligonucleotide
  Target: LAMA2; (-) strand; PAM type: YTN; PAM sequence: TTA
ggatccaaggtcaaaaaagt

SEQ ID NO: 294335 - DNA, 20 bp, Artificial Sequence
  Description of Artificial Sequence: Synthetic oligonucleotide
  Target: LAMA2; (-) strand; PAM type: YTN; PAM sequence: TTA
taagtggacattaggatcca

SEQ ID NO: 294336 - DNA, 20 bp, Artificial Sequence
  Description of Artificial Sequence: Synthetic oligonucleotide
  Target: LAMA2; (-) strand; PAM type: YTN; PAM sequence: TTT
ataagtggacattaggatcc

SEQ ID NO: 294337 - DNA, 20 bp, Artificial Sequence
  Description of Artificial Sequence: Synthetic oligonucleotide
  Target: LAMA2; (-) strand; PAM type: YTN; PAM sequence: TTT
tataagtggacattaggatc

SEQ ID NO: 294338 - DNA, 20 bp, Artificial Sequence
  Description of Artificial Sequence: Synthetic oligonucleotide
  Target: LAMA2; (-) strand; PAM type: YTN; PAM sequence: TTT
ttataagtggacattaggat

SEQ ID NO: 294339 - DNA, 20 bp, Artificial Sequence
  Description of Artificial Sequence: Synthetic oligonucleotide
  Target: LAMA2; (-) strand; PAM type: YTN; PAM sequence: CTA
gaaacatttttataagtgga

SEQ ID NO: 294340 - DNA, 20 bp, Artificial Sequence
  Description of Artificial Sequence: Synthetic oligonucleotide
  Target: LAMA2; (-) strand; PAM type: YTN; PAM sequence: CTC
ctagaaacatttttataagt

SEQ ID NO: 294341 - DNA, 20 bp, Artificial Sequence
  Description of Artificial Sequence: Synthetic oligonucleotide
  Target: LAMA2; (-) strand; PAM type: YTN; PAM sequence: TTC
tcctagaaacatttttataa

SEQ ID NO: 294342 - DNA, 20 bp, Artificial Sequence
  Description of Artificial Sequence: Synthetic oligonucleotide
  Target: LAMA2; (-) strand; PAM type: YTN; PAM sequence: TTT
ctcctagaaacatttttata

SEQ ID NO: 294343 - DNA, 20 bp, Artificial Sequence
  Description of Artificial Sequence: Synthetic oligonucleotide
  Target: LAMA2; (-) strand; PAM type: YTN; PAM sequence: TTT
tctcctagaaacatttttat

SEQ ID NO: 294344 - DNA, 20 bp, Artificial Sequence
  Description of Artificial Sequence: Synthetic oligonucleotide
  Target: LAMA2; (-) strand; PAM type: YTN; PAM sequence: CTG
ttttctcctagaaacatttt

SEQ ID NO: 294345 - DNA, 20 bp, Artificial Sequence
  Description of Artificial Sequence: Synthetic oligonucleotide
  Target: LAMA2; (-) strand; PAM type: YTN; PAM sequence: TTA
ggctgttttctcctagaaac

SEQ ID NO: 294346 - DNA, 20 bp, Artificial Sequence
  Description of Artificial Sequence: Synthetic oligonucleotide
  Target: LAMA2; (-) strand; PAM type: YTN; PAM sequence: TTA
gaaattaggctgttttctcc

SEQ ID NO: 294347 - DNA, 20 bp, Artificial Sequence
  Description of Artificial Sequence: Synthetic oligonucleotide
  Target: LAMA2; (-) strand; PAM type: YTN; PAM sequence: TTT
agaaattaggctgttttctc

SEQ ID NO: 294348 - DNA, 20 bp, Artificial Sequence
  Description of Artificial Sequence: Synthetic oligonucleotide
  Target: LAMA2; (-) strand; PAM type: YTN; PAM sequence: TTA
gtcatttagaaattaggctg

SEQ ID NO: 294349 - DNA, 20 bp, Artificial Sequence
  Description of Artificial Sequence: Synthetic oligonucleotide
  Target: LAMA2; (-) strand; PAM type: YTN; PAM sequence: TTA
agttagtcatttagaaatta

SEQ ID NO: 294350 - DNA, 20 bp, Artificial Sequence
  Description of Artificial Sequence: Synthetic oligonucleotide
  Target: LAMA2; (-) strand; PAM type: YTN; PAM sequence: TTT
aagttagtcatttagaaatt

SEQ ID NO: 294351 - DNA, 20 bp, Artificial Sequence
  Description of Artificial Sequence: Synthetic oligonucleotide
  Target: LAMA2; (-) strand; PAM type: YTN; PAM sequence: TTT
taagttagtcatttagaaat

SEQ ID NO: 294352 - DNA, 20 bp, Artificial Sequence
  Description of Artificial Sequence: Synthetic oligonucleotide
  Target: LAMA2; (-) strand; PAM type: YTN; PAM sequence: TTA
taattttaagttagtcattt

SEQ ID NO: 294353 - DNA, 20 bp, Artificial Sequence
  Description of Artificial Sequence: Synthetic oligonucleotide
  Target: LAMA2; (-) strand; PAM type: YTN; PAM sequence: TTT
ataattttaagttagtcatt

SEQ ID NO: 294354 - DNA, 20 bp, Artificial Sequence
  Description of Artificial Sequence: Synthetic oligonucleotide
  Target: LAMA2; (-) strand; PAM type: YTN; PAM sequence: TTA
gtttataattttaagttagt

SEQ ID NO: 294355 - DNA, 20 bp, Artificial Sequence
  Description of Artificial Sequence: Synthetic oligonucleotide
  Target: LAMA2; (-) strand; PAM type: YTN; PAM sequence: TTT
agtttataattttaagttag

SEQ ID NO: 294356 - DNA, 20 bp, Artificial Sequence
  Description of Artificial Sequence: Synthetic oligonucleotide
  Target: LAMA2; (-) strand; PAM type: YTN; PAM sequence: TTT
tagtttataattttaagtta

SEQ ID NO: 294357 - DNA, 20 bp, Artificial Sequence
  Description of Artificial Sequence: Synthetic oligonucleotide
  Target: LAMA2; (-) strand; PAM type: YTN; PAM sequence: TTG
ccaattttagtttataattt

SEQ ID NO: 294358 - DNA, 20 bp, Artificial Sequence
  Description of Artificial Sequence: Synthetic oligonucleotide
  Target: LAMA2; (-) strand; PAM type: YTN; PAM sequence: CTT
gccaattttagtttataatt

SEQ ID NO: 294359 - DNA, 20 bp, Artificial Sequence
  Description of Artificial Sequence: Synthetic oligonucleotide
  Target: LAMA2; (-) strand; PAM type: YTN; PAM sequence: CTC
ttgccaattttagtttataa

SEQ ID NO: 294360 - DNA, 20 bp, Artificial Sequence
  Description of Artificial Sequence: Synthetic oligonucleotide
  Target: LAMA2; (-) strand; PAM type: YTN; PAM sequence: TTA
gggctcttgccaattttagt

SEQ ID NO: 294361 - DNA, 20 bp, Artificial Sequence
  Description of Artificial Sequence: Synthetic oligonucleotide
  Target: LAMA2; (-) strand; PAM type: YTN; PAM sequence: TTT
agggctcttgccaattttag

SEQ ID NO: 294362 - DNA, 20 bp, Artificial Sequence
  Description of Artificial Sequence: Synthetic oligonucleotide
  Target: LAMA2; (-) strand; PAM type: YTN; PAM sequence: CTT
tagggctcttgccaatttta

SEQ ID NO: 294363 - DNA, 20 bp, Artificial Sequence
  Description of Artificial Sequence: Synthetic oligonucleotide
  Target: LAMA2; (-) strand; PAM type: YTN; PAM sequence: TTG
gaccagatgatctttagggc

SEQ ID NO: 294364 - DNA, 20 bp, Artificial Sequence
  Description of Artificial Sequence: Synthetic oligonucleotide
  Target: LAMA2; (-) strand; PAM type: YTN; PAM sequence: TTA
agatggtgattggaccagat

SEQ ID NO: 294365 - DNA, 20 bp, Artificial Sequence
  Description of Artificial Sequence: Synthetic oligonucleotide
  Target: LAMA2; (-) strand; PAM type: YTN; PAM sequence: CTG
taagtatcatgtaaaaggaa

SEQ ID NO: 294366 - DNA, 20 bp, Artificial Sequence
  Description of Artificial Sequence: Synthetic oligonucleotide
  Target: LAMA2; (-) strand; PAM type: YTN; PAM sequence: TTC
aagcaaaggctgtaagtatc

SEQ ID NO: 294367 - DNA, 20 bp, Artificial Sequence
  Description of Artificial Sequence: Synthetic oligonucleotide
  Target: LAMA2; (-) strand; PAM type: YTN; PAM sequence: TTG
tcaatgaaatgttcaagcaa

SEQ ID NO: 294368 - DNA, 20 bp, Artificial Sequence
  Description of Artificial Sequence: Synthetic oligonucleotide
  Target: LAMA2; (-) strand; PAM type: YTN; PAM sequence: CTT
gtcaatgaaatgttcaagca

SEQ ID NO: 294369 - DNA, 20 bp, Artificial Sequence
  Description of Artificial Sequence: Synthetic oligonucleotide
  Target: LAMA2; (-) strand; PAM type: YTN; PAM sequence: CTG
gaaaatcttgtcaatgaaat

SEQ ID NO: 294370 - DNA, 20 bp, Artificial Sequence
  Description of Artificial Sequence: Synthetic oligonucleotide
  Target: LAMA2; (-) strand; PAM type: YTN; PAM sequence: TTG
tcataacactggaaaatctt

SEQ ID NO: 294371 - DNA, 20 bp, Artificial Sequence
  Description of Artificial Sequence: Synthetic oligonucleotide
  Target: LAMA2; (-) strand; PAM type: YTN; PAM sequence: CTT
gtcataacactggaaaatct

SEQ ID NO: 294372 - DNA, 20 bp, Artificial Sequence
  Description of Artificial Sequence: Synthetic oligonucleotide
  Target: LAMA2; (-) strand; PAM type: YTN; PAM sequence: CTG
ccttgtcataacactggaaa

SEQ ID NO: 294373 - DNA, 20 bp, Artificial Sequence
  Description of Artificial Sequence: Synthetic oligonucleotide
  Target: LAMA2; (-) strand; PAM type: YTN; PAM sequence: CTC
gagcctgccttgtcataaca

SEQ ID NO: 294374 - DNA, 20 bp, Artificial Sequence
  Description of Artificial Sequence: Synthetic oligonucleotide
  Target: LAMA2; (-) strand; PAM type: YTN; PAM sequence: CTA
acaactcgagcctgccttgt

SEQ ID NO: 294375 - DNA, 20 bp, Artificial Sequence
  Description of Artificial Sequence: Synthetic oligonucleotide
  Target: LAMA2; (-) strand; PAM type: YTN; PAM sequence: TTC
taacaactcgagcctgcctt

SEQ ID NO: 294376 - DNA, 20 bp, Artificial Sequence
  Description of Artificial Sequence: Synthetic oligonucleotide
  Target: LAMA2; (-) strand; PAM type: YTN; PAM sequence: TTT
ctaacaactcgagcctgcct

SEQ ID NO: 294377 - DNA, 20 bp, Artificial Sequence
  Description of Artificial Sequence: Synthetic oligonucleotide
  Target: LAMA2; (-) strand; PAM type: YTN; PAM sequence: CTT
tctaacaactcgagcctgcc

SEQ ID NO: 294378 - DNA, 20 bp, Artificial Sequence
  Description of Artificial Sequence: Synthetic oligonucleotide
  Target: LAMA2; (-) strand; PAM type: YTN; PAM sequence: TTA
atgtaaccgatggctttcta

SEQ ID NO: 294379 - DNA, 20 bp, Artificial Sequence
  Description of Artificial Sequence: Synthetic oligonucleotide
  Target: LAMA2; (-) strand; PAM type: YTN; PAM sequence: CTT
aatgtaaccgatggctttct

SEQ ID NO: 294380 - DNA, 20 bp, Artificial Sequence
  Description of Artificial Sequence: Synthetic oligonucleotide
  Target: LAMA2; (-) strand; PAM type: YTN; PAM sequence: TTA
acttaatgtaaccgatggct

SEQ ID NO: 294381 - DNA, 20 bp, Artificial Sequence
  Description of Artificial Sequence: Synthetic oligonucleotide
  Target: LAMA2; (-) strand; PAM type: YTN; PAM sequence: TTT
aacttaatgtaaccgatggc

SEQ ID NO: 294382 - DNA, 20 bp, Artificial Sequence
  Description of Artificial Sequence: Synthetic oligonucleotide
  Target: LAMA2; (-) strand; PAM type: YTN; PAM sequence: TTT
taacttaatgtaaccgatgg

SEQ ID NO: 294383 - DNA, 20 bp, Artificial Sequence
  Description of Artificial Sequence: Synthetic oligonucleotide
  Target: LAMA2; (-) strand; PAM type: YTN; PAM sequence: CTC
agttttaacttaatgtaacc

SEQ ID NO: 294384 - DNA, 20 bp, Artificial Sequence
  Description of Artificial Sequence: Synthetic oligonucleotide
  Target: LAMA2; (-) strand; PAM type: YTN; PAM sequence: TTA
gggactcagttttaacttaa

SEQ ID NO: 294385 - DNA, 20 bp, Artificial Sequence
  Description of Artificial Sequence: Synthetic oligonucleotide
  Target: LAMA2; (-) strand; PAM type: YTN; PAM sequence: TTT
agggactcagttttaactta

SEQ ID NO: 294386 - DNA, 20 bp, Artificial Sequence
  Description of Artificial Sequence: Synthetic oligonucleotide
  Target: LAMA2; (-) strand; PAM type: YTN; PAM sequence: TTT
tagggactcagttttaactt

SEQ ID NO: 294387 - DNA, 20 bp, Artificial Sequence
  Description of Artificial Sequence: Synthetic oligonucleotide
  Target: LAMA2; (-) strand; PAM type: YTN; PAM sequence: TTA
catagaagttttagggactc

SEQ ID NO: 294388 - DNA, 20 bp, Artificial Sequence
  Description of Artificial Sequence: Synthetic oligonucleotide
  Target: LAMA2; (-) strand; PAM type: YTN; PAM sequence: CTA
tagaaatacaatcattacat

SEQ ID NO: 294389 - DNA, 20 bp, Artificial Sequence
  Description of Artificial Sequence: Synthetic oligonucleotide
  Target: LAMA2; (-) strand; PAM type: YTN; PAM sequence: TTG
cctatagaaatacaatcatt

SEQ ID NO: 294390 - DNA, 20 bp, Artificial Sequence
  Description of Artificial Sequence: Synthetic oligonucleotide
  Target: LAMA2; (-) strand; PAM type: YTN; PAM sequence: TTT
gcctatagaaatacaatcat

SEQ ID NO: 294391 - DNA, 20 bp, Artificial Sequence
  Description of Artificial Sequence: Synthetic oligonucleotide
  Target: LAMA2; (-) strand; PAM type: YTN; PAM sequence: TTA
gacagaggacacataaatgt

SEQ ID NO: 294392 - DNA, 20 bp, Artificial Sequence
  Description of Artificial Sequence: Synthetic oligonucleotide
  Target: LAMA2; (-) strand; PAM type: YTN; PAM sequence: TTG
aagggatgttagacagagga

SEQ ID NO: 294393 - DNA, 20 bp, Artificial Sequence
  Description of Artificial Sequence: Synthetic oligonucleotide
  Target: LAMA2; (-) strand; PAM type: YTN; PAM sequence: TTA
ttgaagggatgttagacaga

SEQ ID NO: 294394 - DNA, 20 bp, Artificial Sequence
  Description of Artificial Sequence: Synthetic oligonucleotide
  Target: LAMA2; (-) strand; PAM type: YTN; PAM sequence: TTC
aaattattgaagggatgtta

SEQ ID NO: 294395 - DNA, 20 bp, Artificial Sequence
  Description of Artificial Sequence: Synthetic oligonucleotide
  Target: LAMA2; (-) strand; PAM type: YTN; PAM sequence: TTT
caaattattgaagggatgtt

SEQ ID NO: 294396 - DNA, 20 bp, Artificial Sequence
  Description of Artificial Sequence: Synthetic oligonucleotide
  Target: LAMA2; (-) strand; PAM type: YTN; PAM sequence: TTT
tcaaattattgaagggatgt

SEQ ID NO: 294397 - DNA, 20 bp, Artificial Sequence
  Description of Artificial Sequence: Synthetic oligonucleotide
  Target: LAMA2; (-) strand; PAM type: YTN; PAM sequence: CTA
ttttcaaattattgaaggga

SEQ ID NO: 294398 - DNA, 20 bp, Artificial Sequence
  Description of Artificial Sequence: Synthetic oligonucleotide
  Target: LAMA2; (-) strand; PAM type: YTN; PAM sequence: TTA
gctattttcaaattattgaa

SEQ ID NO: 294399 - DNA, 20 bp, Artificial Sequence
  Description of Artificial Sequence: Synthetic oligonucleotide
  Target: LAMA2; (-) strand; PAM type: YTN; PAM sequence: CTT
agctattttcaaattattga

SEQ ID NO: 294400 - DNA, 20 bp, Artificial Sequence
  Description of Artificial Sequence: Synthetic oligonucleotide
  Target: LAMA2; (-) strand; PAM type: YTN; PAM sequence: CTA
gggaaggagaagacttagct

SEQ ID NO: 294401 - DNA, 20 bp, Artificial Sequence
  Description of Artificial Sequence: Synthetic oligonucleotide
  Target: LAMA2; (-) strand; PAM type: YTN; PAM sequence: TTA
gcctagggaaggagaagact

SEQ ID NO: 294402 - DNA, 20 bp, Artificial Sequence
  Description of Artificial Sequence: Synthetic oligonucleotide
  Target: LAMA2; (-) strand; PAM type: YTN; PAM sequence: CTA
gggaaatggttagcctaggg

SEQ ID NO: 294403 - DNA, 20 bp, Artificial Sequence
  Description of Artificial Sequence: Synthetic oligonucleotide
  Target: LAMA2; (-) strand; PAM type: YTN; PAM sequence: CTA
agctagggaaatggttagcc

SEQ ID NO: 294404 - DNA, 20 bp, Artificial Sequence
  Description of Artificial Sequence: Synthetic oligonucleotide
  Target: LAMA2; (-) strand; PAM type: YTN; PAM sequence: TTA
gaaatgagataatacaaaga

SEQ ID NO: 294405 - DNA, 20 bp, Artificial Sequence
  Description of Artificial Sequence: Synthetic oligonucleotide
  Target: LAMA2; (-) strand; PAM type: YTN; PAM sequence: CTG
atcatggaggggatagtaat

SEQ ID NO: 294406 - DNA, 20 bp, Artificial Sequence
  Description of Artificial Sequence: Synthetic oligonucleotide
  Target: LAMA2; (-) strand; PAM type: YTN; PAM sequence: TTA
agaatactgatcatggaggg

SEQ ID NO: 294407 - DNA, 20 bp, Artificial Sequence
  Description of Artificial Sequence: Synthetic oligonucleotide
  Target: LAMA2; (-) strand; PAM type: YTN; PAM sequence: TTT
aagaatactgatcatggagg

SEQ ID NO: 294408 - DNA, 20 bp, Artificial Sequence
  Description of Artificial Sequence: Synthetic oligonucleotide
  Target: LAMA2; (-) strand; PAM type: YTN; PAM sequence: TTC
aaatttaagaatactgatca

SEQ ID NO: 294409 - DNA, 20 bp, Artificial Sequence
  Description of Artificial Sequence: Synthetic oligonucleotide
  Target: LAMA2; (-) strand; PAM type: YTN; PAM sequence: TTT
caaatttaagaatactgatc

SEQ ID NO: 294410 - DNA, 20 bp, Artificial Sequence
  Description of Artificial Sequence: Synthetic oligonucleotide
  Target: LAMA2; (-) strand; PAM type: YTN; PAM sequence: TTA
tgaagggaatatttcaaatt

SEQ ID NO: 294411 - DNA, 20 bp, Artificial Sequence
  Description of Artificial Sequence: Synthetic oligonucleotide
  Target: LAMA2; (-) strand; PAM type: YTN; PAM sequence: TTG
agcagtaggtgccatattat

SEQ ID NO: 294412 - DNA, 20 bp, Artificial Sequence
  Description of Artificial Sequence: Synthetic oligonucleotide
  Target: LAMA2; (-) strand; PAM type: YTN; PAM sequence: TTT
gagcagtaggtgccatatta

SEQ ID NO: 294413 - DNA, 20 bp, Artificial Sequence
  Description of Artificial Sequence: Synthetic oligonucleotide
  Target: LAMA2; (-) strand; PAM type: YTN; PAM sequence: TTT
tgagcagtaggtgccatatt

SEQ ID NO: 294414 - DNA, 20 bp, Artificial Sequence
  Description of Artificial Sequence: Synthetic oligonucleotide
  Target: LAMA2; (-) strand; PAM type: YTN; PAM sequence: CTT
ttgagcagtaggtgccatat

SEQ ID NO: 294415 - DNA, 20 bp, Artificial Sequence
  Description of Artificial Sequence: Synthetic oligonucleotide
  Target: LAMA2; (-) strand; PAM type: YTN; PAM sequence: TTC
cttttgagcagtaggtgcca

SEQ ID NO: 294416 - DNA, 20 bp, Artificial Sequence
  Description of Artificial Sequence: Synthetic oligonucleotide
  Target: LAMA2; (-) strand; PAM type: YTN; PAM sequence: CTT
ccttttgagcagtaggtgcc

SEQ ID NO: 294417 - DNA, 20 bp, Artificial Sequence
  Description of Artificial Sequence: Synthetic oligonucleotide
  Target: LAMA2; (-) strand; PAM type: YTN; PAM sequence: CTG
gtgacttccttttgagcagt

SEQ ID NO: 294418 - DNA, 20 bp, Artificial Sequence
  Description of Artificial Sequence: Synthetic oligonucleotide
  Target: LAMA2; (-) strand; PAM type: YTN; PAM sequence: CTG
agctggtgacttccttttga

SEQ ID NO: 294419 - DNA, 20 bp, Artificial Sequence
  Description of Artificial Sequence: Synthetic oligonucleotide
  Target: LAMA2; (-) strand; PAM type: YTN; PAM sequence: CTG
tcccctgagctggtgacttc

SEQ ID NO: 294420 - DNA, 20 bp, Artificial Sequence
  Description of Artificial Sequence: Synthetic oligonucleotide
  Target: LAMA2; (-) strand; PAM type: YTN; PAM sequence: TTA
agggagggaggggtcacact

SEQ ID NO: 294421 - DNA, 20 bp, Artificial Sequence
  Description of Artificial Sequence: Synthetic oligonucleotide
  Target: LAMA2; (-) strand; PAM type: YTN; PAM sequence: TTA
atagaaatatggtaacaatt

SEQ ID NO: 294422 - DNA, 20 bp, Artificial Sequence
  Description of Artificial Sequence: Synthetic oligonucleotide
  Target: LAMA2; (-) strand; PAM type: YTN; PAM sequence: TTA
ggtgcattaatagaaatatg

SEQ ID NO: 294423 - DNA, 20 bp, Artificial Sequence
  Description of Artificial Sequence: Synthetic oligonucleotide
  Target: LAMA2; (-) strand; PAM type: YTN; PAM sequence: CTT
aggtgcattaatagaaatat

SEQ ID NO: 294424 - DNA, 20 bp, Artificial Sequence
  Description of Artificial Sequence: Synthetic oligonucleotide
  Target: LAMA2; (-) strand; PAM type: YTN; PAM sequence: TTC
ttaggtgcattaatagaaat

SEQ ID NO: 294425 - DNA, 20 bp, Artificial Sequence
  Description of Artificial Sequence: Synthetic oligonucleotide
  Target: LAMA2; (-) strand; PAM type: YTN; PAM sequence: TTA
aaacattcttaggtgcatta

SEQ ID NO: 294426 - DNA, 20 bp, Artificial Sequence
  Description of Artificial Sequence: Synthetic oligonucleotide
  Target: LAMA2; (-) strand; PAM type: YTN; PAM sequence: TTA
aaaacattaaaacattctta

SEQ ID NO: 294427 - DNA, 20 bp, Artificial Sequence
  Description of Artificial Sequence: Synthetic oligonucleotide
  Target: LAMA2; (-) strand; PAM type: YTN; PAM sequence: CTA
ttaaaaacattaaaacattc

SEQ ID NO: 294428 - DNA, 20 bp, Artificial Sequence
  Description of Artificial Sequence: Synthetic oligonucleotide
  Target: LAMA2; (-) strand; PAM type: YTN; PAM sequence: TTA
gtagcatgatatatctatta

SEQ ID NO: 294429 - DNA, 20 bp, Artificial Sequence
  Description of Artificial Sequence: Synthetic oligonucleotide
  Target: LAMA2; (-) strand; PAM type: YTN; PAM sequence: TTG
gaattagtagcatgatatat

SEQ ID NO: 294430 - DNA, 20 bp, Artificial Sequence
  Description of Artificial Sequence: Synthetic oligonucleotide
  Target: LAMA2; (-) strand; PAM type: YTN; PAM sequence: TTT
ggaattagtagcatgatata

SEQ ID NO: 294431 - DNA, 20 bp, Artificial Sequence
  Description of Artificial Sequence: Synthetic oligonucleotide
  Target: LAMA2; (-) strand; PAM type: YTN; PAM sequence: TTG
aatatggtacccgatttgga

SEQ ID NO: 294432 - DNA, 20 bp, Artificial Sequence
  Description of Artificial Sequence: Synthetic oligonucleotide
  Target: LAMA2; (-) strand; PAM type: YTN; PAM sequence: TTG
attgaatatggtacccgatt

SEQ ID NO: 294433 - DNA, 20 bp, Artificial Sequence
  Description of Artificial Sequence: Synthetic oligonucleotide
  Target: LAMA2; (-) strand; PAM type: YTN; PAM sequence: CTT
gattgaatatggtacccgat

SEQ ID NO: 294434 - DNA, 20 bp, Artificial Sequence
  Description of Artificial Sequence: Synthetic oligonucleotide
  Target: LAMA2; (-) strand; PAM type: YTN; PAM sequence: CTG
cttgattgaatatggtaccc

SEQ ID NO: 294435 - DNA, 20 bp, Artificial Sequence
  Description of Artificial Sequence: Synthetic oligonucleotide
  Target: LAMA2; (-) strand; PAM type: YTN; PAM sequence: TTC
tgcttgattgaatatggtac

SEQ ID NO: 294436 - DNA, 20 bp, Artificial Sequence
  Description of Artificial Sequence: Synthetic oligonucleotide
  Target: LAMA2; (-) strand; PAM type: YTN; PAM sequence: CTA
gtggtagagaagaaggtcca

SEQ ID NO: 294437 - DNA, 20 bp, Artificial Sequence
  Description of Artificial Sequence: Synthetic oligonucleotide
  Target: LAMA2; (-) strand; PAM type: YTN; PAM sequence: TTC
tagtggtagagaagaaggtc

SEQ ID NO: 294438 - DNA, 20 bp, Artificial Sequence
  Description of Artificial Sequence: Synthetic oligonucleotide
  Target: LAMA2; (-) strand; PAM type: YTN; PAM sequence: CTG
gaggatgttctagtggtaga

SEQ ID NO: 294439 - DNA, 20 bp, Artificial Sequence
  Description of Artificial Sequence: Synthetic oligonucleotide
  Target: LAMA2; (-) strand; PAM type: YTN; PAM sequence: CTG
cctggaggatgttctagtgg

SEQ ID NO: 294440 - DNA, 20 bp, Artificial Sequence
  Description of Artificial Sequence: Synthetic oligonucleotide
  Target: LAMA2; (-) strand; PAM type: YTN; PAM sequence: CTG
agagacctgcctggaggatg

SEQ ID NO: 294441 - DNA, 20 bp, Artificial Sequence
  Description of Artificial Sequence: Synthetic oligonucleotide
  Target: LAMA2; (-) strand; PAM type: YTN; PAM sequence: CTA
aaaatccaaaccagcacagg

SEQ ID NO: 294442 - DNA, 20 bp, Artificial Sequence
  Description of Artificial Sequence: Synthetic oligonucleotide
  Target: LAMA2; (-) strand; PAM type: YTN; PAM sequence: TTA
tccctaaaaatccaaaccag

SEQ ID NO: 294443 - DNA, 20 bp, Artificial Sequence
  Description of Artificial Sequence: Synthetic oligonucleotide
  Target: LAMA2; (-) strand; PAM type: YTN; PAM sequence: CTG
gcagggttatccctaaaaat

SEQ ID NO: 294444 - DNA, 20 bp, Artificial Sequence
  Description of Artificial Sequence: Synthetic oligonucleotide
  Target: LAMA2; (-) strand; PAM type: YTN; PAM sequence: TTA
gaaaagtaaggtgatccatg

SEQ ID NO: 294445 - DNA, 20 bp, Artificial Sequence
  Description of Artificial Sequence: Synthetic oligonucleotide
  Target: LAMA2; (-) strand; PAM type: YTN; PAM sequence: CTT
agaaaagtaaggtgatccat

SEQ ID NO: 294446 - DNA, 20 bp, Artificial Sequence
  Description of Artificial Sequence: Synthetic oligonucleotide
  Target: LAMA2; (-) strand; PAM type: YTN; PAM sequence: TTG
tgtaagtacttagaaaagta

SEQ ID NO: 294447 - DNA, 20 bp, Artificial Sequence
  Description of Artificial Sequence: Synthetic oligonucleotide
  Target: LAMA2; (-) strand; PAM type: YTN; PAM sequence: TTT
gtgtaagtacttagaaaagt

SEQ ID NO: 294448 - DNA, 20 bp, Artificial Sequence
  Description of Artificial Sequence: Synthetic oligonucleotide
  Target: LAMA2; (-) strand; PAM type: YTN; PAM sequence: CTA
taaaatgcagtttgtgtaag

SEQ ID NO: 294449 - DNA, 20 bp, Artificial Sequence
  Description of Artificial Sequence: Synthetic oligonucleotide
  Target: LAMA2; (-) strand; PAM type: YTN; PAM sequence: TTG
agaggccctataaaatgcag

SEQ ID NO: 294450 - DNA, 20 bp, Artificial Sequence
  Description of Artificial Sequence: Synthetic oligonucleotide
  Target: LAMA2; (-) strand; PAM type: YTN; PAM sequence: CTT
gagaggccctataaaatgca

SEQ ID NO: 294451 - DNA, 20 bp, Artificial Sequence
  Description of Artificial Sequence: Synthetic oligonucleotide
  Target: LAMA2; (-) strand; PAM type: YTN; PAM sequence: CTA
aataccacagaaaaatgtgc

SEQ ID NO: 294452 - DNA, 20 bp, Artificial Sequence
  Description of Artificial Sequence: Synthetic oligonucleotide
  Target: LAMA2; (-) strand; PAM type: YTN; PAM sequence: CTC
taaataccacagaaaaatgt

SEQ ID NO: 294453 - DNA, 20 bp, Artificial Sequence
  Description of Artificial Sequence: Synthetic oligonucleotide
  Target: LAMA2; (-) strand; PAM type: YTN; PAM sequence: TTG
agaaaaaaggaaaaagtgtg

SEQ ID NO: 294454 - DNA, 20 bp, Artificial Sequence
  Description of Artificial Sequence: Synthetic oligonucleotide
  Target: LAMA2; (-) strand; PAM type: YTN; PAM sequence: TTT
gagaaaaaaggaaaaagtgt

SEQ ID NO: 294455 - DNA, 20 bp, Artificial Sequence
  Description of Artificial Sequence: Synthetic oligonucleotide
  Target: LAMA2; (-) strand; PAM type: YTN; PAM sequence: TTT
tgagaaaaaaggaaaaagtg

SEQ ID NO: 294456 - DNA, 20 bp, Artificial Sequence
  Description of Artificial Sequence: Synthetic oligonucleotide
  Target: LAMA2; (-) strand; PAM type: YTN; PAM sequence: TTA
ttttgagaaaaaaggaaaaa

SEQ ID NO: 294457 - DNA, 20 bp, Artificial Sequence
  Description of Artificial Sequence: Synthetic oligonucleotide
  Target: LAMA2; (-) strand; PAM type: YTN; PAM sequence: TTT
attttgagaaaaaaggaaaa

SEQ ID NO: 294458 - DNA, 20 bp, Artificial Sequence
  Description of Artificial Sequence: Synthetic oligonucleotide
  Target: LAMA2; (-) strand; PAM type: YTN; PAM sequence: CTT
tattttgagaaaaaaggaaa

SEQ ID NO: 294459 - DNA, 20 bp, Artificial Sequence
  Description of Artificial Sequence: Synthetic oligonucleotide
  Target: LAMA2; (-) strand; PAM type: YTN; PAM sequence: TTC
ccagatgggcaagtatcttt

SEQ ID NO: 294460 - DNA, 20 bp, Artificial Sequence
  Description of Artificial Sequence: Synthetic oligonucleotide
  Target: LAMA2; (-) strand; PAM type: YTN; PAM sequence: CTC
cattcccagatgggcaagta

SEQ ID NO: 294461 - DNA, 20 bp, Artificial Sequence
  Description of Artificial Sequence: Synthetic oligonucleotide
  Target: LAMA2; (-) strand; PAM type: YTN; PAM sequence: TTA
aatgagtaaaaatctccatt

SEQ ID NO: 294462 - DNA, 20 bp, Artificial Sequence
  Description of Artificial Sequence: Synthetic oligonucleotide
  Target: LAMA2; (-) strand; PAM type: YTN; PAM sequence: CTT
aaatgagtaaaaatctccat

SEQ ID NO: 294463 - DNA, 20 bp, Artificial Sequence
  Description of Artificial Sequence: Synthetic oligonucleotide
  Target: LAMA2; (-) strand; PAM type: YTN; PAM sequence: TTA
taaaaaaaaaaaagaacctt

SEQ ID NO: 294464 - DNA, 20 bp, Artificial Sequence
  Description of Artificial Sequence: Synthetic oligonucleotide
  Target: LAMA2; (-) strand; PAM type: YTN; PAM sequence: TTA
gaacagaaggttataaaaaa

SEQ ID NO: 294465 - DNA, 20 bp, Artificial Sequence
  Description of Artificial Sequence: Synthetic oligonucleotide
  Target: LAMA2; (-) strand; PAM type: YTN; PAM sequence: CTG
agaggaaatggaaatcgaaa

SEQ ID NO: 294466 - DNA, 20 bp, Artificial Sequence
  Description of Artificial Sequence: Synthetic oligonucleotide
  Target: LAMA2; (-) strand; PAM type: YTN; PAM sequence: CTG
ctgagaggaaatggaaatcg

SEQ ID NO: 294467 - DNA, 20 bp, Artificial Sequence
  Description of Artificial Sequence: Synthetic oligonucleotide
  Target: LAMA2; (-) strand; PAM type: YTN; PAM sequence: TTA
aaacatacactgctgagagg

SEQ ID NO: 294468 - DNA, 20 bp, Artificial Sequence
  Description of Artificial Sequence: Synthetic oligonucleotide
  Target: LAMA2; (-) strand; PAM type: YTN; PAM sequence: TTC
ggaaaagttaaaacatacac

SEQ ID NO: 294469 - DNA, 20 bp, Artificial Sequence
  Description of Artificial Sequence: Synthetic oligonucleotide
  Target: LAMA2; (-) strand; PAM type: YTN; PAM sequence: TTT
cggaaaagttaaaacataca

SEQ ID NO: 294470 - DNA, 20 bp, Artificial Sequence
  Description of Artificial Sequence: Synthetic oligonucleotide
  Target: LAMA2; (-) strand; PAM type: YTN; PAM sequence: TTT
tcggaaaagttaaaacatac

SEQ ID NO: 294471 - DNA, 20 bp, Artificial Sequence
  Description of Artificial Sequence: Synthetic oligonucleotide
  Target: LAMA2; (-) strand; PAM type: YTN; PAM sequence: CTG
ttttcggaaaagttaaaaca

SEQ ID NO: 294472 - DNA, 20 bp, Artificial Sequence
  Description of Artificial Sequence: Synthetic oligonucleotide
  Target: LAMA2; (-) strand; PAM type: YTN; PAM sequence: CTC
tgttttcggaaaagttaaaa

SEQ ID NO: 294473 - DNA, 20 bp, Artificial Sequence
  Description of Artificial Sequence: Synthetic oligonucleotide
  Target: LAMA2; (-) strand; PAM type: YTN; PAM sequence: CTA
agtggaatgctctgttttcg

SEQ ID NO: 294474 - DNA, 20 bp, Artificial Sequence
  Description of Artificial Sequence: Synthetic oligonucleotide
  Target: LAMA2; (-) strand; PAM type: YTN; PAM sequence: CTA
ctaagtggaatgctctgttt

SEQ ID NO: 294475 - DNA, 20 bp, Artificial Sequence
  Description of Artificial Sequence: Synthetic oligonucleotide
  Target: LAMA2; (-) strand; PAM type: YTN; PAM sequence: CTC
atctactaagtggaatgctc

SEQ ID NO: 294476 - DNA, 20 bp, Artificial Sequence
  Description of Artificial Sequence: Synthetic oligonucleotide
  Target: LAMA2; (-) strand; PAM type: YTN; PAM sequence: CTG
tctcatctactaagtggaat

SEQ ID NO: 294477 - DNA, 20 bp, Artificial Sequence
  Description of Artificial Sequence: Synthetic oligonucleotide
  Target: LAMA2; (-) strand; PAM type: YTN; PAM sequence: TTC
tgtctcatctactaagtgga

SEQ ID NO: 294478 - DNA, 20 bp, Artificial Sequence
  Description of Artificial Sequence: Synthetic oligonucleotide
  Target: LAMA2; (-) strand; PAM type: YTN; PAM sequence: CTT
ctgtctcatctactaagtgg

SEQ ID NO: 294479 - DNA, 20 bp, Artificial Sequence
  Description of Artificial Sequence: Synthetic oligonucleotide
  Target: LAMA2; (-) strand; PAM type: YTN; PAM sequence: TTG
cttctgtctcatctactaag

SEQ ID NO: 294480 - DNA, 20 bp, Artificial Sequence
  Description of Artificial Sequence: Synthetic oligonucleotide
  Target: LAMA2; (-) strand; PAM type: YTN; PAM sequence: TTT
gcttctgtctcatctactaa

SEQ ID NO: 294481 - DNA, 20 bp, Artificial Sequence
  Description of Artificial Sequence: Synthetic oligonucleotide
  Target: LAMA2; (-) strand; PAM type: YTN; PAM sequence: TTT
tgcttctgtctcatctacta

SEQ ID NO: 294482 - DNA, 20 bp, Artificial Sequence
  Description of Artificial Sequence: Synthetic oligonucleotide
  Target: LAMA2; (-) strand; PAM type: YTN; PAM sequence: TTT
ttgcttctgtctcatctact

SEQ ID NO: 294483 - DNA, 20 bp, Artificial Sequence
  Description of Artificial Sequence: Synthetic oligonucleotide
  Target: LAMA2; (-) strand; PAM type: YTN; PAM sequence: CTT
tttgcttctgtctcatctac

SEQ ID NO: 294484 - DNA, 20 bp, Artificial Sequence
  Description of Artificial Sequence: Synthetic oligonucleotide
  Target: LAMA2; (-) strand; PAM type: YTN; PAM sequence: CTC
aactttttgcttctgtctca

SEQ ID NO: 294485 - DNA, 20 bp, Artificial Sequence
  Description of Artificial Sequence: Synthetic oligonucleotide
  Target: LAMA2; (-) strand; PAM type: YTN; PAM sequence: CTA
ctcaactttttgcttctgtc

SEQ ID NO: 294486 - DNA, 20 bp, Artificial Sequence
  Description of Artificial Sequence: Synthetic oligonucleotide
  Target: LAMA2; (-) strand; PAM type: YTN; PAM sequence: TTG
gcatgctactcaactttttg

SEQ ID NO: 294487 - DNA, 20 bp, Artificial Sequence
  Description of Artificial Sequence: Synthetic oligonucleotide
  Target: LAMA2; (-) strand; PAM type: YTN; PAM sequence: TTT
ggcatgctactcaacttttt

SEQ ID NO: 294488 - DNA, 20 bp, Artificial Sequence
  Description of Artificial Sequence: Synthetic oligonucleotide
  Target: LAMA2; (-) strand; PAM type: YTN; PAM sequence: CTA
aaccaaccaatttggcatgc

SEQ ID NO: 294489 - DNA, 20 bp, Artificial Sequence
  Description of Artificial Sequence: Synthetic oligonucleotide
  Target: LAMA2; (-) strand; PAM type: YTN; PAM sequence: TTC
taaaccaaccaatttggcat

SEQ ID NO: 294490 - DNA, 20 bp, Artificial Sequence
  Description of Artificial Sequence: Synthetic oligonucleotide
  Target: LAMA2; (-) strand; PAM type: YTN; PAM sequence: TTT
ctaaaccaaccaatttggca

SEQ ID NO: 294491 - DNA, 20 bp, Artificial Sequence
  Description of Artificial Sequence: Synthetic oligonucleotide
  Target: LAMA2; (-) strand; PAM type: YTN; PAM sequence: CTT
tctaaaccaaccaatttggc

SEQ ID NO: 294492 - DNA, 20 bp, Artificial Sequence
  Description of Artificial Sequence: Synthetic oligonucleotide
  Target: LAMA2; (-) strand; PAM type: YTN; PAM sequence: TTC
tttctaaaccaaccaatttg

SEQ ID NO: 294493 - DNA, 20 bp, Artificial Sequence
  Description of Artificial Sequence: Synthetic oligonucleotide
  Target: LAMA2; (-) strand; PAM type: YTN; PAM sequence: CTG
tgattctttctaaaccaacc

SEQ ID NO: 294494 - DNA, 20 bp, Artificial Sequence
  Description of Artificial Sequence: Synthetic oligonucleotide
  Target: LAMA2; (-) strand; PAM type: YTN; PAM sequence: TTC
tgtgattctttctaaaccaa

SEQ ID NO: 294495 - DNA, 20 bp, Artificial Sequence
  Description of Artificial Sequence: Synthetic oligonucleotide
  Target: LAMA2; (-) strand; PAM type: YTN; PAM sequence: CTA
atgttctgtgattctttcta

SEQ ID NO: 294496 - DNA, 20 bp, Artificial Sequence
  Description of Artificial Sequence: Synthetic oligonucleotide
  Target: LAMA2; (-) strand; PAM type: YTN; PAM sequence: CTC
taatgttctgtgattctttc

SEQ ID NO: 294497 - DNA, 20 bp, Artificial Sequence
  Description of Artificial Sequence: Synthetic oligonucleotide
  Target: LAMA2; (-) strand; PAM type: YTN; PAM sequence: CTA
gctctaatgttctgtgattc

SEQ ID NO: 294498 - DNA, 20 bp, Artificial Sequence
  Description of Artificial Sequence: Synthetic oligonucleotide
  Target: LAMA2; (-) strand; PAM type: YTN; PAM sequence: TTC
tagctctaatgttctgtgat

SEQ ID NO: 294499 - DNA, 20 bp, Artificial Sequence
  Description of Artificial Sequence: Synthetic oligonucleotide
  Target: LAMA2; (-) strand; PAM type: YTN; PAM sequence: CTT
ctagctctaatgttctgtga

SEQ ID NO: 294500 - DNA, 20 bp, Artificial Sequence
  Description of Artificial Sequence: Synthetic oligonucleotide
  Target: LAMA2; (-) strand; PAM type: YTN; PAM sequence: TTA
gggtgtcttctagctctaat

SEQ ID NO: 294501 - DNA, 20 bp, Artificial Sequence
  Description of Artificial Sequence: Synthetic oligonucleotide
  Target: LAMA2; (-) strand; PAM type: YTN; PAM sequence: TTT
agggtgtcttctagctctaa

SEQ ID NO: 294502 - DNA, 20 bp, Artificial Sequence
  Description of Artificial Sequence: Synthetic oligonucleotide
  Target: LAMA2; (-) strand; PAM type: YTN; PAM sequence: CTT
tagggtgtcttctagctcta

SEQ ID NO: 294503 - DNA, 20 bp, Artificial Sequence
  Description of Artificial Sequence: Synthetic oligonucleotide
  Target: LAMA2; (-) strand; PAM type: YTN; PAM sequence: TTG
gaatctttagggtgtcttct

SEQ ID NO: 294504 - DNA, 20 bp, Artificial Sequence
  Description of Artificial Sequence: Synthetic oligonucleotide
  Target: LAMA2; (-) strand; PAM type: YTN; PAM sequence: TTA
agagttggaatctttagggt

SEQ ID NO: 294505 - DNA, 20 bp, Artificial Sequence
  Description of Artificial Sequence: Synthetic oligonucleotide
  Target: LAMA2; (-) strand; PAM type: YTN; PAM sequence: CTC
atgtgcaagttaagagttgg

SEQ ID NO: 294506 - DNA, 20 bp, Artificial Sequence
  Description of Artificial Sequence: Synthetic oligonucleotide
  Target: LAMA2; (-) strand; PAM type: YTN; PAM sequence: TTC
ctcatgtgcaagttaagagt

SEQ ID NO: 294507 - DNA, 20 bp, Artificial Sequence
  Description of Artificial Sequence: Synthetic oligonucleotide
  Target: LAMA2; (-) strand; PAM type: YTN; PAM sequence: TTT
cctcatgtgcaagttaagag

SEQ ID NO: 294508 - DNA, 20 bp, Artificial Sequence
  Description of Artificial Sequence: Synthetic oligonucleotide
  Target: LAMA2; (-) strand; PAM type: YTN; PAM sequence: CTT
tcctcatgtgcaagttaaga

SEQ ID NO: 294509 - DNA, 20 bp, Artificial Sequence
  Description of Artificial Sequence: Synthetic oligonucleotide
  Target: LAMA2; (-) strand; PAM type: YTN; PAM sequence: TTC
tttcctcatgtgcaagttaa

SEQ ID NO: 294510 - DNA, 20 bp, Artificial Sequence
  Description of Artificial Sequence: Synthetic oligonucleotide
  Target: LAMA2; (-) strand; PAM type: YTN; PAM sequence: TTT
ctttcctcatgtgcaagtta

SEQ ID NO: 294511 - DNA, 20 bp, Artificial Sequence
  Description of Artificial Sequence: Synthetic oligonucleotide
  Target: LAMA2; (-) strand; PAM type: YTN; PAM sequence: CTT
tctttcctcatgtgcaagtt

SEQ ID NO: 294512 - DNA, 20 bp, Artificial Sequence
  Description of Artificial Sequence: Synthetic oligonucleotide
  Target: LAMA2; (-) strand; PAM type: YTN; PAM sequence: TTG
agggctttctttcctcatgt

SEQ ID NO: 294513 - DNA, 20 bp, Artificial Sequence
  Description of Artificial Sequence: Synthetic oligonucleotide
  Target: LAMA2; (-) strand; PAM type: YTN; PAM sequence: TTT
gagggctttctttcctcatg

SEQ ID NO: 294514 - DNA, 20 bp, Artificial Sequence
  Description of Artificial Sequence: Synthetic oligonucleotide
  Target: LAMA2; (-) strand; PAM type: YTN; PAM sequence: CTG
taagtttgagggctttcttt

SEQ ID NO: 294515 - DNA, 20 bp, Artificial Sequence
  Description of Artificial Sequence: Synthetic oligonucleotide
  Target: LAMA2; (-) strand; PAM type: YTN; PAM sequence: CTG
ggccatgctgtaagtttgag

SEQ ID NO: 294516 - DNA, 20 bp, Artificial Sequence
  Description of Artificial Sequence: Synthetic oligonucleotide
  Target: LAMA2; (-) strand; PAM type: YTN; PAM sequence: CTC
atgtgtgtaaccccctgggc

SEQ ID NO: 294517 - DNA, 20 bp, Artificial Sequence
  Description of Artificial Sequence: Synthetic oligonucleotide
  Target: LAMA2; (-) strand; PAM type: YTN; PAM sequence: CTA
tcgctcatgtgtgtaacccc

SEQ ID NO: 294518 - DNA, 20 bp, Artificial Sequence
  Description of Artificial Sequence: Synthetic oligonucleotide
  Target: LAMA2; (-) strand; PAM type: YTN; PAM sequence: TTA
gtgccaactatcgctcatgt

SEQ ID NO: 294519 - DNA, 20 bp, Artificial Sequence
  Description of Artificial Sequence: Synthetic oligonucleotide
  Target: LAMA2; (-) strand; PAM type: YTN; PAM sequence: TTT
agtgccaactatcgctcatg

SEQ ID NO: 294520 - DNA, 20 bp, Artificial Sequence
  Description of Artificial Sequence: Synthetic oligonucleotide
  Target: LAMA2; (-) strand; PAM type: YTN; PAM sequence: TTT
tagtgccaactatcgctcat

SEQ ID NO: 294521 - DNA, 20 bp, Artificial Sequence
  Description of Artificial Sequence: Synthetic oligonucleotide
  Target: LAMA2; (-) strand; PAM type: YTN; PAM sequence: CTG
ggttttagtgccaactatcg

SEQ ID NO: 294522 - DNA, 20 bp, Artificial Sequence
  Description of Artificial Sequence: Synthetic oligonucleotide
  Target: LAMA2; (-) strand; PAM type: YTN; PAM sequence: TTA
gatatctgggttttagtgcc

SEQ ID NO: 294523 - DNA, 20 bp, Artificial Sequence
  Description of Artificial Sequence: Synthetic oligonucleotide
  Target: LAMA2; (-) strand; PAM type: YTN; PAM sequence: TTT
agatatctgggttttagtgc

SEQ ID NO: 294524 - DNA, 20 bp, Artificial Sequence
  Description of Artificial Sequence: Synthetic oligonucleotide
  Target: LAMA2; (-) strand; PAM type: YTN; PAM sequence: TTG
gaatttagatatctgggttt

SEQ ID NO: 294525 - DNA, 20 bp, Artificial Sequence
  Description of Artificial Sequence: Synthetic oligonucleotide
  Target: LAMA2; (-) strand; PAM type: YTN; PAM sequence: CTC
aaaaaacagacaaacaaaca

SEQ ID NO: 294526 - DNA, 20 bp, Artificial Sequence
  Description of Artificial Sequence: Synthetic oligonucleotide
  Target: LAMA2; (-) strand; PAM type: YTN; PAM sequence: CTC
catctcaaaaaacagacaaa

SEQ ID NO: 294527 - DNA, 20 bp, Artificial Sequence
  Description of Artificial Sequence: Synthetic oligonucleotide
  Target: LAMA2; (-) strand; PAM type: YTN; PAM sequence: CTG
ggtagcaagagtgaaactcc

SEQ ID NO: 294528 - DNA, 20 bp, Artificial Sequence
  Description of Artificial Sequence: Synthetic oligonucleotide
  Target: LAMA2; (-) strand; PAM type: YTN; PAM sequence: CTC
cagcctgggtagcaagagtg

SEQ ID NO: 294529 - DNA, 20 bp, Artificial Sequence
  Description of Artificial Sequence: Synthetic oligonucleotide
  Target: LAMA2; (-) strand; PAM type: YTN; PAM sequence: TTA
cactccagcctgggtagcaa

SEQ ID NO: 294530 - DNA, 20 bp, Artificial Sequence
  Description of Artificial Sequence: Synthetic oligonucleotide
  Target: LAMA2; (-) strand; PAM type: YTN; PAM sequence: TTG
tgacattacactccagcctg

SEQ ID NO: 294531 - DNA, 20 bp, Artificial Sequence
  Description of Artificial Sequence: Synthetic oligonucleotide
  Target: LAMA2; (-) strand; PAM type: YTN; PAM sequence: TTG
cagtgagacgagattgtgac

SEQ ID NO: 294532 - DNA, 20 bp, Artificial Sequence
  Description of Artificial Sequence: Synthetic oligonucleotide
  Target: LAMA2; (-) strand; PAM type: YTN; PAM sequence: TTG
aacccaggaggtggaggttg

SEQ ID NO: 294533 - DNA, 20 bp, Artificial Sequence
  Description of Artificial Sequence: Synthetic oligonucleotide
  Target: LAMA2; (-) strand; PAM type: YTN; PAM sequence: CTT
gaacccaggaggtggaggtt

SEQ ID NO: 294534 - DNA, 20 bp, Artificial Sequence
  Description of Artificial Sequence: Synthetic oligonucleotide
  Target: LAMA2; (-) strand; PAM type: YTN; PAM sequence: TTG
cttgaacccaggaggtggag

SEQ ID NO: 294535 - DNA, 20 bp, Artificial Sequence
  Description of Artificial Sequence: Synthetic oligonucleotide
  Target: LAMA2; (-) strand; PAM type: YTN; PAM sequence: CTG
aagcaggagaattgcttgaa

SEQ ID NO: 294536 - DNA, 20 bp, Artificial Sequence
  Description of Artificial Sequence: Synthetic oligonucleotide
  Target: LAMA2; (-) strand; PAM type: YTN; PAM sequence: CTC
gggaggctgaagcaggagaa

SEQ ID NO: 294537 - DNA, 20 bp, Artificial Sequence
  Description of Artificial Sequence: Synthetic oligonucleotide
  Target: LAMA2; (-) strand; PAM type: YTN; PAM sequence: CTA
ctcgggaggctgaagcagga

SEQ ID NO: 294538 - DNA, 20 bp, Artificial Sequence
  Description of Artificial Sequence: Synthetic oligonucleotide
  Target: LAMA2; (-) strand; PAM type: YTN; PAM sequence: TTA
gccaagagtggtggtgcatg

SEQ ID NO: 294539 - DNA, 20 bp, Artificial Sequence
  Description of Artificial Sequence: Synthetic oligonucleotide
  Target: LAMA2; (-) strand; PAM type: YTN; PAM sequence: CTA
aaaatacaaaattagccaag

SEQ ID NO: 294540 - DNA, 20 bp, Artificial Sequence
  Description of Artificial Sequence: Synthetic oligonucleotide
  Target: LAMA2; (-) strand; PAM type: YTN; PAM sequence: CTA
ctaaaaatacaaaattagcc

SEQ ID NO: 294541 - DNA, 20 bp, Artificial Sequence
  Description of Artificial Sequence: Synthetic oligonucleotide
  Target: LAMA2; (-) strand; PAM type: YTN; PAM sequence: CTC
tactaaaaatacaaaattag

SEQ ID NO: 294542 - DNA, 20 bp, Artificial Sequence
  Description of Artificial Sequence: Synthetic oligonucleotide
  Target: LAMA2; (-) strand; PAM type: YTN; PAM sequence: CTG
accaacatggagaaatcccg

SEQ ID NO: 294543 - DNA, 20 bp, Artificial Sequence
  Description of Artificial Sequence: Synthetic oligonucleotide
  Target: LAMA2; (-) strand; PAM type: YTN; PAM sequence: TTC
gagaccagcctgaccaacat

SEQ ID NO: 294544 - DNA, 20 bp, Artificial Sequence
  Description of Artificial Sequence: Synthetic oligonucleotide
  Target: LAMA2; (-) strand; PAM type: YTN; PAM sequence: TTG
gcagttcgagaccagcctga

SEQ ID NO: 294545 - DNA, 20 bp, Artificial Sequence
  Description of Artificial Sequence: Synthetic oligonucleotide
  Target: LAMA2; (-) strand; PAM type: YTN; PAM sequence: CTG
aagttggcagttcgagacca

SEQ ID NO: 294546 - DNA, 20 bp, Artificial Sequence
  Description of Artificial Sequence: Synthetic oligonucleotide
  Target: LAMA2; (-) strand; PAM type: YTN; PAM sequence: CTG
aggtgggcagaccacctgaa

SEQ ID NO: 294547 - DNA, 20 bp, Artificial Sequence
  Description of Artificial Sequence: Synthetic oligonucleotide
  Target: LAMA2; (-) strand; PAM type: YTN; PAM sequence: TTG
ggaggctgaggtgggcagac

SEQ ID NO: 294548 - DNA, 20 bp, Artificial Sequence
  Description of Artificial Sequence: Synthetic oligonucleotide
  Target: LAMA2; (-) strand; PAM type: YTN; PAM sequence: TTT
gggaggctgaggtgggcaga

SEQ ID NO: 294549 - DNA, 20 bp, Artificial Sequence
  Description of Artificial Sequence: Synthetic oligonucleotide
  Target: LAMA2; (-) strand; PAM type: YTN; PAM sequence: CTT
tgggaggctgaggtgggcag

SEQ ID NO: 294550 - DNA, 20 bp, Artificial Sequence
  Description of Artificial Sequence: Synthetic oligonucleotide
  Target: LAMA2; (-) strand; PAM type: YTN; PAM sequence: CTG
taatcccagcactttgggag

SEQ ID NO: 294551 - DNA, 20 bp, Artificial Sequence
  Description of Artificial Sequence: Synthetic oligonucleotide
  Target: LAMA2; (-) strand; PAM type: YTN; PAM sequence: CTC
atgcctgtaatcccagcact

SEQ ID NO: 294552 - DNA, 20 bp, Artificial Sequence
  Description of Artificial Sequence: Synthetic oligonucleotide
  Target: LAMA2; (-) strand; PAM type: YTN; PAM sequence: TTA
taatgtgcaaaagaagggga

SEQ ID NO: 294553 - DNA, 20 bp, Artificial Sequence
  Description of Artificial Sequence: Synthetic oligonucleotide
  Target: LAMA2; (-) strand; PAM type: YTN; PAM sequence: CTA
attataatgtgcaaaagaag

SEQ ID NO: 294554 - DNA, 20 bp, Artificial Sequence
  Description of Artificial Sequence: Synthetic oligonucleotide
  Target: LAMA2; (-) strand; PAM type: YTN; PAM sequence: CTG
accacacagtcataactaat

SEQ ID NO: 294555 - DNA, 20 bp, Artificial Sequence
  Description of Artificial Sequence: Synthetic oligonucleotide
  Target: LAMA2; (-) strand; PAM type: YTN; PAM sequence: TTC
tgaccacacagtcataacta

SEQ ID NO: 294556 - DNA, 20 bp, Artificial Sequence
  Description of Artificial Sequence: Synthetic oligonucleotide
  Target: LAMA2; (-) strand; PAM type: YTN; PAM sequence: CTA
attctgaccacacagtcata

SEQ ID NO: 294557 - DNA, 20 bp, Artificial Sequence
  Description of Artificial Sequence: Synthetic oligonucleotide
  Target: LAMA2; (-) strand; PAM type: YTN; PAM sequence: CTA
aaaaatctaattctgaccac

SEQ ID NO: 294558 - DNA, 20 bp, Artificial Sequence
  Description of Artificial Sequence: Synthetic oligonucleotide
  Target: LAMA2; (-) strand; PAM type: YTN; PAM sequence: TTC
taaaaaatctaattctgacc

SEQ ID NO: 294559 - DNA, 20 bp, Artificial Sequence
  Description of Artificial Sequence: Synthetic oligonucleotide
  Target: LAMA2; (-) strand; PAM type: YTN; PAM sequence: TTA
atagagatggaaagttctaa

SEQ ID NO: 294560 - DNA, 20 bp, Artificial Sequence
  Description of Artificial Sequence: Synthetic oligonucleotide
  Target: LAMA2; (-) strand; PAM type: YTN; PAM sequence: CTA
aaatataatacaattaatag

SEQ ID NO: 294561 - DNA, 20 bp, Artificial Sequence
  Description of Artificial Sequence: Synthetic oligonucleotide
  Target: LAMA2; (-) strand; PAM type: YTN; PAM sequence: TTC
taaaatataatacaattaat

SEQ ID NO: 294562 - DNA, 20 bp, Artificial Sequence
  Description of Artificial Sequence: Synthetic oligonucleotide
  Target: LAMA2; (-) strand; PAM type: YTN; PAM sequence: TTT
ctaaaatataatacaattaa

SEQ ID NO: 294563 - DNA, 20 bp, Artificial Sequence
  Description of Artificial Sequence: Synthetic oligonucleotide
  Target: LAMA2; (-) strand; PAM type: YTN; PAM sequence: CTG
atttctaaaatataatacaa

SEQ ID NO: 294564 - DNA, 20 bp, Artificial Sequence
  Description of Artificial Sequence: Synthetic oligonucleotide
  Target: LAMA2; (-) strand; PAM type: YTN; PAM sequence: TTC
atgatctgatttctaaaata

SEQ ID NO: 294565 - DNA, 20 bp, Artificial Sequence
  Description of Artificial Sequence: Synthetic oligonucleotide
  Target: LAMA2; (-) strand; PAM type: YTN; PAM sequence: CTT
catgatctgatttctaaaat

SEQ ID NO: 294566 - DNA, 20 bp, Artificial Sequence
  Description of Artificial Sequence: Synthetic oligonucleotide
  Target: LAMA2; (-) strand; PAM type: YTN; PAM sequence: TTA
aaacagaagatatgtgtggc

SEQ ID NO: 294567 - DNA, 20 bp, Artificial Sequence
  Description of Artificial Sequence: Synthetic oligonucleotide
  Target: LAMA2; (-) strand; PAM type: YTN; PAM sequence: CTA
cacacacaaaaagaacataa

SEQ ID NO: 294568 - DNA, 20 bp, Artificial Sequence
  Description of Artificial Sequence: Synthetic oligonucleotide
  Target: LAMA2; (-) strand; PAM type: YTN; PAM sequence: TTC
cccctacacacacaaaaaga

SEQ ID NO: 294569 - DNA, 20 bp, Artificial Sequence
  Description of Artificial Sequence: Synthetic oligonucleotide
  Target: LAMA2; (-) strand; PAM type: YTN; PAM sequence: TTT
ccccctacacacacaaaaag

SEQ ID NO: 294570 - DNA, 20 bp, Artificial Sequence
  Description of Artificial Sequence: Synthetic oligonucleotide
  Target: LAMA2; (-) strand; PAM type: YTN; PAM sequence: TTT
tccccctacacacacaaaaa

SEQ ID NO: 294571 - DNA, 20 bp, Artificial Sequence
  Description of Artificial Sequence: Synthetic oligonucleotide
  Target: LAMA2; (-) strand; PAM type: YTN; PAM sequence: CTT
ttccccctacacacacaaaa

SEQ ID NO: 294572 - DNA, 20 bp, Artificial Sequence
  Description of Artificial Sequence: Synthetic oligonucleotide
  Target: LAMA2; (-) strand; PAM type: YTN; PAM sequence: TTA
aaaagaagacacccttttcc

SEQ ID NO: 294573 - DNA, 20 bp, Artificial Sequence
  Description of Artificial Sequence: Synthetic oligonucleotide
  Target: LAMA2; (-) strand; PAM type: YTN; PAM sequence: TTT
aaaaagaagacacccttttc

SEQ ID NO: 294574 - DNA, 20 bp, Artificial Sequence
  Description of Artificial Sequence: Synthetic oligonucleotide
  Target: LAMA2; (-) strand; PAM type: YTN; PAM sequence: CTT
taaaaagaagacaccctttt

SEQ ID NO: 294575 - DNA, 20 bp, Artificial Sequence
  Description of Artificial Sequence: Synthetic oligonucleotide
  Target: LAMA2; (-) strand; PAM type: YTN; PAM sequence: TTA
gtaacctttaaaaagaagac

SEQ ID NO: 294576 - DNA, 20 bp, Artificial Sequence
  Description of Artificial Sequence: Synthetic oligonucleotide
  Target: LAMA2; (-) strand; PAM type: YTN; PAM sequence: TTT
agtaacctttaaaaagaaga

SEQ ID NO: 294577 - DNA, 20 bp, Artificial Sequence
  Description of Artificial Sequence: Synthetic oligonucleotide
  Target: LAMA2; (-) strand; PAM type: YTN; PAM sequence: TTT
tagtaacctttaaaaagaag

SEQ ID NO: 294578 - DNA, 20 bp, Artificial Sequence
  Description of Artificial Sequence: Synthetic oligonucleotide
  Target: LAMA2; (-) strand; PAM type: YTN; PAM sequence: CTT
ttagtaacctttaaaaagaa

SEQ ID NO: 294579 - DNA, 20 bp, Artificial Sequence
  Description of Artificial Sequence: Synthetic oligonucleotide
  Target: LAMA2; (-) strand; PAM type: YTN; PAM sequence: TTA
acttttagtaacctttaaaa

SEQ ID NO: 294580 - DNA, 20 bp, Artificial Sequence
  Description of Artificial Sequence: Synthetic oligonucleotide
  Target: LAMA2; (-) strand; PAM type: YTN; PAM sequence: TTT
aacttttagtaacctttaaa

SEQ ID NO: 294581 - DNA, 20 bp, Artificial Sequence
  Description of Artificial Sequence: Synthetic oligonucleotide
  Target: LAMA2; (-) strand; PAM type: YTN; PAM sequence: TTT
taacttttagtaacctttaa

SEQ ID NO: 294582 - DNA, 20 bp, Artificial Sequence
  Description of Artificial Sequence: Synthetic oligonucleotide
  Target: LAMA2; (-) strand; PAM type: YTN; PAM sequence: CTT
ttaacttttagtaaccttta

SEQ ID NO: 294583 - DNA, 20 bp, Artificial Sequence
  Description of Artificial Sequence: Synthetic oligonucleotide
  Target: LAMA2; (-) strand; PAM type: YTN; PAM sequence: CTG
taaaacttttaacttttagt

SEQ ID NO: 294584 - DNA, 20 bp, Artificial Sequence
  Description of Artificial Sequence: Synthetic oligonucleotide
  Target: LAMA2; (-) strand; PAM type: YTN; PAM sequence: TTA
caaaataaactgtaaaactt

SEQ ID NO: 294585 - DNA, 20 bp, Artificial Sequence
  Description of Artificial Sequence: Synthetic oligonucleotide
  Target: LAMA2; (-) strand; PAM type: YTN; PAM sequence: TTG
ttacaaaataaactgtaaaa

SEQ ID NO: 294586 - DNA, 20 bp, Artificial Sequence
  Description of Artificial Sequence: Synthetic oligonucleotide
  Target: LAMA2; (-) strand; PAM type: YTN; PAM sequence: TTT
gttacaaaataaactgtaaa

SEQ ID NO: 294587 - DNA, 20 bp, Artificial Sequence
  Description of Artificial Sequence: Synthetic oligonucleotide
  Target: LAMA2; (-) strand; PAM type: YTN; PAM sequence: TTA
ataaatatttgttacaaaat

SEQ ID NO: 294588 - DNA, 20 bp, Artificial Sequence
  Description of Artificial Sequence: Synthetic oligonucleotide
  Target: LAMA2; (-) strand; PAM type: YTN; PAM sequence: CTT
aataaatatttgttacaaaa

SEQ ID NO: 294589 - DNA, 20 bp, Artificial Sequence
  Description of Artificial Sequence: Synthetic oligonucleotide
  Target: LAMA2; (-) strand; PAM type: YTN; PAM sequence: TTA
gtaggtgcttaataaatatt

SEQ ID NO: 294590 - DNA, 20 bp, Artificial Sequence
  Description of Artificial Sequence: Synthetic oligonucleotide
  Target: LAMA2; (-) strand; PAM type: YTN; PAM sequence: CTT
agtaggtgcttaataaatat

SEQ ID NO: 294591 - DNA, 20 bp, Artificial Sequence
  Description of Artificial Sequence: Synthetic oligonucleotide
  Target: LAMA2; (-) strand; PAM type: YTN; PAM sequence: TTG
cacttagtaggtgcttaata

SEQ ID NO: 294592 - DNA, 20 bp, Artificial Sequence
  Description of Artificial Sequence: Synthetic oligonucleotide
  Target: LAMA2; (-) strand; PAM type: YTN; PAM sequence: TTT
gcacttagtaggtgcttaat

SEQ ID NO: 294593 - DNA, 20 bp, Artificial Sequence
  Description of Artificial Sequence: Synthetic oligonucleotide
  Target: LAMA2; (-) strand; PAM type: YTN; PAM sequence: CTT
tgcacttagtaggtgcttaa

SEQ ID NO: 294594 - DNA, 20 bp, Artificial Sequence
  Description of Artificial Sequence: Synthetic oligonucleotide
  Target: LAMA2; (-) strand; PAM type: YTN; PAM sequence: TTC
atctttgcacttagtaggtg

SEQ ID NO: 294595 - DNA, 20 bp, Artificial Sequence
  Description of Artificial Sequence: Synthetic oligonucleotide
  Target: LAMA2; (-) strand; PAM type: YTN; PAM sequence: CTA
gcaatgataatatcgtattc

SEQ ID NO: 294596 - DNA, 20 bp, Artificial Sequence
  Description of Artificial Sequence: Synthetic oligonucleotide
  Target: LAMA2; (-) strand; PAM type: YTN; PAM sequence: CTG
actagcaatgataatatcgt

SEQ ID NO: 294597 - DNA, 20 bp, Artificial Sequence
  Description of Artificial Sequence: Synthetic oligonucleotide
  Target: LAMA2; (-) strand; PAM type: YTN; PAM sequence: CTC
tgactagcaatgataatatc

SEQ ID NO: 294598 - DNA, 20 bp, Artificial Sequence
  Description of Artificial Sequence: Synthetic oligonucleotide
  Target: LAMA2; (-) strand; PAM type: YTN; PAM sequence: TTC
tctgactagcaatgataata

SEQ ID NO: 294599 - DNA, 20 bp, Artificial Sequence
  Description of Artificial Sequence: Synthetic oligonucleotide
  Target: LAMA2; (-) strand; PAM type: YTN; PAM sequence: TTT
ctctgactagcaatgataat

SEQ ID NO: 294600 - DNA, 20 bp, Artificial Sequence
  Description of Artificial Sequence: Synthetic oligonucleotide
  Target: LAMA2; (-) strand; PAM type: YTN; PAM sequence: TTT
tctctgactagcaatgataa

SEQ ID NO: 294601 - DNA, 20 bp, Artificial Sequence
  Description of Artificial Sequence: Synthetic oligonucleotide
  Target: LAMA2; (-) strand; PAM type: YTN; PAM sequence: TTT
ttctctgactagcaatgata

SEQ ID NO: 294602 - DNA, 20 bp, Artificial Sequence
  Description of Artificial Sequence: Synthetic oligonucleotide
  Target: LAMA2; (-) strand; PAM type: YTN; PAM sequence: CTT
tttctctgactagcaatgat

SEQ ID NO: 294603 - DNA, 20 bp, Artificial Sequence
  Description of Artificial Sequence: Synthetic oligonucleotide
  Target: LAMA2; (-) strand; PAM type: YTN; PAM sequence: CTC
tttttctctgactagcaatg

SEQ ID NO: 294604 - DNA, 20 bp, Artificial Sequence
  Description of Artificial Sequence: Synthetic oligonucleotide
  Target: LAMA2; (-) strand; PAM type: YTN; PAM sequence: CTC
cctctttttctctgactagc

SEQ ID NO: 294605 - DNA, 20 bp, Artificial Sequence
  Description of Artificial Sequence: Synthetic oligonucleotide
  Target: LAMA2; (-) strand; PAM type: YTN; PAM sequence: CTC
tccctctttttctctgacta

SEQ ID NO: 294606 - DNA, 20 bp, Artificial Sequence
  Description of Artificial Sequence: Synthetic oligonucleotide
  Target: LAMA2; (-) strand; PAM type: YTN; PAM sequence: CTA
tggcagaaaaagcaactctc

SEQ ID NO: 294607 - DNA, 20 bp, Artificial Sequence
  Description of Artificial Sequence: Synthetic oligonucleotide
  Target: LAMA2; (-) strand; PAM type: YTN; PAM sequence: TTC
atggaataaaagtgggaggg

SEQ ID NO: 294608 - DNA, 20 bp, Artificial Sequence
  Description of Artificial Sequence: Synthetic oligonucleotide
  Target: LAMA2; (-) strand; PAM type: YTN; PAM sequence: CTG
ccagaattcatggaataaaa

SEQ ID NO: 294609 - DNA, 20 bp, Artificial Sequence
  Description of Artificial Sequence: Synthetic oligonucleotide
  Target: LAMA2; (-) strand; PAM type: YTN; PAM sequence: TTA
gaagggacaagtaacctgcc

SEQ ID NO: 294610 - DNA, 20 bp, Artificial Sequence
  Description of Artificial Sequence: Synthetic oligonucleotide
  Target: LAMA2; (-) strand; PAM type: YTN; PAM sequence: TTT
agaagggacaagtaacctgc

SEQ ID NO: 294611 - DNA, 20 bp, Artificial Sequence
  Description of Artificial Sequence: Synthetic oligonucleotide
  Target: LAMA2; (-) strand; PAM type: YTN; PAM sequence: TTA
catttagaagggacaagtaa

SEQ ID NO: 294612 - DNA, 20 bp, Artificial Sequence
  Description of Artificial Sequence: Synthetic oligonucleotide
  Target: LAMA2; (-) strand; PAM type: YTN; PAM sequence: TTT
acatttagaagggacaagta

SEQ ID NO: 294613 - DNA, 20 bp, Artificial Sequence
  Description of Artificial Sequence: Synthetic oligonucleotide
  Target: LAMA2; (-) strand; PAM type: YTN; PAM sequence: TTT
tacatttagaagggacaagt

SEQ ID NO: 294614 - DNA, 20 bp, Artificial Sequence
  Description of Artificial Sequence: Synthetic oligonucleotide
  Target: LAMA2; (-) strand; PAM type: YTN; PAM sequence: TTA
ttttacatttagaagggaca

SEQ ID NO: 294615 - DNA, 20 bp, Artificial Sequence
  Description of Artificial Sequence: Synthetic oligonucleotide
  Target: LAMA2; (-) strand; PAM type: YTN; PAM sequence: TTA
attattttacatttagaagg

SEQ ID NO: 294616 - DNA, 20 bp, Artificial Sequence
  Description of Artificial Sequence: Synthetic oligonucleotide
  Target: LAMA2; (-) strand; PAM type: YTN; PAM sequence: TTG
tccattaattattttacatt

SEQ ID NO: 294617 - DNA, 20 bp, Artificial Sequence
  Description of Artificial Sequence: Synthetic oligonucleotide
  Target: LAMA2; (-) strand; PAM type: YTN; PAM sequence: TTT
gtccattaattattttacat

SEQ ID NO: 294618 - DNA, 20 bp, Artificial Sequence
  Description of Artificial Sequence: Synthetic oligonucleotide
  Target: LAMA2; (-) strand; PAM type: YTN; PAM sequence: TTA
tttgtccattaattatttta

SEQ ID NO: 294619 - DNA, 20 bp, Artificial Sequence
  Description of Artificial Sequence: Synthetic oligonucleotide
  Target: LAMA2; (-) strand; PAM type: YTN; PAM sequence: CTT
atttgtccattaattatttt

SEQ ID NO: 294620 - DNA, 20 bp, Artificial Sequence
  Description of Artificial Sequence: Synthetic oligonucleotide
  Target: LAMA2; (-) strand; PAM type: YTN; PAM sequence: TTA
tccttatttgtccattaatt

SEQ ID NO: 294621 - DNA, 20 bp, Artificial Sequence
  Description of Artificial Sequence: Synthetic oligonucleotide
  Target: LAMA2; (-) strand; PAM type: YTN; PAM sequence: TTA
ttatccttatttgtccatta

SEQ ID NO: 294622 - DNA, 20 bp, Artificial Sequence
  Description of Artificial Sequence: Synthetic oligonucleotide
  Target: LAMA2; (-) strand; PAM type: YTN; PAM sequence: CTA
gaaggaagatattattatcc

SEQ ID NO: 294623 - DNA, 20 bp, Artificial Sequence
  Description of Artificial Sequence: Synthetic oligonucleotide
  Target: LAMA2; (-) strand; PAM type: YTN; PAM sequence: CTC
ataatagtaatcctagaagg

SEQ ID NO: 294624 - DNA, 20 bp, Artificial Sequence
  Description of Artificial Sequence: Synthetic oligonucleotide
  Target: LAMA2; (-) strand; PAM type: YTN; PAM sequence: TTC
cctcataatagtaatcctag

SEQ ID NO: 294625 - DNA, 20 bp, Artificial Sequence
  Description of Artificial Sequence: Synthetic oligonucleotide
  Target: LAMA2; (-) strand; PAM type: YTN; PAM sequence: TTA
ttccctcataatagtaatcc

SEQ ID NO: 294626 - DNA, 20 bp, Artificial Sequence
  Description of Artificial Sequence: Synthetic oligonucleotide
  Target: LAMA2; (-) strand; PAM type: YTN; PAM sequence: CTT
attccctcataatagtaatc

SEQ ID NO: 294627 - DNA, 20 bp, Artificial Sequence
  Description of Artificial Sequence: Synthetic oligonucleotide
  Target: LAMA2; (-) strand; PAM type: YTN; PAM sequence: TTG
cataaaatgtataacttatt

SEQ ID NO: 294628 - DNA, 20 bp, Artificial Sequence
  Description of Artificial Sequence: Synthetic oligonucleotide
  Target: LAMA2; (-) strand; PAM type: YTN; PAM sequence: TTT
gcataaaatgtataacttat

SEQ ID NO: 294629 - DNA, 20 bp, Artificial Sequence
  Description of Artificial Sequence: Synthetic oligonucleotide
  Target: LAMA2; (-) strand; PAM type: YTN; PAM sequence: CTT
tgcataaaatgtataactta

SEQ ID NO: 294630 - DNA, 20 bp, Artificial Sequence
  Description of Artificial Sequence: Synthetic oligonucleotide
  Target: LAMA2; (-) strand; PAM type: YTN; PAM sequence: CTA
ggtgctttgcataaaatgta

SEQ ID NO: 294631 - DNA, 20 bp, Artificial Sequence
  Description of Artificial Sequence: Synthetic oligonucleotide
  Target: LAMA2; (-) strand; PAM type: YTN; PAM sequence: TTG
agccaagcatggtgctaggt

SEQ ID NO: 294632 - DNA, 20 bp, Artificial Sequence
  Description of Artificial Sequence: Synthetic oligonucleotide
  Target: LAMA2; (-) strand; PAM type: YTN; PAM sequence: TTT
gagccaagcatggtgctagg

SEQ ID NO: 294633 - DNA, 20 bp, Artificial Sequence
  Description of Artificial Sequence: Synthetic oligonucleotide
  Target: LAMA2; (-) strand; PAM type: YTN; PAM sequence: CTT
tgagccaagcatggtgctag

SEQ ID NO: 294634 - DNA, 20 bp, Artificial Sequence
  Description of Artificial Sequence: Synthetic oligonucleotide
  Target: LAMA2; (-) strand; PAM type: YTN; PAM sequence: TTA
ctttgagccaagcatggtgc

SEQ ID NO: 294635 - DNA, 20 bp, Artificial Sequence
  Description of Artificial Sequence: Synthetic oligonucleotide
  Target: LAMA2; (-) strand; PAM type: YTN; PAM sequence: CTA
acaaaagaataaatagagag

SEQ ID NO: 294636 - DNA, 20 bp, Artificial Sequence
  Description of Artificial Sequence: Synthetic oligonucleotide
  Target: LAMA2; (-) strand; PAM type: YTN; PAM sequence: TTA
aactaacaaaagaataaata

SEQ ID NO: 294637 - DNA, 20 bp, Artificial Sequence
  Description of Artificial Sequence: Synthetic oligonucleotide
  Target: LAMA2; (-) strand; PAM type: YTN; PAM sequence: TTA
aagttaaactaacaaaagaa

SEQ ID NO: 294638 - DNA, 20 bp, Artificial Sequence
  Description of Artificial Sequence: Synthetic oligonucleotide
  Target: LAMA2; (-) strand; PAM type: YTN; PAM sequence: TTA
aagaaacacagaagttaaag

SEQ ID NO: 294639 - DNA, 20 bp, Artificial Sequence
  Description of Artificial Sequence: Synthetic oligonucleotide
  Target: LAMA2; (-) strand; PAM type: YTN; PAM sequence: TTA
agttaaagaaacacagaagt

SEQ ID NO: 294640 - DNA, 20 bp, Artificial Sequence
  Description of Artificial Sequence: Synthetic oligonucleotide
  Target: LAMA2; (-) strand; PAM type: YTN; PAM sequence: CTA
gaataattaagttaaagaaa

SEQ ID NO: 294641 - DNA, 20 bp, Artificial Sequence
  Description of Artificial Sequence: Synthetic oligonucleotide
  Target: LAMA2; (-) strand; PAM type: YTN; PAM sequence: CTA
actagaataattaagttaaa

SEQ ID NO: 294642 - DNA, 20 bp, Artificial Sequence
  Description of Artificial Sequence: Synthetic oligonucleotide
  Target: LAMA2; (-) strand; PAM type: YTN; PAM sequence: TTA
aactaactagaataattaag

SEQ ID NO: 294643 - DNA, 20 bp, Artificial Sequence
  Description of Artificial Sequence: Synthetic oligonucleotide
  Target: LAMA2; (-) strand; PAM type: YTN; PAM sequence: CTA
aaaatgtgaaaagttaaact

SEQ ID NO: 294644 - DNA, 20 bp, Artificial Sequence
  Description of Artificial Sequence: Synthetic oligonucleotide
  Target: LAMA2; (-) strand; PAM type: YTN; PAM sequence: CTG
ccacccaccctaaaaatgtg

SEQ ID NO: 294645 - DNA, 20 bp, Artificial Sequence
  Description of Artificial Sequence: Synthetic oligonucleotide
  Target: LAMA2; (-) strand; PAM type: YTN; PAM sequence: TTC
cagcacctgccacccaccct

SEQ ID NO: 294646 - DNA, 20 bp, Artificial Sequence
  Description of Artificial Sequence: Synthetic oligonucleotide
  Target: LAMA2; (-) strand; PAM type: YTN; PAM sequence: TTT
ccagcacctgccacccaccc

SEQ ID NO: 294647 - DNA, 20 bp, Artificial Sequence
  Description of Artificial Sequence: Synthetic oligonucleotide
  Target: LAMA2; (-) strand; PAM type: YTN; PAM sequence: TTT
tccagcacctgccacccacc

SEQ ID NO: 294648 - DNA, 20 bp, Artificial Sequence
  Description of Artificial Sequence: Synthetic oligonucleotide
  Target: LAMA2; (-) strand; PAM type: YTN; PAM sequence: TTT
ttccagcacctgccacccac

SEQ ID NO: 294649 - DNA, 20 bp, Artificial Sequence
  Description of Artificial Sequence: Synthetic oligonucleotide
  Target: LAMA2; (-) strand; PAM type: YTN; PAM sequence: TTT
tttccagcacctgccaccca

SEQ ID NO: 294650 - DNA, 20 bp, Artificial Sequence
  Description of Artificial Sequence: Synthetic oligonucleotide
  Target: LAMA2; (-) strand; PAM type: YTN; PAM sequence: TTT
ttttccagcacctgccaccc

SEQ ID NO: 294651 - DNA, 20 bp, Artificial Sequence
  Description of Artificial Sequence: Synthetic oligonucleotide
  Target: LAMA2; (-) strand; PAM type: YTN; PAM sequence: CTT
tttttccagcacctgccacc

SEQ ID NO: 294652 - DNA, 20 bp, Artificial Sequence
  Description of Artificial Sequence: Synthetic oligonucleotide
  Target: LAMA2; (-) strand; PAM type: YTN; PAM sequence: CTC
accacatccctttttttcca

SEQ ID NO: 294653 - DNA, 20 bp, Artificial Sequence
  Description of Artificial Sequence: Synthetic oligonucleotide
  Target: LAMA2; (-) strand; PAM type: YTN; PAM sequence: TTG
aatactcaccacatcccttt

SEQ ID NO: 294654 - DNA, 20 bp, Artificial Sequence
  Description of Artificial Sequence: Synthetic oligonucleotide
  Target: LAMA2; (-) strand; PAM type: YTN; PAM sequence: TTA
aaaattgaatactcaccaca

SEQ ID NO: 294655 - DNA, 20 bp, Artificial Sequence
  Description of Artificial Sequence: Synthetic oligonucleotide
  Target: LAMA2; (-) strand; PAM type: YTN; PAM sequence: CTT
aaaaattgaatactcaccac

SEQ ID NO: 294656 - DNA, 20 bp, Artificial Sequence
  Description of Artificial Sequence: Synthetic oligonucleotide
  Target: LAMA2; (-) strand; PAM type: YTN; PAM sequence: TTG
cttaaaaattgaatactcac

SEQ ID NO: 294657 - DNA, 20 bp, Artificial Sequence
  Description of Artificial Sequence: Synthetic oligonucleotide
  Target: LAMA2; (-) strand; PAM type: YTN; PAM sequence: TTG
gaattgcttaaaaattgaat

SEQ ID NO: 294658 - DNA, 20 bp, Artificial Sequence
  Description of Artificial Sequence: Synthetic oligonucleotide
  Target: LAMA2; (-) strand; PAM type: YTN; PAM sequence: TTT
ggaattgcttaaaaattgaa

SEQ ID NO: 294659 - DNA, 20 bp, Artificial Sequence
  Description of Artificial Sequence: Synthetic oligonucleotide
  Target: LAMA2; (-) strand; PAM type: YTN; PAM sequence: TTA
catatcaaaccaataaaagg

SEQ ID NO: 294660 - DNA, 20 bp, Artificial Sequence
  Description of Artificial Sequence: Synthetic oligonucleotide
  Target: LAMA2; (-) strand; PAM type: YTN; PAM sequence: TTA
caatgtatatatcatcatta

SEQ ID NO: 294661 - DNA, 20 bp, Artificial Sequence
  Description of Artificial Sequence: Synthetic oligonucleotide
  Target: LAMA2; (-) strand; PAM type: YTN; PAM sequence: TTA
ataaccacatcattacaatg

SEQ ID NO: 294662 - DNA, 20 bp, Artificial Sequence
  Description of Artificial Sequence: Synthetic oligonucleotide
  Target: LAMA2; (-) strand; PAM type: YTN; PAM sequence: TTT
aataaccacatcattacaat

SEQ ID NO: 294663 - DNA, 20 bp, Artificial Sequence
  Description of Artificial Sequence: Synthetic oligonucleotide
  Target: LAMA2; (-) strand; PAM type: YTN; PAM sequence: TTA
tttaataaccacatcattac

SEQ ID NO: 294664 - DNA, 20 bp, Artificial Sequence
  Description of Artificial Sequence: Synthetic oligonucleotide
  Target: LAMA2; (-) strand; PAM type: YTN; PAM sequence: CTT
atttaataaccacatcatta

SEQ ID NO: 294665 - DNA, 20 bp, Artificial Sequence
  Description of Artificial Sequence: Synthetic oligonucleotide
  Target: LAMA2; (-) strand; PAM type: YTN; PAM sequence: TTA
tagaggacttatttaataac

SEQ ID NO: 294666 - DNA, 20 bp, Artificial Sequence
  Description of Artificial Sequence: Synthetic oligonucleotide
  Target: LAMA2; (-) strand; PAM type: YTN; PAM sequence: CTG
atacaaaaatggaaaatggt

SEQ ID NO: 294667 - DNA, 20 bp, Artificial Sequence
  Description of Artificial Sequence: Synthetic oligonucleotide
  Target: LAMA2; (-) strand; PAM type: YTN; PAM sequence: TTC
tgatacaaaaatggaaaatg

SEQ ID NO: 294668 - DNA, 20 bp, Artificial Sequence
  Description of Artificial Sequence: Synthetic oligonucleotide
  Target: LAMA2; (-) strand; PAM type: YTN; PAM sequence: CTA
aattctgatacaaaaatgga

SEQ ID NO: 294669 - DNA, 20 bp, Artificial Sequence
  Description of Artificial Sequence: Synthetic oligonucleotide
  Target: LAMA2; (-) strand; PAM type: YTN; PAM sequence: CTG
ggtgacagagcaagaaaaaa

SEQ ID NO: 294670 - DNA, 20 bp, Artificial Sequence
  Description of Artificial Sequence: Synthetic oligonucleotide
  Target: LAMA2; (-) strand; PAM type: YTN; PAM sequence: CTG
cacaccagcctgggtgacag

SEQ ID NO: 294671 - DNA, 20 bp, Artificial Sequence
  Description of Artificial Sequence: Synthetic oligonucleotide
  Target: LAMA2; (-) strand; PAM type: YTN; PAM sequence: TTG
cgccactgcacaccagcctg

SEQ ID NO: 294672 - DNA, 20 bp, Artificial Sequence
  Description of Artificial Sequence: Synthetic oligonucleotide
  Target: LAMA2; (-) strand; PAM type: YTN; PAM sequence: CTG
cagtaagccatgattgcgcc

SEQ ID NO: 294673 - DNA, 20 bp, Artificial Sequence
  Description of Artificial Sequence: Synthetic oligonucleotide
  Target: LAMA2; (-) strand; PAM type: YTN; PAM sequence: TTA
aggctgcagtaagccatgat

SEQ ID NO: 294674 - DNA, 20 bp, Artificial Sequence
  Description of Artificial Sequence: Synthetic oligonucleotide
  Target: LAMA2; (-) strand; PAM type: YTN; PAM sequence: CTG
ggaggttaaggctgcagtaa

SEQ ID NO: 294675 - DNA, 20 bp, Artificial Sequence
  Description of Artificial Sequence: Synthetic oligonucleotide
  Target: LAMA2; (-) strand; PAM type: YTN; PAM sequence: CTG
agcctgggaggttaaggctg

SEQ ID NO: 294676 - DNA, 20 bp, Artificial Sequence
  Description of Artificial Sequence: Synthetic oligonucleotide
  Target: LAMA2; (-) strand; PAM type: YTN; PAM sequence: CTG
aggcatgaggatcgcctgag

SEQ ID NO: 294677 - DNA, 20 bp, Artificial Sequence
  Description of Artificial Sequence: Synthetic oligonucleotide
  Target: LAMA2; (-) strand; PAM type: YTN; PAM sequence: CTC
aggaggctgaggcatgagga

SEQ ID NO: 294678 - DNA, 20 bp, Artificial Sequence
  Description of Artificial Sequence: Synthetic oligonucleotide
  Target: LAMA2; (-) strand; PAM type: YTN; PAM sequence: CTA
ctcaggaggctgaggcatga

SEQ ID NO: 294679 - DNA, 20 bp, Artificial Sequence
  Description of Artificial Sequence: Synthetic oligonucleotide
  Target: LAMA2; (-) strand; PAM type: YTN; PAM sequence: CTG
cagtcccagctactcaggag

SEQ ID NO: 294680 - DNA, 20 bp, Artificial Sequence
  Description of Artificial Sequence: Synthetic oligonucleotide
  Target: LAMA2; (-) strand; PAM type: YTN; PAM sequence: TTA
gccgggcatggtggaatgca

SEQ ID NO: 294681 - DNA, 20 bp, Artificial Sequence
  Description of Artificial Sequence: Synthetic oligonucleotide
  Target: LAMA2; (-) strand; PAM type: YTN; PAM sequence: TTA
aaaatacaaaaattagccgg

SEQ ID NO: 294682 - DNA, 20 bp, Artificial Sequence
  Description of Artificial Sequence: Synthetic oligonucleotide
  Target: LAMA2; (-) strand; PAM type: YTN; PAM sequence: CTA
ttaaaaatacaaaaattagc

SEQ ID NO: 294683 - DNA, 20 bp, Artificial Sequence
  Description of Artificial Sequence: Synthetic oligonucleotide
  Target: LAMA2; (-) strand; PAM type: YTN; PAM sequence: CTC
tattaaaaatacaaaaatta

SEQ ID NO: 294684 - DNA, 20 bp, Artificial Sequence
  Description of Artificial Sequence: Synthetic oligonucleotide
  Target: LAMA2; (-) strand; PAM type: YTN; PAM sequence: CTG
gccaacatggtgaaatccca

SEQ ID NO: 294685 - DNA, 20 bp, Artificial Sequence
  Description of Artificial Sequence: Synthetic oligonucleotide
  Target: LAMA2; (-) strand; PAM type: YTN; PAM sequence: TTC
gagaccagcctggccaacat

SEQ ID NO: 294686 - DNA, 20 bp, Artificial Sequence
  Description of Artificial Sequence: Synthetic oligonucleotide
  Target: LAMA2; (-) strand; PAM type: YTN; PAM sequence: TTC
ccaagagttcgagaccagcc

SEQ ID NO: 294687 - DNA, 20 bp, Artificial Sequence
  Description of Artificial Sequence: Synthetic oligonucleotide
  Target: LAMA2; (-) strand; PAM type: YTN; PAM sequence: CTT
cccaagagttcgagaccagc

SEQ ID NO: 294688 - DNA, 20 bp, Artificial Sequence
  Description of Artificial Sequence: Synthetic oligonucleotide
  Target: LAMA2; (-) strand; PAM type: YTN; PAM sequence: CTG
aggcaggtggatcacttccc

SEQ ID NO: 294689 - DNA, 20 bp, Artificial Sequence
  Description of Artificial Sequence: Synthetic oligonucleotide
  Target: LAMA2; (-) strand; PAM type: YTN; PAM sequence: TTG
gcaggctgaggcaggtggat

SEQ ID NO: 294690 - DNA, 20 bp, Artificial Sequence
  Description of Artificial Sequence: Synthetic oligonucleotide
  Target: LAMA2; (-) strand; PAM type: YTN; PAM sequence: TTT
ggcaggctgaggcaggtgga

SEQ ID NO: 294691 - DNA, 20 bp, Artificial Sequence
  Description of Artificial Sequence: Synthetic oligonucleotide
  Target: LAMA2; (-) strand; PAM type: YTN; PAM sequence: CTT
tggcaggctgaggcaggtgg

SEQ ID NO: 294692 - DNA, 20 bp, Artificial Sequence
  Description of Artificial Sequence: Synthetic oligonucleotide
  Target: LAMA2; (-) strand; PAM type: YTN; PAM sequence: CTC
aacactttggcaggctgagg

SEQ ID NO: 294693 - DNA, 20 bp, Artificial Sequence
  Description of Artificial Sequence: Synthetic oligonucleotide
  Target: LAMA2; (-) strand; PAM type: YTN; PAM sequence: CTG
taatctcaacactttggcag

SEQ ID NO: 294694 - DNA, 20 bp, Artificial Sequence
  Description of Artificial Sequence: Synthetic oligonucleotide
  Target: LAMA2; (-) strand; PAM type: YTN; PAM sequence: TTA
tgcctgtaatctcaacactt

SEQ ID NO: 294695 - DNA, 20 bp, Artificial Sequence
  Description of Artificial Sequence: Synthetic oligonucleotide
  Target: LAMA2; (-) strand; PAM type: YTN; PAM sequence: CTT
atgcctgtaatctcaacact

SEQ ID NO: 294696 - DNA, 20 bp, Artificial Sequence
  Description of Artificial Sequence: Synthetic oligonucleotide
  Target: LAMA2; (-) strand; PAM type: YTN; PAM sequence: CTG
ggccaggcgtggtggcttat

SEQ ID NO: 294697 - DNA, 20 bp, Artificial Sequence
  Description of Artificial Sequence: Synthetic oligonucleotide
  Target: LAMA2; (-) strand; PAM type: YTN; PAM sequence: TTC
tgggccaggcgtggtggctt

SEQ ID NO: 294698 - DNA, 20 bp, Artificial Sequence
  Description of Artificial Sequence: Synthetic oligonucleotide
  Target: LAMA2; (-) strand; PAM type: YTN; PAM sequence: CTA
aattctgggccaggcgtggt

SEQ ID NO: 294699 - DNA, 20 bp, Artificial Sequence
  Description of Artificial Sequence: Synthetic oligonucleotide
  Target: LAMA2; (-) strand; PAM type: YTN; PAM sequence: TTA
aaaagctaaattctgggcca

SEQ ID NO: 294700 - DNA, 20 bp, Artificial Sequence
  Description of Artificial Sequence: Synthetic oligonucleotide
  Target: LAMA2; (-) strand; PAM type: YTN; PAM sequence: CTT
aaaaagctaaattctgggcc

SEQ ID NO: 294701 - DNA, 20 bp, Artificial Sequence
  Description of Artificial Sequence: Synthetic oligonucleotide
  Target: LAMA2; (-) strand; PAM type: YTN; PAM sequence: CTC
ttaaaaagctaaattctggg

SEQ ID NO: 294702 - DNA, 20 bp, Artificial Sequence
  Description of Artificial Sequence: Synthetic oligonucleotide
  Target: LAMA2; (-) strand; PAM type: YTN; PAM sequence: TTA
aataacaactcttaaaaagc

SEQ ID NO: 294703 - DNA, 20 bp, Artificial Sequence
  Description of Artificial Sequence: Synthetic oligonucleotide
  Target: LAMA2; (-) strand; PAM type: YTN; PAM sequence: CTT
aaataacaactcttaaaaag

SEQ ID NO: 294704 - DNA, 20 bp, Artificial Sequence
  Description of Artificial Sequence: Synthetic oligonucleotide
  Target: LAMA2; (-) strand; PAM type: YTN; PAM sequence: TTC
ttaaataacaactcttaaaa

SEQ ID NO: 294705 - DNA, 20 bp, Artificial Sequence
  Description of Artificial Sequence: Synthetic oligonucleotide
  Target: LAMA2; (-) strand; PAM type: YTN; PAM sequence: TTA
gttcttaaataacaactctt

SEQ ID NO: 294706 - DNA, 20 bp, Artificial Sequence
  Description of Artificial Sequence: Synthetic oligonucleotide
  Target: LAMA2; (-) strand; PAM type: YTN; PAM sequence: CTT
agttcttaaataacaactct

SEQ ID NO: 294707 - DNA, 20 bp, Artificial Sequence
  Description of Artificial Sequence: Synthetic oligonucleotide
  Target: LAMA2; (-) strand; PAM type: YTN; PAM sequence: TTA
agtcttagttcttaaataac

SEQ ID NO: 294708 - DNA, 20 bp, Artificial Sequence
  Description of Artificial Sequence: Synthetic oligonucleotide
  Target: LAMA2; (-) strand; PAM type: YTN; PAM sequence: TTT
aagtcttagttcttaaataa

SEQ ID NO: 294709 - DNA, 20 bp, Artificial Sequence
  Description of Artificial Sequence: Synthetic oligonucleotide
  Target: LAMA2; (-) strand; PAM type: YTN; PAM sequence: TTT
taagtcttagttcttaaata

SEQ ID NO: 294710 - DNA, 20 bp, Artificial Sequence
  Description of Artificial Sequence: Synthetic oligonucleotide
  Target: LAMA2; (-) strand; PAM type: YTN; PAM sequence: CTT
ttaagtcttagttcttaaat

SEQ ID NO: 294711 - DNA, 20 bp, Artificial Sequence
  Description of Artificial Sequence: Synthetic oligonucleotide
  Target: LAMA2; (-) strand; PAM type: YTN; PAM sequence: TTA
acttttaagtcttagttctt

SEQ ID NO: 294712 - DNA, 20 bp, Artificial Sequence
  Description of Artificial Sequence: Synthetic oligonucleotide
  Target: LAMA2; (-) strand; PAM type: YTN; PAM sequence: TTC
aggagttaacttttaagtct

SEQ ID NO: 294713 - DNA, 20 bp, Artificial Sequence
  Description of Artificial Sequence: Synthetic oligonucleotide
  Target: LAMA2; (-) strand; PAM type: YTN; PAM sequence: CTT
caggagttaacttttaagtc

SEQ ID NO: 294714 - DNA, 20 bp, Artificial Sequence
  Description of Artificial Sequence: Synthetic oligonucleotide
  Target: LAMA2; (-) strand; PAM type: YTN; PAM sequence: CTC
acttcaggagttaactttta

SEQ ID NO: 294715 - DNA, 20 bp, Artificial Sequence
  Description of Artificial Sequence: Synthetic oligonucleotide
  Target: LAMA2; (-) strand; PAM type: YTN; PAM sequence: TTC
tcacttcaggagttaacttt

SEQ ID NO: 294716 - DNA, 20 bp, Artificial Sequence
  Description of Artificial Sequence: Synthetic oligonucleotide
  Target: LAMA2; (-) strand; PAM type: YTN; PAM sequence: CTC
ataaataggcagttctcact

SEQ ID NO: 294717 - DNA, 20 bp, Artificial Sequence
  Description of Artificial Sequence: Synthetic oligonucleotide
  Target: LAMA2; (-) strand; PAM type: YTN; PAM sequence: CTA
gcacaaatatggagctcata

SEQ ID NO: 294718 - DNA, 20 bp, Artificial Sequence
  Description of Artificial Sequence: Synthetic oligonucleotide
  Target: LAMA2; (-) strand; PAM type: YTN; PAM sequence: CTG
tgctagcacaaatatggagc

SEQ ID NO: 294719 - DNA, 20 bp, Artificial Sequence
  Description of Artificial Sequence: Synthetic oligonucleotide
  Target: LAMA2; (-) strand; PAM type: YTN; PAM sequence: CTG
tcaactgtgctagcacaaat

SEQ ID NO: 294720 - DNA, 20 bp, Artificial Sequence
  Description of Artificial Sequence: Synthetic oligonucleotide
  Target: LAMA2; (-) strand; PAM type: YTN; PAM sequence: TTC
tgtcaactgtgctagcacaa

SEQ ID NO: 294721 - DNA, 20 bp, Artificial Sequence
  Description of Artificial Sequence: Synthetic oligonucleotide
  Target: LAMA2; (-) strand; PAM type: YTN; PAM sequence: TTT
ctgtcaactgtgctagcaca

SEQ ID NO: 294722 - DNA, 20 bp, Artificial Sequence
  Description of Artificial Sequence: Synthetic oligonucleotide
  Target: LAMA2; (-) strand; PAM type: YTN; PAM sequence: TTT
tctgtcaactgtgctagcac

SEQ ID NO: 294723 - DNA, 20 bp, Artificial Sequence
  Description of Artificial Sequence: Synthetic oligonucleotide
  Target: LAMA2; (-) strand; PAM type: YTN; PAM sequence: CTT
ttctgtcaactgtgctagca

SEQ ID NO: 294724 - DNA, 20 bp, Artificial Sequence
  Description of Artificial Sequence: Synthetic oligonucleotide
  Target: LAMA2; (-) strand; PAM type: YTN; PAM sequence: CTG
agaatagatcttttctgtca

SEQ ID NO: 294725 - DNA, 20 bp, Artificial Sequence
  Description of Artificial Sequence: Synthetic oligonucleotide
  Target: LAMA2; (-) strand; PAM type: YTN; PAM sequence: TTG
ggtgtgatgggtgtaaagaa

SEQ ID NO: 294726 - DNA, 20 bp, Artificial Sequence
  Description of Artificial Sequence: Synthetic oligonucleotide
  Target: LAMA2; (-) strand; PAM type: YTN; PAM sequence: CTG
gcaggattgggtgtgatggg

SEQ ID NO: 294727 - DNA, 20 bp, Artificial Sequence
  Description of Artificial Sequence: Synthetic oligonucleotide
  Target: LAMA2; (-) strand; PAM type: YTN; PAM sequence: TTG
ctggcaggattgggtgtgat

SEQ ID NO: 294728 - DNA, 20 bp, Artificial Sequence
  Description of Artificial Sequence: Synthetic oligonucleotide
  Target: LAMA2; (-) strand; PAM type: YTN; PAM sequence: CTG
taagttgctggcaggattgg

SEQ ID NO: 294729 - DNA, 20 bp, Artificial Sequence
  Description of Artificial Sequence: Synthetic oligonucleotide
  Target: LAMA2; (-) strand; PAM type: YTN; PAM sequence: CTC
atgctgtaagttgctggcag

SEQ ID NO: 294730 - DNA, 20 bp, Artificial Sequence
  Description of Artificial Sequence: Synthetic oligonucleotide
  Target: LAMA2; (-) strand; PAM type: YTN; PAM sequence: TTG
tcctcatgctgtaagttgct

SEQ ID NO: 294731 - DNA, 20 bp, Artificial Sequence
  Description of Artificial Sequence: Synthetic oligonucleotide
  Target: LAMA2; (-) strand; PAM type: YTN; PAM sequence: CTG
tagtatagtgaatgttgtcc

SEQ ID NO: 294732 - DNA, 20 bp, Artificial Sequence
  Description of Artificial Sequence: Synthetic oligonucleotide
  Target: LAMA2; (-) strand; PAM type: YTN; PAM sequence: TTG
ccctgtagtatagtgaatgt

SEQ ID NO: 294733 - DNA, 20 bp, Artificial Sequence
  Description of Artificial Sequence: Synthetic oligonucleotide
  Target: LAMA2; (-) strand; PAM type: YTN; PAM sequence: TTA
cattgccctgtagtatagtg

SEQ ID NO: 294734 - DNA, 20 bp, Artificial Sequence
  Description of Artificial Sequence: Synthetic oligonucleotide
  Target: LAMA2; (-) strand; PAM type: YTN; PAM sequence: CTT
acattgccctgtagtatagt

SEQ ID NO: 294735 - DNA, 20 bp, Artificial Sequence
  Description of Artificial Sequence: Synthetic oligonucleotide
  Target: LAMA2; (-) strand; PAM type: YTN; PAM sequence: CTC
aagacacccttacattgccc

SEQ ID NO: 294736 - DNA, 20 bp, Artificial Sequence
  Description of Artificial Sequence: Synthetic oligonucleotide
  Target: LAMA2; (-) strand; PAM type: YTN; PAM sequence: TTC
tcaagacacccttacattgc

SEQ ID NO: 294737 - DNA, 20 bp, Artificial Sequence
  Description of Artificial Sequence: Synthetic oligonucleotide
  Target: LAMA2; (-) strand; PAM type: YTN; PAM sequence: TTT
ctcaagacacccttacattg

SEQ ID NO: 294738 - DNA, 20 bp, Artificial Sequence
  Description of Artificial Sequence: Synthetic oligonucleotide
  Target: LAMA2; (-) strand; PAM type: YTN; PAM sequence: CTT
tctcaagacacccttacatt

SEQ ID NO: 294739 - DNA, 20 bp, Artificial Sequence
  Description of Artificial Sequence: Synthetic oligonucleotide
  Target: LAMA2; (-) strand; PAM type: YTN; PAM sequence: TTC
acaaggcagggctttctcaa

SEQ ID NO: 294740 - DNA, 20 bp, Artificial Sequence
  Description of Artificial Sequence: Synthetic oligonucleotide
  Target: LAMA2; (-) strand; PAM type: YTN; PAM sequence: TTT
cacaaggcagggctttctca

SEQ ID NO: 294741 - DNA, 20 bp, Artificial Sequence
  Description of Artificial Sequence: Synthetic oligonucleotide
  Target: LAMA2; (-) strand; PAM type: YTN; PAM sequence: TTG
acataatccatttcacaagg

SEQ ID NO: 294742 - DNA, 20 bp, Artificial Sequence
  Description of Artificial Sequence: Synthetic oligonucleotide
  Target: LAMA2; (-) strand; PAM type: YTN; PAM sequence: TTA
atcataagattgacataatc

SEQ ID NO: 294743 - DNA, 20 bp, Artificial Sequence
  Description of Artificial Sequence: Synthetic oligonucleotide
  Target: LAMA2; (-) strand; PAM type: YTN; PAM sequence: TTC
aacatgaattaatcataaga

SEQ ID NO: 294744 - DNA, 20 bp, Artificial Sequence
  Description of Artificial Sequence: Synthetic oligonucleotide
  Target: LAMA2; (-) strand; PAM type: YTN; PAM sequence: CTA
gcgtgttcaacatgaattaa

SEQ ID NO: 294745 - DNA, 20 bp, Artificial Sequence
  Description of Artificial Sequence: Synthetic oligonucleotide
  Target: LAMA2; (-) strand; PAM type: YTN; PAM sequence: TTA
atctagcgtgttcaacatga

SEQ ID NO: 294746 - DNA, 20 bp, Artificial Sequence
  Description of Artificial Sequence: Synthetic oligonucleotide
  Target: LAMA2; (-) strand; PAM type: YTN; PAM sequence: TTT
aatctagcgtgttcaacatg

SEQ ID NO: 294747 - DNA, 20 bp, Artificial Sequence
  Description of Artificial Sequence: Synthetic oligonucleotide
  Target: LAMA2; (-) strand; PAM type: YTN; PAM sequence: CTT
taatctagcgtgttcaacat

SEQ ID NO: 294748 - DNA, 20 bp, Artificial Sequence
  Description of Artificial Sequence: Synthetic oligonucleotide
  Target: LAMA2; (-) strand; PAM type: YTN; PAM sequence: CTC
tttaatctagcgtgttcaac

SEQ ID NO: 294749 - DNA, 20 bp, Artificial Sequence
  Description of Artificial Sequence: Synthetic oligonucleotide
  Target: LAMA2; (-) strand; PAM type: YTN; PAM sequence: CTA
ccataatatcaaatgagata

SEQ ID NO: 294750 - DNA, 20 bp, Artificial Sequence
  Description of Artificial Sequence: Synthetic oligonucleotide
  Target: LAMA2; (-) strand; PAM type: YTN; PAM sequence: CTA
aagaataagagagaagtata

SEQ ID NO: 294751 - DNA, 20 bp, Artificial Sequence
  Description of Artificial Sequence: Synthetic oligonucleotide
  Target: LAMA2; (-) strand; PAM type: YTN; PAM sequence: CTC
gatgggctaaagaataagag

SEQ ID NO: 294752 - DNA, 20 bp, Artificial Sequence
  Description of Artificial Sequence: Synthetic oligonucleotide
  Target: LAMA2; (-) strand; PAM type: YTN; PAM sequence: CTC
tcgatgggctaaagaataag

SEQ ID NO: 294753 - DNA, 20 bp, Artificial Sequence
  Description of Artificial Sequence: Synthetic oligonucleotide
  Target: LAMA2; (-) strand; PAM type: YTN; PAM sequence: CTA
gctctcgatgggctaaagaa

SEQ ID NO: 294754 - DNA, 20 bp, Artificial Sequence
  Description of Artificial Sequence: Synthetic oligonucleotide
  Target: LAMA2; (-) strand; PAM type: YTN; PAM sequence: CTC
tagctctcgatgggctaaag

SEQ ID NO: 294755 - DNA, 20 bp, Artificial Sequence
  Description of Artificial Sequence: Synthetic oligonucleotide
  Target: LAMA2; (-) strand; PAM type: YTN; PAM sequence: TTC
tctagctctcgatgggctaa

SEQ ID NO: 294756 - DNA, 20 bp, Artificial Sequence
  Description of Artificial Sequence: Synthetic oligonucleotide
  Target: LAMA2; (-) strand; PAM type: YTN; PAM sequence: TTT
ctctagctctcgatgggcta

SEQ ID NO: 294757 - DNA, 20 bp, Artificial Sequence
  Description of Artificial Sequence: Synthetic oligonucleotide
  Target: LAMA2; (-) strand; PAM type: YTN; PAM sequence: TTT
tctctagctctcgatgggct

SEQ ID NO: 294758 - DNA, 20 bp, Artificial Sequence
  Description of Artificial Sequence: Synthetic oligonucleotide
  Target: LAMA2; (-) strand; PAM type: YTN; PAM sequence: CTC
catgaaaaatatccacaaat

SEQ ID NO: 294759 - DNA, 20 bp, Artificial Sequence
  Description of Artificial Sequence: Synthetic oligonucleotide
  Target: LAMA2; (-) strand; PAM type: YTN; PAM sequence: CTG
ccatcctccatgaaaaatat

SEQ ID NO: 294760 - DNA, 20 bp, Artificial Sequence
  Description of Artificial Sequence: Synthetic oligonucleotide
  Target: LAMA2; (-) strand; PAM type: YTN; PAM sequence: CTC
ctgccatcctccatgaaaaa

SEQ ID NO: 294761 - DNA, 20 bp, Artificial Sequence
  Description of Artificial Sequence: Synthetic oligonucleotide
  Target: LAMA2; (-) strand; PAM type: YTN; PAM sequence: CTA
cctcctgccatcctccatga

SEQ ID NO: 294762 - DNA, 20 bp, Artificial Sequence
  Description of Artificial Sequence: Synthetic oligonucleotide
  Target: LAMA2; (-) strand; PAM type: YTN; PAM sequence: CTC
tacctcctgccatcctccat

SEQ ID NO: 294763 - DNA, 20 bp, Artificial Sequence
  Description of Artificial Sequence: Synthetic oligonucleotide
  Target: LAMA2; (-) strand; PAM type: YTN; PAM sequence: CTA
cctctacctcctgccatcct

SEQ ID NO: 294764 - DNA, 20 bp, Artificial Sequence
  Description of Artificial Sequence: Synthetic oligonucleotide
  Target: LAMA2; (-) strand; PAM type: YTN; PAM sequence: TTA
tctacctctacctcctgcca

SEQ ID NO: 294765 - DNA, 20 bp, Artificial Sequence
  Description of Artificial Sequence: Synthetic oligonucleotide
  Target: LAMA2; (-) strand; PAM type: YTN; PAM sequence: CTT
atctacctctacctcctgcc

SEQ ID NO: 294766 - DNA, 20 bp, Artificial Sequence
  Description of Artificial Sequence: Synthetic oligonucleotide
  Target: LAMA2; (-) strand; PAM type: YTN; PAM sequence: CTC
ttatctacctctacctcctg

SEQ ID NO: 294767 - DNA, 20 bp, Artificial Sequence
  Description of Artificial Sequence: Synthetic oligonucleotide
  Target: LAMA2; (-) strand; PAM type: YTN; PAM sequence: TTC
agcctcttatctacctctac

SEQ ID NO: 294768 - DNA, 20 bp, Artificial Sequence
  Description of Artificial Sequence: Synthetic oligonucleotide
  Target: LAMA2; (-) strand; PAM type: YTN; PAM sequence: TTG
aagttcagcctcttatctac

SEQ ID NO: 294769 - DNA, 20 bp, Artificial Sequence
  Description of Artificial Sequence: Synthetic oligonucleotide
  Target: LAMA2; (-) strand; PAM type: YTN; PAM sequence: CTT
gaagttcagcctcttatcta

SEQ ID NO: 294770 - DNA, 20 bp, Artificial Sequence
  Description of Artificial Sequence: Synthetic oligonucleotide
  Target: LAMA2; (-) strand; PAM type: YTN; PAM sequence: CTG
taatacttgaagttcagcct

SEQ ID NO: 294771 - DNA, 20 bp, Artificial Sequence
  Description of Artificial Sequence: Synthetic oligonucleotide
  Target: LAMA2; (-) strand; PAM type: YTN; PAM sequence: TTC
tgtaatacttgaagttcagc

SEQ ID NO: 294772 - DNA, 20 bp, Artificial Sequence
  Description of Artificial Sequence: Synthetic oligonucleotide
  Target: LAMA2; (-) strand; PAM type: YTN; PAM sequence: TTT
ctgtaatacttgaagttcag

SEQ ID NO: 294773 - DNA, 20 bp, Artificial Sequence
  Description of Artificial Sequence: Synthetic oligonucleotide
  Target: LAMA2; (-) strand; PAM type: YTN; PAM sequence: TTC
cacatgtcaacaaatttctg

SEQ ID NO: 294774 - DNA, 20 bp, Artificial Sequence
  Description of Artificial Sequence: Synthetic oligonucleotide
  Target: LAMA2; (-) strand; PAM type: YTN; PAM sequence: TTT
ccacatgtcaacaaatttct

SEQ ID NO: 294775 - DNA, 20 bp, Artificial Sequence
  Description of Artificial Sequence: Synthetic oligonucleotide
  Target: LAMA2; (-) strand; PAM type: YTN; PAM sequence: TTG
tcacgtttccacatgtcaac

SEQ ID NO: 294776 - DNA, 20 bp, Artificial Sequence
  Description of Artificial Sequence: Synthetic oligonucleotide
  Target: LAMA2; (-) strand; PAM type: YTN; PAM sequence: CTT
gtcacgtttccacatgtcaa

SEQ ID NO: 294777 - DNA, 20 bp, Artificial Sequence
  Description of Artificial Sequence: Synthetic oligonucleotide
  Target: LAMA2; (-) strand; PAM type: YTN; PAM sequence: TTG
cagagaacttgtcacgtttc

SEQ ID NO: 294778 - DNA, 20 bp, Artificial Sequence
  Description of Artificial Sequence: Synthetic oligonucleotide
  Target: LAMA2; (-) strand; PAM type: YTN; PAM sequence: CTT
gcagagaacttgtcacgttt

SEQ ID NO: 294779 - DNA, 20 bp, Artificial Sequence
  Description of Artificial Sequence: Synthetic oligonucleotide
  Target: LAMA2; (-) strand; PAM type: YTN; PAM sequence: CTA
aacagtgcacatacttgcag

SEQ ID NO: 294780 - DNA, 20 bp, Artificial Sequence
  Description of Artificial Sequence: Synthetic oligonucleotide
  Target: LAMA2; (-) strand; PAM type: YTN; PAM sequence: TTG
gtctaaacagtgcacatact

SEQ ID NO: 294781 - DNA, 20 bp, Artificial Sequence
  Description of Artificial Sequence: Synthetic oligonucleotide
  Target: LAMA2; (-) strand; PAM type: YTN; PAM sequence: CTT
ggtctaaacagtgcacatac

SEQ ID NO: 294782 - DNA, 20 bp, Artificial Sequence
  Description of Artificial Sequence: Synthetic oligonucleotide
  Target: LAMA2; (-) strand; PAM type: YTN; PAM sequence: TTA
aaaagacttggtctaaacag

SEQ ID NO: 294783 - DNA, 20 bp, Artificial Sequence
  Description of Artificial Sequence: Synthetic oligonucleotide
  Target: LAMA2; (-) strand; PAM type: YTN; PAM sequence: TTG
ttaaaaagacttggtctaaa

SEQ ID NO: 294784 - DNA, 20 bp, Artificial Sequence
  Description of Artificial Sequence: Synthetic oligonucleotide
  Target: LAMA2; (-) strand; PAM type: YTN; PAM sequence: CTT
gttaaaaagacttggtctaa

SEQ ID NO: 294785 - DNA, 20 bp, Artificial Sequence
  Description of Artificial Sequence: Synthetic oligonucleotide
  Target: LAMA2; (-) strand; PAM type: YTN; PAM sequence: CTA
tccttgttaaaaagacttgg

SEQ ID NO: 294786 - DNA, 20 bp, Artificial Sequence
  Description of Artificial Sequence: Synthetic oligonucleotide
  Target: LAMA2; (-) strand; PAM type: YTN; PAM sequence: CTA
caaatccacacaggctatcc

SEQ ID NO: 294787 - DNA, 20 bp, Artificial Sequence
  Description of Artificial Sequence: Synthetic oligonucleotide
  Target: LAMA2; (-) strand; PAM type: YTN; PAM sequence: TTA
tctacaaatccacacaggct

SEQ ID NO: 294788 - DNA, 20 bp, Artificial Sequence
  Description of Artificial Sequence: Synthetic oligonucleotide
  Target: LAMA2; (-) strand; PAM type: YTN; PAM sequence: CTC
attatctacaaatccacaca

SEQ ID NO: 294789 - DNA, 20 bp, Artificial Sequence
  Description of Artificial Sequence: Synthetic oligonucleotide
  Target: LAMA2; (-) strand; PAM type: YTN; PAM sequence: TTC
aagtaaaagaatgcagccag

SEQ ID NO: 294790 - DNA, 20 bp, Artificial Sequence
  Description of Artificial Sequence: Synthetic oligonucleotide
  Target: LAMA2; (-) strand; PAM type: YTN; PAM sequence: TTC
aataaaattcaagtaaaaga

SEQ ID NO: 294791 - DNA, 20 bp, Artificial Sequence
  Description of Artificial Sequence: Synthetic oligonucleotide
  Target: LAMA2; (-) strand; PAM type: YTN; PAM sequence: CTT
caataaaattcaagtaaaag

SEQ ID NO: 294792 - DNA, 20 bp, Artificial Sequence
  Description of Artificial Sequence: Synthetic oligonucleotide
  Target: LAMA2; (-) strand; PAM type: YTN; PAM sequence: CTC
ttcaataaaattcaagtaaa

SEQ ID NO: 294793 - DNA, 20 bp, Artificial Sequence
  Description of Artificial Sequence: Synthetic oligonucleotide
  Target: LAMA2; (-) strand; PAM type: YTN; PAM sequence: CTG
aactcttcaataaaattcaa

SEQ ID NO: 294794 - DNA, 20 bp, Artificial Sequence
  Description of Artificial Sequence: Synthetic oligonucleotide
  Target: LAMA2; (-) strand; PAM type: YTN; PAM sequence: TTA
cggctgaactcttcaataaa

SEQ ID NO: 294795 - DNA, 20 bp, Artificial Sequence
  Description of Artificial Sequence: Synthetic oligonucleotide
  Target: LAMA2; (-) strand; PAM type: YTN; PAM sequence: TTT
acggctgaactcttcaataa

SEQ ID NO: 294796 - DNA, 20 bp, Artificial Sequence
  Description of Artificial Sequence: Synthetic oligonucleotide
  Target: LAMA2; (-) strand; PAM type: YTN; PAM sequence: CTG
tgaggtttacggctgaactc

SEQ ID NO: 294797 - DNA, 20 bp, Artificial Sequence
  Description of Artificial Sequence: Synthetic oligonucleotide
  Target: LAMA2; (-) strand; PAM type: YTN; PAM sequence: TTA
aactgtgaggtttacggctg

SEQ ID NO: 294798 - DNA, 20 bp, Artificial Sequence
  Description of Artificial Sequence: Synthetic oligonucleotide
  Target: LAMA2; (-) strand; PAM type: YTN; PAM sequence: TTT
aaactgtgaggtttacggct

SEQ ID NO: 294799 - DNA, 20 bp, Artificial Sequence
  Description of Artificial Sequence: Synthetic oligonucleotide
  Target: LAMA2; (-) strand; PAM type: YTN; PAM sequence: TTT
taaactgtgaggtttacggc

SEQ ID NO: 294800 - DNA, 20 bp, Artificial Sequence
  Description of Artificial Sequence: Synthetic oligonucleotide
  Target: LAMA2; (-) strand; PAM type: YTN; PAM sequence: TTC
acattttaaactgtgaggtt

SEQ ID NO: 294801 - DNA, 20 bp, Artificial Sequence
  Description of Artificial Sequence: Synthetic oligonucleotide
  Target: LAMA2; (-) strand; PAM type: YTN; PAM sequence: TTT
cacattttaaactgtgaggt

SEQ ID NO: 294802 - DNA, 20 bp, Artificial Sequence
  Description of Artificial Sequence: Synthetic oligonucleotide
  Target: LAMA2; (-) strand; PAM type: YTN; PAM sequence: TTT
tcacattttaaactgtgagg

SEQ ID NO: 294803 - DNA, 20 bp, Artificial Sequence
  Description of Artificial Sequence: Synthetic oligonucleotide
  Target: LAMA2; (-) strand; PAM type: YTN; PAM sequence: TTA
gttttcacattttaaactgt

SEQ ID NO: 294804 - DNA, 20 bp, Artificial Sequence
  Description of Artificial Sequence: Synthetic oligonucleotide
  Target: LAMA2; (-) strand; PAM type: YTN; PAM sequence: CTT
agttttcacattttaaactg

SEQ ID NO: 294805 - DNA, 20 bp, Artificial Sequence
  Description of Artificial Sequence: Synthetic oligonucleotide
  Target: LAMA2; (-) strand; PAM type: YTN; PAM sequence: TTC
ttagttttcacattttaaac

SEQ ID NO: 294806 - DNA, 20 bp, Artificial Sequence
  Description of Artificial Sequence: Synthetic oligonucleotide
  Target: LAMA2; (-) strand; PAM type: YTN; PAM sequence: TTT
cttagttttcacattttaaa

SEQ ID NO: 294807 - DNA, 20 bp, Artificial Sequence
  Description of Artificial Sequence: Synthetic oligonucleotide
  Target: LAMA2; (-) strand; PAM type: YTN; PAM sequence: TTT
tcttagttttcacattttaa

SEQ ID NO: 294808 - DNA, 20 bp, Artificial Sequence
  Description of Artificial Sequence: Synthetic oligonucleotide
  Target: LAMA2; (-) strand; PAM type: YTN; PAM sequence: TTT
ttcttagttttcacatttta

SEQ ID NO: 294809 - DNA, 20 bp, Artificial Sequence
  Description of Artificial Sequence: Synthetic oligonucleotide
  Target: LAMA2; (-) strand; PAM type: YTN; PAM sequence: TTG
tttttcttagttttcacatt

SEQ ID NO: 294810 - DNA, 20 bp, Artificial Sequence
  Description of Artificial Sequence: Synthetic oligonucleotide
  Target: LAMA2; (-) strand; PAM type: YTN; PAM sequence: TTG
tattgtttttcttagttttc

SEQ ID NO: 294811 - DNA, 20 bp, Artificial Sequence
  Description of Artificial Sequence: Synthetic oligonucleotide
  Target: LAMA2; (-) strand; PAM type: YTN; PAM sequence: CTT
gtattgtttttcttagtttt

SEQ ID NO: 294812 - DNA, 20 bp, Artificial Sequence
  Description of Artificial Sequence: Synthetic oligonucleotide
  Target: LAMA2; (-) strand; PAM type: YTN; PAM sequence: CTA
cttgtattgtttttcttagt

SEQ ID NO: 294813 - DNA, 20 bp, Artificial Sequence
  Description of Artificial Sequence: Synthetic oligonucleotide
  Target: LAMA2; (-) strand; PAM type: YTN; PAM sequence: CTC
catggctacttgtattgttt

SEQ ID NO: 294814 - DNA, 20 bp, Artificial Sequence
  Description of Artificial Sequence: Synthetic oligonucleotide
  Target: LAMA2; (-) strand; PAM type: YTN; PAM sequence: TTC
tccatggctacttgtattgt

SEQ ID NO: 294815 - DNA, 20 bp, Artificial Sequence
  Description of Artificial Sequence: Synthetic oligonucleotide
  Target: LAMA2; (-) strand; PAM type: YTN; PAM sequence: CTC
atcagtacaggaattctcca

SEQ ID NO: 294816 - DNA, 20 bp, Artificial Sequence
  Description of Artificial Sequence: Synthetic oligonucleotide
  Target: LAMA2; (-) strand; PAM type: YTN; PAM sequence: TTC
cccaaatcccaaagagagct

SEQ ID NO: 294817 - DNA, 20 bp, Artificial Sequence
  Description of Artificial Sequence: Synthetic oligonucleotide
  Target: LAMA2; (-) strand; PAM type: YTN; PAM sequence: TTT
ccccaaatcccaaagagagc

SEQ ID NO: 294818 - DNA, 20 bp, Artificial Sequence
  Description of Artificial Sequence: Synthetic oligonucleotide
  Target: LAMA2; (-) strand; PAM type: YTN; PAM sequence: TTT
tccccaaatcccaaagagag

SEQ ID NO: 294819 - DNA, 20 bp, Artificial Sequence
  Description of Artificial Sequence: Synthetic oligonucleotide
  Target: LAMA2; (-) strand; PAM type: YTN; PAM sequence: CTT
ttccccaaatcccaaagaga

SEQ ID NO: 294820 - DNA, 20 bp, Artificial Sequence
  Description of Artificial Sequence: Synthetic oligonucleotide
  Target: LAMA2; (-) strand; PAM type: YTN; PAM sequence: TTC
ttttccccaaatcccaaaga

SEQ ID NO: 294821 - DNA, 20 bp, Artificial Sequence
  Description of Artificial Sequence: Synthetic oligonucleotide
  Target: LAMA2; (-) strand; PAM type: YTN; PAM sequence: CTT
cttttccccaaatcccaaag

SEQ ID NO: 294822 - DNA, 20 bp, Artificial Sequence
  Description of Artificial Sequence: Synthetic oligonucleotide
  Target: LAMA2; (-) strand; PAM type: YTN; PAM sequence: CTC
acttcttttccccaaatccc

SEQ ID NO: 294823 - DNA, 20 bp, Artificial Sequence
  Description of Artificial Sequence: Synthetic oligonucleotide
  Target: LAMA2; (-) strand; PAM type: YTN; PAM sequence: CTG
tgctcacttcttttccccaa

SEQ ID NO: 294824 - DNA, 20 bp, Artificial Sequence
  Description of Artificial Sequence: Synthetic oligonucleotide
  Target: LAMA2; (-) strand; PAM type: YTN; PAM sequence: TTC
tgtgctcacttcttttcccc

SEQ ID NO: 294825 - DNA, 20 bp, Artificial Sequence
  Description of Artificial Sequence: Synthetic oligonucleotide
  Target: LAMA2; (-) strand; PAM type: YTN; PAM sequence: CTT
ctgtgctcacttcttttccc

SEQ ID NO: 294826 - DNA, 20 bp, Artificial Sequence
  Description of Artificial Sequence: Synthetic oligonucleotide
  Target: LAMA2; (-) strand; PAM type: YTN; PAM sequence: TTC
cttctgtgctcacttctttt

SEQ ID NO: 294827 - DNA, 20 bp, Artificial Sequence
  Description of Artificial Sequence: Synthetic oligonucleotide
  Target: LAMA2; (-) strand; PAM type: YTN; PAM sequence: TTT
ccttctgtgctcacttcttt

SEQ ID NO: 294828 - DNA, 20 bp, Artificial Sequence
  Description of Artificial Sequence: Synthetic oligonucleotide
  Target: LAMA2; (-) strand; PAM type: YTN; PAM sequence: CTT
tccttctgtgctcacttctt

SEQ ID NO: 294829 - DNA, 20 bp, Artificial Sequence
  Description of Artificial Sequence: Synthetic oligonucleotide
  Target: LAMA2; (-) strand; PAM type: YTN; PAM sequence: TTC
tttccttctgtgctcacttc

SEQ ID NO: 294830 - DNA, 20 bp, Artificial Sequence
  Description of Artificial Sequence: Synthetic oligonucleotide
  Target: LAMA2; (-) strand; PAM type: YTN; PAM sequence: CTA
ttctttccttctgtgctcac

SEQ ID NO: 294831 - DNA, 20 bp, Artificial Sequence
  Description of Artificial Sequence: Synthetic oligonucleotide
  Target: LAMA2; (-) strand; PAM type: YTN; PAM sequence: CTC
tattctttccttctgtgctc

SEQ ID NO: 294832 - DNA, 20 bp, Artificial Sequence
  Description of Artificial Sequence: Synthetic oligonucleotide
  Target: LAMA2; (-) strand; PAM type: YTN; PAM sequence: TTC
ctctattctttccttctgtg

SEQ ID NO: 294833 - DNA, 20 bp, Artificial Sequence
  Description of Artificial Sequence: Synthetic oligonucleotide
  Target: LAMA2; (-) strand; PAM type: YTN; PAM sequence: TTT
cctctattctttccttctgt

SEQ ID NO: 294834 - DNA, 20 bp, Artificial Sequence
  Description of Artificial Sequence: Synthetic oligonucleotide
  Target: LAMA2; (-) strand; PAM type: YTN; PAM sequence: CTT
tcctctattctttccttctg

SEQ ID NO: 294835 - DNA, 20 bp, Artificial Sequence
  Description of Artificial Sequence: Synthetic oligonucleotide
  Target: LAMA2; (-) strand; PAM type: YTN; PAM sequence: TTC
ctttcctctattctttcctt

SEQ ID NO: 294836 - DNA, 20 bp, Artificial Sequence
  Description of Artificial Sequence: Synthetic oligonucleotide
  Target: LAMA2; (-) strand; PAM type: YTN; PAM sequence: TTT
cctttcctctattctttcct

SEQ ID NO: 294837 - DNA, 20 bp, Artificial Sequence
  Description of Artificial Sequence: Synthetic oligonucleotide
  Target: LAMA2; (-) strand; PAM type: YTN; PAM sequence: CTT
tcctttcctctattctttcc

SEQ ID NO: 294838 - DNA, 20 bp, Artificial Sequence
  Description of Artificial Sequence: Synthetic oligonucleotide
  Target: LAMA2; (-) strand; PAM type: YTN; PAM sequence: CTA
gggaaatcgctttcctttcc

SEQ ID NO: 294839 - DNA, 20 bp, Artificial Sequence
  Description of Artificial Sequence: Synthetic oligonucleotide
  Target: LAMA2; (-) strand; PAM type: YTN; PAM sequence: CTG
ctagggaaatcgctttcctt

SEQ ID NO: 294840 - DNA, 20 bp, Artificial Sequence
  Description of Artificial Sequence: Synthetic oligonucleotide
  Target: LAMA2; (-) strand; PAM type: YTN; PAM sequence: CTA
aagctgctagggaaatcgct

SEQ ID NO: 294841 - DNA, 20 bp, Artificial Sequence
  Description of Artificial Sequence: Synthetic oligonucleotide
  Target: LAMA2; (-) strand; PAM type: YTN; PAM sequence: TTA
aaggtgtagcactaaagctg

SEQ ID NO: 294842 - DNA, 20 bp, Artificial Sequence
  Description of Artificial Sequence: Synthetic oligonucleotide
  Target: LAMA2; (-) strand; PAM type: YTN; PAM sequence: CTT
aaaggtgtagcactaaagct

SEQ ID NO: 294843 - DNA, 20 bp, Artificial Sequence
  Description of Artificial Sequence: Synthetic oligonucleotide
  Target: LAMA2; (-) strand; PAM type: YTN; PAM sequence: TTA
ggtcttaaaggtgtagcact

SEQ ID NO: 294844 - DNA, 20 bp, Artificial Sequence
  Description of Artificial Sequence: Synthetic oligonucleotide
  Target: LAMA2; (-) strand; PAM type: YTN; PAM sequence: CTT
aggtcttaaaggtgtagcac

SEQ ID NO: 294845 - DNA, 20 bp, Artificial Sequence
  Description of Artificial Sequence: Synthetic oligonucleotide
  Target: LAMA2; (-) strand; PAM type: YTN; PAM sequence: CTG
tacttaggtcttaaaggtgt

SEQ ID NO: 294846 - DNA, 20 bp, Artificial Sequence
  Description of Artificial Sequence: Synthetic oligonucleotide
  Target: LAMA2; (-) strand; PAM type: YTN; PAM sequence: TTG
actgtacttaggtcttaaag

SEQ ID NO: 294847 - DNA, 20 bp, Artificial Sequence
  Description of Artificial Sequence: Synthetic oligonucleotide
  Target: LAMA2; (-) strand; PAM type: YTN; PAM sequence: CTT
gactgtacttaggtcttaaa

SEQ ID NO: 294848 - DNA, 20 bp, Artificial Sequence
  Description of Artificial Sequence: Synthetic oligonucleotide
  Target: LAMA2; (-) strand; PAM type: YTN; PAM sequence: TTG
gccttgactgtacttaggtc

SEQ ID NO: 294849 - DNA, 20 bp, Artificial Sequence
  Description of Artificial Sequence: Synthetic oligonucleotide
  Target: LAMA2; (-) strand; PAM type: YTN; PAM sequence: TTT
ggccttgactgtacttaggt

SEQ ID NO: 294850 - DNA, 20 bp, Artificial Sequence
  Description of Artificial Sequence: Synthetic oligonucleotide
  Target: LAMA2; (-) strand; PAM type: YTN; PAM sequence: CTT
tggccttgactgtacttagg

SEQ ID NO: 294851 - DNA, 20 bp, Artificial Sequence
  Description of Artificial Sequence: Synthetic oligonucleotide
  Target: LAMA2; (-) strand; PAM type: YTN; PAM sequence: TTA
tcctttggccttgactgtac

SEQ ID NO: 294852 - DNA, 20 bp, Artificial Sequence
  Description of Artificial Sequence: Synthetic oligonucleotide
  Target: LAMA2; (-) strand; PAM type: YTN; PAM sequence: TTT
atcctttggccttgactgta

SEQ ID NO: 294853 - DNA, 20 bp, Artificial Sequence
  Description of Artificial Sequence: Synthetic oligonucleotide
  Target: LAMA2; (-) strand; PAM type: YTN; PAM sequence: TTA
aatacatatcagtatccaat

SEQ ID NO: 294854 - DNA, 20 bp, Artificial Sequence
  Description of Artificial Sequence: Synthetic oligonucleotide
  Target: LAMA2; (-) strand; PAM type: YTN; PAM sequence: TTT
aaatacatatcagtatccaa

SEQ ID NO: 294855 - DNA, 20 bp, Artificial Sequence
  Description of Artificial Sequence: Synthetic oligonucleotide
  Target: LAMA2; (-) strand; PAM type: YTN; PAM sequence: CTT
taaatacatatcagtatcca

SEQ ID NO: 294856 - DNA, 20 bp, Artificial Sequence
  Description of Artificial Sequence: Synthetic oligonucleotide
  Target: LAMA2; (-) strand; PAM type: YTN; PAM sequence: CTC
tttaaatacatatcagtatc

SEQ ID NO: 294857 - DNA, 20 bp, Artificial Sequence
  Description of Artificial Sequence: Synthetic oligonucleotide
  Target: LAMA2; (-) strand; PAM type: YTN; PAM sequence: TTC
tctttaaatacatatcagta

SEQ ID NO: 294858 - DNA, 20 bp, Artificial Sequence
  Description of Artificial Sequence: Synthetic oligonucleotide
  Target: LAMA2; (-) strand; PAM type: YTN; PAM sequence: TTT
ctctttaaatacatatcagt

SEQ ID NO: 294859 - DNA, 20 bp, Artificial Sequence
  Description of Artificial Sequence: Synthetic oligonucleotide
  Target: LAMA2; (-) strand; PAM type: YTN; PAM sequence: TTT
tctctttaaatacatatcag

SEQ ID NO: 294860 - DNA, 20 bp, Artificial Sequence
  Description of Artificial Sequence: Synthetic oligonucleotide
  Target: LAMA2; (-) strand; PAM type: YTN; PAM sequence: TTG
ataagtggaaaatgtatgtt

SEQ ID NO: 294861 - DNA, 20 bp, Artificial Sequence
  Description of Artificial Sequence: Synthetic oligonucleotide
  Target: LAMA2; (-) strand; PAM type: YTN; PAM sequence: CTT
gataagtggaaaatgtatgt

SEQ ID NO: 294862 - DNA, 20 bp, Artificial Sequence
  Description of Artificial Sequence: Synthetic oligonucleotide
  Target: LAMA2; (-) strand; PAM type: YTN; PAM sequence: TTC
cttgataagtggaaaatgta

SEQ ID NO: 294863 - DNA, 20 bp, Artificial Sequence
  Description of Artificial Sequence: Synthetic oligonucleotide
  Target: LAMA2; (-) strand; PAM type: YTN; PAM sequence: CTA
aacaaggattccttgataag

SEQ ID NO: 294864 - DNA, 20 bp, Artificial Sequence
  Description of Artificial Sequence: Synthetic oligonucleotide
  Target: LAMA2; (-) strand; PAM type: YTN; PAM sequence: TTA
atgtctaaacaaggattcct

SEQ ID NO: 294865 - DNA, 20 bp, Artificial Sequence
  Description of Artificial Sequence: Synthetic oligonucleotide
  Target: LAMA2; (-) strand; PAM type: YTN; PAM sequence: TTA
tacattaatgtctaaacaag

SEQ ID NO: 294866 - DNA, 20 bp, Artificial Sequence
  Description of Artificial Sequence: Synthetic oligonucleotide
  Target: LAMA2; (-) strand; PAM type: YTN; PAM sequence: TTT
atacattaatgtctaaacaa

SEQ ID NO: 294867 - DNA, 20 bp, Artificial Sequence
  Description of Artificial Sequence: Synthetic oligonucleotide
  Target: LAMA2; (-) strand; PAM type: YTN; PAM sequence: TTA
cagtaatatttatacattaa

SEQ ID NO: 294868 - DNA, 20 bp, Artificial Sequence
  Description of Artificial Sequence: Synthetic oligonucleotide
  Target: LAMA2; (-) strand; PAM type: YTN; PAM sequence: TTT
acagtaatatttatacatta

SEQ ID NO: 294869 - DNA, 20 bp, Artificial Sequence
  Description of Artificial Sequence: Synthetic oligonucleotide
  Target: LAMA2; (-) strand; PAM type: YTN; PAM sequence: TTG
ggcatttacagtaatattta

SEQ ID NO: 294870 - DNA, 20 bp, Artificial Sequence
  Description of Artificial Sequence: Synthetic oligonucleotide
  Target: LAMA2; (-) strand; PAM type: YTN; PAM sequence: CTT
gggcatttacagtaatattt

SEQ ID NO: 294871 - DNA, 20 bp, Artificial Sequence
  Description of Artificial Sequence: Synthetic oligonucleotide
  Target: LAMA2; (-) strand; PAM type: YTN; PAM sequence: TTG
gtgggtcttgggcatttaca

SEQ ID NO: 294872 - DNA, 20 bp, Artificial Sequence
  Description of Artificial Sequence: Synthetic oligonucleotide
  Target: LAMA2; (-) strand; PAM type: YTN; PAM sequence: TTT
ggtgggtcttgggcatttac

SEQ ID NO: 294873 - DNA, 20 bp, Artificial Sequence
  Description of Artificial Sequence: Synthetic oligonucleotide
  Target: LAMA2; (-) strand; PAM type: YTN; PAM sequence: TTT
tggtgggtcttgggcattta

SEQ ID NO: 294874 - DNA, 20 bp, Artificial Sequence
  Description of Artificial Sequence: Synthetic oligonucleotide
  Target: LAMA2; (-) strand; PAM type: YTN; PAM sequence: CTT
ttggtgggtcttgggcattt

SEQ ID NO: 294875 - DNA, 20 bp, Artificial Sequence
  Description of Artificial Sequence: Synthetic oligonucleotide
  Target: LAMA2; (-) strand; PAM type: YTN; PAM sequence: CTC
ttttggtgggtcttgggcat

SEQ ID NO: 294876 - DNA, 20 bp, Artificial Sequence
  Description of Artificial Sequence: Synthetic oligonucleotide
  Target: LAMA2; (-) strand; PAM type: YTN; PAM sequence: TTA
agctcttttggtgggtcttg

SEQ ID NO: 294877 - DNA, 20 bp, Artificial Sequence
  Description of Artificial Sequence: Synthetic oligonucleotide
  Target: LAMA2; (-) strand; PAM type: YTN; PAM sequence: CTT
aagctcttttggtgggtctt

SEQ ID NO: 294878 - DNA, 20 bp, Artificial Sequence
  Description of Artificial Sequence: Synthetic oligonucleotide
  Target: LAMA2; (-) strand; PAM type: YTN; PAM sequence: CTG
cacttaagctcttttggtgg

SEQ ID NO: 294879 - DNA, 20 bp, Artificial Sequence
  Description of Artificial Sequence: Synthetic oligonucleotide
  Target: LAMA2; (-) strand; PAM type: YTN; PAM sequence: TTA
acactgcacttaagctcttt

SEQ ID NO: 294880 - DNA, 20 bp, Artificial Sequence
  Description of Artificial Sequence: Synthetic oligonucleotide
  Target: LAMA2; (-) strand; PAM type: YTN; PAM sequence: TTG
ttaacactgcacttaagctc

SEQ ID NO: 294881 - DNA, 20 bp, Artificial Sequence
  Description of Artificial Sequence: Synthetic oligonucleotide
  Target: LAMA2; (-) strand; PAM type: YTN; PAM sequence: TTA
ttgttaacactgcacttaag

SEQ ID NO: 294882 - DNA, 20 bp, Artificial Sequence
  Description of Artificial Sequence: Synthetic oligonucleotide
  Target: LAMA2; (-) strand; PAM type: YTN; PAM sequence: CTG
aattattgttaacactgcac

SEQ ID NO: 294883 - DNA, 20 bp, Artificial Sequence
  Description of Artificial Sequence: Synthetic oligonucleotide
  Target: LAMA2; (-) strand; PAM type: YTN; PAM sequence: TTG
agaaactgaattattgttaa

SEQ ID NO: 294884 - DNA, 20 bp, Artificial Sequence
  Description of Artificial Sequence: Synthetic oligonucleotide
  Target: LAMA2; (-) strand; PAM type: YTN; PAM sequence: TTA
ttgagaaactgaattattgt

SEQ ID NO: 294885 - DNA, 20 bp, Artificial Sequence
  Description of Artificial Sequence: Synthetic oligonucleotide
  Target: LAMA2; (-) strand; PAM type: YTN; PAM sequence: TTT
attgagaaactgaattattg

SEQ ID NO: 294886 - DNA, 20 bp, Artificial Sequence
  Description of Artificial Sequence: Synthetic oligonucleotide
  Target: LAMA2; (-) strand; PAM type: YTN; PAM sequence: CTC
aagatgtttattgagaaact

SEQ ID NO: 294887 - DNA, 20 bp, Artificial Sequence
  Description of Artificial Sequence: Synthetic oligonucleotide
  Target: LAMA2; (-) strand; PAM type: YTN; PAM sequence: CTA
ctcaagatgtttattgagaa

SEQ ID NO: 294888 - DNA, 20 bp, Artificial Sequence
  Description of Artificial Sequence: Synthetic oligonucleotide
  Target: LAMA2; (-) strand; PAM type: YTN; PAM sequence: CTA
aaatataaaagccctactca

SEQ ID NO: 294889 - DNA, 20 bp, Artificial Sequence
  Description of Artificial Sequence: Synthetic oligonucleotide
  Target: LAMA2; (-) strand; PAM type: YTN; PAM sequence: TTC
taaaatataaaagccctact

SEQ ID NO: 294890 - DNA, 20 bp, Artificial Sequence
  Description of Artificial Sequence: Synthetic oligonucleotide
  Target: LAMA2; (-) strand; PAM type: YTN; PAM sequence: CTT
ctaaaatataaaagccctac

SEQ ID NO: 294891 - DNA, 20 bp, Artificial Sequence
  Description of Artificial Sequence: Synthetic oligonucleotide
  Target: LAMA2; (-) strand; PAM type: YTN; PAM sequence: TTC
ttctaaaatataaaagccct

SEQ ID NO: 294892 - DNA, 20 bp, Artificial Sequence
  Description of Artificial Sequence: Synthetic oligonucleotide
  Target: LAMA2; (-) strand; PAM type: YTN; PAM sequence: CTT
cttctaaaatataaaagccc

SEQ ID NO: 294893 - DNA, 20 bp, Artificial Sequence
  Description of Artificial Sequence: Synthetic oligonucleotide
  Target: LAMA2; (-) strand; PAM type: YTN; PAM sequence: TTA
atcttcttctaaaatataaa

SEQ ID NO: 294894 - DNA, 20 bp, Artificial Sequence
  Description of Artificial Sequence: Synthetic oligonucleotide
  Target: LAMA2; (-) strand; PAM type: YTN; PAM sequence: TTT
aatcttcttctaaaatataa

SEQ ID NO: 294895 - DNA, 20 bp, Artificial Sequence
  Description of Artificial Sequence: Synthetic oligonucleotide
  Target: LAMA2; (-) strand; PAM type: YTN; PAM sequence: CTT
taatcttcttctaaaatata

SEQ ID NO: 294896 - DNA, 20 bp, Artificial Sequence
  Description of Artificial Sequence: Synthetic oligonucleotide
  Target: LAMA2; (-) strand; PAM type: YTN; PAM sequence: CTG
actttaatcttcttctaaaa

SEQ ID NO: 294897 - DNA, 20 bp, Artificial Sequence
  Description of Artificial Sequence: Synthetic oligonucleotide
  Target: LAMA2; (-) strand; PAM type: YTN; PAM sequence: TTA
tagcactgactttaatcttc

SEQ ID NO: 294898 - DNA, 20 bp, Artificial Sequence
  Description of Artificial Sequence: Synthetic oligonucleotide
  Target: LAMA2; (-) strand; PAM type: YTN; PAM sequence: TTT
atagcactgactttaatctt

SEQ ID NO: 294899 - DNA, 20 bp, Artificial Sequence
  Description of Artificial Sequence: Synthetic oligonucleotide
  Target: LAMA2; (-) strand; PAM type: YTN; PAM sequence: TTT
tatagcactgactttaatct

SEQ ID NO: 294900 - DNA, 20 bp, Artificial Sequence
  Description of Artificial Sequence: Synthetic oligonucleotide
  Target: LAMA2; (-) strand; PAM type: YTN; PAM sequence: TTT
ttatagcactgactttaatc

SEQ ID NO: 294901 - DNA, 20 bp, Artificial Sequence
  Description of Artificial Sequence: Synthetic oligonucleotide
  Target: LAMA2; (-) strand; PAM type: YTN; PAM sequence: CTT
tttatagcactgactttaat

SEQ ID NO: 294902 - DNA, 20 bp, Artificial Sequence
  Description of Artificial Sequence: Synthetic oligonucleotide
  Target: LAMA2; (-) strand; PAM type: YTN; PAM sequence: TTA
tggatgaataagtggaagat

SEQ ID NO: 294903 - DNA, 20 bp, Artificial Sequence
  Description of Artificial Sequence: Synthetic oligonucleotide
  Target: LAMA2; (-) strand; PAM type: YTN; PAM sequence: TTT
atggatgaataagtggaaga

SEQ ID NO: 294904 - DNA, 20 bp, Artificial Sequence
  Description of Artificial Sequence: Synthetic oligonucleotide
  Target: LAMA2; (-) strand; PAM type: YTN; PAM sequence: CTT
tatggatgaataagtggaag

SEQ ID NO: 294905 - DNA, 20 bp, Artificial Sequence
  Description of Artificial Sequence: Synthetic oligonucleotide
  Target: LAMA2; (-) strand; PAM type: YTN; PAM sequence: TTC
tttatggatgaataagtgga

SEQ ID NO: 294906 - DNA, 20 bp, Artificial Sequence
  Description of Artificial Sequence: Synthetic oligonucleotide
  Target: LAMA2; (-) strand; PAM type: YTN; PAM sequence: TTT
ctttatggatgaataagtgg

SEQ ID NO: 294907 - DNA, 20 bp, Artificial Sequence
  Description of Artificial Sequence: Synthetic oligonucleotide
  Target: LAMA2; (-) strand; PAM type: YTN; PAM sequence: TTT
tctttatggatgaataagtg

SEQ ID NO: 294908 - DNA, 20 bp, Artificial Sequence
  Description of Artificial Sequence: Synthetic oligonucleotide
  Target: LAMA2; (-) strand; PAM type: YTN; PAM sequence: TTG
tcatgattttctttatggat

SEQ ID NO: 294909 - DNA, 20 bp, Artificial Sequence
  Description of Artificial Sequence: Synthetic oligonucleotide
  Target: LAMA2; (-) strand; PAM type: YTN; PAM sequence: TTT
gtcatgattttctttatgga

SEQ ID NO: 294910 - DNA, 20 bp, Artificial Sequence
  Description of Artificial Sequence: Synthetic oligonucleotide
  Target: LAMA2; (-) strand; PAM type: YTN; PAM sequence: TTA
tttgtcatgattttctttat

SEQ ID NO: 294911 - DNA, 20 bp, Artificial Sequence
  Description of Artificial Sequence: Synthetic oligonucleotide
  Target: LAMA2; (-) strand; PAM type: YTN; PAM sequence: CTT
atttgtcatgattttcttta

SEQ ID NO: 294912 - DNA, 20 bp, Artificial Sequence
  Description of Artificial Sequence: Synthetic oligonucleotide
  Target: LAMA2; (-) strand; PAM type: YTN; PAM sequence: CTG
gtgcttatttgtcatgattt

SEQ ID NO: 294913 - DNA, 20 bp, Artificial Sequence
  Description of Artificial Sequence: Synthetic oligonucleotide
  Target: LAMA2; (-) strand; PAM type: YTN; PAM sequence: CTA
aaatcacatctggtgcttat

SEQ ID NO: 294914 - DNA, 20 bp, Artificial Sequence
  Description of Artificial Sequence: Synthetic oligonucleotide
  Target: LAMA2; (-) strand; PAM type: YTN; PAM sequence: CTA
ataaatgtgggctaaaatca

SEQ ID NO: 294915 - DNA, 20 bp, Artificial Sequence
  Description of Artificial Sequence: Synthetic oligonucleotide
  Target: LAMA2; (-) strand; PAM type: YTN; PAM sequence: CTC
taataaatgtgggctaaaat

SEQ ID NO: 294916 - DNA, 20 bp, Artificial Sequence
  Description of Artificial Sequence: Synthetic oligonucleotide
  Target: LAMA2; (-) strand; PAM type: YTN; PAM sequence: TTC
tctaataaatgtgggctaaa

SEQ ID NO: 294917 - DNA, 20 bp, Artificial Sequence
  Description of Artificial Sequence: Synthetic oligonucleotide
  Target: LAMA2; (-) strand; PAM type: YTN; PAM sequence: TTT
ctctaataaatgtgggctaa

SEQ ID NO: 294918 - DNA, 20 bp, Artificial Sequence
  Description of Artificial Sequence: Synthetic oligonucleotide
  Target: LAMA2; (-) strand; PAM type: YTN; PAM sequence: TTA
atttctctaataaatgtggg

SEQ ID NO: 294919 - DNA, 20 bp, Artificial Sequence
  Description of Artificial Sequence: Synthetic oligonucleotide
  Target: LAMA2; (-) strand; PAM type: YTN; PAM sequence: TTC
atgagtcaataattaatttc

SEQ ID NO: 294920 - DNA, 20 bp, Artificial Sequence
  Description of Artificial Sequence: Synthetic oligonucleotide
  Target: LAMA2; (-) strand; PAM type: YTN; PAM sequence: TTT
catgagtcaataattaattt

SEQ ID NO: 294921 - DNA, 20 bp, Artificial Sequence
  Description of Artificial Sequence: Synthetic oligonucleotide
  Target: LAMA2; (-) strand; PAM type: YTN; PAM sequence: CTT
tcatgagtcaataattaatt

SEQ ID NO: 294922 - DNA, 20 bp, Artificial Sequence
  Description of Artificial Sequence: Synthetic oligonucleotide
  Target: LAMA2; (-) strand; PAM type: YTN; PAM sequence: TTC
tttcatgagtcaataattaa

SEQ ID NO: 294923 - DNA, 20 bp, Artificial Sequence
  Description of Artificial Sequence: Synthetic oligonucleotide
  Target: LAMA2; (-) strand; PAM type: YTN; PAM sequence: CTT
ctttcatgagtcaataatta

SEQ ID NO: 294924 - DNA, 20 bp, Artificial Sequence
  Description of Artificial Sequence: Synthetic oligonucleotide
  Target: LAMA2; (-) strand; PAM type: YTN; PAM sequence: TTC
ttctttcatgagtcaataat

SEQ ID NO: 294925 - DNA, 20 bp, Artificial Sequence
  Description of Artificial Sequence: Synthetic oligonucleotide
  Target: LAMA2; (-) strand; PAM type: YTN; PAM sequence: TTT
cttctttcatgagtcaataa

SEQ ID NO: 294926 - DNA, 20 bp, Artificial Sequence
  Description of Artificial Sequence: Synthetic oligonucleotide
  Target: LAMA2; (-) strand; PAM type: YTN; PAM sequence: TTT
tcttctttcatgagtcaata

SEQ ID NO: 294927 - DNA, 20 bp, Artificial Sequence
  Description of Artificial Sequence: Synthetic oligonucleotide
  Target: LAMA2; (-) strand; PAM type: YTN; PAM sequence: TTG
cataattttcttctttcatg

SEQ ID NO: 294928 - DNA, 20 bp, Artificial Sequence
  Description of Artificial Sequence: Synthetic oligonucleotide
  Target: LAMA2; (-) strand; PAM type: YTN; PAM sequence: TTG
aaagcaccaaacaatgaatc

SEQ ID NO: 294929 - DNA, 20 bp, Artificial Sequence
  Description of Artificial Sequence: Synthetic oligonucleotide
  Target: LAMA2; (-) strand; PAM type: YTN; PAM sequence: CTT
gaaagcaccaaacaatgaat

SEQ ID NO: 294930 - DNA, 20 bp, Artificial Sequence
  Description of Artificial Sequence: Synthetic oligonucleotide
  Target: LAMA2; (-) strand; PAM type: YTN; PAM sequence: TTC
ttgaaagcaccaaacaatga

SEQ ID NO: 294931 - DNA, 20 bp, Artificial Sequence
  Description of Artificial Sequence: Synthetic oligonucleotide
  Target: LAMA2; (-) strand; PAM type: YTN; PAM sequence: TTG
ttcttgaaagcaccaaacaa

SEQ ID NO: 294932 - DNA, 20 bp, Artificial Sequence
  Description of Artificial Sequence: Synthetic oligonucleotide
  Target: LAMA2; (-) strand; PAM type: YTN; PAM sequence: TTT
gttcttgaaagcaccaaaca

SEQ ID NO: 294933 - DNA, 20 bp, Artificial Sequence
  Description of Artificial Sequence: Synthetic oligonucleotide
  Target: LAMA2; (-) strand; PAM type: YTN; PAM sequence: CTT
tgttcttgaaagcaccaaac

SEQ ID NO: 294934 - DNA, 20 bp, Artificial Sequence
  Description of Artificial Sequence: Synthetic oligonucleotide
  Target: LAMA2; (-) strand; PAM type: YTN; PAM sequence: CTG
gcatctttgttcttgaaagc

SEQ ID NO: 294935 - DNA, 20 bp, Artificial Sequence
  Description of Artificial Sequence: Synthetic oligonucleotide
  Target: LAMA2; (-) strand; PAM type: YTN; PAM sequence: TTA
tcaaaactggcatctttgtt

SEQ ID NO: 294936 - DNA, 20 bp, Artificial Sequence
  Description of Artificial Sequence: Synthetic oligonucleotide
  Target: LAMA2; (-) strand; PAM type: YTN; PAM sequence: TTT
atcaaaactggcatctttgt

SEQ ID NO: 294937 - DNA, 20 bp, Artificial Sequence
  Description of Artificial Sequence: Synthetic oligonucleotide
  Target: LAMA2; (-) strand; PAM type: YTN; PAM sequence: TTA
catttatcaaaactggcatc

SEQ ID NO: 294938 - DNA, 20 bp, Artificial Sequence
  Description of Artificial Sequence: Synthetic oligonucleotide
  Target: LAMA2; (-) strand; PAM type: YTN; PAM sequence: TTA
tattacatttatcaaaactg

SEQ ID NO: 294939 - DNA, 20 bp, Artificial Sequence
  Description of Artificial Sequence: Synthetic oligonucleotide
  Target: LAMA2; (-) strand; PAM type: YTN; PAM sequence: TTT
atattacatttatcaaaact

SEQ ID NO: 294940 - DNA, 20 bp, Artificial Sequence
  Description of Artificial Sequence: Synthetic oligonucleotide
  Target: LAMA2; (-) strand; PAM type: YTN; PAM sequence: CTG
agcagagatttatattacat

SEQ ID NO: 294941 - DNA, 20 bp, Artificial Sequence
  Description of Artificial Sequence: Synthetic oligonucleotide
  Target: LAMA2; (-) strand; PAM type: YTN; PAM sequence: CTG
ggtcctgagcagagatttat

SEQ ID NO: 294942 - DNA, 20 bp, Artificial Sequence
  Description of Artificial Sequence: Synthetic oligonucleotide
  Target: LAMA2; (-) strand; PAM type: YTN; PAM sequence: TTC
ctgggtcctgagcagagatt

SEQ ID NO: 294943 - DNA, 20 bp, Artificial Sequence
  Description of Artificial Sequence: Synthetic oligonucleotide
  Target: LAMA2; (-) strand; PAM type: YTN; PAM sequence: TTT
cctgggtcctgagcagagat

SEQ ID NO: 294944 - DNA, 20 bp, Artificial Sequence
  Description of Artificial Sequence: Synthetic oligonucleotide
  Target: LAMA2; (-) strand; PAM type: YTN; PAM sequence: TTG
aatttcctgggtcctgagca

SEQ ID NO: 294945 - DNA, 20 bp, Artificial Sequence
  Description of Artificial Sequence: Synthetic oligonucleotide
  Target: LAMA2; (-) strand; PAM type: YTN; PAM sequence: CTT
gaatttcctgggtcctgagc

SEQ ID NO: 294946 - DNA, 20 bp, Artificial Sequence
  Description of Artificial Sequence: Synthetic oligonucleotide
  Target: LAMA2; (-) strand; PAM type: YTN; PAM sequence: CTC
ttgaatttcctgggtcctga

SEQ ID NO: 294947 - DNA, 20 bp, Artificial Sequence
  Description of Artificial Sequence: Synthetic oligonucleotide
  Target: LAMA2; (-) strand; PAM type: YTN; PAM sequence: TTG
ataagcatctcttgaatttc

SEQ ID NO: 294948 - DNA, 20 bp, Artificial Sequence
  Description of Artificial Sequence: Synthetic oligonucleotide
  Target: LAMA2; (-) strand; PAM type: YTN; PAM sequence: TTC
gttgataagcatctcttgaa

SEQ ID NO: 294949 - DNA, 20 bp, Artificial Sequence
  Description of Artificial Sequence: Synthetic oligonucleotide
  Target: LAMA2; (-) strand; PAM type: YTN; PAM sequence: TTC
aggagtgcgtatgattcgtt

SEQ ID NO: 294950 - DNA, 20 bp, Artificial Sequence
  Description of Artificial Sequence: Synthetic oligonucleotide
  Target: LAMA2; (-) strand; PAM type: YTN; PAM sequence: TTA
gattcaggagtgcgtatgat

SEQ ID NO: 294951 - DNA, 20 bp, Artificial Sequence
  Description of Artificial Sequence: Synthetic oligonucleotide
  Target: LAMA2; (-) strand; PAM type: YTN; PAM sequence: CTT
agattcaggagtgcgtatga

SEQ ID NO: 294952 - DNA, 20 bp, Artificial Sequence
  Description of Artificial Sequence: Synthetic oligonucleotide
  Target: LAMA2; (-) strand; PAM type: YTN; PAM sequence: TTC
ttagattcaggagtgcgtat

SEQ ID NO: 294953 - DNA, 20 bp, Artificial Sequence
  Description of Artificial Sequence: Synthetic oligonucleotide
  Target: LAMA2; (-) strand; PAM type: YTN; PAM sequence: TTG
gaaatgagttcttagattca

SEQ ID NO: 294954 - DNA, 20 bp, Artificial Sequence
  Description of Artificial Sequence: Synthetic oligonucleotide
  Target: LAMA2; (-) strand; PAM type: YTN; PAM sequence: TTT
ggaaatgagttcttagattc

SEQ ID NO: 294955 - DNA, 20 bp, Artificial Sequence
  Description of Artificial Sequence: Synthetic oligonucleotide
  Target: LAMA2; (-) strand; PAM type: YTN; PAM sequence: CTG
acatttggaaatgagttctt

SEQ ID NO: 294956 - DNA, 20 bp, Artificial Sequence
  Description of Artificial Sequence: Synthetic oligonucleotide
  Target: LAMA2; (-) strand; PAM type: YTN; PAM sequence: TTG
gtggctgacatttggaaatg

SEQ ID NO: 294957 - DNA, 20 bp, Artificial Sequence
  Description of Artificial Sequence: Synthetic oligonucleotide
  Target: LAMA2; (-) strand; PAM type: YTN; PAM sequence: CTG
cagattggtggctgacattt

SEQ ID NO: 294958 - DNA, 20 bp, Artificial Sequence
  Description of Artificial Sequence: Synthetic oligonucleotide
  Target: LAMA2; (-) strand; PAM type: YTN; PAM sequence: CTA
actgcagattggtggctgac

SEQ ID NO: 294959 - DNA, 20 bp, Artificial Sequence
  Description of Artificial Sequence: Synthetic oligonucleotide
  Target: LAMA2; (-) strand; PAM type: YTN; PAM sequence: CTA
actaactgcagattggtggc

SEQ ID NO: 294960 - DNA, 20 bp, Artificial Sequence
  Description of Artificial Sequence: Synthetic oligonucleotide
  Target: LAMA2; (-) strand; PAM type: YTN; PAM sequence: TTC
taactaactgcagattggtg

SEQ ID NO: 294961 - DNA, 20 bp, Artificial Sequence
  Description of Artificial Sequence: Synthetic oligonucleotide
  Target: LAMA2; (-) strand; PAM type: YTN; PAM sequence: TTT
ctaactaactgcagattggt

SEQ ID NO: 294962 - DNA, 20 bp, Artificial Sequence
  Description of Artificial Sequence: Synthetic oligonucleotide
  Target: LAMA2; (-) strand; PAM type: YTN; PAM sequence: TTT
tctaactaactgcagattgg

SEQ ID NO: 294963 - DNA, 20 bp, Artificial Sequence
  Description of Artificial Sequence: Synthetic oligonucleotide
  Target: LAMA2; (-) strand; PAM type: YTN; PAM sequence: CTT
ttctaactaactgcagattg

SEQ ID NO: 294964 - DNA, 20 bp, Artificial Sequence
  Description of Artificial Sequence: Synthetic oligonucleotide
  Target: LAMA2; (-) strand; PAM type: YTN; PAM sequence: TTC
aggtcagaataaagcaatgg

SEQ ID NO: 294965 - DNA, 20 bp, Artificial Sequence
  Description of Artificial Sequence: Synthetic oligonucleotide
  Target: LAMA2; (-) strand; PAM type: YTN; PAM sequence: CTT
caggtcagaataaagcaatg

SEQ ID NO: 294966 - DNA, 20 bp, Artificial Sequence
  Description of Artificial Sequence: Synthetic oligonucleotide
  Target: LAMA2; (-) strand; PAM type: YTN; PAM sequence: TTA
acttcaggtcagaataaagc

SEQ ID NO: 294967 - DNA, 20 bp, Artificial Sequence
  Description of Artificial Sequence: Synthetic oligonucleotide
  Target: LAMA2; (-) strand; PAM type: YTN; PAM sequence: TTT
aacttcaggtcagaataaag

SEQ ID NO: 294968 - DNA, 20 bp, Artificial Sequence
  Description of Artificial Sequence: Synthetic oligonucleotide
  Target: LAMA2; (-) strand; PAM type: YTN; PAM sequence: CTC
atttaacttcaggtcagaat

SEQ ID NO: 294969 - DNA, 20 bp, Artificial Sequence
  Description of Artificial Sequence: Synthetic oligonucleotide
  Target: LAMA2; (-) strand; PAM type: YTN; PAM sequence: CTG
tcactcatttaacttcaggt

SEQ ID NO: 294970 - DNA, 20 bp, Artificial Sequence
  Description of Artificial Sequence: Synthetic oligonucleotide
  Target: LAMA2; (-) strand; PAM type: YTN; PAM sequence: TTC
acccccacactgtcactcat

SEQ ID NO: 294971 - DNA, 20 bp, Artificial Sequence
  Description of Artificial Sequence: Synthetic oligonucleotide
  Target: LAMA2; (-) strand; PAM type: YTN; PAM sequence: TTT
cacccccacactgtcactca

SEQ ID NO: 294972 - DNA, 20 bp, Artificial Sequence
  Description of Artificial Sequence: Synthetic oligonucleotide
  Target: LAMA2; (-) strand; PAM type: YTN; PAM sequence: TTT
tcacccccacactgtcactc

SEQ ID NO: 294973 - DNA, 20 bp, Artificial Sequence
  Description of Artificial Sequence: Synthetic oligonucleotide
  Target: LAMA2; (-) strand; PAM type: YTN; PAM sequence: TTG
gtaacggggccaaaacgttt

SEQ ID NO: 294974 - DNA, 20 bp, Artificial Sequence
  Description of Artificial Sequence: Synthetic oligonucleotide
  Target: LAMA2; (-) strand; PAM type: YTN; PAM sequence: TTA
gggaagtagatagtgcacca

SEQ ID NO: 294975 - DNA, 20 bp, Artificial Sequence
  Description of Artificial Sequence: Synthetic oligonucleotide
  Target: LAMA2; (-) strand; PAM type: YTN; PAM sequence: TTT
agggaagtagatagtgcacc

SEQ ID NO: 294976 - DNA, 20 bp, Artificial Sequence
  Description of Artificial Sequence: Synthetic oligonucleotide
  Target: LAMA2; (-) strand; PAM type: YTN; PAM sequence: TTG
tttagggaagtagatagtgc

SEQ ID NO: 294977 - DNA, 20 bp, Artificial Sequence
  Description of Artificial Sequence: Synthetic oligonucleotide
  Target: LAMA2; (-) strand; PAM type: YTN; PAM sequence: CTT
gtttagggaagtagatagtg

SEQ ID NO: 294978 - DNA, 20 bp, Artificial Sequence
  Description of Artificial Sequence: Synthetic oligonucleotide
  Target: LAMA2; (-) strand; PAM type: YTN; PAM sequence: CTC
ccaaagccttgtttagggaa

SEQ ID NO: 294979 - DNA, 20 bp, Artificial Sequence
  Description of Artificial Sequence: Synthetic oligonucleotide
  Target: LAMA2; (-) strand; PAM type: YTN; PAM sequence: TTA
tggaggaagccatgctccca

SEQ ID NO: 294980 - DNA, 20 bp, Artificial Sequence
  Description of Artificial Sequence: Synthetic oligonucleotide
  Target: LAMA2; (-) strand; PAM type: YTN; PAM sequence: TTG
ggaataattatggaggaagc

SEQ ID NO: 294981 - DNA, 20 bp, Artificial Sequence
  Description of Artificial Sequence: Synthetic oligonucleotide
  Target: LAMA2; (-) strand; PAM type: YTN; PAM sequence: TTA
gagcagtgatgtggttggga

SEQ ID NO: 294982 - DNA, 20 bp, Artificial Sequence
  Description of Artificial Sequence: Synthetic oligonucleotide
  Target: LAMA2; (-) strand; PAM type: YTN; PAM sequence: TTG
attagagcagtgatgtggtt

SEQ ID NO: 294983 - DNA, 20 bp, Artificial Sequence
  Description of Artificial Sequence: Synthetic oligonucleotide
  Target: LAMA2; (-) strand; PAM type: YTN; PAM sequence: CTG
ttgattagagcagtgatgtg

SEQ ID NO: 294984 - DNA, 20 bp, Artificial Sequence
  Description of Artificial Sequence: Synthetic oligonucleotide
  Target: LAMA2; (-) strand; PAM type: YTN; PAM sequence: CTC
gcgtggtggtgcacctgttg

SEQ ID NO: 294985 - DNA, 20 bp, Artificial Sequence
  Description of Artificial Sequence: Synthetic oligonucleotide
  Target: LAMA2; (-) strand; PAM type: YTN; PAM sequence: TTG
ggtggggagtctcgcgtggt

SEQ ID NO: 294986 - DNA, 20 bp, Artificial Sequence
  Description of Artificial Sequence: Synthetic oligonucleotide
  Target: LAMA2; (-) strand; PAM type: YTN; PAM sequence: CTT
gggtggggagtctcgcgtgg

SEQ ID NO: 294987 - DNA, 20 bp, Artificial Sequence
  Description of Artificial Sequence: Synthetic oligonucleotide
  Target: LAMA2; (-) strand; PAM type: YTN; PAM sequence: TTG
taggcagacaggacttgggt

SEQ ID NO: 294988 - DNA, 20 bp, Artificial Sequence
  Description of Artificial Sequence: Synthetic oligonucleotide
  Target: LAMA2; (-) strand; PAM type: YTN; PAM sequence: TTA
caagttgtaggcagacagga

SEQ ID NO: 294989 - DNA, 20 bp, Artificial Sequence
  Description of Artificial Sequence: Synthetic oligonucleotide
  Target: LAMA2; (-) strand; PAM type: YTN; PAM sequence: TTG
gcaggttacaagttgtaggc

SEQ ID NO: 294990 - DNA, 20 bp, Artificial Sequence
  Description of Artificial Sequence: Synthetic oligonucleotide
  Target: LAMA2; (-) strand; PAM type: YTN; PAM sequence: CTT
ggcaggttacaagttgtagg

SEQ ID NO: 294991 - DNA, 20 bp, Artificial Sequence
  Description of Artificial Sequence: Synthetic oligonucleotide
  Target: LAMA2; (-) strand; PAM type: YTN; PAM sequence: TTG
cttggcaggttacaagttgt

SEQ ID NO: 294992 - DNA, 20 bp, Artificial Sequence
  Description of Artificial Sequence: Synthetic oligonucleotide
  Target: LAMA2; (-) strand; PAM type: YTN; PAM sequence: TTT
gcttggcaggttacaagttg

SEQ ID NO: 294993 - DNA, 20 bp, Artificial Sequence
  Description of Artificial Sequence: Synthetic oligonucleotide
  Target: LAMA2; (-) strand; PAM type: YTN; PAM sequence: CTT
tgcttggcaggttacaagtt

SEQ ID NO: 294994 - DNA, 20 bp, Artificial Sequence
  Description of Artificial Sequence: Synthetic oligonucleotide
  Target: LAMA2; (-) strand; PAM type: YTN; PAM sequence: TTG
cctttgcttggcaggttaca

SEQ ID NO: 294995 - DNA, 20 bp, Artificial Sequence
  Description of Artificial Sequence: Synthetic oligonucleotide
  Target: LAMA2; (-) strand; PAM type: YTN; PAM sequence: TTT
gcctttgcttggcaggttac

SEQ ID NO: 294996 - DNA, 20 bp, Artificial Sequence
  Description of Artificial Sequence: Synthetic oligonucleotide
  Target: LAMA2; (-) strand; PAM type: YTN; PAM sequence: TTC
atttgcctttgcttggcagg

SEQ ID NO: 294997 - DNA, 20 bp, Artificial Sequence
  Description of Artificial Sequence: Synthetic oligonucleotide
  Target: LAMA2; (-) strand; PAM type: YTN; PAM sequence: TTT
catttgcctttgcttggcag

SEQ ID NO: 294998 - DNA, 20 bp, Artificial Sequence
  Description of Artificial Sequence: Synthetic oligonucleotide
  Target: LAMA2; (-) strand; PAM type: YTN; PAM sequence: TTT
tcatttgcctttgcttggca

SEQ ID NO: 294999 - DNA, 20 bp, Artificial Sequence
  Description of Artificial Sequence: Synthetic oligonucleotide
  Target: LAMA2; (-) strand; PAM type: YTN; PAM sequence: TTT
ttcatttgcctttgcttggc

SEQ ID NO: 295000 - DNA, 20 bp, Artificial Sequence
  Description of Artificial Sequence: Synthetic oligonucleotide
  Target: LAMA2; (-) strand; PAM type: YTN; PAM sequence: TTG
tttttcatttgcctttgctt

SEQ ID NO: 295001 - DNA, 20 bp, Artificial Sequence
  Description of Artificial Sequence: Synthetic oligonucleotide
  Target: LAMA2; (-) strand; PAM type: YTN; PAM sequence: CTT
gtttttcatttgcctttgct

SEQ ID NO: 295002 - DNA, 20 bp, Artificial Sequence
  Description of Artificial Sequence: Synthetic oligonucleotide
  Target: LAMA2; (-) strand; PAM type: YTN; PAM sequence: CTA
gaaatagataatggggaaaa

SEQ ID NO: 295003 - DNA, 20 bp, Artificial Sequence
  Description of Artificial Sequence: Synthetic oligonucleotide
  Target: LAMA2; (-) strand; PAM type: YTN; PAM sequence: TTA
aagtactagaaatagataat

SEQ ID NO: 295004 - DNA, 20 bp, Artificial Sequence
  Description of Artificial Sequence: Synthetic oligonucleotide
  Target: LAMA2; (-) strand; PAM type: YTN; PAM sequence: TTT
aaagtactagaaatagataa

SEQ ID NO: 295005 - DNA, 20 bp, Artificial Sequence
  Description of Artificial Sequence: Synthetic oligonucleotide
  Target: LAMA2; (-) strand; PAM type: YTN; PAM sequence: TTT
taaagtactagaaatagata

SEQ ID NO: 295006 - DNA, 20 bp, Artificial Sequence
  Description of Artificial Sequence: Synthetic oligonucleotide
  Target: LAMA2; (-) strand; PAM type: YTN; PAM sequence: TTT
ttaaagtactagaaatagat

SEQ ID NO: 295007 - DNA, 20 bp, Artificial Sequence
  Description of Artificial Sequence: Synthetic oligonucleotide
  Target: LAMA2; (-) strand; PAM type: YTN; PAM sequence: CTT
tttaaagtactagaaataga

SEQ ID NO: 295008 - DNA, 20 bp, Artificial Sequence
  Description of Artificial Sequence: Synthetic oligonucleotide
  Target: LAMA2; (-) strand; PAM type: YTN; PAM sequence: TTG
tggggactttttaaagtact

SEQ ID NO: 295009 - DNA, 20 bp, Artificial Sequence
  Description of Artificial Sequence: Synthetic oligonucleotide
  Target: LAMA2; (-) strand; PAM type: YTN; PAM sequence: CTT
gtggggactttttaaagtac

SEQ ID NO: 295010 - DNA, 20 bp, Artificial Sequence
  Description of Artificial Sequence: Synthetic oligonucleotide
  Target: LAMA2; (-) strand; PAM type: YTN; PAM sequence: CTG
ccaccttgtggggacttttt

SEQ ID NO: 295011 - DNA, 20 bp, Artificial Sequence
  Description of Artificial Sequence: Synthetic oligonucleotide
  Target: LAMA2; (-) strand; PAM type: YTN; PAM sequence: TTC
tgccaccttgtggggacttt

SEQ ID NO: 295012 - DNA, 20 bp, Artificial Sequence
  Description of Artificial Sequence: Synthetic oligonucleotide
  Target: LAMA2; (-) strand; PAM type: YTN; PAM sequence: TTA
caattctgccaccttgtggg

SEQ ID NO: 295013 - DNA, 20 bp, Artificial Sequence
  Description of Artificial Sequence: Synthetic oligonucleotide
  Target: LAMA2; (-) strand; PAM type: YTN; PAM sequence: CTC
aacgtgttacaattctgcca

SEQ ID NO: 295014 - DNA, 20 bp, Artificial Sequence
  Description of Artificial Sequence: Synthetic oligonucleotide
  Target: LAMA2; (-) strand; PAM type: YTN; PAM sequence: CTC
atcaatctcaacgtgttaca

SEQ ID NO: 295015 - DNA, 20 bp, Artificial Sequence
  Description of Artificial Sequence: Synthetic oligonucleotide
  Target: LAMA2; (-) strand; PAM type: YTN; PAM sequence: CTC
agtagaggctcatcaatctc

SEQ ID NO: 295016 - DNA, 20 bp, Artificial Sequence
  Description of Artificial Sequence: Synthetic oligonucleotide
  Target: LAMA2; (-) strand; PAM type: YTN; PAM sequence: TTC
acagtctcagtagaggctca

SEQ ID NO: 295017 - DNA, 20 bp, Artificial Sequence
  Description of Artificial Sequence: Synthetic oligonucleotide
  Target: LAMA2; (-) strand; PAM type: YTN; PAM sequence: TTA
aaacaacaataataataaaa

SEQ ID NO: 295018 - DNA, 20 bp, Artificial Sequence
  Description of Artificial Sequence: Synthetic oligonucleotide
  Target: LAMA2; (-) strand; PAM type: YTN; PAM sequence: CTC
aaatgtgttaaaacaacaat

SEQ ID NO: 295019 - DNA, 20 bp, Artificial Sequence
  Description of Artificial Sequence: Synthetic oligonucleotide
  Target: LAMA2; (-) strand; PAM type: YTN; PAM sequence: CTC
tcaaatgtgttaaaacaaca

SEQ ID NO: 295020 - DNA, 20 bp, Artificial Sequence
  Description of Artificial Sequence: Synthetic oligonucleotide
  Target: LAMA2; (-) strand; PAM type: YTN; PAM sequence: CTA
atctctcaaatgtgttaaaa

SEQ ID NO: 295021 - DNA, 20 bp, Artificial Sequence
  Description of Artificial Sequence: Synthetic oligonucleotide
  Target: LAMA2; (-) strand; PAM type: YTN; PAM sequence: TTG
gacgcactaatctctcaaat

SEQ ID NO: 295022 - DNA, 20 bp, Artificial Sequence
  Description of Artificial Sequence: Synthetic oligonucleotide
  Target: LAMA2; (-) strand; PAM type: YTN; PAM sequence: TTT
ggacgcactaatctctcaaa

SEQ ID NO: 295023 - DNA, 20 bp, Artificial Sequence
  Description of Artificial Sequence: Synthetic oligonucleotide
  Target: LAMA2; (-) strand; PAM type: YTN; PAM sequence: TTT
tggacgcactaatctctcaa

SEQ ID NO: 295024 - DNA, 20 bp, Artificial Sequence
  Description of Artificial Sequence: Synthetic oligonucleotide
  Target: LAMA2; (-) strand; PAM type: YTN; PAM sequence: TTG
ttttggacgcactaatctct

SEQ ID NO: 295025 - DNA, 20 bp, Artificial Sequence
  Description of Artificial Sequence: Synthetic oligonucleotide
  Target: LAMA2; (-) strand; PAM type: YTN; PAM sequence: CTG
tgttgttttggacgcactaa

SEQ ID NO: 295026 - DNA, 20 bp, Artificial Sequence
  Description of Artificial Sequence: Synthetic oligonucleotide
  Target: LAMA2; (-) strand; PAM type: YTN; PAM sequence: TTA
cctgtgttgttttggacgca

SEQ ID NO: 295027 - DNA, 20 bp, Artificial Sequence
  Description of Artificial Sequence: Synthetic oligonucleotide
  Target: LAMA2; (-) strand; PAM type: YTN; PAM sequence: TTT
acctgtgttgttttggacgc

SEQ ID NO: 295028 - DNA, 20 bp, Artificial Sequence
  Description of Artificial Sequence: Synthetic oligonucleotide
  Target: LAMA2; (-) strand; PAM type: YTN; PAM sequence: CTT
tacctgtgttgttttggacg

SEQ ID NO: 295029 - DNA, 20 bp, Artificial Sequence
  Description of Artificial Sequence: Synthetic oligonucleotide
  Target: LAMA2; (-) strand; PAM type: YTN; PAM sequence: CTA
tggatgtgatgctttacctg

SEQ ID NO: 295030 - DNA, 20 bp, Artificial Sequence
  Description of Artificial Sequence: Synthetic oligonucleotide
  Target: LAMA2; (-) strand; PAM type: YTN; PAM sequence: CTC
tatggatgtgatgctttacc

SEQ ID NO: 295031 - DNA, 20 bp, Artificial Sequence
  Description of Artificial Sequence: Synthetic oligonucleotide
  Target: LAMA2; (-) strand; PAM type: YTN; PAM sequence: CTC
atctctatggatgtgatgct

SEQ ID NO: 295032 - DNA, 20 bp, Artificial Sequence
  Description of Artificial Sequence: Synthetic oligonucleotide
  Target: LAMA2; (-) strand; PAM type: YTN; PAM sequence: TTG
aaggcgtcctcatctctatg

SEQ ID NO: 295033 - DNA, 20 bp, Artificial Sequence
  Description of Artificial Sequence: Synthetic oligonucleotide
  Target: LAMA2; (-) strand; PAM type: YTN; PAM sequence: CTT
gaaggcgtcctcatctctat

SEQ ID NO: 295034 - DNA, 20 bp, Artificial Sequence
  Description of Artificial Sequence: Synthetic oligonucleotide
  Target: LAMA2; (-) strand; PAM type: YTN; PAM sequence: CTA
gtgtatacttgaaggcgtcc

SEQ ID NO: 295035 - DNA, 20 bp, Artificial Sequence
  Description of Artificial Sequence: Synthetic oligonucleotide
  Target: LAMA2; (-) strand; PAM type: YTN; PAM sequence: CTA
agctagtgtatacttgaagg

SEQ ID NO: 295036 - DNA, 20 bp, Artificial Sequence
  Description of Artificial Sequence: Synthetic oligonucleotide
  Target: LAMA2; (-) strand; PAM type: YTN; PAM sequence: TTC
taagctagtgtatacttgaa

SEQ ID NO: 295037 - DNA, 20 bp, Artificial Sequence
  Description of Artificial Sequence: Synthetic oligonucleotide
  Target: LAMA2; (-) strand; PAM type: YTN; PAM sequence: TTT
ctaagctagtgtatacttga

SEQ ID NO: 295038 - DNA, 20 bp, Artificial Sequence
  Description of Artificial Sequence: Synthetic oligonucleotide
  Target: LAMA2; (-) strand; PAM type: YTN; PAM sequence: TTT
tctaagctagtgtatacttg

SEQ ID NO: 295039 - DNA, 20 bp, Artificial Sequence
  Description of Artificial Sequence: Synthetic oligonucleotide
  Target: LAMA2; (-) strand; PAM type: YTN; PAM sequence: CTT
ttctaagctagtgtatactt

SEQ ID NO: 295040 - DNA, 20 bp, Artificial Sequence
  Description of Artificial Sequence: Synthetic oligonucleotide
  Target: LAMA2; (-) strand; PAM type: YTN; PAM sequence: TTG
caagatgaatcatccttttc

SEQ ID NO: 295041 - DNA, 20 bp, Artificial Sequence
  Description of Artificial Sequence: Synthetic oligonucleotide
  Target: LAMA2; (-) strand; PAM type: YTN; PAM sequence: TTA
aagaatggtcattgcaagat

SEQ ID NO: 295042 - DNA, 20 bp, Artificial Sequence
  Description of Artificial Sequence: Synthetic oligonucleotide
  Target: LAMA2; (-) strand; PAM type: YTN; PAM sequence: TTT
aaagaatggtcattgcaaga

SEQ ID NO: 295043 - DNA, 20 bp, Artificial Sequence
  Description of Artificial Sequence: Synthetic oligonucleotide
  Target: LAMA2; (-) strand; PAM type: YTN; PAM sequence: TTT
taaagaatggtcattgcaag

SEQ ID NO: 295044 - DNA, 20 bp, Artificial Sequence
  Description of Artificial Sequence: Synthetic oligonucleotide
  Target: LAMA2; (-) strand; PAM type: YTN; PAM sequence: CTT
ttaaagaatggtcattgcaa

SEQ ID NO: 295045 - DNA, 20 bp, Artificial Sequence
  Description of Artificial Sequence: Synthetic oligonucleotide
  Target: LAMA2; (-) strand; PAM type: YTN; PAM sequence: TTA
aggaacttttaaagaatggt

SEQ ID NO: 295046 - DNA, 20 bp, Artificial Sequence
  Description of Artificial Sequence: Synthetic oligonucleotide
  Target: LAMA2; (-) strand; PAM type: YTN; PAM sequence: TTT
aaggaacttttaaagaatgg

SEQ ID NO: 295047 - DNA, 20 bp, Artificial Sequence
  Description of Artificial Sequence: Synthetic oligonucleotide
  Target: LAMA2; (-) strand; PAM type: YTN; PAM sequence: TTT
taaggaacttttaaagaatg

SEQ ID NO: 295048 - DNA, 20 bp, Artificial Sequence
  Description of Artificial Sequence: Synthetic oligonucleotide
  Target: LAMA2; (-) strand; PAM type: YTN; PAM sequence: CTA
atgaggtaattttaaggaac

SEQ ID NO: 295049 - DNA, 20 bp, Artificial Sequence
  Description of Artificial Sequence: Synthetic oligonucleotide
  Target: LAMA2; (-) strand; PAM type: YTN; PAM sequence: CTA
agaaaaaagggtaagagaaa

SEQ ID NO: 295050 - DNA, 20 bp, Artificial Sequence
  Description of Artificial Sequence: Synthetic oligonucleotide
  Target: LAMA2; (-) strand; PAM type: YTN; PAM sequence: CTA
agctaagaaaaaagggtaag

SEQ ID NO: 295051 - DNA, 20 bp, Artificial Sequence
  Description of Artificial Sequence: Synthetic oligonucleotide
  Target: LAMA2; (-) strand; PAM type: YTN; PAM sequence: CTG
aaatctaagctaagaaaaaa

SEQ ID NO: 295052 - DNA, 20 bp, Artificial Sequence
  Description of Artificial Sequence: Synthetic oligonucleotide
  Target: LAMA2; (-) strand; PAM type: YTN; PAM sequence: TTG
ccactgaaatctaagctaag

SEQ ID NO: 295053 - DNA, 20 bp, Artificial Sequence
  Description of Artificial Sequence: Synthetic oligonucleotide
  Target: LAMA2; (-) strand; PAM type: YTN; PAM sequence: CTT
gccactgaaatctaagctaa

SEQ ID NO: 295054 - DNA, 20 bp, Artificial Sequence
  Description of Artificial Sequence: Synthetic oligonucleotide
  Target: LAMA2; (-) strand; PAM type: YTN; PAM sequence: CTG
cttgccactgaaatctaagc

SEQ ID NO: 295055 - DNA, 20 bp, Artificial Sequence
  Description of Artificial Sequence: Synthetic oligonucleotide
  Target: LAMA2; (-) strand; PAM type: YTN; PAM sequence: CTC
tgcttgccactgaaatctaa

SEQ ID NO: 295056 - DNA, 20 bp, Artificial Sequence
  Description of Artificial Sequence: Synthetic oligonucleotide
  Target: LAMA2; (-) strand; PAM type: YTN; PAM sequence: TTC
aactctgcttgccactgaaa

SEQ ID NO: 295057 - DNA, 20 bp, Artificial Sequence
  Description of Artificial Sequence: Synthetic oligonucleotide
  Target: LAMA2; (-) strand; PAM type: YTN; PAM sequence: TTT
caactctgcttgccactgaa

SEQ ID NO: 295058 - DNA, 20 bp, Artificial Sequence
  Description of Artificial Sequence: Synthetic oligonucleotide
  Target: LAMA2; (-) strand; PAM type: YTN; PAM sequence: TTT
tcaactctgcttgccactga

SEQ ID NO: 295059 - DNA, 20 bp, Artificial Sequence
  Description of Artificial Sequence: Synthetic oligonucleotide
  Target: LAMA2; (-) strand; PAM type: YTN; PAM sequence: CTA
aggatgatgttttcaactct

SEQ ID NO: 295060 - DNA, 20 bp, Artificial Sequence
  Description of Artificial Sequence: Synthetic oligonucleotide
  Target: LAMA2; (-) strand; PAM type: YTN; PAM sequence: TTG
tcactaaggatgatgttttc

SEQ ID NO: 295061 - DNA, 20 bp, Artificial Sequence
  Description of Artificial Sequence: Synthetic oligonucleotide
  Target: LAMA2; (-) strand; PAM type: YTN; PAM sequence: CTT
gtcactaaggatgatgtttt

SEQ ID NO: 295062 - DNA, 20 bp, Artificial Sequence
  Description of Artificial Sequence: Synthetic oligonucleotide
  Target: LAMA2; (-) strand; PAM type: YTN; PAM sequence: CTC
agaaataaaatgatcttgtc

SEQ ID NO: 295063 - DNA, 20 bp, Artificial Sequence
  Description of Artificial Sequence: Synthetic oligonucleotide
  Target: LAMA2; (-) strand; PAM type: YTN; PAM sequence: TTG
ctcagaaataaaatgatctt

SEQ ID NO: 295064 - DNA, 20 bp, Artificial Sequence
  Description of Artificial Sequence: Synthetic oligonucleotide
  Target: LAMA2; (-) strand; PAM type: YTN; PAM sequence: TTT
gctcagaaataaaatgatct

SEQ ID NO: 295065 - DNA, 20 bp, Artificial Sequence
  Description of Artificial Sequence: Synthetic oligonucleotide
  Target: LAMA2; (-) strand; PAM type: YTN; PAM sequence: CTT
tgctcagaaataaaatgatc

SEQ ID NO: 295066 - DNA, 20 bp, Artificial Sequence
  Description of Artificial Sequence: Synthetic oligonucleotide
  Target: LAMA2; (-) strand; PAM type: YTN; PAM sequence: CTG
tgctttgctcagaaataaaa

SEQ ID NO: 295067 - DNA, 20 bp, Artificial Sequence
  Description of Artificial Sequence: Synthetic oligonucleotide
  Target: LAMA2; (-) strand; PAM type: YTN; PAM sequence: CTG
ccctgtgctttgctcagaaa

SEQ ID NO: 295068 - DNA, 20 bp, Artificial Sequence
  Description of Artificial Sequence: Synthetic oligonucleotide
  Target: LAMA2; (-) strand; PAM type: YTN; PAM sequence: TTA
aagggggaacaagtgagatg

SEQ ID NO: 295069 - DNA, 20 bp, Artificial Sequence
  Description of Artificial Sequence: Synthetic oligonucleotide
  Target: LAMA2; (-) strand; PAM type: YTN; PAM sequence: TTT
aaagggggaacaagtgagat

SEQ ID NO: 295070 - DNA, 20 bp, Artificial Sequence
  Description of Artificial Sequence: Synthetic oligonucleotide
  Target: LAMA2; (-) strand; PAM type: YTN; PAM sequence: TTT
taaagggggaacaagtgaga

SEQ ID NO: 295071 - DNA, 20 bp, Artificial Sequence
  Description of Artificial Sequence: Synthetic oligonucleotide
  Target: LAMA2; (-) strand; PAM type: YTN; PAM sequence: CTA
gcattttaaagggggaacaa

SEQ ID NO: 295072 - DNA, 20 bp, Artificial Sequence
  Description of Artificial Sequence: Synthetic oligonucleotide
  Target: LAMA2; (-) strand; PAM type: YTN; PAM sequence: TTC
tagcattttaaagggggaac

SEQ ID NO: 295073 - DNA, 20 bp, Artificial Sequence
  Description of Artificial Sequence: Synthetic oligonucleotide
  Target: LAMA2; (-) strand; PAM type: YTN; PAM sequence: CTT
ctagcattttaaagggggaa

SEQ ID NO: 295074 - DNA, 20 bp, Artificial Sequence
  Description of Artificial Sequence: Synthetic oligonucleotide
  Target: LAMA2; (-) strand; PAM type: YTN; PAM sequence: TTC
cttctagcattttaaagggg

SEQ ID NO: 295075 - DNA, 20 bp, Artificial Sequence
  Description of Artificial Sequence: Synthetic oligonucleotide
  Target: LAMA2; (-) strand; PAM type: YTN; PAM sequence: TTT
ccttctagcattttaaaggg

SEQ ID NO: 295076 - DNA, 20 bp, Artificial Sequence
  Description of Artificial Sequence: Synthetic oligonucleotide
  Target: LAMA2; (-) strand; PAM type: YTN; PAM sequence: TTT
tccttctagcattttaaagg

SEQ ID NO: 295077 - DNA, 20 bp, Artificial Sequence
  Description of Artificial Sequence: Synthetic oligonucleotide
  Target: LAMA2; (-) strand; PAM type: YTN; PAM sequence: TTT
ttccttctagcattttaaag

SEQ ID NO: 295078 - DNA, 20 bp, Artificial Sequence
  Description of Artificial Sequence: Synthetic oligonucleotide
  Target: LAMA2; (-) strand; PAM type: YTN; PAM sequence: TTT
tttccttctagcattttaaa

SEQ ID NO: 295079 - DNA, 20 bp, Artificial Sequence
  Description of Artificial Sequence: Synthetic oligonucleotide
  Target: LAMA2; (-) strand; PAM type: YTN; PAM sequence: CTT
ttttccttctagcattttaa

SEQ ID NO: 295080 - DNA, 20 bp, Artificial Sequence
  Description of Artificial Sequence: Synthetic oligonucleotide
  Target: LAMA2; (-) strand; PAM type: YTN; PAM sequence: TTC
ttttttccttctagcatttt

SEQ ID NO: 295081 - DNA, 20 bp, Artificial Sequence
  Description of Artificial Sequence: Synthetic oligonucleotide
  Target: LAMA2; (-) strand; PAM type: YTN; PAM sequence: CTT
cttttttccttctagcattt

SEQ ID NO: 295082 - DNA, 20 bp, Artificial Sequence
  Description of Artificial Sequence: Synthetic oligonucleotide
  Target: LAMA2; (-) strand; PAM type: YTN; PAM sequence: CTC
aagcttcttttttccttcta

SEQ ID NO: 295083 - DNA, 20 bp, Artificial Sequence
  Description of Artificial Sequence: Synthetic oligonucleotide
  Target: LAMA2; (-) strand; PAM type: YTN; PAM sequence: CTG
ctcaagcttcttttttcctt

SEQ ID NO: 295084 - DNA, 20 bp, Artificial Sequence
  Description of Artificial Sequence: Synthetic oligonucleotide
  Target: LAMA2; (-) strand; PAM type: YTN; PAM sequence: CTC
atccagctgctcaagcttct

SEQ ID NO: 295085 - DNA, 20 bp, Artificial Sequence
  Description of Artificial Sequence: Synthetic oligonucleotide
  Target: LAMA2; (-) strand; PAM type: YTN; PAM sequence: CTG
ctcatccagctgctcaagct

SEQ ID NO: 295086 - DNA, 20 bp, Artificial Sequence
  Description of Artificial Sequence: Synthetic oligonucleotide
  Target: LAMA2; (-) strand; PAM type: YTN; PAM sequence: CTC
atgtcccacagtgggtggag

SEQ ID NO: 295087 - DNA, 20 bp, Artificial Sequence
  Description of Artificial Sequence: Synthetic oligonucleotide
  Target: LAMA2; (-) strand; PAM type: YTN; PAM sequence: CTG
cctcatgtcccacagtgggt

SEQ ID NO: 295088 - DNA, 20 bp, Artificial Sequence
  Description of Artificial Sequence: Synthetic oligonucleotide
  Target: LAMA2; (-) strand; PAM type: YTN; PAM sequence: TTC
tgcctcatgtcccacagtgg

SEQ ID NO: 295089 - DNA, 20 bp, Artificial Sequence
  Description of Artificial Sequence: Synthetic oligonucleotide
  Target: LAMA2; (-) strand; PAM type: YTN; PAM sequence: CTT
ctgcctcatgtcccacagtg

SEQ ID NO: 295090 - DNA, 20 bp, Artificial Sequence
  Description of Artificial Sequence: Synthetic oligonucleotide
  Target: LAMA2; (-) strand; PAM type: YTN; PAM sequence: TTC
cttctgcctcatgtcccaca

SEQ ID NO: 295091 - DNA, 20 bp, Artificial Sequence
  Description of Artificial Sequence: Synthetic oligonucleotide
  Target: LAMA2; (-) strand; PAM type: YTN; PAM sequence: CTT
ccttctgcctcatgtcccac

SEQ ID NO: 295092 - DNA, 20 bp, Artificial Sequence
  Description of Artificial Sequence: Synthetic oligonucleotide
  Target: LAMA2; (-) strand; PAM type: YTN; PAM sequence: CTC
ttccttctgcctcatgtccc

SEQ ID NO: 295093 - DNA, 20 bp, Artificial Sequence
  Description of Artificial Sequence: Synthetic oligonucleotide
  Target: LAMA2; (-) strand; PAM type: YTN; PAM sequence: TTC
tcttccttctgcctcatgtc

SEQ ID NO: 295094 - DNA, 20 bp, Artificial Sequence
  Description of Artificial Sequence: Synthetic oligonucleotide
  Target: LAMA2; (-) strand; PAM type: YTN; PAM sequence: CTT
ctcttccttctgcctcatgt

SEQ ID NO: 295095 - DNA, 20 bp, Artificial Sequence
  Description of Artificial Sequence: Synthetic oligonucleotide
  Target: LAMA2; (-) strand; PAM type: YTN; PAM sequence: CTC
ttctcttccttctgcctcat

SEQ ID NO: 295096 - DNA, 20 bp, Artificial Sequence
  Description of Artificial Sequence: Synthetic oligonucleotide
  Target: LAMA2; (-) strand; PAM type: YTN; PAM sequence: TTC
ctcttctcttccttctgcct

SEQ ID NO: 295097 - DNA, 20 bp, Artificial Sequence
  Description of Artificial Sequence: Synthetic oligonucleotide
  Target: LAMA2; (-) strand; PAM type: YTN; PAM sequence: CTT
cctcttctcttccttctgcc

SEQ ID NO: 295098 - DNA, 20 bp, Artificial Sequence
  Description of Artificial Sequence: Synthetic oligonucleotide
  Target: LAMA2; (-) strand; PAM type: YTN; PAM sequence: TTG
cttcctcttctcttccttct

SEQ ID NO: 295099 - DNA, 20 bp, Artificial Sequence
  Description of Artificial Sequence: Synthetic oligonucleotide
  Target: LAMA2; (-) strand; PAM type: YTN; PAM sequence: TTG
cccggtgttgcttcctcttc

SEQ ID NO: 295100 - DNA, 20 bp, Artificial Sequence
  Description of Artificial Sequence: Synthetic oligonucleotide
  Target: LAMA2; (-) strand; PAM type: YTN; PAM sequence: TTT
gcccggtgttgcttcctctt

SEQ ID NO: 295101 - DNA, 20 bp, Artificial Sequence
  Description of Artificial Sequence: Synthetic oligonucleotide
  Target: LAMA2; (-) strand; PAM type: YTN; PAM sequence: CTT
tgcccggtgttgcttcctct

SEQ ID NO: 295102 - DNA, 20 bp, Artificial Sequence
  Description of Artificial Sequence: Synthetic oligonucleotide
  Target: LAMA2; (-) strand; PAM type: YTN; PAM sequence: TTG
ctttgcccggtgttgcttcc

SEQ ID NO: 295103 - DNA, 20 bp, Artificial Sequence
  Description of Artificial Sequence: Synthetic oligonucleotide
  Target: LAMA2; (-) strand; PAM type: YTN; PAM sequence: TTA
ttgctttgcccggtgttgct

SEQ ID NO: 295104 - DNA, 20 bp, Artificial Sequence
  Description of Artificial Sequence: Synthetic oligonucleotide
  Target: LAMA2; (-) strand; PAM type: YTN; PAM sequence: TTT
attgctttgcccggtgttgc

SEQ ID NO: 295105 - DNA, 20 bp, Artificial Sequence
  Description of Artificial Sequence: Synthetic oligonucleotide
  Target: LAMA2; (-) strand; PAM type: YTN; PAM sequence: TTC
agggcagcaccagtttattg

SEQ ID NO: 295106 - DNA, 20 bp, Artificial Sequence
  Description of Artificial Sequence: Synthetic oligonucleotide
  Target: LAMA2; (-) strand; PAM type: YTN; PAM sequence: CTC
aaaaagaaaaaaaacatgat

SEQ ID NO: 295107 - DNA, 20 bp, Artificial Sequence
  Description of Artificial Sequence: Synthetic oligonucleotide
  Target: LAMA2; (-) strand; PAM type: YTN; PAM sequence: CTG
tctcaaaaagaaaaaaaaca

SEQ ID NO: 295108 - DNA, 20 bp, Artificial Sequence
  Description of Artificial Sequence: Synthetic oligonucleotide
  Target: LAMA2; (-) strand; PAM type: YTN; PAM sequence: CTG
gacagtagagcaagaacctg

SEQ ID NO: 295109 - DNA, 20 bp, Artificial Sequence
  Description of Artificial Sequence: Synthetic oligonucleotide
  Target: LAMA2; (-) strand; PAM type: YTN; PAM sequence: CTC
caacctggacagtagagcaa

SEQ ID NO: 295110 - DNA, 20 bp, Artificial Sequence
  Description of Artificial Sequence: Synthetic oligonucleotide
  Target: LAMA2; (-) strand; PAM type: YTN; PAM sequence: CTG
cactccaacctggacagtag

SEQ ID NO: 295111 - DNA, 20 bp, Artificial Sequence
  Description of Artificial Sequence: Synthetic oligonucleotide
  Target: LAMA2; (-) strand; PAM type: YTN; PAM sequence: TTG
catcactgcactccaacctg

SEQ ID NO: 295112 - DNA, 20 bp, Artificial Sequence
  Description of Artificial Sequence: Synthetic oligonucleotide
  Target: LAMA2; (-) strand; PAM type: YTN; PAM sequence: CTA
tgattgcatcactgcactcc

SEQ ID NO: 295113 - DNA, 20 bp, Artificial Sequence
  Description of Artificial Sequence: Synthetic oligonucleotide
  Target: LAMA2; (-) strand; PAM type: YTN; PAM sequence: TTA
gagtgagctatgattgcatc

SEQ ID NO: 295114 - DNA, 20 bp, Artificial Sequence
  Description of Artificial Sequence: Synthetic oligonucleotide
  Target: LAMA2; (-) strand; PAM type: YTN; PAM sequence: TTC
aaggttagagtgagctatga

SEQ ID NO: 295115 - DNA, 20 bp, Artificial Sequence
  Description of Artificial Sequence: Synthetic oligonucleotide
  Target: LAMA2; (-) strand; PAM type: YTN; PAM sequence: CTA
ggagttcaaggttagagtga

SEQ ID NO: 295116 - DNA, 20 bp, Artificial Sequence
  Description of Artificial Sequence: Synthetic oligonucleotide
  Target: LAMA2; (-) strand; PAM type: YTN; PAM sequence: TTG
agcctaggagttcaaggtta

SEQ ID NO: 295117 - DNA, 20 bp, Artificial Sequence
  Description of Artificial Sequence: Synthetic oligonucleotide
  Target: LAMA2; (-) strand; PAM type: YTN; PAM sequence: CTT
gagcctaggagttcaaggtt

SEQ ID NO: 295118 - DNA, 20 bp, Artificial Sequence
  Description of Artificial Sequence: Synthetic oligonucleotide
  Target: LAMA2; (-) strand; PAM type: YTN; PAM sequence: CTC
gggaggccaaggcaggagaa

SEQ ID NO: 295119 - DNA, 20 bp, Artificial Sequence
  Description of Artificial Sequence: Synthetic oligonucleotide
  Target: LAMA2; (-) strand; PAM type: YTN; PAM sequence: CTA
ctcgggaggccaaggcagga

SEQ ID NO: 295120 - DNA, 20 bp, Artificial Sequence
  Description of Artificial Sequence: Synthetic oligonucleotide
  Target: LAMA2; (-) strand; PAM type: YTN; PAM sequence: CTG
aaagccccagctactcggga

SEQ ID NO: 295121 - DNA, 20 bp, Artificial Sequence
  Description of Artificial Sequence: Synthetic oligonucleotide
  Target: LAMA2; (-) strand; PAM type: YTN; PAM sequence: TTG
catgctgaaagccccagcta

SEQ ID NO: 295122 - DNA, 20 bp, Artificial Sequence
  Description of Artificial Sequence: Synthetic oligonucleotide
  Target: LAMA2; (-) strand; PAM type: YTN; PAM sequence: TTG
ttgcatgctgaaagccccag

SEQ ID NO: 295123 - DNA, 20 bp, Artificial Sequence
  Description of Artificial Sequence: Synthetic oligonucleotide
  Target: LAMA2; (-) strand; PAM type: YTN; PAM sequence: CTG
ggcatgttgttgcatgctga

SEQ ID NO: 295124 - DNA, 20 bp, Artificial Sequence
  Description of Artificial Sequence: Synthetic oligonucleotide
  Target: LAMA2; (-) strand; PAM type: YTN; PAM sequence: TTA
gctgggcatgttgttgcatg

SEQ ID NO: 295125 - DNA, 20 bp, Artificial Sequence
  Description of Artificial Sequence: Synthetic oligonucleotide
  Target: LAMA2; (-) strand; PAM type: YTN; PAM sequence: TTA
aaaaaataaaaaattagctg

SEQ ID NO: 295126 - DNA, 20 bp, Artificial Sequence
  Description of Artificial Sequence: Synthetic oligonucleotide
  Target: LAMA2; (-) strand; PAM type: YTN; PAM sequence: CTC
caaaagaacaacaacaacaa

SEQ ID NO: 295127 - DNA, 20 bp, Artificial Sequence
  Description of Artificial Sequence: Synthetic oligonucleotide
  Target: LAMA2; (-) strand; PAM type: YTN; PAM sequence: CTC
tccaaaagaacaacaacaac

SEQ ID NO: 295128 - DNA, 20 bp, Artificial Sequence
  Description of Artificial Sequence: Synthetic oligonucleotide
  Target: LAMA2; (-) strand; PAM type: YTN; PAM sequence: CTG
tctctccaaaagaacaacaa

SEQ ID NO: 295129 - DNA, 20 bp, Artificial Sequence
  Description of Artificial Sequence: Synthetic oligonucleotide
  Target: LAMA2; (-) strand; PAM type: YTN; PAM sequence: CTC
tgtctctccaaaagaacaac

SEQ ID NO: 295130 - DNA, 20 bp, Artificial Sequence
  Description of Artificial Sequence: Synthetic oligonucleotide
  Target: LAMA2; (-) strand; PAM type: YTN; PAM sequence: CTG
cccccctctgtctctccaaa

SEQ ID NO: 295131 - DNA, 20 bp, Artificial Sequence
  Description of Artificial Sequence: Synthetic oligonucleotide
  Target: LAMA2; (-) strand; PAM type: YTN; PAM sequence: CTG
ggcaacaaagtgaggacccc

SEQ ID NO: 295132 - DNA, 20 bp, Artificial Sequence
  Description of Artificial Sequence: Synthetic oligonucleotide
  Target: LAMA2; (-) strand; PAM type: YTN; PAM sequence: TTG
agaccagcctgggcaacaaa

SEQ ID NO: 295133 - DNA, 20 bp, Artificial Sequence
  Description of Artificial Sequence: Synthetic oligonucleotide
  Target: LAMA2; (-) strand; PAM type: YTN; PAM sequence: TTT
gagaccagcctgggcaacaa

SEQ ID NO: 295134 - DNA, 20 bp, Artificial Sequence
  Description of Artificial Sequence: Synthetic oligonucleotide
  Target: LAMA2; (-) strand; PAM type: YTN; PAM sequence: CTA
gtagtttgagaccagcctgg

SEQ ID NO: 295135 - DNA, 20 bp, Artificial Sequence
  Description of Artificial Sequence: Synthetic oligonucleotide
  Target: LAMA2; (-) strand; PAM type: YTN; PAM sequence: TTG
aggctagtagtttgagacca

SEQ ID NO: 295136 - DNA, 20 bp, Artificial Sequence
  Description of Artificial Sequence: Synthetic oligonucleotide
  Target: LAMA2; (-) strand; PAM type: YTN; PAM sequence: CTT
gaggctagtagtttgagacc

SEQ ID NO: 295137 - DNA, 20 bp, Artificial Sequence
  Description of Artificial Sequence: Synthetic oligonucleotide
  Target: LAMA2; (-) strand; PAM type: YTN; PAM sequence: TTG
gaaagccgaggcaggaagat

SEQ ID NO: 295138 - DNA, 20 bp, Artificial Sequence
  Description of Artificial Sequence: Synthetic oligonucleotide
  Target: LAMA2; (-) strand; PAM type: YTN; PAM sequence: TTT
ggaaagccgaggcaggaaga

SEQ ID NO: 295139 - DNA, 20 bp, Artificial Sequence
  Description of Artificial Sequence: Synthetic oligonucleotide
  Target: LAMA2; (-) strand; PAM type: YTN; PAM sequence: TTA
atcccagcatttggaaagcc

SEQ ID NO: 295140 - DNA, 20 bp, Artificial Sequence
  Description of Artificial Sequence: Synthetic oligonucleotide
  Target: LAMA2; (-) strand; PAM type: YTN; PAM sequence: TTT
aatcccagcatttggaaagc

SEQ ID NO: 295141 - DNA, 20 bp, Artificial Sequence
  Description of Artificial Sequence: Synthetic oligonucleotide
  Target: LAMA2; (-) strand; PAM type: YTN; PAM sequence: TTT
taatcccagcatttggaaag

SEQ ID NO: 295142 - DNA, 20 bp, Artificial Sequence
  Description of Artificial Sequence: Synthetic oligonucleotide
  Target: LAMA2; (-) strand; PAM type: YTN; PAM sequence: TTT
ttaatcccagcatttggaaa

SEQ ID NO: 295143 - DNA, 20 bp, Artificial Sequence
  Description of Artificial Sequence: Synthetic oligonucleotide
  Target: LAMA2; (-) strand; PAM type: YTN; PAM sequence: CTC
atgtttttaatcccagcatt

SEQ ID NO: 295144 - DNA, 20 bp, Artificial Sequence
  Description of Artificial Sequence: Synthetic oligonucleotide
  Target: LAMA2; (-) strand; PAM type: YTN; PAM sequence: CTG
atgggtgtaagggatgggcg

SEQ ID NO: 295145 - DNA, 20 bp, Artificial Sequence
  Description of Artificial Sequence: Synthetic oligonucleotide
  Target: LAMA2; (-) strand; PAM type: YTN; PAM sequence: CTG
aaaccaagtctgatgggtgt

SEQ ID NO: 295146 - DNA, 20 bp, Artificial Sequence
  Description of Artificial Sequence: Synthetic oligonucleotide
  Target: LAMA2; (-) strand; PAM type: YTN; PAM sequence: TTG
ggtaaactgaaaccaagtct

SEQ ID NO: 295147 - DNA, 20 bp, Artificial Sequence
  Description of Artificial Sequence: Synthetic oligonucleotide
  Target: LAMA2; (-) strand; PAM type: YTN; PAM sequence: CTT
gggtaaactgaaaccaagtc

SEQ ID NO: 295148 - DNA, 20 bp, Artificial Sequence
  Description of Artificial Sequence: Synthetic oligonucleotide
  Target: LAMA2; (-) strand; PAM type: YTN; PAM sequence: TTC
cttgggtaaactgaaaccaa

SEQ ID NO: 295149 - DNA, 20 bp, Artificial Sequence
  Description of Artificial Sequence: Synthetic oligonucleotide
  Target: LAMA2; (-) strand; PAM type: YTN; PAM sequence: TTT
ccttgggtaaactgaaacca

SEQ ID NO: 295150 - DNA, 20 bp, Artificial Sequence
  Description of Artificial Sequence: Synthetic oligonucleotide
  Target: LAMA2; (-) strand; PAM type: YTN; PAM sequence: TTT
tccttgggtaaactgaaacc

SEQ ID NO: 295151 - DNA, 20 bp, Artificial Sequence
  Description of Artificial Sequence: Synthetic oligonucleotide
  Target: LAMA2; (-) strand; PAM type: YTN; PAM sequence: CTT
ttccttgggtaaactgaaac

SEQ ID NO: 295152 - DNA, 20 bp, Artificial Sequence
  Description of Artificial Sequence: Synthetic oligonucleotide
  Target: LAMA2; (-) strand; PAM type: YTN; PAM sequence: TTG
catcacttttccttgggtaa

SEQ ID NO: 295153 - DNA, 20 bp, Artificial Sequence
  Description of Artificial Sequence: Synthetic oligonucleotide
  Target: LAMA2; (-) strand; PAM type: YTN; PAM sequence: CTT
gcatcacttttccttgggta

SEQ ID NO: 295154 - DNA, 20 bp, Artificial Sequence
  Description of Artificial Sequence: Synthetic oligonucleotide
  Target: LAMA2; (-) strand; PAM type: YTN; PAM sequence: TTC
cttgcatcacttttccttgg

SEQ ID NO: 295155 - DNA, 20 bp, Artificial Sequence
  Description of Artificial Sequence: Synthetic oligonucleotide
  Target: LAMA2; (-) strand; PAM type: YTN; PAM sequence: CTT
ccttgcatcacttttccttg

SEQ ID NO: 295156 - DNA, 20 bp, Artificial Sequence
  Description of Artificial Sequence: Synthetic oligonucleotide
  Target: LAMA2; (-) strand; PAM type: YTN; PAM sequence: TTA
aagggtgtcttccttgcatc

SEQ ID NO: 295157 - DNA, 20 bp, Artificial Sequence
  Description of Artificial Sequence: Synthetic oligonucleotide
  Target: LAMA2; (-) strand; PAM type: YTN; PAM sequence: TTG
gttaaagggtgtcttccttg

SEQ ID NO: 295158 - DNA, 20 bp, Artificial Sequence
  Description of Artificial Sequence: Synthetic oligonucleotide
  Target: LAMA2; (-) strand; PAM type: YTN; PAM sequence: CTT
ggttaaagggtgtcttcctt

SEQ ID NO: 295159 - DNA, 20 bp, Artificial Sequence
  Description of Artificial Sequence: Synthetic oligonucleotide
  Target: LAMA2; (-) strand; PAM type: YTN; PAM sequence: TTG
cttggttaaagggtgtcttc

SEQ ID NO: 295160 - DNA, 20 bp, Artificial Sequence
  Description of Artificial Sequence: Synthetic oligonucleotide
  Target: LAMA2; (-) strand; PAM type: YTN; PAM sequence: CTT
gcttggttaaagggtgtctt

SEQ ID NO: 295161 - DNA, 20 bp, Artificial Sequence
  Description of Artificial Sequence: Synthetic oligonucleotide
  Target: LAMA2; (-) strand; PAM type: YTN; PAM sequence: CTC
ccccttgcttggttaaaggg

SEQ ID NO: 295162 - DNA, 20 bp, Artificial Sequence
  Description of Artificial Sequence: Synthetic oligonucleotide
  Target: LAMA2; (-) strand; PAM type: YTN; PAM sequence: CTC
gacctcccccttgcttggtt

SEQ ID NO: 295163 - DNA, 20 bp, Artificial Sequence
  Description of Artificial Sequence: Synthetic oligonucleotide
  Target: LAMA2; (-) strand; PAM type: YTN; PAM sequence: TTG
tacaaatctcgacctccccc

SEQ ID NO: 295164 - DNA, 20 bp, Artificial Sequence
  Description of Artificial Sequence: Synthetic oligonucleotide
  Target: LAMA2; (-) strand; PAM type: YTN; PAM sequence: TTT
gtacaaatctcgacctcccc

SEQ ID NO: 295165 - DNA, 20 bp, Artificial Sequence
  Description of Artificial Sequence: Synthetic oligonucleotide
  Target: LAMA2; (-) strand; PAM type: YTN; PAM sequence: TTT
tgtacaaatctcgacctccc

SEQ ID NO: 295166 - DNA, 20 bp, Artificial Sequence
  Description of Artificial Sequence: Synthetic oligonucleotide
  Target: LAMA2; (-) strand; PAM type: YTN; PAM sequence: TTG
gtagtgttttgtacaaatct

SEQ ID NO: 295167 - DNA, 20 bp, Artificial Sequence
  Description of Artificial Sequence: Synthetic oligonucleotide
  Target: LAMA2; (-) strand; PAM type: YTN; PAM sequence: TTT
ggtagtgttttgtacaaatc

SEQ ID NO: 295168 - DNA, 20 bp, Artificial Sequence
  Description of Artificial Sequence: Synthetic oligonucleotide
  Target: LAMA2; (-) strand; PAM type: YTN; PAM sequence: CTA
atttggtagtgttttgtaca

SEQ ID NO: 295169 - DNA, 20 bp, Artificial Sequence
  Description of Artificial Sequence: Synthetic oligonucleotide
  Target: LAMA2; (-) strand; PAM type: YTN; PAM sequence: CTC
taatttggtagtgttttgta

SEQ ID NO: 295170 - DNA, 20 bp, Artificial Sequence
  Description of Artificial Sequence: Synthetic oligonucleotide
  Target: LAMA2; (-) strand; PAM type: YTN; PAM sequence: TTC
cccaccctctaatttggtag

SEQ ID NO: 295171 - DNA, 20 bp, Artificial Sequence
  Description of Artificial Sequence: Synthetic oligonucleotide
  Target: LAMA2; (-) strand; PAM type: YTN; PAM sequence: TTA
aatgggacaaaaattcccca

SEQ ID NO: 295172 - DNA, 20 bp, Artificial Sequence
  Description of Artificial Sequence: Synthetic oligonucleotide
  Target: LAMA2; (-) strand; PAM type: YTN; PAM sequence: TTT
aaatgggacaaaaattcccc

SEQ ID NO: 295173 - DNA, 20 bp, Artificial Sequence
  Description of Artificial Sequence: Synthetic oligonucleotide
  Target: LAMA2; (-) strand; PAM type: YTN; PAM sequence: TTA
ggatttaaatgggacaaaaa

SEQ ID NO: 295174 - DNA, 20 bp, Artificial Sequence
  Description of Artificial Sequence: Synthetic oligonucleotide
  Target: LAMA2; (-) strand; PAM type: YTN; PAM sequence: CTT
aggatttaaatgggacaaaa

SEQ ID NO: 295175 - DNA, 20 bp, Artificial Sequence
  Description of Artificial Sequence: Synthetic oligonucleotide
  Target: LAMA2; (-) strand; PAM type: YTN; PAM sequence: TTA
aaaatatgtaccttaggatt

SEQ ID NO: 295176 - DNA, 20 bp, Artificial Sequence
  Description of Artificial Sequence: Synthetic oligonucleotide
  Target: LAMA2; (-) strand; PAM type: YTN; PAM sequence: TTT
aaaaatatgtaccttaggat

SEQ ID NO: 295177 - DNA, 20 bp, Artificial Sequence
  Description of Artificial Sequence: Synthetic oligonucleotide
  Target: LAMA2; (-) strand; PAM type: YTN; PAM sequence: TTT
taaaaatatgtaccttagga

SEQ ID NO: 295178 - DNA, 20 bp, Artificial Sequence
  Description of Artificial Sequence: Synthetic oligonucleotide
  Target: LAMA2; (-) strand; PAM type: YTN; PAM sequence: TTT
ttaaaaatatgtaccttagg

SEQ ID NO: 295179 - DNA, 20 bp, Artificial Sequence
  Description of Artificial Sequence: Synthetic oligonucleotide
  Target: LAMA2; (-) strand; PAM type: YTN; PAM sequence: CTG
gtgtaagagggtttttaaaa

SEQ ID NO: 295180 - DNA, 20 bp, Artificial Sequence
  Description of Artificial Sequence: Synthetic oligonucleotide
  Target: LAMA2; (-) strand; PAM type: YTN; PAM sequence: CTG
agaagtgctggtgtaagagg

SEQ ID NO: 295181 - DNA, 20 bp, Artificial Sequence
  Description of Artificial Sequence: Synthetic oligonucleotide
  Target: LAMA2; (-) strand; PAM type: YTN; PAM sequence: TTG
gaaaaggactgagaagtgct

SEQ ID NO: 295182 - DNA, 20 bp, Artificial Sequence
  Description of Artificial Sequence: Synthetic oligonucleotide
  Target: LAMA2; (-) strand; PAM type: YTN; PAM sequence: CTG
gcagttggaaaaggactgag

SEQ ID NO: 295183 - DNA, 20 bp, Artificial Sequence
  Description of Artificial Sequence: Synthetic oligonucleotide
  Target: LAMA2; (-) strand; PAM type: YTN; PAM sequence: TTA
aactggcagttggaaaagga

SEQ ID NO: 295184 - DNA, 20 bp, Artificial Sequence
  Description of Artificial Sequence: Synthetic oligonucleotide
  Target: LAMA2; (-) strand; PAM type: YTN; PAM sequence: TTA
ttaaactggcagttggaaaa

SEQ ID NO: 295185 - DNA, 20 bp, Artificial Sequence
  Description of Artificial Sequence: Synthetic oligonucleotide
  Target: LAMA2; (-) strand; PAM type: YTN; PAM sequence: TTT
attaaactggcagttggaaa

SEQ ID NO: 295186 - DNA, 20 bp, Artificial Sequence
  Description of Artificial Sequence: Synthetic oligonucleotide
  Target: LAMA2; (-) strand; PAM type: YTN; PAM sequence: CTT
tattaaactggcagttggaa

SEQ ID NO: 295187 - DNA, 20 bp, Artificial Sequence
  Description of Artificial Sequence: Synthetic oligonucleotide
  Target: LAMA2; (-) strand; PAM type: YTN; PAM sequence: TTC
ctttattaaactggcagttg

SEQ ID NO: 295188 - DNA, 20 bp, Artificial Sequence
  Description of Artificial Sequence: Synthetic oligonucleotide
  Target: LAMA2; (-) strand; PAM type: YTN; PAM sequence: CTT
cctttattaaactggcagtt

SEQ ID NO: 295189 - DNA, 20 bp, Artificial Sequence
  Description of Artificial Sequence: Synthetic oligonucleotide
  Target: LAMA2; (-) strand; PAM type: YTN; PAM sequence: CTA
tcaccttcctttattaaact

SEQ ID NO: 295190 - DNA, 20 bp, Artificial Sequence
  Description of Artificial Sequence: Synthetic oligonucleotide
  Target: LAMA2; (-) strand; PAM type: YTN; PAM sequence: TTC
tatcaccttcctttattaaa

SEQ ID NO: 295191 - DNA, 20 bp, Artificial Sequence
  Description of Artificial Sequence: Synthetic oligonucleotide
  Target: LAMA2; (-) strand; PAM type: YTN; PAM sequence: CTT
ctatcaccttcctttattaa

SEQ ID NO: 295192 - DNA, 20 bp, Artificial Sequence
  Description of Artificial Sequence: Synthetic oligonucleotide
  Target: LAMA2; (-) strand; PAM type: YTN; PAM sequence: TTA
ataaaacttctatcaccttc

SEQ ID NO: 295193 - DNA, 20 bp, Artificial Sequence
  Description of Artificial Sequence: Synthetic oligonucleotide
  Target: LAMA2; (-) strand; PAM type: YTN; PAM sequence: TTT
aataaaacttctatcacctt

SEQ ID NO: 295194 - DNA, 20 bp, Artificial Sequence
  Description of Artificial Sequence: Synthetic oligonucleotide
  Target: LAMA2; (-) strand; PAM type: YTN; PAM sequence: TTT
taataaaacttctatcacct

SEQ ID NO: 295195 - DNA, 20 bp, Artificial Sequence
  Description of Artificial Sequence: Synthetic oligonucleotide
  Target: LAMA2; (-) strand; PAM type: YTN; PAM sequence: CTG
ttttaataaaacttctatca

SEQ ID NO: 295196 - DNA, 20 bp, Artificial Sequence
  Description of Artificial Sequence: Synthetic oligonucleotide
  Target: LAMA2; (-) strand; PAM type: YTN; PAM sequence: TTG
caacaggatggatactgttt

SEQ ID NO: 295197 - DNA, 20 bp, Artificial Sequence
  Description of Artificial Sequence: Synthetic oligonucleotide
  Target: LAMA2; (-) strand; PAM type: YTN; PAM sequence: TTT
gcaacaggatggatactgtt

SEQ ID NO: 295198 - DNA, 20 bp, Artificial Sequence
  Description of Artificial Sequence: Synthetic oligonucleotide
  Target: LAMA2; (-) strand; PAM type: YTN; PAM sequence: TTG
atttgcaacaggatggatac

SEQ ID NO: 295199 - DNA, 20 bp, Artificial Sequence
  Description of Artificial Sequence: Synthetic oligonucleotide
  Target: LAMA2; (-) strand; PAM type: YTN; PAM sequence: CTA
tcaatcattgatttgcaaca

SEQ ID NO: 295200 - DNA, 20 bp, Artificial Sequence
  Description of Artificial Sequence: Synthetic oligonucleotide
  Target: LAMA2; (-) strand; PAM type: YTN; PAM sequence: TTA
ctatcaatcattgatttgca

SEQ ID NO: 295201 - DNA, 20 bp, Artificial Sequence
  Description of Artificial Sequence: Synthetic oligonucleotide
  Target: LAMA2; (-) strand; PAM type: YTN; PAM sequence: TTT
actatcaatcattgatttgc

SEQ ID NO: 295202 - DNA, 20 bp, Artificial Sequence
  Description of Artificial Sequence: Synthetic oligonucleotide
  Target: LAMA2; (-) strand; PAM type: YTN; PAM sequence: TTA
aggacatccaaggtgatgtt

SEQ ID NO: 295203 - DNA, 20 bp, Artificial Sequence
  Description of Artificial Sequence: Synthetic oligonucleotide
  Target: LAMA2; (-) strand; PAM type: YTN; PAM sequence: TTT
aaggacatccaaggtgatgt

SEQ ID NO: 295204 - DNA, 20 bp, Artificial Sequence
  Description of Artificial Sequence: Synthetic oligonucleotide
  Target: LAMA2; (-) strand; PAM type: YTN; PAM sequence: TTT
taaggacatccaaggtgatg

SEQ ID NO: 295205 - DNA, 20 bp, Artificial Sequence
  Description of Artificial Sequence: Synthetic oligonucleotide
  Target: LAMA2; (-) strand; PAM type: YTN; PAM sequence: TTT
ttaaggacatccaaggtgat

SEQ ID NO: 295206 - DNA, 20 bp, Artificial Sequence
  Description of Artificial Sequence: Synthetic oligonucleotide
  Target: LAMA2; (-) strand; PAM type: YTN; PAM sequence: TTG
tttttaaggacatccaaggt

SEQ ID NO: 295207 - DNA, 20 bp, Artificial Sequence
  Description of Artificial Sequence: Synthetic oligonucleotide
  Target: LAMA2; (-) strand; PAM type: YTN; PAM sequence: TTT
gtttttaaggacatccaagg

SEQ ID NO: 295208 - DNA, 20 bp, Artificial Sequence
  Description of Artificial Sequence: Synthetic oligonucleotide
  Target: LAMA2; (-) strand; PAM type: YTN; PAM sequence: CTT
tgtttttaaggacatccaag

SEQ ID NO: 295209 - DNA, 20 bp, Artificial Sequence
  Description of Artificial Sequence: Synthetic oligonucleotide
  Target: LAMA2; (-) strand; PAM type: YTN; PAM sequence: TTA
tggtgtatagtcctttgttt

SEQ ID NO: 295210 - DNA, 20 bp, Artificial Sequence
  Description of Artificial Sequence: Synthetic oligonucleotide
  Target: LAMA2; (-) strand; PAM type: YTN; PAM sequence: TTA
aagccattatggtgtatagt

SEQ ID NO: 295211 - DNA, 20 bp, Artificial Sequence
  Description of Artificial Sequence: Synthetic oligonucleotide
  Target: LAMA2; (-) strand; PAM type: YTN; PAM sequence: TTT
aaagccattatggtgtatag

SEQ ID NO: 295212 - DNA, 20 bp, Artificial Sequence
  Description of Artificial Sequence: Synthetic oligonucleotide
  Target: LAMA2; (-) strand; PAM type: YTN; PAM sequence: CTC
aaagtttaaagccattatgg

SEQ ID NO: 295213 - DNA, 20 bp, Artificial Sequence
  Description of Artificial Sequence: Synthetic oligonucleotide
  Target: LAMA2; (-) strand; PAM type: YTN; PAM sequence: CTA
acatgtaacctcaaagttta

SEQ ID NO: 295214 - DNA, 20 bp, Artificial Sequence
  Description of Artificial Sequence: Synthetic oligonucleotide
  Target: LAMA2; (-) strand; PAM type: YTN; PAM sequence: CTC
taacatgtaacctcaaagtt

SEQ ID NO: 295215 - DNA, 20 bp, Artificial Sequence
  Description of Artificial Sequence: Synthetic oligonucleotide
  Target: LAMA2; (-) strand; PAM type: YTN; PAM sequence: CTG
atcactctaacatgtaacct

SEQ ID NO: 295216 - DNA, 20 bp, Artificial Sequence
  Description of Artificial Sequence: Synthetic oligonucleotide
  Target: LAMA2; (-) strand; PAM type: YTN; PAM sequence: TTG
taccaaactgatcactctaa

SEQ ID NO: 295217 - DNA, 20 bp, Artificial Sequence
  Description of Artificial Sequence: Synthetic oligonucleotide
  Target: LAMA2; (-) strand; PAM type: YTN; PAM sequence: TTA
tggaaaagagttgtaccaaa

SEQ ID NO: 295218 - DNA, 20 bp, Artificial Sequence
  Description of Artificial Sequence: Synthetic oligonucleotide
  Target: LAMA2; (-) strand; PAM type: YTN; PAM sequence: CTC
agatgagccaatgttatgga

SEQ ID NO: 295219 - DNA, 20 bp, Artificial Sequence
  Description of Artificial Sequence: Synthetic oligonucleotide
  Target: LAMA2; (-) strand; PAM type: YTN; PAM sequence: TTC
tcagatgagccaatgttatg

SEQ ID NO: 295220 - DNA, 20 bp, Artificial Sequence
  Description of Artificial Sequence: Synthetic oligonucleotide
  Target: LAMA2; (-) strand; PAM type: YTN; PAM sequence: TTA
ataaaacggtattctcagat

SEQ ID NO: 295221 - DNA, 20 bp, Artificial Sequence
  Description of Artificial Sequence: Synthetic oligonucleotide
  Target: LAMA2; (-) strand; PAM type: YTN; PAM sequence: CTT
aataaaacggtattctcaga

SEQ ID NO: 295222 - DNA, 20 bp, Artificial Sequence
  Description of Artificial Sequence: Synthetic oligonucleotide
  Target: LAMA2; (-) strand; PAM type: YTN; PAM sequence: CTC
aagaagcaggcagaagcagt

SEQ ID NO: 295223 - DNA, 20 bp, Artificial Sequence
  Description of Artificial Sequence: Synthetic oligonucleotide
  Target: LAMA2; (-) strand; PAM type: YTN; PAM sequence: CTG
caacgggcagccctcaagaa

SEQ ID NO: 295224 - DNA, 20 bp, Artificial Sequence
  Description of Artificial Sequence: Synthetic oligonucleotide
  Target: LAMA2; (-) strand; PAM type: YTN; PAM sequence: TTC
tgcaacgggcagccctcaag

SEQ ID NO: 295225 - DNA, 20 bp, Artificial Sequence
  Description of Artificial Sequence: Synthetic oligonucleotide
  Target: LAMA2; (-) strand; PAM type: YTN; PAM sequence: TTT
ctgcaacgggcagccctcaa

SEQ ID NO: 295226 - DNA, 20 bp, Artificial Sequence
  Description of Artificial Sequence: Synthetic oligonucleotide
  Target: LAMA2; (-) strand; PAM type: YTN; PAM sequence: CTC
cgtttctgcaacgggcagcc

SEQ ID NO: 295227 - DNA, 20 bp, Artificial Sequence
  Description of Artificial Sequence: Synthetic oligonucleotide
  Target: LAMA2; (-) strand; PAM type: YTN; PAM sequence: TTA
gatcctccgtttctgcaacg

SEQ ID NO: 295228 - DNA, 20 bp, Artificial Sequence
  Description of Artificial Sequence: Synthetic oligonucleotide
  Target: LAMA2; (-) strand; PAM type: YTN; PAM sequence: CTG
gattagatcctccgtttctg

SEQ ID NO: 295229 - DNA, 20 bp, Artificial Sequence
  Description of Artificial Sequence: Synthetic oligonucleotide
  Target: LAMA2; (-) strand; PAM type: YTN; PAM sequence: CTC
ctggattagatcctccgttt

SEQ ID NO: 295230 - DNA, 20 bp, Artificial Sequence
  Description of Artificial Sequence: Synthetic oligonucleotide
  Target: LAMA2; (-) strand; PAM type: YTN; PAM sequence: TTA
ggaagaagaacacctcctgg

SEQ ID NO: 295231 - DNA, 20 bp, Artificial Sequence
  Description of Artificial Sequence: Synthetic oligonucleotide
  Target: LAMA2; (-) strand; PAM type: YTN; PAM sequence: TTT
aggaagaagaacacctcctg

SEQ ID NO: 295232 - DNA, 20 bp, Artificial Sequence
  Description of Artificial Sequence: Synthetic oligonucleotide
  Target: LAMA2; (-) strand; PAM type: YTN; PAM sequence: TTG
aaatttaggaagaagaacac

SEQ ID NO: 295233 - DNA, 20 bp, Artificial Sequence
  Description of Artificial Sequence: Synthetic oligonucleotide
  Target: LAMA2; (-) strand; PAM type: YTN; PAM sequence: CTT
gaaatttaggaagaagaaca

SEQ ID NO: 295234 - DNA, 20 bp, Artificial Sequence
  Description of Artificial Sequence: Synthetic oligonucleotide
  Target: LAMA2; (-) strand; PAM type: YTN; PAM sequence: TTA
catccacttgaaatttagga

SEQ ID NO: 295235 - DNA, 20 bp, Artificial Sequence
  Description of Artificial Sequence: Synthetic oligonucleotide
  Target: LAMA2; (-) strand; PAM type: YTN; PAM sequence: TTA
caggttacatccacttgaaa

SEQ ID NO: 295236 - DNA, 20 bp, Artificial Sequence
  Description of Artificial Sequence: Synthetic oligonucleotide
  Target: LAMA2; (-) strand; PAM type: YTN; PAM sequence: TTA
agaatcattacaggttacat

SEQ ID NO: 295237 - DNA, 20 bp, Artificial Sequence
  Description of Artificial Sequence: Synthetic oligonucleotide
  Target: LAMA2; (-) strand; PAM type: YTN; PAM sequence: TTT
aagaatcattacaggttaca

SEQ ID NO: 295238 - DNA, 20 bp, Artificial Sequence
  Description of Artificial Sequence: Synthetic oligonucleotide
  Target: LAMA2; (-) strand; PAM type: YTN; PAM sequence: TTT
taagaatcattacaggttac

SEQ ID NO: 295239 - DNA, 20 bp, Artificial Sequence
  Description of Artificial Sequence: Synthetic oligonucleotide
  Target: LAMA2; (-) strand; PAM type: YTN; PAM sequence: CTT
ttaagaatcattacaggtta

SEQ ID NO: 295240 - DNA, 20 bp, Artificial Sequence
  Description of Artificial Sequence: Synthetic oligonucleotide
  Target: LAMA2; (-) strand; PAM type: YTN; PAM sequence: TTC
ttttaagaatcattacaggt

SEQ ID NO: 295241 - DNA, 20 bp, Artificial Sequence
  Description of Artificial Sequence: Synthetic oligonucleotide
  Target: LAMA2; (-) strand; PAM type: YTN; PAM sequence: TTG
tcaaagttcttttaagaatc

SEQ ID NO: 295242 - DNA, 20 bp, Artificial Sequence
  Description of Artificial Sequence: Synthetic oligonucleotide
  Target: LAMA2; (-) strand; PAM type: YTN; PAM sequence: TTT
gtcaaagttcttttaagaat

SEQ ID NO: 295243 - DNA, 20 bp, Artificial Sequence
  Description of Artificial Sequence: Synthetic oligonucleotide
  Target: LAMA2; (-) strand; PAM type: YTN; PAM sequence: CTT
tgtcaaagttcttttaagaa

SEQ ID NO: 295244 - DNA, 20 bp, Artificial Sequence
  Description of Artificial Sequence: Synthetic oligonucleotide
  Target: LAMA2; (-) strand; PAM type: YTN; PAM sequence: TTG
accagaaaaggacagggact

SEQ ID NO: 295245 - DNA, 20 bp, Artificial Sequence
  Description of Artificial Sequence: Synthetic oligonucleotide
  Target: LAMA2; (-) strand; PAM type: YTN; PAM sequence: TTT
gaccagaaaaggacagggac

SEQ ID NO: 295246 - DNA, 20 bp, Artificial Sequence
  Description of Artificial Sequence: Synthetic oligonucleotide
  Target: LAMA2; (-) strand; PAM type: YTN; PAM sequence: CTT
tgaccagaaaaggacaggga

SEQ ID NO: 295247 - DNA, 20 bp, Artificial Sequence
  Description of Artificial Sequence: Synthetic oligonucleotide
  Target: LAMA2; (-) strand; PAM type: YTN; PAM sequence: TTA
gaaaaaaacctttgaccaga

SEQ ID NO: 295248 - DNA, 20 bp, Artificial Sequence
  Description of Artificial Sequence: Synthetic oligonucleotide
  Target: LAMA2; (-) strand; PAM type: YTN; PAM sequence: TTT
agaaaaaaacctttgaccag

SEQ ID NO: 295249 - DNA, 20 bp, Artificial Sequence
  Description of Artificial Sequence: Synthetic oligonucleotide
  Target: LAMA2; (-) strand; PAM type: YTN; PAM sequence: TTT
tagaaaaaaacctttgacca

SEQ ID NO: 295250 - DNA, 20 bp, Artificial Sequence
  Description of Artificial Sequence: Synthetic oligonucleotide
  Target: LAMA2; (-) strand; PAM type: YTN; PAM sequence: CTG
gtcaagccattttagaaaaa

SEQ ID NO: 295251 - DNA, 20 bp, Artificial Sequence
  Description of Artificial Sequence: Synthetic oligonucleotide
  Target: LAMA2; (-) strand; PAM type: YTN; PAM sequence: CTA
gatggacaaggcactggtca

SEQ ID NO: 295252 - DNA, 20 bp, Artificial Sequence
  Description of Artificial Sequence: Synthetic oligonucleotide
  Target: LAMA2; (-) strand; PAM type: YTN; PAM sequence: TTC
tagatggacaaggcactggt

SEQ ID NO: 295253 - DNA, 20 bp, Artificial Sequence
  Description of Artificial Sequence: Synthetic oligonucleotide
  Target: LAMA2; (-) strand; PAM type: YTN; PAM sequence: TTT
ctagatggacaaggcactgg

SEQ ID NO: 295254 - DNA, 20 bp, Artificial Sequence
  Description of Artificial Sequence: Synthetic oligonucleotide
  Target: LAMA2; (-) strand; PAM type: YTN; PAM sequence: TTT
tctagatggacaaggcactg

SEQ ID NO: 295255 - DNA, 20 bp, Artificial Sequence
  Description of Artificial Sequence: Synthetic oligonucleotide
  Target: LAMA2; (-) strand; PAM type: YTN; PAM sequence: CTA
tgagattttctagatggaca

SEQ ID NO: 295256 - DNA, 20 bp, Artificial Sequence
  Description of Artificial Sequence: Synthetic oligonucleotide
  Target: LAMA2; (-) strand; PAM type: YTN; PAM sequence: TTG
tatactatgagattttctag

SEQ ID NO: 295257 - DNA, 20 bp, Artificial Sequence
  Description of Artificial Sequence: Synthetic oligonucleotide
  Target: LAMA2; (-) strand; PAM type: YTN; PAM sequence: TTC
gttgtatactatgagatttt

SEQ ID NO: 295258 - DNA, 20 bp, Artificial Sequence
  Description of Artificial Sequence: Synthetic oligonucleotide
  Target: LAMA2; (-) strand; PAM type: YTN; PAM sequence: TTT
cgttgtatactatgagattt

SEQ ID NO: 295259 - DNA, 20 bp, Artificial Sequence
  Description of Artificial Sequence: Synthetic oligonucleotide
  Target: LAMA2; (-) strand; PAM type: YTN; PAM sequence: TTG
tttcgttgtatactatgaga

SEQ ID NO: 295260 - DNA, 20 bp, Artificial Sequence
  Description of Artificial Sequence: Synthetic oligonucleotide
  Target: LAMA2; (-) strand; PAM type: YTN; PAM sequence: TTG
ttgtttcgttgtatactatg

SEQ ID NO: 295261 - DNA, 20 bp, Artificial Sequence
  Description of Artificial Sequence: Synthetic oligonucleotide
  Target: LAMA2; (-) strand; PAM type: YTN; PAM sequence: TTG
ttgttgtttcgttgtatact

SEQ ID NO: 295262 - DNA, 20 bp, Artificial Sequence
  Description of Artificial Sequence: Synthetic oligonucleotide
  Target: LAMA2; (-) strand; PAM type: YTN; PAM sequence: TTT
gttgttgtttcgttgtatac

SEQ ID NO: 295263 - DNA, 20 bp, Artificial Sequence
  Description of Artificial Sequence: Synthetic oligonucleotide
  Target: LAMA2; (-) strand; PAM type: YTN; PAM sequence: TTT
tgttgttgtttcgttgtata

SEQ ID NO: 295264 - DNA, 20 bp, Artificial Sequence
  Description of Artificial Sequence: Synthetic oligonucleotide
  Target: LAMA2; (-) strand; PAM type: YTN; PAM sequence: TTA
ttttgttgttgtttcgttgt

SEQ ID NO: 295265 - DNA, 20 bp, Artificial Sequence
  Description of Artificial Sequence: Synthetic oligonucleotide
  Target: LAMA2; (-) strand; PAM type: YTN; PAM sequence: TTT
attttgttgttgtttcgttg

SEQ ID NO: 295266 - DNA, 20 bp, Artificial Sequence
  Description of Artificial Sequence: Synthetic oligonucleotide
  Target: LAMA2; (-) strand; PAM type: YTN; PAM sequence: TTT
tattttgttgttgtttcgtt

SEQ ID NO: 295267 - DNA, 20 bp, Artificial Sequence
  Description of Artificial Sequence: Synthetic oligonucleotide
  Target: LAMA2; (-) strand; PAM type: YTN; PAM sequence: TTT
ttattttgttgttgtttcgt

SEQ ID NO: 295268 - DNA, 20 bp, Artificial Sequence
  Description of Artificial Sequence: Synthetic oligonucleotide
  Target: LAMA2; (-) strand; PAM type: YTN; PAM sequence: TTG
tttttattttgttgttgttt

SEQ ID NO: 295269 - DNA, 20 bp, Artificial Sequence
  Description of Artificial Sequence: Synthetic oligonucleotide
  Target: LAMA2; (-) strand; PAM type: YTN; PAM sequence: TTT
gtttttattttgttgttgtt

SEQ ID NO: 295270 - DNA, 20 bp, Artificial Sequence
  Description of Artificial Sequence: Synthetic oligonucleotide
  Target: LAMA2; (-) strand; PAM type: YTN; PAM sequence: TTG
gtttgtttttattttgttgt

SEQ ID NO: 295271 - DNA, 20 bp, Artificial Sequence
  Description of Artificial Sequence: Synthetic oligonucleotide
  Target: LAMA2; (-) strand; PAM type: YTN; PAM sequence: TTT
ggtttgtttttattttgttg

SEQ ID NO: 295272 - DNA, 20 bp, Artificial Sequence
  Description of Artificial Sequence: Synthetic oligonucleotide
  Target: LAMA2; (-) strand; PAM type: YTN; PAM sequence: TTT
tggtttgtttttattttgtt

SEQ ID NO: 295273 - DNA, 20 bp, Artificial Sequence
  Description of Artificial Sequence: Synthetic oligonucleotide
  Target: LAMA2; (-) strand; PAM type: YTN; PAM sequence: TTT
ttggtttgtttttattttgt

SEQ ID NO: 295274 - DNA, 20 bp, Artificial Sequence
  Description of Artificial Sequence: Synthetic oligonucleotide
  Target: LAMA2; (-) strand; PAM type: YTN; PAM sequence: TTT
tttggtttgtttttattttg

SEQ ID NO: 295275 - DNA, 20 bp, Artificial Sequence
  Description of Artificial Sequence: Synthetic oligonucleotide
  Target: LAMA2; (-) strand; PAM type: YTN; PAM sequence: CTA
agcagcagttttttggtttg

SEQ ID NO: 295276 - DNA, 20 bp, Artificial Sequence
  Description of Artificial Sequence: Synthetic oligonucleotide
  Target: LAMA2; (-) strand; PAM type: YTN; PAM sequence: CTG
agctaagcagcagttttttg

SEQ ID NO: 295277 - DNA, 20 bp, Artificial Sequence
  Description of Artificial Sequence: Synthetic oligonucleotide
  Target: LAMA2; (-) strand; PAM type: YTN; PAM sequence: CTG
gtcctgagctaagcagcagt

SEQ ID NO: 295278 - DNA, 20 bp, Artificial Sequence
  Description of Artificial Sequence: Synthetic oligonucleotide
  Target: LAMA2; (-) strand; PAM type: YTN; PAM sequence: CTG
gacaggtgtatccaaaactg

SEQ ID NO: 295279 - DNA, 20 bp, Artificial Sequence
  Description of Artificial Sequence: Synthetic oligonucleotide
  Target: LAMA2; (-) strand; PAM type: YTN; PAM sequence: CTG
gtagactggacaggtgtatc

SEQ ID NO: 295280 - DNA, 20 bp, Artificial Sequence
  Description of Artificial Sequence: Synthetic oligonucleotide
  Target: LAMA2; (-) strand; PAM type: YTN; PAM sequence: TTG
ctggtagactggacaggtgt

SEQ ID NO: 295281 - DNA, 20 bp, Artificial Sequence
  Description of Artificial Sequence: Synthetic oligonucleotide
  Target: LAMA2; (-) strand; PAM type: YTN; PAM sequence: TTG
gattgctggtagactggaca

SEQ ID NO: 295282 - DNA, 20 bp, Artificial Sequence
  Description of Artificial Sequence: Synthetic oligonucleotide
  Target: LAMA2; (-) strand; PAM type: YTN; PAM sequence: TTT
ggattgctggtagactggac

SEQ ID NO: 295283 - DNA, 20 bp, Artificial Sequence
  Description of Artificial Sequence: Synthetic oligonucleotide
  Target: LAMA2; (-) strand; PAM type: YTN; PAM sequence: TTT
tggattgctggtagactgga

SEQ ID NO: 295284 - DNA, 20 bp, Artificial Sequence
  Description of Artificial Sequence: Synthetic oligonucleotide
  Target: LAMA2; (-) strand; PAM type: YTN; PAM sequence: CTT
ttggattgctggtagactgg

SEQ ID NO: 295285 - DNA, 20 bp, Artificial Sequence
  Description of Artificial Sequence: Synthetic oligonucleotide
  Target: LAMA2; (-) strand; PAM type: YTN; PAM sequence: TTA
tggggaacttttggattgct

SEQ ID NO: 295286 - DNA, 20 bp, Artificial Sequence
  Description of Artificial Sequence: Synthetic oligonucleotide
  Target: LAMA2; (-) strand; PAM type: YTN; PAM sequence: CTG
tatgttatggggaacttttg

SEQ ID NO: 295287 - DNA, 20 bp, Artificial Sequence
  Description of Artificial Sequence: Synthetic oligonucleotide
  Target: LAMA2; (-) strand; PAM type: YTN; PAM sequence: CTC
ccggtagcagctgtatgtta

SEQ ID NO: 295288 - DNA, 20 bp, Artificial Sequence
  Description of Artificial Sequence: Synthetic oligonucleotide
  Target: LAMA2; (-) strand; PAM type: YTN; PAM sequence: TTG
tacactcccggtagcagctg

SEQ ID NO: 295289 - DNA, 20 bp, Artificial Sequence
  Description of Artificial Sequence: Synthetic oligonucleotide
  Target: LAMA2; (-) strand; PAM type: YTN; PAM sequence: TTC
aaggtggcagttgtacactc

SEQ ID NO: 295290 - DNA, 20 bp, Artificial Sequence
  Description of Artificial Sequence: Synthetic oligonucleotide
  Target: LAMA2; (-) strand; PAM type: YTN; PAM sequence: TTT
caaggtggcagttgtacact

SEQ ID NO: 295291 - DNA, 20 bp, Artificial Sequence
  Description of Artificial Sequence: Synthetic oligonucleotide
  Target: LAMA2; (-) strand; PAM type: YTN; PAM sequence: TTT
tcaaggtggcagttgtacac

SEQ ID NO: 295292 - DNA, 20 bp, Artificial Sequence
  Description of Artificial Sequence: Synthetic oligonucleotide
  Target: LAMA2; (-) strand; PAM type: YTN; PAM sequence: TTA
aaaaattttcaaggtggcag

SEQ ID NO: 295293 - DNA, 20 bp, Artificial Sequence
  Description of Artificial Sequence: Synthetic oligonucleotide
  Target: LAMA2; (-) strand; PAM type: YTN; PAM sequence: TTT
aaaaaattttcaaggtggca

SEQ ID NO: 295294 - DNA, 20 bp, Artificial Sequence
  Description of Artificial Sequence: Synthetic oligonucleotide
  Target: LAMA2; (-) strand; PAM type: YTN; PAM sequence: TTA
aaatttaaaaaattttcaag

SEQ ID NO: 295295 - DNA, 20 bp, Artificial Sequence
  Description of Artificial Sequence: Synthetic oligonucleotide
  Target: LAMA2; (-) strand; PAM type: YTN; PAM sequence: CTA
ttaaaatttaaaaaattttc

SEQ ID NO: 295296 - DNA, 20 bp, Artificial Sequence
  Description of Artificial Sequence: Synthetic oligonucleotide
  Target: LAMA2; (-) strand; PAM type: YTN; PAM sequence: CTC
tattaaaatttaaaaaattt

SEQ ID NO: 295297 - DNA, 20 bp, Artificial Sequence
  Description of Artificial Sequence: Synthetic oligonucleotide
  Target: LAMA2; (-) strand; PAM type: YTN; PAM sequence: TTC
tctattaaaatttaaaaaat

SEQ ID NO: 295298 - DNA, 20 bp, Artificial Sequence
  Description of Artificial Sequence: Synthetic oligonucleotide
  Target: LAMA2; (-) strand; PAM type: YTN; PAM sequence: CTT
ctctattaaaatttaaaaaa

SEQ ID NO: 295299 - DNA, 20 bp, Artificial Sequence
  Description of Artificial Sequence: Synthetic oligonucleotide
  Target: LAMA2; (-) strand; PAM type: YTN; PAM sequence: CTA
tatgtaaatgtcaatataac

SEQ ID NO: 295300 - DNA, 20 bp, Artificial Sequence
  Description of Artificial Sequence: Synthetic oligonucleotide
  Target: LAMA2; (-) strand; PAM type: YTN; PAM sequence: TTA
ctatatgtaaatgtcaatat

SEQ ID NO: 295301 - DNA, 20 bp, Artificial Sequence
  Description of Artificial Sequence: Synthetic oligonucleotide
  Target: LAMA2; (-) strand; PAM type: YTN; PAM sequence: CTA
attactatatgtaaatgtca

SEQ ID NO: 295302 - DNA, 20 bp, Artificial Sequence
  Description of Artificial Sequence: Synthetic oligonucleotide
  Target: LAMA2; (-) strand; PAM type: YTN; PAM sequence: CTC
gtctaattactatatgtaaa

SEQ ID NO: 295303 - DNA, 20 bp, Artificial Sequence
  Description of Artificial Sequence: Synthetic oligonucleotide
  Target: LAMA2; (-) strand; PAM type: YTN; PAM sequence: TTA
cagtcactcgtctaattact

SEQ ID NO: 295304 - DNA, 20 bp, Artificial Sequence
  Description of Artificial Sequence: Synthetic oligonucleotide
  Target: LAMA2; (-) strand; PAM type: YTN; PAM sequence: TTG
cggttacagtcactcgtcta

SEQ ID NO: 295305 - DNA, 20 bp, Artificial Sequence
  Description of Artificial Sequence: Synthetic oligonucleotide
  Target: LAMA2; (-) strand; PAM type: YTN; PAM sequence: TTA
ttgcggttacagtcactcgt

SEQ ID NO: 295306 - DNA, 20 bp, Artificial Sequence
  Description of Artificial Sequence: Synthetic oligonucleotide
  Target: LAMA2; (-) strand; PAM type: YTN; PAM sequence: TTA
tgtccatattattgcggtta

SEQ ID NO: 295307 - DNA, 20 bp, Artificial Sequence
  Description of Artificial Sequence: Synthetic oligonucleotide
  Target: LAMA2; (-) strand; PAM type: YTN; PAM sequence: TTA
aaagagaaccaccagtgggt

SEQ ID NO: 295308 - DNA, 20 bp, Artificial Sequence
  Description of Artificial Sequence: Synthetic oligonucleotide
  Target: LAMA2; (-) strand; PAM type: YTN; PAM sequence: CTT
aaaagagaaccaccagtggg

SEQ ID NO: 295309 - DNA, 20 bp, Artificial Sequence
  Description of Artificial Sequence: Synthetic oligonucleotide
  Target: LAMA2; (-) strand; PAM type: YTN; PAM sequence: TTA
catgtagcttaaaagagaac

SEQ ID NO: 295310 - DNA, 20 bp, Artificial Sequence
  Description of Artificial Sequence: Synthetic oligonucleotide
  Target: LAMA2; (-) strand; PAM type: YTN; PAM sequence: TTA
ggaaacaattacatgtagct

SEQ ID NO: 295311 - DNA, 20 bp, Artificial Sequence
  Description of Artificial Sequence: Synthetic oligonucleotide
  Target: LAMA2; (-) strand; PAM type: YTN; PAM sequence: CTG
aggaattaggaaacaattac

SEQ ID NO: 295312 - DNA, 20 bp, Artificial Sequence
  Description of Artificial Sequence: Synthetic oligonucleotide
  Target: LAMA2; (-) strand; PAM type: YTN; PAM sequence: TTA
agaaaggtggatggatgctg

SEQ ID NO: 295313 - DNA, 20 bp, Artificial Sequence
  Description of Artificial Sequence: Synthetic oligonucleotide
  Target: LAMA2; (-) strand; PAM type: YTN; PAM sequence: TTG
agggattaagaaaggtggat

SEQ ID NO: 295314 - DNA, 20 bp, Artificial Sequence
  Description of Artificial Sequence: Synthetic oligonucleotide
  Target: LAMA2; (-) strand; PAM type: YTN; PAM sequence: CTG
aaaattgagggattaagaaa

SEQ ID NO: 295315 - DNA, 20 bp, Artificial Sequence
  Description of Artificial Sequence: Synthetic oligonucleotide
  Target: LAMA2; (-) strand; PAM type: YTN; PAM sequence: CTC
tgaaaattgagggattaaga

SEQ ID NO: 295316 - DNA, 20 bp, Artificial Sequence
  Description of Artificial Sequence: Synthetic oligonucleotide
  Target: LAMA2; (-) strand; PAM type: YTN; PAM sequence: CTC
agctctgaaaattgagggat

SEQ ID NO: 295317 - DNA, 20 bp, Artificial Sequence
  Description of Artificial Sequence: Synthetic oligonucleotide
  Target: LAMA2; (-) strand; PAM type: YTN; PAM sequence: TTA
caccctcagctctgaaaatt

SEQ ID NO: 295318 - DNA, 20 bp, Artificial Sequence
  Description of Artificial Sequence: Synthetic oligonucleotide
  Target: LAMA2; (-) strand; PAM type: YTN; PAM sequence: TTT
acaccctcagctctgaaaat

SEQ ID NO: 295319 - DNA, 20 bp, Artificial Sequence
  Description of Artificial Sequence: Synthetic oligonucleotide
  Target: LAMA2; (-) strand; PAM type: YTN; PAM sequence: CTT
tacaccctcagctctgaaaa

SEQ ID NO: 295320 - DNA, 20 bp, Artificial Sequence
  Description of Artificial Sequence: Synthetic oligonucleotide
  Target: LAMA2; (-) strand; PAM type: YTN; PAM sequence: CTG
aaacatctttacaccctcag

SEQ ID NO: 295321 - DNA, 20 bp, Artificial Sequence
  Description of Artificial Sequence: Synthetic oligonucleotide
  Target: LAMA2; (-) strand; PAM type: YTN; PAM sequence: TTC
actgaaacatctttacaccc

SEQ ID NO: 295322 - DNA, 20 bp, Artificial Sequence
  Description of Artificial Sequence: Synthetic oligonucleotide
  Target: LAMA2; (-) strand; PAM type: YTN; PAM sequence: TTT
cactgaaacatctttacacc

SEQ ID NO: 295323 - DNA, 20 bp, Artificial Sequence
  Description of Artificial Sequence: Synthetic oligonucleotide
  Target: LAMA2; (-) strand; PAM type: YTN; PAM sequence: CTG
ggggcagaatttcactgaaa

SEQ ID NO: 295324 - DNA, 20 bp, Artificial Sequence
  Description of Artificial Sequence: Synthetic oligonucleotide
  Target: LAMA2; (-) strand; PAM type: YTN; PAM sequence: CTG
tgagtccactgggggcagaa

SEQ ID NO: 295325 - DNA, 20 bp, Artificial Sequence
  Description of Artificial Sequence: Synthetic oligonucleotide
  Target: LAMA2; (-) strand; PAM type: YTN; PAM sequence: CTG
ctgtgagtccactgggggca

SEQ ID NO: 295326 - DNA, 20 bp, Artificial Sequence
  Description of Artificial Sequence: Synthetic oligonucleotide
  Target: LAMA2; (-) strand; PAM type: YTN; PAM sequence: CTA
tctgctgtgagtccactggg

SEQ ID NO: 295327 - DNA, 20 bp, Artificial Sequence
  Description of Artificial Sequence: Synthetic oligonucleotide
  Target: LAMA2; (-) strand; PAM type: YTN; PAM sequence: CTA
agataatcctatctgctgtg

SEQ ID NO: 295328 - DNA, 20 bp, Artificial Sequence
  Description of Artificial Sequence: Synthetic oligonucleotide
  Target: LAMA2; (-) strand; PAM type: YTN; PAM sequence: CTC
agaaatcactaagataatcc

SEQ ID NO: 295329 - DNA, 20 bp, Artificial Sequence
  Description of Artificial Sequence: Synthetic oligonucleotide
  Target: LAMA2; (-) strand; PAM type: YTN; PAM sequence: TTC
ctcagaaatcactaagataa

SEQ ID NO: 295330 - DNA, 20 bp, Artificial Sequence
  Description of Artificial Sequence: Synthetic oligonucleotide
  Target: LAMA2; (-) strand; PAM type: YTN; PAM sequence: CTT
cctcagaaatcactaagata

SEQ ID NO: 295331 - DNA, 20 bp, Artificial Sequence
  Description of Artificial Sequence: Synthetic oligonucleotide
  Target: LAMA2; (-) strand; PAM type: YTN; PAM sequence: TTG
cagtcttcctcagaaatcac

SEQ ID NO: 295332 - DNA, 20 bp, Artificial Sequence
  Description of Artificial Sequence: Synthetic oligonucleotide
  Target: LAMA2; (-) strand; PAM type: YTN; PAM sequence: CTT
gcagtcttcctcagaaatca

SEQ ID NO: 295333 - DNA, 20 bp, Artificial Sequence
  Description of Artificial Sequence: Synthetic oligonucleotide
  Target: LAMA2; (-) strand; PAM type: YTN; PAM sequence: CTC
gataaacacacgcagcttgc

SEQ ID NO: 295334 - DNA, 20 bp, Artificial Sequence
  Description of Artificial Sequence: Synthetic oligonucleotide
  Target: LAMA2; (-) strand; PAM type: YTN; PAM sequence: TTC
ccggacagaggaccgtctcg

SEQ ID NO: 295335 - DNA, 20 bp, Artificial Sequence
  Description of Artificial Sequence: Synthetic oligonucleotide
  Target: LAMA2; (-) strand; PAM type: YTN; PAM sequence: TTT
cccggacagaggaccgtctc

SEQ ID NO: 295336 - DNA, 20 bp, Artificial Sequence
  Description of Artificial Sequence: Synthetic oligonucleotide
  Target: LAMA2; (-) strand; PAM type: YTN; PAM sequence: CTC
acgatatttcccggacagag

SEQ ID NO: 295337 - DNA, 20 bp, Artificial Sequence
  Description of Artificial Sequence: Synthetic oligonucleotide
  Target: LAMA2; (-) strand; PAM type: YTN; PAM sequence: CTC
tcacgatatttcccggacag

SEQ ID NO: 295338 - DNA, 20 bp, Artificial Sequence
  Description of Artificial Sequence: Synthetic oligonucleotide
  Target: LAMA2; (-) strand; PAM type: YTN; PAM sequence: TTA
tcagcctctcacgatatttc

SEQ ID NO: 295339 - DNA, 20 bp, Artificial Sequence
  Description of Artificial Sequence: Synthetic oligonucleotide
  Target: LAMA2; (-) strand; PAM type: YTN; PAM sequence: TTT
atcagcctctcacgatattt

SEQ ID NO: 295340 - DNA, 20 bp, Artificial Sequence
  Description of Artificial Sequence: Synthetic oligonucleotide
  Target: LAMA2; (-) strand; PAM type: YTN; PAM sequence: TTT
tatcagcctctcacgatatt

SEQ ID NO: 295341 - DNA, 20 bp, Artificial Sequence
  Description of Artificial Sequence: Synthetic oligonucleotide
  Target: LAMA2; (-) strand; PAM type: YTN; PAM sequence: CTT
ttatcagcctctcacgatat

SEQ ID NO: 295342 - DNA, 20 bp, Artificial Sequence
  Description of Artificial Sequence: Synthetic oligonucleotide
  Target: LAMA2; (-) strand; PAM type: YTN; PAM sequence: TTG
ggatcttttatcagcctctc

SEQ ID NO: 295343 - DNA, 20 bp, Artificial Sequence
  Description of Artificial Sequence: Synthetic oligonucleotide
  Target: LAMA2; (-) strand; PAM type: YTN; PAM sequence: TTA
atagaattgggatcttttat

SEQ ID NO: 295344 - DNA, 20 bp, Artificial Sequence
  Description of Artificial Sequence: Synthetic oligonucleotide
  Target: LAMA2; (-) strand; PAM type: YTN; PAM sequence: CTA
ttaatagaattgggatcttt

SEQ ID NO: 295345 - DNA, 20 bp, Artificial Sequence
  Description of Artificial Sequence: Synthetic oligonucleotide
  Target: LAMA2; (-) strand; PAM type: YTN; PAM sequence: TTC
tattaatagaattgggatct

SEQ ID NO: 295346 - DNA, 20 bp, Artificial Sequence
  Description of Artificial Sequence: Synthetic oligonucleotide
  Target: LAMA2; (-) strand; PAM type: YTN; PAM sequence: CTT
ctattaatagaattgggatc

SEQ ID NO: 295347 - DNA, 20 bp, Artificial Sequence
  Description of Artificial Sequence: Synthetic oligonucleotide
  Target: LAMA2; (-) strand; PAM type: YTN; PAM sequence: CTC
agtcatgaatacttctatta

SEQ ID NO: 295348 - DNA, 20 bp, Artificial Sequence
  Description of Artificial Sequence: Synthetic oligonucleotide
  Target: LAMA2; (-) strand; PAM type: YTN; PAM sequence: TTA
agatctcagtcatgaatact

SEQ ID NO: 295349 - DNA, 20 bp, Artificial Sequence
  Description of Artificial Sequence: Synthetic oligonucleotide
  Target: LAMA2; (-) strand; PAM type: YTN; PAM sequence: CTT
aagatctcagtcatgaatac

SEQ ID NO: 295350 - DNA, 20 bp, Artificial Sequence
  Description of Artificial Sequence: Synthetic oligonucleotide
  Target: LAMA2; (-) strand; PAM type: YTN; PAM sequence: CTG
tagcttaagatctcagtcat

SEQ ID NO: 295351 - DNA, 20 bp, Artificial Sequence
  Description of Artificial Sequence: Synthetic oligonucleotide
  Target: LAMA2; (-) strand; PAM type: YTN; PAM sequence: CTC
tgtagcttaagatctcagtc

SEQ ID NO: 295352 - DNA, 20 bp, Artificial Sequence
  Description of Artificial Sequence: Synthetic oligonucleotide
  Target: LAMA2; (-) strand; PAM type: YTN; PAM sequence: CTG
caaaaagagcccgaatggaa

SEQ ID NO: 295353 - DNA, 20 bp, Artificial Sequence
  Description of Artificial Sequence: Synthetic oligonucleotide
  Target: LAMA2; (-) strand; PAM type: YTN; PAM sequence: CTG
cctgcaaaaagagcccgaat

SEQ ID NO: 295354 - DNA, 20 bp, Artificial Sequence
  Description of Artificial Sequence: Synthetic oligonucleotide
  Target: LAMA2; (-) strand; PAM type: YTN; PAM sequence: TTA
cgctgcctgcaaaaagagcc

SEQ ID NO: 295355 - DNA, 20 bp, Artificial Sequence
  Description of Artificial Sequence: Synthetic oligonucleotide
  Target: LAMA2; (-) strand; PAM type: YTN; PAM sequence: TTA
ttacgctgcctgcaaaaaga

SEQ ID NO: 295356 - DNA, 20 bp, Artificial Sequence
  Description of Artificial Sequence: Synthetic oligonucleotide
  Target: LAMA2; (-) strand; PAM type: YTN; PAM sequence: CTT
attacgctgcctgcaaaaag

SEQ ID NO: 295357 - DNA, 20 bp, Artificial Sequence
  Description of Artificial Sequence: Synthetic oligonucleotide
  Target: LAMA2; (-) strand; PAM type: YTN; PAM sequence: TTC
ttattacgctgcctgcaaaa

SEQ ID NO: 295358 - DNA, 20 bp, Artificial Sequence
  Description of Artificial Sequence: Synthetic oligonucleotide
  Target: LAMA2; (-) strand; PAM type: YTN; PAM sequence: TTT
cttattacgctgcctgcaaa

SEQ ID NO: 295359 - DNA, 20 bp, Artificial Sequence
  Description of Artificial Sequence: Synthetic oligonucleotide
  Target: LAMA2; (-) strand; PAM type: YTN; PAM sequence: CTT
tcttattacgctgcctgcaa

SEQ ID NO: 295360 - DNA, 20 bp, Artificial Sequence
  Description of Artificial Sequence: Synthetic oligonucleotide
  Target: LAMA2; (-) strand; PAM type: YTN; PAM sequence: TTA
gaggcagcatgtggcacctt

SEQ ID NO: 295361 - DNA, 20 bp, Artificial Sequence
  Description of Artificial Sequence: Synthetic oligonucleotide
  Target: LAMA2; (-) strand; PAM type: YTN; PAM sequence: TTT
agaggcagcatgtggcacct

SEQ ID NO: 295362 - DNA, 20 bp, Artificial Sequence
  Description of Artificial Sequence: Synthetic oligonucleotide
  Target: LAMA2; (-) strand; PAM type: YTN; PAM sequence: TTT
tagaggcagcatgtggcacc

SEQ ID NO: 295363 - DNA, 20 bp, Artificial Sequence
  Description of Artificial Sequence: Synthetic oligonucleotide
  Target: LAMA2; (-) strand; PAM type: YTN; PAM sequence: CTT
ttagaggcagcatgtggcac

SEQ ID NO: 295364 - DNA, 20 bp, Artificial Sequence
  Description of Artificial Sequence: Synthetic oligonucleotide
  Target: LAMA2; (-) strand; PAM type: YTN; PAM sequence: CTC
ttttagaggcagcatgtggc

SEQ ID NO: 295365 - DNA, 20 bp, Artificial Sequence
  Description of Artificial Sequence: Synthetic oligonucleotide
  Target: LAMA2; (-) strand; PAM type: YTN; PAM sequence: CTG
aatggcctcttttagaggca

SEQ ID NO: 295366 - DNA, 20 bp, Artificial Sequence
  Description of Artificial Sequence: Synthetic oligonucleotide
  Target: LAMA2; (-) strand; PAM type: YTN; PAM sequence: TTC
gcacagctgaatggcctctt

SEQ ID NO: 295367 - DNA, 20 bp, Artificial Sequence
  Description of Artificial Sequence: Synthetic oligonucleotide
  Target: LAMA2; (-) strand; PAM type: YTN; PAM sequence: TTC
attcgcacagctgaatggcc

SEQ ID NO: 295368 - DNA, 20 bp, Artificial Sequence
  Description of Artificial Sequence: Synthetic oligonucleotide
  Target: LAMA2; (-) strand; PAM type: YTN; PAM sequence: CTA
ttcattcgcacagctgaatg

SEQ ID NO: 295369 - DNA, 20 bp, Artificial Sequence
  Description of Artificial Sequence: Synthetic oligonucleotide
  Target: LAMA2; (-) strand; PAM type: YTN; PAM sequence: CTA
tgcaaaaccccgtgggtagg

SEQ ID NO: 295370 - DNA, 20 bp, Artificial Sequence
  Description of Artificial Sequence: Synthetic oligonucleotide
  Target: LAMA2; (-) strand; PAM type: YTN; PAM sequence: TTC
acacagctatgcaaaacccc

SEQ ID NO: 295371 - DNA, 20 bp, Artificial Sequence
  Description of Artificial Sequence: Synthetic oligonucleotide
  Target: LAMA2; (-) strand; PAM type: YTN; PAM sequence: CTG
tggccgaaattcacacagct

SEQ ID NO: 295372 - DNA, 20 bp, Artificial Sequence
  Description of Artificial Sequence: Synthetic oligonucleotide
  Target: LAMA2; (-) strand; PAM type: YTN; PAM sequence: TTA
taaagagcagactgtggccg

SEQ ID NO: 295373 - DNA, 20 bp, Artificial Sequence
  Description of Artificial Sequence: Synthetic oligonucleotide
  Target: LAMA2; (-) strand; PAM type: YTN; PAM sequence: TTC
ccaggagatggtcagttata

SEQ ID NO: 295374 - DNA, 20 bp, Artificial Sequence
  Description of Artificial Sequence: Synthetic oligonucleotide
  Target: LAMA2; (-) strand; PAM type: YTN; PAM sequence: CTT
cccaggagatggtcagttat

SEQ ID NO: 295375 - DNA, 20 bp, Artificial Sequence
  Description of Artificial Sequence: Synthetic oligonucleotide
  Target: LAMA2; (-) strand; PAM type: YTN; PAM sequence: TTG
cttcccaggagatggtcagt

SEQ ID NO: 295376 - DNA, 20 bp, Artificial Sequence
  Description of Artificial Sequence: Synthetic oligonucleotide
  Target: LAMA2; (-) strand; PAM type: YTN; PAM sequence: CTT
gcttcccaggagatggtcag

SEQ ID NO: 295377 - DNA, 20 bp, Artificial Sequence
  Description of Artificial Sequence: Synthetic oligonucleotide
  Target: LAMA2; (-) strand; PAM type: YTN; PAM sequence: TTC
ttgcttcccaggagatggtc

SEQ ID NO: 295378 - DNA, 20 bp, Artificial Sequence
  Description of Artificial Sequence: Synthetic oligonucleotide
  Target: LAMA2; (-) strand; PAM type: YTN; PAM sequence: CTT
cttgcttcccaggagatggt

SEQ ID NO: 295379 - DNA, 20 bp, Artificial Sequence
  Description of Artificial Sequence: Synthetic oligonucleotide
  Target: LAMA2; (-) strand; PAM type: YTN; PAM sequence: TTC
ccttcttgcttcccaggaga

SEQ ID NO: 295380 - DNA, 20 bp, Artificial Sequence
  Description of Artificial Sequence: Synthetic oligonucleotide
  Target: LAMA2; (-) strand; PAM type: YTN; PAM sequence: TTT
cccttcttgcttcccaggag

SEQ ID NO: 295381 - DNA, 20 bp, Artificial Sequence
  Description of Artificial Sequence: Synthetic oligonucleotide
  Target: LAMA2; (-) strand; PAM type: YTN; PAM sequence: TTC
atggaagtatttcccttctt

SEQ ID NO: 295382 - DNA, 20 bp, Artificial Sequence
  Description of Artificial Sequence: Synthetic oligonucleotide
  Target: LAMA2; (-) strand; PAM type: YTN; PAM sequence: CTT
catggaagtatttcccttct

SEQ ID NO: 295383 - DNA, 20 bp, Artificial Sequence
  Description of Artificial Sequence: Synthetic oligonucleotide
  Target: LAMA2; (-) strand; PAM type: YTN; PAM sequence: TTG
gtcttcatggaagtatttcc

SEQ ID NO: 295384 - DNA, 20 bp, Artificial Sequence
  Description of Artificial Sequence: Synthetic oligonucleotide
  Target: LAMA2; (-) strand; PAM type: YTN; PAM sequence: TTG
aaatgccgtaaaattggtct

SEQ ID NO: 295385 - DNA, 20 bp, Artificial Sequence
  Description of Artificial Sequence: Synthetic oligonucleotide
  Target: LAMA2; (-) strand; PAM type: YTN; PAM sequence: TTT
gaaatgccgtaaaattggtc

SEQ ID NO: 295386 - DNA, 20 bp, Artificial Sequence
  Description of Artificial Sequence: Synthetic oligonucleotide
  Target: LAMA2; (-) strand; PAM type: YTN; PAM sequence: TTT
tgaaatgccgtaaaattggt

SEQ ID NO: 295387 - DNA, 20 bp, Artificial Sequence
  Description of Artificial Sequence: Synthetic oligonucleotide
  Target: LAMA2; (-) strand; PAM type: YTN; PAM sequence: TTA
aagtgttttgaaatgccgta

SEQ ID NO: 295388 - DNA, 20 bp, Artificial Sequence
  Description of Artificial Sequence: Synthetic oligonucleotide
  Target: LAMA2; (-) strand; PAM type: YTN; PAM sequence: CTT
aaagtgttttgaaatgccgt

SEQ ID NO: 295389 - DNA, 20 bp, Artificial Sequence
  Description of Artificial Sequence: Synthetic oligonucleotide
  Target: LAMA2; (-) strand; PAM type: YTN; PAM sequence: CTG
ccacagcaggtaaaaggctt

SEQ ID NO: 295390 - DNA, 20 bp, Artificial Sequence
  Description of Artificial Sequence: Synthetic oligonucleotide
  Target: LAMA2; (-) strand; PAM type: YTN; PAM sequence: CTC
tgccacagcaggtaaaaggc

SEQ ID NO: 295391 - DNA, 20 bp, Artificial Sequence
  Description of Artificial Sequence: Synthetic oligonucleotide
  Target: LAMA2; (-) strand; PAM type: YTN; PAM sequence: TTA
gtcaaacgaagcactctgcc

SEQ ID NO: 295392 - DNA, 20 bp, Artificial Sequence
  Description of Artificial Sequence: Synthetic oligonucleotide
  Target: LAMA2; (-) strand; PAM type: YTN; PAM sequence: CTT
agtcaaacgaagcactctgc

SEQ ID NO: 295393 - DNA, 20 bp, Artificial Sequence
  Description of Artificial Sequence: Synthetic oligonucleotide
  Target: LAMA2; (-) strand; PAM type: YTN; PAM sequence: TTG
atcttagtcaaacgaagcac

SEQ ID NO: 295394 - DNA, 20 bp, Artificial Sequence
  Description of Artificial Sequence: Synthetic oligonucleotide
  Target: LAMA2; (-) strand; PAM type: YTN; PAM sequence: CTT
gatcttagtcaaacgaagca

SEQ ID NO: 295395 - DNA, 20 bp, Artificial Sequence
  Description of Artificial Sequence: Synthetic oligonucleotide
  Target: LAMA2; (-) strand; PAM type: YTN; PAM sequence: CTC
ttgatcttagtcaaacgaag

SEQ ID NO: 295396 - DNA, 20 bp, Artificial Sequence
  Description of Artificial Sequence: Synthetic oligonucleotide
  Target: LAMA2; (-) strand; PAM type: YTN; PAM sequence: TTC
tcttgatcttagtcaaacga

SEQ ID NO: 295397 - DNA, 20 bp, Artificial Sequence
  Description of Artificial Sequence: Synthetic oligonucleotide
  Target: LAMA2; (-) strand; PAM type: YTN; PAM sequence: TTT
ctcttgatcttagtcaaacg

SEQ ID NO: 295398 - DNA, 20 bp, Artificial Sequence
  Description of Artificial Sequence: Synthetic oligonucleotide
  Target: LAMA2; (-) strand; PAM type: YTN; PAM sequence: TTT
tctcttgatcttagtcaaac

SEQ ID NO: 295399 - DNA, 20 bp, Artificial Sequence
  Description of Artificial Sequence: Synthetic oligonucleotide
  Target: LAMA2; (-) strand; PAM type: YTN; PAM sequence: CTT
ttctcttgatcttagtcaaa

SEQ ID NO: 295400 - DNA, 20 bp, Artificial Sequence
  Description of Artificial Sequence: Synthetic oligonucleotide
  Target: LAMA2; (-) strand; PAM type: YTN; PAM sequence: CTC
ttttctcttgatcttagtca

SEQ ID NO: 295401 - DNA, 20 bp, Artificial Sequence
  Description of Artificial Sequence: Synthetic oligonucleotide
  Target: LAMA2; (-) strand; PAM type: YTN; PAM sequence: TTC
tcttttctcttgatcttagt

SEQ ID NO: 295402 - DNA, 20 bp, Artificial Sequence
  Description of Artificial Sequence: Synthetic oligonucleotide
  Target: LAMA2; (-) strand; PAM type: YTN; PAM sequence: TTG
ttctcttttctcttgatctt

SEQ ID NO: 295403 - DNA, 20 bp, Artificial Sequence
  Description of Artificial Sequence: Synthetic oligonucleotide
  Target: LAMA2; (-) strand; PAM type: YTN; PAM sequence: CTT
gttctcttttctcttgatct

SEQ ID NO: 295404 - DNA, 20 bp, Artificial Sequence
  Description of Artificial Sequence: Synthetic oligonucleotide
  Target: LAMA2; (-) strand; PAM type: YTN; PAM sequence: TTG
atgaggaaaagccttgttct

SEQ ID NO: 295405 - DNA, 20 bp, Artificial Sequence
  Description of Artificial Sequence: Synthetic oligonucleotide
  Target: LAMA2; (-) strand; PAM type: YTN; PAM sequence: CTT
gatgaggaaaagccttgttc

SEQ ID NO: 295406 - DNA, 20 bp, Artificial Sequence
  Description of Artificial Sequence: Synthetic oligonucleotide
  Target: LAMA2; (-) strand; PAM type: YTN; PAM sequence: TTA
cttgatgaggaaaagccttg

SEQ ID NO: 295407 - DNA, 20 bp, Artificial Sequence
  Description of Artificial Sequence: Synthetic oligonucleotide
  Target: LAMA2; (-) strand; PAM type: YTN; PAM sequence: TTT
acttgatgaggaaaagcctt

SEQ ID NO: 295408 - DNA, 20 bp, Artificial Sequence
  Description of Artificial Sequence: Synthetic oligonucleotide
  Target: LAMA2; (-) strand; PAM type: YTN; PAM sequence: TTT
tacttgatgaggaaaagcct

SEQ ID NO: 295409 - DNA, 20 bp, Artificial Sequence
  Description of Artificial Sequence: Synthetic oligonucleotide
  Target: LAMA2; (-) strand; PAM type: YTN; PAM sequence: TTT
ttacttgatgaggaaaagcc

SEQ ID NO: 295410 - DNA, 20 bp, Artificial Sequence
  Description of Artificial Sequence: Synthetic oligonucleotide
  Target: LAMA2; (-) strand; PAM type: YTN; PAM sequence: CTC
atcagcacacaggaaatttt

SEQ ID NO: 295411 - DNA, 20 bp, Artificial Sequence
  Description of Artificial Sequence: Synthetic oligonucleotide
  Target: LAMA2; (-) strand; PAM type: YTN; PAM sequence: CTC
agagatgactcatcagcaca

SEQ ID NO: 295412 - DNA, 20 bp, Artificial Sequence
  Description of Artificial Sequence: Synthetic oligonucleotide
  Target: LAMA2; (-) strand; PAM type: YTN; PAM sequence: TTC
ccaaagagtgtacctcagag

SEQ ID NO: 295413 - DNA, 20 bp, Artificial Sequence
  Description of Artificial Sequence: Synthetic oligonucleotide
  Target: LAMA2; (-) strand; PAM type: YTN; PAM sequence: CTT
cccaaagagtgtacctcaga

SEQ ID NO: 295414 - DNA, 20 bp, Artificial Sequence
  Description of Artificial Sequence: Synthetic oligonucleotide
  Target: LAMA2; (-) strand; PAM type: YTN; PAM sequence: TTC
ttcccaaagagtgtacctca

SEQ ID NO: 295415 - DNA, 20 bp, Artificial Sequence
  Description of Artificial Sequence: Synthetic oligonucleotide
  Target: LAMA2; (-) strand; PAM type: YTN; PAM sequence: TTG
atgcacagtgttcttcccaa

SEQ ID NO: 295416 - DNA, 20 bp, Artificial Sequence
  Description of Artificial Sequence: Synthetic oligonucleotide
  Target: LAMA2; (-) strand; PAM type: YTN; PAM sequence: TTT
gatgcacagtgttcttccca

SEQ ID NO: 295417 - DNA, 20 bp, Artificial Sequence
  Description of Artificial Sequence: Synthetic oligonucleotide
  Target: LAMA2; (-) strand; PAM type: YTN; PAM sequence: TTT
tgatgcacagtgttcttccc

SEQ ID NO: 295418 - DNA, 20 bp, Artificial Sequence
  Description of Artificial Sequence: Synthetic oligonucleotide
  Target: LAMA2; (-) strand; PAM type: YTN; PAM sequence: CTT
ttgatgcacagtgttcttcc

SEQ ID NO: 295419 - DNA, 20 bp, Artificial Sequence
  Description of Artificial Sequence: Synthetic oligonucleotide
  Target: LAMA2; (-) strand; PAM type: YTN; PAM sequence: CTC
aagcagcccaaggcaggctt

SEQ ID NO: 295420 - DNA, 20 bp, Artificial Sequence
  Description of Artificial Sequence: Synthetic oligonucleotide
  Target: LAMA2; (-) strand; PAM type: YTN; PAM sequence: TTC
tcaagcagcccaaggcaggc

SEQ ID NO: 295421 - DNA, 20 bp, Artificial Sequence
  Description of Artificial Sequence: Synthetic oligonucleotide
  Target: LAMA2; (-) strand; PAM type: YTN; PAM sequence: CTC
agcagaggttctcaagcagc

SEQ ID NO: 295422 - DNA, 20 bp, Artificial Sequence
  Description of Artificial Sequence: Synthetic oligonucleotide
  Target: LAMA2; (-) strand; PAM type: YTN; PAM sequence: CTG
actcagcagaggttctcaag

SEQ ID NO: 295423 - DNA, 20 bp, Artificial Sequence
  Description of Artificial Sequence: Synthetic oligonucleotide
  Target: LAMA2; (-) strand; PAM type: YTN; PAM sequence: CTG
ccccagtgagtgctgactca

SEQ ID NO: 295424 - DNA, 20 bp, Artificial Sequence
  Description of Artificial Sequence: Synthetic oligonucleotide
  Target: LAMA2; (-) strand; PAM type: YTN; PAM sequence: CTG
ggccgctgccccagtgagtg

SEQ ID NO: 295425 - DNA, 20 bp, Artificial Sequence
  Description of Artificial Sequence: Synthetic oligonucleotide
  Target: LAMA2; (-) strand; PAM type: YTN; PAM sequence: CTG
gctgggccgctgccccagtg

SEQ ID NO: 295426 - DNA, 20 bp, Artificial Sequence
  Description of Artificial Sequence: Synthetic oligonucleotide
  Target: LAMA2; (-) strand; PAM type: YTN; PAM sequence: CTC
tggctgggccgctgccccag

SEQ ID NO: 295427 - DNA, 20 bp, Artificial Sequence
  Description of Artificial Sequence: Synthetic oligonucleotide
  Target: LAMA2; (-) strand; PAM type: YTN; PAM sequence: TTA
atagctctggctgggccgct

SEQ ID NO: 295428 - DNA, 20 bp, Artificial Sequence
  Description of Artificial Sequence: Synthetic oligonucleotide
  Target: LAMA2; (-) strand; PAM type: YTN; PAM sequence: CTT
aatagctctggctgggccgc

SEQ ID NO: 295429 - DNA, 20 bp, Artificial Sequence
  Description of Artificial Sequence: Synthetic oligonucleotide
  Target: LAMA2; (-) strand; PAM type: YTN; PAM sequence: CTG
cacttaatagctctggctgg

SEQ ID NO: 295430 - DNA, 20 bp, Artificial Sequence
  Description of Artificial Sequence: Synthetic oligonucleotide
  Target: LAMA2; (-) strand; PAM type: YTN; PAM sequence: TTA
agatctgcacttaatagctc

SEQ ID NO: 295431 - DNA, 20 bp, Artificial Sequence
  Description of Artificial Sequence: Synthetic oligonucleotide
  Target: LAMA2; (-) strand; PAM type: YTN; PAM sequence: TTT
aagatctgcacttaatagct

SEQ ID NO: 295432 - DNA, 20 bp, Artificial Sequence
  Description of Artificial Sequence: Synthetic oligonucleotide
  Target: LAMA2; (-) strand; PAM type: YTN; PAM sequence: TTT
taagatctgcacttaatagc

SEQ ID NO: 295433 - DNA, 20 bp, Artificial Sequence
  Description of Artificial Sequence: Synthetic oligonucleotide
  Target: LAMA2; (-) strand; PAM type: YTN; PAM sequence: TTT
ttaagatctgcacttaatag

SEQ ID NO: 295434 - DNA, 20 bp, Artificial Sequence
  Description of Artificial Sequence: Synthetic oligonucleotide
  Target: LAMA2; (-) strand; PAM type: YTN; PAM sequence: CTG
tttttaagatctgcacttaa

SEQ ID NO: 295435 - DNA, 20 bp, Artificial Sequence
  Description of Artificial Sequence: Synthetic oligonucleotide
  Target: LAMA2; (-) strand; PAM type: YTN; PAM sequence: CTC
accaacacatctgtttttaa

SEQ ID NO: 295436 - DNA, 20 bp, Artificial Sequence
  Description of Artificial Sequence: Synthetic oligonucleotide
  Target: LAMA2; (-) strand; PAM type: YTN; PAM sequence: CTC
tcaccaacacatctgttttt

SEQ ID NO: 295437 - DNA, 20 bp, Artificial Sequence
  Description of Artificial Sequence: Synthetic oligonucleotide
  Target: LAMA2; (-) strand; PAM type: YTN; PAM sequence: CTG
cacactctcaccaacacatc

SEQ ID NO: 295438 - DNA, 20 bp, Artificial Sequence
  Description of Artificial Sequence: Synthetic oligonucleotide
  Target: LAMA2; (-) strand; PAM type: YTN; PAM sequence: TTA
gaacatgcagtacatgagaa

SEQ ID NO: 295439 - DNA, 20 bp, Artificial Sequence
  Description of Artificial Sequence: Synthetic oligonucleotide
  Target: LAMA2; (-) strand; PAM type: YTN; PAM sequence: CTT
agaacatgcagtacatgaga

SEQ ID NO: 295440 - DNA, 20 bp, Artificial Sequence
  Description of Artificial Sequence: Synthetic oligonucleotide
  Target: LAMA2; (-) strand; PAM type: YTN; PAM sequence: CTC
ttagaacatgcagtacatga

SEQ ID NO: 295441 - DNA, 20 bp, Artificial Sequence
  Description of Artificial Sequence: Synthetic oligonucleotide
  Target: LAMA2; (-) strand; PAM type: YTN; PAM sequence: TTA
tgacatctcttagaacatgc

SEQ ID NO: 295442 - DNA, 20 bp, Artificial Sequence
  Description of Artificial Sequence: Synthetic oligonucleotide
  Target: LAMA2; (-) strand; PAM type: YTN; PAM sequence: CTT
atgacatctcttagaacatg

SEQ ID NO: 295443 - DNA, 20 bp, Artificial Sequence
  Description of Artificial Sequence: Synthetic oligonucleotide
  Target: LAMA2; (-) strand; PAM type: YTN; PAM sequence: CTG
cttatgacatctcttagaac

SEQ ID NO: 295444 - DNA, 20 bp, Artificial Sequence
  Description of Artificial Sequence: Synthetic oligonucleotide
  Target: LAMA2; (-) strand; PAM type: YTN; PAM sequence: TTC
acaagataggtcgatataca

SEQ ID NO: 295445 - DNA, 20 bp, Artificial Sequence
  Description of Artificial Sequence: Synthetic oligonucleotide
  Target: LAMA2; (-) strand; PAM type: YTN; PAM sequence: TTT
cacaagataggtcgatatac

SEQ ID NO: 295446 - DNA, 20 bp, Artificial Sequence
  Description of Artificial Sequence: Synthetic oligonucleotide
  Target: LAMA2; (-) strand; PAM type: YTN; PAM sequence: TTT
tcacaagataggtcgatata

SEQ ID NO: 295447 - DNA, 20 bp, Artificial Sequence
  Description of Artificial Sequence: Synthetic oligonucleotide
  Target: LAMA2; (-) strand; PAM type: YTN; PAM sequence: CTA
ttttcacaagataggtcgat

SEQ ID NO: 295448 - DNA, 20 bp, Artificial Sequence
  Description of Artificial Sequence: Synthetic oligonucleotide
  Target: LAMA2; (-) strand; PAM type: YTN; PAM sequence: CTC
tattttcacaagataggtcg

SEQ ID NO: 295449 - DNA, 20 bp, Artificial Sequence
  Description of Artificial Sequence: Synthetic oligonucleotide
  Target: LAMA2; (-) strand; PAM type: YTN; PAM sequence: TTC
tctattttcacaagataggt

SEQ ID NO: 295450 - DNA, 20 bp, Artificial Sequence
  Description of Artificial Sequence: Synthetic oligonucleotide
  Target: LAMA2; (-) strand; PAM type: YTN; PAM sequence: CTG
ttctctattttcacaagata

SEQ ID NO: 295451 - DNA, 20 bp, Artificial Sequence
  Description of Artificial Sequence: Synthetic oligonucleotide
  Target: LAMA2; (-) strand; PAM type: YTN; PAM sequence: TTC
cctgttctctattttcacaa

SEQ ID NO: 295452 - DNA, 20 bp, Artificial Sequence
  Description of Artificial Sequence: Synthetic oligonucleotide
  Target: LAMA2; (-) strand; PAM type: YTN; PAM sequence: TTT
ccctgttctctattttcaca

SEQ ID NO: 295453 - DNA, 20 bp, Artificial Sequence
  Description of Artificial Sequence: Synthetic oligonucleotide
  Target: LAMA2; (-) strand; PAM type: YTN; PAM sequence: CTT
tccctgttctctattttcac

SEQ ID NO: 295454 - DNA, 20 bp, Artificial Sequence
  Description of Artificial Sequence: Synthetic oligonucleotide
  Target: LAMA2; (-) strand; PAM type: YTN; PAM sequence: TTC
ctttccctgttctctatttt

SEQ ID NO: 295455 - DNA, 20 bp, Artificial Sequence
  Description of Artificial Sequence: Synthetic oligonucleotide
  Target: LAMA2; (-) strand; PAM type: YTN; PAM sequence: TTA
ccaaagccacaattcctttc

SEQ ID NO: 295456 - DNA, 20 bp, Artificial Sequence
  Description of Artificial Sequence: Synthetic oligonucleotide
  Target: LAMA2; (-) strand; PAM type: YTN; PAM sequence: TTA
aattaccaaagccacaattc

SEQ ID NO: 295457 - DNA, 20 bp, Artificial Sequence
  Description of Artificial Sequence: Synthetic oligonucleotide
  Target: LAMA2; (-) strand; PAM type: YTN; PAM sequence: CTT
aaattaccaaagccacaatt

SEQ ID NO: 295458 - DNA, 20 bp, Artificial Sequence
  Description of Artificial Sequence: Synthetic oligonucleotide
  Target: LAMA2; (-) strand; PAM type: YTN; PAM sequence: CTC
cttaaattaccaaagccaca

SEQ ID NO: 295459 - DNA, 20 bp, Artificial Sequence
  Description of Artificial Sequence: Synthetic oligonucleotide
  Target: LAMA2; (-) strand; PAM type: YTN; PAM sequence: CTC
cataaataatcaaggctcct

SEQ ID NO: 295460 - DNA, 20 bp, Artificial Sequence
  Description of Artificial Sequence: Synthetic oligonucleotide
  Target: LAMA2; (-) strand; PAM type: YTN; PAM sequence: CTA
ccataacacacagctccata

SEQ ID NO: 295461 - DNA, 20 bp, Artificial Sequence
  Description of Artificial Sequence: Synthetic oligonucleotide
  Target: LAMA2; (-) strand; PAM type: YTN; PAM sequence: TTG
gctaccataacacacagctc

SEQ ID NO: 295462 - DNA, 20 bp, Artificial Sequence
  Description of Artificial Sequence: Synthetic oligonucleotide
  Target: LAMA2; (-) strand; PAM type: YTN; PAM sequence: TTT
ggctaccataacacacagct

SEQ ID NO: 295463 - DNA, 20 bp, Artificial Sequence
  Description of Artificial Sequence: Synthetic oligonucleotide
  Target: LAMA2; (-) strand; PAM type: YTN; PAM sequence: CTG
agtagatcacatttggctac

SEQ ID NO: 295464 - DNA, 20 bp, Artificial Sequence
  Description of Artificial Sequence: Synthetic oligonucleotide
  Target: LAMA2; (-) strand; PAM type: YTN; PAM sequence: CTG
gctgagtagatcacatttgg

SEQ ID NO: 295465 - DNA, 20 bp, Artificial Sequence
  Description of Artificial Sequence: Synthetic oligonucleotide
  Target: LAMA2; (-) strand; PAM type: YTN; PAM sequence: TTG
caaagcatacagcagtcctg

SEQ ID NO: 295466 - DNA, 20 bp, Artificial Sequence
  Description of Artificial Sequence: Synthetic oligonucleotide
  Target: LAMA2; (-) strand; PAM type: YTN; PAM sequence: CTT
gcaaagcatacagcagtcct

SEQ ID NO: 295467 - DNA, 20 bp, Artificial Sequence
  Description of Artificial Sequence: Synthetic oligonucleotide
  Target: LAMA2; (-) strand; PAM type: YTN; PAM sequence: CTG
ggccttgcaaagcatacagc

SEQ ID NO: 295468 - DNA, 20 bp, Artificial Sequence
  Description of Artificial Sequence: Synthetic oligonucleotide
  Target: LAMA2; (-) strand; PAM type: YTN; PAM sequence: TTG
cactgggccttgcaaagcat

SEQ ID NO: 295469 - DNA, 20 bp, Artificial Sequence
  Description of Artificial Sequence: Synthetic oligonucleotide
  Target: LAMA2; (-) strand; PAM type: YTN; PAM sequence: TTT
gcactgggccttgcaaagca

SEQ ID NO: 295470 - DNA, 20 bp, Artificial Sequence
  Description of Artificial Sequence: Synthetic oligonucleotide
  Target: LAMA2; (-) strand; PAM type: YTN; PAM sequence: TTT
tgcactgggccttgcaaagc

SEQ ID NO: 295471 - DNA, 20 bp, Artificial Sequence
  Description of Artificial Sequence: Synthetic oligonucleotide
  Target: LAMA2; (-) strand; PAM type: YTN; PAM sequence: TTC
cattttgcactgggccttgc

SEQ ID NO: 295472 - DNA, 20 bp, Artificial Sequence
  Description of Artificial Sequence: Synthetic oligonucleotide
  Target: LAMA2; (-) strand; PAM type: YTN; PAM sequence: TTT
ccattttgcactgggccttg

SEQ ID NO: 295473 - DNA, 20 bp, Artificial Sequence
  Description of Artificial Sequence: Synthetic oligonucleotide
  Target: LAMA2; (-) strand; PAM type: YTN; PAM sequence: TTT
tccattttgcactgggcctt

SEQ ID NO: 295474 - DNA, 20 bp, Artificial Sequence
  Description of Artificial Sequence: Synthetic oligonucleotide
  Target: LAMA2; (-) strand; PAM type: YTN; PAM sequence: CTG
cattttccattttgcactgg

SEQ ID NO: 295475 - DNA, 20 bp, Artificial Sequence
  Description of Artificial Sequence: Synthetic oligonucleotide
  Target: LAMA2; (-) strand; PAM type: YTN; PAM sequence: TTC
agtgaggggccctgcatttt

SEQ ID NO: 295476 - DNA, 20 bp, Artificial Sequence
  Description of Artificial Sequence: Synthetic oligonucleotide
  Target: LAMA2; (-) strand; PAM type: YTN; PAM sequence: TTT
cagtgaggggccctgcattt

SEQ ID NO: 295477 - DNA, 20 bp, Artificial Sequence
  Description of Artificial Sequence: Synthetic oligonucleotide
  Target: LAMA2; (-) strand; PAM type: YTN; PAM sequence: TTT
tcagtgaggggccctgcatt

SEQ ID NO: 295478 - DNA, 20 bp, Artificial Sequence
  Description of Artificial Sequence: Synthetic oligonucleotide
  Target: LAMA2; (-) strand; PAM type: YTN; PAM sequence: TTT
ttcagtgaggggccctgcat

SEQ ID NO: 295479 - DNA, 20 bp, Artificial Sequence
  Description of Artificial Sequence: Synthetic oligonucleotide
  Target: LAMA2; (-) strand; PAM type: YTN; PAM sequence: TTA
ataatttttcagtgaggggc

SEQ ID NO: 295480 - DNA, 20 bp, Artificial Sequence
  Description of Artificial Sequence: Synthetic oligonucleotide
  Target: LAMA2; (-) strand; PAM type: YTN; PAM sequence: CTT
aataatttttcagtgagggg

SEQ ID NO: 295481 - DNA, 20 bp, Artificial Sequence
  Description of Artificial Sequence: Synthetic oligonucleotide
  Target: LAMA2; (-) strand; PAM type: YTN; PAM sequence: TTC
ttaataatttttcagtgagg

SEQ ID NO: 295482 - DNA, 20 bp, Artificial Sequence
  Description of Artificial Sequence: Synthetic oligonucleotide
  Target: LAMA2; (-) strand; PAM type: YTN; PAM sequence: TTG
aaattcttaataatttttca

SEQ ID NO: 295483 - DNA, 20 bp, Artificial Sequence
  Description of Artificial Sequence: Synthetic oligonucleotide
  Target: LAMA2; (-) strand; PAM type: YTN; PAM sequence: CTT
gaaattcttaataatttttc

SEQ ID NO: 295484 - DNA, 20 bp, Artificial Sequence
  Description of Artificial Sequence: Synthetic oligonucleotide
  Target: LAMA2; (-) strand; PAM type: YTN; PAM sequence: CTG
tcaccatcttgaaattctta

SEQ ID NO: 295485 - DNA, 20 bp, Artificial Sequence
  Description of Artificial Sequence: Synthetic oligonucleotide
  Target: LAMA2; (-) strand; PAM type: YTN; PAM sequence: CTG
ctgtcaccatcttgaaattc

SEQ ID NO: 295486 - DNA, 20 bp, Artificial Sequence
  Description of Artificial Sequence: Synthetic oligonucleotide
  Target: LAMA2; (-) strand; PAM type: YTN; PAM sequence: CTC
tgctgtcaccatcttgaaat

SEQ ID NO: 295487 - DNA, 20 bp, Artificial Sequence
  Description of Artificial Sequence: Synthetic oligonucleotide
  Target: LAMA2; (-) strand; PAM type: YTN; PAM sequence: TTA
atgctctgctgtcaccatct

SEQ ID NO: 295488 - DNA, 20 bp, Artificial Sequence
  Description of Artificial Sequence: Synthetic oligonucleotide
  Target: LAMA2; (-) strand; PAM type: YTN; PAM sequence: TTT
aatgctctgctgtcaccatc

SEQ ID NO: 295489 - DNA, 20 bp, Artificial Sequence
  Description of Artificial Sequence: Synthetic oligonucleotide
  Target: LAMA2; (-) strand; PAM type: YTN; PAM sequence: CTG
tgcagtcacatggtttaatg

SEQ ID NO: 295490 - DNA, 20 bp, Artificial Sequence
  Description of Artificial Sequence: Synthetic oligonucleotide
  Target: LAMA2; (-) strand; PAM type: YTN; PAM sequence: CTA
ggtgcggggctgtgcagtca

SEQ ID NO: 295491 - DNA, 20 bp, Artificial Sequence
  Description of Artificial Sequence: Synthetic oligonucleotide
  Target: LAMA2; (-) strand; PAM type: YTN; PAM sequence: CTG
agggggagagctaggtgcgg

SEQ ID NO: 295492 - DNA, 20 bp, Artificial Sequence
  Description of Artificial Sequence: Synthetic oligonucleotide
  Target: LAMA2; (-) strand; PAM type: YTN; PAM sequence: CTA
gggtgctgagggggagagct

SEQ ID NO: 295493 - DNA, 20 bp, Artificial Sequence
  Description of Artificial Sequence: Synthetic oligonucleotide
  Target: LAMA2; (-) strand; PAM type: YTN; PAM sequence: TTC
ctagggtgctgagggggaga

SEQ ID NO: 295494 - DNA, 20 bp, Artificial Sequence
  Description of Artificial Sequence: Synthetic oligonucleotide
  Target: LAMA2; (-) strand; PAM type: YTN; PAM sequence: CTT
cctagggtgctgagggggag

SEQ ID NO: 295495 - DNA, 20 bp, Artificial Sequence
  Description of Artificial Sequence: Synthetic oligonucleotide
  Target: LAMA2; (-) strand; PAM type: YTN; PAM sequence: TTC
aaagatcagcttcctagggt

SEQ ID NO: 295496 - DNA, 20 bp, Artificial Sequence
  Description of Artificial Sequence: Synthetic oligonucleotide
  Target: LAMA2; (-) strand; PAM type: YTN; PAM sequence: CTG
ttcaaagatcagcttcctag

SEQ ID NO: 295497 - DNA, 20 bp, Artificial Sequence
  Description of Artificial Sequence: Synthetic oligonucleotide
  Target: LAMA2; (-) strand; PAM type: YTN; PAM sequence: CTG
ccactgttcaaagatcagct

SEQ ID NO: 295498 - DNA, 20 bp, Artificial Sequence
  Description of Artificial Sequence: Synthetic oligonucleotide
  Target: LAMA2; (-) strand; PAM type: YTN; PAM sequence: TTC
aactgccactgttcaaagat

SEQ ID NO: 295499 - DNA, 20 bp, Artificial Sequence
  Description of Artificial Sequence: Synthetic oligonucleotide
  Target: LAMA2; (-) strand; PAM type: YTN; PAM sequence: TTT
caactgccactgttcaaaga

SEQ ID NO: 295500 - DNA, 20 bp, Artificial Sequence
  Description of Artificial Sequence: Synthetic oligonucleotide
  Target: LAMA2; (-) strand; PAM type: YTN; PAM sequence: TTA
aaaatgtaacccaccataca

SEQ ID NO: 295501 - DNA, 20 bp, Artificial Sequence
  Description of Artificial Sequence: Synthetic oligonucleotide
  Target: LAMA2; (-) strand; PAM type: YTN; PAM sequence: TTT
aaaaatgtaacccaccatac

SEQ ID NO: 295502 - DNA, 20 bp, Artificial Sequence
  Description of Artificial Sequence: Synthetic oligonucleotide
  Target: LAMA2; (-) strand; PAM type: YTN; PAM sequence: TTT
taaaaatgtaacccaccata

SEQ ID NO: 295503 - DNA, 20 bp, Artificial Sequence
  Description of Artificial Sequence: Synthetic oligonucleotide
  Target: LAMA2; (-) strand; PAM type: YTN; PAM sequence: CTA
ggcaacccagcacattttaa

SEQ ID NO: 295504 - DNA, 20 bp, Artificial Sequence
  Description of Artificial Sequence: Synthetic oligonucleotide
  Target: LAMA2; (-) strand; PAM type: YTN; PAM sequence: TTG
ctaggcaacccagcacattt

SEQ ID NO: 295505 - DNA, 20 bp, Artificial Sequence
  Description of Artificial Sequence: Synthetic oligonucleotide
  Target: LAMA2; (-) strand; PAM type: YTN; PAM sequence: TTG
ccagttgctaggcaacccag

SEQ ID NO: 295506 - DNA, 20 bp, Artificial Sequence
  Description of Artificial Sequence: Synthetic oligonucleotide
  Target: LAMA2; (-) strand; PAM type: YTN; PAM sequence: CTT
gccagttgctaggcaaccca

SEQ ID NO: 295507 - DNA, 20 bp, Artificial Sequence
  Description of Artificial Sequence: Synthetic oligonucleotide
  Target: LAMA2; (-) strand; PAM type: YTN; PAM sequence: TTC
aggcccttgccagttgctag

SEQ ID NO: 295508 - DNA, 20 bp, Artificial Sequence
  Description of Artificial Sequence: Synthetic oligonucleotide
  Target: LAMA2; (-) strand; PAM type: YTN; PAM sequence: CTG
cacgtcagcccattcaggcc

SEQ ID NO: 295509 - DNA, 20 bp, Artificial Sequence
  Description of Artificial Sequence: Synthetic oligonucleotide
  Target: LAMA2; (-) strand; PAM type: YTN; PAM sequence: CTA
aacctgcacgtcagcccatt

SEQ ID NO: 295510 - DNA, 20 bp, Artificial Sequence
  Description of Artificial Sequence: Synthetic oligonucleotide
  Target: LAMA2; (-) strand; PAM type: YTN; PAM sequence: TTC
aagatggtgtatctaaacct

SEQ ID NO: 295511 - DNA, 20 bp, Artificial Sequence
  Description of Artificial Sequence: Synthetic oligonucleotide
  Target: LAMA2; (-) strand; PAM type: YTN; PAM sequence: TTT
caagatggtgtatctaaacc

SEQ ID NO: 295512 - DNA, 20 bp, Artificial Sequence
  Description of Artificial Sequence: Synthetic oligonucleotide
  Target: LAMA2; (-) strand; PAM type: YTN; PAM sequence: CTT
tcaagatggtgtatctaaac

SEQ ID NO: 295513 - DNA, 20 bp, Artificial Sequence
  Description of Artificial Sequence: Synthetic oligonucleotide
  Target: LAMA2; (-) strand; PAM type: YTN; PAM sequence: TTC
catgaatgtagactttcaag

SEQ ID NO: 295514 - DNA, 20 bp, Artificial Sequence
  Description of Artificial Sequence: Synthetic oligonucleotide
  Target: LAMA2; (-) strand; PAM type: YTN; PAM sequence: TTT
ccatgaatgtagactttcaa

SEQ ID NO: 295515 - DNA, 20 bp, Artificial Sequence
  Description of Artificial Sequence: Synthetic oligonucleotide
  Target: LAMA2; (-) strand; PAM type: YTN; PAM sequence: CTA
gaaggtttccatgaatgtag

SEQ ID NO: 295516 - DNA, 20 bp, Artificial Sequence
  Description of Artificial Sequence: Synthetic oligonucleotide
  Target: LAMA2; (-) strand; PAM type: YTN; PAM sequence: TTA
tcagtccactagaaggtttc

SEQ ID NO: 295517 - DNA, 20 bp, Artificial Sequence
  Description of Artificial Sequence: Synthetic oligonucleotide
  Target: LAMA2; (-) strand; PAM type: YTN; PAM sequence: TTG
aaaattatcagtccactaga

SEQ ID NO: 295518 - DNA, 20 bp, Artificial Sequence
  Description of Artificial Sequence: Synthetic oligonucleotide
  Target: LAMA2; (-) strand; PAM type: YTN; PAM sequence: CTT
gaaaattatcagtccactag

SEQ ID NO: 295519 - DNA, 20 bp, Artificial Sequence
  Description of Artificial Sequence: Synthetic oligonucleotide
  Target: LAMA2; (-) strand; PAM type: YTN; PAM sequence: TTC
ttgaaaattatcagtccact

SEQ ID NO: 295520 - DNA, 20 bp, Artificial Sequence
  Description of Artificial Sequence: Synthetic oligonucleotide
  Target: LAMA2; (-) strand; PAM type: YTN; PAM sequence: TTT
cttgaaaattatcagtccac

SEQ ID NO: 295521 - DNA, 20 bp, Artificial Sequence
  Description of Artificial Sequence: Synthetic oligonucleotide
  Target: LAMA2; (-) strand; PAM type: YTN; PAM sequence: TTT
tcttgaaaattatcagtcca

SEQ ID NO: 295522 - DNA, 20 bp, Artificial Sequence
  Description of Artificial Sequence: Synthetic oligonucleotide
  Target: LAMA2; (-) strand; PAM type: YTN; PAM sequence: TTT
ttcttgaaaattatcagtcc

SEQ ID NO: 295523 - DNA, 20 bp, Artificial Sequence
  Description of Artificial Sequence: Synthetic oligonucleotide
  Target: LAMA2; (-) strand; PAM type: YTN; PAM sequence: CTT
tttcttgaaaattatcagtc

SEQ ID NO: 295524 - DNA, 20 bp, Artificial Sequence
  Description of Artificial Sequence: Synthetic oligonucleotide
  Target: LAMA2; (-) strand; PAM type: YTN; PAM sequence: TTA
ctttttcttgaaaattatca

SEQ ID NO: 295525 - DNA, 20 bp, Artificial Sequence
  Description of Artificial Sequence: Synthetic oligonucleotide
  Target: LAMA2; (-) strand; PAM type: YTN; PAM sequence: CTA
tattactttttcttgaaaat

SEQ ID NO: 295526 - DNA, 20 bp, Artificial Sequence
  Description of Artificial Sequence: Synthetic oligonucleotide
  Target: LAMA2; (-) strand; PAM type: YTN; PAM sequence: CTC
ccactatattactttttctt

SEQ ID NO: 295527 - DNA, 20 bp, Artificial Sequence
  Description of Artificial Sequence: Synthetic oligonucleotide
  Target: LAMA2; (-) strand; PAM type: YTN; PAM sequence: TTC
catctcccactatattactt

SEQ ID NO: 295528 - DNA, 20 bp, Artificial Sequence
  Description of Artificial Sequence: Synthetic oligonucleotide
  Target: LAMA2; (-) strand; PAM type: YTN; PAM sequence: TTT
ccatctcccactatattact

SEQ ID NO: 295529 - DNA, 20 bp, Artificial Sequence
  Description of Artificial Sequence: Synthetic oligonucleotide
  Target: LAMA2; (-) strand; PAM type: YTN; PAM sequence: CTC
cccatttccatctcccacta

SEQ ID NO: 295530 - DNA, 20 bp, Artificial Sequence
  Description of Artificial Sequence: Synthetic oligonucleotide
  Target: LAMA2; (-) strand; PAM type: YTN; PAM sequence: TTG
ccctccccatttccatctcc

SEQ ID NO: 295531 - DNA, 20 bp, Artificial Sequence
  Description of Artificial Sequence: Synthetic oligonucleotide
  Target: LAMA2; (-) strand; PAM type: YTN; PAM sequence: CTT
gccctccccatttccatctc

SEQ ID NO: 295532 - DNA, 20 bp, Artificial Sequence
  Description of Artificial Sequence: Synthetic oligonucleotide
  Target: LAMA2; (-) strand; PAM type: YTN; PAM sequence: TTC
ttgccctccccatttccatc

SEQ ID NO: 295533 - DNA, 20 bp, Artificial Sequence
  Description of Artificial Sequence: Synthetic oligonucleotide
  Target: LAMA2; (-) strand; PAM type: YTN; PAM sequence: TTT
cttgccctccccatttccat

SEQ ID NO: 295534 - DNA, 20 bp, Artificial Sequence
  Description of Artificial Sequence: Synthetic oligonucleotide
  Target: LAMA2; (-) strand; PAM type: YTN; PAM sequence: TTT
tcttgccctccccatttcca

SEQ ID NO: 295535 - DNA, 20 bp, Artificial Sequence
  Description of Artificial Sequence: Synthetic oligonucleotide
  Target: LAMA2; (-) strand; PAM type: YTN; PAM sequence: TTT
ttcttgccctccccatttcc

SEQ ID NO: 295536 - DNA, 20 bp, Artificial Sequence
  Description of Artificial Sequence: Synthetic oligonucleotide
  Target: LAMA2; (-) strand; PAM type: YTN; PAM sequence: TTT
tttcttgccctccccatttc

SEQ ID NO: 295537 - DNA, 20 bp, Artificial Sequence
  Description of Artificial Sequence: Synthetic oligonucleotide
  Target: LAMA2; (-) strand; PAM type: YTN; PAM sequence: TTA
taagagtagcaaaatgtgtt

SEQ ID NO: 295538 - DNA, 20 bp, Artificial Sequence
  Description of Artificial Sequence: Synthetic oligonucleotide
  Target: LAMA2; (-) strand; PAM type: YTN; PAM sequence: TTG
ggttataagagtagcaaaat

SEQ ID NO: 295539 - DNA, 20 bp, Artificial Sequence
  Description of Artificial Sequence: Synthetic oligonucleotide
  Target: LAMA2; (-) strand; PAM type: YTN; PAM sequence: CTT
gggttataagagtagcaaaa

SEQ ID NO: 295540 - DNA, 20 bp, Artificial Sequence
  Description of Artificial Sequence: Synthetic oligonucleotide
  Target: LAMA2; (-) strand; PAM type: YTN; PAM sequence: CTA
gccacttgggttataagagt

SEQ ID NO: 295541 - DNA, 20 bp, Artificial Sequence
  Description of Artificial Sequence: Synthetic oligonucleotide
  Target: LAMA2; (-) strand; PAM type: YTN; PAM sequence: TTA
gaagatcgaacagggaaaat

SEQ ID NO: 295542 - DNA, 20 bp, Artificial Sequence
  Description of Artificial Sequence: Synthetic oligonucleotide
  Target: LAMA2; (-) strand; PAM type: YTN; PAM sequence: CTT
agaagatcgaacagggaaaa

SEQ ID NO: 295543 - DNA, 20 bp, Artificial Sequence
  Description of Artificial Sequence: Synthetic oligonucleotide
  Target: LAMA2; (-) strand; PAM type: YTN; PAM sequence: TTC
ttagaagatcgaacagggaa

SEQ ID NO: 295544 - DNA, 20 bp, Artificial Sequence
  Description of Artificial Sequence: Synthetic oligonucleotide
  Target: LAMA2; (-) strand; PAM type: YTN; PAM sequence: CTA
ttcttagaagatcgaacagg

SEQ ID NO: 295545 - DNA, 20 bp, Artificial Sequence
  Description of Artificial Sequence: Synthetic oligonucleotide
  Target: LAMA2; (-) strand; PAM type: YTN; PAM sequence: CTC
tattcttagaagatcgaaca

SEQ ID NO: 295546 - DNA, 20 bp, Artificial Sequence
  Description of Artificial Sequence: Synthetic oligonucleotide
  Target: LAMA2; (-) strand; PAM type: YTN; PAM sequence: TTC
acatatgaagagctctattc

SEQ ID NO: 295547 - DNA, 20 bp, Artificial Sequence
  Description of Artificial Sequence: Synthetic oligonucleotide
  Target: LAMA2; (-) strand; PAM type: YTN; PAM sequence: CTT
cacatatgaagagctctatt

SEQ ID NO: 295548 - DNA, 20 bp, Artificial Sequence
  Description of Artificial Sequence: Synthetic oligonucleotide
  Target: LAMA2; (-) strand; PAM type: YTN; PAM sequence: TTC
cttcacatatgaagagctct

SEQ ID NO: 295549 - DNA, 20 bp, Artificial Sequence
  Description of Artificial Sequence: Synthetic oligonucleotide
  Target: LAMA2; (-) strand; PAM type: YTN; PAM sequence: TTT
ccttcacatatgaagagctc

SEQ ID NO: 295550 - DNA, 20 bp, Artificial Sequence
  Description of Artificial Sequence: Synthetic oligonucleotide
  Target: LAMA2; (-) strand; PAM type: YTN; PAM sequence: TTT
tccttcacatatgaagagct

SEQ ID NO: 295551 - DNA, 20 bp, Artificial Sequence
  Description of Artificial Sequence: Synthetic oligonucleotide
  Target: LAMA2; (-) strand; PAM type: YTN; PAM sequence: TTT
ttccttcacatatgaagagc

SEQ ID NO: 295552 - DNA, 20 bp, Artificial Sequence
  Description of Artificial Sequence: Synthetic oligonucleotide
  Target: LAMA2; (-) strand; PAM type: YTN; PAM sequence: TTC
atttttccttcacatatgaa

SEQ ID NO: 295553 - DNA, 20 bp, Artificial Sequence
  Description of Artificial Sequence: Synthetic oligonucleotide
  Target: LAMA2; (-) strand; PAM type: YTN; PAM sequence: TTT
catttttccttcacatatga

SEQ ID NO: 295554 - DNA, 20 bp, Artificial Sequence
  Description of Artificial Sequence: Synthetic oligonucleotide
  Target: LAMA2; (-) strand; PAM type: YTN; PAM sequence: CTT
tcatttttccttcacatatg

SEQ ID NO: 295555 - DNA, 20 bp, Artificial Sequence
  Description of Artificial Sequence: Synthetic oligonucleotide
  Target: LAMA2; (-) strand; PAM type: YTN; PAM sequence: TTC
cctttcatttttccttcaca

SEQ ID NO: 295556 - DNA, 20 bp, Artificial Sequence
  Description of Artificial Sequence: Synthetic oligonucleotide
  Target: LAMA2; (-) strand; PAM type: YTN; PAM sequence: TTT
ccctttcatttttccttcac

SEQ ID NO: 295557 - DNA, 20 bp, Artificial Sequence
  Description of Artificial Sequence: Synthetic oligonucleotide
  Target: LAMA2; (-) strand; PAM type: YTN; PAM sequence: CTG
gaatttccctttcatttttc

SEQ ID NO: 295558 - DNA, 20 bp, Artificial Sequence
  Description of Artificial Sequence: Synthetic oligonucleotide
  Target: LAMA2; (-) strand; PAM type: YTN; PAM sequence: CTG
agaaaactggaatttccctt

SEQ ID NO: 295559 - DNA, 20 bp, Artificial Sequence
  Description of Artificial Sequence: Synthetic oligonucleotide
  Target: LAMA2; (-) strand; PAM type: YTN; PAM sequence: TTC
tgagaaaactggaatttccc

SEQ ID NO: 295560 - DNA, 20 bp, Artificial Sequence
  Description of Artificial Sequence: Synthetic oligonucleotide
  Target: LAMA2; (-) strand; PAM type: YTN; PAM sequence: TTT
ctgagaaaactggaatttcc

SEQ ID NO: 295561 - DNA, 20 bp, Artificial Sequence
  Description of Artificial Sequence: Synthetic oligonucleotide
  Target: LAMA2; (-) strand; PAM type: YTN; PAM sequence: TTA
tgtatatttctgagaaaact

SEQ ID NO: 295562 - DNA, 20 bp, Artificial Sequence
  Description of Artificial Sequence: Synthetic oligonucleotide
  Target: LAMA2; (-) strand; PAM type: YTN; PAM sequence: TTT
atgtatatttctgagaaaac

SEQ ID NO: 295563 - DNA, 20 bp, Artificial Sequence
  Description of Artificial Sequence: Synthetic oligonucleotide
  Target: LAMA2; (-) strand; PAM type: YTN; PAM sequence: CTA
aaaatttatgtatatttctg

SEQ ID NO: 295564 - DNA, 20 bp, Artificial Sequence
  Description of Artificial Sequence: Synthetic oligonucleotide
  Target: LAMA2; (-) strand; PAM type: YTN; PAM sequence: CTC
taaaaatttatgtatatttc

SEQ ID NO: 295565 - DNA, 20 bp, Artificial Sequence
  Description of Artificial Sequence: Synthetic oligonucleotide
  Target: LAMA2; (-) strand; PAM type: YTN; PAM sequence: TTA
tcctctaaaaatttatgtat

SEQ ID NO: 295566 - DNA, 20 bp, Artificial Sequence
  Description of Artificial Sequence: Synthetic oligonucleotide
  Target: LAMA2; (-) strand; PAM type: YTN; PAM sequence: TTC
attatcctctaaaaatttat

SEQ ID NO: 295567 - DNA, 20 bp, Artificial Sequence
  Description of Artificial Sequence: Synthetic oligonucleotide
  Target: LAMA2; (-) strand; PAM type: YTN; PAM sequence: TTT
cattatcctctaaaaattta

SEQ ID NO: 295568 - DNA, 20 bp, Artificial Sequence
  Description of Artificial Sequence: Synthetic oligonucleotide
  Target: LAMA2; (-) strand; PAM type: YTN; PAM sequence: CTC
atagtttcattatcctctaa

SEQ ID NO: 295569 - DNA, 20 bp, Artificial Sequence
  Description of Artificial Sequence: Synthetic oligonucleotide
  Target: LAMA2; (-) strand; PAM type: YTN; PAM sequence: TTA
actcatagtttcattatcct

SEQ ID NO: 295570 - DNA, 20 bp, Artificial Sequence
  Description of Artificial Sequence: Synthetic oligonucleotide
  Target: LAMA2; (-) strand; PAM type: YTN; PAM sequence: TTG
attaactcatagtttcatta

SEQ ID NO: 295571 - DNA, 20 bp, Artificial Sequence
  Description of Artificial Sequence: Synthetic oligonucleotide
  Target: LAMA2; (-) strand; PAM type: YTN; PAM sequence: TTA
ttgattaactcatagtttca

SEQ ID NO: 295572 - DNA, 20 bp, Artificial Sequence
  Description of Artificial Sequence: Synthetic oligonucleotide
  Target: LAMA2; (-) strand; PAM type: YTN; PAM sequence: TTT
attgattaactcatagtttc

SEQ ID NO: 295573 - DNA, 20 bp, Artificial Sequence
  Description of Artificial Sequence: Synthetic oligonucleotide
  Target: LAMA2; (-) strand; PAM type: YTN; PAM sequence: CTC
agacatatttattgattaac

SEQ ID NO: 295574 - DNA, 20 bp, Artificial Sequence
  Description of Artificial Sequence: Synthetic oligonucleotide
  Target: LAMA2; (-) strand; PAM type: YTN; PAM sequence: CTA
aaggaatgtgctcagacata

SEQ ID NO: 295575 - DNA, 20 bp, Artificial Sequence
  Description of Artificial Sequence: Synthetic oligonucleotide
  Target: LAMA2; (-) strand; PAM type: YTN; PAM sequence: CTG
gaatggctaaaggaatgtgc

SEQ ID NO: 295576 - DNA, 20 bp, Artificial Sequence
  Description of Artificial Sequence: Synthetic oligonucleotide
  Target: LAMA2; (-) strand; PAM type: YTN; PAM sequence: CTC
atatcacaccctggaatggc

SEQ ID NO: 295577 - DNA, 20 bp, Artificial Sequence
  Description of Artificial Sequence: Synthetic oligonucleotide
  Target: LAMA2; (-) strand; PAM type: YTN; PAM sequence: TTC
tcatatcacaccctggaatg

SEQ ID NO: 295578 - DNA, 20 bp, Artificial Sequence
  Description of Artificial Sequence: Synthetic oligonucleotide
  Target: LAMA2; (-) strand; PAM type: YTN; PAM sequence: TTT
ctcatatcacaccctggaat

SEQ ID NO: 295579 - DNA, 20 bp, Artificial Sequence
  Description of Artificial Sequence: Synthetic oligonucleotide
  Target: LAMA2; (-) strand; PAM type: YTN; PAM sequence: TTT
tctcatatcacaccctggaa

SEQ ID NO: 295580 - DNA, 20 bp, Artificial Sequence
  Description of Artificial Sequence: Synthetic oligonucleotide
  Target: LAMA2; (-) strand; PAM type: YTN; PAM sequence: CTC
agtgcgtgtgaatcagtttt

SEQ ID NO: 295581 - DNA, 20 bp, Artificial Sequence
  Description of Artificial Sequence: Synthetic oligonucleotide
  Target: LAMA2; (-) strand; PAM type: YTN; PAM sequence: TTG
agtgctcagtgcgtgtgaat

SEQ ID NO: 295582 - DNA, 20 bp, Artificial Sequence
  Description of Artificial Sequence: Synthetic oligonucleotide
  Target: LAMA2; (-) strand; PAM type: YTN; PAM sequence: TTA
ttgagtgctcagtgcgtgtg

SEQ ID NO: 295583 - DNA, 20 bp, Artificial Sequence
  Description of Artificial Sequence: Synthetic oligonucleotide
  Target: LAMA2; (-) strand; PAM type: YTN; PAM sequence: TTA
ttattgagtgctcagtgcgt

SEQ ID NO: 295584 - DNA, 20 bp, Artificial Sequence
  Description of Artificial Sequence: Synthetic oligonucleotide
  Target: LAMA2; (-) strand; PAM type: YTN; PAM sequence: CTT
attattgagtgctcagtgcg

SEQ ID NO: 295585 - DNA, 20 bp, Artificial Sequence
  Description of Artificial Sequence: Synthetic oligonucleotide
  Target: LAMA2; (-) strand; PAM type: YTN; PAM sequence: CTG
catagtaagtacttattatt

SEQ ID NO: 295586 - DNA, 20 bp, Artificial Sequence
  Description of Artificial Sequence: Synthetic oligonucleotide
  Target: LAMA2; (-) strand; PAM type: YTN; PAM sequence: CTA
ctgcatagtaagtacttatt

SEQ ID NO: 295587 - DNA, 20 bp, Artificial Sequence
  Description of Artificial Sequence: Synthetic oligonucleotide
  Target: LAMA2; (-) strand; PAM type: YTN; PAM sequence: CTG
tagtctactgcatagtaagt

SEQ ID NO: 295588 - DNA, 20 bp, Artificial Sequence
  Description of Artificial Sequence: Synthetic oligonucleotide
  Target: LAMA2; (-) strand; PAM type: YTN; PAM sequence: CTC
tgtagtctactgcatagtaa

SEQ ID NO: 295589 - DNA, 20 bp, Artificial Sequence
  Description of Artificial Sequence: Synthetic oligonucleotide
  Target: LAMA2; (-) strand; PAM type: YTN; PAM sequence: TTC
atctctgtagtctactgcat

SEQ ID NO: 295590 - DNA, 20 bp, Artificial Sequence
  Description of Artificial Sequence: Synthetic oligonucleotide
  Target: LAMA2; (-) strand; PAM type: YTN; PAM sequence: TTA
ttcatctctgtagtctactg

SEQ ID NO: 295591 - DNA, 20 bp, Artificial Sequence
  Description of Artificial Sequence: Synthetic oligonucleotide
  Target: LAMA2; (-) strand; PAM type: YTN; PAM sequence: CTA
cattattcatctctgtagtc

SEQ ID NO: 295592 - DNA, 20 bp, Artificial Sequence
  Description of Artificial Sequence: Synthetic oligonucleotide
  Target: LAMA2; (-) strand; PAM type: YTN; PAM sequence: TTA
agaataaaaactacattatt

SEQ ID NO: 295593 - DNA, 20 bp, Artificial Sequence
  Description of Artificial Sequence: Synthetic oligonucleotide
  Target: LAMA2; (-) strand; PAM type: YTN; PAM sequence: TTT
aagaataaaaactacattat

SEQ ID NO: 295594 - DNA, 20 bp, Artificial Sequence
  Description of Artificial Sequence: Synthetic oligonucleotide
  Target: LAMA2; (-) strand; PAM type: YTN; PAM sequence: CTT
taagaataaaaactacatta

SEQ ID NO: 295595 - DNA, 20 bp, Artificial Sequence
  Description of Artificial Sequence: Synthetic oligonucleotide
  Target: LAMA2; (-) strand; PAM type: YTN; PAM sequence: TTC
tttaagaataaaaactacat

SEQ ID NO: 295596 - DNA, 20 bp, Artificial Sequence
  Description of Artificial Sequence: Synthetic oligonucleotide
  Target: LAMA2; (-) strand; PAM type: YTN; PAM sequence: TTA
gcgtaattctttaagaataa

SEQ ID NO: 295597 - DNA, 20 bp, Artificial Sequence
  Description of Artificial Sequence: Synthetic oligonucleotide
  Target: LAMA2; (-) strand; PAM type: YTN; PAM sequence: TTA
catattagcgtaattcttta

SEQ ID NO: 295598 - DNA, 20 bp, Artificial Sequence
  Description of Artificial Sequence: Synthetic oligonucleotide
  Target: LAMA2; (-) strand; PAM type: YTN; PAM sequence: CTT
acatattagcgtaattcttt

SEQ ID NO: 295599 - DNA, 20 bp, Artificial Sequence
  Description of Artificial Sequence: Synthetic oligonucleotide
  Target: LAMA2; (-) strand; PAM type: YTN; PAM sequence: TTC
ttacatattagcgtaattct

SEQ ID NO: 295600 - DNA, 20 bp, Artificial Sequence
  Description of Artificial Sequence: Synthetic oligonucleotide
  Target: LAMA2; (-) strand; PAM type: YTN; PAM sequence: TTT
cttacatattagcgtaattc

SEQ ID NO: 295601 - DNA, 20 bp, Artificial Sequence
  Description of Artificial Sequence: Synthetic oligonucleotide
  Target: LAMA2; (-) strand; PAM type: YTN; PAM sequence: TTG
tttcttacatattagcgtaa

SEQ ID NO: 295602 - DNA, 20 bp, Artificial Sequence
  Description of Artificial Sequence: Synthetic oligonucleotide
  Target: LAMA2; (-) strand; PAM type: YTN; PAM sequence: CTA
attgtttcttacatattagc

SEQ ID NO: 295603 - DNA, 20 bp, Artificial Sequence
  Description of Artificial Sequence: Synthetic oligonucleotide
  Target: LAMA2; (-) strand; PAM type: YTN; PAM sequence: CTG
tctaattgtttcttacatat

SEQ ID NO: 295604 - DNA, 20 bp, Artificial Sequence
  Description of Artificial Sequence: Synthetic oligonucleotide
  Target: LAMA2; (-) strand; PAM type: YTN; PAM sequence: TTA
aaaaggtaatgatgctgtct

SEQ ID NO: 295605 - DNA, 20 bp, Artificial Sequence
  Description of Artificial Sequence: Synthetic oligonucleotide
  Target: LAMA2; (-) strand; PAM type: YTN; PAM sequence: TTT
aaaaaggtaatgatgctgtc

SEQ ID NO: 295606 - DNA, 20 bp, Artificial Sequence
  Description of Artificial Sequence: Synthetic oligonucleotide
  Target: LAMA2; (-) strand; PAM type: YTN; PAM sequence: CTT
taaaaaggtaatgatgctgt

SEQ ID NO: 295607 - DNA, 20 bp, Artificial Sequence
  Description of Artificial Sequence: Synthetic oligonucleotide
  Target: LAMA2; (-) strand; PAM type: YTN; PAM sequence: TTC
tttaaaaaggtaatgatgct

SEQ ID NO: 295608 - DNA, 20 bp, Artificial Sequence
  Description of Artificial Sequence: Synthetic oligonucleotide
  Target: LAMA2; (-) strand; PAM type: YTN; PAM sequence: CTG
ttctttaaaaaggtaatgat

SEQ ID NO: 295609 - DNA, 20 bp, Artificial Sequence
  Description of Artificial Sequence: Synthetic oligonucleotide
  Target: LAMA2; (-) strand; PAM type: YTN; PAM sequence: TTA
tggactgttctttaaaaagg

SEQ ID NO: 295610 - DNA, 20 bp, Artificial Sequence
  Description of Artificial Sequence: Synthetic oligonucleotide
  Target: LAMA2; (-) strand; PAM type: YTN; PAM sequence: CTG
taaaatacccaggagagaaa

SEQ ID NO: 295611 - DNA, 20 bp, Artificial Sequence
  Description of Artificial Sequence: Synthetic oligonucleotide
  Target: LAMA2; (-) strand; PAM type: YTN; PAM sequence: CTG
cagcacaaggaccctgtaaa

SEQ ID NO: 295612 - DNA, 20 bp, Artificial Sequence
  Description of Artificial Sequence: Synthetic oligonucleotide
  Target: LAMA2; (-) strand; PAM type: YTN; PAM sequence: TTC
tgcagcacaaggaccctgta

SEQ ID NO: 295613 - DNA, 20 bp, Artificial Sequence
  Description of Artificial Sequence: Synthetic oligonucleotide
  Target: LAMA2; (-) strand; PAM type: YTN; PAM sequence: CTG
attctgcagcacaaggaccc

SEQ ID NO: 295614 - DNA, 20 bp, Artificial Sequence
  Description of Artificial Sequence: Synthetic oligonucleotide
  Target: LAMA2; (-) strand; PAM type: YTN; PAM sequence: TTC
tgattctgcagcacaaggac

SEQ ID NO: 295615 - DNA, 20 bp, Artificial Sequence
  Description of Artificial Sequence: Synthetic oligonucleotide
  Target: LAMA2; (-) strand; PAM type: YTN; PAM sequence: CTG
gttctgattctgcagcacaa

SEQ ID NO: 295616 - DNA, 20 bp, Artificial Sequence
  Description of Artificial Sequence: Synthetic oligonucleotide
  Target: LAMA2; (-) strand; PAM type: YTN; PAM sequence: CTA
tcaaaagagctggttctgat

SEQ ID NO: 295617 - DNA, 20 bp, Artificial Sequence
  Description of Artificial Sequence: Synthetic oligonucleotide
  Target: LAMA2; (-) strand; PAM type: YTN; PAM sequence: CTC
cctatcaaaagagctggttc

SEQ ID NO: 295618 - DNA, 20 bp, Artificial Sequence
  Description of Artificial Sequence: Synthetic oligonucleotide
  Target: LAMA2; (-) strand; PAM type: YTN; PAM sequence: TTG
ctccctatcaaaagagctgg

SEQ ID NO: 295619 - DNA, 20 bp, Artificial Sequence
  Description of Artificial Sequence: Synthetic oligonucleotide
  Target: LAMA2; (-) strand; PAM type: YTN; PAM sequence: CTT
gctccctatcaaaagagctg

SEQ ID NO: 295620 - DNA, 20 bp, Artificial Sequence
  Description of Artificial Sequence: Synthetic oligonucleotide
  Target: LAMA2; (-) strand; PAM type: YTN; PAM sequence: CTG
cttgctccctatcaaaagag

SEQ ID NO: 295621 - DNA, 20 bp, Artificial Sequence
  Description of Artificial Sequence: Synthetic oligonucleotide
  Target: LAMA2; (-) strand; PAM type: YTN; PAM sequence: TTG
aaagcccgaactgcttgctc

SEQ ID NO: 295622 - DNA, 20 bp, Artificial Sequence
  Description of Artificial Sequence: Synthetic oligonucleotide
  Target: LAMA2; (-) strand; PAM type: YTN; PAM sequence: CTT
gaaagcccgaactgcttgct

SEQ ID NO: 295623 - DNA, 20 bp, Artificial Sequence
  Description of Artificial Sequence: Synthetic oligonucleotide
  Target: LAMA2; (-) strand; PAM type: YTN; PAM sequence: TTC
ttgaaagcccgaactgcttg

SEQ ID NO: 295624 - DNA, 20 bp, Artificial Sequence
  Description of Artificial Sequence: Synthetic oligonucleotide
  Target: LAMA2; (-) strand; PAM type: YTN; PAM sequence: TTT
cttgaaagcccgaactgctt

SEQ ID NO: 295625 - DNA, 20 bp, Artificial Sequence
  Description of Artificial Sequence: Synthetic oligonucleotide
  Target: LAMA2; (-) strand; PAM type: YTN; PAM sequence: CTG
tttcttgaaagcccgaactg

SEQ ID NO: 295626 - DNA, 20 bp, Artificial Sequence
  Description of Artificial Sequence: Synthetic oligonucleotide
  Target: LAMA2; (-) strand; PAM type: YTN; PAM sequence: TTG
caatgtgactgtttcttgaa

SEQ ID NO: 295627 - DNA, 20 bp, Artificial Sequence
  Description of Artificial Sequence: Synthetic oligonucleotide
  Target: LAMA2; (-) strand; PAM type: YTN; PAM sequence: TTG
gtgtcatcaaatgcaattgc

SEQ ID NO: 295628 - DNA, 20 bp, Artificial Sequence
  Description of Artificial Sequence: Synthetic oligonucleotide
  Target: LAMA2; (-) strand; PAM type: YTN; PAM sequence: TTT
ggtgtcatcaaatgcaattg

SEQ ID NO: 295629 - DNA, 20 bp, Artificial Sequence
  Description of Artificial Sequence: Synthetic oligonucleotide
  Target: LAMA2; (-) strand; PAM type: YTN; PAM sequence: CTT
tggtgtcatcaaatgcaatt

SEQ ID NO: 295630 - DNA, 20 bp, Artificial Sequence
  Description of Artificial Sequence: Synthetic oligonucleotide
  Target: LAMA2; (-) strand; PAM type: YTN; PAM sequence: TTA
actttggtgtcatcaaatgc

SEQ ID NO: 295631 - DNA, 20 bp, Artificial Sequence
  Description of Artificial Sequence: Synthetic oligonucleotide
  Target: LAMA2; (-) strand; PAM type: YTN; PAM sequence: TTT
aactttggtgtcatcaaatg

SEQ ID NO: 295632 - DNA, 20 bp, Artificial Sequence
  Description of Artificial Sequence: Synthetic oligonucleotide
  Target: LAMA2; (-) strand; PAM type: YTN; PAM sequence: TTT
taactttggtgtcatcaaat

SEQ ID NO: 295633 - DNA, 20 bp, Artificial Sequence
  Description of Artificial Sequence: Synthetic oligonucleotide
  Target: LAMA2; (-) strand; PAM type: YTN; PAM sequence: TTT
ttaactttggtgtcatcaaa

SEQ ID NO: 295634 - DNA, 20 bp, Artificial Sequence
  Description of Artificial Sequence: Synthetic oligonucleotide
  Target: LAMA2; (-) strand; PAM type: YTN; PAM sequence: CTC
aggatgatacataccggttt

SEQ ID NO: 295635 - DNA, 20 bp, Artificial Sequence
  Description of Artificial Sequence: Synthetic oligonucleotide
  Target: LAMA2; (-) strand; PAM type: YTN; PAM sequence: TTC
ccagtgtctcaggatgatac

SEQ ID NO: 295636 - DNA, 20 bp, Artificial Sequence
  Description of Artificial Sequence: Synthetic oligonucleotide
  Target: LAMA2; (-) strand; PAM type: YTN; PAM sequence: TTT
cccagtgtctcaggatgata

SEQ ID NO: 295637 - DNA, 20 bp, Artificial Sequence
  Description of Artificial Sequence: Synthetic oligonucleotide
  Target: LAMA2; (-) strand; PAM type: YTN; PAM sequence: CTT
tcccagtgtctcaggatgat

SEQ ID NO: 295638 - DNA, 20 bp, Artificial Sequence
  Description of Artificial Sequence: Synthetic oligonucleotide
  Target: LAMA2; (-) strand; PAM type: YTN; PAM sequence: TTC
tttcccagtgtctcaggatg

SEQ ID NO: 295639 - DNA, 20 bp, Artificial Sequence
  Description of Artificial Sequence: Synthetic oligonucleotide
  Target: LAMA2; (-) strand; PAM type: YTN; PAM sequence: TTA
tcggttctttcccagtgtct

SEQ ID NO: 295640 - DNA, 20 bp, Artificial Sequence
  Description of Artificial Sequence: Synthetic oligonucleotide
  Target: LAMA2; (-) strand; PAM type: YTN; PAM sequence: TTT
atcggttctttcccagtgtc

SEQ ID NO: 295641 - DNA, 20 bp, Artificial Sequence
  Description of Artificial Sequence: Synthetic oligonucleotide
  Target: LAMA2; (-) strand; PAM type: YTN; PAM sequence: TTC
atttatcggttctttcccag

SEQ ID NO: 295642 - DNA, 20 bp, Artificial Sequence
  Description of Artificial Sequence: Synthetic oligonucleotide
  Target: LAMA2; (-) strand; PAM type: YTN; PAM sequence: CTT
catttatcggttctttccca

SEQ ID NO: 295643 - DNA, 20 bp, Artificial Sequence
  Description of Artificial Sequence: Synthetic oligonucleotide
  Target: LAMA2; (-) strand; PAM type: YTN; PAM sequence: TTC
ttcatttatcggttctttcc

SEQ ID NO: 295644 - DNA, 20 bp, Artificial Sequence
  Description of Artificial Sequence: Synthetic oligonucleotide
  Target: LAMA2; (-) strand; PAM type: YTN; PAM sequence: CTC
agttcttcatttatcggttc

SEQ ID NO: 295645 - DNA, 20 bp, Artificial Sequence
  Description of Artificial Sequence: Synthetic oligonucleotide
  Target: LAMA2; (-) strand; PAM type: YTN; PAM sequence: TTA
aacacaaatactcagttctt

SEQ ID NO: 295646 - DNA, 20 bp, Artificial Sequence
  Description of Artificial Sequence: Synthetic oligonucleotide
  Target: LAMA2; (-) strand; PAM type: YTN; PAM sequence: TTG
attaaacacaaatactcagt

SEQ ID NO: 295647 - DNA, 20 bp, Artificial Sequence
  Description of Artificial Sequence: Synthetic oligonucleotide
  Target: LAMA2; (-) strand; PAM type: YTN; PAM sequence: CTT
gattaaacacaaatactcag

SEQ ID NO: 295648 - DNA, 20 bp, Artificial Sequence
  Description of Artificial Sequence: Synthetic oligonucleotide
  Target: LAMA2; (-) strand; PAM type: YTN; PAM sequence: TTC
aacttgattaaacacaaata

SEQ ID NO: 295649 - DNA, 20 bp, Artificial Sequence
  Description of Artificial Sequence: Synthetic oligonucleotide
  Target: LAMA2; (-) strand; PAM type: YTN; PAM sequence: TTA
ataagtgtagtagattcaac

SEQ ID NO: 295650 - DNA, 20 bp, Artificial Sequence
  Description of Artificial Sequence: Synthetic oligonucleotide
  Target: LAMA2; (-) strand; PAM type: YTN; PAM sequence: TTA
attaataagtgtagtagatt

SEQ ID NO: 295651 - DNA, 20 bp, Artificial Sequence
  Description of Artificial Sequence: Synthetic oligonucleotide
  Target: LAMA2; (-) strand; PAM type: YTN; PAM sequence: TTC
attaattaataagtgtagta

SEQ ID NO: 295652 - DNA, 20 bp, Artificial Sequence
  Description of Artificial Sequence: Synthetic oligonucleotide
  Target: LAMA2; (-) strand; PAM type: YTN; PAM sequence: CTT
cattaattaataagtgtagt

SEQ ID NO: 295653 - DNA, 20 bp, Artificial Sequence
  Description of Artificial Sequence: Synthetic oligonucleotide
  Target: LAMA2; (-) strand; PAM type: YTN; PAM sequence: CTA
acttcattaattaataagtg

SEQ ID NO: 295654 - DNA, 20 bp, Artificial Sequence
  Description of Artificial Sequence: Synthetic oligonucleotide
  Target: LAMA2; (-) strand; PAM type: YTN; PAM sequence: CTC
agtgaataaaagaaaagcta

SEQ ID NO: 295655 - DNA, 20 bp, Artificial Sequence
  Description of Artificial Sequence: Synthetic oligonucleotide
  Target: LAMA2; (-) strand; PAM type: YTN; PAM sequence: TTG
tactcagtgaataaaagaaa

SEQ ID NO: 295656 - DNA, 20 bp, Artificial Sequence
  Description of Artificial Sequence: Synthetic oligonucleotide
  Target: LAMA2; (-) strand; PAM type: YTN; PAM sequence: CTA
ttgtactcagtgaataaaag

SEQ ID NO: 295657 - DNA, 20 bp, Artificial Sequence
  Description of Artificial Sequence: Synthetic oligonucleotide
  Target: LAMA2; (-) strand; PAM type: YTN; PAM sequence: CTC
tattgtactcagtgaataaa

SEQ ID NO: 295658 - DNA, 20 bp, Artificial Sequence
  Description of Artificial Sequence: Synthetic oligonucleotide
  Target: LAMA2; (-) strand; PAM type: YTN; PAM sequence: TTC
tctattgtactcagtgaata

SEQ ID NO: 295659 - DNA, 20 bp, Artificial Sequence
  Description of Artificial Sequence: Synthetic oligonucleotide
  Target: LAMA2; (-) strand; PAM type: YTN; PAM sequence: CTA
ttctctattgtactcagtga

SEQ ID NO: 295660 - DNA, 20 bp, Artificial Sequence
  Description of Artificial Sequence: Synthetic oligonucleotide
  Target: LAMA2; (-) strand; PAM type: YTN; PAM sequence: TTC
tattctctattgtactcagt

SEQ ID NO: 295661 - DNA, 20 bp, Artificial Sequence
  Description of Artificial Sequence: Synthetic oligonucleotide
  Target: LAMA2; (-) strand; PAM type: YTN; PAM sequence: CTC
agacaaataaaattctattc

SEQ ID NO: 295662 - DNA, 20 bp, Artificial Sequence
  Description of Artificial Sequence: Synthetic oligonucleotide
  Target: LAMA2; (-) strand; PAM type: YTN; PAM sequence: CTC
aggctcagacaaataaaatt

SEQ ID NO: 295663 - DNA, 20 bp, Artificial Sequence
  Description of Artificial Sequence: Synthetic oligonucleotide
  Target: LAMA2; (-) strand; PAM type: YTN; PAM sequence: CTC
ctcaggctcagacaaataaa

SEQ ID NO: 295664 - DNA, 20 bp, Artificial Sequence
  Description of Artificial Sequence: Synthetic oligonucleotide
  Target: LAMA2; (-) strand; PAM type: YTN; PAM sequence: TTG
ggctcctcaggctcagacaa

SEQ ID NO: 295665 - DNA, 20 bp, Artificial Sequence
  Description of Artificial Sequence: Synthetic oligonucleotide
  Target: LAMA2; (-) strand; PAM type: YTN; PAM sequence: CTA
aattgggctcctcaggctca

SEQ ID NO: 295666 - DNA, 20 bp, Artificial Sequence
  Description of Artificial Sequence: Synthetic oligonucleotide
  Target: LAMA2; (-) strand; PAM type: YTN; PAM sequence: TTC
ctaaattgggctcctcaggc

SEQ ID NO: 295667 - DNA, 20 bp, Artificial Sequence
  Description of Artificial Sequence: Synthetic oligonucleotide
  Target: LAMA2; (-) strand; PAM type: YTN; PAM sequence: TTT
cctaaattgggctcctcagg

SEQ ID NO: 295668 - DNA, 20 bp, Artificial Sequence
  Description of Artificial Sequence: Synthetic oligonucleotide
  Target: LAMA2; (-) strand; PAM type: YTN; PAM sequence: CTG
atttcctaaattgggctcct

SEQ ID NO: 295669 - DNA, 20 bp, Artificial Sequence
  Description of Artificial Sequence: Synthetic oligonucleotide
  Target: LAMA2; (-) strand; PAM type: YTN; PAM sequence: CTA
ctgatttcctaaattgggct

SEQ ID NO: 295670 - DNA, 20 bp, Artificial Sequence
  Description of Artificial Sequence: Synthetic oligonucleotide
  Target: LAMA2; (-) strand; PAM type: YTN; PAM sequence: TTA
tcaggctactgatttcctaa

SEQ ID NO: 295671 - DNA, 20 bp, Artificial Sequence
  Description of Artificial Sequence: Synthetic oligonucleotide
  Target: LAMA2; (-) strand; PAM type: YTN; PAM sequence: TTT
atcaggctactgatttccta

SEQ ID NO: 295672 - DNA, 20 bp, Artificial Sequence
  Description of Artificial Sequence: Synthetic oligonucleotide
  Target: LAMA2; (-) strand; PAM type: YTN; PAM sequence: CTT
tatcaggctactgatttcct

SEQ ID NO: 295673 - DNA, 20 bp, Artificial Sequence
  Description of Artificial Sequence: Synthetic oligonucleotide
  Target: LAMA2; (-) strand; PAM type: YTN; PAM sequence: CTC
agagatgaggactttatcag

SEQ ID NO: 295674 - DNA, 20 bp, Artificial Sequence
  Description of Artificial Sequence: Synthetic oligonucleotide
  Target: LAMA2; (-) strand; PAM type: YTN; PAM sequence: TTC
tcagagatgaggactttatc

SEQ ID NO: 295675 - DNA, 20 bp, Artificial Sequence
  Description of Artificial Sequence: Synthetic oligonucleotide
  Target: LAMA2; (-) strand; PAM type: YTN; PAM sequence: CTT
ctcagagatgaggactttat

SEQ ID NO: 295676 - DNA, 20 bp, Artificial Sequence
  Description of Artificial Sequence: Synthetic oligonucleotide
  Target: LAMA2; (-) strand; PAM type: YTN; PAM sequence: TTC
ataaaggagagtaaaacctt

SEQ ID NO: 295677 - DNA, 20 bp, Artificial Sequence
  Description of Artificial Sequence: Synthetic oligonucleotide
  Target: LAMA2; (-) strand; PAM type: YTN; PAM sequence: TTT
cataaaggagagtaaaacct

SEQ ID NO: 295678 - DNA, 20 bp, Artificial Sequence
  Description of Artificial Sequence: Synthetic oligonucleotide
  Target: LAMA2; (-) strand; PAM type: YTN; PAM sequence: TTT
tcataaaggagagtaaaacc

SEQ ID NO: 295679 - DNA, 20 bp, Artificial Sequence
  Description of Artificial Sequence: Synthetic oligonucleotide
  Target: LAMA2; (-) strand; PAM type: YTN; PAM sequence: CTG
cattttcataaaggagagta

SEQ ID NO: 295680 - DNA, 20 bp, Artificial Sequence
  Description of Artificial Sequence: Synthetic oligonucleotide
  Target: LAMA2; (-) strand; PAM type: YTN; PAM sequence: CTA
aaatagagcggtatcagatc

SEQ ID NO: 295681 - DNA, 20 bp, Artificial Sequence
  Description of Artificial Sequence: Synthetic oligonucleotide
  Target: LAMA2; (-) strand; PAM type: YTN; PAM sequence: CTC
atgctaaaatagagcggtat

SEQ ID NO: 295682 - DNA, 20 bp, Artificial Sequence
  Description of Artificial Sequence: Synthetic oligonucleotide
  Target: LAMA2; (-) strand; PAM type: YTN; PAM sequence: TTC
tcatgctaaaatagagcggt

SEQ ID NO: 295683 - DNA, 20 bp, Artificial Sequence
  Description of Artificial Sequence: Synthetic oligonucleotide
  Target: LAMA2; (-) strand; PAM type: YTN; PAM sequence: CTG
tgaaacaaaagcatgcaaag

SEQ ID NO: 295684 - DNA, 20 bp, Artificial Sequence
  Description of Artificial Sequence: Synthetic oligonucleotide
  Target: LAMA2; (-) strand; PAM type: YTN; PAM sequence: TTG
tgagactgtgaaacaaaagc

SEQ ID NO: 295685 - DNA, 20 bp, Artificial Sequence
  Description of Artificial Sequence: Synthetic oligonucleotide
  Target: LAMA2; (-) strand; PAM type: YTN; PAM sequence: CTC
aattgtgagactgtgaaaca

SEQ ID NO: 295686 - DNA, 20 bp, Artificial Sequence
  Description of Artificial Sequence: Synthetic oligonucleotide
  Target: LAMA2; (-) strand; PAM type: YTN; PAM sequence: TTC
caactcaattgtgagactgt

SEQ ID NO: 295687 - DNA, 20 bp, Artificial Sequence
  Description of Artificial Sequence: Synthetic oligonucleotide
  Target: LAMA2; (-) strand; PAM type: YTN; PAM sequence: CTT
ccaactcaattgtgagactg

SEQ ID NO: 295688 - DNA, 20 bp, Artificial Sequence
  Description of Artificial Sequence: Synthetic oligonucleotide
  Target: LAMA2; (-) strand; PAM type: YTN; PAM sequence: TTA
cttccaactcaattgtgaga

SEQ ID NO: 295689 - DNA, 20 bp, Artificial Sequence
  Description of Artificial Sequence: Synthetic oligonucleotide
  Target: LAMA2; (-) strand; PAM type: YTN; PAM sequence: CTT
acttccaactcaattgtgag

SEQ ID NO: 295690 - DNA, 20 bp, Artificial Sequence
  Description of Artificial Sequence: Synthetic oligonucleotide
  Target: LAMA2; (-) strand; PAM type: YTN; PAM sequence: TTC
ttacttccaactcaattgtg

SEQ ID NO: 295691 - DNA, 20 bp, Artificial Sequence
  Description of Artificial Sequence: Synthetic oligonucleotide
  Target: LAMA2; (-) strand; PAM type: YTN; PAM sequence: TTC
ggttcttacttccaactcaa

SEQ ID NO: 295692 - DNA, 20 bp, Artificial Sequence
  Description of Artificial Sequence: Synthetic oligonucleotide
  Target: LAMA2; (-) strand; PAM type: YTN; PAM sequence: CTT
cggttcttacttccaactca

SEQ ID NO: 295693 - DNA, 20 bp, Artificial Sequence
  Description of Artificial Sequence: Synthetic oligonucleotide
  Target: LAMA2; (-) strand; PAM type: YTN; PAM sequence: TTC
agcttcggttcttacttcca

SEQ ID NO: 295694 - DNA, 20 bp, Artificial Sequence
  Description of Artificial Sequence: Synthetic oligonucleotide
  Target: LAMA2; (-) strand; PAM type: YTN; PAM sequence: TTG
atgcgagccatgtaaaaaag

SEQ ID NO: 295695 - DNA, 20 bp, Artificial Sequence
  Description of Artificial Sequence: Synthetic oligonucleotide
  Target: LAMA2; (-) strand; PAM type: YTN; PAM sequence: TTG
caaaatcagcatgattgatg

SEQ ID NO: 295696 - DNA, 20 bp, Artificial Sequence
  Description of Artificial Sequence: Synthetic oligonucleotide
  Target: LAMA2; (-) strand; PAM type: YTN; PAM sequence: CTG
ttgcaaaatcagcatgattg

SEQ ID NO: 295697 - DNA, 20 bp, Artificial Sequence
  Description of Artificial Sequence: Synthetic oligonucleotide
  Target: LAMA2; (-) strand; PAM type: YTN; PAM sequence: CTG
aactgttgcaaaatcagcat

SEQ ID NO: 295698 - DNA, 20 bp, Artificial Sequence
  Description of Artificial Sequence: Synthetic oligonucleotide
  Target: LAMA2; (-) strand; PAM type: YTN; PAM sequence: CTC
agctgaactgttgcaaaatc

SEQ ID NO: 295699 - DNA, 20 bp, Artificial Sequence
  Description of Artificial Sequence: Synthetic oligonucleotide
  Target: LAMA2; (-) strand; PAM type: YTN; PAM sequence: TTC
tcagctgaactgttgcaaaa

SEQ ID NO: 295700 - DNA, 20 bp, Artificial Sequence
  Description of Artificial Sequence: Synthetic oligonucleotide
  Target: LAMA2; (-) strand; PAM type: YTN; PAM sequence: TTT
ctcagctgaactgttgcaaa

SEQ ID NO: 295701 - DNA, 20 bp, Artificial Sequence
  Description of Artificial Sequence: Synthetic oligonucleotide
  Target: LAMA2; (-) strand; PAM type: YTN; PAM sequence: CTG
aagtagggcaatccatttct

SEQ ID NO: 295702 - DNA, 20 bp, Artificial Sequence
  Description of Artificial Sequence: Synthetic oligonucleotide
  Target: LAMA2; (-) strand; PAM type: YTN; PAM sequence: CTC
cccaagtcatagctgaagta

SEQ ID NO: 295703 - DNA, 20 bp, Artificial Sequence
  Description of Artificial Sequence: Synthetic oligonucleotide
  Target: LAMA2; (-) strand; PAM type: YTN; PAM sequence: TTG
gtggggatcatggtgtgggt

SEQ ID NO: 295704 - DNA, 20 bp, Artificial Sequence
  Description of Artificial Sequence: Synthetic oligonucleotide
  Target: LAMA2; (-) strand; PAM type: YTN; PAM sequence: TTT
ggtggggatcatggtgtggg

SEQ ID NO: 295705 - DNA, 20 bp, Artificial Sequence
  Description of Artificial Sequence: Synthetic oligonucleotide
  Target: LAMA2; (-) strand; PAM type: YTN; PAM sequence: TTT
tggtggggatcatggtgtgg

SEQ ID NO: 295706 - DNA, 20 bp, Artificial Sequence
  Description of Artificial Sequence: Synthetic oligonucleotide
  Target: LAMA2; (-) strand; PAM type: YTN; PAM sequence: TTG
attttggtggggatcatggt

SEQ ID NO: 295707 - DNA, 20 bp, Artificial Sequence
  Description of Artificial Sequence: Synthetic oligonucleotide
  Target: LAMA2; (-) strand; PAM type: YTN; PAM sequence: CTG
gccatcattgattttggtgg

SEQ ID NO: 295708 - DNA, 20 bp, Artificial Sequence
  Description of Artificial Sequence: Synthetic oligonucleotide
  Target: LAMA2; (-) strand; PAM type: YTN; PAM sequence: TTG
tgccactggccatcattgat

SEQ ID NO: 295709 - DNA, 20 bp, Artificial Sequence
  Description of Artificial Sequence: Synthetic oligonucleotide
  Target: LAMA2; (-) strand; PAM type: YTN; PAM sequence: CTT
gtgccactggccatcattga

SEQ ID NO: 295710 - DNA, 20 bp, Artificial Sequence
  Description of Artificial Sequence: Synthetic oligonucleotide
  Target: LAMA2; (-) strand; PAM type: YTN; PAM sequence: TTA
ccttgtgccactggccatca

SEQ ID NO: 295711 - DNA, 20 bp, Artificial Sequence
  Description of Artificial Sequence: Synthetic oligonucleotide
  Target: LAMA2; (-) strand; PAM type: YTN; PAM sequence: CTA
ttaccttgtgccactggcca

SEQ ID NO: 295712 - DNA, 20 bp, Artificial Sequence
  Description of Artificial Sequence: Synthetic oligonucleotide
  Target: LAMA2; (-) strand; PAM type: YTN; PAM sequence: CTG
ccaatatccaggggactatt

SEQ ID NO: 295713 - DNA, 20 bp, Artificial Sequence
  Description of Artificial Sequence: Synthetic oligonucleotide
  Target: LAMA2; (-) strand; PAM type: YTN; PAM sequence: TTA
gggtactgccaatatccagg

SEQ ID NO: 295714 - DNA, 20 bp, Artificial Sequence
  Description of Artificial Sequence: Synthetic oligonucleotide
  Target: LAMA2; (-) strand; PAM type: YTN; PAM sequence: CTT
agggtactgccaatatccag

SEQ ID NO: 295715 - DNA, 20 bp, Artificial Sequence
  Description of Artificial Sequence: Synthetic oligonucleotide
  Target: LAMA2; (-) strand; PAM type: YTN; PAM sequence: TTC
ccttagggtactgccaatat

SEQ ID NO: 295716 - DNA, 20 bp, Artificial Sequence
  Description of Artificial Sequence: Synthetic oligonucleotide
  Target: LAMA2; (-) strand; PAM type: YTN; PAM sequence: CTC
agtaattcccttagggtact

SEQ ID NO: 295717 - DNA, 20 bp, Artificial Sequence
  Description of Artificial Sequence: Synthetic oligonucleotide
  Target: LAMA2; (-) strand; PAM type: YTN; PAM sequence: CTG
ccactcagtaattcccttag

SEQ ID NO: 295718 - DNA, 20 bp, Artificial Sequence
  Description of Artificial Sequence: Synthetic oligonucleotide
  Target: LAMA2; (-) strand; PAM type: YTN; PAM sequence: CTG
atggctgccactcagtaatt

SEQ ID NO: 295719 - DNA, 20 bp, Artificial Sequence
  Description of Artificial Sequence: Synthetic oligonucleotide
  Target: LAMA2; (-) strand; PAM type: YTN; PAM sequence: CTG
gcaccaggagaatgctgatg

SEQ ID NO: 295720 - DNA, 20 bp, Artificial Sequence
  Description of Artificial Sequence: Synthetic oligonucleotide
  Target: LAMA2; (-) strand; PAM type: YTN; PAM sequence: CTG
gcaaaatatactggcaccag

SEQ ID NO: 295721 - DNA, 20 bp, Artificial Sequence
  Description of Artificial Sequence: Synthetic oligonucleotide
  Target: LAMA2; (-) strand; PAM type: YTN; PAM sequence: CTG
ccctggcaaaatatactggc

SEQ ID NO: 295722 - DNA, 20 bp, Artificial Sequence
  Description of Artificial Sequence: Synthetic oligonucleotide
  Target: LAMA2; (-) strand; PAM type: YTN; PAM sequence: CTG
ccagagtcagtgtctgccct

SEQ ID NO: 295723 - DNA, 20 bp, Artificial Sequence
  Description of Artificial Sequence: Synthetic oligonucleotide
  Target: LAMA2; (-) strand; PAM type: YTN; PAM sequence: TTC
tgccagagtcagtgtctgcc

SEQ ID NO: 295724 - DNA, 20 bp, Artificial Sequence
  Description of Artificial Sequence: Synthetic oligonucleotide
  Target: LAMA2; (-) strand; PAM type: YTN; PAM sequence: CTT
ctgccagagtcagtgtctgc

SEQ ID NO: 295725 - DNA, 20 bp, Artificial Sequence
  Description of Artificial Sequence: Synthetic oligonucleotide
  Target: LAMA2; (-) strand; PAM type: YTN; PAM sequence: TTA
gcttctgccagagtcagtgt

SEQ ID NO: 295726 - DNA, 20 bp, Artificial Sequence
  Description of Artificial Sequence: Synthetic oligonucleotide
  Target: LAMA2; (-) strand; PAM type: YTN; PAM sequence: TTT
agcttctgccagagtcagtg

SEQ ID NO: 295727 - DNA, 20 bp, Artificial Sequence
  Description of Artificial Sequence: Synthetic oligonucleotide
  Target: LAMA2; (-) strand; PAM type: YTN; PAM sequence: TTT
tagcttctgccagagtcagt

SEQ ID NO: 295728 - DNA, 20 bp, Artificial Sequence
  Description of Artificial Sequence: Synthetic oligonucleotide
  Target: LAMA2; (-) strand; PAM type: YTN; PAM sequence: TTT
ttagcttctgccagagtcag

SEQ ID NO: 295729 - DNA, 20 bp, Artificial Sequence
  Description of Artificial Sequence: Synthetic oligonucleotide
  Target: LAMA2; (-) strand; PAM type: YTN; PAM sequence: TTA
tttttagcttctgccagagt

SEQ ID NO: 295730 - DNA, 20 bp, Artificial Sequence
  Description of Artificial Sequence: Synthetic oligonucleotide
  Target: LAMA2; (-) strand; PAM type: YTN; PAM sequence: TTT
atttttagcttctgccagag

SEQ ID NO: 295731 - DNA, 20 bp, Artificial Sequence
  Description of Artificial Sequence: Synthetic oligonucleotide
  Target: LAMA2; (-) strand; PAM type: YTN; PAM sequence: TTT
tatttttagcttctgccaga

SEQ ID NO: 295732 - DNA, 20 bp, Artificial Sequence
  Description of Artificial Sequence: Synthetic oligonucleotide
  Target: LAMA2; (-) strand; PAM type: YTN; PAM sequence: TTA
ttttatttttagcttctgcc

SEQ ID NO: 295733 - DNA, 20 bp, Artificial Sequence
  Description of Artificial Sequence: Synthetic oligonucleotide
  Target: LAMA2; (-) strand; PAM type: YTN; PAM sequence: CTT
attttatttttagcttctgc

SEQ ID NO: 295734 - DNA, 20 bp, Artificial Sequence
  Description of Artificial Sequence: Synthetic oligonucleotide
  Target: LAMA2; (-) strand; PAM type: YTN; PAM sequence: TTG
tatatggcacttattttatt

SEQ ID NO: 295735 - DNA, 20 bp, Artificial Sequence
  Description of Artificial Sequence: Synthetic oligonucleotide
  Target: LAMA2; (-) strand; PAM type: YTN; PAM sequence: TTG
tggtagttgtatatggcact

SEQ ID NO: 295736 - DNA, 20 bp, Artificial Sequence
  Description of Artificial Sequence: Synthetic oligonucleotide
  Target: LAMA2; (-) strand; PAM type: YTN; PAM sequence: TTC
caagattgtggtagttgtat

SEQ ID NO: 295737 - DNA, 20 bp, Artificial Sequence
  Description of Artificial Sequence: Synthetic oligonucleotide
  Target: LAMA2; (-) strand; PAM type: YTN; PAM sequence: TTT
ccaagattgtggtagttgta

SEQ ID NO: 295738 - DNA, 20 bp, Artificial Sequence
  Description of Artificial Sequence: Synthetic oligonucleotide
  Target: LAMA2; (-) strand; PAM type: YTN; PAM sequence: TTT
tccaagattgtggtagttgt

SEQ ID NO: 295739 - DNA, 20 bp, Artificial Sequence
  Description of Artificial Sequence: Synthetic oligonucleotide
  Target: LAMA2; (-) strand; PAM type: YTN; PAM sequence: CTG
agcacattttccaagattgt

SEQ ID NO: 295740 - DNA, 20 bp, Artificial Sequence
  Description of Artificial Sequence: Synthetic oligonucleotide
  Target: LAMA2; (-) strand; PAM type: YTN; PAM sequence: CTA
cacaggtctgagcacatttt

SEQ ID NO: 295741 - DNA, 20 bp, Artificial Sequence
  Description of Artificial Sequence: Synthetic oligonucleotide
  Target: LAMA2; (-) strand; PAM type: YTN; PAM sequence: TTG
aaaaccacagccatatagca

SEQ ID NO: 295742 - DNA, 20 bp, Artificial Sequence
  Description of Artificial Sequence: Synthetic oligonucleotide
  Target: LAMA2; (-) strand; PAM type: YTN; PAM sequence: TTT
gaaaaccacagccatatagc

SEQ ID NO: 295743 - DNA, 20 bp, Artificial Sequence
  Description of Artificial Sequence: Synthetic oligonucleotide
  Target: LAMA2; (-) strand; PAM type: YTN; PAM sequence: TTA
tgggtagatgtttgaaaacc

SEQ ID NO: 295744 - DNA, 20 bp, Artificial Sequence
  Description of Artificial Sequence: Synthetic oligonucleotide
  Target: LAMA2; (-) strand; PAM type: YTN; PAM sequence: TTT
atgggtagatgtttgaaaac

SEQ ID NO: 295745 - DNA, 20 bp, Artificial Sequence
  Description of Artificial Sequence: Synthetic oligonucleotide
  Target: LAMA2; (-) strand; PAM type: YTN; PAM sequence: CTC
agtttatgggtagatgtttg

SEQ ID NO: 295746 - DNA, 20 bp, Artificial Sequence
  Description of Artificial Sequence: Synthetic oligonucleotide
  Target: LAMA2; (-) strand; PAM type: YTN; PAM sequence: CTG
gcctcagtttatgggtagat

SEQ ID NO: 295747 - DNA, 20 bp, Artificial Sequence
  Description of Artificial Sequence: Synthetic oligonucleotide
  Target: LAMA2; (-) strand; PAM type: YTN; PAM sequence: TTC
agccacctggcctcagttta

SEQ ID NO: 295748 - DNA, 20 bp, Artificial Sequence
  Description of Artificial Sequence: Synthetic oligonucleotide
  Target: LAMA2; (-) strand; PAM type: YTN; PAM sequence: CTT
cagccacctggcctcagttt

SEQ ID NO: 295749 - DNA, 20 bp, Artificial Sequence
  Description of Artificial Sequence: Synthetic oligonucleotide
  Target: LAMA2; (-) strand; PAM type: YTN; PAM sequence: TTA
gagcagtggaaatgtcttca

SEQ ID NO: 295750 - DNA, 20 bp, Artificial Sequence
  Description of Artificial Sequence: Synthetic oligonucleotide
  Target: LAMA2; (-) strand; PAM type: YTN; PAM sequence: CTT
agagcagtggaaatgtcttc

SEQ ID NO: 295751 - DNA, 20 bp, Artificial Sequence
  Description of Artificial Sequence: Synthetic oligonucleotide
  Target: LAMA2; (-) strand; PAM type: YTN; PAM sequence: CTC
acttagagcagtggaaatgt

SEQ ID NO: 295752 - DNA, 20 bp, Artificial Sequence
  Description of Artificial Sequence: Synthetic oligonucleotide
  Target: LAMA2; (-) strand; PAM type: YTN; PAM sequence: TTC
tcacttagagcagtggaaat

SEQ ID NO: 295753 - DNA, 20 bp, Artificial Sequence
  Description of Artificial Sequence: Synthetic oligonucleotide
  Target: LAMA2; (-) strand; PAM type: YTN; PAM sequence: TTT
ctcacttagagcagtggaaa

SEQ ID NO: 295754 - DNA, 20 bp, Artificial Sequence
  Description of Artificial Sequence: Synthetic oligonucleotide
  Target: LAMA2; (-) strand; PAM type: YTN; PAM sequence: CTA
cgtttctcacttagagcagt

SEQ ID NO: 295755 - DNA, 20 bp, Artificial Sequence
  Description of Artificial Sequence: Synthetic oligonucleotide
  Target: LAMA2; (-) strand; PAM type: YTN; PAM sequence: TTC
tacgtttctcacttagagca

SEQ ID NO: 295756 - DNA, 20 bp, Artificial Sequence
  Description of Artificial Sequence: Synthetic oligonucleotide
  Target: LAMA2; (-) strand; PAM type: YTN; PAM sequence: CTG
ttctacgtttctcacttaga

SEQ ID NO: 295757 - DNA, 20 bp, Artificial Sequence
  Description of Artificial Sequence: Synthetic oligonucleotide
  Target: LAMA2; (-) strand; PAM type: YTN; PAM sequence: CTC
tgttctacgtttctcactta

SEQ ID NO: 295758 - DNA, 20 bp, Artificial Sequence
  Description of Artificial Sequence: Synthetic oligonucleotide
  Target: LAMA2; (-) strand; PAM type: YTN; PAM sequence: TTG
atggtgaacacactctgttc

SEQ ID NO: 295759 - DNA, 20 bp, Artificial Sequence
  Description of Artificial Sequence: Synthetic oligonucleotide
  Target: LAMA2; (-) strand; PAM type: YTN; PAM sequence: CTT
gatggtgaacacactctgtt

SEQ ID NO: 295760 - DNA, 20 bp, Artificial Sequence
  Description of Artificial Sequence: Synthetic oligonucleotide
  Target: LAMA2; (-) strand; PAM type: YTN; PAM sequence: TTG
aatacatcgagcttgatggt

SEQ ID NO: 295761 - DNA, 20 bp, Artificial Sequence
  Description of Artificial Sequence: Synthetic oligonucleotide
  Target: LAMA2; (-) strand; PAM type: YTN; PAM sequence: TTA
aaattgaatacatcgagctt

SEQ ID NO: 295762 - DNA, 20 bp, Artificial Sequence
  Description of Artificial Sequence: Synthetic oligonucleotide
  Target: LAMA2; (-) strand; PAM type: YTN; PAM sequence: CTT
aaaattgaatacatcgagct

SEQ ID NO: 295763 - DNA, 20 bp, Artificial Sequence
  Description of Artificial Sequence: Synthetic oligonucleotide
  Target: LAMA2; (-) strand; PAM type: YTN; PAM sequence: TTC
cttaaaattgaatacatcga

SEQ ID NO: 295764 - DNA, 20 bp, Artificial Sequence
  Description of Artificial Sequence: Synthetic oligonucleotide
  Target: LAMA2; (-) strand; PAM type: YTN; PAM sequence: TTA
ttccttaaaattgaatacat

SEQ ID NO: 295765 - DNA, 20 bp, Artificial Sequence
  Description of Artificial Sequence: Synthetic oligonucleotide
  Target: LAMA2; (-) strand; PAM type: YTN; PAM sequence: CTC
agaataaatattattcctta

SEQ ID NO: 295766 - DNA, 20 bp, Artificial Sequence
  Description of Artificial Sequence: Synthetic oligonucleotide
  Target: LAMA2; (-) strand; PAM type: YTN; PAM sequence: CTA
taatataatctcagaataaa

SEQ ID NO: 295767 - DNA, 20 bp, Artificial Sequence
  Description of Artificial Sequence: Synthetic oligonucleotide
  Target: LAMA2; (-) strand; PAM type: YTN; PAM sequence: TTA
gccaccataaaaatgctata

SEQ ID NO: 295768 - DNA, 20 bp, Artificial Sequence
  Description of Artificial Sequence: Synthetic oligonucleotide
  Target: LAMA2; (-) strand; PAM type: YTN; PAM sequence: TTT
agccaccataaaaatgctat

SEQ ID NO: 295769 - DNA, 20 bp, Artificial Sequence
  Description of Artificial Sequence: Synthetic oligonucleotide
  Target: LAMA2; (-) strand; PAM type: YTN; PAM sequence: TTT
tagccaccataaaaatgcta

SEQ ID NO: 295770 - DNA, 20 bp, Artificial Sequence
  Description of Artificial Sequence: Synthetic oligonucleotide
  Target: LAMA2; (-) strand; PAM type: YTN; PAM sequence: CTT
ttagccaccataaaaatgct

SEQ ID NO: 295771 - DNA, 20 bp, Artificial Sequence
  Description of Artificial Sequence: Synthetic oligonucleotide
  Target: LAMA2; (-) strand; PAM type: YTN; PAM sequence: TTC
ataatagaaaggccttttag

SEQ ID NO: 295772 - DNA, 20 bp, Artificial Sequence
  Description of Artificial Sequence: Synthetic oligonucleotide
  Target: LAMA2; (-) strand; PAM type: YTN; PAM sequence: TTT
cataatagaaaggcctttta

SEQ ID NO: 295773 - DNA, 20 bp, Artificial Sequence
  Description of Artificial Sequence: Synthetic oligonucleotide
  Target: LAMA2; (-) strand; PAM type: YTN; PAM sequence: CTA
tttcataatagaaaggcctt

SEQ ID NO: 295774 - DNA, 20 bp, Artificial Sequence
  Description of Artificial Sequence: Synthetic oligonucleotide
  Target: LAMA2; (-) strand; PAM type: YTN; PAM sequence: TTG
gcaaatactatttcataata

SEQ ID NO: 295775 - DNA, 20 bp, Artificial Sequence
  Description of Artificial Sequence: Synthetic oligonucleotide
  Target: LAMA2; (-) strand; PAM type: YTN; PAM sequence: TTT
ggcaaatactatttcataat

SEQ ID NO: 295776 - DNA, 20 bp, Artificial Sequence
  Description of Artificial Sequence: Synthetic oligonucleotide
  Target: LAMA2; (-) strand; PAM type: YTN; PAM sequence: TTT
tggcaaatactatttcataa

SEQ ID NO: 295777 - DNA, 20 bp, Artificial Sequence
  Description of Artificial Sequence: Synthetic oligonucleotide
  Target: LAMA2; (-) strand; PAM type: YTN; PAM sequence: CTT
ttggcaaatactatttcata

SEQ ID NO: 295778 - DNA, 20 bp, Artificial Sequence
  Description of Artificial Sequence: Synthetic oligonucleotide
  Target: LAMA2; (-) strand; PAM type: YTN; PAM sequence: TTG
cttttggcaaatactatttc

SEQ ID NO: 295779 - DNA, 20 bp, Artificial Sequence
  Description of Artificial Sequence: Synthetic oligonucleotide
  Target: LAMA2; (-) strand; PAM type: YTN; PAM sequence: TTT
gcttttggcaaatactattt

SEQ ID NO: 295780 - DNA, 20 bp, Artificial Sequence
  Description of Artificial Sequence: Synthetic oligonucleotide
  Target: LAMA2; (-) strand; PAM type: YTN; PAM sequence: TTT
tgcttttggcaaatactatt

SEQ ID NO: 295781 - DNA, 20 bp, Artificial Sequence
  Description of Artificial Sequence: Synthetic oligonucleotide
  Target: LAMA2; (-) strand; PAM type: YTN; PAM sequence: CTT
ttgcttttggcaaatactat

SEQ ID NO: 295782 - DNA, 20 bp, Artificial Sequence
  Description of Artificial Sequence: Synthetic oligonucleotide
  Target: LAMA2; (-) strand; PAM type: YTN; PAM sequence: TTG
ccaacttttgcttttggcaa

SEQ ID NO: 295783 - DNA, 20 bp, Artificial Sequence
  Description of Artificial Sequence: Synthetic oligonucleotide
  Target: LAMA2; (-) strand; PAM type: YTN; PAM sequence: TTA
gtgttgccaacttttgcttt

SEQ ID NO: 295784 - DNA, 20 bp, Artificial Sequence
  Description of Artificial Sequence: Synthetic oligonucleotide
  Target: LAMA2; (-) strand; PAM type: YTN; PAM sequence: TTT
agtgttgccaacttttgctt

SEQ ID NO: 295785 - DNA, 20 bp, Artificial Sequence
  Description of Artificial Sequence: Synthetic oligonucleotide
  Target: LAMA2; (-) strand; PAM type: YTN; PAM sequence: TTT
tagtgttgccaacttttgct

SEQ ID NO: 295786 - DNA, 20 bp, Artificial Sequence
  Description of Artificial Sequence: Synthetic oligonucleotide
  Target: LAMA2; (-) strand; PAM type: YTN; PAM sequence: TTG
ggacccattttagtgttgcc

SEQ ID NO: 295787 - DNA, 20 bp, Artificial Sequence
  Description of Artificial Sequence: Synthetic oligonucleotide
  Target: LAMA2; (-) strand; PAM type: YTN; PAM sequence: CTT
gggacccattttagtgttgc

SEQ ID NO: 295788 - DNA, 20 bp, Artificial Sequence
  Description of Artificial Sequence: Synthetic oligonucleotide
  Target: LAMA2; (-) strand; PAM type: YTN; PAM sequence: TTA
ggtggggagtcttgggaccc

SEQ ID NO: 295789 - DNA, 20 bp, Artificial Sequence
  Description of Artificial Sequence: Synthetic oligonucleotide
  Target: LAMA2; (-) strand; PAM type: YTN; PAM sequence: CTG
tgtggttaggtggggagtct

SEQ ID NO: 295790 - DNA, 20 bp, Artificial Sequence
  Description of Artificial Sequence: Synthetic oligonucleotide
  Target: LAMA2; (-) strand; PAM type: YTN; PAM sequence: TTC
acagaccactgtgtggttag

SEQ ID NO: 295791 - DNA, 20 bp, Artificial Sequence
  Description of Artificial Sequence: Synthetic oligonucleotide
  Target: LAMA2; (-) strand; PAM type: YTN; PAM sequence: TTT
cacagaccactgtgtggtta

SEQ ID NO: 295792 - DNA, 20 bp, Artificial Sequence
  Description of Artificial Sequence: Synthetic oligonucleotide
  Target: LAMA2; (-) strand; PAM type: YTN; PAM sequence: TTT
tcacagaccactgtgtggtt

SEQ ID NO: 295793 - DNA, 20 bp, Artificial Sequence
  Description of Artificial Sequence: Synthetic oligonucleotide
  Target: LAMA2; (-) strand; PAM type: YTN; PAM sequence: CTG
gttttcacagaccactgtgt

SEQ ID NO: 295794 - DNA, 20 bp, Artificial Sequence
  Description of Artificial Sequence: Synthetic oligonucleotide
  Target: LAMA2; (-) strand; PAM type: YTN; PAM sequence: TTC
ctggttttcacagaccactg

SEQ ID NO: 295795 - DNA, 20 bp, Artificial Sequence
  Description of Artificial Sequence: Synthetic oligonucleotide
  Target: LAMA2; (-) strand; PAM type: YTN; PAM sequence: CTG
gattcctggttttcacagac

SEQ ID NO: 295796 - DNA, 20 bp, Artificial Sequence
  Description of Artificial Sequence: Synthetic oligonucleotide
  Target: LAMA2; (-) strand; PAM type: YTN; PAM sequence: TTC
ctggattcctggttttcaca

SEQ ID NO: 295797 - DNA, 20 bp, Artificial Sequence
  Description of Artificial Sequence: Synthetic oligonucleotide
  Target: LAMA2; (-) strand; PAM type: YTN; PAM sequence: TTA
aacacgatcaaccagagatt

SEQ ID NO: 295798 - DNA, 20 bp, Artificial Sequence
  Description of Artificial Sequence: Synthetic oligonucleotide
  Target: LAMA2; (-) strand; PAM type: YTN; PAM sequence: TTT
aaacacgatcaaccagagat

SEQ ID NO: 295799 - DNA, 20 bp, Artificial Sequence
  Description of Artificial Sequence: Synthetic oligonucleotide
  Target: LAMA2; (-) strand; PAM type: YTN; PAM sequence: CTT
taaacacgatcaaccagaga

SEQ ID NO: 295800 - DNA, 20 bp, Artificial Sequence
  Description of Artificial Sequence: Synthetic oligonucleotide
  Target: LAMA2; (-) strand; PAM type: YTN; PAM sequence: TTA
gagccctttaaacacgatca

SEQ ID NO: 295801 - DNA, 20 bp, Artificial Sequence
  Description of Artificial Sequence: Synthetic oligonucleotide
  Target: LAMA2; (-) strand; PAM type: YTN; PAM sequence: CTT
agagccctttaaacacgatc

SEQ ID NO: 295802 - DNA, 20 bp, Artificial Sequence
  Description of Artificial Sequence: Synthetic oligonucleotide
  Target: LAMA2; (-) strand; PAM type: YTN; PAM sequence: CTG
tcagtagaaatgatacctta

SEQ ID NO: 295803 - DNA, 20 bp, Artificial Sequence
  Description of Artificial Sequence: Synthetic oligonucleotide
  Target: LAMA2; (-) strand; PAM type: YTN; PAM sequence: TTC
caaataactgtcagtagaaa

SEQ ID NO: 295804 - DNA, 20 bp, Artificial Sequence
  Description of Artificial Sequence: Synthetic oligonucleotide
  Target: LAMA2; (-) strand; PAM type: YTN; PAM sequence: TTG
ttccaaataactgtcagtag

SEQ ID NO: 295805 - DNA, 20 bp, Artificial Sequence
  Description of Artificial Sequence: Synthetic oligonucleotide
  Target: LAMA2; (-) strand; PAM type: YTN; PAM sequence: TTA
aagttgttccaaataactgt

SEQ ID NO: 295806 - DNA, 20 bp, Artificial Sequence
  Description of Artificial Sequence: Synthetic oligonucleotide
  Target: LAMA2; (-) strand; PAM type: YTN; PAM sequence: TTT
aaagttgttccaaataactg

SEQ ID NO: 295807 - DNA, 20 bp, Artificial Sequence
  Description of Artificial Sequence: Synthetic oligonucleotide
  Target: LAMA2; (-) strand; PAM type: YTN; PAM sequence: TTT
taaagttgttccaaataact

SEQ ID NO: 295808 - DNA, 20 bp, Artificial Sequence
  Description of Artificial Sequence: Synthetic oligonucleotide
  Target: LAMA2; (-) strand; PAM type: YTN; PAM sequence: TTT
ttaaagttgttccaaataac

SEQ ID NO: 295809 - DNA, 20 bp, Artificial Sequence
  Description of Artificial Sequence: Synthetic oligonucleotide
  Target: LAMA2; (-) strand; PAM type: YTN; PAM sequence: CTG
ggtgtaaggccaacgttttt

SEQ ID NO: 295810 - DNA, 20 bp, Artificial Sequence
  Description of Artificial Sequence: Synthetic oligonucleotide
  Target: LAMA2; (-) strand; PAM type: YTN; PAM sequence: TTC
tgggtgtaaggccaacgttt

SEQ ID NO: 295811 - DNA, 20 bp, Artificial Sequence
  Description of Artificial Sequence: Synthetic oligonucleotide
  Target: LAMA2; (-) strand; PAM type: YTN; PAM sequence: TTT
ctgggtgtaaggccaacgtt

SEQ ID NO: 295812 - DNA, 20 bp, Artificial Sequence
  Description of Artificial Sequence: Synthetic oligonucleotide
  Target: LAMA2; (-) strand; PAM type: YTN; PAM sequence: CTG
tgcccataatagtaccagtt

SEQ ID NO: 295813 - DNA, 20 bp, Artificial Sequence
  Description of Artificial Sequence: Synthetic oligonucleotide
  Target: LAMA2; (-) strand; PAM type: YTN; PAM sequence: TTC
tgtgcccataatagtaccag

SEQ ID NO: 295814 - DNA, 20 bp, Artificial Sequence
  Description of Artificial Sequence: Synthetic oligonucleotide
  Target: LAMA2; (-) strand; PAM type: YTN; PAM sequence: CTT
ctgtgcccataatagtacca

SEQ ID NO: 295815 - DNA, 20 bp, Artificial Sequence
  Description of Artificial Sequence: Synthetic oligonucleotide
  Target: LAMA2; (-) strand; PAM type: YTN; PAM sequence: CTG
gcaaatgagccttctgtgcc

SEQ ID NO: 295816 - DNA, 20 bp, Artificial Sequence
  Description of Artificial Sequence: Synthetic oligonucleotide
  Target: LAMA2; (-) strand; PAM type: YTN; PAM sequence: TTG
cagtcatgccaaagaggaca

SEQ ID NO: 295817 - DNA, 20 bp, Artificial Sequence
  Description of Artificial Sequence: Synthetic oligonucleotide
  Target: LAMA2; (-) strand; PAM type: YTN; PAM sequence: TTT
gcagtcatgccaaagaggac

SEQ ID NO: 295818 - DNA, 20 bp, Artificial Sequence
  Description of Artificial Sequence: Synthetic oligonucleotide
  Target: LAMA2; (-) strand; PAM type: YTN; PAM sequence: CTA
tttgcagtcatgccaaagag

SEQ ID NO: 295819 - DNA, 20 bp, Artificial Sequence
  Description of Artificial Sequence: Synthetic oligonucleotide
  Target: LAMA2; (-) strand; PAM type: YTN; PAM sequence: TTA
tctatttgcagtcatgccaa

SEQ ID NO: 295820 - DNA, 20 bp, Artificial Sequence
  Description of Artificial Sequence: Synthetic oligonucleotide
  Target: LAMA2; (-) strand; PAM type: YTN; PAM sequence: TTA
atcaggcagtatattatcta

SEQ ID NO: 295821 - DNA, 20 bp, Artificial Sequence
  Description of Artificial Sequence: Synthetic oligonucleotide
  Target: LAMA2; (-) strand; PAM type: YTN; PAM sequence: TTT
aatcaggcagtatattatct

SEQ ID NO: 295822 - DNA, 20 bp, Artificial Sequence
  Description of Artificial Sequence: Synthetic oligonucleotide
  Target: LAMA2; (-) strand; PAM type: YTN; PAM sequence: TTT
taatcaggcagtatattatc

SEQ ID NO: 295823 - DNA, 20 bp, Artificial Sequence
  Description of Artificial Sequence: Synthetic oligonucleotide
  Target: LAMA2; (-) strand; PAM type: YTN; PAM sequence: TTG
ttttaatcaggcagtatatt

SEQ ID NO: 295824 - DNA, 20 bp, Artificial Sequence
  Description of Artificial Sequence: Synthetic oligonucleotide
  Target: LAMA2; (-) strand; PAM type: YTN; PAM sequence: TTT
gttttaatcaggcagtatat

SEQ ID NO: 295825 - DNA, 20 bp, Artificial Sequence
  Description of Artificial Sequence: Synthetic oligonucleotide
  Target: LAMA2; (-) strand; PAM type: YTN; PAM sequence: TTT
tgttttaatcaggcagtata

SEQ ID NO: 295826 - DNA, 20 bp, Artificial Sequence
  Description of Artificial Sequence: Synthetic oligonucleotide
  Target: LAMA2; (-) strand; PAM type: YTN; PAM sequence: TTG
agattttgttttaatcaggc

SEQ ID NO: 295827 - DNA, 20 bp, Artificial Sequence
  Description of Artificial Sequence: Synthetic oligonucleotide
  Target: LAMA2; (-) strand; PAM type: YTN; PAM sequence: CTA
tcgcaggtgcagagacaaat

SEQ ID NO: 295828 - DNA, 20 bp, Artificial Sequence
  Description of Artificial Sequence: Synthetic oligonucleotide
  Target: LAMA2; (-) strand; PAM type: YTN; PAM sequence: TTA
ataggctatcgcaggtgcag

SEQ ID NO: 295829 - DNA, 20 bp, Artificial Sequence
  Description of Artificial Sequence: Synthetic oligonucleotide
  Target: LAMA2; (-) strand; PAM type: YTN; PAM sequence: TTT
aataggctatcgcaggtgca

SEQ ID NO: 295830 - DNA, 20 bp, Artificial Sequence
  Description of Artificial Sequence: Synthetic oligonucleotide
  Target: LAMA2; (-) strand; PAM type: YTN; PAM sequence: CTT
taataggctatcgcaggtgc

SEQ ID NO: 295831 - DNA, 20 bp, Artificial Sequence
  Description of Artificial Sequence: Synthetic oligonucleotide
  Target: LAMA2; (-) strand; PAM type: YTN; PAM sequence: TTG
ctttaataggctatcgcagg

SEQ ID NO: 295832 - DNA, 20 bp, Artificial Sequence
  Description of Artificial Sequence: Synthetic oligonucleotide
  Target: LAMA2; (-) strand; PAM type: YTN; PAM sequence: TTT
gctttaataggctatcgcag

SEQ ID NO: 295833 - DNA, 20 bp, Artificial Sequence
  Description of Artificial Sequence: Synthetic oligonucleotide
  Target: LAMA2; (-) strand; PAM type: YTN; PAM sequence: CTT
tgctttaataggctatcgca

SEQ ID NO: 295834 - DNA, 20 bp, Artificial Sequence
  Description of Artificial Sequence: Synthetic oligonucleotide
  Target: LAMA2; (-) strand; PAM type: YTN; PAM sequence: CTA
gggaagctttgctttaatag

SEQ ID NO: 295835 - DNA, 20 bp, Artificial Sequence
  Description of Artificial Sequence: Synthetic oligonucleotide
  Target: LAMA2; (-) strand; PAM type: YTN; PAM sequence: CTA
cctagggaagctttgcttta

SEQ ID NO: 295836 - DNA, 20 bp, Artificial Sequence
  Description of Artificial Sequence: Synthetic oligonucleotide
  Target: LAMA2; (-) strand; PAM type: YTN; PAM sequence: TTG
gtctacctagggaagctttg

SEQ ID NO: 295837 - DNA, 20 bp, Artificial Sequence
  Description of Artificial Sequence: Synthetic oligonucleotide
  Target: LAMA2; (-) strand; PAM type: YTN; PAM sequence: TTA
ttggtctacctagggaagct

SEQ ID NO: 295838 - DNA, 20 bp, Artificial Sequence
  Description of Artificial Sequence: Synthetic oligonucleotide
  Target: LAMA2; (-) strand; PAM type: YTN; PAM sequence: TTT
attggtctacctagggaagc

SEQ ID NO: 295839 - DNA, 20 bp, Artificial Sequence
  Description of Artificial Sequence: Synthetic oligonucleotide
  Target: LAMA2; (-) strand; PAM type: YTN; PAM sequence: TTT
tattggtctacctagggaag

SEQ ID NO: 295840 - DNA, 20 bp, Artificial Sequence
  Description of Artificial Sequence: Synthetic oligonucleotide
  Target: LAMA2; (-) strand; PAM type: YTN; PAM sequence: TTA
aaaattttattggtctacct

SEQ ID NO: 295841 - DNA, 20 bp, Artificial Sequence
  Description of Artificial Sequence: Synthetic oligonucleotide
  Target: LAMA2; (-) strand; PAM type: YTN; PAM sequence: CTG
aaaattaaaaattttattgg

SEQ ID NO: 295842 - DNA, 20 bp, Artificial Sequence
  Description of Artificial Sequence: Synthetic oligonucleotide
  Target: LAMA2; (-) strand; PAM type: YTN; PAM sequence: CTC
tgaaaattaaaaattttatt

SEQ ID NO: 295843 - DNA, 20 bp, Artificial Sequence
  Description of Artificial Sequence: Synthetic oligonucleotide
  Target: LAMA2; (-) strand; PAM type: YTN; PAM sequence: CTA
ataatatcgtactctgaaaa

SEQ ID NO: 295844 - DNA, 20 bp, Artificial Sequence
  Description of Artificial Sequence: Synthetic oligonucleotide
  Target: LAMA2; (-) strand; PAM type: YTN; PAM sequence: CTA
acatctaataatatcgtact

SEQ ID NO: 295845 - DNA, 20 bp, Artificial Sequence
  Description of Artificial Sequence: Synthetic oligonucleotide
  Target: LAMA2; (-) strand; PAM type: YTN; PAM sequence: TTA
accaaatctaacatctaata

SEQ ID NO: 295846 - DNA, 20 bp, Artificial Sequence
  Description of Artificial Sequence: Synthetic oligonucleotide
  Target: LAMA2; (-) strand; PAM type: YTN; PAM sequence: TTA
acattaaccaaatctaacat

SEQ ID NO: 295847 - DNA, 20 bp, Artificial Sequence
  Description of Artificial Sequence: Synthetic oligonucleotide
  Target: LAMA2; (-) strand; PAM type: YTN; PAM sequence: CTA
gaatatgacaagtcaaagta

SEQ ID NO: 295848 - DNA, 20 bp, Artificial Sequence
  Description of Artificial Sequence: Synthetic oligonucleotide
  Target: LAMA2; (-) strand; PAM type: YTN; PAM sequence: TTC
tagaatatgacaagtcaaag

SEQ ID NO: 295849 - DNA, 20 bp, Artificial Sequence
  Description of Artificial Sequence: Synthetic oligonucleotide
  Target: LAMA2; (-) strand; PAM type: YTN; PAM sequence: TTT
ctagaatatgacaagtcaaa

SEQ ID NO: 295850 - DNA, 20 bp, Artificial Sequence
  Description of Artificial Sequence: Synthetic oligonucleotide
  Target: LAMA2; (-) strand; PAM type: YTN; PAM sequence: CTT
tctagaatatgacaagtcaa

SEQ ID NO: 295851 - DNA, 20 bp, Artificial Sequence
  Description of Artificial Sequence: Synthetic oligonucleotide
  Target: LAMA2; (-) strand; PAM type: YTN; PAM sequence: TTG
gctttctagaatatgacaag

SEQ ID NO: 295852 - DNA, 20 bp, Artificial Sequence
  Description of Artificial Sequence: Synthetic oligonucleotide
  Target: LAMA2; (-) strand; PAM type: YTN; PAM sequence: TTT
ggctttctagaatatgacaa

SEQ ID NO: 295853 - DNA, 20 bp, Artificial Sequence
  Description of Artificial Sequence: Synthetic oligonucleotide
  Target: LAMA2; (-) strand; PAM type: YTN; PAM sequence: CTT
tggctttctagaatatgaca

SEQ ID NO: 295854 - DNA, 20 bp, Artificial Sequence
  Description of Artificial Sequence: Synthetic oligonucleotide
  Target: LAMA2; (-) strand; PAM type: YTN; PAM sequence: TTC
tttggctttctagaatatga

SEQ ID NO: 295855 - DNA, 20 bp, Artificial Sequence
  Description of Artificial Sequence: Synthetic oligonucleotide
  Target: LAMA2; (-) strand; PAM type: YTN; PAM sequence: TTA
aggttctttggctttctaga

SEQ ID NO: 295856 - DNA, 20 bp, Artificial Sequence
  Description of Artificial Sequence: Synthetic oligonucleotide
  Target: LAMA2; (-) strand; PAM type: YTN; PAM sequence: TTT
aaggttctttggctttctag

SEQ ID NO: 295857 - DNA, 20 bp, Artificial Sequence
  Description of Artificial Sequence: Synthetic oligonucleotide
  Target: LAMA2; (-) strand; PAM type: YTN; PAM sequence: TTT
taaggttctttggctttcta

SEQ ID NO: 295858 - DNA, 20 bp, Artificial Sequence
  Description of Artificial Sequence: Synthetic oligonucleotide
  Target: LAMA2; (-) strand; PAM type: YTN; PAM sequence: TTT
ttaaggttctttggctttct

SEQ ID NO: 295859 - DNA, 20 bp, Artificial Sequence
  Description of Artificial Sequence: Synthetic oligonucleotide
  Target: LAMA2; (-) strand; PAM type: YTN; PAM sequence: TTT
tttaaggttctttggctttc

SEQ ID NO: 295860 - DNA, 20 bp, Artificial Sequence
  Description of Artificial Sequence: Synthetic oligonucleotide
  Target: LAMA2; (-) strand; PAM type: YTN; PAM sequence: TTC
gcgttttttaaggttctttg

SEQ ID NO: 295861 - DNA, 20 bp, Artificial Sequence
  Description of Artificial Sequence: Synthetic oligonucleotide
  Target: LAMA2; (-) strand; PAM type: YTN; PAM sequence: CTT
cgcgttttttaaggttcttt

SEQ ID NO: 295862 - DNA, 20 bp, Artificial Sequence
  Description of Artificial Sequence: Synthetic oligonucleotide
  Target: LAMA2; (-) strand; PAM type: YTN; PAM sequence: TTG
gcttcgcgttttttaaggtt

SEQ ID NO: 295863 - DNA, 20 bp, Artificial Sequence
  Description of Artificial Sequence: Synthetic oligonucleotide
  Target: LAMA2; (-) strand; PAM type: YTN; PAM sequence: TTG
gttggcttcgcgttttttaa

SEQ ID NO: 295864 - DNA, 20 bp, Artificial Sequence
  Description of Artificial Sequence: Synthetic oligonucleotide
  Target: LAMA2; (-) strand; PAM type: YTN; PAM sequence: TTC
catgataacaaattggttgg

SEQ ID NO: 295865 - DNA, 20 bp, Artificial Sequence
  Description of Artificial Sequence: Synthetic oligonucleotide
  Target: LAMA2; (-) strand; PAM type: YTN; PAM sequence: TTT
ccatgataacaaattggttg

SEQ ID NO: 295866 - DNA, 20 bp, Artificial Sequence
  Description of Artificial Sequence: Synthetic oligonucleotide
  Target: LAMA2; (-) strand; PAM type: YTN; PAM sequence: TTA
tttccatgataacaaattgg

SEQ ID NO: 295867 - DNA, 20 bp, Artificial Sequence
  Description of Artificial Sequence: Synthetic oligonucleotide
  Target: LAMA2; (-) strand; PAM type: YTN; PAM sequence: CTT
atttccatgataacaaattg

SEQ ID NO: 295868 - DNA, 20 bp, Artificial Sequence
  Description of Artificial Sequence: Synthetic oligonucleotide
  Target: LAMA2; (-) strand; PAM type: YTN; PAM sequence: TTC
ttatttccatgataacaaat

SEQ ID NO: 295869 - DNA, 20 bp, Artificial Sequence
  Description of Artificial Sequence: Synthetic oligonucleotide
  Target: LAMA2; (-) strand; PAM type: YTN; PAM sequence: TTT
cttatttccatgataacaaa

SEQ ID NO: 295870 - DNA, 20 bp, Artificial Sequence
  Description of Artificial Sequence: Synthetic oligonucleotide
  Target: LAMA2; (-) strand; PAM type: YTN; PAM sequence: TTT
tcttatttccatgataacaa

SEQ ID NO: 295871 - DNA, 20 bp, Artificial Sequence
  Description of Artificial Sequence: Synthetic oligonucleotide
  Target: LAMA2; (-) strand; PAM type: YTN; PAM sequence: CTT
ttcttatttccatgataaca

SEQ ID NO: 295872 - DNA, 20 bp, Artificial Sequence
  Description of Artificial Sequence: Synthetic oligonucleotide
  Target: LAMA2; (-) strand; PAM type: YTN; PAM sequence: TTC
cttttcttatttccatgata

SEQ ID NO: 295873 - DNA, 20 bp, Artificial Sequence
  Description of Artificial Sequence: Synthetic oligonucleotide
  Target: LAMA2; (-) strand; PAM type: YTN; PAM sequence: CTC
ccagcaaaaatgaagattcc

SEQ ID NO: 295874 - DNA, 20 bp, Artificial Sequence
  Description of Artificial Sequence: Synthetic oligonucleotide
  Target: LAMA2; (-) strand; PAM type: YTN; PAM sequence: CTA
gtcataagctcccagcaaaa

SEQ ID NO: 295875 - DNA, 20 bp, Artificial Sequence
  Description of Artificial Sequence: Synthetic oligonucleotide
  Target: LAMA2; (-) strand; PAM type: YTN; PAM sequence: TTG
ctagtcataagctcccagca

SEQ ID NO: 295876 - DNA, 20 bp, Artificial Sequence
  Description of Artificial Sequence: Synthetic oligonucleotide
  Target: LAMA2; (-) strand; PAM type: YTN; PAM sequence: TTT
gctagtcataagctcccagc

SEQ ID NO: 295877 - DNA, 20 bp, Artificial Sequence
  Description of Artificial Sequence: Synthetic oligonucleotide
  Target: LAMA2; (-) strand; PAM type: YTN; PAM sequence: CTG
tatttgctagtcataagctc

SEQ ID NO: 295878 - DNA, 20 bp, Artificial Sequence
  Description of Artificial Sequence: Synthetic oligonucleotide
  Target: LAMA2; (-) strand; PAM type: YTN; PAM sequence: TTG
gatctgtatttgctagtcat

SEQ ID NO: 295879 - DNA, 20 bp, Artificial Sequence
  Description of Artificial Sequence: Synthetic oligonucleotide
  Target: LAMA2; (-) strand; PAM type: YTN; PAM sequence: TTT
ggatctgtatttgctagtca

SEQ ID NO: 295880 - DNA, 20 bp, Artificial Sequence
  Description of Artificial Sequence: Synthetic oligonucleotide
  Target: LAMA2; (-) strand; PAM type: YTN; PAM sequence: TTC
atttggatctgtatttgcta

SEQ ID NO: 295881 - DNA, 20 bp, Artificial Sequence
  Description of Artificial Sequence: Synthetic oligonucleotide
  Target: LAMA2; (-) strand; PAM type: YTN; PAM sequence: CTT
catttggatctgtatttgct

SEQ ID NO: 295882 - DNA, 20 bp, Artificial Sequence
  Description of Artificial Sequence: Synthetic oligonucleotide
  Target: LAMA2; (-) strand; PAM type: YTN; PAM sequence: CTC
cttcatttggatctgtattt

SEQ ID NO: 295883 - DNA, 20 bp, Artificial Sequence
  Description of Artificial Sequence: Synthetic oligonucleotide
  Target: LAMA2; (-) strand; PAM type: YTN; PAM sequence: TTA
atgagagctccttcatttgg

SEQ ID NO: 295884 - DNA, 20 bp, Artificial Sequence
  Description of Artificial Sequence: Synthetic oligonucleotide
  Target: LAMA2; (-) strand; PAM type: YTN; PAM sequence: CTT
aatgagagctccttcatttg

SEQ ID NO: 295885 - DNA, 20 bp, Artificial Sequence
  Description of Artificial Sequence: Synthetic oligonucleotide
  Target: LAMA2; (-) strand; PAM type: YTN; PAM sequence: CTC
ttaatgagagctccttcatt

SEQ ID NO: 295886 - DNA, 20 bp, Artificial Sequence
  Description of Artificial Sequence: Synthetic oligonucleotide
  Target: LAMA2; (-) strand; PAM type: YTN; PAM sequence: CTA
gagatggaagaactcttaat

SEQ ID NO: 295887 - DNA, 20 bp, Artificial Sequence
  Description of Artificial Sequence: Synthetic oligonucleotide
  Target: LAMA2; (-) strand; PAM type: YTN; PAM sequence: TTA
gctagagatggaagaactct

SEQ ID NO: 295888 - DNA, 20 bp, Artificial Sequence
  Description of Artificial Sequence: Synthetic oligonucleotide
  Target: LAMA2; (-) strand; PAM type: YTN; PAM sequence: CTA
ttagctagagatggaagaac

SEQ ID NO: 295889 - DNA, 20 bp, Artificial Sequence
  Description of Artificial Sequence: Synthetic oligonucleotide
  Target: LAMA2; (-) strand; PAM type: YTN; PAM sequence: TTC
tattagctagagatggaaga

SEQ ID NO: 295890 - DNA, 20 bp, Artificial Sequence
  Description of Artificial Sequence: Synthetic oligonucleotide
  Target: LAMA2; (-) strand; PAM type: YTN; PAM sequence: TTA
ttctattagctagagatgga

SEQ ID NO: 295891 - DNA, 20 bp, Artificial Sequence
  Description of Artificial Sequence: Synthetic oligonucleotide
  Target: LAMA2; (-) strand; PAM type: YTN; PAM sequence: TTA
ttattctattagctagagat

SEQ ID NO: 295892 - DNA, 20 bp, Artificial Sequence
  Description of Artificial Sequence: Synthetic oligonucleotide
  Target: LAMA2; (-) strand; PAM type: YTN; PAM sequence: TTT
attattctattagctagaga

SEQ ID NO: 295893 - DNA, 20 bp, Artificial Sequence
  Description of Artificial Sequence: Synthetic oligonucleotide
  Target: LAMA2; (-) strand; PAM type: YTN; PAM sequence: CTC
aaatgtcatatttattattc

SEQ ID NO: 295894 - DNA, 20 bp, Artificial Sequence
  Description of Artificial Sequence: Synthetic oligonucleotide
  Target: LAMA2; (-) strand; PAM type: YTN; PAM sequence: TTC
tcaaatgtcatatttattat

SEQ ID NO: 295895 - DNA, 20 bp, Artificial Sequence
  Description of Artificial Sequence: Synthetic oligonucleotide
  Target: LAMA2; (-) strand; PAM type: YTN; PAM sequence: TTT
ctcaaatgtcatatttatta

SEQ ID NO: 295896 - DNA, 20 bp, Artificial Sequence
  Description of Artificial Sequence: Synthetic oligonucleotide
  Target: LAMA2; (-) strand; PAM type: YTN; PAM sequence: TTT
tctcaaatgtcatatttatt

SEQ ID NO: 295897 - DNA, 20 bp, Artificial Sequence
  Description of Artificial Sequence: Synthetic oligonucleotide
  Target: LAMA2; (-) strand; PAM type: YTN; PAM sequence: TTT
ttctcaaatgtcatatttat

SEQ ID NO: 295898 - DNA, 20 bp, Artificial Sequence
  Description of Artificial Sequence: Synthetic oligonucleotide
  Target: LAMA2; (-) strand; PAM type: YTN; PAM sequence: CTT
tttctcaaatgtcatattta

SEQ ID NO: 295899 - DNA, 20 bp, Artificial Sequence
  Description of Artificial Sequence: Synthetic oligonucleotide
  Target: LAMA2; (-) strand; PAM type: YTN; PAM sequence: TTC
aacaatatgtctttttctca

SEQ ID NO: 295900 - DNA, 20 bp, Artificial Sequence
  Description of Artificial Sequence: Synthetic oligonucleotide
  Target: LAMA2; (-) strand; PAM type: YTN; PAM sequence: TTG
tggttcaacaatatgtcttt

SEQ ID NO: 295901 - DNA, 20 bp, Artificial Sequence
  Description of Artificial Sequence: Synthetic oligonucleotide
  Target: LAMA2; (-) strand; PAM type: YTN; PAM sequence: CTC
attgtggttcaacaatatgt

SEQ ID NO: 295902 - DNA, 20 bp, Artificial Sequence
  Description of Artificial Sequence: Synthetic oligonucleotide
  Target: LAMA2; (-) strand; PAM type: YTN; PAM sequence: TTA
atcccagcctcattgtggtt

SEQ ID NO: 295903 - DNA, 20 bp, Artificial Sequence
  Description of Artificial Sequence: Synthetic oligonucleotide
  Target: LAMA2; (-) strand; PAM type: YTN; PAM sequence: CTT
aatcccagcctcattgtggt

SEQ ID NO: 295904 - DNA, 20 bp, Artificial Sequence
  Description of Artificial Sequence: Synthetic oligonucleotide
  Target: LAMA2; (-) strand; PAM type: YTN; PAM sequence: TTC
ttaatcccagcctcattgtg

SEQ ID NO: 295905 - DNA, 20 bp, Artificial Sequence
  Description of Artificial Sequence: Synthetic oligonucleotide
  Target: LAMA2; (-) strand; PAM type: YTN; PAM sequence: TTT
cttaatcccagcctcattgt

SEQ ID NO: 295906 - DNA, 20 bp, Artificial Sequence
  Description of Artificial Sequence: Synthetic oligonucleotide
  Target: LAMA2; (-) strand; PAM type: YTN; PAM sequence: CTT
tcttaatcccagcctcattg

SEQ ID NO: 295907 - DNA, 20 bp, Artificial Sequence
  Description of Artificial Sequence: Synthetic oligonucleotide
  Target: LAMA2; (-) strand; PAM type: YTN; PAM sequence: TTC
cctttcttaatcccagcctc

SEQ ID NO: 295908 - DNA, 20 bp, Artificial Sequence
  Description of Artificial Sequence: Synthetic oligonucleotide
  Target: LAMA2; (-) strand; PAM type: YTN; PAM sequence: TTA
agttccctttcttaatccca

SEQ ID NO: 295909 - DNA, 20 bp, Artificial Sequence
  Description of Artificial Sequence: Synthetic oligonucleotide
  Target: LAMA2; (-) strand; PAM type: YTN; PAM sequence: TTT
aagttccctttcttaatccc

SEQ ID NO: 295910 - DNA, 20 bp, Artificial Sequence
  Description of Artificial Sequence: Synthetic oligonucleotide
  Target: LAMA2; (-) strand; PAM type: YTN; PAM sequence: TTA
tagtatttaagttccctttc

SEQ ID NO: 295911 - DNA, 20 bp, Artificial Sequence
  Description of Artificial Sequence: Synthetic oligonucleotide
  Target: LAMA2; (-) strand; PAM type: YTN; PAM sequence: CTA
attatagtatttaagttccc

SEQ ID NO: 295912 - DNA, 20 bp, Artificial Sequence
  Description of Artificial Sequence: Synthetic oligonucleotide
  Target: LAMA2; (-) strand; PAM type: YTN; PAM sequence: TTG
actaattatagtatttaagt

SEQ ID NO: 295913 - DNA, 20 bp, Artificial Sequence
  Description of Artificial Sequence: Synthetic oligonucleotide
  Target: LAMA2; (-) strand; PAM type: YTN; PAM sequence: TTT
gactaattatagtatttaag

SEQ ID NO: 295914 - DNA, 20 bp, Artificial Sequence
  Description of Artificial Sequence: Synthetic oligonucleotide
  Target: LAMA2; (-) strand; PAM type: YTN; PAM sequence: TTA
atttgactaattatagtatt

SEQ ID NO: 295915 - DNA, 20 bp, Artificial Sequence
  Description of Artificial Sequence: Synthetic oligonucleotide
  Target: LAMA2; (-) strand; PAM type: YTN; PAM sequence: TTA
ttaatttgactaattatagt

SEQ ID NO: 295916 - DNA, 20 bp, Artificial Sequence
  Description of Artificial Sequence: Synthetic oligonucleotide
  Target: LAMA2; (-) strand; PAM type: YTN; PAM sequence: TTA
aaaaccatcaaaaataaaat

SEQ ID NO: 295917 - DNA, 20 bp, Artificial Sequence
  Description of Artificial Sequence: Synthetic oligonucleotide
  Target: LAMA2; (-) strand; PAM type: YTN; PAM sequence: TTT
aaaaaccatcaaaaataaaa

SEQ ID NO: 295918 - DNA, 20 bp, Artificial Sequence
  Description of Artificial Sequence: Synthetic oligonucleotide
  Target: LAMA2; (-) strand; PAM type: YTN; PAM sequence: TTT
taaaaaccatcaaaaataaa

SEQ ID NO: 295919 - DNA, 20 bp, Artificial Sequence
  Description of Artificial Sequence: Synthetic oligonucleotide
  Target: LAMA2; (-) strand; PAM type: YTN; PAM sequence: TTT
ttaaaaaccatcaaaaataa

SEQ ID NO: 295920 - DNA, 20 bp, Artificial Sequence
  Description of Artificial Sequence: Synthetic oligonucleotide
  Target: LAMA2; (-) strand; PAM type: YTN; PAM sequence: TTG
ggaagtaatttttaaaaacc

SEQ ID NO: 295921 - DNA, 20 bp, Artificial Sequence
  Description of Artificial Sequence: Synthetic oligonucleotide
  Target: LAMA2; (-) strand; PAM type: YTN; PAM sequence: TTT
gggaagtaatttttaaaaac

SEQ ID NO: 295922 - DNA, 20 bp, Artificial Sequence
  Description of Artificial Sequence: Synthetic oligonucleotide
  Target: LAMA2; (-) strand; PAM type: YTN; PAM sequence: CTG
gtttgggaagtaatttttaa

SEQ ID NO: 295923 - DNA, 20 bp, Artificial Sequence
  Description of Artificial Sequence: Synthetic oligonucleotide
  Target: LAMA2; (-) strand; PAM type: YTN; PAM sequence: TTC
tggtttgggaagtaattttt

SEQ ID NO: 295924 - DNA, 20 bp, Artificial Sequence
  Description of Artificial Sequence: Synthetic oligonucleotide
  Target: LAMA2; (-) strand; PAM type: YTN; PAM sequence: CTA
ttctggtttgggaagtaatt

SEQ ID NO: 295925 - DNA, 20 bp, Artificial Sequence
  Description of Artificial Sequence: Synthetic oligonucleotide
  Target: LAMA2; (-) strand; PAM type: YTN; PAM sequence: TTA
cacatatctattctggtttg

SEQ ID NO: 295926 - DNA, 20 bp, Artificial Sequence
  Description of Artificial Sequence: Synthetic oligonucleotide
  Target: LAMA2; (-) strand; PAM type: YTN; PAM sequence: TTT
acacatatctattctggttt

SEQ ID NO: 295927 - DNA, 20 bp, Artificial Sequence
  Description of Artificial Sequence: Synthetic oligonucleotide
  Target: LAMA2; (-) strand; PAM type: YTN; PAM sequence: TTT
tacacatatctattctggtt

SEQ ID NO: 295928 - DNA, 20 bp, Artificial Sequence
  Description of Artificial Sequence: Synthetic oligonucleotide
  Target: LAMA2; (-) strand; PAM type: YTN; PAM sequence: TTC
attttacacatatctattct

SEQ ID NO: 295929 - DNA, 20 bp, Artificial Sequence
  Description of Artificial Sequence: Synthetic oligonucleotide
  Target: LAMA2; (-) strand; PAM type: YTN; PAM sequence: CTT
cattttacacatatctattc

SEQ ID NO: 295930 - DNA, 20 bp, Artificial Sequence
  Description of Artificial Sequence: Synthetic oligonucleotide
  Target: LAMA2; (-) strand; PAM type: YTN; PAM sequence: TTC
acacttcattttacacatat

SEQ ID NO: 295931 - DNA, 20 bp, Artificial Sequence
  Description of Artificial Sequence: Synthetic oligonucleotide
  Target: LAMA2; (-) strand; PAM type: YTN; PAM sequence: TTT
cacacttcattttacacata

SEQ ID NO: 295932 - DNA, 20 bp, Artificial Sequence
  Description of Artificial Sequence: Synthetic oligonucleotide
  Target: LAMA2; (-) strand; PAM type: YTN; PAM sequence: TTA
gagtaatttcacacttcatt

SEQ ID NO: 295933 - DNA, 20 bp, Artificial Sequence
  Description of Artificial Sequence: Synthetic oligonucleotide
  Target: LAMA2; (-) strand; PAM type: YTN; PAM sequence: CTG
ggtcaggattagagtaattt

SEQ ID NO: 295934 - DNA, 20 bp, Artificial Sequence
  Description of Artificial Sequence: Synthetic oligonucleotide
  Target: LAMA2; (-) strand; PAM type: YTN; PAM sequence: TTA
aaaatgagtctgggtcagga

SEQ ID NO: 295935 - DNA, 20 bp, Artificial Sequence
  Description of Artificial Sequence: Synthetic oligonucleotide
  Target: LAMA2; (-) strand; PAM type: YTN; PAM sequence: TTT
aaaaatgagtctgggtcagg

SEQ ID NO: 295936 - DNA, 20 bp, Artificial Sequence
  Description of Artificial Sequence: Synthetic oligonucleotide
  Target: LAMA2; (-) strand; PAM type: YTN; PAM sequence: CTA
aagtaccatgatggtttaaa

SEQ ID NO: 295937 - DNA, 20 bp, Artificial Sequence
  Description of Artificial Sequence: Synthetic oligonucleotide
  Target: LAMA2; (-) strand; PAM type: YTN; PAM sequence: CTG
tgaaatgctaaagtaccatg

SEQ ID NO: 295938 - DNA, 20 bp, Artificial Sequence
  Description of Artificial Sequence: Synthetic oligonucleotide
  Target: LAMA2; (-) strand; PAM type: YTN; PAM sequence: TTA
ggtaaaggagcatgaaagcc

SEQ ID NO: 295939 - DNA, 20 bp, Artificial Sequence
  Description of Artificial Sequence: Synthetic oligonucleotide
  Target: LAMA2; (-) strand; PAM type: YTN; PAM sequence: TTT
aggtaaaggagcatgaaagc

SEQ ID NO: 295940 - DNA, 20 bp, Artificial Sequence
  Description of Artificial Sequence: Synthetic oligonucleotide
  Target: LAMA2; (-) strand; PAM type: YTN; PAM sequence: CTG
aatttaggtaaaggagcatg

SEQ ID NO: 295941 - DNA, 20 bp, Artificial Sequence
  Description of Artificial Sequence: Synthetic oligonucleotide
  Target: LAMA2; (-) strand; PAM type: YTN; PAM sequence: TTG
agtctgaatttaggtaaagg

SEQ ID NO: 295942 - DNA, 20 bp, Artificial Sequence
  Description of Artificial Sequence: Synthetic oligonucleotide
  Target: LAMA2; (-) strand; PAM type: YTN; PAM sequence: CTT
gagtctgaatttaggtaaag

SEQ ID NO: 295943 - DNA, 20 bp, Artificial Sequence
  Description of Artificial Sequence: Synthetic oligonucleotide
  Target: LAMA2; (-) strand; PAM type: YTN; PAM sequence: CTG
gagtataaaaaccttgagtc

SEQ ID NO: 295944 - DNA, 20 bp, Artificial Sequence
  Description of Artificial Sequence: Synthetic oligonucleotide
  Target: LAMA2; (-) strand; PAM type: YTN; PAM sequence: CTG
gctggagtataaaaaccttg

SEQ ID NO: 295945 - DNA, 20 bp, Artificial Sequence
  Description of Artificial Sequence: Synthetic oligonucleotide
  Target: LAMA2; (-) strand; PAM type: YTN; PAM sequence: CTG
agacagaatgaaataagggg

SEQ ID NO: 295946 - DNA, 20 bp, Artificial Sequence
  Description of Artificial Sequence: Synthetic oligonucleotide
  Target: LAMA2; (-) strand; PAM type: YTN; PAM sequence: TTC
tgagacagaatgaaataagg

SEQ ID NO: 295947 - DNA, 20 bp, Artificial Sequence
  Description of Artificial Sequence: Synthetic oligonucleotide
  Target: LAMA2; (-) strand; PAM type: YTN; PAM sequence: CTT
ctgagacagaatgaaataag

SEQ ID NO: 295948 - DNA, 20 bp, Artificial Sequence
  Description of Artificial Sequence: Synthetic oligonucleotide
  Target: LAMA2; (-) strand; PAM type: YTN; PAM sequence: TTA
tcttctgagacagaatgaaa

SEQ ID NO: 295949 - DNA, 20 bp, Artificial Sequence
  Description of Artificial Sequence: Synthetic oligonucleotide
  Target: LAMA2; (-) strand; PAM type: YTN; PAM sequence: TTA
gggcggtggagtgaattatc

SEQ ID NO: 295950 - DNA, 20 bp, Artificial Sequence
  Description of Artificial Sequence: Synthetic oligonucleotide
  Target: LAMA2; (-) strand; PAM type: YTN; PAM sequence: TTT
agggcggtggagtgaattat

SEQ ID NO: 295951 - DNA, 20 bp, Artificial Sequence
  Description of Artificial Sequence: Synthetic oligonucleotide
  Target: LAMA2; (-) strand; PAM type: YTN; PAM sequence: CTG
aaatttagggcggtggagtg

SEQ ID NO: 295952 - DNA, 20 bp, Artificial Sequence
  Description of Artificial Sequence: Synthetic oligonucleotide
  Target: LAMA2; (-) strand; PAM type: YTN; PAM sequence: CTG
aggctgaaatttagggcggt

SEQ ID NO: 295953 - DNA, 20 bp, Artificial Sequence
  Description of Artificial Sequence: Synthetic oligonucleotide
  Target: LAMA2; (-) strand; PAM type: YTN; PAM sequence: CTG
atgagtacaaagtgggggag

SEQ ID NO: 295954 - DNA, 20 bp, Artificial Sequence
  Description of Artificial Sequence: Synthetic oligonucleotide
  Target: LAMA2; (-) strand; PAM type: YTN; PAM sequence: CTG
cagaacctgatgagtacaaa

SEQ ID NO: 295955 - DNA, 20 bp, Artificial Sequence
  Description of Artificial Sequence: Synthetic oligonucleotide
  Target: LAMA2; (-) strand; PAM type: YTN; PAM sequence: TTC
tgcagaacctgatgagtaca

SEQ ID NO: 295956 - DNA, 20 bp, Artificial Sequence
  Description of Artificial Sequence: Synthetic oligonucleotide
  Target: LAMA2; (-) strand; PAM type: YTN; PAM sequence: TTT
ctgcagaacctgatgagtac

SEQ ID NO: 295957 - DNA, 20 bp, Artificial Sequence
  Description of Artificial Sequence: Synthetic oligonucleotide
  Target: LAMA2; (-) strand; PAM type: YTN; PAM sequence: CTT
tctgcagaacctgatgagta

SEQ ID NO: 295958 - DNA, 20 bp, Artificial Sequence
  Description of Artificial Sequence: Synthetic oligonucleotide
  Target: LAMA2; (-) strand; PAM type: YTN; PAM sequence: CTA
ctttctgcagaacctgatga

SEQ ID NO: 295959 - DNA, 20 bp, Artificial Sequence
  Description of Artificial Sequence: Synthetic oligonucleotide
  Target: LAMA2; (-) strand; PAM type: YTN; PAM sequence: CTG
cactactttctgcagaacct

SEQ ID NO: 295960 - DNA, 20 bp, Artificial Sequence
  Description of Artificial Sequence: Synthetic oligonucleotide
  Target: LAMA2; (-) strand; PAM type: YTN; PAM sequence: TTA
aagaaagagtggcacaaata

SEQ ID NO: 295961 - DNA, 20 bp, Artificial Sequence
  Description of Artificial Sequence: Synthetic oligonucleotide
  Target: LAMA2; (-) strand; PAM type: YTN; PAM sequence: TTG
tgcagaattaaagaaagagt

SEQ ID NO: 295962 - DNA, 20 bp, Artificial Sequence
  Description of Artificial Sequence: Synthetic oligonucleotide
  Target: LAMA2; (-) strand; PAM type: YTN; PAM sequence: CTT
gtgcagaattaaagaaagag

SEQ ID NO: 295963 - DNA, 20 bp, Artificial Sequence
  Description of Artificial Sequence: Synthetic oligonucleotide
  Target: LAMA2; (-) strand; PAM type: YTN; PAM sequence: TTC
ttgtgcagaattaaagaaag

SEQ ID NO: 295964 - DNA, 20 bp, Artificial Sequence
  Description of Artificial Sequence: Synthetic oligonucleotide
  Target: LAMA2; (-) strand; PAM type: YTN; PAM sequence: CTT
cttgtgcagaattaaagaaa

SEQ ID NO: 295965 - DNA, 20 bp, Artificial Sequence
  Description of Artificial Sequence: Synthetic oligonucleotide
  Target: LAMA2; (-) strand; PAM type: YTN; PAM sequence: CTA
acaggcccttcttgtgcaga

SEQ ID NO: 295966 - DNA, 20 bp, Artificial Sequence
  Description of Artificial Sequence: Synthetic oligonucleotide
  Target: LAMA2; (-) strand; PAM type: YTN; PAM sequence: TTG
cctaacaggcccttcttgtg

SEQ ID NO: 295967 - DNA, 20 bp, Artificial Sequence
  Description of Artificial Sequence: Synthetic oligonucleotide
  Target: LAMA2; (-) strand; PAM type: YTN; PAM sequence: TTT
gcctaacaggcccttcttgt

SEQ ID NO: 295968 - DNA, 20 bp, Artificial Sequence
  Description of Artificial Sequence: Synthetic oligonucleotide
  Target: LAMA2; (-) strand; PAM type: YTN; PAM sequence: CTT
tgcctaacaggcccttcttg

SEQ ID NO: 295969 - DNA, 20 bp, Artificial Sequence
  Description of Artificial Sequence: Synthetic oligonucleotide
  Target: LAMA2; (-) strand; PAM type: YTN; PAM sequence: CTA
catccctttgcctaacaggc

SEQ ID NO: 295970 - DNA, 20 bp, Artificial Sequence
  Description of Artificial Sequence: Synthetic oligonucleotide
  Target: LAMA2; (-) strand; PAM type: YTN; PAM sequence: TTC
agatacgctacatccctttg

SEQ ID NO: 295971 - DNA, 20 bp, Artificial Sequence
  Description of Artificial Sequence: Synthetic oligonucleotide
  Target: LAMA2; (-) strand; PAM type: YTN; PAM sequence: TTT
cagatacgctacatcccttt

SEQ ID NO: 295972 - DNA, 20 bp, Artificial Sequence
  Description of Artificial Sequence: Synthetic oligonucleotide
  Target: LAMA2; (-) strand; PAM type: YTN; PAM sequence: CTC
ccaacacaatttcagatacg

SEQ ID NO: 295973 - DNA, 20 bp, Artificial Sequence
  Description of Artificial Sequence: Synthetic oligonucleotide
  Target: LAMA2; (-) strand; PAM type: YTN; PAM sequence: CTG
ggctcccaacacaatttcag

SEQ ID NO: 295974 - DNA, 20 bp, Artificial Sequence
  Description of Artificial Sequence: Synthetic oligonucleotide
  Target: LAMA2; (-) strand; PAM type: YTN; PAM sequence: TTG
agcaaagagcctgggctccc

SEQ ID NO: 295975 - DNA, 20 bp, Artificial Sequence
  Description of Artificial Sequence: Synthetic oligonucleotide
  Target: LAMA2; (-) strand; PAM type: YTN; PAM sequence: TTG
attgagcaaagagcctgggc

SEQ ID NO: 295976 - DNA, 20 bp, Artificial Sequence
  Description of Artificial Sequence: Synthetic oligonucleotide
  Target: LAMA2; (-) strand; PAM type: YTN; PAM sequence: TTT
gattgagcaaagagcctggg

SEQ ID NO: 295977 - DNA, 20 bp, Artificial Sequence
  Description of Artificial Sequence: Synthetic oligonucleotide
  Target: LAMA2; (-) strand; PAM type: YTN; PAM sequence: TTA
gtttgattgagcaaagagcc

SEQ ID NO: 295978 - DNA, 20 bp, Artificial Sequence
  Description of Artificial Sequence: Synthetic oligonucleotide
  Target: LAMA2; (-) strand; PAM type: YTN; PAM sequence: TTA
aaagtgcattagtttgattg

SEQ ID NO: 295979 - DNA, 20 bp, Artificial Sequence
  Description of Artificial Sequence: Synthetic oligonucleotide
  Target: LAMA2; (-) strand; PAM type: YTN; PAM sequence: TTT
aaaagtgcattagtttgatt

SEQ ID NO: 295980 - DNA, 20 bp, Artificial Sequence
  Description of Artificial Sequence: Synthetic oligonucleotide
  Target: LAMA2; (-) strand; PAM type: YTN; PAM sequence: TTT
taaaagtgcattagtttgat

SEQ ID NO: 295981 - DNA, 20 bp, Artificial Sequence
  Description of Artificial Sequence: Synthetic oligonucleotide
  Target: LAMA2; (-) strand; PAM type: YTN; PAM sequence: TTC
atgcacagttttaaaagtgc

SEQ ID NO: 295982 - DNA, 20 bp, Artificial Sequence
  Description of Artificial Sequence: Synthetic oligonucleotide
  Target: LAMA2; (-) strand; PAM type: YTN; PAM sequence: TTA
agtgggtagcaaaattcatg

SEQ ID NO: 295983 - DNA, 20 bp, Artificial Sequence
  Description of Artificial Sequence: Synthetic oligonucleotide
  Target: LAMA2; (-) strand; PAM type: YTN; PAM sequence: TTC
ataaattaagtgggtagcaa

SEQ ID NO: 295984 - DNA, 20 bp, Artificial Sequence
  Description of Artificial Sequence: Synthetic oligonucleotide
  Target: LAMA2; (-) strand; PAM type: YTN; PAM sequence: TTT
cataaattaagtgggtagca

SEQ ID NO: 295985 - DNA, 20 bp, Artificial Sequence
  Description of Artificial Sequence: Synthetic oligonucleotide
  Target: LAMA2; (-) strand; PAM type: YTN; PAM sequence: CTT
tcataaattaagtgggtagc

SEQ ID NO: 295986 - DNA, 20 bp, Artificial Sequence
  Description of Artificial Sequence: Synthetic oligonucleotide
  Target: LAMA2; (-) strand; PAM type: YTN; PAM sequence: CTA
atagcactttcataaattaa

SEQ ID NO: 295987 - DNA, 20 bp, Artificial Sequence
  Description of Artificial Sequence: Synthetic oligonucleotide
  Target: LAMA2; (-) strand; PAM type: YTN; PAM sequence: CTG
cagactaatagcactttcat

SEQ ID NO: 295988 - DNA, 20 bp, Artificial Sequence
  Description of Artificial Sequence: Synthetic oligonucleotide
  Target: LAMA2; (-) strand; PAM type: YTN; PAM sequence: TTG
taaggaaccctgcagactaa

SEQ ID NO: 295989 - DNA, 20 bp, Artificial Sequence
  Description of Artificial Sequence: Synthetic oligonucleotide
  Target: LAMA2; (-) strand; PAM type: YTN; PAM sequence: TTG
ccaaatgtggatatgtgtgg

SEQ ID NO: 295990 - DNA, 20 bp, Artificial Sequence
  Description of Artificial Sequence: Synthetic oligonucleotide
  Target: LAMA2; (-) strand; PAM type: YTN; PAM sequence: CTC
ggtagattgccaaatgtgga

SEQ ID NO: 295991 - DNA, 20 bp, Artificial Sequence
  Description of Artificial Sequence: Synthetic oligonucleotide
  Target: LAMA2; (-) strand; PAM type: YTN; PAM sequence: CTC
ctcggtagattgccaaatgt

SEQ ID NO: 295992 - DNA, 20 bp, Artificial Sequence
  Description of Artificial Sequence: Synthetic oligonucleotide
  Target: LAMA2; (-) strand; PAM type: YTN; PAM sequence: TTA
ggtcgaagtctcctcggtag

SEQ ID NO: 295993 - DNA, 20 bp, Artificial Sequence
  Description of Artificial Sequence: Synthetic oligonucleotide
  Target: LAMA2; (-) strand; PAM type: YTN; PAM sequence: TTT
aggtcgaagtctcctcggta

SEQ ID NO: 295994 - DNA, 20 bp, Artificial Sequence
  Description of Artificial Sequence: Synthetic oligonucleotide
  Target: LAMA2; (-) strand; PAM type: YTN; PAM sequence: TTT
taggtcgaagtctcctcggt

SEQ ID NO: 295995 - DNA, 20 bp, Artificial Sequence
  Description of Artificial Sequence: Synthetic oligonucleotide
  Target: LAMA2; (-) strand; PAM type: YTN; PAM sequence: CTG
ggtcagttttaggtcgaagt

SEQ ID NO: 295996 - DNA, 20 bp, Artificial Sequence
  Description of Artificial Sequence: Synthetic oligonucleotide
  Target: LAMA2; (-) strand; PAM type: YTN; PAM sequence: TTC
ctgggtcagttttaggtcga

SEQ ID NO: 295997 - DNA, 20 bp, Artificial Sequence
  Description of Artificial Sequence: Synthetic oligonucleotide
  Target: LAMA2; (-) strand; PAM type: YTN; PAM sequence: TTT
cctgggtcagttttaggtcg

SEQ ID NO: 295998 - DNA, 20 bp, Artificial Sequence
  Description of Artificial Sequence: Synthetic oligonucleotide
  Target: LAMA2; (-) strand; PAM type: YTN; PAM sequence: TTT
tcctgggtcagttttaggtc

SEQ ID NO: 295999 - DNA, 20 bp, Artificial Sequence
  Description of Artificial Sequence: Synthetic oligonucleotide
  Target: LAMA2; (-) strand; PAM type: YTN; PAM sequence: CTA
tcaccaaaagaataccaaat

SEQ ID NO: 296000 - DNA, 20 bp, Artificial Sequence
  Description of Artificial Sequence: Synthetic oligonucleotide
  Target: LAMA2; (-) strand; PAM type: YTN; PAM sequence: CTA
ctatcaccaaaagaatacca

SEQ ID NO: 296001 - DNA, 20 bp, Artificial Sequence
  Description of Artificial Sequence: Synthetic oligonucleotide
  Target: LAMA2; (-) strand; PAM type: YTN; PAM sequence: TTC
catgactactatcaccaaaa

SEQ ID NO: 296002 - DNA, 20 bp, Artificial Sequence
  Description of Artificial Sequence: Synthetic oligonucleotide
  Target: LAMA2; (-) strand; PAM type: YTN; PAM sequence: TTT
ccatgactactatcaccaaa

SEQ ID NO: 296003 - DNA, 20 bp, Artificial Sequence
  Description of Artificial Sequence: Synthetic oligonucleotide
  Target: LAMA2; (-) strand; PAM type: YTN; PAM sequence: TTT
tccatgactactatcaccaa

SEQ ID NO: 296004 - DNA, 20 bp, Artificial Sequence
  Description of Artificial Sequence: Synthetic oligonucleotide
  Target: LAMA2; (-) strand; PAM type: YTN; PAM sequence: CTT
ttccatgactactatcacca

SEQ ID NO: 296005 - DNA, 20 bp, Artificial Sequence
  Description of Artificial Sequence: Synthetic oligonucleotide
  Target: LAMA2; (-) strand; PAM type: YTN; PAM sequence: CTG
tcttttccatgactactatc

SEQ ID NO: 296006 - DNA, 20 bp, Artificial Sequence
  Description of Artificial Sequence: Synthetic oligonucleotide
  Target: LAMA2; (-) strand; PAM type: YTN; PAM sequence: TTC
tgtcttttccatgactacta

SEQ ID NO: 296007 - DNA, 20 bp, Artificial Sequence
  Description of Artificial Sequence: Synthetic oligonucleotide
  Target: LAMA2; (-) strand; PAM type: YTN; PAM sequence: CTC
aaattctgtcttttccatga

SEQ ID NO: 296008 - DNA, 20 bp, Artificial Sequence
  Description of Artificial Sequence: Synthetic oligonucleotide
  Target: LAMA2; (-) strand; PAM type: YTN; PAM sequence: TTA
cagaatatctcaaattctgt

SEQ ID NO: 296009 - DNA, 20 bp, Artificial Sequence
  Description of Artificial Sequence: Synthetic oligonucleotide
  Target: LAMA2; (-) strand; PAM type: YTN; PAM sequence: TTT
acagaatatctcaaattctg

SEQ ID NO: 296010 - DNA, 20 bp, Artificial Sequence
  Description of Artificial Sequence: Synthetic oligonucleotide
  Target: LAMA2; (-) strand; PAM type: YTN; PAM sequence: TTT
tacagaatatctcaaattct

SEQ ID NO: 296011 - DNA, 20 bp, Artificial Sequence
  Description of Artificial Sequence: Synthetic oligonucleotide
  Target: LAMA2; (-) strand; PAM type: YTN; PAM sequence: TTA
aacccattttacagaatatc

SEQ ID NO: 296012 - DNA, 20 bp, Artificial Sequence
  Description of Artificial Sequence: Synthetic oligonucleotide
  Target: LAMA2; (-) strand; PAM type: YTN; PAM sequence: TTA
tatatgggaaagttaaaccc

SEQ ID NO: 296013 - DNA, 20 bp, Artificial Sequence
  Description of Artificial Sequence: Synthetic oligonucleotide
  Target: LAMA2; (-) strand; PAM type: YTN; PAM sequence: CTA
agcccattatatatgggaaa

SEQ ID NO: 296014 - DNA, 20 bp, Artificial Sequence
  Description of Artificial Sequence: Synthetic oligonucleotide
  Target: LAMA2; (-) strand; PAM type: YTN; PAM sequence: TTA
gtatgcgctaagcccattat

SEQ ID NO: 296015 - DNA, 20 bp, Artificial Sequence
  Description of Artificial Sequence: Synthetic oligonucleotide
  Target: LAMA2; (-) strand; PAM type: YTN; PAM sequence: CTT
agtatgcgctaagcccatta

SEQ ID NO: 296016 - DNA, 20 bp, Artificial Sequence
  Description of Artificial Sequence: Synthetic oligonucleotide
  Target: LAMA2; (-) strand; PAM type: YTN; PAM sequence: TTG
aaacaatgtacacagtgctt

SEQ ID NO: 296017 - DNA, 20 bp, Artificial Sequence
  Description of Artificial Sequence: Synthetic oligonucleotide
  Target: LAMA2; (-) strand; PAM type: YTN; PAM sequence: TTA
ccaagaaaaattgaaacaat

SEQ ID NO: 296018 - DNA, 20 bp, Artificial Sequence
  Description of Artificial Sequence: Synthetic oligonucleotide
  Target: LAMA2; (-) strand; PAM type: YTN; PAM sequence: CTA
acgatgttaccaagaaaaat

SEQ ID NO: 296019 - DNA, 20 bp, Artificial Sequence
  Description of Artificial Sequence: Synthetic oligonucleotide
  Target: LAMA2; (-) strand; PAM type: YTN; PAM sequence: CTC
taacgatgttaccaagaaaa

SEQ ID NO: 296020 - DNA, 20 bp, Artificial Sequence
  Description of Artificial Sequence: Synthetic oligonucleotide
  Target: LAMA2; (-) strand; PAM type: YTN; PAM sequence: TTC
acatatgcagagtataagac

SEQ ID NO: 296021 - DNA, 20 bp, Artificial Sequence
  Description of Artificial Sequence: Synthetic oligonucleotide
  Target: LAMA2; (-) strand; PAM type: YTN; PAM sequence: TTT
cacatatgcagagtataaga

SEQ ID NO: 296022 - DNA, 20 bp, Artificial Sequence
  Description of Artificial Sequence: Synthetic oligonucleotide
  Target: LAMA2; (-) strand; PAM type: YTN; PAM sequence: CTG
aacaaatttcacatatgcag

SEQ ID NO: 296023 - DNA, 20 bp, Artificial Sequence
  Description of Artificial Sequence: Synthetic oligonucleotide
  Target: LAMA2; (-) strand; PAM type: YTN; PAM sequence: TTA
atgccaatcctgaacaaatt

SEQ ID NO: 296024 - DNA, 20 bp, Artificial Sequence
  Description of Artificial Sequence: Synthetic oligonucleotide
  Target: LAMA2; (-) strand; PAM type: YTN; PAM sequence: CTA
caaaaaagaaaggagtcatt

SEQ ID NO: 296025 - DNA, 20 bp, Artificial Sequence
  Description of Artificial Sequence: Synthetic oligonucleotide
  Target: LAMA2; (-) strand; PAM type: YTN; PAM sequence: TTA
atctacaaaaaagaaaggag

SEQ ID NO: 296026 - DNA, 20 bp, Artificial Sequence
  Description of Artificial Sequence: Synthetic oligonucleotide
  Target: LAMA2; (-) strand; PAM type: YTN; PAM sequence: CTT
aatctacaaaaaagaaagga

SEQ ID NO: 296027 - DNA, 20 bp, Artificial Sequence
  Description of Artificial Sequence: Synthetic oligonucleotide
  Target: LAMA2; (-) strand; PAM type: YTN; PAM sequence: TTA
tcttaatctacaaaaaagaa

SEQ ID NO: 296028 - DNA, 20 bp, Artificial Sequence
  Description of Artificial Sequence: Synthetic oligonucleotide
  Target: LAMA2; (-) strand; PAM type: YTN; PAM sequence: CTC
attatcttaatctacaaaaa

SEQ ID NO: 296029 - DNA, 20 bp, Artificial Sequence
  Description of Artificial Sequence: Synthetic oligonucleotide
  Target: LAMA2; (-) strand; PAM type: YTN; PAM sequence: TTC
tcattatcttaatctacaaa

SEQ ID NO: 296030 - DNA, 20 bp, Artificial Sequence
  Description of Artificial Sequence: Synthetic oligonucleotide
  Target: LAMA2; (-) strand; PAM type: YTN; PAM sequence: CTT
ctcattatcttaatctacaa

SEQ ID NO: 296031 - DNA, 20 bp, Artificial Sequence
  Description of Artificial Sequence: Synthetic oligonucleotide
  Target: LAMA2; (-) strand; PAM type: YTN; PAM sequence: TTA
cttctcattatcttaatcta

SEQ ID NO: 296032 - DNA, 20 bp, Artificial Sequence
  Description of Artificial Sequence: Synthetic oligonucleotide
  Target: LAMA2; (-) strand; PAM type: YTN; PAM sequence: CTT
acttctcattatcttaatct

SEQ ID NO: 296033 - DNA, 20 bp, Artificial Sequence
  Description of Artificial Sequence: Synthetic oligonucleotide
  Target: LAMA2; (-) strand; PAM type: YTN; PAM sequence: TTG
cttacttctcattatcttaa

SEQ ID NO: 296034 - DNA, 20 bp, Artificial Sequence
  Description of Artificial Sequence: Synthetic oligonucleotide
  Target: LAMA2; (-) strand; PAM type: YTN; PAM sequence: CTT
gcttacttctcattatctta

SEQ ID NO: 296035 - DNA, 20 bp, Artificial Sequence
  Description of Artificial Sequence: Synthetic oligonucleotide
  Target: LAMA2; (-) strand; PAM type: YTN; PAM sequence: TTC
ttgcttacttctcattatct

SEQ ID NO: 296036 - DNA, 20 bp, Artificial Sequence
  Description of Artificial Sequence: Synthetic oligonucleotide
  Target: LAMA2; (-) strand; PAM type: YTN; PAM sequence: CTT
cttgcttacttctcattatc

SEQ ID NO: 296037 - DNA, 20 bp, Artificial Sequence
  Description of Artificial Sequence: Synthetic oligonucleotide
  Target: LAMA2; (-) strand; PAM type: YTN; PAM sequence: TTC
cttcttgcttacttctcatt

SEQ ID NO: 296038 - DNA, 20 bp, Artificial Sequence
  Description of Artificial Sequence: Synthetic oligonucleotide
  Target: LAMA2; (-) strand; PAM type: YTN; PAM sequence: CTA
cataaagaattccttcttgc

SEQ ID NO: 296039 - DNA, 20 bp, Artificial Sequence
  Description of Artificial Sequence: Synthetic oligonucleotide
  Target: LAMA2; (-) strand; PAM type: YTN; PAM sequence: TTG
gaagccccatctacataaag

SEQ ID NO: 296040 - DNA, 20 bp, Artificial Sequence
  Description of Artificial Sequence: Synthetic oligonucleotide
  Target: LAMA2; (-) strand; PAM type: YTN; PAM sequence: CTG
ttggaagccccatctacata

SEQ ID NO: 296041 - DNA, 20 bp, Artificial Sequence
  Description of Artificial Sequence: Synthetic oligonucleotide
  Target: LAMA2; (-) strand; PAM type: YTN; PAM sequence: TTC
tgttggaagccccatctaca

SEQ ID NO: 296042 - DNA, 20 bp, Artificial Sequence
  Description of Artificial Sequence: Synthetic oligonucleotide
  Target: LAMA2; (-) strand; PAM type: YTN; PAM sequence: CTG
atggttctgttggaagcccc

SEQ ID NO: 296043 - DNA, 20 bp, Artificial Sequence
  Description of Artificial Sequence: Synthetic oligonucleotide
  Target: LAMA2; (-) strand; PAM type: YTN; PAM sequence: TTG
ggactgatggttctgttgga

SEQ ID NO: 296044 - DNA, 20 bp, Artificial Sequence
  Description of Artificial Sequence: Synthetic oligonucleotide
  Target: LAMA2; (-) strand; PAM type: YTN; PAM sequence: TTT
gggactgatggttctgttgg

SEQ ID NO: 296045 - DNA, 20 bp, Artificial Sequence
  Description of Artificial Sequence: Synthetic oligonucleotide
  Target: LAMA2; (-) strand; PAM type: YTN; PAM sequence: TTT
tgggactgatggttctgttg

SEQ ID NO: 296046 - DNA, 20 bp, Artificial Sequence
  Description of Artificial Sequence: Synthetic oligonucleotide
  Target: LAMA2; (-) strand; PAM type: YTN; PAM sequence: TTT
ttgggactgatggttctgtt

SEQ ID NO: 296047 - DNA, 20 bp, Artificial Sequence
  Description of Artificial Sequence: Synthetic oligonucleotide
  Target: LAMA2; (-) strand; PAM type: YTN; PAM sequence: TTT
tttgggactgatggttctgt

SEQ ID NO: 296048 - DNA, 20 bp, Artificial Sequence
  Description of Artificial Sequence: Synthetic oligonucleotide
  Target: LAMA2; (-) strand; PAM type: YTN; PAM sequence: CTT
ttttgggactgatggttctg

SEQ ID NO: 296049 - DNA, 20 bp, Artificial Sequence
  Description of Artificial Sequence: Synthetic oligonucleotide
  Target: LAMA2; (-) strand; PAM type: YTN; PAM sequence: TTC
ccacgacatccaggatgtcg

SEQ ID NO: 296050 - DNA, 20 bp, Artificial Sequence
  Description of Artificial Sequence: Synthetic oligonucleotide
  Target: LAMA2; (-) strand; PAM type: YTN; PAM sequence: TTG
atgggtaacccaccaacata

SEQ ID NO: 296051 - DNA, 20 bp, Artificial Sequence
  Description of Artificial Sequence: Synthetic oligonucleotide
  Target: LAMA2; (-) strand; PAM type: YTN; PAM sequence: TTC
gggtagtgtagttgatgggt

SEQ ID NO: 296052 - DNA, 20 bp, Artificial Sequence
  Description of Artificial Sequence: Synthetic oligonucleotide
  Target: LAMA2; (-) strand; PAM type: YTN; PAM sequence: CTT
cgggtagtgtagttgatggg

SEQ ID NO: 296053 - DNA, 20 bp, Artificial Sequence
  Description of Artificial Sequence: Synthetic oligonucleotide
  Target: LAMA2; (-) strand; PAM type: YTN; PAM sequence: TTC
ttcgggtagtgtagttgatg

SEQ ID NO: 296054 - DNA, 20 bp, Artificial Sequence
  Description of Artificial Sequence: Synthetic oligonucleotide
  Target: LAMA2; (-) strand; PAM type: YTN; PAM sequence: CTG
gaccaattcttcgggtagtg

SEQ ID NO: 296055 - DNA, 20 bp, Artificial Sequence
  Description of Artificial Sequence: Synthetic oligonucleotide
  Target: LAMA2; (-) strand; PAM type: YTN; PAM sequence: TTA
ctggaccaattcttcgggta

SEQ ID NO: 296056 - DNA, 20 bp, Artificial Sequence
  Description of Artificial Sequence: Synthetic oligonucleotide
  Target: LAMA2; (-) strand; PAM type: YTN; PAM sequence: TTT
actggaccaattcttcgggt

SEQ ID NO: 296057 - DNA, 20 bp, Artificial Sequence
  Description of Artificial Sequence: Synthetic oligonucleotide
  Target: LAMA2; (-) strand; PAM type: YTN; PAM sequence: TTA
agtaataaagaagaaatcag

SEQ ID NO: 296058 - DNA, 20 bp, Artificial Sequence
  Description of Artificial Sequence: Synthetic oligonucleotide
  Target: LAMA2; (-) strand; PAM type: YTN; PAM sequence: TTT
aagtaataaagaagaaatca

SEQ ID NO: 296059 - DNA, 20 bp, Artificial Sequence
  Description of Artificial Sequence: Synthetic oligonucleotide
  Target: LAMA2; (-) strand; PAM type: YTN; PAM sequence: CTA
ataagtcaaaatatatcaat

SEQ ID NO: 296060 - DNA, 20 bp, Artificial Sequence
  Description of Artificial Sequence: Synthetic oligonucleotide
  Target: LAMA2; (-) strand; PAM type: YTN; PAM sequence: TTC
atgggcccatgtgacctaat

SEQ ID NO: 296061 - DNA, 20 bp, Artificial Sequence
  Description of Artificial Sequence: Synthetic oligonucleotide
  Target: LAMA2; (-) strand; PAM type: YTN; PAM sequence: TTT
catgggcccatgtgacctaa

SEQ ID NO: 296062 - DNA, 20 bp, Artificial Sequence
  Description of Artificial Sequence: Synthetic oligonucleotide
  Target: LAMA2; (-) strand; PAM type: YTN; PAM sequence: TTT
tcatgggcccatgtgaccta

SEQ ID NO: 296063 - DNA, 20 bp, Artificial Sequence
  Description of Artificial Sequence: Synthetic oligonucleotide
  Target: LAMA2; (-) strand; PAM type: YTN; PAM sequence: CTA
tcagttttcatgggcccatg

SEQ ID NO: 296064 - DNA, 20 bp, Artificial Sequence
  Description of Artificial Sequence: Synthetic oligonucleotide
  Target: LAMA2; (-) strand; PAM type: YTN; PAM sequence: TTC
acctatcagttttcatgggc

SEQ ID NO: 296065 - DNA, 20 bp, Artificial Sequence
  Description of Artificial Sequence: Synthetic oligonucleotide
  Target: LAMA2; (-) strand; PAM type: YTN; PAM sequence: CTA
ttcacctatcagttttcatg

SEQ ID NO: 296066 - DNA, 20 bp, Artificial Sequence
  Description of Artificial Sequence: Synthetic oligonucleotide
  Target: LAMA2; (-) strand; PAM type: YTN; PAM sequence: TTC
ctattcacctatcagttttc

SEQ ID NO: 296067 - DNA, 20 bp, Artificial Sequence
  Description of Artificial Sequence: Synthetic oligonucleotide
  Target: LAMA2; (-) strand; PAM type: YTN; PAM sequence: CTT
cctattcacctatcagtttt

SEQ ID NO: 296068 - DNA, 20 bp, Artificial Sequence
  Description of Artificial Sequence: Synthetic oligonucleotide
  Target: LAMA2; (-) strand; PAM type: YTN; PAM sequence: TTA
tcagaaaagatgacttccta

SEQ ID NO: 296069 - DNA, 20 bp, Artificial Sequence
  Description of Artificial Sequence: Synthetic oligonucleotide
  Target: LAMA2; (-) strand; PAM type: YTN; PAM sequence: CTT
atcagaaaagatgacttcct

SEQ ID NO: 296070 - DNA, 20 bp, Artificial Sequence
  Description of Artificial Sequence: Synthetic oligonucleotide
  Target: LAMA2; (-) strand; PAM type: YTN; PAM sequence: CTG
tcccttatcagaaaagatga

SEQ ID NO: 296071 - DNA, 20 bp, Artificial Sequence
  Description of Artificial Sequence: Synthetic oligonucleotide
  Target: LAMA2; (-) strand; PAM type: YTN; PAM sequence: TTC
tgtcccttatcagaaaagat

SEQ ID NO: 296072 - DNA, 20 bp, Artificial Sequence
  Description of Artificial Sequence: Synthetic oligonucleotide
  Target: LAMA2; (-) strand; PAM type: YTN; PAM sequence: CTT
ctgtcccttatcagaaaaga

SEQ ID NO: 296073 - DNA, 20 bp, Artificial Sequence
  Description of Artificial Sequence: Synthetic oligonucleotide
  Target: LAMA2; (-) strand; PAM type: YTN; PAM sequence: CTC
aaaacaaacaaacaaacaaa

SEQ ID NO: 296074 - DNA, 20 bp, Artificial Sequence
  Description of Artificial Sequence: Synthetic oligonucleotide
  Target: LAMA2; (-) strand; PAM type: YTN; PAM sequence: CTG
tctcaaaacaaacaaacaaa

SEQ ID NO: 296075 - DNA, 20 bp, Artificial Sequence
  Description of Artificial Sequence: Synthetic oligonucleotide
  Target: LAMA2; (-) strand; PAM type: YTN; PAM sequence: CTC
tgtctcaaaacaaacaaaca

SEQ ID NO: 296076 - DNA, 20 bp, Artificial Sequence
  Description of Artificial Sequence: Synthetic oligonucleotide
  Target: LAMA2; (-) strand; PAM type: YTN; PAM sequence: CTG
ggcgacagagcgagactctg

SEQ ID NO: 296077 - DNA, 20 bp, Artificial Sequence
  Description of Artificial Sequence: Synthetic oligonucleotide
  Target: LAMA2; (-) strand; PAM type: YTN; PAM sequence: CTC
cagcctgggcgacagagcga

SEQ ID NO: 296078 - DNA, 20 bp, Artificial Sequence
  Description of Artificial Sequence: Synthetic oligonucleotide
  Target: LAMA2; (-) strand; PAM type: YTN; PAM sequence: CTG
cactccagcctgggcgacag

SEQ ID NO: 296079 - DNA, 20 bp, Artificial Sequence
  Description of Artificial Sequence: Synthetic oligonucleotide
  Target: LAMA2; (-) strand; PAM type: YTN; PAM sequence: TTG
cagtgagccaagatcgcacc

SEQ ID NO: 296080 - DNA, 20 bp, Artificial Sequence
  Description of Artificial Sequence: Synthetic oligonucleotide
  Target: LAMA2; (-) strand; PAM type: YTN; PAM sequence: CTT
gcagtgagccaagatcgcac

SEQ ID NO: 296081 - DNA, 20 bp, Artificial Sequence
  Description of Artificial Sequence: Synthetic oligonucleotide
  Target: LAMA2; (-) strand; PAM type: YTN; PAM sequence: CTG
aggcaggagaatggcgtgaa

SEQ ID NO: 296082 - DNA, 20 bp, Artificial Sequence
  Description of Artificial Sequence: Synthetic oligonucleotide
  Target: LAMA2; (-) strand; PAM type: YTN; PAM sequence: CTA
gggaggctgaggcaggagaa

SEQ ID NO: 296083 - DNA, 20 bp, Artificial Sequence
  Description of Artificial Sequence: Synthetic oligonucleotide
  Target: LAMA2; (-) strand; PAM type: YTN; PAM sequence: CTA
ctagggaggctgaggcagga

SEQ ID NO: 296084 - DNA, 20 bp, Artificial Sequence
  Description of Artificial Sequence: Synthetic oligonucleotide
  Target: LAMA2; (-) strand; PAM type: YTN; PAM sequence: CTG
tagtcccagctactagggag

SEQ ID NO: 296085 - DNA, 20 bp, Artificial Sequence
  Description of Artificial Sequence: Synthetic oligonucleotide
  Target: LAMA2; (-) strand; PAM type: YTN; PAM sequence: TTA
gccaggcgtggtggtaggca

SEQ ID NO: 296086 - DNA, 20 bp, Artificial Sequence
  Description of Artificial Sequence: Synthetic oligonucleotide
  Target: LAMA2; (-) strand; PAM type: YTN; PAM sequence: TTA
aaagtacaaaaaattagcca

SEQ ID NO: 296087 - DNA, 20 bp, Artificial Sequence
  Description of Artificial Sequence: Synthetic oligonucleotide
  Target: LAMA2; (-) strand; PAM type: YTN; PAM sequence: CTA
ttaaaagtacaaaaaattag

SEQ ID NO: 296088 - DNA, 20 bp, Artificial Sequence
  Description of Artificial Sequence: Synthetic oligonucleotide
  Target: LAMA2; (-) strand; PAM type: YTN; PAM sequence: CTC
tattaaaagtacaaaaaatt

SEQ ID NO: 296089 - DNA, 20 bp, Artificial Sequence
  Description of Artificial Sequence: Synthetic oligonucleotide
  Target: LAMA2; (-) strand; PAM type: YTN; PAM sequence: TTA
aaagtacaccccgtctctat

SEQ ID NO: 296090 - DNA, 20 bp, Artificial Sequence
  Description of Artificial Sequence: Synthetic oligonucleotide
  Target: LAMA2; (-) strand; PAM type: YTN; PAM sequence: CTA
ttaaaagtacaccccgtctc

SEQ ID NO: 296091 - DNA, 20 bp, Artificial Sequence
  Description of Artificial Sequence: Synthetic oligonucleotide
  Target: LAMA2; (-) strand; PAM type: YTN; PAM sequence: CTC
tattaaaagtacaccccgtc

SEQ ID NO: 296092 - DNA, 20 bp, Artificial Sequence
  Description of Artificial Sequence: Synthetic oligonucleotide
  Target: LAMA2; (-) strand; PAM type: YTN; PAM sequence: CTA
acacagtgaaaccccccgtc

SEQ ID NO: 296093 - DNA, 20 bp, Artificial Sequence
  Description of Artificial Sequence: Synthetic oligonucleotide
  Target: LAMA2; (-) strand; PAM type: YTN; PAM sequence: CTG
gctaacacagtgaaaccccc

SEQ ID NO: 296094 - DNA, 20 bp, Artificial Sequence
  Description of Artificial Sequence: Synthetic oligonucleotide
  Target: LAMA2; (-) strand; PAM type: YTN; PAM sequence: TTG
agaccatcctggctaacaca

SEQ ID NO: 296095 - DNA, 20 bp, Artificial Sequence
  Description of Artificial Sequence: Synthetic oligonucleotide
  Target: LAMA2; (-) strand; PAM type: YTN; PAM sequence: TTG
ggaggccgaggcaggcggat

SEQ ID NO: 296096 - DNA, 20 bp, Artificial Sequence
  Description of Artificial Sequence: Synthetic oligonucleotide
  Target: LAMA2; (-) strand; PAM type: YTN; PAM sequence: TTT
gggaggccgaggcaggcgga

SEQ ID NO: 296097 - DNA, 20 bp, Artificial Sequence
  Description of Artificial Sequence: Synthetic oligonucleotide
  Target: LAMA2; (-) strand; PAM type: YTN; PAM sequence: CTT
tgggaggccgaggcaggcgg

SEQ ID NO: 296098 - DNA, 20 bp, Artificial Sequence
  Description of Artificial Sequence: Synthetic oligonucleotide
  Target: LAMA2; (-) strand; PAM type: YTN; PAM sequence: CTG
taatcccagcactttgggag

SEQ ID NO: 296099 - DNA, 20 bp, Artificial Sequence
  Description of Artificial Sequence: Synthetic oligonucleotide
  Target: LAMA2; (-) strand; PAM type: YTN; PAM sequence: CTC
aggcctgtaatcccagcact

SEQ ID NO: 296100 - DNA, 20 bp, Artificial Sequence
  Description of Artificial Sequence: Synthetic oligonucleotide
  Target: LAMA2; (-) strand; PAM type: YTN; PAM sequence: CTG
ggcgaggtggctcaggcctg

SEQ ID NO: 296101 - DNA, 20 bp, Artificial Sequence
  Description of Artificial Sequence: Synthetic oligonucleotide
  Target: LAMA2; (-) strand; PAM type: YTN; PAM sequence: CTG
tcagctgggcgaggtggctc

SEQ ID NO: 296102 - DNA, 20 bp, Artificial Sequence
  Description of Artificial Sequence: Synthetic oligonucleotide
  Target: LAMA2; (-) strand; PAM type: YTN; PAM sequence: TTC
tgtcagctgggcgaggtggc

SEQ ID NO: 296103 - DNA, 20 bp, Artificial Sequence
  Description of Artificial Sequence: Synthetic oligonucleotide
  Target: LAMA2; (-) strand; PAM type: YTN; PAM sequence: CTT
ctgtcagctgggcgaggtgg

SEQ ID NO: 296104 - DNA, 20 bp, Artificial Sequence
  Description of Artificial Sequence: Synthetic oligonucleotide
  Target: LAMA2; (-) strand; PAM type: YTN; PAM sequence: CTA
aaaaaccttctgtcagctgg

SEQ ID NO: 296105 - DNA, 20 bp, Artificial Sequence
  Description of Artificial Sequence: Synthetic oligonucleotide
  Target: LAMA2; (-) strand; PAM type: YTN; PAM sequence: CTA
tctaaaaaaccttctgtcag

SEQ ID NO: 296106 - DNA, 20 bp, Artificial Sequence
  Description of Artificial Sequence: Synthetic oligonucleotide
  Target: LAMA2; (-) strand; PAM type: YTN; PAM sequence: CTA
atctatctaaaaaaccttct

SEQ ID NO: 296107 - DNA, 20 bp, Artificial Sequence
  Description of Artificial Sequence: Synthetic oligonucleotide
  Target: LAMA2; (-) strand; PAM type: YTN; PAM sequence: CTC
ataatctaatctatctaaaa

SEQ ID NO: 296108 - DNA, 20 bp, Artificial Sequence
  Description of Artificial Sequence: Synthetic oligonucleotide
  Target: LAMA2; (-) strand; PAM type: YTN; PAM sequence: CTC
tcataatctaatctatctaa

SEQ ID NO: 296109 - DNA, 20 bp, Artificial Sequence
  Description of Artificial Sequence: Synthetic oligonucleotide
  Target: LAMA2; (-) strand; PAM type: YTN; PAM sequence: TTG
tctctcataatctaatctat

SEQ ID NO: 296110 - DNA, 20 bp, Artificial Sequence
  Description of Artificial Sequence: Synthetic oligonucleotide
  Target: LAMA2; (-) strand; PAM type: YTN; PAM sequence: TTC
cgtggcattgtctctcataa

SEQ ID NO: 296111 - DNA, 20 bp, Artificial Sequence
  Description of Artificial Sequence: Synthetic oligonucleotide
  Target: LAMA2; (-) strand; PAM type: YTN; PAM sequence: CTC
agtgttccgtggcattgtct

SEQ ID NO: 296112 - DNA, 20 bp, Artificial Sequence
  Description of Artificial Sequence: Synthetic oligonucleotide
  Target: LAMA2; (-) strand; PAM type: YTN; PAM sequence: TTC
cccactcagtgttccgtggc

SEQ ID NO: 296113 - DNA, 20 bp, Artificial Sequence
  Description of Artificial Sequence: Synthetic oligonucleotide
  Target: LAMA2; (-) strand; PAM type: YTN; PAM sequence: CTC
caggttccccactcagtgtt

SEQ ID NO: 296114 - DNA, 20 bp, Artificial Sequence
  Description of Artificial Sequence: Synthetic oligonucleotide
  Target: LAMA2; (-) strand; PAM type: YTN; PAM sequence: TTG
gctccaggttccccactcag

SEQ ID NO: 296115 - DNA, 20 bp, Artificial Sequence
  Description of Artificial Sequence: Synthetic oligonucleotide
  Target: LAMA2; (-) strand; PAM type: YTN; PAM sequence: TTT
ggctccaggttccccactca

SEQ ID NO: 296116 - DNA, 20 bp, Artificial Sequence
  Description of Artificial Sequence: Synthetic oligonucleotide
  Target: LAMA2; (-) strand; PAM type: YTN; PAM sequence: TTC
aaaccaagacagtttggctc

SEQ ID NO: 296117 - DNA, 20 bp, Artificial Sequence
  Description of Artificial Sequence: Synthetic oligonucleotide
  Target: LAMA2; (-) strand; PAM type: YTN; PAM sequence: TTA
aataggtattcaaaccaaga

SEQ ID NO: 296118 - DNA, 20 bp, Artificial Sequence
  Description of Artificial Sequence: Synthetic oligonucleotide
  Target: LAMA2; (-) strand; PAM type: YTN; PAM sequence: CTA
gtcaatagttaaataggtat

SEQ ID NO: 296119 - DNA, 20 bp, Artificial Sequence
  Description of Artificial Sequence: Synthetic oligonucleotide
  Target: LAMA2; (-) strand; PAM type: YTN; PAM sequence: CTC
caaaacacacagctagtcaa

SEQ ID NO: 296120 - DNA, 20 bp, Artificial Sequence
  Description of Artificial Sequence: Synthetic oligonucleotide
  Target: LAMA2; (-) strand; PAM type: YTN; PAM sequence: TTG
ctccaaaacacacagctagt

SEQ ID NO: 296121 - DNA, 20 bp, Artificial Sequence
  Description of Artificial Sequence: Synthetic oligonucleotide
  Target: LAMA2; (-) strand; PAM type: YTN; PAM sequence: CTT
gctccaaaacacacagctag

SEQ ID NO: 296122 - DNA, 20 bp, Artificial Sequence
  Description of Artificial Sequence: Synthetic oligonucleotide
  Target: LAMA2; (-) strand; PAM type: YTN; PAM sequence: TTA
acttgctccaaaacacacag

SEQ ID NO: 296123 - DNA, 20 bp, Artificial Sequence
  Description of Artificial Sequence: Synthetic oligonucleotide
  Target: LAMA2; (-) strand; PAM type: YTN; PAM sequence: TTA
aaaaagattaacttgctcca

SEQ ID NO: 296124 - DNA, 20 bp, Artificial Sequence
  Description of Artificial Sequence: Synthetic oligonucleotide
  Target: LAMA2; (-) strand; PAM type: YTN; PAM sequence: TTG
ttaaaaaagattaacttgct

SEQ ID NO: 296125 - DNA, 20 bp, Artificial Sequence
  Description of Artificial Sequence: Synthetic oligonucleotide
  Target: LAMA2; (-) strand; PAM type: YTN; PAM sequence: TTT
gttaaaaaagattaacttgc

SEQ ID NO: 296126 - DNA, 20 bp, Artificial Sequence
  Description of Artificial Sequence: Synthetic oligonucleotide
  Target: LAMA2; (-) strand; PAM type: YTN; PAM sequence: CTT
tgttaaaaaagattaacttg

SEQ ID NO: 296127 - DNA, 20 bp, Artificial Sequence
  Description of Artificial Sequence: Synthetic oligonucleotide
  Target: LAMA2; (-) strand; PAM type: YTN; PAM sequence: TTG
caaaagagaaatctttgtta

SEQ ID NO: 296128 - DNA, 20 bp, Artificial Sequence
  Description of Artificial Sequence: Synthetic oligonucleotide
  Target: LAMA2; (-) strand; PAM type: YTN; PAM sequence: TTT
gcaaaagagaaatctttgtt

SEQ ID NO: 296129 - DNA, 20 bp, Artificial Sequence
  Description of Artificial Sequence: Synthetic oligonucleotide
  Target: LAMA2; (-) strand; PAM type: YTN; PAM sequence: TTT
tgcaaaagagaaatctttgt

SEQ ID NO: 296130 - DNA, 20 bp, Artificial Sequence
  Description of Artificial Sequence: Synthetic oligonucleotide
  Target: LAMA2; (-) strand; PAM type: YTN; PAM sequence: CTG
ttttgcaaaagagaaatctt

SEQ ID NO: 296131 - DNA, 20 bp, Artificial Sequence
  Description of Artificial Sequence: Synthetic oligonucleotide
  Target: LAMA2; (-) strand; PAM type: YTN; PAM sequence: TTA
ccctgttttgcaaaagagaa

SEQ ID NO: 296132 - DNA, 20 bp, Artificial Sequence
  Description of Artificial Sequence: Synthetic oligonucleotide
  Target: LAMA2; (-) strand; PAM type: YTN; PAM sequence: TTA
tcattaccctgttttgcaaa

SEQ ID NO: 296133 - DNA, 20 bp, Artificial Sequence
  Description of Artificial Sequence: Synthetic oligonucleotide
  Target: LAMA2; (-) strand; PAM type: YTN; PAM sequence: TTA
gtattatcattaccctgttt

SEQ ID NO: 296134 - DNA, 20 bp, Artificial Sequence
  Description of Artificial Sequence: Synthetic oligonucleotide
  Target: LAMA2; (-) strand; PAM type: YTN; PAM sequence: TTT
agtattatcattaccctgtt

SEQ ID NO: 296135 - DNA, 20 bp, Artificial Sequence
  Description of Artificial Sequence: Synthetic oligonucleotide
  Target: LAMA2; (-) strand; PAM type: YTN; PAM sequence: TTG
tttagtattatcattaccct

SEQ ID NO: 296136 - DNA, 20 bp, Artificial Sequence
  Description of Artificial Sequence: Synthetic oligonucleotide
  Target: LAMA2; (-) strand; PAM type: YTN; PAM sequence: TTT
gtttagtattatcattaccc

SEQ ID NO: 296137 - DNA, 20 bp, Artificial Sequence
  Description of Artificial Sequence: Synthetic oligonucleotide
  Target: LAMA2; (-) strand; PAM type: YTN; PAM sequence: TTT
tgtttagtattatcattacc

SEQ ID NO: 296138 - DNA, 20 bp, Artificial Sequence
  Description of Artificial Sequence: Synthetic oligonucleotide
  Target: LAMA2; (-) strand; PAM type: YTN; PAM sequence: TTT
ttgtttagtattatcattac

SEQ ID NO: 296139 - DNA, 20 bp, Artificial Sequence
  Description of Artificial Sequence: Synthetic oligonucleotide
  Target: LAMA2; (-) strand; PAM type: YTN; PAM sequence: CTT
tttgtttagtattatcatta

SEQ ID NO: 296140 - DNA, 20 bp, Artificial Sequence
  Description of Artificial Sequence: Synthetic oligonucleotide
  Target: LAMA2; (-) strand; PAM type: YTN; PAM sequence: TTA
tgcaatcctttttgtttagt

SEQ ID NO: 296141 - DNA, 20 bp, Artificial Sequence
  Description of Artificial Sequence: Synthetic oligonucleotide
  Target: LAMA2; (-) strand; PAM type: YTN; PAM sequence: TTT
atgcaatcctttttgtttag

SEQ ID NO: 296142 - DNA, 20 bp, Artificial Sequence
  Description of Artificial Sequence: Synthetic oligonucleotide
  Target: LAMA2; (-) strand; PAM type: YTN; PAM sequence: CTT
tatgcaatcctttttgttta

SEQ ID NO: 296143 - DNA, 20 bp, Artificial Sequence
  Description of Artificial Sequence: Synthetic oligonucleotide
  Target: LAMA2; (-) strand; PAM type: YTN; PAM sequence: TTA
atctttatgcaatccttttt

SEQ ID NO: 296144 - DNA, 20 bp, Artificial Sequence
  Description of Artificial Sequence: Synthetic oligonucleotide
  Target: LAMA2; (-) strand; PAM type: YTN; PAM sequence: TTT
aatctttatgcaatcctttt

SEQ ID NO: 296145 - DNA, 20 bp, Artificial Sequence
  Description of Artificial Sequence: Synthetic oligonucleotide
  Target: LAMA2; (-) strand; PAM type: YTN; PAM sequence: CTC
atttaatctttatgcaatcc

SEQ ID NO: 296146 - DNA, 20 bp, Artificial Sequence
  Description of Artificial Sequence: Synthetic oligonucleotide
  Target: LAMA2; (-) strand; PAM type: YTN; PAM sequence: TTA
cctcatttaatctttatgca

SEQ ID NO: 296147 - DNA, 20 bp, Artificial Sequence
  Description of Artificial Sequence: Synthetic oligonucleotide
  Target: LAMA2; (-) strand; PAM type: YTN; PAM sequence: TTA
aataaattacctcatttaat

SEQ ID NO: 296148 - DNA, 20 bp, Artificial Sequence
  Description of Artificial Sequence: Synthetic oligonucleotide
  Target: LAMA2; (-) strand; PAM type: YTN; PAM sequence: TTT
aaataaattacctcatttaa

SEQ ID NO: 296149 - DNA, 20 bp, Artificial Sequence
  Description of Artificial Sequence: Synthetic oligonucleotide
  Target: LAMA2; (-) strand; PAM type: YTN; PAM sequence: CTT
taaataaattacctcattta

SEQ ID NO: 296150 - DNA, 20 bp, Artificial Sequence
  Description of Artificial Sequence: Synthetic oligonucleotide
  Target: LAMA2; (-) strand; PAM type: YTN; PAM sequence: TTA
caggtgtgagccaccatgcc

SEQ ID NO: 296151 - DNA, 20 bp, Artificial Sequence
  Description of Artificial Sequence: Synthetic oligonucleotide
  Target: LAMA2; (-) strand; PAM type: YTN; PAM sequence: CTG
ggattacaggtgtgagccac

SEQ ID NO: 296152 - DNA, 20 bp, Artificial Sequence
  Description of Artificial Sequence: Synthetic oligonucleotide
  Target: LAMA2; (-) strand; PAM type: YTN; PAM sequence: CTC
ccaaagtgctgggattacag

SEQ ID NO: 296153 - DNA, 20 bp, Artificial Sequence
  Description of Artificial Sequence: Synthetic oligonucleotide
  Target: LAMA2; (-) strand; PAM type: YTN; PAM sequence: TTG
gcctcccaaagtgctgggat

SEQ ID NO: 296154 - DNA, 20 bp, Artificial Sequence
  Description of Artificial Sequence: Synthetic oligonucleotide
  Target: LAMA2; (-) strand; PAM type: YTN; PAM sequence: CTT
ggcctcccaaagtgctggga

SEQ ID NO: 296155 - DNA, 20 bp, Artificial Sequence
  Description of Artificial Sequence: Synthetic oligonucleotide
  Target: LAMA2; (-) strand; PAM type: YTN; PAM sequence: CTG
ccttggcctcccaaagtgct

SEQ ID NO: 296156 - DNA, 20 bp, Artificial Sequence
  Description of Artificial Sequence: Synthetic oligonucleotide
  Target: LAMA2; (-) strand; PAM type: YTN; PAM sequence: CTG
cctgccttggcctcccaaag

SEQ ID NO: 296157 - DNA, 20 bp, Artificial Sequence
  Description of Artificial Sequence: Synthetic oligonucleotide
  Target: LAMA2; (-) strand; PAM type: YTN; PAM sequence: CTC
aagtgatctgcctgccttgg

SEQ ID NO: 296158 - DNA, 20 bp, Artificial Sequence
  Description of Artificial Sequence: Synthetic oligonucleotide
  Target: LAMA2; (-) strand; PAM type: YTN; PAM sequence: CTG
gtctcaagtgatctgcctgc

SEQ ID NO: 296159 - DNA, 20 bp, Artificial Sequence
  Description of Artificial Sequence: Synthetic oligonucleotide
  Target: LAMA2; (-) strand; PAM type: YTN; PAM sequence: CTC
ctggtctcaagtgatctgcc

SEQ ID NO: 296160 - DNA, 20 bp, Artificial Sequence
  Description of Artificial Sequence: Synthetic oligonucleotide
  Target: LAMA2; (-) strand; PAM type: YTN; PAM sequence: TTG
aactcctggtctcaagtgat

SEQ ID NO: 296161 - DNA, 20 bp, Artificial Sequence
  Description of Artificial Sequence: Synthetic oligonucleotide
  Target: LAMA2; (-) strand; PAM type: YTN; PAM sequence: CTT
gaactcctggtctcaagtga

SEQ ID NO: 296162 - DNA, 20 bp, Artificial Sequence
  Description of Artificial Sequence: Synthetic oligonucleotide
  Target: LAMA2; (-) strand; PAM type: YTN; PAM sequence: CTC
atcttgaactcctggtctca

SEQ ID NO: 296163 - DNA, 20 bp, Artificial Sequence
  Description of Artificial Sequence: Synthetic oligonucleotide
  Target: LAMA2; (-) strand; PAM type: YTN; PAM sequence: CTA
tgatggccaggctcatcttg

SEQ ID NO: 296164 - DNA, 20 bp, Artificial Sequence
  Description of Artificial Sequence: Synthetic oligonucleotide
  Target: LAMA2; (-) strand; PAM type: YTN; PAM sequence: TTG
ctatgatggccaggctcatc

SEQ ID NO: 296165 - DNA, 20 bp, Artificial Sequence
  Description of Artificial Sequence: Synthetic oligonucleotide
  Target: LAMA2; (-) strand; PAM type: YTN; PAM sequence: TTT
gctatgatggccaggctcat

SEQ ID NO: 296166 - DNA, 20 bp, Artificial Sequence
  Description of Artificial Sequence: Synthetic oligonucleotide
  Target: LAMA2; (-) strand; PAM type: YTN; PAM sequence: TTT
tgctatgatggccaggctca

SEQ ID NO: 296167 - DNA, 20 bp, Artificial Sequence
  Description of Artificial Sequence: Synthetic oligonucleotide
  Target: LAMA2; (-) strand; PAM type: YTN; PAM sequence: TTG
tagagacagggttttgctat

SEQ ID NO: 296168 - DNA, 20 bp, Artificial Sequence
  Description of Artificial Sequence: Synthetic oligonucleotide
  Target: LAMA2; (-) strand; PAM type: YTN; PAM sequence: TTT
gtagagacagggttttgcta

SEQ ID NO: 296169 - DNA, 20 bp, Artificial Sequence
  Description of Artificial Sequence: Synthetic oligonucleotide
  Target: LAMA2; (-) strand; PAM type: YTN; PAM sequence: TTT
tgtagagacagggttttgct

SEQ ID NO: 296170 - DNA, 20 bp, Artificial Sequence
  Description of Artificial Sequence: Synthetic oligonucleotide
  Target: LAMA2; (-) strand; PAM type: YTN; PAM sequence: TTT
ttgtagagacagggttttgc

SEQ ID NO: 296171 - DNA, 20 bp, Artificial Sequence
  Description of Artificial Sequence: Synthetic oligonucleotide
  Target: LAMA2; (-) strand; PAM type: YTN; PAM sequence: TTG
tatttttgtagagacagggt

SEQ ID NO: 296172 - DNA, 20 bp, Artificial Sequence
  Description of Artificial Sequence: Synthetic oligonucleotide
  Target: LAMA2; (-) strand; PAM type: YTN; PAM sequence: TTT
gtatttttgtagagacaggg

SEQ ID NO: 296173 - DNA, 20 bp, Artificial Sequence
  Description of Artificial Sequence: Synthetic oligonucleotide
  Target: LAMA2; (-) strand; PAM type: YTN; PAM sequence: TTT
tgtatttttgtagagacagg

SEQ ID NO: 296174 - DNA, 20 bp, Artificial Sequence
  Description of Artificial Sequence: Synthetic oligonucleotide
  Target: LAMA2; (-) strand; PAM type: YTN; PAM sequence: TTT
ttgtatttttgtagagacag

SEQ ID NO: 296175 - DNA, 20 bp, Artificial Sequence
  Description of Artificial Sequence: Synthetic oligonucleotide
  Target: LAMA2; (-) strand; PAM type: YTN; PAM sequence: CTT
tttgtatttttgtagagaca

SEQ ID NO: 296176 - DNA, 20 bp, Artificial Sequence
  Description of Artificial Sequence: Synthetic oligonucleotide
  Target: LAMA2; (-) strand; PAM type: YTN; PAM sequence: CTA
actttttgtatttttgtaga

SEQ ID NO: 296177 - DNA, 20 bp, Artificial Sequence
  Description of Artificial Sequence: Synthetic oligonucleotide
  Target: LAMA2; (-) strand; PAM type: YTN; PAM sequence: CTG
gctaactttttgtatttttg

SEQ ID NO: 296178 - DNA, 20 bp, Artificial Sequence
  Description of Artificial Sequence: Synthetic oligonucleotide
  Target: LAMA2; (-) strand; PAM type: YTN; PAM sequence: CTA
cagacacacaccaccacacc

SEQ ID NO: 296179 - DNA, 20 bp, Artificial Sequence
  Description of Artificial Sequence: Synthetic oligonucleotide
  Target: LAMA2; (-) strand; PAM type: YTN; PAM sequence: CTG
ggactacagacacacaccac

SEQ ID NO: 296180 - DNA, 20 bp, Artificial Sequence
  Description of Artificial Sequence: Synthetic oligonucleotide
  Target: LAMA2; (-) strand; PAM type: YTN; PAM sequence: CTC
caaagtagctgggactacag

SEQ ID NO: 296181 - DNA, 20 bp, Artificial Sequence
  Description of Artificial Sequence: Synthetic oligonucleotide
  Target: LAMA2; (-) strand; PAM type: YTN; PAM sequence: CTC
agcctccaaagtagctggga

SEQ ID NO: 296182 - DNA, 20 bp, Artificial Sequence
  Description of Artificial Sequence: Synthetic oligonucleotide
  Target: LAMA2; (-) strand; PAM type: YTN; PAM sequence: TTG
cctcagcctccaaagtagct

SEQ ID NO: 296183 - DNA, 20 bp, Artificial Sequence
  Description of Artificial Sequence: Synthetic oligonucleotide
  Target: LAMA2; (-) strand; PAM type: YTN; PAM sequence: CTT
gcctcagcctccaaagtagc

SEQ ID NO: 296184 - DNA, 20 bp, Artificial Sequence
  Description of Artificial Sequence: Synthetic oligonucleotide
  Target: LAMA2; (-) strand; PAM type: YTN; PAM sequence: CTC
ttgcctcagcctccaaagta

SEQ ID NO: 296185 - DNA, 20 bp, Artificial Sequence
  Description of Artificial Sequence: Synthetic oligonucleotide
  Target: LAMA2; (-) strand; PAM type: YTN; PAM sequence: TTC
tcttgcctcagcctccaaag

SEQ ID NO: 296186 - DNA, 20 bp, Artificial Sequence
  Description of Artificial Sequence: Synthetic oligonucleotide
  Target: LAMA2; (-) strand; PAM type: YTN; PAM sequence: TTC
aagtgattctcttgcctcag

SEQ ID NO: 296187 - DNA, 20 bp, Artificial Sequence
  Description of Artificial Sequence: Synthetic oligonucleotide
  Target: LAMA2; (-) strand; PAM type: YTN; PAM sequence: CTC
gggttcaagtgattctcttg

SEQ ID NO: 296188 - DNA, 20 bp, Artificial Sequence
  Description of Artificial Sequence: Synthetic oligonucleotide
  Target: LAMA2; (-) strand; PAM type: YTN; PAM sequence: CTG
accctcgggttcaagtgatt

SEQ ID NO: 296189 - DNA, 20 bp, Artificial Sequence
  Description of Artificial Sequence: Synthetic oligonucleotide
  Target: LAMA2; (-) strand; PAM type: YTN; PAM sequence: CTC
tgaccctcgggttcaagtga

SEQ ID NO: 296190 - DNA, 20 bp, Artificial Sequence
  Description of Artificial Sequence: Synthetic oligonucleotide
  Target: LAMA2; (-) strand; PAM type: YTN; PAM sequence: CTG
caacctctgaccctcgggtt

SEQ ID NO: 296191 - DNA, 20 bp, Artificial Sequence
  Description of Artificial Sequence: Synthetic oligonucleotide
  Target: LAMA2; (-) strand; PAM type: YTN; PAM sequence: CTC
actgcaacctctgaccctcg

SEQ ID NO: 296192 - DNA, 20 bp, Artificial Sequence
  Description of Artificial Sequence: Synthetic oligonucleotide
  Target: LAMA2; (-) strand; PAM type: YTN; PAM sequence: TTA
cagctcactgcaacctctga

SEQ ID NO: 296193 - DNA, 20 bp, Artificial Sequence
  Description of Artificial Sequence: Synthetic oligonucleotide
  Target: LAMA2; (-) strand; PAM type: YTN; PAM sequence: CTA
ttacagctcactgcaacctc

SEQ ID NO: 296194 - DNA, 20 bp, Artificial Sequence
  Description of Artificial Sequence: Synthetic oligonucleotide
  Target: LAMA2; (-) strand; PAM type: YTN; PAM sequence: CTG
gaatgcagtggtgctattac

SEQ ID NO: 296195 - DNA, 20 bp, Artificial Sequence
  Description of Artificial Sequence: Synthetic oligonucleotide
  Target: LAMA2; (-) strand; PAM type: YTN; PAM sequence: TTG
cccaggctggaatgcagtgg

SEQ ID NO: 296196 - DNA, 20 bp, Artificial Sequence
  Description of Artificial Sequence: Synthetic oligonucleotide
  Target: LAMA2; (-) strand; PAM type: YTN; PAM sequence: CTG
ttgcccaggctggaatgcag

SEQ ID NO: 296197 - DNA, 20 bp, Artificial Sequence
  Description of Artificial Sequence: Synthetic oligonucleotide
  Target: LAMA2; (-) strand; PAM type: YTN; PAM sequence: CTC
tgttgcccaggctggaatgc

SEQ ID NO: 296198 - DNA, 20 bp, Artificial Sequence
  Description of Artificial Sequence: Synthetic oligonucleotide
  Target: LAMA2; (-) strand; PAM type: YTN; PAM sequence: CTC
gctctgttgcccaggctgga

SEQ ID NO: 296199 - DNA, 20 bp, Artificial Sequence
  Description of Artificial Sequence: Synthetic oligonucleotide
  Target: LAMA2; (-) strand; PAM type: YTN; PAM sequence: TTG
agacagggtctcgctctgtt

SEQ ID NO: 296200 - DNA, 20 bp, Artificial Sequence
  Description of Artificial Sequence: Synthetic oligonucleotide
  Target: LAMA2; (-) strand; PAM type: YTN; PAM sequence: TTT
gagacagggtctcgctctgt

SEQ ID NO: 296201 - DNA, 20 bp, Artificial Sequence
  Description of Artificial Sequence: Synthetic oligonucleotide
  Target: LAMA2; (-) strand; PAM type: YTN; PAM sequence: TTT
tgagacagggtctcgctctg

SEQ ID NO: 296202 - DNA, 20 bp, Artificial Sequence
  Description of Artificial Sequence: Synthetic oligonucleotide
  Target: LAMA2; (-) strand; PAM type: YTN; PAM sequence: TTT
ttgagacagggtctcgctct

SEQ ID NO: 296203 - DNA, 20 bp, Artificial Sequence
  Description of Artificial Sequence: Synthetic oligonucleotide
  Target: LAMA2; (-) strand; PAM type: YTN; PAM sequence: TTT
tttgagacagggtctcgctc

SEQ ID NO: 296204 - DNA, 20 bp, Artificial Sequence
  Description of Artificial Sequence: Synthetic oligonucleotide
  Target: LAMA2; (-) strand; PAM type: YTN; PAM sequence: TTT
ttttgagacagggtctcgct

SEQ ID NO: 296205 - DNA, 20 bp, Artificial Sequence
  Description of Artificial Sequence: Synthetic oligonucleotide
  Target: LAMA2; (-) strand; PAM type: YTN; PAM sequence: TTA
tttttttgagacagggtctc

SEQ ID NO: 296206 - DNA, 20 bp, Artificial Sequence
  Description of Artificial Sequence: Synthetic oligonucleotide
  Target: LAMA2; (-) strand; PAM type: YTN; PAM sequence: TTT
atttttttgagacagggtct

SEQ ID NO: 296207 - DNA, 20 bp, Artificial Sequence
  Description of Artificial Sequence: Synthetic oligonucleotide
  Target: LAMA2; (-) strand; PAM type: YTN; PAM sequence: TTA
tttatttttttgagacaggg

SEQ ID NO: 296208 - DNA, 20 bp, Artificial Sequence
  Description of Artificial Sequence: Synthetic oligonucleotide
  Target: LAMA2; (-) strand; PAM type: YTN; PAM sequence: TTT
atttatttttttgagacagg

SEQ ID NO: 296209 - DNA, 20 bp, Artificial Sequence
  Description of Artificial Sequence: Synthetic oligonucleotide
  Target: LAMA2; (-) strand; PAM type: YTN; PAM sequence: TTA
tttatttatttttttgagac

SEQ ID NO: 296210 - DNA, 20 bp, Artificial Sequence
  Description of Artificial Sequence: Synthetic oligonucleotide
  Target: LAMA2; (-) strand; PAM type: YTN; PAM sequence: TTT
atttatttatttttttgaga

SEQ ID NO: 296211 - DNA, 20 bp, Artificial Sequence
  Description of Artificial Sequence: Synthetic oligonucleotide
  Target: LAMA2; (-) strand; PAM type: YTN; PAM sequence: TTA
tttatttatttatttttttg

SEQ ID NO: 296212 - DNA, 20 bp, Artificial Sequence
  Description of Artificial Sequence: Synthetic oligonucleotide
  Target: LAMA2; (-) strand; PAM type: YTN; PAM sequence: TTT
atttatttatttattttttt

SEQ ID NO: 296213 - DNA, 20 bp, Artificial Sequence
  Description of Artificial Sequence: Synthetic oligonucleotide
  Target: LAMA2; (-) strand; PAM type: YTN; PAM sequence: TTA
tttatttatttatttatttt

SEQ ID NO: 296214 - DNA, 20 bp, Artificial Sequence
  Description of Artificial Sequence: Synthetic oligonucleotide
  Target: LAMA2; (-) strand; PAM type: YTN; PAM sequence: TTT
atttatttatttatttattt

SEQ ID NO: 296215 - DNA, 20 bp, Artificial Sequence
  Description of Artificial Sequence: Synthetic oligonucleotide
  Target: LAMA2; (-) strand; PAM type: YTN; PAM sequence: TTT
tatttatttatttatttatt

SEQ ID NO: 296216 - DNA, 20 bp, Artificial Sequence
  Description of Artificial Sequence: Synthetic oligonucleotide
  Target: LAMA2; (-) strand; PAM type: YTN; PAM sequence: TTT
ttatttatttatttatttat

SEQ ID NO: 296217 - DNA, 20 bp, Artificial Sequence
  Description of Artificial Sequence: Synthetic oligonucleotide
  Target: LAMA2; (-) strand; PAM type: YTN; PAM sequence: TTA
tttttatttatttatttatt

SEQ ID NO: 296218 - DNA, 20 bp, Artificial Sequence
  Description of Artificial Sequence: Synthetic oligonucleotide
  Target: LAMA2; (-) strand; PAM type: YTN; PAM sequence: TTT
atttttatttatttatttat

SEQ ID NO: 296219 - DNA, 20 bp, Artificial Sequence
  Description of Artificial Sequence: Synthetic oligonucleotide
  Target: LAMA2; (-) strand; PAM type: YTN; PAM sequence: TTT
tatttttatttatttattta

SEQ ID NO: 296220 - DNA, 20 bp, Artificial Sequence
  Description of Artificial Sequence: Synthetic oligonucleotide
  Target: LAMA2; (-) strand; PAM type: YTN; PAM sequence: TTT
ttatttttatttatttattt

SEQ ID NO: 296221 - DNA, 20 bp, Artificial Sequence
  Description of Artificial Sequence: Synthetic oligonucleotide
  Target: LAMA2; (-) strand; PAM type: YTN; PAM sequence: TTA
tttttatttttatttattta

SEQ ID NO: 296222 - DNA, 20 bp, Artificial Sequence
  Description of Artificial Sequence: Synthetic oligonucleotide
  Target: LAMA2; (-) strand; PAM type: YTN; PAM sequence: TTT
atttttatttttatttattt

SEQ ID NO: 296223 - DNA, 20 bp, Artificial Sequence
  Description of Artificial Sequence: Synthetic oligonucleotide
  Target: LAMA2; (-) strand; PAM type: YTN; PAM sequence: CTT
tatttttatttttatttatt

SEQ ID NO: 296224 - DNA, 20 bp, Artificial Sequence
  Description of Artificial Sequence: Synthetic oligonucleotide
  Target: LAMA2; (-) strand; PAM type: YTN; PAM sequence: TTC
caatcactttatttttattt

SEQ ID NO: 296225 - DNA, 20 bp, Artificial Sequence
  Description of Artificial Sequence: Synthetic oligonucleotide
  Target: LAMA2; (-) strand; PAM type: YTN; PAM sequence: CTT
ccaatcactttatttttatt

SEQ ID NO: 296226 - DNA, 20 bp, Artificial Sequence
  Description of Artificial Sequence: Synthetic oligonucleotide
  Target: LAMA2; (-) strand; PAM type: YTN; PAM sequence: CTC
ttccaatcactttattttta

SEQ ID NO: 296227 - DNA, 20 bp, Artificial Sequence
  Description of Artificial Sequence: Synthetic oligonucleotide
  Target: LAMA2; (-) strand; PAM type: YTN; PAM sequence: CTA
ctcttccaatcactttattt

SEQ ID NO: 296228 - DNA, 20 bp, Artificial Sequence
  Description of Artificial Sequence: Synthetic oligonucleotide
  Target: LAMA2; (-) strand; PAM type: YTN; PAM sequence: CTG
ctactcttccaatcacttta

SEQ ID NO: 296229 - DNA, 20 bp, Artificial Sequence
  Description of Artificial Sequence: Synthetic oligonucleotide
  Target: LAMA2; (-) strand; PAM type: YTN; PAM sequence: TTA
tatgcctgctactcttccaa

SEQ ID NO: 296230 - DNA, 20 bp, Artificial Sequence
  Description of Artificial Sequence: Synthetic oligonucleotide
  Target: LAMA2; (-) strand; PAM type: YTN; PAM sequence: TTT
atatgcctgctactcttcca

SEQ ID NO: 296231 - DNA, 20 bp, Artificial Sequence
  Description of Artificial Sequence: Synthetic oligonucleotide
  Target: LAMA2; (-) strand; PAM type: YTN; PAM sequence: TTT
tatatgcctgctactcttcc

SEQ ID NO: 296232 - DNA, 20 bp, Artificial Sequence
  Description of Artificial Sequence: Synthetic oligonucleotide
  Target: LAMA2; (-) strand; PAM type: YTN; PAM sequence: TTT
ttatatgcctgctactcttc

SEQ ID NO: 296233 - DNA, 20 bp, Artificial Sequence
  Description of Artificial Sequence: Synthetic oligonucleotide
  Target: LAMA2; (-) strand; PAM type: YTN; PAM sequence: CTT
tttatatgcctgctactctt

SEQ ID NO: 296234 - DNA, 20 bp, Artificial Sequence
  Description of Artificial Sequence: Synthetic oligonucleotide
  Target: LAMA2; (-) strand; PAM type: YTN; PAM sequence: TTC
agtgctttttatatgcctgc

SEQ ID NO: 296235 - DNA, 20 bp, Artificial Sequence
  Description of Artificial Sequence: Synthetic oligonucleotide
  Target: LAMA2; (-) strand; PAM type: YTN; PAM sequence: TTT
cagtgctttttatatgcctg

SEQ ID NO: 296236 - DNA, 20 bp, Artificial Sequence
  Description of Artificial Sequence: Synthetic oligonucleotide
  Target: LAMA2; (-) strand; PAM type: YTN; PAM sequence: CTT
tcagtgctttttatatgcct

SEQ ID NO: 296237 - DNA, 20 bp, Artificial Sequence
  Description of Artificial Sequence: Synthetic oligonucleotide
  Target: LAMA2; (-) strand; PAM type: YTN; PAM sequence: TTC
atctttcagtgctttttata

SEQ ID NO: 296238 - DNA, 20 bp, Artificial Sequence
  Description of Artificial Sequence: Synthetic oligonucleotide
  Target: LAMA2; (-) strand; PAM type: YTN; PAM sequence: TTT
catctttcagtgctttttat

SEQ ID NO: 296239 - DNA, 20 bp, Artificial Sequence
  Description of Artificial Sequence: Synthetic oligonucleotide
  Target: LAMA2; (-) strand; PAM type: YTN; PAM sequence: TTT
tcatctttcagtgcttttta

SEQ ID NO: 296240 - DNA, 20 bp, Artificial Sequence
  Description of Artificial Sequence: Synthetic oligonucleotide
  Target: LAMA2; (-) strand; PAM type: YTN; PAM sequence: CTG
aaacaccatgaatacatacc

SEQ ID NO: 296241 - DNA, 20 bp, Artificial Sequence
  Description of Artificial Sequence: Synthetic oligonucleotide
  Target: LAMA2; (-) strand; PAM type: YTN; PAM sequence: CTA
tgcctgaaacaccatgaata

SEQ ID NO: 296242 - DNA, 20 bp, Artificial Sequence
  Description of Artificial Sequence: Synthetic oligonucleotide
  Target: LAMA2; (-) strand; PAM type: YTN; PAM sequence: CTC
tatgcctgaaacaccatgaa

SEQ ID NO: 296243 - DNA, 20 bp, Artificial Sequence
  Description of Artificial Sequence: Synthetic oligonucleotide
  Target: LAMA2; (-) strand; PAM type: YTN; PAM sequence: CTA
aatctctatgcctgaaacac

SEQ ID NO: 296244 - DNA, 20 bp, Artificial Sequence
  Description of Artificial Sequence: Synthetic oligonucleotide
  Target: LAMA2; (-) strand; PAM type: YTN; PAM sequence: TTG
ctaaatctctatgcctgaaa

SEQ ID NO: 296245 - DNA, 20 bp, Artificial Sequence
  Description of Artificial Sequence: Synthetic oligonucleotide
  Target: LAMA2; (-) strand; PAM type: YTN; PAM sequence: TTT
gctaaatctctatgcctgaa

SEQ ID NO: 296246 - DNA, 20 bp, Artificial Sequence
  Description of Artificial Sequence: Synthetic oligonucleotide
  Target: LAMA2; (-) strand; PAM type: YTN; PAM sequence: CTC
aatatttgctaaatctctat

SEQ ID NO: 296247 - DNA, 20 bp, Artificial Sequence
  Description of Artificial Sequence: Synthetic oligonucleotide
  Target: LAMA2; (-) strand; PAM type: YTN; PAM sequence: CTC
tcaatatttgctaaatctct

SEQ ID NO: 296248 - DNA, 20 bp, Artificial Sequence
  Description of Artificial Sequence: Synthetic oligonucleotide
  Target: LAMA2; (-) strand; PAM type: YTN; PAM sequence: CTG
cacctctcaatatttgctaa

SEQ ID NO: 296249 - DNA, 20 bp, Artificial Sequence
  Description of Artificial Sequence: Synthetic oligonucleotide
  Target: LAMA2; (-) strand; PAM type: YTN; PAM sequence: CTA
ctgcacctctcaatatttgc

SEQ ID NO: 296250 - DNA, 20 bp, Artificial Sequence
  Description of Artificial Sequence: Synthetic oligonucleotide
  Target: LAMA2; (-) strand; PAM type: YTN; PAM sequence: CTG
taactactgcacctctcaat

SEQ ID NO: 296251 - DNA, 20 bp, Artificial Sequence
  Description of Artificial Sequence: Synthetic oligonucleotide
  Target: LAMA2; (-) strand; PAM type: YTN; PAM sequence: CTG
tactgtaactactgcacctc

SEQ ID NO: 296252 - DNA, 20 bp, Artificial Sequence
  Description of Artificial Sequence: Synthetic oligonucleotide
  Target: LAMA2; (-) strand; PAM type: YTN; PAM sequence: TTG
gataactgtactgtaactac

SEQ ID NO: 296253 - DNA, 20 bp, Artificial Sequence
  Description of Artificial Sequence: Synthetic oligonucleotide
  Target: LAMA2; (-) strand; PAM type: YTN; PAM sequence: CTG
aatccaaaattggataactg

SEQ ID NO: 296254 - DNA, 20 bp, Artificial Sequence
  Description of Artificial Sequence: Synthetic oligonucleotide
  Target: LAMA2; (-) strand; PAM type: YTN; PAM sequence: TTC
tgaatccaaaattggataac

SEQ ID NO: 296255 - DNA, 20 bp, Artificial Sequence
  Description of Artificial Sequence: Synthetic oligonucleotide
  Target: LAMA2; (-) strand; PAM type: YTN; PAM sequence: TTA
aattctgaatccaaaattgg

SEQ ID NO: 296256 - DNA, 20 bp, Artificial Sequence
  Description of Artificial Sequence: Synthetic oligonucleotide
  Target: LAMA2; (-) strand; PAM type: YTN; PAM sequence: TTT
aaattctgaatccaaaattg

SEQ ID NO: 296257 - DNA, 20 bp, Artificial Sequence
  Description of Artificial Sequence: Synthetic oligonucleotide
  Target: LAMA2; (-) strand; PAM type: YTN; PAM sequence: CTT
taaattctgaatccaaaatt

SEQ ID NO: 296258 - DNA, 20 bp, Artificial Sequence
  Description of Artificial Sequence: Synthetic oligonucleotide
  Target: LAMA2; (-) strand; PAM type: YTN; PAM sequence: CTG
tgagggctttaaattctgaa

SEQ ID NO: 296259 - DNA, 20 bp, Artificial Sequence
  Description of Artificial Sequence: Synthetic oligonucleotide
  Target: LAMA2; (-) strand; PAM type: YTN; PAM sequence: TTA
caaaactgtgagggctttaa

SEQ ID NO: 296260 - DNA, 20 bp, Artificial Sequence
  Description of Artificial Sequence: Synthetic oligonucleotide
  Target: LAMA2; (-) strand; PAM type: YTN; PAM sequence: TTT
acaaaactgtgagggcttta

SEQ ID NO: 296261 - DNA, 20 bp, Artificial Sequence
  Description of Artificial Sequence: Synthetic oligonucleotide
  Target: LAMA2; (-) strand; PAM type: YTN; PAM sequence: TTG
atttacaaaactgtgagggc

SEQ ID NO: 296262 - DNA, 20 bp, Artificial Sequence
  Description of Artificial Sequence: Synthetic oligonucleotide
  Target: LAMA2; (-) strand; PAM type: YTN; PAM sequence: TTG
tgaatattgatttacaaaac

SEQ ID NO: 296263 - DNA, 20 bp, Artificial Sequence
  Description of Artificial Sequence: Synthetic oligonucleotide
  Target: LAMA2; (-) strand; PAM type: YTN; PAM sequence: TTT
gtgaatattgatttacaaaa

SEQ ID NO: 296264 - DNA, 20 bp, Artificial Sequence
  Description of Artificial Sequence: Synthetic oligonucleotide
  Target: LAMA2; (-) strand; PAM type: YTN; PAM sequence: TTT
tgtgaatattgatttacaaa

SEQ ID NO: 296265 - DNA, 20 bp, Artificial Sequence
  Description of Artificial Sequence: Synthetic oligonucleotide
  Target: LAMA2; (-) strand; PAM type: YTN; PAM sequence: TTA
ttttgtgaatattgatttac

SEQ ID NO: 296266 - DNA, 20 bp, Artificial Sequence
  Description of Artificial Sequence: Synthetic oligonucleotide
  Target: LAMA2; (-) strand; PAM type: YTN; PAM sequence: CTA
ataaaaaattattttgtgaa

SEQ ID NO: 296267 - DNA, 20 bp, Artificial Sequence
  Description of Artificial Sequence: Synthetic oligonucleotide
  Target: LAMA2; (-) strand; PAM type: YTN; PAM sequence: CTA
ggatacacggtctaataaaa

SEQ ID NO: 296268 - DNA, 20 bp, Artificial Sequence
  Description of Artificial Sequence: Synthetic oligonucleotide
  Target: LAMA2; (-) strand; PAM type: YTN; PAM sequence: TTC
caaagcaaactaggatacac

SEQ ID NO: 296269 - DNA, 20 bp, Artificial Sequence
  Description of Artificial Sequence: Synthetic oligonucleotide
  Target: LAMA2; (-) strand; PAM type: YTN; PAM sequence: TTT
ccaaagcaaactaggataca

SEQ ID NO: 296270 - DNA, 20 bp, Artificial Sequence
  Description of Artificial Sequence: Synthetic oligonucleotide
  Target: LAMA2; (-) strand; PAM type: YTN; PAM sequence: CTT
tccaaagcaaactaggatac

SEQ ID NO: 296271 - DNA, 20 bp, Artificial Sequence
  Description of Artificial Sequence: Synthetic oligonucleotide
  Target: LAMA2; (-) strand; PAM type: YTN; PAM sequence: CTC
agagtaacactttccaaagc

SEQ ID NO: 296272 - DNA, 20 bp, Artificial Sequence
  Description of Artificial Sequence: Synthetic oligonucleotide
  Target: LAMA2; (-) strand; PAM type: YTN; PAM sequence: CTC
tcagagtaacactttccaaa

SEQ ID NO: 296273 - DNA, 20 bp, Artificial Sequence
  Description of Artificial Sequence: Synthetic oligonucleotide
  Target: LAMA2; (-) strand; PAM type: YTN; PAM sequence: TTC
tctcagagtaacactttcca

SEQ ID NO: 296274 - DNA, 20 bp, Artificial Sequence
  Description of Artificial Sequence: Synthetic oligonucleotide
  Target: LAMA2; (-) strand; PAM type: YTN; PAM sequence: CTT
ctctcagagtaacactttcc

SEQ ID NO: 296275 - DNA, 20 bp, Artificial Sequence
  Description of Artificial Sequence: Synthetic oligonucleotide
  Target: LAMA2; (-) strand; PAM type: YTN; PAM sequence: CTA
aaagcaccaatcaatccccc

SEQ ID NO: 296276 - DNA, 20 bp, Artificial Sequence
  Description of Artificial Sequence: Synthetic oligonucleotide
  Target: LAMA2; (-) strand; PAM type: YTN; PAM sequence: CTC
taaaagcaccaatcaatccc

SEQ ID NO: 296277 - DNA, 20 bp, Artificial Sequence
  Description of Artificial Sequence: Synthetic oligonucleotide
  Target: LAMA2; (-) strand; PAM type: YTN; PAM sequence: TTC
tctaaaagcaccaatcaatc

SEQ ID NO: 296278 - DNA, 20 bp, Artificial Sequence
  Description of Artificial Sequence: Synthetic oligonucleotide
  Target: LAMA2; (-) strand; PAM type: YTN; PAM sequence: CTA
gtgtgttctctaaaagcacc

SEQ ID NO: 296279 - DNA, 20 bp, Artificial Sequence
  Description of Artificial Sequence: Synthetic oligonucleotide
  Target: LAMA2; (-) strand; PAM type: YTN; PAM sequence: TTG
tatctagtgtgttctctaaa

SEQ ID NO: 296280 - DNA, 20 bp, Artificial Sequence
  Description of Artificial Sequence: Synthetic oligonucleotide
  Target: LAMA2; (-) strand; PAM type: YTN; PAM sequence: TTT
gtatctagtgtgttctctaa

SEQ ID NO: 296281 - DNA, 20 bp, Artificial Sequence
  Description of Artificial Sequence: Synthetic oligonucleotide
  Target: LAMA2; (-) strand; PAM type: YTN; PAM sequence: TTG
agtatagaaatgtatcacat

SEQ ID NO: 296282 - DNA, 20 bp, Artificial Sequence
  Description of Artificial Sequence: Synthetic oligonucleotide
  Target: LAMA2; (-) strand; PAM type: YTN; PAM sequence: TTT
gagtatagaaatgtatcaca

SEQ ID NO: 296283 - DNA, 20 bp, Artificial Sequence
  Description of Artificial Sequence: Synthetic oligonucleotide
  Target: LAMA2; (-) strand; PAM type: YTN; PAM sequence: CTA
atttgagtatagaaatgtat

SEQ ID NO: 296284 - DNA, 20 bp, Artificial Sequence
  Description of Artificial Sequence: Synthetic oligonucleotide
  Target: LAMA2; (-) strand; PAM type: YTN; PAM sequence: TTC
taatttgagtatagaaatgt

SEQ ID NO: 296285 - DNA, 20 bp, Artificial Sequence
  Description of Artificial Sequence: Synthetic oligonucleotide
  Target: LAMA2; (-) strand; PAM type: YTN; PAM sequence: TTA
tcatgtgttctaatttgagt

SEQ ID NO: 296286 - DNA, 20 bp, Artificial Sequence
  Description of Artificial Sequence: Synthetic oligonucleotide
  Target: LAMA2; (-) strand; PAM type: YTN; PAM sequence: CTA
cattatcatgtgttctaatt

SEQ ID NO: 296287 - DNA, 20 bp, Artificial Sequence
  Description of Artificial Sequence: Synthetic oligonucleotide
  Target: LAMA2; (-) strand; PAM type: YTN; PAM sequence: TTG
atgaatgaacaaatctacat

SEQ ID NO: 296288 - DNA, 20 bp, Artificial Sequence
  Description of Artificial Sequence: Synthetic oligonucleotide
  Target: LAMA2; (-) strand; PAM type: YTN; PAM sequence: TTT
gatgaatgaacaaatctaca

SEQ ID NO: 296289 - DNA, 20 bp, Artificial Sequence
  Description of Artificial Sequence: Synthetic oligonucleotide
  Target: LAMA2; (-) strand; PAM type: YTN; PAM sequence: CTT
tgatgaatgaacaaatctac

SEQ ID NO: 296290 - DNA, 20 bp, Artificial Sequence
  Description of Artificial Sequence: Synthetic oligonucleotide
  Target: LAMA2; (-) strand; PAM type: YTN; PAM sequence: TTG
tctttgatgaatgaacaaat

SEQ ID NO: 296291 - DNA, 20 bp, Artificial Sequence
  Description of Artificial Sequence: Synthetic oligonucleotide
  Target: LAMA2; (-) strand; PAM type: YTN; PAM sequence: CTA
taatgggtgattgtctttga

SEQ ID NO: 296292 - DNA, 20 bp, Artificial Sequence
  Description of Artificial Sequence: Synthetic oligonucleotide
  Target: LAMA2; (-) strand; PAM type: YTN; PAM sequence: TTA
caactataatgggtgattgt

SEQ ID NO: 296293 - DNA, 20 bp, Artificial Sequence
  Description of Artificial Sequence: Synthetic oligonucleotide
  Target: LAMA2; (-) strand; PAM type: YTN; PAM sequence: CTG
agaattacaactataatggg

SEQ ID NO: 296294 - DNA, 20 bp, Artificial Sequence
  Description of Artificial Sequence: Synthetic oligonucleotide
  Target: LAMA2; (-) strand; PAM type: YTN; PAM sequence: CTG
atcatccacaagagaagcca

SEQ ID NO: 296295 - DNA, 20 bp, Artificial Sequence
  Description of Artificial Sequence: Synthetic oligonucleotide
  Target: LAMA2; (-) strand; PAM type: YTN; PAM sequence: CTA
tgaaagaaaagtaatactga

SEQ ID NO: 296296 - DNA, 20 bp, Artificial Sequence
  Description of Artificial Sequence: Synthetic oligonucleotide
  Target: LAMA2; (-) strand; PAM type: YTN; PAM sequence: CTA
aaaagcatatccaataccta

SEQ ID NO: 296297 - DNA, 20 bp, Artificial Sequence
  Description of Artificial Sequence: Synthetic oligonucleotide
  Target: LAMA2; (-) strand; PAM type: YTN; PAM sequence: TTG
atagacctaaaaagcatatc

SEQ ID NO: 296298 - DNA, 20 bp, Artificial Sequence
  Description of Artificial Sequence: Synthetic oligonucleotide
  Target: LAMA2; (-) strand; PAM type: YTN; PAM sequence: TTT
gatagacctaaaaagcatat

SEQ ID NO: 296299 - DNA, 20 bp, Artificial Sequence
  Description of Artificial Sequence: Synthetic oligonucleotide
  Target: LAMA2; (-) strand; PAM type: YTN; PAM sequence: TTT
tgatagacctaaaaagcata

SEQ ID NO: 296300 - DNA, 20 bp, Artificial Sequence
  Description of Artificial Sequence: Synthetic oligonucleotide
  Target: LAMA2; (-) strand; PAM type: YTN; PAM sequence: TTT
ttgatagacctaaaaagcat

SEQ ID NO: 296301 - DNA, 20 bp, Artificial Sequence
  Description of Artificial Sequence: Synthetic oligonucleotide
  Target: LAMA2; (-) strand; PAM type: YTN; PAM sequence: TTA
gtttttgatagacctaaaaa

SEQ ID NO: 296302 - DNA, 20 bp, Artificial Sequence
  Description of Artificial Sequence: Synthetic oligonucleotide
  Target: LAMA2; (-) strand; PAM type: YTN; PAM sequence: TTT
agtttttgatagacctaaaa

SEQ ID NO: 296303 - DNA, 20 bp, Artificial Sequence
  Description of Artificial Sequence: Synthetic oligonucleotide
  Target: LAMA2; (-) strand; PAM type: YTN; PAM sequence: CTT
tagtttttgatagacctaaa

SEQ ID NO: 296304 - DNA, 20 bp, Artificial Sequence
  Description of Artificial Sequence: Synthetic oligonucleotide
  Target: LAMA2; (-) strand; PAM type: YTN; PAM sequence: TTC
agagactttagtttttgata

SEQ ID NO: 296305 - DNA, 20 bp, Artificial Sequence
  Description of Artificial Sequence: Synthetic oligonucleotide
  Target: LAMA2; (-) strand; PAM type: YTN; PAM sequence: CTT
cagagactttagtttttgat

SEQ ID NO: 296306 - DNA, 20 bp, Artificial Sequence
  Description of Artificial Sequence: Synthetic oligonucleotide
  Target: LAMA2; (-) strand; PAM type: YTN; PAM sequence: TTG
taccagtgtcacttcagaga

SEQ ID NO: 296307 - DNA, 20 bp, Artificial Sequence
  Description of Artificial Sequence: Synthetic oligonucleotide
  Target: LAMA2; (-) strand; PAM type: YTN; PAM sequence: CTT
gtaccagtgtcacttcagag

SEQ ID NO: 296308 - DNA, 20 bp, Artificial Sequence
  Description of Artificial Sequence: Synthetic oligonucleotide
  Target: LAMA2; (-) strand; PAM type: YTN; PAM sequence: TTG
cttgtaccagtgtcacttca

SEQ ID NO: 296309 - DNA, 20 bp, Artificial Sequence
  Description of Artificial Sequence: Synthetic oligonucleotide
  Target: LAMA2; (-) strand; PAM type: YTN; PAM sequence: TTC
aagtgaattgcttgtaccag

SEQ ID NO: 296310 - DNA, 20 bp, Artificial Sequence
  Description of Artificial Sequence: Synthetic oligonucleotide
  Target: LAMA2; (-) strand; PAM type: YTN; PAM sequence: TTA
gaaattcaagtgaattgctt

SEQ ID NO: 296311 - DNA, 20 bp, Artificial Sequence
  Description of Artificial Sequence: Synthetic oligonucleotide
  Target: LAMA2; (-) strand; PAM type: YTN; PAM sequence: TTT
agaaattcaagtgaattgct

SEQ ID NO: 296312 - DNA, 20 bp, Artificial Sequence
  Description of Artificial Sequence: Synthetic oligonucleotide
  Target: LAMA2; (-) strand; PAM type: YTN; PAM sequence: TTT
tagaaattcaagtgaattgc

SEQ ID NO: 296313 - DNA, 20 bp, Artificial Sequence
  Description of Artificial Sequence: Synthetic oligonucleotide
  Target: LAMA2; (-) strand; PAM type: YTN; PAM sequence: TTT
ttagaaattcaagtgaattg

SEQ ID NO: 296314 - DNA, 20 bp, Artificial Sequence
  Description of Artificial Sequence: Synthetic oligonucleotide
  Target: LAMA2; (-) strand; PAM type: YTN; PAM sequence: CTG
tttttagaaattcaagtgaa

SEQ ID NO: 296315 - DNA, 20 bp, Artificial Sequence
  Description of Artificial Sequence: Synthetic oligonucleotide
  Target: LAMA2; (-) strand; PAM type: YTN; PAM sequence: TTA
tctgtttttagaaattcaag

SEQ ID NO: 296316 - DNA, 20 bp, Artificial Sequence
  Description of Artificial Sequence: Synthetic oligonucleotide
  Target: LAMA2; (-) strand; PAM type: YTN; PAM sequence: TTT
atctgtttttagaaattcaa

SEQ ID NO: 296317 - DNA, 20 bp, Artificial Sequence
  Description of Artificial Sequence: Synthetic oligonucleotide
  Target: LAMA2; (-) strand; PAM type: YTN; PAM sequence: TTT
tatctgtttttagaaattca

SEQ ID NO: 296318 - DNA, 20 bp, Artificial Sequence
  Description of Artificial Sequence: Synthetic oligonucleotide
  Target: LAMA2; (-) strand; PAM type: YTN; PAM sequence: TTA
tattttatctgtttttagaa
